United States Patent Application Publication US 2005/0153317 A1 - sequence listing, part 12

SEQ ID NO: 51118 - DNA, 600 bp, Chicken  19866894298617_1
catagtttcaaaagcacagtagccaaactttctcttaagtaaaacattgggtcttttcccttttggaactgactaatggtagcagaatgaaggaattgtctgtctttgctaaaaataaccttcatctcattcccattcattatgaaagaaaacagaaattcctaagtaataaattcttcagttaattcactgtctagggatattctttgtgcatctgtgttgaaggagaaaatgaatacatgaagagagaaaaaatgttactacatttatcatatagatgttaagataacacaagatttyggtgaattttagcaagtttttggcaagtttcagaattctcatcttcttaataccataagaaacaaaaaaagtatttagcactgggtgctctatttattaagaaggccatttgaaataatttttggtccataacaaataatagcatgtattttcaatcctcatagaaactgttaaaataagatcaagcatgtcaataatgtattagtctttttctcagtacaaagaatcccttctatgtctagaaaagactacagattacctgtgctttcagaaaaactccctgccaggaaaggtgttcca

SEQ ID NO: 51119 - DNA, 599 bp, Chicken  19866894298620_1
  misc_feature (1)..(1): n is any nucleotide
nccccaattaaaattcatcccagttaagtcaagaaaaggaaaggccgatatgggcctgaggcaaaagaaggaaaggcaaagagacaacttgcccctcccgaccctagtctttttccttccccttcgctcttctttagcatttcttctgctgtccctttatcttctccagcccttctgtttcatgacagttcagtcactgtggtcccctgatgaggtttcttcttcaggtctctgtttttctatacaccgaatttctcagagcatgagcacaactgtcttgtgtgttcagaacatgtgtgwgtctctacttctccccaatcctagtacttgcattttgcatccccttaaacacagtttcaaaattgaagtaattgacgtttcctttttcacagtttcctttgtttgcaactctgggatgaattaaagtcacagtatgatgacagaaggagtgaggcaagagggtctgggaagggtaggcaaataggtgcatgtaacaaatcaagtagataatggggctgtacaaaaaaagctgctttaaaaaacactgctgtgctgtagcatctaccgctgaaatagagggacttctctaggaaagaagg

SEQ ID NO: 51120 - DNA, 600 bp, Chicken  19866894298624_1
actgctcatcatccttccctcttgctgcagtactgagagtcagcagttgctggacatgaacgtagagtgacagcgtgtcagagaaggatcacaatcagcagccgtggttttagtcaaagaaaatctaaggctctctgtagtaaacatcacggaatcgcttgtttcaacagaattaaaacatactttaagatcaggcacccgttcgactaccacagagaccaatcctattcttcagtaaagtgggttgttcacctttcatacacagcattgcaagtgatggtacgtgggaaacccatctarcagctaagaatcagtacaagaaaaatgatcaaaaatacwagcactaatgattctctaactgaacgtgtgcttatttacttggcaacatcacctactgacacatcaataggtaatactgtgtagatgcacaatgctaagcaatgcaattgctgcagctgaacagacaaaatccaaaaacagtcctataaggctgccctccagttttcatcacgacgacacaagttatgacatctcacatgcttcccctgtaattatcctcaatagcattttatcaactgctgtttccttgttccagtaagc

SEQ ID NO: 51121 - DNA, 600 bp, Chicken  19866894298624_2
tcagcagttgctggacatgaacgtagagtgacagcgtgtcagagaaggatcacaatcagcagccgtggttttagtcaaagaaaatctaaggctctctgtagtaaacatcacggaatcgcttgtttcaacagaattaaaacatactttaagatcaggcacccgttcgactaccacagagaccaatcctattcttcagtaaagtgggttgttcacctttcatacacagcattgcaagtgatggtacgtgggaaacccatctarcagctaagaatcagtacaagaaaaatgatcaaaaatacwagcactaatgattctctaactgaacgtgtgcttatttacttggcaacatcacctactgacacatcaataggtaatactgtgtagatgcacaatgctaagcaatgcaattgctgcagctgaacagacaaaatccaaaaacagtcctataaggctgccctccagttttcatcacgacgacacaagttatgacatctcacatgcttcccctgtaattatcctcaatagcattttatcaactgctgtttccttgttccagtaagcttcttgcccttccccacctctcatcttgtttccctgctg

SEQ ID NO: 51122 - DNA, 599 bp, Chicken  19866894298629_1
  misc_feature (1)..(201): n is any nucleotide
nnnnnnnnnnnnnnnnnnnnnnnnnnnnnnnnnnnnnnnnnnnnnnnnnnnnnnnnnnnnnnnnnnnnnnnnnnnnnnnnnnnnnnnnnnnnnnnnnnnnnnnnnnnnnnnnnnnnnnnnnnnnnnnnnnnnnnnnnnnnnnnnnnnnnnnnnnnnnnnnnnnnnnnnnnnnnnnnnnnnnnnnnnnnnnnnnnnnnnnnncttttattgttttttccctcttcccatcttttctctcgcagtttagtctagaataaaattcccggtgattctgagaccttgcatttgaaaagacacgtrgaaatggctgggatgcaattttgttgtgatacaatttgrctttgacccttcgagggtcgttcctgcagtactctgctctagtcctggtgaattcttcagcctggggaggggctgaaggaagctgcctttgcctattttgcttggagaagttaatcagaaccactgcggggatcatgctgagctgtcctcacatggctgcttaagaaacaaggaagctcttgatactgctttcaaggaaaggaagagcagccacagagaatgatcagaaggtcaaggcttacacattgtgtgcagacagt

SEQ ID NO: 51123 - DNA, 599 bp, Chicken  19866894298629_2
  misc_feature (1)..(162): n is any nucleotide
nnnnnnnnnnnnnnnnnnnnnnnnnnnnnnnnnnnnnnnnnnnnnnnnnnnnnnnnnnnnnnnnnnnnnnnnnnnnnnnnnnnnnnnnnnnnnnnnnnnnnnnnnnnnnnnnnnnnnnnnnnnnnnnnnnnnnnnnnnnnnnnnnnnnnnnnnnnnnnnnnncttttattgttttttccctcttcccatcttttctctcgcagtttagtctagaataaaattcccggtgattctgagaccttgcatttgaaaagacacgtrgaaatggctgggatgcaattttgttgtgatacaatttgrctttgacccttcgagggtcgttcctgcagtactctgctctagtcctggtgaattcttcagcctggggaggggctgaaggaagctgcctttgcctattttgcttggagaagttaatcagaaccactgcggggatcatgctgagctgtcctcacatggctgcttaagaaacaaggaagctcttgatactgctttcaaggaaaggaagagcagccacagagaatgatcagaaggtcaaggcttacacattgtgtgcagacagttctgatatggggaggctgcaagatttkttgcttcaacag

SEQ ID NO: 51124 - DNA, 600 bp, Chicken  19866894298629_3
tgatacaatttgrctttgacccttcgagggtcgttcctgcagtactctgctctagtcctggtgaattcttcagcctggggaggggctgaaggaagctgcctttgcctattttgcttggagaagttaatcagaaccactgcggggatcatgctgagctgtcctcacatggctgcttaagaaacaaggaagctcttgatactgctttcaaggaaaggaagagcagccacagagaatgatcagaaggtcaaggcttacacattgtgtgcagacagttctgatatggggaggctgcaagatttkttgcttcaacagtaagctggagatgagtataaggagtttgacaaacgagagactggcctaaatattacacaggaaaaaagaaatgcgtgtatatgtggttttgcttcttgttgcctttctgaggctggcagcgctcctctttttgtataagcacttctaagacrgatcagcattgtatctaaattcaaaagcctggcttaaagaaattggaaacaggtttcagaagcttattgtggtggcaaaggcacaccacctgggaggaaggaagcaaagcctgtgaagattactgggaagagtacc

SEQ ID NO: 51125 - DNA, 600 bp, Chicken  19866894298629_4
catggctgcttaagaaacaaggaagctcttgatactgctttcaaggaaaggaagagcagccacagagaatgatcagaaggtcaaggcttacacattgtgtgcagacagttctgatatggggaggctgcaagatttkttgcttcaacagtaagctggagatgagtataaggagtttgacaaacgagagactggcctaaatattacacaggaaaaaagaaatgcgtgtatatgtggttttgcttcttgttgcctttctgaggctggcagcgctcctctttttgtataagcacttctaagacrgatcagcattgtatctaaattcaaaagcctggcttaaagaaattggaaacaggtttcagaagcttattgtggtggcaaaggcacaccacctgggaggaaggaagcaaagcctgtgaagattactgggaagagtaccaggacatttgaaggagagaacactgcacagtgctctcgtatagacctggccaattatgtagccgttagggagacaataaataaactctgtataatttacagttctccataagcttcacaggctgagtttggatttatcgagttgaaaaaaaggacgacaaagct

SEQ ID NO: 51126 - DNA, 600 bp, Chicken  19866894298634_1
atattcagacaactgtgttttctgttcagaaagaaaataatcagtcatctcactaatggctaaggtttagttcttaacaatacatttattaatgatcctagcttctatgcacaagaagataataggaaatatattgtgttacctcagtcttacaaatgaaaatttatgtctcctaaaatgctggataaaggatacactgtctttgtaactagttcatgaagttatcacaaattcatataagaaaatacaaacgtaattataaatgatttgcattacttgttcacttattgcattttttcrttttttttttgtcaagtacaaattattttgttattcgtcatattctattaactgaaattttatacatatatttctatatatttcacatgtacagctgctgtgtattttttaaatataaataaatgacagaagcaataaaaatatgtaaattagaagtaatcttagtatggaaatttaacctcaacatctgcttaagaactcatttactgcccttaacttcttcaaaccttgggaaaatttgtgagctaaactcatgaatcatgtcagtatatatatatgtatatgcatatatatacacac

SEQ ID NO: 51127 - DNA, 600 bp, Chicken  19866894298634_2; identical to SEQ ID NO: 51126

SEQ ID NO: 51128 - DNA, 600 bp, Chicken  19866894298634_3; identical to SEQ ID NO: 51126

SEQ ID NO: 51129 - DNA, 600 bp, Chicken  19866894298642_1
cagtgtcccatacagcaccgctttcccctttctggtggcacccacagggctggctgcagcactctgagctcctgctattgctctcctcgtaccctcagcaatgagccccaggatggacacaaggcatgggctcaggggtggaggtttgcaggagccttgaagccatgcacaaactgccccccagagtcccagttcaccatatcctttaaggcataggtactggtgattaaaagcagataacagttattaacagcaccaatgcagacagaagctgagcaactgaaacataacccttgaacrtactcacatgatgcaaaaacacaatctgttcttagattaacggcatcacttagccaaacgcattctggagcaatggacaaaggctgtgtctataaaaagcacactggtttcagcaggggtatttttatgttctggaagccttttattataattttataggcgctgagtgtcaggtctctgtgttctttcaagtcccttccagtcccgggggtggattttgctagctgctctctggagccacataggaaacgtgctggggacacagctgagtctcttggcactgtgggcagcgccagggaa

SEQ ID NO: 51130 - DNA, 600 bp, Chicken  19866894298642_2
gttgtaccaactccacttaatttctgtgtttaaatccaagcacgcttctaagtatcttatttttcttatcctaagctttctgcctgagaaacgtagcagcccacaggctttgcccattgctctgagggtgagtaatgatagcaatgctgtgccactctgctatgagacctgtggagggagcacgggagaggaggggggatgtccaactgctccggcctgtccctgggaggtggggatgaaggcatttgcaaatggggagcagatttaattcagcagcataattccaccctgtaggtaggstgctcagctggggcactgcatagcagggccaagggctgtsyccctctggttttggctgaagctgaatcctaaccccaatgaaagatgtgaggatattgcttcctttctccttttccttttattaaattttaatttgaaccagtgttttctaaccaacccgtggagaatacttttcagcacagtccttgcccagctctcatctgacaccatctccagggagacctgagatccttatcacttgatgaaaaatgagatttacgttcctgtatcacacgggcactttgaaaatattatccctga

SEQ ID NO: 51131 - DNA, 600 bp, Chicken  19866894298642_3
cacgcttctaagtatcttatttttcttatcctaagctttctgcctgagaaacgtagcagcccacaggctttgcccattgctctgagggtgagtaatgatagcaatgctgtgccactctgctatgagacctgtggagggagcacgggagaggaggggggatgtccaactgctccggcctgtccctgggaggtggggatgaaggcatttgcaaatggggagcagatttaattcagcagcataattccaccctgtaggtaggstgctcagctggggcactgcatagcagggccaagggctgtsyccctctggttttggctgaagctgaatcctaaccccaatgaaagatgtgaggatattgcttcctttctccttttccttttattaaattttaatttgaaccagtgttttctaaccaacccgtggagaatacttttcagcacagtccttgcccagctctcatctgacaccatctccagggagacctgagatccttatcacttgatgaaaaatgagatttacgttcctgtatcacacgggcactttgaaaatattatccctgactctggagaaatggctcatacattttaatgccactattag

SEQ ID NO: 51132 - DNA, 600 bp, Chicken  19866894298642_4
acgcttctaagtatcttatttttcttatcctaagctttctgcctgagaaacgtagcagcccacaggctttgcccattgctctgagggtgagtaatgatagcaatgctgtgccactctgctatgagacctgtggagggagcacgggagaggaggggggatgtccaactgctccggcctgtccctgggaggtggggatgaaggcatttgcaaatggggagcagatttaattcagcagcataattccaccctgtaggtaggstgctcagctggggcactgcatagcagggccaagggctgtsyccctctggttttggctgaagctgaatcctaaccccaatgaaagatgtgaggatattgcttcctttctccttttccttttattaaattttaatttgaaccagtgttttctaaccaacccgtggagaatacttttcagcacagtccttgcccagctctcatctgacaccatctccagggagacctgagatccttatcacttgatgaaaaatgagatttacgttcctgtatcacacgggcactttgaaaatattatccctgactctggagaaatggctcatacattttaatgccactattaga

SEQ ID NO: 51133 - DNA, 589 bp, Chicken  19866894298642_5
aaagatgtgaggatattgcttcctttctccttttccttttattaaattttaatttgaaccagtgttttctaaccaacccgtggagaatacttttcagcacagtccttgcccagctctcatctgacaccatctccagggagacctgagatccttatcacttgatgaaaaatgagatttacgttcctgtatcacacgggcactttgaaaatattatccctgactctggagaaatggctcatacattttaatgccactattagaaattgaattgacaacacttattctcggtggaaactgccrtgcagcttaagggaaagatatgcagaaggcactggtggagaccagagagctctggtcaccttgggatgtgtgtgtgcttttggtgcagtgcttctgctgaacaaaaagagcaagggaaggggaaagcaagggaaggggaaagagtgtggggcagcaagcagggggtgaggtggcactgaggtcagagcattgaaacagcgcctggtctgaaggtgtgctcaggtaacaataagctatacagagaaagggagctgggtgaatgcggcttacatgggcctcagggtaagac

SEQ ID NO: 51134 - DNA, 599 bp, Chicken  19866894298646_1
  misc_feature (1)..(57): n is any nucleotide
nnnnnnnnnnnnnnnnnnnnnnnnnnnnnnnnnnnnnnnnnnnnnnnnnnnnnnnnnatgccaagatgcagatatcaatctgtttctatatccttaatatttcattgattctacttcatcttgcaaaaatgatagtatagaaatacttaggcatgtcaacttcaaggttatgtaaacactcaaaagcaaggtaacgtaaaacctttagtatcttctctctctccaacctagtagtcaaaagtgatattaaaaaaacttctgcttttagtaacacaatagaccttgcatctaatttttttwaaataattagaagatcttaaatttgaagtaaaatttaaaataaaattttcacagcaatttccactgtgttcagagaacaawtcaaatgttacataaatctcacctgtgagcaaagaagcatcaccagctccacaactgaactgctagatttcatacacacaaggcctacaaaaggaaaaaatatatgtattagacataaatgcatgtttatttggcattgtttgctaacacaaaatattgtaatgtgtaatagaggcatctcaacaataaaagaaagctgacattctcataccacttac

SEQ ID NO: 51135 - DNA, 600 bp, Chicken  19866894298646_2
gtttctatatccttaatatttcattgattctacttcatcttgcaaaaatgatagtatagaaatacttaggcatgtcaacttcaaggttatgtaaacactcaaaagcaaggtaacgtaaaacctttagtatcttctctctctccaacctagtagtcaaaagtgatattaaaaaaacttctgcttttagtaacacaatagaccttgcatctaatttttttwaaataattagaagatcttaaatttgaagtaaaatttaaaataaaattttcacagcaatttccactgtgttcagagaacaawtcaaatgttacataaatctcacctgtgagcaaagaagcatcaccagctccacaactgaactgctagatttcatacacacaaggcctacaaaaggaaaaaatatatgtattagacataaatgcatgtttatttggcattgtttgctaacacaaaatattgtaatgtgtaatagaggcatctcaacaataaaagaaagctgacattctcataccacttacagtagaattttgtactttatcagcataaaataaaattttgtgagggagaccatacattccatgctttgcatctaaagatgca

SEQ ID NO: 51136 - DNA, 600 bp, Chicken  19866894298648_1
ttctccaatttgtttgatctactcaagtggaagctcttgcgctgagcagcctctacaaatacacggtgcagtttaaattccccggtgttaaaaatatatgcttgaccgtaaaacactctactttttatatggaaatagcagctcactgggagaaaagtggcaatgcattgcatagcatgctgaagcaatctaggaaaaataaaatctattacacaccaaaaataaaaatacaaagaaaataaataaagaagtaaggccaatgggactgtatttacaaacatatcaaaatcttccgacgcwaaaaacatttactttccatgcaaatgcagtttcttacttgcttttatctccattctatatgcacactgtacctctcaggagtctgatgggttgatttgttattgattgcggtgggagtgggtatgtacagaatagacaaatacttctttagcaagtagcacaactattaactcaacatccattggcctcagaaagmagttctgtcctcttttctctgttttctccatgttttctcacagaccccgtcttgatatccaggtgttgatgtttaaccccttggccagtgttaggtcaaaatgc

SEQ ID NO: 51137 - DNA, 600 bp, Chicken  19866894298648_2
aaataaaatctattacacaccaaaaataaaaatacaaagaaaataaataaagaagtaaggccaatgggactgtatttacaaacatatcaaaatcttccgacgcaaaaaacatttactttccatgcaaatgcagtttcttacttgcttttatctccattctatatgcacactgtacctctcaggagtctgatgggttgatttgttattgattgcggtgggagtgggtatgtacagaatagacaaatacttctttagcaagtagcacaactattaactcaacatccattggcctcagaaagmagttctgtcctcttttctctgttttctccatgttttctcacagaccccgtcttgatatccaggtgttgatgtttaaccccttggccagtgttaggtcaaaatgctatcacatttctagaacaggaagatgtgctaccaaatgggcatggtttaatcctgcagggaaatagacactaaatccttttaagaaatgccaagggtagaacagcacctctcgagtgtttttagagaaacagctatataaaaaccaaaataagttagaaaaaaaaccaaccatacaaaattgtatccaacataatt

SEQ ID NO: 51138 - DNA, 599 bp, Chicken  19866894298650_1
  misc_feature (1)..(25): n is any nucleotide
nnnnnnnnnnnnnnnnnnnnnnnnnaactgataggcatggcagatcatcataagagcaaaatttacaagtgagaaacaaagtttataaaccgataaaccaaaactacataatacctttctcactcaaattattttgacattttgcaatgtttttgtatgcagaatcagtctgatgtccacttagggtgaatgtaaaatttcattgctgcataaaaattctatgtcggcacaaatcttttatgtacaagtgtttccatagatatatatatgtaatattatggtatacagatattactctcrttttctgcacagaagtgacttttaagtcctgcatattcccaccatacagcatcaagatgaagcaagtgataaaaaaggtatttttcaaatgataaaaatgttttgacctttgctgtagaagagtttttatctttcacatgtaatttgmactacaggttgtctatagtatgttcttaaacatactactrttggtcatggagcattttactcagagatttgtctgctacacccaaatactgtccgaggtatgtataatgttaaatgaagaatttctccacaagtccttctgagaacagyta

SEQ ID NO: 51139 - DNA, 600 bp, Chicken  19866894298650_2
gtttttgtatgcagaatcagtctgatgtccacttagggtgaatgtaaaatttcattgctgcataaaaattctatgtcggcacaaatcttttatgtacaagtgtttccatagatatatatatgtaatattatggtatacagatattactctcrttttctgcacagaagtgacttttaagtcctgcatattcccaccatacagcatcaagatgaagcaagtgataaaaaaggtatttttcaaatgataaaaatgttttgacctttgctgtagaagagtttttatctttcacatgtaatttgmactacaggttgtctatagtatgttcttaaacatactactrttggtcatggagcattttactcagagatttgtctgctacacccaaatactgtccgaggtatgtataatgttaaatgaagaatttctccacaagtccttctgagaacagytagaactagagcaatggacactgacaaacacgacaaggatcatctgtactgtaaatcaacaaatgagaatcacacactgagaagaacatataattatatttctgatggaagcatatggatcagtaagggaggatagttctgtttgcatctt

SEQ ID NO: 51140 - DNA, 600 bp, Chicken  19866894298650_3
aatgtaaaatttcattgctgcataaaaattctatgtcggcacaaatcttttatgtacaagtgtttccatagatatatatatgtaatattatggtatacagatattactctcrttttctgcacagaagtgacttttaagtcctgcatattcccaccatacagcatcaagatgaagcaagtgataaaaaaggtatttttcaaatgataaaaatgttttgacctttgctgtagaagagtttttatctttcacatgtaatttgmactacaggttgtctatagtatgttcttaaacatactactrttggtcatggagcattttactcagagatttgtctgctacacccaaatactgtccgaggtatgtataatgttaaatgaagaatttctccacaagtccttctgagaacagytagaactagagcaatggacactgacaaacacgacaaggatcatctgtactgtaaatcaacaaatgagaatcacacactgagaagaacatataattatatttctgatggaagcatatggatcagtaagggaggatagttctgtttgcatcttgaggatgtataaaaaagtttctgccttaatttatgctgtt

SEQ ID NO: 51141 - DNA, 600 bp, Chicken  19866894298650_4
tcrttttctgcacagaagtgacttttaagtcctgcatattcccaccatacagcatcaagatgaagcaagtgataaaaaaggtatttttcaaatgataaaaatgttttgacctttgctgtagaagagtttttatctttcacatgtaatttgmactacaggttgtctatagtatgttcttaaacatactactrttggtcatggagcattttactcagagatttgtctgctacacccaaatactgtccgaggtatgtataatgttaaatgaagaatttctccacaagtccttctgagaacagytagaactagagcaatggacactgacaaacacgacaaggatcatctgtactgtaaatcaacaaatgagaatcacacactgagaagaacatataattatatttctgatggaagcatatggatcagtaagggaggatagttctgtttgcatcttgaggatgtataaaaaagtttctgccttaatttatgctgtttgaaaggcctgaactacttttcaaaactttatccttcaaaggcattcttaatattcaaaaagaccctgctaattaactcctaaaactacctcaattctaacctgcttct

SEQ ID NO: 51142 - DNA, 600 bp, Chicken  19866894298650_5
tttcaaatgataaaaatgttttgacctttgctgtagaagagtttttatctttcacatgtaatttgmactacaggttgtctatagtatgttcttaaacatactactrttggtcatggagcattttactcagagatttgtctgctacacccaaatactgtccgaggtatgtataatgttaaatgaagaatttctccacaagtccttctgagaacagytagaactagagcaatggacactgacaaacacgacaaggatcatctgtactgtaaatcaacaaatgagaatcacacactgagaagyacatataattatatttctgatggaagcatatggatcagtaagggaggatagttctgtttgcatcttgaggatgtataaaaaagtttctgccttaatttatgctgtttgaaaggcctgaactacttttcaaaactttatccttcaaaggcattcttaatattcaaaaagaccctgctaattaactcctaaaactacctcaattctaacctgcttctcctgctccttagaaaagttttaattacacagattaagcactgggattccagctgtcaccttccaatagctttcttcctttttaaa

SEQ ID NO: 51143 - DNA, 600 bp, Chicken  19866894298650_6; identical to SEQ ID NO: 51142

SEQ ID NO: 51144 - DNA, 600 bp, Chicken  19866894298650_7; identical to SEQ ID NO: 51142

SEQ ID NO: 51145 - DNA, 600 bp, Chicken  19866894298650_8; identical to SEQ ID NO: 51142

SEQ ID NO: 51146 - DNA, 600 bp, Chicken  19866894298650_9
gacagctggccatcagagtaggttttacccaacacagccaattatttggatactgaagtgatacagatcctaatgtaaggacttactttcagcagaaggatggattggatgacctccacaggagctgcttccagagcagacttttgtttgatcctaagagctatgcatcagatgacaaaatactgccactgcagttctatccccactttctgtattaacattcagtggaaaatagtcaaaagaaaattgtttcataggatcagtggacttttatcaaccaccacttctgtatgaataaastaggcagtacaatgggagaagctccaaggaaatgtcagcagaaaaaaattgttctgacttttccgactgcacagagcttcctaggtcaggacacaggacaggatttgcataagcatatctgcttataaacatacataatcatagaatcgctcaggttggaaaagaccttaaatcttcctcttacagaaactgttctttagccaggatgctgagcacgggccctatttcctggattttctgtggtcccaacccacgtgcaggtgatggtatcactagatatgcctgataagtaggtacatg

SEQ ID NO: 51147 - DNA, 600 bp, Chicken  19866894298652_1
ccagtaacatgtgcatcttttcataccaatgatttctccaggggaccaagggtgtaaatccaggccagcttgggtctgcatcccactattgtcactgcccagaagactccttggagatgctaatgcctaggcagccagcagagggaaaagaaaatagcaaaaacagcgttcatgttcagccaattacaccccagctctttcaagagcttttaacacatgcacatttttgcttgtgacatccagactcacagtagggagtaacaaacatttgagaatcatagctctgcacgttcccatcaycccacacccaccatcccacagcctgggtcttctgtgctggaatccacattaaacagagcagtgaagttctgattgtttgttgtcaaagagtttcagttttgtgatgaaagatgtgacctttcttggcagcaagagtcctttctgattgattagtaaacatgaggtaaaatgcaggagcacgccagcgttaacttgatactgccaccggctctgtgcatcaaatatttttgctttattttgaacatcctgttaatgagaaaaacatcctaatcaaagaaacatgtttccttcaattctctg

SEQ ID NO: 51148 - DNA, 600 bp, Chicken  19866894298661_1
cacgccggagtgacaagaaaagcaaggcaaagataaagctttgtgctgtgataagatgtctgagtgtaaagcaggagatcacagagaccttttgggattacctatgttcatctcaccctggatatgactgcagacaagctagctcttctcaagtgacagtttaaaaaactcaggactatgtttctcttccccgttgctttcttgccagtgatttttaccgttgactttgccagcccttcagctctgcagcactggaactgtcctaatggatacagattaaagagtgaaagctctgcctgygtaggtaagtggtggaccattcacagattaagaaaaaagcatttgtattcgtttaactgagctttataattgtcatgagttttctatacagattgcctatgcgttgtaacagcacaattgataaagcagcttctcagaatctgttccttctcataatgaacattttgtttagtttcttattcagaagttggtcccttatctgccagttcggctatcacaaatcaggttgaaggtttatgtgatcagtaagtgatcagaactgctcactaatcacaagaattcctttgcatagctgtagtg

SEQ ID NO: 51149 - DNA, 599 bp, Chicken  19866894298664_1
  misc_feature (1)..(233): n is any nucleotide
nnnnnnnnnnnnnnnnnnnnnnnnnnnnnnnnnnnnnnnnnnnnnnnnnnnnnnnnnnnnnnnnnnnnnnnnnnnnnnnnnnnnnnnnnnnnnnnnnnnnnnnnnnnnnnnnnnnnnnnnnnnnnnnnnnnnnnnnnnnnnnnnnnnnnnnnnnnnnnnnnnnnnnnnnnnnnnnnnnnnnnnnnnnnnnnnnnnnnnnnnnnnnnnnnnnnnnnnnnnnnnnnnnnnnnnnntactttataaaagggacaataagtaatcagttccctttcagagagcaatcagaacttgtaaatggayttttctggttctgaaatttagttcaagaaaagttaaacgtgcagcagtgaagagtggagtatcctctgtagtaaatggtgcatttaaatgcatgtacatggaaaggcaatacagaactggtggctaatgatcagacaatggttcataaatctacctagtgaatatttatagcaataaggaaagtttctctgacttgctgccaaaatgttcttgtgttttgcaaggtcagattgctttacaacaaccagctcccttccctacatggtcatcagcagagttggggtggggggaaggactgt

SEQ ID NO: 51150 - DNA, 600 bp, Chicken  19866894298667_1
tgctcccttgaaacttttgtgaggacaaagggtgattcccttggtactcccttcagcgttactaggcctggccaatcacttctgaagtagtcagtgagtgcagacaaatctgagtagcatcactggcagctgcccaccctatggatattcgtgcgaggctgggctagagccgttgtgtcagcaagaagctaattccattctgcagcattcatccttacatatatgtgtgggcatacaattatgaacagtaatgtgtttcctctctgaatgctgaaagctatctttagatagaagccagtwtcccacaacatccctggctttttaaatcccaaatccagtgtgatgcggctttttataaacggctgtctctccagtgatttatttgtaatgatacttatgatatgcatgccaaagccaacttaacatcccatctgtgtgtgttctgatctcacagcttattagtataagagaggattgttttaataggaaggagacagtgattcagcagccctccagctttccttstggtgaatgcctttgccraacctcaaagggctgcagaattcactgtgttcaggtgtgcarcaaaataagtcctca

SEQ ID NO: 51151 - DNA, 600 bp, Chicken  19866894298667_2
tgtgggcatacaattatgaacagtaatgtgtttcctctctgaatgctgaaagctatctttagatagaagccagtwtcccacaacatccctggctttttaaatcccaaatccagtgtgatgcggctttttataaacggctgtctctccagtgatttatttgtaatgatacttatgatatgcatgccaaagccaacttaacatcccatctgtgtgtgttctgatctcacagcttattagtataagagaggattgttttaataggaaggagacagtgattcagcagccctccagctttccttstggtgaatgcctttgccraacctcaaagggctgcagaattcactgtgttcaggtgtgcarcaaaataagtcctcacctttcagcagagaatttgattcagcaaattacgggatagcaattcatcagcataaacactgaaagggacagacaccaattgttttgctgcgtcagaatcctttggtttcctgctgcttaaattgctgcaaaaccactgaaatttcatttggttaaaactggaggacgtcagctcaaactacgcatcaacaataaattggtcatatgattacttattgaaacgtg

SEQ ID NO: 51152 - DNA, 600 bp, Chicken  19866894298667_3
aacagtaatgtgtttcctctctgaatgctgaaagctatctttagatagaagccagtwtcccacaacatccctggctttttaaatcccaaatccagtgtgatgcggctttttataaacggctgtctctccagtgatttatttgtaatgatacttatgatatgcatgccaaagccaacttaacatcccatctgtgtgtgttctgatctcacagcttattagtataagagaggattgttttaataggaaggagacagtgattcagcagccctccagctttccttstggtgaatgcctttgccraacctcaaagggctgcagaattcactgtgttcaggtgtgcarcaaaataagtcctcacctttcagcagagaatttgattcagcaaattacgggatagcaattcatcagcataaacactgaaagggacagacaccaattgttttgctgcgtcagaatcctttggtttcctgctgcttaaattgctgcaaaaccactgaaatttcatttggttaaaactggaggacgtcagctcaaactacgcatcaacaataaattggtcatatgattacttattgaaacgtgagtcaacatcttgtagct

SEQ ID NO: 51153 - DNA, 600 bp, Chicken  19866894298667_4
agatagaagccagtwtcccacaacatccctggctttttaaatcccaaatccagtgtgatgcggctttttataaacggctgtctctccagtgatttatttgtaatgatacttatgatatgcatgccaaagccaacttaacatcccatctgtgtgtgttctgatctcacagcttattagtataagagaggattgttttaataggaaggagacagtgattcagcagccctccagctttccttstggtgaatgcctttgccraacctcaaagggctgcagaattcactgtgttcaggtgtgcarcaaaataagtcctcacctttcagcagagaatttgattcagcaaattacgggatagcaattcatcagcataaacactgaaagggacagacaccaattgttttgctgcgtcagaatcctttggtttcctgctgcttaaattgctgcaaaaccactgaaatttcatttggttaaaactggaggacgtcagctcaaactacgcatcaacaataaattggtcatatgattacttattgaaacgtgagtcaacatcttgtagctaatgagataaacagaagtattatggcttattggagacctagc

SEQ ID NO: 51154 - DNA, 600 bp, Chicken  19866894298669_1
aatccatttttttttccacatgcatcatgataacagactccacccttgttatggttccttccaagtttagacgtaatttgagaaaaactgttataatgtagaagttatatatcaaattatgcctctcaaaactctaaaggtcacactgtaccattttaatgaacttctaaacctaaagcaaagaggaaacaataaacagtggatatcaaatatttactgtttaataactattctcagatgaccatggtctccttccagtgtgatcactgtatcaccatgagttcattatacatttggcamaggacagcacactggcacagctgacactgcatttgtttcaattcctttgctgatacsctgttatttctagttgatcttacactggcatttctattgtaaaattttgagattgtgcaaacagatgagtttttgccgtgttgtataattaaaatggtctgggctaagaacactgtcctccctgacatgcatatgcattctgattccacttcccattctaaattgctacatttttattttacatgctctctttataaacagaggactccagtaattcagaggcaaatctgtatttgcagaagc

SEQ ID NO: 51155 - DNA, 600 bp, Chicken  19866894298669_2
cttccaagtttagacgtaatttgagaaaaactgttataatgtagaagttatatatcaaattatgcctctcaaaactctaaaggtcacactgtaccattttaatgaacttctaaacctaaagcaaagaggaaacaataaacagtggatatcaaatatttactgtttaataactattctcagatgaccatggtctccttccagtgtgatcactgtatcaccatgagttcattatacatttggcamaggacagcacactggcacagctgacactgcatttgtttcaattcctttgctgatacsctgttatttctagttgatcttacactggcatttctattgtaaaattttgagattgtgcaaacagatgagtttttgccgtgttgtataattaaaatggtctgggctaagaacactgtcctccctgacatgcatatgcattctgattccacttcccattctaaattgctacatttttattttacatgctctctttataaacagaggactccagtaattcagaggcaaatctgtatttgcagaagccttaactaaaatgaatgttgcaagtgtgaatctcttctgctgatatgaaaggaagtt

SEQ ID NO: 51156 - DNA, 600 bp, Chicken  19866894298672_1
tcttcagtcagagctgctgatctctgagtgcttcccgctcattcagagcaggaggaagaggatccaattcctgtcatactgttcttaaaagatctgttttgtcccacgtctgaatagaaacagtctactcagagaacgcaaatgcttccagcagagtagcatttgtccaccagtgccttcgcccctcttcctatactgaagcttttcccattttcctctagacctgttttttttttcattctcttcccatctctttctctcaacaaagctctcccacagtgttagaagctagtccttccwagtccttctttttgttttttacttttgttctcctgctcagaaaagcagcagcaagtcagcaaggctcagaaaagcagattggcgcaccaaggatggcctcaggctgtattattccctgtgatgactccttcagcagttatctggttgtgaactttcatcagaatcggtgaataaatatgaattattttactgttaatctcaatctagtgttatagaagaggagtggaaataaaaagaggaggttcagcactgccaatcggaaaggggatatcaactgggtccccttcactacagaagaga

SEQ ID NO: 51157 - DNA, 585 bp, Chicken  19866894298679_1
gaaacacattccctcaacaacactttacttgagtatgttgatctcacaagacaactcctagaagcagaaaatgaaaaggattctgatacattgaaagatatccgatgccattttagtgccttagtggcaaatatcattcaaaatgttccaggtatgtaaaaagatcttaataacttctgatagactgtttttatttcattttatttttgttaaagcatcaaaaaattctacttacctgaacttgcagaatacattaataaaaatataccatcagttctgaacacaacttcagcaatgagrgtttttaagagaggtgtctgatactgtttagaagctacaagtagctttctcacttagcaaaagtcttcttggctggcaatgcatttacgttttttaggttaataaatagcttacccttatacctcggtgacattaggcaggataacagcaaaattacatccagctattatgattttgaaatagtgtctttattttttccctttcgtagtctgattctcttctatgtacattattttaaaaagtgatacaaaaagtgcttctaactttattttcttttcttacagt

SEQ ID NO: 51158 - DNA, 600 bp, Chicken  19866894298681_1
ggtggacttcagttcatctgtcactgggagaggagcagggggaatagtgtgtatttcatgatagtacgatcccttaccaagggtattattccactgcccaactctgttgcgacaggcatatccatgtgtagagttgtttcccaaaatcatgtttctgtgctgggcttctgtcttccagaacacctctgcatgaatgaatcctgcagttattttggtttgcaaattgataagggatgtccactgctccttaccagctgagacgatttggcttaatgaattgcaaatgtccatcagtctccrattcatttcctaacttggcatatgcagattaaaagtatcttaatgagctatttcacgcaggtaccatcttctggcattgacagtcttccttaaatatgaaagatcaggtctgctcwagacaaatcccactaaatgtgaggcrcataaggaagatgattaaagtacaaaccactggtctagatgaaagaggactctcagatggctggtgcaacgttgtcaacaggaaacttcacctttatggcaagtggcagatagtggaagttagaccaaaaagctaaagtgaactcagtagccatattt

SEQ ID NO: 51159 - DNA, 600 bp, Chicken  19866894298681_2
catatccatgtgtagagttgtttcccaaaatcatgtttctgtgctgggcttctgtcttccagaacacctctgcatgaatgaatcctgcagttattttggtttgcaaattgataagggatgtccactgctccttaccagctgagacgatttggcttaatgaattgcaaatgtccatcagtctccrattcatttcctaacttggcatatgcagattaaaagtatcttaatgagctatttcacgcaggtaccatcttctggcattgacagtcttccttaaatatgaaagatcaggtctgctcwagacaaatcccactaaatgtgaggcrcataaggaagatgattaaagtacaaaccactggtctagatgaaagaggactctcagatggctggtgcaacgttgtcaacaggaaacttcacctttatggcaagtggcagatagtggaagttagaccaaaaagctaaagtgaactcagtagccatatttgtgtaatgtatgggaggagggaaggaattttgctgctaaggaggcgaggaaggaggtaattacaataatcaaaatgagagacaaagagctcttgaatgtagctgtcggaatagaaa

SEQ ID NO: 51160 - DNA, 600 bp, Chicken  19866894298681_3
aaaatcatgtttctgtgctgggcttctgtcttccagaacacctctgcatgaatgaatcctgcagttattttggtttgcaaattgataagggatgtccactgctccttaccagctgagacgatttggcttaatgaattgcaaatgtccatcagtctccrattcatttcctaacttggcatatgcagattaaaagtatcttaatgagctatttcacgcaggtaccatcttctggcattgacagtcttccttaaatatgaaagatcaggtctgctcwagacaaatcccactaaatgtgaggcrcataaggaagatgattaaagtacaaaccactggtctagatgaaagaggactctcagatggctggtgcaacgttgtcaacaggaaacttcacctttatggcaagtggcagatagtggaagttagaccaaaaagctaaagtgaactcagtagccatatttgtgtaatgtatgggaggagggaaggaattttgctgctaaggaggcgaggaaggaggtaattacaataatcaaaatgagagacaaagagctcttgaatgtagctgtcggaatagaaagaaaggacaaaagttggttgattgct

SEQ ID NO: 51161 - DNA, 600 bp, Chicken  19866894298681_4
gaaggaattttgctgctaaggaggcgaggaaggaggtaattacaataatcaaaatgagagacaaagagctcttgaatgtagctgtcggaatagaaagaaaggacaaaagttggttgattgctgggttgccagatgatgaaagtgaagttgtcgtatttgtgaatgttttgcctggatataagcgtatatggggtatattgcttgttattctgatgggtgtatgtactgcagtttctgtgcagtcactgtcgggctttgtgtgcattgaaattgtattttatgaaaagagtcatttgagaygtattatagagacacgcaggtatgtgctcactctcattttggcagagacagttctgttttgcattcagaaaaacgcgaatcagattagcgtctttcttcagactttgttagatttttcaacatgttttatcatctacaaattcactttcgagaagcatccaggcttctgggtaaaagaagccttctccaggataaattgacacatggcatcgtcttgagtctcttgttgtctgatactgaacggtacgacagtcctctccattgcatgtatgggaggggatctttctgacgcataattgg

SEQ ID NO: 51162 - DNA, 599 bp, Chicken  19866894298685_1
  misc_feature (1)..(34): n is any nucleotide
nnnnnnnnnnnnnnnnnnnnnnnnnnnnnnnnnntgaagtcactatcaattttcttactgaaaagttctcaacaaaatgaggctttcttgtgatgtatattgttataacactatggattttcaaaatccagcaaaatgcaccgcatttctaagttgtttccactgcattgtcctgatttaaaggaaatgactatgtaattcattaatcttcaaacatttccagtatttttactaataaatcagtaagaactcacagcatttctgtggagcgatgtggagggaggtgtattggatcatatmcattaatcagtttgatgcttatgcagggaagraattaggttgtcaccatacattcttgttttactgtgttcttactttctttgtaactcattagcactaaggtaggtacattgctaatattttgtaatgagtaaacaagaaaaaatcaatgactggtagagaatattaagaaaatattttaggaatttggcctcttaaaaaaatataaatttttttaaaggaggtgatcagttgaaaaggagattactgtacgcaacaacaggacttgtttttgaccatgctggctccttttcatagaa

SEQ ID NO: 51163 - DNA, 599 bp, Chicken  19866894298685_2
  misc_feature (1)..(2): n is any nucleotide
nntgaagtcactatcaattttcttactgaaaagttctcaacaaaatgaggctttcttgtgatgtatattgttataacactatggattttcaaaatccagcaaaatgcaccgcatttctaagttgtttccactgcattgtcctgatttaaaggaaatgactatgtaattcattaatcttcaaacatttccagtatttttactaataaatcagtaagaactcacagcatttctgtggagcgatgtggagggaggtgtattggatcatatmcattaatcagtttgatgcttatgcagggaagraattaggttgtcaccatacattcttgttttactgtgttcttactttctttgtaactcattagcactaaggtaggtacattgctaatattttgtaatgagtaaacaagaaaaaatcaatgactggtagagaatattaagaaaatattttaggaatttggcctcttaaaaaaatataaatttttttaaaggaggtgatcagttgaaaaggagattactgtacgcaacaacaggacttgtttttgaccatgctggctccttttcatagaatgatagaatggcctgggttgaaaaggaccaca

SEQ ID NO: 51164 - DNA, 599 bp, Chicken  19866894298686_1
  misc_feature (1)..(153): n is any nucleotide
nnnnnnnnnnnnnnnnnnnnnnnnnnnnnnnnnnnnnnnnnnnnnnnnnnnnnnnnnnnnnnnnnnnnnnnnnnnnnnnnnnnnnnnnnnnnnnnnnnnnnnnnnnnnnnnnnnnnnnnnnnnnnnnnnnnnnnnnnnnnnnnnnnnnnnnnncggtgggaaaagcacgcggcgatgcaacacgatttgtttctccttgcagacagacatcgtatggctggaagttttgagcccagctgtggcagtcagaaaatgctgcagaggaagcggtgccgctcggctcacctgaagcccaacgcygagcagcagaactgcaacgctcygagcrcacaacatgcccaaatccccacctcgtgccgtcccactgccacgcgacccacctgggatgctcccacccaactccactcccatttacacctcggctggctcaggatccattggaaaaaastaaaaccagcgtcaacagactgtgtgagttctgagcccccctcagcccggccctcaccctcctcctcggcagccctcagccttatctccacccgctgcactccggctcctaccccgcctggacgagccctgggaggctgcggcgctgagca

SEQ ID NO: 51165 - DNA, 599 bp, Chicken  19866894298686_2
  misc_feature (1)..(130): n is any nucleotide
nnnnnnnnnnnnnnnnnnnnnnnnnnnnnnnnnnnnnnnnnnnnnnnnnnnnnnnnnnnnnnnnnnnnnnnnnnnnnnnnnnnnnnnnnnnnnnnnnnnnnnnnnnnnnnnnnnnnnnnnnnnnnnnnnncggtgggaaaagcacgcggcgatgcaacacgatttgtttctccttgcagacagacatcgtatggctggaagttttgagcccagctgtggcagtcagaaaatgctgcagaggaagcggtgccgctcggctcacctgaagcccaacgcygagcagcagaactgcaacgctcygagcrcacaacatgcccaaatccccacctcgtgccgtcccactgccacgcgacccacctgggatgctcccacccaactccactcccatttacacctcggctggctcaggatccattggaaaaaastaaaaccagcgtcaacagactgtgtgagttctgagcccccctcagcccggccctcaccctcctcctcggcagccctcagccttatctccacccgctgcactccggctcctaccccgcctggacgagccctgggaggctgcggcgctgagcaggaggaggagggtggagcgccca

SEQ ID NO: 51166 - DNA, 599 bp, Chicken  19866894298686_3
  misc_feature (1)..(125): n is any nucleotide
nnnnnnnnnnnnnnnnnnnnnnnnnnnnnnnnnnnnnnnnnnnnnnnnnnnnnnnnnnnnnnnnnnnnnnnnnnnnnnnnnnnnnnnnnnnnnnnnnnnnnnnnnnnnnnnnnnnnnnnnnnnnncggtgggaaaagcacgcggcgatgcaacacgatttgtttctccttgcagacagacatcgtatggctggaagttttgagcccagctgtggcagtcagaaaatgctgcagaggaagcggtgccgctcggctcacctgaagcccaacgcygagcagcagaactgcaacgctcygagcrcacaacatgcccaaatccccacctcgtgccgtcccactgccacgcgacccacctgggatgctcccacccaactccactcccatttacacctcggctggctcaggatccattggaaaaaastaaaaccagcgtcaacagactgtgtgagttctgagcccccctcagcccggccctcaccctcctcctcggcagccctcagccttatctccacccgctgcactccggctcctaccccgcctggacgagccctgggaggctgcggcgctgagcaggaggaggagggtggagcgcccaaactc

SEQ ID NO: 51167 - DNA, 579 bp, Chicken  19866894298686_4
  misc_feature (1)..(5): n is any nucleotide
nnnnncggtgggaaaagcacgcggcgatgcaacacgatttgtttctccttgcagacagacatcgtatggctggaagttttgagcccagctgtggcagtcagaaaatgctgcagaggaagcggtgccgctcggctcacctgaagcccaacgcygagcagcagaactgcaacgctcygagcrcacaacatgcccaaatccccacctcgtgccgtcccactgccacgcgacccacctgggatgctcccacccaactccactcccatttacacctcggctggctcaggatccattggaaaaaastaaaaccagcgtcaacagactgtgtgagttctgagcccccctcagcccggccctcaccctcctcctcggcagccctcagccttatctccacccgctgcactccggctcctaccccgcctggacgagccctgggaggctgcggcgctgagcaggaggaggagggtggagcgcccaaactccagagccattctttgttcggagcctccatgagataatggcagttgtgctcacaaaaagaacagttataaacagggcaaaaggaagtgacttcggtcggag

SEQ ID NO: 51168 - DNA, 600 bp, Chicken  19866894298696_1
tgaatttctccatagctttccacagtaaaccacatgcagagggagagccatgtctcctccttgcatgtccctgttcatagcagggaagttggaccagttgacctttaaatgtccctttcagcttgaatgattctgtgatttcagcagcgcttgttggggtgatcttctccttgtcccgacacaaaactgggctgagctgacctctgggtcccaaacctttgggcaacactggtgctctctgttttatctgccctagtacccttattgtgtgctaaacagcgaggatttggctatcttaarccagacaaggtggagacattttctctttgagtgtgcaggctgacagggctgcagcatgacaggggatggtcagaaactgccttctgccttctgcaaacagtggctgagctcggagagggatcagcccccaaacctggcaggaaaacaaactcctggcagtcacgcgcccatgagctcagagccttctaaagaatctcagacctggagagtttttcagaagaggagcaatgcacatcagttagatcaggttgctgtgggccagcagtgatgctcagaatcaaaacacctgaagggatgctg

SEQ ID NO: 51169 - DNA, 600 bp, Chicken  19866894298700_1
taatcatagcataaagtaaaatcatgtcctgcttgatagaggtttttgccaaatattgccaaataaagtccaggagtgctagaacagagatttagcctccatgggctattgtgtctatgtatctgaactgaattacaaaatctcagtaaggaatgatttttgaatgcatggtaatagtagaggcaacaatctatgccatgttttaaactgtctctacagggccaaagatggaatgtttaaacatgggccgagtgtctgttgtctacccaggtaaccagcatacatgacagtctagcccarttccctatctatgtgtcagtctctgatatcatcttgcacttaaagcaccagagcaatcagtgcaggttgctcagttccactcaaacaattaaatgcactttttgtcatgtactgtgttacaaacagcataatcatggagactggaattgtgtatcatttgaacagatggaaaactgaacagtaatgaagactgcaatgttttaggtgtaatttcacatttcagcatagacatccgttaaattattgtaacatgggagttgccgtgaacaatagttcattttgacttttgagtatgctaag

SEQ ID NO: 51170 - DNA, 600 bp, Chicken  19866894298703_1
tttaacttattttaaatgattataaattagtgataaaagaaattggtaatcaccataaaattcagttggactgaccattttccaatttaatatccttgatgccagcaattagaatgtatttttctcatagatgttatgagaggcaatgatgccagcaggagaagctggaaagctgctagaaaaagaaaaaagtctagaaaaaagagaaagtggaggaagggaaggaggaaactttaaagtattttcaatggttatattaaacctgggaaccagaatatcattagactagcatcgttttgrttttttttttacctttcatctatcacttttagtacagttcttcatatgtataataacaaataccaaggcttgaatattgccacactgtaagacacaaaacactaccaggaattgaaacttcaaacttggatccacaactacagataatgcaaatatctcatttgaactgtgactacgacaacacaaatgcaggagtacaactgttcctaggcaaattgttcattgtgatcaaatgattagtttagttttactgagtgaaaaatttatgtgcaaggcagtttactgatgcctttgttattt

SEQ ID NO: 51171 - DNA, 600 bp, Chicken  19866894298703_2
ggatccacaactacagataatgcaaatatctcatttgaactgtgactacgacaacacaaatgcaggagtacaactgttcctaggcaaattgttcattgtgatcaaatgattagtttagttttactgagtgaaaaatttatgtgcaaggcagtttactgatgcctttgttatttgtaagtgttaaaaaaaaaatcaggtcataattttgggatatgcatacttggcatttatcttagaatatttgtgatgtctgtggtgtcatgtaagtgacagggtattgtttctacttcttcactgggyagcaaagtagggtgactgttaaataccatctgtaagaacatatctgcactggcatacaaacagggttataactgaaaaagaaaaaaaamatagacgttccctatgtactcacaggaaaaatctgtcctgataatatttttttccactgttatttcacagaccaacaaaaacagaggctcacagatttcacagttaattattagtttcttcaatatatgataattttatagggtactgcatttgttttcctttataattttgatgatttgattccagaatccattgcagacttcctttaag

SEQ ID NO: 51172 - DNA, 600 bp, Chicken  19866894298703_3
tgttcattgtgatcaaatgattagtttagttttactgagtgaaaaatttatgtgcaaggcagtttactgatgcctttgttatttgtaagtgttaaaaaaaaaatcaggtcataattttgggatatgcatacttggcatttatcttagaatatttgtgatgtctgtggtgtcatgtaagtgacagggtattgtttctacttcttcactgggyagcaaagtagggtgactgttaaataccatctgtaagaacatatctgcactggcatacaaacagggttataactgaaaaagaaaaaaaamatagacgttccctatgtactcacaggaaaaatctgtcctgataatatttttttccactgttatttcacagaccaacaaaaacagaggctcacagatttcacagttaattattagtttcttcaatatatgataattttatagggtactgcatttgttttcctttataattttgatgatttgattccagaatccattgcagacttcctttaagtcattctaatgtcccctgcatgagctactctgccttgaagggaatgcatgagctgtaatttgttcctggacattaaaagccacaaatct

SEQ ID NO: 51173 - DNA, 557 bp, Chicken  19866894298713_1
ataacaggatatacaaagcagttggatgtatcctgtgaggacacaccttggcgttagctgtccatttacactgcatagccagtggaaagcagtgcttgggacttggaaaacacaaaatctcttgcacaggagcctgtggatatacgtacaagttccaggatccttttgaatgacaatccacactgccccttcctctacagaggtggcttggtaggaagtggctgtggagttggccttgcttgatacctgtttggagaagaagttggaagactgctcgagggcatgaattatttgcaattytttactgtatataagcctgaaggggtaaaactcatcttttgcttcctaatgatgtggcttctcaaactggctatgatgtgatgaaataactgagtaatgctgaatgttcctgtgctcatgtctgtgctggatttgccaggtggaacatggtgcacgtacagtgggaaagctgtagccaaaggtgtctttcttccacttcattataaactactgagatgctttcccccatcaatataatgctgataaatggttgtttt

SEQ ID NO: 51174 - DNA, 600 bp, Chicken  19866894298724_1
tcctcgtcagtatgctgaatttcattggatgaagttcttatgaccatctgttttttttctcttcactttatgcacgctttcagcatccaagtcaacagcttaactgttaagctataagcttcctgctgtaaaacatgcaatgtaatgtagggaaaacctttttattccattgttgttcagcctcagacacctcaaagctagctgtctgtgttaatgcaagcagactggtcgcagctacttctctccagacctaaactgatcatgtacatggacaaagaggccaccatttaatatttaacrttccataaaactgcactgagagcttgtrctgaaacgtgtcagtaaagacatgctgcagcagtgatagcaggcrgctgagagccaagaggatcctatgttctacttctgcctgaggcatgttctctgataccgagcagcttgcttgaccccttgtattgcagccaacctagctgtaaaattaagcaacaaagaaagctctgtgacggacgtgtctggaggtgaactttcaaggcaagctttgctttactgataattcatcttactactgaaatttttgttttttaaccagtgcatgttttt

SEQ ID NO: 51175 - DNA, 600 bp, Chicken  19866894298724_2
atgaagttcttatgaccatctgttttttttctcttcactttatgcacgctttcagcatccaagtcaacagcttaactgttaagctataagcttcctgctgtaaaacatgcaatgtaatgtagggaaaacctttttattccattgttgttcagcctcagacacctcaaagctagctgtctgtgttaatgcaagcagactggtcgcagctacttctctccagacctaaactgatcatgtacatggacaaagaggccaccatttaatatttaacrttccataaaactgcactgagagcttgtrctgaaacgtgtcagtaaagacatgctgcagcagtgatagcaggcrgctgagagccaagaggatcctatgttctacttctgcctgaggcatgttctctgataccgagcagcttgcttgaccccttgtattgcagccaacctagctgtaaaattaagcaacaaagaaagctctgtgacggacgtgtctggaggtgaactttcaaggcaagctttgctttactgataattcatcttactactgaaatttttgttttttaaccagtgcatgttttttgttgtccttccaggcagcattcactct

SEQ ID NO: 51176 - DNA, 600 bp, Chicken  19866894298724_3
acgctttcagcatccaagtcaacagcttaactgttaagctataagcttcctgctgtaaaacatgcaatgtaatgtagggaaaacctttttattccattgttgttcagcctcagacacctcaaagctagctgtctgtgttaatgcaagcagactggtcgcagctacttctctccagacctaaactgatcatgtacatggacaaagaggccaccatttaatatttaacrttccataaaactgcactgagagcttgtrctgaaacgtgtcagtaaagacatgctgcagcagtgatagcaggcrgctgagagccaagaggatcctatgttctacttctgcctgaggcatgttctctgataccgagcagcttgcttgaccccttgtattgcagccaacctagctgtaaaattaagcaacaaagaaagctctgtgacggacgtgtctggaggtgaactttcaaggcaagctttgctttactgataattcatcttactactgaaatttttgttttttaaccagtgcatgttttttgttgtccttccaggcagcattcactcttctcttgggtcctttcaccttcttcaatgtgcagaagaccaagta

SEQ ID NO: 51177 - DNA, 600 bp, Chicken  19866894298725_1
cgctgtttgtattgatacattgctttgaaagctataaaaacaaattacagtttttctaaacatgatcaactgaaaatacagcttttaatattacagtgtggtttttaaaaaatggcttaaggtaatgttttgtgtactctgtttaaccttcacattttcagtattgctttgcttttttttttttttagcacaagaatttgaaatagctttgacagaccttaggtggaataaatctgaaacttagagctgtatagctgataatgtgcttctgcaagttaatacctaactgctgcaaagcawgatagaaaactatggccactgaaattttttagtctttctgcagatatagtaattggctctgatctctgcatttcccaggtgatacttacatagcaagcattgtgcaaggagtagcgcaaatgcttcggtgacattggctgtgcccacaaagaaatctttaaagatttgaaggcagtctcagtgtaaatgagtgagaagaaatwtatttcagtattgcaggctttttcctttagcctagaagcttcaataacagctgtcaggaagttcagagtttctttctgatcttcagaatattttttt

SEQ ID NO: 51178 - DNA, 600 bp, Chicken  19866894298725_2
tagctttgacagaccttaggtggaataaatctgaaacttagagctgtatagctgataatgtgcttctgcaagttaatacctaactgctgcaaagcawgatagaaaactatggccactgaaattttttagtctttctgcagatatagtaattggctctgatctctgcatttcccaggtgatacttacatagcaagcattgtgcaaggagtagcgcaaatgcttcggtgacattggctgtgcccacaaagaaatctttaaagatttgaaggcagtctcagtgtaaatgagtgagaagaaatwtatttcagtattgcaggctttttcctttagcctagaagcttcaataacagctgtcaggaagttcagagtttctttctgatcttcagaatatttttttcagtcaagtagtaaggtaaagcaaacaaatgtattcttatgttgattctatatggaacagttagtttttcagcattttgcatatggagaatayattttccttgtggttattgaatgtgcaactgaaagtttaacagaargttttacagaagtgctttttaaagcagacaaaagttaaccttcaggtccagaagtcgctgccct

SEQ ID NO: 51179 - DNA, 600 bp, Chicken  19866894298725_3
caagcattgtgcaaggagtagcgcaaatgcttcggtgacattggctgtgcccacaaagaaatctttaaagatttgaaggcagtctcagtgtaaatgagtgagaagaaatwtatttcagtattgcaggctttttcctttagcctagaagcttcaataacagctgtcaggaagttcagagtttctttctgatcttcagaatatttttttcagtcaagtagtaaggtaaagcaaacaaatgtattcttatgttgattctatatggaacagttagtttttcagcattttgcatatggagaatayattttccttgtggttattgaatgtgcaactgaaagtttaacagaargttttacagaagtgctttttaaagcagacaaaagttaaccttcaggtccagaagtcgctgccctcctgctgtatgcaagacataaaattgaccattgtcgtggagggaaagatgttgatatccagtatacatcaagacttgttgaaaaagagttgttggtttttttttttttttcacaagcttagaaaactgtaacaatctgtagggtttccctgcagatgccgtttttatgtgctttagtaaggtcaaacttt

SEQ ID NO: 51180 - DNA, 600 bp, Chicken  19866894298725_4
gtgcccacaaagaaatctttaaagatttgaaggcagtctcagtgtaaatgagtgagaagaaatwtatttcagtattgcaggctttttcctttagcctagaagcttcaataacagctgtcaggaagttcagagtttctttctgatcttcagaatatttttttcagtcaagtagtaaggtaaagcaaacaaatgtattcttatgttgattctatatggaacagttagtttttcagcattttgcatatggagaatayattttccttgtggttattgaatgtgcaactgaaagtttaacagaargttttacagaagtgctttttaaagcagacaaaagttaaccttcaggtccagaagtcgctgccctcctgctgtatgcaagacataaaattgaccattgtcgtggagggaaagatgttgatatccagtatacatcaagacttgttgaaaaagagttgttggtttttttttttttttcacaagcttagaaaactgtaacaatctgtagggtttccctgcagatgccgtttttatgtgctttagtaaggtcaaactttcaagtagactattcagcagcctaaaggtaaggtgctagttcagcct

SEQ ID NO: 51181 - DNA, 600 bp, Chicken  19866894298730_1
ataaaggttctgtgtgcttaatgtgtggccccaagcgcagtatgtgttagttatgttggtgtgagtgctgtcccatactggtataaagtattagtggtccctgctctaccagcaagtattttttccattgtgtagcactcaacaagaatgaaagtgagctttggcttctctgcttgtcatgtgggtgaaaggagaaggaattgctcaagatacttttctgttgttttgggagaaagtgggctgaggaaactgcagcaaagccagacatctccaactgctgcacagacagagttctgtcarttwaactgagctgatgcatggcttttctccaaatttrgagaagttcaggaatgtgtgaggaccttcttttgctttgaaattattccagagtaacacatacgtttcccttatccctctgaaggttgtttcaataaggcacaggttgtgatcattaccaggggactttgtgggagtattggaatcatgcartcatagaacagaatgcattaagcttatggaggaaagctagatcttaatctcataytctcttgcaggttgggatcagtcagataagtttattaagatttatgtctctttaaa

SEQ ID NO: 51182 - DNA, 600 bp, Chicken  19866894298730_2
aaggttctgtgtgcttaatgtgtggccccaagcgcagtatgtgttagttatgttggtgtgagtgctgtcccatactggtataaagtattagtggtccctgctctaccagcaagtattttttccattgtgtagcactcaacaagaatgaaagtgagctttggcttctctgcttgtcatgtgggtgaaaggagaaggaattgctcaagatacttttctgttgttttgggagaaagtgggctgaggaaactgcagcaaagccagacatctccaactgctgcacagacagagttctgtcatttwaactgagctgatgcatggcttttctccaaatttrgagaagttcaggaatgtgtgaggaccttcttttgctttgaaattattccagagtaacacatacgtttcccttatccctctgaaggttgtttcaataaggcacaggttgtgatcattaccaggggactttgtgggagtattggaatcatgcartcatagaacagaatgcattaagcttatggaggaaagctagatcttaatctcataytctcttgcaggttgggatcagtcagataagtttattaagatttatgtctctttaaatgg

SEQ ID NO: 51183 - DNA, 600 bp, Chicken  19866894298730_3
cagtatgtgttagttatgttggtgtgagtgctgtcccatactggtataaagtattagtggtccctgctctaccagcaagtattttttccattgtgtagcactcaacaagaatgaaagtgagctttggcttctctgcttgtcatgtgggtgaaaggagaaggaattgctcaagatacttttctgttgttttgggagaaagtgggctgaggaaactgcagcaaagccagacatctccaactgctgcacagacagagttctgtcatttwaactgagctgatgcatggcttttctccaaatttrgagaagttcaggaatgtgtgaggaccttcttttgctttgaaattattccagagtaacacatacgtttcccttatccctctgaaggttgtttcaataaggcacaggttgtgatcattaccaggggactttgtgggagtattggaatcatgcartcatagaacagaatgcattaagcttatggaggaaagctagatcttaatctcataytctcttgcaggttgggatcagtcagataagtttattaagatttatgtctctttaaatggagtccagaagcttccagctgagaacgtgcaggtg

SEQ ID NO: 51184 - DNA, 502 bp, Chicken  19866894298730_4
aggagaaggaattgctcaagatacttttctgttgttttgggagaaagtgggctgaggaaactgcagcaaagccagacatctccaactgctgcacagacagagttctgtcatttwaactgagctgatgcatggcttttctccaaatttrgagaagttcaggaatgtgtgaggaccttcttttgctttgaaattattccagagtaacacatacgtttcccttatccctctgaaggttgtttcaataaggcacaggttgtgatcattaccaggggactttgtgggagtattggaatcatgcartcatagaacagaatgcattaagcttatggaggaaagctagatcttaatctcataytctcttgcaggttgggatcagtcagataagtttattaagatttatgtctctttaaatggagtccagaagcttccagctgagaacgtgcaggtgaatttcacagaaaggtgagctcatcttgctgcagtatgccatgagggaaagcat

SEQ ID NO: 51185 - DNA, 447 bp, Chicken  19866894298730_5
ggaaactgcagcaaagccagacatctccaactgctgcacagacagagttctgtcatttwaactgagctgatgcatggcttttctccaaatttrgagaagttcaggaatgtgtgaggaccttcttttgctttgaaattattccagagtaacacatacgtttcccttatccctctgaaggttgtttcaataaggcacaggttgtgatcattaccaggggactttgtgggagtattggaatcatgcartcatagaacagaatgcattaagcttatggaggaaagctagatcttaatctcataytctcttgcaggttgggatcagtcagataagtttattaagatttatgtctctttaaatggagtccagaagcttccagctgagaacgtgcaggtgaatttcacagaaaggtgagctcatcttgctgcagtatgccatgagggaaagcat

SEQ ID NO: 51186 - DNA, 600 bp, Chicken  19866894298741_1
ggaggcaaaactgcggctgaaggagaagttgatctcaccatttttatactttccccatgctccaaatggcactatgacaaccgtgctattatcttcagtgccgtactgcattgcctgaaggaagaaataaattgtcagcatcacggtcctgctcagaaagggaaacaactgtctaactccacataggacagcatgctctgagacttctttgcttcctcccagctccaacactgcaggctcttgcatgcttcagagctttccatgggatataccactgtcaaaaaccttcaatgagaaackgatggtttctgcctacgctgatgacattctcagcagttctgtggaccaagaactaagcacattaattgaaatgacggccctgtgtccttgcaaggatctggcattttgatgcttcaagaaaccctagcattacctgctcagtaacaacgtgggcagcttcagcaggatcgtggcactggttgatgaagtcrcagatctcctgactgttcaccatgaagttaatgccatctgtagtaaggaccaggaagccgtcatctgcatgatgcaactgcaataaaggtatgaagtatgcacaacagt

SEQ ID NO: 51187 - DNA, 600 bp, Chicken  19866894298741_2
catgctctgagacttctttgcttcctcccagctccaacactgcaggctcttgcatgcttcagagctttccatgggatataccactgtcaaaaaccttcaatgagaaackgatggtttctgcctacgctgatgacattctcagcagttctgtggaccaagaactaagcacattaattgaaatgacggccctgtgtccttgcaaggatctggcattttgatgcttcaagaaaccctagcattacctgctcagtaacaacgtgggcagcttcagcaggatcgtggcactggttgatgaagtcrcagatctcctgactgttcaccatgaagttaatgccatctgtagtaaggaccaggaagccgtcatctgcatgatgcaactgcaataaaggtatgaagtatgcacaacagtgaggagagtgctgcaaggcaaaaccgctgccttgatttcttttctttaccctttgttgcaaagtacttttttctgggagtgctgcccgttcttctgctttctgtatgaggactaacagttttacagaacagccctctggatgcagtgaggccaaaagaccagagccacacattacccatgaggatttcaag

SEQ ID NO: 51188 - DNA, 600 bp, Chicken  19866894298750_1
agagctcatcccctcctagttttggtaggtccaaatgaggcttctcattgtattttcccttttgcagtcaaagctgagtgaggtggcagagctggatctcagcagtctggttcctgagcttctggcagaactcaaacaactgataccagcaccagaaaggtgtgcttttgaggtgcaacagggactttgcttattcatgttcgcttctttgttcctcataattacatttgaacttcctgaagtattctgtattctgaagtattcctgaagtattctgaagtatcagatattactgacccmaaaaccaatscaaagagctccattgctcattcttgagggtaggagcctgcaaatgtgacagagattytcattyccaacattttacagtgctcagtaaccttagatgaactgagagagtgaaagagaaataaaaatagtagtagaggggctgtgctctccattagcagtgttcagcttagcacactctgaggcagtctccagcccccttcagcagaagcataggtcgaatgatggctacagctttctgctgtagctaattcccccatctgctgctgcacatttgtgtttcagcctggttac

SEQ ID NO: 51189 - DNA, 600 bp, Chicken  19866894298750_2
ccctcctagttttggtaggtccaaatgaggcttctcattgtattttcccttttgcagtcaaagctgagtgaggtggcagagctggatctcagcagtctggttcctgagcttctggcagaactcaaacaactgataccagcaccagaaaggtgtgcttttgaggtgcaacagggactttgcttattcatgttcgcttctttgttcctcataattacatttgaacttcctgaagtattctgtattctgaagtattcctgaagtattctgaagtatcagatattactgacccmaaaaccaatscaaagagctccattgctcattcttgagggtaggagcctgcaaatgtgacagagattytcattyccaacattttacagtgctcagtaaccttagatgaactgagagagtgaaagagaaataaaaatagtagtagaggggctgtgctctccattagcagtgttcagcttagcacactctgaggcagtctccagcccccttcagcagaagcataggtcgaatgatggctacagctttctgctgtagctaattcccccatctgctgctgcacatttgtgtttcagcctggttacacagagacca

SEQ ID NO: 51190 - DNA, 600 bp, Chicken  19866894298750_3
tcaaagctgagtgaggtggcagagctggatctcagcagtctggttcctgagcttctggcagaactcaaacaactgataccagcaccagaaaggtgtgcttttgaggtgcaacagggactttgcttattcatgttcgcttctttgttcctcataattacatttgaacttcctgaagtattctgtattctgaagtattcctgaagtattctgaagtatcagatattactgacccmaaaaccaatscaaagagctccattgctcattcttgagggtaggagcctgcaaatgtgacagagattytcattyccaacattttacagtgctcagtaaccttagatgaactgagagagtgaaagagaaataaaaatagtagtagaggggctgtgctctccattagcagtgttcagcttagcacactctgaggcagtctccagcccccttcagcagaagcataggtcgaatgatggctacagctttctgctgtagctaattcccccatctgctgctgcacatttgtgtttcagcctggttacacagagaccagtgcctggacttggttctgggggccccagctgctgccctgcatggggatgctcagca

SEQ ID NO: 51191 - DNA, 600 bp, Chicken  19866894298750_4
ctgagtgaggtggcagagctggatctcagcagtctggttcctgagcttctggcagaactcaaacaactgataccagcaccagaaaggtgtgcttttgaggtgcaacagggactttgcttattcatgttcgcttctttgttcctcataattacatttgaacttcctgaagtattctgtattctgaagtattcctgaagtattctgaagtatcagatattactgacccmaaaaccaatscaaagagctccattgctcattcttgagggtaggagcctgcaaatgtgacagagattytcattyccaacattttacagtgctcagtaaccttagatgaactgagagagtgaaagagaaataaaaatagtagtagaggggctgtgctctccattagcagtgttcagcttagcacactctgaggcagtctccagcccccttcagcagaagcataggtcgaatgatggctacagctttctgctgtagctaattcccccatctgctgctgcacatttgtgtttcagcctggttacacagagaccagtgcctggacttggttctgggggccccagctgctgccctgcatggggatgctcagcagccaag

SEQ ID NO: 51192 - DNA, 600 bp, Chicken  19866894298752_1
agtatgtggtgataacagggtaccacagtccagggcactgtaatgtcaaagggaagaatcaaggccctgaaataggtacctatagccttgtgattaaggcaggcttctggaacacagcaagcatggagcttaatctcttttatttgatggagaaatttaacccaggtctcccacttgctgagagagcattttacataagaatggtgatttttctctgctctgttctgtaaaagaactcctcctggttaccagatagacagaaacacacgcataatgtcttaagaaggatggcagaagtcytggggaaaggaatggggagctttgtagtttgcatttcattaagcttttgttccctattactgtgtggcttcatttttaatgactgatactacacytacctcttccattgcactgcactgggatctgtggcatatgcatgatgacagggcagtggtgggaggtgctttaaagatgcctgcttcaacatagacgttgacatctatcagtaaatacagttctttgccctattctcctgaaactgaagggaaagttcaggcttatggctgacatgtggccagaggaagggatgggagcccctgc

SEQ ID NO: 51193 - DNA, 600 bp, Chicken  19866894298752_2
aaggcaggcttctggaacacagcaagcatggagcttaatctcttttatttgatggagaaatttaacccaggtctcccacttgctgagagagcattttacataagaatggtgatttttctctgctctgttctgtaaaagaactcctcctggttaccagatagacagaaacacacgcataatgtcttaagaaggatggcagaagtcytggggaaaggaatggggagctttgtagtttgcatttcattaagcttttgttccctattactgtgtggcttcatttttaatgactgatactacacytacctcttccattgcactgcactgggatctgtggcatatgcatgatgacagggcagtggtgggaggtgctttaaagatgcctgcttcaacatagacgttgacatctatcagtaaatacagttctttgccctattctcctgaaactgaagggaaagttcaggcttatggctgacatgtggccagaggaagggatgggagcccctgccactgggagactgccatgtgtaatctgtaccccattcagtggggagggatcactcatctctgtttttctggctctgacccatttttcttaaaagg

SEQ ID NO: 51194 - DNA, 600 bp, Chicken  19866894298756_1
agacataatatcagaaaattcaacatgagcaaaatcaaatattatcgttggcaagaaatagtgaatgtgagctagcagcagaatcaaaaatacctcctcaagatctcctatgagggagtactcttcgccaagaaaaatgtcacagtccagaatacagttcaaaactttagtttaattattgtaacaaaaacacttattttagtttactctgctttaacataggatgaaaaaaaccacagattggatattttatccttctactgtgccagttaataaaacagaagagcttagcatgatatwtgtgttgtaaatccatgtccagraatatctgtaactacctaacaaaatagccactaaaaaaaaaaaaaaggttgaataagcagcttttggaacgagactacacctctgtgctcagaactaccttcagaaatctttaagttgctaagcagcacaagacaaagcctatcttttagcacaatcacagaaatgccagagagtgaatgtttgcaatgtttgctgtgaagagtatgtataggaaggaaaataagagactgtaagagctggttttaaattacctttatccttcactccaaatcttat

SEQ ID NO: 51195 - DNA, 600 bp, Chicken  19866894298756_2
catgagcaaaatcaaatattatcgttggcaagaaatagtgaatgtgagctagcagcagaatcaaaaatacctcctcaagatctcctatgagggagtactcttcgccaagaaaaatgtcacagtccagaatacagttcaaaactttagtttaattattgtaacaaaaacacttattttagtttactctgctttaacataggatgaaaaaaaccacagattggatattttatccttctactgtgccagttaataaaacagaagagcttagcatgatatwtgtgttgtaaatccatgtccagraatatctgtaactacctaacaaaatagccactaaaaaaaaaaaaaaggttgaataagcagcttttggaacgagactacacctctgtgctcagaactaccttcagaaatctttaagttgctaagcagcacaagacaaagcctatcttttagcacaatcacagaaatgccagagagtgaatgtttgcaatgtttgctgtgaagagtatgtataggaaggaaaataagagactgtaagagctggttttaaattacctttatccttcactccaaatcttatacttaacatatgataacctcagg

SEQ ID NO: 51196 - DNA, 599 bp, Chicken  19866894298762_1
  misc_feature (1)..(87): n is any nucleotide
nnnnnnnnnnnnnnnnnnnnnnnnnnnnnnnnnnnnnnnnnnnnnnnnnnnnnnnnnnnnnnnnnnnnnnnnnnnnnnnnnnnnnnnccatgctcctcaccccatcactctggctcagtattgggcagggatttccccaaacctatccagtaaacgagctccatttccttagatactcaggcagacaagttgactgtgacacccaaccattacatcatggttctgcccactgttttctgccatgtcccagtgatgcccaaggaaaaattaagcccccaaacttcccttacttcctcaaawgaagaaaacctgaacgtcgctcagaatcactgccaaagcccccmgctctgcttccagcactacagcccaagtcagagcatcaagatagagcagcagacatggcgcttctcattttcattccaatttagttcagcatcctcaagaagcaaagccacgtgcaggcactgatagtggatttcatacaaagcaatcagaacgcaataatattctccccagtaaacgtcccggcaaaaagcctgggagacattgacattatttgcatctttattgttcctgagcaatagagcaatgatgtcgcc

SEQ ID NO: 51197 - DNA, 599 bp, Chicken  19866894298762_2
  misc_feature (1)..(43): n is any nucleotide
nnnnnnnnnnnnnnnnnnnnnnnnnnnnnnnnnnnnnnnnnnnccatgctcctcaccccatcactctggctcagtattgggcagggatttccccaaacctatccagtaaacgagctccatttccttagatactcaggcagacaagttgactgtgacacccaaccattacatcatggttctgcccactgttttctgccatgtcccagtgatgcccaaggaaaaattaagcccccaaacttcccttacttcctcaaawgaagaaaacctgaacgtcgctcagaatcactgccaaagcccccmgctctgcttccagcactacagcccaagtcagagcatcaagatagagcagcagacatggcgcttctcattttcattccaatttagttcagcatcctcaagaagcaaagccacgtgcaggcactgatagtggatttcatacaaagcaatcagaacgcaataatattctccccagtaaacgtcccggcaaaaagcctgggagacattgacattatttgcatctttattgttcctgagcaatagagcaatgatgtcgccgtgttttgactaaatagacgaagagagatgttttgttgcttcct

SEQ ID NO: 51198 - DNA, 600 bp, Chicken  19866894298764_1
tatttctgctcacagaggaataaggaaatgacattataaagaaaatgttacttcaggagcctcatatgccactgttatttcagatgctcattttcagacccctgtggagtttgactgaattagctgcttagaaatatcagttatctgcatcttgcttgaaacccgggtgctcttcatgaagtaacttttctttttacagaagtgctgtttgcagcaccttgaaagcatctataatcaaataatgagaaatatgtaaaaaaaatgaagatgagtcatgttaaaggtattcattatcacaaytgattgtagtcagcactgtaaaaaggaacgaataaacaccaacatctgtctaggtcttccaaggtcgcagacaaacctagacrtcttatctatgccttrgactgactgttttgaatgagtttatgagggtcctaaaacaagactgaggaatagttgtggtaaattacatgactctataaccagacataagactgatgaagaaaaccagtaagtccttgttgctctatagactccaggcaataggtaagctgattcattctctgaaaagttgtaaaatgcatctgtcactgatttttatgc

SEQ ID NO: 51199 - DNA, 600 bp, Chicken  19866894298764_2
atgctcattttcagacccctgtggagtttgactgaattagctgcttagaaatatcagttatctgcatcttgcttgaaacccgggtgctcttcatgaagtaacttttctttttacagaagtgctgtttgcagcaccttgaaagcatctataatcaaataatgagaaatatgtaaaaaaaatgaagatgagtcatgttaaaggtattcattatcacaaytgattgtagtcagcactgtaaaaaggaacgaataaacaccaacatctgtctaggtcttccaaggtcgcagacaaacctagacrtcttatctatgccttrgactgactgttttgaatgagtttatgagggtcctaaaacaagactgaggaatagttgtggtaaattacatgactctataaccagacataagactgatgaagaaaaccagtaagtccttgttgctctatagactccaggcaataggtaagctgattcattctctgaaaagttgtaaaatgcatctgtcactgatttttatgctggattcttaaaaggccagggtacattatcctgactatctcttgcccagtaatctattctcatctaatggccttttagagcaa

SEQ ID NO: 51200 - DNA, 600 bp, Chicken  19866894298764_3
ccctgtggagtttgactgaattagctgcttagaaatatcagttatctgcatcttgcttgaaacccgggtgctcttcatgaagtaacttttctttttacagaagtgctgtttgcagcaccttgaaagcatctataatcaaataatgagaaatatgtaaaaaaaatgaagatgagtcatgttaaaggtattcattatcacaaytgattgtagtcagcactgtaaaaaggaacgaataaacaccaacatctgtctaggtcttccaaggtcgcagacaaacctagacrtcttatctatgccttrgactgactgttttgaatgagtttatgagggtcctaaaacaagactgaggaatagttgtggtaaattacatgactctataaccagacataagactgatgaagaaaaccagtaagtccttgttgctctatagactccaggcaataggtaagctgattcattctctgaaaagttgtaaaatgcatctgtcactgatttttatgctggattcttaaaaggccagggtacattatcctgactatctcttgcccagtaatctattctcatctaatggccttttagagcaaaggattctggctgaca

SEQ ID NO: 51201 - DNA, 599 bp, Chicken  19866894298768_1
  misc_feature (1)..(38): n is any nucleotide
nnnnnnnnnnnnnnnnnnnnnnnnnnnnnnnnnnnnnnttctggattttggcaccttccgccttgctccttccagtggttgcctttgagttttcagtgaaatgctgggagcaaggacatcagttgttcagcctgtccttcaggcagggtgcggctggtggctgagctcagagcagtgcatttgggtcagcctgggatggtcacctggggctgcagcagctcaagagagctgaggacagtggcagcacctggtgccactggtggctatgctcaggtggagtgctgtccttgtcaccaattrggagccctgtgcagctttcacttagtgggtccattcctctcaagtcatcttcayttgcatccagycctcacgttgacctctctgtttgcaataatgataacagagcagaacagaactcctctcacacgtagcaaacctctaccaagaacctgctcatggctcasccagcagctggatgtaggtggctaatgccatcctccctcccatgttgtcccttcctgagaascctatgcccatcactggtgttgggggctgcaccaagatgtatttgcactgggagtttgggttcctggagcaga

SEQ ID NO: 51202 - DNA, 600 bp, Chicken  19866894298768_2
cttccgccttgctccttccagtggttgcctttgagttttcagtgaaatgctgggagcaaggacatcagttgttcagcctgtccttcaggcagggtgcggctggtggctgagctcagagcagtgcatttgggtcagcctgggatggtcacctggggctgcagcagctcaagagagctgaggacagtggcagcacctggtgccactggtggctatgctcaggtggagtgctgtccttgtcaccaattrggagccctgtgcagctttcacttagtgggtccattcctctcaagtcatcttcayttgcatccagycctcacgttgacctctctgtttgcaataatgataacagagcagaacagaactcctctcacacgtagcaaacctctaccaagaacctgctcatggctcasccagcagctggatgtaggtggctaatgccatcctccctcccatgttgtcccttcctgagaascctatgcccatcactggtgttgggggctgcaccaagatgtatttgcactgggagtttgggttcctggagcagagattccccccttcagcttcccacactgagcatcaagagcaaaccctcacctggag

SEQ ID NO: 51203 - DNA, 600 bp, Chicken  19866894298768_3
ctccttccagtggttgcctttgagttttcagtgaaatgctgggagcaaggacatcagttgttcagcctgtccttcaggcagggtgcggctggtggctgagctcagagcagtgcatttgggtcagcctgggatggtcacctggggctgcagcagctcaagagagctgaggacagtggcagcacctggtgccactggtggctatgctcaggtggagtgctgtccttgtcaccaattrggagccctgtgcagctttcacttagtgggtccattcctctcaagtcatcttcayttgcatccagycctcacgttgacctctctgtttgcaataatgataacagagcagaacagaactcctctcacacgtagcaaacctctaccaagaacctgctcatggctcasccagcagctggatgtaggtggctaatgccatcctccctcccatgttgtcccttcctgagaascctatgcccatcactggtgttgggggctgcaccaagatgtatttgcactgggagtttgggttcctggagcagagattccccccttcagcttcccacactgagcatcaagagcaaaccctcacctggagtgcacaaaaga

SEQ ID NO: 51204 - DNA, 600 bp, Chicken  19866894298768_4
gctcagagcagtgcatttgggtcagcctgggatggtcacctggggctgcagcagctcaagagagctgaggacagtggcagcacctggtgccactggtggctatgctcaggtggagtgctgtccttgtcaccaattrggagccctgtgcagctttcacttagtgggtccattcctctcaagtcatcttcayttgcatccagycctcacgttgacctctctgtttgcaataatgataacagagcagaacagaactcctctcacacgtagcaaacctctaccaagaacctgctcatggctcasccagcagctggatgtaggtggctaatgccatcctccctcccatgttgtcccttcctgagaascctatgcccatcactggtgttgggggctgcaccaagatgtatttgcactgggagtttgggttcctggagcagagattccccccttcagcttcccacactgagcatcaagagcaaaccctcacctggagtgcacaaaagaaggaataatttgtagataacttttgagtttcatcatctggaagaattaatcaaacctggatgaagcacccattcagactgctggatacactgtgccatt

SEQ ID NO: 51205 - DNA, 600 bp, Chicken  19866894298768_5
agctgaggacagtggcagcacctggtgccactggtggctatgctcaggtggagtgctgtccttgtcaccaattrggagccctgtgcagctttcacttagtgggtccattcctctcaagtcatcttcayttgcatccagycctcacgttgacctctctgtttgcaataatgataacagagcagaacagaactcctctcacacgtagcaaacctctaccaagaacctgctcatggctcasccagcagctggatgtaggtggctaatgccatcctccctcccatgttgtcccttcctgagaascctatgcccatcactggtgttgggggctgcaccaagatgtatttgcactgggagtttgggttcctggagcagagattccccccttcagcttcccacactgagcatcaagagcaaaccctcacctggagtgcacaaaagaaggaataatttgtagataacttttgagtttcatcatctggaagaattaatcaaacctggatgaagcacccattcagactgctggatacactgtgccattgtcaagtgcagttaggctgagccagggctgaatcagaactgctctggccaaagctcagagct

SEQ ID NO: 51206 - DNA, 600 bp, Chicken  19866894298770_1
ggcctgctcagatgtggttccctcagcatggccttccgagtgcagagaggccacacactgttcctgtccccagtggctgctccccgactgctgttcccaggctttgcctcacttgccaccgactgcaggaagatcacaaaaccacagaattgtagtggttgaaagggatctctggagatctagtccaaaccgctgcaaaagcacattccccgtggtaggttccacagaaaagcatctaggcaggttttgaagaggaagaggagaattcacaacctctctgggcagcttgttgcagtaaaraagctcttgtttttgtacggaacttaagataactgtaggacctgccttggttctgggggcataaatgcagagtaaccttgtcaacccgggcctactgtaactgggatgacagtctatcttcagatattgcttgactaatggttttcagatgaaaaagtgaggtaatactagtttgagatgagttcctagtgaattggtgtctgtattgctaagcaagttgcaccctaactgcgactgctttcagtggtcctcccacctcaggatttaagatgttctccttgggactgggaaaagtgctgg

SEQ ID NO: 51207 - DNA, 600 bp, Chicken  19866894298781_1
taccatgctctggatgtttggaagttcagtggcaaggagagtcaggcagccgttgcatgaccttctgtggttttgaggtgctttggggagcgcagaggaccccccaagagcaggggcagactcacagaagttaacgtggtgccaccaagacgtgtcaagcagcctctgaagatgggagccgttgcccatccttggctgtggtggccagtaggtgcccaatgcagagcctcctgccagcctcagtcatctgctgatgttccccggccataagctgagggagaccggcgtgtgtgagtcacygggctctgctggctgccatccacgtgctccatttggtgctgctttgtgtgtgtgagagcgtgctccctctcccagctgtgtgtgcttgcctgccagctcgcggctgattgcctttgcagctgtgcyggtttttgcctctcttggagctctgagagccttgtccatggatgaggggaaaggaggaggaggacaaggaagagggagggaaaatgaaagataaattaataaaccagcagaatgagagatgccctatagaagaggatgtctgcttgcagagctgttgatcccccaggcatgtgg

SEQ ID NO: 51208 - DNA, 600 bp, Chicken  19866894298781_2
gaagttaacgtggtgccaccaagacgtgtcaagcagcctctgaagatgggagccgttgcccatccttggctgtggtggccagtaggtgcccaatgcagagcctcctgccagcctcagtcatctgctgatgttccccggccataagctgagggagaccggcgtgtgtgagtcacygggctctgctggctgccatccacgtgctccatttggtgctgctttgtgtgtgtgagagcgtgctccctctcccagctgtgtgtgcttgcctgccagctcgcggctgattgcctttgcagctgtgcyggtttttgcctctcttggagctctgagagccttgtccatggatgaggggaaaggaggaggaggacaaggaagagggagggaaaatgaaagataaattaataaaccagcagaatgagagatgccctatagaagaggatgtctgcttgcagagctgttgatcccccaggcatgtggtgtgctgttgtccccaccacgcctccagcaccagcaagcagaagatgtcatctccccacacyttcctgaagatgggcagaggtccctgctggaagcccctctgcttggcacggggctgctcgctcc

SEQ ID NO: 51209 - DNA, 532 bp, Chicken  19866894298781_3
ctccctctcccagctgtgtgtgcttgcctgccagctcgcggctgattgcctttgcagctgtgcyggtttttgcctctcttggagctctgagagccttgtccatggatgaggggaaaggaggaggaggacaaggaagagggagggaaaatgaaagataaattaataaaccagcagaatgagagatgccctatagaagaggatgtctgcttgcagagctgttgatcccccaggcatgtggtgtgctgttgtccccaccacgcctccagcaccagcaagcagaagatgtcatctccccacacyttcctgaagatgggcagaggtccctgctggaagcccctctgcttggcacggggctgctcgctcctctgggcaccacagtgattcccaaggccttgtctcagggctttgcactcaacccttcttccggggctgcttctctctccgtgtggtgagggaggacaccttccctgcacatagatggacgggaccatcctcagtaggactcacaccatggcaccttgcaggggaacag

SEQ ID NO: 51210 - DNA, 599 bp, Chicken  19866894298784_1
  misc_feature (1)..(53): n is any nucleotide
nnnnnnnnnnnnnnnnnnnnnnnnnnnnnnnnnnnnnnnnnnnnnnnnnnnnnaaaaggaggtggagaggctgatcacagccacctgaacatgagccagaagtgtgcacaggtggccaagaagggcaatggcagcctggcctacgttgaaatagtctggccagcaggagtagggaagtgtttgtcccctggtacatggcactggtgacactacacctcaaacactgacttcagtttggtgcccctcattatgagaaggattttgagttgcctgtgttgagtatgtgaagagaagaaaagytaagatggtgaaggaaccagaaacaaagttatgaggagtgactgagagaactggggctygtttgttctggaggaagttcaggggagactctcgtcactctctacaacttcctgaaaggagtctgaagtgaggacatctgtttgtctcttttcttaggttacaggtaactgagtgtaaagaaatggtctcaaattgcaccaggggagatttagatagaatattaggaataatttcttcacttgaaatcgtggttaggcattggaacaggctgcccaaaaaaggggtgaagtccccatccc

SEQ ID NO: 51211 - DNA, 600 bp, Chicken  19866894298784_2
aggtggagaggctgatcacagccacctgaacatgagccagaagtgtgcacaggtggccaagaagggcaatggcagcctggcctacgttgaaatagtctggccagcaggagtagggaagtgtttgtcccctggtacatggcactggtgacactacacctcaaacactgacttcagtttggtgcccctcattatgagaaggattttgagttgcctgtgttgagtatgtgaagagaagaaaagytaagatggtgaaggaaccagaaacaaagttatgaggagtgactgagagaactggggctygtttgttctggaggaagttcaggggagactctcgtcactctctacaacttcctgaaaggagtctgaagtgaggacatctgtttgtctcttttcttaggttacaggtaactgagtgtaaagaaatggtctcaaattgcaccaggggagatttagatagaatattaggaataatttcttcacttgaaatcgtggttaggcattggaacaggctgcccaaaaaaggggtgaagtccccatccctggaggtatttcagagatgtgtggatgtaacactaagggacatggtttagtgatggaact

SEQ ID NO: 51212 - DNA, 600 bp, Chicken  19866894298786_1
cagaatggagggcatggtgagatgtgccagaccagctctgtggggccctttgggagcctgaaggaagatggatgtgtgtgattgctggtggatccctgagcagatcagggcctctggtctatgggaatacagagagacacgtgtgctgcagcccagggcaggtgagtgtgcacagctctctgttaaacagcagccacttcctgtgatgacatgaatcgaatttgcagccagttgtctcaccaggggaacccaaagcaggagcagagacagatgaaacagctataggtttgctttgcagtygcttgcccattgccagtagatttccatattttaagagaaagctagaagcttagttttgttgctgaatggggggattctctaccagatcacccacagttggaaatggactatccaaaactcctaagctggcatcttttgaaaagccatgattttattcagccacaaattcactgagtgcaatgtatgacagtcagggtgagattttatgtcccctttatgccactttgatgacacaaggacagcaacttccccagaaatgcacctagcctctctaacaggaactgtggctttggaattgca

SEQ ID NO: 51213 - DNA, 600 bp, Chicken  19866894298791_1
gtacaggcttcagacaagcttttcttaccacaatggtaagtattctacatctttatattcccttttgtagttatttttgaaactcaggaatctgcaggaacaaaaatagaaccctctggaaccaagctaaaaacagagtgctggaatgtagcttagacttcagtttcagctattaagtcctctctactcatttttccaattgtaagtaagagcaaaacacctccagaattccaatgaaaaaaagctgcactccatactgcagcctcctagctatactgtcttggcatagaaagcacaagkgctcctttcaagtcctgcaacttgctatttatccaataccactacacccagaaaaatcaggcactacatgtctatacttaccaaggtttcctacacggcctgtacgaccaatacggtgcacrtattcttcaatgtcactcggcaagtcaaagtttatgacatgctttacatttgatatatccagtcctcttgctgctacctagtagttaraagagtaaagaaatcatctctgggctgagttcattgagataataagcctactgactcaaacttcagaaattggacttactgccgtggcta

SEQ ID NO: 51214 - DNA, 578 bp, Chicken  19866894298791_2
caagctaaaaacagagtgctggaatgtagcttagacttcagtttcagctattaagtcctctctactcatttttccaattgtaagtaagagcaaaacacctccagaattccaatgaaaaaaagctgcactccatactgcagcctcctagctatactgtcttggcatagaaagcacaagkgctcctttcaagtcctgcaacttgctatttatccaataccactacacccagaaaaatcaggcactacatgtctatacttaccaaggtttcctacacggcctgtacgaccaatacggtgcacrtattcttcaatgtcactcggcaagtcaaagtttatgacatgctttacatttgatatatccagtcctcttgctgctacctagtagttaraagagtaaagaaatcatctctgggctgagttcattgagataataagcctactgactcaaacttcagaaattggacttactgccgtggctacaagaattgggctcttgcccgaacggaactgatggagtgcttcctctctgtctctttgagaacgatctccatgtatactcgtacaggcatatccttcatg

SEQ ID NO: 51215 - DNA, 490 bp, Chicken  19866894298791_3
agcaaaacacctccagaattccaatgaaaaaaagctgcactccatactgcagcctcctagctatactgtcttggcatagaaagcacaagkgctcctttcaagtcctgcaacttgctatttatccaataccactacacccagaaaaatcaggcactacatgtctatacttaccaaggtttcctacacggcctgtacgaccaatacggtgcacrtattcttcaatgtcactcggcaagtcaaagtttatgacatgctttacatttgatatatccagtcctcttgctgctacctagtagttaraagagtaaagaaatcatctctgggctgagttcattgagataataagcctactgactcaaacttcagaaattggacttactgccgtggctacaagaattgggctcttgcccgaacggaactgatggagtgcttcctctctgtctctttgagaacgatctccatgtatactcgtacaggcatatccttcatg

SEQ ID NO: 51216 - DNA, 599 bp, Chicken  19866894298793_1
  misc_feature (1)..(5): n is any nucleotide
nnnnngtttcctacacggcctgtacgaccaatacggtgcacatattcttcaatgtcactcggcaagtcaaagtttatgacatgctttacatttgatatatccagtcctcttgctgctacctagtagttagaagagtaaagaaatcatccctgggctgagttcattgagacaataagcttactgacacaaacttcagaaattggacttactgccgtggctacaagaattgggctcttgcccgaacggaactgatggagtgcttcctctctgtctctttgagaacgatctccatgtatactygtacaggcatatccttcatggtagagaaagtcctctagagcatctgctccctttttagtttccacaaacacgagagtcaaggaatccttgcctaagaataaatgaaccacaagtttacaagagaaaagctgtacagacaattacatcatagtctggaagaaggcagctttagttctctgcttcctattactctaaactgaagatcagctttcttattttgtattactgaaagttttcatcaacacagaaccaccattcagccaatgcaagacattcactgcatgctgcggaaacacaaa

SEQ ID NO: 51217 - DNA, 600 bp, Chicken  19866894298795_1
actgtcctacatgcacaggttggtagatgcaacgccctcagtgcatggataagagtgcatacaaaactagcaattataaaaaaaaccaccaaaccaatccaccactttttcacacttgtgactaattaggttttacagcttgctcctgtatcccttatccacataaacagcattgctgccttcagtgccagctggcagagtaaggctcttatataacgataagtgttgaaagatgggatatgttcagtttgaggtgcctccacacctacgtcttaacagctgctcttttcttttccctgrgatacagaaatgcacaaactgcacatcacccttttctccccaccaagtccataatccgagattaaccaacagccacttccccatctttctcacagccaacatttccccaggccagccctttagataaagccacatacgtacaaaaaacctttttctcagctaggaaaatacagaaatatcacttctgcaggtttggcagctaccactgcctttaggatgcaggctgcattcagctctgtgagcattctccctaagctaagctccccagctcactctgtttttcttacagaagtgatcgtg

SEQ ID NO: 51218 - DNA, 599 bp, Chicken  19866894298817_1
  misc_feature (1)..(2): n is any nucleotide
nnattctgggagaggagactctgttagtgagaatggagagacgcagaaggctgggctggttgtaccaacaagcccgaaggggaaagtcctggacaggcgctcccgctctgggaaaggaagaggtcttccaaagaaaggttggtgtaatttggtgatgagagtaccgtgataaagattctgtccagagtgtagtggtgtttttactgggaattgtattcacaacccacagtcattgtgcaggcattttgttcttaggtagtggcgataggagttaatagtaagtggaatcttaccaggaaraaaatgtgtgtattgttaagtaacttcagactttaagtatcttctgttagtaaattgaatacayaggcttgaactgttgtggtcaagtggttcacagaactgttactaatgtaaactgaaggcttgaytatatttaaaaatacagttgtttcaaccttcagtaattcttgtgcacttctgtgcacactacttctaatatcttaatggaaagtgatgaaaaaactagttgctgaacatgccatacagwcacttctgccattttcagcatacgttgccacagtcagtggctgcaagtgcac

SEQ ID NO: 51219 - DNA, 600 bp, Chicken  19866894298817_2
ccaacaagcccgaaggggaaagtcctggacaggcgctcccgctctgggaaaggaagaggtcttccaaagaaaggttggtgtaatttggtgatgagagtaccgtgataaagattctgtccagagtgtagtggtgtttttactgggaattgtattcacaacccacagtcattgtgcaggcattttgttcttaggtagtggcgataggagttaatagtaagtggaatcttaccaggaaraaaatgtgtgtattgttaagtaacttcagactttaagtatcttctgttagtaaattgaatacayaggcttgaactgttgtggtcaagtggttcacagaactgttactaatgtaaactgaaggcttgaytatatttaaaaatacagttgtttcaaccttcagtaattcttgtgcacttctgtgcacactacttctaatatcttaatggaaagtgatgaaaaaactagttgctgaacatgccatacagwcacttctgccattttcagcatacgttgccacagtcagtggctgcaagtgcacctgtgtgtgaaagaatgttgggttgagttcaaagtctcgtttgtaaactgtctgtccttgcttag

SEQ ID NO: 51220 - DNA, 600 bp, Chicken  19866894298817_3
caaagaaaggttggtgtaatttggtgatgagagtaccgtgataaagattctgtccagagtgtagtggtgtttttactgggaattgtattcacaacccacagtcattgtgcaggcattttgttcttaggtagtggcgataggagttaatagtaagtggaatcttaccaggaaraaaatgtgtgtattgttaagtaacttcagactttaagtatcttctgttagtaaattgaatacayaggcttgaactgttgtggtcaagtggttcacagaactgttactaatgtaaactgaaggcttgaytatatttaaaaatacagttgtttcaaccttcagtaattcttgtgcacttctgtgcacactacttctaatatcttaatggaaagtgatgaaaaaactagttgctgaacatgccatacagwcacttctgccattttcagcatacgttgccacagtcagtggctgcaagtgcacctgtgtgtgaaagaatgttgggttgagttcaaagtctcgtttgtaaactgtctgtccttgcttagttgctcacagttctctattttgccaggtggagcaggtggtaagggagtctggggaacaccaggt

SEQ ID NO: 51221 - DNA, 600 bp, Chicken  19866894298817_4
gttcttaggtagtggcgataggagttaatagtaagtggaatcttaccaggaaraaaatgtgtgtattgttaagtaacttcagactttaagtatcttctgttagtaaattgaatacayaggcttgaactgttgtggtcaagtggttcacagaactgttactaatgtaaactgaaggcttgaytatatttaaaaatacagttgtttcaaccttcagtaattcttgtgcacttctgtgcacactacttctaatatcttaatggaaagtgatgaaaaaactagttgctgaacatgccatacagwcacttctgccattttcagcatacgttgccacagtcagtggctgcaagtgcacctgtgtgtgaaagaatgttgggttgagttcaaagtctcgtttgtaaactgtctgtccttgcttagttgctcacagttctctattttgccaggtggagcaggtggtaagggagtctggggaacaccaggtcaagtgtatgatgtggaagaagtagatattaaggatcctaattatgatgatgaccaggtaggcaaacaaacttctttgctcagtgcttgttttgattttatattaattaaaattactgt

SEQ ID NO: 51222 - DNA, 600 bp, Chicken  19866894298819_1
ccccccatagattatttcttccactgaagttgtttctttatatatggtttggcaactatttctgcctagtgcacaatgctcatcactagctctagagtgcacaagaaacactgttaatatcaactaacccaaatggctactgaactgacaaagcagactaccatacagcaaaacagtgggcactgacaggagaccatcggggcaggagatgggctcagctccatgctgcagtgcctccagaagccaggctgctgctgctgctggagcccagctcctgagcagggggtgggagcacacacrtcgaagcagtgctgggtggggccaggaagcactccacatagtgtgcaaagggtttcatcagctgcagcctttctctcccagagcaagggcagagcctctcaggaagcagagaatgatgcaaagtacagstgtagttgcatgcgctgtttccctttcgtttcagagcagcaccatcctacttccagctgttgagctgctcttccaccagccaacattctcccctgtgctaggaagctgccatactgctgtcagtggccatctagtatgtagcatgacagttgcaagatgcaaagctggtgc

SEQ ID NO: 51223 - DNA, 600 bp, Chicken  19866894298819_2
caaatggctactgaactgacaaagcagactaccatacagcaaaacagtgggcactgacaggagaccatcggggcaggagatgggctcagctccatgctgcagtgcctccagaagccaggctgctgctgctgctggagcccagctcctgagcagggggtgggagcacacacrtcgaagcagtgctgggtggggccaggaagcactccacatagtgtgcaaagggtttcatcagctgcagcctttctctcccagagcaagggcagagcctctcaggaagcagagaatgatgcaaagtacagstgtagttgcatgcgctgtttccctttcgtttcagagcagcaccatcctacttccagctgttgagctgctcttccaccagccaacattctcccctgtgctaggaagctgccatactgctgtcagtggccatctagtatgtagcatgacagttgcaagatgcaaagctggtgctggtgtgtgcagcaagctctgctggcagcgagcagaggaaggaattacagagtccctcccattaatgacagccttcaccttgcaaagtgacaagtttcctgaagtcctcacagaaagaaaaatagcaac

SEQ ID NO: 51224 - DNA, 600 bp, Chicken  19866894298819_3
gtcagtggccatctagtatgtagcatgacagttgcaagatgcaaagctggtgctggtgtgtgcagcaagctctgctggcagcgagcagaggaaggaattacagagtccctcccattaatgacagccttcaccttgcaaagtgacaagtttcctgaagtcctcacagaaagaaaaatagcaaccagtctggcagggttgcctcacagtcctctgacagcaacacacctcatttcctaagtgtctggcaagaccggccttagcaggtactgctgctggtcacaaaaacaagctgagaacacrcagccactcagtgacacacatcrcttccacggggaagcccttctgcctcttgtcccaagggaacaacgcgttctcagggagatcacagcagctgcaaaccccttgataaggttgaagctattttaaaagcaagccaccagttaggtccgtgccctagaacacatccctttaattaggctccagggcaacttgtgacagcgaggaagccccagccacaggcagtcccgcccccagcagccagaagagctgtgctcacggtgacgtgagggtgacgtggctgcctgtcaccgcaggcttcct

SEQ ID NO: 51225 - DNA, 600 bp, Chicken  19866894298819_4
catgacagttgcaagatgcaaagctggtgctggtgtgtgcagcaagctctgctggcagcgagcagaggaaggaattacagagtccctcccattaatgacagccttcaccttgcaaagtgacaagtttcctgaagtcctcacagaaagaaaaatagcaaccagtctggcagggttgcctcacagtcctctgacagcaacacacctcatttcctaagtgtctggcaagaccggccttagcaggtactgctgctggtcacaaaaacaagctgagaacacrcagccactcagtgacacacatcrcttccacggggaagcccttctgcctcttgtcccaagggaacaacgcgttctcagggagatcacagcagctgcaaaccccttgataaggttgaagctattttaaaagcaagccaccagttaggtccgtgccctagaacacatccctttaattaggctccagggcaacttgtgacagcgaggaagccccagccacaggcagtcccgcccccagcagccagaagagctgtgctcacggtgacgtgagggtgacgtggctgcctgtcaccgcaggcttcctcagataagttggragagcaaggc

SEQ ID NO: 51226 - DNA, 560 bp, Chicken  19866894298819_5
acacacatcrcttccacggggaagcccttctgcctcttgtcccaagggaacaacgcgttctcagggagatcacagcagctgcaaaccccttgataaggttgaagctattttaaaagcaagccaccagttaggtccgtgccctagaacacatccctttaattaggctccagggcaacttgtgacagcgaggaagccccagccacaggcagtcccgcccccagcagccagaagagctgtgctcacggtgacgtgagggtgacgtggctgcctgtcaccgcaggcttcctcagataagttggragagcaaggctgtaaacaacagcacrcacacattccttccacgccccaggatggtatttataggactgagtgcaggatgcagggtgaagggcagccatgacccrgctcaagggcagcagggcaaaagcccrgctccatcctcactcactatacaacttggccggcaacctccataaaacatctttattctgtacatttatttatagacactcagggaacagggacaagccccagcattagaaaacgtcaagacaacaaaa

SEQ ID NO: 51227 - DNA, 534 bp, Chicken  19866894298819_6
cttctgcctcttgtcccaagggaacaacgcgttctcagggagatcacagcagctgcaaaccccttgataaggttgaagctattttaaaagcaagccaccagttaggtccgtgccctagaacacatccctttaattaggctccagggcaacttgtgacagcgaggaagccccagccacaggcagtcccgcccccagcagccagaagagctgtgctcacggtgacgtgagggtgacgtggctgcctgtcaccgcaggcttcctcagataagttggragagcaaggctgtaaacaacagcacrcacacattccttccacgccccaggatggtatttataggactgagtgcaggatgcagggtgaagggcagccatgacccrgctcaagggcagcagggcaaaagcccrgctccatcctcactcactatacaacttggccggcaacctccataaaacatctttattctgtacatttatttatagacactcagggaacagggacaagccccagcattagaaaacgtcaagacaacaaaa

SEQ ID NO: 51228 - DNA, 456 bp, Chicken  19866894298819_7
ctattttaaaagcaagccaccagttaggtccgtgccctagaacacatccctttaattaggctccagggcaacttgtgacagcgaggaagccccagccacaggcagtcccgcccccagcagccagaagagctgtgctcacggtgacgtgagggtgacgtggctgcctgtcaccgcaggcttcctcagataagttggragagcaaggctgtaaacaacagcacrcacacattccttccacgccccaggatggtatttataggactgagtgcaggatgcagggtgaagggcagccatgacccrgctcaagggcagcagggcaaaagcccrgctccatcctcactcactatacaacttggccggcaacctccataaaacatctttattctgtacatttatttatagacactcagggaacagggacaagccccagcattagaaaacgtcaagacaacaaaa

SEQ ID NO: 51229 - DNA, 429 bp, Chicken  19866894298819_8
gtccgtgccctagaacacatccctttaattaggctccagggcaacttgtgacagcgaggaagccccagccacaggcagtcccgcccccagcagccagaagagctgtgctcacggtgacgtgagggtgacgtggctgcctgtcaccgcaggcttcctcagataagttggragagcaaggctgtaaacaacagcacrcacacattccttccacgccccaggatggtatttataggactgagtgcaggatgcagggtgaagggcagccatgacccrgctcaagggcagcagggcaaaagcccrgctccatcctcactcactatacaacttggccggcaacctccataaaacatctttattctgtacatttatttatagacactcagggaacagggacaagccccagcattagaaaacgtcaagacaacaaaa

SEQ ID NO: 51230 - DNA, 599 bp, Chicken  19866894298830_1
  misc_feature (1)..(178): n is any nucleotide
nnnnnnnnnnnnnnnnnnnnnnnnnnnnnnnnnnnnnnnnnnnnnnnnnnnnnnnnnnnnnnnnnnnnnnnnnnnnnnnnnnnnnnnnnnnnnnnnnnnnnnnnnnnnnnnnnnnnnnnnnnnnnnnnnnnnnnnnnnnnnnnnnnnnnnnnnnnnnnnnnnnnnnnnnnnnnnnnnntggggttccatgattatcctggatggggacacaagcggaggtcctggggagctgtagggggtttccacgatgcatccatggataggacacaaggggaggggccgtatggggatgccatgagstcccacctgtgccattggtgtgggcctggatgtgctgcaggacgctctggatgtcctcgggcttggtgaggtccatgcgtagcagcgtgagccgggccgagcagctcctctgcagctcctgtgcgccagggccgcgtgggtccagcacgctggcraagacacggaagcccaaggagtccaagtgccgcgctgttgcctgcccaaagccggaatcgcagcctgcaagagccaatggtagcgctgtgagggccggggatggccgtgcagggaccccrtggggacatgaccttgtcccgggg

SEQ ID NO: 51231 - DNA, 599 bp, Chicken  19866894298830_2
  misc_feature (1)..(23): n is any nucleotide
nnnnnnnnnnnnnnnnnnnnnnntggggttccatgattatcctggatggggacacaagcggaggtcctggggagctgtagggggtttccacgatgcatccatggataggacacaaggggaggggccgtatggggatgccatgagstcccacctgtgccattggtgtgggcctggatgtgctgcaggacgctctggatgtcctcgggcttggtgaggtccatgcgtagcagcgtgagccgggccgagcagctcctctgcagctcctgtgcgccagggccgcgtgggtccagcacgctggcraagacacggaagcccaaggagtccaagtgccgcgctgttgcctgcccaaagccggaatcgcagcctgcaagagccaatggtagcgctgtgagggccggggatggccgtgcagggaccccrtggggacatgaccttgtcccggggcacccgcaggtcacagcgctgctgttttttctctctygcacaggaggaagaaaacactccttatcagcaaacccatcgccccgctgatgctgacagctgataaagggctgagcgcaggggggcacccacgagacggcggcacgatgggctctgag

SEQ ID NO: 51232 - DNA, 600 bp, Chicken  19866894298830_3
ggggccgtatggggatgccatgagstcccacctgtgccattggtgtgggcctggatgtgctgcaggacgctctggatgtcctcgggcttggtgaggtccatgcgtagcagcgtgagccgggccgagcagctcctctgcagctcctgtgcgccagggccgcgtgggtccagcacgctggcraagacacggaagcccaaggagtccaagtgccgcgctgttgcctgcccaaagccggaatcgcagcctgcaagagccaatggtagcgctgtgagggccggggatggccgtgcagggaccccrtggggacatgaccttgtcccggggcacccgcaggtcacagcgctgctgttttttctctctygcacaggaggaagaaaacactccttatcagcaaacccatcgccccgctgatgctgacagctgataaagggctgagcgcaggggggcacccacgagacggcggcacgatgggctctgagccctgcggtgacacacggggacccacagygtccccacctccaccactgcgaggccggggagatgtcagatggccaaaaccaaacaggggattgggaataatgggggggggaaaggaactgc

SEQ ID NO: 51233 - DNA, 600 bp, Chicken  19866894298830_4
gcaggacgctctggatgtcctcgggcttggtgaggtccatgcgtagcagcgtgagccgggccgagcagctcctctgcagctcctgtgcgccagggccgcgtgggtccagcacgctggcraagacacggaagcccaaggagtccaagtgccgcgctgttgcctgcccaaagccggaatcgcagcctgcaagagccaatggtagcgctgtgagggccggggatggccgtgcagggaccccrtggggacatgaccttgtcccggggcacccgcaggtcacagcgctgctgttttttctctctygcacaggaggaagaaaacactccttatcagcaaacccatcgccccgctgatgctgacagctgataaagggctgagcgcaggggggcacccacgagacggcggcacgatgggctctgagccctgcggtgacacacggggacccacagygtccccacctccaccactgcgaggccggggagatgtcagatggccaaaaccaaacaggggattgggaataatgggggggggaaaggaactgcgtgtgcttctgtccccttccagaccccggggcaccccaagggatgtcccacatggcagcac

SEQ ID NO: 51234 - DNA, 564 bp, Chicken  19866894298830_5
gccgcgctgttgcctgcccaaagccggaatcgcagcctgcaagagccaatggtagcgctgtgagggccggggatggccgtgcagggaccccrtggggacatgaccttgtcccggggcacccgcaggtcacagcgctgctgttttttctctctygcacaggaggaagaaaacactccttatcagcaaacccatcgccccgctgatgctgacagctgataaagggctgagcgcaggggggcacccacgagacggcggcacgatgggctctgagccctgcggtgacacacggggacccacagygtccccacctccaccactgcgaggccggggagatgtcagatggccaaaaccaaacaggggattgggaataatgggggggggaaaggaactgcgtgtgcttctgtccccttccagaccccggggcaccccaagggatgtcccacatggcagcacccaagccggccctgtgcccaagggagagccctgcgggagatggggctgagagcaaacaggcggtgtggaacagcgtgttcccagctgatggcagcgccgatagcgcggccc

SEQ ID NO: 51235 - DNA, 600 bp, Chicken  19866894298835_1
tttaaaaaatcattaataaagcatgcttcaatctgtgtttacatttttatagcctataatgtaacacatagtatagattttactttctagttgtacacttttaggtcagtatgattgtcttaagaataaactttacagatgactctgggatttcataaccatactctttcattatatctcaacaccctggacacctccctttctgctccttgtgcctcttcgttcagaaaactttccagatagatgcacatatgcatctatgctgctgtcaaatgtctctcatactcatttctgtacaaragctaggcagtatgtaattattttagaacaataaagtttgaattcgaccacagaataattcatactagttctggagatggattagttaatcaaggaattttctttaattcctagctaaaacatcacattaggttttcagttcttataaaatgaaggacatttatttcaaagctatcagggtttacacatgaattttagattagaatttgattatattatcttccatctctcaaacatctctgacagcagaatgcaggtgatctattgcaattaacctgtctggggaaaagtaccatataa

SEQ ID NO: 51236 - DNA, 531 bp, Chicken  19866894298855_1
cttctgtgcacacctgtccctatggagcacacacatccctctgcacatatatcctatcctcatgcacacgtgtccctatgatgcacacaacctcatgcacacgtgtccctatggtgcacccctgagcacacacctcatctcctggtgtacacacaccactatgatgcccacaacctcatgcacacgcttgtccccaagatgcacacgcaccccagtgcacaaacatgtccccatgctgcacacgcatccctccgtacacacacacacgtccccttgcacgctcacttctgagcacacctrcccctgtgaagcacacacatccctrtgcacacgcatcctatcctgatccacacgcatccttataacgcacacaacctcatgcacacacctgtccccatgctgcacacacaccccacgcacatcctaccctcccacccacgttacccccgcatcccccacccccaggcccccaacccccccgtgctctcatccacacacgcgtgtgcacgcaccaccatcacacacccaaag

SEQ ID NO: 51237 - DNA, 506 bp, Chicken  19866894298855_2
agcacacacatccctctgcacatatatcctatcctcatgcacacgtgtccctatgatgcacacaacctcatgcacacgtgtccctatggtgcacccctgagcacacacctcatctcctggtgtacacacaccactatgatgcccacaacctcatgcacacgcttgtccccaagatgcacacgcaccccagtgcacaaacatgtccccatgctgcacacgcatccctccgtacacacacacacgtccccttgcacgctcacttctgagcacacctrcccctgtgaagcacacacatccctrtgcacacgcatcctatcctgatccacacgcatccttataacgcacacaacctcatgcacacacctgtccccatgctgcacacacaccccacgcacatcctaccctcccacccacgttacccccgcatcccccacccccaggcccccaacccccccgtgctctcatccacacacgcgtgtgcacgcaccaccatcacacacccaaag

SEQ ID NO: 51238 - DNA, 599 bp, Chicken  19866894298856_1
  misc_feature (1)..(105): n is any nucleotide
nnnnnnnnnnnnnnnnnnnnnnnnnnnnnnnnnnnnnnnnnnnnnnnnnnnnnnnnnnnnnnnnnnnnnnnnnnnnnnnnnnnnnnnnnnnnnnnnnnnnnnnnnttgaaaagtatgaacaccgaattcaataagtcaagaagaaaataaacataaaactccacagagataacaaaatgtatgcttaaatgcatcattcaattactctgctcactctttgcttcccattacactctcctttgtcagtacacagtgtatctaaatggcaatctctttgtgacaagaagcttttcttcctgmctttacctgctggtgcagaacgttgttggtactttggaaatatcaaaaaataagaagaattgattgcaggcaatgtatgatttgtgtgatggttagtgaagcttctcagagttttccctatccagtagtaaaccaaaatttgtagatctggrctgtgytcgtccttatgaatgagaagggcagttttgggtcaactaccagtaggtaatttagttcyttaagtcaccgagggccatccaagctacagagggatggcaactgaaacagcattactctttgttttcactttcaggataagt

SEQ ID NO: 51239 - DNA, 600 bp, Chicken  19866894298856_2
ataaaactccacagagataacaaaatgtatgcttaaatgcatcattcaattactctgctcactctttgcttcccattacactctcctttgtcagtacacagtgtatctaaatggcaatctctttgtgacaagaagcttttcttcctgmctttacctgctggtgcagaacgttgttggtactttggaaatatcaaaaaataagaagaattgattgcaggcaatgtatgatttgtgtgatggttagtgaagcttctcagagttttccctatccagtagtaaaccaaaatttgtagatctggrctgtgytcgtccttatgaatgagaagggcagttttgggtcaactaccagtaggtaatttagttcyttaagtcaccgagggccatccaagctacagagggatggcaactgaaacagcattactctttgttttcactttcaggataagtcagtcargaattgtattgcctctactcacttagaattgcttgtccctgaggatgtgagttgtatcaggcactctcctggrgcttcttttccttgcatgttcctagagagctggttcagaacctggcacaaatagagcaaaccagatttccact

SEQ ID NO: 51240 - DNA, 600 bp, Chicken  19866894298856_3
ctccacagagataacaaaatgtatgcttaaatgcatcattcaattactctgctcactctttgcttcccattacactctcctttgtcagtacacagtgtatctaaatggcaatctctttgtgacaagaagcttttcttcctgmctttacctgctggtgcagaacgttgttggtactttggaaatatcaaaaaataagaagaattgattgcaggcaatgtatgatttgtgtgatggttagtgaagcttctcagagttttccctatccagtagtaaaccaaaatttgtagatctggrctgtgytcgtccttatgaatgagaagggcagttttgggtcaactaccagtaggtaatttagttcyttaagtcaccgagggccatccaagctacagagggatggcaactgaaacagcattactctttgttttcactttcaggataagtcagtcargaattgtattgcctctactcacttagaattgcttgtccctgaggatgtgagttgtatcaggcactctcctggrgcttcttttccttgcatgttcctagagagctggttcagaacctggcacaaatagagcaaaccagatttccactcaggcc

SEQ ID NO: 51241 - DNA, 600 bp, Chicken  19866894298856_4
ttgcttcccattacactctcctttgtcagtacacagtgtatctaaatggcaatctctttgtgacaagaagcttttcttcctgmctttacctgctggtgcagaacgttgttggtactttggaaatatcaaaaaataagaagaattgattgcaggcaatgtatgatttgtgtgatggttagtgaagcttctcagagttttccctatccagtagtaaaccaaaatttgtagatctggrctgtgytcgtccttatgaatgagaagggcagttttgggtcaactaccagtaggtaatttagttcyttaagtcaccgagggccatccaagctacagagggatggcaactgaaacagcattactctttgttttcactttcaggataagtcagtcargaattgtattgcctctactcacttagaattgcttgtccctgaggatgtgagttgtatcaggcactctcctggrgcttcttttccttgcatgttcctagagagctggttcagaacctggcacaaatagagcaaaccagatttccactcaggccaccctgactgtagaatacagaagttccctctcttccaagaacggatccaactgctttgt

SEQ ID NO: 51242 - DNA, 600 bp, Chicken  19866894298856_5
ctgctggtgcagaacgttgttggtactttggaaatatcaaaaaataagaagaattgattgcaggcaatgtatgatttgtgtgatggttagtgaagcttctcagagttttccctatccagtagtaaaccaaaatttgtagatctggrctgtgytcgtccttatgaatgagaagggcagttttgggtcaactaccagtaggtaatttagttcyttaagtcaccgagggccatccaagctacagagggatggcaactgaaacagcattactctttgttttcactttcaggataagtcagtcargaattgtattgcctctactcacttagaattgcttgtccctgaggatgtgagttgtatcaggcactctcctggrgcttcttttccttgcatgttcctagagagctggttcagaacctggcacaaatagagcaaaccagatttccactcaggccaccctgactgtagaatacagaagttccctctcttccaagaacggatccaactgctttgtgttgcaccattttcagtggggctttttaactgcttgtaatgtgaacttcagacagaagacagaattaaagtttgtgttattaggctgta

SEQ ID NO: 51243 - DNA, 600 bp, Chicken  19866894298856_6
atttgtgtgatggttagtgaagcttctcagagttttccctatccagtagtaaaccaaaatttgtagatctggrctgtgytcgtccttatgaatgagaagggcagttttgggtcaactaccagtaggtaatttagttcyttaagtcaccgagggccatccaagctacagagggatggcaactgaaacagcattactctttgttttcactttcaggataagtcagtcargaattgtattgcctctactcacttagaattgcttgtccctgaggatgtgagttgtatcaggcactctcctggrgcttcttttccttgcatgttcctagagagctggttcagaacctggcacaaatagagcaaaccagatttccactcaggccaccctgactgtagaatacagaagttccctctcttccaagaacggatccaactgctttgtgttgcaccattttcagtggggctttttaactgcttgtaatgtgaacttcagacagaagacagaattaaagtttgtgttattaggctgtatgccattaatgcttcttgtgatctgaaaatcctcattttcagtgtactagcatctgaaaacgattgtatgatt

SEQ ID NO: 51244 - DNA, 522 bp, Chicken  19866894298859_1
caacgttctctcatgttctctcaggcagagaacacagaaatagggctgtgaatgcaatgacattccatgcagtttttcataaaagaaattctcttttcttacacttagaagtgcctaaacatcaagtattttttgaggcagggatggcttcaccaacatggctcagcctctcagcaataggaacagaacatgcctattgatgcttaccaggataactaccatcacaaaggatatattggttgaggcccaacatgaggctccttgcagctttttctcacaactttgccatcctggaagatragtaggagacagaagttgcagagcccgttgatgtactcagtgcctgggagtgtccgtggtaccatagatgtcacatttccaaggttttcaaacctcctcctctgaaaattttggcatgtatctgggagggtggcacagcctaagacagttatctgtaaagcattccacctggcggctgatttattcctggatcagcagagcccatcttcatgacctccaggc

SEQ ID NO: 51245 - DNA, 600 bp, Chicken  19866894298870_1
acaacagtgaagactgttactattagtactaaagcaggaagtagaaaggaagagtcaaaaacaaatctagctaccttgcatgaatctgcatttcaccaaggagtatcattacttacatgttatctacggtatctattaacattcaatgaagtcctttcacagagaaagtaaaaggaaagtaaaaacaactcagttctctttttaaattgcaatggcatcgattgaaatgtatgaaaaaatctaagatgaagagtagatccatttttactttaaaatatgttcagaatcacttaaaaaaamctgtaagttggcatatcggatgtacctgggttaaatgcagaaaaatatcttagtagctgtttcccaaatacaggggaaacatatgtagaacatgaaaattgtatgcctctatttaaactgagattcttgtgcatcaaagctcacaagcactttgggacctgtcactcatagcagcagagccacatgagcaactaacgtcatctacttgggcttgtgcaaagcatttgacactgtcctgcatgatatcctggttgtcaaattggagaaaaaaaaggatttgatggatggatcactcactgg

SEQ ID NO: 51246 - DNA, 508 bp, Chicken  19866894298870_2
atgaaaattgtatgcctctatttaaactgagattcttgtgcatcaaagctcacaagcactttgggacctgtcactcatagcagcagagccacatgagcaactaacgtcatctacttgggcttgtgcaaagcatttgacactgtcctgcatgatatcctggttgtcaaattggagaaaaaaaaggatttgatggatggatcactcactggataaggaattggctagatggtcacacttaagagagttgtatacagtggctcaatgtccaagtggaggctggtgatgagtggcgttcctcasggattgatgctgggactartgctattttacagctttgtaggcaacatggatagtgggatcaagtgcaccctcaacaagtctgaagatgacaacaagccgagtagagcacttgatatgctggagggaagggatgtcatccagatggacctggacgggcttgaagtgaacccatgccaaactcatgaagttccacaaggccaagtaaaag

SEQ ID NO: 51247 - DNA, 489 bp, Chicken  19866894298870_3
atttaaactgagattcttgtgcatcaaagctcacaagcactttgggacctgtcactcatagcagcagagccacatgagcaactaacgtcatctacttgggcttgtgcaaagcatttgacactgtcctgcatgatatcctggttgtcaaattggagaaaaaaaaggatttgatggatggatcactcactggataaggaattggctagatggtcacacttaagagagttgtatacagtggctcaatgtccaagtggaggctggtgatgagtggcgttcctcasggattgatgctgggactartgctattttacagctttgtaggcaacatggatagtgggatcaagtgcaccctcaacaagtctgaagatgacaacaagccgagtagagcacttgatatgctggagggaagggatgtcatccagatggacctggacgggcttgaagtgaacccatgccaaactcatgaagttccacaaggccaagtaaaag

SEQ ID NO: 51248 - DNA, 600 bp, Chicken  19866894298876_1
tgtggctgtcatcacttggctctttggggctgtgtgaaaatattgatgctaagggctggtcctgggccctatgggcagagtcccgcagctccccatgctctcttgtttttccagcctgaagcataacaatagggtttttagaaaggatgctgtatgcaaactatgggcatcagcagccaggggagctgtgttccctccgtgccccaagggtttgcaaagcaaatccctcaaggtccctgtcaaccagagccttgggaaagccccaaaggaaaagagaaaaaggggaaaaaagagaaaaarggggaaaagcatgtaaaacaatacaggagggtgggttggctggatggaaccaggtgaactgccccaaaaaggtttttttttttctcatgcaagtagtcaaggataagcgatttttcttggcaatgggagaaaaatgcttgggatgggctaagaaaggaaaacacagaagtggggctttgagctgtctgctggatctggagtgcactgaagtttgggataggatcatagaattgcttaggttggaagggatctcgaggataactcagtgccacccctcctgtgtgctggttgccacccacc

SEQ ID NO: 51249 - DNA, 600 bp, Chicken  19866894298877_1
cccaaaggctgaattgtgcatctccaaaggccgtagcagattctgggcaggccgccctttgcctaccaaaccccctgttgcttgcagctgctgtctcctagcagatgcctctcacctttagggcacactccaacagggcaggctgcaaagaccatatcaaagtgagcttccatggtatggagggtgtcaggtcaaattgctaatcaaataaagctgtgcacgtccatattgcctgcaccgggctgctcagccccccagctgtacacccaggtattgcagcaggaggaggagagcagtatktggggccctggcagcagtgagagccttcacttctacaatcactgaaaaatgcagcgtgtatctttctggagtgggttggatagggatgctttcttgcaggatgccacattacttcgtgcttttcatttgcagcatagcttgtcccatttggctgcattcttttttacttcctgcaggaagtaatgtgtgtgtgtccaggcttttcccttggggtttggctgcgaaaacagcattaaggtcttcaggaaatctcccagaagtgatgagattcaggtggtaatctgaagtagcataaaggca

SEQ ID NO: 51250 - DNA, 600 bp, Chicken  19866894298879_1
ccttcagcatgcagttcatggtaggtgcttaaggacgtctctagctcagggggttctgcatgctgattagacgtaccattgaaaaatgtttgctaatctggatggtagtgagtgcgtttgctactcctttcttgtttttctcccccttttagattgtggctgaggaagtaagtcttgaaatatgccacggatttattcttcgtgttgaacggatggctgatggacaggactgtttccattctgccctcatctaactccttagagcacatggtgcgtgcagaggcctggctgagtggctgyaggtgccgccatgcaccatctctttgggctggttttggcacaaagggacctttcacgtgcaggrgatcttttctccttggatgatgctgaaatygaaggaagcctctccgaagctcttgaacaaataaggataattagttcatctgctgtaagtgaaatgctgtcctgtaatttgtgagattaaatgtattgtaaaaacaaagtgttaatgatggggacgtgcacacgttaaggtttggaactcaagaatgccaagcaaaatacaagataaacgtcctgcttcctttcctttgtctgggg

SEQ ID NO: 51251 - DNA, 600 bp, Chicken  19866894298879_2
gattagacgtaccattgaaaaatgtttgctaatctggatggtagtgagtgcgtttgctactcctttcttgtttttctcccccttttagattgtggctgaggaagtaagtcttgaaatatgccacggatttattcttcgtgttgaacggatggctgatggacaggactgtttccattctgccctcatctaactccttagagcacatggtgcgtgcagaggcctggctgagtggctgyaggtgccgccatgcaccatctctttgggctggttttggcacaaagggacctttcacgtgcaggrgatcttttctccttggatgatgctgaaatygaaggaagcctctccgaagctcttgaacaaataaggataattagttcatctgctgtaagtgaaatgctgtcctgtaatttgtgagattaaatgtattgtaaaaacaaagtgttaatgatggggacgtgcacacgttaaggtttggaactcaagaatgccaagcaaaatacaagataaacgtcctgcttcctttcctttgtctggggctggctccaggcttggaggctgctgccagggcattggttagaatagaatagagtagaatagaat

SEQ ID NO: 51252 - DNA, 600 bp, Chicken  19866894298879_3
aatctggatggtagtgagtgcgtttgctactcctttcttgtttttctcccccttttagattgtggctgaggaagtaagtcttgaaatatgccacggatttattcttcgtgttgaacggatggctgatggacaggactgtttccattctgccctcatctaactccttagagcacatggtgcgtgcagaggcctggctgagtggctgyaggtgccgccatgcaccatctctttgggctggttttggcacaaagggacctttcacgtgcaggrgatcttttctccttggatgatgctgaaatygaaggaagcctctccgaagctcttgaacaaataaggataattagttcatctgctgtaagtgaaatgctgtcctgtaatttgtgagattaaatgtattgtaaaaacaaagtgttaatgatggggacgtgcacacgttaaggtttggaactcaagaatgccaagcaaaatacaagataaacgtcctgcttcctttcctttgtctggggctggctccaggcttggaggctgctgccagggcattggttagaatagaatagagtagaatagaatagaatagaatagctcaggttggaaaagacc

SEQ ID NO: 51253 - DNA, 600 bp, Chicken  19866894298882_1
gctgctgttggtgccctgtcctccctccccatgttccctcctccaggcagctcagcaccaccccaggcagcactggctaagctcccacaggggtctcctttactcttccaacttcagccagccctgtgcagaacctccaccgagattaaagagcgatgcagtgtgaaaccttcctcctcttcagcagatggtgtttgcggcagtggacgtttcctgtgctgttgtaacagaacggcctggtctagccaggaagcagaagtggaagatgcagtctggtcttgctgaggctgccttgctttrcagacctgacctgagatcctggatcacaaatgatctcttgctttctcaagtatcggatgtttttttttttttttttccccctttttttcctccatgttcaacccatgagctgaagagctgccatgccttgctgcagccagcagcttctgtcactgcagcactcacagcagcctcctggggctcggtgcccgcagatgtgctgtgtgatgcaatgtgaacttcacatcaccttcacggaaagactgaaacgcatctaaactggagctcacccggtgtcactgccttaggctgaacagagca

SEQ ID NO: 51254 - DNA, 600 bp, Chicken  19866894298882_2
ggcctcgctgcctccctggagccagcactgtgactgctccctggagagcagctccctgactgcatcagctccccgagcagctctgctccttctcctgccagcagccagaaactgcctacatcagcttttaccttccgatggaaaccggctgagccacagcaatggggagcgacccatgggcactacgtgctgctgcaagctctgtcccacacccgggcaagcctggggtatgaacctctgtgcttcaggagctgcattcccctgccagctctgcaaggtcagacacagcccatgccatgmtctgtgcacccctcctcacccctctgactgcaatagcaccaggctgtctcacagcccctgctgagccctgccaaacctcaaaagccctttcacaaagagccactgtgtcagctctccgtgtcccctatcagctccatctacctgacttcttcctgccggtcacagcaagcctgggcaggtagcaggacacggggcagctggaggtggatgctgaaggttcagccaaagtgcactccttcctgcagcactgccttcagctaaggaagggatctttctttagctcctcttttcctccgcctt

SEQ ID NO: 51255 - DNA, 599 bp, Chicken  19866894298894_1
  misc_feature (1)..(55): n is any nucleotide
nnnnnnnnnnnnnnnnnnnnnnnnnnnnnnnnnnnnnnnnnnnnnnnnnnnnnnntcccccaaaaaaagaacaggttcagtgaaggacaatggtgataatcaaagacgtggagcagcttttggataagaggagctgaataaacttcagcttggagcagaaatggttagtgggggaagtgagaagaggaatgttacagaaagcatgagcagagcatgactgtacctggccctccccactcaggaaaaagtaagcaatgaggaagcaacaagcttataatgggaaaacttttcatttgatartgctttcctttcagtgctgcacaggttgtgcatgtgctgagatgaggggttaagcagagactggataaaacctccccttggcttttcgagacagcctcttctggctcagagaaacattaccaaagcaatgctttagagggaggtactgtcatctatgttaaacttgctgcagaaacgtgaagtttaattttgtatggatgccattaataccattttgctcttttgagatactgtcctgttgtctagtatgcatctggggctgcaagttggaggaacagatttaaagtgaggtttcttgg

SEQ ID NO: 51256 - DNA, 600 bp, Chicken  19866894298896_1
catggagtcaaatgcttcccatcttcttctgagctgtgaagcccttatcttgttccacaatattattgtgtagttcagtagaggtttctttcactgatttatgtggctgtgatttattcagcctgcacccatactctgctactacagttgtgccagtgttgcttactgtggaccagatggtgaatgagtttgagcaccgatcaatgttaaaagtgactgttttctttttggctgagttacactgagctttgatcacttctctggggcagtttccttcctggccacacaattataccagcrtgactgaggaagaggaggaagtgaacagtggtagcaggactggtatagggtaggagagtgaaggccacttaagctagtgctgctgccagaagaaatattcaatgaatgaatgcctagtggtatgtctgaccaaagcctgcggaagtcttctgcctcagggacaaaatcytgctttccggcccagtgtgctctgatccgatttattcatctcctgttcagaactttctggcacagtggggtgcagcagccaggctgaggcaggtgctgaggcaggaagaaaaggtgggggcaggaaggaaa

SEQ ID NO: 51257 - DNA, 503 bp, Chicken  19866894298896_2
ggaccagatggtgaatgagtttgagcaccgatcaatgttaaaagtgactgttttctttttggctgagttacactgagctttgatcacttctctggggcagtttccttcctggccacacaattataccagcrtgactgaggaagaggaggaagtgaacagtggtagcaggactggtatagggtaggagagtgaaggccacttaagctagtgctgctgccagaagaaatattcaatgaatgaatgcctagtggtatgtctgaccaaagcctgcggaagtcttctgcctcagggacaaaatcytgctttccggcccagtgtgctctgatccgatttattcatctcctgttcagaactttctggcacagtggggtgcagcagccaggctgaggcaggtgctgaggcaggaagaaaaggtgggggcaggaaggaaaaagaagagcctggtgctgaatggtagacactccaaattgagacaagcagcagcaaaaaaggtgctacagaga

SEQ ID NO: 51258 - DNA, 600 bp, Chicken  19866894298905_1
tcggcttttaagagcgatgtttgctgctggaaaatctggataagcaaaccagttagtacttaggaaagaaatgaattagatttttgtatatgaaattaaatcgatttttctaatgcttacagagtttgcttcttatctgatattaatcatcattgtcttggagaatcgctcggttttcctgatacttaaagcagttgggacatgagctacagcacagtggtctctgcgtagaggacgtcagaggtggaatgtgcagaaaggtgggtcagtgctgtgctccttcaggtgagactgttatgytctttgctgggagctgagcrtggagggaggaggcaccttctgctgaraacacctgtwaataatactagggctttatcgataattacagttatgttaaagttgtctttcttctgaagacttttccctgccttcagaagttttgaattctgccattctgtgtgattttcagcacctctgtcttgaccctcacttgcaaaattcctccrggcaaaccggaaagctcacctggagctggcctggggatctgtgcatgtgaaaggctcctgctgggtgccttgctgggcagtgtcagagtgcttt

SEQ ID NO: 51259 - DNA, 600 bp, Chicken  19866894298905_2
ttgctgctggaaaatctggataagcaaaccagttagtacttaggaaagaaatgaattagatttttgtatatgaaattaaatcgatttttctaatgcttacagagtttgcttcttatctgatattaatcatcattgtcttggagaatcgctcggttttcctgatacttaaagcagttgggacatgagctacagcacagtggtctctgcgtagaggacgtcagaggtggaatgtgcagaaaggtgggtcagtgctgtgctccttcaggtgagactgttatgytctttgctgggagctgagcrtggagggaggaggcaccttctgctgaraacacctgtwaataatactagggctttatcgataattacagttatgttaaagttgtctttcttctgaagacttttccctgccttcagaagttttgaattctgccattctgtgtgattttcagcacctctgtcttgaccctcacttgcaaaattcctccrggcaaaccggaaagctcacctggagctggcctggggatctgtgcatgtgaaaggctcctgctgggtgccttgctgggcagtgtcagagtgctttaggactcctcagatggagca

SEQ ID NO: 51260 - DNA, 600 bp, Chicken  19866894298905_3
accagttagtacttaggaaagaaatgaattagatttttgtatatgaaattaaatcgatttttctaatgcttacagagtttgcttcttatctgatattaatcatcattgtcttggagaatcgctcggttttcctgatacttaaagcagttgggacatgagctacagcacagtggtctctgcgtagaggacgtcagaggtggaatgtgcagaaaggtgggtcagtgctgtgctccttcaggtgagactgttatgytctttgctgggagctgagcrtggagggaggaggcaccttctgctgaraacacctgtwaataatactagggctttatcgataattacagttatgttaaagttgtctttcttctgaagacttttccctgccttcagaagttttgaattctgccattctgtgtgattttcagcacctctgtcttgaccctcacttgcaaaattcctccrggcaaaccggaaagctcacctggagctggcctggggatctgtgcatgtgaaaggctcctgctgggtgccttgctgggcagtgtcagagtgctttaggactcctcagatggagcagccaggaacctgaaggcaaatcaacct

SEQ ID NO: 51261 - DNA, 600 bp, Chicken  19866894298905_4
acttaggaaagaaatgaattagatttttgtatatgaaattaaatcgatttttctaatgcttacagagtttgcttcttatctgatattaatcatcattgtcttggagaatcgctcggttttcctgatacttaaagcagttgggacatgagctacagcacagtggtctctgcgtagaggacgtcagaggtggaatgtgcagaaaggtgggtcagtgctgtgctccttcaggtgagactgttatgytctttgctgggagctgagcrtggagggaggaggcaccttctgctgaraacacctgtwaataatactagggctttatcgataattacagttatgttaaagttgtctttcttctgaagacttttccctgccttcagaagttttgaattctgccattctgtgtgattttcagcacctctgtcttgaccctcacttgcaaaattcctccrggcaaaccggaaagctcacctggagctggcctggggatctgtgcatgtgaaaggctcctgctgggtgccttgctgggcagtgtcagagtgctttaggactcctcagatggagcagccaggaacctgaaggcaaatcaacctcagtcggtga

SEQ ID NO: 51262 - DNA, 600 bp, Chicken  19866894298905_5
ctacagcacagtggtctctgcgtagaggacgtcagaggtggaatgtgcagaaaggtgggtcagtgctgtgctccttcaggtgagactgttatgytctttgctgggagctgagcrtggagggaggaggcaccttctgctgaraacacctgtwaataatactagggctttatcgataattacagttatgttaaagttgtctttcttctgaagacttttccctgccttcagaagttttgaattctgccattctgtgtgattttcagcacctctgtcttgaccctcacttgcaaaattcctccrggcaaaccggaaagctcacctggagctggcctggggatctgtgcatgtgaaaggctcctgctgggtgccttgctgggcagtgtcagagtgctttaggactcctcagatggagcagccaggaacctgaaggcaaatcaacctcagtcggtgaaatcaaagtatgtaaattaaaatgtgaatggtttcatccaggtgtgaagtggcctttagaagtactgrtggggaaggaagtggtgggaattggttttcaagttctggagcgctgtcagtctgtgccttttagaaatctctattaactct

SEQ ID NO: 51263 - DNA, 600 bp, Chicken  19866894298905_6
tgccttcagaagttttgaattctgccattctgtgtgattttcagcacctctgtcttgaccctcacttgcaaaattcctccrggcaaaccggaaagctcacctggagctggcctggggatctgtgcatgtgaaaggctcctgctgggtgccttgctgggcagtgtcagagtgctttaggactcctcagatggagcagccaggaacctgaaggcaaatcaacctcagtcggtgaaatcaaagtatgtaaattaaaatgtgaatggtttcatccaggtgtgaagtggcctttagaagtactgrtggggaaggaagtggtgggaattggttttcaagttctggagcgctgtcagtctgtgccttttagaaatctctattaactcttgttttacccataagcttaacaaatacctatttacatcaccaggttaagtatacgagctggagaacgtgccttagagaaaaatctgaataatggcaaaagaagtcttgggtctctctgccagtcgttatatagtgagtcagcttggattctcttgatcaggtagagagatgctgaatttggggtcccccgaatgggtttgtgggagagctgcagagggc

SEQ ID NO: 51264 - DNA, 600 bp, Chicken  19866894298906_1
gcagccagcccagccccatgctcacctgctcacacagcgtgcccacgagcccctccaggtcctgcttctcgcgcaaagctgtctgcttctcctcgtgctcctgctccagttgcatctccagctgccggagctgtaataagaacacaggacatgcagagtgagggagagaagggtgaatgacattctgtcagcatgagtggccacagcagtacagcacagacatgctcatgggagcagagatctctccatctgcctcccaacccccgccgctttccttaaacagcaaaagcaaaattcaaygactgtgcccaggctgtgcctkkggctgctgccttggtgcctacaggggaggaaggacccctcrtcccccagcccaacctaccctcctctggcaggactgccttgcatcctccagctcctcgtccttgtcctccagctccttttggtggatctgcttcatccgctcaatctccagctccagcctctggtgcagctgaaagacccgaaggcaatgcacccacactcacacctcgcaccgcagggtccccccacacacagggctgccctacctgctccaggtgatccacatttggctgtctg

SEQ ID NO: 51265 - DNA, 587 bp, Chicken  19866894298906_2
cacctgctcacacagcgtgcccacgagcccctccaggtcctgcttctcgcgcaaagctgtctgcttctcctcgtgctcctgctccagttgcatctccagctgccggagctgtaataagaacacaggacatgcagagtgagggagagaagggtgaatgacattctgtcagcatgagtggccacagcagtacagcacagacatgctcatgggagcagagatctctccatctgcctcccaacccccgccgctttccttaaacagcaaaagcaaaattcaaygactgtgcccaggctgtgcctkkggctgctgccttggtgcctacaggggaggaaggacccctcrtcccccagcccaacctaccctcctctggcaggactgccttgcatcctccagctcctcgtccttgtcctccagctccttttggtggatctgcttcatccgctcaatctccagctccagcctctggtgcagctgaaagacccgaaggcaatgcacccacactcacacctcgcaccgcagggtccccccacacacagggctgccctacctgctccaggtgatccacatttggctgtctgcctctccag

SEQ ID NO: 51266 - DNA, 586 bp, Chicken  19866894298906_3
acctgctcacacagcgtgcccacgagcccctccaggtcctgcttctcgcgcaaagctgtctgcttctcctcgtgctcctgctccagttgcatctccagctgccggagctgtaataagaacacaggacatgcagagtgagggagagaagggtgaatgacattctgtcagcatgagtggccacagcagtacagcacagacatgctcatgggagcagagatctctccatctgcctcccaacccccgccgctttccttaaacagcaaaagcaaaattcaaygactgtgcccaggctgtgcctkkggctgctgccttggtgcctacaggggaggaaggacccctcrtcccccagcccaacctaccctcctctggcaggactgccttgcatcctccagctcctcgtccttgtcctccagctccttttggtggatctgcttcatccgctcaatctccagctccagcctctggtgcagctgaaagacccgaaggcaatgcacccacactcacacctcgcaccgcagggtccccccacacacagggctgccctacctgctccaggtgatccacatttggctgtctgcctctccag

SEQ ID NO: 51267 - DNA, 545 bp, Chicken  19866894298906_4
cttctcgcgcaaagctgtctgcttctcctcgtgctcctgctccagttgcatctccagctgccggagctgtaataagaacacaggacatgcagagtgagggagagaagggtgaatgacattctgtcagcatgagtggccacagcagtacagcacagacatgctcatgggagcagagatctctccatctgcctcccaacccccgccgctttccttaaacagcaaaagcaaaattcaaygactgtgcccaggctgtgcctkkggctgctgccttggtgcctacaggggaggaaggacccctcrtcccccagcccaacctaccctcctctggcaggactgccttgcatcctccagctcctcgtccttgtcctccagctccttttggtggatctgcttcatccgctcaatctccagctccagcctctggtgcagctgaaagacccgaaggcaatgcacccacactcacacctcgcaccgcagggtccccccacacacagggctgccctacctgctccaggtgatccacatttggctgtctgcctctccag

SEQ ID NO: 51268 - DNA, 600 bp, Chicken  19866894298913_1
agcaattcctacagcagatcggtgccttcgctccctgggcaggaacccgctgctcaactcagcaactgaaaaatcaatggcccattaagaagtaattaattgcaacagcccctctccgtgtatcacttcagcaaacaaagctgcaaatgaatttgctattaattgatgtatgtactttgagacaacagcgaggtatcggctgccttcctcgggctcaacgtttcatgggagcgcatcgcccagcagctgcagccaaggagcaatggctggcatggagctcctctgctaatgcaaacaagrgatgcccgagtgcacakccaaacacgaggggctttgcagatcaagtggtcaaagcggcaaggtcagctgagcccctttctttggtgggattaaaggtgatctcctctctcccgccagcgctctcctgtaatccctgcacaaagcccttccatgtgctgctgccatcggccccaccrctgctctttggccccagcaagcaggggacatcacagtcactgtcctgacagcaggaaggatgcggggaggcacaccgcctctgtttgggagcaggaaggaaagcgaggccacaacagagacggg

SEQ ID NO: 51269 - DNA, 600 bp, Chicken  19866894298913_2
atcggtgccttcgctccctgggcaggaacccgctgctcaactcagcaactgaaaaatcaatggcccattaagaagtaattaattgcaacagcccctctccgtgtatcacttcagcaaacaaagctgcaaatgaatttgctattaattgatgtatgtactttgagacaacagcgaggtatcggctgccttcctcgggctcaacgtttcatgggagcgcatcgcccagcagctgcagccaaggagcaatggctggcatggagctcctctgctaatgcaaacaagrgatgcccgagtgcacakccaaacacgaggggctttgcagatcaagtggtcaaagcggcaaggtcagctgagcccctttctttggtgggattaaaggtgatctcctctctcccgccagcgctctcctgtaatccctgcacaaagcccttccatgtgctgctgccatcggccccaccrctgctctttggccccagcaagcaggggacatcacagtcactgtcctgacagcaggaaggatgcggggaggcacaccgcctctgtttgggagcaggaaggaaagcgaggccacaacagagacgggaggatgggctgtcagca

SEQ ID NO: 51270 - DNA, 600 bp, Chicken  19866894298913_3
ttgagacaacagcgaggtatcggctgccttcctcgggctcaacgtttcatgggagcgcatcgcccagcagctgcagccaaggagcaatggctggcatggagctcctctgctaatgcaaacaagrgatgcccgagtgcacakccaaacacgaggggctttgcagatcaagtggtcaaagcggcaaggtcagctgagcccctttctttggtgggattaaaggtgatctcctctctcccgccagcgctctcctgtaatccctgcacaaagcccttccatgtgctgctgccatcggccccaccrctgctctttggccccagcaagcaggggacatcacagtcactgtcctgacagcaggaaggatgcggggaggcacaccgcctctgtttgggagcaggaaggaaagcgaggccacaacagagacgggaggatgggctgtcagcaggggggtgagmacaacccttcagaggttcagggtgagagactcagaagagccgtgactgcagcatctcctccatccaaggggcctaaagctcttcccagcgatgggaacgccagccctgtgccacaggtgagggctgcactgcacccccagagtgstga

SEQ ID NO: 51271 - DNA, 600 bp, Chicken  19866894298913_4
gggctttgcagatcaagtggtcaaagcggcaaggtcagctgagcccctttctttggtgggattaaaggtgatctcctctctcccgccagcgctctcctgtaatccctgcacaaagcccttccatgtgctgctgccatcggccccaccrctgctctttggccccagcaagcaggggacatcacagtcactgtcctgacagcaggaaggatgcggggaggcacaccgcctctgtttgggagcaggaaggaaagcgaggccacaacagagacgggaggatgggctgtcagcaggggggtgagmacaacccttcagaggttcagggtgagagactcagaagagccgtgactgcagcatctcctccatccaaggggcctaaagctcttcccagcgatgggaacgccagccctgtgccacaggtgagggctgcactgcacccccagagtgstgaggatcatcagattccagctgagctccaaatgaaacggraacacagctgaccccaggaggacactacaggctayaggaacacataggaatgtaaagcaacagagcctgcagatctcctcccagcagctcacagtcacaccagcacctccccct

SEQ ID NO: 51272 - DNA, 600 bp, Chicken  19866894298913_5
ccrctgctctttggccccagcaagcaggggacatcacagtcactgtcctgacagcaggaaggatgcggggaggcacaccgcctctgtttgggagcaggaaggaaagcgaggccacaacagagacgggaggatgggctgtcagcaggggggtgagmacaacccttcagaggttcagggtgagagactcagaagagccgtgactgcagcatctcctccatccaaggggcctaaagctcttcccagcgatgggaacgccagccctgtgccacaggtgagggctgcactgcacccccagagtgstgaggatcatcagattccagctgagctccaaatgaaacggraacacagctgaccccaggaggacactacaggctayaggaacacataggaatgtaaagcaacagagcctgcagatctcctcccagcagctcacagtcacaccagcacctcccccttcccaccctacagctccatggggaatcctccatcatttgggaccgatctctccaaagcggttcaatgcagtcagtgcctcccaccaaccctcatagcccatcccaccccctccacggtccctctgctgtgggagggaggtgggag

SEQ ID NO: 51273 - DNA, 600 bp, Chicken  19866894298913_6
actgtcctgacagcaggaaggatgcggggaggcacaccgcctctgtttgggagcaggaaggaaagcgaggccacaacagagacgggaggatgggctgtcagcaggggggtgagmacaacccttcagaggttcagggtgagagactcagaagagccgtgactgcagcatctcctccatccaaggggcctaaagctcttcccagcgatgggaacgccagccctgtgccacaggtgagggctgcactgcacccccagagtgstgaggatcatcagattccagctgagctccaaatgaaacggraacacagctgaccccaggaggacactacaggctayaggaacacataggaatgtaaagcaacagagcctgcagatctcctcccagcagctcacagtcacaccagcacctcccccttcccaccctacagctccatggggaatcctccatcatttgggaccgatctctccaaagcggttcaatgcagtcagtgcctcccaccaaccctcatagcccatcccaccccctccacggtccctctgctgtgggagggaggtgggagcaatgctgtgcacccccctggcttgagctgggagctcctcc

SEQ ID NO: 51274 - DNA, 600 bp, Chicken  19866894298913_7
accgcctctgtttgggagcaggaaggaaagcgaggccacaacagagacgggaggatgggctgtcagcaggggggtgagmacaacccttcagaggttcagggtgagagactcagaagagccgtgactgcagcatctcctccatccaaggggcctaaagctcttcccagcgatgggaacgccagccctgtgccacaggtgagggctgcactgcacccccagagtgstgaggatcatcagattccagctgagctccaaatgaaacggraacacagctgaccccaggaggacactacaggctayaggaacacataggaatgtaaagcaacagagcctgcagatctcctcccagcagctcacagtcacaccagcacctcccccttcccaccctacagctccatggggaatcctccatcatttgggaccgatctctccaaagcggttcaatgcagtcagtgcctcccaccaaccctcatagcccatcccaccccctccacggtccctctgctgtgggagggaggtgggagcaatgctgtgcacccccctggcttgagctgggagctcctccgtgccacacgctgcactcactgacctccacttgct

SEQ ID NO: 51275 - DNA, 600 bp, Chicken  19866894298914_1
gagcagagcgtggttcagtgtcccagtcttgctgagctgcgtgcgcctcctgtaagttttccaggtggttgtgaattcccaggtcgtcctctctgcctgcctgagtcgcagtgtgtttcaaggtgtttgtgcagatgaaattgtctgcattagagaagaggtacagtcccaggctaggagtggtatgggagatagctaagtggtgttttacttccgtaactgcatcagagcagatgctctagaaactgttctctgggtctgagtgaatatggacagctcagaagttcagaatgagcctgytggccaggatccctctgcattcatgtcacttttgactctgaagctaacagtggtttaaaaaaaaaaatttaaaagcagattattgaaccatgcaattttgggaaacattgaaaaayaacgtaggtaatttttcacattgttttgaaggctgtgaaagtgaggcttggtctgccaaaacctctttgcgatgagttctggtgctataggaaagcccagtgttacccaggaaaagctgcctgcttttcctttcaagtattttgctggctgtgcatctgcctgatttgtgtcttcccmgagacc

SEQ ID NO: 51276 - DNA, 600 bp, Chicken  19866894298914_2
ttcaaggtgtttgtgcagatgaaattgtctgcattagagaagaggtacagtcccaggctaggagtggtatgggagatagctaagtggtgttttacttccgtaactgcatcagagcagatgctctagaaactgttctctgggtctgagtgaatatggacagctcagaagttcagaatgagcctgytggccaggatccctctgcattcatgtcacttttgactctgaagctaacagtggtttaaaaaaaaaaatttaaaagcagattattgaaccatgcaattttgggaaacattgaaaaayaacgtaggtaatttttcacattgttttgaaggctgtgaaagtgaggcttggtctgccaaaacctctttgcgatgagttctggtgctataggaaagcccagtgttacccaggaaaagctgcctgcttttcctttcaagtattttgctggctgtgcatctgcctgatttgtgtcttcccmgagaccttaacatgctcatctggaataagatgaggtatagcaaattcttcttgtacttaccgtttttcttgaaaccccagctcgtggagcctactaagagccagttcaccatttcagaaacc

SEQ ID NO: 51277 - DNA, 600 bp, Chicken  19866894298914_3
gcctgytggccaggatccctctgcattcatgtcacttttgactctgaagctaacagtggtttaaaaaaaaaaatttaaaagcagattattgaaccatgcaattttgggaaacattgaaaaayaacgtaggtaatttttcacattgttttgaaggctgtgaaagtgaggcttggtctgccaaaacctctttgcgatgagttctggtgctataggaaagcccagtgttacccaggaaaagctgcctgcttttcctttcaagtattttgctggctgtgcatctgcctgatttgtgtcttcccmgagaccttaacatgctcatctggaataagatgaggtatagcaaattcttcttgtacttaccgtttttcttgaaaccccagctcgtggagcctactaagagccagttcaccatttcagaaaccaagataggttatcccggaggagtattataactctagtgtatgaatggttttggtttttgttttctttgtgtggggaaagtggtttggagttgacaggtgatactcacagaggaagtcctcttcttgtgagagagagtttctgtgggttactgataccagcacttcccagagttttgtt

SEQ ID NO: 51278 - DNA, 599 bp, Chicken  19866894298916_1
  misc_feature (1)..(46): n is any nucleotide
nnnnnnnnnnnnnnnnnnnnnnnnnnnnnnnnnnnnnnnnnnnnnnaaactttgatacctttttgtgtatgtgtttttcctcgttttttcctttcatttttcttttagcaaatttactgtcagttgctccagatgaagaacatcctaaccatatgaacagtagttccccagaggaagaacgcaatcagtttcctgggattgttggtaagaatttacttttgctgttcatagttgttagtttttaatgcaaactctctttggcttgtctactcctttaattgtttattttgaggatttatrtattggttgaaatacataagcatagtgaactgggaacattagaactagcttcgtggccatttttgtcataaataatacatattttgaaaacataccatcactgacaaatatctgccagtaatatagcaaccttaacaaaacatgtttcatttaaatcacacataaataaaatgaaagaagaraaagaaattcagtctaaagttgctttaaaacattagtttcctctgcctttgggacttgaaggaatgctgtcttatagtagtagtaataacagcagggaacaaatcagatgggtacta

SEQ ID NO: 51279 - DNA, 600 bp, Chicken  19866894298916_2
aatcagtttcctgggattgttggtaagaatttacttttgctgttcatagttgttagtttttaatgcaaactctctttggcttgtctactcctttaattgtttattttgaggatttatrtattggttgaaatacataagcatagtgaactgggaacattagaactagcttcgtggccatttttgtcataaataatacatattttgaaaacataccatcactgacaaatatctgccagtaatatagcaaccttaacaaaacatgtttcatttaaatcacacataaataaaatgaaagaagaraaagaaattcagtctaaagttgctttaaaacattagtttcctctgcctttgggacttgaaggaatgctgtcttatagtagtagtaataacagcagggaacaaatcagatgggtactaattatagtttattttcactttgttgtgtctagatggcctatcacttactatttcccccmcctcctcccccatgcctttttttttcccccttttagtaaatttgttgccaacagctccaaatgaggaagagtcccatactgtgaacagtagttacctagaggaagagtacaagcagtttcccag

SEQ ID NO: 51280 - DNA, 600 bp, Chicken  19866894298916_3
atttttgtcataaataatacatattttgaaaacataccatcactgacaaatatctgccagtaatatagcaaccttaacaaaacatgtttcatttaaatcacacataaataaaatgaaagaagaraaagaaattcagtctaaagttgctttaaaacattagtttcctctgcctttgggacttgaaggaatgctgtcttatagtagtagtaataacagcagggaacaaatcagatgggtactaattatagtttattttcactttgttgtgtctagatggcctatcacttactatttcccccmcctcctcccccatgcctttttttttcccccttttagtaaatttgttgccaacagctccaaatgaggaagagtcccatactgtgaacagtagttacctagaggaagagtacaagcagtttcccagttcctttggttagaatttgcttttgcagttctgagttctcagtttttatctgtgctgttgatttattttccatttccactcattttgcagtgtatctgagactaaagaattggtttcaatctgtgtctattattttcataagcaaggcaagtctaagtgaagaaatgtatttctac

SEQ ID NO: 51281 - DNA, 600 bp, Chicken  19866894298917_1
ctgtggttaggtgctgctgctgctgcctgtggttgccttcctcttccctctttcccctttccatttcagctgcgtgttttctgaggttctcttttgtcatttgtgggaagtgctgtgtttcttacaaggacctttgaaattgaaatcttgcttcatcttggaacgaatgctttgcacttcataaaatgcataatgtgcataatgtgtgctggcagtggggggactggcaggtaaggagatgactcgatctacatgacagatattggctttgaggagatgcttttctctcccagcctaacmtgctttgctccgtgcaccagaacagcctctttagaaatcatgcttggcgacttcagccaagccctcactgctttgcagtgcactgcagattaatgctactgcaagcttgggctcttaatgcaatctcaaccctttaattaaaataacatggaacaaaaagrgagaattagttaaaaataacaactctcggaagcccagcttgcctttttattagacttgtcctcactttctcagctgctctgataagaaggatattctccctctgggatgcagtgaataaactgggatgtaactcatttg

SEQ ID NO: 51282 - DNA, 600 bp, Chicken  19866894298917_2
aacgaatgctttgcacttcataaaatgcataatgtgcataatgtgtgctggcagtggggggactggcaggtaaggagatgactcgatctacatgacagatattggctttgaggagatgcttttctctcccagcctaacmtgctttgctccgtgcaccagaacagcctctttagaaatcatgcttggcgacttcagccaagccctcactgctttgcagtgcactgcagattaatgctactgcaagcttgggctcttaatgcaatctcaaccctttaattaaaataacatggaacaaaaagrgagaattagttaaaaataacaactctcggaagcccagcttgcctttttattagacttgtcctcactttctcagctgctctgataagaaggatattctccctctgggatgcagtgaataaactgggatgtaactcatttgtttgggcattatgttttaattaatttctaacactaatccattccctgtactctttttttttccttctggcttgtagataataaaatagtcctgttccaaggagaggattggtggtttgtgccattacagaaatgaggtttgggtgctgtgtagcaatgcag

SEQ ID NO: 51283 - DNA, 599 bp, Chicken  19866894298921_1
  misc_feature (1)..(140): n is any nucleotide
nnnnnnnnnnnnnnnnnnnnnnnnnnnnnnnnnnnnnnnnnnnnnnnnnnnnnnnnnnnnnnnnnnnnnnnnnnnnnnnnnnnnnnnnnnnnnnnnnnnnnnnnnnnnnnnnnnnnnnnnnnnnnnnnnnnnnnnnnnnnctaattgattatgttggcccatgacattggaggtggatgttggtggtatggcagtagagggtgaacctttctgccaacattccattacattttgttgccatttgacaaatgacatcagaggggcagtctggcaaaatggcatctgacgtggaagtgtgtwttaagcaaaggtgtgtcatcaaatttcttgatgagatgctggaacaggttgcccggagaggttgtggatgtatcatccctggagatgtttaagaccaagatggatggggccctgggcaatctgattaartatttgatctagtggctggcaaccttgcctgtggcaggggagttggatcttgatgatgttgatgatcctctgaggttccttccaactcaggctgttctatgattcatctgtaaaaacaaaaattgcacccattcattgatgcttgctgaatgctatggagagcaaacagt

SEQ ID NO: 51284 - DNA, 599 bp, Chicken  19866894298921_2
  misc_feature (1)..(11): n is any nucleotide
nnnnnnnnnnnctaattgattatgttggcccatgacattggaggtggatgttggtggtatggcagtagagggtgaacctttctgccaacattccattacattttgttgccatttgacaaatgacatcagaggggcagtctggcaaaatggcatctgacgtggaagtgtgtwttaagcaaaggtgtgtcatcaaatttcttgatgagatgctggaacaggttgcccggagaggttgtggatgtatcatccctggagatgtttaagaccaagatggatggggccctgggcaatctgattaartatttgatctagtggctggcaaccttgcctgtggcaggggagttggatcttgatgatgttgatgatcctctgaggttccttccaactcaggctgttctatgattcatctgtaaaaacaaaaattgcacccattcattgatgcttgctgaatgctatggagagcaaacagtggatgtgagcacactgaggtggtgggtrgtatgtttcaagcagtggcaacagagatgtgaaagacaagccatgttccagacagccatacgcagctgttacaccatgaaatgaagaactccttttgatag

SEQ ID NO: 51285 - DNA, 600 bp, Chicken  19866894298921_3
ttgatgagatgctggaacaggttgcccggagaggttgtggatgtatcatccctggagatgtttaagaccaagatggatggggccctgggcaatctgattaartatttgatctagtggctggcaaccttgcctgtggcaggggagttggatcttgatgatgttgatgatcctctgaggttccttccaactcaggctgttctatgattcatctgtaaaaacaaaaattgcacccattcattgatgcttgctgaatgctatggagagcaaacagtggatgtgagcacactgaggtggtgggtrgtatgtttcaagcagtggcaacagagatgtgaaagacaagccatgttccagacagccatacgcagctgttacaccatgaaatgaagaactccttttgatagctgatgaaaatgcataactaatgttggtgactatgctgaaaaagagtgttctgtagctgaggatttactctatgaaatagtgtcattccgctctttgtagctgttgtagcttccgtggaaataaataggaggcattacttttggagcaacctatgtattacactgggggatttacaaggccttagcaagctttaagaat

SEQ ID NO: 51286 - DNA, 600 bp, Chicken  19866894298923_1
ttgctagtgaactcagctgcctggatgttgtacccatggagaattctatgcattagcaatctctttagagttttcagttaatcatgaacaacctaatctttccagggtcttgaacaagcacatttctcactgacttccttttgcattctcaggactgctatcacagcagcaaatgcagcctacggtgcataactgggagaaataaagaatccactgggcttgggatgagaatatttgtttttcttttatgcacttacagtgagagctgggatctcactggcctcccttccgaaacctatytcaaagttaacttcagcaggagcagataaaatttgatgaggtaggagataatattacccgctctcagcttccagctaaaggagttgggcaaactgtgatttcatctgacgactaccagtgcccaaagcactgcacgatgggcagagctggctgcacacgcataaccggtcaccacagctctgccaaggaacagcaaagccttaggctagggtaatccaatcgcttgtgatcatcttcctgtactccagttcagagggataaccatctaaaacaaggaagccaaggtaacgtaggcacaag

SEQ ID NO: 51287 - DNA, 600 bp, Chicken  19866894298923_2
caaggtaacgtaggcacaagcactgattaaaaagatcttcggccttatgttcagctccactaaatcttggaagactcaagatgccagagagcagaacagcggcattagtgcgagacaagcgggatgagggaagtaattacagcctgcttacttccataccgatttggtacaaaaacaagggatgaaagatagggaatccaacttttaattaaggactgccttgcggactttacgtaagttgccaacagggaatcgttatccaatgggaaagttttagttcactttgcagagatcagacastgcacaacgcctcctgatataagaaaaagctgtcagatataaagaagatggactttgaaaggaatttacatgtcaaaacaaggaaaatgataaaagcctgctctccagcaaaggaaatgtagaatccacaataaagcaggcgaaaaaagaaagaaaaaaaaaaaaagagaacaatttgctaaagacataaaagcaaataccaacaaacatcagaagcagaaaactgccagatgatcagtggggatgacgcaccgtcagtgccaaacacctcaggggaaaacagggtcagttggaaaacct

SEQ ID NO: 51288 - DNA, 600 bp, Chicken  19866894298928_1
tgcagcagatgcatgattttcagattaaccttatttctccattcttcttttataatgtgcttttttttttagctgatgagaattggaaactaatttaaaacttaatagcacattcattcatccatcattgattaatgttaggattttaacaaggaagaaataaaatcttttgcaaaacaagataccaagatacttctgaagcagaatttaattttaaatttgatcatcattcactcaccattgcaattagagtttagcttattaaataccatctgttttctaaacatcaaggaatattcygaaaagatttctctaaaggcaaaaaatcctacatgacgaaagcttgtgccatcttttttaacattactttgcatattggatttttaaccttttaacaaagaaaagaggattgaccaacaagataataagtgcatatgctaaaaggatgagaacataatgaataataaactcttcagaagcacccaggcttaaatatacttgccttttaactatatttacctctaaggaattcagaaggagagaaagaaaaaagttcacaatattttcttaatctcatttcctttttttttttttttttct

SEQ ID NO: 51289 - DNA, 600 bp, Chicken  19866894298934_1
catcagacttatggcagatagtttgacagaggtacggatgttctggtttatatctaatgggaatttaatgaacattttactaaaataaacgtagttaatgttttgtggttgcacggagcagtaactgtctacagatttgtggtcaggatagcttacagttcactgcaaatttcctctccccagaataggatcttctttctcagcactgtgacatgaggtcagaaggacggaaatgcagttggagattgttttacagctaagaatacagtgcaggattttagacgattgtgaggaataacrtttgatatccactgtgatcagtaaagaatgataaatggcatttcagtgtgctgaaatcctcagttgatgccaagatagtgcctgtgaaraatgaagattccaagattttgggactcgtagaaaatgacacaagtatccgtattacaggaagataaggtatttgtaatgcaggactgcagtctgggagagagggtatatttttctctttctctacccagaagtgccctaggtatattcagaccctgcctagtgtccaagccagggtgagtgtatgactcaagtaatagccgtgctgctggc

SEQ ID NO: 51290 - DNA, 600 bp, Chicken  19866894298934_2
cgtagttaatgttttgtggttgcacggagcagtaactgtctacagatttgtggtcaggatagcttacagttcactgcaaatttcctctccccagaataggatcttctttctcagcactgtgacatgaggtcagaaggacggaaatgcagttggagattgttttacagctaagaatacagtgcaggattttagacgattgtgaggaataacrtttgatatccactgtgatcagtaaagaatgataaatggcatttcagtgtgctgaaatcctcagttgatgccaagatagtgcctgtgaaraatgaagattccaagattttgggactcgtagaaaatgacacaagtatccgtattacaggaagataaggtatttgtaatgcaggactgcagtctgggagagagggtatatttttctctttctctacccagaagtgccctaggtatattcagaccctgcctagtgtccaagccagggtgagtgtatgactcaagtaatagccgtgctgctggctgccctttctcttggggactcaagattatgcactgtgggaagcctgttcaggggaatgatccctggaaatgccttggtatcctacaagt

SEQ ID NO: 51291 - DNA, 600 bp, Chicken  19866894298937_1
tatgatcatggttatgagtgaaagtgctgatctggcagtgggtggtaaagtgttagaaaatatgtatgaaaataggaggataaatttcatgactgtatgttactcaaaaaaacaggatgggtcaacaaaatctgcagaatggaactatatgccattcacatcatcagtacatctactttatttctttcagagttatggagaacagaattccatttcttcactggatccatgtgcagcacacatgcacaaaagataagggtatttctcagaattcacataaattttcactgtatagtttgkcattttattattgatacatttagaaaaataaaatagtatgtaaatactatgtgtttttatttatttatttatttatttattatgatggcatctataaacccttctgggcttgcttgttgccatgagcagtccttggtttactacagcaagcagttcttttagattggtgctaatgacatcacacctatacactatattttcagatttaactttttgaaataatgttggatattggaagacgagtcattaagtttagatgtataattttgtacacagtgccacctggagaatttgggaata

SEQ ID NO: 51292 - DNA, 600 bp, Chicken  19866894298944_1
gaggaataagagtacaaacacaaactgcttcagatttaagttccatactacaatttcagttcactttcaggcctacattttctgcatgacataattctcaaatgtcttgcacaccaataagtagtgcagtgtctttgaattcaaacatctgatttgtcttgttttcctgatcactctagagggcatacatatgaaccctcggtagatgcaatgaaattgttatgatgatggcaacagccatcctatttttccaaagttttcaccagttcctaataaagttcagtcaaagttgaaataaaraattgaattcatagcccacaatcatgaaataaacactggagaagggaacaagcccttaggttactttatagatgaaacaaaagtttatctgcgagaaaaaaatgcacgaacattcctgcatccttataccttagtgacaacgaagaggtcttcccgcttcacagccccctccttgatcttctgcttgattgcattccctatttcatgctcattctggtagaaataggcacagtcgatgtggcggtagccagcatcgatagcgtgtttcaccacctcttccacctttcctggaggagcctg

SEQ ID NO: 51293 - DNA, 589 bp, Chicken  19866894298954_1
taacacactacaataaagctgtaaaagctgcatttgtgatacgttaaaaaagtaattctgctcaagaagactaagaaacaagttcagactaacacggcttttattacctcatgcagaagtgtttttaaaaccttcttagacactgcatttaaatcttgcgaagtcatgggaactcattcgctcagcttctcaatgtacgagcattcaaagctgacactcagggattcctggtaaatccacccttcgaacccaaatgcccaggtttccattacgtctgcaagccagtgcgtgcctaacggsccaggtattacacacctttccttagagacaagggggcattgctaacttactcattataccatgaaccccttcttgttacttggttttctgcaaacctgcaaggatattttattagccactaaatacattagtactatttacatcctcaaatgctccgtttttaataagctaccctatcacctgataaaacagtaaaattacaaagatcttattcatgaaatcaaacagatcctctgggttcataataggcacgttgtcttttcaattatttacgtattttttagcaatt

SEQ ID NO: 51294 - DNA, 600 bp, Chicken  19866894298959_1
tttttcaccaattttagtgctgttttatccagtaaggtgctgctagattgttatccagtcagtaagtcacgtacccttggcacttctcttgctctttgtcttggtttggttgggacagagttaattttcttcatagtagctcacagggtgttatgtttcacatttgtgatgaaaacagtgctgataacacactgatgttgtagttgtcactgagcagtgcttgcactgagtcaaggactttctggcttctcatactgcctgccagcaaggttttcttacttccgattgtcttcccccccrttcagctgcagkgatgtgaccaagcagctctgtggtgcccagctgcttgccagggttaaacctcatctctctttggttgctgtaggctctttgggtacttctctgggctcttgcaggctcatgggaagstcttgtgctatgttctctgtgatggccatcagcgtaagaatgagaggactttgggctaccttggcccatttccttattgccttttctctgtaggactgcacaattttaggracatggtttagtgggcatggtggtgatggattaacagttgaactagattatattagtgct

SEQ ID NO: 51295 - DNA, 600 bp, Chicken  19866894298959_2
tttagtgctgttttatccagtaaggtgctgctagattgttatccagtcagtaagtcacgtacccttggcacttctcttgctctttgtcttggtttggttgggacagagttaattttcttcatagtagctcacagggtgttatgtttcacatttgtgatgaaaacagtgctgataacacactgatgttgtagttgtcactgagcagtgcttgcactgagtcaaggactttctggcttctcatactgcctgccagcaaggttttcttacttccgattgtcttcccccccrttcagctgcagkgatgtgaccaagcagctctgtggtgcccagctgcttgccagggttaaacctcatctctctttggttgctgtaggctctttgggtacttctctgggctcttgcaggctcatgggaagstcttgtgctatgttctctgtgatggccatcagcgtaagaatgagaggactttgggctaccttggcccatttccttattgccttttctctgtaggactgcacaattttaggracatggtttagtgggcatggtggtgatggattaacagttgaactagattatattagtgctcttctccaacct

SEQ ID NO: 51296 - DNA, 600 bp, Chicken  19866894298959_3
ttcatagtagctcacagggtgttatgtttcacatttgtgatgaaaacagtgctgataacacactgatgttgtagttgtcactgagcagtgcttgcactgagtcaaggactttctggcttctcatactgcctgccagcaaggttttcttacttccgattgtcttcccccccrttcagctgcagkgatgtgaccaagcagctctgtggtgcccagctgcttgccagggttaaacctcatctctctttggttgctgtaggctctttgggtacttctctgggctcttgcaggctcatgggaagstcttgtgctatgttctctgtgatggccatcagcgtaagaatgagaggactttgggctaccttggcccatttccttattgccttttctctgtaggactgcacaattttaggracatggtttagtgggcatggtggtgatggattaacagttgaactagattatattagtgctcttctccaaccttaatgattctgtgattcattcgtgcccatatttatttgccagagaagcccactccccagtggcagcccttcagccaggctgcagtgcagaccctacagaggaacgcaggttcttcac

SEQ ID NO: 51297 - DNA, 600 bp, Chicken  19866894298959_4
tctggcttctcatactgcctgccagcaaggttttcttacttccgattgtcttcccccccrttcagctgcagkgatgtgaccaagcagctctgtggtgcccagctgcttgccagggttaaacctcatctctctttggttgctgtaggctctttgggtacttctctgggctcttgcaggctcatgggaagstcttgtgctatgttctctgtgatggccatcagcgtaagaatgagaggactttgggctaccttggcccatttccttattgccttttctctgtaggactgcacaattttaggracatggtttagtgggcatggtggtgatggattaacagttgaactagattatattagtgctcttctccaaccttaatgattctgtgattcattcgtgcccatatttatttgccagagaagcccactccccagtggcagcccttcagccaggctgcagtgcagaccctacagaggaacgcaggttcttcactttcctcagcatgagtagaagcgatcctgggatgtgctttgtggtgctgtaaagagctcggagctgcttgtgattagcaaagcactgtaatgagggccagagggacacaaa

SEQ ID NO: 51298 - DNA, 600 bp, Chicken  19866894298959_5
tttgttctttatcaacaatggcatcaaaatcgctctgagatctccagctctataccctgtgctgcaaaccacagggctgcttcatggcctttttgtttcctcctctgctgaatgcaggattccaggatgcacaacaagaccctgaaacgcacccgcaagtttgtggtggatggagtgggaggtgagcgtcaccacctcgaagatcatcagcgaggatgagaagaaggatgaagagatgaggtttctcaggcaagttggcctccatgctggagggagggcagggcgacaagttgggcagcrttatattctctrtgagcagaagcagtcctgtcactatctgcctgtgtaaaaagtcrgtctccatcttgttgataagctcccttcaagtactggaaggccacacttggggtttcccccggtggcttctcttctgggacgaacaagcccagctctctcagcctttcttcccctcagtgaggggagtgatgcaacatcttggtaggtagggcagaatctggggaaaactgccctttctgccacccaggtgtgaacacgaatggatgcagggtgttgggagcaggctggcgcaacaccagcttg

SEQ ID NO: 51299 - DNA, 600 bp, Chicken  19866894298959_6
caacaatggcatcaaaatcgctctgagatctccagctctataccctgtgctgcaaaccacagggctgcttcatggcctttttgtttcctcctctgctgaatgcaggattccaggatgcacaacaagaccctgaaacgcacccgcaagtttgtggtggatggagtgggaggtgagcgtcaccacctcgaagatcatcagcgaggatgagaagaaggatgaagagatgaggtttctcaggcaagttggcctccatgctggagggagggcagggcgacaagttgggcagcrttatattctctrtgagcagaagcagtcctgtcactatctgcctgtgtaaaaagtcrgtctccatcttgttgataagctcccttcaagtactggaaggccacacttggggtttcccccggtggcttctcttctgggacgaacaagcccagctctctcagcctttcttcccctcagtgaggggagtgatgcaacatcttggtaggtagggcagaatctggggaaaactgccctttctgccacccaggtgtgaacacgaatggatgcagggtgttgggagcaggctggcgcaacaccagcttggcccgagccatg

SEQ ID NO: 51300 - DNA, 600 bp, Chicken  19866894298959_7
ctgtgctgcaaaccacagggctgcttcatggcctttttgtttcctcctctgctgaatgcaggattccaggatgcacaacaagaccctgaaacgcacccgcaagtttgtggtggatggagtgggaggtgagcgtcaccacctcgaagatcatcagcgaggatgagaagaaggatgaagagatgaggtttctcaggcaagttggcctccatgctggagggagggcagggcgacaagttgggcagcrttatattctctrtgagcagaagcagtcctgtcactatctgcctgtgtaaaaagtcrgtctccatcttgttgataagctcccttcaagtactggaaggccacacttggggtttcccccggtggcttctcttctgggacgaacaagcccagctctctcagcctttcttcccctcagtgaggggagtgatgcaacatcttggtaggtagggcagaatctggggaaaactgccctttctgccacccaggtgtgaacacgaatggatgcagggtgttgggagcaggctggcgcaacaccagcttggcccgagccatgttttcaagatgtatgtgcaataattcggatggtaggcattgcct

SEQ ID NO: 51301 - DNA, 600 bp, Chicken  19866894298962_1
tgagagaaccaagttttgtgcttatatatctgattttttaaagttatacttcaatttcgtggagttatctgtttctactgaaagcagcccatttggaagaagatgaagctgagttaatcaacttaatagtagagttatcctgacattcaatctgaaagaaattgaaaatgatcactttcttactaggctgattatcataatggttataaaatgcatttaatgttgaatagtcttgattggcttgcagttgcttcaaacagtgacgttaatctgacttaactacatttttattctgtacarcttgttagcctcatcagattaatgtagcaaggacaaggtagaaaagaacaaatttgcttgcatatttttttatggtttggaacactactattagagagtttacagcgtctgatagaggggagagtcaaccctgaaaatatcttaggaaaatatcccagatacattttgttctataatttttcataaaatgaatgattaaagaaaaaaaacaaccaacaactgaaggctagctgtcaaaagaaaaaagaaatcaagtgaccaaaaccggaaaaatcaagataacaaaggaatttcactgta

SEQ ID NO: 51302 - DNA, 599 bp, Chicken  19866894298966_1
  misc_feature (1)..(8): n is any nucleotide
nnnnnnnnttatgaggatgccttattactttcctatcttctgtgtgatcttgacgtttgttcgctattctttctcatctgcaactgaatttcaattatgaatacagtgatataaactgtaaaatgtaagtgttcttagctctttgattaagagttgatatatgaaaaaatatcttttaaataaaacatctctcactgcactctacatctcagcatttgttctgctaaatatcatgtattgctacatttaccttatcaagcccagatagtttgtcagaaaatagttgcatggattaaaaaytaaacccttgcttgaattattttaaaaaatacctctaaataagttgatagagttacaaaataaagataatatgaayggagggaatgaatctttagcatgcatacagttagaaaagcctcatgacaagggagtcaatgttgaaaagaagctgagctattcaagatggaagagaaggaatgttcattactatttgtatttgagaagacatctaagtgtagtgaaaatatttggaggaaccgaaattatgtactgattaccaggagagtagagacttgtaatttgttattgagtggatatwt

SEQ ID NO: 51303 - DNA, 600 bp, Chicken  19866894298966_2
tctgcaactgaatttcaattatgaatacagtgatataaactgtaaaatgtaagtgttcttagctctttgattaagagttgatatatgaaaaaatatcttttaaataaaacatctctcactgcactctacatctcagcatttgttctgctaaatatcatgtattgctacatttaccttatcaagcccagatagtttgtcagaaaatagttgcatggattaaaaaytaaacccttgcttgaattattttaaaaaatacctctaaataagttgatagagttacaaaataaagataatatgaayggagggaatgaatctttagcatgcatacagttagaaaagcctcatgacaagggagtcaatgttgaaaagaagctgagctattcaagatggaagagaaggaatgttcattactatttgtatttgagaagacatctaagtgtagtgaaaatatttggaggaaccgaaattatgtactgattaccaggagagtagagacttgtaatttgttattgagtggatatwttttttttctgtaccaccgaagaattcttcagagttaaaatagtagtatataattcttagtgtatgtatgtataaata

SEQ ID NO: 51304 - DNA, 600 bp, Chicken  19866894298966_3
aytaaacccttgcttgaattattttaaaaaatacctctaaataagttgatagagttacaaaataaagataatatgaayggagggaatgaatctttagcatgcatacagttagaaaagcctcatgacaagggagtcaatgttgaaaagaagctgagctattcaagatggaagagaaggaatgttcattactatttgtatttgagaagacatctaagtgtagtgaaaatatttggaggaaccgaaattatgtactgattaccaggagagtagagacttgtaatttgttattgagtggatatwttttttttctgtaccaccgaagaattcttcagagttaaaatagtagtatataattcttagtgtatgtatgtataaataacccgtagttagaaatgagatttaaaatactttacagtgcctcaaaatacgtatcccagttttaagagtgacctttagtgagaatctgggagtgctgttaagaagtgtatagactgttaagagctgcctctgagaaacagccatgatcaggctgggagctggtggcttaaaattagggaccagatcaatgaaggcattggtggttggagtctactacaggct

SEQ ID NO: 51305 - DNA, 600 bp, Chicken  19866894298967_1
gtctgtgtgttgcaaaaccgagagttgatgggatcagagcctcaactctgcctcttcacaatacttagaggagggacgtacgccacagaaatcaggttttcaccctttagacctgacctcgctgttgcatcttcgttgcctcgggtgtttgtaagcacccagcagccctcaagtctggctcagcctggctccccggggctggcattggcagaatggcgcttgtgctcaggctctgaacgcttaacagctgcacgctggaagtcctcactgtgcacccacacagctcccgtggcagctctygctacgcagtgcctgctgctgtcctactgcagctcagggccttcaggacggtccttgggaactccggtatggccacctttggragcgtgcagctggaggatgggctcccacctcggtgacggcaccgcagggcacaaatgcttgctaccagccaacgctgccgagggacaccgtcacgtatttcctttcatcctgtctcccctagagtgaaaacgccagtgaggaggctggtgagggtgaatacgtcaatctgtattcctctggccagagcaacggggaactccctcattctggaggagt

SEQ ID NO: 51306 - DNA, 600 bp, Chicken  19866894298967_2
cacagaaatcaggttttcaccctttagacctgacctcgctgttgcatcttcgttgcctcgggtgtttgtaagcacccagcagccctcaagtctggctcagcctggctccccggggctggcattggcagaatggcgcttgtgctcaggctctgaacgcttaacagctgcacgctggaagtcctcactgtgcacccacacagctcccgtggcagctctygctacgcagtgcctgctgctgtcctactgcagctcagggccttcaggacggtccttgggaactccggtatggccacctttggragcgtgcagctggaggatgggctcccacctcggtgacggcaccgcagggcacaaatgcttgctaccagccaacgctgccgagggacaccgtcacgtatttcctttcatcctgtctcccctagagtgaaaacgccagtgaggaggctggtgagggtgaatacgtcaatctgtattcctctggccagagcaacggggaactccctcattctggaggagtaagtaaccgggagaggccacgcactgggaaggggctgcctggtgcatgctgagctcacactgtggcccggcccctgtgcaccc

SEQ ID NO: 51307 - DNA, 599 bp, Chicken  19866894298971_1
  misc_feature (1)..(25): n is any nucleotide
nnnnnnnnnnnnnnnnnnnnnnnnngtgttacggtagctggcagacggggcgccggacaggctagaactgtcacggtagctggcagacggggcgccggacacattgtaggtgttgcggtagctggaagtggggcgccggacaagctttgggtgttgcggtagctggaagtgggtcgccagacaagctgtgggtgtcacagtagctggaagcagggcaccagacaagctgcaattgttgcggtagctggagtggggcgccggacacattatgggtgtcgcagttgctggaagcggggcgcyggacaagctgtgggtgtcacggtagctggaagtggggcaccggacaagctgcagttgttgcagtaactggaagtgaggcgccggacacgttgcgggtgttgcggtagctggaaacggggtgccagacacattgcgggtgtcgcggtagctggaaacagggcgctggacactgtaagtgttgcggtagctggaagcggggtctctccctgtctgtctccatgatggagtgggaagctgcagaaaaactgctcttaacttttctttttaggagtggggagcaagtatctcctaaagacctg

SEQ ID NO: 51308 - DNA, 534 bp, Chicken  19866894298971_2
cggtagctggaagtggggcaccggacaagctgcagttgttgcagtaactggaagtgaggcgccggacacgttgcgggtgttgcggtagctggaaacggggtgccagacacattgcgggtgtcgcggtagctggaaacagggcgctggacactgtaagtgttgcggtagctggaagcggggtctctccctgtctgtctccatgatggagtgggaagctgcagaaaaactgctcttaacttttctttttaggagtggggagcaagtatctcctaaagacctgttggagctggtaaaatgggyctgacaacgtgaatactttacggaggtggcaattatgctcaktgttttggaatggtgtgatataagagatcatatatgggactgcatgaacatctggggggaaggaggaaaagttactgaagcctctggaaccactgtgcccgtgctgttgctaacaccttgaaggccaggcagccggaatggcggatcgcagcaaggccatacacgctgtatcgaacaggtttctccatccac

SEQ ID NO: 51309 - DNA, 492 bp, Chicken  19866894298971_3
agtaactggaagtgaggcgccggacacgttgcgggtgttgcggtagctggaaacggggtgccagacacattgcgggtgtcgcggtagctggaaacagggcgctggacactgtaagtgttgcggtagctggaagcggggtctctccctgtctgtctccatgatggagtgggaagctgcagaaaaactgctcttaacttttctttttaggagtggggagcaagtatctcctaaagacctgttggagctggtaaaatgggyctgacaacgtgaatactttacggaggtggcaattatgctcaktgttttggaatggtgtgatataagagatcatatatgggactgcatgaacatctggggggaaggaggaaaagttactgaagcctctggaaccactgtgcccgtgctgttgctaacaccttgaaggccaggcagccggaatggcggatcgcagcaaggccatacacgctgtatcgaacaggtttctccatccac

SEQ ID NO: 51310 - DNA, 600 bp, Chicken  19866894298981_1
gaggcagtaccaagtgacaccaggctgctgtcttggagctgatcccaagcagattgctttcctgggatgtgctgagtcttctccatttccagtgcagccaatagaagctcagagggtgctgagcaccctctgcataatgctcagggctcaaactcaacatctgctgctacttccaacccgttcactggcgtagaagccacaaagctttcttgtctcttcatttaatcattcatctgcagagctgagctgttattaacatccaagtacactcgtcttcatataacatagcagtgtaagaaygacttgattcctgtcttgagtggaaacccggaggtgatctccctgtggcatcacaccagtgacagcaggaactccagccggctgccacgagacactggcagaagttcagtgggactgtgtgaagcacaacaacgtgtgatggttgcagcgttcacagccagggtgagacagaaatgctggctgtgcaaagggtgctagctcagttgggtgggcacctygtagcaacaggatcacagcagcctcatcatgatggtggagcaaatcgacttcagtcacaggaactggtaagaagggctgctt

SEQ ID NO: 51311 - DNA, 600 bp, Chicken  19866894298981_2
catttaatcattcatctgcagagctgagctgttattaacatccaagtacactcgtcttcatataacatagcagtgtaagaaygacttgattcctgtcttgagtggaaacccggaggtgatctccctgtggcatcacaccagtgacagcaggaactccagccggctgccacgagacactggcagaagttcagtgggactgtgtgaagcacaacaacgtgtgatggttgcagcgttcacagccagggtgagacagaaatgctggctgtgcaaagggtgctagctcagttgggtgggcacctygtagcaacaggatcacagcagcctcatcatgatggtggagcaaatcgacttcagtcacaggaactggtaagaagggctgcttgcacctttgcttgcaccaggagagcctggtcagcccaagtcctcatgggtggaatttgctggagttaatcagtgctctgcatttgttcatataacagctgcgtgcacacagcatgaatcagtttcctgcatatgggtggtatgccactaggaatgctccaggtcttcccaccactggctggctctttcgcagggcttgggtaatattggcctgccccg

SEQ ID NO: 51312 - DNA, 599 bp, Chicken  19866894298991_1
  misc_feature (1)..(18): n is any nucleotide
nnnnnnnnnnnnnnnnnnacctcagaaaggaaaaaggaaaagcatcagagcagcatcttaacaggcgttccatcttctctcacattctgcagtagacgtttatctcagggagctgtgaggcgtgtgtttcaagctctgtctgtggataattattgacttcagcccaggatctgcaccttaacggcatcacatccccctcattctgagcaggctgaacctcctgcccacgctgagagcagcctttacagaaggatcgtgggttcagtttgtttgttcagtagactcgttttgctttcagcrtgttgctgcctttggtgctcttgttttaatcttctgttcttctttggtctctgtgtgctccatccctgctttgccccaagctgcagtccctccttccgtccccactttgctgcagagggaaagtgcccccgccagaccccaaaacatgcaggcagagttgkgaggctctggggaartgtcatacctctcacatctgttgcttcttcctgcctggggagaaggcagaagtctctattgatttccacagtgtaaccagaaagtgggcactgtgtgactgcccccagcaaatcctgcatctc

SEQ ID NO: 51313 - DNA, 600 bp, Chicken  19866894298991_2
gcccaggatctgcaccttaacggcatcacatccccctcattctgagcaggctgaacctcctgcccacgctgagagcagcctttacagaaggatcgtgggttcagtttgtttgttcagtagactcgttttgctttcagcrtgttgctgcctttggtgctcttgttttaatcttctgttcttctttggtctctgtgtgctccatccctgctttgccccaagctgcagtccctccttccgtccccactttgctgcagagggaaagtgcccccgccagaccccaaaacatgcaggcagagttgkgaggctctggggaartgtcatacctctcacatctgttgcttcttcctgcctggggagaaggcagaagtctctattgatttccacagtgtaaccagaaagtgggcactgtgtgactgcccccagcaaatcctgcatctccagccaaggagtctgcaacccacagctccagtctgcaaagcagggggcagaacaggacatttccttggctgctgctccagctaaagcctcctctttgccctgctttgccagagcatccttgaagaggtaggactgcaaatttgatccacgccaatcatttgt

SEQ ID NO: 51314 - DNA, 600 bp, Chicken  19866894298991_3
cttaacggcatcacatccccctcattctgagcaggctgaacctcctgcccacgctgagagcagcctttacagaaggatcgtgggttcagtttgtttgttcagtagactcgttttgctttcagcrtgttgctgcctttggtgctcttgttttaatcttctgttcttctttggtctctgtgtgctccatccctgctttgccccaagctgcagtccctccttccgtccccactttgctgcagagggaaagtgcccccgccagaccccaaaacatgcaggcagagttgkgaggctctggggaartgtcatacctctcacatctgttgcttcttcctgcctggggagaaggcagaagtctctattgatttccacagtgtaaccagaaagtgggcactgtgtgactgcccccagcaaatcctgcatctccagccaaggagtctgcaacccacagctccagtctgcaaagcagggggcagaacaggacatttccttggctgctgctccagctaaagcctcctctttgccctgctttgccagagcatccttgaagaggtaggactgcaaatttgatccacgccaatcatttgtgtggtgggtcctaag

SEQ ID NO: 51315 - DNA, 600 bp, Chicken  19866894298994_1
tgttcccaggtttaaagctttttttctcttgccttttattggactaaccccaagacctgttgctgtaccccctctctaaataacagatagatagtgaattctgagggcccccaatgcctggtagagagaagattcacttggatggagggagggaaaagagtgggtgctgttccagctgtgcccctccccgcactgtgcccccacttaaactggagctgtagagttctccccatcgctttctcattctccttaagagaagatgctgtgaagacagaggcagcacttggaaatcagggagaygtgtgccacaacaaacttgtgtctgtattaaaacaaacaaactaaagcagcaaagcaaagctactcagctgctgtttgctctgtgggcaattactcttgctgtgccttctgcaggtggaggttcctcgatttaatcattccaaagagatgccaagaacacaatgacagggagcgatgccctcatcgtcaccggccccaccactcccaacctgtgacatggggaggaagaggctgccaggaggtgaagagcagagtttgctacctgccatacctcctgctcttggctctcacccatggaaa

SEQ ID NO: 51316 - DNA, 600 bp, Chicken  19866894299006_1
gctttgaagggctttgaaagctcttacatcatgaaggctgcaaattatttgtaaacaaggtcttactacttgcaaacttagatgttattttgtaaagtaagatagattgaattattagaaccaaatctgtaatgttactcttgtttacagcacacctcccttaacaataaatctccaagcccgtgggcactttcaattactgcaacttccttgcttagcaaaggaactcataaacgtccttctgtcagatcattctgaaagaaaagacctttgtatgtaatgaagactgtttctaatgasatatatatatgtatatatatgtatgtatctagacattaaataattatcttctgtggttcacttctctttgcctgtgacaacagtagagaagtattacagggtttactgcagaaaacttggacctttttttaaagacttaataggcacataaaaatttattcctgtgtactgtgtaaataggtcaaaaatgcaatggaactcttctaagtgaatctttacaatttatttaagggtttttttttaatgtataaaatggcaattatttccagtgtgaactctttcaaatgtacagcaccagtc

SEQ ID NO: 51317 - DNA, 541 bp, Chicken  19866894299008_1
ccactaaattgtgtcccttagtaccacagctaaacgtttcttggacacctccagggacggtgattccagcacttccctgggcagcccgttccagagcctgatcactctttcagggaataaattttactcaatatccaacctgaatcaatttttcatgatggatttggcaaatccatcatgcaaaggcacgtcttcaataaatagctccaaatgatttttctatcacatcaatacttatatggaaaaatgaattaatagaaacctttcgacaaacttttcagtaattatgctttttatatytaayatttaatgtaaatttgatgttgaacggcagttctgttagcagtagtttagctactggacaccaaacagtggagatgtstgatgctgagtgatctgttcaggagagctgtgctcgatcacatcacttcatgattcccttagaaagaagtttgaagaagccttcaggaactgccaccaatggaggcaagcttccgtaggtccttctcacaggtggggggaatggtaagattttcctatg

SEQ ID NO: 51318 - DNA, 537 bp, Chicken  19866894299008_2
taaattgtgtcccttagtaccacagctaaacgtttcttggacacctccagggacggtgattccagcacttccctgggcagcccgttccagagcctgatcactctttcagggaataaattttactcaatatccaacctgaatcaatttttcatgatggatttggcaaatccatcatgcaaaggcacgtcttcaataaatagctccaaatgatttttctatcacatcaatacttatatggaaaaatgaattaatagaaacctttcgacaaacttttcagtaattatgctttttatatytaayatttaatgtaaatttgatgttgaacggcagttctgttagcagtagtttagctactggacaccaaacagtggagatgtstgatgctgagtgatctgttcaggagagctgtgctcgatcacatcacttcatgattcccttagaaagaagtttgaagaagccttcaggaactgccaccaatggaggcaagcttccgtaggtccttctcacaggtggggggaatggtaagattttcctatg

SEQ ID NO: 51319 - DNA, 459 bp, Chicken  19866894299008_3
agcccgttccagagcctgatcactctttcagggaataaattttactcaatatccaacctgaatcaatttttcatgatggatttggcaaatccatcatgcaaaggcacgtcttcaataaatagctccaaatgatttttctatcacatcaatacttatatggaaaaatgaattaatagaaacctttcgacaaacttttcagtaattatgctttttatatytaayatttaatgtaaatttgatgttgaacggcagttctgttagcagtagtttagctactggacaccaaacagtggagatgtstgatgctgagtgatctgttcaggagagctgtgctcgatcacatcacttcatgattcccttagaaagaagtttgaagaagccttcaggaactgccaccaatggaggcaagcttccgtaggtccttctcacaggtggggggaatggtaagattttcctatg

SEQ ID NO: 51320 - DNA, 600 bp, Chicken  19866894299013_1
tgggcagcctgggctgctggttggcaactctgcacatagcaggggttggaactggatgagcattgtggttcttttcaacccagaccattctatgattctttgtttcccaaatgttttttgtgtgggtagataataggtttcacaccaaaatgtatctgccaagttcttttcaaggttattaaaatatatgtggaggcagctttgtgatgcagatagaagaagcaaaatgcagcagcatgtttagatgtcacagagtatgtgatagatgcagccctctcataggaaatgtctggaattgakctctcagagytcaggttctacatgtaaacagttaatacatacatatgcagcacactggcacacatattcattcttttccaagaactcattaaagtccctctgtttgtgtccctctgggcatgtgcagttgcattgtgggtggttgtacgcccacttactttatgcccattctcccaccactggtttcatcactgagacttttggttgacctgtagctgtttttccccaattttgcaaacttccattgcttgttaggccataatgagcaacttccaaaacaatgtgtgtgaaaatccaagg

SEQ ID NO: 51321 - DNA, 600 bp, Chicken  19866894299013_2
gggctgctggttggcaactctgcacatagcaggggttggaactggatgagcattgtggttcttttcaacccagaccattctatgattctttgtttcccaaatgttttttgtgtgggtagataataggtttcacaccaaaatgtatctgccaagttcttttcaaggttattaaaatatatgtggaggcagctttgtgatgcagatagaagaagcaaaatgcagcagcatgtttagatgtcacagagtatgtgatagatgcagccctctcataggaaatgtctggaattgakctctcagagytcaggttctacatgtaaacagttaatacatacatatgcagcacactggcacacatattcattcttttccaagaactcattaaagtccctctgtttgtgtccctctgggcatgtgcagttgcattgtgggtggttgtacgcccacttactttatgcccattctcccaccactggtttcatcactgagacttttggttgacctgtagctgtttttccccaattttgcaaacttccattgcttgttaggccataatgagcaacttccaaaacaatgtgtgtgaaaatccaaggaaagcatcct

SEQ ID NO: 51322 - DNA, 600 bp, Chicken  19866894299023_1
gacttcagaaagaaattcttcactaggagggcagtgaggcagtggcacagctgcccagagaagctgagggtgtctcgtacctggaagtgctcaagaccaggttggatggggccctgggcagcctgagctgatgggtggcagccctgcccacagcagggggttggaactgggtgggctttaataaggtccattccagcccaatcccttctatgattctatgacacaatttatatttcaacagagaaataagtgtatctcagattaaatgttttactccttaattaaaaatacttcaatacycatcatctactgagggtgttggctggtagagcaacacacctacagaagtgttaaccacattgttcctcagtattcttctggggatcacagtgaacaccacaaccacagtgagctctctgcagaaccatcagctgagctgcttgcaagatcaacacttagcatgcttcaattgctgtgcaggaagttgggaacatgacacatcatgacagagacagaggctctggtctgagggggcttaaagtagatataggagctgaaggtgtgtatctgttcaatgcatagcatgactatgttgcatga

SEQ ID NO: 51323 - DNA, 600 bp, Chicken  19866894299025_1
gttggaaggggccttagttgagttgggttgagttgggtgggaaggggccttggttgcattgggttggaaggggctggctactgtcccccagctcaggctgcccagggcccatccatggcctcgggcacctacagggatggggcacccaccgctctgggcagcagtgccaggtctcactgcccattaagtgaagaacttccgcctcacatccaacctaaatctcccctcattgagcttaaaatcattcccgaaccttacccagcctgcatggacagcagggctaggatgggttacatcccrgagtcgcggctcctcctcaaatccatccatcctttgctccttccccagcagcccgcacactggcacagggctgcagcccagctggcagcccacgatggatcccaaaaggaaccgccaccccgagccgctacctggggcagcgctatgcagggacacgacagatgatcccagcggggggctgttgttcctccagcaaaaacaaatgggaaaaaataaataaaatgaaaggactgctctgctggcctggcacagaagggacatctgcccgtgtccatctgctgcttgcgctgacaccccggc

SEQ ID NO: 51324 - DNA, 600 bp, Chicken  19866894299035_1
gtatcagcaggtagtagtgattaaattctaacctcatccttttctctgtatttcatcagtactccaaaatcagacagaatgtgcttacctcaaattataggcaggatgtattgctgcaaattctgtggctacccttttcacttcctctgagctactcacaagaagcttaagtctttcacaaggaactgaagcagagcatcagctgtaggcactatgatagtggatatgaaaggcatgtcttattttacatacatgatgcgagcatacagcacaggcaatcatgtgatctaactaattagygtgaagttataggatgagcagaatggtgatgcaagatgctagaaaagaaagcacaagacttaaaacatatggaaaacatgcctggtatcccctgttgcccagtggttagaagatgcaaggtgctgcattttgaaccatttgcagtagggatgatgcaagaatgtaggatggctttgaaaaggctaaaatgagtataaattataaatctttccttgctgagtggagttgtcagtttatatctcatagctggtgcctgaagagtaacaggtagtgccagtgaaaacaatcctgactgctcat

SEQ ID NO: 51325 - DNA, 599 bp, Chicken  19866894299044_1
  misc_feature (1)..(11): n is any nucleotide
nnnnnnnnnnnaattacttggaaatggcatccagaacaaattgtctgtcatctttccagtgacacaagtgaggctgactgggtaaatatctatgtaaatatcatgaaagttctttccattacttcccagctcaatttctttgagcaaacaaaaaagatataacccatgtgttacaaatatttcattacacacaaagtctgccatatataatataatcccactggtttttaaatgtttaatattcacaatctgatgagcagtgtctaaactactgattgtcctattataaatctttaaacyggcttaaaacagtatagaaaataaacattatgctcttattttctctatgatttggcataaagtaaacctttcctttgaccttatctcatttgataagattgtattctgtagaggacagaggtgtatcttgatgagtggtgtgtagaagatgaagatgcatactacctctgataggtaacaggtacttactagtgaagggtactgcaaaccttcagcaaatctttcaatctacaccaccatagtcactagacwttagtacagtgatgaatctacctttttttaaaaaaaaagttttacag

SEQ ID NO: 51326 - DNA, 600 bp, Chicken  19866894299044_2
atgagcagtgtctaaactactgattgtcctattataaatctttaaacyggcttaaaacagtatagaaaataaacattatgctcttattttctctatgatttggcataaagtaaacctttcctttgaccttatctcatttgataagattgtattctgtagaggacagaggtgtatcttgatgagtggtgtgtagaagatgaagatgcatactacctctgataggtaacaggtacttactagtgaagggtactgcaaaccttcagcaaatctttcaatctacaccaccatagtcactagacwttagtacagtgatgaatctacctttttttaaaaaaaaagttttacagtggtatcccatgaaaacagtacttttaacacattgcaaagtgatatttaccagctgaatgagattttcagcattgcataaatcctaggcaaaatcctggtcccartgagactttttccactaattacagaatggctattaatttgccctagtccaacatgtaaggtttcacaataatgcaaattagaatataaaatataaaagcatactttatgacctctacagcattacatgtggataagtgtgacttatca

SEQ ID NO: 51327 - DNA, 580 bp, Chicken  19866894299044_3
tctgtagaggacagaggtgtatcttgatgagtggtgtgtagaagatgaagatgcatactacctctgataggtaacaggtacttactagtgaagggtactgcaaaccttcagcaaatctttcaatctacaccaccatagtcactagacwttagtacagtgatgaatctacctttttttaaaaaaaaagttttacagtggtatcccatgaaaacagtacttttaacacattgcaaagtgatatttaccagctgaatgagattttcagcattgcataaatcctaggcaaaatcctggtcccartgagactttttccactaattacagaatggctattaatttgccctagtccaacatgtaaggtttcacaataatgcaaattagaatataaaatataaaagcatactttatgacctctacagcattacatgtggataagtgtgacttatcatttctgttataatttaatgataggactttgcaattaaaaacattgtacttgctaaaaaagcacaggaaaagaaatgacacaacaggagggaaagttaaatacctgttaatattccctgtctctgaccttcca

SEQ ID NO: 51328 - DNA, 600 bp, Chicken  19866894299048_1
gaaatgagaatgctgcatgccttggcctaaagcaattaaccaagtttgtacctaatgaagtgcatcccacatttatttatttatttttaagcgcctggtctccagttgggctccacaaagctacccacgttcaaagctttttttagctattcctcagaaatgcacagcttttcttatcagcaactgaagacagaatagatgctcacactcccaactgtggctgtgcactgagcacgtccatgctgccacataagcacttcattgcctatacgccaccacaaaaagcagtaccagtacccygtgtgtaaccgcaagctgtgcagcaagggaggtacattgcccatagctgagatatatactggggagtaggtacaatctaactgcacccgaaacataggcagcatctatcagcagttaattttcccgtgccatctggctgccctgtagtactgcagatacttgtgggatcatgcaacttggtgttatttccatttcyttttatctgccgcatctgacctcctgaagggaagggagtgcccccaccacttaacagcactgacattcatctcccccaatactattttcttttttaaagggaac

SEQ ID NO: 51329 - DNA, 600 bp, Chicken  19866894299048_2
agatgctcacactcccaactgtggctgtgcactgagcacgtccatgctgccacataagcacttcattgcctatacgccaccacaaaaagcagtaccagtacccygtgtgtaaccgcaagctgtgcagcaagggaggtacattgcccatagctgagatatatactggggagtaggtacaatctaactgcacccgaaacataggcagcatctatcagcagttaattttcccgtgccatctggctgccctgtagtactgcagatacttgtgggatcatgcaacttggtgttatttccatttcyttttatctgccgcatctgacctcctgaagggaagggagtgcccccaccacttaacagcactgacattcatctcccccaatactattttcttttttaaagggaacatttctacctagtgctagcttcctacattcattaccaagttcctgcctggtaactggcagttaaccagcaggagcaagcccatctccagtgcccagagcagaggccacacgtcgcagtaccagctgaaaacagaattctgaagatcattagcacacatccgtctctaaaatggtaagtctgataactgagaaaacg

SEQ ID NO: 51330 - DNA, 600 bp, Chicken  19866894299051_1
cctttgggctgtggtgcaagcatgccttgctgcatgcctggatgctgtggtgcttgtgctgctaatttctcctctgggttcaagcgggtagcaggcagcctcacttatgacacagccccatagatcccaagaatttgccaagcctcggctgaaggcagggtcacatagctccgtggccccttttatctctagggaatcctgtttgcctctgcctgtcattgcctctggagaactgccaaaacatatttcttggcaaggcttggatcttcccaccaaacttcgttatcttttcataagaawaaagggatgtgcaaagcccccagttccttggcaaacaaacagacctccctcagagacttattcattcaaagggcagaatagaagtcaaagaaaaaaacaggaaatacttttttttctgccaactgtagcactgtttggcttcccagtctcttctccccatcaacagaaggtcaagagtggctgaagctaaagagaagaggcagcacagcctctgccttgtcctgttctgtgtatcttgttcatgctcctggggtcgtgacggcctttgcaaattgcccctttaggtcaaatggggaggta

SEQ ID NO: 51331 - DNA, 600 bp, Chicken  19866894299053_1
atccttacaataccataatagagccatcctatcaccagatgtgcttataatgctctaaaagtgcattcttaatatctaggcatttgaggtacttatttcatttctttctcctgtcttgtaactcaggtttcctttttagggagcaataggattaattccttctcctgatccatatgctgtgtggattttttcattattatttttgtgagatggccttccatgagtcatttatgtttgaattgattttgtaaattgtttcaaaagtcaaatggagtcaaatcatcttactttgatgactgyagaaaattttaatacccttatatagcatttaatatggtcaaacatatgttttttctacagcttgattaaatgccagaaaggtaattatgaagtgttagttggtcagtgcctcttaagctgcaacgtatggttgaaattaccactatagtcaagaggaagataaagctttcttgagataatagactccatgatttatctcacatcttgggaaacaactgaaagttgtaacacaacaatacttttctcagactattttttgctcttcttcactctgaataatataatgtcatgaaagaagga

SEQ ID NO: 51332 - DNA, 599 bp, Chicken  19866894299056_1
  misc_feature (1)..(152): n is any nucleotide
nnnnnnnnnnnnnnnnnnnnnnnnnnnnnnnnnnnnnnnnnnnnnnnnnnnnnnnnnnnnnnnnnnnnnnnnnnnnnnnnnnnnnnnnnnnnnnnnnnnnnnnnnnnnnnnnnnnnnnnnnnnnnnnnnnnnnnnnnnnnnnnnnnnnnnnnatagatcaacagcatgattgaatcatgaaggttggaaaagacctcgaggatcatttagtccaatcatcaaacccatccccaccactaaaccacatccaagtcatgcacccaatgtggggcatggaagcagcccaaagacatctatctycccacatcttttccgttagagatctaaaatgaaatttctggttcaagcattaacactccattcacctacttgaagtatgggaatcaaggggtttcccmtgtggacaaacaaaaaatcctcccactcccacccagtgggaagcatacatggttggtgcaagataagagctgaaakccyasagctgagggccctgcragcatccagtcaaggctcagggtgtaccaaggagtgagaagacagcagaagcatttcagaccaccactgaggcaagcatttgtgctacctgcattgctgtagga

SEQ ID NO: 51333 - DNA, 599 bp, Chicken  19866894299056_2
  misc_feature (1)..(54): n is any nucleotide
nnnnnnnnnnnnnnnnnnnnnnnnnnnnnnnnnnnnnnnnnnnnnnnnnnnnnnatagatcaacagcatgattgaatcatgaaggttggaaaagacctcgaggatcatttagtccaatcatcaaacccatccccaccactaaaccacatccaagtcatgcacccaatgtggggcatggaagcagcccaaagacatctatctycccacatcttttccgttagagatctaaaatgaaatttctggttcaagcattaacactccattcacctacttgaagtatgggaatcaaggggtttcccmtgtggacaaacaaaaaatcctcccactcccacccagtgggaagcatacatggttggtgcaagataagagctgaaakccyasagctgagggccctgcragcatccagtcaaggctcagggtgtaccaaggagtgagaagacagcagaagcatttcagaccaccactgaggcaagcatttgtgctacctgcattgctgtaggacagaagaatcccagttgtggctcagggctatgcggtggaacagagctggtccttggaaccaatctttactcctaaatgcagacacgcttaatgcaatg

SEQ ID NO: 51334 - DNA, 600 bp, Chicken  19866894299056_3
tcatgaaggttggaaaagacctcgaggatcatttagtccaatcatcaaacccatccccaccactaaaccacatccaagtcatgcacccaatgtggggcatggaagcagcccaaagacatctatctycccacatcttttccgttagagatctaaaatgaaatttctggttcaagcattaacactccattcacctacttgaagtatgggaatcaaggggtttcccmtgtggacaaacaaaaaatcctcccactcccacccagtgggaagcatacatggttggtgcaagataagagctgaaakccyasagctgagggccctgcragcatccagtcaaggctcagggtgtaccaaggagtgagaagacagcagaagcatttcagaccaccactgaggcaagcatttgtgctacctgcattgctgtaggacagaagaatcccagttgtggctcagggctatgcggtggaacagagctggtccttggaaccaatctttactcctaaatgcagacacgcttaatgcaatgcctgtgattaatccactgacttgagtggattgactaactgtgagtatctgtaagcacagccagaggtatttgcagaa

SEQ ID NO: 51335 - DNA, 600 bp, Chicken  19866894299056_4
tgaaggttggaaaagacctcgaggatcatttagtccaatcatcaaacccatccccaccactaaaccacatccaagtcatgcacccaatgtggggcatggaagcagcccaaagacatctatctycccacatcttttccgttagagatctaaaatgaaatttctggttcaagcattaacactccattcacctacttgaagtatgggaatcaaggggtttcccmtgtggacaaacaaaaaatcctcccactcccacccagtgggaagcatacatggttggtgcaagataagagctgaaakccyasagctgagggccctgcragcatccagtcaaggctcagggtgtaccaaggagtgagaagacagcagaagcatttcagaccaccactgaggcaagcatttgtgctacctgcattgctgtaggacagaagaatcccagttgtggctcagggctatgcggtggaacagagctggtccttggaaccaatctttactcctaaatgcagacacgcttaatgcaatgcctgtgattaatccactgacttgagtggattgactaactgtgagtatctgtaagcacagccagaggtatttgcagaactg

SEQ ID NO: 51336 - DNA, 600 bp, Chicken  19866894299056_5
aaggttggaaaagacctcgaggatcatttagtccaatcatcaaacccatccccaccactaaaccacatccaagtcatgcacccaatgtggggcatggaagcagcccaaagacatctatctycccacatcttttccgttagagatctaaaatgaaatttctggttcaagcattaacactccattcacctacttgaagtatgggaatcaaggggtttcccmtgtggacaaacaaaaaatcctcccactcccacccagtgggaagcatacatggttggtgcaagataagagctgaaakccyasagctgagggccctgcragcatccagtcaaggctcagggtgtaccaaggagtgagaagacagcagaagcatttcagaccaccactgaggcaagcatttgtgctacctgcattgctgtaggacagaagaatcccagttgtggctcagggctatgcggtggaacagagctggtccttggaaccaatctttactcctaaatgcagacacgcttaatgcaatgcctgtgattaatccactgacttgagtggattgactaactgtgagtatctgtaagcacagccagaggtatttgcagaactgta

SEQ ID NO: 51337 - DNA, 600 bp, Chicken  19866894299056_6
tcgaggatcatttagtccaatcatcaaacccatccccaccactaaaccacatccaagtcatgcacccaatgtggggcatggaagcagcccaaagacatctatctycccacatcttttccgttagagatctaaaatgaaatttctggttcaagcattaacactccattcacctacttgaagtatgggaatcaaggggtttcccmtgtggacaaacaaaaaatcctcccactcccacccagtgggaagcatacatggttggtgcaagataagagctgaaakccyasagctgagggccctgcragcatccagtcaaggctcagggtgtaccaaggagtgagaagacagcagaagcatttcagaccaccactgaggcaagcatttgtgctacctgcattgctgtaggacagaagaatcccagttgtggctcagggctatgcggtggaacagagctggtccttggaaccaatctttactcctaaatgcagacacgcttaatgcaatgcctgtgattaatccactgacttgagtggattgactaactgtgagtatctgtaagcacagccagaggtatttgcagaactgtagtctgcaggagtggaa

SEQ ID NO: 51338 - DNA, 599 bp, Chicken  19866894299063_1
  misc_feature (1)..(20): n is any nucleotide
nnnnnnnnnnnnnnnnnnnnaaatgcgagagagaatgtagaattctctcctatgaatcagctggaaaatccctacctctgacttcagaaggaggtaagtaattactatttaaaatagaaatttactcactttttggtttcagtatttttttcttcagtagatttgtctttcttgctttgtttgtaaaagtattttaaaatggtctccagcttatttgcaaaagcaaagtcgagttggtaatggtttgaacatatatcttgtttgtgcttcacatgcgtttggtttgtgacagtctgactyctaagtattaaaattcatatgtcaagtaatggttagagacagcatagcctatatgaatgctcctaactactttttaaaacatgttaacatgagctatagatatgatcctatgttgctatttagaagcaggtttctttaaagagcctgtgaaagtattttgatgaataatgtatttaaaaacaacaaaaaccaacaacagcaaaatattaaaatgtatctgtaacgtaaattttaggattaccttcctcaaggtagcaatgctttactcttcagtataggtggcctagttttaatttgcg

SEQ ID NO: 51339 - DNA, 600 bp, Chicken  19866894299063_2
acatgagctatagatatgatcctatgttgctatttagaagcaggtttctttaaagagcctgtgaaagtattttgatgaataatgtatttaaaaacaacaaaaaccaacaacagcaaaatattaaaatgtatctgtaacgtaaattttaggattaccttcctcaaggtagcaatgctttactcttcagtataggtggcctagttttaatttgcgggtcctgattcttcgttctttgggggactcctagtcagccacggaagtcatttcagcagtcaccagtgttaaggggatgtcttgaartaatagagacagcagaatcagacataatgacattgtacatttccttattgygcagttactaaaaggtgcaagagaaggtgatcatctcatcatctcagaagatgagaaagtcatttgttgctttgcagtcmtcttaccgtactgattttttagaagatggttacaaagaagtytgagaaatgtgatcttmgtctataaaatgaatgacctaaaacatagaagatgagaaggcgaggttagatgaatgtgaaatagataaaattgaattcttcttgggagtgggtgcgctgtgcggagagc

SEQ ID NO: 51340 - DNA, 600 bp, Chicken  19866894299063_3
aaagagcctgtgaaagtattttgatgaataatgtatttaaaaacaacaaaaaccaacaacagcaaaatattaaaatgtatctgtaacgtaaattttaggattaccttcctcaaggtagcaatgctttactcttcagtataggtggcctagttttaatttgcgggtcctgattcttcgttctttgggggactcctagtcagccacggaagtcatttcagcagtcaccagtgttaaggggatgtcttgaartaatagagacagcagaatcagacataatgacattgtacatttccttattgygcagttactaaaaggtgcaagagaaggtgatcatctcatcatctcagaagatgagaaagtcatttgttgctttgcagtcmtcttaccgtactgattttttagaagatggttacaaagaagtytgagaaatgtgatcttmgtctataaaatgaatgacctaaaacatagaagatgagaaggcgaggttagatgaatgtgaaatagataaaattgaattcttcttgggagtgggtgcgctgtgcggagagccacgtcccaatacataactccttcatagcaaaaataatagcttttcttcat

SEQ ID NO: 51341 - DNA, 600 bp, Chicken  19866894299063_4
ctgtaacgtaaattttaggattaccttcctcaaggtagcaatgctttactcttcagtataggtggcctagttttaatttgcgggtcctgattcttcgttctttgggggactcctagtcagccacggaagtcatttcagcagtcaccagtgttaaggggatgtcttgaartaatagagacagcagaatcagacataatgacattgtacatttccttattgygcagttactaaaaggtgcaagagaaggtgatcatctcatcatctcagaagatgagaaagtcatttgttgctttgcagtcmtcttaccgtactgattttttagaagatggttacaaagaagtytgagaaatgtgatcttmgtctataaaatgaatgacctaaaacatagaagatgagaaggcgaggttagatgaatgtgaaatagataaaattgaattcttcttgggagtgggtgcgctgtgcggagagccacgtcccaatacataactccttcatagcaaaaataatagcttttcttcataaggttgtaaaaagtcagtaactgggtgctcccaaaccaaatgttacagaaggtaaaagctgaaaattcttcagcaacta

SEQ ID NO: 51342 - DNA, 600 bp, Chicken  19866894299063_5
gctttactcttcagtataggtggcctagttttaatttgcgggtcctgattcttcgttctttgggggactcctagtcagccacggaagtcatttcagcagtcaccagtgttaaggggatgtcttgaartaatagagacagcagaatcagacataatgacattgtacatttccttattgygcagttactaaaaggtgcaagagaaggtgatcatctcatcatctcagaagatgagaaagtcatttgttgctttgcagtcmtcttaccgtactgattttttagaagatggttacaaagaagtytgagaaatgtgatcttmgtctataaaatgaatgacctaaaacatagaagatgagaaggcgaggttagatgaatgtgaaatagataaaattgaattcttcttgggagtgggtgcgctgtgcggagagccacgtcccaatacataactccttcatagcaaaaataatagcttttcttcataaggttgtaaaaagtcagtaactgggtgctcccaaaccaaatgttacagaaggtaaaagctgaaaattcttcagcaactaagggaatatgaggttaaaaacatcaagatgtaataaagtgct

SEQ ID NO: 51343 - DNA, 600 bp, Chicken  19866894299063_6
aggtggcctagttttaatttgcgggtcctgattcttcgttctttgggggactcctagtcagccacggaagtcatttcagcagtcaccagtgttaaggggatgtcttgaartaatagagacagcagaatcagacataatgacattgtacatttccttattgygcagttactaaaaggtgcaagagaaggtgatcatctcatcatctcagaagatgagaaagtcatttgttgctttgcagtcmtcttaccgtactgattttttagaagatggttacaaagaagtytgagaaatgtgatcttmgtctataaaatgaatgacctaaaacatagaagatgagaaggcgaggttagatgaatgtgaaatagataaaattgaattcttcttgggagtgggtgcgctgtgcggagagccacgtcccaatacataactccttcatagcaaaaataatagcttttcttcataaggttgtaaaaagtcagtaactgggtgctcccaaaccaaatgttacagaaggtaaaagctgaaaattcttcagcaactaagggaatatgaggttaaaaacatcaagatgtaataaagtgctttttgtcaagtcatagc

SEQ ID NO: 51344 - DNA, 600 bp, Chicken  19866894299065_1
caggattatagaggtcaattaggctatgaattgtcttaaaaggtaaagaatgaaaggattgaactgtagttaagtgaaagatgtaagaaaacaaatgtgtactgaatattcagactcgaggcagggatatacataaaagctttcataggaaaatgtttcatcaaagggttattgcaaataatgagtaggtaagacaagggaatactctttagttcttgaactgcttggattgaggacaatatttaggttacaaaactatgccataggcaggaggatattgtttcccacaatgattaaaaygaagacactcaaagagagagatcaggcagaattagatgtctagtgcagctattctcatagttcaaagacagatgtcaaagagttcaaacttgttaatacagaaaagagaaagcagatgatctatgtagaagcagatctgagaggtatccaattgtatttgcaaatgacagtatccacattctcgaacagagagagaacataaggtaaacagactccaagataaggaagatacttagcatgtagaaataattagagaaattattgaaggatgcatggaaataaagaaaagacaaagatttt

SEQ ID NO: 51345 - DNA, 600 bp, Chicken  19866894299065_2
agtttatttatttcctggaatgtagtttggtagcaagaaacaaattcccacaacaaactctgggactagatttaattttactctatgagccagtgaaatacaaacttgaaaaggctttggtggaaaaagtacttatgaagatatactgttctatgacttttgtcctgtgtccagttatatataaattaatttgattttgtttttatttttaaaagtcttttatgataatgaattccatcaaatgtctgtaactggacaaacagaattcactcactcaaaaccatcatgactttcataaasaatggttccttagcatgaggctgaaactcacttccacatagggctcccaccttcctttcaatcagagatgacattaccaggattttattgaatgatactactagatgcatacttagcagtcaatgacatctgacagagttcctactgatacggatttttagagtacaaatagatatacttctgtgtgaaacagcttttgaaagtctattacaaaagggactgactgtaaagctttaataaaatagactcaagggagatgcaaaatagtagaagctaaaaaaatgctgttcatgggagacc

SEQ ID NO: 51346 - DNA, 600 bp, Chicken  19866894299068_1
gttctcaaggtcttgttcacaaaacaggcaagcatccaaaactgcagcatgtactcaacaagaataagtactcagggcaggtccagaaatctgcaaagataggctgttcttgctagctttgaaggcagtgtaaggagataacacctgaagatgttatctgcttcatatgagtttaggattttctcctcagaaagacagcttttccctttaggatttacaagcttacttgactaaccaatcaagttcttaaattcctttcacagactttggagtctccaggtttacaagctctgcagaaayagtgcattataacgcactattaaatgcaagttcgcattttctttaactctatagattgtaaaatacatgtaaaatatttgcagtgaatttgttcctcaactaaaaccatatttattttacaatgatcataaaattatgttggacctgtccaaaaggtcccatycattgaatcaggcttttggaaggataatgcagaggaattttcaaatgagattcagatattcgttttgatattaaacagttgtgtttacttgttcatgttacttcaaaatggttcacaggatgcaattgcagttgaac

SEQ ID NO: 51347 - DNA, 600 bp, Chicken  19866894299068_2
catatgagtttaggattttctcctcagaaagacagcttttccctttaggatttacaagcttacttgactaaccaatcaagttcttaaattcctttcacagactttggagtctccaggtttacaagctctgcagaaayagtgcattataacgcactattaaatgcaagttcgcattttctttaactctatagattgtaaaatacatgtaaaatatttgcagtgaatttgttcctcaactaaaaccatatttattttacaatgatcataaaattatgttggacctgtccaaaaggtcccatycattgaatcaggcttttggaaggataatgcagaggaattttcaaatgagattcagatattcgttttgatattaaacagttgtgtttacttgttcatgttacttcaaaatggttcacaggatgcaattgcagttgaacctcttttttttttctttctaccaacttcagtcaagtaatagattaaacatgaaatacactttaccaaactgattatcttggaagctgttgaatattcatctttatacaattttatatgaaattgtaagtcagctataactgcagtatatgccagatataacaa

SEQ ID NO: 51348 - DNA, 599 bp, Chicken  19866894299075_1
  misc_feature (1)..(134): n is any nucleotide
nnnnnnnnnnnnnnnnnnnnnnnnnnnnnnnnnnnnnnnnnnnnnnnnnnnnnnnnnnnnnnnnnnnnnnnnnnnnnnnnnnnnnnnnnnnnnnnnnnnnnnnnnnnnnnnnnnnnnnnnnnnnnnnnnnnnnngtggaatggattgggttgggttagaaggatcttggaaggttgtggaaccatggaatggttgggttgggatggtccttaaagatcatagagctgtgggatggattgtgttgggttagaaggatcttggaaggttgtagaaccatggaatggttgtgttgtgttgggrtggtccttcaagatcatagagctgtgggatggattgggttgggttagattggttgggaaagaaaggttgggttggagtagggttcaaagggtccttaaagatcatagagctgtggaatggttgggttggaagggtccgtaagaatcgtagagccatggaatcattgggttggaagggtccttgaagatcatagagctgtggaatggttgggttggaagggtccgtaagaatcatagagccatggaatcactgggttggaagggtccttgaagatcatagagctgtggaatggttgggtt

SEQ ID NO: 51349 - DNA, 599 bp, Chicken  19866894299078_1
  misc_feature (1)..(106): n is any nucleotide
nnnnnnnnnnnnnnnnnnnnnnnnnnnnnnnnnnnnnnnnnnnnnnnnnnnnnnnnnnnnnnnnnnnnnnnnnnnnnnnnnnnnnnnnnnnnnnnnnnnnnnnnnnaatcatcatagaatggcttgggttggaagagacctttaagaacatctagttccaacccccggctataggcagggacacgttcctctagaccagcttgctcaaagcctcatccagcctggccttgaatgcttccaggaagggagcgttcacaacttcactgggcaacctgttccagtgtctcaccactcccacartaaagaatttcttactaacgtatagtctaaatctaccctcttccagtttataaccatttccccttgtcctgttgtgttacatgcccttctaaaaagtccctccccagctttcctgtaggtccccttcaagtacccctttctgagaataagggcttactggaaaactctcgtactaggctatttccaagtagagatgcttcccttttggctgccagcccttaaatgaggttagggaggggtggacttagggtctatcccctctggttaggggataggtgacttgcttgctcctgtgctcc

SEQ ID NO: 51350 - DNA, 600 bp, Chicken  19866894299078_2
gtctaaatctaccctcttccagtttataaccatttccccttgtcctgttgtgttacatgcccttctaaaaagtccctccccagctttcctgtaggtccccttcaagtacccctttctgagaataagggcttactggaaaactctcgtactaggctatttccaagtagagatgcttcccttttggctgccagcccttaaatgaggttagggaggggtggacttagggtctatcccctctggttaggggataggtgacttgcttgctcctgtgctcccagggctggctacaccccttcaccrggtgctcaatcactggttcaggccctgacctgacagttcccgcacactgctgtgcaatttagatgaatttaagcctaccagcttgtttcgttctcagttaagcatcaattatttttgtcttgcttgttctgcaagyaaacacaagatttgcagatagttatgtctcctgaggataacctgctacagcctaaattaaattttaaatgggcatatcagggtaagattaatgcctgagaggtagactgggaggtcctgtgtggcttaggggttctctgggcaggttgtacttgactggagtag

SEQ ID NO: 51351 - DNA, 519 bp, Chicken  19866894299078_3
aaaactctcgtactaggctatttccaagtagagatgcttcccttttggctgccagcccttaaatgaggttagggaggggtggacttagggtctatcccctctggttaggggataggtgacttgcttgctcctgtgctcccagggctggctacaccccttcaccrggtgctcaatcactggttcaggccctgacctgacagttcccgcacactgctgtgcaatttagatgaatttaagcctaccagcttgtttcgttctcagttaagcatcaattatttttgtcttgcttgttctgcaagyaaacacaagatttgcagatagttatgtctcctgaggataacctgctacagcctaaattaaattttaaatgggcatatcagggtaagattaatgcctgagaggtagactgggaggtcctgtgtggcttaggggttctctgggcaggttgtacttgactggagtagttagcagtgccatttcacagctcctgcaaactgttttatcttagaatatccctag

SEQ ID NO: 51352 - DNA, 600 bp, Chicken  19866894299080_1
gacaacattccctggctccacagacaggtgcagcaggacagaagagaagtaacaaagcactgaagacagcaaagagccgccaaagtcttctcacctcataatccatttccagacaagcaaacattgggttttcaaatcccacgtcgactcccaccacgtggtagaccaaggtattggccttgtgggcttccagcggggaggaaatggtgagccgagctgcagcatctctgtttaagatatacaccagcttctgcttttcaatagcacctgcaagaaaagggcagcaatacttggtgatgsgatctgtcataccagcatcccaatataaaacttcacaacagaatgtcagcgttgttttgctgctgaaatctgctattggtacttatctctgtgccaccaatcaccttcaaatagctcgttttaatatttcagactacaagcaacaaatccagctctaaagcctagctctgactctttgggttaggtstaactagcccaatattcagcccataatagctacaggcagatctactctacccacacaaaacacaatggactgcacggaaacaagaacaagttaaaaaaagccagctttggcaa

SEQ ID NO: 51353 - DNA, 600 bp, Chicken  19866894299080_2
ttccagcggggaggaaatggtgagccgagctgcagcatctctgtttaagatatacaccagcttctgcttttcaatagcacctgcaagaaaagggcagcaatacttggtgatgsgatctgtcataccagcatcccaatataaaacttcacaacagaatgtcagcgttgttttgctgctgaaatctgctattggtacttatctctgtgccaccaatcaccttcaaatagctcgttttaatatttcagactacaagcaacaaatccagctctaaagcctagctctgactctttgggttaggtstaactagcccaatattcagcccataatagctacaggcagatctactctacccacacaaaacacaatggactgcacggaaacaagaacaagttaaaaaaagccagctttggcaaactaaggaggttcctgcactagcgtttactctcactccacaagcttgtcatcccattggctgtaaaagcacaactgttagtaatgctggtcagccaaccaagtaactaagatgcttcatggtaatgcttaactaccaaagtgttctttttagctacaaagcctgatcagaaattcatctggttgtct

SEQ ID NO: 51354 - DNA, 599 bp, Chicken  19866894299082_1
  misc_feature (1)..(94): n is any nucleotide
nnnnnnnnnnnnnnnnnnnnnnnnnnnnnnnnnnnnnnnnnnnnnnnnnnnnnnnnnnnnnnnnnnnnnnnnnnnnnnnnnnnnnnnnnnnnnntaaagctgtgtagggggatccttcaacccccaaaaaaagtaacagtgtcagctggagccattgcagtgcatggagctcaattgttggcagctatagtgtggggatttgttttgtcctccaatgtttaggcctttgcagcatggtttctataaatgcgttaatgctgacatctccaagcaccaggcaggaagtcatttattttcccmcatctctgaatgcaacccagccaaggtttgacgtgaaggcaactggaagaatctgggttgggaaacagtgcttagttctttttggaaaggaaaacatcacacttaagactgtacaaacaaaaaggaaagggaaaaataactgatattgggatggtgagttccatcttgatgctattgctattgtttcgttctgcttcctggatatgagctctttagtctgaaggtrgaatgatstctagcaatctttgttagaattcaggaaagcatargtcctgtaagtgttagcctgcacttcagac

SEQ ID NO: 51355 - DNA, 600 bp, Chicken  19866894299082_2
ttgcagcatggtttctataaatgcgttaatgctgacatctccaagcaccaggcaggaagtcatttattttcccmcatctctgaatgcaacccagccaaggtttgacgtgaaggcaactggaagaatctgggttgggaaacagtgcttagttctttttggaaaggaaaacatcacacttaagactgtacaaacaaaaaggaaagggaaaaataactgatattgggatggtgagttccatcttgatgctattgctattgtttcgttctgcttcctggatatgagctctttagtctgaaggtrgaatgatstctagcaatctttgttagaattcaggaaagcatargtcctgtaagtgttagcctgcacttcagacagtctggaagtacaaaagtgcaatagatgcttgctgcttgttgggggagatgtgtcaacctggctcttgtctcattttagcatgccaatgaagacgtggagaggatgctgttaggaaacaagtgtgacatggaagataaaagagttgttcctaaagcaaaaggtgaacaggtaggtgctggacgcaaacttgcttttccaagtaagcagatcagtgccaagagttcc

SEQ ID NO: 51356 - DNA, 600 bp, Chicken  19866894299082_3
tggtttctataaatgcgttaatgctgacatctccaagcaccaggcaggaagtcatttattttcccmcatctctgaatgcaacccagccaaggtttgacgtgaaggcaactggaagaatctgggttgggaaacagtgcttagttctttttggaaaggaaaacatcacacttaagactgtacaaacaaaaaggaaagggaaaaataactgatattgggatggtgagttccatcttgatgctattgctattgtttcgttctgcttcctggatatgagctctttagtctgaaggtrgaatgatstctagcaatctttgttagaattcaggaaagcatargtcctgtaagtgttagcctgcacttcagacagtctggaagtacaaaagtgcaatagatgcttgctgcttgttgggggagatgtgtcaacctggctcttgtctcattttagcatgccaatgaagacgtggagaggatgctgttaggaaacaagtgtgacatggaagataaaagagttgttcctaaagcaaaaggtgaacaggtaggtgctggacgcaaacttgcttttccaagtaagcagatcagtgccaagagttccactgttgt

SEQ ID NO: 51357 - DNA, 600 bp, Chicken  19866894299082_4
agcaccaggcaggaagtcatttattttcccmcatctctgaatgcaacccagccaaggtttgacgtgaaggcaactggaagaatctgggttgggaaacagtgcttagttctttttggaaaggaaaacatcacacttaagactgtacaaacaaaaaggaaagggaaaaataactgatattgggatggtgagttccatcttgatgctattgctattgtttcgttctgcttcctggatatgagctctttagtctgaaggtrgaatgatstctagcaatctttgttagaattcaggaaagcatargtcctgtaagtgttagcctgcacttcagacagtctggaagtacaaaagtgcaatagatgcttgctgcttgttgggggagatgtgtcaacctggctcttgtctcattttagcatgccaatgaagacgtggagaggatgctgttaggaaacaagtgtgacatggaagataaaagagttgttcctaaagcaaaaggtgaacaggtaggtgctggacgcaaacttgcttttccaagtaagcagatcagtgccaagagttccactgttgttgggtggtttggattccacggtggggtatgagaca

SEQ ID NO: 51358 - DNA, 600 bp, Chicken  19866894299085_1
ggtcagaagagggctacactccaagtgagaaggagatcttaaaagcaaatgaggggtttgggatgtttctgaagtaattggcactgaaactcagctctttctggcacctcaactgccagtgctgaactggatgtttaaaggaaaggtcccctccacccatcatgctgctgatgccacatggagtaagtggattgtgttcattatgcaacgagtgtggatggggaacctcagccgtccaggaatcctagaggtgatcatggactggccagaaggtaaaaagtttggaacatcacgggcagmagaggtatcacatgctaaagaggccccaccatacaataaactaccagaaaataaaaagaaatgtgccctgtccacggatgaatcgtgtcgtattgtggggaagcattgcagatggaaagctgctgtgtggagccccacacgtcaggttacagaggccactgaaggaaaaggagaagcaagtcagctcacagaggtaaaggctgtccaactggccttagatgttgctgaacgggagaggtggccaatgctttatcgttacactgactcatggggggtggaaaatgccttatggcggtggtt

SEQ ID NO: 51359 - DNA, 600 bp, Chicken  19866894299088_1
taccctgtgatctgatttgtatggccacgggccaacagtgcgtgccttaatgcagccaagtgcaagataatacacgtatgggagaacaatacagagctcgtatcggcaggatggaagtctgtccagcaaggccacgagacaggcagagctacaacagtagttctgctctgggctatgggatcaggaagattagaacccacttgtaattagggacctttagctgcccacacattggctggggaaggaagacatcagacacagccttgctttgagttcctggaacgcatggaggaaaaaaamggagagaggagacgggaaagggacaggaaaggaggctccttggggttggttccgatcaaattgcagactaaacgacttgcggcacacgaagaggtgggagctccaccaggctggtacagacgagtgccgggagagagccaagcactcagagaaaccacgcacagcgaggctcctgagcggcaacgaggagacatttgataactccattagtgggaagaggcagaccagagagttcgtcacctcctacgtggggagaaaaggttaattgakgggtttatgccactgaatgccacgagccct

SEQ ID NO: 51360 - DNA, 600 bp, Chicken  19866894299088_2
gagttcctggaacgcatggaggaaaaaaamggagagaggagacgggaaagggacaggaaaggaggctccttggggttggttccgatcaaattgcagactaaacgacttgcggcacacgaagaggtgggagctccaccaggctggtacagacgagtgccgggagagagccaagcactcagagaaaccacgcacagcgaggctcctgagcggcaacgaggagacatttgataactccattagtgggaagaggcagaccagagagttcgtcacctcctacgtggggagaaaaggttaattgakgggtttatgccactgaatgccacgagccctcccgaagccgtgagtgcgtgtcagccctccccctcccaycgcaatctgttttctgttaggtttatgggttttctttattctctacacagcacccagagctggctggttctggtaatgacattacatgttataacgtacatataattgttgatcctaagatacacagtttataaaatattttcccttatgagactcattaaataggacggtaaatcgaatttaataaattctaaattcgccgtaagaagccgtattccccacagttacaaa

SEQ ID NO: 51361 - DNA, 600 bp, Chicken  19866894299088_3
ttggggttggttccgatcaaattgcagactaaacgacttgcggcacacgaagaggtgggagctccaccaggctggtacagacgagtgccgggagagagccaagcactcagagaaaccacgcacagcgaggctcctgagcggcaacgaggagacatttgataactccattagtgggaagaggcagaccagagagttcgtcacctcctacgtggggagaaaaggttaattgakgggtttatgccactgaatgccacgagccctcccgaagccgtgagtgcgtgtcagccctccccctcccaycgcaatctgttttctgttaggtttatgggttttctttattctctacacagcacccagagctggctggttctggtaatgacattacatgttataacgtacatataattgttgatcctaagatacacagtttataaaatattttcccttatgagactcattaaataggacggtaaatcgaatttaataaattctaaattcgccgtaagaagccgtattccccacagttacaaaagaaatggccaaatcagataatgagaaagccaaagtgttgcttaacaaactagagagcgtcacctgaga

SEQ ID NO: 51362 - DNA, 600 bp, Chicken  19866894299088_4
ctatctctaagaatttctggcagacaaatgaggtttcagaagactgggaaagggcagatatagtggctgtgttcaacaggttgaaaaatcaaggaaattgcaggccagtcgacataacttcaattcctggaaaaaaaaatgttgaaacaaattaaacagtccatctgcaagggagggctggaagcaataggcacatcacatgaagccaacctgctttccctttgacgtagcaaaagggtctcatatgtgagataggggcaacagatgttatatacctttactttcgcaaggtttcagctygagttctgtagaacatcttaattagcaaattagggaaatagagtctagatgaaattccatacggggaacgcacagctggttgggaaaccgtacacaaaaatgcagacatgaacaagcagtaccgtgccaataaagcccacgkctgcacgagggtatgcaggcaggagtgtcacgcaaagacacgtgaaataatcctgctgctcttcagctacaacactgggctcattttgaggcaatgcgcttcaaagaagcccagaccaattgggagagcccaagggaacccagcaaaacacagagcca

SEQ ID NO: 51363 - DNA, 600 bp, Chicken  19866894299088_5
tgaaacaaattaaacagtccatctgcaagggagggctggaagcaataggcacatcacatgaagccaacctgctttccctttgacgtagcaaaagggtctcatatgtgagataggggcaacagatgttatatacctttactttcgcaaggtttcagctygagttctgtagaacatcttaattagcaaattagggaaatagagtctagatgaaattccatacggggaacgcacagctggttgggaaaccgtacacaaaaatgcagacatgaacaagcagtaccgtgccaataaagcccacgkctgcacgagggtatgcaggcaggagtgtcacgcaaagacacgtgaaataatcctgctgctcttcagctacaacactgggctcattttgaggcaatgcgcttcaaagaagcccagaccaattgggagagcccaagggaacccagcaaaacacagagccacaaaaaaaaatgcagagtgctgaaagggacctcaagaggcagaatcaaccacgcatgtgtcattcaacttgaaaataacattgccatgaggagagagcagaagaaagccaattgtttggtgggagcacaaaagtcttagggg

SEQ ID NO: 51364 - DNA, 600 bp, Chicken  19866894299093_1
attatataagaatacccttgacagtgtgttgcttacttcagattacaactcttatccaggattagaatggaagaaaataggaaagctggtgttaagcactcttttttttttgctttgatgtgcctgtcttgaagcttagaaaccttggtttctaggcagtgggtgttgtttcatgttgccccataacactccagacctcagagttttgctcgacaagctcatacactttttctccaggggaatgtacttggctatctgctgcagctccttcatgttttctcgcagacgctgttgtcttcmcaagttctgtggtgccctcagacactttgtaatgttttttttctagtgtgccttaaatccccttttatggcaaattaaggcattcatttcaggattgaaaacacttatctactgtctttgttgatcgaattttgactttgagaaaacaattgccttctttcatatgcacatttagaaatattttccagataggtaattaatgaaaaggcattatttgcatttaatgcctcccacataagtcttggtgccttaggaacttctacacagatacatccaggattaagatgcaagttttaacac

SEQ ID NO: 51365 - DNA, 600 bp, Chicken  19866894299096_1
ggtatgacctgagagcaattgccttttttcttttttcctttccaaataatgttcaactcagtgattccagagtttgcacagaagagtccttctgtttgatggcttcagttaattctttaagtgacatttgtactgtcagaacaactaaaaggaaatcgtggaagttattgggcagcattttccaacgtgggcactgtgccacactcatgtatgttttcttccttttccccttccataaggattttaaagcataaactttaaagccctttgtagtgagaaatatatgtacattttcagagyggcgtggagttaaaattttgcagtatctattaaagaaatacaacttgcacgtgtaaaatcctcagcagcatttggaatgtcttcttccatactgaagcagattctcagagctcctcttggaatctctaaactcttccraggcttttccttccacatggctgtcattgtgttgtgaattgtttgtgggtatgtttttcctctccagtgactcgaccaggactggggtgtcgggaactcgtgtcaaggaacctctccaaagtccttccaggtctctgccatgatctaacagactgggttgaa

SEQ ID NO: 51366 - DNA, 600 bp, Chicken  19866894299096_2
gaacaactaaaaggaaatcgtggaagttattgggcagcattttccaacgtgggcactgtgccacactcatgtatgttttcttccttttccccttccataaggattttaaagcataaactttaaagccctttgtagtgagaaatatatgtacattttcagagyggcgtggagttaaaattttgcagtatctattaaagaaatacaacttgcacgtgtaaaatcctcagcagcatttggaatgtcttcttccatactgaagcagattctcagagctcctcttggaatctctaaactcttccraggcttttccttccacatggctgtcattgtgttgtgaattgtttgtgggtatgtttttcctctccagtgactcgaccaggactggggtgtcgggaactcgtgtcaaggaacctctccaaagtccttccaggtctctgccatgatctaacagactgggttgaaagcacaagagtgaaagcatcccagcttctgtatgtgttactgctgcacgcagaggaccacataacacagcacatggagctgcttctcagagctttgtatcaagcgtgcttggatagagaaagtgaggtggttaggaat

SEQ ID NO: 51367 - DNA, 600 bp, Chicken  19866894299096_3
cgtgcttggatagagaaagtgaggtggttaggaatgtaagtatctgctacatgcttcatgaagatactctttgttgtgtgcctgggtgtattgtgtgagggatagcagtaccataggtcactgcagcttccccatgacattgggatcagcttttaatgggtgttagaaatatgtacaaattgtatttaattactgtgttaaaataaatgcattcttgtgttgttggtatgaagatcaataataaaattatttaaatactctttagcttatatggttcaataataaggcaataaaatacaygtcactgaaaggactagatgaatttctcagaggacaggcaggcaatacaaactgtctttacaatttttagagaagatccattcatttttctgctgtatagcaaacaggtataggaccagagagattattgcattataaaggagtaatgaaataaagaacttacctgtgtcctggactcacagaagggctccaagaggagcaatctccagatagagatccttcctccttgggagtcagcccttaatggggcctaggaggggtgcagccaggatccaccccttccggtcactcaggtgaaac

SEQ ID NO: 51368 - DNA, 600 bp, Chicken  19866894299096_4
atgaatttctcagaggacaggcaggcaatacaaactgtctttacaatttttagagaagatccattcatttttctgctgtatagcaaacaggtataggaccagagagattattgcattataaaggagtaatgaaataaagaacttacctgtgtcctggactcacagaagggctccaagaggagcaatctccagatagagatccttcctccttgggagtcagcccttaatggggcctaggaggggtgcagccaggatccaccccttccggtcactcaggtgaaactgccttcacctgtgccsctgcggctgactcagcactcgcctcaggtggtcaatcagaggttcaggctgtgattcaacagttcccatacatctacacaagcaagacagcacacatataacaaaagcatcacataatttaattcaaagctgcaaatggtattgctttggggaattggaagaatattttttgctcacttggatgcaagtagtccaacttatgttaaatagaatgaatttcctaaatcaaggttttcttttcattcccactattattttggccatatgcagactgagaaatccatgtctgaaatgatcctt

SEQ ID NO: 51369 - DNA, 600 bp, Chicken  19866894299105_1
gcaggagtggcagttgggctgtcactggggcgcagctcccaggtgtatgcatggccaccacgggagccgtaacctgggacatgctgagctctgcagcaccagggctggcaacagcctggagacagagggcggaggcacgcgggcagtccctgttcccatgctctgtacactgtggtctctgtgctggaaaaccccttacaaaagaggaaagtgctttttgcaggttcataccctgcaggttttcggctcttgaagtcaccatttgcagcagcactgttgctcaggctgcctgtcccataygcgtggtgccgggcaggagctggggagctgtgcctgcagcaccacaccgagtgggcctggggcatccatccgtgcrcccacrccccacattgctcactgctccaacacaccacgtctgcatggccctgtgcagtcccagggctgcaggaaggggacrgcacctgggggttcccacgcagggatgcttcctcctctgccctgcccyatcccgtcccatgctggcagggttctgggcatggcagtgctgtcccgaggggaagggaacacctcctgctcccgtgctgtggctgcgggatgttc

SEQ ID NO: 51370 - DNA, 576 bp, Chicken  19866894299105_2
ggacatgctgagctctgcagcaccagggctggcaacagcctggagacagagggcggaggcacgcgggcagtccctgttcccatgctctgtacactgtggtctctgtgctggaaaaccccttacaaaagaggaaagtgctttttgcaggttcataccctgcaggttttcggctcttgaagtcaccatttgcagcagcactgttgctcaggctgcctgtcccataygcgtggtgccgggcaggagctggggagctgtgcctgcagcaccacaccgagtgggcctggggcatccatccgtgcrcccacrccccacattgctcactgctccaacacaccacgtctgcatggccctgtgcagtcccagggctgcaggaaggggacrgcacctgggggttcccacgcagggatgcttcctcctctgccctgcccyatcccgtcccatgctggcagggttctgggcatggcagtgctgtcccgaggggaagggaacacctcctgctcccgtgctgtggctgcgggatgttctgttcccgaggcactcagctcagggccttttttccccatggaaagacaaaca

SEQ ID NO: 51371 - DNA, 570 bp, Chicken  19866894299105_3
gctgagctctgcagcaccagggctggcaacagcctggagacagagggcggaggcacgcgggcagtccctgttcccatgctctgtacactgtggtctctgtgctggaaaaccccttacaaaagaggaaagtgctttttgcaggttcataccctgcaggttttcggctcttgaagtcaccatttgcagcagcactgttgctcaggctgcctgtcccataygcgtggtgccgggcaggagctggggagctgtgcctgcagcaccacaccgagtgggcctggggcatccatccgtgcrcccacrccccacattgctcactgctccaacacaccacgtctgcatggccctgtgcagtcccagggctgcaggaaggggacrgcacctgggggttcccacgcagggatgcttcctcctctgccctgcccyatcccgtcccatgctggcagggttctgggcatggcagtgctgtcccgaggggaagggaacacctcctgctcccgtgctgtggctgcgggatgttctgttcccgaggcactcagctcagggccttttttccccatggaaagacaaaca

SEQ ID NO: 51372 - DNA, 495 bp, Chicken  19866894299105_4
atgctctgtacactgtggtctctgtgctggaaaaccccttacaaaagaggaaagtgctttttgcaggttcataccctgcaggttttcggctcttgaagtcaccatttgcagcagcactgttgctcaggctgcctgtcccataygcgtggtgccgggcaggagctggggagctgtgcctgcagcaccacaccgagtgggcctggggcatccatccgtgcrcccacrccccacattgctcactgctccaacacaccacgtctgcatggccctgtgcagtcccagggctgcaggaaggggacrgcacctgggggttcccacgcagggatgcttcctcctctgccctgcccyatcccgtcccatgctggcagggttctgggcatggcagtgctgtcccgaggggaagggaacacctcctgctcccgtgctgtggctgcgggatgttctgttcccgaggcactcagctcagggccttttttccccatggaaagacaaaca

SEQ ID NO: 51373 - DNA, 447 bp, Chicken  19866894299105_5
ggaaagtgctttttgcaggttcataccctgcaggttttcggctcttgaagtcaccatttgcagcagcactgttgctcaggctgcctgtcccataygcgtggtgccgggcaggagctggggagctgtgcctgcagcaccacaccgagtgggcctggggcatccatccgtgcrcccacrccccacattgctcactgctccaacacaccacgtctgcatggccctgtgcagtcccagggctgcaggaaggggacrgcacctgggggttcccacgcagggatgcttcctcctctgccctgcccyatcccgtcccatgctggcagggttctgggcatggcagtgctgtcccgaggggaagggaacacctcctgctcccgtgctgtggctgcgggatgttctgttcccgaggcactcagctcagggccttttttccccatggaaagacaaaca

SEQ ID NO: 51374 - DNA, 600 bp, Chicken  19866894299109_1
attggttcctaagcagaccattcatgcattctgctgtgggactaggctgggggttaagcagaggccacccaggactttcacatgccctgcgtcacagaggaagcctggcagccctgcaggctggctgtgctaaagccacaaaccccggaactgttagcattcctgacctagtaagagaaccactgtgtggggactgctcagctgcaatgggaaatgttcaggttagccccaaaagttgtagttataacatttccagagtaccagactctaggatgagtcagatttgtattctttcaatgyctgctttgtgcaagagaatcagtgaatctcaagagccttggtttgagctgcagatgccatggctttcacagcttcagtgcagtaagaaccagcgcagacctggggctacagatcctgaaagcatcctgggcagcccactctttctacatcaaaattaaagtgcttgcattaggtatggctgctgggacacctcaactgagcactgcaccaagaacagtgggcaattttgtccccctgacgttttgaacttcgtgaaagaagacgagcttgttcagacggcaaacatgaattgctagtcct

SEQ ID NO: 51375 - DNA, 600 bp, Chicken  19866894299120_1
ttttgaggttcttttcaacccaggccattctatgataaaataggaagcattactttcaaagcaacccacagtattttgtagatgttacagaagcttcacttagttgtttgtgctgtgtggttttattaggtggtagttttttcaatacctttttcttcccctttcaccaaaagattgaagccacaggattatacttcccagggatcaaaagtagtaatctcattttcagcttctattaaaaatattctctccagatgcaaactaaaactacctcctagatttaggagatgtacatgtgcygataaagtcaaaagattaagcgtatttcagagagctggtgtgcatatgttatgctgcttatttcttccattcttaccatgtccatctctactggataattctggattcagctgtttcctttctcaccagagtactccctaactaggttcttacagatatacttgaggaggagttaatgtacgatattgtttatatttattggaagatatttggtgaagtaattgggacgtaacatggactggttagccatttgactgtggtgccagttttagtgcataacaaaagaagagtaacttacag

SEQ ID NO: 51376 - DNA, 600 bp, Chicken  19866894299121_1
gtcttttgaagcaccgttttcttttgcagatttcccattcagtgccatagataagcaacttgtgaatatgtacactatcaaaacacatgtggctgtgcctcctgtattttatacagaaaaaaaagcagcatattaatctccatggtggtcttttgcatccacttctgcacagtggatgtttaacccatcaatgacataaatgcaataaaaccagcatccacagatgtcttggtcgttcacttaaaaccaagactgcccaagtgtcaagctctggtccagaaccagagtaatttttttctsagccttgatatgtcctgggtattctgatcagacatatgtttctgattcttctctaccaattgcccagcataagagctctcaaccaccagcagccctgcagtgcaaaacttcctgttaagtggagcttggtaatttactctgagaacattgtaaaattgagtcattctgttcaaggcaggatgtccctcacaggaaatcatttgcaactcctctccacaccagtgatgatacaaggtagtgctgtaaaaaacaaagttaattcttcgccttgtacacaactacagttcattgcttccaaat

SEQ ID NO: 51377 - DNA, 600 bp, Chicken  19866894299123_1
tttatgaaactgaaactattctattctattctattctattctattctattctattctattctattctattctattctactctactctactctactctactctactctactctactctactctactctactctactctaccatacccaaccctaacctaccctatcctatcctataccctatcctatcctatcctaccctaccctaccctaccctaccctatccaatctactttcttagacaccccagtaccatgggatgagacaaagagccatttagaggctgcgcagacagtaggaaamtcaatgctgacctgatcaagttgagacctccatcttgcaaacgcctattttaagagcaatgagtaccacttttctctgaatttcctggcctggttgtgcaaccctgaggcgcacagagatcatttgcagaagtgttattgctgcagtgaatggaactccatgggtaagtaaagggttgcaggattgtttctgtctggtgcctgctgcccgcatgcatctatggaatggctccactgggacccacaggggttgtgaaatcaggctggtgccttttctttgcagactttgttatctctgact

SEQ ID NO: 51378 - DNA, 557 bp, Chicken  19866894299128_1
aaatacttcatagtcctgtaaaacatcacttgttttagaggaagctgtttacataaacaacaagctaatgcatgaacctcttgacatgttagcattgaaaccaactgtcccccgtgtggttttgttctcacatgagggaggctgaagatgtacatctggtgctttgtgggcaggagagttctgcgcaggctgctggtttgagtgggattaaaaaatgctgtgtgcagacaaggtgaaaaaagatcattgaaataatgagtttttcaaagaagcttatgtttagagagcgggcattctctkcatttattccccacggrgaatctgctgttcattttaatggatgcgtctggtatgggagcatccctatcaaaaaccgccgtgtgaaaagtgatgcagaaagggattgggttcctaatagcatgtgagaacaggtagcgagcaagtgcgtttttccagctcaaatgtgtgcgagtctcagctgttaccacacattgatgttgtatgtcggtttgagaagcagggggatgaaagctgtgtgttggctcaatgactccttg

SEQ ID NO: 51379 - DNA, 540 bp, Chicken  19866894299128_2
gtaaaacatcacttgttttagaggaagctgtttacataaacaacaagctaatgcatgaacctcttgacatgttagcattgaaaccaactgtcccccgtgtggttttgttctcacatgagggaggctgaagatgtacatctggtgctttgtgggcaggagagttctgcgcaggctgctggtttgagtgggattaaaaaatgctgtgtgcagacaaggtgaaaaaagatcattgaaataatgagtttttcaaagaagcttatgtttagagagcgggcattctctkcatttattccccacggrgaatctgctgttcattttaatggatgcgtctggtatgggagcatccctatcaaaaaccgccgtgtgaaaagtgatgcagaaagggattgggttcctaatagcatgtgagaacaggtagcgagcaagtgcgtttttccagctcaaatgtgtgcgagtctcagctgttaccacacattgatgttgtatgtcggtttgagaagcagggggatgaaagctgtgtgttggctcaatgactccttg

SEQ ID NO: 51380 - DNA, 599 bp, Chicken  19866894299130_1
  misc_feature (1)..(90): n is any nucleotide
nnnnnnnnnnnnnnnnnnnnnnnnnnnnnnnnnnnnnnnnnnnnnnnnnnnnnnnnnnnnnnnnnnnnnnnnnnnnnnnnnnnnnnnnnnccaatgctggcaaagaaggaattttactgaccttgagtttcagcaattatttgcagatttagttgactcgaatcaaagcaagtaagacaaaaaattttggaacgagtgaataaataaataatcaaacctaacaaattgcagtggaagaatagctggaaactgtttccagtatttctttactgcaaaaatgatcctactcaaaacaatcascaaatggctgacggtattgttattatagccatcagcatagcaattaggcttcggaaacaaacttattttcctattactcatgaccaatgcatctgtttttacataatttagctaaaggaccagtactgtacaaacattcattaaaatgacattacacttacattatattcagaatatccacgatgccttcagctgagacaaagtttttgtaaaacatgagtgggaggtgggaggaagacatttgaagaatagaggtggttattgtatttaaaagtttgtgattttcctcaagaaaaaga

SEQ ID NO: 51381 - DNA, 432 bp, Chicken  19866894299130_2
cagtactgtacaaacattcattaaaatgacattacacttacattatattcagaatatccacgatgccttcagctgagacaaagtttttgtaaaacatgagtgggaggtgggaggaagacatttgaagaatagaggtggttattgtatttaaaagtttgtgattttcctcaagaaaaagaaaaggaaaaaacaaaaagcaacaaaaaagaaggagaaaagaagaataccagattaaaagcagctccaatgcacaaataatttaagagccaaagtggcatgatgtgttaaccgagaagtgcrtaaataacaaaattaatccggttgttgttcaagttgcagcaagttgatatatggtcaactttgctggccaccttcttgccttctacagagtcttgcaattatcttttcttcagtctttttaaaaccaatttg

SEQ ID NO: 51382 - DNA, 599 bp, Chicken  19866894299132_1
  misc_feature (1)..(120): n is any nucleotide
nnnnnnnnnnnnnnnnnnnnnnnnnnnnnnnnnnnnnnnnnnnnnnnnnnnnnnnnnnnnnnnnnnnnnnnnnnnnnnnnnnnnnnnnnnnnnnnnnnnnnnnnnnnnnnnnnnnnnnnngctggatgtggctctgggcagcatggtctggtggttggcaaccctgcacatagcagggggttgaaactcgatgattattgtggtccttttcaacccaagccattctatgattctatgagcttcacccctacaagcttgtttcaataagcttaaaatcgggagaagtttatttacctccaycaaaaaatgtgttgcaattctgtgttgagaagtactgcaaaaggtagctatttatgtttggaatctgttcatgggatccgttaatttaacatttcattgcagttgctctgtaccaaactcttctcagtctgtctttcttgacctattattggtgtttattgaaccagatcgaagagtgaaattgacaacttttatcrcttgatcaatgcatggtgtggtacttgaggagataaaatatgccatgcttattctaaatatgcattactgagaattgtatcaacgcttgttttatgtttatt

SEQ ID NO: 51383 - DNA, 600 bp, Chicken  19866894299132_2
ttgtggtccttttcaacccaagccattctatgattctatgagcttcacccctacaagcttgtttcaataagcttaaaatcgggagaagtttatttacctccaycaaaaaatgtgttgcaattctgtgttgagaagtactgcaaaaggtagctatttatgtttggaatctgttcatgggatccgttaatttaacatttcattgcagttgctctgtaccaaactcttctcagtctgtctttcttgacctattattggtgtttattgaaccagatcgaagagtgaaattgacaacttttatcrcttgatcaatgcatggtgtggtacttgaggagataaaatatgccatgcttattctaaatatgcattactgagaattgtatcaacgcttgttttatgtttattggcactgcatttaaactggctatttgagttctgcgtctcacttgaccaagcttaactttgtttctaggtcacagcaatttcttgccatgataaaaggtaaaggggggatttcctattttaaacacaaaataattatagtttaattttttgagatatgcacattgatgcttacaagccttaatatctgcccagtccgct

SEQ ID NO: 51384 - DNA, 600 bp, Chicken  19866894299136_1
cctggctctgcccagctgacacagcacctcaccctgccctcctggagggctgcagctgcacagggagaggaagaggaggatgaacactgaggggcagtcctgaacctgcagtctccagctttcactgtttcaccttcagcacagcaaaaattgcttgttgttggcatgctgaggactaatgccccggtcttaactcataccaactgaaatcaacgtgaaaacatgcaattagtcagaaaaagtacatgaatgaggaaagaaactgactgcaacagtgccagagatcggtgaaataaagckggcaatgcagatttctaaaaactacaacaggattaaacagaggagtgcatgatctgaaagctcggtggctttgtcagctcatctgaagatgcctgccctgggagataccttctgatgttgccgaaaccacaagagatctttagagctttttttcttctttgagaaaaatccagtgaagagcagattaaaatcatgcaagtatttgtttttcaagctgaaggtgaagaccccagagttgcgtctcctctcctcatgctttcaaccaatggagaactgaacaggctgcaggacaaaatcctg

SEQ ID NO: 51385 - DNA, 599 bp, Chicken  19866894299139_1
  misc_feature (1)..(32): n is any nucleotide
nnnnnnnnnnnnnnnnnnnnnnnnnnnnnnnntgctgaggaagtagtagagaaggggagatccaatcagaagagaaaaatgccaaagcaagaagaaagtgaaacacaagatggatagcagtagcggcagaggagactgaagggagtaaagcatggaagaggcgaggaatttcagatgagaagaaaaaggcaaggaaaagacttcaacccaaccaagaagagtactaactaataataagtatttcccaggggaggattgtagcccctctatgtgatattgttttatcagagaaactaattygtattttaagctgtgggttttgcgtgtccccaaaatatgagtctcaggaaaaattaaaaccttactgtcaaagtatggttactttaaacytactttaaagccttgyatctgatttgagggcttataagggttcaatggatttaacatggactggtagtcttctatgtctaggttaattactttgtgttaatgagtaaattaatgtcttaagtactgtacccctcttctttgtctgyagttgctattacgcaaggaggagcaattcagttgtctaacaacggcacggatggagtacaagg

SEQ ID NO: 51386 - DNA, 600 bp, Chicken  19866894299139_2
gaagaaagtgaaacacaagatggatagcagtagcggcagaggagactgaagggagtaaagcatggaagaggcgaggaatttcagatgagaagaaaaaggcaaggaaaagacttcaacccaaccaagaagagtactaactaataataagtatttcccaggggaggattgtagcccctctatgtgatattgttttatcagagaaactaattygtattttaagctgtgggttttgcgtgtccccaaaatatgagtctcaggaaaaattaaaaccttactgtcaaagtatggttactttaaacytactttaaagccttgyatctgatttgagggcttataagggttcaatggatttaacatggactggtagtcttctatgtctaggttaattactttgtgttaatgagtaaattaatgtcttaagtactgtacccctcttctttgtctgyagttgctattacgcaaggaggagcaattcagttgtctaacaacggcacggatggagtacaaggtctccagacgttgactatgaccaatgcagctgcaacacaacctggcactaccattttacaatatgcacagaccacagatggacaacagata

SEQ ID NO: 51387 - DNA, 600 bp, Chicken  19866894299139_3
aagatggatagcagtagcggcagaggagactgaagggagtaaagcatggaagaggcgaggaatttcagatgagaagaaaaaggcaaggaaaagacttcaacccaaccaagaagagtactaactaataataagtatttcccaggggaggattgtagcccctctatgtgatattgttttatcagagaaactaattygtattttaagctgtgggttttgcgtgtccccaaaatatgagtctcaggaaaaattaaaaccttactgtcaaagtatggttactttaaacytactttaaagccttgyatctgatttgagggcttataagggttcaatggatttaacatggactggtagtcttctatgtctaggttaattactttgtgttaatgagtaaattaatgtcttaagtactgtacccctcttctttgtctgyagttgctattacgcaaggaggagcaattcagttgtctaacaacggcacggatggagtacaaggtctccagacgttgactatgaccaatgcagctgcaacacaacctggcactaccattttacaatatgcacagaccacagatggacaacagatacttgtacccagcaacc

SEQ ID NO: 51388 - DNA, 600 bp, Chicken  19866894299139_4
agtatttcccaggggaggattgtagcccctctatgtgatattgttttatcagagaaactaattygtattttaagctgtgggttttgcgtgtccccaaaatatgagtctcaggaaaaattaaaaccttactgtcaaagtatggttactttaaacytactttaaagccttgyatctgatttgagggcttataagggttcaatggatttaacatggactggtagtcttctatgtctaggttaattactttgtgttaatgagtaaattaatgtcttaagtactgtacccctcttctttgtctgyagttgctattacgcaaggaggagcaattcagttgtctaacaacggcacggatggagtacaaggtctccagacgttgactatgaccaatgcagctgcaacacaacctggcactaccattttacaatatgcacagaccacagatggacaacagatacttgtacccagcaaccaagttgtagtacaaggtgagatgcttcacagccggtcattctgtataacattttctccacagagattcatcttgccaacccaaagtcctcaaatgtgtcaggagacagaattaacaggtttaacacagat

SEQ ID NO: 51389 - DNA, 600 bp, Chicken  19866894299144_1
aattgtcttagtacatgaaaaatttaaatcaactatgttaagggagatgactcatgacaataaattatgatcatttatttgctgaacaaaattgtagctgtctttgaaattggctcttaatttcagtgactgggaaaacagttggtagctgtatcatgtacagcgtggagttctccaaaaacaatgagaaagccaatcaaaatattatagcttttctttttcttttgacttgttggccactcttctattttaacctaacctaataaagacagatctgcttcaaagagttctgggtacgcrgcattctttttttgctacggctacaaagayggcaaatagataaaacgttggtagatgggattttgttcagaaatagttgtatrcgcatctctgggtgaggcacatttataaatatgtcaacttgcatatccrtgtgaattatgcatgtgcacaaactcctggatgtggctttatggctgmacagagcacacgtttgggtaagcaaggacaacgcaccagaaaccgtaggtaaaagaaaatagggtgatgttatcttttttccccaatatttttcgaagcgtttattttttaaagaagaat

SEQ ID NO: 51390 - DNA, 600 bp, Chicken  19866894299144_2
aactatgttaagggagatgactcatgacaataaattatgatcatttatttgctgaacaaaattgtagctgtctttgaaattggctcttaatttcagtgactgggaaaacagttggtagctgtatcatgtacagcgtggagttctccaaaaacaatgagaaagccaatcaaaatattatagcttttctttttcttttgacttgttggccactcttctattttaacctaacctaataaagacagatctgcttcaaagagttctgggtacgcrgcattctttttttgctacggctacaaagayggcaaatagataaaacgttggtagatgggattttgttcagaaatagttgtatrcgcatctctgggtgaggcacatttataaatatgtcaacttgcatatccrtgtgaattatgcatgtgcacaaactcctggatgtggctttatggctgmacagagcacacgtttgggtaagcaaggacaacgcaccagaaaccgtaggtaaaagaaaatagggtgatgttatcttttttccccaatatttttcgaagcgtttattttttaaagaagaatttcaggtcctgttttgttgctggagcataa

SEQ ID NO: 51391 - DNA, 600 bp, Chicken  19866894299144_3
gaacaaaattgtagctgtctttgaaattggctcttaatttcagtgactgggaaaacagttggtagctgtatcatgtacagcgtggagttctccaaaaacaatgagaaagccaatcaaaatattatagcttttctttttcttttgacttgttggccactcttctattttaacctaacctaataaagacagatctgcttcaaagagttctgggtacgcrgcattctttttttgctacggctacaaagayggcaaatagataaaacgttggtagatgggattttgttcagaaatagttgtatrcgcatctctgggtgaggcacatttataaatatgtcaacttgcatatccrtgtgaattatgcatgtgcacaaactcctggatgtggctttatggctgmacagagcacacgtttgggtaagcaaggacaacgcaccagaaaccgtaggtaaaagaaaatagggtgatgttatcttttttccccaatatttttcgaagcgtttattttttaaagaagaatttcaggtcctgttttgttgctggagcataaatagttcacagtgtgtgcagagggttaatggtggtaagcacgtggaggatgaa

SEQ ID NO: 51392 - DNA, 600 bp, Chicken  19866894299144_4
ggaaaacagttggtagctgtatcatgtacagcgtggagttctccaaaaacaatgagaaagccaatcaaaatattatagcttttctttttcttttgacttgttggccactcttctattttaacctaacctaataaagacagatctgcttcaaagagttctgggtacgcrgcattctttttttgctacggctacaaagayggcaaatagataaaacgttggtagatgggattttgttcagaaatagttgtatrcgcatctctgggtgaggcacatttataaatatgtcaacttgcatatccrtgtgaattatgcatgtgcacaaactcctggatgtggctttatggctgmacagagcacacgtttgggtaagcaaggacaacgcaccagaaaccgtaggtaaaagaaaatagggtgatgttatcttttttccccaatatttttcgaagcgtttattttttaaagaagaatttcaggtcctgttttgttgctggagcataaatagttcacagtgtgtgcagagggttaatggtggtaagcacgtggaggatgaagactacgcaaaaacacacttcgcaagaacacacttcatctttgcttaca

SEQ ID NO: 51393 - DNA, 600 bp, Chicken  19866894299144_5
acaatgagaaagccaatcaaaatattatagcttttctttttcttttgacttgttggccactcttctattttaacctaacctaataaagacagatctgcttcaaagagttctgggtacgcrgcattctttttttgctacggctacaaagayggcaaatagataaaacgttggtagatgggattttgttcagaaatagttgtatrcgcatctctgggtgaggcacatttataaatatgtcaacttgcatatccrtgtgaattatgcatgtgcacaaactcctggatgtggctttatggctgmacagagcacacgtttgggtaagcaaggacaacgcaccagaaaccgtaggtaaaagaaaatagggtgatgttatcttttttccccaatatttttcgaagcgtttattttttaaagaagaatttcaggtcctgttttgttgctggagcataaatagttcacagtgtgtgcagagggttaatggtggtaagcacgtggaggatgaagactacgcaaaaacacacttcgcaagaacacacttcatctttgcttacagtgtctgccaactctcaagctcagcagtctttcatcttagcccttctt

SEQ ID NO: 51394 - DNA, 382 bp, Chicken  19866894299148_1
gcacagaaatagaggattacagtcttgtcatactaagtctgaattttgctgtcgttaccaacctgagttcacttgagcataggtgtttcactatactgagcacagagaacaaagcagaacattcagtaagaaataaatggtttactaagttaaattttaagaactgcaaaatatccacagaacagaacttcatttagaattatagctcatggaatagaaaaaataccacattgccacgagaacaccataaaaccaaaaagttcccaagcaaatacattgctgatgtatgttcgtgcatcyagaatcaccgaggttggaaaagacctccaagatcacttagtgcaaccatccacctcctaccaacatctccccacatcactgg

SEQ ID NO: 51395 - DNA, 600 bp, Chicken  19866894299158_1
caagtgccctgatagtcacaaacgaagatactgaagggcaagatgaaaaaataaatggctataaatggaacttaaagctgaataggagcattatgagcatggacacggaaggaagcagagttaatacaagatctatttgattgtatttcataaggtaaaactgcaaatgtttcagaaaagactgggacaataatttgtgatgcacagcagaattgggcagagtttagagaaagcacgacatttattttgttatgaagtagtgtggacaatgttactgagttctggacgagtctgaaggtkcttctgkktttttttccctgtttcactaaggaagttgtcgtgcatcaaaatgtgttagtttttggagatagcttctgtaacttatgaaggggtaatggtggaaggttatatagagttgacaaataaggccttttgagtaggagggctgattaggttgtttgtgaataacatcagaaatgggtgttcagtcggtggtatgacctcccaggcagcatttgtagtacgttttccacatactacttttcatacgttacttaagtcaatgttgtatcctttaaagaaagacattgtgtatgtacc

SEQ ID NO: 51396 - DNA, 600 bp, Chicken  19866894299158_2
cctgatagtcacaaacgaagatactgaagggcaagatgaaaaaataaatggctataaatggaacttaaagctgaataggagcattatgagcatggacacggaaggaagcagagttaatacaagatctatttgattgtatttcataaggtaaaactgcaaatgtttcagaaaagactgggacaataatttgtgatgcacagcagaattgggcagagtttagagaaagcacgacatttattttgttatgaagtagtgtggacaatgttactgagttctggacgagtctgaaggtkcttctgkktttttttccctgtttcactaaggaagttgtcgtgcatcaaaatgtgttagtttttggagatagcttctgtaacttatgaaggggtaatggtggaaggttatatagagttgacaaataaggccttttgagtaggagggctgattaggttgtttgtgaataacatcagaaatgggtgttcagtcggtggtatgacctcccaggcagcatttgtagtacgttttccacatactacttttcatacgttacttaagtcaatgttgtatcctttaaagaaagacattgtgtatgtacctgacaga

SEQ ID NO: 51397 - DNA, 600 bp, Chicken  19866894299158_3
ctgatagtcacaaacgaagatactgaagggcaagatgaaaaaataaatggctataaatggaacttaaagctgaataggagcattatgagcatggacacggaaggaagcagagttaatacaagatctatttgattgtatttcataaggtaaaactgcaaatgtttcagaaaagactgggacaataatttgtgatgcacagcagaattgggcagagtttagagaaagcacgacatttattttgttatgaagtagtgtggacaatgttactgagttctggacgagtctgaaggtkcttctgkktttttttccctgtttcactaaggaagttgtcgtgcatcaaaatgtgttagtttttggagatagcttctgtaacttatgaaggggtaatggtggaaggttatatagagttgacaaataaggccttttgagtaggagggctgattaggttgtttgtgaataacatcagaaatgggtgttcagtcggtggtatgacctcccaggcagcatttgtagtacgttttccacatactacttttcatacgttacttaagtcaatgttgtatcctttaaagaaagacattgtgtatgtacctgacagaa

SEQ ID NO: 51398 - DNA, 600 bp, Chicken  19866894299158_4
atgaaggggtaatggtggaaggttatatagagttgacaaataaggccttttgagtaggagggctgattaggttgtttgtgaataacatcagaaatgggtgttcagtcggtggtatgacctcccaggcagcatttgtagtacgttttccacatactacttttcatacgttacttaagtcaatgttgtatcctttaaagaaagacattgtgtatgtacctgacagaacaaaacagttgatttatgatcaaatgttggcttattacacagctatccagctcagtgagagtggcagtgattcaratgtggagaccaatgcagtgagacctaaacagcctcatgttcttcaagagaacacacgaatgggcatggacaatgaagaaagcatgatgtcttacgagggcgatggtggggagacatctcaggttatggaggacagtaatatcaggtaattagagctgagaatctggttaaaataattatttcctcaaaacaaaatctgttctcttaaaggcttctgaagtgttttttgtaaaaaggtgtggttttttttatgttattctgtcacttgcagaatacacactctgcttgtgttgcagacat

SEQ ID NO: 51399 - DNA, 600 bp, Chicken  19866894299162_1
ttctctttttttgtattatttttccgtgcagcactcttaagcaaactgcatcccaatcatcttctggtgtagtcccagtccctttaattatatcagtaggagtctaataggatcaggctcttggtgaggaattcaggacatggtgtagcactcaagacctgcccagatagaccatggagacaatcagaagctcagggatctcagaccatgcatgtagtgaggaaacagccacctgatcttaaaaactagctcagacagtgaaagtggcataaataaaaccaacacagcttttgttcttgrggattttttgttcaaagtctccatataaaaaagtcaagaaaacccctagacacaatgtggacatccttcctcattcaaagtgctccatcattttaaaaaattcctttggaagaaatctcttatacatctccccagtcttttcttcatagcacacacacagccgatgagccctgaagtccctcctttgtgaatcatgttttgaaaccttgtctgtcatgttctccacagtgccctttggaaatgtgtaattgccatattcgatgattgtccatcagacagatggctgttgttagctttcat

SEQ ID NO: 51400 - DNA, 600 bp, Chicken  19866894299174_1
ttccagccatctgctctttaaatgccgagtggttgatgattcacagagacatggctctgtgtaagagcttaggtctactataataactttttatttttgtccttgttgctttcacctgtgcagctcttgatcctgctttatcctgcctttgtttgttgtagttttgtttacttggttacagtgcctgtgatagccattgctgcttgcttggagcaaaggttcatcctggcaagttattgctgtcattgatctgcacagcttaacacccccaggttagccgggcagtggctcatttccatygctgtgcaaataatactgggaactggtggaaaatgtaacygaaaggtatatggcttcatgggaaattttctcatttttaaacatcagtatattgcatttgcaagtagctgtataattttccccyttttgcgtggcacctttgatatttttacatggacaaatgaacgattgttagttcgtttagcatggaagttagcatggaagttcctggcttcagaaggaatcagttgagctgagaacaaaagtacttgatccacatagcctttgagcaattgaaaatagtgtaaaccttttaaagag

SEQ ID NO: 51401 - DNA, 600 bp, Chicken  19866894299174_2
tcacagagacatggctctgtgtaagagcttaggtctactataataactttttatttttgtccttgttgctttcacctgtgcagctcttgatcctgctttatcctgcctttgtttgttgtagttttgtttacttggttacagtgcctgtgatagccattgctgcttgcttggagcaaaggttcatcctggcaagttattgctgtcattgatctgcacagcttaacacccccaggttagccgggcagtggctcatttccatygctgtgcaaataatactgggaactggtggaaaatgtaacygaaaggtatatggcttcatgggaaattttctcatttttaaacatcagtatattgcatttgcaagtagctgtataattttccccyttttgcgtggcacctttgatatttttacatggacaaatgaacgattgttagttcgtttagcatggaagttagcatggaagttcctggcttcagaaggaatcagttgagctgagaacaaaagtacttgatccacatagcctttgagcaattgaaaatagtgtaaaccttttaaagagcagaagatgtgaaagtggcatgattgcaataaaaataaat

SEQ ID NO: 51402 - DNA, 600 bp, Chicken  19866894299174_3
tcttgatcctgctttatcctgcctttgtttgttgtagttttgtttacttggttacagtgcctgtgatagccattgctgcttgcttggagcaaaggttcatcctggcaagttattgctgtcattgatctgcacagcttaacacccccaggttagccgggcagtggctcatttccatygctgtgcaaataatactgggaactggtggaaaatgtaacygaaaggtatatggcttcatgggaaattttctcatttttaaacatcagtatattgcatttgcaagtagctgtataattttccccyttttgcgtggcacctttgatatttttacatggacaaatgaacgattgttagttcgtttagcatggaagttagcatggaagttcctggcttcagaaggaatcagttgagctgagaacaaaagtacttgatccacatagcctttgagcaattgaaaatagtgtaaaccttttaaagagcagaagatgtgaaagtggcatgattgcaataaaaataaatagatagcagatgagataagactgctattgttgaggcagtcgtgggttggaattcagatcatgtttctttaggaagaaaagagaa

SEQ ID NO: 51403 - DNA, 600 bp, Chicken  19866894299175_1
ctgattgcatatggagctctgctacaatgcgttcactaacactatattgaactggtgtcctatggagtaatgttcaaaatatctcctcttattttcccccttccatgaggttgattttagtttgcaaagatgttggttttttttacctaaaaaaagaaaaaggcaacaaaaaaatctagctcctttcttcaactactaaagctgcctctttgtggttaagcaattctactcatctctttgatatttatatgaaattatctgaataaataagtcgctaatctaagttaaataaagtttctktcagaaatattttacaaggttttaaaaaaatcacaaagatgttgaaattaatgatgccttaaatgggggggggggggagggagaaataaccttcctagtcatcagcatggactatcttgcagaacattttggaggcattctttctttaaatatcatgaataattcattcctgttccacacagcaatctcttctttctccctccccctccacatctactttttaagttcaataccagttgctttatttgtactaaaacattttccatgtcaaacagattaaaaaaaaatcaaactctaaaa

SEQ ID NO: 51404 - DNA, 600 bp, Chicken  19866894299177_1
ctgcatgacgttgtaaatggtgcaacatgtcagctgaatcaaactactgaaaatatatagctcaataatttggtttgtttttaggtcttaggctgcccctccttgtcctagatgccttcttttagcctgggaacctaaaggttcatttgaaatcatgatataatagatcttttcatatcaactgctgaggttagccttgggggatactgcaacgtatttcttaatcttatagaactgacagagaggagtttggccagattataaaaacatacaagtgtaactacaaggtccaactcttcytgtgtggtccgccatacactgagagctccactttaagaaaagctgtgagtgttgggcatgtctgcaaatcagaacacagtcttccagtcaattgtgtatgtagttaaggtacaaaccatttgatcaacaatgtaaaaaattagggtgcatatattwcagatgggaggatggttttgaaaaatactatctgcaaaaatttgaagattatgattctactttcctacaactcagttawtgtgtcagatcataaacaattgatacatactgagtctttcaaccagaacagatggatgaatttct

SEQ ID NO: 51405 - DNA, 600 bp, Chicken  19866894299177_2
gatataatagatcttttcatatcaactgctgaggttagccttgggggatactgcaacgtatttcttaatcttatagaactgacagagaggagtttggccagattataaaaacatacaagtgtaactacaaggtccaactcttcytgtgtggtccgccatacactgagagctccactttaagaaaagctgtgagtgttgggcatgtctgcaaatcagaacacagtcttccagtcaattgtgtatgtagttaaggtacaaaccatttgatcaacaatgtaaaaaattagggtgcatatattwcagatgggaggatggttttgaaaaatactatctgcaaaaatttgaagattatgattctactttcctacaactcagttawtgtgtcagatcataaacaattgatacatactgagtctttcaaccagaacagatggatgaatttctgggtaccaataatctctcttagcattaatggtgagggcccacagaacagtcttgcttaaataacacaataaagggatctgtaatttacatgttttttaaccgtgaattgctgttagtctgtggatattcaggaattctttcttctctgagattagt

SEQ ID NO: 51406 - DNA, 588 bp, Chicken  19866894299177_3
tgacagagaggagtttggccagattataaaaacatacaagtgtaactacaaggtccaactcttcytgtgtggtccgccatacactgagagctccactttaagaaaagctgtgagtgttgggcatgtctgcaaatcagaacacagtcttccagtcaattgtgtatgtagttaaggtacaaaccatttgatcaacaatgtaaaaaattagggtgcatatattwcagatgggaggatggttttgaaaaatactatctgcaaaaatttgaagattatgattctactttcctacaactcagttawtgtgtcagatcataaacaattgatacatactgagtctttcaaccagaacagatggatgaatttctgggtaccaataatctctcttagcattaatggtgagggcccacagaacagtcttgcttaaataacacaataaagggatctgtaatttacatgttttttaaccgtgaattgctgttagtctgtggatattcaggaattctttcttctctgagattagttatggatactgactaatgtaatcttcatgccatgctgagtccattcacaatagatttctcagctttg

SEQ ID NO: 51407 - DNA, 600 bp, Chicken  19866894299179_1
cacatatggataactgatgtcctatgtgtgggattttaaaaacagaatttgcctttcatagaatcatagaatggcttaggttggaagggatctcaaagatcatgtagttccaaccccgtgccacaggctgggtgtcaaccactagatcaagctgcgcaggatcctacctaacttggccttgaatatctctagagatggggcatccagaacctctctgggcagcctgttccagtgcctcactgccctctgagtaagccatttctttctaacatctaacctaaatctcacctcatttagttwaaattcattcccccttgtcctattactatcagaccgtgtaaaaagttggtccacctcctgcatgtaagttcccttcaagtactggaaggtcactagaaggtctcctcagagctttctcttctccagactaaaaaagcccaactccctcaacctttcttcataggagatgttctccagctctctgagcatctttgtggctctcytctggacctgctccaacagctccacatccttcctatactgggggccccaggcctggatgcagtactgcagatgggacctcaaaggggtagagcagag

SEQ ID NO: 51408 - DNA, 541 bp, Chicken  19866894299179_2
ccagaacctctctgggcagcctgttccagtgcctcactgccctctgagtaagccatttctttctaacatctaacctaaatctcacctcatttagttwaaattcattcccccttgtcctattactatcagaccgtgtaaaaagttggtccacctcctgcatgtaagttcccttcaagtactggaaggtcactagaaggtctcctcagagctttctcttctccagactaaaaaagcccaactccctcaacctttcttcataggagatgttctccagctctctgagcatctttgtggctctcytctggacctgctccaacagctccacatccttcctatactgggggccccaggcctggatgcagtactgcagatgggacctcaaaggggtagagcagagggggacagtcacctccctctccctgctgccacccatcttttgacgcagctcaggatactgttggccttttggactgcaagagcacacaactgggctcgtgtccagcttattgtctgtcaagaaccccaagtccctctccacagg

SEQ ID NO: 51409 - DNA, 600 bp, Chicken  19866894299184_1
cggggtccgccactgcgtcacggggcccaccaccgcgtcacagggcccgtcaccgtgtccctgtccccacaggagtcgactggatgaacaaggtgatggcacgcttcgtgcggggcgacgcgcaggcagccgagatcgatgcgctgtgggagatcagcaagcagatcgagggccacaccatctgtgcgctgggcgacggtgccgcgtggcccgtgcaggtgagcgcggggctttgggatggcggcaggacctcgggggcttagctctcggcctcgttaactccgctttgtttgctcaacmcagggcctcatccgccactttcggccggagctggaggacaggatgcggcgctttggagaggccaaagcccgagcggcctcagcatgaggaggtctgggtggtggcagcagtggcaccacgcttcgctgctcccagtgggttctcgcccactcctggggctccttaataaacactgctgcaactgaagtggtttgaaacatggctttgtactaaaatcacaacgtgaaacgtcaaccgtggccgcagtggcgcagagagggggayggcggtgagaccgtgccaccctccaccctaaagcct

SEQ ID NO: 51410 - DNA, 600 bp, Chicken  19866894299184_2
tctcggcctcgttaactccgctttgtttgctcaacmcagggcctcatccgccactttcggccggagctggaggacaggatgcggcgctttggagaggccaaagcccgagcggcctcagcatgaggaggtctgggtggtggcagcagtggcaccacgcttcgctgctcccagtgggttctcgcccactcctggggctccttaataaacactgctgcaactgaagtggtttgaaacatggctttgtactaaaatcacaacgtgaaacgtcaaccgtggccgcagtggcgcagagagggggayggcggtgagaccgtgccaccctccaccctaaagccttccagccccaaacccctcacccccagagcctgggctccttccaaaatgcagctcaagcccttttttggggggcggtgatgccgcggccaggcacgtgggtctttctgcagtacaagtcgggtgccagcagctccagcgtcagctcggtgatgatggctgtcagcccccagatgcggtgggggccgttgaggaagacgggcagagtgtatccgtagcgaccggcagtacggaaatgggtatagccctggttctcttcccgcagga

SEQ ID NO: 51411 - DNA, 600 bp, Chicken  19866894299188_1
tctggaacataattactacacaaaatctgcagaatgcattgatgacttcaaaactatgttcttgaactgctacatatataacaaggtaagtgaaacaaacacctcctattagtcatcaattataatgaacgccaacaagtctaaagcaagtggatacttctagctacctatagaacttgccagtatcttcgagatttcttgaaactagttctgtttgaaatgggagggggctttgctgctagatttgactgaagacagaggcgaggcttaacttgctgttaacatctggatgcatagttrtcatagcacaaaggttctgctggcaaaacttcaaggtttattttgcacagcttacagcacactgtaacagctagacgagtccaaggtcagttactctgaggcattcttctctcctccattaagcttaggacaaactaatgtaagatgaagtgtgagtatttccctgtgctttggctgtgcttagtatctttgagctttcttcaggccataagaaggaataaaggaattgcagccctactcccttttccctttgctacgggaagcatgtgattatgtgagcaaacaggacagggtggggaa

SEQ ID NO: 51412 - DNA, 600 bp, Chicken  19866894299191_1
gataatgggtctttttaattgctttgttttcattcttcccgagttttctccgtgtttgtgtttctcacggcatttgcttttgtttctgtcaactgcagaactttgttccttgccttagcgttgctctgttcagctctgatgtctcactgtgtcagttaccattttgtactggctagaaaaacatcctcattatgcaaacctgaatgttatctggtcattttgccagcatgaggatcttttgagatctctaagatctgaaatttaagagcatttaatgtgtttaaaaacttgcagttggcwgtgcrgaggtgatggtatttgttttattcttctgatacttgccttgcctctccatacctctggctgtttttgcacgtttcaggtacttctgtgacatgaaacctctgaaaagaaatggccgctgactcgatgtgaattggttcaggttactataatgagcgatttttcagtgtgcaaattaaattgaaatgggaggtgtttgccaggtctggcctcaatataaaggacttaatgttcttacacataaatgaaggcctatttaaattgtaggagccttgaataatattttgaaggtactga

SEQ ID NO: 51413 - DNA, 600 bp, Chicken  19866894299191_2
tgggtctttttaattgctttgttttcattcttcccgagttttctccgtgtttgtgtttctcacggcatttgcttttgtttctgtcaactgcagaactttgttccttgccttagcgttgctctgttcagctctgatgtctcactgtgtcagttaccattttgtactggctagaaaaacatcctcattatgcaaacctgaatgttatctggtcattttgccagcatgaggatcttttgagatctctaagatctgaaatttaagagcatttaatgtgtttaaaaacttgcagttggcwgtgcrgaggtgatggtatttgttttattcttctgatacttgccttgcctctccatacctctggctgtttttgcacgtttcaggtacttctgtgacatgaaacctctgaaaagaaatggccgctgactcgatgtgaattggttcaggttactataatgagcgatttttcagtgtgcaaattaaattgaaatgggaggtgtttgccaggtctggcctcaatataaaggacttaatgttcttacacataaatgaaggcctatttaaattgtaggagccttgaataatattttgaaggtactgagtaaa

SEQ ID NO: 51414 - DNA, 600 bp, Chicken  19866894299192_1
cgagagacacctgcttccagacttcagtttgcacagcaggaacttataacaccttgatagccaggctagcagtgtgggtttggttatgcctgtagccttttagcaatttgaggtaatgtttttactcagcccttggctacaaaatatgtttgtggtcttaagctctattaatacgcttgtgtttgggttgtctgagtcttctgtccttgggcactgctgggaagtgtctggctcctttgtctatgcaacttccaaacaggtatgtgtatttgctgaaaagatcctcactttgggggtggkggggaaagagcctctctttttactgcgggaagcttgagggcttgcatgttagcagtgcagctgatgggtgactcctagatgcggaagtaacctgataaaagtactctcaaagagtaggtattcctgaactttcagcccttcctccaggcttctgatggttctgttgctggatctgagtaacttctgacagcacgaagctgaagtttggtgtcatgtatgaagcgataaactgttactcctggagtctgttgttgtttccaatgattgaggaatataacctctttgctcagtagtgttttg

SEQ ID NO: 51415 - DNA, 600 bp, Chicken  19866894299195_1
ggcttagcctgtgcttttcctctgtatgacttccatctaaccttttcttctgaatacagacagacatgcttgggaaaagagggactaatcctctgctttggaataagatctctctggtgtttggtaaacactatatttaaaagattattacattcagaagttaatttttatatagatatgattcttcagattagtttttctgtatcttcctgccttcctaactggccttcatagctttttgcaaccttaaggctcatagtgagatgattcattgtcttagccatggacttctgaaaactytggggctgaaatgtgaaggattgtgcttcctgctttggaaaccagaagaatataaaaatttaaaacactaaaacagtgttttaaaatagtttaaaaattattaaaataaatttaaaaaataattaaaatagtttaaaaatgtaaacactaaaatagattttagtctactaaaatctattatatgcctgccctgggcttgtcatagagcaaatatggaaaacgcagaattcttccataaaaagcaaggcatagatacaagggaatgctctgctggctcctgttggaggaggaggaaagagt

SEQ ID NO: 51416 - DNA, 600 bp, Chicken  19866894299195_2
cctcagcacacaggtagaatggcaatcgtgacaactagcaaaaaattcctgtgagaaattttaagggaacagaatcagcatttccagagtggggctggaactttatactgaatccagatgatcacaagtgagacattctgagtgcaactccaaacttcctttagcctttatttagcctttattccttgaaagtactttcaagctcctgctcaccaggaacacaaagcaaatgtatcacatctttttaatccacctctcagttttggtttgttctataacctggtagaaatgaccaatagytgtagtaaaagcaacagtcacttccagtaactaagtctacacttaaccaaaatatgcagaactcatctatgttccttatttagcacctgtatgcagagacaaaacctctgatwatttggtatttcatccctctattctcccctagaacatcagatataaaaaatgatgatgttgcatgacctgctccactaccacagagaaacgggagggaacaaagtcttatcgagaaccttggagtccaatgaggtgctgactccacttcaaattccttcacctccaacaaacttccaagacaggtaa

SEQ ID NO: 51417 - DNA, 600 bp, Chicken  19866894299195_3
ccagatgatcacaagtgagacattctgagtgcaactccaaacttcctttagcctttatttagcctttattccttgaaagtactttcaagctcctgctcaccaggaacacaaagcaaatgtatcacatctttttaatccacctctcagttttggtttgttctataacctggtagaaatgaccaatagytgtagtaaaagcaacagtcacttccagtaactaagtctacacttaaccaaaatatgcagaactcatctatgttccttatttagcacctgtatgcagagacaaaacctctgatwatttggtatttcatccctctattctcccctagaacatcagatataaaaaatgatgatgttgcatgacctgctccactaccacagagaaacgggagggaacaaagtcttatcgagaaccttggagtccaatgaggtgctgactccacttcaaattccttcacctccaacaaacttccaagacaggtaagaacaaaattcacacagaaaaatgatttcattagaagtatttgatatccaattgctgttactaaaaagtatttttctaarggttgtatttttctggcatattcrtttctttcc

SEQ ID NO: 51418 - DNA, 600 bp, Chicken  19866894299195_4
actttcaagctcctgctcaccaggaacacaaagcaaatgtatcacatctttttaatccacctctcagttttggtttgttctataacctggtagaaatgaccaatagytgtagtaaaagcaacagtcacttccagtaactaagtctacacttaaccaaaatatgcagaactcatctatgttccttatttagcacctgtatgcagagacaaaacctctgatwatttggtatttcatccctctattctcccctagaacatcagatataaaaaatgatgatgttgcatgacctgctccactacwacagagaaacgggagggaacaaagtcttatcgagaaccttggagtccaatgaggtgctgactccacttcaaattccttcacctccaacaaacttccaagacaggtaagaacaaaattcacacagaaaaatgatttcattagaagtatttgatatccaattgctgttactaaaaagtatttttctaarggttgtatttttctggcatattcrtttctttccattatagcctaatgctatggtctgccagttccctgggaaacaggattatatctgaaaatatattgtgttgtggttttcaa

SEQ ID NO: 51419 - DNA, 600 bp, Chicken  19866894299195_5
ctttcaagctcctgctcaccaggaacacaaagcaaatgtatcacatctttttaatccacctctcagttttggtttgttctataacctggtagaaatgaccaatagytgtagtaaaagcaacagtcacttccagtaactaagtctacacttaaccaaaatatgcagaactcatctatgttccttatttagcacctgtatgcagagacaaaacctctgatwatttggtatttcatccctctattctcccctagaacatcagatataaaaaatgatgatgttgcatgacctgctccactaccwcagagaaacgggagggaacaaagtcttatcgagaaccttggagtccaatgaggtgctgactccacttcaaattccttcacctccaacaaacttccaagacaggtaagaacaaaattcacacagaaaaatgatttcattagaagtatttgatatccaattgctgttactaaaaagtatttttctaarggttgtatttttctggcatattcrtttctttccattatagcctaatgctatggtctgccagttccctgggaaacaggattatatctgaaaatatattgtgttgtggttttcaaa

SEQ ID NO: 51420 - DNA, 600 bp, Chicken  19866894299195_6
tagcacctgtatgcagagacaaaacctctgatwatttggtatttcatccctctattctcccctagaacatcagatataaaaaatgatgatgttgcatgacctgctccactaccacagagaaacgggagggaacaaagtcttatcgagaaccttggagtccaatgaggtgctgactccacttcaaattccttcacctccaacaaacttccaagacaggtaagaacaaaattcacacagaaaaatgatttcattagaagtatttgatatccaattgctgttactaaaaagtatttttctaarggttgtatttttctggcatattcrtttctttccattatagcctaatgctatggtctgccagttccctgggaaacaggattatatctgaaaatatattgtgttgtggttttcaaatatctcttgaaataattttcatgaagaataaaaatgacaggtatattgtatttccaattaggaggaaaaaaaaagagagcaaaaaaaggagcatatttcacaaatggatcgccaatgtttatcatgctcttctttgatctagtcctgtcttgaacccttctttctagatcacaaattgacctagaa

SEQ ID NO: 51421 - DNA, 600 bp, Chicken  19866894299195_7
cctctgatwatttggtatttcatccctctattctcccctagaacatcagatataaaaaatgatgatgttgcatgacctgctccactaccacagagaaacgggagggaacaaagtcttatcgagaaccttggagtccaatgaggtgctgactccacttcaaattccttcacctccaacaaacttccaagacaggtaagaacaaaattcacacagaaaaatgatttcattagaagtatttgatatccaattgctgttactaaaaagtatttttctaarggttgtatttttctggcatattcrtttctttccattatagcctaatgctatggtctgccagttccctgggaaacaggattatatctgaaaatatattgtgttgtggttttcaaatatctcttgaaataattttcatgaagaataaaaatgacaggtatattgtatttccaattaggaggaaaaaaaaagagagcaaaaaaaggagcatatttcacaaatggatcgccaatgtttatcatgctcttctttgatctagtcctgtcttgaacccttctttctagatcacaaattgacctagaattaccgagataaactttaagatta

SEQ ID NO: 51422 - DNA, 600 bp, Chicken  19866894299210_1
aagtgatgcaaaatcaggcagggtatccctaagtggtatctggtgaatctggaggtgacatgcttgtttcttagggcatgtgtatcttatgaaaatgggattgtgttttaaattaccttgctattgtacttctggtttttaaaaaccagtaggttagctagcatagatggaaataaagacctatgtttgttgctgaaggtggtatttgagaactgtgcatattgtcagagatgttcaggggtgtgtgtaaggaatgactgaaggaagggatggctgaaggaatcacctttttcaccgtayatctaacacaacagatacttctggctagatattttcacagcatgtcagcaaatgtayttaaagcatttcttgctttcccaagacttatatcctttttaaggctaaactgtatggtcattggttctttgggatattattaagtgtcatcctggacatattaagtttgaaatgagatgttctcagagccttgtgctgctgagattgtgctttaataaagagatcgttttgcctacatttcaattcacaacttcagccttcaaaaattgaacactgcagtgtcctcaggacaaattatgctct

SEQ ID NO: 51423 - DNA, 600 bp, Chicken  19866894299210_2
acatgcttgtttcttagggcatgtgtatcttatgaaaatgggattgtgttttaaattaccttgctattgtacttctggtttttaaaaaccagtaggttagctagcatagatggaaataaagacctatgtttgttgctgaaggtggtatttgagaactgtgcatattgtcagagatgttcaggggtgtgtgtaaggaatgactgaaggaagggatggctgaaggaatcacctttttcaccgtayatctaacacaacagatacttctggctagatattttcacagcatgtcagcaaatgtayttaaagcatttcttgctttcccaagacttatatcctttttaaggctaaactgtatggtcattggttctttgggatattattaagtgtcatcctggacatattaagtttgaaatgagatgttctcagagccttgtgctgctgagattgtgctttaataaagagatcgttttgcctacatttcaattcacaacttcagccttcaaaaattgaacactgcagtgtcctcaggacaaattatgctctttcatttccattcttatagcagcactgttcctggtaagccttgccaaaggaatgaca

SEQ ID NO: 51424 - DNA, 464 bp, Chicken  19866894299211_1
tcattcctcttcattgatctactctgtaatttacataactttctcaactctgagaatagtacagggtacagatttacatttttgcttgaaaagttgaggcaaagtaggtgagaaacagacacgaaggtttccccgtagagatttttcttctgaatttggaaatccagaagcatccaacaaacgttgctaagtttgtagttatgcaaacaaaagtcatacagataatatttgctggaagagatactaccttcagtgaaggctgttattttttatcaaccgaaaataacctcttggtttcgmaaatcggttcagagatgaaaaatatatttaaaagttatttaaatgaacagttaatatattgctattaaatgttatttatcacgtcccttaattttagctgggataccttttctgtgctttctaatgtttagctgtgagagtctgtcagcatcctgttatttctg

SEQ ID NO: 51425 - DNA, 600 bp, Chicken  19866894299212_1
ttgtttcttgtttggaggggaaaatgagcaattttttcctttttctttcattcctcttcattgatctactctgtaatttacataactttctcaactctgagaatagtacagggcacagatttacatttttgcttgaaaagttgaggcaaagtaggtgagaaacagacacgaaggtttccccgtagagatttttcttctgaatttggaaatccagaaagcaacaacaagcattgctaagtttgtagttatgcaaacaaaagtcatacagataatatttgctggaagagatactaccttcartgaaggctgttattttttatcaaccgaaaataacctcttggttttgaaaatcggttcagagatgaaaaatatatttaaaagttatttaaatgaacagttaatatattgctattaaatgttatttatcacgtcccttmattttagctgggataccttttctgtgctttctaatgtttagctgtgagagtctgtcagcatcctgttatttctgtactattttaaagtcagacaaacatatttagagataatgaggtatcttcacactgtttttctttcttgcctcttcgtagccagggggat

SEQ ID NO: 51426 - DNA, 600 bp, Chicken  19866894299212_2
aagttgaggcaaagtaggtgagaaacagacacgaaggtttccccgtagagatttttcttctgaatttggaaatccagaaagcaacaacaagcattgctaagtttgtagttatgcaaacaaaagtcatacagataatatttgctggaagagatactaccttcartgaaggctgttattttttatcaaccgaaaataacctcttggttttgaaaatcggttcagagatgaaaaatatatttaaaagttatttaaatgaacagttaatatattgctattaaatgttatttatcacgtcccttmattttagctgggataccttttctgtgctttctaatgtttagctgtgagagtctgtcagcatcctgttatttctgtactattttaaagtcagacaaacatatttagagataatgaggtatcttcacactgtttttctttcttgcctcttcgtagccagggggatttttgtaagaaatcagagcatctgtttattcacacaccatccctcctaatcttaaaggaaacacttgttttggagaggttttgccagactcacacgagagatgagaatccagcatcttcctggccagcggcttaatg

SEQ ID NO: 51427 - DNA, 600 bp, Chicken  19866894299216_1
ctgacactagctttgcccttgcaaagaacatacattacagtactgtaatatactgtttgtttcctcctaaacatggagaaattttctggatgttctggacaaaatgtgtatctgagtgtccctgcttcagatacactgtcatgggaatgaagtcccagctcatgttttggggttgtcataattttgaatgtgttggggaactctgaattattaaaagcagtgtttaacatagaagctcaaaactattttagctgacaaatgaagatcagtttatgttcaagtaattgcatgtgctgaatygtggtgaaatcagagtgtatgcttaagcaagagagaatgaaaccgatgttctcactctgtcaagcatattttgaaaatatttcactgcttttattctcaygtatctaatatgtgcagtaggatttggtaagaggcgtaggcaaaatgtgattatttttacacaatttctctaataggattttctgattcttgtgtctgagctgctctgagactgcacagcctttgctctgtgtgctgcttagcagcaaagcaggggagctcacagatgaagaattggaagtttcaccttgttgatgtgcr

SEQ ID NO: 51428 - DNA, 600 bp, Chicken  19866894299216_2
aaaatgtgtatctgagtgtccctgcttcagatacactgtcatgggaatgaagtcccagctcatgttttggggttgtcataattttgaatgtgttggggaactctgaattattaaaagcagtgtttaacatagaagctcaaaactattttagctgacaaatgaagatcagtttatgttcaagtaattgcatgtgctgaatygtggtgaaatcagagtgtatgcttaagcaagagagaatgaaaccgatgttctcactctgtcaagcatattttgaaaatatttcactgcttttattctcaygtatctaatatgtgcagtaggatttggtaagaggcgtaggcaaaatgtgattatttttacacaatttctctaataggattttctgattcttgtgtctgagctgctctgagactgcacagcctttgctctgtgtgctgcttagcagcaaagcaggggagctcacagatgaagaattggaagtttcaccttgttgatgtgcrtttatttaaaacaaaatgttagctgtgaagtttgttttctactgtttgcaagtggggttatcatctgtgtgtctgattcatatgagttttttctcatatg

SEQ ID NO: 51429 - DNA, 600 bp, Chicken  19866894299216_3
gtggtgaaatcagagtgtatgcttaagcaagagagaatgaaaccgatgttctcactctgtcaagcatattttgaaaatatttcactgcttttattctcaygtatctaatatgtgcagtaggatttggtaagaggcgtaggcaaaatgtgattatttttacacaatttctctaataggattttctgattcttgtgtctgagctgctctgagactgcacagcctttgctctgtgtgctgcttagcagcaaagcaggggagctcacagatgaagaattggaagtttcaccttgttgatgtgcrtttatttaaaacaaaatgttagctgtgaagtttgttttctactgtttgcaagtggggttatcatctgtgtgtctgattcatatgagttttttctcatatgattatgattatgaccgtgtagaaatcagtatttgtctcctgttgtcagtcaggacagcaaagatctcagctggaagttaatgcaagcaagaacattcaaacaggagttgagcttgaaccctgctccttgctgtttgtgtgtatctcacataactaggaagagtcaattccagtactgacttaaggagcaaaacctgccag

SEQ ID NO: 51430 - DNA, 599 bp, Chicken  19866894299219_1
  misc_feature (1)..(72): n is any nucleotide
nnnnnnnnnnnnnnnnnnnnnnnnnnnnnnnnnnnnnnnnnnnnnnnnnnnnnnnnnnnnnnnnnnnnnnnncacattctatgcttggaagctgcaaaattgttttcgcaagttaactataataatagaaatgcttggaaggagtatctgtaatgtggagaatcccatattccaactaacctggctcaactggcccagtttcaagcaattttcacaattttttatcttgacttgtcagctgttgtccctgtgtagttcaagctgaaattaccctatttgttttcttttctggtgcaccayatatgctagtacatcacaataatgttttgcattatgagattctactgcaccatgtagttcacaaggtcttttcattctgttgcgtttaataggaaatagcccgtcatctccgacctggaactctgcgtgctgtctttgggaagaacaagattcagaatgctgtccactgcacagatctaccagaagatggacttctggaggtaagacttgctagataaacatatgcttttatatcatagaaaatttaaggtgaaaaactgtacttgatgctattttaagctgttcaagtgttttatttg

SEQ ID NO: 51431 - DNA, 599 bp, Chicken  19866894299224_1
  misc_feature (1)..(78): n is any nucleotide
nnnnnnnnnnnnnnnnnnnnnnnnnnnnnnnnnnnnnnnnnnnnnnnnnnnnnnnnnnnnnnnnnnnnnnnnnnnnnnaaaaagagtaatataaaaatgactgtaagaagatacctaacagcttgtagccttcagaagagtacaccaattcttccaaggcttttactacattgaagtagatagaaaggtgttgattgattagctttttttgtttgtgaaatgaacccccaaaaattttgagaagtttgaaaaaagaaggtcaaggcagtaatggagaacagcattataagacaattccaygtgggactataggttgcgatggtcttgaagacaaaagaaagcaggttaagttgcatctaatgaataatggctagtctgtgaaggaaggcaaagagatgagtgatctggtcaaagcaaagcaacaaaagatatcagcacagcattttgtagagataagagcgaattctcagcccttacacaatgcaagaataaagaaggagccaaggacaagcaagcactgaaaaaccaggcatcaactgaggtacacctgaatgcccagaagagacagcaaaagacccctgagcaatattcttcacttc

SEQ ID NO: 51432 - DNA, 600 bp, Chicken  19866894299225_1
aaaacaaataatcatgccagaaaacaacacacattcaaccaccttatgttcaattatcatttaagatatctgttttgtctgatttaagagcacagacaaaaaaaggctcaagccaagaagtcacagaaagcatggttaaaatacacaaacaacataaaacttgttttgttcttccaaacatttccaagaataacctaataaacagtttgttttccagtgctgaatggctatttgttagacaaccatagtaagctggcagctatctataggttgcaggtgttgtgggttttttttgtgttkttttttttttttccctaacaagacatatttgacacgtacctgtaggaaatatcagatcttcttggaaatagttctactgcatcattttcatgtccccctccattctccaatttatctaaagcagaatgcatacataagctttcttaaattaacagtattttaaaaataaaaacaaaaccagaaagaaaatagttatagttttattcagatatacttacctttacttaagaattttaagtgcttaaaagctttctccaaatctagcttctgcacattcaccccaaacgcaggtaggattgt

SEQ ID NO: 51433 - DNA, 600 bp, Chicken  19866894299226_1
ctcaccaagcttccctgtgtccatacctggaagccttctcaggctgactgccacgctccaaagcaagcctgccacagcaccccactgagtacagggcgagcctcctgctgcaccaccccccaacaagaactgcaacaacacaatgccagcccaccgcacctcagcccagcagccagcaggccctctgacaccacccacaccccaacagcacacgaggatcgaggactgctccaacgtggattcatttcatgcattctgaacttgaaaaaactggtctttacttcctccaatccaaccccsygctatcggaacacaactgcctaagcaaccaattaaatgaggaatgtgctaataagtgatctgttcctaccaaacgaaaaactacctggaagcacgcagtaaaaatgaatgacacctgatcagccacatcaaaaaacaaccaacccaactccaaaacaacaccgcacaaagcttccctccaacgagagctgcagggctgtcgctgcgtgcacatcacgcactgctctgtccatggggaaagggcagcagcaggcrgtgcaggaggagcccacctgcaaggagaaagtgcttccatcagag

SEQ ID NO: 51434 - DNA, 600 bp, Chicken  19866894299226_2
tcaccaagcttccctgtgtccatacctggaagccttctcaggctgactgccacgctccaaagcaagcctgccacagcaccccactgagtacagggcgagcctcctgctgcaccaccccccaacaagaactgcaacaacacaatgccagcccaccgcacctcagcccagcagccagcaggccctctgacaccacccacaccccaacagcacacgaggatcgaggactgctccaacgtggattcatttcatgcattctgaacttgaaaaaactggtctttacttcctccaatccaaccccsygctatcggaacacaactgcctaagcaaccaattaaatgaggaatgtgctaataagtgatctgttcctaccaaacgaaaaactacctggaagcacgcagtaaaaatgaatgacacctgatcagccacatcaaaaaacaaccaacccaactccaaaacaacaccgcacaaagcttccctccaacgagagctgcagggctgtcgctgcgtgcacatcacgcactgctctgtccatggggaaagggcagcagcaggcrgtgcaggaggagcccacctgcaaggagaaagtgcttccatcagagc

SEQ ID NO: 51435 - DNA, 600 bp, Chicken  19866894299226_3
ctgaacttgaaaaaactggtctttacttcctccaatccaaccccsygctatcggaacacaactgcctaagcaaccaattaaatgaggaatgtgctaataagtgatctgttcctaccaaacgaaaaactacctggaagcacgcagtaaaaatgaatgacacctgatcagccacatcaaaaaacaaccaacccaactccaaaacaacaccgcacaaagcttccctccaacgagagctgcagggctgtcgctgcgtgcacatcacgcactgctctgtccatggggaaagggcagcagcaggcrgtgcaggaggagcccacctgcaaggagaaagtgcttccatcagagctcagctcacaccgccaggtcaacagcactatctttacagcgtaatggccccaataacagcctgcagataacgctctcctgaccggtcacacatgctgtgctggcagcacagtcagctcctcacrccaytggactgcaggagctcagcacatccctatcttatgcaccgctgcagcaaagcacrtacgtgtacaattcaccaatttcctgcttcrggagcctcttgtcttcagcaataactttaatgtgaatcat

SEQ ID NO: 51436 - DNA, 600 bp, Chicken  19866894299226_4
acatcaaaaaacaaccaacccaactccaaaacaacaccgcacaaagcttccctccaacgagagctgcagggctgtcgctgcgtgcacatcacgcactgctctgtccatggggaaagggcagcagcaggcrgtgcaggaggagcccacctgcaaggagaaagtgcttccatcagagctcagctcacaccgccaggtcaacagcactatctttacagcgtaatggccccaataacagcctgcagataacgctctcctgaccggtcacacatgctgtgctggcagcacagtcagctcctcacrccaytggactgcaggagctcagcacatccctatcttatgcaccgctgcagcaaagcacrtacgtgtacaattcaccaatttcctgcttcrggagcctcttgtcttcagcaataactttaatgtgaatcattgctcygaattattattgaaatgattttgtgcagctttaagagccaacagttgttcttccaaagcgtgtttcagtgcatgcagagaacaaacgtgtaacttcacccgggggtcagatctcatctcgctgcggaagcccaagcactccgttacctcaaagacctccatggc

SEQ ID NO: 51437 - DNA, 600 bp, Chicken  19866894299226_5
caaaaaacaaccaacccaactccaaaacaacaccgcacaaagcttccctccaacgagagctgcagggctgtcgctgcgtgcacatcacgcactgctctgtccatggggaaagggcagcagcaggcrgtgcaggaggagcccacctgcaaggagaaagtgcttccatcagagctcagctcacaccgccaggtcaacagcactatctttacagcgtaatggccccaataacagcctgcagataacgctctcctgaccggtcacacatgctgtgctggcagcacagtcagctcctcacrccaytggactgcaggagctcagcacatccctatcttatgcaccgctgcagcaaagcacrtacgtgtacaattcaccaatttcctgcttcrggagcctcttgtcttcagcaataactttaatgtgaatcattgctcygaattattattgaaatgattttgtgcagctttaagagccaacagttgttcttccaaagcgtgtttcagtgcatgcagagaacaaacgtgtaacttcacccgggggtcagatctcatctcgctgcggaagcccaagcactccgttacctcaaagacctccatggcatca

SEQ ID NO: 51438 - DNA, 548 bp, Chicken  19866894299226_6
agagctgcagggctgtcgctgcgtgcacatcacgcactgctctgtccatggggaaagggcagcagcaggcrgtgcaggaggagcccacctgcaaggagaaagtgcttccatcagagctcagctcacaccgccaggtcaacagcactatctttacagcgtaatggccccaataacagcctgcagataacgctctcctgaccggtcacacatgctgtgctggcagcacagtcagctcctcacrccaytggactgcaggagctcagcacatccctatcttatgcaccgctgcagcaaagcacrtacgtgtacaattcaccaatttcctgcttcrggagcctcttgtcttcagcaataactttaatgtgaatcattgctcygaattattattgaaatgattttgtgcagctttaagagccaacagttgttcttccaaagcgtgtttcagtgcatgcagagaacaaacgtgtaacttcacccgggggtcagatctcatctcgctgcggaagcccaagcactccgttacctcaaagacctccatggcatcacag

SEQ ID NO: 51439 - DNA, 517 bp, Chicken  19866894299226_7
acgcactgctctgtccatggggaaagggcagcagcaggcrgtgcaggaggagcccacctgcaaggagaaagtgcttccatcagagctcagctcacaccgccaggtcaacagcactatctttacagcgtaatggccccaataacagcctgcagataacgctctcctgaccggtcacacatgctgtgctggcagcacagtcagctcctcacrccaytggactgcaggagctcagcacatccctatcttatgcaccgctgcagcaaagcacrtacgtgtacaattcaccaatttcctgcttcrggagcctcttgtcttcagcaataactttaatgtgaatcattgctcygaattattattgaaatgattttgtgcagctttaagagccaacagttgttcttccaaagcgtgtttcagtgcatgcagagaacaaacgtgtaacttcacccgggggtcagatctcatctcgctgcggaagcccaagcactccgttacctcaaagacctccatggcatcacag

SEQ ID NO: 51440 - DNA, 471 bp, Chicken  19866894299226_8
gaggagcccacctgcaaggagaaagtgcttccatcagagctcagctcacaccgccaggtcaacagcactatctttacagcgtaatggccccaataacagcctgcagataacgctctcctgaccggtcacacatgctgtgctggcagcacagtcagctcctcacrccaytggactgcaggagctcagcacatccctatcttatgcaccgctgcagcaaagcacrtacgtgtacaattcaccaatttcctgcttcrggagcctcttgtcttcagcaataactttaatgtgaatcattgctcygaattattattgaaatgattttgtgcagctttaagagccaacagttgttcttccaaagcgtgtttcagtgcatgcagagaacaaacgtgtaacttcacccgggggtcagatctcatctcgctgcggaagcccaagcactccgttacctcaaagacctccatggcatcacag

SEQ ID NO: 51441 - DNA, 600 bp, Chicken  19866894299228_1
ttctaaaattaagaccctgcttagaaactttttaaagagggggaaaaaaaagttctaactgatacatgaagcattcttataataaagttcactccccttccccccaactcccagtatgcaccggtgttatagattgcagttattgattgcagtaagtaacaaagcacagcatagaattataaggttgcaagcacacaaacatcatgccaaaagcaagtgccctgaaatccagtgtcactcatcagctgtaacttcccgaaactctgctttttttccaatttacatgcaaaaagggggaayactttttgcaggagcaagaatccacgtgtatttccactccttgccaaaattaggaggagcaatctgactctacaacagtgctttgagtagaatacagagtactgacattttccagtaatgctgatgttcagtatcaaacttgattctatagaaacaaatgtgtttcactgcaatatccaagccaagcgctacgtaacagtattttatactgaaaatgaatgggtacacataggtactatcatctgaaggtaaaaagcttaaagctattcgattttgagatgtgtttgatgtattgcacta

SEQ ID NO: 51442 - DNA, 532 bp, Chicken  19866894299229_1
ccccatgcatgcctcaagttctgtcggtctcagctccaccgccacgtgtgcctcgagctcagtggggtctcagcttccgccgtccgtgcgttgagctctgcagggtctcagccccataaccgtgccccttccccacaggctggagcttccagatgggctcggcgtatcagttccacagctgtagggtcttcgtcctggtgtgcgccttcccctccgttttcgccatcggggcgctgaccactatgcccgagagcccccgcttcttcctggaggtcagcggggttggggggcacggccacmggggacccccggatggctgctgagggtgggaaagggacccccaaatggatgttggagttggggtaaggacccccaggtggatactgggattgggaccccaggtgagtgctggcggcggcatagggacccccggggggctgctaagggtggagtagggatccctataagggcgctggcgatgggacggggacccccacgtgacatgggggtggggcagggatcacaggtgggt

SEQ ID NO: 51443 - DNA, 599 bp, Chicken  19866894299231_1
  misc_feature (1)..(51): n is any nucleotide
nnnnnnnnnnnnnnnnnnnnnnnnnnnnnnnnnnnnnnnnnnnnnnnnnnncatttcagaaaatggctttttgatattgatattttttatttttttttctttttatatatttttagatatagactataagtctaggtatctagacttgactgaggtataagttgttttgaaatgaagttctgaattgattctgagagacaaatcattatatattcatcatagaaaagtgtctcctagaaagagtttaatgttattcttatagagcattaaaacttgtaaattcaaaaaattatacagcamaattagttctattaaacttctactgaaaagaagtttccttattatcatagcagacttatcacaagaaacctgaaagcctccaagacagttttccaaatcatgcatctataaatactatacttaatttacatcttgccttacatgaaaatggaatttctcaaatgggacttaaataygtatagaatatcatatttttaccaatagtgggctaaaatcttgctattgttacgctcattgcctttgcttttatgagaacaagacttaaaaagatccaactccrcttaaggtgacctaatttt

SEQ ID NO: 51444 - DNA, 600 bp, Chicken  19866894299231_2
gttctgaattgattctgagagacaaatcattatatattcatcatagaaaagtgtctcctagaaagagtttaatgttattcttatagagcattaaaacttgtaaattcaaaaaattatacagcamaattagttctattaaacttctactgaaaagaagtttccttattatcatagcagacttatcacaagaaacctgaaagcctccaagacagttttccaaatcatgcatctataaatactatacttaatttacatcttgccttacatgaaaatggaatttctcaaatgggacttaaataygtatagaatatcatatttttaccaatagtgggctaaaatcttgctattgttacgctcattgcctttgcttttatgagaacaagacttaaaaagatccaactccrcttaaggtgacctaattttgcaaagtttcagaaaaagcacagatcaggccatggtgcaacctacaacagcagaaaacctatggtaaatacatcttcgctactctgtagtccactctactctgactaaagatgatatttctaatttttttcggagttgcaaaagacagatatctctgtagtcacacccttataggtg

SEQ ID NO: 51445 - DNA, 600 bp, Chicken  19866894299231_3
ttcaaaaaattatacagcamaattagttctattaaacttctactgaaaagaagtttccttattatcatagcagacttatcacaagaaacctgaaagcctccaagacagttttccaaatcatgcatctataaatactatacttaatttacatcttgccttacatgaaaatggaatttctcaaatgggacttaaataygtatagaatatcatatttttaccaatagtgggctaaaatcttgctattgttacgctcattgcctttgcttttatgagaacaagacttaaaaagatccaactccrcttaaggtgacctaattttgcaaagtttcagaaaaagcacagatcaggccatggtgcaacctacaacagcagaaaacctatggtaaatacatcttcgctactctgtagtccactctactctgactaaagatgatatttctaatttttttcggagttgcaaaagacagatatctctgtagtcacacccttataggtgtctatttaaattaatatttctgagatttctctttccttttatcttaagatcctcagttgtatctaattctgcaataggaaagtttttagaacatttaataacta

SEQ ID NO: 51446 - DNA, 600 bp, Chicken  19866894299232_1
atttgcctactgacttctcaaggcaggatgttagaaaatgggatacagtggcccaagtttgaccaaaaacacagaactttccagagtacgttaaattaacatgagatctaatttagtgggcatttagctctgaatatcttcaaatttccagaatttttcaaacctgttttctcgctttgatttcttagaaaaacagctttagtttcaaaggacagatcactgcaagtgagaagaacactttgtggaaaagtacttaaagcaaaggaaaagcatacagcattttgatcagattaagatatrcaaatttaagtcctatgctgtgcaagtttatgttccattttttaattgcaagtctctcagaaaaaaactattgtaacaattatgggataaacagtgtgacaatgtggaatcagtgagtgcatatgaatactaatgaaatgtatataaaatacgccyygagtatttagtcttgactgcctcactttccatttcctccactatacagctaaatatagattgcctattagatacaggtgtcacagctcattatatttaaacctagtgccctaagtctatttgttggtatgttgcctacgcctg

SEQ ID NO: 51447 - DNA, 600 bp, Chicken  19866894299232_2
ttcaaacctgttttctcgctttgatttcttagaaaaacagctttagtttcaaaggacagatcactgcaagtgagaagaacactttgtggaaaagtacttaaagcaaaggaaaagcatacagcattttgatcagattaagatatrcaaatttaagtcctatgctgtgcaagtttatgttccattttttaattgcaagtctctcagaaaaaaactattgtaacaattatgggataaacagtgtgacaatgtggaatcagtgagtgcatatgaatactaatgaaatgtatataaaatacgccyygagtatttagtcttgactgcctcactttccatttcctccactatacagctaaatatagattgcctattagatacaggtgtcacagctcattatatttaaacctagtgccctaagtctatttgttggtatgttgcctacgcctggattgcaatttcagcctggcatgagactgtgtgttaggaagggctggcattttgtgaagatacctggagatagaatttctataacgaagattcaatcctgaattgattaattttgacagaatcttttacctgcccttttaaaattattatttcaca

SEQ ID NO: 51448 - DNA, 600 bp, Chicken  19866894299232_3
tcaaacctgttttctcgctttgatttcttagaaaaacagctttagtttcaaaggacagatcactgcaagtgagaagaacactttgtggaaaagtacttaaagcaaaggaaaagcatacagcattttgatcagattaagatatrcaaatttaagtcctatgctgtgcaagtttatgttccattttttaattgcaagtctctcagaaaaaaactattgtaacaattatgggataaacagtgtgacaatgtggaatcagtgagtgcatatgaatactaatgaaatgtatataaaatacgccyygagtatttagtcttgactgcctcactttccatttcctccactatacagctaaatatagattgcctattagatacaggtgtcacagctcattatatttaaacctagtgccctaagtctatttgttggtatgttgcctacgcctggattgcaatttcagcctggcatgagactgtgtgttaggaagggctggcattttgtgaagatacctggagatagaatttctataacgaagattcaatcctgaattgattaattttgacagaatcttttacctgcccttttaaaattattatttcacag

SEQ ID NO: 51449 - DNA, 600 bp, Chicken  19866894299233_1
gaagaagttcagatgcagtcctcagtggataaagtcatgtgcactgtcttttgagataggaagggggtgacctgtctggatttcttggacactgactaaaatgaaaacttcaacttccagagtaaagccagagaagacaacctttgtcttacaacacagtaattccaggccccatatcagtttgaagaccatggagcacactgctgtttttggttgagctgtcctaccatttgcactatatagtccagatttggcaccttctgactttcatctgctcaggacaatgaaagatggattgcrtaggcaactttttcctcccagcagtgctgtcacagtagctgtgatacaacgggttatttctgctcattcagatttttttgagtgcagtatacaggctctttttcattgctcatgaaaatgcatagctaacagtgattaataggtagaaaaatatttttttttatatttggaatttcctctatcagttagtgttattttgttatttgtaattgttgcagtttccatgaaaataaataggaggcattatttttgaagcaacctatgtatacatgagtatgtataaaataaaaatattcttaa

SEQ ID NO: 51450 - DNA, 600 bp, Chicken  19866894299239_1
agatattttaactgcaaggagcaaatggagtgcattaatacagatttgttggcagagtatggtctggggatttggatacaccaagaagtttgtctgagtgattatgtgtattactgcagcatttttaagatattacatgtttttattgtgtgttatttgattgttattgtttattttgctaatctatagactgttttgtaatttgatttttcatcgaagcaagtctgaagttagaatactgtgaaaaaaccttaaatatttatttttccctatgtttagaaacacaaaaatgcagacgtygtgcactcatttatatctcagaaccaakttaaaaaaaaaaaagctaaatcccatctttaataacatttgttacagaaatgctgacctgactgtaatgctgtgaatcataactgttctgtaagagaacagattaatgaggagaccaagaaacctacatcatattttgctgattttttaaattttattttacttttaataaatatactgctgtttttcttactcctcctgaaaatcttcttcaaagtccattgctccyactaactatgatgcgaratgcctgccaggcagctttcggcatgc

SEQ ID NO: 51451 - DNA, 600 bp, Chicken  19866894299239_2
agtgcattaatacagatttgttggcagagtatggtctggggatttggatacaccaagaagtttgtctgagtgattatgtgtattactgcagcatttttaagatattacatgtttttattgtgtgttatttgattgttattgtttattttgctaatctatagactgttttgtaatttgatttttcatcgaagcaagtctgaagttagaatactgtgaaaaaaccttaaatatttatttttccctatgtttagaaacacaaaaatgcagacgtygtgcactcatttatatctcagaaccaakttaaaaaaaaaaaagctaaatcccatctttaataacatttgttacagaaatgctgacctgactgtaatgctgtgaatcataactgttctgtaagagaacagattaatgaggagaccaagaaacctacatcatattttgctgattttttaaattttattttacttttaataaatatactgctgtttttcttactcctcctgaaaatcttcttcaaagtccattgctccyactaactatgatgcgaratgcctgccaggcagctttcggcatgccatgtgcccttaacattttagagagagg

SEQ ID NO: 51452 - DNA, 600 bp, Chicken  19866894299239_3
tatttatttttccctatgtttagaaacacaaaaatgcagacgtygtgcactcatttatatctcagaaccaakttaaaaaaaaaaaagctaaatcccatctttaataacatttgttacagaaatgctgacctgactgtaatgctgtgaatcataactgttctgtaagagaacagattaatgaggagaccaagaaacctacatcatattttgctgattttttaaattttattttacttttaataaatatactgctgtttttcttactcctcctgaaaatcttcttcaaagtccattgctccyactaactatgatgcgaratgcctgccaggcagctttcggcatgccatgtgcccttaacattttagagagagggagggaatgttctttgcagtgctgtgagtaaacattcagcgctgttacccaacagtttgatctgcatcagtaaacctgcttctggaacagctatcttaagttcttcttgcctcctgctttgtggtttctcgtgcaccagtttcttagctggcccaaccatgacaccccttatataagtgctggcagaaggccttgtggcttattctcagcctaatacaaattgaaaga

SEQ ID NO: 51453 - DNA, 600 bp, Chicken  19866894299239_4
gtttagaaacacaaaaatgcagacgtygtgcactcatttatatctcagaaccaakttaaaaaaaaaaaagctaaatcccatctttaataacatttgttacagaaatgctgacctgactgtaatgctgtgaatcataactgttctgtaagagaacagattaatgaggagaccaagaaacctacatcatattttgctgattttttaaattttattttacttttaataaatatactgctgtttttcttactcctcctgaaaatcttcttcaaagtccattgctccyactaactatgatgcgaratgcctgccaggcagctttcggcatgccatgtgcccttaacattttagagagagggagggaatgttctttgcagtgctgtgagtaaacattcagcgctgttacccaacagtttgatctgcatcagtaaacctgcttctggaacagctatcttaagttcttcttgcctcctgctttgtggtttctcgtgcaccagtttcttagctggcccaaccatgacaccccttatataagtgctggcagaaggccttgtggcttattctcagcctaatacaaattgaaagaaggatgaatagctggtc

SEQ ID NO: 51454 - DNA, 599 bp, Chicken  19866894299249_1
  misc_feature (1)..(207): n is any nucleotide
nnnnnnnnnnnnnnnnnnnnnnnnnnnnnnnnnnnnnnnnnnnnnnnnnnnnnnnnnnnnnnnnnnnnnnnnnnnnnnnnnnnnnnnnnnnnnnnnnnnnnnnnnnnnnnnnnnnnnnnnnnnnnnnnnnnnnnnnnnnnnnnnnnnnnnnnnnnnnnnnnnnnnnnnnnnnnnnnnnnnnnnnnnnnnnnnnnnnnnnnnnnnnnntgactgcattttggatgctgtgattatagcagtcagttagcattctcatcagcaggtttgcaccaacatgcatgcaacaaagatcttttttawwaaaaaaaaaaaaaaggctacacacaccctcttagattttatgtagtatagatgccagcctgttccatcacactcagcatgtgttattctgccttagtaaacrttgcatrcagaatcatcaactatcggaggacgattactgctcttctatcgtgcctaagaatctgcttaaatgtaacaccgcacacttaggaaagttggtgtcattgtttcctgatttctagtgcagcgatgacgaatgatagtaccagcatatgctcttaccactaacgagcctgaggcactcaaagccaagtctc

SEQ ID NO: 51455 - DNA, 599 bp, Chicken  19866894299249_2
  misc_feature (1)..(206): n is any nucleotide
nnnnnnnnnnnnnnnnnnnnnnnnnnnnnnnnnnnnnnnnnnnnnnnnnnnnnnnnnnnnnnnnnnnnnnnnnnnnnnnnnnnnnnnnnnnnnnnnnnnnnnnnnnnnnnnnnnnnnnnnnnnnnnnnnnnnnnnnnnnnnnnnnnnnnnnnnnnnnnnnnnnnnnnnnnnnnnnnnnnnnnnnnnnnnnnnnnnnnnnnnnnnnntgactgcattttggatgctgtgattatagcagtcagttagcattctcatcagcaggtttgcaccaacatgcatgcaacaaagatcttttttawwaaaaaaaaaaaaaaggctacacacaccctcttagattttatgtagtatagatgccagcctgttccatcacactcagcatgtgttattctgccttagtaaacrttgcatrcagaatcatcaactatcggaggacgattactgctcttctatcgtgcctaagaatctgcttaaatgtaacaccgcacacttaggaaagttggtgtcattgtttcctgatttctagtgcagcgatgacgaatgatagtaccagcatatgctcttaccactaacgagcctgaggcactcaaagccaagtctca

SEQ ID NO: 51456 - DNA, 599 bp, Chicken  19866894299249_3
  misc_feature (1)..(104): n is any nucleotide
nnnnnnnnnnnnnnnnnnnnnnnnnnnnnnnnnnnnnnnnnnnnnnnnnnnnnnnnnnnnnnnnnnnnnnnnnnnnnnnnnnnnnnnnnnnnnnnnnnnnnnnntgactgcattttggatgctgtgattatagcagtcagttagcattctcatcagcaggtttgcaccaacatgcatgcaacaaagatcttttttawwaaaaaaaaaaaaaaggctacacacaccctcttagattttatgtagtatagatgccagcctgttccatcacactcagcatgtgttattctgccttagtaaacrttgcatrcagaatcatcaactatcggaggacgattactgctcttctatcgtgcctaagaatctgcttaaatgtaacaccgcacacttaggaaagttggtgtcattgtttcctgatttctagtgcagcgatgacgaatgatagtaccagcatatgctcttaccactaacgagcctgaggcactcaaagccaagtctcaaaactaaagcattgccatagcaaccaagcaaaacactcagcgagctgctcctcctgcactgagtgtgtcttgctaatcttagcaagtctctcagcttcacca

SEQ ID NO: 51457 - DNA, 599 bp, Chicken  19866894299249_4
  misc_feature (1)..(97): n is any nucleotide
nnnnnnnnnnnnnnnnnnnnnnnnnnnnnnnnnnnnnnnnnnnnnnnnnnnnnnnnnnnnnnnnnnnnnnnnnnnnnnnnnnnnnnnnnnnnnnnnntgactgcattttggatgctgtgattatagcagtcagttagcattctcatcagcaggtttgcaccaacatgcatgcaacaaagatcttttttawwaaaaaaaaaaaaaaggctacacacaccctcttagattttatgtagtatagatgccagcctgttccatcacactcagcatgtgttattctgccttagtaaacrttgcatrcagaatcatcaactatcggaggacgattactgctcttctatcgtgcctaagaatctgcttaaatgtaacaccgcacacttaggaaagttggtgtcattgtttcctgatttctagtgcagcgatgacgaatgatagtaccagcatatgctcttaccactaacgagcctgaggcactcaaagccaagtctcaaaactaaagcattgccatagcaaccaagcaaaacactcagcgagctgctcctcctgcactgagtgtgtcttgctaatcttagcaagtctctcagcttcaccacaacacg

SEQ ID NO: 51458 - DNA, 600 bp, Chicken  19866894299249_5
tcagtctaaattattcttgcctaactgaggcttttgtcctgcgctgacttcagtgttctcttctggtagtgattatcttttgagctttgaaacttaagtgggtattttacaggtcagtactcctgttcagatgatgcttttgttctgcttgcctccgtctgcaaaatgcttgctcatcacagcaggcatttcaggacagagccatcctatactatctatatagcacagagctggacaagttttatgatcttgtctgaaacttttgtaggactcactgtggctgtattattctcccaatcrgcaacaatggtttctgcaagaggctatgtgggttaacagcttgtgtgaccccacccaaaggctgaccccatatccagagattcagtaagaatgcccacgctgttaaagctattycacagaatccataaatcaactccagcattaaytgcaatgttcttcatctctagattatgtatatcatttttcatttagaagaagtttgggaagtaaacaaatgagactatggaatgtactaatttcaaactctgcataatcactacgagtatatatataacgcagtaggaacagatcttccaggca

SEQ ID NO: 51459 - DNA, 600 bp, Chicken  19866894299249_6
cagtactcctgttcagatgatgcttttgttctgcttgcctccgtctgcaaaatgcttgctcatcacagcaggcatttcaggacagagccatcctatactatctatatagcacagagctggacaagttttatgatcttgtctgaaacttttgtaggactcactgtggctgtattattctcccaatcrgcaacaatggtttctgcaagaggctatgtgggttaacagcttgtgtgaccccacccaaaggctgaccccatatccagagattcagtaagaatgcccacgctgttaaagctattycacagaatccataaatcaactccagcattaaytgcaatgttcttcatctctagattatgtatatcatttttcatttagaagaagtttgggaagtaaacaaatgagactatggaatgtactaatttcaaactctgcataatcactacgagtatatatataacgcagtaggaacagatcttccaggcaatctttaggctcttccagaagtagtatatttttctaagtccaaaaaaaacccccaaaaaacaaaaaaaacaaaacaaaaaccaaaaaaacagcaatccttttagtcttccccat

SEQ ID NO: 51460 - DNA, 600 bp, Chicken  19866894299249_7
gcttgcctccgtctgcaaaatgcttgctcatcacagcaggcatttcaggacagagccatcctatactatctatatagcacagagctggacaagttttatgatcttgtctgaaacttttgtaggactcactgtggctgtattattctcccaatcrgcaacaatggtttctgcaagaggctatgtgggttaacagcttgtgtgaccccacccaaaggctgaccccatatccagagattcagtaagaatgcccacgctgttaaagctattycacagaatccataaatcaactccagcattaaytgcaatgttcttcatctctagattatgtatatcatttttcatttagaagaagtttgggaagtaaacaaatgagactatggaatgtactaatttcaaactctgcataatcactacgagtatatatataacgcagtaggaacagatcttccaggcaatctttaggctcttccagaagtagtatatttttctaagtccaaaaaaaacccccaaaaaacaaaaaaaacaaaacaaaaaccaaaaaaacagcaatccttttagtcttccccataaagaaattactcaaccttacttaaccatatg

SEQ ID NO: 51461 - DNA, 600 bp, Chicken  19866894299253_1
atccccctacagcagttgcacacaaattgtgcaagtgggtttggatacctccagacagggaaactccccccctactcagggtagctgtgccaaggctctgccaccctcacagcacaggatttcttcctcatgtgcatatggaactccctgggctccagtctgtgcccagtaccccttgttttggtgttgagcacctcaaaacagagcccagccccatcccccaactccacgctgcagatatggatcagcactgcttagatcccctcagccttctcttttccaggtgcacagccccagggytctctatttttattctgatctctgtgcagttctctggaatttgtgatgtcgaactctttcgtgcattttgaagtttgcattttattccagaagtaaaacatgtttgtgtatttttcaataaacggttaatatggcatacattgttaataaatacttgtcctgagtttaatgtgtatctaaaggcatagagcacgagggcttgagaggtaaattgcaaggtaatacactaatttagataaaaacataaatggaaaagtaatttttaaatgttacatgtggcatgtctatgtaatgtgagta

SEQ ID NO: 51462 - DNA, 600 bp, Chicken  19866894299260_1
agcaggaagaatttagttaatcagtactttcccctcataaacccatgttggctatgaccagtggctacaatgcctttcaggtgctttttagtaccccccagaatagacttctccattattttatcaggcactgaagtgtgactgattggcctgttacttctagggtcttctttcttgccctccttgaaaactaggatgtttgacagcttccagtcaatggggatctctccagtttcccagtatcactgaaaaataattgagagaggttttctgatgacatgagccagttctttcagtacyttgggatgaatcctatcggggaacatagactccttatgtcttacacctaccctgacatttggcagtaaagaataaaaagtgttggtgtttttttttttttttttttaaggttataagtgtcattcagacaccagtcttctgagatgggaaagaccaatgatgaaaagaccagtgatgtttcttcactcctttcagaagatattaactgcaaggtctgtaagttcacatgagctcactatacgtagctagacacacatttctggaaggggttaacagcacttcagatgtggaaacttgaac

SEQ ID NO: 51463 - DNA, 600 bp, Chicken  19866894299270_1
ttgggcatctggagaagggaaagatgaggcagggaagaactgaggcaggaaagaagctttccttgctgtagaaatattttattttcaagggaggggggatagctatttatttacctttgatgaagccagtgcaaaccatttgtttgatggattaggctgttagttttaatttgtcaggttgcctagggtacaggacaggcaggttagctggagcaattgtctctatacagatggaaagaataatgtcctgaaaaggcagcattacaggggctgctctctcctgtgcagaccattccgcartacttaccctttaaatcccagtcaagtctcttgaggagatctgagttagcagttaaaagtaaaggcttgcatggccttttagctgcagactaaataccactctaatattgcagcctttgacatgcacagtgctgtttttccccctcttaggaatggtttgataaaggctgtttattttttttttctgctgttgctattaccccaagcctttattatcatgagttgccaggtataacagcaatatatgtaaaggcaggccattaactcggtgacttgcaaagtacaatattatgagtctag

SEQ ID NO: 51464 - DNA, 599 bp, Chicken  19866894299274_1
  misc_feature (1)..(53): n is any nucleotide
nnnnnnnnnnnnnnnnnnnnnnnnnnnnnnnnnnnnnnnnnnnnnnnnnnnnntaagatgttgaaaacaattctcaagctttccgagtgtttgttcactgtgttgctccaggacacatcaggaaaatacaataaaccttacgctgattttaaattaaatacctttaatcatcagaacagaacaatttgcacttacctctttcattggtacaatatgaaaaatattatgcttctaaagaagcaacaagacattaagaaaagcacttctactgcaatcatcaacccatctttatctcacagrtggcaaaagttctgaaaatggtccattaaaaggatgctataaaaattaggtatggcaattgaagatttaaggcttatgggctgtggtgcaaaytagacagacacaggaaatgttatatgaaatgtttatattattttaatctgaaatwaaagaaaaattgaaaaacaawtgttttaaagaatttaataccttattctaaccaaaattaaacccttttggtcaatttagaaataaaaatcctattgtaacaaaggtaaraaattgatttaagcaatgtgggggaaaaaaagcatggctac

SEQ ID NO: 51465 - DNA, 600 bp, Chicken  19866894299274_2
ttcactgtgttgctccaggacacatcaggaaaatacaataaaccttacgctgattttaaattaaatacctttaatcatcagaacagaacaatttgcacttacctctttcattggtacaatatgaaaaatattatgcttctaaagaagcaacaagacattaagaaaagcacttctactgcaatcatcaacccatctttatctcacagrtggcaaaagttctgaaaatggtccattaaaaggatgctataaaaattaggtatggcaattgaagatttaaggcttatgggctgtggtgcaaaytagacagacacaggaaatgttatatgaaatgtttatattattttaatctgaaatwaaagaaaaattgaaaaacaawtgttttaaagaatttaataccttattctaaccaaaattaaacccttttggtcaatttagaaataaaaatcctattgtaacaaaggtaaraaattgatttaagcaatgtgggggaaaaaaagcatggctactacmagaaatacactttatttccacaaattgtgcaagatccacttagaaaaatggactcaggccaactttgcttttgttgcttttatctacagg

SEQ ID NO: 51466 - DNA, 600 bp, Chicken  19866894299274_3
ttaaattaaatacctttaatcatcagaacagaacaatttgcacttacctctttcattggtacaatatgaaaaatattatgcttctaaagaagcaacaagacattaagaaaagcacttctactgcaatcatcaacccatctttatctcacagrtggcaaaagttctgaaaatggtccattaaaaggatgctataaaaattaggtatggcaattgaagatttaaggcttatgggctgtggtgcaaaytagacagacacaggaaatgttatatgaaatgtttatattattttaatctgaaatwaaagaaaaattgaaaaacaawtgttttaaagaatttaataccttattctaaccaaaattaaacccttttggtcaatttagaaataaaaatcctattgtaacaaaggtaaraaattgatttaagcaatgtgggggaaaaaaagcatggctactacmagaaatacactttatttccacaaattgtgcaagatccacttagaaaaatggactcaggccaactttgcttttgttgcttttatctacaggtaaaactaatcattttttaaaataaaaattaccctgaaaatatcatgcagtaaca

SEQ ID NO: 51467 - DNA, 600 bp, Chicken  19866894299274_4
atcagaacagaacaatttgcacttacctctttcattggtacaatatgaaaaatattatgcttctaaagaagcaacaagacattaagaaaagcacttctactgcaatcatcaacccatctttatctcacagrtggcaaaagttctgaaaatggtccattaaaaggatgctataaaaattaggtatggcaattgaagatttaaggcttatgggctgtggtgcaaaytagacagacacaggaaatgttatatgaaatgtttatattattttaatctgaaatwaaagaaaaattgaaaaacaawtgttttaaagaatttaataccttattctaaccaaaattaaacccttttggtcaatttagaaataaaaatcctattgtaacaaaggtaaraaattgatttaagcaatgtgggggaaaaaaagcatggctactacmagaaatacactttatttccacaaattgtgcaagatccacttagaaaaatggactcaggccaactttgcttttgttgcttttatctacaggtaaaactaatcattttttaaaataaaaattaccctgaaaatatcatgcagtaacaaaccatataaatttgacacaa

SEQ ID NO: 51468 - DNA, 600 bp, Chicken  19866894299274_5
agcacttctactgcaatcatcaacccatctttatctcacagrtggcaaaagttctgaaaatggtccattaaaaggatgctataaaaattaggtatggcaattgaagatttaaggcttatgggctgtggtgcaaaytagacagacacaggaaatgttatatgaaatgtttatattattttaatctgaaatwaaagaaaaattgaaaaacaawtgttttaaagaatttaataccttattctaaccaaaattaaacccttttggtcaatttagaaataaaaatcctattgtaacaaaggtaaraaattgatttaagcaatgtgggggaaaaaaagcatggctactacmagaaatacactttatttccacaaattgtgcaagatccacttagaaaaatggactcaggccaactttgcttttgttgcttttatctacaggtaaaactaatcattttttaaaataaaaattaccctgaaaatatcatgcagtaacaaaccatataaatttgacacaaaattttccagtaaattgtaagcaatattttaatacaaaacaatatgaagtagaacagtaccttttctgccaggcttcatttcaccttct

SEQ ID NO: 51469 - DNA, 600 bp, Chicken  19866894299274_6
caaaagttctgaaaatggtccattaaaaggatgctataaaaattaggtatggcaattgaagatttaaggcttatgggctgtggtgcaaaytagacagacacaggaaatgttatatgaaatgtttatattattttaatctgaaatwaaagaaaaattgaaaaacaawtgttttaaagaatttaataccttattctaaccaaaattaaacccttttggtcaatttagaaataaaaatcctattgtaacaaaggtaaraaattgatttaagcaatgtgggggaaaaaaagcatggctactacmagaaatacactttatttccacaaattgtgcaagatccacttagaaaaatggactcaggccaactttgcttttgttgcttttatctacaggtaaaactaatcattttttaaaataaaaattaccctgaaaatatcatgcagtaacaaaccatataaatttgacacaaaattttccagtaaattgtaagcaatattttaatacaaaacaatatgaagtagaacagtaccttttctgccaggcttcatttcaccttcttgatccatccaatattctctaatatcaattaaaactttccctttg

SEQ ID NO: 51470 - DNA, 600 bp, Chicken  19866894299275_1
agccacagaaaatcatcgtctggatgatgcattggagcactaatggtttagacttggaaagggggggaaaaaacctggtgacacgagtagcaaatggcagatggagtttatttcctgacaagaagtgtcatcgttaattctcgggctgcagtggaggaaggctggctgagccctgggcactcactgacagatatcagcagggctgagcagtgcaggacccctgggctgagccctgctgccaccaggaccttacacagcccggcgcaccccatggcctgccctgaacaagaggtctgagaygtgggttttgagccaagttccggtggttttggaacacactgcgtgtgtgggtccttctgtgctttggaggtgttggatgtaagtcctcctgcccagtctttggaaacgtgatggtctcctcacacataaaatttacacttcttcccccaagaaccgagtgggttcactgccagataagtgcacgagcatctcctgctttcataaatcatacaatcatcaaggttggaaaagacctccaagatcaccaggtccaaccccaacccaccccaccgtgcccactgcccacatccctcagtgcca

SEQ ID NO: 51471 - DNA, 600 bp, Chicken  19866894299275_2
cttcttcccccaagaaccgagtgggttcactgccagataagtgcacgagcatctcctgctttcataaatcatacaatcatcaaggttggaaaagacctccaagatcaccaggtccaaccccaacccaccccaccgtgcccactgcccacatccctcagtgccacatctccacactgaacacctccatagacggtgaccccaccgctccccatgcagctgtgccagcacagcactgccccttctaagaagaacctctccctaatatccaacctgaatctcccatagtgcaactcaaagccytcctactacagcagctgaaacaactccattttccatccctggctgcgtctcttggttgctggctcatttaaacctccacgcctcaggtttgccatgtgtaaagtgatgaaatgttatttgtttattcccaaatgtcgcaacgtttattcatccctcacgttagttgagctaattaataacatcgcagttaccaagagcaattccccaacaggattactactgaattatgagagtaattgcacacaggaactttatttggctaaaacctcttccctggcaaggaatttggtgtgcagcttg

SEQ ID NO: 51472 - DNA, 599 bp, Chicken  19866894299277_1
  misc_feature (1)..(67): n is any nucleotide
nnnnnnnnnnnnnnnnnnnnnnnnnnnnnnnnnnnnnnnnnnnnnnnnnnnnnnnnnnnnnnnnnnncataggttgattgcttgcagatctgccaatgttcatgtgcaaattctctgaagaagataatgttctgacggtgttatcttgcaattcagataaagcagcaaagtaaaactccatggtttacattacagaaaaacaaaacaatctgaattcatcaaagccaatacatctcatttatatgctatatatgctaaagtggaaaataactttagatattaaaaatacagatacaatarggcttaattttctcagaaataatttgtaacttttcctttaattattttttttttaatttctgcctaaagatagacaaaaatagtcaccaaaattgatctatttggccaaaggataaggyttcaactgatactcgcattcattcttacaagtgatcagtatgaaaacatatcagagtgcagaaacctgtctacctgctatcatttcaagtgttctgtatttgcagtacatgctcactgttcatgctgcatgataggtcagctccraggaggtggccaagctgccagaaaggcaaaggtac

SEQ ID NO: 51473 - DNA, 600 bp, Chicken  19866894299277_2
gaagataatgttctgacggtgttatcttgcaattcagataaagcagcaaagtaaaactccatggtttacattacagaaaaacaaaacaatctgaattcatcaaagccaatacatctcatttatatgctatatatgctaaagtggaaaataactttagatattaaaaatacagatacaatarggcttaattttctcagaaataatttgtaacttttcctttaattattttttttttaatttctgcctaaagatagacaaaaatagtcaccaaaattgatctatttggccaaaggataaggyttcaactgatactcgcattcattcttacaagtgatcagtatgaaaacatatcagagtgcagaaacctgtctacctgctatcatttcaagtgttctgtatttgcagtacatgctcactgttcatgctgcatgataggtcagctccraggaggtggccaagctgccagaaaggcaaaggtacacagcaackgcccttaatcaatcctgaagaaacttatctttcttcatttgctgtacagtcagcttgtgttctcaatttaagtgcacaaattttatgttcaaaataaatgagcactaaaat

SEQ ID NO: 51474 - DNA, 600 bp, Chicken  19866894299277_3
aaataactttagatattaaaaatacagatacaatarggcttaattttctcagaaataatttgtaacttttcctttaattattttttttttaatttctgcctaaagatagacaaaaatagtcaccaaaattgatctatttggccaaaggataaggyttcaactgatactcgcattcattcttacaagtgatcagtatgaaaacatatcagagtgcagaaacctgtctacctgctatcatttcaagtgttctgtatttgcagtacatgctcactgttcatgctgcatgataggtcagctccraggaggtggccaagctgccagaaaggcaaaggtacacagcaackgcccttaatcaatcctgaagaaacttatctttcttcatttgctgtacagtcagcttgtgttctcaatttaagtgcacaaattttatgttcaaaataaatgagcactaaaatttcttaatatgcaattttttccctgaaaattattctttatgcctaagcatagtgctgaacctatatgatatttatcttttatctactccttatatcacagtcctaaatacaatttaaacatgacataaaccttcttttaactctc

SEQ ID NO: 51475 - DNA, 600 bp, Chicken  19866894299277_4
tttctcagaaataatttgtaacttttcctttaattattttttttttaatttctgcctaaagatagacaaaaatagtcaccaaaattgatctatttggccaaaggataaggyttcaactgatactcgcattcattcttacaagtgatcagtatgaaaacatatcagagtgcagaaacctgtctacctgctatcatttcaagtgttctgtatttgcagtacatgctcactgttcatgctgcatgataggtcagctccraggaggtggccaagctgccagaaaggcaaaggtacacagcaackgcccttaatcaatcctgaagaaacttatctttcttcatttgctgtacagtcagcttgtgttctcaatttaagtgcacaaattttatgttcaaaataaatgagcactaaaatttcttaatatgcaattttttccctgaaaattattctttatgcctaagcatagtgctgaacctatatgatatttatcttttatctactccttatatcacagtcctaaatacaatttaaacatgacataaaccttcttttaactctctgtacagtgaagaatttcatgctacatgaacatcctgatgaaaa

SEQ ID NO: 51476 - DNA, 600 bp, Chicken  19866894299277_5
gttttcataaaacatctgtgttaaaatgtcacatttccaataaaaatgtcagattttaaagtttctcctgagttgggtcagagatattcaagcactttacaacaaaagcagttttcacctaaaagctgtcaatagatgtccacactttttaattcaactaattagcatatttccagtatattttattatacattttccaatcaacttcacttgtaaataatgctgaggtacgtcgtcaaaacacattcaaacaaattttagagaacatttatttccatttttctttcagctctactcaarggatattgattacccctgatccaatgtcaaggtcctaaaactagaaagcagcatttaataagtatagagaggacatcatttctatcctggataactctacaattctcatttgtaccatcggtttgtgaaaagatcaggagaactatcagttttctcttacaaggtaatatatgactttctaagtttgcatggcctgaaaggctggaaagatttgttatagtctggactgaagtgaatgctttgaaatgcagaaactatctgcagctattccgtcataaggtggggygtgaccccacattc

SEQ ID NO: 51477 - DNA, 499 bp, Chicken  19866894299277_6
cagctctactcaarggatattgattacccctgatccaatgtcaaggtcctaaaactagaaagcagcatttaataagtatagagaggacatcatttctatcctggataactctacaattctcatttgtaccatcggtttgtgaaaagatcaggagaactatcagttttctcttacaaggtaatatatgactttctaagtttgcatggcctgaaaggctggaaagatttgttatagtctggactgaagtgaatgctttgaaatgcagaaactatctgcagctattccgtcataaggtggggygtgaccccacattctgaatttagcctcccatccatcacagattaattacgtttctggaaacaaaaaaagtgtaattattcaatgtgatgtgcaaggaagtgaccatataacagctattaacctatgcatcacactaagtaattgtcctaaagtcctaccactaatactggttttcaagttttcctggtctatttcaata

SEQ ID NO: 51478 - DNA, 600 bp, Chicken  19866894299287_1
tgacctcagcatgctgccttaagggtcatctctacaagcaatatttcagaagctgtgcaggccctcagtcactcactcagcaataaacctaaatactgcaggatgctgggatttccctttgatgactctcttctaagaagaatgctttccctgtatttctgatacaatatgtagtctacagattttaaggaaaaaaatctgcacagggagagaaatctccagtaattcttttctcagccctagtaacactaagttacacacttaaataaggttacacacactccaaacaggcacagaaaraaagaaacatttcttctttcttctcccctctgccaggcacaatcttttggaactccatttcttcaacagcatttgctaaggtatcaatcagcctgtagttacttttcccagcttacctcatagaagagcccttcaggaaactgctggaagcactgggcacacacgaagcactgctcgtggtacagctcaccattgctgttgacgattttctctgctggtgcaaagccccctctacagcgctcacagatggcatttgcgagtgcgtttgccatgttgctgtcataaaaacaagaaagagaa

SEQ ID NO: 51479 - DNA, 599 bp, Chicken  19866894299291_1
  misc_feature (1)..(77): n is any nucleotide
nnnnnnnnnnnnnnnnnnnnnnnnnnnnnnnnnnnnnnnnnnnnnnnnnnnnnnnnnnnnnnnnnnnnnnnnnnnnnagaattgcattaaggagcatgagatgcaggggcagttcagcaaaggaggtggtttgtatacacagggtgagcagacagctcaatagggtgcaatggcagaaaacaccttgctgaagtgaggcatgggaaagggacagctatggtaccagtccaaccagtaggacttctctgtgtccttccttgatagatttaccatgccattctggtttgtagcgagcccttyggatsgtgcatcctattgtgatgatttaacacacaccttacaatacagcaacttaggtggactgaaagatttatgttgctgattctgcaacaaatatgtcaagttccaaatgggctctcaatgacttcctgtgttatgctgagatagttggtcggaggcatcttggtgaaagacaaggccagcctacagtcrtatctgggcatgagtcggatctgccgcctttcatgcacttttatttattgcagagacaatgtgtttcactcacagctttcctcctctgacaactattygtgcaattt

SEQ ID NO: 51480 - DNA, 599 bp, Chicken  19866894299291_2
  misc_feature (1)..(72): n is any nucleotide
nnnnnnnnnnnnnnnnnnnnnnnnnnnnnnnnnnnnnnnnnnnnnnnnnnnnnnnnnnnnnnnnnnnnnnnnagaattgcattaaggagcatgagatgcaggggcagttcagcaaaggaggtggtttgtatacacagggtgagcagacagctcaatagggtgcaatggcagaaaacaccttgctgaagtgaggcatgggaaagggacagctatggtaccagtccaaccagtaggacttctctgtgtccttccttgatagatttaccatgccattctggtttgtagcgagcccttyggatsgtgcatcctattgtgatgatttaacacacaccttacaatacagcaacttaggtggactgaaagatttatgttgctgattctgcaacaaatatgtcaagttccaaatgggctctcaatgacttcctgtgttatgctgagatagttggtcggaggcatcttggtgaaagacaaggccagcctacagtcrtatctgggcatgagtcggatctgccgcctttcatgcacttttatttattgcagagacaatgtgtttcactcacagctttcctcctctgacaactattygtgcaatttaaata

SEQ ID NO: 51481 - DNA, 600 bp, Chicken  19866894299291_3
gtgaggcatgggaaagggacagctatggtaccagtccaaccagtaggacttctctgtgtccttccttgatagatttaccatgccattctggtttgtagcgagcccttyggatsgtgcatcctattgtgatgatttaacacacaccttacaatacagcaacttaggtggactgaaagatttatgttgctgattctgcaacaaatatgtcaagttccaaatgggctctcaatgacttcctgtgttatgctgagatagttggtcggaggcatcttggtgaaagacaaggccagcctacagtcrtatctgggcatgagtcggatctgccgcctttcatgcacttttatttattgcagagacaatgtgtttcactcacagctttcctcctctgacaactattygtgcaatttaaataagctgcactccagtgtttggacattgccctgctttctactttgtttgtttagtgaaactgccgcataactgccccagcagagtctggagttataaacaagctttgactgcagaatgtgtggtttaagttcagttttcaccttgacacagagcctttgctttctggaggagtagagacactctccagaa

SEQ ID NO: 51482 - DNA, 566 bp, Chicken  19866894299291_4
cgagcccttyggatsgtgcatcctattgtgatgatttaacacacaccttacaatacagcaacttaggtggactgaaagatttatgttgctgattctgcaacaaatatgtcaagttccaaatgggctctcaatgacttcctgtgttatgctgagatagttggtcggaggcatcttggtgaaagacaaggccagcctacagtcrtatctgggcatgagtcggatctgccgcctttcatgcacttttatttattgcagagacaatgtgtttcactcacagctttcctcctctgacaactattygtgcaatttaaataagctgcactccagtgtttggacattgccctgctttctactttgtttgtttagtgaaactgccgcataactgccccagcagagtctggagttataaacaagctttgactgcagaatgtgtggtttaagttcagttttcaccttgacacagagcctttgctttctggaggagtagagacactctccagaacacatcaacacagcgctgtgcacacaccgagaacagcaagcacgaactcccttgcagaaaaaca

SEQ ID NO: 51483 - DNA, 600 bp, Chicken  19866894299293_1
agttggtcaaaccagaatcggtcacaccagctgccacgtagattttgtctttgtgcacagtggctccaaacaaggaacgagcagttttcatgggagccagctccttccactcaaacttatttgggttgtagacacacatcttcttcaggcacttcctagggaaagaggagagagaaggagagagtaaattgtcagcccaggggcagatttgctctgcaggagttcggggatgcctgttgcaaagaacatggctctatagaagggatttcagttcttctacgttggccttagtgcatttgmttgggtaggcactcgagcttgtccrtgcccagggataccatttctgtgtacaacacatctgctcacaatgtgactgctttggataaggaatcttaaaagctcagcactgtgtgtgcacacctggataaagagtccatgtaactaactgcctctcaggaccatgtgtgcagccttcagatgctgtttcagtgctgctgactcaacactgcaaaataccctcccaaaagttacccgacacagtggacggcagtgtgaggtaagtgactgcatgccatattccttccagaacaggacttcttt

SEQ ID NO: 51484 - DNA, 600 bp, Chicken  19866894299293_2
accagctgccacgtagattttgtctttgtgcacagtggctccaaacaaggaacgagcagttttcatgggagccagctccttccactcaaacttatttgggttgtagacacacatcttcttcaggcacttcctagggaaagaggagagagaaggagagagtaaattgtcagcccaggggcagatttgctctgcaggagttcggggatgcctgttgcaaagaacatggctctatagaagggatttcagttcttctacgttggccttagtgcatttgmttgggtaggcactcgagcttgtccrtgcccagggataccatttctgtgtacaacacatctgctcacaatgtgactgctttggataaggaatcttaaaagctcagcactgtgtgtgcacacctggataaagagtccatgtaactaactgcctctcaggaccatgtgtgcagccttcagatgctgtttcagtgctgctgactcaacactgcaaaataccctcccaaaagttacccgacacagtggacggcagtgtgaggtaagtgactgcatgccatattccttccagaacaggacttctttgctgggttatggcaagttttgctca

SEQ ID NO: 51485 - DNA, 600 bp, Chicken  19866894299298_1
gaacagtgaaacaaatagtttggcactgcctacctacttggttgtcttatgaatttttgctgaacttgaagcatctgaagttccctttgtgattgctaaatcttaatattagcgtaggtatcctgaaataagcccccaaatgcaatgcagatacagccttcatttcaagtttaccaaaaccaagtttttgttccctacaatctaccagaagaaatataaagaaatgcaacaaatgaaacaggtcaaaattgctgggcgaactatatctgtttaatttaacttctcaaattgtttctgttygtttaattatcattcggcccttgcttatgagaataacaggatcatcctcttaagtacaactttctaagtggaggattatctttgcagcatacttgttctagatggtgcagatgcagttctggacctccaaacacaacaaactcaggttctaggatagaaaaatactgccatggaaaaacaaaaacaacaacaaaagaaaaactatgggaagttcttctttcatttaattgataacaaaccaaactactgtgttttgggttgtaaccatccaattgaagcattatttgcaaggagggggag

SEQ ID NO: 51486 - DNA, 599 bp, Chicken  19866894299301_1
  misc_feature (1)..(110): n is any nucleotide
nnnnnnnnnnnnnnnnnnnnnnnnnnnnnnnnnnnnnnnnnnnnnnnnnnnnnnnnnnnnnnnnnnnnnnnnnnnnnnnnnnnnnnnnnnnnnnnnnnnnnnnnnnnnnnaaatgtttaggtgctgctgtcagcaggatcatttcccccggagtccaatttctggttctgtaagtgcttgctaattacacagatctttgggtgagatacctcagctctgtgctagcagtttcaggaagcaggctgttccactcgcagttctcttcctattacattagctgttgaacatgctctctgtttrgggttcgtcatggacgagtatttatttttgaaacttataccacatgttcctaatgctttgtttgcacagctgtgagaaaagataatctaatgggaagaatagtttctyaaacaagaaagaattgtcttccaagacggccatttcacttcctttgtagcacaacagcgtgggtgtaggttcatattggacatgcttgtatgtcagaaattaaaatcaatgtttttcttattatgcagcgtagaataggtttcactttgacaatacctgcagatctgctctgtgtgactgcacaaaaatgt

SEQ ID NO: 51487 - DNA, 599 bp, Chicken  19866894299301_2
  misc_feature (1)..(2): n is any nucleotide
nnaaatgtttaggtgctgctgtcagcaggatcatttcccccggagtccaatttctggttctgtaagtgcttgctaattacacagatctttgggtgagatacctcagctctgtgctagcagtttcaggaagcaggctgttccactcgcagttctcttcctattacattagctgttgaacatgctctctgtttrgggttcgtcatggacgagtatttatttttgaaacttataccacatgttcctaatgctttgtttgcacagctgtgagaaaagataatctaatgggaagaatagtttctyaaacaagaaagaattgtcttccaagacggccatttcacttcctttgtagcacaacagcgtgggtgtaggttcatattggacatgcttgtatgtcagaaattaaaatcaatgtttttcttattatgcagcgtagaataggtttcactttgacaatacctgcagatctgctctgtgtgactgcacaaaaatgtaatttagtgacagcctgaaaagccattttggtgttactaattgtcgtaagttttctgtaggcaaccgtgggaggggaacaggaatttcatgctgaaggcagctgtgta

SEQ ID NO: 51488 - DNA, 516 bp, Chicken  19866894299303_1
gatcaagctctggacaaacctggtctacctgtgcatgtccctgttcattgtaggggagttgaactagatgacctctaggggtcccttccaattctaaggattctatgattccatgattctatgattctaaacagacacactgatcttcagctgtgcttctcctaatcttccctattattaaacctatttgttaccacagacttcctggtatgtggaactagaaatgattgtttccagacaactacattatagtttgaagttacatgtttttgtctttcaaaagtgatagataaatttttyggcttattttttctcatccagtgtaaggctcaacactgaataactgcagagtaactggtcccatactaacagagctcactgagaaaaaaagagtcattcatgtaaaggatatttgcagaacctgatcactgatgattaacttgcttatttaaattgctgttgttaactggtctgattgcaacaaataagaattacttttgaccttagatgatatgt

SEQ ID NO: 51489 - DNA, 600 bp, Chicken  19866894299305_1
tcatggttgtgtctgttttctacccatttgacctatgatttcttgtggcatagaatacagagctgagaacaagctgattcggaatggtgaagtacagaaaaacattcccatataacgactgacagcttttacgttttactcacatggggtgttttcactgcagttgaatgtgtgcagctgaaagtgcccatcattcagcagctgtaccactgggactgtgggctggcctgctccaggatggtgctacagtaagtgctgttttcattggaaggggtggggaatcccaacccatgggagagrgtgtcaggaagcaatgtccagggagatggggtatattggagcagctgtgaattttgcttagccttacgagagcacatattcctgaatacccttggagaattactkctgccagggcctagcacagcaatccagaagaaagggaaaataraagctaagacaaacataagaccttttgaataattgttttgattgatcagcactgagctaacaattaagcagtttggcatgcttaagctgataagaagttatccctctttcctgttgttacaattcagactggtatttaccacagcaagtcac

SEQ ID NO: 51490 - DNA, 600 bp, Chicken  19866894299305_2
tcccatataacgactgacagcttttacgttttactcacatggggtgttttcactgcagttgaatgtgtgcagctgaaagtgcccatcattcagcagctgtaccactgggactgtgggctggcctgctccaggatggtgctacagtaagtgctgttttcattggaaggggtggggaatcccaacccatgggagagrgtgtcaggaagcaatgtccagggagatggggtatattggagcagctgtgaattttgcttagccttacgagagcacatattcctgaatacccttggagaattactkctgccagggcctagcacagcaatccagaagaaagggaaaataraagctaagacaaacataagaccttttgaataattgttttgattgatcagcactgagctaacaattaagcagtttggcatgcttaagctgataagaagttatccctctttcctgttgttacaattcagactggtatttaccacagcaagtcacataattcctttctatatcattatgcaatgggtaggtttatcctagtttctgagtgtactgcctctgtcctgctgaacccccacccagcctgtggggtgaatgggt

SEQ ID NO: 51491 - DNA, 600 bp, Chicken  19866894299305_3
gtgttttcactgcagttgaatgtgtgcagctgaaagtgcccatcattcagcagctgtaccactgggactgtgggctggcctgctccaggatggtgctacagtaagtgctgttttcattggaaggggtggggaatcccaacccatgggagagrgtgtcaggaagcaatgtccagggagatggggtatattggagcagctgtgaattttgcttagccttacgagagcacatattcctgaatacccttggagaattactkctgccagggcctagcacagcaatccagaagaaagggaaaataraagctaagacaaacataagaccttttgaataattgttttgattgatcagcactgagctaacaattaagcagtttggcatgcttaagctgataagaagttatccctctttcctgttgttacaattcagactggtatttaccacagcaagtcacataattcctttctatatcattatgcaatgggtaggtttatcctagtttctgagtgtactgcctctgtcctgctgaacccccacccagcctgtggggtgaatgggtttttgttccaggacttgtttcaacgtcacagctatgcactata

SEQ ID NO: 51492 - DNA, 600 bp, Chicken  19866894299306_1
gattagaaagctccttcaaaacctcagcatgtcagagtcccacagctaattatagtggctgaatcttttttcccctttgattcaacagcagtactttgtgttagggtgtctcatagctaaatctcacatcacaatgaaaaataagtatttagttaaaaaaaaaaattggatagaaagattaggatcagatgaaactttggataagaaaaataacagattgttttgtgctcaactcagtaagatcgaagaagttggtggctgcgctgaagctgaaatcctaagtgggataatacgggtaastgaggaactggagaaaagccaatgcaaaggaargattacaaatttttcagagtatctgaaaggtagggatggtttgtgaatgaaataatgactgaggcgttgtgttacgaaaatcagtacaaattctggatatctacccagcacatgagtgaggaatatattaattcctaagagcacactaaaagacatttttctgatgtccaattagactgtgttcctattctataagaatgcatgctgggcatcrcaagtatgaattttgatcggccaaacagatattctttggtaaatagcactcca

SEQ ID NO: 51493 - DNA, 600 bp, Chicken  19866894299306_2
agagtcccacagctaattatagtggctgaatcttttttcccctttgattcaacagcagtactttgtgttagggtgtctcatagctaaatctcacatcacaatgaaaaataagtatttagttaaaaaaaaaaattggatagaaagattaggatcagatgaaactttggataagaaaaataacagattgttttgtgctcaactcagtaagatcgaagaagttggtggctgcgctgaagctgaaatcctaagtgggataatacgggtaastgaggaactggagaaaagccaatgcaaaggaargattacaaatttttcagagtatctgaaaggtagggatggtttgtgaatgaaataatgactgaggcgttgtgttacgaaaatcagtacaaattctggatatctacccagcacatgagtgaggaatatattaattcctaagagcacactaaaagacatttttctgatgtccaattagactgtgttcctattctataagaatgcatgctgggcatcrcaagtatgaattttgatcggccaaacagatattctttggtaaatagcactccacggtttgagctttttattggttgtgtttgcttc

SEQ ID NO: 51494 - DNA, 600 bp, Chicken  19866894299306_3
gaagttggtggctgcgctgaagctgaaatcctaagtgggataatacgggtaastgaggaactggagaaaagccaatgcaaaggaargattacaaatttttcagagtatctgaaaggtagggatggtttgtgaatgaaataatgactgaggcgttgtgttacgaaaatcagtacaaattctggatatctacccagcacatgagtgaggaatatattaattcctaagagcacactaaaagacatttttctgatgtccaattagactgtgttcctattctataagaatgcatgctgggcatcrcaagtatgaattttgatcggccaaacagatattctttggtaaatagcactccacggtttgagctttttattggttgtgtttgcttcactgatatttgtaacacagtgagacttgcatttctcatttcaaatgttattcccctttttccctcgttgccttatggagtagttagcagtgtaatcctttccttattgctgaaaaattgtctgttttaagctttgattctactaccagctatgccagatcaaatccaaagcatctaccttggggaaaggcactccaatctgaatgctgccctga

SEQ ID NO: 51495 - DNA, 600 bp, Chicken  19866894299308_1
acgcatctagtcctcagagtcaaccaagaatgaatgtattaaggaagacctagtcaatgccttcagaaaacatagagctgaacacacctgctcttgttactgctaagatcattacagttgaaaataaaaaagtgcaggtagtagtaatgggaactcagctcagagaaagggaaggtagaaaacatagaagaggcatgaggatatgaatataattgttgtcctgaaaagaaggattctttttttctcattatttaacaccatacaaatagacctactttaaatagttgtttgtatatttayttatgctaatccccatggaagcaccctataggggtggtgttttagtgtgtcttcacctgcagacaaaaaaataatattctgaaagccaactgtgttcatcactgggatggacctctgctttcccctcagtgcagatcgctactgtcacatacagggcctgttattttcctgtattctggtatgaaaatggtgatgctatgaagaagagcttaaccatctcacaacagtgcctaaatcccagcctcaaccagagaaaataagggacaaaaagacttttaacttagcaagaaggtggagtta

SEQ ID NO: 51496 - DNA, 600 bp, Chicken  19866894299308_2
tcacctgcagacaaaaaaataatattctgaaagccaactgtgttcatcactgggatggacctctgctttcccctcagtgcagatcgctactgtcacatacagggcctgttattttcctgtattctggtatgaaaatggtgatgctatgaagaagagcttaaccatctcacaacagtgcctaaatcccagcctcaaccagagaaaataagggacaaaaagacttttaacttagcaagaaggtggagttagagagcaatgccatgacaggctcagtgctcctctgggtgtctttggcacagyagggagctgggcagcagtctgccaagccgtgcaactarcatctccgtcacaagtctctccttcctctctctgctctcaaatccccagaagcagcaggagcaacacaacagaaacaaaagatgtagtatgctctcactgaccctgagcctgaagaggcctctcagctccaattccactttatagaagtgtgatttcatgggggcccaagaatatgtcatggttgcctgacaggcataacagagggtggagagaacagctggggaagcaggtaggtgctacctgctgctaacgaaatcatac

SEQ ID NO: 51497 - DNA, 600 bp, Chicken  19866894299308_3
tgtgttcatcactgggatggacctctgctttcccctcagtgcagatcgctactgtcacatacagggcctgttattttcctgtattctggtatgaaaatggtgatgctatgaagaagagcttaaccatctcacaacagtgcctaaatcccagcctcaaccagagaaaataagggacaaaaagacttttaacttagcaagaaggtggagttagagagcaatgccatgacaggctcagtgctcctctgggtgtctttggcacagyagggagctgggcagcagtctgccaagccgtgcaactarcatctccgtcacaagtctctccttcctctctctgctctcaaatccccagaagcagcaggagcaacacaacagaaacaaaagatgtagtatgctctcactgaccctgagcctgaagaggcctctcagctccaattccactttatagaagtgtgatttcatgggggcccaagaatatgtcatggttgcctgacaggcataacagagggtggagagaacagctggggaagcaggtaggtgctacctgctgctaacgaaatcatacacaggatttcagctgtgattgatttctcccacagtcca

SEQ ID NO: 51498 - DNA, 600 bp, Chicken  19866894299308_4
tgatgtattcccacatcttcaataataaaacaatctgatttgcacaacagcgatatgcctgcttctgcagagctgaaacaacattttagtattccagcttcttacccccaaatgtatctctctagatacgcggtggtaaatgtaggatgtacaggataacagcatttatttctgattcaaggttagctggtacaagagagaagaaggggaaatcaatcactgagtttctttcaggattttctatgcttaggtttattttctttgtatacatacctctacaaacgtagtggtgatttgaaratgtaatcacaaagtggcatgyttcacatgttcactgtacttayagaaggcaaaattgtacgagtgatttatcaaattctactttattaygaaacataaaaaacaacatggcacaggaaatatttctggtgtatctacaaaaacacattttaaggcaaaaagagctgaaattgtgcagatactgaattaatctgtttttaagcaaaaatctataaaacagcaaaataaaaggcattgtgctgtgtgttgctgcttaaaactgggaacaacagtggagcgcggcagttaattagcttcagt

SEQ ID NO: 51499 - DNA, 600 bp, Chicken  19866894299308_5
taataaaacaatctgatttgcacaacagcgatatgcctgcttctgcagagctgaaacaacattttagtattccagcttcttacccccaaatgtatctctctagatacgcggtggtaaatgtaggatgtacaggataacagcatttatttctgattcaaggttagctggtacaagagagaagaaggggaaatcaatcactgagtttctttcaggattttctatgcttaggtttattttctttgtatacatacctctacaaacgtagtggtgatttgaaratgtaatcacaaagtggcatgyttcacatgttcactgtacttayagaaggcaaaattgtacgagtgatttatcaaattctactttattaygaaacataaaaaacaacatggcacaggaaatatttctggtgtatctacaaaaacacattttaaggcaaaaagagctgaaattgtgcagatactgaattaatctgtttttaagcaaaaatctataaaacagcaaaataaaaggcattgtgctgtgtgttgctgcttaaaactgggaacaacagtggagcgcggcagttaattagcttcagtcaacatgagatgctttacaaca

SEQ ID NO: 51500 - DNA, 600 bp, Chicken  19866894299308_6
caacagcgatatgcctgcttctgcagagctgaaacaacattttagtattccagcttcttacccccaaatgtatctctctagatacgcggtggtaaatgtaggatgtacaggataacagcatttatttctgattcaaggttagctggtacaagagagaagaaggggaaatcaatcactgagtttctttcaggattttctatgcttaggtttattttctttgtatacatacctctacaaacgtagtggtgatttgaaratgtaatcacaaagtggcatgyttcacatgttcactgtacttayagaaggcaaaattgtacgagtgatttatcaaattctactttattaygaaacataaaaaacaacatggcacaggaaatatttctggtgtatctacaaaaacacattttaaggcaaaaagagctgaaattgtgcagatactgaattaatctgtttttaagcaaaaatctataaaacagcaaaataaaaggcattgtgctgtgtgttgctgcttaaaactgggaacaacagtggagcgcggcagttaattagcttcagtcaacatgagatgctttacaacatttctcacatcgctgcttcatc

SEQ ID NO: 51501 - DNA, 600 bp, Chicken  19866894299308_7
attccagcttcttacccccaaatgtatctctctagatacgcggtggtaaatgtaggatgtacaggataacagcatttatttctgattcaaggttagctggtacaagagagaagaaggggaaatcaatcactgagtttctttcaggattttctatgcttaggtttattttctttgtatacatacctctacaaacgtagtggtgatttgaaratgtaatcacaaagtggcatgyttcacatgttcactgtacttayagaaggcaaaattgtacgagtgatttatcaaattctactttattaygaaacataaaaaacaacatggcacaggaaatatttctggtgtatctacaaaaacacattttaaggcaaaaagagctgaaattgtgcagatactgaattaatctgtttttaagcaaaaatctataaaacagcaaaataaaaggcattgtgctgtgtgttgctgcttaaaactgggaacaacagtggagcgcggcagttaattagcttcagtcaacatgagatgctttacaacatttctcacatcgctgcttcatctgggctttggaataaacatttcccacactctgcatgaagaaaataa

SEQ ID NO: 51502 - DNA, 600 bp, Chicken  19866894299310_1
gagccaccattcagtggacccttggatgaaacttgcctagttcaccacctttaagagatcattttgtgccttctcatcctctgcacatttgtaatgccgtgcaaactttatcatcagcttccctttccagaagatgattgccccatttgccaggctatagaaaaccctaaccagccaggaaacagaataaacctagtgcaggaatgtcctcagaattccaatgtgtttattgtcactttttacagagcaaatgcaaaaagtctatactgttagcctattttatcttgtcttggacctcayactggaagactgtaactccttttgatttgtaagttgtcaccaacagtgataaagttgaagtgaaatttcttgctctatgttcactcttgtgtytgtaataaagcctttgagaagaatgcagattttcgttttgcttgcttctgctgatasaagattctcttgtcactaatttctatgaggctaaaggtttctttttgctccactacacatggaagaacaagttaatcctcttggctcactgtggtgagacatgctttgggtagaaaaaaagttacttgtggcccagtacatagaggcttt

SEQ ID NO: 51503 - DNA, 600 bp, Chicken  19866894299310_2
atgccgtgcaaactttatcatcagcttccctttccagaagatgattgccccatttgccaggctatagaaaaccctaaccagccaggaaacagaataaacctagtgcaggaatgtcctcagaattccaatgtgtttattgtcactttttacagagcaaatgcaaaaagtctatactgttagcctattttatcttgtcttggacctcayactggaagactgtaactccttttgatttgtaagttgtcaccaacagtgataaagttgaagtgaaatttcttgctctatgttcactcttgtgtytgtaataaagcctttgagaagaatgcagattttcgttttgcttgcttctgctgatasaagattctcttgtcactaatttctatgaggctaaaggtttctttttgctccactacacatggaagaacaagttaatcctcttggctcactgtggtgagacatgctttgggtagaaaaaaagttacttgtggcccagtacatagaggctttgtccagctgaggtctctggggctacgcttaaattttccttattcaagcacactgcgaccacataaatgtcaaattaaaaaaaagtgatctatt

SEQ ID NO: 51504 - DNA, 600 bp, Chicken  19866894299310_3
caggctatagaaaaccctaaccagccaggaaacagaataaacctagtgcaggaatgtcctcagaattccaatgtgtttattgtcactttttacagagcaaatgcaaaaagtctatactgttagcctattttatcttgtcttggacctcayactggaagactgtaactccttttgatttgtaagttgtcaccaacagtgataaagttgaagtgaaatttcttgctctatgttcactcttgtgtytgtaataaagcctttgagaagaatgcagattttcgttttgcttgcttctgctgatasaagattctcttgtcactaatttctatgaggctaaaggtttctttttgctccactacacatggaagaacaagttaatcctcttggctcactgtggtgagacatgctttgggtagaaaaaaagttacttgtggcccagtacatagaggctttgtccagctgaggtctctggggctacgcttaaattttccttattcaagcacactgcgaccacataaatgtcaaattaaaaaaaagtgatctattttaatagcagtagaactggccttatactgcggttatatgctggtaaatattctagtc

SEQ ID NO: 51505 - DNA, 600 bp, Chicken  19866894299324_1
gcaaagttgggggttctacagcttttcactggagtacattagtgacttcattgctaaatcttatgctcctgtgcttttgcttatgattgttagtgcagatctgtaatcattgatgaattgatggaccatataaaagtcagcctggctttcaggttggaacctgtgctcaagcttgggaaaatgacctgtgaggatttttattattataaggaaaactggaagttgaaaagctctgtatttgtaaatctgctcacagattctgttactctgatgggcgtgttttcagtaggaatatgcttkttgttgttgttgttgttattgttgcactgctttaaaatagaaataataggaaaaagcctagtaaaaagactggtaagtttcaccacacagagttaaaggactctggacaaagttgttgagcgcactgatttctcagactacaaaaacagagaaaaaagtggcagaagaaactagaacatgggaaccagaggacatggagtggtttgctttagcctttagcaagaacctcattgctctgatttgctgaggagaggctataatggagcaagatgcagagggaaaaaatggtaaaatataygc

SEQ ID NO: 51506 - DNA, 600 bp, Chicken  19866894299324_2
tkttgttgttgttgttgttattgttgcactgctttaaaatagaaataataggaaaaagcctagtaaaaagactggtaagtttcaccacacagagttaaaggactctggacaaagttgttgagcgcactgatttctcagactacaaaaacagagaaaaaagtggcagaagaaactagaacatgggaaccagaggacatggagtggtttgctttagcctttagcaagaacctcattgctctgatttgctgaggagaggctataatggagcaagatgcagagggaaaaaatggtaaaatataygcttgcagaagtagatatgtgggatcctcaagctgcctttggttaccagttattactatgacatcaggaatgtgacagtgagctgtgggatttttttcctgaaactgtggattaagtgtcctcagagaggacattcagaatctttggtgggagcggaatgtgaaacaccagctgctgcatgggctgaggcaatctatggaggcaactggagaagtataaaggatggtgttgttaaggatggggagaggttcttttaactttttaaagacactgcatctcttcctaatcaaacaatcatga

SEQ ID NO: 51507 - DNA, 600 bp, Chicken  19866894299325_1
aataatctgtaaatctatcatatattgcaaccagtgtttttgcacttgcaaaatgcacttgctgccttcccaacagtggcatttatgatctctaaaatacaggctcatgtttaatcctgccttaagcagctacgaggtggttttttttttttttccctaaaatcaaatgataaatgctattttgctacttataaatgaatctattttgcagataatgcgatttattcttaaaaggaaaacgctggaaagtgttgctttttttgcagaatgctttgaaaatgagagctatatctaaaatawttttttttatgagacatagcttaaataagtgggggatgaggaggatgaaaggggagagtacatacgatgttaaagctattgttttgaggattcactgacttctaagtctgattcttgaaacaagaaaataattctaaatattgtcctttgaaaggacaggactcgagccttagtaagcaggtaccatgttcttttggtaataaacttttcagaataaaccaggaggtgcacatttaggttaaaagacacttcatcaaaagcaatgtaaaaaaaatcacagagaaacagctgtctacagca

SEQ ID NO: 51508 - DNA, 599 bp, Chicken  19866894299341_1
  misc_feature (1)..(185): n is any nucleotide
nnnnnnnnnnnnnnnnnnnnnnnnnnnnnnnnnnnnnnnnnnnnnnnnnnnnnnnnnnnnnnnnnnnnnnnnnnnnnnnnnnnnnnnnnnnnnnnnnnnnnnnnnnnnnnnnnnnnnnnnnnnnnnnnnnnnnnnnnnnnnnnnnnnnnnnnnnnnnnnnnnnnnnnnnnnnnnnnnnnnnnnnntgatctgggtactgtgaagcagctgcaaggactacagattgtaggatgctgtaaaggtacggctactcataaaagaaaagagttctcagtgaaatccactaacagcttttcacaytgttactatgaaaagccttaaaacttttcctagtgtgattcataaccctcaccaacttctaaagcacagggattttcttagaagcagttacttgatcagtaatatattttgcaaccagcttcccagcttgcaacagcctgcctacccatacatcaacagaacaaataactatgcttcttcaaaaggtgtccaagtagctatttgcattgttaagcaatttaacattcttgattagttaaactaaatcaaatgaaaaaacaaaaacagtgacttttcaaaaccaagtactttcactccct

SEQ ID NO: 51509 - DNA, 599 bp, Chicken  19866894299342_1
  misc_feature (1)..(47): n is any nucleotide
nnnnnnnnnnnnnnnnnnnnnnnnnnnnnnnnnnnnnnnnnnnnnnnacaaaggaagggaaaggattgctaactgtctgaggatctaggttcacagaggaaacttcacaggggagggatctctagaaagagatccttccacagcgtcagtaagcccttaaatgaggtctaagagaggtgtagccaggctccaccccttctggttgcacaggtgaattgccttcacctgtgctcccaggactggccaggtctcttcttccagttgctcaatcagtggttcaggctatgatgcaacagttcrcatacacttgggtttattattatttttggcatttacctcccagcagacattagaaatatatcacagccttatgaattagctgtcaaacctactactgttccacatytaatttttttaacaaatatttaagtggcctacgctctcaaatgtattaatcctgaatgtatcaataagatgatgttttataataaagttgttacctgctacttttttgtgatccagaagttccagaatggaactcacagaattcatttcatccaatgcatgtgacttaaagtagtcttattgcctaagtacac

SEQ ID NO: 51510 - DNA, 600 bp, Chicken  19866894299342_2
acaggggagggatctctagaaagagatccttccacagcgtcagtaagcccttaaatgaggtctaagagaggtgtagccaggctccaccccttctggttgcacaggtgaattgccttcacctgtgctcccaggactggccaggtctcttcttccagttgctcaatcagtggttcaggctatgatgcaacagttcrcatacacttgggtttattattatttttggcatttacctcccagcagacattagaaatatatcacagccttatgaattagctgtcaaacctactactgttccacatytaatttttttaacaaatatttaagtggcctacgctctcaaatgtattaatcctgaatgtatcaataagatgatgttttataataaagttgttacctgctacttttttgtgatccagaagttccagaatggaactcacagaattcatttcatccaatgcatgtgacttaaagtagtcttattgcctaagtacaccaggaaaaatatgattttttttttgtattataatttttgaaagcatatgtgtaaaaaggatgaatgaaaatgcattcatgaaaaatattcataaagaggactttatc

SEQ ID NO: 51511 - DNA, 600 bp, Chicken  19866894299345_1
ttttctttttattttttaaactgagtaccctttgagcatgaggaaagtcactgcaaccattattagtttctttttcatgtctgttggagagtacttgtaatgtgcaatggtatttctaaggaatcttgtaatttatcctcttattattgtaggtgtcagtgtattgatcttgactgagttaatacacttaaccatgttgctcgatctgaaggatcattaccctgaatttattttctttgttttcccagaggtgaattatcaattaagtgcatactaaccagaataagagggtggatttgmggcattagcacttyctttctgaaaagagaacacctgctgagtactcagtggtaaacctgaaatggaggaaaacatcaaaatatttgctggatggatactttgagtaaaggctgtccattaagcttaactgcaattagggagtgagtggctatcacttctcttcattcactaagaaaacatgaattctaattagcttcaggcaaaggtgtaattttccccagagggattttaggtccatgtacaagctcccagtgggagacagcctgaacatcctccagcaagctggagacaggtccttat

SEQ ID NO: 51512 - DNA, 600 bp, Chicken  19866894299345_2
tttaaactgagtaccctttgagcatgaggaaagtcactgcaaccattattagtttctttttcatgtctgttggagagtacttgtaatgtgcaatggtatttctaaggaatcttgtaatttatcctcttattattgtaggtgtcagtgtattgatcttgactgagttaatacacttaaccatgttgctcgatctgaaggatcattaccctgaatttattttctttgttttcccagaggtgaattatcaattaagtgcatactaaccagaataagagggtggatttgmggcattagcacttyctttctgaaaagagaacacctgctgagtactcagtggtaaacctgaaatggaggaaaacatcaaaatatttgctggatggatactttgagtaaaggctgtccattaagcttaactgcaattagggagtgagtggctatcacttctcttcattcactaagaaaacatgaattctaattagcttcaggcaaaggtgtaattttccccagagggattttaggtccatgtacaagctcccagtgggagacagcctgaacatcctccagcaagctggagacaggtccttattagaaacatcttta

SEQ ID NO: 51513 - DNA, 599 bp, Chicken  19866894299346_1
  misc_feature (1)..(122): n is any nucleotide
nnnnnnnnnnnnnnnnnnnnnnnnnnnnnnnnnnnnnnnnnnnnnnnnnnnnnnnnnnnnnnnnnnnnnnnnnnnnnnnnnnnnnnnnnnnnnnnnnnnnnnnnnnnnnnnnnnnnnnnnnnatattcatcatgagagcagttgtaacagcctgaagaaaaggaaagattaaattcattttacatttctcagagaacagcgcttagcctatactatgtataatctaaaatcttaaatttctattattaagaaattgtattgattgtaacttcatacattcaagtaagcatctccaatgtraacctcagaaagaactgcatacgtagtaaattctggggggttctccaattatgtttgtttgtctaatagaaataatactgttctctcacacctctttttacctaagtagaggttgttttaattcagcacaggtcagaggatttatcttcgtaataaccygagttcaatataaagccaggtgtagtacaggtactgaacagattatgcayttatagcgttagaggtaatgtaaagaaagcaaaactgttttaaaggtaacatcaatgaaaacactactaactgtggtatggctgataggg

SEQ ID NO: 51514 - DNA, 526 bp, Chicken  19866894299346_2
atattcatcatgagagcagttgtaacagcctgaagaaaaggaaagattaaattcattttacatttctcagagaacagcgcttagcctatactatgtataatctaaaatcttaaatttctattattaagaaattgtattgattgtaacttcatacattcaagtaagcatctccaatgtraacctcagaaagaactgcatacgtagtaaattctggggggttctccaattatgtttgtttgtctaatagaaataatactgttctctcacacctctttttacctaagtagaggttgttttaaygagttcaatataaagccaggtgtagtacaggtactgaacagattatgcayttatagcgttagaggtaatgtaaagaaagcaaaactgttttaaaggtaacatcaatgaaaacactactaactgtggtatggctgatagggaaaaaaaaaccatcatggaaaataattatgttactgctttgtgggtgaaaatagtatagcttattaccttcaatgttcacatattt

SEQ ID NO: 51515 - DNA, 476 bp, Chicken  19866894299346_3
atattcatcatgagagcagttgtaacagcctgaagaaaaggaaagattaaattcattttacatttctcagagaacagcgcttagcctatactatgtataatctaaaatcttaaatttctattattaagaaattgtattgattgtaacttcatacattcaagtaagcatctccaatgtraacctcagaaagaactgcatacgtagtaaattctggggggttctccaattatgtttgtttgtctaatagaaataatactgttctctcacacctctttttacctaagtagaggttgttttaayttatagcgttagaggtaatgtaaagaaagcaaaactgttttaaaggtaacatcaatgaaaacactactaactgtggtatggctgatagggaaaaaaaaaccatcatggaaaataattatgttactgctttgtgggtgaaaatagtatagcttattaccttcaatgttcacatattt

SEQ ID NO: 51516 - DNA, 600 bp, Chicken  19866894299348_1
tcagtatttatggcccccagctgacaggctgcctccagcgaggcacacacttaggaaactgttctggaagaggtaaaatggaacaagtattaaaagtactttgtaggaccaggagatacagcataaagatttgcctcatggagagctggtgtgagagcaggatttattttatttcatttattggccttgtggtttttatatttgtttttttaacagaaaatctatccaagtaaacctcagacagattgatctgatgtgttttccagtatcttgtctgtttagcccttaagtggtctgtamagttagcaatgtgaattcatccacctgcagaggaagccatttcatggagggaaatyctgattttcatcgacagaaaagttaaatctctcaagattattacaggcttacgatgttcctgcagttacagatgagttttaaagctgagagtgctttggatgaggatcttttttctcatcagcctttatttcagctacataaatagattatctggtgacaagattacataattgcaacatataagcttgtcaccaaggtgaatccagcttgctgctttttgcttttctccccagttgctgctct

SEQ ID NO: 51517 - DNA, 600 bp, Chicken  19866894299348_2
aactgttctggaagaggtaaaatggaacaagtattaaaagtactttgtaggaccaggagatacagcataaagatttgcctcatggagagctggtgtgagagcaggatttattttatttcatttattggccttgtggtttttatatttgtttttttaacagaaaatctatccaagtaaacctcagacagattgatctgatgtgttttccagtatcttgtctgtttagcccttaagtggtctgtamagttagcaatgtgaattcatccacctgcagaggaagccatttcatggagggaaatyctgattttcatcgacagaaaagttaaatctctcaagattattacaggcttacgatgttcctgcagttacagatgagttttaaagctgagagtgctttggatgaggatcttttttctcatcagcctttatttcagctacataaatagattatctggtgacaagattacataattgcaacatataagcttgtcaccaaggtgaatccagcttgctgctttttgcttttctccccagttgctgctcttgtgttcagggtcaaaagattttgagagtaaaaagaaatgattcaaagatttgcat

SEQ ID NO: 51518 - DNA, 600 bp, Chicken  19866894299352_1
ctagagtcagttatcttaccccataaatagtgagcagcccaagagcccctggagctctcctgtgtggcagctggctgcacaacaggatctccccttgagtagggacacctctcaaggttacgcctgcacagagatcccttacactttgacatcaagacattttgctgatacagatactcaggaagtgactgatggctttaagctttgttagctttgctaagattagatcgttgattgtgcacacgatcccttcaacataaatcactgaccaagtctgtaggtaggattgggttcaactgyacctaggctcctaaattcctagaaccacagaggtaagaaagcaagggggtccactctgaacctcacaactcagcagaagggtctcccatatttccatgtttaactctatgcaataaataatcaagtgcatccagccatctcaaatcttactaggtcactgtgaaatcactacatgatatctatattacaatcaataaatatactcctgctgccctcttacaagaggagcatattggttagttgtttccatccatgacgaatgtgctctgctttgtgcatccggacttcccagttcatccc

SEQ ID NO: 51519 - DNA, 600 bp, Chicken  19866894299362_1
accaccgaggcaggctcctgtgctgggcactcgctcctggtctggagctgttgtgcaaagggttatctgggagagcagagcctggcaaacagcctgcccaggtcccggctgctttttcctatccttcctgctgacacacggagagctcaacctccagctgaacgaaaagttacttctgtggcttggaaaggacttggtggcaaacacggggagaggaggaacgatccctctggagtcagcctgcctgggaaagggctcacagctgtgagctccgcacccagaaagcaccggagtcccacygagagccaggtaggagcaggcactgcggggctgggagcggggacatcctctgcctggtccttgggtggtgctcgtgctgtaggaaatgcaggttgggggtgcagcagtcatgcaygttctttgcttcctcacttctgctcttttgtttttttttttcctctttttaagctcgattcttaatgcagcatgttgttcgcttgtactgattgcgccccgtacctgtgtgttggcagtacatgggatgctctgtgaaccacatgctatgttactgagtggttatcatgcatatatctctatatg

SEQ ID NO: 51520 - DNA, 600 bp, Chicken  19866894299362_2
ttcctatccttcctgctgacacacggagagctcaacctccagctgaacgaaaagttacttctgtggcttggaaaggacttggtggcaaacacggggagaggaggaacgatccctctggagtcagcctgcctgggaaagggctcacagctgtgagctccgcacccagaaagcaccggagtcccacygagagccaggtaggagcaggcactgcggggctgggagcggggacatcctctgcctggtccttgggtggtgctcgtgctgtaggaaatgcaggttgggggtgcagcagtcatgcaygttctttgcttcctcacttctgctcttttgtttttttttttcctctttttaagctcgattcttaatgcagcatgttgttcgcttgtactgattgcgccccgtacctgtgtgttggcagtacatgggatgctctgtgaaccacatgctatgttactgagtggttatcatgcatatatctctatatggtgttacccccattctccctgctttctgcagtgcctgacatgaaggcatcaggttgtgctgttgccgtgaagttgttctttgctgacccgatgcgtcctggctgatggatattgt

SEQ ID NO: 51521 - DNA, 380 bp, Chicken  19866894299366_1
tgatatatctcatgaaagaaagtagtctggatgtaatatcaaggatgagttcaccttctgtcatctctttatgagcacattacttgctgcttcataattatggaacaaaaacatttaacaggcattgttcctcactattaactagaaaacctgtttattgtgtcaacatgccacttgttttttagcctacaccactggaggaagtggcacagggttgggcacgatggaccaggagcaaagccccgctgtgctggttccttgtgtttgaagctgcagatgcagccaactgctggttggggrtaggaagggtcaccaaggctgcctcctactcctgcctgctgttttccctggggggcagctctgcccttcatctgcagaag

SEQ ID NO: 51522 - DNA, 600 bp, Chicken  19866894299370_1
gctacttgcagtaagaagcaagatatttccctttgacaccacagtaatcaggagaagatctggatcacaatgcttggaacccacccttgggttgctggtgtggcattgctgcagcacttagaagagcaaaaagaaagccacgttttaagatgggatgaaatgtaaataatgtactcatttgatgagattcagatgaagtgctctgtgtgtggcaaactgaatttttatttatagcagttaaagaaaaacacaagctgatctggatacactaaagaccatgaaccaaccattgttggttcycaattctgttttaaataaacagacaatattctactttaggtgctgtttttctgctgaagtgatgcaatctttacaaagattgctgctacatctgagttgtgttttttacagaagaaaacattacacctcaacagatgttggcagtgctctattgcatgctggactaattgacttttcaagctaaattttctttcatagtcactctcaaagatgtatattatcccttgtcaaaataaagagttgtggtctcttagcagctcagaggaatacgggaagtgcatattatcaccataacatcta

SEQ ID NO: 51523 - DNA, 600 bp, Chicken  19866894299370_2
gcagttctctgctcagttggatacaggtgggactatccatcctccactggggaagagtcctggtccaagactgcagactcccacatgaaagaagcatcagtagcagtgggttttgatgctttctgtgagcacccaaggcattttcctgcaggaagttccctacacagtagcagaacaccaggcaattatttctagaaaacaagaagtaccagggagaggctatctcaaacagtggtgcttccactttttctgtatgctgtgttcacagtcctgagtatacagaacttacccatgtgttcmtacatgctttggttgcactttggtctttcacatgaggctagaaaaactatagcaagagtcagaaaccataaaatgctgcaggagctctatgcctgagttttgttcctctgtgttctggtttagttgcgcatggagatgtaagatagtccatttttaagccaagaatatggcttgttcatgaatatatgaaagtaagaactccaataaagacagagttgctaacactgggaatttctgttcactgaaaactgacctgaacctaaagggctagcagttttagaaaagacaattaaaccttaa

SEQ ID NO: 51524 - DNA, 600 bp, Chicken  19866894299370_3
agagaagttcttgtattccactgaaattctctgaacatacaactggaagaaaactccagaaacagcactagagaagcaagggcagtgtttcacttcgtctgtgaatcaaacaggtgattttttcattaagctggcatgtagtacaggcagaaagcagcaggcaagaactctcccagcaaaacttggcacctcaaaactagccagacatctaaccaggcccctaacatttgactgcacatcacagcatccatttcagaagtcctacaaagaatgtaagtttagttatctaatcaggtatcyaaactgcagatctaaagtgtagttaatgttttcctctacctccacagatgacctggattgcaatgaatatttcaatctggcactgagcgtggtgtgtttgtatctattccagttcatttaaaactccaaagattttttaaaatgttgcccattagaaaaagcaaagcacctttttgctcagcactgaacatttacttttgtaattgatttatgtaggacttgagtaaacagaaactaataaggtatgtagagtgttgcacagacaaatttgtacttcacaatgaacagtggtggagtatt

SEQ ID NO: 51525 - DNA, 600 bp, Chicken  19866894299372_1
gatatctgagttataaagcagtttgcttttgtgttcaattacttcacaggtagtttttctgttaataacaagatataagcttaaggtttgaagcagtcaaacagggctatggaaagtatggataatgagaagaaacagagaccctgtctgtgctgattggtgttcttggcccttcggaagagaggcatagattatacactggaatgttgggttctttggtgatgaagcaggagagatgttccctaggggaagctgtactgactctgatgtagtctgtgtaaatcgtgctgtctgtacagygtgcttttttcataataaattttcattataagtctttatggaatacgtgtagataagcagtgtttactccatgtgtctttttgttaaaccaggagtttttttgcatttaaacttttctgttgctgttaaaattacacaaacacgtgacttttcgatacgagttcctaaccagccatccctggagatgccaaggctgggctggatggggccctgggctgcctgatctgctggggagcagccagctcacggcaggggctgggtgggccttaaggtccctccccacccaaaccattctgtgac

SEQ ID NO: 51526 - DNA, 599 bp, Chicken  19866894299377_1
  misc_feature (1)..(219): n is any nucleotide
nnnnnnnnnnnnnnnnnnnnnnnnnnnnnnnnnnnnnnnnnnnnnnnnnnnnnnnnnnnnnnnnnnnnnnnnnnnnnnnnnnnnnnnnnnnnnnnnnnnnnnnnnnnnnnnnnnnnnnnnnnnnnnnnnnnnnnnnnnnnnnnnnnnnnnnnnnnnnnnnnnnnnnnnnnnnnnnnnnnnnnnnnnnnnnnnnnnnnnnnnnnnnnnnnnnnnnnnnnntgatgttaccccaaaaatcctctcccagcagctcaggtggttcccataccatgtgcaacccaagtgcaggaattatcctcstgcctcacttggcacagacgcagtcacacaggtattgagacgtaagcaaataagaagtaatcctaagtaaagaaatacaaaacacctctcaaacagaaaaccaggtgcggtatttaactgtaaagcacttcagaaaagaaagtgcaagcagctcaggcagatgaaaagatgaagctctacagctggcacgtctcatgcagcagctcttcccactgatgttagcccccytggttgcagatacctggctgtgtgcacaatgtggtaggtgacatacactgagataggctttaacattgatc

SEQ ID NO: 51527 - DNA, 600 bp, Chicken  19866894299377_2
cccaaaaatcctctcccagcagctcaggtggttcccataccatgtgcaacccaagtgcaggaattatcctcstgcctcacttggcacagacgcagtcacacaggtattgagacgtaagcaaataagaagtaatcctaagtaaagaaatacaaaacacctctcaaacagaaaaccaggtgcggtatttaactgtaaagcacttcagaaaagaaagtgcaagcagctcaggcagatgaaaagatgaagctctacagctggcacgtctcatgcagcagctcttcccactgatgttagcccccytggttgcagatacctggctgtgtgcacaatgtggtaggtgacatacactgagataggctttaacattgatcagagaacctagcagaagcaytactctgtattttttcmcctgaatgctctgctgctctttaaaatgaaacaatccacgtgtgcgatatttagtagagctctgctgctatgagagcccccagaggtcaatcctgtagggaaaagcaggaaaagcacaggaaagcaataccctaagtagtgtgaaatacacrtatttggacatcagcagctactgatgttatacagatgctc

SEQ ID NO: 51528 - DNA, 600 bp, Chicken  19866894299377_3
gcagtcacacaggtattgagacgtaagcaaataagaagtaatcctaagtaaagaaatacaaaacacctctcaaacagaaaaccaggtgcggtatttaactgtaaagcacttcagaaaagaaagtgcaagcagctcaggcagatgaaaagatgaagctctacagctggcacgtctcatgcagcagctcttcccactgatgttagcccccytggttgcagatacctggctgtgtgcacaatgtggtaggtgacatacactgagataggctttaacattgatcagagaacctagcagaagcaytactctgtattttttcmcctgaatgctctgctgctctttaaaatgaaacaatccacgtgtgcgatatttagtagagctctgctgctatgagagcccccagaggtcaatcctgtagggaaaagcaggaaaagcacaggaaagcaataccctaagtagtgtgaaatacacrtatttggacatcagcagctactgatgttatacagatgctccactgtgcagggctgcaccaagatcctggtcctgcagggagacagacgcagccaaagccatcccaacaccacagatgagtgcagtgaagga

SEQ ID NO: 51529 - DNA, 600 bp, Chicken  19866894299377_4
gagacgtaagcaaataagaagtaatcctaagtaaagaaatacaaaacacctctcaaacagaaaaccaggtgcggtatttaactgtaaagcacttcagaaaagaaagtgcaagcagctcaggcagatgaaaagatgaagctctacagctggcacgtctcatgcagcagctcttcccactgatgttagcccccytggttgcagatacctggctgtgtgcacaatgtggtaggtgacatacactgagataggctttaacattgatcagagaacctagcagaagcaytactctgtattttttcmcctgaatgctctgctgctctttaaaatgaaacaatccacgtgtgcgatatttagtagagctctgctgctatgagagcccccagaggtcaatcctgtagggaaaagcaggaaaagcacaggaaagcaataccctaagtagtgtgaaatacacrtatttggacatcagcagctactgatgttatacagatgctccactgtgcagggctgcaccaagatcctggtcctgcagggagacagacgcagccaaagccatcccaacaccacagatgagtgcagtgaaggacctggaagcagcacacg

SEQ ID NO: 51530 - DNA, 600 bp, Chicken  19866894299377_5
cgtctcatgcagcagctcttcccactgatgttagcccccytggttgcagatacctggctgtgtgcacaatgtggtaggtgacatacactgagataggctttaacattgatcagagaacctagcagaagcaytactctgtattttttcmcctgaatgctctgctgctctttaaaatgaaacaatccacgtgtgcgatatttagtagagctctgctgctatgagagcccccagaggtcaatcctgtagggaaaagcaggaaaagcacaggaaagcaataccctaagtagtgtgaaatacacrtatttggacatcagcagctactgatgttatacagatgctccactgtgcagggctgcaccaagatcctggtcctgcagggagacagacgcagccaaagccatcccaacaccacagatgagtgcagtgaaggacctggaagcagcacacgctgtaaggaatctcaacttgcacagaaaatcaacatctggggggaaaactgcaatgctgccaggtgcaatttccctcctgaacacagaataaaatccactgctcggtgggaagaggcactgcagctcagcccaaactcctggcacatgatgt

SEQ ID NO: 51531 - DNA, 600 bp, Chicken  19866894299380_1
cagatggactcacttctagtgtatttctgggtgagaaatcagcacatttatccataattagaataacctagggcagcctgctgctgaggcttataggaagattcactctcagccatttgaacagaacatgcctgatagctaaacagcttcacttgtgtgagatcactccaaattggtaccatctaccagtaagcacgtgcaggtgttgtctaagtccagcctactgaagtaagctccttctgcaccattggagacagacagctcctgtatcctcacagtgaaatcagcttgataatgttsgttggctgacataaaggcatagaaactcagcatgcccaccccaaattatatctcagtgctggcactgctttgtgctgaacttgctactggatgctacagcacagtgaaaatccaggatcagctctggctgaccctttttgaacaggtacaatggattgcgtggtctcaagaggtcccttttcatctcaaagacttcatcattttgtgattctatatcttgtatgaagagacaaccctgaggagctaggacttcgtacttatatcaaagagacaggagaacgagggcacagttgccaggtt

SEQ ID NO: 51532 - DNA, 600 bp, Chicken  19866894299383_1
atcgcatgccattacaaagtacatctcccattttctgctgttctgacatcaccaaattccagtcactaccccattccacagtgctcttgttgctaagagcctcagctatcacaatgcagaaggaaatatatgcatgcaaagaaaatagccttgaattatctcaggcttcctcctgctgctttcagtgtgcttcatctcatggattagggaaccaagaagttgcattaatttcagagctccctagtttaagcctttgggaattgaatgctttctggacccttcttttgctgatcctaaggrtgcatccaggtgcagcactgtttattaaagggcaaaggacacaagctgcagtgctgcctttattatttcattactcacatgtgtctgttgggcacatcaggagaaagaaaatgcatgaagagtgtgaggccaatagtgatggaagaaaatactgtaacagaaaagaaaaaggagtragaaaatagaggataaagcaggaaaggaaaaaagaggaaaaaaaatagttggtgctcttgagagttccgtgagttgtgtttagcagctatcataatgcagtttgctgttttttcataatgctga

SEQ ID NO: 51533 - DNA, 600 bp, Chicken  19866894299383_2
tgctttcagtgtgcttcatctcatggattagggaaccaagaagttgcattaatttcagagctccctagtttaagcctttgggaattgaatgctttctggacccttcttttgctgatcctaaggrtgcatccaggtgcagcactgtttattaaagggcaaaggacacaagctgcagtgctgcctttattatttcattactcacatgtgtctgttgggcacatcaggagaaagaaaatgcatgaagagtgtgaggccaatagtgatggaagaaaatactgtaacagaaaagaaaaaggagtragaaaatagaggataaagcaggaaaggaaaaaagaggaaaaaaaatagttggtgctcttgagagttccgtgagttgtgtttagcagctatcataatgcagtttgctgttttttcataatgctgacatggcgtgtcagtatagctgtttgtactgcagaatgataaactcactgtacgctattctacaggtcctcagtagcttctggatgcttatactcgggacagtaatgccaatagagagggtaatgctgcaggtgaggtgtaactaggtgaaggaggcagcgtgtgatgagagataaa

SEQ ID NO: 51534 - DNA, 600 bp, Chicken  19866894299384_1
tcacataattgcaaaggttttcgggaggcctgatatcctctgctctgaacagtcactgcgaagagcatcagtctcacttaaggtgaaaaatgggcccacttcatttctaatattcagccagttgctctaggtagaggctattccttaggtctaaaacactggagaaagtctcatacccttcaatatttctgatgtgcaatccttaaaaaatctattgttgtataaatagtgttttgtatttgatttctgtcccctaaacgctatttaaatcagaagtaatattttctaatcctgtaaaaygcccaaagcttaaatcaataaacatttgatgaatacataacctggggacattctacatggctgataaatgttcattgtgggagtgtctggcagcttttgtggttaaaccttcacttttatataatttaatggctggcgtcttccagcactggacacatcttaatatcttaatgataactgcacaaggagtagaagagcttatcgtggacaaatgaagcaaaggcctttcccttggtgccagtaaatgagcagctggagctggggccatggggctttgtgctggcagccatcaggacatcc

SEQ ID NO: 51535 - DNA, 599 bp, Chicken  19866894299385_1
  misc_feature (1)..(271): n is any nucleotide
nnnnnnnnnnnnnnnnnnnnnnnnnnnnnnnnnnnnnnnnnnnnnnnnnnnnnnnnnnnnnnnnnnnnnnnnnnnnnnnnnnnnnnnnnnnnnnnnnnnnnnnnnnnnnnnnnnnnnnnnnnnnnnnnnnnnnnnnnnnnnnnnnnnnnnnnnnnnnnnnnnnnnnnnnnnnnnnnnnnnnnnnnnnnnnnnnnnnnnnnnnnnnnnnnnnnnnnnnnnnnnnnnnnnnnnnnnnnnnnnnnnnnnnnnnnnnnnnnnnnnnnnnnnnnnnctaacacaaaaaatgtgctatggtttttyttcccctaaattttacatcttctccacagaaatttaaaactgggtctgatgcacgacaataatattccattgtcatttctagagtggaggaaggtctttaatatgcattacatttttaatctaataaatatgtagctagttctaaatacacaatgtatcagtcaaatcattttcattcatatgtagttttccagtaaacctcagtgatctttcaattttggtgaggtgttccctcctactcctcataaaatatggaactacggtactctgcctgtgggggaaaagcctgaagccacgta

SEQ ID NO: 51536 - DNA, 600 bp, Chicken  19866894299385_2
ggaggaaggtctttaatatgcattacatttttaatctaataaatatgtagctagttctaaatacacaatgtatcagtcaaatcattttcattcatatgtagttttccagtaaacctcagtgatctttcaattttggtgaggtgttccctcctactcctcataaaatatggaactacggtactctgcctgtgggggaaaagcctgaagccacgtagtgatgtatctgttccacagtgtgaaagagatattccctgttcacagtcctgcagagtcagacttactgctggtaaactttaaatygcctgagttgcctgacatcatgattaaaagactttttttctttcttgcctgaagttgtttgacaaaataggagagacaaaaggctcacaactgtttgcataccaagcaaacaattgcacattgaccaattctacaggtttctcttattcttaaaactgtagtctaatagtatagatagcatgggaccctttcaatttccccatcacaagcaaaacaaaaggccgaagtccagaatcgcaaagcatgatcatgtgaagtgtgaaatggagtaggtatatccagcatgcacagagtaataac

SEQ ID NO: 51537 - DNA, 600 bp, Chicken  19866894299389_1
ctggacaagctctgcctcttctttaggatcaaaggaatttctgtgccaagcactctcacattcctccttcacagtctgccacaacacactcaaactggaagttgctatgaatgttaaccagatagttccaaaatctaatacattctgataagcagatgaatctgtgtggtttatgttttaatattgtttgtatttcttactttagtaatgaaaacttcccgctatttcagtatcatttttagttttagtgatttctgtctcttacggtgttccatttcagtagcctcaaatttgcatccyacaaaccatgaccatgaatagctagatctgagctgttataaacttgaccagtataatgaaaataagcttgatgagctaacattatctgctctgaatgttttgttcactgtgatcatgtgatgtgtcacactagctatggcttttttaaaggctaaatgtttctgtaaattcagttccctttactttccctgacgcaattacttaaaagttgaaggacgaggctcatagtaggttaatattctaaggagcttrgaataaatcagtgaatgccagatatgcaatagtccaaatataaacagt

SEQ ID NO: 51538 - DNA, 600 bp, Chicken  19866894299389_2
ttctgtctcttacggtgttccatttcagtagcctcaaatttgcatccyacaaaccatgaccatgaatagctagatctgagctgttataaacttgaccagtataatgaaaataagcttgatgagctaacattatctgctctgaatgttttgttcactgtgatcatgtgatgtgtcacactagctatggcttttttaaaggctaaatgtttctgtaaattcagttccctttactttccctgacgcaattacttaaaagttgaaggacgaggctcatagtaggttaatattctaaggagcttrgaataaatcagtgaatgccagatatgcaatagtccaaatataaacagttttgaattcctctgtaaagcacacagtaacctttcttttcatgataagagatagataaacttttgaaagatgttgagtccaatgtatgaagctgccttcaaataaattamgtttttgtgttaggtagagagttctaacaatgttgaaactaatattgaagttaaaataatgagtgcatctcattcaacaataccgacaacagaggaaagatatgaggttacttttattctttactttcttattcagtatttc

SEQ ID NO: 51539 - DNA, 600 bp, Chicken  19866894299389_3
gatcatgtgatgtgtcacactagctatggcttttttaaaggctaaatgtttctgtaaattcagttccctttactttccctgacgcaattacttaaaagttgaaggacgaggctcatagtaggttaatattctaaggagcttrgaataaatcagtgaatgccagatatgcaatagtccaaatataaacagttttgaattcctctgtaaagcacacagtaacctttcttttcatgataagagatagataaacttttgaaagatgttgagtccaatgtatgaagctgccttcaaataaattamgtttttgtgttaggtagagagttctaacaatgttgaaactaatattgaagttaaaataatgagtgcatctcattcaacaataccgacaacagaggaaagatatgaggttacttttattctttactttcttattcagtatttcttagagtgcctctgttgaagaattcatatagaagaaatcataaacaagctgaacacaaggaagtttaagaaaataaatcaacagtggtagttgtatgtcatttgcaatctcttggttccttgagatcctgcaggtaaataagctgactgtatgtattt

SEQ ID NO: 51540 - DNA, 600 bp, Chicken  19866894299391_1
tacagaaaacctgtagcctacaggcaagttgtcctgtgtcccagtggctgcaggaggagggctatccctgctgcaggaccgggggaaattcaaggttccaggaaatggacagacttcagacttcaacagggtacattttgaaaagcagagtcattagcctgcaatgtagggaagagggagagagggaaagtgtgaaaaaagatttcccgataatctcactgtactcaccagccatgtgaatgagcttcctgtatgctgactcatttttagctgtttaaacgtgtttccttagatatcttyytagttctttttttttttttctcaacagtattaacttttctcaacttaatatggtaatatgcagtcaaagacactgaagtccttagtgtgatcatttttttctcctgttttctcctgtcttaccgagcctatggaaaccttaccagttttcctgtggatggtgcctgtctacaaggcccctgaaagccccatagggaccccagtccagacaagtctggaaatttcttttggaaatgatagcatcatagaatggcttgtgttggaagggaccttaaagcccacccagtcccacctgcctgc

SEQ ID NO: 51541 - DNA, 600 bp, Chicken  19866894299391_2
acagaaaacctgtagcctacaggcaagttgtcctgtgtcccagtggctgcaggaggagggctatccctgctgcaggaccgggggaaattcaaggttccaggaaatggacagacttcagacttcaacagggtacattttgaaaagcagagtcattagcctgcaatgtagggaagagggagagagggaaagtgtgaaaaaagatttcccgataatctcactgtactcaccagccatgtgaatgagcttcctgtatgctgactcatttttagctgtttaaacgtgtttccttagatatcttyytagttctttttttttttttctcaacagtattaacttttctcaacttaatatggtaatatgcagtcaaagacactgaagtccttagtgtgatcatttttttctcctgttttctcctgtcttaccgagcctatggaaaccttaccagttttcctgtggatggtgcctgtctacaaggcccctgaaagccccatagggaccccagtccagacaagtctggaaatttcttttggaaatgatagcatcatagaatggcttgtgttggaagggaccttaaagcccacccagtcccacctgcctgcc

SEQ ID NO: 51542 - DNA, 600 bp, Chicken  19866894299403_1
tgctccatctctgaccttccttacccctgtggctgttgaagggtttttctgtcattgggtgcagttgctgaatgaactgagcgtggtggaggcagaactgctgttgaaatcctccgaccttgttggcagctacaccaccagcttgtgcctgtgcatcgtggctgtgctgcggcactaccattcctgccttatactgaacccaggaccagatggctcaggtctttgaagggtaagagaacctttccctcgtcacatggaagggacttataaagggcagggatgtatctttgttctaatagrtagcaacgttatgcttgagggttcagctcacagaatttgaggggaaagggatttgttgtccagttagcactgctgctgtgaactctgtgtaatgagtctrtattccttcagattctctttttatgttgctgcagctttttttgtctctgtacagtctgtgtggggtggtgaaacatggcatgaaccgctcggatggstcctcggcagagcgctgtatcctggcctatctctatgacctgtatacctcctgcagtcacctcaaaagtaaatttggggagctttttaggtgagtctgaggca

SEQ ID NO: 51543 - DNA, 600 bp, Chicken  19866894299403_2
ctgttgaaatcctccgaccttgttggcagctacaccaccagcttgtgcctgtgcatcgtggctgtgctgcggcactaccattcctgccttatactgaacccaggaccagatggctcaggtctttgaagggtaagagaacctttccctcgtcacatggaagggacttataaagggcagggatgtatctttgttctaatagrtagcaacgttatgcttgagggttcagctcacagaatttgaggggaaagggatttgttgtccagttagcactgctgctgtgaactctgtgtaatgagtctrtattccttcagattctctttttatgttgctgcagctttttttgtctctgtacagtctgtgtggggtggtgaaacatggcatgaaccgctcggatggstcctcggcagagcgctgtatcctggcctatctctatgacctgtatacctcctgcagtcacctcaaaagtaaatttggggagctttttaggtgagtctgaggcaggtgragtgcagtggatgcctgccagtatagtaccttggtgttaagctttgtgtgtgatctggtttggtggaayggtctgagagatgctctcagtaggga

SEQ ID NO: 51544 - DNA, 600 bp, Chicken  19866894299403_3
acccaggaccagatggctcaggtctttgaagggtaagagaacctttccctcgtcacatggaagggacttataaagggcagggatgtatctttgttctaatagrtagcaacgttatgcttgagggttcagctcacagaatttgaggggaaagggatttgttgtccagttagcactgctgctgtgaactctgtgtaatgagtctrtattccttcagattctctttttatgttgctgcagctttttttgtctctgtacagtctgtgtggggtggtgaaacatggcatgaaccgctcggatggstcctcggcagagcgctgtatcctggcctatctctatgacctgtatacctcctgcagtcacctcaaaagtaaatttggggagctttttaggtgagtctgaggcaggtgragtgcagtggatgcctgccagtatagtaccttggtgttaagctttgtgtgtgatctggtttggtggaayggtctgagagatgctctcagtagggaccagaagttttgggatgagtgcctaytttgtcttctcccgcagcccttgctctctattagtgtttcagtgcaggtgtttggcagggatatctaagct

SEQ ID NO: 51545 - DNA, 600 bp, Chicken  19866894299403_4
acgttatgcttgagggttcagctcacagaatttgaggggaaagggatttgttgtccagttagcactgctgctgtgaactctgtgtaatgagtctrtattccttcagattctctttttatgttgctgcagctttttttgtctctgtacagtctgtgtggggtggtgaaacatggcatgaaccgctcggatggstcctcggcagagcgctgtatcctggcctatctctatgacctgtatacctcctgcagtcacctcaaaagtaaatttggggagctttttaggtgagtctgaggcaggtgragtgcagtggatgcctgccagtatagtaccttggtgttaagctttgtgtgtgatctggtttggtggaayggtctgagagatgctctcagtagggaccagaagttttgggatgagtgcctaytttgtcttctcccgcagcccttgctctctattagtgtttcagtgcaggtgtttggcagggatatctaagctcacgtgttacccctgttgaggggctgtgagagttgcttgtgcctcggtgtgggctgtgggctggttttwgacagaactgaaagcaggaggaagtgcattggagttctg

SEQ ID NO: 51546 - DNA, 600 bp, Chicken  19866894299403_5
gctgtgaactctgtgtaatgagtctrtattccttcagattctctttttatgttgctgcagctttttttgtctctgtacagtctgtgtggggtggtgaaacatggcatgaaccgctcggatggstcctcggcagagcgctgtatcctggcctatctctatgacctgtatacctcctgcagtcacctcaaaagtaaatttggggagctttttaggtgagtctgaggcaggtgragtgcagtggatgcctgccagtatagtaccttggtgttaagctttgtgtgtgatctggtttggtggaayggtctgagagatgctctcagtagggaccagaagttttgggatgagtgcctaytttgtcttctcccgcagcccttgctctctattagtgtttcagtgcaggtgtttggcagggatatctaagctcacgtgttacccctgttgaggggctgtgagagttgcttgtgcctcggtgtgggctgtgggctggttttwgacagaactgaaagcaggaggaagtgcattggagttctgtgcagcagccatcacacagatggaaatgagaaacatgatatcagtgtaactgaattcccaaaagctatt

SEQ ID NO: 51547 - DNA, 600 bp, Chicken  19866894299403_6
tgctgcagctttttttgtctctgtacagtctgtgtggggtggtgaaacatggcatgaaccgctcggatggstcctcggcagagcgctgtatcctggcctatctctatgacctgtatacctcctgcagtcacctcaaaagtaaatttggggagctttttaggtgagtctgaggcaggtgragtgcagtggatgcctgccagtatagtaccttggtgttaagctttgtgtgtgatctggtttggtggaayggtctgagagatgctctcagtagggaccagaagttttgggatgagtgcctaytttgtcttctcccgcagcccttgctctctattagtgtttcagtgcaggtgtttggcagggatatctaagctcacgtgttacccctgttgaggggctgtgagagttgcttgtgcctcggtgtgggctgtgggctggttttwgacagaactgaaagcaggaggaagtgcattggagttctgtgcagcagccatcacacagatggaaatgagaaacatgatatcagtgtaactgaattcccaaaagctattcagcaagcctttaatgtaaacagctacgaataaaagggaatgtcctcttgca

SEQ ID NO: 51548 - DNA, 600 bp, Chicken  19866894299403_7
aaatttggggagctttttaggtgagtctgaggcaggtgragtgcagtggatgcctgccagtatagtaccttggtgttaagctttgtgtgtgatctggtttggtggaayggtctgagagatgctctcagtagggaccagaagttttgggatgagtgcctaytttgtcttctcccgcagcccttgctctctattagtgtttcagtgcaggtgtttggcagggatatctaagctcacgtgttacccctgttgaggggctgtgagagttgcttgtgcctcggtgtgggctgtgggctggttttwgacagaactgaaagcaggaggaagtgcattggagttctgtgcagcagccatcacacagatggaaatgagaaacatgatatcagtgtaactgaattcccaaaagctattcagcaagcctttaatgtaaacagctacgaataaaagggaatgtcctcttgcaggcaaacaatagattggaggttgagacaaggagtaggaagaagttatgtttttgagggtgatccctctctgaagaagccccacaggactctgtgagtgcttgtgttcttcagcatatcaaaggttgtatgaatgctgata

SEQ ID NO: 51549 - DNA, 600 bp, Chicken  19866894299403_8
gcagcagccatcacacagatggaaatgagaaacatgatatcagtgtaactgaattcccaaaagctattcagcaagcctttaatgtaaacagctacgaataaaagggaatgtcctcttgcaggcaaacaatagattggaggttgagacaaggagtaggaagaagttatgtttttgagggtgatccctctctgaagaagccccacaggactctgtgagtgcttgtgttcttcagcatatcaaaggttgtatgaatgctgatatgaaagtttttgatataactgttatcaatcacataaaatycaaagtgcctgctagtcagtagtgcccartggtgatggctggatgataaactggcagatgaaatttagtgtgattagacaaaataatgcacgtaggatcatccttgttgcctccctgacactacagagcagtggatatatattaccactcagataaatgatcttgtgactgtagtaaatgcataagtgaaaatgtcttctcagtgttcaggagctgtcaaaaagcaaatgaaatgttagttagtgtttgaaaagaaatgggagaacagaatggagggcatcattaggccaccatataagt

SEQ ID NO: 51550 - DNA, 600 bp, Chicken  19866894299403_9
aaacatgatatcagtgtaactgaattcccaaaagctattcagcaagcctttaatgtaaacagctacgaataaaagggaatgtcctcttgcaggcaaacaatagattggaggttgagacaaggagtaggaagaagttatgtttttgagggtgatccctctctgaagaagccccacaggactctgtgagtgcttgtgttcttcagcatatcaaaggttgtatgaatgctgatatgaaagtttttgatataactgttatcaatcacataaaatycaaagtgcctgctagtcagtagtgcccartggtgatggctggatgataaactggcagatgaaatttagtgtgattagacaaaataatgcacgtaggatcatccttgttgcctccctgacactacagagcagtggatatatattaccactcagataaatgatcttgtgactgtagtaaatgcataagtgaaaatgtcttctcagtgttcaggagctgtcaaaaagcaaatgaaatgttagttagtgtttgaaaagaaatgggagaacagaatggagggcatcattaggccaccatataagtcatggtgcaattgtaacttttgtgttttt

SEQ ID NO: 51551 - DNA, 599 bp, Chicken  19866894299411_1
  misc_feature (1)..(21): n is any nucleotide
nnnnnnnnnnnnnnnnnnnnnggtgtatctctggaccgctcaacaggatcacccacctctcccatttccccttcagtcaatgcctgctcttttccctctgcatacttggaaagaggaatgccttgttttcagaccattgtggcttccaaagatcattcacaaggaatcatggacccaaagtccttaagagacctcatgaggcagctgagttgtttgtcattcctatctttctcttgaaaagagagagagatctatgaaactttttggataaacgcaaatatattttctaatagagaaaaygatctgtgaacttaagtaatatttagatcatgatttgggatctcaaacaacattttcaggtgcctctaccaataaaattctctgtgctgaagctctttttttattattattctccawgattgagctaggagccatcagctgaaatggatctgtaggttagaaaactatttgttgaaggagcctgagaagaattttaatgttcttcttgacatatagcagtgaaaaaatggtaggacattatagtaacagagattactgggtaacattttcaaaagcacctgattcttacaagtttccta

SEQ ID NO: 51552 - DNA, 600 bp, Chicken  19866894299411_2
atgccttgttttcagaccattgtggcttccaaagatcattcacaaggaatcatggacccaaagtccttaagagacctcatgaggcagctgagttgtttgtcattcctatctttctcttgaaaagagagagagatctatgaaactttttggataaacgcaaatatattttctaatagagaaaaygatctgtgaacttaagtaatatttagatcatgatttgggatctcaaacaacattttcaggtgcctctaccaataaaattctctgtgctgaagctctttttttattattattctccawgattgagctaggagccatcagctgaaatggatctgtaggttagaaaactatttgttgaaggagcctgagaagaattttaatgttcttcttgacatatagcagtgaaaaaatggtaggacattatagtaacagagattactgggtaacattttcaaaagcacctgattcttacaagtttcctatttcacttcgacactaagattccagtttcatttttgactaagacttttaaatagcttagggctttcaaattcccttccgggcagtggtgctgtaattgactatttttcctcaattctg

SEQ ID NO: 51553 - DNA, 600 bp, Chicken  19866894299417_1
agatagcgtagtttggttaggttgtggttggatcgatgatcttaaaggtcttttccaacctgagcagttgcattctatgattctatacaataaggtcgcattttctcaaaaatttgggcttttttgagataatgactaacaaacaaatagtcaatttggggggttctctttgtgttaatatgaaccaccagcagcacgtgtgtacacagatcaaaagcaagtaagggtaacttaaagtaatctaaaggaaactgatatttgaaaaaaatatgtactatcaaagcagcacagactggcagwaggaacagaactgcagttgtgtgtaagaattggtgtcctttgaaaggacacttgggtcataacttgtcctcaaagtccctgctgtgacctgaagactcaactgtttctaagatgcttagtacccccaaaactctggacatctactatttctttcagctctggactctggacagcttttcttattcttggaatggattatattttgctgaggaaatgactaagggccatcctatttaaatgagagctgtatattcacacattaaacacagtcagagaaaccaacacttgtctgctaagcca

SEQ ID NO: 51554 - DNA, 600 bp, Chicken  19866894299418_1
tcgggatgtggtggctgctgggcagcaaggtgagaactgactggcttcaacacacttccctgtcaaatctccactgtgatgtatgtaaagtatcttgtatgttacaaaaggattttaaaaagtgtcttaaggcctgtaaactccgctgtttggtctgaagatggcattctgtaaagagaccgctgtatgaatacgttcccatgcttttttccctatgctatcaaacaacaaaccatatctgttctgtatgtaataaatgtgttaacatcagcaagtgccagtatgtcttgttcctggaamggtcactggggtttctgctcagcctctaataacaytgtgacacttwaagtggtgagaatggcacccattagcaattagcaggaaatgagatgtgtgttccttactgtttgaccaggaggtgctggtcctgcaagccatgtgcccttgaagccagtgcacagtgtgacttctctctgtgtcagaaataaaggacaggtccttcagctgcaggttgtccacatctgtccttttggggtccccttcagacaagctgtggagatcttccatcagttccctgctgataccaggtagtagttgaca

SEQ ID NO: 51555 - DNA, 600 bp, Chicken  19866894299418_2
actgactggcttcaacacacttccctgtcaaatctccactgtgatgtatgtaaagtatcttgtatgttacaaaaggattttaaaaagtgtcttaaggcctgtaaactccgctgtttggtctgaagatggcattctgtaaagagaccgctgtatgaatacgttcccatgcttttttccctatgctatcaaacaacaaaccatatctgttctgtatgtaataaatgtgttaacatcagcaagtgccagtatgtcttgttcctggaamggtcactggggtttctgctcagcctctaataacaytgtgacacttwaagtggtgagaatggcacccattagcaattagcaggaaatgagatgtgtgttccttactgtttgaccaggaggtgctggtcctgcaagccatgtgcccttgaagccagtgcacagtgtgacttctctctgtgtcagaaataaaggacaggtccttcagctgcaggttgtccacatctgtccttttggggtccccttcagacaagctgtggagatcttccatcagttccctgctgataccaggtagtagttgacaaagtgcaataggaatgatgacattcaacacttaaa

SEQ ID NO: 51556 - DNA, 600 bp, Chicken  19866894299418_3
tcaacacacttccctgtcaaatctccactgtgatgtatgtaaagtatcttgtatgttacaaaaggattttaaaaagtgtcttaaggcctgtaaactccgctgtttggtctgaagatggcattctgtaaagagaccgctgtatgaatacgttcccatgcttttttccctatgctatcaaacaacaaaccatatctgttctgtatgtaataaatgtgttaacatcagcaagtgccagtatgtcttgttcctggaamggtcactggggtttctgctcagcctctaataacaytgtgacacttwaagtggtgagaatggcacccattagcaattagcaggaaatgagatgtgtgttccttactgtttgaccaggaggtgctggtcctgcaagccatgtgcccttgaagccagtgcacagtgtgacttctctctgtgtcagaaataaaggacaggtccttcagctgcaggttgtccacatctgtccttttggggtccccttcagacaagctgtggagatcttccatcagttccctgctgataccaggtagtagttgacaaagtgcaataggaatgatgacattcaacacttaaagcgagttcacg

SEQ ID NO: 51557 - DNA, 600 bp, Chicken  19866894299421_1
gaatggttaggaacagtggataacagcatttgtcaagaagtgagaaaaggatcttatggatctctagatgagagttaggtacctggatatgttgcttacatgaatgggattcagaaagaatctcagcaaaacttagactttgactgtgagggtctagatggagcactctgaactgaataggattctgactatggacttgagtgacagataggctgcggatattgtccacagtgcatgggaagaataaggagaagctctgtcatgttaagattgagctgacaaattggcatctgcaaagaratgtgtgagagaaagaggcttagattttcctttggacagaaaaagagaggcaggtaatagaattagagcaatgcataagatatctgtgaaaagaagttaagttcttacagctcagctgtgaaggaacactgttggctgactgcaaaaatccaatgctgaaaacgcagaacttgtttttaatttttgtttgcccaagtcatgataaagatgagttctgctattgtaataacaagctaaaataaagaccagatgattggatagttatgagagatggagtatcaggagttaaagaataaaact

SEQ ID NO: 51558 - DNA, 600 bp, Chicken  19866894299425_1
tgcagcagaaccacatcatggggcatcttgactcttttctttgttcgaatgcttatttacctatttcagttcagagtttatacaacgtaggtcagtatgtgtgtgcccttgtcccacaggagtcttaggagaataaatacaattgggattgtgaagcacatggatagtgtggaaagaggaaacagagtgtagagatacgacagaaagaaccacacattcctggacttttctgtcaaaaaatgctacttccacctaatattagacaatataattctctatgcagatactttcccctgagaraatgtaaagctataggagtagccatcaaaaatataacatccagattgaagcaaaactcttgccagagatggacagaggcaacttcacatgattgagttgacttcgttgagatccagaccttcctctgaaacatttcttatatgggagagtgtttttaaaacccacagagtccaatttgtcactgtttcaaagaggagaagctggattccagcatattttatcaataaaagatcatatgtagtcagcagtatgattttttttattactatgttttattgctttccatcatctctgggggaa

SEQ ID NO: 51559 - DNA, 600 bp, Chicken  19866894299427_1
tgaggaggtgaggggaaatagaattgaaaatgggcaaagggaagaggaaaacggaaaggaagaagaaagagaatggtggagggcagaaaacctagaggaaatgtagactttagatactgactgaagacctacagcagtgtggagggttttcaaagagagacaatcatcaaagagcagcagatcaagtggtattgcctgtgcacaagtgcatgctcacacatgtcagaattgacagaaaatggatgtaagaaggagggaggctatctcacacagaaagaggcagggttaagccttctgtgrccatcttggttacaagaagaccccagtgaagaagactattcagcacccagggaagatgatgctttaacaccagggctctgaaggcctctgtcctggagctctcttctgctgcarcaccagtgtgragaatcaggagggctgagctgtgtgtctgtgggagccaggcagggccaagaataaaacccagtttttctgtgcctcagctctatccgtacagccaccggttccccacgcaataatctgacgttacagaatgtatggtgatgcaaagccacaaagaaactaaattcagagagtagt

SEQ ID NO: 51560 - DNA, 600 bp, Chicken  19866894299427_2
tactgactgaagacctacagcagtgtggagggttttcaaagagagacaatcatcaaagagcagcagatcaagtggtattgcctgtgcacaagtgcatgctcacacatgtcagaattgacagaaaatggatgtaagaaggagggaggctatctcacacagaaagaggcagggttaagccttctgtgrccatcttggttacaagaagaccccagtgaagaagactattcagcacccagggaagatgatgctttaacaccagggctctgaaggcctctgtcctggagctctcttctgctgcarcaccagtgtgragaatcaggagggctgagctgtgtgtctgtgggagccaggcagggccaagaataaaacccagtttttctgtgcctcagctctatccgtacagccaccggttccccacgcaataatctgacgttacagaatgtatggtgatgcaaagccacaaagaaactaaattcagagagtagtgggtgtatgacttgcatgcaatgtttccctttcactgcaaatttctcgtttactgttatttttgcatggggctatgtgactgaattcccataaagtggtctcccacacctcagg

SEQ ID NO: 51561 - DNA, 600 bp, Chicken  19866894299427_3
gacctacagcagtgtggagggttttcaaagagagacaatcatcaaagagcagcagatcaagtggtattgcctgtgcacaagtgcatgctcacacatgtcagaattgacagaaaatggatgtaagaaggagggaggctatctcacacagaaagaggcagggttaagccttctgtgrccatcttggttacaagaagaccccagtgaagaagactattcagcacccagggaagatgatgctttaacaccagggctctgaaggcctctgtcctggagctctcttctgctgcarcaccagtgtgragaatcaggagggctgagctgtgtgtctgtgggagccaggcagggccaagaataaaacccagtttttctgtgcctcagctctatccgtacagccaccggttccccacgcaataatctgacgttacagaatgtatggtgatgcaaagccacaaagaaactaaattcagagagtagtgggtgtatgacttgcatgcaatgtttccctttcactgcaaatttctcgtttactgttatttttgcatggggctatgtgactgaattcccataaagtggtctcccacacctcaggcagttattaga

SEQ ID NO: 51562 - DNA, 600 bp, Chicken  19866894299429_1
gaaatctgttccaaacctaatggcaattcccgtttgtcccaaaattccatccaggataaacttgatttgggaattttctgtatattagatgcacttagacatgccactgtggctgttagcttcgactgagacttaaggaaatccaggcaggtggcagtgagcgtgttctggctcaagtcagtcacggaggatgaggcctgagcatagacatcctccgaggccattgcacaattggagaaaggtacttcaacatctggcaggcagcatttggcacactggtatgctaggttgctgatgttygtcagaaggcattttgcttggctcttttgccttgaattgcacagggacagcctttcacagcaacagttaacaataatctgctgcacgttcaagctcaactcttctctagccaacagtgaagaaagcctgcaggattgaaatcagaaccagcttacccaacacacataaacagtactttacaattacagatytccataagtctttcaaattgtccagtcctygatacttttcctatggcaatagtacatatcttttatctatacagtatgagcaggtttatagaacacaacattgataact

SEQ ID NO: 51563 - DNA, 600 bp, Chicken  19866894299429_2
tgaggcctgagcatagacatcctccgaggccattgcacaattggagaaaggtacttcaacatctggcaggcagcatttggcacactggtatgctaggttgctgatgttygtcagaaggcattttgcttggctcttttgccttgaattgcacagggacagcctttcacagcaacagttaacaataatctgctgcacgttcaagctcaactcttctctagccaacagtgaagaaagcctgcaggattgaaatcagaaccagcttacccaacacacataaacagtactttacaattacagatytccataagtctttcaaattgtccagtcctygatacttttcctatggcaatagtacatatcttttatctatacagtatgagcaggtttatagaacacaacattgataactcagaacttatgcagccattccttgaaaggaatcaaacttaacactcaagcactgacttccacctaagcgtgacatactaaaacattttgctattaatgcttcttactggtatcttttattttgcactacacatttaaggtgcaagtccagtgttctgaactgtcatacatgaaaaaattctatatagagac

SEQ ID NO: 51564 - DNA, 600 bp, Chicken  19866894299429_3
cattgcacaattggagaaaggtacttcaacatctggcaggcagcatttggcacactggtatgctaggttgctgatgttygtcagaaggcattttgcttggctcttttgccttgaattgcacagggacagcctttcacagcaacagttaacaataatctgctgcacgttcaagctcaactcttctctagccaacagtgaagaaagcctgcaggattgaaatcagaaccagcttacccaacacacataaacagtactttacaattacagatytccataagtctttcaaattgtccagtcctygatacttttcctatggcaatagtacatatcttttatctatacagtatgagcaggtttatagaacacaacattgataactcagaacttatgcagccattccttgaaaggaatcaaacttaacactcaagcactgacttccacctaagcgtgacatactaaaacattttgctattaatgcttcttactggtatcttttattttgcactacacatttaaggtgcaagtccagtgttctgaactgtcatacatgaaaaaattctatatagagacactgcctcttccaaacaaacgatagttgtc

SEQ ID NO: 51565 - DNA, 599 bp, Chicken  19866894299443_1
  misc_feature (1)..(23): n is any nucleotide
nnnnnnnnnnnnnnnnnnnnnnnctgtccgcaacaggcagcactgccggggtggggagaggcaccttcaggcgctggggcggcacagcctcggcaccccaatgcccatcagccctgcttaccctgcacttctctgtagtcaacgttggggcgctggatggtgatggggtgctcaatccggggagggtgcaccagcagctccaggttctccaaccctgcagttgggaaaatatgggtgggggtgactccgggacaaatgggcacgagtttggcacactgcacgtggggtgggaccgtgggygcagggtagaaccactggcagaggggagcaccrcaggcacggtatagcaccagagacataggatggctgtggggcacccrgtgagctgtggcactcacccctcctcttcctccagcgccagcggagcagcacagcggccaggacrcagcagaccaggaaggtgacaccggtgcccagggccaggctggcagccatgtccagcgaggaggcgggcagcaccaaacccagtgcctggcagtcaccattcacgcagatctgggagaatgggcgctcagcggggccgggggcgccgggggaca

SEQ ID NO: 51566 - DNA, 600 bp, Chicken  19866894299443_2
caggcagcactgccggggtggggagaggcaccttcaggcgctggggcggcacagcctcggcaccccaatgcccatcagccctgcttaccctgcacttctctgtagtcaacgttggggcgctggatggtgatggggtgctcaatccggggagggtgcaccagcagctccaggttctccaaccctgcagttgggaaaatatgggtgggggtgactccgggacaaatgggcacgagtttggcacactgcacgtggggtgggaccgtgggygcagggtagaaccactggcagaggggagcaccrcaggcacggtatagcaccagagacataggatggctgtggggcacccrgtgagctgtggcactcacccctcctcttcctccagcgccagcggagcagcacagcggccaggacrcagcagaccaggaaggtgacaccggtgcccagggccaggctggcagccatgtccagcgaggaggcgggcagcaccaaacccagtgcctggcagtcaccattcacgcagatctgggagaatgggcgctcagcggggccgggggcgccgggggacagggttaccctggggggtacctacctgcacggggg

SEQ ID NO: 51567 - DNA, 600 bp, Chicken  19866894299443_3
ggcacagcctcggcaccccaatgcccatcagccctgcttaccctgcacttctctgtagtcaacgttggggcgctggatggtgatggggtgctcaatccggggagggtgcaccagcagctccaggttctccaaccctgcagttgggaaaatatgggtgggggtgactccgggacaaatgggcacgagtttggcacactgcacgtggggtgggaccgtgggygcagggtagaaccactggcagaggggagcaccrcaggcacggtatagcaccagagacataggatggctgtggggcacccrgtgagctgtggcactcacccctcctcttcctccagcgccagcggagcagcacagcggccaggacrcagcagaccaggaaggtgacaccggtgcccagggccaggctggcagccatgtccagcgaggaggcgggcagcaccaaacccagtgcctggcagtcaccattcacgcagatctgggagaatgggcgctcagcggggccgggggcgccgggggacagggttaccctggggggtacctacctgcacgggggccccggccggggtcaagtccacgtcgcgaggcacacggcacgtcacc

SEQ ID NO: 51568 - DNA, 600 bp, Chicken  19866894299443_4
tggggcgctggatggtgatggggtgctcaatccggggagggtgcaccagcagctccaggttctccaaccctgcagttgggaaaatatgggtgggggtgactccgggacaaatgggcacgagtttggcacactgcacgtggggtgggaccgtgggygcagggtagaaccactggcagaggggagcaccrcaggcacggtatagcaccagagacataggatggctgtggggcacccrgtgagctgtggcactcacccctcctcttcctccagcgccagcggagcagcacagcggccaggacrcagcagaccaggaaggtgacaccggtgcccagggccaggctggcagccatgtccagcgaggaggcgggcagcaccaaacccagtgcctggcagtcaccattcacgcagatctgggagaatgggcgctcagcggggccgggggcgccgggggacagggttaccctggggggtacctacctgcacgggggccccggccggggtcaagtccacgtcgcgaggcacacggcacgtcacctcgttcttcagcacgttggggtggcagtcccggccccccaccgtcatggtgatgttcatgcaccc

SEQ ID NO: 51569 - DNA, 600 bp, Chicken  19866894299443_5
ccggtgcccagggccaggctggcagccatgtccagcgaggaggcgggcagcaccaaacccagtgcctggcagtcaccattcacgcagatctgggagaatgggcgctcagcggggccgggggcgccgggggacagggttaccctggggggtacctacctgcacgggggccccggccggggtcaagtccacgtcgcgaggcacacggcacgtcacctcgttcttcagcacgttggggtggcagtcccggccccccaccgtcatggtgatgttcatgcacccagccacagagtccagccccarttgctgscggracagacagccctgagcccggccggccccactgcgacccccccagcacgcctcgctcccccacgtacattcaccttaatctcattgtcrccgggtttgagttggtaccgctcgccctgctgcccaaaggagaacatctggggctgggggaagtagcgcaggcggaacagccagcggtcagcagccccatccagcagcacgctcaggttcccaggcaccggcttgatctcaatggggaaggccgggctgcggcacagcagccagttgggtgactgcgggccctcgcactcc

SEQ ID NO: 51570 - DNA, 600 bp, Chicken  19866894299443_6
ccagggccaggctggcagccatgtccagcgaggaggcgggcagcaccaaacccagtgcctggcagtcaccattcacgcagatctgggagaatgggcgctcagcggggccgggggcgccgggggacagggttaccctggggggtacctacctgcacgggggccccggccggggtcaagtccacgtcgcgaggcacacggcacgtcacctcgttcttcagcacgttggggtggcagtcccggccccccaccgtcatggtgatgttcatgcacccagccacagagtccagccccarttgctgscggracagacagccctgagcccggccggccccactgcgacccccccagcacgcctcgctcccccacgtacattcaccttaatctcattgtcrccgggtttgagttggtaccgctcgccctgctgcccaaaggagaacatctggggctgggggaagtagcgcaggcggaacagccagcggtcagcagccccatccagcagcacgctcaggttcccaggcaccggcttgatctcaatggggaaggccgggctgcggcacagcagccagttgggtgactgcgggccctcgcactcctgtgggt

SEQ ID NO: 51571 - DNA, 600 bp, Chicken  19866894299443_7
ggccaggctggcagccatgtccagcgaggaggcgggcagcaccaaacccagtgcctggcagtcaccattcacgcagatctgggagaatgggcgctcagcggggccgggggcgccgggggacagggttaccctggggggtacctacctgcacgggggccccggccggggtcaagtccacgtcgcgaggcacacggcacgtcacctcgttcttcagcacgttggggtggcagtcccggccccccaccgtcatggtgatgttcatgcacccagccacagagtccagccccarttgctgscggracagacagccctgagcccggccggccccactgcgacccccccagcacgcctcgctcccccacgtacattcaccttaatctcattgtcrccgggtttgagttggtaccgctcgccctgctgcccaaaggagaacatctggggctgggggaagtagcgcaggcggaacagccagcggtcagcagccccatccagcagcacgctcaggttcccaggcaccggcttgatctcaatggggaaggccgggctgcggcacagcagccagttgggtgactgcgggccctcgcactcctgtgggtaggc

SEQ ID NO: 51572 - DNA, 600 bp, Chicken  19866894299443_8
gggcgctcagcggggccgggggcgccgggggacagggttaccctggggggtacctacctgcacgggggccccggccggggtcaagtccacgtcgcgaggcacacggcacgtcacctcgttcttcagcacgttggggtggcagtcccggccccccaccgtcatggtgatgttcatgcacccagccacagagtccagccccarttgctgscggracagacagccctgagcccggccggccccactgcgacccccccagcacgcctcgctcccccacgtacattcaccttaatctcattgtcrccgggtttgagttggtaccgctcgccctgctgcccaaaggagaacatctggggctgggggaagtagcgcaggcggaacagccagcggtcagcagccccatccagcagcacgctcaggttcccaggcaccggcttgatctcaatggggaaggccgggctgcggcacagcagccagttgggtgactgcgggccctcgcactcctgtgggtaggcacggggctgctggcacggtgccgaggacagccccgcggtgacagctccctgccctggtgctcaccgtggcttcagtcttcccaccacc

SEQ ID NO: 51573 - DNA, 527 bp, Chicken  19866894299454_1
tctctgtaaagacttagaggggatcagctgagttagaacataacagtgatcttactgctctctacaactaccagaaaggaggttgtagggaggtgggagtcagcctcttcccccatggtgttagcaataggactagagagaacggcctcaagttgtgcaaggagagattcaggttcaatgttaggaattctttgctgagagagtggtcaggcactggaatgcactgccgagggagatggtggagtcactgtccctggaggtgttcaagaaacatctagatgtactgagggacatggtttmgtgggaaatagtgatgataggtggatggttggactggatgatctttgaggtcttttccaagcttgctgattctgtggttctataatgtcaggcaagaggaaatctggaaaaaggtctgaaggaggtgaaaatgcctcatgcttacacttttctgactacctttattttagatcaatgtcttgtgaagtctttaaggaataatgatcctctcatactgctaaatctgg

SEQ ID NO: 51574 - DNA, 600 bp, Chicken  19866894299457_1
cattctgtgattctgtgattctgtgtgattctgtgacttcttttactgtttttatgcagctttcgattttgcagttttgtatctacaggtgtgaatgccacccaccaagaggtaggcactgcattttgctacagtcctgttgttgcaatggagtcacacggggtcttgcacaggcacaaccacttctcagagtgagggcaggcaggtcaaggtggatgagctgttagcacctcgctgctcttccaattgcaggccacatgcagaggacacaataattaagtctgtttaagtgagaaagamgtgaggtgagtgaagcacatgggaacaggtagagagtgcaagcccaccttcatattctgacccacaggctcagaaacaaagaggttaacaagaggtccagtgtgtgcgagctgcccattctgcagctaacagacccaatgttcttgtccttgaaataaatatcacaaagcactggcagctgtttttcttctgccagtcagctcccaaagtcctctctgacttgccactcccgggggaatttatattgtctttccagttgtcttttctgctggcttccccttctgtattccttcttggatt

SEQ ID NO: 51575 - DNA, 600 bp, Chicken  19866894299472_1
aattattcattgaattgggcagatttttttccttgcttacttcgattttttttgtttgtttgacttgaacaattggaacagaagagatctgtagattagataataccaagcacgaaagttagtcaagggttatttattgacctgcaaggtaaatcgtccagccttgtcaagcaagatagagtgaagattattgcaataactgtgatagcctttcaatctgatgataatcatactagcctaatccatatggacagtggcactgacaactgtatatgttgcacaaagtacccgtgcaatctkcagcttcataacttatattgacctccaaatctgttacagcatgtaaaatcctgacttcacaatcagaaagtaaaatatgcaaacaaacttgccagtaaactccttatgctgagactygaggcaacacattttaaactcgctcaatttttgtcttcagactaaactctttatcttgctaagaactacacttaaacaagattaactttttgaaaactagccctacaagtacatccccttatccaaccagttttcagcatactctaaattatcacagaagttaattagaaggagagagaggta

SEQ ID NO: 51576 - DNA, 600 bp, Chicken  19866894299472_2
gttagtcaagggttatttattgacctgcaaggtaaatcgtccagccttgtcaagcaagatagagtgaagattattgcaataactgtgatagcctttcaatctgatgataatcatactagcctaatccatatggacagtggcactgacaactgtatatgttgcacaaagtacccgtgcaatctkcagcttcataacttatattgacctccaaatctgttacagcatgtaaaatcctgacttcacaatcagaaagtaaaatatgcaaacaaacttgccagtaaactccttatgctgagactygaggcaacacattttaaactcgctcaatttttgtcttcagactaaactctttatcttgctaagaactacacttaaacaagattaactttttgaaaactagccctacaagtacatccccttatccaaccagttttcagcatactctaaattatcacagaagttaattagaaggagagagaggtatagttttccccctttcagcccacaaaactccatatcatctcagaaagtctccctgaagttactgcatttgatagtgaacctcccagaacatttgaggagttgagaacccagaaacag

SEQ ID NO: 51577 - DNA, 599 bp, Chicken  19866894299474_1
  misc_feature (1)..(18): n is any nucleotide
nnnnnnnnnnnnnnnnnnaaaacaagtcctccaattaagcccctgatgagtgctgattgaagattagaatttatgacacaacattacaactcctcctcactcctaacggatcagctcaagacggtatcctctgcaaagcagacctcagtgcagctgtgtgacccatatgcattattaatgctccgtgagctgcagaagagcagcacagacacaaaggcttcgtcctgaagcagctggtttggctgcacgctgctgactgtaccaactggatttccactttctataggagcctggagtaaytacagctgagatgyagacccmttgggagcgactcaggtgagtctgaactggcatctagcaataaacagayacagtaaaatatcttcaagggactcccagatctgatacaggatgtcccaaagccagccttggtgtctgcaggatgttcaggatgactctaggccatatgtgaatgcatctgaattaacatccctacaactgaagtggaaggacagtgtggaatccygtggaagcacagtgcagaattccatgtwgcttggaagctcccaggcccattgagggaggaatgctgatgatca

SEQ ID NO: 51578 - DNA, 599 bp, Chicken  19866894299474_2
  misc_feature (1)..(4): n is any nucleotide
nnnnaaaacaagtcctccaattaagcccctgatgagtgctgattgaagattagaatttatgacacaacattacaactcctcctcactcctaacggatcagctcaagacggtatcctctgcaaagcagacctcagtgcagctgtgtgacccatatgcattattaatgctccgtgagctgcagaagagcagcacagacacaaaggcttcgtcctgaagcagctggtttggctgcacgctgctgactgtaccaactggatttccactttctataggagcctggagtaaytacagctgagatgyagacccmttgggagcgactcaggtgagtctgaactggcatctagcaataaacagayacagtaaaatatcttcaagggactcccagatctgatacaggatgtcccaaagccagccttggtgtctgcaggatgttcaggatgactctaggccatatgtgaatgcatctgaattaacatccctacaactgaagtggaaggacagtgtggaatccygtggaagcacagtgcagaattccatgtwgcttggaagctcccaggcccattgagggaggaatgctgatgatcaacatatcatatgat

SEQ ID NO: 51579 - DNA, 600 bp, Chicken  19866894299474_3
acaagtcctccaattaagcccctgatgagtgctgattgaagattagaatttatgacacaacattacaactcctcctcactcctaacggatcagctcaagacggtatcctctgcaaagcagacctcagtgcagctgtgtgacccatatgcattattaatgctccgtgagctgcagaagagcagcacagacacaaaggcttcgtcctgaagcagctggtttggctgcacgctgctgactgtaccaactggatttccactttctataggagcctggagtaaytacagctgagatgyagacccmttgggagcgactcaggtgagtctgaactggcatctagcaataaacagayacagtaaaatatcttcaagggactcccagatctgatacaggatgtcccaaagccagccttggtgtctgcaggatgttcaggatgactctaggccatatgtgaatgcatctgaattaacatccctacaactgaagtggaaggacagtgtggaatccygtggaagcacagtgcagaattccatgtwgcttggaagctcccaggcccattgagggaggaatgctgatgatcaacatatcatatgatgaaggtag

SEQ ID NO: 51580 - DNA, 600 bp, Chicken  19866894299474_4
ttatgacacaacattacaactcctcctcactcctaacggatcagctcaagacggtatcctctgcaaagcagacctcagtgcagctgtgtgacccatatgcattattaatgctccgtgagctgcagaagagcagcacagacacaaaggcttcgtcctgaagcagctggtttggctgcacgctgctgactgtaccaactggatttccactttctataggagcctggagtaaytacagctgagatgyagacccmttgggagcgactcaggtgagtctgaactggcatctagcaataaacagayacagtaaaatatcttcaagggactcccagatctgatacaggatgtcccaaagccagccttggtgtctgcaggatgttcaggatgactctaggccatatgtgaatgcatctgaattaacatccctacaactgaagtggaaggacagtgtggaatccygtggaagcacagtgcagaattccatgtwgcttggaagctcccaggcccattgagggaggaatgctgatgatcaacatatcatatgatgaaggtagaaggaagtatcctcgttctagctctaacctacctgctactcagcatgaa

SEQ ID NO: 51581 - DNA, 555 bp, Chicken  19866894299474_5
gaagcagctggtttggctgcacgctgctgactgtaccaactggatttccactttctataggagcctggagtaaytacagctgagatgyagacccmttgggagcgactcaggtgagtctgaactggcatctagcaataaacagayacagtaaaatatcttcaagggactcccagatctgatacaggatgtcccaaagccagccttggtgtctgcaggatgttcaggatgactctaggccatatgtgaatgcatctgaattaacatccctacaactgaagtggaaggacagtgtggaatccygtggaagcacagtgcagaattccatgtwgcttggaagctcccaggcccattgagggaggaatgctgatgatcaacatatcatatgatgaaggtagaaggaagtatcctcgttctagctctaacctacctgctactcagcatgaacagactgaacttcactccctgaactcacactgtattttcatccttttacaagcaagggtaacatttggtcttatctctatcacccctggatccacaagctgctgaagaaaa

SEQ ID NO: 51582 - DNA, 527 bp, Chicken  19866894299474_6
gactgtaccaactggatttccactttctataggagcctggagtaaytacagctgagatgyagacccmttgggagcgactcaggtgagtctgaactggcatctagcaataaacagayacagtaaaatatcttcaagggactcccagatctgatacaggatgtcccaaagccagccttggtgtctgcaggatgttcaggatgactctaggccatatgtgaatgcatctgaattaacatccctacaactgaagtggaaggacagtgtggaatccygtggaagcacagtgcagaattccatgtwgcttggaagctcccaggcccattgagggaggaatgctgatgatcaacatatcatatgatgaaggtagaaggaagtatcctcgttctagctctaacctacctgctactcagcatgaacagactgaacttcactccctgaactcacactgtattttcatccttttacaagcaagggtaacatttggtcttatctctatcacccctggatccacaagctgctgaagaaaa

SEQ ID NO: 51583 - DNA, 600 bp, Chicken  19866894299477_1
taatgatgctgttttgtgtatttgaaagctattctgtgtctagctacgtgtaaatatgttattatctctatcaaaattgctgtaatcaaagaatgataattttagataacatttttttttatttaaaatgtagaattttttcaaggcccaaggaaatcttaatgattagtttattttcttaccaacatacctctgcagaatactcagctataaagtactagaaagctttcagtttctgtggccatgtgactgtgctctttctctttacatatttaataatacgtatctcttgaggaatartatrcgtaaattccaaaaatatctctgtggccttttaactgtgggttttggtaagagtttgaggattcttttgaagctgtggctttagttatttgaacactgttgtttactactcaaccattctgcactgcaaacggcttggttttaaacactaatctggtaccgatttccccttgatgtcactgtttctttgaaattgcagaaagcaaaattttcatatcatgtttgaatccagatttaaacagatcaaaatagattacaaaattaatgagacagatacctttcttaacatttcacgtc

SEQ ID NO: 51584 - DNA, 600 bp, Chicken  19866894299477_2
gatgctgttttgtgtatttgaaagctattctgtgtctagctacgtgtaaatatgttattatctctatcaaaattgctgtaatcaaagaatgataattttagataacatttttttttatttaaaatgtagaattttttcaaggcccaaggaaatcttaatgattagtttattttcttaccaacatacctctgcagaatactcagctataaagtactagaaagctttcagtttctgtggccatgtgactgtgctctttctctttacatatttaataatacgtatctcttgaggaatartatrcgtaaattccaaaaatatctctgtggccttttaactgtgggttttggtaagagtttgaggattcttttgaagctgtggctttagttatttgaacactgttgtttactactcaaccattctgcactgcaaacggcttggttttaaacactaatctggtaccgatttccccttgatgtcactgtttctttgaaattgcagaaagcaaaattttcatatcatgtttgaatccagatttaaacagatcaaaatagattacaaaattaatgagacagatacctttcttaacatttcacgtcatca

SEQ ID NO: 51585 - DNA, 599 bp, Chicken  19866894299483_1
  misc_feature (1)..(229): n is any nucleotide
nnnnnnnnnnnnnnnnnnnnnnnnnnnnnnnnnnnnnnnnnnnnnnnnnnnnnnnnnnnnnnnnnnnnnnnnnnnnnnnnnnnnnnnnnnnnnnnnnnnnnnnnnnnnnnnnnnnnnnnnnnnnnnnnnnnnnnnnnnnnnnnnnnnnnnnnnnnnnnnnnnnnnnnnnnnnnnnnnnnnnnnnnnnnnnnnnnnnnnnnnnnnnnnnnnnnnnnnnnnnnnnnnnnnncaccaaaaagagaaaatctgtatgataggaataatgatgttatctctctttcagtcatcttaaaatctccwtgtgaggagtctgtttttaatacttagtgcagtggtttgccctctagtactgtgatcttactaatggtattatgccgagagaggtctgaagccagtgagagtttaatatccaggttaaggatgcaggtcgtggtttataactctcttggtatacaggccaggtctgctgtgattctgcaacttacaayagtgaagtacagggatacactatcatttctggggattcagtcctccccagcatggaagagacctcagttaaagccggtgtgttaaactggagcggggctctccaggcaata

SEQ ID NO: 51586 - DNA, 599 bp, Chicken  19866894299483_2
  misc_feature (1)..(41): n is any nucleotide
nnnnnnnnnnnnnnnnnnnnnnnnnnnnnnnnnnnnnnnnncaccaaaaagagaaaatctgtatgataggaataatgatgttatctctctttcagtcatcttaaaatctccwtgtgaggagtctgtttttaatacttagtgcagtggtttgccctctagtactgtgatcttactaatggtattatgccgagagaggtctgaagccagtgagagtttaatatccaggttaaggatgcaggtcgtggtttataactctcttggtatacaggccaggtctgctgtgattctgcaacttacaayagtgaagtacagggatacactatcatttctggggattcagtcctccccagcatggaagagacctcagttaaagccggtgtgttaaactggagcggggctctccaggcaataagcgagatcacatggagaagagttcttagactacatgacggatgcttgtctgagatctgctataaagctgcagtagagttcataagagggatctctgcctactttctttcccagggaggacatttcacaggaaatgtaagttcagaatgctcaggattgcatgtttggccatcatcaccaaaataaag

SEQ ID NO: 51587 - DNA, 600 bp, Chicken  19866894299493_1
cacctctgctgtgctggcggtggggctgccagcatgtgggtacggctgcagcccggctgtgggcatgcggcgcagggagctggcagcctgcagccctgcctgccctggcctctgcagggacccatctgggggtgagaataggggagggttggttagcagggtcccagcgggaaggcacggggcagcagcatgcaggggggcccaacagccctgcaggacgtactcccagcgctgcctgcccctgtgcggtgctgcctgtcccctccatcctgcaccgagccccctgaaggtgctacgggrgaagcagcaccctgcaggtttcccatcctcctccattgttcttttggccaaacacatctgtaagtttgcaccccaagccctccccagcccccagcatttgctgctgttggctgctctgcgctggctgctccatctggcagctgctttccaggctgcagcactggaagtcgcacgctttatttccttggcagtgcctcgctgtttgcaagattgattttttaataagagccaccacaggtgcgtgaggtcctctacagcaatactgcttttaagataaacctggtgttgagtctaaaacca

SEQ ID NO: 51588 - DNA, 599 bp, Chicken  19866894299496_1
  misc_feature (1)..(73): n is any nucleotide
nnnnnnnnnnnnnnnnnnnnnnnnnnnnnnnnnnnnnnnnnnnnnnnnnnnnnnnnnnnnnnnnnnnnnnnnntgaaaactctacaaacactctacacttgctctaattgaagcccatcaggttcctctctacccaactcttacagcagccttctcatggcagcctgcagctcctcgcagggagcaaagggacagtgctgagttctgctctctagggaacagcctggagctgcaccagaggagggtgagggaaaggttccccctctggacctcctgcctctctcctcccactgcacttcygcaatacgaaggacttgccagataaaagtcagctttgatccacagtccaaacagattaatttagggcaaaattaggacaagcggaaaactacaattgacacagtttgatcaccagtgggctgatgaaccacatcttcacaaatagagaggagatcattttcattagacctgaacgcctcatgcaatagcttaatgacttctttaattgctgttattgttagaatgtgaggaggaggagggcagagggaagagcgagatagatttatttcaggtttataaaaatgcccacaccctgtcat

SEQ ID NO: 51589 - DNA, 600 bp, Chicken  19866894299501_1
taatataaaccatctgctttgagcaggcagcagcctcaggctgaagctctgctgccttcatgtctgcacagcagggtctctgagctgccacagagaatgccccactgtttatccatgaatgctgccagctatgggctctacctggccacagcagttagctcatcctcaggctaagagctggatgccaggtcctggagcaaaaatagagctgaaggccttcagttctctctctgccatgaagagcagaggtagatcggtgaagtcacaaacagagtaggagctgggactggacaccactgstaccctggcaagaaggagaggaggacagggccctgtaggcaccagtagtgttctgaggactgttcacagacacaagagatcccagtgagaggtccagcatcctttatgaaagaaagggagagccacatgtcctggcattctccgctaacaatgaaagtgggtcccagcaggtggtgctgccccaaaatctctcattttamtctcacaaccaccccagtaagagctagctgggaaatgtgtcctgtgcaatgagtttgctgctgagcacagggcatagcagagcagtgccattccccagac

SEQ ID NO: 51590 - DNA, 600 bp, Chicken  19866894299501_2
aaatagagctgaaggccttcagttctctctctgccatgaagagcagaggtagatcggtgaagtcacaaacagagtaggagctgggactggacaccactgstaccctggcaagaaggagaggaggacagggccctgtaggcaccagtagtgttctgaggactgttcacagacacaagagatcccagtgagaggtccagcatcctttatgaaagaaagggagagccacatgtcctggcattctccgctaacaatgaaagtgggtcccagcaggtggtgctgccccaaaatctctcattttamtctcacaaccaccccagtaagagctagctgggaaatgtgtcctgtgcaatgagtttgctgctgagcacagggcatagcagagcagtgccattccccagacctgcccagctcactgctgtttgcaaggctcaggtgctgatgcacagccctgctatggggacaggacatcacctcaagagccatcatcacaatgctgaccctggccacgggagggacagaaaggaagcagtttgaaagggatcagatggtctacctgacttctttacctctgtggttccagaaagctctgttcatttaaaa

SEQ ID NO: 51591 - DNA, 600 bp, Chicken  19866894299505_1
cgagaagagcgcgatgagcaccgcgctgacttctgccagctggctctcatggggcactccaacaacacggccgccctcacctccaccggggcaccgccgggctgccacgtttgggctccagccaacactcaggcggttccgttcccagcagtgttggctcacagcacggtactgcagtgcagagaagctccgtgccgacagaagggagaagtttcgatttgtctcagtagggattgagaaaagaaagctgcagcactcagcacacccgtctaccttaactcacacacagcgcacgcgaastcagcgaggggagaaaagacttcctggaggtgtgaagggcttcggggtaggaaggagcagaggctgcaggccagcagcccgagcaggagctgtgatgctgggctgctcctcgcgctgcgctgcctcctccgtacggtgctcccactgctctccaggtgtgcagaaccccggtgctgtcagtgaggtgtgctacagacaccttctgttccagtggtttgatggcaagcactgcaaactcccatttctgcctaccctgggatggagagccgcagcgaccgcccggctgtcctgcagccaggt

SEQ ID NO: 51592 - DNA, 600 bp, Chicken  19866894299510_1
tttagctgtaggtcatggtggtgcatggtactacatgtttgttttgtattagtttgttttccacaccctcctcatccaaaaggaccagggaattactgtcagtgtaaagtctactgaactctttcaagaagagattttcttaggctgctggatgggtgggacaaaggctactcctttgtttttctctctatcttcctttcctaatctagtacttgccagattatctgatctcagtgtgagatgggaacctatccctggaaaacatcagccatctattgaggctgttgtgccaggtaacaktatggatactaaccacttttcttccattttcagctgaggtatctataccataattttcttgctcacgctctccacttgggccttacagctcctctctgactgtaaatgtgtagcagctcacctgtgatgtgaaacaytgcgctgctcactcctgactcttagcgcagatttattcctatgctggagagcgagagggagaggtcataagatctggaaaaataaagttgactgagttgctcaaaatagtgctgaggggggcacaaatctaagccatggctacagcaatggggtgagtacctt

SEQ ID NO: 51593 - DNA, 600 bp, Chicken  19866894299510_2
tcttaggctgctggatgggtgggacaaaggctactcctttgtttttctctctatcttcctttcctaatctagtacttgccagattatctgatctcagtgtgagatgggaacctatccctggaaaacatcagccatctattgaggctgttgtgccaggtaacaktatggatactaaccacttttcttccattttcagctgaggtatctataccataattttcttgctcacgctctccacttgggccttacagctcctctctgactgtaaatgtgtagcagctcacctgtgatgtgaaacaytgcgctgctcactcctgactcttagcgcagatttattcctatgctggagagcgagagggagaggtcataagatctggaaaaataaagttgactgagttgctcaaaatagtgctgaggggggcacaaatctaagccatggctacagcaatggggtgagtaccttaggtgccatcaagtagggtgcaagtttatagctgtagaattgctgcagtgtaaatttagcacccarccccagtggacacacctgacctgctcaattatacatgtcccctgcttcataaatacagaagcatcattagc

SEQ ID NO: 51594 - DNA, 600 bp, Chicken  19866894299510_3
gctctccacttgggccttacagctcctctctgactgtaaatgtgtagcagctcacctgtgatgtgaaacaytgcgctgctcactcctgactcttagcgcagatttattcctatgctggagagcgagagggagaggtcataagatctggaaaaataaagttgactgagttgctcaaaatagtgctgaggggggcacaaatctaagccatggctacagcaatggggtgagtaccttaggtgccatcaagtagggtgcaagtttatagctgtagaattgctgcagtgtaaatttagcacccarccccagtggacacacctgacctgctcaattatacatgtcccctgcttcataaatacagaagcatcattagcaaaagtacaaacaggctagcacaggacctgacgtagcagagagcatctgctttgtaaaataatctgcccaggtaacaatgatgaggaaggtactttgctgtgatagatgaaagaaggtggattatctgcgctgagagtatctctgtgccagccactaatttaagggcctccccagttgtggtggagggctgctgtgaacttaatttcacatagcagtttgccaaaatat

SEQ ID NO: 51595 - DNA, 600 bp, Chicken  19866894299511_1
tctcagccgcagtctaagatgggctgctgccagcttccagtgatgaaagttgtcctggaagtcccccgctgtccagccggagatagggagggtttatttcagagaggaaaactgctacagacttgggtgtgatttgtcttgcttcagacttttgtcgatgcctcgtcagggattcagcctgacctgaaccaagtgttacctttggccagcctggagggctcctccaccaaaacctacagcctggctgtcattgggctggatgcctacaggtgcgatgtgctggggatgtgcggggagcawcggggctgggaagtttgccacagatggggagaagtwtctgtgcaggaaggaggtgcctggggctgtgctgctgagcttggtgccagcaaggtctgtgcttaagaggacttgagttttgctgtcttgtggatatactttgcagatggatttaatgcagactgaggattttgtagttagaaggtgtttgtgagtaagactacactcaggactaggcagagggatgcagtgatacagctcttgttgcactgccctgtgctccaagtagggctgcagtgcctttctgttctcagcaaggtgtgc

SEQ ID NO: 51596 - DNA, 596 bp, Chicken  19866894299511_2
ccagtgatgaaagttgtcctggaagtcccccgctgtccagccggagatagggagggtttatttcagagaggaaaactgctacagacttgggtgtgatttgtcttgcttcagacttttgtcgatgcctcgtcagggattcagcctgacctgaaccaagtgttacctttggccagcctggagggctcctccaccaaaacctacagcctggctgtcattgggctggatgcctacaggtgcgatgtgctggggatgtgcggggagcawcggggctgggaagtttgccacagatggggagaagtwtctgtgcaggaaggaggtgcctggggctgtgctgctgagcttggtgccagcaaggtctgtgcttaagaggacttgagttttgctgtcttgtggatatactttgcagatggatttaatgcagactgaggattttgtagttagaaggtgtttgtgagtaagactacactcaggactaggcagagggatgcagtgatacagctcttgttgcactgccctgtgctccaagtagggctgcagtgcctttctgttctcagcaaggtgtgcagctcatgaagcagggagagagatgtttggtg

SEQ ID NO: 51597 - DNA, 600 bp, Chicken  19866894299516_1
aatgatttcacatatctacatcaaaattcacactttgatcatgtctaaatattacgcctgggtctgctgaaagtatttggcagtgtctcctattgaagaaacccttttgtgatgtacaaacactagaaataaaatagaacctatgtagcatacatgaacgtgcacctctgcaaacagctaataacttgcctccatatagccactgattttagaaaacaaacagaaccattttttgccttgcctaatatctaaacagtcactaaactgatcacaagttagacagagactgactctataccrttcagctttgaaaagcagtatcactacataatctctggtttttcctctgtcagcctaatagtcaagttgagaggagcgatgaagctaatccataataaactatttcttaactacagggttgaagaggttcttacttctgcatttctgacaaagaaaaatacaagtgaagtagtttaggatcagcaaatcgttttcatgtatcctgtggaaggaactgatggttttgctttctaaagaacaggtcacaaactagacgtacaaagaccttcaaaagcatcatcttaaacacatgaataataa

SEQ ID NO: 51598 - DNA, 600 bp, Chicken  19866894299518_1
caggctgggccacagaagctctgcaggggtagtacaggggctgtacatgtgtatagggctgcatgtgtgtacagctaccatacagagtcctcagccactgccacccatcactgccccggggctgcgctggtcgcagcacaggccgggcctgcttaatccgcacccacatctcccaccacgagaggcccacagtgctggagtgctctgcaggggcacctcaggcagcaaggccgtctcctccccacgccaggccaggccctggtgagatgtgcccacagcaccgtgcccaccctgcccagsaggaaggtctggatggtgccatggggcagctcggggtctcgccagcctggacgagtaatgctccatctctcctgcacactctggacgtttcatccttccacagaaactgctggagataagggccacgagctggcaccagctctgcgagctcaggaatttctaacctctttttctgataagagctttgacaaagcctgccctgggatgctgggaacagccagttttcatgggtgctatgcaaggtcaagccatccagcagggaccaccctgcacttcgtctgaacagactgaaatagcgat

SEQ ID NO: 51599 - DNA, 600 bp, Chicken  19866894299523_1
cacttaatcctgagggatcacagcagacagtgacagaatgtatcaaggtcagtgataattaagtcaaagtgatgatggagaccaaatgcaacccactctagtcctaagaaataaaatcttgcaggggcctttgctaaaatatatagtattctttgggacactgtatgaaaatggtaggttaaatttccaacatcttctactgtgtttgttttcacaagtccttgcttctgctcaccttttgttacaaagtagatacctaaactactaaattctgaaggctggatcactcatcttgaaacygctcctgcttaccttgttcttcagtaaaaagttccatataacacaaatacacattcaaaaaagaaagaaaaatatgcaagcctgatgactggcaaacttaagaatttttttaagcatgaaaatgaagatgtagaagaaaatgtaaagaaaatgaaaatgtagaagaaaatgtaaagaaaatgaaatctacaagaaaatgtagatcatatgcctgtatcatggggtatttgtgtgagagagaagcatgaagataaattcttctctccctgtacagtactagaaatgtgttgcaaattttca

SEQ ID NO: 51600 - DNA, 599 bp, Chicken  19866894299526_1
  misc_feature (1)..(112): n is any nucleotide
nnnnnnnnnnnnnnnnnnnnnnnnnnnnnnnnnnnnnnnnnnnnnnnnnnnnnnnnnnnnnnnnnnnnnnnnnnnnnnnnnnnnnnnnnnnnnnnnnnnnnnnnnnnnnnnntagcttccgcctgtgtatcagatcttccccaagctttatctgtgtagcacgtggcaaagtcaggtggttggtagaatcctgctttgtgtcttcatccccctgttctgctctgctacaaactggtatggcatggctgagctctccaggctcctggtgttacagcaggagtgccacctggcagacatcayctttctgctgccctgctctcatagtcaaacactgcagaattgattgggtttttccaacagacaagcrtcttcaagttctttataaaatgtaaggtggctctcccttgaaagctttttttctccaacactcatctctttgctgctttcttgcctcacagttggaattctgatgttgttggttccttcatttgctgtattgaaaatggtctgaaataaataagaacattgcttacatctgtgaaagtgtcgcttagcaaagtctgagtcttgatgaaatgttaattcattttcataactta

SEQ ID NO: 51601 - DNA, 599 bp, Chicken  19866894299526_2
  misc_feature (1)..(45): n is any nucleotide
nnnnnnnnnnnnnnnnnnnnnnnnnnnnnnnnnnnnnnnnnnnnntagcttccgcctgtgtatcagatcttccccaagctttatctgtgtagcacgtggcaaagtcaggtggttggtagaatcctgctttgtgtcttcatccccctgttctgctctgctacaaactggtatggcatggctgagctctccaggctcctggtgttacagcaggagtgccacctggcagacatcayctttctgctgccctgctctcatagtcaaacactgcagaattgattgggtttttccaacagacaagcrtcttcaagttctttataaaatgtaaggtggctctcccttgaaagctttttttctccaacactcatctctttgctgctttcttgcctcacagttggaattctgatgttgttggttccttcatttgctgtattgaaaatggtctgaaataaataagaacattgcttacatctgtgaaagtgtcgcttagcaaagtctgagtcttgatgaaatgttaattcattttcataacttacatctgttatttctcacagtatttgatatattttacatgcttttgtgatcctaattttaaaggaaag

SEQ ID NO: 51602 - DNA, 600 bp, Chicken  19866894299532_1
gcagcagtaggcaagggatgtttggctacagggacctggggaaaaaagcttctcccgtagccatctccatcagcccacagcagagggagagaaggagatctttcccaagccagtcacctctccacgctccccaaaatgcaggttgtatatgtctgtatggcacaaggcaccccctctgtgctgtggggcacaggtgggtgctgccatctcagcagagcagcaggggctgggacttcccagcttacccctgtgaggcttacagtttgtacatgctcagacagatggggctgcctggttgcrcagcagtgccatacaggatgcagcagcaaccctgctgagcagcgtattttttcctctgcgccttgcaaatcgcagccagcagtggggacaaacaggcttttttttccctcctgtgttcaggaaatctctctgccataggtcttctttcttcaccagccgagcgtgctctgggatacttgatggtccctgaaaatggcagtggcaacggaggctgccgcctcctgcacacctcatgcgtgtggctgcacctgtgtgtgtcacagtgtcccagcagctgtgagcttatgggtagcaccagga

SEQ ID NO: 51603 - DNA, 600 bp, Chicken  19866894299534_1
gatgagaagtgtcagtgtcatttgttggcagggctgttggcttatgtttgggaagtttattctagagttgctatcacaggggccaaaacatgagctgagtagcagcgattgaatggggccagctcatgccagttttgctgccactgtgtctctgatggctgccatgctcagcttcctttctaactgcctgcctctggcatttctgaatgtgtgtaaccagtgcagtgctgcctgccactttgtgtggctgccttggagccagtctgcagcactgtgactgctttgcccagtgtgacttaytagttctgaagcatcaataacactgttagttttgagtgggaagacacaaccaagatgggaaacaatcagtttgatgtactgttaatagtgccttggcttagtgttgtaagggaatcacagaatcatagggattggaagggacctccagagrtcccccagtccacccytctgctaaggcaggttccctacagtaggtcacagactaaagcatctgtgtgggttttgaatatccccagaggaggagacttctcccacctctctgggcwatctgtgccagggctctgtcatcctcacccaaga

SEQ ID NO: 51604 - DNA, 600 bp, Chicken  19866894299534_2
ctgatggctgccatgctcagcttcctttctaactgcctgcctctggcatttctgaatgtgtgtaaccagtgcagtgctgcctgccactttgtgtggctgccttggagccagtctgcagcactgtgactgctttgcccagtgtgacttaytagttctgaagcatcaataacactgttagttttgagtgggaagacacaaccaagatgggaaacaatcagtttgatgtactgttaatagtgccttggcttagtgttgtaagggaatcacagaatcatagggattggaagggacctccagagrtcccccagtccacccytctgctaaggcaggttccctacagtaggtcacagactaaagcatctgtgtgggttttgaatatccccagaggaggagacttctcccacctctctgggcwatctgtgccagggctctgtcatcctcacccaagacattttccctcattttcatatggaacttcctatgtcctagttagcacctgcagctgatgtggaagtgcggatggagcaaaggtgtgggactgaattcctctgtttgggggaaaaaaaaaactccacccattgacactcactattgaatgct

SEQ ID NO: 51605 - DNA, 600 bp, Chicken  19866894299534_3
tcagcttcctttctaactgcctgcctctggcatttctgaatgtgtgtaaccagtgcagtgctgcctgccactttgtgtggctgccttggagccagtctgcagcactgtgactgctttgcccagtgtgacttaytagttctgaagcatcaataacactgttagttttgagtgggaagacacaaccaagatgggaaacaatcagtttgatgtactgttaatagtgccttggcttagtgttgtaagggaatcacagaatcatagggattggaagggacctccagagrtcccccagtccacccytctgctaaggcaggttccctacagtaggtcacagactaaagcatctgtgtgggttttgaatatccccagaggaggagacttctcccacctctctgggcwatctgtgccagggctctgtcatcctcacccaagacattttccctcattttcatatggaacttcctatgtcctagttagcacctgcagctgatgtggaagtgcggatggagcaaaggtgtgggactgaattcctctgtttgggggaaaaaaaaaactccacccattgacactcactattgaatgctgatggagaccaaacag

SEQ ID NO: 51606 - DNA, 533 bp, Chicken  19866894299534_4
cagcactgtgactgctttgcccagtgtgacttaytagttctgaagcatcaataacactgttagttttgagtgggaagacacaaccaagatgggaaacaatcagtttgatgtactgttaatagtgccttggcttagtgttgtaagggaatcacagaatcatagggattggaagggacctccagagrtcccccagtccacccytctgctaaggcaggttccctacagtaggtcacagactaaagcatctgtgtgggttttgaatatccccagaggaggagacttctcccacctctctgggcwatctgtgccagggctctgtcatcctcacccaagacattttccctcattttcatatggaacttcctatgtcctagttagcacctgcagctgatgtggaagtgcggatggagcaaaggtgtgggactgaattcctctgtttgggggaaaaaaaaaactccacccattgacactcactattgaatgctgatggagaccaaacagtaggtggagcacaatgaggcagtggatggtgc

SEQ ID NO: 51607 - DNA, 600 bp, Chicken  19866894299541_1
agcatatctccacagacgtgagagcaagggtgttattttcccctactacagctggacgcgtgtcacatcagtgaatgaagttataagctaggcatgagaaagcactgctgcagggcagccaggtgctggcactggtagcattgtgggtggctgcacggtgagcagcagggctggggaacttcagctgttcgagatttgtggggctctcaaggcttcgctggggttgatgtactgtccttggcagggaggggaaaggtggctggccaaggaattgccccttggagttaatgctttctgcartactacktcttcagctgatgtacttaggatcctctccgacccgaatcgccctcccctacagcagacacgtagaatggtcccttgaagtggacgtagcagcggggctccgcgtgtcccggaggcggcgggcacagagcgccccctgggggcacaccccgcgctcacaccggcgcggctgtcccgcagcccctgcggcgatagtccgctctgtgagagtgagtgggctcaccctccggagccaaagggaagcgctggctgtgccgcctgtggggtgtgagtgacggctggctgagcagaacg

SEQ ID NO: 51608 - DNA, 600 bp, Chicken  19866894299541_2
ctccacagacgtgagagcaagggtgttattttcccctactacagctggacgcgtgtcacatcagtgaatgaagttataagctaggcatgagaaagcactgctgcagggcagccaggtgctggcactggtagcattgtgggtggctgcacggtgagcagcagggctggggaacttcagctgttcgagatttgtggggctctcaaggcttcgctggggttgatgtactgtccttggcagggaggggaaaggtggctggccaaggaattgccccttggagttaatgctttctgcartactacktcttcagctgatgtacttaggatcctctccgacccgaatcgccctcccctacagcagacacgtagaatggtcccttgaagtggacgtagcagcggggctccgcgtgtcccggaggcggcgggcacagagcgccccctgggggcacaccccgcgctcacaccggcgcggctgtcccgcagcccctgcggcgatagtccgctctgtgagagtgagtgggctcaccctccggagccaaagggaagcgctggctgtgccgcctgtggggtgtgagtgacggctggctgagcagaacggtccgag

SEQ ID NO: 51609 - DNA, 600 bp, Chicken  19866894299544_1
tgaatattcaaatgaagtcctgccattcatctaacgctggaaaaagcacccacatcagaagactggcggagaggaggcgattcattatcaaaaagccatcagaagtgctaaatattgagcttagttcactgataactgaggggtgactatagccctgctgtaagcatttggacagggtgagaaattaggagcaatgatagaaggagcgagtactggatgtaatgggatcaaattaaatacagggaagttaagtatctggcaaagaagtatttaaattggaatgagataggcaaaaaaaayccaagatgggacagctgagagaagaagaaaagaggggccatgcatacacctcagtggtcagaaatcaggataacaaagctcatgatgtagatccagaaggatagcatgagaggtttttcrtgttataaactcacaccatttcaagcagcttgccatgaaaaaacatacatgcttctctgcagagttaactgcagaagcagaggatctccttgtataactcagacaaaaawcaatctctgctcagaataaatgacaagacaagattagtagaaraaatagaagcccraggaatggtaacaa

SEQ ID NO: 51610 - DNA, 600 bp, Chicken  19866894299544_2
ttagttcactgataactgaggggtgactatagccctgctgtaagcatttggacagggtgagaaattaggagcaatgatagaaggagcgagtactggatgtaatgggatcaaattaaatacagggaagttaagtatctggcaaagaagtatttaaattggaatgagataggcaaaaaaaayccaagatgggacagctgagagaagaagaaaagaggggccatgcatacacctcagtggtcagaaatcaggataacaaagctcatgatgtagatccagaaggatagcatgagaggtttttcrtgttataaactcacaccatttcaagcagcttgccatgaaaaaacatacatgcttctctgcagagttaactgcagaagcagaggatctccttgtataactcagacaaaaawcaatctctgctcagaataaatgacaagacaagattagtagaaraaatagaagcccraggaatggtaacaactcatcacagaggagatttgtgaatagaaacctaaaaggtctctaatcgggatgtttcctacaccagctcccacaaaatattatcatagaatcaccaagggtggaaaagacccccaggat

SEQ ID NO: 51611 - DNA, 514 bp, Chicken  19866894299544_3
aattaaatacagggaagttaagtatctggcaaagaagtatttaaattggaatgagataggcaaaaaaaayccaagatgggacagctgagagaagaagaaaagaggggccatgcatacacctcagtggtcagaaatcaggataacaaagctcatgatgtagatccagaaggatagcatgagaggtttttcrtgttataaactcacaccatttcaagcagcttgccatgaaaaaacatacatgcttctctgcagagttaactgcagaagcagaggatctccttgtataactcagacaaaaawcaatctctgctcagaataaatgacaagacaagattagtagaaraaatagaagcccraggaatggtaacaactcatcacagaggagatttgtgaatagaaacctaaaaggtctctaatcgggatgtttcctacaccagctcccacaaaatattatcatagaatcaccaagggtggaaaagacccccaggatcacccagtccaaccatccacccat

SEQ ID NO: 51612 - DNA, 471 bp, Chicken  19866894299544_4
aattggaatgagataggcaaaaaaaayccaagatgggacagctgagagaagaagaaaagaggggccatgcatacacctcagtggtcagaaatcaggataacaaagctcatgatgtagatccagaaggatagcatgagaggtttttcrtgttataaactcacaccatttcaagcagcttgccatgaaaaaacatacatgcttctctgcagagttaactgcagaagcagaggatctccttgtataactcagacaaaaawcaatctctgctcagaataaatgacaagacaagattagtagaaraaatagaagcccraggaatggtaacaactcatcacagaggagatttgtgaatagaaacctaaaaggtctctaatcgggatgtttcctacaccagctcccacaaaatattatcatagaatcaccaagggtggaaaagacccccaggatcacccagtccaaccatccacccat

SEQ ID NO: 51613 - DNA, 458 bp, Chicken  19866894299544_5
taggcaaaaaaaayccaagatgggacagctgagagaagaagaaaagaggggccatgcatacacctcagtggtcagaaatcaggataacaaagctcatgatgtagatccagaaggatagcatgagaggtttttcrtgttataaactcacaccatttcaagcagcttgccatgaaaaaacatacatgcttctctgcagagttaactgcagaagcagaggatctccttgtataactcagacaaaaawcaatctctgctcagaataaatgacaagacaagattagtagaaraaatagaagcccraggaatggtaacaactcatcacagaggagatttgtgaatagaaacctaaaaggtctctaatcgggatgtttcctacaccagctcccacaaaatattatcatagaatcaccaagggtggaaaagacccccaggatcacccagtccaaccatccacccat

SEQ ID NO: 51614 - DNA, 600 bp, Chicken  19866894299547_1
agtttttattatatgcatctggtgtattgctgttagtgctctagaataactcatgtatgatttctctgtagtaggtaaatctgccatctaggttttcagtttcatagtggcttctctattgatgctttcacagtgcaaggaactgatattggacatacccattgaactagccttgtaagaattactcatcattagaaatcatacaaatggaatatggtatgaatcttctaacaagactacagtgcactaaagtaaacttttggactatatggaagcaatgtatgtgtaaaaaatttttcmtgtgactgaatacattttacaaggcttcaatccagtgacatacattttacaacacttttaattgatgaaatggatgtactgttaagtataatgacagaacccacatcaggaaattgcagtgtacaataacacagggcacacataaatatatacatgtgcagatatatatgtgtgtatacacatacatatacatatgtaatacataacatacatgcatatataatattggcatgcatacagatacaagagtacctgtctatttatctatctttaccttttcttacaagagaaaagtgattg

SEQ ID NO: 51615 - DNA, 600 bp, Chicken  19866894299547_2
ttgtaattgacagggaaagcatttaaggtaaagaaaaaaaatattttattcatctttgattacactgtgatgtgatttggtgacataatacagctgtgaactgaggcaagaaaggcaataattcctacttgaggctttgacatgatgtagccctttagtcttcttcaaaccaatgcctccagctacaatagtccccttgatggagtctagacaaatagatatacagactgttacaatttaaaggcaaacagctttaaaataacgttcctctaggtcatgaattttggtattaaatggttmggctgatactctttttactttatgaaaattaaatctaaatcattcattaaaaatcacacattggataaaaatgattcacttcagaaggattttaatatgaaaataaactatttttcacacttacggagcaatttaattagaagcatgtactagaagtgaacactgtatgtagttaattcacttgcaatggctttaagtactatatctacctcatggatatcctaactttttactttttttctttgtaytgcatagtcaaaatatcactttggtattcctgaaaatgtgttgtgtcaggat

SEQ ID NO: 51616 - DNA, 600 bp, Chicken  19866894299547_3
cagctttaaaataacgttcctctaggtcatgaattttggtattaaatggttmggctgatactctttttactttatgaaaattaaatctaaatcattcattaaaaatcacacattggataaaaatgattcacttcagaaggattttaatatgaaaataaactatttttcacacttacggagcaatttaattagaagcatgtactagaagtgaacactgtatgtagttaattcacttgcaatggctttaagtactatatctacctcatggatatcctaactttttactttttttctttgtaytgcatagtcaaaatatcactttggtattcctgaaaatgtgttgtgtcaggatcttcagaagtacttatcggtacctagtttacaaaatctttagacactgagagcccaaacattctgttaggaatgttcataatgaaaaatcatgaaaagaaaatctgacaataaaaataatctcaccaaattttagctgctgtagttgtctaatcctaggtagcccctctgtgttctcctggagaacagttcttgtttacttcacttgctcatgtaacagactgacctagagacctactccgtgggctt

SEQ ID NO: 51617 - DNA, 600 bp, Chicken  19866894299549_1
agtaacacctcctatttcattattttggcccacaacttcagaggcagatgtagatgatgtggcagtagactctgtactgctgagctctgctcagccttctgagctctgcgagtcagccagttctcctttgtccactcttctatcccacctttcctagtcacacctatgggtacattacgggagactgttgttgaaagtcttgctgaagtcaaggtagacaacatccagtgctcttcactcatctacccatccactgttggtgtcatagaaggccaccaggttggtcaagaatggttcacycttggagaatccatgttgactacttctgagaacttccttttcttccatttgcctggagatgacattcagaataagcagttctaacaccttcccagggatggagatgaggctgactggcctgtagtgtcctcgaacctctttcttgccttttctgaagactggcatgacactggcttttcttcagtcttcaggcacctttcctgttctccattacctttcaaagatgatagagagtaccttggcaattgctattgtcacctccctcaccactaacaagtatatctcattggggcccatgga

SEQ ID NO: 51618 - DNA, 599 bp, Chicken  19866894299553_1
  misc_feature (1)..(32): n is any nucleotide
nnnnnnnnnnnnnnnnnnnnnnnnnnnnnnnngagtttacgcataacagaggtttgttccagtagaaaatctgaggtcgagtgtctgtctcagcagaatagtattctgtggcataaatccaagaagcagctttcaagagttaagatgatttactagctactctaacactatcccgtggcaggtgtaagtagtgtttacatttcaagtgaccctattagctctgataccttgatggcttaaagccgtatttttccttttaagaaaacagctgtgcttttgtgttaatcttagttgataagyagataaataatcctgcagtttttcctcctctagatgtgaacattgtatatctaagtggaaaactttctccgcagatgttttgcagtttactgtgttgggaacagttggaaattgtttcagtactataaaaaggcttaggggaactaagagaacttattttgtaacttgtagtggaatgtactgctatgttggtgtggttttttagtttttaatttaagtggtaggtttaatattctacctttyagatacatctaaattgcaagtattcagaaagccatgaatatttcctataagatgtt

SEQ ID NO: 51619 - DNA, 595 bp, Chicken  19866894299553_2
cgtatttttccttttaagaaaacagctgtgcttttgtgttaatcttagttgataagyagataaataatcctgcagtttttcctcctctagatgtgaacattgtatatctaagtggaaaactttctccgcagatgttttgcagtttactgtgttgggaacagttggaaattgtttcagtactataaaaaggcttaggggaactaagagaacttattttgtaacttgtagtggaatgtactgctatgttggtgtggttttttagtttttaatttaagtggtaggtttaatattctacctttyagatacatctaaattgcaagtattcagaaagccatgaatatttcctataagatgtttcaggagagcttgtacaggagcaggtgaatataagatgtaacaggaacagtgtcgggttctgtaatagcaggctgcactaatttaggcagcacagaacacagttctgcgtggtcctcaaactacagaataaacatttcarcctttaaaagacttaataatcgtcttgaaaagagccctatttgatgggggggagaggggcaaaggagttttgaaatgctattttttcatgtgattaaaa

SEQ ID NO: 51620 - DNA, 399 bp, Chicken  19866894299553_3
ggaactaagagaacttattttgtaacttgtagtggaatgtactgctatgttggtgtggttttttagtttttaatttaagtggtaggtttaatattctacctttyagatacatctaaattgcaagtattcagaaagccatgaatatttcctataagatgtttcaggagagcttgtacaggagcaggtgaatataagatgtaacaggaacagtgtcgggttctgtaatagcaggctgcactaatttaggcagcacagaacacagttctgcgtggtcctcaaactacagaataaacatttcarcctttaaaagacttaataatcgtcttgaaaagagccctatttgatgggggggagaggggcaaaggagttttgaaatgctattttttcatgtgattaaaa

SEQ ID NO: 51621 - DNA, 600 bp, Chicken  19866894299554_1
cagtgtgttgaattagtaagaaaacagaaaagaattttagaccttgacttttgacagaaactctatgaactctatgtagaaactaatgataataagaagagggatgtggaattttaaatatttatctatgattatctgatatttacctcactgtccttctaaaagtttccttaggatccagccctatagtatgttgctttcaggcagaagaaggattttagcaaaaatgaaaagcagtgagccagaaccatccccagtccttaacaagaaggcacatctctcataccttggccccccacrgacttggaaggcagaggagtactggtacttacagagtctgctggatccatgcatggagagctttcatcagcttcagcaactgctctcagggtatagggctgagaaacaggcacaattttcatctttattttagccttttaccacagagatctttacatgttcttyggtagctgaaacagactgcgcactgtcagttcaaatgtcagtgaaaggtaactgcaggagagagaaggagaacaaggagaggggaaaagagaagaacagcaagttgtcacagtttcacaggaaaactgcctgctt

SEQ ID NO: 51622 - DNA, 600 bp, Chicken  19866894299554_2
tttccttaggatccagccctatagtatgttgctttcaggcagaagaaggattttagcaaaaatgaaaagcagtgagccagaaccatccccagtccttaacaagaaggcacatctctcataccttggccccccacrgacttggaaggcagaggagtactggtacttacagagtctgctggatccatgcatggagagctttcatcagcttcagcaactgctctcagggtatagggctgagaaacaggcacaattttcatctttattttagccttttaccacagagatctttacatgttcttyggtagctgaaacagactgcgcactgtcagttcaaatgtcagtgaaaggtaactgcaggagagagaaggagaacaaggagaggggaaaagagaagaacagcaagttgtcacagtttcacaggaaaactgcctgctttatgtcacttgtatctgacttcagccagtgatgrcagtcactcagttcaggcacactagaaataataagtgagcaaaagagagaagaaatggaattacagatatgagtctttgctttttaatgatttttagtaatagtaggtgatataagcacctgtctcccagg

SEQ ID NO: 51623 - DNA, 600 bp, Chicken  19866894299554_3
agtctgctggatccatgcatggagagctttcatcagcttcagcaactgctctcagggtatagggctgagaaacaggcacaattttcatctttattttagccttttaccacagagatctttacatgttcttyggtagctgaaacagactgcgcactgtcagttcaaatgtcagtgaaaggtaactgcaggagagagaaggagaacaaggagaggggaaaagagaagaacagcaagttgtcacagtttcacaggaaaactgcctgctttatgtcacttgtatctgacttcagccagtgatgrcagtcactcagttcaggcacactagaaataataagtgagcaaaagagagaagaaatggaattacagatatgagtctttgctttttaatgatttttagtaatagtaggtgatataagcacctgtctcccaggtttatgaatttctgctttttatgatgcttaagagcctcaattccaaaattactatgcagtagaagtatttttcaatggtaaatccaccacacacaaatgctagcctagaggaaaaatggggggagggaaggagagagggrgtaaagaaggaagggggaagatatccaca

SEQ ID NO: 51624 - DNA, 600 bp, Chicken  19866894299554_4
cacttgtatctgacttcagccagtgatgrcagtcactcagttcaggcacactagaaataataagtgagcaaaagagagaagaaatggaattacagatatgagtctttgctttttaatgatttttagtaatagtaggtgatataagcacctgtctcccaggtttatgaatttctgctttttatgatgcttaagagcctcaattccaaaattactatgcagtagaagtatttttcaatggtaaatccaccacacacaaatgctagcctagaggaaaaatggggggagggaaggagagagggrgtaaagaaggaagggggaagatatccacagactctcttgtaacatcctgtggtggatgacagaagaatcaagcaacctttttttcttaaaatttataccttgttcygttgctttttggtaatattacatttgtcagaattgtcccagtttattaacatttctcagtgtatgtataataatgaagtgaagatggaaggaaaggtagaacgtgcacagctgaatgagagcggattgccttcctgaaactaaagttgagttcattcattttgctttgttcctgttgtcagtatttactagggg

SEQ ID NO: 51625 - DNA, 592 bp, Chicken  19866894299554_5
tgctttttaatgatttttagtaatagtaggtgatataagcacctgtctcccaggtttatgaatttctgctttttatgatgcttaagagcctcaattccaaaattactatgcagtagaagtatttttcaatggtaaatccaccacacacaaatgctagcctagaggaaaaatggggggagggaaggagagagggrgtaaagaaggaagggggaagatatccacagactctcttgtaacatcctgtggtggatgacagaagaatcaagcaacctttttttcttaaaatttataccttgttcygttgctttttggtaatattacatttgtcagaattgtcccagtttattaacatttctcagtgtatgtataataatgaagtgaagatggaaggaaaggtagaacgtgcacagctgaatgagagcggattgccttcctgaaactaaagttgagttcattcattttgctttgttcctgttgtcagtatttactaggggcaaatggttctccagacatggaaacatgaaggggaccatgaactcctgagcagctttggatatcaagcagtggttggaggtgtgaggatgagaatgga

SEQ ID NO: 51626 - DNA, 600 bp, Chicken  19866894299558_1
tgtgttggaagggacccacatggattctgactgctggttcaatagagaagcaccaaaaattcaaaccctgtgtctgagagtgttgtccaaaagctccttgaactccgtcagcttggggctgtgatcactgccctgaggagctgttcccaggcctgattaccctctctcaaagaatcttttcctaacatccaacctgaccccctctgacacagttccgtgccattcccttgtgtcctgtcgctgttatcagagagcaaagatcagtgtttcccctccactcccctcatgaggagctgtggrctgccatgtgggagtctctcctcttctctgggctgaacaaaccaagaagcctcagccactcctcaaacatcttgccctctagagctttcatcaccttcaaagccctactctggactctctactattataaggagatataggaagatcaaaaaatgtcatgttaatgattctatttgaacaatcactagggaaaaagtaaactatttttagaaggggataaaattgttttttttctccattagtctggctttctgagttttcccattccttctttttctgtagagcatttgagctctattg

SEQ ID NO: 51627 - DNA, 600 bp, Chicken  19866894299559_1
aggaacgtagttgcatttatggaagatcttgacttttacagcgtgtgaggcccatgcagtttcccctgtgtacgcgtgttgcctgcataattaccaacagctgtaacaaaaacccagttttgttaaaggagctttcaacagaaaggtagaagtgatatgcaacagaagaaaaattaaaaacaagagggcttggaaaacgtttatatacttaggaaaaaaattcatttttaatcctgttctattattctctctctgatattaaaatctatataaagcactgctgatttcaatcggctcaaygcgaggtaattcagaactcccaccccgctgtccccagctctgaggggataaatctcagcagcccgtggctgtatgatacagagagcctcagcacaactgttgcatgcactgaaaaagatgctcttactctgaggagtaattcaccttcccctcttcttccatcaggacaagggaagttacgggattaaatgatccttgatcacgaaagcaggtgcaccggaggcaatcagaatgcacgtctgctgaagccccggtgagtacacagcgcttacagctgacagcgcggcactgccaacacag

SEQ ID NO: 51628 - DNA, 600 bp, Chicken  19866894299560_1
actcatgtcaaaaacatgtattgctactgtatcacatcgtccctctgttgcctgttttctcagtatttttccaagccattatgagtgtttttttcactgtttatctaacaatggaaccactgttttccatggtagctaggaatacctgaatggatgcctgaaacacactgcttcattctagtagtcacttttgccagccactgcaatccctcatgctttcagctcctcatcctagccagctaagtgtcaggtttacacttgccttgtctcccctaccctgctagaaaccagaacatactrtaatttccctaatttttaactttccctaactgtatgtcacatgtagtctattgtgcaaatacatccagccaatgatgtatacctgccattgctgacacagacacgggagaggtttctgcttttatagcccctcttgtttgctgtttctcaaaggacctagctcttatcagcttgagtaatgagttactgggatgcaggttttggctttcaatgaaaagtgcaaagtgagaccatcggctttcaataagcagtgcaaagccatacactttacacttttttctattttttgttttttttttt

SEQ ID NO: 51629 - DNA, 600 bp, Chicken  19866894299562_1
aaattaggattctctaaagacatgctctgttaccttttaaaatgtttgtgcaccttagtttttgccagaaaaatcttctctgaaaaaaaggcttgctgtgagtaaagtgtgtaaaaggcttaggtttcctctatttattttcattgacttgactaatcttctaagctttataagttctttcatctttccttgtctgacacaactgtttattgcactggtatagattcagctggagatatctggaggtcgtgcccttccttggatcctttttggtcccaagggtcccttggtccccctgtmtaaaaagaagtgggatcacctagccataggacatttcttgagctgtggaaagacctaacttcataagccttcagccagggaatggaaaactttagacacctagctaaggctaaaaaggcaggtaggttacctaacctaaaatatrattttgcttctagatactcatttgagatcttctttgtcgtcctgtcaaaaagttcaaggagaaaagcttttcctaatacaattcagtttgttggtgagagtagtgaagcaaaagaaaatgaataatctgtaggtcagcttaggtctttgtgatca

SEQ ID NO: 51630 - DNA, 513 bp, Chicken  19866894299562_2
gacttgactaatcttctaagctttataagttctttcatctttccttgtctgacacaactgtttattgcactggtatagattcagctggagatatctggaggtcgtgcccttccttggatcctttttggtcccaagggtcccttggtccccctgtmtaaaaagaagtgggatcacctagccataggacatttcttgagctgtggaaagacctaacttcataagccttcagccagggaatggaaaactttagacacctagctaaggctaaaaaggcaggtaggttacctaacctaaaatatrattttgcttctagatactcatttgagatcttctttgtcgtcctgtcaaaaagttcaaggagaaaagcttttcctaatacaattcagtttgttggtgagagtagtgaagcaaaagaaaatgaataatctgtaggtcagcttaggtctttgtgatcagctgtgtgcattgactatttagttgatttgattcagcaatttcctcatcttgatttgg

SEQ ID NO: 51631 - DNA, 599 bp, Chicken  19866894299563_1
  misc_feature (1)..(25): n is any nucleotide
nnnnnnnnnnnnnnnnnnnnnnnnncatgaaaagcttcattcagggaaggatggaaaatggaaaagaaaaattactgttcagccacaaaacaaagctagttttctgtcatagtttcataaagaatctatattctcacaatgtcttgaactcaaaattataattttgtcattaataaaaacaaggagtacttacaggtttattatcagcaatagaaaagtcaaaggtatttttgatgacctttatgacatctaaactgtctttgtattttacctgaaaagatgtgcattaaatttggaacyttgtggttgagtgataacctacctattaaaaaacatttaatctttaagatttaaggttttagagcagcaactcctccattagagagatttctcagtggttacttattctaaaaatgtttctttctataattatcatttgctgactagttttaatttgtctagttattacttcatttgctgttgcagttcattatcattttgtcttccagattaaaaaaaccttttatcatcagaatcttctccttcttgtgaatacttacaaaatcaagtctatcttataatttctttttgttaaggta

SEQ ID NO: 51632 - DNA, 600 bp, Chicken  19866894299570_1
gtgatgcattaaattttgcttttttttttttttttttcctgttctcaaatgatctgcaaacagacagtaatattcttaactactcttaacctttgatttagaaggctatgattcagaaattgcttcagggaaaaatttgtagtatataggccattccaaaattcacaaaatttggcaatttacaatttatattgtgttattagttatgcaagttatgtgattgtatttgtgctcccattttcaggatggtttattatgtcagtttacctctgatgctgtactgattcattttcaagtgtygtaacacttgtgattttgaaggtaaaaccagtacccagatatcaactgtgaagtttgttttccacgtttgaatagagtgctaccaaagttttttgtctccttttgtaatgagaaatactatgtattctgtgaattacatgggcttyttatttaacrtattagaattactaaagaaacttgtggcatttgatttcaacctctgatgtgtcttatttctagtttttgaccttcaaccataaattctaagttgagttaatcctaaaatcctgggaaatgctttggacatacttaggcagagat

SEQ ID NO: 51633 - DNA, 600 bp, Chicken  19866894299570_2
taggccattccaaaattcacaaaatttggcaatttacaatttatattgtgttattagttatgcaagttatgtgattgtatttgtgctcccattttcaggatggtttattatgtcagtttacctctgatgctgtactgattcattttcaagtgtygtaacacttgtgattttgaaggtaaaaccagtacccagatatcaactgtgaagtttgttttccacgtttgaatagagtgctaccaaagttttttgtctccttttgtaatgagaaatactatgtattctgtgaattacatgggcttyttatttaacrtattagaattactaaagaaacttgtggcatttgatttcaacctctgatgtgtcttatttctagtttttgaccttcaaccataaattctaagttgagttaatcctaaaatcctgggaaatgctttggacatacttaggcagagatgttccttggatgttttgtttctgataattgtgaagaaatatagacagagtttgtagctaacagctgttgttagaatcaggaagatcagacacaatatgctgaattttttggaagtttggatgaccaaggtaaactgatatcacctc

SEQ ID NO: 51634 - DNA, 600 bp, Chicken  19866894299570_3
caaaattcacaaaatttggcaatttacaatttatattgtgttattagttatgcaagttatgtgattgtatttgtgctcccattttcaggatggtttattatgtcagtttacctctgatgctgtactgattcattttcaagtgtygtaacacttgtgattttgaaggtaaaaccagtacccagatatcaactgtgaagtttgttttccacgtttgaatagagtgctaccaaagttttttgtctccttttgtaatgagaaatactatgtattctgtgaattacatgggcttyttatttaacrtattagaattactaaagaaacttgtggcatttgatttcaacctctgatgtgtcttatttctagtttttgaccttcaaccataaattctaagttgagttaatcctaaaatcctgggaaatgctttggacatacttaggcagagatgttccttggatgttttgtttctgataattgtgaagaaatatagacagagtttgtagctaacagctgttgttagaatcaggaagatcagacacaatatgctgaattttttggaagtttggatgaccaaggtaaactgatatcacctctgcacatagt

SEQ ID NO: 51635 - DNA, 600 bp, Chicken  19866894299572_1
ataagttatatttgcacggagaaactgtaaataccatttgtttctgtatacaccctgaaccacaggaattttcagtttcctttcctttttttttttccccttccaaccacttcttcagtctgagcagcacgctgtaacttaatatcgctcccaacaacgttgctgtccaaattatagtactcggctctagaaggtttatattaaatatattttttggtaatgaaacttgcatctaactgaatttcagaagagtttggtcttattaactcttgaagcagtttgttagtaatgcataaaccrtatgaaatgtgcattctagaacttgttcaagtcttcacaacctcatttaagcaagctgaatattagctactggttttaattatgaatgctggtgaaagagcagtaatacttataaaagttatttcaagttttaagacctcattgtccattaattgacattactgtagtcttaatttgcttgttgaagcaatgggctttaggccaaagatctgacagttcattactgaactagtaatattaattacctcaaagataatatcctgtaattttcattgtcattgccttcagttggtgcctgat

SEQ ID NO: 51636 - DNA, 600 bp, Chicken  19866894299576_1
ctcaaatggagcgggtttatatgtgagtgtcaacacttgagtctctttccattattctttgctcttgcctaagatcatcccagaagctttcctcaaggtatttggtgttgcaccctgtcaggagcagaatggcagcaagggtttatacagggaaatgggcaaaagagacaacagaatgaaaaacgctttccaactccttgcctggattttgaccctagtgcagtggtgggctgtgccagctctacagaggtatttctagggaagtggcatggctgagtaactggcatgcatgctgcggtrcctcgtggctggattcgcctcagcatatttctgtagttctccttgagcccaactcagccaatgggcaatttgtagggctcctccccattcaagacatgcctgcctactgactgcccagcatcactatctccggtcagctgtaatcctgaatctcacactgggaagctgaagtcacctcttgagacagaatactttcagatggttctagcatctccatttctgtagcttttgctacagttctgtgagccttggtgaagaaaagaatccctacagaggtgactgctgctgagaaatgttgga

SEQ ID NO: 51637 - DNA, 599 bp, Chicken  19866894299583_1
  misc_feature (1)..(111): n is any nucleotide
nnnnnnnnnnnnnnnnnnnnnnnnnnnnnnnnnnnnnnnnnnnnnnnnnnnnnnnnnnnnnnnnnnnnnnnnnnnnnnnnnnnnnnnnnnnnnnnnnnnnnnnnnnnnnnngagcttataaagaagatgggagactgactttatacatgtcagtatacatgatagtgataggacaagggggaatggttttaaactagaagagggaaaatttagggtagatgttaggaagaaattccttactcagagggcgatgaggccctgtcacaggctgctcagagagattgtagatgcctcatccayggaggtgttcaaggccagtctggatggggccttgggcagctgatctgctgggtggcagccctgcttagggcagagggttggaagtgcatggactttcaggtcccttacaayccaaaccattctgtgactcctatgaactcccygttggcagttgcagaagattcagtatttgcacactgctcagatggcagtgactaccagtcactggccaccttatgatacattacttgtctgcttgccttgagctcagtctgcaggctcagctgtctttcccttccttctaacaacacatggggtgt

SEQ ID NO: 51638 - DNA, 600 bp, Chicken  19866894299583_2
gagcttataaagaagatgggagactgactttatacatgtcagtatacatgatagtgataggacaagggggaatggttttaaactagaagagggaaaatttagggtagatgttaggaagaaattccttactcagagggcgatgaggccctgtcacaggctgctcagagagattgtagatgcctcatccayggaggtgttcaaggccagtctggatggggccttgggcagctgatctgctgggtggcagccctgcttagggcagagggttggaagtgcatggactttcaggtcccttacaayccaaaccattctgtgactcctatgaactcccygttggcagttgcagaagattcagtatttgcacactgctcagatggcagtgactaccagtcactggccaccttatgatacattacttgtctgcttgccttgagctcagtctgcaggctcagctgtctttcccttccttctaacaacacatggggtgtctggtgaatttagtcccatagctgaaatcaatcattttcaagttgagaaagttgggtttactctgtggttcatttacaagcacagaaaatgaacttaggcaataaagaaaca

SEQ ID NO: 51639 - DNA, 600 bp, Chicken  19866894299583_3
tacatgtcagtatacatgatagtgataggacaagggggaatggttttaaactagaagagggaaaatttagggtagatgttaggaagaaattccttactcagagggcgatgaggccctgtcacaggctgctcagagagattgtagatgcctcatccayggaggtgttcaaggccagtctggatggggccttgggcagctgatctgctgggtggcagccctgcttagggcagagggttggaagtgcatggactttcaggtcccttacaayccaaaccattctgtgactcctatgaactcccygttggcagttgcagaagattcagtatttgcacactgctcagatggcagtgactaccagtcactggccaccttatgatacattacttgtctgcttgccttgagctcagtctgcaggctcagctgtctttcccttccttctaacaacacatggggtgtctggtgaatttagtcccatagctgaaatcaatcattttcaagttgagaaagttgggtttactctgtggttcatttacaagcacagaaaatgaacttaggcaataaagaaacagctgtttcctgttttccaaaacttttatagtt

SEQ ID NO: 51640 - DNA, 600 bp, Chicken  19866894299587_1
agcgcaatgtgcaaaatttaaataaagaatatttattaatatgcatagtacaaatgggtgtacacgtttctgctttaagtgctgtggcagaggtttgcattaccactgttcagggtggatgagaagctcttaatttggtccgtgcagcttcttggaggtaaaggtgaaggttgaggtgaagaagctccactgggagaagcacagctggttcagtagtgcttgtgggagcggagtggtgctgagcctttgcccctgtgctgctttgaggtttggtgttgtttttcattgagctgcctctgygggagggcactgcagcccttgttgccgaagccatcgttcagctctctgacgtgctcaaacaaaaaggtttccacacagtttggtgttcccttaatgaaataaggagctctgttctgaagacaaaatgtgagtgctttgccatcaacttttcaaccctgtcttgttcttattgctatagtatgtagtggcctgactcgtgtgcaggaggatgatgtgacaggtggcaaaggtagggaacgtgggagaggtgtgctgggaggagctggggggtatttcttgtgctgctattctaaacattac

SEQ ID NO: 51641 - DNA, 600 bp, Chicken  19866894299588_1
ctccagactgggaaaatacagtgttgcaatttctttattttactcttccatagcaacaacatcccgtttagggggaatgttggccggttatatcccaagttcaccccacattgcaagtttgaaattcaaagatggatttacttctatataacaagtcataaaactaggtcctcagaaaatgtggccttaattgatagtcataagattagtttgctcaaatccaattgatctgttttcagtgatggtcattattttcagataataaatactgtatcagcaactttggtagccttttaatgycttttcttttagtacaatgctacatggagaattgcttaacrtaccaaattacaacaaatttaagctaccaaaaaatgaatttataaggctgcttaaygtattcagtgcatcaccatttgccagggaaatagcacactggaggcaaagaaaacaagacagcrtattttctttatagtggaaatgcactttatcatttgcaaggaaattcaatacagaaaggagccaaagtccaactcaaggttcagtcttgctatgagattgcgcaggtgacctcagacaagcagataacttgccctgaaa

SEQ ID NO: 51642 - DNA, 600 bp, Chicken  19866894299588_2
actcttccatagcaacaacatcccgtttagggggaatgttggccggttatatcccaagttcaccccacattgcaagtttgaaattcaaagatggatttacttctatataacaagtcataaaactaggtcctcagaaaatgtggccttaattgatagtcataagattagtttgctcaaatccaattgatctgttttcagtgatggtcattattttcagataataaatactgtatcagcaactttggtagccttttaatgycttttcttttagtacaatgctacatggagaattgcttaacrtaccaaattacaacaaatttaagctaccaaaaaatgaatttataaggctgcttaaygtattcagtgcatcaccatttgccagggaaatagcacactggaggcaaagaaaacaagacagcrtattttctttatagtggaaatgcactttatcatttgcaaggaaattcaatacagaaaggagccaaagtccaactcaaggttcagtcttgctatgagattgcgcaggtgacctcagacaagcagataacttgccctgaaacaagaattagctgactaacctgactcccagttcaagaactg

SEQ ID NO: 51643 - DNA, 600 bp, Chicken  19866894299588_3
agttcaccccacattgcaagtttgaaattcaaagatggatttacttctatataacaagtcataaaactaggtcctcagaaaatgtggccttaattgatagtcataagattagtttgctcaaatccaattgatctgttttcagtgatggtcattattttcagataataaatactgtatcagcaactttggtagccttttaatgycttttcttttagtacaatgctacatggagaattgcttaacrtaccaaattacaacaaatttaagctaccaaaaaatgaatttataaggctgcttaaygtattcagtgcatcaccatttgccagggaaatagcacactggaggcaaagaaaacaagacagcrtattttctttatagtggaaatgcactttatcatttgcaaggaaattcaatacagaaaggagccaaagtccaactcaaggttcagtcttgctatgagattgcgcaggtgacctcagacaagcagataacttgccctgaaacaagaattagctgactaacctgactcccagttcaagaactgattccaagcccagttctctacctgcttcctttgtataacattcatcctttacagac

SEQ ID NO: 51644 - DNA, 600 bp, Chicken  19866894299588_4
aactaggtcctcagaaaatgtggccttaattgatagtcataagattagtttgctcaaatccaattgatctgttttcagtgatggtcattattttcagataataaatactgtatcagcaactttggtagccttttaatgycttttcttttagtacaatgctacatggagaattgcttaacrtaccaaattacaacaaatttaagctaccaaaaaatgaatttataaggctgcttaaygtattcagtgcatcaccatttgccagggaaatagcacactggaggcaaagaaaacaagacagcrtattttctttatagtggaaatgcactttatcatttgcaaggaaattcaatacagaaaggagccaaagtccaactcaaggttcagtcttgctatgagattgcgcaggtgacctcagacaagcagataacttgccctgaaacaagaattagctgactaacctgactcccagttcaagaactgattccaagcccagttctctacctgcttcctttgtataacattcatcctttacagacgatatttgcaatttctacttacaggaataatgaaaaaatatgaaaagttgtcccagtccaggag

SEQ ID NO: 51645 - DNA, 600 bp, Chicken  19866894299590_1
ctatctcaagtacgtgaaccctcagggagaagaactggctccaaggacagcattttgatgcataggttagcagtgaattcaggtttaattagcttgtctctgccaacttaaaacatatcatcaaataagattacaagtaggaggtaaagacggccatgctcaggtttacaacttgagccacagacaagagtgaccacacaaaaataaattctgcagacagatgtagccaggagaaggatcagccccccacaaataatgtacctgccggggagatgcctaattgagccatcacaaagccayttgtcatgaccacggtgtattaattacttggacgaatgaaaatcatagaattgtagaatcaccaaggctggaaaatacatccaagatcatcagtccaaccatccacctatcaccaatatctcccactaagccatgtcccttggtacgacatctagccaggctctaccacaggtcagtctttctccctttttttttagggcttcatattgtttcatacagctcctggcaggtgcctgaggctcactggtccttctcaggctctcttccagcccacagaatgatggtgttcaccttcgggtt

SEQ ID NO: 51646 - DNA, 600 bp, Chicken  19866894299590_2
tgaaaatcatagaattgtagaatcaccaaggctggaaaatacatccaagatcatcagtccaaccatccacctatcaccaatatctcccactaagccatgtcccttggtacgacatctagccaggctctaccacaggtcagtctttctccctttttttttagggcttcatattgtttcatacagctcctggcaggtgcctgaggctcactggtccttctcaggctctcttccagcccacagaatgatggtgttcaccttcgggtttttgtttcattttcaagctttgctttttaaatcacwgttttaatgttttttggaggattgcaacctcaagagaatgagccatcctgagctagataaacagtttacaaagtgcatcagcactgccaagtacttgctgcaaggagcttcacaaatccctgctattgcaggaaatccatgcagctactaagtgtccacatacatattagctaggtgtgaaaaaacagaattccaatgacattttgagcraataatataagggactgagcaatactgcagcaaaaaattcaacccatggtacrwaacagttatgagaaaccactgtgtttagctccatgc

SEQ ID NO: 51647 - DNA, 600 bp, Chicken  19866894299590_3
gtccttctcaggctctcttccagcccacagaatgatggtgttcaccttcgggtttttgtttcattttcaagctttgctttttaaatcacwgttttaatgttttttggaggattgcaacctcaagagaatgagccatcctgagctagataaacagtttacaaagtgcatcagcactgccaagtacttgctgcaaggagcttcacaaatccctgctattgcaggaaatccatgcagctactaagtgtccacatacatattagctaggtgtgaaaaaacagaattccaatgacattttgagcraataatataagggactgagcaatactgcagcaaaaaattcaacccatggtacrwaacagttatgagaaaccactgtgtttagctccatgcttccctggatgctagaggggaatacttgaatagcagatttccccagttacgatagccaaggcctcaatctaagtttccgtagcatttttgtattgttatgacctgtttcaacatggcaatgactctgaaaacttgaattccttgggcaagctatcccaaagagttattattgtttctgttattgttgttgttatcattgctgtcattatt

SEQ ID NO: 51648 - DNA, 600 bp, Chicken  19866894299590_4
ttttgtttcattttcaagctttgctttttaaatcacwgttttaatgttttttggaggattgcaacctcaagagaatgagccatcctgagctagataaacagtttacaaagtgcatcagcactgccaagtacttgctgcaaggagcttcacaaatccctgctattgcaggaaatccatgcagctactaagtgtccacatacatattagctaggtgtgaaaaaacagaattccaatgacattttgagcraataatataagggactgagcaatactgcagcaaaaaattcaacccatggtacrwaacagttatgagaaaccactgtgtttagctccatgcttccctggatgctagaggggaatacttgaatagcagatttccccagttacgatagccaaggcctcaatctaagtttccgtagcatttttgtattgttatgacctgtttcaacatggcaatgactctgaaaacttgaattccttgggcaagctatcccaaagagttattattgtttctgttattgttgttgttatcattgctgtcattattatttccgcagagaaatgtttcatccttctccacgtagaaatagcaaggaaagg

SEQ ID NO: 51649 - DNA, 599 bp, Chicken  19866894299590_5
tttgtttcattttcaagctttgctttttaaatcacwgttttaatgttttttggaggattgcaacctcaagagaatgagccatcctgagctagataaacagtttacaaagtgcatcagcactgccaagtacttgctgcaaggagcttcacaaatccctgctattgcaggaaatccatgcagctactaagtgtccacatacatattagctaggtgtgaaaaaacagaattccaatgacattttgagcraataatataagggactgagcaatactgcagcaaaaaattcaacccatggtacrwaacagttatgagaaaccactgtgtttagctccatgcttccctggatgctagaggggaatacttgaatagcagatttccccagttacgatagccaaggcctcaatctaagtttccgtagcatttttgtattgttatgacctgtttcaacatggcaatgactctgaaaacttgaattccttgggcaagctatcccaaagagttattattgtttctgttattgttgttgttatcattgctgtcattattatttccgcagagaaatgtttcatccttctccacgtagaaatagcaaggaaagg

SEQ ID NO: 51650 - DNA, 600 bp, Chicken  19866894299596_1
gagaagacgctgaagccgggcttacattcatgtgtgtgcttgggatttcataaacgctcacccaggagccaattatgcagatggtgcatctagagaaggttctgggtggatccagctcagacctgacggtgtcattccctcattacatctccttaatcacaagaacaagtcggtacccgctcctcggagccacaagaaaggagcagcgctcatgagcccccgctgccgggcccaccccccgccccgctcccgctgcctcgtggggctgctccggcccggccgctgccgtgagagcgccgrgccgggcgggctgcggagccccgggggctcggagagagccccaaagctcggccaggcaacacagcagctgcctctgcgtggctacaacgcggggagctccgcacaaatccctcctcgacagagccccgaaagccgggcgggggacgcaggaccctcagtaaggtggggcgggggtgggagaggagagacggcccccaaggcccgagctggggggcggaggacacctctgttcctcccgaccacccgcagccgatgtactgagggacgaggcccctcgagaggcaacgaggatcggttccg

SEQ ID NO: 51651 - DNA, 599 bp, Chicken  19866894299597_1
  misc_feature (1)..(100): n is any nucleotide
nnnnnnnnnnnnnnnnnnnnnnnnnnnnnnnnnnnnnnnnnnnnnnnnnnnnnnnnnnnnnnnnnnnnnnnnnnnnnnnnnnnnnnnnnnnnnnnnnnnntatttttatgcaagacaaagaatgctgcttaaacaaaagacagcacaaagccatttgtaatattgatttgatagatatacataaacatagcaatggaggggggaaaaaagattcattactttagttacttgaatttcagctgttaaagaggacagaagcatgggcatagacagtgttcatctaaatatgcagagtttacraatgccagaaatattcacggaaatagacaaaagttttgttgacaccgaggttttccagtgcaataagaaagacttaaagtgccactatttatttttcagctcatagttatttaaaaatatttctagaaattatgagtgtatatgtatttttaagtgttgtaaataaatgtcacacacggaatgctgaaaaagctatcggaatttcacactttgtgcatgaatatctacttagatttttttccataatacatctctggctragtagaagagttttgtaaagagaacaaacttttctctat

SEQ ID NO: 51652 - DNA, 600 bp, Chicken  19866894299597_2
tgggcatagacagtgttcatctaaatatgcagagtttacraatgccagaaatattcacggaaatagacaaaagttttgttgacaccgaggttttccagtgcaataagaaagacttaaagtgccactatttatttttcagctcatagttatttaaaaatatttctagaaattatgagtgtatatgtatttttaagtgttgtaaataaatgtcacacacggaatgctgaaaaagctatcggaatttcacactttgtgcatgaatatctacttagatttttttccataatacatctctggctragtagaagagttttgtaaagagaacaaacttttctctatgaaaatccatttcctcataattctataataaacatctgttgatttgatgttacagaagatgtacaaatttattctgtcattcatccaactctttcccacaagtaatgtaaacttatggtaagatgaaacacagatagcaagtttcgcagatcacccccaaaagtaagacacataaaaacagccatctcctattaacatgcatttacatcacatgtatgaggctcttctgagaccttcttaagaccttctacgtaagtacta

SEQ ID NO: 51653 - DNA, 600 bp, Chicken  19866894299601_1
acatcgaagtggctcgtgctgcccgcctggcacagatcttcaaggagatttgtgacagcatcatagcctacaaaggtgaaggtgacactcctgaaaggtctccatggagactttttcagcctctggagcaatggattctctgaatacaaaatattagaaatttgaaaaaacaaaagctgatgtcaggatgttaaataaccttttccttttttttccccttcctcctgctaccagcgttatcctcaaccccattctctgccaccacgatctgcagataatgcttttaaatgggttttttgrtttttttggttttttttccagtatttcagcaaaatggtgccatttaaactgcaaggagcccatcctgcgtttcggtacagagcagagcagccaacttcttggcaccarcttgatttcagttycctgctagtggaagggccttttgattttattaaacctaagttgaatgttgttagttactttccaagtttcactccagtaattgttgctaaactgtgtgttccygttgcagattcctccaggcaggctcttgcagctcccctcctgaacctgcccccaaagaagaagtaagtactgctc

SEQ ID NO: 51654 - DNA, 600 bp, Chicken  19866894299601_10
taaaaagatattgtatagaaagagaacctctgataatccttttgtgatgatcggacgttgataacagtctatgtgcttcaggttactctgagtgctttttgttgccgtaggtgggacgaatagacggtaaaaaacrtgcatcaggagctaacctaaagaaactgcagtgcttctgggtggaggggaattgttctttagtgccatacataagataggtgggcttgctgctcaggccaaggtgcacggttgtgttatcacatcagtggctgcayctttaagagtgcatgcaaacaaacaggrggagtgcactgaaaacctrcgagggaaaagcaaacacgtccaaaggttttaactcttccttttgtccttaattcagaaatattatggcaggaagtctccaactggtcgtgatgtgtgcaggctgcggaaggcgtattacaacgcccgccatgaggcatctgcccagattgatgagatagtgggagagacagcaagcgaggctgacagcagcgagacgtctgtctgcgagaaggagaatgggcacgagaaggatgaggatgtcatccgctgcatctgtggcctttacaaagatgaaggact

SEQ ID NO: 51655 - DNA, 600 bp, Chicken  19866894299601_11
aagagaacctctgataatccttttgtgatgatcggacgttgataacagtctatgtgcttcaggttactctgagtgctttttgttgccgtaggtgggacgaatagacggtaaaaaacrtgcatcaggagctaacctaaagaaactgcagtgcttctgggtggaggggaattgttctttagtgccatacataagataggtgggcttgctgctcaggccaaggtgcacggttgtgttatcacatcagtggctgcayctttaagagtgcatgcaaacaaacaggrggagtgcactgaaaacctrcgagggaaaagcaaacacgtccaaaggttttaactcttccttttgtccttaattcagaaatattatggcaggaagtctccaactggtcgtgatgtgtgcaggctgcggaaggcgtattacaacgcccgccatgaggcatctgcccagattgatgagatagtgggagagacagcaagcgaggctgacagcagcgagacgtctgtctgcgagaaggagaatgggcacgagaaggatgaggatgtcatccgctgcatctgtggcctttacaaagatgaaggactcatgatccagtgtgaaaag

SEQ ID NO: 51656 - DNA, 600 bp, Chicken  19866894299601_2
gtggctcgtgctgcccgcctggcacagatcttcaaggagatttgtgacagcatcatagcctacaaaggtgaaggtgacactcctgaaaggtctccatggagactttttcagcctctggagcaatggattctctgaatacaaaatattagaaatttgaaaaaacaaaagctgatgtcaggatgttaaataaccttttccttttttttccccttcctcctgctaccagcgttatcctcaaccccattctctgccaccacgatctgcagataatgcttttaaatgggttttttgttttttttrgttttttttccagtatttcagcaaaatggtgccatttaaactgcaaggagcccatcctgcgtttcggtacagagcagagcagccaacttcttggcaccarcttgatttcagttycctgctagtggaagggccttttgattttattaaacctaagttgaatgttgttagttactttccaagtttcactccagtaattgttgctaaactgtgtgttccygttgcagattcctccaggcaggctcttgcagctcccctcctgaacctgcccccaaagaagaagtaagtactgctcagagtaac

SEQ ID NO: 51657 - DNA, 600 bp, Chicken  19866894299601_3
ctgcccgcctggcacagatcttcaaggagatttgtgacagcatcatagcctacaaaggtgaaggtgacactcctgaaaggtctccatggagactttttcagcctctggagcaatggattctctgaatacaaaatattagaaatttgaaaaaacaaaagctgatgtcaggatgttaaataaccttttccttttttttccccttcctcctgctaccagcgttatcctcaaccccattctctgccaccacgatctgcagataatgcttttaaatgggttttttgttttttttggttttttttrcagtatttcagcaaaatggtgccatttaaactgcaaggagcccatcctgcgtttcggtacagagcagagcagccaacttcttggcaccarcttgatttcagttycctgctagtggaagggccttttgattttattaaacctaagttgaatgttgttagttactttccaagtttcactccagtaattgttgctaaactgtgtgttccygttgcagattcctccaggcaggctcttgcagctcccctcctgaacctgcccccaaagaagaagtaagtactgctcagagtaacccatagtgtt

SEQ ID NO: 51658 - DNA, 600 bp, Chicken  19866894299601_4
gactttttcagcctctggagcaatggattctctgaatacaaaatattagaaatttgaaaaaacaaaagctgatgtcaggatgttaaataaccttttccttttttttccccttcctcctgctaccagcgttatcctcaaccccattctctgccaccacgatctgcagataatgcttttaaatgggttttttgttttttttggttttttttccagtatttcagcaaaatggtgccatttaaactgcaaggagcccatcctgcgtttcggtacagagcagagcagccaacttcttggcaccarcttgatttcagttycctgctagtggaagggccttttgattttattaaacctaagttgaatgttgttagttactttccaagtttcactccagtaattgttgctaaactgtgtgttccygttgcagattcctccaggcaggctcttgcagctcccctcctgaacctgcccccaaagaagaagtaagtactgctcagagtaacccatagtgttccacgatggatttgcatacatttgagatgctgatgaaaatgacattctgcacacaccaytctcattttagaaatgcagactattacgaaa

SEQ ID NO: 51659 - DNA, 600 bp, Chicken  19866894299601_5
ctggagcaatggattctctgaatacaaaatattagaaatttgaaaaaacaaaagctgatgtcaggatgttaaataaccttttccttttttttccccttcctcctgctaccagcgttatcctcaaccccattctctgccaccacgatctgcagataatgcttttaaatgggttttttgttttttttggttttttttccagtatttcagcaaaatggtgccatttaaactgcaaggagcccatcctgcgtttcggtacagagcagagcagccaacttcttggcaccarcttgatttcagttycctgctagtggaagggccttttgattttattaaacctaagttgaatgttgttagttactttccaagtttcactccagtaattgttgctaaactgtgtgttccygttgcagattcctccaggcaggctcttgcagctcccctcctgaacctgcccccaaagaagaagtaagtactgctcagagtaacccatagtgttccacgatggatttgcatacatttgagatgctgatgaaaatgacattctgcacacaccaytctcattttagaaatgcagactattacgaaaagatctctgaccca

SEQ ID NO: 51660 - DNA, 600 bp, Chicken  19866894299601_6
tgctaccagcgttatcctcaaccccattctctgccaccacgatctgcagataatgcttttaaatgggttttttgttttttttggttttttttccagtatttcagcaaaatggtgccatttaaactgcaaggagcccatcctgcgtttcggtacagagcagagcagccaacttcttggcaccarcttgatttcagttycctgctagtggaagggccttttgattttattaaacctaagttgaatgttgttagttactttccaagtttcactccagtaattgttgctaaactgtgtgttccygttgcagattcctccaggcaggctcttgcagctcccctcctgaacctgcccccaaagaagaagtaagtactgctcagagtaacccatagtgttccacgatggatttgcatacatttgagatgctgatgaaaatgacattctgcacacaccaytctcattttagaaatgcagactattacgaaaagatctctgacccattggaccttgccaccattgagaaacagatcttgactggctattacaaaactgtggaagcttttgatggggacatgctgaaggtcttccggaacgcagaggtga

SEQ ID NO: 51661 - DNA, 600 bp, Chicken  19866894299601_7
cagagcagagcagccaacttcttggcaccarcttgatttcagttycctgctagtggaagggccttttgattttattaaacctaagttgaatgttgttagttactttccaagtttcactccagtaattgttgctaaactgtgtgttccygttgcagattcctccaggcaggctcttgcagctcccctcctgaacctgcccccaaagaagaagtaagtactgctcagagtaacccatagtgttccacgatggatttgcatacatttgagatgctgatgaaaatgacattctgcacacaccaytctcattttagaaatgcagactattacgaaaagatctctgacccattggaccttgccaccattgagaaacagatcttgactggctattacaaaactgtggaagcttttgatggggacatgctgaaggtcttccggaacgcagaggtgaggctccctctggccctaaggctgttacacacagggaggatatatcctagctgaatgcctttcctgacttacagtcagaaaagataaaaagatattgtatagaaagagaacctctgataatccttttgtgatgatcggacgttgataacagtc

SEQ ID NO: 51662 - DNA, 600 bp, Chicken  19866894299601_8
aacagatcttgactggctattacaaaactgtggaagcttttgatggggacatgctgaaggtcttccggaacgcagaggtgaggctccctctggccctaaggctgttacacacagggaggatatatcctagctgaatgcctttcctgacttacagtcagaaaagataaaaagatattgtatagaaagagaacctctgataatccttttgtgatgatcggacgttgataacagtctatgtgcttcaggttactctgagtgctttttgttgccgtaggtgggacgaatagacggtaaaaaacrtgcatcaggagctaacctaaagaaactgcagtgcttctgggtggaggggaattgttctttagtgccatacataagataggtgggcttgctgctcaggccaaggtgcacggttgtgttatcacatcagtggctgcayctttaagagtgcatgcaaacaaacaggrggagtgcactgaaaacctrcgagggaaaagcaaacacgtccaaaggttttaactcttccttttgtccttaattcagaaatattatggcaggaagtctccaactggtcgtgatgtgtgcaggctgcggaaggcgtat

SEQ ID NO: 51663 - DNA, 600 bp, Chicken  19866894299601_9
gcctttcctgacttacagtcagaaaagataaaaagatattgtatagaaagagaacctctgataatccttttgtgatgatcggacgttgataacagtctatgtgcttcaggttactctgagtgctttttgttgccgtaggtgggacgaatagacggtaaaaaacrtgcatcaggagctaacctaaagaaactgcagtgcttctgggtggaggggaattgttctttagtgccatacataagataggtgggcttgctgctcaggccaaggtgcacggttgtgttatcacatcagtggctgcayctttaagagtgcatgcaaacaaacaggrggagtgcactgaaaacctrcgagggaaaagcaaacacgtccaaaggttttaactcttccttttgtccttaattcagaaatattatggcaggaagtctccaactggtcgtgatgtgtgcaggctgcggaaggcgtattacaacgcccgccatgaggcatctgcccagattgatgagatagtgggagagacagcaagcgaggctgacagcagcgagacgtctgtctgcgagaaggagaatgggcacgagaaggatgaggatgtcatccgctgca

SEQ ID NO: 51664 - DNA, 600 bp, Chicken  19866894299607_1
accccacataacctggacagtggtacaatgagggaactagacatactgaatgacttcagtgcgtcactggacaatggaagaggcactgatgtcgtatctctggacttcattatggcctttcgcgctgttccccactacatctctctctccaaactggatagatatggatttgatgggtggactgtttgatgggcgaagagctggttgtgagatcgtccccagcaagtggtggtcaatggctcagtgtctggatggagatgggtgacagtggtgtcccccaggggtcagtattggcaccartgctctttaacatccttatcgatgacactgacagtgggatcaacacacccaatggacaggatgccatccagagagacctggacaggctgagcagtgggagcaagagaacttcatgaggttcagcaaagccaactgcaaggtctgcaccacggtcatggcaactgccactgtcagtacaagctggaggatggaaggatggagggccctactgaaaaggacctgggggtactggtggatggcagatggatatgagccagcactgtgccctcagccctaaagccaaccatatcctgttcctga

SEQ ID NO: 51665 - DNA, 600 bp, Chicken  19866894299607_2
gatggaaggatggagggccctactgaaaaggacctgggggtactggtggatggcagatggatatgagccagcactgtgccctcagccctaaagccaaccatatcctgttcctgaaagacagtaaaaaattatttccatttatgtggaaatggtgatttatggcggtttcatagaaccatagaatggcctgggttggaaaggaccacaatgctcatccagttccaaccccctgctatgtgcagggtcgccaaccagcagaccaggctgcccagagccacatccagcctggccttgaatgcytgcagggatggggcatccacagcctcctcaggcaatctgttccagwgcrtcaccaatttgtggctgtgatctgtggttggctagaaaaattagtcagctttctgtaacgttttgctgtatttaaagaataattttaggctgcttttccttaattgtataacttgtgattattgctagaaggaagaggttcccagctaaccagcaataggatgagaggtgatggcctcaagttgcaccaggggaggttaaggtcgagtgttmgaacttccttctgtgaaagagcagtcaggcactgctacc

SEQ ID NO: 51666 - DNA, 600 bp, Chicken  19866894299607_3
tggatggcagatggatatgagccagcactgtgccctcagccctaaagccaaccatatcctgttcctgaaagacagtaaaaaattatttccatttatgtggaaatggtgatttatggcggtttcatagaaccatagaatggcctgggttggaaaggaccacaatgctcatccagttccaaccccctgctatgtgcagggtcgccaaccagcagaccaggctgcccagagccacatccagcctggccttgaatgcytgcagggatggggcatccacagcctcctcaggcaatctgttccagwgcrtcaccaatttgtggctgtgatctgtggttggctagaaaaattagtcagctttctgtaacgttttgctgtatttaaagaataattttaggctgcttttccttaattgtataacttgtgattattgctagaaggaagaggttcccagctaaccagcaataggatgagaggtgatggcctcaagttgcaccaggggaggttaaggtcgagtgttmgaacttccttctgtgaaagagcagtcaggcactgctacccagagagcgggtggtgtcaccatcctggggaggtgtcccagagcca

SEQ ID NO: 51667 - DNA, 600 bp, Chicken  19866894299607_4
atggcagatggatatgagccagcactgtgccctcagccctaaagccaaccatatcctgttcctgaaagacagtaaaaaattatttccatttatgtggaaatggtgatttatggcggtttcatagaaccatagaatggcctgggttggaaaggaccacaatgctcatccagttccaaccccctgctatgtgcagggtcgccaaccagcagaccaggctgcccagagccacatccagcctggccttgaatgcytgcagggatggggcatccacagcctcctcaggcaatctgttccagwgcrtcaccaatttgtggctgtgatctgtggttggctagaaaaattagtcagctttctgtaacgttttgctgtatttaaagaataattttaggctgcttttccttaattgtataacttgtgattattgctagaaggaagaggttcccagctaaccagcaataggatgagaggtgatggcctcaagttgcaccaggggaggttaaggtcgagtgttmgaacttccttctgtgaaagagcagtcaggcactgctacccagagagcgggtggtgtcaccatcctggggaggtgtcccagagccatgg

SEQ ID NO: 51668 - DNA, 490 bp, Chicken  19866894299607_5
aggctgcccagagccacatccagcctggccttgaatgcytgcagggatggggcatccacagcctcctcaggcaatctgttccagwgcrtcaccaatttgtggctgtgatctgtggttggctagaaaaattagtcagctttctgtaacgttttgctgtatttaaagaataattttaggctgcttttccttaattgtataacttgtgattattgctagaaggaagaggttcccagctaaccagcaataggatgagaggtgatggcctcaagttgcaccaggggaggttaaggtcgagtgttmgaacttccttctgtgaaagagcagtcaggcactgctacccagagagcgggtggtgtcaccatcctggggaggtgtcccagagccatgggagacgtggcactgagggacacgttgggtgggttgggttttggggaacttagagacctttttaaccttcatgtttctattgttctttgacaggggcctgcaa

SEQ ID NO: 51669 - DNA, 600 bp, Chicken  19866894299612_1
ttgcattactttcacttcagttaaagtgataggcgacgtcaagctgctgccagtttctgccacactcactgatttgtcagacagatgggtaatttaaaggccatgcgccgcattgtgtcaggaaaaatacggttgggttgggagagtctgacagatagaggcttgtctgatcgatgtatgcattgtgacacttcctcacaaaagattattggtgttagcctacaatctcatacatcaaagacttctggtgaatactagagcaaatcctcctgagcacttcaagcagccattgataaatcraggctgaactcctaggcagggttaggattagcagcccaaagggaaagaggggaacaaatgacaataaatcctaggtcagttttaacttctctggtgtatttcatcaaaggatttccaggttgaagaactcagccccgcactcatcacactttcctaacaacaaaataccacacgcaattcttctgcctcatgggcacatccctctgggattagcttcataaaaaaattctgacagtttcttaaataagcaagctgcttcttaaagtagccacaaaattcttaatactctgtgtctgaaag

SEQ ID NO: 51670 - DNA, 600 bp, Chicken  19866894299614_1
ctagattgctatttgtttttccttgatcctccttctgcctgtatgattttttgatttatcattatacttaggaatattttttcacataaatatatatatgcataaaattatagaaggcatactttaaagtgggattattctgaactatttgcaaatagtgtctgtctcaacaatctgaaaaacatttgtaaattgcaattgaataaaagaggtatatgcacccatcaagaaaaaatttcaatatagaatatttcatttttaagtaagttgtttcttcaactcaaggagaaaacaaggttrtatagtataagcaagaagtagctttaatcaacaaaatggaaaattatccattaaaaaaaagagctttcacacagtttcttccaatgggattgtttagctcggagaacaaaaggcgccggggggacctcattgcagcctttcagtacttgaagggagcatacagacaggaaggggctgtttacgagggtggatagtgatagggcaagggagaatggtcttaaactgagacaggggagatttaggttagacattaggaggaagtttttcactcagagggtggtgacacactggaacaggttg

SEQ ID NO: 51671 - DNA, 599 bp, Chicken  19866894299615_1
  misc_feature (1)..(156): n is any nucleotide
nnnnnnnnnnnnnnnnnnnnnnnnnnnnnnnnnnnnnnnnnnnnnnnnnnnnnnnnnnnnnnnnnnnnnnnnnnnnnnnnnnnnnnnnnnnnnnnnnnnnnnnnnnnnnnnnnnnnnnnnnnnnnnnnnnnnnnnnnnnnnnnnnnnnnnnnnnnngaaaagcttctgtcctaagcgcacttgcagatctattgtagtgaattttgccttccttggatgaaacaacaaagaaataccactgaaagagcctgctgaggcaaatcaaggctgggctcatctgcagaaatctacaaggcagasctggacagaaaaggaagaaacaatctgttgaacagctgtgtggacagcaaataatggatgagaaaacaagccattttaattgtctcwggtcaatgctttaccttgttattctaaagtaagcagtctcttctacatcctttacaattctttccccttccctcctatacacctatatatccccatttgctggttctccayttgcactggagaaatgcagcattgaacagaagactgtgagaaaacctggttgcagcatgtagagattttcccagttgagggaatacttatggggtgggcta

SEQ ID NO: 51672 - DNA, 599 bp, Chicken  19866894299615_2
  misc_feature (1)..(69): n is any nucleotide
nnnnnnnnnnnnnnnnnnnnnnnnnnnnnnnnnnnnnnnnnnnnnnnnnnnnnnnnnnnnnnnnnnnnngaaaagcttctgtcctaagcgcacttgcagatctattgtagtgaattttgccttccttggatgaaacaacaaagaaataccactgaaagagcctgctgaggcaaatcaaggctgggctcatctgcagaaatctacaaggcagasctggacagaaaaggaagaaacaatctgttgaacagctgtgtggacagcaaataatggatgagaaaacaagccattttaattgtctcwggtcaatgctttaccttgttattctaaagtaagcagtctcttctacatcctttacaattctttccccttccctcctatacacctatatatccccatttgctggttctccayttgcactggagaaatgcagcattgaacagaagactgtgagaaaacctggttgcagcatgtagagattttcccagttgagggaatacttatggggtgggctaaactgtttgagtgctttgtactagcagcgtagttcaaaaacatcctgctggagactagacttatcggacagctttgtaagtcaccct

SEQ ID NO: 51673 - DNA, 600 bp, Chicken  19866894299615_3
gaattttgccttccttggatgaaacaacaaagaaataccactgaaagagcctgctgaggcaaatcaaggctgggctcatctgcagaaatctacaaggcagasctggacagaaaaggaagaaacaatctgttgaacagctgtgtggacagcaaataatggatgagaaaacaagccattttaattgtctcwggtcaatgctttaccttgttattctaaagtaagcagtctcttctacatcctttacaattctttccccttccctcctatacacctatatatccccatttgctggttctccayttgcactggagaaatgcagcattgaacagaagactgtgagaaaacctggttgcagcatgtagagattttcccagttgagggaatacttatggggtgggctaaactgtttgagtgctttgtactagcagcgtagttcaaaaacatcctgctggagactagacttatcggacagctttgtaagtcacccttctagtattttcttgtacattctgtattaggtagacataaaagagtccccgcgtctgtagctctccaagcagcatcacagcggacgtcactggtcttcctttgggttgctag

SEQ ID NO: 51674 - DNA, 600 bp, Chicken  19866894299615_4
tgtcatctctctccttaaaaatcccaaaccttctcaccgggggaaactgcaaagctgtgctggcacaacgatgttctgcttgcgctgaatttgcagagcagaaggatatattcactgtcagagcagaaaggaagcaccctcctccctccccccacaaaaagctattttttgcaggcgttgtcatatcttatccccaggaagagaagagggctgtgctagaaagtcttcagattcacattcgctcccttttgctccgtccttcacagcacagctgtaaccatttatcaatacaagggaggrcaactggcaacaagcaagctaggcagagtcctctaatgaaaacaaatccttaggagaggatgaagtagctcacggatccgcctgctgaaacccactcccaccgcaataaggttttcagcactrctcacatttagggacaggagggtatgaacggtcgcagcactttacccaaagtaatttggggtccaaaagcccaagtgaataaagcaccaggggactcgagatacataatcagaataaataagattttgcgctgacagagcatccgtcatctgaaagtatgcacagatattaattaag

SEQ ID NO: 51675 - DNA, 600 bp, Chicken  19866894299615_5
cagaaaggaagcaccctcctccctccccccacaaaaagctattttttgcaggcgttgtcatatcttatccccaggaagagaagagggctgtgctagaaagtcttcagattcacattcgctcccttttgctccgtccttcacagcacagctgtaaccatttatcaatacaagggaggrcaactggcaacaagcaagctaggcagagtcctctaatgaaaacaaatccttaggagaggatgaagtagctcacggatccgcctgctgaaacccactcccaccgcaataaggttttcagcactrctcacatttagggacaggagggtatgaacggtcgcagcactttacccaaagtaatttggggtccaaaagcccaagtgaataaagcaccaggggactcgagatacataatcagaataaataagattttgcgctgacagagcatccgtcatctgaaagtatgcacagatattaattaagctctctaacccccaggtgaagtagattagcagctttatccccgttttacagaggtttagagcaaagtgtgacacaccacagctgacaggaggagctggagctggccgtgcaggggctgagcaa

SEQ ID NO: 51676 - DNA, 599 bp, Chicken  19866894299616_1
  misc_feature (1)..(242): n is any nucleotide
nnnnnnnnnnnnnnnnnnnnnnnnnnnnnnnnnnnnnnnnnnnnnnnnnnnnnnnnnnnnnnnnnnnnnnnnnnnnnnnnnnnnnnnnnnnnnnnnnnnnnnnnnnnnnnnnnnnnnnnnnnnnnnnnnnnnnnnnnnnnnnnnnnnnnnnnnnnnnnnnnnnnnnnnnnnnnnnnnnnnnnnnnnnnnnnnnnnnnnnnnnnnnnnnnnnnnnnnnnnnnnnnnnnnnnnnnnnnnnnnnnccatagcaaaagcaagactcttcatttagtctatcattcaaagagtggcaacagggakagggggagaaaacaagacctgcatggacagcatttaagggcttttagaatgccatttctgcctcctagagtcaggctttcaggaagatgcatgctcagcccttctcrttcatagcagcagcaccacatgttttctacagatgtttgtgctgaaccatgcaagtactttgacaaagactatttgcttgtctaacacagttgggcaaatgtccccatgacagattaatggactcagtgacagataggagaagaaaacacagtcaaagtacaaaggaaaaaaaaaaaaagggggttggctgt

SEQ ID NO: 51677 - DNA, 599 bp, Chicken  19866894299616_2
  misc_feature (1)..(135): n is any nucleotide
nnnnnnnnnnnnnnnnnnnnnnnnnnnnnnnnnnnnnnnnnnnnnnnnnnnnnnnnnnnnnnnnnnnnnnnnnnnnnnnnnnnnnnnnnnnnnnnnnnnnnnnnnnnnnnnnnnnnnnnnnnnnnnnnnnnnnnnccatagcaaaagcaagactcttcatttagtctatcattcaaagagtggcaacagggakagggggagaaaacaagacctgcatggacagcatttaagggcttttagaatgccatttctgcctcctagagtcaggctttcaggaagatgcatgctcagcccttctcrttcatagcagcagcaccacatgttttctacagatgtttgtgctgaaccatgcaagtactttgacaaagactatttgcttgtctaacacagttgggcaaatgtccccatgacagattaatggactcagtgacagataggagaagaaaacacagtcaaagtacaaaggaaaaaaaaaaaaagggggttggctgtcctgcttgaatcagcccggaggactgtttattccaagcttaaatctgctccgaactgctttctctcaaaaccaagcgctgatacaatctttgcaactgactgtatca

SEQ ID NO: 51678 - DNA, 600 bp, Chicken  19866894299647_1
gaaagcatttatggtaaaatattagttcaaaaaaatgtataatccttggaattactttgaaacaaaatatgtccttcaaaacatttcaggcaagcataatgctataacaatttgttataactagcttgtgacagaattactcttattaataagctctcggtttataagctggatttcttactgagttcagcttaagtaaagttttctgccatctgccattctggaagtttcttaccccagtacatttctgttcctatgttgtctgatcactaggctttgccgcaacaaatgtatttaatrtttgtaataataagctaaatttagatgtctagattttgaaattgttcgttgcagatattagaaattggccacycaggacactgaaaccaactaataaaaatgaggtggttaagaagtctgtaactgagacacagttgcttctttytcagccactgatgaaygtactgtagaaatctaagttacttttccaccactgagcaatgagatttttagcacaacgcagtgtttctgccagtcagtggggattagaacagctaaacagagacttgaaaagaatcattgcttgaagccttcatgatg

SEQ ID NO: 51679 - DNA, 600 bp, Chicken  19866894299647_2
cttcaaaacatttcaggcaagcataatgctataacaatttgttataactagcttgtgacagaattactcttattaataagctctcggtttataagctggatttcttactgagttcagcttaagtaaagttttctgccatctgccattctggaagtttcttaccccagtacatttctgttcctatgttgtctgatcactaggctttgccgcaacaaatgtatttaatrtttgtaataataagctaaatttagatgtctagattttgaaattgttcgttgcagatattagaaattggccacycaggacactgaaaccaactaataaaaatgaggtggttaagaagtctgtaactgagacacagttgcttctttytcagccactgatgaaygtactgtagaaatctaagttacttttccaccactgagcaatgagatttttagcacaacgcagtgtttctgccagtcagtggggattagaacagctaaacagagacttgaaaagaatcattgcttgaagccttcatgatgtatttgaaattttaattgatatttaactacttttaatatactgccagaactcttagtttgctatgctgcatat

SEQ ID NO: 51680 - DNA, 600 bp, Chicken  19866894299647_3
ttaataagctctcggtttataagctggatttcttactgagttcagcttaagtaaagttttctgccatctgccattctggaagtttcttaccccagtacatttctgttcctatgttgtctgatcactaggctttgccgcaacaaatgtatttaatrtttgtaataataagctaaatttagatgtctagattttgaaattgttcgttgcagatattagaaattggccacycaggacactgaaaccaactaataaaaatgaggtggttaagaagtctgtaactgagacacagttgcttctttytcagccactgatgaaygtactgtagaaatctaagttacttttccaccactgagcaatgagatttttagcacaacgcagtgtttctgccagtcagtggggattagaacagctaaacagagacttgaaaagaatcattgcttgaagccttcatgatgtatttgaaattttaattgatatttaactacttttaatatactgccagaactcttagtttgctatgctgcatatcccaagcatggaaatgttacctcctttcatttcccagtgccaacaatgtcaaataagtctcattttgaagtt

SEQ ID NO: 51681 - DNA, 600 bp, Chicken  19866894299647_4
ttataagctggatttcttactgagttcagcttaagtaaagttttctgccatctgccattctggaagtttcttaccccagtacatttctgttcctatgttgtctgatcactaggctttgccgcaacaaatgtatttaatrtttgtaataataagctaaatttagatgtctagattttgaaattgttcgttgcagatattagaaattggccacycaggacactgaaaccaactaataaaaatgaggtggttaagaagtctgtaactgagacacagttgcttctttytcagccactgatgaaygtactgtagaaatctaagttacttttccaccactgagcaatgagatttttagcacaacgcagtgtttctgccagtcagtggggattagaacagctaaacagagacttgaaaagaatcattgcttgaagccttcatgatgtatttgaaattttaattgatatttaactacttttaatatactgccagaactcttagtttgctatgctgcatatcccaagcatggaaatgttacctcctttcatttcccagtgccaacaatgtcaaataagtctcattttgaagtttatcagaaagaaagta

SEQ ID NO: 51682 - DNA, 600 bp, Chicken  19866894299657_1
ctggctagatgtttttgtgcagctcaagtaggttgtgtagaaaagcttttctcgtagtcattcttgcttaagtgagactttttccaatctcttctatgaacataacaaacacaatcacaaacagcaattcagttgcagtgttcttgtcagggattcttaatattaccatctaaccacaagcaaataattattctaacttactattaacgtgcattaacttcctctgcaagtattaatagatctttgttttatcattgttttattagtagatctgcattttatcaatctcttatctggatrtttattttactcttttcaaaaataagcaactgaatcgatcccagtatctgagtgcttccaactttttttacaacaacatgccaaactgtggatatggaggaccttaagctgtttgtttggaaagtaggactgtcagcagtaatttattcctagcagggcccttcctctttgtttagtacagttctgtaggactgctgtagaattcttttgtaaatctgccataaaatgttctaacttcttctctgaaatgctggtatgtatctgtcatataagcagactacaatttccatatgcatccac

SEQ ID NO: 51683 - DNA, 599 bp, Chicken  19866894299673_1
  misc_feature (1)..(216): n is any nucleotide
nnnnnnnnnnnnnnnnnnnnnnnnnnnnnnnnnnnnnnnnnnnnnnnnnnnnnnnnnnnnnnnnnnnnnnnnnnnnnnnnnnnnnnnnnnnnnnnnnnnnnnnnnnnnnnnnnnnnnnnnnnnnnnnnnnnnnnnnnnnnnnnnnnnnnnnnnnnnnnnnnnnnnnnnnnnnnnnnnnnnnnnnnnnnnnnnnnnnnnnnnnnnnnnnnnnnnnnnttcatttgtaaacataggattcattgcccttgtagacgtttgatcctgatctaaccactcctgtcaccaacttcctccttcccmttgatccaactgagctatattggaattagaagtgttagtcgttaaacaacagatttgtagcaatatggtttgcagccttttctcacttactttcttacatgggattaatcctaatgaaatcccaagaactgttttgagttacacccataaaattaaaaccagaatgagacctgtggattttacagaccaaatcacatgatcgatttgttgctagtcagaactttctgagtataggcactaaaaatcataaactcggcatagaagcaagaattctgggcatttttgattgtcttttaata

SEQ ID NO: 51684 - DNA, 600 bp, Chicken  19866894299673_2
cagatttgtagcaatatggtttgcagccttttctcacttactttcttacatgggattaatcctaatgaaatcccaagaactgttttgagttacacccataaaattaaaaccagaatgagacctgtggattttacagaccaaatcacatgatcgatttgttgctagtcagaactttctgagtataggcactaaaaatcataaactcggcatagaagcaagaattctgggcatttttgattgtcttttaataccaaatattcctggtgccaaattaccgtgaactagtttatgtcttttttwwwaaaaaaaaaaaacaaataaaacacaaaaatatgtggctttgcactgtagggatgttaaatgtctttgcagtattcaaacgtatgaagatttgaaatctgtaaatgttcaatgtttagaaactacagtactgattttactcagagccattaagaaacacagtgattaatctgggttttattttttttctttgtatatttattgaaaaaaaatgttgaaaattcataaatgtagtacatggtagaaaagtaaaatgaaagttctgtgttcttgaaatccttatcgggtttatgttttaat

SEQ ID NO: 51685 - DNA, 600 bp, Chicken  19866894299673_3
agatttgtagcaatatggtttgcagccttttctcacttactttcttacatgggattaatcctaatgaaatcccaagaactgttttgagttacacccataaaattaaaaccagaatgagacctgtggattttacagaccaaatcacatgatcgatttgttgctagtcagaactttctgagtataggcactaaaaatcataaactcggcatagaagcaagaattctgggcatttttgattgtcttttaataccaaatattcctggtgccaaattaccgtgaactagtttatgtcttttttwwwaaaaaaaaaaaacaaataaaacacaaaaatatgtggctttgcactgtagggatgttaaatgtctttgcagtattcaaacgtatgaagatttgaaatctgtaaatgttcaatgtttagaaactacagtactgattttactcagagccattaagaaacacagtgattaatctgggttttattttttttctttgtatatttattgaaaaaaaatgttgaaaattcataaatgtagtacatggtagaaaagtaaaatgaaagttctgtgttcttgaaatccttatcgggtttatgttttaatg

SEQ ID NO: 51686 - DNA, 600 bp, Chicken  19866894299673_4
gatttgtagcaatatggtttgcagccttttctcacttactttcttacatgggattaatcctaatgaaatcccaagaactgttttgagttacacccataaaattaaaaccagaatgagacctgtggattttacagaccaaatcacatgatcgatttgttgctagtcagaactttctgagtataggcactaaaaatcataaactcggcatagaagcaagaattctgggcatttttgattgtcttttaataccaaatattcctggtgccaaattaccgtgaactagtttatgtcttttttwwwaaaaaaaaaaaacaaataaaacacaaaaatatgtggctttgcactgtagggatgttaaatgtctttgcagtattcaaacgtatgaagatttgaaatctgtaaatgttcaatgtttagaaactacagtactgattttactcagagccattaagaaacacagtgattaatctgggttttattttttttctttgtatatttattgaaaaaaaatgttgaaaattcataaatgtagtacatggtagaaaagtaaaatgaaagttctgtgttcttgaaatccttatcgggtttatgttttaatgc

SEQ ID NO: 51687 - DNA, 600 bp, Chicken  19866894299675_1
aggaagatcattgccagcagttcaagagaggtaaccctccttctccactcagccctgacaaggcctcatttggaatactgtccagtatctggaccccctaatacaagagagacaaggatctcctggaatgagtccagtgaagggctacatgattaaggggcaggagcatccctcttatgaggaaagactgaaagagttgggcctgttcagcttggaaaagagaaagactggggggacttgattaatgtaagtatattattactatcattattatattattaatataaatatattattacwctcagtcaggagtataagtacctgaaggaagcgtataaagaggatggccgaactcttcttagtggtggcagacaacaggacaagaggcaacaggaacaaacagagaytcaggaagttacaggccttttctggcctgcctctatgtcctggtctcgtgtcagcaatcttcacccatgctacggcaccaggaacataggaggcagtcctggtgcaataaacatccagtaagccccagctttcctgacagtctttccaattcagcctgcaggagagctgtcacagctgctgactgtggtagca

SEQ ID NO: 51688 - DNA, 600 bp, Chicken  19866894299675_2
agagacaaggatctcctggaatgagtccagtgaagggctacatgattaaggggcaggagcatccctcttatgaggaaagactgaaagagttgggcctgttcagcttggaaaagagaaagactggggggacttgattaatgtaagtatattattactatcattattatattattaatataaatatattattacwctcagtcaggagtataagtacctgaaggaagcgtataaagaggatggccgaactcttcttagtggtggcagacaacaggacaagaggcaacaggaacaaacagagaytcaggaagttacaggccttttctggcctgcctctatgtcctggtctcgtgtcagcaatcttcacccatgctacggcaccaggaacataggaggcagtcctggtgcaataaacatccagtaagccccagctttcctgacagtctttccaattcagcctgcaggagagctgtcacagctgctgactgtggtagcaacaccatctgcgggtgctttgaggacgcagagccagaaagagagctggagggcagcaaagggcgttggtgaaagagctgcggcaaagaaagacagactgactttagg

SEQ ID NO: 51689 - DNA, 600 bp, Chicken  19866894299677_1
cacaggctatagtactactgaaatactcttgctatgtggatgaactttaatctgatattacaatgcaaactctctatgcagaatgccagacaggatagtggggactcatccttttgtataaaaggacattttatagtttcagttttgttaaaaacaggagaaaaggaagtatgcaataaaaaggatgtcttaccaaagggaaattcaggaagatcaataaatccctgcttcccacagtcaggtgtatggaaagcaagtggttgagacatcaggtgggctttcagcttagcagcttgcaarccctctttcatcagtttcacagtttccagtacagtatctgggtcaaaatgacagttgactccaacaatggaagcacctatgaggaggacagtaactgtttaaatcacatattcccaagaactaggtaatgaatgttcttagtcacagcacaccagaagcaaagcagtccgtctttacaccagccctatgaaaaggcatctgagctggagccagtctcagctctcatgtggcagatcataaccatctgcatttcagctgctctctttgccttccagatgaagtaccaagatgaaaagcatc

SEQ ID NO: 51690 - DNA, 600 bp, Chicken  19866894299681_1
acacacgatcacgtgaaacccttgctgcagtctctctcgtccggtgtctgcgtgccaagctgtattaccaactgcttggtctgtgcctaccttactgttcatagttagatgatgtagagcaacttggggtggctggcactcggaggctttgggaagagaaagataactctcctaatttttctcctctttcttacataaaaaaactaaattgtgttttactaaccacttcattgggcttttcttagatctgagttataaaaccatatcccttcataagtcttaaaactgcttaaaactttraaacatctgattttcttttcttctggcttttcaagctaatggccaaacagattgattcatggttttgattgaatatgttcygcatttaaatagtttawggacracatagttaggaagctacttattctatctgcatgaaagcttttcaatgaaagcaraaatggaaactaactgttcagtgtgttgtagaaataacaaaacaaatgctaccctctgttacatataccaacttaatttgcaagccagtggaggtctgtaagtatgtgtgagaggatagagttgatttcaaagtacttaagc

SEQ ID NO: 51691 - DNA, 600 bp, Chicken  19866894299681_2
tgtgcctaccttactgttcatagttagatgatgtagagcaacttggggtggctggcactcggaggctttgggaagagaaagataactctcctaatttttctcctctttcttacataaaaaaactaaattgtgttttactaaccacttcattgggcttttcttagatctgagttataaaaccatatcccttcataagtcttaaaactgcttaaaactttraaacatctgattttcttttcttctggcttttcaagctaatggccaaacagattgattcatggttttgattgaatatgttcygcatttaaatagtttawggacracatagttaggaagctacttattctatctgcatgaaagcttttcaatgaaagcaraaatggaaactaactgttcagtgtgttgtagaaataacaaaacaaatgctaccctctgttacatataccaacttaatttgcaagccagtggaggtctgtaagtatgtgtgagaggatagagttgatttcaaagtacttaagcattctttttctttaagcagtttttcttgcaatgttcttgagcttccttttctgtcctgcttactatgcttttgtcttcccc

SEQ ID NO: 51692 - DNA, 600 bp, Chicken  19866894299681_3
tcatagttagatgatgtagagcaacttggggtggctggcactcggaggctttgggaagagaaagataactctcctaatttttctcctctttcttacataaaaaaactaaattgtgttttactaaccacttcattgggcttttcttagatctgagttataaaaccatatcccttcataagtcttaaaactgcttaaaactttraaacatctgattttcttttcttctggcttttcaagctaatggccaaacagattgattcatggttttgattgaatatgttcygcatttaaatagtttawggacracatagttaggaagctacttattctatctgcatgaaagcttttcaatgaaagcaraaatggaaactaactgttcagtgtgttgtagaaataacaaaacaaatgctaccctctgttacatataccaacttaatttgcaagccagtggaggtctgtaagtatgtgtgagaggatagagttgatttcaaagtacttaagcattctttttctttaagcagtttttcttgcaatgttcttgagcttccttttctgtcctgcttactatgcttttgtcttccccaaagcctctgagtgttc

SEQ ID NO: 51693 - DNA, 600 bp, Chicken  19866894299681_4
gttagatgatgtagagcaacttggggtggctggcactcggaggctttgggaagagaaagataactctcctaatttttctcctctttcttacataaaaaaactaaattgtgttttactaaccacttcattgggcttttcttagatctgagttataaaaccatatcccttcataagtcttaaaactgcttaaaactttraaacatctgattttcttttcttctggcttttcaagctaatggccaaacagattgattcatggttttgattgaatatgttcygcatttaaatagtttawggacracatagttaggaagctacttattctatctgcatgaaagcttttcaatgaaagcaraaatggaaactaactgttcagtgtgttgtagaaataacaaaacaaatgctaccctctgttacatataccaacttaatttgcaagccagtggaggtctgtaagtatgtgtgagaggatagagttgatttcaaagtacttaagcattctttttctttaagcagtttttcttgcaatgttcttgagcttccttttctgtcctgcttactatgcttttgtcttccccaaagcctctgagtgttcacaac

SEQ ID NO: 51694 - DNA, 600 bp, Chicken  19866894299681_5
aaagataactctcctaatttttctcctctttcttacataaaaaaactaaattgtgttttactaaccacttcattgggcttttcttagatctgagttataaaaccatatcccttcataagtcttaaaactgcttaaaactttraaacatctgattttcttttcttctggcttttcaagctaatggccaaacagattgattcatggttttgattgaatatgttcygcatttaaatagtttawggacracatagttaggaagctacttattctatctgcatgaaagcttttcaatgaaagcaraaatggaaactaactgttcagtgtgttgtagaaataacaaaacaaatgctaccctctgttacatataccaacttaatttgcaagccagtggaggtctgtaagtatgtgtgagaggatagagttgatttcaaagtacttaagcattctttttctttaagcagtttttcttgcaatgttcttgagcttccttttctgtcctgcttactatgcttttgtcttccccaaagcctctgagtgttcacaaccagctgccttctgcatgtagtgttgcatgtaagtagatggccataaatggaaagt

SEQ ID NO: 51695 - DNA, 599 bp, Chicken  19866894299687_1
  misc_feature (1)..(53): n is any nucleotide
nnnnnnnnnnnnnnnnnnnnnnnnnnnnnnnnnnnnnnnnnnnnnnnnnnnnntttcccaagaagcccgagttgtttgccatgtttgagtgccaaaaaagatcttttgtctctttgggaactgaggccagacgtgctagggtagctgatatgtggaataaagaatgggagagctgatgtaagggggaagcagctgtgctttgctgcaccgcttttggagtcggggtttattaggtgatgtttctataacaccaactgtgtggttatcacttttgctttagaaaatctttccccacgtccygaaacacttccttctcccatcytcygccattcagttacagattcagcttatttgtaagggtcttaattaaagtgggaggaaggggaagagttacaggcttttgttcctaatttcagagtagactaatgatgctaagaatgtgtcgtaagaatgtagyatacaaggcaggcttctgaaaccttcttttgaaaggcactggagtttcacatccgtaaggcagggcacacaaagttgggtagttggaagattttctgttcctttgctcttttytgttttgtttttcttgtgtgtgttccttt

SEQ ID NO: 51696 - DNA, 599 bp, Chicken  19866894299687_2
  misc_feature (1)..(31): n is any nucleotide
nnnnnnnnnnnnnnnnnnnnnnnnnnnnnnntttcccaagaagcccgagttgtttgccatgtttgagtgccaaaaaagatcttttgtctctttgggaactgaggccagacgtgctagggtagctgatatgtggaataaagaatgggagagctgatgtaagggggaagcagctgtgctttgctgcaccgcttttggagtcggggtttattaggtgatgtttctataacaccaactgtgtggttatcacttttgctttagaaaatctttccccacgtccygaaacacttccttctcccatcytcygccattcagttacagattcagcttatttgtaagggtcttaattaaagtgggaggaaggggaagagttacaggcttttgttcctaatttcagagtagactaatgatgctaagaatgtgtcgtaagaatgtagyatacaaggcaggcttctgaaaccttcttttgaaaggcactggagtttcacatccgtaaggcagggcacacaaagttgggtagttggaagattttctgttcctttgctcttttytgttttgtttttcttgtgtgtgttcctttgtggtttctcctgcaagagaac

SEQ ID NO: 51697 - DNA, 599 bp, Chicken  19866894299687_3
  misc_feature (1)..(28): n is any nucleotide
nnnnnnnnnnnnnnnnnnnnnnnnnnnntttcccaagaagcccgagttgtttgccatgtttgagtgccaaaaaagatcttttgtctctttgggaactgaggccagacgtgctagggtagctgatatgtggaataaagaatgggagagctgatgtaagggggaagcagctgtgctttgctgcaccgcttttggagtcggggtttattaggtgatgtttctataacaccaactgtgtggttatcacttttgctttagaaaatctttccccacgtccygaaacacttccttctcccatcytcygccattcagttacagattcagcttatttgtaagggtcttaattaaagtgggaggaaggggaagagttacaggcttttgttcctaatttcagagtagactaatgatgctaagaatgtgtcgtaagaatgtagyatacaaggcaggcttctgaaaccttcttttgaaaggcactggagtttcacatccgtaaggcagggcacacaaagttgggtagttggaagattttctgttcctttgctcttttytgttttgtttttcttgtgtgtgttcctttgtggtttctcctgcaagagaactat

SEQ ID NO: 51698 - DNA, 600 bp, Chicken  19866894299687_4
taaagaatgggagagctgatgtaagggggaagcagctgtgctttgctgcaccgcttttggagtcggggtttattaggtgatgtttctataacaccaactgtgtggttatcacttttgctttagaaaatctttccccacgtccygaaacacttccttctcccatcytcygccattcagttacagattcagcttatttgtaagggtcttaattaaagtgggaggaaggggaagagttacaggcttttgttcctaatttcagagtagactaatgatgctaagaatgtgtcgtaagaatgtagyatacaaggcaggcttctgaaaccttcttttgaaaggcactggagtttcacatccgtaaggcagggcacacaaagttgggtagttggaagattttctgttcctttgctcttttytgttttgtttttcttgtgtgtgttcctttgtggtttctcctgcaagagaactatacaaagaaaaycttayatggattttttygggcaatactgctgcttgcaaataataaagcagagtttttctaaatctttgaattattgatcctgtagttccaaaatgctatggctgtttttatctgccttttgg

SEQ ID NO: 51699 - DNA, 600 bp, Chicken  19866894299687_5
tttgctttagaaaatctttccccacgtccygaaacacttccttctcccatcytcygccattcagttacagattcagcttatttgtaagggtcttaattaaagtgggaggaaggggaagagttacaggcttttgttcctaatttcagagtagactaatgatgctaagaatgtgtcgtaagaatgtagyatacaaggcaggcttctgaaaccttcttttgaaaggcactggagtttcacatccgtaaggcagggcacacaaagttgggtagttggaagattttctgttcctttgctcttttytgttttgtttttcttgtgtgtgttcctttgtggtttctcctgcaagagaactatacaaagaaaaycttayatggattttttygggcaatactgctgcttgcaaataataaagcagagtttttctaaatctttgaattattgatcctgtagttccaaaatgctatggctgtttttatctgccttttgggcaagcagtgttctacttgagtgttcttggtaatgcttctcatactgctcttttgaattccccctgacctgcagggctcatgtagcagaagtaatgcatgtaaagtgacagtg

SEQ ID NO: 51700 - DNA, 600 bp, Chicken  19866894299687_6
tacagattcagcttatttgtaagggtcttaattaaagtgggaggaaggggaagagttacaggcttttgttcctaatttcagagtagactaatgatgctaagaatgtgtcgtaagaatgtagyatacaaggcaggcttctgaaaccttcttttgaaaggcactggagtttcacatccgtaaggcagggcacacaaagttgggtagttggaagattttctgttcctttgctcttttytgttttgtttttcttgtgtgtgttcctttgtggtttctcctgcaagagaactatacaaagaaaaycttayatggattttttygggcaatactgctgcttgcaaataataaagcagagtttttctaaatctttgaattattgatcctgtagttccaaaatgctatggctgtttttatctgccttttgggcaagcagtgttctacttgagtgttcttggtaatgcttctcatactgctcttttgaattccccctgacctgcagggctcatgtagcagaagtaatgcatgtaaagtgacagtgtcagaaacaattacttactgacgtgtgttgtgcagtaatcattctctctgagtttcttgacaagc

SEQ ID NO: 51701 - DNA, 600 bp, Chicken  19866894299687_7
attcagcttatttgtaagggtcttaattaaagtgggaggaaggggaagagttacaggcttttgttcctaatttcagagtagactaatgatgctaagaatgtgtcgtaagaatgtagyatacaaggcaggcttctgaaaccttcttttgaaaggcactggagtttcacatccgtaaggcagggcacacaaagttgggtagttggaagattttctgttcctttgctcttttytgttttgtttttcttgtgtgtgttcctttgtggtttctcctgcaagagaactatacaaagaaaaycttayatggattttttygggcaatactgctgcttgcaaataataaagcagagtttttctaaatctttgaattattgatcctgtagttccaaaatgctatggctgtttttatctgccttttgggcaagcagtgttctacttgagtgttcttggtaatgcttctcatactgctcttttgaattccccctgacctgcagggctcatgtagcagaagtaatgcatgtaaagtgacagtgtcagaaacaattacttactgacgtgtgttgtgcagtaatcattctctctgagtttcttgacaagcctttt

SEQ ID NO: 51702 - DNA, 600 bp, Chicken  19866894299687_8
tgtaagggtcttaattaaagtgggaggaaggggaagagttacaggcttttgttcctaatttcagagtagactaatgatgctaagaatgtgtcgtaagaatgtagyatacaaggcaggcttctgaaaccttcttttgaaaggcactggagtttcacatccgtaaggcagggcacacaaagttgggtagttggaagattttctgttcctttgctcttttytgttttgtttttcttgtgtgtgttcctttgtggtttctcctgcaagagaactatacaaagaaaaycttayatggattttttygggcaatactgctgcttgcaaataataaagcagagtttttctaaatctttgaattattgatcctgtagttccaaaatgctatggctgtttttatctgccttttgggcaagcagtgttctacttgagtgttcttggtaatgcttctcatactgctcttttgaattccccctgacctgcagggctcatgtagcagaagtaatgcatgtaaagtgacagtgtcagaaacaattacttactgacgtgtgttgtgcagtaatcattctctctgagtttcttgacaagccttttggatttgtggtt

SEQ ID NO: 51703 - DNA, 600 bp, Chicken  19866894299691_1
ctcaagttgtgccaggcgggttcagtttggatgctgggaaataattcttctccgagagagcggtcaggcactggaatgggctgcccagtgaggtggtggagtcaccaaccctggaggtgtccatgaaacatttagctgttgtactgtaggacatggtttggtgggaaacgttggtggtaggtgaacagttggactggatgaccttagagctcttttccaaccttggtgattctgcgattgtatgactctatatgttctaagcagaacgctttttctcagctcataggtaggtagtcaccragctccatttaattttgagaagctgactttatgccggccatcttgggcttgatgcttggctgatgtacctggaggactgcacacaaggtgccattagcatgtcattgccctcagttayggatagaagaaaaacattaatctgccgctttcagtcccacggctttctagcttttccactgggcttaccataggcttctgtcagatgggaaatrctctgacccacttactgctagtgatcactgtgatgtctttaattcccgcctgcaatatcgccacatttaaattaccacagaacagcra

SEQ ID NO: 51704 - DNA, 600 bp, Chicken  19866894299691_2
gtccatgaaacatttagctgttgtactgtaggacatggtttggtgggaaacgttggtggtaggtgaacagttggactggatgaccttagagctcttttccaaccttggtgattctgcgattgtatgactctatatgttctaagcagaacgctttttctcagctcataggtaggtagtcaccragctccatttaattttgagaagctgactttatgccggccatcttgggcttgatgcttggctgatgtacctggaggactgcacacaaggtgccattagcatgtcattgccctcagttayggatagaagaaaaacattaatctgccgctttcagtcccacggctttctagcttttccactgggcttaccataggcttctgtcagatgggaaatrctctgacccacttactgctagtgatcactgtgatgtctttaattcccgcctgcaatatcgccacatttaaattaccacagaacagcraataatgggtttgtatggatgctcacaataccttttggacttgtttgtgcttactggtacattggaataagtttattttgtggagtaaggcattctaatcctatttacttattttttgg

SEQ ID NO: 51705 - DNA, 600 bp, Chicken  19866894299691_3
ttttccaaccttggtgattctgcgattgtatgactctatatgttctaagcagaacgctttttctcagctcataggtaggtagtcaccragctccatttaattttgagaagctgactttatgccggccatcttgggcttgatgcttggctgatgtacctggaggactgcacacaaggtgccattagcatgtcattgccctcagttayggatagaagaaaaacattaatctgccgctttcagtcccacggctttctagcttttccactgggcttaccataggcttctgtcagatgggaaatrctctgacccacttactgctagtgatcactgtgatgtctttaattcccgcctgcaatatcgccacatttaaattaccacagaacagcraataatgggtttgtatggatgctcacaataccttttggacttgtttgtgcttactggtacattggaataagtttattttgtggagtaaggcattctaatcctatttacttattttttggtctagtgttcttacaacacayacatctccacagtgtttctccctgcttccatgggaaatgccttgctgcaaagttaagattaaccagattatgg

SEQ ID NO: 51706 - DNA, 600 bp, Chicken  19866894299691_4
ragctccatttaattttgagaagctgactttatgccggccatcttgggcttgatgcttggctgatgtacctggaggactgcacacaaggtgccattagcatgtcattgccctcagttayggatagaagaaaaacattaatctgccgctttcagtcccacggctttctagcttttccactgggcttaccataggcttctgtcagatgggaaatrctctgacccacttactgctagtgatcactgtgatgtctttaattcccgcctgcaatatcgccacatttaaattaccacagaacagcraataatgggtttgtatggatgctcacaataccttttggacttgtttgtgcttactggtacattggaataagtttattttgtggagtaaggcattctaatcctatttacttattttttggtctagtgttcttacaacacayacatctccacagtgtttctccctgcttccatgggaaatgccttgctgcaaagttaagattaaccagattatggttttgtttgtttgttttgttttcatttatctacagaaacatggcaaaataaactccggtccgctggctgacacctggctttggcaca

SEQ ID NO: 51707 - DNA, 600 bp, Chicken  19866894299691_5
ctgccgctttcagtcccacggctttctagcttttccactgggcttaccataggcttctgtcagatgggaaatrctctgacccacttactgctagtgatcactgtgatgtctttaattcccgcctgcaatatcgccacatttaaattaccacagaacagcraataatgggtttgtatggatgctcacaataccttttggacttgtttgtgcttactggtacattggaataagtttattttgtggagtaaggcattctaatcctatttacttattttttggtctagtgttcttacaacacayacatctccacagtgtttctccctgcttccatgggaaatgccttgctgcaaagttaagattaaccagattatggttttgtttgtttgttttgttttcatttatctacagaaacatggcaaaataaactccggtccgctggctgacacctggctttggcacagctctcactgcacgcgggctgatctacttaatgcgactgctcccttaaccatggcattcagcatgcgcttggtagtgtgagctggagatctttgttcaccaggtttgctctgactcgtacaactggggagactttctgac

SEQ ID NO: 51708 - DNA, 600 bp, Chicken  19866894299693_1
atcattcaggacaagaaagctccgtccaggactaaaaataccacaattgcttgtccaaaaagaaagacaaagtgtgcttccctgagtgctgtaaatattccattggacaccatccttaacggcctctgactcatggattctgtcttctccgtcactgaaacagagacaagccccaatcagctgccccgctcgtgtggtgaagaatattttcctgacagcaccgtccaaggtattttgccaagatcagcgagtggcttccaccatttcctttgtcagatcccttgcaggatgaagaatacrgggcggttttcccctggtatgggttgtgagttggatctcctccctgccckatggcacagggcattgcaggcggcctcttggctgcaaaacaaaacctttgtgccgacgccatgcaacaaacccaacgtctccccagtttatgccatcctctggccaagggctgccctgaaagcaaaacccatgcttcactttccctgcaaagaataattcttctgtccaggattattgtttcagtctcttaaaagaacaatacgacacctatgtcagaaatcctgcaaaagcacaacacagagaaatacc

SEQ ID NO: 51709 - DNA, 600 bp, Chicken  19866894299693_2
ttgtccaaaaagaaagacaaagtgtgcttccctgagtgctgtaaatattccattggacaccatccttaacggcctctgactcatggattctgtcttctccgtcactgaaacagagacaagccccaatcagctgccccgctcgtgtggtgaagaatattttcctgacagcaccgtccaaggtattttgccaagatcagcgagtggcttccaccatttcctttgtcagatcccttgcaggatgaagaatacrgggcggttttcccctggtatgggttgtgagttggatctcctccctgccckatggcacagggcattgcaggcggcctcttggctgcaaaacaaaacctttgtgccgacgccatgcaacaaacccaacgtctccccagtttatgccatcctctggccaagggctgccctgaaagcaaaacccatgcttcactttccctgcaaagaataattcttctgtccaggattattgtttcagtctcttaaaagaacaatacgacacctatgtcagaaatcctgcaaaagcacaacacagagaaatacccggggatccataaagcagaaagcttcctccagcacatgtttaaactattg

SEQ ID NO: 51710 - DNA, 600 bp, Chicken  19866894299694_1
ggaaatggcatttcagagtcccattacagcattttggcccccagagagagatgtctctctggcgccctaccttataagagccaaggaaaaaggatgagttgcttgctttgtacaatgcacaggtccaggagagcccagagaggtgtgaatgtgcatttgtggagcggagtcactttcacaccactcagagggagtccttcacgctgaccccagccaaactgcagcactggtgccagcctggaaggacactcaggagcttgggacacagcaggagagttacaggaagctagatctatgccrcaaaacccaagccagcacctgccacgaatgttatcacataaaaatagcttttctgtgatagaaactggctccagtcaaaggggacccaaccatggctgcagtgcggyaggcacccgggggcaacactggggctgagacatgataggcaacctctgcaccggctccatccccagaatatccatgcacaggtccaacgggtgtgggtacactgggaagtgcccggtccctgcacagccagaccaaaggagaatgcccactgtgggggaatgagcccagcccatagcaaaccgtgctgggccc

SEQ ID NO: 51711 - DNA, 600 bp, Chicken  19866894299694_2
ttgtacaatgcacaggtccaggagagcccagagaggtgtgaatgtgcatttgtggagcggagtcactttcacaccactcagagggagtccttcacgctgaccccagccaaactgcagcactggtgccagcctggaaggacactcaggagcttgggacacagcaggagagttacaggaagctagatctatgccrcaaaacccaagccagcacctgccacgaatgttatcacataaaaatagcttttctgtgatagaaactggctccagtcaaaggggacccaaccatggctgcagtgcggyaggcacccgggggcaacactggggctgagacatgataggcaacctctgcaccggctccatccccagaatatccatgcacaggtccaacgggtgtgggtacactgggaagtgcccggtccctgcacagccagaccaaaggagaatgcccactgtgggggaatgagcccagcccatagcaaaccgtgctgggcccttgttaaagaatgggaaatagcctctgctgatggtctgaaggtctgaaaacaccgcgggtggattaaacctatttcaggaagaaataccacgccaggtctgagtgat

SEQ ID NO: 51712 - DNA, 514 bp, Chicken  19866894299705_1
ttgctttttttctaccctgccttggctctctgctgtgcttacaacttcactgtgcttgctgccaatttagtgaccagtgtagtttgtcagaatcagatgtcagacgtcagactctaaaggaaaaatgttttggaaattatttctaaagcgatgacagtgataatgtcttcttagaagaacagagctgaacagcaaaaacagatgtttggatccaaatgatgaagaagatatcataagaagaagtatgcaaaaatgcttaagaagtaggacaaaagttttcaaagatcctctgttattacstaccatttatagactaatgactggaggatatatgtacgtggctgaattatagagttacctgtatcctaaataggtaactgacattggcatggaaaaggggcaaatcctgccccgaagagaaccatctttgcgaacatgagaaaagcatcagaaaagttaatcgtgatgagctttaatttattggttttgttttcggctttttcttctcttcttg

SEQ ID NO: 51713 - DNA, 600 bp, Chicken  19866894299706_1
gcccagtaggtagacctgctatttaagtgcagtgaagaagcaagcacagggaattacaggagaaatgatagtgccctgacagctgccatttcccaccacaagtctcccctaatggagtcctaatgtagtggtgggctcctcgctgacagcccagccccagacagggctcttctttgtgctggtgacagatgggacagtccggcaacaaacctgtaatcctctgatttttgccgcctctgtttaaccccttcttctcctggcacagctcactgccaaggtgtgcatggaaaccccctgccycactgccggatgctgggtccttgtgccccagagcatggatatggggagcggatggcaacctgtggatctctcccccgtcactcagtggctgtgggcaggtggcagagctcaggatcaggactaaaccaacactgcagcgtggctccctgtgaggaaagcaaaaaggcagagcctcttctggctgcattccctgtgctgcactgcctgtgtgacatttatgtacgcaggtgaaccagtgcaggtgtgctcgccgggggggctctgggctgcctgcccagcacggtggctgtgggctgtgct

SEQ ID NO: 51714 - DNA, 600 bp, Chicken  19866894299708_1
gagataaaagcacggtgggcaggggagagggatgagcacgggacccccgggagggatgcgggatgctgatggcgcccataggactgagctccctgaaatcactgcgccacactctgtgcctctgacaacgcaccgggcgcaatggaagggcagcggtgtgagatgtgagctgcaaacccggggggctcctgaaccccctcctgctgcactgcagctctgagcatccctacaaaccgagcaatccctgcaaaccgacccaaggctccggccccccggctctctccacaccccctgggaacrcactgctcgctgcatgcaaaccccgaatcgttccagcagtgtgagtcagagcccagaaataacacactgggtctgagtgctacgggagcttcccccatagcacgaagggctgcgagctttcctcctgcaaagggtgaagcaacgtaatgctggggctcctggggaccctcagctcttcttgtagctcttcccggggaaagtgctgctgaacccagcccacatttgctccttgctctccaggcacacagcagggctgctccgtgcccacgctgcacaggcgggaggtttgggagccataac

SEQ ID NO: 51715 - DNA, 599 bp, Chicken  19866894299717_1
  misc_feature (1)..(1): n is any nucleotide
nccggcgcgtggggctgctgcaccgcctgctgcagctcgccgtgctgggctacgtgctggggtacggccgccccgcagcgccgctttattccgcggctccgcggccccgagccgggctcaccgcgccgcccgtccgcaggtgggtgttcgtggtgcggaggggttaccaggacaccgatgccgctccacgcgtctcggtcgtcaccaagctgaagggagtgtccgtcagccggccggaggacgcgcggagacggctctgggacgcggcggatttctcgaggcccccgcaggtaggcgagscgggattcgaaccggggaccctccggcgccgggattcgaaccggggaccctccggcgccgggattcgaacccgcgtcccaaccacgcgacctcgtcgagccccggctgcagcccgcccgtaaagcttccctgctctgctgcccaaaargaggtcggaagctctaaagcgcgtcctgcagtagtgcagtgctcaaggtgtcttcttgcctcgcagggagaaaatgtgctttttttggtgaccaacttcattgtgacggacaggcaggttcagggcacctgtcccgaggtgagcaggcctt

SEQ ID NO: 51716 - DNA, 600 bp, Chicken  19866894299717_2
cgtggtgcggaggggttaccaggacaccgatgccgctccacgcgtctcggtcgtcaccaagctgaagggagtgtccgtcagccggccggaggacgcgcggagacggctctgggacgcggcggatttctcgaggcccccgcaggtaggcgagscgggattcgaaccggggaccctccggcgccgggattcgaaccggggaccctccggcgccgggattcgaacccgcgtcccaaccacgcgacctcgtcgagccccggctgcagcccgcccgtaaagcttccctgctctgctgcccaaaargaggtcggaagctctaaagcgcgtcctgcagtagtgcagtgctcaaggtgtcttcttgcctcgcagggagaaaatgtgctttttttggtgaccaacttcattgtgacggacaggcaggttcagggcacctgtcccgaggtgagcaggccttgctgcaagtggggctgcacgggaagagtggagcgcggtggtctgcagtggtggtgtggcatggcagagctccccggggctgtgggcacaatgccggagctcagggagcattgggatgttgctcgtgaagggaggtgagatggctgtcag

SEQ ID NO: 51717 - DNA, 599 bp, Chicken  19866894299724_1
  misc_feature (1)..(111): n is any nucleotide
nnnnnnnnnnnnnnnnnnnnnnnnnnnnnnnnnnnnnnnnnnnnnnnnnnnnnnnnnnnnnnnnnnnnnnnnnnnnnnnnnnnnnnnnnnnnnnnnnnnnnnnnnnnnnnntaagcagttaaaaatgtcaagagactagaaaaaaatctaatacagtaataattgactaaaaaataaagtagtttctcaaaacaacccccagatatttgaaaggagtacaatcccagctgctgaacttctaagctgaaaccctgggatacctctggcagtcagtgaaaatggtcctctaatgcagtgtcyggagcatccatgtgacaagtggctgcagccaaggtgaaatggctttacactggaagagggtgggtttagaccagatattaggaagaaattcctgactgaggatggtgagacactgattaggctgcccagtgaggttgtgggtgccccctmcctggaagcactcaaggccagactgggtgggttgtgggcaacctggtctagwgggaggtgtccttgcctgtagcagggagttgaaactagatcttaaaggtcccttccaacccaaaccattctatggtcttgtgctctgtgttcagtca

SEQ ID NO: 51718 - DNA, 600 bp, Chicken  19866894299724_2
atacagtaataattgactaaaaaataaagtagtttctcaaaacaacccccagatatttgaaaggagtacaatcccagctgctgaacttctaagctgaaaccctgggatacctctggcagtcagtgaaaatggtcctctaatgcagtgtcyggagcatccatgtgacaagtggctgcagccaaggtgaaatggctttacactggaagagggtgggtttagaccagatattaggaagaaattcctgactgaggatggtgagacactgattaggctgcccagtgaggttgtgggtgccccctmcctggaagcactcaaggccagactgggtgggttgtgggcaacctggtctagwgggaggtgtccttgcctgtagcagggagttgaaactagatcttaaaggtcccttccaacccaaaccattctatggtcttgtgctctgtgttcagtcaagcagatgtgctttccaagtgaccatgtttcctgtggctgagccagatggatgagtcacgagcatgcattaaaagatgcaaaatagcaacacattatctccatatcaagaagagatgttgaatatgtttctgagactgaagaccatggcat

SEQ ID NO: 51719 - DNA, 600 bp, Chicken  19866894299724_3
atatttgaaaggagtacaatcccagctgctgaacttctaagctgaaaccctgggatacctctggcagtcagtgaaaatggtcctctaatgcagtgtcyggagcatccatgtgacaagtggctgcagccaaggtgaaatggctttacactggaagagggtgggtttagaccagatattaggaagaaattcctgactgaggatggtgagacactgattaggctgcccagtgaggttgtgggtgccccctmcctggaagcactcaaggccagactgggtgggttgtgggcaacctggtctagwgggaggtgtccttgcctgtagcagggagttgaaactagatcttaaaggtcccttccaacccaaaccattctatggtcttgtgctctgtgttcagtcaagcagatgtgctttccaagtgaccatgtttcctgtggctgagccagatggatgagtcacgagcatgcattaaaagatgcaaaatagcaacacattatctccatatcaagaagagatgttgaatatgtttctgagactgaagaccatggcatgactggaaaagttacagagtgatagaagaacctgaatacctctgtgtgtgtc

SEQ ID NO: 51720 - DNA, 600 bp, Chicken  19866894299724_4
atgtttctgagactgaagaccatggcatgactggaaaagttacagagtgatagaagaacctgaatacctctgtgtgtgtccaggctgttatccaatgtgagagaaagctagcaggagaactgtgttgccctgctgctttccagctgcagtgtcatcctggcgcctgcagcttgagcacatatagagatggaactgggcagacttaggagtgcaaatgaccagcaaatatcctggcatgccttccaggactatggacaggccaatgagtgaggctctggctgctgcttgggctaagcaagkgcttgcctgctttgtgttcttgtgtgctgtgctgtagcagtacatgtgtgtgcagatgtggggactgaaatcttgctgcttccgagaacaaagtgacccaccatgctgtcatattggagatacagatctaggtaatgaaaccagggctcagtactgcttttgtttatgcaggtgactgactttatacacttgcacgttcccactgagttcacaggcttgtggaagctttctttgttttatcttcacatggtgtcatgaaaataggagctgagccttagaagtcgattccaggggaagcag

SEQ ID NO: 51721 - DNA, 592 bp, Chicken  19866894299740_1
ggccaagctgatctttcttaaccaacatacactgagtgacatgctgaaggtatacaaaagtacactttacatacacagtattccagttgacacaaatttaatcaacaattcttcccactggaaagccacctttcatctgagtaggcaccatattattgtagagaatacttcaaggcagtcagaagtagaaaagattttctgattacacatacagcacctgtccagccattacataatgttgatttgcctttcaaatcatttaaaggggtgaaagaaaatgaaattctgcataccagtaayattggacacatttagaaagtatgtaatgctttattctctaactactggccagaaagggaaggaaaattaccacacacctactggtgcttccttaagatagtatccagaaagttccgtgctctcaggaaaatacacaaggatttgatccaatasgtaaaccatcaaattcactaagtacagggtaaggagataactgaacttgcacaagatcttacttcagaattatatgctagttttcagatttagtaaaggactttgcctacaacaacctatgatagatgggaaatttaag

SEQ ID NO: 51722 - DNA, 439 bp, Chicken  19866894299740_2
tattgtagagaatacttcaaggcagtcagaagtagaaaagattttctgattacacatacagcacctgtccagccattacataatgttgatttgcctttcaaatcatttaaaggggtgaaagaaaatgaaattctgcataccagtaayattggacacatttagaaagtatgtaatgctttattctctaactactggccagaaagggaaggaaaattaccacacacctactggtgcttccttaagatagtatccagaaagttccgtgctctcaggaaaatacacaaggatttgatccaatasgtaaaccatcaaattcactaagtacagggtaaggagataactgaacttgcacaagatcttacttcagaattatatgctagttttcagatttagtaaaggactttgcctacaacaacctatgatagatgggaaatttaag

SEQ ID NO: 51723 - DNA, 600 bp, Chicken  19866894299745_1
aggcaaagttagagctggtctcagggaacgcccatgcagctctgtaaagcactgattacatgcccacagctggagctgcaccttgaggcgattgctctgcctcagtgagtgcaggtctaacccagctgcttctccctctgctcgggaggagcagactgcagggaggtgagagctttccttctctccagagaggctctgccatgggagaatggtttgcaggatctgctgggatctgctgggtgcaagctgctctgcaagtgctggatgtaagtgaagggttgggggggttggttggggcayratgctcatcctgtagggatggtagtctgtggggtcagagctcctggagcgggttgatgggagtgttgtggtcctgtgttcttggggtactgggtagcccctggtgctgaccccgctgagtgcccaagctgtggtgggcacaaatcagtggttggtggatctctctttctctggagcaaggtcttatagctggaacccttccctcctagctgggtataactgcattttgaatcacttttgggatgcccagaagtgtgtgtctcagtgcttgcctagttctcttgctgctcagcacctayt

SEQ ID NO: 51724 - DNA, 600 bp, Chicken  19866894299745_2
ggcaaagttagagctggtctcagggaacgcccatgcagctctgtaaagcactgattacatgcccacagctggagctgcaccttgaggcgattgctctgcctcagtgagtgcaggtctaacccagctgcttctccctctgctcgggaggagcagactgcagggaggtgagagctttccttctctccagagaggctctgccatgggagaatggtttgcaggatctgctgggatctgctgggtgcaagctgctctgcaagtgctggatgtaagtgaagggttgggggggttggttggggcayratgctcatcctgtagggatggtagtctgtggggtcagagctcctggagcgggttgatgggagtgttgtggtcctgtgttcttggggtactgggtagcccctggtgctgaccccgctgagtgcccaagctgtggtgggcacaaatcagtggttggtggatctctctttctctggagcaaggtcttatagctggaacccttccctcctagctgggtataactgcattttgaatcacttttgggatgcccagaagtgtgtgtctcagtgcttgcctagttctcttgctgctcagcacctaytg

SEQ ID NO: 51725 - DNA, 600 bp, Chicken  19866894299745_3
yratgctcatcctgtagggatggtagtctgtggggtcagagctcctggagcgggttgatgggagtgttgtggtcctgtgttcttggggtactgggtagcccctggtgctgaccccgctgagtgcccaagctgtggtgggcacaaatcagtggttggtggatctctctttctctggagcaaggtcttatagctggaacccttccctcctagctgggtataactgcattttgaatcacttttgggatgcccagaagtgtgtgtctcagtgcttgcctagttctcttgctgctcagcacctaytgggtgccttggtgagggctctttctgcttctcgtgttgaaggtgctcgtgtgagctgggcacagggaggtggcacaagagctggtggttcagaagcatgggggggtggagagcatccatccttccaccctgtgctctgtcacacaaacctggaaggaggagcgggccctggcagccgtgaccaaggaccctgtttgaagaagctgagagcccctgtgctccgtgtctgggggacagagccctgccaggctgggccaggaagggcggaggtgcccatgggcatgtctagctttgagctga

SEQ ID NO: 51726 - DNA, 600 bp, Chicken  19866894299749_1
cgcaggttgctacctgcacgcagctcggggcagagccttcctaaaggagcttcacaacgggggaatcttccaccgttcgtttttctgttgaaccgggacaggatcaggagatttgtttttcttcgcttattacacccagctgcacctgtagccgtggcaccacgtcaggaacagcccccccccaccgcgcacacccgaaggctgaaagcgtcctcgcctctttgcctaggcgcactacagacacctcttcgggtcccgcagtctctctggagcctcaataaagtcttctttgtgtcttcygcaggcagttttaactcaagacgcgaggcgcagcccatccgggagctgccccggcacgctcagcacctctccccrccgcaccccgcagaaacgactcacccgagagcggcaaagcagggctaggtctgaccgcctgctgctccttaaacscgggacttcgggcggatgcgcccccctccctcatcccctaagcgctgcccgttgcggcccctcggctccacgcccgccccccgtaccccctttcccagaccggggctcaccggcggcgctcccacgcccggctgtgcgcgaccctcggcg

SEQ ID NO: 51727 - DNA, 600 bp, Chicken  19866894299749_2
ttcgtttttctgttgaaccgggacaggatcaggagatttgtttttcttcgcttattacacccagctgcacctgtagccgtggcaccacgtcaggaacagcccccccccaccgcgcacacccgaaggctgaaagcgtcctcgcctctttgcctaggcgcactacagacacctcttcgggtcccgcagtctctctggagcctcaataaagtcttctttgtgtcttcygcaggcagttttaactcaagacgcgaggcgcagcccatccgggagctgccccggcacgctcagcacctctccccrccgcaccccgcagaaacgactcacccgagagcggcaaagcagggctaggtctgaccgcctgctgctccttaaacscgggacttcgggcggatgcgcccccctccctcatcccctaagcgctgcccgttgcggcccctcggctccacgcccgccccccgtaccccctttcccagaccggggctcaccggcggcgctcccacgcccggctgtgcgcgaccctcggcggctccgcgggaaggaggaggaggaggagccgggagcggagctctgcctctgcccggaccgccccgcaggttcgcg

SEQ ID NO: 51728 - DNA, 600 bp, Chicken  19866894299749_3
gccgtggcaccacgtcaggaacagcccccccccaccgcgcacacccgaaggctgaaagcgtcctcgcctctttgcctaggcgcactacagacacctcttcgggtcccgcagtctctctggagcctcaataaagtcttctttgtgtcttcygcaggcagttttaactcaagacgcgaggcgcagcccatccgggagctgccccggcacgctcagcacctctccccrccgcaccccgcagaaacgactcacccgagagcggcaaagcagggctaggtctgaccgcctgctgctccttaaacscgggacttcgggcggatgcgcccccctccctcatcccctaagcgctgcccgttgcggcccctcggctccacgcccgccccccgtaccccctttcccagaccggggctcaccggcggcgctcccacgcccggctgtgcgcgaccctcggcggctccgcgggaaggaggaggaggaggagccgggagcggagctctgcctctgcccggaccgccccgcaggttcgcggtrggacagagccgtgcrgcagatgggcgctgtgctcgcagccgtcttttaaagcggggaggaaggtgatcttta

SEQ ID NO: 51729 - DNA, 578 bp, Chicken  19866894299749_4
caccccgcagaaacgactcacccgagagcggcaaagcagggctaggtctgaccgcctgctgctccttaaacscgggacttcgggcggatgcgcccccctccctcatcccctaagcgctgcccgttgcggcccctcggctccacgcccgccccccgtaccccctttcccagaccggggctcaccggcggcgctcccacgcccggctgtgcgcgaccctcggcggctccgcgggaaggaggaggaggaggagccgggagcggagctctgcctctgcccggaccgccccgcaggttcgcggtrggacagagccgtgcrgcagatgggcgctgtgctcgcagccgtcttttaaagcggggaggaaggtgatctttagctactctgaggacgtgatctaaaaagtggggatggaggggcgctgtgcccttatattgcatggtgagggcacacctggcgggtttagggccggcccctttcacactcactgcctccacgtgctccaccccagcagcgcgctctgcccacccacaaacgtgcgggacgagctccgggatgggaacagaaaagaagaaaggagcagt

SEQ ID NO: 51730 - DNA, 563 bp, Chicken  19866894299749_5
actcacccgagagcggcaaagcagggctaggtctgaccgcctgctgctccttaaacscgggacttcgggcggatgcgcccccctccctcatcccctaagcgctgcccgttgcggcccctcggctccacgcccgccccccgtaccccctttcccagaccggggctcaccggcggcgctcccacgcccggctgtgcgcgaccctcggcggctccgcgggaaggaggaggaggaggagccgggagcggagctctgcctctgcccggaccgccccgcaggttcgcggtrggacagagccgtgcrgcagatgggcgctgtgctcgcagccgtcttttaaagcggggaggaaggtgatctttagctactctgaggacgtgatctaaaaagtggggatggaggggcgctgtgcccttatattgcatggtgagggcacacctggcgggtttagggccggcccctttcacactcactgcctccacgtgctccaccccagcagcgcgctctgcccacccacaaacgtgcgggacgagctccgggatgggaacagaaaagaagaaaggagcagt

SEQ ID NO: 51731 - DNA, 600 bp, Chicken  19866894299765_1
ccagtgacttaacatcccttccactgcagacagcatgctacatggagttaacagaaccatctattctacacctgctgccggggcggggaatgctgcacaatgggacctggcctgtgagcaatgggtgagggagataggggagcaagtggggatggggccctctgtaaagaggtgagtgtggagcagcagagcagcaaaggtgcctggtgaggaaggtggcactaaaccctgcacactcgcctgatggagaaagtccttctgacatcttgcctgggtcaggctgtcactggtgggtgtccygttgggatgatattgcatttccctcttgcggcccagctcactcttcccaggagaaaaccaggcccagctgcaagacagccagaagagttgtgtccccctgggcttggctgggtttcaaactgtgtttgaaatatgtctggagtagttgaaaccatccgtttgggatttgggataagaaaaccagcagcctgactcagcagaaagccgtatcgacagtgctggccaaggcgcaggagagcgtgatgagaaacatgagacacatcagcaagcactgttctcctgccctgatgggaagccaca

SEQ ID NO: 51732 - DNA, 600 bp, Chicken  19866894299770_1
ttttgtcctggaatatatacaaattattggtggcagctacagcaatgatgttctccatgggatgccatgctgtatgaagaatcttcttgttgaagtccagactgtcaacatttatttcatctttctttcttttaccacctgtacacactttacgtggttttaagatggcacgaggtttgctgctctccctggatgcttctaaagtgatatcccgccgtgtgttgcggtcaaacattctaaagaagttgttgtaagatccagtcatgatagcactgttgaaaaacagaagaaaggaaagcrtcattaggcttccagcaggggtattcaatccctatcttcctctcttacccgcaaggtgtcaggtcagatttaccaccagtctctggcacyacacttttaatctctgatgtaagcccttgctcatttctgctgggcatttaatactgcttccactccctaattttccctcccaggtgttgccccctggtccatgctccctgccagtaaatctcagcagcagtcctaggctttcttcatcgtaatagaaacaaagcaggccttcttattcctactatatcccttcaccctttagcaccagga

SEQ ID NO: 51733 - DNA, 600 bp, Chicken  19866894299770_2
tgaagtccagactgtcaacatttatttcatctttctttcttttaccacctgtacacactttacgtggttttaagatggcacgaggtttgctgctctccctggatgcttctaaagtgatatcccgccgtgtgttgcggtcaaacattctaaagaagttgttgtaagatccagtcatgatagcactgttgaaaaacagaagaaaggaaagcrtcattaggcttccagcaggggtattcaatccctatcttcctctcttacccgcaaggtgtcaggtcagatttaccaccagtctctggcacyacacttttaatctctgatgtaagcccttgctcatttctgctgggcatttaatactgcttccactccctaattttccctcccaggtgttgccccctggtccatgctccctgccagtaaatctcagcagcagtcctaggctttcttcatcgtaatagaaacaaagcaggccttcttattcctactatatcccttcaccctttagcaccaggagctatagaggaagcacatacattgtgaactacttaatttcatcagactgtcacaaacacacaagtgccttccttgtgtttatatacacaa

SEQ ID NO: 51734 - DNA, 600 bp, Chicken  19866894299771_1
ttattttgcgcctagttctggatctaagccattttaataaataccatttcatgttttttttttttttttttgcctcaagaagcatgatggaaaagctctttgctgcttgaagaattttgagtagtaaattataaagtcattgaatgacttaggttggaagggaccttaaagatcatctagttccagtcttcctactgccagtagggttgccacccactgaatcaggcattagatcagattgcccagggccccatccagactggccttaaatgcctccaggaatgggcatccacaaccttmaagtgctgccagctctgttctgttcctatggtccctaaggacagtttcccaggggatctcacgcaacaattctttaaacagttggaggttcactctcttgaaggtcaagtttctgactctgatctttctcaggccttgagatcacaaactcaaccagagtatagttgacgtagccaggctgcctccagtcttaagctgtaaactatattctccacattggtgagcaccaggtccaataatgcttcacttcttgttggtctgtccaatacctggatcaggaagttatcaatagtctccagg

SEQ ID NO: 51735 - DNA, 599 bp, Chicken  19866894299778_1
  misc_feature (1)..(55): n is any nucleotide
nnnnnnnnnnnnnnnnnnnnnnnnnnnnnnnnnnnnnnnnnnnnnnnnnnnnnnnaaggaagcagggagtgtccagacctctcagacaagcagtgactctgtgatctacatcagtttgactagatgtaatgaaagaagagaagagaactcaggtgggtgtatttatccttctcttaactttcatttcttcatcctcttcctgtactttctctacctcaatattttctcttttcctaaaaactctgtttgccaaatatctccaggcacagagctaagcaactgtctttaaagcatctgtcmgtrttttggcatgaagatccttccaaatgaagacctttgtttcgttggacaggttttccagcaacagaacaaaagtcccatccataaaaaacgatggttacagacttgtaactgatcactggaagctgaaatgaggctgtgggcacactgggagagcacacagcactgctctgtgcaggacagaggcagaggaacactgtgctttgtagcacaraagtacttcagccagagcactgtgagctgcagtgggattcagggaatggtgctggcatcaaagttactgcactgaactgagcaaa

SEQ ID NO: 51736 - DNA, 599 bp, Chicken  19866894299778_2
  misc_feature (1)..(52): n is any nucleotide
nnnnnnnnnnnnnnnnnnnnnnnnnnnnnnnnnnnnnnnnnnnnnnnnnnnnaaggaagcagggagtgtccagacctctcagacaagcagtgactctgtgatctacatcagtttgactagatgtaatgaaagaagagaagagaactcaggtgggtgtatttatccttctcttaactttcatttcttcatcctcttcctgtactttctctacctcaatattttctcttttcctaaaaactctgtttgccaaatatctccaggcacagagctaagcaactgtctttaaagcatctgtcmgtrttttggcatgaagatccttccaaatgaagacctttgtttcgttggacaggttttccagcaacagaacaaaagtcccatccataaaaaacgatggttacagacttgtaactgatcactggaagctgaaatgaggctgtgggcacactgggagagcacacagcactgctctgtgcaggacagaggcagaggaacactgtgctttgtagcacaraagtacttcagccagagcactgtgagctgcagtgggattcagggaatggtgctggcatcaaagttactgcactgaactgagcaaaact

SEQ ID NO: 51737 - DNA, 600 bp, Chicken  19866894299778_3
ctcaatattttctcttttcctaaaaactctgtttgccaaatatctccaggcacagagctaagcaactgtctttaaagcatctgtcmgtrttttggcatgaagatccttccaaatgaagacctttgtttcgttggacaggttttccagcaacagaacaaaagtcccatccataaaaaacgatggttacagacttgtaactgatcactggaagctgaaatgaggctgtgggcacactgggagagcacacagcactgctctgtgcaggacagaggcagaggaacactgtgctttgtagcacaraagtacttcagccagagcactgtgagctgcagtgggattcagggaatggtgctggcatcaaagttactgcactgaactgagcaaaactttcccaaaaggaacacaaatacatagaacaagcaacccaactgcaaacaacggggtagtgggaatgggaacctcttamtgcatgacgttcagtctcctgtcttcacaatttgcaacattgcttcccagctccaactgcacaaggctgttccactgggaacacccttctttggaaacacaggtcaaccagaaaatagttgatatgctatctac

SEQ ID NO: 51738 - DNA, 600 bp, Chicken  19866894299778_4
tccataaaaaacgatggttacagacttgtaactgatcactggaagctgaaatgaggctgtgggcacactgggagagcacacagcactgctctgtgcaggacagaggcagaggaacactgtgctttgtagcacaraagtacttcagccagagcactgtgagctgcagtgggattcagggaatggtgctggcatcaaagttactgcactgaactgagcaaaactttcccaaaaggaacacaaatacatagaacaagcaacccaactgcaaacaacggggtagtgggaatgggaacctcttamtgcatgacgttcagtctcctgtcttcacaatttgcaacattgcttcccagctccaactgcacaaggctgttccactgggaacacccttctttggaaacacaggtcaaccagaaaatagttgatatgctatctactcaaatacaaataatctcactatcctgatggaaccactgaacagggttcccttgagctgctgctgccactgcccgtcccatgggtactgttctgtgtaaccccgtgtctgctgttcccaacagcctgaggctgtcccaccctgcatgtccatgtgtgcctctccca

SEQ ID NO: 51739 - DNA, 600 bp, Chicken  19866894299781_1
ttaaacaggattccagtttgatgaagtacagtaaaaatacgcaggactgacatagaggttaccaaaagcaatcaaatctagccctggagggaagaatgccctggacagagtcctcacattagcagctagaaggtacccagtggaattgccaaatggatttaacagaaaaatgttagtgaagagcaattgagtaagggaatcttttgcaagagaaacatcttgaaagagcaagaaatagccaagtgtgtgaaaggaggaaagcgtttaaagaagaaccagcagaatactaatgtaagcagygcctatggaggacaatttcatgctcactgctgctatgtcgagaactgactgcagtgctactgcactggtagctaccatattcatgtacaaaataaccaggctgttatgagcaaaggcaaaaagacagtacacacacaagaaaagtgaaccacatgaacagagtaatatctttcagtgtactgttctacttagctggcattccctccaggagatgatattaaaggaggattttctgtacattcacaacaattctrtgaaatccccatgcaaaggtagatgaagattgaatagtaattctca

SEQ ID NO: 51740 - DNA, 600 bp, Chicken  19866894299781_2
aggaaagcgtttaaagaagaaccagcagaatactaatgtaagcagygcctatggaggacaatttcatgctcactgctgctatgtcgagaactgactgcagtgctactgcactggtagctaccatattcatgtacaaaataaccaggctgttatgagcaaaggcaaaaagacagtacacacacaagaaaagtgaaccacatgaacagagtaatatctttcagtgtactgttctacttagctggcattccctccaggagatgatattaaaggaggattttctgtacattcacaacaattctrtgaaatccccatgcaaaggtagatgaagattgaatagtaattctcatcaccygacctttacagagatatgtcaagctctcacagggatgaaacaggcaacattttatagaaatgtataatacatataatacagcttaaagagtactgccgctgctgagccctgaaaaccataagtaaatgtgtaacttcatacaaatcataagaatggctgcaacagcctgagactgaaaataaaaatactaatatttacattgtttatgcttgtcttctggctgtacaggatgtttcaccctataccct

SEQ ID NO: 51741 - DNA, 600 bp, Chicken  19866894299781_3
ggaggacaatttcatgctcactgctgctatgtcgagaactgactgcagtgctactgcactggtagctaccatattcatgtacaaaataaccaggctgttatgagcaaaggcaaaaagacagtacacacacaagaaaagtgaaccacatgaacagagtaatatctttcagtgtactgttctacttagctggcattccctccaggagatgatattaaaggaggattttctgtacattcacaacaattctrtgaaatccccatgcaaaggtagatgaagattgaatagtaattctcatcaccygacctttacagagatatgtcaagctctcacagggatgaaacaggcaacattttatagaaatgtataatacatataatacagcttaaagagtactgccgctgctgagccctgaaaaccataagtaaatgtgtaacttcatacaaatcataagaatggctgcaacagcctgagactgaaaataaaaatactaatatttacattgtttatgcttgtcttctggctgtacaggatgtttcaccctatacccttatgaaataacaggtcagaaactgccagaataccgcaagcatggattttaaa

SEQ ID NO: 51742 - DNA, 599 bp, Chicken  19866894299783_1
  misc_feature (1)..(175): n is any nucleotide
nnnnnnnnnnnnnnnnnnnnnnnnnnnnnnnnnnnnnnnnnnnnnnnnnnnnnnnnnnnnnnnnnnnnnnnnnnnnnnnnnnnnnnnnnnnnnnnnnnnnnnnnnnnnnnnnnnnnnnnnnnnnnnnnnnnnnnnnnnnnnnnnnnnnnnnnnnnnnnnnnnnnnnnnnnnnnnngagttggcgtagaaggcccttttttggtagattcttaaagccctcccactttagaggcaattagcgtacatacatgtgattgaggtccagattaaaaaacacagacgtcaggagcaaatagatgmaatcctttgaagaaaagatgtctgataccaggattttaacttaatgtgccacctcyatatccaccttttgcataacaaagattgcagccctccatctaagaacactgttaccagagtggtaacttcaactsgcctcacagcccttgctggagttgtggaaatggagtgtctgtggctgtcattactaaaaagtctgaagaccattaaaatacaaaacagtaacaaagggtttgcttcagttttcctggagtcccacaaaaacaattaagagctttcaaagtatgtcattgacccctcat

SEQ ID NO: 51743 - DNA, 599 bp, Chicken  19866894299783_2
  misc_feature (1)..(119): n is any nucleotide
nnnnnnnnnnnnnnnnnnnnnnnnnnnnnnnnnnnnnnnnnnnnnnnnnnnnnnnnnnnnnnnnnnnnnnnnnnnnnnnnnnnnnnnnnnnnnnnnnnnnnnnnnnnnnnnnnnnnnnngagttggcgtagaaggcccttttttggtagattcttaaagccctcccactttagaggcaattagcgtacatacatgtgattgaggtccagattaaaaaacacagacgtcaggagcaaatagatgmaatcctttgaagaaaagatgtctgataccaggattttaacttaatgtgccacctcyatatccaccttttgcataacaaagattgcagccctccatctaagaacactgttaccagagtggtaacttcaactsgcctcacagcccttgctggagttgtggaaatggagtgtctgtggctgtcattactaaaaagtctgaagaccattaaaatacaaaacagtaacaaagggtttgcttcagttttcctggagtcccacaaaaacaattaagagctttcaaagtatgtcattgacccctcatggcacaagccacttaattccacgaagcttctgaattgcaagaaattagctaggata

SEQ ID NO: 51744 - DNA, 599 bp, Chicken  19866894299783_3
  misc_feature (1)..(44): n is any nucleotide
nnnnnnnnnnnnnnnnnnnnnnnnnnnnnnnnnnnnnnnnnnnngagttggcgtagaaggcccttttttggtagattcttaaagccctcccactttagaggcaattagcgtacatacatgtgattgaggtccagattaaaaaacacagacgtcaggagcaaatagatgmaatcctttgaagaaaagatgtctgataccaggattttaacttaatgtgccacctcyatatccaccttttgcataacaaagattgcagccctccatctaagaacactgttaccagagtggtaacttcaactsgcctcacagcccttgctggagttgtggaaatggagtgtctgtggctgtcattactaaaaagtctgaagaccattaaaatacaaaacagtaacaaagggtttgcttcagttttcctggagtcccacaaaaacaattaagagctttcaaagtatgtcattgacccctcatggcacaagccacttaattccacgaagcttctgaattgcaagaaattagctaggatacaaaaccacaacattcttcccaatgttcacaatatgatatgatcctggtgtaacaataatctcactataaataca

SEQ ID NO: 51745 - DNA, 600 bp, Chicken  19866894299785_1
tagagtgtgagggtgtcaatcattacttttttccgctatctatattagctaggagagttttcttgcaggtactgcgcaagaagaggtgctctgaaacctgcgtgacgtacctgaacactggtatgcctggagaggaaagctgtcatctcaccctgtgcgtctgtgggagctggttgctgtcctacagcagtcggctttcataactctatccaaagggtttcagctttcataactctatccaaagtgcatgccccctccctttccccaagctgcgtgctgattgaccccatgcctgaaacycaagcagttctcccaagaaataytgctcttgcttattcctgtgatgatggtgagcagagyaaaacacataactctatttaacaacaacaaaaaaaagcagggtctctaacaattgctcatctgagggcaagcrggttcctggcaagagtgtgtgtgtgtatgtgtgyacatacgtagtttgaggtttttgtctgtatagcagaccaggtcttgagtgccctgtcaattaaaggcagcaattcaaagtgattcacagcagattacaccagcctgtctcttgatggagcttgctctggtcct

SEQ ID NO: 51746 - DNA, 600 bp, Chicken  19866894299785_2
tacttttttccgctatctatattagctaggagagttttcttgcaggtactgcgcaagaagaggtgctctgaaacctgcgtgacgtacctgaacactggtatgcctggagaggaaagctgtcatctcaccctgtgcgtctgtgggagctggttgctgtcctacagcagtcggctttcataactctatccaaagggtttcagctttcataactctatccaaagtgcatgccccctccctttccccaagctgcgtgctgattgaccccatgcctgaaacycaagcagttctcccaagaaataytgctcttgcttattcctgtgatgatggtgagcagagyaaaacacataactctatttaacaacaacaaaaaaaagcagggtctctaacaattgctcatctgagggcaagcrggttcctggcaagagtgtgtgtgtgtatgtgtgyacatacgtagtttgaggtttttgtctgtatagcagaccaggtcttgagtgccctgtcaattaaaggcagcaattcaaagtgattcacagcagattacaccagcctgtctcttgatggagcttgctctggtcctgcgcctgcaggtgctgcacaggc

SEQ ID NO: 51747 - DNA, 600 bp, Chicken  19866894299785_3
tcttgcaggtactgcgcaagaagaggtgctctgaaacctgcgtgacgtacctgaacactggtatgcctggagaggaaagctgtcatctcaccctgtgcgtctgtgggagctggttgctgtcctacagcagtcggctttcataactctatccaaagggtttcagctttcataactctatccaaagtgcatgccccctccctttccccaagctgcgtgctgattgaccccatgcctgaaacycaagcagttctcccaagaaataytgctcttgcttattcctgtgatgatggtgagcagagyaaaacacataactctatttaacaacaacaaaaaaaagcagggtctctaacaattgctcatctgagggcaagcrggttcctggcaagagtgtgtgtgtgtatgtgtgyacatacgtagtttgaggtttttgtctgtatagcagaccaggtcttgagtgccctgtcaattaaaggcagcaattcaaagtgattcacagcagattacaccagcctgtctcttgatggagcttgctctggtcctgcgcctgcaggtgctgcacaggctgccaagcctggagcaagcctgcagttatgctgtcag

SEQ ID NO: 51748 - DNA, 600 bp, Chicken  19866894299785_4
ggaaagctgtcatctcaccctgtgcgtctgtgggagctggttgctgtcctacagcagtcggctttcataactctatccaaagggtttcagctttcataactctatccaaagtgcatgccccctccctttccccaagctgcgtgctgattgaccccatgcctgaaacycaagcagttctcccaagaaataytgctcttgcttattcctgtgatgatggtgagcagagyaaaacacataactctatttaacaacaacaaaaaaaagcagggtctctaacaattgctcatctgagggcaagcrggttcctggcaagagtgtgtgtgtgtatgtgtgyacatacgtagtttgaggtttttgtctgtatagcagaccaggtcttgagtgccctgtcaattaaaggcagcaattcaaagtgattcacagcagattacaccagcctgtctcttgatggagcttgctctggtcctgcgcctgcaggtgctgcacaggctgccaagcctggagcaagcctgcagttatgctgtcagcctcgcttagatctaatgctttatgacaactgtctacctgtaatgtgataatgggctgaaaacctctgcaaaa

SEQ ID NO: 51749 - DNA, 600 bp, Chicken  19866894299785_5
agctggttgctgtcctacagcagtcggctttcataactctatccaaagggtttcagctttcataactctatccaaagtgcatgccccctccctttccccaagctgcgtgctgattgaccccatgcctgaaacycaagcagttctcccaagaaataytgctcttgcttattcctgtgatgatggtgagcagagyaaaacacataactctatttaacaacaacaaaaaaaagcagggtctctaacaattgctcatctgagggcaagcrggttcctggcaagagtgtgtgtgtgtatgtgtgyacatacgtagtttgaggtttttgtctgtatagcagaccaggtcttgagtgccctgtcaattaaaggcagcaattcaaagtgattcacagcagattacaccagcctgtctcttgatggagcttgctctggtcctgcgcctgcaggtgctgcacaggctgccaagcctggagcaagcctgcagttatgctgtcagcctcgcttagatctaatgctttatgacaactgtctacctgtaatgtgataatgggctgaaaacctctgcaaaattgatagggtctctcaaaagaaggagaaacttca

SEQ ID NO: 51750 - DNA, 600 bp, Chicken  19866894299785_6
aggtttttgtctgtatagcagaccaggtcttgagtgccctgtcaattaaaggcagcaattcaaagtgattcacagcagattacaccagcctgtctcttgatggagcttgctctggtcctgcgcctgcaggtgctgcacaggctgccaagcctggagcaagcctgcagttatgctgtcagcctcgcttagatctaatgctttatgacaactgtctacctgtaatgtgataatgggctgaaaacctctgcaaaattgatagggtctctcaaaagaaggagaaacttcaaatgtggcaggccygagcctttcttccacaaggtttgcgtgarctgcaaagggtgtagctgtgatgtctggttctccttgtgccccaacatgaagggtggctgtgttagtggctgtgaagctactggcctccgactctctccaagtgcaggggagtcaacctgttgcattttcaggtgctttagatctgctgttaatcctctgaatccaaagacagtctgggcttctatgttttagggcttccagtgttctctctccataatctttatgttctggataaaataatcttttgcccgtaagatgtttccagagttt

SEQ ID NO: 51751 - DNA, 600 bp, Chicken  19866894299785_7
ttgagtgccctgtcaattaaaggcagcaattcaaagtgattcacagcagattacaccagcctgtctcttgatggagcttgctctggtcctgcgcctgcaggtgctgcacaggctgccaagcctggagcaagcctgcagttatgctgtcagcctcgcttagatctaatgctttatgacaactgtctacctgtaatgtgataatgggctgaaaacctctgcaaaattgatagggtctctcaaaagaaggagaaacttcaaatgtggcaggccygagcctttcttccacaaggtttgcgtgarctgcaaagggtgtagctgtgatgtctggttctccttgtgccccaacatgaagggtggctgtgttagtggctgtgaagctactggcctccgactctctccaagtgcaggggagtcaacctgttgcattttcaggtgctttagatctgctgttaatcctctgaatccaaagacagtctgggcttctatgttttagggcttccagtgttctctctccataatctttatgttctggataaaataatcttttgcccgtaagatgtttccagagtttatataataatttggttatttttaatcccc

SEQ ID NO: 51752 - DNA, 600 bp, Chicken  19866894299794_1
tattttagccaactcgtgtggtggaaaattattttattctagtgacatttctgataaaagagacatcagtaaatattttccctgagaaatgtgtcctagaggttttcaggtaatagcaacagtcctttcaagtgctgtctgtgactcacaataaataaaatagaaccaatattgaacaaggactgaaacatgaatatgtttgtgtttagcaggtctctttctcacgtgaacattctctatgccaaacaccaagatggatgtctgttgtacctgtgtaatatgctgcctgactagacttcrctgttgccttctgtgcttttatcatttctgggaataaattgactccagttaacaacggtgatacgataaaacactaccactcctgccctttaccccgagtttccaagagggttgctgatatgcctcaacttgtgtggattttaatgaaaccctatccaacagaacaacagccatggcactaagtaggtttcctttccgtaagccaatgaagaaattaaaaatgcaaggagaccaggactttttgtgttctgcttatcatcttgtaatatcaagagcaatgatacttgaaatactttccaa

SEQ ID NO: 51753 - DNA, 597 bp, Chicken  19866894299802_1
gatcttcagaagatcacttgtgtctccccaagtcacaggtaataaagccatctgtcataacgcctgtcccagacccccctggcaggtggattctgagtcacaaggagcagaaaattgtctgtacacatttctcagcgttgaaagcagatcacccaaaagccaggggtaggctacaactgctaactttggcctctcatgtatgtcctcatagcgcccatgttatgctgctgggtactatcacaaacagtaaacgttcccgtacatgtgccacttatataactcgatgcagatcactttgtraagagtctaagatctgaccctacagctgctgcagctgtcactgataggacagcagcactgtaggttggaatcagccatcgttgctgtagtccagagaaatcaaaactcccctttgctagagaatggcctgatgtaagagctgaatagcagcaacagaggttactggcagcaaagtgcctgtagaactccatctcctccaaagaagaggtatgatacccacagccccatgaacctgctcttctatgagaccattaagaaacgcaggaataccttctagttaactcagacaagaaaaaa

SEQ ID NO: 51754 - DNA, 600 bp, Chicken  19866894299806_1
gtgtcagaggaggtttagattagacataaggaaaagctttttctctcagagagtagtcaggtgctggaatggccacccagggaagtggtggagttgccgtccctggcagtgttcaagaggcatctggatgaggaactacgagatacagtttagtagcttgtggcagcaatggtaatgagaggacagctggactagatgatcttgtaggtccttccccaccttatgattctatgataggtccacccatgaggctgtctagagtaagaaggttgactccacacctcaagactgcctccaccrtggacagcaaggtgactgatgtaagtgactccctgctaagaggatcagaaggcctatacgttggccctaccctacctccagagaagtgtgctgcctccctggtgcccaggtcagggttatttctaggaaacttccttgtctggttctcccctctgattattatccattactaatagttcaggccggcagcgatggagttgctgacagaagcctgaggacttagcaaaaaggacttcaggggactggggcagttagaggacagagcgggtatacagcttgtattttcctctatcccttcag

SEQ ID NO: 51755 - DNA, 495 bp, Chicken  19866894299812_1
ggccacttgaacacctgtggtagctactgttactgctacctttctaaacctgcaaagtctgtatgtttattactttttacatctctagacattagattacagcgagtgactcagcctatggctgagttttccaggactctggtggcatcccgttgctcagcactcatggagttctccttggtcacttaaaaatgttgatctctacagtgctcccaagaaaaaaaaagcatgctgtgtgtcagataattctgccaaaataaattcacagctgcaaatgacacatcaagagcatttctcagyggagctagatactaatacacattgattgatcaatggtatggtgtaagtgatagtcctgagcatgggagaaaaagaattaagcaaaatacaagtggtatgtatccatcaaccttatcattcaggagaaaaaataacagtgtcattagctaagtttccaaatagcccagtttcctgcttgaaagccaatccttcaga

SEQ ID NO: 51756 - DNA, 600 bp, Chicken  19866894299813_1
gtatccattaaagaaaaggtattttctaactcaaattatttcaaatcgttttagaattttaggcacacttttggcatttatgaactttgaaataattctcttcctactactgtaatagacaagcccatttcactttctgtagataaaacaattcaattgctatcatttactagttagtaaattgttttaatgctacataaaatcaaaatctaaacatttctaaaccagtggatttgtgctattacacagtcaaagatgaaaacaaaagctttagcaatctgagtcttccaaatcacttgyagcacactagtcagaaataacscatcctcrggaacttcrttatttattgttattttttttctttaataygcttgacagtaataactcaatctgatttatgatgatctgtattattcactgcaaaacatgctaccttgcagaggaaccacagcttgctctagtttgcttgtgctctcatgcttatgctcaccctttttggtcttcagcattccaagctcaagaactttgccatttagtgccacccactccttcaactatcagagtatcttttttcatctccacattcamrtagaatgcgca

SEQ ID NO: 51757 - DNA, 600 bp, Chicken  19866894299813_2
tttctaactcaaattatttcaaatcgttttagaattttaggcacacttttggcatttatgaactttgaaataattctcttcctactactgtaatagacaagcccatttcactttctgtagataaaacaattcaattgctatcatttactagttagtaaattgttttaatgctacataaaatcaaaatctaaacatttctaaaccagtggatttgtgctattacacagtcaaagatgaaaacaaaagctttagcaatctgagtcttccaaatcacttgyagcacactagtcagaaataacscatcctcrggaacttcrttatttattgttattttttttctttaataygcttgacagtaataactcaatctgatttatgatgatctgtattattcactgcaaaacatgctaccttgcagaggaaccacagcttgctctagtttgcttgtgctctcatgcttatgctcaccctttttggtcttcagcattccaagctcaagaactttgccatttagtgccacccactccttcaactatcagagtatcttttttcatctccacattcamrtagaatgcgcaaacttagaccacttcctcagca

SEQ ID NO: 51758 - DNA, 600 bp, Chicken  19866894299813_3
tcaaattatttcaaatcgttttagaattttaggcacacttttggcatttatgaactttgaaataattctcttcctactactgtaatagacaagcccatttcactttctgtagataaaacaattcaattgctatcatttactagttagtaaattgttttaatgctacataaaatcaaaatctaaacatttctaaaccagtggatttgtgctattacacagtcaaagatgaaaacaaaagctttagcaatctgagtcttccaaatcacttgyagcacactagtcagaaataacscatcctcrggaacttcrttatttattgttattttttttctttaataygcttgacagtaataactcaatctgatttatgatgatctgtattattcactgcaaaacatgctaccttgcagaggaaccacagcttgctctagtttgcttgtgctctcatgcttatgctcaccctttttggtcttcagcattccaagctcaagaactttgccatttagtgccacccactccttcaactatcagagtatcttttttcatctccacattcamrtagaatgcgcaaacttagaccacttcctcagcaaacaactc

SEQ ID NO: 51759 - DNA, 600 bp, Chicken  19866894299813_4
ttcaaatcgttttagaattttaggcacacttttggcatttatgaactttgaaataattctcttcctactactgtaatagacaagcccatttcactttctgtagataaaacaattcaattgctatcatttactagttagtaaattgttttaatgctacataaaatcaaaatctaaacatttctaaaccagtggatttgtgctattacacagtcaaagatgaaaacaaaagctttagcaatctgagtcttccaaatcacttgyagcacactagtcagaaataacscatcctcrggaacttcrttatttattgttattttttttctttaataygcttgacagtaataactcaatctgatttatgatgatctgtattattcactgcaaaacatgctaccttgcagaggaaccacagcttgctctagtttgcttgtgctctcatgcttatgctcaccctttttggtcttcagcattccaagctcaagaactttgccatttagtgccacccactccttcaactatcagagtatcttttttcatctccacattcamrtagaatgcgcaaacttagaccacttcctcagcaaacaactcttcatgtct

SEQ ID NO: 51760 - DNA, 600 bp, Chicken  19866894299813_5
tttggcatttatgaactttgaaataattctcttcctactactgtaatagacaagcccatttcactttctgtagataaaacaattcaattgctatcatttactagttagtaaattgttttaatgctacataaaatcaaaatctaaacatttctaaaccagtggatttgtgctattacacagtcaaagatgaaaacaaaagctttagcaatctgagtcttccaaatcacttgyagcacactagtcagaaataacscatcctcrggaacttcrttatttattgttattttttttctttaataygcttgacagtaataactcaatctgatttatgatgatctgtattattcactgcaaaacatgctaccttgcagaggaaccacagcttgctctagtttgcttgtgctctcatgcttatgctcaccctttttggtcttcagcattccaagctcaagaactttgccatttagtgccacccactccttcaactatcagagtatcttttttcatctccacattcamrtagaatgcgcaaacttagaccacttcctcagcaaacaactcttcatgtctcaaaagaggaaatgactgacggcctaccct

SEQ ID NO: 51761 - DNA, 551 bp, Chicken  19866894299813_6
caaatcacttgyagcacactagtcagaaataacscatcctcrggaacttcrttatttattgttattttttttctttaataygcttgacagtaataactcaatctgatttatgatgatctgtattattcactgcaaaacatgctaccttgcagaggaaccacagcttgctctagtttgcttgtgctctcatgcttatgctcaccctttttggtcttcagcattccaagctcaagaactttgccatttagtgccacccactccttcaactatcagagtatcttttttcatctccacattcamrtagaatgcgcaaacttagaccacttcctcagcaaacaactcttcatgtctcaaaagaggaaatgactgacggcctaccctcagaaaagctcaagtttaattccagttttagttataaaactagacagtcacttctaagccctgtaactttcatggctgtatcacctttttaactgcagcagactacatttgtaatctgtgatttttaaatgtaacaagtttaatttacatacaaagttaaaacaaaggtg

SEQ ID NO: 51762 - DNA, 550 bp, Chicken  19866894299813_7
aaatcacttgyagcacactagtcagaaataacscatcctcrggaacttcrttatttattgttattttttttctttaataygcttgacagtaataactcaatctgatttatgatgatctgtattattcactgcaaaacatgctaccttgcagaggaaccacagcttgctctagtttgcttgtgctctcatgcttatgctcaccctttttggtcttcagcattccaagctcaagaactttgccatttagtgccacccactccttcaactatcagagtatcttttttcatctccacattcamrtagaatgcgcaaacttagaccacttcctcagcaaacaactcttcatgtctcaaaagaggaaatgactgacggcctaccctcagaaaagctcaagtttaattccagttttagttataaaactagacagtcacttctaagccctgtaactttcatggctgtatcacctttttaactgcagcagactacatttgtaatctgtgatttttaaatgtaacaagtttaatttacatacaaagttaaaacaaaggtg

SEQ ID NO: 51763 - DNA, 600 bp, Chicken  19866894299817_1
ttgactgttttaaaggaaacagcagatggcctttcagtcccatcacgtaaccagttatgagatcattaaatgcacattccttacagcaatgttctctgggccatgtataatccgctgggagtgggatgcatacaagttaaaagaatctttcacctaggctctacaggaaaagattagcagtgtgttcacaatgaggttagaaatagtttgagggagctgggcttgttcagcctggagaatagaaggctgcgaggagacctcatggcaatcttccagtatttaagaggagattatagacargaagggaatcaactttttacaagggtaggcagtgataggacaagggggaatggttttaggctcaagaaggaaggtttagattggatgtcagggggattacagagagagtggtgaggtgctggaacaagctgcccagagaggctgtggatgctccatctctggaggtgttcaagaatggattgggcaacctggtctagtaccagacctggaggttggtggccctgcctgtggcagggggttggaacttgatccttgaggtcccttccaaccagggccattctgtgattctgtgaaatagaa

SEQ ID NO: 51764 - DNA, 600 bp, Chicken  19866894299823_1
atgttatcccacttctagcaatttaaataattcttttctattctttgatagtatctggcagatataatggatttaactgtaaaaggaaggttgtttcacaatccctggaaaaactttcatgtaggtttccttaatcatgaagtgtctatttttggttttggatgatattaaacagctggatttttttccatgcaatccaacagaaaatccattaagttgtccagtactttatatacaaaacaactgggtgtaagcattttcacttaagacagatgctacgtttctcaaagcattttcccycttttctagctagcgttatttgtttttttttttcagtatttctcatctctagctatgtttatgaaaagcagaaaaaactatgcataaaaacttttgaagaagaaaaaataaaagttttattcctaaaatgagcatgtattagcttattccattctttattttccgctgctctccctacagtgccggctagaacttcattctatggttgacaggtttggaatgtaaagtgagagcttctggattacaggtaacatagtcactatcctaaagctatccctgaggaagatacaaaattacagg

SEQ ID NO: 51765 - DNA, 600 bp, Chicken  19866894299826_1
ttaacatgacttggcaattgtccatggcattctggtttctaaggtaacaataaaatatacacacataaagaaaaaaagacaaagatgctatacttagttatgctttgcttataggatttttttttctggtttgtttcttatttcaaagtgtgtgacatcataagtgttgggacttgctttcgtatttgtatcaagactctccatgtacaagagaaatgacactggaatttgaatactctaaagcaccaagaatattataaatgaaaacaggtaagatgcatagacttacggaggtttaayttggaaaagagtgcagttatcacacgtatttacacaaacatacaacatgtctgtcatagaatacagaataataaggaaatgtgaataagtggtgacgagggctaaaaatgacaaaagatgccaatacacctttcctaattattttttcctcctttccaacacatcggaaaattgggtttgtatctgggcttcagtagttcagacaagtacctgaaagttcaggaacagactagtcacagaataagaatttggaagactgatgagacttaattctcctgttgaaatgaaactcagaggaaa

SEQ ID NO: 51766 - DNA, 441 bp, Chicken  19866894299833_1
aatatctagtctaaatctaccctcactcttttaaaaaacatttcccttcatcctatcactacatgcccttatgaaaagtccctcttcagcattcctgtaggccatcttcaggtactggaaggccacttccaacgtaagctgcccccagagccttctcttctccaggctgaagagtcccaactctctcagcctgtcctcataggggaggtgctccagccctctgatcatcctcgtggccctcctctggacctgctccaacagctctatgtccttgtgttggggacaccaaactggatgcartacttcaggtggagtctcacaagagcagaattacttcccttgacctgctggtcatgctcctcttgatgcaacccagaatacagttggccttctgggctgcaagatgtctgtacatgttcaattctgtacatgttgtaagtt

SEQ ID NO: 51767 - DNA, 600 bp, Chicken  19866894299837_1
aatctgaatgagatctgcatccaaacccatttttggcatgtctctaaaaaaatgataacttctaagataaaaaagattcatgggcagagtttcagttggatcgatgacctgaaacgattttcaaagcaagccataaacttgtacaagggtctcataatttgatctggagtcactgggtctggcaacccccccacaacaagtacagcaccaactccatgttgcccaagggggcactcggaagggcatgaggtcaagacactgacttgggacccagaaggtctagctttgctttctaacttyttaaacagctttcttatttttcctggatgggtcaatctatctgagccttagttgagtatttagaaaataaagaaaatgagatatttgacttttctcacatttttctgccctcttacaggcattgcctgtttagactgtaaatgcttcaggtcagagatggtctgtcactgttttcaaatgcacatataatgctagcacattgatattagtatagaacatgggaagacacaccctttgccgaacacggatggaaaatgacatgtcaaacaccaatcgtcaccgcaacctcaacttgcagcc

SEQ ID NO: 51768 - DNA, 599 bp, Chicken  19866894299839_1
  misc_feature (1)..(83): n is any nucleotide
nnnnnnnnnnnnnnnnnnnnnnnnnnnnnnnnnnnnnnnnnnnnnnnnnnnnnnnnnnnnnnnnnnnnnnnnnnnnnnnnnnnccattatcttgggcttttatcttatggtaagcagatgcggcatgactcatgcagcagtattactttgagagaagcaagctgtttagaattgtctcctgtgagatcacgaaacagtgatctcacagaataaggatccttttcacaaatcccctttcatccaccgtgccagacctagaataatctgaacagtctgccagagtagcaaagcatctgcagyagtacgtagtagctgttattctacgtggaaaaacaggccaatccagcaacaagatatgcatcaaaaggcatctatttacattcactgtaagttgaaaagacaaaaaaaacaaaaatcaggggaagtggaactcaaaatagtccaaattaggttatgctaatcaagtcagatctgcaagtatatamatgggtgcactactcacttctcctaccacttagycttgaattttgccagttccttgcattaagtgtatgcagctcagaaatgttccttgcagtttgacgcatcctgggatatga

SEQ ID NO: 51769 - DNA, 600 bp, Chicken  19866894299839_2
atcacgaaacagtgatctcacagaataaggatccttttcacaaatcccctttcatccaccgtgccagacctagaataatctgaacagtctgccagagtagcaaagcatctgcagyagtacgtagtagctgttattctacgtggaaaaacaggccaatccagcaacaagatatgcatcaaaaggcatctatttacattcactgtaagttgaaaagacaaaaaaaacaaaaatcaggggaagtggaactcaaaatagtccaaattaggttatgctaatcaagtcagatctgcaagtatatamatgggtgcactactcacttctcctaccacttagycttgaattttgccagttccttgcattaagtgtatgcagctcagaaatgttccttgcagtttgacgcatcctgggatatgagaaaccactgtgtagtgactccaaggggaaatctaggattcacatccccaagtcatttctttccayatacgcaataaggagcagcaaatgcctcatcacactttgtctaaactgatagagagggaattaacagagagggacagctacatttaagggtgctagtacgttagtttcaaggcttagaat

SEQ ID NO: 51770 - DNA, 600 bp, Chicken  19866894299839_3
ttttcacaaatcccctttcatccaccgtgccagacctagaataatctgaacagtctgccagagtagcaaagcatctgcagyagtacgtagtagctgttattctacgtggaaaaacaggccaatccagcaacaagatatgcatcaaaaggcatctatttacattcactgtaagttgaaaagacaaaaaaaacaaaaatcaggggaagtggaactcaaaatagtccaaattaggttatgctaatcaagtcagatctgcaagtatatamatgggtgcactactcacttctcctaccacttagycttgaattttgccagttccttgcattaagtgtatgcagctcagaaatgttccttgcagtttgacgcatcctgggatatgagaaaccactgtgtagtgactccaaggggaaatctaggattcacatccccaagtcatttctttccayatacgcaataaggagcagcaaatgcctcatcacactttgtctaaactgatagagagggaattaacagagagggacagctacatttaagggtgctagtacgttagtttcaaggcttagaatatccagcagaaagatatcaacaattcgcaaatct

SEQ ID NO: 51771 - DNA, 600 bp, Chicken  19866894299839_4
aggcatctatttacattcactgtaagttgaaaagacaaaaaaaacaaaaatcaggggaagtggaactcaaaatagtccaaattaggttatgctaatcaagtcagatctgcaagtatatamatgggtgcactactcacttctcctaccacttagycttgaattttgccagttccttgcattaagtgtatgcagctcagaaatgttccttgcagtttgacgcatcctgggatatgagaaaccactgtgtagtgactccaaggggaaatctaggattcacatccccaagtcatttctttccayatacgcaataaggagcagcaaatgcctcatcacactttgtctaaactgatagagagggaattaacagagagggacagctacatttaagggtgctagtacgttagtttcaaggcttagaatatccagcagaaagatatcaacaattcgcaaatctttagaccatttaaatccacccataagtaggtcacagagactgattcacacatcaaactataatttagagagccactatttcaaatatttagaacaacatggttgcagcaaatattactcataagacactacggccacagttcagct

SEQ ID NO: 51772 - DNA, 599 bp, Chicken  19866894299843_1
  misc_feature (1)..(172): n is any nucleotide
nnnnnnnnnnnnnnnnnnnnnnnnnnnnnnnnnnnnnnnnnnnnnnnnnnnnnnnnnnnnnnnnnnnnnnnnnnnnnnnnnnnnnnnnnnnnnnnnnnnnnnnnnnnnnnnnnnnnnnnnnnnnnnnnnnnnnnnnnnnnnnnnnnnnnnnnnnnnnnnnnnnnnnnnnnnnatgtttcttccctttgcctattgcatttattatattgcaagaaaatcgcttaatgggggtactggtaggaggttgtaacaaaatagagttgccattattagaatctggctgtaacttcccagattttytttttttttttttttttttttttgctgctataggtgaatttacaggagtgttttttgtcattatagaaatgttcaaatcacactcctgcctctgatattctacccaggaaggcaactatgcccttgtcaactatccagagatatttctgccatccaaggttgtatcctctcccttgtgcaaatcttcctgaaatgaagctagaatctgacccacagtgatatgcaagctgcaaggagtccttaaaatctgacctttgcttaaagaaggtacttaaaactgcatttaggtacattagcct

SEQ ID NO: 51773 - DNA, 600 bp, Chicken  19866894299843_2
tttttgtcattatagaaatgttcaaatcacactcctgcctctgatattctacccaggaaggcaactatgcccttgtcaactatccagagatatttctgccatccaaggttgtatcctctcccttgtgcaaatcttcctgaaatgaagctagaatctgacccacagtgatatgcaagctgcaaggagtccttaaaatctgacctttgcttaaagaaggtacttaaaactgcatttaggtacattagccttcaatattaggcaaaactacccattatgccaatggaagctgtttaggacttkctactgagctctgatctcgtggggaacatggcagacaggaaaaacagcagagttgctactgtttgtgtttacagatgatggaatagagaccaaatttgactcccatggtgcatcgtgtatcacccgcatgggtgggtagaaatgctgttgaagcatgggagaaattggttggagaagagggaccacctgtaggctatattccaaggtctgaaactccgcatgggaaatctgagaggcatgattgaaaaacccttctgggaaaaagactgagcgtaatatagtctgcttttagatgtgatt

SEQ ID NO: 51774 - DNA, 600 bp, Chicken  19866894299848_1
gcgagactgcagtggggacaaggagtgaccagagaggcaatctcatttcctctttggggacggatggagacatgaagtctccacctcatgtgataaatagccgtcatgtgtggtggcacttttggtttcccagtgacaaacagagagcactgcacagagcccccattgctgtgccccacgcaggctgtcacctctcaagtccccaaggagcccccatcatgtggccttgcactctgttccccatgggatgccagacacagcatgcatggctccaatgggctgtcccacgtggcatgccaygtgccatccccagcacatccagcctgctgtcaccatgcactttgggtaacacactctttccccactgcactttcctctgccatcccyactggggacagcagcacagacctttgggggcacagtgacacccacatagacatggggcaccctctgagggcacacacgtacagcgagtatgcacttgtagtgtcagtgtttggatagatgctaaaaacaggggtgtgcattatagtatacccatatcttgtgtatacatgacattgtgcatatagacatggaggcacgctagtaggtttgtga

SEQ ID NO: 51775 - DNA, 600 bp, Chicken  19866894299848_2
atgtgataaatagccgtcatgtgtggtggcacttttggtttcccagtgacaaacagagagcactgcacagagcccccattgctgtgccccacgcaggctgtcacctctcaagtccccaaggagcccccatcatgtggccttgcactctgttccccatgggatgccagacacagcatgcatggctccaatgggctgtcccacgtggcatgccaygtgccatccccagcacatccagcctgctgtcaccatgcactttgggtaacacactctttccccactgcactttcctctgccatcccyactggggacagcagcacagacctttgggggcacagtgacacccacatagacatggggcaccctctgagggcacacacgtacagcgagtatgcacttgtagtgtcagtgtttggatagatgctaaaaacaggggtgtgcattatagtatacccatatcttgtgtatacatgacattgtgcatatagacatggaggcacgctagtaggtttgtgatacacgtgtacgtacatctcttttgcccatgtgacagcagacacacgtgtaatgtgtatgtatcatattcatgcagtgcacatgtga

SEQ ID NO: 51776 - DNA, 599 bp, Chicken  19866894299849_1
  misc_feature (1)..(30): n is any nucleotide
nnnnnnnnnnnnnnnnnnnnnnnnnnnnnntttctgagagcgtaagagatgccataaagcctgcaggacgctgccctgcgggggggtacacagcctggtaagacagttgctgcatacacagctatggagaaatactgcacagctccttccccatggccgtgtctgccctgctcctgctggacgggcactgccttgccccccaggagaggggagtccagcaaggtgccccgattctcctcaggtaggagaatggctatgtggtgcctggggtaagaaaagccacgtaaaggtggcagtggwttgctgaggtcttttgtcatgacccgggttaagcctaggccaaaaatccttcctgcccttcagccagcacctacctcaggttgtacctggcaggtttcaaagccaggattgctgctggactaagcctcggggaatcactccagaggtggtttcctggccacattctgcctccttttcggagggcttcagagggctcagcagtgctacrgcccttttcagtacaaggtaaactgtcatgtgctggccagacacctcagccagacagcaatagctaatgctgtctgagtggcacagcacat

SEQ ID NO: 51777 - DNA, 600 bp, Chicken  19866894299849_2
gggagtccagcaaggtgccccgattctcctcaggtaggagaatggctatgtggtgcctggggtaagaaaagccacgtaaaggtggcagtggwttgctgaggtcttttgtcatgacccgggttaagcctaggccaaaaatccttcctgcccttcagccagcacctacctcaggttgtacctggcaggtttcaaagccaggattgctgctggactaagcctcggggaatcactccagaggtggtttcctggccacattctgcctccttttcggagggcttcagagggctcagcagtgctacrgcccttttcagtacaaggtaaactgtcatgtgctggccagacacctcagccagacagcaatagctaatgctgtctgagtggcacagcacataatggccagtccatttatctcccagttgctgcagttccagtaaagcagcattttgttaaacgcctggagctgagaaaaacatccccagagctagagaaaacaggacttattccagccaggtcctatttgtcccctggaagatctgctgtgctgaagtggctgctacaaacccaatcttcaccgccaacagcagaccttccctgctattt

SEQ ID NO: 51778 - DNA, 599 bp, Chicken  19866894299851_1
  misc_feature (1)..(86): n is any nucleotide
nnnnnnnnnnnnnnnnnnnnnnnnnnnnnnnnnnnnnnnnnnnnnnnnnnnnnnnnnnnnnnnnnnnnnnnnnnnnnnnnnnnnnnctcttgcagtagaaacatatccttttacaggctgcatagtttatgacagtaacacaggctaggaggaataagaacaaatgaacagctggatgtactttggggatggagaatggcactggattaggagaggaaaaaaactgtgaaagccgcaacacatgagggaggaattgatcacagccagaaagactacttttgatttggtttatttctcgtytgtaatttagacatcttgrgttggcttcagagtatttcagagagaatcacaagagctgtttgttaattgacacagaaggcttctggctgaccatgggtctgagaatcaggggtgtactgatttctgggaggtggctgtgaagtcctgttttgctatgtgctcaagagttgggtaggacagcatagttgttttgcctaggaattgggagaacatgctgagctgccataccagcatgccttgaaatgagacttctgggaaagcaagaatcaattcttggtgaagcaagcattttcttgaac

SEQ ID NO: 51779 - DNA, 599 bp, Chicken  19866894299851_2
  misc_feature (1)..(67): n is any nucleotide
nnnnnnnnnnnnnnnnnnnnnnnnnnnnnnnnnnnnnnnnnnnnnnnnnnnnnnnnnnnnnnnnnnnctcttgcagtagaaacatatccttttacaggctgcatagtttatgacagtaacacaggctaggaggaataagaacaaatgaacagctggatgtactttggggatggagaatggcactggattaggagaggaaaaaaactgtgaaagccgcaacacatgagggaggaattgatcacagccagaaagactacttttgatttggtttatttctcgtytgtaatttagacatcttgrgttggcttcagagtatttcagagagaatcacaagagctgtttgttaattgacacagaaggcttctggctgaccatgggtctgagaatcaggggtgtactgatttctgggaggtggctgtgaagtcctgttttgctatgtgctcaagagttgggtaggacagcatagttgttttgcctaggaattgggagaacatgctgagctgccataccagcatgccttgaaatgagacttctgggaaagcaagaatcaattcttggtgaagcaagcattttcttgaacattttctatgttcctgctg

SEQ ID NO: 51780 - DNA, 600 bp, Chicken  19866894299851_3
ttgcctaggaattgggagaacatgctgagctgccataccagcatgccttgaaatgagacttctgggaaagcaagaatcaattcttggtgaagcaagcattttcttgaacattttctatgttcctgctgaaagaactcatgttacacgtgtccatggctactctatcaatttgcaaggctctttagaggtgccataggaccctcatgatcaatgggcctcagctacactgtcccagaacactttaaactgaggtcatgaatctgaaatatctaagtacgctgtttagattagaagtaactmctggaatagagttaggacctattgagacaaacagtgactcagtagttgttgaaggattctaaatcactaagaataaaagatgttcctgagcttgtttgtatgtaggcctgagaatttaaaatgcctatatgctctttgataacataggtaacatctcagataaccagctaaaataaaaaaatttttaaaaagtcagcaaaccacctgaattaattacagcttcaagacttgcagaatcactacacagtgatgcatccaaaacaatgtccataggtaggatttcaccacaaacatctaaac

SEQ ID NO: 51781 - DNA, 600 bp, Chicken  19866894299854_1
ctgagaggaaggaaggagtcataaaacagcagataccaagactaaaaagctagcacagagcaggatctgcaccagtaaagtatgaccaacataccatgaccactaatgacaaaagccatcctgcttcaagtattcaaaaggctcgtgtattttaaaaatatgcttatcattttacccaataaaaccctagagatcttaccaataaaatgcttaaaacactgacaagctgtttggtaaaccatagctcaaataattattgcattgagcattagtacttagtgaaactcctgctttgcagcraggaagctgcaagaagttgacttacagctgacctcaaaatgagcttcctgaaagtcagaaggaagcattcaattgatttcagataaacagcagctgaaaggatcttgacaacattgtttctcctatctaagtgaaaagcaaatactcaggagtcctacagccacgaaaaactggagatagatgctggcaagcagagaagaaagtagaagatgcaattcttcaactttacamcccccataagagatcagcactgctggtgaatccagtgcttcaacgatctacaaaatatcttctagtttt

SEQ ID NO: 51782 - DNA, 436 bp, Chicken  19866894299854_2
tggtaaaccatagctcaaataattattgcattgagcattagtacttagtgaaactcctgctttgcagcraggaagctgcaagaagttgacttacagctgacctcaaaatgagcttcctgaaagtcagaaggaagcattcaattgatttcagataaacagcagctgaaaggatcttgacaacattgtttctcctatctaagtgaaaagcaaatactcaggagtcctacagccacgaaaaactggagatagatgctggcaagcagagaagaaagtagaagatgcaattcttcaactttacamcccccataagagatcagcactgctggtgaatccagtgcttcaacgatctacaaaatatcttctagttttcatatgaaatgtagttagaaacaaacaaacaaacaaaaaaagtatagaagcttccagttctatgctg

SEQ ID NO: 51783 - DNA, 600 bp, Chicken  19866894299857_1
aatatataaagataacttcttaaaaaatatattgaagctttttgccttcccagaggtgttaaactgagtcataattcacagtgatctaacataagttggtacaaattatttgccataaattaatgctttggtttttgtggcatctcacgtaagagacatactttttctaatgggcttctttaaaaaaaaatagctacagtcaacattcaaaaagaaattcagttctgtttaatactatttatctttccagcacactgaataaaataatttaaaatgatggaaaacacatttctgcttctygatgcttatcttctgaaatctcttacaagaagtcatattcatacaygatgtgttcagtctctctctgatcctcttctcacctgactgtgataatgacaaaaaatgaatacatatacaatgcagttttaagtgaacaagactgttatttatcagtaaaggctatgaaaaaagtagaatcaagttatcatttaatgataacaaaaaaaaaaaaaaaagccacagtattcataagtgtactggtcagtttccttgaaagactcccagtgccatcttgtattcagattttgtttctacttggct

SEQ ID NO: 51784 - DNA, 600 bp, Chicken  19866894299857_2
ttcccagaggtgttaaactgagtcataattcacagtgatctaacataagttggtacaaattatttgccataaattaatgctttggtttttgtggcatctcacgtaagagacatactttttctaatgggcttctttaaaaaaaaatagctacagtcaacattcaaaaagaaattcagttctgtttaatactatttatctttccagcacactgaataaaataatttaaaatgatggaaaacacatttctgcttctygatgcttatcttctgaaatctcttacaagaagtcatattcatacaygatgtgttcagtctctctctgatcctcttctcacctgactgtgataatgacaaaaaatgaatacatatacaatgcagttttaagtgaacaagactgttatttatcagtaaaggctatgaaaaaagtagaatcaagttatcatttaatgataacaaaaaaaaaaaaaaaagccacagtattcataagtgtactggtcagtttccttgaaagactcccagtgccatcttgtattcagattttgtttctacttggctgagtgcactgaagacatttctatgacataaaaggtcccgtgtatac

SEQ ID NO: 51785 - DNA, 548 bp, Chicken  19866894299857_3
tcctttaaatagttatcagtttcatgtcagtcttaaatcgctttttcctcagtggggaagaaaaacaacaagcatagcttttatgtttcttccaatttccttttttttgttgtttctgtttttgtttttgcctccagctacagcacagaacaaggttttgctaggtaaaatagcaggaaacagcaacagaggcactctcctccttctccacctaggtcccacctcccctagtttacaccctaagaaattcctgcagcttcaatagggggggtgttcctttttattccatatcacgaaagraggaaggtggtgtcaaaaagatgttaagcagattaagcttagaaatttcagataactttaaaagataagtgcacgggttctgatcttgctacacgctgaatattttatcctatgttatctttaaagggtgaaaaaggagacaatggtgtaaaaggagaaaaaggagaaccaaatggaggtttttacctgacaggaccacctggaccacctggaagaccaggattagttgtaagatacacaagttgtat

SEQ ID NO: 51786 - DNA, 600 bp, Chicken  19866894299860_1
aatatcacccagtacttcttcgcattaaattttttccacaaatgcacagttgactattgtcagtggaagacatagtagtatcactgaaaatcttttttttttttttttttttttaatgaagagttctaaaaaggtgctttgacagcgatataatggggttactctttatagcaattacagactgagttataaaggagagatcagtggaaaacatgatgtttttttaaaaatggaaagcctaataaatgactggggggaaaaagtttctaactggttttatttccataaatcactcagaasagctgccactcaaagcaacctacctttgttgaagatgcagttagcatatgttcagtctctgcaatagtacttgagataaatagaaatttatacacctattgttgctttctcttggtctcgtctccatccaaacttcaacctcccttagaacatatcctgacttcacaatatgtgaaccatgctatctaggctgtgttactgcttccagctaacttccgaagcacatagaaatgtgcgctcacttctatgacagtgatctagatacgccgatattaaaatatttataaaattggatcaatc

SEQ ID NO: 51787 - DNA, 600 bp, Chicken  19866894299862_1
caatcacagagaccttatacatgagctatacagcacagtacacttatttctgcatgtcattttttatatatattattataaattgttggagaagagagcaaagtatgagcaactatagtacactgaaaggtcagcattgtcacttggaaatggataagtttgtatggagtgagaaagcttctgcccatcgatatcatacaggagcttgtctgcatctaagctaataaatgtaagcgtggttgaacaggaaatattacttgtctgaagtgtggttcttgcatcctttgtcagcttttgcawttaatgaaaaatgatgcttttgcctagcacagtgtacactttcatccttgaaaaacacagttttggtttttgttttcttaaggatgtataaagttttcttggcacttttttttttctctcctcccatccagttgtaatgtgttggatgattattattgccattgcaagtcactaggtttccctgtgggggcactggaaaataaactttagagatgcaattgtccagtgacttgtaagaaaaaacataggtattggagcatgtttgctgtcacgttatttatcgaccagtcaagaagacat

SEQ ID NO: 51788 - DNA, 600 bp, Chicken  19866894299871_1
gtattgcatagaggcagcattaggacactgtctgggggataagacatattcatgctccagacagacatacctcatcaagccttaaacaactgcagtgaatttctgcccgcatcagtgaggccaggactttgtgtgcaggctctaaaccaaatcctccacccatgcaggctttgataagcccactatgtttccttccttctgctttccagatatttagaggaattttaaatgggtgcctctcaaacctgcaccaaaggcactgacaatcttaccgtgcagctcgatgcacagaaacttcaygttctttctgacagcatttctgtacctatgctgcctcggaaaygttcmcttgctcaacacaatgcgacatgattgctaagagcttggcagattctggagtaacatcaattccccccctgcacagtgtgaagcaggtgagcaatgcgtctacacagagctacatactactgccttttctgcacctcgctatgtttacttgtgcacccacagctctttctaacaggaacttgattcttactttcatggctgtgttaacatgacaccaaggcctgctcctccggcagtttgcggggggatgag

SEQ ID NO: 51789 - DNA, 600 bp, Chicken  19866894299871_2
acatattcatgctccagacagacatacctcatcaagccttaaacaactgcagtgaatttctgcccgcatcagtgaggccaggactttgtgtgcaggctctaaaccaaatcctccacccatgcaggctttgataagcccactatgtttccttccttctgctttccagatatttagaggaattttaaatgggtgcctctcaaacctgcaccaaaggcactgacaatcttaccgtgcagctcgatgcacagaaacttcaygttctttctgacagcatttctgtacctatgctgcctcggaaaygttcmcttgctcaacacaatgcgacatgattgctaagagcttggcagattctggagtaacatcaattccccccctgcacagtgtgaagcaggtgagcaatgcgtctacacagagctacatactactgccttttctgcacctcgctatgtttacttgtgcacccacagctctttctaacaggaacttgattcttactttcatggctgtgttaacatgacaccaaggcctgctcctccggcagtttgcggggggatgaggatgtcatgctgacacatccaggccttgatctgacagcaaaca

SEQ ID NO: 51790 - DNA, 600 bp, Chicken  19866894299871_3
ttcatgctccagacagacatacctcatcaagccttaaacaactgcagtgaatttctgcccgcatcagtgaggccaggactttgtgtgcaggctctaaaccaaatcctccacccatgcaggctttgataagcccactatgtttccttccttctgctttccagatatttagaggaattttaaatgggtgcctctcaaacctgcaccaaaggcactgacaatcttaccgtgcagctcgatgcacagaaacttcaygttctttctgacagcatttctgtacctatgctgcctcggaaaygttcmcttgctcaacacaatgcgacatgattgctaagagcttggcagattctggagtaacatcaattccccccctgcacagtgtgaagcaggtgagcaatgcgtctacacagagctacatactactgccttttctgcacctcgctatgtttacttgtgcacccacagctctttctaacaggaacttgattcttactttcatggctgtgttaacatgacaccaaggcctgctcctccggcagtttgcggggggatgaggatgtcatgctgacacatccaggccttgatctgacagcaaacaaggac

SEQ ID NO: 51791 - DNA, 600 bp, Chicken  19866894299877_1
tggattttcctggagaacatcaggagagatgtctgcactgtgggctgatggacaatgaggtacaaccagcagctccaaagggatggagggctgctatgggtacctcagaggttggagatgtcgctcccctccgtaattttcagcatgttgcagatatgtataagcataaacagatgttgttaacttttaaaatcaaaaattacaaacacaatcagcctgaaaacaatagctaggtttgcccagcaaccgcactgcctgcagccagtcctggctcctgagtgcacatgccacactcacacrgcacaggagggatgcacacatatggcactgatcccactgcagcaccatcacactgctcccagccccttctgggaaggaaggaggatcactgggaacatgtgagtcgggtcccatgtgagcaaaggaactgaaccctgggatgaaatgggataactggagctgccagcacagacctcccagcaacgccagcaaaagccaaggaatctgctgggtatccgatccattgctaacctcagctccacggcttcaggagcaatcacctgctgacaactacaaagatttgtcaccctgaactatact

SEQ ID NO: 51792 - DNA, 600 bp, Chicken  19866894299878_1
tacatccaagtagaagacattctatggtttagcactatcacatcttgggcacatactgttaacatttactacgtcactgccatgcaagtaagatgagcaatatatgaaagtggtttagcaccagaagagttagtagtgtactttcagcaaggtacctactactaaccaggcataggtaatatatcatacaagaacagatggaaactgaaaatactttaaatgttccctgcaattccagagtgatgcatctttaaaataagagctggattccacagcaaatattacctttggtaccatgtscatgctgttactaccaacctgtttccttagagtgcattctgctgctataccccacattctactggaaaaagttgtctacatatgtgtatatattatgtatgcatatatatgtatacacatatataaaatcataattaaaatacatttccttattgtcagagaaatatgcagacttctgaagaacccaaatgtgagaattaggttgacagctctacgttcagtatttcctcataaggaactaagccttttcttatcctggtatataattggcaacaaactgtgcaaccttaaatcrgagtt

SEQ ID NO: 51793 - DNA, 600 bp, Chicken  19866894299878_2
atgtscatgctgttactaccaacctgtttccttagagtgcattctgctgctataccccacattctactggaaaaagttgtctacatatgtgtatatattatgtatgcatatatatgtatacacatatataaaatcataattaaaatacatttccttattgtcagagaaatatgcagacttctgaagaacccaaatgtgagaattaggttgacagctctacgttcagtatttcctcataaggaactaagccttttcttatcctggtatataattggcaacaaactgtgcaaccttaaatcrgagttcaaagacaaagaacaaaatggctaatgacacaaggctaagagtgctctcagctggcagcatgttcagtttgcagtcgctcaatcagttgctcagcctatgaaagagagaacacaacacattaactatgcagcaggttgtcagttggctgaaaagtccactttaaaaatagtaacagcatgacactgacagacacagcatatatttatcattcttacggataaagcatacaaagaagtaaaataccacgactgttttaaacagctgacattgtcgtgttttcactaaactcccact

SEQ ID NO: 51794 - DNA, 487 bp, Chicken  19866894299887_1
gtgtggtgatcaggactagggaagtaatcctgcccctgtactcagcactggtgaggctgcacctcgagcactgtgtccagttttgggccccttattgtaagaaagacattgaggccctggagcgtgtccagaggagggcaacaaagctggtgaggggtatggagcacaggccttatgaggagcggctgaaggagctgggattgttcagtctggagaagaggaggctcaggggagaccttattgctctctataactacctgaagggaggttgtagtgagctgggcatcagccttttctccygtgtgactagtgataggacgagagggaatggcttcaagctgcrycagggaagattcagactggatgttaggaaatactacttctctgaaagggtggtcaggcactggaatgggctgcccagagaggtgacggagtcaccaagcctggtggtgttcaaagagcgtttggatgttgtgctgagggacat

SEQ ID NO: 51795 - DNA, 444 bp, Chicken  19866894299887_2
agcactggtgaggctgcacctcgagcactgtgtccagttttgggccccttattgtaagaaagacattgaggccctggagcgtgtccagaggagggcaacaaagctggtgaggggtatggagcacaggccttatgaggagcggctgaaggagctgggattgttcagtctggagaagaggaggctcaggggagaccttattgctctctataactacctgaagggaggttgtagtgagctgggcatcagccttttctccygtgtgactagtgataggacgagagggaatggcttcaagctgcrycagggaagattcagactggatgttaggaaatactacttctctgaaagggtggtcaggcactggaatgggctgcccagagaggtgacggagtcaccaagcctggtggtgttcaaagagcgtttggatgttgtgctgagggacat

SEQ ID NO: 51796 - DNA, 443 bp, Chicken  19866894299887_3
gcactggtgaggctgcacctcgagcactgtgtccagttttgggccccttattgtaagaaagacattgaggccctggagcgtgtccagaggagggcaacaaagctggtgaggggtatggagcacaggccttatgaggagcggctgaaggagctgggattgttcagtctggagaagaggaggctcaggggagaccttattgctctctataactacctgaagggaggttgtagtgagctgggcatcagccttttctccygtgtgactagtgataggacgagagggaatggcttcaagctgcrycagggaagattcagactggatgttaggaaatactacttctctgaaagggtggtcaggcactggaatgggctgcccagagaggtgacggagtcaccaagcctggtggtgttcaaagagcgtttggatgttgtgctgagggacat

SEQ ID NO: 51797 - DNA, 600 bp, Chicken  19866894299892_1
taataaatatcatcttactaaatagaccagaaacatatcaacatctgtttttcacattcattcaacctgagattgggatcaaaaatctatgcaagccctaccttttccactgggactattgctaaaatcaaatgtctggctaggctagtatactgtttctaatagggattaatactgggagccttagagtctgtgaaccagataagtatagaataataactcattggtatattctcccggcctcaatgtgattctaatttcagatttatttctactccttaggtactctactacctctgytctgctatctagaaaacacatctccgaatccactaattatgtttggcatcatctattaggacttgaagttcaaattttcctttttttctttcagcttaagttaatttttctgctaatctgttttcaagtacatctgttttctttacttcctagtagttagtttcataaatactttagtgtccctggagatgtgttttgtgtgaaattgtgtgactcagtttacacttttaatatagtcttctttcttatgtgatctcaaggggctctacttcttggagagatgctcactgggaataggcg

SEQ ID NO: 51798 - DNA, 600 bp, Chicken  19866894299894_1
ctgtgcagaagttttctatgccacagcttaatgcgaacccactgtgttgttgtgaagctgagatattctaaaacaagcaatcagcaattgagtctgcaaccctgcagtgcttttctcttcacagttggctcttaggtttatgtaatactttaaaagtagtctattaagggaagtgtaattaaaatttaaactcatggtaaatgctagaaggcatcaatgtctgttccttcacagtaacttctgcacgggctcattaaaactgtccttgatggtttttttaatcttgggtggctgctgacrgcgtgtttcagccttgctggcttggttctgaaaagccagctgataatcctgacatgtgcacygtgttcctcacctccctgacccctcaaaaaagcatgctggggtgagcagtgctgggrtaacagctccacagaacggctgtacagcacccccttgctttgcactcgctctgatgggtgaagcctcctttgttgtctgcaggttttttcactgcaacgccagcatccggagcaggaacggtctctgggatgattgtgggaggtctgggtctgctcagtgctcgtctcacaggaatattaa

SEQ ID NO: 51799 - DNA, 600 bp, Chicken  19866894299894_2
atattctaaaacaagcaatcagcaattgagtctgcaaccctgcagtgcttttctcttcacagttggctcttaggtttatgtaatactttaaaagtagtctattaagggaagtgtaattaaaatttaaactcatggtaaatgctagaaggcatcaatgtctgttccttcacagtaacttctgcacgggctcattaaaactgtccttgatggtttttttaatcttgggtggctgctgacrgcgtgtttcagccttgctggcttggttctgaaaagccagctgataatcctgacatgtgcacygtgttcctcacctccctgacccctcaaaaaagcatgctggggtgagcagtgctgggrtaacagctccacagaacggctgtacagcacccccttgctttgcactcgctctgatgggtgaagcctcctttgttgtctgcaggttttttcactgcaacgccagcatccggagcaggaacggtctctgggatgattgtgggaggtctgggtctgctcagtgctcgtctcacaggaatattaactgtgttccgaaaaagctgatgrggtctgttctgactctgcagtgattccccacaagatmgg

SEQ ID NO: 51800 - DNA, 600 bp, Chicken  19866894299894_3
cacagttggctcttaggtttatgtaatactttaaaagtagtctattaagggaagtgtaattaaaatttaaactcatggtaaatgctagaaggcatcaatgtctgttccttcacagtaacttctgcacgggctcattaaaactgtccttgatggtttttttaatcttgggtggctgctgacrgcgtgtttcagccttgctggcttggttctgaaaagccagctgataatcctgacatgtgcacygtgttcctcacctccctgacccctcaaaaaagcatgctggggtgagcagtgctgggrtaacagctccacagaacggctgtacagcacccccttgctttgcactcgctctgatgggtgaagcctcctttgttgtctgcaggttttttcactgcaacgccagcatccggagcaggaacggtctctgggatgattgtgggaggtctgggtctgctcagtgctcgtctcacaggaatattaactgtgttccgaaaaagctgatgrggtctgttctgactctgcagtgattccccacaagatmgggcgtgtgatagatgggagcccagcagatcagtgcgggaagctgaaggtgggagaccg

SEQ ID NO: 51801 - DNA, 600 bp, Chicken  19866894299894_4
ggttctgaaaagccagctgataatcctgacatgtgcacygtgttcctcacctccctgacccctcaaaaaagcatgctggggtgagcagtgctgggrtaacagctccacagaacggctgtacagcacccccttgctttgcactcgctctgatgggtgaagcctcctttgttgtctgcaggttttttcactgcaacgccagcatccggagcaggaacggtctctgggatgattgtgggaggtctgggtctgctcagtgctcgtctcacaggaatattaactgtgttccgaaaaagctgatgrggtctgttctgactctgcagtgattccccacaagatmgggcgtgtgatagatgggagcccagcagatcagtgcgggaagctgaaggtgggagaccgcatctcggcggtgaatgggcagtccatcgtggagctctcccacgacagcatcgtgcagctgatcaaagatgcaggccacgtggtgactctgaccgtcgttgctgaggaaggtgagggtgcacctgctgaggtgaacgtggccaccacgtgtgccacatctgttgtgtgtagctttcgaggtcggtttgcttacagggggggtgt

SEQ ID NO: 51802 - DNA, 600 bp, Chicken  19866894299894_5
cygtgttcctcacctccctgacccctcaaaaaagcatgctggggtgagcagtgctgggrtaacagctccacagaacggctgtacagcacccccttgctttgcactcgctctgatgggtgaagcctcctttgttgtctgcaggttttttcactgcaacgccagcatccggagcaggaacggtctctgggatgattgtgggaggtctgggtctgctcagtgctcgtctcacaggaatattaactgtgttccgaaaaagctgatgrggtctgttctgactctgcagtgattccccacaagatmgggcgtgtgatagatgggagcccagcagatcagtgcgggaagctgaaggtgggagaccgcatctcggcggtgaatgggcagtccatcgtggagctctcccacgacagcatcgtgcagctgatcaaagatgcaggccacgtggtgactctgaccgtcgttgctgaggaaggtgagggtgcacctgctgaggtgaacgtggccaccacgtgtgccacatctgttgtgtgtagctttcgaggtcggtttgcttacagggggggtgttttcaggtgtttgggaaagagatccatttcttccaga

SEQ ID NO: 51803 - DNA, 599 bp, Chicken  19866894299904_1
  misc_feature (1)..(155): n is any nucleotide
nnnnnnnnnnnnnnnnnnnnnnnnnnnnnnnnnnnnnnnnnnnnnnnnnnnnnnnnnnnnnnnnnnnnnnnnnnnnnnnnnnnnnnnnnnnnnnnnnnnnnnnnnnnnnnnnnnnnnnnnnnnnnnnnnnnnnnnnnnnnnnnnnnnnnnnnnnnaatggcttggtttggaagggacccttaagatcatgtagttccaaccccctgcaataagcagggacacctcccactaggccaggctgctcaaagccccatccagcctggccttgaatgcttccagggagggggcatccacagcctytctgggcaacctgttccagtgtctcaccaccttcacagtaaagaatttcttcctactatctagtctaaatctgccatctcccagtttaaagccattttccctcatcctgtcacctaatgcctttataaaaagtcccttcccatctttcctgtaggtcccttcaggtactggaatgctgctacaagatctccttagggccttctcttcaggctgaagggcaccagcctgtcctggtagggraggtgctctagtcctcttatcatctttgtggcccttctctgggcctgctccaacaactc

SEQ ID NO: 51804 - DNA, 600 bp, Chicken  19866894299904_2
gctcaaagccccatccagcctggccttgaatgcttccagggagggggcatccacagcctytctgggcaacctgttccagtgtctcaccaccttcacagtaaagaatttcttcctactatctagtctaaatctgccatctcccagtttaaagccattttccctcatcctgtcacctaatgcctttataaaaagtcccttcccatctttcctgtaggtcccttcaggtactggaatgctgctacaagatctccttagggccttctcttcaggctgaagggcaccagcctgtcctggtagggraggtgctctagtcctcttatcatctttgtggcccttctctgggcctgctccaacaactccatgtccttcttgtgttcaggaactggacacagtactccaggaggggtctcacaatagcaaagtaaaggggcagaatcacctccttcaacctgttggccacacttctcttgatgcaactcaggatacggttggccttctgggctgaaagtgcacattactggctcatgctcaatcttctatctaccagcatctccaaatacttctcctcagtgctgctgtcaagccattctccacccaacc

SEQ ID NO: 51805 - DNA, 600 bp, Chicken  19866894299908_1
ctgaggctctgcggtaagttaaacctcccttatcactggttatactgtctaatactaactgtacgttaaatgtaataatccaaaattgctgaactagtctcaagtagacaaactgggagtgcccaaggattgtcatgatgtgttttgtctcttggagtggcaacctctctcctctacgcttgaatttccttccttcctccttctcttccctgtcctgccaattggtgctgtttgctgcattgtgttcactcaccttttggtgagggactttcaatctatttttatataattcttttaacrgcatctagttggtgattgtgggtttttttgttctttttttcttcctgtgtgcctagaaactatgagaatttggtcaacatgctgttggactgtgtggagcaaagaaatctgtaagtctcccttcacgtgtacaaaatgttttatttctttatgctgttttggagttgaatacagcaataaatatcaaattcatcaagaggtgcagttagaatgatcagaattgagtattactttttgtccttcaggtagttgtccaaaagcagtttgtcagtagaaatcttgcataaagttggttgtggc

SEQ ID NO: 51806 - DNA, 411 bp, Chicken  19866894299909_1
ggcagctgtgaactgggcaatatgcccaggggctggtggggctgctggttcccagggaggagcgagccatgcaggcacaaaggatgcgaggcaccactgctggctgtgggcatggggacaaataccttcggcacctcatttgccaccagcacccacttcttcaggggcctctggtcaaatccgccttctgcttcctcagcctcatctcctttggaatggctcagaatgcacctgtgctgggcctcgtttggtgcacgtcagtgatttacaggcatttgcaaaatgctaggatggggcttytgatgagtaaaaaacatccagcaaagaaatgtaaccacaagttgactgacccgtggcttttggcacaccctgtgctgcactgaggtcctgcaaatttcttctgcgcatcat

SEQ ID NO: 51807 - DNA, 599 bp, Chicken  19866894299911_1
  misc_feature (1)..(121): n is any nucleotide
nnnnnnnnnnnnnnnnnnnnnnnnnnnnnnnnnnnnnnnnnnnnnnnnnnnnnnnnnnnnnnnnnnnnnnnnnnnnnnnnnnnnnnnnnnnnnnnnnnnnnnnnnnnnnnnnnnnnnnnnnctgcacaagttctccccttgctggctgctgaaatgagccagaccacgctgcaaaaacagaactttcagcactaacccaaggctgagatcacatttacacccatgccataaggcagtttgttacagcctctaatcaaggatgctgatgaggggttccagagcacaccctgcactgcacgycctgtcaatcaccagcaattctcatgtgaaaacccttaagcttatgctgcttttcacacactaggggctgtagtagtcctgagccctgactgtgctgtcttctccacagacattgatgacatgtgcaatgactgacagcaaaaagaatgaaaagagatgaggcaggaaaggatttccatgttttgcacaaaaccaggcaccaaaacacagcttgactacataacttctctctgcatgaagcagcagatttccctccccagaggagctcagtgaggaggcacacggcgatgtgcggtgct

SEQ ID NO: 51808 - DNA, 405 bp, Chicken  19866894299911_2
tgtgctgtcttctccacagacattgatgacatgtgcaatgactgacagcaaaaagaatgaaaagagatgaggcaggaaaggatttccatgttttgcacaaaaccaggcaccaaaacacagcttgactacataacttctctctgcatgaagcagcagatttccctccccagaggagctcagtgaggaggcacacggcgatgtgcggtgctgcttactcagagctctggctgcagcacgaagcactgccttcacccactcagcacgtgcacagagccttctcctggccggagagcccagcayggctgtcacacattacatgcaacacggcstcggccatctagtgtgtgctgctgcatgtygggggcagatagggaccaggcagcacgactggacacagtgcataag

SEQ ID NO: 51809 - DNA, 376 bp, Chicken  19866894299911_3
catgtgcaatgactgacagcaaaaagaatgaaaagagatgaggcaggaaaggatttccatgttttgcacaaaaccaggcaccaaaacacagcttgactacataacttctctctgcatgaagcagcagatttccctccccagaggagctcagtgaggaggcacacggcgatgtgcggtgctgcttactcagagctctggctgcagcacgaagcactgccttcacccactcagcacgtgcacagagccttctcctggccggagagcccagcayggctgtcacacattacatgcaacacggcstcggccatctagtgtgtgctgctgcatgtygggggcagatagggaccaggcagcacgactggacacagtgcataag

SEQ ID NO: 51810 - DNA, 346 bp, Chicken  19866894299911_4
aaaagagatgaggcaggaaaggatttccatgttttgcacaaaaccaggcaccaaaacacagcttgactacataacttctctctgcatgaagcagcagatttccctccccagaggagctcagtgaggaggcacacggcgatgtgcggtgctgcttactcagagctctggctgcagcacgaagcactgccttcacccactcagcacgtgcacagagccttctcctggccggagagcccagcayggctgtcacacattacatgcaacacggcstcggccatctagtgtgtgctgctgcatgtygggggcagatagggaccaggcagcacgactggacacagtgcataag

SEQ ID NO: 51811 - DNA, 434 bp, Chicken  19866894299912_1
agcttgactacataacttctctctgcatgaagcagcagatttccctccccagaggagctcagtgaggaggcacacggcgatgtgcggtgctgcttactcagagctctggctgcagcacgaagcactgccttcacccactcagcacgtgcacagagccttctcctggccagagagcccagcatggctgtcacacattacatgcaacacggcgtcagccatctagtgtgtgctgctgcatgtcgggggcagatagggaccaggcagcacgactggacacagtgcataagttatcaggggcaytgggagccagcacgagggagctcagggcttcagccgctgtgcccatacaacacactctgctctaggtctgtccttactgctttctgctctttaagaggacagggacacggtgctcagtccaagctccaagtctt

SEQ ID NO: 51812 - DNA, 600 bp, Chicken  19866894299917_1
ttataaatcattagaggtatttaactggtcaggaaagcaaaagataactcatatgctgtctatacattcatcatgaaaattagatccgatctcgtttcactgtcaccccttaaatgatgtgccttttgtgatttagaagggaacataccaatgtgtctttcacttagcagtgcttctttcagctctggatttgatatgcacgcacctcatgatcagagtgaagtgatcaataagcagttgtggcgctcaaggttatcccaagttcaaagtgggctcggagctgattactttccaaaatcrgatgcggtcaggctgctgtggtcacaggagcaaggtcactgaggggatctggtgacagtataaataataaagcagagcttatctagtttgttgacagtacccccacccccaggataaattgtgctttattgcgttgtttttcaggcttttctgtgtgatctctcaccttttgtgacccctctctttatttttctctttcaccacaaatgttttttcccactttctcccccagtgccatttcagttgtaaatagaataaagaacttgcttggaaggcagtaagtcagcaaatcaatgccat

SEQ ID NO: 51813 - DNA, 600 bp, Chicken  19866894299917_2
cccctctctttatttttctctttcaccacaaatgttttttcccactttctcccccagtgccatttcagttgtaaatagaataaagaacttgcttggaaggcagtaagtcagcaaatcaatgccatcccattactgaattagatcagagacagacatgatggatcaaatacattaaaaagacaggtagctcatggctaaccctatgatattttacctttgctctagtgtttatcgtgctcaaatgaagcgtttggctgaaatggtggattatgacctgtctgttaactacgagataatatrctaaagatagataccgaaaactgcgtttgcaagcccctttccaccttccatgcctctcttcatgataccatcagtgctcttttcccatactcgtctgtgtcactgataagccaaaggttgtacatgcccggggactcctctggcagctgaatgtcaaactttatggagtgggtggatcctgatcatccatttcccttccgagcttttctaaaaataccacaaaccttgacaaggagctatttttgaggaatcatattcatgaggatagtcatgggaagcttattttggcaggcttgcatg

SEQ ID NO: 51814 - DNA, 600 bp, Chicken  19866894299921_1
aagtttagcagtttctgcttttgttgaatttattcacttggagagggattgggggtgctttctgtctctgtgtagcattaattttcaaatgtaaggcagagcgatcaataatctattctgccagcaatttcacttggtttgttcttgtatcaggtattagtttcctctgcagatttattgcctacagctttgatgttatctggcatgagcacgcctgtcactgagcctcctgtggcatacccaagtctccatgtggccctgagccatggtgtagcttggcatgggaacaggtgaaattawtctgagttgcatgcagttggtcatccctgaactaagcaatcatctgccatctctcccaaagtgctgaaaaaaaaaaatacagctatttccatctacctgtacagcttggaacmttctgattgtcttccccacctatggccattttggcttgcatagccagtggtgacccaacacatttggcctttaaatcaagatttctgcataatcagattcatgaattgaggcacttagggaaatattggcctctacatcactgtgtaggctggtgttacctgcaggtagtcatacatagacagctct

SEQ ID NO: 51815 - DNA, 533 bp, Chicken  19866894299921_2
tattctgccagcaatttcacttggtttgttcttgtatcaggtattagtttcctctgcagatttattgcctacagctttgatgttatctggcatgagcacgcctgtcactgagcctcctgtggcatacccaagtctccatgtggccctgagccatggtgtagcttggcatgggaacaggtgaaattawtctgagttgcatgcagttggtcatccctgaactaagcaatcatctgccatctctcccaaagtgctgaaaaaaaaaaatacagctatttccatctacctgtacagcttggaacmttctgattgtcttccccacctatggccattttggcttgcatagccagtggtgacccaacacatttggcctttaaatcaagatttctgcataatcagattcatgaattgaggcacttagggaaatattggcctctacatcactgtgtaggctggtgttacctgcaggtagtcatacatagacagctcttcattcctggcagtgaagagtgtgtctggagtgagaccaaaacaaa

SEQ ID NO: 51816 - DNA, 600 bp, Chicken  19866894299922_1
tactgcttctttaacaatgaactggttttctacagaacaccatttttctatctttatctaggctgcaataactccaatttcttgttcctcataataacagttttgatactaacttattccactggcaatttttacctatagaagacatcttcaatagctctcagactgcaggtgattttggtagggaaacatccattgatattctgattgtaaaattctctgaagtctttatttttttcctgaaccatctacattactgttattttagaatgaaggtgacttagcctctttgcaaaactkcttattcaacatgttgttaacaagcaaatatgattggtgcaacattatcttcctaaccagaatcataactgaccagatagttatgaaaatctcaccaaaattctaagagtagtctttaatctcaattttatagcaacttctggcactgcatgaatacatgattttgtacagtctctgtgtttcagaacagaagtagctaggtttagtttgtggaagagagataaactatttatatttgggatcaattgcttcaaaagtgcaggactgtactacttttggttatgctagctacttagcaaa

SEQ ID NO: 51817 - DNA, 599 bp, Chicken  19866894299923_1
  misc_feature (1)..(166): n is any nucleotide
nnnnnnnnnnnnnnnnnnnnnnnnnnnnnnnnnnnnnnnnnnnnnnnnnnnnnnnnnnnnnnnnnnnnnnnnnnnnnnnnnnnnnnnnnnnnnnnnnnnnnnnnnnnnnnnnnnnnnnnnnnnnnnnnnnnnnnnnnnnnnnnnnnnnnnnnnnnnnnnnnnnnnntcgctcctgttggaaaagaccttaaagacctcgagtccaaccatgacctaaccatactaccctaactcaaacaaccccccactaaatcatgtccctgagcaccacatccaaatgatttttaaacacatccaagratggtgactcaatcacctccctgaggagcctattccagtgcttagcaaccctttcagtgaagaagtttttcctgatatccaacctaaacttaccctggtgcaacttaacgccatttccacycgtcctgtgccagttagccatttctaagttctcactatactttggaaccaaatttggctgttttctaacatatcccatgcttggaaatgcttggaaataggaagcttggaaataggaagtacaggtagtgaagaaatagttatattgttccagcracagttaatgtctactttcatta

SEQ ID NO: 51818 - DNA, 599 bp, Chicken  19866894299923_2
  misc_feature (1)..(45): n is any nucleotide
nnnnnnnnnnnnnnnnnnnnnnnnnnnnnnnnnnnnnnnnnnnnntcgctcctgttggaaaagaccttaaagacctcgagtccaaccatgacctaaccatactaccctaactcaaacaaccccccactaaatcatgtccctgagcaccacatccaaatgatttttaaacacatccaagratggtgactcaatcacctccctgaggagcctattccagtgcttagcaaccctttcagtgaagaagtttttcctgatatccaacctaaacttaccctggtgcaacttaacgccatttccacycgtcctgtgccagttagccatttctaagttctcactatactttggaaccaaatttggctgttttctaacatatcccatgcttggaaatgcttggaaataggaagcttggaaataggaagtacaggtagtgaagaaatagttatattgttccagcracagttaatgtctactttcattaattacatctgggatgggaarcagacagcttgtcttctattaactgaaataagcaagtgatcaataagtgttaattgcgcaagtatcagcaagtatgctgaatgtcctcccacaaggtacca

SEQ ID NO: 51819 - DNA, 600 bp, Chicken  19866894299923_3
aatgatttttaaacacatccaagratggtgactcaatcacctccctgaggagcctattccagtgcttagcaaccctttcagtgaagaagtttttcctgatatccaacctaaacttaccctggtgcaacttaacgccatttccacycgtcctgtgccagttagccatttctaagttctcactatactttggaaccaaatttggctgttttctaacatatcccatgcttggaaatgcttggaaataggaagcttggaaataggaagtacaggtagtgaagaaatagttatattgttccagcracagttaatgtctactttcattaattacatctgggatgggaarcagacagcttgtcttctattaactgaaataagcaagtgatcaataagtgttaattgcgcaagtatcagcaagtatgctgaatgtcctcccacaaggtaccagctgaggagtatttttatgctcctactttcttcatgtcaatctcagtcataggcaaagccagtataggtctgatgttcagtagaccgaatttagttctgcttagtgataatcagggccttcagaaacaawactattggtaatatcaagcactatta

SEQ ID NO: 51820 - DNA, 600 bp, Chicken  19866894299923_4
cctgaggagcctattccagtgcttagcaaccctttcagtgaagaagtttttcctgatatccaacctaaacttaccctggtgcaacttaacgccatttccacycgtcctgtgccagttagccatttctaagttctcactatactttggaaccaaatttggctgttttctaacatatcccatgcttggaaatgcttggaaataggaagcttggaaataggaagtacaggtagtgaagaaatagttatattgttccagcracagttaatgtctactttcattaattacatctgggatgggaarcagacagcttgtcttctattaactgaaataagcaagtgatcaataagtgttaattgcgcaagtatcagcaagtatgctgaatgtcctcccacaaggtaccagctgaggagtatttttatgctcctactttcttcatgtcaatctcagtcataggcaaagccagtataggtctgatgttcagtagaccgaatttagttctgcttagtgataatcagggccttcagaaacaawactattggtaatatcaagcactattaaattttcagatatatgtgaaatggttgaaatgttatttgccat

SEQ ID NO: 51821 - DNA, 453 bp, Chicken  19866894299923_5
gaagaaatagttatattgttccagcracagttaatgtctactttcattaattacatctgggatgggaarcagacagcttgtcttctattaactgaaataagcaagtgatcaataagtgttaattgcgcaagtatcagcaagtatgctgaatgtcctcccacaaggtaccagctgaggagtatttttatgctcctactttcttcatgtcaatctcagtcataggcaaagccagtataggtctgatgttcagtagaccgaatttagttctgcttagtgataatcagggccttcagaaacaawactattggtaatatcaagcactattaaattttcagatatatgtgaaatggttgaaatgttatttgccatcactttttgtgtaagattcatccagttggttattcagtacataaatattgattctacacaggggaagtgcttataggaggggcc

SEQ ID NO: 51822 - DNA, 562 bp, Chicken  19866894299926_1
taggattcaaagtgtattattcacattttgagtgttttaaaagtatgacatgctgtgtcagtgatgcctgctatccattcataacactgcatggaagtttactgaaacactgcaataaatctgtatttttcaagaggagactggaaacataacaagactcattactgtttagttcactgacactgtttcacaatcctggaatggttcagatggggaaaaaagaaagaaagagagaaagagagagagaaagagagaaagagagaaagagagaaagagagaaagagagaaagagagaaagaragaaagaaagaaagaaagaaagaaagaaagaaagaaagaaagaaagaaagaaagaaagaaagaaagaaagaaagaaagaaagaaagaaagaaagaaagaaagaaagaaaggaaagaaaggaagaaagaaagagaatttggtcctcctgttcaagatttttctcttctggttcagttggggttttgcccatgaaaaaggtctgcagaatcatgaaattacagataggcttcaatttgtgtagatgggcccattcaaaatcatt

SEQ ID NO: 51823 - DNA, 600 bp, Chicken  19866894299930_1
caacagatacagagagcacaataacactatctgatagggcaaactctccggtacaaaccagtatttttcagcacagtcaccaccattagctgtgcacttttgcctgtgatgaacaagagtctgcatgctgtgctcgtaaaactctgcaccaggagagctaacccactgctgctgccaccactgctgcaatgcaccactgactctgcactgttcggtctccaccagttttcatagcattaatgaatgtcaatgggtgccatttttttccacatggaggaattcaattccaccccttcgctycatacaaacttccatgtcagactgcccctctgctgccatctgttgcacagcagaaaacgtaacagaataggacccataaggcagtgagctgggactctctcactcaacagcccacactgtgccttatggggaaaaaaaaagaaaaggcaaatcccacctttgctgcccattctcaccctacttttgttctgttcactgattaacagtgacagtgtttcttccytccctatcacttaactcagtcagaaatgccgtaggtttcaagcagaatagcaaattcatcccactgagcatgaagaa

SEQ ID NO: 51824 - DNA, 553 bp, Chicken  19866894299930_2
agttttcatagcattaatgaatgtcaatgggtgccatttttttccacatggaggaattcaattccaccccttcgctycatacaaacttccatgtcagactgcccctctgctgccatctgttgcacagcagaaaacgtaacagaataggacccataaggcagtgagctgggactctctcactcaacagcccacactgtgccttatggggaaaaaaaaagaaaaggcaaatcccacctttgctgcccattctcaccctacttttgttctgttcactgattaacagtgacagtgtttcttccytccctatcacttaactcagtcagaaatgccgtaggtttcaagcagaatagcaaattcatcccactgagcatgaagaaaacctgtcctcagtgatcctcagaatcctttgctaccaagtaaacactcagtgaccttcatagacacaacctgcagacccagcacagatgattttcagtccaaccaaacactgaacagttgcaggcagtgatacagttcttattccaatgtacataaaggaaacagtcaaagaatt

SEQ ID NO: 51825 - DNA, 599 bp, Chicken  19866894299936_1
  misc_feature (1)..(175): n is any nucleotide
nnnnnnnnnnnnnnnnnnnnnnnnnnnnnnnnnnnnnnnnnnnnnnnnnnnnnnnnnnnnnnnnnnnnnnnnnnnnnnnnnnnnnnnnnnnnnnnnnnnnnnnnnnnnnnnnnnnnnnnnnnnnnnnnnnnnnnnnnnnnnnnnnnnnnnnnnnnnnnnnnnnnnnnnnnnnnnntagagagaatgagctctctaaaagagaaccagatatacaatactggtacaggagcagagtttcacgttcagttcacactaaacacttgtgagtcttaacactttctgaatctgaaacatacaacrtatatatatgatcactgtcctaaacacaaaaataggtcagacatctgctcaaggtggcattcccatttaaaagctgcttgcattagaaaactggtgtaatgtgatctccattgtccctctcgtgccattcatctccccagtcactataagagaattgataatgcacagaaaatgaggaagggctaaagtactaaatgttcctctatgctttcagtcagttattacagtactttctgcccaacttttctacttgtaatgtctctgtctgcttttggaagccctataaaccacatagtacc

SEQ ID NO: 51826 - DNA, 600 bp, Chicken  19866894299947_1
gcgtggttttgcatccttcccttccttctgggggcagacggaaagccctctgtgctgcagtttgctctctctttggtatctccagctcagagtccagagccttatctcaaccagaaaacccttgccccacacccccgcctgtcccagccatgccagcagctgtcactgaagcacagctgggtggtaattgtgctccacgtgatggacttcatctgaactggcaccgaaacgggatctgccaccaacaaacccagccctgaggtttatgagcccataaaggaagtatctgtggggacctgstgttgtagaaaccccactcagggatgtcagccttgaactcaggtgagttgtgcatctgaagataaaaccayggagaatggcacagacagggagtgccaggagcagggatgcctcctcccccatatgccagccaggacacagagcccagggctgcatttgggtgagaaatatgtagattcatgtcctgccacctccgacttgggatgtgtgtcttcttgcactgcgtggtgcttggctctggcagcatggtaggtttggtcccactgcactgttctccatcgtgttgcacgtggagcaggt

SEQ ID NO: 51827 - DNA, 600 bp, Chicken  19866894299947_2
tttggtatctccagctcagagtccagagccttatctcaaccagaaaacccttgccccacacccccgcctgtcccagccatgccagcagctgtcactgaagcacagctgggtggtaattgtgctccacgtgatggacttcatctgaactggcaccgaaacgggatctgccaccaacaaacccagccctgaggtttatgagcccataaaggaagtatctgtggggacctgstgttgtagaaaccccactcagggatgtcagccttgaactcaggtgagttgtgcatctgaagataaaaccayggagaatggcacagacagggagtgccaggagcagggatgcctcctcccccatatgccagccaggacacagagcccagggctgcatttgggtgagaaatatgtagattcatgtcctgccacctccgacttgggatgtgtgtcttcttgcactgcgtggtgcttggctctggcagcatggtaggtttggtcccactgcactgttctccatcgtgttgcacgtggagcaggtgacccatgcagggagaaagatccctgcaaggtgaaccatagaaactgaggcatttatggcattggtgttta

SEQ ID NO: 51828 - DNA, 599 bp, Chicken  19866894299948_1
  misc_feature (1)..(148): n is any nucleotide
nnnnnnnnnnnnnnnnnnnnnnnnnnnnnnnnnnnnnnnnnnnnnnnnnnnnnnnnnnnnnnnnnnnnnnnnnnnnnnnnnnnnnnnnnnnnnnnnnnnnnnnnnnnnnnnnnnnnnnnnnnnnnnnnnnnnnnnnnnnnnnnnnnnncaagtgtgccatctcctccagccggagccattggggtgcgggcggcatcccaacgtggatccgcggcgcgcaggcggcaggtaggggagcgtggctggggcgtggggctgcctcgcacctggtggtagggggggacaggcacggagcggggstgagcggcgtgggaacagcgggagaaggtgaaggagctgatcctgaccgagcctgcgagccgagggatagaatctcccttccttcagctccgtctcctggcttccgtctgcaccccgctgccggggacaggggatcccctgcagggacacgctgatccccctgtccgtcgtttcktttttccccttccccttgatgagggaagtgcactcggggctgggcgtcgcggcacggagctgcttgctcctgcacgttgcagagggagcagagtttgcttccagctcccggaggctccaatgga

SEQ ID NO: 51829 - DNA, 600 bp, Chicken  19866894299948_2
ccattggggtgcgggcggcatcccaacgtggatccgcggcgcgcaggcggcaggtaggggagcgtggctggggcgtggggctgcctcgcacctggtggtagggggggacaggcacggagcggggstgagcggcgtgggaacagcgggagaaggtgaaggagctgatcctgaccgagcctgcgagccgagggatagaatctcccttccttcagctccgtctcctggcttccgtctgcaccccgctgccggggacaggggatcccctgcagggacacgctgatccccctgtccgtcgtttcktttttccccttccccttgatgagggaagtgcactcggggctgggcgtcgcggcacggagctgcttgctcctgcacgttgcagagggagcagagtttgcttccagctcccggaggctccaatggaagccctgtccccgtgtgcgctcagcaccgcaccgcgctgtgctgtgctgcgctgtgctggaggagcacgggggagagcaggcagagggatgcagctcggctgtgccgtgtccatgcctgggaaccggggctgggacgggcagggtgcagagctgggcaggagagcaggtggagagg

SEQ ID NO: 51830 - DNA, 600 bp, Chicken  19866894299950_1
acaagcctaaaaaagtgctcttgtgcagggctttggaaaatctaaatctgtgtcacccctctgccttctggagggagagcagggagaatgcactgcgcctacgtcagtagccatatgctgtacagagccattcatggaaaagaaggctgctgtgtcttcttggatttagcaacaaaaactctctcctgtgtgtatttcttccaaatggtcttctgaggcagctacttcgcagtgaaatatattcataattcagaaaaagatttttactccaggacacataaatgccagctgtgatgtttygagcccgagaaatgcctgcatgagcagtaggtaaaccagaaattttgagttttcttcctggaaagtcatatcaattctgtgataactcagaaagaggctgaatggacctttataaaaatacgaactaagtcacttctaagtggagacagctggggtctatttaatatcctgtgtaaaatggtcggggtcaacttcctggaataactgaggagttttatttcacaaatatcccagtgctgcagagacctgaggtgacggcgaggctcttgaactaacatgtgctgcaaggaaaagctctgc

SEQ ID NO: 51831 - DNA, 600 bp, Chicken  19866894299950_2
gtggggtggtgggaagcgcccaagggcctgggatgtgtgtgcatccttgtaagtatttgctgtgggtgcttcttaatgtgtgctaccagtctcaggcttttcttccaaccctgtatttgtgtggtttagagattggagaactagtggaaaagcattgggaggtggcactctggacaataagtctagggattcgtgaatgtgatggtccaaaatacctagcttcttttctaatctgggacattggatcctaaattcgttcatttatcatcacgcttgcacagtgtcttttttccccttagrgtgaatgcagccatatccttgctgtctaacactgtgcatttccttgatgtattccctgtatctattcaatttaactgttctggattcctcgggtttagaatcttaccttgtaacgtgctgctattcagttgtatatgggtgaaaagatgttagtatgtatagaccactaccgctgctgagtgttcacccccacacgcagaagttgcatgatatgacaattagtataagctgtagcccagtggcaacttaattataaacgtgtgctgcactaagcatggaaactggtgaaaaaactataca

SEQ ID NO: 51832 - DNA, 600 bp, Chicken  19866894299950_3
tttagaatcttaccttgtaacgtgctgctattcagttgtatatgggtgaaaagatgttagtatgtatagaccactaccgctgctgagtgttcacccccacacgcagaagttgcatgatatgacaattagtataagctgtagcccagtggcaacttaattataaacgtgtgctgcactaagcatggaaactggtgaaaaaactatacataaaaaattgatgtcttctatggctagctacaattcacagcatgaaaatttggcctttccttgactgcttattgaaataaaagataaattgtrggtttaaataagagctawgagggagacaggagaagactattaaaaagagatraaggatgaagtcctgaaatgataattatctggttgcttctgttagatagagatgggaatcgaagtgtatatatcttgtccgtggaatgggcaagctgagccagaccagaaaaggctattgcagactatgctgggggccctgtatggcatgtatgggtactggtttggtcagctgtggcaaggctccacgccatcagctgtgtttcaagtttttgtgctggttctgagaacggaggtaaattggatggt

SEQ ID NO: 51833 - DNA, 600 bp, Chicken  19866894299950_4
aacgtgctgctattcagttgtatatgggtgaaaagatgttagtatgtatagaccactaccgctgctgagtgttcacccccacacgcagaagttgcatgatatgacaattagtataagctgtagcccagtggcaacttaattataaacgtgtgctgcactaagcatggaaactggtgaaaaaactatacataaaaaattgatgtcttctatggctagctacaattcacagcatgaaaatttggcctttccttgactgcttattgaaataaaagataaattgtrggtttaaataagagctawgagggagacaggagaagactattaaaaagagatraaggatgaagtcctgaaatgataattatctggttgcttctgttagatagagatgggaatcgaagtgtatatatcttgtccgtggaatgggcaagctgagccagaccagaaaaggctattgcagactatgctgggggccctgtatggcatgtatgggtactggtttggtcagctgtggcaaggctccacgccatcagctgtgtttcaagtttttgtgctggttctgagaacggaggtaaattggatggtggggtttggggatggatt

SEQ ID NO: 51834 - DNA, 600 bp, Chicken  19866894299950_5
gatgttagtatgtatagaccactaccgctgctgagtgttcacccccacacgcagaagttgcatgatatgacaattagtataagctgtagcccagtggcaacttaattataaacgtgtgctgcactaagcatggaaactggtgaaaaaactatacataaaaaattgatgtcttctatggctagctacaattcacagcatgaaaatttggcctttccttgactgcttattgaaataaaagataaattgtrggtttaaataagagctawgagggagacaggagaagactattaaaaagagatraaggatgaagtcctgaaatgataattatctggttgcttctgttagatagagatgggaatcgaagtgtatatatcttgtccgtggaatgggcaagctgagccagaccagaaaaggctattgcagactatgctgggggccctgtatggcatgtatgggtactggtttggtcagctgtggcaaggctccacgccatcagctgtgtttcaagtttttgtgctggttctgagaacggaggtaaattggatggtggggtttggggatggatttggaaaataacgaggagcaggaagttcctccctc

SEQ ID NO: 51835 - DNA, 599 bp, Chicken  19866894299958_1
  misc_feature (1)..(169): n is any nucleotide
nnnnnnnnnnnnnnnnnnnnnnnnnnnnnnnnnnnnnnnnnnnnnnnnnnnnnnnnnnnnnnnnnnnnnnnnnnnnnnnnnnnnnnnnnnnnnnnnnnnnnnnnnnnnnnnnnnnnnnnnnnnnnnnnnnnnnnnnnnnnnnnnnnnnnnnnnnnnnnnnnnnnnnnnntatttacatgcctatagcagaacagcatgtcacagaaggtgcctaacctaagaagggcaattcatatctctggaaggatagggtgtttatctaagcattaaagcaagttttaaaaaatggcattccccttyacatgcagctttgagaaggtagagtgtttcatgcttaagtcagtttgccagctggctggcaatgtgttaaggatggctgaatgctggagagcaaagcatggtggcttttcccctcctaatcatacagcatggcagggacgaaagtgtaaatgtaattctggggttttgaaatcaacagagcagcaacaacgggagctgcaatttcacctgaagcttrgagcaagaccagcagtatgctgtattcagcttatcacctttaaaaaaattgctattgcaaaagcctaaaaataacagccaaa

SEQ ID NO: 51836 - DNA, 600 bp, Chicken  19866894299958_2
taagaagggcaattcatatctctggaaggatagggtgtttatctaagcattaaagcaagttttaaaaaatggcattccccttyacatgcagctttgagaaggtagagtgtttcatgcttaagtcagtttgccagctggctggcaatgtgttaaggatggctgaatgctggagagcaaagcatggtggcttttcccctcctaatcatacagcatggcagggacgaaagtgtaaatgtaattctggggttttgaaatcaacagagcagcaacaacgggagctgcaatttcacctgaagcttrgagcaagaccagcagtatgctgtattcagcttatcacctttaaaaaaattgctattgcaaaagcctaaaaataacagccaaatgtgggcactgcctcttggtgtgtccctaaagaacaaggaatcttattcctttgtttatttgtttttttttaaaaaaacagaccccctacagttatacaatgaagtcttttaactactgtgatcgtaggatcatagaacggtttgggttggaagagacctcaaagatcaccttattccaaccccctgtagtgggcagggttgccaaccagtagatgaa

SEQ ID NO: 51837 - DNA, 600 bp, Chicken  19866894299958_3
ggcacccatagttctctgccatcacctcaccactctgtcaagtaaaaaacttcccctgatatcaaatatctgtgtagaacaggttggacttctcactggaccaagagaaggcgactttaggagggaagacacctgagtttggctcttcctctctctcactgggtctttttttgtttttttcacaacagtgccagtggtttctttggctgtaagttcagacttcaggggaattcttgcctgtggtatcaaaggaaaccacatccaagccttcggaaatctcctttctcaatccctttcccytacasttcaaaacctgcccttcaaaaccagaatctttctaacatgtaggtgggctgggrggggggaataggggacaaagaaacacgtttcagaaatgtgtctcctctgaagtagccacagaattaattagaagaaggaaaattatctttcagttcagagyctttatctggtgaggctgaattcaatatgagcaagcagcatccttgggtttgctgagagctgccacttctctcagtggcagaaatttttcttttcatacatcatttacaagtagctgcagtgagtccacaaagtcggtac

SEQ ID NO: 51838 - DNA, 600 bp, Chicken  19866894299958_4
ccatagttctctgccatcacctcaccactctgtcaagtaaaaaacttcccctgatatcaaatatctgtgtagaacaggttggacttctcactggaccaagagaaggcgactttaggagggaagacacctgagtttggctcttcctctctctcactgggtctttttttgtttttttcacaacagtgccagtggtttctttggctgtaagttcagacttcaggggaattcttgcctgtggtatcaaaggaaaccacatccaagccttcggaaatctcctttctcaatccctttcccytacasttcaaaacctgcccttcaaaaccagaatctttctaacatgtaggtgggctgggrggggggaataggggacaaagaaacacgtttcagaaatgtgtctcctctgaagtagccacagaattaattagaagaaggaaaattatctttcagttcagagyctttatctggtgaggctgaattcaatatgagcaagcagcatccttgggtttgctgagagctgccacttctctcagtggcagaaatttttcttttcatacatcatttacaagtagctgcagtgagtccacaaagtcggtacaactc

SEQ ID NO: 51839 - DNA, 600 bp, Chicken  19866894299958_5
tatcaaatatctgtgtagaacaggttggacttctcactggaccaagagaaggcgactttaggagggaagacacctgagtttggctcttcctctctctcactgggtctttttttgtttttttcacaacagtgccagtggtttctttggctgtaagttcagacttcaggggaattcttgcctgtggtatcaaaggaaaccacatccaagccttcggaaatctcctttctcaatccctttcccytacasttcaaaacctgcccttcaaaaccagaatctttctaacatgtaggtgggctgggrggggggaataggggacaaagaaacacgtttcagaaatgtgtctcctctgaagtagccacagaattaattagaagaaggaaaattatctttcagttcagagyctttatctggtgaggctgaattcaatatgagcaagcagcatccttgggtttgctgagagctgccacttctctcagtggcagaaatttttcttttcatacatcatttacaagtagctgcagtgagtccacaaagtcggtacaactccataacacaaagcagaagaatgtacaaaggaaaataaggatgttctgttggtgt

SEQ ID NO: 51840 - DNA, 600 bp, Chicken  19866894299958_6
gggtctttttttgtttttttcacaacagtgccagtggtttctttggctgtaagttcagacttcaggggaattcttgcctgtggtatcaaaggaaaccacatccaagccttcggaaatctcctttctcaatccctttcccytacasttcaaaacctgcccttcaaaaccagaatctttctaacatgtaggtgggctgggrggggggaataggggacaaagaaacacgtttcagaaatgtgtctcctctgaagtagccacagaattaattagaagaaggaaaattatctttcagttcagagyctttatctggtgaggctgaattcaatatgagcaagcagcatccttgggtttgctgagagctgccacttctctcagtggcagaaatttttcttttcatacatcatttacaagtagctgcagtgagtccacaaagtcggtacaactccataacacaaagcagaagaatgtacaaaggaaaataaggatgttctgttggtgttttttaacggaggttctgtttaggcagggttgggatgcaccaggatggaaacaaagggccaaaattgatgtatttttttcactttcttatattttgatgtc

SEQ ID NO: 51841 - DNA, 600 bp, Chicken  19866894299959_1
attgtgaaacaacagctaatgttcacttaaacagtacgctgacatgtcagctctgagtgcaatgagctttgttacatgaagggaattttagggacagaactggtccggtttttctttgtggaagtgaaacatcgtgttttagtaagaacgaaaccaaaccaacttaagatgttctcacggaatgcacagatatgttcattcagaaatatgctttaatttgcaaattagtccatagcttttctctttggctgcacacagaaggattctctgagcatggagcaccatgggatttaaatccakcagggattcctggtctaactaaaatgaggaaatacagcagcaagactccagctctcataacagtctccagcaacactccaaatgagtacattttgattttcagcttaaaaagaaaagtctgttttcaaacatttgttttatcagtgattttttttttactaatgtgagattttttaacaagaatctacctcagtaaagagtgttttcccaaataaaatctaattttcccagcccttgattgactcttccctacctttcttgccgccactttctgttaaataaaacaaacaaaaccacaaa

SEQ ID NO: 51842 - DNA, 599 bp, Chicken  19866894299967_1
  misc_feature (1)..(1): n is any nucleotide
nccttttaatctactcatattaaggaaaaagctgtgaaaagattctcctcaagattatgcctttcactgaagtaaactgcaagtgcagaaaacgatgactgtaggtcttttgctcttgcttctaggaagaatttaagggaataattatctagagttgagataattaatatgatacagaggttcatctatttgtttaattgggttttttattatttgtatcaatccattgtttcttaacatctcttattttgttgattattacattacttacctcttcagtatagtagcttcaagacttaraagttatataaagaaggtgattttaataaaatcttgacccacataatctcttagctttctgttctcaaatagacaaaattattattattttttataaacgaattattactattactgtagtgaaattgttytaccatgcataaacactactggtctctgcagaagaaaagcctagtaaaaatgttgtagagtctatgctatactaataaaacccagtattttttaattcagataatgaaaacttgactaggagcctcttctgtatgmtgactttacaaatgatattctttgcttctttt

SEQ ID NO: 51843 - DNA, 587 bp, Chicken  19866894299967_2
tttaagggaataattatctagagttgagataattaatatgatacagaggttcatctatttgtttaattgggttttttattatttgtatcaatccattgtttcttaacatctcttattttgttgattattacattacttacctcttcagtatagtagcttcaagacttaraagttatataaagaaggtgattttaataaaatcttgacccacataatctcttagctttctgttctcaaatagacaaaattattattattttttataaacgaattattactattactgtagtgaaattgttytaccatgcataaacactactggtctctgcagaagaaaagcctagtaaaaatgttgtagagtctatgctatactaataaaacccagtattttttaattcagataatgaaaacttgactaggagcctcttctgtatgmtgactttacaaatgatattctttgcttcttttaatctaagtgaatcataatgccttgattctgcaaagccaatacacctcagagaattctgctgcatcttgtctctgtagtaagtgcaacaaagacatatttttaaataacaactgtttat

SEQ ID NO: 51844 - DNA, 451 bp, Chicken  19866894299967_3
ttacctcttcagtatagtagcttcaagacttaraagttatataaagaaggtgattttaataaaatcttgacccacataatctcttagctttctgttctcaaatagacaaaattattattattttttataaacgaattattactattactgtagtgaaattgttytaccatgcataaacactactggtctctgcagaagaaaagcctagtaaaaatgttgtagagtctatgctatactaataaaacccagtattttttaattcagataatgaaaacttgactaggagcctcttctgtatgmtgactttacaaatgatattctttgcttcttttaatctaagtgaatcataatgccttgattctgcaaagccaatacacctcagagaattctgctgcatcttgtctctgtagtaagtgcaacaaagacatatttttaaataacaactgtttat

SEQ ID NO: 51845 - DNA, 599 bp, Chicken  19866894299977_1
  misc_feature (1)..(84): n is any nucleotide
nnnnnnnnnnnnnnnnnnnnnnnnnnnnnnnnnnnnnnnnnnnnnnnnnnnnnnnnnnnnnnnnnnnnnnnnnnnnnnnnnnnnatgcgcatttggtgcgggcacatcttggtatcatataaaactacagctgctctagtaaatcctgacatgggagttcattgcatagtgctactgaaagggaaaagcccaatatgacctttcaacaaagccacaaaggaatgtgctcacagacaggtaaacccatttcagtcacatctacttctcctgatgttcaccacccatgataaattgaggtgrttttgaaagcatcacagcaagaacgatctatgggtgcagttaaaaaaaaaatcatcaaggttttcatgggagtgcagaggtgaatgggcctcagctttttgacatgtgctgtctgaagaaacaccccagcctgaaccgagaaccttttcaagcagatgcaggyggtctgggacatgacgggcacttcagtgtgcaactcactgtaccatgtatgctgcccacagaaaataaagctgaacttgattcacacaagagctgtttcagcctgcaacattgatgagatgttaatttgattcata

SEQ ID NO: 51846 - DNA, 600 bp, Chicken  19866894299977_2
gcatagtgctactgaaagggaaaagcccaatatgacctttcaacaaagccacaaaggaatgtgctcacagacaggtaaacccatttcagtcacatctacttctcctgatgttcaccacccatgataaattgaggtgrttttgaaagcatcacagcaagaacgatctatgggtgcagttaaaaaaaaaatcatcaaggttttcatgggagtgcagaggtgaatgggcctcagctttttgacatgtgctgtctgaagaaacaccccagcctgaaccgagaaccttttcaagcagatgcaggyggtctgggacatgacgggcacttcagtgtgcaactcactgtaccatgtatgctgcccacagaaaataaagctgaacttgattcacacaagagctgtttcagcctgcaacattgatgagatgttaatttgattcatattaatttgagatagtttttcacctcatttacccatgaacagcttctgatatggaaactttcctatgctccacaataatgaacaccaaaagcaaagaattcacttagctctttttggtagccttatttatttgagcattccattgcaccctgaccagggttccac

SEQ ID NO: 51847 - DNA, 600 bp, Chicken  19866894299992_1
gtgcacctcaggaagctggaaattagactaataagtggaatacatttccaaatacataaaaatttggtcaaggagaagacttagcatgagcactgcagttcagctaatacagttcgctatcaacagttaaccgacgcttttcactagacatagctgaagagaacataaggaccacttttgcctgggaaactcattttggcacactctctgtgccaaaacagaatctgaaatcaaattgaatttgatgtagaacaatgaaatgtacaggcaattatgagataccaaacattcttaatttcyattcatagactgtaagatatttgagcatcaggagttggcatgatgtccattcctttccctactgtctgttgatgactgacactggtataaatagtgttacaggtaggacattaattgagggtaaagtaagatgcaaagatggaaatttcccacagtccactcagaaaccttagaagaaaatcctgcgataaaatggaactattcttggtcctacagtaagatcttctgatattaattatgatttcttccgtaggcctcagcaatttcagattgaacaaatgataaacacaacattgaaac

SEQ ID NO: 51848 - DNA, 600 bp, Chicken  19866894299994_1
ttgttgcgtgctgttcaggagcattatctagcacagagttcaagggcctggcctgctggcacgtaaagaaactaacatttcactccagattgcagctgagtatgttttacactacagaaaagcaagcttgtgtcaacccagtgcaatgcagcccccagcgctgtgctgcaggagggctgggggggactttacatgaaagcaaagcagacaaactgactgaggtgctcagttcctgcagggctgcactgcctttcacgagggctaaccaacggacacagccacacacggcacctcttccayttgctcaagtcagtgcaggttcagaagctcccagcacctccagatgcaaagtgcacctctgagcctgcagtccagaatgggaacatggatggagtgctaacacccayaaaagcagcacgcattgtggcctgttttccacaagcaagatgttcccagccagaggattataagtgccatgcttcgttacatttcaaacaataaaaatgaatgacccatctccagtgagtgtcatatttctggaagggaggatagcccatgtgctaaggaacatgtcctaaatctgtctgctccattaacctt

SEQ ID NO: 51849 - DNA, 600 bp, Chicken  19866894299994_2
tacactacagaaaagcaagcttgtgtcaacccagtgcaatgcagcccccagcgctgtgctgcaggagggctgggggggactttacatgaaagcaaagcagacaaactgactgaggtgctcagttcctgcagggctgcactgcctttcacgagggctaaccaacggacacagccacacacggcacctcttccayttgctcaagtcagtgcaggttcagaagctcccagcacctccagatgcaaagtgcacctctgagcctgcagtccagaatgggaacatggatggagtgctaacacccayaaaagcagcacgcattgtggcctgttttccacaagcaagatgttcccagccagaggattataagtgccatgcttcgttacatttcaaacaataaaaatgaatgacccatctccagtgagtgtcatatttctggaagggaggatagcccatgtgctaaggaacatgtcctaaatctgtctgctccattaacctttgaaagttggaatagttctaaggtttgagaagcaattaatatcctgtaggcaataacattcttgaatagacgacccaggatttcagttacacctgagcagaaagtaa

SEQ ID NO: 51850 - DNA, 599 bp, Chicken  19866894300001_1
  misc_feature (1)..(232): n is any nucleotide
nnnnnnnnnnnnnnnnnnnnnnnnnnnnnnnnnnnnnnnnnnnnnnnnnnnnnnnnnnnnnnnnnnnnnnnnnnnnnnnnnnnnnnnnnnnnnnnnnnnnnnnnnnnnnnnnnnnnnnnnnnnnnnnnnnnnnnnnnnnnnnnnnnnnnnnnnnnnnnnnnnnnnnnnnnnnnnnnnnnnnnnnnnnnnnnnnnnnnnnnnnnnnnnnnnnnnnnnnnnnnnnnnnnnnnnnctgccctgctgaccacagaagctgaactaaaagagctgctaacatctgctcacacagaaagtatgggrcgagtttaaaaagttggttatgctcattcctgtctattttgatacaaaactctggacaacatgcatgcttacctgaataaggttcagcaaggaactttacaaagcaaagaaggacttcaatttcacagcttgaggaatgttcagaggtgagattatttgccaaaattcacacccgttgtgggtcactaataatgccaagtcctgaataaggcatcctcagccctaacttggagctgaatcccattgtttgattcatccttggccagcagaactgttgtgggtttctgtttctaatggtg

SEQ ID NO: 51851 - DNA, 600 bp, Chicken  19866894300001_2
aataaggttcagcaaggaactttacaaagcaaagaaggacttcaatttcacagcttgaggaatgttcagaggtgagattatttgccaaaattcacacccgttgtgggtcactaataatgccaagtcctgaataaggcatcctcagccctaacttggagctgaatcccattgtttgattcatccttggccagcagaactgttgtgggtttctgtttctaatggtgtggctgtgctcacaggcctttggatcagagactttccctggtctcacaggttgatcactgaatctcattgacttaytacagagtacctagcaagcttgattaatctcttggaaatacagaaagaggaaaacacatcctcatttgccgaagttatcatagaggtttcatagttctttggctaacgagacagaatttccattaaattccataggccaaaagctttgctgaatggggttaaaagtttctgacttcacatcaacaaaacttcctgctggagggattgttatgtccaacaaggtaggtcattccactcctgtgtatttttcctcctcttatctctggtgactccaaaagcacataggattcacagaagcta

SEQ ID NO: 51852 - DNA, 599 bp, Chicken  19866894300008_1
  misc_feature (1)..(171): n is any nucleotide
nnnnnnnnnnnnnnnnnnnnnnnnnnnnnnnnnnnnnnnnnnnnnnnnnnnnnnnnnnnnnnnnnnnnnnnnnnnnnnnnnnnnnnnnnnnnnnnnnnnnnnnnnnnnnnnnnnnnnnnnnnnnnnnnnnnnnnnnnnnnnnnnnnnnnnnnnnnnnnnnnnnnnnnnnnnaattttactgctaggtatatggatttagtccagagtctggggagatctttaaattccccatctggaaagaaaatctcattatatacttgagctttcagtaacagaaaatttcattttttatgttctctrtagggataagagacctgactgaaggctctttctttttatgaactgaaaacattagaaatgggmacatgtttattcccacctttcctttcttctcttatcccccaaagatttttttgctcaagttttattcaggactattgtctacacttgagataaattttaaatgggaagtggttgaccatttgagaactttgagagtggaactgctaagtggctgatgacacacacacatgcctacaaatgggaaaaaataccaggattttccaaaggctcagcaaaatggagactgctttgctgct

SEQ ID NO: 51853 - DNA, 599 bp, Chicken  19866894300008_2
  misc_feature (1)..(108): n is any nucleotide
nnnnnnnnnnnnnnnnnnnnnnnnnnnnnnnnnnnnnnnnnnnnnnnnnnnnnnnnnnnnnnnnnnnnnnnnnnnnnnnnnnnnnnnnnnnnnnnnnnnnnnnnnnnnaattttactgctaggtatatggatttagtccagagtctggggagatctttaaattccccatctggaaagaaaatctcattatatacttgagctttcagtaacagaaaatttcattttttatgttctctrtagggataagagacctgactgaaggctctttctttttatgaactgaaaacattagaaatgggmacatgtttattcccacctttcctttcttctcttatcccccaaagatttttttgctcaagttttattcaggactattgtctacacttgagataaattttaaatgggaagtggttgaccatttgagaactttgagagtggaactgctaagtggctgatgacacacacacatgcctacaaatgggaaaaaataccaggattttccaaaggctcagcaaaatggagactgctttgctgctgtgctgtcatctctcggctcatccccctgcaagcatttgagttgccagctccaagacagaaac

SEQ ID NO: 51854 - DNA, 600 bp, Chicken  19866894300008_3
tacttgagctttcagtaacagaaaatttcattttttatgttctctrtagggataagagacctgactgaaggctctttctttttatgaactgaaaacattagaaatgggmacatgtttattcccacctttcctttcttctcttatcccccaaagatttttttgctcaagttttattcaggactattgtctacacttgagataaattttaaatgggaagtggttgaccatttgagaactttgagagtggaactgctaagtggctgatgacacacacacatgcctacaaatgggaaaaaatamcaggattttccaaaggctcagcaaaatggagactgctttgctgctgtgctgtcatctctcggctcatccccctgcaagcatttgagttgccagctccaagacagaaacaataaaaaacaaatgcctttagtgtaataaaaactctgggattctgggttgtgccctgaggccatggacagtttgccatttgtggtcaacccccaggagcaaaggacaaaacgtatcattaaaatgtttgtgacagaccctcatcctgttgtaatagctgacttttgatacttaaatctctttttgcttgtt

SEQ ID NO: 51855 - DNA, 470 bp, Chicken  19866894300009_1
ataaacagtggagcgtgatgacagggtcatttttataggagaacaaatcactgggctgcttctctgagcttctttcctccagtttaagcgatgctaaggagggaggtcaacctgcttccatttatcccctcgacacaagctgggacatttcactcttttgacaagcaaactcctagggcagacttttaaagttgcacggacactgtgttcctttctgaggaggaaaatacttccagaggctgcagtgggcatagcagcatattctcatgccccagaagattctaagaagcaccttaaagsaaaaggctcctatggcaaaggagcagagaataaaagtagactggacaaaagcctgctcaaccccagggctccgcatgctggcctgtagattgtaacaatataagagtcacaatagaactgcaaatcttggcacctcccaccccagcactgtggttggagctcagttcctg

SEQ ID NO: 51856 - DNA, 600 bp, Chicken  19866894300010_1
taatttcacggaactattgttgacttgacatttaggccaaacttctaattattctgaactttgcaaggaaagaatgaaaatacgggcttggatacaggcaggagtaaatcattgtagctccagtggtctccacagagcttggcacatttattctgtctaagaatatggtcttagaaatgttttattttatgcttttctcttgcaaagcctgacactgtgaccaacatgcaacatagcattctaaggcagtagcggatccatacttagcttttaattcatccttccttttaggaagcatcwtgtttatttagagatatttcaaatagcatagtgaaaaccatagcagagtatggagttcctgctttgttctaaaacctaactctgacagtgtaatccagggtattgtttgacgtgtgagattgcaggcagccagtcacaagatctgcaggacatggagttgcttggacatacgcaattactgcttgtcagttgaaaggttatctgattcactctcacagttcaaggcaaacatgcacatttgggccagggctcattttgctttgcaaggagaagcgctcacacaagctgctgcaattaagt

SEQ ID NO: 51857 - DNA, 600 bp, Chicken  19866894300010_2
tcctgctttgttctaaaacctaactctgacagtgtaatccagggtattgtttgacgtgtgagattgcaggcagccagtcacaagatctgcaggacatggagttgcttggacatacgcaattactgcttgtcagttgaaaggttatctgattcactctcacagttcaaggcaaacatgcacatttgggccagggctcattttgctttgcaaggagaagcgctcacacaagctgctgcaattaagtcaatgggcagtatcatgctgaggtgcgataacccacagtcatgtgagcagccctcmgagacccacaaggtctcctcccaactcrtgttcctgagcttatcctcttaacttcaaagctaatcttcctctaataccaggtagatagtgaattttatgcataacagtctaacgaaaagtgtatttcattttctgctgtcttctaagacatttgtgattcagagtttccctccctaactctgtcctgatttgataattctctacatactggaataaggatgattagagcagcttgcagagagttacagctttcagtcactgaatttggtccaaacatactgcaattttgcattgtaagca

SEQ ID NO: 51858 - DNA, 600 bp, Chicken  19866894300010_3
acagtgtaatccagggtattgtttgacgtgtgagattgcaggcagccagtcacaagatctgcaggacatggagttgcttggacatacgcaattactgcttgtcagttgaaaggttatctgattcactctcacagttcaaggcaaacatgcacatttgggccagggctcattttgctttgcaaggagaagcgctcacacaagctgctgcaattaagtcaatgggcagtatcatgctgaggtgcgataacccacagtcatgtgagcagccctcmgagacccacaaggtctcctcccaactcrtgttcctgagcttatcctcttaacttcaaagctaatcttcctctaataccaggtagatagtgaattttatgcataacagtctaacgaaaagtgtatttcattttctgctgtcttctaagacatttgtgattcagagtttccctccctaactctgtcctgatttgataattctctacatactggaataaggatgattagagcagcttgcagagagttacagctttcagtcactgaatttggtccaaacatactgcaattttgcattgtaagcaaaagaaatcaccaaataaaagtaatcaa

SEQ ID NO: 51859 - DNA, 599 bp, Chicken  19866894300014_1
  misc_feature (1)..(21): n is any nucleotide
nnnnnnnnnnnnnnnnnnnnntttacaaacccttgggaagtgaaaagaagcagtcattaaacttgattttccttaaaaacaaacagtgaaaaaaacatttttagaaaatgaaagttaaattcttccatgcgctggaattctgttccgtctctccctcttgtcgtggttctactttccacataaaacagacaccagcctgacaaatgcctacagatcaaaaacactctacctataggtgtatagctgcaaactagtcgtgaaagaaatgtgttgtgaactcactgcttttaagaagtctaygttaccatttacaagaaygtccctgacggcctgtgtccacacaaataccacaggcccattcttcccaacagcacccagcctctcccactgcatttcatcttccagaaagcacgagggaaaacccctgcactattactatttataatacacgttaccaaacagctcttaaaggtgtcattaatcacaccatgttaagtggttttctctaacacgtgagttttactgtgatagttttagtcctccaggtcacaccttttcattttagtattatgtgttcaaatcagagtactggaggtttc

SEQ ID NO: 51860 - DNA, 599 bp, Chicken  19866894300014_2
  misc_feature (1)..(3): n is any nucleotide
nnntttacaaacccttgggaagtgaaaagaagcagtcattaaacttgattttccttaaaaacaaacagtgaaaaaaacatttttagaaaatgaaagttaaattcttccatgcgctggaattctgttccgtctctccctcttgtcgtggttctactttccacataaaacagacaccagcctgacaaatgcctacagatcaaaaacactctacctataggtgtatagctgcaaactagtcgtgaaagaaatgtgttgtgaactcactgcttttaagaagtctaygttaccatttacaagaaygtccctgacggcctgtgtccacacaaataccacaggcccattcttcccaacagcacccagcctctcccactgcatttcatcttccagaaagcacgagggaaaacccctgcactattactatttataatacacgttaccaaacagctcttaaaggtgtcattaatcacaccatgttaagtggttttctctaacacgtgagttttactgtgatagttttagtcctccaggtcacaccttttcattttagtattatgtgttcaaatcagagtactggaggtttctctttgatttctatcatg

SEQ ID NO: 51861 - DNA, 599 bp, Chicken  19866894300016_1
  misc_feature (1)..(134): n is any nucleotide
nnnnnnnnnnnnnnnnnnnnnnnnnnnnnnnnnnnnnnnnnnnnnnnnnnnnnnnnnnnnnnnnnnnnnnnnnnnnnnnnnnnnnnnnnnnnnnnnnnnnnnnnnnnnnnnnnnnnnnnnnnnnnnnnnnnnnnctatgcgaagtctttaaccatatttgaactaacgggctaagttggataccatgaggggggaaatgccagtctgcctgacagctcgttttaataatgagaaagttgttccactgacaggaggacaatgaaggctggggctgcacagaatgttgttgccttccttatrgctcagagcatatatgaaacagcagaggaatgggctggtcccaaaatggtgcatrtgcagcttcccctccatgtggaggtggcaccgatcccatgagtcccatccaaaggggctttgttggtatatagatgccttctcctaaatcatggctcattttaaatatgttgttccccatgcaagtaataaaaataggtgacttttgtagttagtgttattactgcagaatgtatgaagcttttgacatttagggcaagaaagtcagatttgtgagagctcctcatccccctggatgggcaagg

SEQ ID NO: 51862 - DNA, 599 bp, Chicken  19866894300016_2
  misc_feature (1)..(79): n is any nucleotide
nnnnnnnnnnnnnnnnnnnnnnnnnnnnnnnnnnnnnnnnnnnnnnnnnnnnnnnnnnnnnnnnnnnnnnnnnnnnnnnctatgcgaagtctttaaccatatttgaactaacgggctaagttggataccatgaggggggaaatgccagtctgcctgacagctcgttttaataatgagaaagttgttccactgacaggaggacaatgaaggctggggctgcacagaatgttgttgccttccttatrgctcagagcatatatgaaacagcagaggaatgggctggtcccaaaatggtgcatrtgcagcttcccctccatgtggaggtggcaccgatcccatgagtcccatccaaaggggctttgttggtatatagatgccttctcctaaatcatggctcattttaaatatgttgttccccatgcaagtaataaaaataggtgacttttgtagttagtgttattactgcagaatgtatgaagcttttgacatttagggcaagaaagtcagatttgtgagagctcctcatccccctggatgggcaaggctcctctgctgatcccctggatgaccrtatcttgcacaaccaaaccatcgtgtgt

SEQ ID NO: 51863 - DNA, 566 bp, Chicken  19866894300016_3
ggaatgggctggtcccaaaatggtgcatrtgcagcttcccctccatgtggaggtggcaccgatcccatgagtcccatccaaaggggctttgttggtatatagatgccttctcctaaatcatggctcattttaaatatgttgttccccatgcaagtaataaaaataggtgacttttgtagttagtgttattactgcagaatgtatgaagcttttgacatttagggcaagaaagtcagatttgtgagagctcctcatccccctggatgggcaaggctcctctgctgatcccctggatgaccrtatcttgcacaaccaaaccatcgtgtgttgcatgtattgtagkcccatgtattgcttgtattttaggtagcagagccttgctccagttttggcagtgccacgtctaatttaggcagtgtacgctggctttccagtgatgagacaaaggacagagtttgctttattcggcacagaagagtgggcaggcttgaagtcctgtgtggtcatgacacaagcacaaaacctctgcattttgcaatcgtggcatctcattgtggaaatgatgt

SEQ ID NO: 51864 - DNA, 523 bp, Chicken  19866894300016_4
catgtggaggtggcaccgatcccatgagtcccatccaaaggggctttgttggtatatagatgccttctcctaaatcatggctcattttaaatatgttgttccccatgcaagtaataaaaataggtgacttttgtagttagtgttattactgcagaatgtatgaagcttttgacatttagggcaagaaagtcagatttgtgagagctcctcatccccctggatgggcaaggctcctctgctgatcccctggatgaccrtatcttgcacaaccaaaccatcgtgtgttgcatgtattgtagkcccatgtattgcttgtattttaggtagcagagccttgctccagttttggcagtgccacgtctaatttaggcagtgtacgctggctttccagtgatgagacaaaggacagagtttgctttattcggcacagaagagtgggcaggcttgaagtcctgtgtggtcatgacacaagcacaaaacctctgcattttgcaatcgtggcatctcattgtggaaatgatgt

SEQ ID NO: 51865 - DNA, 599 bp, Chicken  19866894300020_1
  misc_feature (1)..(75): n is any nucleotide
nnnnnnnnnnnnnnnnnnnnnnnnnnnnnnnnnnnnnnnnnnnnnnnnnnnnnnnnnnnnnnnnnnnnnnnnnnncgatgctgagtgcatgcttcaacaaactccttttcgatgctacaggtccaccatgttcaggtatagaattgtgaacgttgaaatgttttgataatatttctccctaagtttgaaacttctccctcctgtatttgtattgcttaggatgcagctaacctgttagggttatgtgctttgtacacaaaagttgtcatgggcaacagtaccaataatgtaatagatgarctgctgaaagcttttagcaaatagggaatttcttcttagagtaggaaagtagataggtatctagtttttgtatttaaaacaagtttgtaggtttagtagaaagataactgttacccagttattactgttgtaataaatgtgcatttgccagcagtggaggttttcaagacccagctggataactctccgagcagcccaatctgtgtcttagttgactcttctcatagaagaaggttggaacgatcctgtgatccaaaatgttaaaatgagatgtatgcttcttgaaatatcattggttt

SEQ ID NO: 51866 - DNA, 599 bp, Chicken  19866894300026_1
  misc_feature (1)..(8): n is any nucleotide
nnnnnnnngaacgggtatttgcaaagcagtgctgatgaacaggaggcagatttcatgggctgcattaataaggcaggcagtgattcctctctattcaatgtcagtgaggcctcagttagaatactgagtacagtccggagcctgacacttaatttctgtctttggaggttggggaaatctttgtgaaagggcttaagaagaggttacacaactgtttttcagggatgcaatagatgagcttggtcttagcacagagttagactgaacctctccagaggttgcttccagccacatataacrctattaacatatgtgaatatcagccttcgtgcccctggttagaatgaaaataaaaataagacagtcaaaattaaaccagaaggcatctgctgcactaaaggattttgtgcactgacctaaagctgctattaatgactgctgcactatgccatttcccaaagatacgtattctgcagtaagtggcccaaacgtgcttaaatatgcttagatttcaggatcagagaactgtctcctcactacaacctctatcttatgatgcagatatttttccagaactgaattatgagatgacagccaca

SEQ ID NO: 51867 - DNA, 600 bp, Chicken  19866894300032_1
gactttcactgaatggccactgtgaaacaaaaccttgtgcagtagctatttattgacaagttccttttctggataaactcattctttccatgcaacgtaacatgcttttgtaaaggattaatcaatatcagaatgcacacatttgttaaagaacaagaacatccatgcttcaaaaccagctgtttcattttacattcatacttgaatctaaatttgctttcaagtgcaaaagctgtaacctatgacctatccaagaaactgtactgcttgtcagactacatatcattttattctttgatygaaattacacttagttttgcctcagtttgagctaaggtgctccaagacactaggaatggaygaagaggtagaaggagatgactgtccccttctgctctgcccctcttgcaatactgcatccaggcctggggcccccagcacaagaaaaatgtggagctgttggaacaggtccagaggagggccatgaaggtgatcagagagctggagcacctctcctatgagaaaggttgagggagttgggcttgttcagcctggagaagagaaggctccagggagacatcatttcagccttttaatagt

SEQ ID NO: 51868 - DNA, 600 bp, Chicken  19866894300032_2
tccttttctggataaactcattctttccatgcaacgtaacatgcttttgtaaaggattaatcaatatcagaatgcacacatttgttaaagaacaagaacatccatgcttcaaaaccagctgtttcattttacattcatacttgaatctaaatttgctttcaagtgcaaaagctgtaacctatgacctatccaagaaactgtactgcttgtcagactacatatcattttattctttgatygaaattacacttagttttgcctcagtttgagctaaggtgctccaagacactaggaatggaygaagaggtagaaggagatgactgtccccttctgctctgcccctcttgcaatactgcatccaggcctggggcccccagcacaagaaaaatgtggagctgttggaacaggtccagaggagggccatgaaggtgatcagagagctggagcacctctcctatgagaaaggttgagggagttgggcttgttcagcctggagaagagaaggctccagggagacatcatttcagccttttaatagttaatggaagctgattagcaggagggagactgacttcttacagtctgatgatgatagaaaaa

SEQ ID NO: 51869 - DNA, 600 bp, Chicken  19866894300034_1
atggtatccccccagcatgcgtatttcagctgctgcgtggttgcacttttacaagaaagcagctgataaaaacctgttggattgggaacctcagagcttttgtgcatggctttggtcagcacctgcctttaaattctctgcacttgtgttcaggactggaattcgaactgctggctgcagttcaggctggagctggggctgcctgcagcagttactgttcagatgagcagaatgtattctgcaaaccgcgctatactccaaaatcatacaaataattctggtactacaaagaaggatttwattgtccctacccggggaaggcagtaactgaactagtatgggtctttaccttgtacgcagcttttacaggrggcacaatagggaacctgtacctgtgtacagaagccctgatgataaaacccacacgttaatttctccattaattgagacaaaaatcttgtttccttgactgtctttactaaattgtatatgtccattgtaaagggggaaagaggagaatcgtgagcaggaggaaggcagcccactgctcgatacactgctgttcgtgctctgtagtacttatcccatttattgttgtga

SEQ ID NO: 51870 - DNA, 600 bp, Chicken  19866894300034_2
acctgttggattgggaacctcagagcttttgtgcatggctttggtcagcacctgcctttaaattctctgcacttgtgttcaggactggaattcgaactgctggctgcagttcaggctggagctggggctgcctgcagcagttactgttcagatgagcagaatgtattctgcaaaccgcgctatactccaaaatcatacaaataattctggtactacaaagaaggatttwattgtccctacccggggaaggcagtaactgaactagtatgggtctttaccttgtacgcagcttttacaggrggcacaatagggaacctgtacctgtgtacagaagccctgatgataaaacccacacgttaatttctccattaattgagacaaaaatcttgtttccttgactgtctttactaaattgtatatgtccattgtaaagggggaaagaggagaatcgtgagcaggaggaaggcagcccactgctcgatacactgctgttcgtgctctgtagtacttatcccatttattgttgtgagagctcacagcttccactgtcacatggacaaacatttctgtgaaatgccaacacttgtgcaatgacagctt

SEQ ID NO: 51871 - DNA, 600 bp, Chicken  19866894300035_1
tatccctttcctcccactgccattcctctacttttattcatctgaaataagtggaattccagccgggagtcttccttttgccccctttaataacaaggggctgttgatcggacccgcaggtcggacctgccgggagttgtcttcctctgtgagttatgggcagatgaagcaagccatgcttaatcctttttccaactgataaatatgtgctctgtcagtggccacacttgggcaagaaattcttctggttccttcttcagcttaactggaagagcatcaaactctgctcggctgaacacrtgaagcaaacacaaaaacccatcctgcaggttgtgggtgggctcggagttgcagactttctccctcgagagcagttctgtgtggaacattcccactgtcggagcggatggctggtgctgataaatgggaacstgggctgcatccacatgtagcatcatctgggctaacgtggctcatctcaggctcagagggaatggaaatcatagaatgattaaggttggaaaagatctctgctacagcaagtctgwctgacagctcatctccaccatgcctaccgcagtgcccagtgccccgctgcac

SEQ ID NO: 51872 - DNA, 600 bp, Chicken  19866894300035_2
ggagttgtcttcctctgtgagttatgggcagatgaagcaagccatgcttaatcctttttccaactgataaatatgtgctctgtcagtggccacacttgggcaagaaattcttctggttccttcttcagcttaactggaagagcatcaaactctgctcggctgaacacrtgaagcaaacacaaaaacccatcctgcaggttgtgggtgggctcggagttgcagactttctccctcgagagcagttctgtgtggaacattcccactgtcggagcggatggctggtgctgataaatgggaacstgggctgcatccacatgtagcatcatctgggctaacgtggctcatctcaggctcagagggaatggaaatcatagaatgattaaggttggaaaagatctctgctacagcaagtctgwctgacagctcatctccaccatgcctaccgcagtgcccagtgccccgctgcaccgtggtttaagctgcccttctgcctgcaatgacccragcgagggttttgatttgagctttttcctgagcgttttgaaagatcagaagggcacaaagaagaggatgagtgaaacaatcgttcttctcatgaaa

SEQ ID NO: 51873 - DNA, 600 bp, Chicken  19866894300035_3
ttccttcttcagcttaactggaagagcatcaaactctgctcggctgaacacrtgaagcaaacacaaaaacccatcctgcaggttgtgggtgggctcggagttgcagactttctccctcgagagcagttctgtgtggaacattcccactgtcggagcggatggctggtgctgataaatgggaacstgggctgcatccacatgtagcatcatctgggctaacgtggctcatctcaggctcagagggaatggaaatcatagaatgattaaggttggaaaagatctctgctacagcaagtctgwctgacagctcatctccaccatgcctaccgcagtgcccagtgccccgctgcaccgtggtttaagctgcccttctgcctgcaatgacccragcgagggttttgatttgagctttttcctgagcgttttgaaagatcagaagggcacaaagaagaggatgagtgaaacaatcgttcttctcatgaaatgagtggttcagggactaaccctgcatccccaccgtgccttaaacacctagtgaaaccagaaacgcggagcacgcacggtgcagcagaaccctcccatggacagcgaaggctgtta

SEQ ID NO: 51874 - DNA, 561 bp, Chicken  19866894300035_4
gtgggctcggagttgcagactttctccctcgagagcagttctgtgtggaacattcccactgtcggagcggatggctggtgctgataaatgggaacstgggctgcatccacatgtagcatcatctgggctaacgtggctcatctcaggctcagagggaatggaaatcatagaatgattaaggttggaaaagatctctgctacagcaagtctgwctgacagctcatctccaccatgcctaccgcagtgcccagtgccccgctgcaccgtggtttaagctgcccttctgcctgcaatgacccragcgagggttttgatttgagctttttcctgagcgttttgaaagatcagaagggcacaaagaagaggatgagtgaaacaatcgttcttctcatgaaatgagtggttcagggactaaccctgcatccccaccgtgccttaaacacctagtgaaaccagaaacgcggagcacgcacggtgcagcagaaccctcccatggacagcgaaggctgttactgctctgagaggtgtctttggtaatttaagattgagcagccatgtggt

SEQ ID NO: 51875 - DNA, 600 bp, Chicken  19866894300039_1
ttgcacctgaagctggctggggcggccacagcgagctcccatcactttgtgtcagctccgccgttgcagtaattaatgctgaaggctggtggatttcaccttgtcctttcactcgctggccatgcctccatttggcatttcggtattccgggctccttctctgggctcataaatcacatgcaaagccttcctgagaacagaaagggatctgttctcctcccaacacacacgcacggcttcccggagttaatgcaagcttggctcgtggacgggagcgatggatgcgccccatggacctcragtcattggcagaaaaataattgcaagagaaacagctgtccgaaaagtgggaacactgtgtctttgcatcaaatctgttacgccttattataaggttgttttccttagtgttatttctcctgcacttgctgggaggtggagtcctcacctgtgctctgcctctccttgctccatttcttactgtcacttctccccaccacattcactgatttttctctaattgctcccagatgttgaagaaaggccttttgtcctgcaactgcaccrgagctgagggatatggagtatgagatggggtgg

SEQ ID NO: 51876 - DNA, 487 bp, Chicken  19866894300039_2
gacgggagcgatggatgcgccccatggacctcragtcattggcagaaaaataattgcaagagaaacagctgtccgaaaagtgggaacactgtgtctttgcatcaaatctgttacgccttattataaggttgttttccttagtgttatttctcctgcacttgctgggaggtggagtcctcacctgtgctctgcctctccttgctccatttcttactgtcacttctccccaccacattcactgatttttctctaattgctcccagatgttgaagaaaggccttttgtcctgcaactgcaccrgagctgagggatatggagtatgagatggggtggtagaggaggaggtggctgtgggccacaatattcctcttcctcaagctgagcatcctcactgatgggcttgtgcatcacctgagggcttctggacttctactccggctgttcagccggaaaggtgtgcatttatctcgaacacaacagatgtaca

SEQ ID NO: 51877 - DNA, 600 bp, Chicken  19866894300040_1
gatagaaagggtaaaacctctctgatattttctcttttataaatagcagaaaagaatttcaaatgaacacattttactatagagctttgaacagtgcagaagggtgagctctggtgtttccatacatgtgcaattatgacctgatctcttttcttcattctgtagagtttcttgatcctcagctgcattatctcatggtcacgtattcccaagcagaccttccttgtttgtaagaattaggttcagtagcacacctctgcttcttggctcctctatcacttgtgtcagaaagttatcttycacacacaatgcaggaacctccaggactctctgtacctggcagtactgttttaccaacaagtaccacagtggctgaagtcccccaagagaactaatcctaaaatgcagcattctcagtaatggtctcaaaaaccactgtcatttattctccaaaattttgctactcttagatatcagatcagacctttagtctccctgttctcgttctaggcacctaaaatgatgtgaaaaatagtaggctactcatgaacattttttattagtttatttcccacagctactattgtataaataatcctg

SEQ ID NO: 51878 - DNA, 600 bp, Chicken  19866894300046_1
gttagtcaggcattgaatggaactgaattcaatcagcgtggcttcaaatatttaaatctgtctatcaaacaatatattggattttacgtgtggttttgcattacaagaaatcataaatctagaagcattagacttgaaccacaataggcataagtaacatctcagctggcacttactgaaagcctccattgcctgaaggtttttagctggtggtacattctctacagatagagacaaagcagcaattctcctgaggaatcagctttcaaaggaaatcacttcaaagtttcatgggaaaasagatacagggaagacakacagttttaaagaatctcagcaacataacacatcttgatatatcccacattaaacagctaacaatccccacagaaacatacttactattccagctccaaaaggcagcaagctgaaagcctttaactttacaccctccactgcatttatttttgtgaagatgaatgatcagagctttggactaagcataaccactgatgtttcccctggagattcctggacaactctgttgataagacttaacagaatttcagggatttttgcaaactcttctgttgaagaagg

SEQ ID NO: 51879 - DNA, 600 bp, Chicken  19866894300046_2
tggaactgaattcaatcagcgtggcttcaaatatttaaatctgtctatcaaacaatatattggattttacgtgtggttttgcattacaagaaatcataaatctagaagcattagacttgaaccacaataggcataagtaacatctcagctggcacttactgaaagcctccattgcctgaaggtttttagctggtggtacattctctacagatagagacaaagcagcaattctcctgaggaatcagctttcaaaggaaatcacttcaaagtttcatgggaaaasagatacagggaagacakacagttttaaagaatctcagcaacataacacatcttgatatatcccacattaaacagctaacaatccccacagaaacatacttactattccagctccaaaaggcagcaagctgaaagcctttaactttacaccctccactgcatttatttttgtgaagatgaatgatcagagctttggactaagcataaccactgatgtttcccctggagattcctggacaactctgttgataagacttaacagaatttcagggatttttgcaaactcttctgttgaagaaggctatccttggtaccttg

SEQ ID NO: 51880 - DNA, 600 bp, Chicken  19866894300047_1
gagcttaaactgatgctgcatttgcttgtgagtttgtccttaagaacaaagatgtaactgagtggcgaggagatggaagggatttctctgcccctcagaaccaaaaggctgagagcggaaaactaagttgatttctcatcaaaaagagatggtatctcaaggcagcatctcaagggacaccttccagctgtgatacgctgtgcaggtgaagtgttgctgggtgttcctttccactgttttccttctcaggaataataaaccactaccctagacccttctagctaaagggttttagcctaygagatgtcatgtggatctgctgtttgtctctggcattcagatgtctacttttctctttttcttgcttcctccaaagaatgtgcaaaggccttccatgcagctggctccaggctggtgctctgtggcagagacagtgagaagctcaaagacctggcacaggaactttctgccatgactgatcaccgaaagaacgtaagtgcacraggaggaaaggctcactgtcccatgcagctggaattggtatctgtgctagtacagaagttagagttgcttgtgtgttgttctgttgagcaataggaa

SEQ ID NO: 51881 - DNA, 551 bp, Chicken  19866894300047_2
aggtgaagtgttgctgggtgttcctttccactgttttccttctcaggaataataaaccactaccctagacccttctagctaaagggttttagcctaygagatgtcatgtggatctgctgtttgtctctggcattcagatgtctacttttctctttttcttgcttcctccaaagaatgtgcaaaggccttccatgcagctggctccaggctggtgctctgtggcagagacagtgagaagctcaaagacctggcacaggaactttctgccatgactgatcaccgaaagaacgtaagtgcacraggaggaaaggctcactgtcccatgcagctggaattggtatctgtgctagtacagaagttagagttgcttgtgtgttgttctgttgagcaataggaaaaatgcaactttgtggctggggatagatattgctataggagtgctttgagctaacacatcraaggttgcaaaaagcctacaaaaataagccagctgaaagactcttgccttgtaatggaagtgaacgcatgaagtgagcagagtctcccagacc

SEQ ID NO: 51882 - DNA, 393 bp, Chicken  19866894300047_3
ttgcttcctccaaagaatgtgcaaaggccttccatgcagctggctccaggctggtgctctgtggcagagacagtgagaagctcaaagacctggcacaggaactttctgccatgactgatcaccgaaagaacgtaagtgcacraggaggaaaggctcactgtcccatgcagctggaattggtatctgtgctagtacagaagttagagttgcttgtgtgttgttctgttgagcaataggaaaaatgcaactttgtggctggggatagatattgctataggagtgctttgagctaacacatcraaggttgcaaaaagcctacaaaaataagccagctgaaagactcttgccttgtaatggaagtgaacgcatgaagtgagcagagtctcccagacc

SEQ ID NO: 51883 - DNA, 600 bp, Chicken  19866894300048_1
ccccatagtcagcctacagcacccaataccaccgcccccgtgcaccacttccatttcatcccagcctctgccctcccagcaccacagggcagcggctccactttctggtaaaaagatttattaagaacctgcctgaaaggagggcggcagtggggcacgggcagtgagcggcgaagcagcaggagcagggtgggagggtgagctctcctccgagcagaatgaccccatgctgcagcagcagcagcagggtgagatggggagagctccgggcacagagcacggggagcacagctgcaggcwgagtayctcccactgctccatgctggaattaaggcacacacagcgctgggaggaagggcaaccctataaggtgttgggcagggagtgatggaagcggtggtgatgggtgacctgcacctccagagctgatacaggcatgggggggggtcacagtggtatcactgtgactgaggggtccccagataggacctgggctgctggtcctgtgttgcagtgcagtaccctgccccagctcggtcccagtggcaaaatgagatgaatgggacccccatctgtgcttcagtagaggtggacggggac

SEQ ID NO: 51884 - DNA, 600 bp, Chicken  19866894300048_2
agtcagcctacagcacccaataccaccgcccccgtgcaccacttccatttcatcccagcctctgccctcccagcaccacagggcagcggctccactttctggtaaaaagatttattaagaacctgcctgaaaggagggcggcagtggggcacgggcagtgagcggcgaagcagcaggagcagggtgggagggtgagctctcctccgagcagaatgaccccatgctgcagcagcagcagcagggtgagatggggagagctccgggcacagagcacggggagcacagctgcaggcwgagtayctcccactgctccatgctggaattaaggcacacacagcgctgggaggaagggcaaccctataaggtgttgggcagggagtgatggaagcggtggtgatgggtgacctgcacctccagagctgatacaggcatgggggggggtcacagtggtatcactgtgactgaggggtccccagataggacctgggctgctggtcctgtgttgcagtgcagtaccctgccccagctcggtcccagtggcaaaatgagatgaatgggacccccatctgtgcttcagtagaggtggacggggacacctgc

SEQ ID NO: 51885 - DNA, 575 bp, Chicken  19866894300049_1
ctgatgaaaactgtaaaataatggtcaaaatagagaatgtatggaaggaacagttgaactctgtagtgattcatacagtgtgtcttctggaaagtgattattttgaacatctctgtggtgtatgttggtcactccaaaagtactgttcgatagaacaaattctcatctacaaaatactgtttttcagcataatcactaccattagctatggattttcaaaagcactgaatatgagtttgcatgccttgctcatagaaaacctgcatagctgtccagaatgtggctcatttttcatgtcamtgtcaccactgctgaaatgcaccaccccctgcttcactgtgttcacatccactggtttggtctccataaatcttcagcaagtatcagtgaatgtcagtgggtaccatttttctgcgtcaaggaattcagtgacacacttttgcttcctgcacacttctatctcagacgccattttgtcagactacccttctgctgccatcagtcagacagcaacagcatgtaacggaatgctgttggggaagggtcaacctctactgccataccaccaccatctc

SEQ ID NO: 51886 - DNA, 600 bp, Chicken  19866894300056_1
tgaaacttcattagtcatcctttaatgtcatggcagtaacagaaaaataacctgaaatttgagcatttattttttgaatttaaaggtattaaaactgatgagaaaattattgctcagctttgtactcaagccacagatgcattcttgaatgtgtccttgagcactgagctcttgtactgaaagtccaaggttggaactgaagaagaagaaaggcatcagatcttttctcagcagctgtgcaacattatattagtctttcctttatccataaaataatactagataataaattgcagcctrmagttgtatctcaaggaggagtatagaaaaattttgtttgttcttttgtttactacatctcttagtgggtgtgcccagaaactgaraagacatgacagatctgttaggtattacagcagtggaagaaacgttatgtttcatagctaaaattatagattactgcccaggtttttggtctctagttatgaatgagttacacaagctcgtaataactttgtggataccttggtgatttgatggtgatccaggtgctgcttaaattctcagttctgtgttattttgtttagctgtagtaaagcc

SEQ ID NO: 51887 - DNA, 600 bp, Chicken  19866894300056_2
gaaacttcattagtcatcctttaatgtcatggcagtaacagaaaaataacctgaaatttgagcatttattttttgaatttaaaggtattaaaactgatgagaaaattattgctcagctttgtactcaagccacagatgcattcttgaatgtgtccttgagcactgagctcttgtactgaaagtccaaggttggaactgaagaagaagaaaggcatcagatcttttctcagcagctgtgcaacattatattagtctttcctttatccataaaataatactagataataaattgcagcctrmagttgtatctcaaggaggagtatagaaaaattttgtttgttcttttgtttactacatctcttagtgggtgtgcccagaaactgaraagacatgacagatctgttaggtattacagcagtggaagaaacgttatgtttcatagctaaaattatagattactgcccaggtttttggtctctagttatgaatgagttacacaagctcgtaataactttgtggataccttggtgatttgatggtgatccaggtgctgcttaaattctcagttctgtgttattttgtttagctgtagtaaagccg

SEQ ID NO: 51888 - DNA, 600 bp, Chicken  19866894300056_3
tattaaaactgatgagaaaattattgctcagctttgtactcaagccacagatgcattcttgaatgtgtccttgagcactgagctcttgtactgaaagtccaaggttggaactgaagaagaagaaaggcatcagatcttttctcagcagctgtgcaacattatattagtctttcctttatccataaaataatactagataataaattgcagcctrmagttgtatctcaaggaggagtatagaaaaattttgtttgttcttttgtttactacatctcttagtgggtgtgcccagaaactgaraagacatgacagatctgttaggtattacagcagtggaagaaacgttatgtttcatagctaaaattatagattactgcccaggtttttggtctctagttatgaatgagttacacaagctcgtaataactttgtggataccttggtgatttgatggtgatccaggtgctgcttaaattctcagttctgtgttattttgtttagctgtagtaaagccgtctggaaaggccatttcatttattgaaattaaaatactccaaaatttcgccataaatcaaggactccatctgaagtactgagtcc

SEQ ID NO: 51889 - DNA, 600 bp, Chicken  19866894300065_1
aacttatcattcttggatgataggtaatattttaaaagtcatgctccattttatagaaaatacagtgagagtgtcttgggcccattcagcaactacgctacaggttcatgaatattcaaaggaagtgagttgagacctacatgtggatcaggagtcttttgtgttatttaggatgctaccttttttcccctcagactttgttgatctcaacaacggcaggttctatgtgggggtctgtgcattcgtgaaagtgcagcttaaggtaagtggattttttgttcgctctgtctgtagctgagygattgcttaaagctgggaatgaaagtacataggtcagactgtagttctcaggagtaacgcactacaccagagaacacagtggagtccaaaacactgaccttgctacaaaacatccagctaatggtgagtaagcaggcttaggaaagtgcagtgtctagcaatggatgctttatgttcagagtttcccttatacttaatgcttttaaaatcttactgcaggacggctcataccatgaagatgtgggctatggagtcagtgaaggcttgaagtccaaggccttgtccttagaaaaggcaaga

SEQ ID NO: 51890 - DNA, 600 bp, Chicken  19866894300065_2
gggctatggagtcagtgaaggcttgaagtccaaggccttgtccttagaaaaggcaagaaaggaggcagtaacagatggactgaagagggcgctcaagtaagtgaaggtcactacttgtacattctcagaggtgaactgggagctgttattttcagtcacaatgggctctccttgtttctcaggtgctttgggaatgctcttgggaactgcatcctagacaaagactacctacaagcagttaataagcttccacgtcaggtacagtatgtgatgtttcagagcagggactgctcgatgttrattgttcctggtccttcatgttaaaaggaatgtaaataatgatacaaatgcatcttagccccaaatatttcctgctgtcagaccagtagcatttgcctgctagtttgattgcatgagctgtccgttcctgagttcttttccccagcactttactacaactgttctaaagtttaactatttgcagtaggcaagcttactatggtgagacagctgaagatacagtattctactcaagatgccgtgtgacatttagcgtcaaagaccctaagtctttctattcagtgccagcaatgtgtacag

SEQ ID NO: 51891 - DNA, 600 bp, Chicken  19866894300067_1
tgttatcactcagctgtctttcctattttctttcctgcctacctcctgtttactggcttctatggtggaggggatgcagtttcttccacatcattctgcatgctacggagtggtcttagttcaccctccaaaatactcattattacccagaaggcctggagaagaaaagacttaaggaatctgaagaatgctctgatgaagtttgcctgggttttaataaggattttcatatcatgtcacatactgatcataacagatcaggcgttatttgcagggatgtttgtttgcagaacaacaagrcatagattgttatttttgttttsaaggagacctgattatcatgatgttacattttggcagtctttaaagcattaaggaatatgcttacatttgaagtagtaagatggtgaaagaaagcaaggtggagctggaaacatgagcaaaaagcaaagtagaaaacagcaatagtgtttggcatagaattgagagacaaaagggctggagrcgaaagagctggagaagtggagatcacagtagtcaagcaacaagattatcagcccatccacaaacgctytggcagtctctcatgcaaaacaagtc

SEQ ID NO: 51892 - DNA, 600 bp, Chicken  19866894300067_2
tattttctttcctgcctacctcctgtttactggcttctatggtggaggggatgcagtttcttccacatcattctgcatgctacggagtggtcttagttcaccctccaaaatactcattattacccagaaggcctggagaagaaaagacttaaggaatctgaagaatgctctgatgaagtttgcctgggttttaataaggattttcatatcatgtcacatactgatcataacagatcaggcgttatttgcagggatgtttgtttgcagaacaacaagrcatagattgttatttttgttttsaaggagacctgattatcatgatgttacattttggcagtctttaaagcattaaggaatatgcttacatttgaagtagtaagatggtgaaagaaagcaaggtggagctggaaacatgagcaaaaagcaaagtagaaaacagcaatagtgtttggcatagaattgagagacaaaagggctggagrcgaaagagctggagaagtggagatcacagtagtcaagcaacaagattatcagcccatccacaaacgctytggcagtctctcatgcaaaacaagtctttgcaaagttgtggaggaagga

SEQ ID NO: 51893 - DNA, 600 bp, Chicken  19866894300067_3
cctgggttttaataaggattttcatatcatgtcacatactgatcataacagatcaggcgttatttgcagggatgtttgtttgcagaacaacaagrcatagattgttatttttgttttsaaggagacctgattatcatgatgttacattttggcagtctttaaagcattaaggaatatgcttacatttgaagtagtaagatggtgaaagaaagcaaggtggagctggaaacatgagcaaaaagcaaagtagaaaacagcaatagtgtttggcatagaattgagagacaaaagggctggagrcgaaagagctggagaagtggagatcacagtagtcaagcaacaagattatcagcccatccacaaacgctytggcagtctctcatgcaaaacaagtctttgcaaagttgtggaggaaggagtgataagatttaaacacagccaagataaaaggtagtctaagagaaaggaaaaggaaatatggtgtactgcttacgcctggtgagtaggaagatgatgctgccatccatgatgagaggagaaggagaagggaaaataggaagaaatttgaatgttagcaagattgaaataacagatctgcct

SEQ ID NO: 51894 - DNA, 600 bp, Chicken  19866894300067_4
ggatgtttgtttgcagaacaacaagrcatagattgttatttttgttttsaaggagacctgattatcatgatgttacattttggcagtctttaaagcattaaggaatatgcttacatttgaagtagtaagatggtgaaagaaagcaaggtggagctggaaacatgagcaaaaagcaaagtagaaaacagcaatagtgtttggcatagaattgagagacaaaagggctggagrcgaaagagctggagaagtggagatcacagtagtcaagcaacaagattatcagcccatccacaaacgctytggcagtctctcatgcaaaacaagtctttgcaaagttgtggaggaaggagtgataagatttaaacacagccaagataaaaggtagtctaagagaaaggaaaaggaaatatggtgtactgcttacgcctggtgagtaggaagatgatgctgccatccatgatgagaggagaaggagaagggaaaataggaagaaatttgaatgttagcaagattgaaataacagatctgcctcaaactgaagtgttatagttacctatacagcaaaagtttcttaagaaagcctcacaaagtatttctaag

SEQ ID NO: 51895 - DNA, 600 bp, Chicken  19866894300067_5
agtatttctaaggtacttctttcttcatgccctttctctactccccgtgagctcaacagctaagtacaagtgtacttgaaatacctgattattttgtcccatccttgacgagtcttcatttcttataaactgttctaatcaagagaatgtcaaaagaatgtccctttagcagaagatgaagcaaatcagactttgagaactgaacagagatgaagcaattatgagaatcaatcttcacagaaactgagggaactgggaaaatatctaaggacaggcaagcaattttctcttgcaatataygcagaagcagataggaggaactgatcagggtgtttgaagtacttaaagactattgttttccagagggaaagaaaaagcctaggatgtagaaaaaaaattgactggttgtttttggctacagttttaaaagcttggatttggacagttgaagttgttggacaaaaaactattcatagtataaaagaactacagaaaatctacagaaaaaagaaaaacggagaaaaaaaaagktaagaaaaaaggccaaacatatggaatcaaatgaaattaaaaggaagaaatcattcatactgctggttt

SEQ ID NO: 51896 - DNA, 570 bp, Chicken  19866894300067_6
tcttcacagaaactgagggaactgggaaaatatctaaggacaggcaagcaattttctcttgcaatataygcagaagcagataggaggaactgatcagggtgtttgaagtacttaaagactattgttttccagagggaaagaaaaagcctaggatgtagaaaaaaaattgactggttgtttttggctacagttttaaaagcttggatttggacagttgaagttgttggacaaaaaactattcatagtataaaagaactacagaaaatctacagaaaaaagaaaaacggagaaaaaaaaagktaagaaaaaaggccaaacatatggaatcaaatgaaattaaaaggaagaaatcattcatactgctggtttataataagaagcaggtattaaaaaggtctgtgcattgtgaggtgtccagaatagcagagacaattgtggatttgctgcaacccacttagtctgcataacgttgcttcgcacaggtgctaggtgctcagtgtagatgattgctgtcccaaatcaagcaaaggagaagtcacctgctgtcctcacttggaaaaacagcacatc

SEQ ID NO: 51897 - DNA, 600 bp, Chicken  19866894300068_1
taaataatttctaaatcagacgtgtgggaaaacgcaatgagcacagcagcaggtaaataaatacgtgaatatcagagggaatcgtttgcaagctgtaaattctctgcacccccgggggttctgttttactcctctgttttttcctgtgcttttttttatcttcttgctgtggcaaatactgaagtagcatttgctgcctccttctccttgaaccccgtttcctcccttccccctaaaggcatggatttagtggaggtcacgggatggctttgtagtattcaatgtgcagtctttgcaccrtgcaagatgcaaaggtttatgaagagggaaatgttggtacctaagaggagatcggctcctaagaacaccatagaaaagaggaattacttccagaattccccaattattggtgagtttagggtttgagtcacagctggagcartgcaggtcggctgacgggttggcacagagcagcgaggctgctcaggtctgctgtcttaataccatgttttgtttgtctcataggctgatattttttttttacaggaaaataaaataaagaagtaacacgttctgtagacgacacaaaaaaatgcattt

SEQ ID NO: 51898 - DNA, 560 bp, Chicken  19866894300068_2
cctgtgcttttttttatcttcttgctgtggcaaatactgaagtagcatttgctgcctccttctccttgaaccccgtttcctcccttccccctaaaggcatggatttagtggaggtcacgggatggctttgtagtattcaatgtgcagtctttgcaccrtgcaagatgcaaaggtttatgaagagggaaatgttggtacctaagaggagatcggctcctaagaacaccatagaaaagaggaattacttccagaattccccaattattggtgagtttagggtttgagtcacagctggagcartgcaggtcggctgacgggttggcacagagcagcgaggctgctcaggtctgctgtcttaataccatgttttgtttgtctcataggctgatattttttttttacaggaaaataaaataaagaagtaacacgttctgtagacgacacaaaaaaatgcatttttagagtacacgctgtatggaatccttgtatttaaagcaacttggcattttgtgctcccaggacagtctcaggagccatgtgagggctgcaaagctggtttg

SEQ ID NO: 51899 - DNA, 600 bp, Chicken  19866894300070_1
gaaaagattaaagaggtttcattttttgaatggcactcttgagacttgactgaagtgtttgtgatttggagtagctgcaaaattgttctaagaaatgtaattctagaaaacgcttctaaattacccagacaatgagaaaacagctttgggtcctgagtcattcctgttgatgcagatcagaagtaaacgttgcactccttctttggaggtgcagtgtggtcttctgcatggtcagtgagctctccttgccgtcactgggcagtgatgatggggagtcagcagaaaggtcaggcagattgyacctaagtgttaggcacagtcagagcttgctctgagagtcactgagataatgctagtgctatgttccccctcaccctctccacttcttttcttcttcacaggctgcacygtctatctgcaggctctctggacagggatttgcaggagctgagcataagtgcctcttctttcaggagtctgagcttcctttcctatgtgtaggttcccaaacctctggtctttagacctcttacctgaggttccactagattactgtgtttctgccatagaaatatttctcctctttatcaaacatccaca

SEQ ID NO: 51900 - DNA, 600 bp, Chicken  19866894300070_2
acgcttctaaattacccagacaatgagaaaacagctttgggtcctgagtcattcctgttgatgcagatcagaagtaaacgttgcactccttctttggaggtgcagtgtggtcttctgcatggtcagtgagctctccttgccgtcactgggcagtgatgatggggagtcagcagaaaggtcaggcagattgyacctaagtgttaggcacagtcagagcttgctctgagagtcactgagataatgctagtgctatgttccccctcaccctctccacttcttttcttcttcacaggctgcacygtctatctgcaggctctctggacagggatttgcaggagctgagcataagtgcctcttctttcaggagtctgagcttcctttcctatgtgtaggttcccaaacctctggtctttagacctcttacctgaggttccactagattactgtgtttctgccatagaaatatttctcctctttatcaaacatccacagcactgttggaggaagtgttgtgtgttatcaggataccggtgttaccagctcactgtgcccacagaactgctgtaggtgaatgaaggaagatgcccagttagtaactca

SEQ ID NO: 51901 - DNA, 600 bp, Chicken  19866894300070_3
aatctttaaaatatccttcttctattctaaagctctgtttgcttatgtttccttgctaccttttggaatcaaattattcagaagtaacgtgtttagaatgtgttctggaagaaaactggcagccactgcttttgtgacggcagaggaagtggctagcagctactcctgtcaccagtcctgtaagtcaggcaccagctgatgctttgggattgctccagtgctcttcctcagcgactgtgagattacctgaatgctctccccataaatttcctgaatatagtcacagtgagctgagaaacracgttacctcacagatgaatttaccacggactaactcagcatactgccttgatcccctttgcagcaggatcaggactttgacctttgacagtaaaagaaagaaacatcactgcttgagattggaaagaaaagaaaaaatcttagckacagccactgtagcattagcatcttttgtcagaggccccatcactagttgaggagtagtaccagtctgtggagcaagccctattaccacagtagactaccttgatgttattctgggggtccgtctgaaggaaggctggtagctgcagcatagaa

SEQ ID NO: 51902 - DNA, 600 bp, Chicken  19866894300070_4
aagtggctagcagctactcctgtcaccagtcctgtaagtcaggcaccagctgatgctttgggattgctccagtgctcttcctcagcgactgtgagattacctgaatgctctccccataaatttcctgaatatagtcacagtgagctgagaaacracgttacctcacagatgaatttaccacggactaactcagcatactgccttgatcccctttgcagcaggatcaggactttgacctttgacagtaaaagaaagaaacatcactgcttgagattggaaagaaaagaaaaaatcttagckacagccactgtagcattagcatcttttgtcagaggccccatcactagttgaggagtagtaccagtctgtggagcaagccctattaccacagtagactaccttgatgttattctgggggtccgtctgaaggaaggctggtagctgcagcatagaagagatttccctttaagaatcacaggggaygtgtggaccagcagctattcctgaacctttgcccttgcctcattcatagytcaacaggacctttgtgattcctgttttcaagttggcaggaaacatgcactgaaaacactgctcatc

SEQ ID NO: 51903 - DNA, 600 bp, Chicken  19866894300070_5
actaactcagcatactgccttgatcccctttgcagcaggatcaggactttgacctttgacagtaaaagaaagaaacatcactgcttgagattggaaagaaaagaaaaaatcttagckacagccactgtagcattagcatcttttgtcagaggccccatcactagttgaggagtagtaccagtctgtggagcaagccctattaccacagtagactaccttgatgttattctgggggtccgtctgaaggaaggctggtagctgcagcatagaagagatttccctttaagaatcacaggggaygtgtggaccagcagctattcctgaacctttgcccttgcctcattcatagytcaacaggacctttgtgattcctgttttcaagttggcaggaaacatgcactgaaaacactgctcatcggttggaaagcctctctcctgatgagtgctgagctggcagcttctgagtttccagtgtcagaagtgaagttgcagccaaatgaccaaactgagagcatgtccccttcagctgcccattgctgcttcctttgagagcccacacagaagtcgtacgtcttcagtygatgcagactacaaagggca

SEQ ID NO: 51904 - DNA, 600 bp, Chicken  19866894300070_6
gacctttgacagtaaaagaaagaaacatcactgcttgagattggaaagaaaagaaaaaatcttagckacagccactgtagcattagcatcttttgtcagaggccccatcactagttgaggagtagtaccagtctgtggagcaagccctattaccacagtagactaccttgatgttattctgggggtccgtctgaaggaaggctggtagctgcagcatagaagagatttccctttaagaatcacaggggaygtgtggaccagcagctattcctgaacctttgcccttgcctcattcatagytcaacaggacctttgtgattcctgttttcaagttggcaggaaacatgcactgaaaacactgctcatcggttggaaagcctctctcctgatgagtgctgagctggcagcttctgagtttccagtgtcagaagtgaagttgcagccaaatgaccaaactgagagcatgtccccttcagctgcccattgctgcttcctttgagagcccacacagaagtcgtacgtcttcagtygatgcagactacaaagggcagtgcatggtctgcattgagtttggcacacggatcccctggtgccttgctg

SEQ ID NO: 51905 - DNA, 600 bp, Chicken  19866894300070_7
ctttaagaatcacaggggaygtgtggaccagcagctattcctgaacctttgcccttgcctcattcatagytcaacaggacctttgtgattcctgttttcaagttggcaggaaacatgcactgaaaacactgctcatcggttggaaagcctctctcctgatgagtgctgagctggcagcttctgagtttccagtgtcagaagtgaagttgcagccaaatgaccaaactgagagcatgtccccttcagctgcccattgctgcttcctttgagagcccacacagaagtcgtacgtcttcagtygatgcagactacaaagggcagtgcatggtctgcattgagtttggcacacggatcccctggtgccttgctgctgccctgagctcacagggtcctaagtagcccrttttaggggatcatatcatctgatgaatggcactgaatgctacgaggttctgagttttcccaaagaagctgaaaacacatcagatgttggactgaatctttccttgtctagctggaggcctcaggcctatgttacaaagcttttgcgagcattttgtaccagcatattaaacccaagtgctgccatatttcatatag

SEQ ID NO: 51906 - DNA, 600 bp, Chicken  19866894300070_8
tggcaggaaacatgcactgaaaacactgctcatcggttggaaagcctctctcctgatgagtgctgagctggcagcttctgagtttccagtgtcagaagtgaagttgcagccaaatgaccaaactgagagcatgtccccttcagctgcccattgctgcttcctttgagagcccacacagaagtcgtacgtcttcagtygatgcagactacaaagggcagtgcatggtctgcattgagtttggcacacggatcccctggtgccttgctgctgccctgagctcacagggtcctaagtagcccrttttaggggatcatatcatctgatgaatggcactgaatgctacgaggttctgagttttcccaaagaagctgaaaacacatcagatgttggactgaatctttccttgtctagctggaggcctcaggcctatgttacaaagcttttgcgagcattttgtaccagcatattaaacccaagtgctgccatatttcatatagtaataattatgtcctttgcctctaatgttctggataatgtttagctttgcctttattacttgctactgttctgctgggagctctggtttgcatttaattatgg

SEQ ID NO: 51907 - DNA, 600 bp, Chicken  19866894300076_1
actgaatgtacaagtgcacagacttatcccttggctccaacacgattttatgtcacctttccatctttctctctgcctgttctggaacaaaccattagaggccattggaccctcagtgcgatgcagagcagccacagctctaaattgtactgccttgtaattggcccctgaagagtcattacagcagctgcagattatcatcaggcagcaagttcctgtagatttctaacctctgccaccatatggatggatcaagaagcaatacataccagctctgagtttctggctggctggttaacwgagcatctttgtgtctctacttggagaagaggcttagttcacagtgtaatcacagtgtaattccctgagtgcctctgcataggcttagcaggacacttcaactgagaataataaactacatggtctttattgttttatttatagtgccttgaagttgcaacgaggtgctgagtcaccttaaaatcagttttctccttcctttccaaagctgcaagagctgagaacacccaagtaccttattggcttggagacagaaagaaagaaaagaagtatgactttatgtaaatgcagtaagtaaac

SEQ ID NO: 51908 - DNA, 512 bp, Chicken  19866894300076_2
acacccaagtaccttattggcttggagacagaaagaaagaaaagaagtatgactttatgtaaatgcagtaagtaaactaaggcaattaaaggagagttttattcactttggtttagttgtaataacaagattagtgaaggttatttttgacaaatgagcctaagtaggtatatgtagtctgtttcttactctgattctgtttagctggtgctttggaagaaaagtcccacaaagtcatttagcaagtggcagattttcgttcattctggaggtccttgagaccgacacagcaagtgtgtrtaatacagccaactcaatatgcacctcagcagcattgtgtacgtgagctcatgcattttacagaagtagactgcaaatactatgtgcaaataaaacatatgtgaaacattgtttattggcatggtcttgctcctacaggtcttaatagccagatatctagtatgtaggaatatttcagcaggcttctgaccatagtaccataatcacccatt

SEQ ID NO: 51909 - DNA, 599 bp, Chicken  19866894300086_1
  misc_feature (1)..(189): n is any nucleotide
nnnnnnnnnnnnnnnnnnnnnnnnnnnnnnnnnnnnnnnnnnnnnnnnnnnnnnnnnnnnnnnnnnnnnnnnnnnnnnnnnnnnnnnnnnnnnnnnnnnnnnnnnnnnnnnnnnnnnnnnnnnnnnnnnnnnnnnnnnnnnnnnnnnnnnnnnnnnnnnnnnnnnnnnnnnnnnnnnnnnnnnnnnnnntgatttattggataggttattaattttggaaagagaaagccagttttaatggatgattactagtttccattgcttcctaaaattagcaaattaatcgttttttgaaaaaaraaaaagaaaagaaaacattttgattttcagttacagcattaaagcgtttgtgctattgcatatgtttacttttatatcttttatctatatataaagaatattggaagacaactctggatgctattcaggtaagcttcttgtttaaagagcattattccagcaattttactggtcatcctagacctgaaagctgaataaaactgagatgaccttgatgctgaacctgtttcgcttatgtgttttcttttcccacgcagtcctatattgtatcagtccctattgtatcaatacatattttt

SEQ ID NO: 51910 - DNA, 600 bp, Chicken  19866894300086_2
agaatattggaagacaactctggatgctattcaggtaagcttcttgtttaaagagcattattccagcaattttactggtcatcctagacctgaaagctgaataaaactgagatgaccttgatgctgaacctgtttcgcttatgtgttttcttttcccacgcagtcctatattgtatcagtccctattgtatcaatacatatttttctgttctagggagaggtaagaggatgatttagccttgagaagacttcagataattttcataacttctaaaaactatttaatggctacatctactycctaaactcaatagtaatatacagaatataacaatgkttgactttttctgatttattccaaatggagtgagaagactcaccattacacatagtcaggactgataaaactcttaagggtcactctgcaagactcagatcatggtgcatttatgggaagtgcaaaattgtacctatcttgggcagaaaaaaaccctggatgttccaaaaatgagtgctgaaagaattagatccattaattcagatatatgttgcatttgcttgttttattctaatcaaaacaatttaggaaggtttaacttg

SEQ ID NO: 51911 - DNA, 600 bp, Chicken  19866894300086_3
agcttcttgtttaaagagcattattccagcaattttactggtcatcctagacctgaaagctgaataaaactgagatgaccttgatgctgaacctgtttcgcttatgtgttttcttttcccacgcagtcctatattgtatcagtccctattgtatcaatacatatttttctgttctagggagaggtaagaggatgatttagccttgagaagacttcagataattttcataacttctaaaaactatttaatggctacatctactycctaaactcaatagtaatatacagaatataacaatgkttgactttttctgatttattccaaatggagtgagaagactcaccattacacatagtcaggactgataaaactcttaagggtcactctgcaagactcagatcatggtgcatttatgggaagtgcaaaattgtacctatcttgggcagaaaaaaaccctggatgttccaaaaatgagtgctgaaagaattagatccattaattcagatatatgttgcatttgcttgttttattctaatcaaaacaatttaggaaggtttaacttgaatgaggaatcatttagtaaaatatatccttcaaata

SEQ ID NO: 51912 - DNA, 600 bp, Chicken  19866894300087_1
gggaagctttgccacttatcaaggaatgcacgctgaaaagaaaggactggagccgttcagatgctttggcatgttcaaaataacatctcacatcagtcaggctcagaggcactaggagacatttcaaaataaactttatatctatctatctatctggaggcaaagattcaatttaacagacaaatcactctgtggcatcacattggctctgagagaacattgttataagggtcaccagttgcaaaatgactcaccaacataatttgagagcatttattgtagggtctcgtgcccccccaracaagcctagatttgaaaattcacatctgcgtataattctagtgatttctttaaattgaggggtttcactcctcttggccgaggaatgttttgtttacttattgtgtgacatcctgaaggatcccaaagataatggaactgccaaattctggtcttgtttatttcctcttcagtattacggaatacatttgggattgcctagctttaactgaattcagaaatgggttatcggggttatttaggagttgctatgcttttcagcaatacatggtatgaatagaaaatggaactttggtacgt

SEQ ID NO: 51913 - DNA, 600 bp, Chicken  19866894300089_1
tattgatcagttgtttggactgttccaggacaagggatgtctgtaaaagcttgttttgcctggagaaagccctgtttggtgctgttaaacaagtgtacttcgttatgctttcaactttcctgagcgtgtagcagaagagcacctggaagaggttaggaatggtgaggttaggcatgctcaggtctgaactgtgagctgatggtgctctgttagcctcattctgagtgcgtggtggggcagattgctgctgctcacacgatgtaacctaatcaaaacggattggaggatgcattaaaaagraaaccagaacaaactctttattcctcttttgaggaatgaagcttactgtgcaatgcaaatagtaatctctttgataaacttgcttttctgctctttggctctgcrgttcataaaaaatctactttgccagtgctgtgctttctcagtatgtatttgttggacttggtaagcgctgtccattgcttggagggagcaaaaatgttccacaaaccaagaaccataaaatcaatacacgtttttcattgagcatagcagagcawgccattggcccgaatggagagagcttggcaggagaacaga

SEQ ID NO: 51914 - DNA, 600 bp, Chicken  19866894300089_2
tgctttcaactttcctgagcgtgtagcagaagagcacctggaagaggttaggaatggtgaggttaggcatgctcaggtctgaactgtgagctgatggtgctctgttagcctcattctgagtgcgtggtggggcagattgctgctgctcacacgatgtaacctaatcaaaacggattggaggatgcattaaaaagraaaccagaacaaactctttattcctcttttgaggaatgaagcttactgtgcaatgcaaatagtaatctctttgataaacttgcttttctgctctttggctctgcrgttcataaaaaatctactttgccagtgctgtgctttctcagtatgtatttgttggacttggtaagcgctgtccattgcttggagggagcaaaaatgttccacaaaccaagaaccataaaatcaatacacgtttttcattgagcatagcagagcawgccattggcccgaatggagagagcttggcaggagaacagagctggaaagagttgtcaagatgtaaaaatataatgaaggagctacagggcttttcctcaacaaaataacttgaagttcttacaaactcagaacagtataacaaac

SEQ ID NO: 51915 - DNA, 600 bp, Chicken  19866894300089_3
gtaacctaatcaaaacggattggaggatgcattaaaaagraaaccagaacaaactctttattcctcttttgaggaatgaagcttactgtgcaatgcaaatagtaatctctttgataaacttgcttttctgctctttggctctgcrgttcataaaaaatctactttgccagtgctgtgctttctcagtatgtatttgttggacttggtaagcgctgtccattgcttggagggagcaaaaatgttccacaaaccaagaaccataaaatcaatacacgtttttcattgagcatagcagagcawgccattggcccgaatggagagagcttggcaggagaacagagctggaaagagttgtcaagatgtaaaaatataatgaaggagctacagggcttttcctcaacaaaataacttgaagttcttacaaactcagaacagtataacaaacagcttggaatgaaaatcctgcgtgaaagcaggacagccatgacctctttgtgctgtcctggggaaatgcagcagaacattgctgtattcagcaatgtgcagaagtaaagttcactcacagcagctctcagctttcctaattgccaggtgaatggg

SEQ ID NO: 51916 - DNA, 600 bp, Chicken  19866894300089_4
gggacgacgatgcagaaatgttgctgtatttgctttttcctcttgtgtcctggtttgagctgtgtaacaaaaacaagcttgacaaacgttttgaggctgcaggttcgttcaggagtcctagatatttgtgtctgcatcccagcagaacgcctctgctctgcaggagccccaggttcaggtgctctgtagtttcaagcacactgtttgtaagggccagagttgcagtaggatttgaccacaccatacagccgtttgcttccagtgttttaattctaatgtttggctcttaacatggttttrctcacaaaaagcttcgtgcctcacttcaaaaataaaatgggctggtgaaatcgtttagctgctgcgctgtttctgctgcagggtgggaaatatgtgccctgtcggagcaaagtgctgctatttgccacacaaagcctgatgatggagcctgcccagctgtactcttaaatgcttgaccgcagccccgtcagctcagttgtgtgtcaggctgctaggggcagcttgcttgccagtgtcaggctggagaacgcactgcagtgtcggtcccctgagctgtcccctcgatggcttttgtttgga

SEQ ID NO: 51917 - DNA, 600 bp, Chicken  19866894300096_1
gaataataaatttgagcagagttgtaaggcttggcaacaactttcactgtaggcttatctggaagctgcactaaatgctatcattaggatatgtgataaatctgtcataataggtgaaaatgaatataaagactaagaagcctcaaaaaaacacataattctacgcagcagaagtctttacactttataaatgtgatggcccctggcaatattcacgtgaattgattagctcagtcttccacatgctgttataaaacacaaaaacttctgtagttattgaaattcagtataaaaaatggmggcataattcttttttatgataacgcttgcaatttaaaaaagtatgtgtttctgccagtaaaactgcagcagagaggtccaagctggaagctgtaaatatgatctagttattatttcttcactcttgtacttctgtattcatactgcaccaacgtgagagaggraggattgccatctaaggcgttgcttagtctgtcctaaggatcgtgtgattcattagcctactacttattacttaaaaaaagaagtgccagtaactcagataacaacgtatgtattagaaatgtaagatgataatgt

SEQ ID NO: 51918 - DNA, 600 bp, Chicken  19866894300096_2
gcagcagaagtctttacactttataaatgtgatggcccctggcaatattcacgtgaattgattagctcagtcttccacatgctgttataaaacacaaaaacttctgtagttattgaaattcagtataaaaaatggmggcataattcttttttatgataacgcttgcaatttaaaaaagtatgtgtttctgccagtaaaactgcagcagagaggtccaagctggaagctgtaaatatgatctagttattatttcttcactcttgtacttctgtattcatactgcaccaacgtgagagaggraggattgccatctaaggcgttgcttagtctgtcctaaggatcgtgtgattcattagcctactacttattacttaaaaaaagaagtgccagtaactcagataacaacgtatgtattagaaatgtaagatgataatgtttttcccatgagtctttctccatgatgaaactggccatcaaagcgttaagtagtgtggaaatgtctgtatggaacaaggtcttagcatctgttgaagaaacatacttccaacatgctgttgctctaagttcatttcagccagatgattttgtgagaatagtctt

SEQ ID NO: 51919 - DNA, 599 bp, Chicken  19866894300098_1
  misc_feature (1)..(6): n is any nucleotide
nnnnnnatggagtgattccataatggggttcatggacttttatagcatgaaccccaccccatgatggatcagcccaacagtaatggtgatctgtggcagggtaaaagtcaatggtgggattctctgatctttgataggatcaacccagccatgatggtgtccgtgattgggttcactggtcttttatggagttgacccaacaaagatggagtccacaatagagggatttgatcttgcatttggctttcagcagggaaaacaagttgtgtggatgtggttttggtgactttttgcaaggcragcatcactgccaccaaaatatgtcctgaaccacatacaagtyatcarcatggcaggaagcagagggcagatctccacagactttctgtgtgttgtttttctcctgtcagatgggaataaggctctgcattatctgggtcattgwttttatataatacacagcatggcccttgtttgaggttgctgtaactgtaacataaataaatggcaacaaatatctgaatatraatggtctttcaaagagccgatgaccttcaccattgccactgccctcatagctgaagcatccaccatttgtt

SEQ ID NO: 51920 - DNA, 600 bp, Chicken  19866894300098_2
agcatgaaccccaccccatgatggatcagcccaacagtaatggtgatctgtggcagggtaaaagtcaatggtgggattctctgatctttgataggatcaacccagccatgatggtgtccgtgattgggttcactggtcttttatggagttgacccaacaaagatggagtccacaatagagggatttgatcttgcatttggctttcagcagggaaaacaagttgtgtggatgtggttttggtgactttttgcaaggcragcatcactgccaccaaaatatgtcctgaaccacatacaagtyatcarcatggcaggaagcagagggcagatctccacagactttctgtgtgttgtttttctcctgtcagatgggaataaggctctgcattatctgggtcattgwttttatataatacacagcatggcccttgtttgaggttgctgtaactgtaacataaataaatggcaacaaatatctgaatatraatggtctttcaaagagccgatgaccttcaccattgccactgccctcatagctgaagcatccaccatttgttccaggttgttttgcttggggatcacaaacagctgaagcctgtgg

SEQ ID NO: 51921 - DNA, 600 bp, Chicken  19866894300098_3
gaaccccaccccatgatggatcagcccaacagtaatggtgatctgtggcagggtaaaagtcaatggtgggattctctgatctttgataggatcaacccagccatgatggtgtccgtgattgggttcactggtcttttatggagttgacccaacaaagatggagtccacaatagagggatttgatcttgcatttggctttcagcagggaaaacaagttgtgtggatgtggttttggtgactttttgcaaggcragcatcactgccaccaaaatatgtcctgaaccacatacaagtyatcarcatggcaggaagcagagggcagatctccacagactttctgtgtgttgtttttctcctgtcagatgggaataaggctctgcattatctgggtcattgwttttatataatacacagcatggcccttgtttgaggttgctgtaactgtaacataaataaatggcaacaaatatctgaatatraatggtctttcaaagagccgatgaccttcaccattgccactgccctcatagctgaagcatccaccatttgttccaggttgttttgcttggggatcacaaacagctgaagcctgtggtcaac

SEQ ID NO: 51922 - DNA, 600 bp, Chicken  19866894300098_4
cagccatgatggtgtccgtgattgggttcactggtcttttatggagttgacccaacaaagatggagtccacaatagagggatttgatcttgcatttggctttcagcagggaaaacaagttgtgtggatgtggttttggtgactttttgcaaggcragcatcactgccaccaaaatatgtcctgaaccacatacaagtyatcarcatggcaggaagcagagggcagatctccacagactttctgtgtgttgtttttctcctgtcagatgggaataaggctctgcattatctgggtcattgwttttatataatacacagcatggcccttgtttgaggttgctgtaactgtaacataaataaatggcaacaaatatctgaatatraatggtctttcaaagagccgatgaccttcaccattgccactgccctcatagctgaagcatccaccatttgttccaggttgttttgcttggggatcacaaacagctgaagcctgtggtcaacaatgacttctgcaagagccttggcatggagacrtctctttttgagcgctaccagaagcaggcatggatgctggacacgcagtaccgcatggtgaggc

SEQ ID NO: 51923 - DNA, 600 bp, Chicken  19866894300098_5
ttgatcttgcatttggctttcagcagggaaaacaagttgtgtggatgtggttttggtgactttttgcaaggcragcatcactgccaccaaaatatgtcctgaaccacatacaagtyatcarcatggcaggaagcagagggcagatctccacagactttctgtgtgttgtttttctcctgtcagatgggaataaggctctgcattatctgggtcattgwttttatataatacacagcatggcccttgtttgaggttgctgtaactgtaacataaataaatggcaacaaatatctgaatatraatggtctttcaaagagccgatgaccttcaccattgccactgccctcatagctgaagcatccaccatttgttccaggttgttttgcttggggatcacaaacagctgaagcctgtggtcaacaatgacttctgcaagagccttggcatggagacrtctctttttgagcgctaccagaagcaggcatggatgctggacacgcagtaccgcatggtgaggctttcctcaagctgcaggagaaaatgttatcagcagggtttggctgaagccatcggaaaacagatattctccatttcccttgc

SEQ ID NO: 51924 - DNA, 600 bp, Chicken  19866894300098_6
ctttctgtgtgttgtttttctcctgtcagatgggaataaggctctgcattatctgggtcattgwttttatataatacacagcatggcccttgtttgaggttgctgtaactgtaacataaataaatggcaacaaatatctgaatatraatggtctttcaaagagccgatgaccttcaccattgccactgccctcatagctgaagcatccaccatttgttccaggttgttttgcttggggatcacaaacagctgaagcctgtggtcaacaatgacttctgcaagagccttggcatggagacrtctctttttgagcgctaccagaagcaggcatggatgctggacacgcagtaccgcatggtgaggctttcctcaagctgcaggagaaaatgttatcagcagggtttggctgaagccatcggaaaacagatattctccatttcccttgccagagcaacgaataatgcacttgcccagtaaaagcacagtggcatggcaggtggaacctgctccaaaaatgctgccagttaggaacgttttttttttttttcccctaatgttattgtatagttttatttatttatttatttatttatttattcc

SEQ ID NO: 51925 - DNA, 599 bp, Chicken  19866894300099_1
  misc_feature (1)..(27): n is any nucleotide
nnnnnnnnnnnnnnnnnnnnnnnnnnntgtttttagggaagactggccacaaacttgctatttcagtcttggtagatctacttagctcttgtactcacaaaggtctacatttctgactaaccattattattgtctagagagatcacacacaataaaatgaggtatgttttaatctgttatcagaacatgattgcagcatataaacaggattgtaagacacaattttgtcctattttaaaatgttcatatgagtgaattcaatagaaaattgattagaaggcagccttgtctcttcccttmrtgtaagagacattccagcacattaccagactgcaatatagcaaggattcattcaaaatgttgatagcagattaaattattttgagcaaagaagcataaagaatctcctcctactgactaaaatttatagctgtggcttacatagtagcttagcagttcacatatggcttatgtcaatggcagaaaccatgttattttctaaatcacattgatttgttatgtggtactgaaagatcttaaacagaatcattggctataaattacagaatctagtcttctacattcttatctgtgtttca

SEQ ID NO: 51926 - DNA, 599 bp, Chicken  19866894300099_2
  misc_feature (1)..(26): n is any nucleotide
nnnnnnnnnnnnnnnnnnnnnnnnnntgtttttagggaagactggccacaaacttgctatttcagtcttggtagatctacttagctcttgtactcacaaaggtctacatttctgactaaccattattattgtctagagagatcacacacaataaaatgaggtatgttttaatctgttatcagaacatgattgcagcatataaacaggattgtaagacacaattttgtcctattttaaaatgttcatatgagtgaattcaatagaaaattgattagaaggcagccttgtctcttcccttmrtgtaagagacattccagcacattaccagactgcaatatagcaaggattcattcaaaatgttgatagcagattaaattattttgagcaaagaagcataaagaatctcctcctactgactaaaatttatagctgtggcttacatagtagcttagcagttcacatatggcttatgtcaatggcagaaaccatgttattttctaaatcacattgatttgttatgtggtactgaaagatcttaaacagaatcattggctataaattacagaatctagtcttctacattcttatctgtgtttcag

SEQ ID NO: 51927 - DNA, 599 bp, Chicken  19866894300103_1
  misc_feature (1)..(147): n is any nucleotide
nnnnnnnnnnnnnnnnnnnnnnnnnnnnnnnnnnnnnnnnnnnnnnnnnnnnnnnnnnnnnnnnnnnnnnnnnnnnnnnnnnnnnnnnnnnnnnnnnnnnnnnnnnnnnnnnnnnnnnnnnnnnnnnnnnnnnnnnnnnnnnnnnnncttgcattacaagtgcatttactacccaaagcactatataaaatgtgtatgtgtgtgtatatatgctcatctctgaaatgcagctgtttctggtataagatatgagagttggccattgcagtttgcaatgaagctctgattccttactgcttwstaagtcatattgtcatttgtgctagaggtatttgkgatgtggactgtttggtgaggatttcctagcatctcaaaccaacgtcacaaaagagaaaataacttcacaagaggaaaacaattaagaatgtgccctactgtcaattagacaaaatagtgagagaaaatgatgacrgatttccaccagcatgtgaacaggaataatacccttattgtttgtgtgtgcagcctgtgaagggacacaggtggacaaggtccccaacgtctgccctgaaaagcaggtgctcacatcccacagtgac

SEQ ID NO: 51928 - DNA, 599 bp, Chicken  19866894300103_2
  misc_feature (1)..(146): n is any nucleotide
nnnnnnnnnnnnnnnnnnnnnnnnnnnnnnnnnnnnnnnnnnnnnnnnnnnnnnnnnnnnnnnnnnnnnnnnnnnnnnnnnnnnnnnnnnnnnnnnnnnnnnnnnnnnnnnnnnnnnnnnnnnnnnnnnnnnnnnnnnnnnnnnnncttgcattacaagtgcatttactacccaaagcactatataaaatgtgtatgtgtgtgtatatatgctcatctctgaaatgcagctgtttctggtataagatatgagagttggccattgcagtttgcaatgaagctctgattccttactgcttwstaagtcatattgtcatttgtgctagaggtatttgkgatgtggactgtttggtgaggatttcctagcatctcaaaccaacgtcacaaaagagaaaataacttcacaagaggaaaacaattaagaatgtgccctactgtcaattagacaaaatagtgagagaaaatgatgacrgatttccaccagcatgtgaacaggaataatacccttattgtttgtgtgtgcagcctgtgaagggacacaggtggacaaggtccccaacgtctgccctgaaaagcaggtgctcacatcccacagtgacg

SEQ ID NO: 51929 - DNA, 599 bp, Chicken  19866894300103_3
  misc_feature (1)..(111): n is any nucleotide
nnnnnnnnnnnnnnnnnnnnnnnnnnnnnnnnnnnnnnnnnnnnnnnnnnnnnnnnnnnnnnnnnnnnnnnnnnnnnnnnnnnnnnnnnnnnnnnnnnnnnnnnnnnnnnncttgcattacaagtgcatttactacccaaagcactatataaaatgtgtatgtgtgtgtatatatgctcatctctgaaatgcagctgtttctggtataagatatgagagttggccattgcagtttgcaatgaagctctgattccttactgcttwstaagtcatattgtcatttgtgctagaggtatttgkgatgtggactgtttggtgaggatttcctagcatctcaaaccaacgtcacaaaagagaaaataacttcacaagaggaaaacaattaagaatgtgccctactgtcaattagacaaaatagtgagagaaaatgatgacrgatttccaccagcatgtgaacaggaataatacccttattgtttgtgtgtgcagcctgtgaagggacacaggtggacaaggtccccaacgtctgccctgaaaagcaggtgctcacatcccacagtgacgagaaatagtcacatatacgctgggcttacagtggc

SEQ ID NO: 51930 - DNA, 600 bp, Chicken  19866894300103_4
ccaaagcactatataaaatgtgtatgtgtgtgtatatatgctcatctctgaaatgcagctgtttctggtataagatatgagagttggccattgcagtttgcaatgaagctctgattccttactgcttwstaagtcatattgtcatttgtgctagaggtatttgkgatgtggactgtttggtgaggatttcctagcatctcaaaccaacgtcacaaaagagaaaataacttcacaagaggaaaacaattaagaatgtgccctactgtcaattagacaaaatagtgagagaaaatgatgacrgatttccaccagcatgtgaacaggaataatacccttattgtttgtgtgtgcagcctgtgaagggacacaggtggacaaggtccccaacgtctgccctgaaaagcaggtgctcacatcccacagtgacgagaaatagtcacatatacgctgggcttacagtggcatgctccttcctagagtacaggactcacagatcgggaagttgccttcaccarttagtatctgttaagtgtattgttcagtatgtgttggttattattaacttctcccgagtaggaagcctcatgaaaacagaaaata

SEQ ID NO: 51931 - DNA, 465 bp, Chicken  19866894300103_5
aagagaaaataacttcacaagaggaaaacaattaagaatgtgccctactgtcaattagacaaaatagtgagagaaaatgatgacrgatttccaccagcatgtgaacaggaataatacccttattgtttgtgtgtgcagcctgtgaagggacacaggtggacaaggtccccaacgtctgccctgaaaagcaggtgctcacatcccacagtgacgagaaatagtcacatatacgctgggcttacagtggcatgctccttcctagagtacaggactcacagatcgggaagttgccttcaccarttagtatctgttaagtgtattgttcagtatgtgttggttattattaacttctcccgagtaggaagcctcatgaaaacagaaaataaataggggagagagagccattccctctctccccctacctacattaaggtattattacagacatacacatggcatttgaac

SEQ ID NO: 51932 - DNA, 600 bp, Chicken  19866894300104_1
cacaagctggtctcaggattcacgtttccatttgtgctttcattctgaagttaacatagcattgagttcacccttgcataaattaacaggacattcaggatttctggtggaatcccaaattatgcagtgctatagcaggtgaaatttttaacaagagaacattaagtacttgtgaacgtgctgcacgaggaagggaattaggcttccaccttcacctgtctggggccttcctgctgaagccacacttagattaggagctgggctaatcacagggaaccccttgtccccatctcagagcasaactcacactctgtgaggccaacatgcctttaggatcactctgcagggatttacagccatatgagtcagtcaaacctgtgttgcagctcaacagagttgctctaaggtgaataaactggtgcattcatgtcaaaaasagaacaaaatctcctcacaggcaaaaccacaatgctcagaaagaaacaaacttaaaagtgcattgaagagcctcaggtataaaagtgttgtgtacaacaaacattkttgcaytgaaagcagacatttcttccactttaagaaaatcttagtatgactctttay

SEQ ID NO: 51933 - DNA, 600 bp, Chicken  19866894300104_2
ggtgaaatttttaacaagagaacattaagtacttgtgaacgtgctgcacgaggaagggaattaggcttccaccttcacctgtctggggccttcctgctgaagccacacttagattaggagctgggctaatcacagggaaccccttgtccccatctcagagcasaactcacactctgtgaggccaacatgcctttaggatcactctgcagggatttacagccatatgagtcagtcaaacctgtgttgcagctcaacagagttgctctaaggtgaataaactggtgcattcatgtcaaaaasagaacaaaatctcctcacaggcaaaaccacaatgctcagaaagaaacaaacttaaaagtgcattgaagagcctcaggtataaaagtgttgtgtacaacaaacattkttgcaytgaaagcagacatttcttccactttaagaaaatcttagtatgactctttayatcagtagtctatactgccagtttattcagaaaaccaaaaggcatttctcaagatcactgaaaacaccagtaaaatttccatcracttctgtttgagcaagaactatctcttagatgaagggtttatctttctgcct

SEQ ID NO: 51934 - DNA, 600 bp, Chicken  19866894300104_3
acttagattaggagctgggctaatcacagggaaccccttgtccccatctcagagcasaactcacactctgtgaggccaacatgcctttaggatcactctgcagggatttacagccatatgagtcagtcaaacctgtgttgcagctcaacagagttgctctaaggtgaataaactggtgcattcatgtcaaaaasagaacaaaatctcctcacaggcaaaaccacaatgctcagaaagaaacaaacttaaaagtgcattgaagagcctcaggtataaaagtgttgtgtacaacaaacattkttgcaytgaaagcagacatttcttccactttaagaaaatcttagtatgactctttayatcagtagtctatactgccagtttattcagaaaaccaaaaggcatttctcaagatcactgaaaacaccagtaaaatttccatcracttctgtttgagcaagaactatctcttagatgaagggtttatctttctgcctcttgaaagcttcttgtttaggcccagacactcacctccttcctttggcatcagctgctcatagaaagtcccaatgtcatgcactgcatgacactttcacttcaaca

SEQ ID NO: 51935 - DNA, 600 bp, Chicken  19866894300104_4
attaggagctgggctaatcacagggaaccccttgtccccatctcagagcasaactcacactctgtgaggccaacatgcctttaggatcactctgcagggatttacagccatatgagtcagtcaaacctgtgttgcagctcaacagagttgctctaaggtgaataaactggtgcattcatgtcaaaaasagaacaaaatctcctcacaggcaaaaccacaatgctcagaaagaaacaaacttaaaagtgcattgaagagcctcaggtataaaagtgttgtgtacaacaaacattkttgcaytgaaagcagacatttcttccactttaagaaaatcttagtatgactctttayatcagtagtctatactgccagtttattcagaaaaccaaaaggcatttctcaagatcactgaaaacaccagtaaaatttccatcracttctgtttgagcaagaactatctcttagatgaagggtttatctttctgcctcttgaaagcttcttgtttaggcccagacactcacctccttcctttggcatcagctgctcatagaaagtcccaatgtcatgcactgcatgacactttcacttcaacacatctt

SEQ ID NO: 51936 - DNA, 571 bp, Chicken  19866894300104_5
aactcacactctgtgaggccaacatgcctttaggatcactctgcagggatttacagccatatgagtcagtcaaacctgtgttgcagctcaacagagttgctctaaggtgaataaactggtgcattcatgtcaaaaasagaacaaaatctcctcacaggcaaaaccacaatgctcagaaagaaacaaacttaaaagtgcattgaagagcctcaggtataaaagtgttgtgtacaacaaacattkttgcaytgaaagcagacatttcttccactttaagaaaatcttagtatgactctttayatcagtagtctatactgccagtttattcagaaaaccaaaaggcatttctcaagatcactgaaaacaccagtaaaatttccatcracttctgtttgagcaagaactatctcttagatgaagggtttatctttctgcctcttgaaagcttcttgtttaggcccagacactcacctccttcctttggcatcagctgctcatagaaagtcccaatgtcatgcactgcatgacactttcacttcaacacatctttccacatgcacccccagtgcaa

SEQ ID NO: 51937 - DNA, 487 bp, Chicken  19866894300104_6
agctcaacagagttgctctaaggtgaataaactggtgcattcatgtcaaaaasagaacaaaatctcctcacaggcaaaaccacaatgctcagaaagaaacaaacttaaaagtgcattgaagagcctcaggtataaaagtgttgtgtacaacaaacattkttgcaytgaaagcagacatttcttccactttaagaaaatcttagtatgactctttayatcagtagtctatactgccagtttattcagaaaaccaaaaggcatttctcaagatcactgaaaacaccagtaaaatttccatcracttctgtttgagcaagaactatctcttagatgaagggtttatctttctgcctcttgaaagcttcttgtttaggcccagacactcacctccttcctttggcatcagctgctcatagaaagtcccaatgtcatgcactgcatgacactttcacttcaacacatctttccacatgcacccccagtgcaa

SEQ ID NO: 51938 - DNA, 467 bp, Chicken  19866894300109_1
ggagaagacagcttgggcttggaagcaaaccaaaggcactgagtccagcccgtgtttggctgaggctggaagcgagcacggagccagctgggagcacacagccttccttctcctacacagccaagtgtgatggattctgcagatctttcgggctgggaacacagctgcaattctcctgtcaggttagcagccctctgacagccaaactgacgtggctgcatgacgttcatttgcacagctgacgtaactcttttggtgcttttcaagtcccatcctcttggcttttcagatgcaacgcayggcaatggggacccggccctgtcacaccggtgtccgaacatcctacagagcctgggtatgattttggggagggatccatccagtttcacacagagcaaagcaaagggggcagctgccgtaggacaccttaatggctgaaactcactgcttgctgcccacagaaggca

SEQ ID NO: 51939 - DNA, 600 bp, Chicken  19866894300116_1
atagaaaataaaagtttgcattgatctttaaaaaaggtggacagtacaggcctttgtcagcttacttcccagctctcatctgcgggtaacttcattcttccatttttagtttaccttccagctttcctcatatgggatattaataccttgcagaccacacctctgttctgaaacttttcctattatttggacttttgttacacactattgaaattgacgcaggtctctgttacagtgctactataaaaagtattgataataatttaacacaacgagtacttgcctagagatgcggtctgwgacttttgaggctgaattgctgcaggatcccacttcagtttctgtagcggtgacatcatcctatgctggcagtcctgatgtgtcctgagcacggcaggccccagcggatctaagctgctggttcagctggtcctgttttgcaacgctactgctccacacttccatccttttccatgtaggaattgctatttctgacagcacagtaacaccaaccacactgtaagagaacagacattaaagccatcattttcagacatgctctatgagagctgatgttgcttaacctttctgatagctact

SEQ ID NO: 51940 - DNA, 600 bp, Chicken  19866894300120_1
agctcaatgcttgaggtcaccttcctaacagaaatctgcaaagtaccaggtctgagcaaaaaaaggccaatacaacacagatccctctgctcttccaacaactcttattattcaaatagttagatcttttctgctaacaaaatgcctgctttgatgtagagacatttacccagtgttccgagctgcaggcaggattcagtgctcactgtctgttgctcctaacacagtgctactttcccataagcccttccaatctgcaatcctgctgttaaaatttccttccttcacagtcttgctcayggaggtactccaaaaatcagcactactaatttgagagtaaagcaggcttccagccttgccctccaagacataccattttacaaataaaaactagccaaattttgaaacaaaacatgaggaacttcagcgtgcagagcagtttatttggggagtatgaatggaaggagacaactggaatttcagttaacagttttacaaactccatctacagaagctcactttgatgaataatagcacaaacatctccagtatgtctgttactgacatccttttccccctaatgaaacctttgatttagaa

SEQ ID NO: 51941 - DNA, 600 bp, Chicken  19866894300143_1
aaactgtttatctccctccatatgtgaccagtttttgcagcattgcagtattgtggaacaacctctaagtatagccttcagatgtgtttttaggaaccctggtttataaataaatacagttgacagtctgctgatcagaagcctatatttaccataaagaagttgacatagtgtcatgtaggatttgacaattaaccttgaaaattcctgaagtatgctttacatcttttgtatttttttctgagtaaaaaccaaaattaaaaaaataaaaaataaaaaaaggaagaaagaaagaaattygtggcacggtgttccttcrggttgcagaagataatcacaaaccgtaagtgaaaaaatggtaatttaatctctgtccaaatgataggattgcataatgttttctggatttgccatttgatgttgcaactggctgcaaattagtgaagcagtttatatattgcttcttttcttctctatactcagttaatccagacaaaaagctggccatgtctacttgttttttccaatacttacatctgtgccagtaatatacctgtttgtatgagagataatgctgtgatttgggcaaaatgaccctgg

SEQ ID NO: 51942 - DNA, 600 bp, Chicken  19866894300143_2
atatgtgaccagtttttgcagcattgcagtattgtggaacaacctctaagtatagccttcagatgtgtttttaggaaccctggtttataaataaatacagttgacagtctgctgatcagaagcctatatttaccataaagaagttgacatagtgtcatgtaggatttgacaattaaccttgaaaattcctgaagtatgctttacatcttttgtatttttttctgagtaaaaaccaaaattaaaaaaataaaaaataaaaaaaggaagaaagaaagaaattygtggcacggtgttccttcrggttgcagaagataatcacaaaccgtaagtgaaaaaatggtaatttaatctctgtccaaatgataggattgcataatgttttctggatttgccatttgatgttgcaactggctgcaaattagtgaagcagtttatatattgcttcttttcttctctatactcagttaatccagacaaaaagctggccatgtctacttgttttttccaatacttacatctgtgccagtaatatacctgtttgtatgagagataatgctgtgatttgggcaaaatgaccctggaagaatatgccagaatgag

SEQ ID NO: 51943 - DNA, 599 bp, Chicken  19866894300145_1
  misc_feature (1)..(169): n is any nucleotide
nnnnnnnnnnnnnnnnnnnnnnnnnnnnnnnnnnnnnnnnnnnnnnnnnnnnnnnnnnnnnnnnnnnnnnnnnnnnnnnnnnnnnnnnnnnnnnnnnnnnnnnnnnnnnnnnnnnnnnnnnnnnnnnnnnnnnnnnnnnnnnnnnnnnnnnnnnnnnnnnnnnnnnnnntgagattactgtagaatgtcagaacctctttactagcctgatttttatttaccatcaaatcatctagcttcaggaaatatttccactgttttacttcttttcaactagttgcactcttcagtgaagcaaawgtttatcttcagaaaccttttgatgtaaaaatattgttagggaggtttgtttaattccacttgattctattttacttttgtcacttcctgaactgcagagttaggtgttggatagatgacatccaaacctgtagagcccctttcaagtaggaccaagmtgttccaacaggcaacttccattctcccagtgtgaggtgatgttactgttgaccggcagctttgtatgcatcatagaaagagcctcagctctgtastgaagcaattacacaacccattctgcactktagatttctctgttc

SEQ ID NO: 51944 - DNA, 599 bp, Chicken  19866894300145_2
  misc_feature (1)..(11): n is any nucleotide
nnnnnnnnnnntgagattactgtagaatgtcagaacctctttactagcctgatttttatttaccatcaaatcatctagcttcaggaaatatttccactgttttacttcttttcaactagttgcactcttcagtgaagcaaawgtttatcttcagaaaccttttgatgtaaaaatattgttagggaggtttgtttaattccacttgattctattttacttttgtcacttcctgaactgcagagttaggtgttggatagatgacatccaaacctgtagagcccctttcaagtaggaccaagmtgttccaacaggcaacttccattctcccagtgtgaggtgatgttactgttgaccggcagctttgtatgcatcatagaaagagcctcagctctgtastgaagcaattacacaacccattctgcactktagatttctctgttctgtaccttacttccaaatttgaggtgcagacctggaaagctggaataacttaactggcacacttcactgcttgtgtttgtccttgggtacgtgctaagtaaccaactttatctacatcatgaattttaggcccattaaatccagaaaagtcatacaag

SEQ ID NO: 51945 - DNA, 600 bp, Chicken  19866894300145_3
ctgttttacttcttttcaactagttgcactcttcagtgaagcaaawgtttatcttcagaaaccttttgatgtaaaaatattgttagggaggtttgtttaattccacttgattctattttacttttgtcacttcctgaactgcagagttaggtgttggatagatgacatccaaacctgtagagcccctttcaagtaggaccaagmtgttccaacaggcaacttccattctcccagtgtgaggtgatgttactgttgaccggcagctttgtatgcatcatagaaagagcctcagctctgtastgaagcaattacacaacccattctgcactktagatttctctgttctgtaccttacttccaaatttgaggtgcagacctggaaagctggaataacttaactggcacacttcactgcttgtgtttgtccttgggtacgtgctaagtaaccaactttatctacatcatgaattttaggcccattaaatccagaaaagtcatacaagtgaagtgaaattcttgatttttgagcctttcttgaaaaggatgtcactaatttctgataatgtgatttgaattaatatgaagcccagtagtctgcct

SEQ ID NO: 51946 - DNA, 600 bp, Chicken  19866894300145_4
cttcagtgaagcaaawgtttatcttcagaaaccttttgatgtaaaaatattgttagggaggtttgtttaattccacttgattctattttacttttgtcacttcctgaactgcagagttaggtgttggatagatgacatccaaacctgtagagcccctttcaagtaggaccaagmtgttccaacaggcaacttccattctcccagtgtgaggtgatgttactgttgaccggcagctttgtatgcatcatagaaagagcctcagctctgtastgaagcaattacacaacccattctgcactktagatttctctgttctgtaccttacttccaaatttgaggtgcagacctggaaagctggaataacttaactggcacacttcactgcttgtgtttgtccttgggtacgtgctaagtaaccaactttatctacatcatgaattttaggcccattaaatccagaaaagtcatacaagtgaagtgaaattcttgatttttgagcctttcttgaaaaggatgtcactaatttctgataatgtgatttgaattaatatgaagcccagtagtctgcctgcaagtaagcttaccttttggctatcagaa

SEQ ID NO: 51947 - DNA, 600 bp, Chicken  19866894300147_1
attcatcaaattctaccagccaaattcccaaacctagcaacactttctgctctccagcatcagagtgaaccagtccatccccgtgcatcacccaaagcatctccgtcactgatagctccaccaaggccactggggaccttccttgaaggttcaagagggcaaagtccattgaaacagtcccatcctttgccatttgctcacatcctcatcccagtggtggcaaagtggtgcaattgatgaccagaggctcagaaatgccataagatgccccatcatgagccatctgctcccagccatcawcatcccatcattgacacccagttcaggtgtggtccaatgctacaggagggatccttagtgttgggacccttagtacatggtkaggagagctcttcacagctcgacttggacaagctgtgttacatccctgcttcctgtcatttctttcataaaatattagctggtattaaacctaacccgatttcctacattaaagcagtttgctggcagaggttattttattaacactttatttttacatcttaattctcagatttatttcttgattcatttaggagcacaattgtcatgcagttaatg

SEQ ID NO: 51948 - DNA, 600 bp, Chicken  19866894300147_2
gtgcatcacccaaagcatctccgtcactgatagctccaccaaggccactggggaccttccttgaaggttcaagagggcaaagtccattgaaacagtcccatcctttgccatttgctcacatcctcatcccagtggtggcaaagtggtgcaattgatgaccagaggctcagaaatgccataagatgccccatcatgagccatctgctcccagccatcawcatcccatcattgacacccagttcaggtgtggtccaatgctacaggagggatccttagtgttgggacccttagtacatggtkaggagagctcttcacagctcgacttggacaagctgtgttacatccctgcttcctgtcatttctttcataaaatattagctggtattaaacctaacccgatttcctacattaaagcagtttgctggcagaggttattttattaacactttatttttacatcttaattctcagatttatttcttgattcatttaggagcacaattgtcatgcagttaatgaaataagtaatattttctcattccaagaaatctcattaagctaattagcatgctccactggcaggcgagtttgattatactc

SEQ ID NO: 51949 - DNA, 519 bp, Chicken  19866894300150_1
aaaccattgacagactgtagaattgcaagtgggtatttgaccttggtttttttttcccctaattattataactctttttcataggtatgcaattacaaatacacacagagacagctttaaatcacaaatagctgcctaatagcaaagctaccctcctaaaggtgtattcttcactatggttgcaaactataggctctctgtagctcttgagagtgagaacctctgattttgggcaaatgaaaatgactccactattttaatactgcaatacttctaacattaagttgttttttcctctcytctgcattaaaaaaatattttagtcacatatcaacataataggctcgatttaaaaaaaaacctgtattaaaattttactgatcttgcaaaatgtcaactgttaaaatagctgtaaagtattttttaaaatctgcaaatgtatgttttacccacaactgctgcagcaataaccacaaaatcaaggtagaatttaataccatatgtaatggtgcatttcag

SEQ ID NO: 51950 - DNA, 600 bp, Chicken  19866894300152_1
aaccgatcgctctgtgattacttaccatcagtaaatactctgaagatgcatttcattggagtcccaaccccagttctcctatttttaacaccagcaccaagtaacaccatcttacctagcggtaggtgcattgtgcgtatataaaatgccaacaattaatcaaagtcattgagcattttgcagttggctaactgcattacagcaaggacaaggtctcctaacaaggctaactataaagcccccttccccagtacttacactcagatgcatatggaaagcttgttttagggctaaaatagracaggaattccttggttctacacttaatgggagggaggygcagggtctttgttggcaaattctgtactgaaaagttgcacagtacagagaacatagtagataacactctgttcctttagctctacctagtgctgaagtcattaaatataattaaatgaatacttagaagtctgcctcaatgacactggagatgtttccaccattatggatgagcaagtcatttaccttcttctgtagccatccaattggacttctactttctcagggatatcaaacagcagagacagtgacagattaaca

SEQ ID NO: 51951 - DNA, 600 bp, Chicken  19866894300152_2
ctgaagatgcatttcattggagtcccaaccccagttctcctatttttaacaccagcaccaagtaacaccatcttacctagcggtaggtgcattgtgcgtatataaaatgccaacaattaatcaaagtcattgagcattttgcagttggctaactgcattacagcaaggacaaggtctcctaacaaggctaactataaagcccccttccccagtacttacactcagatgcatatggaaagcttgttttagggctaaaatagracaggaattccttggttctacacttaatgggagggaggygcagggtctttgttggcaaattctgtactgaaaagttgcacagtacagagaacatagtagataacactctgttcctttagctctacctagtgctgaagtcattaaatataattaaatgaatacttagaagtctgcctcaatgacactggagatgtttccaccattatggatgagcaagtcatttaccttcttctgtagccatccaattggacttctactttctcagggatatcaaacagcagagacagtgacagattaacaactaacaacacatctaaaatgttgtctccacatgccaat

SEQ ID NO: 51952 - DNA, 600 bp, Chicken  19866894300156_1
tctggtctgaaggagcagtggcactgctcaccccataagtctcttcacatctcttcaggtggtcgtgccccatagtgctgacctaggcagctgcagtgctatgccaagaggtattcagttatagttaaactgtactttgttggaactagcttgtcttcgttatccataacactttcatacttgtgcttgctgtaataataaaacacttcatattaatcctttccagctaatggaaaccaactacagaaatagctccaagttttatatctaacatggcatgatacagctaatgcaaaaatrtgtatgctgttaaggtgtgagttttgattgaaaccatttgtaacagtggaacaatagtttttataaattgatttacattcattacgttcaaatatcttgtttagaaaaataaaaaactactgcaatgtgttagaagtatgaaaataacacaaaaagtatcctatattcataacctgcaggtgttatgcttctctttttgtttatttaatgcagatatacttttaataaatggtgaagagtaaaatgacagaatgcttccttagtcttgctttgttggtagatcattgcttcaaaagccat

SEQ ID NO: 51953 - DNA, 600 bp, Chicken  19866894300156_2
atcctatattcataacctgcaggtgttatgcttctctttttgtttatttaatgcagatatacttttaataaatggtgaagagtaaaatgacagaatgcttccttagtcttgctttgttggtagatcattgcttcaaaagccatctttaattcttattttcaaagctcttaagttcactgtgtgtgactttcaacccatctgtaatgctgtgctgcttcgctacctccttaatctgtcctctgtttctagttgagcttgtattgtttggaactggtaatgtagaattattgaaaaaattaygtttcatgtacttttttttgttaacataaagcctgaaytgatggtggttgaagatttccctggaaaattaamccacaatcatacagacagtctgaactttcttattttcaagttgatgtggtttgtgcttgcagtggttgctctttggaagtatgcaagcatcagtcagcatcaccaatgtgcatgaatatcagccaaggactcatactgggtatgccaatgcttaacaagagtcttgagaactgtccagctctccgcttcatttgctagaagtttaagacagtagtgaggtgatgaaat

SEQ ID NO: 51954 - DNA, 600 bp, Chicken  19866894300156_3
tttgtttatttaatgcagatatacttttaataaatggtgaagagtaaaatgacagaatgcttccttagtcttgctttgttggtagatcattgcttcaaaagccatctttaattcttattttcaaagctcttaagttcactgtgtgtgactttcaacccatctgtaatgctgtgctgcttcgctacctccttaatctgtcctctgtttctagttgagcttgtattgtttggaactggtaatgtagaattattgaaaaaattaygtttcatgtacttttttttgttaacataaagcctgaaytgatggtggttgaagatttccctggaaaattaamccacaatcatacagacagtctgaactttcttattttcaagttgatgtggtttgtgcttgcagtggttgctctttggaagtatgcaagcatcagtcagcatcaccaatgtgcatgaatatcagccaaggactcatactgggtatgccaatgcttaacaagagtcttgagaactgtccagctctccgcttcatttgctagaagtttaagacagtagtgaggtgatgaaatctattcggtgttattacataccttgcacagtcggtgct

SEQ ID NO: 51955 - DNA, 600 bp, Chicken  19866894300156_4
tggtgaagagtaaaatgacagaatgcttccttagtcttgctttgttggtagatcattgcttcaaaagccatctttaattcttattttcaaagctcttaagttcactgtgtgtgactttcaacccatctgtaatgctgtgctgcttcgctacctccttaatctgtcctctgtttctagttgagcttgtattgtttggaactggtaatgtagaattattgaaaaaattaygtttcatgtacttttttttgttaacataaagcctgaaytgatggtggttgaagatttccctggaaaattaamccacaatcatacagacagtctgaactttcttattttcaagttgatgtggtttgtgcttgcagtggttgctctttggaagtatgcaagcatcagtcagcatcaccaatgtgcatgaatatcagccaaggactcatactgggtatgccaatgcttaacaagagtcttgagaactgtccagctctccgcttcatttgctagaagtttaagacagtagtgaggtgatgaaatctattcggtgttattacataccttgcacagtcggtgcttttatgtctcctgtgtaggcaagtctcttggttt

SEQ ID NO: 51956 - DNA, 600 bp, Chicken  19866894300156_5
agccgttctaatacatagtagtagagaaacatgaagcattccagttggtacacaaccccagtgcactgggaaatcgagttctcaaagtgcggatttatatcactgatcctactttggaattaatgttgaagtttaattgcagtgtgcacatggctttgcgtctgttagctggaaaaagtcccattttctgcattggctaactgaccctcatcattaaccttgatatccgagtgagcaagtgttggctggaacaacaccatcgggtaatcaacagcactaacctgactgctccgtgatggwcttgatatgttagcactgtcaggtggcctaccctcagaaagcagacctgtggttttgaggaggaaaacattgcttttcctcaatttaagagcgcttttaataactttgggctctgtaagagatgtttgtttgcagaggggatgactagttcatacagacaataatgaacagaatgtcttaatttcctttccttttgttacacgttctttgactaaagaggttaactgaaagcctcccaccttgaagggcttaaccgaatttcacaaagatctgaggtggaaaaaacaatgatttgaatct

SEQ ID NO: 51957 - DNA, 600 bp, Chicken  19866894300157_1
ttttcatttctctagctatgttagactcccttctttttatggtcaaaagagcagctggaatacaccagcagccaaagtatagcaaagtatagtgccagaaagaaacttgaggtaaattgaagccatgatttctcagtcacaaaacaaaaatgtttacagtagctacacatgtgggatttttctcttaaatagatttgtccaccaaccatagtagtagtccatgatcatttgctggaaagttgctttgtctgaacttgggcagtcctttcggcacggaggctgtgcacatacatttctcayggcacacgttttgtctgaagaggtgttacagcctggtgtaagtgaatgcaaygactcaggctgggtgttataagaccatggggcagccgggtgaccacaagcaatcaggatgaaaatacaggtaaggaagcttgtgaaaatactgcgccctacagcaaaatcatagcagatcacatagagtccaatatctggataccatctgtgatcagacttccaactgaaacagcagaagcataatatgtttacaagtaatgaaagagaagattaagggacttaacaaacataaagaaaaacaaaatt

SEQ ID NO: 51958 - DNA, 600 bp, Chicken  19866894300157_2
agctggaatacaccagcagccaaagtatagcaaagtatagtgccagaaagaaacttgaggtaaattgaagccatgatttctcagtcacaaaacaaaaatgtttacagtagctacacatgtgggatttttctcttaaatagatttgtccaccaaccatagtagtagtccatgatcatttgctggaaagttgctttgtctgaacttgggcagtcctttcggcacggaggctgtgcacatacatttctcayggcacacgttttgtctgaagaggtgttacagcctggtgtaagtgaatgcaaygactcaggctgggtgttataagaccatggggcagccgggtgaccacaagcaatcaggatgaaaatacaggtaaggaagcttgtgaaaatactgcgccctacagcaaaatcatagcagatcacatagagtccaatatctggataccatctgtgatcagacttccaactgaaacagcagaagcataatatgtttacaagtaatgaaagagaagattaagggacttaacaaacataaagaaaaacaaaattgtttttgtttattgtaaaatgcgccagactatcacgctaacaggcagctcag

SEQ ID NO: 51959 - DNA, 600 bp, Chicken  19866894300168_1
aaactttattcataagaaatgttactggctctaatacagccttttaatattctgaaataccattacatctcttctctctcaaattcttccttaaactagagtaatggaagtccacaatgtcctgccaaaacctcacaagacagagtgatgggaacatcacaaagcatcctattcataattgtgtttgtttgttcttctatctctgccacttctgaggtcttactttattcttaaatgttaggtcacttaggaataacagatttaaatgaaaactgcacaaactgcacaaaaacatttccytagcatatctggacctcattgtaggtcaacattttctgtcttccataacagctttctcaatacaagtctgggatatctttttttttcattccttcatagggtgcaatgaccccaggaaggacttctaaaatgatcagcagagaaactgcaaaaccatagaaactattacctactcacattttctctggaactatttaactctgcaaaatagagagcctcacattatactgggaaagcattcacacattacgttcagttgttgtgtctgtaaaaccacacaccataaactaaatagatatc

SEQ ID NO: 51960 - DNA, 599 bp, Chicken  19866894300169_1
  misc_feature (1)..(96): n is any nucleotide
nnnnnnnnnnnnnnnnnnnnnnnnnnnnnnnnnnnnnnnnnnnnnnnnnnnnnnnnnnnnnnnnnnnnnnnnnnnnnnnnnnnnnnnnnnnnnnnnacttctctccctttatcctctatatatctggaaaaagttcacactactacgtatgcatgtcctgcatttaaagtggaaatcacttagtggtattaacagtaaatgacagtttggacttcaaaatcactttgaaatgttattattcatatgtcctactcactaggactcaaagtcaagccttgattatatatacttttatttccrgagcattgatacttgggagctggttttcttcttcctccctttctgtgccatccatcctcattccgcaactgccrccaactctttatgtcccgaagactgtgattgctcccttgaatccatcaagtcattcatcttctttaattcacttgacattatacctctttcctgcaaatctaagagtgatggacttaaaatttaattgtttttgtccctaagagcatcatggacataaagcactaagtcgtttaactagccttaaagacaattctttaatgctgttacttcaagttatttctttt

SEQ ID NO: 51961 - DNA, 599 bp, Chicken  19866894300169_2
  misc_feature (1)..(22): n is any nucleotide
nnnnnnnnnnnnnnnnnnnnnnacttctctccctttatcctctatatatctggaaaaagttcacactactacgtatgcatgtcctgcatttaaagtggaaatcacttagtggtattaacagtaaatgacagtttggacttcaaaatcactttgaaatgttattattcatatgtcctactcactaggactcaaagtcaagccttgattatatatacttttatttccrgagcattgatacttgggagctggttttcttcttcctccctttctgtgccatccatcctcattccgcaactgccrccaactctttatgtcccgaagactgtgattgctcccttgaatccatcaagtcattcatcttctttaattcacttgacattatacctctttcctgcaaatctaagagtgatggacttaaaatttaattgtttttgtccctaagagcatcatggacataaagcactaagtcgtttaactagccttaaagacaattctttaatgctgttacttcaagttatttcttttcctctctttaagacatgtagttattttaccagatttcttaaaaagctgccaaagtgacaagcctgattaaaata

SEQ ID NO: 51962 - DNA, 589 bp, Chicken  19866894300177_1
aaacaaaacaaaacacacaaaaaaacccaacatcaatgtttcttttgttttcagaagactaaaaatgattcagattatcagttttataaggtatgagtgattgatgcaagtacatttctgtttaactagtgcttttgttttatctgtttttttctgtcagcattttttccaaaattcaccccaacagggaactgggcagaagagtatatttggcaggaaactggattgacagactgtaatcatgacagaaataaacaaacaagcaagcaaacaaacaccagcacatccaaaaaaaaaaamaaaaaaaaaammacaccctcaaatattattattattaaaaatagtaataaaaactggatatatgaaacagataggatttgtcagttccttctgttcattctccaagattgttgctgttagagagtatatttcaacacagcagtaaggaaaatagagctaatgtataatgcttcatctaatttgccaaaagcctttaaatgttattgggaatcctatgtgatgacatatgaaagataaaaagctactttcataatataaagtttttgactgtatagaaatataaagtcat

SEQ ID NO: 51963 - DNA, 578 bp, Chicken  19866894300177_2
aacacacaaaaaaacccaacatcaatgtttcttttgttttcagaagactaaaaatgattcagattatcagttttataaggtatgagtgattgatgcaagtacatttctgtttaactagtgcttttgttttatctgtttttttctgtcagcattttttccaaaattcaccccaacagggaactgggcagaagagtatatttggcaggaaactggattgacagactgtaatcatgacagaaataaacaaacaagcaagcaaacaaacaccagcacatccaaaaaaaaaaamaaaaaaaaaammacaccctcaaatattattattattaaaaatagtaataaaaactggatatatgaaacagataggatttgtcagttccttctgttcattctccaagattgttgctgttagagagtatatttcaacacagcagtaaggaaaatagagctaatgtataatgcttcatctaatttgccaaaagcctttaaatgttattgggaatcctatgtgatgacatatgaaagataaaaagctactttcataatataaagtttttgactgtatagaaatataaagtcat

SEQ ID NO: 51964 - DNA, 577 bp, Chicken  19866894300177_3
acacacaaaaaaacccaacatcaatgtttcttttgttttcagaagactaaaaatgattcagattatcagttttataaggtatgagtgattgatgcaagtacatttctgtttaactagtgcttttgttttatctgtttttttctgtcagcattttttccaaaattcaccccaacagggaactgggcagaagagtatatttggcaggaaactggattgacagactgtaatcatgacagaaataaacaaacaagcaagcaaacaaacaccagcacatccaaaaaaaaaaamaaaaaaaaaammacaccctcaaatattattattattaaaaatagtaataaaaactggatatatgaaacagataggatttgtcagttccttctgttcattctccaagattgttgctgttagagagtatatttcaacacagcagtaaggaaaatagagctaatgtataatgcttcatctaatttgccaaaagcctttaaatgttattgggaatcctatgtgatgacatatgaaagataaaaagctactttcataatataaagtttttgactgtatagaaatataaagtcat

SEQ ID NO: 51965 - DNA, 600 bp, Chicken  19866894300180_1
cctgtagggaactcgttacctaaggctcgcattccattccaaccattcccctgccctggcacagaaaacaggtgtcaccaaacgtgaagcggaggtgtgctctgccgtgggggtgaccctgatgataaataatccatccaaacagcggtgatgacctgagggcatttcacctctttgcccttccacacccccagacagcacagcggaggcgtttgtgtgctgagctggaggagcttcagcctcactgctccgtgcaatgggctgcagcagcaggactgcatttctttcattaagaacacytcttctaatccaaagcaaagcttagcgatggtctcacagacaccacaaacccaatttctgatgcattgccaaggtttttccaacagtaatttttcacagttccaaatcaatggttttggcttccagatccgtgcaccagcaaggagcgttgtgttggggcaccatgggggcacccgctgagggaaaatgcattctgaagaaaggagagacaccagcttggaaatcatccgtgcaggatttctagttcttggttttatctccctttgaaaacgagttgggctatggtgcttaatgaatcat

SEQ ID NO: 51966 - DNA, 599 bp, Chicken  19866894300186_1
  misc_feature (1)..(105): n is any nucleotide
nnnnnnnnnnnnnnnnnnnnnnnnnnnnnnnnnnnnnnnnnnnnnnnnnnnnnnnnnnnnnnnnnnnnnnnnnnnnnnnnnnnnnnnnnnnnnnnnnnnnnnnnntctctgaaaaacttccaccaccacttggatcaaccaccacttggcccaaaccccctcgttcaaaagcaggcaggagcatctcagggcacatcatgctgagtacagcttctctgggttgaaagagaacaagcaggaacatgtcagaacaataacaacaacaaaagcctatctatattgttctcaaattttcaatayctcargaagtacaggcactcatgaaaacagaaaaaaaaatacatttaraatttgtttctttctgtgtgaatatatacacagaaaatgcgtacacagttttcctcctggaccagatatatctgaaatctaacttcaaattctcactagttttcctattcaccaataagcactgaagtatatgtacatttattgacagactaatcagaaaacaggattttgccttaaaattcttgcttcagggagttactgctgcataaaatccagtgggtgttgtcttttttgtcaaaatctattttatc

SEQ ID NO: 51967 - DNA, 599 bp, Chicken  19866894300186_2
  misc_feature (1)..(100): n is any nucleotide
nnnnnnnnnnnnnnnnnnnnnnnnnnnnnnnnnnnnnnnnnnnnnnnnnnnnnnnnnnnnnnnnnnnnnnnnnnnnnnnnnnnnnnnnnnnnnnnnnnnntctctgaaaaacttccaccaccacttggatcaaccaccacttggcccaaaccccctcgttcaaaagcaggcaggagcatctcagggcacatcatgctgagtacagcttctctgggttgaaagagaacaagcaggaacatgtcagaacaataacaacaacaaaagcctatctatattgttctcaaattttcaatayctcargaagtacaggcactcatgaaaacagaaaaaaaaatacatttaraatttgtttctttctgtgtgaatatatacacagaaaatgcgtacacagttttcctcctggaccagatatatctgaaatctaacttcaaattctcactagttttcctattcaccaataagcactgaagtatatgtacatttattgacagactaatcagaaaacaggattttgccttaaaattcttgcttcagggagttactgctgcataaaatccagtgggtgttgtcttttttgtcaaaatctattttatcagctc

SEQ ID NO: 51968 - DNA, 599 bp, Chicken  19866894300186_3
  misc_feature (1)..(57): n is any nucleotide
nnnnnnnnnnnnnnnnnnnnnnnnnnnnnnnnnnnnnnnnnnnnnnnnnnnnnnnnntctctgaaaaacttccaccaccacttggatcaaccaccacttggcccaaaccccctcgttcaaaagcaggcaggagcatctcagggcacatcatgctgagtacagcttctctgggttgaaagagaacaagcaggaacatgtcagaacaataacaacaacaaaagcctatctatattgttctcaaattttcaatayctcargaagtacaggcactcatgaaaacagaaaaaaaaatacatttaraatttgtttctttctgtgtgaatatatacacagaaaatgcgtacacagttttcctcctggaccagatatatctgaaatctaacttcaaattctcactagttttcctattcaccaataagcactgaagtatatgtacatttattgacagactaatcagaaaacaggattttgccttaaaattcttgcttcagggagttactgctgcataaaatccagtgggtgttgtcttttttgtcaaaatctattttatcagctcatgagcactagtaataacgacaaagttctcctgaacagtgcaa

SEQ ID NO: 51969 - DNA, 600 bp, Chicken  19866894300186_4
tatatacacagaaaatgcgtacacagttttcctcctggaccagatatatctgaaatctaacttcaaattctcactagttttcctattcaccaataagcactgaagtatatgtacatttattgacagactaatcagaaaacaggattttgccttaaaattcttgcttcagggagttactgctgcataaaatccagtgggtgttgtcttttttgtcaaaatctattttatcagctcatgagcactagtaataacgacaaagttctcctgaacagtgcaaatgatgacttgaaatacagtatrtagaaataaggaagagtggctaccctaactgctggcatttccagtgagaggaaccattgcttcctcaccaccaagtgagccaagaaacaagacaaatagacgcatcatttaggcatatgaagatatgccatagaaggaaccaagacagttgcatgaaatttgacagtcgcagaaacaaaattaaatcaggtgaccagtaagggctcacaggaaaatctgcagattttgataaaatgctgatctcatttcaactccaagagactaatgtctgcattgactaagaaaatttcttaccgagag

SEQ ID NO: 51970 - DNA, 497 bp, Chicken  19866894300186_5
ttacataactatctctaaaacagtaatgtagcattattttcatttttagaggaattatttacagatcaaaaatgcttaaaaataaatccttggataactgcaagctaacaaaaaaaaaatgttgatgtcttgttttgttatctgtttttcttcttacattagaaagggttttattatgccactacatgcaactttggagaaacaaggatttatcaaatacctgggcaagtaggaaaagctgggctccagagttcaattaagaatacacttcggtgcttgttgtaaactctgattggaacwtgactggygaggaaacttcccaaacataacagcctgcagcagaaaacactgttctgtgttgttttatgtttattactgatcttattttagtcattaaatatattatagacaaaagatttcgcaataagatgtaggtgaaaaacaacttattttctacaggtgcatagccagaaactttgagcaacaaaagctatgaa

SEQ ID NO: 51971 - DNA, 489 bp, Chicken  19866894300186_6
ctatctctaaaacagtaatgtagcattattttcatttttagaggaattatttacagatcaaaaatgcttaaaaataaatccttggataactgcaagctaacaaaaaaaaaatgttgatgtcttgttttgttatctgtttttcttcttacattagaaagggttttattatgccactacatgcaactttggagaaacaaggatttatcaaatacctgggcaagtaggaaaagctgggctccagagttcaattaagaatacacttcggtgcttgttgtaaactctgattggaacwtgactggygaggaaacttcccaaacataacagcctgcagcagaaaacactgttctgtgttgttttatgtttattactgatcttattttagtcattaaatatattatagacaaaagatttcgcaataagatgtaggtgaaaaacaacttattttctacaggtgcatagccagaaactttgagcaacaaaagctatgaa

SEQ ID NO: 51972 - DNA, 600 bp, Chicken  19866894300187_1
tagtttacatattaggaagaagtttttcacccagagggtggtgacacactggaacaggttgcccaaggaggctgtggatgccccatccctggaggcattccaggccaggctggatgtggctctgggcagcctggtctggtggttggcgaccctgcacatagcaggggggttgaaactcaatgatcattgcggtccttttcaacccaggccattctgtgattctgtgcctttctaaaagaaacacaatggagcaggtgaacacagcatcgagtctgacagtgtaagtctgcttgctccackcagcagctctacctcaggcacatatgcataagtgagatgtaaactctgtataaatgctaccgaactctacatgtgtactgatagaagttatgactgaaccttggagggaaaaattcctgttgtagctctgggatatctaaatttcaagcccagctttgaagacgaagctcttctattttgatataatattgtttaccaggtttatcttagaagaaattgtctttgaaagagagcttgcttttttgtccagttgggtatttctatttactaaagcaatatctgaaagttgtgttgtgaaaa

SEQ ID NO: 51973 - DNA, 600 bp, Chicken  19866894300187_2
atgtaaactctgtataaatgctaccgaactctacatgtgtactgatagaagttatgactgaaccttggagggaaaaattcctgttgtagctctgggatatctaaatttcaagcccagctttgaagacgaagctcttctattttgatataatattgtttaccaggtttatcttagaagaaattgtctttgaaagagagcttgcttttttgtccagttgggtatttctatttactaaagcaatatctgaaagttgtgttgtgaaaatccttaccaattgtcttttgattttatatacaaagrgcaacacttgtgtacatgggaggtcaaaaacttggagaggtattttaataagcattaacttgcaacttaaagaagcrgccaaggaagctctgtgtgtatcacatcctacagcagatagtctgacaccaaccactgcagacatctgaaatctcttaaatctccagaaaaaataattgtagacagctgaaagcctgtaaacctccagcaaaattagtaagtgaacagaaaaaatatacagctgggagctgactaccctgtggtgtgtatttagtagtgttcttactcaacagatatacagag

SEQ ID NO: 51974 - DNA, 600 bp, Chicken  19866894300187_3
ttcctgttgtagctctgggatatctaaatttcaagcccagctttgaagacgaagctcttctattttgatataatattgtttaccaggtttatcttagaagaaattgtctttgaaagagagcttgcttttttgtccagttgggtatttctatttactaaagcaatatctgaaagttgtgttgtgaaaatccttaccaattgtcttttgattttatatacaaagrgcaacacttgtgtacatgggaggtcaaaaacttggagaggtattttaataagcattaacttgcaacttaaagaagcrgccaaggaagctctgtgtgtatcacatcctacagcagatagtctgacaccaaccactgcagacatctgaaatctcttaaatctccagaaaaaataattgtagacagctgaaagcctgtaaacctccagcaaaattagtaagtgaacagaaaaaatatacagctgggagctgactaccctgtggtgtgtatttagtagtgttcttactcaacagatatacagagaaatagagtagaaaatttgaatggaactgcctgaagctctgctagtgctctcagtgagatcaggggtagtcttctcc

SEQ ID NO: 51975 - DNA, 599 bp, Chicken  19866894300198_1
  misc_feature (1)..(59): n is any nucleotide
nnnnnnnnnnnnnnnnnnnnnnnnnnnnnnnnnnnnnnnnnnnnnnnnnnnnnnnnnnnggaaatgaggtaagctgtgggataagcacaagagttgagtatatttgtagaatgatcagtagtgattggaagttacaatttagaatgagaactgtgcttcctaacgatccctctgagatgggcagttttgattaactgatcttctgaatattcaggaagatgttactacatcatcttacaactgcttgatatatttaaggatggcttaattggtatgatgctagccataaaactctttacrgactttggaatctgggtcttgggttcagtattcttgtgggagaaaatggatttttcatacagaagagttatcttagcatggactgttttgaattcttttgtacactggagtgaacaaaagaaaactcctggtttattccaacgaggacttactttacagatcttacagttaattccttcatgaattgcttgagagcttgcaggcatctgaacacggtatccaggagtgaatctactacatctgtggttcctgcttctaaagctgatgactgagcagccgtcgcttctctcttgaagctt

SEQ ID NO: 51976 - DNA, 599 bp, Chicken  19866894300213_1
  misc_feature (1)..(197): n is any nucleotide
nnnnnnnnnnnnnnnnnnnnnnnnnnnnnnnnnnnnnnnnnnnnnnnnnnnnnnnnnnnnnnnnnnnnnnnnnnnnnnnnnnnnnnnnnnnnnnnnnnnnnnnnnnnnnnnnnnnnnnnnnnnnnnnnnnnnnnnnnnnnnnnnnnnnnnnnnnnnnnnnnnnnnnnnnnnnnnnnnnnnnnnnnnnnnnnnnnnnnagagggagaggacggcacaccataatgacacccaaagccaacattattcccaatggctccatctgatacactgctacctttgtcccctcgtgtcctcacaccrttccctgcctgttgaccctgtgtggccgcccatgcctttttgcaggggtttcctacacagatctgtgcttcgcttccataagcatcacccaaaaaagttacagtgaatcctcccctgtagaaaacctgcaccttcctcaagatttttacagttctatcaggctgaatacgcctcatcgacacctgcagccatgggacaaacagatttgccctgcatcccaacggaacgctcaggctaattttggtgygcccagcactgcatcacacaggatggaggaggaaatgcaggagcagagggga

SEQ ID NO: 51977 - DNA, 557 bp, Chicken  19866894300213_2
caatggctccatctgatacactgctacctttgtcccctcgtgtcctcacaccrttccctgcctgttgaccctgtgtggccgcccatgcctttttgcaggggtttcctacacagatctgtgcttcgcttccataagcatcacccaaaaaagttacagtgaatcctcccctgtagaaaacctgcaccttcctcaagatttttacagttctatcaggctgaatacgcctcatcgacacctgcagccatgggacaaacagatttgccctgcatcccaacggaacgctcaggctaattttggtgygcccagcactgcatcacacaggatggaggaggaaatgcaggagcagaggggaaggggaggatcaggttggatgtcaggaaaaggccctgcaccagagggagctgggcatggaacaggttcccaaaagcackgagcttgccggagtgcaagaagcattygggcaacrctctcagacacaatgtctgatttttgggtgctaccggtgtggagcccggagtaggacaccatgacccttagggatcccttccaactcggga

SEQ ID NO: 51978 - DNA, 426 bp, Chicken  19866894300213_3
taagcatcacccaaaaaagttacagtgaatcctcccctgtagaaaacctgcaccttcctcaagatttttacagttctatcaggctgaatacgcctcatcgacacctgcagccatgggacaaacagatttgccctgcatcccaacggaacgctcaggctaattttggtgygcccagcactgcatcacacaggatggaggaggaaatgcaggagcagaggggaaggggaggatcaggttggatgtcaggaaaaggccctgcaccagagggagctgggcatggaacaggttcccaaaagcackgagcttgccggagtgcaagaagcattygggcaacrctctcagacacaatgtctgatttttgggtgctaccggtgtggagcccggagtaggacaccatgacccttagggatcccttccaactcggga

SEQ ID NO: 51979 - DNA, 399 bp, Chicken  19866894300213_4
aatcctcccctgtagaaaacctgcaccttcctcaagatttttacagttctatcaggctgaatacgcctcatcgacacctgcagccatgggacaaacagatttgccctgcatcccaacggaacgctcaggctaattttggtgygcccagcactgcatcacacaggatggaggaggaaatgcaggagcagaggggaaggggaggatcaggttggatgtcaggaaaaggccctgcaccagagggagctgggcatggaacaggttcccaaaagcackgagcttgccggagtgcaagaagcattygggcaacrctctcagacacaatgtctgatttttgggtgctaccggtgtggagcccggagtaggacaccatgacccttagggatcccttccaactcggga

SEQ ID NO: 51980 - DNA, 391 bp, Chicken  19866894300213_5
cctgtagaaaacctgcaccttcctcaagatttttacagttctatcaggctgaatacgcctcatcgacacctgcagccatgggacaaacagatttgccctgcatcccaacggaacgctcaggctaattttggtgygcccagcactgcatcacacaggatggaggaggaaatgcaggagcagaggggaaggggaggatcaggttggatgtcaggaaaaggccctgcaccagagggagctgggcatggaacaggttcccaaaagcackgagcttgccggagtgcaagaagcattygggcaacrctctcagacacaatgtctgatttttgggtgctaccggtgtggagcccggagtaggacaccatgacccttagggatcccttccaactcggga

SEQ ID NO: 51981 - DNA, 600 bp, Chicken  19866894300224_1
ggactgctctcttcacactaaccccaatttgtttactcacagtttgcagtgcctgtaattacctccctacctcagtcctgtggcatccacaggaaagtgacatctttgctttaggtaagaagtgctcttactgttcagctttcacgagacaaattgaggtctttcttttcacgtgacagctttgctgataacctcattctctcttctccaaaaggtgatgaaagtggaacagttgcactagtagacacaaagaatcctgattctgccctcagctccattgtgcatgcccgacgtgtgacrggctttgcattttctgcacataggtactgtctaaaataggggcatagagtgtgcaactacgtacacttgaatgccagagtaaagcgtttttcrttaaagcttttgtgtatttaattgttctaaccatggtctcttctctgccctctagttcacctttgctggcttccatcagcgaagattgtacagtagctgttctcaactcagacctttcagaggtgtaagtaccagacagtgtattcttgggggacaaactgggagctgtttgtcgtgctgatttttcattaattgtttatgtactga

SEQ ID NO: 51982 - DNA, 600 bp, Chicken  19866894300224_2
aaagtgacatctttgctttaggtaagaagtgctcttactgttcagctttcacgagacaaattgaggtctttcttttcacgtgacagctttgctgataacctcattctctcttctccaaaaggtgatgaaagtggaacagttgcactagtagacacaaagaatcctgattctgccctcagctccattgtgcatgcccgacgtgtgacrggctttgcattttctgcacataggtactgtctaaaataggggcatagagtgtgcaactacgtacacttgaatgccagagtaaagcgtttttcrttaaagcttttgtgtatttaattgttctaaccatggtctcttctctgccctctagttcacctttgctggcttccatcagcgaagattgtacagtagctgttctcaactcagacctttcagaggtgtaagtaccagacagtgtattcttgggggacaaactgggagctgtttgtcgtgctgatttttcattaattgtttatgtactgaagggaaggtgaaaatactccttaaattggggagcattgttctaacaaacttgcatcaggaagtgcacaagcccatacattcttaacagcagtg

SEQ ID NO: 51983 - DNA, 599 bp, Chicken  19866894300226_1
  misc_feature (1)..(21): n is any nucleotide
nnnnnnnnnnnnnnnnnnnnnacatacataagtagcttattcccatgtaaggcaacccaattcatttttccttctcagagccaatctgagtagactgcacgcgtggcagaggacttcctgctgaattcactcagtgccctgccttgcagcagccacccagccctgtcagggtgctccatcctgctcccaggtgcagagagttgcaatgtgctgagattgaattcaccccttggggctgtggagactatgtgttgtatgctggcagtgtgcctgggagcccccatgccggacgtgctcacrctgtttgaggatccatcaaggtatggctgcgtcatggagagatgaccagaaggtgaactccaggctgataaggatggaaggaacaggttgatggggtctgtggctgaatgtgccttgtgggaaaggtctccacctcgctgcctgcagaagatgctttctgtggctgtactgccgtttgttcttcttgttctccaagctgagtggtgccactgacctgctagagggaagggatgtcatccagagggacctggagaggtgggcccatgctaacttcatgaagttcagcaaggccaagtgcg

SEQ ID NO: 51984 - DNA, 600 bp, Chicken  19866894300226_2
tccacctcgctgcctgcagaagatgctttctgtggctgtactgccgtttgttcttcttgttctccaagctgagtggtgccactgacctgctagagggaagggatgtcatccagagggacctggagaggtgggcccatgctaacttcatgaagttcagcaaggccaagtgcgagatcctgctcctgggtcaggacaatcccaagcacagatacaagttgagtggagaatggcttgagagcagccccgaggagagggatttgggagtgctggttgatgaaagattcagcatgagccagcaaygtgcacttgcagcccagaaggccaactgtgtcctgaaatgcatcaggagaagtgtgatcagcaggtcgggggaggtgattctgtacctctgctctgctctcatgagccgccacctggagtactgcatccagttctgggggccccagcacaagaaggtcatggagctgttggagtgggtccagaggagggccacagaggtggtcagagagctggaacacctcccttggggggacagactgagggagctggggctcttcagcctggagaggaggaggcactgatgagaccttttagcagcat

SEQ ID NO: 51985 - DNA, 365 bp, Chicken  19866894300226_3
agtgggtccagaggagggccacagaggtggtcagagagctggaacacctcccttggggggacagactgagggagctggggctcttcagcctggagaggaggaggcactgatgagaccttttagcagcattccagtacctgaggtgggcctacacaaaagctggggaggaactttttataatggcatccagcaacaagacaagtggaaatggctttaaattggaagagagtagatttggactagatgttaggaagaaattctttactgtgagagtgttgagacactggaataggttgcccrgtgaggctatgaatgccacctccctggaagcactcaaggccaggctggatggggctgtgagcaac

SEQ ID NO: 51986 - DNA, 600 bp, Chicken  19866894300229_1
gcactcctgccagcccaggcctggggaccagcagcgcggcaagcacgctgctctgcacacaaagcagtgcaggagcggccacagatctgcctgcgagccagaagccatcatttcagcagaaaactgtcagatgccgtgtcatataaattgtcacagctctcctgacacatgctttagaatttcatagtcatttctaacagcatctacatagcccaagggcatgacttcttcggatggaagaaggggaacaaattatgaactcctctctaaaaagattagcaggctttccatttcacttgygtggtgcaatcaagcacctctttataaccagaatatagctctgaaggcaagctcagcaaaacgcagctggaaaagtgcacaaaacrtcttttcagacaccttacaatacacgtgcctaaaaaaatgactgtcatttacacagctgactcagtcacagcaaacagttcttctttagcctgaccactcagatcaatcgctccacgttaagttaatcataaactgctttaagccaacaatccattctgaagtcaaagctgatgatcttctcttaagctcaattctagatattaacatatagta

SEQ ID NO: 51987 - DNA, 600 bp, Chicken  19866894300229_2
ctgcctgcgagccagaagccatcatttcagcagaaaactgtcagatgccgtgtcatataaattgtcacagctctcctgacacatgctttagaatttcatagtcatttctaacagcatctacatagcccaagggcatgacttcttcggatggaagaaggggaacaaattatgaactcctctctaaaaagattagcaggctttccatttcacttgygtggtgcaatcaagcacctctttataaccagaatatagctctgaaggcaagctcagcaaaacgcagctggaaaagtgcacaaaacrtcttttcagacaccttacaatacacgtgcctaaaaaaatgactgtcatttacacagctgactcagtcacagcaaacagttcttctttagcctgaccactcagatcaatcgctccacgttaagttaatcataaactgctttaagccaacaatccattctgaagtcaaagctgatgatcttctcttaagctcaattctagatattaacatatagtagatatgttcatatctggatacagcataaggagttaaagttgtggggtttgttattattacatatttagatggtctttgatttgatc

SEQ ID NO: 51988 - DNA, 600 bp, Chicken  19866894300229_3
aatcgctccacgttaagttaatcataaactgctttaagccaacaatccattctgaagtcaaagctgatgatcttctcttaagctcaattctagatattaacatatagtagatatgttcatatctggatacagcataaggagttaaagttgtggggtttgttattattacatatttagatggtctttgatttgatcctcatgagttgctcgcttggaatggataagcaggcatgccacgctcactacagtgcataaacctttacgagtcattcacacagcaaattacctctccaaagcacrggctgttttctcctggcccgtagggttgcaaatcttaagcagggaaatggtgacatccagtgctcagatactatgtaaagcatatgcatcctcctagtgctttttgtttgttgtagtgcacagacacggccagcgtctgctgcacagatgcaccaaggcacagatgtattacgttgcagcaaagcactgcagacatccaaggtaaactaaggaagaatttacatctcactttcagattttccactttgactacacagcaacaaaaaaaaaagcaaacaactttggaaacagtatctcagc

SEQ ID NO: 51989 - DNA, 599 bp, Chicken  19866894300231_1
  misc_feature (1)..(78): n is any nucleotide
nnnnnnnnnnnnnnnnnnnnnnnnnnnnnnnnnnnnnnnnnnnnnnnnnnnnnnnnnnnnnnnnnnnnnnnnnnnnnnaaatgaagaagctgtgtgcttttaacatactgcactgccaatcaaaatttatctggatgtatagagtgctccctatccatattctgccaatggtcctctgttccccttaactcaccgtgtccacatccttttctccttgctgacctcctcctgctgaccacccgtccctgcagctcaggttgccctgagaggtgatggatgctccatccctggaggtactcraggtcagactggacagggctctgagcaacctgatggagctgtaggtgtccccgttcattgcaggggagctggactgggtgagccttaaaaatcccttccagctcaaaagattcaatggttctataaaactgcattcatgcaattacttttgtacggagccttgtgtttgactgaaccttccagataggtattttctcttccattgctggaagagaaatrtgtatttttgggcctaaggctgctcacaaacaaagcacgagcggtttccatgtctcatttctatctgatactgtatttga

SEQ ID NO: 51990 - DNA, 567 bp, Chicken  19866894300231_2
gacctcctcctgctgaccacccgtccctgcagctcaggttgccctgagaggtgatggatgctccatccctggaggtactcraggtcagactggacagggctctgagcaacctgatggagctgtaggtgtccccgttcattgcaggggagctggactgggtgagccttaaaaatcccttccagctcaaaagattcaatggttctataaaactgcattcatgcaattacttttgtacggagccttgtgtttgactgaaccttccagataggtattttctcttccattgctggaagagaaatrtgtatttttgggcctaaggctgctcacaaacaaagcacgagcggtttccatgtctcatttctatctgatactgtatttgaagcttaggccttgcttccctggctcctgccaggcaaccacagagcataacaccagcatacaccagctgcagcagcgatgtgttccttcaggccttcagtgtgctgctgggtgctgcaagcttttctccatccctgcttcccaccatgcaagccagccagcacagcaaagccaggatatgtacaggaa

SEQ ID NO: 51991 - DNA, 600 bp, Chicken  19866894300232_1
gccatggccagctccctgggattcttcatgaacctttaactccgaaatctggaacagaaatatggcaggcttataatataggtacacacaaagtaagtatcaagaggaataaataacgctgtaaaaacccctgctcggggctcatgcattcaggagtctgctttaccaaaagtgggacttagcacacattttcaaaagcacttacatttttgttgtttcgaggtttttacagtgtttatgactgtgcttcctgaggattgctattggtgtgacagagagataccacatactgcctccacraagcacgtacaaggtcatatcaaagtatcagtttttaagcaggggccctgcagaaaacagctgaacagtgactgtactaatggccccgagtgtgattgyagcaatgtgatgtttcgctacgtaaataaattgatgtgtttaaaaaagatcacagcaatcataaagacatagccaatttgtgagtgctatttaccaaatagctagtgaccaattttccagccgtcctgtttaaattaatgaatatttaaaggagaaactaatttgatttccctaaaacctgcccggtgtcattaacacagt

SEQ ID NO: 51992 - DNA, 600 bp, Chicken  19866894300232_2
tcaagaggaataaataacgctgtaaaaacccctgctcggggctcatgcattcaggagtctgctttaccaaaagtgggacttagcacacattttcaaaagcacttacatttttgttgtttcgaggtttttacagtgtttatgactgtgcttcctgaggattgctattggtgtgacagagagataccacatactgcctccacraagcacgtacaaggtcatatcaaagtatcagtttttaagcaggggccctgcagaaaacagctgaacagtgactgtactaatggccccgagtgtgattgyagcaatgtgatgtttcgctacgtaaataaattgatgtgtttaaaaaagatcacagcaatcataaagacatagccaatttgtgagtgctatttaccaaatagctagtgaccaattttccagccgtcctgtttaaattaatgaatatttaaaggagaaactaatttgatttccctaaaacctgcccggtgtcattaacacagtggggggaaacacaaaatatgtatttgaatgctttgctcttcaagaaaagtcattccacctcttatgagtggaagattaaaagatgtgagtgattaaaat

SEQ ID NO: 51993 - DNA, 600 bp, Chicken  19866894300240_1
aaccacacacacacctgatggcacgtggagcaggctccttagctgcccaagtccttttgccatatagaatactgatactacaacgtagatgtcatcaacaatgagaagtcaggacatggtaaccgttactccaccctctgtaaaaggggtaacatctatgatttatcagccctagaagtatcagatgcccaatcttatacactaaacgacgcgcagtttatatggccacaagctacatcagtgacctactggctaaaacccactgcccacagatccttacagctagagagcacgagctgytgtgcagtgaatgtaaaataacccacactgatgatgaacggcttgacccatcttactacaggaaggcttcccactaatggattcttgcacttatttggcaaccttaacaagcattcataacatcttgtggagtaactcctgcataccagctgcagattacaaccctgattgcagaaagtatctatttgaagttaaaatctgcctaccacccacttggtttccttcaggaggaaccaagttccctattccaactcttttttttcttcctttcaagaccatgatttagtcagaccaccttaa

SEQ ID NO: 51994 - DNA, 600 bp, Chicken  19866894300243_1
tccagataatgccagaactggaacagtttacagcagtagtttgaaaacaaccctgattttccttcctgtacttgtgaattgaggtagcagtacgtccccaaaatactaatctggagtctgattctgcagacatcgactatgtgaataactttgtttgcacgagtagtcccactgataattctcatgagagagggtacttgtctgaacttaaaagtttccaggccaagtccttgtattttggtactttgattagaatttatttcacaaatgcccacttatcatcctagtagttcgaaagarttacagtgccggtataacacatgcattaaaaaaaaaaaacaaaaacccaacaacccacaaaacaacagcaaaactcacctacttctgcagaaaactagtgaagaggtaaaatgttactctcaggttcttgaacaactgcagtctcaaggctgagctcgttccctcatgccccctataagaaaaccagcccctccgagtttcacggtgtgagtcagctgaaattctgagttgtagaaaagaatgctgtaagggttgaacttcaagttgatacttgaaatagcttttaaactgaaagccatc

SEQ ID NO: 51995 - DNA, 600 bp, Chicken  19866894300243_2
ttgaaaacaaccctgattttccttcctgtacttgtgaattgaggtagcagtacgtccccaaaatactaatctggagtctgattctgcagacatcgactatgtgaataactttgtttgcacgagtagtcccactgataattctcatgagagagggtacttgtctgaacttaaaagtttccaggccaagtccttgtattttggtactttgattagaatttatttcacaaatgcccacttatcatcctagtagttcgaaagarttacagtgccggtataacacatgcattaaaaaaaaaaaaraaaaacccaacaacccacaaaacaacagcaaaactcacctacttctgcagaaaactagtgaagaggtaaaatgttactctcaggttcttgaacaactgcagtctcaaggctgagctcgttccctcatgccccctataagaaaaccagcccctccgagtttcacggtgtgagtcagctgaaattctgagttgtagaaaagaatgctgtaagggttgaacttcaagttgatacttgaaatagcttttaaactgaaagccatctatgatgtatgttttcatgcttcttacaatgcatcactga

SEQ ID NO: 51996 - DNA, 600 bp, Chicken  19866894300243_3
acaaccctgattttccttcctgtacttgtgaattgaggtagcagtacgtccccaaaatactaatctggagtctgattctgcagacatcgactatgtgaataactttgtttgcacgagtagtcccactgataattctcatgagagagggtacttgtctgaacttaaaagtttccaggccaagtccttgtattttggtactttgattagaatttatttcacaaatgcccacttatcatcctagtagttcgaaagarttacagtgccggtataacacatgcattaaaaaaaaaaaacaaaaarccaacaacccacaaaacaacagcaaaactcacctacttctgcagaaaactagtgaagaggtaaaatgttactctcaggttcttgaacaactgcagtctcaaggctgagctcgttccctcatgccccctataagaaaaccagcccctccgagtttcacggtgtgagtcagctgaaattctgagttgtagaaaagaatgctgtaagggttgaacttcaagttgatacttgaaatagcttttaaactgaaagccatctatgatgtatgttttcatgcttcttacaatgcatcactgatggaga

SEQ ID NO: 51997 - DNA, 600 bp, Chicken  19866894300243_4
gaagaggtaaaatgttactctcaggttcttgaacaactgcagtctcaaggctgagctcgttccctcatgccccctataagaaaaccagcccctccgagtttcacggtgtgagtcagctgaaattctgagttgtagaaaagaatgctgtaagggttgaacttcaagttgatacttgaaatagcttttaaactgaaagccatctatgatgtatgttttcatgcttcttacaatgcatcactgatggagaaggatatgtttcaagaattaaatactttgttatagtttatttaaaaaaaaaaracaaaaccttcttacaacacaattttaaaataacagaactgaggaattgcctgtacttgttatttaytgggggccctgtcttgataaaaaccttaaaatatgtttttaaaagttaatgtaaagggagcattagctgagaaktgtatgcaggagtatttaaaaactactgaaattctgttcatgatatgaatgatttgaaacttagatgtatcacagcagagaaaggcaagagtatattttaactacatggtttcaagaaaaggttttttctactttgtaaacaagctgaagtactgcttg

SEQ ID NO: 51998 - DNA, 600 bp, Chicken  19866894300243_5
tgccccctataagaaaaccagcccctccgagtttcacggtgtgagtcagctgaaattctgagttgtagaaaagaatgctgtaagggttgaacttcaagttgatacttgaaatagcttttaaactgaaagccatctatgatgtatgttttcatgcttcttacaatgcatcactgatggagaaggatatgtttcaagaattaaatactttgttatagtttatttaaaaaaaaaaracaaaaccttcttacaacacaattttaaaataacagaactgaggaattgcctgtacttgttatttaytgggggccctgtcttgataaaaaccttaaaatatgtttttaaaagttaatgtaaagggagcattagctgagaaktgtatgcaggagtatttaaaaactactgaaattctgttcatgatatgaatgatttgaaacttagatgtatcacagcagagaaaggcaagagtatattttaactacatggtttcaagaaaaggttttttctactttgtaaacaagctgaagtactgcttgggtatgttttctgtgtacaagtctgtatgtgaaactgctgtgtttggagcttgtggaacatacagga

SEQ ID NO: 51999 - DNA, 600 bp, Chicken  19866894300243_6
atgctgtaagggttgaacttcaagttgatacttgaaatagcttttaaactgaaagccatctatgatgtatgttttcatgcttcttacaatgcatcactgatggagaaggatatgtttcaagaattaaatactttgttatagtttatttaaaaaaaaaaracaaaaccttcttacaacacaattttaaaataacagaactgaggaattgcctgtacttgttatttaytgggggccctgtcttgataaaaaccttaaaatatgtttttaaaagttaatgtaaagggagcattagctgagaaktgtatgcaggagtatttaaaaactactgaaattctgttcatgatatgaatgatttgaaacttagatgtatcacagcagagaaaggcaagagtatattttaactacatggtttcaagaaaaggttttttctactttgtaaacaagctgaagtactgcttgggtatgttttctgtgtacaagtctgtatgtgaaactgctgtgtttggagcttgtggaacatacaggagcctatcttgctgaagatgtcaaatggggcttggtatataatactggacctctagctgtatttcatgtactggt

SEQ ID NO: 52000 - DNA, 600 bp, Chicken  19866894300245_1
agtgctgcatgcatgtgtctttttttgttttaaagagtagcatggatttaactgaaaaataaagctgaattttatctacttttgagagataatggtgcaattacctgagtcttgcagctggctgacgttttccatgcaaatgtgaagtgctttcatggagattttgtactgtgactaattatcttcaggaaatagccttgctgtaattggcagcctaaaagggagttaattaagaagatctttgtgggatagcaagcctttttagtgggcaaatttaaggtgatggcgtatttacttcgwagaacagcattacaaatttgatctccccttatattgcatttaatattaggaggaaaaaaaaaagtacttataatgaaagaataagtagccacatatctatctgacaaaatgtctaatgattccattatggaagaaacagtctgagtcctatctaactcatggtagtgtagacatagtactagatgcagttattaaataaagtttaaaaaataaataaggggagcagtgcatgtccagcagattttaagttaatatctttttattgactactggtgtttcttccatataattcttcattaa

SEQ ID NO: 52001 - DNA, 600 bp, Chicken  19866894300258_1
ggtcttctggttttccaatctgtctgctaaaggcattcagggctcccccagctttgattctgtgagttcccagctgcaggatggggctctgctccagtgcaggtggccgtgggactggactggggtgctgctccagcagctgcagtacagtgctgtgtggtgacagtgtgctaaagagagagaagagcagtgtagctgctgctctgcagctgcttctctcccctgtcccacttgcaaaaggctttctgatctctttgagagctttgccatgttcctcactcagttgggcctccctgaagwcagtgcagcacccacaggcaccttctgctcctcctgcaccttcggtgcccaccttgggctcctcctacagaggagcagagccagcaaactgcagacaaagggcccttaatgaacccctctgcccaggcactttggccccctgcaacaygagctttatttacgtctacgaaaagcactctgctggtttgttggagcmgcagtgctctcactcacttctcatagggacgatgtcactgtcaatatttgccttggaggaacactgccagcagatgaaggcttgtttcatggccagagggactc

SEQ ID NO: 52002 - DNA, 600 bp, Chicken  19866894300258_2
agtgctgtgtggtgacagtgtgctaaagagagagaagagcagtgtagctgctgctctgcagctgcttctctcccctgtcccacttgcaaaaggctttctgatctctttgagagctttgccatgttcctcactcagttgggcctccctgaagwcagtgcagcacccacaggcaccttctgctcctcctgcaccttcggtgcccaccttgggctcctcctacagaggagcagagccagcaaactgcagacaaagggcccttaatgaacccctctgcccaggcactttggccccctgcaacaygagctttatttacgtctacgaaaagcactctgctggtttgttggagcmgcagtgctctcactcacttctcatagggacgatgtcactgtcaatatttgccttggaggaacactgccagcagatgaaggcttgtttcatggccagagggactcttcctcctcgtggcttcagcgcctgctgctggcacagaaccatcacctcccagtgacaatgtgagtgcacagatgtgggtttcaggtaagccccaccaggtaacactcatgtccagaccccggtgtgcccatctggagccagccaatg

SEQ ID NO: 52003 - DNA, 600 bp, Chicken  19866894300258_3
tgctgctctgcagctgcttctctcccctgtcccacttgcaaaaggctttctgatctctttgagagctttgccatgttcctcactcagttgggcctccctgaagwcagtgcagcacccacaggcaccttctgctcctcctgcaccttcggtgcccaccttgggctcctcctacagaggagcagagccagcaaactgcagacaaagggcccttaatgaacccctctgcccaggcactttggccccctgcaacaygagctttatttacgtctacgaaaagcactctgctggtttgttggagcmgcagtgctctcactcacttctcatagggacgatgtcactgtcaatatttgccttggaggaacactgccagcagatgaaggcttgtttcatggccagagggactcttcctcctcgtggcttcagcgcctgctgctggcacagaaccatcacctcccagtgacaatgtgagtgcacagatgtgggtttcaggtaagccccaccaggtaacactcatgtccagaccccggtgtgcccatctggagccagccaatgtccccagggggggcagggggggaggcagcacagggaccccctgcaata

SEQ ID NO: 52004 - DNA, 600 bp, Chicken  19866894300268_1
tgactttggttagaggggatgtcaaggatgatagttccaaccttgcagtaggcagggatgccagccactggatcatgctgcttgcggtcctatccaatctggccttgaatgcctccagggatgggtcgtccacaacttatttgggcagcctgtttcacctcctcaggactcttttaggaaagaagttttcctagcatctatacttcccctctgttaattcaaagctgttctcctatgtcctattgttaccactatgcccgtgtgaaaagttgttatgcctcctgcttataagctgccttygagcactggaagtctgtgatgatgtctccctagagcctttgcttctctagctaaacaagtccatctcccacagtctgtctttcctaagagtggtgttccagccctcctttgaacctgttccaacaactctatatctgttttctgtttggggcactggtctttgctgcactactccaggtggggcctcatgaggacagactagaggggtagagtcacttcctttgccctgctggccagtcatcttttgatgcaacctggaacacatctgcctgcctgggccacgggttcatgtccagcttt

SEQ ID NO: 52005 - DNA, 600 bp, Chicken  19866894300273_1
ctttataaaatcaagaggtttttttatagacgaattcctgttcttccacaagttaactgaagaagtgtagtataaaaatcaattaaaagttggagcaataaaataacaggaaatactgcagtttccttcagagaaattgagactactctggcatttgtggatatgcttgttagcctgtacacacaatacgttttgtgcctcattttaaggccctttaagtggaatgattatctcaaatgctgcatctcagcacatttccctgctctgggttctggtaagtgcatggttggccagaaccayggctgactagtctggtggactagctcattcacccctgcaccatatttaattgcacaggctagccatgcacttggtaaacataagtcaagagatcttgtacagcccagtgctgcaaaagcacagacctgtgaagaaacacatctagccataaacatatggaataccactgcagattatgtttacacaggccactgagctcagcagttatattgcagctctattgtcccttctaactggagatctcaaaatgtcataacgatgcaatcaattatagaagagagccttatctcttagagtcag

SEQ ID NO: 52006 - DNA, 600 bp, Chicken  19866894300274_1
cctgagaattttccatatgcttctgaagtacttcatattttttgcttagtgaacataatattgcacttccagaatgctttaatatttcaattttactgtgtaggtaaggttgtaaggaaaaaacactaaggaaaaaacaagaacacttgttttctagaacatattttctgcctttatttttttcccaatttactatggaaaaatctatatggaacaaaaatggaataaaattatgatcaatacacatttgcccctgattacataaatttttgatttccttacattataaagaaaatccarccaatcatttatgggaatggtgatgctattggaactgaagatagttagcttctttgtatcagataactcaattctacttgatcaatttatttgatccttggacaccttgatttttattaagaaagtagaatttatctactctttctaaataggagacagcaagcagttcaagcaactcattcatggacatggtaaagtgaatgttcatcaagtagtttattattttgcccatacgatgtagcttatattatcatggtggctgtcagaagtcaaagtacttcttgtaattagcatttatac

SEQ ID NO: 52007 - DNA, 600 bp, Chicken  19866894300285_1
ggttatatttcaacacaagcgaagggatgtagcacatatggaggtagcagataattttctcaaggcttcatctttcagcagatatccagctgttttatttgtggatggtggaagtcaacaggagacattctcctttattttcccttccttcctcagaatgtttattctgccgtgtcccttccatacaaattcatggacatgctttgaaaagctatgcccaacagccattagtgcctattagtatctaatatgactggtgttctcactttaatcacaaccaagtgaaatccacagaaaatktattgttttcktcaacatggtatggataatggtgtggttgttactccttattttcttgaggtcagaatttaaatcatagattctgatctgaatttgtcttctcaattcctgagacaagaagtatgctcaggcagaggctcttgttcactttacttttgtgtatctccaactagaagagcagaccatgtttgtgcattgcagaatatgtagttaggcaatgtggaggtgctcctcagaggttgtttgctcctcaaaagatcttcacataccaacaccctagaacaggaaatgctgctccag

SEQ ID NO: 52008 - DNA, 600 bp, Chicken  19866894300285_2
aacacaagcgaagggatgtagcacatatggaggtagcagataattttctcaaggcttcatctttcagcagatatccagctgttttatttgtggatggtggaagtcaacaggagacattctcctttattttcccttccttcctcagaatgtttattctgccgtgtcccttccatacaaattcatggacatgctttgaaaagctatgcccaacagccattagtgcctattagtatctaatatgactggtgttctcactttaatcacaaccaagtgaaatccacagaaaatktattgttttcktcaacatggtatggataatggtgtggttgttactccttattttcttgaggtcagaatttaaatcatagattctgatctgaatttgtcttctcaattcctgagacaagaagtatgctcaggcagaggctcttgttcactttacttttgtgtatctccaactagaagagcagaccatgtttgtgcattgcagaatatgtagttaggcaatgtggaggtgctcctcagaggttgtttgctcctcaaaagatcttcacataccaacaccctagaacaggaaatgctgctccaggaaagtgcatc

SEQ ID NO: 52009 - DNA, 600 bp, Chicken  19866894300290_1
aaagccagtctttatcattccaactacatgactgggaaattagcatttgagcctgctttagaggaaaatgttgttgtgcttaaatgtctttaatctgccattagcatccactgtgtctggaacctattaggtttgctcgatattaatacagcatggtgagtcccaagggtaaaaaaaatccagccctcagacttctataataacacttttaaatgattatatttgcaactgggaatgtttactccattctgtcacattctaatgtaatttatatcagcttgtcgcgtggttggttgcatmacacataaacattttatttctttgttaggttatgtctggagaagatactgctacaatgcattattcagtcaagaactttgtcaggagctgatgtcatccatgctctcaaacctttctactttgctgtgcatccagatttctttggccagcatcccaaagagagggtaaaaatctcgcagtgggctttctttgtaaatgtgacgtatgtcaaagatgggagtgatctgttttctgtgctgtcagagtggagaaggcactggggccaaatatagttgttacaaaagagcaaaaggaagcgct

SEQ ID NO: 52010 - DNA, 600 bp, Chicken  19866894300296_1
ttaatcagtcactgagagagataccaaatattcactcaagaagtaaatgtatgcaaatgcagccagacagcttgaatatgtgagaaggaagtctgagtcatgaaggcagcagaatcaaagtatatagcaggaacatgtcctccaccacagcttctacatgcacctctatgaagcttcttgccacaaagcggaggatgacattgtttcatggctgactcattcgagcctgctgcagccattacattaacacttacaagagagatgattttgagcgggtgtggagagtggaaaaatcaactrctaaagtttataaggcggctgagtttcctttcaagtctttttgccttggagctcctgctaaattctgttttccagtcattgtaaatcaaataaaatttgttatggtttgaaagtcaaagagatctgacaccacatctgttctactcaccccccacacacttggagagaaaggtctgattctatcagtcttagcctcacattcctcctttgcagttagcatttgcagtgcaggacactaaacatcaacacaggaagcaggatggtggaccagatccacatccaacttcccacttctggaca

SEQ ID NO: 52011 - DNA, 600 bp, Chicken  19866894300302_1
gggctttctctgttaaaactgacttaacagaaacgtctcctaggtatttttggaatttcttccaaaaaaccccaagagcatcagcacaaggtatgttttcatactattgtgagatagcatgaaattcgcttttatactacattacattgtacatgcctgtgaccatatctttccatggaaacacattattgcctaagtcttttaagatgaaaaggatttatatatatatacacacatccaaataaacaaacaagttcttctctgacaaaattaatgaactctgctttgatgcaaagcctmaggctctgcccctgcatccttccacaatggcagtgctgcmtctccaccatcctacctacagccctactaccatgggccaccaggcagcatgtaatggccggttcaggttacaaacatgctgatgcatgctaaaagggaatatgctgctctaattttcataatgcatgtaggaactcagtacttcttttttaagttactgtatcagaagcttgtaattgggcaatatttgagtggtgtagggagggctgtcagggaatgatagcatggtttcataggcaatgaaaggtagttttttgtgtg

SEQ ID NO: 52012 - DNA, 600 bp, Chicken  19866894300302_2
taggtatttttggaatttcttccaaaaaaccccaagagcatcagcacaaggtatgttttcatactattgtgagatagcatgaaattcgcttttatactacattacattgtacatgcctgtgaccatatctttccatggaaacacattattgcctaagtcttttaagatgaaaaggatttatatatatatacacacatccaaataaacaaacaagttcttctctgacaaaattaatgaactctgctttgatgcaaagcctmaggctctgcccctgcatccttccacaatggcagtgctgcmtctccaccatcctacctacagccctactaccatgggccaccaggcagcatgtaatggccggttcaggttacaaacatgctgatgcatgctaaaagggaatatgctgctctaattttcataatgcatgtaggaactcagtacttcttttttaagttactgtatcagaagcttgtaattgggcaatatttgagtggtgtagggagggctgtcagggaatgatagcatggtttcataggcaatgaaaggtagttttttgtgtggtatctagtgcatgactcttgtttcttcagtgaagagatc

SEQ ID NO: 52013 - DNA, 600 bp, Chicken  19866894300302_3
ctaattttcataatgcatgtaggaactcagtacttcttttttaagttactgtatcagaagcttgtaattgggcaatatttgagtggtgtagggagggctgtcagggaatgatagcatggtttcataggcaatgaaaggtagttttttgtgtggtatctagtgcatgactcttgtttcttcagtgaagagatctcagtaccacaagtaacactcacaacgtgcacatcaggtcatggaaccctgctatttgcctacccaagtaacaccctatcaagctgcacagggatgcactgtcagcartgacactgtaacaggcaagatgaagaatcacagcccagggaaacactaatcagaaatcattacaccaatttccactgtctgggcccactatatttacatgaagaagatggcacacctgtgctgcaggtccctgagaactaatgagctgcagctgtggggaggtggtgcccctgccccagcacagctgaggctgtttggcaggaagaaggtgctagaagtggccaggtcagttggtgcaatagctatttcaggagcagcgtgggaagccttttgtgaggagtggtgtgtattggttggtcc

SEQ ID NO: 52014 - DNA, 600 bp, Chicken  19866894300308_1
cagagagagcagctgagtgttgtcacggtcgtggtttgtttgctttgtcgagcagccagaatcagaaatacatgatggcttccaggataattggggtacttcaataattcatgggctgggctaaaagaaaaataaatactaattgccattgagcacaaacgagctgcttcggtgtggtcataatattcctttgtatggatccctgagccacctgcacagaaacagagcgtgttgtgttggaacaacgcgtgtaacacgttctgtgttcagcagtgagcatgctggcttgcaccctgttgratatacagtgagtgggtcaaaataagctgctttcaaggctgtctttgagtcgtaattgggargtggaagagaaatgctgatttatcttctgttggtaaaggcctttcaggcatttgcattgctgtgcatcgctcaggtctgctcacatcatgggatggcagagtcgtttgagttgtataggatctttaagacactgctcttaagacagggagctgttggagagggtccagaggagggccacaaagatgatcagaggacctcaaggatgatgaagctccaaccccccaccacacacagggc

SEQ ID NO: 52015 - DNA, 600 bp, Chicken  19866894300308_2
cagaaatacatgatggcttccaggataattggggtacttcaataattcatgggctgggctaaaagaaaaataaatactaattgccattgagcacaaacgagctgcttcggtgtggtcataatattcctttgtatggatccctgagccacctgcacagaaacagagcgtgttgtgttggaacaacgcgtgtaacacgttctgtgttcagcagtgagcatgctggcttgcaccctgttgratatacagtgagtgggtcaaaataagctgctttcaaggctgtctttgagtcgtaattgggargtggaagagaaatgctgatttatcttctgttggtaaaggcctttcaggcatttgcattgctgtgcatcgctcaggtctgctcacatcatgggatggcagagtcgtttgagttgtataggatctttaagacactgctcttaagacagggagctgttggagagggtccagaggagggccacaaagatgatcagaggacctcaaggatgatgaagctccaaccccccaccacacacagggccaccaacctccacatttcagaccagcccaggctgcccagggccccatccaacctggccttca

SEQ ID NO: 52016 - DNA, 599 bp, Chicken  19866894300311_1
  misc_feature (1)..(58): n is any nucleotide
nnnnnnnnnnnnnnnnnnnnnnnnnnnnnnnnnnnnnnnnnnnnnnnnnnnnnnnnnnagcctcatgcaaaggactctgggctcttctgctcgatccatggctgtttgcagaggtccctggcccagtccccagcgtgttggccaagagagcagctgtcatgctaacttgaggcaacagcagcctcttgttcagtttctgcctggaaacgaagagagaatatttgaaatctcctgagagcaagcttagaagcttgtccttagaagctctcctctgttagggagatgtgatagttgagcaarccatgggaatggatgggcagccttctgcagaaagcctgggagcagaaagcttccgtgtccagcggtgaatttaagtttctaagcaagtggtggtcacaagttcctctgaactgctcagaggmayagaaccaggcccttaaaaactttgctgagattgtgtaatgagaaaataccaggaaagggctgtagtggggatagaaatatgtctttctgaattcagcctctgggaactcagagacatgcagccaccragtgcccggtgagccccggcctggcctgtggctgcttccttgggtatg

SEQ ID NO: 52017 - DNA, 600 bp, Chicken  19866894300311_2
ccagtccccagcgtgttggccaagagagcagctgtcatgctaacttgaggcaacagcagcctcttgttcagtttctgcctggaaacgaagagagaatatttgaaatctcctgagagcaagcttagaagcttgtccttagaagctctcctctgttagggagatgtgatagttgagcaarccatgggaatggatgggcagccttctgcagaaagcctgggagcagaaagcttccgtgtccagcggtgaatttaagtttctaagcaagtggtggtcacaagttcctctgaactgctcagaggmayagaaccaggcccttaaaaactttgctgagattgtgtaatgagaaaataccaggaaagggctgtagtggggatagaaatatgtctttctgaattcagcctctgggaactcagagacatgcagccaccragtgcccggtgagccccggcctggcctgtggctgcttccttgggtatggtgcccaggagggctggccttccccagccttggcctggtcttggcgmtgaggtttgtgctggtgcaggcagagttctggtcatttgcatttgggccaaatgctgcgactgctgaaacatattt

SEQ ID NO: 52018 - DNA, 600 bp, Chicken  19866894300311_3
agtccccagcgtgttggccaagagagcagctgtcatgctaacttgaggcaacagcagcctcttgttcagtttctgcctggaaacgaagagagaatatttgaaatctcctgagagcaagcttagaagcttgtccttagaagctctcctctgttagggagatgtgatagttgagcaarccatgggaatggatgggcagccttctgcagaaagcctgggagcagaaagcttccgtgtccagcggtgaatttaagtttctaagcaagtggtggtcacaagttcctctgaactgctcagaggmayagaaccaggcccttaaaaactttgctgagattgtgtaatgagaaaataccaggaaagggctgtagtggggatagaaatatgtctttctgaattcagcctctgggaactcagagacatgcagccaccragtgcccggtgagccccggcctggcctgtggctgcttccttgggtatggtgcccaggagggctggccttccccagccttggcctggtcttggcgmtgaggtttgtgctggtgcaggcagagttctggtcatttgcatttgggccaaatgctgcgactgctgaaacatatttta

SEQ ID NO: 52019 - DNA, 474 bp, Chicken  19866894300311_4
ttgtccttagaagctctcctctgttagggagatgtgatagttgagcaarccatgggaatggatgggcagccttctgcagaaagcctgggagcagaaagcttccgtgtccagcggtgaatttaagtttctaagcaagtggtggtcacaagttcctctgaactgctcagaggmayagaaccaggcccttaaaaactttgctgagattgtgtaatgagaaaataccaggaaagggctgtagtggggatagaaatatgtctttctgaattcagcctctgggaactcagagacatgcagccaccragtgcccggtgagccccggcctggcctgtggctgcttccttgggtatggtgcccaggagggctggccttccccagccttggcctggtcttggcgmtgaggtttgtgctggtgcaggcagagttctggtcatttgcatttgggccaaatgctgcgactgctgaaacatattttat

SEQ ID NO: 52020 - DNA, 379 bp, Chicken  19866894300311_5
aagcttccgtgtccagcggtgaatttaagtttctaagcaagtggtggtcacaagttcctctgaactgctcagaggmayagaaccaggcccttaaaaactttgctgagattgtgtaatgagaaaataccaggaaagggctgtagtggggatagaaatatgtctttctgaattcagcctctgggaactcagagacatgcagccaccragtgcccggtgagccccggcctggcctgtggctgcttccttgggtatggtgcccaggagggctggccttccccagccttggcctggtcttggcgmtgaggtttgtgctggtgcaggcagagttctggtcatttgcatttgggccaaatgctgcgactgctgaaacatattttat

SEQ ID NO: 52021 - DNA, 599 bp, Chicken  19866894300313_1
  misc_feature (1)..(64): n is any nucleotide
nnnnnnnnnnnnnnnnnnnnnnnnnnnnnnnnnnnnnnnnnnnnnnnnnnnnnnnnnnnnnnnntgcttggtcgcttcttccacacggtcctaatcagccaaggagacgacctgtacagatgcaagatagaagcattcacctggatctgatgggaggagcacgacaagctatccttcccactcactgtgagcctgctgcatcattgcagctctttatgtttttttcagaaactgtacaagagttctgagtcttgaagggtactaaatcgcattcattgcaatgggcaactcaccacaggwkgtgctggcagaatcaggctgcctgctgcctcctgatccaaaatagtcactgttgcagtgctggtgtctccaagaacagcttccactgggtcatctggacccagcaccagagaaaaggactcgtgccactcccgatcttcgttggacataatctccaccttaaacatgatgtggtccacacctrtgagagtaaatgcaagagaaacagagaattcatcactggatattgctctgaagctctcataaaaaaaagaaagcagagctgatctatgccgtggccactgaaatacaatgataaa

SEQ ID NO: 52022 - DNA, 599 bp, Chicken  19866894300313_2
  misc_feature (1)..(63): n is any nucleotide
nnnnnnnnnnnnnnnnnnnnnnnnnnnnnnnnnnnnnnnnnnnnnnnnnnnnnnnnnnnnnnntgcttggtcgcttcttccacacggtcctaatcagccaaggagacgacctgtacagatgcaagatagaagcattcacctggatctgatgggaggagcacgacaagctatccttcccactcactgtgagcctgctgcatcattgcagctctttatgtttttttcagaaactgtacaagagttctgagtcttgaagggtactaaatcgcattcattgcaatgggcaactcaccacaggwkgtgctggcagaatcaggctgcctgctgcctcctgatccaaaatagtcactgttgcagtgctggtgtctccaagaacagcttccactgggtcatctggacccagcaccagagaaaaggactcgtgccactcccgatcttcgttggacataatctccaccttaaacatgatgtggtccacacctrtgagagtaaatgcaagagaaacagagaattcatcactggatattgctctgaagctctcataaaaaaaagaaagcagagctgatctatgccgtggccactgaaatacaatgataaaa

SEQ ID NO: 52023 - DNA, 600 bp, Chicken  19866894300313_3
ctgtgagcctgctgcatcattgcagctctttatgtttttttcagaaactgtacaagagttctgagtcttgaagggtactaaatcgcattcattgcaatgggcaactcaccacaggwkgtgctggcagaatcaggctgcctgctgcctcctgatccaaaatagtcactgttgcagtgctggtgtctccaagaacagcttccactgggtcatctggacccagcaccagagaaaaggactcgtgccactcccgatcttcgttggacataatctccaccttaaacatgatgtggtccacacctrtgagagtaaatgcaagagaaacagagaattcatcactggatattgctctgaagctctcataaaaaaaagaaagcagagctgatctatgccgtggccactgaaatacaatgataaaatacacattataaattttatttccactcattgctgctaataatttagccctttccacacaggaatttatacataaaactctaactatgacaactgatctgattgatcaagtgataaatttactagcagatgccatctraggattaataatgcctgtcttatgttagctgtctgtagtaaaagtct

SEQ ID NO: 52024 - DNA, 600 bp, Chicken  19866894300313_4
ttcgttggacataatctccaccttaaacatgatgtggtccacacctrtgagagtaaatgcaagagaaacagagaattcatcactggatattgctctgaagctctcataaaaaaaagaaagcagagctgatctatgccgtggccactgaaatacaatgataaaatacacattataaattttatttccactcattgctgctaataatttagccctttccacacaggaatttatacataaaactctaactatgacaactgatctgattgatcaagtgataaatttactagcagatgccatctraggattaataatgcctgtcttatgttagctgtctgtagtaaaagtctatgatccgaagaatatcccacctctgcagtgagcatctctactcgctctcataccaacaggcagagctgttttgtgacagcttttgtctcagtaacatggtctatgctcttagaggatttggaaagatctctgctgaacctcgaaggaccgctctgccagatagcagtgcttctggtagaggactgttctgagggctcttcatccaacaaatcatcacaaaactacagctgtggcagcacacagggctacagc

SEQ ID NO: 52025 - DNA, 600 bp, Chicken  19866894300315_1
aaaattctttacagtaaacttggcaagatgctgctcttttccctcaccataatccccgaatagtattttctcttacacagtgtagttttggatttgttaaaccaactcagccgcaataggactgaaaccagagtttgttgaaggtaacttctgagcagattcttcagtaattttgtttgtgaaaagtatgctctcttgctcctttcagactctttgatttatgggcacaggttgcccagagaggtggtggaatttctttccttgaagagagaattcagaatctatctggtcatggtcccwggcacccagctgtaggtagggctactcgaggaaggcagggttggaggtgacctccttgaatcccttccaacctcaaccattctgtggttagaatggcacagactgttccttaagataatgtctctgccatagcaatttgtgccacgttactgtgtcaaaagccaatgtcctctgtgtaagcttgcagcttgaggtaacccaggaggaaactgcagcagatgcagtggctgctgtgttcagcagtagttcttggccacagctaattgtgcactttcttcaagtcctacgtaagacttcgct

SEQ ID NO: 52026 - DNA, 588 bp, Chicken  19866894302224_1
ccatctgaaaaggactgtaattaccactccccaaaattatttcttatttaatgaaatgtctcgttaggctgaacaaaggaattttcagagtggagagcactggagggcgggatgaggaacacaggcaagaacactgttcaattacagggagaaaaatcctctcgacctcatgacgcagtttgtgggagatctcattagaaacttcgccaggccagagcaatgtgtactttttttatacagagattctgtatctatttatactgaccctacccgctgtgaaccactatctatagttctccwagaggcacgaaggacatgcagctcattcctgcctgcaagattcgaaagggagctgcttccttttctaccagcaaaatgtcagatgaattcttgcagtgaggatgctgccaagcctgggaacaccctgctgcatcagaaaggaaaatgcaagtggatgggttgctctggccatagggagcagtcggtcctctggcactccgttaggatagggatgctgttagcccaagggagctgccccaggggcaaggggggctctcctctccttgtgtccttctcacctcttctctt

SEQ ID NO: 52027 - DNA, 600 bp, Chicken  19866894302227_1
ctgtgctgtgccctcagcctgcacacaggctgaccccagtgtcacctgtcccctctgcacagctccacctgcaactcacagacgctcttataccttccgctgacagaaagtggagcagtagttgactttatggcatcccgtgcactcattcattgcctcgcggccacagttgacacacgactgctgtgaaaacaagcaggaaagggaccacatcagagggaacaacagtggaggggtgactgtagtgaagcagaaggcagaggagtaaaagtaagaagactgtaacaggagtacaggacktaagcccagaggatgaggtagcatatggagattgaaaatcacacctggtttttaaaggatgcttttgtgtctagcactttaatcttacaccrgtgacatcaattaacatagcctgcatggtgaggtggagatctcgctgagttatcacaaaaataagcactctgcagaacattcagttcccagctcattaagttactgacacatcattagcacgtcagagcrgtggtgccaggctgccaagggaaacttttctcagcttcagaagcaccatcagtgcagtgcccaacacaagcacaactc

SEQ ID NO: 52028 - DNA, 600 bp, Chicken  19866894302227_2
ccttccgctgacagaaagtggagcagtagttgactttatggcatcccgtgcactcattcattgcctcgcggccacagttgacacacgactgctgtgaaaacaagcaggaaagggaccacatcagagggaacaacagtggaggggtgactgtagtgaagcagaaggcagaggagtaaaagtaagaagactgtaacaggagtacaggacktaagcccagaggatgaggtagcatatggagattgaaaatcacacctggtttttaaaggatgcttttgtgtctagcactttaatcttacaccrgtgacatcaattaacatagcctgcatggtgaggtggagatctcgctgagttatcacaaaaataagcactctgcagaacattcagttcccagctcattaagttactgacacatcattagcacgtcagagcrgtggtgccaggctgccaagggaaacttttctcagcttcagaagcaccatcagtgcagtgcccaacacaagcacaactcagtgctgctgactcatttctctcctgagcactaccaatccagccatcagtgcccccatcagcaccgagctcatcacaccactggctcacagc

SEQ ID NO: 52029 - DNA, 600 bp, Chicken  19866894302227_3
caacagtggaggggtgactgtagtgaagcagaaggcagaggagtaaaagtaagaagactgtaacaggagtacaggacktaagcccagaggatgaggtagcatatggagattgaaaatcacacctggtttttaaaggatgcttttgtgtctagcactttaatcttacaccrgtgacatcaattaacatagcctgcatggtgaggtggagatctcgctgagttatcacaaaaataagcactctgcagaacattcagttcccagctcattaagttactgacacatcattagcacgtcagagcrgtggtgccaggctgccaagggaaacttttctcagcttcagaagcaccatcagtgcagtgcccaacacaagcacaactcagtgctgctgactcatttctctcctgagcactaccaatccagccatcagtgcccccatcagcaccgagctcatcacaccactggctcacagcacaaaggggtacctacagttagcaggtggtgggactgaaccactgttgtgtttctgatgtccagccataaatcgaggctatcaaaatggggcttgacacctagcttacagagcaaaaaggaaagacgttt

SEQ ID NO: 52030 - DNA, 600 bp, Chicken  19866894302231_1
gagaatgagtgaagtatgtttccatttagtccatagaatcatatctgcaaggaggttgcaaataattggatacagaacccttctgacagagtggctcagatatctttattgttagaggggatgctttatacactgccttccagtggccctttgacaaagaggaaagatgtctgaagactcaataattgattgctgcttcaaagaattaataaaaagcactgcactcagagagcagttatagctatgaatgaactgtgctctcggtggctttgctctcctagaaaacttatcaaaatttcyattattaaacaaagtgcatagagcctcaaaggggaagcggaragggaaggacagatgtcatgataatgaatataaaacatattttactccaaattctactctcttgaattttgaataaccagatgtcattaaacataatctgaatcaacaagatgtatatttcacattttaacaaggatctctgcttccactatttctttaaygtacactaattttcttcatttttttctagtccttttcacatttccctgcacagaagttctcaaaggctacgaaaggacaaagaactgctgtgaaaga

SEQ ID NO: 52031 - DNA, 600 bp, Chicken  19866894302231_2
atctgcaaggaggttgcaaataattggatacagaacccttctgacagagtggctcagatatctttattgttagaggggatgctttatacactgccttccagtggccctttgacaaagaggaaagatgtctgaagactcaataattgattgctgcttcaaagaattaataaaaagcactgcactcagagagcagttatagctatgaatgaactgtgctctcggtggctttgctctcctagaaaacttatcaaaatttcyattattaaacaaagtgcatagagcctcaaaggggaagcggaragggaaggacagatgtcatgataatgaatataaaacatattttactccaaattctactctcttgaattttgaataaccagatgtcattaaacataatctgaatcaacaagatgtatatttcacattttaacaaggatctctgcttccactatttctttaaygtacactaattttcttcatttttttctagtccttttcacatttccctgcacagaagttctcaaaggctacgaaaggacaaagaactgctgtgaaagagacctagaagtgcatctgcctgggagggctgtgggaaactct

SEQ ID NO: 52032 - DNA, 600 bp, Chicken  19866894302231_3
aattaataaaaagcactgcactcagagagcagttatagctatgaatgaactgtgctctcggtggctttgctctcctagaaaacttatcaaaatttcyattattaaacaaagtgcatagagcctcaaaggggaagcggaragggaaggacagatgtcatgataatgaatataaaacatattttactccaaattctactctcttgaattttgaataaccagatgtcattaaacataatctgaatcaacaagatgtatatttcacattttaacaaggatctctgcttccactatttctttaaygtacactaattttcttcatttttttctagtccttttcacatttccctgcacagaagttctcaaaggctacgaaaggacaaagaactgctgtgaaagagacctagaagtgcatctgcctgggagggctgtgggaaactcttccaactacagtgagcatttcagtgattctcaacttgtctggaaattgtgtagccctgtttttctccaaggggtattactctgtgctatgaatttacacttctgcaatttttcactcacctccagggacccacagatcacaggtggaaaaatcactgcctt

SEQ ID NO: 52033 - DNA, 600 bp, Chicken  19866894302231_4
atgtaaatactgtcttctacagtaggtgtaacaaatggctgtgggagaataagaacaggtcaagtacatatcagaattcctcctaatctatcagcctccaaatatgttcatccctggcatctcttgagctatgtatgagagctattcatttatttatcctcagtttcctttgcaaactgttcaaaattgtagaatgccttggcaaggagttctccaagtctatctgttgcccaaagagacaccttatttgatttattttggacaatgtttctcctaccttggctcgaggccttctatgtyttgcaattaaaaacatagagtagtaacctactttgmatgctggaaagacctagaacactaagacaatctttatgtggaagacataccgtaattttgaccagatctctgattcttctctaaatatttgccagttgaattacatctttgtagaagagccatgctgtctattcaggaatatttgcagttgttgattctgaacagattatgaaagctatraaaaaatttagtggcttaaatgaaatactatatggaacattcttaagatatgtactattatccatcaggtgccttttcactgaa

SEQ ID NO: 52034 - DNA, 600 bp, Chicken  19866894302231_5
ggctgtgggagaataagaacaggtcaagtacatatcagaattcctcctaatctatcagcctccaaatatgttcatccctggcatctcttgagctatgtatgagagctattcatttatttatcctcagtttcctttgcaaactgttcaaaattgtagaatgccttggcaaggagttctccaagtctatctgttgcccaaagagacaccttatttgatttattttggacaatgtttctcctaccttggctcgaggccttctatgtyttgcaattaaaaacatagagtagtaacctactttgmatgctggaaagacctagaacactaagacaatctttatgtggaagacataccgtaattttgaccagatctctgattcttctctaaatatttgccagttgaattacatctttgtagaagagccatgctgtctattcaggaatatttgcagttgttgattctgaacagattatgaaagctatraaaaaatttagtggcttaaatgaaatactatatggaacattcttaagatatgtactattatccatcaggtgccttttcactgaaaactgtgtcttgttttgcctgtaataagggaacatg

SEQ ID NO: 52035 - DNA, 600 bp, Chicken  19866894302231_6
agtctatctgttgcccaaagagacaccttatttgatttattttggacaatgtttctcctaccttggctcgaggccttctatgtyttgcaattaaaaacatagagtagtaacctactttgmatgctggaaagacctagaacactaagacaatctttatgtggaagacataccgtaattttgaccagatctctgattcttctctaaatatttgccagttgaattacatctttgtagaagagccatgctgtctattcaggaatatttgcagttgttgattctgaacagattatgaaagctatraaaaaatttagtggcttaaatgaaatactatatggaacattcttaagatatgtactattatccatcaggtgccttttcactgaaaactgtgtcttgttttgcctgtaataagggaacatggtgacaataagaaaatgataatttgtatatcaaaatggttggtcataattgtcccaaaattccataaaattttgaggattttaaactttaagtaatgttatgagaaataactttttttttctgtgattataacttctttgaatatctcaaaatgttatttaaaggtttttactttcccac

SEQ ID NO: 52036 - DNA, 575 bp, Chicken  19866894302231_7
agaaaccactgcttgtattgaaagaaaatcttagggagtgagaacatgatgcatcccaaagaaagtaaaggcaagctgccctttcacaagtgcacattttttgtgccagagttgttgttctttttttgtttatgtggacagtgctgcttttttggagggaacttggcactacatgtgcttgcgaggagacctagggcagaggacggagagaaccagagaaggcagcatatagacagcagcactccaaggccacatcaggcccaatggcactgtggggcctgcccagggccacaaggctgrggcaasgctgtggggacagccaccccaggattcccctgccaccaccaagaaatgtgttctggcactttcctgagcctgggccctgcccaagcccagagtcatgaccagagccaggcccaatgcctggctccagttcaacattgcctcctccctgccactcatgtggccttcatggggctgctgattcagggatggatagtaagtatgaaggaataaggagctgaaatgataaggctggactgagatctcctttgtttgtctttttttctaatgta

SEQ ID NO: 52037 - DNA, 569 bp, Chicken  19866894302231_8
cactgcttgtattgaaagaaaatcttagggagtgagaacatgatgcatcccaaagaaagtaaaggcaagctgccctttcacaagtgcacattttttgtgccagagttgttgttctttttttgtttatgtggacagtgctgcttttttggagggaacttggcactacatgtgcttgcgaggagacctagggcagaggacggagagaaccagagaaggcagcatatagacagcagcactccaaggccacatcaggcccaatggcactgtggggcctgcccagggccacaaggctgrggcaasgctgtggggacagccaccccaggattcccctgccaccaccaagaaatgtgttctggcactttcctgagcctgggccctgcccaagcccagagtcatgaccagagccaggcccaatgcctggctccagttcaacattgcctcctccctgccactcatgtggccttcatggggctgctgattcagggatggatagtaagtatgaaggaataaggagctgaaatgataaggctggactgagatctcctttgtttgtctttttttctaatgta

SEQ ID NO: 52038 - DNA, 600 bp, Chicken  19866894302239_1
tctgagtgttgtgttcactttttactggaaaacatcagtgttacttagtaacacagaagaataatacacactttataccacattcaatacaaactacagctgaattgatcccagctatagcccccagtactacatttcattaccacatccttcatttatttttcagtccatatgatagtgttcatccccatacaaaattgaattaattgtcttaataaaaggaaagcaaagaattattattactaatagtgcagctaaccatctgaggaggacgtattctcagtgtaaataaattaaaayttaaaaaataatgagttctgctaatggattttattcctgttgatttgtagtattccagaaaaatctgtagtaaagaaaaaccttctttccctatgtaaatatccttaagtattataacaagaccccatgaaagcaagttctgaaatcaatacaaaacattgctggcaaggcaagcttgccattttatttatgcattgcaagatatttaaaccactgatatttccacgagaagttgaagtgatgattagtcaccttatcagtaggttgtaattaccttatataacacaggctttagcctca

SEQ ID NO: 52039 - DNA, 600 bp, Chicken  19866894302240_1
aaaaaggtggcaaagactattaacattccagcttatgtaaatgaagccttaattcagactagtattccagcagtcacataaaaatgatttaatgtcaagcttgtttgtatgtttaatagactctgtgacgtcaagaatccttttcccaaagaggccacttcaaaaggactggaaatgctgcagatttttttcagcaggactgcactgaatacgtgaatcagtgactgcaagagcgtctaattaaatgctctgagtcaaagaaatatgactgtcaacattagcaaccaagtaaggatcctkttgactgaatacttaagaagttcttcagcaattttgagaacaggtggccgatatttatctactgttgttgcaacattatgccaggtagaaaatatggaactaattgtaatccgattaaatctgatattagtaagaaccccagaatatgctatttattagtctagcatatttttgtctctttcccactatgttcttagttgttctttttccatacctttccatgccagtatttttcatgttcagaccagcctgctcatggtcccagcttcaaaaaataggcactgttttcactttcttgac

SEQ ID NO: 52040 - DNA, 600 bp, Chicken  19866894302240_2
gtcatgagagttagttcacaggactacctgagaagtggggttgcaggccttaaatgctacttgttaggagctctttttaagaacaacatggataagtgtatctcctgcatgcctgcagcgtcctcagtgctccttgtgagcaggtgcatggagcagatgttctctagagaggttccttccaaacctaagatcctaggattttctaagggcagcagaataatagaaaatcagacagatctagtggtcagttgtttctatgagaaattaactgaatttgctgttaggtagcaagacttaccwtgtcaaaatgcacagtgtgatcacactgctgttccacatatggcaataaagtggtggtaacacagaaggcaatggacttacatggaagtaaacctggccttgaaaataatgtctgtgtgaatcagtgttttcccctgcacagacaataaaatgaatgaggatgtttaacctagcccaggaactttgctgtctaggttgaagaggtgccttgtttttgagaaaaatggaagggtattttctagtatcaacttatggagctcctcccgcacctgtctggcaaaattggctttcatatctgtg

SEQ ID NO: 52041 - DNA, 600 bp, Chicken  19866894302242_1
ttaacataccttgagaaggtaacattaaggttctttatcacctatttagatttacatagtagctcctgcttatacatcatcatctgctctaatggaacagctcccaagaagcccgcccatgcaattattaattataaatacatccatgcctcaatcacttcagtagccaaggaactccatgcccagcagtgtctgcagtcaatacaatacctcaattttgcactcctcagcacaaagccctgtgaccaactaattaattatcagaacacgatgcatatattcgtttgctttgaggaagartgatctgaagcttcctctgacgcatgccctaatcaaccagtggcctgacactcaacttttcacttggtcagttatttgtttctatatgtgtgctacagtcttgggtctctggcttacctcagggcaatactgtactgatccattgcttcctggtactcgttgacagctacaaggaagtctcccagtattcgatgcagaacacagtcgctctggttagccagtgcrttccttagcaaagcaattccatcttcatacttctgctctctacctgtttatttgcaaaactacagttttaattaa

SEQ ID NO: 52042 - DNA, 600 bp, Chicken  19866894302242_2
ctcagcacaaagccctgtgaccaactaattaattatcagaacacgatgcatatattcgtttgctttgaggaagartgatctgaagcttcctctgacgcatgccctaatcaaccagtggcctgacactcaacttttcacttggtcagttatttgtttctatatgtgtgctacagtcttgggtctctggcttacctcagggcaatactgtactgatccattgcttcctggtactcgttgacagctacaaggaagtctcccagtattcgatgcagaacacagtcgctctggttagccagtgcrttccttagcaaagcaattccatcttcatacttctgctctctacctgtttatttgcaaaactacagttttaattaatggtttagataaacctgtaagcagactgtacactaagggctatcacaacacaaaagcatttcttccctcagagctgttggcatgaaggatggcagtaatacactttttgtaagcaataaccgctacacacattaacacatatactttgaaggcaaaacattttgtatgcaacggttttaagtgctgccataatgtcagttgctaggtacaattaattcctgtgct

SEQ ID NO: 52043 - DNA, 600 bp, Chicken  19866894302257_1
ccaagggaagtgttgcctatcagggtgtcgcttataatgaatacaagacacatggtgtagcctccaaaatagcgactggctcagtccggtgttctcaccagaccatatttatgaagactctgtagtaggggcacacctccaaatgaaacttattgtcctgtgtcttcaataaaagggacttaatcttcttgattttaatatggtcattgtgtatgtgattgcagtcatgaggttagtggatttcttcagttgctgataatgaagttctatcctgacttcagtgaaagttctggcctttgrgggcacagattgatgtctgatgcacctttctggaacttctgtgagaataaagggtggtatattgccatttctacaggaagaaaagaggtataattcttcaagagtcatagaatacaaaaacagaaagggtagaaaacaaccaaagataaagcagttaaagaagagaaaggatcttgaatgaagagatggctgtataatcaacggtaaatataaaggcatacaaatctaatggatcgtcatacaataaaagagctcttctgaacatttcatgacctcctgttggtttctaaatattcaaat

SEQ ID NO: 52044 - DNA, 600 bp, Chicken  19866894302268_1
tcagtctgactcttctttggcatacagcatttgtttgcctttactctgtgcccggataggttggaaagagaagggaggtctaggagaaagcagcagtggtgctaagagaaagtaaataaaagtgaggaaagcaaaggagctggagcactgctctccccagccattaacttcttacaggagtagagcagccaataggatttgaaaagctccatgagaaaccacacaaattcctttccttccctctcactgagcctggttcctgtttatattttagttattcccttctgaaaaaagggaagygtagtattctaaatggatttgtttataatgggacattgtttagcaattctttttttcaacaggaaatggtaagtgtgctgatttgtataatgagcaattgagattcactggaggagtccaaattcctttttcttttcctcactatagaaatgaatttatgataaaatctcagttaagataaaccatacaagcaaatacgatggctgagattttctgtgcctgtgtagctcataaacaatgctacttcttgcttcctaacagcatggggccttaatatttgatcttgtgtcatttagtgaa

SEQ ID NO: 52045 - DNA, 600 bp, Chicken  19866894302274_1
atattaattgcccattattaggaggagtaccaaccattcttaaccattggctagtgccttcacagaatgtacttatatagttttcatacagttgtttccatgcctttgtgattcttcttcaattaaaaaaaaaaagtaatatatctggtctgattaacagtagtagcagctgatcaacattagtagtgacagtagttactatcaactgaatgcactgagcagcgcatttacaataaataggatttccaaacttgccatgaagcattcataccatgggagctttgacagacaaaatatttkcataagttatttttatcaccgccatgagaccactctaaagcagcaatttattatcaacgaaccctttctgttgggtaaaaataaaaacacacacagaaacttgggtttctaagtttctacgaagtccctgctttccatggattctgttcactaaacaacaccgacaatttttcaagagcataactatttcgtgctgactgtccgaataatgtggttttgatacatgtgcagacaacaagaattttaaatttatcttagaaacttcattttggattttggcactcacaccagaatgatgca

SEQ ID NO: 52046 - DNA, 600 bp, Chicken  19866894302285_1
taattctttcattatacagtattgctctggggtcatccacagacagggagaaattccaggcaaagtttctgccccaaagagttaaccgtgtcagctgcttctacatcaaagctctgacaggaatgcagaaaagtcaggaaatggggataaggctgaaattacattcataaaagatcttgcagtggttgggaatcacagcccatgcatggacaagcctgcattgagactgctgtaatccctgggtgaaatggggggagtgaaggagaggtcagtgctctttgtgggattctgtggcattaygggggcatggggagtcagtccctctcttatgtgaacagtgaatgagtattgtttcagatctgtttttttttttaatgttgccagaagaaaaargaataagcaagagaayatcaccccaaatcattttgggattgctgactatggagaagtgcaaatacagaatcagactgctttcctgcaaaacgcttcttttttcacggcttgtttccatgccagcactgcgaatggtgaagggaagggctgatgaacgtgcagaaggggctttcagagattcccgaggactactgaattggtgctgcc

SEQ ID NO: 52047 - DNA, 600 bp, Chicken  19866894302285_2
gctgcttctacatcaaagctctgacaggaatgcagaaaagtcaggaaatggggataaggctgaaattacattcataaaagatcttgcagtggttgggaatcacagcccatgcatggacaagcctgcattgagactgctgtaatccctgggtgaaatggggggagtgaaggagaggtcagtgctctttgtgggattctgtggcattaygggggcatggggagtcagtccctctcttatgtgaacagtgaatgagtattgtttcagatctgtttttttttttaatgttgccagaagaaaaargaataagcaagagaayatcaccccaaatcattttgggattgctgactatggagaagtgcaaatacagaatcagactgctttcctgcaaaacgcttcttttttcacggcttgtttccatgccagcactgcgaatggtgaagggaagggctgatgaacgtgcagaaggggctttcagagattcccgaggactactgaattggtgctgcccgttcaaatgctccaaatcrctgttatatcagcctgggttgtgcacatacactgtcacagggcccaggcgctgcagatcaatgtgtggaagca

SEQ ID NO: 52048 - DNA, 600 bp, Chicken  19866894302285_3
agctctgacaggaatgcagaaaagtcaggaaatggggataaggctgaaattacattcataaaagatcttgcagtggttgggaatcacagcccatgcatggacaagcctgcattgagactgctgtaatccctgggtgaaatggggggagtgaaggagaggtcagtgctctttgtgggattctgtggcattaygggggcatggggagtcagtccctctcttatgtgaacagtgaatgagtattgtttcagatctgtttttttttttaatgttgccagaagaaaaargaataagcaagagaayatcaccccaaatcattttgggattgctgactatggagaagtgcaaatacagaatcagactgctttcctgcaaaacgcttcttttttcacggcttgtttccatgccagcactgcgaatggtgaagggaagggctgatgaacgtgcagaaggggctttcagagattcccgaggactactgaattggtgctgcccgttcaaatgctccaaatcrctgttatatcagcctgggttgtgcacatacactgtcacagggcccaggcgctgcagatcaatgtgtggaagcacagcaacatttgtgca

SEQ ID NO: 52049 - DNA, 600 bp, Chicken  19866894302285_4
cctctcttatgtgaacagtgaatgagtattgtttcagatctgtttttttttttaatgttgccagaagaaaaargaataagcaagagaayatcaccccaaatcattttgggattgctgactatggagaagtgcaaatacagaatcagactgctttcctgcaaaacgcttcttttttcacggcttgtttccatgccagcactgcgaatggtgaagggaagggctgatgaacgtgcagaaggggctttcagagattcccgaggactactgaattggtgctgcccgttcaaatgctccaaatcrctgttatatcagcctgggttgtgcacatacactgtcacagggcccaggcgctgcagatcaatgtgtggaagcacagcaacatttgtgcatccccgttgtttggggatgtatgaaggatgttggctgaaccccrcgccttgcgctctgttccctgctcccggggcaccccctgcagccccgggccagtgctgggacacgggactgtggctcatgggttgggggtgatgctgaggtggcagccgacggtctgaaaaccgctgggagccctgcaggtccaggagctggagccttccttttcct

SEQ ID NO: 52050 - DNA, 600 bp, Chicken  19866894302285_5
aatacagaatcagactgctttcctgcaaaacgcttcttttttcacggcttgtttccatgccagcactgcgaatggtgaagggaagggctgatgaacgtgcagaaggggctttcagagattcccgaggactactgaattggtgctgcccgttcaaatgctccaaatcrctgttatatcagcctgggttgtgcacatacactgtcacagggcccaggcgctgcagatcaatgtgtggaagcacagcaacatttgtgcatccccgttgtttggggatgtatgaaggatgttggctgaaccccrcgccttgcgctctgttccctgctcccggggcaccccctgcagccccgggccagtgctgggacacgggactgtggctcatgggttgggggtgatgctgaggtggcagccgacggtctgaaaaccgctgggagccctgcaggtccaggagctggagccttccttttcctggggcgacrgaaagagaagtatttaagtgccacattttatatagttcctacatttacttatgtttgagtgcttctagcagaaggtttgtgtccttgtgcgctcctatctgtgtgtttgcatgagaaatgccaa

SEQ ID NO: 52051 - DNA, 600 bp, Chicken  19866894302285_6
cagcctgggttgtgcacatacactgtcacagggcccaggcgctgcagatcaatgtgtggaagcacagcaacatttgtgcatccccgttgtttggggatgtatgaaggatgttggctgaaccccrcgccttgcgctctgttccctgctcccggggcaccccctgcagccccgggccagtgctgggacacgggactgtggctcatgggttgggggtgatgctgaggtggcagccgacggtctgaaaaccgctgggagccctgcaggtccaggagctggagccttccttttcctggggcgacrgaaagagaagtatttaagtgccacattttatatagttcctacatttacttatgtttgagtgcttctagcagaaggtttgtgtccttgtgcgctcctatctgtgtgtttgcatgagaaatgccaaggctttcgtttggggcttgtgtttttccacagctgaggtgacacggctcccacgtcttttaaccctctcctgccagagccgatacattttattcctttgggaaggaaacagagccaggcggccggaagccgttccctttgagggctgcatgcgctgggccgcaggacagtgccaga

SEQ ID NO: 52052 - DNA, 600 bp, Chicken  19866894302293_1
tgacctccagattagctagaccgaaagcctaacagccactgtgttgcagaactgtggcactgctctacagggtagtgtagtgctctacagcctggggtaacaagccactggtgcaccctgggtgactgcatgcagaaggagcatacaggacaatccatcatccaggggacgtttgctagcgcatagtgcaggaagctgagtatttagtaacgcttctctttcatgtgaaggtttatctatggctcctgttatgggtgaaattcagtaggagcctgtgatcccagtgcatctgactcacayccagcatcttagtggacttcacaacagtacacctgcactcctggctgctcgctgtccgaaacatcctccatttgagtgagaaaaggaagtgggtgtgtaaaagaggggaggactgaacaactttacgcagaggatggagagtggtggtactgctcaggataataacttcaactctgatttgctttctcccattgcaacaaggcatctgtattctctgcagagcacagacggcctggaggaagcttttgttcctggaaaccacgaggaagtcaacagatcatttgggaaattgaagaggca

SEQ ID NO: 52053 - DNA, 600 bp, Chicken  19866894302299_1
taaactacatacacattaatttttcattcacttacacacacagatgcactacatgccacagacgactacactatatttaagaaacccacaaggcatgcattgcaaaaatagcaatacctgttaaactgttattcttgcataattaagatcatttgaattcacacacactaggctgcacatccagagacaaattttcacacacataaacaagagccttccatttcaattccttctcaggaatatacttgaatcatccttttcataagatgtcttagtgaaatctgatttcagcatccaaawaggtccatagaaggaacagtcactaagcaatgaatacatagaaagcaataaatgggttatcaattaatactgacgtttactagacttggtaatttggactggtatgagccaaaactttattttaatattaatttaatgaggatatggttcacaatggttatataagataaacatagaaatgcacaaggatgacagttgaagattgtagaatgaaattttggcatatcagaatccactaagctcttattaaaaaggatgcaaggggaaacacatttatgtttctaatttcaggttcattac

SEQ ID NO: 52054 - DNA, 599 bp, Chicken  19866894302301_1
  misc_feature (1)..(28): n is any nucleotide
nnnnnnnnnnnnnnnnnnnnnnnnnnnnagggaaagagtagagatggacatcttaaagcggccaatgaatgtttatatagctgagatgtgtgatgaactgagtcaggtcagtgaagatttctaggggtccatatcccgtaacaagggaacttaaggacctatctgtgcttgtcattttgtcccattagggtacaatttagtgtcccacagaccaacagaactgctttctgtgtctgatcagcacaaaaattaacctctcataccagacacctgcatccagcagttgtgttgtccaacttkgcaartgggttcagttgagttccctttcgttacttttatggtggtgcggatacagccctcacagatggcagcactaagtctgcttgctgagaaagtgcagctatccttaaacatacacaaagtgctgctcatgccgcgctggaatwtgtgctttctttgtaagttttttgtcagccatgagccctctgaaactgcygggattcagagaatcaagaggtctgtctcaaaaggtggtgctcatttcctgccctttctaggaggctcctgagacacatttctatgctgtacagtacggccat

SEQ ID NO: 52055 - DNA, 599 bp, Chicken  19866894302301_2
  misc_feature (1)..(23): n is any nucleotide
nnnnnnnnnnnnnnnnnnnnnnnagggaaagagtagagatggacatcttaaagcggccaatgaatgtttatatagctgagatgtgtgatgaactgagtcaggtcagtgaagatttctaggggtccatatcccgtaacaagggaacttaaggacctatctgtgcttgtcattttgtcccattagggtacaatttagtgtcccacagaccaacagaactgctttctgtgtctgatcagcacaaaaattaacctctcataccagacacctgcatccagcagttgtgttgtccaacttkgcaartgggttcagttgagttccctttcgttacttttatggtggtgcggatacagccctcacagatggcagcactaagtctgcttgctgagaaagtgcagctatccttaaacatacacaaagtgctgctcatgccgcgctggaatwtgtgctttctttgtaagttttttgtcagccatgagccctctgaaactgcygggattcagagaatcaagaggtctgtctcaaaaggtggtgctcatttcctgccctttctaggaggctcctgagacacatttctatgctgtacagtacggccatgcaga

SEQ ID NO: 52056 - DNA, 600 bp, Chicken  19866894302301_3
gaacttaaggacctatctgtgcttgtcattttgtcccattagggtacaatttagtgtcccacagaccaacagaactgctttctgtgtctgatcagcacaaaaattaacctctcataccagacacctgcatccagcagttgtgttgtccaacttkgcaartgggttcagttgagttccctttcgttacttttatggtggtgcggatacagccctcacagatggcagcactaagtctgcttgctgagaaagtgcagctatccttaaacatacacaaagtgctgctcatgccgcgctggaatwtgtgctttctttgtaagttttttgtcagccatgagccctctgaaactgcygggattcagagaatcaagaggtctgtctcaaaaggtggtgctcatttcctgccctttctaggaggctcctgagacacatttctatgctgtacagtacggccatgcagaatagctccttttcaagtcactgtttggctgggggtgatgttgaggactcagcatgttggttattcccatgcttctcagacccagggcttcaccagggaccagtagctatcacaaattaacactacaggtgttggcaatgcta

SEQ ID NO: 52057 - DNA, 600 bp, Chicken  19866894302301_4
ttagtgtcccacagaccaacagaactgctttctgtgtctgatcagcacaaaaattaacctctcataccagacacctgcatccagcagttgtgttgtccaacttkgcaartgggttcagttgagttccctttcgttacttttatggtggtgcggatacagccctcacagatggcagcactaagtctgcttgctgagaaagtgcagctatccttaaacatacacaaagtgctgctcatgccgcgctggaatwtgtgctttctttgtaagttttttgtcagccatgagccctctgaaactgcygggattcagagaatcaagaggtctgtctcaaaaggtggtgctcatttcctgccctttctaggaggctcctgagacacatttctatgctgtacagtacggccatgcagaatagctccttttcaagtcactgtttggctgggggtgatgttgaggactcagcatgttggttattcccatgcttctcagacccagggcttcaccagggaccagtagctatcacaaattaacactacaggtgttggcaatgctactggtgagaaatttttcttcaacaaaccttgctgtgctattaaggcacca

SEQ ID NO: 52058 - DNA, 600 bp, Chicken  19866894302301_5
agggaccagtagctatcacaaattaacactacaggtgttggcaatgctactggtgagaaatttttcttcaacaaaccttgctgtgctattaaggcaccattttgtacttgaaaggcttaaacatggagaagaaaatgtttcagctcttcagggaggagaaggccagttattttctgatgctgcttgtgtccaaagcacctcctgatgcacaagcgacagagctgcatcaaggacagcggccctggagggagacaggagacatgttatgcatatggctttatctccccaaggcccatcacrgatgtgcagcccccagcacacttagtagtggaaagccaggcctacatccaccaaaggatgtcagcccacmattcggttcaagcctcatcactctctggccttacacacccataataagtattaacaatcattcattcccctttaacttgcacaagtgttaaacagcttgtgttgtttgtaaagagatgattgatgcttccttcaaagtctttcccccacagacactgagatccaggattgcagcccactgcttgaaagttatttcataacagtgacaaacatatagcaaaagaaatgcta

SEQ ID NO: 52059 - DNA, 600 bp, Chicken  19866894302301_6
acaaaccttgctgtgctattaaggcaccattttgtacttgaaaggcttaaacatggagaagaaaatgtttcagctcttcagggaggagaaggccagttattttctgatgctgcttgtgtccaaagcacctcctgatgcacaagcgacagagctgcatcaaggacagcggccctggagggagacaggagacatgttatgcatatggctttatctccccaaggcccatcacrgatgtgcagcccccagcacacttagtagtggaaagccaggcctacatccaccaaaggatgtcagcccacmattcggttcaagcctcatcactctctggccttacacacccataataagtattaacaatcattcattcccctttaacttgcacaagtgttaaacagcttgtgttgtttgtaaagagatgattgatgcttccttcaaagtctttcccccacagacactgagatccaggattgcagcccactgcttgaaagttatttcataacagtgacaaacatatagcaaaagaaatgctacataatcctttatttaagccttcctgattaaccaatcccatgctggtaaatacaagccatgctgaagaat

SEQ ID NO: 52060 - DNA, 600 bp, Chicken  19866894302304_1
cagccagtttatttgtgatatgacaaatatttcagccattaggatctttccgtctcttagcagcttaaatgcactcacttatattccaaatcactgcttaatttaaaagcctatttgtcgagattgttgcaggcaggaaggaaaatgcagaatgctcacccctgcagataggactggagcagcaccgcagccgagctgccaattgggtccccactctgtaacttcacacccagcacagtaatcacacagcgccaggcagcagcacagcaattccacagaggaagtggggatgtgatgctkggggggctggggggagcttctccccaccgtgaggctgtttgctggctctgctttgatttccccacttgccgccatatgagtttatttggggacaaacaggcaggaggtgctgttttggtatggggaggtggttcgtgtttgctgtgatctgagtgtttctgaaaattaaagtcatggtgatgcctgatttcttcagccctgtttgcctcttcttcaccctcagctcaaggaggaggagcttggggtgccccatcagccaggctgattcccacagtcagaaggcttcatttagggactgct

SEQ ID NO: 52061 - DNA, 600 bp, Chicken  19866894302316_1
ctcagaatcctgatggctcttgagtggcattaaatcaagatggatgtcactttacatctcattgtgaatgcactacctgcagcatgggcttgcatataacattcctttccaagcagagacttctgccttgagggagatttgatctagctgggaagaaaggaagaaaagcttctctcatgtcccagtatgctagtcagtctgtgtacgaccacgattcaccgaagcctcctcctggagagcttcacatgatgcatagggatctaagtcaactctcagcatgcctctacactgaggacatasggmragaaaatgagctgtgtctccaggctggagcractcctcattgttgtagcagtttcagtatgctcttactgcatgtcagctcctatttcagttcaccagttcatgtaattgctccatctcccctgatgacacggtgatgctgtgcgtgcgttcatgctaaagacttgctcctttgtttcctaatgtcttaggaagtcactaactacagagtaaaatcattccagctaactttatagggacaataaaatatgtcaggagagaatattttgtaattcctatgttgggagctaatgttat

SEQ ID NO: 52062 - DNA, 600 bp, Chicken  19866894302316_2
agaatcctgatggctcttgagtggcattaaatcaagatggatgtcactttacatctcattgtgaatgcactacctgcagcatgggcttgcatataacattcctttccaagcagagacttctgccttgagggagatttgatctagctgggaagaaaggaagaaaagcttctctcatgtcccagtatgctagtcagtctgtgtacgaccacgattcaccgaagcctcctcctggagagcttcacatgatgcatagggatctaagtcaactctcagcatgcctctacactgaggacatasggmragaaaatgagctgtgtctccaggctggagcractcctcattgttgtagcagtttcagtatgctcttactgcatgtcagctcctatttcagttcaccagttcatgtaattgctccatctcccctgatgacacggtgatgctgtgcgtgcgttcatgctaaagacttgctcctttgtttcctaatgtcttaggaagtcactaactacagagtaaaatcattccagctaactttatagggacaataaaatatgtcaggagagaatattttgtaattcctatgttgggagctaatgttatagt

SEQ ID NO: 52063 - DNA, 600 bp, Chicken  19866894302316_3
gaatcctgatggctcttgagtggcattaaatcaagatggatgtcactttacatctcattgtgaatgcactacctgcagcatgggcttgcatataacattcctttccaagcagagacttctgccttgagggagatttgatctagctgggaagaaaggaagaaaagcttctctcatgtcccagtatgctagtcagtctgtgtacgaccacgattcaccgaagcctcctcctggagagcttcacatgatgcatagggatctaagtcaactctcagcatgcctctacactgaggacatasggmragaaaatgagctgtgtctccaggctggagcractcctcattgttgtagcagtttcagtatgctcttactgcatgtcagctcctatttcagttcaccagttcatgtaattgctccatctcccctgatgacacggtgatgctgtgcgtgcgttcatgctaaagacttgctcctttgtttcctaatgtcttaggaagtcactaactacagagtaaaatcattccagctaactttatagggacaataaaatatgtcaggagagaatattttgtaattcctatgttgggagctaatgttatagtt

SEQ ID NO: 52064 - DNA, 600 bp, Chicken  19866894302316_4
caagatggatgtcactttacatctcattgtgaatgcactacctgcagcatgggcttgcatataacattcctttccaagcagagacttctgccttgagggagatttgatctagctgggaagaaaggaagaaaagcttctctcatgtcccagtatgctagtcagtctgtgtacgaccacgattcaccgaagcctcctcctggagagcttcacatgatgcatagggatctaagtcaactctcagcatgcctctacactgaggacatasggmragaaaatgagctgtgtctccaggctggagcractcctcattgttgtagcagtttcagtatgctcttactgcatgtcagctcctatttcagttcaccagttcatgtaattgctccatctcccctgatgacacggtgatgctgtgcgtgcgttcatgctaaagacttgctcctttgtttcctaatgtcttaggaagtcactaactacagagtaaaatcattccagctaactttatagggacaataaaatatgtcaggagagaatattttgtaattcctatgttgggagctaatgttatagttgacctgctggagatgttcagagctgttcaga

SEQ ID NO: 52065 - DNA, 597 bp, Chicken  19866894302318_1
aagattttaactgctggcaaccaaactggaacaggatgaagtgaacagtatttctgtccatcttgatgacacagatgtcaatagagcatatgtggtaggatctaggagactactgattacactgaagaagtaaaagaagaaaaaatttctgccatggcaaaactgacgtccgtaaaaatgacacatttctctgaccaagactagttctgtgctggggctaaccagggcacaccatgtctttggaatgtgtgcatgcacatggagttgtcttctttggcagatacatggaaagtttgctcmcttcctctcctcctctcaacttcctggtgacatttggggtaagagtatgcagtactgactgctcagcgtagaatgtaattgccacagtaaagggagggtgccaaagaggaactcctgtctgtgctttggtggggcacagctctggagatgtgaaagatgctgaaagtcctggagatgaagagagtacaatgaagagttggytttgagattaaaaatatcatcaggtccattgacagtagagctataagaggaaaaaggcctgactcagaaagtccttgaactttggacttgtagttg

SEQ ID NO: 52066 - DNA, 396 bp, Chicken  19866894302318_2
tagttctgtgctggggctaaccagggcacaccatgtctttggaatgtgtgcatgcacatggagttgtcttctttggcagatacatggaaagtttgctcmcttcctctcctcctctcaacttcctggtgacatttggggtaagagtatgcagtactgactgctcagcgtagaatgtaattgccacagtaaagggagggtgccaaagaggaactcctgtctgtgctttggtggggcacagctctggagatgtgaaagatgctgaaagtcctggagatgaagagagtacaatgaagagttggytttgagattaaaaatatcatcaggtccattgacagtagagctataagaggaaaaaggcctgactcagaaagtccttgaactttggacttgtagttg

SEQ ID NO: 52067 - DNA, 600 bp, Chicken  19866894302319_1
agtcagtttcagaaatttgaaaaatcatgctttaaattacggtttgtgcaacaagcaagcaattgctagataagaacacacaatcatggtatttaaatgttatcgcttaagaagtttggcattttctaaggagaagctgagtacagcatcccactctatagcgcatttggttctaaatactggtctgaacatttactgagaagtactgctagagcaagttaccctttagcttgtgctcagacagacaaacttcatggaaaggtttggaaagcaacgtaggatcagataccagatgggatyccaaacacatccccascacaagcactcagatgactcaagtctccagtagttccatgccatcacttcagaagcaaaatcttcaccttgctacgaagtagcatcacagttaacttttcttcaggcttcctatcagtggctctataaccctgagctttgagttccacccagatttgagttaaagcaatagataagacatttaaaaacaatttagcaggttatatacccaaatcttaaatttgcagaggacaactcaccaggcatttgactctcaatgacccggagtgagtttgcattttttat

SEQ ID NO: 52068 - DNA, 600 bp, Chicken  19866894302319_2
ttgaaaaatcatgctttaaattacggtttgtgcaacaagcaagcaattgctagataagaacacacaatcatggtatttaaatgttatcgcttaagaagtttggcattttctaaggagaagctgagtacagcatcccactctatagcgcatttggttctaaatactggtctgaacatttactgagaagtactgctagagcaagttaccctttagcttgtgctcagacagacaaacttcatggaaaggtttggaaagcaacgtaggatcagataccagatgggatyccaaacacatccccascacaagcactcagatgactcaagtctccagtagttccatgccatcacttcagaagcaaaatcttcaccttgctacgaagtagcatcacagttaacttttcttcaggcttcctatcagtggctctataaccctgagctttgagttccacccagatttgagttaaagcaatagataagacatttaaaaacaatttagcaggttatatacccaaatcttaaatttgcagaggacaactcaccaggcatttgactctcaatgacccggagtgagtttgcattttttatttttaggaagtttcat

SEQ ID NO: 52069 - DNA, 600 bp, Chicken  19866894302320_1
gagaatggaaatagaaacatggagatatctcatatcccagactgttggcgtcagctgatctgtattacacaacacaaatcattggactgttggaattacagtgctgattaataacaccgagctcatttatggtattgtccattcaagaatgctcattaaacatgcacaatttccaagtctaattaaaagttaaatgacattaataccttctttaaacccctgctcttggcctggacaacatggagcaccaccagtgggaggtctggctcttcatctaatgtgaatcgtccctgcggcagsgatgtgtgcaggaggaggtggtgtaaggccagagaaggtccagtagggccgggatcctcaaagctcccaccatggcactgcaggtgcctggccctgccgctcccagcccaccacccagcacagacactcctggtgactccagcaaggcaaacagcaggggaatctcgcccctcrtgaatcactcaaaatggaaaataatcgtcttaaattaaagatacgatctgtctgcaaccagcaagactttgtcagcacaagaataagacgttctccataatcctgttcttgctgaaagaagtttat

SEQ ID NO: 52070 - DNA, 600 bp, Chicken  19866894302320_2
aagtctaattaaaagttaaatgacattaataccttctttaaacccctgctcttggcctggacaacatggagcaccaccagtgggaggtctggctcttcatctaatgtgaatcgtccctgcggcagsgatgtgtgcaggaggaggtggtgtaaggccagagaaggtccagtagggccgggatcctcaaagctcccaccatggcactgcaggtgcctggccctgccgctcccagcccaccacccagcacagacactcctggtgactccagcaaggcaaacagcaggggaatctcgcccctcrtgaatcactcaaaatggaaaataatcgtcttaaattaaagatacgatctgtctgcaaccagcaagactttgtcagcacaagaataagacgttctccataatcctgttcttgctgaaagaagtttattcaagtatttatctaaccttgtatttaaccaggaaatccagctgagctaatcactttgtgccaaagaagtatttgggtgcacatctgccatgacatttttgagtgtttttgtacaccttggccattcttttaatggtttaatcacacccagaaagagccatgcatttttcaatg

SEQ ID NO: 52071 - DNA, 600 bp, Chicken  19866894302320_3
ttattcaagtatttatctaaccttgtatttaaccaggaaatccagctgagctaatcactttgtgccaaagaagtatttgggtgcacatctgccatgacatttttgagtgtttttgtacaccttggccattcttttaatggtttaatcacacccagaaagagccatgcatttttcaatgaagtttccctcaaaaatcaaggagtgtcgtcttcagggaagacttaagaaaatgttttcattatttgtagaggtgacgccttgagatgagcagagccgaggggttctgcctcacacgctttrtctggtccctttcttcctccatcaaacttcatgcaattccatcctgcactttacgtctttaccctgtaacaatgccctctccttctgagactccaaacaaggggctcattttttctccataacccctgagattctgatagcttggttacctctagcaatatctcacctcagtaataatattgcagtgttctttgctgcctgtcttctcataaagtgcaagagatgccctgtacacagatgcagacatatacagcttatgatgaatttatgggtagaaagacataggagagaattctgaag

SEQ ID NO: 52072 - DNA, 599 bp, Chicken  19866894302331_1
  misc_feature (1)..(68): n is any nucleotide
nnnnnnnnnnnnnnnnnnnnnnnnnnnnnnnnnnnnnnnnnnnnnnnnnnnnnnnnnnnnnnnnnnnncattgtatgcatcattaattgaaaagcacccacatcagagcttcttgttatatatgctattatgcaacttttctagatgctgatatcaacttatttgcagttttgtgaatttgtggatttttatatagagttaaattgcttgcagtcaaaaggtctctctcacattgctggacaaatctggccaagcaattatattttctaactctacttgtttcttcataaactgcaagcwtcagcctctytcatgtttcagtccctgttgtctccctttgctttttcagagtcacacatgggctgtaatatgaaagactggaagcaggaaatgttctctcaaagaatctgtgactcgtagtagctctgtagctcatagtttctgatagtactgcctgccagcaataactgtggagatctgtgctgttgatgtcatttaaaataggtgatgttaccctgccgtattttgttacagaaaacttctagaatttcttgtaggatgaggaattttacagaaatctttaagatttttcattaggc

SEQ ID NO: 52073 - DNA, 599 bp, Chicken  19866894302331_2
  misc_feature (1)..(58): n is any nucleotide
nnnnnnnnnnnnnnnnnnnnnnnnnnnnnnnnnnnnnnnnnnnnnnnnnnnnnnnnnncattgtatgcatcattaattgaaaagcacccacatcagagcttcttgttatatatgctattatgcaacttttctagatgctgatatcaacttatttgcagttttgtgaatttgtggatttttatatagagttaaattgcttgcagtcaaaaggtctctctcacattgctggacaaatctggccaagcaattatattttctaactctacttgtttcttcataaactgcaagcwtcagcctctytcatgtttcagtccctgttgtctccctttgctttttcagagtcacacatgggctgtaatatgaaagactggaagcaggaaatgttctctcaaagaatctgtgactcgtagtagctctgtagctcatagtttctgatagtactgcctgccagcaataactgtggagatctgtgctgttgatgtcatttaaaataggtgatgttaccctgccgtattttgttacagaaaacttctagaatttcttgtaggatgaggaattttacagaaatctttaagatttttcattaggccactagatgg

SEQ ID NO: 52074 - DNA, 600 bp, Chicken  19866894302331_3
aatctgtgactcgtagtagctctgtagctcatagtttctgatagtactgcctgccagcaataactgtggagatctgtgctgttgatgtcatttaaaataggtgatgttaccctgccgtattttgttacagaaaacttctagaatttcttgtaggatgaggaattttacagaaatctttaagatttttcattaggccactagatggagtacaagtaccagccagtttatattagcttgagttatattccatactatttattcctcaccagctccagaaagctttattatcttttgggcaakaacttactcatatcaaatagccaaaaagtattcatttctcatcaggtgctgacaacagtccaccaaaacatccagtcaatagtgaaagccattcatctcgaaggaggaatcgacactccagatcaaaagtaacaaatggaattggcaagaaataagaaggatgtctgaagatattctaccacgagatgacaaagaaattcagatttagccctgagtttccaaatggaagattgattttaatttttaaaaaagttgttgaagataaggatggtcaagacggagccaccagtgtagtgcaaa

SEQ ID NO: 52075 - DNA, 600 bp, Chicken  19866894302335_1
cagtcccaaaggtggagctgattccattcctttgttagacccatcgtttatttgagatggttccttttcttgtgatgttttttcatttgggcccccatagaaagcagctttcttaggatgctggttgggcttggtggtgtctgttcagctctggggtgtcatggacacgtgtaatggctgccaagtgcacagagcaggctggcttttatgtgctggccatgcagttgtgaggagtggctccaggtggttcatttcagagcaatggtactggcatcagatgagctgtgccaagagatgagmgcgtgctgtcaggttgtgttgcttacgttgcagatcgcytcgkttctgccgctgtaagctcattctttggacagaacagattcctgtggacctccttatttaaatgtttttgtatgccataaattaccactcctaaatgaggctatgtatgtgtttacaggactaggtgcttgggtttggcacartctgtcccttcctcrtcctaagcatgctcacgaaggcagctcactgctggggctggacatggcagctccactggccatgtattcctgggagattcctctggatatgtttgccagc

SEQ ID NO: 52076 - DNA, 600 bp, Chicken  19866894302335_2
cccatcgtttatttgagatggttccttttcttgtgatgttttttcatttgggcccccatagaaagcagctttcttaggatgctggttgggcttggtggtgtctgttcagctctggggtgtcatggacacgtgtaatggctgccaagtgcacagagcaggctggcttttatgtgctggccatgcagttgtgaggagtggctccaggtggttcatttcagagcaatggtactggcatcagatgagctgtgccaagagatgagmgcgtgctgtcaggttgtgttgcttacgttgcagatcgcytcgkttctgccgctgtaagctcattctttggacagaacagattcctgtggacctccttatttaaatgtttttgtatgccataaattaccactcctaaatgaggctatgtatgtgtttacaggactaggtgcttgggtttggcacartctgtcccttcctcrtcctaagcatgctcacgaaggcagctcactgctggggctggacatggcagctccactggccatgtattcctgggagattcctctggatatgtttgccagctttggtcctttccttcccttcaggaatttaggtagcaca

SEQ ID NO: 52077 - DNA, 600 bp, Chicken  19866894302335_3
tcgtttatttgagatggttccttttcttgtgatgttttttcatttgggcccccatagaaagcagctttcttaggatgctggttgggcttggtggtgtctgttcagctctggggtgtcatggacacgtgtaatggctgccaagtgcacagagcaggctggcttttatgtgctggccatgcagttgtgaggagtggctccaggtggttcatttcagagcaatggtactggcatcagatgagctgtgccaagagatgagmgcgtgctgtcaggttgtgttgcttacgttgcagatcgcytcgkttctgccgctgtaagctcattctttggacagaacagattcctgtggacctccttatttaaatgtttttgtatgccataaattaccactcctaaatgaggctatgtatgtgtttacaggactaggtgcttgggtttggcacartctgtcccttcctcrtcctaagcatgctcacgaaggcagctcactgctggggctggacatggcagctccactggccatgtattcctgggagattcctctggatatgtttgccagctttggtcctttccttcccttcaggaatttaggtagcacagaga

SEQ ID NO: 52078 - DNA, 600 bp, Chicken  19866894302335_4
tgcacagagcaggctggcttttatgtgctggccatgcagttgtgaggagtggctccaggtggttcatttcagagcaatggtactggcatcagatgagctgtgccaagagatgagmgcgtgctgtcaggttgtgttgcttacgttgcagatcgcytcgkttctgccgctgtaagctcattctttggacagaacagattcctgtggacctccttatttaaatgtttttgtatgccataaattaccactcctaaatgaggctatgtatgtgtttacaggactaggtgcttgggtttggcacartctgtcccttcctcrtcctaagcatgctcacgaaggcagctcactgctggggctggacatggcagctccactggccatgtattcctgggagattcctctggatatgtttgccagctttggtcctttccttcccttcaggaatttaggtagcacagagagcaaaccattcctttggttactgtgatacacagaatctcatgttacccacacgtgctgtctgcatcccctcttggtttcttcatagtgcagctgctctagatctgaagggatgctgccctggaaatcagagggcttggagct

SEQ ID NO: 52079 - DNA, 600 bp, Chicken  19866894302335_5
ggcttttatgtgctggccatgcagttgtgaggagtggctccaggtggttcatttcagagcaatggtactggcatcagatgagctgtgccaagagatgagmgcgtgctgtcaggttgtgttgcttacgttgcagatcgcytcgkttctgccgctgtaagctcattctttggacagaacagattcctgtggacctccttatttaaatgtttttgtatgccataaattaccactcctaaatgaggctatgtatgtgtttacaggactaggtgcttgggtttggcacartctgtcccttcctcrtcctaagcatgctcacgaaggcagctcactgctggggctggacatggcagctccactggccatgtattcctgggagattcctctggatatgtttgccagctttggtcctttccttcccttcaggaatttaggtagcacagagagcaaaccattcctttggttactgtgatacacagaatctcatgttacccacacgtgctgtctgcatcccctcttggtttcttcatagtgcagctgctctagatctgaagggatgctgccctggaaatcagagggcttggagctaggctgagctctcag

SEQ ID NO: 52080 - DNA, 600 bp, Chicken  19866894302335_6
cctaagcatgctcacgaaggcagctcactgctggggctggacatggcagctccactggccatgtattcctgggagattcctctggatatgtttgccagctttggtcctttccttcccttcaggaatttaggtagcacagagagcaaaccattcctttggttactgtgatacacagaatctcatgttacccacacgtgctgtctgcatcccctcttggtttcttcatagtgcagctgctctagatctgaagggatgctgccctggaaatcagagggcttggagctaggctgagctctcagytaccatacaggggctgatggtgcactcagctcagaatttgttcctgaatttcagccctgaayctcaagtccagtctgtgttctctgggctttgccctggacagatgtgtgctgggatgctggagcagctgatgctggcacttgcggctcttcccttctcccctgcagttcccacatgtccaaggaagttgtgagatttccccaccccctctgttttcgaaagccaattcctggggttgtggcttttaacatgcacaaatgagtctaatttagtcatttatttagttgacatatttatttg

SEQ ID NO: 52081 - DNA, 600 bp, Chicken  19866894302335_7
gtattcctgggagattcctctggatatgtttgccagctttggtcctttccttcccttcaggaatttaggtagcacagagagcaaaccattcctttggttactgtgatacacagaatctcatgttacccacacgtgctgtctgcatcccctcttggtttcttcatagtgcagctgctctagatctgaagggatgctgccctggaaatcagagggcttggagctaggctgagctctcagytaccatacaggggctgatggtgcactcagctcagaatttgttcctgaatttcagccctgaayctcaagtccagtctgtgttctctgggctttgccctggacagatgtgtgctgggatgctggagcagctgatgctggcacttgcggctcttcccttctcccctgcagttcccacatgtccaaggaagttgtgagatttccccaccccctctgttttcgaaagccaattcctggggttgtggcttttaacatgcacaaatgagtctaatttagtcatttatttagttgacatatttatttgggatgttcctttgcttcagttaaagatcctgcgaccagtgccccaggcatgctcagcagtac

SEQ ID NO: 52082 - DNA, 600 bp, Chicken  19866894302340_1
attaagtagacttaaaaattatgtccttaggagaagaagaagaaaaaaaaaaaaggatcaaatgtagtctcaaatgaaaagtaattcaaaatatacaattagacttaattcctttactcctttggaaaaggaatggatgagacttttgacatattttgacactacacttggaaagaattaaacaatcagaccggttagaaagtttctgatttcaacttgtgaggaggattctggaaaaaagaaacataagtaagcaaaagagaaaaatctacaaagtatatggaaagaaaacaggaaagsactatactgcaaacttttcaatacatacatttcataatatacttaatatactttttttttttcttcttcagaatgaaatgacaaaactaaagactgattaccaattttaaatctggtgtaaaacctctaggtcatagaaagcaagtaataataaaagtctaaagcgtataactgtgatgcgagtaaaacaggtagttaaatctgtgccaggcaattatattagggtaagttttacctttggctgtaaacatatttatcagttattgactctgattagtaaatattgcttcatttattctt

SEQ ID NO: 52083 - DNA, 600 bp, Chicken  19866894302342_1
gtgtgttagcgataacacggagcagcacaatgagcaatgataaaactatgacaaactgagaaggctcttagccacagtaaaaaaggaaacaatgggtttcccactgacccgtgtgatactttgaagaaacaaaactcattcctacgtgtctgtcaggctctgatcttactgaaatttgctggcttgtgctctgtgtgtctgtgtttgtgctcagattctacactgttaaacccacgcctgtcattccctgcctgtccttcctcatcagtcggtggcctctcagtgctgtcctggcacatytccttctgccagccaagacaggaagggaacagaagtgcttcggaaagatgttgacccagatttaccctggcaagcaccaaagcaacaggagatgaccacagggcaggcagtgaggagctgccagctctgagcttgtgatggctgcgtgtcagccagtgtgggcggsygggcacccggccccgggctgtgctggtcatcccctgtctgcatggaggctgctgggcgtggtctgttttgggatgctgtaatcacactttgggacccatgcaagttgttagttttgtgtgtacagggtgtaac

SEQ ID NO: 52084 - DNA, 600 bp, Chicken  19866894302342_2
tactgaaatttgctggcttgtgctctgtgtgtctgtgtttgtgctcagattctacactgttaaacccacgcctgtcattccctgcctgtccttcctcatcagtcggtggcctctcagtgctgtcctggcacatytccttctgccagccaagacaggaagggaacagaagtgcttcggaaagatgttgacccagatttaccctggcaagcaccaaagcaacaggagatgaccacagggcaggcagtgaggagctgccagctctgagcttgtgatggctgcgtgtcagccagtgtgggcggsygggcacccggccccgggctgtgctggtcatcccctgtctgcatggaggctgctgggcgtggtctgttttgggatgctgtaatcacactttgggacccatgcaagttgttagttttgtgtgtacagggtgtaacgggactggagagccaaggatatgggrtaagataatagcatgatggggttggttgagstaggctagcatttggcaagggggagagaacttaaaatcatagaatcctggattcawtaaggttggaaaagacctmtaaaatcacctaattcaaccccatcccatccccg

SEQ ID NO: 52085 - DNA, 600 bp, Chicken  19866894302342_3
actgaaatttgctggcttgtgctctgtgtgtctgtgtttgtgctcagattctacactgttaaacccacgcctgtcattccctgcctgtccttcctcatcagtcggtggcctctcagtgctgtcctggcacatytccttctgccagccaagacaggaagggaacagaagtgcttcggaaagatgttgacccagatttaccctggcaagcaccaaagcaacaggagatgaccacagggcaggcagtgaggagctgccagctctgagcttgtgatggctgcgtgtcagccagtgtgggcggsygggcacccggccccgggctgtgctggtcatcccctgtctgcatggaggctgctgggcgtggtctgttttgggatgctgtaatcacactttgggacccatgcaagttgttagttttgtgtgtacagggtgtaacgggactggagagccaaggatatgggrtaagataatagcatgatggggttggttgagstaggctagcatttggcaagggggagagaacttaaaatcatagaatcctggattcawtaaggttggaaaagacctmtaaaatcacctaattcaaccccatcccatccccgc

SEQ ID NO: 52086 - DNA, 600 bp, Chicken  19866894302342_4
gaacagaagtgcttcggaaagatgttgacccagatttaccctggcaagcaccaaagcaacaggagatgaccacagggcaggcagtgaggagctgccagctctgagcttgtgatggctgcgtgtcagccagtgtgggcggsygggcacccggccccgggctgtgctggtcatcccctgtctgcatggaggctgctgggcgtggtctgttttgggatgctgtaatcacactttgggacccatgcaagttgttagttttgtgtgtacagggtgtaacgggactggagagccaaggatatgggrtaagataatagcatgatggggttggttgagstaggctagcatttggcaagggggagagaacttaaaatcatagaatcctggattcawtaaggttggaaaagacctmtaaaatcacctaattcaaccccatcccatccccgctaaccatgactttcagtactggttcctaagatggtgactccaccacctgcctgagcagcctgttccaatgcactgcaactctttctgagaagaaattctgcctattttttccaaaatatccaacctgagccttcctggtacaactcaaggccatcatcg

SEQ ID NO: 52087 - DNA, 600 bp, Chicken  19866894302342_5
agatttaccctggcaagcaccaaagcaacaggagatgaccacagggcaggcagtgaggagctgccagctctgagcttgtgatggctgcgtgtcagccagtgtgggcggsygggcacccggccccgggctgtgctggtcatcccctgtctgcatggaggctgctgggcgtggtctgttttgggatgctgtaatcacactttgggacccatgcaagttgttagttttgtgtgtacagggtgtaacgggactggagagccaaggatatgggrtaagataatagcatgatggggttggttgagstaggctagcatttggcaagggggagagaacttaaaatcatagaatcctggattcawtaaggttggaaaagacctmtaaaatcacctaattcaaccccatcccatccccgctaaccatgactttcagtactggttcctaagatggtgactccaccacctgcctgagcagcctgttccaatgcactgcaactctttctgagaagaaattctgcctattttttccaaaatatccaacctgagccttcctggtacaactcaaggccatcatcgcttgtcctatcactgtcacctgggagaagag

SEQ ID NO: 52088 - DNA, 600 bp, Chicken  19866894302342_6
ggagctgccagctctgagcttgtgatggctgcgtgtcagccagtgtgggcggsygggcacccggccccgggctgtgctggtcatcccctgtctgcatggaggctgctgggcgtggtctgttttgggatgctgtaatcacactttgggacccatgcaagttgttagttttgtgtgtacagggtgtaacgggactggagagccaaggatatgggrtaagataatagcatgatggggttggttgagstaggctagcatttggcaagggggagagaacttaaaatcatagaatcctggattcawtaaggttggaaaagacctmtaaaatcacctaattcaaccccatcccatccccgctaaccatgactttcagtactggttcctaagatggtgactccaccacctgcctgagcagcctgttccaatgcactgcaactctttctgagaagaaattctgcctattttttccaaaatatccaacctgagccttcctggtacaactcaaggccatcatcgcttgtcctatcactgtcacctgggagaagaggccaaccccaaacccagtctcctttcaggcagttgtagagagccataaggtctccc

SEQ ID NO: 52089 - DNA, 600 bp, Chicken  19866894302342_7
ttgtgatggctgcgtgtcagccagtgtgggcggsygggcacccggccccgggctgtgctggtcatcccctgtctgcatggaggctgctgggcgtggtctgttttgggatgctgtaatcacactttgggacccatgcaagttgttagttttgtgtgtacagggtgtaacgggactggagagccaaggatatgggrtaagataatagcatgatggggttggttgagstaggctagcatttggcaagggggagagaacttaaaatcatagaatcctggattcawtaaggttggaaaagacctmtaaaatcacctaattcaaccccatcccatccccgctaaccatgactttcagtactggttcctaagatggtgactccaccacctgcctgagcagcctgttccaatgcactgcaactctttctgagaagaaattctgcctattttttccaaaatatccaacctgagccttcctggtacaactcaaggccatcatcgcttgtcctatcactgtcacctgggagaagaggccaaccccaaacccagtctcctttcaggcagttgtagagagccataaggtctccctgggcctcctcttctccag

SEQ ID NO: 52090 - DNA, 600 bp, Chicken  19866894302350_1
aatggtttacatgccagaaactctacaaccatacccaaagacccaatttacagacagtaaaacatccaaagttacctactgacttcaaagtagcgatatggcttaatgcagggtaactccctagtaatgatttaatgattggattagcagcccaatcaactaatgcattcaactgcacgcaaacatctgtacaagaagattgctataaaaccaagtgaaaaggaagttttctggatgactttggtacaccactgaccacaacaagtttatatgcaacacaacctcaagcacaacactgtratgaagactatttcaagtgttctccttgctactgtaaagcattcaaacactgcaaacccctccaatgtattatgatacaaaatttgaatactgaaaaaaaaaaagcaggaggaggaagtgagagcatttctagtgacatctattgtccactgctaaaagtggcacccagaacaaagttaagttctccaaaacttgaaataagcaagaatgagttctgatgacaggacatcrattaaagcttcccatctaaatgcagtacctcatctttattcaaacgcattgtatctttcatcttatttc

SEQ ID NO: 52091 - DNA, 600 bp, Chicken  19866894302350_2
tggatgactttggtacaccactgaccacaacaagtttatatgcaacacaacctcaagcacaacactgtratgaagactatttcaagtgttctccttgctactgtaaagcattcaaacactgcaaacccctccaatgtattatgatacaaaatttgaatactgaaaaaaaaaaagcaggaggaggaagtgagagcatttctagtgacatctattgtccactgctaaaagtggcacccagaacaaagttaagttctccaaaacttgaaataagcaagaatgagttctgatgacaggacatcrattaaagcttcccatctaaatgcagtacctcatctttattcaaacgcattgtatctttcatcttatttctccagcatgtttctgttgagttttaatcccatcatccaatgtgcttgcaatcctttttatactgctgtcacttgtagattgaataagcacattaagtccatcatcatggccattaatgaagccattgtaacaccacaggacaagtcagacctttgtgggactcctttccatacactctattcttctgacaacactcaaagcatgttttaaaacaactttccttaatttgct

SEQ ID NO: 52092 - DNA, 599 bp, Chicken  19866894302356_1
  misc_feature (1)..(194): n is any nucleotide
nnnnnnnnnnnnnnnnnnnnnnnnnnnnnnnnnnnnnnnnnnnnnnnnnnnnnnnnnnnnnnnnnnnnnnnnnnnnnnnnnnnnnnnnnnnnnnnnnnnnnnnnnnnnnnnnnnnnnnnnnnnnnnnnnnnnnnnnnnnnnnnnnnnnnnnnnnnnnnnnnnnnnnnnnnnnnnnnnnnnnnnnnnnnnnnnnntgaattacctctgcccatatatttttgtagagtaggaacagggcattttactttaactttttattagttgttctgttgagattttttcccccattctttcttacawgtaatattgtcatgacaactgaagttagcatttcactgcttattattatttattattcagctgaacttctatgacaggatggggtktgccagtttattggttgactctatattatctttaacagtacaataatttccccagtgatttgtaatgttatcataatgatttccgttatgcacctaccattttgcttaagtagccacagaacactctgcaagcattaaaaaggtaatgaccacaaatcttgtaaacaaagtgtagctactctataaatgagtaaacaagagtagwtactacat

SEQ ID NO: 52093 - DNA, 599 bp, Chicken  19866894302356_2
  misc_feature (1)..(108): n is any nucleotide
nnnnnnnnnnnnnnnnnnnnnnnnnnnnnnnnnnnnnnnnnnnnnnnnnnnnnnnnnnnnnnnnnnnnnnnnnnnnnnnnnnnnnnnnnnnnnnnnnnnnnnnnnnnntgaattacctctgcccatatatttttgtagagtaggaacagggcattttactttaactttttattagttgttctgttgagattttttcccccattctttcttacawgtaatattgtcatgacaactgaagttagcatttcactgcttattattatttattattcagctgaacttctatgacaggatggggtktgccagtttattggttgactctatattatctttaacagtacaataatttccccagtgatttgtaatgttatcataatgatttccgttatgcacctaccattttgcttaagtagccacagaacactctgcaagcattaaaaaggtaatgaccacaaatcttgtaaacaaagtgtagctactctataaatgagtaaacaagagtagwtactacataattgctatgcaacataatataacttaattattatagtttcttgggagatatgtgcctgggaagtgtagcatatgttaatagttta

SEQ ID NO: 52094 - DNA, 600 bp, Chicken  19866894302356_3
ttcttacawgtaatattgtcatgacaactgaagttagcatttcactgcttattattatttattattcagctgaacttctatgacaggatggggtktgccagtttattggttgactctatattatctttaacagtacaataatttccccagtgatttgtaatgttatcataatgatttccgttatgcacctaccattttgcttaagtagccacagaacactctgcaagcattaaaaaggtaatgaccacaaatcttgtaaacaaagtgtagctactctataaatgagtaaacaagagtagwtactacataattgctatgcaacataatataacttaattattatagtttcttgggagatatgtgcctgggaagtgtagcatatgttaatagtttattagccctggaagaagggacaatgcttcccaaaccttttycttctatttgagttcatgctcagtctgtctgcactatgcactcgtctttctgagggaagaggtagacttgcttggaagctgacacagttaacatagattttgtaataagatatcctcctaagtagctttctccaagactaagagtattgaatttgaaagattccca

SEQ ID NO: 52095 - DNA, 600 bp, Chicken  19866894302356_4
acaataatttccccagtgatttgtaatgttatcataatgatttccgttatgcacctaccattttgcttaagtagccacagaacactctgcaagcattaaaaaggtaatgaccacaaatcttgtaaacaaagtgtagctactctataaatgagtaaacaagagtagwtactacataattgctatgcaacataatataacttaattattatagtttcttgggagatatgtgcctgggaagtgtagcatatgttaatagtttattagccctggaagaagggacaatgcttcccaaaccttttycttctatttgagttcatgctcagtctgtctgcactatgcactcgtctttctgagggaagaggtagacttgcttggaagctgacacagttaacatagattttgtaataagatatcctcctaagtagctttctccaagactaagagtattgaatttgaaagattcccagtgttctccgtaacacccttacaggtctgctaagatctgatttttcatttttgtttttactgtaaaatatactgtttgttttacaccttgcaatttctactctagggcatgctatcaggtgttttttatgttct

SEQ ID NO: 52096 - DNA, 600 bp, Chicken  19866894302371_1
ccctcaacttttccacataagagagatgatcatctctgtggccttcctccatctgcaccaacagctttaagtctttctttatgctgagggccccagacctgagcacagtactccaggtggagccacacgggcagagcagaaggcagacacttccctcaccctgctggccacacctttattatgcagctcaggagacagttggccttctgcgctgcaagcacgtactgttggcttgcatcaagctctttatccatcagaaaccccaagtccttctctgcagggctgctcccaatgaattcktcttctagtttgtggacgtctgggattgctccaactcaaatacaccacttggccttgttgaacctcactaggttctgtgggcccacttatcgagtctgtctctttgcatggcattccttccttctgttatatcaactccaccactcagcttaatgtgatcagcaaacttgttgaaggtgcactcgatcccactatttaggtcatttataaagatgttgatgaatacatcccaaggtggactcccygggggcaccactcaccaccagcctccrcctttgaccataatcctctgaaataatc

SEQ ID NO: 52097 - DNA, 600 bp, Chicken  19866894302371_2
tttatccatcagaaaccccaagtccttctctgcagggctgctcccaatgaattcktcttctagtttgtggacgtctgggattgctccaactcaaatacaccacttggccttgttgaacctcactaggttctgtgggcccacttatcgagtctgtctctttgcatggcattccttccttctgttatatcaactccaccactcagcttaatgtgatcagcaaacttgttgaaggtgcactcgatcccactatttaggtcatttataaagatgttgatgaatacatcccaaggtggactcccygggggcaccactcaccaccagcctccrcctttgaccataatcctctgaaataatccaaccaattcctcatccactgaaaccactcttcaaatccatatcttttcaatataaaccttaacaaaagaaatgtatttcagattcattcaaaactaattacctattttacacttacacaattcttgtaagcttatctttgcattctaaactttcagtgcttgtgaatcttattcttctaataattgttcttcatacaatttcataattacagtaaatgagttcaaaaataattcctctttttaa

SEQ ID NO: 52098 - DNA, 600 bp, Chicken  19866894302371_3
ctctgcagggctgctcccaatgaattcktcttctagtttgtggacgtctgggattgctccaactcaaatacaccacttggccttgttgaacctcactaggttctgtgggcccacttatcgagtctgtctctttgcatggcattccttccttctgttatatcaactccaccactcagcttaatgtgatcagcaaacttgttgaaggtgcactcgatcccactatttaggtcatttataaagatgttgatgaatacatcccaaggtggactcccygggggcaccactcaccaccagcctccrcctttgaccataatcctctgaaataatccaaccaattcctcatccactgaaaccactcttcaaatccatatcttttcaatataaaccttaacaaaagaaatgtatttcagattcattcaaaactaattacctattttacacttacacaattcttgtaagcttatctttgcattctaaactttcagtgcttgtgaatcttattcttctaataattgttcttcatacaatttcataattacagtaaatgagttcaaaaataattcctctttttaaatgaggaaacgagtccctctgacaaag

SEQ ID NO: 52099 - DNA, 600 bp, Chicken  19866894302384_1
tggccatgtttttttttaatgcacccccaggataccattggccttcttgaccacaggggcacactgctggctcacagccaacctgctgttggtccttctccacagggctcctctccagcaggtcatcccctaacctgtactgattcatgcagttattcctcccgggctgcaaggctctacacttgttcttgttgaacctcaccaggttcctctctgcccagctttgcagcccattcaggtcttgctgaatggtagcacagctttctggtgtgtcagccactcctcccagctgctcacttycctctcctrtgaaakcacatctgttgttttctttgtaggacataagggaagtagtcttcaggtgagatgtgtctactttgaagcttaccttccggtttaacacrtggtccaagtatctttgtgtatgcacattctggaactgcagggttgtatgcgtgcacaggaaagcaaaggragcagagctggggtgttatggagtgagatgtttgctcctagcagcrattgaggccccagtgggtgcctgatgtaactgagagccacaaagcactaatatgcagagcgtgctgtgctacttgcttg

SEQ ID NO: 52100 - DNA, 600 bp, Chicken  19866894302384_2
ttttttttaatgcacccccaggataccattggccttcttgaccacaggggcacactgctggctcacagccaacctgctgttggtccttctccacagggctcctctccagcaggtcatcccctaacctgtactgattcatgcagttattcctcccgggctgcaaggctctacacttgttcttgttgaacctcaccaggttcctctctgcccagctttgcagcccattcaggtcttgctgaatggtagcacagctttctggtgtgtcagccactcctcccagctgctcacttycctctcctrtgaaakcacatctgttgttttctttgtaggacataagggaagtagtcttcaggtgagatgtgtctactttgaagcttaccttccggtttaacacrtggtccaagtatctttgtgtatgcacattctggaactgcagggttgtatgcgtgcacaggaaagcaaaggragcagagctggggtgttatggagtgagatgtttgctcctagcagcrattgaggccccagtgggtgcctgatgtaactgagagccacaaagcactaatatgcagagcgtgctgtgctacttgcttgggttattct

SEQ ID NO: 52101 - DNA, 600 bp, Chicken  19866894302384_3
ttaatgcacccccaggataccattggccttcttgaccacaggggcacactgctggctcacagccaacctgctgttggtccttctccacagggctcctctccagcaggtcatcccctaacctgtactgattcatgcagttattcctcccgggctgcaaggctctacacttgttcttgttgaacctcaccaggttcctctctgcccagctttgcagcccattcaggtcttgctgaatggtagcacagctttctggtgtgtcagccactcctcccagctgctcacttycctctcctrtgaaakcacatctgttgttttctttgtaggacataagggaagtagtcttcaggtgagatgtgtctactttgaagcttaccttccggtttaacacrtggtccaagtatctttgtgtatgcacattctggaactgcagggttgtatgcgtgcacaggaaagcaaaggragcagagctggggtgttatggagtgagatgtttgctcctagcagcrattgaggccccagtgggtgcctgatgtaactgagagccacaaagcactaatatgcagagcgtgctgtgctacttgcttgggttattctttttaa

SEQ ID NO: 52102 - DNA, 600 bp, Chicken  19866894302384_4
gggctcctctccagcaggtcatcccctaacctgtactgattcatgcagttattcctcccgggctgcaaggctctacacttgttcttgttgaacctcaccaggttcctctctgcccagctttgcagcccattcaggtcttgctgaatggtagcacagctttctggtgtgtcagccactcctcccagctgctcacttycctctcctrtgaaakcacatctgttgttttctttgtaggacataagggaagtagtcttcaggtgagatgtgtctactttgaagcttaccttccggtttaacacrtggtccaagtatctttgtgtatgcacattctggaactgcagggttgtatgcgtgcacaggaaagcaaaggragcagagctggggtgttatggagtgagatgtttgctcctagcagcrattgaggccccagtgggtgcctgatgtaactgagagccacaaagcactaatatgcagagcgtgctgtgctacttgcttgggttattctttttaaatagagattaagctgttttgttgtactgcttctccatcgcccaaatcccatgacagttgctggagtttcttttgttttgaagatgtaag

SEQ ID NO: 52103 - DNA, 600 bp, Chicken  19866894302384_5
tctacacttgttcttgttgaacctcaccaggttcctctctgcccagctttgcagcccattcaggtcttgctgaatggtagcacagctttctggtgtgtcagccactcctcccagctgctcacttycctctcctrtgaaakcacatctgttgttttctttgtaggacataagggaagtagtcttcaggtgagatgtgtctactttgaagcttaccttccggtttaacacrtggtccaagtatctttgtgtatgcacattctggaactgcagggttgtatgcgtgcacaggaaagcaaaggragcagagctggggtgttatggagtgagatgtttgctcctagcagcrattgaggccccagtgggtgcctgatgtaactgagagccacaaagcactaatatgcagagcgtgctgtgctacttgcttgggttattctttttaaatagagattaagctgttttgttgtactgcttctccatcgcccaaatcccatgacagttgctggagtttcttttgttttgaagatgtaagctgcctccatgggtgggcagaggctattttaaaatgtattaacatgtggatttatttcatgctcaagtata

SEQ ID NO: 52104 - DNA, 600 bp, Chicken  19866894302384_6
ctttgcagcccattcaggtcttgctgaatggtagcacagctttctggtgtgtcagccactcctcccagctgctcacttycctctcctrtgaaakcacatctgttgttttctttgtaggacataagggaagtagtcttcaggtgagatgtgtctactttgaagcttaccttccggtttaacacrtggtccaagtatctttgtgtatgcacattctggaactgcagggttgtatgcgtgcacaggaaagcaaaggragcagagctggggtgttatggagtgagatgtttgctcctagcagcrattgaggccccagtgggtgcctgatgtaactgagagccacaaagcactaatatgcagagcgtgctgtgctacttgcttgggttattctttttaaatagagattaagctgttttgttgtactgcttctccatcgcccaaatcccatgacagttgctggagtttcttttgttttgaagatgtaagctgcctccatgggtgggcagaggctattttaaaatgtattaacatgtggatttatttcatgctcaagtataaccatttctgtgccacagccattgtgcctacacattctttggtaga

SEQ ID NO: 52105 - DNA, 600 bp, Chicken  19866894302384_7
gtgaggccctggcacagctgcccagagagctgtggtgccccatccctggaggtgctcaaggccatgttggatgggccctgggcagctgagctggtgggaggcaaccagcccatggcagaggttgggaccgggtgatccttacatgtcccttccaacccaaaccactctatgattcttctcttctgttggaaatacttacatgctgtaattaggcttggctgctttaataaactggatgaaatatctccactgtggtaaagggcacattagtgttatctgtcttctggcccaacacactgyttgtgttcgattcgcctgaactgacagcgagcagagcccgagtgtggccaagatacaatagatggagcacagctcccacttagtaggagaaaaacctcctgcagagaagtaaaatcatcctgaaagttttccagcctttgtggaaaagatgtatttttggctgcggctctaagggaactactgttgagcttgaagctaagcccagataccaatcttggcaaaaacaaaagcatcaaactgggtaagaggggaaaaaaatccaacacaagaagtgtgtggtcttttctaatgggatgatct

SEQ ID NO: 52106 - DNA, 600 bp, Chicken  19866894302393_1
acagactctaactgtgctttattaaaatgctttcagacatcattttgcaagatgcacctaagcggaaaaatcttaaatctagtggatgatcagattaaagaatctgctgaggcagaatgtctccctcccactactcacatctctgaaacaaggaaaggggtcccttgcagtcccagttaccagttcagcagctttcagcacttcccccaagttcagcaaacatcagacaactctctctcaggtctgtgccaagtctttcatcactcccaaagtctggcttggcaagcagttccctgaacwgctgaaagcaggatctccacttgctgcacatctcactagctgaccacaacctccctcggcctgaacatgctaggaaagctgcaattccctcctcttctcctttctagagaaagtataacatggtaaagagcacagagaagccaggacactgtaaacagatcatcctccctttccagagacaacttaacgtggcacacactgttcagcttgcctgatcagcaaaacacatctcataccayccttaacacactactctaaactctgaacactcacttaacccattcttgaacatttagcctc

SEQ ID NO: 52107 - DNA, 577 bp, Chicken  19866894302393_2
aggtctgtgccaagtctttcatcactcccaaagtctggcttggcaagcagttccctgaacwgctgaaagcaggatctccacttgctgcacatctcactagctgaccacaacctccctcggcctgaacatgctaggaaagctgcaattccctcctcttctcctttctagagaaagtataacatggtaaagagcacagagaagccaggacactgtaaacagatcatcctccctttccagagacaacttaacgtggcacacactgttcagcttgcctgatcagcaaaacacatctcataccayccttaacacactactctaaactctgaacactcacttaacccattcttgaacatttagcctcttatactttcaaacacgcttatgtaaactctggatgtcagtttgcatgataattgcttaactctgaactttatttcccaggtttcctatgcaataaataaaagttatatcaccagttcagaaatgagattcaagtagatgctggaaccctgttttcagccagcatttctcatcagcaaattggaatggtcttacattcagtgcactcatttttcta

SEQ ID NO: 52108 - DNA, 600 bp, Chicken  19866894302397_1
aaacccatgtagcctggtggcttgctagtctattttcaattatctggggtgcagagagaagaaggcattaatattgctgaggatgacatagcaaattactactgcttcctaacctttttaaattgctaacactgttgtaatctgtaattacagaaatcagtgtgagaattgtggcacagtataattatctttcctgatactttattgctgtatgaattattaatcaaaatcagtcttgtatagtatttgcagcaactaagaagaataatgtataattaaatttcattatttctatttttrtgctggtgttttatgatgttgtaattgataattaattggttaaaaattcacacagttcttaggagtttcgtatgactatgactgcttggtattcagcatgtattaattgaataatgggctcactgaggagacctttgtatatagtcttctgtcattacagtgagctctcaaaaatggtgaattaatcattaggcctttcaatagtttctttttaaaggaaagcggtgacaatataatcatacactttgttgttatatctataattgagagatcataataaccaattataaggatggtcat

SEQ ID NO: 52109 - DNA, 599 bp, Chicken  19866894302400_1
  misc_feature (1)..(231): n is any nucleotide
nnnnnnnnnnnnnnnnnnnnnnnnnnnnnnnnnnnnnnnnnnnnnnnnnnnnnnnnnnnnnnnnnnnnnnnnnnnnnnnnnnnnnnnnnnnnnnnnnnnnnnnnnnnnnnnnnnnnnnnnnnnnnnnnnnnnnnnnnnnnnnnnnnnnnnnnnnnnnnnnnnnnnnnnnnnnnnnnnnnnnnnnnnnnnnnnnnnnnnnnnnnnnnnnnnnnnnnnnnnnnnnnnnnnnnncccactgcccacagaggaacagctttcccctgggctgcctcaggacggccaactgctcctgcgtgggtyggggagaagaggaaaagctgcgttcctctgaaagctgtttggggaggaagtcttggcctcggcaggcaacaaaaagagaggcagcaaatgccccgtgagaaccgaaccaaagggactggctgtggagatcagcacctgttggagcgggcagccaaagcagtgccagcagacaggaggcagccacgtgcgagcagggatcgaatcagagcaaaggaaagcgccagcatgagagctgggctcccagggagctgtttgcagttagcttgtacttgcaccagctcagcagttctctcttctaa

SEQ ID NO: 52110 - DNA, 600 bp, Chicken  19866894302400_2
cagggagctgtttgcagttagcttgtacttgcaccagctcagcagttctctcttctaacagcgttcccatggaatctagtagctcactttgaaagtcaaccagtttttaacgactggctttggcagccagcgtctgaattattcagtataacctgcccagagttagcccaggagatctggcccaagactgaaagtttcccttgcttttaagtctgacttctctggataccagagatgcgatcaattaggcccggagatcaaagtgcggtggggttgaagcaggcatgtggttttgcccgkcaggatttggaagagggaagaaagcacatctccctggacactttgggaggcgcctgtgggagctgcacgagggctgtgccgtgcagcagctctcccatccaggccagggagccctgactgggggtcagaccgcccagagcacatccctgaagccagctctccaacagagcccattttatggccgcgggaaactctgggagagaaaccaagtgacagctggggcccgtccctgctatctgaagagggaagcttgccttgtgcgtgtgggctcgagcaaatacacgtcacgaagcctcaaat

SEQ ID NO: 52111 - DNA, 600 bp, Chicken  19866894302406_1
attcaatcagattgcatgtcagattaacggcttgctcagagggcagaggctgagtatcagtgtctcatggtccggggcaggaggatgtggaggacatctgcaccgtgcaaatcctcccggaggatttcccactcagaggtgttgagtaggttgccatttattttttaaaaacattgtgcacactggtgaatctgcgtccttttaagagggaagaagagaaagcacaaggatcaactttcatatgcattcaacggatgcttctcttgtcagaaagatgtcactcagaaaagacagctttcwttaaagactcgcttgttttctgcttccatcactcccccttcaaaacaaacagaagattagttatatatatatattttaatttaaatccactttcatgatagattaaataatcttcctatgatgattaaatcagagtctgagcatttctggaggatgctttgaagtgtgagaaaagcttttctggcatgctgtcaccgttccttctcttctgtaactattatctctcttcatacaaaaaaataccaccccagtcagggattgaactctgccaagtaatcttctctatccactacctgtcta

SEQ ID NO: 52112 - DNA, 600 bp, Chicken  19866894302406_2
agaagattagttatatatatatattttaatttaaatccactttcatgatagattaaataatcttcctatgatgattaaatcagagtctgagcatttctggaggatgctttgaagtgtgagaaaagcttttctggcatgctgtcaccgttccttctcttctgtaactattatctctcttcatacaaaaaaataccaccccagtcagggattgaactctgccaagtaatcttctctatccactacctgtctaagttatctgcccatttcagcgcatatctggagcacaatagctgcaacccrtttggaaagctctctgatagtgcagtgatataaagtcmgatataaaggcttatctgactgcataattagtgacagaaaacttgcccaattattgatgcccaagttatcttttactgtttctgttcttagcatgcaaagtatccacatctgcacaaaccttgggtacaactgttttaaatgtctagtcttgctttcctataagaaaataggtgaactggaagacagtccttgacagcagcatagtgacagaagccataatcaaaataaaatagtcttcatgcaatacctaattagcatgat

SEQ ID NO: 52113 - DNA, 600 bp, Chicken  19866894302406_3
actttcatgatagattaaataatcttcctatgatgattaaatcagagtctgagcatttctggaggatgctttgaagtgtgagaaaagcttttctggcatgctgtcaccgttccttctcttctgtaactattatctctcttcatacaaaaaaataccaccccagtcagggattgaactctgccaagtaatcttctctatccactacctgtctaagttatctgcccatttcagcgcatatctggagcacaatagctgcaacccrtttggaaagctctctgatagtgcagtgatataaagtcmgatataaaggcttatctgactgcataattagtgacagaaaacttgcccaattattgatgcccaagttatcttttactgtttctgttcttagcatgcaaagtatccacatctgcacaaaccttgggtacaactgttttaaatgtctagtcttgctttcctataagaaaataggtgaactggaagacagtccttgacagcagcatagtgacagaagccataatcaaaataaaatagtcttcatgcaatacctaattagcatgatatgtttgacactgttatctaaaggcttaattcagtaat

SEQ ID NO: 52114 - DNA, 600 bp, Chicken  19866894302407_1
tcttccagtgtgacctatggttaggagagatacttattctttaccaactggtccaaagaagaaaaaaattaagaagtctttatggtaacaacagtttctacagggtactgtgacctgttgacagtcagacctccacattgccccacatcagcccagtgttgatatgagtccaccactctctgagtccctctagagaaatcattaacaattagtgacaattggtaaggttttttaagttgcactttatacatggtggtgggataatgcagtgtacagaacatgtttgctctgagccatgcycttgtgcaggctgcaggcaggccaaggtgagccagagcccctcacatgctgagtgttccactgggtgtagatgagcagcagcttcaggagatgctctgtaaggcatgtgctggagtgatgggatccacagagcagggctaggcagacagagagggagaatgaggtgacatatgagtggttacccttacaaaactgttaaggacgttgcatatcaaccttaccgaatgctgtagtgcattgaagtaattttatttgcatatccgagttaaatttggctagtttctaaggaatattgctata

SEQ ID NO: 52115 - DNA, 600 bp, Chicken  19866894302407_2
gagcagggctaggcagacagagagggagaatgaggtgacatatgagtggttacccttacaaaactgttaaggacgttgcatatcaaccttaccgaatgctgtagtgcattgaagtaattttatttgcatatccgagttaaatttggctagtttctaaggaatattgctataggcagtatgcacgtaccacctggaacatcatctcctcccattataaacctctaatgatggcttataaacagaaacatggtcaacctagaaataagctgtcacacaaaatgctgacatctctaaatgtcragtgtatccgagggatttttttctcattaaaaatactgcatttgtttttctcagaggaagtagaagtcataagaaaaatcaacattatatgacctaatctttctcattttcatttttaattcccctagcatggggctagaattgctccattccttgacaccaagtgccatgacaactaccagatccaccaggtctctgcacagccactctgctcattacctggggataaatgtatgtaccaaacactcaaagtctttataaacctattaaatataaataactaatatgatttgacccaga

SEQ ID NO: 52116 - DNA, 599 bp, Chicken  19866894302411_1
  misc_feature (1)..(40): n is any nucleotide
nnnnnnnnnnnnnnnnnnnnnnnnnnnnnnnnnnnnnnnnctgcaaaaacccaagcagtaaaatctttcctgatgcgactgtctgctgcgagtgaactgcttttggtgctatcattaaaccttggctttggtttccctccccgcagggcgacatccagcagctgctgatcgtggccgacccccgggcagcccacgactactgtgagcactacagccccgactgtgacaccgccgtccccgatgctccacaatcccaggaccccaaccaggatgaatacgtgagtaggagctcatggctgyaggtggggatgctctgggggcagcagtatcgggcttcacgccgtggttgcaaagcttagcttgcttgtttcaatctgaagggacctgtaaaggccacgtgttcccactccttgcaatgaacaaggacacccacagctccactgggtgccctccagtgtgacctgatggggcaccaccacctctctgtgcaacctkcaccagtgctgcactgcccttataggaaaaaacttmttccttatatccagccttcctcctgtcccacttgcctgtaaaccctttgtaatgcagtggccaaagca

SEQ ID NO: 52117 - DNA, 593 bp, Chicken  19866894302411_2
actactgtgagcactacagccccgactgtgacaccgccgtccccgatgctccacaatcccaggaccccaaccaggatgaatacgtgagtaggagctcatggctgyaggtggggatgctctgggggcagcagtatcgggcttcacgccgtggttgcaaagcttagcttgcttgtttcaatctgaagggacctgtaaaggccacgtgttcccactccttgcaatgaacaaggacacccacagctccactgggtgccctccagtgtgacctgatggggcaccaccacctctctgtgcaacctkcaccagtgctgcactgcccttataggaaaaaacttmttccttatatccagccttcctcctgtcccacttgcctgtaaaccctttgtaatgcagtggccaaagcagaggttgtttttaggatcctgcagtcctggtatcctgccctcagggctttcccttcccttctgtgctcctccagcaaacgcagtgcaggtttgctcagagctcagaaccttgcagatttcagagcctgagctgatggaagcactgaccttcccaggctgcccaaaccccatccaaaatgggcacctgtt

SEQ ID NO: 52118 - DNA, 557 bp, Chicken  19866894302411_3
ccgtccccgatgctccacaatcccaggaccccaaccaggatgaatacgtgagtaggagctcatggctgyaggtggggatgctctgggggcagcagtatcgggcttcacgccgtggttgcaaagcttagcttgcttgtttcaatctgaagggacctgtaaaggccacgtgttcccactccttgcaatgaacaaggacacccacagctccactgggtgccctccagtgtgacctgatggggcaccaccacctctctgtgcaacctkcaccagtgctgcactgcccttataggaaaaaacttmttccttatatccagccttcctcctgtcccacttgcctgtaaaccctttgtaatgcagtggccaaagcagaggttgtttttaggatcctgcagtcctggtatcctgccctcagggctttcccttcccttctgtgctcctccagcaaacgcagtgcaggtttgctcagagctcagaaccttgcagatttcagagcctgagctgatggaagcactgaccttcccaggctgcccaaaccccatccaaaatgggcacctgtt

SEQ ID NO: 52119 - DNA, 600 bp, Chicken  19866894302412_1
ccagaaaagcctctcaagcagggctgaactgcacagtgctggcacagctctgcagcacaggccccatctgcaggaggcgatcccaggcagtgcggtgctgcaggtgggtgctgtgagggcaggcagtccctgtctgatgcaccacacacaccgggtttcaccccacctctcggaacaccaatggctttgggctcagtctccaccacattacggtcctggtgcaactgaccactcaagcattaaatcacaaagagctctgttgctcttcagagaaagaccaccagacactcatttaccttrtgtcctcaggatgaagctgccccaccagaagattacacacatggaatcacagcattgctcaggttggaaaagaccctaaagatcatcaagtccaaccacaacctgaccatactaccctaactctaacaaccctccgctcaatcacgtccctgagcactgcatccagacgttttgtagacacattcagggatggtgactcaaccatctccctggggagcctattccagtgcttaacaatcctttctgtaaagttcttcctgatatccaacctatacctccagtggttcaacttgaggccat

SEQ ID NO: 52120 - DNA, 600 bp, Chicken  19866894302416_1
tcaatttagtgcagacatttcgtgaatgtaggtcaactctatcagttgttttagcttaaaaaagagaatgttctgaaataaaaagcaattattaggggatacatgcagttttatcgggggggaaaaaagttgaaagaaacttcattttcagttcaacaaaaatctttcttctgaattgtggcaatttacaagtttgtttttcatttattggaaatgctttttaaaatatatgctttaggttagagtgaagtaaatctcttttccgatcttccagaactgcaagcaaagcaaaaaaaaaamcatcacttcttcatgcacttttgctcatgagggagtgcatctttgaaaccttcccagcmtattttcccagctgctaggacctcagaaggctctgataggattcagggtgacgtccagccagctagacctttacctgtgctttctcaggttcgcttacagtatctcttttctygctattcatcttattcagtataggagcatgctcaaagcagtgattagtacgcacaaggaaaagcttagaggtgacatatgtctaacatattgcctcrtgcctctttccatgtcctcaaaacatggctt

SEQ ID NO: 52121 - DNA, 600 bp, Chicken  19866894302416_2
aaaagagaatgttctgaaataaaaagcaattattaggggatacatgcagttttatcgggggggaaaaaagttgaaagaaacttcattttcagttcaacaaaaatctttcttctgaattgtggcaatttacaagtttgtttttcatttattggaaatgctttttaaaatatatgctttaggttagagtgaagtaaatctcttttccgatcttccagaactgcaagcaaagcaaaaaaaaaamcatcacttcttcatgcacttttgctcatgagggagtgcatctttgaaaccttcccagcmtattttcccagctgctaggacctcagaaggctctgataggattcagggtgacgtccagccagctagacctttacctgtgctttctcaggttcgcttacagtatctcttttctygctattcatcttattcagtataggagcatgctcaaagcagtgattagtacgcacaaggaaaagcttagaggtgacatatgtctaacatattgcctcrtgcctctttccatgtcctcaaaacatggcttgcaaatgagagagatgggaaagactggagcaagtagcagctgtgtgaatttcaatctgc

SEQ ID NO: 52122 - DNA, 600 bp, Chicken  19866894302416_3
gaattgtggcaatttacaagtttgtttttcatttattggaaatgctttttaaaatatatgctttaggttagagtgaagtaaatctcttttccgatcttccagaactgcaagcaaagcaaaaaaaaaamcatcacttcttcatgcacttttgctcatgagggagtgcatctttgaaaccttcccagcmtattttcccagctgctaggacctcagaaggctctgataggattcagggtgacgtccagccagctagacctttacctgtgctttctcaggttcgcttacagtatctcttttctygctattcatcttattcagtataggagcatgctcaaagcagtgattagtacgcacaaggaaaagcttagaggtgacatatgtctaacatattgcctcrtgcctctttccatgtcctcaaaacatggcttgcaaatgagagagatgggaaagactggagcaagtagcagctgtgtgaatttcaatctgcccaaaagaccacttatatctctggtttcagaaaacggtgtggggggtaagatgatgggggtgaatcctgtcctaaactcacttggagtgcaggaaacggctcagatttaagat

SEQ ID NO: 52123 - DNA, 600 bp, Chicken  19866894302416_4
tccagaactgcaagcaaagcaaaaaaaaaamcatcacttcttcatgcacttttgctcatgagggagtgcatctttgaaaccttcccagcmtattttcccagctgctaggacctcagaaggctctgataggattcagggtgacgtccagccagctagacctttacctgtgctttctcaggttcgcttacagtatctcttttctygctattcatcttattcagtataggagcatgctcaaagcagtgattagtacgcacaaggaaaagcttagaggtgacatatgtctaacatattgcctcrtgcctctttccatgtcctcaaaacatggcttgcaaatgagagagatgggaaagactggagcaagtagcagctgtgtgaatttcaatctgcccaaaagaccacttatatctctggtttcagaaaacggtgtggggggtaagatgatgggggtgaatcctgtcctaaactcacttggagtgcaggaaacggctcagatttaagatgaccctcaagtgtcatttgaaccacaaagtgaaggatgccctattcttgcactgcttttctcatctaagggaaatgggaagctggagaagagtgtga

SEQ ID NO: 52124 - DNA, 600 bp, Chicken  19866894302425_1
aagggaccttcttagtttttgcaatgtgaaaaaaatacatatatcaacagaataactcaaaattctatttgcagtcggactatgcattaattgtcccttgacccttttgagtgcctgacagctaaataacattctaatcatttgtttcagcacttcaagatgaaattttattcattcaatacctgcagaagataaaagcagagatttgatttggatccatacaattaggaagcgtatcaaggaaaccaatcagttcctccttcttatcttgtccctttcttcatggaaaagaaaagagcrgttaagaaataaaggtctgattgaatagygtattaactgaacacaaagaggaagtctgggaagtagtcagctggcagtccattactgcaggcagttactacaaatttcagctggtggggctgaagtttaaagatgtgacacaattctgagcatgatcaaactccctaccataatagatcccactgccagaatggttaatgtgtgttgtgcattgggaaaggaaatgagggaggggaacacacagtccyaacagcgatggccgtagcagcttcctcagcaaagcaatgccaactaatggta

SEQ ID NO: 52125 - DNA, 600 bp, Chicken  19866894302425_2
aaaaaatacatatatcaacagaataactcaaaattctatttgcagtcggactatgcattaattgtcccttgacccttttgagtgcctgacagctaaataacattctaatcatttgtttcagcacttcaagatgaaattttattcattcaatacctgcagaagataaaagcagagatttgatttggatccatacaattaggaagcgtatcaaggaaaccaatcagttcctccttcttatcttgtccctttcttcatggaaaagaaaagagcrgttaagaaataaaggtctgattgaatagygtattaactgaacacaaagaggaagtctgggaagtagtcagctggcagtccattactgcaggcagttactacaaatttcagctggtggggctgaagtttaaagatgtgacacaattctgagcatgatcaaactccctaccataatagatcccactgccagaatggttaatgtgtgttgtgcattgggaaaggaaatgagggaggggaacacacagtccyaacagcgatggccgtagcagcttcctcagcaaagcaatgccaactaatggtatggaagaacataagtacttcttggtgaac

SEQ ID NO: 52126 - DNA, 600 bp, Chicken  19866894302425_3
atcagttcctccttcttatcttgtccctttcttcatggaaaagaaaagagcrgttaagaaataaaggtctgattgaatagygtattaactgaacacaaagaggaagtctgggaagtagtcagctggcagtccattactgcaggcagttactacaaatttcagctggtggggctgaagtttaaagatgtgacacaattctgagcatgatcaaactccctaccataatagatcccactgccagaatggttaatgtgtgttgtgcattgggaaaggaaatgagggaggggaacacacagtccyaacagcgatggccgtagcagcttcctcagcaaagcaatgccaactaatggtatggaagaacataagtacttcttggtgaactgggtgtaggaagaaagaggtttggaatggatttatgagcagaacagaactgcattcccagtgctcggtgctgcacaatgcctatcttatgattgacttcaacaggctctaggctaaccccctgggctcagtgctagcatgagatcacttttagcatgcttctggagagcaccttccaactgagcttcatttcaaaggaacttcttcttataccccgag

SEQ ID NO: 52127 - DNA, 600 bp, Chicken  19866894302426_1
ccatttaccgtgtggaaaagcccctgcttagggcttctgcatttctgcacccagggtgggaggtggggctgcagcacagtttcaagacagtcatagtcagataagtacaacatcagctaaacgtgccgactgacctcgatgggcagttaagtatcaaaacccagttatgaatgcgttccttttcattctttccccttgaatacctattcagctgatgtcagcctaacaaaactctgtccagaaggtaagaaaagaaacaggaaaaaccacatcacatccctgcccccacgtttttgtccsagtgcccatcgggcagcagcaatttggtcccagcggactcaagcggcaaggcaagtggttagggaaagtaaggttgtgtggcagtgagaaagccttttagtgagaaatgaggccagttaatgagatgaagttatctggggatttctgagccagtcacagaatgcttccgtccctgatgtacttacctgcattatcatctttgcttgtgacctttacagggtgctatcataagcagtttcataaaccaaacaggacctggattctgaggtgcagccatcactgagccagcgagactgtgaa

SEQ ID NO: 52128 - DNA, 599 bp, Chicken  19866894302429_1
  misc_feature (1)..(120): n is any nucleotide
nnnnnnnnnnnnnnnnnnnnnnnnnnnnnnnnnnnnnnnnnnnnnnnnnnnnnnnnnnnnnnnnnnnnnnnnnnnnnnnnnnnnnnnnnnnnnnnnnnnnnnnnnnnnnnnnnnnnnnnntgggaagtataagcagcctgctagaccgagatcaagcagagaatgacttctgcagatttagaggaattcattggtggagccgtacttggcatagaggagttaatgcactggagattctgagtgccatccgctagatgggactctttcttagggaggaagagagctattaaaattattttyggtggtgaaaagtaactatagaattggtcatgaaaggatgagagtagaagaaagrtgcatgaaaaaaagcccaaagggatcattgttgctcaaactggaagaagcttcactacctttttctttctttaaaacaactaaaccagaagcattctattatatatgtatgaaaaagctaggaatgcagatccccacaaaggtggaagatatattttcagtcatttggacttgcctgagaatgtgttaatttattttattttgtccagaggcaaagaaaggcactgcctgtagtaggttatcct

SEQ ID NO: 52129 - DNA, 599 bp, Chicken  19866894302429_2
  misc_feature (1)..(65): n is any nucleotide
nnnnnnnnnnnnnnnnnnnnnnnnnnnnnnnnnnnnnnnnnnnnnnnnnnnnnnnnnnnnnnnnntgggaagtataagcagcctgctagaccgagatcaagcagagaatgacttctgcagatttagaggaattcattggtggagccgtacttggcatagaggagttaatgcactggagattctgagtgccatccgctagatgggactctttcttagggaggaagagagctattaaaattattttyggtggtgaaaagtaactatagaattggtcatgaaaggatgagagtagaagaaagrtgcatgaaaaaaagcccaaagggatcattgttgctcaaactggaagaagcttcactacctttttctttctttaaaacaactaaaccagaagcattctattatatatgtatgaaaaagctaggaatgcagatccccacaaaggtggaagatatattttcagtcatttggacttgcctgagaatgtgttaatttattttattttgtccagaggcaaagaaaggcactgcctgtagtaggttatcctgcagaaatatgatcatcaaagtattgcttatgttgattcctgctgagaaattaca

SEQ ID NO: 52130 - DNA, 600 bp, Chicken  19866894302433_1
caatgtgaagcaacagacaggaatgtacgaggcaggataatgtctaaataaagggcctcgtggccttctaggcaaacccttcctttccgcaggtgaacttttgccatcgttcctactcatgaattcttaatcttcctattaagaagcacagacattgtcctctctctgccagcacttggagcttatttacactcttttagctctgtttgcttttagtcttactgagagccgtgacttaattggccctcatgcaagtgcaagctgaaaatctgtctctgttctgagccccagctcctttcyaggttacttaagctaacagggttttgtctttccttctaatctggctaaccctcctgactgggctgcagatgagggaaagaggctgaccacgaaatrctgagaagtgaactacctctggcttccttcgagtccttctcctggtcccaaaggaatgygtgcaggaggccaaatgtctcaggaagcagctgccacactaaatacttctagctggggggtcggtcctgagatggtgggaaagctgaactggtttggaaaatgttagcaaaatcgctgtcgaaaccaacttagcaaagagctgcc

SEQ ID NO: 52131 - DNA, 600 bp, Chicken  19866894302433_2
acttttgccatcgttcctactcatgaattcttaatcttcctattaagaagcacagacattgtcctctctctgccagcacttggagcttatttacactcttttagctctgtttgcttttagtcttactgagagccgtgacttaattggccctcatgcaagtgcaagctgaaaatctgtctctgttctgagccccagctcctttcyaggttacttaagctaacagggttttgtctttccttctaatctggctaaccctcctgactgggctgcagatgagggaaagaggctgaccacgaaatrctgagaagtgaactacctctggcttccttcgagtccttctcctggtcccaaaggaatgygtgcaggaggccaaatgtctcaggaagcagctgccacactaaatacttctagctggggggtcggtcctgagatggtgggaaagctgaactggtttggaaaatgttagcaaaatcgctgtcgaaaccaacttagcaaagagctgccacccagctcatgtttcaggggcttagaggagataaggaaaccccctaacagtgcagaggcacggagcttttagcacttgctaagtcaaatattgtg

SEQ ID NO: 52132 - DNA, 600 bp, Chicken  19866894302433_3
tgtcctctctctgccagcacttggagcttatttacactcttttagctctgtttgcttttagtcttactgagagccgtgacttaattggccctcatgcaagtgcaagctgaaaatctgtctctgttctgagccccagctcctttcyaggttacttaagctaacagggttttgtctttccttctaatctggctaaccctcctgactgggctgcagatgagggaaagaggctgaccacgaaatrctgagaagtgaactacctctggcttccttcgagtccttctcctggtcccaaaggaatgygtgcaggaggccaaatgtctcaggaagcagctgccacactaaatacttctagctggggggtcggtcctgagatggtgggaaagctgaactggtttggaaaatgttagcaaaatcgctgtcgaaaccaacttagcaaagagctgccacccagctcatgtttcaggggcttagaggagataaggaaaccccctaacagtgcagaggcacggagcttttagcacttgctaagtcaaatattgtgtagggtaaataagcaaagcttcggtgcttcattactttggaagtaaggtgatttttttt

SEQ ID NO: 52133 - DNA, 599 bp, Chicken  19866894302437_1
  misc_feature (1)..(42): n is any nucleotide
nnnnnnnnnnnnnnnnnnnnnnnnnnnnnnnnnnnnnnnnnnatcatccagtccaactgttcacctatcatcagtatttcccaataaaccacatccctcagtacaacatctgaatgtttcttgaacacctccaggggcagtgactccaccacctccctgggcagcccatcccaatgcctgaccactctctcagagaagaagcattttctaacatccaaactgaatctcccctggcacaacttgaggccattccccctactcctatccctagttacgtgagagaagaggctgactttcacstcaccataacctcctttcaggtggttgtagagagcagtcgtcacccccgagcctcctccagattaaacaatcccagctctctcagctgctcctcataaaacttgcactccagacccctcacagcttcactgcccttctctggacatgctccagagcctcaatgtctttcttgtggagagggacccaaaactgaacacagaactgacagcacagcctcaccagagctgaatacaggatgatcacttccctgctcctgctggcaacactatttctgatacaagccaggatgccattggcct

SEQ ID NO: 52134 - DNA, 599 bp, Chicken  19866894302441_1
  misc_feature (1)..(85): n is any nucleotide
nnnnnnnnnnnnnnnnnnnnnnnnnnnnnnnnnnnnnnnnnnnnnnnnnnnnnnnnnnnnnnnnnnnnnnnnnnnnnnnnnnnnnaactacatatagactacccagatataatcagagataaatatacaagtcttaacttactaaaaaaatgattagtattactagaatattatcataatattatcatagaatattatcattagaatataatgaaagtattgagcagatattaagaaatggttaaagcattttacatgtaagtatttgggttttttttttcatttgtagataatttttcmcttttcacttttagtacttttatttagcacatttacagcagcaactagaccactgaaagtctttgaatagataatgcacagttttagctattattccacaacatatgttttcctacattgcagctcatcaaaaagggatacacaactgtgactgcttgctgaaaaatcagcttctcagttcaagactgaatgcacaagggatttgtagcaatcagattctcagctttaccatagacctaaataaggaaaggtgaaatgaatgctaagagacatgaactagaagttttccaattcaattc

SEQ ID NO: 52135 - DNA, 600 bp, Chicken  19866894302443_1
tcaatgcagctgacctaaggcctattacaattttttttccccctctccaggagtgcacaactgtctgcaaataagctacgaggtgctcacaattaaaaatacttctagtattagacagttgttttgcaaattgtcgtggctgattattctttccttcttttaagcatttgcagatcttagggggttcattgagtggggtgtgtatttgggtgtttttttttttttgctaaaacgttttccccatcaaattacttgtgagaattttatttctttttatgaagttgaagcttcctattaacwgaagtgcaggccataaagacaggagaattactttccagtaattgggccaaaatctgttttcagttattcaggtgttgggttgcattcatgggttagaacaggatttttgtcatagtcatctctcacctatttaaaaaacaaaacaaaactgtgatgaaaacacttctacccttgtcactcctctacttttgcctcccatatattatttcttggcactctcctaacccaggaggagctcaccatgctatgcccagaaatacacatgaataagtgacataggattcagcaggaaccctttta

SEQ ID NO: 52136 - DNA, 600 bp, Chicken  19866894302454_1
ggctccatttctgagaatgacagcttttagtttactcttctgccaaatatgaatgcgcagatccagatacatcccaagaaagtggaaaatgcaagaggcgtttcttaagagtcttgggttcaacacaatgtttacaatggacaaatgaaattcagttgcaaactcatatttatggcgctccacattctctcacactttagatctgtctataaataccttaacattttgtaaaatatgccccttcctctcccagtttacacacactcctccgattcatagcttgggccttcacagctttcyagcagtcaacagaatcttgttttaagcagaaataaggaaagcatcaattgcttcagcagtacaggaaagtgtgggtgggaggcagggagtgccaacatggacgccagaagcacacgcatcacatgctgtgcataaggctgggtcaggcaagacagaaggacacagtcaaggcaatagacaggctgtcccatagcagtgaaattgccagtgacactaaagacagatgtggaaaaagcaaaatattgaagcatttcaaatcactattgcttcacatgttaagaaaacactgtcatctcacat

SEQ ID NO: 52137 - DNA, 600 bp, Chicken  19866894302458_1
tattctaataacacctttcattttgaatgacatatgatttggcctaggaataatcagccaagcaagaagctcatgtttccaggccctgccgatagaatagctaacaatactgaatcaggaccttatgtgatcctggtaagtagtttaccactagtctaagatgctcatccagtttctactgctgataagtaaacacagatgaccagtaaaaaataaataaataaaaattggatgatttgtttgctgctctgaaaaatcttttgacatcctgtataatgagatgtttgcatgttatagcartatgttgtttatgtacaaccaagtctaagctgatgcatttagaaaccttttggagggaacgagccaggtgaagacaaagtatagaatggattaggaagatgagtatcaaaaggcaataatggatgctttagagctcttttacctttgtcataatttatatttatctccattcctttttcctctatcaatttcctatcacctactattggaatagatgaatatttaattatgatcactctaggtactcaggagagctgcaagttaaacatcagaagaaaccatccaatttggcattaactt

SEQ ID NO: 52138 - DNA, 600 bp, Chicken  19866894302460_1
ctacccatactgttccttcatgcaaaggtctctgcaatctctttagcactttctggagatggaggtaggacttgccctcttctaggcacagctctgctaccatctgaatcagtaattatatatatatataaacacagctgtgtgcaatgaggatctccagctgaagcggtgcttgctgtatgcactattgaggtaaccttgctcagctctgccctttgcagtgcacgtgaactttccactttgaaatgtttttatctccataatgggtaagaagggatgtatttatttttacctgtttcraaagggataaaaactgagtaggtctggggcttgagttcatatctcgggtgccaacacttagacatgctgatgtgtgcaagtgagactggattttattatcttgtgttaaaggctctgacacgcttctatctttcgaacactacatgctaagtgtgctcagatgtgagatgttttaggctaacaaaatgctaatgtaagactagttataagcctctctcaatgtgaaactccatgaattcattcaaattgttttccaatgtcttttaatgccttgactgaaacttttgtttggagatatta

SEQ ID NO: 52139 - DNA, 600 bp, Chicken  19866894302460_2
cagatgtgagatgttttaggctaacaaaatgctaatgtaagactagttataagcctctctcaatgtgaaactccatgaattcattcaaattgttttccaatgtcttttaatgccttgactgaaacttttgtttggagatattactgcacgttgctgttgcatttttagtaaccctgttaagcagagggaatattggctgttctatacggactcaagtggatcgataacagatgcatgtgacatgctggaaaaccacttacagaccaataggcaaggtcactccatgtcattgctgcagcrtgtcacagaacagcggagccagctctcctgcccatgttcttccaaccaagagaaactcaaactcctcctcactggtctatgcatacccatccttcggaagagcaggagaacttggagggaggacctggttactatggctatgtgcattgctcactctgcatggagaaatcaagccaatgatagctgtgcacattaacattatttgtacaggaaggtagctcactgctggcggctgtgtgaagctgctgagctaaaatccagctttgttcatgccagtcagtaacttgaaggtttttgtgc

SEQ ID NO: 52140 - DNA, 600 bp, Chicken  19866894302462_1
ctccactggggctgtgggaccttccctcctcagccagggaggtggctgttggcattaataaaagcatgaaatagaaatccccgggtttgtcagcaaatgactaaccccctcatatccctttcctttctcagctttcattgtgctgattcacagggcccatccgtccacagattttttcccaccagcagagtttctgccaggctagatacgatctgcatttctaggacgtaggaaaagcaacaaacaaaaaccctacacgatttttggattttcctttttggtctgcctaacccggagggsacacacatctgctcccagctcagaaacacccagggctcgacagcaaaccaactcagccctcgaggagccgcagacaccgtacctgtgtggacggtcttgtggctggcgaggttccccttgtagcggaaggaggcctggcagcggtcgcacttgtagggtttgtcgctgtggacttgcagagagtgcctcttgagcgaggcctcctcggagaaccggcagtcacactcgttgcagaagaaggctccgttctctgaggagcagagcggagagcggtcagacgggtgatgcgcaaccctacgc

SEQ ID NO: 52141 - DNA, 600 bp, Chicken  19866894302462_2
accaactcagccctcgaggagccgcagacaccgtacctgtgtggacggtcttgtggctggcgaggttccccttgtagcggaaggaggcctggcagcggtcgcacttgtagggtttgtcgctgtggacttgcagagagtgcctcttgagcgaggcctcctcggagaaccggcagtcacactcgttgcagaagaaggctccgttctctgaggagcagagcggagagcggtcagacgggtgatgcgcaaccctacgcacccaacttattaggcgtcttctgaaggatgctcggccctggagcmactccagcaccttcggaggtcttaaaccttcatggtgcagatgtcttccgcgagcgtggggagaccaccagcagctgaagaagcaggcgggtcgcctgttacaaggctgcccagctcttaaatgctgcgtggagctttgagcatcactgctcaaagggttcctgctacagatctctgcccagaccacagtgacaattctgcattccctctccctgagctacaggcagatgggcacacagatattgtctccggacttgtggggttttgcaacgagcttgcaaggctcattatctgcatttc

SEQ ID NO: 52142 - DNA, 599 bp, Chicken  19866894302468_1
  misc_feature (1)..(4): n is any nucleotide
nnnncggtgcgtgggccttttatgggccttctgcacaacgctgaattttacccaaactgcaggttaaagcccatgctacgtatttatgcaagcaggtccataatctctcttccaaaacctccccaagcagctcttcgcttgctaagccaggtagctccctgtctggagagtgccataatgcattttaggggactttgtttattcgttttggttaagaaaacaaacacagcaaagcccctccatgtcctgagcaagccagcagtcaccagggtcccaagcccctatctgagctactccagkattttcctcctccacctcctaaaggcagaacggaggtagcttggcttcagctgtgctctcctcaaacatcttggaaagaggtttgacagcttcagagccaaaacgtttgctatttttttttttttttgcccaaaatctagcttgaggggccaaaatctgtttctttctctctctctcttttactttttatctggagggggcaatgtggatcatttccagcagaactgctctctgccgttccccacaaatcttgaccattacagtacttcaatgaattcaatttagatccttcatcttat

SEQ ID NO: 52143 - DNA, 600 bp, Chicken  19866894302468_2
tgctgtagaatcacagaatcgtttaggttggaaaagtccactgagatcacctcgtgccaccaccagcgatgggtgcgtgagggacctgagccctccttgaactgctgcttggggtcaggccggtggcgatggtctgggtaggattgtccatcacccactggagaactcacccttacattccttcgggtttatttcagactttccagttgcttcattttccctcctttctctgggaaggtgctccactgactgccaaatgcttcccaccatcactcttcagagctcatttgctcattttarctcaccaccaatgctgagttaacrttcactcccagcaagcacagcgaatgcatggctctgaagccatgggtctcaaaacacagaggtgaacacggtcacgggtcctctgcccactgggatctgcctctgtgtaggtgcccatagctccattcwagccaatggggatctcctccacacaagggktgaacaygtgggcttcctgggtactcctccagccctccaggccgtgtttccagcttagcactgaaagcatgtaaattaatgggacttaaatatatgcttcgggttaactctattcta

SEQ ID NO: 52144 - DNA, 600 bp, Chicken  19866894302468_3
aggttggaaaagtccactgagatcacctcgtgccaccaccagcgatgggtgcgtgagggacctgagccctccttgaactgctgcttggggtcaggccggtggcgatggtctgggtaggattgtccatcacccactggagaactcacccttacattccttcgggtttatttcagactttccagttgcttcattttccctcctttctctgggaaggtgctccactgactgccaaatgcttcccaccatcactcttcagagctcatttgctcattttarctcaccaccaatgctgagttaacrttcactcccagcaagcacagcgaatgcatggctctgaagccatgggtctcaaaacacagaggtgaacacggtcacgggtcctctgcccactgggatctgcctctgtgtaggtgcccatagctccattcwagccaatggggatctcctccacacaagggktgaacaygtgggcttcctgggtactcctccagccctccaggccgtgtttccagcttagcactgaaagcatgtaaattaatgggacttaaatatatgcttcgggttaactctattctaaacctgaactagattttcattttc

SEQ ID NO: 52145 - DNA, 600 bp, Chicken  19866894302468_4
cccactggagaactcacccttacattccttcgggtttatttcagactttccagttgcttcattttccctcctttctctgggaaggtgctccactgactgccaaatgcttcccaccatcactcttcagagctcatttgctcattttarctcaccaccaatgctgagttaacrttcactcccagcaagcacagcgaatgcatggctctgaagccatgggtctcaaaacacagaggtgaacacggtcacgggtcctctgcccactgggatctgcctctgtgtaggtgcccatagctccattcwagccaatggggatctcctccacacaagggktgaacaygtgggcttcctgggtactcctccagccctccaggccgtgtttccagcttagcactgaaagcatgtaaattaatgggacttaaatatatgcttcgggttaactctattctaaacctgaactagattttcattttccaaggtaagtcttgttaaaatttgcaaggtaaattttcatctttgtgaagatgaaacatgactgtccttccttcctggcttcctcctgacagatttcaccgttttattttcacttcttagtgaacctca

SEQ ID NO: 52146 - DNA, 600 bp, Chicken  19866894302468_5
cgggtttatttcagactttccagttgcttcattttccctcctttctctgggaaggtgctccactgactgccaaatgcttcccaccatcactcttcagagctcatttgctcattttarctcaccaccaatgctgagttaacrttcactcccagcaagcacagcgaatgcatggctctgaagccatgggtctcaaaacacagaggtgaacacggtcacgggtcctctgcccactgggatctgcctctgtgtaggtgcccatagctccattcwagccaatggggatctcctccacacaagggktgaacaygtgggcttcctgggtactcctccagccctccaggccgtgtttccagcttagcactgaaagcatgtaaattaatgggacttaaatatatgcttcgggttaactctattctaaacctgaactagattttcattttccaaggtaagtcttgttaaaatttgcaaggtaaattttcatctttgtgaagatgaaacatgactgtccttccttcctggcttcctcctgacagatttcaccgttttattttcacttcttagtgaacctcagcctggagccatggccactggctgtatgga

SEQ ID NO: 52147 - DNA, 600 bp, Chicken  19866894302468_6
atttcagactttccagttgcttcattttccctcctttctctgggaaggtgctccactgactgccaaatgcttcccaccatcactcttcagagctcatttgctcattttarctcaccaccaatgctgagttaacrttcactcccagcaagcacagcgaatgcatggctctgaagccatgggtctcaaaacacagaggtgaacacggtcacgggtcctctgcccactgggatctgcctctgtgtaggtgcccatagctccattcwagccaatggggatctcctccacacaagggktgaacaygtgggcttcctgggtactcctccagccctccaggccgtgtttccagcttagcactgaaagcatgtaaattaatgggacttaaatatatgcttcgggttaactctattctaaacctgaactagattttcattttccaaggtaagtcttgttaaaatttgcaaggtaaattttcatctttgtgaagatgaaacatgactgtccttccttcctggcttcctcctgacagatttcaccgttttattttcacttcttagtgaacctcagcctggagccatggccactggctgtatggaagctgca

SEQ ID NO: 52148 - DNA, 600 bp, Chicken  19866894302471_1
ctggaagacttcttgtgcacatcttgtctccagcaaggccgctacaagaaagaaagcaggctctggagatggtccgtgaagtgaatcatcaagagattctgtgtgactgccttagcccaactttgcaagtaagcttgagggtattagagaaatctatagaacttgaattcaaatttctggcttaaattgtatgattaacaagggcaggctttgtgcctgaagttgttcactgctattttagccagcatacacatctccagttactctgttgtgctgagggtagatagatttttaatgggyaaagatgggattctttctggttgttgtgactatgtagcacgtcttctgtgtcatatagaaccgaaaggtagtactagttttaacaggaggaactggaagatgtttgaaggagattattgaaggcattatgcttgccctggactctaactgcagactttctgaaacttgttagaactgattgccacaatatcttgagtmagttggtcatcaattaaagcagtactctatttttccttatttattcttaattctccaagtgaaattgtgtgttctgtgttcttaaaactcaaatacctgaac

SEQ ID NO: 52149 - DNA, 600 bp, Chicken  19866894302471_2
caagggcaggctttgtgcctgaagttgttcactgctattttagccagcatacacatctccagttactctgttgtgctgagggtagatagatttttaatgggyaaagatgggattctttctggttgttgtgactatgtagcacgtcttctgtgtcatatagaaccgaaaggtagtactagttttaacaggaggaactggaagatgtttgaaggagattattgaaggcattatgcttgccctggactctaactgcagactttctgaaacttgttagaactgattgccacaatatcttgagtmagttggtcatcaattaaagcagtactctatttttccttatttattcttaattctccaagtgaaattgtgtgttctgtgttcttaaaactcaaatacctgaacaacttctcctccatttctgggattgaaaaggaagaaaaaaaccacattttttattacactctgtgtcaatttgtgtactgcaagcttgtgagaaagcatttcttagtcatgacctgttatggagtgggaacatggctgtttgggatcttctgcaagaatgaaataatatcagcacacgatacactaaggaaagaaagt

SEQ ID NO: 52150 - DNA, 600 bp, Chicken  19866894302478_1
agataaggttaatgtaatgccttgtcaaaaaactaagatctgcctttatgatttcaattgttcgtgttagatgctactacacagttttgcttcttagtttatgaacttaagtaacaccttcatatttaatatttattagtaagtacattgtttagaaagttgtgtctaaagtttctaatatttaaatgcaatggctgtcaagtaatctaattcagaatattgttatcaaatatagtcaacagttcttaaaagaagcatacagtgacttactatgttttctattgtgatattggcattatyttccctctttcctgagcacaacccctttgaattttattcaaaatatttgtgacaatatttgtgaatgttatgtgttttctgtctcttcctaggaatattaaaaatcatgcttgattaatacaatgaaccaaaaaatagtgtatgcgatgtttaaaaagtaataagagaagatgcccttgtacggagatcatattcagaaggacttgaattttccacaaaaatttacagtccatgtaaaggaagaaaggaaactttatttatcttcactatgctgaatcacacagagaagttctaaggcta

SEQ ID NO: 52151 - DNA, 600 bp, Chicken  19866894302480_1
aagaaataagaaaatggaaagaaacagaaaggaaaaggctttcagaagcagacaaacacagagccattcagcctctgtgttccaaagccctgtggggagaaaggcagggcaggtccctgtgcaaggaaacaaggacaaaaaagaacatcagggcaaatagagcaccttaaggcattttttaaagctagctttagaaagggaatgtgaagtcatttcagatagagcacttgggacttcatatcaataaaacaataagtaaaaaaaggtgtttaggttgtgacagaagtcattacagcccaygaaagtaactcagtaataataataataaactagtggagaagtttacggtatcatcagtagtggctccagatgatttattatgaattctatgtattaacatgggtaaatgcaaacaggctctgcatggcaaatcagggtggtgtcagagcataggataatttatgactgcctgataaatactgcagctaatgacctttcatgagcacattttaataaagagcttttaaactctctacttgtgaggttatttatctgcctgcagacacaggggacacaaatacacagtagggcaccaatgag

SEQ ID NO: 52152 - DNA, 600 bp, Chicken  19866894302481_1
gtttgtgcccttatcaggtatcctggattggaaatgtcaaacttctgtggttaacacaaactctttgtaatttcagtcctagttcctaatgctgaagcaaactagtccacaccttttcatcttctgagagtgtatttttcattctatccttacaactccaacttcatgtagaagttataatcttgttatcttttcgagatccagaaacagactgtagatcacaacacagacaagtacggtacaccttgatcacgcctttgtgatgctacataagcacatacagtcattttgaagacagtytcctaaaattaataagattctttgtaaagaaggtacccttcaataawggaaatgttgatagccctgacaacacacacaaatgcttgtgaaaggtagacaataaaccaaataacatgtgaagcaatctccttagccagacaaacttggcacgattgcagtaagaactgaaagttcaacttcgcaaagttaaatgcaaagcagtggctatttattaccttctttctgtctcagctgcatgcttgcaacacttgacatcatcatatctgcagatacagctaagcaaaacacatttttagttat

SEQ ID NO: 52153 - DNA, 600 bp, Chicken  19866894302481_2
tggttaacacaaactctttgtaatttcagtcctagttcctaatgctgaagcaaactagtccacaccttttcatcttctgagagtgtatttttcattctatccttacaactccaacttcatgtagaagttataatcttgttatcttttcgagatccagaaacagactgtagatcacaacacagacaagtacggtacaccttgatcacgcctttgtgatgctacataagcacatacagtcattttgaagacagtytcctaaaattaataagattctttgtaaagaaggtacccttcaataawggaaatgttgatagccctgacaacacacacaaatgcttgtgaaaggtagacaataaaccaaataacatgtgaagcaatctccttagccagacaaacttggcacgattgcagtaagaactgaaagttcaacttcgcaaagttaaatgcaaagcagtggctatttattaccttctttctgtctcagctgcatgcttgcaacacttgacatcatcatatctgcagatacagctaagcaaaacacatttttagttataaacttatttgctctttcatgttccattgctggctggtctggtgctt

SEQ ID NO: 52154 - DNA, 600 bp, Chicken  19866894302484_1
tgttttgtttagtttattttagttttgttttttttgctgaaacttcgttatagttgtgaagagcaaataggatccttctggtaagtacctatgtctaaaccatttactttccttatatgtaaacccagcacataaacacattaatttttctttctctttattgcactgaatttaatatagcaagtgatctcagtgctgaaaatagtctgccaatagagctgagtacagactttaaaagaatacttacatcttcaaaataatgtgtgaacattagttgatcaagcccattagcagcactgrgatacaaataagtagcattaaatctgttttctgtagtcaatttgatggagaaaactgctccagcttagcctcagtgcgaagagttgcttctcagctttgattgtagcaggaccagtggcttcttagttgggtgagaatacttgtcttttcagtttgtcaaaagatgatcagagaattgcctttggattggggttgtctacataaaaaaatctaatgtgcatgatgctcagatgaaagctggtaatacttaagcggtgtggactcattctttatggtatgtactccaacaattctcttttc

SEQ ID NO: 52155 - DNA, 599 bp, Chicken  19866894302487_1
  misc_feature (1)..(32): n is any nucleotide
nnnnnnnnnnnnnnnnnnnnnnnnnnnnnnnntcagtcaccgctccctctccttgccctgcccttcccttcccacccaccatgctgccacctgtgctgtgctggcaccacagctttgtgctgcgaggagcctgggagctgctacagctgaaaaatgactttgcacagaggtgggcgatctttcctcctagcgcagcagtcctggtcaccatatgttgcacaaatgagggctggcagaagggagcagaggcaaacactggaggtggggttgagaggaaatgcaggttgacagtctgattaytggcaatggagaaatgcgcacgatataaatatatctggaatgtttatagtgtgagaaccaggatctgtgttgtcctgtccactgtgccctaccagaatcctcttccaaacaagggggccatagaagcatttgagttggaaggaacccttaaaagccacctagtccaaccccttgcaatgatcagggatatctacagccccatcaggtgctcagagccccgtctatgaccgtgagtgtctccagggatgggacacccacctctctatgggcaacctgtgccagtgcctcmccactcttat

SEQ ID NO: 52156 - DNA, 521 bp, Chicken  19866894302487_2
agtctgattaytggcaatggagaaatgcgcacgatataaatatatctggaatgtttatagtgtgagaaccaggatctgtgttgtcctgtccactgtgccctaccagaatcctcttccaaacaagggggccatagaagcatttgagttggaaggaacccttaaaagccacctagtccaaccccttgcaatgatcagggatatctacagccccatcaggtgctcagagccccgtctatgaccgtgagtgtctccagggatgggacacccacctctctatgggcaacctgtgccagtgcctcmccactcttatggttaaaaaaaaagaagagcacaccctgccctgcactcactgggtaatgccccacatgcaggtgggtggccatgagcagtgaatgctcaggctcagacatcacagaggcatcctaatgcatttgcattaacacctttcccttggctcttcagctaagagccatttctgtgatgcacaggatggagccagcgttgcttagcagctccctgtg

SEQ ID NO: 52157 - DNA, 600 bp, Chicken  19866894302495_1
tctctgtctcagtacaacgaagcactggtagcacagtccctgactgcttttggaacagagaggcagcaagacatagattgcccattccttccagttctcttgtcccttctgggtgggtttcctggcccagcactgctgcagggcaggagcacgcatgaaggctggaggacgaggcctcctcacccagctattacttggaggaacagagcttactgctcagcttcacagagagattcagatttgtgcagcgcatcaaacagtgctgtaggagagtaaatcagtgtcatgtttcagagcagyagctcccacagagagaagcagccttaggaagaacacagctaatgttttaggtctgtaccttctccccactccctcaatagtggcatacagtatctgtagctctttgttactcagtagatgtagggagcaaattgcatttacgccagtacagaaaagggaggaagatctggtataaagttctcaagtagttttgccattcctagctgcagtgaataatttaacttctcacatgcaaatgatgaaacagtattaatataagcaaaaatatctgaagataggcatttagctcatacttaaccc

SEQ ID NO: 52158 - DNA, 600 bp, Chicken  19866894302498_1
ctacaatatcggggcagagctgacctaacaaatgcatgttatctttgtagtctggtaagatgattcctgaatataattgtaaaactcattttgaaattaagggaactgcctaattttcctcttaggatgtctgaatcttttcttggtcagcctttcaaaccactctcagttgtatgtcactgcatgacaataatttatgtgtacaaatgaaagaaaacatatgcggggacaggataattacacaagataagataagatgtaagatatacaaaggtaggactgccttgatccagcctctcrgaaaagctagcaaaaggagttcagtgcaatttattccttgggaaaggaggacagcggggaaggccaggcagagacagcgacatgataaaatgttcagaagagcaagaaggttcatttaaggatgagagaattacagactgcagaggtggttaaattatgggaaaaggagagactgccatggccaagctctgagttatctccccagcacatggcttctcttattggtaccaatctggtttttcatagtctttcccacacagctgtgagaaatacaagtaacaaggggtatggctagaagac

SEQ ID NO: 52159 - DNA, 600 bp, Chicken  19866894302503_1
ttctcaaaaatcattgggctgttctcacaaccctgggtaacactgtccaggttaactgagtcttttttgtcccaaattgaggctctcctattcaatggcaaataaccttaggcttcctttggccaaactaggcaaaaaaggcatccttcaaatccagaaggtaaactccacctactcattccctaacttagttactaaagtgtatggatttgccaccacggagtgtatacattcaacagttctattacttgccctccaatcttgtactaaactatagcacttgctatccaatttttcatyggcaagattggagtactgtatttggattcacattcaattagtaatccaaaatccaaaagttatccatttttcttttatccttctacagttgcatgttcccaaagggcactgctttaccctgactgggctagctctagctcttgcttttaacgtagggctgcattttgtctctaccaggcatccctggaacccacactcctaagcatactttatttaagatttctgtaacttctgggggtacaccattgtttttcccagtttgtcttaaagccagacttacaattttcaatcagtcaatat

SEQ ID NO: 52160 - DNA, 600 bp, Chicken  19866894302512_1
tccaggctctctcttttgcagctcatctcactcatacttgtggtttcaacatgtgattcacattaggcccctctgctcgccatttgatggttctgctcaacagatgtgaatttatttagtcacagagcctgctctttacactgcctctttgtagaacagatgggctatttttttcccattcctgttcagcaatattcagataatgctcatactccatgcactggttttcttgatgattttgtacatgtaaaggtgcaacatgcaaacacatgcctgtgatctcacacaggcagtaaggayacatggcaagaggcaaaagtartgatgggcaatactgaactgcagctctagcatcacccaaggaagtccaagacctcagggatctgagttcagccccataccttcaggaaaatgagtgatgcacagtttgcctagcagggtccagaagacacagatcctccaatggtcaatcccaaaacacggcttcccggcgaaagtgttggtggaaggggaagctcctgaaacattamtggggccatgaaaccacgtgtatctcctgggactctrcagcatggtgaaatagcctggaaaagccattca

SEQ ID NO: 52161 - DNA, 600 bp, Chicken  19866894302512_2
tcatctcactcatacttgtggtttcaacatgtgattcacattaggcccctctgctcgccatttgatggttctgctcaacagatgtgaatttatttagtcacagagcctgctctttacactgcctctttgtagaacagatgggctatttttttcccattcctgttcagcaatattcagataatgctcatactccatgcactggttttcttgatgattttgtacatgtaaaggtgcaacatgcaaacacatgcctgtgatctcacacaggcagtaaggayacatggcaagaggcaaaagtartgatgggcaatactgaactgcagctctagcatcacccaaggaagtccaagacctcagggatctgagttcagccccataccttcaggaaaatgagtgatgcacagtttgcctagcagggtccagaagacacagatcctccaatggtcaatcccaaaacacggcttcccggcgaaagtgttggtggaaggggaagctcctgaaacattamtggggccatgaaaccacgtgtatctcctgggactctrcagcatggtgaaatagcctggaaaagccattcactccctgtgtgggcattcttct

SEQ ID NO: 52162 - DNA, 600 bp, Chicken  19866894302512_3
tgatgattttgtacatgtaaaggtgcaacatgcaaacacatgcctgtgatctcacacaggcagtaaggayacatggcaagaggcaaaagtartgatgggcaatactgaactgcagctctagcatcacccaaggaagtccaagacctcagggatctgagttcagccccataccttcaggaaaatgagtgatgcacagtttgcctagcagggtccagaagacacagatcctccaatggtcaatcccaaaacacggcttcccggcgaaagtgttggtggaaggggaagctcctgaaacattamtggggccatgaaaccacgtgtatctcctgggactctrcagcatggtgaaatagcctggaaaagccattcactccctgtgtgggcattcttcttgctgcactgagagtgcctttggcactggatgaagcagaactgcacaaaggccctctcggagcagaataagactgcccacatgagaagtacgcttggaatagctattgcacttcaaattcacaccctagctttgtttcgcaacacctcccctgtgcagaaaggccctaggcatcagattcaatttctgcctgtattatcaagagctga

SEQ ID NO: 52163 - DNA, 600 bp, Chicken  19866894302512_4
acatgcctgtgatctcacacaggcagtaaggayacatggcaagaggcaaaagtartgatgggcaatactgaactgcagctctagcatcacccaaggaagtccaagacctcagggatctgagttcagccccataccttcaggaaaatgagtgatgcacagtttgcctagcagggtccagaagacacagatcctccaatggtcaatcccaaaacacggcttcccggcgaaagtgttggtggaaggggaagctcctgaaacattamtggggccatgaaaccacgtgtatctcctgggactctrcagcatggtgaaatagcctggaaaagccattcactccctgtgtgggcattcttcttgctgcactgagagtgcctttggcactggatgaagcagaactgcacaaaggccctctcggagcagaataagactgcccacatgagaagtacgcttggaatagctattgcacttcaaattcacaccctagctttgtttcgcaacacctcccctgtgcagaaaggccctaggcatcagattcaatttctgcctgtattatcaagagctgaggactgcttccatccgtgagcaggacgtggcctacaa

SEQ ID NO: 52164 - DNA, 600 bp, Chicken  19866894302514_1
aattggcattaagttaccataattaaaaagtcatgaaattgaagacgatgatacacacaaaatccccagcattcctgcaagatgtatcagcaagtgactcattctgacagagaaatccactaaaaggttacatgcacagagacaccggtgaaaaatgtgaactcttatacccactggtataacaataacttcattttatccctaaacatcattctgaaataaaatgttggactctcactgtggctatcaggatatacttcctagtcctgacttgtgttagactgaaggacaatggaatcwtgcaaaccagagggcagatgtagaagatgtggaagaaaagtggaaataatcacagatcttcccctgctcccattaaggatcaattatttcttacacagcatcgactttaaacaaaattttacaggacagacagtgggcaggctgaagtaaattacctagctattaaataaaacaaatacacagtgcatagatataaacatgttatgccagatgtagctgtgaacaatccagatgagaaagaaatatctycsatagacagctgtctattggtgtctgccagctatccatacaatcctaagc

SEQ ID NO: 52165 - DNA, 395 bp, Chicken  19866894302514_2
ggatatacttcctagtcctgacttgtgttagactgaaggacaatggaatcwtgcaaaccagagggcagatgtagaagatgtggaagaaaagtggaaataatcacagatcttcccctgctcccattaaggatcaattatttcttacacagcatcgactttaaacaaaattttacaggacagacagtgggcaggctgaagtaaattacctagctattaaataaaacaaatacacagtgcatagatataaacatgttatgccagatgtagctgtgaacaatccagatgagaaagaaatatctycsatagacagctgtctattggtgtctgccagctatccatacaatcctaagcaccatcagagaatcacagcaggttgattttgatcactaatgatg

SEQ ID NO: 52166 - DNA, 393 bp, Chicken  19866894302514_3
atatacttcctagtcctgacttgtgttagactgaaggacaatggaatcwtgcaaaccagagggcagatgtagaagatgtggaagaaaagtggaaataatcacagatcttcccctgctcccattaaggatcaattatttcttacacagcatcgactttaaacaaaattttacaggacagacagtgggcaggctgaagtaaattacctagctattaaataaaacaaatacacagtgcatagatataaacatgttatgccagatgtagctgtgaacaatccagatgagaaagaaatatctycsatagacagctgtctattggtgtctgccagctatccatacaatcctaagcaccatcagagaatcacagcaggttgattttgatcactaatgatg

SEQ ID NO: 52167 - DNA, 600 bp, Chicken  19866894302519_1
taggacaagagggaatggcttcaagttgtgccatgggagattcaggttgcatattaggaaaaatttcttctccagaagagtggtgaggcactggaatgggctgcccagagaggtgattgagtcaccatccctggaggtgttcaagaaactcatagatgtggcactgagggacacagtttagtggacaatattggtgtcagatggatggttggactagatgatctttgaggtcttttccaaccttaatgattctatgattgtactactattatgatttgagtaaaaatgaattatcacagytatctgacccagaagcacagactcctgacgcgggaactgtaatcatgacagtaagtactgcatgtaaagtaatactaaatggagaaaaaaaaatataggcaaaatacatacaattttattgtctattatccagaatttaaaatttcaaaatgtccttcttttagtgttcctctagtatgtcctcactttcggcccattacaccaaatcaagtaatacgacatttttaaattttcacagtgtttgagtgaaaaaggaagatgtattttccttcagaaatagaagaaagagaagaaagatct

SEQ ID NO: 52168 - DNA, 600 bp, Chicken  19866894302526_1
taccggagacctgctgcttctgcccggacttcttcctggacctactcgatacctgcaccttctcactgcccaagaccggccatgctgctgctgctcttcccctgcacttttgccccagaccatcggaacatcatgcaacaggactactgccagatcctggtggtgactatccccgctttacacaattcttgcttctcctatcttttctatcacttgccttcccttccccatcaccccaatctgtaatagtgtccatcctcccctttcttcatctcccttattaacatttgtaatatactkgttggaccaacatttgaacygttrtttcttaatctcacgccgggcatacatatttcaaagaacctcctctccctcctataaattggagcragacaagaatagacagacctttaaaagaaacctcagtgcttgagagttatatttgcttttagtacatctttagggttttcaatttgagactttgtgtatacaactttcaaaaggctcgttgtagtctatagaaatgttttccccatgtatgagatgtcattttaaaaggacaacaaagtaaggacagagctaggatctttttaggttttg

SEQ ID NO: 52169 - DNA, 600 bp, Chicken  19866894302526_2
tgcccggacttcttcctggacctactcgatacctgcaccttctcactgcccaagaccggccatgctgctgctgctcttcccctgcacttttgccccagaccatcggaacatcatgcaacaggactactgccagatcctggtggtgactatccccgctttacacaattcttgcttctcctatcttttctatcacttgccttcccttccccatcaccccaatctgtaatagtgtccatcctcccctttcttcatctcccttattaacatttgtaatatactkgttggaccaacatttgaacygttrtttcttaatctcacgccgggcatacatatttcaaagaacctcctctccctcctataaattggagcragacaagaatagacagacctttaaaagaaacctcagtgcttgagagttatatttgcttttagtacatctttagggttttcaatttgagactttgtgtatacaactttcaaaaggctcgttgtagtctatagaaatgttttccccatgtatgagatgtcattttaaaaggacaacaaagtaaggacagagctaggatctttttaggttttggagyacataatacaccgaac

SEQ ID NO: 52170 - DNA, 600 bp, Chicken  19866894302526_3
cggacttcttcctggacctactcgatacctgcaccttctcactgcccaagaccggccatgctgctgctgctcttcccctgcacttttgccccagaccatcggaacatcatgcaacaggactactgccagatcctggtggtgactatccccgctttacacaattcttgcttctcctatcttttctatcacttgccttcccttccccatcaccccaatctgtaatagtgtccatcctcccctttcttcatctcccttattaacatttgtaatatactkgttggaccaacatttgaacygttrtttcttaatctcacgccgggcatacatatttcaaagaacctcctctccctcctataaattggagcragacaagaatagacagacctttaaaagaaacctcagtgcttgagagttatatttgcttttagtacatctttagggttttcaatttgagactttgtgtatacaactttcaaaaggctcgttgtagtctatagaaatgttttccccatgtatgagatgtcattttaaaaggacaacaaagtaaggacagagctaggatctttttaggttttggagyacataatacaccgaacactt

SEQ ID NO: 52171 - DNA, 600 bp, Chicken  19866894302526_4
ctgctcttcccctgcacttttgccccagaccatcggaacatcatgcaacaggactactgccagatcctggtggtgactatccccgctttacacaattcttgcttctcctatcttttctatcacttgccttcccttccccatcaccccaatctgtaatagtgtccatcctcccctttcttcatctcccttattaacatttgtaatatactkgttggaccaacatttgaacygttrtttcttaatctcacgccgggcatacatatttcaaagaacctcctctccctcctataaattggagcragacaagaatagacagacctttaaaagaaacctcagtgcttgagagttatatttgcttttagtacatctttagggttttcaatttgagactttgtgtatacaactttcaaaaggctcgttgtagtctatagaaatgttttccccatgtatgagatgtcattttaaaaggacaacaaagtaaggacagagctaggatctttttaggttttggagyacataatacaccgaacacttgtctgtaacaggacatacttgatttagcygttaaaaagcattcattttacttaatggagaaccctc

SEQ ID NO: 52172 - DNA, 600 bp, Chicken  19866894302526_5
gaccaacatttgaacygttrtttcttaatctcacgccgggcatacatatttcaaagaacctcctctccctcctataaattggagcragacaagaatagacagacctttaaaagaaacctcagtgcttgagagttatatttgcttttagtacatctttagggttttcaatttgagactttgtgtatacaactttcaaaaggctcgttgtagtctatagaaatgttttccccatgtatgagatgtcattttaaaaggacaacaaagtaaggacagagctaggatctttttaggttttggagyacataatacaccgaacacttgtctgtaacaggacatacttgatttagcygttaaaaagcattcattttacttaatggagaaccctctgctctaagagagtaaaagaatagcttgatatcatatttattcccttttatttacagtatgtaacatttcatwaaaaagattatttcaacaaacatggtttcagatagtcaacaaattttatttgaccctgaaaatatacatttcattaagagtatgtgtttatttttatgaagattaagaagatctctggtgtgcatagcggtacacagtaat

SEQ ID NO: 52173 - DNA, 600 bp, Chicken  19866894302526_6
ttcaaagaacctcctctccctcctataaattggagcragacaagaatagacagacctttaaaagaaacctcagtgcttgagagttatatttgcttttagtacatctttagggttttcaatttgagactttgtgtatacaactttcaaaaggctcgttgtagtctatagaaatgttttccccatgtatgagatgtcattttaaaaggacaacaaagtaaggacagagctaggatctttttaggttttggagyacataatacaccgaacacttgtctgtaacaggacatacttgatttagcygttaaaaagcattcattttacttaatggagaaccctctgctctaagagagtaaaagaatagcttgatatcatatttattcccttttatttacagtatgtaacatttcatwaaaaagattatttcaacaaacatggtttcagatagtcaacaaattttatttgaccctgaaaatatacatttcattaagagtatgtgtttatttttatgaagattaagaagatctctggtgtgcatagcggtacacagtaatgaagtacaagtgaagttctcttcatattactatcctttttccctgtcac

SEQ ID NO: 52174 - DNA, 600 bp, Chicken  19866894302526_7
ggttttcaatttgagactttgtgtatacaactttcaaaaggctcgttgtagtctatagaaatgttttccccatgtatgagatgtcattttaaaaggacaacaaagtaaggacagagctaggatctttttaggttttggagyacataatacaccgaacacttgtctgtaacaggacatacttgatttagcygttaaaaagcattcattttacttaatggagaaccctctgctctaagagagtaaaagaatagcttgatatcatatttattcccttttatttacagtatgtaacatttcatwaaaaagattatttcaacaaacatggtttcagatagtcaacaaattttatttgaccctgaaaatatacatttcattaagagtatgtgtttatttttatgaagattaagaagatctctggtgtgcatagcggtacacagtaatgaagtacaagtgaagttctcttcatattactatcctttttccctgtcacctcaagtatctttacatgcatactatataaagatttagaattttaacttggtgggaatacacgtagtttttagatattcctagtagtacagtttttgctttttagtgact

SEQ ID NO: 52175 - DNA, 600 bp, Chicken  19866894302527_1
aatgcacacttcaagttcttttctttaggtttataatttttcaattctgttggatgacaggttttcagcctttccagccccatcaaaaggaacagacaacattttttaatagaaagctaagattcccacagacacagggtttggagcttaaaaaaacaatcaccaaatatggcaagaaaccataagctggagatgttgaaacactgttattattatctgctcatcctgtcttttccaacaggcttcacactaaacagagagcagagaaaatgctctcacctaggacaggatgaataagcyggttacattttaaatgccaggcacccacagctctgataccagtgggaaatgcaggtgctcagagaataagatcctgtcatcagttttttttctgctgttgatttgccttgttctctgttcaggcaggatgtgatcctgttgctttcctctgcaatgagaacagaggggacttgaggacgctccctgccagctttacccacagatttgggcagggtcattccacctcttgggtcagacgtaagctacgcactctgtgcttatgagctgaatgacagggatctggcttaaacacctttttgc

SEQ ID NO: 52176 - DNA, 600 bp, Chicken  19866894302528_1
cttttcagcaggatatcagaacaacactcaaacaccagtgaggagcaggacagtttccagatgtagaaaaaacatgctttcagtgctttatgggaaatttgctgtatgggaagctgtctggcactggactactccttaccctaccaaagcaacaagcaggaaatcatagctcacttttactcatgttagggtcactggaagtgttgcagagccatggagatgtggcactgagggacacggtcatcgggcatggtggggatgggttggagttggacttggtgatcttagagatcttttccmaccttaatgactatatgggtctatgattttaggatgakccttagcctccatcagctaaccaagagtttcccagccaccacctgaaggagtgggacagacacaggcatgctcccagccttaacgcttcctcctcctcccatgctcacacgatggtttgaatggacagtgctgttgatacctgatgaggtatcaacctgtcatggacttctgactcatttccatacagaaagaggcaaacaccattaccaacatcccaatcacagctgctttcaccaaagctgcctcttcagttttcatggg

SEQ ID NO: 52177 - DNA, 600 bp, Chicken  19866894302528_2
tgaggagcaggacagtttccagatgtagaaaaaacatgctttcagtgctttatgggaaatttgctgtatgggaagctgtctggcactggactactccttaccctaccaaagcaacaagcaggaaatcatagctcacttttactcatgttagggtcactggaagtgttgcagagccatggagatgtggcactgagggacacggtcatcgggcatggtggggatgggttggagttggacttggtgatcttagagatcttttccmaccttaatgactatatgggtctatgattttaggatgakccttagcctccatcagctaaccaagagtttcccagccaccacctgaaggagtgggacagacacaggcatgctcccagccttaacgcttcctcctcctcccatgctcacacgatggtttgaatggacagtgctgttgatacctgatgaggtatcaacctgtcatggacttctgactcatttccatacagaaagaggcaaacaccattaccaacatcccaatcacagctgctttcaccaaagctgcctcttcagttttcatgggacaacactggcctctgacatcacttgggatccattagt

SEQ ID NO: 52178 - DNA, 600 bp, Chicken  19866894302530_1
tccaactccgctatgcatgtttatttgcactgcccaaatatccaggagccctcttcacagactggggcatggttgtgctgtatcaacaacatgatgggcagcatcttacagagcaaatataaggcatggagcaaactaaagaaacagcactggccgtagcagaaggcagcacttccaacagactgaagacaggcagttactgggtccagcatggtttggatctgaccccgcacccatcagcagcactggcaagcttttctgaacagcaaacaagtgcaaagcatatccagtgacagaagyatctgcatttccaatgggcagagtccttccgccctgcccttttcctgctttccctgggtaagcccaggtacaagyctgtatgcaaaatgaaggctggaaggacgtatggctgttctctatcagaatgctggggcagaaaaagagcaaggagggaaaataactacagcagccaaagtaaaaccctgtcagaagaagaaataggtatcaactcaccatgagtaagcataggcttgaaataaagaggattagaaaccctcagaagaggaaggatctggaacaaccttctaataggaacaggga

SEQ ID NO: 52179 - DNA, 600 bp, Chicken  19866894302530_2
tgctgtatcaacaacatgatgggcagcatcttacagagcaaatataaggcatggagcaaactaaagaaacagcactggccgtagcagaaggcagcacttccaacagactgaagacaggcagttactgggtccagcatggtttggatctgaccccgcacccatcagcagcactggcaagcttttctgaacagcaaacaagtgcaaagcatatccagtgacagaagyatctgcatttccaatgggcagagtccttccgccctgcccttttcctgctttccctgggtaagcccaggtacaagyctgtatgcaaaatgaaggctggaaggacgtatggctgttctctatcagaatgctggggcagaaaaagagcaaggagggaaaataactacagcagccaaagtaaaaccctgtcagaagaagaaataggtatcaactcaccatgagtaagcataggcttgaaataaagaggattagaaaccctcagaagaggaaggatctggaacaaccttctaataggaacagggaacggctgaaaagtaattagctttgagatggtacaggatgcatttatgacagacatttaaatgctgtggctgccca

SEQ ID NO: 52180 - DNA, 600 bp, Chicken  19866894302530_3
taagcccaggtacaagyctgtatgcaaaatgaaggctggaaggacgtatggctgttctctatcagaatgctggggcagaaaaagagcaaggagggaaaataactacagcagccaaagtaaaaccctgtcagaagaagaaataggtatcaactcaccatgagtaagcataggcttgaaataaagaggattagaaaccctcagaagaggaaggatctggaacaaccttctaataggaacagggaacggctgaaaagtaattagctttgagatggtacaggatgcatttatgacagacatttyaatgctgtggctgcccataatagcagaggagtgacctccacaacccaggtcatccctcccactgcagtaactgtctgtgaccccagaacacagaaaaggccaaaatcctgtttgttcaaagcccctctgctgatctgcttattttgtccttmatccactgctacaccagccagcagaatagcgagcaaacggaatgggaaaaaaactgttaatctaagaagatgcacaaatagaatagatcaggatatcaaaaccaaaatgtgttactatttgaaattcagcttctaaaatctgccatct

SEQ ID NO: 52181 - DNA, 492 bp, Chicken  19866894302530_4
caccatgagtaagcataggcttgaaataaagaggattagaaaccctcagaagaggaaggatctggaacaaccttctaataggaacagggaacggctgaaaagtaattagctttgagatggtacaggatgcatttatgacagacatttaaatgctgtggctgcccataatagcagaggagtgacctccacaacccaggtcatccctcccactgcagtaactgtctgtgaccccagaacacagaaaaggccaaaatcctgtttgttcaaagcccctctgctgatctgcttattttgtccttmatccactgctacaccagccagcagaatagcgagcaaacggaatgggaaaaaaactgttaatctaagaagatgcacaaatagaatagatcaggatatcaaaaccaaaatgtgttactatttgaaattcagcttctaaaatctgccatctccaactcaaggcataaaaatgcaaaagcgattggggaatcaaat

SEQ ID NO: 52182 - DNA, 599 bp, Chicken  19866894302536_1
  misc_feature (1)..(151): n is any nucleotide
nnnnnnnnnnnnnnnnnnnnnnnnnnnnnnnnnnnnnnnnnnnnnnnnnnnnnnnnnnnnnnnnnnnnnnnnnnnnnnnnnnnnnnnnnnnnnnnnnnnnnnnnnnnnnnnnnnnnnnnnnnnnnnnnnnnnnnnnnnnnnnnnnnnnnnnccttcacgtctataatttgcatcagaagaatggcttcacctgcatgctcatcggggagatcttcgagctcatgtaagtgcggagtgcccctgtgttggggccgcaacggcgactggggaacagctacgggaggctgccaggctcctgcrgttgagtggacaggagggttcctgtcgcagtcctcctgtcaacccttcattagagttttctgtgccccagaccttcrgttcattttgtgsaactggtgccctggagctttcctgctgcctggctgtgggaatgcgtgaccctgtgctcctccctgcttcacgtttggaggaggcagaaggcttccctcattatttctctctttcttcacaggcagttcatytttgtggtggcgtttaccacctttcttattagctgcgttgattatgatattctttttgccaacaaagcggtaaatcac

SEQ ID NO: 52183 - DNA, 599 bp, Chicken  19866894302536_2
  misc_feature (1)..(74): n is any nucleotide
nnnnnnnnnnnnnnnnnnnnnnnnnnnnnnnnnnnnnnnnnnnnnnnnnnnnnnnnnnnnnnnnnnnnnnnnnnccttcacgtctataatttgcatcagaagaatggcttcacctgcatgctcatcggggagatcttcgagctcatgtaagtgcggagtgcccctgtgttggggccgcaacggcgactggggaacagctacgggaggctgccaggctcctgcrgttgagtggacaggagggttcctgtcgcagtcctcctgtcaacccttcattagagttttctgtgccccagaccttcrgttcattttgtgsaactggtgccctggagctttcctgctgcctggctgtgggaatgcgtgaccctgtgctcctccctgcttcacgtttggaggaggcagaaggcttccctcattatttctctctttcttcacaggcagttcatytttgtggtggcgtttaccacctttcttattagctgcgttgattatgatattctttttgccaacaaagcggtaaatcacagccagcatcccagtgagcccattaaggtgactctaccagatgctttcctgcctccaaatgtctgcagtgcaaggta

SEQ ID NO: 52184 - DNA, 599 bp, Chicken  19866894302536_3
  misc_feature (1)..(61): n is any nucleotide
nnnnnnnnnnnnnnnnnnnnnnnnnnnnnnnnnnnnnnnnnnnnnnnnnnnnnnnnnnnnnccttcacgtctataatttgcatcagaagaatggcttcacctgcatgctcatcggggagatcttcgagctcatgtaagtgcggagtgcccctgtgttggggccgcaacggcgactggggaacagctacgggaggctgccaggctcctgcrgttgagtggacaggagggttcctgtcgcagtcctcctgtcaacccttcattagagttttctgtgccccagaccttcrgttcattttgtgsaactggtgccctggagctttcctgctgcctggctgtgggaatgcgtgaccctgtgctcctccctgcttcacgtttggaggaggcagaaggcttccctcattatttctctctttcttcacaggcagttcatytttgtggtggcgtttaccacctttcttattagctgcgttgattatgatattctttttgccaacaaagcggtaaatcacagccagcatcccagtgagcccattaaggtgactctaccagatgctttcctgcctccaaatgtctgcagtgcaaggtaggggcagccaagg

SEQ ID NO: 52185 - DNA, 600 bp, Chicken  19866894302536_4
atgtaagtgcggagtgcccctgtgttggggccgcaacggcgactggggaacagctacgggaggctgccaggctcctgcrgttgagtggacaggagggttcctgtcgcagtcctcctgtcaacccttcattagagttttctgtgccccagaccttcrgttcattttgtgsaactggtgccctggagctttcctgctgcctggctgtgggaatgcgtgaccctgtgctcctccctgcttcacgtttggaggaggcagaaggcttccctcattatttctctctttcttcacaggcagttcatytttgtggtggcgtttaccacctttcttattagctgcgttgattatgatattctttttgccaacaaagcggtaaatcacagccagcatcccagtgagcccattaaggtgactctaccagatgctttcctgcctccaaatgtctgcagtgcaaggtaggggcagccaaggcactgttcatgctttctcgggtgctggtagctcctgcccagggctcatctcccactactactgccaccttctttcttgcagaatccaggcaaacagcttcctcatctgcatcctggtgatagctgggggttt

SEQ ID NO: 52186 - DNA, 600 bp, Chicken  19866894302537_1
tgaagccaaaaccccagatctgaacaactgcccaaccccctctttagtctggccccaagtgtagttagcattcagttcagaatatactgctttgactctgaaaaggagcagttacctctttcataagcatctttagagaggatgataaaaacaaaacaaaacaaacaaacaaaaaaaccccaaaaactaggaagaaaagaaaaaagaattttctccttgaaaaacttgaatagatgcttatcattatggccgaggtagaagtgactggtgtaagtactttaccaaagtcaagattatcarttgataatttgctccacaatccaattctgcacatgaaattctccaaagctgctgcctgaggtcagtgacttaatggtttcctgtgctaataggtctgaagattcctgagtacttgataccgtacatggacattcccatgtaatttccagttgctgaaatgcacttagattacacctaaacctgctgagattccttgctgtgatattgttctgattatcttgtctgcaagacttgacaatacatgtcccctctgtacatctacccaatccaccacatgcaaacggaggaaggggaatttat

SEQ ID NO: 52187 - DNA, 600 bp, Chicken  19866894302541_1
ctgtccaaatgctcttacccatttttgtatgtgtgtgtgcatagggtcgtggttgggtgcatttggtggaggcaagggcagtgtcccagggcaagccagggagaaggatgtgaattgttccctgaccagacaggggtgtttgggtgcgacttcccaaagagagcatctcctcaaaactctgcttttcctcagaggccacttctctgattgtataaaagcactgatttgtgcttgttttgtactcacttcttaagggaaaagttgtatactgggttctcaccagcagctcgtgggtaatgygcgccccatcctcctcccaaactggaggatgctcggcttcagaagccctgtttgtccctcgctgtcacacagccctgagcacactttggtttgtacgcaacagtgataaaccaaaccaaatcagaaatcagtgccatatacctgaagtaatctcttcttctacattgccacacgtgtcttctaatggccggtcctttctgagatgaggtactgctgaacctctgtctttacagcggggtgtttttgtgacttaaaaagagttgtcatttcgttgcaatcctgtaagagatgcgtcatgca

SEQ ID NO: 52188 - DNA, 600 bp, Chicken  19866894302542_1
acttgaaggagagaaatatgggtttttatatctttctatcaaatattcgaaatgaagctgcttgaacataaaaatagggactatacagggctgcaatccctatggaaagcacacatgttgcaacagtgcatagaataaacctttctgtgctccaaaaaattgtatgaacccagcccttttcttctatttgtgcaataatcttcagttttactaaatgcttgaaaacacaaaatagtagttttattttttagcacattagtcatgtgatgctgttttttcttggtgattgttaacttactkctaagaactacatatactaaaactgttttatttacttcctaacacttcctcctgtctacttcctttctaagattatactgccaaatccctcttatctctcgtgtctgtatctggaaatcatcaataactacttttttttcccttagtaagacataatattatgcagtcaaacttcagagtttcaatatctgaaatctcctctgtctttttgtattatccagttcccaaatccactgattccatgttgctgttattaatgctacactaaagctagttatgggcattctcccttttctactc

SEQ ID NO: 52189 - DNA, 599 bp, Chicken  19866894302546_1
  misc_feature (1)..(23): n is any nucleotide
nnnnnnnnnnnnnnnnnnnnnnncttcctttggcaacagatttatgataattagccatcaaatgaaactccttctcctttgcacacctcaactgccaggctgggcagggaggaggcagtgctactttgggggcacaggaacaggagcgacgtgcagaaggtctccatgctgctgcctgctgcctgctgctctgtgccattgggtacccaagggtgttcatggggctgataggatgctcctcgggccggcagccacaaacacatccgagcgcagggtgatggcacacccatgcagcgacgrcagctcyggctgtgagtttctgctgtgagcrctgcgtgggcacggggtggggagggcgagcgtggggcgaacgggttttgcaaccccgctacagtcataaacacaaagcacggggctgaaaggggaagygrggcaaagccgtgcgggaagacgtgcagcgccgcagggagaagtgtccgtacggagacggggatggaaaggggctgggggtggaaaggggttggggaggttgggaaggagcgggatgcggccgtgctgyggggtccggcccgtgcccagccccgagggaagggatgcgc

SEQ ID NO: 52190 - DNA, 599 bp, Chicken  19866894302546_2
  misc_feature (1)..(16): n is any nucleotide
nnnnnnnnnnnnnnnncttcctttggcaacagatttatgataattagccatcaaatgaaactccttctcctttgcacacctcaactgccaggctgggcagggaggaggcagtgctactttgggggcacaggaacaggagcgacgtgcagaaggtctccatgctgctgcctgctgcctgctgctctgtgccattgggtacccaagggtgttcatggggctgataggatgctcctcgggccggcagccacaaacacatccgagcgcagggtgatggcacacccatgcagcgacgrcagctcyggctgtgagtttctgctgtgagcrctgcgtgggcacggggtggggagggcgagcgtggggcgaacgggttttgcaaccccgctacagtcataaacacaaagcacggggctgaaaggggaagygrggcaaagccgtgcgggaagacgtgcagcgccgcagggagaagtgtccgtacggagacggggatggaaaggggctgggggtggaaaggggttggggaggttgggaaggagcgggatgcggccgtgctgyggggtccggcccgtgcccagccccgagggaagggatgcgctgcatcg

SEQ ID NO: 52191 - DNA, 600 bp, Chicken  19866894302546_3
ggcaacagatttatgataattagccatcaaatgaaactccttctcctttgcacacctcaactgccaggctgggcagggaggaggcagtgctactttgggggcacaggaacaggagcgacgtgcagaaggtctccatgctgctgcctgctgcctgctgctctgtgccattgggtacccaagggtgttcatggggctgataggatgctcctcgggccggcagccacaaacacatccgagcgcagggtgatggcacacccatgcagcgacgrcagctcyggctgtgagtttctgctgtgagcrctgcgtgggcacggggtggggagggcgagcgtggggcgaacgggttttgcaaccccgctacagtcataaacacaaagcacggggctgaaaggggaagygrggcaaagccgtgcgggaagacgtgcagcgccgcagggagaagtgtccgtacggagacggggatggaaaggggctgggggtggaaaggggttggggaggttgggaaggagcgggatgcggccgtgctgyggggtccggcccgtgcccagccccgagggaagggatgcgctgcatcgctcgacggggtgggcggacagagct

SEQ ID NO: 52192 - DNA, 600 bp, Chicken  19866894302546_4
gggcacaggaacaggagcgacgtgcagaaggtctccatgctgctgcctgctgcctgctgctctgtgccattgggtacccaagggtgttcatggggctgataggatgctcctcgggccggcagccacaaacacatccgagcgcagggtgatggcacacccatgcagcgacgrcagctcyggctgtgagtttctgctgtgagcrctgcgtgggcacggggtggggagggcgagcgtggggcgaacgggttttgcaaccccgctacagtcataaacacaaagcacggggctgaaaggggaagygrggcaaagccgtgcgggaagacgtgcagcgccgcagggagaagtgtccgtacggagacggggatggaaaggggctgggggtggaaaggggttggggaggttgggaaggagcgggatgcggccgtgctgyggggtccggcccgtgcccagccccgagggaagggatgcgctgcatcgctcgacggggtgggcggacagagctgtgcgggggggagaggagagctgcgggagcgcgggcgctgcgaggggcagcacggcacagcatagcacggcatagcacggcatagcacggcatagcac

SEQ ID NO: 52193 - DNA, 600 bp, Chicken  19866894302546_5
gcacaggaacaggagcgacgtgcagaaggtctccatgctgctgcctgctgcctgctgctctgtgccattgggtacccaagggtgttcatggggctgataggatgctcctcgggccggcagccacaaacacatccgagcgcagggtgatggcacacccatgcagcgacgrcagctcyggctgtgagtttctgctgtgagcrctgcgtgggcacggggtggggagggcgagcgtggggcgaacgggttttgcaaccccgctacagtcataaacacaaagcacggggctgaaaggggaagygrggcaaagccgtgcgggaagacgtgcagcgccgcagggagaagtgtccgtacggagacggggatggaaaggggctgggggtggaaaggggttggggaggttgggaaggagcgggatgcggccgtgctgyggggtccggcccgtgcccagccccgagggaagggatgcgctgcatcgctcgacggggtgggcggacagagctgtgcgggggggagaggagagctgcgggagcgcgggcgctgcgaggggcagcacggcacagcatagcacggcatagcacggcatagcacggcatagcacgg

SEQ ID NO: 52194 - DNA, 503 bp, Chicken  19866894302546_6
acatccgagcgcagggtgatggcacacccatgcagcgacgrcagctcyggctgtgagtttctgctgtgagcrctgcgtgggcacggggtggggagggcgagcgtggggcgaacgggttttgcaaccccgctacagtcataaacacaaagcacggggctgaaaggggaagygrggcaaagccgtgcgggaagacgtgcagcgccgcagggagaagtgtccgtacggagacggggatggaaaggggctgggggtggaaaggggttggggaggttgggaaggagcgggatgcggccgtgctgyggggtccggcccgtgcccagccccgagggaagggatgcgctgcatcgctcgacggggtgggcggacagagctgtgcgggggggagaggagagctgcgggagcgcgggcgctgcgaggggcagcacggcacagcatagcacggcatagcacggcatagcacggcatagcacggcatagcacggcacagctcagcacggtcggcc

SEQ ID NO: 52195 - DNA, 599 bp, Chicken  19866894302548_1
  misc_feature (1)..(146): n is any nucleotide
nnnnnnnnnnnnnnnnnnnnnnnnnnnnnnnnnnnnnnnnnnnnnnnnnnnnnnnnnnnnnnnnnnnnnnnnnnnnnnnnnnnnnnnnnnnnnnnnnnnnnnnnnnnnnnnnnnnnnnnnnnnnnnnnnnnnnnnnnnnnnnnnnnaattgtccattacaatggcactctgttagccagagctctgtgtcctttgcccagagtgagacctggcacagcagctcctttgccgaagcacaaggctgccaagatgtgggaaagctctgcttgtcgtggtttgaagcagcaaggctgtgagagygctgtggcatgcactgtttcccaaggggaaggagagcctacccatgtctggtatgaggcacatctcccagtctgttccttttttaaatagataaggaagagcaactggaagtcctatagttatgtgggctacactttccttcaggcacaacaaaagcctccaaccccaaggagagccgctgctgagagcagctaactgctcctgaagcagcaagactgctacagaagctacttctgtacccctggcagccatctgagccatctcagtgtcttgctgtccattgctcgtgcagctttgga

SEQ ID NO: 52196 - DNA, 599 bp, Chicken  19866894302550_1
  misc_feature (1)..(190): n is any nucleotide
nnnnnnnnnnnnnnnnnnnnnnnnnnnnnnnnnnnnnnnnnnnnnnnnnnnnnnnnnnnnnnnnnnnnnnnnnnnnnnnnnnnnnnnnnnnnnnnnnnnnnnnnnnnnnnnnnnnnnnnnnnnnnnnnnnnnnnnnnnnnnnnnnnnnnnnnnnnnnnnnnnnnnnnnnnnnnnnnnnnnnnnnnnnnnntgcctaatgaaactctggggggggggggacgtgggggtctctgctttatgggactgtgtgggcgggcttgaaggggctctgctttacggcgctgggtgtgggttctgggragactstgctctatgggatcatggtaggggcttgggggggctctgcttaatggcactgtrtggagggacattgggggtctcagccttataggacgttgrggatgatttgtgggggtctcagcctttgcaatattgaggrcactctgggtggtggtctgagcccttagggcccccagggagggctttagggtgggctcagccttttgggatactggggtccttttgaggggagggtctcaactttatgggatgttgcaaagagtttggagggggtctcagctctgagggatattggggac

SEQ ID NO: 52197 - DNA, 599 bp, Chicken  19866894302550_2
  misc_feature (1)..(184): n is any nucleotide
nnnnnnnnnnnnnnnnnnnnnnnnnnnnnnnnnnnnnnnnnnnnnnnnnnnnnnnnnnnnnnnnnnnnnnnnnnnnnnnnnnnnnnnnnnnnnnnnnnnnnnnnnnnnnnnnnnnnnnnnnnnnnnnnnnnnnnnnnnnnnnnnnnnnnnnnnnnnnnnnnnnnnnnnnnnnnnnnnnnnnnnntgcctaatgaaactctggggggggggggacgtgggggtctctgctttatgggactgtgtgggcgggcttgaaggggctctgctttacggcgctgggtgtgggttctgggragactstgctctatgggatcatggtaggggcttgggggggctctgcttaatggcactgtrtggagggacattgggggtctcagccttataggacgttgrggatgatttgtgggggtctcagcctttgcaatattgaggrcactctgggtggtggtctgagcccttagggcccccagggagggctttagggtgggctcagccttttgggatactggggtccttttgaggggagggtctcaactttatgggatgttgcaaagagtttggagggggtctcagctctgagggatattggggacaattcg

SEQ ID NO: 52198 - DNA, 556 bp, Chicken  19866894302550_3
  misc_feature (1)..(130): n is any nucleotide
nnnnnnnnnnnnnnnnnnnnnnnnnnnnnnnnnnnnnnnnnnnnnnnnnnnnnnnnnnnnnnnnnnnnnnnnnnnnnnnnnnnnnnnnnnnnnnnnnnnnnnnnnnnnnnnnnnnnnnnnnnnnnnnnnntgcctaatgaaactctggggggggggggacgtgggggtctctgctttatgggactgtgtgggcgggcttgaaggggctctgctttacggcgctgggtgtgggttctgggragactstgctctatgggatcatggtaggggcttgggggggctctgcttaatggcactgtrtggagggacattgggggtctcagccttataggacgttgrggatgatttgtgggggtctcagcctttgcaatattgaggrcactctgggtggtggtctgagcccttagggcccccagggagggctttagggtgggctcagccttttgggatactggggtccttttgaggggagggtctcaactttatgggatgttgcaaagagtttggagggggtctcagctctgagggatattggggacaattcgggggatctcag

SEQ ID NO: 52199 - DNA, 517 bp, Chicken  19866894302550_4
  misc_feature (1)..(91): n is any nucleotide
nnnnnnnnnnnnnnnnnnnnnnnnnnnnnnnnnnnnnnnnnnnnnnnnnnnnnnnnnnnnnnnnnnnnnnnnnnnnnnnnnnnnnnnnnnntgcctaatgaaactctggggggggggggacgtgggggtctctgctttatgggactgtgtgggcgggcttgaaggggctctgctttacggcgctgggtgtgggttctgggragactstgctctatgggatcatggtaggggcttgggggggctctgcttaatggcactgtrtggagggacattgggggtctcagccttataggacgttgrggatgatttgtgggggtctcagcctttgcaatattgaggrcactctgggtggtggtctgagcccttagggcccccagggagggctttagggtgggctcagccttttgggatactggggtccttttgaggggagggtctcaactttatgggatgttgcaaagagtttggagggggtctcagctctgagggatattggggacaattcgggggatctcag

SEQ ID NO: 52200 - DNA, 477 bp, Chicken  19866894302550_5
  misc_feature (1)..(51): n is any nucleotide
nnnnnnnnnnnnnnnnnnnnnnnnnnnnnnnnnnnnnnnnnnnnnnnnnnntgcctaatgaaactctggggggggggggacgtgggggtctctgctttatgggactgtgtgggcgggcttgaaggggctctgctttacggcgctgggtgtgggttctgggragactstgctctatgggatcatggtaggggcttgggggggctctgcttaatggcactgtrtggagggacattgggggtctcagccttataggacgttgrggatgatttgtgggggtctcagcctttgcaatattgaggrcactctgggtggtggtctgagcccttagggcccccagggagggctttagggtgggctcagccttttgggatactggggtccttttgaggggagggtctcaactttatgggatgttgcaaagagtttggagggggtctcagctctgagggatattggggacaattcgggggatctcag

SEQ ID NO: 52201 - DNA, 600 bp, Chicken  19866894302551_1
cttcaagcaactggagctactggagggaaataacgggaactcattttcaagtcattactgtgaaggagggagtggatcagcagccaaggaattaatacctgctccagctgaaatcccaaagcaagcacagggcaccgtgcacaagcactggggctgctcacaaagcacaacacggggtctgctgcaaagacagggaaatgacagctgcaatcctctgccgcgttgccaggacagcagctcagctatgcactcagttacggtccaggggtattgccaaaaccaatctttgcaacagcaaamccccagcagacygtttaaaagcagtctcctaaacaaacatgcctgagagaggaaggggttacatcacttacacgctttaaaggttgtttatagctagctttaggctacagattttcacaaaaatatgacctcatccttcatatgactcctctgtttcagggaaaatcaccacacaatgctgccttttcccttactcaccttggacaagcaataagttacaagctctagccttcamaatatgactgctggcatttgcattagtgcccactgaaattaaagcaactgcttgcatcagagttg

SEQ ID NO: 52202 - DNA, 600 bp, Chicken  19866894302551_2
ggagctactggagggaaataacgggaactcattttcaagtcattactgtgaaggagggagtggatcagcagccaaggaattaatacctgctccagctgaaatcccaaagcaagcacagggcaccgtgcacaagcactggggctgctcacaaagcacaacacggggtctgctgcaaagacagggaaatgacagctgcaatcctctgccgcgttgccaggacagcagctcagctatgcactcagttacggtccaggggtattgccaaaaccaatctttgcaacagcaaamccccagcagacygtttaaaagcagtctcctaaacaaacatgcctgagagaggaaggggttacatcacttacacgctttaaaggttgtttatagctagctttaggctacagattttcacaaaaatatgacctcatccttcatatgactcctctgtttcagggaaaatcaccacacaatgctgccttttcccttactcaccttggacaagcaataagttacaagctctagccttcamaatatgactgctggcatttgcattagtgcccactgaaattaaagcaactgcttgcatcagagttgtcattccaggct

SEQ ID NO: 52203 - DNA, 418 bp, Chicken  19866894302551_3
agctcagctatgcactcagttacggtccaggggtattgccaaaaccaatctttgcaacagcaaamccccagcagacygtttaaaagcagtctcctaaacaaacatgcctgagagaggaaggggttacatcacttacacgctttaaaggttgtttatagctagctttaggctacagattttcacaaaaatatgacctcatccttcatatgactcctctgtttcagggaaaatcaccacacaatgctgccttttcccttactcaccttggacaagcaataagttacaagctctagccttcamaatatgactgctggcatttgcattagtgcccactgaaattaaagcaactgcttgcatcagagttgtcattccaggctctctgcaaactcacgctcacattaaagttgatgtcagcatg

SEQ ID NO: 52204 - DNA, 600 bp, Chicken  19866894302562_1
aacgagaagcagtgtgccacaccctctcattcttcctggagtagagaaggacctccataaacattcatctcatatccaccaagagtaagatgttctctcttggtagatctggaggccgcacatggtgggaaataatgtcaaaggctcaaagtaagatgcagaaattttaatgaatgtttaaagaggaaaatgagatcagtctgagcagaggttccacagcataggatttgcatgatctcatgtttgaaatcaggcaggccactttcaagcagagaatgtactggtactgagaaatctcamatctgggatcatagggggaaaaaaatcagagaaaaagtggagacagagatggataaatggattgaggaatggaagctgagacgtgaagcaggttgtcagaaagcccaggactgcctcttccagccagtatttcttaagagtagctgaggatggtcaggtattctgaaagcaggggcttgaagattccttcttcatccagaaccatgtttctggtttatggatgaatttctccaggaccatggccagtggctttagcagggtgggcaccttctgccacagtagcggctgccaaagccagac

SEQ ID NO: 52205 - DNA, 600 bp, Chicken  19866894302564_1
cagatatgtttgccttctcaggactagaaactcttatcttattgaggactttttcttctgttttgctaaggagagattgattatgtgattacattgtctacctattaatctgcccatggtattgaatatactaaatgttgaacaagaaggttcattttagtcatacatacatggaaaaagacaaagtaattttacagggaagttctgaaaagtttcacagaagtcaggaacagaattcagggtacatgaccaagactcaaaacagaaagcagtaggaaagttatccaccctacattaagyttggcagtggggttttggtcagttgtcacatctctagccccagagcacaagtgtagctctgtgcaaaacctagcacatgtggtttcttccccaaagggtatgttgcaagaatcaaaaggaagaaatgcatttatagaaatgacagtgataacatggaatatcactgggtttcatcagttcattgatgaatcatcctgttcaatctaagtagttatttctgttatttgtttacaaaaatcctgttcaacctaagtagttatttctattacttgtgtacaattttttttttatttgttaggg

SEQ ID NO: 52206 - DNA, 600 bp, Chicken  19866894302569_1
tacgttacattggcatgtaaagaatgccttgtccccccagtgttcatagtaactttgcttcaagaacaccccccgctgtataaatgccattgggcacatgctcgatttactggcaagtcaaaatccagaggcagatattgctttaccttgtacaataatggcacaactggcatgtgatcaaacagaaggacgtggggcttgttttctttcttccagttagacaggaagcggatgtagtttttatctgtaatctttaaacagagtcagaatgttaatttaacctcagaacagtcagatacrtgcagtgctgtaggattaggtgcctgagtgggaaccgggtctgaaaaagctgccaaagatatgcctgacgtgtgctggtttcactcgggactgacacaagctgtggtactgcagctggaagagcagcatacagactacactgctggcctaaatgtgcagtagtgcaattagccctgtcacaaaggaaataagcattacagaacrgtgttgtgtgcttgcttccaagcagggaaagagggtgtgtaggcataattacagctcttgaagcactctggttccccacttggctctyctcacgtc

SEQ ID NO: 52207 - DNA, 600 bp, Chicken  19866894302569_2
tctttcttccagttagacaggaagcggatgtagtttttatctgtaatctttaaacagagtcagaatgttaatttaacctcagaacagtcagatacrtgcagtgctgtaggattaggtgcctgagtgggaaccgggtctgaaaaagctgccaaagatatgcctgacgtgtgctggtttcactcgggactgacacaagctgtggtactgcagctggaagagcagcatacagactacactgctggcctaaatgtgcagtagtgcaattagccctgtcacaaaggaaataagcattacagaacrgtgttgtgtgcttgcttccaagcagggaaagagggtgtgtaggcataattacagctcttgaagcactctggttccccacttggctctyctcacgtcagtgacacagatcagctccgggctgaattaattggatgagccactgcaacagctaaagaggtctgtctatccaagtcagacagcaactggagtgctctgcagccctctcacatgtaccttttctacgaggttccctggcagcaggttctccacaaactgccgcaggttttctcgaacgacggcgctgtggaagaaggttatctt

SEQ ID NO: 52208 - DNA, 600 bp, Chicken  19866894302569_3
cagatacrtgcagtgctgtaggattaggtgcctgagtgggaaccgggtctgaaaaagctgccaaagatatgcctgacgtgtgctggtttcactcgggactgacacaagctgtggtactgcagctggaagagcagcatacagactacactgctggcctaaatgtgcagtagtgcaattagccctgtcacaaaggaaataagcattacagaacrgtgttgtgtgcttgcttccaagcagggaaagagggtgtgtaggcataattacagctcttgaagcactctggttccccacttggctctyctcacgtcagtgacacagatcagctccgggctgaattaattggatgagccactgcaacagctaaagaggtctgtctatccaagtcagacagcaactggagtgctctgcagccctctcacatgtaccttttctacgaggttccctggcagcaggttctccacaaactgccgcaggttttctcgaacgacggcgctgtggaagaaggttatcttcccattaatcagtcccagtatcgacggcgtgctgtgagcaccgaggtgatgggcmaggcgcctctcgtacccagcatgaacgacccca

SEQ ID NO: 52209 - DNA, 600 bp, Chicken  19866894302569_4
tcttgaagcactctggttccccacttggctctyctcacgtcagtgacacagatcagctccgggctgaattaattggatgagccactgcaacagctaaagaggtctgtctatccaagtcagacagcaactggagtgctctgcagccctctcacatgtaccttttctacgaggttccctggcagcaggttctccacaaactgccgcaggttttctcgaacgacggcgctgtggaagaaggttatcttcccattaatcagtcccagtatcgacggcgtgctgtgagcaccgaggtgatgggcmaggcgcctctcgtacccagcatgaacgaccccaatgcccactcctgtaaaaggagagcaaattgacctaaaagatgacagatgaccccaaacgtggaccagacagcgtgagtttgaagaccccttcccttgcccagcaccacacttgggagttatttatttgtgtcacggtccctcccagctctgtactttccttgtgctgcagtcccttggaacttgtgctgaaagcttttatcaagggagagagggaatgtgatggcctcttttgttctacccactgatgtcacacgtgctacagtaa

SEQ ID NO: 52210 - DNA, 600 bp, Chicken  19866894302574_1
agctgctgttcgacaggaatcctgtgcagggaggggtggctgctgccgcctgaggggcagtgagcctgcccagggggagagagggcagggtgcgcccgcctgagggagggacctgccctatgggaggactgtttaaatacttgtattgacagtttgctcattcacttaataagatttccatacctgacaattttgtgccaaatgccagtaaatcctgctttaaaagctggagtgagatggtatcttttggctggctggtctcaatgaaacatggagtggatcttcctcaggactgtctcsgtgccatctgaacaccttttggtgcagaccctgtccctgacccccagctgccccttccctgacacagctccatgccgttccctcgggccctgtcgctgtcacagaaagcagagctcagcgctgcccctccgctacctgtgaggagctgcagccgccatgaggcctcccctcagctcctctgctctgggctgagcctatcaggggacctcagcttctcatcatacagcttccctgctgggccctccactatcactgtagccttaaaaaagacttaggctggcagtgctgtcttcagggtgg

SEQ ID NO: 52211 - DNA, 600 bp, Chicken  19866894302574_2
tgtcagccactggtgacacggcatgttttgaacgagatgttccagctctggcaggccaacgagctcaaaaatgagcttggagcctggctgaagcatagctgccaactgttggcatccagatggatccagccaggagggtgaagtatcaccacgaacctatcatacacagactttacaggcagctttgagaactcagtatcaattcttccatcgggtttttatgtcaataagcatttttttgtttgtttgtttactgaagtagcactactgataggagtatgtttgctgcagtcctgtaaracacaatgatgacagctgtaacagctgagcaaactgatgctttcaagcactggatacrtttcagtttttcttggcctggcaaggcgcagcctgtaaaatatttcattttacactattgtcttgtcttttggtgatggacttgtgcaagaatgcagatttttttgttgtaatacattatgcattaagwgtttactccgtaaaatttgctcctggaattttgttaatggtatttttggactctgaattgcaaaaagcatcccctacagaaakacgaaaattgataacatctgaaaattagtc

SEQ ID NO: 52212 - DNA, 600 bp, Chicken  19866894302574_3
acgagctcaaaaatgagcttggagcctggctgaagcatagctgccaactgttggcatccagatggatccagccaggagggtgaagtatcaccacgaacctatcatacacagactttacaggcagctttgagaactcagtatcaattcttccatcgggtttttatgtcaataagcatttttttgtttgtttgtttactgaagtagcactactgataggagtatgtttgctgcagtcctgtaaracacaatgatgacagctgtaacagctgagcaaactgatgctttcaagcactggatacrtttcagtttttcttggcctggcaaggcgcagcctgtaaaatatttcattttacactattgtcttgtcttttggtgatggacttgtgcaagaatgcagatttttttgttgtaatacattatgcattaagwgtttactccgtaaaatttgctcctggaattttgttaatggtatttttggactctgaattgcaaaaagcatcccctacagaaakacgaaaattgataacatctgaaaattagtcactcagagagagataggcaaatttcccaatccatttggagtggtgcatctgtaactgt

SEQ ID NO: 52213 - DNA, 600 bp, Chicken  19866894302574_4
agaactcagtatcaattcttccatcgggtttttatgtcaataagcatttttttgtttgtttgtttactgaagtagcactactgataggagtatgtttgctgcagtcctgtaaracacaatgatgacagctgtaacagctgagcaaactgatgctttcaagcactggatacrtttcagtttttcttggcctggcaaggcgcagcctgtaaaatatttcattttacactattgtcttgtcttttggtgatggacttgtgcaagaatgcagatttttttgttgtaatacattatgcattaagwgtttactccgtaaaatttgctcctggaattttgttaatggtatttttggactctgaattgcaaaaagcatcccctacagaaakacgaaaattgataacatctgaaaattagtcactcagagagagataggcaaatttcccaatccatttggagtggtgcatctgtaactgtaattaaagattgctccatgatgcatatactgacatagatcctcccttggaaacgtgtggtgttcagtcaccattgcctgacaatgccaaaactatcagagcaacaaaaatatgactggaaagtatggtg

SEQ ID NO: 52214 - DNA, 600 bp, Chicken  19866894302574_5
ataggagtatgtttgctgcagtcctgtaaracacaatgatgacagctgtaacagctgagcaaactgatgctttcaagcactggatacrtttcagtttttcttggcctggcaaggcgcagcctgtaaaatatttcattttacactattgtcttgtcttttggtgatggacttgtgcaagaatgcagatttttttgttgtaatacattatgcattaagwgtttactccgtaaaatttgctcctggaattttgttaatggtatttttggactctgaattgcaaaaagcatcccctacagaaakacgaaaattgataacatctgaaaattagtcactcagagagagataggcaaatttcccaatccatttggagtggtgcatctgtaactgtaattaaagattgctccatgatgcatatactgacatagatcctcccttggaaacgtgtggtgttcagtcaccattgcctgacaatgccaaaactatcagagcaacaaaaatatgactggaaagtatggtggtttttaacactgcatttcattaaaggtaaggttatgaggcaatggaaaggcactcctgcctaatagctctcacctgaacata

SEQ ID NO: 52215 - DNA, 600 bp, Chicken  19866894302575_1
ctgactcctcaagcatagagttttgcagcatgcaaaactggactgtatatgtagagaagcagttttcagtacagcagtgattcagcagagagggggagatatttgcaaaagtgcacatctgaaagagatatgagtgacagtgcaaagaaaaaaaatggcatttattgccatatgggagaagaaaaaaagtctcaagtgattctgggttgtctgaatataagtacaatgacacactgggaaagctaatagattgactgctgcaccaaagacatgttttatgtgagcacatgctctggcagrtactttctggataattaagctgtggcatctgaagatgctactacccacccatctcttctgctgcagattgccaaccagcacagccagcagaaaagaatgtccactggtgcattcatttctccagttctcagtctggagtcttcacacaaagttagcttcattgttgacctactttggactcagaactggattaatgaggcaaaaaatgtactcagttctgatgcttctgttacagtagtaataacttctgggttcaataagtgaaggcagtcagaagatgctgtaaaagtgatgcagtgg

SEQ ID NO: 52216 - DNA, 530 bp, Chicken  19866894302578_1
ctttctcctttcttcatttttcccttccatttgtcttcagttttcttatcaactttcctagacttctgatctgtcctttgtgttgccataacagtgcaagtgacataatactttaaatatcctacgattacaagtattgctgtcaaagctcatctgaaaaggtgctttaaaccaataccctccacagcaaactatctcacagcatcctaccgccaggcatccttctgatcctgtcacctgcaagagcacacattagctcaatttttactttgtcaaaaagccatacagaatcacatcacratcttattgttgctcagcctggctccagctgttgtcagctgccaagacgccttgaggctgctcttttactttctgatgctagcccagaatataaaaacacatcaatgtggctttcatctacccatatcctaactttctcatgcaaacaaatttggttctgttaattctccttttttttttttttttgaatagagaacacagcatcaatgttttgcaatactagaaacatt

SEQ ID NO: 52217 - DNA, 599 bp, Chicken  19866894302582_1
  misc_feature (1)..(45): n is any nucleotide
nnnnnnnnnnnnnnnnnnnnnnnnnnnnnnnnnnnnnnnnnnnnntacgcatgcgccaggttcgagacgatagtacgcatgcgagagccaggagacggcagtacgcatgcgcgagtcgggagacagcagtacgcatgcgcaacatcatagacagcagtaggcatgcgcgagcttcgggttggaagtacgcatgctcgagcgtcgagaaggtagtacgcatgcgcgacgttatagacggtagtacgcatgcgcgatattatggacggcggtacgcatgcgcgaggttcgagacggcagcaygcatgcgcggcaatatgtacagcagtacgtatgcgcgaactgcgagacggcaatacgcatgcgcgacatcatagcagtacgcatacgggagcttcgagacggtagtacgcatgcgctagccgggagacggccgtacgcatgcgcgacattatagacagcagtacgcatgcgcgagtttcgagacggcagtacgcatgcgcgagccgggagacggcagtacgcatgcgcgacatgatagacagcagtacgcatgcgcgagcttcgagacggcagtacgcatgcgcgagcgcctatacggc

SEQ ID NO: 52218 - DNA, 599 bp, Chicken  19866894302593_1
  misc_feature (1)..(232): n is any nucleotide
nnnnnnnnnnnnnnnnnnnnnnnnnnnnnnnnnnnnnnnnnnnnnnnnnnnnnnnnnnnnnnnnnnnnnnnnnnnnnnnnnnnnnnnnnnnnnnnnnnnnnnnnnnnnnnnnnnnnnnnnnnnnnnnnnnnnnnnnnnnnnnnnnnnnnnnnnnnnnnnnnnnnnnnnnnnnnnnnnnnnnnnnnnnnnnnnnnnnnnnnnnnnnnnnnnnnnnnnnnnnnnnnnnnnnnnncccagatacattgtggaatctctgtacctgaacagcatcaaagtttggctggacaaagtcctagcccygctgtgagcaggggattgggctaaaggaggtacctaccagcctatgtggtcccattactccatgggttttgtgagaaaccattcctaaaatttaccatgaaggagactgctttttatgtaattatagctgcttttaatctaaatatggctaaataatcttcaattaagcctttatggagctggagacgtatctgatgttttcattctttccaattccttactccacttcacctaggaagaagtagtctaaataacagtctcttttcctttatgtgtgtctgtaaaaaatcttcacttta

SEQ ID NO: 52219 - DNA, 600 bp, Chicken  19866894302595_1
tatttgagactcgtaacttcctttttctttaagtagtattccttaaagtacgtcttctcagctcaagtgtcagatcaattaattttttctctctttgtttgctctagaggagacttcttttattacaagaaaagaaaaaaaaatgtacatatgtgatagtaactttaattattgaaggtttttgacaccaccgatgaaaacgcttcctacaaagtcagctttgagcatagccagtgacaatactgtgaaggtcagtgttcagattaacatgcttaatgcaaaaacatatggcagattttkgtactaatagaaatagtaacatgtgaactgattgaaaaagtgaaaaacacatccagaataattagaagcctctgatactgagtaactaaacaagcttccttgggaagcagaagcttaaaatttatgtccttgcctgtttcttctaatgtaaggtgagttggattccaaaatgctttttttttttttttttttttaatttagttccttctgagacagttgccaggaagaatttcaactgacggaatagatccttggtatatcccctagtattaaacacattgcacgccggcatcctgattc

SEQ ID NO: 52220 - DNA, 600 bp, Chicken  19866894302595_2
catagcataaggaactaacagcattggaggatggaaaaaaaaaaaaaaaatctgtcccttaagcagtaataattggatttggggctcactccagcacaaattagcattcatggcatctggcccagggaccagatgctgtaggactttcgttgagtttggtagtgtccagttaatggcagaaaatgacttttaaggtaaaaatcaaacaaaggttagagagaatagcagtgttttcaccaaagtccaccccacagcattagggactggtgggagctaggacatatcttgaagctgttgaarctagaacttttttttctggaaaggtcaggaaaagaataaataatccactggtctacatttttcacttatttaaagaaaagcaattcggctttgattcaacctaacatggcagaactacttccaagaagtggaaggacacattacctcctacactggattagctccgttaaaaatgttatctgctatatgaatcatactctcatttcaagaaattctaccttgttctacaattgtaggccagtttgacatactaatactactggcaaattaagagagcccccaaagccatggaacattgtg

SEQ ID NO: 52221 - DNA, 600 bp, Chicken  19866894302597_1
gagtcctccggctggcagcacaaaatccctattgctggaaagaatgatgggcagcagaaaacagccttgaaaaataccttttctgccaaggaaaacaaatggggtctttctttagccgtgcatttatataaataaacacaggaatattttgcgagccctatgggactctcccggagtagtgttttgctgaatcagggtgggagccatcctccgttgctgagcctgcgcacgagcatggctgctctgcctgggccgagaggacgcagtgccatgtgggcagtgcccgtatggagctgcccygtgccagcagggcaggtgtggcagctctgaactcctcccgtgctcatgcacgtgtttcagtagaaatcgcagcacctcgtggtgggcccttcagcacgagggagcagggcaggtttttctgcacctgccaccgaagggatcgtttttgctttccagtgagtttaacggcccacacggcactgtgccttgctcatccctaatgcagggatygctcttactaatgctgtcatgagccagcccagaactgcctgcctgctgagctgccatgcacaagatgaggctggtgccgcaagccaagat

SEQ ID NO: 52222 - DNA, 565 bp, Chicken  19866894302597_2
ccgttgctgagcctgcgcacgagcatggctgctctgcctgggccgagaggacgcagtgccatgtgggcagtgcccgtatggagctgcccygtgccagcagggcaggtgtggcagctctgaactcctcccgtgctcatgcacgtgtttcagtagaaatcgcagcacctcgtggtgggcccttcagcacgagggagcagggcaggtttttctgcacctgccaccgaagggatcgtttttgctttccagtgagtttaacggcccacacggcactgtgccttgctcatccctaatgcagggatygctcttactaatgctgtcatgagccagcccagaactgcctgcctgctgagctgccatgcacaagatgaggctggtgccgcaagccaagatggccggccccctctctggaagatggccgctggccctgccacgcttggcatgagctgagggttccctgacacagtggggatcccctatgatcccctctgagtgtgcttgtgatggggacagccgagctgcgtgccgtgggctgcatagcggaagggcaggggcagccatcttaagt

SEQ ID NO: 52223 - DNA, 600 bp, Chicken  19866894302599_1
cactccatgtccataataggactccatgcaccctaacaggagattctgtgcattactatcaactgtctttaaagttcaacccactttctctctatgcctctgtcaagctgagacagcagccttatcctatccccacagatacaattaaagactgagaagtgactaatttgaaataattagataacttgtgtctgcatcaccagttcatataaacaacatatacatctttagtattgcaatcctagctcagtcacataagcagtaaatgtacagattcagagctgatgtctaactcaaatrcccagtaaacttcatccttgtacttgcaataggaatttactcaggattagcctaacagtttatgaagatgctaaactgaattacataattctgttaaccttctgatccaagcattgctctatgttgacatataagtgatagctagtttacactgaccttttttcattcccaaaaatgggaatcctcacatttcaacagtaactggcacattctcagcataacatttcagtctgagtaattagtattacttcttacaagattttctccaaggaaaagaaaatcaacagcactgtcagagat

SEQ ID NO: 52224 - DNA, 599 bp, Chicken  19866894302600_1
  misc_feature (1)..(98): n is any nucleotide
nnnnnnnnnnnnnnnnnnnnnnnnnnnnnnnnnnnnnnnnnnnnnnnnnnnnnnnnnnnnnnnnnnnnnnnnnnnnnnnnnnnnnnnnnnnnnnnnnntaatttcatatcttttccacatctttttaaattgaatctatttttatagctccagctgtaaagccagactcacttagtaaccatgtgtccaactacaaagctcgctgagggagtgaaaacaaaaaaataaagtaatattttcattccaaaaataacctgagctcttcagcttgctttctctccctctcttttctttctctcrtttttttttttttaaattagattcaatatagaagcctaaagccaagattcctttgagtacttatcatatgtcttgccagagagcaccagaaactgagcagttggatgtttcagatccatgtaactataacatacctctatggtcagcaaagaaaaagaagctggggtctcctacggaatcaaaggctgtaaaacactgtggtaagagaagttttcttctacaggcccagacagtggctacagtgctgtgggggaacaatatttgtgacgtggaaatccttgctcactccgactttgcaa

SEQ ID NO: 52225 - DNA, 600 bp, Chicken  19866894302613_1
gggaaccaggcacatacaactaaccctgaccacattcatcccataaaccaaagaaacgtctagcatttggctgacacctctgaaaataaaaacacaaaagggaaaagacttaagcacaagagaaagtggaacagaggcatcttacctggctaaaaacctacacctgaggctgcttgacaaaggacataggaaagattaagtgaagctaagccacatcagacagtcctaggccccaaactaagaccaccaatatcctcacctcagcttgtataattttcctgaagggaggaggaaaagaargagagctgttggagaggatccagaggagggacacaaagataaacagggagctggagcacctcccctacaaagacaggctgaggtagctgggcktgttaagtatagagagaagaaagcggctgggtaaactaaccgcagcatttcagtacctgaatagagcctataaacaggaggggagtcaactgtttgacaggatagataacaggagaacaaggggaaatggttttaagttcagggagggaagatttaggttggatgtcggggggaagttcttcactataagaacggcgaggcagagaa

SEQ ID NO: 52226 - DNA, 600 bp, Chicken  19866894302613_2
ggaaccaggcacatacaactaaccctgaccacattcatcccataaaccaaagaaacgtctagcatttggctgacacctctgaaaataaaaacacaaaagggaaaagacttaagcacaagagaaagtggaacagaggcatcttacctggctaaaaacctacacctgaggctgcttgacaaaggacataggaaagattaagtgaagctaagccacatcagacagtcctaggccccaaactaagaccaccaatatcctcacctcagcttgtataattttcctgaagggaggaggaaaagaaaragagctgttggagaggatccagaggagggacacaaagataaacagggagctggagcacctcccctacaaagacaggctgaggtagctgggcktgttaagtatagagagaagaaagcggctgggtaaactaaccgcagcatttcagtacctgaatagagcctataaacaggaggggagtcaactgtttgacaggatagataacaggagaacaaggggaaatggttttaagttcagggagggaagatttaggttggatgtcggggggaagttcttcactataagaacggcgaggcagagaaa

SEQ ID NO: 52227 - DNA, 600 bp, Chicken  19866894302613_3
acaaaagggaaaagacttaagcacaagagaaagtggaacagaggcatcttacctggctaaaaacctacacctgaggctgcttgacaaaggacataggaaagattaagtgaagctaagccacatcagacagtcctaggccccaaactaagaccaccaatatcctcacctcagcttgtataattttcctgaagggaggaggaaaagaaagagagctgttggagaggatccagaggagggacacaaagataaacagggagctggagcacctcccctacaaagacaggctgaggtagctgggcktgttaagtatagagagaagaaagcggctgggtaaactaaccgcagcatttcagtacctgaatagagcctataaacaggaggggagtcaactgtttgacaggatagataacaggagaacaaggggaaatggttttaagttcagggagggaagatttaggttggatgtcggggggaagttcttcactataagaacggcgaggcagagaaacaagctgcccagagagactgcggatacaccgtccccggagatgttcaaggccaggttggatggggctctggacagcctggtctagtatcaaa

SEQ ID NO: 52228 - DNA, 600 bp, Chicken  19866894302613_4
aaacaggaggggagtcaactgtttgacaggatagataacaggagaacaaggggaaatggttttaagttcagggagggaagatttaggttggatgtcggggggaagttcttcactataagaacggcgaggcagagaaacaagctgcccagagagactgcggatacaccgtccccggagatgttcaaggccaggttggatggggctctggacagcctggtctagtatcaaatgagaaggttagtggccacacctgtgtcaaggagaatggagatccatgatacttgaggtaccttcaaacckgcaccactctgagattctgtgagaaagcttggcaggaaaatcaactagtaagaaacaaaataattaatgctaccaaagactcaaaaccaagaataaatacaaaaaggaaaagaacagcaaatataacaggaaaaacaacatggaaaaaaaactttattcacagctgacgacgctgacaaaaagagtgataaagtcttacacaactgttcaaaactgtggctccaaaaggcaaagaaatacaagaaaaacagtcaacagatacccaatcttgattttgcagcgccaggtccccacgccgct

SEQ ID NO: 52229 - DNA, 599 bp, Chicken  19866894302617_1
  misc_feature (1)..(161): n is any nucleotide
nnnnnnnnnnnnnnnnnnnnnnnnnnnnnnnnnnnnnnnnnnnnnnnnnnnnnnnnnnnnnnnnnnnnnnnnnnnnnnnnnnnnnnnnnnnnnnnnnnnnnnnnnnnnnnnnnnnnnnnnnnnnnnnnnnnnnnnnnnnnnnnnnnnnnnnnnnnnnnnnntttttttttttttttttttttttgtggttatttctgctcagaaaaatatctatgcttttcattgtcaatgcagagtttatttcttttggagaagccaataggaaaactttctgtaacttagaatagattttataatcartgattactcaatggttttaaactgagacaggggaggtttaggttagatattaggaagaagtttttccacacagagggtggtgaggcactggaacaggttgcccgaggaggctgtggrtgccccatccctggaggcattcaaggccaggctggatgtggctctggccagcctggtctggtggttggttaccctgcacatagcagggggtttgaaaccagatgatcrttgtggtccttttcagtccaggacattctatgattctgtgactacagactccttagaaagatcagagttcaaga

SEQ ID NO: 52230 - DNA, 599 bp, Chicken  19866894302617_2
  misc_feature (1)..(44): n is any nucleotide
nnnnnnnnnnnnnnnnnnnnnnnnnnnnnnnnnnnnnnnnnnnntttttttttttttttttttttttgtggttatttctgctcagaaaaatatctatgcttttcattgtcaatgcagagtttatttcttttggagaagccaataggaaaactttctgtaacttagaatagattttataatcartgattactcaatggttttaaactgagacaggggaggtttaggttagatattaggaagaagtttttccacacagagggtggtgaggcactggaacaggttgcccgaggaggctgtggrtgccccatccctggaggcattcaaggccaggctggatgtggctctggccagcctggtctggtggttggttaccctgcacatagcagggggtttgaaaccagatgatcrttgtggtccttttcagtccaggacattctatgattctgtgactacagactccttagaaagatcagagttcaagaggcagaagctaagtatcaaaaataaactcaactttcttacattttccagaagaattgtactgatcttgggattttaaacaccatgtcccaactcatgtctgacagctatttggtagg

SEQ ID NO: 52231 - DNA, 600 bp, Chicken  19866894302617_3
tcaatgcagagtttatttcttttggagaagccaataggaaaactttctgtaacttagaatagattttataatcartgattactcaatggttttaaactgagacaggggaggtttaggttagatattaggaagaagtttttccacacagagggtggtgaggcactggaacaggttgcccgaggaggctgtggrtgccccatccctggaggcattcaaggccaggctggatgtggctctggccagcctggtctggtggttggttaccctgcacatagcagggggtttgaaaccagatgatcrttgtggtccttttcagtccaggacattctatgattctgtgactacagactccttagaaagatcagagttcaagaggcagaagctaagtatcaaaaataaactcaactttcttacattttccagaagaattgtactgatcttgggattttaaacaccatgtcccaactcatgtctgacagctatttggtaggactgagggacaaagtcacaagaagatttgaaaagcgaatcacacagttggagccaggcacattccaaaggaaacatcagactttccaaagaagccttccagtgtgcagt

SEQ ID NO: 52232 - DNA, 600 bp, Chicken  19866894302619_1
tgtctcccttttctacacagcacttcctccaaaaagaaaaatgtcaattgtgatttgctgtaatatgaaaaggggtaagatttgaggttgttcatcaaagtgaaacatttttgtacaggcttttctgcttcttgaagttctgacaaagtgggctccctcctaattctacaatacattttcaggctataaaacttggaaggttgggacagtcggctcattacattgcagacgtaagtagttgaaaagaggcaattttactgttgtctgcgttctggaaaaaaaaatggtgatggcagaacraaatagaaacttcaggtctgcaggaaggattctagatattccagtaattggactgtaatggtggtttaagtgattacagggtctatttctgttctggtatcttcttccacagttgagaatccaacaggcatgtataaattcagattttggtagggatactttgaaacatatatctcrtgttaatattgggatggaattgtttcactgcttgggaaacacgaatcacagagctccacttttgagcattcagcaaagatgtttttctacttaagttttgaattggcaaacttatctatatta

SEQ ID NO: 52233 - DNA, 600 bp, Chicken  19866894302619_2
ttcaggctataaaacttggaaggttgggacagtcggctcattacattgcagacgtaagtagttgaaaagaggcaattttactgttgtctgcgttctggaaaaaaaaatggtgatggcagaacraaatagaaacttcaggtctgcaggaaggattctagatattccagtaattggactgtaatggtggtttaagtgattacagggtctatttctgttctggtatcttcttccacagttgagaatccaacaggcatgtataaattcagattttggtagggatactttgaaacatatatctcrtgttaatattgggatggaattgtttcactgcttgggaaacacgaatcacagagctccacttttgagcattcagcaaagatgtttttctacttaagttttgaattggcaaacttatctatattaccgtacagcccaaggattctgaatggagctgtgatccaccgtatgtaatgtacctgggagaaatgtttatacctttgcatgtttttgggtatgtaaggaccatctacttaacaggaagtatgcatataggggcagagggcaaattagttttgtcagagagcatccctgctgtgtttg

SEQ ID NO: 52234 - DNA, 600 bp, Chicken  19866894302625_1
cactttttaagaaggcatttaataatttcaaagaaatgttcctcacaagcttttcagtggtagtgctggatgggcagaagctcacttgtaccagaagtgtcctattcatcagcaagatttgcagccccttgggtatttcccaaagatcattggtgtttgccaccgagggaagcaagtcctgcccagaaatgcccagtacacagactgtcagaaaagagcagctcaggctaaccaaaagggagagacagatttcaatactgtcacttacaatttatgggtaagaaaacagtcataaaaccrcatatgtggaaggggcacaccccgtataaaggaaaagatacatgttttagtgccagatgtgtgacatcaaccacatatcgtgcttcttacaggtagccaagtggtttgagcatccaggactrctaatgccaaggtaaagacttgcataaaaataattgtgcagtattttctgatacatggtratgtcaaacgaaagcagctgctgtaaatgaatatattcacattgactgttttattttagatgccatgatctactgtagtgtagtactgctgatgactgagtctgtatgacttactgca

SEQ ID NO: 52235 - DNA, 566 bp, Chicken  19866894302625_2
agccccttgggtatttcccaaagatcattggtgtttgccaccgagggaagcaagtcctgcccagaaatgcccagtacacagactgtcagaaaagagcagctcaggctaaccaaaagggagagacagatttcaatactgtcacttacaatttatgggtaagaaaacagtcataaaaccrcatatgtggaaggggcacaccccgtataaaggaaaagatacatgttttagtgccagatgtgtgacatcaaccacatatcgtgcttcttacaggtagccaagtggtttgagcatccaggactrctaatgccaaggtaaagacttgcataaaaataattgtgcagtattttctgatacatggtratgtcaaacgaaagcagctgctgtaaatgaatatattcacattgactgttttattttagatgccatgatctactgtagtgtagtactgctgatgactgagtctgtatgacttactgcagaagaatcagcagccggtacatctataccaactggacagtaccaaattccgatgcttcttgtctgaacgctgtactacctgtaaatat

SEQ ID NO: 52236 - DNA, 506 bp, Chicken  19866894302625_3
ccagaaatgcccagtacacagactgtcagaaaagagcagctcaggctaaccaaaagggagagacagatttcaatactgtcacttacaatttatgggtaagaaaacagtcataaaaccrcatatgtggaaggggcacaccccgtataaaggaaaagatacatgttttagtgccagatgtgtgacatcaaccacatatcgtgcttcttacaggtagccaagtggtttgagcatccaggactrctaatgccaaggtaaagacttgcataaaaataattgtgcagtattttctgatacatggtratgtcaaacgaaagcagctgctgtaaatgaatatattcacattgactgttttattttagatgccatgatctactgtagtgtagtactgctgatgactgagtctgtatgacttactgcagaagaatcagcagccggtacatctataccaactggacagtaccaaattccgatgcttcttgtctgaacgctgtactacctgtaaatat

SEQ ID NO: 52237 - DNA, 600 bp, Chicken  19866894302636_1
ttatactgcagccttttattattgagggctaaataaataattatttattgatttcttccctccgcagatggaatccatttccaaaaaactttgcaggaatttaatagcattgagatctgtactcagccaccgcactcagccaacaggctgaaaagtcactgtgacgagaaaaaaggggtgagggtgccaacaaaccaatggacttagagccacaggaccatcagataggtctcctgccccgagcactgggctaaatgcacgagccgggaagggagaaggttcccgtgaagcctgagtatrtcatatagtaaaatatagaggagaagaaaagattataagtgaaatacagttttctggctaagaagggcatctcttgactggcattacagggcctacgctaagtgcacaatggaacattttccactccaactgtttatggaattatggagaaaataatgagttrctgacaaatggcaacatctgtwctaggggtgagggaggtttttcttctcacacatgaaaaagaagaaacagagaacgggtctaaccatgcctagcagtgcttaagttacaaagaagctgaattgcctctcagaattc

SEQ ID NO: 52238 - DNA, 600 bp, Chicken  19866894302636_2
acgagaaaaaaggggtgagggtgccaacaaaccaatggacttagagccacaggaccatcagataggtctcctgccccgagcactgggctaaatgcacgagccgggaagggagaaggttcccgtgaagcctgagtatrtcatatagtaaaatatagaggagaagaaaagattataagtgaaatacagttttctggctaagaagggcatctcttgactggcattacagggcctacgctaagtgcacaatggaacattttccactccaactgtttatggaattatggagaaaataatgagttrctgacaaatggcaacatctgtwctaggggtgagggaggtttttcttctcacacatgaaaaagaagaaacagagaacgggtctaaccatgcctagcagtgcttaagttacaaagaagctgaattgcctctcagaattcccctaccatcctcacctccttgctgttcggtaagaggaaaggtataggtagctcagatgtgccgctaaagcttcccagatcacaatcccaaaaacaaagacatctgatgctctggaatagaacccataatttcccacctctggggcagccctatggaagaaat

SEQ ID NO: 52239 - DNA, 600 bp, Chicken  19866894302636_3
gccaacaaaccaatggacttagagccacaggaccatcagataggtctcctgccccgagcactgggctaaatgcacgagccgggaagggagaaggttcccgtgaagcctgagtatrtcatatagtaaaatatagaggagaagaaaagattataagtgaaatacagttttctggctaagaagggcatctcttgactggcattacagggcctacgctaagtgcacaatggaacattttccactccaactgtttatggaattatggagaaaataatgagttrctgacaaatggcaacatctgtwctaggggtgagggaggtttttcttctcacacatgaaaaagaagaaacagagaacgggtctaaccatgcctagcagtgcttaagttacaaagaagctgaattgcctctcagaattcccctaccatcctcacctccttgctgttcggtaagaggaaaggtataggtagctcagatgtgccgctaaagcttcccagatcacaatcccaaaaacaaagacatctgatgctctggaatagaacccataatttcccacctctggggcagccctatggaagaaatgaacaggttattcacccagttc

SEQ ID NO: 52240 - DNA, 600 bp, Chicken  19866894302643_1
actacttcatccccagttgaaggcattgctgcacagcgttatgaaattcaaggtaatcgcatcttcctaattgaaagctggagagagcactctgcattcctttctaagaggagtgtgtataatcaaattaaaaaaaatccaattgttgaggatcaaatttaagacaacaaagccaaaacaattcagaacggagtttaatgcttttgagcttaaccttaagggaaataatagatgagatggatttacatgtgtattcctccatgctgctcagtagagatggaagaggtgtctctgctaagraggagtctactgtaatttatttcattttgcagacctttatttaagagcctttgagtcatttgggcatgaatcaggggccagattaaaccttccacagtgcccttaaatgtgtactgtgcatctaaccgtgcacaaccgagctccaacacgtgctctgttgatgacgcagcagagggaattctgcttccttagttctgtagaaattgaggggaaaaccaactcttatagccagtgcagtccttagagcatccactcttgtttagctcaggtttttttcatttttaaaatcctgtctgtacc

SEQ ID NO: 52241 - DNA, 600 bp, Chicken  19866894302643_2
tctgttgatgacgcagcagagggaattctgcttccttagttctgtagaaattgaggggaaaaccaactcttatagccagtgcagtccttagagcatccactcttgtttagctcaggtttttttcatttttaaaatcctgtctgtacctgacaacagcctagtctcaggcatgaaacagcagtgctgcccagggagctagagggtggcattttggtataatctgtctttaagaagagctgcaacatgagaatcaatgtgttgttttcagtattgcattttccctggcctggaaatggacartgcctataccatgggaaggcttttgcaatggctgcaggcgcacagctagcggtctttgttactgcaccctttgctcagcccatggatgctgaggtctgctaagagcaaagtaatttcctcttactggcataggcagctgtgcttgcatttctatctctgtgtgcttttaggacagacggctttttcagcaaggaatggtataagacccatttacacagacagcttactgcttcacatgaatcctagggagcatttgcgcttctgcaacagacaggctgacagtgtgagtgaatgggcata

SEQ ID NO: 52242 - DNA, 535 bp, Chicken  19866894302644_1
tttatacacaaagaggaaacttcctagtgcttcatcagatctctgtttatctcagtggattctgatggcagcaaaacacagtctagttttgttaaaaactcagagagaattttgaatctcataaacgcggatattgtagcccggattttgagaggctgagaacctgcagcttctggggacacctgaaaatgggaggcgcacagtgtctctttcattttaaagcagctgtccacagtcataacacagacacggggcaacaaacaacagatcgtacaaaacttttacaatattctgcttttktttcaggctttaaaaaaaaaatraaatgaatactgcaggtgaggagcgtggcaaggcagaagattcataatgggtctttggcagctgaactgcacggcccagggttacrgctcatcttgtgttggggtgggagcagctyaagacaagctgtgtacatagcttatcttccacaaaattgctgggtaaaccagagcatctctagcatacataatgcttacatgctttaggaatcttc

SEQ ID NO: 52243 - DNA, 523 bp, Chicken  19866894302644_2
gaggaaacttcctagtgcttcatcagatctctgtttatctcagtggattctgatggcagcaaaacacagtctagttttgttaaaaactcagagagaattttgaatctcataaacgcggatattgtagcccggattttgagaggctgagaacctgcagcttctggggacacctgaaaatgggaggcgcacagtgtctctttcattttaaagcagctgtccacagtcataacacagacacggggcaacaaacaacagatcgtacaaaacttttacaatattctgcttttktttcaggctttkaaaaaaaaatraaatgaatactgcaggtgaggagcgtggcaaggcagaagattcataatgggtctttggcagctgaactgcacggcccagggttacrgctcatcttgtgttggggtgggagcagctyaagacaagctgtgtacatagcttatcttccacaaaattgctgggtaaaccagagcatctctagcatacataatgcttacatgctttaggaatcttc

SEQ ID NO: 52244 - DNA, 512 bp, Chicken  19866894302644_3
ctagtgcttcatcagatctctgtttatctcagtggattctgatggcagcaaaacacagtctagttttgttaaaaactcagagagaattttgaatctcataaacgcggatattgtagcccggattttgagaggctgagaacctgcagcttctggggacacctgaaaatgggaggcgcacagtgtctctttcattttaaagcagctgtccacagtcataacacagacacggggcaacaaacaacagatcgtacaaaacttttacaatattctgcttttktttcaggctttaaaaaaaaaatraaatgaatactgcaggtgaggagcgtggcaaggcagaagattcataatgggtctttggcagctgaactgcacggcccagggttacrgctcatcttgtgttggggtgggagcagctyaagacaagctgtgtacatagcttatcttccacaaaattgctgggtaaaccagagcatctctagcatacataatgcttacatgctttaggaatcttc

SEQ ID NO: 52245 - DNA, 426 bp, Chicken  19866894302644_4
ttttgaatctcataaacgcggatattgtagcccggattttgagaggctgagaacctgcagcttctggggacacctgaaaatgggaggcgcacagtgtctctttcattttaaagcagctgtccacagtcataacacagacacggggcaacaaacaacagatcgtacaaaacttttacaatattctgcttttktttcaggctttaaaaaaaaaatraaatgaatactgcaggtgaggagcgtggcaaggcagaagattcataatgggtctttggcagctgaactgcacggcccagggttacrgctcatcttgtgttggggtgggagcagctyaagacaagctgtgtacatagcttatcttccacaaaattgctgggtaaaccagagcatctctagcatacataatgcttacatgctttaggaatcttc

SEQ ID NO: 52246 - DNA, 396 bp, Chicken  19866894302644_5
cccggattttgagaggctgagaacctgcagcttctggggacacctgaaaatgggaggcgcacagtgtctctttcattttaaagcagctgtccacagtcataacacagacacggggcaacaaacaacagatcgtacaaaacttttacaatattctgcttttktttcaggctttaaaaaaaaaatraaatgaatactgcaggtgaggagcgtggcaaggcagaagattcataatgggtctttggcagctgaactgcacggcccagggttacrgctcatcttgtgttggggtgggagcagctyaagacaagctgtgtacatagcttatcttccacaaaattgctgggtaaaccagagcatctctagcatacataatgcttacatgctttaggaatcttc

SEQ ID NO: 52247 - DNA, 600 bp, Chicken  19866894302647_1
ataattgattttctggccttactctttcaagttaactatgtaaaaaattgacccaaatatatacggaactgaataagcggcaggagggaatggcttgcaaaggaaaagatgaaagctggaattttcaaaggagcaagagggagacgagcatccaaccactgtagaatctcaatacggttggatgcacaactgctgcaggaccccaccaaaatccaaggctggaaaaattaaatacttagtacatggcaaagaataaggaatggctttggaaacccaaagtagttaggggttataaacagmtaaagaagagagattatttctcatggggaaataccgggagcattaacgagagataaagaaacacttcagctgctaggcaggaggaagacactgtgtcaccctgccatcactaacatcaacatgtagatagacctgaattgggatgttaaaaaaatactgagggaaaaaaacaattaccactggctgcaaaacagtgttgtcagtagcattatagaaaagacagcaaactgagtraaattgagtaatttaagtaagggattattacagagctaactaagatctgggcaagactacagaagg

SEQ ID NO: 52248 - DNA, 600 bp, Chicken  19866894302647_2
cttagtacatggcaaagaataaggaatggctttggaaacccaaagtagttaggggttataaacagmtaaagaagagagattatttctcatggggaaataccgggagcattaacgagagataaagaaacacttcagctgctaggcaggaggaagacactgtgtcaccctgccatcactaacatcaacatgtagatagacctgaattgggatgttaaaaaaatactgagggaaaaaaacaattaccactggctgcaaaacagtgttgtcagtagcattatagaaaagacagcaaactgagtraaattgagtaatttaagtaagggattattacagagctaactaagatctgggcaagactacagaagggcttgattctgagtattctcacagatgcagaaaatgacagtcaacctgactactcaaaaatgacctyctytatgaaacagtacaggcaccattccatcagcgagtggtactcctcaggtgttggtatcgggactggcactacttaacttcttgtcctgaggagaaggacttggaagtgctggctgacgaaaaattcaacatgagccagcaatgtgcactcgcagctcagaaagc

SEQ ID NO: 52249 - DNA, 600 bp, Chicken  19866894302647_3
agctgctaggcaggaggaagacactgtgtcaccctgccatcactaacatcaacatgtagatagacctgaattgggatgttaaaaaaatactgagggaaaaaaacaattaccactggctgcaaaacagtgttgtcagtagcattatagaaaagacagcaaactgagtraaattgagtaatttaagtaagggattattacagagctaactaagatctgggcaagactacagaagggcttgattctgagtattctcacagatgcagaaaatgacagtcaacctgactactcaaaaatgacctyctytatgaaacagtacaggcaccattccatcagcgagtggtactcctcaggtgttggtatcgggactggcactacttaacttcttgtcctgaggagaaggacttggaagtgctggctgacgaaaaattcaacatgagccagcaatgtgcactcgcagctcagaaagccaactgtatgctgggctgcatcaaaaagggggtgggtggccagcagggcaagggaggaaattcctctctactctgcccttgtaaggctccatctggagtactgcatccagacctggggtctccagcacaagaa

SEQ ID NO: 52250 - DNA, 600 bp, Chicken  19866894302647_4
tgctaggcaggaggaagacactgtgtcaccctgccatcactaacatcaacatgtagatagacctgaattgggatgttaaaaaaatactgagggaaaaaaacaattaccactggctgcaaaacagtgttgtcagtagcattatagaaaagacagcaaactgagtraaattgagtaatttaagtaagggattattacagagctaactaagatctgggcaagactacagaagggcttgattctgagtattctcacagatgcagaaaatgacagtcaacctgactactcaaaaatgacctyctytatgaaacagtacaggcaccattccatcagcgagtggtactcctcaggtgttggtatcgggactggcactacttaacttcttgtcctgaggagaaggacttggaagtgctggctgacgaaaaattcaacatgagccagcaatgtgcactcgcagctcagaaagccaactgtatgctgggctgcatcaaaaagggggtgggtggccagcagggcaagggaggaaattcctctctactctgcccttgtaaggctccatctggagtactgcatccagacctggggtctccagcacaagaatga

SEQ ID NO: 52251 - DNA, 599 bp, Chicken  19866894302650_1
  misc_feature (1)..(105): n is any nucleotide
nnnnnnnnnnnnnnnnnnnnnnnnnnnnnnnnnnnnnnnnnnnnnnnnnnnnnnnnnnnnnnnnnnnnnnnnnnnnnnnnnnnnnnnnnnnnnnnnnnnnnnnnnccccctccccacggccacactcccgtccctgcatgaccacgggggctcacccgagaagctgtccttgtccatggcagccaggtcccgtgcctggtacatgtagcagcgcaggtggtagcggttcccatctggaatggatcgagaaatggctgagaggagcagccacggtgaccccatccgcgcccgatgacggcrcccggggtggatgcggggcgatgcatggccacggggtgcccccgttgcgtttcgtcctccccccgcagcgactcacagtcgaagatgcaggagatggtgggtctgttgacgccgaaactcagcgtggagacggatttgccatcgtcgcttttgtcgtccgtcattcctccctgccagagagagcagcggggtggggggctgcgcgccatggggtgacaaaggggacatgggggtcgtcgcctcccggcaccgtgggctgagctgaggttcccccgtccctaaacccttccccttgggtg

SEQ ID NO: 52252 - DNA, 600 bp, Chicken  19866894302651_1
gtatgatatgcacacattagcggcaatgccattagcacagcaatcccgatcaagcagcccgcatccgaggctggggctgcctcgtttgtcatccgaaaagggctgtcggctttcggatttgggttaatcggagccgggcacctcgctaagcagcaacaaggtcacctcgcgctgctcagcaccccgaacgccgcgagccacgcggagcgctcccgaggagcagcgggcggcggcggggcggcacggcggggagcggcacggggtggcagcgcggagccgcgtgctgctgctgctgctgcrgggacgggagcggagcagcgcgtgcagcccctcctgcgcccgctggaaaagttctgggcagaattcagcggaacggagcggccccccgcgatgcaaaagcagagcggggctgccggctcgcacaccgacgccagacaggaggagaagcagcgcgcgcgctctcgctgaatttcagaccgttacctgcaaaagcaaagccggagagcacagcccctaaggcagaaccgctccaaacttcgggcggcgctcgggaagagccgcacgcagcgccccgggacatctccgaaataaaacgtgcga

SEQ ID NO: 52253 - DNA, 599 bp, Chicken  19866894302652_1
  misc_feature (1)..(86): n is any nucleotide
nnnnnnnnnnnnnnnnnnnnnnnnnnnnnnnnnnnnnnnnnnnnnnnnnnnnnnnnnnnnnnnnnnnnnnnnnnnnnnnnnnnnnnttttctctaattagtaattttaccttgaggaaacaagtgaatttaagttctgacataaacatttgtctactgattattaggttgaaaatgctcattacttacacacagagaactaaaatggtatcatggtagtaacttttttcaaccattatgaactccaaattaattgtgctaagaaatgcctctgaactacatggtttccaagtttactttwaacagaagtcaggatatgtgggggtaggcagggggggaataacaacacatgacttgtggtctcrctccagcactccagttcctggtacatcctatacttacatttttctgtaaagagtataacttgttgcaagatttgtttctcttcctgaagtccagttacaggtaagcttaatatcaacatcgtaaatgcaggaaatatttcttggtgtgcctggtggaactaccacaacaaaggaaaacaaattctcatgaaaataagcaactctaatgtaaaacttaaaatgttagtaggcaggc

SEQ ID NO: 52254 - DNA, 599 bp, Chicken  19866894302652_2
  misc_feature (1)..(22): n is any nucleotide
nnnnnnnnnnnnnnnnnnnnnnttttctctaattagtaattttaccttgaggaaacaagtgaatttaagttctgacataaacatttgtctactgattattaggttgaaaatgctcattacttacacacagagaactaaaatggtatcatggtagtaacttttttcaaccattatgaactccaaattaattgtgctaagaaatgcctctgaactacatggtttccaagtttactttwaacagaagtcaggatatgtgggggtaggcagggggggaataacaacacatgacttgtggtctcrctccagcactccagttcctggtacatcctatacttacatttttctgtaaagagtataacttgttgcaagatttgtttctcttcctgaagtccagttacaggtaagcttaatatcaacatcgtaaatgcaggaaatatttcttggtgtgcctggtggaactaccacaacaaaggaaaacaaattctcatgaaaataagcaactctaatgtaaaacttaaaatgttagtaggcaggctgattacaccaagccactacatgatctgcatagaaattcatttaagaatttcttattgtcctca

SEQ ID NO: 52255 - DNA, 599 bp, Chicken  19866894302655_1
  misc_feature (1)..(69): n is any nucleotide
nnnnnnnnnnnnnnnnnnnnnnnnnnnnnnnnnnnnnnnnnnnnnnnnnnnnnnnnnnnnnnnnnnnnnaggaagagctcacaaggaagtcacaggccatgttattatgcaaggacggattttgcactgtgcagtttcacatctgctgctgggttacatggtggagatatctgtgcgcaagaaacttcccctaatcagattattctacaaggagctgctgaacagtacccctaaagtcctctcttgaccccagaaagcctgtgtgcaactgagaccaccgtgagtcccttggtcacaccmcagcctgccgaaaagggagcccactgacttgcagccataggtatctgtacttgaatgtggattatattcttgaacggtcttttcctggcaggatttgctcctaggttttgatgcagcaggacaaactcatacttcaggcactggtaattatgtacatgatacaggttaaaaataataataatctaatgagtactgcacgctcttatgaccaaatcaggacttcagctatggcacaaacagcggctcaggcatgaacaggaaacctccacagctgcgcactggggctgttcacaaacaaa

SEQ ID NO: 52256 - DNA, 600 bp, Chicken  19866894302663_1
agtagcaccctcatcctgtaactgctctctgtggagggcacatagcagggtttgcctctccactcagctgcccattttcgttgaacttgtctgaaattaagatcaccagtgttctctcagataaggttgaaagcaatcagaatttctagaggagaagcttggaggaacagagacgtgcattcatgtgtgcctacacccacacatactcaacatgattgcataagtcccatttcctcaggaaatcaagctaaaaatacatggcacccaagaaatatcagctgggtgtacctgcagtccctragcatacaccagggcagagcatggagtggctcagagctccgtttttttccaacatcttcagcaaatcctcacrtctgagcagtagacagggctgaaacgagcagagctttgcctctggcctgcttctttttctgtgatgtctctaaccagttttctctcctctgatcttgttacagggtagagaaggtgccttcatggtgagagattcraggcagcctggmatgtacacagtctctgttttcaccaaagcattgaggtacagctgagctcagcagcttttcacatcaattacatcaatga

SEQ ID NO: 52257 - DNA, 600 bp, Chicken  19866894302663_2
attttcgttgaacttgtctgaaattaagatcaccagtgttctctcagataaggttgaaagcaatcagaatttctagaggagaagcttggaggaacagagacgtgcattcatgtgtgcctacacccacacatactcaacatgattgcataagtcccatttcctcaggaaatcaagctaaaaatacatggcacccaagaaatatcagctgggtgtacctgcagtccctragcatacaccagggcagagcatggagtggctcagagctccgtttttttccaacatcttcagcaaatcctcacrtctgagcagtagacagggctgaaacgagcagagctttgcctctggcctgcttctttttctgtgatgtctctaaccagttttctctcctctgatcttgttacagggtagagaaggtgccttcatggtgagagattcraggcagcctggmatgtacacagtctctgttttcaccaaagcattgaggtacagctgagctcagcagcttttcacatcaattacatcaatgaaatggcttctatgagagagtaatctctgtagttgttttggcatcatgaagatagagcagaaggctcattaaaa

SEQ ID NO: 52258 - DNA, 600 bp, Chicken  19866894302663_3
acatgattgcataagtcccatttcctcaggaaatcaagctaaaaatacatggcacccaagaaatatcagctgggtgtacctgcagtccctragcatacaccagggcagagcatggagtggctcagagctccgtttttttccaacatcttcagcaaatcctcacrtctgagcagtagacagggctgaaacgagcagagctttgcctctggcctgcttctttttctgtgatgtctctaaccagttttctctcctctgatcttgttacagggtagagaaggtgccttcatggtgagagattcraggcagcctggmatgtacacagtctctgttttcaccaaagcattgaggtacagctgagctcagcagcttttcacatcaattacatcaatgaaatggcttctatgagagagtaatctctgtagttgttttggcatcatgaagatagagcagaaggctcattaaaatgatagagaaaaatgcttccaaaaaaggcagaagagttagctgctgttctcaaagcaaagcatattaaaggctccacttcaccctgcatcaaaataagtgcctataaattgtccctccgacatcaccaggcttgta

SEQ ID NO: 52259 - DNA, 600 bp, Chicken  19866894302663_4
aagtcccatttcctcaggaaatcaagctaaaaatacatggcacccaagaaatatcagctgggtgtacctgcagtccctragcatacaccagggcagagcatggagtggctcagagctccgtttttttccaacatcttcagcaaatcctcacrtctgagcagtagacagggctgaaacgagcagagctttgcctctggcctgcttctttttctgtgatgtctctaaccagttttctctcctctgatcttgttacagggtagagaaggtgccttcatggtgagagattcraggcagcctggmatgtacacagtctctgttttcaccaaagcattgaggtacagctgagctcagcagcttttcacatcaattacatcaatgaaatggcttctatgagagagtaatctctgtagttgttttggcatcatgaagatagagcagaaggctcattaaaatgatagagaaaaatgcttccaaaaaaggcagaagagttagctgctgttctcaaagcaaagcatattaaaggctccacttcaccctgcatcaaaataagtgcctataaattgtccctccgacatcaccaggcttgtaattttgttgaaa

SEQ ID NO: 52260 - DNA, 600 bp, Chicken  19866894302669_1
agggtttcccatgaaaaacaaagggtgcggtatttcaatgtcgtttcagtcgcggggctgttctctcgccctatactatattgcggagtcttttttacctcaccgctatctcagaacagccgtttcctgagctttgtgctgcgcatgccggcactgcgagtccctgaaatgcgctgctgacacgcggggctcagcggaggggaaaacggcgcagctctgcgccagcgcctgctgtccctgatcagttctgtaccggtgtgcgctgccagcaatactcctctatcgtctgctgacttaaakatatttgcataacaccactgacgaaaatcaaggaatatttacaagtgaaatgcacgtagagtttatgtatataatctataatctatttttcccccctcttctttcagacctcaattccactgaggctgaaagaagctctgttttctcgctgcgggtaccactcgcttcaaatactgcagacgtagagcagtgaagggaaagcaggggcagcagaatgggcagagtgccgtgcaggacctgtgtgttttccccacaccttcctcaccacagaatgacagaggacccacggacacaccacgc

SEQ ID NO: 52261 - DNA, 600 bp, Chicken  19866894302671_1
cacttcctgagtttaaaagatgtgttcatctgctgtatatttcatgcagttttcttccccacaaaatatttgtggctgctttgttgtaggtactcattggtcacatattgggcagtaatctgtctctgtaccatgttctgttaggaaaggttcttaatcttctggtcttctgaattaaaacagcagttaaatgcactggtgtcctataagtaaatctctgcttcagaaagagtgcattacacggaacttgaggtccttcattgtacagacataagcaggactagttaaaataactgcagwtttgtgagggaagctgttgttttaatgtcggatacctcgataagaatatgattttagttgtkttttgtgaattactcctgagttcataataaaatgacttggcttgacttcagtgtagggatcacagggctccaggaggcacacaagctgttctgaatcaaacctttctgaaaatggaatacttgacaattatgagtaaagttatttaacagtcaacttcctgtggtttacatgcttttctgaatcaggaggaggctgaagggctgcagctgaaatgtgtatgctttgtttgaagcaaaa

SEQ ID NO: 52262 - DNA, 564 bp, Chicken  19866894302671_2
aaaatatttgtggctgctttgttgtaggtactcattggtcacatattgggcagtaatctgtctctgtaccatgttctgttaggaaaggttcttaatcttctggtcttctgaattaaaacagcagttaaatgcactggtgtcctataagtaaatctctgcttcagaaagagtgcattacacggaacttgaggtccttcattgtacagacataagcaggactagttaaaataactgcagwtttgtgagggaagctgttgttttaatgtcggatacctcgataagaatatgattttagttgtkttttgtgaattactcctgagttcataataaaatgacttggcttgacttcagtgtagggatcacagggctccaggaggcacacaagctgttctgaatcaaacctttctgaaaatggaatacttgacaattatgagtaaagttatttaacagtcaacttcctgtggtttacatgcttttctgaatcaggaggaggctgaagggctgcagctgaaatgtgtatgctttgtttgaagcaaaaagggcatcttctacaagcagtcaaag

SEQ ID NO: 52263 - DNA, 599 bp, Chicken  19866894302676_1
  misc_feature (1)..(126): n is any nucleotide
nnnnnnnnnnnnnnnnnnnnnnnnnnnnnnnnnnnnnnnnnnnnnnnnnnnnnnnnnnnnnnnnnnnnnnnnnnnnnnnnnnnnnnnnnnnnnnnnnnnnnnnnnnnnnnnnnnnnnnnnnnnnnntgaatcatcttaaggatttttttttgtgatatacagaccagtagaatatccagagaagtggtaggtgggtggtcttctcttttctttggtcactgatatcaaaataaccagaactaaccttcagttgctgcttctctgaataaataagagaaccaatgggaatactttaagaawaaagtgyrtttgtgttggcaagggaaggaagcagaaggtcactgacttcgctctgtttgtgttgaacgggatgtctgggtattaagtttgtctcgggactggggccctagtctgcaggtgaagacaatgttacttgtggattaagtgctggagatgagcctggggaggcctgcaggtgcctcagagccttccctcctctgagggtgcaggcttgtgttgcgagcagcttgctactactggagtgacaggcctgcctgagrgcgacgccatatttgtggctggttagggcagtggcaacc

SEQ ID NO: 52264 - DNA, 599 bp, Chicken  19866894302676_2
  misc_feature (1)..(119): n is any nucleotide
nnnnnnnnnnnnnnnnnnnnnnnnnnnnnnnnnnnnnnnnnnnnnnnnnnnnnnnnnnnnnnnnnnnnnnnnnnnnnnnnnnnnnnnnnnnnnnnnnnnnnnnnnnnnnnnnnnnnnnntgaatcatcttaaggatttttttttgtgatatacagaccagtagaatatccagagaagtggtaggtgggtggtcttctcttttctttggtcactgatatcaaaataaccagaactaaccttcagttgctgcttctctgaataaataagagaaccaatgggaatactttaagaawaaagtgyrtttgtgttggcaagggaaggaagcagaaggtcactgacttcgctctgtttgtgttgaacgggatgtctgggtattaagtttgtctcgggactggggccctagtctgcaggtgaagacaatgttacttgtggattaagtgctggagatgagcctggggaggcctgcaggtgcctcagagccttccctcctctgagggtgcaggcttgtgttgcgagcagcttgctactactggagtgacaggcctgcctgagrgcgacgccatatttgtggctggttagggcagtggcaaccaaggggc

SEQ ID NO: 52265 - DNA, 599 bp, Chicken  19866894302676_3
  misc_feature (1)..(118): n is any nucleotide
nnnnnnnnnnnnnnnnnnnnnnnnnnnnnnnnnnnnnnnnnnnnnnnnnnnnnnnnnnnnnnnnnnnnnnnnnnnnnnnnnnnnnnnnnnnnnnnnnnnnnnnnnnnnnnnnnnnnnntgaatcatcttaaggatttttttttgtgatatacagaccagtagaatatccagagaagtggtaggtgggtggtcttctcttttctttggtcactgatatcaaaataaccagaactaaccttcagttgctgcttctctgaataaataagagaaccaatgggaatactttaagaawaaagtgyrtttgtgttggcaagggaaggaagcagaaggtcactgacttcgctctgtttgtgttgaacgggatgtctgggtattaagtttgtctcgggactggggccctagtctgcaggtgaagacaatgttacttgtggattaagtgctggagatgagcctggggaggcctgcaggtgcctcagagccttccctcctctgagggtgcaggcttgtgttgcgagcagcttgctactactggagtgacaggcctgcctgagrgcgacgccatatttgtggctggttagggcagtggcaaccaaggggca

SEQ ID NO: 52266 - DNA, 600 bp, Chicken  19866894302676_4
tctgaataaataagagaaccaatgggaatactttaagaawaaagtgyrtttgtgttggcaagggaaggaagcagaaggtcactgacttcgctctgtttgtgttgaacgggatgtctgggtattaagtttgtctcgggactggggccctagtctgcaggtgaagacaatgttacttgtggattaagtgctggagatgagcctggggaggcctgcaggtgcctcagagccttccctcctctgagggtgcaggcttgtgttgcgagcagcttgctactactggagtgacaggcctgcctgagrgcgacgccatatttgtggctggttagggcagtggcaaccaaggggcagcacctggcagcccggcccagaggcctgctcttagcagcagccacagcaaccgtgggtcttgcgagtgactttggaaaaccagtccgtagacttgtagctgtattttgaaagtgtttggtggttggaaatgaaaagggatggcagcaatgtgtgactgggcagctcctcaaaattgcatattgagaaacacttacaatgtgcttacgcatatccgcttgggacgtgctgtcttttgaagagtgattcttcaga

SEQ ID NO: 52267 - DNA, 600 bp, Chicken  19866894302681_1
tgccccagcaacattctctcagcttgcctaattttttaaggactgccattcttcaaagacctgattttgaaaaacagaactctctaaacctttgattaatgggtgtgagctcaagagggagaaaagtttcagacatagccctggaggcggtaattccttactggctgtttgcatggcatgctggctgctttggatctcctttcagagaaactcagctctccatgtgcactgcagaggacgacaatactggtccagtgcctcatctcaggagcttcacaattctatgctcagtgttgtgcrcacacctcttttctggcttttagcctcattaattaaaataaggtcaccagccartctgttttagaacagggcttaaatccacgtctttttagttctaatatagtactcgagtgactagattgtcttccctcrccaggcctgtttcccaatctgtaattacagagatggcccccgcaaaaggctttgtcatacacaaatgaaaagcatgatttaaacagcagctagtattgtttttcacctggtgaacttcctttgtcacacctagagacaagcaaagcaggtttccaaagtttgaattgc

SEQ ID NO: 52268 - DNA, 600 bp, Chicken  19866894302681_2
aaagacctgattttgaaaaacagaactctctaaacctttgattaatgggtgtgagctcaagagggagaaaagtttcagacatagccctggaggcggtaattccttactggctgtttgcatggcatgctggctgctttggatctcctttcagagaaactcagctctccatgtgcactgcagaggacgacaatactggtccagtgcctcatctcaggagcttcacaattctatgctcagtgttgtgcrcacacctcttttctggcttttagcctcattaattaaaataaggtcaccagccartctgttttagaacagggcttaaatccacgtctttttagttctaatatagtactcgagtgactagattgtcttccctcrccaggcctgtttcccaatctgtaattacagagatggcccccgcaaaaggctttgtcatacacaaatgaaaagcatgatttaaacagcagctagtattgtttttcacctggtgaacttcctttgtcacacctagagacaagcaaagcaggtttccaaagtttgaattgcccttgaaaagcatatctacttctgggattcatattcttttatttcctgtattgg

SEQ ID NO: 52269 - DNA, 600 bp, Chicken  19866894302681_3
acatagccctggaggcggtaattccttactggctgtttgcatggcatgctggctgctttggatctcctttcagagaaactcagctctccatgtgcactgcagaggacgacaatactggtccagtgcctcatctcaggagcttcacaattctatgctcagtgttgtgcrcacacctcttttctggcttttagcctcattaattaaaataaggtcaccagccartctgttttagaacagggcttaaatccacgtctttttagttctaatatagtactcgagtgactagattgtcttccctcrccaggcctgtttcccaatctgtaattacagagatggcccccgcaaaaggctttgtcatacacaaatgaaaagcatgatttaaacagcagctagtattgtttttcacctggtgaacttcctttgtcacacctagagacaagcaaagcaggtttccaaagtttgaattgcccttgaaaagcatatctacttctgggattcatattcttttatttcctgtattggcgtactgtgcaagtacacactgactgcatgcaatgagatcattggcaaaagatgtaaataatacataagagaaatagt

SEQ ID NO: 52270 - DNA, 600 bp, Chicken  19866894302681_4
gtttccaaagtttgaattgcccttgaaaagcatatctacttctgggattcatattcttttatttcctgtattggcgtactgtgcaagtacacactgactgcatgcaatgagatcattggcaaaagatgtaaataatacataagagaaatagtgggagtgaagaaagtgggcactgttgaggagaatttagatgataaaatagcgagatggcagactgactgaatactcattcagatgtagggacttgaacatatttgcagtgaccaccccaactcgtatttgaatctcaacccatgagayaatgataggtaatagaaagacagtaatgatctcctgaattcagctattttgtcaataatgaactgtaatgcttttactggacgtcttcagcatgcagggatgaaaacatgatggttccatccagcagagggggcttggcagcaagtttttttgaatacaaatccaagtgatttctttggaaactgaatgatattataactaaactgacttttataggaacttgcatagtattaaggataaaagcagaactttctgtgaacaagagacacacatataaacagacggaacacaaattgagtg

SEQ ID NO: 52271 - DNA, 600 bp, Chicken  19866894302685_1
attaatcttggagtttccttcacaatattcccatcctgtgtaaatctagattgtgaattctaaatgctactgatcatttgcagcactggaaactgttcctataaatatttttggcctgtgggggaagggtaaaaattgaaaaagagttgaaattccttagtaaattaccacctttaaattggcaaacaggagcagatgaatgagtgactgaaaactgtgtctacgctgataaatttgcaaaaaagtagaagataagcagctgaaccagtagttcacccacggttcctgagcaacaatgasaagtgcagaacacaaagaaagcaacctctatcctatgatcctggttccactgcatttactgccttgatggttgttcttttttttcagtttagtaaatgatgagagttgatttcaaatagggaaataatgattaaaaaagattaccaatagttttgaatgtcatgactcttgagaaatgttataatttacctctgataagtagtaaaaattggtcaagtacagaaggataggccaggagaattaaaattaacccctaactaactagaaattaattgagcaaattaaattatcatcagtaat

SEQ ID NO: 52272 - DNA, 600 bp, Chicken  19866894302688_1
agtgtgcgtggtttagtattgatcatttgggagggcgagatgagacagttgtgacttccttaacaggaccattttgcagatcttgctgtttgatgaaacattacttgctcaccgctgttgttgaggagctttctctcataacttggcattttgcattgcaaatctgaaactgagctggatgcttccttaggccaccagcactctttggggttttacaaccttcctttcccattcttgatttggcatcagtgttgatacagctgtgtgccagagggaaacagccagtaaatggaatccagytcttagtgtccccaggtctcccttgtgtgccaatgtgactctttagtcaagattaactatcacaaagacaaaaaaagaatctagcctggagcttgtgtaattatgtcagcatcccaaggtaaactcaggcatctccagtacctggggcacccgtggcgggcagttcttaaatgagagggtttggggacctttgccattaagtatttgactgcgctgccttctgtgcagtgggcaaaagctggtctgagctgctcgttaatccctgggaaatgagggcagcagcaagatctgcaataggga

SEQ ID NO: 52273 - DNA, 600 bp, Chicken  19866894302692_1
ttaacaatgtgatgtgtttcttacaggaatccagtccagtgatttatttagctaaatgtgaaccagagggcatacttttcctgaaatgaaacatgcacagaaccaagtgtcattctgttttcattgatccgttgaaaatccaacatggtgtaacttggagtatcagcagctcactacttagaattgtaccagcacaagaaaatgtcattttgggatatttctagggtttagatgatcttggaagtttagttcttgaccttgtgtggaaagggtgattttttttttcgccttgttctcaarggagaagctctactgtaaaacaaaaatccttgagttgcaattaaactcytgtrcaagaaaaggggatacaagcatttgcactttaggaaatacaacaatgctgtatcctgagcaaggctgacgatattctatctggcccctgggcagggtcaagtaacttragaagccccaacagtgagctgggttgttcccatcccatagtcttctctttctgaagcagcacctctgagctgcatagcggggttcacaactggctgctcctctttgagcagctttctgcttgtcactttggtggtgccc

SEQ ID NO: 52274 - DNA, 600 bp, Chicken  19866894302692_2
agctaaatgtgaaccagagggcatacttttcctgaaatgaaacatgcacagaaccaagtgtcattctgttttcattgatccgttgaaaatccaacatggtgtaacttggagtatcagcagctcactacttagaattgtaccagcacaagaaaatgtcattttgggatatttctagggtttagatgatcttggaagtttagttcttgaccttgtgtggaaagggtgattttttttttcgccttgttctcaarggagaagctctactgtaaaacaaaaatccttgagttgcaattaaactcytgtrcaagaaaaggggatacaagcatttgcactttaggaaatacaacaatgctgtatcctgagcaaggctgacgatattctatctggcccctgggcagggtcaagtaacttragaagccccaacagtgagctgggttgttcccatcccatagtcttctctttctgaagcagcacctctgagctgcatagcggggttcacaactggctgctcctctttgagcagctttctgcttgtcactttggtggtgcccttctgggacagctcaggtgctttcttccccacagatctgctgtaatgct

SEQ ID NO: 52275 - DNA, 600 bp, Chicken  19866894302692_3
aaatgtgaaccagagggcatacttttcctgaaatgaaacatgcacagaaccaagtgtcattctgttttcattgatccgttgaaaatccaacatggtgtaacttggagtatcagcagctcactacttagaattgtaccagcacaagaaaatgtcattttgggatatttctagggtttagatgatcttggaagtttagttcttgaccttgtgtggaaagggtgattttttttttcgccttgttctcaarggagaagctctactgtaaaacaaaaatccttgagttgcaattaaactcytgtrcaagaaaaggggatacaagcatttgcactttaggaaatacaacaatgctgtatcctgagcaaggctgacgatattctatctggcccctgggcagggtcaagtaacttragaagccccaacagtgagctgggttgttcccatcccatagtcttctctttctgaagcagcacctctgagctgcatagcggggttcacaactggctgctcctctttgagcagctttctgcttgtcactttggtggtgcccttctgggacagctcaggtgctttcttccccacagatctgctgtaatgcttgct

SEQ ID NO: 52276 - DNA, 600 bp, Chicken  19866894302692_4
atcagcagctcactacttagaattgtaccagcacaagaaaatgtcattttgggatatttctagggtttagatgatcttggaagtttagttcttgaccttgtgtggaaagggtgattttttttttcgccttgttctcaarggagaagctctactgtaaaacaaaaatccttgagttgcaattaaactcytgtrcaagaaaaggggatacaagcatttgcactttaggaaatacaacaatgctgtatcctgagcaaggctgacgatattctatctggcccctgggcagggtcaagtaacttragaagccccaacagtgagctgggttgttcccatcccatagtcttctctttctgaagcagcacctctgagctgcatagcggggttcacaactggctgctcctctttgagcagctttctgcttgtcactttggtggtgcccttctgggacagctcaggtgctttcttccccacagatctgctgtaatgcttgctgggtgctctgctaagccacttaaggtttctaccagctatcgaggaggtattaaaaacaaaacaaaagccctaacagcaggcagggaatcattagaaaatccatgcaaa

SEQ ID NO: 52277 - DNA, 600 bp, Chicken  19866894302695_1
tctaacaaaagagcagtgtctaaactgaaaatactttacattagacttatgtggaagtagaaggtctagctactgtcaggtgaagaggaagcatctttttgtaaagtataaactgtccagttatgcacactttaagttgtttggatttcagggtttttagttaggaaaacaaattatattcaggcttgggaggttatagcaatgcatgtgttctttgtgagtgtaaaatcaaggaatggagtctgtcagtctaactccagattttataaatatgaagaaagagagctgttatttcatatmaaacctgtctattatgaatttcaaaacggagtttctagcataaataactggaagcttgactgaagaaaatttaaacttaacacttgaatggatatttttacattggctagaattcacttccactttttgactctgttgaaattgagaaatgtatcatatctatattaagaagcatattttttggaattcaaatgaattagcattaaattggcacttaaaaaaaccctcaactgctatgcggggtgataaaaaaaaaaaaaagcaagcaaacaaacaaacaaacaaaaaaaaaacactcga

SEQ ID NO: 52278 - DNA, 599 bp, Chicken  19866894302703_1
  misc_feature (1)..(93): n is any nucleotide
nnnnnnnnnnnnnnnnnnnnnnnnnnnnnnnnnnnnnnnnnnnnnnnnnnnnnnnnnnnnnnnnnnnnnnnnnnnnnnnnnnnnnnnnnnnnntgcaggcacagagctgtgcacctgctgaggatgggtgggcatgaaaggggctgcaagaatgacccacagctgctttgtgtctgactccaaggggagctgcgctgcgttgttgtactgctctattcttgggagcttggtttctcgtatggctccgttccaatcatggtgtgcacccaggaagctttgcatggagccccatgtccgtgsggtgcaatgggacctggctgcgtgtgcagccctcttccatccgtgcctacagagcgtgttgtggcataaggccgttgccttctgacaacatcccaacctcgctgagctgcgcggttcaatcacagatagaagttaacagagggtgggtttcttgttttcagttgtgcaaaagtgagtttggggccattatgtggcatstgaggcaacatctgaggtcacttcccatgtgcattcagtgcagctgttagaataatggagatggttgggcctctgcagcgctggctctgtagctttgctga

SEQ ID NO: 52279 - DNA, 600 bp, Chicken  19866894302703_2
gttgttgtactgctctattcttgggagcttggtttctcgtatggctccgttccaatcatggtgtgcacccaggaagctttgcatggagccccatgtccgtgsggtgcaatgggacctggctgcgtgtgcagccctcttccatccgtgcctacagagcgtgttgtggcataaggccgttgccttctgacaacatcccaacctcgctgagctgcgcggttcaatcacagatagaagttaacagagggtgggtttcttgttttcagttgtgcaaaagtgagtttggggccattatgtggcatstgaggcaacatctgaggtcacttcccatgtgcattcagtgcagctgttagaataatggagatggttgggcctctgcagcgctggctctgtagctttgctgaacaaagacgtgctttaatggtttgcacagagcttcctgctggccaatgaagagattagttacttctgttgaaaagaacaggttttgataatggaatttttctgcgctaatttttacatcaagttaagaggtttctaataaaagagttcggaaatgagagcaccacagggaaaaaacaacctcagtgtgatgtgtttagt

SEQ ID NO: 52280 - DNA, 600 bp, Chicken  19866894302705_1
aaggcctgagtgtcaccgtgcagagacccatgcacagggattggctcctgagctgtaggtgctcactgccctttggttggcaccaaccaactgcagccagcagcagctccggtccccacagcagagccccacagagcgcacagcacagactgctgctttctgaccaaggctgctaaagctggaaacagtccagggcccaccgcccatgttttccagcccgtctcaaagcctgatgagctttagggaatgaatgttagacatactcccttcctgccaggcctgggcagcacccagtgcagmagcaacatgcaggaggctccrgcaacgctctgctcatagggatgggatggcagtggcccttgggtgggtttcagggggactgcagtgtgaggagctctaatgcgcgttataaggctctaatgtttttattaacagaaacgagcaggagttaagttaataatccaaacacaccaacagatgttcaacaagtacttggcattgctgcagccagagcaagaaggaattaaacattctcttggaacagccggcggaacagcacagccccaagcaacagagctccctgctaccagctcaggtgaa

SEQ ID NO: 52281 - DNA, 600 bp, Chicken  19866894302705_2
agagacccatgcacagggattggctcctgagctgtaggtgctcactgccctttggttggcaccaaccaactgcagccagcagcagctccggtccccacagcagagccccacagagcgcacagcacagactgctgctttctgaccaaggctgctaaagctggaaacagtccagggcccaccgcccatgttttccagcccgtctcaaagcctgatgagctttagggaatgaatgttagacatactcccttcctgccaggcctgggcagcacccagtgcagmagcaacatgcaggaggctccrgcaacgctctgctcatagggatgggatggcagtggcccttgggtgggtttcagggggactgcagtgtgaggagctctaatgcgcgttataaggctctaatgtttttattaacagaaacgagcaggagttaagttaataatccaaacacaccaacagatgttcaacaagtacttggcattgctgcagccagagcaagaaggaattaaacattctcttggaacagccggcggaacagcacagccccaagcaacagagctccctgctaccagctcaggtgaatgcatgtgcagaaaagccagg

SEQ ID NO: 52282 - DNA, 600 bp, Chicken  19866894302713_1
gaaactgcttaacctcatatatccatcactgcttttactggagcttttctcgaaggtatttagctattacagggaaagaatgtacatttctagaagcatgttcaaatgactaaagctgggctcctaaaaacctagaactttggtgcagtaggtgagctgcagttattaaacttctgcaaaggaaaaaaaatcacacattttaaaccactgctagaaaaagctctcatgtatgcaacgttaataaaactgaacaaaacgatttcatctgtcctttgtacattttcattctgctctttatasctgtgttattgttaagattttcaagtattcagagaaaatgttgatcaggtaaacaatatggaaggcaatggctgtttaaagcacacttgcagttagtatcactgaaacctggtgcttctccccttgttacaccaacttgtctctaatattaaacttgtttattgggaaaaaaaaaaacaaacaaacctaaaaagcaatttgtgacagtgcaagaaaaacttttaacaaatattgctttaaaatattattcagaaagacaaatattaggaattataaaatgtaaagtgatcttatttgcat

SEQ ID NO: 52283 - DNA, 600 bp, Chicken  19866894302713_2
aaacttctgcaaaggaaaaaaaatcacacattttaaaccactgctagaaaaagctctcatgtatgcaacgttaataaaactgaacaaaacgatttcatctgtcctttgtacattttcattctgctctttatasctgtgttattgttaagattttcaagtattcagagaaaatgttgatcaggtaaacaatatggaaggcaatggctgtttaaagcacacttgcagttagtatcactgaaacctggtgcttctccccttgttacaccaacttgtctctaatattaaacttgtttattgggsaaaaaaaaaacaaacaaacctaaaaagcaatttgtgacagtgcaagaaaaacttttaacaaatattgctttaaaatattattcagaaagacaaatattaggaattataaaatgtaaagtgatcttatttgcattagatttacatgtgcagaggtctaccagatgtcgcttactgtgccaggcaaagctgagctgccccgactaggcacacagcccattttgaaggatacattatcccttttcaaaggcatcgagaagctacatgtaaacaagcaagttgagaaactcagtagacagaaaa

SEQ ID NO: 52284 - DNA, 600 bp, Chicken  19866894302715_1
caaggttgcattgcccaacgatgccaagattagggaccatgcaaatgagccaccacaccaagagaaacacaggaaaagcactctcaaaaccacatttctgccagttacagcagaggtgcagcaggaatagaggtctgtcctgagtatttttaggatacaactgctgaggatgaaggaaggaaggcacagcagacactacccttgatgctggctgtttatgggaatttgtgtgatgtcctgacttgtttcaagccaaataaatacagctgaccacagactgaacccccacagtaaggaatwaacacattcatcttccttgttccatcagacagkaggagtttccctgcctwtacaagatgtactatcaacgactccagataattaaaatgttctgggctatgagaacactggcagcccagcctgccctactgacatgccccaaagycagagctatacaaccagaaacttaactgatgttctccaagcgccaccaccccatctcaaggttttccttcagtgagcatcctccttcggactgctgagaggtggcagctggagaaactgcacaacacctcttatctacccatcaagatcttcgca

SEQ ID NO: 52285 - DNA, 600 bp, Chicken  19866894302715_2
ggaccatgcaaatgagccaccacaccaagagaaacacaggaaaagcactctcaaaaccacatttctgccagttacagcagaggtgcagcaggaatagaggtctgtcctgagtatttttaggatacaactgctgaggatgaaggaaggaaggcacagcagacactacccttgatgctggctgtttatgggaatttgtgtgatgtcctgacttgtttcaagccaaataaatacagctgaccacagactgaacccccacagtaaggaatwaacacattcatcttccttgttccatcagacagkaggagtttccctgcctwtacaagatgtactatcaacgactccagataattaaaatgttctgggctatgagaacactggcagcccagcctgccctactgacatgccccaaagycagagctatacaaccagaaacttaactgatgttctccaagcgccaccaccccatctcaaggttttccttcagtgagcatcctccttcggactgctgagaggtggcagctggagaaactgcacaacacctcttatctacccatcaagatcttcgcagggacaaagtttcatgttacgtcacttttagga

SEQ ID NO: 52286 - DNA, 600 bp, Chicken  19866894302715_3
caccacaccaagagaaacacaggaaaagcactctcaaaaccacatttctgccagttacagcagaggtgcagcaggaatagaggtctgtcctgagtatttttaggatacaactgctgaggatgaaggaaggaaggcacagcagacactacccttgatgctggctgtttatgggaatttgtgtgatgtcctgacttgtttcaagccaaataaatacagctgaccacagactgaacccccacagtaaggaatwaacacattcatcttccttgttccatcagacagkaggagtttccctgcctwtacaagatgtactatcaacgactccagataattaaaatgttctgggctatgagaacactggcagcccagcctgccctactgacatgccccaaagycagagctatacaaccagaaacttaactgatgttctccaagcgccaccaccccatctcaaggttttccttcagtgagcatcctccttcggactgctgagaggtggcagctggagaaactgcacaacacctcttatctacccatcaagatcttcgcagggacaaagtttcatgttacgtcacttttaggaaaacctgcgcaaccaga

SEQ ID NO: 52287 - DNA, 580 bp, Chicken  19866894302715_4
atttttaggatacaactgctgaggatgaaggaaggaaggcacagcagacactacccttgatgctggctgtttatgggaatttgtgtgatgtcctgacttgtttcaagccaaataaatacagctgaccacagactgaacccccacagtaaggaatwaacacattcatcttccttgttccatcagacagkaggagtttccctgcctwtacaagatgtactatcaacgactccagataattaaaatgttctgggctatgagaacactggcagcccagcctgccctactgacatgccccaaagycagagctatacaaccagaaacttaactgatgttctccaagcgccaccaccccatctcaaggttttccttcagtgagcatcctccttcggactgctgagaggtggcagctggagaaactgcacaacacctcttatctacccatcaagatcttcgcagggacaaagtttcatgttacgtcacttttaggaaaacctgcgcaaccagagaagtgagaaagagtcacttctggaggcaccaaccttgtctgcctcttttggaaagaaaggggcatggatgacat

SEQ ID NO: 52288 - DNA, 600 bp, Chicken  19866894302730_1
ctctgcttcccatgggaaggtaagatccagacattaccccaagttacagttaaagtgagcaatttgcaaagtgtatttgcataaacgtgttcacgtgataaattatgagtaatgaatcattaataaaaattcaaaacctttctttgattttcttcctagaaggaaaggaaggatgaaagacattctggagataaatttttcataggcaataatctgaccagctgtaatcactgtccatattcagtataaacagatttgtttatttcctaatgaagacagagatgcaatctgtcatttttmaggtacacttaatgacaaagaataacaytgtartgaactattagagacgaatcaatttaaaattaggcagacaaaamagacttcacttgaacaggatttcattcttaaggatccacatgtaacaatacagctgtctaaccacgtgtgacagtgaggcagactcagatcaatgacctcagataatggagtagtaacttatctctagataacagagaaaaatccctgtgactgctttccagtgtgtgggctcagtcctacagraaggtctgtgcctcagagcagggcttactgcaatgcaca

SEQ ID NO: 52289 - DNA, 600 bp, Chicken  19866894302730_2
agacattaccccaagttacagttaaagtgagcaatttgcaaagtgtatttgcataaacgtgttcacgtgataaattatgagtaatgaatcattaataaaaattcaaaacctttctttgattttcttcctagaaggaaaggaaggatgaaagacattctggagataaatttttcataggcaataatctgaccagctgtaatcactgtccatattcagtataaacagatttgtttatttcctaatgaagacagagatgcaatctgtcatttttmaggtacacttaatgacaaagaataacaytgtartgaactattagagacgaatcaatttaaaattaggcagacaaaamagacttcacttgaacaggatttcattcttaaggatccacatgtaacaatacagctgtctaaccacgtgtgacagtgaggcagactcagatcaatgacctcagataatggagtagtaacttatctctagataacagagaaaaatccctgtgactgctttccagtgtgtgggctcagtcctacagraaggtctgtgcctcagagcagggcttactgcaatgcacaagacttctttccaccacttacagaagtg

SEQ ID NO: 52290 - DNA, 600 bp, Chicken  19866894302730_3
ttaccccaagttacagttaaagtgagcaatttgcaaagtgtatttgcataaacgtgttcacgtgataaattatgagtaatgaatcattaataaaaattcaaaacctttctttgattttcttcctagaaggaaaggaaggatgaaagacattctggagataaatttttcataggcaataatctgaccagctgtaatcactgtccatattcagtataaacagatttgtttatttcctaatgaagacagagatgcaatctgtcatttttmaggtacacttaatgacaaagaataacaytgtartgaactattagagacgaatcaatttaaaattaggcagacaaaamagacttcacttgaacaggatttcattcttaaggatccacatgtaacaatacagctgtctaaccacgtgtgacagtgaggcagactcagatcaatgacctcagataatggagtagtaacttatctctagataacagagaaaaatccctgtgactgctttccagtgtgtgggctcagtcctacagraaggtctgtgcctcagagcagggcttactgcaatgcacaagacttctttccaccacttacagaagtgaactg

SEQ ID NO: 52291 - DNA, 600 bp, Chicken  19866894302730_4
tgcataaacgtgttcacgtgataaattatgagtaatgaatcattaataaaaattcaaaacctttctttgattttcttcctagaaggaaaggaaggatgaaagacattctggagataaatttttcataggcaataatctgaccagctgtaatcactgtccatattcagtataaacagatttgtttatttcctaatgaagacagagatgcaatctgtcatttttmaggtacacttaatgacaaagaataacaytgtartgaactattagagacgaatcaatttaaaattaggcagacaaaamagacttcacttgaacaggatttcattcttaaggatccacatgtaacaatacagctgtctaaccacgtgtgacagtgaggcagactcagatcaatgacctcagataatggagtagtaacttatctctagataacagagaaaaatccctgtgactgctttccagtgtgtgggctcagtcctacagraaggtctgtgcctcagagcagggcttactgcaatgcacaagacttctttccaccacttacagaagtgaactggaacactttatttctgtaaattaccatgacaaaccttcaggtcc

SEQ ID NO: 52292 - DNA, 600 bp, Chicken  19866894302730_5
atttcctaatgaagacagagatgcaatctgtcatttttmaggtacacttaatgacaaagaataacaytgtartgaactattagagacgaatcaatttaaaattaggcagacaaaamagacttcacttgaacaggatttcattcttaaggatccacatgtaacaatacagctgtctaaccacgtgtgacagtgaggcagactcagatcaatgacctcagataatggagtagtaacttatctctagataacagagaaaaatccctgtgactgctttccagtgtgtgggctcagtcctacagraaggtctgtgcctcagagcagggcttactgcaatgcacaagacttctttccaccacttacagaagtgaactggaacactttatttctgtaaattaccatgacaaaccttcaggtccaggtattttgctgctgggaactagagaagagaattcagactgagaagtgagaattcattttctttctttataaactgaaaagagtattaagtggatgctagaagccttcatgcatgtgttgacaggaagaacacagtgttaccactgttatcttttccttctgatgccattgtgcacatgtgat

SEQ ID NO: 52293 - DNA, 600 bp, Chicken  19866894302732_1
ggtatgggcatgtggctgacagaaaccaaagtggggtctgctagacccactccagttgggttgactttagaccactgagtcaccaaggactgacccacagggttgtatcttcatcaggagcacagtatcctgcctgtgcatcagccctgggtaaatttgtggaccgaggaccactgtgatttatggagatgagaacttgccagctacacaggtgaacagcttgcagagctagctgcaggtgtactatgaatgtagcagaaagtgtggacataactttcataattcacagaggtttttcamatgcactcttttctggtgtctgacattttagacacacattgaattaagttgttagtaacatcaataactcttctgagttctagatctgaacacaattaaaaaaatctacagaacaagtgatgatattaatacagacttttaaaatcatattttgtacaaaatatcctgcgaaaaacacatcttttatagcataaactattttcaagggtatctacacacatacttagcttagctcagaaaaaagggacatttcatgactcattctttctattatatttaaaaatgggcatgctttaactc

SEQ ID NO: 52294 - DNA, 600 bp, Chicken  19866894302733_1
gtttacatgacggaaaatttgtaggaatgtagacagcaatatttagcataagaacctgactatgtgctctgatatgttttggcaatgtatttgtcagattatgtaacaatagatgtagcaattatggaagattgactcagaacacaaatatctgcatgtgtataattccatattttttctgtagaacacttgaataatatagaatctggatttatgcaagctgcttggtgtttattgctgacattggtgggaacaggatgaagtttaggattcactagaactgacccactactagaactracttagcacgagaaaattcactacttctgtagtcctgaaaagtggatctctaggaatatcttcaaagtatcttgaagaccagggatggtggggagaggagtgggaggtgtgagattaaggcatatactaggtctgccagaccttgacagggtttagaccccccaagtatgtgccacgaacactgtcctctgtccttttcctctgaaaggactgatttcatgcaggcagtgtcttctttaccacatcatttctgagaaggaaatggcaaagagagttatcacttgtcagataaagtttaaa

SEQ ID NO: 52295 - DNA, 600 bp, Chicken  19866894302735_1
tccgttttcagctccaaaataaaaaggctttcaaacttggagccaggcctgcctaaaaacgcccagctgcaagtgggctggcttgtcagaaagggaaaatgtggatggagaaatctttgcaaaggtgaaattgagcagggaacagcggcgctgatacagaggctgatgcaaagctgcctttgtgtgcttgcccgaggtgcaggcattgtgcagagggcatctcctggtgctttaggagatgaatggaggctctcagtggggctgtggggctgacgtgcctgatgggagtggtgtggagcygtggtgatgcgcggagcagaagctgagtggcttttctggctccatcggggttatgtggataaatggttctttgttttcttctggcagtgttgtgacaaatcccagcaagcaatctccttccagaaaccgtcgaagcaaaaaagatgtcatcttgattacaccaaacccagagaagaaaagcttggggcagcggaaagccaaaaggagggattgttgttgggtcaaagggaagcgccactgagagaagcattcaggtttatgggttgggagggctgaaactgagagcctcagcttcagagg

SEQ ID NO: 52296 - DNA, 599 bp, Chicken  19866894302741_1
  misc_feature (1)..(3): n is any nucleotide
nnntcccttgtctcactttaaaaccattcctccttgtcctatcactatccaccctagtaagcagccgcaccacctcctgtttatatgctcccttcaagtactggaaggctgcaatgaggtctccccggagccttttcttctccaagctaaacaagtccggttccctcagcctttcagaggacagatgcagacagcaatcagacagcagtgaaggaaacccaacaccgtgggtccattgggtcaatgatgttgcactgacacaaggccagaggagcccttctccaaccatgcagtgcatcwagagrcacagaattgcctattttcctctatatttttgcaggaattaaaattcatgtgttctttatctctttctggctggttccaatgtgtgattcaaaccgtttagtagtgcatctaaaacctattttctcccagaaacgtgtggaaaacacttcgcttttttggccataagtgcactgctgctgtaaacaagtttttttctgagctctttttaatgaagataattaagaacacattataaagcagattattagtagtaaacagcaagtagcaaatcccttctatataatgtagcaata

SEQ ID NO: 52297 - DNA, 600 bp, Chicken  19866894302741_2
ccttgtctcactttaaaaccattcctccttgtcctatcactatccaccctagtaagcagccgcaccacctcctgtttatatgctcccttcaagtactggaaggctgcaatgaggtctccccggagccttttcttctccaagctaaacaagtccggttccctcagcctttcagaggacagatgcagacagcaatcagacagcagtgaaggaaacccaacaccgtgggtccattgggtcaatgatgttgcactgacacaaggccagaggagcccttctccaaccatgcagtgcatcwagagrcacagaattgcctattttcctctatatttttgcaggaattaaaattcatgtgttctttatctctttctggctggttccaatgtgtgattcaaaccgtttagtagtgcatctaaaacctattttctcccagaaacgtgtggaaaacacttcgcttttttggccataagtgcactgctgctgtaaacaagtttttttctgagctctttttaatgaagataattaagaacacattataaagcagattattagtagtaaacagcaagtagcaaatcccttctatataatgtagcaatattatta

SEQ ID NO: 52298 - DNA, 600 bp, Chicken  19866894302742_1
ttacatttgatcaggctgtccgtgtaccgaattactttggccctctctggctggtgtgtactccttggcagttggactgagcaactcacaggttctcaagtcaccataacaagctcctgttaatctagaattagtcagtggtcacaatctagtgaactggttggcttgaagctgaagtcacacaaattaggtgttcttaaagtaatgagattccttagctgtacagctcaaaaatctactggtagagcagatgatgcaaaacttcacgatatcacaagtcaaatagcactgtatgacagsaggttcattaacaacgttgtaaatacctgaagtgaggaacttgaatacaggaacagtcttatctgtacacagcttggcagttatcttgctgaaaatgcttgttatctgtagcacgaagtcccaagcaactgaccagcacctccagggctgctcaggattccatgggttcagtgggagttcagtgtgttactgagaacaattttaggtaagttttttccatgctggcattatgaagttaaattctaaaacataaactggggttgcctggaactaccctagcttacagagcccaacgttttc

SEQ ID NO: 52299 - DNA, 600 bp, Chicken  19866894302747_1
atatttttagtgttataaactactgccaaatagcagcactgagtgcacttccagttcagtttatgccactctgaagttatctatgccatgagaggcagcgacgtgtgtctgactcttggtgacctgattcagggagtgaagtaggaaactagtccgaatgctggtttagctacctgaagtgactcactgagggatcagacaggtgcaagtgctgatgcaaggaaggggcgtgggaatgcatggctagtggctagggaacagcagagccaaatagctcagacttggattaattgtaattgwtatttaagctgagggaaaactatagagtacgtgctgcttccttccttgaagatagctgcatgactattagaatcagtgagtgtaatacacctctgcagtgggtgctttttgatgtggtggttttgtttgttttttaataataaagtgaactatgagatctgattgcagtcacatttcagagaagaaaatcacatgtgagagttgcaagtggctcttgtctataacagcataaagctcgctttaagagtatttttgagcccatttattggtattttcttagtatcccatcctattttatca

SEQ ID NO: 52300 - DNA, 600 bp, Chicken  19866894302747_2
tccttgaagatagctgcatgactattagaatcagtgagtgtaatacacctctgcagtgggtgctttttgatgtggtggttttgtttgttttttaataataaagtgaactatgagatctgattgcagtcacatttcagagaagaaaatcacatgtgagagttgcaagtggctcttgtctataacagcataaagctcgctttaagagtatttttgagcccatttattggtattttcttagtatcccatcctattttatcagattacttcagtacctctctcccatgaggctgaaaacttgtrcaattcttggctgatctgttgacctcagctctcagctttgtgttcaaatcattccagatgaatggtttatacctaacaaaagctttgcatcttagcttaatatttatgtcttgcaataatcatatatactttctttcctgacttttyttactccatgttcatctgagtgttataactgctgtcaaaaaaaaagggggggggggagrgagaatgccctagtcagtgatgtaaccataatattgagtttattgctgtgctatctaattcaacaaattacattgcgatggtgtttagaaactc

SEQ ID NO: 52301 - DNA, 600 bp, Chicken  19866894302747_3
cacatgtgagagttgcaagtggctcttgtctataacagcataaagctcgctttaagagtatttttgagcccatttattggtattttcttagtatcccatcctattttatcagattacttcagtacctctctcccatgaggctgaaaacttgtrcaattcttggctgatctgttgacctcagctctcagctttgtgttcaaatcattccagatgaatggtttatacctaacaaaagctttgcatcttagcttaatatttatgtcttgcaataatcatatatactttctttcctgacttttyttactccatgttcatctgagtgttataactgctgtcaaaaaaaaagggggggggggagrgagaatgccctagtcagtgatgtaaccataatattgagtttattgctgtgctatctaattcaacaaattacattgcgatggtgtttagaaactcattgcagctatattacactgtgttcatgtttgagggttttttgtgtgtgtttttgtcaccctgctctccgaatttaaataatgccatcttctttcttttcagtttgttgcttgcattggaatggtgatatggaatttcactgttaaa

SEQ ID NO: 52302 - DNA, 600 bp, Chicken  19866894302747_4
tcgctttaagagtatttttgagcccatttattggtattttcttagtatcccatcctattttatcagattacttcagtacctctctcccatgaggctgaaaacttgtrcaattcttggctgatctgttgacctcagctctcagctttgtgttcaaatcattccagatgaatggtttatacctaacaaaagctttgcatcttagcttaatatttatgtcttgcaataatcatatatactttctttcctgacttttyttactccatgttcatctgagtgttataactgctgtcaaaaaaaaayggggggggggagrgagaatgccctagtcagtgatgtaaccataatattgagtttattgctgtgctatctaattcaacaaattacattgcgatggtgtttagaaactcattgcagctatattacactgtgttcatgtttgagggttttttgtgtgtgtttttgtcaccctgctctccgaatttaaataatgccatcttctttcttttcagtttgttgcttgcattggaatggtgatatggaatttcactgttaaacaaaaagatgtaactgtgcagatcctagtatttatatttctctaca

SEQ ID NO: 52303 - DNA, 600 bp, Chicken  19866894302747_5
cgctttaagagtatttttgagcccatttattggtattttcttagtatcccatcctattttatcagattacttcagtacctctctcccatgaggctgaaaacttgtrcaattcttggctgatctgttgacctcagctctcagctttgtgttcaaatcattccagatgaatggtttatacctaacaaaagctttgcatcttagcttaatatttatgtcttgcaataatcatatatactttctttcctgacttttyttactccatgttcatctgagtgttataactgctgtcaaaaaaaaagygggggggggagrgagaatgccctagtcagtgatgtaaccataatattgagtttattgctgtgctatctaattcaacaaattacattgcgatggtgtttagaaactcattgcagctatattacactgtgttcatgtttgagggttttttgtgtgtgtttttgtcaccctgctctccgaatttaaataatgccatcttctttcttttcagtttgttgcttgcattggaatggtgatatggaatttcactgttaaacaaaaagatgtaactgtgcagatcctagtatttatatttctctacag

SEQ ID NO: 52304 - DNA, 600 bp, Chicken  19866894302747_6
atttttgagcccatttattggtattttcttagtatcccatcctattttatcagattacttcagtacctctctcccatgaggctgaaaacttgtrcaattcttggctgatctgttgacctcagctctcagctttgtgttcaaatcattccagatgaatggtttatacctaacaaaagctttgcatcttagcttaatatttatgtcttgcaataatcatatatactttctttcctgacttttyttactccatgttcatctgagtgttataactgctgtcaaaaaaaaagggggggggggagrgagaatgccctagtcagtgatgtaaccataatattgagtttattgctgtgctatctaattcaacaaattacattgcgatggtgtttagaaactcattgcagctatattacactgtgttcatgtttgagggttttttgtgtgtgtttttgtcaccctgctctccgaatttaaataatgccatcttctttcttttcagtttgttgcttgcattggaatggtgatatggaatttcactgttaaacaaaaagatgtaactgtgcagatcctagtatttatatttctctacagttcactttatag

SEQ ID NO: 52305 - DNA, 600 bp, Chicken  19866894302758_1
atcagatttttcttatttgttttgtggtcaaaatagtaagaagtaattagctttgagtatggaataagttaaagggaaatttgcaggacagattggtggaacagggcagttagtaaacatgcatacttggacagtagagtaatgatggtgggttggatggtgtgcaggtgtctaaaattaacttagagctgattaactgtgatattcctgcagttttatcgtgcagttccatttgaaagaaaaggagtcagccgaggctgaatttctataccatacagaggagcgtggagttgtaacttyggtcctttttgaaacttctcaagagtctgagaaacaccttaaagatttttttttgaagttcttacttggcttacagacatttagtgacacttagataaaatatttggcacatctgtttcctagagacgccctaatgctgctgcctagtctgtacttgcaaacctttaatgcaagcttagggaagccaaaagcgaggtggcgtgcgtagccccaggtgaaatcttttgaagagctggcagcatattaattgctgggttttgaatatgcatactaaagcctatttaaagaaggagtgctggg

SEQ ID NO: 52306 - DNA, 600 bp, Chicken  19866894302760_1
accactgttggcaagggctgtcttgtcctatattcttggacactatgacagtaaaaaaaaatgctacaggtgatctgatcttttctcctttcaggcaaaagctgcctgtggttgccacgtgttctctctgacaaaggccttgagacccattatgtgcaaactccagggaaaataggaaagttgcttatttttgttggcatatgaatgattgttctggcctaactgagttcacttttgtgtgtgtttatgtcacactttatgatttgcatgggtagttctggtttggctgtcaatgcctgstggttcggtaatttgtacagccctcggtctgtccgcctttgctgtattccactgtcgtggcagtttcttttttcattgctacttcctcctgtgggagcagtaatttatggccagaggttaaccccatttgctgaagcatccaactgttgcaccaatagatctataaaagcagagaacggggaccaagagatggggaataaataaaatagatattcttcaaacgacatacaaagccattcttgttgacacagaaacaaagaaatttctgtaatggctaagatcgatatcaaatccgrtgtt

SEQ ID NO: 52307 - DNA, 595 bp, Chicken  19866894302760_2
ctgstggttcggtaatttgtacagccctcggtctgtccgcctttgctgtattccactgtcgtggcagtttcttttttcattgctacttcctcctgtgggagcagtaatttatggccagaggttaaccccatttgctgaagcatccaactgttgcaccaatagatctataaaagcagagaacggggaccaagagatggggaataaataaaatagatattcttcaaacgacatacaaagccattcttgttgacacagaaacaaagaaatttctgtaatggctaagatcgatatcaaatccgrtgttctgcctctgacggtgtatcgtagcaataccttggaggaaaaggacagttccattaagtaaaaattgtggagccatctgcctgtagcaggctttgctctcagccaatttgcttcctgagccaaatgctaatcggcgaacaccttacagcaggtctccttatcgctacacgttgttacacagctccatgcaaccacgggtcctccctttgtgcatacagcactgcttgtctcttgactccaatgacattttgtggtaatgagttctgcagatgagctgtgcataaagatgtct

SEQ ID NO: 52308 - DNA, 600 bp, Chicken  19866894302765_1
tcttgattgctagagccacttactccttacctcagtgtataatcagtgttcagtgttgcgtggagcctttagctgagccgggaaatcagtcttatggttcacgtttgtatgactgagaatgcttaagaaatgcactgtcgtggtttttttccataattcaagtaaagttaggattgaatttgcatttcccagttaacaaatttatcttcagctgaggtaaggagataaaagttcaaaaaactgtgttcaaagatgggaatgcaaaataaaaactggcagcatggcatagtttgctcatcrtatttttcagtatcagacattaatgtgcgatgtaacagtggtgaaaataaaacactcaaagtgaacatttggtgttgaaatgtagtcgagataactgaacagtcttttctgtagttgtcgtgtttgtgaagattgttagaatattccctccttagaggggaagctgatccaaaagagatgtctggtataggctgcaatataagcaaacatcaagtggttttcagttcacaaaccctttctgcaaactctgatttttctcaagtggtcatgttcaaaatgcatgcataactctacccaaca

SEQ ID NO: 52309 - DNA, 600 bp, Chicken  19866894302767_1
tgaaatccatctgcacagttggaaccttttctgcttaaaattgtgtagaataccttcagcatctatactgattgcagtataaaatagataagcagtcttctctttggtaaaggctgcttattacttaatgttactctattttaatttttttgtaattctattaaaatgcctgttattaacattcttgcctgattaaaacgctgtcaattttaaaattctaattacagggactttccgatgaacttttggaatagtaatgacagggcagaagaaggctatgaacattttaatggagagttygttgcaatttgtattgactttcattgatgtttcacataagcatgtatagtctattcctctgcattctgcttccctttctataccagctccagagagaacacaagactgaaaggtatccttgtctatatatttagctaagtttgatacagtgaggttaacctgcacatggatttactaaagaccttggraattttgccataaatgctacaagatttcatctgcagacagcattttactttcagttaatttgytatggcagcccaaattcaggactccaggtggatgrattaatagtctatc

SEQ ID NO: 52310 - DNA, 600 bp, Chicken  19866894302767_2
ctgattaaaacgctgtcaattttaaaattctaattacagggactttccgatgaacttttggaatagtaatgacagggcagaagaaggctatgaacattttaatggagagttygttgcaatttgtattgactttcattgatgtttcacataagcatgtatagtctattcctctgcattctgcttccctttctataccagctccagagagaacacaagactgaaaggtatccttgtctatatatttagctaagtttgatacagtgaggttaacctgcacatggatttactaaagaccttggraattttgccataaatgctacaagatttcatctgcagacagcattttactttcagttaatttgytatggcagcccaaattcaggactccaggtggatgrattaatagtctatctaaaacataaatattactaaggaatttgtattcatttctttagattaacagggagaaaaggaaattacttccatagcctactatctgaggtatcttcttgttcttattatttgagacaatttttttacccagactcgttacctgttgcttatcaaactagcctatcattctatattttttgggtttct

SEQ ID NO: 52311 - DNA, 600 bp, Chicken  19866894302767_3
tagtaatgacagggcagaagaaggctatgaacattttaatggagagttygttgcaatttgtattgactttcattgatgtttcacataagcatgtatagtctattcctctgcattctgcttccctttctataccagctccagagagaacacaagactgaaaggtatccttgtctatatatttagctaagtttgatacagtgaggttaacctgcacatggatttactaaagaccttggraattttgccataaatgctacaagatttcatctgcagacagcattttactttcagttaatttgytatggcagcccaaattcaggactccaggtggatgrattaatagtctatctaaaacataaatattactaaggaatttgtattcatttctttagattaacagggagaaaaggaaattacttccatagcctactatctgaggtatcttcttgttcttattatttgagacaatttttttacccagactcgttacctgttgcttatcaaactagcctatcattctatattttttgggtttctttaatccttgacattctattttttgctttcacgtctgctgtattaaatgaactcaggccccca

SEQ ID NO: 52312 - DNA, 600 bp, Chicken  19866894302767_4
ttaatggagagttygttgcaatttgtattgactttcattgatgtttcacataagcatgtatagtctattcctctgcattctgcttccctttctataccagctccagagagaacacaagactgaaaggtatccttgtctatatatttagctaagtttgatacagtgaggttaacctgcacatggatttactaaagaccttggraattttgccataaatgctacaagatttcatctgcagacagcattttactttcagttaatttgytatggcagcccaaattcaggactccaggtggatgrattaatagtctatctaaaacataaatattactaaggaatttgtattcatttctttagattaacagggagaaaaggaaattacttccatagcctactatctgaggtatcttcttgttcttattatttgagacaatttttttacccagactcgttacctgttgcttatcaaactagcctatcattctatattttttgggtttctttaatccttgacattctattttttgctttcacgtctgctgtattaaatgaactcaggcccccaagcataataaaacatatgattattgtaatgtatca

SEQ ID NO: 52313 - DNA, 600 bp, Chicken  19866894302769_1
tgtttttcttcttccagtgtttgatcagagttatcccgctaagcttctaagcaagaaaaaaaatacccaaaaaacagaattagcatatacttctctgaaattcaccttccctctttagcatatgtgttctggaactggcagaaatcactagtacatactccaacgtgttaaaagactagttttatggcagtataaataaatgaggccttacagcaacagggtgaagcactacctttatcaatattctattcagaacaaaagaaaggagaaacccttaaaacttcttaccagaaaaacatsggatgaatttaattttcagtgtgaactgtgaaattcttcctctctttcaaacactgtctctgccaggaggaaaaagaacatcaccaacagtacttcacgaattgctatgatttcatagaatcattaaggttaaaaaagacctataagatcatctccagggatcctgtcttcaacaaataaaaatctgttgatacttttgaatcatgggttagaggaagcaagcatcatgtgctgcaaatccagctgctgctgttcaaaaccttgggttctacaggtagagagatgcatttagtggcaggt

SEQ ID NO: 52314 - DNA, 600 bp, Chicken  19866894302773_1
tttcaggtccgatatttcccattagcagtaaaaagaaaacgtaaacagtacaaaaacatctacttttttgagaggtcaccaagatacttatttggcttcctaggcagtttacctgcaaagataaatttctctgtattctttttcacttatctgtccataaattagagataaaagtattgataatgataaatctatgctagtgtatgcatcctttatgtccttgaggaagagtcatgttgtatttctgatcttgtttagttttagattctactttttgtttagctatttctgaaagtttawattttatatttaagaatggaacaattaaatctttttggaggagtgagatgcacaattttatatttactgttgttgagaagaaactattccctttttcattatgcaaatagatccataaataattaggaagtatggaaacgatatatgcaaatcccagcacaaacaatctgttcctattttatatcatagcaaacaccctctgaccttcaaggaaaataaatacagtacactttgtagacgtaggagaaaacaacccaaacttgattacctttctcatgaaataaaagaaagacaccttgc

SEQ ID NO: 52315 - DNA, 471 bp, Chicken  19866894302775_1
tgtatgttttaatttcaggttgtatatttgactgtcgggataaaacaatggtgggaatactggtgtattacttacagtgaagtaattaacagtgtggttttgtgccctgctgagatctccatcactatttccgagacttcttacgttacagtgttgattcggatcgagctgagtatacacaatcctttgtagcttttctggattcattcaaggcaccagaagtgattttttggccagtgtaaacaacagtaatggcgagcttcaactcattcgatgtggtttttgtatttcagtaaaccyggatttttatttttttaataagagcgagaaatgtaaaagtgagtgtaaatgtatattgcgcttgcattattagctgggaattagtctgagcacattacatcagcctgaaatattaatttttcagaattctgagctcccttttgattttgaggccaagtcttgaaacatcaa

SEQ ID NO: 52316 - DNA, 600 bp, Chicken  19866894302779_1
ccgggatcgtgtcggtgtgctcttctccatggcgttcgtttccccgaacccctgtgtgaagagtgaagaaagagaggcgtttttcttttaattctgagtttcgtgttattttggaagtctgaagttcttttccttcttcccttttctttcttttcctcctttttcttttttgggggatgaggaatagaaaacaaagtttcaagctaattccaaagtctttgtttgatcaactgttcaggcaactcttccatacagcatctctgcacagacaagctgaatgcattttaagaataacttaayttgctkctgccaacraaggggtagaaacatycatgctctcggtggcaatcctcctctcctctctatccttcttctctcatgtctgagttcatcttctacgccatttactttgacaatgatcattggcagctacttcactgtgctgactcagtggcacgtgtgctacaaattagcaatacagtaactgtatgaagcctgtcctggttaaaagcctttctgcccaagcagttgtcatgagcaagtttgttgggaagatcgtgggaactctgaagttgtgcacagctcccccttccctcccac

SEQ ID NO: 52317 - DNA, 600 bp, Chicken  19866894302779_2
tcgtgtcggtgtgctcttctccatggcgttcgtttccccgaacccctgtgtgaagagtgaagaaagagaggcgtttttcttttaattctgagtttcgtgttattttggaagtctgaagttcttttccttcttcccttttctttcttttcctcctttttcttttttgggggatgaggaatagaaaacaaagtttcaagctaattccaaagtctttgtttgatcaactgttcaggcaactcttccatacagcatctctgcacagacaagctgaatgcattttaagaataacttaayttgctkctgccaacraaggggtagaaacatycatgctctcggtggcaatcctcctctcctctctatccttcttctctcatgtctgagttcatcttctacgccatttactttgacaatgatcattggcagctacttcactgtgctgactcagtggcacgtgtgctacaaattagcaatacagtaactgtatgaagcctgtcctggttaaaagcctttctgcccaagcagttgtcatgagcaagtttgttgggaagatcgtgggaactctgaagttgtgcacagctcccccttccctcccaccaatgc

SEQ ID NO: 52318 - DNA, 600 bp, Chicken  19866894302779_3
tgtgctcttctccatggcgttcgtttccccgaacccctgtgtgaagagtgaagaaagagaggcgtttttcttttaattctgagtttcgtgttattttggaagtctgaagttcttttccttcttcccttttctttcttttcctcctttttcttttttgggggatgaggaatagaaaacaaagtttcaagctaattccaaagtctttgtttgatcaactgttcaggcaactcttccatacagcatctctgcacagacaagctgaatgcattttaagaataacttaayttgctkctgccaacraaggggtagaaacatycatgctctcggtggcaatcctcctctcctctctatccttcttctctcatgtctgagttcatcttctacgccatttactttgacaatgatcattggcagctacttcactgtgctgactcagtggcacgtgtgctacaaattagcaatacagtaactgtatgaagcctgtcctggttaaaagcctttctgcccaagcagttgtcatgagcaagtttgttgggaagatcgtgggaactctgaagttgtgcacagctcccccttccctcccaccaatgcagtgctgtt

SEQ ID NO: 52319 - DNA, 600 bp, Chicken  19866894302779_4
gcgttcgtttccccgaacccctgtgtgaagagtgaagaaagagaggcgtttttcttttaattctgagtttcgtgttattttggaagtctgaagttcttttccttcttcccttttctttcttttcctcctttttcttttttgggggatgaggaatagaaaacaaagtttcaagctaattccaaagtctttgtttgatcaactgttcaggcaactcttccatacagcatctctgcacagacaagctgaatgcattttaagaataacttaayttgctkctgccaacraaggggtagaaacatycatgctctcggtggcaatcctcctctcctctctatccttcttctctcatgtctgagttcatcttctacgccatttactttgacaatgatcattggcagctacttcactgtgctgactcagtggcacgtgtgctacaaattagcaatacagtaactgtatgaagcctgtcctggttaaaagcctttctgcccaagcagttgtcatgagcaagtttgttgggaagatcgtgggaactctgaagttgtgcacagctcccccttccctcccaccaatgcagtgctgtttgtgttatgccaggac

SEQ ID NO: 52320 - DNA, 583 bp, Chicken  19866894302779_5
tgctctcggtggcaatcctcctctcctctctatccttcttctctcatgtctgagttcatcttctacgccatttactttgacaatgatcattggcagctacttcactgtgctgactcagtggcacgtgtgctacaaattagcaatacagtaactgtatgaagcctgtcctggttaaaagcctttctgcccaagcagttgtcatgagcaagtttgttgggaagatcgtgggaactctgaagttgtgcacagctcccccttccctcccaccaatgcagtgctgtttgtgttatgccaggacayttgctstttcttgccgctggttgctgagctgtgccagcagcactctgaccttctgtgaagggaatacgtcaaggagctgtctcagtccatcctaaccctctgcctgatagcaaacagtgggctgagacttaaccataaatgtcacttaatgtgcacctggatgtgtgatggagtgaataacttcttgtcagcatgggtcccaggccacgcgcagctcaactggttctcaataatcacttctaacttcttctgatacattttaaatgttctgcgtcagtgaaaa

SEQ ID NO: 52321 - DNA, 577 bp, Chicken  19866894302779_6
cggtggcaatcctcctctcctctctatccttcttctctcatgtctgagttcatcttctacgccatttactttgacaatgatcattggcagctacttcactgtgctgactcagtggcacgtgtgctacaaattagcaatacagtaactgtatgaagcctgtcctggttaaaagcctttctgcccaagcagttgtcatgagcaagtttgttgggaagatcgtgggaactctgaagttgtgcacagctcccccttccctcccaccaatgcagtgctgtttgtgttatgccaggacayttgctstttcttgccgctggttgctgagctgtgccagcagcactctgaccttctgtgaagggaatacgtcaaggagctgtctcagtccatcctaaccctctgcctgatagcaaacagtgggctgagacttaaccataaatgtcacttaatgtgcacctggatgtgtgatggagtgaataacttcttgtcagcatgggtcccaggccacgcgcagctcaactggttctcaataatcacttctaacttcttctgatacattttaaatgttctgcgtcagtgaaaa

SEQ ID NO: 52322 - DNA, 600 bp, Chicken  19866894302780_1
ggtattttgggtagggatgagcatgggatgaggggagtagtgcttggtgccttgggaaggtgagagttcattgcagagtccattctcttgcccttacattagggagggtgattgacaacagatgtttttatgaagaacttgtggtatttcttattctacggtaagaagagtaattggttcggtcagtctatttttttactcacttagcatttcccttgaagagcagcctttcttcaaggggaagggaaaagatctgattttgtactggtcttactgctttgactagaagttagtaacagyatgagacagctgcatgctcacgattgtgatgagcttgacaaaaatgactacttggaaataattagaggtgaatgtggaaagaagtagaggtgttaatgtggcttgtataaacataaattttgcaggtatttgctraactttaaccctatgtcatgctcagttggtttatggcaaaataaaccatgggacatggrcttgcatggtacaagttccacacactaacctaaaaagcttgcctgttcctgggaatgggctggaagatgacccgtattggctttccttttgttctgaagccctgtc

SEQ ID NO: 52323 - DNA, 600 bp, Chicken  19866894302780_2
aacttgtggtatttcttattctacggtaagaagagtaattggttcggtcagtctatttttttactcacttagcatttcccttgaagagcagcctttcttcaaggggaagggaaaagatctgattttgtactggtcttactgctttgactagaagttagtaacagyatgagacagctgcatgctcacgattgtgatgagcttgacaaaaatgactacttggaaataattagaggtgaatgtggaaagaagtagaggtgttaatgtggcttgtataaacataaattttgcaggtatttgctraactttaaccctatgtcatgctcagttggtttatggcaaaataaaccatgggacatggrcttgcatggtacaagttccacacactaacctaaaaagcttgcctgttcctgggaatgggctggaagatgacccgtattggctttccttttgttctgaagccctgtctacaggtgagtgagcctctcactgaagactttatttttaccttgaatctgatgttcattgtaataagggcaggtaacgtccactttttaagacagtgtggaacaaggaatgctttccaaacccctgtgcttagtt

SEQ ID NO: 52324 - DNA, 600 bp, Chicken  19866894302780_3
tttactcacttagcatttcccttgaagagcagcctttcttcaaggggaagggaaaagatctgattttgtactggtcttactgctttgactagaagttagtaacagyatgagacagctgcatgctcacgattgtgatgagcttgacaaaaatgactacttggaaataattagaggtgaatgtggaaagaagtagaggtgttaatgtggcttgtataaacataaattttgcaggtatttgctraactttaaccctatgtcatgctcagttggtttatggcaaaataaaccatgggacatggrcttgcatggtacaagttccacacactaacctaaaaagcttgcctgttcctgggaatgggctggaagatgacccgtattggctttccttttgttctgaagccctgtctacaggtgagtgagcctctcactgaagactttatttttaccttgaatctgatgttcattgtaataagggcaggtaacgtccactttttaagacagtgtggaacaaggaatgctttccaaacccctgtgcttagtttcattttggatacagttggaaggttatgctggcaacattactaaaattacaaagacgcc

SEQ ID NO: 52325 - DNA, 600 bp, Chicken  19866894302782_1
accaatttagtttagtgaggttaatttcctttcctacagtcagtgagtagtccatagagaattctgagcagggaataatcaagctacagcctccaccctaatgctaaaatagattttggaactgaactggagacaataatagtgactgtgaaagcaatacatcgcctctagtactaacagcactgcaatcctgaaatgtgacagcagtgcaaatccacagccctgacattcacccatatggccaacagcttatgatctaaaggaataattgcactcatttatgcttattaactaattgtstttcgatcctaatatacaaagatgaaatattcacatattactccacgctggtcaatgcagaacagcatagtggtaaagaaaagctttcagatccattaggaactatgacatacattaaaatagatatatgttgtacacctgattcttaacctctgctgcctcaatctgctggaaaatagacacacatcagaacagcaaccagtcactcacctatactggcaacacaacagacactgtcagacacactttctgtggtactctcctttttttgtgcaggtattatcgatcccctccagactg

SEQ ID NO: 52326 - DNA, 600 bp, Chicken  19866894302784_1
catattgatgcagtaacgtaatgctgaatattcatatctgacttgagtctggaaaagtgctttcataattttaatgatttcagttaacctgttagtggtatgcaaatttgtcttcttggaattctgcacctatcaatgccatcaagctggacaaaagtaggattatttaaaattcagatgctgccactgtgatcatcaataaagtactaaagtgaaagaagtagaacgatcatgtatgttttctgttttgtttagggtgcaaaatttggacgtccgatgggattaaatcaggctcctccrcagcgttcttctgttcggagatcatttgggagatcaaagcgattcagtattactcgttcgctggatgacctggaggtaattgacttctacttacagcttagaaatgagtcctggagggaagtatacagtaattaattttgatgataattgaagaaaagtagcaatacctgtagtgtaataaagttactaatgacgatatgacatttttgtgagggaaatgcagatttcacatatgaacctgaatttctgaattttcttcaatagtttgcattgatgctggcagtaaccattctttctgtg

SEQ ID NO: 52327 - DNA, 600 bp, Chicken  19866894302787_1
cttccctgcacccagcaccggtccacccaaagaattcagaaataccccctcctctcaccatgagagtaaatccacggatggtcctttcatcaacaggcagcagcaagaagcgactaacgctccgtgcacagccagttccttattcccttctccccttgggcagtggcagcacacgtctcactcagactgcagcagatgctggacatttgttctggcaccagatgctgccctgggaccctcctttctgccctccctggggcctgatcagcttcgcagttcaaggaatactaatgcttcccycaaatcctcgctgaaagacaaggctgcattcttctactcccaatccacaaggtaactgtttagacgacccaacttgcatatgtaaattgaattctttagaaaccagagtgcagcagatctccagacagagcgcttatgggatgctctgggactttttctctcttctgcacatatttttctagggaggaaaacaggattgctggctagaactgggtgggaaaccgtttcacattctctgaaccttttctgagacttcagcaagtttccattctgcgctgggacaaagaaaacaacaaaaaa

SEQ ID NO: 52328 - DNA, 600 bp, Chicken  19866894302787_2
gatgactattaaatcatttgcttgtagtagaaaggttccaacaacagtcactgacagaggacagtggagggtgaatcactgtttgagttgggagaataaagtcctgcctgaacgtttgcccacgtcccagttgactgttccagttgccagcccattggctgtcttgtgctgaataaagccttttcccaattaaactgattttatcaagtgaagatatttgtgactgccatgcactagccagcaagaagcagggcaggagtccatccctgcctccaaaaggggatgaaatgccattacagyttgctaggttgcacaaagatgcctatgcagcccttgtgacttgaatgactgtctctgtacagtgccasctggacataaggtgaattcaggacactttttttttttttttaccattgccataatcagtatggacaacccaatcatgccttcaackctgtggctaacagaagtgatggctttaaagataaactcttgttccctctctggccacaagagtccttattccaaagacccagatctggctcccagagcacctaatgcactgctcactgatcatatcgtcacctttctctgtgrggt

SEQ ID NO: 52329 - DNA, 600 bp, Chicken  19866894302787_3
gggtgaatcactgtttgagttgggagaataaagtcctgcctgaacgtttgcccacgtcccagttgactgttccagttgccagcccattggctgtcttgtgctgaataaagccttttcccaattaaactgattttatcaagtgaagatatttgtgactgccatgcactagccagcaagaagcagggcaggagtccatccctgcctccaaaaggggatgaaatgccattacagyttgctaggttgcacaaagatgcctatgcagcccttgtgacttgaatgactgtctctgtacagtgccasctggacataaggtgaattcaggacactttttttttttttttaccattgccataatcagtatggacaacccaatcatgccttcaackctgtggctaacagaagtgatggctttaaagataaactcttgttccctctctggccacaagagtccttattccaaagacccagatctggctcccagagcacctaatgcactgctcactgatcatatcgtcacctttctctgtgrggtctccaatgacaaaacagctttgctttgtacaatatttacagatcttctcatgtacrgagctataagca

SEQ ID NO: 52330 - DNA, 600 bp, Chicken  19866894302787_4
ttggctgtcttgtgctgaataaagccttttcccaattaaactgattttatcaagtgaagatatttgtgactgccatgcactagccagcaagaagcagggcaggagtccatccctgcctccaaaaggggatgaaatgccattacagyttgctaggttgcacaaagatgcctatgcagcccttgtgacttgaatgactgtctctgtacagtgccasctggacataaggtgaattcaggacactttttttttttttttaccattgccataatcagtatggacaacccaatcatgccttcaackctgtggctaacagaagtgatggctttaaagataaactcttgttccctctctggccacaagagtccttattccaaagacccagatctggctcccagagcacctaatgcactgctcactgatcatatcgtcacctttctctgtgrggtctccaatgacaaaacagctttgctttgtacaatatttacagatcttctcatgtacrgagctataagcatacaagcatcaagtcaggctggaggaaatggcacttcctgaaggtttgcaggcaatgatgagagctctccattcagactttccttc

SEQ ID NO: 52331 - DNA, 600 bp, Chicken  19866894302787_5
agyttgctaggttgcacaaagatgcctatgcagcccttgtgacttgaatgactgtctctgtacagtgccasctggacataaggtgaattcaggacactttttttttttttttaccattgccataatcagtatggacaacccaatcatgccttcaackctgtggctaacagaagtgatggctttaaagataaactcttgttccctctctggccacaagagtccttattccaaagacccagatctggctcccagagcacctaatgcactgctcactgatcatatcgtcacctttctctgtgrggtctccaatgacaaaacagctttgctttgtacaatatttacagatcttctcatgtacrgagctataagcatacaagcatcaagtcaggctggaggaaatggcacttcctgaaggtttgcaggcaatgatgagagctctccattcagactttccttcatgcacccaccccattacctggaataatccaccacatggcacccatgtctaggaaagagatctgctctggtgagcagataytgccagttagtttcaaaagtgtcccaccaggaatgttgtgacactggagaggggttgacatt

SEQ ID NO: 52332 - DNA, 600 bp, Chicken  19866894302787_6
gtacagtgccasctggacataaggtgaattcaggacactttttttttttttttaccattgccataatcagtatggacaacccaatcatgccttcaackctgtggctaacagaagtgatggctttaaagataaactcttgttccctctctggccacaagagtccttattccaaagacccagatctggctcccagagcacctaatgcactgctcactgatcatatcgtcacctttctctgtgrggtctccaatgacaaaacagctttgctttgtacaatatttacagatcttctcatgtacrgagctataagcatacaagcatcaagtcaggctggaggaaatggcacttcctgaaggtttgcaggcaatgatgagagctctccattcagactttccttcatgcacccaccccattacctggaataatccaccacatggcacccatgtctaggaaagagatctgctctggtgagcagataytgccagttagtttcaaaagtgtcccaccaggaatgttgtgacactggagaggggttgacatttgatttgaaaatgcaggytttctgacaactggattagactggattcaagctctgctctt

SEQ ID NO: 52333 - DNA, 600 bp, Chicken  19866894302787_7
gatctggctcccagagcacctaatgcactgctcactgatcatatcgtcacctttctctgtgrggtctccaatgacaaaacagctttgctttgtacaatatttacagatcttctcatgtacrgagctataagcatacaagcatcaagtcaggctggaggaaatggcacttcctgaaggtttgcaggcaatgatgagagctctccattcagactttccttcatgcacccaccccattacctggaataatccaccacatggcacccatgtctaggaaagagatctgctctggtgagcagataytgccagttagtttcaaaagtgtcccaccaggaatgttgtgacactggagaggggttgacatttgatttgaaaatgcaggytttctgacaactggattagactggattcaagctctgctcttggatttagagtccctgcttggatggacagaatgaaacaggacagctaactgaagggttattaattttcactggcactggccagcagactgaagcagtctgctgcataacacttatgtttggtttacttcagtggtttaactactgatgcagcggcacagtaaagacctgctaagagatg

SEQ ID NO: 52334 - DNA, 600 bp, Chicken  19866894302787_8
agctttgctttgtacaatatttacagatcttctcatgtacrgagctataagcatacaagcatcaagtcaggctggaggaaatggcacttcctgaaggtttgcaggcaatgatgagagctctccattcagactttccttcatgcacccaccccattacctggaataatccaccacatggcacccatgtctaggaaagagatctgctctggtgagcagataytgccagttagtttcaaaagtgtcccaccaggaatgttgtgacactggagaggggttgacatttgatttgaaaatgcaggytttctgacaactggattagactggattcaagctctgctcttggatttagagtccctgcttggatggacagaatgaaacaggacagctaactgaagggttattaattttcactggcactggccagcagactgaagcagtctgctgcataacacttatgtttggtttacttcagtggtttaactactgatgcagcggcacagtaaagacctgctaagagatgcaagtscggggcatctttgctctgtcaccatgtaaacactcaacagacagttggccagtagccacgggctgcagttgatg

SEQ ID NO: 52335 - DNA, 600 bp, Chicken  19866894302787_9
ttagtttcaaaagtgtcccaccaggaatgttgtgacactggagaggggttgacatttgatttgaaaatgcaggytttctgacaactggattagactggattcaagctctgctcttggatttagagtccctgcttggatggacagaatgaaacaggacagctaactgaagggttattaattttcactggcactggccagcagactgaagcagtctgctgcataacacttatgtttggtttacttcagtggtttaactactgatgcagcggcacagtaaagacctgctaagagatgcaagtscggggcatctttgctctgtcaccatgtaaacactcaacagacagttggccagtagccacgggctgcagttgatgcctgattacttttctggtctttttgcacacctgatgcggtgaaaacacacagcgtcaggtgtgagatgagagactctccaagaggtgtggtaagagtaacatgaagggctcaggtctgtagaaggatcatactcagtatcgtgggcttccacagacctgtagatgtttggaggcaatgtgacaatgaacagcccttttcttttaattattattttaatacgcttat

SEQ ID NO: 52336 - DNA, 600 bp, Chicken  19866894302790_1
caggcggcacatgatgttgaagccaggtgaggagtggaaggcacacatgtccatgtgctgtggacaggagcagggagcacagacctttaattctgcgagctggggtgaactgtaacacaaaagtgactgatttcttggggagcctcaagacagaaagagtatgtcaggcagtccaggataacagagcacctactccaaagcgaggctgggagactttcaaagagggctgggggagtcttctctgtgtactctgattcacactgttttgtggcttgggtggctttgagtccaccattccamtattgtttctttactctctcctgcatttcccttctctctgtcagtaaggcattgtaccaagtgtctccctgagatcctgccactggaagctcagcaccattgttcacagtggaaattcatctctacataatatgaggctatatagactgtgtttaacaatggrtgttgctccacagtgacctcaggattgtgtgattacggcagtcctttgctatcgcaggagtattctctgtgcacacagaaatgaaacaaggaattaaccaaaccaaaatttttcttcaggggtaaaatgtcatgtag

SEQ ID NO: 52337 - DNA, 600 bp, Chicken  19866894302790_2
tcaggcagtccaggataacagagcacctactccaaagcgaggctgggagactttcaaagagggctgggggagtcttctctgtgtactctgattcacactgttttgtggcttgggtggctttgagtccaccattccamtattgtttctttactctctcctgcatttcccttctctctgtcagtaaggcattgtaccaagtgtctccctgagatcctgccactggaagctcagcaccattgttcacagtggaaattcatctctacataatatgaggctatatagactgtgtttaacaatggrtgttgctccacagtgacctcaggattgtgtgattacggcagtcctttgctatcgcaggagtattctctgtgcacacagaaatgaaacaaggaattaaccaaaccaaaatttttcttcaggggtaaaatgtcatgtagactttcggaaatatgttgaggctttcttttctgtttattacagtgagttctgatgcaccttctattgagattttctgagcctgtgagctctgtatctgtctactaaaggaaaaatcaagagaataaaacaacctacaactcatccaactcagaaagaggaaaa

SEQ ID NO: 52338 - DNA, 600 bp, Chicken  19866894302790_3
tgaaaattacgaagaactttctgctgttgaaaatacttagtaccaactttttctttgggttttgctctgaatagagtgtctccagaggtaggtaacaggcccttgaggcctttagaaggaggcctggcaagacttcagaaagtgtatggagactgccatagaagaaaaacactgccctagaagacaagtgaacaaaacatcttctatttacatccaagacaacttctgtatatcacacatattgtgtgtggttttggtgggtttttttttttggcattattaatttcatttccatatatkctgccaaaccaaaataaagtaaaatgttgactgttagatatgggatgtagagactgatagattctaaagttactttgacaagaatgaacgccatggaaatccaaagagtaatctgcttcaggaccatcaaagaggctttctgataccacacacctcgtggggcatcttactcttttgcatttgacaactactgaataaaaccagatgatcaataaatattaaaaataacatctttgagaaggcaccatttattcaaacagtcttctcaacaatctcagaaacatggtctgatatttaggt

SEQ ID NO: 52339 - DNA, 599 bp, Chicken  19866894302807_1
  misc_feature (1)..(119): n is any nucleotide
nnnnnnnnnnnnnnnnnnnnnnnnnnnnnnnnnnnnnnnnnnnnnnnnnnnnnnnnnnnnnnnnnnnnnnnnnnnnnnnnnnnnnnnnnnnnnnnnnnnnnnnnnnnnnnnnnnnnnnnttggttctaacaagcaacaaaaggcgctctaaggagtgagcagtcattccgcaaggcagttatatgggaagttgggaggcggcagcccacacctgagcttctgcgggcagggttgggcacacagctggggcacatctgtaaaagcagtgcaagttctgagtctgttaacacttgggggggraaaaaaaaaacaaaacaagtctggtaaaatgctttgctctgttgtgcccttaaaccatgctattctagatcttagcactgaatttatattttttccacgctcttccagtttttggcactttttcctgcttgcttgttcatgtgatggcctaackgaatgaagctttgcrctacacagctgcatctggatgttcccayagcttacagtagagctgaagtgcctttagctaggccttcctaccctgtctgcctatttgctggtgtctcatcctcctggggcatgcctcaggctggtgaccc

SEQ ID NO: 52340 - DNA, 600 bp, Chicken  19866894302807_2
gtgagcagtcattccgcaaggcagttatatgggaagttgggaggcggcagcccacacctgagcttctgcgggcagggttgggcacacagctggggcacatctgtaaaagcagtgcaagttctgagtctgttaacacttgggggggraaaaaaaaaacaaaacaagtctggtaaaatgctttgctctgttgtgcccttaaaccatgctattctagatcttagcactgaatttatattttttccacgctcttccagtttttggcactttttcctgcttgcttgttcatgtgatggcctaackgaatgaagctttgcrctacacagctgcatctggatgttcccayagcttacagtagagctgaagtgcctttagctaggccttcctaccctgtctgcctatttgctggtgtctcatcctcctggggcatgcctcaggctggtgacccagtgtcttctgctgaatctgtcattcgggcagtatctgaggcatccacactgatgcggaatgtttctttctctctgggagatgattgcttctcccattgtctcagcacagcagctcagaggactccagtcccagcctgccactcttcttcatgac

SEQ ID NO: 52341 - DNA, 600 bp, Chicken  19866894302807_3
gcaaggcagttatatgggaagttgggaggcggcagcccacacctgagcttctgcgggcagggttgggcacacagctggggcacatctgtaaaagcagtgcaagttctgagtctgttaacacttgggggggraaaaaaaaaacaaaacaagtctggtaaaatgctttgctctgttgtgcccttaaaccatgctattctagatcttagcactgaatttatattttttccacgctcttccagtttttggcactttttcctgcttgcttgttcatgtgatggcctaackgaatgaagctttgcrctacacagctgcatctggatgttcccayagcttacagtagagctgaagtgcctttagctaggccttcctaccctgtctgcctatttgctggtgtctcatcctcctggggcatgcctcaggctggtgacccagtgtcttctgctgaatctgtcattcgggcagtatctgaggcatccacactgatgcggaatgtttctttctctctgggagatgattgcttctcccattgtctcagcacagcagctcagaggactccagtcccagcctgccactcttcttcatgactcacctggagcccac

SEQ ID NO: 52342 - DNA, 600 bp, Chicken  19866894302807_4
gcggcagcccacacctgagcttctgcgggcagggttgggcacacagctggggcacatctgtaaaagcagtgcaagttctgagtctgttaacacttgggggggraaaaaaaaaacaaaacaagtctggtaaaatgctttgctctgttgtgcccttaaaccatgctattctagatcttagcactgaatttatattttttccacgctcttccagtttttggcactttttcctgcttgcttgttcatgtgatggcctaackgaatgaagctttgcrctacacagctgcatctggatgttcccayagcttacagtagagctgaagtgcctttagctaggccttcctaccctgtctgcctatttgctggtgtctcatcctcctggggcatgcctcaggctggtgacccagtgtcttctgctgaatctgtcattcgggcagtatctgaggcatccacactgatgcggaatgtttctttctctctgggagatgattgcttctcccattgtctcagcacagcagctcagaggactccagtcccagcctgccactcttcttcatgactcacctggagcccacggggagcttgagaccatcctctggacyc

SEQ ID NO: 52343 - DNA, 434 bp, Chicken  19866894302807_5
yagcttacagtagagctgaagtgcctttagctaggccttcctaccctgtctgcctatttgctggtgtctcatcctcctggggcatgcctcaggctggtgacccagtgtcttctgctgaatctgtcattcgggcagtatctgaggcatccacactgatgcggaatgtttctttctctctgggagatgattgcttctcccattgtctcagcacagcagctcagaggactccagtcccagcctgccactcttcttcatgactcacctggagcccacggggagcttgagaccatcctctggacycttcctggtcctggcacggcagcttagaggacaccagtcctagtcctgcccacttcctcaggacttgcccagaggccacagcgagcctgggatcatctcctggacccctgatgtcctgatgcagaagctcaggg

SEQ ID NO: 52344 - DNA, 600 bp, Chicken  19866894302815_1
tgacaaaatcaaacaagtggtgtttaatggcaggtgatttccagcaacagtatgggaaactctggtgtttgccacttgacttttgctttggatttgtggtcttggagcagaaagtcttattaatcggttcataaaacagtaggattaaaaaagaatgtaccgggggtgtaaaacagtcaacaccaagagattttaaaattagcttaataaataaaccataattggataaaataggtgagtaatgagttcagagcagcccaaatgtgcactttctggaggtcagtggcagcatggcagctygcgccacagctgggtgaagcctggagggcgcgtagcggggggctgcaatgttgcattaactgcactttgccgtcgaggtgtctcagttggtccctctcacagcagtgcttttaagcgatgcggaagaagctgagctaactcacaagatgcacgccaactgctgtttgcttctgattttatttcctcttgagatggggtaaaggaaatgtccctcgttacagcaagaagccaggaagggaggcaggtcctggtggctctgactttccgtgggtgtgtgtggggcacccactggcaagtggt

SEQ ID NO: 52345 - DNA, 600 bp, Chicken  19866894302823_1
caggatgagcatccagacaagcagaccctgatttctttctggacatgcatgtttctaaagctaattcttgaggtttcactagcaaaactgagggtttggaggagcaattggcagtattgtcatgaaagccctttgaagctatgagttatactcttacagttttatctcaatcttattttatttctttgctaattttcttgacttattctggtaaacatatgaagctgcattaggaacctgcctgcatagtgctgtctattccatcttcatgctatgaagtagtttcactttcaggagaargtgaagtcttctcctccctgccacagagaagttgtctctctgcaagtgtgtggagaggttgttgttcacctagtataactagtagcagtctttaaaggataataggttttgttaaatcaagcaggtttatgtggaagtatttgataattttctcagcttagtattttgtttaaattacttgaacctttgcaaattcatatcttgcctagtattctcaatggctgccttgatatttacttagcaatgatggggctgttttgttttgctctgttttgtttttcctcatttgctttattgctc

SEQ ID NO: 52346 - DNA, 600 bp, Chicken  19866894302829_1
gtaagatagaaggactaagatcttcagacatatataagccgttctgaaggaaaggaaaaaagatgaaccgctgacagcaacgcatttggtatctcattaatttgacagaatgtgtttcaatacgacatttgaaatactagaagaatacagaaatgctgttgaaatataaatccacagaagggttcgggctgtttttaatgattatatctttgctcatgaggtatctgctgaaaaaatgatacctctcctctgaagcatattttatagaatgaaggactacttttaggaccaccgacttgytccattccatcactttttttctctccaagttttctgtcctgctacttgagtattacccaggtgctgtgaagctaaacactatttcattcatactttaatgacaatgcacttaatctatctcagtgcctttccatatgctgcggtaaagaaagagttgcctgagtttgcctattcggtattttttatttctttctttttcttctccttattaatggtatgcctaagtatgattactgctccaaatccccccagatttactactttcttttataaggttgctcatctttatttttcccaaac

SEQ ID NO: 52347 - DNA, 431 bp, Chicken  19866894302829_2
attcggtattttttatttctttctttttcttctccttattaatggtatgcctaagtatgattactgctccaaatccccccagatttactactttcttttataaggttgctcatctttatttttcccaaacattctgactgcttcagttttgaaacgctttgtatctgaagtatctacaggaaatttaggagcaaatctgccttctgtgtaggaacaatgctttgtccatctattgtcagcaatagtgaacaacagtgaacaaaagaaggtgaagtctgcttttgtaccagcagaacagcrtatgcatacataactctgaaggagatttatctgaagaagaatgagttactgctttcataggcaagtatttaagaaatctttacagaaaaaaaaaaaggataggttagtctgcgagcaaattcctagtattt

SEQ ID NO: 52348 - DNA, 600 bp, Chicken  19866894302836_1
taattaagaaggctgatggagtgatgctgattccaaccgctataaatcctgtgttttatttaaacgttgactggtttatgtgagcttagcaagagcagcatttgcaccgcaatgctgatcgctgttggcaagcaggaatatcatcctgaaccggctttggcccacttaagatattcggatgccacccagaggaagaagcaggtacttgtagcagggctgtcctgatttatagcagctctctgtcctggaaagggtgctccagtagtaccagtggactattaggtaatgacagtgagcagmggaaacaggcagggcacgtagctgtgtgggcacataactacagggtgacatccaaggcccttatcatttccatgccatggagatgtatggtttgagtgctggagcagaagatagggaacagaaatctcagtgttcatcctgactcagctaagtgcagagcagggttggaccctgctccctcctcacagttacccaagtggtgagctcctgtctacacctggctcctgtcttcacaaatatattttgtgaaaatcttgctaaaaccatatctgcagaacttgctgggcttctttttttcta

SEQ ID NO: 52349 - DNA, 600 bp, Chicken  19866894302842_1
aacatacttcaggactgccagtgaagacaaccagagaaacagtggtatccaaagtgctctaaaaggaaacaatggggaaggtgtcttcagaagtgcgccactcaactaaaataaaacactaatgaagaaacacctgcagagggagcactggtatgaattttaatccttcctgacaggtgaagagaatgcactgtggccttcccagcttgggagagtgatataactagataaaacattggtagtaacagcagtgctccatctggctgccattttctgaaagagaaccttctgtgggccatratgaagtctactgtacaaccactttgtgtgctgtgtggtgcctgttatgcttctgtttgagaatacctgccaaatctgtctattcaaaggattaagacatatattttgtaattatgtcatgagaatcagacgctacacattgcctttgaaattgactttggaagtcttccagttggtgagtgggctcttcctgtggcctttagcaaactaccaagcagggtggacagtgtgtatagcaccagctcctaacctatgaattcatatccatctgtaaattgcacctacactcaaaaaatgaac

SEQ ID NO: 52350 - DNA, 600 bp, Chicken  19866894302856_1
tgagggtgctgtggtggtatcatcagtagctgacctgagggagggctgggcttgtactggcaagctgtaggtgatgcagaacacagggtccaatggaaactggattgtgttgggttttgctgtgcagggaagagatgaagagtccaaaacatcagaaaattcaaaacatcagaaatacctacacggatttcaatgataatacagatatgttacacaaggtttttcctactaatagtgcttttaatgaaaatttcttagtgcatgcactaatagcatctaataataataaattaataacawtttggattttaatagtagaatatgggcacctgatttatgatctgaaagtagctcawaacttttcactctggaacatctactgtccacccgtgccagaggctgagtggaatatatgtctttttggctgtttatccttgctggagtcgtgatagaacacaacaagcctcctaatacatttagcagcagccgtatggtatgatggaccaaggccatgtgtgctgtgaagtagaacaatttaaatgaaaaaatggtggaaaagttccaaccaaatatgtcacattttggtctgctgaggaggga

SEQ ID NO: 52351 - DNA, 600 bp, Chicken  19866894302856_2
ctggcaagctgtaggtgatgcagaacacagggtccaatggaaactggattgtgttgggttttgctgtgcagggaagagatgaagagtccaaaacatcagaaaattcaaaacatcagaaatacctacacggatttcaatgataatacagatatgttacacaaggtttttcctactaatagtgcttttaatgaaaatttcttagtgcatgcactaatagcatctaataataataaattaataacawtttggattttaatagtagaatatgggcacctgatttatgatctgaaagtagctcawaacttttcactctggaacatctactgtccacccgtgccagaggctgagtggaatatatgtctttttggctgtttatccttgctggagtcgtgatagaacacaacaagcctcctaatacatttagcagcagccgtatggtatgatggaccaaggccatgtgtgctgtgaagtagaacaatttaaatgaaaaaatggtggaaaagttccaaccaaatatgtcacattttggtctgctgaggagggatatatcctgaaatgacttatcaggcttttctatttgaatttgggatctctgtgctt

SEQ ID NO: 52352 - DNA, 599 bp, Chicken  19866894302857_1
  misc_feature (1)..(28): n is any nucleotide
nnnnnnnnnnnnnnnnnnnnnnnnnnnntgactgctgaagtcatatagtctagctgtcaaaccatcaacactgtgcccactaaaccctgtccctcaaggtaagagattgtatacaaaaatttaagaatacaaggtataaccactgcactggatttttgaggtgctagaaacaaacaaacaaacaacaaaaaaaactttttgcttgaaaataatggaacttgcggacttctgtttgagttatagcttcatggcagaaaggtgagctagtcttacagagaaccaaaaactgtatgggaagakctacctctgaagctgcaaaaacaagctagtaatagatgttctttcaagcactgtttccagattataatgctgcagtgttgtagcacactaataatagaatgtttttgaagttgtttatttcaaagttgcttaaaatgtatcttggggatttaggattggaaaatgaataagcycccaatctccagcataggacaaaaggtttattagaatattaaacatgttttttcttcatagttttcttaagtgtgagcagctgggtcttgcatttagcctgaagataaaagattggaaatcatgct

SEQ ID NO: 52353 - DNA, 600 bp, Chicken  19866894302857_2
acaaacaaacaacaaaaaaaactttttgcttgaaaataatggaacttgcggacttctgtttgagttatagcttcatggcagaaaggtgagctagtcttacagagaaccaaaaactgtatgggaagakctacctctgaagctgcaaaaacaagctagtaatagatgttctttcaagcactgtttccagattataatgctgcagtgttgtagcacactaataatagaatgtttttgaagttgtttatttcaaagttgcttaaaatgtatcttggggatttaggattggaaaatgaataagcycccaatctccagcataggacaaaaggtttattagaatattaaacatgttttttcttcatagttttcttaagtgtgagcagctgggtcttgcatttagcctgaagataaaagattggaaatcatgctattaaaaatatataatcaggttataaatttttatcactcactattgttaattaacctttaaacgctgatcatgtagagaaggcctgtggtttggtttctgtgggaacactttttagtagtaatgagcacctgaggattcttttctctcctagagtgaacatgacatttcagttc

SEQ ID NO: 52354 - DNA, 600 bp, Chicken  19866894302858_1
tttattccaaggacacacaatgtttttactctgtatgtttacttaacctgctatctagcaaatggtattgacttccatcatgccatatccaacatgcattaatatgatgtacaagaaatttggagtgtgctttttatatcatcctggcataatatattgaacatatgactaactgtaacatttgtgacacagactgctgaaataacatttgttgacatcccttctggagctaaacagccccaagtctctcagcctttcctcataacgaagatgctccaggcccctcatcatctttgtagycctttgctggattctccagtagttccctgcatttcttgaactgagaggtccagaactggacacagaactccagatgcggcctcatcaggacagagcagagggggaggatcacatcactcactgttcattcagctatcccacaattcctagtcttacctatgagaatgttatgggagacagtgtcaaaagccttgctgaactcaaagtgagcaacatccactgttctcccctcatctacccaaccagtgatgaccatcacagagggctaccagactggtcaagtgtgatttcctccttgtc

SEQ ID NO: 52355 - DNA, 600 bp, Chicken  19866894302859_1
agggttgctcagagccacatccagcctcaccttgaatgtctccatggacagggcatacaccaccttgctgggcaacctgttcctgtatctcaccacctttatcataaaaaaaatatctttgttatacccaattttaatctcctttcctttagtttaaaatcatttccccttgtactatcacagcagactctgctaaagaatctgtcctctttcctcttgtaggtcacctttagttaaagggagtcactgtcaggtcacccagagccttctcaaggctggacagccccagctctctcagcmtgtcctcataagagaggtattctatcccttggattatttttgtggccctcctctggatgcactccaacaggtcaacactgctcctcttctgaggacaccacatctggatctagtactccaggtgagttctcaccagaacagagtagaggggcaggattacctctctcttccttctgatcacactttttttgatacagccctgcatacagttggctttccagtctgagagggtatcttgctggctcatgtccatcttgccacccaccattacctccaagtccttttaggtagggctgtgct

SEQ ID NO: 52356 - DNA, 599 bp, Chicken  19866894302868_1
  misc_feature (1)..(107): n is any nucleotide
nnnnnnnnnnnnnnnnnnnnnnnnnnnnnnnnnnnnnnnnnnnnnnnnnnnnnnnnnnnnnnnnnnnnnnnnnnnnnnnnnnnnnnnnnnnnnnnnnnnnnnnnnnnaatgtctggtctgcaggtgagagaacacagtactgtaccatgacctatgaatgctaagagggatctgagtgattgagtatcttccgagtgatggaggagtgttggaacatgaacaagatgtttatattttcacttctgtagcagtggtgtacagcatttttcagagaggtggtgaaagccatactgaatgcayggacctctcaagtacagaaaaatttaagtygtaatgaatggctgacttttcctctgccattcatctaagtgtacatgtacttgtagatttccatgtttaaatgttcatctctgtttctttcgattttttatgttactgtagctctccttgggcttgaaggtaaaaaaaaaccatgagcctgaaatagtagcttgatgaaagactgaataacgaaagaaaagaaaaattaggttggaagttcaggtttagtcattttatttttaaattttataggttagagatgcatgtaggttttcatt

SEQ ID NO: 52357 - DNA, 599 bp, Chicken  19866894302868_2
  misc_feature (1)..(77): n is any nucleotide
nnnnnnnnnnnnnnnnnnnnnnnnnnnnnnnnnnnnnnnnnnnnnnnnnnnnnnnnnnnnnnnnnnnnnnnnnnnnnaatgtctggtctgcaggtgagagaacacagtactgtaccatgacctatgaatgctaagagggatctgagtgattgagtatcttccgagtgatggaggagtgttggaacatgaacaagatgtttatattttcacttctgtagcagtggtgtacagcatttttcagagaggtggtgaaagccatactgaatgcayggacctctcaagtacagaaaaatttaagtygtaatgaatggctgacttttcctctgccattcatctaagtgtacatgtacttgtagatttccatgtttaaatgttcatctctgtttctttcgattttttatgttactgtagctctccttgggcttgaaggtaaaaaaaaaccatgagcctgaaatagtagcttgatgaaagactgaataacgaaagaaaagaaaaattaggttggaagttcaggtttagtcattttatttttaaattttataggttagagatgcatgtaggttttcattggatcttggttttggacagttttcatctat

SEQ ID NO: 52358 - DNA, 599 bp, Chicken  19866894302875_1
  misc_feature (1)..(165): n is any nucleotide
nnnnnnnnnnnnnnnnnnnnnnnnnnnnnnnnnnnnnnnnnnnnnnnnnnnnnnnnnnnnnnnnnnnnnnnnnnnnnnnnnnnnnnnnnnnnnnnnnnnnnnnnnnnnnnnnnnnnnnnnnnnnnnnnnnnnnnnnnnnnnnnnnnnnnnnnnnnnnnnnnnnnncctcttttgcagaaattcccatcactgcaaaggggaaattatgtggggaaattaagtgggaaactgcagaagcagtacctctttctgaggggtacggaaggaccaaggggttcttctgttctgagttcctgttgygtccctgggggtcacttatttctcctcctagttgctctcctgctgggatctcctcacgtgtccaagccaattcaggcttggcgagggccacagatggaagtttccaggggaaatccaagtatctgcgatcagcctgcgtttcaaggcctctgagtcagtaaggaattcatcctgcactgtgtaaaccaacagtttttgctatcgtatttactggcagaaaggttctttatttcttcataaatacaggcatattcccgagggagatctgaacgtctcccgaggactgaaattcccactga

SEQ ID NO: 52359 - DNA, 600 bp, Chicken  19866894302878_1
aggggcacaagggattggcagggccaaatggatattccatgccatataacatctcatgaaaaaactacaaaactgagacgagatggccggggggacagcttctgcttggaaaccagctgggcattagttggtgggtggtgagcaattgcttgtgcatcactttgaatacttatctatctatctatctatctattgtaaatgttctttccctctttcttttctgtctgtgtaaataatttttatctcaacttgacttctacattttttttccagttctatcccctgtcccactgggggttyggaagcaagtgaacagctgtgtggtgttcagctgcttattgggttaaaccacaacataaaagaaaatacaagaaagataaggccaagatgacttaaagaattctatagacagaaatttgcagaaatttgaacacagaaattttgttgaaaagcatttatagaaagtgaaaacacacataaccaccagaatgtgtcttgagtcaaggcaggtctgaaattctaccctgaatttctcttcaaaattcatcatagcaagactatggatacatacactgtattattctagtacttaacagttat

SEQ ID NO: 52360 - DNA, 600 bp, Chicken  19866894302883_1
gctttaggcagaacttctgtgtgatgtatttatctgctcccttacattttttttattaattttaactcaacttggatgctgttttcacttttacatgtccagcatattttgtttcttgctgaactctaaaattgtatgacacaaaacaaacaaacaaaaaaacaaaaccttaagaggaaaattatatgcatattacactactgctctgttttgaggaaggacatacttatttccgagacacgggtcattagtttgttgatcacagaggggtccagtccatcctccttcacactcacaggwaaagcttgactggctggtagcatggcatgttccatgcacacaaactttcttgtgacaaggctcgcaacctggcagaattcccacttgcagtggcacatttctgaagtcctggagttcgctgttgatatacagattacggatgcagccatggaagcttgtgccattctgtcctggagactgacgtagagctgcaatgttatttttcacaggcatgcctaggaagttaataacagcaaataatcaatgtaatttttggtacagttttctataccatattccctgtttttaaagacgttttta

SEQ ID NO: 52361 - DNA, 599 bp, Chicken  19866894302885_1
  misc_feature (1)..(61): n is any nucleotide
nnnnnnnnnnnnnnnnnnnnnnnnnnnnnnnnnnnnnnnnnnnnnnnnnnnnnnnnnnnnnatctccctttttctactttttgttctttggtgtccagtggttatgtagctcgcccatactgcatggcttttctttgctgttggtgcaacctcttcttattgcctggattcaagctatgcagaggtgattactttggtaaagttcagcttgtcctcttcactcaggaagataatttcttttagcatttttggtaaatatgatcccaacagctcttctggagaagacaactctccaagaaygatgtgaattattactttctgacttcctcctcttccacrctctctttttgattcaagtgtgtgttaagcaggttgctgtagtgaaacatcccttggtgttaagagagcagatttttttccagctacaaaaccgctctttctgctgtttttcagtcctgatttcagatcatgtgctttgtagttcacaggtgactctggagaggtcacttttcagcagcaggagatcttgtcagatgtgcttgcgttagcccaggcagtcagcagctcggcacatgggagaggagggaatgccttggctg

SEQ ID NO: 52362 - DNA, 599 bp, Chicken  19866894302885_2
  misc_feature (1)..(22): n is any nucleotide
nnnnnnnnnnnnnnnnnnnnnnatctccctttttctactttttgttctttggtgtccagtggttatgtagctcgcccatactgcatggcttttctttgctgttggtgcaacctcttcttattgcctggattcaagctatgcagaggtgattactttggtaaagttcagcttgtcctcttcactcaggaagataatttcttttagcatttttggtaaatatgatcccaacagctcttctggagaagacaactctccaagaaygatgtgaattattactttctgacttcctcctcttccacrctctctttttgattcaagtgtgtgttaagcaggttgctgtagtgaaacatcccttggtgttaagagagcagatttttttccagctacaaaaccgctctttctgctgtttttcagtcctgatttcagatcatgtgctttgtagttcacaggtgactctggagaggtcacttttcagcagcaggagatcttgtcagatgtgcttgcgttagcccaggcagtcagcagctcggcacatgggagaggagggaatgccttggctgtcaaggtgtgatccgtgcaatggatgagcagtagtcttg

SEQ ID NO: 52363 - DNA, 600 bp, Chicken  19866894302889_1
gagcctggcggcccacacgttctcactcaaacagcagaggcaggttttttactgtcagatgctgtaacctcttatgaaatcctgcaacgccataggaaggctgggcagagccctgctgcacccacatctcctgttgcaagcatcactgaaatcacaaagtgatgttcggtgacctccaggtgcctctctgtgttcagcagttgagctctggcttctcacaccgctgcagcagaggggtttctcttttccttggtgatggaaaagtcagagcgtctgtcaggatgatggtttacgtcaggytctgccctgcgtgctctgaggagggttgtttggccctccaggctctatsctgctgctcacaggagttgtgttgttggcctgggtgggatgagacactcagagctgaccttaaaagtcttcagaaaacattaaggaactgcagtggagtgacagaggaggggagaaacagtggctgtgaaggggatgggtcaggctgtggtctgtgtgtggttycatgcataaagctgagccatcgatccacctctgcaacggggctgttccctttcataacacaccgtggccgtgttctcttcgtgcaga

SEQ ID NO: 52364 - DNA, 600 bp, Chicken  19866894302889_2
tactgtcagatgctgtaacctcttatgaaatcctgcaacgccataggaaggctgggcagagccctgctgcacccacatctcctgttgcaagcatcactgaaatcacaaagtgatgttcggtgacctccaggtgcctctctgtgttcagcagttgagctctggcttctcacaccgctgcagcagaggggtttctcttttccttggtgatggaaaagtcagagcgtctgtcaggatgatggtttacgtcaggytctgccctgcgtgctctgaggagggttgtttggccctccaggctctatsctgctgctcacaggagttgtgttgttggcctgggtgggatgagacactcagagctgaccttaaaagtcttcagaaaacattaaggaactgcagtggagtgacagaggaggggagaaacagtggctgtgaaggggatgggtcaggctgtggtctgtgtgtggttycatgcataaagctgagccatcgatccacctctgcaacggggctgttccctttcataacacaccgtggccgtgttctcttcgtgcagacatggcagtgccctctgctcctgcgtcctctcagtcaccagaacagaga

SEQ ID NO: 52365 - DNA, 600 bp, Chicken  19866894302889_3
tctcacaccgctgcagcagaggggtttctcttttccttggtgatggaaaagtcagagcgtctgtcaggatgatggtttacgtcaggytctgccctgcgtgctctgaggagggttgtttggccctccaggctctatsctgctgctcacaggagttgtgttgttggcctgggtgggatgagacactcagagctgaccttaaaagtcttcagaaaacattaaggaactgcagtggagtgacagaggaggggagaaacagtggctgtgaaggggatgggtcaggctgtggtctgtgtgtggttycatgcataaagctgagccatcgatccacctctgcaacggggctgttccctttcataacacaccgtggccgtgttctcttcgtgcagacatggcagtgccctctgctcctgcgtcctctcagtcaccagaacagagaattgaagagttgggtctctgttagtcataaatctgtatttctccattggtttcagttgaaattagtttggctgggccaacctgacattaaaataaccagtttggtgggcagtggagctaatgacacctactttcctatggatttctcttgtttcactcaaaata

SEQ ID NO: 52366 - DNA, 599 bp, Chicken  19866894302896_1
  misc_feature (1)..(4): n is any nucleotide
nnnnttgtagaaagctaggattttgtttctagtccaataaaagcaacttctgacatattgcacttacgctaacatttctttacatttcaattacatataataatggatgtttcttgcgtgcacttcctatgatttttatttttatttttttagcttacatctctgctgtgataaggcattgctcacaacacatccattctctatctgggcttcaaggatttgcacacttttattaagctgcacatacaggtctgacttgtgggtgttagaaaatgaaaggtaaaatgaaatggctgtggwgatcttagaacataatttctgctaaataattccccaaagaagttatgcagttactccaagtgaaaaattaacaagctayagtgctttgcattttaataatgcgtaggaaggtgaacccataccttttttttctgttctctcatgttttcatacttaagaattaaggaaataaatggcgtgaggtttatttaatacatttgttattgttcagttattattgcaagatactttgtctgaaactgtcatttttatgtacaagttgtagactctttgtatatgattagsatttgaacacaaaa

SEQ ID NO: 52367 - DNA, 600 bp, Chicken  19866894302896_2
ttacatttcaattacatataataatggatgtttcttgcgtgcacttcctatgatttttatttttatttttttagcttacatctctgctgtgataaggcattgctcacaacacatccattctctatctgggcttcaaggatttgcacacttttattaagctgcacatacaggtctgacttgtgggtgttagaaaatgaaaggtaaaatgaaatggctgtggwgatcttagaacataatttctgctaaataattccccaaagaagttatgcagttactccaagtgaaaaattaacaagctayagtgctttgcattttaataatgcgtaggaaggtgaacccataccttttttttctgttctctcatgttttcatacttaagaattaaggaaataaatggcgtgaggtttatttaatacatttgttattgttcagttattattgcaagatactttgtctgaaactgtcatttttatgtacaagttgtagactctttgtatatgattagsatttgaacacaaaattagaaacacctgttcagtaaatctgcttccatattattaattcacgtgtgcagcagcttgactctgaatagcaaaatgt

SEQ ID NO: 52368 - DNA, 600 bp, Chicken  19866894302896_3
tgaaatggctgtggwgatcttagaacataatttctgctaaataattccccaaagaagttatgcagttactccaagtgaaaaattaacaagctayagtgctttgcattttaataatgcgtaggaaggtgaacccataccttttttttctgttctctcatgttttcatacttaagaattaaggaaataaatggcgtgaggtttatttaatacatttgttattgttcagttattattgcaagatactttgtctgaaactgtcatttttatgtacaagttgtagactctttgtatatgattagsatttgaacacaaaattagaaacacctgttcagtaaatctgcttccatattattaattcacgtgtgcagcagcttgactctgaatagcaaaatgtattgggttctctgtgtaccacgatgtatgagcacaggtgatgatggtaggttactgctgctttttggtaggttggttggtttgtttttctttttaaacacaattgtacagtatagaataggttgattaatgggtttggtcaatgcaaatcagagcagtcgatcttttgttttccacctacagtttttctttaattctctttaaaat

SEQ ID NO: 52369 - DNA, 600 bp, Chicken  19866894302900_1
caaactgagctctctgtgctctctgcactcagcgtggctttcaggagcgaggtgctggtttcttagccatcaccgttgctgcacaagagactttttacctccattgggtttccaaatctggattttaaagtcagtgttagggaagacgtggagtttttagccttctggcatgtcaggtgggattttacaccgctctgagcaaaaactacaccctctgctccaactgggcaatgaggcagtgctgaatattcatgaagaaaagctaacagagggaaaagcaaatgaagcagattgatctgyactgaccccagcagtggtgcctacctgccctggttcaaaggagcagcgtgataaatgcattcaggtgaacagctgcctggctctggtgcgaatgaaccaccaacctgagcgtactctgcatgaagaggatgtctgagcagtgcatgcagaatgcactgtggctttgccaattacccgtgggatgcaaactgctgctgtccctccgaaggaacacggtgagggtctctcagctctgctcagacccaacccccgccaaacctgcaggtattctataggtttgataagtcagcctttgccaag

SEQ ID NO: 52370 - DNA, 600 bp, Chicken  19866894302908_1
gcgactaatggtttgggaaaagccttatgtcgacaaatgctcagaccagagagaaactaacaaacgtcctgaagaaggctttgtggagataatcttaatcctggagttcttcaaaactgagttatatgtacatttctactctcccttttgcatatgcatggctctgtagatggacataacacgcattcatggcattactcttcactgtcaaatatgtaatgctgaggatgggaaagaattcctcccctcttctttgaccccctctagaagcctttttaggggactcaaatatggcatgcygyatgagatkgattctgcaacagacccttgccataaactttccattggcattaagacctgaactgcccagaaaggagctgttgygagtcatggttcttcacctagtattatttgttgataaatagctaattaaagccataaacgcgcaacttctgattgacttataggtaatgccagctatctctcaggccccctttacagcctagaaatgagacagtccttaatactatgcttttcaaagtctttcctctaaaaagcctccctacgttcttgaatctttccccttcatttctggccaca

SEQ ID NO: 52371 - DNA, 600 bp, Chicken  19866894302908_2
gactaatggtttgggaaaagccttatgtcgacaaatgctcagaccagagagaaactaacaaacgtcctgaagaaggctttgtggagataatcttaatcctggagttcttcaaaactgagttatatgtacatttctactctcccttttgcatatgcatggctctgtagatggacataacacgcattcatggcattactcttcactgtcaaatatgtaatgctgaggatgggaaagaattcctcccctcttctttgaccccctctagaagcctttttaggggactcaaatatggcatgcygyatgagatkgattctgcaacagacccttgccataaactttccattggcattaagacctgaactgcccagaaaggagctgttgygagtcatggttcttcacctagtattatttgttgataaatagctaattaaagccataaacgcgcaacttctgattgacttataggtaatgccagctatctctcaggccccctttacagcctagaaatgagacagtccttaatactatgcttttcaaagtctttcctctaaaaagcctccctacgttcttgaatctttccccttcatttctggccacatc

SEQ ID NO: 52372 - DNA, 600 bp, Chicken  19866894302908_3
gtttgggaaaagccttatgtcgacaaatgctcagaccagagagaaactaacaaacgtcctgaagaaggctttgtggagataatcttaatcctggagttcttcaaaactgagttatatgtacatttctactctcccttttgcatatgcatggctctgtagatggacataacacgcattcatggcattactcttcactgtcaaatatgtaatgctgaggatgggaaagaattcctcccctcttctttgaccccctctagaagcctttttaggggactcaaatatggcatgcygyatgagatkgattctgcaacagacccttgccataaactttccattggcattaagacctgaactgcccagaaaggagctgttgygagtcatggttcttcacctagtattatttgttgataaatagctaattaaagccataaacgcgcaacttctgattgacttataggtaatgccagctatctctcaggccccctttacagcctagaaatgagacagtccttaatactatgcttttcaaagtctttcctctaaaaagcctccctacgttcttgaatctttccccttcatttctggccacatctccctttt

SEQ ID NO: 52373 - DNA, 600 bp, Chicken  19866894302908_4
ggagataatcttaatcctggagttcttcaaaactgagttatatgtacatttctactctcccttttgcatatgcatggctctgtagatggacataacacgcattcatggcattactcttcactgtcaaatatgtaatgctgaggatgggaaagaattcctcccctcttctttgaccccctctagaagcctttttaggggactcaaatatggcatgcygyatgagatkgattctgcaacagacccttgccataaactttccattggcattaagacctgaactgcccagaaaggagctgttgygagtcatggttcttcacctagtattatttgttgataaatagctaattaaagccataaacgcgcaacttctgattgacttataggtaatgccagctatctctcaggccccctttacagcctagaaatgagacagtccttaatactatgcttttcaaagtctttcctctaaaaagcctccctacgttcttgaatctttccccttcatttctggccacatctcccttttgatgtaaagtactagcaccaattgtcagaagataattctccttctctacaaatacagacactggctatttcagc

SEQ ID NO: 52374 - DNA, 600 bp, Chicken  19866894302909_1
aggagatgaaattgcaaatgctgctccttccaatatattttcagaaattatgaatttatgaataagggtaggaggccaaataatttaatctctctccctctccctctctctctggagtatattaacatgatagtttagtgctgatttaaaatgaagatgtcctttattaatggcttatccccaaacaacttactacaaataaagggcttaaccctagaaatttttacttaaggaagcagtttttaatcacaccaaaaatcttttttcactcactggggtaactaacatgagttaggatgycaggatcaagtcactcgrcacatgaaccagtgattaatgtaattgattacattttgatctgtattagttaaacattttacactgaagcagtcattcaaggaatcagatttgggtgacaaactcttggttcacaacaaaacttttcatttctggatggggctctaagcaacctgatgtagctgtaagtgttcctattcactgtgggggagttggaccagatgacctttaagggtcccttccaactcaaatgattctctgatctgcagctagatgaggagctcagagccccatccagcctga

SEQ ID NO: 52375 - DNA, 600 bp, Chicken  19866894302909_2
tgctgctccttccaatatattttcagaaattatgaatttatgaataagggtaggaggccaaataatttaatctctctccctctccctctctctctggagtatattaacatgatagtttagtgctgatttaaaatgaagatgtcctttattaatggcttatccccaaacaacttactacaaataaagggcttaaccctagaaatttttacttaaggaagcagtttttaatcacaccaaaaatcttttttcactcactggggtaactaacatgagttaggatgycaggatcaagtcactcgrcacatgaaccagtgattaatgtaattgattacattttgatctgtattagttaaacattttacactgaagcagtcattcaaggaatcagatttgggtgacaaactcttggttcacaacaaaacttttcatttctggatggggctctaagcaacctgatgtagctgtaagtgttcctattcactgtgggggagttggaccagatgacctttaagggtcccttccaactcaaatgattctctgatctgcagctagatgaggagctcagagccccatccagcctgaccttgaatgtctacaggg

SEQ ID NO: 52376 - DNA, 600 bp, Chicken  19866894302922_1
tgttcacttgagagatgtctgtttttcttgactttacgtatattagtggctcctctcttggtcttgagttaagtcttgggtgaagctcctccacatttaaaataaatctttccatttccttctacagcaacagctgtacgtgagctcagaggaaggggtcacacaggtccccttgcaccgctgccacatctatgggactgcctgtgctgactgttgcctcgcccgagacccgtactgcgcctgggatggcaactcctgctccaggttctatcccacagggaaaaggtgagcagccctgtraagtctgccaggaatgtaggaataaagcttttgctctgctatgtagcttggagacttgtaacgagatacagaagtggaatgtcattcctttcaggagcacatataaataggtacttggtattgttcatcatstgggactgtatgctagaagggttgccttttcatatttaaagcaacagatggggagaaaaaaaaaaaaacaccctattcataatcagaaatattaatctgatgtctcatgcacaaaaaaatcagtgaaacatttgttccctttgttaaaattcagttgctcactgtgga

SEQ ID NO: 52377 - DNA, 600 bp, Chicken  19866894302922_2
gctgtacgtgagctcagaggaaggggtcacacaggtccccttgcaccgctgccacatctatgggactgcctgtgctgactgttgcctcgcccgagacccgtactgcgcctgggatggcaactcctgctccaggttctatcccacagggaaaaggtgagcagccctgtraagtctgccaggaatgtaggaataaagcttttgctctgctatgtagcttggagacttgtaacgagatacagaagtggaatgtcattcctttcaggagcacatataaataggtacttggtattgttcatcatstgggactgtatgctagaagggttgccttttcatatttaaagcaacagatggggagaaaaaaaaaaaaacaccctattcataatcagaaatattaatctgatgtctcatgcacaaaaaaatcagtgaaacatttgttccctttgttaaaattcagttgctcactgtggataaaattaagatagccctaaatacagccagatatcactgaggttgcttgatgaataaagtcatttagtttttgttcctcacttgctccttaatgagaagaattatttctatggaaatttcaggcaaatgtga

SEQ ID NO: 52378 - DNA, 600 bp, Chicken  19866894302925_1
aaaaaaaaagaaagaaattacgtctggtagcttgtaatgtgttttacacgcaagcctgaaagaagtgtaaaagatcttatctgcattcagcaacaaaaagcacttgtttcacattttctctttcttgatctaaatagctgcccagtatttgacttgatagaacatggggctccatatagccaccctcagggcagtgtccattacacttgctaataattgttaaatatctttcatcaagctttgtttgaagacactgcttgtccaggagatcaagctgacggacatcatgagttactctgrttgtgtgacactcatgtagcacctcccactaatgcccatctcagctttaggtgagctaagagtcaaagttccattttctttcaaatggagtcaagagctttgcctccattcaggctctagggcagacaatggttcaccagggtatttcagttttactcaattcccaatcaaagctcttctctgcrcatgtcattgttgtgtaaaggcaaggcagatgaaagctattgtagtaagagctatggatgacctgacctaatttaggtagggctatgcaaaggtcaacatatcctcaaaagttgc

SEQ ID NO: 52379 - DNA, 600 bp, Chicken  19866894302925_2
tcagggcagtgtccattacacttgctaataattgttaaatatctttcatcaagctttgtttgaagacactgcttgtccaggagatcaagctgacggacatcatgagttactctgrttgtgtgacactcatgtagcacctcccactaatgcccatctcagctttaggtgagctaagagtcaaagttccattttctttcaaatggagtcaagagctttgcctccattcaggctctagggcagacaatggttcaccagggtatttcagttttactcaattcccaatcaaagctcttctctgcrcatgtcattgttgtgtaaaggcaaggcagatgaaagctattgtagtaagagctatggatgacctgacctaatttaggtagggctatgcaaaggtcaacatatcctcaaaagttgcttttatgagctaagtgtggtacaaccaaatgtgctcatttcaaacagcctgtcacaggcaatatttgctgcctgcttcccttcattgaaggtggctcttccagaaggggtgcttcrgatatccacagttcacacttcaagcagaagcacggcatgaattttactctctagatgtaaagttaggta

SEQ ID NO: 52380 - DNA, 600 bp, Chicken  19866894302925_3
ctagggcagacaatggttcaccagggtatttcagttttactcaattcccaatcaaagctcttctctgcrcatgtcattgttgtgtaaaggcaaggcagatgaaagctattgtagtaagagctatggatgacctgacctaatttaggtagggctatgcaaaggtcaacatatcctcaaaagttgcttttatgagctaagtgtggtacaaccaaatgtgctcatttcaaacagcctgtcacaggcaatatttgctgcctgcttcccttcattgaaggtggctcttccagaaggggtgcttcrgatatccacagttcacacttcaagcagaagcacggcatgaattttactctctagatgtaaagttaggtacaacatcagagcacaacctctgttctacatgaactgcatctcccagagtctttcctccattcctgaaggtatgctgtcccttcagtctcctcttcagtctctctgctctggggcttattaatcccattagaagtttaaagatctgacttaatgctcacctaatgctccaccactgtgctgtaggtgcttgatttcctgtgagctgcctcaggaggagcttatggctatttg

SEQ ID NO: 52381 - DNA, 591 bp, Chicken  19866894302928_1
agtcagcttcataattaatattcagacatggccttgagtgtcttgtaagtacttggatttctttctcctgtctgactttagctatgaagctacttaatcttcaaatagatacaaaacttgcacgctcttcaatttttttttttaagttaggtcttatctttttttcttttctgttgaacagatctttaaattgctgtcatttattgacgttctcatggcatacatttgtataacatccctaagccctgcagcaagagaatataatttaatctgcatagctaaatactcagcagtgaggasgagctataaygagaactatctgttaaaaaccttaacttgacactaaaggtggatgcatcattttacagctctcattacatgatcataaactacttttcaccagagaaccactgagtaatttaccactcgaggagatttcacttttgttgcaaagtgtctgactatgagcattacatcaggctgacttatttgctgcacaagtttcaaatggaggagtgtgggaggacaacctttctgactgcctgatcccagcccttgccactaactgcagctgaacttggtttctactgg

SEQ ID NO: 52382 - DNA, 581 bp, Chicken  19866894302928_2
ataattaatattcagacatggccttgagtgtcttgtaagtacttggatttctttctcctgtctgactttagctatgaagctacttaatcttcaaatagatacaaaacttgcacgctcttcaatttttttttttaagttaggtcttatctttttttcttttctgttgaacagatctttaaattgctgtcatttattgacgttctcatggcatacatttgtataacatccctaagccctgcagcaagagaatataatttaatctgcatagctaaatactcagcagtgaggasgagctataaygagaactatctgttaaaaaccttaacttgacactaaaggtggatgcatcattttacagctctcattacatgatcataaactacttttcaccagagaaccactgagtaatttaccactcgaggagatttcacttttgttgcaaagtgtctgactatgagcattacatcaggctgacttatttgctgcacaagtttcaaatggaggagtgtgggaggacaacctttctgactgcctgatcccagcccttgccactaactgcagctgaacttggtttctactgg

SEQ ID NO: 52383 - DNA, 599 bp, Chicken  19866894302930_1
  misc_feature (1)..(2): n is any nucleotide
nnattggcattcaccactcttgtcttctgcagaggtgtcagtttgaatttgcgtagctcccaggggtctgatacatctctcttccccccttccgtaagttgaagagagcctctctgcccgtttccagtttatcacaatcctctgccttgggactgacactgtaagatctattaatttctcattgctccaagtttaaactgaagaccctcctataacccactcataaccttcacaggagagtggagtatccttgccaattatctcagagatagctttataaactcattccctccaaatacrttttacagcgggaataactcacatgaaaaaaagattcaccttcctctcagcaatgtcactggagtcacggcacaytcagaaaaagaggaggcaccagcaggagtcgtatgaaatcacacacgcttcctccttgctccttcttttctctccgccatctctcccggctgtcagagctctcggtcacatctccagtaaaagcatccccatttctaagtcctcacgccctttgacatagtcgatttgctcttacctcccttaggaccaaaaataaatgggagacttcttcattatcttccaaa

SEQ ID NO: 52384 - DNA, 600 bp, Chicken  19866894302930_2
tctctcttccccccttccgtaagttgaagagagcctctctgcccgtttccagtttatcacaatcctctgccttgggactgacactgtaagatctattaatttctcattgctccaagtttaaactgaagaccctcctataacccactcataaccttcacaggagagtggagtatccttgccaattatctcagagatagctttataaactcattccctccaaatacrttttacagcgggaataactcacatgaaaaaaagattcaccttcctctcagcaatgtcactggagtcacggcacaytcagaaaaagaggaggcaccagcaggagtcgtatgaaatcacacacgcttcctccttgctccttcttttctctccgccatctctcccggctgtcagagctctcggtcacatctccagtaaaagcatccccatttctaagtcctcacgccctttgacatagtcgatttgctcttacctcccttaggaccaaaaataaatgggagacttcttcattatcttccaaatgagatgtgaaaccgaggtcctgaccactagtgatcattagaaaaatcccattggcacttcttgcaagagcaagac

SEQ ID NO: 52385 - DNA, 600 bp, Chicken  19866894302931_1
gacagtgcattctacttgcaaacacagggcaagggacttggccaacccaattgctaaatgactgtggggggagcagaggacaggggttggctgtcacagtgctggcagcagcatctttcagttgttcccccccacttccctgcaatgtccttcgctgaagagttcagatagggcttttgctgcagtgcatcaaagagagggtgacttgccagcaaaccacaaagagttccctcctctgcacttctcccgcacccacccagagcagaggagctgacacgtggtaattggaggctgaaggaytgcctyacccgtctgcgggtcccastctcacttgtaccacccctcctctaaactcctccaggtgcactcaaggatcctgctcagtttgaccctctgtgtgccatagcctcatttacacagcttctctgcagagcacctcttccctgagagatgctggttctaatagctccatgggcaagaaggcctcagagccaggatcatatcccagaacgcagcctgaggtccatcctctcatggctgcgaccccctgtcctaacccacaagcttgtccacggcccaggttaacccagagatgggttt

SEQ ID NO: 52386 - DNA, 600 bp, Chicken  19866894302931_2
gcattctacttgcaaacacagggcaagggacttggccaacccaattgctaaatgactgtggggggagcagaggacaggggttggctgtcacagtgctggcagcagcatctttcagttgttcccccccacttccctgcaatgtccttcgctgaagagttcagatagggcttttgctgcagtgcatcaaagagagggtgacttgccagcaaaccacaaagagttccctcctctgcacttctcccgcacccacccagagcagaggagctgacacgtggtaattggaggctgaaggaytgcctyacccgtctgcgggtcccastctcacttgtaccacccctcctctaaactcctccaggtgcactcaaggatcctgctcagtttgaccctctgtgtgccatagcctcatttacacagcttctctgcagagcacctcttccctgagagatgctggttctaatagctccatgggcaagaaggcctcagagccaggatcatatcccagaacgcagcctgaggtccatcctctcatggctgcgaccccctgtcctaacccacaagcttgtccacggcccaggttaacccagagatgggtttcagtgc

SEQ ID NO: 52387 - DNA, 600 bp, Chicken  19866894302931_3
agggcaagggacttggccaacccaattgctaaatgactgtggggggagcagaggacaggggttggctgtcacagtgctggcagcagcatctttcagttgttcccccccacttccctgcaatgtccttcgctgaagagttcagatagggcttttgctgcagtgcatcaaagagagggtgacttgccagcaaaccacaaagagttccctcctctgcacttctcccgcacccacccagagcagaggagctgacacgtggtaattggaggctgaaggaytgcctyacccgtctgcgggtcccastctcacttgtaccacccctcctctaaactcctccaggtgcactcaaggatcctgctcagtttgaccctctgtgtgccatagcctcatttacacagcttctctgcagagcacctcttccctgagagatgctggttctaatagctccatgggcaagaaggcctcagagccaggatcatatcccagaacgcagcctgaggtccatcctctcatggctgcgaccccctgtcctaacccacaagcttgtccacggcccaggttaacccagagatgggtttcagtgcacggtttcctcctgccttc

SEQ ID NO: 52388 - DNA, 600 bp, Chicken  19866894302934_1
tagcgagtagtcacatttatattgctgtgtcagcctcgtttcttatcatgtaaccagagatgggctggatgagcatggaaagcttttctgtacctctgcattcagggtcatttggaggtccgcagatggaacgggcgctttgccactgaactatttaccacaacaaatgccgtgatgttctgtgcatcgttcaaggagaaaatgatgctgctcaaaatggcaggggagcactgcaaaggaaggctgaatggcacaactgcagatgggcagccctgcctacctgcagcgcatgctgttacrgcaggttttggagagctttcccatggggcgctgccttcgtgtcccagtaaagcggtgcagggaggagagccgtctcattgcacctctgagcaacgagctctgaatcacagtttccatcagttgagctgatctccaaagagcagcggttttggaaaatgtgacccgtttcgttgctgtttaaacacaggcaccagaagtgtgcacacctctggtccgtgcagttcagtcgctggactgtcaccagtgtgagacatcacccagtgagagtcactggaaacccagctctccccgtgctgtctc

SEQ ID NO: 52389 - DNA, 600 bp, Chicken  19866894302935_1
tgttgtggaggggtccagattgtcattccagctgtgttagcatctagcactgggagtaggactagtagaaagagatgggcagatgggcagtagagtttctgagcttgtacccagggccttcctcaaatctgtgtggaaaattgtctctacactgatggtttatagtaggtctgactgtggaataaaaagaagccatgctttaaaattcaaggcagttaataatgaatacattactggaagaacaataatacaggatagtgtgtcgttttcttcttgtagccatttaaaaccaaaaaaaamcacagtcctagacaaatgagggatagaaagaaatggcacaaaccattgtcattaataccattcattaatagcaatctgaggggtgggcaacacatcctcccactggaacagaaaggaaaaatgctgttttgaaccacacaaatggttagtggcagaagctaasaggactttcctgagagctgttcatggtgtgaagacaccgctctttgaagctgatttttccatttggtgtatttatagttcgatcaaatattcttattgatttgaggatgtgctattttccttcgggaggggctaatg

SEQ ID NO: 52390 - DNA, 489 bp, Chicken  19866894302935_2
agtaggtctgactgtggaataaaaagaagccatgctttaaaattcaaggcagttaataatgaatacattactggaagaacaataatacaggatagtgtgtcgttttcttcttgtagccatttaaaaccaaaaaaaamcacagtcctagacaaatgagggatagaaagaaatggcacaaaccattgtcattaataccattcattaatagcaatctgaggggtgggcaacacatcctcccactggaacagaaaggaaaaatgctgttttgaaccacacaaatggttagtggcagaagctaasaggactttcctgagagctgttcatggtgtgaagacaccgctctttgaagctgatttttccatttggtgtatttatagttcgatcaaatattcttattgatttgaggatgtgctattttccttcgggaggggctaatgagagaaggtgtctagtaagccctccagaggtttgagctgcctgatgctgatt

SEQ ID NO: 52391 - DNA, 600 bp, Chicken  19866894302942_1
agcagcagcagttggcaacagcttgcctagtctaaatcctataaagcccagaaatgtatggatagttctatagttaactagtggatacataacaactgtttttgtcaaccatactaatatctatacattgatagtttaccagtgaggcaaaacacagacaaattcaatgagttcacccatggaaaggtatattctctcataacagcactatgaattaaattcagtacatttaagttagtcctttctgcctatgttattaattaacaatgaagtgcagaataaattctgtggaatagaaaractttctaatagaacatacactgcatatagggtacttttggaagcctgagttttgcaagtcttcaataattcattcagtgagtggagctttgtctttaattcaaatagaaatgtactaaaatgttttaggagcaaaggctagtattgtcaaacccaatggagatttactcgttttttgaattatgataccactcaaaagcctcagccaagcatcttactacattttgtcagggactatgcaaagaagaaaaaaggacactgttgacatgagcatacgtatgtgggaactagtactttctc

SEQ ID NO: 52392 - DNA, 599 bp, Chicken  19866894302949_1
  misc_feature (1)..(184): n is any nucleotide
nnnnnnnnnnnnnnnnnnnnnnnnnnnnnnnnnnnnnnnnnnnnnnnnnnnnnnnnnnnnnnnnnnnnnnnnnnnnnnnnnnnnnnnnnnnnnnnnnnnnnnnnnnnnnnnnnnnnnnnnnnnnnnnnnnnnnnnnnnnnnnnnnnnnnnnnnnnnnnnnnnnnnnnnnnnnnnnnnnnnnnnnatacactgacatacaacctatgtaggagatggagatacattaaattaacctggataagtcttaaagtaactaggatgagtcttctaatcgaactcatacgagcctttattgatcartcacaaactgagcacatagtttcatgcagatctatattcacccatccttatataagtctytttttttctttattttaattataagtcttcagaatagactacagtgctttactacagcctctcactatgagtttccatagttttaaaacaaattgcctggaaacacaaatacttaccactgagttgttccatgaagcatacattgccattggtgttaaaagccagagtgtcaggagtgatgcagagcgtctggaagattgcagaatgggcaatgctcttcagagaatggcaacactcca

SEQ ID NO: 52393 - DNA, 599 bp, Chicken  19866894302949_2
  misc_feature (1)..(124): n is any nucleotide
nnnnnnnnnnnnnnnnnnnnnnnnnnnnnnnnnnnnnnnnnnnnnnnnnnnnnnnnnnnnnnnnnnnnnnnnnnnnnnnnnnnnnnnnnnnnnnnnnnnnnnnnnnnnnnnnnnnnnnnnnnnnatacactgacatacaacctatgtaggagatggagatacattaaattaacctggataagtcttaaagtaactaggatgagtcttctaatcgaactcatacgagcctttattgatcartcacaaactgagcacatagtttcatgcagatctatattcacccatccttatataagtctytttttttctttattttaattataagtcttcagaatagactacagtgctttactacagcctctcactatgagtttccatagttttaaaacaaattgcctggaaacacaaatacttaccactgagttgttccatgaagcatacattgccattggtgttaaaagccagagtgtcaggagtgatgcagagcgtctggaagattgcagaatgggcaatgctcttcagagaatggcaacactccaggcaaattgcccaaatatcctgctcagtaagacagctatctcgcagtgacaaaatatcag

SEQ ID NO: 52394 - DNA, 600 bp, Chicken  19866894302958_1
aggaatttttgttttgaaacaatttaagaaaaaaatgaagggttcgtgaacaccatcactcttggaagtatttggaaaatgggaggtggaaagcagaaaggaaagacattaaacagtgttactagctgtgttgggtaaagaaaaaaggagcaggtggcatacaaagctggctttaagggcaaacttcacctagcatggacaacgtaacatccaaagagctgaagaccacaactctgaagccaaggaggcaactacatactacacttgagccggagtactatttgagttactcaactcttwgcaaagaaaacttacctgtttcataccctcagggcattctccctcctcccacagcactgtgagaagttgtctgttccagcatgtaaaacaagcagtatggaaaaggcaaaataaagtcaatgcacgtgccttattttcatagcattgtttaatatttcaaaagaactgtttgtcagttcagcttagatatttcttaccagagttaatgtaacttctatttcagagaaacattctagacaggggaatgcttcctggagagaaatgccctgtaggcttamgtgtcagatttctagtaaatct

SEQ ID NO: 52395 - DNA, 600 bp, Chicken  19866894302958_2
tatttgagttactcaactcttwgcaaagaaaacttacctgtttcataccctcagggcattctccctcctcccacagcactgtgagaagttgtctgttccagcatgtaaaacaagcagtatggaaaaggcaaaataaagtcaatgcacgtgccttattttcatagcattgtttaatatttcaaaagaactgtttgtcagttcagcttagatatttcttaccagagttaatgtaacttctatttcagagaaacattctagacaggggaatgcttcctggagagaaatgccctgtaggcttamgtgtcagatttctagtaaatctcagaagtgggctatcaagtttatcccagaactatggctttgggtacacaggaataaggtgatacatatcaatactcttgcgcagtttgttttattacatgaaggtcacataagagtgtatttgtctactttgtacacagttgtctagtcttacgcacagtggcttccaagttcttcctagttctggcaagcaccaataaattctgaaacagaatgtcaagtgctttaagtttaaatcagaaccttggtagatggatcttgcactcagttatcagggaa

SEQ ID NO: 52396 - DNA, 600 bp, Chicken  19866894302962_1
gtgaagcgaaaagctttgttagtaatatagaaacactttgcagcttatcatcagctctgggaagttcctctcagctccttgcttctcatttctacttcccttaaatttctgtttctttaccaaatcagaaagggtagcttgctgttttataagcacagaagctacataatgaaaggcgtgaaagtggcacctgtactgcagtcaaagcatctttgctaacgtagaatagacactaaagagcctctctactgatttgctacacttttctcccttcagcatagttagctgcttctagcttamtatatatatatatatatatataaaatatggttttctatgctatgtatataaacctagcttctaatgatggttctgagcagtgctttggtgttcttctgaggctgcctctgagcatctggtgctgatggacacaggcagcagtcactacagaatactaatgctgctgctggctcctccaatggcttctctgctgaaaaatgctttagaccattcagcgtccttacaccatgctgagcaacaggatggcagagatgccatgctcagggattttttttctccaattcagagcaagaagcctgc

SEQ ID NO: 52397 - DNA, 600 bp, Chicken  19866894302962_10
gcaatcaaggaaatcagtatgtttgacaccttcaaggaygttttttttctgtttatactcacaggtgaactttctgtggaagacatacaggacccattccttgtcagtgtacatattatcacagaccccggtgaatccaagactcttcagcaagcgatcgataagcttctggcctggatccatccagaactccagctgtttcgagtctcagaaagacgtgtgtccaagaagcacaggaagccagataaagctggtgtttcccagccagccctcgctgtcattctgttcctgcaggaggartatggagaagaacccatcttgcaactccatgaaacctttcagcggccgccttggcattaccaccacacagaacgagtgcatgggaagttcctcccttacatgccatgcagccaggacttttacactttggctccagagactcctctgtgggctattcgtccagtgcattatgggaaagaaatcatccgcttcacaatatactgcagaaatgaaaactttgttgatatcttgaagttttatgagttaatactgaaaagaccagtatgtcagaaaaaagcggacttctgtgtttttcctatc

SEQ ID NO: 52398 - DNA, 600 bp, Chicken  19866894302962_2
tgaagcgaaaagctttgttagtaatatagaaacactttgcagcttatcatcagctctgggaagttcctctcagctccttgcttctcatttctacttcccttaaatttctgtttctttaccaaatcagaaagggtagcttgctgttttataagcacagaagctacataatgaaaggcgtgaaagtggcacctgtactgcagtcaaagcatctttgctaacgtagaatagacactaaagagcctctctactgatttgctacacttttctcccttcagcatagttagctgcttctagcttaaratatatatatatatatatataaaatatggttttctatgctatgtatataaacctagcttctaatgatggttctgagcagtgctttggtgttcttctgaggctgcctctgagcatctggtgctgatggacacaggcagcagtcactacagaatactaatgctgctgctggctcctccaatggcttctctgctgaaaaatgctttagaccattcagcgtccttacaccatgctgagcaacaggatggcagagatgccatgctcagggattttttttctccaattcagagcaagaagcctgca

SEQ ID NO: 52399 - DNA, 600 bp, Chicken  19866894302962_3
ttcctgtattaaaagacaactaaaatatgctacttgtatagtgctggttttccattaaagcgattgctaaagtatcacaggaatgttgttctgatgccaggagggaggagggagagcttcatagagttgccagtgggaggggaggcagcctgtgagacaatccttctattaaacgtggtctgcacaatgaaaagcttgggaagcctttctaagccctcacacacttaggctttgtgcccaggcttgaggtctcagacatgtaggtagtttctgaataccacatagagggaaccgtttcascaaaaatatccagattacctggatgatttattgaactgtcytggatctttgtttgcatgcrtctctcttggcatgcaastccagcagagcagaagtggtaattccacccctgccctccgtccarccattgctgctgagctgtcagagaggtctcggggacagcagcacacgcagcccctttgaacactcccatggctaagtagggatttcttttttcccttgagtaagggtaactttttgtgcttcctgcttttaccactcttccctaatcttataaaaaccttgaagcagtagtattgt

SEQ ID NO: 52400 - DNA, 600 bp, Chicken  19866894302962_4
tgctggttttccattaaagcgattgctaaagtatcacaggaatgttgttctgatgccaggagggaggagggagagcttcatagagttgccagtgggaggggaggcagcctgtgagacaatccttctattaaacgtggtctgcacaatgaaaagcttgggaagcctttctaagccctcacacacttaggctttgtgcccaggcttgaggtctcagacatgtaggtagtttctgaataccacatagagggaaccgtttcascaaaaatatccagattacctggatgatttattgaactgtcytggatctttgtttgcatgcrtctctcttggcatgcaastccagcagagcagaagtggtaattccacccctgccctccgtccarccattgctgctgagctgtcagagaggtctcggggacagcagcacacgcagcccctttgaacactcccatggctaagtagggatttcttttttcccttgagtaagggtaactttttgtgcttcctgcttttaccactcttccctaatcttataaaaaccttgaagcagtagtattgttgttatgatggtctaaagatctaaacggtgcaggatttata

SEQ ID NO: 52401 - DNA, 600 bp, Chicken  19866894302962_5
gattgctaaagtatcacaggaatgttgttctgatgccaggagggaggagggagagcttcatagagttgccagtgggaggggaggcagcctgtgagacaatccttctattaaacgtggtctgcacaatgaaaagcttgggaagcctttctaagccctcacacacttaggctttgtgcccaggcttgaggtctcagacatgtaggtagtttctgaataccacatagagggaaccgtttcascaaaaatatccagattacctggatgatttattgaactgtcytggatctttgtttgcatgcrtctctcttggcatgcaastccagcagagcagaagtggtaattccacccctgccctccgtccarccattgctgctgagctgtcagagaggtctcggggacagcagcacacgcagcccctttgaacactcccatggctaagtagggatttcttttttcccttgagtaagggtaactttttgtgcttcctgcttttaccactcttccctaatcttataaaaaccttgaagcagtagtattgttgttatgatggtctaaagatctaaacggtgcaggatttatagggaggagtaatatcttttc

SEQ ID NO: 52402 - DNA, 600 bp, Chicken  19866894302962_6
ggaatgttgttctgatgccaggagggaggagggagagcttcatagagttgccagtgggaggggaggcagcctgtgagacaatccttctattaaacgtggtctgcacaatgaaaagcttgggaagcctttctaagccctcacacacttaggctttgtgcccaggcttgaggtctcagacatgtaggtagtttctgaataccacatagagggaaccgtttcascaaaaatatccagattacctggatgatttattgaactgtcytggatctttgtttgcatgcrtctctcttggcatgcaastccagcagagcagaagtggtaattccacccctgccctccgtccarccattgctgctgagctgtcagagaggtctcggggacagcagcacacgcagcccctttgaacactcccatggctaagtagggatttcttttttcccttgagtaagggtaactttttgtgcttcctgcttttaccactcttccctaatcttataaaaaccttgaagcagtagtattgttgttatgatggtctaaagatctaaacggtgcaggatttatagggaggagtaatatcttttcctgaagaagggcttgtgt

SEQ ID NO: 52403 - DNA, 600 bp, Chicken  19866894302962_7
agttgccagtgggaggggaggcagcctgtgagacaatccttctattaaacgtggtctgcacaatgaaaagcttgggaagcctttctaagccctcacacacttaggctttgtgcccaggcttgaggtctcagacatgtaggtagtttctgaataccacatagagggaaccgtttcascaaaaatatccagattacctggatgatttattgaactgtcytggatctttgtttgcatgcrtctctcttggcatgcaastccagcagagcagaagtggtaattccacccctgccctccgtccarccattgctgctgagctgtcagagaggtctcggggacagcagcacacgcagcccctttgaacactcccatggctaagtagggatttcttttttcccttgagtaagggtaactttttgtgcttcctgcttttaccactcttccctaatcttataaaaaccttgaagcagtagtattgttgttatgatggtctaaagatctaaacggtgcaggatttatagggaggagtaatatcttttcctgaagaagggcttgtgtgcctgaaggcttgtctgatttttttttccccaaatgtatcagttg

SEQ ID NO: 52404 - DNA, 600 bp, Chicken  19866894302962_8
ccaagtggtacaaattaaaacaaggtggggtgaacactatccaccccagttgttctgcacatcgttagtggtcctttcacccccatgctacgtcaatatttttgtctttcctatatcttagctctaaggggcagctcatttctaacgctgaaatgcactttgggaactgtgttttgtatgcttcctcagtagaaagagcaactgttgtggtatgcttaatgaaacttctctgtcttctggttattttctcaactgatatatgtctgcacattagtttattgtaagtgagcttgagggagrtgagaaaaaagcccagtgggactgagtagactgcttccctgtgaaggatcagctcaatgttgacagcaatcaaggaaatcagtatgtttgacaccttcaaggaygttttttttctgtttatactcacaggtgaactttctgtggaagacatacaggacccattccttgtcagtgtacatattatcacagaccccggtgaatccaagactcttcagcaagcgatcgataagcttctggcctggatccatccagaactccagctgtttcgagtctcagaaagacgtgtgtccaagaagcaca

SEQ ID NO: 52405 - DNA, 600 bp, Chicken  19866894302962_9
tctttcctatatcttagctctaaggggcagctcatttctaacgctgaaatgcactttgggaactgtgttttgtatgcttcctcagtagaaagagcaactgttgtggtatgcttaatgaaacttctctgtcttctggttattttctcaactgatatatgtctgcacattagtttattgtaagtgagcttgagggagrtgagaaaaaagcccagtgggactgagtagactgcttccctgtgaaggatcagctcaatgttgacagcaatcaaggaaatcagtatgtttgacaccttcaaggaygttttttttctgtttatactcacaggtgaactttctgtggaagacatacaggacccattccttgtcagtgtacatattatcacagaccccggtgaatccaagactcttcagcaagcgatcgataagcttctggcctggatccatccagaactccagctgtttcgagtctcagaaagacgtgtgtccaagaagcacaggaagccagataaagctggtgtttcccagccagccctcgctgtcattctgttcctgcaggaggartatggagaagaacccatcttgcaactccatgaaaccttt

SEQ ID NO: 52406 - DNA, 600 bp, Chicken  19866894302965_1
acgcgttttctcttcgcaaatcccccatttaagcgaaaataacatgtttcctctatgcaaatttcccatttaagtgaaaatcacgcgttttctcttcgcaaatcccccatttaagcgaaaatcacgcgttttctcttcggaaatcccccatttaagcaaaaatcacgcgttttctcttcgcaaatcccccatttaagcgaaaatcacacgttttctcttctcaaatcccccatttaagcgaaaatcacgcgttttctcttcgcaaatcccccattcaaacaaaaatcacatgttttctcktcgsaaatccccyatttaagcgaaaatcacgcgttttctctttgcaaatcccccatttaagcgaaaatcacgcgttttctcttcgagaatcccccatttaagcgaaaatcaggcgttttctcttcggaaatcccttatttaagcgaaaatcacgcgttttctcttcgagaatcccccatttaagcgaaaatcacgcgttttctcttcgagaatcccccatataacccgaaaatcacgcgttttctcttcacaaatcccccatttaagccacaaatcacgcgttttctctttgcaaatccc

SEQ ID NO: 52407 - DNA, 600 bp, Chicken  19866894302965_2
gttttctcttcgcaaatcccccatttaagcgaaaataacatgtttcctctatgcaaatttcccatttaagtgaaaatcacgcgttttctcttcgcaaatcccccatttaagcgaaaatcacgcgttttctcttcggaaatcccccatttaagcaaaaatcacgcgttttctcttcgcaaatcccccatttaagcgaaaatcacacgttttctcttctcaaatcccccatttaagcgaaaatcacgcgttttctcttcgcaaatcccccattcaaacaaaaatcacatgttttctcktcgsaaatccccyatttaagcgaaaatcacgcgttttctctttgcaaatcccccatttaagcgaaaatcacgcgttttctcttcgagaatcccccatttaagcgaaaatcaggcgttttctcttcggaaatcccttatttaagcgaaaatcacgcgttttctcttcgagaatcccccatttaagcgaaaatcacgcgttttctcttcgagaatcccccatataacccgaaaatcacgcgttttctcttcacaaatcccccatttaagccacaaatcacgcgttttctctttgcaaatcccccat

SEQ ID NO: 52408 - DNA, 600 bp, Chicken  19866894302965_3
tcgcaaatcccccatttaagcgaaaataacatgtttcctctatgcaaatttcccatttaagtgaaaatcacgcgttttctcttcgcaaatcccccatttaagcgaaaatcacgcgttttctcttcggaaatcccccatttaagcaaaaatcacgcgttttctcttcgcaaatcccccatttaagcgaaaatcacacgttttctcttctcaaatcccccatttaagcgaaaatcacgcgttttctcttcgcaaatcccccattcaaacaaaaatcacatgttttctcktcgsaaatccccyatttaagcgaaaatcacgcgttttctctttgcaaatcccccatttaagcgaaaatcacgcgttttctcttcgagaatcccccatttaagcgaaaatcaggcgttttctcttcggaaatcccttatttaagcgaaaatcacgcgttttctcttcgagaatcccccatttaagcgaaaatcacgcgttttctcttcgagaatcccccatataacccgaaaatcacgcgttttctcttcacaaatcccccatttaagccacaaatcacgcgttttctctttgcaaatcccccatttacgcgaa

SEQ ID NO: 52409 - DNA, 600 bp, Chicken  19866894302975_1
ctgggtctctacaaaagattttgccatcatatttccaattaagtagttacagattaatgaattgatcaatcaaccaattttaagacgcagaaatcaaagcaaaattccaaggatgcgagcagttgtgttatcagctttgaaccttacagagatgtcacctctctggagactgcactgtaaccggtcatacaaatgcttcacttgggagaggacagactttagaggacaaccattaagcaccttagtgaatccacaacagcagagaaggaggatgcttgtggcaacctttctaaaccttgrgggtggagtctctatcagaaacaaatagcacaggcagcttttactttttaagatccagcttctgtagacccatttgcatgtgaacaatcaatcaccctaatggtggagtgcaggtttttcatgcatacggtaattaaagagcaactaaacccacaaataggttacctaattaacaaattcaagcctgaaagttgtaacagaaaagtcaagttacctacagaaattttctttccaattgaggctgcagggctgccccatggcctcccctcagcctcctctgctctgggctatcacactgct

SEQ ID NO: 52410 - DNA, 599 bp, Chicken  19866894302978_1
  misc_feature (1)..(162): n is any nucleotide
nnnnnnnnnnnnnnnnnnnnnnnnnnnnnnnnnnnnnnnnnnnnnnnnnnnnnnnnnnnnnnnnnnnnnnnnnnnnnnnnnnnnnnnnnnnnnnnnnnnnnnnnnnnnnnnnnnnnnnnnnnnnnnnnnnnnnnnnnnnnnnnnnnnnnnnnnnnnnnnnnngagtacaaaatgccctgaggttgtcagacacagtgaaaaagaagttccagcttcatcctactgagctcatggtgccaggagccaagcactgccttccatgggtgctcactctcaaggagatctttgcatcactgccaygcacttgctgaacttcttttctgaggctgagatttctgcagcccctcttgaaatgtkcctaacgtccacccactcacacacagaaatcataaaacatcatcaggaatagtattttyagaacatgaaagtaatagaacatgaaagccatgattgccacaacagaagtccggcttcagctctaattaataatgcatgctgccccagacacttcttgctttctatatgtgayggcgatgtgcaagctggcttgatccaattcttaatgagcacaagatgctgttgtggcttttgttacctgt

SEQ ID NO: 52411 - DNA, 599 bp, Chicken  19866894302978_2
  misc_feature (1)..(105): n is any nucleotide
nnnnnnnnnnnnnnnnnnnnnnnnnnnnnnnnnnnnnnnnnnnnnnnnnnnnnnnnnnnnnnnnnnnnnnnnnnnnnnnnnnnnnnnnnnnnnnnnnnnnnnnnngagtacaaaatgccctgaggttgtcagacacagtgaaaaagaagttccagcttcatcctactgagctcatggtgccaggagccaagcactgccttccatgggtgctcactctcaaggagatctttgcatcactgccaygcacttgctgaacttcttttctgaggctgagatttctgcagcccctcttgaaatgtkcctaacgtccacccactcacacacagaaatcataaaacatcatcaggaatagtattttyagaacatgaaagtaatagaacatgaaagccatgattgccacaacagaagtccggcttcagctctaattaataatgcatgctgccccagacacttcttgctttctatatgtgayggcgatgtgcaagctggcttgatccaattcttaatgagcacaagatgctgttgtggcttttgttacctgttcttcattagttattagtaacaaaacactaaaatttattgggcaagactagctaatt

SEQ ID NO: 52412 - DNA, 599 bp, Chicken  19866894302978_3
  misc_feature (1)..(46): n is any nucleotide
nnnnnnnnnnnnnnnnnnnnnnnnnnnnnnnnnnnnnnnnnnnnnngagtacaaaatgccctgaggttgtcagacacagtgaaaaagaagttccagcttcatcctactgagctcatggtgccaggagccaagcactgccttccatgggtgctcactctcaaggagatctttgcatcactgccaygcacttgctgaacttcttttctgaggctgagatttctgcagcccctcttgaaatgtkcctaacgtccacccactcacacacagaaatcataaaacatcatcaggaatagtattttyagaacatgaaagtaatagaacatgaaagccatgattgccacaacagaagtccggcttcagctctaattaataatgcatgctgccccagacacttcttgctttctatatgtgayggcgatgtgcaagctggcttgatccaattcttaatgagcacaagatgctgttgtggcttttgttacctgttcttcattagttattagtaacaaaacactaaaatttattgggcaagactagctaattgaaggaacaaatatgaaaaaaacaggacattcctttatatacaaactataccaaaggct

SEQ ID NO: 52413 - DNA, 600 bp, Chicken  19866894302978_4
catggtgccaggagccaagcactgccttccatgggtgctcactctcaaggagatctttgcatcactgccaygcacttgctgaacttcttttctgaggctgagatttctgcagcccctcttgaaatgtkcctaacgtccacccactcacacacagaaatcataaaacatcatcaggaatagtattttyagaacatgaaagtaatagaacatgaaagccatgattgccacaacagaagtccggcttcagctctaattaataatgcatgctgccccagacacttcttgctttctatatgtgayggcgatgtgcaagctggcttgatccaattcttaatgagcacaagatgctgttgtggcttttgttacctgttcttcattagttattagtaacaaaacactaaaatttattgggcaagactagctaattgaaggaacaaatatgaaaaaaacaggacattcctttatatacaaactataccaaaggcttatttgcatttttattttgaaaacagagaatgaaattttagacacttttgtggtagaactgtttagaagacaaaaagaattattggaggattacacatcttcaaattctcttaa

SEQ ID NO: 52414 - DNA, 600 bp, Chicken  19866894302984_1
tgacttgttgcttccctatggaccaatgagacatcgctcaatccctggtggtgactatccctgctttgtaaactgctcgctaggatttctctctttactactgctagcttccccatcttccctgcgttctttagttcttagaatttgacataaaccattagagagcatttggcctcatttgtcatctcaatcttcaccagggtatatatatatgtcaaaccacatcctccaataataagagcgaaacacacgcttgtaaaaaaatctgcaccagtggaggtgacacactgcttcacagtygctatgatggtgtcattgctgggtaaatgttgcccacacagtccatctttcattagtctgaagacatggaagtcagaaggtgccaaatctagactacacagtgggtgtggcaggacagtccagtcaatgtgtcaatgtgctccacattcttcaaagagatatggagcccggtattatcatgttgcaaaagaaaagttgtcttcttctgtggactgactctggaagcttgaacattcagctgagtgagcatcacaatggagcagtcagagttgaggtttgtctgcgttacagggaatccag

SEQ ID NO: 52415 - DNA, 600 bp, Chicken  19866894302994_1
ggacactttatccatgcttccattttggtacaggagtctgcctggaatctataaatatgatctatttttggtactttttcctcttcctcacacttgtgaatctatctgctgctaagcactgaaggtgcatatgtaaagctggttagcaagttgatgagattgccagtggctgagaattaaataggaaagggctctctcaccccctccactttccatgcttagtgatatggcttggaagatgtgaacctgaactcctttggctataccagacactgagattaaaatgaaaatggcataccytttcctgagtgtctaggaattgctatygtattttctgtggacactggctgtggtagcatgatttgttatattagttcaaaatagcagctcctgaaatcccccttggcttgcatgtggttccctcctgtgctagggyttgggatggggctgcagttttaatgaagccaaactgcatgatctctgatgttaatttagaggagcacacacacacaggtgctggagatgagcagcttttgactatggcacatgtaatayccacaaatccaatcgcgatctgacatctgygtgcttttggtcagt

SEQ ID NO: 52416 - DNA, 600 bp, Chicken  19866894302994_2
gtacaggagtctgcctggaatctataaatatgatctatttttggtactttttcctcttcctcacacttgtgaatctatctgctgctaagcactgaaggtgcatatgtaaagctggttagcaagttgatgagattgccagtggctgagaattaaataggaaagggctctctcaccccctccactttccatgcttagtgatatggcttggaagatgtgaacctgaactcctttggctataccagacactgagattaaaatgaaaatggcataccytttcctgagtgtctaggaattgctatygtattttctgtggacactggctgtggtagcatgatttgttatattagttcaaaatagcagctcctgaaatcccccttggcttgcatgtggttccctcctgtgctagggyttgggatggggctgcagttttaatgaagccaaactgcatgatctctgatgttaatttagaggagcacacacacacaggtgctggagatgagcagcttttgactatggcacatgtaatayccacaaatccaatcgcgatctgacatctgygtgcttttggtcagtgatttaccactgtttggctggagtatg

SEQ ID NO: 52417 - DNA, 600 bp, Chicken  19866894302994_3
agctggttagcaagttgatgagattgccagtggctgagaattaaataggaaagggctctctcaccccctccactttccatgcttagtgatatggcttggaagatgtgaacctgaactcctttggctataccagacactgagattaaaatgaaaatggcataccytttcctgagtgtctaggaattgctatygtattttctgtggacactggctgtggtagcatgatttgttatattagttcaaaatagcagctcctgaaatcccccttggcttgcatgtggttccctcctgtgctagggyttgggatggggctgcagttttaatgaagccaaactgcatgatctctgatgttaatttagaggagcacacacacacaggtgctggagatgagcagcttttgactatggcacatgtaatayccacaaatccaatcgcgatctgacatctgygtgcttttggtcagtgatttaccactgtttggctggagtatgacctctctcctgccttgagtccctccaccagagcaacagatgcttgtctctttatgcccaggtgaaatcctggagtgacaaagcccagagtagtacygtacaaaagcca

SEQ ID NO: 52418 - DNA, 600 bp, Chicken  19866894302994_4
tttggctataccagacactgagattaaaatgaaaatggcataccytttcctgagtgtctaggaattgctatygtattttctgtggacactggctgtggtagcatgatttgttatattagttcaaaatagcagctcctgaaatcccccttggcttgcatgtggttccctcctgtgctagggyttgggatggggctgcagttttaatgaagccaaactgcatgatctctgatgttaatttagaggagcacacacacacaggtgctggagatgagcagcttttgactatggcacatgtaatayccacaaatccaatcgcgatctgacatctgygtgcttttggtcagtgatttaccactgtttggctggagtatgacctctctcctgccttgagtccctccaccagagcaacagatgcttgtctctttatgcccaggtgaaatcctggagtgacaaagcccagagtagtacygtacaaaagccatgcagcaaagctaatgaagaatgactgcagaggttaatgtggcagcaaaagggagaactgcaaggaggggtcagacttcaaaacactgaactttgccagggctttttctattcgtttaa

SEQ ID NO: 52419 - DNA, 600 bp, Chicken  19866894302994_5
gaaaatggcataccytttcctgagtgtctaggaattgctatygtattttctgtggacactggctgtggtagcatgatttgttatattagttcaaaatagcagctcctgaaatcccccttggcttgcatgtggttccctcctgtgctagggyttgggatggggctgcagttttaatgaagccaaactgcatgatctctgatgttaatttagaggagcacacacacacaggtgctggagatgagcagcttttgactatggcacatgtaatayccacaaatccaatcgcgatctgacatctgygtgcttttggtcagtgatttaccactgtttggctggagtatgacctctctcctgccttgagtccctccaccagagcaacagatgcttgtctctttatgcccaggtgaaatcctggagtgacaaagcccagagtagtacygtacaaaagccatgcagcaaagctaatgaagaatgactgcagaggttaatgtggcagcaaaagggagaactgcaaggaggggtcagacttcaaaacactgaactttgccagggctttttctattcgtttaaagagcttcatccaaaatctggacaaagaaa

SEQ ID NO: 52420 - DNA, 600 bp, Chicken  19866894302994_6
ctgtgctagggyttgggatggggctgcagttttaatgaagccaaactgcatgatctctgatgttaatttagaggagcacacacacacaggtgctggagatgagcagcttttgactatggcacatgtaatayccacaaatccaatcgcgatctgacatctgygtgcttttggtcagtgatttaccactgtttggctggagtatgacctctctcctgccttgagtccctccaccagagcaacagatgcttgtctctttatgcccaggtgaaatcctggagtgacaaagcccagagtagtacygtacaaaagccatgcagcaaagctaatgaagaatgactgcagaggttaatgtggcagcaaaagggagaactgcaaggaggggtcagacttcaaaacactgaactttgccagggctttttctattcgtttaaagagcttcatccaaaatctggacaaagaaaggccgacccagaggttcagacagtccctgacttcatggtctgcaatgaaagctgggttgctggagctgaagctgagcaaagctttaaaggtgaccccactgcagtctcacaatgcctggattttcaggagcttatacaa

SEQ ID NO: 52421 - DNA, 600 bp, Chicken  19866894302997_1
gaatcactatataaataatcactccttttccctaacatgtgagaagatggagaaccataatgacttgtgctaatgtggacttggcagtaagacctcaaaacacctgagagcttctcagtacaagaaggcaatagtgcagtactttaggagaacggctgaaaaagtaagctctgactggaaatgagctcctaggcctcttgaaatatttccattgctgctgaaacatctctgtaagagagatgggtatttttatcctccacttgattcatgtcagagccttgctggaaagcagaacacagyacagctgttatgaagaggcttgagttcatgctgatttgaaacatttggcgttcatggaggtgagcagtgctgagcaagcatggccttgatggtaccgtctgccagggctgccctccacctctcagcagcagacccaaggcagcttttgggtaaacaacgtgtcctatctttgagagcattactgtgtcatgtttctatctgaatagaaacaagatcttgctgaaaaacattttctgaacttgtgtcaatggcagaaccatggaactttaaggcagttaaaatcaaaaaacctctgaacaa

SEQ ID NO: 52422 - DNA, 600 bp, Chicken  19866894303000_1
accgaaccaacagcgcccgcggttcggagccaatgcccgcgcgaccgcgcccttctcccgctcctgcgcccgggactgacccggtccctccacccgcaccgaatcccgccgcccgcccgcccaacccgctcccggcccgcctcgcctcaccaccacggcggtgacgggctgtcccggcacgtacgacatggccccacacagccgcccgtcgcggccgccgcccgaacaaaagcgcttcagccggccccgcccccttctgccctcagccaatcagacgccgcctcgccctccgcctcgcasctcgcgccggaagtgagccggctttcccggcgctcctcgcgccaagatggctgacaggagcttccggcggggaggcgcgcggtgccgccgcgggggtaagttgggcccgcaggcggtctcgtctctcccagccgtgctaccggggccggcctgtggtgacgggtgccgtgtgctgtcccctggcagggtgcgaagcgtgacggtcgggtccggccgagggctctgcggagcagcgtgcggccgtggatgagaggtacgggccggggcgggcgggcgagcgggcggtgccggggggacccg

SEQ ID NO: 52423 - DNA, 600 bp, Chicken  19866894303000_2
ggggaggcgcgcggtgccgccgcgggggtaagttgggcccgcaggcggtctcgtctctcccagccgtgctaccggggccggcctgtggtgacgggtgccgtgtgctgtcccctggcagggtgcgaagcgtgacggtcgggtccggccgagggctctgcggagcagcgtgcggccgtggatgagaggtacgggccggggcgggcgggcgagcgggcggtgccggggggacccgcgggaggcgccgcttcggcaggcccctgggtggcgacgggccgagcacagcgcgtgtctgctctcccycagcccagctgggagccaggaggtccccgagcccgcctgagagccatggccgcggtggtggccaagcgcgaggggccgcagttcatcagtgaggcggccgtgcgcggraacgcggccatcctggactactgccggacgtcggtgtcggccctgtcgggcgccacggcggggatcctcgggctgacgggcctgcacggcttcatcttctacttcctggcgtccgtcctcctctccttgctcctggtgctgaaagccgggcggcgatggaataagtactttaaatcccggaggccgcttttc

SEQ ID NO: 52424 - DNA, 600 bp, Chicken  19866894303000_3
cccctggcagggtgcgaagcgtgacggtcgggtccggccgagggctctgcggagcagcgtgcggccgtggatgagaggtacgggccggggcgggcgggcgagcgggcggtgccggggggacccgcgggaggcgccgcttcggcaggcccctgggtggcgacgggccgagcacagcgcgtgtctgctctcccycagcccagctgggagccaggaggtccccgagcccgcctgagagccatggccgcggtggtggccaagcgcgaggggccgcagttcatcagtgaggcggccgtgcgcggraacgcggccatcctggactactgccggacgtcggtgtcggccctgtcgggcgccacggcggggatcctcgggctgacgggcctgcacggcttcatcttctacttcctggcgtccgtcctcctctccttgctcctggtgctgaaagccgggcggcgatggaataagtactttaaatcccggaggccgcttttcacgggagggctcataggagggctcttcacctacgtcctgttctggactttcctgtatggcatggttcacgtctactgaaacaacggctgtggtagccacggtggtttt

SEQ ID NO: 52425 - DNA, 600 bp, Chicken  19866894303000_4
gccacggcggggatcctcgggctgacgggcctgcacggcttcatcttctacttcctggcgtccgtcctcctctccttgctcctggtgctgaaagccgggcggcgatggaataagtactttaaatcccggaggccgcttttcacgggagggctcataggagggctcttcacctacgtcctgttctggactttcctgtatggcatggttcacgtctactgaaacaacggctgtggtagccacggtggtttttaatgaagcaggaggactgttgccaaacgtcacccacacaactaggccagmttaccttttaaacttgttcattgcttgtatccttagtactgtcagtaaattatgtccgagtacaaatgaatcggtagtactgttctaattaaactgaatgtgaaaccacttggatgcctcccatgaatgtttgtttggtggcagaggaatgacttattgtccttaactgcagtcacagctgcaggttttgcccaccttcgttccttgcatcctgtgcgttgtgggtaagaaataccaattactgctgttgctgcctgcccctacatgcaaatagagcactataaaaataagccactgaca

SEQ ID NO: 52426 - DNA, 600 bp, Chicken  19866894303010_1
accccttctaggggctctcatcacttatggatttgtttccccacctgctcctatgatgatttctttcagcaccctccctacatcttctaacctgctttggcaaaccacatgcttttttctgctgtcacaaccttctctgactgtatagatgagatgtgtcttggtatcactgcagctctgattctgttttctgctttcacccctgcctgcaggccctcttgtcctcaaatctcttccaaacctctgcacataatccttgcttatcttaaaactcttcatcctggatgtctttgaaatctmttcttcccattatgtctaaaaacatgacagagggacatgatgacactgcrcatccccaagcaccgtacccaaggaagtcggtttytcagctctccctttatgtcagtcctgcagcccttcaaggattgrcttccaytccaattttgccactaaattagtgaaaaaaagtagagtgcagatggcaaagctgmccatacctgtttgatgctcccatctaaactgcctgcagagctcygtgacgtaagaaacctgttgtctctatggactgtgccttgattcatcctcaaagcctcttcaaat

SEQ ID NO: 52427 - DNA, 466 bp, Chicken  19866894303010_10
cttgaagaagaaatagcacaggaaagaggtaactacacatatctgagggaaatcagtctctgagggggcaagctgggctatgagaaccttgtgaagtgctctgggcaatatccaatgctytctggaggcttcaaaggggatttaatcctgagtctatcaattctggataagggtcaggttcccacaaacactaatccacarcaggtgtgtatccaaagggtgagttccagtcattcattactaggttaactactgggtgaagaagcacttgtgcaggtctgtatgagctggactcacaakcagcccaggagcactcacaccatgacctgctgaatggaagtaggggctcacatcccccctaaaccatccatctgacttatcctgatccaaactgtgtgtcccaatgagctaactcacatcttatccctagttttgctgaggggaggtgcttattgaccaaaactct

SEQ ID NO: 52428 - DNA, 600 bp, Chicken  19866894303010_2
ctatgatgatttctttcagcaccctccctacatcttctaacctgctttggcaaaccacatgcttttttctgctgtcacaaccttctctgactgtatagatgagatgtgtcttggtatcactgcagctctgattctgttttctgctttcacccctgcctgcaggccctcttgtcctcaaatctcttccaaacctctgcacataatccttgcttatcttaaaactcttcatcctggatgtctttgaaatctmttcttcccattatgtctaaaaacatgacagagggacatgatgacactgcrcatccccaagcaccgtacccaaggaagtcggtttytcagctctccctttatgtcagtcctgcagcccttcaaggattgrcttccaytccaattttgccactaaattagtgaaaaaaagtagagtgcagatggcaaagctgmccatacctgtttgatgctcccatctaaactgcctgcagagctcygtgacgtaagaaacctgttgtctctatggactgtgccttgattcatcctcaaagcctcttcaaatgtgctgtcatgctgctccctggtagtcaggatatcttgctttagctgggc

SEQ ID NO: 52429 - DNA, 600 bp, Chicken  19866894303010_3
tctaacctgctttggcaaaccacatgcttttttctgctgtcacaaccttctctgactgtatagatgagatgtgtcttggtatcactgcagctctgattctgttttctgctttcacccctgcctgcaggccctcttgtcctcaaatctcttccaaacctctgcacataatccttgcttatcttaaaactcttcatcctggatgtctttgaaatctmttcttcccattatgtctaaaaacatgacagagggacatgatgacactgcrcatccccaagcaccgtacccaaggaagtcggtttytcagctctccctttatgtcagtcctgcagcccttcaaggattgrcttccaytccaattttgccactaaattagtgaaaaaaagtagagtgcagatggcaaagctgmccatacctgtttgatgctcccatctaaactgcctgcagagctcygtgacgtaagaaacctgttgtctctatggactgtgccttgattcatcctcaaagcctcttcaaatgtgctgtcatgctgctccctggtagtcaggatatcttgctttagctgggcaatttcttccagcagcgactgtttttcttcattgc

SEQ ID NO: 52430 - DNA, 600 bp, Chicken  19866894303010_4
accttctctgactgtatagatgagatgtgtcttggtatcactgcagctctgattctgttttctgctttcacccctgcctgcaggccctcttgtcctcaaatctcttccaaacctctgcacataatccttgcttatcttaaaactcttcatcctggatgtctttgaaatctmttcttcccattatgtctaaaaacatgacagagggacatgatgacactgcrcatccccaagcaccgtacccaaggaagtcggtttytcagctctccctttatgtcagtcctgcagcccttcaaggattgrcttccaytccaattttgccactaaattagtgaaaaaaagtagagtgcagatggcaaagctgmccatacctgtttgatgctcccatctaaactgcctgcagagctcygtgacgtaagaaacctgttgtctctatggactgtgccttgattcatcctcaaagcctcttcaaatgtgctgtcatgctgctccctggtagtcaggatatcttgctttagctgggcaatttcttccagcagcgactgtttttcttcattgctctccttcagctgcttttctagctcctccctcttcttgttgctt

SEQ ID NO: 52431 - DNA, 600 bp, Chicken  19866894303010_5
ctgactgtatagatgagatgtgtcttggtatcactgcagctctgattctgttttctgctttcacccctgcctgcaggccctcttgtcctcaaatctcttccaaacctctgcacataatccttgcttatcttaaaactcttcatcctggatgtctttgaaatctmttcttcccattatgtctaaaaacatgacagagggacatgatgacactgcrcatccccaagcaccgtacccaaggaagtcggtttytcagctctccctttatgtcagtcctgcagcccttcaaggattgrcttccaytccaattttgccactaaattagtgaaaaaaagtagagtgcagatggcaaagctgmccatacctgtttgatgctcccatctaaactgcctgcagagctcygtgacgtaagaaacctgttgtctctatggactgtgccttgattcatcctcaaagcctcttcaaatgtgctgtcatgctgctccctggtagtcaggatatcttgctttagctgggcaatttcttccagcagcgactgtttttcttcattgctctccttcagctgcttttctagctcctccctcttcttgttgctttcaagta

SEQ ID NO: 52432 - DNA, 600 bp, Chicken  19866894303010_6
tgctttcacccctgcctgcaggccctcttgtcctcaaatctcttccaaacctctgcacataatccttgcttatcttaaaactcttcatcctggatgtctttgaaatctmttcttcccattatgtctaaaaacatgacagagggacatgatgacactgcrcatccccaagcaccgtacccaaggaagtcggtttytcagctctccctttatgtcagtcctgcagcccttcaaggattgrcttccaytccaattttgccactaaattagtgaaaaaaagtagagtgcagatggcaaagctgmccatacctgtttgatgctcccatctaaactgcctgcagagctcygtgacgtaagaaacctgttgtctctatggactgtgccttgattcatcctcaaagcctcttcaaatgtgctgtcatgctgctccctggtagtcaggatatcttgctttagctgggcaatttcttccagcagcgactgtttttcttcattgctctccttcagctgcttttctagctcctccctcttcttgttgctttcaagtaattcagaacttgaagaagaaatagcacaggaaagaggtaactacacatatctgag

SEQ ID NO: 52433 - DNA, 600 bp, Chicken  19866894303010_7
ccaaacctctgcacataatccttgcttatcttaaaactcttcatcctggatgtctttgaaatctmttcttcccattatgtctaaaaacatgacagagggacatgatgacactgcrcatccccaagcaccgtacccaaggaagtcggtttytcagctctccctttatgtcagtcctgcagcccttcaaggattgrcttccaytccaattttgccactaaattagtgaaaaaaagtagagtgcagatggcaaagctgmccatacctgtttgatgctcccatctaaactgcctgcagagctcygtgacgtaagaaacctgttgtctctatggactgtgccttgattcatcctcaaagcctcttcaaatgtgctgtcatgctgctccctggtagtcaggatatcttgctttagctgggcaatttcttccagcagcgactgtttttcttcattgctctccttcagctgcttttctagctcctccctcttcttgttgctttcaagtaattcagaacttgaagaagaaatagcacaggaaagaggtaactacacatatctgagggaaatcagtctctgagggggcaagctgggctatgagaaccttg

SEQ ID NO: 52434 - DNA, 600 bp, Chicken  19866894303010_8
actgtgccttgattcatcctcaaagcctcttcaaatgtgctgtcatgctgctccctggtagtcaggatatcttgctttagctgggcaatttcttccagcagcgactgtttttcttcattgctctccttcagctgcttttctagctcctccctcttcttgttgctttcaagtaattcagaacttgaagaagaaatagcacaggaaagaggtaactacacatatctgagggaaatcagtctctgagggggcaagctgggctatgagaaccttgtgaagtgctctgggcaatatccaatgctytctggaggcttcaaaggggatttaatcctgagtctatcaattctggataagggtcaggttcccacaaacactaatccacarcaggtgtgtatccaaagggtgagttccagtcattcattactaggttaactactgggtgaagaagcacttgtgcaggtctgtatgagctggactcacaakcagcccaggagcactcacaccatgacctgctgaatggaagtaggggctcacatcccccctaaaccatccatctgacttatcctgatccaaactgtgtgtcccaatgagctaactcacatc

SEQ ID NO: 52435 - DNA, 565 bp, Chicken  19866894303010_9
tgggcaatttcttccagcagcgactgtttttcttcattgctctccttcagctgcttttctagctcctccctcttcttgttgctttcaagtaattcagaacttgaagaagaaatagcacaggaaagaggtaactacacatatctgagggaaatcagtctctgagggggcaagctgggctatgagaaccttgtgaagtgctctgggcaatatccaatgctytctggaggcttcaaaggggatttaatcctgagtctatcaattctggataagggtcaggttcccacaaacactaatccacarcaggtgtgtatccaaagggtgagttccagtcattcattactaggttaactactgggtgaagaagcacttgtgcaggtctgtatgagctggactcacaakcagcccaggagcactcacaccatgacctgctgaatggaagtaggggctcacatcccccctaaaccatccatctgacttatcctgatccaaactgtgtgtcccaatgagctaactcacatcttatccctagttttgctgaggggaggtgcttattgaccaaaactct

SEQ ID NO: 52436 - DNA, 599 bp, Chicken  19866894303017_1
  misc_feature (1)..(228): n is any nucleotide
nnnnnnnnnnnnnnnnnnnnnnnnnnnnnnnnnnnnnnnnnnnnnnnnnnnnnnnnnnnnnnnnnnnnnnnnnnnnnnnnnnnnnnnnnnnnnnnnnnnnnnnnnnnnnnnnnnnnnnnnnnnnnnnnnnnnnnnnnnnnnnnnnnnnnnnnnnnnnnnnnnnnnnnnnnnnnnnnnnnnnnnnnnnnnnnnnnnnnnnnnnnnnnnnnnnnnnnnnnnnnnnnnnnnagacagttgtcaatgtcacggatgtgttataatggtgcaaaactacaaggaagacagagaaatcagcagaaygtttaagctatttttataaaggacccagtgccctcgattatgtttaaaaagtcatacaaaagaaaamgtcacttctttttcttccctacatgcaggataaataaagaaatataaaatgtaggtctttctatcaataaatatcaacttgggtttgtattttcagataaagttcagtaagtgtatgcaaatgtgtatgaawggaagttttccttcacagcagaacatttacccagagaatcaycaccagaactttgtgagaagcaggcctttctgtgctgcagggaaaaaaagccctgacc

SEQ ID NO: 52437 - DNA, 599 bp, Chicken  19866894303017_2
  misc_feature (1)..(161): n is any nucleotide
nnnnnnnnnnnnnnnnnnnnnnnnnnnnnnnnnnnnnnnnnnnnnnnnnnnnnnnnnnnnnnnnnnnnnnnnnnnnnnnnnnnnnnnnnnnnnnnnnnnnnnnnnnnnnnnnnnnnnnnnnnnnnnnnnnnnnnnnnnnnnnnnnnnnnnnnnnnnnnnnnagacagttgtcaatgtcacggatgtgttataatggtgcaaaactacaaggaagacagagaaatcagcagaaygtttaagctatttttataaaggacccagtgccctcgattatgtttaaaaagtcatacaaaagaaaamgtcacttctttttcttccctacatgcaggataaataaagaaatataaaatgtaggtctttctatcaataaatatcaacttgggtttgtattttcagataaagttcagtaagtgtatgcaaatgtgtatgaawggaagttttccttcacagcagaacatttacccagagaatcaycaccagaactttgtgagaagcaggcctttctgtgctgcagggaaaaaaagccctgacctggcccagtcaacatcacccctgcttcctgctgaaggaagcagagagaactcagcagtgctkcccca

SEQ ID NO: 52438 - DNA, 599 bp, Chicken  19866894303017_3
  misc_feature (1)..(29): n is any nucleotide
nnnnnnnnnnnnnnnnnnnnnnnnnnnnnagacagttgtcaatgtcacggatgtgttataatggtgcaaaactacaaggaagacagagaaatcagcagaaygtttaagctatttttataaaggacccagtgccctcgattatgtttaaaaagtcatacaaaagaaaamgtcacttctttttcttccctacatgcaggataaataaagaaatataaaatgtaggtctttctatcaataaatatcaacttgggtttgtattttcagataaagttcagtaagtgtatgcaaatgtgtatgaawggaagttttccttcacagcagaacatttacccagagaatcaycaccagaactttgtgagaagcaggcctttctgtgctgcagggaaaaaaagccctgacctggcccagtcaacatcacccctgcttcctgctgaaggaagcagagagaactcagcagtgctkccccaagccaagcttcagcaamtgaatggtaatttcacaatgtcacctagaacgttccacacaaaccaaagtaataccatagggttcagagccaccaaagttgctgtttattctgtagagaacgtgaagcaattagt

SEQ ID NO: 52439 - DNA, 600 bp, Chicken  19866894303017_4
tgtcacggatgtgttataatggtgcaaaactacaaggaagacagagaaatcagcagaaygtttaagctatttttataaaggacccagtgccctcgattatgtttaaaaagtcatacaaaagaaaamgtcacttctttttcttccctacatgcaggataaataaagaaatataaaatgtaggtctttctatcaataaatatcaacttgggtttgtattttcagataaagttcagtaagtgtatgcaaatgtgtatgaawggaagttttccttcacagcagaacatttacccagagaatcaycaccagaactttgtgagaagcaggcctttctgtgctgcagggaaaaaaagccctgacctggcccagtcaacatcacccctgcttcctgctgaaggaagcagagagaactcagcagtgctkccccaagccaagcttcagcaamtgaatggtaatttcacaatgtcacctagaacgttccacacaaaccaaagtaataccatagggttcagagccaccaaagttgctgtttattctgtagagaacgtgaagcaattagtgggagcttgtcaaactatggacaacgaattacatgcaccatga

SEQ ID NO: 52440 - DNA, 600 bp, Chicken  19866894303017_5
gaaaamgtcacttctttttcttccctacatgcaggataaataaagaaatataaaatgtaggtctttctatcaataaatatcaacttgggtttgtattttcagataaagttcagtaagtgtatgcaaatgtgtatgaawggaagttttccttcacagcagaacatttacccagagaatcaycaccagaactttgtgagaagcaggcctttctgtgctgcagggaaaaaaagccctgacctggcccagtcaacatcacccctgcttcctgctgaaggaagcagagagaactcagcagtgctkccccaagccaagcttcagcaamtgaatggtaatttcacaatgtcacctagaacgttccacacaaaccaaagtaataccatagggttcagagccaccaaagttgctgtttattctgtagagaacgtgaagcaattagtgggagcttgtcaaactatggacaacgaattacatgcaccatgaattttggaatattttactttaaaaaaataaataaagtcattaacaactagttccaatctctaagaatgtctttttaaattgaaatactacaatgaaaattctggtttgtttattagccaa

SEQ ID NO: 52441 - DNA, 600 bp, Chicken  19866894303017_6
ccctacatgcaggataaataaagaaatataaaatgtaggtctttctatcaataaatatcaacttgggtttgtattttcagataaagttcagtaagtgtatgcaaatgtgtatgaawggaagttttccttcacagcagaacatttacccagagaatcaycaccagaactttgtgagaagcaggcctttctgtgctgcagggaaaaaaagccctgacctggcccagtcaacatcacccctgcttcctgctgaaggaagcagagagaactcagcagtgctkccccaagccaagcttcagcaamtgaatggtaatttcacaatgtcacctagaacgttccacacaaaccaaagtaataccatagggttcagagccaccaaagttgctgtttattctgtagagaacgtgaagcaattagtgggagcttgtcaaactatggacaacgaattacatgcaccatgaattttggaatattttactttaaaaaaataaataaagtcattaacaactagttccaatctctaagaatgtctttttaaattgaaatactacaatgaaaattctggtttgtttattagccaaccacttcagatataatagctat

SEQ ID NO: 52442 - DNA, 600 bp, Chicken  19866894303022_1
tttgccttggattcagtaaaatttcattaaacccctactgtgccaaatgtagcatatcaagctcaatgaaaaaaaaatcactagttctcataatattcccaatacaactctctggcctatgctttctatttctattgcctacttgcccttatagcaaaattagttgtagacaacagctgtaaacaggagaacagctgaactattagcccaaggccaccactacagtgacccaaaataataaaaaaataagtgaaaaatttatagctcaaccagatgttatcttagttgtctgctgtctgytgtaaacttctctgtatcactctttctaggaaatctcwgcctaaatcagttttccttttgtgactcttaattctagaagaggtcatagaatactctgtcttcaaaayatggctactactttgggagctcccatcacaggccttagattcatctacaatctttttaaaaccagtggagacacaagtattaataacagaaataaagttataaaaagatggaaaaggtcttagaaaaaaagtgtcaatstgaatctagaaaacatgctttacaattggaagtgaaagggttggctcttcttca

SEQ ID NO: 52443 - DNA, 600 bp, Chicken  19866894303022_2
tgtgccaaatgtagcatatcaagctcaatgaaaaaaaaatcactagttctcataatattcccaatacaactctctggcctatgctttctatttctattgcctacttgcccttatagcaaaattagttgtagacaacagctgtaaacaggagaacagctgaactattagcccaaggccaccactacagtgacccaaaataataaaaaaataagtgaaaaatttatagctcaaccagatgttatcttagttgtctgctgtctgytgtaaacttctctgtatcactctttctaggaaatctcwgcctaaatcagttttccttttgtgactcttaattctagaagaggtcatagaatactctgtcttcaaaayatggctactactttgggagctcccatcacaggccttagattcatctacaatctttttaaaaccagtggagacacaagtattaataacagaaataaagttataaaaagatggaaaaggtcttagaaaaaaagtgtcaatstgaatctagaaaacatgctttacaattggaagtgaaagggttggctcttcttcaaaaccatttcccaaagaagatgggaatataaaatataa

SEQ ID NO: 52444 - DNA, 594 bp, Chicken  19866894303022_3
ctctctggcctatgctttctatttctattgcctacttgcccttatagcaaaattagttgtagacaacagctgtaaacaggagaacagctgaactattagcccaaggccaccactacagtgacccaaaataataaaaaaataagtgaaaaatttatagctcaaccagatgttatcttagttgtctgctgtctgytgtaaacttctctgtatcactctttctaggaaatctcwgcctaaatcagttttccttttgtgactcttaattctagaagaggtcatagaatactctgtcttcaaaayatggctactactttgggagctcccatcacaggccttagattcatctacaatctttttaaaaccagtggagacacaagtattaataacagaaataaagttataaaaagatggaaaaggtcttagaaaaaaagtgtcaatstgaatctagaaaacatgctttacaattggaagtgaaagggttggctcttcttcaaaaccatttcccaaagaagatgggaatataaaatataaaagctgtataaactttctatttgataaactacatggtataactgccttattttactgaaaaac

SEQ ID NO: 52445 - DNA, 455 bp, Chicken  19866894303022_4
taagtgaaaaatttatagctcaaccagatgttatcttagttgtctgctgtctgytgtaaacttctctgtatcactctttctaggaaatctcwgcctaaatcagttttccttttgtgactcttaattctagaagaggtcatagaatactctgtcttcaaaayatggctactactttgggagctcccatcacaggccttagattcatctacaatctttttaaaaccagtggagacacaagtattaataacagaaataaagttataaaaagatggaaaaggtcttagaaaaaaagtgtcaatstgaatctagaaaacatgctttacaattggaagtgaaagggttggctcttcttcaaaaccatttcccaaagaagatgggaatataaaatataaaagctgtataaactttctatttgataaactacatggtataactgccttattttactgaaaaac

SEQ ID NO: 52446 - DNA, 600 bp, Chicken  19866894303030_1
tctattttaatattacattacattatctcatatcacctcattaatagctatgactgactagcatttatactacacactgttttcaaattttggcatacttcaattacagagtcaggagattttcaagaacaaagatacttattttaaaagttatatgtatggatacacatcagtagtgaaagcgagaacttagtactttgcagaaccctgcttcagactgacacacagacagaaaatgtacgttatttaccttccttcctttcttgacatctcttcaaaattcagtaaaggaagtttaartaaacagtattcctgtgcttccttgggtgtgcaagtggacttctggggaaggatatatatatataaaaattcatcagctcattagcaatactgatttgttctcttagattctataaggatttacattcctgcatttctatagaatgtgcaacaattttgtttttatttaattcacactgtattttttattctactcttcatttcttcaggcactgtatggatgagacttaactactgagcttgatattatattccaatttcttagattaggggcatctcccaaacccaaaatttatgctg

SEQ ID NO: 52447 - DNA, 599 bp, Chicken  19866894303031_1
  misc_feature (1)..(11): n is any nucleotide
nnnnnnnnnnnaactctggagaaaacagcttgcattaatatgctctaatccggtataattagtcaaattactgcacgccgaccggcttgtcatgcgttgtcagatttggcatgcatgcgggatcgccggggtccctctggaatgccaccctggatcagggaaaacggctcgtttgtagtgctgctgttctcctgatggggaaagcaaactgaatcagcagccacagccttccagaaaaaaggcaaagaaaaaaaaaaaagaacacatttgtaattgttctgttgagaaacagggaattcstgtcctgggaactgtttgtggttgataccttccatgagaaatagaagcaattctattgcttcttacaatttccaggtatctcacaacactgaagatccgctgtactctataagattagcattcataaaaagatttaaaataaataattacaagaggatcagctacaaattacctaccacactgtgacacagattattagctaccagtgtggggtgcaggagtgtgcgtgtgtgctgcaagtgtgcgtgtgcccctatttccagccggggaggaggttattaaactataaaagggccata

SEQ ID NO: 52448 - DNA, 599 bp, Chicken  19866894303032_1
  misc_feature (1)..(172): n is any nucleotide
nnnnnnnnnnnnnnnnnnnnnnnnnnnnnnnnnnnnnnnnnnnnnnnnnnnnnnnnnnnnnnnnnnnnnnnnnnnnnnnnnnnnnnnnnnnnnnnnnnnnnnnnnnnnnnnnnnnnnnnnnnnnnnnnnnnnnnnnnnnnnnnnnnnnnnnnnnnnnnnnnnnnnnnnnnnngaattaaagagcatgcaaaagaagactagattatagttgaagcagagaccttctagtgcttgacttcacagcaatgtgaaagctgtcaggcatgacctgacagctctgctctgcaatactgtctgccmtagaacagtgaacagattaaaaaaaaagaagaaaaaaaaagggagggacagagatttagtaacwggctctgctttttgctctgtgtggggtctgatgtgcattcagtttctgcaaagaaagaaaatggctcaattccgagaactttctgaaaattatgaagcaactgtacaacagagagccagtatgaaggacactacactatacrtttctattattctatctgaaaaagaccattccatcctcacaccttgccttcataacatgcaaactatatttcaacagaaaaaaaaacaacaaa

SEQ ID NO: 52449 - DNA, 599 bp, Chicken  19866894303032_2
  misc_feature (1)..(108): n is any nucleotide
nnnnnnnnnnnnnnnnnnnnnnnnnnnnnnnnnnnnnnnnnnnnnnnnnnnnnnnnnnnnnnnnnnnnnnnnnnnnnnnnnnnnnnnnnnnnnnnnnnnnnnnnnnnngaattaaagagcatgcaaaagaagactagattatagttgaagcagagaccttctagtgcttgacttcacagcaatgtgaaagctgtcaggcatgacctgacagctctgctctgcaatactgtctgccmtagaacagtgaacagattaaaaaaaaagaagaaaaaaaaagggagggacagagatttagtaacwggctctgctttttgctctgtgtggggtctgatgtgcattcagtttctgcaaagaaagaaaatggctcaattccgagaactttctgaaaattatgaagcaactgtacaacagagagccagtatgaaggacactacactatacrtttctattattctatctgaaaaagaccattccatcctcacaccttgccttcataacatgcaaactatatttcaacagaaaaaaaaacaacaaaacatctgacttgaaaaccaaaggttttagttacatgagtatgaatgtctttagtaatcagcaat

SEQ ID NO: 52450 - DNA, 600 bp, Chicken  19866894303032_3
agttgaagcagagaccttctagtgcttgacttcacagcaatgtgaaagctgtcaggcatgacctgacagctctgctctgcaatactgtctgccmtagaacagtgaacagattaaaaaaaaagaagaaaaaaaaagggagggacagagatttagtaacwggctctgctttttgctctgtgtggggtctgatgtgcattcagtttctgcaaagaaagaaaatggctcaattccgagaactttctgaaaattatgaagcaactgtacaacagagagccagtatgaaggacactacactatacrtttctattattctatctgaaaaagaccattccatcctcacaccttgccttcataacatgcaaactatatttcaacagaaaaaaaaacaacaaaacatctgacttgaaaaccaaaggttttagttacatgagtatgaatgtctttagtaatcagcaataacatwaaaaaaaaaaacaattgaaatcatgtctaattagaattgttttaaattccattttaacaccacaattgtagcatccatctaaattttgttttccagtgttcatgattccaacgcgaatgctgctctgaaaactgtat

SEQ ID NO: 52451 - DNA, 600 bp, Chicken  19866894303032_4
tgctttttgctctgtgtggggtctgatgtgcattcagtttctgcaaagaaagaaaatggctcaattccgagaactttctgaaaattatgaagcaactgtacaacagagagccagtatgaaggacactacactatacrtttctattattctatctgaaaaagaccattccatcctcacaccttgccttcataacatgcaaactatatttcaacagaaaaaaaaacaacaaaacatctgacttgaaaaccaaaggttttagttacatgagtatgaatgtctttagtaatcagcaataacatwaaaaaaaaaaacaattgaaatcatgtctaattagaattgttttaaattccattttaacaccacaattgtagcatccatctaaattttgttttccagtgttcatgattccaacgcgaatgctgctctgaaaactgtatgttagtttttaattgctactgcaccatttttatggtcattgacagctccaatccataaaatgactcttaccttatcaagagctgcttgaactacagattcgctctgagtatctagagcagatgtagcttcatccagaagaagaatctttggatttcttgccag

SEQ ID NO: 52452 - DNA, 600 bp, Chicken  19866894303034_1
caatgcaatgtgttcccactgacttaggaggttgcttattacacaacagactaactcagtttttcacatatttttcatagtagtcgaaggttgcccgaataaactgtgtaaggcaaattgtgagtggtgtacctgaccgtaaggggtttgaaacaggatgcaggctttctcttatcttgatggagaggtgtaactaatcccagaacatgcatgaagctgtctgtgagttcatagtcagagaacacacatcctttaagatggcgaagaaagaaatcccgcaagccctctgaagagattaaytgacatcaacttcagtttttcttatctrgccggaatgtgaccaaggctgttccccttcccctccttaggatagccagaaaagtactttttcctccaccaatccctgaatgttgaaggyatctcccaaagaacaccgatgctgcaagtaatttagatacttttgatgygcacgtgctgtttgtgaaaacaacgggaaaataccaacagacaccagaaaacagcatttctagccctgacagtgaagggaagggaaaatcgtggtgtctgtgtacatctgggggttatagagggaaacaaagc

SEQ ID NO: 52453 - DNA, 600 bp, Chicken  19866894303034_2
aggttgcttattacacaacagactaactcagtttttcacatatttttcatagtagtcgaaggttgcccgaataaactgtgtaaggcaaattgtgagtggtgtacctgaccgtaaggggtttgaaacaggatgcaggctttctcttatcttgatggagaggtgtaactaatcccagaacatgcatgaagctgtctgtgagttcatagtcagagaacacacatcctttaagatggcgaagaaagaaatcccgcaagccctctgaagagattaaytgacatcaacttcagtttttcttatctrgccggaatgtgaccaaggctgttccccttcccctccttaggatagccagaaaagtactttttcctccaccaatccctgaatgttgaaggyatctcccaaagaacaccgatgctgcaagtaatttagatacttttgatgygcacgtgctgtttgtgaaaacaacgggaaaataccaacagacaccagaaaacagcatttctagccctgacagtgaagggaagggaaaatcgtggtgtctgtgtacatctgggggttatagagggaaacaaagcttgtcttccgctgcagggaagggaaaag

SEQ ID NO: 52454 - DNA, 600 bp, Chicken  19866894303034_3
tgtgagtggtgtacctgaccgtaaggggtttgaaacaggatgcaggctttctcttatcttgatggagaggtgtaactaatcccagaacatgcatgaagctgtctgtgagttcatagtcagagaacacacatcctttaagatggcgaagaaagaaatcccgcaagccctctgaagagattaaytgacatcaacttcagtttttcttatctrgccggaatgtgaccaaggctgttccccttcccctccttaggatagccagaaaagtactttttcctccaccaatccctgaatgttgaaggyatctcccaaagaacaccgatgctgcaagtaatttagatacttttgatgygcacgtgctgtttgtgaaaacaacgggaaaataccaacagacaccagaaaacagcatttctagccctgacagtgaagggaagggaaaatcgtggtgtctgtgtacatctgggggttatagagggaaacaaagcttgtcttccgctgcagggaagggaaaaggttgggtgggtgtgggcgggaaaaggtaggattgttttctctctgcgacaggaggggctggggaaagtgtttatttctttgtaccagcas

SEQ ID NO: 52455 - DNA, 600 bp, Chicken  19866894303034_4
tctcttatcttgatggagaggtgtaactaatcccagaacatgcatgaagctgtctgtgagttcatagtcagagaacacacatcctttaagatggcgaagaaagaaatcccgcaagccctctgaagagattaaytgacatcaacttcagtttttcttatctrgccggaatgtgaccaaggctgttccccttcccctccttaggatagccagaaaagtactttttcctccaccaatccctgaatgttgaaggyatctcccaaagaacaccgatgctgcaagtaatttagatacttttgatgygcacgtgctgtttgtgaaaacaacgggaaaataccaacagacaccagaaaacagcatttctagccctgacagtgaagggaagggaaaatcgtggtgtctgtgtacatctgggggttatagagggaaacaaagcttgtcttccgctgcagggaagggaaaaggttgggtgggtgtgggcgggaaaaggtaggattgttttctctctgcgacaggaggggctggggaaagtgtttatttctttgtaccagcasaggaaatgtytttgtttacacatttatctgtggcactggaaaaggcaaa

SEQ ID NO: 52456 - DNA, 600 bp, Chicken  19866894303034_5
atctcccaaagaacaccgatgctgcaagtaatttagatacttttgatgygcacgtgctgtttgtgaaaacaacgggaaaataccaacagacaccagaaaacagcatttctagccctgacagtgaagggaagggaaaatcgtggtgtctgtgtacatctgggggttatagagggaaacaaagcttgtcttccgctgcagggaagggaaaaggttgggtgggtgtgggcgggaaaaggtaggattgttttctctctgcgacaggaggggctggggaaagtgtttatttctttgtaccagcasaggaaatgtytttgtttacacatttatctgtggcactggaaaaggcaaagtcttcctctctggctgcagggatggaattcttttgctcaggcacaggcaaaggggagatttattctttcttttgcctttccctgtggcaggggatgaagggaggtctgcctgcagacccaccggctgcttcggaagggaaaatacacgcgatccgtacagatttccaaaaggtttgagcgtaggcaggagagttcatttcgacgccgtcccgggctgagcaaatgttcagctatctatttttggcactcg

SEQ ID NO: 52457 - DNA, 600 bp, Chicken  19866894303034_6
gaacaccgatgctgcaagtaatttagatacttttgatgygcacgtgctgtttgtgaaaacaacgggaaaataccaacagacaccagaaaacagcatttctagccctgacagtgaagggaagggaaaatcgtggtgtctgtgtacatctgggggttatagagggaaacaaagcttgtcttccgctgcagggaagggaaaaggttgggtgggtgtgggcgggaaaaggtaggattgttttctctctgcgacaggaggggctggggaaagtgtttatttctttgtaccagcasaggaaatgtytttgtttacacatttatctgtggcactggaaaaggcaaagtcttcctctctggctgcagggatggaattcttttgctcaggcacaggcaaaggggagatttattctttcttttgcctttccctgtggcaggggatgaagggaggtctgcctgcagacccaccggctgcttcggaagggaaaatacacgcgatccgtacagatttccaaaaggtttgagcgtaggcaggagagttcatttcgacgccgtcccgggctgagcaaatgttcagctatctatttttggcactcgtacgttcaag

SEQ ID NO: 52458 - DNA, 600 bp, Chicken  19866894303037_1
tgcatgaaaaacaccctcatgcttttgtgatggttctcctccttaaaatggtagctgaactgcacagctggcctttgggtaacagcacatcagcactctttattctcaaaagatactctatgtccatgctcctttttgtaattactccctttgcacagaactcagtggtggtttaccagttttaatacatgagcagctctgtcactgtgcgttaaatcatacatgcactgcttgggatattggagtctaaatcagttgttaaaggggataatttatgactttttatgaagttaattttaygtactcyttattttttscagatatatttggaaatwtatgtagattttaagacgtatttcttgaatgtgtaaaggcaaagtacttgttcttttgagggaatatcttctcagatgtaaaagctaacacgcagttcaactaattatctttaaaatacaaagtgttaagaacattggtacactgcacaatgatgactaaacctttggggcctcttgaaaagatgatgtgtaactgcagtgtagcatacaaacaaagtgataacaatttccaaaccactttaaaactatgcaggtgcacatttct

SEQ ID NO: 52459 - DNA, 600 bp, Chicken  19866894303037_2
aaaacaccctcatgcttttgtgatggttctcctccttaaaatggtagctgaactgcacagctggcctttgggtaacagcacatcagcactctttattctcaaaagatactctatgtccatgctcctttttgtaattactccctttgcacagaactcagtggtggtttaccagttttaatacatgagcagctctgtcactgtgcgttaaatcatacatgcactgcttgggatattggagtctaaatcagttgttaaaggggataatttatgactttttatgaagttaattttaygtactcyttattttttscagatatatttggaaatwtatgtagattttaagacgtatttcttgaatgtgtaaaggcaaagtacttgttcttttgagggaatatcttctcagatgtaaaagctaacacgcagttcaactaattatctttaaaatacaaagtgttaagaacattggtacactgcacaatgatgactaaacctttggggcctcttgaaaagatgatgtgtaactgcagtgtagcatacaaacaaagtgataacaatttccaaaccactttaaaactatgcaggtgcacatttcttgagttt

SEQ ID NO: 52460 - DNA, 600 bp, Chicken  19866894303037_3
catgcttttgtgatggttctcctccttaaaatggtagctgaactgcacagctggcctttgggtaacagcacatcagcactctttattctcaaaagatactctatgtccatgctcctttttgtaattactccctttgcacagaactcagtggtggtttaccagttttaatacatgagcagctctgtcactgtgcgttaaatcatacatgcactgcttgggatattggagtctaaatcagttgttaaaggggataatttatgactttttatgaagttaattttaygtactcyttattttttscagatatatttggaaatwtatgtagattttaagacgtatttcttgaatgtgtaaaggcaaagtacttgttcttttgagggaatatcttctcagatgtaaaagctaacacgcagttcaactaattatctttaaaatacaaagtgttaagaacattggtacactgcacaatgatgactaaacctttggggcctcttgaaaagatgatgtgtaactgcagtgtagcatacaaacaaagtgataacaatttccaaaccactttaaaactatgcaggtgcacatttcttgagttttattttccrt

SEQ ID NO: 52461 - DNA, 600 bp, Chicken  19866894303037_4
ctcctccttaaaatggtagctgaactgcacagctggcctttgggtaacagcacatcagcactctttattctcaaaagatactctatgtccatgctcctttttgtaattactccctttgcacagaactcagtggtggtttaccagttttaatacatgagcagctctgtcactgtgcgttaaatcatacatgcactgcttgggatattggagtctaaatcagttgttaaaggggataatttatgactttttatgaagttaattttaygtactcyttattttttscagatatatttggaaatwtatgtagattttaagacgtatttcttgaatgtgtaaaggcaaagtacttgttcttttgagggaatatcttctcagatgtaaaagctaacacgcagttcaactaattatctttaaaatacaaagtgttaagaacattggtacactgcacaatgatgactaaacctttggggcctcttgaaaagatgatgtgtaactgcagtgtagcatacaaacaaagtgataacaatttccaaaccactttaaaactatgcaggtgcacatttcttgagttttattttccrtgtcttcaccagaaacagg

SEQ ID NO: 52462 - DNA, 600 bp, Chicken  19866894303037_5
scagatatatttggaaatwtatgtagattttaagacgtatttcttgaatgtgtaaaggcaaagtacttgttcttttgagggaatatcttctcagatgtaaaagctaacacgcagttcaactaattatctttaaaatacaaagtgttaagaacattggtacactgcacaatgatgactaaacctttggggcctcttgaaaagatgatgtgtaactgcagtgtagcatacaaacaaagtgataacaatttccaaaccactttaaaactatgcaggtgcacatttcttgagttttattttccrtgtcttcaccagaaacaggcctccttctgttacatttcctaagttttgtagttcacagcaataaactatttctcctttacatccttttgaaataacgttttgaatccttgaaaagttcagtgttggcagtgttatttggtgcgttatctgagagatagtgggcaaaatgtttccatggaaacgtcagtaactctggcattagaaaagcccttcagaaataatggggaggactcgtaaagtccccttatcttctgtcatcagacactttttgggcggaattttgggtttggggaattcact

SEQ ID NO: 52463 - DNA, 599 bp, Chicken  19866894303045_1
  misc_feature (1)..(124): n is any nucleotide
nnnnnnnnnnnnnnnnnnnnnnnnnnnnnnnnnnnnnnnnnnnnnnnnnnnnnnnnnnnnnnnnnnnnnnnnnnnnnnnnnnnnnnnnnnnnnnnnnnnnnnnnnnnnnnnnnnnnnnnnnnnncaagaaattattttccgcactgctacctgctttacccactgaaaaccaacttccctgacacttttattacaatatatacatatgtatatattctacactctttccagttttggtccatccaaaagcagtagagtgctgatagtgtaagacttgcaaaggagcatcttgcttttggwgggattcatattccagtatcacttaggataaagcccacagttattcattttgaaacacatgaacattgctagacaacaaagaggtttgattaacccttgtgactgtaccctcctaggagtttttacatgcaaacctccccagatcccattttcagtgctacatctagtgaacgtaagagtagcacattatatatatatactctgaggccagctgctaggtgcattggccctttctttaatgaaactttkaggwcctgtcttaggttcagctgggacacaattgtttttcttcagaacat

SEQ ID NO: 52464 - DNA, 600 bp, Chicken  19866894303045_2
cagtagagtgctgatagtgtaagacttgcaaaggagcatcttgcttttggwgggattcatattccagtatcacttaggataaagcccacagttattcattttgaaacacatgaacattgctagacaacaaagaggtttgattaacccttgtgactgtaccctcctaggagtttttacatgcaaacctccccagatcccattttcagtgctacatctagtgaacgtaagagtagcacattatatatatatactctgaggccagctgctaggtgcattggccctttctttaatgaaactttkaggwcctgtcttaggttcagctgggacacaattgtttttcttcagaacatctggttttattctatgttttggttctagkagaaaaataatgctgataacacactgctgtttctagttgttgctgagtagttctgtaatagagtcaaggatgtttcagtccctcmatttctgttgcccagcaagagggctgggggggcacaaggacctgggagaggacagaatcaggacagctgacctaaactggccaaggggatattccataccatatgacattataaagaaggaaagtttgaaaaagag

SEQ ID NO: 52465 - DNA, 600 bp, Chicken  19866894303045_3
agagtgctgatagtgtaagacttgcaaaggagcatcttgcttttggwgggattcatattccagtatcacttaggataaagcccacagttattcattttgaaacacatgaacattgctagacaacaaagaggtttgattaacccttgtgactgtaccctcctaggagtttttacatgcaaacctccccagatcccattttcagtgctacatctagtgaacgtaagagtagcacattatatatatatactctgaggccagctgctaggtgcattggccctttctttaatgaaactttkaggwcctgtcttaggttcagctgggacacaattgtttttcttcagaacatctggttttattctatgttttggttctagkagaaaaataatgctgataacacactgctgtttctagttgttgctgagtagttctgtaatagagtcaaggatgtttcagtccctcmatttctgttgcccagcaagagggctgggggggcacaaggacctgggagaggacagaatcaggacagctgacctaaactggccaaggggatattccataccatatgacattataaagaaggaaagtttgaaaaagagggca

SEQ ID NO: 52466 - DNA, 600 bp, Chicken  19866894303045_4
taaagcccacagttattcattttgaaacacatgaacattgctagacaacaaagaggtttgattaacccttgtgactgtaccctcctaggagtttttacatgcaaacctccccagatcccattttcagtgctacatctagtgaacgtaagagtagcacattatatatatatactctgaggccagctgctaggtgcattggccctttctttaatgaaactttkaggwcctgtcttaggttcagctgggacacaattgtttttcttcagaacatctggttttattctatgttttggttctagkagaaaaataatgctgataacacactgctgtttctagttgttgctgagtagttctgtaatagagtcaaggatgtttcagtccctcmatttctgttgcccagcaagagggctgggggggcacaaggacctgggagaggacagaatcaggacagctgacctaaactggccaaggggatattccataccatatgacattataaagaaggaaagtttgaaaaagagggcaaattctgggggttttcttccactgctcaggaagtaactgtgcatcagtcagtgggtggttagcaattgcttgtgc

SEQ ID NO: 52467 - DNA, 600 bp, Chicken  19866894303045_5
taggagtttttacatgcaaacctccccagatcccattttcagtgctacatctagtgaacgtaagagtagcacattatatatatatactctgaggccagctgctaggtgcattggccctttctttaatgaaactttkaggwcctgtcttaggttcagctgggacacaattgtttttcttcagaacatctggttttattctatgttttggttctagkagaaaaataatgctgataacacactgctgtttctagttgttgctgagtagttctgtaatagagtcaaggatgtttcagtccctcmatttctgttgcccagcaagagggctgggggggcacaaggacctgggagaggacagaatcaggacagctgacctaaactggccaaggggatattccataccatatgacattataaagaaggaaagtttgaaaaagagggcaaattctgggggttttcttccactgctcaggaagtaactgtgcatcagtcagtgggtggttagcaattgcttgtgcatcacttgttcttatatacatatatgtgtaattgtcataactattaccctttttttctctcttccttttctctatcttagtaggt

SEQ ID NO: 52468 - DNA, 484 bp, Chicken  19866894303045_6
aagagggcaaattctgggggttttcttccactgctcaggaagtaactgtgcatcagtcagtgggtggttagcaattgcttgtgcatcacttgttcttatatacatatatgtgtaattgtcataactattaccctttttttctctcttccttttctctatcttagtaggtagtttttatctcaacacagaagttctactttatttttttcctattctcacctcctcccactgggaacgggggaggaagcaagcaaacagctgtgtagcgcttagctatctgccaggttaaaccacaacacwtctgaggacaaaatcaccagacacgctaatcagagccacatcccctcagaaagtgcattaggaccaagctcacaataggaayaggcaggatacatcaccagcagatgcagctccacttagagttcgtggggatcaggcaccaacatatctataagcactccctgtacagtccatagatccaaag

SEQ ID NO: 52469 - DNA, 402 bp, Chicken  19866894303045_7
gcatcacttgttcttatatacatatatgtgtaattgtcataactattaccctttttttctctcttccttttctctatcttagtaggtagtttttatctcaacacagaagttctactttatttttttcctattctcacctcctcccactgggaacgggggaggaagcaagcaaacagctgtgtagcgcttagctatctgccaggttaaaccacaacacwtctgaggacaaaatcaccagacacgctaatcagagccacatcccctcagaaagtgcattaggaccaagctcacaataggaayaggcaggatacatcaccagcagatgcagctccacttagagttcgtggggatcaggcaccaacatatctataagcactccctgtacagtccatagatccaaag

SEQ ID NO: 52470 - DNA, 600 bp, Chicken  19866894303046_1
tgttatattttcttttaaaatatagatctggacctcatgtatttcccttcacgcgaaactactgcagacgcttgaacatggtacactagagggcactagtgagctatgaaaattgtctagtttactattggcgtattaccattacatattaatctctccggctttttaggttccacttcttctctaactataggctgttctcacagtataaaaacttttgcacaacatcactaaatgtcatgatgttcttttttcactgttctcaggatttggtatatttctaagatgtaggtgaaattkgtgaatttcattactccagaaaattattcactgagtagtctgagtagctttcctacagtactccctctttgttctttgtctgctctttggagtcacagctcttggcagcactggtaataccaaacaggactgagcaaatatttggtttatgtatttccccttggaattcttttaaaagctaatttaaaccctcttattcaaagactatgagcatagaaatgttatactttgcttctggatttcagaatacaatacatgtcgcagaaaaggtgaaattatgaaaaaaaactgcaaaatatg

SEQ ID NO: 52471 - DNA, 600 bp, Chicken  19866894303049_1
ggatgctgcatactctctgcatactctacaggtttgtattccagatttcaggagctccatttcagtgacagagggccacagaatggtaaccaggtgggaattatgttaaaagcaagttacccaaaggacaaaaggcaagcctccttttccttccagtttcaggacattatcccattgagctgtatgcaatcacctacattaaatgagactcacacatttatgtcttgattctaaagggcctcaccccgctcactacagaaaagctgtctatccagatgagttcactgaaggcagtgtggkctttgcatgcagtgggctcactcactgaccagcaatgccaygtgaaaatggacttctggagactgtgacaggacttttacaccagagactgcccttgccacacagtgtagttaagcggggtaaacaacgatatgagaagcatgccttgccttgttccactttcatacacttccattaagagtggcagcgacctgctcctccatctcgtccagctcacagttacttccactctacttacagagaggaaaaactgagaaacaaaaggccctgcttccattgcctcaatgcaattgctaattg

SEQ ID NO: 52472 - DNA, 600 bp, Chicken  19866894303049_2
cagatttcaggagctccatttcagtgacagagggccacagaatggtaaccaggtgggaattatgttaaaagcaagttacccaaaggacaaaaggcaagcctccttttccttccagtttcaggacattatcccattgagctgtatgcaatcacctacattaaatgagactcacacatttatgtcttgattctaaagggcctcaccccgctcactacagaaaagctgtctatccagatgagttcactgaaggcagtgtggkctttgcatgcagtgggctcactcactgaccagcaatgccaygtgaaaatggacttctggagactgtgacaggacttttacaccagagactgcccttgccacacagtgtagttaagcggggtaaacaacgatatgagaagcatgccttgccttgttccactttcatacacttccattaagagtggcagcgacctgctcctccatctcgtccagctcacagttacttccactctacttacagagaggaaaaactgagaaacaaaaggccctgcttccattgcctcaatgcaattgctaattgtctgtgttccaagaggagtcatctgccagggacggaaaaca

SEQ ID NO: 52473 - DNA, 600 bp, Chicken  19866894303058_1
tcatggccatgtctgatgttgtaaatcatctgaactgagctggatgactcagctgtgttgaatgatgctgtgtacagagcaggagtgagccaccactttgcacatgtatgtgcatttcatggaaatatacttaatatcgactgcggcaaagctgcacttgggatattttgataagttattggtattgacacgcaagcaagatgcagacacgtgatggaaggagccctgcatccctgtctgctgcatgattctccgtggctggggctcctacaggcccataggaagtgggtgtgagagcgrgaaggctgtctgtgtctatcggtggggctgtgacagtggggatttgcttgccaacaccctcactgtatggccggtactgcagctgttagcaatcaagaggaagctattgtttccttttgacttttacagacgggcctaatatgagttctatttattcaggtgtttttatccaaattttccaaagatcctgagttcgacctttgtatatgtagtttcccctccaattagtaagaagtgtttagaaacatcaagaatgggactggaaggggccttgtaggtgccgtgtgctgctgtcgcagc

SEQ ID NO: 52474 - DNA, 600 bp, Chicken  19866894303061_1
gtgatcaggaacagcaccaccaagcacagatcgtgtgggtttcagcattccttccctgcaaaccttgtttatgtaaagcctaagggatgaacgtgagagcttgacaagataaagcgatgaaagcaagatgatgtaaaacagactgctacaaactgggggaagaaacatttgatattttgcagagaatatgtacttttttcagaatcacaaaaagcagacatcatagttgtgtggaggggaagaaaacaagcattcacaatacgcttcacttttatgcatcaaaacagctgccagaacacyatgctgcaactgtctgttttcaagtcagctcccaccttgctgcctagggaagcagaacattgcacagcacagatgacagggaccccaggtatttgatcaccttctttacctttccctaccaaacacaacacaaggytgggaactgcatgcattcagcccacactatgtttatataagtctttaaatgcaagtttctctgtcaaggcttccwagaaacgcctggcacatcaggtacakcacttcagcaaggagggggatcagagatgcttactgctctttggaaaaacagaagcttaattt

SEQ ID NO: 52475 - DNA, 600 bp, Chicken  19866894303061_2
aacagactgctacaaactgggggaagaaacatttgatattttgcagagaatatgtacttttttcagaatcacaaaaagcagacatcatagttgtgtggaggggaagaaaacaagcattcacaatacgcttcacttttatgcatcaaaacagctgccagaacacyatgctgcaactgtctgttttcaagtcagctcccaccttgctgcctagggaagcagaacattgcacagcacagatgacagggaccccaggtatttgatcaccttctttacctttccctaccaaacacaacacaaggytgggaactgcatgcattcagcccacactatgtttatataagtctttaaatgcaagtttctctgtcaaggcttccwagaaacgcctggcacatcaggtacakcacttcagcaaggagggggatcagagatgcttactgctctttggaaaaacagaagcttaattttcagatgatgcagatggaatgaaaacattgctagcagccagggtaacagaatgtgctcacagtgagataacgaaaaactaactaacctgcagatatctgcatcaggtcagtatgggctggtagtcctggggccaga

SEQ ID NO: 52476 - DNA, 600 bp, Chicken  19866894303061_3
aagcagacatcatagttgtgtggaggggaagaaaacaagcattcacaatacgcttcacttttatgcatcaaaacagctgccagaacacyatgctgcaactgtctgttttcaagtcagctcccaccttgctgcctagggaagcagaacattgcacagcacagatgacagggaccccaggtatttgatcaccttctttacctttccctaccaaacacaacacaaggytgggaactgcatgcattcagcccacactatgtttatataagtctttaaatgcaagtttctctgtcaaggcttccwagaaacgcctggcacatcaggtacakcacttcagcaaggagggggatcagagatgcttactgctctttggaaaaacagaagcttaattttcagatgatgcagatggaatgaaaacattgctagcagccagggtaacagaatgtgctcacagtgagataacgaaaaactaactaacctgcagatatctgcatcaggtcagtatgggctggtagtcctggggccagagctacctccacacagtagggattacagtagggttaatcgggtcttcaatttgcataacaacaggtaggatgccac

SEQ ID NO: 52477 - DNA, 600 bp, Chicken  19866894303061_4
ggaagaaaacaagcattcacaatacgcttcacttttatgcatcaaaacagctgccagaacacyatgctgcaactgtctgttttcaagtcagctcccaccttgctgcctagggaagcagaacattgcacagcacagatgacagggaccccaggtatttgatcaccttctttacctttccctaccaaacacaacacaaggytgggaactgcatgcattcagcccacactatgtttatataagtctttaaatgcaagtttctctgtcaaggcttccwagaaacgcctggcacatcaggtacakcacttcagcaaggagggggatcagagatgcttactgctctttggaaaaacagaagcttaattttcagatgatgcagatggaatgaaaacattgctagcagccagggtaacagaatgtgctcacagtgagataacgaaaaactaactaacctgcagatatctgcatcaggtcagtatgggctggtagtcctggggccagagctacctccacacagtagggattacagtagggttaatcgggtcttcaatttgcataacaacaggtaggatgccacatgctccattacacaggcagacaaaa

SEQ ID NO: 52478 - DNA, 599 bp, Chicken  19866894303077_1
  misc_feature (1)..(226): n is any nucleotide
nnnnnnnnnnnnnnnnnnnnnnnnnnnnnnnnnnnnnnnnnnnnnnnnnnnnnnnnnnnnnnnnnnnnnnnnnnnnnnnnnnnnnnnnnnnnnnnnnnnnnnnnnnnnnnnnnnnnnnnnnnnnnnnnnnnnnnnnnnnnnnnnnnnnnnnnnnnnnnnnnnnnnnnnnnnnnnnnnnnnnnnnnnnnnnnnnnnnnnnnnnnnnnnnnnnnnnnnnnnnnnnnnntttaatcaggggccattagagagtacagagtaattccagcaaataataccacatcatttacaaattgctctctycactgttgcctggaagcagacaactcatcagaactacctgttttcattgctgcttcccaactccaaaagagcaatccaagagtataaatgctcggacagtaccctgcataactttacttctgcaaactcagtctggaagcaaaccttcagaaagcacaacggtaagtaaactaatcacaagggagtgtgctttttatgtaccacagatatgcaaatctaacagaacttgttcatggacagtatttttcttctccaaatactaaaatagcacataaaagcttatcaggtcaagccattag

SEQ ID NO: 52479 - DNA, 600 bp, Chicken  19866894303077_2
ggaagcaaaccttcagaaagcacaacggtaagtaaactaatcacaagggagtgtgctttttatgtaccacagatatgcaaatctaacagaacttgttcatggacagtatttttcttctccaaatactaaaatagcacataaaagcttatcaggtcaagccattagaattgcttaaacaaattacacttacaatccaaaacgtttgagttcttacaacactaagagatgcatattccttcaaataaaccaaccacaaagggaaaccttgaatttatctatttacagatctgtatttcacayamtagtaaatgagaatggtaaacaacattcccagcatcacgatcctaatmccgatgaattytgggaactggctgcagcagcaacctgcaaatgagcagcatcgcttgttgccatgcgctggaacttccactctggatcatctcccattggtacattgcctttactctttcaaactacatcagatacttgaacttcrttaatagagcacttcacccatctaaatgcacaccttgaagygatagcttttaatactgtcatcttgatagcacaattctttccaactattattagcttaagaag

SEQ ID NO: 52480 - DNA, 600 bp, Chicken  19866894303077_3
aagcaaaccttcagaaagcacaacggtaagtaaactaatcacaagggagtgtgctttttatgtaccacagatatgcaaatctaacagaacttgttcatggacagtatttttcttctccaaatactaaaatagcacataaaagcttatcaggtcaagccattagaattgcttaaacaaattacacttacaatccaaaacgtttgagttcttacaacactaagagatgcatattccttcaaataaaccaaccacaaagggaaaccttgaatttatctatttacagatctgtatttcacayamtagtaaatgagaatggtaaacaacattcccagcatcacgatcctaatmccgatgaattytgggaactggctgcagcagcaacctgcaaatgagcagcatcgcttgttgccatgcgctggaacttccactctggatcatctcccattggtacattgcctttactctttcaaactacatcagatacttgaacttcrttaatagagcacttcacccatctaaatgcacaccttgaagygatagcttttaatactgtcatcttgatagcacaattctttccaactattattagcttaagaagct

SEQ ID NO: 52481 - DNA, 600 bp, Chicken  19866894303077_4
gtgtgctttttatgtaccacagatatgcaaatctaacagaacttgttcatggacagtatttttcttctccaaatactaaaatagcacataaaagcttatcaggtcaagccattagaattgcttaaacaaattacacttacaatccaaaacgtttgagttcttacaacactaagagatgcatattccttcaaataaaccaaccacaaagggaaaccttgaatttatctatttacagatctgtatttcacayamtagtaaatgagaatggtaaacaacattcccagcatcacgatcctaatmccgatgaattytgggaactggctgcagcagcaacctgcaaatgagcagcatcgcttgttgccatgcgctggaacttccactctggatcatctcccattggtacattgcctttactctttcaaactacatcagatacttgaacttcrttaatagagcacttcacccatctaaatgcacaccttgaagygatagcttttaatactgtcatcttgatagcacaattctttccaactattattagcttaagaagctaaaagcatcttccatcctacgctttttaaaagcaagctttgcagatag

SEQ ID NO: 52482 - DNA, 600 bp, Chicken  19866894303077_5
atgtaccacagatatgcaaatctaacagaacttgttcatggacagtatttttcttctccaaatactaaaatagcacataaaagcttatcaggtcaagccattagaattgcttaaacaaattacacttacaatccaaaacgtttgagttcttacaacactaagagatgcatattccttcaaataaaccaaccacaaagggaaaccttgaatttatctatttacagatctgtatttcacayamtagtaaatgagaatggtaaacaacattcccagcatcacgatcctaatmccgatgaattytgggaactggctgcagcagcaacctgcaaatgagcagcatcgcttgttgccatgcgctggaacttccactctggatcatctcccattggtacattgcctttactctttcaaactacatcagatacttgaacttcrttaatagagcacttcacccatctaaatgcacaccttgaagygatagcttttaatactgtcatcttgatagcacaattctttccaactattattagcttaagaagctaaaagcatcttccatcctacgctttttaaaagcaagctttgcagatagttttcaaaagt

SEQ ID NO: 52483 - DNA, 466 bp, Chicken  19866894303077_6
aaacgtttgagttcttacaacactaagagatgcatattccttcaaataaaccaaccacaaagggaaaccttgaatttatctatttacagatctgtatttcacayamtagtaaatgagaatggtaaacaacattcccagcatcacgatcctaatmccgatgaattytgggaactggctgcagcagcaacctgcaaatgagcagcatcgcttgttgccatgcgctggaacttccactctggatcatctcccattggtacattgcctttactctttcaaactacatcagatacttgaacttcrttaatagagcacttcacccatctaaatgcacaccttgaagygatagcttttaatactgtcatcttgatagcacaattctttccaactattattagcttaagaagctaaaagcatcttccatcctacgctttttaaaagcaagctttgcagatagttttcaaaagta

SEQ ID NO: 52484 - DNA, 425 bp, Chicken  19866894303077_7
tcaaataaaccaaccacaaagggaaaccttgaatttatctatttacagatctgtatttcacayamtagtaaatgagaatggtaaacaacattcccagcatcacgatcctaatmccgatgaattytgggaactggctgcagcagcaacctgcaaatgagcagcatcgcttgttgccatgcgctggaacttccactctggatcatctcccattggtacattgcctttactctttcaaactacatcagatacttgaacttcrttaatagagcacttcacccatctaaatgcacaccttgaagygatagcttttaatactgtcatcttgatagcacaattctttccaactattattagcttaagaagctaaaagcatcttccatcctacgctttttaaaagcaagctttgcagatagttttcaaaagta

SEQ ID NO: 52485 - DNA, 599 bp, Chicken  19866894303078_1
  misc_feature (1)..(33): n is any nucleotide
nnnnnnnnnnnnnnnnnnnnnnnnnnnnnnnnnttccctatattcctttctgatgcattcaggcactgtgaattgttccctaaagccaaatctatactttttattgttatgtgaatattctgctcatactagatattacacttatacttcctattcaataaatatccatggcactcagctcagcaattagtctgtcagaacaataatttatgatagtaatggtgtaatatcaataggtttatggatcaggaatgtgtaaatacgaagctcaagcagtggctctgtgagtttaattctgtktaagcagatattccattccaaaatttagtaggtgctgttttatctcatttcaaagatgatttgaaatgtgaagtgatttatgaactcgatgagagtctttgaaatttttttttctyatgcattttgtgacaatatataagccatcaggttgttgacgatgagaatccatttcagttacttcattgggatatagctcaatattaactttctggtctgctgtcttactgaacactgcctgttccactgacagttcatttagatattgtcatggtgttggaagctttaaaggggttaatgag

SEQ ID NO: 52486 - DNA, 600 bp, Chicken  19866894303078_2
gttatgtgaatattctgctcatactagatattacacttatacttcctattcaataaatatccatggcactcagctcagcaattagtctgtcagaacaataatttatgatagtaatggtgtaatatcaataggtttatggatcaggaatgtgtaaatacgaagctcaagcagtggctctgtgagtttaattctgtktaagcagatattccattccaaaatttagtaggtgctgttttatctcatttcaaagatgatttgaaatgtgaagtgatttatgaactcgatgagagtctttgaaakttttttttctyatgcattttgtgacaatatataagccatcaggttgttgacgatgagaatccatttcagttacttcattgggatatagctcaatattaactttctggtctgctgtcttactgaacactgcctgttccactgacagttcatttagatattgtcatggtgttggaagctttaaaggggttaatgaggtatttattccattattgttattggaaattacagtgtctagaacacttacacaagaagattaaagatagatgctttagaccactttctatagtctgatagaccatt

SEQ ID NO: 52487 - DNA, 600 bp, Chicken  19866894303078_3
attctgctcatactagatattacacttatacttcctattcaataaatatccatggcactcagctcagcaattagtctgtcagaacaataatttatgatagtaatggtgtaatatcaataggtttatggatcaggaatgtgtaaatacgaagctcaagcagtggctctgtgagtttaattctgtktaagcagatattccattccaaaatttagtaggtgctgttttatctcatttcaaagatgatttgaaatgtgaagtgatttatgaactcgatgagagtctttgaaatttttttttctyatgcattttgtgacaatatataagccatcaggttgttgacgatgagaatccatttcagttacttcattgggatatagctcaatattaactttctggtctgctgtcttactgaacactgcctgttccactgacagttcatttagatattgtcatggtgttggaagctttaaaggggttaatgaggtatttattccattattgttattggaaattacagtgtctagaacacttacacaagaagattaaagatagatgctttagaccactttctatagtctgatagaccattattttctggtt

SEQ ID NO: 52488 - DNA, 600 bp, Chicken  19866894303082_1
ggtaaggatccgtacctgtacagatcaggatgagcagcaggggatgaagcattcatgttccgtggctcacttggcagcacttcttggttctgtatgcattccaggttctcaacattttcatactgtgacccgccattcccaggtgcatcacccacacctgctttgccatcactaacaaacatagattgcttagcagcctgtgcctcctgctgacttagaattttaggaaaatactggacatccattcctttttgtatcatctcgttggctgaacctgtaccaatctgagcctgagagagwacgttagctggaacccgctgaggatgcattggctggtgatataagggtgacgaatgtggttgacaagcaaactcagttttctcaaccatgtaatttttttcagatgaaagtatttcttcattttctgcctcatcccctttgaaaaacatggaaagggatcctgagtcttggtctgtgggaataggtctatttgatgtttcagacatacctggagactgtttctggaggttattttcctgagctgtaggaatgacagaactggagtcttgcaacagcgggctgtgggtagaactgctcctg

SEQ ID NO: 52489 - DNA, 600 bp, Chicken  19866894303086_1
tcaaaacaaaacctgctgctgtgtgaaattacccctgattgtccatgcagcctcctggtcaatatgagtagaaaaaccttagcctgattgtgttggttaaaaacggtgaaagcaaaggcaggaagatttttgcaacatcttagtaatagatcgtaatgatatgcaggttgtaaccatttttactgcggagttgtttttaaaaacagaacattagattgcaaactgagtattttcttgacatcaggtagatttcctctcttttcatctactgccctcccctcaggactttaagagcttggrtttttgacacaaagctttatggctagaaatgagccagcctctatttcttaggagaaggctgtaagtatcacaggattgcaagtggctatagcaattctatccaaagagcgatggaacgtcagatgtgtttgtgtcaggctctgcagcagtggcagagcctcgaagttcgttgtggaatgtttttgccatgctgttgatttatgtaccagctgcattgatgagggttggcttctcattctgcccatcagcattagggaataggatggagcactgggacagaaacgtggaaaatcaatgtct

SEQ ID NO: 52490 - DNA, 600 bp, Chicken  19866894303089_1
ggagttcacagtaaatcagtggttggagagatttcttacgacactttacattaaaacagtcttccaccacccaccacgctctcggtttttgccttcgtagtgacattgtgaatgaaatatatattttagtgcctttaatgtacttacacaacctcccacaaagtttctgtactctctaagctcacctatcctgtatgtgtcacatcaatcacttgcgctcttcctagggaagccagctcctctattacctcttgggatgtcagaaacagtaacaaggaactaaacctctatcacgcactsggagctgccttccaacccattcwacaaggctgctccctcactcagttcaccactcgaaccaccggaggtttaccaagttctccctgcaytgggagggagacaaaaggcaccctccaacccaggaaacatcaaccatttcaggccacagtggaactaaaactctttatttctaatgctcatacagcactgccatctttagcttgcaaaacatgaaagggatactcaaacccaaacaaaaactaactgtttccatttgaatgcaactcttgagagtgttcttgtttacacatctaagcccag

SEQ ID NO: 52491 - DNA, 600 bp, Chicken  19866894303089_2
tggagagatttcttacgacactttacattaaaacagtcttccaccacccaccacgctctcggtttttgccttcgtagtgacattgtgaatgaaatatatattttagtgcctttaatgtacttacacaacctcccacaaagtttctgtactctctaagctcacctatcctgtatgtgtcacatcaatcacttgcgctcttcctagggaagccagctcctctattacctcttgggatgtcagaaacagtaacaaggaactaaacctctatcacgcactsggagctgccttccaacccattcwacaaggctgctccctcactcagttcaccactcgaaccaccggaggtttaccaagttctccctgcaytgggagggagacaaaaggcaccctccaacccaggaaacatcaaccatttcaggccacagtggaactaaaactctttatttctaatgctcatacagcactgccatctttagcttgcaaaacatgaaagggatactcaaacccaaacaaaaactaactgtttccatttgaatgcaactcttgagagtgttcttgtttacacatctaagcccagctttttgttcatttaattagaag

SEQ ID NO: 52492 - DNA, 600 bp, Chicken  19866894303089_3
tgccttcgtagtgacattgtgaatgaaatatatattttagtgcctttaatgtacttacacaacctcccacaaagtttctgtactctctaagctcacctatcctgtatgtgtcacatcaatcacttgcgctcttcctagggaagccagctcctctattacctcttgggatgtcagaaacagtaacaaggaactaaacctctatcacgcactsggagctgccttccaacccattcwacaaggctgctccctcactcagttcaccactcgaaccaccggaggtttaccaagttctccctgcaytgggagggagacaaaaggcaccctccaacccaggaaacatcaaccatttcaggccacagtggaactaaaactctttatttctaatgctcatacagcactgccatctttagcttgcaaaacatgaaagggatactcaaacccaaacaaaaactaactgtttccatttgaatgcaactcttgagagtgttcttgtttacacatctaagcccagctttttgttcatttaattagaagtcaagctttgagggcaaagctagaccacaaccaacttctgaacactcaagggactggcgattatac

SEQ ID NO: 52493 - DNA, 600 bp, Chicken  19866894303089_4
tggcgattatactgcaacataaccactggttatcatcaattaaccctgtgcctctcatcatcctatagatttcctctctcctacatttggaaggagaaagtggtatcaaaaggcacagatgagatttggcccaataacccaaaacacagactggattccacacacgttctcgttatctcccacggaaaaatacattctatttcaattttctcctttaccactctaccaactatatatttccgacccaagggccgccgtgttaccaagttgaccacaacgaaccattcacagaaataacasgcagaactacgaccccccttcamagctgagagctgcctttccatgccygccatttcagctgtcacagcctgaaggtacctctggcatcgctgcttcccatgacttcctccgacttcccccttcgagcacacaaataaatttccagaataaattacatttctgtcccttgtctcgcttgctttctccatgccaacattttactttgaatgtcaacaggaacagcagcttagcaaaaacggagccaacagaacgaactgaatccctacaataatattgattgatgccttctccacacggctc

SEQ ID NO: 52494 - DNA, 600 bp, Chicken  19866894303089_5
cactggttatcatcaattaaccctgtgcctctcatcatcctatagatttcctctctcctacatttggaaggagaaagtggtatcaaaaggcacagatgagatttggcccaataacccaaaacacagactggattccacacacgttctcgttatctcccacggaaaaatacattctatttcaattttctcctttaccactctaccaactatatatttccgacccaagggccgccgtgttaccaagttgaccacaacgaaccattcacagaaataacasgcagaactacgaccccccttcamagctgagagctgcctttccatgccygccatttcagctgtcacagcctgaaggtacctctggcatcgctgcttcccatgacttcctccgacttcccccttcgagcacacaaataaatttccagaataaattacatttctgtcccttgtctcgcttgctttctccatgccaacattttactttgaatgtcaacaggaacagcagcttagcaaaaacggagccaacagaacgaactgaatccctacaataatattgattgatgccttctccacacggctcagcagagcaagtagctctagatt

SEQ ID NO: 52495 - DNA, 600 bp, Chicken  19866894303089_6
tgcctctcatcatcctatagatttcctctctcctacatttggaaggagaaagtggtatcaaaaggcacagatgagatttggcccaataacccaaaacacagactggattccacacacgttctcgttatctcccacggaaaaatacattctatttcaattttctcctttaccactctaccaactatatatttccgacccaagggccgccgtgttaccaagttgaccacaacgaaccattcacagaaataacasgcagaactacgaccccccttcamagctgagagctgcctttccatgccygccatttcagctgtcacagcctgaaggtacctctggcatcgctgcttcccatgacttcctccgacttcccccttcgagcacacaaataaatttccagaataaattacatttctgtcccttgtctcgcttgctttctccatgccaacattttactttgaatgtcaacaggaacagcagcttagcaaaaacggagccaacagaacgaactgaatccctacaataatattgattgatgccttctccacacggctcagcagagcaagtagctctagatttagccgagctcacatgaaagcatcc

SEQ ID NO: 52496 - DNA, 600 bp, Chicken  19866894303090_1
tggggattggagcactaagtgcccaagagacttattgtagttaactttgttagaaacaaagaaagcaaaaatcaaaatgcaggttgtcgtgtggcagataaagttctgggaggtgctgcggagactggaaagtgagattgggacctaagaagtgaaattagggaactgaatgaagctctgagtttgctctgttaaagcttttgccttttacccagccagctcaaattaacagtctaacagtgactctgcaaatccacccaaataatctgaattttacttagaatacttctttttttcctygctaagaaaygcattaaaaaaaaaattagttttgaaggtccaactcaggcagtgctgcaggccctgccttccctcccctccctccaagagctgcaggaggcagagctctgcatggttttcattaggaagaaggatgaagcgagttcttttctacagytctttattgctaggatttgacaaagaaggagggagcccagcttgccttgcctttggtttcctacccttagcaataaataaataataaaaaaaattcaacccatgaactgtgcacagcacgtaatcatttcccatggatctcca

SEQ ID NO: 52497 - DNA, 600 bp, Chicken  19866894303090_2
agcactaagtgcccaagagacttattgtagttaactttgttagaaacaaagaaagcaaaaatcaaaatgcaggttgtcgtgtggcagataaagttctgggaggtgctgcggagactggaaagtgagattgggacctaagaagtgaaattagggaactgaatgaagctctgagtttgctctgttaaagcttttgccttttacccagccagctcaaattaacagtctaacagtgactctgcaaatccacccaaataatctgaattttacttagaatacttctttttttcctygctaagaaaygcattaaaaaaaaaattagttttgaaggtccaactcaggcagtgctgcaggccctgccttccctcccctccctccaagagctgcaggaggcagagctctgcatggttttcattaggaagaaggatgaagcgagttcttttctacagytctttattgctaggatttgacaaagaaggagggagcccagcttgccttgcctttggtttcctacccttagcaataaataaataataaaaaaaattcaacccatgaactgtgcacagcacgtaatcatttcccatggatctccagatcattagg

SEQ ID NO: 52498 - DNA, 480 bp, Chicken  19866894303090_3
ttagggaactgaatgaagctctgagtttgctctgttaaagcttttgccttttacccagccagctcaaattaacagtctaacagtgactctgcaaatccacccaaataatctgaattttacttagaatacttctttttttcctygctaagaaaygcattaaaaaaaaaattagttttgaaggtccaactcaggcagtgctgcaggccctgccttccctcccctccctccaagagctgcaggaggcagagctctgcatggttttcattaggaagaaggatgaagcgagttcttttctacagytctttattgctaggatttgacaaagaaggagggagcccagcttgccttgcctttggtttcctacccttagcaataaataaataataaaaaaaattcaacccatgaactgtgcacagcacgtaatcatttcccatggatctccagatcattaggaaaccacaccaggccagcttcccatca

SEQ ID NO: 52499 - DNA, 600 bp, Chicken  19866894303093_1
ggccagatttccaaaggcatattttaaagcaccaacatatgtgcttattttctatctacttcaatgggcattggaagaagggcagcattggatgctaaatatcagatacatacaagttaggaagaaaaggtctatagaaagaatggctgggtagggttcttttatttttgtttttcaaatattccttgcagtcatagaattgcacaggctggaaaagaccttaaagatcatcaagtccaaccacaacctgaccacactaccctaacaacccccagctaactggagaggctcaagcctgastttattatataggctacttcaaaccaataggaattttaggagtcgttttaaagagagaactgctactgctgcgggcacagaatgagttaagcagctttctcataactgtcaataaaatcacrtggacttaggatcgtaaaaatgacagcagcctgttctgttggattttgaaacaggacagttattacttagaggtggttttacatgtaattaagattcggcattcctagacatcaaaagctcacatttacaaatctgtgyctaagtaacgacaaaccttattttccacacttcttgtaa

SEQ ID NO: 52500 - DNA, 600 bp, Chicken  19866894303093_2
agaaaaggtctatagaaagaatggctgggtagggttcttttatttttgtttttcaaatattccttgcagtcatagaattgcacaggctggaaaagaccttaaagatcatcaagtccaaccacaacctgaccacactaccctaacaacccccagctaactggagaggctcaagcctgastttattatataggctacttcaaaccaataggaattttaggagtcgttttaaagagagaactgctactgctgcgggcacagaatgagttaagcagctttctcataactgtcaataaaatcacrtggacttaggatcgtaaaaatgacagcagcctgttctgttggattttgaaacaggacagttattacttagaggtggttttacatgtaattaagattcggcattcctagacatcaaaagctcacatttacaaatctgtgyctaagtaacgacaaaccttattttccacacttcttgtaatatgccttaactacaaactgcatacaaatggcgacaagtggagctcaatttaaaaatgtcaagtgacacagcagcaaaagcacagctgtgagtttatcagatcaaaagcagctggttcttaa

SEQ ID NO: 52501 - DNA, 485 bp, Chicken  19866894303093_3
ctaacaacccccagctaactggagaggctcaagcctgastttattatataggctacttcaaaccaataggaattttaggagtcgttttaaagagagaactgctactgctgcgggcacagaatgagttaagcagctttctcataactgtcaataaaatcacrtggacttaggatcgtaaaaatgacagcagcctgttctgttggattttgaaacaggacagttattacttagaggtggttttacatgtaattaagattcggcattcctagacatcaaaagctcacatttacaaatctgtgyctaagtaacgacaaaccttattttccacacttcttgtaatatgccttaactacaaactgcatacaaatggcgacaagtggagctcaatttaaaaatgtcaagtgacacagcagcaaaagcacagctgtgagtttatcagatcaaaagcagctggttcttaattaaacgacaaaaaattagatttc

SEQ ID NO: 52502 - DNA, 475 bp, Chicken  19866894303095_1
ccctcagctttagggcagcccttctcctaggccccgtttccctttcttctttccccatggtgagctggggtgactcctgaccccccacgtttggggcagcttctctctcctgtcccattttccagccccacagcaagctggggacacagctgagtgctccacattggaagtaaccctttttctgaaccctattgtccagctctatggaaagctggggggccactgctgagcccctcatgtctgaggcagcccctgtcccgtgccctatcccctaaccctaaccttccccacagtgatccrgagtgactcctgagccccctaggtttggggtaccccttctgctatgccctatcctgcagctccatggtgagctggaaccattgctgagccccccagggttggggcagctcctcgtgccccatttttcagccccacgggtctctcccgtaccccacggaacccataccccgggggg

SEQ ID NO: 52503 - DNA, 600 bp, Chicken  19866894303102_1
gtaaataagttcttttttttatgttcatataaaacttctgctccagtttgttgcaattatcacttgtcctgtttctgggcaccaccaagtagaacctggctccatccatcgaagtcccaccaattagatatttataagcaccttattacctctttccaatcacaaaattaaaggtgaaaaatttaaatgaggatgaaatgttattcttgttcactaactgtatctctaatcattgcacttcacaagtatttctttgctaaagcgtctttcattccttaccttctttacaaaatttcatcrccgtcctaaaaaatgtagctattatttttctgaaatatttagcatccttaatgaaaattatgtatataatcaaagttaaccctttcagctgatacttacattttctcagtctttaattactgtcaaagatcatatcctcaaaaccctcctccagctgctaccggatcttcaaaccaattaactaccggtgtttcttcctgttaagtctaccgggcacataaattcctattgtgtggcaagttaccaattgcttggttagtggaagcattctcaggctaggaaaggtctctgtattttgtc

SEQ ID NO: 52504 - DNA, 599 bp, Chicken  19866894303108_1
  misc_feature (1)..(147): n is any nucleotide
nnnnnnnnnnnnnnnnnnnnnnnnnnnnnnnnnnnnnnnnnnnnnnnnnnnnnnnnnnnnnnnnnnnnnnnnnnnnnnnnnnnnnnnnnnnnnnnnnnnnnnnnnnnnnnnnnnnnnnnnnnnnnnnnnnnnnnnnnnnnnnnnnnnattgcagtgcagcacagtaaaacattccaaaatgtgtgactagggaggtgaagctaaaaaaatgggaagatttgacagtgtccacaacagctccaaactagtccctaatttaagatgccaagcttttagacctgtcatagagattggggcatwtgctttcctggatgataaatccaaaaacctgacaagaacatcaaaatgctctctgcaagaattctatccacaaggcagaagtaggaagatcaaattgtttatagagctgttaataaatctaatataaagtttgatgtttttaccggaatacatgttgaccataattagttcgctgaagtttcagctgggagagtcaaggtcacaaaacttgtccttttcagcgttgcgttatgtcaatactgtttcaacaaattcatttgaataaatattttyctgcttaagttgagtgggagttggaa

SEQ ID NO: 52505 - DNA, 600 bp, Chicken  19866894303108_2
tagacctgtcatagagattggggcatwtgctttcctggatgataaatccaaaaacctgacaagaacatcaaaatgctctctgcaagaattctatccacaaggcagaagtaggaagatcaaattgtttatagagctgttaataaatctaatataaagtttgatgtttttaccggaatacatgttgaccataattagttcgctgaagtttcagctgggagagtcaaggtcacaaaacttgtccttttcagcgttgcgttatgtcaatactgtttcaacaaattcatttgaataaatattttyctgcttaagttgagtgggagttggaaagaaaatcttttgctgtttagttactttcacatgctgattttttttgcagcagggtgctgccagttcatttttgtcagtcaagatagcctatcctgatgaaactgcaaaaaggcaaaaggaaaagacaatgtctgatracacctacctacactgagtaagtcatgtaaaatgttctcaagttgacacactatctgagagctctgaaaccaaagaaagcttgacatacgcctgcaggtattaaacccacacaccggttccaagcttttgatgccc

SEQ ID NO: 52506 - DNA, 557 bp, Chicken  19866894303108_3
ttttaccggaatacatgttgaccataattagttcgctgaagtttcagctgggagagtcaaggtcacaaaacttgtccttttcagcgttgcgttatgtcaatactgtttcaacaaattcatttgaataaatattttyctgcttaagttgagtgggagttggaaagaaaatcttttgctgtttagttactttcacatgctgattttttttgcagcagggtgctgccagttcatttttgtcagtcaagatagcctatcctgatgaaactgcaaaaaggcaaaaggaaaagacaatgtctgatracacctacctacactgagtaagtcatgtaaaatgttctcaagttgacacactatctgagagctctgaaaccaaagaaagcttgacatacgcctgcaggtattaaacccacacaccggttccaagcttttgatgccctttcatttctactatagaaatgctgaaggagttcatgattaggatatatattaaggacttgttttcaccaattaactgctgtcagaactaatatgcattgtttgctaattacagcctacca

SEQ ID NO: 52507 - DNA, 600 bp, Chicken  19866894303111_1
ctgtttcagccgtgatactaataagatgacttgatttttttactgtgatctgagccaagacttacggtgggaacctcagccaggttctggccactccttttaccattttgtttcctcacaaggccagacctccccgctcaccattcccatgcctcccagcaggcttcttgccacgctgaggccattgacctgtaagtgccaggatggccaacctagttttaaacaattgtacttgcaccagaaacctaattttgcagttgaaaaatgtaccccagcagcccctgtttgtgatccataaarcagacagaggtgggtctactctgatggtgttggctggcagaatgaatgtaaaaggaggagctggcataggagagcgattgaaagagcaattaaaatgatcagagagacaaaatctagcacagatctggtgttatgccacttgaagagcaatgggagtgagggctcagctgacagcataactttgaaggtggcagtgagagggaaagccagtcatgcaagagtccccagcacagcygtggactcactgtacctgcccagaggtgatctcctgggtccttgggatcatgtaaagctagcagg

SEQ ID NO: 52508 - DNA, 600 bp, Chicken  19866894303111_2
caccagaaacctaattttgcagttgaaaaatgtaccccagcagcccctgtttgtgatccataaarcagacagaggtgggtctactctgatggtgttggctggcagaatgaatgtaaaaggaggagctggcataggagagcgattgaaagagcaattaaaatgatcagagagacaaaatctagcacagatctggtgttatgccacttgaagagcaatgggagtgagggctcagctgacagcataactttgaaggtggcagtgagagggaaagccagtcatgcaagagtccccagcacagcygtggactcactgtacctgcccagaggtgatctcctgggtccttgggatcatgtaaagctagcagggagctgccaaaaacactgctgctgctgcagaggacacccctgtgcagcacatctgtgctactttgggattcatgagacaaaagattgtttttccttctgcattgtagttgtagctcatggtttgatgcactgaatatccaaggacatgactacccatgactgtgcctatgtaagatggcctgtgctggcaggaggcgggtgacagacagtcagagataccattgacatcatttta

SEQ ID NO: 52509 - DNA, 599 bp, Chicken  19866894303112_1
  misc_feature (1)..(229): n is any nucleotide
nnnnnnnnnnnnnnnnnnnnnnnnnnnnnnnnnnnnnnnnnnnnnnnnnnnnnnnnnnnnnnnnnnnnnnnnnnnnnnnnnnnnnnnnnnnnnnnnnnnnnnnnnnnnnnnnnnnnnnnnnnnnnnnnnnnnnnnnnnnnnnnnnnnnnnnnnnnnnnnnnnnnnnnnnnnnnnnnnnnnnnnnnnnnnnnnnnnnnnnnnnnnnnnnnnnnnnnnnnnnnnnnnnnnntgagtgcaggcggcccgctgtgccatatccccgttaggctccccggctgaaggcctgccgtcggggacggytrctytcttccctgtagcctctcgcagtgccgccagttgagaccttatctgcaggtatagcctgtcatgaggtagcagtgaaggcttccctgccccatgactacgatgactgggtcccatcatgcgtttgtttttgaccttgcttctgtcagacaattggaaatgtctgtatgtcactcagcgtgctatrcattcatatagtttgttgcacgagtgggtgatgatgccttatgaccgtcgtgaaggtgtcttccatctgtgtaatgtatacatttcggtaatactatgcgttgtaggtg

SEQ ID NO: 52510 - DNA, 599 bp, Chicken  19866894303112_2
  misc_feature (1)..(227): n is any nucleotide
nnnnnnnnnnnnnnnnnnnnnnnnnnnnnnnnnnnnnnnnnnnnnnnnnnnnnnnnnnnnnnnnnnnnnnnnnnnnnnnnnnnnnnnnnnnnnnnnnnnnnnnnnnnnnnnnnnnnnnnnnnnnnnnnnnnnnnnnnnnnnnnnnnnnnnnnnnnnnnnnnnnnnnnnnnnnnnnnnnnnnnnnnnnnnnnnnnnnnnnnnnnnnnnnnnnnnnnnnnnnnnnnnnntgagtgcaggcggcccgctgtgccatatccccgttaggctccccggctgaaggcctgccgtcggggacggytrctytcttccctgtagcctctcgcagtgccgccagttgagaccttatctgcaggtatagcctgtcatgaggtagcagtgaaggcttccctgccccatgactacgatgactgggtcccatcatgcgtttgtttttgaccttgcttctgtcagacaattggaaatgtctgtatgtcactcagcgtgctatrcattcatatagtttgttgcacgagtgggtgatgatgccttatgaccgtcgtgaaggtgtcttccatctgtgtaatgtatacatttcggtaatactatgcgttgtaggtgtc

SEQ ID NO: 52511 - DNA, 599 bp, Chicken  19866894303112_3
  misc_feature (1)..(224): n is any nucleotide
nnnnnnnnnnnnnnnnnnnnnnnnnnnnnnnnnnnnnnnnnnnnnnnnnnnnnnnnnnnnnnnnnnnnnnnnnnnnnnnnnnnnnnnnnnnnnnnnnnnnnnnnnnnnnnnnnnnnnnnnnnnnnnnnnnnnnnnnnnnnnnnnnnnnnnnnnnnnnnnnnnnnnnnnnnnnnnnnnnnnnnnnnnnnnnnnnnnnnnnnnnnnnnnnnnnnnnnnnnnnnnnntgagtgcaggcggcccgctgtgccatatccccgttaggctccccggctgaaggcctgccgtcggggacggytrctytcttccctgtagcctctcgcagtgccgccagttgagaccttatctgcaggtatagcctgtcatgaggtagcagtgaaggcttccctgccccatgactacgatgactgggtcccatcatgcgtttgtttttgaccttgcttctgtcagacaattggaaatgtctgtatgtcactcagcgtgctatrcattcatatagtttgttgcacgagtgggtgatgatgccttatgaccgtcgtgaaggtgtcttccatctgtgtaatgtatacatttcggtaatactatgcgttgtaggtgtcagg

SEQ ID NO: 52512 - DNA, 599 bp, Chicken  19866894303112_4
  misc_feature (1)..(39): n is any nucleotide
nnnnnnnnnnnnnnnnnnnnnnnnnnnnnnnnnnnnnnntgagtgcaggcggcccgctgtgccatatccccgttaggctccccggctgaaggcctgccgtcggggacggytrctytcttccctgtagcctctcgcagtgccgccagttgagaccttatctgcaggtatagcctgtcatgaggtagcagtgaaggcttccctgccccatgactacgatgactgggtcccatcatgcgtttgtttttgaccttgcttctgtcagacaattggaaatgtctgtatgtcactcagcgtgctatrcattcatatagtttgttgcacgagtgggtgatgatgccttatgaccgtcgtgaaggtgtcttccatctgtgtaatgtatacatttcggtaatactatgcgttgtaggtgtcaggtttgaaggattcttgggaaagaaggaataaaaagaaggggcagtggtcacatgggtgagcaatggaatgryaatctctgctgytctggcatctttgtgaagtagaggatgatgttaccgtttctggtcttttttcartctctccagaagaacataagggatagttcagtgataggaaagtagaga

SEQ ID NO: 52513 - DNA, 600 bp, Chicken  19866894303112_5
gcagtgaaggcttccctgccccatgactacgatgactgggtcccatcatgcgtttgtttttgaccttgcttctgtcagacaattggaaatgtctgtatgtcactcagcgtgctatrcattcatatagtttgttgcacgagtgggtgatgatgccttatgaccgtcgtgaaggtgtcttccatctgtgtaatgtatacatttcggtaatactatgcgttgtaggtgtcaggtttgaaggattcttgggaaagaaggaataaaaagaaggggcagtggtcacatgggtgagcaatggaatgryaatctctgctgytctggcatctttgtgaagtagaggatgatgttaccgtttctggtcttttttcartctctccagaagaacataagggatagttcagtgataggaaagtagagacctwcatctgttcctgtctttgtgccttgtctggcaaactgatcgttgcataattgcccatctgttttcacagttaactggaggaaaaagatgttccttctacagttattctgactgtacctagctctttgcttattgtgagataaaatcaagttaatttgcatttggtgtttgttggtgtgttt

SEQ ID NO: 52514 - DNA, 600 bp, Chicken  19866894303112_6
cagtgaaggcttccctgccccatgactacgatgactgggtcccatcatgcgtttgtttttgaccttgcttctgtcagacaattggaaatgtctgtatgtcactcagcgtgctatrcattcatatagtttgttgcacgagtgggtgatgatgccttatgaccgtcgtgaaggtgtcttccatctgtgtaatgtatacatttcggtaatactatgcgttgtaggtgtcaggtttgaaggattcttgggaaagaaggaataaaaagaaggggcagtggtcacatgggtgagcaatggaatgryaatctctgctgytctggcatctttgtgaagtagaggatgatgttaccgtttctggtcttttttcartctctccagaagaacataagggatagttcagtgataggaaagtagagacctwcatctgttcctgtctttgtgccttgtctggcaaactgatcgttgcataattgcccatctgttttcacagttaactggaggaaaaagatgttccttctacagttattctgactgtacctagctctttgcttattgtgagataaaatcaagttaatttgcatttggtgtttgttggtgtgttta

SEQ ID NO: 52515 - DNA, 600 bp, Chicken  19866894303112_7
ccctgccccatgactacgatgactgggtcccatcatgcgtttgtttttgaccttgcttctgtcagacaattggaaatgtctgtatgtcactcagcgtgctatrcattcatatagtttgttgcacgagtgggtgatgatgccttatgaccgtcgtgaaggtgtcttccatctgtgtaatgtatacatttcggtaatactatgcgttgtaggtgtcaggtttgaaggattcttgggaaagaaggaataaaaagaaggggcagtggtcacatgggtgagcaatggaatgryaatctctgctgytctggcatctttgtgaagtagaggatgatgttaccgtttctggtcttttttcartctctccagaagaacataagggatagttcagtgataggaaagtagagacctwcatctgttcctgtctttgtgccttgtctggcaaactgatcgttgcataattgcccatctgttttcacagttaactggaggaaaaagatgttccttctacagttattctgactgtacctagctctttgcttattgtgagataaaatcaagttaatttgcatttggtgtttgttggtgtgtttattggcgtgtagg

SEQ ID NO: 52516 - DNA, 600 bp, Chicken  19866894303112_8
gcttctgtcagacaattggaaatgtctgtatgtcactcagcgtgctatrcattcatatagtttgttgcacgagtgggtgatgatgccttatgaccgtcgtgaaggtgtcttccatctgtgtaatgtatacatttcggtaatactatgcgttgtaggtgtcaggtttgaaggattcttgggaaagaaggaataaaaagaaggggcagtggtcacatgggtgagcaatggaatgryaatctctgctgytctggcatctttgtgaagtagaggatgatgttaccgtttctggtcttttttcartctctccagaagaacataagggatagttcagtgataggaaagtagagacctwcatctgttcctgtctttgtgccttgtctggcaaactgatcgttgcataattgcccatctgttttcacagttaactggaggaaaaagatgttccttctacagttattctgactgtacctagctctttgcttattgtgagataaaatcaagttaatttgcatttggtgtttgttggtgtgtttattggcgtgtaggtgtgtgtgttgcaggggtgtttcacaaaatgctctgtctaaagacttgagaatt

SEQ ID NO: 52517 - DNA, 600 bp, Chicken  19866894303112_9
tcatatagtttgttgcacgagtgggtgatgatgccttatgaccgtcgtgaaggtgtcttccatctgtgtaatgtatacatttcggtaatactatgcgttgtaggtgtcaggtttgaaggattcttgggaaagaaggaataaaaagaaggggcagtggtcacatgggtgagcaatggaatgryaatctctgctgytctggcatctttgtgaagtagaggatgatgttaccgtttctggtcttttttcartctctccagaagaacataagggatagttcagtgataggaaagtagagacctwcatctgttcctgtctttgtgccttgtctggcaaactgatcgttgcataattgcccatctgttttcacagttaactggaggaaaaagatgttccttctacagttattctgactgtacctagctctttgcttattgtgagataaaatcaagttaatttgcatttggtgtttgttggtgtgtttattggcgtgtaggtgtgtgtgttgcaggggtgtttcacaaaatgctctgtctaaagacttgagaattctctggtctcattttggtatttagtttgtcatttgagctttgtgtctcaaga

SEQ ID NO: 52518 - DNA, 600 bp, Chicken  19866894303122_1
gtagtgtcagttgtgtcagtgcactcacagccaggacagcatttgaatcaatgcatggagcaactttgttctgacttgaaggtacttcaaggaaagaaaaaaaaatagaactgcaatttgtgcatgaagctgtgggcatttcttcctgcggagacctgcttagtcattgttttcttccttcaagaccatttacctgtcaggataaaagtgcccaactatgtaataaatctcagtcaaaaactgtgataggatcttataggctggtttatgagatggctaggctgtggagccccagcctcygtgaacactgctcgtgtgtagactctggtttgaaaagctaggctgtttccactgatcttcttgctgccacattactttctcagaatgagtccacatgggacagggtgggtcatagaaacagcacacacgtgtttctaaggaaaagattgtatgctgctaccacttgtgccaaagcaaatacaaacaccctgctagaaacataagaattttgctcttagttttcattgatagggatgcttagagtctggaggcccagtctcatgtgctgggtgccaagccagttgtctcccagtgcaggct

SEQ ID NO: 52519 - DNA, 488 bp, Chicken  19866894303127_1
taacagatcaaacacctaaagtaaacattgtgcagaaattcatggaatttgtgtcacatgcatagtaacagattgatcttcacctctacagaaattcagagaatatctggaaggtagtaatctcatcacaaaacttcaagcaaaacatgacttgctgcaaagggcacttggagaaggtaaatattatataatatatgtaaatgtgattccaggctatacagtgaacccgctgaaatgcacgatgtatttaggagaaaatgaagaaacttagagcttaattgtcagctaagcatagatttytaaccagtcatagttgtgatacagtggtaagaatacagagaataaatcaattttatttcttcagcagatatttatttccactgtacaaatgtttagacaagtgactgtatgtgaaggtggaactgttgaatgaaaaatctcatgtctgaaaggagagctgatacaatcagtgcagggtgatttaagag

SEQ ID NO: 52520 - DNA, 600 bp, Chicken  19866894303131_1
tggggtcagattgctcagcctttgaagatggttccttggagtccttgatcctgattttctttgcctctttgaagtttctccttgatgtgtgtgcagtatctgggtgactcagttccctccctctccaagtgagatcagatcttgtttgccagctttgtctcacatcctcctgtgtagatagacagctgctatgtccacagtgtggccactgtgtccacaggctctgagtttctgtcccactccttattgttggtaggacattccacaggcatggaagtctttgagacatgtctgctttayggatgtggaatcctacagcccagcatcataggccccaggattcctaccaacctctgaaatgaggtgcttccctctctttctttcccagtttagtgtgcagagttccaaatcacctcagtaagaggtatctaagaaaagttcctttgccatcttttctccttgttcaggggcttctcccttgcccatgtcttttcctggagaactttccacctgccatctcccagggatgtgccagtgtgctggaagcagagctgttgggatgagctttagcaacagctccggatgcttccagctgcccat

SEQ ID NO: 52521 - DNA, 599 bp, Chicken  19866894303132_1
  misc_feature (1)..(127): n is any nucleotide
nnnnnnnnnnnnnnnnnnnnnnnnnnnnnnnnnnnnnnnnnnnnnnnnnnnnnnnnnnnnnnnnnnnnnnnnnnnnnnnnnnnnnnnnnnnnnnnnnnnnnnnnnnnnnnnnnnnnnnnnnnnnnnncaggaggttgggctggagactgcagagatctctttcaagccacagaactagatgtgcttacagtttttctggatactttatcatgggtgccaaacagccccataacctgtggtcttatctacccttatctgtagatttagcatgtcacaggaaacagccatgaaggtttgtcyaccccttgctgtcactatagttttgactgaagtgcacccataaaatcatagaatggcttgggctggaagggaccccaggaatcatcaagttccaaccccctgcctgtggmagggccaycaacctccaggtctgctacyagaccaggtcatcaggtactacaccatctcatcttctacacaaggcctaaacmccaccagaaaacmttccaggtagggtatwtgtgtggccacagtggtgttctcgatgttcccaatggtcaggcaatcgcccgttaacaactgaaatataactctccatt

SEQ ID NO: 52522 - DNA, 599 bp, Chicken  19866894303132_2
  misc_feature (1)..(17): n is any nucleotide
nnnnnnnnnnnnnnnnncaggaggttgggctggagactgcagagatctctttcaagccacagaactagatgtgcttacagtttttctggatactttatcatgggtgccaaacagccccataacctgtggtcttatctacccttatctgtagatttagcatgtcacaggaaacagccatgaaggtttgtcyaccccttgctgtcactatagttttgactgaagtgcacccataaaatcatagaatggcttgggctggaagggaccccaggaatcatcaagttccaaccccctgcctgtggmagggccaycaacctccaggtctgctacyagaccaggtcatcaggtactacaccatctcatcttctacacaaggcctaaacmccaccagaaaacmttccaggtagggtatwtgtgtggccacagtggtgttctcgatgttcccaatggtcaggcaatcgcccgttaacaactgaaatataactctccattcatttcataccaacatctgtttattcctggcaattttaactgaatctaatttaaacaatccagtttggaattattccattttaaataaaggctctgaagagatcaggctc

SEQ ID NO: 52523 - DNA, 599 bp, Chicken  19866894303132_3
  misc_feature (1)..(9): n is any nucleotide
nnnnnnnnncaggaggttgggctggagactgcagagatctctttcaagccacagaactagatgtgcttacagtttttctggatactttatcatgggtgccaaacagccccataacctgtggtcttatctacccttatctgtagatttagcatgtcacaggaaacagccatgaaggtttgtcyaccccttgctgtcactatagttttgactgaagtgcacccataaaatcatagaatggcttgggctggaagggaccccaggaatcatcaagttccaaccccctgcctgtggmagggccaycaacctccaggtctgctacyagaccaggtcatcaggtactacaccatctcatcttctacacaaggcctaaacmccaccagaaaacmttccaggtagggtatwtgtgtggccacagtggtgttctcgatgttcccaatggtcaggcaatcgcccgttaacaactgaaatataactctccattcatttcataccaacatctgtttattcctggcaattttaactgaatctaatttaaacaatccagtttggaattattccattttaaataaaggctctgaagagatcaggctctgtataac

SEQ ID NO: 52524 - DNA, 600 bp, Chicken  19866894303132_4
gctggagactgcagagatctctttcaagccacagaactagatgtgcttacagtttttctggatactttatcatgggtgccaaacagccccataacctgtggtcttatctacccttatctgtagatttagcatgtcacaggaaacagccatgaaggtttgtcyaccccttgctgtcactatagttttgactgaagtgcacccataaaatcatagaatggcttgggctggaagggaccccaggaatcatcaagttccaaccccctgcctgtggmagggccaycaacctccaggtctgctacyagaccaggtcatcaggtactacaccatctcatcttctacacaaggcctaaacmccaccagaaaacmttccaggtagggtatwtgtgtggccacagtggtgttctcgatgttcccaatggtcaggcaatcgcccgttaacaactgaaatataactctccattcatttcataccaacatctgtttattcctggcaattttaactgaatctaatttaaacaatccagtttggaattattccattttaaataaaggctctgaagagatcaggctctgtataacaatattacccgtgtcagcctt

SEQ ID NO: 52525 - DNA, 600 bp, Chicken  19866894303132_5
ttttctggatactttatcatgggtgccaaacagccccataacctgtggtcttatctacccttatctgtagatttagcatgtcacaggaaacagccatgaaggtttgtcyaccccttgctgtcactatagttttgactgaagtgcacccataaaatcatagaatggcttgggctggaagggaccccaggaatcatcaagttccaaccccctgcctgtggmagggccaycaacctccaggtctgctacyagaccaggtcatcaggtactacaccatctcatcttctacacaaggcctaaacmccaccagaaaacmttccaggtagggtatwtgtgtggccacagtggtgttctcgatgttcccaatggtcaggcaatcgcccgttaacaactgaaatataactctccattcatttcataccaacatctgtttattcctggcaattttaactgaatctaatttaaacaatccagtttggaattattccattttaaataaaggctctgaagagatcaggctctgtataacaatattacccgtgtcagccttaactagaacatttcttgcttcacatctgattcctctttcactgagaaggaaaa

SEQ ID NO: 52526 - DNA, 600 bp, Chicken  19866894303132_6
ttatcatgggtgccaaacagccccataacctgtggtcttatctacccttatctgtagatttagcatgtcacaggaaacagccatgaaggtttgtcyaccccttgctgtcactatagttttgactgaagtgcacccataaaatcatagaatggcttgggctggaagggaccccaggaatcatcaagttccaaccccctgcctgtggmagggccaycaacctccaggtctgctacyagaccaggtcatcaggtactacaccatctcatcttctacacaaggcctaaacmccaccagaaaacmttccaggtagggtatwtgtgtggccacagtggtgttctcgatgttcccaatggtcaggcaatcgcccgttaacaactgaaatataactctccattcatttcataccaacatctgtttattcctggcaattttaactgaatctaatttaaacaatccagtttggaattattccattttaaataaaggctctgaagagatcaggctctgtataacaatattacccgtgtcagccttaactagaacatttcttgcttcacatctgattcctctttcactgagaaggaaaactgctgaaatcct

SEQ ID NO: 52527 - DNA, 600 bp, Chicken  19866894303132_7
acagccccataacctgtggtcttatctacccttatctgtagatttagcatgtcacaggaaacagccatgaaggtttgtcyaccccttgctgtcactatagttttgactgaagtgcacccataaaatcatagaatggcttgggctggaagggaccccaggaatcatcaagttccaaccccctgcctgtggmagggccaycaacctccaggtctgctacyagaccaggtcatcaggtactacaccatctcatcttctacacaaggcctaaacmccaccagaaaacmttccaggtagggtatwtgtgtggccacagtggtgttctcgatgttcccaatggtcaggcaatcgcccgttaacaactgaaatataactctccattcatttcataccaacatctgtttattcctggcaattttaactgaatctaatttaaacaatccagtttggaattattccattttaaataaaggctctgaagagatcaggctctgtataacaatattacccgtgtcagccttaactagaacatttcttgcttcacatctgattcctctttcactgagaaggaaaactgctgaaatcctgtgtctccagtgcagc

SEQ ID NO: 52528 - DNA, 600 bp, Chicken  19866894303140_1
gagacttctgtgaaaagaaataaaaaatagaagtgttgaccaacgtattgatttcaattcttgtacacatctttgacctttgatctctcagaactttgtttctagtgaaaaacaagttactgatgttgtttaatttcatttcagtcacataattttccattttaattgtgcaggtacctctttcatgatgtgtctgtctgcaatttcacactccctcttcaagctttcactttagcatttaacatgtctaatgctttcaagaattcttctcaaatgatatcaccttcttgaagaatacartgtatgtactcatgcttggtagaccaaatagcttttttccaccttgttgattttttttctttttaataccctccaaaaagttttacgtaagcctgacaaataaatgtgtgcaatataccttgctggttttttttcaacaaatatcctgatcttcttagatcagtggaaaattacactattgatggttccccagaggcttttagcacttgattttgaacacttcagrccagagagttggataagtgacttcaatgattgtagtataaaatctaagcaaaacctacttctgcccctacttgg

SEQ ID NO: 52529 - DNA, 600 bp, Chicken  19866894303140_2
tcactttagcatttaacatgtctaatgctttcaagaattcttctcaaatgatatcaccttcttgaagaatacartgtatgtactcatgcttggtagaccaaatagcttttttccaccttgttgattttttttctttttaataccctccaaaaagttttacgtaagcctgacaaataaatgtgtgcaatataccttgctggttttttttcaacaaatatcctgatcttcttagatcagtggaaaattacactattgatggttccccagaggcttttagcacttgattttgaacacttcagrccagagagttggataagtgacttcaatgattgtagtataaaatctaagcaaaacctacttctgcccctacttgggcaggaaaggcttcaccctaaaaatatccatgcaagctattccttaactctggaaatccctmaactctatggttcttcatccaagcacttcatatttacagtttttcttttttgtacatactacagcaccttagtattgaccaggctgactacaagcatctgtctcatatctaaatttaatcagaatcaaaaattagatttctctgctgcttttggcagttctagc

SEQ ID NO: 52530 - DNA, 493 bp, Chicken  19866894303140_3
ttaataccctccaaaaagttttacgtaagcctgacaaataaatgtgtgcaatataccttgctggttttttttcaacaaatatcctgatcttcttagatcagtggaaaattacactattgatggttccccagaggcttttagcacttgattttgaacacttcagrccagagagttggataagtgacttcaatgattgtagtataaaatctaagcaaaacctacttctgcccctacttgggcaggaaaggcttcaccctaaaaatatccatgcaagctattccttaactctggaaatccctmaactctatggttcttcatccaagcacttcatatttacagtttttcttttttgtacatactacagcaccttagtattgaccaggctgactacaagcatctgtctcatatctaaatttaatcagaatcaaaaattagatttctctgctgcttttggcagttctagccctttattacaaatacaatcaatatattt

SEQ ID NO: 52531 - DNA, 600 bp, Chicken  19866894303141_1
tgtctttcttactgctaccctttaatattgaaaggccacaaggagatctccccaaagcctttgccagactaaacaagcccagctccctcagcctgtctcccaagagaggtgctccagccctaggagcacccttgtggcctcctctgaacctagcaagtccctgttccttttgtgttgggtctctagagctgaacacagtgctgcaggtggggtctcacaagggcagagggggagaatccccttccaacaaggaaggattgaggattgagatgtctgtgaggagcaagtgaatgggggtgrtgaggcttaaggtaactcctccttgcaccttgcagcccagctatgtgtcttgtgttgctgtgatgcaatagtgaaggattatattgttaagagacagttggataagcaagtagagtctgcaaaacataatgctcagcaagtcagcaccagctgcctgagtatgtgaggtcaaactagaggagtatggagacttgtgaacaaggcaagatgatctcagcaggtctgttttcaggttgtgttggagggccgtggataggggggagtgtagaaaggggtgggggaggaggtcagcagtggtga

SEQ ID NO: 52532 - DNA, 600 bp, Chicken  19866894303142_1
atcaaagatccgtctgcctatgcaggtatgagaaagatcctcatgataaatgcagagaaatgatctgatgggaggagaaaagtgatgttttccaaaaccgctgctttgtcagaggttgctgacctaccatgcagtttgcccagcactatgagcacagggcagacactctctggtgctgttatttgctcttggagacactcacctcataaggacagaggtcaaaggaaggaaaataggtagttgttgtcctttaaagctgagccaaataaggatgtatgcctggttgatacatagaagccsacagcagagagacttcacagaagctgactgcactgaaggacagggctgcacctgttgggctttcagggctgctgtaaacaaaagcagattaaaaaccagtgaaagattggagcctttctatggggcagaaagatctttgtggcagcaactttgttgctgagggtgcagggagctcagaagaactgaaacaatgttatgctgctggcagagctaatgtagcttacaggtcacatgaaaataacaccgttttgttwaacagccatcctggtacgtccagtgcctcctcttcaacctgtgcca

SEQ ID NO: 52533 - DNA, 480 bp, Chicken  19866894303142_2
agctgagccaaataaggatgtatgcctggttgatacatagaagccsacagcagagagacttcacagaagctgactgcactgaaggacagggctgcacctgttgggctttcagggctgctgtaaacaaaagcagattaaaaaccagtgaaagattggagcctttctatggggcagaaagatctttgtggcagcaactttgttgctgagggtgcagggagctcagaagaactgaaacaatgttatgctgctggcagagctaatgtagcttacaggtcacatgaaaataacaccgttttgttwaacagccatcctggtacgtccagtgcctcctcttcaacctgtgccaagaggtgaaccgagtcggcggtcacactctgccaaaggtcaccttgcaggagctgctgaaggcctgcatggcagaagtgcttgctgcctatgaaaagctcatggacgagaagcaggacaaggtacttgagtagg

SEQ ID NO: 52534 - DNA, 599 bp, Chicken  19866894303146_1
  misc_feature (1)..(29): n is any nucleotide
nnnnnnnnnnnnnnnnnnnnnnnnnnnnncccacttagtggggagtgccaattaaaaggaaggctatttgctgccttgctgcactgaattctgagagatgctggaggtccaaacggcgcttcaaggttccctgtgcaggggtaggaaaaacaattttaaagaaaaacaggaagatacagcaggaaagacaacaagatatagcagaaaaatatttatttcatcaccctcatagaagtttttacatctttgtacataaaacggactgaattaaaaactgcttccttaaaaaaatctattccmcagggtgagaattacagtggaaaaccctgtatgcaaacctatgccccacactaacataaaacaaatacagggataaaaagcagagcataataactttgttaaataaccaagttacagcattaaaatcacaacccatgtttaaatggcttaaatacagtaattaattttccttttgtgattctatgtaagccatagcagtgtctgacatccccgcggtaaccagcaccgtacatgattttaaaagctgcacacatcacaacacacttgatcagaagctgatttcccaggacagtgctgtg

SEQ ID NO: 52535 - DNA, 600 bp, Chicken  19866894303147_1
agtgatgctcagctgatgttaaatttgcaggaagggaaaacaaaaaaacatgatgtcctgacatccgatccctttctaagtattactcccacatccaatttactttcacagaaggaaatccaagtcaagagctgccactatgaaaggcacgagcttagttctaatactccatcaggatgctggcagtgagatatattcaaaggcagctggaagaaactactgcatctgaaggcttaaatgtataagagctctgaaaaaatctatcagtgcctttggtcaggaaaaaacacagcactgcartctttcactcaggactgaaagagttytgctgactgttaccagcatcatggactcttgcagcactggtagcagaaccactgcagcaacacaagcagatctgttcatctggaacaggtgagactgcccacagarcccagtgttctgggggttcatactttagatgctaagtgtgtgaataatgattggacagttattattttctgctacaaacttactctgtccagaaactagaacccataactccatcaacttcaagggatttaatattcatatctgcaagaaaagccacagccatgcagt

SEQ ID NO: 52536 - DNA, 600 bp, Chicken  19866894303147_2
gcaggaagggaaaacaaaaaaacatgatgtcctgacatccgatccctttctaagtattactcccacatccaatttactttcacagaaggaaatccaagtcaagagctgccactatgaaaggcacgagcttagttctaatactccatcaggatgctggcagtgagatatattcaaaggcagctggaagaaactactgcatctgaaggcttaaatgtataagagctctgaaaaaatctatcagtgcctttggtcaggaaaaaacacagcactgcartctttcactcaggactgaaagagttytgctgactgttaccagcatcatggactcttgcagcactggtagcagaaccactgcagcaacacaagcagatctgttcatctggaacaggtgagactgcccacagarcccagtgttctgggggttcatactttagatgctaagtgtgtgaataatgattggacagttattattttctgctacaaacttactctgtccagaaactagaacccataactccatcaacttcaagggatttaatattcatatctgcaagaaaagccacagccatgcagtgagcaaacttgaaaggtaacctgact

SEQ ID NO: 52537 - DNA, 545 bp, Chicken  19866894303147_3
tgccactatgaaaggcacgagcttagttctaatactccatcaggatgctggcagtgagatatattcaaaggcagctggaagaaactactgcatctgaaggcttaaatgtataagagctctgaaaaaatctatcagtgcctttggtcaggaaaaaacacagcactgcartctttcactcaggactgaaagagttytgctgactgttaccagcatcatggactcttgcagcactggtagcagaaccactgcagcaacacaagcagatctgttcatctggaacaggtgagactgcccacagarcccagtgttctgggggttcatactttagatgctaagtgtgtgaataatgattggacagttattattttctgctacaaacttactctgtccagaaactagaacccataactccatcaacttcaagggatttaatattcatatctgcaagaaaagccacagccatgcagtgagcaaacttgaaaggtaacctgactgtataactatgctgtgcaatatggccttctttcctctatcatcatacttgg

SEQ ID NO: 52538 - DNA, 600 bp, Chicken  19866894303150_1
cactagctgtccaagaagaggctgggttattacgatgagtcccccttccacaagattgacatttcccccttcccccccgcccccacgtctcagttcttttacgcatgcgtggtatctcttgctggttgtctggtggtctttctgatgaaggccatggtcttcctcactgtgttctttcacctggctttggccggtcctctcatcggctacaactccgtccaccaattcgttgcttctttgttaatttgtggtttactgtcctagcctgctgtctgcattccagacgtagggtacctgaayggtgtcacttggaggaacaggagacccgctgtctgcactcgttgtctaagcctgtagaaaagcatckgttatcggcagccaaaagctggcttcacaaggccacatctgcagctgccaattcagcacgccatgaaagcacatagcttttaacctgacctattttccttaattcaaggcttgtccaatgtgtgagtctgctgcctgataggagtgcatcttgctgtccgtgttggccttcatgagcgctgccaggcgggagaacctctgtccgccagatgtgccctcctggctgtagaggtc

SEQ ID NO: 52539 - DNA, 600 bp, Chicken  19866894303150_2
ccttcccccccgcccccacgtctcagttcttttacgcatgcgtggtatctcttgctggttgtctggtggtctttctgatgaaggccatggtcttcctcactgtgttctttcacctggctttggccggtcctctcatcggctacaactccgtccaccaattcgttgcttctttgttaatttgtggtttactgtcctagcctgctgtctgcattccagacgtagggtacctgaayggtgtcacttggaggaacaggagacccgctgtctgcactcgttgtctaagcctgtagaaaagcatckgttatcggcagccaaaagctggcttcacaaggccacatctgcagctgccaattcagcacgccatgaaagcacatagcttttaacctgacctattttccttaattcaaggcttgtccaatgtgtgagtctgctgcctgataggagtgcatcttgctgtccgtgttggccttcatgagcgctgccaggcgggagaacctctgtccgccagatgtgccctcctggctgtagaggtcctcgagcaaggcgaggcatctgctccgctgaaccagccaggcttgcttcttcctcctgccacgcaag

SEQ ID NO: 52540 - DNA, 600 bp, Chicken  19866894303150_3
cagccaaaagctggcttcacaaggccacatctgcagctgccaattcagcacgccatgaaagcacatagcttttaacctgacctattttccttaattcaaggcttgtccaatgtgtgagtctgctgcctgataggagtgcatcttgctgtccgtgttggccttcatgagcgctgccaggcgggagaacctctgtccgccagatgtgccctcctggctgtagaggtcctcgagcaaggcgaggcatctgctccgctgaaccagccaggcttgcttcttcctcctgccacgcaagagaaaccrttgggcccagaggcacagctgtggagcactgagtcagacagggcaagggaaagcagggcggtggggctagccagatagattgctggaagaaaggatttatctagatgactccgtgacagcatccgtcagcacaagctgctttttacccaaaggtgtgcattcttctcctgtgctgtgcaggggaggcagcgtgaggcagcgccatccctggctctacccacacatcccgcctgaatgcctcagtcctgctaaggcttgggaaatgggctgaaacccgggcaggcctgggcctggatgcgt

SEQ ID NO: 52541 - DNA, 600 bp, Chicken  19866894303153_1
accagctcatttcagacaagcaaggcaacaccttcacattggcatacaaagggatttataattcacagtagtatcaccaccatttttatttaagatatcactttgacattcaaaaccactgccattaagttctttgtaaacaacagcagaatttacctagggctcacatcattaatttgcaggtgccttcagcccagcttcctgctgtgcatctgccagagcacacatggggcagtgccagggtaaggctgagctccagtgacccaggtgaggaacccacagctgctctgagacacaccrggcactccagataatgaagtagttttgtacacagcactgctgatacttgaattttagctaggcttattattacttttaagtgtttaatgagcccagcagagctgcccccgctctccaccacccactggtggaacatgaggtggctattccttccaaaggccaggatgtccccacgcagtgcccataggggatggtgacatgcactgccagtacctacagtcaccaactgtgctggttttatggcactgcaaagccccaagagcccctgaggtccagaaattaactgtattcttttcctga

SEQ ID NO: 52542 - DNA, 600 bp, Chicken  19866894303158_1
tcttgttcttgttctagagtaggatgtatgttgctcctatacctgaagatcagaaatttattgctgcctttggagatgactcttcaacaagagacatatcttgtcaagttgtgaacagtgggtatctacagctcgactgaacttcttgttttcaaaaaatgaaaaattcactgagatttctatttttcctctacagcaattttatttctgtctggttaaaatgtgttccttacacacgtatctatttcaaaacattaactgatagaacagacaaggtccttaaagaaataaagagtctargaagaaagagaattaaagcaaatatattgatcattatacaggagaataatatttacaaacatttcttaatggctgtctttgttttcagaattcataatagctcagcatgttgtgaagacaacagagtaggcagaactcatcagtaattacaaattctgtcaaccttgttaacaaaaatggaagaatgaaactgcattcctgcaaaactcagaatcaatcagaacacagaattgagctgtcacagatgacaaccatacttctgcctaagccaggagcagatggagatatttcattattggt

SEQ ID NO: 52543 - DNA, 600 bp, Chicken  19866894303160_1
tgtgttgaagtagctagccattgtgcttgtcaagaaaaattatttatcccttacaagtgggtttgtatttgcctatgtagagcttgatggaggatttaaacaactgcctacttgcaagcttgatcagcatattcatatgaaaattggtgcccataaaatacctcaacaacaccaaacagctactagttattccagttaaaatgcctatgacaaccttaatgtcaaaaataacattctaagataaatttccctctaaggcttagagaactgtagaggtgtaagaagatttagagcatacgyatgaatatgcaaaatacctgttcttagccagttctaatttttggcttacactgttgtaaagaaaatcctgaaatgtgactcggagaaagccactgtaacatctgtcagcaaggtctgaatgaactggcaagcagcctcatgatgagtcctttttcagtcttgctgaaaagctctcctctgtgtggctattttccatacaatattcagcagtgctctgaatacgaaatgtgatgtgggaacattcaattaacgcaattaagtaagacacaatcatgtttcacgctaatcatttccacaatc

SEQ ID NO: 52544 - DNA, 600 bp, Chicken  19866894303161_1
ggtttctacatagcagatattgttttcataaggggaagaccaaaatacagccagtgactgaataaccacatttcctgcagccagggtgggcgctgccacaggggacgtgccataggggctggatgagctggacttcccccttaacatgttctgagtttaaagaatctcatgcccactcttccaaacagtgtaggaatccacctgagtattcattttgaattcatttttccagctcttgtgaaacccacagtgctctgccttttggctctgtcttgcccagagacccccgagcaaccctcrtgtttcctctcacaccgtcctgcttgcttggagaaactcacattgtgtgaaaagaggaaattcttgtaaaaagcccctggctctcttaaattccccttcagctgttgcaatttgagcaagcctcagcacttcctgatttctgcagatcccctcactgcaaacagccaggttcagctctgcccaaaggtttggccggggtttctttcaaaatcaagctaacattgttgcccccagctaaagacacaacgtgttgttcagcacaaggctgtttcctgcagtgccarccctgctgcatccatg

SEQ ID NO: 52545 - DNA, 423 bp, Chicken  19866894303161_2
ccccgagcaaccctcrtgtttcctctcacaccgtcctgcttgcttggagaaactcacattgtgtgaaaagaggaaattcttgtaaaaagcccctggctctcttaaattccccttcagctgttgcaatttgagcaagcctcagcacttcctgatttctgcagatcccctcactgcaaacagccaggttcagctctgcccaaaggtttggccggggtttctttcaaaatcaagctaacattgttgcccccagctaaagacacaacgtgttgttcagcacaaggctgtttcctgcagtgccarccctgctgcatccatgcaccgagcagaactgtcacagcccgcacctgcagtgggcttgctgcagggagggttcactgtagggtttgggcaaaatgataatctcagcaggaagtgagggaaggg

SEQ ID NO: 52546 - DNA, 600 bp, Chicken  19866894303162_1
tctgacagtgagctgcctggctgtgctgaaattgttgcgcggggaaaccgtagtgattccactgctgcctgctctgtgcagattccaggtgcctgtgaccaagtgcagttgttgattaatattttgcaaataataataataatagcaaaggtgagtgtaatgacattcttcatgtaggtgtgagcaggtggtggggagtgcttttcctccacagttccccatcacttgtctccttggattacactgccacagctgttttcaataggtgggtttgggttattaatgcctgttttgtgctcrgctcagctccctgagagcgttcaggtccagcaggcagagccctgtggtgaggacaggaacaccgtgaccttgctgagagcaggtggatgcggacggggctgtgctgtccccgcactgtgcactgctgccagaggcaccctgtgacgcccagggattgtttggtgcagaggtagggagcacacaccttgtttacagtagttgcagagcatgacagtgagcaaacacaccattctcgtgcgctaccactgaagtatttcagatgtttttgtgctttcaagctggaatttgttggctgaaagc

SEQ ID NO: 52547 - DNA, 581 bp, Chicken  19866894303180_1
tttatattatgttagcatttacaattaaattcatattgcaatgaaaacaactgttaaaggcttaaatttaacgaatagcatttccaatgtgcaaaatgaaatgttccattaaaaaaatgtaataaaatgaaactaaggcagaagggaggctagaactgacatattatgtcagcctcagaaggtctgtggtgcattgacggctctgtgttttaactgtcaggtttgctttattcattgtgattgaaaaatagtatatgcaaattttaaaaaccataagtaaaatagcaacttcagttccarattagaatttacacagatccactcttatgcttggtctatttcctactgacatcacttggyctttgtagaggcaaatgaggtggtgcaagactggagcttagctaggaaataagagcttactcagccatgctttatgaattttcatattaaaatattcaactggaattttttcaatttttaacaattgtttatgacagaataatcttttgaggttttactggcaaagggtaatattttctttttcatcaatgtattagaaagcattaaaagttagaaaggta

SEQ ID NO: 52548 - DNA, 521 bp, Chicken  19866894303180_2
cttaaatttaacgaatagcatttccaatgtgcaaaatgaaatgttccattaaaaaaatgtaataaaatgaaactaaggcagaagggaggctagaactgacatattatgtcagcctcagaaggtctgtggtgcattgacggctctgtgttttaactgtcaggtttgctttattcattgtgattgaaaaatagtatatgcaaattttaaaaaccataagtaaaatagcaacttcagttccarattagaatttacacagatccactcttatgcttggtctatttcctactgacatcacttggyctttgtagaggcaaatgaggtggtgcaagactggagcttagctaggaaataagagcttactcagccatgctttatgaattttcatattaaaatattcaactggaattttttcaatttttaacaattgtttatgacagaataatcttttgaggttttactggcaaagggtaatattttctttttcatcaatgtattagaaagcattaaaagttagaaaggta

SEQ ID NO: 52549 - DNA, 600 bp, Chicken  19866894303188_1
cagcgctccaatctctgcaagatcagagatttttaagtttccttacagcacgagaaggacacaaggtaagaaatccctctcttcacggcacctctttcaccttgctaagaaggagcacccacctgagctctgtgcccacagccctgctccctcccccagcatcacagtaataccaacaatagaaccctccagggccacgactaccccactgctgcagaggaatcccaaaatatccacttctgaagagctgacacaggaacagagcaacgcatgacacacgtgtcactaagctctatgcartccctgagtgggatgtcacggygtggcatgctctattctaccttcaccacccagggatcgcagagcaattaagcagcgtttcactttggggctgtgcattttctccttcagcttcacttattttccactcatctctgggctgagcactgcccctgcccacctagcgagcctacttctcagggcaggagtgagcagattcaaacactaatgaagctccaaattagagaagtgcagagctgacaccctcaacgctccagctggcccagaacaagcacgctttgcacagacacggaggacaaa

SEQ ID NO: 52550 - DNA, 600 bp, Chicken  19866894303188_2
tcagagatttttaagtttccttacagcacgagaaggacacaaggtaagaaatccctctcttcacggcacctctttcaccttgctaagaaggagcacccacctgagctctgtgcccacagccctgctccctcccccagcatcacagtaataccaacaatagaaccctccagggccacgactaccccactgctgcagaggaatcccaaaatatccacttctgaagagctgacacaggaacagagcaacgcatgacacacgtgtcactaagctctatgcartccctgagtgggatgtcacggygtggcatgctctattctaccttcaccacccagggatcgcagagcaattaagcagcgtttcactttggggctgtgcattttctccttcagcttcacttattttccactcatctctgggctgagcactgcccctgcccacctagcgagcctacttctcagggcaggagtgagcagattcaaacactaatgaagctccaaattagagaagtgcagagctgacaccctcaacgctccagctggcccagaacaagcacgctttgcacagacacggaggacaaagggaaacctgaaggggaaaatt

SEQ ID NO: 52551 - DNA, 599 bp, Chicken  19866894303193_1
  misc_feature (1)..(48): n is any nucleotide
nnnnnnnnnnnnnnnnnnnnnnnnnnnnnnnnnnnnnnnnnnnnnnnngttcagagctgagatttttagatccaggacagtttgtggaggtagctggtgggaatggaaggccggcattccaaccagtttggtgcagtttgctttcttcacatgccgtgcagttggggttctttaattttcttatttaataatcattccactgtaaaatgcatttgtgaagagcagctctcgttctccttggcatgctgtacgcatgctggaaagcattgagttctttttgcagcacaaggaaacgtcccrgtgcttggtggaacttgggtgagtgctgctcatgtggaagcagttaagacatctggtaaagctgtatgatagcacttccacagcagtgttattggagcttggagcagccagtgtaataatgctttagtgtctgtaaggggggaaacaaaaagagggcaataaactcctaagaatggcgctaagtaaaaatccccaaagtaaatgatattttctttatgaatttgctttaatctcctgtagagatgcttccctgatgctccctccatcccctgtgatgtagggctccattcgtgytgagg

SEQ ID NO: 52552 - DNA, 544 bp, Chicken  19866894303193_2
gtcccrgtgcttggtggaacttgggtgagtgctgctcatgtggaagcagttaagacatctggtaaagctgtatgatagcacttccacagcagtgttattggagcttggagcagccagtgtaataatgctttagtgtctgtaaggggggaaacaaaaagagggcaataaactcctaagaatggcgctaagtaaaaatccccaaagtaaatgatattttctttatgaatttgctttaatctcctgtagagatgcttccctgatgctccctccatcccctgtgatgtagggctccattcgtgytgaggattgaggtcatgctgtaacacaagtctccggtccttgcactgacagcacagcacaagagatgtccttctgttctttgatagatggtcacgctgtttcccttgcagtggcattagagtccttcacataggtgggatggcaccttcctattgaagcaaatgtctttaatctcttcagttgggatgggatgtgtgtaggaagggtgcatccctttcatgaatgaattttgtgtaacagcaga

SEQ ID NO: 52553 - DNA, 599 bp, Chicken  19866894303195_1
  misc_feature (1)..(70): n is any nucleotide
nnnnnnnnnnnnnnnnnnnnnnnnnnnnnnnnnnnnnnnnnnnnnnnnnnnnnnnnnnnnnnnnnnnnnngattgctgcaggtaaggagccagcgctgttccagcagcgttaggcagcagtgcaagtggtgggcagcaaaatctccttcttcaaaacaatgagtaattgcattttcccgtgattcagattgttcgctgtgataaaccccacaattttctttgtcggtctgctgcaggctgtggtttggtgccatggatggcacagaggctgggtgaggggcagtctcagagcaccttcawtctcctcctgcagatgaggtgagtgggggctgccccgtgagcagggaccctgaccttgttatcagcttgaaataccctagggattgtgtgtgaggtttggtttcattgtggtttgttcagatttgtcttattatgctctttttctccaagtttacagttggaaagggagaagcagagcaggctttgggatacataaatgtctttattgggctattgcataatgtaatgctattcgaatctaaggacagcagtgtaaatctcagtgaaacaaactcatttcagaaagattatatatatgt

SEQ ID NO: 52554 - DNA, 600 bp, Chicken  19866894303199_1
tctggcggagaacacgtgagttcacacgtgtactgagatgtgaattatcacacatccctttccttaaacctaagatctctgcagaaaatatagctaataaggtttcaaaaatatatggtaggggcatgtccaacacttcaaagggacaggaagcaaaccgtgataatcaattcatcaaacaccacttccaaatgagaccaaatggattgtaaacgacaataaggaaagacaaagtgttctttagtagctttctgctcctaagaaggctagattttactatggtctaagagaggggaaaayatcactcacctatatatgattaaagaagcaataagcagcaaaatgaacaagatgctgagaaggcctccaatgatgtagctaacatgcagtccctcacctgaaagagaacagcaagggaacactctccttaacttccactggataacactgacatcagtataacatcttatacagaattataaaaaccatatggaagtatgtgaagcaaaatgtcagcatgctgagctttagcaaagtcttttatttggtgatatgaacaaagcctttcttcccacccaggtcccagcaaaccaggagcat

SEQ ID NO: 52555 - DNA, 599 bp, Chicken  19866894303201_1
  misc_feature (1)..(124): n is any nucleotide
nnnnnnnnnnnnnnnnnnnnnnnnnnnnnnnnnnnnnnnnnnnnnnnnnnnnnnnnnnnnnnnnnnnnnnnnnnnnnnnnnnnnnnnnnnnnnnnnnnnnnnnnnnnnnnnnnnnnnnnnnnnntttgattggtgatagaggaagatgtatttgaagtagaaatgtggtgcctttttttgtttgtttgtttcccatatcgggtaatgagtaaccactggtacaaaacttgcctacagtgaaaggggatttctgacttgaagtctttgaaaccaggccagatgtctttctaagtgaaatgytgcagctcagctagaaatgacaagctagaggcaggaaccacttgttgaaattcaatgacctctgtaatacaggaccacagagctgaagatccttacagtgtcataagaatcctgcttttatttatttgtattaaagtaatgcttagatccaaataacatctgcttgcaggaaaaaaaagaaaaagaaaaaagaaaaaaaaaagaaaacaacacatttgtgaaaatttttatgttaaaactaaaattgctattttctgttaaccattgtacacatacagctagtgaaaacagatagtctc

SEQ ID NO: 52556 - DNA, 600 bp, Chicken  19866894303213_1
ttcagctcagtaacatactgtgctttgtttcctttattcagggatccaactacattttatacattaacctaagcctttcaccagcacaattaattcagcaaactggactattcatagggccgttgttgctgaaagatgtgcaatatgagctactaaaatatataagcaacaacataagggactgcagagtggattggcagaaagtaattaagtgagctggaaactggccaggatggtaaaatgaattcgtttgtttgggtttcttttttccaaatggccagaagtggtccaggcttcacrttgctgcccagctctgtgtaatagctgggagaagcagtcttctctgcttcaggatggcagcaaacccattggacacgccttggcatatatggggtgagaggcaacgtgctctttccaaggacccaaacatttttgtgtacagcaaccagtgcagctgggtgcagacctcacctgtgatctctggaagagcagaagaggactgcagctgctgagtcagggagctagcatctccctgtctccagttcttgtagactcccaaaccctgtagttcacctgcacagcccccactgcaggagctgc

SEQ ID NO: 52557 - DNA, 599 bp, Chicken  19866894303218_1
  misc_feature (1)..(77): n is any nucleotide
nnnnnnnnnnnnnnnnnnnnnnnnnnnnnnnnnnnnnnnnnnnnnnnnnnnnnnnnnnnnnnnnnnnnnnnnnnnnncaaccttaaatctctttttggataactgctaaatagttcttctgtttcctcctcccccccccccccccctttttttttaatagcacgagatgagaacatggccactttccgtggttccgaatacctttgctatgacctgtctcagaaccctatccagagcagcagcgatgagatcactctctccttcaagacatggcaacgcaacgggctcattctgcacacyggcaagtctgctgattatgtcaacctggccctgaaagatggtgcggtctcactggtcattaacctggggtctggggccttcgaggccattgtggagcctgtcaatggcaaattcaatgacaacgcatggcatgacgttaaggtgacgcgcaacttgcggcaggtaatgttgaaggagagaaagtgctggggaaaactttgttctcttatgtttggacagaggtggatatgagggagaaatggggatgcttggtgggatcaccagagtttcttcttctcttccagttattggtatgatga

SEQ ID NO: 52558 - DNA, 600 bp, Chicken  19866894303233_1
tccagagaagacagaaaagatcaataactctcaaatttacgatgaccatttaactcgtagcatttcctacagcagatgacagacatctccatttattatttttgtcagaaaacactgtcctgtatggtttactgcataacctgtgttgttcaccactgtcaaaatgaaagcaagtaaatcaccagggcactcactctatttccatcttggctggtttgatttctgtgcttgcacttccccggcagagaggaggcaggcatggtgctcagcagttcccaccgccgctcagtacagggatcygcacagcaagaagcaatgctgcttcagctcatttgggaaacaaaagctgcattcccttcttcagggaggaggagacactttggccaactcttgctatctttcacctgsataagrttgtgacaagaactaggaagctgtgcagcaaggtatgagtcctcacaaataaactaaaggtgtgctgacagtctggtcatcaatactgcatggaaataatccttcatcaacagagagctattggctgaggcacccacctttcagattgaatttgctaaaccttacctgcaggcaagccacatgatc

SEQ ID NO: 52559 - DNA, 600 bp, Chicken  19866894303233_2
aaaacactgtcctgtatggtttactgcataacctgtgttgttcaccactgtcaaaatgaaagcaagtaaatcaccagggcactcactctatttccatcttggctggtttgatttctgtgcttgcacttccccggcagagaggaggcaggcatggtgctcagcagttcccaccgccgctcagtacagggatcygcacagcaagaagcaatgctgcttcagctcatttgggaaacaaaagctgcattcccttcttcagggaggaggagacactttggccaactcttgctatctttcacctgsataagrttgtgacaagaactaggaagctgtgcagcaaggtatgagtcctcacaaataaactaaaggtgtgctgacagtctggtcatcaatactgcatggaaataatccttcatcaacagagagctattggctgaggcacccacctttcagattgaatttgctaaaccttacctgcaggcaagccacatgatcagcctgctattcccacaaggttatctaccatgtaactaggaagagcaggccctgttgacaagactgtggctggacgatctccagccacttccctacccctcccacacc

SEQ ID NO: 52560 - DNA, 600 bp, Chicken  19866894303233_3
ctgtcctgtatggtttactgcataacctgtgttgttcaccactgtcaaaatgaaagcaagtaaatcaccagggcactcactctatttccatcttggctggtttgatttctgtgcttgcacttccccggcagagaggaggcaggcatggtgctcagcagttcccaccgccgctcagtacagggatcygcacagcaagaagcaatgctgcttcagctcatttgggaaacaaaagctgcattcccttcttcagggaggaggagacactttggccaactcttgctatctttcacctgsataagrttgtgacaagaactaggaagctgtgcagcaaggtatgagtcctcacaaataaactaaaggtgtgctgacagtctggtcatcaatactgcatggaaataatccttcatcaacagagagctattggctgaggcacccacctttcagattgaatttgctaaaccttacctgcaggcaagccacatgatcagcctgctattcccacaaggttatctaccatgtaactaggaagagcaggccctgttgacaagactgtggctggacgatctccagccacttccctacccctcccacaccaggcag

SEQ ID NO: 52561 - DNA, 600 bp, Chicken  19866894303245_1
cagttacttttctccaggagtcagtaaacgttagggcaaagcctgtttgcatctgagatcttcagagatacgtctcctaactaatgacaggaatacagataggcactcacgtggatctaatctgaaagctggcattttagtttaatattccccagaattatgtggacaacttgggcatgccaaagcagaactgtcacaagtacgtgggtaggcagatgcataatgtacacatgctatgtttaaagaaaaaaaggtaaaaggtaatatttttgataaattgatctggcgtgcatgtccttytgtgtattcattctttctgacttgggtgctgcttgcctgtttgaatgtaaggctaataacaggcacttgaagccagtgtgttacaggatcacagagtggatgagatttgaaggtgcccctggagactgccagtgcagcctcctgctccaggcagggtcagtggaagcagggtgctcaggactgtgcccaggcaagtgtgggtgtttccaagggtggagactgtgaacctctgagtaatttgttctattttttttaccaccttcagagaaaaaaacaaaaatccctgtcatgtttaaacaa

SEQ ID NO: 52562 - DNA, 600 bp, Chicken  19866894303245_2
tcttctttatgctccctcagcaaatactgagacattctgataagctcaccccttagccttctggtcttcaagctcagttctcagcttcttgtgtgacagattctggcccatgtagctgtctttatgacgctttgctggacttgctccagtatatctgtgcccttttagtatgaacacgtccagtactgaatacagtgctgcagatgtcctaccagcactaagcagaagggaagtaattacctccctcagcctgctggtggcagcatgcattcttggagtatgaacttctatggcttaaaycccagatgctgaaaagagcctctggatgctgtctcattttgggccatcgtgtgcctgctgcatggatgctgaaaacctcagtgcagctgaatcaggatctgcttgctgtctgtgcctgctggcaggaggctgctattcatcctcagtgtaatttagcatgtcacctgttgatttcaacagcagtgtttagtttgtgctagttccaaccacctgtgagaagagtrgggataaatttctcaggatctctctccaacctggaacaagaatttctaaaaaatacagtgtctgcaaaggcttata

SEQ ID NO: 52563 - DNA, 600 bp, Chicken  19866894303245_3
gaagggaagtaattacctccctcagcctgctggtggcagcatgcattcttggagtatgaacttctatggcttaaaycccagatgctgaaaagagcctctggatgctgtctcattttgggccatcgtgtgcctgctgcatggatgctgaaaacctcagtgcagctgaatcaggatctgcttgctgtctgtgcctgctggcaggaggctgctattcatcctcagtgtaatttagcatgtcacctgttgatttcaacagcagtgtttagtttgtgctagttccaaccacctgtgagaagagtrgggataaatttctcaggatctctctccaacctggaacaagaatttctaaaaaatacagtgtctgcaaaggcttatatcacttaaacgaataaatagaattatgacaccagcatgacatggtcctgctttttgttggatttctctttgattttttttttaatgttctggtgccaacagtgctaacagctgaatgttctggtgttacagtacgtcctcagcacagcattttctttattgtgcatgttggcaccttaaacctttaaacagcagtgtttttacatagacagcagggatgtttgt

SEQ ID NO: 52564 - DNA, 600 bp, Chicken  19866894303254_1
cactgaccttgatcccattcactagagtagagccaccctttcattttatgctggggcaaatccgtgaaagaaaccatgctgcactgtctgaaaagcatgggtttgggtttccaggcccaacggccccctaccagatcaaagaccttgctaatgaccacaggaaagcaaaaaagtttgttagatgtctgcacaccgctggaaaagctaacacaagtgttttcagaggttgtacagatgcagaggataaaatccagggtgtgcatgtggccatttcctcagctctgagaacctcattcaacrcgagcatgaaaagtcttcaaatcccaaactttgatcccagtggttgttgcagcctcgcatgcccatggctcaactccttcatctcctgcagtggcactgtacagcaaccatgccctgttggctggtttagccttgatgtttggctgctcttttttttcctgtttaccaagtcaagcaaacctcaataaaattacatcttggaggtgagagggggtgagtgtggggagatgtgtggcaggacggattttcctctaaagctaaaatgtgctgtgcttgatttttttttttcttctgtactgg

SEQ ID NO: 52565 - DNA, 600 bp, Chicken  19866894303256_1
gaaaagggagtcacccagcagtgggcctgagtggaggagagcaagtggttgcctttaggcagctcaaagactcagccctaggaaaggcagcaatagcaattaggtaatcacactgatgggttgtatacccactgatggttttggtgaactgagaagaaataacagtaatgtgctcaagatgctgtccagagagaataagctgcatttgtgtctcaaaggctgtatccaaggaaatataaatggaaatcaatgaaaagtgaaataacaaaagttcagggcagatgggacacatggttgtgstacaaaatctgagacatagcatacctaggacatttgaaaagaactataggcgagacaccaaaaatcatggttaaaagaatgctgttgagtagggcagaagggcttttatttgcttgcaactttgcgttacaatatatatatattttaagcctcattatcattaagtctccatgactggaggagagtgtgagctatggtgaggtatcggaggtatccattccccaggccaggaaaggccacctgtgtggctgcacatccactgccacagtgctccaggctgaagtgcagagccgtgtaccc

SEQ ID NO: 52566 - DNA, 600 bp, Chicken  19866894303256_2
accaccaacaaaaaaaaacctgacagcacattgctcttttctcaccattgtttagggaaaaaacatgtattaattatctgtatcttggcatctagaacattctccaccctcctgcaagtgacattttgcctcagaatgggttgcaaattgttcatagcattattaatgtcagtgtttgaaaaatttgtctaatactctgctttgtgtagaaactatgcagacatggtatattttcctagaactgtattaagtacagttctaaatgtacttaataaagacataaaggatacacaatacagmaaatcaataagaatcttgtagactgggtgcatctgttttttagagtctgacagtaggaagatgatacagttactggttttgatttctgtggctaatagaaaacttcatcttttcttgaaatgatctgcataagcattgtgacaaaccagcatttaatttcatgttgataaaattcttaaatacattgctgacatccrggaagaaaactttgatcttgagcttgtaaataaaaaacaaagtcagtaagaagttgtttcataactgtcaggtggtttgatggttagtgacataattcttcac

SEQ ID NO: 52567 - DNA, 600 bp, Chicken  19866894303256_3
tgctttgtgtagaaactatgcagacatggtatattttcctagaactgtattaagtacagttctaaatgtacttaataaagacataaaggatacacaatacagmaaatcaataagaatcttgtagactgggtgcatctgttttttagagtctgacagtaggaagatgatacagttactggttttgatttctgtggctaatagaaaacttcatcttttcttgaaatgatctgcataagcattgtgacaaaccagcatttaatttcatgttgataaaattcttaaatacattgctgacatccrggaagaaaactttgatcttgagcttgtaaataaaaaacaaagtcagtaagaagttgtttcataactgtcaggtggtttgatggttagtgacataattcttcactgacatttgccatttgttgtcatttccatctttgtgaactggatcttctgtgatccgtagtcttcatgttgcttcagaagcatgatttatctaaggctgataactggggctttgcctgctctcaaattggtccatggagagagcagagcagccttagttgctggcatctactctgtcccctggcttagtagcacaaa

SEQ ID NO: 52568 - DNA, 600 bp, Chicken  19866894303257_1
acagatttccacatgtgcttttactaagcatcttagcaatgacgtttagagacatggggcaaaaaacttgtgcaccagagctgactgatcacacagcgctgccaaagctgaactgttctgtgtggtgttacttttcacgtaaattctatctgggaatttgtatgatcctaacggatacttatttccactaactctggatttcagcttgctttttctacaggcacaaaacctatcttgtggctgctcaacattttcaagtgctgtcatttcaacatttaagggagattatagggctttccyggctcttgcattacagaaatgttccctgctccatgccacagcccccacaaaacaagccaaagagaccagccctgataatctgtaatttaagtaatgtgcatagacaaaatggctaatcttttattccctacagaatccagccacctaaaccaggaacatttcaaaagtcttttatgtaactctcaaagcaatccctcccctacactggacagctcatggagtgcatctggcatatcaacatggtcctccatttacatagtggaaaattatctttgaaaacagatgacaccatatggagaa

SEQ ID NO: 52569 - DNA, 600 bp, Chicken  19866894303260_1
tgcacaaaccacaataaccatttacacaacgttcatttttataatgaacattaaataaaactatttatttgaaaaagcaccgcttcctgtaaatgatcacttttatagtaatttttcttcaacacgcatctcacaaggagctcagctttcagaaaagtcatataattttacaacagttcatcaacgttttctctagtttctgcttatgttaaaaactatctattttttgcaaagtctttagatagtttgcctctctgctgctgaggtaaaataccacttcagccaaactacataaaccarcygctgaacctgacctgaacatcaaaagcagataggcttggttgctgcctgaagcaatacaaggctcaaatgaccttactacacactatatacttacatgctacagagctgaagccaaagcctaaaacaaaaacgcacacaaaaaattagtagtaggagttacatcattactaactcaatagcctagaagataagcaaaataaaagataacaggtatttgatttacttccattttcaaaaccctttccttgttgaccacgggcttagttccaacttggggaaaagatattcaaacagggc

SEQ ID NO: 52570 - DNA, 600 bp, Chicken  19866894303260_2
cacaaaccacaataaccatttacacaacgttcatttttataatgaacattaaataaaactatttatttgaaaaagcaccgcttcctgtaaatgatcacttttatagtaatttttcttcaacacgcatctcacaaggagctcagctttcagaaaagtcatataattttacaacagttcatcaacgttttctctagtttctgcttatgttaaaaactatctattttttgcaaagtctttagatagtttgcctctctgctgctgaggtaaaataccacttcagccaaactacataaaccarcygctgaacctgacctgaacatcaaaagcagataggcttggttgctgcctgaagcaatacaaggctcaaatgaccttactacacactatatacttacatgctacagagctgaagccaaagcctaaaacaaaaacgcacacaaaaaattagtagtaggagttacatcattactaactcaatagcctagaagataagcaaaataaaagataacaggtatttgatttacttccattttcaaaaccctttccttgttgaccacgggcttagttccaacttggggaaaagatattcaaacagggctc

SEQ ID NO: 52571 - DNA, 553 bp, Chicken  19866894303265_1
agggcttttctatgtttaacttaagtgcataagataggagtaatctaaagtgaagattctcagttcaccactaccctatctgatggtctatattcacctttctaccccactacacacgtatagttagtaagatcaaatcacatttgttaaatgatccgagtacacaactagatgatgatagccttgctgatacagaattgcagacatttgaatttaatgtgaagagccacatctagtaactgagaacaggaaggagatcatgggtctcaaatgtttttgctttgaatctccacacagcamaacatggtagaatttgttatacagttcaatgctcttggaaaaacaaatctgtattttgcagacttaatcacctgggtatgtaaatgttcaccctataaaaataaataaaattcagagcatgctgctatttgatatacaaacatcctgaagactcataaccacactataacatatccagccaacatattacggtttgtaaaatacagaaagcatattatccttctattttttgtgtctcctcaaaacaagctag

SEQ ID NO: 52572 - DNA, 600 bp, Chicken  19866894303268_1
caattatgcacccccgggcccagcctcagctgccaccagactgtgatagtttcagtcgccgaaatccggtggaatccctccagatgcagaccaatgctggcctgttggtctctgttgctcccaggcgcagttatgtcagggcaaaagaagggtaagctctgctgccccagggtgcatcctttgccttagcgtggcacgaacggctccgcatgctgtaggctgagagcagagcatctcctgcctccagtctcctatagggcagtcccaggcagagcagatctgcagtcagggcaggggagygattaaccccatcctgagatggggcagtgagcctgtgtccaccgagagccacgggcgctagctaactgagccacgagcttttagggctgcacgcaaatccatttggggacccgtgaggactgattctcttctcacccccaggataaatcaggagtgattacccttgaaatgatgagttacacaagtgtaaaaccagttcaaatcaaaggagaatccaattcatctgctgtatttataattaattactctgattaagggctggcagctaggatcaaacttcattgctcttgtttcatcaga

SEQ ID NO: 52573 - DNA, 599 bp, Chicken  19866894303269_1
  misc_feature (1)..(269): n is any nucleotide
nnnnnnnnnnnnnnnnnnnnnnnnnnnnnnnnnnnnnnnnnnnnnnnnnnnnnnnnnnnnnnnnnnnnnnnnnnnnnnnnnnnnnnnnnnnnnnnnnnnnnnnnnnnnnnnnnnnnnnnnnnnnnnnnnnnnnnnnnnnnnnnnnnnnnnnnnnnnnnnnnnnnnnnnnnnnnnnnnnnnnnnnnnnnnnnnnnnnnnnnnnnnnnnnnnnnnnnnnnnnnnnnnnnnnnnnnnnnnnnnnnnnnnnnnnnnnnnnnnnnnnnnnnnnnctctctctctatgagcccttggaggtgagarggaatggattaggttatcttattttttgtttattggtgcacaaagaagccagacttctgagaagcccaagatatcccrctgtctttcacagtacaataatgccagttctgcatttcacactggttaagaaaatacagagtggaagaaaaggaagaggacttgaaaactatagacagaaacaagccatctttcagattagatacattttaattagctattaataagggtatctgggtgcagctctgatctcagctctgtggagcgacacagaagttatcatcccagccccactgccaaga

SEQ ID NO: 52574 - DNA, 599 bp, Chicken  19866894303269_2
  misc_feature (1)..(191): n is any nucleotide
nnnnnnnnnnnnnnnnnnnnnnnnnnnnnnnnnnnnnnnnnnnnnnnnnnnnnnnnnnnnnnnnnnnnnnnnnnnnnnnnnnnnnnnnnnnnnnnnnnnnnnnnnnnnnnnnnnnnnnnnnnnnnnnnnnnnnnnnnnnnnnnnnnnnnnnnnnnnnnnnnnnnnnnnnnnnnnnnnnnnnnnnnnnnnnnctctctctctatgagcccttggaggtgagarggaatggattaggttatcttattttttgtttattggtgcacaaagaagccagacttctgagaagcccaagatatcccrctgtctttcacagtacaataatgccagttctgcatttcacactggttaagaaaatacagagtggaagaaaaggaagaggacttgaaaactatagacagaaacaagccatctttcagattagatacattttaattagctattaataagggtatctgggtgcagctctgatctcagctctgtggagcgacacagaagttatcatcccagccccactgccaagaagtgctatgcaatcaagycctaggagatgccctgagaagtttcctaccaaatgaatggcaggaaatgtcaaacaatgt

SEQ ID NO: 52575 - DNA, 600 bp, Chicken  19866894303269_3
cttattttttgtttattggtgcacaaagaagccagacttctgagaagcccaagatatcccrctgtctttcacagtacaataatgccagttctgcatttcacactggttaagaaaatacagagtggaagaaaaggaagaggacttgaaaactatagacagaaacaagccatctttcagattagatacattttaattagctattaataagggtatctgggtgcagctctgatctcagctctgtggagcgacacagaagttatcatcccagccccactgccaagaagtgctatgcaatcaagycctaggagatgccctgagaagtttcctaccaaatgaatggcaggaaatgtcaaacaatgttatatcycatttccttgaargaaaagactgggcaacatgaaaaatggactctcttaacatagaatagtttgagttggaacggatctttgaaggccatctagtccagcctccctgcaatgaacaaagacacctacagatcaatcagatgcttggagccccatctagcctgaccttgagtgtctccagggatggggcatccaccacctgtgtgggcaaccttgggtctaaaaaacttcttga

SEQ ID NO: 52576 - DNA, 600 bp, Chicken  19866894303269_4
ttcacagtacaataatgccagttctgcatttcacactggttaagaaaatacagagtggaagaaaaggaagaggacttgaaaactatagacagaaacaagccatctttcagattagatacattttaattagctattaataagggtatctgggtgcagctctgatctcagctctgtggagcgacacagaagttatcatcccagccccactgccaagaagtgctatgcaatcaagycctaggagatgccctgagaagtttcctaccaaatgaatggcaggaaatgtcaaacaatgttatatcycatttccttgaargaaaagactgggcaacatgaaaaatggactctcttaacatagaatagtttgagttggaacggatctttgaaggccatctagtccagcctccctgcaatgaacaaagacacctacagatcaatcagatgcttggagccccatctagcctgaccttgagtgtctccagggatggggcatccaccacctgtgtgggcaaccttgggtctaaaaaacttcttgagtctaaacaattccactcttcctcctccttagaggctacaggtctccaggctcctttaatgcctttc

SEQ ID NO: 52577 - DNA, 600 bp, Chicken  19866894303269_5
aatgccagttctgcatttcacactggttaagaaaatacagagtggaagaaaaggaagaggacttgaaaactatagacagaaacaagccatctttcagattagatacattttaattagctattaataagggtatctgggtgcagctctgatctcagctctgtggagcgacacagaagttatcatcccagccccactgccaagaagtgctatgcaatcaagycctaggagatgccctgagaagtttcctaccaaatgaatggcaggaaatgtcaaacaatgttatatcycatttccttgaargaaaagactgggcaacatgaaaaatggactctcttaacatagaatagtttgagttggaacggatctttgaaggccatctagtccagcctccctgcaatgaacaaagacacctacagatcaatcagatgcttggagccccatctagcctgaccttgagtgtctccagggatggggcatccaccacctgtgtgggcaaccttgggtctaaaaaacttcttgagtctaaacaattccactcttcctcctccttagaggctacaggtctccaggctcctttaatgcctttccttctgctcttgg

SEQ ID NO: 52578 - DNA, 599 bp, Chicken  19866894303272_1
  misc_feature (1)..(217): n is any nucleotide
nnnnnnnnnnnnnnnnnnnnnnnnnnnnnnnnnnnnnnnnnnnnnnnnnnnnnnnnnnnnnnnnnnnnnnnnnnnnnnnnnnnnnnnnnnnnnnnnnnnnnnnnnnnnnnnnnnnnnnnnnnnnnnnnnnnnnnnnnnnnnnnnnnnnnnnnnnnnnnnnnnnnnnnnnnnnnnnnnnnnnnnnnnnnnnnnnnnnnnnnnnnnnnnnnnnnnnnnncagaggcgagcggcaacaaagccaatcgcttgcatttgtcttggaagaattagcggcacttctcattcacgcgccgggcgccrgcgagcagctgtggcgtgcatctgcagcgcgaggcggtgatgctcggcacgttcgcgctccccaccccccgaatatgccaaaccgtcgtcgtgcaattaattgcggggtgctgccgtcccgaaggagagctcgtggtctgcagctttgtgccccgcaggggtgcgtgtttgatttccagttagggtcatagagcagatgggatgaagtctgtctgggcatttcggggctttataaacgccggtctgaattacctggaggtagcgctaaactgaggaggaggagagagggctctgctccc

SEQ ID NO: 52579 - DNA, 600 bp, Chicken  19866894303272_2
ccgtcgtcgtgcaattaattgcggggtgctgccgtcccgaaggagagctcgtggtctgcagctttgtgccccgcaggggtgcgtgtttgatttccagttagggtcatagagcagatgggatgaagtctgtctgggcatttcggggctttataaacgccggtctgaattacctggaggtagcgctaaactgaggaggaggagagagggctctgctcccttcagtgagatagctcttagcattggcagaagaaactgagctaaagcaagcagcattcttgtactatcttgtaggatgtgttygttatcaakgcaaacttgttcagccctgtgcagggtgattaaggggttaaaaatacatcttagctttgcttcgtgcccagtggtagcttggtagcgtttacacgtggatcagattaaaataggtcagtgtcctctgtggcgggtcctttggcactttggtgcacggctgcacctaccttgaggatggatgagcctggaagagctctgtgcattaacagaaccacagcctagggatacttcgggatcaaagtcctttattcatcaactgaatcaaaggcttgacagggagactttgtcatc

SEQ ID NO: 52580 - DNA, 600 bp, Chicken  19866894303272_3
tgcaattaattgcggggtgctgccgtcccgaaggagagctcgtggtctgcagctttgtgccccgcaggggtgcgtgtttgatttccagttagggtcatagagcagatgggatgaagtctgtctgggcatttcggggctttataaacgccggtctgaattacctggaggtagcgctaaactgaggaggaggagagagggctctgctcccttcagtgagatagctcttagcattggcagaagaaactgagctaaagcaagcagcattcttgtactatcttgtaggatgtgttygttatcaakgcaaacttgttcagccctgtgcagggtgattaaggggttaaaaatacatcttagctttgcttcgtgcccagtggtagcttggtagcgtttacacgtggatcagattaaaataggtcagtgtcctctgtggcgggtcctttggcactttggtgcacggctgcacctaccttgaggatggatgagcctggaagagctctgtgcattaacagaaccacagcctagggatacttcgggatcaaagtcctttattcatcaactgaatcaaaggcttgacagggagactttgtcatccagtcagcc

SEQ ID NO: 52581 - DNA, 599 bp, Chicken  19866894303274_1
  misc_feature (1)..(111): n is any nucleotide
nnnnnnnnnnnnnnnnnnnnnnnnnnnnnnnnnnnnnnnnnnnnnnnnnnnnnnnnnnnnnnnnnnnnnnnnnnnnnnnnnnnnnnnnnnnnnnnnnnnnnnnnnnnnnnnccaagcagagcccctgccctaggaacccagaacaccccccttgccccctgtacctcctcactgttggaacagcacagggaaagaaacccaatcccttttaagggagaggaaggggtgggctttagaactatttgactgaaaataaccttcatgctaatctgagtcctggatagcagccagctgcagcgrgtgctcaggctgcccatagaaccagggggtgggccaggctgccccagctgctccccrgggtttatctcctgcagctgtctcctggatgggataccccacccatctcctgctgggcacacaccctttctccacgaagctgaactgggctctctatctcttctaaacacctcagaacagcttgtagcagcactagtggaggtcttggtggagaaggagcctggcttgggtgaaatactgcagcccatctcctcactccgagacccccagcacttctgtagtggagtgaagctgctccctgc

SEQ ID NO: 52582 - DNA, 599 bp, Chicken  19866894303274_2
  misc_feature (1)..(54): n is any nucleotide
nnnnnnnnnnnnnnnnnnnnnnnnnnnnnnnnnnnnnnnnnnnnnnnnnnnnnnccaagcagagcccctgccctaggaacccagaacaccccccttgccccctgtacctcctcactgttggaacagcacagggaaagaaacccaatcccttttaagggagaggaaggggtgggctttagaactatttgactgaaaataaccttcatgctaatctgagtcctggatagcagccagctgcagcgrgtgctcaggctgcccatagaaccagggggtgggccaggctgccccagctgctccccrgggtttatctcctgcagctgtctcctggatgggataccccacccatctcctgctgggcacacaccctttctccacgaagctgaactgggctctctatctcttctaaacacctcagaacagcttgtagcagcactagtggaggtcttggtggagaaggagcctggcttgggtgaaatactgcagcccatctcctcactccgagacccccagcacttctgtagtggagtgaagctgctccctgcctcattacagctttcttctgccctcctttccttcaggtccagcaccaaactgtgctg

SEQ ID NO: 52583 - DNA, 348 bp, Chicken  19866894303274_3
ctgcatggctgtcattcccttcagggctcagaaggagagcagggcaaatttacttcaataaataccttgggaaaatgttgtctagcctgagaggctttagctgtgtgtggcactggcctccgagtgcgtatggggggagatgacggtgtaggctgaggtcactggagctgtgagctgggaacggggcatggcatctgcaagctaaacctgcgtttcctcacgtaatggaggcacaaatcagccactccaaaccagcagccccatcccagcagctgtcagtgctgagcctgggagagccawgtagctcagcgtttcacacacacagggccatgggctcatcgtgccagg

SEQ ID NO: 52584 - DNA, 599 bp, Chicken  19866894303277_1
  misc_feature (1)..(31): n is any nucleotide
nnnnnnnnnnnnnnnnnnnnnnnnnnnnnnnctgcaatgtcagatgcatgaatggaggaagctgcaatgaggaatcttgcctctgccagaaaggttacactggaacgtactgtgggcagcgtaagtacttgcaacaccagctatgtgtatgcacagtgagcagaagggcaaggctagatttgtagagcctcataaatagaggtcaccttgcatgctctgatgtgctggttgcagcgcagactttggagtcctcgctgtgttctgctctccattggaatctcagctcactctcactgggaygtaggttacatttgtttaggttacatttggcgtggctgggagaagagtcaacgctgacactctgcagccatccttctggttccccacagctgtagatccaaactgctctgcagtgtgcacatctatccagcactgcccatcgcrcaccgctgacctcaaagtcatgacctgccttgacttgcactgtgctcctcggacatgagtttgagggagctcatatcaaagatgtggcctttgagtgcacatctcttggctctcagccctgagtgccccatgctaggaagggcaggtgcagcctt

SEQ ID NO: 52585 - DNA, 600 bp, Chicken  19866894303277_2
gtgtatgcacagtgagcagaagggcaaggctagatttgtagagcctcataaatagaggtcaccttgcatgctctgatgtgctggttgcagcgcagactttggagtcctcgctgtgttctgctctccattggaatctcagctcactctcactgggaygtaggttacatttgtttaggttacatttggcgtggctgggagaagagtcaacgctgacactctgcagccatccttctggttccccacagctgtagatccaaactgctctgcagtgtgcacatctatccagcactgcccatcgcrcaccgctgacctcaaagtcatgacctgccttgacttgcactgtgctcctcggacatgagtttgagggagctcatatcaaagatgtggcctttgagtgcacatctcttggctctcagccctgagtgccccatgctaggaagggcaggtgcagcctttgctgattgtcccctgttctacagtggaccacggtagcctggagttccatattatttctctgtatatatttttagaaaatatttttagaaaaacagcatattctctgggaatggtcttcttgtgggaaaccttcattttagctca

SEQ ID NO: 52586 - DNA, 600 bp, Chicken  19866894303296_1
ttgtttgtgaatttatgactgttttgagaaacagaatatttggattcctataatgtaatcttctgtgccttttcctaaaaataataataattaaaaaataccatcagcattagcacacttgaatcagatttctacattgttccattttcctgcagttctttctgattcttcctgaaatccatatccactcatttccaatcatttgcagtcagtctattaccaggcacaagaactagagtgcagttttctcatttgtatctagctattcattttacttcatcttaaaattgatttatgttrcatttttagaacagaaaagaactggacttgatgttttgtatttaagtgttgcaaaacccactcccttatttctttacatgtaacaaataaataatgcaactcgtgtattgggatggaaagctgtgstagaagtagacatatggcaaacagctcttgcaacgtcagaacagcactgcttattacagagcagggtgatggatgatattaaaaacgataatgttgctgtatgatatggtgtgggggaacagatcagaggaacagagctgtaacttctaactggaacaatttaaacagcagttt

SEQ ID NO: 52587 - DNA, 600 bp, Chicken  19866894303296_2
gatttctacattgttccattttcctgcagttctttctgattcttcctgaaatccatatccactcatttccaatcatttgcagtcagtctattaccaggcacaagaactagagtgcagttttctcatttgtatctagctattcattttacttcatcttaaaattgatttatgttrcatttttagaacagaaaagaactggacttgatgttttgtatttaagtgttgcaaaacccactcccttatttctttacatgtaacaaataaataatgcaactcgtgtattgggatggaaagctgtgstagaagtagacatatggcaaacagctcttgcaacgtcagaacagcactgcttattacagagcagggtgatggatgatattaaaaacgataatgttgctgtatgatatggtgtgggggaacagatcagaggaacagagctgtaacttctaactggaacaatttaaacagcagtttgaaggtttacaaaccttttgtatgctctgctaagcgctcagctaagctttttcttcattgagctgggacaaccattgtaatttaaagctaatgactatcagggtgaattgcaatggtcctgtcctt

SEQ ID NO: 52588 - DNA, 599 bp, Chicken  19866894303302_1
  misc_feature (1)..(8): n is any nucleotide
nnnnnnnnaaatagattaaaatagatcaagaattgcttcaaaagttgagacaaatatgtaataaagaacccctacaagacacaaatctgcctcttacttcaaaaaactcagcaattatatagccagttcaggatctacaatttaaaggtgactttccaagaaatatgaaatacattgtgcaataaaagtgttagaaacaggttttccactaagtataaaatctacttaaatttttccaagatcaattatcacataatatggcaaaaataagcaaaaatcagttttttaacatccagctcraggagtacatggccacatccatataatcgtcaagctgccttttgattctgatagataggattgttaccttgtaggcctcggcccggtgtaaagtgttttgtctgctcaaaggccctcatcacggctggtcctttcagaagactgacaattgaatcaacctgttgggatcaaagttctgtgacatagttgttttckatagcagagatctgaaattctttctttgagaaacacagactagaagaaaacagctttggttgctttcttacctactagctgtagttaaagctcagggctagara

SEQ ID NO: 52589 - DNA, 600 bp, Chicken  19866894303302_2
aacaggttttccactaagtataaaatctacttaaatttttccaagatcaattatcacataatatggcaaaaataagcaaaaatcagttttttaacatccagctcraggagtacatggccacatccatataatcgtcaagctgccttttgattctgatagataggattgttaccttgtaggcctcggcccggtgtaaagtgttttgtctgctcaaaggccctcatcacggctggtcctttcagaagactgacaattgaatcaacctgttgggatcaaagttctgtgacatagttgttttckatagcagagatctgaaattctttctttgagaaacacagactagaagaaaacagctttggttgctttcttacctactagctgtagttaaagctcagggctagaraatgttactaaatacaagggcctgtttaatctgtagttttggactatttacagaaaaacagaaggagaaagagtaaatagagtaaatacataccatcccaataaacattggaaagcaaaagtaaaaaaaaaaaaaaaaaaaattgctagacattttagctcaagtatggatgttattattaaagaaaaaaaaaaaaa

SEQ ID NO: 52590 - DNA, 600 bp, Chicken  19866894303302_3
craggagtacatggccacatccatataatcgtcaagctgccttttgattctgatagataggattgttaccttgtaggcctcggcccggtgtaaagtgttttgtctgctcaaaggccctcatcacggctggtcctttcagaagactgacaattgaatcaacctgttgggatcaaagttctgtgacatagttgttttckatagcagagatctgaaattctttctttgagaaacacagactagaagaaaacagctttggttgctttcttacctactagctgtagttaaagctcagggctagaraatgttactaaatacaagggcctgtttaatctgtagttttggactatttacagaaaaacagaaggagaaagagtaaatagagtaaatacataccatcccaataaacattggaaagcaaaagtaaaaaaaaaaaaaaaaaaaattgctagacattttagctcaagtatggatgttattattaaagaaaaaaaaaaaaaaaaaacacaactcatacttgaccaaaaagatgttccaaacagctatggagcttgtcttgtttatcatgagagattcgaacacttatgggaagctcatcgcctg

SEQ ID NO: 52591 - DNA, 599 bp, Chicken  19866894303305_1
  misc_feature (1)..(195): n is any nucleotide
nnnnnnnnnnnnnnnnnnnnnnnnnnnnnnnnnnnnnnnnnnnnnnnnnnnnnnnnnnnnnnnnnnnnnnnnnnnnnnnnnnnnnnnnnnnnnnnnnnnnnnnnnnnnnnnnnnnnnnnnnnnnnnnnnnnnnnnnnnnnnnnnnnnnnnnnnnnnnnnnnnnnnnnnnnnnnnnnnnnnnnnnnnnnnnnnnnnttgtgaagttcctgcttgactgtaaggtctgtcattttacatcagatgagttaacgcttgaaaactattagaattctcttttagaagtttgtctggctgccctcrgcaaaaattaatggataaatcatgacctaaaaaggtggttagaagttgtgagcactgtgtcttccggcagcctcaattttttagggagatgattatacctttactgaacaattattgcttaaaatggtacctttgggtaagagaacttaaaagctgcagaagccacagatgtaaaagagcctgggatggcttcactgagaatctgttagtttttagacgatgctattgcttattaactgctgcatctttaatattgtttcaggagacatcatcttctttaatgcccagggcagatgtta

SEQ ID NO: 52592 - DNA, 600 bp, Chicken  19866894303311_1
ttggctatgtctctggatatccagtatcaggcacctatgtatgtaactatgtatgtttttcttgctaggtctgtggggcacaagactgatggaagaaaacaacatgagcagagagagatacctgagaagtgttttgcgggagctgattacgtatgtgatcttccttgtggtgctgtgtgtctgtaagtactactcagccttaatgtatgcagttctgcaccacttgcttgcaaatccacagcgtttcagggaagtgccagagagtaatgaataggccactgtagggggaaatattttgarttatttctttctcttgattttgtagttggattgttgcttgagattctgtgccttagcagtttttgcatttttaatagtcagaactattaacatgttcatatatttgcataacaatcaggaagacggtgccaagtacaacattttgtgatgtttaattttgtcactagggaggctagcaacaaaatctgcatgcagtaagtttgtttatctctggaaagctgatgagtttcaagccctcagtctttagcatgggcagttctgttctaaaggcctccagtgccaatgactgttgagttgtct

SEQ ID NO: 52593 - DNA, 600 bp, Chicken  19866894303311_2
ttgattttgtagttggattgttgcttgagattctgtgccttagcagtttttgcatttttaatagtcagaactattaacatgttcatatatttgcataacaatcaggaagacggtgccaagtacaacattttgtgatgtttaattttgtcactagggaggctagcaacaaaatctgcatgcagtaagtttgtttatctctggaaagctgatgagtttcaagccctcagtctttagcatgggcagttctgttctaaaggcctccagtgccaatgactgttgagttgtctttgaccagctgtratgagccgaggtgccacttttatttgtaaagaaaacctttcactgaaaaaaaaaaacccaaaccacaaacagtgtgagtagtctgagagcaagtgctttgcttgtccagagcggaattcctacaacaagagcaaataaaaaaaaaaacccaaaccgcaaacattattcagttgacacagctcaactggtttggtgacgtatcacacacatgattatatactgactgtcatgttcgtttcctgcctgagacttttggtgcaggtttatggacaaaggagagtaggaatgcctgagactcta

SEQ ID NO: 52594 - DNA, 600 bp, Chicken  19866894303312_1
gttttacagcagtgatcaaaattgtcctctcccagcataaaagatgctttgcatgcttgcttaccagtggcttcagtgtagtttcttgattgcctggaagtgtttaagaatttaagtgatatattgcaggatctgtaaatcccatattccctcttcatccaaatgtattaaatcttactgggacacagtttgataccagttgaaccaagttagctgtctgagagctcttgagaatgaaagaatgatcgtattcattctgtccatgttttgtctagggcagcagcctgaatttatgcctayggaaaaatatagcaaggccgtggcttgccggagggagcgcagttaattgccttaatatttgctggtttggtctgtaaggcattgactgttttctttcttggtgctgtatatttggcattctgctgcacacgcaatcatgtgagcaaagcgctttttcttcctcagaacaggagctgaaattgtttcagtttggtagtctgaggaactgtttgtatgatctgaagatttgccctcttgctgttgtgttatctggggaacaagtatcctgtacgttgggtatctgctggtatactctttaac

SEQ ID NO: 52595 - DNA, 600 bp, Chicken  19866894303320_1
tctcactgctctgagcagtttatagagttcatgggagcagtgacatcctttggccccaaggcagatgatgtgctttgttaaatcccctcacactgctccctttgcactcaactctgcctactcttcttccttcctaccttcccaccctagcaaagtccaggtgctgtatggagggacggatttgtttgactatgaagtgagaaggactttcaacaatgacatgttgctggccttcatcagcagtagctgcatagctgtcctggtttacatccttacctcctgctcaggtaggctcggagyccagtgtgccctgttagtgccccagcagggcaggtgggaggtgtctattctccctggggatggccatcactggtgtattttccatcttgctttccttctgcagtgttcctgtcattctttggcatcgccagtattgggctgagctgtctggtggctctgttcctgtaccacgttgtttttgggatccagtacttgggcatactcaatggtgtagctgcctttgtcattgtggggattggtaagcatgttcttgttcagacatacctgtgctgccttgccataattcctgcatgcaggaga

SEQ ID NO: 52596 - DNA, 600 bp, Chicken  19866894303320_2
gtgccccagcagggcaggtgggaggtgtctattctccctggggatggccatcactggtgtattttccatcttgctttccttctgcagtgttcctgtcattctttggcatcgccagtattgggctgagctgtctggtggctctgttcctgtaccacgttgtttttgggatccagtacttgggcatactcaatggtgtagctgcctttgtcattgtggggattggtaagcatgttcttgttcagacatacctgtgctgccttgccataattcctgcatgcaggagagaggaaggtgatggaracaaatgcaggtcaaattttcaagcccattgcctcaattatgtgtaagtgggggatcttcagatcmgaagctcrggggaaatgagaatctcatcacgtgtccctatagcgtragcaaagtaccaaactctccctcctttcttttccctaggggttgatgatgtctttgtgttcatcaacacctaccgccaagccacccacctcaaagacctgcggctgcgcatgatccacactatccagacagcagggaaggccaccttcttcacttccctgaccacggccgcagcttatgctgccaaca

SEQ ID NO: 52597 - DNA, 600 bp, Chicken  19866894303320_3
catcttgctttccttctgcagtgttcctgtcattctttggcatcgccagtattgggctgagctgtctggtggctctgttcctgtaccacgttgtttttgggatccagtacttgggcatactcaatggtgtagctgcctttgtcattgtggggattggtaagcatgttcttgttcagacatacctgtgctgccttgccataattcctgcatgcaggagagaggaaggtgatggaracaaatgcaggtcaaattttcaagcccattgcctcaattatgtgtaagtgggggatcttcagatcmgaagctcrggggaaatgagaatctcatcacgtgtccctatagcgtragcaaagtaccaaactctccctcctttcttttccctaggggttgatgatgtctttgtgttcatcaacacctaccgccaagccacccacctcaaagacctgcggctgcgcatgatccacactatccagacagcagggaaggccaccttcttcacttccctgaccacggccgcagcttatgctgccaacatcttctctcaggtacactgcagttgtgggactgggggctttctattcctgtcagaggccctaaaag

SEQ ID NO: 52598 - DNA, 600 bp, Chicken  19866894303320_4
tttccttctgcagtgttcctgtcattctttggcatcgccagtattgggctgagctgtctggtggctctgttcctgtaccacgttgtttttgggatccagtacttgggcatactcaatggtgtagctgcctttgtcattgtggggattggtaagcatgttcttgttcagacatacctgtgctgccttgccataattcctgcatgcaggagagaggaaggtgatggaracaaatgcaggtcaaattttcaagcccattgcctcaattatgtgtaagtgggggatcttcagatcmgaagctcrggggaaatgagaatctcatcacgtgtccctatagcgtragcaaagtaccaaactctccctcctttcttttccctaggggttgatgatgtctttgtgttcatcaacacctaccgccaagccacccacctcaaagacctgcggctgcgcatgatccacactatccagacagcagggaaggccaccttcttcacttccctgaccacggccgcagcttatgctgccaacatcttctctcaggtacactgcagttgtgggactgggggctttctattcctgtcagaggccctaaaagagagggac

SEQ ID NO: 52599 - DNA, 600 bp, Chicken  19866894303320_5
cagtattgggctgagctgtctggtggctctgttcctgtaccacgttgtttttgggatccagtacttgggcatactcaatggtgtagctgcctttgtcattgtggggattggtaagcatgttcttgttcagacatacctgtgctgccttgccataattcctgcatgcaggagagaggaaggtgatggaracaaatgcaggtcaaattttcaagcccattgcctcaattatgtgtaagtgggggatcttcagatcmgaagctcrggggaaatgagaatctcatcacgtgtccctatagcgtragcaaagtaccaaactctccctcctttcttttccctaggggttgatgatgtctttgtgttcatcaacacctaccgccaagccacccacctcaaagacctgcggctgcgcatgatccacactatccagacagcagggaaggccaccttcttcacttccctgaccacggccgcagcttatgctgccaacatcttctctcaggtacactgcagttgtgggactgggggctttctattcctgtcagaggccctaaaagagagggacgctgacagcctctgaatcagctccatgccaagtttgct

SEQ ID NO: 52600 - DNA, 599 bp, Chicken  19866894303324_1
  misc_feature (1)..(24): n is any nucleotide
nnnnnnnnnnnnnnnnnnnnnnnnaacatgataagaaaagcagagtgtcatcactgtccctgatcccacaatcgtgatctcagatagcaattcccattgctttcatcagttgtttccagcaagaggagcagtgccggatccagcccagcgtgtgcgatgcaatcagtggttcgttgtcacagagctgggaattactgccagcattaacacccccagccacccacacgcttttattctacaccatcacgctctccagagagttgctcctcactgctacatgtggcccaaatcacggccacraggccctggcacagtgtgcctggctccaggtgccctcctgccacaccatggggctcacccagcccaaagacaggcagtggggctcagcagacaggtgtgaggttagtcaataggcccctccatctgtttgtctgatctcaggtgtgatgcaagccagcagcagggtgggaggtgtgcgtttcatcacccacccatctaccctgtcttttctgcccccagccccactgcctgcagcagctctgggagcacccagctggagctcttgtgtgcacacatcatgtatttgccctcgcagcccg

SEQ ID NO: 52601 - DNA, 600 bp, Chicken  19866894303327_1
atctctgtgcctattaagatcatggaacagatccttctgaaaggcatatgcaagatgagaaggtgatgtaagacagccagtatggcttcaccaaggacaaatcactccttaccaatctcgtggtcttctatgatgaagtgatggcactggtggacaaaggaagggcaactgatgtcatctacctggacttgtgtaaggcctttgaagtggccctgcactacatccttatctctaaattgaagaaacattaatttgaaggatgcactatgtggtggataaacaattggttggatggtcacrgatacagtactgtggtcattggctctgtggtcaggtagaggccagtgacaagtggtgtcccccaggggtccatcttggaccagtgcccttcaacatctttatctatgacctagatagtgggactgagtataccctcagcaagcttgctgatgacatcaagctgggtaatgcagttgacacaatagaaggaagggatgccatccagagggtcctggacaagcatgaaaagtgagcacacgtaaacctaatgagattcaaaaagaccaagtgcaaggtagtggcttgggtcagctgcagaca

SEQ ID NO: 52602 - DNA, 600 bp, Chicken  19866894303329_1
gttgtgtttggaagccggagcccatggccatccagcctgattcccaaggatgcagaggtgctgaaccatgctgaggcagcacagaaagctgccatcattattatagcaatccagaggcaacattacgacttccttgcatcactggaggagacactccgtggaaaagtgttggtggacataagcaacaacttaaaaataaaccagtatcctgaatccaatgcaaagtacctggctcagctggtgcccagtgctagggttgtgaaagcctttaacaccgtgtctgcctgggctctgcagtcrggcaccctggatgcaagtcggcaggtaagactgaactgcaggagtttgctatttcatagagttatgaagtaacatacaggcttttaacagttagacaaaacacacacttgggacatatgactcagacaaggctgagatggaatttttcactgtaattgcaaatctcaaattaaatgtgagctaaaatttactttgggattcaaatatgacatgacaaggaatattgatagcttgcctcagaatgcagaaagctgttaggagacattacagaagcaaggaaaaaaaaaagagagaaagaaa

SEQ ID NO: 52603 - DNA, 600 bp, Chicken  19866894303332_1
ctgtgcatttaaatataactgtagaaagggggaaattatctccctgggatcctcaaaccacccccagcatgtgggataaggaaggtcattgtattgctaatgagtggtaaagctcgatgataacttgagccagatgtaagcacccacaaggcgcccagcccttacatgtaaccagtcttggttgcgtgtgaaaactgttgtgttgcatgggtatataaggctctgagcacctacaataaaccctcttgttctgcaccagcgaaggagtccgcacctctttcgccacacctgcaagggagygtgatgccctcttgcaacaccagcacgcctaagtcatcccacttgatcaagggctgatcatactcatagcactagtaaggagacactgtaatcaaggagctgctgacgtgtttaaatcaggacttggtctcacttcagtgaaggtcccgtgaaaaggacacctcagtaggaacgaggaagcctgatgttgttttcccagcaagacaacaccacacacagtgcatgctatcagtcaaagatatgttgcttaccacacacaggctgggcacttcatataattcacagcccaaatgtgtcaga

SEQ ID NO: 52604 - DNA, 600 bp, Chicken  19866894303336_1
accctctaatatacagagaaatgaaagatatgtcatgcaatttgaaagcaatttcttacaaatgtataacaaagtctataattttacctaaaacctcactgtaagttgatttaggctttctggactgatgccttagttattccacctaagaaataagaaaatcaatgctatgaaaatttaaaaattcattctaggtcatcttcaaaagaaagtgtataaaatttaaatgatacaggaattcagttaacacattagagatgaacggagatagacacaaaccaaggaatgttacattcacamctcygtattctgttgagtaaggaaaaatacttttctgtgcttcgaaggtgaagccrggactcaccatgccttttccttctgggctattctagcagcccctaaagctgcagaccacagtgcaggtgcttactatggaggaagcactgaatatgcttgtatagaaggcactgccaaacagcagctacaagtgatctattccaacaatttgctgcccaaaatataccatctcccacactaggcaccacttactctaggctaattttgtaccactgcaggaatgcttattcattttaggaatct

SEQ ID NO: 52605 - DNA, 600 bp, Chicken  19866894303336_2
tctaatatacagagaaatgaaagatatgtcatgcaatttgaaagcaatttcttacaaatgtataacaaagtctataattttacctaaaacctcactgtaagttgatttaggctttctggactgatgccttagttattccacctaagaaataagaaaatcaatgctatgaaaatttaaaaattcattctaggtcatcttcaaaagaaagtgtataaaatttaaatgatacaggaattcagttaacacattagagatgaacggagatagacacaaaccaaggaatgttacattcacamctcygtattctgttgagtaaggaaaaatacttttctgtgcttcgaaggtgaagccrggactcaccatgccttttccttctgggctattctagcagcccctaaagctgcagaccacagtgcaggtgcttactatggaggaagcactgaatatgcttgtatagaaggcactgccaaacagcagctacaagtgatctattccaacaatttgctgcccaaaatataccatctcccacactaggcaccacttactctaggctaattttgtaccactgcaggaatgcttattcattttaggaatcttgtt

SEQ ID NO: 52606 - DNA, 600 bp, Chicken  19866894303336_3
tacaaatgtataacaaagtctataattttacctaaaacctcactgtaagttgatttaggctttctggactgatgccttagttattccacctaagaaataagaaaatcaatgctatgaaaatttaaaaattcattctaggtcatcttcaaaagaaagtgtataaaatttaaatgatacaggaattcagttaacacattagagatgaacggagatagacacaaaccaaggaatgttacattcacamctcygtattctgttgagtaaggaaaaatacttttctgtgcttcgaaggtgaagccrggactcaccatgccttttccttctgggctattctagcagcccctaaagctgcagaccacagtgcaggtgcttactatggaggaagcactgaatatgcttgtatagaaggcactgccaaacagcagctacaagtgatctattccaacaatttgctgcccaaaatataccatctcccacactaggcaccacttactctaggctaattttgtaccactgcaggaatgcttattcattttaggaatcttgttggatgagctaaacatcaagtgcacttaatgatcagatatttctgctttcaga

SEQ ID NO: 52607 - DNA, 600 bp, Chicken  19866894303336_4
tattccaacaatttgctgcccaaaatataccatctcccacactaggcaccacttactctaggctaattttgtaccactgcaggaatgcttattcattttaggaatcttgttggatgagctaaacatcaagtgcacttaatgatcagatatttctgctttcagaaataataataattcagagaagttcaggttttgcttgtgaccactgtcttagaagagctcaaagttcacttgcatacaaaaccagcatctccttgtcattttttatagattttactgacaacaggaaagttcaaatgsctaagagcaaggcaagaaacagattccaaaagacagctttaaatgttartcaagtaaaagagattgcccrtgtactttaagaacagattgctgccccttccataaaagcagctttttaccaaacacagtgtaaccagaggaataagaattttaggcatacagtttactcatctcattgagttgaataaagccttacctcaatcaacgtgaaatttttaaaatcatcagtgctggctgatgagaacacaacctgttggattagtttcacgtttcacacaactgtttgataagctgtaaaga

SEQ ID NO: 52608 - DNA, 600 bp, Chicken  19866894303336_5
cacttactctaggctaattttgtaccactgcaggaatgcttattcattttaggaatcttgttggatgagctaaacatcaagtgcacttaatgatcagatatttctgctttcagaaataataataattcagagaagttcaggttttgcttgtgaccactgtcttagaagagctcaaagttcacttgcatacaaaaccagcatctccttgtcattttttatagattttactgacaacaggaaagttcaaatgsctaagagcaaggcaagaaacagattccaaaagacagctttaaatgttartcaagtaaaagagattgcccrtgtactttaagaacagattgctgccccttccataaaagcagctttttaccaaacacagtgtaaccagaggaataagaattttaggcatacagtttactcatctcattgagttgaataaagccttacctcaatcaacgtgaaatttttaaaatcatcagtgctggctgatgagaacacaacctgttggattagtttcacgtttcacacaactgtttgataagctgtaaagaagcagactatttcattgggctgtgctcggcaaaccgaacgccaggatat

SEQ ID NO: 52609 - DNA, 600 bp, Chicken  19866894303336_6
gtaccactgcaggaatgcttattcattttaggaatcttgttggatgagctaaacatcaagtgcacttaatgatcagatatttctgctttcagaaataataataattcagagaagttcaggttttgcttgtgaccactgtcttagaagagctcaaagttcacttgcatacaaaaccagcatctccttgtcattttttatagattttactgacaacaggaaagttcaaatgsctaagagcaaggcaagaaacagattccaaaagacagctttaaatgttartcaagtaaaagagattgcccrtgtactttaagaacagattgctgccccttccataaaagcagctttttaccaaacacagtgtaaccagaggaataagaattttaggcatacagtttactcatctcattgagttgaataaagccttacctcaatcaacgtgaaatttttaaaatcatcagtgctggctgatgagaacacaacctgttggattagtttcacgtttcacacaactgtttgataagctgtaaagaagcagactatttcattgggctgtgctcggcaaaccgaacgccaggatattggcctgctgctctgcactga

SEQ ID NO: 52610 - DNA, 599 bp, Chicken  19866894303337_1
  misc_feature (1)..(48): n is any nucleotide
nnnnnnnnnnnnnnnnnnnnnnnnnnnnnnnnnnnnnnnnnnnnnnnnttccctaatgcttattttaggatgaaaaagaaaaatccctaggtgagttattgtctctctggatagcgaggcatcaactcaaagttttatcaggactgaagacgagtgaggagcatctggcacctcatgggtttatggctactgaagcaagtgcaaaccaggaacaaaaataataattaggacatggtgatacttgctttgttacaggttatcagtaatccaataaaaaacaaagccaaaaatgttcttaawtgtacatggctctttataaaaggtgtcacagagtcataatcatcctgcaaaacacagagttaatagcgtttttccctttctctgtctcatctacacataggaaggtgttgtaatatgacaatgacttgcataacctttgtgtagaatccctgaagagtaatggaaacctcaaggtactcaagaatggcatgggatgtatatgtatatggcataggatatgccatggtatatcctatggtataggatatacacatgtaattagaagtggagttggatctgcaaaatgagcatgaactgca

SEQ ID NO: 52611 - DNA, 528 bp, Chicken  19866894303337_2
ttaatagcgtttttccctttctctgtctcatctacacataggaaggtgttgtaatatgacaatgacttgcataacctttgtgtagaatccctgaagagtaatggaaacctcaaggtactcaagaatggcatgggatgtatatgtatatggcataggatatgccatggtatatcctatggtataggatatacacatgtaattagaagtggagttggatctgcaaaatgagcatgaactgcaacaaggatcaacaggaggtgcttcagagctgtgtggggttttgcagaattgatgtgtgawtttttttcctccatttcattgtaaatcagtacattcaagattatattgrggggagagggggtttggtggcaattgacacacacgtctcttctgttaacatcttaccagcagttcttcaggaactaaaaggagagatgtaatttgcacagtatgttcacagtaatgtaattgtgtatatgatcgttctactgctaaggcagctcagtttcatatagctcttttatgttt

SEQ ID NO: 52612 - DNA, 479 bp, Chicken  19866894303337_3
tgtaatatgacaatgacttgcataacctttgtgtagaatccctgaagagtaatggaaacctcaaggtactcaagaatggcatgggatgtatatgtatatggcataggatatgccatggtatatcctatggtataggatatacacatgtaattagaagtggagttggatctgcaaaatgagcatgaactgcaacaaggatcaacaggaggtgcttcagagctgtgtggggttttgcagaattgatgtgtgawtttttttcctccatttcattgtaaatcagtacattcaagattatattgrggggagagggggtttggtggcaattgacacacacgtctcttctgttaacatcttaccagcagttcttcaggaactaaaaggagagatgtaatttgcacagtatgttcacagtaatgtaattgtgtatatgatcgttctactgctaaggcagctcagtttcatatagctcttttatgttt

SEQ ID NO: 52613 - DNA, 600 bp, Chicken  19866894303341_1
tggtccagctttgaaaagtacaaggcctaaaacattcatttatacagaaccactctgggcatacagagtcaggaatcagttcacattattctcactacaggatcagagtcttattaaagtcatgagtgttgatgatcttctttcctctcctgccttccttatctgctgtttcttcactgaagacaacattttgatacacagctgacagatgatcattaagaacaagcagccatcaaaatcaatgactaattcttctataaaaggggagaaaaaaaaaaagtacaaatcaactgaaatggkcatctaagagttaaatggttctacaaaattttaatcccaattaaaatatttttgaaaacaccaaacctttcaggtttgggtagagaatatgtatatcacttccactgtctgcgtaatgtacactacagcattctgaataaggagttcaggtttagaatgacttaaattatgtgttttccaatctgctcttcattacttgctgtatctgagtcacctttcaagataccttcaaggtcagatggtgatagaaaattaaaataactgttgagatgaaaaaaatgtaacaaagcctccatgcaa

SEQ ID NO: 52614 - DNA, 600 bp, Chicken  19866894303342_1
ccattctgccatattccatggggaaaaaagaaagagggacaagacatgtagaaaggggttcagcagccttggtgactgagataaggaaagaaggaggcaagaaatccagacctgctttttttttttttttttttgtaggctgagcattatctccagggagtggcagctcaccaaaaaccccattaattttactgctgtgacttaaactgcatggattttattgcacagaacagtgactgttccctgctagggctgtcctactttcacttggttcagctgctgtctccaaacttcagtttwctgctgtccctggatgcagacattgctccctgttcttccaccagattaatttctgttagtttgtctgcagaagtcatcagcaggtgataaaacctgaagttaagatcttgaaataaattcagagaactgcaaaatacaccagtctctgaccaaaagcccctgcaatacaatagataatacttatcatcaaaaagcaggcagcagagcaggctggcagctctaacatgcactaatatgatcacagtgtagcaactgtagagaggatgctgttgcactgacagagaatgttgtcaataacat

SEQ ID NO: 52615 - DNA, 600 bp, Chicken  19866894303342_2
ccccctgctgtgggcagggttctcatccactagacctggctgccaaaggccccatccagcctggcccagagcacttccagaggtggagtacccacatcttctctgagcaacccgtgccagtgcctcaccatcctctgaataaataatttattcctaacatctagccctagatttcttctcttttagattacagccacagggagccccttgtcctatcactatcacatcgtgtaaaatgttactccacttcctacttataagatcccttcaagtattggaaggccacaatgaggtctcccygaagccttctcttctccaagctaaataagtccaactccctcaaactttcttcattttaaatattagtaagctattttaccaatgaatgagagcttaacttgtttaaatatgctttatctttatgagcctatagggtattaggtacctccaaacctcagttttcccctttaaactaaatactcaagtcaataactcctgctttaacgtgagttgtgctcagactaacctttttactaaagaagtcatagatttttaatttttttttaatttaaaaagtgtaaaaaaacaaagacttttatt

SEQ ID NO: 52616 - DNA, 599 bp, Chicken  19866894303344_1
  misc_feature (1)..(95): n is any nucleotide
nnnnnnnnnnnnnnnnnnnnnnnnnnnnnnnnnnnnnnnnnnnnnnnnnnnnnnnnnnnnnnnnnnnnnnnnnnnnnnnnnnnnnnnnnnnnnnngtttgtttatttacttatttgtcgttaaggagagtgtaacttcaaagcctggcttagtaggcacttagaagtcagtgtagcatggagaggagcttattggtacagaacttggtatctgcaaaccaaaaagaagtaaacaaaaaccctgttagtgctctaaataaggcatacagttgtgtcggtcttttgctttaaatataaatamttaaaaaawaataataatcttaatccctttcttacatgaatatgcaagttactgatgttagtttaaagaacaaattaaacttccaagttcttaggtgctgagtagcagtaggagtttgactcccctatgtctgaattgttcctgtggcactgtacaatcacttttgccatactactcrtstaactctgtagaggtaaaagaacttcacctttctatcatgcatctattgaataagagcactgttgtgtacagaacagaagacagctggtatttggcaggtatgctccttctgaggagct

SEQ ID NO: 52617 - DNA, 599 bp, Chicken  19866894303344_2
  misc_feature (1)..(86): n is any nucleotide
nnnnnnnnnnnnnnnnnnnnnnnnnnnnnnnnnnnnnnnnnnnnnnnnnnnnnnnnnnnnnnnnnnnnnnnnnnnnnnnnnnnnnngtttgtttatttacttatttgtcgttaaggagagtgtaacttcaaagcctggcttagtaggcacttagaagtcagtgtagcatggagaggagcttattggtacagaacttggtatctgcaaaccaaaaagaagtaaacaaaaaccctgttagtgctctaaataaggcatacagttgtgtcggtcttttgctttaaatataaatamttaaaaaawaataataatcttaatccctttcttacatgaatatgcaagttactgatgttagtttaaagaacaaattaaacttccaagttcttaggtgctgagtagcagtaggagtttgactcccctatgtctgaattgttcctgtggcactgtacaatcacttttgccatactactcrtstaactctgtagaggtaaaagaacttcacctttctatcatgcatctattgaataagagcactgttgtgtacagaacagaagacagctggtatttggcaggtatgctccttctgaggagctggtacctga

SEQ ID NO: 52618 - DNA, 600 bp, Chicken  19866894303344_3
ggagaggagcttattggtacagaacttggtatctgcaaaccaaaaagaagtaaacaaaaaccctgttagtgctctaaataaggcatacagttgtgtcggtcttttgctttaaatataaatamttaaaaaawaataataatcttaatccctttcttacatgaatatgcaagttactgatgttagtttaaagaacaaattaaacttccaagttcttaggtgctgagtagcagtaggagtttgactcccctatgtctgaattgttcctgtggcactgtacaatcacttttgccatactactcrtstaactctgtagaggtaaaagaacttcacctttctatcatgcatctattgaataagagcactgttgtgtacagaacagaagacagctggtatttggcaggtatgctccttctgaggagctggtacctgaaattgttggagtgggggttttcagtataatgtaattatactgtaattaatcactttgtatccttctctgtagtgactgcgtccttcccaagctctagagttgcttcccggtgtttattgtacttaacctctttgagcagattttgttcttcatccagttattttgcactt

SEQ ID NO: 52619 - DNA, 600 bp, Chicken  19866894303344_4
agaggagcttattggtacagaacttggtatctgcaaaccaaaaagaagtaaacaaaaaccctgttagtgctctaaataaggcatacagttgtgtcggtcttttgctttaaatataaatamttaaaaaawaataataatcttaatccctttcttacatgaatatgcaagttactgatgttagtttaaagaacaaattaaacttccaagttcttaggtgctgagtagcagtaggagtttgactcccctatgtctgaattgttcctgtggcactgtacaatcacttttgccatactactcrtstaactctgtagaggtaaaagaacttcacctttctatcatgcatctattgaataagagcactgttgtgtacagaacagaagacagctggtatttggcaggtatgctccttctgaggagctggtacctgaaattgttggagtgggggttttcagtataatgtaattatactgtaattaatcactttgtatccttctctgtagtgactgcgtccttcccaagctctagagttgcttcccggtgtttattgtacttaacctctttgagcagattttgttcttcatccagttattttgcacttct

SEQ ID NO: 52620 - DNA, 548 bp, Chicken  19866894303349_1
cacaaacaactatacctcgtgcactaagattcctgtaatgttctgctcaggtgaggaggaactgttatttttgaggttcgtaagaggcctggcagtgctcagagttgctacagtcttgctttgcttctgatgtgaaagcagtgaaacaccaaagagtaacacacatcagagtagtgaaataattgtgtggtccatacatgagtgtaacaaaaatgctgagtcacagtctgaagcagtgattgagcacctggagggaaggcagggccagcccaggggagctcaggtgcatgcagtgtaccygagtgacgagaagggttggagccaggacccaccccttccagagctcacttaagggctggcagtggaggtgagggtatctcgctggagatccgtgcatacctgaggccttactagggtaagcagatgctttcatttgtttctgtgcccacagctgtggcatttgagcatatcacctgctgcagcgtaggactttgctactatgatatctgtgctgtgctttctattgtgttacggtgagcttactcgtg

SEQ ID NO: 52621 - DNA, 600 bp, Chicken  19866894303350_1
tcccctcccatcagaatactgaaaatgcccataagaggcagtaaagggaaccagaacattaactctttaacttccactggttcgcatgatgttctgatgtggaatactgacaacaaaaagtcaccaaaccacaacactgagggagctgaaatttatcatgctggaaaagcgaggactcaagggggatcttatcaatgcttatgaatacctgaagggatgatgcaaagaggatggagccaggttcgtttcagtgttgctcagcactaggacaagaggcaatgggcacaaaccagaatacakgaagttccatctgaacattaagaaacayttctttacagtgcaggggatggagcgttggaacaggctgcccagagagactttagagtctccttaaaaaaagacaggctgatggagttggagttgttcacctagagcaggttccaggaagaccttctagcagcctttcagcacttgaaggaggctyacaaaaakgatagggagatatgttttatgggaaaatgtagtgataggacaaagggtaattgttttaaattaaaagaagaaagctttagattaggcattaggaagaaattattaact

SEQ ID NO: 52622 - DNA, 600 bp, Chicken  19866894303350_2
ccataagaggcagtaaagggaaccagaacattaactctttaacttccactggttcgcatgatgttctgatgtggaatactgacaacaaaaagtcaccaaaccacaacactgagggagctgaaatttatcatgctggaaaagcgaggactcaagggggatcttatcaatgcttatgaatacctgaagggatgatgcaaagaggatggagccaggttcgtttcagtgttgctcagcactaggacaagaggcaatgggcacaaaccagaatacakgaagttccatctgaacattaagaaacayttctttacagtgcaggggatggagcgttggaacaggctgcccagagagactttagagtctccttaaaaaaagacaggctgatggagttggagttgttcacctagagcaggttccaggaagaccttctagcagcctttcagcacttgaaggaggctyacaaaaakgatagggagatatgttttatgggaaaatgtagtgataggacaaagggtaattgttttaaattaaaagaagaaagctttagattaggcattaggaagaaattattaactataaagacagtaaggcacaggaacaggt

SEQ ID NO: 52623 - DNA, 600 bp, Chicken  19866894303350_3
gatcttatcaatgcttatgaatacctgaagggatgatgcaaagaggatggagccaggttcgtttcagtgttgctcagcactaggacaagaggcaatgggcacaaaccagaatacakgaagttccatctgaacattaagaaacayttctttacagtgcaggggatggagcgttggaacaggctgcccagagagactttagagtctccttaaaaaaagacaggctgatggagttggagttgttcacctagagcaggttccaggaagaccttctagcagcctttcagcacttgaaggaggctyacaaaaakgatagggagatatgttttatgggaaaatgtagtgataggacaaagggtaattgttttaaattaaaagaagaaagctttagattaggcattaggaagaaattattaactataaagacagtaaggcacaggaacaggttttccagagaagttctgaatgctcctccccagaagtgttcaacatcagactagatggggctttttgcaaccctgatctagttgaagatgtccctgcctatgacaggaggttggaactagatgatcttttaaggttccttccaactcaaatcattct

SEQ ID NO: 52624 - DNA, 600 bp, Chicken  19866894303350_4
caatgcttatgaatacctgaagggatgatgcaaagaggatggagccaggttcgtttcagtgttgctcagcactaggacaagaggcaatgggcacaaaccagaatacakgaagttccatctgaacattaagaaacayttctttacagtgcaggggatggagcgttggaacaggctgcccagagagactttagagtctccttaaaaaaagacaggctgatggagttggagttgttcacctagagcaggttccaggaagaccttctagcagcctttcagcacttgaaggaggctyacaaaaakgatagggagatatgttttatgggaaaatgtagtgataggacaaagggtaattgttttaaattaaaagaagaaagctttagattaggcattaggaagaaattattaactataaagacagtaaggcacaggaacaggttttccagagaagttctgaatgctcctccccagaagtgttcaacatcagactagatggggctttttgcaaccctgatctagttgaagatgtccctgcctatgacaggaggttggaactagatgatcttttaaggttccttccaactcaaatcattctgtgattca

SEQ ID NO: 52625 - DNA, 600 bp, Chicken  19866894303351_1
tccagtgacctccacaggcactttaacttcatagggcttgaaaactaagatactggctggtcattaacttacgatgccaccaaatgagccctcgtggtaccacccagctggtgtgagaaacacgcagcactcttggcttcctcagcccatgcctgcagcagtgtcccagggtcagctaggaaggctcagcagcagccaggacagcacagtgactccatcaatctgctctatagaggtgtgtgtttcacttagaagagtgaccacagacttcagaaacaaaatgcacgccaacagctccayaacagcctgggatcgggaagtaagggctcttgtaggtgctgtctatgtatttatttcacctgacttggtgtttaaaagacttctgtgtataatttctctctctccttccatcctgaggtaggagcaagaaaccagaaccccaccagcctgcctcatagcactgcccataggcactctgcaagcactgaatcagtttggcagcgaagctttcggaccaggaatggatccaagccggagaggataacggtggccatccagcctcctccggcacagcgtgctcttggctggaatatcctcagc

SEQ ID NO: 52626 - DNA, 599 bp, Chicken  19866894303353_1
  misc_feature (1)..(219): n is any nucleotide
nnnnnnnnnnnnnnnnnnnnnnnnnnnnnnnnnnnnnnnnnnnnnnnnnnnnnnnnnnnnnnnnnnnnnnnnnnnnnnnnnnnnnnnnnnnnnnnnnnnnnnnnnnnnnnnnnnnnnnnnnnnnnnnnnnnnnnnnnnnnnnnnnnnnnnnnnnnnnnnnnnnnnnnnnnnnnnnnnnnnnnnnnnnnnnnnnnnnnnnnnnnnnnnnnnnnnnnnnnnatcaaaaacagagtggggaggtaaatttctactaaaatttacagtacccattaacaatgcccacctgaaataatttcagckacatttttaactgtaggagccaagttaaaatagtttggctggactgactttattagaagcttatgaattaaactgagaatgaatgcgtttagtagaggttttctggcatcaaagaactagctgcaataagctttcttggactaagctgaattattaatgttgattatataagagtaccattcacctttcaaatgctgagggtaattaggaatcgctcagcagaatagctggggagaaatcactcaaacaaytttcttatgcagttcctttgaaagaaaaagaaaattaaatctctgcaa

SEQ ID NO: 52627 - DNA, 600 bp, Chicken  19866894303353_2
taaaatttacagtacccattaacaatgcccacctgaaataatttcagckacatttttaactgtaggagccaagttaaaatagtttggctggactgactttattagaagcttatgaattaaactgagaatgaatgcgtttagtagaggttttctggcatcaaagaactagctgcaataagctttcttggactaagctgaattattaatgttgattatataagagtaccattcacctttcaaatgctgagggtaattaggaatcgctcagcagaatagctggggagaaatcactcaaacaaytttcttatgcagttcctttgaaagaaaaagaaaattaaatctctgcaagaaagactgccctgctaatacgcatgctttcagcagatttcaaaaagacaaaaaaaaaaaattcttttcttgcaaattacatttgtagttaaacattcacttttgaaatagaatgttttcagcaccatggcatcagaaaggaaatggagatgttgctctgaatgcttaacgatacactgagctgctcgcttttaataaaatctcatttcaccaagatcattctgctgagaaagatgtgttgaataacactgg

SEQ ID NO: 52628 - DNA, 600 bp, Chicken  19866894303353_3
ttattagaagcttatgaattaaactgagaatgaatgcgtttagtagaggttttctggcatcaaagaactagctgcaataagctttcttggactaagctgaattattaatgttgattatataagagtaccattcacctttcaaatgctgagggtaattaggaatcgctcagcagaatagctggggagaaatcactcaaacaaytttcttatgcagttcctttgaaagaaaaagaaaattaaatctctgcaagaaagactgccctgctaatacgcatgctttcagcagatttcaaaaagacyaaaaaaaaaaattcttttcttgcaaattacatttgtagttaaacattcacttttgaaatagaatgttttcagcaccatggcatcagaaaggaaatggagatgttgctctgaatgcttaacgatacactgagctgctcgcttttaataaaatctcatttcaccaagatcattctgctgagaaagatgtgttgaataacactggaaagccactgaaccaacaccatcatattacatcatcgatattaaatattctcctttgtgcactcacgccatgttttcctgcatttgatgcatgagaac

SEQ ID NO: 52629 - DNA, 599 bp, Chicken  19866894303354_1
  misc_feature (1)..(85): n is any nucleotide
nnnnnnnnnnnnnnnnnnnnnnnnnnnnnnnnnnnnnnnnnnnnnnnnnnnnnnnnnnnnnnnnnnnnnnnnnnnnnnnnnnnnnctcagagggcatgtgtgtatgtgccttcatttgaaaaaggttgaacctgtcaaacttgtctgtagcatagctgcatgtttaagaaggactggaaaagtaacatttctttgcctccaccctgcgtggcaaaatgttttctaaaccacagcaaggaaattgactgaagaggggagaaaagcttctatgaaaagacttcttttaaaatataattcgcrtaaaggccacrtggacaatgtgtatgaacctcataggtgcaagcatgtctgctgttaatcgagtacttccttcgtttttctgtttctcacctctctttgcagcctgtctgatgcctgtctgtgctttctgagaagggcgttccattgcctctttttatgcatctcttcctctttctattttaaatgatgtaggtaatttggaaactattactcaggaaggggacagcacttctttctttttttatgcttactgctgaaaatccaagcttttgtaatctattcacgatctgagtactggg

SEQ ID NO: 52630 - DNA, 599 bp, Chicken  19866894303354_2
  misc_feature (1)..(74): n is any nucleotide
nnnnnnnnnnnnnnnnnnnnnnnnnnnnnnnnnnnnnnnnnnnnnnnnnnnnnnnnnnnnnnnnnnnnnnnnnnctcagagggcatgtgtgtatgtgccttcatttgaaaaaggttgaacctgtcaaacttgtctgtagcatagctgcatgtttaagaaggactggaaaagtaacatttctttgcctccaccctgcgtggcaaaatgttttctaaaccacagcaaggaaattgactgaagaggggagaaaagcttctatgaaaagacttcttttaaaatataattcgcrtaaaggccacrtggacaatgtgtatgaacctcataggtgcaagcatgtctgctgttaatcgagtacttccttcgtttttctgtttctcacctctctttgcagcctgtctgatgcctgtctgtgctttctgagaagggcgttccattgcctctttttatgcatctcttcctctttctattttaaatgatgtaggtaatttggaaactattactcaggaaggggacagcacttctttctttttttatgcttactgctgaaaatccaagcttttgtaatctattcacgatctgagtactggggagatgtagct

SEQ ID NO: 52631 - DNA, 600 bp, Chicken  19866894303355_1
accaggcccaccaaacttcttcatgtccctgcagtagtggcacatgccacactcgccttgcatgcaggccttgcatttccggcagcgcacacgcctccgtcgggcacctgacacgatgggggacatcgtaggcctgatgggcgttgggcgtggggttggcttcatggtgtgaggcttggtgatggggatggtgggcaggcgcactctcagccgggcctgcagctttagctgaggatagaagagggaaggagttgaggtgggttggatggcagtaccctccatgagacagcagacatctaycccactgcatccctctaggagcagccatgatgctgcatgcgctcaaaaagccagtatgagaacagcgctgtggacgcaccaagcacctgaatgccacacccacagcgtgcaaatacctcctgctctcctctcccagaagagtggcccacgcccttgagcagtacaagtaccctgtggactcacagcagatccccccagacaaagcaaacgccagcacactgggggctgcccacggagccccatgctgtgcccctgcagcactccctggtcagtacggaggtagtgctgccaagctccaga

SEQ ID NO: 52632 - DNA, 600 bp, Chicken  19866894303356_1
ttaagcaataagttgaatcaaccaagtttatatgaaatcctagcccaaggtagcacagtacttaaagtgggctttaacagtcagaaggggaagagaactgatggaatttaacagaatgcaaaagatctattgttgtccttctaaagataatttcatacatacatgttgctctagtaatttattcctaccagtcagcgatgcaaaacttcagatcaaagctttcctcagccaactcccctcacctcacttaccaaattgtaaatgccaagcagcaatgcttcaatgcaaccgttactttgyctatccctgctggcagtaagacgcagrtatacccagatcagctctggcaaaaattgcagtgtgaatctcttcagccgaacttcagaactacgatatagctcaaagagctggtggcaaacaggctccaggagctgtgaaaagacaaaaagggtcatgaattactcttaggcttctctaatgaaagagaacgcaatatcaaatgtatgggctatacaatgcagccactgtagtcattaaagatgacatccctcaatgtcaagtaaatgaaygaaycaaaacaatatttgtgttcattttaag

SEQ ID NO: 52633 - DNA, 600 bp, Chicken  19866894303356_2
ttatatgaaatcctagcccaaggtagcacagtacttaaagtgggctttaacagtcagaaggggaagagaactgatggaatttaacagaatgcaaaagatctattgttgtccttctaaagataatttcatacatacatgttgctctagtaatttattcctaccagtcagcgatgcaaaacttcagatcaaagctttcctcagccaactcccctcacctcacttaccaaattgtaaatgccaagcagcaatgcttcaatgcaaccgttactttgyctatccctgctggcagtaagacgcagrtatacccagatcagctctggcaaaaattgcagtgtgaatctcttcagccgaacttcagaactacgatatagctcaaagagctggtggcaaacaggctccaggagctgtgaaaagacaaaaagggtcatgaattactcttaggcttctctaatgaaagagaacgcaatatcaaatgtatgggctatacaatgcagccactgtagtcattaaagatgacatccctcaatgtcaagtaaatgaaygaaycaaaacaatatttgtgttcattttaaggaggtctgcaaatatagacttgagggg

SEQ ID NO: 52634 - DNA, 566 bp, Chicken  19866894303356_3
cagcaatgcttcaatgcaaccgttactttgyctatccctgctggcagtaagacgcagrtatacccagatcagctctggcaaaaattgcagtgtgaatctcttcagccgaacttcagaactacgatatagctcaaagagctggtggcaaacaggctccaggagctgtgaaaagacaaaaagggtcatgaattactcttaggcttctctaatgaaagagaacgcaatatcaaatgtatgggctatacaatgcagccactgtagtcattaaagatgacatccctcaatgtcaagtaaatgaaygaaycaaaacaatatttgtgttcattttaaggaggtctgcaaatatagacttgaggggaactggtatgctgaactgggaaacgtggccttactacacaaccatcttgttcttcaagaatactgtcttctaggactgtcagtatgataccaatttaaggtatgtgacagattaatggcttgaactacgtggaacacagaggttcaacggtgctgttataatgcttagaaaagtacaaaggttggagattagtagaagctgctgaaga

SEQ ID NO: 52635 - DNA, 562 bp, Chicken  19866894303356_4
aatgcttcaatgcaaccgttactttgyctatccctgctggcagtaagacgcagrtatacccagatcagctctggcaaaaattgcagtgtgaatctcttcagccgaacttcagaactacgatatagctcaaagagctggtggcaaacaggctccaggagctgtgaaaagacaaaaagggtcatgaattactcttaggcttctctaatgaaagagaacgcaatatcaaatgtatgggctatacaatgcagccactgtagtcattaaagatgacatccctcaatgtcaagtaaatgaaygaaycaaaacaatatttgtgttcattttaaggaggtctgcaaatatagacttgaggggaactggtatgctgaactgggaaacgtggccttactacacaaccatcttgttcttcaagaatactgtcttctaggactgtcagtatgataccaatttaaggtatgtgacagattaatggcttgaactacgtggaacacagaggttcaacggtgctgttataatgcttagaaaagtacaaaggttggagattagtagaagctgctgaaga

SEQ ID NO: 52636 - DNA, 600 bp, Chicken  19866894303363_1
gaagtttttcacacagaaggtggtgacacactggaacaggttgccccaggaggttgtggatgccccatccctggaggcattcaaggccaggctggatgtggctctgggcagtctggtctagtggttggcgaccccagacatagcaggggggttgaaactcgatgatcattatggttcttttcaactcaggccatctatgattctatgattctatgattcagagtaagggcagaggcagtacaaaaccttttagcaatattacgttttctcttcagcagccctgacagcaatcagtactgwggcactgctccagcactgatggtggaaatagctgcccccaaagccaagaaagctrcctgtattcaaggaaaagcttgaagctgtgcaagctatagcacataatcatcattaaaaaatagaggaaaaatactttgttagtgaattgtgcttttatggttaccacagcttggcattcaatctatgttcctgatttactgtgttactacattttggctagcagctagagaacatggctgaacttcagatacagggcaagaaccgcttctgctctgatagcattcaatttgcactgattccaga

SEQ ID NO: 52637 - DNA, 600 bp, Chicken  19866894303363_2
gtggatgccccatccctggaggcattcaaggccaggctggatgtggctctgggcagtctggtctagtggttggcgaccccagacatagcaggggggttgaaactcgatgatcattatggttcttttcaactcaggccatctatgattctatgattctatgattcagagtaagggcagaggcagtacaaaaccttttagcaatattacgttttctcttcagcagccctgacagcaatcagtactgwggcactgctccagcactgatggtggaaatagctgcccccaaagccaagaaagctrcctgtattcaaggaaaagcttgaagctgtgcaagctatagcacataatcatcattaaaaaatagaggaaaaatactttgttagtgaattgtgcttttatggttaccacagcttggcattcaatctatgttcctgatttactgtgttactacattttggctagcagctagagaacatggctgaacttcagatacagggcaagaaccgcttctgctctgatagcattcaatttgcactgattccagattgaaattgcacatatctgccagaatttttcaagttttgtttgtaaagatagcat

SEQ ID NO: 52638 - DNA, 600 bp, Chicken  19866894303363_3
ggcattcaatctatgttcctgatttactgtgttactacattttggctagcagctagagaacatggctgaacttcagatacagggcaagaaccgcttctgctctgatagcattcaatttgcactgattccagattgaaattgcacatatctgccagaatttttcaagttttgtttgtaaagatagcatttttcaaaattccatctaataaaagagcacctactaacaaaatttaaatattactaccaatattgctaccaatctgtattcattgtctttcaaatcctttcagggttgccatwccattcctgctgtttgcatgaaagggtacaaacacatgcaactctccagctcctgtgaacctcaggagaagagtgaatgatagaatggaatttgctgatgattattcccctgagactgtctctcggggaaacagtaggagaaagctgttgtagttgtgtcacagacagaactctcagatctcacattacccacattcaaaaatgtggccgagttcttaaggaatttgtgcatgaggccagtatcttgatatggcatactgtctggagtgtagagtagcatttgctttgtgctatgcacaa

SEQ ID NO: 52639 - DNA, 600 bp, Chicken  19866894303365_1
agaatgtatggagcagaatgctccccagtgctgctgccaaaagtttccagtaacattagaaacaagaatttcagagcaggccatccagcaccaaattaaacactgaattcacctgtttggacattagtcaagggtctagtttcctcagtgtgcttccataaatacacagtcacacaagcctatacccaagtatcagcttgaggcatgtttatccttgcttcagaaatatttagcaaccagatttttattcagtaagaagagcactgagcttcaccagttggaaatttgttctgttgttgygagcacagaggttccccctgcctgaggttatttatctccagaaatcatctaagagtaaaaggattcagagagaattctttcctttcaaaactgtgtgtttggggagatgaaagcattacaacttcgtgctggaactgaagatgaggagaagccaacagcctttgcccatgttcttgttcatctgccattcttttgctctcaggtgtttctttcwkttaacattaaaagctgtcattttcctgagagacaagagaaaataacatgcttragtggtatgaagctggcactgcaggctgatcc

SEQ ID NO: 52640 - DNA, 519 bp, Chicken  19866894303365_2
ttgcttcagaaatatttagcaaccagatttttattcagtaagaagagcactgagcttcaccagttggaaatttgttctgttgttgygagcacagaggttccccctgcctgaggttatttatctccagaaatcatctaagagtaaaaggattcagagagaattctttcctttcaaaactgtgtgtttggggagatgaaagcattacaacttcgtgctggaactgaagatgaggagaagccaacagcctttgcccatgttcttgttcatctgccattcttttgctctcaggtgtttctttcwkttaacattaaaagctgtcattttcctgagagacaagagaaaataacatgcttragtggtatgaagctggcactgcaggctgatccattccaccttttggtggctgtactttawaagtctctccaagaattctttaaaacttgtttttgttcccgaaggctggtcagtaccactagagttttgacataaccaagtagagaggaaaaattactacagggt

SEQ ID NO: 52641 - DNA, 518 bp, Chicken  19866894303365_3
tgcttcagaaatatttagcaaccagatttttattcagtaagaagagcactgagcttcaccagttggaaatttgttctgttgttgygagcacagaggttccccctgcctgaggttatttatctccagaaatcatctaagagtaaaaggattcagagagaattctttcctttcaaaactgtgtgtttggggagatgaaagcattacaacttcgtgctggaactgaagatgaggagaagccaacagcctttgcccatgttcttgttcatctgccattcttttgctctcaggtgtttctttcwkttaacattaaaagctgtcattttcctgagagacaagagaaaataacatgcttragtggtatgaagctggcactgcaggctgatccattccaccttttggtggctgtactttawaagtctctccaagaattctttaaaacttgtttttgttcccgaaggctggtcagtaccactagagttttgacataaccaagtagagaggaaaaattactacagggt

SEQ ID NO: 52642 - DNA, 465 bp, Chicken  19866894303365_4
cttcaccagttggaaatttgttctgttgttgygagcacagaggttccccctgcctgaggttatttatctccagaaatcatctaagagtaaaaggattcagagagaattctttcctttcaaaactgtgtgtttggggagatgaaagcattacaacttcgtgctggaactgaagatgaggagaagccaacagcctttgcccatgttcttgttcatctgccattcttttgctctcaggtgtttctttcwkttaacattaaaagctgtcattttcctgagagacaagagaaaataacatgcttragtggtatgaagctggcactgcaggctgatccattccaccttttggtggctgtactttawaagtctctccaagaattctttaaaacttgtttttgttcccgaaggctggtcagtaccactagagttttgacataaccaagtagagaggaaaaattactacagggt

SEQ ID NO: 52643 - DNA, 405 bp, Chicken  19866894303365_5
tatttatctccagaaatcatctaagagtaaaaggattcagagagaattctttcctttcaaaactgtgtgtttggggagatgaaagcattacaacttcgtgctggaactgaagatgaggagaagccaacagcctttgcccatgttcttgttcatctgccattcttttgctctcaggtgtttctttcwkttaacattaaaagctgtcattttcctgagagacaagagaaaataacatgcttragtggtatgaagctggcactgcaggctgatccattccaccttttggtggctgtactttawaagtctctccaagaattctttaaaacttgtttttgttcccgaaggctggtcagtaccactagagttttgacataaccaagtagagaggaaaaattactacagggt

SEQ ID NO: 52644 - DNA, 600 bp, Chicken  19866894303368_1
gtgctcttttgatcaagtttccctctagaaactgcagcaggagccagaatcctttggaaagccctccatataaatatcttgtttagttagtctaataaaggtattactaacggcactgctttgaggatttattgggggatttcagtaagacagtgttagcagtggaattatagtcattctctggtaagaccttgtcaatgcgagagaaaataatgctgatccaatcagagatattttgcaggatcaatgtaatattcctccgcataatcacaactgaaggattatggggctgtaccgggrgtgacaaaggatcacttgacagatcacagcctcatttgctctccttgtttcagctggtaaagcataggaaggttttaaatgtgcatttataaccctgtatcttaaataaacctgggctctgtctgaaaataacagacattattttcagtctattgcctttaaacaatattttaggctatttctgcatttttcytagctgagccayrcagragcatcttggtgtgaccttgagacaattccccctgcactgaggtggtccatgtgcatgaaaggggagaggaggcctgcgaggaggcaagg

SEQ ID NO: 52645 - DNA, 600 bp, Chicken  19866894303368_2
gtcaatgcgagagaaaataatgctgatccaatcagagatattttgcaggatcaatgtaatattcctccgcataatcacaactgaaggattatggggctgtaccgggrgtgacaaaggatcacttgacagatcacagcctcatttgctctccttgtttcagctggtaaagcataggaaggttttaaatgtgcatttataaccctgtatcttaaataaacctgggctctgtctgaaaataacagacattattttcagtctattgcctttaaacaatattttaggctatttctgcatttttcytagctgagccayrcagragcatcttggtgtgaccttgagacaattccccctgcactgaggtggtccatgtgcatgaaaggggagaggaggcctgcgaggaggcaaggaggaggaaaaggcaaatcgatatgcagcacgaaccttatagcccaaacctcatcaggagccctaaataccttggtgtaattgagcttttggttaacccagcagttcttactaggggaaatgagcattactgatcactgtgaattcaggctcaagaatgtagcatattggcaataattgataataaaacaagac

SEQ ID NO: 52646 - DNA, 600 bp, Chicken  19866894303368_3
gaaaataatgctgatccaatcagagatattttgcaggatcaatgtaatattcctccgcataatcacaactgaaggattatggggctgtaccgggrgtgacaaaggatcacttgacagatcacagcctcatttgctctccttgtttcagctggtaaagcataggaaggttttaaatgtgcatttataaccctgtatcttaaataaacctgggctctgtctgaaaataacagacattattttcagtctattgcctttaaacaatattttaggctatttctgcatttttcytagctgagccayrcagragcatcttggtgtgaccttgagacaattccccctgcactgaggtggtccatgtgcatgaaaggggagaggaggcctgcgaggaggcaaggaggaggaaaaggcaaatcgatatgcagcacgaaccttatagcccaaacctcatcaggagccctaaataccttggtgtaattgagcttttggttaacccagcagttcttactaggggaaatgagcattactgatcactgtgaattcaggctcaagaatgtagcatattggcaataattgataataaaacaagacctcctcattact

SEQ ID NO: 52647 - DNA, 600 bp, Chicken  19866894303368_4
aaaataatgctgatccaatcagagatattttgcaggatcaatgtaatattcctccgcataatcacaactgaaggattatggggctgtaccgggrgtgacaaaggatcacttgacagatcacagcctcatttgctctccttgtttcagctggtaaagcataggaaggttttaaatgtgcatttataaccctgtatcttaaataaacctgggctctgtctgaaaataacagacattattttcagtctattgcctttaaacaatattttaggctatttctgcatttttcytagctgagccayrcagragcatcttggtgtgaccttgagacaattccccctgcactgaggtggtccatgtgcatgaaaggggagaggaggcctgcgaggaggcaaggaggaggaaaaggcaaatcgatatgcagcacgaaccttatagcccaaacctcatcaggagccctaaataccttggtgtaattgagcttttggttaacccagcagttcttactaggggaaatgagcattactgatcactgtgaattcaggctcaagaatgtagcatattggcaataattgataataaaacaagacctcctcattactc

SEQ ID NO: 52648 - DNA, 600 bp, Chicken  19866894303368_5
taatgctgatccaatcagagatattttgcaggatcaatgtaatattcctccgcataatcacaactgaaggattatggggctgtaccgggrgtgacaaaggatcacttgacagatcacagcctcatttgctctccttgtttcagctggtaaagcataggaaggttttaaatgtgcatttataaccctgtatcttaaataaacctgggctctgtctgaaaataacagacattattttcagtctattgcctttaaacaatattttaggctatttctgcatttttcytagctgagccayrcagragcatcttggtgtgaccttgagacaattccccctgcactgaggtggtccatgtgcatgaaaggggagaggaggcctgcgaggaggcaaggaggaggaaaaggcaaatcgatatgcagcacgaaccttatagcccaaacctcatcaggagccctaaataccttggtgtaattgagcttttggttaacccagcagttcttactaggggaaatgagcattactgatcactgtgaattcaggctcaagaatgtagcatattggcaataattgataataaaacaagacctcctcattactcatgt

SEQ ID NO: 52649 - DNA, 506 bp, Chicken  19866894303372_1
ccacctccctcttacaagatatccaagtttaatgttttctttattatttttttttaatgattactactataattttcttccaggaaatgcttttgtgccaagcattgtcatgttgacccattgtactcaaaaataaattgatagtacagcagtatgtccaggatcagtcccattcacggcaattgctgtaactgcagttattggaaaacagtaactggtgaaatgtgcacagttgctcagatgcatgcactgcatatggcacttgcatgattacagcttgctgtgttctgcacagtgtayggcaagtggaaaacaaacccagtgggtggaattcttctggcaaactgcacgctggaggcagatgccggtcaggtggttaatgtatagctgctcattaactcatatggcagaagcactcctctgcagtagattgtgtagctccaactacttgcgctgtttcattcactctctccttgtcttagagcctaactggacccatccagtaa

SEQ ID NO: 52650 - DNA, 600 bp, Chicken  19866894303380_1
ctaaagcaaaatataaatcagtatttaatgaagagtttggcattcaggaaaatttacaatagcaaagctatgtgtaatggaaaaatatatttctggccttttcagtggtgatcacgccttgtatatggcaagaatcctagtaagatgcaatcaatttctttcaggaaatccagtaaatggtctacatcagctgaatatattaaatgaaattatagacagacagatagatagatatgcacttacatatataaaaaaatgggaactctaaaacctttatgaatatttgactggaattgaatmygtctagatcaaaattaatgtgggaggaggggtggagttacaaaacttgtaatgcctgagcatgcagagaagttgtaccaaaaatacccccaaatttatcacaatgaacgaagcactgttaatggcgtcatttgtgtgtttgtgtgtgtgtgtaaagaataacagagcctaggaactccatcttgagtgatattatttaatgataagttaagaaaaaaataattggatagcctcgatggaacagttcaaagagactgtaaaagtgcaaatatcattagagattaatgtgcagctttctta

SEQ ID NO: 52651 - DNA, 600 bp, Chicken  19866894303380_2
taaagcaaaatataaatcagtatttaatgaagagtttggcattcaggaaaatttacaatagcaaagctatgtgtaatggaaaaatatatttctggccttttcagtggtgatcacgccttgtatatggcaagaatcctagtaagatgcaatcaatttctttcaggaaatccagtaaatggtctacatcagctgaatatattaaatgaaattatagacagacagatagatagatatgcacttacatatataaaaaaatgggaactctaaaacctttatgaatatttgactggaattgaatmygtctagatcaaaattaatgtgggaggaggggtggagttacaaaacttgtaatgcctgagcatgcagagaagttgtaccaaaaatacccccaaatttatcacaatgaacgaagcactgttaatggcgtcatttgtgtgtttgtgtgtgtgtgtaaagaataacagagcctaggaactccatcttgagtgatattatttaatgataagttaagaaaaaaataattggatagcctcgatggaacagttcaaagagactgtaaaagtgcaaatatcattagagattaatgtgcagctttcttac

SEQ ID NO: 52652 - DNA, 517 bp, Chicken  19866894303380_3
atttgtgtgtttgtgtgtgtgtgtaaagaataacagagcctaggaactccatcttgagtgatattatttaatgataagttaagaaaaaaataattggatagcctcgatggaacagttcaaagagactgtaaaagtgcaaatatcattagagattaatgtgcagctttcttaccttatatgcagcacagagtagacagatataggataaataccatgtaagctaagaaactgtgcatgaaaattttaactgtacactaaaatactctgtaaataatgccatagggggtctgtctttaaaawgatataacacccaaaattctctaagaacatgagggactactctctgtatcaacgtataggaattcacaatgataatgctgatgtagaagtgttagctaagtttgctgaggaatcatgaggcttaacagtcataacagaacataatcttcaagtttggttgcagggagtgagagaatcctgcatggaactgcatgagttgcactcctgcgggcagtaa

SEQ ID NO: 52653 - DNA, 599 bp, Chicken  19866894303382_1
  misc_feature (1)..(18): n is any nucleotide
nnnnnnnnnnnnnnnnnntcagcacctgcctccccgtactggagtttgttccatacccacagtgggtttttcattctggcttctcctggcctgctttcaatcaatcactctggccacgcacctccaagggtagatgagaagcagattttatcaaattggcataaaatgcagtaaagccgcgctggcttttgataatttcagtcctgtgcttcacagggtttattagcaacattttcctattgatttcccacagctgctgcaggagatctccctgtaggcgcaaagaggggaataccaccyagcccagcacttgtggtctgcccctgcaatgcccagcaaaggatggagctggggcaccagcaytgcagcttgcaggaaccagtcctcagctgggctgtaaaggtacgcacaagcaccctagtgagaaacaggggctgctgagctcacactcagctggacgagagggacgcgtgagcagggggtggctctggaccttcacctccctctgctcgatgtgccccgcctgccaaggagatgccctgggaaaggcatcagcatttaycctggctgtgggtgtggggcagcgtyggcaccgcgtg

SEQ ID NO: 52654 - DNA, 600 bp, Chicken  19866894303382_2
gggtttttcattctggcttctcctggcctgctttcaatcaatcactctggccacgcacctccaagggtagatgagaagcagattttatcaaattggcataaaatgcagtaaagccgcgctggcttttgataatttcagtcctgtgcttcacagggtttattagcaacattttcctattgatttcccacagctgctgcaggagatctccctgtaggcgcaaagaggggaataccaccyagcccagcacttgtggtctgcccctgcaatgcccagcaaaggatggagctggggcaccagcaytgcagcttgcaggaaccagtcctcagctgggctgtaaaggtacgcacaagcaccctagtgagaaacaggggctgctgagctcacactcagctggacgagagggacgcgtgagcagggggtggctctggaccttcacctccctctgctcgatgtgccccgcctgccaaggagatgccctgggaaaggcatcagcatttaycctggctgtgggtgtggggcagcgtyggcaccgcgtgggctctgacagcaggaggggctttatgtgatgcaccgcgcactgactgtgctgaccttgtagag

SEQ ID NO: 52655 - DNA, 600 bp, Chicken  19866894303382_3
gagatctccctgtaggcgcaaagaggggaataccaccyagcccagcacttgtggtctgcccctgcaatgcccagcaaaggatggagctggggcaccagcaytgcagcttgcaggaaccagtcctcagctgggctgtaaaggtacgcacaagcaccctagtgagaaacaggggctgctgagctcacactcagctggacgagagggacgcgtgagcagggggtggctctggaccttcacctccctctgctcgatgtgccccgcctgccaaggagatgccctgggaaaggcatcagcatttaycctggctgtgggtgtggggcagcgtyggcaccgcgtgggctctgacagcaggaggggctttatgtgatgcaccgcgcactgactgtgctgaccttgtagaggtgtgcgtcgtcctcttggcgtccttcctccttccttctccacctgtgtgacaatgactatccctgactataaaatcaaacacagcagctgcaccagcgcctttttatttaccaggaagcaacgtttgctctcacgatgactaatgttaacggaggtaaagagcaacagcagtgcagctgctgcagcccagcgctgctc

SEQ ID NO: 52656 - DNA, 600 bp, Chicken  19866894303382_4
tgtaggcgcaaagaggggaataccaccyagcccagcacttgtggtctgcccctgcaatgcccagcaaaggatggagctggggcaccagcaytgcagcttgcaggaaccagtcctcagctgggctgtaaaggtacgcacaagcaccctagtgagaaacaggggctgctgagctcacactcagctggacgagagggacgcgtgagcagggggtggctctggaccttcacctccctctgctcgatgtgccccgcctgccaaggagatgccctgggaaaggcatcagcatttaycctggctgtyggtgtggggcagcgtyggcaccgcgtgggctctgacagcaggaggggctttatgtgatgcaccgcgcactgactgtgctgaccttgtagaggtgtgcgtcgtcctcttggcgtccttcctccttccttctccacctgtgtgacaatgactatccctgactataaaatcaaacacagcagctgcaccagcgcctttttatttaccaggaagcaacgtttgctctcacgatgactaatgttaacggaggtaaagagcaacagcagtgcagctgctgcagcccagcgctgctcctgcttggct

SEQ ID NO: 52657 - DNA, 600 bp, Chicken  19866894303382_5
ggaataccaccyagcccagcacttgtggtctgcccctgcaatgcccagcaaaggatggagctggggcaccagcaytgcagcttgcaggaaccagtcctcagctgggctgtaaaggtacgcacaagcaccctagtgagaaacaggggctgctgagctcacactcagctggacgagagggacgcgtgagcagggggtggctctggaccttcacctccctctgctcgatgtgccccgcctgccaaggagatgccctgggaaaggcatcagcatttaycctggctgtgggtgtggggcagcgtyggcaccgcgtgggctctgacagcaggaggggctttatgtgatgcaccgcgcactgactgtgctgaccttgtagaggtgtgcgtcgtcctcttggcgtccttcctccttccttctccacctgtgtgacaatgactatccctgactataaaatcaaacacagcagctgcaccagcgcctttttatttaccaggaagcaacgtttgctctcacgatgactaatgttaacggaggtaaagagcaacagcagtgcagctgctgcagcccagcgctgctcctgcttggctgctggggcccacctgg

SEQ ID NO: 52658 - DNA, 600 bp, Chicken  19866894303383_1
gcaaataatggggaacgaggctccggatccacacatctttcctcctgagactcaaagttcagtaccataaaactcaaagtttaaatgcaaagtgcttagcgttggccaaagcaaacacgctgaagctcacggttttaatgcacaaatgcacagcacgagaacatttttaaaaacaccaattatactattgggaaatcaggaaaaaaagcctgctcaaatatattctcctttctggctccatagcacagagaaattgaggtatctccagcataacaagcactggatttaatacagacaatwcaggggaattacctcagaaaggtaatcaggttcatcttcctctgtgtctaccaaacaacattaaagaactataaaggttggctgatgaaccataataatcagacagggcttttgtcgttgttcatttgttcttgttttttctttttttttccttcattaaaataaatctacgcaagacttacatgagctcaagtatttatttgaaagaacaaaacactacttagacattcttactcataaaggaatactgagataagagaagacttgatcttacagaataatattagcatcacccacttg

SEQ ID NO: 52659 - DNA, 600 bp, Chicken  19866894303385_1
atatgtcagtaaatcgattcaccactaatatctgcctcaaaaaaaagttttgcatggcagttcttactgccataccacctgggaaatgaaaatatctgcatgtcactatgtacaagactgcttctcatatgtaaaagaatttctaattttacatcttcagctggctgctaattgcacaagattctcaatttactattatgttaataacccccagtccttacaatgctatgcgatatgagcacttgagaggaggagatcaagaaaagcccactcaaatgagaaaaaagagaagaggagaakgaaaccacacaacaccccaatttcagacccatccaccaaggccttggcagaagagaggagctttgcactgtgaatggaaagaacaaacttgagctatggtgaacggtaggtgggaaccagtttcatagccagagatctactgtggaataggcttgagtatacatggacaaagaaacgtaacttgtgaataattctagatgcagctagtcagtgcatgtatagataataacactatgaaaatatttgcatttggtacgcgttagaaagctttcattatgaactccaaacaaatattagttt

SEQ ID NO: 52660 - DNA, 599 bp, Chicken  19866894303389_1
  misc_feature (1)..(109): n is any nucleotide
nnnnnnnnnnnnnnnnnnnnnnnnnnnnnnnnnnnnnnnnnnnnnnnnnnnnnnnnnnnnnnnnnnnnnnnnnnnnnnnnnnnnnnnnnnnnnnnnnnnnnnnnnnnnnattcataaagtgtgattaagaagtaaaccagtaacacaacatttaaagacctgcttgtgaaaaaaaagttcctttctttgaatttaagttccctgagttctaagtataccccaacctataaaagtgataggtaaaattcaggctcatgaacactgcttactgttctgtttagttcactgtgttaagctaargaagtataaaaccatcaccaattgcactaaatcacctggaaaaaaacagcaatttaattatggaagttcttcagtcccataagaatagaagagaaaaaaggccacgggtggcatacaagtcagacaacacaggtaacagctttatrgcatagcatgatgagactttcttcctcttagtagaagcccaagctttggtagctttcctttctttcttgaatgatgctcttactgcaattatacagctgtgactacacagtcagtcagttaatggaactgatctgggattaagaagtccacct

SEQ ID NO: 52661 - DNA, 600 bp, Chicken  19866894303389_2
aacatttaaagacctgcttgtgaaaaaaaagttcctttctttgaatttaagttccctgagttctaagtataccccaacctataaaagtgataggtaaaattcaggctcatgaacactgcttactgttctgtttagttcactgtgttaagctaargaagtataaaaccatcaccaattgcactaaatcacctggaaaaaaacagcaatttaattatggaagttcttcagtcccataagaatagaagagaaaaaaggccacgggtggcatacaagtcagacaacacaggtaacagctttatrgcatagcatgatgagactttcttcctcttagtagaagcccaagctttggtagctttcctttctttcttgaatgatgctcttactgcaattatacagctgtgactacacagtcagtcagttaatggaactgatctgggattaagaagtccacctgacagtttcagcgttgaactgatccaggcagtagaacagcatatacgcagtggcagctgagacctgccagtggaatacagtcggctcacactgcagccaataatatgttattcagtgactaacatgtaacatcaagcaatacagctt

SEQ ID NO: 52662 - DNA, 482 bp, Chicken  19866894303389_3
agaagcccaagctttggtagctttcctttctttcttgaatgatgctcttactgcaattatacagctgtgactacacagtcagtcagttaatggaactgatctgggattaagaagtccacctgacagtttcagcgttgaactgatccaggcagtagaacagcatatacgcagtggcagctgagacctgccagtggaatacagtcggctcacactgcagccaataatatgttattcagtgactaacatgtaacatcaagcaatacagcttgcttgaaccatcttgaaacttcaaggacaaarcagggagaccggcagagttggtttttgttctgtttgttttccttggcacggctctgcttctatccatatccaaacatccccaaatgcaaatcatatatcctggacttctgaggccattacacagttctaccttagatcagtttcctcttcatccattttacagatgagtaagagtattagga

SEQ ID NO: 52663 - DNA, 600 bp, Chicken  19866894303394_1
atcataagcaaaaccaaaggctttaagagaaaccaaaaactccatcttacctttgtgcccctgagctccctgcactggctcaccagaggtgagcctttgagctgcctcggagaacctggcagcatagcagacaccctgtggcagtttttcactctgatgcatgtcagggacatgcattcacttctctgcagaatgtctctagcaggaactttccaagctgaagcgtgtcctttttctctgaggaagattcataatctgaagtcagagaggatctccaaatggcaggaactggtcagtgcyacttaccagtggcagcgtttttgctcttggtgttacttagcatgattgcagcctttatggtccatagccttctctacagtcccctctttgcagtgccactgtggaaatgtctgtgtaaatgtgagtttcaatagccattatactcccagcagcagcaatccgcgtttggtacctcagagcctgctaatctgtcgtagtcataaggctacttatctcccgctcttttcaaatacctcagcagtggatacaaaaggcaaatggcagaagctattcttatgtggagtctgagagggtgttttt

SEQ ID NO: 52664 - DNA, 600 bp, Chicken  19866894303396_1
gatgtagactttggaattcaatctgacagtgagttccgacccccaatacggaggggcaacattggcaggggaagagtcctgcgaggaaagcgtattacaaggggtgctgctaaagctaaactattcaaaggagacatcaaaccccccctaaagaaatggaaccctaaaaagctgcagccaggccctgatcagaagccaactgtgcaacctgatcaaatgccagaaactgctgatggacccaaccagaggccggtggccatccagcacctcaatcagaagctgcctccacaacctaatcaraggccggctatagccaccccgagacctattctcaggctcccraagcctgcacatgttttcagaaatctcaattttgaccttgtggataagtctgacattttctcaacgtttggaatacaaatcataaaatgggctggatttcacaccataaaaaacgatgcggaattttcccgactctttggagctctctttgagctggagacagaaacgtgtgcaaaaatgcttgcttcgttcaaatgctccttaaagccagaacacagagattattgtttctttaccatcaagagtttacagcatgct

SEQ ID NO: 52665 - DNA, 600 bp, Chicken  19866894303396_2
ccaatacggaggggcaacattggcaggggaagagtcctgcgaggaaagcgtattacaaggggtgctgctaaagctaaactattcaaaggagacatcaaaccccccctaaagaaatggaaccctaaaaagctgcagccaggccctgatcagaagccaactgtgcaacctgatcaaatgccagaaactgctgatggacccaaccagaggccggtggccatccagcacctcaatcagaagctgcctccacaacctaatcaraggccggctatagccaccccgagacctattctcaggctcccraagcctgcacatgttttcagaaatctcaattttgaccttgtggataagtctgacattttctcaacgtttggaatacaaatcataaaatgggctggatttcacaccataaaaaacgatgcggaattttcccgactctttggagctctctttgagctggagacagaaacgtgtgcaaaaatgcttgcttcgttcaaatgctccttaaagccagaacacagagattattgtttctttaccatcaagagtttacagcatgctgctttgaaaactcccaaggtggacaatgagtttttaaatatg

SEQ ID NO: 52666 - DNA, 590 bp, Chicken  19866894303396_3
acaaagaactgcttctttgaagtaataaaaccgtttgataaatatataatgaggctacaagaccgcctgctaaagggtgttacgcctctgcttatggcctgcaatgcttatgaattaagcattaagacaaacggttttggtaaccccagagaaatggcgagtgcttttgagatcactgtttctctttgtcgtaagtcgttagcacttctgggtcagacctttgcattagcgtctgttttcaggcaagagaaaatactggaagctgtagggctccaggagatggctccagcaccaacactrttcccaaactttgatgattcgacgttgtttggaagagaatacattgagaacttaaaggcttggctggagaagagtggctatccaattcagatgaaaaaagctgaagcagagtccacagagcagcttaaaaagccctctcctgacacaaaagttaaaagtgagtgaatccttgtaagattctttgcagtatgtggtttctctatttgtcagtagaatgttgccttgttgctacagctttactagttcacgaataacagatggtgggaattccatgtaaatcacaggcagtg

SEQ ID NO: 52667 - DNA, 600 bp, Chicken  19866894303397_1
ggctgtgaaacgcaaggactgaggtaatgaccaccgcttcattaacccatgactgcttcgccttatggctgatcgattccccgccagagctgccagcccagccacgagatgtgcacggagcacggacacaacgcccggacactgcgctgcctatctgcaccccaaaccactgctaaaacaggaggaagatgccagcaggatgaccttccagcaccacagcctgccccagtgttccctttctcattagtagaaaggttatggagcggcccttcaaaaacacctcgtccccatgtccccacygmcacctgctytgtgctctttgcggacggagcagaaggatctcatgagcctcccactggagagagccccragggaggtcacgtatgaggtggtgaggggacgcttcatgccccacagaaccagaaggggacagggacacattggggccatatcaggtggctgagcctggcactccattgggccccatgggacattcccaaagtctccatgctctgctcccattgtgtaattgcactttgtcaagtaaacccagctcacagtgatgcatcttctctacttgcctctattctgccaagtttt

SEQ ID NO: 52668 - DNA, 600 bp, Chicken  19866894303397_2
ctgtgaaacgcaaggactgaggtaatgaccaccgcttcattaacccatgactgcttcgccttatggctgatcgattccccgccagagctgccagcccagccacgagatgtgcacggagcacggacacaacgcccggacactgcgctgcctatctgcaccccaaaccactgctaaaacaggaggaagatgccagcaggatgaccttccagcaccacagcctgccccagtgttccctttctcattagtagaaaggttatggagcggcccttcaaaaacacctcgtccccatgtccccacygmcacctgctytgtgctctttgcggacggagcagaaggatctcatgagcctcccactggagagagccccragggaggtcacgtatgaggtggtgaggggacgcttcatgccccacagaaccagaaggggacagggacacattggggccatatcaggtggctgagcctggcactccattgggccccatgggacattcccaaagtctccatgctctgctcccattgtgtaattgcactttgtcaagtaaacccagctcacagtgatgcatcttctctacttgcctctattctgccaagttttcc

SEQ ID NO: 52669 - DNA, 600 bp, Chicken  19866894303397_3
gcaaggactgaggtaatgaccaccgcttcattaacccatgactgcttcgccttatggctgatcgattccccgccagagctgccagcccagccacgagatgtgcacggagcacggacacaacgcccggacactgcgctgcctatctgcaccccaaaccactgctaaaacaggaggaagatgccagcaggatgaccttccagcaccacagcctgccccagtgttccctttctcattagtagaaaggttatggagcggcccttcaaaaacacctcgtccccatgtccccacygmcacctgctytgtgctctttgcggacggagcagaaggatctcatgagcctcccactggagagagccccragggaggtcacgtatgaggtggtgaggggacgcttcatgccccacagaaccagaaggggacagggacacattggggccatatcaggtggctgagcctggcactccattgggccccatgggacattcccaaagtctccatgctctgctcccattgtgtaattgcactttgtcaagtaaacccagctcacagtgatgcatcttctctacttgcctctattctgccaagttttccttatcsctt

SEQ ID NO: 52670 - DNA, 600 bp, Chicken  19866894303397_4
gatcgattccccgccagagctgccagcccagccacgagatgtgcacggagcacggacacaacgcccggacactgcgctgcctatctgcaccccaaaccactgctaaaacaggaggaagatgccagcaggatgaccttccagcaccacagcctgccccagtgttccctttctcattagtagaaaggttatggagcggcccttcaaaaacacctcgtccccatgtccccacygmcacctgctytgtgctctttgcggacggagcagaaggatctcatgagcctcccactggagagagccccragggaggtcacgtatgaggtggtgaggggacgcttcatgccccacagaaccagaaggggacagggacacattggggccatatcaggtggctgagcctggcactccattgggccccatgggacattcccaaagtctccatgctctgctcccattgtgtaattgcactttgtcaagtaaacccagctcacagtgatgcatcttctctacttgcctctattctgccaagttttccttatcsctttccctccaccaaaggactcagaagtgggaaggaggggaaaactcaatgctcgccccact

SEQ ID NO: 52671 - DNA, 600 bp, Chicken  19866894303397_5
ctytgtgctctttgcggacggagcagaaggatctcatgagcctcccactggagagagccccragggaggtcacgtatgaggtggtgaggggacgcttcatgccccacagaaccagaaggggacagggacacattggggccatatcaggtggctgagcctggcactccattgggccccatgggacattcccaaagtctccatgctctgctcccattgtgtaattgcactttgtcaagtaaacccagctcacagtgatgcatcttctctacttgcctctattctgccaagttttccttatcsctttccctccaccaaaggactcagaagtgggaaggaggggaaaactcaatgctcgccccactcataaagcaaaatccaggactaaaaaaggggcaagaaaagcacaggctggtgtcaggtgcctctccctaacccgtcccctcatggtttgcccgtgggggtttgacaaaagtgcttttcggctgacaaaatgattacagggtgccatggcagtgtgttgtacatgggcttcttcctgcatttcaagcagggtgaagacacggccacgaaaacagctgcactggggaagggtcacagcgg

SEQ ID NO: 52672 - DNA, 600 bp, Chicken  19866894303398_1
aagagtctgaaaagactgaaaaagtcttaaaaagattgttgaggccagtgggtaacgaacaggtaacaaatggccttttttacataacaacatcaaatgtccacgtttggtcgaagaaagatttttcaagtagaagttgctttatttactgttattttgagtaaatatttgactctctagagaagtattttcaatctaagtattataacccggtctcattttcaacatgctcctagttttcagtacttccagcagaaatttgttagtattatcagttaaattataatggtaaagtataayttgtgcaggtgagctaacactgttctccttttagatcaaagttgatgtggaattttaaataactgcaattttaacarttggaagttcatgctatgaaaccataatgttttcattttatgctatagaattcaattattggattatgtattttagcagtaccgcatttcaagtgttgttcgtgtcttgtatttagaagagtgatagattttgaggaagaaacctttyggctctaygcagtatccaccttacgactggtaccaaatgctgagagcagctgtggatggaggggctgcacagagc

SEQ ID NO: 52673 - DNA, 600 bp, Chicken  19866894303398_2
ttttacataacaacatcaaatgtccacgtttggtcgaagaaagatttttcaagtagaagttgctttatttactgttattttgagtaaatatttgactctctagagaagtattttcaatctaagtattataacccggtctcattttcaacatgctcctagttttcagtacttccagcagaaatttgttagtattatcagttaaattataatggtaaagtataayttgtgcaggtgagctaacactgttctccttttagatcaaagttgatgtggaattttaaataactgcaattttaacarttggaagttcatgctatgaaaccataatgttttcattttatgctatagaattcaattattggattatgtattttagcagtaccgcatttcaagtgttgttcgtgtcttgtatttagaagagtgatagattttgaggaagaaacctttyggctctaygcagtatccaccttacgactggtaccaaatgctgagagcagctgtggatggaggggctgcacagagcactcatgcaaagagaacagcacgtgcagaagtgctaatgggagagcaacagcccatgtagtagttctatcaataaac

SEQ ID NO: 52674 - DNA, 593 bp, Chicken  19866894303398_3
catgctcctagttttcagtacttccagcagaaatttgttagtattatcagttaaattataatggtaaagtataayttgtgcaggtgagctaacactgttctccttttagatcaaagttgatgtggaattttaaataactgcaattttaacarttggaagttcatgctatgaaaccataatgttttcattttatgctatagaattcaattattggattatgtattttagcagtaccgcatttcaagtgttgttcgtgtcttgtatttagaagagtgatagattttgaggaagaaacctttyggctctaygcagtatccaccttacgactggtaccaaatgctgagagcagctgtggatggaggggctgcacagagcactcatgcaaagagaacagcacgtgcagaagtgctaatgggagagcaacagcccatgtagtagttctatcaataaacatatatctgtgttaaatgcaaaagtgtcacgggaggcctcttcacattagtatatcatgactgagtggagttttctcccctgtgtgaagctcttcatgtgtgaagcctctctatggtctatttgctggctgagcttggctg

SEQ ID NO: 52675 - DNA, 585 bp, Chicken  19866894303398_4
tagttttcagtacttccagcagaaatttgttagtattatcagttaaattataatggtaaagtataayttgtgcaggtgagctaacactgttctccttttagatcaaagttgatgtggaattttaaataactgcaattttaacarttggaagttcatgctatgaaaccataatgttttcattttatgctatagaattcaattattggattatgtattttagcagtaccgcatttcaagtgttgttcgtgtcttgtatttagaagagtgatagattttgaggaagaaacctttyggctctaygcagtatccaccttacgactggtaccaaatgctgagagcagctgtggatggaggggctgcacagagcactcatgcaaagagaacagcacgtgcagaagtgctaatgggagagcaacagcccatgtagtagttctatcaataaacatatatctgtgttaaatgcaaaagtgtcacgggaggcctcttcacattagtatatcatgactgagtggagttttctcccctgtgtgaagctcttcatgtgtgaagcctctctatggtctatttgctggctgagcttggctg

SEQ ID NO: 52676 - DNA, 600 bp, Chicken  19866894303418_1
gtgcataatggccactatcttgtgattttctacactaagactccactcccttaaagatttgatcatcttacttccctagagttgctgcaaaatatgggtttttttagatgattgtaggtgtagtggaacagtctcagagaataactcctgtctggcttgtgaatagtgccctctgataaactggaggaaggatatcttatatgagcatgagagaataggttgttgcagtggaagcatgttgctggatgagtgagtatctttgtgactactgtaagaggtgccttgcttagttggaagtakctacgaaactactgctcggaagctgtggcaagaggtcactcagagactcgtgtgcatgacagtgttttactttgtgtctagaagcatccttcttttggagatatcatcttctgcccgactttcctccttcatgttttgtgttactaatttggagatctgtcttcacctcttccatcccaaaaatagatctgcgcagtagtttataataaaggaccttcttatatgtagctcctttccaaacagctactgtctttgttttggttttagacctccatcagcttttcttctttattgcatcac

SEQ ID NO: 52677 - DNA, 563 bp, Chicken  19866894303418_2
ctactgctcggaagctgtggcaagaggtcactcagagactcgtgtgcatgacagtgttttactttgtgtctagaagcatccttcttttggagatatcatcttctgcccgactttcctccttcatgttttgtgttactaatttggagatctgtcttcacctcttccatcccaaaaatagatctgcgcagtagtttataataaaggaccttcttatatgtagctcctttccaaacagctactgtctttgttttggttttagacctccatcagcttttcttctttattgcatcactactctcyactttacattaagttgactaggtccagtttgtcaacacttttcaaagaattacatactcctaaactaaatctctccagattttattctgatatattgattttccagaggtagtatactatcattttgttgtgctccatatctacagataagaggcctatgtatgtcatgactttttgaagacatatattgtgtagagaaagaaaaaatgggatgggtatgaattgtaggtctcatgatatcgtgctgcgaagccttctgaggg

SEQ ID NO: 52678 - DNA, 600 bp, Chicken  19866894303420_1
acatgctgatcagagagaacaaatctgaagtgatttcttgatattttcattccggtaaagaatttttggctttttttgaagtgtaactcagctgtggccagatattatttattgctgttatctcagagatctgctatgcacccaaaatgcctagaattagttattattctaataattcttaattattctagaattagaattacttaattaattttgcaagacaaattggaagcaaaaacagagcagataactgataacatattagtaataaatcaatataagttaaagaaaatatgaaawtttactattttgcatatctgattacagaaatttctacttttatgattttgaatgtattattattttatcacaatccagatttccaaatcagacccagaaagagggtttctagtctctaagaaatgaataaaacatagaaatattaataagtgtattgatmattaatgaaatataraatgaaatctcaggccataaacagttaatgaaatagttagccaagtgatttattcagtgtagaagtaacatttgcacaagctacttagcatatggtaatagtaagtgcaaatattattgtctaag

SEQ ID NO: 52679 - DNA, 600 bp, Chicken  19866894303420_2
ttattattctaataattcttaattattctagaattagaattacttaattaattttgcaagacaaattggaagcaaaaacagagcagataactgataacatattagtaataaatcaatataagttaaagaaaatatgaaawtttactattttgcatatctgattacagaaatttctacttttatgattttgaatgtattattattttatcacaatccagatttccaaatcagacccagaaagagggtttctagtctctaagaaatgaataaaacatagaaatattaataagtgtattgatmattaatgaaatataraatgaaatctcaggccataaacagttaatgaaatagttagccaagtgatttattcagtgtagaagtaacatttgcacaagctacttagcatatggtaatagtaagtgcaaatattattgtctaagagaattttcactgctccatctccagtgatcaattcagtgtaaagcctagcaaggaacatctgtggaacagatcttttagtactcactaatttgtatacaggctagtatattgacataggttatcaaagttcagacaaaatttagtgtagatcatgaatga

SEQ ID NO: 52680 - DNA, 600 bp, Chicken  19866894303420_3
ttcttaattattctagaattagaattacttaattaattttgcaagacaaattggaagcaaaaacagagcagataactgataacatattagtaataaatcaatataagttaaagaaaatatgaaawtttactattttgcatatctgattacagaaatttctacttttatgattttgaatgtattattattttatcacaatccagatttccaaatcagacccagaaagagggtttctagtctctaagaaatgaataaaacatagaaatattaataagtgtattgatmattaatgaaatataraatgaaatctcaggccataaacagttaatgaaatagttagccaagtgatttattcagtgtagaagtaacatttgcacaagctacttagcatatggtaatagtaagtgcaaatattattgtctaagagaattttcactgctccatctccagtgatcaattcagtgtaaagcctagcaaggaacatctgtggaacagatcttttagtactcactaatttgtatacaggctagtatattgacataggttatcaaagttcagacaaaatttagtgtagatcatgaatgagtggccaatttggat

SEQ ID NO: 52681 - DNA, 600 bp, Chicken  19866894303423_1
gaatacaaatacttacatgattttacagtcataactgctttacaagtaccaagattctataagcttttgtactcttttttacagtgatacaatttgaccatacaattctgtttcataggattgtatagtcatgacagaaattaaggctaaatgtatcactacattagtttgatcttttagcatccattatcgcttaaaaacatacatttcacttcccacaaaactatgatgtgtgccaagggaagaaaagaggataaaaatccagtggcagcagctacttaggaaagatcctcaaactcycacctgacttgacagaaaaagccatcccatccctacttcacctgtatcactttttgccacagaccacatctagccatggacaacttctgaggattccaaggaaaacaaaacaaaacgaaagaattatcaacagatattctttcctgatcactgacaaacatttgactgaagcacacaattttattataagcaatatcttaacagggaatctgccttaaatatataaaaaatwttacatacactccattcaatatagcattgtttgctatttgaatagaatggatcgattaaataaggaag

SEQ ID NO: 52682 - DNA, 600 bp, Chicken  19866894303423_2
gtgccaagggaagaaaagaggataaaaatccagtggcagcagctacttaggaaagatcctcaaactcycacctgacttgacagaaaaagccatcccatccctacttcacctgtatcactttttgccacagaccacatctagccatggacaacttctgaggattccaaggaaaacaaaacaaaacgaaagaattatcaacagatattctttcctgatcactgacaaacatttgactgaagcacacaattttattataagcaatatcttaacagggaatctgccttaaatatataaaaaatwttacatacactccattcaatatagcattgtttgctatttgaatagaatggatcgattaaataaggaagagcgattcataagacaaacagactgggacttcaaactgtgccttaattaatcctaaaaggacgatgagtgttcaaaatactactaccagatgtgtccagcttgggactcagcaccccagattcagatgaaggagttacctgtgggaaactggagcaaagattattatcatgttatcagctatttgctcttagattttcttctatcttgcaattaagaaccctcacaaatgta

SEQ ID NO: 52683 - DNA, 600 bp, Chicken  19866894303426_1
gctggcacgagcatgcctggtgagccgtgcctcagatagtgtggctcaatgctgtagtgcaaagacagcctagctgcccttgaggagtacatttttatctgcagttggcacacatggccttatgtaaaccataaggtgtgtccaagaagtagagtgaagcaattgcgtgaccccaggcacaggactttgagaaatgtgttacaaattttttcagcaggaggtggggaacaaggaatagttggcatgttttcccctgcaatttgggtatgcaggtttcagctgtaagggccgctctgagartttcaacatgaggctaaatcctgctctgtgtggctgtggagtgacaaactgaggataattttttcttttggtgcatctctaytcacccctgggttactaacagttgcatgcagaaaagaaatacttaacagcaaggagactgtcctgggttcagggaggactggaaacaaaaccagccatgtagcaatttaaattatctctttcttgtccttgctttccttctttttacaagatgatggtgaacagtgccttgctggacttctgtttcagctgcatgtagtatattctagagtagcaaaa

SEQ ID NO: 52684 - DNA, 600 bp, Chicken  19866894303426_2
aggagtacatttttatctgcagttggcacacatggccttatgtaaaccataaggtgtgtccaagaagtagagtgaagcaattgcgtgaccccaggcacaggactttgagaaatgtgttacaaattttttcagcaggaggtggggaacaaggaatagttggcatgttttcccctgcaatttgggtatgcaggtttcagctgtaagggccgctctgagartttcaacatgaggctaaatcctgctctgtgtggctgtggagtgacaaactgaggataattttttcttttggtgcatctctaytcacccctgggttactaacagttgcatgcagaaaagaaatacttaacagcaaggagactgtcctgggttcagggaggactggaaacaaaaccagccatgtagcaatttaaattatctctttcttgtccttgctttccttctttttacaagatgatggtgaacagtgccttgctggacttctgtttcagctgcatgtagtatattctagagtagcaaaagacacacagccattattctgaaggtgtaaattagcttgtactcaggaccgttgccaggtgggagggtggtgtgtgaggcata

SEQ ID NO: 52685 - DNA, 600 bp, Chicken  19866894303441_1
gaggtgttcaagagccatgtggatgtggcactaagggaggtggtcagtgtgcatggtggggataggctactggttggactgggtgaccttagaggtctttcccaacctttatgattccatgactgtatgcaccagcacacagactcattggagaatccagaggaaaattagggtcatctgggaaatctgccttctgtctgtggaaagcattagggctgccagagacagggattgaagagcttgttttgcagctcaagggcaagctgtctcacagtttgccagtttgtgacagagatcaamaaatggaaaaaaacttatttccaacagaagtacatatacgttttggaggatggtgtttgttaaaaaattcaaagtaaataataggtgtggctgagggtaagtgttatatgtagcttcatttttttactcaaatccagcaataacacctcacaaacttaactttaatgggactccagtataggtatagaagctttgacaaacaggagtgggtttcatcacaaactgaaaaataagcaagtgtttcacgtcttgtattcctcctggagaagaggttagaagaagcatgaatttccttttcag

SEQ ID NO: 52686 - DNA, 600 bp, Chicken  19866894303441_2
tctattttattaattttccttttcaaactagctccagatttttctactacttgctgaaaattcagagaataccttccatcaccccatctgcttacaaaataatatgcacttaactccatacatgcttaattctgtaaaagatgcttagcatgaaaagccctaagtctgactagcagttgttacttttggtaatacttcattaaatgcaggaccctgtttctggaggagggaatatgtcagaggtttccaaaccagtaatacatttgtttatcaaggatttttatttttttattttttttwaaataagggttttgttttctcaggctatatcctggacagtagccatataagtttatttttaaagatatggattttatttattttgaaatctatggcaaaactgtggtagaattttctgctaaacgttcagaacctttcattgcatgccagcatggccaacattttcttcaaatacttcaactgtgtttataaccccccatgatctttctgaagataccacagaagactgagaattagtttacatgctacagctctttttgtgtccctgtagcagcaactgagttatttacggctttctat

SEQ ID NO: 52687 - DNA, 600 bp, Chicken  19866894303444_1
aatattaggctagcacatcagcgtatgaagtggcaatgtaacatgatcaatgaactttttaaagccccaaatgcttctttattcagtattgctttgttcattcactccaaaagaaagtacaacaaataatgattattcatcagcaatcataaatatgtatgattatacatacatacataataattatatataattattgtatgttacaatgactcctctcccatggtggggaggtttccatgaggggagaccttattgctctcttccagtatcagaaacgtgcttatagcgagagcgggrttggtctcttctcactgttgacaggtgacaggatgaggggaaatggcctcaagttatgccagggtaagtttaggctggatatcaggaaacacttctttacagaaagggttgttaagcactggaataggctccccagggaggtggttgagtcaccatccctggttgcgtttaaaaaccatttggatgtggtgctcagggatatgatttagcagagtgttgttagagttagggtagtatggttaggtcgtagttgggcttgatgatctttaaggtcttttccaaccagagtgattctatgat

SEQ ID NO: 52688 - DNA, 600 bp, Chicken  19866894303447_1
tttcaattgctttaagagttttgttaatgcttacgcctaaagtatattagaaatgaagtggtttttcaaaggcagatgtgtactgtttgaacataatggttaattatgttttaattgatataggaataattaatttcgcgtgaagtaattaataatatgcaaccttagtgatgttttaaatgttgcactaaattaacagtctttgagctgctgtaccaagcagcttcttatcttgtcttatgctggcaaaaggctgtatttgtaggcacttcaggatgagttcatctaattcttttcttygcagtaacagcagtctgatcataggaatgctttttaagttattatggactaatgtttgttatttttcactttaaatcattccttgtcccttttgactatacaggtgaccatattgcatgtgtgtgtttagctacactggtgttcagatgtatgataacatcgacctttctggagagctcatgacattttgaggaagtgtctttgagagttttatttctttagaggattactgattgttctttgctctgacatttgtgaaatgatgtggatttttttttgtcttgggctacacctggtttg

SEQ ID NO: 52689 - DNA, 600 bp, Chicken  19866894303452_1
ggcctcgttactcaagagctgcactgcacacacagtctgcagtgtggatacaatcatgtctaccagcaatagcctaactgtggcttttttctttagcacggactgtaatgttatactcctgttttgaaactgacaagagattgcaaaattatttctggctgagggagggagaggtgacatgcaggcaggcagccatcagcatcatgattaccaatgcactgtttccaagcagaaaaaggcaacacacaccttactaaaactgtatttaccgaaagcataaaagagagcagaaagaaagartcaacaaaacatatgctttctttctgctccctcccatgcaacaagacaaattcctttccttgcagaacctcatatgaggactcgggcgatgctctgaagctcaaactctctcactcccacactcctcccttgtatagctacactgccttggccccaggactawgatctcttcctcctctcttccaacaccagcagtcctcctattgctccaaccactgtagtgccatgcccaaactaacaaggctgtctcattccacccaggacctaaycggctggggagcagcacagggcctaagcctt

SEQ ID NO: 52690 - DNA, 600 bp, Chicken  19866894303452_2
ggagggagaggtgacatgcaggcaggcagccatcagcatcatgattaccaatgcactgtttccaagcagaaaaaggcaacacacaccttactaaaactgtatttaccgaaagcataaaagagagcagaaagaaagartcaacaaaacatatgctttctttctgctccctcccatgcaacaagacaaattcctttccttgcagaacctcatatgaggactcgggcgatgctctgaagctcaaactctctcactcccacactcctcccttgtatagctacactgccttggccccaggactawgatctcttcctcctctcttccaacaccagcagtcctcctattgctccaaccactgtagtgccatgcccaaactaacaaggctgtctcattccacccaggacctaaycggctggggagcagcacagggcctaagccttccctgcgtagaaatgatgaagattatttctttgggcttggtgcctgccttgcctgcaatgtgcttacacttcactacttggtaattgctactgagtccggacattaagtgatagaagcttgtgcccaagctawtggggtcgtaacaagcatggatctattata

SEQ ID NO: 52691 - DNA, 600 bp, Chicken  19866894303452_3
cgaaagcataaaagagagcagaaagaaagartcaacaaaacatatgctttctttctgctccctcccatgcaacaagacaaattcctttccttgcagaacctcatatgaggactcgggcgatgctctgaagctcaaactctctcactcccacactcctcccttgtatagctacactgccttggccccaggactawgatctcttcctcctctcttccaacaccagcagtcctcctattgctccaaccactgtagtgccatgcccaaactaacaaggctgtctcattccacccaggacctaaycggctggggagcagcacagggcctaagccttccctgcgtagaaatgatgaagattatttctttgggcttggtgcctgccttgcctgcaatgtgcttacacttcactacttggtaattgctactgagtccggacattaagtgatagaagcttgtgcccaagctawtggggtcgtaacaagcatggatctattataatgaaaattgaatgttttccttaaaaataaataaaaaaaatactaaaggagatacttatgtaatcacctgaatccaggtgctggagcttaaggtaagtgttaacta

SEQ ID NO: 52692 - DNA, 600 bp, Chicken  19866894303452_4
atagctacactgccttggccccaggactawgatctcttcctcctctcttccaacaccagcagtcctcctattgctccaaccactgtagtgccatgcccaaactaacaaggctgtctcattccacccaggacctaaycggctggggagcagcacagggcctaagccttccctgcgtagaaatgatgaagattatttctttgggcttggtgcctgccttgcctgcaatgtgcttacacttcactacttggtaattgctactgagtccggacattaagtgatagaagcttgtgcccaagctawtggggtcgtaacaagcatggatctattataatgaaaattgaatgttttccttaaaaataaataaaaaaaatactaaaggagatacttatgtaatcacctgaatccaggtgctggagcttaaggtaagtgttaactaccacacgctggtgagagctggagatgctggaatagagccagacaatcttcagaaccctggcgctrcaacagagtgctccgggcaagcagcagcccaacatacaagaaaatagaaatgacaaaatatcagaagagctgacacttcaagttgattttccctttgtg

SEQ ID NO: 52693 - DNA, 600 bp, Chicken  19866894303452_5
cctcctattgctccaaccactgtagtgccatgcccaaactaacaaggctgtctcattccacccaggacctaaycggctggggagcagcacagggcctaagccttccctgcgtagaaatgatgaagattatttctttgggcttggtgcctgccttgcctgcaatgtgcttacacttcactacttggtaattgctactgagtccggacattaagtgatagaagcttgtgcccaagctawtggggtcgtaacaagcatggatctattataatgaaaattgaatgttttccttaaaaataaatwaaaaaaatactaaaggagatacttatgtaatcacctgaatccaggtgctggagcttaaggtaagtgttaactaccacacgctggtgagagctggagatgctggaatagagccagacaatcttcagaaccctggcgctrcaacagagtgctccgggcaagcagcagcccaacatacaagaaaatagaaatgacaaaatatcagaagagctgacacttcaagttgattttccctttgtgcaatttctaataatactaaaataaatattaaaacaaacaacctaaagttttcagagcataaag

SEQ ID NO: 52694 - DNA, 600 bp, Chicken  19866894303452_6
gcttggtgcctgccttgcctgcaatgtgcttacacttcactacttggtaattgctactgagtccggacattaagtgatagaagcttgtgcccaagctawtggggtcgtaacaagcatggatctattataatgaaaattgaatgttttccttaaaaataaataaaaaaaatactaaaggagatacttatgtaatcacctgaatccaggtgctggagcttaaggtaagtgttaactaccacacgctggtgagagctggagatgctggaatagagccagacaatcttcagaaccctggcgctrcaacagagtgctccgggcaagcagcagcccaacatacaagaaaatagaaatgacaaaatatcagaagagctgacacttcaagttgattttccctttgtgcaatttctaataatactaaaataaatattaaaacaaacaacctaaagttttcagagcataaagcaagctggggtgatcactctggtgtgacattcagacaaaactctggctgtttttcttcatcataaaatctgccagagttactatctatgggtcttatgtgatttatctctctctctcttttttttttttttttgcaat

SEQ ID NO: 52695 - DNA, 439 bp, Chicken  19866894303454_1
gctgacaggagcagggcctggcattgatttctgttaatacatttttatttattaaaatcccctggctgttccatattcattaatgcttcacctgcctgaaaagggaacacgcagatatcttgataccgccataaagagctggagtaaattggtaatagttctattgactttggcagagaggagctggctctcggcagctggggatctggcaggaagcacatccaattctcctcagcttctgcagcagccgagcgctgccacagcctctgctactttacaactccttgcagcagcactctycartaaacacacccaggcagggaagaaggtgcctttcccaaagccagttggcgggcttagccatctcgctgtcattaatttcagtagcagttacacagctcagccttctagtcagcctcgaggacctcatcaataatcc

SEQ ID NO: 52696 - DNA, 436 bp, Chicken  19866894303454_2
gacaggagcagggcctggcattgatttctgttaatacatttttatttattaaaatcccctggctgttccatattcattaatgcttcacctgcctgaaaagggaacacgcagatatcttgataccgccataaagagctggagtaaattggtaatagttctattgactttggcagagaggagctggctctcggcagctggggatctggcaggaagcacatccaattctcctcagcttctgcagcagccgagcgctgccacagcctctgctactttacaactccttgcagcagcactctycartaaacacacccaggcagggaagaaggtgcctttcccaaagccagttggcgggcttagccatctcgctgtcattaatttcagtagcagttacacagctcagccttctagtcagcctcgaggacctcatcaataatcc

SEQ ID NO: 52697 - DNA, 600 bp, Chicken  19866894303455_1
gaccatcagcagagcaacagtgtgtgatggtgatggaaacaccaaccagcactgtgtgacatctgatggaaacaactgccacggttacagaattctcttctaggacaaaagcagatgacagccttagaaattcaaagcagtgtcaacctggttccttcagctgctgcttacccaaacatggtgaggagaaaacaaggcaggaacaacacctacccttgaggtggccagggaggcttttaaactggaaactttaagatgcttttttgtcatgaggtcgctggggatgtgggacagccttcrgatgggaataaagttttaatgttgggtttggtttgttcctgaagggaattccatgaagtagttatgtgcccaatggacgctgagcgcgatgacccagaaagtctcttctggcaccaggctgccctacccgacttcctgcagccatgcagggcagcactcggctgggcccagcactgcctttcacaccactgccacccgagcgggcacatcccgtggggccgtgccatgtcccagggggagctgtgagtgagcccagcctggatgtggcacatccaccccaggagcccctgtgcacacgca

SEQ ID NO: 52698 - DNA, 600 bp, Chicken  19866894303472_1
accctaatcatgtatggtttgggaagatcccaatgggatgggctgcaaaggcagagcatccatagacatggactctacctagatctatttgaagcatcatttaaaaaataaaaaaataaaaaaataaatcaaagaaattttgcaaatatatctgttcattttgtggaacactttctttgctccatcatctcaaagaggaagacgactcagtaagaaactggtgtgggaggtcacctccactccttctagcatgccctggctggaaaagcatttggggtcttatacaaagtagctggcacrtgctaaattatttgttgtgcttcatatgcatccaaatataaaacaagggctgtataagctgagtaaataaacagacttactaatctctggtgacgaggtctgtgtcgttttattcacactttttaccatatactccagggtcatttgccagactgggaataaatggcatctgtttctgtaatccaggcttgatttcctctttcttacaaagatgtttcactcctggcttctagggtgcaaaacaaaagaaaaacagaacaaagtatgatggaaatttacccacaaaatgtcctcagtgta

SEQ ID NO: 52699 - DNA, 599 bp, Chicken  19866894303476_1
  misc_feature (1)..(154): n is any nucleotide
nnnnnnnnnnnnnnnnnnnnnnnnnnnnnnnnnnnnnnnnnnnnnnnnnnnnnnnnnnnnnnnnnnnnnnnnnnnnnnnnnnnnnnnnnnnnnnnnnnnnnnnnnnnnnnnnnnnnnnnnnnnnnnnnnnnnnnnnnnnnnnnnnnnnnnnnnnggcacaatcaaacctaggggcaattttgaaactcataaccttttccactgtttttttccatggatactttgcacaccgcctgaattttccactctcctattttctggtcactaaaaatcaaccctgcaataataaagtttaacatwaatcatgcagacagctgactaataattaataaccatggcagcgtggagacaaagaggtaaccacctgttgccttgtcatttaaaaataaagaataaaaaaccattaacgtggttgtcaataacaaaggcatttcaccaaaacatttgcctaacattgcatgaaattaaagcycatagatggcattcttccagagggacaggcaaccattagtcactaactgtataatacttggcacytataatgcattaatgcatttctgcccaaagaacccaacacactcgagacacatttagaccag

SEQ ID NO: 52700 - DNA, 600 bp, Chicken  19866894303476_2
ggcaattttgaaactcataaccttttccactgtttttttccatggatactttgcacaccgcctgaattttccactctcctattttctggtcactaaaaatcaaccctgcaataataaagtttaacatwaatcatgcagacagctgactaataattaataaccatggcagcgtggagacaaagaggtaaccacctgttgccttgtcatttaaaaataaagaataaaaaaccattaacgtggttgtcaataacaaaggcatttcaccaaaacatttgcctaacattgcatgaaattaaagcycatagatggcattcttccagagggacaggcaaccattagtcactaactgtataatacttggcacytataatgcattaatgcatttctgcccaaagaacccaacacactcgagacacatttagaccagaaactcccaagaagtaggttaaatattactattcaattctaaacataagaaaaatgaggcaccaaaaaaatctctcatcccgctcaaggttacaataacaattaataagaaaggcaagaatagaacccaagcagcccagctcctattttgtgctctatacaaggagaccccag

SEQ ID NO: 52701 - DNA, 600 bp, Chicken  19866894303476_3
attttccactctcctattttctggtcactaaaaatcaaccctgcaataataaagtttaacatwaatcatgcagacagctgactaataattaataaccatggcagcgtggagacaaagaggtaaccacctgttgccttgtcatttaaaaataaagaataaaaaaccattaacgtggttgtcaataacaaaggcatttcaccaaaacatttgcctaacattgcatgaaattaaagcycatagatggcattcttccagagggacaggcaaccattagtcactaactgtataatacttggcacytataatgcattaatgcatttctgcccaaagaacccaacacactcgagacacatttagaccagaaactcccaagaagtaggttaaatattactattcaattctaaacataagaaaaatgaggcaccaaaaaaatctctcatcccgctcaaggttacaataacaattaataagaaaggcaagaatagaacccaagcagcccagctcctattttgtgctctatacaaggagaccccaggatgtcaccaggacatgcatggtgcatttctccagtgccaggaatacaaacaccaatggcttatc

SEQ ID NO: 52702 - DNA, 600 bp, Chicken  19866894303477_1
ttgattgtgtcagtagaaaatgcttctggggaactatgaaatagattgcagagtaccatccttaaacatgaattagcatagtatgaaaaagaacatatttcatagaattacaggcctgaagactcaagaagaaattactaccagaagacaagagcacaaaaaggattctggaggcacgtagtgattcatattaaaagcaataaataactgagaataagagaaacagagaaagctggaaaagatgtaagaaaaccatgatcctggatgatttttagatccagaaaacctgtaaccaaaagytttttttwaaaaaaaaaaaacacaattaaggaaatatgctgtggaaaaattttgctcataaagcacaaagggaaaatakcacgtcaacatctctttaagaagcctaatcaacttccttaaataattagaagacctttatagctccttgcttttttgagaagaatacagtataaaggatagataccaatrtaatacactaaatcatcattaactcaagtaaagcactctctgtatttcctaggaactaggacacaaaacacttaaaaaccactatgctttatctaattttacatacataaa

SEQ ID NO: 52703 - DNA, 600 bp, Chicken  19866894303477_2
gtcagtagaaaatgcttctggggaactatgaaatagattgcagagtaccatccttaaacatgaattagcatagtatgaaaaagaacatatttcatagaattacaggcctgaagactcaagaagaaattactaccagaagacaagagcacaaaaaggattctggaggcacgtagtgattcatattaaaagcaataaataactgagaataagagaaacagagaaagctggaaaagatgtaagaaaaccatgatcctggatgatttttagatccagaaaacctgtaaccaaaagytttttttwaaaaaaaaaaaacacaattaaggaaatatgctgtggaaaaattttgctcataaagcacaaagggaaaatakcacgtcaacatctctttaagaagcctaatcaacttccttaaataattagaagacctttatagctccttgcttttttgagaagaatacagtataaaggatagataccaatrtaatacactaaatcatcattaactcaagtaaagcactctctgtatttcctaggaactaggacacaaaacacttaaaaaccactatgctttatctaattttacatacataaaattgtaaa

SEQ ID NO: 52704 - DNA, 600 bp, Chicken  19866894303477_3
agtatgaaaaagaacatatttcatagaattacaggcctgaagactcaagaagaaattactaccagaagacaagagcacaaaaaggattctggaggcacgtagtgattcatattaaaagcaataaataactgagaataagagaaacagagaaagctggaaaagatgtaagaaaaccatgatcctggatgatttttagatccagaaaacctgtaaccaaaagytttttttwaaaaaaaaaaaacacaattaaggaaatatgctgtggaaaaattttgctcataaagcacaaagggaaaatakcacgtcaacatctctttaagaagcctaatcaacttccttaaataattagaagacctttatagctccttgcttttttgagaagaatacagtataaaggatagataccaatrtaatacactaaatcatcattaactcaagtaaagcactctctgtatttcctaggaactaggacacaaaacacttaaaaaccactatgctttatctaattttacatacataaaattgtaaatagctcagtgcaatcatcaagctgtacttccacgttggaaggtgttaatgatatatttccatctttctgaa

SEQ ID NO: 52705 - DNA, 600 bp, Chicken  19866894303477_4
attaaaagcaataaataactgagaataagagaaacagagaaagctggaaaagatgtaagaaaaccatgatcctggatgatttttagatccagaaaacctgtaaccaaaagytttttttwaaaaaaaaaaaacacaattaaggaaatatgctgtggaaaaattttgctcataaagcacaaagggaaaatakcacgtcaacatctctttaagaagcctaatcaacttccttaaataattagaagacctttatagctccttgcttttttgagaagaatacagtataaaggatagataccaatrtaatacactaaatcatcattaactcaagtaaagcactctctgtatttcctaggaactaggacacaaaacacttaaaaaccactatgctttatctaattttacatacataaaattgtaaatagctcagtgcaatcatcaagctgtacttccacgttggaaggtgttaatgatatatttccatctttctgaagtaatactgccttggatatattgtttttgttttaaaggtcacatttccttaaaggaaagagggttgatgtgaagatattcaggtgattaaagaaaatcaagttacatggg

SEQ ID NO: 52706 - DNA, 575 bp, Chicken  19866894303481_1
aacagatgactctcagaaaatgaggaagagcccatgtagaggctgcagaagaagcaggagaaaatcagtgtagaaaacgggaagagagataaaccaatacaagaaaattagcccggtatatcaaggagtggtaagttgtgggaggaaaggtgaatcacgttgtggtaggaaggcagcaattaaaaaagctatgaatattacatagcaatttaatttgcttccatcagtcactgctacagcagataccatatgacaccctactgggagctattagttcagattgcaatttttgccgtggtscacatccccgcaggatgattcccaccaccaccaggtgctggtgagctctgctgaccttctaccttcgcacaggttgcctggccaccagcacaaactatatctgtcagacttctagccaccagatctctttccccagcacagtggtgcctaacatcagccacatccctcctgccagaccacaaccccttggggaaggacatgagaacctggctttttttgtagggaaacagagaaaaacagccaagcctctcagagcatgagagtaatgcctctta

SEQ ID NO: 52707 - DNA, 599 bp, Chicken  19866894303484_1
  misc_feature (1)..(49): n is any nucleotide
nnnnnnnnnnnnnnnnnnnnnnnnnnnnnnnnnnnnnnnnnnnnnnnnnttgcttgcagttctggcttctatggttactacagcagaatttcaaagattaaggatgaaaaaaatagattcttcaatctgaaaatactccttatatatcttaataatctctttaaaatttcagagaaattagcacttgagacctgtcctgacattctcttccattcagtctggaagtttttattgctgcaacaaagaatgcttgcttaaaacaaaagacagaaataaaccctccaaccctactaattccayacacagacgtatctgactaacctacatactgcacacattcctgaagtacagacaggggcttcgggaggcaagctttaaatgcaggtggtgaacttcagcacatatcatagttcaggtatacttctgtggcctggacatcaacctcactgctccacccagcagcagcagacaagggatatgccccaaactacagccagaggaatgtgtttcagtagtgctcttctaacatgcagtttcctgctgcttgtgcaggtttaaacaaacacaaaaatcgatacaaagatacggaaatcactgca

SEQ ID NO: 52708 - DNA, 600 bp, Chicken  19866894303491_1
actaattgtggccatttattatagtcacttatctgatagtagcttctttatctgtgatagctttacagggataaaatccaccaggcatttgcaccagtatataaacatgttaccttgtggcagagtgtctgttacttactgtcaacacttgccagcgaaaaaatgcctatctctagcttatatgaagtaatgatgagtttaatatgctccagtgaaagccacaggataaacaaggcatcacaagtgtttgccttgtctggcctcttaaacaaataaaggtgactgagaagtacaaacagygctgggtcgtggcttatcagtgtgagcaccactaatgctgtgcttgtaggatatggcaggaagcacccagggagccctcagtgaggggcacagggtgaggctctccctgcatgcatctccccactagcatggagatggggggtatggaagagctgtgctggtggtgtagatcctgtacaacaaggaggaccacacagcccctctctgggcttccagtttgagggaggaaaatagcaccaacttgcgctggcaagcgagaaataaattaaaaaatagttgtaattattttgctggatcagc

SEQ ID NO: 52709 - DNA, 600 bp, Chicken  19866894303494_1
tgatttgcagagacatgggcacgtgatctgaacactgagctccacagtgtgaaaagcactacattctctctttttgtgtgaactgctagtttcactgagggaaacagggactgcccccgcttaacctactgctggcaaagggctctgcgctgcagactcctttgaggaggtagggccgggcaggatgaggcaggtatggtactagttacttttatccaatctagagaaccctgctgattcctcagtgcatgagaactattatccagctctatagaggtatcagtagagcaggatcatatkctagacacacaatttctggatgctgaggcaatcacccacaaaattttaatttttctttgctgctttgaagtgtacagaactagttcttgactgattttttttataccatttcatagtgatagaacaaggaggaatgattttaaactaaaagacaggagatttatgtgggatattaggaagaaattatttgctcagcaggcaatgaggcactggcacaggctgtccagagacgctctggatgccccatccctggagatgctcaaggccaggctggatagggccctgggcagcctgagctgg

SEQ ID NO: 52710 - DNA, 600 bp, Chicken  19866894303494_2
caaggaggaatgattttaaactaaaagacaggagatttatgtgggatattaggaagaaattatttgctcagcaggcaatgaggcactggcacaggctgtccagagacgctctggatgccccatccctggagatgctcaaggccaggctggatagggccctgggcagcctgagctggtggggggcagcccatggtagggggtggggctgggtgatctatagggtccctaccaacataggccatcctatgtctgtgatttgtgagtagtgctggaggaagagatttcttgggttttgtgccrttacacctcctcatgtcagccagcatgctttacttgatccagcagcacctggaagtactaatctttctgtcaagagggggagaggaaagtgtgtaggacgcagtaccgtacccactaaggtgccttttaaatgctgggatccctgcctgtgtggaagctctggggctctgggtgtgcattcattccttccaacacgcaaataaaaatatttctttctcttctagaaacctcagtgctctgaacaaaaaatccttccacaggaaggtcacttctggaagctttctgctggactctcgctgt

SEQ ID NO: 52711 - DNA, 600 bp, Chicken  19866894303497_1
gatagctgagggtcagccccactgagacaagcaggttggttttcatagaatctttagagttggaagggacctctgaaggccatctggtgttcttttggtaactggtagctgaagctgaccaatcctagatggactagatgaccttcaaaggtccctttcaactcaaatgattctatgattctatatggcaaccagcatacatttgaaaaggagacctcaggggttccccacacagtggttggccaacagctgcagggctggggaaggaaatatggacattataacctttccatggccctrgactgttctaaagcttttgggcagaccctgcagttggccccytgcaatttacattggcaatagttttctactttgaaatgcataagccagttggtttcacatcagagttccctgtggcatcctcccagtttcatctccgatgtgacttgcaagtgcattaaagtgttgatattaaaatttctaaaaaaggatgtaggtacataaacaagatacttggcatgcagtagatgacactctgctcattaatgagcctggactgctattacagggtatgaaatcactcctacagttttgcatcga

SEQ ID NO: 52712 - DNA, 600 bp, Chicken  19866894303497_2
tcatagaatctttagagttggaagggacctctgaaggccatctggtgttcttttggtaactggtagctgaagctgaccaatcctagatggactagatgaccttcaaaggtccctttcaactcaaatgattctatgattctatatggcaaccagcatacatttgaaaaggagacctcaggggttccccacacagtggttggccaacagctgcagggctggggaaggaaatatggacattataacctttccatggccctrgactgttctaaagcttttgggcagaccctgcagttggccccytgcaatttacattggcaatagttttctactttgaaatgcataagccagttggtttcacatcagagttccctgtggcatcctcccagtttcatctccgatgtgacttgcaagtgcattaaagtgttgatattaaaatttctaaaaaaggatgtaggtacataaacaagatacttggcatgcagtagatgacactctgctcattaatgagcctggactgctattacagggtatgaaatcactcctacagttttgcatcgactctcccaaaagtcacagttcaatctgggcagttgccacgtt

SEQ ID NO: 52713 - DNA, 599 bp, Chicken  19866894303500_1
  misc_feature (1)..(115): n is any nucleotide
nnnnnnnnnnnnnnnnnnnnnnnnnnnnnnnnnnnnnnnnnnnnnnnnnnnnnnnnnnnnnnnnnnnnnnnnnnnnnnnnnnnnnnnnnnnnnnnnnnnnnnnnnnnnnnnnnnntcaaaattagcacattcccaagaaaatttccatttcaacaaactggcatttttcaatgataaactctgtttctggaaaatgtccaaataacactactacttgacacctgtttaagttgctaaatattgaatgaagtggttcatattaccatggaacaccatagcattccttcttgtaagatattygtaaaaaaagattgctgtatcagtggggagtttttgctgggagtctctcttttgtactgccaaagagcactgagagcagggtgaaggcttaggaatgattacaccattatacatgaaaagttcccagtgaatgaacagtaacctgtctttgattactcaaggcaaagcactggcaacaaagacttctcaaagatgcatctgtccttctctgctctcacttccacataacctttcacaccttcacccacccctgtgacaaattctactacagaatttaaacttgtttctgatgaactgtg

SEQ ID NO: 52714 - DNA, 600 bp, Chicken  19866894303511_1
aaaacagaaagagtgccctgctttctgtgaagatgcttccattgcaaacaagcaaacaaccattccagtttcagcccaggttttaaaatgaacccaggttactgacttcccaaacctatggcattcttcctccatgaggtcttggatgagaagaaccacacctggctaccatattctccctggaccatctctgactttgctattgctctcacagcctccccaaggtatactagataatttttacagagatgaagtctctgggacccacagaaggacccacagaaatgagctgggaggaayaggccagctcccctcattcagcacgatttggcattttgtgcatttccttaatcattgattaatggacaacagtaacgtaggcactgttcaaaaagtaagagtctcactttttttctgagaaaagcctgtcaaattttcccagtaaaaaatgggcaagactaaggcaggagcaaacggaataactgctacgaagtgagatgaaagtgctctttgaatatatattttaaatgcctgcaatattctgtacttaaagacactgtcaacgtaattctgcacaaaagcttatttatcctacgtgta

SEQ ID NO: 52715 - DNA, 600 bp, Chicken  19866894303511_2
tccttaatcattgattaatggacaacagtaacgtaggcactgttcaaaaagtaagagtctcactttttttctgagaaaagcctgtcaaattttcccagtaaaaaatgggcaagactaaggcaggagcaaacggaataactgctacgaagtgagatgaaagtgctctttgaatatatattttaaatgcctgcaatattctgtacttaaagacactgtcaacgtaattctgcacaaaagcttatttatcctacgtgtaaactcagagcaccaacttccctaaggaaagaaaatacacccacygtggtaataaatgtttcagaagacatcagaaaatctcttttttttagtaaaagggaaccaaaatcaccacccgccctcatcccacccagctggaaaagaagcacgcaaaattcctgattgtaattaatttgcaccttttctaatttcagcatgatccatgcttatgaatatttccattaaccatctcatacaacactcagcaacgtacttagcctaattagattgtgaaaatggttttgtatcagggaggtgtaattagcagcaagaatttcacatgctatttccactacatggaatagc

SEQ ID NO: 52716 - DNA, 600 bp, Chicken  19866894303512_1
gaagacgacttggggggggaaaatcatatatatatatatatcccctgctggtcctctccctccatttcctcttggatttctttgtgactgcactgaaagaggtcaatagttcccagcttgagcaaagcagcttttgaaaggactatcaccagcatctgtatttaaagaatgattttacttcacagccccccagctaatgcagtgcttttaaaaagcaagcagcaagataaacctgcaagcaacagaaaaaggaaagagtgaaggagaaactgtagctttttgccttgggtttactgacayctccacaggaatgaagctcacctggcaaaagtggggcagggaacatatgctgctatggatcattacaccctgcttcagtcaccacmttcccatcctttaaagtatgttacaaaaccacatgaggcagccaagcaccaagcttgaaaagaattttaaccgattaaaaataatgggcaaattagcactggactcacagaacacatcaaagctttgtgactcaatcttcagtttaagaaattctgatctgataaacacaggcgaactcgtcaaattttaatagccttgattaacttatctcga

SEQ ID NO: 52717 - DNA, 600 bp, Chicken  19866894303512_2
actgcactgaaagaggtcaatagttcccagcttgagcaaagcagcttttgaaaggactatcaccagcatctgtatttaaagaatgattttacttcacagccccccagctaatgcagtgcttttaaaaagcaagcagcaagataaacctgcaagcaacagaaaaaggaaagagtgaaggagaaactgtagctttttgccttgggtttactgacayctccacaggaatgaagctcacctggcaaaagtggggcagggaacatatgctgctatggatcattacaccctgcttcagtcaccacmttcccatcctttaaagtatgttacaaaaccacatgaggcagccaagcaccaagcttgaaaagaattttaaccgattaaaaataatgggcaaattagcactggactcacagaacacatcaaagctttgtgactcaatcttcagtttaagaaattctgatctgataaacacaggcgaactcgtcaaattttaatagccttgattaacttatctcgataatgaaatgcagtggatatgcttatactgaggctttctatttgaagaaatagtccagaaaagctatggcacattagaatcaagga

SEQ ID NO: 52718 - DNA, 600 bp, Chicken  19866894303514_1
aggatttccgcccaggtttgtaatgtcctttatggcaaacctcccatcctcactaacctgaagttcagcgagaaaacacaggaagagtcttctataaggatttgtcctctttgggcacctcctatgggttttcgtgtggaaggaggaaggcagagcacatcactcccgcctaccagggaaggagaggtgcccccagtccctgcaggattggtgttaatgtcctttcactcccacctgcagctcagagagcgtggcaggatccttccagcaccacgagctctctcctgtctgtgcggtgcrtttggctctgttaccacaggagagattctgcattccagaaccaagtcctttattgccccagaaagccaaggttttatgcacctctgtaagggcatctcagtttggagaaggaagcgtgagctccaagagctgactgtgagtgactccaggtggttactttctgtggactttaaaattcaccattaataaccctccgaaaaatagcacctttgaaagcaaactgcagaaacttctttttaacagagagagttttgtccacgatgatgtcaaccccaaacacatgtacctcctgcctaatga

SEQ ID NO: 52719 - DNA, 600 bp, Chicken  19866894303516_1
ttttttttctctctggtagcagtgggcaatacagaagtcacacaagcttttttttttagtgaacacttggaatagaaggtatactatagccctgatgtcagggaatgttgggatttttagaactcacacaccataagaagttaaggcttttttcagcaaaaagttttcggaagagtctttggactctgtagagttgggaaatgtggggccacctgtaagcagagagatgattatagctgacagttctgggaaatgtagtatgttactggatatccttccacagctcatatttactctatyacttccatcatattctcctaaattttgcagtgcttccttgcagctcttcctgtaaacctcagctacatttactggtattacatttttgaggagatctgtacaagcagtgtttgtgatatgctgagtaattttttttttattattagttcatttctttcttcctccagaagtaccatcttggttgcagtgattttatagtgttgcctagaaagccaaactattcttaaataatcgagtttagtatgtgcttttaatctgcctaatgattttcacctgcctaaatgtacttagaagacatat

SEQ ID NO: 52720 - DNA, 599 bp, Chicken  19866894303520_1
  misc_feature (1)..(20): n is any nucleotide
nnnnnnnnnnnnnnnnnnnntccgctccgctctgctcgttcctacagtcggacagacgcacaaacacccaacccggccccaccccgcaccgctttgtcccgcctcaacccggccgtgcaccgcccgcccctttccgcgccgctctgcgctgttcgggacggttccagagccgggccggggttgggagcgcaggcggtgctcgggcggggcgcagcacggttgggttggaagggacctcccagccccagccctgccgtgggctggctgccccccagctcaggctgcccagggcccctccgyggcgtggggcacctccagggatgggcacccacggctgaggggcggctctgcgggcgggggatgggatcggacgtggggtarcgggggggaccgcttgcgggggaagcgcggcagcagagccgtaactgggccggaggagcgcgcagcccttactcagagccccgtgggcgatgagcggttgcagcgcaacgcgaaccggttttgctcaacttacttaaaaaaggaagaaaacctccaccccaaccaaaaagggaacggcacgggaacgagtaagctcagtaacggcggcgggtgaaatc

SEQ ID NO: 52721 - DNA, 600 bp, Chicken  19866894303520_2
ccccgcaccgctttgtcccgcctcaacccggccgtgcaccgcccgcccctttccgcgccgctctgcgctgttcgggacggttccagagccgggccggggttgggagcgcaggcggtgctcgggcggggcgcagcacggttgggttggaagggacctcccagccccagccctgccgtgggctggctgccccccagctcaggctgcccagggcccctccgyggcgtggggcacctccagggatgggcacccacggctgaggggcggctctgcgggcgggggatgggatcggacgtggggtarcgggggggaccgcttgcgggggaagcgcggcagcagagccgtaactgggccggaggagcgcgcagcccttactcagagccccgtgggcgatgagcggttgcagcgcaacgcgaaccggttttgctcaacttacttaaaaaaggaagaaaacctccaccccaaccaaaaagggaacggcacgggaacgagtaagctcagtaacggcggcgggtgaaatccccacgggcagcgcacagctgggaacttcctgctctggcggggggagggggcgaagggctgcctttgcctgtccaaaatagc

SEQ ID NO: 52722 - DNA, 600 bp, Chicken  19866894303523_1
gtgaaactcatatgattgtagttaggagcaattccacagcatccttgttaacgtatgagaaacaaattccttgacttttgtctccgagtagtaactacatgaccgcatactgcttccttcagcagtctaagtgcacccctcttctctaagccttgactggagttgcatctgatggaaatgagcagctgctgtgtttcctgagccatgtgcttgattagatgtaacatatacataatttactgtgttatgtcactaacttatttatttttcctacttttatttgtaggaaacttccttccsctgctacatttcaatctttatgcaatgactgatcagaacttagcctccttcaatgcgtagggctttacttctcgtgatttctttgtgcttgctttcctttgccttcttactcccagtaagtgataaaaacagagtaaggaacagagcagggattattgtacttcattttccctgtctttacttacagcctcatagacaaatagccatattttgaacagcaggaacctgatgcataccatgacctcacactgaagaggggtgtgatccataaggtgcaggtcagctctagctgagctcctg

SEQ ID NO: 52723 - DNA, 600 bp, Chicken  19866894303523_2
ttctgaaagataatgaagaaaatagtaagacgtattttccagttagaagaaaataatcagatggtccatttttattatgtcgtgatgttggtcatcacgtgcaggctgaaacttatcaaataaaagaatacgtaaagccatataaattggctttatggagacagaagagtctatgggaagtattttaataactgtaattactataaattttatatgcaacatattaaaaacacagaagttataatgaagcatatcagattttatgttgtttgtcttccaaataaatatgctgatttttaytaaatgctaaccagagatgctttttcaaagggtgcgtgtttaaaactcttctatttagttttgaaacaggagagggggaactttacagatcttatttacagagaacccaagaaagaaaatatatattttttaagtagagagatgattgataaagcagtagataaagtttagcacttggataatcccatgttgtgtcttggtgtagcaaacaggatttttggaactacagagtttttaatctgtttattttattttttcttgtaggcattatttgctgttcagtctgtattagcagaagaa

SEQ ID NO: 52724 - DNA, 600 bp, Chicken  19866894303525_1
cttgttttcctgcagaatcactggttcacttacaatgaaaccatgactgtggagagcgtgacgcaggctgtgtccaacctggcgctgcagtttggggaggaggatgcagaccccggtgcaatggtgtgtaatggtgggctgggctgccccaggagcctcccgtgcccccctggctctgccctcagccctgcctgaccattggctgctttctgttgcagtctcgtccatttggtgtcgcgctgctttttggaggagttgatgagaagggacctcagctgtaagttctgctctgtaatcctsggaagagacaaaacctcagagtgaaacagccgagggctctttaatgacttgatcctgtggttttccataagccaaaccctcggggtttatcccattatgtacctgacatgtttggtaatgcatttaaaccttccctgcataagaagggccgcggcagcacgatcacaggctgcttgttcaggattgaagagagtgctstgcctttagtgaaccctttgcttttcttcgtgtggtttcctgggcgggagggaggtgcttaagctctccttgtcctgagtttattcctacctttccctaaag

SEQ ID NO: 52725 - DNA, 600 bp, Chicken  19866894303525_2
ttggctgctttctgttgcagtctcgtccatttggtgtcgcgctgctttttggaggagttgatgagaagggacctcagctgtaagttctgctctgtaatcctsggaagagacaaaacctcagagtgaaacagccgagggctctttaatgacttgatcctgtggttttccataagccaaaccctcggggtttatcccattatgtacctgacatgtttggtaatgcatttaaaccttccctgcataagaagggccgcggcagcacgatcacaggctgcttgttcaggattgaagagagtgctstgcctttagtgaaccctttgcttttcttcgtgtggtttcctgggcgggagggaggtgcttaagctctccttgtcctgagtttattcctacctttccctaaaggagtagcagagccacggtaacataatatctgcagccgtctgtaacattccttggggaggcggagtggttgaaacctgaactggtgcttcaaacactgcctctgctggaggtgggaacggctcagcacagccagcccaaaaaagtccccctsttggtctccctcccaggagcagtggtgaaaacctactgattttgtaa

SEQ ID NO: 52726 - DNA, 600 bp, Chicken  19866894303525_3
cggcagcacgatcacaggctgcttgttcaggattgaagagagtgctstgcctttagtgaaccctttgcttttcttcgtgtggtttcctgggcgggagggaggtgcttaagctctccttgtcctgagtttattcctacctttccctaaaggagtagcagagccacggtaacataatatctgcagccgtctgtaacattccttggggaggcggagtggttgaaacctgaactggtgcttcaaacactgcctctgctggaggtgggaacggctcagcacagccagcccaaaaaagtccccctsttggtctccctcccaggagcagtggtgaaaacctactgattttgtaaaagaaaacagggagggggagaaacattctgctatgagtgtggaaggcagtgttggggtgcattgctttcctcctggcttatgagcccagcgtggggctgcaggcaaatgccgagtgcttcccagacctcggccctgctgtgagctcagcactgtgctctgggtgccctgggtgtgcagtgtggctgtgggtccgtgcggggagaagccctggtgctgtggtgcaggatgtggtgcgcctctgcttgctgatgc

SEQ ID NO: 52727 - DNA, 600 bp, Chicken  19866894303528_1
catacatgttctctttagtctgttaatgtgctcactgcccaaagcagctgatcacaactggtgcatcttcactagtaaatgatattttcttcactgatactaacaaacttctgaagtcagggcaatccataacctccctgtttacccactacaagttaaatgatggtgtagtcaagcacaggcttttgtctataatttgagcaaacatgttaagccgtcatcataactaggacttggcttcatgttaatagacttaaggtgagtgaataaatcaagaagcacaggttgttaatgcacggraggcaatggggtcccaactcaggcaggatataacagttttagaaatgattagccactggctgattgcttttattggatagacatgtggataagatggctgtcacactgtatgctctactctgtggctatttgtatgtcagatattaattgctcagcactaatgtacagtgaccacattgaggaaagcagtagcacagatgtacttttgttcatatgactaattggtaatcagtattatttattttttttagatgggtgattttaattgctyctcctcaccacagcagcgtaagggtacca

SEQ ID NO: 52728 - DNA, 600 bp, Chicken  19866894303528_2
tcaagaagcacaggttgttaatgcacggraggcaatggggtcccaactcaggcaggatataacagttttagaaatgattagccactggctgattgcttttattggatagacatgtggataagatggctgtcacactgtatgctctactctgtggctatttgtatgtcagatattaattgctcagcactaatgtacagtgaccacattgaggaaagcagtagcacagatgtacttttgttcatatgactaattggtaatcagtattatttattttttttagatgggtgattttaattgctyctcctcaccacagcagcgtaagggtaccaattttcttctcccataagcatattaggcgatgaagccaaaatatttaatcttgctgtagttttgtctgcaaaaatatgctttcccattccaattttatgttatattaattaagcctacaacatttcagtggaaaaacagtgtcttactgtgcattttcataaaagacagtattgagaattgcaacagatactattataatctgaataaaaatgtcagtgtgccctttccatacatgtttatcatctgtatattttggacatagacatttta

SEQ ID NO: 52729 - DNA, 599 bp, Chicken  19866894303531_1
  misc_feature (1)..(101): n is any nucleotide
nnnnnnnnnnnnnnnnnnnnnnnnnnnnnnnnnnnnnnnnnnnnnnnnnnnnnnnnnnnnnnnnnnnnnnnnnnnnnnnnnnnnnnnnnnnnnnnnnnnnntttgtgccacaatgcatcatttacttattacatttagtaatagataagaacagccaaaggcatccaggtaagcttgggatgtgtgagatagacaagcagacattgaggcaggttgagaactggctgactggcagagccaatcagagggttgtgattagcaacacagaatccaactggaggatgttagctagtggtgtcygctagggattgatactgggttttgtcttgtttaacatcttcatcaatgacatggatgaagagacagcatgtactctcagcaagttttctgatgatatgaagctgggaggagaggttgatgcaccagaagtctatgctgccattccacaagacctggccagggtggagagttgggyatggaggaacctggtgaggttccacaagagcaagtgcagactcttgcacctggggaggaataactgcacacatcagtacaggttaggggctgrcctgctggagrtgagctctttggagaaggac

SEQ ID NO: 52730 - DNA, 600 bp, Chicken  19866894303531_2
tgggatgtgtgagatagacaagcagacattgaggcaggttgagaactggctgactggcagagccaatcagagggttgtgattagcaacacagaatccaactggaggatgttagctagtggtgtcygctagggattgatactgggttttgtcttgtttaacatcttcatcaatgacatggatgaagagacagcatgtactctcagcaagttttctgatgatatgaagctgggaggagaggttgatgcaccagaagtctatgctgccattccacaagacctggccagggtggagagttgggyatggaggaacctggtgaggttccacaagagcaagtgcagactcttgcacctggggaggaataactgcacacatcagtacaggttaggggctgrcctgctggagrtgagctctttggagaaggacctgggggtcctggtggataacaggttggccatgagccagcagtgtgtacttgtggccaagaaggccaatggtctcctggggtgcattaaaaagatcgtggccagtaagttgagggaggtratcctccccctctactgtgccccrstgaggctacatctggagaactgtgtcctgtt

SEQ ID NO: 52731 - DNA, 600 bp, Chicken  19866894303531_3
atccaactggaggatgttagctagtggtgtcygctagggattgatactgggttttgtcttgtttaacatcttcatcaatgacatggatgaagagacagcatgtactctcagcaagttttctgatgatatgaagctgggaggagaggttgatgcaccagaagtctatgctgccattccacaagacctggccagggtggagagttgggyatggaggaacctggtgaggttccacaagagcaagtgcagactcttgcacctggggaggaataactgcacacatcagtacaggttaggggctgrcctgctggagrtgagctctttggagaaggacctgggggtcctggtggataacaggttggccatgagccagcagtgtgtacttgtggccaagaaggccaatggtctcctggggtgcattaaaaagatcgtggccagtaagttgagggaggtratcctccccctctactgtgccccrstgaggctacatctggagaactgtgtcctgttctggtcttcccagatcaagacagaaagggaacttctagggaatccagtagagggccactaaaatgatgagggacctggagcatctccctaatg

SEQ ID NO: 52732 - DNA, 600 bp, Chicken  19866894303531_4
ggatgttagctagtggtgtcygctagggattgatactgggttttgtcttgtttaacatcttcatcaatgacatggatgaagagacagcatgtactctcagcaagttttctgatgatatgaagctgggaggagaggttgatgcaccagaagtctatgctgccattccacaagacctggccagggtggagagttgggyatggaggaacctggtgaggttccacaagagcaagtgcagactcttgcacctggggaggaataactgcacacatcagtacaggttaggggctgrcctgctggagrtgagctctttggagaaggacctgggggtcctggtggataacaggttggccatgagccagcagtgtgtacttgtggccaagaaggccaatggtctcctggggtgcattaaaaagatcgtggccagtaagttgagggaggtratcctccccctctactgtgccccrstgaggctacatctggagaactgtgtcctgttctggtcttcccagatcaagacagaaagggaacttctagggaatccagtagagggccactaaaatgatgagggacctggagcatctccctaatgaggtagaatga

SEQ ID NO: 52733 - DNA, 600 bp, Chicken  19866894303531_5
gcaccagaagtctatgctgccattccacaagacctggccagggtggagagttgggyatggaggaacctggtgaggttccacaagagcaagtgcagactcttgcacctggggaggaataactgcacacatcagtacaggttaggggctgrcctgctggagrtgagctctttggagaaggacctgggggtcctggtggataacaggttggccatgagccagcagtgtgtacttgtggccaagaaggccaatggtctcctggggtgcattaaaaagatcgtggccagtaagttgagggaggtratcctccccctctactgtgccccrstgaggctacatctggagaactgtgtcctgttctggtcttcccagatcaagacagaaagggaacttctagggaatccagtagagggccactaaaatgatgagggacctggagcatctccctaatgaggtagaatgacaatgaaatgacagggccaaatacgttctcagggcatagactacccattactggctacttcaaagaacagtaggcaggatttcacattggcattaacaaatacacttaccattgcagaaggaactttgaacccaaataga

SEQ ID NO: 52734 - DNA, 600 bp, Chicken  19866894303531_6
ccacaagacctggccagggtggagagttgggyatggaggaacctggtgaggttccacaagagcaagtgcagactcttgcacctggggaggaataactgcacacatcagtacaggttaggggctgrcctgctggagrtgagctctttggagaaggacctgggggtcctggtggataacaggttggccatgagccagcagtgtgtacttgtggccaagaaggccaatggtctcctggggtgcattaaaaagatcgtggccagtaagttgagggaggtratcctccccctctactgtgccccrstgaggctacatctggagaactgtgtcctgttctggtcttcccagatcaagacagaaagggaacttctagggaatccagtagagggccactaaaatgatgagggacctggagcatctccctaatgaggtagaatgacaatgaaatgacagggccaaatacgttctcagggcatagactacccattactggctacttcaaagaacagtaggcaggatttcacattggcattaacaaatacacttaccattgcagaaggaactttgaacccaaatagaagcccatggaattttagaaagtac

SEQ ID NO: 52735 - DNA, 600 bp, Chicken  19866894303531_7
cacaagacctggccagggtggagagttgggyatggaggaacctggtgaggttccacaagagcaagtgcagactcttgcacctggggaggaataactgcacacatcagtacaggttaggggctgrcctgctggagrtgagctctttggagaaggacctgggggtcctggtggataacaggttggccatgagccagcagtgtgtacttgtggccaagaaggccaatggtctcctggggtgcattaaaaagatcgtggccagtaagttgagggaggtratcctccccctctactgtgccccrstgaggctacatctggagaactgtgtcctgttctggtcttcccagatcaagacagaaagggaacttctagggaatccagtagagggccactaaaatgatgagggacctggagcatctccctaatgaggtagaatgacaatgaaatgacagggccaaatacgttctcagggcatagactacccattactggctacttcaaagaacagtaggcaggatttcacattggcattaacaaatacacttaccattgcagaaggaactttgaacccaaatagaagcccatggaattttagaaagtacc

SEQ ID NO: 52736 - DNA, 600 bp, Chicken  19866894303533_1
tgtgcacttccaaatataattttactcgattttagtacaactgggaaagaaactgctggcggaccaacatgtagacatgcttcttgcctcacaaggagaagcatggttatggtcctgtcaaaaatgactatttaccacctctgtcacaaaacagatttcacagccttcacacagtaactcaagtcctgtagaacagtacacttagagaactccaatgacacagtaagatgcctagcctggcagtataagctgggaatagggttcattaactggcattagcgcactcatacaagaacacakmcgcatgtgtggcctaaccaagttactgagctaaagcctcttgtattttaatacaaagggttcttaacgtgacttactatgttaaaatacaagatgaggtgagctgaaatctgtcactcagaatacagctactgcacagtgtccttactagagaccagaagctactgctaaagcaaagagctggctgaggcccaacgcagctgtggacgtccgctgcaccccacagatgtgcagggcgaaggtgtgtgtgagcctcacactgcagacagtgctgcggtgcctcaccctgagcacagcacg

SEQ ID NO: 52737 - DNA, 600 bp, Chicken  19866894303533_2
gtgcacttccaaatataattttactcgattttagtacaactgggaaagaaactgctggcggaccaacatgtagacatgcttcttgcctcacaaggagaagcatggttatggtcctgtcaaaaatgactatttaccacctctgtcacaaaacagatttcacagccttcacacagtaactcaagtcctgtagaacagtacacttagagaactccaatgacacagtaagatgcctagcctggcagtataagctgggaatagggttcattaactggcattagcgcactcatacaagaacacakmcgcatgtgtggcctaaccaagttactgagctaaagcctcttgtattttaatacaaagggttcttaacgtgacttactatgttaaaatacaagatgaggtgagctgaaatctgtcactcagaatacagctactgcacagtgtccttactagagaccagaagctactgctaaagcaaagagctggctgaggcccaacgcagctgtggacgtccgctgcaccccacagatgtgcagggcgaaggtgtgtgtgagcctcacactgcagacagtgctgcggtgcctcaccctgagcacagcacga

SEQ ID NO: 52738 - DNA, 600 bp, Chicken  19866894303540_1
tgtagtctgccagcagtgtgccagggctgttggtgcccccacgttgagcactctgggctcagcctctcgctttgattcctgctggagtcgtgctgctgagatgtgctgagcttcccatctccgtttgggtccagctgaactcatgtctctgaaggacaatgggctgttttatggcagtttgctcataaaacgaaattgttaggcacatgggctggtttggacaagttcaaacatgctctactgttcatctttacagcgtcctttatagaccatctcagggagccctgtgaacaccacacygggggcctgacctctgcaggcccagcagctgggtgttggccatgctcacaggaccaagggctgttgtcatttctgtcctcttcttttccttcttccttaagtatgttcttgcccatgctggccttctcccctgcccagtcaatgcggtcccacctacagccttcctcccacagagggcagggagagctgagcaggcagtgagagctggaaagcagagcaggargagcagaagarcctgaaggccacaaagtcttacagaacaaaagatcttatcctgcctsagagttgtgggtgggatga

SEQ ID NO: 52739 - DNA, 600 bp, Chicken  19866894303540_2
agttcaaacatgctctactgttcatctttacagcgtcctttatagaccatctcagggagccctgtgaacaccacacygggggcctgacctctgcaggcccagcagctgggtgttggccatgctcacaggaccaagggctgttgtcatttctgtcctcttcttttccttcttccttaagtatgttcttgcccatgctggccttctcccctgcccagtcaatgcggtcccacctacagccttcctcccacagagggcagggagagctgagcaggcagtgagagctggaaagcagagcaggargagcagaagarcctgaaggccacaaagtcttacagaacaaaagatcttatcctgcctsagagttgtgggtgggatgagagtctgcttatggggaaagagtggaaaggagaattgaaacagagcatttcctgcctgtggacttcagggtggtagataagccaggctggataagggatgtccctcccagccttgccagagaagccagatgctgccatctgtcccactccaattcctccttgctcaaacaatttctggcccagttggtgagaaaggtaagaaatcaaatccacgactgcccta

SEQ ID NO: 52740 - DNA, 600 bp, Chicken  19866894303540_3
gctctactgttcatctttacagcgtcctttatagaccatctcagggagccctgtgaacaccacacygggggcctgacctctgcaggcccagcagctgggtgttggccatgctcacaggaccaagggctgttgtcatttctgtcctcttcttttccttcttccttaagtatgttcttgcccatgctggccttctcccctgcccagtcaatgcggtcccacctacagccttcctcccacagagggcagggagagctgagcaggcagtgagagctggaaagcagagcaggargagcagaagarcctgaaggccacaaagtcttacagaacaaaagatcttatcctgcctsagagttgtgggtgggatgagagtctgcttatggggaaagagtggaaaggagaattgaaacagagcatttcctgcctgtggacttcagggtggtagataagccaggctggataagggatgtccctcccagccttgccagagaagccagatgctgccatctgtcccactccaattcctccttgctcaaacaatttctggcccagttggtgagaaaggtaagaaatcaaatccacgactgccctatagccaaggaa

SEQ ID NO: 52741 - DNA, 600 bp, Chicken  19866894303540_4
gccctgtgaacaccacacygggggcctgacctctgcaggcccagcagctgggtgttggccatgctcacaggaccaagggctgttgtcatttctgtcctcttcttttccttcttccttaagtatgttcttgcccatgctggccttctcccctgcccagtcaatgcggtcccacctacagccttcctcccacagagggcagggagagctgagcaggcagtgagagctggaaagcagagcaggargagcagaagarcctgaaggccacaaagtcttacagaacaaaagatcttatcctgcctsagagttgtgggtgggatgagagtctgcttatggggaaagagtggaaaggagaattgaaacagagcatttcctgcctgtggacttcagggtggtagataagccaggctggataagggatgtccctcccagccttgccagagaagccagatgctgccatctgtcccactccaattcctccttgctcaaacaatttctggcccagttggtgagaaaggtaagaaatcaaatccacgactgccctatagccaaggaagcagaaggctaacttagctaaataacataactgctgactgagaactt

SEQ ID NO: 52742 - DNA, 600 bp, Chicken  19866894303542_1
ctattgttctgttctgctaaaagaaaactgaatctatctatctatctatttatttatttatttttagcatttcagagccccagaaggttattagaaataacagctcagtggttacttcatgcagtcctctaaacactccagtccttcaacactgttcttgatattcctactcttcccaatgtgatgacataaaatgttccttgcccttcatattcctattttcatttgattttgcatattgacctttcagactttctatttgtaccagttcatggagtttttatacccatcttcaataaygttttcgtgcttaawactttctatttttctatttgttttttactttttctctttagattaaccagattaacaaaatgtcccatttctccratttcaaattctcatttcatggtttcactgacttaaactctgtctcattttcaagttctctcctatagttggtccccctgaatacagtgaaaagcaaagaaagctccctcctgctctttctgccacccttagcagccagaaaactactgcaacattcaagaccttagtgggtaacttacaacctggaagtgttgcattccctacagataa

SEQ ID NO: 52743 - DNA, 600 bp, Chicken  19866894303542_2
gctaaaagaaaactgaatctatctatctatctatttatttatttatttttagcatttcagagccccagaaggttattagaaataacagctcagtggttacttcatgcagtcctctaaacactccagtccttcaacactgttcttgatattcctactcttcccaatgtgatgacataaaatgttccttgcccttcatattcctattttcatttgattttgcatattgacctttcagactttctatttgtaccagttcatggagtttttatacccatcttcaataaygttttcgtgcttaawactttctatttttctatttgttttttactttttctctttagattaaccagattaacaaaatgtcccatttctccratttcaaattctcatttcatggtttcactgacttaaactctgtctcattttcaagttctctcctatagttggtccccctgaatacagtgaaaagcaaagaaagctccctcctgctctttctgccacccttagcagccagaaaactactgcaacattcaagaccttagtgggtaacttacaacctggaagtgttgcattccctacagataaaagacaattaaattt

SEQ ID NO: 52744 - DNA, 600 bp, Chicken  19866894303542_3
ttagaaataacagctcagtggttacttcatgcagtcctctaaacactccagtccttcaacactgttcttgatattcctactcttcccaatgtgatgacataaaatgttccttgcccttcatattcctattttcatttgattttgcatattgacctttcagactttctatttgtaccagttcatggagtttttatacccatcttcaataaygttttcgtgcttaawactttctatttttctatttgttttttactttttctctttagattaaccagattaacaaaatgtcccatttctccratttcaaattctcatttcatggtttcactgacttaaactctgtctcattttcaagttctctcctatagttggtccccctgaatacagtgaaaagcaaagaaagctccctcctgctctttctgccacccttagcagccagaaaactactgcaacattcaagaccttagtgggtaacttacaacctggaagtgttgcattccctacagataaaagacaattaaattttctcactgctacatagtcctgtgcttgttgctcacaaaaatactccatccatctccatttgagagatctggagca

SEQ ID NO: 52745 - DNA, 599 bp, Chicken  19866894303543_1
  misc_feature (1)..(37): n is any nucleotide
nnnnnnnnnnnnnnnnnnnnnnnnnnnnnnnnnnnnntctggtgttgggaggtgcagaacacccagaaatggctgctaaagatcaacagcgattaggaaggggaatatcctctgaaatctagaccctatcttcagtttatatagcctaaagtagaacagtctgcttcctacctctgacaggcttcactgttagtatcaaaatgaaccaaaaggaatgaagagatagttggtttgaaaactgtccacatgcagaggtaaaaaatttaatttttgaggtgtgggaattcctagggcagcaaytctctcacctaccacctctcagcttcttgcttgctctaatgccactgctgccactggaagccttatagccattaatgcttggtggcactgtagttgtctgctgcaccctgtggtggcagggtgctgggttggaccacccccgcagtgctggtacctgcctgcctactcaggctgccagggaacaagactcccagaggcacagctacaacattgattattctgtttgaaaaatggcagtgtgttcagmgggtgaccccttccgtgaagcgatggtgaaggagaatagcccttcccgctag

SEQ ID NO: 52746 - DNA, 600 bp, Chicken  19866894303543_2
tgcagaggtaaaaaatttaatttttgaggtgtgggaattcctagggcagcaaytctctcacctaccacctctcagcttcttgcttgctctaatgccactgctgccactggaagccttatagccattaatgcttggtggcactgtagttgtctgctgcaccctgtggtggcagggtgctgggttggaccacccccgcagtgctggtacctgcctgcctactcaggctgccagggaacaagactcccagaggcacagctacaacattgattattctgtttgaaaaatggcagtgtgttcagmgggtgaccccttccgtgaagcgatggtgaaggagaatagcccttcccgctagaagaaattctgacctgtccccattccactagcggccgaaggtggggaraagtgagagcacagagatgtcgtgggtctcatacatagctgctgcctcattgaatctgcctggcttcagttggttgaacaacttaattgaagttctcatttcagtaagttatttgttccagaaggtctgaggagctgagaatcctgtgtctctcctgtgtgttggagaattttttgtaatggtttctaaatgaaaccgga

SEQ ID NO: 52747 - DNA, 510 bp, Chicken  19866894303543_3
ctgccactggaagccttatagccattaatgcttggtggcactgtagttgtctgctgcaccctgtggtggcagggtgctgggttggaccacccccgcagtgctggtacctgcctgcctactcaggctgccagggaacaagactcccagaggcacagctacaacattgattattctgtttgaaaaatggcagtgtgttcagmgggtgaccccttccgtgaagcgatggtgaaggagaatagcccttcccgctagaagaaattctgacctgtccccattccactagcggccgaaggtggggaraagtgagagcacagagatgtcgtgggtctcatacatagctgctgcctcattgaatctgcctggcttcagttggttgaacaacttaattgaagttctcatttcagtaagttatttgttccagaaggtctgaggagctgagaatcctgtgtctctcctgtgtgttggagaattttttgtaatggtttctaaatgaaaccggatgctcttcca

SEQ ID NO: 52748 - DNA, 599 bp, Chicken  19866894303550_1
  misc_feature (1)..(169): n is any nucleotide
nnnnnnnnnnnnnnnnnnnnnnnnnnnnnnnnnnnnnnnnnnnnnnnnnnnnnnnnnnnnnnnnnnnnnnnnnnnnnnnnnnnnnnnnnnnnnnnnnnnnnnnnnnnnnnnnnnnnnnnnnnnnnnnnnnnnnnnnnnnnnnnnnnnnnnnnnnnnnnnnnnnnnnnnnaaacaaacaaacaaacaaaaaccctctatagccaaccacacctaatactccaaaagttagcaagcaggaacattattccagaatgaattctcttaagtgtgatgaactttgtctgtactgattacataagsagaataaaaaattcaaaagaactgcaaaacattcaaaaattccttgtaaggcaattctagtcrtggctcctacatggttggcatcctattcccttaatgtatttaacaaaattgtacatgaaaggtccattgagtctgtcaggttgcttggctaggatcccaggagagagagttggcaccaagtaggactgacaaattgtggttgttcaacatgtgatagggtttatatcaccagccatcacagatgatgggactttctcattcaatttcactgaaatgaatcctcttcacagaggttt

SEQ ID NO: 52749 - DNA, 599 bp, Chicken  19866894303550_2
  misc_feature (1)..(106): n is any nucleotide
nnnnnnnnnnnnnnnnnnnnnnnnnnnnnnnnnnnnnnnnnnnnnnnnnnnnnnnnnnnnnnnnnnnnnnnnnnnnnnnnnnnnnnnnnnnnnnnnnnnnnnnnnnaaacaaacaaacaaacaaaaaccctctatagccaaccacacctaatactccaaaagttagcaagcaggaacattattccagaatgaattctcttaagtgtgatgaactttgtctgtactgattacataagsagaataaaaaattcaaaagaactgcaaaacattcaaaaattccttgtaaggcaattctagtcrtggctcctacatggttggcatcctattcccttaatgtatttaacaaaattgtacatgaaaggtccattgagtctgtcaggttgcttggctaggatcccaggagagagagttggcaccaagtaggactgacaaattgtggttgttcaacatgtgatagggtttatatcaccagccatcacagatgatgggactttctcattcaatttcactgaaatgaatcctcttcacagaggtttacagtgtgagaagttttgcagctgttatatcagctscatatatataacgtgtgtgtgtgtcca

SEQ ID NO: 52750 - DNA, 526 bp, Chicken  19866894303550_3
aaaattccttgtaaggcaattctagtcrtggctcctacatggttggcatcctattcccttaatgtatttaacaaaattgtacatgaaaggtccattgagtctgtcaggttgcttggctaggatcccaggagagagagttggcaccaagtaggactgacaaattgtggttgttcaacatgtgatagggtttatatcaccagccatcacagatgatgggactttctcattcaatttcactgaaatgaatcctcttcacagaggtttacagtgtgagaagttttgcagctgttatatcagctscatatatataacgtgtgtgtgtgtccacatatgtatttatactcataaggaaaatttgagacagtgacatggcattcattttttcttgtacggtggaatacagaataaggtcagagaagagcaagccagtctcaatctatgttttgttatgtttctctcccactcattctaagttttcaaacatggtttaaatattaacttcctcccttatgactgtctatcatct

SEQ ID NO: 52751 - DNA, 600 bp, Chicken  19866894303557_1
cctacgaggagagattgacctggacctgcggtaggaagctgaccttgacctacaaaaaaaacagaacacaaactactaagaggtatttttcacaaaagggtatccttcctagaatgaagggaaaagtaaaaacagtaaaataaacagcaaggtgactgcacttggtatcttacctcctaccacggcttcgactgcgtgagcgagaataccttcttcctcgggacctggagcgggatcgagaccgggacctggttttaggttagagaaaacacgtatcagaaaacagcctcagccaacagygctcgtgaggccctgctgaagtcaaaactttcagacaactaagaagaaaacaaaacaaaaaaacaaacaaaaaaacaaaaacaaaaccacaccactagcatctgtcagttggaaaaaatgcctgggcctacttgtcttgagcatttttactacctagaaaaatgttaaaagctgaattacattgcagaattacattagaataaaaaaatactgtaatgcgtatttaaaataacccttgcaagtttgcaggtcgaccctctttggcccaaggtctagcagatctagacgatctagaagtat

SEQ ID NO: 52752 - DNA, 600 bp, Chicken  19866894303564_1
acacttctgtttttctttcattcttctttcctcctcctacctcttaccttgattttctagataaaagtggtcaagagcagcaaagtggaatatttccttttcctactggcaatacttgttcagaccatcttaaattgcttggagagctacagtgaaaaactcagaaaaaagactcctcctccttttttattttattttaaatattgaatgcctcgctgtcacaatgaatccagaaggcacagtgagatgtcctggcatgggacactttgatctgttacaggctggagaagagacaaaatsagaatgattatggaatgacagrtgacctgaagctggaagggaactcaggagtctgtttcaaccacctgctcaaaacaaagctgatcttgaaattaatttctgcttcaaagtcagatcaggttgttcaaatgcccaatcaagttttaattattgatgtgaatggggattggatggcatggtttctctgggcaaattcttcaatgtatgttcacctttcattttgttcccctttagatcaacaggaatggcactagtctgtgacagggtaggttcagtttggatatcaggaaaaggttattt

SEQ ID NO: 52753 - DNA, 600 bp, Chicken  19866894303564_2
cttctttcctcctcctacctcttaccttgattttctagataaaagtggtcaagagcagcaaagtggaatatttccttttcctactggcaatacttgttcagaccatcttaaattgcttggagagctacagtgaaaaactcagaaaaaagactcctcctccttttttattttattttaaatattgaatgcctcgctgtcacaatgaatccagaaggcacagtgagatgtcctggcatgggacactttgatctgttacaggctggagaagagacaaaatsagaatgattatggaatgacagrtgacctgaagctggaagggaactcaggagtctgtttcaaccacctgctcaaaacaaagctgatcttgaaattaatttctgcttcaaagtcagatcaggttgttcaaatgcccaatcaagttttaattattgatgtgaatggggattggatggcatggtttctctgggcaaattcttcaatgtatgttcacctttcattttgttcccctttagatcaacaggaatggcactagtctgtgacagggtaggttcagtttggatatcaggaaaaggttatttaccagagggtagtaggcgtgga

SEQ ID NO: 52754 - DNA, 600 bp, Chicken  19866894303567_1
ctgcaactcataggttgaagatgaatctcttaggaaaggaaatccagctatatttaatgtcgtgaaatagtctaaaataaacagttgatgcgtttcatttcttgaggcattgtgctgaaacagtgtttaagtgagagcacataataggaaccttatccaaaatgttttacaagatacgttttctcctgatgacttgtggctttgttggtactgtggtgtttgtaggtagattgctttttctcacctttttcctggtgtgctgtagttgaggctacttgtttttatcacacagtgctcacrttgttagggagaaggaaaatgggaagrtttttccctttgaaacaaactgcacagaaaacccagtgtcaggggaagagatgtgagtttcagggggatgtttttgtattctkacttaytgcttagcaagtacttccatcatgttaagaagaaycatgagcagctaaatactttgctcgggtgacgtttgtcagttagttgatacagggttggttttggtttccatttctgatgttgagatagccaggaagccttccagctgctcagtaatctgcatttccagcagtgcaatctgtctcttgc

SEQ ID NO: 52755 - DNA, 600 bp, Chicken  19866894303567_2
tcttaggaaaggaaatccagctatatttaatgtcgtgaaatagtctaaaataaacagttgatgcgtttcatttcttgaggcattgtgctgaaacagtgtttaagtgagagcacataataggaaccttatccaaaatgttttacaagatacgttttctcctgatgacttgtggctttgttggtactgtggtgtttgtaggtagattgctttttctcacctttttcctggtgtgctgtagttgaggctacttgtttttatcacacagtgctcacrttgttagggagaaggaaaatgggaagrtttttccctttgaaacaaactgcacagaaaacccagtgtcaggggaagagatgtgagtttcagggggatgtttttgtattctkacttaytgcttagcaagtacttccatcatgttaagaagaaycatgagcagctaaatactttgctcgggtgacgtttgtcagttagttgatacagggttggttttggtttccatttctgatgttgagatagccaggaagccttccagctgctcagtaatctgcatttccagcagtgcaatctgtctcttgcctcctgaatggtggagtagctcctttc

SEQ ID NO: 52756 - DNA, 600 bp, Chicken  19866894303567_3
tgtgctgaaacagtgtttaagtgagagcacataataggaaccttatccaaaatgttttacaagatacgttttctcctgatgacttgtggctttgttggtactgtggtgtttgtaggtagattgctttttctcacctttttcctggtgtgctgtagttgaggctacttgtttttatcacacagtgctcacrttgttagggagaaggaaaatgggaagrtttttccctttgaaacaaactgcacagaaaacccagtgtcaggggaagagatgtgagtttcagggggatgtttttgtattctkacttaytgcttagcaagtacttccatcatgttaagaagaaycatgagcagctaaatactttgctcgggtgacgtttgtcagttagttgatacagggttggttttggtttccatttctgatgttgagatagccaggaagccttccagctgctcagtaatctgcatttccagcagtgcaatctgtctcttgcctcctgaatggtggagtagctcctttctcttgcagcagcaggcttagtctttaggaagaagacaaatagcgagtcctcagatgaactggtctaaaaatggtcaagtggaa

SEQ ID NO: 52757 - DNA, 600 bp, Chicken  19866894303567_4
gaaacagtgtttaagtgagagcacataataggaaccttatccaaaatgttttacaagatacgttttctcctgatgacttgtggctttgttggtactgtggtgtttgtaggtagattgctttttctcacctttttcctggtgtgctgtagttgaggctacttgtttttatcacacagtgctcacrttgttagggagaaggaaaatgggaagrtttttccctttgaaacaaactgcacagaaaacccagtgtcaggggaagagatgtgagtttcagggggatgtttttgtattctkacttaytgcttagcaagtacttccatcatgttaagaagaaycatgagcagctaaatactttgctcgggtgacgtttgtcagttagttgatacagggttggttttggtttccatttctgatgttgagatagccaggaagccttccagctgctcagtaatctgcatttccagcagtgcaatctgtctcttgcctcctgaatggtggagtagctcctttctcttgcagcagcaggcttagtctttaggaagaagacaaatagcgagtcctcagatgaactggtctaaaaatggtcaagtggaagtgtgg

SEQ ID NO: 52758 - DNA, 600 bp, Chicken  19866894303567_5
cttatccaaaatgttttacaagatacgttttctcctgatgacttgtggctttgttggtactgtggtgtttgtaggtagattgctttttctcacctttttcctggtgtgctgtagttgaggctacttgtttttatcacacagtgctcacrttgttagggagaaggaaaatgggaagrtttttccctttgaaacaaactgcacagaaaacccagtgtcaggggaagagatgtgagtttcagggggatgtttttgtattctkacttaytgcttagcaagtacttccatcatgttaagaagaaycatgagcagctaaatactttgctcgggtgacgtttgtcagttagttgatacagggttggttttggtttccatttctgatgttgagatagccaggaagccttccagctgctcagtaatctgcatttccagcagtgcaatctgtctcttgcctcctgaatggtggagtagctcctttctcttgcagcagcaggcttagtctttaggaagaagacaaatagcgagtcctcagatgaactggtctaaaaatggtcaagtggaagtgtggagtggagctggcagtgaccaggtaggggccctggc

SEQ ID NO: 52759 - DNA, 600 bp, Chicken  19866894303569_1
agcattgcagcagctctctttaaggggataattcaacctggaaggggactctggtggctgcttggcccaacagccgtgcatagggcagactaacttagaggatagatccaatttcaaaggtaacttgggttgctcagagctgctcaggttttgaacttctccaatgagggggactcctctttcaccctaggcttcttttccagtctgtgaccaccctcgtagtggggaaaaaaatccaaataatgaattggaatttctttggcaacatcttatggctgttgcctctttgctttcaccatrcgtctccagaagtttgcttgtttcttctttaaaagcaccctggatggatgaaaaaaccataagatctccactcaacttctcttcttaaaattgaacaaactaagttctcttagtctctcttcttatgttatgtgctccagatcccatcaagttaacagactggtcccttcatccaaagcaaaaactccaattaattttcaacagatatgtctcagctttcaagacatgagtgaaggccagacacgtggggtaagttatttccatgtttgaaggaaaacttgttggcacatacacaagata

SEQ ID NO: 52760 - DNA, 600 bp, Chicken  19866894303570_1
tcaatggtgggcattttgaagtggaataattaataaacatctattcaatctactacttatgtcattattatttgtcaaatgaaagaaataaaccagtctactttctggatgaaaaagcactttctttagctctcatttcacttgaagtgtctggctcttttcttgtagtcatatggatctgctcttttaatagtaaaaacaccttccaagggaatatttctggagcagattctcctgccctttggtgagaattaggagcagaagagcacatgtttgaacttactcagacagctgaagtargaagaggagcagtgaggtgagatgcagctagggcagcatcattcaaaggttagggcagctcccaaggttcacctcagctatttctcacagtcagctgatgataattcagttttagaacacttctccagtccaaagcaattttctttattgctattgtccatacaggtgtcctctcttaagctggtttttctaataccttcttttcctatatgttcttccaggttcagtaaaacacttaacttggcacactgcattggaaacttggcttgctcacttcccagcaacagatttttgaattct

SEQ ID NO: 52761 - DNA, 599 bp, Chicken  19866894303571_1
  misc_feature (1)..(93): n is any nucleotide
nnnnnnnnnnnnnnnnnnnnnnnnnnnnnnnnnnnnnnnnnnnnnnnnnnnnnnnnnnnnnnnnnnnnnnnnnnnnnnnnnnnnnnnnnnnnnactcgtgtttgcagaccacaaaatgcaggtcagcactaaaatctgctgcaggagaactgaaccttgtaaagttttatggcatattcagtaggcaggctattctgacagctctgttataaaacactgtttagtagtctataattcagattttacgtgatcagcatagaggacgtgaagagagaagcctctggaactcctctccagaamtcagtttagagatccctcaatgaagctgtaggatctatgagtaaaataaaaaawcagttgctgtcagacctgttttttttttacttgattataacttaaaaataatcttcctttgccagcaatcattgtctgaggacagaatggcctatatttgtgcaaagaaacatctctgcaattaccacaccccccacaaaagctgcacgcaagtcctctatagggaatgccctgaaacacattgggaattattttgggtaatgctggttgctgtggatcaaaactgtgcgagagaatccaaatgt

SEQ ID NO: 52762 - DNA, 599 bp, Chicken  19866894303571_2
  misc_feature (1)..(39): n is any nucleotide
nnnnnnnnnnnnnnnnnnnnnnnnnnnnnnnnnnnnnnnactcgtgtttgcagaccacaaaatgcaggtcagcactaaaatctgctgcaggagaactgaaccttgtaaagttttatggcatattcagtaggcaggctattctgacagctctgttataaaacactgtttagtagtctataattcagattttacgtgatcagcatagaggacgtgaagagagaagcctctggaactcctctccagaamtcagtttagagatccctcaatgaagctgtaggatctatgagtaaaataaaaaawcagttgctgtcagacctgttttttttttacttgattataacttaaaaataatcttcctttgccagcaatcattgtctgaggacagaatggcctatatttgtgcaaagaaacatctctgcaattaccacaccccccacaaaagctgcacgcaagtcctctatagggaatgccctgaaacacattgggaattattttgggtaatgctggttgctgtggatcaaaactgtgcgagagaatccaaatgttttgaggatgatcaacttccaccatctggcaacgtccccactgtttaattcact

SEQ ID NO: 52763 - DNA, 600 bp, Chicken  19866894303575_1
attttgttccgaagaccactgacagtttagcattttgtctgcagtgttcagagctcagtattttccctcatacagagagagcaagctttgacttcagctaacatgccaccaaggtacgctgtgataagagggaatgcgctcccatggcccaagcaggggtggcacttcaggttgctgacactgtcagaactgcagaggtacatctgccacacatcttctcctgtaggatttgtaaagagatctaaaacaagccccacaaaggtaaactatctctcttgctttgaggaaatgtgattcctygtccgtttttatgttccaaaccaagtgcagcagtccataaggcttatccagctcaggttctscagcttatataggagagccaggcacttggtggtaagaggtgtttttcagctcttagaacttataataaagatcgtaacatttcaaaagctcatgcagaggtgtctttggagggggatttttttttacctctgctttagataagctgctgcccagagactatatgtgtgaagaggcacaggtcagttgggctgtctgacataggaaagtcactgtccatacaacaaccactgctcttat

SEQ ID NO: 52764 - DNA, 600 bp, Chicken  19866894303575_2
ttccctcatacagagagagcaagctttgacttcagctaacatgccaccaaggtacgctgtgataagagggaatgcgctcccatggcccaagcaggggtggcacttcaggttgctgacactgtcagaactgcagaggtacatctgccacacatcttctcctgtaggatttgtaaagagatctaaaacaagccccacaaaggtaaactatctctcttgctttgaggaaatgtgattcctygtccgtttttatgttccaaaccaagtgcagcagtccataaggcttatccagctcaggttctscagcttatataggagagccaggcacttggtggtaagaggtgtttttcagctcttagaacttataataaagatcgtaacatttcaaaagctcatgcagaggtgtctttggagggggatttttttttacctctgctttagataagctgctgcccagagactatatgtgtgaagaggcacaggtcagttgggctgtctgacataggaaagtcactgtccatacaacaaccactgctcttatcaggtgctggcattagttcccatattttgtggcggaagacattacatttgcaaagatcttcc

SEQ ID NO: 52765 - DNA, 600 bp, Chicken  19866894303581_1
ggcctgtcatttggggtctgactgtgtctttgtgctgtacacgtctggctgcatgcagacactgagcagtggaacgtgcggaccctggcaagacaagcagtggtggggagtgcacaatatatgtggtcttttgaattaattatgatggattttgagatattcataaattaatgtaggtgaggttgggtctgctatacagatgcagtaggatttttgccaagtctttatgcagaagcgtagctgagcaatggttggatgatggttgtgaggctgatgccattaagagcaaggggagaagcrgcagagtggatgggaactcaaagctgcatctggaaattggttgtaaataaagacgaatggaggcctgaattcacaaatgctgccaacaaattcatcatacaattaaagtctgaaacagcaaaataagaactgtcaaacacctaaccagctacccagctgatctgtttttktatgctgcatttaattgcatgtattacctcttcttcatccaccgccctttccggatcactttgtcttatcaattcagttccaggacaaaaggacatgcttcttttacttgcaggatagaagcgtggtggt

SEQ ID NO: 52766 - DNA, 579 bp, Chicken  19866894303581_2
atgtaggtgaggttgggtctgctatacagatgcagtaggatttttgccaagtctttatgcagaagcgtagctgagcaatggttggatgatggttgtgaggctgatgccattaagagcaaggggagaagcrgcagagtggatgggaactcaaagctgcatctggaaattggttgtaaataaagacgaatggaggcctgaattcacaaatgctgccaacaaattcatcatacaattaaagtctgaaacagcaaaataagaactgtcaaacacctaaccagctacccagctgatctgtttttktatgctgcatttaattgcatgtattacctcttcttcatccaccgccctttccggatcactttgtcttatcaattcagttccaggacaaaaggacatgcttcttttacttgcaggatagaagcgtggtggtggtttgtcacctttttttttctgggctctgccatcccagaattgatactcagctgatttaaaaatatttgtagctcaacaagttcatttatagaggaaaattaatttggcttgtagagtgtaagtgaaaaataattaaaaaatatttcc

SEQ ID NO: 52767 - DNA, 600 bp, Chicken  19866894303582_1
ccaaactctgtattcatattacagttaagcttgaaaccacacaacactcagaatagatggctttaaagacagagcatctgagacacacagaagatgaaacgttcactcaaatctcatgccagtaagaagtccacagctgctaactatccaaaccatttcccaaactttaggtcttagcccagactatttcatgaaaacaaggctggagtccatgtccttacgttccacactcatggagaatggcagggtgaggaattcctagcttgcaaaatggtaactgcaaatctgattgttctgcasatggagaatggaaataacagggctgaggtaaggggaaactgaaagattcagcattcaagaccacggagggataccatcaaacaagtcaagaaaacaaatgtagttggaagttggaaagagccaggtactctgtagctgaatggattagctaaagcatgactgactagaattacacgtgactttttaaattacacatttggcagtgctagggatgtgaagagagcagagaagaatgaccacatgtttcctttcaactcagaggcagactgtttggactggaagtggatcagaactcgtaac

SEQ ID NO: 52768 - DNA, 600 bp, Chicken  19866894303584_1
aactcctaactgttaacactccctctgtggcagaatggctgctacacgactggagtgctggaaacctgctcagtgatgacacaagctgttcttccaggtgctgcaggctggcctttaggccatgcatcatacatatgctagacactcgccccttggtttcagcaacaggcacagatgaagcacgaagtgggtgatggaagaactcttaagcagaatactgctttaagaactcatctgccatgattcttttcactctccatcctgtatcaatcagcaagtcaattaattagtacaatgagrtgttaaaaacataacgtcttatgggaaaaaaacaaaggcagtcagcctggcaggtaaacctgamtgcagtgcaggcttgttctccagccacagtcagtctcctatctcttttcctttatgggaggcagaggagaatactgacccaaaattagtatgctgtgaattaacccttatctgcatttaagcatagagacatttcaaaaagcacgtaattgtgaagcttcttagaaatacatagccaaggagggatcactgccctgactggtgattttaatctaagcactctcatattgacayagc

SEQ ID NO: 52769 - DNA, 600 bp, Chicken  19866894303584_2
cctgctcagtgatgacacaagctgttcttccaggtgctgcaggctggcctttaggccatgcatcatacatatgctagacactcgccccttggtttcagcaacaggcacagatgaagcacgaagtgggtgatggaagaactcttaagcagaatactgctttaagaactcatctgccatgattcttttcactctccatcctgtatcaatcagcaagtcaattaattagtacaatgagrtgttaaaaacataacgtcttatgggaaaaaaacaaaggcagtcagcctggcaggtaaacctgamtgcagtgcaggcttgttctccagccacagtcagtctcctatctcttttcctttatgggaggcagaggagaatactgacccaaaattagtatgctgtgaattaacccttatctgcatttaagcatagagacatttcaaaaagcacgtaattgtgaagcttcttagaaatacatagccaaggagggatcactgccctgactggtgattttaatctaagcactctcatattgacayagcaatgaacaataattgattcatatcccttcattagtatatactatgtatactggtatagtccttg

SEQ ID NO: 52770 - DNA, 600 bp, Chicken  19866894303584_3
agrtgttaaaaacataacgtcttatgggaaaaaaacaaaggcagtcagcctggcaggtaaacctgamtgcagtgcaggcttgttctccagccacagtcagtctcctatctcttttcctttatgggaggcagaggagaatactgacccaaaattagtatgctgtgaattaacccttatctgcatttaagcatagagacatttcaaaaagcacgtaattgtgaagcttcttagaaatacatagccaaggagggatcactgccctgactggtgattttaatctaagcactctcatattgacayagcaatgaacaataattgattcatatcccttcattagtatatactatgtatactggtatagtccttggttaaaaatacaatctggtttcatcagtttctttcttttatactctgcttagaatatatcycaaaaagcccacaccacaaattattttgggtgctcttagaaacaaactcaggaagggtgctcagctcatatggtcatgaacctatgcagctgtaggcagggagataatccacttgcaagaatcctrgggctgctatcaagtgtgaaagtcagaccctaggattccataccta

SEQ ID NO: 52771 - DNA, 600 bp, Chicken  19866894303584_4
cagaggagaatactgacccaaaattagtatgctgtgaattaacccttatctgcatttaagcatagagacatttcaaaaagcacgtaattgtgaagcttcttagaaatacatagccaaggagggatcactgccctgactggtgattttaatctaagcactctcatattgacayagcaatgaacaataattgattcatatcccttcattagtatatactatgtatactggtatagtccttggttaaaaatacaatctggtttcatcagtttctttcttttatactctgcttagaatatatcycaaaaagcccacaccacaaattattttgggtgctcttagaaacaaactcaggaagggtgctcagctcatatggtcatgaacctatgcagctgtaggcagggagataatccacttgcaagaatcctrgggctgctatcaagtgtgaaagtcagaccctaggattccatacctactgctagggtgtaaccagctcacctagtctagtcagttcatactgcttcactttcttctttagctttatgggtcctacgtcccagctctcctcttcagcaccatccagagggctttcatcactggact

SEQ ID NO: 52772 - DNA, 600 bp, Chicken  19866894303584_5
actgccctgactggtgattttaatctaagcactctcatattgacayagcaatgaacaataattgattcatatcccttcattagtatatactatgtatactggtatagtccttggttaaaaatacaatctggtttcatcagtttctttcttttatactctgcttagaatatatcycaaaaagcccacaccacaaattattttgggtgctcttagaaacaaactcaggaagggtgctcagctcatatggtcatgaacctatgcagctgtaggcagggagataatccacttgcaagaatcctrgggctgctatcaagtgtgaaagtcagaccctaggattccatacctactgctagggtgtaaccagctcacctagtctagtcagttcatactgcttcactttcttctttagctttatgggtcctacgtcccagctctcctcttcagcaccatccagagggctttcatcactggactcctcctggcccacctcccggtagtagagtttgtagcctgatatctgggcatggttggctgggggttgccatgtaatcaggagagactccatcttygctcggacttttaattctgttggtgcaaacg

SEQ ID NO: 52773 - DNA, 600 bp, Chicken  19866894303584_6
gcagggagataatccacttgcaagaatcctrgggctgctatcaagtgtgaaagtcagaccctaggattccatacctactgctagggtgtaaccagctcacctagtctagtcagttcatactgcttcactttcttctttagctttatgggtcctacgtcccagctctcctcttcagcaccatccagagggctttcatcactggactcctcctggcccacctcccggtagtagagtttgtagcctgatatctgggcatggttggctgggggttgccatgtaatcaggagagactccatcttygctcggacttttaattctgttggtgcaaacggaactagaagaacaagggaaaaaacattcagtcacttatctccattactaactacaaatggaaggaggaaagacccactacccaagacatataggggctgctcaacagaaagccaagggcaggtgctccgctctaatcaaaaccaatagttagaactccctaatgaacgcagacatttctggttatgcctcaaggtccccatccccaaccccaagcaacacccagcctcctaccatgtgtctggttgtccctgtcaggagtccgatgct

SEQ ID NO: 52774 - DNA, 600 bp, Chicken  19866894303590_1
ggaagagatctgcagaatgtgcttgcagggctacgatctccagcagcagtagagaggtgatatagaaagtgtagctactacagtggggatacagggagttgacacactgacaaagtcccctttcagggttggaaagacaagttcagagtgggtagtgctaaatctgagcatgtgcctggtaagacgctttctgggatgtaaccagtcagccttgcacctgctgcttggacatgacaaatgtgctcctcaccaggaccctggcctgcaggttgcaactctggcatgagacaaaaaagcacrgttgctaggagctaagataagctcatctccactgaagctactctcctgcaagctcttcaaagagattacaagcacccaaaacactgtcaccatgacagggtcctgccttatcccaacttgcattacccagtcctctcaccagcctctattgtacaaactcaattgccttaattactagagcccccggtctactttgccttatatattcatgtctagacattaaatatttatcaaaagattcattatttgggcattaaatattaatttctatgaggcagtgaatggggtgatttgtatttg

SEQ ID NO: 52775 - DNA, 600 bp, Chicken  19866894303591_1
gacaaaataacccttctttgacttgttgcccctgtagttacccattccttcaggtctcaaggctctatcagctgctggtgaaaaccttcacctcttccaccacaaaaaatgcccccagaagataatctacttggtgcagaagaattgtgcatatcatagaatcatagaatcttttgagttggaagagacccatacaggctagctattccaactcccctgcaatgagcaggggcacctacagctagatcaggttgctcagagcattgtccagcctgaccttgaaggtatccagggataccmtccaccacctcgctgggcaagctgttccagtgccacaccacccttattgtaaaaaacttcctccttatatccagcctaaatctcccctctcctagtatttggagatcaatgagcaggactcatgtcttgacagttgatttctgtcttatttgggcaagacactgctcttccagactcagttaagtagcagtatttgaaatggacccattctgcttcatcttttgtggatgacagacagcttaaatcctcttagagacattctgaaattctgcaaagcgaggaattatacatggcacgaac

SEQ ID NO: 52776 - DNA, 599 bp, Chicken  19866894303595_1
  misc_feature (1)..(68): n is any nucleotide
nnnnnnnnnnnnnnnnnnnnnnnnnnnnnnnnnnnnnnnnnnnnnnnnnnnnnnnnnnnnnnnnnnnnttttcttctgggaaacagaagggaaataggctatgaaaaaaaaatcacacgaaaacaacacaaggaaaacaaggaacatttaactagtagtaaaatcaatgattttctaaatggaaaaaggtgaagaaaacaataaatctatattttggagtcaatctaatattcagtgaaatagaggtttggatacaactggaaaatatgcagtaacactgcagtactttttccacatgargaattcctgcagtgtcagagagtggactgttgctaccaaggtgcaygttcagttttaaaggaagcatggtaacgtgcaaaaatctcaaggtacttcagagagagaaaactaaacaaattactgcaaactaaatcttcctaggctttgattttttattaggatccattaaatgtcaattaaggtacacaccgagagaggtctccaaatgagtgatcctggcatcttgtgaaaatactcagcagagcagggaacatggcattgcatacaaattgtgctctcagggggaccttaccccagca

SEQ ID NO: 52777 - DNA, 599 bp, Chicken  19866894303595_2
  misc_feature (1)..(22): n is any nucleotide
nnnnnnnnnnnnnnnnnnnnnnttttcttctgggaaacagaagggaaataggctatgaaaaaaaaatcacacgaaaacaacacaaggaaaacaaggaacatttaactagtagtaaaatcaatgattttctaaatggaaaaaggtgaagaaaacaataaatctatattttggagtcaatctaatattcagtgaaatagaggtttggatacaactggaaaatatgcagtaacactgcagtactttttccacatgargaattcctgcagtgtcagagagtggactgttgctaccaaggtgcaygttcagttttaaaggaagcatggtaacgtgcaaaaatctcaaggtacttcagagagagaaaactaaacaaattactgcaaactaaatcttcctaggctttgattttttattaggatccattaaatgtcaattaaggtacacaccgagagaggtctccaaatgagtgatcctggcatcttgtgaaaatactcagcagagcagggaacatggcattgcatacaaattgtgctctcagggggaccttaccccagcagggcttcttggcattattataatatattataaacattgaaaaataa

SEQ ID NO: 52778 - DNA, 599 bp, Chicken  19866894303601_1
  misc_feature (1)..(36): n is any nucleotide
nnnnnnnnnnnnnnnnnnnnnnnnnnnnnnnnnnnntttaaaatcagagataattattaccctacataataaaatatcaacatatcaatttgctgtgggaggatgcttatttcctgctacctattaaaaaataaataaaactgagtaattaataagtgacagcatagtccactggcttctggttaatcttgcagtctgagtcaaccgggaaggaatttgtctctgttaacttctctaagctggattccctttgtaactgagaaaaaagtaggcacttctagggagcttgtcatctccttwggttagcatctgacacagatcaaacaataaatggttgcaatgtgccagttttattcaattgaccgtaatgagtcaggagacagaatggtaagtctraaatgaatcccacygatatgttttgaaatatcccacaaagatgaatgggctgtgactggaggtacaaattctgtgaacagtggattttactgctgcgcacaatgctgcaaaagggaatttacttccttaccaccttatatatttaccctttaggagcattaaattcttggcttattttaattggtttcaaaactctaaatcat

SEQ ID NO: 52779 - DNA, 600 bp, Chicken  19866894303601_2
gggaggatgcttatttcctgctacctattaaaaaataaataaaactgagtaattaataagtgacagcatagtccactggcttctggttaatcttgcagtctgagtcaaccgggaaggaatttgtctctgttaacttctctaagctggattccctttgtaactgagaaaaaagtaggcacttctagggagcttgtcatctccttwggttagcatctgacacagatcaaacaataaatggttgcaatgtgccagttttattcaattgaccgtaatgagtcaggagacagaatggtaagtctraaatgaatcccacygatatgttttgaaatatcccacaaagatgaatgggctgtgactggaggtacaaattctgtgaacagtggattttactgctgcgcacaatgctgcaaaagggaatttacttccttaccaccttatatatttaccctttaggagcattaaattcttggcttattttaattggtttcaaaactctaaatcatgttgctgagaatagaatacaaaagcatttacagcatgcttcatggtgttcattcacagtgaataggagcatttgtttatggaggtatagtccgtttg

SEQ ID NO: 52780 - DNA, 600 bp, Chicken  19866894303601_3
ttcctgctacctattaaaaaataaataaaactgagtaattaataagtgacagcatagtccactggcttctggttaatcttgcagtctgagtcaaccgggaaggaatttgtctctgttaacttctctaagctggattccctttgtaactgagaaaaaagtaggcacttctagggagcttgtcatctccttwggttagcatctgacacagatcaaacaataaatggttgcaatgtgccagttttattcaattgaccgtaatgagtcaggagacagaatggtaagtctraaatgaatcccacygatatgttttgaaatatcccacaaagatgaatgggctgtgactggaggtacaaattctgtgaacagtggattttactgctgcgcacaatgctgcaaaagggaatttacttccttaccaccttatatatttaccctttaggagcattaaattcttggcttattttaattggtttcaaaactctaaatcatgttgctgagaatagaatacaaaagcatttacagcatgcttcatggtgttcattcacagtgaataggagcatttgtttatggaggtatagtccgtttgtatttttttgagcg

SEQ ID NO: 52781 - DNA, 600 bp, Chicken  19866894303606_1
ttcccgctgctgctggcagcaggcaggtgactccatcaggcagtgctgaatcactcgagctctgtgctgctaaacgctctgcagagacagtgggttttcaagggaaatgtgcctctgagcacggaaactcagggaagcagagaatgccgtcactgcttcatcactgacagttgttccctcggcctcctcccgctcccctgcttccaggacatgttgaagaaggaagctctcctcctcattcccaatgtgctgaaggttttcctggagaacgggcagatcaagtccttcacattcgatggycgaacgaccgtgaaggtgggtccctcctgcttccccccagcatcacatcgatgcctcccttctccatttttctccatttttctcagccttttgcttccttgcacaaacatgtgggctgccaccatgcagcagccatcctgaggcaatgcatattgcagccccatgcaaggagggagctgctgcttctcacccaagcccatctgtggcatttgcaggatgtgatggtgacgttgcaggaccgcctgtccctgaggcacatcgagcactttgccctggtcctggagtactcgagcccagagc

SEQ ID NO: 52782 - DNA, 600 bp, Chicken  19866894303616_1
taccctggaagtccatctgcccactaaagggaatgcagttgacactctcttttgagtcctcaagccactgtctcatttcagatttatacctgcaatttgactgtactgaggccatttggcaaacatatgccctgaaagcagtggtgaaactgccaggaattacatgacttccttggttagtgaataaatggtgaaaagcaactgagactctgatcagctgtgattgtcaacacctctctcagtgttggcaatctactagcaatgctaaatcagtctgtaatctggccttcactcaaaaawatatcactctaagccagtaacgttgccaacagctatcccatttcaaatcttttctacttaagtaagttaatcrgcttacttttactctaaaaacccaagaaccttttgaatatgttttagttagattgattaaacatctaagggcatatatgcacgcttttagatatagcagtagaattcagtgtaatatatcaagaggtggtgttgttattcttaaaggatcttgtacacaaaaatatattgaggtgatactgtttgctcaaatggattctgtaaaaattaggatgattgagcctttag

SEQ ID NO: 52783 - DNA, 600 bp, Chicken  19866894303616_2
catttcagatttatacctgcaatttgactgtactgaggccatttggcaaacatatgccctgaaagcagtggtgaaactgccaggaattacatgacttccttggttagtgaataaatggtgaaaagcaactgagactctgatcagctgtgattgtcaacacctctctcagtgttggcaatctactagcaatgctaaatcagtctgtaatctggccttcactcaaaaawatatcactctaagccagtaacgttgccaacagctatcccatttcaaatcttttctacttaagtaagttaatcrgcttacttttactctaaaaacccaagaaccttttgaatatgttttagttagattgattaaacatctaagggcatatatgcacgcttttagatatagcagtagaattcagtgtaatatatcaagaggtggtgttgttattcttaaaggatcttgtacacaaaaatatattgaggtgatactgtttgctcaaatggattctgtaaaaattaggatgattgagcctttagctaggcaatcctcatttcagtgttccatgactcaatcatattagttcagagatttttctggtatttttataat

SEQ ID NO: 52784 - DNA, 600 bp, Chicken  19866894303616_3
taaaaacccaagaaccttttgaatatgttttagttagattgattaaacatctaagggcatatatgcacgcttttagatatagcagtagaattcagtgtaatatatcaagaggtggtgttgttattcttaaaggatcttgtacacaaaaatatattgaggtgatactgtttgctcaaatggattctgtaaaaattaggatgattgagcctttagctaggcaatcctcatttcagtgttccatgactcaatcatattagttcagagatttttctggtatttttataatagttttctttctgmaaattaacaaacaaacaataataacattattattagagagagtaaagatgtttttttctgagactttgaaaccatgcttgtttagaattttagatataaacatttttatgaatgtgtgcctgtatgtgtctgtgtgtattacttgtgtgtgcatctgaagaattttcttctgtatctatcagatgacagacacaacttctgattgctttccttctttctccttagttcttatccccctccactttcctgtcctaactcctaacttcctagaggagaggttgatgccccatgcctgtcagt

SEQ ID NO: 52785 - DNA, 600 bp, Chicken  19866894303625_1
ttaaaggaggcctgatatataaaataaaacaatcagtctaaagaaaacaaattttaaaggtggtaatcttgacaatattagctactgaaccagccttgatgggaagcatctactctccatcaactgctcaaggtctatagaggtggcaaggaggaaggtgaagaggtgaagagaatgggatggagagtatagtgacactttattcacctgccggagagctcctgccttcaaagctggtgtggtgcatcagctaagctctgaagaaaccaaaacttgtgctgagcgacttgggggggggamagggaggggataaaaccagatgtcagatggagggggagggagaaggtttattagaaatgcagaatagttttttgttgttgttgttgttgttgtttaataaaaaacagtgtgatgaagaaagctgagtgtaggcagggaagaatgcagaagagaaaagaaaaggaaagaactgggaggagagatctgaggggaggtggagagaccagggcagtgctctctcctctgtctctgcataccatttgaaatggctatatatagttaagaaatgctaacatatggcactcatatagcatatggcac

SEQ ID NO: 52786 - DNA, 564 bp, Chicken  19866894303625_2
gaaaagaaaaggaaagaactgggaggagagatctgaggggaggtggagagaccagggcagtgctctctcctctgtctctgcataccatttgaaatggctatatatagttaagaaatgctaacatatggcactcatatagcatatggcactcaaaatagttaagagatacacttgtcttaaagccaaatgctgccttgagctgcatgggtgtaagtgaggataggatttatttcatgtttctcagattgctctgactgttgaaatcacatgaagagtgggagctccccttctattttatcytagaccctctttcctctgtgtgcagaagtcaaatccctgaagcagagcggaatgtttgtaccaaaaacaacccacagccccactaatctctgtctggctttgagttcgtaaggacttttgctcaaggaccacagaagtcaatggagacatggtcatctccacagctgtttaacaggatcaaaatatccatagttttgggacagtgtatagttttgttgttgttgtttgtttgttttccatttttgtttgtttgtttgtttggta

SEQ ID NO: 52787 - DNA, 600 bp, Chicken  19866894303629_1
acagcataatatcatcattcctatgcttttatagcatgtcttcttaggatttatgtcccccaaagtcctccatctcttttacagcctttcttaatatggcgtctttcctccatggaagatttgatatccatgagccttaaatcaaacacacaaaatggactcatgttctgttgttttcttcacataaagttagttcaaaaaagtattttggaaaatgaaaataccagactgctgtttactgtttactcctataaatttatctgtcagagatatggtacttgcaagccactgtctgaggaytcaccttctctgagatatcagtcctgctgtggtttgacctgacaagtcacagattgcaaagcagcagctccaccacttgaaataggaaagaatctttctcgagaggcaaaatgataaaaatgagatcatttttcaagtttcctgacactagagggcaagccattttaaataacactgtatttgatgaagaatcttaaaatatatttccttaatagcgaataaactctgtcaacactcagtcattcatatatcttcatgtattcttctggctattaacatagaacagttctgctcaagcta

SEQ ID NO: 52788 - DNA, 600 bp, Chicken  19866894303630_1
gcatgaaaagtacatgtttttttgcagtctccagtaaaaatttaattgtataaaaacatatgtaaatgtatgccatatagaaaccaacaagctatctttggtaagaacttctcttaattgatgtttccacttaactcctaaatcatgcaggaacatacgctgctaaaatattttttcactactatgcttaccaggatttccaacatttattgtcatcctataaattctctaaaatgactcaaagggcaaaattaattagactaaaatcctgaacccctattcaaacaaaacaaaagagaygtgcaaaattttgtattcctaatattcatcatcctgtattgtcatctcaccttactcttatcccatcctgctcaaccatcctcaagacaaaagactcaaaagtcaaatcaaaggaagacttgtttagtgacatcactgagacctccgttttrctgtatatttcccctctcagtttctttttctttctttgttattacaatttattttgttttattttattttattcaggggctgggaatgtggttgccatagttccttgtattcacaagttatgaaaaagatgtcatgaaaatgagaagg

SEQ ID NO: 52789 - DNA, 600 bp, Chicken  19866894303630_2
acatacgctgctaaaatattttttcactactatgcttaccaggatttccaacatttattgtcatcctataaattctctaaaatgactcaaagggcaaaattaattagactaaaatcctgaacccctattcaaacaaaacaaaagagaygtgcaaaattttgtattcctaatattcatcatcctgtattgtcatctcaccttactcttatcccatcctgctcaaccatcctcaagacaaaagactcaaaagtcaaatcaaaggaagacttgtttagtgacatcactgagacctccgttttrctgtatatttcccctctcagtttctttttctttctttgttattacaatttattttgttttattttattttattcaggggctgggaatgtggttgccatagttccttgtattcacaagttatgaaaaagatgtcatgaaaatgagaaggtgcatgaatgaggtttgatgtttttggacattaaagttccccatttttctgttgaagtcatcaagaggtaaattgtcaccttactaactctatgaaatccctttctatcttctgttaggaaaaaaaaaaaaagagagagagagagagagaga

SEQ ID NO: 52790 - DNA, 600 bp, Chicken  19866894303632_1
ccctggcaaaccctgctgaaagcatgcaggtggagggaaaacgccgtaaccactaaaatcagctactgtgattctgaccacacgctagaaaccagaggatgcaacacttgcactcggtcacctctcacagaactaatggctcgcttccagcccactcatctgtactgctgctgcttctcaatttgcttgcttttctacagacatttccacaaaagcacaccaaaattagaatgagatgtcagtgacctttcttcctattgcttctgctctcgctacctaccagctgatctttcatttccygtctccctgcatgygtctttctagcatcgggccctaagagctgtggcttctgcagcaatgctgagtgcacagccaatattttggtctcctcactgtcttgaggagtggagtgtcatacttcagttcagcaggaggtggtggagaaatagtttccatgcaaatgataatgcatttcttaactgaaaagagcacaggcggtgctcttttactaaattaatttccttaaattttgaattcaaatcacttgacatgtgaaaagttatcacacaaggcagccaacttcatgttgcatggataaaa

SEQ ID NO: 52791 - DNA, 600 bp, Chicken  19866894303632_2
gctgaaagcatgcaggtggagggaaaacgccgtaaccactaaaatcagctactgtgattctgaccacacgctagaaaccagaggatgcaacacttgcactcggtcacctctcacagaactaatggctcgcttccagcccactcatctgtactgctgctgcttctcaatttgcttgcttttctacagacatttccacaaaagcacaccaaaattagaatgagatgtcagtgacctttcttcctattgcttctgctctcgctacctaccagctgatctttcatttccygtctccctgcatgygtctttctagcatcgggccctaagagctgtggcttctgcagcaatgctgagtgcacagccaatattttggtctcctcactgtcttgaggagtggagtgtcatacttcagttcagcaggaggtggtggagaaatagtttccatgcaaatgataatgcatttcttaactgaaaagagcacaggcggtgctcttttactaaattaatttccttaaattttgaattcaaatcacttgacatgtgaaaagttatcacacaaggcagccaacttcatgttgcatggataaaatattttcttcttct

SEQ ID NO: 52792 - DNA, 600 bp, Chicken  19866894303635_1
tgttactgaccggcttttaaccacaaatgggtacacaggggaaagtaatgtgatgggaaaacagagcacttctaccactcaaatttcttgagaaagcactaaagcagtaaaatgtccacacaaaataaatttcagaaagtgggagaattagaaactgaccccaatggcttggcacacgctcatgtactttccctcaaccaaatcggagcctcagtgagctctgcagtaagatcaaggccaaacctggacaggagattttgtgcagagctattgcaaaagaataatgttggctcaaatttkttcttactgtttcaccttagacatagatctgctattttatatcacagaactacactgactgttcctcttcaaatctttttccccagtctcttgtaacttcctcccaagcttcctatcatcgtttttaccccatggctgaacttctaggagaattttgaataaaatctatctgttgtttggttggtaggtacctcatctgaaaactatgagaatgctgtgcactcatcattggcaaatcaggcagcacacaatgctcataatttctgcagcccattattattattttttttttttttttgg

SEQ ID NO: 52793 - DNA, 600 bp, Chicken  19866894303635_2
atgttggctcaaatttkttcttactgtttcaccttagacatagatctgctattttatatcacagaactacactgactgttcctcttcaaatctttttccccagtctcttgtaacttcctcccaagcttcctatcatcgtttttaccccatggctgaacttctaggagaattttgaataaaatctatctgttgtttggttggtaggtacctcatctgaaaactatgagaatgctgtgcactcatcattggcaaatcaggcagcacacaatgctcataatttctgcagcccattattattaktttttttttttttttggatctttgagataaccccagagacagttgtaaccagaagaaacttggattgagcaacctttccagctcagaaactcaaaacatctttgcctcctgcagaactttctaacgcatcatcaagctcataaaactttattctggttaaacatccagcagtaaacttcttgaaacaattagtctccctgagctgctactcaagaagcagtttacaggaatcaagtggaagaaactattttgtgtcatccagaggatccaataactaataaatgttccatttcttctgct

SEQ ID NO: 52794 - DNA, 600 bp, Chicken  19866894303635_3
tgttggctcaaatttkttcttactgtttcaccttagacatagatctgctattttatatcacagaactacactgactgttcctcttcaaatctttttccccagtctcttgtaacttcctcccaagcttcctatcatcgtttttaccccatggctgaacttctaggagaattttgaataaaatctatctgttgtttggttggtaggtacctcatctgaaaactatgagaatgctgtgcactcatcattggcaaatcaggcagcacacaatgctcataatttctgcagcccattattattatkttttttttttttttggatctttgagataaccccagagacagttgtaaccagaagaaacttggattgagcaacctttccagctcagaaactcaaaacatctttgcctcctgcagaactttctaacgcatcatcaagctcataaaactttattctggttaaacatccagcagtaaacttcttgaaacaattagtctccctgagctgctactcaagaagcagtttacaggaatcaagtggaagaaactattttgtgtcatccagaggatccaataactaataaatgttccatttcttctgctg

SEQ ID NO: 52795 - DNA, 599 bp, Chicken  19866894303640_1
  misc_feature (1)..(216): n is any nucleotide
nnnnnnnnnnnnnnnnnnnnnnnnnnnnnnnnnnnnnnnnnnnnnnnnnnnnnnnnnnnnnnnnnnnnnnnnnnnnnnnnnnnnnnnnnnnnnnnnnnnnnnnnnnnnnnnnnnnnnnnnnnnnnnnnnnnnnnnnnnnnnnnnnnnnnnnnnnnnnnnnnnnnnnnnnnnnnnnnnnnnnnnnnnnnnnnnnnnnnnnnnnnnnnnnnnnnnnnnacaccaccaccacctacaatccctcctgcaaaagaaggtaagtgctgcatgtgtggatttataataatttcaagatgtttcatrattttctgcttctgacactcttttagacctgtggagatcagatgtcaaaatgcatttgctacgactacactgttaaggcagctggcttaaatttaatgagccaaaaatttgacatcattattgtattgttgaaatttgcagaaaggagagttagcatctgtgagaytttctttttccagaactcttaaaccatacatattttgcaactgaagcagatatcctagggataattaaacttctaaaacagcacgatgtaaaaaaaatatgtctacttcagttaatgacaaaattgttggcag

SEQ ID NO: 52796 - DNA, 599 bp, Chicken  19866894303640_2
  misc_feature (1)..(50): n is any nucleotide
nnnnnnnnnnnnnnnnnnnnnnnnnnnnnnnnnnnnnnnnnnnnnnnnnnacaccaccaccacctacaatccctcctgcaaaagaaggtaagtgctgcatgtgtggatttataataatttcaagatgtttcatrattttctgcttctgacactcttttagacctgtggagatcagatgtcaaaatgcatttgctacgactacactgttaaggcagctggcttaaatttaatgagccaaaaatttgacatcattattgtattgttgaaatttgcagaaaggagagttagcatctgtgagaytttctttttccagaactcttaaaccatacatattttgcaactgaagcagatatcctagggataattaaacttctaaaacagcacgatgtaaaaaaaatatgtctacttcagttaatgacaaaattgttggcagtgttcaggttctttaaatgcaggcttccttttgtttatcagttgagcatgtagtgtcttgtacagagtcacatgaatacttctgtgagggggatcattactgttcactcattactgaggaccaaatctatttacagcaattgagaatttaatacctaggtacagga

SEQ ID NO: 52797 - DNA, 600 bp, Chicken  19866894303642_1
ctacaatagaatttattcatgctttcagagtactttcatggaatccttgagggctaatgccatctccttaactcttgtatacaattcaggtctccaaattgcatacttcaagtaacttaaatgcacattgagccatttattcttttttctaacgtacacaaccacgaaagcagttccaaagcattaggaactcaaagaaagctaaatgcataaatacctacagtcatgggcaattgcatcacttgagcattcagcatcacattgttagtgcccactgccagcagcaggacaggggaagayttctcccatagtttccccaaaaaraactccaactggcrgcatccaacaaggcctttctgttggctgcgatgaggaggaaagaagagaagagatccacctgtgcttgaacagaaggaaagctaacagcctactgaaccaacagatgagatgtgtatgggaagatgaacatctctgcttggcaaaaaaattgggatcatgcagcacgatttacacagggcacattcacccatttaagatatgtttgaggcagtgtgtctttacattattctaaagagatattaagctgtttttgttttgaga

SEQ ID NO: 52798 - DNA, 600 bp, Chicken  19866894303642_2
ttcatgctttcagagtactttcatggaatccttgagggctaatgccatctccttaactcttgtatacaattcaggtctccaaattgcatacttcaagtaacttaaatgcacattgagccatttattcttttttctaacgtacacaaccacgaaagcagttccaaagcattaggaactcaaagaaagctaaatgcataaatacctacagtcatgggcaattgcatcacttgagcattcagcatcacattgttagtgcccactgccagcagcaggacaggggaagayttctcccatagtttycccaaaaaraactccaactggcrgcatccaacaaggcctttctgttggctgcgatgaggaggaaagaagagaagagatccacctgtgcttgaacagaaggaaagctaacagcctactgaaccaacagatgagatgtgtatgggaagatgaacatctctgcttggcaaaaaaattgggatcatgcagcacgatttacacagggcacattcacccatttaagatatgtttgaggcagtgtgtctttacattattctaaagagatattaagctgtttttgttttgagacatatctatccccac

SEQ ID NO: 52799 - DNA, 600 bp, Chicken  19866894303642_3
tcagagtactttcatggaatccttgagggctaatgccatctccttaactcttgtatacaattcaggtctccaaattgcatacttcaagtaacttaaatgcacattgagccatttattcttttttctaacgtacacaaccacgaaagcagttccaaagcattaggaactcaaagaaagctaaatgcataaatacctacagtcatgggcaattgcatcacttgagcattcagcatcacattgttagtgcccactgccagcagcaggacaggggaagayttctcccatagtttccccaaaaaraactccaactggcrgcatccaacaaggcctttctgttggctgcgatgaggaggaaagaagagaagagatccacctgtgcttgaacagaaggaaagctaacagcctactgaaccaacagatgagatgtgtatgggaagatgaacatctctgcttggcaaaaaaattgggatcatgcagcacgatttacacagggcacattcacccatttaagatatgtttgaggcagtgtgtctttacattattctaaagagatattaagctgtttttgttttgagacatatctatccccacccttccaga

SEQ ID NO: 52800 - DNA, 600 bp, Chicken  19866894303642_4
tggaatccttgagggctaatgccatctccttaactcttgtatacaattcaggtctccaaattgcatacttcaagtaacttaaatgcacattgagccatttattcttttttctaacgtacacaaccacgaaagcagttccaaagcattaggaactcaaagaaagctaaatgcataaatacctacagtcatgggcaattgcatcacttgagcattcagcatcacattgttagtgcccactgccagcagcaggacaggggaagayttctcccatagtttccccaaaaaraactccaactggcrgcatccaacaaggcctttctgttggctgcgatgaggaggaaagaagagaagagatccacctgtgcttgaacagaaggaaagctaacagcctactgaaccaacagatgagatgtgtatgggaagatgaacatctctgcttggcaaaaaaattgggatcatgcagcacgatttacacagggcacattcacccatttaagatatgtttgaggcagtgtgtctttacattattctaaagagatattaagctgtttttgttttgagacatatctatccccacccttccagatagatatatttatt

SEQ ID NO: 52801 - DNA, 600 bp, Chicken  19866894303647_1
gccagaattacatttaacaaccagtagaatacttgattatattcaccacaggaaagctaatataattgatcaattatattttataccagttcttggtcagcaggatttcataattcttcatatggaattgtcatgctcctagtgaaatctgccatgaaaatcagattttgccacaatacaaagaagagttgattccctcccctgccagaagcaggaaggccacagaatcagtcatggcagtgtgtctcttggatgtctgatgttggttctatctgggcagatttcatatgtgatgttaasagaacttttttgtctttttatcttttatcctgtttcgttcctcaaatgagtagcagaactgtcatctgaaacttttaaactggtggaatgtctgcctgtgctgcccagaaggagacatcacgttccccatgttacctcaggtacacaaaatgagcagcataccaacagatgaagtctgtagactcttaatgtttatctctgccagtgttggttcttctgccttaaaaaatgatgttgctcatcacaggatagcttaaacctcatgagaacaataactcagtaacacaatgtatacagcaa

SEQ ID NO: 52802 - DNA, 599 bp, Chicken  19866894303649_1
  misc_feature (1)..(161): n is any nucleotide
nnnnnnnnnnnnnnnnnnnnnnnnnnnnnnnnnnnnnnnnnnnnnnnnnnnnnnnnnnnnnnnnnnnnnnnnnnnnnnnnnnnnnnnnnnnnnnnnnnnnnnnnnnnnnnnnnnnnnnnnnnnnnnnnnnnnnnnnnnnnnnnnnnnnnnnnnnnnnnnnnctaaactattgcaagaccatatttcagaagactcatcctgctagtaatgataccattaaatacagcaagcatacataagaatatgcaaaccaatttactatacaaagtacaatctcctacagttatttgaaaaagaaarcataatagcatcatagagtatctcaagttggaagggacccgcaaggactgtcgagtcctggctccacgcaggaccaccccaaatcaaacygtatttctgcgagcactgttcaaatgctccttgaactccagcagcctggggccatgaccactgccctggggagcctctgtcagtgcccaaccaccctcttcagtaaaggaccttttactcatgtccaatttcaagctaagctttttaccgactcatcttaagatttccaatattataattctcgacttaagaatgccatttacttaccc

SEQ ID NO: 52803 - DNA, 599 bp, Chicken  19866894303649_2
  misc_feature (1)..(71): n is any nucleotide
nnnnnnnnnnnnnnnnnnnnnnnnnnnnnnnnnnnnnnnnnnnnnnnnnnnnnnnnnnnnnnnnnnnnnnnctaaactattgcaagaccatatttcagaagactcatcctgctagtaatgataccattaaatacagcaagcatacataagaatatgcaaaccaatttactatacaaagtacaatctcctacagttatttgaaaaagaaarcataatagcatcatagagtatctcaagttggaagggacccgcaaggactgtcgagtcctggctccacgcaggaccaccccaaatcaaacygtatttctgcgagcactgttcaaatgctccttgaactccagcagcctggggccatgaccactgccctggggagcctctgtcagtgcccaaccaccctcttcagtaaaggaccttttactcatgtccaatttcaagctaagctttttaccgactcatcttaagatttccaatattataattctcgacttaagaatgccatttacttacccttaaatgatataaagaaagccatcagaagggctttgtacatctagaagaatacgagtcttttcctgaagtgattcttatcaggcagaata

SEQ ID NO: 52804 - DNA, 599 bp, Chicken  19866894303649_3
  misc_feature (1)..(70): n is any nucleotide
nnnnnnnnnnnnnnnnnnnnnnnnnnnnnnnnnnnnnnnnnnnnnnnnnnnnnnnnnnnnnnnnnnnnnnctaaactattgcaagaccatatttcagaagactcatcctgctagtaatgataccattaaatacagcaagcatacataagaatatgcaaaccaatttactatacaaagtacaatctcctacagttatttgaaaaagaaarcataatagcatcatagagtatctcaagttggaagggacccgcaaggactgtcgagtcctggctccacgcaggaccaccccaaatcaaacyytatttctgcgagcactgttcaaatgctccttgaactccagcagcctggggccatgaccactgccctggggagcctctgtcagtgcccaaccaccctcttcagtaaaggaccttttactcatgtccaatttcaagctaagctttttaccgactcatcttaagatttccaatattataattctcgacttaagaatgccatttacttacccttaaatgatataaagaaagccatcagaagggctttgtacatctagaagaatacgagtcttttcctgaagtgattcttatcaggcagaatag

SEQ ID NO: 52805 - DNA, 599 bp, Chicken  19866894303649_4
  misc_feature (1)..(69): n is any nucleotide
nnnnnnnnnnnnnnnnnnnnnnnnnnnnnnnnnnnnnnnnnnnnnnnnnnnnnnnnnnnnnnnnnnnnnctaaactattgcaagaccatatttcagaagactcatcctgctagtaatgataccattaaatacagcaagcatacataagaatatgcaaaccaatttactatacaaagtacaatctcctacagttatttgaaaaagaaarcataatagcatcatagagtatctcaagttggaagggacccgcaaggactgtcgagtcctggctccacgcaggaccaccccaaatcaaacygyatttctgcgagcactgttcaaatgctccttgaactccagcagcctggggccatgaccactgccctggggagcctctgtcagtgcccaaccaccctcttcagtaaaggaccttttactcatgtccaatttcaagctaagctttttaccgactcatcttaagatttccaatattataattctcgacttaagaatgccatttacttacccttaaatgatataaagaaagccatcagaagggctttgtacatctagaagaatacgagtcttttcctgaagtgattcttatcaggcagaataga

SEQ ID NO: 52806 - DNA, 599 bp, Chicken  19866894303651_1
  misc_feature (1)..(114): n is any nucleotide
nnnnnnnnnnnnnnnnnnnnnnnnnnnnnnnnnnnnnnnnnnnnnnnnnnnnnnnnnnnnnnnnnnnnnnnnnnnnnnnnnnnnnnnnnnnnnnnnnnnnnnnnnnnnnnnnnnacaccattctcatgtgtatccctgcccagattgaacacagtgggaaaacgttccaatccctagctctcatgggctgcccagagataacgtccccatatcccagggcttgctggtaaccacatatcggtgtgacagagctgttctcaaggggctgagagaagatgactacatctgttattcttactkcatccaggccacactgcagagcccggtgtggagagctggctcttggaaaccatctctgttcacgattaaaagatattttctttagaaaagacttgaatggccagcgtggattaatttttccttctctgtaatcgaggttagttaacatttgcatgtggtaatctttttcaaaagttcctggacataaatcactcgtcagagtctggtggcttggaagcagggaacagccatccaaaacaccactgtgtgggccaagggttgtgtgagctcctctctccccagctgtaaatatcagcaga

SEQ ID NO: 52807 - DNA, 600 bp, Chicken  19866894303651_2
ctgcagagcccggtgtggagagctggctcttggaaaccatctctgttcacgattaaaagatattttctttagaaaagacttgaatggccagcgtggattaatttttccttctctgtaatcgaggttagttaacatttgcatgtggtaatctttttcaaaagttcctggacataaatcactcgtcagagtctggtggcttggaagcagggaacagccatccaaaacaccactgtgtgggccaagggttgtgtgagctcctctctccccagctgtaaatatcagcagaaaaacgagtccagycgtggtgaatgrctggattcagtgcagagaaatggcatttctggaggggtggtgttggaactagagaactggtgcaagaggatttgggttcactctgtgaaagtcatcgggaatgtayttrtgtgtgttttacagactgcctcccatccaaaagcaaaatgaacataaagcaggcactgggcagcaccactccagcctggtcacctggtacgaagctcatgcatgaccataaaacaataaacatcatgtggactcactgggcagaatgttaaaccgcagcaacaaatgcatgcacatacg

SEQ ID NO: 52808 - DNA, 600 bp, Chicken  19866894303651_3
gtgtggagagctggctcttggaaaccatctctgttcacgattaaaagatattttctttagaaaagacttgaatggccagcgtggattaatttttccttctctgtaatcgaggttagttaacatttgcatgtggtaatctttttcaaaagttcctggacataaatcactcgtcagagtctggtggcttggaagcagggaacagccatccaaaacaccactgtgtgggccaagggttgtgtgagctcctctctccccagctgtaaatatcagcagaaaaacgagtccagycgtggtgaatgrctggattcagtgcagagaaatggcatttctggaggggtggtgttggaactagagaactggtgcaagaggatttgggttcactctgtgaaagtcatcgggaatgtayttrtgtgtgttttacagactgcctcccatccaaaagcaaaatgaacataaagcaggcactgggcagcaccactccagcctggtcacctggtacgaagctcatgcatgaccataaaacaataaacatcatgtggactcactgggcagaatgttaaaccgcagcaacaaatgcatgcacatacgtggactaagatt

SEQ ID NO: 52809 - DNA, 600 bp, Chicken  19866894303651_4
tcgaggttagttaacatttgcatgtggtaatctttttcaaaagttcctggacataaatcactcgtcagagtctggtggcttggaagcagggaacagccatccaaaacaccactgtgtgggccaagggttgtgtgagctcctctctccccagctgtaaatatcagcagaaaaacgagtccagycgtggtgaatgrctggattcagtgcagagaaatggcatttctggaggggtggtgttggaactagagaactggtgcaagaggatttgggttcactctgtgaaagtcatcgggaatgtayttrtgtgtgttttacagactgcctcccatccaaaagcaaaatgaacataaagcaggcactgggcagcaccactccagcctggtcacctggtacgaagctcatgcatgaccataaaacaataaacatcatgtggactcactgggcagaatgttaaaccgcagcaacaaatgcatgcacatacgtggactaagatttatgtgctctgggacatacaggaaagaattccaagctaattaaaggcatggctttgaagcaaattcacagaatgtcatcattaaagcctttcctgagtaaatgggt

SEQ ID NO: 52810 - DNA, 600 bp, Chicken  19866894303651_5
aggttagttaacatttgcatgtggtaatctttttcaaaagttcctggacataaatcactcgtcagagtctggtggcttggaagcagggaacagccatccaaaacaccactgtgtgggccaagggttgtgtgagctcctctctccccagctgtaaatatcagcagaaaaacgagtccagycgtggtgaatgrctggattcagtgcagagaaatggcatttctggaggggtggtgttggaactagagaactggtgcaagaggatttgggttcactctgtgaaagtcatcgggaatgtayttrtgtgtgttttacagactgcctcccatccaaaagcaaaatgaacataaagcaggcactgggcagcaccactccagcctggtcacctggtacgaagctcatgcatgaccataaaacaataaacatcatgtggactcactgggcagaatgttaaaccgcagcaacaaatgcatgcacatacgtggactaagatttatgtgctctgggacatacaggaaagaattccaagctaattaaaggcatggctttgaagcaaattcacagaatgtcatcattaaagcctttcctgagtaaatgggttag

SEQ ID NO: 52811 - DNA, 600 bp, Chicken  19866894303652_1
tttttaagttctgtttgttttgttcttttcaccctgaaactttgtttagtattagcagttgcatttcttctgtcagtgggtcacgagaagtctatcatgagaagctatatgaccgtgtacgtgtgtgggttacataaggcagaataaaaacgtactgcttcctaaaggcttatggcaaagcagcagaactctaaaagcatatcagttcttcacagcagagcagatcacttgatgccgcccctctctagcgattaacagctgaaactgaacattttctccaaagtctgcagcaattccctrgtgcagatcatgctggcactcgcagcacagctgctgatggatgcggtgaccattaaacactgcagtaggtgttacaccaagcagccagcaataccataaggcagagttactgaagcctttttacarcagttcttcctcagaagtttttgtaaaagttaggagagtgcttycagctatgttcaccctttctgcaccctcttaaaattgaaaggcagtatcgtaggtggcagtaaaagctgaatctgtgtgacctctgcatctctcactcagggtgctgtcactaccactgcgtcccactgt

SEQ ID NO: 52812 - DNA, 600 bp, Chicken  19866894303652_2
gggttacataaggcagaataaaaacgtactgcttcctaaaggcttatggcaaagcagcagaactctaaaagcatatcagttcttcacagcagagcagatcacttgatgccgcccctctctagcgattaacagctgaaactgaacattttctccaaagtctgcagcaattccctrgtgcagatcatgctggcactcgcagcacagctgctgatggatgcggtgaccattaaacactgcagtaggtgttacaccaagcagccagcaataccataaggcagagttactgaagcctttttacarcagttcttcctcagaagtttttgtaaaagttaggagagtgcttycagctatgttcaccctttctgcaccctcttaaaattgaaaggcagtatcgtaggtggcagtaaaagctgaatctgtgtgacctctgcatctctcactcagggtgctgtcactaccactgcgtcccactgtacgttgtcctcttcatggaggtgaattttgtatgaatgatgaaatcatgctgatgatttaaggtgctaattagaaactgagccccagaagcattcctcctcccaacagctatcaaggtgcacaaaa

SEQ ID NO: 52813 - DNA, 600 bp, Chicken  19866894303652_3
tatggcaaagcagcagaactctaaaagcatatcagttcttcacagcagagcagatcacttgatgccgcccctctctagcgattaacagctgaaactgaacattttctccaaagtctgcagcaattccctrgtgcagatcatgctggcactcgcagcacagctgctgatggatgcggtgaccattaaacactgcagtaggtgttacaccaagcagccagcaataccataaggcagagttactgaagcctttttacarcagttcttcctcagaagtttttgtaaaagttaggagagtgcttycagctatgttcaccctttctgcaccctcttaaaattgaaaggcagtatcgtaggtggcagtaaaagctgaatctgtgtgacctctgcatctctcactcagggtgctgtcactaccactgcgtcccactgtacgttgtcctcttcatggaggtgaattttgtatgaatgatgaaatcatgctgatgatttaaggtgctaattagaaactgagccccagaagcattcctcctcccaacagctatcaaggtgcacaaaatagtcttgaatcaaagtcagtgagacaggtactgcaccccatca

SEQ ID NO: 52814 - DNA, 600 bp, Chicken  19866894303658_1
agaaatttatcaacacgttgcagttggcacagcaaaggaaccaagaaaattaacaacgttttgcttttttcttgcagctcagtaccaagaactgcactcaccggcgttcagttctgttatttgatgcttgtttttataaacaggctgaattagaaaagaagtacaactgaacacatcttagttatctgttcagggcacgtcacattcttctcctgaatatttccctcaagctccattaatgaattcgttgggcaaaatcacacacttagagaccacaaaaaaattatcttctgtttcatyttggtggatattgtcttaaatggtgcgtgtgcaagaaaacgtgtaagtagtgttcttatgggatcgactattcataactcaatttaggatggagttactgtctgacaggttaaactgagagctgtcctcttgtctccattaatcttcatctgaatgttcactaaaaaacagcacggggatggctgcattgccgacgcattgctggcaatccttcctttgcattgatccgcgcttcaggctgctcatgtgagctatgggttaactctgtctggaattctgcataattttttaatcttgttt

SEQ ID NO: 52815 - DNA, 600 bp, Chicken  19866894303659_1
gcagtagccccaaaggaattctgttatttaacatttcgggtgcaaattgatctgcctctgcttttctgaaagcatgagatggtctgaattgaaaacaacacttggtgtttggactgcaatgggtcgtttccagtcagcagtttttgctacatccatcagcactggatcttgcacaatctcttctctgtctacagagggagcttagtcacattatttatgagaaaagtacagctgggcaatagcattcatgcaggtaggaatcaacatggatcttgtattttatactaccattttcaagtrgcttatcttacccataacagactaaatattartttttttgtactactcaaaagtccaatagcaatttaatgcacttcctattgaaamtgaacagaaragctttattatagtgttttataatcttatttacctttaagttctgacagcattcaatttagcagcatgcctttttgtatacacgctactacaattttctgcaattctaagtggaaaggaaatgtatttgaattttgctgaaggacattcacactgtaacagttcaaagatcaacatactgtcaatatactgccacttttttgg

SEQ ID NO: 52816 - DNA, 600 bp, Chicken  19866894303659_2
atttcgggtgcaaattgatctgcctctgcttttctgaaagcatgagatggtctgaattgaaaacaacacttggtgtttggactgcaatgggtcgtttccagtcagcagtttttgctacatccatcagcactggatcttgcacaatctcttctctgtctacagagggagcttagtcacattatttatgagaaaagtacagctgggcaatagcattcatgcaggtaggaatcaacatggatcttgtattttatactaccattttcaagtrgcttatcttacccataacagactaaatattartttttttgtactactcaaaagtccaatagcaatttaatgcacttcctattgaaamtgaacagaaragctttattatagtgttttataatcttatttacctttaagttctgacagcattcaatttagcagcatgcctttttgtatacacgctactacaattttctgcaattctaagtggaaaggaaatgtatttgaattttgctgaaggacattcacactgtaacagttcaaagatcaacatactgtcaatatactgccacttttttggaagaaaaactccataaattagcactcgtacag

SEQ ID NO: 52817 - DNA, 600 bp, Chicken  19866894303659_3
attgaaaacaacacttggtgtttggactgcaatgggtcgtttccagtcagcagtttttgctacatccatcagcactggatcttgcacaatctcttctctgtctacagagggagcttagtcacattatttatgagaaaagtacagctgggcaatagcattcatgcaggtaggaatcaacatggatcttgtattttatactaccattttcaagtrgcttatcttacccataacagactaaatattartttttttgtactactcaaaagtccaatagcaatttaatgcacttcctattgaaamtgaacagaaragctttattatagtgttttataatcttatttacctttaagttctgacagcattcaatttagcagcatgcctttttgtatacacgctactacaattttctgcaattctaagtggaaaggaaatgtatttgaattttgctgaaggacattcacactgtaacagttcaaagatcaacatactgtcaatatactgccacttttttggaagaaaaactccataaattagcactcgtacagcacaaatatcaaaacatcaattatgctcttattaataggtttttggtggtttgtg

SEQ ID NO: 52818 - DNA, 600 bp, Chicken  19866894303659_4
acacttggtgtttggactgcaatgggtcgtttccagtcagcagtttttgctacatccatcagcactggatcttgcacaatctcttctctgtctacagagggagcttagtcacattatttatgagaaaagtacagctgggcaatagcattcatgcaggtaggaatcaacatggatcttgtattttatactaccattttcaagtrgcttatcttacccataacagactaaatattartttttttgtactactcaaaagtccaatagcaatttaatgcacttcctattgaaamtgaacagaaragctttattatagtgttttataatcttatttacctttaagttctgacagcattcaatttagcagcatgcctttttgtatacacgctactacaattttctgcaattctaagtggaaaggaaatgtatttgaattttgctgaaggacattcacactgtaacagttcaaagatcaacatactgtcaatatactgccacttttttggaagaaaaactccataaattagcactcgtacagcacaaatatcaaaacatcaattatgctcttattaataggtttttggtggtttgtgggttttgtgc

SEQ ID NO: 52819 - DNA, 600 bp, Chicken  19866894303670_1
ggtaggtaaggcagggccttgtcgtgggaggggtaaaataaatgtgaatttcctgggagctctgtctggcctctatctctctctatttatttatttggttggttgttgttggacagtgtgtcttgtagctgccaaggattgagctctgactatttgtttagatagctaccattgttattcaattcctcttgctgacttcatctatttcttttcacccccaggctatgcaatgttggattgctctgctgagatagttagcaactagtatcagtagcttttggttggttgattttttttttwattattwtttggtaatttatttttaaaaaaagaagcaggctgtaattctttgcagcttttgaagctgtggcaaacactaaaggtatttcagtggaagaatggtctagtccaaaagctcacgtgctgctcgttacaggtggatcagttcctccgccatcacaacgcatactgcagtattgcagaattgatgacacttttttttttcctcagtgcttcaggcaagagactcctatataaagcttgtatttccccttgtttcaaccttgcagtctttctgtaagaacttggttgagtttcaag

SEQ ID NO: 52820 - DNA, 600 bp, Chicken  19866894303670_2
aaggcagggccttgtcgtgggaggggtaaaataaatgtgaatttcctgggagctctgtctggcctctatctctctctatttatttatttggttggttgttgttggacagtgtgtcttgtagctgccaaggattgagctctgactatttgtttagatagctaccattgttattcaattcctcttgctgacttcatctatttcttttcacccccaggctatgcaatgttggattgctctgctgagatagttagcaactagtatcagtagcttttggttggttgattttttttttwattattwtttggtaatttatttttaaaaaaagaagcaggctgtaattctttgcagcttttgaagctgtggcaaacactaaaggtatttcagtggaagaatggtctagtccaaaagctcacgtgctgctcgttacaggtggatcagttcctccgccatcacaacgcatactgcagtattgcagaattgatgacacttttttttttcctcagtgcttcaggcaagagactcctatataaagcttgtatttccccttgtttcaaccttgcagtctttctgtaagaacttggttgagtttcaagaaaacta

SEQ ID NO: 52821 - DNA, 600 bp, Chicken  19866894303673_1
ataggcttcaggttcagagcagtgtggtggtgagagcacagctgtatgcccagaggggcacatacagcctctctaaatgctgaaaacagagcaggaagcttttaaaacagaaaaaaaaaaaaaaagcaaacgaaacctggcattatgtaatgtctccctgctagtctcctcaaagcaaaggcaacgcatgcagggcatgattcacttctcccatcatcaacgtaaaatatatcaacagcaatttgaaggaagtcactgtgaggaaaatcaagctcacaaagtatgaggctgagcagtaayttcatagagtagggccagaggctttcatgtccataaaagctaactctacaggaaagggtcaacaagtattcaggacgtaaggcatcatgcagcaccttctgagtaattccatcgcctgaaaccaaataaatacggtgcctctacrgcaaagagaaaggagccggacccagcagcagtcattaacataaatgaaccacagtataaccaaacaagttttcacccagttcaacactcgcatccaaaaaaaaacacacatctacaatggcttgattcctcttgacaacaacaaaagagaatttc

SEQ ID NO: 52822 - DNA, 600 bp, Chicken  19866894303673_2
tgtaatgtctccctgctagtctcctcaaagcaaaggcaacgcatgcagggcatgattcacttctcccatcatcaacgtaaaatatatcaacagcaatttgaaggaagtcactgtgaggaaaatcaagctcacaaagtatgaggctgagcagtaayttcatagagtagggccagaggctttcatgtccataaaagctaactctacaggaaagggtcaacaagtattcaggacgtaaggcatcatgcagcaccttctgagtaattccatcgcctgaaaccaaataaatacggtgcctctacrgcaaagagaaaggagccggacccagcagcagtcattaacataaatgaaccacagtataaccaaacaagttttcacccagttcaacactcgcatccaaaaaaaaacacacatctacaatggcttgattcctcttgacaacaacaaaagagaatttcatctgaaagcatagatgttcaccacggccaatattttgctttgcaggctctgactggcttcagggtaaataacgagtgattacagctaatatcaggatacagcgtgaggcactaaaaagaggcaattatgaggaaatgagaaatt

SEQ ID NO: 52823 - DNA, 472 bp, Chicken  19866894303675_1
gcaggtcaaatgctaaaggattaaggctgtggttgctgaaagcaggatttctcatccacacctcagcaaggaattgttaatgtttttgcagccctttgttgccagtgcaaatagccttgacataacaaattggtaatggaagatgacatgatttaaactgggagatttctcatagaagcagcatggtgcataagcatgagttctctcaccagctacagcaacacaagagctgcaacatttcagtgctaagagcagaagaaatcatttatggaaacatctttctaaagtgtagctgatatwatgaggggaaacttgtgaggaactgtgtcctcttttcatgaaggaggagtttcatgaatgaaacaagttcagaacaacctctccttcagtgaggtcatgtgagagcccaggcagctggtacttaccaatccggtgggccacagggcacttagtcctaagatcccattcttgt

SEQ ID NO: 52824 - DNA, 600 bp, Chicken  19866894303676_1
attgttaaataattatttttatgtagtagtgacaattatttgtgttattatctgttgtctccacttgaaaagaaatcacagtgctgaatgcaaagtgtgacactgtagaacttacagaagaagttctactctacagaagttcttacttctctccttatgacttgcttccttaaaatacatgaaatacagttaacatcattgtgataaaaaaataactttctcacagaatcactggtgctgatgactactaagtgatggattttgaacgatgctgagtgcttcagccaaggtgcagtatgrctttggcttcatttagtttagatagaaaatttaccctaatgctaagttcaatcttgaataaagcactgctaggtactagattttgtgtaactcaggtttacaaagcttggtttaaatacagttgtgccagcagttttaaggctaaactgagaacatttaaaaaaggaaataactgactgtatttccaagagttttccttaattgtgctgtattttaataatctgcttacagcctgtctgtttttgtttatctggaacaaagcagcttgcatgagtaagataatttgattcagaaagtgca

SEQ ID NO: 52825 - DNA, 600 bp, Chicken  19866894303676_2
aaactgagaacatttaaaaaaggaaataactgactgtatttccaagagttttccttaattgtgctgtattttaataatctgcttacagcctgtctgtttttgtttatctggaacaaagcagcttgcatgagtaagataatttgattcagaaagtgcactccctgtagatgtctccaatatgcaaaatattttgttcactgatgtttttcacaaaggctacgttcctctcactacaccgaagccctaatactgttcctcgggggaaaaggttatttgatatatgaatagccacagattttsttcttttaaatgttttgttacagacctgagctcctctggccatttctgtttgcacaaatctttcccacaaagtattagtcacactctgatttctgtgaagtttatttgatgagctgcattcttctagctggcatagtggctcagaaacaaaatgaagctgatttgtaagcagtaatattacccaaagtctgcagctcagctgcttagccactctttcattataaactttgtctgcttttatttaaatcttaggaaagatcttctcattaaaacaccaaccattaaaataaaatgtcagtg

SEQ ID NO: 52826 - DNA, 599 bp, Chicken  19866894303679_1
  misc_feature (1)..(79): n is any nucleotide
nnnnnnnnnnnnnnnnnnnnnnnnnnnnnnnnnnnnnnnnnnnnnnnnnnnnnnnnnnnnnnnnnnnnnnnnnnnnnnntccctgatttaatttagcagatgatcttctatttatctgagaaccaattttctgcacaatggccgtcttcttaatctcctgttggccttagtgaaattcccaatcaaggattctctcatctcatcatgtttatataccacccttagcataacagcacataagtcaaaatgacagcagtcactacaagaagattttatgctccattctagttagctgttatkttctcaaactgcctgtaaatttcacagttcaactaataatgcagctaaacgtgaggaaaattgcaacaaactgaactataatagctttttattaccatttatgttgccagtgtctagaatcctggaaatattactgatcaaatcactattattgcaaatgattgcacataacagtgaattattccctcataatatgtgactgcaaaagaaactatctatataattcagtgggaacatttcggaagaaaagaaaaaaaaaaagaaaatcaaccaagatacacacattttgcattgaatta

SEQ ID NO: 52827 - DNA, 543 bp, Chicken  19866894303679_2
agcagtcactacaagaagattttatgctccattctagttagctgttatkttctcaaactgcctgtaaatttcacagttcaactaataatgcagctaaacgtgaggaaaattgcaacaaactgaactataatagctttttattaccatttatgttgccagtgtctagaatcctggaaatattactgatcaaatcactattattgcaaatgattgcacataacagtgaattattccctcataatatgtgactgcaaaagaaactatctatataattcagtgggaacatttcggaagaaaagkaaaaaaaaaagaaaatcaaccaagatacacacattttgcattgaattataaggaaccgtcagtgcaggtaggaaatatcccaagttagatttcaccatagttgctagcctcttgaaagaatttgaaatatgattttaaaaatccctgtaaccaatggactacatgtgtcaacttgccttgaaagattaacttaattatgttgaaagagggaagcagagacggtaggattggtaggatttaaaa

SEQ ID NO: 52828 - DNA, 599 bp, Chicken  19866894303680_1
  misc_feature (1)..(60): n is any nucleotide
nnnnnnnnnnnnnnnnnnnnnnnnnnnnnnnnnnnnnnnnnnnnnnnnnnnnnnnnnnnnttttcttctccctgaatgcctccttactcttagcctgggctagagagccgtgtgtggacaaaaacaagagaaaggacaggctgcaccttcagccttcacctgcggcattacagtcacagagaactcagtacatcattgcaagccttgtacaaaacccatgaatttctcaagtgcagcacactcaaatgctgctagcctaatctaatctcctattcagagaatgatccagccagacttcasgtgccagttgtgcagtcagtatcacatcacatgagaacagcccatctcaacactatatacacatgcatttactatataaccaaaactrtattgtttcttaggataaacaaagtattaaaaaaattgtttcctctctagcagcttgatcccagttctcccagtacctgcacaatctcttctgtatatcacatccaacatccacctgtcttctggccttgtgcgtaataggaacaggcaycacgctataccagttccttccgcttgtgtacttcaccctscrttactcttacctagcaaga

SEQ ID NO: 52829 - DNA, 600 bp, Chicken  19866894303680_2
cttagcctgggctagagagccgtgtgtggacaaaaacaagagaaaggacaggctgcaccttcagccttcacctgcggcattacagtcacagagaactcagtacatcattgcaagccttgtacaaaacccatgaatttctcaagtgcagcacactcaaatgctgctagcctaatctaatctcctattcagagaatgatccagccagacttcasgtgccagttgtgcagtcagtatcacatcacatgagaacagcccatctcaacactatatacacatgcatttactatataaccaaaactrtattgtttcttaggataaacaaagtattaaaaaaattgtttcctctctagcagcttgatcccagttctcccagtacctgcacaatctcttctgtatatcacatccaacatccacctgtcttctggccttgtgcgtaataggaacaggcaycacgctataccagttccttccgcttgtgtacttcaccctscrttactcttacctagcaagaactgctgctggctaattctgaaatacagcaaggcactttgatggatgttaaagactttgtgtgtgcgcargcaggatgcaaatccaccc

SEQ ID NO: 52830 - DNA, 584 bp, Chicken  19866894303680_3
cactcaaatgctgctagcctaatctaatctcctattcagagaatgatccagccagacttcasgtgccagttgtgcagtcagtatcacatcacatgagaacagcccatctcaacactatatacacatgcatttactatataaccaaaactrtattgtttcttaggataaacaaagtattaaaaaaattgtttcctctctagcagcttgatcccagttctcccagtacctgcacaatctcttctgtatatcacatccaacatccacctgtcttctggccttgtgcgtaataggaacaggcaycacgctataccagttccttccgcttgtgtacttcaccctscrttactcttacctagcaagaactgctgctggctaattctgaaatacagcaaggcactttgatggatgttaaagactttgtgtgtgcgcargcaggatgcaaatccaccccctcctcacaacagcttgcctttagggcaaacacagacctcagcaatctcctaaggaaagatgaccacagcacagcaagtcatctggcctgcaaagaacagcaacgtggagggaacagaccagcttcctcagag

SEQ ID NO: 52831 - DNA, 544 bp, Chicken  19866894303680_4
gaatgatccagccagacttcasgtgccagttgtgcagtcagtatcacatcacatgagaacagcccatctcaacactatatacacatgcatttactatataaccaaaactrtattgtttcttaggataaacaaagtattaaaaaaattgtttcctctctagcagcttgatcccagttctcccagtacctgcacaatctcttctgtatatcacatccaacatccacctgtcttctggccttgtgcgtaataggaacaggcaycacgctataccagttccttccgcttgtgtacttcaccctscrttactcttacctagcaagaactgctgctggctaattctgaaatacagcaaggcactttgatggatgttaaagactttgtgtgtgcgcargcaggatgcaaatccaccccctcctcacaacagcttgcctttagggcaaacacagacctcagcaatctcctaaggaaagatgaccacagcacagcaagtcatctggcctgcaaagaacagcaacgtggagggaacagaccagcttcctcagag

SEQ ID NO: 52832 - DNA, 542 bp, Chicken  19866894303680_5
atgatccagccagacttcasgtgccagttgtgcagtcagtatcacatcacatgagaacagcccatctcaacactatatacacatgcatttactatataaccaaaactrtattgtttcttaggataaacaaagtattaaaaaaattgtttcctctctagcagcttgatcccagttctcccagtacctgcacaatctcttctgtatatcacatccaacatccacctgtcttctggccttgtgcgtaataggaacaggcaycacgctataccagttccttccgcttgtgtacttcaccctscrttactcttacctagcaagaactgctgctggctaattctgaaatacagcaaggcactttgatggatgttaaagactttgtgtgtgcgcargcaggatgcaaatccaccccctcctcacaacagcttgcctttagggcaaacacagacctcagcaatctcctaaggaaagatgaccacagcacagcaagtcatctggcctgcaaagaacagcaacgtggagggaacagaccagcttcctcagag

SEQ ID NO: 52833 - DNA, 453 bp, Chicken  19866894303680_6
tactatataaccaaaactrtattgtttcttaggataaacaaagtattaaaaaaattgtttcctctctagcagcttgatcccagttctcccagtacctgcacaatctcttctgtatatcacatccaacatccacctgtcttctggccttgtgcgtaataggaacaggcaycacgctataccagttccttccgcttgtgtacttcaccctscrttactcttacctagcaagaactgctgctggctaattctgaaatacagcaaggcactttgatggatgttaaagactttgtgtgtgcgcargcaggatgcaaatccaccccctcctcacaacagcttgcctttagggcaaacacagacctcagcaatctcctaaggaaagatgaccacagcacagcaagtcatctggcctgcaaagaacagcaacgtggagggaacagaccagcttcctcagag

SEQ ID NO: 52834 - DNA, 600 bp, Chicken  19866894303681_1
ctttaaactcgctatgaaggtagcttaggattactaccatagctggagaaatttaccttttaggcatctggttctgtatttacagatgagatgggataaatctatactgtatatgactttagcctcgagagaatttgataacttcccatttttcttactaacaagaagctgtcctgcaaaaaccagcacaatgaaaactgattattttaggaaagtgttacaaaatattagcaattgaaagagatgataggttaggctgttggtataactttctagagcatctgttcttgtgctacttasacagacgccatgattttcagagatttacttttcattgttcgccgccacttcccctgataatgccaatgaggcctgtgtgtctttggtataatattcattttttcttattactattttagtattcatttattcattcacaggaggagccatctccaacatgtacagcataatggccgcacgctacaaatatttccccgaagtcaaaaccaaaggcatggctgcagtccctaaactggttctctttacctcagaacatgtgagcttaacacactgctaattgttaatttattgatgtacatt

SEQ ID NO: 52835 - DNA, 600 bp, Chicken  19866894303683_1
agggcaaagcacagggatgggggagtaggaggttagtagggcctgagtgatgcatgcagttatgtcacagggtgtgatggggaatggggaaggttttgctttgtcattggaagcttcatctctttgaagatgctggaagccctgactggagcttttcctcaggcatctcaccagcagaggtgggatacagctctcctgggctggctcgtgtctgtcccagctcaggcagccaccagcaagaaggtcgttaccgcagggccccgctcggcaaagcagggaaacccatctctatttgtcacygagcgtcagggccttggaggtgaatcagatgcactgtattaatagatctaatcatcgcaagccttggttgtgccgtatgtagcaatctgtttcctggctgacagtgtgcttgctgctagcaggagggagaggcaggggaagaagtatcgcccatccgcagctctgcagggcaggaccttgatggtggctgaggtgggtggctgtttgcacgttgggtgggtgaaatgctggcctggtggtcagcaatggcaaatctactttagaatagattgcagccgggcagggttttgggttttggaa

SEQ ID NO: 52836 - DNA, 600 bp, Chicken  19866894303683_2
tagggagcacttgctggcatcgtattaattgagccttatgcttagagccccggtgctatcgattgtaactgtaacttcagctggaatttgggaagcacttacttgaagtctgaaaaatgagaggaaagcagaatgccgggtgattggattgacttcatttccagcagattacactgtaataattgcctatgtccaatctactttcgttactcgtccctctaatgaaagtaccaggaaggctttcagatttcaatatgcaggatctatatagggcttgttgggagcaggcaccagagcacrccaggcaggagcaatacaagaggctttatcttaataactggcagaagatatccactcaccccrttccctgtcccattcacatccttttactttgctctccttccccttagagaagaaataaagagaagagagaagaagaaacaaaaatgccaattactgaccaagaacacgaatttttcactgatctcctgtaattccccaccaagctgaagagcctggaaggtaatgaagtgagatttcttcaaagagcagatgaacgagaggagatgactgcctgaaccaaaagcccagtgagatgca

SEQ ID NO: 52837 - DNA, 598 bp, Chicken  19866894303683_3
tgtaactgtaacttcagctggaatttgggaagcacttacttgaagtctgaaaaatgagaggaaagcagaatgccgggtgattggattgacttcatttccagcagattacactgtaataattgcctatgtccaatctactttcgttactcgtccctctaatgaaagtaccaggaaggctttcagatttcaatatgcaggatctatatagggcttgttgggagcaggcaccagagcacrccaggcaggagcaatacaagaggctttatcttaataactggcagaagatatccactcaccccrttccctgtcccattcacatccttttactttgctctccttccccttagagaagaaataaagagaagagagaagaagaaacaaaaatgccaattactgaccaagaacacgaatttttcactgatctcctgtaattccccaccaagctgaagagcctggaaggtaatgaagtgagatttcttcaaagagcagatgaacgagaggagatgactgcctgaaccaaaagcccagtgagatgcaggtctgccttttggggtgcagagaggacagatgtttttggggtgaagagggatgagaaggg

SEQ ID NO: 52838 - DNA, 600 bp, Chicken  19866894303686_1
ggatgagatatgaggatacagacatgggatggatttggaatatggttatgggatggatatgagggtatggatataggatgggctatgaatacacgatgggatatgggatgggataaggttgtagcatatggatacgggttatgggatggcaatgagatgggactgtagtggtgatggggtcataggggctatggggctgggatgctgcagtcacctgtccccagagtgccccccggtgtgacatgcagagccccacagccgctcctctgccttttattcatgcagaggtctgggggggcrgcgtctcccagtccaccttatcacaaaataaatcttatttacaaaaataaagtgtgtgcccccctcaacttccacccacccccgcatgggaacaatgcggtcagaaggacggacaccgggggatctgcagaggggtgcctccaactttggggtgtgacatggaaggggtgacacagaggtgtccccagcagtgacaccccatgcatgttgacaaaagcaacacccagcagcgatgacagctgttccacgctgatgtcacacacggtcccctctggtggcagcagagtacaccaccacgtc

SEQ ID NO: 52839 - DNA, 600 bp, Chicken  19866894303687_1
ttttaaaggtcaggcaacagcctgatttatttcccctttcttgagtgataaggcagtgtgaataagctgagtagaaaaacattgctctaattgcactacaggaaagaaattgttcattggggccatatcaggggtatatttcttttcttccaactgacattttcctgtacgtttttccactctgcttcattcttcgccaatagcagcaaatcataattattccatacaagtcatctgcatttttctccaacggaaatctcaaatatttctgctgctcttttccttttcttatttcaacargaattttgattgcttttactattagttatttaacaactttcacaaaacctcaaattcagcaatctctggaatctctgttaagatgtgcttgatgcagtcttgctatagctatgggcaggaatggaagaacagtgtctattccaccttgtagctaagttcaacctagaattgcttttatttttcctcaacaaactttatctccttagttcttttcagattatttcagagcatttctttcaaaatgccaagcacatttactattgtttagtctgagcagtttaaacaagttgatttataatc

SEQ ID NO: 52840 - DNA, 600 bp, Chicken  19866894303689_1
gtcttgaaaggtgaaaaagatcaggactttcacctctagtgggatggtctactcaagatagggtgagtgaggtggagcatttgtgactttatccaggctttctctgtaaataggcctttggggtagctatgtttcagctattgacaaagattgttaacccctaaacggatgacacacactgcataggtatgccctaagttgcataaatggtgaattctgctttccatcttgctattttaaatcaaagacagtacaatcagattcattattgatttaatatagcataaacaaaagcagatwttttttctaaatctgtgggtcacttggagaatactatatagagtgagtgcatttttctctctttcctatagctgagtcctgaaaaataatgttaactgtagcccatactgaaatatcagagacttactgaaagtcactagaatgagaacttacattaaaagcaccagrgtgcttcttttatggttacttactactgggctttttttgtttgtttatttttttgtctctgctcttacagtagttgtccataagatcactaatacgatgtttttcgtggttgtgccaaatgattgcattgca

SEQ ID NO: 52841 - DNA, 600 bp, Chicken  19866894303689_2
atgacacacactgcataggtatgccctaagttgcataaatggtgaattctgctttccatcttgctattttaaatcaaagacagtacaatcagattcattattgatttaatatagcataaacaaaagcagatwttttttctaaatctgtgggtcacttggagaatactatatagagtgagtgcatttttctctctttcctatagctgagtcctgaaaaataatgttaactgtagcccatactgaaatatcagagacttactgaaagtcactagaatgagaacttacattaaaagcaccagrgtgcttcttttatggttacttactactgggctttttttgtttgtttatttttttgtctctgctcttacagtagttgtccataagatcactaatacgatgtttttcgtggttgtgccaaatgattgcattgcaagctatattttgttattgcctactgctaggtttcttccatctcccctcgagcatcttccatgcaggagacaacattttaaactaagtggcctgtgattttgatcgtgtatggcaatttctaccatcctgtttgtatactatattggagctttgaaacccttgcattag

SEQ ID NO: 52842 - DNA, 600 bp, Chicken  19866894303698_1
aggagtttggggataatccagttgcacaatggggttcaaggactgattttcacctgctgaagatgatgcatgaattattctttagaaaaaaggtacaaggccaaaaacagcattgtttttaggaacaaagcaccttgcacaagccctgaacctctcagcatagggacttggggctcactcccttctggagaagtttgtgtaatatccaagccatagcttgagggattttgataagcagcctagcaaaaaatctgacatttctgataatatttcatcctcctgcttgtttaaccttcactytccctctttcctcctttacccgactccaatgccctgcgacaaacatgctttccctgcctgaccctgcatgtttcagtgctttccacccattytgccctgcacgtgggcacctctgcctcgccctgctcttccagttactaccaaggatgccgcctttcattttcacttgaacatcccacatcaccactgtttcttgcaagccttcattctctcgacacctgcatggcacagacaattatcactttatgagataactgctatctaaaagctacctaacccgtctaagggcactctatacag

SEQ ID NO: 52843 - DNA, 600 bp, Chicken  19866894303698_2
gtacaaggccaaaaacagcattgtttttaggaacaaagcaccttgcacaagccctgaacctctcagcatagggacttggggctcactcccttctggagaagtttgtgtaatatccaagccatagcttgagggattttgataagcagcctagcaaaaaatctgacatttctgataatatttcatcctcctgcttgtttaaccttcactytccctctttcctcctttacccgactccaatgccctgcgacaaacatgctttccctgcctgaccctgcatgtttcagtgctttccacccattytgccctgcacgtgggcacctctgcctcgccctgctcttccagttactaccaaggatgccgcctttcattttcacttgaacatcccacatcaccactgtttcttgcaagccttcattctctcgacacctgcatggcacagacaattatcactttatgagataactgctatctaaaagctacctaacccgtctaagggcactctatacagaagggtggatctaggatttagacacacctaattatcattagtcttaatacttataacctgtcattataattcttatattgcacattagctag

SEQ ID NO: 52844 - DNA, 526 bp, Chicken  19866894303699_1
attcatgatcacttggcttcttagtttggtttaagactaaattgtcccaagcagttgataatttacactgttctgaaatcaagctgaaaccacagaatcaaaggaaaaaatgtgtctgcctcttcctaccatcctgccagcaccaacaaaaactgaagctctaaatttggaagacatttaaaggactaatgcaaaacatgcttttgttttggtactctttggtgcatttttagtattagctttgtccattaggtatgttactaagcacatcagaaagagattgcctttagtgaaccacawaaaaaamcccagcacattttggaaattttgtaaaactcaagataaattgctaggaaatctgccattgtgagtcacagtcttcaatcctaatatgtttctgttctacagagattgttggaacctctgtggtgagtctgttcaggaagattcgccagaatagagatgttccagagcccacccttttcccagctcatcaaggactccagcaccgatcaggtcctgctgc

SEQ ID NO: 52845 - DNA, 519 bp, Chicken  19866894303699_2
atcacttggcttcttagtttggtttaagactaaattgtcccaagcagttgataatttacactgttctgaaatcaagctgaaaccacagaatcaaaggaaaaaatgtgtctgcctcttcctaccatcctgccagcaccaacaaaaactgaagctctaaatttggaagacatttaaaggactaatgcaaaacatgcttttgttttggtactctttggtgcatttttagtattagctttgtccattaggtatgttactaagcacatcagaaagagattgcctttagtgaaccacawaaaaaamcccagcacattttggaaattttgtaaaactcaagataaattgctaggaaatctgccattgtgagtcacagtcttcaatcctaatatgtttctgttctacagagattgttggaacctctgtggtgagtctgttcaggaagattcgccagaatagagatgttccagagcccacccttttcccagctcatcaaggactccagcaccgatcaggtcctgctgc

SEQ ID NO: 52846 - DNA, 600 bp, Chicken  19866894303703_1
ccaagttgtacttgaccattccctgcaatcatagaatcacaaggttggaaaggacctacaagatcatctagtccaaccatcctcccattaccattgttactacaagccactaaaccatatcttgtagctcctcatccagatgcttcttgaacactgtcagggatggcgactccaccacctccctgggcggctgttccagtacctgaccactctgagagaaaaaaaacttttccttatgtcttatctaaacctcctccggtacaacttgtggccatttcctcaggtcctgtttgttgcctkggagaagaagccaaacccctcctcatcacaacctccctctaggaagttgtagagggcaatgaggtctcctctgagcctcctcctctccaccctaaacaatcccagctccctcagccactcctcattctcctccagacccctcaccagtttcgctgcccttgtctggagaagagaaaccctccagagcctcaatgtctttcttgtagtgaggggcccaaaactgaacacaatactcgaggtgcagcctcagtgctgatacagggggatgatcacctccctgctcctgctggctacactatt

SEQ ID NO: 52847 - DNA, 600 bp, Chicken  19866894303703_2
gaggtctcctctgagcctcctcctctccaccctaaacaatcccagctccctcagccactcctcattctcctccagacccctcaccagtttcgctgcccttgtctggagaagagaaaccctccagagcctcaatgtctttcttgtagtgaggggcccaaaactgaacacaatactcgaggtgcagcctcagtgctgatacagggggatgatcacctccctgctcctgctggctacactatttctaatgtaggccaggatgccattggccctcttagccacctgggcacactgtcagttcaygttcagctgagtatcagccagcacccgcaggtccctttcctcttcacagtcatccaaccactcagccccaagcctatagcactgtatggggttattgtggctaaagtgcaggacctggtacttggccttgttgaacctcatcccattcacctcagctcagtgatccagcttatctagatccctctgaagggcctccctaccctcaggttgattgacaccacctcccaacttggtgtcatctgcaaacttattgagggtactctcaatcccctcatctaggtcatcaatacagatactaaa

SEQ ID NO: 52848 - DNA, 599 bp, Chicken  19866894303706_1
  misc_feature (1)..(13): n is any nucleotide
nnnnnnnnnnnnntatgaggtgtcactacaagcgtatgtatgatgtggctttctgacctttctgcatgtgtttattctcagatctgttacacaaatacatctaagaaagctggaggtggtctaattgatgttgtgggttcctttttgttatgagctgccacacttagtgtttgaatggcagagaggagggaaactcttacaaatttaattattggcagatgctgtttagattatttgggggagatatgaattagcttgaaatcactgtgtattgctccttaaacctccagtggttaattygattgtttcattccagctatgcaagagaatccaataagttaatagaccttccggatgactacagctgcctcattaaccaagcttctaatttctcgtaagttgaatgcaattatagtgagaacccctaaagtcttctgctgcttctgatgatctggaaaacatctaatgtaaaagtctcacataaactgttcatggagtcatgaagttaatagcagttactgattgtcatattttccagcaaaaacactgtatttcagtgaaatagaaattgcaagcatctgtgtaactgttaactgcat

SEQ ID NO: 52849 - DNA, 600 bp, Chicken  19866894303709_1
ccagaaaggtataaagaaactgaggaaaagaacacatcctgtctgcatgtacattttgaagggcaatcaaatagaatgtttgttatgctacactgtaagagctccttaatatgggatgtacacaaaaaaaagtgtctttaaaaaaaataaacaccccctgaaaactcaccatgtgttctgatggtttacatacagtttcagaattaaaaatgaaaaagcgttttgagtttctttcataaaatctccttcctttttaaattctgtgattgaaaaaagtactcaaaatgaaagcagttccamaaagtctcartgtattgaaagacagctttagccatgcttgctctaagactgccattcccagagagccaaactgcraattacagctgagagaggaattaaatgcaggatttctcgcctgggtttctcccataaggatgctctgagggcctgaatggtataaagaagcatgtgaagaaccatgcattcctastggcttttgaggagagtgctttaataactttccttgccaccctttctgagaaatccttttgggacctacagttcctgggctggcagctgggaacgcaccatcacaccaca

SEQ ID NO: 52850 - DNA, 600 bp, Chicken  19866894303709_2
ataaagaaactgaggaaaagaacacatcctgtctgcatgtacattttgaagggcaatcaaatagaatgtttgttatgctacactgtaagagctccttaatatgggatgtacacaaaaaaaagtgtctttaaaaaaaataaacaccccctgaaaactcaccatgtgttctgatggtttacatacagtttcagaattaaaaatgaaaaagcgttttgagtttctttcataaaatctccttcctttttaaattctgtgattgaaaaaagtactcaaaatgaaagcagttccamaaagtctcartgtattgaaagacagctttagccatgcttgctctaagactgccattcccagagagccaaactgcraattacagctgagagaggaattaaatgcaggatttctcgcctgggtttctcccataaggatgctctgagggcctgaatggtataaagaagcatgtgaagaaccatgcattcctastggcttttgaggagagtgctttaataactttccttgccaccctttctgagaaatccttttgggacctacagttcctgggctggcagctgggaacgcaccatcacaccacatccccgcggc

SEQ ID NO: 52851 - DNA, 600 bp, Chicken  19866894303709_3
atgtttgttatgctacactgtaagagctccttaatatgggatgtacacaaaaaaaagtgtctttaaaaaaaataaacaccccctgaaaactcaccatgtgttctgatggtttacatacagtttcagaattaaaaatgaaaaagcgttttgagtttctttcataaaatctccttcctttttaaattctgtgattgaaaaaagtactcaaaatgaaagcagttccamaaagtctcartgtattgaaagacagctttagccatgcttgctctaagactgccattcccagagagccaaactgcraattacagctgagagaggaattaaatgcaggatttctcgcctgggtttctcccataaggatgctctgagggcctgaatggtataaagaagcatgtgaagaaccatgcattcctastggcttttgaggagagtgctttaataactttccttgccaccctttctgagaaatccttttgggacctacagttcctgggctggcagctgggaacgcaccatcacaccacatccccgcggcatcactggtgggacagccccgtgccagggctgctgtccatgcagaaggaggttgcttaggaacgc

SEQ ID NO: 52852 - DNA, 600 bp, Chicken  19866894303709_4
tacagtttcagaattaaaaatgaaaaagcgttttgagtttctttcataaaatctccttcctttttaaattctgtgattgaaaaaagtactcaaaatgaaagcagttccamaaagtctcartgtattgaaagacagctttagccatgcttgctctaagactgccattcccagagagccaaactgcraattacagctgagagaggaattaaatgcaggatttctcgcctgggtttctcccataaggatgctctgagggcctgaatggtataaagaagcatgtgaagaaccatgcattcctastggcttttgaggagagtgctttaataactttccttgccaccctttctgagaaatccttttgggacctacagttcctgggctggcagctgggaacgcaccatcacaccacatccccgcggcatcactggtgggacagccccgtgccagggctgctgtccatgcagaaggaggttgcttaggaacgccaacagctggggagggggagggggggcaatgagaaagcagacccccaggtttctgccttgcggagaaatgccaggcagacatttgtatttgctttacagtttattacaaaagtct

SEQ ID NO: 52853 - DNA, 600 bp, Chicken  19866894303711_1
ggctcgtccctcctgtgccgtcctgcagcgcccggtctgtgttgctgcgggtgttggaccgaggcaccagctgtgccagcctcatctcaggtctgttgtagctcagcagcatctccctgcagtgggtgatgaggccgtagagcctgtcaaacaccaggttgtctggtagggagatcctgtggatgctggcgtcctgccgccaatggatgcggcagcgctgcaattctcatcactccggatggacagaacgcagtccccaatgaacgtctcactctccctgagcaggaaggagccatcggygccccgtctcggtgcagcactctgtcagcagcccatgtgccacccatcgcgccccgctcccagcctgccatgcagcccatcctgcacgacgtgcagctccgtgttggcgctcagctcctcctgcacaggtcgtctcccccgtctgctcccagctgggacaacgcaaagcggcttccattcgtaaggggtggagtcttccaccagttggcaatccacttctgctcctttgtcacacgtggacccgtggctcctcgccactcactgccatcaggccacctcagggccggcagggctggccca

SEQ ID NO: 52854 - DNA, 599 bp, Chicken  19866894303714_1
  misc_feature (1)..(123): n is any nucleotide
nnnnnnnnnnnnnnnnnnnnnnnnnnnnnnnnnnnnnnnnnnnnnnnnnnnnnnnnnnnnnnnnnnnnnnnnnnnnnnnnnnnnnnnnnnnnnnnnnnnnnnnnnnnnnnnnnnnnnnnnnnntaaggaacttttattttgttaatgggagacttctgtagctatgacactacatctggatataaaacaagcaaggtgcacttcaaaacattttaatgactccagctacacgtattataggcacacatgtcaaatgtgggtactgtgggacacattaagaattcctgcctgcataacatrtttcctgcagcccagaaggaaaatattcttttaacgcaatacaagcccaagttcatgtttaaagcaggaactgctgatcccaaatggataaagcagaagattttcatcacatggaggaaagaggaaggaattacttgtcagatatgtctctggaaaatttgcttacaggaacacgtctgtgtgtacagagcaagggcctatttttggggaaagggtgtccccatgaaggcttcatacatctgttttgattaactgccctggagatttcctgtattggtttttctgaagaggagtctgca

SEQ ID NO: 52855 - DNA, 600 bp, Chicken  19866894303714_2
aaatggataaagcagaagattttcatcacatggaggaaagaggaaggaattacttgtcagatatgtctctggaaaatttgcttacaggaacacgtctgtgtgtacagagcaagggcctatttttggggaaagggtgtccccatgaaggcttcatacatctgttttgattaactgccctggagatttcctgtattggtttttctgaagaggagtctgcacaaagcactgcagagctttccattctgcacaggctgttaactctactggaaaaagacaagcactgaatgaacattttaatgytactcaagacacagttgagattacagcagcaaggaakgcgcagagacagacatctcagagagcccacagctcccttttcaaaggtacaaagcaaaatgaaaaatggaagagccattcctgctgagttctactgtaacatgaactgcagctcttctgccagtgcccaaccaggcacggaagcacagatgaaagcaatcggacctggtgtcaaaagacagacagaagaaaacttcttgcatggtgacttggccagctttcagactgcaatgggacttaactgtcttcctaccacctgcaaaa

SEQ ID NO: 52856 - DNA, 600 bp, Chicken  19866894303714_3
aagaggaaggaattacttgtcagatatgtctctggaaaatttgcttacaggaacacgtctgtgtgtacagagcaagggcctatttttggggaaagggtgtccccatgaaggcttcatacatctgttttgattaactgccctggagatttcctgtattggtttttctgaagaggagtctgcacaaagcactgcagagctttccattctgcacaggctgttaactctactggaaaaagacaagcactgaatgaacattttaatgytactcaagacacagttgagattacagcagcaaggaakgcgcagagacagacatctcagagagcccacagctcccttttcaaaggtacaaagcaaaatgaaaaatggaagagccattcctgctgagttctactgtaacatgaactgcagctcttctgccagtgcccaaccaggcacggaagcacagatgaaagcaatcggacctggtgtcaaaagacagacagaagaaaacttcttgcatggtgacttggccagctttcagactgcaatgggacttaactgtcttcctaccacctgcaaaactgtcaaaatcccaagccaggatttaagctgtggcct

SEQ ID NO: 52857 - DNA, 599 bp, Chicken  19866894303718_1
  misc_feature (1)..(124): n is any nucleotide
nnnnnnnnnnnnnnnnnnnnnnnnnnnnnnnnnnnnnnnnnnnnnnnnnnnnnnnnnnnnnnnnnnnnnnnnnnnnnnnnnnnnnnnnnnnnnnnnnnnnnnnnnnnnnnnnnnnnnnnnnnnntcagagccagagaggtatgagggggggaaaaccaaagaggtttcaccacatatggtgaaaggggcagatgacccagttgaccaagccaggctgattaaaatcctgatgcattaatatcattgtttgggtctgggtgtgttaaaaatcacttctgagaaacagctggttttcatttykktctgcttggttgaaagtgaaaacagcactaacccccccaacttcatgaatgcaaattgtattgcagaagtatatatggagtagtaaattcatatttctgatgttatagctgcctgcagtagtatgaatgatctcatgatgcattttaaaaatacaacagaartagaagagcttcagatctgcagtagatttatggccaagtagctgtgtgggaaggctgttcaggactgccaagtagagaaggaagatccataaacaaagttgttctagaggtacttgaaatgaagtactgtacagg

SEQ ID NO: 52858 - DNA, 599 bp, Chicken  19866894303718_2
  misc_feature (1)..(123): n is any nucleotide
nnnnnnnnnnnnnnnnnnnnnnnnnnnnnnnnnnnnnnnnnnnnnnnnnnnnnnnnnnnnnnnnnnnnnnnnnnnnnnnnnnnnnnnnnnnnnnnnnnnnnnnnnnnnnnnnnnnnnnnnnnntcagagccagagaggtatgagggggggaaaaccaaagaggtttcaccacatatggtgaaaggggcagatgacccagttgaccaagccaggctgattaaaatcctgatgcattaatatcattgtttgggtctgggtgtgttaaaaatcacttctgagaaacagctggttttcatttykktctgcttggttgaaagtgaaaacagcactaacccccccaacttcatgaatgcaaattgtattgcagaagtatatatggagtagtaaattcatatttctgatgttatagctgcctgcagtagtatgaatgatctcatgatgcattttaaaaatacaacagaartagaagagcttcagatctgcagtagatttatggccaagtagctgtgtgggaaggctgttcaggactgccaagtagagaaggaagatccataaacaaagttgttctagaggtacttgaaatgaagtactgtacagga

SEQ ID NO: 52859 - DNA, 599 bp, Chicken  19866894303718_3
  misc_feature (1)..(122): n is any nucleotide
nnnnnnnnnnnnnnnnnnnnnnnnnnnnnnnnnnnnnnnnnnnnnnnnnnnnnnnnnnnnnnnnnnnnnnnnnnnnnnnnnnnnnnnnnnnnnnnnnnnnnnnnnnnnnnnnnnnnnnnnnntcagagccagagaggtatgagggggggaaaaccaaagaggtttcaccacatatggtgaaaggggcagatgacccagttgaccaagccaggctgattaaaatcctgatgcattaatatcattgtttgggtctgggtgtgttaaaaatcacttctgagaaacagctggttttcatttykktctgcttggttgaaagtgaaaacagcactaacccccccaacttcatgaatgcaaattgtattgcagaagtatatatggagtagtaaattcatatttctgatgttatagctgcctgcagtagtatgaatgatctcatgatgcattttaaaaatacaacagaartagaagagcttcagatctgcagtagatttatggccaagtagctgtgtgggaaggctgttcaggactgccaagtagagaaggaagatccataaacaaagttgttctagaggtacttgaaatgaagtactgtacaggaa

SEQ ID NO: 52860 - DNA, 600 bp, Chicken  19866894303718_4
tttcaccacatatggtgaaaggggcagatgacccagttgaccaagccaggctgattaaaatcctgatgcattaatatcattgtttgggtctgggtgtgttaaaaatcacttctgagaaacagctggttttcatttykktctgcttggttgaaagtgaaaacagcactaacccccccaacttcatgaatgcaaattgtattgcagaagtatatatggagtagtaaattcatatttctgatgttatagctgcctgcagtagtatgaatgatctcatgatgcattttaaaaatacaacagaartagaagagcttcagatctgcagtagatttatggccaagtagctgtgtgggaaggctgttcaggactgccaagtagagaaggaagatccataaacaaagttgttctagaggtacttgaaatgaagtactgtacaggaagaatcaatcagatgttcctatttattctttatctaacacaaacgcagaggaatgttccatcaaaatgacaaactttatatttggggttttataccaggctaatcatagaaaaccattggagtttttttttacaggtttgggtaatgagaacctttcatgctgt

SEQ ID NO: 52861 - DNA, 600 bp, Chicken  19866894303723_1
ctgtgggaagcctgcaagccctgtgtgactgtgaggctgaatcaccccttaggaaaaataaaggtgttgttgatctgctagatattagtgctgcattacaaagggatctctatctagtagaatcctgagtattcttatgtctgacgtgacaagaagtctgaccaagcagttgctaacaacagggtgaaataaatctacctcatagctgtaaagatctaatgggagattatccctgctttttgttttcctctgtaagataaaaacacgtaaaacttgcatgaagttggacttgaaatatgrcttttcatacgggtattgtcagtgctagagcattagcaagccaaaacccacagtaacaatttcagtgttagaatcatatcactatgtggaagatagcatggtaagtactatcagtgataaggatagcaatgtataattggggaagaaagcaggaactgcttcctttattagtggtgcattatgagtattgatagagtgtactctaagtggtgcttgactttccatacaaataatgggtgtttttgagtaacttgcctacagttgagcatctgtggacraggaaaaaattccctaaactct

SEQ ID NO: 52862 - DNA, 600 bp, Chicken  19866894303723_2
tgaagttggacttgaaatatgrcttttcatacgggtattgtcagtgctagagcattagcaagccaaaacccacagtaacaatttcagtgttagaatcatatcactatgtggaagatagcatggtaagtactatcagtgataaggatagcaatgtataattggggaagaaagcaggaactgcttcctttattagtggtgcattatgagtattgatagagtgtactctaagtggtgcttgactttccatacaaataatgggtgtttttgagtaacttgcctacagttgagcatctgtggacraggaaaaaattccctaaactctttggaacataatcagaattttcaaaatgattcctaaatgtattgaagtctggtaaatatccatattggagaatgtatactgccagttttgtcaggaaggcatccactggcagtgtgatataatgtaatgtactgacccattacccttttggggcaaggcctatgtatgtacttgagaaacttacactgtgtgttaatttttcagggtaaaccttttaccaagtgatgtatggctgtttcaggtgctgtgtttctgagtcctcagctgtgcttgtgttt

SEQ ID NO: 52863 - DNA, 600 bp, Chicken  19866894303725_1
tatctcttaagtgtgtcccccccttctctccaggtgctgggacctcagcgcagggaacatgaagtggatttaccaggtccccatcttggctgccgttgtggtaggaaattaacgatccttcctggggcagaggggaccggtagcgccccggggctgtttgctgccagttacagggccaggtccctgcaggcaacaaacccaacgtgggtgggtggctgttggcaggtgaacttcttcctcttcctcaacatcgtgcgggtgctggcctccaagctctgggagacgaacacggggaagccrgacccacggcagcagtacaggcaagccctggcctggctcattctctgcccatttcatgggratggttccccatggggctgtgactgaagagcagagccatgggggtggctggcagatctcagctcaccgccccatttctcctcccaggaagctgctgaagtccacgctggtgctgatgccgctttttggagtgcactacgtggtgttcatggccatgccctacaccgaagtctccggggtcctgtggcagatccagatgcattatgagatgctctttaactcctctcaggtacgatgctc

SEQ ID NO: 52864 - DNA, 600 bp, Chicken  19866894303725_2
aagtggatttaccaggtccccatcttggctgccgttgtggtaggaaattaacgatccttcctggggcagaggggaccggtagcgccccggggctgtttgctgccagttacagggccaggtccctgcaggcaacaaacccaacgtgggtgggtggctgttggcaggtgaacttcttcctcttcctcaacatcgtgcgggtgctggcctccaagctctgggagacgaacacggggaagccrgacccacggcagcagtacaggcaagccctggcctggctcattctctgcccatttcatgggratggttccccatggggctgtgactgaagagcagagccatgggggtggctggcagatctcagctcaccgccccatttctcctcccaggaagctgctgaagtccacgctggtgctgatgccgctttttggagtgcactacgtggtgttcatggccatgccctacaccgaagtctccggggtcctgtggcagatccagatgcattatgagatgctctttaactcctctcaggtacgatgctccaagcacagcaatggctcatccgggaatccaagctcagggctcaaactcctccctctcttt

SEQ ID NO: 52865 - DNA, 600 bp, Chicken  19866894303725_3
caggtacgatgctccaagcacagcaatggctcatccgggaatccaagctcagggctcaaactcctccctctcttttggcagggtttctttgtggcttttatctactgcttttgcaatggggaggtaagtgaggggcggcatctttccctgcacccctgagcatgggacaaccagagggaaaactcagacttgagaagggaaaggaaggctgctttgctggctctgagcaccagcagctctgatctctcccccaggtgcaggcagagattaaaaaagcccattttcggagaagcctggcgytggacttcaagcagaaggcgcgtgccagcagcgcagcagggagctgctgttayggtgggctgatgtcccacggcaccacgarcttcagtgtgagcctgacagggcgagggccggggggcacacagccccgggggctgctcctccctgcccgtggcagcctgccaggctacacccccagctcctgtgctgcagaccttttgccccacctgacgcaggagatgagtcagaaaacctacggggaaaacaccgtgggctcaaaagaccccgatgagagtcaccccaacccgaacaaagagctgg

SEQ ID NO: 52866 - DNA, 581 bp, Chicken  19866894303725_4
gctcaaactcctccctctcttttggcagggtttctttgtggcttttatctactgcttttgcaatggggaggtaagtgaggggcggcatctttccctgcacccctgagcatgggacaaccagagggaaaactcagacttgagaagggaaaggaaggctgctttgctggctctgagcaccagcagctctgatctctcccccaggtgcaggcagagattaaaaaagcccattttcggagaagcctggcgytggacttcaagcagaaggcgcgtgccagcagcgcagcagggagctgctgttayggtgggctgatgtcccacggcaccacgarcttcagtgtgagcctgacagggcgagggccggggggcacacagccccgggggctgctcctccctgcccgtggcagcctgccaggctacacccccagctcctgtgctgcagaccttttgccccacctgacgcaggagatgagtcagaaaacctacggggaaaacaccgtgggctcaaaagaccccgatgagagtcaccccaacccgaacaaagagctggagacgatgctatgaagtcaacactgcatctccca

SEQ ID NO: 52867 - DNA, 552 bp, Chicken  19866894303725_5
gtttctttgtggcttttatctactgcttttgcaatggggaggtaagtgaggggcggcatctttccctgcacccctgagcatgggacaaccagagggaaaactcagacttgagaagggaaaggaaggctgctttgctggctctgagcaccagcagctctgatctctcccccaggtgcaggcagagattaaaaaagcccattttcggagaagcctggcgytggacttcaagcagaaggcgcgtgccagcagcgcagcagggagctgctgttayggtgggctgatgtcccacggcaccacgarcttcagtgtgagcctgacagggcgagggccggggggcacacagccccgggggctgctcctccctgcccgtggcagcctgccaggctacacccccagctcctgtgctgcagaccttttgccccacctgacgcaggagatgagtcagaaaacctacggggaaaacaccgtgggctcaaaagaccccgatgagagtcaccccaacccgaacaaagagctggagacgatgctatgaagtcaacactgcatctccca

SEQ ID NO: 52868 - DNA, 600 bp, Chicken  19866894303728_1
ccaaaattgagaagagtacttttgccattttcagacattttatttctaattatttttcaagtagatcttagtctgtgaatttatgtattttgtaatacaaatagcgactgtttggtgcatcaagttttagtttttaattccactgttaaacataatattataggagttaatattattttctcctcgagactcataatcttaaagctaaatttatcttcatgtatgcagacaataattttagaatgtgctcgttaattttttaccctttgaaaggagtgtgcacatcaccccgtgtaataracattctcttaaaatctgtgtgaaacacagaaggttactttaatattgatagggtcttttctagaattgttcatatgtgatttatgctgcatgatgtatttacatgagtgstaagcagaagtttgaattacagcagttatttttacagcaacctgggagaagatctttgttgttttgttttccctttggagtggcagaattctgttcttatttttgatacagataaaaagacaaacacagagagaacaaagttgcattgagataaaatatgactcaaaaatattttgtaattctttcttt

SEQ ID NO: 52869 - DNA, 600 bp, Chicken  19866894303728_2
ttggtgcatcaagttttagtttttaattccactgttaaacataatattataggagttaatattattttctcctcgagactcataatcttaaagctaaatttatcttcatgtatgcagacaataattttagaatgtgctcgttaattttttaccctttgaaaggagtgtgcacatcaccccgtgtaataracattctcttaaaatctgtgtgaaacacagaaggttactttaatattgatagggtcttttctagaattgttcatatgtgatttatgctgcatgatgtatttacatgagtgstaagcagaagtttgaattacagcagttatttttacagcaacctgggagaagatctttgttgttttgttttccctttggagtggcagaattctgttcttatttttgatacagataaaaagacaaacacagagagaacaaagttgcattgagataaaatatgactcaaaaatattttgtaattctttcttttgctatttctcttccttcagatgctcactgtctctgttcttcacacttgttttcagttagagcattgtgaaagattgaaagaacaaacagtaagtcttaatgtcttttcac

SEQ ID NO: 52870 - DNA, 588 bp, Chicken  19866894303731_1
tttttcttttttattaggggaaatgaatagggaattagatctggcactgctaggtcgactgaacattactgttttgctgtaactttttgattttgtttgtgaactccccagaaaagcacagttagtgctatccaacacttcctctgaactgaaaggtttgatttttgttttcttgttttcatcagggatttgattagggtgctcttctaacactgttttctccttttcagaaagtgtcccatgtgatgcctcagaggtctagtgctcattcccattaaagccattttggtactttcacaygcctttgataatgaacaagattcaaaacatcttcgcttttctcactggtggcacggtttcaaggatgacatgggcaccttcctatttatggagttcattttacaggcttcttcatcaactccattaatatttatgtaaactcagattgctttcaatgtcattatcacaacatatcattttgcctcattgcatgtattgtaactccaaaagatagtttgacaaggttaggcccttacatatgcttagtgatgtgtacagattttagcatttgcttagatgtgtatcggt

SEQ ID NO: 52871 - DNA, 600 bp, Chicken  19866894303735_1
ctatttgcataaataaaggcttgtaggctaagtccctaaatttgtatgtatagtatattaaagtataataaaattaaattacaaatgagtcactgattaagtgtcctttgaagtgcaataaaattttgcattgaactggagctccttactgctgctgagataactaagcattcagaaccacagcaatggagactttggtaggcatgcagattgtggatctgccttatctcatgttttgatagaaaatggctttcgggattacataccatctgaaaagaaatctagggacaccaaacttcrgcctagctcctccagacattgcaaygatggctttgaagatggagatttgaaggatttgaggggattaattatcttctgacacaaattagaggacagttggccaagccatcagatccatagaaacaacaggctcttgtcaagacacctatgttacagttacttacaaagaatactagtaaggaagaaaaacatcaaggagatttggatgctgtcatgaaaatgtcccaacagaaaagtataaggtacatagtgaggaccttgatgcggtgctggaattggtgctgtcagtagtagatctag

SEQ ID NO: 52872 - DNA, 600 bp, Chicken  19866894303735_2
ggctaagtccctaaatttgtatgtatagtatattaaagtataataaaattaaattacaaatgagtcactgattaagtgtcctttgaagtgcaataaaattttgcattgaactggagctccttactgctgctgagataactaagcattcagaaccacagcaatggagactttggtaggcatgcagattgtggatctgccttatctcatgttttgatagaaaatggctttcgggattacataccatctgaaaagaaatctagggacaccaaacttcrgcctagctcctccagacattgcaaygatggctttgaagatggagatttgaaggatttgaggggattaattatcttctgacacaaattagaggacagttggccaagccatcagatccatagaaacaacaggctcttgtcaagacacctatgttacagttacttacaaagaatactagtaaggaagaaaaacatcaaggagatttggatgctgtcatgaaaatgtcccaacagaaaagtataaggtacatagtgaggaccttgatgcggtgctggaattggtgctgtcagtagtagatctagttaaacacagatattcttcagtcac

SEQ ID NO: 52873 - DNA, 600 bp, Chicken  19866894303738_1
ggataaaagtaagtttactggttggggactaagacatagttacttgatcacatgcttgaaagacctgattgcctattacttcacctgtgtgtggtttgagttctatgagcatggaaagggagcaaaattatttctcagcttcatattattggtttgatattacctggactgtctgttgtgcgtccatagcatgctattgtagcctcctgatggaaaggacccaaagcactccatggacagtagcacactaactttgcaccctgaacattcaaggactgctcttagagagggatgaagggmaaaatacttatcttctggggacaagatgtgagagtgtgctatatgtgagtgaaagattaatgcttccaytggctttgcagtcctgtaaaaygggctagaaagagcacctttgcagaatcaagtgtgcaaacaccattcaccaagcatctgacatgacacctgttgtgactttcagaattatttcattwgttctgggagactcagggaggaaaggctgtatgaaaacaaactcaagccatgccagccaaaatatctattgaaaatgagctaggaggctgcaagaggaaacaacaatagaac

SEQ ID NO: 52874 - DNA, 600 bp, Chicken  19866894303738_2
tgcctattacttcacctgtgtgtggtttgagttctatgagcatggaaagggagcaaaattatttctcagcttcatattattggtttgatattacctggactgtctgttgtgcgtccatagcatgctattgtagcctcctgatggaaaggacccaaagcactccatggacagtagcacactaactttgcaccctgaacattcaaggactgctcttagagagggatgaagggmaaaatacttatcttctggggacaagatgtgagagtgtgctatatgtgagtgaaagattaatgcttccaytggctttgcagtcctgtaaaaygggctagaaagagcacctttgcagaatcaagtgtgcaaacaccattcaccaagcatctgacatgacacctgttgtgactttcagaattatttcattwgttctgggagactcagggaggaaaggctgtatgaaaacaaactcaagccatgccagccaaaatatctattgaaaatgagctaggaggctgcaagaggaaacaacaatagaactggagtacaggtgaagaatacaaacgtttatggttaactggtgtcgaggttagaagaggtatgtgaggt

SEQ ID NO: 52875 - DNA, 600 bp, Chicken  19866894303738_3
tggtttgagttctatgagcatggaaagggagcaaaattatttctcagcttcatattattggtttgatattacctggactgtctgttgtgcgtccatagcatgctattgtagcctcctgatggaaaggacccaaagcactccatggacagtagcacactaactttgcaccctgaacattcaaggactgctcttagagagggatgaagggmaaaatacttatcttctggggacaagatgtgagagtgtgctatatgtgagtgaaagattaatgcttccaytggctttgcagtcctgtaaaaygggctagaaagagcacctttgcagaatcaagtgtgcaaacaccattcaccaagcatctgacatgacacctgttgtgactttcagaattatttcattwgttctgggagactcagggaggaaaggctgtatgaaaacaaactcaagccatgccagccaaaatatctattgaaaatgagctaggaggctgcaagaggaaacaacaatagaactggagtacaggtgaagaatacaaacgtttatggttaactggtgtcgaggttagaagaggtatgtgaggtaaagaccccaaaaactaagcac

SEQ ID NO: 52876 - DNA, 594 bp, Chicken  19866894303738_4
gcatgctattgtagcctcctgatggaaaggacccaaagcactccatggacagtagcacactaactttgcaccctgaacattcaaggactgctcttagagagggatgaagggmaaaatacttatcttctggggacaagatgtgagagtgtgctatatgtgagtgaaagattaatgcttccaytggctttgcagtcctgtaaaaygggctagaaagagcacctttgcagaatcaagtgtgcaaacaccattcaccaagcatctgacatgacacctgttgtgactttcagaattatttcattwgttctgggagactcagggaggaaaggctgtatgaaaacaaactcaagccatgccagccaaaatatctattgaaaatgagctaggaggctgcaagaggaaacaacaatagaactggagtacaggtgaagaatacaaacgtttatggttaactggtgtcgaggttagaagaggtatgtgaggtaaagaccccaaaaactaagcacagctttctgaaatgagaatttgagctggggatgcagcatccacagaaggcaatgactgcatacccagctcactgctggcgctcctgggctg

SEQ ID NO: 52877 - DNA, 600 bp, Chicken  19866894303743_1
tttttctcttaagctcccaaaaagcctcgtgtgaggttcagtaatattatggagattcggcagctcccctcgagccacgcgctggaagcaaagctgtctcgcatgtcatacccagcagtgaaggagcaggaatcaatattaaaaactgtaggaaaactcactgcaactcaagtagcaaagattagctttttcttttgctttgtggtatgtgctctgttttttttttccttttctgaaaactatagatgcaattaaaacttagataattttcactattattatacgtagagtattgagagraatagtattctttatgtctctttttctaaaaaatattatcagtagtaaaacctgcctcatgctgaacgtaatcctccttggaaggaggataacaaaaaagaaatcctgggtttctagttagctctaaggtcagttgtagaagatgcacagtgatttccatgctttcaagtcctattgtccaacactggatatgattaaagcagcaaaatctggagttgcagctacacaggctgtttccaccttcaatgaaaatggtctgaatgtatttccatgtatacacacatgcagattttctagact

SEQ ID NO: 52878 - DNA, 600 bp, Chicken  19866894303751_1
cctgggctgcaccctccttgttggagctagcccctttatttgatttgccacaagatgtgttcatgttacctctctcaaggtctttccacaatttggggagtgaaaatactttactgagaaacaatagaggtaaaaaaaaaaaaaaaaaaaaaagttcttatgaaacttattggttgataattctctttcccagtggataattctacaaacaaacgttacttctatcatgttcaaagtttctctcataggtactaaaagtaactatattatgaaagtgtgtaatttcatttgctctctggrctgcacaggttagtccctaatttaagcttactttttaaggttgttcatgtgtttatgtaagataactttgactgttcttccctataatttttatttccagctaaagtgatacacagtgccttttcatttaggagttttgacctgaattcatcaggcagcagccaaatgtcaccttcatccttcagaaataacttattggcaaatttaaatcactttaacccagaaacagcttccaagctgatataaatgatgatcactttctgatttctctgaagttgattataaatggatgtaaatata

SEQ ID NO: 52879 - DNA, 600 bp, Chicken  19866894303755_1
gtatattttctacagagattaaatagatttttggaagacaaaaacaccagctgacacctcactgaaaagaaatgtattacctacatggagatgcagtttaatgcatatacatgagcaatatgtattttctaaagatcagctttaatagctaaaagaaaatacaatgtgattaatttgcccaatgcatgttgtttttttccagacatttttgccttctacaggattcgagtttcaaagtatagatgtacaagtagtagagcagtgtggttcatttaatttcattcactgactttttgtgcyacagaaaaacaattccaaacataacaagcctaaaacaaatgaaaagtaatcatgtacatccagatatgcaggggtaaacagtttttgagctaaacttaaattggtaaaaattgcgtttgagtaagaatacaaatacattgaaaaaggcatgaggaaagaaaataaggtgaaataactttttattgaaacacaattctgaaagattgtcctccactgcacttttctaaagctatactgagggtagaagtcaagcactgtgataaaattattgcagaaaccacatagttytagtgcttgtag

SEQ ID NO: 52880 - DNA, 554 bp, Chicken  19866894303755_2
actttttgtgcyacagaaaaacaattccaaacataacaagcctaaaacaaatgaaaagtaatcatgtacatccagatatgcaggggtaaacagtttttgagctaaacttaaattggtaaaaattgcgtttgagtaagaatacaaatacattgaaaaaggcatgaggaaagaaaataaggtgaaataactttttattgaaacacaattctgaaagattgtcctccactgcacttttctaaagctatactgagggtagaagtcaagcactgtgataaaattattgcagaaaccacatagttytagtgcttgtagactttctttttttttctgtcagttttaacttctacagtgcaaaatgaatttaacctcaagaattcagacaatgtttcagtaacaaggaactaaacaacaaaacaattcagaaaaatggcttagaaaccaatactttaaggatgtaggtcactctgaaagtaatgttttctatttatttccatggaatccacaacagatacaaagagcacaataacattatttgatagaacaaatgagcaaat

SEQ ID NO: 52881 - DNA, 599 bp, Chicken  19866894303756_1
  misc_feature (1)..(82): n is any nucleotide
nnnnnnnnnnnnnnnnnnnnnnnnnnnnnnnnnnnnnnnnnnnnnnnnnnnnnnnnnnnnnnnnnnnnnnnnnnnnnnnnnntaagtctgcctgcattgtaggtaagttcaagggctgatgtgaatcactgctactatcttaaatcatctttgaagtagtttgagaggcatagactgtgttaagtgatttatttggtactgtgtgagtgagctagtgaattctggtgagccagtgagtgttgagagatctcctgaagtgtcacagcatgcttctggattgagctatggtgcagtcttgcygtagaagaactkgtagttcctgcattgtttayacttgtataacatgtgtaactgatgatattatacataaatgagttatcttcttaagacttcgagttaaagagatctaactattaaggtaaagctccctgaagttaatccttaagtatttacaagcaattagtacatcagaatcattgtaactaaaacaggtagcaaagctgggctccctcatgtccctctgatgttgcctctccacttaaaagggagtgttaggtcttcctttctccatcatagcctcaggctgggagtgttaagga

SEQ ID NO: 52882 - DNA, 599 bp, Chicken  19866894303756_2
  misc_feature (1)..(70): n is any nucleotide
nnnnnnnnnnnnnnnnnnnnnnnnnnnnnnnnnnnnnnnnnnnnnnnnnnnnnnnnnnnnnnnnnnnnnntaagtctgcctgcattgtaggtaagttcaagggctgatgtgaatcactgctactatcttaaatcatctttgaagtagtttgagaggcatagactgtgttaagtgatttatttggtactgtgtgagtgagctagtgaattctggtgagccagtgagtgttgagagatctcctgaagtgtcacagcatgcttctggattgagctatggtgcagtcttgcygtagaagaactkgtagttcctgcattgtttayacttgtataacatgtgtaactgatgatattatacataaatgagttatcttcttaagacttcgagttaaagagatctaactattaaggtaaagctccctgaagttaatccttaagtatttacaagcaattagtacatcagaatcattgtaactaaaacaggtagcaaagctgggctccctcatgtccctctgatgttgcctctccacttaaaagggagtgttaggtcttcctttctccatcatagcctcaggctgggagtgttaaggaagcctgctgggt

SEQ ID NO: 52883 - DNA, 599 bp, Chicken  19866894303756_3
  misc_feature (1)..(50): n is any nucleotide
nnnnnnnnnnnnnnnnnnnnnnnnnnnnnnnnnnnnnnnnnnnnnnnnnntaagtctgcctgcattgtaggtaagttcaagggctgatgtgaatcactgctactatcttaaatcatctttgaagtagtttgagaggcatagactgtgttaagtgatttatttggtactgtgtgagtgagctagtgaattctggtgagccagtgagtgttgagagatctcctgaagtgtcacagcatgcttctggattgagctatggtgcagtcttgcygtagaagaactkgtagttcctgcattgtttayacttgtataacatgtgtaactgatgatattatacataaatgagttatcttcttaagacttcgagttaaagagatctaactattaaggtaaagctccctgaagttaatccttaagtatttacaagcaattagtacatcagaatcattgtaactaaaacaggtagcaaagctgggctccctcatgtccctctgatgttgcctctccacttaaaagggagtgttaggtcttcctttctccatcatagcctcaggctgggagtgttaaggaagcctgctgggtcctggtatggctgtattgta

SEQ ID NO: 52884 - DNA, 600 bp, Chicken  19866894303756_4
aacatgtgtaactgatgatattatacataaatgagttatcttcttaagacttcgagttaaagagatctaactattaaggtaaagctccctgaagttaatccttaagtatttacaagcaattagtacatcagaatcattgtaactaaaacaggtagcaaagctgggctccctcatgtccctctgatgttgcctctccacttaaaagggagtgttaggtcttcctttctccatcatagcctcaggctgggagtgttaaggaagcctgctgggtcctggtatggctgtattgtaataacaggycacctagcagcagagcagtcccacaaatgccaggcagtgagtcagagtgctgctagcaaggcaaaatgttttccggagggaaggttataagatgatcagtttgattctgcagtactctactgcttgcactatctggaaagataaagataactggcagctcttaagtgatgcctgttggagagaagagagtaaagaagcagtgaagaatgtgaagactacaggaacgtttcaagtgctgagctcagtagcttttacaaagaacccaaacagagggatatcttcaggcatctagaggagtta

SEQ ID NO: 52885 - DNA, 600 bp, Chicken  19866894303758_1
ctgaagcagagaaggctctggggagacgtgatagcaacctttcagtgcctaaaggatgggtataagaaagaagtggacagactctttaggaggatctgttttgataggacaaggggaaatcatttcaaactaaagaggggagatttgggtataaggaaaaagcttttttttatgataagggtagtgtgacagtggcacaggttgctcagagaggtggtggatactttgggggccttggagacattcaaggtcaggctggatggggctctgagcagtgtgatcgtgctgtgggtgtccctkttcattgcaggggagtcagattagatgatctttaacggttccttccaactaacaattctattgttctgtaatttttattattatttttaatcactgttgcaggaaaaaattcccaaatagagtgtggttagggatcatgcaggcacaacttctacttacctttcccccttccccttctcacatgactcataactatgatttgcgttgtgtttgttcagtgtttttcttccagctgttctgtttactgataacattttagatatgccagaaaacaaccatctaatgcttttgcaagaggaa

SEQ ID NO: 52886 - DNA, 600 bp, Chicken  19866894303758_2
cattgcaggggagtcagattagatgatctttaacggttccttccaactaacaattctattgttctgtaatttttattattatttttaatcactgttgcaggaaaaaattcccaaatagagtgtggttagggatcatgcaggcacaacttctacttacctttcccccttccccttctcacatgactcataactatgatttgcgttgtgtttgttcagtgtttttcttccagctgttctgtttactgataacattttagatatgccagaaaacaaccatctaatgcttttgcaagaggaaaraatgactcgcagacttaacttctctctgttccttagttgtggagcattactgaactagtggtagactactctagatgatcctgtcggtcttcagtttaaagctgtagagcatcttcctcacttaagaaaatatttctttaatgtataagctattagttccactaatcagtattccaaattggtggtgcttttttgttgttgtttttaatggaacaaataaaagtacctgtgataggctgataaccattcaaaagcaaaactcagatcctagttgtgccagtaccaccttcccaaagactt

SEQ ID NO: 52887 - DNA, 600 bp, Chicken  19866894303759_1
atcagtggggacactcagtcactcaatgagaaagaattagtagagcacacctgtaggcagtgacagccccggatccaaccacctgctctgtattgacttacacagagatttaaaataaacaaactagtcttcattgatagtgatggcatcacctgacttgctttttctcctttattattacactaacttactgtcaacagcaagagaaaaaaagttattatccggatgtatcatgtaaaaaatgctatacttacagaatttcataggaactagaacaaaatgttttccttcctctctttytattctgacttctggtcttaaattggattatgaaagtaacgtctcacttttaaaataagtctcctaacttcagttttagaagatgctgatcttaggtcacacagatcccagtaagagtccttcttcattctcactaactgtgtgaaagcaaacagtttttccattccctacctccttacttgagccagtaagtccataagcactgagtggatctaaaagtgtaacttagaacatcctaaggaactgattaattggagagatttcaacagaacccaataaataaataaataaataaataaa

SEQ ID NO: 52888 - DNA, 600 bp, Chicken  19866894303763_1
gatgaaacaagccttgttgcctgcatccagagcagcttgctgggggtctctgagccctttgtaaagatgacaaagtttggaacccacctttgacactgaagtgatgaaggggggagtagaaacgctgcagcctcagaggtatgcaggagccaggagcttaactggggctcagggtgcagatctcagccctgccacagctggggactctgtgtgacatcaaagtgcgaaggcagataacaaattattgatactttgagctaaggcagcacatagcaattacaaagatttgctactcaaaaycctggggggcaggagttgttcttttctatggaaatgaccagaaaaactttagatctccatttaaccttcaaattatcctttttctttttttcagacactcaagctaccgaatttgtgtaataccttcaggtcaactcaagtttatgcattcaggttgaagaaaacaaacaaaaaccaacaaacagaccaaaaaacaaacaagaaaaaaacccaacccaccaaagccttggttttgagaattgcacttagcaggaaatgaaaaacattcattctcaccaactgttctcacttagaaagtgt

SEQ ID NO: 52889 - DNA, 600 bp, Chicken  19866894303764_1
accctgctgtctgttgaacggggtggggagaaggctccaaggtgctggaagggaaggagcaagcttgtcccaccatgcaggacctcctgcaatggagagcattagctggacctgaacaagagcctgccaacagagctgactttgcacagagtaggagatgcctacaggcaaattaaaccaatgatagcatcaacctggaggtcgagctggcattgtatgcttgaaataagttttaaaggaccatgatgcttcttggtccaagatcttttacttaagtaacagccaaagccgaacagaaaygaaatactctgctattcagctctgaggaaggcaggcaagtgttgaagttaggccaaggagtacgtgagttccgcacatcaggccagagagcattcctcccagagcagctctggagatgattatctttgctgagctgaaggcatcaataagatgagaacctgagctgctccaggagcttcagtacagctcgagccctgctgctggtggtgcagcagaaggcaaatgatactcccagaagtgaaggatgcccgagagcagggaatatccctcacgtcccagctgctcacatgcaggtccagc

SEQ ID NO: 52890 - DNA, 600 bp, Chicken  19866894303766_1
ccctccggccagttcttagcaaaaagtgcacctgtccaggccatgggctgccagattccccgggaaaatactgtgggagacaacatcaaaggctttgctgaagtcttggcagactacatcagcagtcttttccttatctacaaggctggtcacttgatcatagaagattaggttggtcaagcaggacctgtctttcatgaacccattctgcctgaccctgatgccccggctgttccacacacgtgtgatctcactcaagataatctgttccataaccttccctggcactgaggtcagacrgacaggcctgtagttctccacatcatccttacaacccttcttgtatatggggatcacactggtaagcctccagtcctctgggacctctttatggtttaccaggaacactgatagragtggaaagtggcttggcaatcaccttctctagctccctcagcatccttgagtggatctcatctggtccyatggacttgttacagtctagatggagtagaaggtctctaactgtctccacctgaaytgtgggggatttattctgctccctgtcccagacttccaagtaagggggtagagtactct

SEQ ID NO: 52891 - DNA, 600 bp, Chicken  19866894303766_2
acatcagcagtcttttccttatctacaaggctggtcacttgatcatagaagattaggttggtcaagcaggacctgtctttcatgaacccattctgcctgaccctgatgccccggctgttccacacacgtgtgatctcactcaagataatctgttccataaccttccctggcactgaggtcagacrgacaggcctgtagttctccacatcatccttacaacccttcttgtatatggggatcacactggtaagcctccagtcctctgggacctctttatggtttaccaggaacactgatagragtggaaagtggcttggcaatcaccttctctagctccctcagcatccttgagtggatctcatctggtccyatggacttgttacagtctagatggagtagaaggtctctaactgtctccacctgaaytgtgggggatttattctgctccctgtcccagacttccaagtaagggggtagagtactctgaggataactggtatgattattaaagacagatgtaaagaaggcattgagaacaacagccatttcctttacctcagtgattgtgctccctgctgcatcctgtaaagggcaaagatt

SEQ ID NO: 52892 - DNA, 600 bp, Chicken  19866894303766_3
acctgtctttcatgaacccattctgcctgaccctgatgccccggctgttccacacacgtgtgatctcactcaagataatctgttccataaccttccctggcactgaggtcagacrgacaggcctgtagttctccacatcatccttacaacccttcttgtatatggggatcacactggtaagcctccagtcctctgggacctctttatggtttaccaggaacactgatagragtggaaagtggcttggcaatcaccttctctagctccctcagcatccttgagtggatctcatctggtccyatggacttgttacagtctagatggagtagaaggtctctaactgtctccacctgaaytgtgggggatttattctgctccctgtcccagacttccaagtaagggggtagagtactctgaggataactggtatgattattaaagacagatgtaaagaaggcattgagaacaacagccatttcctttacctcagtgattgtgctccctgctgcatcctgtaaagggcaaagattttccttagtcctcttcatactgttaatatatttgtaagaaaaaaaatggttctcttttactacagtggcc

SEQ ID NO: 52893 - DNA, 600 bp, Chicken  19866894303766_4
cgtgtgatctcactcaagataatctgttccataaccttccctggcactgaggtcagacrgacaggcctgtagttctccacatcatccttacaacccttcttgtatatggggatcacactggtaagcctccagtcctctgggacctctttatggtttaccaggaacactgatagragtggaaagtggcttggcaatcaccttctctagctccctcagcatccttgagtggatctcatctggtccyatggacttgttacagtctagatggagtagaaggtctctaactgtctccacctgaaytgtgggggatttattctgctccctgtcccagacttccaagtaagggggtagagtactctgaggataactggtatgattattaaagacagatgtaaagaaggcattgagaacaacagccatttcctttacctcagtgattgtgctccctgctgcatcctgtaaagggcaaagattttccttagtcctcttcatactgttaatatatttgtaagaaaaaaaatggttctcttttactacagtggccaggttgaatttaagctggacttttgctgttctaattttcaccctgcatatcctagc

SEQ ID NO: 52894 - DNA, 600 bp, Chicken  19866894303767_1
ataaaatattacatagaaacacaagcagtgatggaactgctcaaagcatagataatataggattatattaattattgcatgatctaccttgaagaaaatgtaagtatgcattcaatattcattcttagcatctcctgaaaaacacttcagattcatgagagtcagttctttttcctgcagcagggccatatcctccagcatttgatggcaacataaattataaggttctttaattattcagatccacccaggctggccagcaccttcattatcttctcatgcagagcaccctccaacttrgagcaaagcctgtctgtacaggagcaggttgtgtagacaagccagaagaattctgtttttgtgggcaaactgacatagttgctgwcttctccatctacacaaaatcagccaccccctggtcactgcttttatcccagttattaacttaaattaacctttcatatagaactgtgaagaatatttgcatttgattctaaaatctctctgatatcaaaggaaggaaaatatcttaggcagggacaagatcaggcactgaaagcatttgacttgaagtaaaaattcaagatgttgggcctgatt

SEQ ID NO: 52895 - DNA, 600 bp, Chicken  19866894303767_2
accttgaagaaaatgtaagtatgcattcaatattcattcttagcatctcctgaaaaacacttcagattcatgagagtcagttctttttcctgcagcagggccatatcctccagcatttgatggcaacataaattataaggttctttaattattcagatccacccaggctggccagcaccttcattatcttctcatgcagagcaccctccaacttrgagcaaagcctgtctgtacaggagcaggttgtgtagacaagccagaagaattctgtttttgtgggcaaactgacatagttgctgwcttctccatctacacaaaatcagccaccccctggtcactgcttttatcccagttattaacttaaattaacctttcatatagaactgtgaagaatatttgcatttgattctaaaatctctctgatatcaaaggaaggaaaatatcttaggcagggacaagatcaggcactgaaagcatttgacttgaagtaaaaattcaagatgttgggcctgatttaggcaaggatataatccaggcacagacttcactttgtacatgtaagcagcctcctttcagacacagcaaagtaaaagcaagtag

SEQ ID NO: 52896 - DNA, 600 bp, Chicken  19866894303772_1
ctcattaaccactatggcaagaggttagctgactgctggcacttccacatctgtgcaaatgtgtcccatgtgtcttgacaaagctgtctgctagctcaaaaggccattgctcatggcacacagctacttctccatgcaaaggtcccagttcctctgttgtgcaatatgtctgatgtactaacatcacagagacagtcattatttccttagcatgcagaggacagtcaggtattttatggagtaatgactttactgcaatgaatttactccaactctgagaagaaaatagcaacatgtaaytccactgcaaaaatacaaaaatygcaacagcatccatagactgagcagccattacagagctccccttatgaagaagatggaaattatggcattactctggaattgtgctgctgggcatcagtcaacaggagtgcctacttgtgctttatgcgagtatgcaaggttaggcacctggtttgaaaacgttcatctcarttctagccagttacgctttctgctctttccttacagacatttactgatgggtttccctttaaagtgtctagagtcattggtccagtttgtcctgccaggctgggt

SEQ ID NO: 52897 - DNA, 600 bp, Chicken  19866894303772_2
gttagctgactgctggcacttccacatctgtgcaaatgtgtcccatgtgtcttgacaaagctgtctgctagctcaaaaggccattgctcatggcacacagctacttctccatgcaaaggtcccagttcctctgttgtgcaatatgtctgatgtactaacatcacagagacagtcattatttccttagcatgcagaggacagtcaggtattttatggagtaatgactttactgcaatgaatttactccaactctgagaagaaaatagcaacatgtaaytccactgcaaaaatacaaaaatygcaacagcatccatagactgagcagccattacagagctccccttatgaagaagatggaaattatggcattactctggaattgtgctgctgggcatcagtcaacaggagtgcctacttgtgctttatgcgagtatgcaaggttaggcacctggtttgaaaacgttcatctcarttctagccagttacgctttctgctctttccttacagacatttactgatgggtttccctttaaagtgtctagagtcattggtccagtttgtcctgccaggctgggtggctcctggtggcccaagatctt

SEQ ID NO: 52898 - DNA, 434 bp, Chicken  19866894303772_3
tcattatttccttagcatgcagaggacagtcaggtattttatggagtaatgactttactgcaatgaatttactccaactctgagaagaaaatagcaacatgtaaytccactgcaaaaatacaaaaatygcaacagcatccatagactgagcagccattacagagctccccttatgaagaagatggaaattatggcattactctggaattgtgctgctgggcatcagtcaacaggagtgcctacttgtgctttatgcgagtatgcaaggttaggcacctggtttgaaaacgttcatctcarttctagccagttacgctttctgctctttccttacagacatttactgatgggtttccctttaaagtgtctagagtcattggtccagtttgtcctgccaggctgggtggctcctggtggcccaagatctttggtct

SEQ ID NO: 52899 - DNA, 599 bp, Chicken  19866894303774_1
  misc_feature (1)..(65): n is any nucleotide
nnnnnnnnnnnnnnnnnnnnnnnnnnnnnnnnnnnnnnnnnnnnnnnnnnnnnnnnnnnnnnnnnaagatacacttgtgactattgcttcttgaaggttctgatgaagacagaaatttaacagaaggcatcacagtataaatatagtgatataagggaagaaaagtctgcttctgatctcagcctctcaaaatactgcattaaagatttaaatgcagcaagggcaatggctttagtttcacaaattattacacatttgcaaaatgaaacaaaattctgattggtagggaaaagaagacakggctaaaaatgctgccctagtgcagctcaccatactcaaggatggtaacaaagcactggtctcagagcacactgagatgcaaatcggtttgcccaaagttcttcatttggaaatatgcacccaccaaatacccagacatgcgacactgtgaatcatttctccaacagctgcctttaaaaggcatctttctataaacagagaagagctgttgcattaggagaaacacaatcagttctctgtgatttatgattgttcagtgcttttcattatagaagctttcagccagttgcccaagccat

SEQ ID NO: 52900 - DNA, 600 bp, Chicken  19866894303781_1
agtagttgtcatttcaaatagtttcatcagcagactcctggtgtagagagttcatgagagatttctgtggttactcttctaagtcgagagttctttgttctttgatacatacgaaatggaagtactaaatttgtgctgtgtaaatggttattttacttgggacagtagaatgggattatctgtgttgttgatgtttaatgtgcatgctaactggaatagtacattattttattatatgattttgtgtacctagacctagaagttgtcactggaattcctgctgaagttccacaaagaagrgaagctgtgaccagagagggacgacatctctgttttcaagtacagaatccttcaggaacagcaatatcaaccctgtgctacataagcagaagcaatctgcttgttgtgggtttttcagatggctacctgtcactatggaatatgaaaactttgaagcgggagtaagtaagcttttatgcatggctaagtctggacttgtagggatctcagattttaacacaaggaaatatgttaaagagaactttttcagggactgaaattcttcagcgtaatcatggaatgtttagaaattctcttctg

SEQ ID NO: 52901 - DNA, 600 bp, Chicken  19866894303787_1
gtttagccatgtgaagtttattctcaacgtgcaactgctactgaattaaggaagagacgtttttggattatggtctgttccatggtcacatgaccaatatcaaaacatctgtgttataaaaggaaccaaactaccaccacatccaaaattcaatcaaagatactaagcagcaacatcctgctctcagctctggtcagtttctgtaaggcgctggttgcacagcaccatgtataaccagacccttttactccacacacaaaaacaatttggaaagacctgtgacatctacacccagactgwgagattacaaagttctacccacccgagtattctgaaatattgaagattaagaactacctactycccctagttcaggttttgatatatgtyctaggttgaccacgtacctcaaggttttctaacacacatcttcttcagagaactcacatggacacagccctagctggactcacaccagagcacagttttacaggtctgctatgaccacaaagtgacacccaaagccaagcctcagctttgcagggaaagctcttaggaacgcagatgccaaacacaatgcaaatccattcctaaatcaca

SEQ ID NO: 52902 - DNA, 600 bp, Chicken  19866894303787_2
tggattatggtctgttccatggtcacatgaccaatatcaaaacatctgtgttataaaaggaaccaaactaccaccacatccaaaattcaatcaaagatactaagcagcaacatcctgctctcagctctggtcagtttctgtaaggcgctggttgcacagcaccatgtataaccagacccttttactccacacacaaaaacaatttggaaagacctgtgacatctacacccagactgwgagattacaaagttctacccacccgagtattctgaaatattgaagattaagaactacctactycccctagttcaggttttgatatatgtyctaggttgaccacgtacctcaaggttttctaacacacatcttcttcagagaactcacatggacacagccctagctggactcacaccagagcacagttttacaggtctgctatgaccacaaagtgacacccaaagccaagcctcagctttgcagggaaagctcttaggaacgcagatgccaaacacaatgcaaatccattcctaaatcacagttaaaagttacttcaaaagcagctgatagctaccctgctcctcacagaaataataaacaatg

SEQ ID NO: 52903 - DNA, 600 bp, Chicken  19866894303787_3
tgaccaatatcaaaacatctgtgttataaaaggaaccaaactaccaccacatccaaaattcaatcaaagatactaagcagcaacatcctgctctcagctctggtcagtttctgtaaggcgctggttgcacagcaccatgtataaccagacccttttactccacacacaaaaacaatttggaaagacctgtgacatctacacccagactgwgagattacaaagttctacccacccgagtattctgaaatattgaagattaagaactacctactycccctagttcaggttttgatatatgtyctaggttgaccacgtacctcaaggttttctaacacacatcttcttcagagaactcacatggacacagccctagctggactcacaccagagcacagttttacaggtctgctatgaccacaaagtgacacccaaagccaagcctcagctttgcagggaaagctcttaggaacgcagatgccaaacacaatgcaaatccattcctaaatcacagttaaaagttacttcaaaagcagctgatagctaccctgctcctcacagaaataataaacaatgaaaaatgtgaggcacgcatgtggctga

SEQ ID NO: 52904 - DNA, 599 bp, Chicken  19866894303789_1
  misc_feature (1)..(255): n is any nucleotide
nnnnnnnnnnnnnnnnnnnnnnnnnnnnnnnnnnnnnnnnnnnnnnnnnnnnnnnnnnnnnnnnnnnnnnnnnnnnnnnnnnnnnnnnnnnnnnnnnnnnnnnnnnnnnnnnnnnnnnnnnnnnnnnnnnnnnnnnnnnnnnnnnnnnnnnnnnnnnnnnnnnnnnnnnnnnnnnnnnnnnnnnnnnnnnnnnnnnnnnnnnnnnnnnnnnnnnnnnnnnnnnnnnnnnnnnnnnnnnnnnnnnnnnnnnnnnnnaaaaataaaacagctctgagtttattttctaagtaggaaacttasagaacacrtcctgcctgagatgccatcatgttaggcatgtggtttgtgaccaagggaatttactaagaagaatttacaaacttgcagagatgcatacatccttatcataacwgtgcaaaagtctaatgaaatcttgaactaatagtacataaatcatttcactcaagccgtaaatctgaaggtatagaagtgtagtatcataataaaggttggattcagaggttggggtggtggtggtggtgcttttttaatrtcttcacgggagctgtgtccagctcctcagctggtrtatcctcccc

SEQ ID NO: 52905 - DNA, 599 bp, Chicken  19866894303789_2
  misc_feature (1)..(247): n is any nucleotide
nnnnnnnnnnnnnnnnnnnnnnnnnnnnnnnnnnnnnnnnnnnnnnnnnnnnnnnnnnnnnnnnnnnnnnnnnnnnnnnnnnnnnnnnnnnnnnnnnnnnnnnnnnnnnnnnnnnnnnnnnnnnnnnnnnnnnnnnnnnnnnnnnnnnnnnnnnnnnnnnnnnnnnnnnnnnnnnnnnnnnnnnnnnnnnnnnnnnnnnnnnnnnnnnnnnnnnnnnnnnnnnnnnnnnnnnnnnnnnnnnnnnnnnaaaaataaaacagctctgagtttattttctaagtaggaaacttasagaacacrtcctgcctgagatgccatcatgttaggcatgtggtttgtgaccaagggaatttactaagaagaatttacaaacttgcagagatgcatacatccttatcataacwgtgcaaaagtctaatgaaatcttgaactaatagtacataaatcatttcactcaagccgtaaatctgaaggtatagaagtgtagtatcataataaaggttggattcagaggttggggtggtggtggtggtgcttttttaatrtcttcacgggagctgtgtccagctcctcagctggtrtatcctccccaatctctg

SEQ ID NO: 52906 - DNA, 599 bp, Chicken  19866894303789_3
  misc_feature (1)..(143): n is any nucleotide
nnnnnnnnnnnnnnnnnnnnnnnnnnnnnnnnnnnnnnnnnnnnnnnnnnnnnnnnnnnnnnnnnnnnnnnnnnnnnnnnnnnnnnnnnnnnnnnnnnnnnnnnnnnnnnnnnnnnnnnnnnnnnnnnnnnnnnnnnnnnnnnaaaaataaaacagctctgagtttattttctaagtaggaaacttasagaacacrtcctgcctgagatgccatcatgttaggcatgtggtttgtgaccaagggaatttactaagaagaatttacaaacttgcagagatgcatacatccttatcataacwgtgcaaaagtctaatgaaatcttgaactaatagtacataaatcatttcactcaagccgtaaatctgaaggtatagaagtgtagtatcataataaaggttggattcagaggttggggtggtggtggtggtgcttttttaatrtcttcacgggagctgtgtccagctcctcagctggtrtatcctccccaatctctgactgtgcattcattaacgtaaaacttacttcatgcactttgagcatgaaataaaacagaaattcaataccgtactcattttagatccctatttcaagttgttta

SEQ ID NO: 52907 - DNA, 599 bp, Chicken  19866894303789_4
  misc_feature (1)..(2): n is any nucleotide
nnaaaaataaaacagctctgagtttattttctaagtaggaaacttasagaacacrtcctgcctgagatgccatcatgttaggcatgtggtttgtgaccaagggaatttactaagaagaatttacaaacttgcagagatgcatacatccttatcataacwgtgcaaaagtctaatgaaatcttgaactaatagtacataaatcatttcactcaagccgtaaatctgaaggtatagaagtgtagtatcataataaaggttggattcagaggttggggtggtggtggtggtgcttttttaatrtcttcacgggagctgtgtccagctcctcagctggtrtatcctccccaatctctgactgtgcattcattaacgtaaaacttacttcatgcactttgagcatgaaataaaacagaaattcaataccgtactcattttagatccctatttcaagttgtttatacaaaaaaaaaaaggaagttgttgatttcttcattttttttctttaaggaaaattgacaggctgctctgaagagttgctttgaggccaagttattagttttgctgcggttttaaggaaaaggtgaagacagaaggcgaaa

SEQ ID NO: 52908 - DNA, 600 bp, Chicken  19866894303789_5
aggaaacttasagaacacrtcctgcctgagatgccatcatgttaggcatgtggtttgtgaccaagggaatttactaagaagaatttacaaacttgcagagatgcatacatccttatcataacwgtgcaaaagtctaatgaaatcttgaactaatagtacataaatcatttcactcaagccgtaaatctgaaggtatagaagtgtagtatcataataaaggttggattcagaggttggggtggtggtggtggtgcttttttaatrtcttcacgggagctgtgtccagctcctcagctggtrtatcctccccaatctctgactgtgcattcattaacgtaaaacttacttcatgcactttgagcatgaaataaaacagaaattcaataccgtactcattttagatccctatttcaagttgtttatacaaaaaaaaaaaggaagttgttgatttcttcattttttttctttaaggaaaattgacaggctgctctgaagagttgctttgaggccaagttattagttttgctgcggttttaaggaaaaggtgaagacagaaggcgaaattagatcagcagtaggctaaagtcctttcccagaaca

SEQ ID NO: 52909 - DNA, 599 bp, Chicken  19866894303791_1
  misc_feature (1)..(114): n is any nucleotide
nnnnnnnnnnnnnnnnnnnnnnnnnnnnnnnnnnnnnnnnnnnnnnnnnnnnnnnnnnnnnnnnnnnnnnnnnnnnnnnnnnnnnnnnnnnnnnnnnnnnnnnnnnnnnnnnnnactacctattgctatcagttgtgacattttcagcatgaaaataaaaccaaaccaaaaaaatccccaggacactattagcccagacaagtacatgcacacacaatgaatctgcatgtttgaattgattccaaagatgaccaaaaacatgtatgaagtatacggaaactatcagtcagcagctccatwgcataattttttttttcaataaatcaaagtgttataaggatttttgctaatgatagacaacttaggtgaatgacactggatgcaagagaatggcagtagtcaaaatctgcattgggtacttatgtgagagaaaaccaaagaggcaaggagagagtatatgcttaagaccgcctagatctcctgatggcaggaggctgggaatgtccccatcccactggatgggcagccattcacaggctcccactcacctctgcaagcacagcactgcttttcctcttctactgaatcctctcctgtct

SEQ ID NO: 52910 - DNA, 599 bp, Chicken  19866894303794_1
  misc_feature (1)..(129): n is any nucleotide
nnnnnnnnnnnnnnnnnnnnnnnnnnnnnnnnnnnnnnnnnnnnnnnnnnnnnnnnnnnnnnnnnnnnnnnnnnnnnnnnnnnnnnnnnnnnnnnnnnnnnnnnnnnnnnnnnnnnnnnnnnnnnnnnncagcggtgccatcaggaagcactcagctctatttttagtgtggctctgtgagagagggcctgtgggagggcatcttccaaaggaatgcagaccatatctgttaggaggaattaatccttaggaaaccattgccctctctcaccaatgaccaggggatatttttctctctgrgctggagtttatacacagagggccgcgtgcgccgaaagaaaatcatgactcattgaatttaaggaactgttcactgaagccaaatcttccagcgctcctccctctcccttggctggctgtcccctgggcacaccaaccctctatcagcggtcacagcagtcacaaagtccttttcatttcctctgaatcggagaagtcaggctttgtcaggactgcgattccacacagctctcgtgtgtgtgtgagaggatgctggcatgctaagctcagytcatttctgtgctctgtgattctgcagt

SEQ ID NO: 52911 - DNA, 600 bp, Chicken  19866894303794_2
caatgaccaggggatatttttctctctgrgctggagtttatacacagagggccgcgtgcgccgaaagaaaatcatgactcattgaatttaaggaactgttcactgaagccaaatcttccagcgctcctccctctcccttggctggctgtcccctgggcacaccaaccctctatcagcggtcacagcagtcacaaagtccttttcatttcctctgaatcggagaagtcaggctttgtcaggactgcgattccacacagctctcgtgtgtgtgtgagaggatgctggcatgctaagctcagytcatttctgtgctctgtgattctgcagtgctgtgctccctccagctcggcacatctggcagcaggctgggctccttatctctgcccccaaaccccgctgtgttgggcacagcaacatcacagcgtcgtgtctgtcacatggctgcaacatcttccccaagggcaatcattgtgtgaatgagcattgtcctaaaagtggtcgctcttcccccaactacctacaaatacatgagctgatgcctatccaggctggaatattttgctagtgtcaaaacccacataaactcgcattctacctgtg

SEQ ID NO: 52912 - DNA, 600 bp, Chicken  19866894303794_3
tcctaaaagtggtcgctcttcccccaactacctacaaatacatgagctgatgcctatccaggctggaatattttgctagtgtcaaaacccacataaactcgcattctacctgtgtatgaagtactcttagcagcatcacctatggggaaaaatagcaagaagagaaaggcagcaataccctatcaacaaacagttgtacataaagtttgtgcattttctgttaaatgcatctccctctctttattgtgactcaaaaacgtttgaccccgcagacagcattcaccagtctgtatgaagcartgacttcagaaatgttgctgtctccctgcacgtgggagacatgttgggatgtcatgggagacatgactgggatggagctctgtgatgctgagcagacgggcctgcaaagcctgtcacaaagttatcgctgagcaaaataaataagcaaaagctgcaactggtgttggcctcagattttaaaacactgaatgactttttatggaasgcatttccatttatcagcttcacagggcatgcggtgggggtcaggttggccactcatccacagcatgaacctatatttctaattttgcatcctgc

SEQ ID NO: 52913 - DNA, 600 bp, Chicken  19866894303794_4
tttgtgcattttctgttaaatgcatctccctctctttattgtgactcaaaaacgtttgaccccgcagacagcattcaccagtctgtatgaagcartgacttcagaaatgttgctgtctccctgcacgtgggagacatgttgggatgtcatgggagacatgactgggatggagctctgtgatgctgagcagacgggcctgcaaagcctgtcacaaagttatcgctgagcaaaataaataagcaaaagctgcaactggtgttggcctcagattttaaaacactgaatgactttttatggaasgcatttccatttatcagcttcacagggcatgcggtgggggtcaggttggccactcatccacagcatgaacctatatttctaattttgcatcctgcttgttgaatcttgcctgcagttgcaaagtctttaaggaaagacttatattttcctatgtgtctgcaaaatgcctgccacartgcccgtgctctcgagatgccactgtaataataataattattattaccatgaacgtaattcccattgagagctgcatgcagcaaggcagccaagagccctgccatgagcagttttatagcctgc

SEQ ID NO: 52914 - DNA, 600 bp, Chicken  19866894303794_5
gtgatgctgagcagacgggcctgcaaagcctgtcacaaagttatcgctgagcaaaataaataagcaaaagctgcaactggtgttggcctcagattttaaaacactgaatgactttttatggaasgcatttccatttatcagcttcacagggcatgcggtgggggtcaggttggccactcatccacagcatgaacctatatttctaattttgcatcctgcttgttgaatcttgcctgcagttgcaaagtctttaaggaaagacttatattttcctatgtgtctgcaaaatgcctgccacartgcccgtgctctcgagatgccactgtaataataataattattattaccatgaacgtaattcccattgagagctgcatgcagcaaggcagccaagagccctgccatgagcagttttatagcctgctgtcaaattactggcatagtgagggtgcaagaagattggccatagagggagaagagggaagagctcttgggggaatcagacaagagtttgagctggaaggtatcccaaaggtcaacttgtcctactcccctgcaatgaacagggacaactacagctccatcaggtgctcagagccc

SEQ ID NO: 52915 - DNA, 600 bp, Chicken  19866894303796_1
ttgccttgatatggaagttcaaatatagacacacaaaaagcaactattaatgtaactgaaatgtgggaatacatcaaaaaagaaaaattctgcttgaaccagaataaagttaatgaaaacactggaggaaaatgtataactattcctaagtgttagttaataaaccattcagaaaatgtgttagtgttttaagtattaaaaactaacacactagttactggtgagttgtcggcatttttaaaaatcataggttagatttacttaagcaaaataaatatttttttctaggcttatcctacraaattatgtaagtaaagacaagattacagtaagtaaagttagaggtaaagttacagtttactgctaattattaaaaaacacactgttaaagcccttaaaaataaagtttgcactacccccatgaaaatataggcaatttgactatactgttttcacatattttagcagtggaagcagacagactgtacagcagcaatacctgcacacataccactactttttaaatgtgttttcctttgtagaacacattaaaaaaaaaagtacatgagcaactaaatactaggcagctatcacttgcag

SEQ ID NO: 52916 - DNA, 600 bp, Chicken  19866894303802_1
accgaattattatgattgaagtacagttgtgaacccaaatgttaggtatatttcaactaacttttttttctctttgttttcttctttcattcagttgagcacatgccctgcagttggcttgtggatctgctatacctgtcttgtgccatatctgagcagagctggcagctccatacagagagaacagagttattttaaaggggaatatcttctgtaggagacaaatctctattttcttttcacctctgcttgaatcctgatccatagaggtcaagagccaaccctctgggctgccattgkgaggggtcactacccccmacatttacttaagtgtttagattcrcccatggcgaaatgaatgtgtttcaatctgaaatatgttatctgattggctgtttgtttttcatactcctacwtgtccggtggttggtcacttttggtgaaggactgagaaaccagtgcctcagatctgggtttggggcagattcgctgaatcaaatgtccatgacaaactcgttgggagaagtgacaggccaatttacaatcaattgctacagacagtagaaacagctgcttcccatcctctccctttcattcact

SEQ ID NO: 52917 - DNA, 600 bp, Chicken  19866894303802_2
aagtacagttgtgaacccaaatgttaggtatatttcaactaacttttttttctctttgttttcttctttcattcagttgagcacatgccctgcagttggcttgtggatctgctatacctgtcttgtgccatatctgagcagagctggcagctccatacagagagaacagagttattttaaaggggaatatcttctgtaggagacaaatctctattttcttttcacctctgcttgaatcctgatccatagaggtcaagagccaaccctctgggctgccattgkgaggggtcactacccccmacatttacttaagtgtttagattcrcccatggcgaaatgaatgtgtttcaatctgaaatatgttatctgattggctgtttgtttttcatactcctacwtgtccggtggttggtcacttttggtgaaggactgagaaaccagtgcctcagatctgggtttggggcagattcgctgaatcaaatgtccatgacaaactcgttgggagaagtgacaggccaatttacaatcaattgctacagacagtagaaacagctgcttcccatcctctccctttcattcactgttcgagacaattttggc

SEQ ID NO: 52918 - DNA, 600 bp, Chicken  19866894303802_3
aggtatatttcaactaacttttttttctctttgttttcttctttcattcagttgagcacatgccctgcagttggcttgtggatctgctatacctgtcttgtgccatatctgagcagagctggcagctccatacagagagaacagagttattttaaaggggaatatcttctgtaggagacaaatctctattttcttttcacctctgcttgaatcctgatccatagaggtcaagagccaaccctctgggctgccattgkgaggggtcactacccccmacatttacttaagtgtttagattcrcccatggcgaaatgaatgtgtttcaatctgaaatatgttatctgattggctgtttgtttttcatactcctacwtgtccggtggttggtcacttttggtgaaggactgagaaaccagtgcctcagatctgggtttggggcagattcgctgaatcaaatgtccatgacaaactcgttgggagaagtgacaggccaatttacaatcaattgctacagacagtagaaacagctgcttcccatcctctccctttcattcactgttcgagacaattttggctaaagtggaagaaattgtaggatgc

SEQ ID NO: 52919 - DNA, 600 bp, Chicken  19866894303802_4
gcttgtggatctgctatacctgtcttgtgccatatctgagcagagctggcagctccatacagagagaacagagttattttaaaggggaatatcttctgtaggagacaaatctctattttcttttcacctctgcttgaatcctgatccatagaggtcaagagccaaccctctgggctgccattgkgaggggtcactacccccmacatttacttaagtgtttagattcrcccatggcgaaatgaatgtgtttcaatctgaaatatgttatctgattggctgtttgtttttcatactcctacwtgtccggtggttggtcacttttggtgaaggactgagaaaccagtgcctcagatctgggtttggggcagattcgctgaatcaaatgtccatgacaaactcgttgggagaagtgacaggccaatttacaatcaattgctacagacagtagaaacagctgcttcccatcctctccctttcattcactgttcgagacaattttggctaaagtggaagaaattgtaggatgcccattaacatacattgctttatttagcacatgcattttactcctctttcgtttggttctaaactaatcttcat

SEQ ID NO: 52920 - DNA, 600 bp, Chicken  19866894303805_1
acatttttctaagctttgattttgccactgtaagtggcttttgttccaaccacctacatttgtatctcagtggggtaaattacttgttagaagcaattatgttcagtgcagttcaccaagcttgtagtgtcagcacatggtgcactgagacatcattctgcctttgtaatgactgaatatggtgttgtaaactgatgtgcaagtacatttgaaactaatgcacctacatgttgttttcagttatgttgattgcacagacagctgaaggtgtgtgaatttgctcaggccaatgcttctgakcattgactaacacagtctgtattcaggtattttgtatataaagtatggattttgaggtgatgagatttatcttgctttgaacattcaaacagcctgcacatcagaagtttctgaaaagagtgtttgtcaattctgtgaataacagatcaatatgtgttcaaaatggcaaagattgcagacacaaagtaaacccacctgaaaatcagctgagcctgaatctcttgcttaattaatcttaaaagatattcctctttgcttctgttgatcttgtatgccaggctcagaatccatgattgtgct

SEQ ID NO: 52921 - DNA, 600 bp, Chicken  19866894303806_1
ccctccctatatctaacctaaatctccccctgtcttagtttcaaaccattctcccttgtcctatcactatccacccatgtaaacagtcattctccctcctgtttgtactctcccttcaagtactggaaggccacaatgaggtctcaccagagccttctcttttcccagctaaacgagcccagttcgctcaaccttttgtcataaactaaggtcagtgactgacattagtacaagagaaatgagagtcgggtataagttgttgaacactgtttagagaaaaaatgctttagatcattctastgctaaagctattgattatgttaatatccatataaatctgtctgcttattgtatgtctattcagtgctttggatgagttggtgagagagtatttttactaagacgcatgatgagatccaaagctatgttaaatgatgcagtgctctttaagttatgccatttgtgctagtataattagctaaggatctctttccagaatctctttccttgatttttttttcccaattatctttgaaggtctttttaacagttaaattttcatttatttgttgtcatttacaatatttaacataatactat

SEQ ID NO: 52922 - DNA, 600 bp, Chicken  19866894303808_1
acattcaagagctaatgcagtcacattaatgtttggaagaggaaagcatggcaaggaatggaacagagaacacatgggatttgtcttgtaagttgtttggaaaagatggttaattctacatgactttcacgcatcattgtttcatgaaaagactgttaattcttaattactttcaactttattattctatccactggtgcaaaggaaggagattgttctttgtttctaaattagaagatatattgctgttctatttaaatatcttcatatggtaaataacatagtaggaacaggtataasaaaatgtaccttaatttcacaaatgcacagttatatgtacagacttagctgtataccttatgtgattgttggtgaagtaaaaaaaaacattcctgtaaccagtgaagctgacaaaaacaatatcaaagaatatctgcgttatcttctgtggggaattctgagcccaattgccattgcgtttgtaactgtggaatggctgataaagataatacatagatgtgtgtataaatatctatgtatatttttatgtttatgtaatcagggttttgataattatctcttcctgtatagtgtttctcc

SEQ ID NO: 52923 - DNA, 599 bp, Chicken  19866894303817_1
  misc_feature (1)..(118): n is any nucleotide
nnnnnnnnnnnnnnnnnnnnnnnnnnnnnnnnnnnnnnnnnnnnnnnnnnnnnnnnnnnnnnnnnnnnnnnnnnnnnnnnnnnnnnnnnnnnnnnnnnnnnnnnnnnnnnnnnnnnnncgttttcgtacgcttacacacagttgcattaaaggaaggcagaggaatacatgcatgctgtaaaatacacaagcaaaccttatgccagaaaaatatttttcttgagcaaaacaggctgttcatagacacccatgcactgacactgaggtattgagcaccttagggtgctgtgaaggagcagmacacagccgagtctgctctgcaacaaaatgcaaattctcagcagtttgaagagctctgaactgagtcaattagaatttcaatgctactcttctgggtttacacacagatacctttagcacagggcatgcatctccctgcacgcccccagaagggatggagccacataccccagggggacaccagggctcttctgggagggcagcgtgccaggaaggccaccccgtgtccccaccctgctcaatagcacagcttgccccaaataactccccgtgtaacctattccaggagaacaaggggc

SEQ ID NO: 52924 - DNA, 600 bp, Chicken  19866894303820_1
aagagatccatctttgggaatgtctacaacacaaaggaaaaggccgagttgcttatactatacatgcaattatagcacagttaacttaactccaggaatcgattcatgatattccacctcagatgcatttaaggtaactctgtatttactgtttttgcttaaaatgcttcaaaatattttgcataaaatcaatctgtcaaaaaatacaacaacctttaaccagtaagctaaaaaatccaacaagtaaaacttacttgcattaatatcctgtttgttgccaagatcccaatgcttgagtgkggaagaacatgaagagcgagagtggaaagcctcttcatgaaagcaagagctcgctgctgggaaacttgctttctccgcttggcaagcatgacatccaggcactggagcacaatccctatgtcatcattggtaccgcctcaaaagcaaagtttgatacaaagagtaagtaatcatgaccaggagcataaaactaaatattctgctactgcctgtgcactgaaacctgagaaataacatgaaggcccaaaaggttcgagcacagcactaacgtgacccaggcgtaaccattcaccccttctt

SEQ ID NO: 52925 - DNA, 600 bp, Chicken  19866894303823_1
ttttccataaagagctcttgctagattaaaatctatgtgcagtctatacagacaactcttccatctgtgatcatctgataaaacaaggagctgaaatttaaaacccatagtatttggcaggtattctggatttactggtgagcattcacgctctccagacatctgccctaactacctgcttcatataacattgtgcccagtccttgtcccatgctcagagaggtcagcatttagctgtacagtcaagcatatctggcactctgcaacccatacctctacctttgctgtcactgtggatcrtattattctgcccaggtatttttgttcagaaaacatcatcatgaaatgttttgaaattgttatttaaaacaaacaaacatacaaaaataaagttttctctttcttcagctggaattatttgctgaattctacttgaatcactgagtgaatctggtcatgctcaaaagaaaaacattttcaaatattcaaagatacaactgcacacttagatgtgatactacggttatacatgtagaagttttctgtggcagtgtaccaacaacctgatcaaatcatccctcttctcatctcaggcaagat

SEQ ID NO: 52926 - DNA, 600 bp, Chicken  19866894303826_1
gatactgccaaatgctacacagcccatatgcacattacaaaatatggttttgctgttctcccgcagagtcatgctagattagatatttttctgttcaagcacaaagcagaacatttgtgaatataggaagccttctatttattataaattcaatctctattattgtaatgtttcaacaagttttttaacttaaatctgtcagtgtcacacgtgtgtgtgtgtgtgtgtatttattttttttcacagaattccaaatcatacctttggtgcaaggccatcaataaccccatgtgcttcagrgagtaggtaatcctttaggcgtagaaacagaagacagatttgcttccaattgtgagctcattcctaggtcaccattgaaagcagagagagaaatgtgctccaaaataaacaacagtttgaactcgaaagcatttttcttttagggtgcccggctatgcataaaggaatttttgcaaattctacttaaccgttccaaggtcttattcatttttctagggtactgtgaccacatactgactctatgacacttcttgaatgggagggcttgaaagaaatacgtaaccagatccctcrtaggtt

SEQ ID NO: 52927 - DNA, 600 bp, Chicken  19866894303826_2
ttcagrgagtaggtaatcctttaggcgtagaaacagaagacagatttgcttccaattgtgagctcattcctaggtcaccattgaaagcagagagagaaatgtgctccaaaataaacaacagtttgaactcgaaagcatttttcttttagggtgcccggctatgcataaaggaatttttgcaaattctacttaaccgttccaaggtcttattcatttttctagggtactgtgaccacatactgactctatgacacttcttgaatgggagggcttgaaagaaatacgtaaccagatccctcrtaggtttgtagtcgaagctgctctggggggcagtggtggggaacaaaaccatctctgaacaatggaaatagtaaagaccttgtcttagggagccaggcaaaactgagggactgccagatagtttcatttttcctaacctccatttctgtagtaactatgtgctagctgataacactgtgtagacttctatctatgggctttgtgaatctttttccaattacatgagatggagtttcaggtaggctgcatagaattgatgaatgacaactccaaattagttatccttaaataaagcaaatc

SEQ ID NO: 52928 - DNA, 600 bp, Chicken  19866894303828_1
tggactgggtggtcctgtgggtcttttccaaccttagtgattctatgattctaagatgactgaagggcagaatgacttttggatttaaagatttctgtgtcttgctcaaatagtaaataaagtcttccagatggcatctctgcaataaaaagtggattactgtctccgtgatctgtcagtgaacgaacacattctgtatccgacttcatctctgacttactatgaaatgtgctgccaaaatctgctctctgagaaaccgttctgtgggttgctctccaggtgggttcttggtgagcccasgtggctgcttgagcaccatggagatggatgaggcygcctgtgtgacgggtgcctgagttctgcagctgctgtgtgacttggaggtggaggcagggatgaataygaggtactctgacccgcatcctctgtgaggtactgctgggagtggtttgggcatgtgaacaaaccaaaggaacgctgtgagcagctcttctgcttttggacacgtggaatagttgaatgcaatwtgtaatggagcagcaaagcttgggaaacaaacgtgacctgtttggacaataagagaaaaaagtatttgcaaaa

SEQ ID NO: 52929 - DNA, 600 bp, Chicken  19866894303828_2
agtgattctatgattctaagatgactgaagggcagaatgacttttggatttaaagatttctgtgtcttgctcaaatagtaaataaagtcttccagatggcatctctgcaataaaaagtggattactgtctccgtgatctgtcagtgaacgaacacattctgtatccgacttcatctctgacttactatgaaatgtgctgccaaaatctgctctctgagaaaccgttctgtgggttgctctccaggtgggttcttggtgagcccasgtggctgcttgagcaccatggagatggatgaggcygcctgtgtgacgggtgcctgagttctgcagctgctgtgtgacttggaggtggaggcagggatgaataygaggtactctgacccgcatcctctgtgaggtactgctgggagtggtttgggcatgtgaacaaaccaaaggaacgctgtgagcagctcttctgcttttggacacgtggaatagttgaatgcaatwtgtaatggagcagcaaagcttgggaaacaaacgtgacctgtttggacaataagagaaaaaagtatttgcaaaacaaatatataaaacaccctcatccatactgtaaca

SEQ ID NO: 52930 - DNA, 600 bp, Chicken  19866894303828_3
gctcaaatagtaaataaagtcttccagatggcatctctgcaataaaaagtggattactgtctccgtgatctgtcagtgaacgaacacattctgtatccgacttcatctctgacttactatgaaatgtgctgccaaaatctgctctctgagaaaccgttctgtgggttgctctccaggtgggttcttggtgagcccasgtggctgcttgagcaccatggagatggatgaggcygcctgtgtgacgggtgcctgagttctgcagctgctgtgtgacttggaggtggaggcagggatgaataygaggtactctgacccgcatcctctgtgaggtactgctgggagtggtttgggcatgtgaacaaaccaaaggaacgctgtgagcagctcttctgcttttggacacgtggaatagttgaatgcaatwtgtaatggagcagcaaagcttgggaaacaaacgtgacctgtttggacaataagagaaaaaagtatttgcaaaacaaatatataaaacaccctcatccatactgtaacaataccagtatgcaaaacttccctggaagtaaaagcaaagtaaaaagttggtgctgctttaatctttat

SEQ ID NO: 52931 - DNA, 566 bp, Chicken  19866894303828_4
tgtgctgccaaaatctgctctctgagaaaccgttctgtgggttgctctccaggtgggttcttggtgagcccasgtggctgcttgagcaccatggagatggatgaggcygcctgtgtgacgggtgcctgagttctgcagctgctgtgtgacttggaggtggaggcagggatgaataygaggtactctgacccgcatcctctgtgaggtactgctgggagtggtttgggcatgtgaacaaaccaaaggaacgctgtgagcagctcttctgcttttggacacgtggaatagttgaatgcaatwtgtaatggagcagcaaagcttgggaaacaaacgtgacctgtttggacaataagagaaaaaagtatttgcaaaacaaatatataaaacaccctcatccatactgtaacaataccagtatgcaaaacttccctggaagtaaaagcaaagtaaaaagttggtgctgctttaatctttattagctgttttggctccacgaacccaagataagagccgtatctcacattctgtcaccgttatggttgtattttagaattcacgttttaatt

SEQ ID NO: 52932 - DNA, 599 bp, Chicken  19866894303841_1
  misc_feature (1)..(69): n is any nucleotide
nnnnnnnnnnnnnnnnnnnnnnnnnnnnnnnnnnnnnnnnnnnnnnnnnnnnnnnnnnnnnnnnnnnnnagtcactgctgtcagcctttttcactggagccttggcaaggactttctttgtctgcacagcttgaggaggtggtacagcactgtactgacctggagagaaacagcattcagatgcccatataacacaagcagcatgtctaagatgttatagttagaataaatcacttctgctacttggttccacttactcctctcctatacatacaaagacatcacccatataatttgaartgttacacttactccactgctacccactgcctctactgtaagtttagctaccctctaagggaatactaagagcactacagtttattgaacagagactcattcactccatcagctggaacacaacttaacagccccggatactccaaggaaaaattataacagtttaaaaaatgcagttacaagataaccaaattacaggctaattaattcccaaatcctgacagacaggaaaccttaaaagggcatctgaacagtggatatgcagacaagtaagcagagtcasaatctcccccactttc

SEQ ID NO: 52933 - DNA, 600 bp, Chicken  19866894303841_2
acccatataatttgaartgttacacttactccactgctacccactgcctctactgtaagtttagctaccctctaagggaatactaagagcactacagtttattgaacagagactcattcactccatcagctggaacacaacttaacagccccggatactccaaggaaaaattataacagtttaaaaaatgcagttacaagataaccaaattacaggctaattaattcccaaatcctgacagacaggaaaccttaaaagggcatctgaacagtggatatgcagacaagtaagcagagtcasaatctcccccactttccatcccttgctgagacaaggctgaattttaagcttagccccaaaagcacaaatggaagaagctgctatrtttctggttcrtgaaaccagcatcacttagaagtttgtgtgcagcaagatttgcctatggctatcagctgttaagtcctgctgtcctacaagaagtactctctcacatacaagcaacagtatttagcatttaccagacttcggctttttttttgcagggggcttttcatcatctgaactgtcagaagagtcttcgctacttgaactttccttggc

SEQ ID NO: 52934 - DNA, 600 bp, Chicken  19866894303841_3
agagcactacagtttattgaacagagactcattcactccatcagctggaacacaacttaacagccccggatactccaaggaaaaattataacagtttaaaaaatgcagttacaagataaccaaattacaggctaattaattcccaaatcctgacagacaggaaaccttaaaagggcatctgaacagtggatatgcagacaagtaagcagagtcasaatctcccccactttccatcccttgctgagacaaggctgaattttaagcttagccccaaaagcacaaatggaagaagctgctatrtttctggttcrtgaaaccagcatcacttagaagtttgtgtgcagcaagatttgcctatggctatcagctgttaagtcctgctgtcctacaagaagtactctctcacatacaagcaacagtatttagcatttaccagacttcggctttttttttgcagggggcttttcatcatctgaactgtcagaagagtcttcgctacttgaactttccttggcaggtttggttttccctggacacgactgtgcagctacaggtttgggcacagctttcttgggaacagccttaacatgaaaagaaata

SEQ ID NO: 52935 - DNA, 600 bp, Chicken  19866894303841_4
gtttattgaacagagactcattcactccatcagctggaacacaacttaacagccccggatactccaaggaaaaattataacagtttaaaaaatgcagttacaagataaccaaattacaggctaattaattcccaaatcctgacagacaggaaaccttaaaagggcatctgaacagtggatatgcagacaagtaagcagagtcasaatctcccccactttccatcccttgctgagacaaggctgaattttaagcttagccccaaaagcacaaatggaagaagctgctatrtttctggttcrtgaaaccagcatcacttagaagtttgtgtgcagcaagatttgcctatggctatcagctgttaagtcctgctgtcctacaagaagtactctctcacatacaagcaacagtatttagcatttaccagacttcggctttttttttgcagggggcttttcatcatctgaactgtcagaagagtcttcgctacttgaactttccttggcaggtttggttttccctggacacgactgtgcagctacaggtttgggcacagctttcttgggaacagccttaacatgaaaagaaatacacattaaaaa

SEQ ID NO: 52936 - DNA, 425 bp, Chicken  19866894303843_1
ggcaaactgcattcatatctcataggattaatcctgaatgctgaccgacagtttaggtaggtaaatgtgctatattatgatccataaaaaaaacagagcaaaagttttgcacggccagagttccttctggaggtactcctgcaagggcctcgtaagcaattttggagttatattgaaatgtatgctcctcttggtttaactacatgataaaatcactggcttaaattatgttttaatagagaatatccatgcttccaatacataggtagcatctattaaaaatgaaggtatttttgcttyttgatttggtatgaaagtctcattatctaaaatcttttaatcttgtttaagtctaattacagacagactcagctgtaaatacaaacaaatatatatttttagcatagttttgttttttttttttt

SEQ ID NO: 52937 - DNA, 600 bp, Chicken  19866894303845_1
ctctgatgaattttttcctagatttttcatgggaaaatgacaaaataaacccccaaggttatttttttgtcagagaaatttatgggcctttgaaaactgtggaagttttgtttcttcatcctaaacctgagaaacatactaaaaggaggtcaatgaaaacgacttctattttatttttttaaagcagggaagagcaacagtattttaataccatttttttccccagccagcttggctgctttttcaccaagccattgtaaaaagcctcagaagagaatgaaaaccccatgctttggtcgyaccaaagctagctgccttgtaagtaagtcccattcaaacagcctggtgatgatgccacagtgaagatggccagactccttcagctatcagctcctgtgaacaagtcttggggtttgggacccagtgggattccttggcacagcatttgatcccagtttgcgcacgggccccacatcccttccacatctctgggggaaaggagatgggaagcaggcagggaagctgccaggagcacatggagcagggactggtttctgctcctcatctgctccatgcatcttcctccacagaaaatactgc

SEQ ID NO: 52938 - DNA, 600 bp, Chicken  19866894303848_1
tagatagctgtgccatgtagtgagtagcacttaattcagcaggtgcaatgactatgggtaaattaattaaagacatattttcatagggaacatttgcttcttttaagatagttctcacaacattactacgtaatcgcaaaaaatgtattagtttcagaaaccagggagattattgtgcatatcttacacatttttagctagatatataaaatgtattattaccattgttgaaaaatgggtagaatctgcttcattataaatacaaggcagcaggataaaggttatccattcagacatacygatgacaattgtgactctgcagtgcttttaaaataactttaacatagcacaagctgctgctgagatacatgaccctctgcctttgcttctgcagagcttgcagtctctcattccctcacctgagggtgcaggcagttgatgaactggaattggataaaaccgtagaagcgttttaaaattaatccagagcatcaaataaaacagacaggagatattcagctacataaaggtaaaacccacagctgtaatgctcaacacaccttgccaggcatgtcttggggcagaggcagaactgtgatt

SEQ ID NO: 52939 - DNA, 600 bp, Chicken  19866894303850_1
gcttctacaagctcaacccacctctgccattcctagaaacagctgatttgtgtcatgctgacagcacgtttcatgtgtcacagactctgcaaggagttttcatcaaaggctcttccaacacgttttccactgaagaagtcaagaagagctttggtttatgctttgcccatccacccagtacccttctggtgcccaatgtcctctgaatgctggtgagagctacggagcgtggatcatcacatgcactcagtgtattcatctcacagctcccaaaaagtccttcccagctcatagggaatkacctgtctatattaggaggaaatcacactgttttgccaaactgtgctctgttcaagacatcaggtcttactgtccctttcctgcctggcaatcccttttacctgccctggtcccactggctgtgctgggatttcccaaaatattttgagataaatgtagatgagacccagagagagaagacartgtctgtgccgcagcaagraagcccatggctgtatgtcatacagcccttgcagtgggcagcgcagtatatttttactcattaaatcaaagtggctgctccttgcccttcaagtcccc

SEQ ID NO: 52940 - DNA, 599 bp, Chicken  19866894303850_2
ttctggtgcccaatgtcctctgaatgctggtgagagctacggagcgtggatcatcacatgcactcagtgtattcatctcacagctcccaaaaagtccttcccagctcatagggaatkacctgtctatattaggaggaaatcacactgttttgccaaactgtgctctgttcaagacatcaggtcttactgtccctttcctgcctggcaatcccttttacctgccctggtcccactggctgtgctgggatttcccaaaatattttgagataaatgtagatgagacccagagagagaagacartgtctgtgccgcagcaagraagcccatggctgtatgtcatacagcccttgcagtgggcagcgcagtatatttttactcattaaatcaaagtggctgctccttgcccttcaagtccccggagagcaactattcttgataacagccagtccccacagactcattaagctttcttgaagctgtttgcagaggcagggtgctaatctatgaagataagaagtcaaacctttcactgcgaggccattttttactacttgcctcgtgctctccatgtaatttcatcaaaggccaaaacgaaaaac

SEQ ID NO: 52941 - DNA, 580 bp, Chicken  19866894303850_3
ctgaatgctggtgagagctacggagcgtggatcatcacatgcactcagtgtattcatctcacagctcccaaaaagtccttcccagctcatagggaatkacctgtctatattaggaggaaatcacactgttttgccaaactgtgctctgttcaagacatcaggtcttactgtccctttcctgcctggcaatcccttttacctgccctggtcccactggctgtgctgggatttcccaaaatattttgagataaatgtagatgagacccagagagagaagacartgtctgtgccgcagcaagraagcccatggctgtatgtcatacagcccttgcagtgggcagcgcagtatatttttactcattaaatcaaagtggctgctccttgcccttcaagtccccggagagcaactattcttgataacagccagtccccacagactcattaagctttcttgaagctgtttgcagaggcagggtgctaatctatgaagataagaagtcaaacctttcactgcgaggccattttttactacttgcctcgtgctctccatgtaatttcatcaaaggccaaaacgaaaaac

SEQ ID NO: 52942 - DNA, 600 bp, Chicken  19866894303856_1
tcagaaggggtgccactgtggctttggctctgctctgatgctgcaatgcagggatgaaatattaatgtactttgtggaaggagggattagcttgtccaacgcttcactgcatgctgcctcattgtgtttgcatgggtcagatgttcagcgccaatctcctcaacagcgcaagctatactcacctctctgcttctacagctgtaagtgaatgctgcccctgtcatatgctggcccccctgtcccatcagggtatcagggaactgccctcttcccttctgcaggaagcagatcaggaggacragatagtgtctatctatgttggtcaaagacgagggtcgtacctgctttggctgatgccgctctgctcgctggtccctgggctggggctgctgcctgtgcagtggtctgtacaacatacttttcaggtatttatagaggttgcttttcaggtataagggattataagtaacttccacttctaagctattcagggcactctgctcggacagaaaaaagaacctggtggcaattagatgtgacaagtggaggacttatttttattatcattattattagtggctgtctttttttttcttttct

SEQ ID NO: 52943 - DNA, 600 bp, Chicken  19866894303857_1
caagcagcaataaaatattttgaaaaggacttttaatttgcaatcaatccattggcattacaggcattcagttgtcgatttcattctagtttttgtatgccaaagtaacacctctgtgcaatggaaagcttttaaaaaatatttgtacaacactctgatgttcctattgaagagttagtatgagtctcttctgtctttatattcaagatatagaattatgaatggaatcatcagcttacttgttagggtgatagtaagcattcaggtgataatattggaagtcatgcaaaactctgtacrgttttaggttgagttctcagaatgctgattgtacaaatgatgcaatgggaaattgtaggaacagtgtttttaatagtaattattaataggcaaattatacagtgtaagcagtacagcagggtgttttcatactaaatgctgttactcctctatcttgtacaccagcaggtactctatcagtaacatcactgggaaaaggaaaacaaaactacttggttttgtttgtttgtttgtttgttttgctgttcttagaatcatcacagaaaaggatcaaatatggaaaatgtgaaatctttttgt

SEQ ID NO: 52944 - DNA, 599 bp, Chicken  19866894303875_1
  misc_feature (1)..(151): n is any nucleotide
nnnnnnnnnnnnnnnnnnnnnnnnnnnnnnnnnnnnnnnnnnnnnnnnnnnnnnnnnnnnnnnnnnnnnnnnnnnnnnnnnnnnnnnnnnnnnnnnnnnnnnnnnnnnnnnnnnnnnnnnnnnnnnnnnnnnnnnnnnnnnnnnnnnnnnnttgctgctgctgtaccttagaagcccctcagcagtatatgccacttgtgggtgtaagcgagtggccctgtttgcaggtaagctttctcatgttttgcactgggattcagactgaaataatggctttcagtggctgtagaatcctccatyctcccccccaaaatatcttcatatgcacrcaggaagaaaggaattaatatttcccatcttctgatttttctaggtagcaattattttctattgtatctcttattcctgcagggtggtattaactaattaaattctgttgaaataaatgaaaggaaaacagcattttgatgttctcttcagacccagagttagagagtttttcaaagattttaggtgctaagaacctcacacatagctgtagtcacaggttcacagcaggctctggcaaagagcacctaaactgtgtgcagaaagctgca

SEQ ID NO: 52945 - DNA, 599 bp, Chicken  19866894303875_2
  misc_feature (1)..(122): n is any nucleotide
nnnnnnnnnnnnnnnnnnnnnnnnnnnnnnnnnnnnnnnnnnnnnnnnnnnnnnnnnnnnnnnnnnnnnnnnnnnnnnnnnnnnnnnnnnnnnnnnnnnnnnnnnnnnnnnnnnnnnnnnnnttgctgctgctgtaccttagaagcccctcagcagtatatgccacttgtgggtgtaagcgagtggccctgtttgcaggtaagctttctcatgttttgcactgggattcagactgaaataatggctttcagtggctgtagaatcctccatyctcccccccaaaatatcttcatatgcacrcaggaagaaaggaattaatatttcccatcttctgatttttctaggtagcaattattttctattgtatctcttattcctgcagggtggtattaactaattaaattctgttgaaataaatgaaaggaaaacagcattttgatgttctcttcagacccagagttagagagtttttcaaagattttaggtgctaagaacctcacacatagctgtagtcacaggttcacagcaggctctggcaaagagcacctaaactgtgtgcagaaagctgcactgagggctgggcaaaggtcagatgtgtt

SEQ ID NO: 52946 - DNA, 600 bp, Chicken  19866894303875_3
gtagcaattattttctattgtatctcttattcctgcagggtggtattaactaattaaattctgttgaaataaatgaaaggaaaacagcattttgatgttctcttcagacccagagttagagagtttttcaaagattttaggtgctaagaacctcacacatagctgtagtcacaggttcacagcaggctctggcaaagagcacctaaactgtgtgcagaaagctgcactgagggctgggcaaaggtcagatgtgttaattaaacagatgctcatcttgtctggagtcaaagggacaggcayagggagaagattttggggtagggagaagaaaaaaaaaaaatcagtgtctgcagtatgcagggcagctgtcattaggggctggaggcagggagctgctacgtggctatttctgcttctgtctctgggaagatttggagcagggcagccccgtggcagctcctggagtaagtgtgatgggaggcgatgggtaagctctgctctctgcagatgaggccttcctgttggctgcgtgcactgtttcttttctgcaggctgctgtgggggagtgtggttcctcattttaattcttatctccttttg

SEQ ID NO: 52947 - DNA, 600 bp, Chicken  19866894303875_4
ttcctgcagggtggtattaactaattaaattctgttgaaataaatgaaaggaaaacagcattttgatgttctcttcagacccagagttagagagtttttcaaagattttaggtgctaagaacctcacacatagctgtagtcacaggttcacagcaggctctggcaaagagcacctaaactgtgtgcagaaagctgcactgagggctgggcaaaggtcagatgtgttaattaaacagatgctcatcttgtctggagtcaaagggacaggcayagggagaagattttggggtagggagaagyaaaaaaaaaaatcagtgtctgcagtatgcagggcagctgtcattaggggctggaggcagggagctgctacgtggctatttctgcttctgtctctgggaagatttggagcagggcagccccgtggcagctcctggagtaagtgtgatgggaggcgatgggtaagctctgctctctgcagatgaggccttcctgttggctgcgtgcactgtttcttttctgcaggctgctgtgggggagtgtggttcctcattttaattcttatctccttttgagataaagatatttagggacgaatactga

SEQ ID NO: 52948 - DNA, 600 bp, Chicken  19866894303877_1
gcacggattacagccaatattattcaagaccagcttaggtccccaccatccagactggctaatacacctgaaaaaaaatgcactaggcaggagtgatttctgacacagctctttataaccgggaggaaagagcagcgagaaaaagaagagtgagcaaaacgatacacttctgctgtgctgcgtgcctgggaggttctaaaacgtccttctctctggctgagcagcacaccaagagcttcccggcccagctgggctgcagtggatgctcagggctttgcatacagctctgagcaccacacrcagctgggctgccccacttggtctggtggaagtactcctgcaggcagctgccataggatcctctgcccttccaaagattcctgctgcccagagcagtgcatttggccactgaaagtcatactgtgcacctactgcaaatggaagcgcatgaaatgcacctggcactgcatttgctgcatctctagcaggaggcactgctcctccttcatacgtctgtctgaaagcactgccctcccttgtaagcagtgcattaaggttggtagaggtttgtgcacccttctgctgtccaaaacctcctag

SEQ ID NO: 52949 - DNA, 600 bp, Chicken  19866894303879_1
tccactgtacaggcatgaattgcctggctggatggagctttgagcaacctagtctggtgggaggtgtccctgtctatagcagggggctggaactcaatcttaaaggtcctgtccaacctaagtcattctatggtcttgacaaaccctgttgaactgaaaattatttaaatgtctatatgcatccatgtctgtgtatgagacttccatttgccaacctgggatctgttaagactgttctattgatgtgttcagatgtcaacactaggtggcaacctgtgcacaaaaattctggtaacttgragkacttggaattttttctcttcattgtcctgatayagatccactgcttcaattgctttctcctttgtatagtatgcgggtattaatggtgatttgctattaggattkaagcgtgttcattggagcttgtctgtcaccttggcaaggttattaaatgttttatatatatatttgtgtagcaatatggctgtttaagtacttggcttgaattataatgagattatgtaatcagcaaaaatcttgctcggaactatttttttctactctatttatgaaatagtagtaaaactacagtagaat

SEQ ID NO: 52950 - DNA, 600 bp, Chicken  19866894303879_2
actgtacaggcatgaattgcctggctggatggagctttgagcaacctagtctggtgggaggtgtccctgtctatagcagggggctggaactcaatcttaaaggtcctgtccaacctaagtcattctatggtcttgacaaaccctgttgaactgaaaattatttaaatgtctatatgcatccatgtctgtgtatgagacttccatttgccaacctgggatctgttaagactgttctattgatgtgttcagatgtcaacactaggtggcaacctgtgcacaaaaattctggtaacttgragkacttggaattttttctcttcattgtcctgatayagatccactgcttcaattgctttctcctttgtatagtatgcgggtattaatggtgatttgctattaggattkaagcgtgttcattggagcttgtctgtcaccttggcaaggttattaaatgttttatatatatatttgtgtagcaatatggctgtttaagtacttggcttgaattataatgagattatgtaatcagcaaaaatcttgctcggaactatttttttctactctatttatgaaatagtagtaaaactacagtagaatact

SEQ ID NO: 52951 - DNA, 600 bp, Chicken  19866894303879_3
gctttgagcaacctagtctggtgggaggtgtccctgtctatagcagggggctggaactcaatcttaaaggtcctgtccaacctaagtcattctatggtcttgacaaaccctgttgaactgaaaattatttaaatgtctatatgcatccatgtctgtgtatgagacttccatttgccaacctgggatctgttaagactgttctattgatgtgttcagatgtcaacactaggtggcaacctgtgcacaaaaattctggtaacttgragkacttggaattttttctcttcattgtcctgatayagatccactgcttcaattgctttctcctttgtatagtatgcgggtattaatggtgatttgctattaggattkaagcgtgttcattggagcttgtctgtcaccttggcaaggttattaaatgttttatatatatatttgtgtagcaatatggctgtttaagtacttggcttgaattataatgagattatgtaatcagcaaaaatcttgctcggaactatttttttctactctatttatgaaatagtagtaaaactacagtagaatacttatgaagtgtctgagtttacatttaacatgttt

SEQ ID NO: 52952 - DNA, 600 bp, Chicken  19866894303879_4
ctgtccaacctaagtcattctatggtcttgacaaaccctgttgaactgaaaattatttaaatgtctatatgcatccatgtctgtgtatgagacttccatttgccaacctgggatctgttaagactgttctattgatgtgttcagatgtcaacactaggtggcaacctgtgcacaaaaattctggtaacttgragkacttggaattttttctcttcattgtcctgatayagatccactgcttcaattgctttctcctttgtatagtatgcgggtattaatggtgatttgctattaggattkaagcgtgttcattggagcttgtctgtcaccttggcaaggttattaaatgttttatatatatatttgtgtagcaatatggctgtttaagtacttggcttgaattataatgagattatgtaatcagcaaaaatcttgctcggaactatttttttctactctatttatgaaatagtagtaaaactacagtagaatacttatgaagtgtctgagtttacatttaacatgtttctttttgcagtgttctgtgtagaaggctcagtgttatgagcagtcagtcaaatgtacaaaaggtaaatcttg

SEQ ID NO: 52953 - DNA, 600 bp, Chicken  19866894303889_1
acctatacacataatgtttggggggacatctatttatcatgatttgcttcaaatactgttaattaacattaacgtaaattacacccggcatctggtacaaaggaactccttttaaacaacaagcaaaaccagtcctttaaaaacttaatagatacttagcttcaaggaagcatcaaaatgtatgttcatataaagatctgtcatgggcagctctgaaatattaaaatccagaatgaacaatattttctgcaaaactatattacatatatacaaccatactacaactacagtgtctattcrtggccagatcagaatggaagaaaataaatgttgggactaatgatggattacaaaacaaacccaagcatttggctagctacaatctactttcctacactttttcttttttttatcaagcgcctctgaagttctccacattgctaagattagattctgtgtgctagtttattggtgtaaattagattgatgttattccagaacttccctaatcaagctgacaataatatttaggcatagaatccaaggagtttgtgcttttagtggtaaattataatgaaaagaaattaataagaaagctac

SEQ ID NO: 52954 - DNA, 600 bp, Chicken  19866894303893_1
aaaccagctagggctgtaagagtagaaatgccattaattgacatttatctaaatatccacaacttctgattgtggatagcttgtgtttttacaagcgggaatggttttaaactgagacatgggaggtttaggttggatatgaggaggaagtttttcccccagagggtggtgacgcactgaacaggttgcccaaggaggctgtggatgccccatccctgcaggcattcaaggccaggctggatgtggctctgggcagcctgggctgctggttggcgaccctgcacatagcagggggttggractgggtgagcattgtggtccttttcaacccaggccattctgtgatgattctgtgactaacagtttttccagaaaaggctaaaaacgttgaatctttaattctggggggaaaaggaaacagattaaacaagaataggggaaagtgacccgagccatcagctctgccatatccagcaagtggcacagcctgcatgtgtgatttcctgccaaaaaacattgccctgcctctcctagaggaacattttgctgtgttcctcgaagggtgagggagaacaagcagtgggatctgcatggactygg

SEQ ID NO: 52955 - DNA, 600 bp, Chicken  19866894303893_2
gractgggtgagcattgtggtccttttcaacccaggccattctgtgatgattctgtgactaacagtttttccagaaaaggctaaaaacgttgaatctttaattctggggggaaaaggaaacagattaaacaagaataggggaaagtgacccgagccatcagctctgccatatccagcaagtggcacagcctgcatgtgtgatttcctgccaaaaaacattgccctgcctctcctagaggaacattttgctgtgttcctcgaagggtgagggagaacaagcagtgggatctgcatggactygggcttatctgcctcactggtggttctgaatggaygtgctgttgtgttcctggagtatcttagctgagaagcagctgcaagaagacctttacgtttaaggtacgtttctaccactctgcagtgaaggaataaacagattgttcctttctggtgggcacyctgcaagcatatgggataagggagagtccttcctgcagccagtaagcgatgtgatgggggctgggagtgggtgtgcaggtggtccaggagttaatgtgaggttgtgctaggggctgctaaaggcaggaagtcgtacaggaa

SEQ ID NO: 52956 - DNA, 600 bp, Chicken  19866894303893_3
gccattctgtgatgattctgtgactaacagtttttccagaaaaggctaaaaacgttgaatctttaattctggggggaaaaggaaacagattaaacaagaataggggaaagtgacccgagccatcagctctgccatatccagcaagtggcacagcctgcatgtgtgatttcctgccaaaaaacattgccctgcctctcctagaggaacattttgctgtgttcctcgaagggtgagggagaacaagcagtgggatctgcatggactygggcttatctgcctcactggtggttctgaatggaygtgctgttgtgttcctggagtatcttagctgagaagcagctgcaagaagacctttacgtttaaggtacgtttctaccactctgcagtgaaggaataaacagattgttcctttctggtgggcacyctgcaagcatatgggataagggagagtccttcctgcagccagtaagcgatgtgatgggggctgggagtgggtgtgcaggtggtccaggagttaatgtgaggttgtgctaggggctgctaaaggcaggaagtcgtacaggaagaaatccaacttagcttttgtgctgccacagaggc

SEQ ID NO: 52957 - DNA, 600 bp, Chicken  19866894303893_4
agctctgccatatccagcaagtggcacagcctgcatgtgtgatttcctgccaaaaaacattgccctgcctctcctagaggaacattttgctgtgttcctcgaagggtgagggagaacaagcagtgggatctgcatggactygggcttatctgcctcactggtggttctgaatggaygtgctgttgtgttcctggagtatcttagctgagaagcagctgcaagaagacctttacgtttaaggtacgtttctaccactctgcagtgaaggaataaacagattgttcctttctggtgggcacyctgcaagcatatgggataagggagagtccttcctgcagccagtaagcgatgtgatgggggctgggagtgggtgtgcaggtggtccaggagttaatgtgaggttgtgctaggggctgctaaaggcaggaagtcgtacaggaagaaatccaacttagcttttgtgctgccacagaggcaggaaaagcttttccttatgaagaacccatggctacgtctgcccattcctacagaccccaataattgagactggcgatctaaggaactaaaagcttcatggcttgtgtttctgggaagccagca

SEQ ID NO: 52958 - DNA, 600 bp, Chicken  19866894303903_1
agttcacgacttttttccagttcaagatggtggacaaataaaataccaagatatacatgctcaacaattgctattttgccaagttccctctcacagctgtatctcagccaacatacacatctctcctgtttacagagggaatacaaggcatgttataatcctatctgcttttctcttcttactaaggcagtgacatttagcagcagccaggtaaacaattttgctgatgcaacacaactgacatacttccttttgacaacccggtaacgcctatcgctgccctatcactaattcacaccrtgctgtcaaacctgttgctcttcattttctctgtgcttgaatcaacaaaaacagcttacaatacaattgtcttcccatttcctgctactcattctcaagagtgtcttgaagttttgggcttcaaaacaaggagaaacttctgtaaagtaaccttttatgttcacacraacacattacagatgattcccttgcccttcttgggaggtttagggtgtttttgttttttttccaacccccagactgaaaactcagacctggtatgattggtgactggccagctagcagagctcaaagaacttg

SEQ ID NO: 52959 - DNA, 600 bp, Chicken  19866894303903_2
cttttctcttcttactaaggcagtgacatttagcagcagccaggtaaacaattttgctgatgcaacacaactgacatacttccttttgacaacccggtaacgcctatcgctgccctatcactaattcacaccrtgctgtcaaacctgttgctcttcattttctctgtgcttgaatcaacaaaaacagcttacaatacaattgtcttcccatttcctgctactcattctcaagagtgtcttgaagttttgggcttcaaaacaaggagaaacttctgtaaagtaaccttttatgttcacacraacacattacagatgattcccttgcccttcttgggaggtttagggtgtttttgttttttttccaacccccagactgaaaactcagacctggtatgattggtgactggccagctagcagagctcaaagaacttgctttgtgaaaatactgtgcatggcaccctagaagtccctcgtaagcatcttcttgaggtggaggatgctgacctatctcaggtggtgaggtgctggaacaggttgcttggagaagctgtgggtgccccatacctggaggtgttcaaggccaggttggatggagccct

SEQ ID NO: 52960 - DNA, 600 bp, Chicken  19866894303905_1
ctacacaactgtggcagtataaggtagcagcagaaattagtcccaacattatttttttaattattttttttaggcagcaggccaacaacttttctgtttttcagtgtacctgatgtaggaacgatgcctaatattaagataaacaagttgtgcttgctttcttttttataaaagattatttctttgagccatcaaacagtgctgtttgtaagttaccaaagggtcggatactgtctgatgttaagatacggagtattttagaacggggaccatttcatatatatatactgatatttaagrtaattagctattgggattcacgtcaggcaaaaaggaataaatcagtccatatgatgctatagataagggaacaaaatttatgtttcaaattttaatctgttaagacttataagatgcagaagaggctctcagtctaaaatgattaatttgctactaatattttaaatcacaaaaagctcccactcaaatgctgttgcattaaaatctgggcagacggtattttggtcacaaaggttttgtgtgcgtttgtatgttgacacgcaaatgtactatgtctagaagatgttgctatgtctaatg

SEQ ID NO: 52961 - DNA, 600 bp, Chicken  19866894303907_1
cacacagcaggtcttctacctcacttaaggtaatcctatgttttcttttacccaaggaacagcacataaaatgacacatggagggcaagggttaagtctgaggacacatataagaatggtcaaaatgtcaaggaaaagagcagtccaggagagaagcactaacctctgtcagggagattgccaactggaggcaatttagacatgaattaaagcattcaaactaaaatcaggaagctttgtgaaatgtagattacagattaatcatagaaatgaacgtttcaaaagagctttttttgatgrgaccatagtagaggaaagaagggaacatctgtcaaaaatgtgcttgttcaataggggtcatgcctgcatgtggtcttcatatcaatctaagcagtacagaatcatagaattgtttaagttcgaaggaacctttcaaaggccatctggtccaaccccctgcaaagaacaaggacacctacagctccatcaggygctcagagccccgtccagcctgaccttgagtgtctgcaggaatggggcatccaccgcctctctgggcaacctgtgccactgcctcaacactcttacggtaagaaactt

SEQ ID NO: 52962 - DNA, 600 bp, Chicken  19866894303907_2
aatttagacatgaattaaagcattcaaactaaaatcaggaagctttgtgaaatgtagattacagattaatcatagaaatgaacgtttcaaaagagctttttttgatgrgaccatagtagaggaaagaagggaacatctgtcaaaaatgtgcttgttcaataggggtcatgcctgcatgtggtcttcatatcaatctaagcagtacagaatcatagaattgtttaagttcgaaggaacctttcaaaggccatctggtccaaccccctgcaaagaacaaggacacctacagctccatcaggygctcagagccccgtccagcctgaccttgagtgtctgcaggaatggggcatccaccgcctctctgggcaacctgtgccactgcctcaacactcttacggtaagaaacttcttccttgtttttcatctagacctccctgcctttagtttgaaacatttttcccttgtcatgtcacaacaggccctgctaaagagtctgtcccctactttcttgtagcccctgtaccacaggctatgattttaccctatctaaaagtggaatataaaagcattaaatacattcagtagttttgcagaagctca

SEQ ID NO: 52963 - DNA, 600 bp, Chicken  19866894303909_1
acccgtgctacaagcgtcctgaacaggtcaaagtccaccctcttgaagttcaagataacagttttgctagtcacccttctgacatctccaagaatagagaattctacaatttcatggttgctctgcccaagacagtccccaatctttacatctcccaccagtccttcactgttagtgaagagcaagtctagcagggcaccaccccttgtaggtgctcataccagctgcataagaaagctatcttccactcactctagaagcctcttggactgcttcctctgcgttgttgcactgattggratgggatcgctagattactggacaaccccatacagctaaatatccaatacgcaatctttaatattacacattcagatagtccaaaacattaattggaactgtactaattttaaaattgttgtagctgaaaggctgtaattcagagacggagcacagtagcccccaactgggttgtattcgtcttaactatgcaatctcagtaatagaatcatagaatcatagaatgggttgggtaagaaggtacctcaaggaccatcaggttccaatcccttgctgaaggcagggttgccaacctctaga

SEQ ID NO: 52964 - DNA, 600 bp, Chicken  19866894303909_2
tagaatgggttgggtaagaaggtacctcaaggaccatcaggttccaatcccttgctgaaggcagggttgccaacctctagatcaggtactagatctggttacccagagtcctggctttgaacatctccagagacagggcatccacatcagttatacttagcttcatttggctatttaatttgtctgatataatttattcaaaactccatataccttctatggggcacactatgtgagctagtagtgatggaatgtggatgatggacttacctgtaggagatctgtgacatcaacataaaytgggactcttaacactgcccactctggagaaaacaacctcttgcaccaactctgtggatcataaggaaatcataaaactactggcaatacctgaatctgttcagtaaaagacccaggggggctctggcaggcaaagtcaaaactgtgctcttaacattatgtttctgtggaaaacaagggatcgatcaacatggcatgactttcgttgttactcagaaaacacaaacataaactgttcaaatctctcagtgtctgctggacaaaatggatggaaatttcaagtatatgatgtttttctca

SEQ ID NO: 52965 - DNA, 600 bp, Chicken  19866894303909_3
cacaaactccagtcaatgcacagtgacaaccctatgtgctctgagttaagaaacaaagtaaagtggggggataaaaatccctattgagagttacatattataaaggcatagggaatttgtcaatctgtagaacactgccaaagaattacactccctctacagggctgctaaattccagcccgactgcttccttgcaaggcgtgacaagaatgcaaagagagcaaatatttcatttagtgatagcagaggtcataacaaactttaaggaggttgaaatgataatgatgacccaaatctacygggagaagactgggaggaacacagtgtgcaacatgcaagagaaattctcttttatgaaaaacacggtgagttggaaacagaaggagataaagagtatttctgaactcaaagttttttgcatgtttgagcctttactcgactgtcttgttgtcagtgatctaagcctcagtattcattttcagaatatggttgtatgttgaaagggatgccatggtcagrcatccactgaaggatgtgcacatttggtatgcagactacaataagaaaaaaaaatgaagaggatacacaagtcactaaatg

SEQ ID NO: 52966 - DNA, 600 bp, Chicken  19866894303909_4
agcaaatatttcatttagtgatagcagaggtcataacaaactttaaggaggttgaaatgataatgatgacccaaatctacygggagaagactgggaggaacacagtgtgcaacatgcaagagaaattctcttttatgaaaaacacggtgagttggaaacagaaggagataaagagtatttctgaactcaaagttttttgcatgtttgagcctttactcgactgtcttgttgtcagtgatctaagcctcagtattcattttcagaatatggttgtatgttgaaagggatgccatggtcagrcatccactgaaggatgtgcacatttggtatgcagactacaataagaaaaaaaaatgaagaggatacacaagtcactaaatggcagttttcatctatattactgttctgaggaaaaattatgtgcttgttagataacaaggaagcttcaaaacagrgtaaattttgtcttttttgaattattatcttccatttatggctaaaattaatgggctatctaaatgatattggtcactacttccttattgatggcttccgtagaacattaaaaaaaaaaagacaaaaccacaaacattttagtgc

SEQ ID NO: 52967 - DNA, 600 bp, Chicken  19866894303909_5
aaacagaaggagataaagagtatttctgaactcaaagttttttgcatgtttgagcctttactcgactgtcttgttgtcagtgatctaagcctcagtattcattttcagaatatggttgtatgttgaaagggatgccatggtcagrcatccactgaaggatgtgcacatttggtatgcagactacaataagaaaaaaaaatgaagaggatacacaagtcactaaatggcagttttcatctatattactgttctgaggaaaaattatgtgcttgttagataacaaggaagcttcaaaacagrgtaaattttgtcttttttgaattattatcttccatttatggctaaaattaatgggctatctaaatgatattggtcactacttccttattgatggcttccgtagaacattaaaaaaaaaaagacaaaaccacaaacattttagtgcatcagtttctgacaagaaaggggaaaagtgaattattttgatcactttgtatagccacaatttgtacaatagctttgttacagagaatctactgttttctaatttccaagtattacttggacacttacattttgcatttgagcagccttaccacc

SEQ ID NO: 52968 - DNA, 599 bp, Chicken  19866894303913_1
  misc_feature (1)..(4): n is any nucleotide
nnnncaggtaagtcagtgaaaaaagaactggaagtacggtatgctgccagatgaacagaagtaatgggaattaaagcatgcagaacaggaatgagagaagtgacagaaggaacagggtgataccaataataataaaaagaaaaaactccaaaacattgtagtggctaccaattcagtcagagtaaacccacattttctatcagaacctgacacttggtgatagagaggtgagaagggaagatccccagcagaatgtctgtgggagcagcacagcactgccatgctgcaatggccctccasccctctgagaactgtataccagaacagccttcccctctatttctccacgtccctcagtgccatctactcacaggtgctatcaaccttgtcagatgaatcctagagaagccagggctcacttccccctctcaccattccccttccaaagaaagtgctgcagttctcttgccccccaggcaaccccagttgcctctgctgcacactggtaaggacacacggcccccactgrgcagatcatgcttgtaaaagcaaacctctgctcccagctcaagttctcatttcctatccttgacatggaa

SEQ ID NO: 52969 - DNA, 600 bp, Chicken  19866894303913_2
gagaagggaagatccccagcagaatgtctgtgggagcagcacagcactgccatgctgcaatggccctccasccctctgagaactgtataccagaacagccttcccctctatttctccacgtccctcagtgccatctactcacaggtgctatcaaccttgtcagatgaatcctagagaagccagggctcacttccccctctcaccattccccttccaaagaaagtgctgcagttctcttgccccccaggcaaccccagttgcctctgctgcacactggtaaggacacacggcccccactgrgcagatcatgcttgtaaaagcaaacctctgctcccagctcaagttctcatttcctatccttgacatggaattggcattgaagagtacttttactcatcaaagtcatacaagaacacatgtgggtttgagcaactcataatgttagctcactattgttttatacaccctcccaggggacctctacctagggagagcaccctttacacactgctgtgttatttgctgtcgcctgaagaacgctgacagtcaaagaggttgctgttactaagcaaattggaatacatagaggactagatctgt

SEQ ID NO: 52970 - DNA, 599 bp, Chicken  19866894303919_1
  misc_feature (1)..(158): n is any nucleotide
nnnnnnnnnnnnnnnnnnnnnnnnnnnnnnnnnnnnnnnnnnnnnnnnnnnnnnnnnnnnnnnnnnnnnnnnnnnnnnnnnnnnnnnnnnnnnnnnnnnnnnnnnnnnnnnnnnnnnnnnnnnnnnnnnnnnnnnnnnnnnnnnnnnnnnnnnnnnnnccccccccccctcctataatggaatcttaccctgctttcttctgtcacttctattaaatgaattttaaagaatgaaaatgtactgactggaaacttcttttctgtcctttaccagaaattctgtctacaactgtaagccttwaaatacttgtatatctgtgatattcttatatactatctacatgtcgcaaattatgtccatctgagaaaattgttaatctgatcagaatgacaagcatggtatttgcaactgcaaaaggtgcacagttttgatagcagtgtgaatgtgttgcaggcacagcctctatactaattaagttagcgagaacctaattaaataaacattatgaattatatttcttataaataaaattcaaatttatttggaaatttgctctatttttgtgctcttttccacttcacactctttagtgctgcatt

SEQ ID NO: 52971 - DNA, 600 bp, Chicken  19866894303919_2
atgtgagaggtgatctgagaaataaactgctagtttaacgtccccatctgtggtgtatgtgggtgttctcgatagtcatctttcttcaactgaagccatttcaatttgaaacactgttagaagaaaaaaaattatttcagtctgagatcttcaaagcagtatgaagaaaattgttattcacaatctatattataattagtgctcatcatcatctgaaatgtactcctgtctacatctctgtggctctgctgagcaaggtacatgcaagctcacatctcaagttaacttctttcccacccycccacccccctcaggacaccctgagaacaacacttgaggttgggataatgcctaaacaacaaggattttcttcagtgtccctctggcagtatgcttgtcatattcacagacatcatgtttcatcatatatattaatttcactgtgctgtgaaactttataacccctgaggctgggagcacataggaaaagaagcagtaaactgaagtattctttggaaggaaaaggaaaagaaatccaatactctttgaagggctattgctgattggtcagttcagtttatttctccagcagtttttatg

SEQ ID NO: 52972 - DNA, 599 bp, Chicken  19866894303928_1
  misc_feature (1)..(104): n is any nucleotide
nnnnnnnnnnnnnnnnnnnnnnnnnnnnnnnnnnnnnnnnnnnnnnnnnnnnnnnnnnnnnnnnnnnnnnnnnnnnnnnnnnnnnnnnnnnnnnnnnnnnnnnncagctggggtgacaacagtttcctggtcatctaacagatgggtgcatttgaaattcacagtattaaggaaatgataagcttgggaggacgagctgcagaaggatgcaaacagtgagctctcaaaggaaggctggtatgctgaggccagggatggctatctctgacttgatcagaaattaggcaccagattcagatrtctcatattcatacacgggttgatygagtctgtgagacaagtggaatatgatagctggtacttatgttggtgaaggtaaaaggaaaacctcagtaayratactgagccacagcattagcaaaccttgggataaaagttttgcttgggatagcaaaacttttgggatccataatcagcttcctcactcaacaattcagtacaatgctgtaagcaattccaacccttttctttcacttgctacctttcccataagaagaacaagctgagtgaaccagtaggtaggattctattttaagggc

SEQ ID NO: 52973 - DNA, 599 bp, Chicken  19866894303928_2
  misc_feature (1)..(79): n is any nucleotide
nnnnnnnnnnnnnnnnnnnnnnnnnnnnnnnnnnnnnnnnnnnnnnnnnnnnnnnnnnnnnnnnnnnnnnnnnnnnnnncagctggggtgacaacagtttcctggtcatctaacagatgggtgcatttgaaattcacagtattaaggaaatgataagcttgggaggacgagctgcagaaggatgcaaacagtgagctctcaaaggaaggctggtatgctgaggccagggatggctatctctgacttgatcagaaattaggcaccagattcagatrtctcatattcatacacgggttgatygagtctgtgagacaagtggaatatgatagctggtacttatgttggtgaaggtaaaaggaaaacctcagtaayratactgagccacagcattagcaaaccttgggataaaagttttgcttgggatagcaaaacttttgggatccataatcagcttcctcactcaacaattcagtacaatgctgtaagcaattccaacccttttctttcacttgctacctttcccataagaagaacaagctgagtgaaccagtaggtaggattctattttaagggcaaccccttacttatgtacacaatac

SEQ ID NO: 52974 - DNA, 599 bp, Chicken  19866894303928_3
  misc_feature (1)..(7): n is any nucleotide
nnnnnnncagctggggtgacaacagtttcctggtcatctaacagatgggtgcatttgaaattcacagtattaaggaaatgataagcttgggaggacgagctgcagaaggatgcaaacagtgagctctcaaaggaaggctggtatgctgaggccagggatggctatctctgacttgatcagaaattaggcaccagattcagatrtctcatattcatacacgggttgatygagtctgtgagacaagtggaatatgatagctggtacttatgttggtgaaggtaaaaggaaaacctcagtaayratactgagccacagcattagcaaaccttgggataaaagttttgcttgggatagcaaaacttttgggatccataatcagcttcctcactcaacaattcagtacaatgctgtaagcaattccaacccttttctttcacttgctacctttcccataagaagaacaagctgagtgaaccagtaggtaggattctattttaagggcaaccccttacttatgtacacaatacttacataacactgttgggacatttgtatacatcctttatcataggatcaaaacgttacatttatgcccttgg

SEQ ID NO: 52975 - DNA, 599 bp, Chicken  19866894303928_4
  misc_feature (1)..(6): n is any nucleotide
nnnnnncagctggggtgacaacagtttcctggtcatctaacagatgggtgcatttgaaattcacagtattaaggaaatgataagcttgggaggacgagctgcagaaggatgcaaacagtgagctctcaaaggaaggctggtatgctgaggccagggatggctatctctgacttgatcagaaattaggcaccagattcagatrtctcatattcatacacgggttgatygagtctgtgagacaagtggaatatgatagctggtacttatgttggtgaaggtaaaaggaaaacctcagtaayratactgagccacagcattagcaaaccttgggataaaagttttgcttgggatagcaaaacttttgggatccataatcagcttcctcactcaacaattcagtacaatgctgtaagcaattccaacccttttctttcacttgctacctttcccataagaagaacaagctgagtgaaccagtaggtaggattctattttaagggcaaccccttacttatgtacacaatacttacataacactgttgggacatttgtatacatcctttatcataggatcaaaacgttacatttatgcccttggc

SEQ ID NO: 52976 - DNA, 599 bp, Chicken  19866894303931_1
  misc_feature (1)..(130): n is any nucleotide
nnnnnnnnnnnnnnnnnnnnnnnnnnnnnnnnnnnnnnnnnnnnnnnnnnnnnnnnnnnnnnnnnnnnnnnnnnnnnnnnnnnnnnnnnnnnnnnnnnnnnnnnnnnnnnnnnnnnnnnnnnnnnnnnnnactacataatgttatagtgcctttgccagtgaatggtaatgatttagaaacccaagccaagggtagaacagaagccagtctaaggattatctgctggtttttacgcttctgtgcttaatgttggaagatgggcaccactggaggtgctgctgttgctctggccacagctygcatctaattagtagagctgrgcagaaaccaacaagttcccttcatragactggagagctgctctcatcaaataattgattatcctgtttattatcctgtttatagctgttaggagtggagaaaacagccagatcccgagatgacctgttttgttttaagtacaggaataaaagatgtcaaataaatagatcttttccacgaagaagacttgtttttcatcgtcagtcattaggaaatcgtggtcaacttgttgtcaaatgtgcagctgaacagccacatgaattggtgtctgcagttg

SEQ ID NO: 52977 - DNA, 599 bp, Chicken  19866894303931_2
  misc_feature (1)..(109): n is any nucleotide
nnnnnnnnnnnnnnnnnnnnnnnnnnnnnnnnnnnnnnnnnnnnnnnnnnnnnnnnnnnnnnnnnnnnnnnnnnnnnnnnnnnnnnnnnnnnnnnnnnnnnnnnnnnnnactacataatgttatagtgcctttgccagtgaatggtaatgatttagaaacccaagccaagggtagaacagaagccagtctaaggattatctgctggtttttacgcttctgtgcttaatgttggaagatgggcaccactggaggtgctgctgttgctctggccacagctygcatctaattagtagagctgrgcagaaaccaacaagttcccttcatragactggagagctgctctcatcaaataattgattatcctgtttattatcctgtttatagctgttaggagtggagaaaacagccagatcccgagatgacctgttttgttttaagtacaggaataaaagatgtcaaataaatagatcttttccacgaagaagacttgtttttcatcgtcagtcattaggaaatcgtggtcaacttgttgtcaaatgtgcagctgaacagccacatgaattggtgtctgcagttggactctatagctttttctttt

SEQ ID NO: 52978 - DNA, 599 bp, Chicken  19866894303931_3
  misc_feature (1)..(83): n is any nucleotide
nnnnnnnnnnnnnnnnnnnnnnnnnnnnnnnnnnnnnnnnnnnnnnnnnnnnnnnnnnnnnnnnnnnnnnnnnnnnnnnnnnnactacataatgttatagtgcctttgccagtgaatggtaatgatttagaaacccaagccaagggtagaacagaagccagtctaaggattatctgctggtttttacgcttctgtgcttaatgttggaagatgggcaccactggaggtgctgctgttgctctggccacagctygcatctaattagtagagctgrgcagaaaccaacaagttcccttcatragactggagagctgctctcatcaaataattgattatcctgtttattatcctgtttatagctgttaggagtggagaaaacagccagatcccgagatgacctgttttgttttaagtacaggaataaaagatgtcaaataaatagatcttttccacgaagaagacttgtttttcatcgtcagtcattaggaaatcgtggtcaacttgttgtcaaatgtgcagctgaacagccacatgaattggtgtctgcagttggactctatagctttttcttttaataggctttgaaaacccaacaacag

SEQ ID NO: 52979 - DNA, 557 bp, Chicken  19866894303931_4
ttttgttttaagtacaggaataaaagatgtcaaataaatagatcttttccacgaagaagacttgtttttcatcgtcagtcattaggaaatcgtggtcaacttgttgtcaaatgtgcagctgaacagccacatgaattggtgtctgcagttggactctatagctttttcttttaataggctttgaaaacccaacaacagcctatctttaggcaaatgataaggcaggcttcctggctgctgtcagtaggatcccagtggagtaagagttaccttaaaatctcttccgggtgatttcttcakctcaagagaaatgaattcttmtgctctttgggagggttccatagctactgttactcgttagccctcagtagtggattgtgtttagctacaccttgaaaatttgtttgtactgttctcaatgtgcagcagtaattgttactttgagatttcaaatcattcattcttcatgtctcatagaaatggtattttaaggaactacttgtgtgttacgtagcacctgtagcatacagagtgtacttgtttcagaggagattaga

SEQ ID NO: 52980 - DNA, 536 bp, Chicken  19866894303931_5
aaaagatgtcaaataaatagatcttttccacgaagaagacttgtttttcatcgtcagtcattaggaaatcgtggtcaacttgttgtcaaatgtgcagctgaacagccacatgaattggtgtctgcagttggactctatagctttttcttttaataggctttgaaaacccaacaacagcctatctttaggcaaatgataaggcaggcttcctggctgctgtcagtaggatcccagtggagtaagagttaccttaaaatctcttccgggtgatttcttcakctcaagagaaatgaattcttmtgctctttgggagggttccatagctactgttactcgttagccctcagtagtggattgtgtttagctacaccttgaaaatttgtttgtactgttctcaatgtgcagcagtaattgttactttgagatttcaaatcattcattcttcatgtctcatagaaatggtattttaaggaactacttgtgtgttacgtagcacctgtagcatacagagtgtacttgtttcagaggagattaga

SEQ ID NO: 52981 - DNA, 600 bp, Chicken  19866894303939_1
aaacttggtcatgtgtccaaacaggtgaagcagaagctccagctggggtcaatggtcttgtgaatgggataggtggccattctgaggatgtgaacaaggacgcagcaccaaaagcttctcttagactgggcttctctgagtaccggcgaatttctaatcttcttgtcctgcacctcagaaaagcagaggaaggtaagaatttgttaaaaagttggcagactgagtagcatcaccatgtgtgaatcgtctctttgctgaaacaaatgcacctggcatttacaagggaaggatgaattcttwatctttgtgtgatggtgatcttttgtccgtaatcaggggaaggttctgcaagtccttatgactgcttgttcttgaagcttcagtctgatgtgtgtgctaggctgctcgtgtaatttgtgaaccacatggatgcatagaactgaaagattaaattctcaatctatctatctcaaattaaagcatgatacagccttctgtacaaagcatgttgttctaagaatggcaggggagcctgacaggctactgtgtgtttatcttctcagcattataactgttaacacagaaacccttttcttttat

SEQ ID NO: 52982 - DNA, 600 bp, Chicken  19866894303943_1
aacttaagacgtatgaatgtggataaaatagacttgagatattagcatgtgttttattttagcctgcttcactgtaatatatttctgtaaggcaaatttagctaatatgattaatatctaaatgaattgagattttactcaacgcttctttattaactagttgatatctctctggccaaacaaaagtgtaatgctccggtgactgataccccttaaattgctttagaaagaagactcttgggccgaatagcaacccaacaattctaattttcataggaatgctgtgtaatattttatggmgcaactaatagaattgttcataaataaaacagtaaagtcagttggcagatgtttgagtgaataatcccacaagtctttccagtgagcattacgtacatgtacagtttgtattatcttcccttcttccttttttgttctatagcttcatttcccaagttttgattcggcaacgtgcttgaggttccagcccaaagcaagtgcttatctgaggtagtctaacccaaactgtgatcagtaaccatgtattcccatggttatttgaacagaagtgcttaaactattagtaactgaactagattg

SEQ ID NO: 52983 - DNA, 599 bp, Chicken  19866894303951_1
  misc_feature (1)..(14): n is any nucleotide
nnnnnnnnnnnnnntatgtaattgaaaataaatttttgcattgtggttatactggtttcattagatgtagagatctttctggtctatcagatacatagctgtaaactgtatttcttggtttatggttttatgtaggctttgcttgaagatgctgatcgttgccggcataaaatgcaaacagcttcaagtctaattagtggtctagcaggtgaaaaagagagatggacaaaacagagtaaagaatttgccttgcaaaccaagaggctagtgggtaagcatttgtccatgcccttgatcttrgaagtaaattagttgatttaattgtaatgtgtaatgaaactaaaaacatttggaatttcaaatgtttcctctgtagttcaagtttctcattgctgaaattgaggcaattgttattaattttcctgtttgaacacaactaggagaagtctgcaatcaggctgaagtttatatttaaataaatcatatttaaacaatatgatactctatttatgctatgcagaagatgttacttgcataagatgcagtacatacctgtgacactgatatttgaacttgactgatgtttgtagtcagtagtc

SEQ ID NO: 52984 - DNA, 600 bp, Chicken  19866894303951_2
ttcctctgtagttcaagtttctcattgctgaaattgaggcaattgttattaattttcctgtttgaacacaactaggagaagtctgcaatcaggctgaagtttatatttaaataaatcatatttaaacaatatgatactctatttatgctatgcagaagatgttacttgcataagatgcagtacatacctgtgacactgatatttgaacttgactgatgtttgtagtcagtagtccatgtgttagaaagtaccaataaaatttgtgtaacagaatgtacgtggaggaaatgaacactaatwttcagtcatgctgacttctaaatatagaagtcagtaattttaaatgcagttattaatgttcatgaaacttttattttgtagaagtaatttttaattttataaataaatacttggaaatgcaatggcaayggggctgttggagccagtttaactgtctgtttctggtatgaggctgttcctgcagttccctgctatcaaaatcttgccacataaaaccaatataatatgttgtattaacatattcttctcttgattcctagagttgcactgaaaaggtaatgtaaatatgttatctactgg

SEQ ID NO: 52985 - DNA, 600 bp, Chicken  19866894303951_3
tatgatactctatttatgctatgcagaagatgttacttgcataagatgcagtacatacctgtgacactgatatttgaacttgactgatgtttgtagtcagtagtccatgtgttagaaagtaccaataaaatttgtgtaacagaatgtacgtggaggaaatgaacactaatwttcagtcatgctgacttctaaatatagaagtcagtaattttaaatgcagttattaatgttcatgaaacttttattttgtagaagtaatttttaattttataaataaatacttggaaatgcaatggcaayggggctgttggagccagtttaactgtctgtttctggtatgaggctgttcctgcagttccctgctatcaaaatcttgccacataaaaccaatataatatgttgtattaacatattcttctcttgattcctagagttgcactgaaaaggtaatgtaaatatgttatctactggaatgcaccattgctttactatataatgatcctggggaaagaagctcatttgtcatctgcatgggccaaagtacattcttccatttaccatcaaaaacattaagaacttgagaagtcagagtctccatca

SEQ ID NO: 52986 - DNA, 600 bp, Chicken  19866894303951_4
agccagtttaactgtctgtttctggtatgaggctgttcctgcagttccctgctatcaaaatcttgccacataaaaccaatataatatgttgtattaacatattcttctcttgattcctagagttgcactgaaaaggtaatgtaaatatgttatctactggaatgcaccattgctttactatataatgatcctggggaaagaagctcatttgtcatctgcatgggccaaagtacattcttccatttaccatcaaaaacattaagaacttgagaagtcagagtctccatcatgaatacaatytgaacatttatatttattttttctttttctttatttatttccctttttattttccttttctttgtttcccttccttttctttttttcaggtgatgtgctgttggctacagcatttctatcctactctggtccmtttaatgaagagttccgcaatctactattaaatractggcaaaaggaaatgaaggcccggaaaattccctttggtaacaacctgaacgtcatagaaatgttgactgatgctcctacaattagtgaatggagccttcaaggattaccaaatgatgacttatccataca

SEQ ID NO: 52987 - DNA, 600 bp, Chicken  19866894303951_5
aggtaatgtaaatatgttatctactggaatgcaccattgctttactatataatgatcctggggaaagaagctcatttgtcatctgcatgggccaaagtacattcttccatttaccatcaaaaacattaagaacttgagaagtcagagtctccatcatgaatacaatytgaacatttatatttattttttctttttctttatttatttccctttttattttccttttctttgtttcccttccttttctttttttcaggtgatgtgctgttggctacagcatttctatcctactctggtccmtttaatgaagagttccgcaatctactattaaatractggcaaaaggaaatgaaggcccggaaaattccctttggtaacaacctgaacgtcatagaaatgttgactgatgctcctacaattagtgaatggagccttcaaggattaccaaatgatgacttatccatacagaatggaatcattgtcactaaagcatctcgttatcctttattaattgatccacaggcacagggtaaaatttggcttaagaacaaggaaggcaaaaatgaacttcaggtaataggaatgcttgtgatttcatag

SEQ ID NO: 52988 - DNA, 600 bp, Chicken  19866894303951_6
cattgctttactatataatgatcctggggaaagaagctcatttgtcatctgcatgggccaaagtacattcttccatttaccatcaaaaacattaagaacttgagaagtcagagtctccatcatgaatacaatytgaacatttatatttattttttctttttctttatttatttccctttttattttccttttctttgtttcccttccttttctttttttcaggtgatgtgctgttggctacagcatttctatcctactctggtccmtttaatgaagagttccgcaatctactattaaatractggcaaaaggaaatgaaggcccggaaaattccctttggtaacaacctgaacgtcatagaaatgttgactgatgctcctacaattagtgaatggagccttcaaggattaccaaatgatgacttatccatacagaatggaatcattgtcactaaagcatctcgttatcctttattaattgatccacaggcacagggtaaaatttggcttaagaacaaggaaggcaaaaatgaacttcaggtaataggaatgcttgtgatttcatagcctctagaaactctcagctgacaaaacgtggcaa

SEQ ID NO: 52989 - DNA, 600 bp, Chicken  19866894303953_1
aaaaggtaagaaggtatatttgtctatatcagcatatttataaatgagtttcctctagtttgattgcaaaaggaggaaaaaaaatacctgatattcaggacctgaacctgcaagcttggtgcttcttaactttcacaagatatattttgagattaaattgcagttgtgggttgttgggttttttttctgtattctattatcttttgccagatacgtgcacagcttactttaagagtgccctaacacccaggttacctttagaaattagttattgtttgctgaaaaatatgaatggtcttrgaagacttctaaaatgctggaactgaaaaaaactgaaaaaaaaattacctgttacttgactatattcaaatagaattccagcaagactatggaggatcaagtttaatgtctgtaataatttgaagaaaaaaaatgctttgcaatatggttagtataaggtggcctcaacttcagtgtacaatgcatttgttagactgtcctgatttagtaatcaagagactgttcaatgttttcctgaaaccgtttcttattttcagagcacacrtctaatatttatttaaagatagttttttcttttta

SEQ ID NO: 52990 - DNA, 562 bp, Chicken  19866894303953_2
tagttattgtttgctgaaaaatatgaatggtcttrgaagacttctaaaatgctggaactgaaaaaaactgaaaaaaaaattacctgttacttgactatattcaaatagaattccagcaagactatggaggatcaagtttaatgtctgtaataatttgaagaaaaaaaatgctttgcaatatggttagtataaggtggcctcaacttcagtgtacaatgcatttgttagactgtcctgatttagtaatcaagagactgttcaatgttttcctgaaaccgtttcttattttcagagcacacrtctaatatttatttaaagatagttttttctttttaaaatcagttgattttattkcaaggtgggattttcataaccccatcttctatctattttgattgtatggcagggtaatccctaagttcagccttgatttccctcccaaatgtgataaacatttgtagaatttgtgacatgtgcaggactaggttttggtgcttatgtatgtagtgcacctacacgtatggctggagacgtttccaaagggtaccctgtggagaataaa

SEQ ID NO: 52991 - DNA, 508 bp, Chicken  19866894303953_3
gaactgaaaaaaactgaaaaaaaaattacctgttacttgactatattcaaatagaattccagcaagactatggaggatcaagtttaatgtctgtaataatttgaagaaaaaaaatgctttgcaatatggttagtataaggtggcctcaacttcagtgtacaatgcatttgttagactgtcctgatttagtaatcaagagactgttcaatgttttcctgaaaccgtttcttattttcagagcacacrtctaatatttatttaaagatagttttttctttttaaaatcagttgattttattkcaaggtgggattttcataaccccatcttctatctattttgattgtatggcagggtaatccctaagttcagccttgatttccctcccaaatgtgataaacatttgtagaatttgtgacatgtgcaggactaggttttggtgcttatgtatgtagtgcacctacacgtatggctggagacgtttccaaagggtaccctgtggagaataaa

SEQ ID NO: 52992 - DNA, 600 bp, Chicken  19866894303957_1
taaatgtttcatgaggacctccagaagttatcttagatatgttatattaaagcacatacaatttaagataatctgtttcactttgtgttggaatgcagctggagagaagcatgcatgtatgcctgcagaaaactccaagaggtactattctgttgatgagtaatctttctggtacataaacaggctgcttaaagttctgaaagaagagttaatgtcttgtaataacaaaaatggagtcgatacaaattctattattctttaagcctggaaaattattctgattgagtttaagttattacyaaaaggaaagcaacaccagtgcatgtctggtttattgcttttgccttttaaaggcagargggtacagatgctgcacaatattttactatacctataatgtgaaaccacttaaatagtgtaatttctgtggcttatgacagttgggctgtaaagatcttgtaaagtctaaattcttcactgtcttgtttgcccaaatttcaggcagctgaggattctttctccttctgaggctgaatttctgatatagaactgatagagatcaggtatctgttgttctgacaccacctggttctgatctcc

SEQ ID NO: 52993 - DNA, 600 bp, Chicken  19866894303957_2
aatttaagataatctgtttcactttgtgttggaatgcagctggagagaagcatgcatgtatgcctgcagaaaactccaagaggtactattctgttgatgagtaatctttctggtacataaacaggctgcttaaagttctgaaagaagagttaatgtcttgtaataacaaaaatggagtcgatacaaattctattattctttaagcctggaaaattattctgattgagtttaagttattacyaaaaggaaagcaacaccagtgcatgtctggtttattgcttttgccttttaaaggcagargggtacagatgctgcacaatattttactatacctataatgtgaaaccacttaaatagtgtaatttctgtggcttatgacagttgggctgtaaagatcttgtaaagtctaaattcttcactgtcttgtttgcccaaatttcaggcagctgaggattctttctccttctgaggctgaatttctgatatagaactgatagagatcaggtatctgttgttctgacaccacctggttctgatctcctgactcagcagcagaatgtaagtcatgaagctgctgctgctgccttaagagccttgtct

SEQ ID NO: 52994 - DNA, 600 bp, Chicken  19866894303957_3
actcatacttttacacaactttccagcttgttttactgaggattaggtaggtcaaataacttgatgtgagatcatgtggaaaagtttaccaatattcagaactgtttagaaatatcccatgaaaaaaagatagtacatcaaatgcttttacttctttcagtaaaatgtgattcaaacaacccccccaccctcaaccattggagtactggtccagaatttattgtcagtgagttactaatctttaacatacagagttctgaagtacatactactgattatgttctaaattgtggaaaataycttggtaaggctgcaagggagttaaaactcttcatgtgggctacatcatacacttagaatgagcacactgtccttattagtatttcactgcaatgctgaggacttcagtagtactgaagtactagagacaaacaagccttagaagtacccttatgaaagggaactgagtatgtgagttcaagactagccattttaatatctttctataatcgggagtctctggggccagaggagggctactaggatgatcagaagagggctggagcagctctcctatgaggaaaggttgagggagctggg

SEQ ID NO: 52995 - DNA, 600 bp, Chicken  19866894303957_4
tagtatttcactgcaatgctgaggacttcagtagtactgaagtactagagacaaacaagccttagaagtacccttatgaaagggaactgagtatgtgagttcaagactagccattttaatatctttctataatcgggagtctctggggccagaggagggctactaggatgatcagaagagggctggagcagctctcctatgaggaaaggttgagggagctgggcttgtttagcttggaggagagaaggctttggggagacctcactgtggtcttctaatatttgaagagagcatataaamagaagggggaatgggtgtttgcaagggyggatagcgattggacaaggaggaatggttttaaacaaagagggaggtttaggttagatctgaagaggaagttaatctcatggaggggggtgaggccctggaacaggttgcccaaggaggctgtggatgccccatctctgaaggcattcaaggccaggctggatgtgactctgggcagcctggtctagtggttggtgaccctgcccacagcagggggcttgaaactcgatggtatttgaggtcctcctcaacccaggcctttctatgattcta

SEQ ID NO: 52996 - DNA, 600 bp, Chicken  19866894303957_5
cagtagtactgaagtactagagacaaacaagccttagaagtacccttatgaaagggaactgagtatgtgagttcaagactagccattttaatatctttctataatcgggagtctctggggccagaggagggctactaggatgatcagaagagggctggagcagctctcctatgaggaaaggttgagggagctgggcttgtttagcttggaggagagaaggctttggggagacctcactgtggtcttctaatatttgaagagagcatataaamagaagggggaatgggtgtttgcaagggyggatagcgattggacaaggaggaatggttttaaacaaagagggaggtttaggttagatctgaagaggaagttaatctcatggaggggggtgaggccctggaacaggttgcccaaggaggctgtggatgccccatctctgaaggcattcaaggccaggctggatgtgactctgggcagcctggtctagtggttggtgaccctgcccacagcagggggcttgaaactcgatggtatttgaggtcctcctcaacccaggcctttctatgattctataaagagataaagaagttctttaaagtt

SEQ ID NO: 52997 - DNA, 600 bp, Chicken  19866894303958_1
attcaaaagatatttggtgaagtttgaaagatacataagatttcttctacccttaagattcaggtttctttttaaaattaatgaaaatatgtttatcttaatttatttaaaatacactaatatttacctaatataaattaatgagtagctggaatatttattttactttcaacactactaacctgataatttgtaccagaatatcgttttagatatttgaaattctttctcacaagttatgtcaatccaagtatgcaagttccagtagcttctatgtgataacttttcgtaatttattaytctataatttttagggcagtgagtatttgagatgaaaacttacaaatgatgtagtattaaactgaagttacagtagaagtactgtactcagagaaggttaatatgccatccttattttgaatggcaaggtgcccagtagtggtaaattgatatataatttaaaaattatccatactgragtaagttttatctactaatttttcaatgattacattaaaatagagccaggagtccccagactagtcctaatacttttgtcagctttccagaccaggggatctggtctttaaattcctgtac

SEQ ID NO: 52998 - DNA, 600 bp, Chicken  19866894303958_2
taacctgataatttgtaccagaatatcgttttagatatttgaaattctttctcacaagttatgtcaatccaagtatgcaagttccagtagcttctatgtgataacttttcgtaatttattaytctataatttttagggcagtgagtatttgagatgaaaacttacaaatgatgtagtattaaactgaagttacagtagaagtactgtactcagagaaggttaatatgccatccttattttgaatggcaaggtgcccagtagtggtaaattgatatataatttaaaaattatccatactgragtaagttttatctactaatttttcaatgattacattaaaatagagccaggagtccccagactagtcctaatacttttgtcagctttccagaccaggggatctggtctttaaattcctgtacaaatctgaaaaagcaatcatggagaagtgaggtcgcctggtacaagagcataatgggagtgacgtaactctttcctaggatctttttttttttttttgattctgtgattattatgaaaaaatatcctaggcaagtgagagaaagttcagtatcaggtacttcaaaaccagaaaaaaaa

SEQ ID NO: 52999 - DNA, 600 bp, Chicken  19866894303958_3
atcaggtacttcaaaaccagaaaaaaaattcactataataacacttccaaaataactttgttgttaaatttgacagctcagcaccacacagctgtttgctcactcctccctcagcgtgatatggaaaagaattagtgaaaggtaacagtcacaggttcagataaggacagtttagtaggacagaaaacagagggaaagttatgagtaaataaatgaataaacaaataaataaaagaagtgacacaatgcaattgctcagaacctgcgaatcaatgccaagccagcccccaagcagcagcmtccctgccagccaacttccccagttttgttgtcttgtaggacttcatatgacatgggatatccctttggccagtttgggtcagctgtcctagtctgtctcctggcatcttgtgcctgccaggctcctcactggcagagcagtgtgagaaatccttgtcttagtataaacactgctcagcaataactaaaacactagggggtttcaacattattctaatcccaaatccaaaacagagctccataccagccactgagaagaaaattaactatattccaagtgaatccaggacacttattaaa

SEQ ID NO: 53000 - DNA, 600 bp, Chicken  19866894303967_1
ggtatcacatttggcccacaccagtacgttaacacagcccagtgctgtggttttcaagcagaacagttccgatcagtactcagtgtgtgcacctcagcagctgttacccgcatgggctggcagcactgtgttcaccagcacacctaacaagcacaaagctggctgagagcatgctgcatttctaaacgcagccccactgagtaaatatttagtttacaagcagtatattccatcacccagtgtcatacgatcatgtaataaaatagaagcagtaatcaagagctcggaatcaaagccagycaggaaacctgtaataactcctgtggctttaatttgggctgcatttaattctctggtgctccatcctccgttgctcaggatttaagtgagaacttatgcatcttctygaggcagargtatgatgcagaaagggaaaagaagaaaggacggctgcctcagcttctgtgccgcgtgcctctgctatgaagacatcagtcctgtgacacaaagctatcctggtaacttctgctgcacggaagagtgaaaatctaataatcctactgtgtcaccttctcaggtaacactcctcatggttcctgc

SEQ ID NO: 53001 - DNA, 600 bp, Chicken  19866894303967_2
ccgcatgggctggcagcactgtgttcaccagcacacctaacaagcacaaagctggctgagagcatgctgcatttctaaacgcagccccactgagtaaatatttagtttacaagcagtatattccatcacccagtgtcatacgatcatgtaataaaatagaagcagtaatcaagagctcggaatcaaagccagycaggaaacctgtaataactcctgtggctttaatttgggctgcatttaattctctggtgctccatcctccgttgctcaggatttaagtgagaacttatgcatcttctygaggcagargtatgatgcagaaagggaaaagaagaaaggacggctgcctcagcttctgtgccgcgtgcctctgctatgaagacatcagtcctgtgacacaaagctatcctggtaacttctgctgcacggaagagtgaaaatctaataatcctactgtgtcaccttctcaggtaacactcctcatggttcctgcataaaagtcgtgcttggcaatgccacttgtcacatgtaaatccagtatgcaaactgcctggtcagacacgctgctgtcacaccgagcattcggggtgtcagaccagc

SEQ ID NO: 53002 - DNA, 600 bp, Chicken  19866894303967_3
ctggcagcactgtgttcaccagcacacctaacaagcacaaagctggctgagagcatgctgcatttctaaacgcagccccactgagtaaatatttagtttacaagcagtatattccatcacccagtgtcatacgatcatgtaataaaatagaagcagtaatcaagagctcggaatcaaagccagycaggaaacctgtaataactcctgtggctttaatttgggctgcatttaattctctggtgctccatcctccgttgctcaggatttaagtgagaacttatgcatcttctygaggcagargtatgatgcagaaagggaaaagaagaaaggacggctgcctcagcttctgtgccgcgtgcctctgctatgaagacatcagtcctgtgacacaaagctatcctggtaacttctgctgcacggaagagtgaaaatctaataatcctactgtgtcaccttctcaggtaacactcctcatggttcctgcataaaagtcgtgcttggcaatgccacttgtcacatgtaaatccagtatgcaaactgcctggtcagacacgctgctgtcacaccgagcattcggggtgtcagaccagcacaggcaaa

SEQ ID NO: 53003 - DNA, 599 bp, Chicken  19866894303975_1
  misc_feature (1)..(165): n is any nucleotide
nnnnnnnnnnnnnnnnnnnnnnnnnnnnnnnnnnnnnnnnnnnnnnnnnnnnnnnnnnnnnnnnnnnnnnnnnnnnnnnnnnnnnnnnnnnnnnnnnnnnnnnnnnnnnnnnnnnnnnnnnnnnnnnnnnnnnnnnnnnnnnnnnnnnnnnnnnnnnnnnnnnnnacaaggtggtgagacaacatggctagggcaccgcacgatggaaacctgagcagaagccacctcctccttcagcgaggagcccagaggggttcagccagacccagcctactggaataccctaaaagccccaccacrtctcaccaggtcctgccactgccagcaccaaatgctagcaggaacacgtcaagtgaactggtctcctctttcccagcttctgtcctgcaagaaccaagagatggggcaagctctgacacagccccagggtggtgctccccagcagcagaagaaactccagcaacaagtaaaaatcacagaacccaagatgacagctaccaaacacaccagctagtgccctccattggtctgcccggaacgtcagcagatggagcatggccaagcccacaccatcccacaaatgggaatccctgcaaygc

SEQ ID NO: 53004 - DNA, 600 bp, Chicken  19866894303975_2
acrtctcaccaggtcctgccactgccagcaccaaatgctagcaggaacacgtcaagtgaactggtctcctctttcccagcttctgtcctgcaagaaccaagagatggggcaagctctgacacagccccagggtggtgctccccagcagcagaagaaactccagcaacaagtaaaaatcacagaacccaagatgacagctaccaaacacaccagctagtgccctccattggtctgcccggaacgtcagcagatggagcatggccaagcccacaccatcccacaaatgggaatccctgcaaygcagcccagctaccgaagggacgaggagtgctgttgatgactggcattccccagcgcagtgggagtgctggatccaggggagcacacgaggagctgtggctgaatgccatgccatgttggtgccttccacctgctttaggggaggcagttatcccccagttacgctgcagtgcccttcccacttgtactaatgacattttcagcttcttggcccaaaatgccttaggcctgtcccctcccactctgtagtgttatctgctatcaaggggacagatgcagcaagtgttttttttttaatcc

SEQ ID NO: 53005 - DNA, 600 bp, Chicken  19866894303986_1
ttatacttttctcaatgctgttgatgtccgttactgttcaatgtgtagatctgtaagaagagctccaaatattacgtgtttcagtttgatgtccctactgtagatggatgtaggctatcatagtaagtagaactgcatagtaaattctgaatgctttttccataaggagttaagtggaatgtgaacattttgctatctttctttggttaactgtaaatgcttaactgtagtctggaatagttgcatttttgtctgtctcaataaattttaatttgtctgcgactcatgattacctgtctygaattttattaagctttggggatcaaaaatacagcagcaccttgagtcagcatttaatcatgcatggaaatggatggtcttttatatttggtttatacctcttacctctgttcaatgtcatccataatctgtgaagttaatgtaaggtctctagaaagctgtattttagaagcagaaatgaaaccgaactgaaagcaatgattgtacccaaaccggaactcttcaaattaaatccagakagattttttaaggaaatgagctgtaggaaggggtgggggaaactttcagtgtwatttcctc

SEQ ID NO: 53006 - DNA, 600 bp, Chicken  19866894303986_2
gttgcatttttgtctgtctcaataaattttaatttgtctgcgactcatgattacctgtctygaattttattaagctttggggatcaaaaatacagcagcaccttgagtcagcatttaatcatgcatggaaatggatggtcttttatatttggtttatacctcttacctctgttcaatgtcatccataatctgtgaagttaatgtaaggtctctagaaagctgtattttagaagcagaaatgaaaccgaactgaaagcaatgattgtacccaaaccggaactcttcaaattaaatccagakagattttttaaggaaatgagctgtaggaaggggtgggggaaactttcagtgtwatttcctccccagtttgcagatcctcttgtctttgtctcttctgaaggaatctggggcagttttatgagcagacacagtcacaccattgcatacagcataaatgaagacaaaaatgcactgaatgcaacttggagtgggggggagggagtcactgtcacttataactgctattaaattgtagttccattttwttaactaactttaaatggccaacatcattacagtgctaattacggaactacaaat

SEQ ID NO: 53007 - DNA, 600 bp, Chicken  19866894303986_3
cctgtctygaattttattaagctttggggatcaaaaatacagcagcaccttgagtcagcatttaatcatgcatggaaatggatggtcttttatatttggtttatacctcttacctctgttcaatgtcatccataatctgtgaagttaatgtaaggtctctagaaagctgtattttagaagcagaaatgaaaccgaactgaaagcaatgattgtacccaaaccggaactcttcaaattaaatccagakagattttttaaggaaatgagctgtaggaaggggtgggggaaactttcagtgtwatttcctccccagtttgcagatcctcttgtctttgtctcttctgaaggaatctggggcagttttatgagcagacacagtcacaccattgcatacagcataaatgaagacaaaaatgcactgaatgcaacttggagtgggggggagggagtcactgtcacttataactgctattaaattgtagttccattttwttaactaactttaaatggccaacatcattacagtgctaattacggaactacaaatgttcttccatcacctttcctctgcacattcaaatatttttgtcaatattaaat

SEQ ID NO: 53008 - DNA, 600 bp, Chicken  19866894303986_4
cgaactgaaagcaatgattgtacccaaaccggaactcttcaaattaaatccagakagattttttaaggaaatgagctgtaggaaggggtgggggaaactttcagtgtwatttcctccccagtttgcagatcctcttgtctttgtctcttctgaaggaatctggggcagttttatgagcagacacagtcacaccattgcatacagcataaatgaagacaaaaatgcactgaatgcaacttggagtgggggggagggagtcactgtcacttataactgctattaaattgtagttccattttwttaactaactttaaatggccaacatcattacagtgctaattacggaactacaaatgttcttccatcacctttcctctgcacattcaaatatttttgtcaatattaaattgccacatgaaagcatgaaacacattttcaaagatgagtgcagtgatgatctcatctaacagatttagagctcatctgtccttacaccactggctgagctgtctcctctaagagcagaatctgtctagagcatacctaaaacttctgttagtttgatgttattcactggtttgtttttaatgttggtaatgc

SEQ ID NO: 53009 - DNA, 600 bp, Chicken  19866894303988_1
tcatatgcatggtttataccttccttagctactcaaccatcaatgattctggccttgggctgagtactttttgtccaccactgagcagaggctaccaagtgaccgatcagactgatgattgccactcggaagactttcatcttccaacaccacttctaatacctgccaagtcacaggcaactctgctagcaaagccaccccacggatttgggtactctgtatcagtcagggaatgttgaagtgtggctgctcataggagggaacaaacacaaggcagccaaacccagaacaggcagttamgcaagatgaaaatatatgtgtagaaatattagctgtttgaggccaagatggtggaaaggttttcttctaaaacaaagagcactacagccactttaagagcttttacattcagtattcaacaaaaatcaaggtacaaggggaaaaaatatatttctggagtacctctttggaactgtaatgaatcacacagaaggtattcaagcaagtaagcaagtgggctgactattaaaaaagaattcagtagaacagatgggaaataatgcctcaactctacatcaaatcattcccagctcagacgca

SEQ ID NO: 53010 - DNA, 600 bp, Chicken  19866894303990_1
attcctgtctgaaggacttttattgtcacatattagctctgcccgggaatttcttaaagcatttaggaattcaccattccttgcctctgatcccgtgtaagccgttgagttgcctccgcaacccctcctgcgttgggtattttcaagctgcaatttgcatgattcaggtacagccgaagctggctttcgcttgggagtatttctgctggaaactggtgggaacgagcgctgaaatgcatgtagattgctctgaaagtaatgcctcgtatttatctccatggaagcgacaaccaatagaargagcacaatgacactgtttggtagagtaaattctcagctgcaaaatgctatttttcaacgcagtcaccaccatgagctatgaaatgtatcacccacccctcactgtgcttacatccactgtttggtctccataaatgttcagcaagcgtcagtgaatgtcagtgggtgccgtttttctgcgtggaggaattcagtgacacacttttgcttcaggtacagttccgtgtcagacaccactctgtcagagtgcccctctgcttccacctgtcacactgcaacaaaatgtaatgggatatgggt

SEQ ID NO: 53011 - DNA, 599 bp, Chicken  19866894303993_1
  misc_feature (1)..(63): n is any nucleotide
nnnnnnnnnnnnnnnnnnnnnnnnnnnnnnnnnnnnnnnnnnnnnnnnnnnnnnnnnnnnnnnccactgaagatttggtgtctttgtactaaatatcaggtggtatttcatctcagtgtagttgcctacggttttaaaatgtgtgtgaaaaggtttattttcttgtggaatctcttcatctcaatgaaggagagcgttaaatgtgctcccaagaatatgcccttgtgggcatggtcactacgtcccagagctatcacaggggaagctgtcagctttcatagcaagccaagcagcagcacrgccttcatgtcacagcccattctcatgtgcatgctgagaaggctccagatcagggtgacactccagtagatgraagcaggtaaacaccacacgctgggctttcagttggtcctgaaggcagcacgggtaactcacgtgatgtctgaccaatggtgtaacactaagtgcaaatctgttcgtggttttctgactgccctcatcaatattttctaggtttttgagtcatttttgtggtgaaattgctgatggctattaccaaggtctatgtgtagaaagagaaggtgagcagtcagcaaaca

SEQ ID NO: 53012 - DNA, 600 bp, Chicken  19866894303993_2
tttggtgtctttgtactaaatatcaggtggtatttcatctcagtgtagttgcctacggttttaaaatgtgtgtgaaaaggtttattttcttgtggaatctcttcatctcaatgaaggagagcgttaaatgtgctcccaagaatatgcccttgtgggcatggtcactacgtcccagagctatcacaggggaagctgtcagctttcatagcaagccaagcagcagcacrgccttcatgtcacagcccattctcatgtgcatgctgagaaggctccagatcagggtgacactccagtagatgraagcaggtaaacaccacacgctgggctttcagttggtcctgaaggcagcacgggtaactcacgtgatgtctgaccaatggtgtaacactaagtgcaaatctgttcgtggttttctgactgccctcatcaatattttctaggtttttgagtcatttttgtggtgaaattgctgatggctattaccaaggtctatgtgtagaaagagaaggtgagcagtcagcaaacaggattttggrgaccrtgtaaaggcagatgtggtaaaaagcatttctgatctccagtcaacagaaaaagatgaca

SEQ ID NO: 53013 - DNA, 600 bp, Chicken  19866894303993_3
tcacagcccattctcatgtgcatgctgagaaggctccagatcagggtgacactccagtagatgraagcaggtaaacaccacacgctgggctttcagttggtcctgaaggcagcacgggtaactcacgtgatgtctgaccaatggtgtaacactaagtgcaaatctgttcgtggttttctgactgccctcatcaatattttctaggtttttgagtcatttttgtggtgaaattgctgatggctattaccaaggtctatgtgtagaaagagaaggtgagcagtcagcaaacaggattttggrgaccrtgtaaaggcagatgtggtaaaaagcatttctgatctccagtcaacagaaaaagatgacagcaaacaatcagatgcttgttgtgaaagagcaattgcacaggcctgacaatgattacatgtgtttttcctgtggatgttagatttaaccagaaatagaatgagacatgttaacttatggtcaagtaaactattacctgcaggtgtcctgggagtacactgctggtatctcagctcttggctgggacaagtcaccattcagggtagtttggactgtattgtggatgctgtggctgga

SEQ ID NO: 53014 - DNA, 600 bp, Chicken  19866894303993_4
gcccattctcatgtgcatgctgagaaggctccagatcagggtgacactccagtagatgraagcaggtaaacaccacacgctgggctttcagttggtcctgaaggcagcacgggtaactcacgtgatgtctgaccaatggtgtaacactaagtgcaaatctgttcgtggttttctgactgccctcatcaatattttctaggtttttgagtcatttttgtggtgaaattgctgatggctattaccaaggtctatgtgtagaaagagaaggtgagcagtcagcaaacaggattttggrgaccrtgtaaaggcagatgtggtaaaaagcatttctgatctccagtcaacagaaaaagatgacagcaaacaatcagatgcttgttgtgaaagagcaattgcacaggcctgacaatgattacatgtgtttttcctgtggatgttagatttaaccagaaatagaatgagacatgttaacttatggtcaagtaaactattacctgcaggtgtcctgggagtacactgctggtatctcagctcttggctgggacaagtcaccattcagggtagtttggactgtattgtggatgctgtggctggaaggag

SEQ ID NO: 53015 - DNA, 600 bp, Chicken  19866894304000_1
ttttatatacatatatattatacattcatatatatatatatactcatatgacttccataattattatttagcattgacaatatgataacaaaactggatgaattcctattaatctgagtactgtacaaacataacacagtgaaattccctgtttcaaagacaaaggaagaagtgtaaaagacataagagaaggaagaaatgaagaaagaaatgaaggaagagagtttggtgaagtgttgtaacatctttgcaaattcaggcatcttcagttcactggctgagtcagtatttactggctargcccccayttccctctttgatgggtggagaagataggttcctgccctctgggtaagctcaccttaatagttgtgacctgactcttgacaatatctattttgtattgactatggagataaacttgggagactcactgtctacatttactgggtatatcagatgactgaggaggggacaggaggggagtgtacatgtatgcacttaagaaaacaaatgtaataggaagtatataatagctgagggtacaatacaaggtacaagcacaggtgtcagcttgctgttaacaacttacaccttaca

SEQ ID NO: 53016 - DNA, 600 bp, Chicken  19866894304000_2
acatatatattatacattcatatatatatatatactcatatgacttccataattattatttagcattgacaatatgataacaaaactggatgaattcctattaatctgagtactgtacaaacataacacagtgaaattccctgtttcaaagacaaaggaagaagtgtaaaagacataagagaaggaagaaatgaagaaagaaatgaaggaagagagtttggtgaagtgttgtaacatctttgcaaattcaggcatcttcagttcactggctgagtcagtatttactggctargcccccayttccctctttgatgggtggagaagataggttcctgccctctgggtaagctcaccttaatagttgtgacctgactcttgacaatatctattttgtattgactatggagataaacttgggagactcactgtctacatttactgggtatatcagatgactgaggaggggacaggaggggagtgtacatgtatgcacttaagaaaacaaatgtaataggaagtatataatagctgagggtacaatacaaggtacaagcacaggtgtcagcttgctgttaacaacttacaccttacagtgtgcat

SEQ ID NO: 53017 - DNA, 568 bp, Chicken  19866894304000_3
tattttgtattgactatggagataaacttgggagactcactgtctacatttactgggtatatcagatgactgaggaggggacaggaggggagtgtacatgtatgcacttaagaaaacaaatgtaataggaagtatataatagctgagggtacaatacaaggtacaagcacaggtgtcagcttgctgttaacaacttacaccttacagtgtgcattatcacagtactgaattttgaggagtggctcagttatatatatcaacctgggaactttctccaagcagaagcagcagcctaagagwaaacaccatttgtccaatagagaacaaggggaccaagacagccacattgaactgaatgcagaggacaaaattacgcttaytggataacaaactactaagagaagatgtcactaattgtatgaagggaacagggaaaatttgtggtaagatgtaaccaattgaagaagcaggaaataaagtaattcattgaaaatgtgtctgtagaagcaacgttttaaatagatgaattgatgtaagagttaaatcaagattacatcaccaagaactg

SEQ ID NO: 53018 - DNA, 488 bp, Chicken  19866894304000_4
acaggaggggagtgtacatgtatgcacttaagaaaacaaatgtaataggaagtatataatagctgagggtacaatacaaggtacaagcacaggtgtcagcttgctgttaacaacttacaccttacagtgtgcattatcacagtactgaattttgaggagtggctcagttatatatatcaacctgggaactttctccaagcagaagcagcagcctaagagwaaacaccatttgtccaatagagaacaaggggaccaagacagccacattgaactgaatgcagaggacaaaattacgcttaytggataacaaactactaagagaagatgtcactaattgtatgaagggaacagggaaaatttgtggtaagatgtaaccaattgaagaagcaggaaataaagtaattcattgaaaatgtgtctgtagaagcaacgttttaaatagatgaattgatgtaagagttaaatcaagattacatcaccaagaactg

SEQ ID NO: 53019 - DNA, 600 bp, Chicken  19866894304001_1
tgtttttgttgttcccgttttatttctttccgtatgtaagaaatcctcaccctgcactgccaaacccccaggcgatagagcctccatccctccccaccgacacacctcctctagcacagcccctccgaaatctccctccagccctgcatccacctctaaacgagtcacaccccgacccgccagtacgggaacgcatgaaacaaaggccaaggtaaggaaatgggacgtgagagaggcagagctgccttggagaacagcttaaggcatcgctggcagtgcttgctgggctgaagcaccacktctcactcacaggagaaagtggggtcatagcatcataggacggcccgggttgaaagggaccacaatgctcatccagttccaaccccctgctatgtgcagggtcgccaaccagcagcccaggctgcccagagccacatccagcctggccttgaatgcctgcagggatggggcatccacagtgctgtgggatgcgtttctctgtatggcaggttttggggcagctgggtcggtctcacggcccctttgttctgctttagagctgcagtagggtttcctggcctctctgaggcatttctgggt

SEQ ID NO: 53020 - DNA, 600 bp, Chicken  19866894304022_1
tgctaaagcatatctggtgtgaaatgtaagtgtcaagtcctcctgaatgctgtagcagatgtccttgtggttatgtatgtctcttgaatttccagttacagcctcactgctaagttcataaaagctgctgtgttgtattaatctttgcctgctattttaaactcaattaaagttgcagtgctctgtgatgacacaatttaatatctgagaagactggcggaggggagatgcaagagcccagtattaattgaagtttggcttattttctctttcttttcagtgtgcaccataagaactttstggtgatacagtatgataaaaatgttccttgcattcattgtttttatttcctgctagagattggatttctgaatcctgaggcttttgtcacccactaaatgtggaaaaagccagcgatggaatatacatttaatgttctgacttctctcaacaattctgcagaagattattgctaacagttttaggagaattcgtgcattctgttcttagcagctttccatactgtgcttctgcagttacttttaaaggcagtattcagttctccatccctgtgttttcaaggtgctccagcctactgtc

SEQ ID NO: 53021 - DNA, 599 bp, Chicken  19866894304027_1
  misc_feature (1)..(183): n is any nucleotide
nnnnnnnnnnnnnnnnnnnnnnnnnnnnnnnnnnnnnnnnnnnnnnnnnnnnnnnnnnnnnnnnnnnnnnnnnnnnnnnnnnnnnnnnnnnnnnnnnnnnnnnnnnnnnnnnnnnnnnnnnnnnnnnnnnnnnnnnnnnnnnnnnnnnnnnnnnnnnnnnnnnnnnnnnnnnnnnnnnnnnnnacccagtagtcccattgactccatgcactctactaggaaaattcagtctaagacactcactcagttgttggtaccagaggaggtactatttctaaaatagcttgtctacataatttkcctttcactgactaaacgggaaatttcagaggtctttaaaggaagattatatttgtttaatatcaggcacctcagctaatagtaaacaacagggaaaaaataacaaattttctggaggaatttcacctcctgacacctaatgttatgagctgtgcaattgaactgaattatagatcagtgagaagggttgttttttttttttttcttctatttttcccctcaaattctgagaaattctcagcacatcctttaagtgggatctatcctgatcaacagtactacctacacaccatttctct

SEQ ID NO: 53022 - DNA, 599 bp, Chicken  19866894304038_1
  misc_feature (1)..(50): n is any nucleotide
nnnnnnnnnnnnnnnnnnnnnnnnnnnnnnnnnnnnnnnnnnnnnnnnnnccaagcaaattcccacatgaggctttaggtcctcaggggagacccccaaaagtctgagagaagggacattcagtcttcacttttgttttgataacctctcttgcctattgaatacacagctgtgagattaggggtctgagaaatgttgcagatgcaagaacactttctagaaattcaaaaccgtggcttgagcacacagagaaaatatagagaatatcaaaatgacatcccctggcttcatcatcactamaggttttcctgacagaactaaaaattcaacaggatagtctttcagaagaggctactgaaccaaaaattcttaccccaaatgaaacaaaaactcaagggtcttcaaaaagggcagtgtcctgttcaaatacaaaagtgagagcacacttaagacatcgtatttcatattgtttctaggcttgacagagctcattttaacctgcactgacctcacagctgaacctactttgtgcaggatgctgcactactgacatcctgagttcttgagaccgtaatcaaatatgaatcatcctatggccc

SEQ ID NO: 53023 - DNA, 600 bp, Chicken  19866894304043_1
gctctagccaaatggcaaggcaagaaatatgtgtggtgaaggatcccagggaactcagggactcacacacattggctgtttaaacctgaggccactattgattcttaaagtacattcccttgtattatagctttgcacaggaaatgttattttttaaaatactaaattctagtcttttggcctaaaatctctctcactgccaatgaatgctatattcagcagataattacgctaatttattttaaataaatttcaaattaaaatgatatactgtggagagacctgattgaaaaatcttgstgttctgttcctcatttgagaactggtttgcaattagtcaagctgtcagatacccagggaatgtttttatttatttatttttactgaagggaatgttgggaagaagagctctctgcacagccatgcaggaaagcttctggtaatcctttttgcacagaagagacttcagaatacagggatcacagtttgccacaagatagctcttatgttttgctttagtatgttatttaccagagttactagtgttaatcacaggttatttaaaaagtgcagctcctgaaaaaagaaattagatgcctg

SEQ ID NO: 53024 - DNA, 600 bp, Chicken  19866894304052_1
ctgctgagctgattccaccttcaaggccacattctcccgggtaagcaggtccattgcctcataaatctccccaaaacctccgccaccgatcttcttcaactagaaaagtacaaggagatttggtacaatgcacaagagagatggcaacaaattgtctctcacagagccaggcactagcttctttaatgcacaggcaggaacaaattcagctcccagtctgtgctgtgcctgaatcacttcagtgcacagttaggcagaagtccagctgcccacttgactgtgctatgtataaattctttkctgcacaacaaaaaacaagctctgcaagtgatggcgcgtgayacattcaaaagcaaatggtaacgcctattatgccaataatgttcttgccaaaaatcaaaggaaagaccctttaaggagatagcagaatgactacgcagagtgtgacagataaaaactgtcattcatcctctgcacacagatctctgcagtaaaacacaatcacagtggctggaattaatgtttgcaagtaataaataaaatgaagtttaaatctcattccctagatcttaaatacagaactaaacaccactggaagtt

SEQ ID NO: 53025 - DNA, 600 bp, Chicken  19866894304052_2
aagcaggtccattgcctcataaatctccccaaaacctccgccaccgatcttcttcaactagaaaagtacaaggagatttggtacaatgcacaagagagatggcaacaaattgtctctcacagagccaggcactagcttctttaatgcacaggcaggaacaaattcagctcccagtctgtgctgtgcctgaatcacttcagtgcacagttaggcagaagtccagctgcccacttgactgtgctatgtataaattctttkctgcacaacaaaaaacaagctctgcaagtgatggcgcgtgayacattcaaaagcaaatggtaacgcctattatgccaataatgttcttgccaaaaatcaaaggaaagaccctttaaggagatagcagaatgactacgcagagtgtgacagataaaaactgtcattcatcctctgcacacagatctctgcagtaaaacacaatcacagtggctggaattaatgtttgcaagtaataaataaaatgaagtttaaatctcattccctagatcttaaatacagaactaaacaccactggaagttttcagatgtttgacctgctctgctagtgagtctcccactgct

SEQ ID NO: 53026 - DNA, 599 bp, Chicken  19866894304066_1
  misc_feature (1)..(210): n is any nucleotide
nnnnnnnnnnnnnnnnnnnnnnnnnnnnnnnnnnnnnnnnnnnnnnnnnnnnnnnnnnnnnnnnnnnnnnnnnnnnnnnnnnnnnnnnnnnnnnnnnnnnnnnnnnnnnnnnnnnnnnnnnnnnnnnnnnnnnnnnnnnnnnnnnnnnnnnnnnnnnnnnnnnnnnnnnnnnnnnnnnnnnnnnnnnnnnnnnnnnnnnnnnnnnnnnnncccatactgccattccaacctcgcacctacaccttcttgctcagccatcacaaagtatcaagaagaagcttaatcgtgtttaccagctcygtgggcacagcccagtactcagggagaaatctttaacagttcaatccagaacctgctgtaaaagcgtacagcctgaatttgtctcacgtgagcttccagtgtcccagtttcactgagtctttattgtgtggtcaaaagccatctccatgtgggacaattttcttctccatagaggaacttcagaagtgcaatcagagcaccccacagctgcctcttagatgagccaaatggactgagttccttctgccttccagatgtgctgtccataaagataggaaaagagctcataccagcctttt

SEQ ID NO: 53027 - DNA, 599 bp, Chicken  19866894304070_1
  misc_feature (1)..(56): n is any nucleotide
nnnnnnnnnnnnnnnnnnnnnnnnnnnnnnnnnnnnnnnnnnnnnnnnnnnnnnnnacagtgtcaaaggctttgctgaagtctaggtagactacatcaacagcctttccctcatccaccagacgggtcactagatcatagaaggagatcaggttggtcaagcaggacctgcccttcatgaacccacgctggctaggcctgatccccccgttgtcccgcacatgctgcgtgatctccctcaagacaatctgctccataatcttccctggcaccgaggtcaggctaacaggcctgtagttcrccrgatcctccctgcagcctttcttgtagatgggagtcacactggcaagcctccagtcttctgggacytcacccgtcaacaaggagcactratagatgatggaaagcagctyggctatctcctccgccagttccctcascactctcgggtgaatctcatccagtcccatggacttgtggcagtccagttatagccagtgttgcttgggcacagggtctgggatttattcctataatgggaaatatcttcatatatgcatatcttatatgaaaagtaagaaatgactcttctttttctgc

SEQ ID NO: 53028 - DNA, 599 bp, Chicken  19866894304070_2
  misc_feature (1)..(53): n is any nucleotide
nnnnnnnnnnnnnnnnnnnnnnnnnnnnnnnnnnnnnnnnnnnnnnnnnnnnnacagtgtcaaaggctttgctgaagtctaggtagactacatcaacagcctttccctcatccaccagacgggtcactagatcatagaaggagatcaggttggtcaagcaggacctgcccttcatgaacccacgctggctaggcctgatccccccgttgtcccgcacatgctgcgtgatctccctcaagacaatctgctccataatcttccctggcaccgaggtcaggctaacaggcctgtagttcrccrgatcctccctgcagcctttcttgtagatgggagtcacactggcaagcctccagtcttctgggacytcacccgtcaacaaggagcactratagatgatggaaagcagctyggctatctcctccgccagttccctcascactctcgggtgaatctcatccagtcccatggacttgtggcagtccagttatagccagtgttgcttgggcacagggtctgggatttattcctataatgggaaatatcttcatatatgcatatcttatatgaaaagtaagaaatgactcttctttttctgccca

SEQ ID NO: 53029 - DNA, 600 bp, Chicken  19866894304070_3
gctttgctgaagtctaggtagactacatcaacagcctttccctcatccaccagacgggtcactagatcatagaaggagatcaggttggtcaagcaggacctgcccttcatgaacccacgctggctaggcctgatccccccgttgtcccgcacatgctgcgtgatctccctcaagacaatctgctccataatcttccctggcaccgaggtcaggctaacaggcctgtagttcrccrgatcctccctgcagcctttcttgtagatgggagtcacactggcaagcctccagtcttctgggacytcacccgtcaacaaggagcactratagatgatggaaagcagctyggctatctcctccgccagttccctcascactctcgggtgaatctcatccagtcccatggacttgtggcagtccagttatagccagtgttgcttgggcacagggtctgggatttattcctataatgggaaatatcttcatatatgcatatcttatatgaaaagtaagaaatgactcttctttttctgcccacactctaaaagctgagtagccgtgtgggctttgtttggagggccrgattctgtgcatgacgggtag

SEQ ID NO: 53030 - DNA, 600 bp, Chicken  19866894304070_4
tacatcaacagcctttccctcatccaccagacgggtcactagatcatagaaggagatcaggttggtcaagcaggacctgcccttcatgaacccacgctggctaggcctgatccccccgttgtcccgcacatgctgcgtgatctccctcaagacaatctgctccataatcttccctggcaccgaggtcaggctaacaggcctgtagttcrccrgatcctccctgcagcctttcttgtagatgggagtcacactggcaagcctccagtcttctgggacytcacccgtcaacaaggagcactratagatgatggaaagcagctyggctatctcctccgccagttccctcascactctcgggtgaatctcatccagtcccatggacttgtggcagtccagttatagccagtgttgcttgggcacagggtctgggatttattcctataatgggaaatatcttcatatatgcatatcttatatgaaaagtaagaaatgactcttctttttctgcccacactctaaaagctgagtagccgtgtgggctttgtttggagggccrgattctgtgcatgacgggtagtacaatgccaacctccacaggga

SEQ ID NO: 53031 - DNA, 600 bp, Chicken  19866894304070_5
atccaccagacgggtcactagatcatagaaggagatcaggttggtcaagcaggacctgcccttcatgaacccacgctggctaggcctgatccccccgttgtcccgcacatgctgcgtgatctccctcaagacaatctgctccataatcttccctggcaccgaggtcaggctaacaggcctgtagttcrccrgatcctccctgcagcctttcttgtagatgggagtcacactggcaagcctccagtcttctgggacytcacccgtcaacaaggagcactratagatgatggaaagcagctyggctatctcctccgccagttccctcascactctcgggtgaatctcatccagtcccatggacttgtggcagtccagttatagccagtgttgcttgggcacagggtctgggatttattcctataatgggaaatatcttcatatatgcatatcttatatgaaaagtaagaaatgactcttctttttctgcccacactctaaaagctgagtagccgtgtgggctttgtttggagggccrgattctgtgcatgacgggtagtacaatgccaacctccacagggagcttgcaccctgccaggtgcc

SEQ ID NO: 53032 - DNA, 600 bp, Chicken  19866894304070_6
gaaggagatcaggttggtcaagcaggacctgcccttcatgaacccacgctggctaggcctgatccccccgttgtcccgcacatgctgcgtgatctccctcaagacaatctgctccataatcttccctggcaccgaggtcaggctaacaggcctgtagttcrccrgatcctccctgcagcctttcttgtagatgggagtcacactggcaagcctccagtcttctgggacytcacccgtcaacaaggagcactratagatgatggaaagcagctyggctatctcctccgccagttccctcascactctcgggtgaatctcatccagtcccatggacttgtggcagtccagttatagccagtgttgcttgggcacagggtctgggatttattcctataatgggaaatatcttcatatatgcatatcttatatgaaaagtaagaaatgactcttctttttctgcccacactctaaaagctgagtagccgtgtgggctttgtttggagggccrgattctgtgcatgacgggtagtacaatgccaacctccacagggagcttgcaccctgccaggtgcctggttccccattagggggtaagcagaa

SEQ ID NO: 53033 - DNA, 541 bp, Chicken  19866894304070_7
agcctccagtcttctgggacytcacccgtcaacaaggagcactratagatgatggaaagcagctyggctatctcctccgccagttccctcascactctcgggtgaatctcatccagtcccatggacttgtggcagtccagttatagccagtgttgcttgggcacagggtctgggatttattcctataatgggaaatatcttcatatatgcatatcttatatgaaaagtaagaaatgactcttctttttctgcccacactctaaaagctgagtagccgtgtgggctttgtttggagggccrgattctgtgcatgacgggtagtacaatgccaacctccacagggagcttgcaccctgccaggtgcctggttccccattagggggtaagcagaagggatgcatatgtgcactctggctaggagagtgtaataaaacctgaaatgctccaacttgaggcactttcttttcaagtcaaagagagagatgtccagcacgtttcatcagctctgggctatgaaacaagccattcataattatgaaga

SEQ ID NO: 53034 - DNA, 600 bp, Chicken  19866894304072_1
tttggtcttgttgaatcccatcccattggcttcggcccagctatccagcctatccagatccctctgtagggcctcgctaaccttgggcagatcgatacttccagccagcttggtgtcatctgcaaacttactgagggcgcactcaatgccctcatccaggtcatcaataaagatattaaacaggacaggccccagcaccaacccctggggaacaccactcgtgactggttgccagctggatttaactccattcaccaccactctctgggcccggccctccagccagttccttacccagcmaagagtgtaccagtcccagccacggactgccagcttctgtaggagaatactgtgggagacagtgtcaaaggctttgctgaagtctaggtagactacatcaacagcctttccctcctccaccagacgggtcactagatcatagaaggagatcacgttggtcaagcaggacctgccctttgtgaacccatgttggctaggcctgatcccctgattgtcctgcacatgccgcatgatctccctcaagacaatctgctccataaccttccccggaaccaaggtcacgctaacaggcctgtagtt

SEQ ID NO: 53035 - DNA, 544 bp, Chicken  19866894304086_1
cagcgaggtgatggccacacactgccataactgaggagatggttgcatgtaggtctcactgaggagatgacaacatataaccctcactaaggagacggccacatgttgggtgtctctgtggagatggccgtatttagatctcccccagcgtctggctggttcatggaggaagctgaaaacacatgcatgggcaagggactatttggcaagggaatgtctcctgagagcaactcgaagagagagtggaagagttggaatgggaattttctgaagggtaactctttgcttacttggaaaagkacttactgctatccggagaaggacagaaaatgagtatcacaccaggagttgcctgaaaccttgttcaactggaaagcccatgtaacaagagctatctgccaggggccaccaactagcaagagctgggtcacagcttcagcataggtgggggcctagctgcagttgctaaaggtgcaataaggtggaacatctcttgattaaaagaattaatagatcaaaaaatcataatgtagaatatcacatt

SEQ ID NO: 53036 - DNA, 600 bp, Chicken  19866894304087_1
tgcgcggttccgagcagcgctgcgcgcacggctccaggcggcggcgcccgacggaggggggggggaatgcgggggctgcccccggagggggtctcactttgaggtttgcagggagggaatggaagatgagcccgagcggaatgggagcgaggggaagccgggtgacggagcgcgccctgggacgcacgcagcaggcagctccatcgtctgacttttttaatttgcctcacaacgtcgggtacacgcggcggcggcagtggcgcggtcggtagacacggatagtgcagggggagcgcgggrgtggcgcggggccgcgctcagttggagggcgcctcgggggtgacgaaggtgcccttctggtcccactgcatgtcccggatgcgacggatggactggatctggggctggaaggcgcaccactcgttccagtgcctgaagtccccggtctcaaagaggtactggtagccgcggtacccggggtactgatacccaacccagctgcggggagagcagacagggtgctgagtgccgtgcccgaaccccccccggtacctccccggtgcagcccccgcttacgttccgctgggcaccttcacgctg

SEQ ID NO: 53037 - DNA, 600 bp, Chicken  19866894304088_1
tgaagcctaaaagtacagaggcatttgaagtctaaacatttgagcccagctcccttcttagaaaagacaggctgaaattgtcttccttgaggactcgcaagcaatgctttcccctctgggctagcaacactaaccttacaggattagcctttaagaagagatcctcaaagcaacatagtatttccataaacatgtttatacttgcagctgttagtttgtcttgtggctaattaaagtcttctatcaacatgtatgagcccacactagtaccttggcatgggttctctggccatcagcagytctttgggcattctctttgtttcatagatgtgacagttccccttcagttaatattacagtgcctagcagctgaagtgaaaaaaaaaaggaaaagtttactttaagaaaggtgaagagatgataaaaacctaggaaagaacgtgacaatcagaagaggctgaggatttcttttcccttgttccattatttagcagctctggtcagacagaagattgtatgctagtgcagcaaaaactcaagcaagcaaaaataaataagttagacattctaattcacccatcacttacctacagagcctga

SEQ ID NO: 53038 - DNA, 600 bp, Chicken  19866894304090_1
aattcttctttcctttgatcattttctttgtttcacaatgatttcaactccatttctaaacagtggtacaacacagtacagaaatataacctgaacctttgttagttgaaccatcctttactcctcagcatgcatcctgaagatatgggatggatgggctgtgcagcagaaagctgcagcattcgatcagcatcatttagttcatcatttgatatccacccaaatatcttatggaaatgtaggaaactgtactaaataccaacctggagaccctggttttaagctaaataacagagaaamagaaatcgggagaaggttctaattagcaaaactacaacccttattttgtttgtaagaaatgacctaggggactttggatcatcttggtttgcagtattcacagtatttttctcctcctcatgcatctttgcaagctttcccctcggtctacagtgttcacatagctctcaagcaagctgaatgtgagcatattcaaacagtaaaccagaaaatggggttagaccatcaaaacacttgaccttctgaaatgaaatcccttcagctgaaatactgaaaacccaaaacacactagttctcaag

SEQ ID NO: 53039 - DNA, 600 bp, Chicken  19866894304090_2
attattttgacttcttcattttcttttattttttttttaactttaatcacaaaatctgaagttttactacagaacatctgagaaataagcagatacatttcttgtgacaaatattacatgaaagcttttccaaagtcaggacaggcttgtgttgatgtgttgtggtttgggagtttttaaagcattttctgaactttctgaagagtgagaaagtctgctttgttcatcttctgcagagtcatcacatctgcacatctagcttgtgcatttgttttcttatatatgacaacttcaaacatstaatgaatcatataatccatgatggctctggtgaattactgagaagtcatgcctctgaatatatgaaggaacaggagggaatatttttctatcttgaatttgcttacatggacaattgctcattattttttaaaattctgtctgcaagtatttgcattttacaaaactgagaggtcttttcaatgggccaccttcattcatcacgtcagccatagcaagcgatatygcattcattgtttcaaggtgataattaaagggaatatttgtaattgcatttatttacacttgcattatttgtgg

SEQ ID NO: 53040 - DNA, 600 bp, Chicken  19866894304090_3
tcttctgcagagtcatcacatctgcacatctagcttgtgcatttgttttcttatatatgacaacttcaaacatstaatgaatcatataatccatgatggctctggtgaattactgagaagtcatgcctctgaatatatgaaggaacaggagggaatatttttctatcttgaatttgcttacatggacaattgctcattattttttaaaattctgtctgcaagtatttgcattttacaaaactgagaggtcttttcaatgggccaccttcattcatcacgtcagccatagcaagcgatatygcattcattgtttcaaggtgataattaaagggaatatttgtaattgcatttatttacacttgcattatttgtgggagagtgatggcaactaggctgaattgcaacctgcttaaaattatgatgctcaaaatgttatacatttcattcacattgcaattatagtgtttggttgaaaggaggatgctccattctctgtcatttaaggtgaaagcagtaagaaaataattcctccagtccaaatgacaacaagctgcgttcagcctaagacaatcaaaatccttcccccagaggtagcatttt

SEQ ID NO: 53041 - DNA, 599 bp, Chicken  19866894304110_1
  misc_feature (1)..(203): n is any nucleotide
nnnnnnnnnnnnnnnnnnnnnnnnnnnnnnnnnnnnnnnnnnnnnnnnnnnnnnnnnnnnnnnnnnnnnnnnnnnnnnnnnnnnnnnnnnnnnnnnnnnnnnnnnnnnnnnnnnnnnnnnnnnnnnnnnnnnnnnnnnnnnnnnnnnnnnnnnnnnnnnnnnnnnnnnnnnnnnnnnnnnnnnnnnnnnnnnnnnnnnnnnnnctcagtgagatcttggcacaaagagctgacaggacctgggaacccacttcagaatgcaggctctggtcatggtgtttgcagagataagcaatctcartgctcacaaagcttccccctgcttgtcgagagacaaatgttattcatcagccctgcaaactgaaatctatatttttctcgtgagttctgaaactcatttaaggcctctaaacagcttctatcagctgaaaaaattgaattaattttattcctgttgcctaacagtccyggggagttctttgtcgagagcataacaatggaaacttgtgcggcactcgcrcccaagcgctgcgtggaagcgccccgagccgcgctcccgtcccggcacaaggacggctttgtcccgcgctggggctgtgg

SEQ ID NO: 53042 - DNA, 599 bp, Chicken  19866894304110_2
  misc_feature (1)..(35): n is any nucleotide
nnnnnnnnnnnnnnnnnnnnnnnnnnnnnnnnnnnctcagtgagatcttggcacaaagagctgacaggacctgggaacccacttcagaatgcaggctctggtcatggtgtttgcagagataagcaatctcartgctcacaaagcttccccctgcttgtcgagagacaaatgttattcatcagccctgcaaactgaaatctatatttttctcgtgagttctgaaactcatttaaggcctctaaacagcttctatcagctgaaaaaattgaattaattttattcctgttgcctaacagtccyggggagttctttgtcgagagcataacaatggaaacttgtgcggcactcgcrcccaagcgctgcgtggaagcgccccgagccgcgctcccgtcccggcacaaggacggctttgtcccgcgctggggctgtggggcagctctggggcccacgtgctaccaggcgcactggagagaagggagaggagagtatttttgcaattaataaaagcaattcaccgaggctaaaagatgtccctgccttaaaactgactctgacacttcttcgatagctgcagtgttcgcagccagtttgaagctgac

SEQ ID NO: 53043 - DNA, 600 bp, Chicken  19866894304110_3
cacaaagagctgacaggacctgggaacccacttcagaatgcaggctctggtcatggtgtttgcagagataagcaatctcartgctcacaaagcttccccctgcttgtcgagagacaaatgttattcatcagccctgcaaactgaaatctatatttttctcgtgagttctgaaactcatttaaggcctctaaacagcttctatcagctgaaaaaattgaattaattttattcctgttgcctaacagtccyggggagttctttgtcgagagcataacaatggaaacttgtgcggcactcgcrcccaagcgctgcgtggaagcgccccgagccgcgctcccgtcccggcacaaggacggctttgtcccgcgctggggctgtggggcagctctggggcccacgtgctaccaggcgcactggagagaagggagaggagagtatttttgcaattaataaaagcaattcaccgaggctaaaagatgtccctgccttaaaactgactctgacacttcttcgatagctgcagtgttcgcagccagtttgaagctgacagacgggtacacagatatgcatctagcctggcctttgtccatgtgcatgcag

SEQ ID NO: 53044 - DNA, 600 bp, Chicken  19866894304110_4
gcactggggtctgagcctaaatatttctaaggagcaaaccagcagttggaggaaagatgcaaaatcactgtgccagatatcctatgctgtcctctttgcatctccataatgcatctccgtgctgagaaagtggcacccagctggcccctcctggtatgcatccccccgtgctgctggagctgggctgggtgggagcacgtttcgtgggatgtggaatttggtgctgtgggagatggttctgagcacaggcaagtgctatggatgtcatggcatggcttctgcaagccactgatctacccmaacaagtgtcggaagtgagtccaaggaggtcagcacagctggttatagtagagtrtagatgctgcaagtaaatcagattcatagttaataatttaatttctagcaaacaaagaaaaatcagcgggctaatgagatatgaaccttataactcagtgtaccaggactcatctgcatctgttatcacaaactcagatctcggcacaagatgtagaagctgtgcaaggaggaggtgggtgctggcacagaaggagctgctagcaggtgggcagacccaaagccagtgtacaaatgcttctagga

SEQ ID NO: 53045 - DNA, 600 bp, Chicken  19866894304110_5
gatgcaaaatcactgtgccagatatcctatgctgtcctctttgcatctccataatgcatctccgtgctgagaaagtggcacccagctggcccctcctggtatgcatccccccgtgctgctggagctgggctgggtgggagcacgtttcgtgggatgtggaatttggtgctgtgggagatggttctgagcacaggcaagtgctatggatgtcatggcatggcttctgcaagccactgatctacccmaacaagtgtcggaagtgagtccaaggaggtcagcacagctggttatagtagagtrtagatgctgcaagtaaatcagattcatagttaataatttaatttctagcaaacaaagaaaaatcagcgggctaatgagatatgaaccttataactcagtgtaccaggactcatctgcatctgttatcacaaactcagatctcggcacaagatgtagaagctgtgcaaggaggaggtgggtgctggcacagaaggagctgctagcaggtgggcagacccaaagccagtgtacaaatgcttctaggaaagatgtcagtgtgatgagcagtaaggccccgcagagtgactgcgaacttttcag

SEQ ID NO: 53046 - DNA, 600 bp, Chicken  19866894304110_6
gcaaacaaagaaaaatcagcgggctaatgagatatgaaccttataactcagtgtaccaggactcatctgcatctgttatcacaaactcagatctcggcacaagatgtagaagctgtgcaaggaggaggtgggtgctggcacagaaggagctgctagcaggtgggcagacccaaagccagtgtacaaatgcttctaggaaagatgtcagtgtgatgagcagtaaggccccgcagagtgactgcgaacttttcaggttctgggttgtttttggattcatatttaattgatttccaagctaamcacgtgctgttctaagacaacctgcagtactggtaaggctgacaggcctggccattattttacaacttatttctacmatckgttgaggcttagataaggcaggtttctggtacgtgtgggaaattactataaatacaagactagcaggcacatatcagtagatatgttgcaccgagtgaagcatggcaaacctcagcaaaacctcctccaaacagccgatgtgcaccaagataaagattatctgccaagttcctgacttcccttcatcagactatcactgcagaagctgattttcctcaa

SEQ ID NO: 53047 - DNA, 600 bp, Chicken  19866894304110_7
atcacaaactcagatctcggcacaagatgtagaagctgtgcaaggaggaggtgggtgctggcacagaaggagctgctagcaggtgggcagacccaaagccagtgtacaaatgcttctaggaaagatgtcagtgtgatgagcagtaaggccccgcagagtgactgcgaacttttcaggttctgggttgtttttggattcatatttaattgatttccaagctaamcacgtgctgttctaagacaacctgcagtactggtaaggctgacaggcctggccattattttacaacttatttctacmatckgttgaggcttagataaggcaggtttctggtacgtgtgggaaattactataaatacaagactagcaggcacatatcagtagatatgttgcaccgagtgaagcatggcaaacctcagcaaaacctcctccaaacagccgatgtgcaccaagataaagattatctgccaagttcctgacttcccttcatcagactatcactgcagaagctgattttcctcaagaagactattttcagaatgcaacccattttctttttttttggcatgcatttcagaagaagtcctctgttgtctccca

SEQ ID NO: 53048 - DNA, 600 bp, Chicken  19866894304110_8
caaactcagatctcggcacaagatgtagaagctgtgcaaggaggaggtgggtgctggcacagaaggagctgctagcaggtgggcagacccaaagccagtgtacaaatgcttctaggaaagatgtcagtgtgatgagcagtaaggccccgcagagtgactgcgaacttttcaggttctgggttgtttttggattcatatttaattgatttccaagctaamcacgtgctgttctaagacaacctgcagtactggtaaggctgacaggcctggccattattttacaacttatttctacmatckgttgaggcttagataaggcaggtttctggtacgtgtgggaaattactataaatacaagactagcaggcacatatcagtagatatgttgcaccgagtgaagcatggcaaacctcagcaaaacctcctccaaacagccgatgtgcaccaagataaagattatctgccaagttcctgacttcccttcatcagactatcactgcagaagctgattttcctcaagaagactattttcagaatgcaacccattttctttttttttggcatgcatttcagaagaagtcctctgttgtctcccaggca

SEQ ID NO: 53049 - DNA, 600 bp, Chicken  19866894304110_9
aaacctcctccaaacagccgatgtgcaccaagataaagattatctgccaagttcctgacttcccttcatcagactatcactgcagaagctgattttcctcaagaagactattttcagaatgcaacccattttctttttttttggcatgcatttcagaagaagtcctctgttgtctcccaggcaaggtcagctgttattgtgctgccatcaataatctcttcttaagcgtacaccgctcagctcagaggggagtttatggctgcactatatctttattaggaatggacaccacctttgccrttgctgagctggttcctagctatttattaaaacctgacactgaccctccagcttcaacaacattaaatcaaattgtatggaactccacagaagtgtcagctgacgatctgtctggaaatgctgagcattgaagctgcacaaaatgatttcttcttttcccttcagaatttctcccatagatagatatatagacatatagttcagagaaatgtaagcaagacttgaactcaaacttccagctttgtggtaacagagatcttggtgatagagcactgctttgctgcaggctgagaagtattt

SEQ ID NO: 53050 - DNA, 600 bp, Chicken  19866894304114_1
ttttcctatagaaatagttccacgaagagcctggtttcaagaatcctgcaggttctgctgggagaatttttcctgtaacctccctggcctttctaatagctgctttgtagtttgagcccagtcccagagaaaagtgtctgtctctgctgcctgccagtcactgccgagaggcttccattctgtggtcactctcactaaaattgcaattgcatccctgtacactccttaaaaatcaacagctgggcagaagcccacaggaacatcacccaaaggacagatgagcagaaggcagctgcacarcagctggttgctggtgrtcagcatgggcaaagccctgcmttgaaataaggtggttttgcccagagaagatgtgaacagcagtttgggaaagattagaaatgaccacataatcttctcatgttaagaagcacgtgagaatcacgggcatattcgtaatgtkaatgatgtttataagggttaggctgtacagtaaggtgagcacgctctgggtgtatatttgatgagtttattttcaggacatcaaaacatgctgatgaatatatgtgcaaaaggcttgctccaaatttgcttacttaagtc

SEQ ID NO: 53051 - DNA, 600 bp, Chicken  19866894304114_2
ttccacgaagagcctggtttcaagaatcctgcaggttctgctgggagaatttttcctgtaacctccctggcctttctaatagctgctttgtagtttgagcccagtcccagagaaaagtgtctgtctctgctgcctgccagtcactgccgagaggcttccattctgtggtcactctcactaaaattgcaattgcatccctgtacactccttaaaaatcaacagctgggcagaagcccacaggaacatcacccaaaggacagatgagcagaaggcagctgcacarcagctggttgctggtgrtcagcatgggcaaagccctgcmttgaaataaggtggttttgcccagagaagatgtgaacagcagtttgggaaagattagaaatgaccacataatcttctcatgttaagaagcacgtgagaatcacgggcatattcgtaatgtkaatgatgtttataagggttaggctgtacagtaaggtgagcacgctctgggtgtatatttgatgagtttattttcaggacatcaaaacatgctgatgaatatatgtgcaaaaggcttgctccaaatttgcttacttaagtctatcctgaattagatac

SEQ ID NO: 53052 - DNA, 600 bp, Chicken  19866894304114_3
agaatcctgcaggttctgctgggagaatttttcctgtaacctccctggcctttctaatagctgctttgtagtttgagcccagtcccagagaaaagtgtctgtctctgctgcctgccagtcactgccgagaggcttccattctgtggtcactctcactaaaattgcaattgcatccctgtacactccttaaaaatcaacagctgggcagaagcccacaggaacatcacccaaaggacagatgagcagaaggcagctgcacarcagctggttgctggtgrtcagcatgggcaaagccctgcmttgaaataaggtggttttgcccagagaagatgtgaacagcagtttgggaaagattagaaatgaccacataatcttctcatgttaagaagcacgtgagaatcacgggcatattcgtaatgtkaatgatgtttataagggttaggctgtacagtaaggtgagcacgctctgggtgtatatttgatgagtttattttcaggacatcaaaacatgctgatgaatatatgtgcaaaaggcttgctccaaatttgcttacttaagtctatcctgaattagatacaaatttttgcctttgaaaatta

SEQ ID NO: 53053 - DNA, 600 bp, Chicken  19866894304114_4
ctgccgagaggcttccattctgtggtcactctcactaaaattgcaattgcatccctgtacactccttaaaaatcaacagctgggcagaagcccacaggaacatcacccaaaggacagatgagcagaaggcagctgcacarcagctggttgctggtgrtcagcatgggcaaagccctgcmttgaaataaggtggttttgcccagagaagatgtgaacagcagtttgggaaagattagaaatgaccacataatcttctcatgttaagaagcacgtgagaatcacgggcatattcgtaatgtkaatgatgtttataagggttaggctgtacagtaaggtgagcacgctctgggtgtatatttgatgagtttattttcaggacatcaaaacatgctgatgaatatatgtgcaaaaggcttgctccaaatttgcttacttaagtctatcctgaattagatacaaatttttgcctttgaaaattacatgttaagcctttgccctccagtgctttaatcagtgggagcaggaagttctgcgactgaagttctacgtattttaccacgctttctagctccacgtcttcactgggagcratgccractc

SEQ ID NO: 53054 - DNA, 600 bp, Chicken  19866894304114_5
tcgtaatgtkaatgatgtttataagggttaggctgtacagtaaggtgagcacgctctgggtgtatatttgatgagtttattttcaggacatcaaaacatgctgatgaatatatgtgcaaaaggcttgctccaaatttgcttacttaagtctatcctgaattagatacaaatttttgcctttgaaaattacatgttaagcctttgccctccagtgctttaatcagtgggagcaggaagttctgcgactgaagttctacgtattttaccacgctttctagctccacgtcttcactgggagcratgccractccaaacatccacgaaggactcacaagagagggaactgagtgctcagggttggcagttatacccagcaggcagtgagacgtggtgctgcatggcactgggcatttcagatcccagcagagcaacaaacagctcacaaatctgttcttgcacgactgagccctgctgggcccaggctcccttgtgctgagcacacggtgtgggatgctataagccagtggtgaataaccaagtgtatgttgtgtaattttctttcttctctgacatgaaagcagctagatttcccaagagaaa

SEQ ID NO: 53055 - DNA, 600 bp, Chicken  19866894304114_6
tgtkaatgatgtttataagggttaggctgtacagtaaggtgagcacgctctgggtgtatatttgatgagtttattttcaggacatcaaaacatgctgatgaatatatgtgcaaaaggcttgctccaaatttgcttacttaagtctatcctgaattagatacaaatttttgcctttgaaaattacatgttaagcctttgccctccagtgctttaatcagtgggagcaggaagttctgcgactgaagttctacgtattttaccacgctttctagctccacgtcttcactgggagcratgccractccaaacatccacgaaggactcacaagagagggaactgagtgctcagggttggcagttatacccagcaggcagtgagacgtggtgctgcatggcactgggcatttcagatcccagcagagcaacaaacagctcacaaatctgttcttgcacgactgagccctgctgggcccaggctcccttgtgctgagcacacggtgtgggatgctataagccagtggtgaataaccaagtgtatgttgtgtaattttctttcttctctgacatgaaagcagctagatttcccaagagaaaatacat

SEQ ID NO: 53056 - DNA, 600 bp, Chicken  19866894304123_1
atatagctgtgtgaacttgttaataaaacatctctgcatatatcctcctcccccaccccagtagaacaccacatgacttttgtcatcagaaagcataataccagcagttctacatctgctctcaggaacaagagggatgccagtgtattcagattactgaattaactttggaaactgaagttctgtactaagcagaagagatctgacccttacttagaaaaagaggattgttttcctgtcacaactctgaaaaatgaaactcacccctactgtttatcctttcagcattttctttcagawtttgaatmttwtccagttcagagcagcaatatgcttytcagagagtctctgttcagggctggtttccttcccagacacaacascactgcaactgtgctgcagtactgctaatatcataggcttaagtcacttcagctcccagtttaccttttttctttatcrtaaactcaccatctttcagagcaggcactgctccttcccaggagctctcttgctgggtgggagaagaccctgccccatcacatccccctctaggccttacatgcacacttctgtcctccacctgcctcaggtctgttt

SEQ ID NO: 53057 - DNA, 600 bp, Chicken  19866894304123_2
gtgtgaacttgttaataaaacatctctgcatatatcctcctcccccaccccagtagaacaccacatgacttttgtcatcagaaagcataataccagcagttctacatctgctctcaggaacaagagggatgccagtgtattcagattactgaattaactttggaaactgaagttctgtactaagcagaagagatctgacccttacttagaaaaagaggattgttttcctgtcacaactctgaaaaatgaaactcacccctactgtttatcctttcagcattttctttcagawtttgaatmttwtccagttcagagcagcaatatgcttytcagagagtctctgttcagggctggtttccttcccagacacaacascactgcaactgtgctgcagtactgctaatatcataggcttaagtcacttcagctcccagtttaccttttttctttatcrtaaactcaccatctttcagagcaggcactgctccttcccaggagctctcttgctgggtgggagaagaccctgccccatcacatccccctctaggccttacatgcacacttctgtcctccacctgcctcaggtctgtttgcttccct

SEQ ID NO: 53058 - DNA, 600 bp, Chicken  19866894304123_3
tgaacttgttaataaaacatctctgcatatatcctcctcccccaccccagtagaacaccacatgacttttgtcatcagaaagcataataccagcagttctacatctgctctcaggaacaagagggatgccagtgtattcagattactgaattaactttggaaactgaagttctgtactaagcagaagagatctgacccttacttagaaaaagaggattgttttcctgtcacaactctgaaaaatgaaactcacccctactgtttatcctttcagcattttctttcagawtttgaatmttwtccagttcagagcagcaatatgcttytcagagagtctctgttcagggctggtttccttcccagacacaacascactgcaactgtgctgcagtactgctaatatcataggcttaagtcacttcagctcccagtttaccttttttctttatcrtaaactcaccatctttcagagcaggcactgctccttcccaggagctctcttgctgggtgggagaagaccctgccccatcacatccccctctaggccttacatgcacacttctgtcctccacctgcctcaggtctgtttgcttcccttgc

SEQ ID NO: 53059 - DNA, 600 bp, Chicken  19866894304123_4
atatatcctcctcccccaccccagtagaacaccacatgacttttgtcatcagaaagcataataccagcagttctacatctgctctcaggaacaagagggatgccagtgtattcagattactgaattaactttggaaactgaagttctgtactaagcagaagagatctgacccttacttagaaaaagaggattgttttcctgtcacaactctgaaaaatgaaactcacccctactgtttatcctttcagcattttctttcagawtttgaatmttwtccagttcagagcagcaatatgcttytcagagagtctctgttcagggctggtttccttcccagacacaacascactgcaactgtgctgcagtactgctaatatcataggcttaagtcacttcagctcccagtttaccttttttctttatcrtaaactcaccatctttcagagcaggcactgctccttcccaggagctctcttgctgggtgggagaagaccctgccccatcacatccccctctaggccttacatgcacacttctgtcctccacctgcctcaggtctgtttgcttcccttgcactcccctcctgctgtttatttcttc

SEQ ID NO: 53060 - DNA, 600 bp, Chicken  19866894304123_5
tatcctcctcccccaccccagtagaacaccacatgacttttgtcatcagaaagcataataccagcagttctacatctgctctcaggaacaagagggatgccagtgtattcagattactgaattaactttggaaactgaagttctgtactaagcagaagagatctgacccttacttagaaaaagaggattgttttcctgtcacaactctgaaaaatgaaactcacccctactgtttatcctttcagcattttctttcagawtttgaatmttwtccagttcagagcagcaatatgcttytcygagagtctctgttcagggctggtttccttcccagacacaacascactgcaactgtgctgcagtactgctaatatcataggcttaagtcacttcagctcccagtttaccttttttctttatcrtaaactcaccatctttcagagcaggcactgctccttcccaggagctctcttgctgggtgggagaagaccctgccccatcacatccccctctaggccttacatgcacacttctgtcctccacctgcctcaggtctgtttgcttcccttgcactcccctcctgctgtttatttcttcatt

SEQ ID NO: 53061 - DNA, 600 bp, Chicken  19866894304123_6; identical to SEQ ID NO: 53060

SEQ ID NO: 53062 - DNA, 600 bp, Chicken  19866894304123_7
catcagaaagcataataccagcagttctacatctgctctcaggaacaagagggatgccagtgtattcagattactgaattaactttggaaactgaagttctgtactaagcagaagagatctgacccttacttagaaaaagaggattgttttcctgtcacaactctgaaaaatgaaactcacccctactgtttatcctttcagcattttctttcagawtttgaatmttwtccagttcagagcagcaatatgcttytcagagagtctctgttcagggctggtttccttcccagacacaacascactgcaactgtgctgcagtactgctaatatcataggcttaagtcacttcagctcccagtttaccttttttctttatcrtaaactcaccatctttcagagcaggcactgctccttcccaggagctctcttgctgggtgggagaagaccctgccccatcacatccccctctaggccttacatgcacacttctgtcctccacctgcctcaggtctgtttgcttcccttgcactcccctcctgctgtttatttcttcattgtgagctactgtagccctggccacaagcctttctgtggggctg

SEQ ID NO: 53063 - DNA, 600 bp, Chicken  19866894304123_8
taactttggaaactgaagttctgtactaagcagaagagatctgacccttacttagaaaaagaggattgttttcctgtcacaactctgaaaaatgaaactcacccctactgtttatcctttcagcattttctttcagawtttgaatmttwtccagttcagagcagcaatatgcttytcagagagtctctgttcagggctggtttccttcccagacacaacascactgcaactgtgctgcagtactgctaatatcataggcttaagtcacttcagctcccagtttaccttttttctttatcrtaaactcaccatctttcagagcaggcactgctccttcccaggagctctcttgctgggtgggagaagaccctgccccatcacatccccctctaggccttacatgcacacttctgtcctccacctgcctcaggtctgtttgcttcccttgcactcccctcctgctgtttatttcttcattgtgagctactgtagccctggccacaagcctttctgtggggctgcacttcattgatttgaaattctgatttgattctctcctctgggagaatggtggttgcttatgtcaggggattttgtttc

SEQ ID NO: 53064 - DNA, 600 bp, Chicken  19866894304137_1
tccaacagtctatttctttgtgggcagtagaagcctgcaagccttagatgtgtgcatttgactgctgataggggttttgcagtttgcctggagtgcttttaatgagctcttcaggcagtgcctgtgaacaagattatatagaagcaatagactgagaatcatcttgctttcagtgttaaactgtctgacacccttgtatgagtagtcattcagataggaatggctttagcataaatcatttctaaaccaaggttacttcactctcaagagtgttcacacaggggttaacatctctattaygtttctattaattcagcctaagctgtccccagcatccatgtttggacatggttttaataacctatatccctgaccagcaatcaggactaccacagagagagaaatctgggttagcaactgtaaccatgaaggataaatactgaactaccccaaacacctccagttctcagcactctggcctttcagctctcaaacacaaactcagcacaaaaggaaggcatcactgagcccctccagcataacacacttctctcagtcacaccatcatactctgcatttaaagtatctgtcattcagagc

SEQ ID NO: 53065 - DNA, 600 bp, Chicken  19866894304140_1
ggaatgaaaaagggagagcaaagccattccagcaactgctgtgggagggggaaaaaagccaagggaggttttggccaagagcaaagggccctggaaaggagaagagccccacatcaaacataggcgtgtgcagcactgcacagtaaccacgctgactcatattcacctctcccgtcatggatatcttcccatcccaatacccagaagcctccttactggccccatacagcttacagaaactcagcaaggagcacttaggtacctatagcagccttagcagaaccggcgtgcacctggagrgcctgccctcggtagctcagagttgctgtgatgttaatgatgaccccgccgtggtcctggggagagacaggagatgcagaattaggagggagtggcatgagggtcacagaggagcacggcaggcttggaggggaggtcaactgtgggcacagccatccctgtgttgccaacacagcacacggcctcactgagcagggccctgccaaagaaatgggaggtacaagggacgagcaaagaccaaactaaacagaggagcagcagtttgcagcttcttcccagacagctggcagagcacagaca

SEQ ID NO: 53066 - DNA, 600 bp, Chicken  19866894304152_1
gggagcaagcccaggagctgcttgctggctcttcctcccgagctcaccctcctcttaacccatacattcacaatccttgggtatcagaaaaaggaaggagggcaaaggaaaataattaaaagttgtagcttcagttgtgcaggagagaaggaagagggaaaacatttgctcgatcttgtgtggctttggctgactgttatttgctttagtcaaagagggcagtctgacctgcctgagctcagtatcactttccaagtgcagcccagggtttctgtaccattttctgtgtgataactcagrccccctctttattttcccacaattgctgcatttctctgctcaaagctctgtgtggtggcttttatgtctccttcctcagaaagactttgagaaatcagagcccttcagcctatcagaagttcaacctatttttactaatgtgcattacctgacggttctcaattatactttaatagtctcttatgagggctcttatcaaaaaatcttttgaaaatccaagtgtgctgtttccactgggtcactgatattaatactcaaaagagctctaacaagattgagaagcacagtttttcctatcga

SEQ ID NO: 53067 - DNA, 600 bp, Chicken  19866894304155_1
gtcctgttggtttcctgcctcccctgcccactttcttgttctgagagatggagagctcttgtgctttcagaaatgaaaagaaatactcctgaaaaaaaagaaaagaaatactcctggagagtagacaactttcttctgctcctttctctctaaggactgcttcccaggagatttcatccaacaattccttaaacagcctgaagtttgctctcccgaagttcagggttctaatcctactctttgccaggcccatgttccttgagatctcaacctcaaccaggtcccagtcactgcagcctmggctgccttcagtcttaatgcctttaatgatctcctctgcattggtgagcaccataacagcaatgcttcacctcttgttgttctattcaatacctgaaccagaaactatcgtccacacagtccaggagattcctggtggattcctgtggatgccccatccctggagacattcaaagtcaggctgggtttggctctgggcagcctggtccagtggttggcgaccctgcacatagcagggaggttgaaaccagattatcattgtggtccttttcaactcaggccattccatgattctatgat

SEQ ID NO: 53068 - DNA, 600 bp, Chicken  19866894304156_1
ctctcttacagatgcccactggactatggggcatatatttcaaggtgcggaagctctgtggcttcagtgaaagctataaactaactcagtgacatgctgagacgtgttccgggggaaaaatagtcactgagagtttgttcatacagagtagaaatgggcttgatggttatattatttgagaggataaccaggatgtgttatagagagtttaacatttccataaggctgtgcgagtaaaaatattaattcaagcaggagggagcgtgggctgctgtgtccctatgaatgcttctgaatgawtgtagacataaactgtacacgcaagtaattaacttgttcatggatagtgtgtgttggactgggaagtgagtacattcatgacctggaatgtcatcattgtgtttaaagaaaagtaataaagtctgaagmagcgcttgaatgcctagatggccttaaaagcaaagcataaggcagcccttgttgtttccccactgtcagatacattcagctccacatccttatggattctgcctctgggctaagtgatgtttgtgtgtttatacaaaactactttttaacatacagtttcaccacacttaa

SEQ ID NO: 53069 - DNA, 600 bp, Chicken  19866894304156_2
agagtttgttcatacagagtagaaatgggcttgatggttatattatttgagaggataaccaggatgtgttatagagagtttaacatttccataaggctgtgcgagtaaaaatattaattcaagcaggagggagcgtgggctgctgtgtccctatgaatgcttctgaatgawtgtagacataaactgtacacgcaagtaattaacttgttcatggatagtgtgtgttggactgggaagtgagtacattcatgacctggaatgtcatcattgtgtttaaagaaaagtaataaagtctgaagmagcgcttgaatgcctagatggccttaaaagcaaagcataaggcagcccttgttgtttccccactgtcagatacattcagctccacatccttatggattctgcctctgggctaagtgatgtttgtgtgtttatacaaaactactttttaacatacagtttcaccacacttaaacaatcagcatactgcaaatatttacttgaacagctattaaatcagcagttcatggagagtttgctgtgttaatactggtaagtggtttttctgtaagcttctgctgcttaatcttggagattctggtt

SEQ ID NO: 53070 - DNA, 600 bp, Chicken  19866894304160_1
tgactatatttatgtatgtgcatattatacacacacacttaaaatcatgtatgtaagaggatatgtgtatgtgtactaagtacatttacacacatgtatgtacaagtacaaagttccttaaaacagaccaaccaatcccacattgcttcagcattactagcttccagcaaacacaaatttgttgtgaacaaccattttttaagagcttatttatgactcatcaacattaaaaatattactgtacaaatttagtgttgtgtgacagatgcatcttttgattcttttatgtacatctctccwatcaaggacaaagttttgtatctacagacaaagccaaacttcatccagttttcatttcatgagaacatagcgccaaataatttacaaacaagttcccaagaaaaagagtattcttcatctgygctggggcctttaagcartgacaaagaaacaattacatacagacatctttctacagtactgcagcatttggaagcacgacctgaacccagaaaagagakmtcgatcacttggtccccacttgaacaagcaaagaaattgcgtaayggaaaggatgcactgctggttaacacctagcag

SEQ ID NO: 53071 - DNA, 600 bp, Chicken  19866894304160_2
acagaccaaccaatcccacattgcttcagcattactagcttccagcaaacacaaatttgttgtgaacaaccattttttaagagcttatttatgactcatcaacattaaaaatattactgtacaaatttagtgttgtgtgacagatgcatcttttgattcttttatgtacatctctccwatcaaggacaaagttttgtatctacagacaaagccaaacttcatccagttttcatttcatgagaacatagcgccaaataatttacaaacaagttcccaagaaaaagagtattcttcatctgygctggggcctttaagcartgacaaagaaacaattacatacagacatctttctacagtactgcagcatttggaagcacgacctgaacccagaaaagagakmtcgatcacttggtccccacttgaacaagcaaagaaattgcgtaayggaaaggatgcactgctggttaacacctagcaggctgctagtcaactgtttgtactggattctcttcaagcaagaaaagcattgaagcttttaaactgccttctgatgtaggctcagcagatctaatgcctcattttgaatgtataagaaattct

SEQ ID NO: 53072 - DNA, 600 bp, Chicken  19866894304160_3
cattgcttcagcattactagcttccagcaaacacaaatttgttgtgaacaaccattttttaagagcttatttatgactcatcaacattaaaaatattactgtacaaatttagtgttgtgtgacagatgcatcttttgattcttttatgtacatctctccwatcaaggacaaagttttgtatctacagacaaagccaaacttcatccagttttcatttcatgagaacatagcgccaaataatttacaaacaagttcccaagaaaaagagtattcttcatctgygctggggcctttaagcartgacaaagaaacaattacatacagacatctttctacagtactgcagcatttggaagcacgacctgaacccagaaaagagakmtcgatcacttggtccccacttgaacaagcaaagaaattgcgtaayggaaaggatgcactgctggttaacacctagcaggctgctagtcaactgtttgtactggattctcttcaagcaagaaaagcattgaagcttttaaactgccttctgatgtaggctcagcagatctaatgcctcattttgaatgtataagaaattctgtgtaaaataaagatgtt

SEQ ID NO: 53073 - DNA, 600 bp, Chicken  19866894304160_4
caacattaaaaatattactgtacaaatttagtgttgtgtgacagatgcatcttttgattcttttatgtacatctctccwatcaaggacaaagttttgtatctacagacaaagccaaacttcatccagttttcatttcatgagaacatagcgccaaataatttacaaacaagttcccaagaaaaagagtattcttcatctgygctggggcctttaagcartgacaaagaaacaattacatacagacatctttctacagtactgcagcatttggaagcacgacctgaacccagaaaagagakmtcgatcacttggtccccacttgaacaagcaaagaaattgcgtaayggaaaggatgcactgctggttaacacctagcaggctgctagtcaactgtttgtactggattctcttcaagcaagaaaagcattgaagcttttaaactgccttctgatgtaggctcagcagatctaatgcctcattttgaatgtataagaaattctgtgtaaaataaagatgttctctgatgcggacttggctgagaaaactgaatacacctaaaaacccaaattttcataaaatctgtacatttagacattact

SEQ ID NO: 53074 - DNA, 600 bp, Chicken  19866894304160_5
aacattaaaaatattactgtacaaatttagtgttgtgtgacagatgcatcttttgattcttttatgtacatctctccwatcaaggacaaagttttgtatctacagacaaagccaaacttcatccagttttcatttcatgagaacatagcgccaaataatttacaaacaagttcccaagaaaaagagtattcttcatctgygctggggcctttaagcartgacaaagaaacaattacatacagacatctttctacagtactgcagcatttggaagcacgacctgaacccagaaaagagakmtcgatcacttggtccccacttgaacaagcaaagaaattgcgtaayggaaaggatgcactgctggttaacacctagcaggctgctagtcaactgtttgtactggattctcttcaagcaagaaaagcattgaagcttttaaactgccttctgatgtaggctcagcagatctaatgcctcattttgaatgtataagaaattctgtgtaaaataaagatgttctctgatgcggacttggctgagaaaactgaatacacctaaaaacccaaattttcataaaatctgtacatttagacattactg

SEQ ID NO: 53075 - DNA, 600 bp, Chicken  19866894304160_6
gcatcttttgattcttttatgtacatctctccwatcaaggacaaagttttgtatctacagacaaagccaaacttcatccagttttcatttcatgagaacatagcgccaaataatttacaaacaagttcccaagaaaaagagtattcttcatctgygctggggcctttaagcartgacaaagaaacaattacatacagacatctttctacagtactgcagcatttggaagcacgacctgaacccagaaaagagakmtcgatcacttggtccccacttgaacaagcaaagaaattgcgtaayggaaaggatgcactgctggttaacacctagcaggctgctagtcaactgtttgtactggattctcttcaagcaagaaaagcattgaagcttttaaactgccttctgatgtaggctcagcagatctaatgcctcattttgaatgtataagaaattctgtgtaaaataaagatgttctctgatgcggacttggctgagaaaactgaatacacctaaaaacccaaattttcataaaatctgtacatttagacattactgtatttcagccttaattcaaatattccttcagggcaggaaacgtcc

SEQ ID NO: 53076 - DNA, 600 bp, Chicken  19866894304162_1
gcggactctctgggcagcctctgccagtgcttgctcacacacacacagctccgtcgtgttctgagaagcctcctgtggttcagtgcctctcatgccgtccctgagtgccactgtcaagagcctggctgtgtcctctttgcactctcccttcaggtactaacagacactgatgagatccccctgggtctcctccagcctaagcagccccagcgctccacctccccccatagcatggtgctccggatcctgaattatccttgtgacccttcacaggtctctccaagtggctccaggtctttyttgtgctggagggtgcagaacaggatccaggacccctgtgctgagcagaagggaaaggtgacctcccttggctggtgggcgctgcttggcctgatgcagcccaggatgccatcagccttccttctgggagggcacatcactgcctcatggtcagctaagagccagtggagcacctctcctcattgcctgctctgcccttaggaggggggtgttaccatcaaggcaccccagcatgcagggttcctagaaagggtttgtgacatatgtctgtgatagtgctgtgtaggcacttccttgctt

SEQ ID NO: 53077 - DNA, 600 bp, Chicken  19866894304164_1
ttgaagcacacatagggtaaaaaaaacaaacaaaacctgtagtactattttaacaggttcagatatcatctgccagtgtactgggaatcaaggtcttctcatccacacatctttttcccctttcttatattttaatatattcagtgctgtcagatatccccccaaaacttagtattattgtggtactttggcttgtgacattatcacaatagctctatgtagcatttgcctcttactactacagaatatagaaagttagcacttagtgcacatttgacactatctatgttatattttggyggatgtgtaacttttaatttataaaattgctttcatataatatttgtatgggcatgacaaactgtgagtagctggaaaatcttattaactactccatgctcaatgaggcgcattgaaaagattctgaaagccaaagaaaaataaggattattaaaaattttttatgaagagtattttaattggaaaagctatcacatgcaactaaatcaatgagtctacattatatataacttgcaagaacactcagcactgcttttcttaataaaatgctttcttgaatggtgagcgttagacagtaat

SEQ ID NO: 53078 - DNA, 600 bp, Chicken  19866894304172_1
ctctagcacatgggaagagctccacagcaaccgctcacagcacactgcagcactgcatcccccatctcacatcttctgataaacactcgagctggtaattctgacacacaaacagcacagatcgaacttctccacgggaaggggaaaccaggaggtttttacatgatggcattccaggctgtgctaacggccatcctccaaaaacaggaaagccacggctccaacacagcgctgctcccactctgccaagcagctgctgatccaggctccacagagttcagtttgcagttaagctgctcrttaggaagagatcctaccattatgggttggaaaaaaaataaggtgaaagaattagctcagcaaagccatctccagttcccacagaaaagcagcccttcrgtttttgtgactgcagctattttggatcccagcaaacagcaaccaaaccgaggagaagctgccagcttcctttcaccaatgctggcaaacggacgtgcacaaacaagtggttttaaagaaacctataaataaatacaggcaagtgctaaaggagcccaagaaggcggcctggagcaacacccgaactgcatgagtcagatg

SEQ ID NO: 53079 - DNA, 600 bp, Chicken  19866894304172_2
tctgacacacaaacagcacagatcgaacttctccacgggaaggggaaaccaggaggtttttacatgatggcattccaggctgtgctaacggccatcctccaaaaacaggaaagccacggctccaacacagcgctgctcccactctgccaagcagctgctgatccaggctccacagagttcagtttgcagttaagctgctcrttaggaagagatcctaccattatgggttggaaaaaaaataaggtgaaagaattagctcagcaaagccatctccagttcccacagaaaagcagcccttcrgtttttgtgactgcagctattttggatcccagcaaacagcaaccaaaccgaggagaagctgccagcttcctttcaccaatgctggcaaacggacgtgcacaaacaagtggttttaaagaaacctataaataaatacaggcaagtgctaaaggagcccaagaaggcggcctggagcaacacccgaactgcatgagtcagatgggcaaagtttatttgccaaacatttctatgaggcaccccagcacgaagagcaggactcagcctgatctcaccacctccctgctctcaaagggagatata

SEQ ID NO: 53080 - DNA, 600 bp, Chicken  19866894304172_3
ttgtgactgcagctattttggatcccagcaaacagcaaccaaaccgaggagaagctgccagcttcctttcaccaatgctggcaaacggacgtgcacaaacaagtggttttaaagaaacctataaataaatacaggcaagtgctaaaggagcccaagaaggcggcctggagcaacacccgaactgcatgagtcagatgggcaaagtttatttgccaaacatttctatgaggcaccccagcacgaagagcaggactcagcctgatctcaccacctccctgctctcaaagggagatatagaargcaagcccccccacccacaaagctcacccattgagattcagcatctctcacaagagagagatccaacagcagagcctgagcatccctcgagttttgccagcaggggggtcacacaaagccatgaaaggacctcggaacgccttaatggattcccatcttttactctttaaaagcaatcctgactaattcaggagcattttatttccgaggcattaatttatcagctggggtttaatagtcaccacgtcataccgtagctaaaccagcatacagaaactctaatggatgtattaaacagct

SEQ ID NO: 53081 - DNA, 600 bp, Chicken  19866894304172_4
tggggtttaatagtcaccacgtcataccgtagctaaaccagcatacagaaactctaatggatgtattaaacagctcctttaagggaagcaataggcctctacttagactaactgcttaatgctattagaaaattaaggagtaatttatagcacagactaaagctggctaggaccggatcccctttactgattgtgctgatccagaaagtaaaactagtccaacagaagccagcacagaacatgaggtacatcaaggctgctgctctgggagagttaagtgatgctgcacattgcacaagygtgcccaaattgcatgtgctaagttttatagctatgggggctactgggctgtatcacactgtgcagcattgcayggaaacagaacaaaacacttccattagcaaattcctcctggtttcagggaggaggaacccayggtacacaggtaccccatttcctacaggcttccttaagcattttctgccacttttgaaggtaggtgtcagggagcagttccttcctatttccagccaactcgggcatggcaatgttctgtagctgcacgctcctgctgctcagcccccagacagccctggagga

SEQ ID NO: 53082 - DNA, 578 bp, Chicken  19866894304172_5
tcctttaagggaagcaataggcctctacttagactaactgcttaatgctattagaaaattaaggagtaatttatagcacagactaaagctggctaggaccggatcccctttactgattgtgctgatccagaaagtaaaactagtccaacagaagccagcacagaacatgaggtacatcaaggctgctgctctgggagagttaagtgatgctgcacattgcacaagygtgcccaaattgcatgtgctaagttttatagctatgggggctactgggctgtatcacactgtgcagcattgcayggaaacagaacaaaacacttccattagcaaattcctcctggtttcagggaggaggaacccayggtacacaggtaccccatttcctacaggcttccttaagcattttctgccacttttgaaggtaggtgtcagggagcagttccttcctatttccagccaactcgggcatggcaatgttctgtagctgcacgctcctgctgctcagcccccagacagccctggaggagcatgacactgcagtgaggacactgaagcacaaaagcattacaagccacaag

SEQ ID NO: 53083 - DNA, 516 bp, Chicken  19866894304172_6
ggagtaatttatagcacagactaaagctggctaggaccggatcccctttactgattgtgctgatccagaaagtaaaactagtccaacagaagccagcacagaacatgaggtacatcaaggctgctgctctgggagagttaagtgatgctgcacattgcacaagygtgcccaaattgcatgtgctaagttttatagctatgggggctactgggctgtatcacactgtgcagcattgcayggaaacagaacaaaacacttccattagcaaattcctcctggtttcagggaggaggaacccayggtacacaggtaccccatttcctacaggcttccttaagcattttctgccacttttgaaggtaggtgtcagggagcagttccttcctatttccagccaactcgggcatggcaatgttctgtagctgcacgctcctgctgctcagcccccagacagccctggaggagcatgacactgcagtgaggacactgaagcacaaaagcattacaagccacaag

SEQ ID NO: 53084 - DNA, 599 bp, Chicken  19866894304179_1
  misc_feature (1)..(83): n is any nucleotide
nnnnnnnnnnnnnnnnnnnnnnnnnnnnnnnnnnnnnnnnnnnnnnnnnnnnnnnnnnnnnnnnnnnnnnnnnnnnnnnnnnntgtcatataattttgatcaaagtcagttacactcaaacttataggtgtctctactttccgttattcatgctgagaaacatggaacatcatctccagagataatgaatacctaacaggttcaatctatttcatctgaagcttcaagtgttcagcaagtctgaagagaaaactgaattaaagggaagaagactccaaaagtcacgaggcatgcaaaagwcactgacacttcttaaggcagatgtgatattaacaatgggaaaggcaatctgtatagaatctctctaatgacaggacatgaggtatatactgcatcaagattaataaggaaaaaaaaaagagagagagagagatagaacttcaattcccttcatatttcctttcctgccacttccaatgaacctgcatctgacttgtaaaatcasgtctctatgtctttacatgacatgtttccatctaggagagtatagcaatatttatctgtatcatatcaggcagatattctgacacaaattctga

SEQ ID NO: 53085 - DNA, 600 bp, Chicken  19866894304179_2
tctatttcatctgaagcttcaagtgttcagcaagtctgaagagaaaactgaattaaagggaagaagactccaaaagtcacgaggcatgcaaaagwcactgacacttcttaaggcagatgtgatattaacaatgggaaaggcaatctgtatagaatctctctaatgacaggacatgaggtatatactgcatcaagattaataaggaaaaaaaaaagagagagagagagatagaacttcaattcccttcatatttcctttcctgccacttccaatgaacctgcatctgacttgtaaaatcasgtctctatgtctttacatgacatgtttccatctaggagagtatagcaatatttatctgtatcatatcaggcagatattctgacacaaattctgaaggttacaagaccttttacaaacatacagcattgttagctttcagcctctgtgtcatattcctagatttaaagtaatcaaaatacaatgtatcacatctgtacacagtaccaacatactgcagctctcctcagaaattctgtaacaaatgagaccagacatacaggtgaatgccagctggagatgcctgtgaaatgtgggggttag

SEQ ID NO: 53086 - DNA, 600 bp, Chicken  19866894304189_1
tcaaagtcaactccagagttaagggacttgctccagttcagtatcttcaataactctcctgcccaaaacaagcacaaacacattgttcaactcaaatcccaaagcaggccatgtaaacagattggctttgctgcattccctggagtccaagagaaaggaggctctttcagatctgtggtgacttcccatcatgaccatggttactggagaacagcctgccaccctgacatttaattctgaaatctgatgtacttaggtcataacataatcacctcctcctcctccctggctactccagcwaaacctctcccttttactcatctcattagtaaccaacattgtgtttacaaagcaatagtaaacagttatccattgtcaaggcagaaaaataattataaaaaaaaaaaatacagggtcatagtttcatccactgatcttaaaaaaacaaataagaacatctgaaactgtcataataatttccctgtgggtagaactcctactgaatttggtggcacaaggtgaccgctgttcaagcagagtacaattcagtgccaactgaacggccaataaaagcaaaagatctgagatctgcaggcttcc

SEQ ID NO: 53087 - DNA, 600 bp, Chicken  19866894304192_1
gagaaaaagaggaagtaagctgttctcccagctacaggtggaacatgagtgctgagcttagaccaggcttctagctagtaaacatctcaattatgtcagagaattcttctccggtctagttaatatccaagagaaaatatctgtaacttcagataccggagtcctgagcttgccatcggttctctacaactaatcttagtgcaaattattccttagaagagcatgaggactttccttctgaagcacagagaacttctgaaatagcatgctgggaattctagagcagcaaactccacattmactacttgttgatgtagcctgtccctcaaaacaaatgtgaacaggcatacttgtaggcaccccactggattctcctctcagctcacgcaagtcattttagccgtatattcaccattaggtcagatgaagaacacatgaagaagaaaatatttctgcccttttgtaaatatttctgcccaagagaacctccattttcaactagctgcactaccagctcacaacagttccctcatatgggttgcgactgcagccatgctaaagaaagcagcttggcaaagactgcacgggattatgtcatct

SEQ ID NO: 53088 - DNA, 599 bp, Chicken  19866894304197_1
  misc_feature (1)..(10): n is any nucleotide
nnnnnnnnnncaggttctcaatgctggcactcaattggcaggacctgtcatctctgtctagcctgcactttgtgaccctaacattttctcttctttcccaccacaattattctgcactgaagaaaaaaaggtgcagattacctgtgggctgggcacaggatatgaagaacaaagagttcttgaaatacacttcattctgtccaacagtttgtggatgaacagtcaaggaattaaatcgggctgtgaaggatttcaaaacactcccattttaaacttaggactatgaagagaagcttacarcataaaaaacacaacccaccaaaaccccccaaaatcacaaaccgcctttcacagttacaataccacatcaaaacaaagaaataaagctattagttataaaaaaaaatgtagaattaatattataaacttggaagacaaagaactgaacaaactcattgtaggagatgactcaggagctctccagtgcactggacacacaatcgtagaacacaacagggcccattcttttctaataaaaaaatgattaaaatccaattttgcttggtcacatgaacaactgaattgggattaaatatgat

SEQ ID NO: 53089 - DNA, 447 bp, Chicken  19866894304197_2
tactcctaaagtaaacagtatttgctccaaaataaatacagatcttattctgcaactttattgcagtagctacactaaaaacaaggtttacattttcatttcaactgcaccttgtaactgggagaatccaatttaaaataaaacatgatctaaagaaatacttttacagcaaccacgatgtgccagttacattcccacagctaaagaaaactgcgttttgctagttttcttgagctcacaaatgtaaagaagtacttgaagaaccgacaccactttgtatacacttggaacgcttctcartatacccaacactaagatcttcccatttttctgttgaagacgtacatcaaactgcaaaaccacacctcaggacaagcacagtaagtgctgtcctctgaacccctgtgacttctcacttgctctaggatgcagagtgtcagtccaaca

SEQ ID NO: 53090 - DNA, 600 bp, Chicken  19866894304199_1
tgcacctttgcactgcataggttcactatgatgtttgggaatttacttttgaatcacttgttagtcactgctcacttttgttttctaaatggtgatcgtattgtcttcatgcttgactggaggaactatggtctgcaatgtgtaggactaccaaaggctaaaattgaagtactgtgtttgagaaaagaaccatgcctacccaagtactcaggatgctgagaatggggaaggtgacacttctaatcttaacttccatatgtcataaatcactgatttataaaacagtgatgagatcattamttttccttgaaggggtattctagaaattaaataatattctggaaatattcgagtacagtagagaagagttccataatccgtcatgcacagtacatggatcaggagtccaaatgagaagcgtactttatgatcttgtaattaaaactctattgtaatacataagcatacaaaaacaatttagcactacatgaccaatgttggctttgacttattctttcttttagctatatcttacatctatcctcttcatcttaactttatatttcactatgttgtgtgttacgtgcttacaagattgtg

SEQ ID NO: 53091 - DNA, 596 bp, Chicken  19866894304203_1
cttggaggaggagaacagcagctttgcagcactgatgatactgtcagatctgataacagttctccttccgtgtgatcactctggtatctaataaggcataaataggaatggaaacgtcttctgcaattaaaacattcaatggagcatgcctgagtgaattctcatgtgtctgataaagcctgaggtcctggtgcagcctgtcaggcagggtgttaacaaagcaactcttctctatccaaaggcttatttactcttgtcagaactcagtatgtttgaaatctctacccttctgttacatgyagttgaaattgactcatgagttcaaagctagttaggaaagatgcttgctacacaaacacatacatgcacacatacaacacactgagcaatggcacaagtgttatgcctttatgagacyggcctaaacggcagtgtggatacagaaacattacttctttcaccccttcccaaaatctggatgtgaatccacagcagcattttacacctgcgctctcggacagcaccctagccatgtttagagcttgggatcaggatggcaggcaggggccaaatgcactttgacatctgagattgtt

SEQ ID NO: 53092 - DNA, 478 bp, Chicken  19866894304203_2
ttctgcaattaaaacattcaatggagcatgcctgagtgaattctcatgtgtctgataaagcctgaggtcctggtgcagcctgtcaggcagggtgttaacaaagcaactcttctctatccaaaggcttatttactcttgtcagaactcagtatgtttgaaatctctacccttctgttacatgyagttgaaattgactcatgagttcaaagctagttaggaaagatgcttgctacacaaacacatacatgcacacatacaacacactgagcaatggcacaagtgttatgcctttatgagacyggcctaaacggcagtgtggatacagaaacattacttctttcaccccttcccaaaatctggatgtgaatccacagcagcattttacacctgcgctctcggacagcaccctagccatgtttagagcttgggatcaggatggcaggcaggggccaaatgcactttgacatctgagattgtt

SEQ ID NO: 53093 - DNA, 600 bp, Chicken  19866894304206_1
gaaagaaagaaagaaaggaaaaaaaaaataacacagggaaaaccacaggcctaaataagctataaggagcatccacatacagttagacgatctttactgagtctggagacattatgattctgctgcgacaagcagcatttgtcttcattttgtttgactgtcctcatgtgttattattagtggctgtcaagcagcagcagaaaaaaaatagcatcacttgactacgaagttgaatgcataaacgcaataactacacattggtagctgaggagtggatgtctgttaagctggtttaaatgyaaaaaaaaaatcctctccaataattacattttaaaagggaaaaaatgcatatctggcaaaacataagcatccatccttccttctgcttgcatagctaaattaggaactaattataaatacaacttcgcagcatctgaagaagttgctttgagaatgtcctttcagaatgtcagtttagtttaatagcaagaaaacaaatatgttggaacattgacatccactcacattttttctgataacactgataatatgaacattttaaatatgagatccttatcatacagcaattcacagtaaaat

SEQ ID NO: 53094 - DNA, 550 bp, Chicken  19866894304206_2
ttaaaagggaaaaaatgcatatctggcaaaacataagcatccatccttccttctgcttgcatagctaaattaggaactaattataaatacaacttcgcagcatctgaagaagttgctttgagaatgtcctttcagaatgtcagtttagtttaatagcaagaaaacaaatatgttggaacattgacatccactcacattttttctgataacactgataatatgaacattttaaatatgagatccttatcatacagcaattcacagtaaaatgtatttaatacttttaaagcccaatgcacwaaacatactttctggttctgatgtgctccaaatgaagtcccttcaccataaatttttttcagttgtacaatacagtgaataataatactgaacatcttttatataacataaaatagtacactcagaaatttatgcttttaggaagaagaaatcataggcttcaacctaggatgactgtcctacctttaaagtgataaatgatttctctaaaagtacatgccttttgaaaatgcatacacaccaaagtttg

SEQ ID NO: 53095 - DNA, 600 bp, Chicken  19866894304213_1
gctgtgcactgttgccagcaatgaacaagagcccgcacgctgcacttgtaaaaatctgaaccactgtcaccactgatgaaatgcaccactcaccacctcactatttggtcaccataaaagttcagcaatgatgattgtcagtggatgccatttttttctgcatggaacaattcactgacacgcctttacttcacatgcactaccatgacagatgccattttgtcagactgcccttctgctgctatctgttggacagtaataaaatgtaatggtgggaagaatcaacatctactatcataytaccaactcctctgcctctgatgttttgtgagccaacataacacaataggaggcattcagtcagtggagtatcatatggaactaaacatgcactacagcctctagctttttgatgtctttttgtatgggtacgagtttgtactgttttagaagttgagacttctaatacttgatttcagggaatattaattagaaaatatagagtcccaatgtatagtcttatatcaaggaccaagatcagtatacatcaccttttttgagaggaagtatacttccatacattaccttttagaagctgat

SEQ ID NO: 53096 - DNA, 599 bp, Chicken  19866894304222_1
  misc_feature (1)..(93): n is any nucleotide
nnnnnnnnnnnnnnnnnnnnnnnnnnnnnnnnnnnnnnnnnnnnnnnnnnnnnnnnnnnnnnnnnnnnnnnnnnnnnnnnnnnnnnnnnnnnnttgagccttctgcctctttttttaattaaaaaatatcaatggacttcacagactgatgaacattggcaattcactcatttaagttattactgttaatagcaatatctttccttcaaaaatcattaaatatgcctggggatcttgagaccaactgtgtagctggagggaaggatccagtcctggctgcactcatgctgatagataaawgtgtcccttacacgggatgtgctttctgatgctaggaatgtcaatgcaggaatggcaacaattgtgagtcagcccaaccttgggagtctaaggccaaagctgtcagatacactaaaagataagaaaagaaaaggaaaacaaaacaaaataaaacaaaaccaacttcagaaatgtaatattatgatgaagaagagcaaagtattgttagcatttgtcctctggacaacggacaattcagatttcrcataacttgttattactgagaactgcattagtagtcccaagttacagatgtcatt

SEQ ID NO: 53097 - DNA, 600 bp, Chicken  19866894304222_2
ctgtgtagctggagggaaggatccagtcctggctgcactcatgctgatagataaawgtgtcccttacacgggatgtgctttctgatgctaggaatgtcaatgcaggaatggcaacaattgtgagtcagcccaaccttgggagtctaaggccaaagctgtcagatacactaaaagataagaaaagaaaaggaaaacaaaacaaaataaaacaaaaccaacttcagaaatgtaatattatgatgaagaagagcaaagtattgttagcatttgtcctctggacaacggacaattcagatttcrcataacttgttattactgagaactgcattagtagtcccaagttacagatgtcattttaattcaagtatcagtaaattcacagctaaataaaactgtggttttagcccatcagttctgaaggaatactaatttaaacttgctgaatgcccttttaaaccttacctccagtgttggtttttttctttcccctttcagaactgacttgttacatttagattggaaaatacatttgtttttagtatactgttctatactgtgataattctgtgttgagaaaatgaatagaatgacatgggacgt

SEQ ID NO: 53098 - DNA, 460 bp, Chicken  19866894304223_1
ctctctgttcaaaatagttgttatctggttagactaaaccacagctttttatctgatggttcagcgttcattaatgcatgatctttaattcataaccatggaaaattaatatctacctgagtaatcttatatttacctcttcttcctttgcagggtttgctacaggaactcagacacctcaaaattaaagtggaagaactggaaaatgaaagaaatcaatatgagtggaaattaaaagcaacaaaagtaaggagaatgcttagcacttgctaatgacagacttacttcagctagaaaggraygaacacactaatgatcattatttacttttgttacagtgtcaatgcctactatgaaaccaggtttccttggaccatctatatactaagcattttggagcacggcttttgtagctactttttgtgccttttgctccctcctccctccaatttccagtctc

SEQ ID NO: 53099 - DNA, 458 bp, Chicken  19866894304223_2
ctctgttcaaaatagttgttatctggttagactaaaccacagctttttatctgatggttcagcgttcattaatgcatgatctttaattcataaccatggaaaattaatatctacctgagtaatcttatatttacctcttcttcctttgcagggtttgctacaggaactcagacacctcaaaattaaagtggaagaactggaaaatgaaagaaatcaatatgagtggaaattaaaagcaacaaaagtaaggagaatgcttagcacttgctaatgacagacttacttcagctagaaaggraygaacacactaatgatcattatttacttttgttacagtgtcaatgcctactatgaaaccaggtttccttggaccatctatatactaagcattttggagcacggcttttgtagctactttttgtgccttttgctccctcctccctccaatttccagtctc

SEQ ID NO: 53100 - DNA, 599 bp, Chicken  19866894304224_1
  misc_feature (1)..(18): n is any nucleotide
nnnnnnnnnnnnnnnnnnattcactgtgtggaactgttcagaaaaattcaagtctaactctgtcatctccatattttaattagataaaggagatacatgtgtataaaaagaaggggcgtgatttttacagaatatgtgagtttttcagaaaatctctaggactctgactcaacccatattgcatgatataatatattatattaatagacaatttttgttttgtttgaacaatatttatgattttgaagacatcttcttcagtttacttaaaaattatagagtatgttaaaagcagtcaartaagacagtaagtaagaaaaactaggtacattccatctacaaatactcagtctctgagataaggaagttttatgcaataggaagcagttgaggctggaaagaaaatgaaaagcaagacaccrcaaagcaggagatgaaaaggaaacagaagtactccacatgaatggatcaagcattacgaaaataaagcaacaaatatgaagaagcctctgaaattttgtggcaacttatttagcaccatgactactgccacagtatagttttccatgtggatataatatggaatcgcagaaacaygg

SEQ ID NO: 53101 - DNA, 600 bp, Chicken  19866894304224_2
ttttacagaatatgtgagtttttcagaaaatctctaggactctgactcaacccatattgcatgatataatatattatattaatagacaatttttgttttgtttgaacaatatttatgattttgaagacatcttcttcagtttacttaaaaattatagagtatgttaaaagcagtcaartaagacagtaagtaagaaaaactaggtacattccatctacaaatactcagtctctgagataaggaagttttatgcaataggaagcagttgaggctggaaagaaaatgaaaagcaagacaccrcaaagcaggagatgaaaaggaaacagaagtactccacatgaatggatcaagcattacgaaaataaagcaacaaatatgaagaagcctctgaaattttgtggcaacttatttagcaccatgactactgccacagtatagttttccatgtggatataatatggaatcgcagaaacaygggacagttaaggttggaagtgactgcgtggttccacccctgctcaagcagggatacccatctgggtccccagggggcttttgactatctctaaggagactccacaagttctaggcaacctgtgc

SEQ ID NO: 53102 - DNA, 600 bp, Chicken  19866894304224_3
aartaagacagtaagtaagaaaaactaggtacattccatctacaaatactcagtctctgagataaggaagttttatgcaataggaagcagttgaggctggaaagaaaatgaaaagcaagacaccrcaaagcaggagatgaaaaggaaacagaagtactccacatgaatggatcaagcattacgaaaataaagcaacaaatatgaagaagcctctgaaattttgtggcaacttatttagcaccatgactactgccacagtatagttttccatgtggatataatatggaatcgcagaaacaygggacagttaaggttggaagtgactgcgtggttccacccctgctcaagcagggatacccatctgggtccccagggggcttttgactatctctaaggagactccacaagttctaggcaacctgtgctagtgtttcattttccttataattaaacagaacctcctttgttccagcttttgcccactggctctttctctggcaccctgtaccactgaaaactacatggcttcattgactttgctccctcccctcaggtatttattagacattgagatttcctcctaaacctcctctttcatag

SEQ ID NO: 53103 - DNA, 599 bp, Chicken  19866894304225_1
  misc_feature (1)..(135): n is any nucleotide
nnnnnnnnnnnnnnnnnnnnnnnnnnnnnnnnnnnnnnnnnnnnnnnnnnnnnnnnnnnnnnnnnnnnnnnnnnnnnnnnnnnnnnnnnnnnnnnnnnnnnnnnnnnnnnnnnnnnnnnnnnnnnnnnnnnnnnncgctcgattactaaagtatttctgctaaatttatttcccctcacggtttttagttaaattaacatgagaattttaaaccatccccagttttacatgcagtgtgactcagtcaccaaaaatctgaagtcaccttaagcttgctgctgttagctcagggtatgctgyttgttatcttcttcatatacaatcaagagcctctacagtgtgcaaatcatagactcatagaatcagagaatggcctgggttgaaaaggaccacaatgatcatgtagtttcaaccccctgctatgtgcagggtcaccaaccaccagaccaggctgcccagagccacatccagcctggccttgaatgcctccagggatggggcgtccaaaatgtttttagccttggaagctstaaaatgttttaggacattaaaagtttatatatatattaagggccaataaggaatactgatamaagtta

SEQ ID NO: 53104 - DNA, 600 bp, Chicken  19866894304225_2
gcagtgtgactcagtcaccaaaaatctgaagtcaccttaagcttgctgctgttagctcagggtatgctgyttgttatcttcttcatatacaatcaagagcctctacagtgtgcaaatcatagactcatagaatcagagaatggcctgggttgaaaaggaccacaatgatcatgtagtttcaaccccctgctatgtgcagggtcaccaaccaccagaccaggctgcccagagccacatccagcctggccttgaatgcctccagggatggggcgtccaaaatgtttttagccttggaagctstaaaatgttttaggacattaaaagtttatatatatattaagggccaataaggaatactgatamaagttacgttctcctattctaatttttcaattttttggtcgtaatctaaaatacattttacgccgaggctgaaaagatgggggtcggtgggggctgggagagcagtcagtgcaggcagagaaaggcgctcatttgttaacttctcaggcacacgaaagaacatgcagcaacccagacagtacacttcccctgccagctttgcagctctccgcctaacagtcactgctgatttttgct

SEQ ID NO: 53105 - DNA, 600 bp, Chicken  19866894304225_3
atgctgyttgttatcttcttcatatacaatcaagagcctctacagtgtgcaaatcatagactcatagaatcagagaatggcctgggttgaaaaggaccacaatgatcatgtagtttcaaccccctgctatgtgcagggtcaccaaccaccagaccaggctgcccagagccacatccagcctggccttgaatgcctccagggatggggcgtccaaaatgtttttagccttggaagctstaaaatgttttaggacattaaaagtttatatatatattaagggccaataaggaatactgatamaagttacgttctcctattctaatttttcaattttttggtcgtaatctaaaatacattttacgccgaggctgaaaagatgggggtcggtgggggctgggagagcagtcagtgcaggcagagaaaggcgctcatttgttaacttctcaggcacacgaaagaacatgcagcaacccagacagtacacttcccctgccagctttgcagctctccgcctaacagtcactgctgatttttgctgtaggaagcaaaatgatgtgtttctgcagtygcacctttgacatcatctaaatggtctaagtt

SEQ ID NO: 53106 - DNA, 600 bp, Chicken  19866894304225_4
atatattaagggccaataaggaatactgatamaagttacgttctcctattctaatttttcaattttttggtcgtaatctaaaatacattttacgccgaggctgaaaagatgggggtcggtgggggctgggagagcagtcagtgcaggcagagaaaggcgctcatttgttaacttctcaggcacacgaaagaacatgcagcaacccagacagtacacttcccctgccagctttgcagctctccgcctaacagtcactgctgatttttgctgtaggaagcaaaatgatgtgtttctgcagtygcacctttgacatcatctaaatggtctaagttacactgctatactcaaatgatactgtgtaaatttgccacgtaatggtttagttatagcttaagttagggcaatgctgctattccctgttccaaacttccagaacttagcagcccgctgtcctgcactatcctccttccttcagtgactcctgttttacttttggtacgtggaagtcacgctttccaattctgttctgcagctgattgggtaccgctgtgccttatggaactgaggcaactactacagcctagcgttgtaacctctgcg

SEQ ID NO: 53107 - DNA, 600 bp, Chicken  19866894304225_5
gctattccctgttccaaacttccagaacttagcagcccgctgtcctgcactatcctccttccttcagtgactcctgttttacttttggtacgtggaagtcacgctttccaattctgttctgcagctgattgggtaccgctgtgccttatggaactgaggcaactactacagcctagcgttgtaacctctgcgggaagacaacaggaaccgggtgcagcactggaaacgctgcctcttactttggtgcagaagagctaggctacttcagtaccaaaaatgaaagcttctgaaaaaatcccrcgttagttctgatcagaaggaaaaaaaaaraaaaagaaaaagaaaaagaagcacaagagactgaatcacagagaaagacaacattaaaatcctggtctagtttcatgacagtctagacattggaatgccactcgccaaccatttaacctgtgcaacaaaactagcacttcacagacgtcacacaaacaacactgagtctggaaaccatgttctatgctgaagattagtgcaaattccacaccattttcatggcatagtggatttccgaattacttgcatgaagcagctaagttcaagctc

SEQ ID NO: 53108 - DNA, 600 bp, Chicken  19866894304225_6
agcagcccgctgtcctgcactatcctccttccttcagtgactcctgttttacttttggtacgtggaagtcacgctttccaattctgttctgcagctgattgggtaccgctgtgccttatggaactgaggcaactactacagcctagcgttgtaacctctgcgggaagacaacaggaaccgggtgcagcactggaaacgctgcctcttactttggtgcagaagagctaggctacttcagtaccaaaaatgaaagcttctgaaaaaatcccrcgttagttctgatcagaaggaaaaaaaaaraaaaagaaaaagaaaaagaagcacaagagactgaatcacagagaaagacaacattaaaatcctggtctagtttcatgacagtctagacattggaatgccactcgccaaccatttaacctgtgcaacaaaactagcacttcacagacgtcacacaaacaacactgagtctggaaaccatgttctatgctgaagattagtgcaaattccacaccattttcatggcatagtggatttccgaattacttgcatgaagcagctaagttcaagctcattcattcactgatttgaggttactagaat

SEQ ID NO: 53109 - DNA, 600 bp, Chicken  19866894304227_1
gctagaaaggcctgcagtgaaattcatggatgttttacaaataacaagaccatagctattccagctgtgaatagtcaagttgcaaataatagttggagggcctcgaccaattttcccctgagctataagatactggagtggatcactatgggactctacagtacattttcctcgacaggagaggtgggaggagggaggtgcattctctcctcccctcctcttagcactccagaccatacattgttcccatgacgtggtagagaagtgctgaaatcaactacatctgtacacagttagctrtcatattataaaaatgttgaacatttaacatatcaagccattctacttaagaaatattttttcctttaactaaagaaaatgccaagtgaaaagatcaaatacagttcctgatttacactttgcaaaaactctttcttcaaaaactaaaaaaaaaacaatttgtatacattttctgaggttttgatgtacaaattcctgagaaaactctcacaaaactttctcagaagaaatgtataacagagaagtgaacacaagccagaattctcagataatactgttcatcccaagaagacaggaaat

SEQ ID NO: 53110 - DNA, 600 bp, Chicken  19866894304229_1
cggccttccccatgctctctgcgagcggccatcaggccccccaggtacctaggagccgatgatctgcccagaccatgtctcatgcttcgtatggggcgccaggttggtgagcaccacctccactgcctggaacttctggttcttgggagggatggggcagaccttgtacgtcacctcatccccctctaccgggacgtactccccctcgatgctgtgggagaggagaggggaggcgatggggccgtggggccgagagatggagccccccagcaccaaggaaggcaccaagcatcatggggraaaacccacctgcagtgggattttaggtatatggagacagagtatcacctatggatgcaccatcacccgtggacacagcatcaccccagcccacgggtcaccggctgtcccccacatacccagtgctgtgcggacttactcagacacatggacaaaaatgtcttctgtgccgttctctggagtgatgaacccatggccctgtgagcgggagaactgcttgcagacacccttgtagatgggcccggcagaagcacgtgccgtcctgcaggagggaagggatggagaagtctgcgcgtgcag

SEQ ID NO: 53111 - DNA, 600 bp, Chicken  19866894304238_1
aaaaataattggggtactgacagacagacagacagatagacagacagatacttgaatgtctagagggattggcctggggagggagtgtgattctccttacccacctttaagcatagtaccttctgtgcacgtggtgaggggatgggtgcatggtctggttctacatgaacatacaccaagtaaatccaggatgatgccaaacatagtgatctagttacaaaccaggtggaaggggagatgcagaggttgaagaaaggaagagttctagttctgtaaactgaactggatgaagggagcctygtgtttgaatcccgacattagaaatgtttctgtgttttacaygtagcagacttctgagtggcacttgaatgagtaactaacttctaggaagtttgatacctttgcatatttgtcaaaatgcacattaccttagaaattgttttttttttcttttttcttttgttattattctggtaaattktttgtataaaaatagatatacrggattgaatcccgtcttttgaattaataaatttatacgatataatggaaaagcaaatttcattaatgctgtataaagaacaaagattgtttctaatg

SEQ ID NO: 53112 - DNA, 600 bp, Chicken  19866894304238_2
gacagatacttgaatgtctagagggattggcctggggagggagtgtgattctccttacccacctttaagcatagtaccttctgtgcacgtggtgaggggatgggtgcatggtctggttctacatgaacatacaccaagtaaatccaggatgatgccaaacatagtgatctagttacaaaccaggtggaaggggagatgcagaggttgaagaaaggaagagttctagttctgtaaactgaactggatgaagggagcctygtgtttgaatcccgacattagaaatgtttctgtgttttacaygtagcagacttctgagtggcacttgaatgagtaactaacttctaggaagtttgatacctttgcatatttgtcaaaatgcacattaccttagaaattgttttttttttcttttttcttttgttattattctggtaaattktttgtataaaaatagatatacrggattgaatcccgtcttttgaattaataaatttatacgatataatggaaaagcaaatttcattaatgctgtataaagaacaaagattgtttctaatgtttaggaaaagttaaagaaagaaaatttcttatctgcttagt

SEQ ID NO: 53113 - DNA, 600 bp, Chicken  19866894304238_3
aaatccaggatgatgccaaacatagtgatctagttacaaaccaggtggaaggggagatgcagaggttgaagaaaggaagagttctagttctgtaaactgaactggatgaagggagcctygtgtttgaatcccgacattagaaatgtttctgtgttttacaygtagcagacttctgagtggcacttgaatgagtaactaacttctaggaagtttgatacctttgcatatttgtcaaaatgcacattaccttagaaattgttttttttttcttttttcttttgttattattctggtaaattktttgtataaaaatagatatacrggattgaatcccgtcttttgaattaataaatttatacgatataatggaaaagcaaatttcattaatgctgtataaagaacaaagattgtttctaatgtttaggaaaagttaaagaaagaaaatttcttatctgcttagttattttaaagctcctttttatgtagactagtaatcacatcacacccgggctagaatagcttcataggctagaaaacactccaacatgctatacactgcatttcattctaagtaggagttattcataaccattgtgtttt

SEQ ID NO: 53114 - DNA, 600 bp, Chicken  19866894304238_4
tagtgatctagttacaaaccaggtggaaggggagatgcagaggttgaagaaaggaagagttctagttctgtaaactgaactggatgaagggagcctygtgtttgaatcccgacattagaaatgtttctgtgttttacaygtagcagacttctgagtggcacttgaatgagtaactaacttctaggaagtttgatacctttgcatatttgtcaaaatgcacattaccttagaaattgttttttttttcttttttcttttgttattattctggtaaattktttgtataaaaatagatatacrggattgaatcccgtcttttgaattaataaatttatacgatataatggaaaagcaaatttcattaatgctgtataaagaacaaagattgtttctaatgtttaggaaaagttaaagaaagaaaatttcttatctgcttagttattttaaagctcctttttatgtagactagtaatcacatcacacccgggctagaatagcttcataggctagaaaacactccaacatgctatacactgcatttcattctaagtaggagttattcataaccattgtgttttctgtgaaatctgtgtgtaatgc

SEQ ID NO: 53115 - DNA, 600 bp, Chicken  19866894304245_1
gaggcatgtgtttctccatgtctggaaccatgcctctcccatttcctgcccaacatcctcaatttcagggccatgacaaagctctcaggaagaagaaatctgttactctagttttacaatagccaaaaatgtaaggaaatagaagttcccgcattgttgactttcgagatttacagttctcccttggtttcacctgggataaactgctaatcatgaaatacctttgagaatttcactactgaacataccaaggccgcccaacgaactaaaaccactcatagcaatgcacgaagcagataykyagcaactctgttccaggacgtgtggcattcactgctggtccttctkcagcaggagtgctggcagcagggtagtgctgcatgggaayacagctccctgcaggtagctgtgacctggcttccaaccagactgttaataaagcaagcttggctactggggattcacaggacttggagctactgtctgaccatagccaggctcagcacgcgagaagtatctatctatccatctttgtacatcaccaggtctaaaacctttcaccattgcgtaaaagcaagctgctgtcctgagtaaaccagg

SEQ ID NO: 53116 - DNA, 600 bp, Chicken  19866894304245_2
aggcatgtgtttctccatgtctggaaccatgcctctcccatttcctgcccaacatcctcaatttcagggccatgacaaagctctcaggaagaagaaatctgttactctagttttacaatagccaaaaatgtaaggaaatagaagttcccgcattgttgactttcgagatttacagttctcccttggtttcacctgggataaactgctaatcatgaaatacctttgagaatttcactactgaacataccaaggccgcccaacgaactaaaaccactcatagcaatgcacgaagcagataykyagcaactctgttccaggacgtgtggcattcactgctggtccttctkcagcaggagtgctggcagcagggtagtgctgcatgggaayacagctccctgcaggtagctgtgacctggcttccaaccagactgttaataaagcaagcttggctactggggattcacaggacttggagctactgtctgaccatagccaggctcagcacgcgagaagtatctatctatccatctttgtacatcaccaggtctaaaacctttcaccattgcgtaaaagcaagctgctgtcctgagtaaaccaggg

SEQ ID NO: 53117 - DNA, 600 bp, Chicken  19866894304245_3
ggcatgtgtttctccatgtctggaaccatgcctctcccatttcctgcccaacatcctcaatttcagggccatgacaaagctctcaggaagaagaaatctgttactctagttttacaatagccaaaaatgtaaggaaatagaagttcccgcattgttgactttcgagatttacagttctcccttggtttcacctgggataaactgctaatcatgaaatacctttgagaatttcactactgaacataccaaggccgcccaacgaactaaaaccactcatagcaatgcacgaagcagataykyagcaactctgttccaggacgtgtggcattcactgctggtccttctkcagcaggagtgctggcagcagggtagtgctgcatgggaayacagctccctgcaggtagctgtgacctggcttccaaccagactgttaataaagcaagcttggctactggggattcacaggacttggagctactgtctgaccatagccaggctcagcacgcgagaagtatctatctatccatctttgtacatcaccaggtctaaaacctttcaccattgcgtaaaagcaagctgctgtcctgagtaaaccagggg

SEQ ID NO: 53118 - DNA, 600 bp, Chicken  19866894304245_4
cccaacatcctcaatttcagggccatgacaaagctctcaggaagaagaaatctgttactctagttttacaatagccaaaaatgtaaggaaatagaagttcccgcattgttgactttcgagatttacagttctcccttggtttcacctgggataaactgctaatcatgaaatacctttgagaatttcactactgaacataccaaggccgcccaacgaactaaaaccactcatagcaatgcacgaagcagataykyagcaactctgttccaggacgtgtggcattcactgctggtccttctkcagcaggagtgctggcagcagggtagtgctgcatgggaayacagctccctgcaggtagctgtgacctggcttccaaccagactgttaataaagcaagcttggctactggggattcacaggacttggagctactgtctgaccatagccaggctcagcacgcgagaagtatctatctatccatctttgtacatcaccaggtctaaaacctttcaccattgcgtaaaagcaagctgctgtcctgagtaaaccaggggactggacactggtcttgtcttgtaggaaccacctgcaaaccaaaat

SEQ ID NO: 53119 - DNA, 600 bp, Chicken  19866894304245_5
gaagaagaaatctgttactctagttttacaatagccaaaaatgtaaggaaatagaagttcccgcattgttgactttcgagatttacagttctcccttggtttcacctgggataaactgctaatcatgaaatacctttgagaatttcactactgaacataccaaggccgcccaacgaactaaaaccactcatagcaatgcacgaagcagataykyagcaactctgttccaggacgtgtggcattcactgctggtccttctkcagcaggagtgctggcagcagggtagtgctgcatgggaayacagctccctgcaggtagctgtgacctggcttccaaccagactgttaataaagcaagcttggctactggggattcacaggacttggagctactgtctgaccatagccaggctcagcacgcgagaagtatctatctatccatctttgtacatcaccaggtctaaaacctttcaccattgcgtaaaagcaagctgctgtcctgagtaaaccaggggactggacactggtcttgtcttgtaggaaccacctgcaaaccaaaatgacgaggagacagggccagcactttgcagtgcaggtgaag

SEQ ID NO: 53120 - DNA, 600 bp, Chicken  19866894304249_1
tgcaaacacagtatatgagtgtgttgaggtccatatacatatatctgaaattgtttcattttaagtgatgttctttagaggacaggcactgtaaatcctagcatgaactctgtttccacatcgtatcttttaaaggaagtaggatattgttttcacttacaggtggcttttctccccctctccttgcagagagaaaggtaatctcaagctcacatggcaattaaagtcctgcaggaaacagaaagcattctttcttcagcagcagtatttgcttcctttaattcagatttttttaatctycttgcaagcagataacaatagctatcagaccagaatatctgcctggaaaacccactctaatccagagcartgagtgttatggtaggatgtaattattttacagggcaatttcccttttcaggcagtgctgggactgctctaaggagatcacttctgcagggaagagaattagctgctgttgctgaaaacagagatgtatctgcagtgaaactaaaccacaggatgggcatcaggtagctgaaagagcttttggagagagaaaaggagggaggagaaaaggctgtatttcattttttcctt

SEQ ID NO: 53121 - DNA, 600 bp, Chicken  19866894304249_2
ttctttagaggacaggcactgtaaatcctagcatgaactctgtttccacatcgtatcttttaaaggaagtaggatattgttttcacttacaggtggcttttctccccctctccttgcagagagaaaggtaatctcaagctcacatggcaattaaagtcctgcaggaaacagaaagcattctttcttcagcagcagtatttgcttcctttaattcagatttttttaatctycttgcaagcagataacaatagctatcagaccagaatatctgcctggaaaacccactctaatccagagcartgagtgttatggtaggatgtaattattttacagggcaatttcccttttcaggcagtgctgggactgctctaaggagatcacttctgcagggaagagaattagctgctgttgctgaaaacagagatgtatctgcagtgaaactaaaccacaggatgggcatcaggtagctgaaagagcttttggagagagaaaaggagggaggagaaaaggctgtatttcattttttcctttaaaatacaccaattttattatccggagatgttctgtttatatacaggcttatgattcttgttttggagt

SEQ ID NO: 53122 - DNA, 600 bp, Chicken  19866894304250_1
tatgtgacatatgttacagcatctcagatgcctttggctagcaacatttatctacacatggccagagtttcacagagtaaaggttttgctgtacatgcacagatccaacatgtgcagtggaattgttttgctccagtgctgttttgctggtgataaaactctcccactaagcaaggagcagtgggttaagaactgatgttctggatactggtgcattttttcaatacattcctaagagatgtgctcagtgtacattgctataagtggcatgaccttgaaagtaattgcttagtcaacaayataaaatggtttttcatattaaatctctccctcagaatatcatggctaccagatgtcattacaaacatcacctaacatcaaaagctgcacctcattatagaggaaaggaaaaggaaaaagaaggaaaataaacactccagtctggaagaagagtaattctttagaagtggkgtcagaaaagagaggaaatgaggttatgagttatgctttgtccctctttgaattctctgtctaggtgagtctgagtaatcaactctcacaacattcatatactccctgggagtgaatttcagccttgtg

SEQ ID NO: 53123 - DNA, 600 bp, Chicken  19866894304250_2
caaggagcagtgggttaagaactgatgttctggatactggtgcattttttcaatacattcctaagagatgtgctcagtgtacattgctataagtggcatgaccttgaaagtaattgcttagtcaacaayataaaatggtttttcatattaaatctctccctcagaatatcatggctaccagatgtcattacaaacatcacctaacatcaaaagctgcacctcattatagaggaaaggaaaaggaaaaagaaggaaaataaacactccagtctggaagaagagtaattctttagaagtggkgtcagaaaagagaggaaatgaggttatgagttatgctttgtccctctttgaattctctgtctaggtgagtctgagtaatcaactctcacaacattcatatactccctgggagtgaatttcagccttgtgagttcatgctgtgagaaaaatgccataaacaatctcccagaaaacagtttgtttccacagaggggccagaccatggggaaatgtcataaaatgagacgaagatgtctcattttatcattttatttattttattatgtctaacaggcagataattctcccaaattgtctctc

SEQ ID NO: 53124 - DNA, 600 bp, Chicken  19866894304253_1
ccataactttccctggcaatgaggtcaggctgacaggcctatggttccctgtatcctccttacagcccttcttgtagataggagtcacatgagcaagcctccaattaatactgatgaatgactacagtgagatactggaacaggtggtgctggagtcactgtccctggaggttttcaagaaaggagtggtactgagggacatggtttagtgggcatggtggtgatgggttgaaggttgaactggatgaattttatgttcttttccaatctaaatgattctatatttctatcaatgtaacytctctcattagcttaactgcacagacaaggacctcttgctgacaggtaggctccaggtgaatgtaaaatatttcactaggaaattgcataaagacattttaacattaaatgcttattacaatcacatggtcatgcttttataaggaatagctcacaccctttctgctagtggtcgagggtagctgaatactgcttataagtgttgtggagtgctaagcagaaacactactttgcaagtgaatagcacatggcaaatgcaataattctaaggattcatgcattatcaccccatgctgatat

SEQ ID NO: 53125 - DNA, 600 bp, Chicken  19866894304254_1
cagagaataaacaacagcagaatctgggacgaggggtactccagaagctcaggaaggaatctgccttgtttggcagtaaatggtagaaggtatgctgtggaagaaagtctttgcagaaggaagagtactgttttgcaagaaggttctgagggaagggcttgtcatttttcctgtgcagaagaggagaaacgaacacctatttaaaaccacgtcagctgaaaaaagagttttctgaggaaaaggctgaggacagggcagagatggtaggaccacttttgaaatctcattcatatgacactrccttttatctgctggatgaaatgctaaaaaagaaatggagccagagcagtaaccattaagaataggaactcccagagacaggaagatttggatggtttttcaagccaaagccttcctgcaagcatgctgcagaaagtacattctgttaagtttgtacacgtcttctcactcggcaccgctcatcacaacgccaggagttctttgttaccctcttgttctctcaggtaatgtttttcatgctaatctgatatctggacttggatgaagcctcttgttctgatgcttgggagaataaatcac

SEQ ID NO: 53126 - DNA, 600 bp, Chicken  19866894304256_1
ccaccaatgcagagagctacactgaagtcaatggaaggatgcgcttctctaccagagaacagagattctcccagcatttgtatgcacaagttagggggtgaccttaagacacaagactgtacatgtcactcactcgttggataaatctcccctaaacaatatgagaaatggagaactaatctttaaactaatatgtgctggaaatgaaaaacagaactgtcagtcaaagtgctgacagtgggcgaagggatccacagtgttgagacaagagcttatatcaatacttggtgcttcatcagycatctatttcaacactttgaacctagataattaaggattatatccacccaggctgtgcaaacccacaaatacacaatttcaggagcaataagattagcacaagtatatttaaaaaaatgtaataggctaagaacaaacagagctggctcttacagtagcagatgaatctccrtgagatatcacatgtgatggatagcaagtctgtgtttgacttacggtgcttgcagtcgtggccagtccagccggggggacacgtgcactccccagtgatgtggtgacacagagcatcactgctgcagc

SEQ ID NO: 53127 - DNA, 600 bp, Chicken  19866894304256_2
gaactaatctttaaactaatatgtgctggaaatgaaaaacagaactgtcagtcaaagtgctgacagtgggcgaagggatccacagtgttgagacaagagcttatatcaatacttggtgcttcatcagycatctatttcaacactttgaacctagataattaaggattatatccacccaggctgtgcaaacccacaaatacacaatttcaggagcaataagattagcacaagtatatttaaaaaaatgtaataggctaagaacaaacagagctggctcttacagtagcagatgaatctccrtgagatatcacatgtgatggatagcaagtctgtgtttgacttacggtgcttgcagtcgtggccagtccagccggggggacacgtgcactccccagtgatgtggtgacacagagcatcactgctgcagctgcatggcagctggcagttttgtccgtagtatccaacagggcaggctgaaagcagaggagcagactgtaatttcacctagataataattcaggcacagatcttttcaaacaagacagtgacagcttgttccctaaaacatgcactagctgaatccaggaagcaaaatggtga

SEQ ID NO: 53128 - DNA, 600 bp, Chicken  19866894304259_1
atgtgtgggtatgcagatttgaaggactgtgggaatggggtgtacgaaggtaccagctagaagagatgaaaaagattaacttagactgttgtccttacagatgtcctatagaattctctttgactgaataaattattctcaaacttcctgctgaggatacgtgaaatattttgcttctttcctgaaaaactgtgtgaatattgcagctttgctagaaggttgctttcacaaactattaatgtagccacttttaaatgaggtcagctgtgtttggggaattttttattattattattattrttttttttttttgtgaaatactgtgttctttatcctcttccagtctgcagaaaactgcttatattcaaagggaaaaaatcaacttgtgaaacagctaatgaaattcaccccaaagttttgccagtcagtaaattatagaaaaataagatatggggaaaaccataacaggtaggattattcatgtctctgtaatttttttttttttttttttgtaaggaatatgcagctattaaggtcatgtaggcgtttcctgacaacctcgctcaaatagctggaaagcatgtgtagtcatttgaaaac

SEQ ID NO: 53129 - DNA, 600 bp, Chicken  19866894304259_2
tgtgtgggtatgcagatttgaaggactgtgggaatggggtgtacgaaggtaccagctagaagagatgaaaaagattaacttagactgttgtccttacagatgtcctatagaattctctttgactgaataaattattctcaaacttcctgctgaggatacgtgaaatattttgcttctttcctgaaaaactgtgtgaatattgcagctttgctagaaggttgctttcacaaactattaatgtagccacttttaaatgaggtcagctgtgtttggggaattttttattattattattattartttttttttttgtgaaatactgtgttctttatcctcttccagtctgcagaaaactgcttatattcaaagggaaaaaatcaacttgtgaaacagctaatgaaattcaccccaaagttttgccagtcagtaaattatagaaaaataagatatggggaaaaccataacaggtaggattattcatgtctctgtaatttttttttttttttttttgtaaggaatatgcagctattaaggtcatgtaggcgtttcctgacaacctcgctcaaatagctggaaagcatgtgtagtcatttgaaaaca

SEQ ID NO: 53130 - DNA, 599 bp, Chicken  19866894304263_1
  misc_feature (1)..(66): n is any nucleotide
nnnnnnnnnnnnnnnnnnnnnnnnnnnnnnnnnnnnnnnnnnnnnnnnnnnnnnnnnnnnnnnnnntggagactgaagctgactggaactgttcatgtagctcctgtctaaaggagaaagagcaggaattcattaatcatatcacaacttgctcaaccacaaagagatgtgagcactctgggctagctgctggaccaggcagtaattctgatgtcagaacatgtggaactggtgcgcttcccagcagcagcatgcaacccggatctttaacttttggctcctgccctactttttcatttkctgtcagggaactgtaagaaatactttgaagggtgcactgtgctttgaaggatgtggtgcgctttgaagaagcagcrgaaaatactgatgagcttaagaggatgtcgcatccagccctcctctgccagagatgtcttttgcaaaagcagtttgtaggaagcaagagaaaacgatgagggcataaatgggaattcctgtggacttcagtgctatcacagtgccagtcatctgggaaatgcttgggaacaagctgcagagctgcagtcagcctacaaaggggcgcagctcccctcagaatg

SEQ ID NO: 53131 - DNA, 600 bp, Chicken  19866894304263_2
gctgactggaactgttcatgtagctcctgtctaaaggagaaagagcaggaattcattaatcatatcacaacttgctcaaccacaaagagatgtgagcactctgggctagctgctggaccaggcagtaattctgatgtcagaacatgtggaactggtgcgcttcccagcagcagcatgcaacccggatctttaacttttggctcctgccctactttttcatttkctgtcagggaactgtaagaaatactttgaagggtgcactgtgctttgaaggatgtggtgcgctttgaagaagcagcrgaaaatactgatgagcttaagaggatgtcgcatccagccctcctctgccagagatgtcttttgcaaaagcagtttgtaggaagcaagagaaaacgatgagggcataaatgggaattcctgtggacttcagtgctatcacagtgccagtcatctgggaaatgcttgggaacaagctgcagagctgcagtcagcctacaaaggggcgcagctcccctcagaatgcatgagcagcaggaacaactccatgcggtgctggcaggaggagaatgtgaatgtgaagggaaatttaacaactccctc

SEQ ID NO: 53132 - DNA, 599 bp, Chicken  19866894304266_1
  misc_feature (1)..(88): n is any nucleotide
nnnnnnnnnnnnnnnnnnnnnnnnnnnnnnnnnnnnnnnnnnnnnnnnnnnnnnnnnnnnnnnnnnnnnnnnnnnnnnnnnnnnnnnnaatggacagatgagaggcaatcaaaagtttaaaggaagaagattgggatctggagaagggttttttttttgcactggaaccatgatgtcaatgaagcagctatcacagagttcaaagatagagagagtgaagaagctgcaagatgcttgcagtctctggaggagtggcatttttaccagaaatctttgatttcatctggaaatagtatgttraatgagtgagtgcttcactgatgattaaagtaatgcattactcttattactgcccttactggtaagctacatggtaccatttctggcatgattttgggacgtcagacacttaatgttaacaaatccactacaagttgcattaatctagttggtcytgccttttccctctgttgtataattcctagttgctaaagctattttttcatattccttayaaacactgtaggtgctctgactgcctgtggcagcaagcrtctgacaggtatcgatgactaatcaactaagggctaaaatactga

SEQ ID NO: 53133 - DNA, 600 bp, Chicken  19866894304266_2
tttgcactggaaccatgatgtcaatgaagcagctatcacagagttcaaagatagagagagtgaagaagctgcaagatgcttgcagtctctggaggagtggcatttttaccagaaatctttgatttcatctggaaatagtatgttraatgagtgagtgcttcactgatgattaaagtaatgcattactcttattactgcccttactggtaagctacatggtaccatttctggcatgattttgggacgtcagacacttaatgttaacaaatccactacaagttgcattaatctagttggtcytgccttttccctctgttgtataattcctagttgctaaagctattttttcatattccttayaaacactgtaggtgctctgactgcctgtggcagcaagcrtctgacaggtatcgatgactaatcaactaagggctaaaatactgaaacagtaaaaagaactttttaaatgtatagcactcaagcaaagagaattttggaaaatatttttcccctgtgtttaaaaggtctgactctgagctgatgctgtcagaagctcaaaaaaagattatgtactgatgggactgggacacgtgggcattg

SEQ ID NO: 53134 - DNA, 600 bp, Chicken  19866894304266_3
tgaagaagctgcaagatgcttgcagtctctggaggagtggcatttttaccagaaatctttgatttcatctggaaatagtatgttraatgagtgagtgcttcactgatgattaaagtaatgcattactcttattactgcccttactggtaagctacatggtaccatttctggcatgattttgggacgtcagacacttaatgttaacaaatccactacaagttgcattaatctagttggtcytgccttttccctctgttgtataattcctagttgctaaagctattttttcatattccttayaaacactgtaggtgctctgactgcctgtggcagcaagcrtctgacaggtatcgatgactaatcaactaagggctaaaatactgaaacagtaaaaagaactttttaaatgtatagcactcaagcaaagagaattttggaaaatatttttcccctgtgtttaaaaggtctgactctgagctgatgctgtcagaagctcaaaaaaagattatgtactgatgggactgggacacgtgggcattgaccctctggttgatgaccactgtgttaggcttctctctgctgtggcttatccttgtcacc

SEQ ID NO: 53135 - DNA, 600 bp, Chicken  19866894304266_4
gcatttttaccagaaatctttgatttcatctggaaatagtatgttraatgagtgagtgcttcactgatgattaaagtaatgcattactcttattactgcccttactggtaagctacatggtaccatttctggcatgattttgggacgtcagacacttaatgttaacaaatccactacaagttgcattaatctagttggtcytgccttttccctctgttgtataattcctagttgctaaagctattttttcatattccttayaaacactgtaggtgctctgactgcctgtggcagcaagcrtctgacaggtatcgatgactaatcaactaagggctaaaatactgaaacagtaaaaagaactttttaaatgtatagcactcaagcaaagagaattttggaaaatatttttcccctgtgtttaaaaggtctgactctgagctgatgctgtcagaagctcaaaaaaagattatgtactgatgggactgggacacgtgggcattgaccctctggttgatgaccactgtgttaggcttctctctgctgtggcttatccttgtcacctctcactctgattactactgatgttttctccgtatattg

SEQ ID NO: 53136 - DNA, 600 bp, Chicken  19866894304271_1
atgaaataaggcagacaacagaccttttccttcaattaattttgcagacaaatgagaagcaattaattaacagtgaacattaaggacactgaattaccgcaaactatggaaaacacagatgaggaaagagtcaatagaaacatttaatgcacgtcttaagtgttagcagaaataaaacatgctgctttctgtgtttccttaaagcctatttcatttcctggcagagaggattttctcccttctacttcttcacaataaacacgcacatttttgctccctcacccatcattaaatcacacrgaacagaagaaatccttcagaagtctctgtccatattaaaacacaaatttcctcattccaacggagatacagaatgatttgtcattggatggttgtgtgtgatgcataactttgttaaattcctgctatttgtttccaaatctttatagcaatattattcacaagagagaaaaaaaacatttacagaggcttttgcaatcagatgatgtaaaatcagtggaaagtataggccactcacacacctggaaacaaaacagcatctccccaataaccgctgccctgtggcactctcagcactgt

SEQ ID NO: 53137 - DNA, 600 bp, Chicken  19866894304271_2
aataaaacatgctgctttctgtgtttccttaaagcctatttcatttcctggcagagaggattttctcccttctacttcttcacaataaacacgcacatttttgctccctcacccatcattaaatcacacrgaacagaagaaatccttcagaagtctctgtccatattaaaacacaaatttcctcattccaacggagatacagaatgatttgtcattggatggttgtgtgtgatgcataactttgttaaattcctgctatttgtttccaaatctttatagcaatattattcacaagagagraaaaaaacatttacagaggcttttgcaatcagatgatgtaaaatcagtggaaagtataggccactcacacacctggaaacaaaacagcatctccccaataaccgctgccctgtggcactctcagcactgtactcaccgcaatcaggatctggaaggagctgtgcatgacctcaatgtaccgatactccagggcacagcctatcacagagatataggaatggctatccagtcctgtgatgccagacattgaagcctccttccttacacagccaggaccgttttcactccaccacgactggt

SEQ ID NO: 53138 - DNA, 599 bp, Chicken  19866894304275_1
  misc_feature (1)..(128): n is any nucleotide
nnnnnnnnnnnnnnnnnnnnnnnnnnnnnnnnnnnnnnnnnnnnnnnnnnnnnnnnnnnnnnnnnnnnnnnnnnnnnnnnnnnnnnnnnnnnnnnnnnnnnnnnnnnnnnnnnnnnnnnnnnnnnnnnatcaagaaagtgcaggtttaagattttaagacctttattatttactatgattcatattatttacttgcttttggcttatgtttttttattatctacttgaagcactcccatctgtactcattgagtattgtacagagttttgtgcttccttaactttcttccagacttcttyaacttttccctcaagacacattcggatacagcttcacactttttctcttttctggatttgtgaaaaacctttatgttatgagctgtgccagttttaaaacaattgctgttcaaaggagatccaaagctgcatagtttaagagaaccagatcaggtgcagaaactatactcttctgcttttcacacatttgttagtagatgcagccatgcatagtgcagtacacttggttttgagacatgacagtaacagcaagtgtactagtgttagttaaatatgtgytctagtgatcttgtcaaacc

SEQ ID NO: 53139 - DNA, 600 bp, Chicken  19866894304275_2
aactttcttccagacttcttyaacttttccctcaagacacattcggatacagcttcacactttttctcttttctggatttgtgaaaaacctttatgttatgagctgtgccagttttaaaacaattgctgttcaaaggagatccaaagctgcatagtttaagagaaccagatcaggtgcagaaactatactcttctgcttttcacacatttgttagtagatgcagccatgcatagtgcagtacacttggttttgagacatgacagtaacagcaagtgtactagtgttagttaaatatgtgytctagtgatcttgtcaaacctcagctgctcctggtgctgtcagaaacctcaatcaaagaatttcagttactgttcatttccaaggaagttctgccacctaccagctgaaaatacaggactgtgccatcacaggtcactcatttctttaaaaatatgaaactgatagcagtgcatgcagataagtaattttaactgatactaaaattggttatttggcatttttgctgtgctttgtgaaataccataaaaatacactattttgaagaaaaaaaaatatttttaataggtgtgataacagct

SEQ ID NO: 53140 - DNA, 600 bp, Chicken  19866894304275_3
gctgtcagaaacctcaatcaaagaatttcagttactgttcatttccaaggaagttctgccacctaccagctgaaaatacaggactgtgccatcacaggtcactcatttctttaaaaatatgaaactgatagcagtgcatgcagataagtaattttaactgatactaaaattggttatttggcatttttgctgtgctttgtgaaataccataaaaatacactattttgaagaaaaaaaaatatttttaataggtgtgataacagctgtttgaacagtatcttctagttgtttttactatcrggtattgtttccctgttattttaagatactgcctataaataacaaaaagctggagactgttgtgaagatgtgggtcttcattaattgcttcctctgctttctgtatgtgtgtgtaaaaaatcccatgactgtgcccttacttcagccttctgtagcattttgtactctctctgcacaaatgtaaatggctgttttaaagtgtatgtcagaacagaaacctctgcattaaacatggccatttaaaaatataaatgagtctgttgaaggcatggatactatttatatacagggtgctgaatc

SEQ ID NO: 53141 - DNA, 599 bp, Chicken  19866894304287_1
  misc_feature (1)..(19): n is any nucleotide
nnnnnnnnnnnnnnnnnnntccaccagcttgtaggtaacattttgaaaatactgcatggtcctggttgtatcaggaaataatccttagggatgcctaataacaacattttattaagtaagcttcccttcaacatctcccacgctggggcagggaagagaaccgcaactgcaggtttaaaaacatccaaaacaagttttcagctatgtcaactgtttattctaacaccagataaaacagtacgatagaatgtgccactgacaacggcacgcacagacttaattccactttctgtgcattcrttgcattacaacagacctgccaaggaaaacagtcagaaccaaacaagcagttccacagtttatcatttcagactcggggtgcttaattgtttcagctattagcaactctgaccargaaaagcagcctcacaggataacgaatagttaagaagagggcagagattaaccactgaaccatgagctttgttagaacagaaagttaagagtaacacaataaagcaacagggctatcaccacggataccctcccctctacctcaacacacagaggtggacactgggacaaactccacctggtga

SEQ ID NO: 53142 - DNA, 600 bp, Chicken  19866894304287_2
gtaagcttcccttcaacatctcccacgctggggcagggaagagaaccgcaactgcaggtttaaaaacatccaaaacaagttttcagctatgtcaactgtttattctaacaccagataaaacagtacgatagaatgtgccactgacaacggcacgcacagacttaattccactttctgtgcattcrttgcattacaacagacctgccaaggaaaacagtcagaaccaaacaagcagttccacagtttatcatttcagactcggggtgcttaattgtttcagctattagcaactctgaccargaaaagcagcctcacaggataacgaatagttaagaagagggcagagattaaccactgaaccatgagctttgttagaacagaaagttaagagtaacacaataaagcaacagggctatcaccacggataccctcccctctacctcaacacacagaggtggacactgggacaaactccacctggtgaagcatgttcaactaccttgcacagactttagtgtacacaggctaaatcgaaataccacattaaataccttactataaccagagttatatcagcacgtacatcaggataacaaacac

SEQ ID NO: 53143 - DNA, 600 bp, Chicken  19866894304290_1
cagaagtacctgtccctgaaagccaatttttcccaccaaggaaaggcatggtcctgtccttccaggtcagcctccaaaatagatgttttcagaaaaggtctatcaggtcttttggctgagggaaacctacatcagagtttcactgcagagggcttcctttctcccagaagaacaaaaagaaagaaaaaacaatgtatccaagagcctcaagggcctgtaggctcatccctggtaacatctctggcctgtcagatatttctaagctgtgggctctgaatgcctcaaatgttggtatccatraaagccctggctttcagaatgagataagacttttctcacaggatttatagaccacagtgagcaaccttctaatgcatcctagaacctctgagtgggaaatgggtcttggcagacagcacagcttccaaagtccttgtgacttctgaaaaccatgtcacctgctccagctatatgcagttttctgggagatccaaatctttccttgtagcaccactctgaagggtcctaggagaagtcactggggtggaaacaatcacagagactgcaaaacatagcctggtttcctgaataggaagaaga

SEQ ID NO: 53144 - DNA, 599 bp, Chicken  19866894304291_1
  misc_feature (1)..(53): n is any nucleotide
nnnnnnnnnnnnnnnnnnnnnnnnnnnnnnnnnnnnnnnnnnnnnnnnnnnnntgcagattttttgtggctgtgcttagttaagtacgtcttaattttgtgtcagaatataaaacaaacagtgggtgcagcagtgagctgtaacattgctattgtgggagagtgtgctgtaactagtatagataccagcaggaatgtttaaaaatatttttaaatgaagccttgtagagtaatgaactaatctaaattttatacatgattctgagacttcaccaggtacttaggcatatgcaaggtcatrgattcacatctaaatggttagcttgaacaatatgtggaatagtgttgccagcaggagcagggaagtgatcatccccctgtactcagcactggtgaggccacacctcgagtactgtgttcagctttgggcccctcactacaagaaagactctgaggccctggagyrtgtctagagaagggcgatggagctgtgaggggtctggagcacaactcttacgagcagtggctgagggagctgggattgtttagtgtggaggaggctcaggggagacctcatcactcttggaatctgcctgaagg

SEQ ID NO: 53145 - DNA, 562 bp, Chicken  19866894304291_2
tgctgtaactagtatagataccagcaggaatgtttaaaaatatttttaaatgaagccttgtagagtaatgaactaatctaaattttatacatgattctgagacttcaccaggtacttaggcatatgcaaggtcatrgattcacatctaaatggttagcttgaacaatatgtggaatagtgttgccagcaggagcagggaagtgatcatccccctgtactcagcactggtgaggccacacctcgagtactgtgttcagctttgggcccctcactacaagaaagactctgaggccctggagyrtgtctagagaagggcgatggagctgtgaggggtctggagcacaactcttacgagcagtggctgagggagctgggattgtttagtgtggaggaggctcaggggagacctcatcactcttggaatctgcctgaagggaggttgtggcgaggtgggagttggcttcctctgtgtaactagtgacagaacaagagggaacagcctcaagttgtgccaggggagattcaggttggatatttaggaaaaatttcttctctgaaagag

SEQ ID NO: 53146 - DNA, 561 bp, Chicken  19866894304291_3
gctgtaactagtatagataccagcaggaatgtttaaaaatatttttaaatgaagccttgtagagtaatgaactaatctaaattttatacatgattctgagacttcaccaggtacttaggcatatgcaaggtcatrgattcacatctaaatggttagcttgaacaatatgtggaatagtgttgccagcaggagcagggaagtgatcatccccctgtactcagcactggtgaggccacacctcgagtactgtgttcagctttgggcccctcactacaagaaagactctgaggccctggagyrtgtctagagaagggcgatggagctgtgaggggtctggagcacaactcttacgagcagtggctgagggagctgggattgtttagtgtggaggaggctcaggggagacctcatcactcttggaatctgcctgaagggaggttgtggcgaggtgggagttggcttcctctgtgtaactagtgacagaacaagagggaacagcctcaagttgtgccaggggagattcaggttggatatttaggaaaaatttcttctctgaaagag

SEQ ID NO: 53147 - DNA, 600 bp, Chicken  19866894304294_1
gcatgcagatgtggaaggggtagggctgcatgggttggggtcccagtgctgcgtctgaccttcccagcaaggtgagcaagcacgactcaccctgcatggagggcacataaagaatcacagaatggttgggttggaagggacctcaaggatcatgaagctccaaccacaggcagggccaccaacctccacatttcataccagcccaggctgcccagggccccatccaacctggccttgaacacctccagggatggatggggcatccacagcctctctgggcagctgttcagcacctcaccrctctcataggaaagaacttccccctgacatccaacctcaatcttccctccttcaatttcaaaccatttccccttgtcctgctgtcatctaccctttcaaagagctgactctcctcctgtttataggctccctttaggtcctggaaggctgcaatgaggtcaccccacagccatcttttctccaggctgaacaagcctagctctctcagcctgtcagcctggataaacagctaagataattatataaggcttatcaaattaggggttgctttgcattgtaagagagatgaagtgaactgaa

SEQ ID NO: 53148 - DNA, 600 bp, Chicken  19866894304296_1
gcctggttctgcccgctaacttacagcttcttcagtacagaagaatcatgatgtacataaaaaacaaacaagtggcatcattaatgtctgatgaaaacacctccactgttgagagaatttccagtaggttaacactgatgaagatgcaaagatgttgcactgagctgggggtgtggttggccgatggccctccaggcccagctccttccttcaggaacacttgcaccccattaagctgctggctaatttaggccttcatgtatttgctagttctaacgaggagcagtgacatcccactgrgggatacaggaaatcattttagaggagaaatatttgcaagaaggcaaaactgtcttcagagcaatgtatatcccagagtttctcctcgcagacaaaaggcctctaggtttgctctgccctttggtagtgcagtggtttacaagccaccttcctggcactgcagttagtcccttcttccctggagagcagtcctacccccatccctgcccactcccagcgtgcacatttctttcttcctttccccactgctgctgtctggcttccatcaaacctgttacctcaaattctccacagcctgtg

SEQ ID NO: 53149 - DNA, 600 bp, Chicken  19866894304307_1
agaaaagggaactcgaacaccggatacgcagagacgtgtactgggtgatgtatctccaaataaggtcagtgaaaagcggggcgtggaatgcttgggatgatttcagtgccttctgaagtgagatagcatcagtgtggattttaaatatatacagtattggaatctcatttaggcctgctgtttttacataaacatataggagaacgctgaaaccaagagtcaaataagcttaaactggctcagttcttccttgtaggtgggcagcgtggattccccgtaagatcataaaaattacatcaygaaggtagaayggatggttcacagtctgccatcctctatttcgactacagagccatggcagcattttctctcacaccactctagtaacatacactgtactgtagtaacaaattcttaggacagaatcacattaccataacaaactctgtagtgcccccccagctgcatgaacagtgatgtaacaagattttgttggctagtattggaagtgaagtaagcaccagtctgttatttttgctgagaacagccctgttccagctctctgggggttgtgttttcttcttccctccaattcatgaa

SEQ ID NO: 53150 - DNA, 600 bp, Chicken  19866894304307_2
ctcgaacaccggatacgcagagacgtgtactgggtgatgtatctccaaataaggtcagtgaaaagcggggcgtggaatgcttgggatgatttcagtgccttctgaagtgagatagcatcagtgtggattttaaatatatacagtattggaatctcatttaggcctgctgtttttacataaacatataggagaacgctgaaaccaagagtcaaataagcttaaactggctcagttcttccttgtaggtgggcagcgtggattccccgtaagatcataaaaattacatcaygaaggtagaayggatggttcacagtctgccatcctctatttcgactacagagccatggcagcattttctctcacaccactctagtaacatacactgtactgtagtaacaaattcttaggacagaatcacattaccataacaaactctgtagtgcccccccagctgcatgaacagtgatgtaacaagattttgttggctagtattggaagtgaagtaagcaccagtctgttatttttgctgagaacagccctgttccagctctctgggggttgtgttttcttcttccctccaattcatgaaaaatttgcaga

SEQ ID NO: 53151 - DNA, 599 bp, Chicken  19866894304309_1
  misc_feature (1)..(24): n is any nucleotide
nnnnnnnnnnnnnnnnnnnnnnnnctgtagttagagaagtgtcattcatttgttctgtcgttacattctggtttgtctgcattttcggtagttaaaattgccttctttatttgtattatttaggttaatttgacagcgtatcaaaatagtaactgcatgcgaagggcactgatgctgctgttgaaagagcgaggagcatgttgtacctaaattattgtgggggctccagcggtcatggtggtgggggaagaacagtctggttttcctgaggaccttcctgttctgatatctgtgcagttrtgccagtttcctcttttccttttaaacasagggcactcagcaaatatagcagaagttttcacatctcttgacaaaggggaggagaaacttggcttccaygttctttaactcgtcttgtaatactaatggctcatcacacttgtctgggatgattactttataccttttaagctctggtactgttgggacgatgaagaaattggtgatggattccttcataattttatcctttctgttcatgaaatgagattgaataggagwattaaacaaacaaaaaaccctacagattttagtctatg

SEQ ID NO: 53152 - DNA, 600 bp, Chicken  19866894304309_2
gttagagaagtgtcattcatttgttctgtcgttacattctggtttgtctgcattttcggtagttaaaattgccttctttatttgtattatttaggttaatttgacagcgtatcaaaatagtaactgcatgcgaagggcactgatgctgctgttgaaagagcgaggagcatgttgtacctaaattattgtgggggctccagcggtcatggtggtgggggaagaacagtctggttttcctgaggaccttcctgttctgatatctgtgcagttrtgccagtttcctcttttccttttaaacasagggcactcagcaaatatagcagaagttttcacatctcttgacaaaggggaggagaaacttggcttccaygttctttaactcgtcttgtaatactaatggctcatcacacttgtctgggatgattactttataccttttaagctctggtactgttgggacgatgaagaaattggtgatggattccttcataattttatcctttctgttcatgaaatgagattgaataggagwattaaacaaacaaaaaaccctacagattttagtctatgtcaggtttatttacctgatgtggcacttag

SEQ ID NO: 53153 - DNA, 600 bp, Chicken  19866894304309_3
gccttctttatttgtattatttaggttaatttgacagcgtatcaaaatagtaactgcatgcgaagggcactgatgctgctgttgaaagagcgaggagcatgttgtacctaaattattgtgggggctccagcggtcatggtggtgggggaagaacagtctggttttcctgaggaccttcctgttctgatatctgtgcagttrtgccagtttcctcttttccttttaaacasagggcactcagcaaatatagcagaagttttcacatctcttgacaaaggggaggagaaacttggcttccaygttctttaactcgtcttgtaatactaatggctcatcacacttgtctgggatgattactttataccttttaagctctggtactgttgggacgatgaagaaattggtgatggattccttcataattttatcctttctgttcatgaaatgagattgaataggagwattaaacaaacaaaaaaccctacagattttagtctatgtcaggtttatttacctgatgtggcacttagatgttcccttacaatgacctgagrcttttccacggttcrtagatacgctctgaattgatggtggatatgc

SEQ ID NO: 53154 - DNA, 600 bp, Chicken  19866894304309_4
tttcctgaggaccttcctgttctgatatctgtgcagttrtgccagtttcctcttttccttttaaacasagggcactcagcaaatatagcagaagttttcacatctcttgacaaaggggaggagaaacttggcttccaygttctttaactcgtcttgtaatactaatggctcatcacacttgtctgggatgattactttataccttttaagctctggtactgttgggacgatgaagaaattggtgatggattccttcataattttatcctttctgttcatgaaatgagattgaataggagwattaaacaaacaaaaaaccctacagattttagtctatgtcaggtttatttacctgatgtggcacttagatgttcccttacaatgacctgagrcttttccacggttcrtagatacgctctgaattgatggtggatatgcaccagggtagaaacaggggactgttcaacttatttcttaggagttttacaaacagctgccaacagctggttttgcagcatagttttaagtagctttggtaggaatatttgtgctgttacattttcacacaacacaaaaacataaaacaaggaagtgtggaag

SEQ ID NO: 53155 - DNA, 600 bp, Chicken  19866894304309_5
agttttcacatctcttgacaaaggggaggagaaacttggcttccaygttctttaactcgtcttgtaatactaatggctcatcacacttgtctgggatgattactttataccttttaagctctggtactgttgggacgatgaagaaattggtgatggattccttcataattttatcctttctgttcatgaaatgagattgaataggagwattaaacaaacaaaaaaccctacagattttagtctatgtcaggtttatttacctgatgtggcacttagatgttcccttacaatgacctgagrcttttccacggttcrtagatacgctctgaattgatggtggatatgcaccagggtagaaacaggggactgttcaacttatttcttaggagttttacaaacagctgccaacagctggttttgcagcatagttttaagtagctttggtaggaatatttgtgctgttacattttcacacaacacaaaaacataaaacaaggaagtgtggaaggtgaaaaatggaagaagtttatctacctgctcatacgctgcttagtgctgtgttttccaagaaccatatttatgcgcactgataaaagatga

SEQ ID NO: 53156 - DNA, 600 bp, Chicken  19866894304309_6
tgacaaaggggaggagaaacttggcttccaygttctttaactcgtcttgtaatactaatggctcatcacacttgtctgggatgattactttataccttttaagctctggtactgttgggacgatgaagaaattggtgatggattccttcataattttatcctttctgttcatgaaatgagattgaataggagwattaaacaaacaaaaaaccctacagattttagtctatgtcaggtttatttacctgatgtggcacttagatgttcccttacaatgacctgagrcttttccacggttcrtagatacgctctgaattgatggtggatatgcaccagggtagaaacaggggactgttcaacttatttcttaggagttttacaaacagctgccaacagctggttttgcagcatagttttaagtagctttggtaggaatatttgtgctgttacattttcacacaacacaaaaacataaaacaaggaagtgtggaaggtgaaaaatggaagaagtttatctacctgctcatacgctgcttagtgctgtgttttccaagaaccatatttatgcgcactgataaaagatgaagtttcatataaaga

SEQ ID NO: 53157 - DNA, 600 bp, Chicken  19866894304311_1
tatttagctacaggaatctccagttgctatttttgttgacgtcagtagttaataggctggacagcctacagggtaattttgcagacagtgttaagcagttctgtgctcagcagagatttcagcatccttgctgtgcatatacagcatatgtgtgctgcagtggtggctttgaatcatgcttgatccgatgtaagggcttcgtggtgctctagaaggaatcaacagcatcttttctctttacttctctaaattcatccctggctgaggaagggattttatattcacagaaccttgattctrtctctttggtgaaggtcttggccaagtttggatgaaaaataaaaaaaaaaaaactacagctctttaacgacatgtttacagctcaggtgggtgcattatcatttgaggaaaacattagtatgtgtaacattagtgatgaataattaatatgcagttataacacctttcatctttatggattttatacgggctacaatcattgaattttctccagatcacatctrgacagyggttaaagagtctgtatgctctcaaatggtccaggaactgaagataactgccacgcacagaggaaacaac

SEQ ID NO: 53158 - DNA, 600 bp, Chicken  19866894304311_2
gcatcttttctctttacttctctaaattcatccctggctgaggaagggattttatattcacagaaccttgattctrtctctttggtgaaggtcttggccaagtttggatgaaaaataaaaaaaaaaaaactacagctctttaacgacatgtttacagctcaggtgggtgcattatcatttgaggaaaacattagtatgtgtaacattagtgatgaataattaatatgcagttataacacctttcatctttatggattttatacgggctacaatcattgaattttctccagatcacatctrgacagyggttaaagagtctgtatgctctcaaatggtccaggaactgaagataactgccacgcacagaggaaacaacagagaatttagctaggcagaaaatactagcaggaagcaagcatctagtgatggaacttagcagtgtgtcttacacatgtaattagctggataaggatttggaaaggacacagaagacttcactgctgcccttgttgaaaggactactgcatcttttaaagcctcacatcagcaggagctcatttcactgtcctattcagaaggaagaacataccatctgcagaa

SEQ ID NO: 53159 - DNA, 600 bp, Chicken  19866894304311_3
tttctctttacttctctaaattcatccctggctgaggaagggattttatattcacagaaccttgattctrtctctttggtgaaggtcttggccaagtttggatgaaaaataaaaaaaaaaaaactacagctctttaacgacatgtttacagctcaggtgggtgcattatcatttgaggaaaacattagtatgtgtaacattagtgatgaataattaatatgcagttataacacctttcatctttatggattttatacgggctacaatcattgaattttctccagatcacatctrgacagyggttaaagagtctgtatgctctcaaatggtccaggaactgaagataactgccacgcacagaggaaacaacagagaatttagctaggcagaaaatactagcaggaagcaagcatctagtgatggaacttagcagtgtgtcttacacatgtaattagctggataaggatttggaaaggacacagaagacttcactgctgcccttgttgaaaggactactgcatcttttaaagcctcacatcagcaggagctcatttcactgtcctattcagaaggaagaacataccatctgcagaattagca

SEQ ID NO: 53160 - DNA, 600 bp, Chicken  19866894304314_1
cttttcaaaagcttctaagcttcatctgtttgaccttttctactattggtaaaaagctagccatgcactgtgcttacatggctctcttttccaatctgagtgattctatgattctatgactttgcttgctctcgcctctcttagaaaacaggggggtagctacttttgacacagagctccccagaaacaccaacttttctctctctcaaaactactaagtgccagacagctttctctctagacaatgtaactgtacattctgattcccaactcttaaactatttagcaggtaggctgccrctgacaatagctactttatacaccttgcgtttttcttggagccatacccttaatacaagccgaatattcacgtgtgatacagacaagactattmtacctgggttactgacatggtaaggaattttaacaaaawtctggagatacctgtaaaactacwatcaaagatcagttctgctgattacagttcttgcaagtgttttaatgtagtcttactacaaaacactttgatattcctaacaattgctttctttgaaagaacatgccgttaagtgtaattttcagccattcctgctacatgtt

SEQ ID NO: 53161 - DNA, 600 bp, Chicken  19866894304314_2
tctgagtgattctatgattctatgactttgcttgctctcgcctctcttagaaaacaggggggtagctacttttgacacagagctccccagaaacaccaacttttctctctctcaaaactactaagtgccagacagctttctctctagacaatgtaactgtacattctgattcccaactcttaaactatttagcaggtaggctgccrctgacaatagctactttatacaccttgcgtttttcttggagccatacccttaatacaagccgaatattcacgtgtgatacagacaagactattmtacctgggttactgacatggtaaggaattttaacaaaawtctggagatacctgtaaaactacwatcaaagatcagttctgctgattacagttcttgcaagtgttttaatgtagtcttactacaaaacactttgatattcctaacaattgctttctttgaaagaacatgccgttaagtgtaattttcagccattcctgctacatgtttaagagtaatctcacagtttggtactagaactagaaataaaacgttaacactttaccattaccaagttaaatatcttcattataaaatggcaag

SEQ ID NO: 53162 - DNA, 600 bp, Chicken  19866894304314_3
gcctctcttagaaaacaggggggtagctacttttgacacagagctccccagaaacaccaacttttctctctctcaaaactactaagtgccagacagctttctctctagacaatgtaactgtacattctgattcccaactcttaaactatttagcaggtaggctgccrctgacaatagctactttatacaccttgcgtttttcttggagccatacccttaatacaagccgaatattcacgtgtgatacagacaagactattmtacctgggttactgacatggtaaggaattttaacaaaawtctggagatacctgtaaaactacwatcaaagatcagttctgctgattacagttcttgcaagtgttttaatgtagtcttactacaaaacactttgatattcctaacaattgctttctttgaaagaacatgccgttaagtgtaattttcagccattcctgctacatgtttaagagtaatctcacagtttggtactagaactagaaataaaacgttaacactttaccattaccaagttaaatatcttcattataaaatggcaaggtgattgattagtttacgtggtcacctgatactatcaca

SEQ ID NO: 53163 - DNA, 600 bp, Chicken  19866894304314_4
agctacttttgacacagagctccccagaaacaccaacttttctctctctcaaaactactaagtgccagacagctttctctctagacaatgtaactgtacattctgattcccaactcttaaactatttagcaggtaggctgccrctgacaatagctactttatacaccttgcgtttttcttggagccatacccttaatacaagccgaatattcacgtgtgatacagacaagactattmtacctgggttactgacatggtaaggaattttaacaaaawtctggagatacctgtaaaactacwatcaaagatcagttctgctgattacagttcttgcaagtgttttaatgtagtcttactacaaaacactttgatattcctaacaattgctttctttgaaagaacatgccgttaagtgtaattttcagccattcctgctacatgtttaagagtaatctcacagtttggtactagaactagaaataaaacgttaacactttaccattaccaagttaaatatcttcattataaaatggcaaggtgattgattagtttacgtggtcacctgatactatcacatttttgttaacagtgaggtctgaa

SEQ ID NO: 53164 - DNA, 600 bp, Chicken  19866894304322_1
gaaattccaagggtaagaaaattgagtacgattatcattccaaaactgtcttagacagatatttaattaccgagaagaaatcagttttgccttgaaacatttttccttaggaacacattgactcaaattcctccttctttatgatcagtagaaccatctgtcagttcttattttgctgaggccgattgtcagacagttgtctcacttgtccttcctgcccgtttcaatactggcctgccattaaaggttcttcagcgtttgaaagttttccccatcaccgcaagacttggagcatgccgrtattcatttagcaaatgtcatcagtagatactctaggcctcttgggagcaagttattcagatttgctggcttaaatttaagagttgagcactcctaagtgttgtttaacattcttctcttgttagtagggaaaattttacctaattcccctattcccctatcattctaatgctttccaagtagaaagcaattatattctctgtctcacaccatttttactgagcatagggctagraagatttgccctgctatcactacagcattttatactgttcatggctctgctgacccaaatgattt

SEQ ID NO: 53165 - DNA, 600 bp, Chicken  19866894304322_2
tgccattaaaggttcttcagcgtttgaaagttttccccatcaccgcaagacttggagcatgccgrtattcatttagcaaatgtcatcagtagatactctaggcctcttgggagcaagttattcagatttgctggcttaaatttaagagttgagcactcctaagtgttgtttaacattcttctcttgttagtagggaaaattttacctaattcccctattcccctatcattctaatgctttccaagtagaaagcaattatattctctgtctcacaccatttttactgagcatagggctagraagatttgccctgctatcactacagcattttatactgttcatggctctgctgacccaaatgattttttctttggtattgtcaataagtttgttctttgtctgttcctcatgttacttttttttttttagttattttttattaccagtggattttctttctgatccaggttttctgaaaaccaaaattgtcctttctcatctgttgcggccttttagcaataaacttcacaaaattctatgattatgctcacagttgacaaaatagagatttttggttcaattccacgcattcacatatgg

SEQ ID NO: 53166 - DNA, 600 bp, Chicken  19866894304331_1
ccgtggaggacgtggacatgctcatcaggcctgcgatgttcatatccgagctgttgttcctggagatcatgttgaggatggtctgctccgaaaggccctcgtcttcgccgtgctcgtcggctttggatttcctggctgcctgcgaggcctgcgagggaagcacagcgcagccgtttcattggggctctcggggcggagggctgacaccacttttctcctcccagctgctgaggaatccctttgcaccccgcagtgccctcagctgccccgatgcgcgccctccgggctctgccccacacrcagatccacacccggaggagcwgsgcacacacacacgggccctcccaagcagaaccccccccacaccaacgtcagagcccccttcagagcctcaccctccagttccggatgcgcttcagcctgttgggggttttctcgaggatctgcaggaattcatgggtcagttctgcagaggagacacaaaggggggaagggggcggtcagagggacgagcggagcggcccgggtccgtcgggacaaccccctgctcactgatggatggagctactgatgggatggagccactccaggaggggcagt

SEQ ID NO: 53167 - DNA, 600 bp, Chicken  19866894304331_2
catcaggcctgcgatgttcatatccgagctgttgttcctggagatcatgttgaggatggtctgctccgaaaggccctcgtcttcgccgtgctcgtcggctttggatttcctggctgcctgcgaggcctgcgagggaagcacagcgcagccgtttcattggggctctcggggcggagggctgacaccacttttctcctcccagctgctgaggaatccctttgcaccccgcagtgccctcagctgccccgatgcgcgccctccgggctctgccccacacrcagatccacacccggaggagcwgsgcacacacacacgggccctcccaagcagaaccccccccacaccaacgtcagagcccccttcagagcctcaccctccagttccggatgcgcttcagcctgttgggggttttctcgaggatctgcaggaattcatgggtcagttctgcagaggagacacaaaggggggaagggggcggtcagagggacgagcggagcggcccgggtccgtcgggacaaccccctgctcactgatggatggagctactgatgggatggagccactccaggaggggcagtgctgacagccggcaccactgac

SEQ ID NO: 53168 - DNA, 600 bp, Chicken  19866894304331_3
tcaggcctgcgatgttcatatccgagctgttgttcctggagatcatgttgaggatggtctgctccgaaaggccctcgtcttcgccgtgctcgtcggctttggatttcctggctgcctgcgaggcctgcgagggaagcacagcgcagccgtttcattggggctctcggggcggagggctgacaccacttttctcctcccagctgctgaggaatccctttgcaccccgcagtgccctcagctgccccgatgcgcgccctccgggctctgccccacacrcagatccacacccggaggagcwgsgcacacacacacgggccctcccaagcagaaccccccccacaccaacgtcagagcccccttcagagcctcaccctccagttccggatgcgcttcagcctgttgggggttttctcgaggatctgcaggaattcatgggtcagttctgcagaggagacacaaaggggggaagggggcggtcagagggacgagcggagcggcccgggtccgtcgggacaaccccctgctcactgatggatggagctactgatgggatggagccactccaggaggggcagtgctgacagccggcaccactgaccg

SEQ ID NO: 53169 - DNA, 599 bp, Chicken  19866894304335_1
  misc_feature (1)..(150): n is any nucleotide
nnnnnnnnnnnnnnnnnnnnnnnnnnnnnnnnnnnnnnnnnnnnnnnnnnnnnnnnnnnnnnnnnnnnnnnnnnnnnnnnnnnnnnnnnnnnnnnnnnnnnnnnnnnnnnnnnnnnnnnnnnnnnnnnnnnnnnnnnnnnnnnnnnnnnnctgcagaaaaatgtgaatatggagttggcggatgcttagcatgtgaactgtggaacttgtttctcactgtgagccagtttttaggtcttgaaaatgtttaaaagctcgtctgaggaaatctaaaaggctgtcagcagatccaaggagaartctaaattcagtaactcaggaatctcagagctgcttgtaagttcatgtatgtaattgacagagccctctcagggcctgaagaagtagaattatgttttctgcraaaacaaggacaattaaaagagtttccttgtgaaaagcacactttttcattcctacwttytcagatatgaactttttcgagcatatgcatataccactggacatatgaaagtttttgcagggaatgcatattactgtcttgcatatggctttatccctggataggacagtgtggaacaggtgacagcgagtggaca

SEQ ID NO: 53170 - DNA, 599 bp, Chicken  19866894304335_2
  misc_feature (1)..(47): n is any nucleotide
nnnnnnnnnnnnnnnnnnnnnnnnnnnnnnnnnnnnnnnnnnnnnnnctgcagaaaaatgtgaatatggagttggcggatgcttagcatgtgaactgtggaacttgtttctcactgtgagccagtttttaggtcttgaaaatgtttaaaagctcgtctgaggaaatctaaaaggctgtcagcagatccaaggagaartctaaattcagtaactcaggaatctcagagctgcttgtaagttcatgtatgtaattgacagagccctctcagggcctgaagaagtagaattatgttttctgcraaaacaaggacaattaaaagagtttccttgtgaaaagcacactttttcattcctacwttytcagatatgaactttttcgagcatatgcatataccactggacatatgaaagtttttgcagggaatgcatattactgtcttgcatatggctttatccctggataggacagtgtggaacaggtgacagcgagtggacatgccctaccatgacatgccactagaagatcccatcaaacagaaaataaraacagtataactaaccaattcctattattactagaagcagaacatctcttcatc

SEQ ID NO: 53171 - DNA, 600 bp, Chicken  19866894304335_3
atgtgaatatggagttggcggatgcttagcatgtgaactgtggaacttgtttctcactgtgagccagtttttaggtcttgaaaatgtttaaaagctcgtctgaggaaatctaaaaggctgtcagcagatccaaggagaartctaaattcagtaactcaggaatctcagagctgcttgtaagttcatgtatgtaattgacagagccctctcagggcctgaagaagtagaattatgttttctgcraaaacaaggacaattaaaagagtttccttgtgaaaagcacactttttcattcctacwttytcagatatgaactttttcgagcatatgcatataccactggacatatgaaagtttttgcagggaatgcatattactgtcttgcatatggctttatccctggataggacagtgtggaacaggtgacagcgagtggacatgccctaccatgacatgccactagaagatcccatcaaacagaaaataaraacagtataactaaccaattcctattattactagaagcagaacatctcttcatcaaagctgtacaagtagccacaaatgtttgggaagcagaggaacgagaaagatggaagg

SEQ ID NO: 53172 - DNA, 600 bp, Chicken  19866894304335_4
tgaatatggagttggcggatgcttagcatgtgaactgtggaacttgtttctcactgtgagccagtttttaggtcttgaaaatgtttaaaagctcgtctgaggaaatctaaaaggctgtcagcagatccaaggagaartctaaattcagtaactcaggaatctcagagctgcttgtaagttcatgtatgtaattgacagagccctctcagggcctgaagaagtagaattatgttttctgcraaaacaaggacaattaaaagagtttccttgtgaaaagcacactttttcattcctacwttytcagatatgaactttttcgagcatatgcatataccactggacatatgaaagtttttgcagggaatgcatattactgtcttgcatatggctttatccctggataggacagtgtggaacaggtgacagcgagtggacatgccctaccatgacatgccactagaagatcccatcaaacagaaaataaraacagtataactaaccaattcctattattactagaagcagaacatctcttcatcaaagctgtacaagtagccacaaatgtttgggaagcagaggaacgagaaagatggaaggtta

SEQ ID NO: 53173 - DNA, 600 bp, Chicken  19866894304335_5
atgtaattgacagagccctctcagggcctgaagaagtagaattatgttttctgcraaaacaaggacaattaaaagagtttccttgtgaaaagcacactttttcattcctacwttytcagatatgaactttttcgagcatatgcatataccactggacatatgaaagtttttgcagggaatgcatattactgtcttgcatatggctttatccctggataggacagtgtggaacaggtgacagcgagtggacatgccctaccatgacatgccactagaagatcccatcaaacagaaaataaraacagtataactaaccaattcctattattactagaagcagaacatctcttcatcaaagctgtacaagtagccacaaatgtttgggaagcagaggaacgagaaagatggaaggttatggagtaaggtaggtatccttacttatccttcccagttgttctaattacacataacttgtttatgtcagaagattcaggctgtggttcttcctaatatacaggatttgtaaaaatgggacactgtactaagtggagggcagaaggaccagcagtgatgatcagtcagccaggagaagattaagat

SEQ ID NO: 53174 - DNA, 599 bp, Chicken  19866894304339_1
  misc_feature (1)..(48): n is any nucleotide
nnnnnnnnnnnnnnnnnnnnnnnnnnnnnnnnnnnnnnnnnnnnnnnnaggaagccacttgttgaattttaacctgagaacaaggtgttcctgtttcctcttcaaatactgttggcaaacacacagaatagcaaaagtagcctttcagccctctgccacatacccacctcccagccaaacatgtacacctcgctggcaactaaaatgaaaaggttttaattatcttctgttagagcatttctgcttgaaattgaaaaacaaagtaatggaggcctcaggtcacagctaaatacattcaarttacaaaccatcataggattattccattagactcytaattatgctatctctgtataaaacctatacacttctaggcatgctcttacgtctgctcccacacagacaagtctggttgaagatcaccctgaggttaagtagtattacagttgctagagcagttcattcatctgttttacacagttttgaggaaaaaaacaaacaaacaaaacaacctaaagctttctgaaagttggatctggactttgtatgtgttggtctgataacctcacacttcacagttagacaggtgctaaggtcct

SEQ ID NO: 53175 - DNA, 599 bp, Chicken  19866894304339_2
  misc_feature (1)..(13): n is any nucleotide
nnnnnnnnnnnnnaggaagccacttgttgaattttaacctgagaacaaggtgttcctgtttcctcttcaaatactgttggcaaacacacagaatagcaaaagtagcctttcagccctctgccacatacccacctcccagccaaacatgtacacctcgctggcaactaaaatgaaaaggttttaattatcttctgttagagcatttctgcttgaaattgaaaaacaaagtaatggaggcctcaggtcacagctaaatacattcaarttacaaaccatcataggattattccattagactcytaattatgctatctctgtataaaacctatacacttctaggcatgctcttacgtctgctcccacacagacaagtctggttgaagatcaccctgaggttaagtagtattacagttgctagagcagttcattcatctgttttacacagttttgaggaaaaaaacaaacaaacaaaacaacctaaagctttctgaaagttggatctggactttgtatgtgttggtctgataacctcacacttcacagttagacaggtgctaaggtcctgcacccctgagagtgtggatgcttcacatatgtat

SEQ ID NO: 53176 - DNA, 599 bp, Chicken  19866894304341_1
  misc_feature (1)..(210): n is any nucleotide
nnnnnnnnnnnnnnnnnnnnnnnnnnnnnnnnnnnnnnnnnnnnnnnnnnnnnnnnnnnnnnnnnnnnnnnnnnnnnnnnnnnnnnnnnnnnnnnnnnnnnnnnnnnnnnnnnnnnnnnnnnnnnnnnnnnnnnnnnnnnnnnnnnnnnnnnnnnnnnnnnnnnnnnnnnnnnnnnnnnnnnnnnnnnnnnnnnnnnnnnnnnnnnnnnnaaaacttcttctcagaaagagtggtgctgcagtggcacaggctgcccagggtgggggtagggtcaccgtccctggaggtgttcaagaaaygtttggaagtcactattgaaagtaatggacaaatcattgtagctatccacgcatgttcccagaagggaccrctgctttttggctgctgtgtgcagtgcgtagaaaagaagctttgtctcaagtaacacagcaatatccttttaagtatacaagatgtcaggaaagggttctacagcagagggtggtcgggccctggaacagactgcccatggtggtggtcaaggctccaatctgcctgagttcaaggaacatttsgacaaygctctcaaacatatggcctgatgtttgggtggtcctgt

SEQ ID NO: 53177 - DNA, 599 bp, Chicken  19866894304341_2
  misc_feature (1)..(139): n is any nucleotide
nnnnnnnnnnnnnnnnnnnnnnnnnnnnnnnnnnnnnnnnnnnnnnnnnnnnnnnnnnnnnnnnnnnnnnnnnnnnnnnnnnnnnnnnnnnnnnnnnnnnnnnnnnnnnnnnnnnnnnnnnnnnnnnnnnnnnnnnnnnaaaacttcttctcagaaagagtggtgctgcagtggcacaggctgcccagggtgggggtagggtcaccgtccctggaggtgttcaagaaaygtttggaagtcactattgaaagtaatggacaaatcattgtagctatccacgcatgttcccagaagggaccrctgctttttggctgctgtgtgcagtgcgtagaaaagaagctttgtctcaagtaacacagcaatatccttttaagtatacaagatgtcaggaaagggttctacagcagagggtggtcgggccctggaacagactgcccatggtggtggtcaaggctccaatctgcctgagttcaaggaacatttsgacaaygctctcaaacatatggcctgatgtttgggtggtcctgtgtggagctaggagttggtcctgatgatccttatgggtcctttccaagytgggatattctaggattctataa

SEQ ID NO: 53178 - DNA, 600 bp, Chicken  19866894304341_3
ccagggtgggggtagggtcaccgtccctggaggtgttcaagaaaygtttggaagtcactattgaaagtaatggacaaatcattgtagctatccacgcatgttcccagaagggaccrctgctttttggctgctgtgtgcagtgcgtagaaaagaagctttgtctcaagtaacacagcaatatccttttaagtatacaagatgtcaggaaagggttctacagcagagggtggtcgggccctggaacagactgcccatggtggtggtcaaggctccaatctgcctgagttcaaggaacatttsgacaaygctctcaaacatatggcctgatgtttgggtggtcctgtgtggagctaggagttggtcctgatgatccttatgggtcctttccaagytgggatattctaggattctataacctttcttatttatttactggctaaaawatargaggatgtagctaaaaccaagagtttgagtacaatactcagtaggaaaatgcagctgaacatcaagaaaaagatgagagcaatgagatataataggcattgagataaccttcataaagggaagcattaaaagcctcatggtttgaaaggtgtc

SEQ ID NO: 53179 - DNA, 600 bp, Chicken  19866894304341_4
tgggggtagggtcaccgtccctggaggtgttcaagaaaygtttggaagtcactattgaaagtaatggacaaatcattgtagctatccacgcatgttcccagaagggaccrctgctttttggctgctgtgtgcagtgcgtagaaaagaagctttgtctcaagtaacacagcaatatccttttaagtatacaagatgtcaggaaagggttctacagcagagggtggtcgggccctggaacagactgcccatggtggtggtcaaggctccaatctgcctgagttcaaggaacatttsgacaaygctctcaaacatatggcctgatgtttgggtggtcctgtgtggagctaggagttggtcctgatgatccttatgggtcctttccaagytgggatattctaggattctataacctttcttatttatttactggctaaaawatargaggatgtagctaaaaccaagagtttgagtacaatactcagtaggaaaatgcagctgaacatcaagaaaaagatgagagcaatgagatataataggcattgagataaccttcataaagggaagcattaaaagcctcatggtttgaaaggtgtccaatag

SEQ ID NO: 53180 - DNA, 553 bp, Chicken  19866894304341_5
cacgcatgttcccagaagggaccrctgctttttggctgctgtgtgcagtgcgtagaaaagaagctttgtctcaagtaacacagcaatatccttttaagtatacaagatgtcaggaaagggttctacagcagagggtggtcgggccctggaacagactgcccatggtggtggtcaaggctccaatctgcctgagttcaaggaacatttsgacaaygctctcaaacatatggcctgatgtttgggtggtcctgtgtggagctaggagttggtcctgatgatccttatgggtcctttccaagytgggatattctaggattctataacctttcttatttatttactggctaaaawatargaggatgtagctaaaaccaagagtttgagtacaatactcagtaggaaaatgcagctgaacatcaagaaaaagatgagagcaatgagatataataggcattgagataaccttcataaagggaagcattaaaagcctcatggtttgaaaggtgtccaatagcctttgtaaaagcagtgaaaacccattacaaggagcagt

SEQ ID NO: 53181 - DNA, 502 bp, Chicken  19866894304341_6
gtagaaaagaagctttgtctcaagtaacacagcaatatccttttaagtatacaagatgtcaggaaagggttctacagcagagggtggtcgggccctggaacagactgcccatggtggtggtcaaggctccaatctgcctgagttcaaggaacatttsgacaaygctctcaaacatatggcctgatgtttgggtggtcctgtgtggagctaggagttggtcctgatgatccttatgggtcctttccaagytgggatattctaggattctataacctttcttatttatttactggctaaaawatargaggatgtagctaaaaccaagagtttgagtacaatactcagtaggaaaatgcagctgaacatcaagaaaaagatgagagcaatgagatataataggcattgagataaccttcataaagggaagcattaaaagcctcatggtttgaaaggtgtccaatagcctttgtaaaagcagtgaaaacccattacaaggagcagt

SEQ ID NO: 53182 - DNA, 498 bp, Chicken  19866894304341_7
aaaagaagctttgtctcaagtaacacagcaatatccttttaagtatacaagatgtcaggaaagggttctacagcagagggtggtcgggccctggaacagactgcccatggtggtggtcaaggctccaatctgcctgagttcaaggaacatttsgacaaygctctcaaacatatggcctgatgtttgggtggtcctgtgtggagctaggagttggtcctgatgatccttatgggtcctttccaagytgggatattctaggattctataacctttcttatttatttactggctaaaawatargaggatgtagctaaaaccaagagtttgagtacaatactcagtaggaaaatgcagctgaacatcaagaaaaagatgagagcaatgagatataataggcattgagataaccttcataaagggaagcattaaaagcctcatggtttgaaaggtgtccaatagcctttgtaaaagcagtgaaaacccattacaaggagcagt

SEQ ID NO: 53183 - DNA, 600 bp, Chicken  19866894304342_1
ctgtgaatctttctcttgtgaaagaccttgtgaagtactttccttgtgcttgggatttcacctcttaatatgtaggttttttaaaacacagacttttggatttcaccacttcgatgaagtatgaacatgtggatatggacagctgctttttgtcagagaagcctaaagcagccatgcagctagaggacatggagattcaggctgagctaccagttcccctgcggcctcctacagatacaaaaaaagtatgtattacaacaaagctctgttgcttcttctaggaaagtactcaggtaaaasttgcatttttagctttgtggaaaactttcaaaacaaggactgtatgtatttgcttcttctgtggtatgtggtagtccagtgaatgcggatttgaattgattatttcctgtggggaaaaaaaaatatgatataaacttgtgaagcagtttgttggcctttcaaaagagaaattcagttaggtttatcatagttcaggcagtaacaccaaaaagagaagaagcggagtgataatctctcagcagaaggacttgacattaactattatcttcagtgtgttcttgccaaagtaattccatgctg

SEQ ID NO: 53184 - DNA, 600 bp, Chicken  19866894304346_1
gagaggagcccgctgcccacgcggctgcgtttcgtacccttcgagctcttctccctgctatcagagcgaacgttgtcccatagggcagcttcgccggcgaacggttacgggaagtagaaagaataccgcgtgtaaggacgcaacgaagagatgcatcgggaagcagggatgctaaccgctgtttcaatttgcgggcggctgctggaggtgcgcccgaagcgcggcgtgcagcgggcacgtcaagtcccagcgcagggctcggggtgtgagggggtgcacgggggtgccgcagaaatgcckctataaaagtacgaacgcggtcggaagatgggagggaaaagtaacgaggtgtcagcggcggagatgctctccccgccgctctcgtgccggcggctccgcgcgtcgcgatccaatccgcctcccagctaataataaagaaaagcgttatctaacatttagcgtgtggttctgtccgaggacaaatgagaaagaagctgcatcattaggacctaaaaggcaacaaaacaaaaatcagagcataatgatgcacctaaatgaagggggaaatgttgcacagctcattttattaatcagactgtc

SEQ ID NO: 53185 - DNA, 600 bp, Chicken  19866894304359_1
ccaggtgctgcacttgagtcataacaacctcaggaagcagtatagacttagggcagagtggttggaaagttgcctggcagaaaagggcctgggaatgctggctgaacatgagccagcagtgtgcccagatggccaatggcatcctgatttgtaccagaaacagtgtggccagcagtgggtaagataggttaaagataaaattttttgttgttgagagtggaggtcaccacttcagttcctgatatcccatggctaatgcctaagaaatcttctcagaaaatatgcaagtgagtagacaaygaagtacttgttggattcatcagcccgctgcaaaacttcaagatatttgaagttttttaaggcaaatattgtggcactaaactcttttttcctgcagggaactgaagacgtaatccctgatcaaaagttatctgttacactgagatctttagaaggaatactgtggccaaaagcttctcaaattttccaactacaccaagtaatcttaaaataaataaataaatacatacataaaccaacaaaaaagacattgctacagcaaaataatacaacaatatatttcatttggcatttgtcaac

SEQ ID NO: 53186 - DNA, 600 bp, Chicken  19866894304361_1
aggggactcctgcttggcaagagccgggtgggcacctgggtgaatggatggagcgtgcccaaagggagagcaaattgctgggggcatggggctgtgagtgccctgctgtggggctgggatgctgaggggctgagacactgcagggctgtgatgctgcagggatgggatgctgagaggcttggatgctgcaggggcttttgcttttaggaatgttcatggtgaggaagcgtctttgctgtcgttgtggtgatggttgaatccatcacactggggtgtgcaggcactatgaacagagcaggraggaaaggttttatttctgtctgcatgttctgagcctcaactgaaggaaagcaagtacctggcctggggtgaggcaggcagcccagtcagtgtgcttggagctctggcacagagctcatccctgtacaccaggatgggggctgcctgatgtctggttagggttagggttaaggttagggttagggttggggttagagttagtcctcccactggtgggctctgtcctggagaaacccccagaatcagagcttgccctctgctgttcccactccaggcagctcagggatctgaggagaaccc

SEQ ID NO: 53187 - DNA, 599 bp, Chicken  19866894304372_1
  misc_feature (1)..(96): n is any nucleotide
nnnnnnnnnnnnnnnnnnnnnnnnnnnnnnnnnnnnnnnnnnnnnnnnnnnnnnnnnnnnnnnnnnnnnnnnnnnnnnnnnnnnnnnnnnnnnnnncaggattcagtttcctgaagtaggtcacatttgatctccttccaggcacactgcagaagcaactgcctaacagggagctttcaaaattcatattctgcttcctaatgctgtcaacacctgcccttcagaaatacagctatactggcagaacagtttttcattgcatttgggtataaacaggccaggaatcctgtttttcccttyggttacctgtatttcttctaaatttcctcagaaggtacatattgactttcagaccacatttgcattcagatgatggcttgttgttggaaaaaatcccttcagaggggctcattaacttcctttcaaatgtttaccgtccccgaccaagggagcaaagtagcaaacaactcactgtgtggcttccatctgagcttaaagacacgggatcctgtatttgtgttgttcattctaatgccacttccagcttcagcacggcttaatgacagaccggagtccatctgctacaatgactagccttg

SEQ ID NO: 53188 - DNA, 600 bp, Chicken  19866894304372_2
aatttcctcagaaggtacatattgactttcagaccacatttgcattcagatgatggcttgttgttggaaaaaatcccttcagaggggctcattaacttcctttcaaatgtttaccgtccccgaccaagggagcaaagtagcaaacaactcactgtgtggcttccatctgagcttaaagacacgggatcctgtatttgtgttgttcattctaatgccacttccagcttcagcacggcttaatgacagaccggagtccatctgctacaatgactagccttggactcagagggagagtcctgyggataatttaggagcacgttttatagttagtacaacttcattccagaccaaggcgaacacgagcaggtggaaatatctctcaaaagcacaacctgacctacatagtgcattgtaaattaaagagatgtataaaaataaagcattaacaatccatcacgcctgcaacaagacccagatacggtcctgaagccgctccctgccgcctgcatgtggctgccattcgcccctccagctctgcattgcccttatgctgatctgcactcttgtccctttcgctttatcacttttctccccactgcc

SEQ ID NO: 53189 - DNA, 600 bp, Chicken  19866894304375_1
tcgcccgccccgcagtgcccctctcccgctcccggccgccctgcagccccgcagtgccaatccccagcgctgcagcggcgctcgccggccccgcagtgccaatctccagcgcagcagcgccgctcgcccgccccgggaccctgccagtctccggcccagcagcgccgctctcccgcgcccccctccagcccctcacccgccccgcagcgccgctccccggccccaccgccgtgcccatccccggcgtcggcgtcgccgcaccgcctgcccggcgagaggatggagctgggctacgccaarccctccagccgccacatcaaggccggcttccagggccgccgcagctactcggaggtgaccaacgtggccccgtaccagcagagccgtgcgctctggctgcagcccgaagcctccacgctccccaagcaccggccctatggtgaggtgtacctggggggcgcgggggcaccgctgagcgcccgcgagcccttcgaggagcagctgcgttttgagaagcagtcgtcggatgaggaggactgggcggaccccggaccccccagccccgaggcgggggctgtgcgctgcgcgtccttctgtgcc

SEQ ID NO: 53190 - DNA, 600 bp, Chicken  19866894304380_1
taaattgtcaacatggggagatgaatgttgcctgcagtctgttgaaggaaattgtatttgatcatacttcaggcattctcagaatcaacagctatcctagcaatgggcaggcttatttactcatttctggtattcctgaatttgttctgtccccatctcttcacagccaataatggttgcaagatttagcatatgaatgaggaaggtcttcatgaaaagttctcatggaaggtaatttgttaccaacatttttagaaggcagtccaatactatttacatttcctgaagaaacacaatttrcaataaacttctttaaaaaaatatttttacaattaagtctactgaaggcctcagtggggtcttgaagtactatgaaaaaccaaatgatggaatatacaggacaacaattctttttccaagtgacttttagaagttggaaaattgaacatacctcaccacttccatttgtttttacagctccaacaagttgtattatacttctgtgcatttttttccacttagtaaatataaaagtgtctttgctttattggaaacagaagtctcttccttacattatcatagagagttttccagctgtaa

SEQ ID NO: 53191 - DNA, 600 bp, Chicken  19866894304380_2
tccaacaagttgtattatacttctgtgcatttttttccacttagtaaatataaaagtgtctttgctttattggaaacagaagtctcttccttacattatcatagagagttttccagctgtaatcttctattatatctaatactatctattctatagagcttctattgtacctagaatcatagaatatcccaagttggaaaggacccacaaggatcatcaagtccaactcctgactctgcacaggaccactcaaaattcaatttctatgtctgagggcgctgtccaaatgtttcttgaatkacagaagcctggggccttgaccgctgccctggggagccagttccagtgcctgaccaccttttcagtcaagaactttttgctaatacacaacccaaactgtacttatttagtatagaaggaccagaacctcaaccccattttttattatattaaaaactttaagaaatacaaatgaaatctaaaacaatttggattgcagaaaatggcctaagttttgtgtaaaaaaagcatttgtgatctttgatgatttctcagagaaattttaagggaacgttttttattacatgactactgatctgt

SEQ ID NO: 53192 - DNA, 600 bp, Chicken  19866894304383_1
ccaagagaacagacaccagcacaaatcccatgttgtgagaagagagggagagaagaaatcaatacatttgagtaagaattgaaacaagttaagagctgtatgcttattagctcctcacagcaacataatctgccattgaaagcagacgggggagaatatcagaacgacggtaatggaacacagattggtttaatggtatcacaaactcttttgaaggcagctgtgtagcttagagcaggtgggtacaactcaacggggaggcctatctctaggtagagactttgttaaagggaaaaactkggggggggaggagggcaaaattgaaattctgttgtcaagtaacatcacgctttaatttcatgccacattatgacaatctggtctgcaaggcactcccagtgtgtggcagcagagctgctgtgttacagctcctctcgcacagctgataggcccaaagacctgcagccctcagctaattgtaaacccgattaaactgcagtgtggagaagtttgattaattccatctatctccatgcatcaagaccagaaccagacgtggaacaagacccaaacctttggattttcgtgtactttgcgctt

SEQ ID NO: 53193 - DNA, 600 bp, Chicken  19866894304387_1
tgacaaacctttgttgcagaagaaatggaggcagaagggagatgtgcatgtgctggctccacagacccaagtgcggtgcgggagtgaaagctccaagaccctctacgagacccctgtgcctgtgccatgcaggttttatacttatttcccatgcccttataccctccaacatcaatgctgaactaagcttctgcttcttgttttccataaatattgcagtggagaattagctgaatttaattacagttatcatgaaatagcaataattaatcagatgccagtagcagctgtattttgctyttctgaaagccagaaactatttaaaaactatttcattacaaacagaaaactattctaaaagcaaagcaaaaagcattccatttatagagtcacattatcccagagaacacaaacactctccaaataataatcaaaagcccctcttaatagcatgctgttgtggtragagcctcttaggggacaaagtctagagagacattcatctggacagctctggatctacaaggcagaaagaggaagagaacaacacaaacaaagcacgtcagttttctcatctatttcagctgctgacatgcactt

SEQ ID NO: 53194 - DNA, 600 bp, Chicken  19866894304387_2
ccaacatcaatgctgaactaagcttctgcttcttgttttccataaatattgcagtggagaattagctgaatttaattacagttatcatgaaatagcaataattaatcagatgccagtagcagctgtattttgctyttctgaaagccagaaactatttaaaaactatttcattacaaacagaaaactattctaaaagcaaagcaaaaagcattccatttatagagtcacattatcccagagaacacaaacactctccaaataataatcaaaagcccctcttaatagcatgctgttgtggtragagcctcttaggggacaaagtctagagagacattcatctggacagctctggatctacaaggcagaaagaggaagagaacaacacaaacaaagcacgtcagttttctcatctatttcagctgctgacatgcactttcagtagagaggcccatctaattacagaatcataacgttctctaaatgtgcataaattgctctaattcacmcatcggttcctcttttgcactgcaaggagcatgtcagtgccatgagaatcaagcccttcatagaacaaaaccagttggatttgacaccctctgc

SEQ ID NO: 53195 - DNA, 600 bp, Chicken  19866894304387_3
agcattccatttatagagtcacattatcccagagaacacaaacactctccaaataataatcaaaagcccctcttaatagcatgctgttgtggtragagcctcttaggggacaaagtctagagagacattcatctggacagctctggatctacaaggcagaaagaggaagagaacaacacaaacaaagcacgtcagttttctcatctatttcagctgctgacatgcactttcagtagagaggcccatctaattacagaatcataacgttctctaaatgtgcataaattgctctaattcacmcatcggttcctcttttgcactgcaaggagcatgtcagtgccatgagaatcaagcccttcatagaacaaaaccagttggatttgacaccctctgctcaccagctttccacttgccctcctcccagtgcagtgtggaatctctctgggcttggaagtggaggtgcagagggttcccacccccagccccgaaagagggcagaacatctcacagctgttccagctgcaggcggttttgttgcctggtccctgccagagctttggggtcctgcactggtacattttgcccataaggatttagtgt

SEQ ID NO: 53196 - DNA, 600 bp, Chicken  19866894304387_4
atattaaaacttgaagcataaagccccttcctattgctgatgaagaaatttcctgtgatttctcactacagtgacagagaaggaagaagaattctcatcaaagtcaggcaaataactcagatggagcaatgtaagcaatataaactcacttttttaaggtttaaaatcatctattaggaggtcatccaatatatttgttccttcaggccacatacttgcattaatagttttcagtctccagctcctgacacactgcagtgagcaattttcaccaggaattgcctcccttttctgacaaaygagtccacgtcttaaatttaagcctcagacacagtcctgtccttccaaaaagcactcagtagcttcctttcatgttttctaaagagtcttaaactttacagatgcttgcccaggactagtaggttgatgagtggcagcaccgagaggtgggagcaggttctctcagtgtcacggaactgtgaaggctggaaaaccactaaggtcatccaggccagccatcaaaccatcgccaccatggccactgaagcatgtctcttggtgtcaagaagctgggtgctggggcaccatgaggcacccttg

SEQ ID NO: 53197 - DNA, 600 bp, Chicken  19866894304395_1
tttgcccaaaggggtgatgataaaaaaatgtgaaagctgatgtcaaaacaatttctctgagcctggaacacacatttttttcattattcttgtcataatcttatatttgtgtcttttcctctctccccttatgatcagtattagggcaaagtaaagcacataatgacattaattctgcattcagatttcttggctagcactgacccaacccactctcatgtgaatatctgggagctctgcacacgacatatggtctttattgtccagagattacaaaatcacataattttcctttcacarctgaacaagagcatcatcgtggggaagatcctttgatttctgctatygggagttctcttgctaattagcaaagccacaagctatggaagaatcacagaagcaaattcttctagcatcaaaagaaaaaaaatgctccatgttatcattcagatgatccaaaatggatcttatttagtccttccattctgctgccaaagaaggaggtgagccaacctcaatctctcctcatgcccatcattcattttcagtgggaagctgggctctggaatgtctttatgaataaatcctccctccatgata

SEQ ID NO: 53198 - DNA, 600 bp, Chicken  19866894304395_2
acaatttctctgagcctggaacacacatttttttcattattcttgtcataatcttatatttgtgtcttttcctctctccccttatgatcagtattagggcaaagtaaagcacataatgacattaattctgcattcagatttcttggctagcactgacccaacccactctcatgtgaatatctgggagctctgcacacgacatatggtctttattgtccagagattacaaaatcacataattttcctttcacarctgaacaagagcatcatcgtggggaagatcctttgatttctgctatygggagttctcttgctaattagcaaagccacaagctatggaagaatcacagaagcaaattcttctagcatcaaaagaaaaaaaatgctccatgttatcattcagatgatccaaaatggatcttatttagtccttccattctgctgccaaagaaggaggtgagccaacctcaatctctcctcatgcccatcattcattttcagtgggaagctgggctctggaatgtctttatgaataaatcctccctccatgatatgtcaaaagatggcaggggatgtttggtgtgatatgctgtggtgagg

SEQ ID NO: 53199 - DNA, 600 bp, Chicken  19866894304398_1
tcttctgaaaaagggatatatttttttatctctaccttctcactctgttccatacatatatcccttccttttctgatcttttttctaagccatctaattaaaagagaaaaactaagccatgcatctatcaaacagaaattaaaacagatgaggtaactgatctgcacatatcctttacatgcacatcttgtcccagtcacttaaagaaaaaacacagaatgtgacaggttgaggttaacagtataagtaatgaaaacagaacctttagagaggttttactgtggtcagaggtgagcacaygcagcttaaactctattgtgtagttacacaattaaaactaagcatctggctcccttcattgcctctctgggcatgtaaagtaatggttaactgttgtgagactaatctaaagttctgcacrtttattcaccagtaccaatcaagggcacaagaaaaatgtgcttccaacagtaaggatccttaatttagcagaagcacagacctgccagactacttcaaaccaccacaactctctggcacctgaagtcagacaatgttttcacctcatcaggaccttgtgtaatggaatcatgtcctgta

SEQ ID NO: 53200 - DNA, 578 bp, Chicken  19866894304398_2
catctatcaaacagaaattaaaacagatgaggtaactgatctgcacatatcctttacatgcacatcttgtcccagtcacttaaagaaaaaacacagaatgtgacaggttgaggttaacagtataagtaatgaaaacagaacctttagagaggttttactgtggtcagaggtgagcacaygcagcttaaactctattgtgtagttacacaattaaaactaagcatctggctcccttcattgcctctctgggcatgtaaagtaatggttaactgttgtgagactaatctaaagttctgcacrtttattcaccagtaccaatcaagggcacaagaaaaatgtgcttccaacagtaaggatccttaatttagcagaagcacagacctgccagactacttcaaaccaccacaactctctggcacctgaagtcagacaatgttttcacctcatcaggaccttgtgtaatggaatcatgtcctgtactgtactgtagtcatcaagaagccagtactgcttataacagtaacaataaaactgaattcccgcagaaaactagaaaggaccatcagttctgaattgaa

SEQ ID NO: 53201 - DNA, 599 bp, Chicken  19866894304400_1
  misc_feature (1)..(97): n is any nucleotide
nnnnnnnnnnnnnnnnnnnnnnnnnnnnnnnnnnnnnnnnnnnnnnnnnnnnnnnnnnnnnnnnnnnnnnnnnnnnnnnnnnnnnnnnnnnnnnnnnctccctctgctgggctgtgtgtaactgctgcacagtttgctcacagaactcatcctccttccctctctgggtacccgagtacctcatcccgggggttcccatacgtgtgggctgcagtgcagtgctgggtgttgctccacactgtggttttcctcctgagaaaccaatcctcatcccatttcccttcccacagagctgggccratgcttggccatggcacactatggacggggcgatgcctttagagggcttttctctgtggtggtgtgggccagggctgctttgcatgcgtggrtcagtcctgcagcacgtggctcttctatgtgcagggacacatagggatgcacagggacacrsttccatcccaaacaggtctcgctgtggaaggggccatggatggggtcctgcagcacatccctcattgctgcagggctgagtccatccccataggatgcagcgagtcacaaagagccccaaagctcaggggctggcgggggcatcc

SEQ ID NO: 53202 - DNA, 599 bp, Chicken  19866894304400_2
  misc_feature (1)..(5): n is any nucleotide
nnnnnctccctctgctgggctgtgtgtaactgctgcacagtttgctcacagaactcatcctccttccctctctgggtacccgagtacctcatcccgggggttcccatacgtgtgggctgcagtgcagtgctgggtgttgctccacactgtggttttcctcctgagaaaccaatcctcatcccatttcccttcccacagagctgggccratgcttggccatggcacactatggacggggcgatgcctttagagggcttttctctgtggtggtgtgggccagggctgctttgcatgcgtggrtcagtcctgcagcacgtggctcttctatgtgcagggacacatagggatgcacagggacacrsttccatcccaaacaggtctcgctgtggaaggggccatggatggggtcctgcagcacatccctcattgctgcagggctgagtccatccccataggatgcagcgagtcacaaagagccccaaagctcaggggctggcgggggcatccaggctcacccctgcccaactctgcctgcagggtggattttttttcccccctttgctttcttcttttccctcctccttcagggtctcagctgt

SEQ ID NO: 53203 - DNA, 600 bp, Chicken  19866894304400_3
ccttccctctctgggtacccgagtacctcatcccgggggttcccatacgtgtgggctgcagtgcagtgctgggtgttgctccacactgtggttttcctcctgagaaaccaatcctcatcccatttcccttcccacagagctgggccratgcttggccatggcacactatggacggggcgatgcctttagagggcttttctctgtggtggtgtgggccagggctgctttgcatgcgtggrtcagtcctgcagcacgtggctcttctatgtgcagggacacatagggatgcacagggacacrsttccatcccaaacaggtctcgctgtggaaggggccatggatggggtcctgcagcacatccctcattgctgcagggctgagtccatccccataggatgcagcgagtcacaaagagccccaaagctcaggggctggcgggggcatccaggctcacccctgcccaactctgcctgcagggtggattttttttcccccctttgctttcttcttttccctcctccttcagggtctcagctgttaattacatttgcctgtcagccccagctgctaatctgctatcgccgagcggaaagcaggagg

SEQ ID NO: 53204 - DNA, 600 bp, Chicken  19866894304400_4
cttccctctctgggtacccgagtacctcatcccgggggttcccatacgtgtgggctgcagtgcagtgctgggtgttgctccacactgtggttttcctcctgagaaaccaatcctcatcccatttcccttcccacagagctgggccratgcttggccatggcacactatggacggggcgatgcctttagagggcttttctctgtggtggtgtgggccagggctgctttgcatgcgtggrtcagtcctgcagcacgtggctcttctatgtgcagggacacatagggatgcacagggacacrsttccatcccaaacaggtctcgctgtggaaggggccatggatggggtcctgcagcacatccctcattgctgcagggctgagtccatccccataggatgcagcgagtcacaaagagccccaaagctcaggggctggcgggggcatccaggctcacccctgcccaactctgcctgcagggtggattttttttcccccctttgctttcttcttttccctcctccttcagggtctcagctgttaattacatttgcctgtcagccccagctgctaatctgctatcgccgagcggaaagcaggaggt

SEQ ID NO: 53205 - DNA, 600 bp, Chicken  19866894304401_1
gttggcagacagggttgaaaccaccgagccttgtttatggccatgatgcccaaagaaatacgtgtacaagctgcattcaatttagactcgctgacaattgctgattgaagtagaaagatatgtacaaaattcagaaacatgaacacgagcactcattcccatggagattttcagccacaagagaggatccttgcagaagtccttgatacaggtaggattcagcatcctcagcgcaacacctgcagtgagatgatcagaggaaactcattccgcctcaatcacaccaggagctgccaagcmcacgtcagtccttacagcagcctgcgagtttgctgtctggtggctgcagcatgttttagaggacacagagcccagaatgctccagggctttctgaggacagctcaggatacgctggctctgcagcgatgcacagaacctgcagcacagctaccttggtggtttccccaggtttgccatgtactgatttgtcatctcagttagcacttccacacgtggctgttttctagcgtaccatagctgatggatgggagtaagctccagaaaaccagctctttctccaaaccactctagatcttctt

SEQ ID NO: 53206 - DNA, 600 bp, Chicken  19866894304404_1
tactggtgaaggaggaaccagaaacctcagcacggtgcagagttctgaaggcacaaagaagtgcacagtacacgagcaaagcagccaccaacttggaacggtgctcgcattgagcgttggctttggctggactgtggcactgagtagctgccagaatcctgcaggctctttctatggagaatacagctatctctatggtgtgcagcaaggcagtatttaaccctttaatatataacatataggcacaaagcataatagagtgtaggtcagtttcagccagacttgcatcctggtttccayatattggcttygtttctgatcactgtgacagtgacacctgtgatcttgtcatgagttacagatttttacagccaactgctcatccatggcattgctggcatgcaggggtttccaaagcacatcctcgacctgcagagatgttctcaaagtgaattggtcattgggatagtccccctgctttctgaatgggtgcatggggagatccctcctgcagagctcagtgggaccaaggaagcccacccaaggagcgtgrtgggcagctgaaaccctgctgctctgctcagcctctgtcagatggag

SEQ ID NO: 53207 - DNA, 600 bp, Chicken  19866894304404_2
gaggaaccagaaacctcagcacggtgcagagttctgaaggcacaaagaagtgcacagtacacgagcaaagcagccaccaacttggaacggtgctcgcattgagcgttggctttggctggactgtggcactgagtagctgccagaatcctgcaggctctttctatggagaatacagctatctctatggtgtgcagcaaggcagtatttaaccctttaatatataacatataggcacaaagcataatagagtgtaggtcagtttcagccagacttgcatcctggtttccayatattggcttygtttctgatcactgtgacagtgacacctgtgatcttgtcatgagttacagatttttacagccaactgctcatccatggcattgctggcatgcaggggtttccaaagcacatcctcgacctgcagagatgttctcaaagtgaattggtcattgggatagtccccctgctttctgaatgggtgcatggggagatccctcctgcagagctcagtgggaccaaggaagcccacccaaggagcgtgrtgggcagctgaaaccctgctgctctgctcagcctctgtcagatggaggacggcagaca

SEQ ID NO: 53208 - DNA, 600 bp, Chicken  19866894304404_3
aatagagtgtaggtcagtttcagccagacttgcatcctggtttccayatattggcttygtttctgatcactgtgacagtgacacctgtgatcttgtcatgagttacagatttttacagccaactgctcatccatggcattgctggcatgcaggggtttccaaagcacatcctcgacctgcagagatgttctcaaagtgaattggtcattgggatagtccccctgctttctgaatgggtgcatggggagatccctcctgcagagctcagtgggaccaaggaagcccacccaaggagcgtgrtgggcagctgaaaccctgctgctctgctcagcctctgtcagatggaggacggcagacacctgtgagctttgcagtcacacctttggtgccacacagatgttggccaaagcttccccagggagccggagcacgcccaaggtgaggggatggtgcagaagcagcagcaagcacagctgggagaggaaacrtggtgcaataaagggtcacacaggaagtgtttcatttacctacacagagagagggacaaagagggagttttgtcagttgtaagtttgtgctccactcacagatgacagcaga

SEQ ID NO: 53209 - DNA, 527 bp, Chicken  19866894304404_4
tctcaaagtgaattggtcattgggatagtccccctgctttctgaatgggtgcatggggagatccctcctgcagagctcagtgggaccaaggaagcccacccaaggagcgtgrtgggcagctgaaaccctgctgctctgctcagcctctgtcagatggaggacggcagacacctgtgagctttgcagtcacacctttggtgccacacagatgttggccaaagcttccccagggagccggagcacgcccaaggtgaggggatggtgcagaagcagcagcaagcacagctgggagaggaaacrtggtgcaataaagggtcacacaggaagtgtttcatttacctacacagagagagggacaaagagggagttttgtcagttgtaagtttgtgctccactcacagatgacagcagaggtataacagcaagcatgggacaccgttagggcttcggtgccttgagcacagcgcgtgcacagaggagtgccagggctccttgcgcccacatgactctcctcgctttgctcaaca

SEQ ID NO: 53210 - DNA, 600 bp, Chicken  19866894304409_1
ggcctactccgacgtcatacactgccgcacgctggaggatggtgagcattctctatgtaggagcaaactggcatccatatgtctgcagtttatggagctccaggctcctgactgctttgctcccagctggagtaacacggcctcttggctcttgccattgcagttcctagtgagcctggtcgcttggctttcaatgtggtgtcttccaccgtgacacagctgagctgggctgagcctgcagaaaccaatggggtgatcacggcttatgaagtcagttatgggctcgttaacgaggacaayggtaagtgctcattttctggtcagggcagctctaccagttggagtctactttccacacctgggmtggtcccatgtcgcagcaggaaacctggaggtgctccagaaaaggatagatgtcacaytgagggactttgggttagtgggcacggtggggatgggttgatggttgaactgggtgatcttactggtcttttccaacctgaatgattctattgtactatgattctagagccaaaagggcatttattgtgaaaactggattcaaggaggggtcgtttccaggaagaaggagtacagcaa

SEQ ID NO: 53211 - DNA, 600 bp, Chicken  19866894304409_2
aaactggcatccatatgtctgcagtttatggagctccaggctcctgactgctttgctcccagctggagtaacacggcctcttggctcttgccattgcagttcctagtgagcctggtcgcttggctttcaatgtggtgtcttccaccgtgacacagctgagctgggctgagcctgcagaaaccaatggggtgatcacggcttatgaagtcagttatgggctcgttaacgaggacaayggtaagtgctcattttctggtcagggcagctctaccagttggagtctactttccacacctgggmtggtcccatgtcgcagcaggaaacctggaggtgctccagaaaaggatagatgtcacaytgagggactttgggttagtgggcacggtggggatgggttgatggttgaactgggtgatcttactggtcttttccaacctgaatgattctattgtactatgattctagagccaaaagggcatttattgtgaaaactggattcaaggaggggtcgtttccaggaagaaggagtacagcaaatcataactgcgggtttaatcctgcaaagccatgagtactctcaattcccattcatttctgcag

SEQ ID NO: 53212 - DNA, 600 bp, Chicken  19866894304409_3
ccagctggagtaacacggcctcttggctcttgccattgcagttcctagtgagcctggtcgcttggctttcaatgtggtgtcttccaccgtgacacagctgagctgggctgagcctgcagaaaccaatggggtgatcacggcttatgaagtcagttatgggctcgttaacgaggacaayggtaagtgctcattttctggtcagggcagctctaccagttggagtctactttccacacctgggmtggtcccatgtcgcagcaggaaacctggaggtgctccagaaaaggatagatgtcacaytgagggactttgggttagtgggcacggtggggatgggttgatggttgaactgggtgatcttactggtcttttccaacctgaatgattctattgtactatgattctagagccaaaagggcatttattgtgaaaactggattcaaggaggggtcgtttccaggaagaaggagtacagcaaatcataactgcgggtttaatcctgcaaagccatgagtactctcaattcccattcatttctgcagtatttagtgttgttcttcatgtttaacactttgtttgtaggtctagacctagagctac

SEQ ID NO: 53213 - DNA, 599 bp, Chicken  19866894304412_1
  misc_feature (1)..(41): n is any nucleotide
nnnnnnnnnnnnnnnnnnnnnnnnnnnnnnnnnnnnnnnnngagaaaaagacaccaatttgcttaagctttatgcagtgagtgggcacaactaggcacaattgcaaagaacccttcagagtatttaggacttttgctgcctactcccatgattagggcaattagatggaaacatttaaaacccttattgcagtgcaaaacagtactgctgctgcaaggacactggttccccatgcaggagcaagtggccatggaaataacgtttggaaaggaggctccttccccaccactgcccacaacygtggggcctttgcttcagccatgcccggctcaaataacctgccaagatggttaaagggaggcacacagcttgtgcattcccatctttggcaatataagtagcayctaaagaatagtttggwsggattgcagcttccattttcctggggataaaggagtgagatgggagctacgtttgagtgataactaggagaaatacagcatttctgacctcttcamgaatagtttttttgkaaatgctgattttccaagccttttttctctatgtataatatttctccacccactctcctttgctta

SEQ ID NO: 53214 - DNA, 600 bp, Chicken  19866894304412_2
aaagaacccttcagagtatttaggacttttgctgcctactcccatgattagggcaattagatggaaacatttaaaacccttattgcagtgcaaaacagtactgctgctgcaaggacactggttccccatgcaggagcaagtggccatggaaataacgtttggaaaggaggctccttccccaccactgcccacaacygtggggcctttgcttcagccatgcccggctcaaataacctgccaagatggttaaagggaggcacacagcttgtgcattcccatctttggcaatataagtagcayctaaagaatagtttggwsggattgcagcttccattttcctggggataaaggagtgagatgggagctacgtttgagtgataactaggagaaatacagcatttctgacctcttcamgaatagtttttttgkaaatgctgattttccaagccttttttctctatgtataatatttctccacccactctcctttgcttagaggtgcttagaaatgcttggaatggaaatacatatgaaaaatatttaatcgcagctacagccccacatggagtgttctgtttagcaaaaagtctgtgcaatgtc

SEQ ID NO: 53215 - DNA, 600 bp, Chicken  19866894304412_3
atttaggacttttgctgcctactcccatgattagggcaattagatggaaacatttaaaacccttattgcagtgcaaaacagtactgctgctgcaaggacactggttccccatgcaggagcaagtggccatggaaataacgtttggaaaggaggctccttccccaccactgcccacaacygtggggcctttgcttcagccatgcccggctcaaataacctgccaagatggttaaagggaggcacacagcttgtgcattcccatctttggcaatataagtagcayctaaagaatagtttggwsggattgcagcttccattttcctggggataaaggagtgagatgggagctacgtttgagtgataactaggagaaatacagcatttctgacctcttcamgaatagtttttttgkaaatgctgattttccaagccttttttctctatgtataatatttctccacccactctcctttgcttagaggtgcttagaaatgcttggaatggaaatacatatgaaaaatatttaatcgcagctacagccccacatggagtgttctgtttagcaaaaagtctgtgcaatgtctgcacgtcagaaaccac

SEQ ID NO: 53216 - DNA, 600 bp, Chicken  19866894304412_4
tttaggacttttgctgcctactcccatgattagggcaattagatggaaacatttaaaacccttattgcagtgcaaaacagtactgctgctgcaaggacactggttccccatgcaggagcaagtggccatggaaataacgtttggaaaggaggctccttccccaccactgcccacaacygtggggcctttgcttcagccatgcccggctcaaataacctgccaagatggttaaagggaggcacacagcttgtgcattcccatctttggcaatataagtagcayctaaagaatagtttggwsggattgcagcttccattttcctggggataaaggagtgagatgggagctacgtttgagtgataactaggagaaatacagcatttctgacctcttcamgaatagtttttttgkaaatgctgattttccaagccttttttctctatgtataatatttctccacccactctcctttgcttagaggtgcttagaaatgcttggaatggaaatacatatgaaaaatatttaatcgcagctacagccccacatggagtgttctgtttagcaaaaagtctgtgcaatgtctgcacgtcagaaaccact

SEQ ID NO: 53217 - DNA, 600 bp, Chicken  19866894304412_5
acactggttccccatgcaggagcaagtggccatggaaataacgtttggaaaggaggctccttccccaccactgcccacaacygtggggcctttgcttcagccatgcccggctcaaataacctgccaagatggttaaagggaggcacacagcttgtgcattcccatctttggcaatataagtagcayctaaagaatagtttggwsggattgcagcttccattttcctggggataaaggagtgagatgggagctacgtttgagtgataactaggagaaatacagcatttctgacctcttcamgaatagtttttttgkaaatgctgattttccaagccttttttctctatgtataatatttctccacccactctcctttgcttagaggtgcttagaaatgcttggaatggaaatacatatgaaaaatatttaatcgcagctacagccccacatggagtgttctgtttagcaaaaagtctgtgcaatgtctgcacgtcagaaaccacttagagacattacccaggctgttatctctaatcactcaaagatgttttataactctaagaataacattgacagctttccctagaccaacacactgta

SEQ ID NO: 53218 - DNA, 600 bp, Chicken  19866894304412_6
gcaggagcaagtggccatggaaataacgtttggaaaggaggctccttccccaccactgcccacaacygtggggcctttgcttcagccatgcccggctcaaataacctgccaagatggttaaagggaggcacacagcttgtgcattcccatctttggcaatataagtagcayctaaagaatagtttggwsggattgcagcttccattttcctggggataaaggagtgagatgggagctacgtttgagtgataactaggagaaatacagcatttctgacctcttcamgaatagtttttttgkaaatgctgattttccaagccttttttctctatgtataatatttctccacccactctcctttgcttagaggtgcttagaaatgcttggaatggaaatacatatgaaaaatatttaatcgcagctacagccccacatggagtgttctgtttagcaaaaagtctgtgcaatgtctgcacgtcagaaaccacttagagacattacccaggctgttatctctaatcactcaaagatgttttataactctaagaataacattgacagctttccctagaccaacacactgtagactttaccacttag

SEQ ID NO: 53219 - DNA, 600 bp, Chicken  19866894304412_7
ttagaggtgcttagaaatgcttggaatggaaatacatatgaaaaatatttaatcgcagctacagccccacatggagtgttctgtttagcaaaaagtctgtgcaatgtctgcacgtcagaaaccacttagagacattacccaggctgttatctctaatcactcaaagatgttttataactctaagaataacattgacagctttccctagaccaacacactgtagactttaccacttagaacatcccttcgagtagtgagaaaaatatccattagagtgcctgatgttaatctggtggatgytggctttaatggcagtcaacatgcagctgttttcacagttgtttaaagatcatattaagagtgctgaagaaaactggagcaggagtcagtgcaatccagtttagaatgcatagcaacattgttgtactaattataattttgccacaagcaattgtcacagtcataaaactgccagtctgtttggtagtgggcagctttctatttcacagacatctggcagaatcagcagaggacgattagcttgccagactgccggctgtgtgcaagaacaaaaaatctcagtgctgaggcaggctggag

SEQ ID NO: 53220 - DNA, 600 bp, Chicken  19866894304413_1
aattggagagagatggttttgaagggtaggctatttggcagataaggaattgatgggaaggtcacagacagagcattgtggtcactggctctatgtccaggtgaaggatggtaacggagtccatcttgagtctggtactctttcccatctttatcaaagacataaaagatgggagctgggcatgttcagcctggaaaaaagaaagctgcagggatacctcattgcaacattgagggaaatcaactttttacacagatagatagtgatagggcaagggggagcggttttaaactaaaggawgggagatttagtttagatcaccagggagaagtttgttactgagagagtgatgagatgctggaacaggttgcccagagagctggtggatgccccatccctaaaggtatttaatgccaggttgtatggggccctgggcaacctggtctagtaccagatctggaggtttgtgaccctgcctgtggcagggaggttggaacttgatgattcttgagatcccttccaaccaaagccattcagtgattctacgtatgggaatgtaggggaaaattaagctgaagtatatacgatgacatgaatacc

SEQ ID NO: 53221 - DNA, 600 bp, Chicken  19866894304423_1
aggattttctagtcttgcccatctctaaatgaaggctgtttgtgaccctgtttgtgacacctccacctaacctgttgctcctgggggtggctgaagctactcccctacaagaaagtaatgtatagttgcacaccttcagcatttgtgtgggaattgctggaaaaatatggcagctggcaaccttccctttcctgcaatcacctccatggttgtggtcaactgtgttattcatttcctggcagggccatggccatatgatgttcgcaggcttccagatggtaaaaatgaacagtccacagmgcagaatatgtctctggtacaaactactctttcctattgctaaccattgacaccactatgctcttcctggagcagctcttctgcaatcttgcagctgcagcacacaaagcacacgctaagcaaagcactcatccagaaaaacactgctgatcttcacaggaagcgtagataaagcaaagattaatcacttcctttttatagtcctctgtaccccattttgctttcatgtgaaattggggcagagaaatacttttatttgctgggaagcagagaaaaactgtgaaacatttccagctcggg

SEQ ID NO: 53222 - DNA, 600 bp, Chicken  19866894304428_1
tgccaatggtgtcagtgtgctttctgtaaggtaactctgaagggcctgcagcattcacctagaagcctggctgcagctgtgggcatcagtgcatatgattccattgccttctggctcagcttgaaacctactcaagcttgaaatcttgtcaatgtaaatgagtttataacttctcacgtaacttctgttagttggcaggtgttacatggacagagcattctgaggacactggggctgtagctggtctctcaccagactcagggccctgcaaagcatgtggaggggcaaggaggtggaggrtgggcaataatggtcagtcctggcagcccacaaagtgtgtctcctggccctgtgcctgagacagagtccgagtactttgccagccaagcagcgctcattcagcgggaggtggataagacctgctgcttttggctttacctaggagataccatcttgttcctccatgaatccttgccataggctctttagggaactgccagacccagagcaggacagactcttgcatccktagctctgaagtggcaaaaaagaaagaaaaaacaaaacaacaaacctaatctttctcatgccaacgggctt

SEQ ID NO: 53223 - DNA, 600 bp, Chicken  19866894304428_2
tggggctgtagctggtctctcaccagactcagggccctgcaaagcatgtggaggggcaaggaggtggaggrtgggcaataatggtcagtcctggcagcccacaaagtgtgtctcctggccctgtgcctgagacagagtccgagtactttgccagccaagcagcgctcattcagcgggaggtggataagacctgctgcttttggctttacctaggagataccatcttgttcctccatgaatccttgccataggctctttagggaactgccagacccagagcaggacagactcttgcatccktagctctgaagtggcaaaaaagaaagaaaaaacaaaacaacaaacctaatctttctcatgccaacgggctttacagctttacatatctagtcactgaaaacactacatgaaaccatgctttcttttatctccttacttattcgaagagttgtgttttgtggaaaaaaaaaaaaacaaaaagcaaacataaaaagcagttacgtatgggtgaaaaagttttgtttttagtggagtaggagtgactactaaataataaagtctgatctttaatgcattattgattatgaatgttaaaccaga

SEQ ID NO: 53224 - DNA, 600 bp, Chicken  19866894304428_3
agcacaacctaaccatctctaactctacatcacccaactctaacaaccctccactaaatgtccctctcatgtccctgagaaccacatccaaacggtttttaaacaccatccagggatggtgactcaaccacctccctgtgggggcccattccagtgcttaacatccctttttgtaaataaggttttcctgatatccaacctaaacctcccctggtgcaacttgaggccatttcccctcatcctgtcacttggcaccagtgagaacagaccaaccccgctcttgctataagcacctttcasgtattggaagagagcaataakgtctcccctcagcctccttttctccagactaaacagtcccagttccttcagtctctccttgtagggcatattctccaagcccttcaccagcctttttgctcttctttggacctgcaccagcactccatgtcctttctataatgagatactcaaaactgaacacaatactcgaggtgaggcctcaccaatgctgagtagaggggcaggattacttccctaggagcttaaggatcatctagttccaactccctttccatatacatgtttgccactcaccag

SEQ ID NO: 53225 - DNA, 600 bp, Chicken  19866894304428_4
actctacatcacccaactctaacaaccctccactaaatgtccctctcatgtccctgagaaccacatccaaacggtttttaaacaccatccagggatggtgactcaaccacctccctgtgggggcccattccagtgcttaacatccctttttgtaaataaggttttcctgatatccaacctaaacctcccctggtgcaacttgaggccatttcccctcatcctgtcacttggcaccagtgagaacagaccaaccccgctcttgctataagcacctttcasgtattggaagagagcaataakgtctcccctcagcctccttttctccagactaaacagtcccagttccttcagtctctccttgtagggcatattctccaagcccttcaccagcctttttgctcttctttggacctgcaccagcactccatgtcctttctataatgagatactcaaaactgaacacaatactcgaggtgaggcctcaccaatgctgagtagaggggcaggattacttccctaggagcttaaggatcatctagttccaactccctttccatatacatgtttgccactcaccagatcaggctgtccagggcctca

SEQ ID NO: 53226 - DNA, 600 bp, Chicken  19866894304430_1
tgtttcaccgctgttggtctttaagacatgaagtggaagctctctttgtttaaacacacacacctgtgtatctccagtagggtcagtgtgattctgccaacccaccccagctgaggacctgccttctcttctctttgcctcaattcagtgtccatgtgttttcaaagctggacaaatccatggtggaagaagccgtgggatgctattgagaaagagacactgctgctgatgtaggatattcttgcactggttgctggagaccaggaagtatctgagtgaggcaatgcttctgtggtctgygcaggctttcttgagtgggtgctgttagtctctgttagacatgtaatacatgtagcccttggtttggcttggtgtgctcactctcatgtgtttctcagtttcgctattatggctgctggcacgggtattgggacagacctctttgcaccctgctcttctttctttctgktgttcttccaagccttacrtgcattttgccttcactccagtgagaagatctcaaatagtgtcacgaatataggtttgggtttgtgtaactgttaccactcagctccatttttttyccccatttccatttct

SEQ ID NO: 53227 - DNA, 600 bp, Chicken  19866894304430_2
ggacaaatccatggtggaagaagccgtgggatgctattgagaaagagacactgctgctgatgtaggatattcttgcactggttgctggagaccaggaagtatctgagtgaggcaatgcttctgtggtctgygcaggctttcttgagtgggtgctgttagtctctgttagacatgtaatacatgtagcccttggtttggcttggtgtgctcactctcatgtgtttctcagtttcgctattatggctgctggcacgggtattgggacagacctctttgcaccctgctcttctttctttctgktgttcttccaagccttacrtgcattttgccttcactccagtgagaagatctcaaatagtgtcacgaatataggtttgggtttgtgtaactgttaccactcagctccatttttttyccccatttccatttctatgcatctgggagtttggaatagtcatttgactgccttgctttaatttagctttaactgagatggcattttacgtggtggtctacctttcagcatactrccctcgtaataagtctgctgtgaatggtgctgtaggaattcacaggccctcagtgtaacagatgytgtgt

SEQ ID NO: 53228 - DNA, 600 bp, Chicken  19866894304430_3
gaagccgtgggatgctattgagaaagagacactgctgctgatgtaggatattcttgcactggttgctggagaccaggaagtatctgagtgaggcaatgcttctgtggtctgygcaggctttcttgagtgggtgctgttagtctctgttagacatgtaatacatgtagcccttggtttggcttggtgtgctcactctcatgtgtttctcagtttcgctattatggctgctggcacgggtattgggacagacctctttgcaccctgctcttctttctttctgktgttcttccaagccttacrtgcattttgccttcactccagtgagaagatctcaaatagtgtcacgaatataggtttgggtttgtgtaactgttaccactcagctccatttttttyccccatttccatttctatgcatctgggagtttggaatagtcatttgactgccttgctttaatttagctttaactgagatggcattttacgtggtggtctacctttcagcatactrccctcgtaataagtctgctgtgaatggtgctgtaggaattcacaggccctcagtgtaacagatgytgtgtgttggaaaagccagaaatt

SEQ ID NO: 53229 - DNA, 600 bp, Chicken  19866894304430_4
tgcttctgtggtctgygcaggctttcttgagtgggtgctgttagtctctgttagacatgtaatacatgtagcccttggtttggcttggtgtgctcactctcatgtgtttctcagtttcgctattatggctgctggcacgggtattgggacagacctctttgcaccctgctcttctttctttctgktgttcttccaagccttacrtgcattttgccttcactccagtgagaagatctcaaatagtgtcacgaatataggtttgggtttgtgtaactgttaccactcagctccatttttttyccccatttccatttctatgcatctgggagtttggaatagtcatttgactgccttgctttaatttagctttaactgagatggcattttacgtggtggtctacctttcagcatactrccctcgtaataagtctgctgtgaatggtgctgtaggaattcacaggccctcagtgtaacagatgytgtgtgttggaaaagccagaaatttgtgagttggtcttttgagccaactgctatgatgcaacaggagcagctcctttaaaggagaaagcagcaccaggttttgtatgacttacatgttta

SEQ ID NO: 53230 - DNA, 600 bp, Chicken  19866894304430_5
ttcgctattatggctgctggcacgggtattgggacagacctctttgcaccctgctcttctttctttctgktgttcttccaagccttacrtgcattttgccttcactccagtgagaagatctcaaatagtgtcacgaatataggtttgggtttgtgtaactgttaccactcagctccatttttttyccccatttccatttctatgcatctgggagtttggaatagtcatttgactgccttgctttaatttagctttaactgagatggcattttacgtggtggtctacctttcagcatactrccctcgtaataagtctgctgtgaatggtgctgtaggaattcacaggccctcagtgtaacagatgytgtgtgttggaaaagccagaaatttgtgagttggtcttttgagccaactgctatgatgcaacaggagcagctcctttaaaggagaaagcagcaccaggttttgtatgacttacatgtttattttggctcattgatgtttccaggaggtgatgccaggaaatactgctggctttttgtactcaaattttaataggatgtttggtgtttggagctggtgtggctctataatgtgggt

SEQ ID NO: 53231 - DNA, 600 bp, Chicken  19866894304430_6
tctgktgttcttccaagccttacrtgcattttgccttcactccagtgagaagatctcaaatagtgtcacgaatataggtttgggtttgtgtaactgttaccactcagctccatttttttyccccatttccatttctatgcatctgggagtttggaatagtcatttgactgccttgctttaatttagctttaactgagatggcattttacgtggtggtctacctttcagcatactrccctcgtaataagtctgctgtgaatggtgctgtaggaattcacaggccctcagtgtaacagatgytgtgtgttggaaaagccagaaatttgtgagttggtcttttgagccaactgctatgatgcaacaggagcagctcctttaaaggagaaagcagcaccaggttttgtatgacttacatgtttattttggctcattgatgtttccaggaggtgatgccaggaaatactgctggctttttgtactcaaattttaataggatgtttggtgtttggagctggtgtggctctataatgtgggtctgcattaccacgaggtggcactgtgcaaggtcctaaggatgtgttggttggagcacttttaagt

SEQ ID NO: 53232 - DNA, 599 bp, Chicken  19866894304434_1
  misc_feature (1)..(48): n is any nucleotide
nnnnnnnnnnnnnnnnnnnnnnnnnnnnnnnnnnnnnnnnnnnnnnnnctacaccctcatttcaagcagtgtacagagcaataaagtcacccctcagcctcctcttccccagaccaaacaatcccagttccctcagctgctcctcataagaattgtgctccagatccctcacagctctgctgatgtccttcttgtagtaaggagcccaaaacagaacacagcacttgaggtatggcttcaccagagctgagtgcaggacaatcacttccctgcttctgctggcaacactaattctgatgygagtccagatgccattggctttcttggccacctgggcatgctgctggctcacgttcagccacaggtcaaccaatactcccaggtctgtttattcttcacaattttccagccattttctgccccacacctatagcactgcctgggcttgttctggccaaagcgcaggacccagcacttggtcttgtcaaagctcatcccatcggtctcagcccaacaatccagtctgtccaggtccatctgtagggccttcctacccccaggcatgtcctgccaacttggtgtcatttgcaaatgtaccg

SEQ ID NO: 53233 - DNA, 599 bp, Chicken  19866894304436_1
  misc_feature (1)..(8): n is any nucleotide
nnnnnnnnagcctgttaccatgctcacccagtccagttcccagtagcccacttactgctttttggattattttctctgtaagcctcttccatagtggttttccctttggacagcggtctgtggcatttctgttacacatgttcattctttgcagttttgtgctgtgttatttgccagcaaagtcagttgattcataagaagatcacatttaactgaacttcccctgtcactaccacttcttctttggtgggccttgaatcttccaaatctatgaggagacaccagctggacacgattaaytgttaaatgctgcacattagtattattgtggccttctccagtctctaaaataattctgcagcctgacactcccaagttaaggaggaaaaaaagccactgtttctctccatgccattttcactcaggatcttcacagcagcaatcaagaaaccacctaatgcacacaactgacccatgcctccctttcactttctttgatctttgcctaactttcccactgtgaatatgacttaatccagaaaatgctcataccaggggggttgaagctagatgatcactatggtccttttcaacccaag

SEQ ID NO: 53234 - DNA, 600 bp, Chicken  19866894304445_1
aatgcttccatactagggagactggaggggttttttttgtttttttttaatttgtgataagcaatttctgagtaggcaagcagttccgtttagtgccaggctgagatgccaagtctattctgctccagccaatgactcacacaggtacttcactgggattaccaaaaagcttgacaagtgagtataagtttaaaggttatgttggagtgggaccacacttctctatatgccttaaccacaaaatgtgagaaagacctagatactgaaaggtatttagatacctaaatcctattgttgtaragtgcttaaatacctctgaatatatgarcccaaatcaggcttctactctctcaatcactctgttgtgaaccttagtgaagaggccagcaactgaagaagcttatagatagactgatccctgtcygcctgtcatgctctgtaaagccttcatggttcactgtaccatgtctcagactgtttcataatcatatatgtttctgcttttcactgtcatccatcaccacttaggactcttcaaaacaaaaaggaaacttcttccaattatgcaacagttgtacaattgcagctatactttagtca

SEQ ID NO: 53235 - DNA, 600 bp, Chicken  19866894304445_2
ggttttttttgtttttttttaatttgtgataagcaatttctgagtaggcaagcagttccgtttagtgccaggctgagatgccaagtctattctgctccagccaatgactcacacaggtacttcactgggattaccaaaaagcttgacaagtgagtataagtttaaaggttatgttggagtgggaccacacttctctatatgccttaaccacaaaatgtgagaaagacctagatactgaaaggtatttagatacctaaatcctattgttgtaragtgcttaaatacctctgaatatatgarcccaaatcaggcttctactctctcaatcactctgttgtgaaccttagtgaagaggccagcaactgaagaagcttatagatagactgatccctgtcygcctgtcatgctctgtaaagccttcatggttcactgtaccatgtctcagactgtttcataatcatatatgtttctgcttttcactgtcatccatcaccacttaggactcttcaaaacaaaaaggaaacttcttccaattatgcaacagttgtacaattgcagctatactttagtcatggttacaaaacaaccattatattatac

SEQ ID NO: 53236 - DNA, 600 bp, Chicken  19866894304445_3
ccagccaatgactcacacaggtacttcactgggattaccaaaaagcttgacaagtgagtataagtttaaaggttatgttggagtgggaccacacttctctatatgccttaaccacaaaatgtgagaaagacctagatactgaaaggtatttagatacctaaatcctattgttgtaragtgcttaaatacctctgaatatatgarcccaaatcaggcttctactctctcaatcactctgttgtgaaccttagtgaagaggccagcaactgaagaagcttatagatagactgatccctgtcygcctgtcatgctctgtaaagccttcatggttcactgtaccatgtctcagactgtttcataatcatatatgtttctgcttttcactgtcatccatcaccacttaggactcttcaaaacaaaaaggaaacttcttccaattatgcaacagttgtacaattgcagctatactttagtcatggttacaaaacaaccattatattatactcaatcatgcataaaagtttccctgcactattggcatgctttatttatggagactcatttcaacaggttacgcaaaagtcttctagctggatgcaa

SEQ ID NO: 53237 - DNA, 600 bp, Chicken  19866894304450_1
aggcgtgtatccatgcacacgcatatgtatacatatgcacgaatagtatatatacaaaatatagtcctctgaatacatacagtgcacattttaattaaacaatcactgcactccatcctcattattccctcctctaacaccagaatcagatacaacagaccactgtcccatgatgaaaagcatcagagaagcccaagggctccctagcacaaacaaaaggaagaaaaaagaaaagaaaaaaaaagagagagagaacccagcagcgaggtcaagagagaagcaagcttggactttcctccwataaaagccagatgcagctaagtcttgcatgggaacctcaaagagagaggaggcaataaacaatactgtaatctaccaaaacaaaatgaaaacctaaaattaaaaaggctcatattcccttggaggaaagcagggaaggatgagaagggtgtgaagatgtattaaagaaaacaaaatactctattaaagaagtacacagcgtatcagtaaattttgtgcataggcattccatatggtgcagcaatgttcagggagcagctgcagcacaaacaacttttgctgggattaaggaacagggcc

SEQ ID NO: 53238 - DNA, 600 bp, Chicken  19866894304455_1
gacaaatatttatggaacctaaagtgaaactcaagacactgttaaaataaagtttgccttagtttttttttttttattttcctgaagaattgacctggctttcttggcagaaagactaatccaaatgctattggtatcttaacagttcataagaaccacatgcttcaaataaagccattactatcagacacgctgagtggttcaattaaacaaatatgaaaatagacacttcatcctgctttaactaagtgggatcatttcactcctgaatccagactgacaatgaaaatgatatagtayttatagagtagctttttatcctgagggatcccataggattacacagaccttgcttcacgcactaccaaagatgatgccacttycagggatgaacccatgagctgtccttcggcctcgaatgatggcacacagcagttgaaatggaggagtggaagggaatttcacattcagctgaaactatagaagggaatttaggcaagcggaatggagcttgtttagactggagcacatccagcacagaggaggtatagcgctccagtgttttgaatataaaagttaaggcaaaacaataagaaaaat

SEQ ID NO: 53239 - DNA, 600 bp, Chicken  19866894304455_2
gaagaattgacctggctttcttggcagaaagactaatccaaatgctattggtatcttaacagttcataagaaccacatgcttcaaataaagccattactatcagacacgctgagtggttcaattaaacaaatatgaaaatagacacttcatcctgctttaactaagtgggatcatttcactcctgaatccagactgacaatgaaaatgatatagtayttatagagtagctttttatcctgagggatcccataggattacacagaccttgcttcacgcactaccaaagatgatgccacttycagggatgaacccatgagctgtccttcggcctcgaatgatggcacacagcagttgaaatggaggagtggaagggaatttcacattcagctgaaactatagaagggaatttaggcaagcggaatggagcttgtttagactggagcacatccagcacagaggaggtatagcgctccagtgttttgaatataaaagttaaggcaaaacaataagaaaaatctggtttaaactatccacagaatttagaagaaaaaaaaaagtgaaagtccatcccgtagaggaacagtttcattctgtcccac

SEQ ID NO: 53240 - DNA, 600 bp, Chicken  19866894304459_1
gaagccctttgccccttcacaaggtctctgtagggtgggagtgagtccatcagcaatcagggcttggggcacacaagggacacatcctcagctggctgctggcctgtcgtcagcacaagtttttctgtggtctgcagggcttctacaggaaagggaaggtgctcctggagatgggacggagagccgaagccctgctggcgtgggagcactgcctggtgctcagtccccacttccagcccgtgcagagagagatggagaaggtgtgtaggtctgcagagtggtgggtcccatgcactcccrttgctcagggatgtgccctgatgtaagtttactgaactcagccagcactggaacaagtggccctgatgctgtggtggcccagggtgcgctctggggtctctgggtcacatacctcctaccagcaccctgctgaaccccgctttctccttgcaggtcctcacatgggaggatgcttctcagccatgtgctgcccagcagggctcaacggatcatcaggaagagcaggatgaagggggccctgcatcctcctctacacaagctcaggtaataggctgagatgggacttggcatccctttggg

SEQ ID NO: 53241 - DNA, 600 bp, Chicken  19866894304462_1
ccatagtgtatggggaggtgagaggaaaagaagtgaccatgggttgatgatgacattagtagcttgctttggatggaggagtttctgcctagcagcagccagggtgatggatcagtgtggggtatgtgacaatttcattctgtgtgggtctgatgggcacactgcagtggtctgggagggtgggagggcacagtgctgggcacagtggagcagcatccacaggaatgacagagaagtgagcccttggcgatgctggggtgattcactcatctgggagcctaggcagatctgtttagtctyttcatggggtaaaatgtcaaaggtgtgtttggattaatgggatctggggtgttaatgcttatctccctgtccctggatattggcaggaagagagtcctgggactaacggatggtattcacaaactgggcactgtgcgctgggagctggctctgtgtctcttgctggcatggatcatctgctacttctgcatctggaaaggtgtcaagtccacaggaaaagtaggagcagagacggtcctcctcatccataatcctccttgtacccatcttacatttctttcccaatctcttttacttttt

SEQ ID NO: 53242 - DNA, 600 bp, Chicken  19866894304464_1
agcagcgctccgagttgtgctgattgcttcttaaccttcattcttcagataatatatcaacattattctgaaaactctaaacccagccaggggcaatacgaggacttggacaacaaagttgccgagaagtcacaaagtattgcatgagagcaaactgtacacaacatcttactttcgatgttggctgtactgaaataagagctaaacagaactctgcgagtcaggaataggttactgcacctacgctgttagacagatacataattcctggatagcatcaaacacgatggaaaacatttmcatatgatataccacagtagtgcattcatgygatgactcagaacaaacaatatctccctcaaacagaaagaccagaagttccactcccccttctccaaagtctgaagtgtgcagatctgactgtgttttgttttgtttgaaatgacagaatttcttgcagaattttcatgaagttcagctctccacagatccctgctcaaatctcatcctgaactttactagacagtaacatcactagagagctttggagtagcaataactctgccatcacactgtaaataagaccacaagccaagataa

SEQ ID NO: 53243 - DNA, 600 bp, Chicken  19866894304464_2
taaccttcattcttcagataatatatcaacattattctgaaaactctaaacccagccaggggcaatacgaggacttggacaacaaagttgccgagaagtcacaaagtattgcatgagagcaaactgtacacaacatcttactttcgatgttggctgtactgaaataagagctaaacagaactctgcgagtcaggaataggttactgcacctacgctgttagacagatacataattcctggatagcatcaaacacgatggaaaacatttmcatatgatataccacagtagtgcattcatgygatgactcagaacaaacaatatctccctcaaacagaaagaccagaagttccactcccccttctccaaagtctgaagtgtgcagatctgactgtgttttgttttgtttgaaatgacagaatttcttgcagaattttcatgaagttcagctctccacagatccctgctcaaatctcatcctgaactttactagacagtaacatcactagagagctttggagtagcaataactctgccatcacactgtaaataagaccacaagccaagataagaatgctggccaagatgaacagattgaatga

SEQ ID NO: 53244 - DNA, 600 bp, Chicken  19866894304468_1
atttggaaacaaacaaacaacaacaacaaaaaacaaacagctcacttctgagacagagatcttgaattaggaaaagaatagtaagacataaaaacaagccaatgacttgtaccaacacactctgatcgttcatggtaaaatgccacttcttctattgttccttttccttctctctgcagatgcccaagccagcttggacctcatggatggttctgcagaacaggaggagacagccagcagaggaatctcttttcctctgaattccccatggcttgacagtgtgaaaaagtgagaacaagrccagttctctcagatattctaatagtcagtattttaattaaacccctacctcctgaagtcacacaataagagattttgcatagctttcttactttgtggctgtaccaatacttaaaattgcagatggttaacaagccccaatacacattaatacaagccaaaatgtatatcttacagtcttttgattgtattagactttttttttttttctttctggatggactgatgatgtttgaattctgaatgcgatttgaaatgcagagtggcagtgggggatgctgtgagtcctcagtgccagca

SEQ ID NO: 53245 - DNA, 600 bp, Chicken  19866894304469_1
aagtgcagataagcataaatgtattgactcagaggggaattattatttgctagtctttaaacaaattttacaaagtactcatttgccagcataagtctcacgttctgaattacctgtcagtgtagacaagaaacgaaattatagtccctgaagaactattaattctaccttcttaaaaggtgaacttaagctgaattatattgaattatgcctgaggcgtttctgctgtattccagtggaaggtgaaacagtaacaagtaattgatctattagttcaatctcattatttgtgagaaacayttggagtgactgaattccattgctttttttttttttttagctcctttcttggcccatatcacctagcagcatgtttgagattttcttcagagcagttgaatcaacagcaagatctgtcctcaaaaaattgacaggcatttcatgtagtgtgaaaataggcatcaattatgtaatttagtcgctcttattaaagcacagaattgagaaattttcaatcttaacaagaaagagccttttattgtttctggttgtttttctcccagaagaagactgaaagcctatgatgacccgaaggaaacc

SEQ ID NO: 53246 - DNA, 600 bp, Chicken  19866894304474_1
cgttagaaactgtaggattcactgtgggatcataacctttataaaggccaatatactgattaaaagcatctgggccaatgattttgggaatataatctcttaaagtaatgatctgaagaaaaaagaaaagaaaaaaaaatcactcagtattttgatagatgaatggtaacgattcacatgtacagaatgcctttttcatcactcatttgttcccaagcacgactaacagcagtgtaaatttgaaaggaacaagatgttagtatttctttgtgtagtctggaaaaaatgacaagagaaaaycagtagcaaagttgagtacacagtacactaaccaggctaatttagcatcctacaataatgctagacaaaaacctactgggcagattgccagtattgctcccttccagttcaagtaggtaaatccagctcacaagagatctgctgaggtttamagcctgggcataagctgtaatgcccatgaatggctgttaatgtgtacagattctattttcaggcatacatatgtaacacaaatcgtcttttctggatatttaaaatgaccaggttttgaaatactggttctgagaatcctttagtaga

SEQ ID NO: 53247 - DNA, 600 bp, Chicken  19866894304474_2
tgatagatgaatggtaacgattcacatgtacagaatgcctttttcatcactcatttgttcccaagcacgactaacagcagtgtaaatttgaaaggaacaagatgttagtatttctttgtgtagtctggaaaaaatgacaagagaaaaycagtagcaaagttgagtacacagtacactaaccaggctaatttagcatcctacaataatgctagacaaaaacctactgggcagattgccagtattgctcccttccagttcaagtaggtaaatccagctcacaagagatctgctgaggtttamagcctgggcataagctgtaatgcccatgaatggctgttaatgtgtacagattctattttcaggcatacatatgtaacacaaatcgtcttttctggatatttaaaatgaccaggttttgaaatactggttctgagaatcctttagtagacatgttatgctaaagtctatagactcataaaaacacacttcaaaattgaaaatggtgattaacaccttctgccaaaagtttatgtaatatattattacaaaatcatattactattacatgaaaaaagtatacgagtactctctctctctccc

SEQ ID NO: 53248 - DNA, 599 bp, Chicken  19866894304475_1
  misc_feature (1)..(110): n is any nucleotide
nnnnnnnnnnnnnnnnnnnnnnnnnnnnnnnnnnnnnnnnnnnnnnnnnnnnnnnnnnnnnnnnnnnnnnnnnnnnnnnnnnnnnnnnnnnnnnnnnnnnnnnnnnnnnntttttctttttgaaaccttttggttcccccatctgtactctttggcatattttaatgctggttttgtgtcttaaaggtatttgtgttttcctcctccgtagaattggaaggtagacgttggaattaacttgaggttgcattgtcagcacagcaaggcaggttgaagggtgtaaacctagcagaaaaatcyaccaggctgtgcaacctacctgaaagttctgacatggatatgcaacaaggattcttatttcagtcagtgacagcagtgtgactatgaccaaagctagaccacaccatatgtctgttttggtcaggcaatctgacttttatcttgtgaggaaatggcagctgaaagtgtatcttcagcagtttgcactcatagcaaggactcagttcactgccagggaaggaagatctttttgaattatgggaggtttgttagctgtgttttggtccagcaccctgtctgatcttatttgcttattgaga

SEQ ID NO: 53249 - DNA, 600 bp, Chicken  19866894304475_2
ccaggctgtgcaacctacctgaaagttctgacatggatatgcaacaaggattcttatttcagtcagtgacagcagtgtgactatgaccaaagctagaccacaccatatgtctgttttggtcaggcaatctgacttttatcttgtgaggaaatggcagctgaaagtgtatcttcagcagtttgcactcatagcaaggactcagttcactgccagggaaggaagatctttttgaattatgggaggtttgttagctgtgttttggtccagcaccctgtctgatcttatttgcttattgagaaygttgtacttgaaatggagttttgattaagtgtggccgctgatgtaaaatatggaactttgaaatgatatctaaaagcaaataccttttttattgaaaagcacaagaacatggaaggtaagatactgttagggttgtacatctctgctcaagttcaggaaacaccagggagctttctaagtgaacaaaattccaactctttacaacagccatcctgttactttcagctgtcttcagtctctgctgtgctcagctggcatctgtgtaaagaggatgtcatgtcatatagttattcttggtta

SEQ ID NO: 53250 - DNA, 600 bp, Chicken  19866894304482_1
gaagggtaatatcttgcaagcgggagggaaaaaaatcttttctccagactcccatctagccttcatgtgatgcccaaaggagaagggtctatgctgggccacaactggtcccacagctctgtcagggcatgctcagcagaagctcccaaatcctgttctcttcccagctgccctgggtggtttcaagtgtcctgcttcagcccagttccccccctcacacttctgggcagcaaagcagatgcaaaagatgcagcctcttgctccctatagaagcacttccccgagccctctgcagagccyaccagctcctctccattacaggcagactcccatcaagttgccagtgcctgctgattaaacaagccttgaatttgaatagtgagcaataaagagagagagacacgcggtcacctatgcacagcgagcccttcgggtagcaatcaatgggagaagggggtgacaccgttagcagccacatgctgcagccacacactgcctgctggcaggctttggggaggggggaccacagtggggggggattaatggattgcaatgatctgtggtctgagcaagtgtggatttcccacccaatgctgccag

SEQ ID NO: 53251 - DNA, 600 bp, Chicken  19866894304495_1
agtcttttgcaggttccattatcataagccatgtcagaaacataatgacttgaaaacttaccaagggagtcaatgaagtctttgttgttctgataaaacttgacataggatactagtttagcgcttacaaaaattgtcaaaagctagaagatggaaaacaaatgtaagaatagtttaaagattttctgtttccctctttggagaatgcacagacacataaaacaccacaattactatagaactgggaaaaaaaaacaacaaataaaaaacccccaaaacaatataagttaacagttcttraaaagtctcctgctaaaagccaagggcaatctgtgctgtgattattttctcagatcagaaaggtagttttgccaaaagaattcacagtgaaggttcaacttgtaactgattttccaaagcttataaaggggagctttctattacacatcttacatgtaacattttaattttctgattctaagaacatttaaaaaaaaaatagtacattgcaacttgagattaatgacacagttcactactccagtgaatttccaaagacactaataaggcaaggactttctaagatattaaaccaacttg

SEQ ID NO: 53252 - DNA, 600 bp, Chicken  19866894304501_1
gaagaaaattttattagcttcttcctttttttatagaaaatgttgtcagattaattggttaaagttggtgctagagaagtgaagttcataaagccaccagattttaactctcacctcattcgcttttattcccaacggtgtgaaataatctttgtgtatctttaagaaatgctggtttaaatgtttgaaaagcctctggaaactctggacatttgttgtcaaaatgttgctggctggatgatttttagaaatactctgcaggtcatattcagacagtttgagttccatctaagatattayatcacattcactggctttattccttctccttttacaagtaatatctgagttcttcaaaagctttcaaagttgctygctgtcttataaccttactaaagggactwaggtgagatttaaattatgtgaatattgactagcacgacaaactttgatatcctaaggagatctttgaatttaaagcacatctggtatatatttttctctgtatgtatccctgaaccgtgtatctctcctgtgtattttggacattcagttgcaaatttgaagaatgttttcccaccttagatttttaaaattgat

SEQ ID NO: 53253 - DNA, 600 bp, Chicken  19866894304501_2
gaagtgaagttcataaagccaccagattttaactctcacctcattcgcttttattcccaacggtgtgaaataatctttgtgtatctttaagaaatgctggtttaaatgtttgaaaagcctctggaaactctggacatttgttgtcaaaatgttgctggctggatgatttttagaaatactctgcaggtcatattcagacagtttgagttccatctaagatattayatcacattcactggctttattccttctccttttacaagtaatatctgagttcttcaaaagctttcaaagttgctygctgtcttataaccttactaaagggactwaggtgagatttaaattatgtgaatattgactagcacgacaaactttgatatcctaaggagatctttgaatttaaagcacatctggtatatatttttctctgtatgtatccctgaaccgtgtatctctcctgtgtattttggacattcagttgcaaatttgaagaatgttttcccaccttagatttttaaaattgataggtttaagagttcttcaataagaaatattcttgcaaaactacctttgtggtgttttaatagtcacgtagctctt

SEQ ID NO: 53254 - DNA, 600 bp, Chicken  19866894304501_3
taactctcacctcattcgcttttattcccaacggtgtgaaataatctttgtgtatctttaagaaatgctggtttaaatgtttgaaaagcctctggaaactctggacatttgttgtcaaaatgttgctggctggatgatttttagaaatactctgcaggtcatattcagacagtttgagttccatctaagatattayatcacattcactggctttattccttctccttttacaagtaatatctgagttcttcaaaagctttcaaagttgctygctgtcttataaccttactaaagggactwaggtgagatttaaattatgtgaatattgactagcacgacaaactttgatatcctaaggagatctttgaatttaaagcacatctggtatatatttttctctgtatgtatccctgaaccgtgtatctctcctgtgtattttggacattcagttgcaaatttgaagaatgttttcccaccttagatttttaaaattgataggtttaagagttcttcaataagaaatattcttgcaaaactacctttgtggtgttttaatagtcacgtagctcttctgtctagcataattccagtaattataaa

SEQ ID NO: 53255 - DNA, 600 bp, Chicken  19866894304509_1
acaaagcccatacagctttagagcatcacagcaatgaaaacaggccatggaacttttcatccacgttgtgttttgctctggtttcacacatttctgatctatgataaatatttatagtgggccgggttcagtatgagcccagtatctcctagcgtgtcctgcctgttctatgacttgccattaatatttctgtccatcactgcactcttacacattccaggtcaggatgtgtttgtttttgtttccttcgagaacacaagaaattgtattgcctgaattattgcagtaaatatttcaaaygaatgagcagtttakctggcttaataagaaatgaataacgtctggctttgttaggcagagtagaatctggaaatttttgtaatgtagaggtaataccagaagaaaacgaagaatgaaaagataaatttccactaagtcgtaatggtttgcctaggtaagaagacagagcaaggaatttttcattgggagatacagagctttatttatggctgaatttaaaaaatggaacagtcttcttgcttttcactgttgttacagcggtgtaatgcttcatgtttttgccttttagccttggaaaaa

SEQ ID NO: 53256 - DNA, 600 bp, Chicken  19866894304509_2
ctttagagcatcacagcaatgaaaacaggccatggaacttttcatccacgttgtgttttgctctggtttcacacatttctgatctatgataaatatttatagtgggccgggttcagtatgagcccagtatctcctagcgtgtcctgcctgttctatgacttgccattaatatttctgtccatcactgcactcttacacattccaggtcaggatgtgtttgtttttgtttccttcgagaacacaagaaattgtattgcctgaattattgcagtaaatatttcaaaygaatgagcagtttakctggcttaataagaaatgaataacgtctggctttgttaggcagagtagaatctggaaatttttgtaatgtagaggtaataccagaagaaaacgaagaatgaaaagataaatttccactaagtcgtaatggtttgcctaggtaagaagacagagcaaggaatttttcattgggagatacagagctttatttatggctgaatttaaaaaatggaacagtcttcttgcttttcactgttgttacagcggtgtaatgcttcatgtttttgccttttagccttggaaaaaaccagaacagaacta

SEQ ID NO: 53257 - DNA, 599 bp, Chicken  19866894304513_1
  misc_feature (1)..(80): n is any nucleotide
nnnnnnnnnnnnnnnnnnnnnnnnnnnnnnnnnnnnnnnnnnnnnnnnnnnnnnnnnnnnnnnnnnnnnnnnnnnnnnnnacaattaaataaatgttcacttcttatttctttccttcttcccgttgtgggttaaacgctgagttatatccctgctctaatagcctacatgataggcgtgtctgtcattcctgacaaagagagggaagttgtaggagatgagggttgagaggaagagaggggcagctgaattttggtattgtctttgtgcatggattttatatctagttttacagcatcygggctggaaattatgaaagatttagatgcatgaaagattctgatataaacccttgctatttcattcagaggattgtgcagagctatttctgtgtcatttcaaatctggacgcttactctaggataaattattcagtatccctttatttcaccttctgtttgcaggctttcaaattccagcataactttcctgtattttggtacccttactgctcttctcatctacatgccactagaaaaagtgttcacctaaatgggtactcatggcctgagatccatataggggggatgtttatgcac

SEQ ID NO: 53258 - DNA, 600 bp, Chicken  19866894304513_2
aaattattcagtatccctttatttcaccttctgtttgcaggctttcaaattccagcataactttcctgtattttggtacccttactgctcttctcatctacatgccactagaaaaagtgttcacctaaatgggtactcatggcctgagatccatataggggggatgtttatgcactcttaatatgtagaatatattagtatgtagaatatattcttaatatgtagcatattatgtgtttagtacatacttagagtatgtaagtgctctcatacttcatcatgtactctcaagaatatttyaaagtttgttttcctttggatcgtgggtttacagtttggattttgtttggcatcmgttttgttgttgctgttgcttttaagattttgatttaccagacaaactggagaagcaacaagcaacctggttcacagagtcaggcattccataggggcaggtgcaatatgttgctctcagctgcagaattggactgtggagatctggctgggtaatcagaagwggaaattatcatgggccactgttcttacctggggttggctcaggtaaagaacaacatagtgctggaatgtaggcagtgggga

SEQ ID NO: 53259 - DNA, 600 bp, Chicken  19866894304513_3
cataactttcctgtattttggtacccttactgctcttctcatctacatgccactagaaaaagtgttcacctaaatgggtactcatggcctgagatccatataggggggatgtttatgcactcttaatatgtagaatatattagtatgtagaatatattcttaatatgtagcatattatgtgtttagtacatacttagagtatgtaagtgctctcatacttcatcatgtactctcaagaatatttyaaagtttgttttcctttggatcgtgggtttacagtttggattttgtttggcatcmgttttgttgttgctgttgcttttaagattttgatttaccagacaaactggagaagcaacaagcaacctggttcacagagtcaggcattccataggggcaggtgcaatatgttgctctcagctgcagaattggactgtggagatctggctgggtaatcagaagwggaaattatcatgggccactgttcttacctggggttggctcaggtaaagaacaacatagtgctggaatgtaggcagtggggagctctcctgctttcccagcagatgatgtctcagctgcaacatggtccggcactcc

SEQ ID NO: 53260 - DNA, 600 bp, Chicken  19866894304513_4
tatgtagcatattatgtgtttagtacatacttagagtatgtaagtgctctcatacttcatcatgtactctcaagaatatttyaaagtttgttttcctttggatcgtgggtttacagtttggattttgtttggcatcmgttttgttgttgctgttgcttttaagattttgatttaccagacaaactggagaagcaacaagcaacctggttcacagagtcaggcattccataggggcaggtgcaatatgttgctctcagctgcagaattggactgtggagatctggctgggtaatcagaagwggaaattatcatgggccactgttcttacctggggttggctcaggtaaagaacaacatagtgctggaatgtaggcagtggggagctctcctgctttcccagcagatgatgtctcagctgcaacatggtccggcactccaagaaagatatgtttgagttggagaggacccaactggagcgagtccagaggaccagggagaataaggagagcttttgaaaacatggtctgcaaggaaatattgaacaaattgggattgtttagcctaaagcagagaagggggaggaggtgttaaactccctga

SEQ ID NO: 53261 - DNA, 599 bp, Chicken  19866894304516_1
  misc_feature (1)..(62): n is any nucleotide
nnnnnnnnnnnnnnnnnnnnnnnnnnnnnnnnnnnnnnnnnnnnnnnnnnnnnnnnnnnnnntcctgtctgccactgtctgcttactcaccctggaaggaagccggtccgaaagcagcagagagcaagtcggcctcacagaccgagtgaatcaggctgcgatgtgttaggagtgagtcacgttgtgctctgtgcgcctgcttttcctcagcaacctcagcgacatcctggcctttatctgctgccccgcgggctgcacaggaatgggcagtgctctgtgtgggggctgaggggctgcctraaatcctcccaggtgcttggaggggaaaagccaaaccccagagctgcccttgccccagcagggctgtgtcctggttcacaacagggtttgcataaggacctgctgcagggctggtgctcacctgtgtttgcagcgaggtgcaggtcaggaggtcaggaccctgcaggcacaaagctgctttatgggctcaggactccagcaaagcattggatgctgcttcccacagcctcctggagaaactggccgctcagggctcggatggatgtgctgtttacaaggtgaaatctggtcatgagtag

SEQ ID NO: 53262 - DNA, 600 bp, Chicken  19866894304523_1
cccagtcagaattgtgctggaaaaatatgacaagagtttcaaatttccctatataggaagcacacaggaaagttttaacatcacccttattctacatttttgaaaaaactgacagtgccatcaaaacagtcaaactcgtctataccaacaaacagcaacaaaggtaaatctttggagttggtttccaaaattagaacatgctgccattcaaattaacttttttaatttaacttagcccgtcctgtgtgtttaaagcagagattatggaaagcaaggaatctcaagagtaactatttaatrgttatcttaataaygagtgtatagatttawtaccaaagagctatatatacatgttcctttatgaatataaaaataaatacaacactcaccgaggtgtcctaggaagcccgtcgtcagtctctacaaaattaccttaaatgtctgttctttttaggcatgctaataacgaaattttctttgaggaagacgtggatggcaatatttgatagatatgtttatatgctagctgattgtatattttgtaaaaagtatgcacttcaagtaacaatgcttcattttaaataatctctgtacactgtt

SEQ ID NO: 53263 - DNA, 600 bp, Chicken  19866894304523_2
tgctggaaaaatatgacaagagtttcaaatttccctatataggaagcacacaggaaagttttaacatcacccttattctacatttttgaaaaaactgacagtgccatcaaaacagtcaaactcgtctataccaacaaacagcaacaaaggtaaatctttggagttggtttccaaaattagaacatgctgccattcaaattaacttttttaatttaacttagcccgtcctgtgtgtttaaagcagagattatggaaagcaaggaatctcaagagtaactatttaatrgttatcttaataaygagtgtatagatttawtaccaaagagctatatatacatgttcctttatgaatataaaaataaatacaacactcaccgaggtgtcctaggaagcccgtcgtcagtctctacaaaattaccttaaatgtctgttctttttaggcatgctaataacgaaattttctttgaggaagacgtggatggcaatatttgatagatatgtttatatgctagctgattgtatattttgtaaaaagtatgcacttcaagtaacaatgcttcattttaaataatctctgtacactgttcagtattgctattc

SEQ ID NO: 53264 - DNA, 600 bp, Chicken  19866894304523_3
caagagtttcaaatttccctatataggaagcacacaggaaagttttaacatcacccttattctacatttttgaaaaaactgacagtgccatcaaaacagtcaaactcgtctataccaacaaacagcaacaaaggtaaatctttggagttggtttccaaaattagaacatgctgccattcaaattaacttttttaatttaacttagcccgtcctgtgtgtttaaagcagagattatggaaagcaaggaatctcaagagtaactatttaatrgttatcttaataaygagtgtatagatttawtaccaaagagctatatatacatgttcctttatgaatataaaaataaatacaacactcaccgaggtgtcctaggaagcccgtcgtcagtctctacaaaattaccttaaatgtctgttctttttaggcatgctaataacgaaattttctttgaggaagacgtggatggcaatatttgatagatatgtttatatgctagctgattgtatattttgtaaaaagtatgcacttcaagtaacaatgcttcattttaaataatctctgtacactgttcagtattgctattcttcagatgccaaaggt

SEQ ID NO: 53265 - DNA, 599 bp, Chicken  19866894304525_1
  misc_feature (1)..(101): n is any nucleotide
nnnnnnnnnnnnnnnnnnnnnnnnnnnnnnnnnnnnnnnnnnnnnnnnnnnnnnnnnnnnnnnnnnnnnnnnnnnnnnnnnnnnnnnnnnnnnnnnnnnnncacttaaatacagatctgttttgtgtttacataaaatatagaaagtctctgcacttgattgtacttgaatatgaagcactatttatacctgtataataatgacaagataagtgaatcttgtgcctttgtgtattttgttaaaggaaaataaagatatctagcagcaaacttgctttgtggttcctagaacactgcatcyatgcaattgttcccattaactgcttcagggrgtttagaaaagctgttaaaaatgacagaataagagtggcttgtgttggaagggccttaaagatctagtttcaacccatatttttgtagagaaagatctrtttttaacttcataatttttcaagggtttaaagttatggtacrtgagaktaatttgcaagtcaattcaggctcagggatayatatgtatatgatactaatatgactccaggctttcctcaatttacagtaagmgtttacacattattcatgccaagtatgtgtgctcca

SEQ ID NO: 53266 - DNA, 599 bp, Chicken  19866894304525_2
  misc_feature (1)..(70): n is any nucleotide
nnnnnnnnnnnnnnnnnnnnnnnnnnnnnnnnnnnnnnnnnnnnnnnnnnnnnnnnnnnnnnnnnnnnnncacttaaatacagatctgttttgtgtttacataaaatatagaaagtctctgcacttgattgtacttgaatatgaagcactatttatacctgtataataatgacaagataagtgaatcttgtgcctttgtgtattttgttaaaggaaaataaagatatctagcagcaaacttgctttgtggttcctagaacactgcatcyatgcaattgttcccattaactgcttcagggrgtttagaaaagctgttaaaaatgacagaataagagtggcttgtgttggaagggccttaaagatctagtttcaacccatatttttgtagagaaagatctrtttttaacttcataatttttcaagggtttaaagttatggtacrtgagaktaatttgcaagtcaattcaggctcagggatayatatgtatatgatactaatatgactccaggctttcctcaatttacagtaagmgtttacacattattcatgccaagtatgtgtgctccagtcctgacacacttgagaggagaggattttg

SEQ ID NO: 53267 - DNA, 564 bp, Chicken  19866894304525_3
cacttaaatacagatctgttttgtgtttacataaaatatagaaagtctctgcacttgattgtacttgaatatgaagcactatttatacctgtataataatgacaagataagtgaatcttgtgcctttgtgtattttgttaaaggaaaataaagatatctagcagcaaacttgctttgtggttcctagaacactgcatcyatgcaattgttcccattaactgcttcagggrgtttagaaaagctgttaaaaatgacagaataagagtggcttgtgttggaagggccttaaagatctagttrtttttaacttcataatttttcaagggtttaaagttatggtacrtgagaktaatttgcaagtcaattcaggctcagggatayatatgtatatgatactaatatgactccaggctttcctcaatttacagtaagmgtttacacattattcatgccaagtatgtgtgctccagtcctgacacacttgagaggagaggattttgtttctgcagcaggtgcttctggacttccatttactgcagtagaggcaatagtgtaaaaaaaaaa

SEQ ID NO: 53268 - DNA, 521 bp, Chicken  19866894304525_4
cacttaaatacagatctgttttgtgtttacataaaatatagaaagtctctgcacttgattgtacttgaatatgaagcactatttatacctgtataataatgacaagataagtgaatcttgtgcctttgtgtattttgttaaaggaaaataaagatatctagcagcaaacttgctttgtggttcctagaacactgcatcyatgcaattgttcccattaactgcttcagggrgtttagaaaagctgttaaaaatgacagaataagagtggcttgtgttggaagggccttaaagatctagttrtgagaktaatttgcaagtcaattcaggctcagggatayatatgtatatgatactaatatgactccaggctttcctcaatttacagtaagmgtttacacattattcatgccaagtatgtgtgctccagtcctgacacacttgagaggagaggattttgtttctgcagcaggtgcttctggacttccatttactgcagtagaggcaatagtgtaaaaaaaaaa

SEQ ID NO: 53269 - DNA, 515 bp, Chicken  19866894304525_5
cacttaaatacagatctgttttgtgtttacataaaatatagaaagtctctgcacttgattgtacttgaatatgaagcactatttatacctgtataataatgacaagataagtgaatcttgtgcctttgtgtattttgttaaaggaaaataaagatatctagcagcaaacttgctttgtggttcctagaacactgcatcyatgcaattgttcccattaactgcttcagggrgtttagaaaagctgttaaaaatgacagaataagagtggcttgtgttggaagggccttaaagatctagttktaatttgcaagtcaattcaggctcagggatayatatgtatatgatactaatatgactccaggctttcctcaatttacagtaagmgtttacacattattcatgccaagtatgtgtgctccagtcctgacacacttgagaggagaggattttgtttctgcagcaggtgcttctggacttccatttactgcagtagaggcaatagtgtaaaaaaaaaa

SEQ ID NO: 53270 - DNA, 483 bp, Chicken  19866894304525_6
cacttaaatacagatctgttttgtgtttacataaaatatagaaagtctctgcacttgattgtacttgaatatgaagcactatttatacctgtataataatgacaagataagtgaatcttgtgcctttgtgtattttgttaaaggaaaataaagatatctagcagcaaacttgctttgtggttcctagaacactgcatcyatgcaattgttcccattaactgcttcagggrgtttagaaaagctgttaaaaatgacagaataagagtggcttgtgttggaagggccttaaagatctagttyatatgtatatgatactaatatgactccaggctttcctcaatttacagtaagmgtttacacattattcatgccaagtatgtgtgctccagtcctgacacacttgagaggagaggattttgtttctgcagcaggtgcttctggacttccatttactgcagtagaggcaatagtgtaaaaaaaaaa

SEQ ID NO: 53271 - DNA, 431 bp, Chicken  19866894304525_7
cacttaaatacagatctgttttgtgtttacataaaatatagaaagtctctgcacttgattgtacttgaatatgaagcactatttatacctgtataataatgacaagataagtgaatcttgtgcctttgtgtattttgttaaaggaaaataaagatatctagcagcaaacttgctttgtggttcctagaacactgcatcyatgcaattgttcccattaactgcttcagggrgtttagaaaagctgttaaaaatgacagaataagagtggcttgtgttggaagggccttaaagatctagttmgtttacacattattcatgccaagtatgtgtgctccagtcctgacacacttgagaggagaggattttgtttctgcagcaggtgcttctggacttccatttactgcagtagaggcaatagtgtaaaaaaaaaa

SEQ ID NO: 53272 - DNA, 600 bp, Chicken  19866894304527_1
cacagctctctccatctgggatttaggtcttccagagccagaaacaagaggattgtgcactagggctccaaaataaagtggaggctttatcttagaactctctccttccctttctctccagcagcagcctgaattatctctgcaccactttagaaaaaatcagttcttctgatggccctcaaatgctctttttcagaccattctcccatctctgttgctaatgaagccttcagctcataggcaaacagcccttgatttgattttgccccctgtgggattcatgtctttggtataattctrttaacgtcaaaggagtttacagcaaggactcatctgggaccttgtgtacagctgttttgttccaggctagaggaactctaccacacccaaatttatcctggattatcaatattctgataagcaactcaattgtttctacactggttaggggaatttctccactccttactttcttcctctattttccctgggccactttacctccactttgagtttctgcttttcaagccatgacattcctggcaattcctagatctctggattcctgcctcatcctcccatttttgctaacatacaact

SEQ ID NO: 53273 - DNA, 600 bp, Chicken  19866894304527_2
ggaacatgttatcattaacttcccatttttattaccccaaatgcctttccagctcacagcatactgtgcttcaggaacttcactgccataattgtacatcattgtgtaaattcagcagtgaatacaatagagacttggtctatcccaaggcctccaggcactgatgtaattgaaataataaagcataatcataaggaagaaagtggcatgtaggtctttcaagcagagtatggaaatgggtatgggtgactgatgctgatgcaattccctcttagcaaatgaagggaaagggtttaggartggaccagtcctgcatagcattagcagttatgttagctgcaatacgatccttctctggttggaaagttctatcccagctatagtaacatgttggagtttgaggctatgtcttctgaggtttgggttttgtttttttcttcccttgattacttgttaaaaatactttattttaccaaaaaggaagaaaacagaggagacagtactgtctgataacttaaatgctggataatactttgacagggcagggtaggtctctgtttctaaatctgtttctcacttctttgtgcctcaacttccccc

SEQ ID NO: 53274 - DNA, 599 bp, Chicken  19866894304535_1
  misc_feature (1)..(132): n is any nucleotide
nnnnnnnnnnnnnnnnnnnnnnnnnnnnnnnnnnnnnnnnnnnnnnnnnnnnnnnnnnnnnnnnnnnnnnnnnnnnnnnnnnnnnnnnnnnnnnnnnnnnnnnnnnnnnnnnnnnnnnnnnnnnnnnnnnnncagcttttaagctggtggtaatgagcactctttactagacctcacttcactcagatgggttcccatatcattttgaaaaacctgtggcttcgtatagtaccagttgtagtgtctcatctaaaggatgtgtctcgctcagcaccctgcccctggcactgaccccgtgaytgaggacaaagagtaaaagtaatccacatcagcgtgtcttgctcagcattcttagttgcatggattacaacccaagttaaaaactgatccaaaaaataccatcagctcttagtccagatgctaaagctgtagaagaccaatattagtctaagacttcactgattctgagaagagccctattctcaggcacatgggttgccacaacatagctcccagctgtcagtgaactctctatttggctattttgcctctagtgttctagtttttaatatatgtatgtagtcctttgaggaatcttg

SEQ ID NO: 53275 - DNA, 600 bp, Chicken  19866894304535_2
gtaaaagtaatccacatcagcgtgtcttgctcagcattcttagttgcatggattacaacccaagttaaaaactgatccaaaaaataccatcagctcttagtccagatgctaaagctgtagaagaccaatattagtctaagacttcactgattctgagaagagccctattctcaggcacatgggttgccacaacatagctcccagctgtcagtgaactctctatttggctattttgcctctagtgttctagtttttaatatatgtatgtagtcctttgaggaatcttgtgttgtttatggrtgggatkagcttgttctcttactgtgaatttrtattttctggtaaaggtcttcctctgacagagctggaattagttttgtgtcatttagtaacagaagtggccttcatttcttccaagaggtcggcaccaatgaagcaaatgtaaatttcagctctgaccaatttgagcatcacagagtaataggctgaaagcagctcatatgaattgattttatgatcagtttctgaagcatctggtgaaagagtcgcatccctctcagtctaattagaattctattgacacatcagagctggagcaga

SEQ ID NO: 53276 - DNA, 600 bp, Chicken  19866894304535_3
taatccacatcagcgtgtcttgctcagcattcttagttgcatggattacaacccaagttaaaaactgatccaaaaaataccatcagctcttagtccagatgctaaagctgtagaagaccaatattagtctaagacttcactgattctgagaagagccctattctcaggcacatgggttgccacaacatagctcccagctgtcagtgaactctctatttggctattttgcctctagtgttctagtttttaatatatgtatgtagtcctttgaggaatcttgtgttgtttatggrtgggatkagcttgttctcttactgtgaatttrtattttctggtaaaggtcttcctctgacagagctggaattagttttgtgtcatttagtaacagaagtggccttcatttcttccaagaggtcggcaccaatgaagcaaatgtaaatttcagctctgaccaatttgagcatcacagagtaataggctgaaagcagctcatatgaattgattttatgatcagtttctgaagcatctggtgaaagagtcgcatccctctcagtctaattagaattctattgacacatcagagctggagcagaaaaggaa

SEQ ID NO: 53277 - DNA, 600 bp, Chicken  19866894304535_4
agcattcttagttgcatggattacaacccaagttaaaaactgatccaaaaaataccatcagctcttagtccagatgctaaagctgtagaagaccaatattagtctaagacttcactgattctgagaagagccctattctcaggcacatgggttgccacaacatagctcccagctgtcagtgaactctctatttggctattttgcctctagtgttctagtttttaatatatgtatgtagtcctttgaggaatcttgtgttgtttatggrtgggatkagcttgttctcttactgtgaatttrtattttctggtaaaggtcttcctctgacagagctggaattagttttgtgtcatttagtaacagaagtggccttcatttcttccaagaggtcggcaccaatgaagcaaatgtaaatttcagctctgaccaatttgagcatcacagagtaataggctgaaagcagctcatatgaattgattttatgatcagtttctgaagcatctggtgaaagagtcgcatccctctcagtctaattagaattctattgacacatcagagctggagcagaaaaggaaactacagcgaagtagaagttaatcc

SEQ ID NO: 53278 - DNA, 599 bp, Chicken  19866894304542_1
  misc_feature (1)..(125): n is any nucleotide
nnnnnnnnnnnnnnnnnnnnnnnnnnnnnnnnnnnnnnnnnnnnnnnnnnnnnnnnnnnnnnnnnnnnnnnnnnnnnnnnnnnnnnnnnnnnnnnnnnnnnnnnnnnnnnnnnnnnnnnnnnnnnctttatctcctatggcatcctgtttgttgtatagtggaatactggcatgcccatgtgtgggattgtcataaaatggggaaatagggaagattaaaaagtagtcaataaatataaaatcaggaaagcacagcagaaaggaaaatctatcagtaaatctggtttcattcatatggayaggtagtctcagtgatctggctgctggatgcaagataagagtgactgaattaaacaaatatgaattgttaatggtaattcccttccagtrttgcctttccagagaggaaaatgaaagatgacaggcwaacacctgccacccagagcaaggaaggaaccactcaycccttgtgtggctcttccactcacatctcagcgttatcaaagcagcragcgaagtgcaggctggtgcacagctactctcctcgggcagttatcagtgtcaatctttatctgtctgactgtgaccacaaataatga

SEQ ID NO: 53279 - DNA, 599 bp, Chicken  19866894304542_2
  misc_feature (1)..(35): n is any nucleotide
nnnnnnnnnnnnnnnnnnnnnnnnnnnnnnnnnnnctttatctcctatggcatcctgtttgttgtatagtggaatactggcatgcccatgtgtgggattgtcataaaatggggaaatagggaagattaaaaagtagtcaataaatataaaatcaggaaagcacagcagaaaggaaaatctatcagtaaatctggtttcattcatatggayaggtagtctcagtgatctggctgctggatgcaagataagagtgactgaattaaacaaatatgaattgttaatggtaattcccttccagtrttgcctttccagagaggaaaatgaaagatgacaggcwaacacctgccacccagagcaaggaaggaaccactcaycccttgtgtggctcttccactcacatctcagcgttatcaaagcagcragcgaagtgcaggctggtgcacagctactctcctcgggcagttatcagtgtcaatctttatctgtctgactgtgaccacaaataatgaatgctaatgaaaaagcatgtgttcctgtgtcaagtatggcacatcttattttgtgactcaggcttggactattattgacacagcactcta

SEQ ID NO: 53280 - DNA, 600 bp, Chicken  19866894304542_3
ttatctcctatggcatcctgtttgttgtatagtggaatactggcatgcccatgtgtgggattgtcataaaatggggaaatagggaagattaaaaagtagtcaataaatataaaatcaggaaagcacagcagaaaggaaaatctatcagtaaatctggtttcattcatatggayaggtagtctcagtgatctggctgctggatgcaagataagagtgactgaattaaacaaatatgaattgttaatggtaattcccttccagtrttgcctttccagagaggaaaatgaaagatgacaggcwaacacctgccacccagagcaaggaaggaaccactcaycccttgtgtggctcttccactcacatctcagcgttatcaaagcagcragcgaagtgcaggctggtgcacagctactctcctcgggcagttatcagtgtcaatctttatctgtctgactgtgaccacaaataatgaatgctaatgaaaaagcatgtgttcctgtgtcaagtatggcacatcttattttgtgactcaggcttggactattattgacacagcactctagtgtaatcatcagctcatagcaaacaggtaaatagtgg

SEQ ID NO: 53281 - DNA, 600 bp, Chicken  19866894304542_4
tactggcatgcccatgtgtgggattgtcataaaatggggaaatagggaagattaaaaagtagtcaataaatataaaatcaggaaagcacagcagaaaggaaaatctatcagtaaatctggtttcattcatatggayaggtagtctcagtgatctggctgctggatgcaagataagagtgactgaattaaacaaatatgaattgttaatggtaattcccttccagtrttgcctttccagagaggaaaatgaaagatgacaggcwaacacctgccacccagagcaaggaaggaaccactcaycccttgtgtggctcttccactcacatctcagcgttatcaaagcagcragcgaagtgcaggctggtgcacagctactctcctcgggcagttatcagtgtcaatctttatctgtctgactgtgaccacaaataatgaatgctaatgaaaaagcatgtgttcctgtgtcaagtatggcacatcttattttgtgactcaggcttggactattattgacacagcactctagtgtaatcatcagctcatagcaaacaggtaaatagtggcaagaaattcctctaccttaagaaacctgcaacaaca

SEQ ID NO: 53282 - DNA, 600 bp, Chicken  19866894304542_5
aagattaaaaagtagtcaataaatataaaatcaggaaagcacagcagaaaggaaaatctatcagtaaatctggtttcattcatatggayaggtagtctcagtgatctggctgctggatgcaagataagagtgactgaattaaacaaatatgaattgttaatggtaattcccttccagtrttgcctttccagagaggaaaatgaaagatgacaggcwaacacctgccacccagagcaaggaaggaaccactcaycccttgtgtggctcttccactcacatctcagcgttatcaaagcagcragcgaagtgcaggctggtgcacagctactctcctcgggcagttatcagtgtcaatctttatctgtctgactgtgaccacaaataatgaatgctaatgaaaaagcatgtgttcctgtgtcaagtatggcacatcttattttgtgactcaggcttggactattattgacacagcactctagtgtaatcatcagctcatagcaaacaggtaaatagtggcaagaaattcctctaccttaagaaacctgcaacaacaaggtactctgagtttagcaatgagaagagaatgacagtgtttgacag

SEQ ID NO: 53283 - DNA, 599 bp, Chicken  19866894304547_1
  misc_feature (1)..(219): n is any nucleotide
nnnnnnnnnnnnnnnnnnnnnnnnnnnnnnnnnnnnnnnnnnnnnnnnnnnnnnnnnnnnnnnnnnnnnnnnnnnnnnnnnnnnnnnnnnnnnnnnnnnnnnnnnnnnnnnnnnnnnnnnnnnnnnnnnnnnnnnnnnnnnnnnnnnnnnnnnnnnnnnnnnnnnnnnnnnnnnnnnnnnnnnnnnnnnnnnnnnnnnnnnnnnnnnnnnnnnnnnnnnacattcatttttctcctctgacgcacaatcgcattttcttttgcttcctctacccaaataaactagtcaagaggaagctcrctgtttaaggatgagctctcatccatgtgaatcagtaagaaactctcctccttctaataccctgataccagtggtttttattttccctgccattgaagacttgcatctttccaaatcccacaagtaagtaatgccacacaaaagaagacttaatggtcaaagaagtaggggttgtaaagagatttttggagatcatctagttcagcccctctacgaaagcaggtaccatacagtaggttacacaaggaagtgtcccagtgggttttgaatatctctagagaaggcgacttcacaacctc

SEQ ID NO: 53284 - DNA, 600 bp, Chicken  19866894304547_2
aactctcctccttctaataccctgataccagtggtttttattttccctgccattgaagacttgcatctttccaaatcccacaagtaagtaatgccacacaaaagaagacttaatggtcaaagaagtaggggttgtaaagagatttttggagatcatctagttcagcccctctacgaaagcaggtaccatacagtaggttacacaaggaagtgtcccagtgggttttgaatatctctagagaaggcgacttcacaacctctctaccccaacaggctagcctgttccaatgctctgtaaccytcacagctatgaaattttttctcatgttcagatgaaatttgtgttcccatttatgcctgttctccttgtcctgtcactgagcaccactgaaaagagcctagccccatccacttgacacctaccttttaggtactcataggcattgataagatctcccctcatccttctcttcgccaagctgaacagccccaggtctctcaacctttctttatttataagggcagtgctccaggccccagtcttctctgtggccctccactgacctctttctagaagttacctatatttcttgaactggag

SEQ ID NO: 53285 - DNA, 599 bp, Chicken  19866894304548_1
  misc_feature (1)..(8): n is any nucleotide
nnnnnnnnatgaggcttaactggtagatcaacagtggctgccttccaatcatatatgccttactgatgagtgtgtcagttcatcacaagcaattccataaacacacgatcattgttctaagagtcttttgtgaatgtttcatgtatgaattctatcctgaaaaatccttgcctgcagagctgagtcctgccttcagctcttgtgaagagtccccagttcctcaacagagaggagtatctgtctgctttgtgcagatatttaagtctttacatatgaagccataaataacataattctccygttgagatggaaayagaccaacaaatatctattttgtcaaaatggatgtttrattgtcatccctctctagttgcactctgcacatcagcagtgcaacgacatcctaataagtcagtgcttcacaytgtacatatgttattttgtttctgcacaggatgtttgatgtgggtggacagcgatcagagagaaaaaagtggattcattgctttgagggagtgacctgcatcatattctgtgctgcactcagtgcctatgacatggttctggtggaagataaagaagtggtgagtcagaagaaa

SEQ ID NO: 53286 - DNA, 600 bp, Chicken  19866894304548_2
cttaactggtagatcaacagtggctgccttccaatcatatatgccttactgatgagtgtgtcagttcatcacaagcaattccataaacacacgatcattgttctaagagtcttttgtgaatgtttcatgtatgaattctatcctgaaaaatccttgcctgcagagctgagtcctgccttcagctcttgtgaagagtccccagttcctcaacagagaggagtatctgtctgctttgtgcagatatttaagtctttacatatgaagccataaataacataattctccygttgagatggaaayagaccaacaaatatctattttgtcaaaatggatgtttrattgtcatccctctctagttgcactctgcacatcagcagtgcaacgacatcctaataagtcagtgcttcacaytgtacatatgttattttgtttctgcacaggatgtttgatgtgggtggacagcgatcagagagaaaaaagtggattcattgctttgagggagtgacctgcatcatattctgtgctgcactcagtgcctatgacatggttctggtggaagataaagaagtggtgagtcagaagaaacaatcctttttgatg

SEQ ID NO: 53287 - DNA, 600 bp, Chicken  19866894304548_3
atatgccttactgatgagtgtgtcagttcatcacaagcaattccataaacacacgatcattgttctaagagtcttttgtgaatgtttcatgtatgaattctatcctgaaaaatccttgcctgcagagctgagtcctgccttcagctcttgtgaagagtccccagttcctcaacagagaggagtatctgtctgctttgtgcagatatttaagtctttacatatgaagccataaataacataattctccygttgagatggaaayagaccaacaaatatctattttgtcaaaatggatgtttrattgtcatccctctctagttgcactctgcacatcagcagtgcaacgacatcctaataagtcagtgcttcacaytgtacatatgttattttgtttctgcacaggatgtttgatgtgggtggacagcgatcagagagaaaaaagtggattcattgctttgagggagtgacctgcatcatattctgtgctgcactcagtgcctatgacatggttctggtggaagataaagaagtggtgagtcagaagaaacaatcctttttgatgcttggttttaatgcattccctgatggcttatcagaatt

SEQ ID NO: 53288 - DNA, 600 bp, Chicken  19866894304548_4
ttttgtgaatgtttcatgtatgaattctatcctgaaaaatccttgcctgcagagctgagtcctgccttcagctcttgtgaagagtccccagttcctcaacagagaggagtatctgtctgctttgtgcagatatttaagtctttacatatgaagccataaataacataattctccygttgagatggaaayagaccaacaaatatctattttgtcaaaatggatgtttrattgtcatccctctctagttgcactctgcacatcagcagtgcaacgacatcctaataagtcagtgcttcacaytgtacatatgttattttgtttctgcacaggatgtttgatgtgggtggacagcgatcagagagaaaaaagtggattcattgctttgagggagtgacctgcatcatattctgtgctgcactcagtgcctatgacatggttctggtggaagataaagaagtggtgagtcagaagaaacaatcctttttgatgcttggttttaatgcattccctgatggcttatcagaattgttcccattcccttataacaatttaaaggctattatgctgtatgggttcttgtcagtgaagagtattacagta

SEQ ID NO: 53289 - DNA, 600 bp, Chicken  19866894304550_1
ttatagtgatgatgaagcgaagaaaatgtcttaattatttttttcttaaccattccaggatgtaaagctggccaaagataaatccaattaatttaacaatagctttaattattccttttgaaacagaaaatgcctgtatgcacaatagacttcaaattaaatgtcttaattcctactaactgtaatggtggcatggaataattccttcgacccagctgctgctattaaattaattacatatctagcttttatcaaagggagtttaaatagagaagaataaacagatccaatatcctatcraacagaatggtactaaaaagttaggtgtactttttcagcccttgggaaacaaaggagtcctttctgaagtgatgcttaaaaaacttggcccctaaattcaagcaggtatcttgatgccaattcattaaggggtcaggaaagtacaaaatagcattcataacaaacaagccagtctcgttactaaattgcaccaggcaaatagagaacctcagggaatcctctatcagtttgactctagagaacaaaaacaacaggcaaggcaaagcagtccattagtgacatttcccacacagaacatga

SEQ ID NO: 53290 - DNA, 600 bp, Chicken  19866894304550_2
attaacagctatcacaaccatctgtatttttggtagtgccagcaaatgagctctgtacctatattatgaaatgtcttctctttcatttcaagtttgctacatttcataaaagcaaattcaacaatgtcatgtttttttaattcatcttgcaaaatgttgtgagccaatctttcatttatttgcccaaattaagattgcctttgctcaaacactctctggataacagcgctaaccatttttgttttccctttgtttcaggccctttccatctgttcagttttttatcaacagaggaaaccwatttcaaagcagacagcgatactggatgaaatgcattttgcatttcgtgctttttcttcttcttacaagtcttccccaaacaacatgtttattcagctatagcccactgatagcaaaggacaggaacttttaagtttttttttaatgatgcttaaaaaaaaaaaattatatagaattcctgttgggactttatctttggcaaaactccatctcacagcaataagattcagtctcataacccctcctcaggcaaattcagaatccaaaacaaaaaggaaaacaaagccttatgtttaagtt

SEQ ID NO: 53291 - DNA, 555 bp, Chicken  19866894304551_1
agcctcctttcaggtaacagtagagggaagtgtagggaaaaccatgagcctcctcttttccagactaaacaattccagtcagggaactggggatgatcagctccctggtcctgttgagtgcactgtttctgatacaagccagaatgccattggccttcttggccacctgggcacactgctggttcatgttcagctgagtgttgaggccttcctaccctcagacagcagtttaatgtggttgatgttaagttatctgactgtcttggcttcagatgtgatgattttcttcctaatagatgwtatgttgctrtgttttagatttaggatgagaataaatttgataacactccagtatttattgttcttgagctgtatttaccataaccaaggactcttctggtttttatgctgatctgccagtgaggagaccgggcttcacaagaagttgggacaggacagaaacaggacaactgaccctaactggccaaacagatattctatagcctacaatatgatgctcttctgggggagatctgggtaggggactgactgctg

SEQ ID NO: 53292 - DNA, 545 bp, Chicken  19866894304551_2
caggtaacagtagagggaagtgtagggaaaaccatgagcctcctcttttccagactaaacaattccagtcagggaactggggatgatcagctccctggtcctgttgagtgcactgtttctgatacaagccagaatgccattggccttcttggccacctgggcacactgctggttcatgttcagctgagtgttgaggccttcctaccctcagacagcagtttaatgtggttgatgttaagttatctgactgtcttggcttcagatgtgatgattttcttcctaatagatgwtatgttgctrtgttttagatttaggatgagaataaatttgataacactccagtatttattgttcttgagctgtatttaccataaccaaggactcttctggtttttatgctgatctgccagtgaggagaccgggcttcacaagaagttgggacaggacagaaacaggacaactgaccctaactggccaaacagatattctatagcctacaatatgatgctcttctgggggagatctgggtaggggactgactgctg

SEQ ID NO: 53293 - DNA, 600 bp, Chicken  19866894304553_1
aggtaaaacatttctttcacagagagatcttcccaatcatgcaatcaactaaaatatttcaactttttgtgcgtaccaatagcaaaggaactagaatcttctttgtacctttatgttgcacagaacactgtccctgcctcacttcctatccgacagttcccagctgttctcagcagatcacaaagggcaaaatacatattaaaaggaaacactttaaaataattaatttaagagacagaacaagaagctttgacagacatcgctgaaatgctaagcctaatatcagaatcataaaccccwtacaggctttactgtgtgtccttgcattaaagagagagcagcactcacttatctccaaattagatcactggcttttcaggctttttctcaaaggtgagcttatccttagctgcttcctggggaactaggcctgctcgctttgatgtcaatgagatcaatgaaagtttggcactggcatttaaacagaacaggaaacaacatttagaccacttaattcaatacggctgctgctttttgtggcatggccctgacattatatgtttaattttattaattttgagatgtagaatttgtttccag

SEQ ID NO: 53294 - DNA, 600 bp, Chicken  19866894304553_2
atcacagctttgcaaaccttgcagcctgaatagagctaaagagttaggcaagaggtgattaaactaagttattttcagaactaacatctatttctttagatgccatcccccaagaggtgtgagaattaagtccgaagactcagtgccaaatgttaccctttctccaggaactcgttagcagcagcgagggcttgcatcaaatgcaggatagtattaaaagattttcccatatgaaaacctcaattaaatttgtgaccttactttacaggtttcactgctgcttgaaccccagtgctagargcttcactctgcaaacagcatcactagcctcatcccaggtagtgaactactgcggactgccatataaggctacaattgcaaacagctatctgtttcattaactgctccattcttgaccagaaatctctctccaccataagaaaaggttttttttwaaaaaaaataaacttgtttcagactaactcattcatccatcacttgcccccttttctcaccaccaagatgtcaacagatctgctgtcaatttggtgtccctccactctataaatccttagggaaagggtgaggagtgagtatact

SEQ ID NO: 53295 - DNA, 600 bp, Chicken  19866894304553_3
ccctttctccaggaactcgttagcagcagcgagggcttgcatcaaatgcaggatagtattaaaagattttcccatatgaaaacctcaattaaatttgtgaccttactttacaggtttcactgctgcttgaaccccagtgctagargcttcactctgcaaacagcatcactagcctcatcccaggtagtgaactactgcggactgccatataaggctacaattgcaaacagctatctgtttcattaactgctccattcttgaccagaaatctctctccaccataagaaaaggttttttttwaaaaaaaataaacttgtttcagactaactcattcatccatcacttgcccccttttctcaccaccaagatgtcaacagatctgctgtcaatttggtgtccctccactctataaatccttagggaaagggtgaggagtgagtatactcctgatgtgggtgacagccactgggattctgcggtgaatctatgcatatctgcctatggcttatgatcagagaagaaagtaaaggtgtaaaaaataagatcaaagggtttaaagaatgagaaaccaagtttagcaaaactgatgtgaaggactct

SEQ ID NO: 53296 - DNA, 599 bp, Chicken  19866894304558_1
  misc_feature (1)..(147): n is any nucleotide
nnnnnnnnnnnnnnnnnnnnnnnnnnnnnnnnnnnnnnnnnnnnnnnnnnnnnnnnnnnnnnnnnnnnnnnnnnnnnnnnnnnnnnnnnnnnnnnnnnnnnnnnnnnnnnnnnnnnnnnnnnnnnnnnnnnnnnnnnnnnnnnnnnngtgtcagcagtcgtcaaagataaatttttctggtcaacatgtctttgtcccaccagtttcagaacatttaacaacattcttggtaaccatttcaatcaatgtctttcctatttatcataatttctatctgagcaggctggaagaagggttttsttgttttttttttaaaggaaattctatgctatgggggcaatggaaaagttggcaactcaccagcttgaaaaggcttcagttttacaagtgcaaaactacagacactgaaaacataaggttgtgtatcatgtgagtttactgctgcaatctgtgtgctcatcatctaccatgagcgctacctgggcagaaatccacgtccttctgtaataacagctgcttaatgctatacagagtgcacaaattaattacggcatgtctccatgacttcccagcaccctgcaggagcatcctcccaagga

SEQ ID NO: 53297 - DNA, 599 bp, Chicken  19866894304558_2
  misc_feature (1)..(133): n is any nucleotide
nnnnnnnnnnnnnnnnnnnnnnnnnnnnnnnnnnnnnnnnnnnnnnnnnnnnnnnnnnnnnnnnnnnnnnnnnnnnnnnnnnnnnnnnnnnnnnnnnnnnnnnnnnnnnnnnnnnnnnnnnnnnnnnnnnnnngtgtcagcagtcgtcaaagataaatttttctggtcaacatgtctttgtcccaccagtttcagaacatttaacaacattcttggtaaccatttcaatcaatgtctttcctatttatcataatttctatctgagcaggctggaagaagggttttsttgttttttttttsaaggaaattctatgctatgggggcaatggaaaagttggcaactcaccagcttgaaaaggcttcagttttacaagtgcaaaactacagacactgaaaacataaggttgtgtatcatgtgagtttactgctgcaatctgtgtgctcatcatctaccatgagcgctacctgggcagaaatccacgtccttctgtaataacagctgcttaatgctatacagagtgcacaaattaattacggcatgtctccatgacttcccagcaccctgcaggagcatcctcccaaggaaggagcacggctct

SEQ ID NO: 53298 - DNA, 600 bp, Chicken  19866894304558_3
ggcaactcaccagcttgaaaaggcttcagttttacaagtgcaaaactacagacactgaaaacataaggttgtgtatcatgtgagtttactgctgcaatctgtgtgctcatcatctaccatgagcgctacctgggcagaaatccacgtccttctgtaataacagctgcttaatgctatacagagtgcacaaattaattacggcatgtctccatgacttcccagcaccctgcaggagcatcctcccaaggaaggagcacggctctttctcctttggcacacattaggccattcacacaatgrctatggcataataatacccatttatgagcagaacaaagcatgtaagaaagcagctgtgacacagaatcatagaattgctcagattggaaaagaccttcaagatcatcaagtccaacctcaacctagccatgctaccttaactctaaccttaacgattctatgattatccaaacaagactttgtttttttttctcttctctctttttttcttctcttctatgtcaggatcagactgctacacatacttacttcacctgtggaagtaattccatgggcttccgtctgactgctcccaggatg

SEQ ID NO: 53299 - DNA, 599 bp, Chicken  19866894304562_1
aatagtgatgaggcattgaaacaggctgcacagggatgtggtgcagtcactgtccatggaggtgttcaagaactgtgtggatgtggcagtgagggacgtggttaatgggcatggtggggatgggctgatgattggactaggtgatattagtgatcttctccaaccttaatgattctagggttctgttctattctgttctattcttagagctgattaaacacaagcggtatcttctcgtcatctctaccaatgagcccatccccacaagcaaggttttgcatttgtgattacagagtttgrgaagcctggcacaaatgtcaacatttccttctgtccgttcattcagactctgcagatgcaactttctgataaacatttattctaaacgaaagagaaaacagaaacaaatggcaaatcatacaagttaacagaggtgatactttaaagtcacatctaaattaatagagaattatattgcttctgaaacattcagagcaaaaataaacatttaatttaaacaacctataaaatacgagcgacttatagagaaaaactggggaggaggaaaaagagctttgcctccctcgtaacacttgaaa

SEQ ID NO: 53300 - DNA, 562 bp, Chicken  19866894304565_1
aggaaggctgcaaaccagctaaagatgaccacaagctgtataacacagagctgagtgccttgcaagacccattatctcaaacagcagatcaagataacagctcttgtgacagcagcaactgggtgcccccagtgtcacccactgccccaaccccttagcagccttttgcatcagacctgtttacctggcatacccgagtccacccagggtgtggaagctggtggggctgagggtcctgcaggagatggcccggagtaggggggaggagggatcacatatgtggagttcatggtggggagyggtgggtaaatacctgaaaaaaagatgacaccggactgatactttggactgtggtgacaagagagagggacagcaagctcccaggcccagccataggcaagagggaagatcagtgagggaagctcagcagggatgcaggcatctgyggttttacatcttgctaatgcctgccacgccagcaggcaacaatcctctgtcaagaagcagcacagtttacatactgcatttccacctcctacctcctgttcagttgcaactacag

SEQ ID NO: 53301 - DNA, 416 bp, Chicken  19866894304565_2
ccaaccccttagcagccttttgcatcagacctgtttacctggcatacccgagtccacccagggtgtggaagctggtggggctgagggtcctgcaggagatggcccggagtaggggggaggagggatcacatatgtggagttcatggtggggagyggtgggtaaatacctgaaaaaaagatgacaccggactgatactttggactgtggtgacaagagagagggacagcaagctcccaggcccagccataggcaagagggaagatcagtgagggaagctcagcagggatgcaggcatctgyggttttacatcttgctaatgcctgccacgccagcaggcaacaatcctctgtcaagaagcagcacagtttacatactgcatttccacctcctacctcctgttcagttgcaactacag

SEQ ID NO: 53302 - DNA, 599 bp, Chicken  19866894304568_1
  misc_feature (1)..(224): n is any nucleotide
nnnnnnnnnnnnnnnnnnnnnnnnnnnnnnnnnnnnnnnnnnnnnnnnnnnnnnnnnnnnnnnnnnnnnnnnnnnnnnnnnnnnnnnnnnnnnnnnnnnnnnnnnnnnnnnnnnnnnnnnnnnnnnnnnnnnnnnnnnnnnnnnnnnnnnnnnnnnnnnnnnnnnnnnnnnnnnnnnnnnnnnnnnnnnnnnnnnnnnnnnnnnnnnnnnnnnnnnnnnnnnnncatgctctcctcagctattatgtactgaaacaagctgatatgttagtgatcttgctgtactgatcttgattccctrtttagtatttcttatttctcttttttgctgtggtgcctgtgatgatcctgcagttctggaccccttgtcagacttgataaatagctttgctctcttttacagccaacaccagcagaaaacctattgatttttatttattctgatggtactgcagtactcttgtcatctcctatcagtatgctgggcatcctcttctccattatccaactattaaaacaaaacagaacacaaaaattaaggaaaagagtgcagcataatgtagcattgtcctaaataacctgtgaagtggagtttgtgtt

SEQ ID NO: 53303 - DNA, 578 bp, Chicken  19866894304568_2
atcctcttctccattatccaactattaaaacaaaacagaacacaaaaattaaggaaaagagtgcagcataatgtagcattgtcctaaataacctgtgaagtggagtttgtgttaaggcattttccttcaaatgaagggagacacagagcagaacttgtgataacataacagaacagtgccagaaaatcctctagtgtcactctaaggtgtgtagatctttcagatcccactaggacaggatctgacagcgcagccacagagggttccttgattttctcttactctactctaagagtaggycttttggaagggcctctggaaatcgctgttgctattaagcaaagcaagtgcactcaccttagctggggcaaatcactgacttaagagctggtgtgtgaaatatgcgtatccttgggccacaactcagatgactggttgagttgctctccttggtaagttgtgcccatgaatagcagggccccaccgtgaggtgtttacagaatcaaatatgggttggaagggacctctgggagatcatcgagtccaaccccctgctaagggcgtgttccctatgatag

SEQ ID NO: 53304 - DNA, 600 bp, Chicken  19866894304572_1
aactaatttattatagtgtgttattgtgcattctgataatataatacaatataattcaatataattggtaaaaaaatcaaatataattgagagaaggattgtccaagagctaaaggccttacactaatactgaaaccttgtgtgcagttgggagcagcagcgagatgatccgaaagcaagcacaacaagacgagaagacgacccaggtcaggtgacctacaggccttatatctgtttccctgagcaggaatgataacagtactcgaacagtcttctggggaacgtagttcttctcttccrgacaagtgcccagaactagagcatttgctctttaactcctagtacactgcatgatgttatgatgtggaataccgataaccaaaaatataaaaccatgacagtcttccagaactctcaaggttgaacagccccagctctcccagcctgtcctcataaggaaggtgttccactccttggatcatttttgaggccctcctctcgagtcactccaataggttcaagaataccctgtactgaggacactgcatctggacatagtactctaggtgaggtctcatcagcrtgaagtagagggagcag

SEQ ID NO: 53305 - DNA, 600 bp, Chicken  19866894304572_2
gtagttcttctcttccrgacaagtgcccagaactagagcatttgctctttaactcctagtacactgcatgatgttatgatgtggaataccgataaccaaaaatataaaaccatgacagtcttccagaactctcaaggttgaacagccccagctctcccagcctgtcctcataaggaaggtgttccactccttggatcatttttgaggccctcctctcgagtcactccaataggttcaagaataccctgtactgaggacactgcatctggacatagtactctaggtgaggtctcatcagcrtgaagtagagggagcaggatcacctcccacaacctactggccactccccttttgatgtagcccaggatatggctagtttcatgggctgtgaggtcacatagctggctcatgtccaacttgccacacctcaagcccttttcaaaacaactgtgctcaatcctttcatcccccagctcatactgatagtgggggttgctgcaacctaggtgtaagaccttgtatttgtatgtgttgaacatcacgaagttcttcagggcccactgctaaagtctgtctaggtgtctcaagatgctatccatc

SEQ ID NO: 53306 - DNA, 600 bp, Chicken  19866894304576_1
taagaagggcagagaagaaaaacagaatactaaaaagcatagatggaataagttttgttaatatctcaatggcttaggccgcctaggctttgtttttttccctctgtttataaaactgaacaaccacgtaatccaaagacgagttgttggggatttcattattaaaacccactcttctagtgatttactacaactatcaacccagcaccatatgcggtggtaacaggtagcatctggctgttgtgcaccgaacagcatctaaagaacagaaacacgaacacaaagccattacaatccccrttacaaaacaacttcagcttttaattttgaacaaaggtaagccgctgaaggagtacagatcccacagcacgtcctcgggctagagtgtgtgcccttgcgtgtccgaatatgcaaacaaagttgttctgtttggcagcaggtgaagtgcctacctcccctattagaccaggctacgtggtgcactggagtgtgctgtaaacactcctgagcagctgtcagccacggctacgatgggactgcgagcagctcagccagaacagcgcgggcctgcactgcactaatgagccttgaaagaggcac

SEQ ID NO: 53307 - DNA, 600 bp, Chicken  19866894304578_1
cagatattgtgggcttccagtagagatattcccagtgctttgagtgtgcctggaaggacagaacggacaggtcaagcacctcctgcagagacaggacttctggagcaccagagaccaagtgtgatggattgcaattgaaaatgggcaatctgcagctgtgaaaagcaagaagagagggacacagcaggggcacaacgcagtgcaaagcaattggcagtatctcctcaatgtaagatgtcagtgccacaaggctggtgtgtacatcgtctctgctggagggatgggaaggaaaagagggtsctcccagctctgctgtggcattaaraccccttcacctggatcacgggaccaaaagtgagggcctttcgtaatgagagcgcagcaatgtcaagtggattctggcagccaccagaagtcctccaagcagagctgctttcaaagggcagtgacctcygatagaaggaaggagtggaaggtctcagacaaacaaaataggagaccaagggaaaaagtttgcaccaggagcatgagttcacatactgccctatagttagagctaagcatggaaatgacctgcctctctttacatatgtattttgc

SEQ ID NO: 53308 - DNA, 600 bp, Chicken  19866894304578_2
atattcccagtgctttgagtgtgcctggaaggacagaacggacaggtcaagcacctcctgcagagacaggacttctggagcaccagagaccaagtgtgatggattgcaattgaaaatgggcaatctgcagctgtgaaaagcaagaagagagggacacagcaggggcacaacgcagtgcaaagcaattggcagtatctcctcaatgtaagatgtcagtgccacaaggctggtgtgtacatcgtctctgctggagggatgggaaggaaaagagggtsctcccagctctgctgtggcattaaraccccttcacctggatcacgggaccaaaagtgagggcctttcgtaatgagagcgcagcaatgtcaagtggattctggcagccaccagaagtcctccaagcagagctgctttcaaagggcagtgacctcygatagaaggaaggagtggaaggtctcagacaaacaaaataggagaccaagggaaaaagtttgcaccaggagcatgagttcacatactgccctatagttagagctaagcatggaaatgacctgcctctctttacatatgtattttgcatgagatagaacaactgtgtatgat

SEQ ID NO: 53309 - DNA, 600 bp, Chicken  19866894304578_3
gctgtgaaaagcaagaagagagggacacagcaggggcacaacgcagtgcaaagcaattggcagtatctcctcaatgtaagatgtcagtgccacaaggctggtgtgtacatcgtctctgctggagggatgggaaggaaaagagggtsctcccagctctgctgtggcattaaraccccttcacctggatcacgggaccaaaagtgagggcctttcgtaatgagagcgcagcaatgtcaagtggattctggcagccaccagaagtcctccaagcagagctgctttcaaagggcagtgacctcygatagaaggaaggagtggaaggtctcagacaaacaaaataggagaccaagggaaaaagtttgcaccaggagcatgagttcacatactgccctatagttagagctaagcatggaaatgacctgcctctctttacatatgtattttgcatgagatagaacaactgtgtatgatacctgcacaaatacgattgctcatttggacactcaatttccacacaaagaggaagcgtgcacagaaaacagtaccaactcaagcccgttgactgaagtaaacatgaaatttggaatatatgttttccag

SEQ ID NO: 53310 - DNA, 599 bp, Chicken  19866894304580_1
  misc_feature (1)..(177): n is any nucleotide
nnnnnnnnnnnnnnnnnnnnnnnnnnnnnnnnnnnnnnnnnnnnnnnnnnnnnnnnnnnnnnnnnnnnnnnnnnnnnnnnnnnnnnnnnnnnnnnnnnnnnnnnnnnnnnnnnnnnnnnnnnnnnnnnnnnnnnnnnnnnnnnnnnnnnnnnnnnnnnnnnnnnnnnnnnnnnnnnntctgccttttttcctcctcccccagtcaccaaatgtgtgggagatagctgggtggaagaagaaaagtgggataagaaacgttatgaatgcaataaataagcaaattgtcactttgatcaaagraaatacccatccatatgtttttgacaaaagcaggaagaagcctaagcttctcaaaaaaggagcagacactgtgttgagcactatcaaatgacagagtgctgkaccttgttcaagcaccaagcttactgtgctctgaatgagtggcagggggtgctggtgtccatcctgggttttcctgagcaaacagaaggtattcatcaattcctttctcaccaagagaactttcatacgtttctctttcacttccttcttgtagtaattttttctctcrctaggatgtccctgttttttagtgttgc

SEQ ID NO: 53311 - DNA, 599 bp, Chicken  19866894304580_2
  misc_feature (1)..(75): n is any nucleotide
nnnnnnnnnnnnnnnnnnnnnnnnnnnnnnnnnnnnnnnnnnnnnnnnnnnnnnnnnnnnnnnnnnnnnnnnnnntctgccttttttcctcctcccccagtcaccaaatgtgtgggagatagctgggtggaagaagaaaagtgggataagaaacgttatgaatgcaataaataagcaaattgtcactttgatcaaagraaatacccatccatatgtttttgacaaaagcaggaagaagcctaagcttctcaaaaaaggagcagacactgtgttgagcactatcaaatgacagagtgctgkaccttgttcaagcaccaagcttactgtgctctgaatgagtggcagggggtgctggtgtccatcctgggttttcctgagcaaacagaaggtattcatcaattcctttctcaccaagagaactttcatacgtttctctttcacttccttcttgtagtaattttttctctcrctaggatgtccctgttttttagtgttgctgaagttgtggtcttggagttgttgagctagttgttggttcatatgacaaaaagggaagctgttttgcttgccagctgtgctctcttcagtgctgatggtgc

SEQ ID NO: 53312 - DNA, 600 bp, Chicken  19866894304580_3
aataagcaaattgtcactttgatcaaagraaatacccatccatatgtttttgacaaaagcaggaagaagcctaagcttctcaaaaaaggagcagacactgtgttgagcactatcaaatgacagagtgctgkaccttgttcaagcaccaagcttactgtgctctgaatgagtggcagggggtgctggtgtccatcctgggttttcctgagcaaacagaaggtattcatcaattcctttctcaccaagagaactttcatacgtttctctttcacttccttcttgtagtaattttttctctcrctaggatgtccctgttttttagtgttgctgaagttgtggtcttggagttgttgagctagttgttggttcatatgacaaaaagggaagctgttttgcttgccagctgtgctctcttcagtgctgatggtgccaatataacagcactactgttaagtaagtgttatrcctggctgaaactggagaaaagcaaaccagagaagcataacagttttcttgttgcatgtgtttatgagcaactgtttggctaaagatggtactacaaaagccttcattgaagtcttcctttagtaatagtctaag

SEQ ID NO: 53313 - DNA, 600 bp, Chicken  19866894304580_4
atgagtggcagggggtgctggtgtccatcctgggttttcctgagcaaacagaaggtattcatcaattcctttctcaccaagagaactttcatacgtttctctttcacttccttcttgtagtaattttttctctcrctaggatgtccctgttttttagtgttgctgaagttgtggtcttggagttgttgagctagttgttggttcatatgacaaaaagggaagctgttttgcttgccagctgtgctctcttcagtgctgatggtgccaatataacagcactactgttaagtaagtgttatrcctggctgaaactggagaaaagcaaaccagagaagcataacagttttcttgttgcatgtgtttatgagcaactgtttggctaaagatggtactacaaaagccttcattgaagtcttcctttagtaatagtctaagaacctagagagggggcctaagagccaaactggactgaaaaagaagtcttaaacatgtaatttaagcgatgcaatgaagaaaggcacttcttgttctaaataaagaaatctaatgtaatgactctttctctagtagaaggtcatgactaattagtgataaaaagga

SEQ ID NO: 53314 - DNA, 599 bp, Chicken  19866894304587_1
  misc_feature (1)..(145): n is any nucleotide
nnnnnnnnnnnnnnnnnnnnnnnnnnnnnnnnnnnnnnnnnnnnnnnnnnnnnnnnnnnnnnnnnnnnnnnnnnnnnnnnnnnnnnnnnnnnnnnnnnnnnnnnnnnnnnnnnnnnnnnnnnnnnnnnnnnnnnnnnnnnnnnnnactttatagatagtttatgtgctactactcattaaatgctacttttttctttttaagatattttcaggaaattttattgatatactggagccagaagttttctgaaatccagcttctccaatgaacgtctaatgtgatatttcaatattttgttmtttagacttaaaatgatgaataaaagtgttgtcttctctgtcatgagggagaaacagacaccagagaattcactttgacctttcaaactaagtgcttactttctgaaagactactaaaggtaaataaaaaaaaaataataataatacttctttctctgcctcttgagacattaatctttcccaggtccttcataagtcagctacatacataattcagctaaattatactacatctgtaattttcagtaagtttttcttccataatgtggaaggcattcattcttctggaagattttatt

SEQ ID NO: 53315 - DNA, 600 bp, Chicken  19866894304587_2
cagagaattcactttgacctttcaaactaagtgcttactttctgaaagactactaaaggtaaataaaaaaaaaataataataatacttctttctctgcctcttgagacattaatctttcccaggtccttcataagtcagctacatacataattcagctaaattatactacatctgtaattttcagtaagtttttcttccataatgtggaaggcattcattcttctggaagattttattttctgttcattttgtactcatactgagtgtaaagaacttccaatttaaacattttctctttratttttgatacctcttcatgaacacttcattaacttttactgcatttaagactcattgactggcattggtgctttgcggactccaaatagtctgctcaaatgctgtataaggagatcaggataacattcaagagtaaggtacctgatttcagttgtctatgcataggcaacctgcagttctgccatgcattcaaaatttccctataaatggagacctgataaatcaaatcagtgcatttaggcaataactcatttcctgctgaagatgtcatagtaaagaccactgtctgtattaactag

SEQ ID NO: 53316 - DNA, 599 bp, Chicken  19866894304596_1
  misc_feature (1)..(48): n is any nucleotide
nnnnnnnnnnnnnnnnnnnnnnnnnnnnnnnnnnnnnnnnnnnnnnnntaatactataaatgtctttgaaacatgttggcatttatttttagatagcaaagaggtttgatttgattccaaaaggaactgtaatcctgaagtatctcctattataatattttaaatgactaaatgtgcacagagataaacacagcatttttgaaggctcagctgactgcaaatcagtttggaaacatgcactgtaaatcactttgtgctgtgcttctatctgggtgtcagcttagtatctctactttattrtaagatgctgggctttattggccccacagccaaatagtaattcaaactggagggtgggttacaaagtctgctgtcagagtgtgggctcttgtcagttctgtgacccctttgctagaccagatatgtttgttaggctatatatgtcccaaacaccctgttgaatgttgtccccagcttccccagccctcctggtcctgctcttgcatgggcaggaattagatgggaagaaaagggagcaggaatgaatgaagtatgaaggttttcaactacctttcacttctcagatggttttggaatac

SEQ ID NO: 53317 - DNA, 600 bp, Chicken  19866894304596_2
ccccagcttccccagccctcctggtcctgctcttgcatgggcaggaattagatgggaagaaaagggagcaggaatgaatgaagtatgaaggttttcaactacctttcacttctcagatggttttggaatacagatggttttggatggacctacgctggagcagggtgtctacttttcttatcttcctgccctgtcttctcttccagtctgatataaagatctggtattggaatgatgttatttgttgaattttcccaataggactaggactcaaaactttggagttcattgctacacaaygctgaagtctgctgaacaatttgaacgtggagtgttatggtgtcagatggttataaatggtcttgggtgctgtgtcaaaccattgacagtctcctttcaccatagcgagcactgggaactatttcttactaatgctatagataaagaaaggaaaacagttcaaaaatccacatgcaagttcctaaaaagggcttccctgtcttttagctttaaagtatgtctgggaaaactcttggcttgagagtaatttataaagcttttgaaaggacaattctaagagaaaaggaaaaaagagaaacc

SEQ ID NO: 53318 - DNA, 599 bp, Chicken  19866894304597_1
  misc_feature (1)..(168): n is any nucleotide
nnnnnnnnnnnnnnnnnnnnnnnnnnnnnnnnnnnnnnnnnnnnnnnnnnnnnnnnnnnnnnnnnnnnnnnnnnnnnnnnnnnnnnnnnnnnnnnnnnnnnnnnnnnnnnnnnnnnnnnnnnnnnnnnnnnnnnnnnnnnnnnnnnnnnnnnnnnnnnnnnnnnnnnnatggttctatctggctccaatttccccactgcagggcacagctgagcccagcagccagggtggtgatctatgggaaaacatgtttaagaaaggataaaaatgccacatgggccaaggtctgagggaaaaaaragcacagaccatccctgtgaatacagaaaaaggagaagaagaggtgctctaggcactggggtgaatatccacgctacagccatggagagctctacattggagctgttcatgaaggactgtatgctgtagagggggctttcactggagaaggggaaagcagaggaggaaagagcgcaaagagtgattgtggggactgatcacaagacccattcccctcccccttcactgcttggtggaggggggtgtttgaggaatcaggaaagacggagtgaaattgagcctggaaagatggagtgggg

SEQ ID NO: 53319 - DNA, 600 bp, Chicken  19866894304600_1
gggtgtagattgagcttctgaaaaagttgtttcagagtgagtttttcgcctttggcgtcgtaaactacacggtcagcatccacacgatacgacttcttgatgaaacgcagaaggtgcttctggttcatgcaggctgcagcatggatgtgtgtatccacctgagaaggcaaagcaacagctctccagcttcaggatgggggtactcaggtaacaccatgtatcccttagttgaacccaagtggtgtaaggaacttggtgtcccattagcaggtgtcccagaccttgacccctacatccacrtgtctcagggagcagcagttaccaagagagctcagctgcagggttactgggtctatgagccttgccatttaccttacggcaattgtagaagtcccgatgaggggttgttcttcagctcttttatctcctccatctcatttagcatttcatgcacttggaacttgtatgagaggaactttaggcgtcgatgactataggtcttactggaaaaagaaaggggcagaagagtgtctgggcatagagagtcaaatgcgccggggggttgagctttcaccccaagtggaggagctcacgctgcct

SEQ ID NO: 53320 - DNA, 600 bp, Chicken  19866894304606_1
tcaaagaaagcactttttaataagtttatttcttttcaggctgccccatgccctctggtggataacctgttacacttgtcccaattctggctacctgcaggctagatagctgttgtgaaaatcctgaagcactgaatgagagaatgaacaattgtataattaatgctgtgggctgaaacttttgtaaaagtggagtgttcttctgcaacagatgaataattaaatactgcccttgtaatgcttttcagtttttctgtactgtgctctgactgtaatctaagtctcccagtagttttaaartgctgcaatttgtgtacaccgaaacttcatcttcctcaaataatatggctacgtagttagcatggaaacttcctgttcttttcctttctgttttgtgtgtgtgtgttgtttgtttgtttgttttgttgttgtttctttgtatctcgaggaggaccaaatctgagggaatcagattgagttgggaagttactcttcagcttgtacttgaaaatgtgactgccccaaagaacagtgtggtgtctgaggtagcaaactggctcaatttagtaagatttttcatgtttttttttttcattctct

SEQ ID NO: 53321 - DNA, 600 bp, Chicken  19866894304613_1
gatgcagcttatatagctgcaatgatcccccacctggaaaaatttatttacaagcaagtctttttttccccctctcagtattaccagtgtgagtcactgaacacgggcatgcagcaacagcctcctctggcacatgaggctaaggaggaaaactgtgaacagcaaatactgaatagttccctccaattaaaagacaggaccttgggagtgggttcagaaaataacgcatctaataacactccttaaatgtgggttggatttggggaaggaattgtgtgtgtcttcactgtgagagaatastgaggtcttttaaagattatcttggatctcagttgcatgctttggtttctgcaaagcctcagctatcagtcagctagcagcactttcctatacatgattaaaccatactgacagtctttaatttcacctcccaaatttctacagctcattattttcttggcactgagctccgagataccaaatgaagatctggatgaggtttttaattttaaccctgaacataaattagacttacagctcctggttattataaatagcaactttaaaccacrtgtggcaccaaccagaaaaaaaaaacac

SEQ ID NO: 53322 - DNA, 573 bp, Chicken  19866894304613_2
tgtgtgtgtcttcactgtgagagaatastgaggtcttttaaagattatcttggatctcagttgcatgctttggtttctgcaaagcctcagctatcagtcagctagcagcactttcctatacatgattaaaccatactgacagtctttaatttcacctcccaaatttctacagctcattattttcttggcactgagctccgagataccaaatgaagatctggatgaggtttttaattttaaccctgaacataaattagacttacagctcctggttattataaatagcaactttaaaccacrtgtggcaccaaccagaaaaaaaaaacacgctttcacctaatgattcaggacagcacagtattaagatgtgaatttaaaagcttactgtggcaagataaagaagttcagacaaaaaaaaaatgttatctgtggaggcagaaccatgcaaaacactgtccctgataaaagtttcctacactgattttaacagctggcagaaaaggcagcctaaaatcaaagaaacatgagacagcccagttgtttatgagccagtagatataagggaacttccag

SEQ ID NO: 53323 - DNA, 556 bp, Chicken  19866894304619_1
ccccaccagtgactggcctttggcctgcaatctgcataaaagcagaggttggcatttctcaagtgcattgtcatttatagtattcatctcctccttctcgcttattttatgtgatctggagacaatcacatttacacatttgctccattcatgcaaagtttcccagttacattccaccaaacagcttactgatttgtctttgagatgaagaacaaaagaatgagaggcaatgaacaagaagttgctgactacatataaggaaagaatggcagctgccaaacagtggaatgaggtctgtaraagttatggaatctttatccttgtgggtgttcaacatttgcctgggcaaggtccagaaggtggctcttctttcatcacagccaggactgcgtgatccagaagccccttcatatctgtgtcattttatgatcctcaaggtcttctaaggaactgttttctgtaaatggtaaatgggtaagtagcaaatgaactctaccatgttagcgacctgtagagatggaattttaagagacccagctatggagctatatgactg

SEQ ID NO: 53324 - DNA, 600 bp, Chicken  19866894304624_1
cagcattatgtactgcacatgcctgaacttgggataggaaactcaccctttgcagacaagtaatctgaaaaccatttttacaacttgtcttagccatcccgttcctaaaggaaatctcaagtaagaattccatagtctgacgcctctataaccagtcaatgcagaacaaagctttcagatctgatagaaaacgaaggccagcaaatactgactcattccccccaccttgccatgcaaaccaggaactgcagcacacaggcttttaaagctaatcctgcagaggaactttggaccctgaargctacataggcctcccactgaatcagaagtgccttcagaagcaacaaagtttcactgttgggctgttaaattccatctttsaaggcaaagaaaagctgatctgttgcaggtaacatactgtttggttgcttgtggtgttggaaacctcccagtgtacacacatccagcaagccgaaaacagtcaagctgcatttttaaataaaaagactgtattcagacataaaatcagcacatctaaaaatactatggcctactcagcagaaaaaaaaaaacagtcttccgacacatggaaaaaagttt

SEQ ID NO: 53325 - DNA, 600 bp, Chicken  19866894304624_2
aacttgtcttagccatcccgttcctaaaggaaatctcaagtaagaattccatagtctgacgcctctataaccagtcaatgcagaacaaagctttcagatctgatagaaaacgaaggccagcaaatactgactcattccccccaccttgccatgcaaaccaggaactgcagcacacaggcttttaaagctaatcctgcagaggaactttggaccctgaargctacataggcctcccactgaatcagaagtgccttcagaagcaacaaagtttcactgttgggctgttaaattccatctttsaaggcaaagaaaagctgatctgttgcaggtaacatactgtttggttgcttgtggtgttggaaacctcccagtgtacacacatccagcaagccgaaaacagtcaagctgcatttttaaataaaaagactgtattcagacataaaatcagcacatctaaaaatactatggcctactcagcagaaaaaaaaaaacagtcttccgacacatggaaaaaagtttcccatttttagacttccaaataaggagaaaaaacacaaagaagaaaaccgcatggattctggtgtctgaataataaagcat

SEQ ID NO: 53326 - DNA, 600 bp, Chicken  19866894304625_1
cttcacttgggtcagtggacagggatggagggaaacctcaggctggtgacaacctcttaacataggaagaatctacttacaaatgtccccatacagacgtttacacagacggaggagtgcagtgccttgctgggatattgcttgggctgcagtcagcaggagacttcaggaaaaaccatcaacaaacaaagcctcttcgcttcccaaaaatcctttagtaatgaatcctggagccagatatgatttaaaatcacactgaggcttgctggtggatgccaggaataacatccactggtcttraggtctgcttgtgactcaccctatggctagcatcaccccaggacaactttggtccttggggttaaggtgatttgatgcccaggaaaataaccaaggggaatttggtgatgatttttgctccctctgcaatgagggatgagtgctttgcaaatatttccctggggctagtgggcagctctgctttctctgcaggacagctttctgctactgccctgcaaccaagatgtgaaaatccagcctgaagtgagcaaatagccctgcctgctctctggacctggataagggacactcacggagggc

SEQ ID NO: 53327 - DNA, 599 bp, Chicken  19866894304628_1
  misc_feature (1)..(26): n is any nucleotide
nnnnnnnnnnnnnnnnnnnnnnnnnnccttccacctttgccagctaacagctgataatccttctagccacttgttttttgtttttttggtttttttttttttgtcatttatatttgagaatatcacacataaaagcctacaacgttctgttgataattttgaagaaaaatccccctttccttggaattcagtcagtagtatgagttcttttggcacttcatctgaaagctgagatacaggtaatatttttagctttcaggccaagtcaaagtgttttactcattcttagtggttgtttgygctcttcaccatgaagtatgggtgattcatgggcttagtccactcaggctcattcacagaagtgctgtagagaagtttcttggcaaaatgaatttctccttcctcartagtccaatttgactgatgtaatttgactggtgtaactgctgagctttctgtgaagcaaaatgcaactgcagatcatgcattcaagttattgagaggattcctaactcaggtatgttctcttttgaggagtatttaatcaagttattattcaggtaaatactacatgtacaaaagtgacttttgacttatca

SEQ ID NO: 53328 - DNA, 600 bp, Chicken  19866894304628_2
ttatatttgagaatatcacacataaaagcctacaacgttctgttgataattttgaagaaaaatccccctttccttggaattcagtcagtagtatgagttcttttggcacttcatctgaaagctgagatacaggtaatatttttagctttcaggccaagtcaaagtgttttactcattcttagtggttgtttgygctcttcaccatgaagtatgggtgattcatgggcttagtccactcaggctcattcacagaagtgctgtagagaagtttcttggcaaaatgaatttctccttcctcartagtccaatttgactgatgtaatttgactggtgtaactgctgagctttctgtgaagcaaaatgcaactgcagatcatgcattcaagttattgagaggattcctaactcaggtatgttctcttttgaggagtatttaatcaagttattattcaggtaaatactacatgtacaaaagtgacttttgacttatcagcgggaaatgttgtgaaggtggatttttcagctcattttcagagctgcactgctaggtttgttgtagttcaattaagcaagtcatccgcattgctacagcagtgttcc

SEQ ID NO: 53329 - DNA, 600 bp, Chicken  19866894304628_3
gtatttaatcaagttattattcaggtaaatactacatgtacaaaagtgacttttgacttatcagcgggaaatgttgtgaaggtggatttttcagctcattttcagagctgcactgctaggtttgttgtagttcaattaagcaagtcatccgcattgctacagcagtgttcctattctctttacatttttgccccattctgtcttgataagacattaaaagtcagcgttgaaattttatcaacagttctgctttgactgtgcatggggcattttcaccaacccaagcagtaatttccaacktgcagtctacaagttacatgcctcaacatttgatgagaaaatgaagcactgacattatttctgtaactttgaaacgtgtgttttgttgtacacaacagctgatgccaccgcagtctatgacattctagtccatatccaaagcacctgataggttagctgcagtcagcagcctgccctcccatggtatttcctttcatcttttatgaaggtaactcaaggatatctccttaagcaatttttatagcaaataaaactgttgactacagactaatcagatactatagactatttatgtaacat

SEQ ID NO: 53330 - DNA, 600 bp, Chicken  19866894304633_1
gaagcaggacttttaccattatcatgatgaatccttctctaggaaatacaaaccactatacctaaaagaggggagatttagagtggatataaggaaaagagaattgcagtaagggtggtgaagcactggaacaggttgcccagagagatggtggattctctgtccttggagacatccaaaggtcaggctggatggggctctgagcaccagatggagctgtaggtgtcccggttcactgcaggggaattggacgagatgacctcttgagattgctttcaacatctgaattctgtgattctrtttttttaacttaaagggtattaaaaatacaagataccaaggcacgacctgtttgttcctttgaaaatgttgccctcaaactcttaccactggattatttatttattttttttctttttacatcttgacctcactgcattccagggactcttagcaatggattaagggcatatttagctgtgaccaaaccattacagctgaactcttgagttgtctgcagtctcctgactggtgtgaattgatgcttgccaatgcaaacgtcttcctgcgtaacttctatttactttgatgtttattgct

SEQ ID NO: 53331 - DNA, 600 bp, Chicken  19866894304637_1
atgccctaggcttcatagctttttttttctctttcaaactgcagttaaactgtcattagtagttacgtagtgcaatgttaattagtacaatggttctatttaacaggggttccagtgtccccgaaaatgatcgactggcttcaatagcagccgagttgcagttcagatcccttagtcgtcactccagtcccactgaggagcgagaaggtgattgtcacaatattaggttgtgacctgaatatgctgatgatttatgtcattaacatatttttatctgttcccagttcttaaccctctcawttttttttttcacctttcccattcagaygtagacttttaacttccagggttacactttaagttcttctgttctcagatgtaactgttctctcgctttccatattgttkttgaattacacccaaaggaatttcctggtgtcttactaagttgcattatgctagatgaactgagtaccacagttgctgaattataccctatcagatagtatatttctaagtactgttaacgaagtgtaaactggacccactggggcaatgaagagtttccagtcaaattctttaactgccactgcagcattc

SEQ ID NO: 53332 - DNA, 600 bp, Chicken  19866894304637_2
ctctttcaaactgcagttaaactgtcattagtagttacgtagtgcaatgttaattagtacaatggttctatttaacaggggttccagtgtccccgaaaatgatcgactggcttcaatagcagccgagttgcagttcagatcccttagtcgtcactccagtcccactgaggagcgagaaggtgattgtcacaatattaggttgtgacctgaatatgctgatgatttatgtcattaacatatttttatctgttcccagttcttaaccctctcawttttttttttcacctttcccattcagaygtagacttttaacttccagggttacactttaagttcttctgttctcagatgtaactgttctctcgctttccatattgttkttgaattacacccaaaggaatttcctggtgtcttactaagttgcattatgctagatgaactgagtaccacagttgctgaattataccctatcagatagtatatttctaagtactgttaacgaagtgtaaactggacccactggggcaatgaagagtttccagtcaaattctttaactgccactgcagcattcattctacagatagttgctgttacttgaa

SEQ ID NO: 53333 - DNA, 600 bp, Chicken  19866894304637_3
gttccagtgtccccgaaaatgatcgactggcttcaatagcagccgagttgcagttcagatcccttagtcgtcactccagtcccactgaggagcgagaaggtgattgtcacaatattaggttgtgacctgaatatgctgatgatttatgtcattaacatatttttatctgttcccagttcttaaccctctcawttttttttttcacctttcccattcagaygtagacttttaacttccagggttacactttaagttcttctgttctcagatgtaactgttctctcgctttccatattgttkttgaattacacccaaaggaatttcctggtgtcttactaagttgcattatgctagatgaactgagtaccacagttgctgaattataccctatcagatagtatatttctaagtactgttaacgaagtgtaaactggacccactggggcaatgaagagtttccagtcaaattctttaactgccactgcagcattcattctacagatagttgctgttacttgaatccagaacagtgtgggtgactttatctcaatcaaggctcctccaggtgtaaccggcccctgtatgtgtggtattttttgg

SEQ ID NO: 53334 - DNA, 600 bp, Chicken  19866894304638_1
cttcccctgcctgcccaggggtgcctgagctcggcatgggtgctgttcctcctggcactcactgggtcttacttcaacccccgtgcgtcgtgttaggtagctcatagggagtattttgccctggctgtgcctccggggctgtgtgtgaggttgctgggagccacggtggtcagagccctttccttgctggtcctcagggccaccacatagcttgcaagggcgagggagctgcactgtgtcatgggcactggggtttcacgtttcacagcccgtgctggggtggcgtgggtaggagctggsccctctcccctccttccctgctgcactttaattgtggtggagggagaagggagacaagtcctgggatgctgatggacctctgcaggggattgctctggaccccactgcagatgcagggctgggctcagggtgggggcccctcctgctacccctctctctgttgtataaagctaatttctttggcactgtcctgacaaaagcttccagagcttgtaaccgatgcctccctctcctttttacaagttttggtttgtgttttttgttggtttttgtttttgttttcttaaataaattagttct

SEQ ID NO: 53335 - DNA, 600 bp, Chicken  19866894304648_1
ttccggtgtatgttaccaacaaacatcactggtctaaggttcacgtataatggaagttcttaagaatacccaatttttaggaacactgcatgttttttttcttatctgagctgcatgtttgtccaagggaagatgaaaagtgacatcctagacaaaccagattgtagaggaatgttcctgagcttgcagctggatcactggttcacattttatcttcactacctatcttttatagctctcagcactttttgaggctctgcttaaagagcaaacccatatatattagttttaagtacgtgytgagtccgtgtttaagctgtcagatggtgccaggaagagaagtatgtagatgttaactgctctgcagtctttcacctcttcaaataatagacccaaaagagaccgtgtctgctttgacactagagggagtcatcgcctaaaagaaatcatcaagactcctgaaatagcacaatttacaacgatttatgtgtcttggaagggaacgaaacactgatttctttttaaagtctctgtttwtattggaatacattatgggaggcctcatttgttgcccaaaatgctcttggccagggtgaaatt

SEQ ID NO: 53336 - DNA, 600 bp, Chicken  19866894304648_2
ctcagcactttttgaggctctgcttaaagagcaaacccatatatattagttttaagtacgtgytgagtccgtgtttaagctgtcagatggtgccaggaagagaagtatgtagatgttaactgctctgcagtctttcacctcttcaaataatagacccaaaagagaccgtgtctgctttgacactagagggagtcatcgcctaaaagaaatcatcaagactcctgaaatagcacaatttacaacgatttatgtgtcttggaagggaacgaaacactgatttctttttaaagtctctgtttwtattggaatacattatgggaggcctcatttgttgcccaaaatgctcttggccagggtgaaattcaaccttcatgatgaggcaggcagattcggcttgcactgcactgctttgtcttagctgggctctcctgggagggctgcatgcagagggcctggaggtagctgggcctctataaatagctccttgctgaattcctgtgtgagygcatttgaaggctgtgccgaaggatagagagttgtgttgtttcaattcacttgacactgacacactcactcaggtttccctgtccagctttggtt

SEQ ID NO: 53337 - DNA, 515 bp, Chicken  19866894304648_3
gaaatcatcaagactcctgaaatagcacaatttacaacgatttatgtgtcttggaagggaacgaaacactgatttctttttaaagtctctgtttwtattggaatacattatgggaggcctcatttgttgcccaaaatgctcttggccagggtgaaattcaaccttcatgatgaggcaggcagattcggcttgcactgcactgctttgtcttagctgggctctcctgggagggctgcatgcagagggcctggaggtagctgggcctctataaatagctccttgctgaattcctgtgtgagygcatttgaaggctgtgccgaaggatagagagttgtgttgtttcaattcacttgacactgacacactcactcaggtttccctgtccagctttggtttgtactcaagggagagaccatggggatgaaatgccactgcctcactctgtatatatttctgcataattgcaagcctataagcaaaataacagcgactgacttaatggaggtgggtgggtg

SEQ ID NO: 53338 - DNA, 600 bp, Chicken  19866894304649_1
taggtggcttcgtggggctcacacaggggtgcaacagcccctctgggggcactgggggtgtcagccacatcccctgcatcacacacaggcgctgcgcgctgagctcaggcaaaaacgatgtcaaagaggcaaaacaaagcatattgtgtttggtctatcttgcaaaaaaattatgcattgaacaagaatactgtggaagcagagtgagagtggtgtacacggcaaagtgtcttgttgcttctctgagacaaaggcagacaaaattaatcagcaatgatttgttgtgccagaaaatgcacrctcctgactatctgtggcagattattgccaaggaaatagttcctcaatatcccaggcacattcctgacctgtatattatgaagttatttctgctttatgatttgtaacctgtaaaatgcctgtgatcttaataaatgagagcttgttgcctcctgaaatccactgtatttcatcttttgctttcctcctttggcagtgttgttatttagactgagttaacattagtattctctctgagcatatacacttccatgaatccgatatcatcgccgcgagctagcacccttaggacgctatgac

SEQ ID NO: 53339 - DNA, 599 bp, Chicken  19866894304654_1
  misc_feature (1)..(65): n is any nucleotide
nnnnnnnnnnnnnnnnnnnnnnnnnnnnnnnnnnnnnnnnnnnnnnnnnnnnnnnnnnnnnnnnnccagaaaaagaagaggcaagttgcagatacagctggaggcccaggaggacaggacaacattagaagagctggtagtgatgttggtctcagttgtgtggaaccttagactgcttccatgacatgcagtaagctcatttattagctcactcctgtgagaaagtcccagccttactcatttgaatggaaatacagttcttgcatgtgaactgctgcaggtttttatgggcagaaatcrttgtaggttgcacacgcagcaaaattactcaattgtatccacttttactaatgmctctaacctggccagctacccatcycyragagaaggttgttctcctaaccrtatctgccagttccctcatagattttatagcagctgcataatccgtctttaagagttgcataagtatattttctttggttgtgtcctggcactcaccgtgacacttggaaaaataatatagatcttacattatttctagccacctgtcagtaaaattcatgccaagacccatgaactaatagcactgcttgtgt

SEQ ID NO: 53340 - DNA, 599 bp, Chicken  19866894304654_2
  misc_feature (1)..(11): n is any nucleotide
nnnnnnnnnnnccagaaaaagaagaggcaagttgcagatacagctggaggcccaggaggacaggacaacattagaagagctggtagtgatgttggtctcagttgtgtggaaccttagactgcttccatgacatgcagtaagctcatttattagctcactcctgtgagaaagtcccagccttactcatttgaatggaaatacagttcttgcatgtgaactgctgcaggtttttatgggcagaaatcrttgtaggttgcacacgcagcaaaattactcaattgtatccacttttactaatgmctctaacctggccagctacccatcycyragagaaggttgttctcctaaccrtatctgccagttccctcatagattttatagcagctgcataatccgtctttaagagttgcataagtatattttctttggttgtgtcctggcactcaccgtgacacttggaaaaataatatagatcttacattatttctagccacctgtcagtaaaattcatgccaagacccatgaactaatagcactgcttgtgtcctctttagatagatgtgtcatctgacctgggtggacgtgcctcgactagattg

SEQ ID NO: 53341 - DNA, 600 bp, Chicken  19866894304654_3
ggcaagttgcagatacagctggaggcccaggaggacaggacaacattagaagagctggtagtgatgttggtctcagttgtgtggaaccttagactgcttccatgacatgcagtaagctcatttattagctcactcctgtgagaaagtcccagccttactcatttgaatggaaatacagttcttgcatgtgaactgctgcaggtttttatgggcagaaatcrttgtaggttgcacacgcagcaaaattactcaattgtatccacttttactaatgmctctaacctggccagctacccatcycyragagaaggttgttctcctaaccrtatctgccagttccctcatagattttatagcagctgcataatccgtctttaagagttgcataagtatattttctttggttgtgtcctggcactcaccgtgacacttggaaaaataatatagatcttacattatttctagccacctgtcagtaaaattcatgccaagacccatgaactaatagcactgcttgtgtcctctttagatagatgtgtcatctgacctgggtggacgtgcctcgactagattgcttgactccagataacctcttcttca

SEQ ID NO: 53342 - DNA, 600 bp, Chicken  19866894304654_4
caagttgcagatacagctggaggcccaggaggacaggacaacattagaagagctggtagtgatgttggtctcagttgtgtggaaccttagactgcttccatgacatgcagtaagctcatttattagctcactcctgtgagaaagtcccagccttactcatttgaatggaaatacagttcttgcatgtgaactgctgcaggtttttatgggcagaaatcrttgtaggttgcacacgcagcaaaattactcaattgtatccacttttactaatgmctctaacctggccagctacccatcycyragagaaggttgttctcctaaccrtatctgccagttccctcatagattttatagcagctgcataatccgtctttaagagttgcataagtatattttctttggttgtgtcctggcactcaccgtgacacttggaaaaataatatagatcttacattatttctagccacctgtcagtaaaattcatgccaagacccatgaactaatagcactgcttgtgtcctctttagatagatgtgtcatctgacctgggtggacgtgcctcgactagattgcttgactccagataacctcttcttcaat

SEQ ID NO: 53343 - DNA, 600 bp, Chicken  19866894304654_5
aagttgcagatacagctggaggcccaggaggacaggacaacattagaagagctggtagtgatgttggtctcagttgtgtggaaccttagactgcttccatgacatgcagtaagctcatttattagctcactcctgtgagaaagtcccagccttactcatttgaatggaaatacagttcttgcatgtgaactgctgcaggtttttatgggcagaaatcrttgtaggttgcacacgcagcaaaattactcaattgtatccacttttactaatgmctctaacctggccagctacccatcycyragagaaggttgttctcctaaccrtatctgccagttccctcatagattttatagcagctgcataatccgtctttaagagttgcataagtatattttctttggttgtgtcctggcactcaccgtgacacttggaaaaataatatagatcttacattatttctagccacctgtcagtaaaattcatgccaagacccatgaactaatagcactgcttgtgtcctctttagatagatgtgtcatctgacctgggtggacgtgcctcgactagattgcttgactccagataacctcttcttcaatc

SEQ ID NO: 53344 - DNA, 600 bp, Chicken  19866894304654_6
ccaggaggacaggacaacattagaagagctggtagtgatgttggtctcagttgtgtggaaccttagactgcttccatgacatgcagtaagctcatttattagctcactcctgtgagaaagtcccagccttactcatttgaatggaaatacagttcttgcatgtgaactgctgcaggtttttatgggcagaaatcrttgtaggttgcacacgcagcaaaattactcaattgtatccacttttactaatgmctctaacctggccagctacccatcycyragagaaggttgttctcctaaccrtatctgccagttccctcatagattttatagcagctgcataatccgtctttaagagttgcataagtatattttctttggttgtgtcctggcactcaccgtgacacttggaaaaataatatagatcttacattatttctagccacctgtcagtaaaattcatgccaagacccatgaactaatagcactgcttgtgtcctctttagatagatgtgtcatctgacctgggtggacgtgcctcgactagattgcttgactccagataacctcttcttcaatctgctgctgcttgacccttttctc

SEQ ID NO: 53345 - DNA, 600 bp, Chicken  19866894304660_1
atttcatggtgaattattgtggcagaaattgtattttcagtgaattctgcggcatgattgatgtgtcatcaactatattactgagcttgcagtcaagcttcatcttaacttctaaacaacacagtttcacaaaaaattatatgctggttggggaacgtacatctttttcatcaggacaacatgctccagatccggttgaggattgcaatacctgaataattaatggttcgtgtgcaaaaccgatggcaatttgatgttttaccaaccaaaaatggcacaaacagtccaaaacagagaggygagttctacatatgttaggccatccctgctgtgggaggaatgaattgcacattaattaatctataggcatgaaatccaaaagcattggagtatggagtacctccaaatgctgagacctgccctgatggctcttctcttcttagcactttggagaaactctgtagaaaatacataccttcagctcccaagaaaagagaggctatgcttcgaatcttgaaagctacctctcttgctcaagcattcaaatatggcatccaagtctttgttgtgttctgctcccttgcgagtgtgtcatggttt

SEQ ID NO: 53346 - DNA, 600 bp, Chicken  19866894304674_1
ccaagcaaagccttacatattgcctcgcaagcctctcccaacagcacctcacagaaaatccattcagtttcttccagctgacaacctcaaaaaaacagaggtctaaataagtccatccttccccccagtcacctacataagtgcaggtgtggatgctgctgcagcttttccatcagctcttcctctgtcggttcttccaaaacatctctacaaagagaaagcatgagttgttagggacaacaaagggaacttctcagcagttgttgcatctcaatgcctgcctagcaagaacacgtgctygtttcattcttgaaaagtggaattaaaattacactaagttgatgctccctaaagatgcatctacttgccagtgatccatcctttacagatgtgtcatggaaaccagcagctgttttcccataaggagcagggaaacaatttcctgcgcacagtacaatacaactgaaggtcagtaagtttgttttcctgaaaaaactcccaaatgagaacatgctcccaacgctactattgaatatccaatgcgcaccagaagttctacgtgttcatgatcatcaagtatcaactcaccacccacaattt

SEQ ID NO: 53347 - DNA, 599 bp, Chicken  19866894304679_1
  misc_feature (1)..(119): n is any nucleotide
nnnnnnnnnnnnnnnnnnnnnnnnnnnnnnnnnnnnnnnnnnnnnnnnnnnnnnnnnnnnnnnnnnnnnnnnnnnnnnnnnnnnnnnnnnnnnnnnnnnnnnnnnnnnnnnnnnnnnnncagtgttaagaattgtatgaaaaacaaaaacatcctttcaaatgagcatcaatgagaaaatcagtaccagtgtgtttatcctgccattaatctgctttcccaaggacaaggcaggaggaaaaaatattctccttccacagactgaaaggctgtgctcaaggaatacttcctttagatagamagtgatataacaaaacacttgccacttacagaaattygagtatgagaacagtactggggatttcaagttgaaggctctatacttggtttccaagtgccttgctgcattccccacctgagttattgatgagatgagttctaaattagtggtctgctacaacatgctatgagtcatcagcccttagaaaagggtaaggacacttgtttgctgtgtgattctgtgattcaagcaagctgtgtgggttggcaaagtgaaatcactttatttgtcaaggaaatgggtgttggaacctctttcac

SEQ ID NO: 53348 - DNA, 599 bp, Chicken  19866894304679_2
  misc_feature (1)..(82): n is any nucleotide
nnnnnnnnnnnnnnnnnnnnnnnnnnnnnnnnnnnnnnnnnnnnnnnnnnnnnnnnnnnnnnnnnnnnnnnnnnnnnnnnnncagtgttaagaattgtatgaaaaacaaaaacatcctttcaaatgagcatcaatgagaaaatcagtaccagtgtgtttatcctgccattaatctgctttcccaaggacaaggcaggaggaaaaaatattctccttccacagactgaaaggctgtgctcaaggaatacttcctttagatagamagtgatataacaaaacacttgccacttacagaaattygagtatgagaacagtactggggatttcaagttgaaggctctatacttggtttccaagtgccttgctgcattccccacctgagttattgatgagatgagttctaaattagtggtctgctacaacatgctatgagtcatcagcccttagaaaagggtaaggacacttgtttgctgtgtgattctgtgattcaagcaagctgtgtgggttggcaaagtgaaatcactttatttgtcaaggaaatgggtgttggaacctctttcactttgtaacacaagatckgaacactttcgcagtgtgca

SEQ ID NO: 53349 - DNA, 539 bp, Chicken  19866894304679_3
acttgccacttacagaaattygagtatgagaacagtactggggatttcaagttgaaggctctatacttggtttccaagtgccttgctgcattccccacctgagttattgatgagatgagttctaaattagtggtctgctacaacatgctatgagtcatcagcccttagaaaagggtaaggacacttgtttgctgtgtgattctgtgattcaagcaagctgtgtgggttggcaaagtgaaatcactttatttgtcaaggaaatgggtgttggaacctctttcactttgtaacacaagatckgaacactttcgcagtgtgcaccaacaaagcygtcgaaacatccatgttcgtgtgccacacatgcctgcttgaaaacgaaataaggtgcaaggtgttgcacttgggtcaaagcaatygcagacgcagaatgggagaagaactgattgagagcagtgctgtggagaaggatgtgggcatcctgatggacaaaaaagctggacatgagccagcagttttgtgtttgcagcccagtaggctaa

SEQ ID NO: 53350 - DNA, 508 bp, Chicken  19866894304679_4
acagtactggggatttcaagttgaaggctctatacttggtttccaagtgccttgctgcattccccacctgagttattgatgagatgagttctaaattagtggtctgctacaacatgctatgagtcatcagcccttagaaaagggtaaggacacttgtttgctgtgtgattctgtgattcaagcaagctgtgtgggttggcaaagtgaaatcactttatttgtcaaggaaatgggtgttggaacctctttcactttgtaacacaagatckgaacactttcgcagtgtgcaccaacaaagcygtcgaaacatccatgttcgtgtgccacacatgcctgcttgaaaacgaaataaggtgcaaggtgttgcacttgggtcaaagcaatygcagacgcagaatgggagaagaactgattgagagcagtgctgtggagaaggatgtgggcatcctgatggacaaaaaagctggacatgagccagcagttttgtgtttgcagcccagtaggctaa

SEQ ID NO: 53351 - DNA, 423 bp, Chicken  19866894304679_5
gagttctaaattagtggtctgctacaacatgctatgagtcatcagcccttagaaaagggtaaggacacttgtttgctgtgtgattctgtgattcaagcaagctgtgtgggttggcaaagtgaaatcactttatttgtcaaggaaatgggtgttggaacctctttcactttgtaacacaagatckgaacactttcgcagtgtgcaccaacaaagcygtcgaaacatccatgttcgtgtgccacacatgcctgcttgaaaacgaaataaggtgcaaggtgttgcacttgggtcaaagcaatygcagacgcagaatgggagaagaactgattgagagcagtgctgtggagaaggatgtgggcatcctgatggacaaaaaagctggacatgagccagcagttttgtgtttgcagcccagtaggctaa

SEQ ID NO: 53352 - DNA, 600 bp, Chicken  19866894304687_1
atgataaaccatggttaaaaagtggtttgattccaaatgaaaatcaaactgaacacgtaatgaagtctaaggcttccgtagcaaagagaactgagcatcatgtatgttactggccaaagaaacctcagctgctccatcccaactgaagccaggacgttggtttccagtggaaggccgtgtaatcatctgcagaacctatggctagggctttgctccctccgtgaggatcacatttccaaaacattgaaggtacaacagattttggcgggggctgctgtgcatttgacatttttggaactragagcactttgctaagtgactgcctagggatttaaaactctgcactgagtcttacttcgtgtcagcagggtgttgagatcagcacacgtgtgcctgyagattaggagtcagattaagaatatatataacatgaatctattatcatagcaggtgtcattcctgctaggaaatcacttatatttgagtcaaaaaaggcgtataattatagttttaagattttctattggtgatctgcatgtgtgaatgtgggtggggtaaggtgcattatatacatatatatatgcgtgtgtcccagcaagg

SEQ ID NO: 53353 - DNA, 544 bp, Chicken  19866894304687_2
tcatgtatgttactggccaaagaaacctcagctgctccatcccaactgaagccaggacgttggtttccagtggaaggccgtgtaatcatctgcagaacctatggctagggctttgctccctccgtgaggatcacatttccaaaacattgaaggtacaacagattttggcgggggctgctgtgcatttgacatttttggaactragagcactttgctaagtgactgcctagggatttaaaactctgcactgagtcttacttcgtgtcagcagggtgttgagatcagcacacgtgtgcctgyagattaggagtcagattaagaatatatataacatgaatctattatcatagcaggtgtcattcctgctaggaaatcacttatatttgagtcaaaaaaggcgtataattatagttttaagattttctattggtgatctgcatgtgtgaatgtgggtggggtaaggtgcattatatacatatatatatgcgtgtgtcccagcaaggtgtcatctctgtaagcagcatggcaagaaataacccgtcag

SEQ ID NO: 53354 - DNA, 600 bp, Chicken  19866894304693_1
cttgggataaaactgaaatgtcaaaactgaagcaaactgcatgagtcaaatggaaatcaagtggtgaaaatgtcttccaaagctgataacacactagtcatatttacttgtatttgccatggtaaaacggaggctctatcaaaaatcaggctcactctgtgtaagacagaagaaggaagaaacctgctttttgatatcaaagaaaaggagagcttgatagcttatattacgcattctatagacaattatgtggaccctattggcttctataacattttgaaaacgcattcacaataataktctatttccatgctagcaatgtcagtgggtgtcctggtagtacattatttaggcacattgagaaaataataggatttacaatagctggcaatttgttttctactgccacagtgtatgcttttgttacagtcctcgtagctgttagaaatttctttctggctattctgttcatcttttctactgaaatatttcttcattgtgaatcactttaatatgaattggactggttttgctgtcaaaggttttcattattagacttaatataaatagtgcaaatgtttttctaggaatagtcatcca

SEQ ID NO: 53355 - DNA, 600 bp, Chicken  19866894304703_1
cacgctgcctgccatgaactggtaagatgctgttgctcactgcccaacccagccctcattagagacgttccagtacaacaccagatgtcatcccacagatggatgtgtccctcttctgaggcacagctcgagctgttctccttcagaagttaccagctgacggtggctgatgctgcctgcaggctgcctggggcaggcagggcaatgcgtgctgcatgctgaggtgacagagttggtactgaggtcttgaacttcacgctacccatgttttgatgggacttcaatcttgagttctcctgygtgtgagaatgagctgctggttggaggatagcttctgatttacttttatccagagggaatccagactgtggatactgaggcaatgcaaaccaaagcacaaggggtatcaacaagagatttgctctaagagcactatcttctccccagctggacacagccttatctcagaacatggctagagttcagtttgtatggaggcaactggaaaagtaacccgatatgaatgaatcaaagagcagttttaatgtaaaaggaattagagcgcaaaatatagcaataaataaatgaataaataaataa

SEQ ID NO: 53356 - DNA, 599 bp, Chicken  19866894304704_1
  misc_feature (1)..(219): n is any nucleotide
nnnnnnnnnnnnnnnnnnnnnnnnnnnnnnnnnnnnnnnnnnnnnnnnnnnnnnnnnnnnnnnnnnnnnnnnnnnnnnnnnnnnnnnnnnnnnnnnnnnnnnnnnnnnnnnnnnnnnnnnnnnnnnnnnnnnnnnnnnnnnnnnnnnnnnnnnnnnnnnnnnnnnnnnnnnnnnnnnnnnnnnnnnnnnnnnnnnnnnnnnnnnnnnnnnnnnnnnnnnacctttgagtaaggtgtgtacgcatagtcatagagtctctggctcgcagtggtaggactcggggtgtcctgcagtaggagygtgagaattcttctggctccgatttgtgtagtctgctctcctgtctgcagtcttaagagctggttcttcaaggaaccacgcatgtgaagtcactgtsggctcccgtgtggagtcctgcacctagagagaggttctcctgactctggtctatgtgttggaccgtggagtggttgggagctaagggagaagacttcacagggaacatgtgtacacaatgagtaggcragaggactggaagaccttttagaggcaagggaaaaggattaacaattctgctggcctctctactatggctgcag

SEQ ID NO: 53357 - DNA, 599 bp, Chicken  19866894304704_2
  misc_feature (1)..(122): n is any nucleotide
nnnnnnnnnnnnnnnnnnnnnnnnnnnnnnnnnnnnnnnnnnnnnnnnnnnnnnnnnnnnnnnnnnnnnnnnnnnnnnnnnnnnnnnnnnnnnnnnnnnnnnnnnnnnnnnnnnnnnnnnnnacctttgagtaaggtgtgtacgcatagtcatagagtctctggctcgcagtggtaggactcggggtgtcctgcagtaggagygtgagaattcttctggctccgatttgtgtagtctgctctcctgtctgcagtcttaagagctggttcttcaaggaaccacgcatgtgaagtcactgtsggctcccgtgtggagtcctgcacctagagagaggttctcctgactctggtctatgtgttggaccgtggagtggttgggagctaagggagaagacttcacagggaacatgtgtacacaatgagtaggcragaggactggaagaccttttagaggcaagggaaaaggattaacaattctgctggcctctctactatggctgcaggttgcttatgattcaagaaatcatcctgatttctcctgtattgctggctttttcatctgcattcctcagcgctcgtttctacgcttccttgattttc

SEQ ID NO: 53358 - DNA, 600 bp, Chicken  19866894304704_3
gagtaaggtgtgtacgcatagtcatagagtctctggctcgcagtggtaggactcggggtgtcctgcagtaggagygtgagaattcttctggctccgatttgtgtagtctgctctcctgtctgcagtcttaagagctggttcttcaaggaaccacgcatgtgaagtcactgtsggctcccgtgtggagtcctgcacctagagagaggttctcctgactctggtctatgtgttggaccgtggagtggttgggagctaagggagaagacttcacagggaacatgtgtacacaatgagtaggcragaggactggaagaccttttagaggcaagggaaaaggattaacaattctgctggcctctctactatggctgcaggttgcttatgattcaagaaatcatcctgatttctcctgtattgctggctttttcatctgcattcctcagcgctcgtttctacgcttccttgattttccttaggacagaagtgataaaatacatctcctctgccatgtagcacagagccgtgattttctctctctgcatctagtgtttatttggttctctgaagttctggggcaggcaacagaaaatagaagtactt

SEQ ID NO: 53359 - DNA, 600 bp, Chicken  19866894304711_1
aaagagtgaagccccatgggaaattgccacttgcctaagaaactttcacagtgttttggttccagctttcatcttccattgtcatgctcctcctgcacgtgcccacagctcgattcacagctaccttctttaccagaaaaaatgttcttcaaccctaaccctgatgaaagactggaaagcaccactagccactgtaacaatcaatgacttaaggtccaggctgcacacctaccaaggtggagcaggtgctagcctctccacaagctaagccagcccctagctgcggctctggagggtcaycaggatggctttcagcagtgcctgcacatcacacctgggttcagcmttacacatcctcaaccccgattcactgtgagtgtcctccagacctcacactagactatgaccccagtttcatgggtcctcctgtgatggttgcttacaaaggatagagatagatggaggaagtccagaaaagcagaaggaaaagccttttcttttatctattttggttaaacttgtagccgccaactgcatcttcttcctgcagtgataatcctgtcccccttcccgtgtgacccaaagcagcctggcaggagg

SEQ ID NO: 53360 - DNA, 600 bp, Chicken  19866894304711_2
cacagtgttttggttccagctttcatcttccattgtcatgctcctcctgcacgtgcccacagctcgattcacagctaccttctttaccagaaaaaatgttcttcaaccctaaccctgatgaaagactggaaagcaccactagccactgtaacaatcaatgacttaaggtccaggctgcacacctaccaaggtggagcaggtgctagcctctccacaagctaagccagcccctagctgcggctctggagggtcaycaggatggctttcagcagtgcctgcacatcacacctgggttcagcmttacacatcctcaaccccgattcactgtgagtgtcctccagacctcacactagactatgaccccagtttcatgggtcctcctgtgatggttgcttacaaaggatagagatagatggaggaagtccagaaaagcagaaggaaaagccttttcttttatctattttggttaaacttgtagccgccaactgcatcttcttcctgcagtgataatcctgtcccccttcccgtgtgacccaaagcagcctggcaggaggaagtcatttattacacatcccattgttctgagcatgcctcagcctt

SEQ ID NO: 53361 - DNA, 600 bp, Chicken  19866894304711_3
tgcagtgataatcctgtcccccttcccgtgtgacccaaagcagcctggcaggaggaagtcatttattacacatcccattgttctgagcatgcctcagcctttgtgttggcccctgagagccccaagatgtgtgtcacccactggcccaccagccagcttcttgccaccctgcaagagactcaagggcagctgtggtgagagctgtcatgggaccataaccaggttggactgtgtgacaccatgtcccagtacctgtgctgggggtggcctgctaccaggcctcacagggcaccagcaggmcctggtactgcctgtgtgccattaggagggggccacactcccattgcacacctcttgctttgcaaacgaacaaaggaaagcacgcttccatttctccctttctatttatttatttatttatttattctctcagagagcattgtgacaaggaaggagttagggtatcaaaagcagggattgcactttgaggctgtgacagtgagatgcaccccacggggctgggccaggcctggtctgctgcctgtggtggtgtgcaggaggccggggcatcttcaccacgagcgtgccacaagccagcca

SEQ ID NO: 53362 - DNA, 600 bp, Chicken  19866894304712_1
tttattaagttgggtaaagtttgtaggcaaacaagccagtctctttgaaagccttgtacctgataattcacatagtgcacatgcagcatctgctattataaagatataatacctcatacatacagagtttggatctcattcctgaaggaagttaaaagcagagaagtagaaaactacttaagtgcagaaaataaaagcatgtcagttttacaaataataggtctttgcttgtgagcttaacacagtcaggtctccattagatcaatcagttacaaaaacaaagaacgcagagaagacagwaagtccgtgaagtttccctcttcatgtattcctttgagatttttcaccttttgaagaacaaagatttggtttttctatttgaatcctttatttgctgaagaaggcaaaaaaatcaggatagaggccaagcactcatacaytgtttactgacrctgcttttgcatattcatatggttgaaaatggctatgctgtccagtgcttccagatcttttccctttagagactgattgacaacatgatataagatacatcctaacctacagtaatttcataagcatcgctttgcatgacagataaat

SEQ ID NO: 53363 - DNA, 583 bp, Chicken  19866894304712_2
cctgaaggaagttaaaagcagagaagtagaaaactacttaagtgcagaaaataaaagcatgtcagttttacaaataataggtctttgcttgtgagcttaacacagtcaggtctccattagatcaatcagttacaaaaacaaagaacgcagagaagacagwaagtccgtgaagtttccctcttcatgtattcctttgagatttttcaccttttgaagaacaaagatttggtttttctatttgaatcctttatttgctgaagaaggcaaaaaaatcaggatagaggccaagcactcatacaytgtttactgacrctgcttttgcatattcatatggttgaaaatggctatgctgtccagtgcttccagatcttttccctttagagactgattgacaacatgatataagatacatcctaacctacagtaatttcataagcatcgctttgcatgacagataaatgtacaggattcagggaaagtgaggtaaatgtttcctcccaggaaagatgttttcattttagttctttcccctaaaagattgtattgggtggtccagacagattagagtaatatcttttgtagt

SEQ ID NO: 53364 - DNA, 571 bp, Chicken  19866894304712_3
taaaagcagagaagtagaaaactacttaagtgcagaaaataaaagcatgtcagttttacaaataataggtctttgcttgtgagcttaacacagtcaggtctccattagatcaatcagttacaaaaacaaagaacgcagagaagacagwaagtccgtgaagtttccctcttcatgtattcctttgagatttttcaccttttgaagaacaaagatttggtttttctatttgaatcctttatttgctgaagaaggcaaaaaaatcaggatagaggccaagcactcatacaytgtttactgacrctgcttttgcatattcatatggttgaaaatggctatgctgtccagtgcttccagatcttttccctttagagactgattgacaacatgatataagatacatcctaacctacagtaatttcataagcatcgctttgcatgacagataaatgtacaggattcagggaaagtgaggtaaatgtttcctcccaggaaagatgttttcattttagttctttcccctaaaagattgtattgggtggtccagacagattagagtaatatcttttgtagt

SEQ ID NO: 53365 - DNA, 599 bp, Chicken  19866894304717_1
  misc_feature (1)..(3): n is any nucleotide
nnnacagaagtaaaacagtgctttcgagacccttttagcattgtgatgtactgggaagcagcagatatccaaatgcattcacaaaagtttacaacccagactaaattaaaatgaactaacttgaaaccctcctcatttcaaggtaggaaaagattatactgacacaaacatgtatatttttgtatgcatgaaaaacaaatatatatgagcccttctagtgggatgtagaacaagaaaagtctcatgaggattgatactctatgcaggcaaattgatatgtgtgaagaaagaagctgctcrttttccggtctcttaagggaacaagttttagataattatatgacaaaaagaccttttaggatctacgaaaaacattctgaaatgtcaactgcatagaagccatgtttcacctgtaatgataaaagcagcacattgtataacctttctagaaataaatttactaagtacattagcttaattttacagcactgtaaatacctattgtactgtactgttagaaagctgtgctaaaaaataatggtgtcttgctgtatgtcagcatattctgggatggctaaggattgtctatggaaagaaaa

SEQ ID NO: 53366 - DNA, 600 bp, Chicken  19866894304723_1
tcaatactgtgatttttttttttcttaaattatttttattacttcccttttaaagaaaagtatagaggaaagcaaaggactgtatatggggaagtgtctcatcctgctgttttcgtgaataaagattgctgttggctgctttgggaaggacaggcctaaccttaattctgtttcatgcagcattttcattgctcctggtggccgaatatctggcacatcaaaaatactgcgtgaacttagctgtaaccagctcattttattcagcttatttatttattccatcttttgtaacaagaaccygcatacctaaatgagtctgttgttagacagacccagcctgaggaattcaagaaatctgaggcggaacctacagccttcttgacctaaacctgtaatttggggggctttcctgcttaatgatccatacagctagtttggggactgtatttagcaagatttggcatgttttcacaattcagtgggggggggaaacagtccttctaggaagagatggcttttaaatcattttattagtgaaaggtgatggaagctctttgcttttaggttttgtttatcagaaaccagttgtccacaagaaga

SEQ ID NO: 53367 - DNA, 600 bp, Chicken  19866894304724_1
tatttgaatctattttctctattatcccatacctgggaattattgttccagggatatctttatggcagagttgcatgctgccaaggctacaagaaatgcctctggccatcctgtaagctagcatcctatccttaggaggtatttaaatcacacagccctggtcatctaggtaatatctgcctgacaccactggaagggttgccctgctcagagctggccttcttttgctattttctttttttgtttattatttactctagcacatacaaaatatccctcagtgactcgttttgctaggayaaatagccctgtggtagcaaatattttcataaaggcatctgctaatcctttggagccctrgtggcttcctttgttaagctgtttaaaaacttgtagggacaacgatttgggtagccattgctcaccatccctggtgaaccagttattttctctctcttctgccccactatttttaattatctctaactcctctracgggaaacattttatctggcagcaaccaggcctctgggagtaaggggaggatcttagatacttctggcagaagtgctgcttctcaaacttcttccatctgcatat

SEQ ID NO: 53368 - DNA, 600 bp, Chicken  19866894304724_2
tatggcagagttgcatgctgccaaggctacaagaaatgcctctggccatcctgtaagctagcatcctatccttaggaggtatttaaatcacacagccctggtcatctaggtaatatctgcctgacaccactggaagggttgccctgctcagagctggccttcttttgctattttctttttttgtttattatttactctagcacatacaaaatatccctcagtgactcgttttgctaggayaaatagccctgtggtagcaaatattttcataaaggcatctgctaatcctttggagccctrgtggcttcctttgttaagctgtttaaaaacttgtagggacaacgatttgggtagccattgctcaccatccctggtgaaccagttattttctctctcttctgccccactatttttaattatctctaactcctctracgggaaacattttatctggcagcaaccaggcctctgggagtaaggggaggatcttagatacttctggcagaagtgctgcttctcaaacttcttccatctgcatatcaattacctgtagactcctccaaaaatcctgactgatgtattatagccacctcttgtggt

SEQ ID NO: 53369 - DNA, 598 bp, Chicken  19866894304724_3
agggttgccctgctcagagctggccttcttttgctattttctttttttgtttattatttactctagcacatacaaaatatccctcagtgactcgttttgctaggayaaatagccctgtggtagcaaatattttcataaaggcatctgctaatcctttggagccctrgtggcttcctttgttaagctgtttaaaaacttgtagggacaacgatttgggtagccattgctcaccatccctggtgaaccagttattttctctctcttctgccccactatttttaattatctctaactcctctracgggaaacattttatctggcagcaaccaggcctctgggagtaaggggaggatcttagatacttctggcagaagtgctgcttctcaaacttcttccatctgcatatcaattacctgtagactcctccaaaaatcctgactgatgtattatagccacctcttgtggtagattcatcacattctaatgcttttgctcagctagttaacaaccctcttcagaaacaagttttgttttaactgtaacaaagcagacagggcccattttcctgcacttccaacggatcaccccactcaagcgg

SEQ ID NO: 53370 - DNA, 539 bp, Chicken  19866894304729_1
ccataaatgtagcctgatttcagggatacagcagtgcaagaagtaattgatttaaaaatagggtaaaatcctgctaagattgttccccaaaaattaacagacccacttcagtttggtagtcaggtgctgactgaatgtgaccttctcctccttcctcctgcacggtccctaacgcttcctctgtttttcatctgccttctagaacagtcgccaaggcatcaggaagacaggaatagccacaaaacaagttgtgagttgatggcataagagctgcctgactccttctgaacaaagccaacstaagagagtgcccgagacatgctggcattccactcggctgtaacacgtaaaaagcctttataaagcattctccctggagattctttaaaactgtggtttttcttaaagccattaagacgtagaaagaataaatgactaagaaatcttatcttggcatgaaaatgtgcagtgggcagagtgccaagaccaaaaaatcagtatgaattcatttaatgaatattctatatctgagcaattgt

SEQ ID NO: 53371 - DNA, 599 bp, Chicken  19866894304732_1
  misc_feature (1)..(105): n is any nucleotide
nnnnnnnnnnnnnnnnnnnnnnnnnnnnnnnnnnnnnnnnnnnnnnnnnnnnnnnnnnnnnnnnnnnnnnnnnnnnnnnnnnnnnnnnnnnnnnnnnnnnnnnnnaggggctgagggagcagggagctgctgcgggcattggggatggagctgcagggctgtgtgctgtgtaagtgcctcttctgggctgccaatgggtttgggttcttggcactgcatggggacgctggggctcctctggaagtgctgcagcggtagcgatgtgatttcccttggaagtcccaaacgtcacggagtatygctctttgtttgagagaacaaggcaacgttacagcgcagcactgaaaaacaggagccacaggtgcaaaatccattaaggaaatataaagacttctaaagtggttctctctttttttttttttcttccctctctcttttttcttacacttttatgacatgcttgtgacttcacaaggctcctgcttgtgatttttgaaagccgggttagcgttactgccggctcgctgttcgcagcaggtgctttattctcctgttttgttcccagcatttaggatttcaatagctgcagaagtgccccc

SEQ ID NO: 53372 - DNA, 599 bp, Chicken  19866894304741_1
  misc_feature (1)..(138): n is any nucleotide
nnnnnnnnnnnnnnnnnnnnnnnnnnnnnnnnnnnnnnnnnnnnnnnnnnnnnnnnnnnnnnnnnnnnnnnnnnnnnnnnnnnnnnnnnnnnnnnnnnnnnnnnnnnnnnnnnnnnnnnnnnnnnnnnnnnnnnnnnnagaataaagaaagtataaaaccacatagggtctatttacaccctaatccctccatcccactcattttgcagcccctggagataaacaaactctcaagggcagtttctgcctggcatttttgagactggtcataggacagcctcggctttgctggctgtttcytttccttctgccctcatcacagccaagcgctgatttatagggcgcacctgaccttactgggccccctacacctctaaaacacctcccatgccctccwgaactgctgcgaccaccagtgyctcccttgagagtgctggcatttctgttctatcagctgcacaggggcacgcacacaagaggtttctttgtattttacactgttagaaagaagaaacggtggacaacagtatctccttcctaagcaagggagagaaggaagaaccttcttggcttctgctacaaaggggtgacttgtcccc

SEQ ID NO: 53373 - DNA, 599 bp, Chicken  19866894304741_2
  misc_feature (1)..(41): n is any nucleotide
nnnnnnnnnnnnnnnnnnnnnnnnnnnnnnnnnnnnnnnnnagaataaagaaagtataaaaccacatagggtctatttacaccctaatccctccatcccactcattttgcagcccctggagataaacaaactctcaagggcagtttctgcctggcatttttgagactggtcataggacagcctcggctttgctggctgtttcytttccttctgccctcatcacagccaagcgctgatttatagggcgcacctgaccttactgggccccctacacctctaaaacacctcccatgccctccwgaactgctgcgaccaccagtgyctcccttgagagtgctggcatttctgttctatcagctgcacaggggcacgcacacaagaggtttctttgtattttacactgttagaaagaagaaacggtggacaacagtatctccttcctaagcaagggagagaaggaagaaccttcttggcttctgctacaaaggggtgacttgtcccccttgccacttctgcagcaacatctgcaagcgttgttcatcctacagaacttaaatccaacctgcaagcactgcctgccttggaggtacgtcagctta

SEQ ID NO: 53374 - DNA, 599 bp, Chicken  19866894304741_3
  misc_feature (1)..(19): n is any nucleotide
nnnnnnnnnnnnnnnnnnnagaataaagaaagtataaaaccacatagggtctatttacaccctaatccctccatcccactcattttgcagcccctggagataaacaaactctcaagggcagtttctgcctggcatttttgagactggtcataggacagcctcggctttgctggctgtttcytttccttctgccctcatcacagccaagcgctgatttatagggcgcacctgaccttactgggccccctacacctctaaaacacctcccatgccctccwgaactgctgcgaccaccagtgyctcccttgagagtgctggcatttctgttctatcagctgcacaggggcacgcacacaagaggtttctttgtattttacactgttagaaagaagaaacggtggacaacagtatctccttcctaagcaagggagagaaggaagaaccttcttggcttctgctacaaaggggtgacttgtcccccttgccacttctgcagcaacatctgcaagcgttgttcatcctacagaacttaaatccaacctgcaagcactgcctgccttggaggtacgtcagcttactccagctaaggacaaccataa

SEQ ID NO: 53375 - DNA, 600 bp, Chicken  19866894304742_1
aagcatctccaggcagaactgcctccctggtttggcagtcactgcttttgtcaaaccagtgcattatttaaccagtttagtttggcagcttcactgacaaacagcaagataaacagggaaaggcagggctggatgttcctctcatcgcttcacagacctcaagctaaggacacccatatattaactgctgccatatcccacagctagtgaaagacttacaggctgtctggagccaggctgtgaactccactggcaccacacatctcaagggataaggcacagaggcaagcagcaaattgygacagaaaggcagcactccatgtctcaggaggcacacagcctcctcagctcttacagccatccactcggcaagactgacttatccttctcttaacagtgggaccccaaaaaacacaccctacagggaagtgttcattcacacccacacaacatagaactctcttctccttcactacctacttgacctggaaaaccttactgactccagaggagactcctgagcaggtcagcaagaatggacagagagactggctcagcctctgctcacttatagaccccatatgtaactcaaaatcacaa

SEQ ID NO: 53376 - DNA, 600 bp, Chicken  19866894304743_1
gtgccactaatccataatgtacaaatgaacagtgtgagaaggtcatactcaagttacttaacaacagttaagtgtggtttcacacttaactctgagtgctcatcctccccttcctgataggatacaatgcagaattttacagtctgctgttaacaccatctttgtaatcgtgttgcacaataagtgacatttgtccatataatttcaagctcattttttaacttgtagtctgcatgcaagacagagtgggtgtcaggaagctatttatgacacttttttggcagactaaaagatctaatraatgagaaaggatttaacacttaaactaagcagcagaaccaagaagtataaacatgcagattttatggtgaaaagtcctctctctgaggaaagtgaaatgaacctgctggaaggggtggagctgacaagcaacccgtgttgcctagttatccatttggaaaatatctttactgcagttggatgaacataaaaatatatgaaaaagtacagaataaggccattttgatagagtttcatctattaagatgttttacatctgtaaggcatgccatttcattaaaaactgatttcctgttccct

SEQ ID NO: 53377 - DNA, 600 bp, Chicken  19866894304746_1
agaatctaagagtagtttaaagagctttttgtctcgaaaaagggaactttaaagctaaatgtgaagagctggacttcttttagttttcgatgaacttgactgctttttaaacagctgcagctgtgagcagttacagatggtgcagatcagaaggatcctctttatcatacttaagtgccttacaggacccccagtgttagtttttcaaccagttatctttatttttttaatgttttttgcagatggagcatgaaaaaaaaaagctaccttaaagctaaatcggaagatgaaaagcctccrtaaaacagcactgcttctctgcagggtgcyttactggaagaagtttcaggacagtcccaaagcactctctctaaagaacgtttccacttcttttgttacaagcaaagtttttcagccatcaggccagaatttgttgaaatcagtctccgactgctttcctgctgcctgatttttgcatgtgcaacttgcagttattgccttagaccttaagcaggcaagtgtgttcatgtaccgtgctgttcttgcatccaggctgtaaggcagagaccrggccgggtccggttctcccacaccttctyc

SEQ ID NO: 53378 - DNA, 600 bp, Chicken  19866894304746_2
gtctcgaaaaagggaactttaaagctaaatgtgaagagctggacttcttttagttttcgatgaacttgactgctttttaaacagctgcagctgtgagcagttacagatggtgcagatcagaaggatcctctttatcatacttaagtgccttacaggacccccagtgttagtttttcaaccagttatctttatttttttaatgttttttgcagatggagcatgaaaaaaaaaagctaccttaaagctaaatcggaagatgaaaagcctccrtaaaacagcactgcttctctgcagggtgcyttactggaagaagtttcaggacagtcccaaagcactctctctaaagaacgtttccacttcttttgttacaagcaaagtttttcagccatcaggccagaatttgttgaaatcagtctccgactgctttcctgctgcctgatttttgcatgtgcaacttgcagttattgccttagaccttaagcaggcaagtgtgttcatgtaccgtgctgttcttgcatccaggctgtaaggcagagaccrggccgggtccggttctcccacaccttctyctgtgktgtagtggtaaattggccgcctttg

SEQ ID NO: 53379 - DNA, 600 bp, Chicken  19866894304746_3
aaagctaaatcggaagatgaaaagcctccrtaaaacagcactgcttctctgcagggtgcyttactggaagaagtttcaggacagtcccaaagcactctctctaaagaacgtttccacttcttttgttacaagcaaagtttttcagccatcaggccagaatttgttgaaatcagtctccgactgctttcctgctgcctgatttttgcatgtgcaacttgcagttattgccttagaccttaagcaggcaagtgtgttcatgtaccgtgctgttcttgcatccaggctgtaaggcagagaccrggccgggtccggttctcccacaccttctyctgtgktgtagtggtaaattggccgcctttgttcctgctggcctctgccacagtgggaggcagcaggagctgcatgcctgctctgctgggctggctgtgttttcgtggctctttgcactgcaggaggtgttctcctttgctgcaggatctcgctgtttccttacgacatcactctgccttggtgtcccctgggagctgctgtcccacactaggcagaccttggtactgtttgagctttggctcatttgggaatgcactctcagtattgcca

SEQ ID NO: 53380 - DNA, 600 bp, Chicken  19866894304746_4
rtaaaacagcactgcttctctgcagggtgcyttactggaagaagtttcaggacagtcccaaagcactctctctaaagaacgtttccacttcttttgttacaagcaaagtttttcagccatcaggccagaatttgttgaaatcagtctccgactgctttcctgctgcctgatttttgcatgtgcaacttgcagttattgccttagaccttaagcaggcaagtgtgttcatgtaccgtgctgttcttgcatccaggctgtaaggcagagaccrggccgggtccggttctcccacaccttctyctgtgktgtagtggtaaattggccgcctttgttcctgctggcctctgccacagtgggaggcagcaggagctgcatgcctgctctgctgggctggctgtgttttcgtggctctttgcactgcaggaggtgttctcctttgctgcaggatctcgctgtttccttacgacatcactctgccttggtgtcccctgggagctgctgtcccacactaggcagaccttggtactgtttgagctttggctcatttgggaatgcactctcagtattgccactgaagattcatgcctcggtgctaatggt

SEQ ID NO: 53381 - DNA, 600 bp, Chicken  19866894304746_5
cagcactgcttctctgcagggtgcyttactggaagaagtttcaggacagtcccaaagcactctctctaaagaacgtttccacttcttttgttacaagcaaagtttttcagccatcaggccagaatttgttgaaatcagtctccgactgctttcctgctgcctgatttttgcatgtgcaacttgcagttattgccttagaccttaagcaggcaagtgtgttcatgtaccgtgctgttcttgcatccaggctgtaaggcagagaccrggccgggtccggttctcccacaccttctyctgtgktgtagtggtaaattggccgcctttgttcctgctggcctctgccacagtgggaggcagcaggagctgcatgcctgctctgctgggctggctgtgttttcgtggctctttgcactgcaggaggtgttctcctttgctgcaggatctcgctgtttccttacgacatcactctgccttggtgtcccctgggagctgctgtcccacactaggcagaccttggtactgtttgagctttggctcatttgggaatgcactctcagtattgccactgaagattcatgcctcggtgctaatggtgtcaag

SEQ ID NO: 53382 - DNA, 599 bp, Chicken  19866894304748_1
  misc_feature (1)..(109): n is any nucleotide
nnnnnnnnnnnnnnnnnnnnnnnnnnnnnnnnnnnnnnnnnnnnnnnnnnnnnnnnnnnnnnnnnnnnnnnnnnnnnnnnnnnnnnnnnnnnnnnnnnnnnnnnnnnnnttacagggcctcaatgtctttcttgtagtttggggcccaaaactgaacacaatattctggcaccctcaccagtgctgagtagagggggatgattacctccctgttcctgctggccacactatttctaacacaggccaggatggcattggccctcttggccacctgggcacactgtcggctcatgttcagcyaagcatcatccaacacccccgggtccctttcctcttcacagtcatccagccactcagccccaagcctacagcgctgcatggggttattgtggccaaagtgcaggacccagcatgtggccttgttggacctcatcccattcacctcagcccagtgacccagcttatctagatccctctgaagggcatccctaccttcagtccaatccccctgctggagcaggaacacctagattaggtcacaattccccccaacgcgttctgaaacccatttttaaacagtctttcagtttgatttatgg

SEQ ID NO: 53383 - DNA, 541 bp, Chicken  19866894304748_2
agccactcagccccaagcctacagcgctgcatggggttattgtggccaaagtgcaggacccagcatgtggccttgttggacctcatcccattcacctcagcccagtgacccagcttatctagatccctctgaagggcatccctaccttcagtccaatccccctgctggagcaggaacacctagattaggtcacaattccccccaacgcgttctgaaacccatttttaaacagtctttcagtttgatttatggtatagctgtatggaatgttgtcagcgcacctgagacacaagcttcacrtatggggaagaatatggcagaagggaagtagaaagggaatgaacttctgaaacatcaatggaaattcacatactttattcttcagttgttttgaatagctgtttggaagatgcagatggcagagcttattcaatgtgtaggaaattggtttgagaagtaaaatagaatacttagccttcataagggaatatctgttccctggcagactttccatgaatggtttattatatgaacagttaag

SEQ ID NO: 53384 - DNA, 581 bp, Chicken  19866894304749_1
gaagttctgaaatcgagcttggatagctcaagcagttaaagctttaaatgacagaaacacattgccaagcacactaagcaaacacaacttactcaaatactcacagtaatcagttcccagtgtccagctgatgtttaaataagaaaataaccctgcaaagtccactcctttacgtaaacagccaacgttagttcagactttataataacaaactagtgctaaagcttctttttacaatcttaagtgtgtgcacgtaatgcttacccacctcccactgagcttgactgcttttattcttgyrtaacactccagttaaaaaaaatagtcatcaaaattgtccttcctggacaactcctagagattgttacagagttcaatagcgttgcttctgcctcatgatgaagtggcagacaagttacacaggacaaagcactgaatacagctgtaatgcagagcacagcagctgacaaggtgcatttttatccttgcaacctctccacacacctgatgatgcctaagactccagaaaactttgcaaaagtatttcctaagcaacgatgaggtcctgtcaacacagcggt

SEQ ID NO: 53385 - DNA, 580 bp, Chicken  19866894304749_2
aagttctgaaatcgagcttggatagctcaagcagttaaagctttaaatgacagaaacacattgccaagcacactaagcaaacacaacttactcaaatactcacagtaatcagttcccagtgtccagctgatgtttaaataagaaaataaccctgcaaagtccactcctttacgtaaacagccaacgttagttcagactttataataacaaactagtgctaaagcttctttttacaatcttaagtgtgtgcacgtaatgcttacccacctcccactgagcttgactgcttttattcttgyrtaacactccagttaaaaaaaatagtcatcaaaattgtccttcctggacaactcctagagattgttacagagttcaatagcgttgcttctgcctcatgatgaagtggcagacaagttacacaggacaaagcactgaatacagctgtaatgcagagcacagcagctgacaaggtgcatttttatccttgcaacctctccacacacctgatgatgcctaagactccagaaaactttgcaaaagtatttcctaagcaacgatgaggtcctgtcaacacagcggt

SEQ ID NO: 53386 - DNA, 600 bp, Chicken  19866894304754_1
ttgaaaattattgctgcgcataactttattgtgaacataataattatataaatatgccttcaaggaaaagagtagaagataatgctatcttagaaacaaatcatgaaaaaaagagaacaattttcactattacccacatattaccatgttctccctctcatttttcaggtcacgtcttttggcttctaacctttctcactcagttatgcacacagatgccttagaaatttccagaataataataaataaataatttttaaatggcctgaagttatttacctaatatttttaaccctcaammgtaaagtgcaaaatcttctaagattgatgtagaaataatacaggatatcctggctaccttgctctttagacgcctaattcagatgtcttagttaagaaaggatgcccctagatttcaaatgttaaaagtagagaaaggaaaatcacagggataaaaaaaaaaatgcatttatatgtcctccaaaggatgatttagaacagcagttcagttcaggaattatgattttgccttgtagaggaatctttctccgtctttattacatgtctagtgataatagaagaatgggtatcctattactg

SEQ ID NO: 53387 - DNA, 600 bp, Chicken  19866894304754_2
tgaaaattattgctgcgcataactttattgtgaacataataattatataaatatgccttcaaggaaaagagtagaagataatgctatcttagaaacaaatcatgaaaaaaagagaacaattttcactattacccacatattaccatgttctccctctcatttttcaggtcacgtcttttggcttctaacctttctcactcagttatgcacacagatgccttagaaatttccagaataataataaataaataatttttaaatggcctgaagttatttacctaatatttttaaccctcaammgtaaagtgcaaaatcttctaagattgatgtagaaataatacaggatatcctggctaccttgctctttagacgcctaattcagatgtcttagttaagaaaggatgcccctagatttcaaatgttaaaagtagagaaaggaaaatcacagggataaaaaaaaaaatgcatttatatgtcctccaaaggatgatttagaacagcagttcagttcaggaattatgattttgccttgtagaggaatctttctccgtctttattacatgtctagtgataatagaagaatgggtatcctattactga

SEQ ID NO: 53388 - DNA, 599 bp, Chicken  19866894304766_1
  misc_feature (1)..(191): n is any nucleotide
nnnnnnnnnnnnnnnnnnnnnnnnnnnnnnnnnnnnnnnnnnnnnnnnnnnnnnnnnnnnnnnnnnnnnnnnnnnnnnnnnnnnnnnnnnnnnnnnnnnnnnnnnnnnnnnnnnnnnnnnnnnnnnnnnnnnnnnnnnnnnnnnnnnnnnnnnnnnnnnnnnnnnnnnnnnnnnnnnnnnnnnnnnnnnnnacgagaaaagagagatcataatatcactcatcataactatgggtaaaaagcacccacccatccaaaacttgacggagtatgactgactcctccatgagacctgtcctgrggatcctgctgccagctaaaagcatggattccaattagaaaggcgggatacaaggatatacctgcttactacacaatagcagcctagtctccaaaggccatcacaaacatactctgataattccaaaatttcaaaccatttaaccacatgactaatgggagttcctacaaaaacacaatagtgaagaataaatccagtaacccaacatgccgttgacttacttttggtgcacctgtgtgttgattacaatagacgtggccagtagatacctcccttgcatctgcagtccatagcaaatt

SEQ ID NO: 53389 - DNA, 600 bp, Chicken  19866894304766_2
tacaaggatatacctgcttactacacaatagcagcctagtctccaaaggccatcacaaacatactctgataattccaaaatttcaaaccatttaaccacatgactaatgggagttcctacaaaaacacaatagtgaagaataaatccagtaacccaacatgccgttgacttacttttggtgcacctgtgtgttgattacaatagacgtggccagtagatacctcccttgcatctgcagtccatagcaaattaaaaggtgcctccgccttctgtaaccattatgaatgctctttctttccmcaagcacccaaaccaaccctgctgtccccacgcttgtcccactgcaccacccattcttatgcccacacacagcaatggaaacagcacacattgccccaaacaactttggtttggtaacagttcctttgcttgaagagagcatcagtgctcctcacacaagcccaaccacattaagttcccttttgaggctgcaaatctctaccattcctcatttactcacatttttccctttccacctcatccctacatttaccaaaagctggatgttttattccctgggatcattttcctggaaggtaa

SEQ ID NO: 53390 - DNA, 600 bp, Chicken  19866894304778_1
tcccttctcttaggtggctgtctgaagttaccatgtgggctgatgggtgatgatcaattaatttgaaagaagaaaaactggctgtaactggagatgtgctttgtcctcttggttcttttcatctgatcacaaacgtagtgttgtgctctgatcgatatgcacctgcgtcaggtggtcagaaggatcaaactatgttcaaagcggcgttgttaaaacagtaatgtacttcattcttcgtgcatgaggacttctgcctgatagttgtttgatatctttgcaaagactggagcacttcttctrcaaggggaggctgagagtgctggaattgctcagtctggagaacagaaggcttgggatgcgggtctcatcaatgtattttaaaacgtggaggtgggtggtgcaaagaggacaggcctagactcttttctgttgcctgatgccaagataagaggagtgtgcacaaactgaaccacaggaggatctgtctgaccatgaggcagcacttcagtgctgtgttagtaatgaagtactggcacaggctgccagagacgctgtggaatctcttggagatcttcaggagcagcctggatgtgtcctgca

SEQ ID NO: 53391 - DNA, 600 bp, Chicken  19866894304781_1
atccataggcaatatcacaatagaaaatgggggaaacatgctgtttcttggcataatagatgtagtaacactagcagaaatgttagaccactttttgccatttaatagcatttttagtatgagaaagattcatactttttctgaataaatagtataatcatatacaataattacaagtttctctccattgtatgctttattgttgggtgattcaaaactgcaaaaattgtgaaatggctataggtaaaaactagttatactgggtaatgaggctaatggaaagtgataggggaaaactayaaaagttgagaaatttataacccaatattagaggaacaaatgttaattttgacwgttttgctgtaatctgtgcaaaggaagacttgcatagtgagagaaatctgatcaatgaagaaattgtcttgagattttcactcaaattcacaagctctacaaatctacatttcccagtcacatattgtcctgtttttcagttgccactccaaagaatttccattttaaatttgacttctaaaacttctgtgaatattgtaaggtaaagtgacaacagaagagcagcactctggatcctaacatcag

SEQ ID NO: 53392 - DNA, 600 bp, Chicken  19866894304781_2
aatagatgtagtaacactagcagaaatgttagaccactttttgccatttaatagcatttttagtatgagaaagattcatactttttctgaataaatagtataatcatatacaataattacaagtttctctccattgtatgctttattgttgggtgattcaaaactgcaaaaattgtgaaatggctataggtaaaaactagttatactgggtaatgaggctaatggaaagtgataggggaaaactayaaaagttgagaaatttataacccaatattagaggaacaaatgttaattttgacwgttttgctgtaatctgtgcaaaggaagacttgcatagtgagagaaatctgatcaatgaagaaattgtcttgagattttcactcaaattcacaagctctacaaatctacatttcccagtcacatattgtcctgtttttcagttgccactccaaagaatttccattttaaatttgacttctaaaacttctgtgaatattgtaaggtaaagtgacaacagaagagcagcactctggatcctaacatcagtttctaaccagagcactgtaaaattttggtgcggcaatggctccaaagcattct

SEQ ID NO: 53393 - DNA, 600 bp, Chicken  19866894304782_1
gctaggagagcagccatcacacctggcacacgctgagagcttttgtttgtatacagagaaaacaaaggacatacaaggttgctactctttcataaggtaagattgcacagaaagagaaagctgctgacctccagggcacagtgcatttcttgaactgatgtccacatggtgactccaaactgctttgatatgagactaacatcaggaataaacgcttaaactggtcggctgatacaggggacagaactgtagaaccacagccacactttactacaagcattgggctgtagtatgaggacrgtttgactggtattcatccctccctcccaaacacacatctccaacaagaaagtagtccaacagttttctaagacacatgaacgagacttgagtttagtccttcagaacagctgtctgtttccatcagggttgcaatagccgtcttgcaccagaaatcagcccagacttaccttattcctattagtttccaagggcctctcatttccctagtggtttctgactatattttccttcagtcgttccacttttcttatttcttagtgttgctgtggcagtctaaatgtctttttcttcttgtag

SEQ ID NO: 53394 - DNA, 599 bp, Chicken  19866894304788_1
  misc_feature (1)..(160): n is any nucleotide
nnnnnnnnnnnnnnnnnnnnnnnnnnnnnnnnnnnnnnnnnnnnnnnnnnnnnnnnnnnnnnnnnnnnnnnnnnnnnnnnnnnnnnnnnnnnnnnnnnnnnnnnnnnnnnnnnnnnnnnnnnnnnnnnnnnnnnnnnnnnnnnnnnnnnnnnnnnnnnnncaatcttctatgaatcaatactgcaacacttgcagagaaagctgtatcttatgtgtccaaagctcaggctcagacttgctgtctctccaccaactgcaacaggctctgagggagatacacaggctagcattaaggttcaragtacttgcaaaattcaacacacagagtaacagacactaagatgatttcattgccctagtctctgtctagtcccctcaaatctgtcctttggaacttcaagctaagcatagagcccctcatcacttgacatatctgaagaatctgcaatacaatcacagaataccctaagttggaagggacccataaggatcatcaagtccatctcctgactctacacagaaccacctaaaagttaagccatatttccgagtaatttgcccaaatgtgccttgaatcccaacagcttggggccacgagc

SEQ ID NO: 53395 - DNA, 600 bp, Chicken  19866894304790_1
cgaagctctatggctcgccgcgagtgccagagccccatcctggagacccggttcagcagcaccagcactttgccatgcaggtaaaaacaaagaaacagatgggaaaaaaaaaaaaacccacaaacccatagcttccagaaacgctgttgtctgctttgctaataataaaagcaaaggcactctgcaggtcccctctgctccccttcgtgcctctcttcagagcaatctgctggcacaccggtgcttacccaccttcctccaactgataatcagccactctctctccttccccagccggcygtgggactgagcgagcaccgtgggcacaggctggccactcccgagaagcaggtgtgtgcagggccgacccacatcgctggtcttggaccccgtcccagcgccttgcagctagggtgcatgagtggaccccctcccgacgccgtctactcaccagcgcagttccagcagggattccttcctcccaggcacaacgggcctccagtgaggccaccagagggttcrgagatgccaccaggacacatgtaccggccctacaagtacctgaatcgcgggcaccctgccctgtggaatggcagccat

SEQ ID NO: 53396 - DNA, 600 bp, Chicken  19866894304790_2
caatctgctggcacaccggtgcttacccaccttcctccaactgataatcagccactctctctccttccccagccggcygtgggactgagcgagcaccgtgggcacaggctggccactcccgagaagcaggtgtgtgcagggccgacccacatcgctggtcttggaccccgtcccagcgccttgcagctagggtgcatgagtggaccccctcccgacgccgtctactcaccagcgcagttccagcagggattccttcctcccaggcacaacgggcctccagtgaggccaccagagggttcrgagatgccaccaggacacatgtaccggccctacaagtacctgaatcgcgggcaccctgccctgtggaatggcagccatggagccagcagccagagtgcggtgggggcagaggagaaggcacctatggggccggcaccctcgctccagccccgcaccatcggccatatgatggagccccgggccatacggccacctctgcctcccagccagtggactgagcaatcaaactttctacctcacggggtgcctccctcagggtatatcagaccacctgggaaaaccaccagccagaggatgccg

SEQ ID NO: 53397 - DNA, 600 bp, Chicken  19866894304790_3
cagagtgcggtgggggcagaggagaaggcacctatggggccggcaccctcgctccagccccgcaccatcggccatatgatggagccccgggccatacggccacctctgcctcccagccagtggactgagcaatcaaactttctacctcacggggtgcctccctcagggtatatcagaccacctgggaaaaccaccagccagaggatgccgcagccaccagctgctcttttcgggggaccgcctcaggttcaaagagggtgccagggtggggactccatgatggacagcccagagatgatygccatgcagcagctgtcatcccgtgtgtgcccgccaggcgtgccttaccaccctcgccagccgcccccaccgcaccttcccgggccctttccccagctggctcacgctgcctccactggygtgccacccccaaagcctgtcgtggggaatgggagctcgcaggatcagaccatggagccggagagcaaccaaggtaactccccatggcactgaccagaggccacccagcagcttttcatctgtcctcgcttctgccaggggctctggatgtagaggatgcagcctcgtggatccttctag

SEQ ID NO: 53398 - DNA, 557 bp, Chicken  19866894304790_4
tggactgagcaatcaaactttctacctcacggggtgcctccctcagggtatatcagaccacctgggaaaaccaccagccagaggatgccgcagccaccagctgctcttttcgggggaccgcctcaggttcaaagagggtgccagggtggggactccatgatggacagcccagagatgatygccatgcagcagctgtcatcccgtgtgtgcccgccaggcgtgccttaccaccctcgccagccgcccccaccgcaccttcccgggccctttccccagctggctcacgctgcctccactggygtgccacccccaaagcctgtcgtggggaatgggagctcgcaggatcagaccatggagccggagagcaaccaaggtaactccccatggcactgaccagaggccacccagcagcttttcatctgtcctcgcttctgccaggggctctggatgtagaggatgcagcctcgtggatccttctagctgtagagatatctctgttcgttcaggggaagttggactggatgaccttcaaaaggtcccttccaactcaaatgatt

SEQ ID NO: 53399 - DNA, 600 bp, Chicken  19866894304792_1
tctgctacatgcctcacaatatcccttgattttacatcattttaggaccccatattttcttaacattttctcaattaatactaccatgttttaattttaaagtgttttcatgcaagagatgaggtctgcctcttcttacacatcctctacatgccatagaaggaaatatgttagagatcagtgcacactccatgtaacctttgttctcactactcagctgctcaagaagcacgacacttccttatttccactctctcccacctgtgaatcagtttgcagaggatggctcaggaaattctstggcttttctaagatcctttagcagtagaaaggggcctgagaagatagctaacatgattaaataaatagaaaagtctgaatttagggcctgagatgaaagattattttattcacgtttcatattggaacagttttattktggtacatgatttgtgtgagagcatatacgtttcaggagaatctccggacagacttgtgctaaccctcctctaataaggacgtctttggaggaggactggaagagcaaggcttgtgattagttgaaggactgtgccttcaaagatctccttcttataaagc

SEQ ID NO: 53400 - DNA, 600 bp, Chicken  19866894304792_2
acatcctctacatgccatagaaggaaatatgttagagatcagtgcacactccatgtaacctttgttctcactactcagctgctcaagaagcacgacacttccttatttccactctctcccacctgtgaatcagtttgcagaggatggctcaggaaattctstggcttttctaagatcctttagcagtagaaaggggcctgagaagatagctaacatgattaaataaatagaaaagtctgaatttagggcctgagatgaaagattattttattcacgtttcatattggaacagttttattktggtacatgatttgtgtgagagcatatacgtttcaggagaatctccggacagacttgtgctaaccctcctctaataaggacgtctttggaggaggactggaagagcaaggcttgtgattagttgaaggactgtgccttcaaagatctccttcttataaagctcagaacagcaggtttcattgaactgctgaaatcactggggaatacagagcatcacggttctttctgatttcaaagatgactttacttttcaggtacaacccagaattcacactgaaaactctttttatgccttcctag

SEQ ID NO: 53401 - DNA, 600 bp, Chicken  19866894304793_1
gacagaaaagtacacactagtattattcagagtattcgttgtacttactctgagccatcgggtctttggtgacacttcttgcttacagcaagcagacatattgatctataaaagagagaatatcttcataatgtgataattttggtgtaaaatgctgttaacgtagttcagggaaaaacagaaataccatgctatagtaaattctcctcattatctaaggaaaagaacagcaacaagttagttggaagtaaatcagaaagaaaagcccacatctaaaatttctgccacaggaactctaayttgtggtatgaaagtatctcctggtgatgaagttcatatttcttatgaagtatcaatgttattcaactgtgatatagtttagtttttggagggactgaaataaaaagatccaaaatgataaatctgaagagtgtaaagtatatagtaaagtaagaattcattgggatattattcaagccaacctgttcctgcatgatgtttccattttaatacagctccttttttaaatagaaagcaagtttgtcaataaaataaaattgcacaggtttgcttagaaatagcagattgccagaaagttgt

SEQ ID NO: 53402 - DNA, 599 bp, Chicken  19866894304797_1
  misc_feature (1)..(70): n is any nucleotide
nnnnnnnnnnnnnnnnnnnnnnnnnnnnnnnnnnnnnnnnnnnnnnnnnnnnnnnnnnnnnnnnnnnnnntgaagggctggctggcagcagacagtgaaacattaatgatcttacagctgctcaaaggtaaatatttcattagctccaccaagtaccattgtgacaattatgttaagcccatgttcacaggtgtcatcctgcaacttaatgcaacgttgggaccacgtctgtgtgagcagagctaaatccctgtggcacgactggacagttggggtctgtcagctcctaagaaagcacakctgcctttgaatttggacacacacagacatgtgtgcatgtggtgacagcagaaaggtgagagttaaagagcaacatttgtacttctgtgcagaaagcagcactccccaggcagccacaggatgtccctcagtgccaaaggcagggaagcagctcttagcctcaaggttacgaacactgaagaagtccaatcaccggaagaagcaaatacatcaaaatcatggggttctcctacagaaaaggaaccagaactttgctgctggccccttgttcctctggctactaagctgcacaaattaat

SEQ ID NO: 53403 - DNA, 600 bp, Chicken  19866894304809_1
cagatgttggagagaagaaaataaagttaacttcgttgaaacagtgtttataagatgctgatgtcttgttttctctttttctttccaggagctgttggacaaatatttaatagctaacgcaactaacccggagagcaaggtattctacctgaagatgaagggagactacttccgataccttgctgaagttgcctgtggtgatgacagaaaacgtgagtgccttttggtccttaggtctctgtttgctaatgaacttcagttgtgagccatgggggagagaacagtaagtgaactgcacgmatyggtatcttactctgaattgatgtggaagttagcagggtggaaaagaccaggcttgtttctacagkcagagggtaaaagactgaatagacctttaacgcagtgtgcagggaaattttggcaggtgtttttgccatctacccygtacctctggatggctgtctaataatgcttattcagagcttttggggaaaaaaaaggtgtaggtctgggaacgtacttgatgtcgtcatacgtattttttactgaaataacattggtgatgatgagagcagttcttgctgactttttttctttgct

SEQ ID NO: 53404 - DNA, 600 bp, Chicken  19866894304809_2
atgttggagagaagaaaataaagttaacttcgttgaaacagtgtttataagatgctgatgtcttgttttctctttttctttccaggagctgttggacaaatatttaatagctaacgcaactaacccggagagcaaggtattctacctgaagatgaagggagactacttccgataccttgctgaagttgcctgtggtgatgacagaaaacgtgagtgccttttggtccttaggtctctgtttgctaatgaacttcagttgtgagccatgggggagagaacagtaagtgaactgcacgmatyggtatcttactctgaattgatgtggaagttagcagggtggaaaagaccaggcttgtttctacagkcagagggtaaaagactgaatagacctttaacgcagtgtgcagggaaattttggcaggtgtttttgccatctacccygtacctctggatggctgtctaataatgcttattcagagcttttggggaaaaaaaaggtgtaggtctgggaacgtacttgatgtcgtcatacgtattttttactgaaataacattggtgatgatgagagcagttcttgctgactttttttctttgctcca

SEQ ID NO: 53405 - DNA, 600 bp, Chicken  19866894304809_3
ttttctctttttctttccaggagctgttggacaaatatttaatagctaacgcaactaacccggagagcaaggtattctacctgaagatgaagggagactacttccgataccttgctgaagttgcctgtggtgatgacagaaaacgtgagtgccttttggtccttaggtctctgtttgctaatgaacttcagttgtgagccatgggggagagaacagtaagtgaactgcacgmatyggtatcttactctgaattgatgtggaagttagcagggtggaaaagaccaggcttgtttctacagkcagagggtaaaagactgaatagacctttaacgcagtgtgcagggaaattttggcaggtgtttttgccatctacccygtacctctggatggctgtctaataatgcttattcagagcttttggggaaaaaaaaggtgtaggtctgggaacgtacttgatgtcgtcatacgtattttttactgaaataacattggtgatgatgagagcagttcttgctgactttttttctttgctccatgaatgcgttatgctcatctataattctaaccatctgaatgtgaagtagtcttcattgtagcaat

SEQ ID NO: 53406 - DNA, 600 bp, Chicken  19866894304809_4
ctacctgaagatgaagggagactacttccgataccttgctgaagttgcctgtggtgatgacagaaaacgtgagtgccttttggtccttaggtctctgtttgctaatgaacttcagttgtgagccatgggggagagaacagtaagtgaactgcacgmatyggtatcttactctgaattgatgtggaagttagcagggtggaaaagaccaggcttgtttctacagkcagagggtaaaagactgaatagacctttaacgcagtgtgcagggaaattttggcaggtgtttttgccatctacccygtacctctggatggctgtctaataatgcttattcagagcttttggggaaaaaaaaggtgtaggtctgggaacgtacttgatgtcgtcatacgtattttttactgaaataacattggtgatgatgagagcagttcttgctgactttttttctttgctccatgaatgcgttatgctcatctataattctaaccatctgaatgtgaagtagtcttcattgtagcaatctgactaagaatttaaataagtaacaacgttactagttcagtaaccatggagaaaagtgtaagcttttgataggga

SEQ ID NO: 53407 - DNA, 600 bp, Chicken  19866894304812_1
aagacaagccaggaggtaagagaacacatagagcagagcactggaaccagcagttattggctttggctttatttaccacatgagatacaacaaaccactgcgtatttttcatgtgaaaggtgatttatgttattatctgcatttaggatttctgtgaaatcttaataaaacattttgtatatatgtgattgaaaggatgtatttgtagaattcaaagattcctatcagaaatgtgtttcagtttgtagggaaagctacagtttgttcttggtatgtgcaatgtccaggtaatttaatttrattttgctgttaaacatatgttaaagaaatcagaaacttattgcaagaaagtattactgctttgtaagtctttacattatactatttgtgctgaaatgcgattaggttaattaggttaatttgtgtaaatctaaatcatgatttcttcagactgtgatctggaaattcactgtgagtttctaagaaggcttatgggctcagtggagatatttctataatacttctcatttccatctgtaattgttgtactaaagagtagaagcatgacttcaaaaataacgagcgtgtcattccctcgtg

SEQ ID NO: 53408 - DNA, 599 bp, Chicken  19866894304816_1
  misc_feature (1)..(73): n is any nucleotide
nnnnnnnnnnnnnnnnnnnnnnnnnnnnnnnnnnnnnnnnnnnnnnnnnnnnnnnnnnnnnnnnnnnnnnnnnggggagcggaaaaccccctcccctgcccagcagaaaacggggctcccccgggcaccctggcacagcaccctgtttgtcctgatcctgaaaggcaaggcggcgcgggggcacagcccacagccgggatggagctacgctaccacggccgcaacgctccacgaggccgcacagccccgggcggcagcgcagcgccgggccagcccaggagccccgctctgccgccgggyggctttcggggcacacggcccctccgtgctgccgacaacacgaccacgacacacgcacacacacagaccaccrcctcggccgccggccctcctgccgggcacactgccccccctatgggaccgtccccgtccccgggcacgctgrctgctccgctgctcacagcaggaccaggctggggttgcgcagctgctggtagatgtgcaggagcttctccgtgtcctcctcggtcaggggcgagtggtcgcgcagggactgcgcctccttcagcagcatctgcaggaggaaggtggagagtgag

SEQ ID NO: 53409 - DNA, 600 bp, Chicken  19866894304816_2
ggggagcggaaaaccccctcccctgcccagcagaaaacggggctcccccgggcaccctggcacagcaccctgtttgtcctgatcctgaaaggcaaggcggcgcgggggcacagcccacagccgggatggagctacgctaccacggccgcaacgctccacgaggccgcacagccccgggcggcagcgcagcgccgggccagcccaggagccccgctctgccgccgggyggctttcggggcacacggcccctccgtgctgccgacaacacgaccacgacacacgcacacacacagaccaccrcctcggccgccggccctcctgccgggcacactgccccccctatgggaccgtccccgtccccgggcacgctgrctgctccgctgctcacagcaggaccaggctggggttgcgcagctgctggtagatgtgcaggagcttctccgtgtcctcctcggtcaggggcgagtggtcgcgcagggactgcgcctccttcagcagcatctgcaggaggaaggtggagagtgagggtgatgtccatagggagggacccacggggaggggttggggaatggggggctcacggcgtcacctcatggttgg

SEQ ID NO: 53410 - DNA, 599 bp, Chicken  19866894304816_3
tttgtcctgatcctgaaaggcaaggcggcgcgggggcacagcccacagccgggatggagctacgctaccacggccgcaacgctccacgaggccgcacagccccgggcggcagcgcagcgccgggccagcccaggagccccgctctgccgccgggyggctttcggggcacacggcccctccgtgctgccgacaacacgaccacgacacacgcacacacacagaccaccrcctcggccgccggccctcctgccgggcacactgccccccctatgggaccgtccccgtccccgggcacgctgrctgctccgctgctcacagcaggaccaggctggggttgcgcagctgctggtagatgtgcaggagcttctccgtgtcctcctcggtcaggggcgagtggtcgcgcagggactgcgcctccttcagcagcatctgcaggaggaaggtggagagtgagggtgatgtccatagggagggacccacggggaggggttggggaatggggggctcacggcgtcacctcatggttggtctggatctggcgcaaatactgcatgcaggaggtcagggggcccccgagccctgtgccgcctgctccaaca

SEQ ID NO: 53411 - DNA, 600 bp, Chicken  19866894304823_1
caggaagttcaccacagatgctttttaaagacatctatctcatctcagaaaaaatgaaagccagacattcaagatctacttgtttctgaatcaaactgtcatttttgctctgttagtgtctgttatcaagtctggacaagcagttattctgtaggctagctcatacaaccttgaattattaaggaagtccttgagagtttatggtattgcaattcatgtatgtatgtgagttatatagaatcttggcagctagctctgctagtaaatatttaatttacaatccataaagttatttaaacwttgcaaagttatttaataacaccattatttattataatccatgtttagttccacttctatttatgcagaatcctccatggtgcaaaaaaaccaaacaaaaactgaacaaaacaagactgatgtacaaattgttcatgattcagcaggaatcatgttaagttttcaggctgatttagtaagtggattaagaaaaaaaaagtgtatcaatctgcatttatgttttatgactgagaccaaggaactcattgcatctctgcaaacggaaggtagatcccatattactgatgggatggggccaaa

SEQ ID NO: 53412 - DNA, 519 bp, Chicken  19866894304824_1
aatgccttctaaaaaacaaatataattcttcactgtatttatagcaatcattgaaatccaagatacttcctatttctctttagcttaagcaaatgcatttgacttaatatctacttaagtctagctaaacttagaatagttttatggaaacctttaaaatatttaatgaaatatttaattcacttattataaaatcattctgaattttatcacattttagaacaagtagtgtcctagtgagacaaattaaagtgcatttgtatgatccatgagacagggaaagagaaaaaagtaggattstccttctttcacattctccttgattttaaccttcatakagaagcacaagtactataacagtatctatcttagtgatgcattctgaaattttagattcttctgggtgacctcaatgtttacatacgtgactactagtcaagagacctcaaacactgtagtggaattccaacatcacagcctgaaccaatgggtgggctacgtgagtgtacgggtgcctgg

SEQ ID NO: 53413 - DNA, 481 bp, Chicken  19866894304824_2
aatgccttctaaaaaacaaatataattcttcactgtatttatagcaatcattgaaatccaagatacttcctatttctctttagcttaagcaaatgcatttgacttaatatctacttaagtctagctaaacttagaatagttttatggaaacctttaaaatatttaatgaaatatttaattcacttattataaaatcattctgaattttatcacattttagaacaagtagtgtcctagtgagacaaattaaagtgcatttgtatgatccatgagacagggaaagagaaaaaagtaggattkagaagcacaagtactataacagtatctatcttagtgatgcattctgaaattttagattcttctgggtgacctcaatgtttacatacgtgactactagtcaagagacctcaaacactgtagtggaattccaacatcacagcctgaaccaatgggtgggctacgtgagtgtacgggtgcctgg

SEQ ID NO: 53414 - DNA, 599 bp, Chicken  19866894304825_1
  misc_feature (1)..(56): n is any nucleotide
nnnnnnnnnnnnnnnnnnnnnnnnnnnnnnnnnnnnnnnnnnnnnnnnnnnnnnnnttcttctatatttttattctttgcttcaatttcatggttctcaaatacgagttctgtgatctttatcttgtattagcattatgcgatcgcaaaggtgttttgataaataggtccataatagttttctgaaggcaaatactgctctgccctactggtaacgtgaaaactgattttccaaaactccatttggtcagactgctgcaggtaatggcaggttgctcttggctgtcttcatttgcctctygagatrctcctgcccagcaggtgacaggtagatttccagtgttgcagagctgtttcagatagtattgcatgcagttttctcttaataaagttcagttggatcttcttcagcaraactttgttattagtgtgatgtggtgtgaaatgaaggtgaagatcaagttccttttagcccttttatcagattaacatggtttgtttgatcaaatgccacagtaaatcaggaggtgtgtttaaaggtyttgaaaccgctgaacagtaaacgttaaacttgtcttacacaactgttagagggatgga

SEQ ID NO: 53415 - DNA, 599 bp, Chicken  19866894304825_2
  misc_feature (1)..(50): n is any nucleotide
nnnnnnnnnnnnnnnnnnnnnnnnnnnnnnnnnnnnnnnnnnnnnnnnnnttcttctatatttttattctttgcttcaatttcatggttctcaaatacgagttctgtgatctttatcttgtattagcattatgcgatcgcaaaggtgttttgataaataggtccataatagttttctgaaggcaaatactgctctgccctactggtaacgtgaaaactgattttccaaaactccatttggtcagactgctgcaggtaatggcaggttgctcttggctgtcttcatttgcctctygagatrctcctgcccagcaggtgacaggtagatttccagtgttgcagagctgtttcagatagtattgcatgcagttttctcttaataaagttcagttggatcttcttcagcaraactttgttattagtgtgatgtggtgtgaaatgaaggtgaagatcaagttccttttagcccttttatcagattaacatggtttgtttgatcaaatgccacagtaaatcaggaggtgtgtttaaaggtyttgaaaccgctgaacagtaaacgttaaacttgtcttacacaactgttagagggatggacacaga

SEQ ID NO: 53416 - DNA, 600 bp, Chicken  19866894304825_3
gatctttatcttgtattagcattatgcgatcgcaaaggtgttttgataaataggtccataatagttttctgaaggcaaatactgctctgccctactggtaacgtgaaaactgattttccaaaactccatttggtcagactgctgcaggtaatggcaggttgctcttggctgtcttcatttgcctctygagatrctcctgcccagcaggtgacaggtagatttccagtgttgcagagctgtttcagatagtattgcatgcagttttctcttaataaagttcagttggatcttcttcagcaraactttgttattagtgtgatgtggtgtgaaatgaaggtgaagatcaagttccttttagcccttttatcagattaacatggtttgtttgatcaaatgccacagtaaatcaggaggtgtgtttaaaggtyttgaaaccgctgaacagtaaacgttaaacttgtcttacacaactgttagagggatggacacagaattctccagtgcaaattggttttccaatgcagcaaatacatacttagtaaatgaacgtcaagtacagttgttaagagcagrgaaatggcagtaagagggctgcagatg

SEQ ID NO: 53417 - DNA, 600 bp, Chicken  19866894304825_4
tttggtcagactgctgcaggtaatggcaggttgctcttggctgtcttcatttgcctctygagatrctcctgcccagcaggtgacaggtagatttccagtgttgcagagctgtttcagatagtattgcatgcagttttctcttaataaagttcagttggatcttcttcagcaraactttgttattagtgtgatgtggtgtgaaatgaaggtgaagatcaagttccttttagcccttttatcagattaacatggtttgtttgatcaaatgccacagtaaatcaggaggtgtgtttaaaggtyttgaaaccgctgaacagtaaacgttaaacttgtcttacacaactgttagagggatggacacagaattctccagtgcaaattggttttccaatgcagcaaatacatacttagtaaatgaacgtcaagtacagttgttaagagcagrgaaatggcagtaagagggctgcagatggtaggttttcaagcaaccttctgcatttgcagtgttgcaggagggaatcccgtgccatttaggagacccagggatggaaaactatggagtgagtgtgcaaaggaatttatctgtttgtctgatgtctt

SEQ ID NO: 53418 - DNA, 575 bp, Chicken  19866894304825_5
aaagttcagttggatcttcttcagcaraactttgttattagtgtgatgtggtgtgaaatgaaggtgaagatcaagttccttttagcccttttatcagattaacatggtttgtttgatcaaatgccacagtaaatcaggaggtgtgtttaaaggtyttgaaaccgctgaacagtaaacgttaaacttgtcttacacaactgttagagggatggacacagaattctccagtgcaaattggttttccaatgcagcaaatacatacttagtaaatgaacgtcaagtacagttgttaagagcagrgaaatggcagtaagagggctgcagatggtaggttttcaagcaaccttctgcatttgcagtgttgcaggagggaatcccgtgccatttaggagacccagggatggaaaactatggagtgagtgtgcaaaggaatttatctgtttgtctgatgtctttatgcagatccgtcgaaggcgccttgcccggctggcagggggaccatcgtcccagcccagcacaccggtcacatcgccgcagagagagaccccacctgggccacctgcagcagctccgac

SEQ ID NO: 53419 - DNA, 600 bp, Chicken  19866894304832_1
atagcatgtttaaagtaacatatgtgactcctcattttttctgctttccaccacttaagctatactcatttgtaaagatgcatttctagaattaattcattcataattcaaagtgaaaatcttttttcatattctttccagctgtagacttccacctctgaaatacagcccattcatatttaaaataagaagtctcccttctctacgtgttgcctttgtggatgcagtttctcaaatcaattgctattatttttgtatattttttcaattgacataagatcacacctgccttattgatcratacgatactttacgcagcaaatttactttgaaatagctaacaagcaaggaaatacggatatacaagagatactaaacgaatgttctctttctttgttacctattcctatttatctacattcttggttactctctatttcacatttttacacaaaaaataaaataaaataaaataaaataaaataaaataaaataaaacaaaacaaactatgggatttgctgtggctgtttgttttgtttgttggtagtttttctgatattattattgtaaatagagtccattttgagttacatgtatgt

SEQ ID NO: 53420 - DNA, 600 bp, Chicken  19866894304834_1
atttactccttttctctgttatataaagcagaacaccgacattttccctttaaatttagacagcagccacagattaagcttcctaagaaataatcagctttcactggtttaaaattaaccaaaacagcataagaatgtttgttttctctcagctggtggcagcagagctcagaaggtgcccagagcatgtggctctggagcagatgtgtgagaaatgcccagcagcaagctgtctccattgccaaaggcacagtgtctcgtccactcaataagcttttctggcccagcctcctggctgcyggaatgagataggtgaaggctggactggatgggaatggagacagacagatatcatcctgtttgggatggggagaaggttagcaacagtgtgtcctgtgctaccatccatcatcttctacctgctccccagcaactgccccatcaattctcttcttccctctactgtgttaacagcagagctgctcattttggcttgtgattgaaacagactggggattttaagactccactcagtgcagtgagtaaggaagaggtctctactgtcctcctttcctttgcttccttactaactggctggaa

SEQ ID NO: 53421 - DNA, 600 bp, Chicken  19866894304845_1
tttgtaaccaactcaaactccattaggaaagcaatgcaatttccctacgtaacttaatagcagccaggtcaggaggcctttttgttaaataaattcaaaataatcattgaaaacaaacaagcaacaaaagaacaacccaatgcacattcttcacacgatatacaaaacaaataacatcagtaaatccagcagctctgcagtttgtgaatggagtattatctaagaatgggaaccagcacactgggaacatttgcaatagctgacagctgagtaggcccatgtcagtagagccatgtaagycatctacaaacaatcctggcctcayttctygatagctaacaattagaacaacactagttaaaaatgaaaaataataaatagatcagttcttttccacaaaaagtgatcgatggctgctcatagacttggtagtatcatttaaactcagttgccaaacatttcatgtgcaattgtgggaattcctagtgtagcagtgcttaatgttggcactgctagacaaaaccatctagggtttgctcagtttctcttccccttcagtcccctagttttcagctgtaacaactcagttacttccaaacc

SEQ ID NO: 53422 - DNA, 600 bp, Chicken  19866894304845_2
ggaaagcaatgcaatttccctacgtaacttaatagcagccaggtcaggaggcctttttgttaaataaattcaaaataatcattgaaaacaaacaagcaacaaaagaacaacccaatgcacattcttcacacgatatacaaaacaaataacatcagtaaatccagcagctctgcagtttgtgaatggagtattatctaagaatgggaaccagcacactgggaacatttgcaatagctgacagctgagtaggcccatgtcagtagagccatgtaagycatctacaaacaatcctggcctcayttctygatagctaacaattagaacaacactagttaaaaatgaaaaataataaatagatcagttcttttccacaaaaagtgatcgatggctgctcatagacttggtagtatcatttaaactcagttgccaaacatttcatgtgcaattgtgggaattcctagtgtagcagtgcttaatgttggcactgctagacaaaaccatctagggtttgctcagtttctcttccccttcagtcccctagttttcagctgtaacaactcagttacttccaaaccatagattagaagaaagcagctggct

SEQ ID NO: 53423 - DNA, 600 bp, Chicken  19866894304845_3
gcaatgcaatttccctacgtaacttaatagcagccaggtcaggaggcctttttgttaaataaattcaaaataatcattgaaaacaaacaagcaacaaaagaacaacccaatgcacattcttcacacgatatacaaaacaaataacatcagtaaatccagcagctctgcagtttgtgaatggagtattatctaagaatgggaaccagcacactgggaacatttgcaatagctgacagctgagtaggcccatgtcagtagagccatgtaagycatctacaaacaatcctggcctcayttctygatagctaacaattagaacaacactagttaaaaatgaaaaataataaatagatcagttcttttccacaaaaagtgatcgatggctgctcatagacttggtagtatcatttaaactcagttgccaaacatttcatgtgcaattgtgggaattcctagtgtagcagtgcttaatgttggcactgctagacaaaaccatctagggtttgctcagtttctcttccccttcagtcccctagttttcagctgtaacaactcagttacttccaaaccatagattagaagaaagcagctggcttacag

SEQ ID NO: 53424 - DNA, 600 bp, Chicken  19866894304845_4
tctgaacttttaaacaaagatttgatgcaagtacacggcaaggaaaggtagctctgtttttttccaggggcattttgttatttctttacttttgactgacttacctgctctacaatcctcctagcctgacttgtattcaggaaaacacagccactgctttccaaaattcacgaaggatggcacctctggtgatatataccaagttaagctcaactattcacacttagaaagcaatgtcgtactgataaagtctgacgaaatcccactcatttgtgggctggaactagctttaatgcacaraaagaaagcagggtttgctgggtcaagagaaaggctctatggctcaagaagagagtattaagaacatctggtttaacctcccactaggctgatgaaaaaagatgcagaaataactttccaaaaatataatgcaacagaaatagatttacaggtcttctcaaaaaaagcagtactgctgtcaggctcaaaatgatgcagattccatgacatccccaggcaagtcattttgccctaccagaggggaaacacaccacttctgcattcttaactccgtctttcaactaacagcactttcacaac

SEQ ID NO: 53425 - DNA, 600 bp, Chicken  19866894304847_1
ggcttgtcacagacttgtgtttgcaggaggtctgtgctaagggaagtgtaggtttcacatcactgctggggtgctgatttgtgacatctccagtgttgggcgatgccaatggagggcaatgagaagttggggcgcagccctcagctctgctcaaagccacctcgggaaccgatttgggctcttttcaattgggtttgattggattttttttttacagcttagtttgttaattacttaaagaatggatctgctcaataggaaccttttgttggtgactttaagtgcttatttcagtctcgyccrtacttaaggctttcctttacaaatcagatctgccacttcgagcagatgatgttctgcagcaggaaaggagctgcagagctgccaggttgtcctctcacagagatcctcctccatccttgtatgtgctcttaaaaggacatcagacaaattcctgttttattaaatccacattttctaataaatacagcgatttagaggtgcattggattggacaattgtaacaccgctgaattacatacattaatttggttagaaatcagctggcattttcctattgagtcgagatcacggtttgtt

SEQ ID NO: 53426 - DNA, 600 bp, Chicken  19866894304847_2
ttgtcacagacttgtgtttgcaggaggtctgtgctaagggaagtgtaggtttcacatcactgctggggtgctgatttgtgacatctccagtgttgggcgatgccaatggagggcaatgagaagttggggcgcagccctcagctctgctcaaagccacctcgggaaccgatttgggctcttttcaattgggtttgattggattttttttttacagcttagtttgttaattacttaaagaatggatctgctcaataggaaccttttgttggtgactttaagtgcttatttcagtctcgyccrtacttaaggctttcctttacaaatcagatctgccacttcgagcagatgatgttctgcagcaggaaaggagctgcagagctgccaggttgtcctctcacagagatcctcctccatccttgtatgtgctcttaaaaggacatcagacaaattcctgttttattaaatccacattttctaataaatacagcgatttagaggtgcattggattggacaattgtaacaccgctgaattacatacattaatttggttagaaatcagctggcattttcctattgagtcgagatcacggtttgttcca

SEQ ID NO: 53427 - DNA, 600 bp, Chicken  19866894304850_1
ccaaatccagattggattttttctaagtgtcattgtcatctgtgacaacgattaacgtaaacaatattctgtctgttttttgtgttcatcaggatagtctcatgatcaccacttacatggattttttgcttcttgtggatgcgtgcatcttcatagatctctgtgttagttgtttgttcttcctcttgcttggatttcttcatattactgtaggtgaatccaatttcctttaaaaacaaaaacaaacaaacaaacaaaaccctcttcctccagatgcctcttgccaactcctttgcttargaatgggcacaaagcagcactgaagtcaatgcaaagttcctcaactttgtggttgtagcatcaggatcaccacaggaagaagtaagtgaaggaggagctgagtgctttgaacaaggtgtcaggagaagtgtgtgacaaaaaccaacgccagttttccagatctgtagtttggcactccagcagctgctcacatctgcaggaggtgccagggccttatctctgatctgacccagctccacgtgctgcacaaatctgcctgctgccagcttactccacatctgaattctgctcctttctatc

SEQ ID NO: 53428 - DNA, 599 bp, Chicken  19866894304855_1
  misc_feature (1)..(32): n is any nucleotide
nnnnnnnnnnnnnnnnnnnnnnnnnnnnnnnngtcaagctataggcaggaggagaacggaggattaggagattagagtcacagacagaggaatagaggattataggctaaaaccctgcgagtctctgtattgatggttgggacacagccagacactaaagagcattgcaaagcctggtgctgatagcatatccgcttagttcctgtctttgcattccaggcagcttttgatagatgtgtcctcatcagaagccggggtcaggcaggtggggagcaccccagttcccaaagtcagataccwrctgagaccaagtctgcgtgctggctggcattcagcctggaaagcgtcactttggcttacgagattctctgcaatgcttgagtcagattcccatgagaccattagattaaaaaacaaaaaaagcccaaatggaacttgtcccttttcccattagtttctgctgtctccctgatcttggccgcagctccctgttgtgcgtcgctgacctgactctaccccagagaccaacatctgtctgctggaatgggagcccagctgggaggaaggcagagggctggaggaagaccacagcttctggc

SEQ ID NO: 53429 - DNA, 599 bp, Chicken  19866894304855_2
  misc_feature (1)..(31): n is any nucleotide
nnnnnnnnnnnnnnnnnnnnnnnnnnnnnnngtcaagctataggcaggaggagaacggaggattaggagattagagtcacagacagaggaatagaggattataggctaaaaccctgcgagtctctgtattgatggttgggacacagccagacactaaagagcattgcaaagcctggtgctgatagcatatccgcttagttcctgtctttgcattccaggcagcttttgatagatgtgtcctcatcagaagccggggtcaggcaggtggggagcaccccagttcccaaagtcagataccwrctgagaccaagtctgcgtgctggctggcattcagcctggaaagcgtcactttggcttacgagattctctgcaatgcttgagtcagattcccatgagaccattagattaaaaaacaaaaaaagcccaaatggaacttgtcccttttcccattagtttctgctgtctccctgatcttggccgcagctccctgttgtgcgtcgctgacctgactctaccccagagaccaacatctgtctgctggaatgggagcccagctgggaggaaggcagagggctggaggaagaccacagcttctggct

SEQ ID NO: 53430 - DNA, 600 bp, Chicken  19866894304855_3
gcgagtctctgtattgatggttgggacacagccagacactaaagagcattgcaaagcctggtgctgatagcatatccgcttagttcctgtctttgcattccaggcagcttttgatagatgtgtcctcatcagaagccggggtcaggcaggtggggagcaccccagttcccaaagtcagataccwrctgagaccaagtctgcgtgctggctggcattcagcctggaaagcgtcactttggcttacgagattctctgcaatgcttgagtcagattcccatgagaccattagattaaaaaacraaaaaagcccaaatggaacttgtcccttttcccattagtttctgctgtctccctgatcttggccgcagctccctgttgtgcgtcgctgacctgactctaccccagagaccaacatctgtctgctggaatgggagcccagctgggaggaaggcagagggctggaggaagaccacagcttctggctcttatcgcagccatcagctggttccctcccactttgcactaatttggtaccagcatctgccacttttgggaggaaggggacttgctgaagtgagaaataacgtaggatgtgcctgt

SEQ ID NO: 53431 - DNA, 600 bp, Chicken  19866894304861_1
ttcattccctgtttttggaacatacgtgttacagctgagcttcattttgttcaaatgtaaatcttacatttgtatgtagtcacctgactccaggtcctgcagctaaaggaaaatacaaaatatctttagaactgggattaaatagtgaaacagtgaagtgcctctgcacatgtggaataagaacaatcattctgactgagattcagtggcagttcagattacttctgttcctatagcttggggtagggtcactcctagagggattgtgtttcaggactttaacccttttaacctcccttycttgctgctcccagaaagacctctgtgccccagctgggcatagcccaagtgacctcagctggctacacacatttcttaaaaaagatccaatttttgacgactccaaccctcttgtgaatgtgaaaacaaagcatgtattttatctagcaaaatatcaggagagtgacgagctttatctggaaatccttttgacagaaatatcagaaacgagaaaataccacaaaagtaccagaaattaactggaaaattggcttcagcacttgtctagggctggaaataactttatctcatgaagattga

SEQ ID NO: 53432 - DNA, 600 bp, Chicken  19866894304872_1
tcccagctcagtatccactgtacacatgggtcaagttttgatctcccatggagatttttcttctctgacttcaaaattagaagctgagaaccaggcaaaaatcatccattaactctgctgtttgcagtttcttattgcttttcatctgttgcccagcacatgggctactgactattgtaagcctaggactttttgtgtggttttctcaaactgagatggtggcttggaagtggtacatgtaaatcctgacaaatgttatggttcagaatcgatcagtaggccaaggtttgagggaaatgwacctggtctgattgtcgtctctcatacatgttagcaaggttaaaaaaaaacatgtaacaagggttttcagggtcacgcaagctgaacaatttgctcacccagattaagcttaatagcagtgcaggttttgcaacataaaggatgggagaagagagcctctgttacaatttgcatgaagtctttgagtctaatatctgcactaggcttaaggagctgatgttagtggtcctggaggtgaaatctcccctatgtcaaattaagtacaaattctaacccaaacagctgtgcctgtctacactg

SEQ ID NO: 53433 - DNA, 599 bp, Chicken  19866894304880_1
  misc_feature (1)..(130): n is any nucleotide
nnnnnnnnnnnnnnnnnnnnnnnnnnnnnnnnnnnnnnnnnnnnnnnnnnnnnnnnnnnnnnnnnnnnnnnnnnnnnnnnnnnnnnnnnnnnnnnnnnnnnnnnnnnnnnnnnnnnnnnnnnnnnnnnnngagggtgcacacacgcgtgctcccagcgtcacacctcccgacgtgcgctgcctgggtccgcaccttgcatgctccttcttcccgtggagcacacattggagggaaaagggcggcctttgtgcattatatgggagatttaatctctttttttaactgctggaagaatttcytccactttccttggragctgatggcgtgcaatgcagatttatctttgctggagatggctttctttttccttttctttgtttgctgggaattctctccattctgccttgcaatatttgtgaggacrcgtttggctctctctgttttacagcagaggactccagccatttttgccttgtgggttcctgcagcctggtaycctacaggggctgcwcctgtgctggcaccatgtctatctacgtgcgccacattggggtgtccattgtgtgggtactgcccrgtgttccacgggcatcttctt

SEQ ID NO: 53434 - DNA, 599 bp, Chicken  19866894304880_2
  misc_feature (1)..(115): n is any nucleotide
nnnnnnnnnnnnnnnnnnnnnnnnnnnnnnnnnnnnnnnnnnnnnnnnnnnnnnnnnnnnnnnnnnnnnnnnnnnnnnnnnnnnnnnnnnnnnnnnnnnnnnnnnnnnnnnnnnngagggtgcacacacgcgtgctcccagcgtcacacctcccgacgtgcgctgcctgggtccgcaccttgcatgctccttcttcccgtggagcacacattggagggaaaagggcggcctttgtgcattatatgggagatttaatctctttttttaactgctggaagaatttcytccactttccttggragctgatggcgtgcaatgcagatttatctttgctggagatggctttctttttccttttctttgtttgctgggaattctctccattctgccttgcaatatttgtgaggacrcgtttggctctctctgttttacagcagaggactccagccatttttgccttgtgggttcctgcagcctggtaycctacaggggctgcwcctgtgctggcaccatgtctatctacgtgcgccacattggggtgtccattgtgtgggtactgcccrgtgttccacgggcatcttcttcataactttccccct

SEQ ID NO: 53435 - DNA, 599 bp, Chicken  19866894304880_3
  misc_feature (1)..(5): n is any nucleotide
nnnnngagggtgcacacacgcgtgctcccagcgtcacacctcccgacgtgcgctgcctgggtccgcaccttgcatgctccttcttcccgtggagcacacattggagggaaaagggcggcctttgtgcattatatgggagatttaatctctttttttaactgctggaagaatttcytccactttccttggragctgatggcgtgcaatgcagatttatctttgctggagatggctttctttttccttttctttgtttgctgggaattctctccattctgccttgcaatatttgtgaggacrcgtttggctctctctgttttacagcagaggactccagccatttttgccttgtgggttcctgcagcctggtaycctacaggggctgcwcctgtgctggcaccatgtctatctacgtgcgccacattggggtgtccattgtgtgggtactgcccrgtgttccacgggcatcttcttcataactttccccctctctcccacatctcagttcagcaaagggcctgtctatctggatgcaggcaataaacgtctgttctcaccctgacttctgttaatgagatagagacaggtaagcatcacac

SEQ ID NO: 53436 - DNA, 600 bp, Chicken  19866894304880_4
catgctccttcttcccgtggagcacacattggagggaaaagggcggcctttgtgcattatatgggagatttaatctctttttttaactgctggaagaatttcytccactttccttggragctgatggcgtgcaatgcagatttatctttgctggagatggctttctttttccttttctttgtttgctgggaattctctccattctgccttgcaatatttgtgaggacrcgtttggctctctctgttttacagcagaggactccagccatttttgccttgtgggttcctgcagcctggtaycctacaggggctgcwcctgtgctggcaccatgtctatctacgtgcgccacattggggtgtccattgtgtgggtactgcccrgtgttccacgggcatcttcttcataactttccccctctctcccacatctcagttcagcaaagggcctgtctatctggatgcaggcaataaacgtctgttctcaccctgacttctgttaatgagatagagacaggtaagcatcacacataccaactttcctgctctcagcaacatcaaggaaacggtgacaagctattaatggaaagtgatggtctgggt

SEQ ID NO: 53437 - DNA, 600 bp, Chicken  19866894304880_5
cgtggagcacacattggagggaaaagggcggcctttgtgcattatatgggagatttaatctctttttttaactgctggaagaatttcytccactttccttggragctgatggcgtgcaatgcagatttatctttgctggagatggctttctttttccttttctttgtttgctgggaattctctccattctgccttgcaatatttgtgaggacrcgtttggctctctctgttttacagcagaggactccagccatttttgccttgtgggttcctgcagcctggtaycctacaggggctgcwcctgtgctggcaccatgtctatctacgtgcgccacattggggtgtccattgtgtgggtactgcccrgtgttccacgggcatcttcttcataactttccccctctctcccacatctcagttcagcaaagggcctgtctatctggatgcaggcaataaacgtctgttctcaccctgacttctgttaatgagatagagacaggtaagcatcacacataccaactttcctgctctcagcaacatcaaggaaacggtgacaagctattaatggaaagtgatggtctgggtgctaattagtgcttc

SEQ ID NO: 53438 - DNA, 600 bp, Chicken  19866894304880_6
tttaactgctggaagaatttcytccactttccttggragctgatggcgtgcaatgcagatttatctttgctggagatggctttctttttccttttctttgtttgctgggaattctctccattctgccttgcaatatttgtgaggacrcgtttggctctctctgttttacagcagaggactccagccatttttgccttgtgggttcctgcagcctggtaycctacaggggctgcwcctgtgctggcaccatgtctatctacgtgcgccacattggggtgtccattgtgtgggtactgcccrgtgttccacgggcatcttcttcataactttccccctctctcccacatctcagttcagcaaagggcctgtctatctggatgcaggcaataaacgtctgttctcaccctgacttctgttaatgagatagagacaggtaagcatcacacataccaactttcctgctctcagcaacatcaaggaaacggtgacaagctattaatggaaagtgatggtctgggtgctaattagtgcttccttttcaacttttacctccrtgtctccgcgatgcccatcccagcctctcctttctccttgcatccc

SEQ ID NO: 53439 - DNA, 575 bp, Chicken  19866894304880_7
atctacgtgcgccacattggggtgtccattgtgtgggtactgcccrgtgttccacgggcatcttcttcataactttccccctctctcccacatctcagttcagcaaagggcctgtctatctggatgcaggcaataaacgtctgttctcaccctgacttctgttaatgagatagagacaggtaagcatcacacataccaactttcctgctctcagcaacatcaaggaaacggtgacaagctattaatggaaagtgatggtctgggtgctaattagtgcttccttttcaacttttacctccrtgtctccgcgatgcccatcccagcctctcctttctccttgcatccctttgtttccagcacgttcctcgttcactgcacacatcccatctcgaaggggcttctctgttcttttcctaccaattgcttgctgcatctcttcattctctttttgtgccctttttttcccttggtaattgctgcctgtacctcctttctccaaaaaaaaaaaatatatatatatatgagaacaatactgtgggggggggtctgagaccttgggaattgggccatgcaaa

SEQ ID NO: 53440 - DNA, 600 bp, Chicken  19866894304902_1
gcacagtcagtaagacacattagaaaaatctgaatcttgtagtagcatttggtatgacaaacataactgtaggcatgacagctgagcattgatcttgggcagactaatgaattagtcaatacagaactctgattattcagaagtaaaggcgatacagtgccaatcaagtaggcaaacgaaagcaggatcttctaagattaatttgaacacatttatctgtagcatcaacagaaagttctgatgataaagaggttactgctgacttcttaaagcttctgtagataactaatctggctccayacagcatttggatgaagaaaatgggtggtatgaaattagtatgctattattataatgggaaaaatagaatcttgttaagatacaaactgtgctgctggaggatatgttaaagtcacttattctattagtgtgtttgatacagtgttcctgataaacacaagttatttgttcttatctttctggtgcttcaaattatttaataatttgctccagcatcttggtttgttaagctaactcatttgcttcttgatcttattcttaatacttatagtagtgctcttcttgaatgtatcaagatct

SEQ ID NO: 53441 - DNA, 599 bp, Chicken  19866894304903_1
  misc_feature (1)..(58): n is any nucleotide
nnnnnnnnnnnnnnnnnnnnnnnnnnnnnnnnnnnnnnnnnnnnnnnnnnnnnnnnnnacacatgctttgatggctccttcaattactgcaaatacagtcattattctctttttttttcagccctcgggtataggtcttggacttaagtgcaccatttgacttctctatctagtttcacagtatcagaaacagaacatacctgttccacaaaccaaaatgaaatttcaaaacagcagaaaaaaaaaaaaaaagattgaattagcatgacattttgccaactaacactttgccatatgttkcatcttgttctcctatcctttatgcctcagtgcgtattctgcgaatgagctggatatagaactcatcgaggagtaccctgcacagtcagtaagacacattagaaaaatctgaatcttgtagtagcatttggtatgacaaacataactgtaggcatgacagctgagcattgatcttgggcagactaatgaattagtcaatacagaactctgattattcagaagtaaaggcgatacagtgccaatcaagtaggcaaacgaaagcaggatcttctaagattaatttgaacacatttatctgt

SEQ ID NO: 53442 - DNA, 599 bp, Chicken  19866894304915_1
  misc_feature (1)..(136): n is any nucleotide
nnnnnnnnnnnnnnnnnnnnnnnnnnnnnnnnnnnnnnnnnnnnnnnnnnnnnnnnnnnnnnnnnnnnnnnnnnnnnnnnnnnnnnnnnnnnnnnnnnnnnnnnnnnnnnnnnnnnnnnnnnnnnnnnnnnnnnnnccacgaaagacctttcccagtgcttctggggaccattctgggctgtttcacccagggctgcggggtgaaatatcagagaagcccttccaagaaattaccaaatgcaaaatgttctccttgcaccccatcgggtgccacaatgagccctttaactgccttcctcrctgctttcatatagacagacttaggcatccgaaagagaagaaaaccttattttgataaaaataaacaaatgcacaaacgttcctagaactcagcacatcgtttcagaaaggaatctgcccattatcaaaacaattgggaaacaatcctctgttttccttattccccgctgaatgcatcggaaaaaacatctctgcttctgcagttccccgaaacctcgggagttaaaactggtagcaataatgagaagctctccagttttgcagaactactcacccctcgtacagcactgcaattgtgt

SEQ ID NO: 53443 - DNA, 600 bp, Chicken  19866894304915_2
actcagcacatcgtttcagaaaggaatctgcccattatcaaaacaattgggaaacaatcctctgttttccttattccccgctgaatgcatcggaaaaaacatctctgcttctgcagttccccgaaacctcgggagttaaaactggtagcaataatgagaagctctccagttttgcagaactactcacccctcgtacagcactgcaattgtgtaggaaattgccactacagctgtcagcaaaaggccagctgggctcgcatgcctgttttgaaagagaaggaaaagatcaggtgagtacamgggcttatgcaagacctgctttagaaagtgaaatgagacgttattgctccacgagagcacttgctcattaaactgaagtgaacaaaaggtggatctttttgtgtgtgcttaatgttaactgtcttagacagatgttacttggcaaagactcttccccagcctacttcggcaacttctttcaagtctgatccccgcatgtctctgttcagagagtttctgctttgatgctaagtcctgagattataaggctgcttaatagctgagcagctgcttatgtacggccgtggctcccagccagcg

SEQ ID NO: 53444 - DNA, 600 bp, Chicken  19866894304917_1
tgaccttctgagtagtaataggcttcaacaaaacacacccaatgcttaatacagataaaaacattgcagaaactataaagatcactattgttcagaatagattaagttttttgaaacaattctaattttcagttgcaataattattggactcatactatcacaacctcacattgaatggggctaattttgtgcactacttctgttctgaatacaattacataatcgctggtagtctttttaagcagcattttaattacacagacagagataaaagcagaatgcacacatacgcttgaacrtaaatacgtattatgacaatcaggcagatttcatttatgcaaacattaagcacttcacaagaaatgggtggaagcaaagaaagaaggccgatgcatcacataggatgttgcaaccaaaatctatttccaggtccttcaggttcactgcatcgtggagctgactaatactggaaataagacaaccttgggatgaagcacggcaaaattcacaactgctgccagggaggtgctggagtcactgtccctgggggggtgtttcaagaaacgtgtagatgtggtacaaaggaacgtggttcagtg

SEQ ID NO: 53445 - DNA, 600 bp, Chicken  19866894304917_2
ataagacaaccttgggatgaagcacggcaaaattcacaactgctgccagggaggtgctggagtcactgtccctgggggggtgtttcaagaaacgtgtagatgtggtacaaaggaacgtggttcagtgggcaacactggtgttaggtggacagtcggactagatgatcttagaggtcttttccaaccttaatgattctatgattattcaggtctcttccaacctaagccattctgtgattctaggaatatcactgtgattcagtatgggcagctgtgaatgccctgctgtagattttcaayactaacacgaaagcgaagcagttcaaacacagcttctcaaccaytatccttttcatataaacaggaacacagacaaaagcattaaatttgtgaaggatccttcagtcgctctcttaaataatgaatttgtaacagctgattacatttttgaaaacaaaagttacaaataaccaaagtgatgttccacagctactgatcttactagtacatgagcacaaaggggtgtttcaagagcatatctaaatcaatatcagcaattatattgtttagataagtgataaaataataagaaaactttcc

SEQ ID NO: 53446 - DNA, 600 bp, Chicken  19866894304917_3
gccagggaggtgctggagtcactgtccctgggggggtgtttcaagaaacgtgtagatgtggtacaaaggaacgtggttcagtgggcaacactggtgttaggtggacagtcggactagatgatcttagaggtcttttccaaccttaatgattctatgattattcaggtctcttccaacctaagccattctgtgattctaggaatatcactgtgattcagtatgggcagctgtgaatgccctgctgtagattttcaayactaacacgaaagcgaagcagttcaaacacagcttctcaaccaytatccttttcatataaacaggaacacagacaaaagcattaaatttgtgaaggatccttcagtcgctctcttaaataatgaatttgtaacagctgattacatttttgaaaacaaaagttacaaataaccaaagtgatgttccacagctactgatcttactagtacatgagcacaaaggggtgtttcaagagcatatctaaatcaatatcagcaattatattgtttagataagtgataaaataataagaaaactttcctcatcagactgctaaaacattttctatgtttggagcaggtgagc

SEQ ID NO: 53447 - DNA, 600 bp, Chicken  19866894304919_1
gtaaatcctctcttggcaattatctgaagacacctattgagttcaagggaaaacagcagctcaggtgccgtagtgcagaaaccattgtcatgtttatgcaaaacttccttcctacaccacaaaagatgcttgttcctgtctgtgctgtgctgcagctgttgacacagctcagcatatcggctgtcagatgaggagcagcaaggatgaaagatgcacatctccgactcctgtccttgggctcacagggattcttgggggcagaaagagctagaaagtaagtgaacatctgccccaaatccrgcagcatgtcctcttgtcaagggcttttcttatcccttcaatgcggttctgcagggggttgcactgtggcagggagaggccctgctttgctgtcactgtcccatgtcaggatgtgcagccacaaaaaaaaaagaaaaaaaaaaccaacaacagataaatcccaaccagaaacttggaggaggaagaaaggccacttacattttaataatgtccagggcggtacgtgaacaagttccccatgttctgcaggaggaacagaggaagctgtttggttaatgtaactggttcaaaatagaataa

SEQ ID NO: 53448 - DNA, 600 bp, Chicken  19866894304922_1
gtgtttccaccattcacgcttggcttcttctcctgcatttctgactggctgtcactagccacatcccaaggtggggttgtcatggcagccgttctcaacaaagcgcagctcctcaccatgtgactgcaaaggaggaagaggagcacagagacaagtgaggataggtcttagtgctgctgaacactaaatttattcctggcccaaaccctgcagcagaatcaaaccatcctgagcacatcaagaggtgtgtaggtttacatctcccttatgcgtaaacagcttccctgctgctccagcagygtatccagctacatccacaaagtggacagrgaaaacaatctctttccaaatcccttcatcccagccaccttccccacctgtccagtgctcaccatgttcttcatcttcggcagacgtctctgccagcagttgtatatgagccccaatacaatgatgatggcacagatggagccaatgatcaccagtaccacaaagagtttcccataatcactgcgtgtctgattggggtgtgactgacagcttgtggtggttgaatagttctggatgccaatctgaaaggaagcaaggaaagaagtagta

SEQ ID NO: 53449 - DNA, 600 bp, Chicken  19866894304922_2
tcctgcatttctgactggctgtcactagccacatcccaaggtggggttgtcatggcagccgttctcaacaaagcgcagctcctcaccatgtgactgcaaaggaggaagaggagcacagagacaagtgaggataggtcttagtgctgctgaacactaaatttattcctggcccaaaccctgcagcagaatcaaaccatcctgagcacatcaagaggtgtgtaggtttacatctcccttatgcgtaaacagcttccctgctgctccagcagygtatccagctacatccacaaagtggacagrgaaaacaatctctttccaaatcccttcatcccagccaccttccccacctgtccagtgctcaccatgttcttcatcttcggcagacgtctctgccagcagttgtatatgagccccaatacaatgatgatggcacagatggagccaatgatcaccagtaccacaaagagtttcccataatcactgcgtgtctgattggggtgtgactgacagcttgtggtggttgaatagttctggatgccaatctgaaaggaagcaaggaaagaagtagtacactaaatcccctggcctgccatcgggtag

SEQ ID NO: 53450 - DNA, 600 bp, Chicken  19866894304924_1
gaggcaataatgagtaacagaaaataatatcataaatcattctttataagttagaattgtctactatttgctaaaatgtctttcatggtgaatttgcatgctcttacttgttgaatgacaataagaaagcaaagaaggtcactggggacacgataaggtaaaatattgctatgtactactgcactgaacagctaggattgatttacagtgcccagcaatgtcttctacaagttcaagaggtgtggacagtatgaaagtctattgatatagggaatcaatatgaattcccaggattttaaraagttgtcagcttagaaaaacctatacagtcctaaaataaaccagcatacatacatacattattgctgcttcttttattaatatgtaggggtaggttttgctcacaagatggcagtgttggttactacacaccacttcactgcgccttcctccagcaaaacttctattttgctccccagggtggaattccctgaaggactgcatctctgcacctgcttacccacaaggtagatctgacccatcgcactacttgtaagctgccataaacctttacaattaaatatacaacgcctgcctaaa

SEQ ID NO: 53451 - DNA, 600 bp, Chicken  19866894304924_2
taagctgccataaacctttacaattaaatatacaacgcctgcctaaatctgggaacatccaaatttccaaataagttggatacctattttccacctttcattaaattctatgtcaccagaaaacattttttttttccatccttattgtaatgctatcatgtgatggaaagtatagcaaaaatagcggagtggcaaagtctctggctgcagcaaatgaggacaatcccaaatgcagcagccatggatgcagaaatgaaggaaaagagctgcttacctttggaaggcctgaggcatacaggratctcctgcaaactaccctcacctccactgccaacccttaaatgaagtctgggaaggggtccatcctggctccacaccttccggtcactccagtacattacatgcacctgagctcctctgggttggccttgccttcccaccaggtgctcaatcactgcttcaggctgtgacttagcatttctgccacacttacagatggctgttgccctgtaatgagcagggatgatctcaaaactggttggattctgtaaaatttcccttaatagccagaagttctatatgattaacacaagagataat

SEQ ID NO: 53452 - DNA, 600 bp, Chicken  19866894304924_3
ccagccttgcatgggtagttcaatatttactgctaacttcggtggtgagtttcaattaaattaatttctcacctacatgatacctattttggagacaagacagatggatttttgaagggtgggcaagttgtttgaaagctaaggcttctcaccctggtgattaggtgtctgaaaagaagacattcgtgttgtcctttcaactggctatggggacctcggggagcataaagtatttctttttcatggactcaagactgcagatgcccagttttccatggcactctctcccctcccttatcyctcgtgtattttttcttggtcatttcctctccagaaatgattttcaacaggagcaatgtgctcagaatctaagtcaatgtctctgacttggtttttgtctcctctttttcctgccaccgttcttgtcatcaaggctgccagaacatctgctacgccctctccttgtgagaatgccaatggattctgaacttgctttcccttccttctttccacttacagcatctacacaggcagctttagccaaaattgcgcttcagaaactgatttttcaactcccaaacaacctcatctggccataca

SEQ ID NO: 53453 - DNA, 599 bp, Chicken  19866894304928_1
  misc_feature (1)..(220): n is any nucleotide
nnnnnnnnnnnnnnnnnnnnnnnnnnnnnnnnnnnnnnnnnnnnnnnnnnnnnnnnnnnnnnnnnnnnnnnnnnnnnnnnnnnnnnnnnnnnnnnnnnnnnnnnnnnnnnnnnnnnnnnnnnnnnnnnnnnnnnnnnnnnnnnnnnnnnnnnnnnnnnnnnnnnnnnnnnnnnnnnnnnnnnnnnnnnnnnnnnnnnnnnnnnnnnnnnnnnnnnnnnnntcctgtgcttcagttcatggctgtttccctttgttctggccccgcaggctgctgaaaagaggttggccgtgtctccttgrctcccrctcttaagatagttataaacattaagtaggtcacctctcaatcttcttttcccaaggctgaacagacccaggtcgccaagcctctcctcacaggggaaatgcttcaggctctttatcatctttgtggcccttcgctggactgttttgtaggagatccctgtctttcttgtactgaggagcccagacctggatacgggactccagctgaggcctgaccagggcagagtagaggaggaggatcacctcccttgacctgctggccatgttcctttyartgcaccccaggatcccat

SEQ ID NO: 53454 - DNA, 599 bp, Chicken  19866894304928_2
  misc_feature (1)..(214): n is any nucleotide
nnnnnnnnnnnnnnnnnnnnnnnnnnnnnnnnnnnnnnnnnnnnnnnnnnnnnnnnnnnnnnnnnnnnnnnnnnnnnnnnnnnnnnnnnnnnnnnnnnnnnnnnnnnnnnnnnnnnnnnnnnnnnnnnnnnnnnnnnnnnnnnnnnnnnnnnnnnnnnnnnnnnnnnnnnnnnnnnnnnnnnnnnnnnnnnnnnnnnnnnnnnnnnnnnnnnnntcctgtgcttcagttcatggctgtttccctttgttctggccccgcaggctgctgaaaagaggttggccgtgtctccttgrctcccrctcttaagatagttataaacattaagtaggtcacctctcaatcttcttttcccaaggctgaacagacccaggtcgccaagcctctcctcacaggggaaatgcttcaggctctttatcatctttgtggcccttcgctggactgttttgtaggagatccctgtctttcttgtactgaggagcccagacctggatacgggactccagctgaggcctgaccagggcagagtagaggaggaggatcacctcccttgacctgctggccatgttcctttyartgcaccccaggatcccattggcct

SEQ ID NO: 53455 - DNA, 600 bp, Chicken  19866894304928_3
aggttggccgtgtctccttgrctcccrctcttaagatagttataaacattaagtaggtcacctctcaatcttcttttcccaaggctgaacagacccaggtcgccaagcctctcctcacaggggaaatgcttcaggctctttatcatctttgtggcccttcgctggactgttttgtaggagatccctgtctttcttgtactgaggagcccagacctggatacgggactccagctgaggcctgaccagggcagagtagaggaggaggatcacctcccttgacctgctggccatgttcctttyartgcaccccaggatcccattggccttctagcccaccagggyacactgctggttcatggccaacctgttgtccaccaggacccccagggtccttatcctcagagctcctctccagcaggtcattccctgacctgtattgataagttcagttatttttttccagatgcaagacattactcctgcttttgttaaacctcatcttgttgattgttgcccagctctccactcatcccaggtctctctgaatggcagcacrgccttcaggtgtgtcagccactcctcccagctttgtaccattgg

SEQ ID NO: 53456 - DNA, 600 bp, Chicken  19866894304928_4
gttggccgtgtctccttgrctcccrctcttaagatagttataaacattaagtaggtcacctctcaatcttcttttcccaaggctgaacagacccaggtcgccaagcctctcctcacaggggaaatgcttcaggctctttatcatctttgtggcccttcgctggactgttttgtaggagatccctgtctttcttgtactgaggagcccagacctggatacgggactccagctgaggcctgaccagggcagagtagaggaggaggatcacctcccttgacctgctggccatgttcctttyartgcaccccaggatcccattggccttctagcccaccagggyacactgctggttcatggccaacctgttgtccaccaggacccccagggtccttatcctcagagctcctctccagcaggtcattccctgacctgtattgataagttcagttatttttttccagatgcaagacattactcctgcttttgttaaacctcatcttgttgattgttgcccagctctccactcatcccaggtctctctgaatggcagcacrgccttcaggtgtgtcagccactcctcccagctttgtaccattggcg

SEQ ID NO: 53457 - DNA, 600 bp, Chicken  19866894304928_5
taaacattaagtaggtcacctctcaatcttcttttcccaaggctgaacagacccaggtcgccaagcctctcctcacaggggaaatgcttcaggctctttatcatctttgtggcccttcgctggactgttttgtaggagatccctgtctttcttgtactgaggagcccagacctggatacgggactccagctgaggcctgaccagggcagagtagaggaggaggatcacctcccttgacctgctggccatgttcctttyartgcaccccaggatcccattggccttctagcccaccagggyacactgctggttcatggccaacctgttgtccaccaggacccccagggtccttatcctcagagctcctctccagcaggtcattccctgacctgtattgataagttcagttatttttttccagatgcaagacattactcctgcttttgttaaacctcatcttgttgattgttgcccagctctccactcatcccaggtctctctgaatggcagcacrgccttcaggtgtgtcagccactcctcccagctttgtaccattggcgtacttgcagagggtgggcactatcccctcatcaagggtgt

SEQ ID NO: 53458 - DNA, 546 bp, Chicken  19866894304928_6
aggaggaggatcacctcccttgacctgctggccatgttcctttyartgcaccccaggatcccattggccttctagcccaccagggyacactgctggttcatggccaacctgttgtccaccaggacccccagggtccttatcctcagagctcctctccagcaggtcattccctgacctgtattgataagttcagttatttttttccagatgcaagacattactcctgcttttgttaaacctcatcttgttgattgttgcccagctctccactcatcccaggtctctctgaatggcagcacrgccttcaggtgtgtcagccactcctcccagctttgtaccattggcgtacttgcagagggtgggcactatcccctcatcaagggtgtcgatgaagacattgaacgagactggcctcagcacagacccccatgggaacaccactgctcacgggtatccaaccagactctgcatcaccaatcacagccctctgaaactcaactagtcagccagctctccacccacctcaccatctattcatctatcccc

SEQ ID NO: 53459 - DNA, 599 bp, Chicken  19866894304932_1
  misc_feature (1)..(63): n is any nucleotide
nnnnnnnnnnnnnnnnnnnnnnnnnnnnnnnnnnnnnnnnnnnnnnnnnnnnnnnnnnnnnnnaggtgaatggaaaacaagcttctcatcctgccctttcccaaaaccaaacccaaactgaaagcaatcaaccaagcaaaataaaaaaaattgagcaaggatctaaaattgcacaatacagctctaagtcttttttttttcagcttggtgaaaatatagcaaatatttaatttacttgcccccgagcctcgttttcaggcaggtattgaaataaagatgactttttttttgccaaagtcrtatcaaaggtctgccttggccctttctcacagctcatacaaccatgagatgtgcataaagtcttttaaacctcatcaatagctatttaaaaatatatgtctaacaaatcccacaagtaataagtaaatgaattcaaatgctcacactgctcaattaaagctcaggcagagatgggcctgggcagctatggccccagttcaacaaaccacttaagcataggcttaaaacaggctctggatcaattcccagcgaggattaatgcatattcgtaaacgcttcgctccttcagagctcacgga

SEQ ID NO: 53460 - DNA, 599 bp, Chicken  19866894304940_1
  misc_feature (1)..(140): n is any nucleotide
nnnnnnnnnnnnnnnnnnnnnnnnnnnnnnnnnnnnnnnnnnnnnnnnnnnnnnnnnnnnnnnnnnnnnnnnnnnnnnnnnnnnnnnnnnnnnnnnnnnnnnnnnnnnnnnnnnnnnnnnnnnnnnnnnnnnnnnnnnnntaccagtaaaaatcaatgagccaaaagataatgctatgtatttcatgtagttcatacagccagctccacacttcaacacccagcactgcaaacatgtaaagtagaccaagtccagctgttatctgagcagtacattaagggactggtagaggttcactgygatgtgtagacttaacccagaacactagagttaagtctagttgcactcacttgcatgaacacagacttggcagttcctgcaggtgatgagtacgctggttccatcttcctccaagtaaggggttgaaagattgagatcagtgctgcagccagttgtagtaaagcacatttcaggaatcaggggcttggttcggatcttcccatccgcggcacccggagttcctccagagttctgactgctgcctccacactctgcctataaggratgcacatgacatttatgttttacaagcaaagcca

SEQ ID NO: 53461 - DNA, 600 bp, Chicken  19866894304940_2
gagcagtacattaagggactggtagaggttcactgygatgtgtagacttaacccagaacactagagttaagtctagttgcactcacttgcatgaacacagacttggcagttcctgcaggtgatgagtacgctggttccatcttcctccaagtaaggggttgaaagattgagatcagtgctgcagccagttgtagtaaagcacatttcaggaatcaggggcttggttcggatcttcccatccgcggcacccggagttcctccagagttctgactgctgcctccacactctgcctataaggratgcacatgacatttatgttttacaagcaaagccatctcaccttcactcaaccattactccatacataaatctacttttaagaaaaaaggcactgcaagattaaacagctagtagatttggtggaaattaatttgttaaaatcctcagtaaatgcaacatgaacattaaattattagtggctaaatgcattgcatccctctgataaaaaaaagcaacgtgcatggaaaactgcatctcttcccaaggaaaatcctcacagaatcacctaacccacctcacactcaaaggaaaaacacttc

SEQ ID NO: 53462 - DNA, 600 bp, Chicken  19866894304942_1
gaaacgtgctgacagccattttctgttgtgctggccctgtttaataggcactctgtgtcataagtatgggtcaaccctcataaatatgctctcttggcatttcacaactgtctgtgaaggtgttgctcaaccagagtcccggccctgcagccatggtgcgcagaggtgttgaatctcctggatcagatgtgggccctgaggcgatcctgactgcagcagccctgttcaaacaagtgctgatcctgctcccgaattatgatgtcctttctgactgcccttgcagatgtttccaagagctgygttttatttgtgcatcaacaaatgatctgatgtttgctaaggatttgaatccagccattgaagaataataaatgactgtttaggttaagctgaaattttgcagcctgattcagttacagtggtgattcacttcgagttggttcttgcatgattcacaaagagtaggggtgactcaacccacaaatttacttagctcccatgttattttccctctcagtgaaaaaaaaaatggttgtaataaataatcacagcaaactttgacttaccccgaggtaaaataaatgtgtgtgttgaaaggct

SEQ ID NO: 53463 - DNA, 600 bp, Chicken  19866894304948_1
attaataatacttcccacacttcacagaatattttaagaatacattcattaacatttgtagagtgtcggagatgcctaaccgatcccaggggaattaattatacatacaaagaccaaaaatagaattaggaaaataactagctgaagaatattagaactgttacttcattacttatactgtacagtatctaaaccagactaattattgaactttcttttctttcctattgcttgttacagaaccataccaccacaatcctttctatttcctttcaaactaatcctaaactgtagaggtamatcagcaaatcgttcataaaggtgtagtttattatgatgcatttaatttaaaatggggtttcatttagtcttttgcttcctactgacagattaaacattattacccaaagaggaagrttttttctgtgtggtccaccccaggataaaagcctactgctgctacaaagaaagagcagggcgaggcatggggtagcaaacacgtcatttgaattcctttgtgcacagacctaacaagccaagcctcctccctccagcccagtgaacatgtgacaccgttgttttgatgcttatgcccttgct

SEQ ID NO: 53464 - DNA, 600 bp, Chicken  19866894304948_2
aaatagaattaggaaaataactagctgaagaatattagaactgttacttcattacttatactgtacagtatctaaaccagactaattattgaactttcttttctttcctattgcttgttacagaaccataccaccacaatcctttctatttcctttcaaactaatcctaaactgtagaggtamatcagcaaatcgttcataaaggtgtagtttattatgatgcatttaatttaaaatggggtttcatttagtcttttgcttcctactgacagattaaacattattacccaaagaggaagrttttttctgtgtggtccaccccaggataaaagcctactgctgctacaaagaaagagcagggcgaggcatggggtagcaaacacgtcatttgaattcctttgtgcacagacctaacaagccaagcctcctccctccagcccagtgaacatgtgacaccgttgttttgatgcttatgcccttgctgaaaattcaaggaagaaaagctctagctaatatttatttttaagtcagtgtataggtggttgtgtttttacagctgaaccgacagaaattctgtgctaggactagaactgataacgt

SEQ ID NO: 53465 - DNA, 599 bp, Chicken  19866894304950_1
  misc_feature (1)..(61): n is any nucleotide
nnnnnnnnnnnnnnnnnnnnnnnnnnnnnnnnnnnnnnnnnnnnnnnnnnnnnnnnnnnnnttttcacattttctgctgagggtgtaattattccaaagcagtctgtttttttggcccaggtatattgcctgatatcgtaatatatcataatatatcataatatatcataatatgtataatatcacagtagtaatatcacataagaacatacttcccttcacaagccctacatcttgcagagatttcgaatgcaattctaaaggtgtaagaacaatttattctaattcatcactaagaayattattaagttgaggcactgattctacaaatctattggtatgctttaatgaataatttcattggctaaaactgtgtattcatagaggagacaaactttttcagtacttattgtagtttgtgtgttaatggaaagcatgtgctcagttaggtctttgtaattaatgacttcccagtcgctgtctagagtaacatctctttgcaaatgttgtgttgtgcattacaracagactgtttcaaactgtgagtcaatacaaagttaagtaatgcattcagtgaaatagggcattcctactgaaaa

SEQ ID NO: 53466 - DNA, 600 bp, Chicken  19866894304950_2
gccctacatcttgcagagatttcgaatgcaattctaaaggtgtaagaacaatttattctaattcatcactaagaayattattaagttgaggcactgattctacaaatctattggtatgctttaatgaataatttcattggctaaaactgtgtattcatagaggagacaaactttttcagtacttattgtagtttgtgtgttaatggaaagcatgtgctcagttaggtctttgtaattaatgacttcccagtcgctgtctagagtaacatctctttgcaaatgttgtgttgtgcattacaracagactgtttcaaactgtgagtcaatacaaagttaagtaatgcattcagtgaaatagggcattcctactgaaaaatatccatctctgaggagagcccctcctgcttctgtgcagttgatttccttcatagcttaagtgactgttttcatctcctcagtggaaacatttgggatgaagatttgcattgggaatggtaacacctttttgactgcagtagayaatgtagtcagtgtcacaccgaaatgaaggtgctgtttttcagcattccagaaattaccttgtaactgtcccagttcctg

SEQ ID NO: 53467 - DNA, 600 bp, Chicken  19866894304950_3
gttaggtctttgtaattaatgacttcccagtcgctgtctagagtaacatctctttgcaaatgttgtgttgtgcattacaracagactgtttcaaactgtgagtcaatacaaagttaagtaatgcattcagtgaaatagggcattcctactgaaaaatatccatctctgaggagagcccctcctgcttctgtgcagttgatttccttcatagcttaagtgactgttttcatctcctcagtggaaacatttgggatgaagatttgcattgggaatggtaacacctttttgactgcagtagayaatgtagtcagtgtcacaccgaaatgaaggtgctgtttttcagcattccagaaattaccttgtaactgtcccagttcctgaaaaagttgacagatccatctgttctcttctgaataactgcccatcctccggggtctaagctgttctcacaccatagctgcattggttcattgctgttttcagctttgatcatataaatcccactgttggaatacccagcgtctttggcgtgttggcagtctttgaacggacctttttggagagaaatgctgtaagcgttcgaggttggctgtgcactgc

SEQ ID NO: 53468 - DNA, 599 bp, Chicken  19866894304955_1
  misc_feature (1)..(23): n is any nucleotide
nnnnnnnnnnnnnnnnnnnnnnncccttggctagctgggggaaaaaggatgtggaatgggacaggttggaactcagagtatcccttggccaactaggaggacagagaacttggccatgggatgtaggatgggacactttggtacctaatgtgtcccttggccagttgtagtgacagggaagtagaacatggggcatgggatcggatagttgacaacccagcatgtcccttggctggctgggggataagatgctgggatgtgggatggctggaacacaaggaactgggacatgggatgtgrgaggggatattttggtacccactgtgtcctttgtggggacagagaactagggcatgggacatgggatgggacaggctggtatccagcatgtccttggccaactgaagagatagagaaatatgacatggggtatgggatgggacaggtgtgacccttgtccagctggcaagatgaagaatctgggacatggggatgggagagtttggtacccaytgaaccccaagtggtgggactcttggaagacccatggccccttgcagctgagagcaaagagcatcccatactgggaatgtcccaca

SEQ ID NO: 53469 - DNA, 600 bp, Chicken  19866894304955_2
tcccttggccagttgtagtgacagggaagtagaacatggggcatgggatcggatagttgacaacccagcatgtcccttggctggctgggggataagatgctgggatgtgggatggctggaacacaaggaactgggacatgggatgtgrgaggggatattttggtacccactgtgtcctttgtggggacagagaactagggcatgggacatgggatgggacaggctggtatccagcatgtccttggccaactgaagagatagagaaatatgacatggggtatgggatgggacaggtgtgarccttgtccagctggcaagatgaagaatctgggacatggggatgggagagtttggtacccaytgaaccccaagtggtgggactcttggaagacccatggccccttgcagctgagagcaaagagcatcccatactgggaatgtcccacactgggcactgccacccactcctgacctcaggagagggatggatggggacagaggaagccaccatctgtgggctctcccttggcagcagcgcagctctccctgaattgccgcctgggtcttttcatctcatctcttttggttcaggcttattat

SEQ ID NO: 53470 - DNA, 552 bp, Chicken  19866894304955_3
aacccagcatgtcccttggctggctgggggataagatgctgggatgtgggatggctggaacacaaggaactgggacatgggatgtgrgaggggatattttggtacccactgtgtcctttgtggggacagagaactagggcatgggacatgggatgggacaggctggtatccagcatgtccttggccaactgaagagatagagaaatatgacatggggtatgggatgggacaggtgtgacccttgtccagctggcaagatgaagaatctgggacatggggatgggagagtttggtacccaytgaaccccaagtggtgggactcttggaagacccatggccccttgcagctgagagcaaagagcatcccatactgggaatgtcccacactgggcactgccacccactcctgacctcaggagagggatggatggggacagaggaagccaccatctgtgggctctcccttggcagcagcgcagctctccctgaattgccgcctgggtcttttcatctcatctcttttggttcaggcttattatgtaaatagctgat

SEQ ID NO: 53471 - DNA, 600 bp, Chicken  19866894304956_1
acttggtgtccaccaggttcctggacccatctctgtaaagctgctttccagccaaccgagtgaacttcccaggaatgtgaatccaaattctatttagaacaagatacatcttcaaggtatcagacctgtaaggctccaaagaccttctaacactgttgcaagaaacaaagtgcacaaaaaggtatagctttttaaatttaaaaataatttcatctcattaaaagggtaatacagttgaaaatattgtaattttaccaatggaacagaaacagtattcttctcatgtctccttgcctatcwtgtctccttgcctatccacagctggctaagattaaaatctcagtttaagattgactgcatttaatcacggccatggcttacaaccataatgcttgattccagatcttcacttttcacaactcctagttagatagcaactgcattgagaaatggcttttatcttctttagccagccagattgttctgtagctctttcctgaatgtgatctacttgtagtaactaagtattttgatccaaagtagaatattagtgtgtgtgtagtaaatatcataatagcaagaatgtgaagaccgtttagt

SEQ ID NO: 53472 - DNA, 599 bp, Chicken  19866894304961_1
  misc_feature (1)..(74): n is any nucleotide
nnnnnnnnnnnnnnnnnnnnnnnnnnnnnnnnnnnnnnnnnnnnnnnnnnnnnnnnnnnnnnnnnnnnnnnnnntcactgccaatatttgcatagtcatctgacaattacacagaaggcctatgaatctctaggacaaattatgtctctagaaatgtattctgaaatgcctactcattaggactagcacattcgttgttcattttgggatgtgtttctctttgtcatccagcgaagggccagaagttcttcattgtggccatacatcacaaactattttgaaagaaaagctgcatttgcratarcttcaagtttctgaaattaaaagaaaaaaaaaaggctaacgtttctaaggtgatctgtaatgccaacttatatttggtaaagcataaacaaaaccatagtgacagatgggtgctcaggaagctgatggttctccaagtcttatcttttgcttcctgttgcagcacagcggtgttgacatcatgttcctgcacatgcaatatgcaaaaagcttgggactcgtaattcagcagttgcataaataaacaattttgctcgttgctattgattttctgctgttgtgcctttctccgatag

SEQ ID NO: 53473 - DNA, 599 bp, Chicken  19866894304961_2
  misc_feature (1)..(70): n is any nucleotide
nnnnnnnnnnnnnnnnnnnnnnnnnnnnnnnnnnnnnnnnnnnnnnnnnnnnnnnnnnnnnnnnnnnnnntcactgccaatatttgcatagtcatctgacaattacacagaaggcctatgaatctctaggacaaattatgtctctagaaatgtattctgaaatgcctactcattaggactagcacattcgttgttcattttgggatgtgtttctctttgtcatccagcgaagggccagaagttcttcattgtggccatacatcacaaactattttgaaagaaaagctgcatttgcratarcttcaagtttctgaaattaaaagaaaaaaaaaaggctaacgtttctaaggtgatctgtaatgccaacttatatttggtaaagcataaacaaaaccatagtgacagatgggtgctcaggaagctgatggttctccaagtcttatcttttgcttcctgttgcagcacagcggtgttgacatcatgttcctgcacatgcaatatgcaaaaagcttgggactcgtaattcagcagttgcataaataaacaattttgctcgttgctattgattttctgctgttgtgcctttctccgatagagct

SEQ ID NO: 53474 - DNA, 600 bp, Chicken  19866894304979_1
agctactgggggctccagtccaaactcccagcacagcctccctgcaagcaaatgaactcccagaaaacccccttagacatggcctggttcacgtgttaaacacagaactcagtcaaacaactgggagagagaagctggagcccaagctggagctggctcagcagcaaggtctgggcactgcagggatacatctgctgggatcccgtgtgtccttcccctcccacctcacccctgcccattcattctcacttacacagaaagctttcatcaaagaaaggtcaaatcactcagaagttcagwtgggaaggatttaagaagagaattatttatacttcgatgtcaggtctacagtagaagccaccaagttcacagaaccatagaaccctttgagttagaagggacctcaagggctatcttagtccaactcccctgcaatgaaagttctcctgtctgcacacaaacccaaccttccaacccactgctatcgatgcaatgcacagcctacagtgagatcctgagcttctcattttagatctcaacacacaggaaaacaagccctactacagcctgcagaaagtgagttagagggcattagaatgg

SEQ ID NO: 53475 - DNA, 600 bp, Chicken  19866894304991_1
cgttgacccaaatggcagccccagagttacttctgagcttactgctttcctgatgagaactcaggcccaggcagagtgctccagccacgcagagggagctgggcaaaggaaaagctattgtaacgctcctattggtaagacacacaacacattattggtgcccaaaggctttcatggtagcttctgtctcacctccctctggtcctgaaactcctcaactcttcttgtactggatagatattacatggtacttacatctcgaagacagcacagatacaaactcaggaaggtcttgcatawgtagcaaattattacacaaattcctaggttttctagacactactttcagttttgagctagccactttttttttttttaagatcaatcccatatttgattgtaagggaaggaatctgtgatcaagcagcaggcaacagatgtttgatgatggtcgaggaacactgaaaactaagttgcactgaggacgtttcagagttaagaatggagaacaccgattcctcatccatatctctagacaggaggagaatgatggatattgcttgaaattgcaccgttcaaagatatgtttataaatgaagg

SEQ ID NO: 53476 - DNA, 384 bp, Chicken  19866894304992_1
attctgaaatgttcatctggacaaaaagcaaatttatctattgcaggaaggagcaggaaggaaattgtaagatgtaaaatttttatatgcatatcattatatccatttttctactgcagtgaggaaccattggtgtataatcagtgtggattatctcagcaacctcttagatacttggtaagctgcttcatagatgaatgatctccatctgggcagcagttaaataacttggtaatgactctaatcctactgccaaaagattatgcgaatactattcatagtgagccttatatgaaaaarcatttcttgaacaagcagagacctctttctttcaaacagtagtcaatggttcttattaaaaacatgtatttcaggatactttta

SEQ ID NO: 53477 - DNA, 600 bp, Chicken  19866894304999_1
ctgggatggcagcagggctgtgatggcaatagggctgggatggcattggggcatttctcaccatctccattgacatcgattttgttgaagacgcggttggtgaactcctctgcgctcgtctcatggtcgccaccattgatggcacggatggcctggaaggggagagcgggataggaaaacacagcagggatcctcaatcctgatagctggccctgaggggaactgggatggggaaggagcaggtcgggactgagagctgccccacgttgtgttgggtggaatagaagcaccgctgggagrgcagagttgggatctggggtgaaaccaccccgagttggccagctgtggggcagagtgggggtggaagccaacatctgtgctgcctctgtgctgagcaatgcagcatcctgagagctgctgggctaatgggggtgtccctctggacagccaagggagggttggcatggctgggggtggagggagatgggacaaagagcagtgccaggatctggcaggttaaagtagaacgtggtgtaacagcttgaacggggtaagaagggggaaatgggggaaaacaaggaaaaacggggggggaatggg

SEQ ID NO: 53478 - DNA, 448 bp, Chicken  19866894305000_1
ataaaataaaataaaataaagtaaaaaagtaccttcattataacttgctttcagtgatttctgtacttcagaagaggcatatttaggaataaatggtccattttaagtttttacgtaaagttcatcatggttattagttaaggtaacaacaaaatattatgatgtataccttaatttctggtcattggtattcttggaggtttggtatttttagttattaggtttgaatggaaagggaatagaaaaatgttactgtgtagtagtaaatgttaatatatgtgcaagtatgaactagaacayagatgtgttgcacttctatttccaaataaataaagacttcaactgaattatttaaaaagacctaggtgaatattcagaaatccaagtttgaaagttggatggatatcttgactcctttgcagttttctatatgcttacttttaatttt

SEQ ID NO: 53479 - DNA, 600 bp, Chicken  19866894305001_1
agttgtctaggctcactgctgctacgcaacatcgctctaccaaaaagcagggaatcagatcctcgcagtgaagatctaacctacataccagaagactgcaggtgatggccacagctcacatcactgacctgttgtccttcatcatagatgctaatcatctgatcagttaaaatgagtgactgcactttgattttataaaaccacttttatcctacctgcaggtgagagcaaacccatggccacgtcactcccagcaatcctcccctacccaacattcccagggtagaacacaccaaatcrcatttcattcttccaaaaccctttcagctttgtttcctgctaccacatttcagatgtagatacctatcctgaggttattctactgcaccagaataattttctgatttgaaagcactgaagggcatagtgaattttttagtggcctccacgatgagtaataatgccattgcaggagactggaatacttaattcttccacctagaacagccaagcatggaatagatgtgactgtgtgtacacacacacagcagagaggatgcaggaaagaaggagaagaggtagggaagctaataaaaaaga

SEQ ID NO: 53480 - DNA, 600 bp, Chicken  19866894305024_1
atgtgatacactgtatgtcatttctgccaagatcagataagaaactaaccacagcaaaatctagatggggtttaatgtcttaggcatttttgctcatctctaagtgaaaaaataaaaagaccatgtaactccaaataatgtattttaatatgtgaatcgtttaggataaatcataaatgtgtttgagtttcttaaacttgaaaccaaaacagtgaaacttacaccactgtagcacatagaaccctttttactaatttacttttccattttatatcttcctactttttcaaatttaaaagsagtttatcaacctaattttcccattaaactcaagtattgtctcaatataytttatgcatccagcatcactagtcttaaaaggatgctgtcattattaactacactttagtagtggagaaactgaggcatcagcatatgaagtgataaatccaaaagatcaactcgtcaataaaagaagaaacaattaagtccagaagcaaccagctggtagtgcacttttccctgcaaacaatctcatgtaggtaatcaaatataataaactgcaatagcttaatccgtagtagtaaatgtagtagtatg

SEQ ID NO: 53481 - DNA, 600 bp, Chicken  19866894305024_2
acagcaaaatctagatggggtttaatgtcttaggcatttttgctcatctctaagtgaaaaaataaaaagaccatgtaactccaaataatgtattttaatatgtgaatcgtttaggataaatcataaatgtgtttgagtttcttaaacttgaaaccaaaacagtgaaacttacaccactgtagcacatagaaccctttttactaatttacttttccattttatatcttcctactttttcaaatttaaaagsagtttatcaacctaattttcccattaaactcaagtattgtctcaatataytttatgcatccagcatcactagtcttaaaaggatgctgtcattattaactacactttagtagtggagaaactgaggcatcagcatatgaagtgataaatccaaaagatcaactcgtcaataaaagaagaaacaattaagtccagaagcaaccagctggtagtgcacttttccctgcaaacaatctcatgtaggtaatcaaatataataaactgcaatagcttaatccgtagtagtaaatgtagtagtatgtcacaaccattttgggcatagatgagaatggcaaagcactctcattttgc

SEQ ID NO: 53482 - DNA, 600 bp, Chicken  19866894305029_1
tacagattagaaccaagcataagatcgtagaatgatttgggttggaagggacctgaaaaccacctagttcaaaccccctgctattgcagggacatagatcaggatgtccaagcgttgtccaacctggtcttgaacacttctggggataggacacctgtaacttctctgtgcaacctgttccagtgattcatcaccctcaaagtggagaatttcttcctaacgtctaatctaaatctacactcttttattttaaagacattatccctcctcctgtcactgcacttcttgataaagagctcmtttccagctttcttgtaggcctactttctgtactggaaagccactagaaggtctcaggtctccctcaattgttctttttgaaatttctgatccaaatttgacactgatatctttcaacaccactgcaaccaaatttgctttatataacaaaccctttacccaccagtcaagacagctgcctcccatttgaaccaaagtagttatttacaactgtctagcaacagtgacagcttcatactggataaaagagaaatatatactatattcaactgaaatgcagagggggaattcaacagcagt

SEQ ID NO: 53483 - DNA, 599 bp, Chicken  19866894305041_1
  misc_feature (1)..(74): n is any nucleotide
nnnnnnnnnnnnnnnnnnnnnnnnnnnnnnnnnnnnnnnnnnnnnnnnnnnnnnnnnnnnnnnnnnnnnnnnnnttggaggtgcaagtgcaggctgggaaagaagaccagtgtggatgaagagggaacttagagactccaggagagaaagagtttaccttctgtggaagaagggatgggcaactctgagagagtacagagaacttattaggacatgcagggagaaaatcagaaaggcagaagctgagcttgaactcaacctggccactgtaataaaagagaacaaaaaacatttttacaratattttaacagtaagaggagggctaaggagaatctttatcctttactggatgcagcagggaatgtgagcactgaagataaggaaaaggctgaggttctcaatgccttctttacatctgtctttaaaagtcagaccaattatcctcagggtactctacccctgacctggaagtctcagatggagagaagaataaaccccccacgattcaggtggaaacagtttgagacctactactccacctgggctgtcacaagtccatggggccagaggggatctacccaagggtgctgagggtgct

SEQ ID NO: 53484 - DNA, 600 bp, Chicken  19866894305043_1
tcagcaactttcttcctgtcggcctaaattatcagtggaggataataatcaggagggtcaaatcaaaataggaagtttcctagaaatatccttggcctgggccccaggtaggtggcacacttttctacaggtgggatctggctgacatataaggtcctttgttcctcccggaagggagtggcctatgacaatctctttcctttttggtggaggcattcctgatgtgtggagtccaccatctcactctagacaaccttgtgggtggaccttctgcagcatcttccctcatctcatcgttaytgatactctgcaacaagttctgttccattggcactgcctgttcatgtcataacttgagtagatttccataaagatgaagttgtctggtttgtatttgtatgtacaaaccttgtatacctgaaattttaatggtgttytacatccctttttgacttgactgaaaaatacaacattctgtattcttaacaaatgctcatgttgcctgcagatgaaacataggatgatattgcagtcagctgaatggatctacttcttgtctctgtttttatcttggccttaraatcatagaatcatagaatt

SEQ ID NO: 53485 - DNA, 600 bp, Chicken  19866894305043_2
ctggctgacatataaggtcctttgttcctcccggaagggagtggcctatgacaatctctttcctttttggtggaggcattcctgatgtgtggagtccaccatctcactctagacaaccttgtgggtggaccttctgcagcatcttccctcatctcatcgttaytgatactctgcaacaagttctgttccattggcactgcctgttcatgtcataacttgagtagatttccataaagatgaagttgtctggtttgtatttgtatgtacaaaccttgtatacctgaaattttaatggtgttytacatccctttttgacttgactgaaaaatacaacattctgtattcttaacaaatgctcatgttgcctgcagatgaaacataggatgatattgcagtcagctgaatggatctacttcttgtctctgtttttatcttggccttaraatcatagaatcatagaattgctaaggttggaaaagacccacaggatcatccagtccaaccattcaccctccaccaatggttctcgctaaaccatgtccctcagcacaacatccaaatgctctttgaacaccaccaggcttggtgactccaccacct

SEQ ID NO: 53486 - DNA, 600 bp, Chicken  19866894305043_3
ttccctcatctcatcgttaytgatactctgcaacaagttctgttccattggcactgcctgttcatgtcataacttgagtagatttccataaagatgaagttgtctggtttgtatttgtatgtacaaaccttgtatacctgaaattttaatggtgttytacatccctttttgacttgactgaaaaatacaacattctgtattcttaacaaatgctcatgttgcctgcagatgaaacataggatgatattgcagtcagctgaatggatctacttcttgtctctgtttttatcttggccttaraatcatagaatcatagaattgctaaggttggaaaagacccacaggatcatccagtccaaccattcaccctccaccaatggttctcgctaaaccatgtccctcagcacaacatccaaatgctctttgaacaccaccaggcttggtgactccaccacctctctgggcagcctattccagtgcctgaccaccctttcagagaagtagtatttcctaatgtccagcctgaatcaaaataaaataatttgtattaaaataatttgtagatagccaaggctctgacatttaattaaagaagactca

SEQ ID NO: 53487 - DNA, 600 bp, Chicken  19866894305047_1
tgggcagggctgctcatgtaccacccatgccttggaaagtcattgcacctagtggatggatgcacacctaaaccatcctgcttgttgagatggctttgctcttggagataaacagagcccaggagccctccgttatgatgaactaggcattcctcttccatcattatctccttacataagcagaattgtttatttcagattggctcgtgcaatcttgtgctttggttcaaagaaccaccaccgagagcactacaagatgacttgatctgaaatctcacacaccagggaatctcccttttytcctccctttccccatgctgagcccattggtttgtgtgctgaagtccttctgcccatgggacgccccacgtccccacatggaggcattcacaatgcagagcctgccacttcccttggtagcaagcaaaccaaagcggtttagtcaaaacaaatctatctccccagttatcaagcctggtctgggctgttgggaattattagatctgattagaaaaggcagaaaggttttctacttgcatttcattaaaaatcctgactctgacacattcaggtttcctattcccacattccctccattct

SEQ ID NO: 53488 - DNA, 600 bp, Chicken  19866894305052_1
cagttccagctttacataatgccagtgatggaagaatgataatttcttttggggaagctgtgatacacagtatggttttggaggtcaaggagttgcagtttcttactaagggaattggacaatctctcttggttgctgcaggctacgtgagagttcttaagtttgagtggcatgcacatggtgcgaccattactgtcattgtctatggactttctagtatgtgtctgccttgatgcacacttgcttcatgtatgtgtggccaactttgattcattttatctgcattgtaccaaagaaaaswtgcgtgctatgaacagttccattcatagtatgaatgccttagtacaaaagtattcagtaaatatatctaccctagcctttctaaagagttattttcatacgacatattagtctactaaatattatttaatacaagtgctgacttaatgtaactatttacttattttgctgacaatggtttatttataggcttttatttacaagcaccgtcctcattctcagatgcaatccattgagacactttgcagtgctgcactgttgcrtgatatttcatctaacgttactaacaatttggaaagt

SEQ ID NO: 53489 - DNA, 600 bp, Chicken  19866894305052_2
agttccagctttacataatgccagtgatggaagaatgataatttcttttggggaagctgtgatacacagtatggttttggaggtcaaggagttgcagtttcttactaagggaattggacaatctctcttggttgctgcaggctacgtgagagttcttaagtttgagtggcatgcacatggtgcgaccattactgtcattgtctatggactttctagtatgtgtctgccttgatgcacacttgcttcatgtatgtgtggccaactttgattcattttatctgcattgtaccaaagaaaaswtgcgtgctatgaacagttccattcatagtatgaatgccttagtacaaaagtattcagtaaatatatctaccctagcctttctaaagagttattttcatacgacatattagtctactaaatattatttaatacaagtgctgacttaatgtaactatttacttattttgctgacaatggtttatttataggcttttatttacaagcaccgtcctcattctcagatgcaatccattgagacactttgcagtgctgcactgttgcrtgatatttcatctaacgttactaacaatttggaaagta

SEQ ID NO: 53490 - DNA, 600 bp, Chicken  19866894305052_3
ctttgattcattttatctgcattgtaccaaagaaaaswtgcgtgctatgaacagttccattcatagtatgaatgccttagtacaaaagtattcagtaaatatatctaccctagcctttctaaagagttattttcatacgacatattagtctactaaatattatttaatacaagtgctgacttaatgtaactatttacttattttgctgacaatggtttatttataggcttttatttacaagcaccgtcctcattctcagatgcaatccattgagacactttgcagtgctgcactgttgcrtgatatttcatctaacgttactaacaatttggaaagtacctacaacttcttgtcgcttgtgagtggtgttcagttacagcagaggttaaactttacgcggttaacttcaagagttttgggttaaaacaactttcaaatgtttttttgtattttgagtagccatagtaacaaatgggaaacattctccaggggtgcagttttctaaagtggttttgtgggactttttaaaaatgaaatactaagttgacagaaataaaatacttttggttttgctaaagtgttgctgttgttcttcctctc

SEQ ID NO: 53491 - DNA, 600 bp, Chicken  19866894305055_1
tgtgtgctgacattattaggatgagacagaaaacttgtatacgtctcagctctatgcaggctaagggttgctaggtaataataactcgattcactggggccctgacgcggtacctctgttcacttcagctgtctgttgtccctgatgagttgaaccattagccccaaatctgctgagtttggggatccaggaaaggatgcactttaagccactgaggacttttcttggggatttggctcaatgctgtgagaaaataattctctgtgtgcttgagaatggcggaggggtttgggaaatgcrtgccatgttatatcttcaggctaaaggcagtcctggaagtgtactgccagagtcaggtgttctttagttctggtgcaaatggttacaaagaattgcagtaaaagataagggttgcaaaaggtgatgacttcttatggtacacccctatcaaggcccattgcatttctcacttaggagtgatttgtgtggagcgtcatttcttcatacagtgtagtttatgaaggcgaacagctcacattttaacaaatctctgacatttttgaaggcaaaacaatagcactggagcagatcatcacagtg

SEQ ID NO: 53492 - DNA, 600 bp, Chicken  19866894305060_1
gtcagaacactaccaatcaaaatattaggtctgattttctccactatccatcatgcaggtaattaagaaacagatggccaaagacacaaatgaccactggtacatataaatacttagtttaaaagcacaatggccctacttacatataaaaattaggtttaagcacaatgcaaagtcaagctaacgttccagctctttgcaatgaggcatccttcctaaaagcttagcaggactgcttttccagtatacatacgtatctctactactattcctggaaggtagtgtatttatgtatatatrtctgtagcttcacttcagttcttgacctcataaataaattttgactgtggatatcagtacaaagcaaatccacctcagtatyttactacacaaaaactgtccagcaatggccttgaatttcagtctcacaaaggcatccagcatcatcacactctagcgatacaaccagagctgaatggyttcagatcaggtgtgcaaggaacaggcccaacttgctcctgctgggcatggctgttgcattttttgggagaaagacccaccaacaactctgaaatctagaaatgattatctgcataaaac

SEQ ID NO: 53493 - DNA, 600 bp, Chicken  19866894305060_2
gacacaaatgaccactggtacatataaatacttagtttaaaagcacaatggccctacttacatataaaaattaggtttaagcacaatgcaaagtcaagctaacgttccagctctttgcaatgaggcatccttcctaaaagcttagcaggactgcttttccagtatacatacgtatctctactactattcctggaaggtagtgtatttatgtatatatrtctgtagcttcacttcagttcttgacctcataaataaattttgactgtggatatcagtacaaagcaaatccacctcagtatyttactacacaaaaactgtccagcaatggccttgaatttcagtctcacaaaggcatccagcatcatcacactctagcgatacaaccagagctgaatggyttcagatcaggtgtgcaaggaacaggcccaacttgctcctgctgggcatggctgttgcattttttgggagaaagacccaccaacaactctgaaatctagaaatgattatctgcataaaacgagctatgacagaccaacattccttgaataatggcttcagtaagtactgccaacctgtcctcagtatatccatagctggcat

SEQ ID NO: 53494 - DNA, 600 bp, Chicken  19866894305060_3
ctaacgttccagctctttgcaatgaggcatccttcctaaaagcttagcaggactgcttttccagtatacatacgtatctctactactattcctggaaggtagtgtatttatgtatatatrtctgtagcttcacttcagttcttgacctcataaataaattttgactgtggatatcagtacaaagcaaatccacctcagtatyttactacacaaaaactgtccagcaatggccttgaatttcagtctcacaaaggcatccagcatcatcacactctagcgatacaaccagagctgaatggyttcagatcaggtgtgcaaggaacaggcccaacttgctcctgctgggcatggctgttgcattttttgggagaaagacccaccaacaactctgaaatctagaaatgattatctgcataaaacgagctatgacagaccaacattccttgaataatggcttcagtaagtactgccaacctgtcctcagtatatccatagctggcatccatcagaaaacctgagtgcttgcagtttcattatcatatcagccaaaacatgactaataatgttgtaatatattctatttggtagaaaaatgaacag

SEQ ID NO: 53495 - DNA, 600 bp, Chicken  19866894305060_4
ctctgctttcccacagaagcacctctccagagggaccagcaattttattcattttttaaaattttaataagaagcaataatagcagttgtgcaacaggcagagatgcaagaattacatcttaatgagtcttttaagagactaattcagcagtgttcaccatcacttcagaaaacaaattacatgaacagcagatctactacaactgaaaaaactgtagttcaccaaaaaaagaacaagcacacattctctataattcacatacatgcaagcaaattacacgagtttttctatcgagacaytgcattatagcataattatttcagctactgcatttttgttacatatcttcttcacacctgagtatgtgattyggtacacagattatagttgtcacagaaagaacccatcaacctcaccgagcttgtgttggttctacaccacaccttttctttgtttgttttaagggggaaagatttactgcccatgactgaaggcacagaattcgcttctccttatttgaaaggaaacattgttgagagggaaataatttatgtttgagtgccacgtgtttcatattttctgacaactgtagattaaac

SEQ ID NO: 53496 - DNA, 600 bp, Chicken  19866894305060_5
agcaataatagcagttgtgcaacaggcagagatgcaagaattacatcttaatgagtcttttaagagactaattcagcagtgttcaccatcacttcagaaaacaaattacatgaacagcagatctactacaactgaaaaaactgtagttcaccaaaaaaagaacaagcacacattctctataattcacatacatgcaagcaaattacacgagtttttctatcgagacaytgcattatagcataattatttcagctactgcatttttgttacatatcttcttcacacctgagtatgtgattyggtacacagattatagttgtcacagaaagaacccatcaacctcaccgagcttgtgttggttctacaccacaccttttctttgtttgttttaagggggaaagatttactgcccatgactgaaggcacagaattcgcttctccttatttgaaaggaaacattgttgagagggaaataatttatgtttgagtgccacgtgtttcatattttctgacaactgtagattaaacttcattcgaaggtgataattaaaatttttatgggcatatctaatattaaacagcaactggcaggctgtggtg

SEQ ID NO: 53497 - DNA, 600 bp, Chicken  19866894305060_6
gtgccttgactgcttaatgcacaagggagaaaagcaataaaaattaactgtcaaggcagcagcttgatctttcctgtcacctaccaaaactacacccttagacagcatgaaaccctcccccactataagaggtaatgaatctgtacagtgaaagttttctacatggaattggcaaaacatcacacacggcaagaaaaggaggcttcaaaataaactgtttttcattttatagcaactgaattgctaatctaggatgttactttgagtaataaatagaactgttaaaaaatctagccagargcgttaagctgtctcagtttcaacataaatgctgtttttgaccaaggactccacagtcactttcaagcaatatgagggagcaacctgctgaacacatataatgagatttttgcccttttttttttttaggcaggtctgtttcagccagttcatttcctgacatggctcaacaaatgaagatctgtggtgctaacacatccaactcttctggtggcaaccaacacttctttcaccttacagcagtcagggatggccatagcctggattaagctatctgtcagagaaaacatttgtttccag

SEQ ID NO: 53498 - DNA, 600 bp, Chicken  19866894305067_1
aagatttctaatgcctttgggcatgatgggatagtaagtaagttattgttttctgagccattaaaagaatgcgttggttttagagatgttctcacttccagtgaaattttacttttcatgggaaatacagacagactcttcctagggcttgcaatgagtttgctggaaacagccatctgcttctccagtttcatcctgaggggaatcaattccttacatctggcccacataatgcagcttagtgccagaaccaagacccaatgaagttaaatgatgtctttcccttagtcaggaaaaaarctagattgtattgcttttatagctaacatttcctgctgcttttgctttttttttgttttgaatcttatcctattccagataatgggcagatgttgctgcccgtatatccttatttctagatttatgcacaggagttctcttacctttccagcacagattgctcagtactatcaattttcagaagagcttttaaaaacttttaattgcctcagcctcagaatcaacactgcttacatagatcagaaattgtaaaccaaaaggtaacttaaagctttctagatttttgcagcttctttrcct

SEQ ID NO: 53499 - DNA, 600 bp, Chicken  19866894305067_2
aarctagattgtattgcttttatagctaacatttcctgctgcttttgctttttttttgttttgaatcttatcctattccagataatgggcagatgttgctgcccgtatatccttatttctagatttatgcacaggagttctcttacctttccagcacagattgctcagtactatcaattttcagaagagcttttaaaaacttttaattgcctcagcctcagaatcaacactgcttacatagatcagaaattgtaaaccaaaaggtaacttaaagctttctagatttttgcagcttctttrcctattgggtgtgcagataattatttctaatttctttcttctttagatgtttctgttactttttggtttgtagaatcaatcccattgtctatatgttgaaaagagcatatgccttgtacagtcgtttactgaacttactttttccccactgaggacctagtttttacagagggcttcagaccatatgtaagacagaagtattctctggggaaagaagtcccaggaatttcccccctttcacaggataccttctgtgggcaacagcaggtatccatttcagtacggtgtcagatctgtgac

SEQ ID NO: 53500 - DNA, 599 bp, Chicken  19866894305071_1
  misc_feature (1)..(57): n is any nucleotide
nnnnnnnnnnnnnnnnnnnnnnnnnnnnnnnnnnnnnnnnnnnnnnnnnnnnnnnnnttttttttccctctctgggtactcttggaagtatatattttacaagggctgctgtgaaagtagtgcctcctactttatcatcttggctgatgatgccagaggtggatgctggtggtatggcagtagaggttgagccttcccaccagtatttcactacgttttgtcgccatgtgacagatggcagcagaggagctctctgacaaaatggtgtctgacatggaattgtgtatggagcaaaggtgygtcatttagtttcttcatgcagaaaaaaaattgcatcctttgacattcatcaacaatcactgaacatttrtggagaccaaacagcggatctgagtgtagttaggcagcgggtggtgtatttcagctgtgstgatggtgacaatgggtcttttatgttggtgaagattttcatgaggccagtatgcaatctcttattgctgatgttctttccttgaactaacatrcaacaacagacacttaataaattgtcaatattgtcttcacaaagaagagattgagtaaattacaattttatataa

SEQ ID NO: 53501 - DNA, 600 bp, Chicken  19866894305071_2
tctgggtactcttggaagtatatattttacaagggctgctgtgaaagtagtgcctcctactttatcatcttggctgatgatgccagaggtggatgctggtggtatggcagtagaggttgagccttcccaccagtatttcactacgttttgtcgccatgtgacagatggcagcagaggagctctctgacaaaatggtgtctgacatggaattgtgtatggagcaaaggtgygtcatttagtttcttcatgcagaaaaaaaattgcatcctttgacattcatcaacaatcactgaacatttrtggagaccaaacagcggatctgagtgtagttaggcagcgggtggtgtatttcagctgtgstgatggtgacaatgggtcttttatgttggtgaagattttcatgaggccagtatgcaatctcttattgctgatgttctttccttgaactaacatrcaacaacagacacttaataaattgtcaatattgtcttcacaaagaagagattgagtaaattacaattttatataacgacatgatgcggacatagttaatgaaaattgttgatttttagtatggattggtgttaagcctcagtgatt

SEQ ID NO: 53502 - DNA, 600 bp, Chicken  19866894305071_3
tttatcatcttggctgatgatgccagaggtggatgctggtggtatggcagtagaggttgagccttcccaccagtatttcactacgttttgtcgccatgtgacagatggcagcagaggagctctctgacaaaatggtgtctgacatggaattgtgtatggagcaaaggtgygtcatttagtttcttcatgcagaaaaaaaattgcatcctttgacattcatcaacaatcactgaacatttrtggagaccaaacagcggatctgagtgtagttaggcagcgggtggtgtatttcagctgtgstgatggtgacaatgggtcttttatgttggtgaagattttcatgaggccagtatgcaatctcttattgctgatgttctttccttgaactaacatrcaacaacagacacttaataaattgtcaatattgtcttcacaaagaagagattgagtaaattacaattttatataacgacatgatgcggacatagttaatgaaaattgttgatttttagtatggattggtgttaagcctcagtgattgttattttctggcagatatgcaaaatgaaaaggaacgcgtggatgaagtatgggagcttt

SEQ ID NO: 53503 - DNA, 561 bp, Chicken  19866894305071_4
catgtgacagatggcagcagaggagctctctgacaaaatggtgtctgacatggaattgtgtatggagcaaaggtgygtcatttagtttcttcatgcagaaaaaaaattgcatcctttgacattcatcaacaatcactgaacatttrtggagaccaaacagcggatctgagtgtagttaggcagcgggtggtgtatttcagctgtgstgatggtgacaatgggtcttttatgttggtgaagattttcatgaggccagtatgcaatctcttattgctgatgttctttccttgaactaacatrcaacaacagacacttaataaattgtcaatattgtcttcacaaagaagagattgagtaaattacaattttatataacgacatgatgcggacatagttaatgaaaattgttgatttttagtatggattggtgttaagcctcagtgattgttattttctggcagatatgcaaaatgaaaaggaacgcgtggatgaagtatgggagcttttattcgtacgcttccaccagtcaataaggcaactttggctgctttaattgaacat

SEQ ID NO: 53504 - DNA, 599 bp, Chicken  19866894305074_1
  misc_feature (1)..(71): n is any nucleotide
nnnnnnnnnnnnnnnnnnnnnnnnnnnnnnnnnnnnnnnnnnnnnnnnnnnnnnnnnnnnnnnnnnnnnnnatataagtcttctacagctgtcaggcttgcagaacgagaagtgagaatgaggacggataccttaatgagacatggagtaccatggtctctggtactctgagctatgcatgtgtcatggatactgctgaggatagagaatcacttctaccttcatcctgcactaggtgctgtatgtttgactggtggtaaggacagtttcaagatgtgcaagctcaacttggatttagasctggcagaaaacagagtgatgttactagttgcagaagaatttatcagagtatgaatgcagactggcatgaagtgaatcactctgtacacaacaaataaacaacaagagcaaaaaaatgaactcagtgtacttcctagcagtaatattctacttgtttcagttttcacaaaacagagttgaagttctttagagaagaaagaagaaaatatatttcaaaagaaatattaaacttgagtttaaaacttatttaaatatcaaaacactttttttttggaaagaaatattttaactaatgctac

SEQ ID NO: 53505 - DNA, 600 bp, Chicken  19866894305076_1
gtttaatatctttctcttcacaaaaaaatacagattcttatcattgactatgggttagctattataacacatggatttttcaatcctttttaaaaacaacaacctgttgtttcacttgacataagtaatatcattgagtttcaccagtgagctgtacatgctgcaagaaaacatttatctcagattttaaataaaatcttcttattattgttgttaaaagataaataaaataattttattggacaactggctacagctacacttgagcagatttttagtatcacagaatgactgattgarggctaaaggatgagggtcccatttcctgcctacaccaagtcaccaagtcagaagggattgggacactttcagccatcctgagacccaatttctcccttttcctatcaaggatagaacagctgaattctcctttggaaaataaaaactgtctgacagatgaagatgagaactcgcccataactgtgtttttctttatcataatcaagcttgaaattataccgtttcttattattatttatagacagagataaagcagaacctgtggtgctttctggaacaattaagagacaaatagccaca

SEQ ID NO: 53506 - DNA, 599 bp, Chicken  19866894305086_1
  misc_feature (1)..(62): n is any nucleotide
nnnnnnnnnnnnnnnnnnnnnnnnnnnnnnnnnnnnnnnnnnnnnnnnnnnnnnnnnnnnnncctgtaaagctcctcctgcaggcggtggtgttctctgacccccatcctcctgggctggcactggggttgctccttgcagcccgtccacccttgcagcactgccttgttcttggggctgggagctttctgtgaaggtgaaggcagccttaccatctcctacagcacgtgacttaattctgtaatgttttacagtgatgtgattatcagcccaagttaagaatatttttagcagcaggcrctaagccctcttctttaggggaatgtcttggcagaggagttggagcagttttaaataggtggcttctcggtgagaaataaccttactctgaatcgtctcatctgttttcacccgacaaaactttctttgttctggtttaatttttttttttctcttggggagacttaccaggccttatcagcttcctcagcaatggaaagcccacatcgcttctcgaggtaaaataagagtggagaaagagattaaggcagaagctactgaaaaatattctgacttctttctggtcaggtggggacgga

SEQ ID NO: 53507 - DNA, 600 bp, Chicken  19866894305091_1
taacatgatcagataaagaaccccctgaaaaaactaatactgatgtctgagaattaagcctgctgtgtgaaacactatttcaaactacaagattgacttgagctatgcacaacactatgtcttgaagcaatgttgttaatggctttctctctcctattttatattaagtacacgcatgaattatcaaatgcctttaggttactgtagctgaaacagctccattgcctttaggttttttcctcgcatagagcatcagtaccacttggatgctgagaatatacagtacttattccaacagtkgctttgaactcatttaaaagcaagtttctaaaagcatttcatttcttagaaaaatatcctgttatttaaaatatacagaatgaagctggatgctcagtttttctggagtctagttacatagagaaatctaaaatactctggatagtgtccttgctgtcagtctgatatattttttacattatgcttcaatactttcttcacctttagacttcagtttttcwttactgaattattctgattatgcctttgtatatatgtcttgrtttaatttctttacrcctttgcaaggataacaagcat

SEQ ID NO: 53508 - DNA, 600 bp, Chicken  19866894305091_2
ttgcctttaggttttttcctcgcatagagcatcagtaccacttggatgctgagaatatacagtacttattccaacagtkgctttgaactcatttaaaagcaagtttctaaaagcatttcatttcttagaaaaatatcctgttatttaaaatatacagaatgaagctggatgctcagtttttctggagtctagttacatagagaaatctaaaatactctggatagtgtccttgctgtcagtctgatatattttttacattatgcttcaatactttcttcacctttagacttcagtttttcwttactgaattattctgattatgcctttgtatatatgtcttgrtttaatttctttacrcctttgcaaggataacaagcatgaaagcaatcatacttcttttaccatcacctcctttactgtcttcctcaaaaaactcctgatcttgtttttgcatttgtggggaagaagagagatggttgaagcttcttccatatcaagcagattaatcagatctaatgacatctgtgcatgtgcattgcttgtatttgactcaacaacatcttctggtcctttgtgaatgaattctgtgctccattaaaa

SEQ ID NO: 53509 - DNA, 600 bp, Chicken  19866894305091_3
tggatgctgagaatatacagtacttattccaacagtkgctttgaactcatttaaaagcaagtttctaaaagcatttcatttcttagaaaaatatcctgttatttaaaatatacagaatgaagctggatgctcagtttttctggagtctagttacatagagaaatctaaaatactctggatagtgtccttgctgtcagtctgatatattttttacattatgcttcaatactttcttcacctttagacttcagtttttcwttactgaattattctgattatgcctttgtatatatgtcttgrtttaatttctttacrcctttgcaaggataacaagcatgaaagcaatcatacttcttttaccatcacctcctttactgtcttcctcaaaaaactcctgatcttgtttttgcatttgtggggaagaagagagatggttgaagcttcttccatatcaagcagattaatcagatctaatgacatctgtgcatgtgcattgcttgtatttgactcaacaacatcttctggtcctttgtgaatgaattctgtgctccattaaaaggtagcactatgtttggtatttgcaagtcaacaatgaaagwt

SEQ ID NO: 53510 - DNA, 600 bp, Chicken  19866894305091_4
tacagtacttattccaacagtkgctttgaactcatttaaaagcaagtttctaaaagcatttcatttcttagaaaaatatcctgttatttaaaatatacagaatgaagctggatgctcagtttttctggagtctagttacatagagaaatctaaaatactctggatagtgtccttgctgtcagtctgatatattttttacattatgcttcaatactttcttcacctttagacttcagtttttcwttactgaattattctgattatgcctttgtatatatgtcttgrtttaatttctttacrcctttgcaaggataacaagcatgaaagcaatcatacttcttttaccatcacctcctttactgtcttcctcaaaaaactcctgatcttgtttttgcatttgtggggaagaagagagatggttgaagcttcttccatatcaagcagattaatcagatctaatgacatctgtgcatgtgcattgcttgtatttgactcaacaacatcttctggtcctttgtgaatgaattctgtgctccattaaaaggtagcactatgtttggtatttgcaagtcaacaatgaaagwtaggagctgctgcttc

SEQ ID NO: 53511 - DNA, 411 bp, Chicken  19866894305091_5
rtttaatttctttacrcctttgcaaggataacaagcatgaaagcaatcatacttcttttaccatcacctcctttactgtcttcctcaaaaaactcctgatcttgtttttgcatttgtggggaagaagagagatggttgaagcttcttccatatcaagcagattaatcagatctaatgacatctgtgcatgtgcattgcttgtatttgactcaacaacatcttctggtcctttgtgaatgaattctgtgctccattaaaaggtagcactatgtttggtatttgcaagtcaacaatgaaagwtaggagctgctgcttcagtttccagcctctaatttcagttcagactctttgtttgtgaatatgtggttacttcacctgcaaggtaaaagaacaacttattcttcaaggaag

SEQ ID NO: 53512 - DNA, 600 bp, Chicken  19866894305102_1
aaggtaaaggttagatatgggccacctaaacaacatctcagacatcagaaaagatctagagaaatgaaggctgctgcatccctgtgagaaagctttgtcccttcccatcttccttgagtcctggaggggagggggaccctgaaaagaccaccagaaagggttcagtgaaaatgagcaaacatcattaaaattattgagtaagaatgtacagagctgtcctggctgagagagacatttttcacgctgtaatggccacacagctccctaagtggaagaaggaaggtcatttacttcacaggwaaaaaaaaaaaagaagtctatgagatcatttataacattactcacaaccattatctatcccaaatcattcttatgccttgtctgatattggctgccttgcagtgctttgagtctctcttaacataaaactccttcttattccttaatggcataccagctgaaatatttaaagcatttgcagacaaatgtacctaattgtatcctagatgcacgaaggctcctgggaacactaactgctgccacagtcacatttacttgccctcggggagtctgttgtttcagtaaaaaccctgtcaaata

SEQ ID NO: 53513 - DNA, 600 bp, Chicken  19866894305103_1
ccccgtccccagaggtgtttaaggccaggctggatggggcactgggcaatctgatctagtacttgttccagtggttgtaaccctgcctgcagcagggaggttagaacttgatggtcccatccaacccaagccattctatgattctgtgatttacagcatagggaatattggcttgtcaaaatctgagcacaaatgaagaagctccagggcattttaattaagaaatcactgaaattattgcagtttgatgacattttgaagtaaaactgtaaatacatcttacacagttgattaaccccrgtgaagtgatgaatgccttgaaatcttattaaaatggtagcagtttagacttcttagcatgactcaggatcactttgtactttggcctagaaacacaaggcaattttcatacaaaacagctggagcaatgctaacgactgttcctgtaccaacgcattggaagagttctgtcaaaggtttaatgaaaagcagtgggaacaagtaaaatatcatactcaaatagagcattactttttgagaacaaatccaaaaatcaatacaaatagctataatcagaaaagggaaatctaaaacccacct

SEQ ID NO: 53514 - DNA, 600 bp, Chicken  19866894305104_1
gtccatcttttattgtttattcttcaggtgaattatctccttgtgcacaaatgaatggaggttgtcacgatttatgtcttctgactcctgatggacgagtgaactgttcatgtagaggggatagaatactgatagatgataacagatgtgtgagtaagtaatactagctgatgcagtgctttttctgtggcatggtgcagttgactatcacaaagtcagttggcccaagtcatgaatttgacttctgtactcttttaaattgctctagactttttttttttacaaattttggcaaagcayggcatataacaggctttaaactattttacatctgataagacttttgtggggttaaaaagcattaatatttattaatttcttcaattccagtttgtatattttgtgttctatctaatatttctgattctgaactagatgaactgcaaatctaaytgaggattcttagttcttacaatgctgataggaggaaaaaaaagggaaaaacagtgctctgatagacatgactgccattctaaggactctgtaaatcataaaagaggatcagatttcaccttgtgagaatccacattttcagcactt

SEQ ID NO: 53515 - DNA, 491 bp, Chicken  19866894305104_2
gtaagtaatactagctgatgcagtgctttttctgtggcatggtgcagttgactatcacaaagtcagttggcccaagtcatgaatttgacttctgtactcttttaaattgctctagactttttttttttacaaattttggcaaagcayggcatataacaggctttaaactattttacatctgataagacttttgtggggttaaaaagcattaatatttattaatttcttcaattccagtttgtatattttgtgttctatctaatatttctgattctgaactagatgaactgcaaatctaaytgaggattcttagttcttacaatgctgataggaggaaaaaaaagggaaaaacagtgctctgatagacatgactgccattctaaggactctgtaaatcataaaagaggatcagatttcaccttgtgagaatccacattttcagcacttctatacttcatatttgaatcaaataaagagttgttttcaagtta

SEQ ID NO: 53516 - DNA, 600 bp, Chicken  19866894305106_1
atgccatgggatgacagtcaagatgatctgttctatgtccttccctgatatcaaggtcaggctgacatacctgtgtattgcccatcactctctgctcttgtgcaatcttctgagtcttttcagattacttgagttgagtttttctcattccaacaaagcaaaaacacaaggcctcttacttcagggagttgaaacttcttccaacagtggttttgaagttatttctaagatctatgtatataaataaaaatatttacacatagtatttctaaacatctactaatgaaaagagtatctacraataactatttaaattcagtacagtgaggcctccatctccactggcagatatgaaaatcaagcactcttttccctgtatgtgaccataaagggacagcagcaatctgtccatcttgtagaatttattgtactaccatattaacttattaaatattttaatatgmcaatgcttaaagtctgtaatgcttttatagactgcagtagtttttttaaagaaactttttagatttcaacagatagaacacctttagttctcagctcagtgacatgatctgcattaatccaacgtgacaaagatgt

SEQ ID NO: 53517 - DNA, 561 bp, Chicken  19866894305106_2
cacaaggcctcttacttcagggagttgaaacttcttccaacagtggttttgaagttatttctaagatctatgtatataaataaaaatatttacacatagtatttctaaacatctactaatgaaaagagtatctacraataactatttaaattcagtacagtgaggcctccatctccactggcagatatgaaaatcaagcactcttttccctgtatgtgaccataaagggacagcagcaatctgtccatcttgtagaatttattgtactaccatattaacttattaaatattttaatatgmcaatgcttaaagtctgtaatgcttttatagactgcagtagtttttttaaagaaactttttagatttcaacagatagaacacctttagttctcagctcagtgacatgatctgcattaatccaacgtgacaaagatgtagatcttcacagctacagtgctaatattgaggaaaaaaatcccctgaagtaaagctgaagaaaaggggagaatcaataccaagagctgcgactgcttgattgagccatgccaaattacatcagct

SEQ ID NO: 53518 - DNA, 600 bp, Chicken  19866894305111_1
gctacaatttctggaaagtgaaacaacagcattgcagttttccatgctgggagtgttttgagtgcagggatcagagtgctcatttgtctctgcctcctggaccagggggaggaggtaactccagcagtagctgcagtttgatgcctcaattacattagcagcaactttccaacctgaatactcctgtcaggtggccatcagtgagctctcatgtatagctgtaattggaagcggtttttcttgtaagatcagaccatcacaaagcaggaatgtggttattctgtagttggtgatggcagytggtaggaggacaggcagggcytgctgtcagcctggagaaaggacaggagtgcagagctggcggtgtcagtgagagctcagcaagcccagggtgctctgctggggtgacaaacactcactgcccaggggctgcagagcagaggtgctttggtgtgcaagatctgcaccctggtggaaatatccaactattatccccaacattagggaactttgcragatgtcccaaaaaagccacagttccccacatccatcccatgtccattcttaaagctgacacacagtttttccatggggcagggg

SEQ ID NO: 53519 - DNA, 600 bp, Chicken  19866894305111_2
acaacagcattgcagttttccatgctgggagtgttttgagtgcagggatcagagtgctcatttgtctctgcctcctggaccagggggaggaggtaactccagcagtagctgcagtttgatgcctcaattacattagcagcaactttccaacctgaatactcctgtcaggtggccatcagtgagctctcatgtatagctgtaattggaagcggtttttcttgtaagatcagaccatcacaaagcaggaatgtggttattctgtagttggtgatggcagytggtaggaggacaggcagggcytgctgtcagcctggagaaaggacaggagtgcagagctggcggtgtcagtgagagctcagcaagcccagggtgctctgctggggtgacaaacactcactgcccaggggctgcagagcagaggtgctttggtgtgcaagatctgcaccctggtggaaatatccaactattatccccaacattagggaactttgcragatgtcccaaaaaagccacagttccccacatccatcccatgtccattcttaaagctgacacacagtttttccatggggcagggggctgttagtgcaggtgaagaaa

SEQ ID NO: 53520 - DNA, 500 bp, Chicken  19866894305111_3
tagctgtaattggaagcggtttttcttgtaagatcagaccatcacaaagcaggaatgtggttattctgtagttggtgatggcagytggtaggaggacaggcagggcytgctgtcagcctggagaaaggacaggagtgcagagctggcggtgtcagtgagagctcagcaagcccagggtgctctgctggggtgacaaacactcactgcccaggggctgcagagcagaggtgctttggtgtgcaagatctgcaccctggtggaaatatccaactattatccccaacattagggaactttgcragatgtcccaaaaaagccacagttccccacatccatcccatgtccattcttaaagctgacacacagtttttccatggggcagggggctgttagtgcaggtgaagaaactccagaggctggagatgacaatcccatcacactgccacggctctggggacatcccgccctctgctgcacttctgttatggcagtcgggtttc

SEQ ID NO: 53521 - DNA, 600 bp, Chicken  19866894305115_1
gcagagaggcaaacataagcaacaggcttcacatctcactgataccccctcatcctggcgatgtgctgccactcactttaccagtttctccaaaaacctaactgaccaactctttttgcaacagcttgcagggcttctctgtcattaagagctgctctgcttggaacactgatgccacagtcagcagagacgcaaagaggcccttgtgcttatctgccacagccttgtgtccctttgttgtaaacccctcagccaggcagaccttctgacaagctttctgctgcagatgtgtttgaaaayatttactattcmttttctcaccttttgtgaactgcttctcaaaaacaaaactttaaaaaacccaccaggctttggctgatttacattttctttccattggttcttatgatatattttttctcgctagaggtttttctttgctgtaacagaatctgggggatttttatggtagagttaagctggggtagagctgctaaaagagaacagagttccataggaaaacaagagtatgaatggcccaggggcagcaaaacaaaagtgaatggctcatcttatgctctcagcctggatggaacaatc

SEQ ID NO: 53522 - DNA, 600 bp, Chicken  19866894305115_2
acataagcaacaggcttcacatctcactgataccccctcatcctggcgatgtgctgccactcactttaccagtttctccaaaaacctaactgaccaactctttttgcaacagcttgcagggcttctctgtcattaagagctgctctgcttggaacactgatgccacagtcagcagagacgcaaagaggcccttgtgcttatctgccacagccttgtgtccctttgttgtaaacccctcagccaggcagaccttctgacaagctttctgctgcagatgtgtttgaaaayatttactattcmttttctcaccttttgtgaactgcttctcaaaaacaaaactttaaaaaacccaccaggctttggctgatttacattttctttccattggttcttatgatatattttttctcgctagaggtttttctttgctgtaacagaatctgggggatttttatggtagagttaagctggggtagagctgctaaaagagaacagagttccataggaaaacaagagtatgaatggcccaggggcagcaaaacaaaagtgaatggctcatcttatgctctcagcctggatggaacaatctgccatgtgtgg

SEQ ID NO: 53523 - DNA, 600 bp, Chicken  19866894305116_1
gaatacatgagctagggtggaaaataacacattaatgcagacatacttcgtatgttttcaagaatggaagaataatgaatttattgatgtttatggtaggatgcattcagtagagaaatggtgtcttatatttttagggttgttctcccctggatgctctcagaatgaggctgaacttatttgtcctattaaatattttaaacattcttctttatacacaggatgagcagaatgccaataagaaacagttcctcagtgtgaattttcaattttttttttctctatttcaacttaacaatrccctaactcctttttttctgtaaatacctttggttaaaaggtgatagaaaactgcttgtcagcagtgttcttattctgattaaaatatacagctgttatgtgggttttcttcctacctcctgtttgaatggcaggtgttgataactaatctcttgttgatgctgatttttgttcctgaaaaatttttgcttaaggataaaatgcttactttttaattttatcatgttacaatctaaagaaaactttgtaatagtagtgattaaataagtaagtatgctcttatgataattctctctttgt

SEQ ID NO: 53524 - DNA, 600 bp, Chicken  19866894305120_1
tgtctttgtaaaagctgttaccagctttttaaaaaagtacaagcacctataattcagtttaaaaaaaaatagctttaagtgcatcacagaaatattaatgcttttaactgtatgcatcataaaatgcctaatttaaaatatattttggccaggtcaaactgtttgtttcatttattcaatattaaactaagctcagaaattttccgttataagtggtttgattatttatttatttgtttgtttgtttgttttccttcttctaattaacttaaaattcatcctcttttctaccccttttaraaacacctttattgaactttaatcatttcctttcccagtaatttttgacaaaggtgtccctaccacactttctccacaaattgttttagttttgagatatttttcagaaaactttcactacaaaatatttaactgctgtctttttagaactggactatattgcctacacatctgtgagtttttcttcttggccatcccacacctctcataactatcaaatgtcacaagtcaatgactagttcccatcatggtagaagccataatgcatccaaaaatactttagaacaaagaagttgaagt

SEQ ID NO: 53525 - DNA, 600 bp, Chicken  19866894305124_1
gggcttgtcgtcctccccgagaggtgcgtggctggtttgctccaggcatcctcccagccccactggctctctcgtgtggggtcacctcctgaaggggcatcccatttccttggctttgtttctgactgtcccccctgtgtcccctttccctgccctctctcctcctttttgctcagtccctgtcctggggagaggccatggtggggcagctcccggggagatgcttgtgctccctcagggctggcagctccatcaagctggtggcattgctgagacacccttgagagggagaagcagaargaaggggtcctgctgtcccacaccaagggcaggactgaagccaggtcaccctgcaccggggacagtgttcctgggtggcatctccaacgcagtcgcaggcaaagctgccagcttcasttctatcctaaagctttttgcccatctttctacttgttacggtgatccaactgcagaaaaccccaaactttgatgcttattgttggggaagattctccaaaaggatttgtggagcagaagatcaagacgtagtttaaaaggagctttgactcttcctcccttgctttatgtgctgccttggcg

SEQ ID NO: 53526 - DNA, 600 bp, Chicken  19866894305124_2
gtttctgactgtcccccctgtgtcccctttccctgccctctctcctcctttttgctcagtccctgtcctggggagaggccatggtggggcagctcccggggagatgcttgtgctccctcagggctggcagctccatcaagctggtggcattgctgagacacccttgagagggagaagcagaargaaggggtcctgctgtcccacaccaagggcaggactgaagccaggtcaccctgcaccggggacagtgttcctgggtggcatctccaacgcagtcgcaggcaaagctgccagcttcasttctatcctaaagctttttgcccatctttctacttgttacggtgatccaactgcagaaaaccccaaactttgatgcttattgttggggaagattctccaaaaggatttgtggagcagaagatcaagacgtagtttaaaaggagctttgactcttcctcccttgctttatgtgctgccttggcgagcgtggtatccgctcagacatccctgcccatctcctgctctcctttgtacttccagaaagagatatcttgtagagattaaacgagggtcactaacaaggaggtgcattgtgtgagg

SEQ ID NO: 53527 - DNA, 517 bp, Chicken  19866894305129_1
gatggccctgtgccccatagagagccctatagatggccctgcgccccatagatggacctctgccccatagagagccccatagagagcccaataggtggtcatgtgccacatagtgagacatagagagccacagagatggacctgtgccccatagagagccccatagatggccctgtgccccatatctgctgcccgaccgcaagaggaagttccagaccaaggtgaggggggccccataggtggtcctgtgacccatagatggccctgtgccccatagatggccctgtgacccatagagarctccagagatggctctgagccccatagagagctccagagatggacctgtgccacatagtgagccacattgagagccacagagatggccctgtgccccatagagagccccagagacagccctgtgccccatagatggacctctgccccatagagagccccatagagagcccaataggtggtcatgtgccacatagtgagacatagagagccacagaga

SEQ ID NO: 53528 - DNA, 600 bp, Chicken  19866894305131_1
taagtgtcctcatctaagagctctttggagactgtggatacctgtgtctgtttctgctggtgagattacaattgcaaccaaaaaaagaagaggactcagttgtataaaacaaatagatgttgccagttgagaagcatttcaaaaacaacaccatctggtcactgccagatattaggcaatttaacacaacatcagaagaaggaaggcagttacctaatttcttccatatctactgcattaattcaatatcatttctggccagtcttaaaacagaatgagaataaatatggcaggaataarttaaaggaaatcagagagaaaggatgttaaatgctcctcattaatctgccaaggaagaaagattaaaataattacagtttaaaattttacataagtttcattaaacttcaaccagacttttcaataaaggattactgctcaatggcaattgttaaagatgccatctaagagggcgggatgtattatctgtattttatagtcatgtaaaaatgtaatagtttttggacacaatgatctaatataattttgagctggaatattgattggacatcacacacagcaaccctaggtgggttatgc

SEQ ID NO: 53529 - DNA, 600 bp, Chicken  19866894305132_1
acaccatccatgttgcaaaaagcaatggtaagaactcagagaaggtagatctgcctgctgtaagtgaagatgaggtttgagaccatctaaaaaacctgaagatgcacaagaccatgggacctgacaagatccatccatgggttctgagggaagtggcagatgaagttgccaagcttctgtcgatcatatttgaaaggtcatggcagcctggtgaagttcccactgattggaaaaggggaaatataatccccattttcaagaatggaaaaaaagaccacccaaggaactacaggccagccrgtctcacctctatgcctggcaagatcatggagcagatcctcctgaaggccctactaaagcacatggtaaacaaagatgaggtgattggtggtagtcaacatggcttcaccaagggcaagacatgcctgacaaacttggtggccttttatgatggagttacaccaccagtggataaaagagaaacygatgtcatctacctggacttgtgcaaagcatttgacactgtcctgcatgatttgatggatggaccactcactggataaggaattggctggatggtcacactaagagagttgtggt

SEQ ID NO: 53530 - DNA, 532 bp, Chicken  19866894305132_2
atatttgaaaggtcatggcagcctggtgaagttcccactgattggaaaaggggaaatataatccccattttcaagaatggaaaaaaagaccacccaaggaactacaggccagccrgtctcacctctatgcctggcaagatcatggagcagatcctcctgaaggccctactaaagcacatggtaaacaaagatgaggtgattggtggtagtcaacatggcttcaccaagggcaagacatgcctgacaaacttggtggccttttatgatggagttacaccaccagtggataaaagagaaacygatgtcatctacctggacttgtgcaaagcatttgacactgtcctgcatgatttgatggatggaccactcactggataaggaattggctggatggtcacactaagagagttgtggtccaagtggggtccggtgacaagtggcattcctcagggatcagtgttaggacaggtgttatttaacatctttgtaggtgacatggacagtgagatcgagtgcaccctcagcatgattg

SEQ ID NO: 53531 - DNA, 590 bp, Chicken  19866894305139_1
tggataattttcagtacaaaatatttcctagaggagtaatataactgttccatctgacagccagagtagctgccccagctatacaaacacagcacagtttggttcagcttagcatttgcattgccacttattcaacttgttcactttttcagccaaaccttggccagtggtgtgaggggaatgaggtgggcaggagctcggccttttctgctgaaatatcatttagagacaagtagcccaatttgcctcaagtagaagaagcaattacttacacgcagtgactggcaatgggacagcagygcagccatggcaaatggtacattccttctcaggatgattatttaccatccacctctgggcagccaaatttcccctccaggggtggctgatctgctaatcaaaaggtcrcagagctcctgtagctcacagcctcccctcctagcatcaggttaataytatgggcttgaaagtggaggtctgggagcagctccctgcacaactctgctgcccctgcagtgctgagagcattgtaagagtggagtggggctgtgcagctgtaggctgaaccccatctgtcagtattcatgagc

SEQ ID NO: 53532 - DNA, 482 bp, Chicken  19866894305139_2
ttagcatttgcattgccacttattcaacttgttcactttttcagccaaaccttggccagtggtgtgaggggaatgaggtgggcaggagctcggccttttctgctgaaatatcatttagagacaagtagcccaatttgcctcaagtagaagaagcaattacttacacgcagtgactggcaatgggacagcagygcagccatggcaaatggtacattccttctcaggatgattatttaccatccacctctgggcagccaaatttcccctccaggggtggctgatctgctaatcaaaaggtcrcagagctcctgtagctcacagcctcccctcctagcatcaggttaataytatgggcttgaaagtggaggtctgggagcagctccctgcacaactctgctgcccctgcagtgctgagagcattgtaagagtggagtggggctgtgcagctgtaggctgaaccccatctgtcagtattcatgagc

SEQ ID NO: 53533 - DNA, 434 bp, Chicken  19866894305139_3
accttggccagtggtgtgaggggaatgaggtgggcaggagctcggccttttctgctgaaatatcatttagagacaagtagcccaatttgcctcaagtagaagaagcaattacttacacgcagtgactggcaatgggacagcagygcagccatggcaaatggtacattccttctcaggatgattatttaccatccacctctgggcagccaaatttcccctccaggggtggctgatctgctaatcaaaaggtcrcagagctcctgtagctcacagcctcccctcctagcatcaggttaataytatgggcttgaaagtggaggtctgggagcagctccctgcacaactctgctgcccctgcagtgctgagagcattgtaagagtggagtggggctgtgcagctgtaggctgaaccccatctgtcagtattcatgagc

SEQ ID NO: 53534 - DNA, 599 bp, Chicken  19866894305142_1
  misc_feature (1)..(51): n is any nucleotide
nnnnnnnnnnnnnnnnnnnnnnnnnnnnnnnnnnnnnnnnnnnnnnnnnnngagtgtgaaaaggcaaatgcagtgctagtcactatgagcctcagagttcaagaaacactgagtagccctctcctttcttatgaagacagcatctgcattgtgatttctaagtatgccttcccaacaagtaaagaaatgtgcttttagtctcatttcctttgtaaactggcttatgcaatgctgcacatcccaccaagaaccactgaaccagttagctgatgtgaatcgcagtcagcagagagggacacrtctcccaggcatttacattcccatgggttttgcatgctgtgtgaagagtctctaaggtcttgacaaatccctaatgaggagaaggcaaaatttactggtcacaaagaaatcctgtgcaagagcagtgggcggataggggggtctcatcataggaaataactgtagtggttactgtccactggaaaatctcccatcccctccacaggatgtgagatatcatgagtccttgataaacttatcactgcatttttgcttgcagctctcaagcaacgtgaatttaactttgcttgtcttgagcc

SEQ ID NO: 53535 - DNA, 600 bp, Chicken  19866894305147_1
ctatgaataacagcgctggggtatttggagcactattggctgcatgcttttcaggagcctgcactgaaaaacacatttctcccttaataacatctgtatcccttgtacgatgcgggctttccctaatcctctaaatacatttggagaagacaacaaaaatatgtaagtcacactgcggattatggcttcccgggatgcaaaccacctcttcatcttcccatgctcacagagggagaaaagctgcctttaggagctcagtgcaggcagagaagcgctctgctcctgcagctgcagctgggmatggtgggcacagctcaggtggtgctccctgcactgctctgctcagctctgcctgcagccccattgctgcacacagccctgctccccctgcagccctccatcacagagatcccttctccaaggggcaatttcccctcgcttttggagacgggattgaagcaaggtgtgtaactgacacctggatctgatcctttgtcatgtgaacgcacgcctcgcaaaccagctggctctcacgccaggctgagtgcttccacccagcactgcagatggaacttcacccctggcactcgccctctctct

SEQ ID NO: 53536 - DNA, 599 bp, Chicken  19866894305161_1
  misc_feature (1)..(153): n is any nucleotide
nnnnnnnnnnnnnnnnnnnnnnnnnnnnnnnnnnnnnnnnnnnnnnnnnnnnnnnnnnnnnnnnnnnnnnnnnnnnnnnnnnnnnnnnnnnnnnnnnnnnnnnnnnnnnnnnnnnnnnnnnnnnnnnnnnnnnnnnnnnnnnnnnnnnnnnnnaaaaattttcactatgcaagggcctactgggtcagtaaataaggatgggctgaatttatacagcctttgttatgtgagaagtcagggaagttgatccagtggcccatttggctttagaaatctgatgaattgctgttgtccttgtgyacaaggcactgccttgatttccactggagttctctctcacagagaacttgctgcctctctgttcagatggatatgggacaaactttgcaaggtggggcttaactacatttggctaggaaaccaaatgaaaagaaatgtctaagctgttccagaatgtttttacattcatgatttcataaattaataattaaagtagctggaagaactcagatacaaaccatattttttcagtttttcgattggcttcaatgctgcggtagcttgtcaaataacaccggggagacaagcacagccaaagc

SEQ ID NO: 53537 - DNA, 600 bp, Chicken  19866894305161_2
caaaatttagagttgcttcattggccaccatcagtgataattctggggagctgtgctagaggttaacactgtataagagacataaaacactaccgagaaagacttgaattttttttttttttctagtaatatctttcaaagaaacatcttggccttgaaactgctggataaatgaaacagcaagagtcatagaaaggccagttgctgttacaggcatgcacactactgttgtttttggcgtgatggaatgaaagctgaatgttggtacatcacaactggtgcatgaggacagaccttctrtagcatcgggcagcagcagtgcatcccccacactgcaggatcagtcccactgctgcaccacatcttactgccacaccagcatgcccaggtgcaaggcacggatagtggataaggattgttatctgttctctgactgtgtgctttcctatattttggctgaagtatgcaaaaattgctgttaaacccttaaggtctcttctttgaccctttcctttacactgcacaccattttcacattctacccatgcaattttggcaagcttactratgtacaagggaaaaattaaacaagggaacatt

SEQ ID NO: 53538 - DNA, 600 bp, Chicken  19866894305161_3
catcacaactggtgcatgaggacagaccttctrtagcatcgggcagcagcagtgcatcccccacactgcaggatcagtcccactgctgcaccacatcttactgccacaccagcatgcccaggtgcaaggcacggatagtggataaggattgttatctgttctctgactgtgtgctttcctatattttggctgaagtatgcaaaaattgctgttaaacccttaaggtctcttctttgaccctttcctttacactgcacaccattttcacattctacccatgcaattttggcaagcttactratgtacaagggaaaaattaaacaagggaacattagcttgtagccacactgcattttgtttaaagtagaagtatctgcaatgggaatagacaggttcctgctctaaggtatgaaatattcataaaaacaccagttcagtgcctcacctttgccccttcaaatagatgacactgtctgcctccccagagccaaggtcttgtgtcagaaagacggtaaatagcttatcattggtaatttatgaattatgtcatctctcttagctctctcccattaaagaggccaaagcctactcatctgcaaa

SEQ ID NO: 53539 - DNA, 599 bp, Chicken  19866894305167_1
  misc_feature (1)..(85): n is any nucleotide
nnnnnnnnnnnnnnnnnnnnnnnnnnnnnnnnnnnnnnnnnnnnnnnnnnnnnnnnnnnnnnnnnnnnnnnnnnnnnnnnnnnnnttcccagagataggaaaaagacttaaatagttttacaatatctattcttgaccgctgatatagtggtctacgtgaaattctttgcatgctttgctggaagagaataactgcaacaaagagctttccattctagcagatatggagtaatgcaagaggaaagttaggtgatttttcagttgtctctttaacgtgatgaacttacagtggagttttaytgctgcgtgaatgtgtggggatcaggatggttattataattataaaattacctctgagcttaaagtgtgttcattttggaatacaaaaagggtaaaaatcatattcttttaacaataaatrctaaagaaaaagcagagttagtatccagttgacttatgtatttcagtttgtggtcttgctttttagatcattatgaaacagtaataggacacttggaatgttttttctctgagataccactaatcaagctttcatgttcataatgttagtggcttctttttgaggattgaagatagat

SEQ ID NO: 53540 - DNA, 583 bp, Chicken  19866894305167_2
aatatctattcttgaccgctgatatagtggtctacgtgaaattctttgcatgctttgctggaagagaataactgcaacaaagagctttccattctagcagatatggagtaatgcaagaggaaagttaggtgatttttcagttgtctctttaacgtgatgaacttacagtggagttttaytgctgcgtgaatgtgtggggatcaggatggttattataattataaaattacctctgagcttaaagtgtgttcattttggaatacaaaaagggtaaaaatcatattcttttaacaataaatrctaaagaaaaagcagagttagtatccagttgacttatgtatttcagtttgtggtcttgctttttagatcattatgaaacagtaataggacacttggaatgttttttctctgagataccactaatcaagctttcatgttcataatgttagtggcttctttttgaggattgaagatagataggaataaaaaaaaaaaattgtacctgtaatgagaaaaattatatttatggaaataaaatttttcttctgttcagaagactgcattaatggtgaatattcattaa

SEQ ID NO: 53541 - DNA, 599 bp, Chicken  19866894305173_1
  misc_feature (1)..(126): n is any nucleotide
nnnnnnnnnnnnnnnnnnnnnnnnnnnnnnnnnnnnnnnnnnnnnnnnnnnnnnnnnnnnnnnnnnnnnnnnnnnnnnnnnnnnnnnnnnnnnnnnnnnnnnnnnnnnnnnnnnnnnnnnnnnnnnaactgtggaaaggtagttattgttcacatatggagaagtatatggcaggttatgactagaacccctctgagacaatttaatccagctatgttggaagtgtattaaataatattctgaacattagtgttaaacattaatgatattaagaactacctctgtgggtactacaagatygattccttgtgctccaaatatcatcttcctattgcaagwttaactttcttttagttttagcactgaggtcattcaaaatgagatttgtgtgcrttgtgaaatagtgtagtgcaacgcttgcagaatctgtgctgaagcttgctcaggaaaaaaagttggatatgtttgagcacattcatagtrtacttaataacaaagaagaagaaatcctgcagaacagtggtaatcgrtgagggctggccaaagttgcaaatactactgttattttcagccattcaaaggaaaggatgggcagactt

SEQ ID NO: 53542 - DNA, 599 bp, Chicken  19866894305173_2
  misc_feature (1)..(87): n is any nucleotide
nnnnnnnnnnnnnnnnnnnnnnnnnnnnnnnnnnnnnnnnnnnnnnnnnnnnnnnnnnnnnnnnnnnnnnnnnnnnnnnnnnnnnnnaactgtggaaaggtagttattgttcacatatggagaagtatatggcaggttatgactagaacccctctgagacaatttaatccagctatgttggaagtgtattaaataatattctgaacattagtgttaaacattaatgatattaagaactacctctgtgggtactacaagatygattccttgtgctccaaatatcatcttcctattgcaagwttaactttcttttagttttagcactgaggtcattcaaaatgagatttgtgtgcrttgtgaaatagtgtagtgcaacgcttgcagaatctgtgctgaagcttgctcaggaaaaaaagttggatatgtttgagcacattcatagtrtacttaataacaaagaagaagaaatcctgcagaacagtggtaatcgrtgagggctggccaaagttgcaaatactactgttattttcagccattcaaaggaaaggatgggcagactttggcagaggtacacatgctctttacctgcttattgtttt

SEQ ID NO: 53543 - DNA, 599 bp, Chicken  19866894305173_3
  misc_feature (1)..(33): n is any nucleotide
nnnnnnnnnnnnnnnnnnnnnnnnnnnnnnnnnaactgtggaaaggtagttattgttcacatatggagaagtatatggcaggttatgactagaacccctctgagacaatttaatccagctatgttggaagtgtattaaataatattctgaacattagtgttaaacattaatgatattaagaactacctctgtgggtactacaagatygattccttgtgctccaaatatcatcttcctattgcaagwttaactttcttttagttttagcactgaggtcattcaaaatgagatttgtgtgcrttgtgaaatagtgtagtgcaacgcttgcagaatctgtgctgaagcttgctcaggaaaaaaagttggatatgtttgagcacattcatagtrtacttaataacaaagaagaagaaatcctgcagaacagtggtaatcgrtgagggctggccaaagttgcaaatactactgttattttcagccattcaaaggaaaggatgggcagactttggcagaggtacacatgctctttacctgcttattgttttagctcatggatttttatatacacataccattttcagcaatataatcgaagttca

SEQ ID NO: 53544 - DNA, 600 bp, Chicken  19866894305173_4
agaacccctctgagacaatttaatccagctatgttggaagtgtattaaataatattctgaacattagtgttaaacattaatgatattaagaactacctctgtgggtactacaagatygattccttgtgctccaaatatcatcttcctattgcaagwttaactttcttttagttttagcactgaggtcattcaaaatgagatttgtgtgcrttgtgaaatagtgtagtgcaacgcttgcagaatctgtgctgaagcttgctcaggaaaaaaagttggatatgtttgagcacattcatagtrtacttaataacaaagaagaagaaatcctgcagaacagtggtaatcgrtgagggctggccaaagttgcaaatactactgttattttcagccattcaaaggaaaggatgggcagactttggcagaggtacacatgctctttacctgcttattgttttagctcatggatttttatatacacataccattttcagcaatataatcgaagttcaaatggaagggtgtgagttttcttttctgtaaaccacattatcaagatatccacaactacctaactgctctgagactttggaatgcatgcaa

SEQ ID NO: 53545 - DNA, 600 bp, Chicken  19866894305173_5
aataatattctgaacattagtgttaaacattaatgatattaagaactacctctgtgggtactacaagatygattccttgtgctccaaatatcatcttcctattgcaagwttaactttcttttagttttagcactgaggtcattcaaaatgagatttgtgtgcrttgtgaaatagtgtagtgcaacgcttgcagaatctgtgctgaagcttgctcaggaaaaaaagttggatatgtttgagcacattcatagtrtacttaataacaaagaagaagaaatcctgcagaacagtggtaatcgrtgagggctggccaaagttgcaaatactactgttattttcagccattcaaaggaaaggatgggcagactttggcagaggtacacatgctctttacctgcttattgttttagctcatggatttttatatacacataccattttcagcaatataatcgaagttcaaatggaagggtgtgagttttcttttctgtaaaccacattatcaagatatccacaactacctaactgctctgagactttggaatgcatgcaacagctgaatttctcatctttcaacatcattgttcatggttcgttaag

SEQ ID NO: 53546 - DNA, 600 bp, Chicken  19866894305175_1
tagattctagataaccaactagatgttcacaacaggaagagatcagcataaagagatactacctagtgagcctacggaaatagtacatatctagattctgtcattacgatttatcataattatatgattattatgattgatttcatcaatcacaatccctaaatccttctaagcagggctactgtcaaggaattcttctcccagtttgcatacacacctgggtttacctcaacccaggtgcaaaaccttgcactttgctttgttgaaccttattaggttcatatgggcccatcttttgartttattgaggtccytctgggtgtcatctctcccttctgctgtaacaaccacacagctcagcttggtgtaatcatcatgttatacagtacaaacagatagaccataataaaaatgtttaatacattctaagggtgacgttttattacaaaacaaaacaaaaagaggtttcaataaagaaaacaaagaaaacacctgttcacaatcagtcttctagtaaaagcggaaagatcaagtgctgaaacttaccacacaatttttagaaaagaaagtacagtcatcatcttcaagagtacttactca

SEQ ID NO: 53547 - DNA, 600 bp, Chicken  19866894305175_2
ccaactagatgttcacaacaggaagagatcagcataaagagatactacctagtgagcctacggaaatagtacatatctagattctgtcattacgatttatcataattatatgattattatgattgatttcatcaatcacaatccctaaatccttctaagcagggctactgtcaaggaattcttctcccagtttgcatacacacctgggtttacctcaacccaggtgcaaaaccttgcactttgctttgttgaaccttattaggttcatatgggcccatcttttgartttattgaggtccytctgggtgtcatctctcccttctgctgtaacaaccacacagctcagcttggtgtaatcatcatgttatacagtacaaacagatagaccataataaaaatgtttaatacattctaagggtgacgttttattacaaaacaaaacaaaaagaggtttcaataaagaaaacaaagaaaacacctgttcacaatcagtcttctagtaaaagcggaaagatcaagtgctgaaacttaccacacaatttttagaaaagaaagtacagtcatcatcttcaagagtacttactcatatgtttccaaatt

SEQ ID NO: 53548 - DNA, 600 bp, Chicken  19866894305175_3
aatacattctaagggtgacgttttattacaaaacaaaacaaaaagaggtttcaataaagaaaacaaagaaaacacctgttcacaatcagtcttctagtaaaagcggaaagatcaagtgctgaaacttaccacacaatttttagaaaagaaagtacagtcatcatcttcaagagtacttactcatatgtttccaaattactttttgtgttctcagtaacatagttgctaggaattagaccttcattcctgaaatatattgaggataatagaatactaagatgtaaaatattaataggattragatacacatcatcttctmttgaatgacagaacttatatatactattggttacgtctttagattctgaatcctaacacgagaatcaaatgagagtataactcctttcacctgaggcaaggtgtttctgcccccagactgggtgtggctactaaaatgatgggtacttacttgactgccaagaacagcatgttaagaaaaaatttcaagtaaaatcaaaacaaagcttaggaaaaaagtgacatttcttccaaatcagaaatcattagctttatttctatccctgtaacaaatcttcaata

SEQ ID NO: 53549 - DNA, 600 bp, Chicken  19866894305175_4
gttttattacaaaacaaaacaaaaagaggtttcaataaagaaaacaaagaaaacacctgttcacaatcagtcttctagtaaaagcggaaagatcaagtgctgaaacttaccacacaatttttagaaaagaaagtacagtcatcatcttcaagagtacttactcatatgtttccaaattactttttgtgttctcagtaacatagttgctaggaattagaccttcattcctgaaatatattgaggataatagaatactaagatgtaaaatattaataggattragatacacatcatcttctmttgaatgacagaacttatatatactattggttacgtctttagattctgaatcctaacacgagaatcaaatgagagtataactcctttcacctgaggcaaggtgtttctgcccccagactgggtgtggctactaaaatgatgggtacttacttgactgccaagaacagcatgttaagaaaaaatttcaagtaaaatcaaaacaaagcttaggaaaaaagtgacatttcttccaaatcagaaatcattagctttatttctatccctgtaacaaatcttcaatatgaagaaatagaaagtgtg

SEQ ID NO: 53550 - DNA, 600 bp, Chicken  19866894305181_1
tagatgcgcattagaagatttatgctttgctttaattcacaattgttattcataaagcaatgctacaagaatctctgcgcagcctggtcttggtggttggcaaccctgctcacagcaggggtggttgaaactagatgatctcctgaggtcctgttcaacccaggccattctacgattctattaatcacttggtttgttttgaaacagtttaaaagcaacagcacagctcttaagcttttctctcagcatttaaacagaagtccacaaataagattcagagttgcaataatcactaacttyataacatctctttcctgggtacaggggggcctaaatcattggttatagcagctacccacatagatacgaaacccttctgaactgcagcacatggtacattggatttttatttatatagaagggaaacagaggcacaagtgaagattgggaaaaaataaaaataagaaaactgtgtattccttcaactcctattatgttcttttcaagaacactaggaggtgctcaaaattgtacagatggaaatatctgcttcatgtgattggaaacacattcagcaacgttaatagtgttcagaactaa

SEQ ID NO: 53551 - DNA, 600 bp, Chicken  19866894305201_1
aaaaaaaaagattaaaagcatagagaaactgataatttcagtacccagatagatagaacgtgttgttctagcaataaaatctcagtttcacttaagtcacatgcctactccacctggcagcttataaaacaggcaatgaactcaccaggttctcaggtattgcatggatactgggagatttgcagacacccattcttagggtctcaaccctttgggtttaccagattctttgttgttgtttttatttctttttgttttatttaatttattggtttatttatttatttatttattatttgwgttaaagcataaagttccattattgtctagagatatgcaccwttattcaagtcaggttctctattcttctagctcagacctcttacaaatgtgtttccgtattagcagcctagtgaggcggaaygtaactcttgggctgttctaacttttctcaaggaaatccaaggatttgcatgcagcaaagatccttctctcacctctttcagtgactccaaatagcattaagayttcttytctgctaaaaagaaaaaaaaactccagctctaccagcaaaaattattgctaaagaccagggaacaa

SEQ ID NO: 53552 - DNA, 600 bp, Chicken  19866894305201_2
acccagatagatagaacgtgttgttctagcaataaaatctcagtttcacttaagtcacatgcctactccacctggcagcttataaaacaggcaatgaactcaccaggttctcaggtattgcatggatactgggagatttgcagacacccattcttagggtctcaaccctttgggtttaccagattctttgttgttgtttttatttctttttgttttatttaatttattggtttatttatttatttatttattatttgwgttaaagcataaagttccattattgtctagagatatgcaccwttattcaagtcaggttctctattcttctagctcagacctcttacaaatgtgtttccgtattagcagcctagtgaggcggaaygtaactcttgggctgttctaacttttctcaaggaaatccaaggatttgcatgcagcaaagatccttctctcacctctttcagtgactccaaatagcattaagayttcttytctgctaaaaagaaaaaaaaactccagctctaccagcaaaaattattgctaaagaccagggaacaagggaaatctgatgccttcagttaacataatatgtaaatgaag

SEQ ID NO: 53553 - DNA, 583 bp, Chicken  19866894305201_3
taaaacaggcaatgaactcaccaggttctcaggtattgcatggatactgggagatttgcagacacccattcttagggtctcaaccctttgggtttaccagattctttgttgttgtttttatttctttttgttttatttaatttattggtttatttatttatttatttattatttgwgttaaagcataaagttccattattgtctagagatatgcaccwttattcaagtcaggttctctattcttctagctcagacctcttacaaatgtgtttccgtattagcagcctagtgaggcggaaygtaactcttgggctgttctaacttttctcaaggaaatccaaggatttgcatgcagcaaagatccttctctcacctctttcagtgactccaaatagcattaagayttcttytctgctaaaaagaaaaaaaaactccagctctaccagcaaaaattattgctaaagaccagggaacaagggaaatctgatgccttcagttaacataatatgtaaatgaagaaataataccactgaaattaataaactctaacagaagaaatacatcaaagaaatgttgggttgtt

SEQ ID NO: 53554 - DNA, 479 bp, Chicken  19866894305201_4
tttgttgttgtttttatttctttttgttttatttaatttattggtttatttatttatttatttattatttgwgttaaagcataaagttccattattgtctagagatatgcaccwttattcaagtcaggttctctattcttctagctcagacctcttacaaatgtgtttccgtattagcagcctagtgaggcggaaygtaactcttgggctgttctaacttttctcaaggaaatccaaggatttgcatgcagcaaagatccttctctcacctctttcagtgactccaaatagcattaagayttcttytctgctaaaaagaaaaaaaaactccagctctaccagcaaaaattattgctaaagaccagggaacaagggaaatctgatgccttcagttaacataatatgtaaatgaagaaataataccactgaaattaataaactctaacagaagaaatacatcaaagaaatgttgggttgtt

SEQ ID NO: 53555 - DNA, 473 bp, Chicken  19866894305201_5
gttgtttttatttctttttgttttatttaatttattggtttatttatttatttatttattatttgwgttaaagcataaagttccattattgtctagagatatgcaccwttattcaagtcaggttctctattcttctagctcagacctcttacaaatgtgtttccgtattagcagcctagtgaggcggaaygtaactcttgggctgttctaacttttctcaaggaaatccaaggatttgcatgcagcaaagatccttctctcacctctttcagtgactccaaatagcattaagayttcttytctgctaaaaagaaaaaaaaactccagctctaccagcaaaaattattgctaaagaccagggaacaagggaaatctgatgccttcagttaacataatatgtaaatgaagaaataataccactgaaattaataaactctaacagaagaaatacatcaaagaaatgttgggttgtt

SEQ ID NO: 53556 - DNA, 589 bp, Chicken  19866894305202_1
tgactgcttcgactacacatcagctatcagcatttgaaatttccacagtcttccagcctaaggaactgttacgatgagaatcatttcaagtcaaagactctggtacttctgtctagtccaatttaactcctgaaactctgtgccagtctataatgtgcaggtatctgaaaactctcctctgttgaaatgaatcgttcttccctccttcaaattcctcagcatttcttgtttgcatttattgtgttctatttatgaaaagtaaagaaaatcagacttgcataaacatctgttttttccacmaaagcattcaggctgtaggcctaacagctaggccaagcagctgaggaagaacaacaatcactaaagcaagcagagatgttaccaacttcaaattgcactgaagtaataagacagataatttggagaacttggcccaaaggactgacaaataaagcccttgagaataaccacatccaggttcccaggtctccacagctcactagtgaaccagcaagtaattaacaaggactgcatttcgtggctcagttttgtgtaggggtgtgcacatgcatgtgtataatttccagta

SEQ ID NO: 53557 - DNA, 600 bp, Chicken  19866894305203_1
cctctttgccagcccgtgagctgctgttagtggcgcggaggagaagtgtcctgtgttgaggtgcagggtgactaagccctgtggtctgcccacttgccagagagggttctcttctagtgtcactgcctgggtttgttggtccagcttccttctggacaagcagaggtgtcagcctgctgtgcccttcctccttttattataaagaggataacagttcctaccataactgaaatcttcattcctcctcctccaatctccaggctggcctgtacacagaaagcagttatctcctctccttcrggttgttctggcccttctcctgttgactagactcccagcagctcagaagccactcatgaccagacacaacactttacaacatgctttaggtgcagagatgtttggattgaatttctaggttcyacctagatgggggatattacagaggtttgattcctctgcattcagcaatgttcaggctttggtttgggcctatgatacaaaaaaaggcaggaaacaaattctgtgctcaaggacaggagtgaacagagacagtgatcccaacagctgaaacatcacacatacaatagaatcacagaa

SEQ ID NO: 53558 - DNA, 600 bp, Chicken  19866894305203_2
tgcctgggtttgttggtccagcttccttctggacaagcagaggtgtcagcctgctgtgcccttcctccttttattataaagaggataacagttcctaccataactgaaatcttcattcctcctcctccaatctccaggctggcctgtacacagaaagcagttatctcctctccttcrggttgttctggcccttctcctgttgactagactcccagcagctcagaagccactcatgaccagacacaacactttacaacatgctttaggtgcagagatgtttggattgaatttctaggttcyacctagatgggggatattacagaggtttgattcctctgcattcagcaatgttcaggctttggtttgggcctatgatacaaaaaaaggcaggaaacaaattctgtgctcaaggacaggagtgaacagagacagtgatcccaacagctgaaacatcacacatacaatagaatcacagaatcattaaggttgaaaaagacctctaagatcacctatcccaaccatcagcccacccccaccatgcccactgaccaygtcctcagtgccacatccacacggttctggaacacctccagggatggt

SEQ ID NO: 53559 - DNA, 600 bp, Chicken  19866894305203_3
acaacatgctttaggtgcagagatgtttggattgaatttctaggttcyacctagatgggggatattacagaggtttgattcctctgcattcagcaatgttcaggctttggtttgggcctatgatacaaaaaaaggcaggaaacaaattctgtgctcaaggacaggagtgaacagagacagtgatcccaacagctgaaacatcacacatacaatagaatcacagaatcattaaggttgaaaaagacctctaagatcacctatcccaaccatcagcccacccccaccatgcccactgaccaygtcctcagtgccacatccacacggttctggaacacctccagggatggtgacttcaccacctccctgggcagcctgtgccactgcagcaccgctctttctgagaagaaattgttcctcatatccaacctgaacctcatctggtgcaacttgaggtcatcccctctcatcctattaatatacctgggagaagaggctgaactccaccttgctaaaacctctgttcaggttgttatagagagcaataaggtttcccctgagcttcctcttctccagtcaacagccagctgttgattaataccc

SEQ ID NO: 53560 - DNA, 600 bp, Chicken  19866894305208_1
ccaaggaggatgttaggaaaagtaacgggatccgatcagggcgcaatgacattgatgagtcgggacctcccttgcagaggattggaagtgttttcctttatcagacacatgctgtcccttccttaaatgaaatgaggttggataataatattgccatttggtatgcaccaaagactgtcaagcaaggtgacatcttgactttccttgtatctattgctaaaaattcaacagaagatcaattcacactgaggtaaggctattttttcttctgtaccttttgttttttttcctactcttggyatgggaagtcactttctcatgtatgagtttccccaaaattcttcaattctctatggaaactgaattacagttgtttcacttgattctttgcgttctgttcagcctaatactgtatgaattgctgagatgtggtctctttcagtgtgaaaggataatttcaacaaaaggccttagaatactacttaaaaattaaattagtagatctgggacccatatacgtgctaataggagataatgtgtaaattctcctgaactgaggtttgtggtgcttctaatctctcactgaactcatgttaagat

SEQ ID NO: 53561 - DNA, 600 bp, Chicken  19866894305208_2
aactcatgttaagattagtaaagctcaaatccacaaaggtatttataagaaatgagcaaaaattaggcatctaagcaggatttatatacttaaatacctccccacagcttgttgtagacctgtctctgtttcgtacttcagaaactcaagtgtgctattgttgacatacaaagaccaagtctggaaatgaaaaatacctgctttgagtataacttaaaagttacaccataagtgccacatggacttggttactttccaaggtttgggatgttggtgggaagttcactctaactgctgatrttatctgagaacaaacatatccaaagtaatccaagaacaaaggctgtcaggctatactgtggtaaactgaaagcagttgtgtattacatgcaagtgagactgcctagttgtctcttcaagtctgagggtctgtgtgccrgcactgttgtgtagctgagagtactgtgtaagaatagtgggtgcagagctgatttctttcttctagcccttataagtgagtaacaacagctccatcagaagtggagctgtgttgtactgtggttactgagattgactgccatgtcctgagtgtttattttg

SEQ ID NO: 53562 - DNA, 600 bp, Chicken  19866894305208_3
agaaactcaagtgtgctattgttgacatacaaagaccaagtctggaaatgaaaaatacctgctttgagtataacttaaaagttacaccataagtgccacatggacttggttactttccaaggtttgggatgttggtgggaagttcactctaactgctgatrttatctgagaacaaacatatccaaagtaatccaagaacaaaggctgtcaggctatactgtggtaaactgaaagcagttgtgtattacatgcaagtgagactgcctagttgtctcttcaagtctgagggtctgtgtgccrgcactgttgtgtagctgagagtactgtgtaagaatagtgggtgcagagctgatttctttcttctagcccttataagtgagtaacaacagctccatcagaagtggagctgtgttgtactgtggttactgagattgactgccatgtcctgagtgtttattttggaaataagcattggtgccaaggttcccaatggctcacaaacttgcttcccaaagagaaggtgcctcataaatgcaggaagctcgctgcgcccttttacaaacatcataggttcactgcagttggtggctgtgaaggatg

SEQ ID NO: 53563 - DNA, 600 bp, Chicken  19866894305216_1
aataccagaggcagcacctcccattcactcatcttaagaaaataatctgttccacttccaagttcatttcttaaagtaacaaccgtcctctcttctgccaagccctctgaattccaataaaacacagaagcaaagctgcacataagagccacaaagtgttcaagccttgtgtacaccaaactggtgcatccttttctgtgtaacaaaaagcagcaacatcccactgcccaaatgactgttcttacataccaagcgtttttctacagtcttgaaaattgcaatttatatatccagcacacktctgagatgcagcaaatgaggcgggactccactgaaacgagtcagaaagctgttttgtatgagacagtacatgggtggagtaagactgtcccatacaaatactatacaagtacattcaaagtaaacacacgtgggatctgacacactatacaatgcattccacacacactggacttggatggaaagtagacaattaccaatctatacccactcccagcccacttgtggaacccaggcacacagcaatgcattaacttgctttcacacattcactgcacttcacacatcccttcctgcctg

SEQ ID NO: 53564 - DNA, 600 bp, Chicken  19866894305221_1
agttgaagttttatttggatgtggcttgccattaaagctaataacaaactttatcttttactttttatgtataatcatttgtagctgtggtttgtgagactagcactgctcgtaaaactgaatctcttccaaaatgcagaaatggaattcgaaccatttggaaatttagaccagcctgatctttattatgaatattaccctcatgtataccctggacgaaaaggtaagatgctcaatttatgaagtatctattttaaccattaatttttgccctgcttttattattatgattctggtttkttgtttgtttgtttgtttgtttgttttcaaagtgtaaaacactgtttaactgtagattcttttttttgttttggttgggtttttttttgctccccagggagagtgcttgaccactaagttaaatcattatttgtgttacagagttgctggtaagaagtaaaaagaagttactccatcacagtatgggtggtcatttgtgttttgtgctgctgttacaacattgatttgagagaggaatattttcaacaagcgaatgtagtagtgttgtagttcaaacttattaatctttttgaattttaa

SEQ ID NO: 53565 - DNA, 600 bp, Chicken  19866894305221_2
gttgaagttttatttggatgtggcttgccattaaagctaataacaaactttatcttttactttttatgtataatcatttgtagctgtggtttgtgagactagcactgctcgtaaaactgaatctcttccaaaatgcagaaatggaattcgaaccatttggaaatttagaccagcctgatctttattatgaatattaccctcatgtataccctggacgaaaaggtaagatgctcaatttatgaagtatctattttaaccattaatttttgccctgcttttattattatgattctggttttktgtttgtttgtttgtttgtttgttttcaaagtgtaaaacactgtttaactgtagattcttttttttgttttggttgggtttttttttgctccccagggagagtgcttgaccactaagttaaatcattatttgtgttacagagttgctggtaagaagtaaaaagaagttactccatcacagtatgggtggtcatttgtgttttgtgctgctgttacaacattgatttgagagaggaatattttcaacaagcgaatgtagtagtgttgtagttcaaacttattaatctttttgaattttaat

SEQ ID NO: 53566 - DNA, 600 bp, Chicken  19866894305221_3
ttgaagttttatttggatgtggcttgccattaaagctaataacaaactttatcttttactttttatgtataatcatttgtagctgtggtttgtgagactagcactgctcgtaaaactgaatctcttccaaaatgcagaaatggaattcgaaccatttggaaatttagaccagcctgatctttattatgaatattaccctcatgtataccctggacgaaaaggtaagatgctcaatttatgaagtatctattttaaccattaatttttgccctgcttttattattatgattctggtttttkgtttgtttgtttgtttgtttgttttcaaagtgtaaaacactgtttaactgtagattcttttttttgttttggttgggtttttttttgctccccagggagagtgcttgaccactaagttaaatcattatttgtgttacagagttgctggtaagaagtaaaaagaagttactccatcacagtatgggtggtcatttgtgttttgtgctgctgttacaacattgatttgagagaggaatattttcaacaagcgaatgtagtagtgttgtagttcaaacttattaatctttttgaattttaata

SEQ ID NO: 53567 - DNA, 600 bp, Chicken  19866894305221_4
tgaagttttatttggatgtggcttgccattaaagctaataacaaactttatcttttactttttatgtataatcatttgtagctgtggtttgtgagactagcactgctcgtaaaactgaatctcttccaaaatgcagaaatggaattcgaaccatttggaaatttagaccagcctgatctttattatgaatattaccctcatgtataccctggacgaaaaggtaagatgctcaatttatgaagtatctattttaaccattaatttttgccctgcttttattattatgattctggttttttktttgtttgtttgtttgtttgttttcaaagtgtaaaacactgtttaactgtagattcttttttttgttttggttgggtttttttttgctccccagggagagtgcttgaccactaagttaaatcattatttgtgttacagagttgctggtaagaagtaaaaagaagttactccatcacagtatgggtggtcatttgtgttttgtgctgctgttacaacattgatttgagagaggaatattttcaacaagcgaatgtagtagtgttgtagttcaaacttattaatctttttgaattttaatag

SEQ ID NO: 53568 - DNA, 525 bp, Chicken  19866894305221_5
tgtagattcttttttttgttttggttgggtttttttttgctccccagggagagtgcttgaccactaagttaaatcattatttgtgttacagagttgctggtaagaagtaaaaagaagttactccatcacagtatgggtggtcatttgtgttttgtgctgctgttacaacattgatttgagagaggaatattttcaacaagcgaatgtagtagtgttgtagttcaaacttattaatctttttgaattttaatagttaattctagccagaaacaactgttaaagatgagagtttatacatayagaatctaaagtttttcctcctctatgcwttttctgtatgatatttcataaagatttgaactgatttatggctttccacatagtgaaaaagggaaagaaggcagaatctttctcttctgtctgacagctgtttgatgcttttttaaattttttttaaccagccacaaaactgtagattaccagtatttcttgagccttaggtatcattggcccatggattccaaa

SEQ ID NO: 53569 - DNA, 496 bp, Chicken  19866894305221_6
tttttttttgctccccagggagagtgcttgaccactaagttaaatcattatttgtgttacagagttgctggtaagaagtaaaaagaagttactccatcacagtatgggtggtcatttgtgttttgtgctgctgttacaacattgatttgagagaggaatattttcaacaagcgaatgtagtagtgttgtagttcaaacttattaatctttttgaattttaatagttaattctagccagaaacaactgttaaagatgagagtttatacatayagaatctaaagtttttcctcctctatgcwttttctgtatgatatttcataaagatttgaactgatttatggctttccacatagtgaaaaagggaaagaaggcagaatctttctcttctgtctgacagctgtttgatgcttttttaaattttttttaaccagccacaaaactgtagattaccagtatttcttgagccttaggtatcattggcccatggattccaaa

SEQ ID NO: 53570 - DNA, 600 bp, Chicken  19866894305226_1
tctccagccctctgcttgaccttctgcttccctgtggcagtcagtggcatcatgatgttctgtgaccttctgagggatgagcaaagaaatatcttcctggctaaataacgaatctaaaaatcaatttgtggagagagtggaaagcaacgagcatacaaattaaccagtggatgagtaatacatttacatctcgtggatccagttagcttcagagcaggaaaaatttatgacctactgaatttcaagtatgaggcttaaagaaattactgggaggagaattattgggttggatactagacrtcattccagccttcattaatgttcttgtgtgmtctttaaagtttctccctagcagcacccatttccaaggctggtaaaaatcaaccactgtgatcacttgaaaaacactttgtctcctccctctcatttcctcaaattgcatttttattttgtgcataaacaggtaacttactttaaaagtgaaattgtgttaataggtatcatgtagtaagacaaaagctgatgatatgcagatacaatagtaagggaaggattcttttgtgggtgtgtgtgcatgcatttgggaagacgattccacat

SEQ ID NO: 53571 - DNA, 600 bp, Chicken  19866894305226_2
tgtggcagtcagtggcatcatgatgttctgtgaccttctgagggatgagcaaagaaatatcttcctggctaaataacgaatctaaaaatcaatttgtggagagagtggaaagcaacgagcatacaaattaaccagtggatgagtaatacatttacatctcgtggatccagttagcttcagagcaggaaaaatttatgacctactgaatttcaagtatgaggcttaaagaaattactgggaggagaattattgggttggatactagacrtcattccagccttcattaatgttcttgtgtgmtctttaaagtttctccctagcagcacccatttccaaggctggtaaaaatcaaccactgtgatcacttgaaaaacactttgtctcctccctctcatttcctcaaattgcatttttattttgtgcataaacaggtaacttactttaaaagtgaaattgtgttaataggtatcatgtagtaagacaaaagctgatgatatgcagatacaatagtaagggaaggattcttttgtgggtgtgtgtgcatgcatttgggaagacgattccacattttgggtgcatttatgacaatttacaacactt

SEQ ID NO: 53572 - DNA, 599 bp, Chicken  19866894305230_1
  misc_feature (1)..(17): n is any nucleotide
nnnnnnnnnnnnnnnnnaaagagctttttcattcaagtgccctctgtgcatgacaggttaccagtaggctttgaaactgatgcttggagttggccaaatcacccctgcagagactactggacagggaagggctgggggacagcatgatgtgaaactgctgatttctattctgtgagaagtgcctcatagattagggtacatttctgctgtgagatggctctctgcttgatttaggagaggaaagaaaaggaagagctttcttcttttatctttgtgtgattgtgcacacagatgaagatrtttttccctagatacttctcatacacatttgcagtgctgtatagtcaactacgtgatattttaaaatctagaaccgcaaaacatataaattatcttacataaaggctaggataccattatatgagtataattcagtgctgactaactatttcagttagtgtttgtccaactaatggatttctcattatttcttataatggatccaagcaaatgcaggtttatgaatagagggtgagatgattttatgctttctagctcagtttgaactccatcctgtcaacagcaaagacaataattgt

SEQ ID NO: 53573 - DNA, 600 bp, Chicken  19866894305232_1
agccggaaaggtcccccagcactgttacctacaacagcacacacactaactctgaggttaagaagaaaaccccctcaaaatgtgtagcaaagcaaataaattggcactgaagcttgagacaatgaaatagcactgctataaagcccaacatgctcaaatctggaagatacaaaacctggtcaaaatagcagctctatgtacagtttttctctctgcaatttgaaagcgtagtgaataaaaacagagaaggggaaaatgcatttagataattagccttcatgtgctgtctgtttggttggsttttattgcagttatacgtctgtctctgtgcaagcacagatatcagctattaaccctattaaacatttttcattgcagagtactcaggctttgttgagatctaatactaaaccattacattgtcttcccgtgaatcaaacagggtgtgaatcagtttcctaaatacaggcagctaatgccatctaagtgaccccagtgtatgcagcctggctctcctgaaaggcacaggccatatggtacatgtgcaaccttcagtgcatatctcacacacacaagagcataacccagtacagataccca

SEQ ID NO: 53574 - DNA, 600 bp, Chicken  19866894305233_1
atgggagctgtgatttgtttctcagttctcatttctctttgcacacagttgcctctcttttaaaagcagcttttcctaggagctctggcctcaaaggtttgttgtcccccctcccccccgtgtgaattacagatgtcacgaacacctctgacatggtgcatggttgctcattcaaatgcagagtagctgagggggaaaacaagtctttagatctatagcatcccctggggatatcagcttaggacacagtgcgtgccagtgataagccaaactagacactggatgtcaccagcactccaytggaaacacagaggagggagcaggtatctggcagtaaaaacatccactcttaaagcaagaagtctgggcagctaaaggaagaagagttggcaaggcatgaattagtgaggatcatctaacataccctaggaaccggaataaatccagcaaaggagatccaactgaggakgtgaaggaaagggtgaaaggaaattgctattctagtttggaaggacaaccaagaccaaagaaggtgcaggaatctcccagatattcaagagacaacaagccttaaaaagtgggaaggaaaatggatggtgg

SEQ ID NO: 53575 - DNA, 600 bp, Chicken  19866894305233_2
attcaaatgcagagtagctgagggggaaaacaagtctttagatctatagcatcccctggggatatcagcttaggacacagtgcgtgccagtgataagccaaactagacactggatgtcaccagcactccaytggaaacacagaggagggagcaggtatctggcagtaaaaacatccactcttaaagcaagaagtctgggcagctaaaggaagaagagttggcaaggcatgaattagtgaggatcatctaacataccctaggaaccggaataaatccagcaaaggagatccaactgaggakgtgaaggaaagggtgaaaggaaattgctattctagtttggaaggacaaccaagaccaaagaaggtgcaggaatctcccagatattcaagagacaacaagccttaaaaagtgggaaggaaaatggatggtgggttggagaagtccactcttttccctgcagatcctgagtgccatcgcgtctggtgctttcaggagaggtccaacctcacaaacacatcgcatagctgcttcctgcatatgtgtctggattacgacatgagcagcagcttgggcagacgtgacccacgctggtctgccaca

SEQ ID NO: 53576 - DNA, 600 bp, Chicken  19866894305234_1
catagacgatggaggccccgtcgtggaagagcagatactgccggcagaacttgatgctcttggcctgcaccaggtcccgctgcgaccactctgtggggatgtgggtgaggagaagcgccgccccctccgcccccctcgcccggtgcccaccccataccggtgtacaggctgcagtatttgcccccgtactgcgtggtgacgtcggggcccaggcaggcggtgctgatccccgggttctggctcagctcccggtacagcgccgcagcctcctccgcgctgggcagcacctgcgggagcacrggcagctggggcatggggggggcaaagggcaggcygggaaaagcttctatgggggcaccgagggggctctgagcaaggaataaggggacacgggaggaatcatgaaggcgtaggggggttctatgaggggtaccagggcacgtggggggctgcgactggggcaccaggyccagaggggggctgctgtgtggtaccaggcccataggggagctgctgtgtggtaccaggcccagggggggctgctgtgtggtrccaggcccacaggggtggttgggctcccaggcctcaggtggacaggaa

SEQ ID NO: 53577 - DNA, 600 bp, Chicken  19866894305234_2
tactgccggcagaacttgatgctcttggcctgcaccaggtcccgctgcgaccactctgtggggatgtgggtgaggagaagcgccgccccctccgcccccctcgcccggtgcccaccccataccggtgtacaggctgcagtatttgcccccgtactgcgtggtgacgtcggggcccaggcaggcggtgctgatccccgggttctggctcagctcccggtacagcgccgcagcctcctccgcgctgggcagcacctgcgggagcacrggcagctggggcatggggggggcaaagggcaggcygggaaaagcttctatgggggcaccgagggggctctgagcaaggaataaggggacacgggaggaatcatgaaggcgtaggggggttctatgaggggtaccagggcacgtggggggctgcgactggggcaccaggyccagaggggggctgctgtgtggtaccaggcccataggggagctgctgtgtggtaccaggcccagggggggctgctgtgtggtrccaggcccacaggggtggttgggctcccaggcctcaggtggacaggaaggccgcggcggsggctatggggcagggggacagtc

SEQ ID NO: 53578 - DNA, 531 bp, Chicken  19866894305234_3
tgcagtatttgcccccgtactgcgtggtgacgtcggggcccaggcaggcggtgctgatccccgggttctggctcagctcccggtacagcgccgcagcctcctccgcgctgggcagcacctgcgggagcacrggcagctggggcatggggggggcaaagggcaggcygggaaaagcttctatgggggcaccgagggggctctgagcaaggaataaggggacacgggaggaatcatgaaggcgtaggggggttctatgaggggtaccagggcacgtggggggctgcgactggggcaccaggyccagaggggggctgctgtgtggtaccaggcccataggggagctgctgtgtggtaccaggcccagggggggctgctgtgtggtrccaggcccacaggggtggttgggctcccaggcctcaggtggacaggaaggccgcggcggsggctatggggcagggggacagtcggggaaaggcagaactcggggtgaggggaagcaccggtcggagggaaggttacggggggcggggt

SEQ ID NO: 53579 - DNA, 448 bp, Chicken  19866894305234_4
tacagcgccgcagcctcctccgcgctgggcagcacctgcgggagcacrggcagctggggcatggggggggcaaagggcaggcygggaaaagcttctatgggggcaccgagggggctctgagcaaggaataaggggacacgggaggaatcatgaaggcgtaggggggttctatgaggggtaccagggcacgtggggggctgcgactggggcaccaggyccagaggggggctgctgtgtggtaccaggcccataggggagctgctgtgtggtaccaggcccagggggggctgctgtgtggtrccaggcccacaggggtggttgggctcccaggcctcaggtggacaggaaggccgcggcggsggctatggggcagggggacagtcggggaaaggcagaactcggggtgaggggaagcaccggtcggagggaaggttacggggggcggggt

SEQ ID NO: 53580 - DNA, 388 bp, Chicken  19866894305234_5
atggggggggcaaagggcaggcygggaaaagcttctatgggggcaccgagggggctctgagcaaggaataaggggacacgggaggaatcatgaaggcgtaggggggttctatgaggggtaccagggcacgtggggggctgcgactggggcaccaggyccagaggggggctgctgtgtggtaccaggcccataggggagctgctgtgtggtaccaggcccagggggggctgctgtgtggtrccaggcccacaggggtggttgggctcccaggcctcaggtggacaggaaggccgcggcggsggctatggggcagggggacagtcggggaaaggcagaactcggggtgaggggaagcaccggtcggagggaaggttacggggggcggggt

SEQ ID NO: 53581 - DNA, 599 bp, Chicken  19866894305240_1
  misc_feature (1)..(157): n is any nucleotide
nnnnnnnnnnnnnnnnnnnnnnnnnnnnnnnnnnnnnnnnnnnnnnnnnnnnnnnnnnnnnnnnnnnnnnnnnnnnnnnnnnnnnnnnnnnnnnnnnnnnnnnnnnnnnnnnnnnnnnnnnnnnnnnnnnnnnnnnnnnnnnnnnnnnnnnnnnnnncatggatgacttcaggccgggtgagtcctcattctcacctttctgggctttttttttttggtggtgtggatggaaagcagaactccctgaggtgtctcagggctttattttcagctccatcggtcaaacgtttctctctattyctctctgaatttggttccttccgtaaaatgggatcccattgcccaaaggaaccattggaagcctcccctgggaggagcagaagggaatttgatgctctctcttgaagtgaggatcgtttggtgacgttttcccccttcccaccatggaggcgttcaaacgtcagctgagatttgcaagcaggggtagagcactgctgtgggagagttcagcgatgttacagaagtccataagaaaagtagaataaaaagcaatacagaattacacatttattttttcatttttgcatcgggcataaaaa

SEQ ID NO: 53582 - DNA, 563 bp, Chicken  19866894305241_1
gctacctctgacacaactcaagaagagatcaaacagttgttgtaagaggaaagttcaatgtaaaaaatgcattagcatgattttatttatttatttatttgtttggcgcaaaatcatacgacaattgtcttttgtgttggcaagtccccataacctacgtgatgatatggcatgggactgttctgagaagttactacagtgtgtttgtctcatcatacatactttcctgcatttcatcttgacagacttttgaaataagccaaaacacataaagaaatctttccaagcctggcatttcayagaatyacagaacatcccaagcaacccayaagaaycaccaagtccaactctaagacaggagcactcaaatctcaaacccagtgtttgagagtgctgtccaaacgtctctgaactccagcaggcatgtgattgtgcccactgccctgagaagcctgttccagtgctcagccaccctctggtgaagaactttttcctaacacacaacctgacacagcttccaggttacttatcccagaatcatagaatggcttgagtggaaggga

SEQ ID NO: 53583 - DNA, 557 bp, Chicken  19866894305241_2
tctgacacaactcaagaagagatcaaacagttgttgtaagaggaaagttcaatgtaaaaaatgcattagcatgattttatttatttatttatttgtttggcgcaaaatcatacgacaattgtcttttgtgttggcaagtccccataacctacgtgatgatatggcatgggactgttctgagaagttactacagtgtgtttgtctcatcatacatactttcctgcatttcatcttgacagacttttgaaataagccaaaacacataaagaaatctttccaagcctggcatttcayagaatyacagaacatcccaagcaacccayaagaaycaccaagtccaactctaagacaggagcactcaaatctcaaacccagtgtttgagagtgctgtccaaacgtctctgaactccagcaggcatgtgattgtgcccactgccctgagaagcctgttccagtgctcagccaccctctggtgaagaactttttcctaacacacaacctgacacagcttccaggttacttatcccagaatcatagaatggcttgagtggaaggga

SEQ ID NO: 53584 - DNA, 534 bp, Chicken  19866894305241_3
caaacagttgttgtaagaggaaagttcaatgtaaaaaatgcattagcatgattttatttatttatttatttgtttggcgcaaaatcatacgacaattgtcttttgtgttggcaagtccccataacctacgtgatgatatggcatgggactgttctgagaagttactacagtgtgtttgtctcatcatacatactttcctgcatttcatcttgacagacttttgaaataagccaaaacacataaagaaatctttccaagcctggcatttcayagaatyacagaacatcccaagcaacccayaagaaycaccaagtccaactctaagacaggagcactcaaatctcaaacccagtgtttgagagtgctgtccaaacgtctctgaactccagcaggcatgtgattgtgcccactgccctgagaagcctgttccagtgctcagccaccctctggtgaagaactttttcctaacacacaacctgacacagcttccaggttacttatcccagaatcatagaatggcttgagtggaaggga

SEQ ID NO: 53585 - DNA, 528 bp, Chicken  19866894305241_4
gttgttgtaagaggaaagttcaatgtaaaaaatgcattagcatgattttatttatttatttatttgtttggcgcaaaatcatacgacaattgtcttttgtgttggcaagtccccataacctacgtgatgatatggcatgggactgttctgagaagttactacagtgtgtttgtctcatcatacatactttcctgcatttcatcttgacagacttttgaaataagccaaaacacataaagaaatctttccaagcctggcatttcayagaatyacagaacatcccaagcaacccayaagaaycaccaagtccaactctaagacaggagcactcaaatctcaaacccagtgtttgagagtgctgtccaaacgtctctgaactccagcaggcatgtgattgtgcccactgccctgagaagcctgttccagtgctcagccaccctctggtgaagaactttttcctaacacacaacctgacacagcttccaggttacttatcccagaatcatagaatggcttgagtggaaggga

SEQ ID NO: 53586 - DNA, 562 bp, Chicken  19866894305244_1
tttttttttcaaatggacgcctgttttatgcacctgagtgataacaaattgactcattacatttcttgtatcttcataaatgtaagaaagcatatcttaatgtagtaacattaaaggcaactaaaagcatacagacttttatacttttcagcgattgttatttacgtattatttctcttcaaagaaactggatacagagcctttggagttgtttgagattgcagttaaagagctcacgtttgatcagctgcagttgttgaaggtaccgttactttggctgttgtgatatgctgggtgtgrgatttgtagctttggtttctggtgtagctgtagataatatgggaaagcatatgctttaaaaatagtaaaagtagaacaagtagttaattccaagaatagtacttctgtaccatcattacagcttgattaaatttcactactcagtttttttttccttagtcagggaagcacataactgaaccaagaatcatgttttggttaatttctagttacataagctgcatctgtaatggaacttcaaacttaaaagcaaataaaataa

SEQ ID NO: 53587 - DNA, 600 bp, Chicken  19866894305245_1
gccagcaacaacttctggtgctttctaacaagtgactatgttctttaacagtgaagcctttgtgtttctgacagacactgtcagtatttttggtgggatacagtggttgtgcagtggttggtatggtgtggcaccctgtaacagaacatcattaaatctcatgttccaaaaggagaaaacacctgtgggaaatgccttatccccacatgctgcagttcgaggtaggatgtgcttatctttacacactccttttcatatgaactatgggcaatctttgtctttcccagaaatgaacgtcartatcgggatctgtcccactgcctttctctgcttcccatctcagagcggggccttcacaagctgcaggacaactttgactgctttgcagacaagctccaagacccagccgtctacagctgtttccaagctgtgctggttcgatgccgcagagcagccagcaaacctgagactaaagtaaggatggttggtgggaagcattcrggtgtggaaacaagtgctttataaacacagtgactggaaagctttgcagttctccatgttaagctgactattctttggcctcaacaatttaatggagat

SEQ ID NO: 53588 - DNA, 600 bp, Chicken  19866894305245_2
cccacatgctgcagttcgaggtaggatgtgcttatctttacacactccttttcatatgaactatgggcaatctttgtctttcccagaaatgaacgtcartatcgggatctgtcccactgcctttctctgcttcccatctcagagcggggccttcacaagctgcaggacaactttgactgctttgcagacaagctccaagacccagccgtctacagctgtttccaagctgtgctggttcgatgccgcagagcagccagcaaacctgagactaaagtaaggatggttggtgggaagcattcrggtgtggaaacaagtgctttataaacacagtgactggaaagctttgcagttctccatgttaagctgactattctttggcctcaacaatttaatggagatgctgatggaaatcctggagcaggaactggctatgccatggatgtaatgcttctctctgttttttgttgttgttgttgttttgtttgtttgtttttgctgctgtgttacaactgtaccaggctttggctgaagagctggagcagaagctgtcygcctgccataaccaagggctggattcagcagaggtgtgccaggaaggtg

SEQ ID NO: 53589 - DNA, 598 bp, Chicken  19866894305245_3
agccagcaaacctgagactaaagtaaggatggttggtgggaagcattcrggtgtggaaacaagtgctttataaacacagtgactggaaagctttgcagttctccatgttaagctgactattctttggcctcaacaatttaatggagatgctgatggaaatcctggagcaggaactggctatgccatggatgtaatgcttctctctgttttttgttgttgttgttgttttgtttgtttgtttttgctgctgtgttacaactgtaccaggctttggctgaagagctggagcagaagctgtcygcctgccataaccaagggctggattcagcagaggtgtgccaggaaggtgataaaactccaatgccagagccagccaagcaaaaaccaacattaggtatcttccctttgtgggactgcagtcttcccccaaccttacagcccagcagggacacctagggagttttcttcacccttacagatagaaggctactacctttccttttttcttagcaggcagccgccgccagcccctgagcacagccaacagggatgatgatgatgactgattttgttacaccccggccacaagcactccgaa

SEQ ID NO: 53590 - DNA, 600 bp, Chicken  19866894305255_1
ctgccctcctctctccccactgccaccaccaaaactttcttgtcaatcaagctctgggcacacacatcaaagctccatgcgggaatggccccaaggggtcagagaaaattcatggcagggccaacgtgaggcacaaagagagagagagaagcacagaccgagagctagacagacacactgagccacagaaacacacaaacagaacgtgccccagtataagcctctaccctatttactcacaagttgacaaataatcttagttctgcatttcaggctccaccaccaccaccatttcccacygctggcaaaatatcaatccaaaatcttttaactgaaaggcaccggacagcagttcacaagcacacataacacagcctccttcctatggcagagcacttccctccaccactaccccttcatagtgctcagccaacagggctctgctgccaaatttatatccgataagtttttccattcaaatctttttccrgaataacagttcattcacaccatcccttatccagcttcctcgctgcacaattctcaggtgtcaccccctgcttcagggctcactgtgggtgcagtagaggaagcaggcag

SEQ ID NO: 53591 - DNA, 600 bp, Chicken  19866894305255_2
acacacaaacagaacgtgccccagtataagcctctaccctatttactcacaagttgacaaataatcttagttctgcatttcaggctccaccaccaccaccatttcccacygctggcaaaatatcaatccaaaatcttttaactgaaaggcaccggacagcagttcacaagcacacataacacagcctccttcctatggcagagcacttccctccaccactaccccttcatagtgctcagccaacagggctctgctgccaaatttatatccgataagtttttccattcaaatctttttccrgaataacagttcattcacaccatcccttatccagcttcctcgctgcacaattctcaggtgtcaccccctgcttcagggctcactgtgggtgcagtagaggaagcaggcagctgcatctcactgataccccatcagttctccagccagtcaccagcaggacacgctgccggagagctttctgcaacactaaatattatgaagatatatgtagaaatatgcacacagagtggaataacctcacttgtccaagaatgccttggcataaaggtgagaaggtgttagtaccctcaggacaggaaa

SEQ ID NO: 53592 - DNA, 600 bp, Chicken  19866894305272_1
ttgctgcccctaaaatgcatttacaattccaaggttgctgaataggaagttaagaaaatttattgtacaactatcttcaaatatttttaaaaggtcaagaaaaacccttgatgttggttttcaattatgttcatttcatgtagtgtttaatagaatgtcaacagaaaaaaatgtagacatcaagtgtaaaccatgacttagaaaggagaagcagtattttattcacagtagtgccttgaatgtaatcagatgcaagcaatataattaaaaatacgggtcgattatgtttttatgaaatgstatgtatttatctgggatgagaaaggtaatttctggaaaataaaaagtaatctgaattactttttctacaagagagttattgacatatttcaaaaggcaccagtagacacttcaagtgatgtttgtaaccaaggaattccacctgtgtttaacctttacgttgtcatccaaacttacatctggccatagagccagctgagatcctgccttcatctgcagaagtaaataaagacctatcatataaaatattgcatacaaatgttgaaggccaaatgatgacagtctcaaggtacagatcca

SEQ ID NO: 53593 - DNA, 600 bp, Chicken  19866894305281_1
tttacaccgtgcagtggtattattaggaaggaaggatcagtaaaaaggaatctgcaacctgatctggtgctgaggaatgccttctgaatgtgttatttgaatttagttattacttctgggaggtgtgaacattctgcatggctcttcattcaaaacctgaaattgactgtgaagagtactaaaaaagttatgcaagccttcatgcaattaagcaaagtagtttcaaaaaggtaattatatgcagtacatcatgatagccaaaaaatacattatgtgatggatgttccttgcattgcattwcttttgatggtccattttctggattttaaaattatcaataaatgtatgtatatgtttggatttagatcctgcacacttagttgattttttgttgttgtttttaaactacatttgctccctcgtggatgttgctccatctccatttctaaaatgctgaatgggcagattgtttctatcaagtattttacatgaactgttaacgaagtgtgaacaataggggactgtcaactaaatggttctcaggaattgcaaagttaagtgatatagaagccctactcaaggaaattcagctttttattg

SEQ ID NO: 53594 - DNA, 600 bp, Chicken  19866894305282_1
agcagagtgagatcagaaaatcatctatttagttcatgctgcatttgttcattcagtcagtacatgttgctctctggtcagctagctagtattgcacggactgaaggctctgtcaagaagaaagctttcatttgcttaccagcatcatgtgggataccatgaaagagacaggtaacaaagcacagccagctttggttgtggtcagttgctgtgatcatcaagctccatgtcttgctaacatcttcagattagccggaagctttgagctctgctagacaaggatataattgcttggtgcayttaaagtgaagtgagagcaagsttgttcgtgccttcagcacaccctaattaggctggctgcaggtgcagggttaggactgggttgcctttcactggtgtttgttgagtgcaggtggactttgcagagttaaattggagctgaagagctccgcaggtgtatgcagactgtggttcagtgcagctctgttgcctgacctatgtagaaagctcttaaaggagatataacatgtatagttctaaaagtatagattaccagctgacttgttttagttaataataaatcgaaagcatagcagttca

SEQ ID NO: 53595 - DNA, 600 bp, Chicken  19866894305282_2
atctatttagttcatgctgcatttgttcattcagtcagtacatgttgctctctggtcagctagctagtattgcacggactgaaggctctgtcaagaagaaagctttcatttgcttaccagcatcatgtgggataccatgaaagagacaggtaacaaagcacagccagctttggttgtggtcagttgctgtgatcatcaagctccatgtcttgctaacatcttcagattagccggaagctttgagctctgctagacaaggatataattgcttggtgcayttaaagtgaagtgagagcaagsttgttcgtgccttcagcacaccctaattaggctggctgcaggtgcagggttaggactgggttgcctttcactggtgtttgttgagtgcaggtggactttgcagagttaaattggagctgaagagctccgcaggtgtatgcagactgtggttcagtgcagctctgttgcctgacctatgtagaaagctcttaaaggagatataacatgtatagttctaaaagtatagattaccagctgacttgttttagttaataataaatcgaaagcatagcagttcaatgaacaaatgagtatacaatg

SEQ ID NO: 53596 - DNA, 600 bp, Chicken  19866894305297_1
ctctttcatcttttagccacaagctgtggctccaggggacatacaggaacaaagatgagcagatatcacaaatgaaggagctcatatgcaaacactctggctcacccactgctgacatatctggaacatttaaaagctaccagggaagagcagggatctcttgtgcaggttctgtcactgtacatccctgagatacagagagattcccaagagagagaaaaaaaatagaggaaagtgaaaatatagaggaaagtggaaaaaaaagatgaatgagaactgagaatttttgcacaaactttrttcagtaaatggtgacaatgcagccaggaaaattaagtcatggatattagcaggtatgccatggatagtaattcattcactaaaacagtatcattttatggtcttctggcatcttgtggcccaygttgtaagttctttttatggtctactgcatctctcaaccaccttggaatatcagaccaacatcttgtgggccacaactagacacaaaagatccaccctgataagattgatgacccatggcccattacccaggaatgtcagacttaatctccttgtacagctcacaaagaaaaactc

SEQ ID NO: 53597 - DNA, 600 bp, Chicken  19866894305297_2
aacatttaaaagctaccagggaagagcagggatctcttgtgcaggttctgtcactgtacatccctgagatacagagagattcccaagagagagaaaaaaaatagaggaaagtgaaaatatagaggaaagtggaaaaaaaagatgaatgagaactgagaatttttgcacaaactttrttcagtaaatggtgacaatgcagccaggaaaattaagtcatggatattagcaggtatgccatggatagtaattcattcactaaaacagtatcattttatggtcttctggcatcttgtggcccaygttgtaagttctttttatggtctactgcatctctcaaccaccttggaatatcagaccaacatcttgtgggccacaactagacacaaaagatccaccctgataagattgatgacccatggcccattacccaggaatgtcagacttaatctccttgtacagctcacaaagaaaaactcacaaaaaatatattcaatatgtgtacaataagtgctttgaaggcaattcctacttttctctggtggctatagaggcaatgtctggctattctgaagagctgcaggctggattgcctactgtacc

SEQ ID NO: 53598 - DNA, 600 bp, Chicken  19866894305300_1
atgtctcagttaaataaggcatagaaacacaaaaggctcaacatcagccacatgttcatctctatttcttgaagctttcaccataagcacaccatcctgctgtatttctctgaatcaacacctactatgcaaacccaaatatcaaccaacaactctaggaaggaatatggaacgaccagttgtctttatcatcacaaaaatcctaacattatcaatctatcctatatccgtatactaaaatatctattagccaaagagttacccctatgccaaagaaagctgtgtttcagttctggcacytgaatgtgagttatagaatagtgagatctccttagaaaaacaagtagagaaagtattataaaacagataaatttaactagcaaaacatcccctgttagcaaaccaacaaattcagacaactgactgcaatttataacactaaatagtaaaaaaagaaataaccataccatgcctacagtcttcatctgcttgcccatactttttctgaaaggtaaaacacgaaaagtttaaaaatagcattattccacttggcataaacaactacatgcttgaattacatctttcttaaaaacttttaca

SEQ ID NO: 53599 - DNA, 397 bp, Chicken  19866894305303_1
gtgattattaggatcctcccattgctgctgctttctgttgccttttctccatctctttgcccagatgcctgcagggaagcagaccccgtaggtgcttccaagaaaggatgtcagcagatgtgtcccaccagcgcactctttgccaccctagcagaagcacacgcacgctcacacaccacgggagcgagttttgactattttagggcctgaaatttccctgtcggcatggcaacttcctactccgcacctctgacggaagcagcttaaaatagaaaagccagaacagcggcagcaagcccrgctccggcaccgtggggctggcaagggcaatttgcagggccaccaacacccaacacctgccagtgcggtgcttcaaccagcaccgaaccctcaccat

SEQ ID NO: 53600 - DNA, 600 bp, Chicken  19866894305313_1
ggggatgagagcgctcaaataactcatccctgatcagacctgcaactgacaaaccaaccagggcatctgcagcagcaagattaaggacaaagtagtgtcccttgtagccggtcttccagataaggcgaaggagggcaatggccaccagcacgttggcagtgatgatgagcggagccagcacagcaaggatgattcccacagccaagctagccatgtctggccactgcagggcacaacccaaagatggcgtgtccacagcacgatcctagagcattcctcacctgaggcttcttggcatgmacagctcagtaagcaggcagtgggcagctgtgagcacagctcctcgctctccaggtggtgccgtgaaagccgtgggtgtagcagtgcctcaggctgcagagcagaattctgctgtgctagaagggactgatgcactcacagcacccgctgtgcccacagaggtccctcccctcgtgccacgtttccagacaaccccagagcaggagggtgagcacacagcactgagcaggaaggctgtgtgaggctgggctgacgccactcwcctcctgaacagcccacacgtgctcccctggctccctg

SEQ ID NO: 53601 - DNA, 600 bp, Chicken  19866894305313_2
atcctagagcattcctcacctgaggcttcttggcatgmacagctcagtaagcaggcagtgggcagctgtgagcacagctcctcgctctccaggtggtgccgtgaaagccgtgggtgtagcagtgcctcaggctgcagagcagaattctgctgtgctagaagggactgatgcactcacagcacccgctgtgcccacagaggtccctcccctcgtgccacgtttccagacaaccccagagcaggagggtgagcacacagcactgagcaggaaggctgtgtgaggctgggctgacgccactcwcctcctgaacagcccacacgtgctcccctggctccctgtcccagcagcagggcagcagccccctgcacagggtgtttcagcatctcccattccggggccgcccgtactgctgttggcctctccatcatctcccagtgcaaccatgagacctgcctaggggcttgtggtccatttcagcaccaggatcacaccctgatcactcctccttgtacagtggtgctgccgtggtggcacacaggggaggtgggcacaccagccaagcactaaggacctgagcagagccagtacttggctttgatg

SEQ ID NO: 53602 - DNA, 600 bp, Chicken  19866894305314_1
gtatggccgtacaagtaaacatggactttgtacaccggaagcccttgatacagtgcttaatgactgaagcagaatagcatgtggctgaaagactgtgccttcttgtacaagtccctcttatctcattacttagaatactagaaaactaaataacactctatagattaacattagataaagagaatacagtgaactctatgtttgccctcttctatgtgaacttgcatgacaggcttcagagctgatgtttgtattagacagattttttatgtgggtctaagttaatcagcactgaaatcycaccatctgttcagaagataccatctttaaatggcaaaagctttacttaaactttttcagatggtgaaggagagtgtaataccctgtaggcatgtatctatatcaaattttctcacttccaaaaatccctctcacttctagatatagggtgaaaccaaaatattaaagacagatctagagtctgtttgctcaggcacagtaaggaaacctgactccaggtaccttttaaagtgggtaaattacattacgtttcacttccatctggagagaattaaagcaggcctagttaatatagcttta

SEQ ID NO: 53603 - DNA, 600 bp, Chicken  19866894305316_1
cagagtgtgggattcctgtaccctccatgaggacgaggacaagtcctgactcacagcagggaagattcaagttagttcttgagctgtaaggagagcaaagtctgcagaggttgggcatctccattgacagagattgttagaaatgatggaggcagaggggtagttctggtcctcaccgagagcctctggtgatatggtggccctccacatctggaacacccggacagctgccacattgccagggccgtatccaggctgcgaccacagagaggagccctgggcagagagcagccctgatgycatgagggtcaggctgggatgctgatgrggtgggcactgctgggtccgtgtggtcaggctggtgctgcagggtcaccggggttggggcgtgcagccaycagaraggagaagagggcagcctggataaaacaggatgtaaaacctgtcttggggaatccatttctttgccctgagctcctggctgatggaaaattctggctcaggaaacagaaagtcaccaggggagacctggaagacaatgcggtgacaaatggcgacctcgggagaagtggatccacttggccagcccatggccctgct

SEQ ID NO: 53604 - DNA, 600 bp, Chicken  19866894305316_2
gaggacgaggacaagtcctgactcacagcagggaagattcaagttagttcttgagctgtaaggagagcaaagtctgcagaggttgggcatctccattgacagagattgttagaaatgatggaggcagaggggtagttctggtcctcaccgagagcctctggtgatatggtggccctccacatctggaacacccggacagctgccacattgccagggccgtatccaggctgcgaccacagagaggagccctgggcagagagcagccctgatgycatgagggtcaggctgggatgctgatgrggtgggcactgctgggtccgtgtggtcaggctggtgctgcagggtcaccggggttggggcgtgcagccaycagaraggagaagagggcagcctggataaaacaggatgtaaaacctgtcttggggaatccatttctttgccctgagctcctggctgatggaaaattctggctcaggaaacagaaagtcaccaggggagacctggaagacaatgcggtgacaaatggcgacctcgggagaagtggatccacttggccagcccatggccctgctctgggctctgaaagattacgtgagagat

SEQ ID NO: 53605 - DNA, 587 bp, Chicken  19866894305316_3
agtctgcagaggttgggcatctccattgacagagattgttagaaatgatggaggcagaggggtagttctggtcctcaccgagagcctctggtgatatggtggccctccacatctggaacacccggacagctgccacattgccagggccgtatccaggctgcgaccacagagaggagccctgggcagagagcagccctgatgycatgagggtcaggctgggatgctgatgrggtgggcactgctgggtccgtgtggtcaggctggtgctgcagggtcaccggggttggggcgtgcagccaycagaraggagaagagggcagcctggataaaacaggatgtaaaacctgtcttggggaatccatttctttgccctgagctcctggctgatggaaaattctggctcaggaaacagaaagtcaccaggggagacctggaagacaatgcggtgacaaatggcgacctcgggagaagtggatccacttggccagcccatggccctgctctgggctctgaaagattacgtgagagatagcacgttcctgcttcacaatatctgtaatggcaacgatcgcgtttgcaaaggcaaa

SEQ ID NO: 53606 - DNA, 582 bp, Chicken  19866894305316_4
gcagaggttgggcatctccattgacagagattgttagaaatgatggaggcagaggggtagttctggtcctcaccgagagcctctggtgatatggtggccctccacatctggaacacccggacagctgccacattgccagggccgtatccaggctgcgaccacagagaggagccctgggcagagagcagccctgatgycatgagggtcaggctgggatgctgatgrggtgggcactgctgggtccgtgtggtcaggctggtgctgcagggtcaccggggttggggcgtgcagccaycagaraggagaagagggcagcctggataaaacaggatgtaaaacctgtcttggggaatccatttctttgccctgagctcctggctgatggaaaattctggctcaggaaacagaaagtcaccaggggagacctggaagacaatgcggtgacaaatggcgacctcgggagaagtggatccacttggccagcccatggccctgctctgggctctgaaagattacgtgagagatagcacgttcctgcttcacaatatctgtaatggcaacgatcgcgtttgcaaaggcaaa

SEQ ID NO: 53607 - DNA, 600 bp, Chicken  19866894305317_1
attacagcctagtataatgtttctggagttaacaggtctgtatgggtgttacagcaaatgtcaaatatagtcctataatctgttacttagatttctgtttctcttaagtttgcatcagagtaaaaaggaattaaaagataaaaacaaattaattacaaaatgatgtagttctgtttcactatttataccctgagtttaacttgttaataacatacagaacacttgcttccaaattagcttttcaaaaacagaacttacctgaactaattcatgcttgaattccaacacttctgcaacacktctgagtattgctgcaaaagaacatcttataactacattcctactgaaaattgccacttttcagaactactttatttttttctaaattcatggcattttccacagatttcattgatatccacactactaaaataagggagtagctcagagtaaggtacctctgataacttaagtaccgtcttatgcctgccaggaaattctttattccagtatttgttatatgttacacttaagtagctaaaaacgtgtaaagcattctcttttcttattctcttatcttatgttctgcatggtgggcac

SEQ ID NO: 53608 - DNA, 600 bp, Chicken  19866894305323_1
ggcgcatagaatagaatcatagaatggcctgggttgaaaaggacctcaaagatcatccagtttcaccccccctgccatgggcagggtcatcaaccaccagaccaggctgcccagagccacgtcccattaaagcactgctcaacacaagagcacatataggagacagcaggtgcagagttaaccagctccagctgacggctgctctgcagaagacagagccgctgttctgccacaaaacgctccagcaaaagggaaacccaactgccactcagcaacggcgctccaggaattcacaacacrgcttttggtacagctgyctgatgctttcaaagtgctcagtacataaggcaatatgaaagtgatccagaccactactgacgcctgaggaggttctttggggcagagaagctgaccgaagtcatgctgtgaagatgcttcactacgcctctaagatgagcatgaactcagggcacgggacctaaggacaacaccagaacaccacatccccatcgaaacggcacgacagactgcacctaaatcagatctgagccttaactcggtcactgtaggctccacctaccccaggacaaggacttccaa

SEQ ID NO: 53609 - DNA, 600 bp, Chicken  19866894305323_2
catagaatggcctgggttgaaaaggacctcaaagatcatccagtttcaccccccctgccatgggcagggtcatcaaccaccagaccaggctgcccagagccacgtcccattaaagcactgctcaacacaagagcacatataggagacagcaggtgcagagttaaccagctccagctgacggctgctctgcagaagacagagccgctgttctgccacaaaacgctccagcaaaagggaaacccaactgccactcagcaacggcgctccaggaattcacaacacrgcttttggtacagctgyctgatgctttcaaagtgctcagtacataaggcaatatgaaagtgatccagaccactactgacgcctgaggaggttctttggggcagagaagctgaccgaagtcatgctgtgaagatgcttcactacgcctctaagatgagcatgaactcagggcacgggacctaaggacaacaccagaacaccacatccccatcgaaacggcacgacagactgcacctaaatcagatctgagccttaactcggtcactgtaggctccacctaccccaggacaaggacttccaaaacagctgagaacatct

SEQ ID NO: 53610 - DNA, 600 bp, Chicken  19866894305323_3
gcctctaagatgagcatgaactcagggcacgggacctaaggacaacaccagaacaccacatccccatcgaaacggcacgacagactgcacctaaatcagatctgagccttaactcggtcactgtaggctccacctaccccaggacaaggacttccaaaacagctgagaacatctcccaccacgccaaccgaggacacagcatcagcaagaacgcgcacagccaaggtgctgataaccatcatctgctatttcaaacattaaaaaaatagccctcgtggcactcctcaatctaaagaccawtcgatatctgcgactgcacgtgtgtggccaccaacgtgtacctgtgacayggaaaagatgggatgcacctcaacggagcaccacaccgctgtgcctctgagctgtccgaggctttctactttgccaaaaatagaccaaagcgaagactgatttccaccaatatcacgaagcacactgccaaagtacacgggggcccttgggaaatacaccaggcgacacgggggaaagagagtcgtgaagtcaggttctcttaccttcaacctcagtaaagtaacaaagcaattcattattaaccgcaag

SEQ ID NO: 53611 - DNA, 600 bp, Chicken  19866894305323_4
gaacaccacatccccatcgaaacggcacgacagactgcacctaaatcagatctgagccttaactcggtcactgtaggctccacctaccccaggacaaggacttccaaaacagctgagaacatctcccaccacgccaaccgaggacacagcatcagcaagaacgcgcacagccaaggtgctgataaccatcatctgctatttcaaacattaaaaaaatagccctcgtggcactcctcaatctaaagaccawtcgatatctgcgactgcacgtgtgtggccaccaacgtgtacctgtgacayggaaaagatgggatgcacctcaacggagcaccacaccgctgtgcctctgagctgtccgaggctttctactttgccaaaaatagaccaaagcgaagactgatttccaccaatatcacgaagcacactgccaaagtacacgggggcccttgggaaatacaccaggcgacacgggggaaagagagtcgtgaagtcaggttctcttaccttcaacctcagtaaagtaacaaagcaattcattattaaccgcaaggaaatactcatcgcgttccagaagccttcgagacaggctgctcagatgca

SEQ ID NO: 53612 - DNA, 600 bp, Chicken  19866894305326_1
ttacttaaaagttctcctgtgctctctggctggtgatttttgtagttagaaaaggcagcagatacaagtcccaggatgctggtccacatctcaccagtggggcccttgtagttgaatgcagggcagcctcctggctctcctgcgtggctgcttggccacagccactgctaatgggtgttgccagtcaaagctgcagccagcatgagcttgcttgctgcacaggcaacatgaatcttagaatcatggaatgacttatgttggaagggaccttaaaggcctgtttcaaccccctgctgtggkctgggtgcccctaacaagatcaggctgcccagtaccccatctagcctggccttgggcacctccagggatggggcaaccacaactgacactcagggttgcattgctgaagtgttgctatgccattcctaacattcattgtaggctgaaagatattgtgaaataaattgctgactttagagattaatgagattgagaggaaaagaacactgatttcaggtaagtaatgctcaaatgagtaagcccacctaaaataatgctgaatttcaaagacactcttttactgttcagaatcattctgtt

SEQ ID NO: 53613 - DNA, 600 bp, Chicken  19866894305337_1
tgatctctagaggtccctttcagcccctacaattctatgactctgtgattctctagcctccccttctgacatttcagaatcatatgtatgaattctcgtatgtatgcttacctagtttgagcagctgtgtaagcaaaagcacttagtgaacgtgttagagatgaagtattattgctttttaatacctggcatctaaagcttgcaaggaaactcacaaataaagacatttattaggactctttcctatagaagttaaacagacacttcagttttgctgtgatttttttattagacgttttycattacttttttctttgctatgaagttgcaagttacagaaaaggtaaaagcmgggaaaacaaaagamagacatagaaacattccatggatgagtaggataataccgatgtatatgtttttcagtggatacctaagtccaagattgaacaaagcaacttaaaggatgtgtcccaagccaaaccacaggtccacttattctagtgtcttctctcacagttgtctgtaagtgctamgaaagtgcaagggcataagaaacagatttttcctcacggtgctctacctgcctccagcacttgagtt

SEQ ID NO: 53614 - DNA, 600 bp, Chicken  19866894305337_2
ctagcctccccttctgacatttcagaatcatatgtatgaattctcgtatgtatgcttacctagtttgagcagctgtgtaagcaaaagcacttagtgaacgtgttagagatgaagtattattgctttttaatacctggcatctaaagcttgcaaggaaactcacaaataaagacatttattaggactctttcctatagaagttaaacagacacttcagttttgctgtgatttttttattagacgttttycattacttttttctttgctatgaagttgcaagttacagaaaaggtaaaagcmgggaaaacaaaagamagacatagaaacattccatggatgagtaggataataccgatgtatatgtttttcagtggatacctaagtccaagattgaacaaagcaacttaaaggatgtgtcccaagccaaaccacaggtccacttattctagtgtcttctctcacagttgtctgtaagtgctamgaaagtgcaagggcataagaaacagatttttcctcacggtgctctacctgcctccagcacttgagttcagggatttcctgggccaaagcctttgcatttcaaatctcttggtggaattt

SEQ ID NO: 53615 - DNA, 600 bp, Chicken  19866894305337_3
gacatttcagaatcatatgtatgaattctcgtatgtatgcttacctagtttgagcagctgtgtaagcaaaagcacttagtgaacgtgttagagatgaagtattattgctttttaatacctggcatctaaagcttgcaaggaaactcacaaataaagacatttattaggactctttcctatagaagttaaacagacacttcagttttgctgtgatttttttattagacgttttycattacttttttctttgctatgaagttgcaagttacagaaaaggtaaaagcmgggaaaacaaaagamagacatagaaacattccatggatgagtaggataataccgatgtatatgtttttcagtggatacctaagtccaagattgaacaaagcaacttaaaggatgtgtcccaagccaaaccacaggtccacttattctagtgtcttctctcacagttgtctgtaagtgctamgaaagtgcaagggcataagaaacagatttttcctcacggtgctctacctgcctccagcacttgagttcagggatttcctgggccaaagcctttgcatttcaaatctcttggtggaatttctttcttatgattta

SEQ ID NO: 53616 - DNA, 600 bp, Chicken  19866894305337_4
ggactctttcctatagaagttaaacagacacttcagttttgctgtgatttttttattagacgttttycattacttttttctttgctatgaagttgcaagttacagaaaaggtaaaagcmgggaaaacaaaagamagacatagaaacattccatggatgagtaggataataccgatgtatatgtttttcagtggatacctaagtccaagattgaacaaagcaacttaaaggatgtgtcccaagccaaaccacaggtccacttattctagtgtcttctctcacagttgtctgtaagtgctamgaaagtgcaagggcataagaaacagatttttcctcacggtgctctacctgcctccagcacttgagttcagggatttcctgggccaaagcctttgcatttcaaatctcttggtggaatttctttcttatgatttattatctaatcattttttgaacctgtgtaactccttggcmcttgtattgaaagaggcagtgaatagtggatccccaaacacctccccagtgcctttcccaattagactgttgtgtcccctcagttacctgtttgtgagacctgcagaatctttagctgcttagtctt

SEQ ID NO: 53617 - DNA, 600 bp, Chicken  19866894305337_5
atgtatatgtttttcagtggatacctaagtccaagattgaacaaagcaacttaaaggatgtgtcccaagccaaaccacaggtccacttattctagtgtcttctctcacagttgtctgtaagtgctamgaaagtgcaagggcataagaaacagatttttcctcacggtgctctacctgcctccagcacttgagttcagggatttcctgggccaaagcctttgcatttcaaatctcttggtggaatttctttcttatgatttattatctaatcattttttgaacctgtgtaactccttggcmcttgtattgaaagaggcagtgaatagtggatccccaaacacctccccagtgcctttcccaattagactgttgtgtcccctcagttacctgtttgtgagacctgcagaatctttagctgcttagtcttcaggctgtaccattcctttgttcatgcttgctgcccttgcctgtgccatttkcrgcctgctgtgtccaccttttttggaggtggtagaaccagaactacacacagcattcaagacagaaaaaaacatccatttattcaatgccrtaataatattctctctttcattctctgat

SEQ ID NO: 53618 - DNA, 600 bp, Chicken  19866894305337_6
tccagcacttgagttcagggatttcctgggccaaagcctttgcatttcaaatctcttggtggaatttctttcttatgatttattatctaatcattttttgaacctgtgtaactccttggcmcttgtattgaaagaggcagtgaatagtggatccccaaacacctccccagtgcctttcccaattagactgttgtgtcccctcagttacctgtttgtgagacctgcagaatctttagctgcttagtcttcaggctgtaccattcctttgttcatgcttgctgcccttgcctgtgccatttkcrgcctgctgtgtccaccttttttggaggtggtagaaccagaactacacacagcattcaagacagaaaaaaacatccatttattcaatgccrtaataatattctctctttcattctctgatcctctcctagtaattcctaattcttggttttgcactgcaagtgagcagtgggctgatgttttcatagaactgcctattataaccccaagatcttattcctgaagtggtaatagtcaccttggagcacatcattttgtgaggttaggtattttcccctcaaagaagtgacctcatattta

SEQ ID NO: 53619 - DNA, 600 bp, Chicken  19866894305337_7
cagcacttgagttcagggatttcctgggccaaagcctttgcatttcaaatctcttggtggaatttctttcttatgatttattatctaatcattttttgaacctgtgtaactccttggcmcttgtattgaaagaggcagtgaatagtggatccccaaacacctccccagtgcctttcccaattagactgttgtgtcccctcagttacctgtttgtgagacctgcagaatctttagctgcttagtcttcaggctgtaccattcctttgttcatgcttgctgcccttgcctgtgccatttkcrgcctgctgtgtccaccttttttggaggtggtagaaccagaactacacacagcattcaagacagaaaaaaacatccatttattcaatgccrtaataatattctctctttcattctctgatcctctcctagtaattcctaattcttggttttgcactgcaagtgagcagtgggctgatgttttcatagaactgcctattataaccccaagatcttattcctgaagtggtaatagtcaccttggagcacatcattttgtgaggttaggtattttcccctcaaagaagtgacctcatatttatt

SEQ ID NO: 53620 - DNA, 600 bp, Chicken  19866894305337_8
attttttgaacctgtgtaactccttggcmcttgtattgaaagaggcagtgaatagtggatccccaaacacctccccagtgcctttcccaattagactgttgtgtcccctcagttacctgtttgtgagacctgcagaatctttagctgcttagtcttcaggctgtaccattcctttgttcatgcttgctgcccttgcctgtgccatttkcrgcctgctgtgtccaccttttttggaggtggtagaaccagaactacacacagcattcaagacagaaaaaaacatccatttattcaatgccrtaataatattctctctttcattctctgatcctctcctagtaattcctaattcttggttttgcactgcaagtgagcagtgggctgatgttttcatagaactgcctattataaccccaagatcttattcctgaagtggtaatagtcaccttggagcacatcattttgtgaggttaggtattttcccctcaaagaagtgacctcatatttatttatctacactgaatttaatttgcctttttattgcctagtcactcagtattgtaaatctttcttcatagtcagccactatcttagctcccc

SEQ ID NO: 53621 - DNA, 600 bp, Chicken  19866894305342_1
agggcagtgcaggtgagtacttgccagggagggatctggccacatgtgctgggcatatgtcagccccagcactgtgcgcagcctgcgccgtgctgcctacctgcaggcaccccgctgtgcacagcagggccctgccgccccgggaggagctgggtcagcaccactggctgtgagcccgcagatcaaagcggcacgatcctggccagccctgggactggcctgcagctgggctggggcagctgtgccaagaggaggcagaggaaaagcagacggacggatgcctggggcaccagtgtgctsccgcaggatgctctgcatgtgcagcgctctcagccggggtgatattaggactgttctgctgaactgcacccctctggaaatccttacggggtggaaattgcacccataggaaatcctcagaaagcacaaatccttgtgctggtttcttcctggactagtttctagctgagctgacgctgcaaaagctgttctactctgaaagccgcaccgtgccccttgtccggctcactgagtacaagagcagcccagaggggctcctgtttccatgctatcagtgcagtgaggtgccagccccccagc

SEQ ID NO: 53622 - DNA, 600 bp, Chicken  19866894305344_1
tttgccttctaacaaggaaggaggtaatgcttttattttatagcaaagttgtactaaaaatttgatctgtttcccaactgacgtccttagtgcagctcacagcaacaatccttcccttgcagcaagcatctacagtggtatactacccgctaacttctggattacccagcttgcaaagctttacgtgtacttcctcaaaaaacaatatgacatttgaagttgagaaagttgaaaaagcaagaactctccttagagataagtatttctcttgcttttgggttgctaccaggaaatttctaygtctcttgataccagacctaccttccccttttcttcctttttaatattattgtctctcttttaattatagtagcaccaagagaccccaratgcaatcagtggctcattctgccagtctctgtgaagacatatggtatgagacagtcctcgccctgaagaacttacagtttaaatagacaagacaataatgagacacattagcattattatcacattgtcccaggtgggaaattgagtcacaaagatgaaaagcaacatgttcaaaatcacatctacaccatacggtgaaggatggttcag

SEQ ID NO: 53623 - DNA, 600 bp, Chicken  19866894305344_2
gtgcagctcacagcaacaatccttcccttgcagcaagcatctacagtggtatactacccgctaacttctggattacccagcttgcaaagctttacgtgtacttcctcaaaaaacaatatgacatttgaagttgagaaagttgaaaaagcaagaactctccttagagataagtatttctcttgcttttgggttgctaccaggaaatttctaygtctcttgataccagacctaccttccccttttcttcctttttaatattattgtctctcttttaattatagtagcaccaagagaccccaratgcaatcagtggctcattctgccagtctctgtgaagacatatggtatgagacagtcctcgccctgaagaacttacagtttaaatagacaagacaataatgagacacattagcattattatcacattgtcccaggtgggaaattgagtcacaaagatgaaaagcaacatgttcaaaatcacatctacaccatacggtgaaggatggttcagacctctctgaattaacaagtgtttaagatgataaattggaaaggagtgctgacttgccaatttcagtccagaagccttgcaccatcttg

SEQ ID NO: 53624 - DNA, 600 bp, Chicken  19866894305349_1
aacccctgttctggaatttggctattgtcaaaggcaattctgtttaaagagttttacatgtgcttctgcctataactttatttttttttccatcagttttattcagcttgtaagtttttgttttagaactagtaaaattacactgtggtttataatccattgtgctgcatgaaataccacgtgagactttcagtgttgtgcttctcaaagagattgaattgtcttaatggttggaaaatctgtgaaccatctcaactacagctggtacagttattagggggctcaaagtcaagaactctrtttttcagaggctgcaggattagtgacccaaaccaatcatttctcatctcagaaaaaagaatttgaagtgaccaacagatatgattttgcttagttctaggtactccaaacagaggatagtgattttgttaaaagagttgactaattgaacttagtggagaaatrgacaacttcaaggttaaatctcgagttaagccttcaattttcttgaatgactggaggcaaaagggcctggttcaaaagggtattttcctttatctctgtctacccctccagaaattctgaaattgtttcaggaat

SEQ ID NO: 53625 - DNA, 600 bp, Chicken  19866894305349_2
tgcatgaaataccacgtgagactttcagtgttgtgcttctcaaagagattgaattgtcttaatggttggaaaatctgtgaaccatctcaactacagctggtacagttattagggggctcaaagtcaagaactctrtttttcagaggctgcaggattagtgacccaaaccaatcatttctcatctcagaaaaaagaatttgaagtgaccaacagatatgattttgcttagttctaggtactccaaacagaggatagtgattttgttaaaagagttgactaattgaacttagtggagaaatrgacaacttcaaggttaaatctcgagttaagccttcaattttcttgaatgactggaggcaaaagggcctggttcaaaagggtattttcctttatctctgtctacccctccagaaattctgaaattgtttcaggaatggctaatatgctgcaaagtaatagctaagctgcagcatttcacagcttactttcattaacaattcttaatatttcctactaaagttcagcagattcagagacggttgagttttccctctatttggtagcagatggcaacaaccatcttacgtcagccttgtttgg

SEQ ID NO: 53626 - DNA, 600 bp, Chicken  19866894305353_1
agctgagcttttcatgatacacctaggtttcagttgtacagtaagatccctgtctctgttaacagggaaaaaaaaggaagccccccctgaaaaaaaaacaaaaaacccacaacaaaacaaaccgacagtaatgagtgctttggctgaagcatttgagaggtgctcagtcatccaaatgaacttagagactgcatcacttccctcctttctcttcccagcttgaagcaaattgggctctagagaaaagaatattgtttgttgcaggggactggaaactttcaccttgagcctcaagggggwttttagataagacagcaggaaagaggaggacttttggtaaacacattttggaaatacattttttttttttttcctctccacagagagacatttccatgctggagtgctgggaaaagtcagaatttggttgagaagtgacagcccagcctccatcttgttagctagtcagccagtgatgcacgtgggagaaagtatgctgatatctaagtctccattaggtgagggcaaatcaactgtactatagggtgaaagaataactgaatatgctgctgtataagagaaggatctggcaaaaactga

SEQ ID NO: 53627 - DNA, 461 bp, Chicken  19866894305361_1
ctaaaaagccttgggtgggagggataggatcgcctctgtgtgtgcttctctaacctgtgtgcatgctgcattgcggtttagggacacaggatgattagtccctttgctggtagctgagctggatctttgctctctagctgagccttttgcaaattgctgttgtttagaagataaaaatagccctggaggtgagggacgtgtgaaacaattccgcatgtctctgaactagacagagatctggtgtgacatggctctttttacagagctgaagggaattgcagcaggcctgcaactggatcrggaaagggtgtatatcggtccctggccattccgggccatgcccacatcttgaataacccccactgcctcagtgggaaggtgctccagtcctacagtgggaaatcaggatcctttttctctgggctggaagggttttaagcaggctttctgacaccctttaa

SEQ ID NO: 53628 - DNA, 599 bp, Chicken  19866894305362_1
  misc_feature (1)..(83): n is any nucleotide
nnnnnnnnnnnnnnnnnnnnnnnnnnnnnnnnnnnnnnnnnnnnnnnnnnnnnnnnnnnnnnnnnnnnnnnnnnnnnnnnnnntagttgtgtttctaatataaatacgcttatttttctaatattggagaaactatttaacatacaacagagtaataaaaatcctgcatcttttgcagcttatttaaaatgcccggttgtatgtataaaaatacagaatttaaagatagttcaatggatatgaaagaagttgatactcactttaatacaagtgaaaacgtgacagaagtgaaaaaagatrcatggagagaaaatcatcagcctccagtaactaaagactcagatttyaccctacatagggtaaatgatggggacatggcatctaaaattggaattaaaataaaatcattgtccggtscttcaaagattctggagatgacaggtaattattattgctctattgaaagtagaaagagagatttggaggctgcccaggaatgggragcatgattcctgtctgattgcctgctgtgctagagttactagactctagtctagtatgagaggatgagaggagagtactgcaaggttatttacttc

SEQ ID NO: 53629 - DNA, 599 bp, Chicken  19866894305362_2
  misc_feature (1)..(36): n is any nucleotide
nnnnnnnnnnnnnnnnnnnnnnnnnnnnnnnnnnnntagttgtgtttctaatataaatacgcttatttttctaatattggagaaactatttaacatacaacagagtaataaaaatcctgcatcttttgcagcttatttaaaatgcccggttgtatgtataaaaatacagaatttaaagatagttcaatggatatgaaagaagttgatactcactttaatacaagtgaaaacgtgacagaagtgaaaaaagatrcatggagagaaaatcatcagcctccagtaactaaagactcagatttyaccctacatagggtaaatgatggggacatggcatctaaaattggaattaaaataaaatcattgtccggtscttcaaagattctggagatgacaggtaattattattgctctattgaaagtagaaagagagatttggaggctgcccaggaatgggragcatgattcctgtctgattgcctgctgtgctagagttactagactctagtctagtatgagaggatgagaggagagtactgcaaggttatttacttcagcaagggtttttgtgggatcttcaaggagctgaggaacagttttct

SEQ ID NO: 53630 - DNA, 600 bp, Chicken  19866894305362_3
ctaatattggagaaactatttaacatacaacagagtaataaaaatcctgcatcttttgcagcttatttaaaatgcccggttgtatgtataaaaatacagaatttaaagatagttcaatggatatgaaagaagttgatactcactttaatacaagtgaaaacgtgacagaagtgaaaaaagatrcatggagagaaaatcatcagcctccagtaactaaagactcagatttyaccctacatagggtaaatgatggggacatggcatctaaaattggaattaaaataaaatcattgtccggtscttcaaagattctggagatgacaggtaattattattgctctattgaaagtagaaagagagatttggaggctgcccaggaatgggragcatgattcctgtctgattgcctgctgtgctagagttactagactctagtctagtatgagaggatgagaggagagtactgcaaggttatttacttcagcaagggtttttgtgggatcttcaaggagctgaggaacagttttctgcagtggttttgtatctgagtcaggatagtaaggtcggaatgagtggatccattacaaaagtgtcgcaaaa

SEQ ID NO: 53631 - DNA, 600 bp, Chicken  19866894305362_4
gtataaaaatacagaatttaaagatagttcaatggatatgaaagaagttgatactcactttaatacaagtgaaaacgtgacagaagtgaaaaaagatrcatggagagaaaatcatcagcctccagtaactaaagactcagatttyaccctacatagggtaaatgatggggacatggcatctaaaattggaattaaaataaaatcattgtccggtscttcaaagattctggagatgacaggtaattattattgctctattgaaagtagaaagagagatttggaggctgcccaggaatgggragcatgattcctgtctgattgcctgctgtgctagagttactagactctagtctagtatgagaggatgagaggagagtactgcaaggttatttacttcagcaagggtttttgtgggatcttcaaggagctgaggaacagttttctgcagtggttttgtatctgagtcaggatagtaaggtcggaatgagtggatccattacaaaagtgtcgcaaaatggttggctcagagagtctggttagtgtgttgtgctttacccacatgcttgcctcaagtggagaagcaggcctttgttctggcac

SEQ ID NO: 53632 - DNA, 600 bp, Chicken  19866894305365_1
gggacattggtgcttttaatttttgataaacacatcttctcaaggatgttctctcagccataatcatcatctttacaactcggtatgttgccatcctctgtgtaggtatgtgattctctactagagtagatgcgtgctatcataaggagtgcaaacaacaacacatgcaggcaatcctactcctccaatatgctgagcaagctgaaggtgtagtgtactttcttgtcaagtcttgggactcaaatgaattggagatgcttaagaaagaaacaatgaggagcatatatgcagcatctcacrttttacttgcttgagttctgaagtctgcttaagaaacacatggttaaactctaaaaccagttctccctgggccaaagtgcatcttatcccacaatgagacataaataagaaacttgttgaaaaatgagcgttatgaagcacaggatgtgggcacgttttcygggttcagtagttactgcctgaatgtgcctcctcctctgatcctccaaccagttgtgagattggcacagggagagtgcttgtagccttaaccacaactgtaaacagcattcttgtgtcagtagctttcacagccctctt

SEQ ID NO: 53633 - DNA, 600 bp, Chicken  19866894305365_2
cacatgcaggcaatcctactcctccaatatgctgagcaagctgaaggtgtagtgtactttcttgtcaagtcttgggactcaaatgaattggagatgcttaagaaagaaacaatgaggagcatatatgcagcatctcacrttttacttgcttgagttctgaagtctgcttaagaaacacatggttaaactctaaaaccagttctccctgggccaaagtgcatcttatcccacaatgagacataaataagaaacttgttgaaaaatgagcgttatgaagcacaggatgtgggcacgttttcygggttcagtagttactgcctgaatgtgcctcctcctctgatcctccaaccagttgtgagattggcacagggagagtgcttgtagccttaaccacaactgtaaacagcattcttgtgtcagtagctttcacagccctcttgagggacatgcaaatgttccagtgatcgtaaacctcctgatacactgaatgcctgggcttggctcttgaggaaatatctttagactttccttgttccctcttatgtgtccccagttaatatcgttcaaaggatattaaaccgaatatagcaaatatcggaa

SEQ ID NO: 53634 - DNA, 600 bp, Chicken  19866894305365_3
cttgtagccttaaccacaactgtaaacagcattcttgtgtcagtagctttcacagccctcttgagggacatgcaaatgttccagtgatcgtaaacctcctgatacactgaatgcctgggcttggctcttgaggaaatatctttagactttccttgttccctcttatgtgtccccagttaatatcgttcaaaggatattaaaccgaatatagcaaatatcggaagattacaaatggtcattttactagtgcagtcccgagcacttatacgctggacaatgcacacatatatcatctttatrggattacattactgttggtttgctagagtgtatagagcccttagtcttggatagaggtcccccccgtgtagtaggagttatgcagaatgatgtaaacaggtcacaacatggtccctaacttgaagaatgaatcattcaattacagagagagatgccagctggttaaaaacaggcaggaaagtgcaacgagttgtttatctgccttgcaggcaataggtaagagcaataagcctacagaagtaactgcaagcagtgggactgcttatctattcacttgatcattatttttgcagtctttaa

SEQ ID NO: 53635 - DNA, 600 bp, Chicken  19866894305373_1
tctatatatatatatatgtaaatagaactcccctttgaatttgaagaaacacatttacagccttagtaatgcagttaatgaactaaatttctactggtagtatttttaatagcttatatcagacttgagttggtaatcttaaatgcaatttactatttaccggtagaactagcagctaactcaaagccatctcacaaaattctatttaaaattcattatttgttcatacatttttaaattaaatacaaacaggattcttccaaggcaaggcaaaaagcttccaaaacaaatacaggtccytctgtgctctctctaaactcagcayttcctgttcatcataaatattttttcctaataattcaagctaaaaataaataaatagcagaacaatakyrcaagcagcattcaaatagatatcagccaagcaaaggccagaaaaattcactgtatatggaaatgcatgattccaaacattcctctatttgtactagtkctactgttgcctatgtgtgaaaggtatccctcagtcagtcagaacattttaggacttttattgagcgttaaagtctcaaggccaaaaytcattcttctttgagcagt

SEQ ID NO: 53636 - DNA, 600 bp, Chicken  19866894305373_2
aactcccctttgaatttgaagaaacacatttacagccttagtaatgcagttaatgaactaaatttctactggtagtatttttaatagcttatatcagacttgagttggtaatcttaaatgcaatttactatttaccggtagaactagcagctaactcaaagccatctcacaaaattctatttaaaattcattatttgttcatacatttttaaattaaatacaaacaggattcttccaaggcaaggcaaaaagcttccaaaacaaatacaggtccytctgtgctctctctaaactcagcayttcctgttcatcataaatattttttcctaataattcaagctaaaaataaataaatagcagaacaatakyrcaagcagcattcaaatagatatcagccaagcaaaggccagaaaaattcactgtatatggaaatgcatgattccaaacattcctctatttgtactagtkctactgttgcctatgtgtgaaaggtatccctcagtcagtcagaacattttaggacttttattgagcgttaaagtctcaaggccaaaaytcattcttctttgagcagttaacctctcattttatcctgctggt

SEQ ID NO: 53637 - DNA, 600 bp, Chicken  19866894305373_3
ctggtagtatttttaatagcttatatcagacttgagttggtaatcttaaatgcaatttactatttaccggtagaactagcagctaactcaaagccatctcacaaaattctatttaaaattcattatttgttcatacatttttaaattaaatacaaacaggattcttccaaggcaaggcaaaaagcttccaaaacaaatacaggtccytctgtgctctctctaaactcagcayttcctgttcatcataaatattttttcctaataattcaagctaaaaataaataaatagcagaacaatakyrcaagcagcattcaaatagatatcagccaagcaaaggccagaaaaattcactgtatatggaaatgcatgattccaaacattcctctatttgtactagtkctactgttgcctatgtgtgaaaggtatccctcagtcagtcagaacattttaggacttttattgagcgttaaagtctcaaggccaaaaytcattcttctttgagcagttaacctctcattttatcctgctggtctcctcaactgagccaagatgagttttatgcatacatataaatatgaaatagcccttygtttcttgat

SEQ ID NO: 53638 - DNA, 600 bp, Chicken  19866894305373_4
tggtagtatttttaatagcttatatcagacttgagttggtaatcttaaatgcaatttactatttaccggtagaactagcagctaactcaaagccatctcacaaaattctatttaaaattcattatttgttcatacatttttaaattaaatacaaacaggattcttccaaggcaaggcaaaaagcttccaaaacaaatacaggtccytctgtgctctctctaaactcagcayttcctgttcatcataaatattttttcctaataattcaagctaaaaataaataaatagcagaacaatakyrcaagcagcattcaaatagatatcagccaagcaaaggccagaaaaattcactgtatatggaaatgcatgattccaaacattcctctatttgtactagtkctactgttgcctatgtgtgaaaggtatccctcagtcagtcagaacattttaggacttttattgagcgttaaagtctcaaggccaaaaytcattcttctttgagcagttaacctctcattttatcctgctggtctcctcaactgagccaagatgagttttatgcatacatataaatatgaaatagcccttygtttcttgata

SEQ ID NO: 53639 - DNA, 600 bp, Chicken  19866894305373_5
ggtagtatttttaatagcttatatcagacttgagttggtaatcttaaatgcaatttactatttaccggtagaactagcagctaactcaaagccatctcacaaaattctatttaaaattcattatttgttcatacatttttaaattaaatacaaacaggattcttccaaggcaaggcaaaaagcttccaaaacaaatacaggtccytctgtgctctctctaaactcagcayttcctgttcatcataaatattttttcctaataattcaagctaaaaataaataaatagcagaacaatakyrcaagcagcattcaaatagatatcagccaagcaaaggccagaaaaattcactgtatatggaaatgcatgattccaaacattcctctatttgtactagtkctactgttgcctatgtgtgaaaggtatccctcagtcagtcagaacattttaggacttttattgagcgttaaagtctcaaggccaaaaytcattcttctttgagcagttaacctctcattttatcctgctggtctcctcaactgagccaagatgagttttatgcatacatataaatatgaaatagcccttygtttcttgatac

SEQ ID NO: 53640 - DNA, 600 bp, Chicken  19866894305373_6
acaaaattctatttaaaattcattatttgttcatacatttttaaattaaatacaaacaggattcttccaaggcaaggcaaaaagcttccaaaacaaatacaggtccytctgtgctctctctaaactcagcayttcctgttcatcataaatattttttcctaataattcaagctaaaaataaataaatagcagaacaatakyrcaagcagcattcaaatagatatcagccaagcaaaggccagaaaaattcactgtatatggaaatgcatgattccaaacattcctctatttgtactagtkctactgttgcctatgtgtgaaaggtatccctcagtcagtcagaacattttaggacttttattgagcgttaaagtctcaaggccaaaaytcattcttctttgagcagttaacctctcattttatcctgctggtctcctcaactgagccaagatgagttttatgcatacatataaatatgaaatagcccttygtttcttgataccaaaaggaattcctcctaattccaataaaactctgtgatcctgcagcctttcttggtgttcctcagacttcttttgacatcaagaaccacgaaacatc

SEQ ID NO: 53641 - DNA, 600 bp, Chicken  19866894305373_7
caaaacaaatacaggtccytctgtgctctctctaaactcagcayttcctgttcatcataaatattttttcctaataattcaagctaaaaataaataaatagcagaacaatakyrcaagcagcattcaaatagatatcagccaagcaaaggccagaaaaattcactgtatatggaaatgcatgattccaaacattcctctatttgtactagtkctactgttgcctatgtgtgaaaggtatccctcagtcagtcagaacattttaggacttttattgagcgttaaagtctcaaggccaaaaytcattcttctttgagcagttaacctctcattttatcctgctggtctcctcaactgagccaagatgagttttatgcatacatataaatatgaaatagcccttygtttcttgataccaaaaggaattcctcctaattccaataaaactctgtgatcctgcagcctttcttggtgttcctcagacttcttttgacatcaagaaccacgaaacatccttagcagcacagtttgtattgtaatcctcattctatactttctcttttgctaccctctcaagaggtcttattttctttgatgcacaa

SEQ ID NO: 53642 - DNA, 600 bp, Chicken  19866894305373_8
agaacaatakyrcaagcagcattcaaatagatatcagccaagcaaaggccagaaaaattcactgtatatggaaatgcatgattccaaacattcctctatttgtactagtkctactgttgcctatgtgtgaaaggtatccctcagtcagtcagaacattttaggacttttattgagcgttaaagtctcaaggccaaaaytcattcttctttgagcagttaacctctcattttatcctgctggtctcctcaactgagccaagatgagttttatgcatacatataaatatgaaatagcccttygtttcttgataccaaaaggaattcctcctaattccaataaaactctgtgatcctgcagcctttcttggtgttcctcagacttcttttgacatcaagaaccacgaaacatccttagcagcacagtttgtattgtaatcctcattctatactttctcttttgctaccctctcaagaggtcttattttctttgatgcacaagctttttctcccaaatgggtaagaattttgtcaagagtgagaggaaaaacagctcctttcctgctttcagaaaaaaaaacaaaagctactctttagttttga

SEQ ID NO: 53643 - DNA, 600 bp, Chicken  19866894305381_1
ttcctggaaatgaccctgagcccagcagctctactgcagccctggctctgagatcaggcacgaaaaggacttcagagagagcacaaggaggcagaagggatgcccacagagcagcaggagtgacatgaagcagcgcttggagatgcagcactgtcccatgtccaggatgggagctgccgtgcactgctctgagccaagacccggcccagccatcttggttgttttggtctttcttcgagggaatgagctcagatgaaaccgaagcaggtgctaattaaaaacagggctattcttcaaacygggcttttaattactgtaaaaatatgttgargaaagttgcaaaggggaagaaaaatagtaattccttgtgctacctgccattttcacttgattaccatcacacttttctgtagagcaaaaacatcagtccttcataacaaactcctctcttgggggctagtgtgaattgagagctgtgaggccccgccgtgggctccaaaactagcagcataatgtctgtaacagacatgctacctaattaaattgttagggaacaggcttttatatctttaacacctaatttactattgtttctttgaa

SEQ ID NO: 53644 - DNA, 600 bp, Chicken  19866894305381_2
tactgcagccctggctctgagatcaggcacgaaaaggacttcagagagagcacaaggaggcagaagggatgcccacagagcagcaggagtgacatgaagcagcgcttggagatgcagcactgtcccatgtccaggatgggagctgccgtgcactgctctgagccaagacccggcccagccatcttggttgttttggtctttcttcgagggaatgagctcagatgaaaccgaagcaggtgctaattaaaaacagggctattcttcaaacygggcttttaattactgtaaaaatatgttgargaaagttgcaaaggggaagaaaaatagtaattccttgtgctacctgccattttcacttgattaccatcacacttttctgtagagcaaaaacatcagtccttcataacaaactcctctcttgggggctagtgtgaattgagagctgtgaggccccgccgtgggctccaaaactagcagcataatgtctgtaacagacatgctacctaattaaattgttagggaacaggcttttatatctttaacacctaatttactattgtttctttgaaagtgtttggcttccctgtggttttttgggcc

SEQ ID NO: 53645 - DNA, 600 bp, Chicken  19866894305383_1
gatttttggttcactccgttagcttactgaaccaggtgagcattgctatggggcctgttcactgccaagtatcgggagagtctacaggcaaatggatgtggcagagggaaggaggtgggagcagctgggctggtgaaatggtgagctgtgaagagcaagatgagcggatggcaacccccagggatcaagtgatctcttcctgaagaaaagctcattcagattttaagacacagctgcttgccacaatgagccactgagtctttcctgcttcatttcccctcgtctcaggccttcccctcyacctcacaccgtggtcatcctttccaygcttttcttcctccrggcctgcacaggagctaagctaagactcaaaggtttgtcactcacatctcgtgctggcagtaggactgaatggaatggatatggctcagagattcagataaaacactccatttacagagcatcttttgccttmctcgccttcctggcaacagataactcctcagtaagaccagatgtagccagtgcttaggaaatacaaacaagctacagggcacccacagctgtacaaagcacgtcctgcaccagccaacctgcagc

SEQ ID NO: 53646 - DNA, 600 bp, Chicken  19866894305383_2
tgaaccaggtgagcattgctatggggcctgttcactgccaagtatcgggagagtctacaggcaaatggatgtggcagagggaaggaggtgggagcagctgggctggtgaaatggtgagctgtgaagagcaagatgagcggatggcaacccccagggatcaagtgatctcttcctgaagaaaagctcattcagattttaagacacagctgcttgccacaatgagccactgagtctttcctgcttcatttcccctcgtctcaggccttcccctcyacctcacaccgtggtcatcctttccaygcttttcttcctccrggcctgcacaggagctaagctaagactcaaaggtttgtcactcacatctcgtgctggcagtaggactgaatggaatggatatggctcagagattcagataaaacactccatttacagagcatcttttgccttmctcgccttcctggcaacagataactcctcagtaagaccagatgtagccagtgcttaggaaatacaaacaagctacagggcacccacagctgtacaaagcacgtcctgcaccagccaacctgcagcaccaggcccagtacaggcctgctgagg

SEQ ID NO: 53647 - DNA, 600 bp, Chicken  19866894305383_3
ttgctatggggcctgttcactgccaagtatcgggagagtctacaggcaaatggatgtggcagagggaaggaggtgggagcagctgggctggtgaaatggtgagctgtgaagagcaagatgagcggatggcaacccccagggatcaagtgatctcttcctgaagaaaagctcattcagattttaagacacagctgcttgccacaatgagccactgagtctttcctgcttcatttcccctcgtctcaggccttcccctcyacctcacaccgtggtcatcctttccaygcttttcttcctccrggcctgcacaggagctaagctaagactcaaaggtttgtcactcacatctcgtgctggcagtaggactgaatggaatggatatggctcagagattcagataaaacactccatttacagagcatcttttgccttmctcgccttcctggcaacagataactcctcagtaagaccagatgtagccagtgcttaggaaatacaaacaagctacagggcacccacagctgtacaaagcacgtcctgcaccagccaacctgcagcaccaggcccagtacaggcctgctgaggtttatgtggaggtat

SEQ ID NO: 53648 - DNA, 600 bp, Chicken  19866894305383_4
ccccagggatcaagtgatctcttcctgaagaaaagctcattcagattttaagacacagctgcttgccacaatgagccactgagtctttcctgcttcatttcccctcgtctcaggccttcccctcyacctcacaccgtggtcatcctttccaygcttttcttcctccrggcctgcacaggagctaagctaagactcaaaggtttgtcactcacatctcgtgctggcagtaggactgaatggaatggatatggctcagagattcagataaaacactccatttacagagcatcttttgccttmctcgccttcctggcaacagataactcctcagtaagaccagatgtagccagtgcttaggaaatacaaacaagctacagggcacccacagctgtacaaagcacgtcctgcaccagccaacctgcagcaccaggcccagtacaggcctgctgaggtttatgtggaggtattccatcccactgacactgcacaaaactgcagttacaaaaagacaggttatcttgagactattactgcatccaaagacatttctccagcacatctttaacactttatagctcctaccagggtgctctctgtgac

SEQ ID NO: 53649 - DNA, 600 bp, Chicken  19866894305389_1
acctttctcaaacagaacctgcaccatttgtttccattgtcctcagctttctacaataggctggttttgttgcttcttttccccagaattaaaacgcagatacttactgacgttagaatattaatcttggttgaagcttattttgccttttgtttttcttccagtggtaacaaagctcgtaaatagaggataccagccacatttggaggacttcctactgcgaatcaactttaataactactacaaggataactgagccctgcagcgtgaagatcactgatatagcatggtaaagcagawtcagataagcatatatgcttggaatttataggagcttatgcaaatgccatgcaagaggcatttttgtcartgaaataacccaccctctgatagcttgaagaatatatatagccaccacatagtttttaagatgcatccctctctctataacagcttcctgttgtttcacctactgggaatcaatgttgtcattatcacaaagatagaggagtgccccatcttaacaggggagagagtgcaaaaactgtatatctgtggatgtgtaaatgttgtattttcagtgttgtgaatttcctccaa

SEQ ID NO: 53650 - DNA, 600 bp, Chicken  19866894305389_2
tgcttcttttccccagaattaaaacgcagatacttactgacgttagaatattaatcttggttgaagcttattttgccttttgtttttcttccagtggtaacaaagctcgtaaatagaggataccagccacatttggaggacttcctactgcgaatcaactttaataactactacaaggataactgagccctgcagcgtgaagatcactgatatagcatggtaaagcagawtcagataagcatatatgcttggaatttataggagcttatgcaaatgccatgcaagaggcatttttgtcartgaaataacccaccctctgatagcttgaagaatatatatagccaccacatagtttttaagatgcatccctctctctataacagcttcctgttgtttcacctactgggaatcaatgttgtcattatcacaaagatagaggagtgccccatcttaacaggggagagagtgcaaaaactgtatatctgtggatgtgtaaatgttgtattttcagtgttgtgaatttcctccaatgtaaatacgtccatgtgaaataaattaaaagatgctttctaaagttgagttgttgagtgtgaggtgcag

SEQ ID NO: 53651 - DNA, 600 bp, Chicken  19866894305394_1
gtcttctgctttgttttgcctttgcatgtctctcagactctgttgcaccttattatttctgttggctgttgcaccttatttctgtcttacagtaaaacctaggtgtctagggaagcagggttctattatggcacgtactttgtacacagaaggaccactgtcaatagcagcagcttttaagttaagtctgaggttgtagctgccaggaattattctcctgcttgtgacatgagaatactgattaatcattttaaagctgtagtcatccagtatagaaagccttgtattgtggtaggttargattgcatttttttaacatctgtaaatcatagaatcattaaggctgaaaaagactacaaagatcatgtagtccaactatcgacttatcaccaccatgcccactaacccatgttcctgagtgcaatgtttctacacttattgaagacctccagggttagggatgccaccacctccctgggtggtcttttccaatgcatcaccattctttctgagaaattatttttcctaatatccaacctgaaatactatgtagtcccagagaatggagttaccaagcccaaactatagtctcccagtatt

SEQ ID NO: 53652 - DNA, 600 bp, Chicken  19866894305394_2
tacacttattgaagacctccagggttagggatgccaccacctccctgggtggtcttttccaatgcatcaccattctttctgagaaattatttttcctaatatccaacctgaaatactatgtagtcccagagaatggagttaccaagcccaaactatagtctcccagtatttccagggaaggcagcaggacctgtagaagatttcaggccatggactggagagatggaattttaacacttactatataacactctgcaaataccaatgcctgagtttctctatccaaagtactgcaagtaragggcctgttatacaagggccacaggaaattttagcataactaatgttttctacagaaatcttcaggtgaaagttgttggaaaacttcaacactctgtggcttaacagtgttattgctctaacctatcaccatcattgcaatagtttaaatggatttgattattaagtcaccatgacaaatttgatgttaattaaaaaagatataaattttaggttgcaaactgtaaacacagctgcttgttctgcttttattgcagaagcaaataagagaaagtgctattgtagtgatatcaacttctg

SEQ ID NO: 53653 - DNA, 600 bp, Chicken  19866894305394_3
cataactaatgttttctacagaaatcttcaggtgaaagttgttggaaaacttcaacactctgtggcttaacagtgttattgctctaacctatcaccatcattgcaatagtttaaatggatttgattattaagtcaccatgacaaatttgatgttaattaaaaaagatataaattttaggttgcaaactgtaaacacagctgcttgttctgcttttattgcagaagcaaataagagaaagtgctattgtagtgatatcaacttctgccaaagtcccttaacttttcatggcttaggtagcrgagggaaagaaarcattttctcagatctcygctccttttttctccttctctgggtagctgttttatgactggagggaaattactctgcaagggttgttcaccacctggatcattataatgctatagcctttaggatgtttctacccagcggcaaaaggagataactttgaatggtctataattctaggtcttaggtctttcaccttgccctgtattgttgctttcccctgtgcctatggatgtagggaagccattagactgagaaatcaaaagtagtgaaatactctcacagattgttac

SEQ ID NO: 53654 - DNA, 600 bp, Chicken  19866894305394_4
ttctacagaaatcttcaggtgaaagttgttggaaaacttcaacactctgtggcttaacagtgttattgctctaacctatcaccatcattgcaatagtttaaatggatttgattattaagtcaccatgacaaatttgatgttaattaaaaaagatataaattttaggttgcaaactgtaaacacagctgcttgttctgcttttattgcagaagcaaataagagaaagtgctattgtagtgatatcaacttctgccaaagtcccttaacttttcatggcttaggtagcrgagggaaagaaarcattttctcagatctcygctccttttttctccttctctgggtagctgttttatgactggagggaaattactctgcaagggttgttcaccacctggatcattataatgctatagcctttaggatgtttctacccagcggcaaaaggagataactttgaatggtctataattctaggtcttaggtctttcaccttgccctgtattgttgctttcccctgtgcctatggatgtagggaagccattagactgagaaatcaaaagtagtgaaatactctcacagattgttaccatactttcagat

SEQ ID NO: 53655 - DNA, 600 bp, Chicken  19866894305394_5
ggtgaaagttgttggaaaacttcaacactctgtggcttaacagtgttattgctctaacctatcaccatcattgcaatagtttaaatggatttgattattaagtcaccatgacaaatttgatgttaattaaaaaagatataaattttaggttgcaaactgtaaacacagctgcttgttctgcttttattgcagaagcaaataagagaaagtgctattgtagtgatatcaacttctgccaaagtcccttaacttttcatggcttaggtagcrgagggaaagaaarcattttctcagatctcygctccttttttctccttctctgggtagctgttttatgactggagggaaattactctgcaagggttgttcaccacctggatcattataatgctatagcctttaggatgtttctacccagcggcaaaaggagataactttgaatggtctataattctaggtcttaggtctttcaccttgccctgtattgttgctttcccctgtgcctatggatgtagggaagccattagactgagaaatcaaaagtagtgaaatactctcacagattgttaccatactttcagatcacctcaaaacagcaac

SEQ ID NO: 53656 - DNA, 599 bp, Chicken  19866894305399_1
  misc_feature (1)..(147): n is any nucleotide
nnnnnnnnnnnnnnnnnnnnnnnnnnnnnnnnnnnnnnnnnnnnnnnnnnnnnnnnnnnnnnnnnnnnnnnnnnnnnnnnnnnnnnnnnnnnnnnnnnnnnnnnnnnnnnnnnnnnnnnnnnnnnnnnnnnnnnnnnnnnnnnnnnntggtaacagaaacatgttggtaaagtagtgccaaaggaaattgatgtgcaaggagaaaaagtgccaaagttgggttcaagtgttgactttagaagctagcaagatctaggactaccagctcctggcaaaagtagcaaaaacagatgaagttgygatagtttaaaaaaccaaacagctaaacatgtgtttagatttgactttatagtattattattgctagtaaatatcactgtattgttgagtgaatgtagtaagctaactttaggtagaataggtacgtgtttgtgtgttgagtaaacagatttatcagagtatcagagactcagtgggaacaattatgagatcaaagcatttcagaggtactcaggtatccgagatatttgcttagggcagagatgtgcaggaccaattggagatctgtttcaggtgggagaaatcctgtgttgcgtgta

SEQ ID NO: 53657 - DNA, 600 bp, Chicken  19866894305411_1
tcacctgctgtagtccacaagagggctcctattatggtaaaaatggctgcacagaggcagttcaaggcacgcactgcagtgagctactggctcagcacttgcttagtgtgaaaacctttagaccatacagaggtgccatccccctactaagagaggatgactaatgaatgtactgccttatttaagcagcaacaggacatggctcagtgcatcataaagttacaagatcacaggctgccactaagcaagcagtatgttgtcctaacgtacagcttccagccctatccacagacagcagcygttccaggcactggagtttggaaataccagctgcttacaaaaaaaaaaaaagcctggaaaactttaataaaaaaagaggaatgtggcagaatggatttatccagtaggtgaactcccaccagtgaacagtactcacaaaagcccccagaattcatgctaaccaaggttttagtatctgttccagatagggccttccccagaggaaaatatgagtgggtggtcaagtttggaaatgagaaaagtggcctgaatgatagtttccccttctttccgcctcaaaaattctaagccttcagatca

SEQ ID NO: 53658 - DNA, 600 bp, Chicken  19866894305413_1
ggaactccctgagaagactgtaatttggtgcgcagaacatggactctccaagcattccagagtgggagtacttcaaaaccctttcatttacagtggacactacagttctttttctcttcagtagctactgcatgcaatctttaaaagaaaatggcaaattaaaagaactgagcaaaaattgtttaccttttctaaggacttaaaattggttagaagtctgtagaagcaaatgggaaaatgtaaagatataagtgttctgcttcagtacctagacagtatttctatggggtccatgaaagrttactgaaatgggatttttattggcagaccgaagttcaatgtaaggacttcagaccaccaackgaatggtttttttagacctttacatgtccaaaaaagcatgcaaatatgcaaatctttcttgtaggaaaaccttactcttcagtagcattgcaaagccctgtggaatgaaaagaatcaaagagtaggctgtttttttcttgtagcattacctactgtggacatctccatgttgatcatggatttctctggaaaactgcaaattaacatattagattctgattatttttttagcacaac

SEQ ID NO: 53659 - DNA, 600 bp, Chicken  19866894305413_2
gggagtacttcaaaaccctttcatttacagtggacactacagttctttttctcttcagtagctactgcatgcaatctttaaaagaaaatggcaaattaaaagaactgagcaaaaattgtttaccttttctaaggacttaaaattggttagaagtctgtagaagcaaatgggaaaatgtaaagatataagtgttctgcttcagtacctagacagtatttctatggggtccatgaaagrttactgaaatgggatttttattggcagaccgaagttcaatgtaaggacttcagaccaccaackgaatggtttttttagacctttacatgtccaaaaaagcatgcaaatatgcaaatctttcttgtaggaaaaccttactcttcagtagcattgcaaagccctgtggaatgaaaagaatcaaagagtaggctgtttttttcttgtagcattacctactgtggacatctccatgttgatcatggatttctctggaaaactgcaaattaacatattagattctgattatttttttagcacaacaaagatcttgtttttactacaaaaccaaatcaatcttaagtcaaatgtaggtcctacacccat

SEQ ID NO: 53660 - DNA, 599 bp, Chicken  19866894305414_1
  misc_feature (1)..(2): n is any nucleotide
nnttcgtaccatagatgtatggctgttgccaaagtgttttgtttccctcgacctcaggatttgcttatgcatctcctaagccaagtacaaaatttatcatccagacttcttagttttgacagctaagtaaactgcatcctacctgctttgctctcaacacattgctctttcaaatctggaaaaaaattcaggaaggaatccagaagatcttgagccacaacactggtaaatttgtacttctcaatgtaggcctgaaacagtgacagggataaatgacagttaagaggaaggtggcttctytttgatgaagaaccacacatacagttaaaaaaataaagatggaaaagtaaggacaagtactcagaaaggtgaakgacagtttaaaaatatatatatctttatatataaaaaaaacaataaatcaagaaaaatattccccttctccytctcaaataaggaaagggacaactctcaatctccagaagaacatatatgtatgcacactaactctgaggaaggagtcaaagcgtcctgggtcaccacacagctgggacaggtagtaaacaaagcagtagcctttctcataggtgaagaggttc

SEQ ID NO: 53661 - DNA, 600 bp, Chicken  19866894305414_2
cctaagccaagtacaaaatttatcatccagacttcttagttttgacagctaagtaaactgcatcctacctgctttgctctcaacacattgctctttcaaatctggaaaaaaattcaggaaggaatccagaagatcttgagccacaacactggtaaatttgtacttctcaatgtaggcctgaaacagtgacagggataaatgacagttaagaggaaggtggcttctytttgatgaagaaccacacatacagttaaaaaaataaagatggaaaagtaaggacaagtactcagaaaggtgaakgacagtttaaaaatatatatatctttatatataaaaaaaacaataaatcaagaaaaatattccccttctccytctcaaataaggaaagggacaactctcaatctccagaagaacatatatgtatgcacactaactctgaggaaggagtcaaagcgtcctgggtcaccacacagctgggacaggtagtaaacaaagcagtagcctttctcataggtgaagaggttcattaaattactaggatttacacctggaaggaaaaagataatgttagaagacactgygcaacaagaacactgactt

SEQ ID NO: 53662 - DNA, 600 bp, Chicken  19866894305414_3
tttgctctcaacacattgctctttcaaatctggaaaaaaattcaggaaggaatccagaagatcttgagccacaacactggtaaatttgtacttctcaatgtaggcctgaaacagtgacagggataaatgacagttaagaggaaggtggcttctytttgatgaagaaccacacatacagttaaaaaaataaagatggaaaagtaaggacaagtactcagaaaggtgaakgacagtttaaaaatatatatatctttatatataaaaaaaacaataaatcaagaaaaatattccccttctccytctcaaataaggaaagggacaactctcaatctccagaagaacatatatgtatgcacactaactctgaggaaggagtcaaagcgtcctgggtcaccacacagctgggacaggtagtaaacaaagcagtagcctttctcataggtgaagaggttcattaaattactaggatttacacctggaaggaaaaagataatgttagaagacactgygcaacaagaacactgacttccaaccagtctaaatgcaaagacgccctagagatctcagagtcaagatgcagtgacttaaaaacagaacaag

SEQ ID NO: 53663 - DNA, 600 bp, Chicken  19866894305414_4
agtactcagaaaggtgaakgacagtttaaaaatatatatatctttatatataaaaaaaacaataaatcaagaaaaatattccccttctccytctcaaataaggaaagggacaactctcaatctccagaagaacatatatgtatgcacactaactctgaggaaggagtcaaagcgtcctgggtcaccacacagctgggacaggtagtaaacaaagcagtagcctttctcataggtgaagaggttcattaaattactaggatttacacctggaaggaaaaagataatgttagaagacactgygcaacaagaacactgacttccaaccagtctaaatgcaaagacgccctagagatctcagagtcaagatgcagtgacttaaaaacagaacaagcctgtgtcagtgcatgtaatttactgcaataaaataacagaagcaatctaagtgtcaaactcacactgcacgttttcaaatataacaatataaaacaagcaatactatgctccttttctgagacctccaacagtcttccattcagcttcaatatcgccacatgcattttgaggttcatatcttatctagactgaagactgcttcacacc

SEQ ID NO: 53664 - DNA, 600 bp, Chicken  19866894305422_1
atttattcaccattttatctccttctttcttctctctctcccatccatacaatcaagatgtatttttattttctctatttcattaaaaacaaaagctagatataggtctttatgccctaactctttcatggaattaaacagtctatccatctcacattcactaccctaaatagtttactgcacagaagagcagtctgagaagaaagaagagcaaaggtacccaacagtagcctattctatctagtatcttgcatcttccacaatgatcaccttggagattgtttcccattagaagagagratagagtttattctcagtataattattttgaaacaaagaattttcagtacagttgtagtttttttgtttgtttgttttacttgtggytgttttacattactcttgcttctttgacctgtacatcctatattttccatctgttcaagtcatgatttccagtccagtggagcaaaagcaacggtaaaagcattttgccagcagcccttggccttgctttatgaatagagttgccaagtcttgctgccactcaggctaggactcctaaatgtaagagacagtttcaaaataaacattaatact

SEQ ID NO: 53665 - DNA, 600 bp, Chicken  19866894305422_2
aacaaaagctagatataggtctttatgccctaactctttcatggaattaaacagtctatccatctcacattcactaccctaaatagtttactgcacagaagagcagtctgagaagaaagaagagcaaaggtacccaacagtagcctattctatctagtatcttgcatcttccacaatgatcaccttggagattgtttcccattagaagagagratagagtttattctcagtataattattttgaaacaaagaattttcagtacagttgtagtttttttgtttgtttgttttacttgtggytgttttacattactcttgcttctttgacctgtacatcctatattttccatctgttcaagtcatgatttccagtccagtggagcaaaagcaacggtaaaagcattttgccagcagcccttggccttgctttatgaatagagttgccaagtcttgctgccactcaggctaggactcctaaatgtaagagacagtttcaaaataaacattaatactaatatgattttctcataaaagttatattatggggaacaatctttgctttcctttccttcatgagagagatcagcactgtgaaagatc

SEQ ID NO: 53666 - DNA, 600 bp, Chicken  19866894305424_1
ctaaatgacaaaggatgagttgtggagctgagcttagccctgatcaggatggggagcaatcgcttgctctgatgatggctcctacagactgcactcgctgtaggtttgtgaaatgggacgtgctttgtgctgcttacctggaaccacactttagcttagcctgtgaaaacaagtaacataattatgctgcagatgttcaggcaaaatctaataggaattgctgctgacatctcatggtgtgcgacagcttgtggtaggtgatgcttttggcaatgtatttacatcctggcttgggtttaktaggtttgagtgtttgttttgttacccaaaagcacttttctttagtgtagcaacttcttgatagctgttacggagttaaagagtgtggatgttcctgggaaagcagtcagagaatcacaggtgagaacatgtcccgttatggcactcagggctgcatgcagcctttgtgggatgctgtcctgcttcagcttggttccctggggatgctgtagctccagmtgggagacagttttcataggcagccaaagccatcttcagcatgtgaaattggtctagtgtgcagcagctgcctgcaagtag

SEQ ID NO: 53667 - DNA, 600 bp, Chicken  19866894305424_2
gctgctgacatctcatggtgtgcgacagcttgtggtaggtgatgcttttggcaatgtatttacatcctggcttgggtttaktaggtttgagtgtttgttttgttacccaaaagcacttttctttagtgtagcaacttcttgatagctgttacggagttaaagagtgtggatgttcctgggaaagcagtcagagaatcacaggtgagaacatgtcccgttatggcactcagggctgcatgcagcctttgtgggatgctgtcctgcttcagcttggttccctggggatgctgtagctccagmtgggagacagttttcataggcagccaaagccatcttcagcatgtgaaattggtctagtgtgcagcagctgcctgcaagtagctgccctgcgatctgtaggtggccgctttagaagggagcattttatgctctgttacaattcaactgtattgagcaatttcagctgcttgcttggtgttccgctcgctccagcatcaaggctctgtgcctaatgggcagaactaaacgacagcataaaaaataaaatcacacctttattccagcatccagaatcagttaccataaatacaaggcagttgc

SEQ ID NO: 53668 - DNA, 600 bp, Chicken  19866894305425_1
attgaaagccagcaatgaatagagtacctcagaggtcagtgctggatccagtccttaacatcttcacgaatgatctggatgataggatagataccctcagtaaatccgcagatggcatgaaatcaggaggaagagaatcgtagaatcactcaggttggaaaagaccttaaagatcactgagtcccaccatgacctaaccatactaccctaccaacaaccctctgctaagtcatgtccctgagcaccacatccaaacggtttttaaacacatccagggatggtgactcaaccaactccccrgggagcctattccagtgcttaacaaccctttctgtaaataagtttttcctaatatccagcctaaagctcccctggcacaacttaaggccatttccccttgtcctgtcacctgtcagcagtgagaagagaccaaccctgctctcactctaagtacctttcagatattggcagaaagcaaggtctcccctcagcttccttttccctagactaaacagcctcagttccttcagttgctcctcatcaggcatattctacaagcccttcacaagccttgttgcccttctttggacctgctccagc

SEQ ID NO: 53669 - DNA, 600 bp, Chicken  19866894305432_1
gataattttggaaagtgatgacaggaggtaaaagatcacagaatcacagaatcataaagattgcaaaagagcattaagatcaaccaaggtccaaccccagcccaccccaccatgcccactgaccacgtccctcagtgccatatctccatggttcttgaacacctccagcgatggtgaccctaccaccttcctgggcagctgtgccactgcatcaccaaccttttggagaataaacatttccatagtatccaaactgaacctttcttgacacagcaggggacaatttcactaataatctgyacatgcagcccttccgcactaaattgttagtattgagattttttcagacttattttcagcagaaaatgctgatatgcaaaataaagccaccacactacttcatgggactgggccagtcttgaatattgttttagggaaaagcagaaggatcctcaggcccacatgcccttggtcaggttatagttccccagaggttagtgtttcagttggtacctacggctatggaaaagccatggcaaagtcactgtttgaaatgcacatttgaatacaaagccaaatgactctggttgagagtttaag

SEQ ID NO: 53670 - DNA, 599 bp, Chicken  19866894305433_1
  misc_feature (1)..(79): n is any nucleotide
nnnnnnnnnnnnnnnnnnnnnnnnnnnnnnnnnnnnnnnnnnnnnnnnnnnnnnnnnnnnnnnnnnnnnnnnnnnnnnnctgcttattttaagagaatattgactaattttttcccattagttagcgcagtgcagtattggagtttaacaactcaaaatatgtgctatggaaaaatagtgaacaacttgtgagacttcagtgtccatgtgtgccaaacaagactggaatcaaagggactgatttggtgagcaaggtgggactgaattcataaatcatcaatgagttgtgcatctctgagwagtagttacccctaactcctgctttagcttactctgactggaatggaaactcctgtaataaacaaatgataggcttttagwaatgatttgtatttaagctgaactaattctgggaattgctcacagagcaaagatcagacccrcagcctccagttcagaccttcactttgcattacaagtytatcacttctgttgtacccggtagtgccgctgacttacagggttcaatcacagttgtggcaaatattaagagaaatacagttgcrtattgaaacaatatatttcagcctctgatcrtc

SEQ ID NO: 53671 - DNA, 600 bp, Chicken  19866894305433_2
gcttattttaagagaatattgactaattttttcccattagttagcgcagtgcagtattggagtttaacaactcaaaatatgtgctatggaaaaatagtgaacaacttgtgagacttcagtgtccatgtgtgccaaacaagactggaatcaaagggactgatttggtgagcaaggtgggactgaattcataaatcatcaatgagttgtgcatctctgagwagtagttacccctaactcctgctttagcttactctgactggaatggaaactcctgtaataaacaaatgataggcttttagwaatgatttgtatttaagctgaactaattctgggaattgctcacagagcaaagatcagacccrcagcctccagttcagaccttcactttgcattacaagtytatcacttctgttgtacccggtagtgccgctgacttacagggttcaatcacagttgtggcaaatattaagagaaatacagttgcrtattgaaacaatatatttcagcctctgatcrtcatgcttcttttgttcctttttccccttgaggtgatatcactggggcaaaacgtggatgttttcaaagagtagtaaaatgtgt

SEQ ID NO: 53672 - DNA, 600 bp, Chicken  19866894305433_3
tttaacaactcaaaatatgtgctatggaaaaatagtgaacaacttgtgagacttcagtgtccatgtgtgccaaacaagactggaatcaaagggactgatttggtgagcaaggtgggactgaattcataaatcatcaatgagttgtgcatctctgagwagtagttacccctaactcctgctttagcttactctgactggaatggaaactcctgtaataaacaaatgataggcttttagwaatgatttgtatttaagctgaactaattctgggaattgctcacagagcaaagatcagacccrcagcctccagttcagaccttcactttgcattacaagtytatcacttctgttgtacccggtagtgccgctgacttacagggttcaatcacagttgtggcaaatattaagagaaatacagttgcrtattgaaacaatatatttcagcctctgatcrtcatgcttcttttgttcctttttccccttgaggtgatatcactggggcaaaacgtggatgttttcaaagagtagtaaaatgtgtgctatgatatattgtggtaaatatcggtatctgaagaaagctgtttaaaaacagctgcctcg

SEQ ID NO: 53673 - DNA, 600 bp, Chicken  19866894305433_4
acaacttgtgagacttcagtgtccatgtgtgccaaacaagactggaatcaaagggactgatttggtgagcaaggtgggactgaattcataaatcatcaatgagttgtgcatctctgagwagtagttacccctaactcctgctttagcttactctgactggaatggaaactcctgtaataaacaaatgataggcttttagwaatgatttgtatttaagctgaactaattctgggaattgctcacagagcaaagatcagacccrcagcctccagttcagaccttcactttgcattacaagtytatcacttctgttgtacccggtagtgccgctgacttacagggttcaatcacagttgtggcaaatattaagagaaatacagttgcrtattgaaacaatatatttcagcctctgatcrtcatgcttcttttgttcctttttccccttgaggtgatatcactggggcaaaacgtggatgttttcaaagagtagtaaaatgtgtgctatgatatattgtggtaaatatcggtatctgaagaaagctgtttaaaaacagctgcctcgtaacttggttttacagagagagcttgagtcatttacct

SEQ ID NO: 53674 - DNA, 600 bp, Chicken  19866894305433_5
tcataaatcatcaatgagttgtgcatctctgagwagtagttacccctaactcctgctttagcttactctgactggaatggaaactcctgtaataaacaaatgataggcttttagwaatgatttgtatttaagctgaactaattctgggaattgctcacagagcaaagatcagacccrcagcctccagttcagaccttcactttgcattacaagtytatcacttctgttgtacccggtagtgccgctgacttacagggttcaatcacagttgtggcaaatattaagagaaatacagttgcrtattgaaacaatatatttcagcctctgatcrtcatgcttcttttgttcctttttccccttgaggtgatatcactggggcaaaacgtggatgttttcaaagagtagtaaaatgtgtgctatgatatattgtggtaaatatcggtatctgaagaaagctgtttaaaaacagctgcctcgtaacttggttttacagagagagcttgagtcatttacctcagattaaaaccaccacattgtaaggttcactttgactttaaggaaaagattagttttaatgcctgctttaaaaatcctttctgt

SEQ ID NO: 53675 - DNA, 600 bp, Chicken  19866894305433_6
agwagtagttacccctaactcctgctttagcttactctgactggaatggaaactcctgtaataaacaaatgataggcttttagwaatgatttgtatttaagctgaactaattctgggaattgctcacagagcaaagatcagacccrcagcctccagttcagaccttcactttgcattacaagtytatcacttctgttgtacccggtagtgccgctgacttacagggttcaatcacagttgtggcaaatattaagagaaatacagttgcrtattgaaacaatatatttcagcctctgatcrtcatgcttcttttgttcctttttccccttgaggtgatatcactggggcaaaacgtggatgttttcaaagagtagtaaaatgtgtgctatgatatattgtggtaaatatcggtatctgaagaaagctgtttaaaaacagctgcctcgtaacttggttttacagagagagcttgagtcatttacctcagattaaaaccaccacattgtaaggttcactttgactttaaggaaaagattagttttaatgcctgctttaaaaatcctttctgtattcagcccctggaggaagatgaagggcccc

SEQ ID NO: 53676 - DNA, 599 bp, Chicken  19866894305434_1
  misc_feature (1)..(185): n is any nucleotide
nnnnnnnnnnnnnnnnnnnnnnnnnnnnnnnnnnnnnnnnnnnnnnnnnnnnnnnnnnnnnnnnnnnnnnnnnnnnnnnnnnnnnnnnnnnnnnnnnnnnnnnnnnnnnnnnnnnnnnnnnnnnnnnnnnnnnnnnnnnnnnnnnnnnnnnnnnnnnnnnnnnnnnnnnnnnnnnnnnnnnnnnncccttgacttgtagggcaccttgagttttgagaaggggcctaaatcagccttcaatcattttctttcccattttcctcaccagggacttgaaagaaaatgtaaaggaggcaaagyacagcacaagaacgcttaccatgtagttggcattttctcatgttggggatacttgtgcctctagcagcaactgcagggaacctgtccacagacagctctgtttcacgcttgcctctggggaagcacattcactcactgtgaaagatgccattaggaagaaacatcaccagaggaaagctcactggtgaaatgatcagtggcacctaatttcctgttaagaggcatttgcctcctgagggccaagttaatggagtccaacagggtgttgatttggtttatcatttgctgctaggtagatg

SEQ ID NO: 53677 - DNA, 599 bp, Chicken  19866894305436_1
  misc_feature (1)..(54): n is any nucleotide
nnnnnnnnnnnnnnnnnnnnnnnnnnnnnnnnnnnnnnnnnnnnnnnnnnnnnntaagcttctgagtcttcacaagtttctgcaaattctgctattgcattggaacgcaagagcagaactgatttttctgcactttttggggaaagcttaactgcaactggaactctaggatgtggtgcataattagaatttttattatagaatgaaggaattctgagcatggatactggctcatgaacaacatcaaaaacattgctgcagtcaggaggattatctgttcacgtcacatccattcctttrratttacattgaacttttcagaaaatgcagagccagaaacatctgtggttttgccaaggagtaactgcatgaatttccactggaaattcctgtaagcgttagcacttaattaccatactctaccttaaaggcaggaattaggtgatatacagcatagctaccactttctacatgtcttaatggatcatgctataactgaaatcaggagttgagctcctttactgataggctttgcttggcagtagctgtaggtacataataaataactgatttccaatcataaaacataaatatccatg

SEQ ID NO: 53678 - DNA, 599 bp, Chicken  19866894305436_2
  misc_feature (1)..(53): n is any nucleotide
nnnnnnnnnnnnnnnnnnnnnnnnnnnnnnnnnnnnnnnnnnnnnnnnnnnnntaagcttctgagtcttcacaagtttctgcaaattctgctattgcattggaacgcaagagcagaactgatttttctgcactttttggggaaagcttaactgcaactggaactctaggatgtggtgcataattagaatttttattatagaatgaaggaattctgagcatggatactggctcatgaacaacatcaaaaacattgctgcagtcaggaggattatctgttcacgtcacatccattcctttrratttacattgaacttttcagaaaatgcagagccagaaacatctgtggttttgccaaggagtaactgcatgaatttccactggaaattcctgtaagcgttagcacttaattaccatactctaccttaaaggcaggaattaggtgatatacagcatagctaccactttctacatgtcttaatggatcatgctataactgaaatcaggagttgagctcctttactgataggctttgcttggcagtagctgtaggtacataataaataactgatttccaatcataaaacataaatatccatgt

SEQ ID NO: 53679 - DNA, 599 bp, Chicken  19866894305439_1
  misc_feature (1)..(22): n is any nucleotide
nnnnnnnnnnnnnnnnnnnnnncagagaaaacggtgtggggtccccctgtagggcagaggtagtgggggtgacactgtggggctggggctggcgctggggggcggtggggggtgagctctcaccatggggcatcacaaccagggggggcttctgggcagtgggaccctcacttggacgcagcaggatggcatcgaagtccaggccctctgtggggatggcataagcaatcagggctcagtggggatgagcgacagccgcactgcccccagcactcaccatactgggggttctcctgctcyggtgggggtttcagggtgcggatgccccaactgatgccaggcaccgggggtgcattttgcaggcagatccactttatctgtgcctcctggcccacaccaggcaagacagccacttgctgcatggggagaagcgtcagcaccagcactcagagtggcaggggggcactggggacagggatgtcaccatactagcgttgcggggcagcttggggtggaaaactgggccaccaagagatcccggtcaatggtgaggacagaccaactcccttggggtgcatctrcrgaagacagggagggtc

SEQ ID NO: 53680 - DNA, 600 bp, Chicken  19866894305439_2
ctgggggttctcctgctcyggtgggggtttcagggtgcggatgccccaactgatgccaggcaccgggggtgcattttgcaggcagatccactttatctgtgcctcctggcccacaccaggcaagacagccacttgctgcatggggagaagcgtcagcaccagcactcagagtggcaggggggcactggggacagggatgtcaccatactagcgttgcggggcagcttggggtggaaaactgggccaccaagagatcccggtcaatggtgaggacagaccaactcccttggggtgcatctrcrgaagacagggagggtcagagctgcaggcacaaccagccccaaccctggcaccgtgcactcaccggctgtcagcgaggttgtgctgcctgtctgcatgtccaccacaaacacatcctgagggcaggagggcagagtccagctcagcaccggaacagctgctcgctgtgcccccaggccctgcagtccttacctgctggctgcgctgggacgtgtctagaacaagccgacggctgtcagctgcccagcacagccttggcagagcgctgcagtagatcccagggaaggcacctgtaacagg

SEQ ID NO: 53681 - DNA, 600 bp, Chicken  19866894305439_3
gggggttctcctgctcyggtgggggtttcagggtgcggatgccccaactgatgccaggcaccgggggtgcattttgcaggcagatccactttatctgtgcctcctggcccacaccaggcaagacagccacttgctgcatggggagaagcgtcagcaccagcactcagagtggcaggggggcactggggacagggatgtcaccatactagcgttgcggggcagcttggggtggaaaactgggccaccaagagatcccggtcaatggtgaggacagaccaactcccttggggtgcatctrcrgaagacagggagggtcagagctgcaggcacaaccagccccaaccctggcaccgtgcactcaccggctgtcagcgaggttgtgctgcctgtctgcatgtccaccacaaacacatcctgagggcaggagggcagagtccagctcagcaccggaacagctgctcgctgtgcccccaggccctgcagtccttacctgctggctgcgctgggacgtgtctagaacaagccgacggctgtcagctgcccagcacagccttggcagagcgctgcagtagatcccagggaaggcacctgtaacaggag

SEQ ID NO: 53682 - DNA, 599 bp, Chicken  19866894305443_1
  misc_feature (1)..(147): n is any nucleotide
nnnnnnnnnnnnnnnnnnnnnnnnnnnnnnnnnnnnnnnnnnnnnnnnnnnnnnnnnnnnnnnnnnnnnnnnnnnnnnnnnnnnnnnnnnnnnnnnnnnnnnnnnnnnnnnnnnnnnnnnnnnnnnnnnnnnnnnnnnnnnnnnnnnactgagtagccggggtgtgttcaacctggggaaaagaaggttgagtggagatttgataaacgtctgtaagtacctaaggagaggttggaggcaaatgaatgaggctaggctattcttggtgaagtgtagtgatagggcaaggagtaatgaccrtaggaatttctatactaacatgcggaagaatttctttgctgtaatggtgacrgagcactggaacaggttgcccagagagattgtggaatctccttctatgaagatattcaagacatgtctggatgcctacctgtgtgacctaytgtagggtacctgctttagcaggcaggctggacttgatctctattgttccttccaacccctgcaattctgtgattgtgtgagttaacccattttgatgttggtgcccaagaggtctcagcattagaaagtactggcattagaaaatactgatcaca

SEQ ID NO: 53683 - DNA, 599 bp, Chicken  19866894305443_2
  misc_feature (1)..(95): n is any nucleotide
nnnnnnnnnnnnnnnnnnnnnnnnnnnnnnnnnnnnnnnnnnnnnnnnnnnnnnnnnnnnnnnnnnnnnnnnnnnnnnnnnnnnnnnnnnnnnnnactgagtagccggggtgtgttcaacctggggaaaagaaggttgagtggagatttgataaacgtctgtaagtacctaaggagaggttggaggcaaatgaatgaggctaggctattcttggtgaagtgtagtgatagggcaaggagtaatgaccrtaggaatttctatactaacatgcggaagaatttctttgctgtaatggtgacrgagcactggaacaggttgcccagagagattgtggaatctccttctatgaagatattcaagacatgtctggatgcctacctgtgtgacctaytgtagggtacctgctttagcaggcaggctggacttgatctctattgttccttccaacccctgcaattctgtgattgtgtgagttaacccattttgatgttggtgcccaagaggtctcagcattagaaagtactggcattagaaaatactgatcacatggcatgcagatattgctgcactaacagtaacagacatgggcttgtgttttt

SEQ ID NO: 53684 - DNA, 599 bp, Chicken  19866894305443_3
  misc_feature (1)..(4): n is any nucleotide
nnnnactgagtagccggggtgtgttcaacctggggaaaagaaggttgagtggagatttgataaacgtctgtaagtacctaaggagaggttggaggcaaatgaatgaggctaggctattcttggtgaagtgtagtgatagggcaaggagtaatgaccrtaggaatttctatactaacatgcggaagaatttctttgctgtaatggtgacrgagcactggaacaggttgcccagagagattgtggaatctccttctatgaagatattcaagacatgtctggatgcctacctgtgtgacctaytgtagggtacctgctttagcaggcaggctggacttgatctctattgttccttccaacccctgcaattctgtgattgtgtgagttaacccattttgatgttggtgcccaagaggtctcagcattagaaagtactggcattagaaaatactgatcacatggcatgcagatattgctgcactaacagtaacagacatgggcttgtgtttttcctaagaagcaaccttaggtgtgcttagcatttgtgaaagtgggtgacctgcagcgtgaaaataaacatgacactggaagaaacaatgtag

SEQ ID NO: 53685 - DNA, 600 bp, Chicken  19866894305444_1
gctttatgtatgtgaaataaccattcccaaactttactaataaagtctaaaacttgagtttgcagcttgctaacaaatttgagttgcctatagtgaagtcacaaaaatgagtttggaggaatgctttataagcatcatggtagtgatgggttgatggttgcacttgatgattttagagactcaaaactcttttccaaccttaatgattctatgatcatgcatgtataatatataatctacaccagaatctctgtgcaaaagactgatataagattcttttgggtatgctaactttgaaayggagagaaaccttccttacctcttctgcgtgaataccacaaagcttgtttcctgacagcagcttgtttttgaggcttttgttctgaggaaagaagttttattacagagacttagtgacattttaagggatcattggaacactttatctatgttatcatactagttttatattacacatgggtaacaccttcaagtcactggaaaagacacaaataaaataatatggtagctgcatcatggtgtaatatcctctcttagaaaattctgaaagcctacaactttccattgaaacaggctttt

SEQ ID NO: 53686 - DNA, 599 bp, Chicken  19866894305455_1
  misc_feature (1)..(37): n is any nucleotide
nnnnnnnnnnnnnnnnnnnnnnnnnnnnnnnnnnnnncatttaagatggagatagtgcctaccaaacatattattgtaaaacagtaatgaaagaatttaatttgcatttgtacagtctttattcaaagtttgtacagaaattttaccaaaacacagttataaacagtcatttgttaatccattttaccctgtttgagtctaagcttcaggaacacagagaggtaatggtcttcagttgtgtcagaggaggctcaggttggatatacaaggaaaaaaacttttcttagagagagtgatgargcattggaacaggctacccctgaaatgatgcagtcatcgtccctggcatttttcaagaaatgtgtagatgtggcatttagaggcatggtttagtgggaatggtggtctgcagttggactaggtaatcttagtggtccttttccaaccttaatgattmtatgactgtgatgtggtaaatgctgtagttcagctcatggcaagggatgcatcataggtctttccctgcaagatagttctggaaaccttcaggtaaagttgatagtctcatgtaaactcattttccaaattgtcattgtata

SEQ ID NO: 53687 - DNA, 600 bp, Chicken  19866894305455_2
tataaacagtcatttgttaatccattttaccctgtttgagtctaagcttcaggaacacagagaggtaatggtcttcagttgtgtcagaggaggctcaggttggatatacaaggaaaaaaacttttcttagagagagtgatgargcattggaacaggctacccctgaaatgatgcagtcatcgtccctggcatttttcaagaaatgtgtagatgtggcatttagaggcatggtttagtgggaatggtggtctgcagttggactaggtaatcttagtggtccttttccaaccttaatgattmtatgactgtgatgtggtaaatgctgtagttcagctcatggcaagggatgcatcataggtctttccctgcaagatagttctggaaaccttcaggtaaagttgatagtctcatgtaaactcattttccaaattgtcattgtatagaatacatgtgtaatataaagaacagtaatttgctagctgtttttatgaagggtaattgttttcatttatatgaggccacatttacttttcatactgatcagatatcatgtatttagtactgaatacagtgcagagcagtggtaagcaaggtccattt

SEQ ID NO: 53688 - DNA, 599 bp, Chicken  19866894305456_1
  misc_feature (1)..(166): n is any nucleotide
nnnnnnnnnnnnnnnnnnnnnnnnnnnnnnnnnnnnnnnnnnnnnnnnnnnnnnnnnnnnnnnnnnnnnnnnnnnnnnnnnnnnnnnnnnnnnnnnnnnnnnnnnnnnnnnnnnnnnnnnnnnnnnnnnnnnnnnnnnnnnnnnnnnnnnnnnnnnnnnnnnnnnngaggagattataccttttattgagcctctctccatgcattgcttctcttgtattccctctcaagcatcagatctgcatcccggctgctacttcagctgatttaggtgaattatctcattctcaatttctgagakaccctcagagatttctatgggtaataataaagctttcatgaaagttgtcagcattcctaataagaagcaaggtaactaacaagttatcaggcaatctacaattgtctgcttascatcttcctctccagtggcactttggctgctgtaacaaacacctcatgacccaattataacacctgcaaggctctgaagcagctaaaaaaggaaccagrtaagaaaagcaattgtaattgcataattgrctttcccattattatacaaagcaaaaattgaattaaatggcattcttcctctgcgga

SEQ ID NO: 53689 - DNA, 599 bp, Chicken  19866894305456_2
  misc_feature (1)..(53): n is any nucleotide
nnnnnnnnnnnnnnnnnnnnnnnnnnnnnnnnnnnnnnnnnnnnnnnnnnnnngaggagattataccttttattgagcctctctccatgcattgcttctcttgtattccctctcaagcatcagatctgcatcccggctgctacttcagctgatttaggtgaattatctcattctcaatttctgagakaccctcagagatttctatgggtaataataaagctttcatgaaagttgtcagcattcctaataagaagcaaggtaactaacaagttatcaggcaatctacaattgtctgcttascatcttcctctccagtggcactttggctgctgtaacaaacacctcatgacccaattataacacctgcaaggctctgaagcagctaaaaaaggaaccagrtaagaaaagcaattgtaattgcataattgrctttcccattattatacaaagcaaaaattgaattaaatggcattcttcctctgcggaagtggaggaaatagtttcagagctrtttgtatttcaacaaagggcacatgaatacattgggagccaatgggttgggtcactccctgaacccatccctgggcagcagtstttgc

SEQ ID NO: 53690 - DNA, 600 bp, Chicken  19866894305456_3
cttgtattccctctcaagcatcagatctgcatcccggctgctacttcagctgatttaggtgaattatctcattctcaatttctgagakaccctcagagatttctatgggtaataataaagctttcatgaaagttgtcagcattcctaataagaagcaaggtaactaacaagttatcaggcaatctacaattgtctgcttascatcttcctctccagtggcactttggctgctgtaacaaacacctcatgacccaattataacacctgcaaggctctgaagcagctaaaaaaggaaccagrtaagaaaagcaattgtaattgcataattgrctttcccattattatacaaagcaaaaattgaattaaatggcattcttcctctgcggaagtggaggaaatagtttcagagctrtttgtatttcaacaaagggcacatgaatacattgggagccaatgggttgggtcactccctgaacccatccctgggcagcagtstttgcagcctcttccttgtcctggtgacctcagctgggtggatggtcatggctcacattcagggacacttcgtaagaccatgaaggcttaaatcatggagaaaca

SEQ ID NO: 53691 - DNA, 600 bp, Chicken  19866894305456_4
atcccggctgctacttcagctgatttaggtgaattatctcattctcaatttctgagakaccctcagagatttctatgggtaataataaagctttcatgaaagttgtcagcattcctaataagaagcaaggtaactaacaagttatcaggcaatctacaattgtctgcttascatcttcctctccagtggcactttggctgctgtaacaaacacctcatgacccaattataacacctgcaaggctctgaagcagctaaaaaaggaaccagrtaagaaaagcaattgtaattgcataattgrctttcccattattatacaaagcaaaaattgaattaaatggcattcttcctctgcggaagtggaggaaatagtttcagagctrtttgtatttcaacaaagggcacatgaatacattgggagccaatgggttgggtcactccctgaacccatccctgggcagcagtstttgcagcctcttccttgtcctggtgacctcagctgggtggatggtcatggctcacattcagggacacttcgtaagaccatgaaggcttaaatcatggagaaacagcatcttccacaaaagctccttgggctacc

SEQ ID NO: 53692 - DNA, 600 bp, Chicken  19866894305456_5
taataaagctttcatgaaagttgtcagcattcctaataagaagcaaggtaactaacaagttatcaggcaatctacaattgtctgcttascatcttcctctccagtggcactttggctgctgtaacaaacacctcatgacccaattataacacctgcaaggctctgaagcagctaaaaaaggaaccagrtaagaaaagcaattgtaattgcataattgrctttcccattattatacaaagcaaaaattgaattaaatggcattcttcctctgcggaagtggaggaaatagtttcagagctrtttgtatttcaacaaagggcacatgaatacattgggagccaatgggttgggtcactccctgaacccatccctgggcagcagtstttgcagcctcttccttgtcctggtgacctcagctgggtggatggtcatggctcacattcagggacacttcgtaagaccatgaaggcttaaatcatggagaaacagcatcttccacaaaagctccttgggctaccagaggaggacttgcataatgtttgttctggcagtttcctctctgctctgggttctaggagaggaactggaggactggaaagt

SEQ ID NO: 53693 - DNA, 600 bp, Chicken  19866894305456_6
gcttascatcttcctctccagtggcactttggctgctgtaacaaacacctcatgacccaattataacacctgcaaggctctgaagcagctaaaaaaggaaccagrtaagaaaagcaattgtaattgcataattgrctttcccattattatacaaagcaaaaattgaattaaatggcattcttcctctgcggaagtggaggaaatagtttcagagctrtttgtatttcaacaaagggcacatgaatacattgggagccaatgggttgggtcactccctgaacccatccctgggcagcagtstttgcagcctcttccttgtcctggtgacctcagctgggtggatggtcatggctcacattcagggacacttcgtaagaccatgaaggcttaaatcatggagaaacagcatcttccacaaaagctccttgggctaccagaggaggacttgcataatgtttgttctggcagtttcctctctgctctgggttctaggagaggaactggaggactggaaagtgccagtcatgggcaacccatccttgtgctctggtgcatactgtggagcccgctgcagtctggctgggttaagacagttttctt

SEQ ID NO: 53694 - DNA, 600 bp, Chicken  19866894305457_1
atggatgttcttgtgttttcttagggaattctttctaaggcacagctgacagttgtcaaccatgtcatccactcatgctgtctattttctgctgaaaacaaatggaaatcactgttacaaaatgtcgaacagactattgctctctgtaccaagaccattgaatggccaaaaaaaaaaggtcaccaccaaagtttgcaaagcttacagaatgatagaatatcctgagttggaaaggacccataaggatcactgagtccaaccacccaaaaatcagaccctgtgtctgagagtaaggataaragtaaggagtaagaataaatttgaagctatgagtgtatttttatcargtgttaaatggatgcagaaaggaagagttagttaaatagaagccttgcagaccagcctgcagttggctgttgtgcattttctgtgtgctaaacctttcaaaacatgaaaggaaaaaaaaaaaagctgttgtgttcacgtcaaagggaaaaagaaaagagcataaatgaaactttatagtaatacctggaattcatatggtagacagatactgggttgatccaggagggggagtagctgagcagccttgggatt

SEQ ID NO: 53695 - DNA, 600 bp, Chicken  19866894305457_2
gacagttgtcaaccatgtcatccactcatgctgtctattttctgctgaaaacaaatggaaatcactgttacaaaatgtcgaacagactattgctctctgtaccaagaccattgaatggccaaaaaaaaaaggtcaccaccaaagtttgcaaagcttacagaatgatagaatatcctgagttggaaaggacccataaggatcactgagtccaaccacccaaaaatcagaccctgtgtctgagagtaaggataaragtaaggagtaagaataaatttgaagctatgagtgtatttttatcargtgttaaatggatgcagaaaggaagagttagttaaatagaagccttgcagaccagcctgcagttggctgttgtgcattttctgtgtgctaaacctttcaaaacatgaaaggaaaaaaaaaaaagctgttgtgttcacgtcaaagggaaaaagaaaagagcataaatgaaactttatagtaatacctggaattcatatggtagacagatactgggttgatccaggagggggagtagctgagcagccttgggattggctttgggaaatctgcccttaggagagctttcgaggaaagttattc

SEQ ID NO: 53696 - DNA, 600 bp, Chicken  19866894305460_1
acctgataagcctgtccccactgcctggagtttctggccaggtccttggaacagtctgcactctctcttcccaccacatcaaattaacagggagcaggcctcaaagtgaaagagttgatcctgccaaccttaaaccactgtagtctacagacatatttcacagttgttttttacagtatttatgtttcttgcacttcctaaaaatatgggtaagtcatgtgatgatatagtatcactctaaaagctcagactggcagtataatctgaaattaaacaagaatgtctgacaccaatcttaaytcyggaaatcaacatttagaaacatccatattaaccaataattctgaaaacattatatcccaaaacagctgctgcaaaggaacaaaatgcatgtctgtccataaataaagtcctgttctcctccaccttgtgtgccaaataaaactacacatttatgtaaggctaaacatcacagttctcatgtgcagagaaaaagagaaggaaaccacgactacagctgcactgaattatgatttctctattagcagaaacacttcagtggtacgttgccccagtcatgaaatatactagatcaaaatt

SEQ ID NO: 53697 - DNA, 600 bp, Chicken  19866894305460_2
tgataagcctgtccccactgcctggagtttctggccaggtccttggaacagtctgcactctctcttcccaccacatcaaattaacagggagcaggcctcaaagtgaaagagttgatcctgccaaccttaaaccactgtagtctacagacatatttcacagttgttttttacagtatttatgtttcttgcacttcctaaaaatatgggtaagtcatgtgatgatatagtatcactctaaaagctcagactggcagtataatctgaaattaaacaagaatgtctgacaccaatcttaaytcyggaaatcaacatttagaaacatccatattaaccaataattctgaaaacattatatcccaaaacagctgctgcaaaggaacaaaatgcatgtctgtccataaataaagtcctgttctcctccaccttgtgtgccaaataaaactacacatttatgtaaggctaaacatcacagttctcatgtgcagagaaaaagagaaggaaaccacgactacagctgcactgaattatgatttctctattagcagaaacacttcagtggtacgttgccccagtcatgaaatatactagatcaaaattaag

SEQ ID NO: 53698 - DNA, 600 bp, Chicken  19866894305463_1
cgcacacatgtagagtgctaccaacagtttttcttttaaaagatcccagctttgatgtctaacattttctatagttataaaacaatgcattaattgtaagtctcttctcatttatgccctttaattccatccagtttagataactgaagtgtctggttgagttttgctttctgcttccccacactaacacaacggtgctttgtttgtgggctccagccctgcaagcaaagtgttcagataaacggttcatgcctggaattgttaaacgtttgaggagccttctgcacacatcagaacttmgaagtcttcgtaaacataaaagrtattattttaatcaataactcactggtaccggcaggaattttgaaaagttaatgcttactccaaggggctgaactgagatgctgcagtgggtgctgaattgcaggaactggatcttcattttggcaagcaggtttcacagagcactttgtatcagattcaatcccgcaatcactcctcacgtcccttggtcattgctcctcagatgaaacaatgaggagacagagaatcccctgtgctttgcctgcagcgggcacacgttgtcaatactgctattat

SEQ ID NO: 53699 - DNA, 600 bp, Chicken  19866894305463_2
acagtttttcttttaaaagatcccagctttgatgtctaacattttctatagttataaaacaatgcattaattgtaagtctcttctcatttatgccctttaattccatccagtttagataactgaagtgtctggttgagttttgctttctgcttccccacactaacacaacggtgctttgtttgtgggctccagccctgcaagcaaagtgttcagataaacggttcatgcctggaattgttaaacgtttgaggagccttctgcacacatcagaacttmgaagtcttcgtaaacataaaagrtattattttaatcaataactcactggtaccggcaggaattttgaaaagttaatgcttactccaaggggctgaactgagatgctgcagtgggtgctgaattgcaggaactggatcttcattttggcaagcaggtttcacagagcactttgtatcagattcaatcccgcaatcactcctcacgtcccttggtcattgctcctcagatgaaacaatgaggagacagagaatcccctgtgctttgcctgcagcgggcacacgttgtcaatactgctattatagctacctacacagcctgcaagg

SEQ ID NO: 53700 - DNA, 599 bp, Chicken  19866894305467_1
  misc_feature (1)..(41): n is any nucleotide
nnnnnnnnnnnnnnnnnnnnnnnnnnnnnnnnnnnnnnnnngggggcagcataaccaaagctggggaaggctgtgattagcgaggaggaaacgagaggagatcagatcagctgagagaggaggcagaaaagtgcaactcacgtgtgggacctggcacagcaaagaaatgagctgctctagacacagactgaggaggggggtgctgtttcggttgatggagggggcaaaagaaagaaaaccacacagagtgaaaaatgcataagcatcaagaaatgcgatcaagaactcttctatttgtgmtgtctggtaccaaagagagaacgctagtaaatcccatgtcaacggtgcagatttgtcacagatgacactgaggagtagagaggtgaggggtgcagccaggaggaggaaacacaaagagtcccatgtaacatcacccatccgctgcatctgtgcctgccccgaacaaccacttccctccagcctctgaaccctctctccttccacccaggygaggagctgagatgccagggagcacaaaggagagctgtgccgtggctctagctcagcagggaagtatttgctccttgctgtacctagcc

SEQ ID NO: 53701 - DNA, 600 bp, Chicken  19866894305467_2
gttgatggagggggcaaaagaaagaaaaccacacagagtgaaaaatgcataagcatcaagaaatgcgatcaagaactcttctatttgtgmtgtctggtaccaaagagagaacgctagtaaatcccatgtcaacggtgcagatttgtcacagatgacactgaggagtagagaggtgaggggtgcagccaggaggaggaaacacaaagagtcccatgtaacatcacccatccgctgcatctgtgcctgccccgaacaaccacttccctccagcctctgaaccctctctccttccacccaggygaggagctgagatgccagggagcacaaaggagagctgtgccgtggctctagctcagcagggaagtatttgctccttgctgtacctagccctgagccctccccacagcatcccagctcccctacacagtcagagaaagagccatgagctcccgagatcagcatcaagagcagggtcacttctccggtccttctagagatctctaggcttcccaaacagggcagggaactacgggatgggctgcagagacttgggcagcaaagagaacttcattatggggtgggtctcttacacagagggta

SEQ ID NO: 53702 - DNA, 599 bp, Chicken  19866894305468_1
  misc_feature (1)..(98): n is any nucleotide
nnnnnnnnnnnnnnnnnnnnnnnnnnnnnnnnnnnnnnnnnnnnnnnnnnnnnnnnnnnnnnnnnnnnnnnnnnnnnnnnnnnnnnnnnnnnnnnnnntgagtcctttcattcagggctacctgtgttggagaagctcaggcctaatagctgacctgtgacagatggtaatgagaaaccaattagcgttgtgatggtgtggttactttcagtggtactttcagtactttcagaggtattttcatgcacaaaataatcctgttttccaagagcaaacgatttgtactggaaatagagagcyctgagaggctgcagcagcagggacaagtgcaatgtctctcatggggtagttgtattccagagcagccaaacaaagggaatactggaaatgcatgaaaaggagacaatctccaagaaagcaatagttgtactggtctctgtgcaccatgcttattccctgacctactgtggagcttagaagtgatcagttttgcgttactttatctgttctcctacttctttgctcagcatttgttttgcagttcagtcccttggagagtgccctttctcccrttgttgtgaataagaataaataggaac

SEQ ID NO: 53703 - DNA, 600 bp, Chicken  19866894305468_2
aaacgatttgtactggaaatagagagcyctgagaggctgcagcagcagggacaagtgcaatgtctctcatggggtagttgtattccagagcagccaaacaaagggaatactggaaatgcatgaaaaggagacaatctccaagaaagcaatagttgtactggtctctgtgcaccatgcttattccctgacctactgtggagcttagaagtgatcagttttgcgttactttatctgttctcctacttctttgctcagcatttgttttgcagttcagtcccttggagagtgccctttctcccrttgttgtgaataagaataaataggaacaaataggcaaaaagccaaagaatgcaagatttaaactgaatgaatctgctttacaactggctctgagtgtgaccaggtttgcctggagtggaaacatctcgaggcaaatggtgatgcttaatgcaaggagattctttactgtacagatgcttattctagccatttttggacgcagaaaagagcrcagcatactctgtgccacgtgtgaggaatgattgcttatgtaggatgtactattatttgatacctgttatttactaacgcagtggaact

SEQ ID NO: 53704 - DNA, 600 bp, Chicken  19866894305468_3
tcagttttgcgttactttatctgttctcctacttctttgctcagcatttgttttgcagttcagtcccttggagagtgccctttctcccrttgttgtgaataagaataaataggaacaaataggcaaaaagccaaagaatgcaagatttaaactgaatgaatctgctttacaactggctctgagtgtgaccaggtttgcctggagtggaaacatctcgaggcaaatggtgatgcttaatgcaaggagattctttactgtacagatgcttattctagccatttttggacgcagaaaagagcrcagcatactctgtgccacgtgtgaggaatgattgcttatgtaggatgtactattatttgatacctgttatttactaacgcagtggaactaaagacctaggcactactggacccagttcacgaatatttattgcaccaaatccaatctataatatagtgtcagccttgtaccaaagcaggagacagtagtatttatgattattagtacaatattgaatcatcctgaaccaattactggtccaattactgtgtcattattatcttctgaatagggcttgatttgtctgtgataaatatgatg

SEQ ID NO: 53705 - DNA, 600 bp, Chicken  19866894305469_1
tttgtctttaagcattttctcagcacaaactatattcagcattacaaaagccatgtctagaacgcctctgtgttggcatagtctctacaacttgcatctaacattttatcatcttgataagtaacagacactagctacaaaacaacttgagttttgaagaggataacagcaggaagcaatcagatatgtgctggtgcaagaactgtgcagatgtggaagtgaaggacacagtcagtaggcatggtggggatgggctggggtgggacttggggagctttagaggtcttttctaaccttaaygattctgtgattcacatggacacaagctggcattaatgaactaactaggacatgcagtaatcttgctttaaaagtagcctgccatcataaggattgaggtccaactagagcaggacccagcaaaaaagtcaacagaaaaaaaagcagtcagacaaaacagctaaaaatacccaaagccaatgaagttttgtccaacttgatacattcatatacttttcttttatacatttgatataactacgaaagcttacattaataacacctgcttttacaggtttatcaataattagaaggctccag

SEQ ID NO: 53706 - DNA, 600 bp, Chicken  19866894305476_1
ggccacggccagttgtgacgaactggggggtgaggagcagagccctggcctccccgcacatgaggacgtttgtcctgaagatgtgaacagtgagagagggtccctggggctggggacgctcaaagcacccatggaacctgggccggagggcagggagaaccacagcctgcatgaggaaaacaccctgcagcacttgccaggccagtctcagagccgggctttcagcctgcctgcccctccattgggggccgcaggggcacagcccctccatgccgggggagaagcctggggccaagaggycgaggggcaggcaggctgcagggaggccttgcaccctgagcccccgggggtgaagcaagaggaatgtgagatcagagatgaggaggagaaaactggcagcagccagagtcaaggtacagtctgagagttcccgctggctgacagtcccctcctcccctccagctgggacaggatggacctgctgttcccagtgctgagccaaagccaaggggctgcccagcctcctggaacagctaccacccctgcaggaggtgggcccctctggccgatgtgacccaccaaagagttggtggctggttg

SEQ ID NO: 53707 - DNA, 600 bp, Chicken  19866894305477_1
tctcccctgttttgaggtcatcttattgattttgcagttgcttctgtatagccgagagaagaggtgagccaagttatactgcagttgattggggtgggaggaggagagagactgcaagaattacagtacagtaaccgaactaacagaaatgacagcaggcaccaaaaatcactttgttcaactagtgaatttctctgtttaattcttccagagcatagattgtactctttgaaaaagattaagtgatatttcagtagctagtacatcacttactcaaaacatgcagtgctatgtagcaarttatatgttctaattcatctggttctgccatgatgctccagtgggtaggcagtaggcctgcagttttcacgttacttctgtgaaaaggtgcagtgaaaattctgtacatttytagtatagctagggtaagcagcatggggagggggatgctatcagcagcatgggggccagctgtattgcattccttttggttaagggtcatgaagacataaggaaaacactgtagatgaagtcttggtatcacttaagtcagtggcaaagttgattttaatggaatcaggagttcagctcaatgatcat

SEQ ID NO: 53708 - DNA, 600 bp, Chicken  19866894305477_2
tgcaagaattacagtacagtaaccgaactaacagaaatgacagcaggcaccaaaaatcactttgttcaactagtgaatttctctgtttaattcttccagagcatagattgtactctttgaaaaagattaagtgatatttcagtagctagtacatcacttactcaaaacatgcagtgctatgtagcaarttatatgttctaattcatctggttctgccatgatgctccagtgggtaggcagtaggcctgcagttttcacgttacttctgtgaaaaggtgcagtgaaaattctgtacatttytagtatagctagggtaagcagcatggggagggggatgctatcagcagcatgggggccagctgtattgcattccttttggttaagggtcatgaagacataaggaaaacactgtagatgaagtcttggtatcacttaagtcagtggcaaagttgattttaatggaatcaggagttcagctcaatgatcattcctgaatggtactgtcatatcattgaactctcttccaagccattctaagatcatctagttccaacccccttgctgcaggcagggttgccaaccactaaatcagagctagat

SEQ ID NO: 53709 - DNA, 600 bp, Chicken  19866894305477_3
agcagcatggggagggggatgctatcagcagcatgggggccagctgtattgcattccttttggttaagggtcatgaagacataaggaaaacactgtagatgaagtcttggtatcacttaagtcagtggcaaagttgattttaatggaatcaggagttcagctcaatgatcattcctgaatggtactgtcatatcattgaactctcttccaagccattctaagatcatctagttccaacccccttgctgcaggcagggttgccaaccactaaatcagagctagatcaggatgtccaggtcyccatccaacctggagttgcagtgcaactttacagatgttgataatgcattttttttgcattcctgaggtcactgtgcattcctctttccttgtttattcttgtattttaatacaagaaagtaatatgtcatttaaaggaagaagtacttaaaaaagtcgtattctctgaagctgaatgagtcgtataatgcaccccatatgaaaagggcatttcaggaacaggctatcatccaggaaatttatggtcagctgccctgactctgagtgagactaaacccttcctgcatagtgctgcctgat

SEQ ID NO: 53710 - DNA, 599 bp, Chicken  19866894305481_1
  misc_feature (1)..(71): n is any nucleotide
nnnnnnnnnnnnnnnnnnnnnnnnnnnnnnnnnnnnnnnnnnnnnnnnnnnnnnnnnnnnnnnnnnnnnnnaaatgaataatctattcacataatttttactcttaactagtggattttctaataagaaaaatagactaataatgtttccaagttatattaatgatttcccttcagtttgtaacattattttccagtgatttctattgctaacaaactagagtgggaggtgtagccatagagaagatataaacaagtggagtaagtttagtgggatctgcagaaaagagtaaaaaagaayttctgttgctaggtgtctgaatgtgttagctgaattagattttaaagtaatatgatttttccttgatgcaaataccctttacacataataacaataataaaaaaaaaagcttctgaagtcaatattctgacagtgatttctgtgttataaagcagactgttatttatttattctatttttttaatttargtaggtatctgtagagaatccttcatctattacatttatatgcactagaaacaatatgaacagaacttgaaagttttgtggaaaratactgtgggtttaawgtgtttttt

SEQ ID NO: 53711 - DNA, 600 bp, Chicken  19866894305481_2
tttccagtgatttctattgctaacaaactagagtgggaggtgtagccatagagaagatataaacaagtggagtaagtttagtgggatctgcagaaaagagtaaaaaagaayttctgttgctaggtgtctgaatgtgttagctgaattagattttaaagtaatatgatttttccttgatgcaaataccctttacacataataacaataataaaaaaaaaagcttctgaagtcaatattctgacagtgatttctgtgttataaagcagactgttatttatttattctatttttttaatttargtaggtatctgtagagaatccttcatctattacatttatatgcactagaaacaatatgaacagaacttgaaagttttgtggaaaratactgtgggtttaawgtgtttttttttctttttttcttttattcttggtttagaagagcaaaatcaaggacaactccatgtgttctgcaaagttcagcagtaatattattattcacacaagttgtctcagctgtgaagtcagtacatttgttctggatgtctctttattattaatagtcctttcacctgactttctacatttgtttgagccaac

SEQ ID NO: 53712 - DNA, 600 bp, Chicken  19866894305481_3
atctgcagaaaagagtaaaaaagaayttctgttgctaggtgtctgaatgtgttagctgaattagattttaaagtaatatgatttttccttgatgcaaataccctttacacataataacaataataaaaaaaaaagcttctgaagtcaatattctgacagtgatttctgtgttataaagcagactgttatttatttattctatttttttaatttargtaggtatctgtagagaatccttcatctattacatttatatgcactagaaacaatatgaacagaacttgaaagttttgtggaaaratactgtgggtttaawgtgtttttttttctttttttcttttattcttggtttagaagagcaaaatcaaggacaactccatgtgttctgcaaagttcagcagtaatattattattcacacaagttgtctcagctgtgaagtcagtacatttgttctggatgtctctttattattaatagtcctttcacctgactttctacatttgtttgagccaacatcacttttacctgctggccagttcacttagattattttcatcccctggttgcctttaaggtgaagctttgttccaaatgtcttc

SEQ ID NO: 53713 - DNA, 600 bp, Chicken  19866894305481_4
aaaaaagaayttctgttgctaggtgtctgaatgtgttagctgaattagattttaaagtaatatgatttttccttgatgcaaataccctttacacataataacaataataaaaaaaaaagcttctgaagtcaatattctgacagtgatttctgtgttataaagcagactgttatttatttattctatttttttaatttargtaggtatctgtagagaatccttcatctattacatttatatgcactagaaacaatatgaacagaacttgaaagttttgtggaaaratactgtgggtttaawgtgtttttttttctttttttcttttattcttggtttagaagagcaaaatcaaggacaactccatgtgttctgcaaagttcagcagtaatattattattcacacaagttgtctcagctgtgaagtcagtacatttgttctggatgtctctttattattaatagtcctttcacctgactttctacatttgtttgagccaacatcacttttacctgctggccagttcacttagattattttcatcccctggttgcctttaaggtgaagctttgttccaaatgtcttcggaaaggttagtttta

SEQ ID NO: 53714 - DNA, 600 bp, Chicken  19866894305481_5
aagaayttctgttgctaggtgtctgaatgtgttagctgaattagattttaaagtaatatgatttttccttgatgcaaataccctttacacataataacaataataaaaaaaaaagcttctgaagtcaatattctgacagtgatttctgtgttataaagcagactgttatttatttattctatttttttaatttargtaggtatctgtagagaatccttcatctattacatttatatgcactagaaacaatatgaacagaacttgaaagttttgtggaaaratactgtgggtttaawgtgwttttttttctttttttcttttattcttggtttagaagagcaaaatcaaggacaactccatgtgttctgcaaagttcagcagtaatattattattcacacaagttgtctcagctgtgaagtcagtacatttgttctggatgtctctttattattaatagtcctttcacctgactttctacatttgtttgagccaacatcacttttacctgctggccagttcacttagattattttcatcccctggttgcctttaaggtgaagctttgttccaaatgtcttcggaaaggttagttttaacta

SEQ ID NO: 53715 - DNA, 600 bp, Chicken  19866894305481_6
gttagttttaactattatattgctatcggattgaaattcaggaaacagctatggcaaatgcaatagtgaaactcttacttctaaggcactactaattctatcaaaaatattgtccccagcatagcgttgcagggtaaaattcaccatggagcacgggtaaatatagcgcaaaggccacaggatgcctaaatccactcaagtttgatactgcactctatctaccttaaacagaagcagatgtttaagtaggaattaagtggtgtgttgcctttttgatggctctttgcaaatgggcatatytcacccagagagaataagcataaaattggatcagtttattaaaagttgtgaaaggaagacattttaaatacattaactgggaaaatataacttccgtcttggaaaaatatatgcttaagaaaaatatcatttttctttcaaatatgaacccaaatacgaatttattatctctaaagttgccatcaatttctggtgaattcggatgaagaagtctggttttccttgggccactttcaagggcctgataatttgagaccgtgaatcagactcatttataattttattttcatatacttaaca

SEQ ID NO: 53716 - DNA, 600 bp, Chicken  19866894305486_1
gcacacattctgggctgttgtctgtaaccacagacatgtacaagacatggaacagggaaacctctccagcaaggaaaatctgctggcaacagagttatgatcagggaatgagaggaaagaaagaacagggagaattcacctgaaaaatccacactactcccttcagtgcagacaccttcctctgagcaagctcccacccagaaatgcctctgccctcatggccatggagttcaatgcacgaaccacctcctgtgcagccagagctccagcagagcagagcatcatctccccaggcacgtstccatcgccctctgcagtgcacaggggctgagagccactgcctggggctgtgggcagtgcagtctgtgagactgggaaggagttggctttcccttaatgagacgccaccactgggtcacatctccttcaagtgtccttcagagctgtgagctgacctccagtattgtaagtttttctcacaggctcgagatcaatgtgcagggacgaaggggagagatgctatacgcagggaaatgctctggggttggtgaaatgaattgtaggtgtcgtttgccagatgtgtggtgatgagaccttgct

SEQ ID NO: 53717 - DNA, 599 bp, Chicken  19866894305493_1
  misc_feature (1)..(85): n is any nucleotide
nnnnnnnnnnnnnnnnnnnnnnnnnnnnnnnnnnnnnnnnnnnnnnnnnnnnnnnnnnnnnnnnnnnnnnnnnnnnnnnnnnnnnaatgcactgcttcccagttctgttttgaatgcagatggcgccgttttttctctgatggtctcatttgcctcaataaccctattaacttttaaatattaatgcacttctatgaattaagagcagttcaatgtgtacctgaagatatatacacacattttaaatggtgctgttgtaggcagaccaagaaatagcctcaggaggagcacccagagctyacaataaagccttccctccagagaaatgctgcccccagyrccgttcctaaagcatcactgagctcaaagccacttttgcatgtatgcaaatgtttcaagagcatttggaagccaactgtccctccaaaaccgtatacgctctgcagcagcagcacatgagtctcagtgcataggagcagaggtaagatgaaggatttgccccagggtttgtatggcagaagacaagcagctccacatttcacagggtgccacagactccctgccccacacagctctgctcacacaccgctatcagagga

SEQ ID NO: 53718 - DNA, 599 bp, Chicken  19866894305493_2
  misc_feature (1)..(46): n is any nucleotide
nnnnnnnnnnnnnnnnnnnnnnnnnnnnnnnnnnnnnnnnnnnnnnaatgcactgcttcccagttctgttttgaatgcagatggcgccgttttttctctgatggtctcatttgcctcaataaccctattaacttttaaatattaatgcacttctatgaattaagagcagttcaatgtgtacctgaagatatatacacacattttaaatggtgctgttgtaggcagaccaagaaatagcctcaggaggagcacccagagctyacaataaagccttccctccagagaaatgctgcccccagyrccgttcctaaagcatcactgagctcaaagccacttttgcatgtatgcaaatgtttcaagagcatttggaagccaactgtccctccaaaaccgtatacgctctgcagcagcagcacatgagtctcagtgcataggagcagaggtaagatgaaggatttgccccagggtttgtatggcagaagacaagcagctccacatttcacagggtgccacagactccctgccccacacagctctgctcacacaccgctatcagaggatgcatcacctcaatgcctgcctggagcaatggcasataa

SEQ ID NO: 53719 - DNA, 599 bp, Chicken  19866894305493_3
  misc_feature (1)..(45): n is any nucleotide
nnnnnnnnnnnnnnnnnnnnnnnnnnnnnnnnnnnnnnnnnnnnnaatgcactgcttcccagttctgttttgaatgcagatggcgccgttttttctctgatggtctcatttgcctcaataaccctattaacttttaaatattaatgcacttctatgaattaagagcagttcaatgtgtacctgaagatatatacacacattttaaatggtgctgttgtaggcagaccaagaaatagcctcaggaggagcacccagagctyacaataaagccttccctccagagaaatgctgcccccagyrccgttcctaaagcatcactgagctcaaagccacttttgcatgtatgcaaatgtttcaagagcatttggaagccaactgtccctccaaaaccgtatacgctctgcagcagcagcacatgagtctcagtgcataggagcagaggtaagatgaaggatttgccccagggtttgtatggcagaagacaagcagctccacatttcacagggtgccacagactccctgccccacacagctctgctcacacaccgctatcagaggatgcatcacctcaatgcctgcctggagcaatggcasataaa

SEQ ID NO: 53720 - DNA, 600 bp, Chicken  19866894305493_4
ccagyrccgttcctaaagcatcactgagctcaaagccacttttgcatgtatgcaaatgtttcaagagcatttggaagccaactgtccctccaaaaccgtatacgctctgcagcagcagcacatgagtctcagtgcataggagcagaggtaagatgaaggatttgccccagggtttgtatggcagaagacaagcagctccacatttcacagggtgccacagactccctgccccacacagctctgctcacacaccgctatcagaggatgcatcacctcaatgcctgcctggagcaatggcasataaatgcatttaatgctccatgctgcctgcatggtacaaagtagccaacgagtcccttttatttttatactttggtcaggctctgaaggcgctgtcatttacagcttctttaaatttgttacctttgatatcagtgactggtaatacaattcccaggggaagagcatcagtaacgctcacagtactttcataatgtttgctttgattgtcctgcgatatttttgtccctatggcgtaacccttatggcaccgctatataacacagagtttacccattggaagtcctgttgtgcctttgt

SEQ ID NO: 53721 - DNA, 600 bp, Chicken  19866894305495_1
ctacatttaattttcctatcatcacccgatgagataagagcagtacgcatgggagggatcaggcacaggggaaagagctatttattaataagttaaatcattttagatttaagagcctctctgcctaaaaagggtctgatctacaagtgcagcttctgtgtctaaagcagacaagtcagataccacatctccatttctgtcctgggcttgcttctgaggtcttgtcttttttttcagaagcaagttgcattgctaactgtgagatgtaacttagacagaaatagagctactgcttaaacycagttttagtctagacacttaaaagtaaacgctcatctcccaccaataacattaacgaacagccacactaacttatgttatttgtaacagactaaggctctsgtgttttcatgatagcatgacctcagagcacactcgcagaaatgcaaggtacactacaacctgttctyctatctttcttttattaccttttcctgccagtgagacaggaaaacatgctgtggtctctgacccctgcaaagacaagcagcgctgtagcatgaccacataaaaccttytctacccaccagccatgcactg

SEQ ID NO: 53722 - DNA, 600 bp, Chicken  19866894305495_2
ttagatttaagagcctctctgcctaaaaagggtctgatctacaagtgcagcttctgtgtctaaagcagacaagtcagataccacatctccatttctgtcctgggcttgcttctgaggtcttgtcttttttttcagaagcaagttgcattgctaactgtgagatgtaacttagacagaaatagagctactgcttaaacycagttttagtctagacacttaaaagtaaacgctcatctcccaccaataacattaacgaacagccacactaacttatgttatttgtaacagactaaggctctsgtgttttcatgatagcatgacctcagagcacactcgcagaaatgcaaggtacactacaacctgttctyctatctttcttttattaccttttcctgccagtgagacaggaaaacatgctgtggtctctgacccctgcaaagacaagcagcgctgtagcatgaccacataaaaccttytctacccaccagccatgcactgagaactgctgttctcacagctttctgtccttcgcttcatcctgtccagacctgcttcctcagccagttatttaaagccccgactgaaaaaatgtatcagttt

SEQ ID NO: 53723 - DNA, 600 bp, Chicken  19866894305495_3
acaagtcagataccacatctccatttctgtcctgggcttgcttctgaggtcttgtcttttttttcagaagcaagttgcattgctaactgtgagatgtaacttagacagaaatagagctactgcttaaacycagttttagtctagacacttaaaagtaaacgctcatctcccaccaataacattaacgaacagccacactaacttatgttatttgtaacagactaaggctctsgtgttttcatgatagcatgacctcagagcacactcgcagaaatgcaaggtacactacaacctgttctyctatctttcttttattaccttttcctgccagtgagacaggaaaacatgctgtggtctctgacccctgcaaagacaagcagcgctgtagcatgaccacataaaaccttytctacccaccagccatgcactgagaactgctgttctcacagctttctgtccttcgcttcatcctgtccagacctgcttcctcagccagttatttaaagccccgactgaaaaaatgtatcagtttgtaatagtggatgacctctacasgttggggttttcastaagaaaaatcctaccgactttgttgcaatc

SEQ ID NO: 53724 - DNA, 600 bp, Chicken  19866894305495_4
aaatagagctactgcttaaacycagttttagtctagacacttaaaagtaaacgctcatctcccaccaataacattaacgaacagccacactaacttatgttatttgtaacagactaaggctctsgtgttttcatgatagcatgacctcagagcacactcgcagaaatgcaaggtacactacaacctgttctyctatctttcttttattaccttttcctgccagtgagacaggaaaacatgctgtggtctctgacccctgcaaagacaagcagcgctgtagcatgaccacataaaaccttytctacccaccagccatgcactgagaactgctgttctcacagctttctgtccttcgcttcatcctgtccagacctgcttcctcagccagttatttaaagccccgactgaaaaaatgtatcagtttgtaatagtggatgacctctacasgttggggttttcastaagaaaaatcctaccgactttgttgcaatcagtgcttcaccacatagcttttttaaaacaggaagggaaaaatatttataacagcaactataaatatacatgctactgacttttcaacttgttgtccttgttctccag

SEQ ID NO: 53725 - DNA, 600 bp, Chicken  19866894305495_5
cagagcacactcgcagaaatgcaaggtacactacaacctgttctyctatctttcttttattaccttttcctgccagtgagacaggaaaacatgctgtggtctctgacccctgcaaagacaagcagcgctgtagcatgaccacataaaaccttytctacccaccagccatgcactgagaactgctgttctcacagctttctgtccttcgcttcatcctgtccagacctgcttcctcagccagttatttaaagccccgactgaaaaaatgtatcagtttgtaatagtggatgacctctacasgttggggttttcastaagaaaaatcctaccgactttgttgcaatcagtgcttcaccacatagcttttttaaaacaggaagggaaaaatatttataacagcaactataaatatacatgctactgacttttcaacttgttgtccttgttctccagctaaatttagtctgttgtatcctgtccaacccttggtgaaaaagcagtatatacacaaagttgtgcaaatcccaaagcaggcaattacctgagcaccttaccagataaccagctggatrggcaaatgctcacttaacgagcataggt

SEQ ID NO: 53726 - DNA, 600 bp, Chicken  19866894305495_6
agaaatgcaaggtacactacaacctgttctyctatctttcttttattaccttttcctgccagtgagacaggaaaacatgctgtggtctctgacccctgcaaagacaagcagcgctgtagcatgaccacataaaaccttytctacccaccagccatgcactgagaactgctgttctcacagctttctgtccttcgcttcatcctgtccagacctgcttcctcagccagttatttaaagccccgactgaaaaaatgtatcagtttgtaatagtggatgacctctacasgttggggttttcastaagaaaaatcctaccgactttgttgcaatcagtgcttcaccacatagcttttttaaaacaggaagggaaaaatatttataacagcaactataaatatacatgctactgacttttcaacttgttgtccttgttctccagctaaatttagtctgttgtatcctgtccaacccttggtgaaaaagcagtatatacacaaagttgtgcaaatcccaaagcaggcaattacctgagcaccttaccagataaccagctggatrggcaaatgctcacttaacgagcataggtatgctcatggctac

SEQ ID NO: 53727 - DNA, 600 bp, Chicken  19866894305495_7
agtttgtaatagtggatgacctctacasgttggggttttcastaagaaaaatcctaccgactttgttgcaatcagtgcttcaccacatagcttttttaaaacaggaagggaaaaatatttataacagcaactataaatatacatgctactgacttttcaacttgttgtccttgttctccagctaaatttagtctgttgtatcctgtccaacccttggtgaaaaagcagtatatacacaaagttgtgcaaatcccaaagcaggcaattacctgagcaccttaccagataaccagctggatrggcaaatgctcacttaacgagcataggtatgctcatggctaccaagaaagtggtctatttctgggatgggatacccccacagtacagaaaattattattgcaggatagtagcaattattacaggatagctctgggcttctgaatgagaaaagtgacgcaggttattcattgcagaccgtatatcaggcttcaagtctgtgggcatctctgagccacaaagaacccctccctgccgacaccttccaattagccacgttcttgttttgtacacagaaatgtttgggatactgagacatatct

SEQ ID NO: 53728 - DNA, 599 bp, Chicken  19866894305496_1
  misc_feature (1)..(233): n is any nucleotide
nnnnnnnnnnnnnnnnnnnnnnnnnnnnnnnnnnnnnnnnnnnnnnnnnnnnnnnnnnnnnnnnnnnnnnnnnnnnnnnnnnnnnnnnnnnnnnnnnnnnnnnnnnnnnnnnnnnnnnnnnnnnnnnnnnnnnnnnnnnnnnnnnnnnnnnnnnnnnnnnnnnnnnnnnnnnnnnnnnnnnnnnnnnnnnnnnnnnnnnnnnnnnnnnnnnnnnnnnnnnnnnnnnnnnnnnntccttgctgtgtcccgctgtgcagtggaagcactggcagttgcattcctgcctggcaggtaaagaartgcccttaaactcaattccatctcctgtaagcagctggcctggcagatgctggctattgtgtacacacggcctgagtcaatatttatcccctgggtaagcagcagacccagtatgagctgcagtgagagggatttggggttgatttttttcctttttttttcctggctctcaaagctgcacratacaaaccctgctgtctgctggttccagcttctgttcagtgctttgagttgggagaatgagacgtttgggcactgattctgtcagtgcaaccaactgccctgggaagatgggactg

SEQ ID NO: 53729 - DNA, 599 bp, Chicken  19866894305496_2
  misc_feature (1)..(51): n is any nucleotide
nnnnnnnnnnnnnnnnnnnnnnnnnnnnnnnnnnnnnnnnnnnnnnnnnnntccttgctgtgtcccgctgtgcagtggaagcactggcagttgcattcctgcctggcaggtaaagaartgcccttaaactcaattccatctcctgtaagcagctggcctggcagatgctggctattgtgtacacacggcctgagtcaatatttatcccctgggtaagcagcagacccagtatgagctgcagtgagagggatttggggttgatttttttcctttttttttcctggctctcaaagctgcacratacaaaccctgctgtctgctggttccagcttctgttcagtgctttgagttgggagaatgagacgtttgggcactgattctgtcagtgcaaccaactgccctgggaagatgggactgtgctctgagctcttcagcctcctgtgctctttcccttcctgggttcgatttctctgtctcatcccttcagcagtttcggaaaggtgtttggtgtaatgtcatgttggtgctttcatggatccctgggcagtccagcagtgaccccatggggatgagctgatgaatgcaaagggtttcagctg

SEQ ID NO: 53730 - DNA, 600 bp, Chicken  19866894305503_1
gattccgccaagagcactactggcatgacatctggatttgcgtagtgaggcgtgcgtttacaaatatgagcttatttcacatgagtgacagaggtcatagttctttgctaacgtagctgagactccatggagaagcttttgccaaactgacatacaagtacagtgatcatggtgaaaatatagcctggttggatgctgcaattagattgacagatttccactacttatatgatcatttatgggatgaaggccagtttattttgagttttgtattcagctgaaaaagtctggtagttaagmttccactttgagggacttggaagtagtggggatttttgttcttttgtcttgttttgaagatataatgaggactttgcactggaagcctgcagcaatcctgttatgctgtgattaatgtcactgtataattctgacaagctgaagccctcccagggtgctcattcatcatggatctctctatagctcttatttatttattgaacaacatgtaagcacagttcccttttttgtttaatgtatcagcatttcagtgtatatggacttcaaggtttcagttttgttgacaataatgagatcatc

SEQ ID NO: 53731 - DNA, 499 bp, Chicken  19866894305503_2
gtatcagcatttcagtgtatatggacttcaaggtttcagttttgttgacaataatgagatcatccagacaattatcgtttgattttcacttcactagtgaggaagattaaagaaaagttaaggagttttgtctgtttcctgttacccatttactgagggggaagaaaaactgtttaaaatgtataaattatgagactttagatcatgctcaagcagcgtgtgagaagacttgcataccgtcagttcattggagttttgaatgggtcaagctggattaactaaaccatgatttagttaaayccccttaagcagcagacatgagttaaggtccaaggcatatcatatgtgcatactacataggtgcatgtgtccagctactacatgttcaagttcttcacagtgcaaagattagttgcttgtgcaaggattcatgcctagcattagcacttttttaaggcatccaggccttaaaggcatacagggtactcacacagagttc

SEQ ID NO: 53732 - DNA, 600 bp, Chicken  19866894305510_1
gtgcatactgaggcactagtcacacagtgatctagtgtttctgatatttaaattgcacagtgctgaaatgtataatatttttgtgtcatcctccaaaatctcttttgcctgcttcataatagtctattaaaaaacaaacaaaacaaccaacagcttttggtctttcaagcttgctatttagttagctatctgtaattaaccttacctgaatttcaatcatttccttttgttttatttagctttagattttcctttctctttaaagtccttgagtttgtcattgactctcagacctgaacrtctactatcccttaaataaatttccagtttctgcttcagctctactggggctgatttctgtggtgtatccattgactgctctttgacatgaacatcatctccttttcccctctctttatttctgtcacttttcccgctgtgtctcttatacagaaagctgtttgtgtaatatttcatggaaagctgtgtgttctctgttgtctcatgggcctctttatgtcttcaggattttctcctttaatttctggaagatcttcctttctgccattccctcatgctgtgaactcttctttgtcccct

SEQ ID NO: 53733 - DNA, 599 bp, Chicken  19866894305515_1
  misc_feature (1)..(17): n is any nucleotide
nnnnnnnnnnnnnnnnncggccgctctgctcttccaaaacccccccgaggaaggaatctccgtagggttttcaggtgcacatcacgtgccatcgctccagcaatgtgccagaaaaaatgactctgacctttcctcatccgcaacaatttctcagcctcccatcatcactgctgcttcataattctccctctttctttctaaagtagtcccattccccaaatcagatgcggcatgctgagattaagctatattaggtccatctaataatactcacatctctgtagaactcttctattaatrcctcccaaaataagggctttttttggctgaggtttgctgagctctgtcagactccatttccgtcacaccactgagtggggttaaagatgcactggagcagctacagcaagatctggaacctctgcctgtgcatcaggcaggaacccgggatgagaagcagccatctgtgcagcttcataacccttcctatggggattggaagctttcacctttgtgtcacttcataaatccccagggatacctgtaggttcctgtgagatcccaatggacacagaagactttgagccttcccaggtcaa

SEQ ID NO: 53734 - DNA, 599 bp, Chicken  19866894305516_1
  misc_feature (1)..(22): n is any nucleotide
nnnnnnnnnnnnnnnnnnnnnntgaaagcttccatccccataggaagggttatgaagctgcacagatggctgcttctcatcccgggttcctgcctgatgcacaggcagaggttccagatcttgctgtagctgctccagtgcatctttaaccccactcagtggtgtgacggaaatggagtctgacagagctcagcaaacctcagccaaaaaagcccttattttgggaggtattaatagaagagttctacagagatgtgagtattattagatggtcctaatatagcttaatctcagcatgcygcatctgatttggggaatgggactactttagaaagaaagagggagaattatgaagcrgcagtgatgatgggaggctgagaaattgttgcggatgaggaaaggtcagagtcattttttctggcacattgctggagcgatggcacgtgatgtgcacctgaaaaccctacggagattccttcctcggggggttttggaagagcagagcggccgcaggggtttggatggggtgggtgtcagcactctgagttgtggcagtgggcaaaacccggagtcctcctggcaaagattgaaggtaactg

SEQ ID NO: 53735 - DNA, 600 bp, Chicken  19866894305516_2
ctgcacagatggctgcttctcatcccgggttcctgcctgatgcacaggcagaggttccagatcttgctgtagctgctccagtgcatctttaaccccactcagtggtgtgacggaaatggagtctgacagagctcagcaaacctcagccaaaaaagcccttattttgggaggtattaatagaagagttctacagagatgtgagtattattagatggtcctaatatagcttaatctcagcatgcygcatctgatttggggaatgggactactttagaaagaaagagggagaattatgaagcrgcagtgatgatgggaggctgagaaattgttgcggatgaggaaaggtcagagtcattttttctggcacattgctggagcgatggcacgtgatgtgcacctgaaaaccctacggagattccttcctcggggggttttggaagagcagagcggccgcaggggtttggatggggtgggtgtcagcactctgagttgtggcagtgggcaaaacccggagtcctcctggcaaagattgaaggtaactgcgtgttcagcaggcaggaagaaagaagggaaggggtggagtcataaacaccacttatg

SEQ ID NO: 53736 - DNA, 600 bp, Chicken  19866894305520_1
aacagtcaccttgggtgtaaatccagatgtttctctggatttatctcaatttaatccagagagtttaaagtttacagatggcctgtcccggcacattttattggttaagggctgttagactgtggggaacatgctaccaaacaaaaaggaccagctgtttatgcacaagacagcagaagaaattacacagaaaggaagatttcccctcctttcaaaatggttgtgctcagaaacagtgtcaagaaatagattcagaatgaaaaatgtcctgcaattaccgtagtgggctaacatgactayataacattaccctgagtgttaaaagtggtgctgcaaactgtagtgcttgagtagaagcaaaattaagcattgtaaatccagacaatgacttgtaaacaagcacataaaggtgaaaagtcaagcattttcagtggacagtgctttaattcagccaaaatgccatcttccagattttaatgaaaaatagaaactcacctattctttgatgtctcattgcaaaatctggcaagttctatattgagattgtaacactaacctgatgctaacacttaaatgatgctcaattaagattaacataat

SEQ ID NO: 53737 - DNA, 600 bp, Chicken  19866894305522_1
aatcacgtgtctgagagcagcaccacaggtccctgcagccctgtttgcatcctcagccccgtgagcctgtaggacacaaggatagaggaaggctgggctgaagcaggggtgaggtgctgcatccaagggcatatggctgctgaatgcaaaagccacgagctgcacacccagcccatggtgaccttcgggccgggccacgatatcgtgagacacacctgctatcgtatcatatccctctttttttttttggctttttctttcccaagagcttttggaggccgtcaaagaaaacaagaggtrtttgcaaggttaagagagtcagtgtctaagcgtaccgtaaaggtttgcagtaatttacagctgtaggcagcaagcactctttgtggggggaagggaaatgcaatttaagagaacagaaataaataaggagccgcagcagctaacactctctgatttaatcctcaacccatgagaaagatttattctgttatctgacagtttgatcattccatgaatcccataggtcagcccttatctgctgttgttatctctgggctgctcccagagaggtgcatggggaagatttgttaaagaaatgag

SEQ ID NO: 53738 - DNA, 600 bp, Chicken  19866894305522_2
gcagctaacactctctgatttaatcctcaacccatgagaaagatttattctgttatctgacagtttgatcattccatgaatcccataggtcagcccttatctgctgttgttatctctgggctgctcccagagaggtgcatggggaagatttgttaaagaaatgagccaaagaggggctctgataagtgttacagatgggaaacccggagacctttggtacaaaggaaacctatgggatgcaaccacacaactgcctgagatcctctttaggtaggaagggccaaggcccttcaggaaggwggaatctgttccctgcaatkgggctgggagtgctagtggcccctatggcttcattgtgggggagcaggaaacagtgggccatgggctgcacggtcatatacagagctcccaggaaagggaartttggtcctgcrgtgagggcaggtttgctgcctgtactgcagtgctaacatctgctctgacaataaatcccccttcctgaatgcaagcacgtgccctaacatgccccagmattacagaaaggcaggcagcattggcatggttgagatctgagggactgttgccttccgctcattaaac

SEQ ID NO: 53739 - DNA, 600 bp, Chicken  19866894305522_3
taatcctcaacccatgagaaagatttattctgttatctgacagtttgatcattccatgaatcccataggtcagcccttatctgctgttgttatctctgggctgctcccagagaggtgcatggggaagatttgttaaagaaatgagccaaagaggggctctgataagtgttacagatgggaaacccggagacctttggtacaaaggaaacctatgggatgcaaccacacaactgcctgagatcctctttaggtaggaagggccaaggcccttcaggaaggwggaatctgttccctgcaatkgggctgggagtgctagtggcccctatggcttcattgtgggggagcaggaaacagtgggccatgggctgcacggtcatatacagagctcccaggaaagggaartttggtcctgcrgtgagggcaggtttgctgcctgtactgcagtgctaacatctgctctgacaataaatcccccttcctgaatgcaagcacgtgccctaacatgccccagmattacagaaaggcaggcagcattggcatggttgagatctgagggactgttgccttccgctcattaaactggcattaatctactggaga

SEQ ID NO: 53740 - DNA, 600 bp, Chicken  19866894305522_4
gctcccagagaggtgcatggggaagatttgttaaagaaatgagccaaagaggggctctgataagtgttacagatgggaaacccggagacctttggtacaaaggaaacctatgggatgcaaccacacaactgcctgagatcctctttaggtaggaagggccaaggcccttcaggaaggwggaatctgttccctgcaatkgggctgggagtgctagtggcccctatggcttcattgtgggggagcaggaaacagtgggccatgggctgcacggtcatatacagagctcccaggaaagggaartttggtcctgcrgtgagggcaggtttgctgcctgtactgcagtgctaacatctgctctgacaataaatcccccttcctgaatgcaagcacgtgccctaacatgccccagmattacagaaaggcaggcagcattggcatggttgagatctgagggactgttgccttccgctcattaaactggcattaatctactggagagatcccagtttctgccccggagcaccactgcagttccatggtcaccgcctgcctctcatcccttgctggcacaactcttcagagctattagtggaggtccag

SEQ ID NO: 53741 - DNA, 600 bp, Chicken  19866894305522_5
gtgcatggggaagatttgttaaagaaatgagccaaagaggggctctgataagtgttacagatgggaaacccggagacctttggtacaaaggaaacctatgggatgcaaccacacaactgcctgagatcctctttaggtaggaagggccaaggcccttcaggaaggwggaatctgttccctgcaatkgggctgggagtgctagtggcccctatggcttcattgtgggggagcaggaaacagtgggccatgggctgcacggtcatatacagagctcccaggaaagggaartttggtcctgcrgtgagggcaggtttgctgcctgtactgcagtgctaacatctgctctgacaataaatcccccttcctgaatgcaagcacgtgccctaacatgccccagmattacagaaaggcaggcagcattggcatggttgagatctgagggactgttgccttccgctcattaaactggcattaatctactggagagatcccagtttctgccccggagcaccactgcagttccatggtcaccgcctgcctctcatcccttgctggcacaactcttcagagctattagtggaggtccagaaaggattccca

SEQ ID NO: 53742 - DNA, 600 bp, Chicken  19866894305522_6
tgggatgcaaccacacaactgcctgagatcctctttaggtaggaagggccaaggcccttcaggaaggwggaatctgttccctgcaatkgggctgggagtgctagtggcccctatggcttcattgtgggggagcaggaaacagtgggccatgggctgcacggtcatatacagagctcccaggaaagggaartttggtcctgcrgtgagggcaggtttgctgcctgtactgcagtgctaacatctgctctgacaataaatcccccttcctgaatgcaagcacgtgccctaacatgccccagmattacagaaaggcaggcagcattggcatggttgagatctgagggactgttgccttccgctcattaaactggcattaatctactggagagatcccagtttctgccccggagcaccactgcagttccatggtcaccgcctgcctctcatcccttgctggcacaactcttcagagctattagtggaggtccagaaaggattcccatatattttttttccttcaaaaccagcaggaaaaccacttgtacaggtgctgggyygggggactggttggaggagatgggtgtaaatggatagagctga

SEQ ID NO: 53743 - DNA, 600 bp, Chicken  19866894305522_7
atcccccttcctgaatgcaagcacgtgccctaacatgccccagmattacagaaaggcaggcagcattggcatggttgagatctgagggactgttgccttccgctcattaaactggcattaatctactggagagatcccagtttctgccccggagcaccactgcagttccatggtcaccgcctgcctctcatcccttgctggcacaactcttcagagctattagtggaggtccagaaaggattcccatatattttttttccttcaaaaccagcaggaaaaccacttgtacaggtgctgggyygggggactggttggaggagatgggtgtaaatggatagagctgagcacaacttccttatgcgctgagaggggtctgaccccagctcctgagttcctgagtgaggagagtcactgcagcgtatcttggcttagaggccagaaaatagagtgggaaataccatcattaaaccccaaagcgatgagatgcaggttgaaaagcaacaatttcccagcaccctccctcctcttccattgctgtttaataacttcccggtgcagtgtgtgcattttgctgtcagagctgtctgggaatggcaccaa

SEQ ID NO: 53744 - DNA, 600 bp, Chicken  19866894305522_8
tcccccttcctgaatgcaagcacgtgccctaacatgccccagmattacagaaaggcaggcagcattggcatggttgagatctgagggactgttgccttccgctcattaaactggcattaatctactggagagatcccagtttctgccccggagcaccactgcagttccatggtcaccgcctgcctctcatcccttgctggcacaactcttcagagctattagtggaggtccagaaaggattcccatatattttttttccttcaaaaccagcaggaaaaccacttgtacaggtgctgggyygggggactggttggaggagatgggtgtaaatggatagagctgagcacaacttccttatgcgctgagaggggtctgaccccagctcctgagttcctgagtgaggagagtcactgcagcgtatcttggcttagaggccagaaaatagagtgggaaataccatcattaaaccccaaagcgatgagatgcaggttgaaaagcaacaatttcccagcaccctccctcctcttccattgctgtttaataacttcccggtgcagtgtgtgcattttgctgtcagagctgtctgggaatggcaccaaa

SEQ ID NO: 53745 - DNA, 600 bp, Chicken  19866894305523_1
ttgtactacttgtttattatggaagaggcacttgaaaacgctgttagttgggaaaacagttcagttttgaagataagaaaaacagagacgtgaatgacagatattttttgactttaaatgaaatagttggcactagaagaaagatcacttcaacagattatataggctctcccgctaatttttgctgtctttgattcaagcatgtgtgtggaagtcaaaatgttggtgagaacctatgttccaggttactgataacatttgctctattggcaagagagttgctggaagtttctcatgtastgttacytatagacaagctgcagtgttgatgatcttcacagatagagaactttctctgaattttccttgttaaacataaaatgatgcaggtgataattgttagccttctgagactgcattttgtactaaatctgtcactactgarggatagaaactttaaatcactatacattcagtatttttccaagtaattatgtagttgagaacttggttttacttctgttttcagttctcatgcatgaagaaccaatggatatttagagaaataatcactattgattaaaagtataaagaaagctt

SEQ ID NO: 53746 - DNA, 600 bp, Chicken  19866894305523_2
acttgtttattatggaagaggcacttgaaaacgctgttagttgggaaaacagttcagttttgaagataagaaaaacagagacgtgaatgacagatattttttgactttaaatgaaatagttggcactagaagaaagatcacttcaacagattatataggctctcccgctaatttttgctgtctttgattcaagcatgtgtgtggaagtcaaaatgttggtgagaacctatgttccaggttactgataacatttgctctattggcaagagagttgctggaagtttctcatgtastgttacytatagacaagctgcagtgttgatgatcttcacagatagagaactttctctgaattttccttgttaaacataaaatgatgcaggtgataattgttagccttctgagactgcattttgtactaaatctgtcactactgarggatagaaactttaaatcactatacattcagtatttttccaagtaattatgtagttgagaacttggttttacttctgttttcagttctcatgcatgaagaaccaatggatatttagagaaataatcactattgattaaaagtataaagaaagcttgcttgaa

SEQ ID NO: 53747 - DNA, 600 bp, Chicken  19866894305523_3
cacttcaacagattatataggctctcccgctaatttttgctgtctttgattcaagcatgtgtgtggaagtcaaaatgttggtgagaacctatgttccaggttactgataacatttgctctattggcaagagagttgctggaagtttctcatgtastgttacytatagacaagctgcagtgttgatgatcttcacagatagagaactttctctgaattttccttgttaaacataaaatgatgcaggtgataattgttagccttctgagactgcattttgtactaaatctgtcactactgarggatagaaactttaaatcactatacattcagtatttttccaagtaattatgtagttgagaacttggttttacttctgttttcagttctcatgcatgaagaaccaatggatatttagagaaataatcactattgattaaaagtataaagaaagcttgcttgaattaatgcagattagatgtgtctttggtctaagctgtataaagaaaatccacttggatggttcagatcacctaggatgttttgtgcacagtgtaaaaaaataacaggggactttgcagtttcatggtgtcttaaattgt

SEQ ID NO: 53748 - DNA, 600 bp, Chicken  19866894305524_1
agttattcctgcatttgccctcagtacacatctaattattagcaagtccttcactgctgtggctttgtctatcattgccgcttacggccaaaagtgcccattagatttcaaagtataccagcatttttgtcttttaaattattactttccttaagcttttaatcatttctgttacactgaactgattggaagtgaggacactcagctgcaataagcacagttaaaaggttcgcagcaacagctgagcacttctgcagtgaaactccaagtatggcttgacacgatgactcctgtcacatycaaaataaaaatgtataaagcacctcagaaatctttttgcagagacttcagattttgatgctttttaccacggaacactgactcagctctgatcgttttcactgatgctgttttctgacattaaattggtgatgcgtgatgtaccagaacctttacagagcttttcctttaccgatctgtgatttgattcattaattaattattgattgctgtcattatgccagctgaagacattttgttgaaagagttcacattcacactcaaagatttagtccagacacacaacatgggagctcaatt

SEQ ID NO: 53749 - DNA, 600 bp, Chicken  19866894305525_1
acaactggaaataataagaagcgatattagtttgggcattattcagggtaagttgagaaagaagtctaaaagctttttcctttgtattatttgtatctactgctccaaaagcccgactgaaaccaaagccttgtttatgggcccaattttaacaagttgtcagtagtttcagtgattcagacctactgaaataggcatttgaaatgtagtgaagcagttacagtcagagtaataaataccataaaccaatataagaactacattcatttaggctgaacaaatagatgttactctgtgaakgactaataccagaaagcccagtgggtgtttcctcttctacaaggtagaagaccataaaacgaagtactgtcatagcaatcatgaaagcttaacttgaaagaattactttagagccagattagaggattcttgctactactgtacctacagccatcgtacgagcaaagtgctrttttgtaattacaactaagaatgccattaatgctaattatctgcggaaagaattgtaatagctcatgtacatttgcccagaataaagccttagagaaaggaacaaagcagtccaaaatcacaagctta

SEQ ID NO: 53750 - DNA, 600 bp, Chicken  19866894305525_2
tgattcagacctactgaaataggcatttgaaatgtagtgaagcagttacagtcagagtaataaataccataaaccaatataagaactacattcatttaggctgaacaaatagatgttactctgtgaakgactaataccagaaagcccagtgggtgtttcctcttctacaaggtagaagaccataaaacgaagtactgtcatagcaatcatgaaagcttaacttgaaagaattactttagagccagattagaggattcttgctactactgtacctacagccatcgtacgagcaaagtgctrttttgtaattacaactaagaatgccattaatgctaattatctgcggaaagaattgtaatagctcatgtacatttgcccagaataaagccttagagaaaggaacaaagcagtccaaaatcacaagcttactggcatgcagctttttgtccacatggtacggagaccacgtgatgtaagcaaagaccaactcaagcctgggtaactgggtgatgctcctttctgggacatggtttttagatggaaaaatcattctattaagagaaagaccatattttctctaatataattcatacttcggaa

SEQ ID NO: 53751 - DNA, 600 bp, Chicken  19866894305526_1
ccagatggatgtttgccatgattgttacaaaatgttcagtgctgggaaggaaatttctccttgctgcgactgttcagctgatgtgctgttgttaatgggaagtaactcttctgctcctttctacagcacactgatctggattctttaaaaaaaaaaaaagctcaatgtgaggaatcctcatgtctggaaaacaaacaaccacaccaaccaaaagtaacctataaaacaaacagacacaaaacatctcgagcacaaacacacacgtacatacaaaccaatatgaagataagccgtggtaasagctgctgcctgatggacaaacttggcacagctctggctcagaccagggaggtttattcaccggtcaatgctctgcgtatgcattacagaagtggaggtttcttggtgtctgaaagatttatcttccaattttttttaatccctgaaattcattagcaaaattatttctagttttgcctactccgtgtcttcccctgtacgtcagtggtgaccttgctgcctgaaggaatcatgggtgttcaaccttttggcttggmtgggctgcgttgtgtgaagaggaattgtcttgggccatgtata

SEQ ID NO: 53752 - DNA, 459 bp, Chicken  19866894305526_2
acacacgtacatacaaaccaatatgaagataagccgtggtaasagctgctgcctgatggacaaacttggcacagctctggctcagaccagggaggtttattcaccggtcaatgctctgcgtatgcattacagaagtggaggtttcttggtgtctgaaagatttatcttccaattttttttaatccctgaaattcattagcaaaattatttctagttttgcctactccgtgtcttcccctgtacgtcagtggtgaccttgctgcctgaaggaatcatgggtgttcaaccttttggcttggmtgggctgcgttgtgtgaagaggaattgtcttgggccatgtatatgtaggatgctccaaaagtaatgcctcttatctattttcatggaaactacaacaggtacagtgagcagtgtaactgtgacagtgtaactgttactgatagggcaaattctcagcaa

SEQ ID NO: 53753 - DNA, 599 bp, Chicken  19866894305527_1
  misc_feature (1)..(1): n is any nucleotide
ncattaggattatggctttatcgatcagctggactgataaaggcaggtttgaatgcttgagagggagcagctatggcaatgaaggcaaccaccaatgagagcaccatgcaaaatctgtcaaacagaccacagacatctattttaaaatctggagtcattaaatacaatttgattaaaggatattttaaactttgtaagccataattacttctaaacagcgatttcctttcatcagggggaagttctgtgtttcataaggcacgaataaacactatgcagaatggcttcatgaagaatccrtattgtgggatgaaaacagtgtgatcgtatggacttcttcttgttaaggcagctgggaaactcgtatactgcagtttaatgcttctttagttgcagcaaaaattcatgccagcagtttggtaaccaatatgttttgaattgttttttttcttcccatgatgtagaatgtggctgtttctagaaatcttgcagtcgagtggtacatacgtagaatattaactatgcatgttttctggaagcagctcttttaaagaagaatgtcagattatttctttatttcataattttggtagtcttca

SEQ ID NO: 53754 - DNA, 600 bp, Chicken  19866894305529_1
gctgcaggctcgtgcagcattgctttgaggctccgaccgcacatcaagagctttgaatgccgctgcctcacgtgttgcatggcacgtgtttggtggctcactcgttatttgcaaaaagcggcaaggacactgcagagtcaaacagggagcagagcagggacccggagctgattttgtccagtggtagcagaggcatttccctcctcgggattgggtttaattccccagagccacactgcaatgagcctcagagctgaccatgccaggagaagggccgggctgggtgccgtggctgatccygctgcatgtttcctggatctgtgtttctgcacagctgactttgcgcaagcagatttctgtgctccctttgcccacacactggcctggaaacttcccccgaggtggaccgtggcccaggcaggcccctgcgtttgctcagcatggggtggcatcagtgaacatcatgcgatcgctggacactccccgtgcccttgaatcatccctsttctccccccacgaggctcagtgtaacgaagcagtggccttcatggccaggccaatgccctacagctttgacatccagcccagagcygccgtgag

SEQ ID NO: 53755 - DNA, 600 bp, Chicken  19866894305529_2
cgggattgggtttaattccccagagccacactgcaatgagcctcagagctgaccatgccaggagaagggccgggctgggtgccgtggctgatccygctgcatgtttcctggatctgtgtttctgcacagctgactttgcgcaagcagatttctgtgctccctttgcccacacactggcctggaaacttcccccgaggtggaccgtggcccaggcaggcccctgcgtttgctcagcatggggtggcatcagtgaacatcatgcgatcgctggacactccccgtgcccttgaatcatccctsttctccccccacgaggctcagtgtaacgaagcagtggccttcatggccaggccaatgccctacagctttgacatccagcccagagcygccgtgagctcagccaacacttccatgccacctctcgtccctgcargctgggctcgctgggagaggtggccagtgtcctcaaggacagcatctcccgatgtgtcacccaatggctcttctccctggggcagctcttggatggggtacacagtttcccctgcagctggtcaccctgacaaagcgagatgagcttcgggaagcaccagagttctt

SEQ ID NO: 53756 - DNA, 600 bp, Chicken  19866894305529_3
ctgatccygctgcatgtttcctggatctgtgtttctgcacagctgactttgcgcaagcagatttctgtgctccctttgcccacacactggcctggaaacttcccccgaggtggaccgtggcccaggcaggcccctgcgtttgctcagcatggggtggcatcagtgaacatcatgcgatcgctggacactccccgtgcccttgaatcatccctsttctccccccacgaggctcagtgtaacgaagcagtggccttcatggccaggccaatgccctacagctttgacatccagcccagagcygccgtgagctcagccaacacttccatgccacctctcgtccctgcargctgggctcgctgggagaggtggccagtgtcctcaaggacagcatctcccgatgtgtcacccaatggctcttctccctggggcagctcttggatggggtacacagtttcccctgcagctggtcaccctgacaaagcgagatgagcttcgggaagcaccagagttcttcagatgtgtttgggtgatgctcagcttatggatctcccattcctatccgcaccgcagggacaccagagccctgaaacaggccctcaa

SEQ ID NO: 53757 - DNA, 600 bp, Chicken  19866894305529_4
ctttgcgcaagcagatttctgtgctccctttgcccacacactggcctggaaacttcccccgaggtggaccgtggcccaggcaggcccctgcgtttgctcagcatggggtggcatcagtgaacatcatgcgatcgctggacactccccgtgcccttgaatcatccctsttctccccccacgaggctcagtgtaacgaagcagtggccttcatggccaggccaatgccctacagctttgacatccagcccagagcygccgtgagctcagccaacacttccatgccacctctcgtccctgcargctgggctcgctgggagaggtggccagtgtcctcaaggacagcatctcccgatgtgtcacccaatggctcttctccctggggcagctcttggatggggtacacagtttcccctgcagctggtcaccctgacaaagcgagatgagcttcgggaagcaccagagttcttcagatgtgtttgggtgatgctcagcttatggatctcccattcctatccgcaccgcagggacaccagagccctgaaacaggccctcaatgacaccataattcaagacaggtcagatccaaaggccagatttcca

SEQ ID NO: 53758 - DNA, 599 bp, Chicken  19866894305533_1
  misc_feature (1)..(121): n is any nucleotide
nnnnnnnnnnnnnnnnnnnnnnnnnnnnnnnnnnnnnnnnnnnnnnnnnnnnnnnnnnnnnnnnnnnnnnnnnnnnnnnnnnnnnnnnnnnnnnnnnnnnnnnnnnnnnnnnnnnnnnnnnaagttataactattaaatgccttgtgaaagaactaggaataatatatcttttcaataaaattcagtcttcaaacataatctaggagtgtgtgtgctatgaatgagatggatgcaaaaaaagaaatgatgagttagttaggctaactcactgtctcatcatttggaatctcactgactcwtcatttggaaaatggaagaagactcctttgcctgaaacagcatgtgcaatgttagaatcataaatgccgcaatacatttttcacagaaacaatattgctgccctaccttttgtaaaaagatccatstaggaaacaatgcgcattgaataactcagtatcctgaaccacacagctacagatctagacagataaagcaagatgaagatggagtacaccgtactcaaacttatagtcagcrtaggcattttttttttaatctgtcctcccggtagtagaaagaatgagttgaatgttgctca

SEQ ID NO: 53759 - DNA, 600 bp, Chicken  19866894305533_2
ataactattaaatgccttgtgaaagaactaggaataatatatcttttcaataaaattcagtcttcaaacataatctaggagtgtgtgtgctatgaatgagatggatgcaaaaaaagaaatgatgagttagttaggctaactcactgtctcatcatttggaatctcactgactcwtcatttggaaaatggaagaagactcctttgcctgaaacagcatgtgcaatgttagaatcataaatgccgcaatacatttttcacagaaacaatattgctgccctaccttttgtaaaaagatccatstaggaaacaatgcgcattgaataactcagtatcctgaaccacacagctacagatctagacagataaagcaagatgaagatggagtacaccgtactcaaacttatagtcagcrtaggcattttttttttaatctgtcctcccggtagtagaaagaatgagttgaatgttgctcataaactgaaatttggacacctcactgatagaaagaaaaaagcaatgtgaacataacatccattctttttctgttgtgaaaaactgtattactaaattatcctgttcatgacaaagagtataaccacc

SEQ ID NO: 53760 - DNA, 600 bp, Chicken  19866894305533_3
aaagaaatgatgagttagttaggctaactcactgtctcatcatttggaatctcactgactcwtcatttggaaaatggaagaagactcctttgcctgaaacagcatgtgcaatgttagaatcataaatgccgcaatacatttttcacagaaacaatattgctgccctaccttttgtaaaaagatccatstaggaaacaatgcgcattgaataactcagtatcctgaaccacacagctacagatctagacagataaagcaagatgaagatggagtacaccgtactcaaacttatagtcagcrtaggcattttttttttaatctgtcctcccggtagtagaaagaatgagttgaatgttgctcataaactgaaatttggacacctcactgatagaaagaaaaaagcaatgtgaacataacatccattctttttctgttgtgaaaaactgtattactaaattatcctgttcatgacaaagagtataaccaccaaaaataaattttatgcatatgatatcagcactattttttaagtttattagtaattattttgatattttgatactgttttgattatgtgttactgttgaatataggcattct

SEQ ID NO: 53761 - DNA, 600 bp, Chicken  19866894305534_1
tatgtaagtccaatttaattcaatttgactcttcatgctaaaatagctcaaagaatcaatgacccaactagttcttggactcagatctgagaccatacagatactattgacaatttcaatttacacactgctcttcctgctttcacgtagaggcattaccgtttcttttcaaaatcattacagtttacaaagggtgaacaccccccttttccctgctaattcttctaggaaaggagagaatctttttgtggaaacttcaatccaacacagccagtgtaatgcaggagatggcaaatttcmccaccaagtaattcaaatgttcaaatgagctggcagtggggctgcaaagcataaggtgcccagtacaccgagcatcctcagctacccacggtcttcatataacaacacacaaaagccccaagagttagtttgagttgttagctaactcaaaagactcacggttgaaatgctccccggcaagctgccctcccaccccgcagacccgctgttgacctgcagccagtctgccatcctacagcgcagccgcctgctgcccgcaagggtcagaccctgaggacttccttcagcccaacctcctat

SEQ ID NO: 53762 - DNA, 600 bp, Chicken  19866894305534_2
ccacggtcttcatataacaacacacaaaagccccaagagttagtttgagttgttagctaactcaaaagactcacggttgaaatgctccccggcaagctgccctcccaccccgcagacccgctgttgacctgcagccagtctgccatcctacagcgcagccgcctgctgcccgcaagggtcagaccctgaggacttccttcagcccaacctcctatccgtttctacaggaacctgacctgaaccaaactcctgtctgagtaaatgatggagagcaactgtaaagaacacatgattacgagygccagtaaccacagctaattcacattttgcatagaagaacgggggaaaaaaaggcacggccttcgcacagcctccctaaggatggaggtacagatttactggcaaagggcggtagtgaagtctcctgcttctacaattttattacttttacataataggctatcacgcatttactagcacgctgcgaagcactgccataaatatttaaactgcaatgacaaactaaccgagtcgcagcccgtttctggctttttgctgcttgctctctcgggcccatgatgaagaaagccttgttgtgtc

SEQ ID NO: 53763 - DNA, 600 bp, Chicken  19866894305538_1
actccctttattttttaattttcttaggttattgaagtccccggcttccaaaaacattaattttacattttgtcaaatagaaggaagttcagtagattcaaataaaaccagactgaataatcctacctaatgtcctttttccttcactttgaaaaattcagcaactgtggatgaaactcttgttcctgtgataggctgaaaagaaaattaaagtaagtcttatttcattagatctgaaatacaaaactccttgtcacttttcaaaaaagggaaaaaaaattattccgatctctacgtaastaacacgttgatgctcctgatccacctagtaggaattttattttacaaagagcccgatcttgcaatccaatttgaacacaaaagccctttcacttccactgaaaggcagtgaatccactgggcacgaagcttacaaaagtatctggcacttaaaaatgcagacaggtgtgtagtaaaatcttcaaaaaacgcataggaagtgaattcctatcaaaatactttccagctcaatcaagtgtctgcaacacaacacagtttcctttaaatgaacccagccaacaaaaccaaaacatatttttt

SEQ ID NO: 53764 - DNA, 600 bp, Chicken  19866894305538_2
gtaastaacacgttgatgctcctgatccacctagtaggaattttattttacaaagagcccgatcttgcaatccaatttgaacacaaaagccctttcacttccactgaaaggcagtgaatccactgggcacgaagcttacaaaagtatctggcacttaaaaatgcagacaggtgtgtagtaaaatcttcaaaaaacgcataggaagtgaattcctatcaaaatactttccagctcaatcaagtgtctgcaacacaacacagtttcctttaaatgaacccagccaacaaaaccaaaacatasttttttttttaagaaacattccaaagagttgggatttctgtcgtatggcacaagaaaatgctgctttgggaaggctcaggccatacaggctaagggactgcagagtttttgggaacatgcttcatctccctgccctgtgggtgctcagtaacttgctgaccagcagcatatgttgctcctgctccgtgacaatatcaagagcaggtgcctgatttcacatccccacaccctgcacttgcaccagagcttctcttgagggaaaatgcaggtgtgtttgctcatttccagtttttgagaaga

SEQ ID NO: 53765 - DNA, 600 bp, Chicken  19866894305538_3; identical to SEQ ID NO: 53764

SEQ ID NO: 53766 - DNA, 599 bp, Chicken  19866894305542_1
  misc_feature (1)..(51): n is any nucleotide
nnnnnnnnnnnnnnnnnnnnnnnnnnnnnnnnnnnnnnnnnnnnnnnnnnncaactttctcaaatggatggtcaaggagctgacaaggataggcactctgctagacctgatagttacaaacaagtaagaattaggactatggaaatcagacacagtcacagcagcaatgacaatgaaatggcagcattcaggatcctgagaggaggctataaggaaaaaggaggatcaaaatcttagatttcaggagtgcaaactttggcctattcaagtaagaatccatgggagatgccactagagagmagagggaatcagaagagttagttgattggcaattattacatcctccaagctcaagcccagttccacatgcagaatttcaagcaaatatggtcagaggcctgcatggatgaacaaaggatgtctgagaaaacttgaatacttaaaagaaatcatataagacgtggaagaatggtgacttggtgatccaggacaactatagagacactggttagccaaagttttcctggaattgaatctgacacaggatggaaagggaaacaagaaaggtttctatacatatataagcagcaaaatgtaga

SEQ ID NO: 53767 - DNA, 600 bp, Chicken  19866894305542_2
aggatgtctgagaaaacttgaatacttaaaagaaatcatataagacgtggaagaatggtgacttggtgatccaggacaactatagagacactggttagccaaagttttcctggaattgaatctgacacaggatggaaagggaaacaagaaaggtttctatacatatataagcagcaaaatgtagatcaaaggagcaggagtgcttagcataactaagaatatgaagaaagtatttagtactgtttttgccttggtctttcttgataagattgccctttaggaaccccaagtccctgaaaycaatgggaaagtatggagtaaggaagacttaccctcagtagaggaggaccatgctagcaaaatacctaaacaaatcagctatacacaactctattgaacctgatgagatgtaagaacaactgctgagtgtgctgactgacatcactgcaaggctgctttggaatgtttgaaagatcatgggaattggggcacatttttgaggactgaaagaaagcaaatgtcactttatactttagaaagagtatctggaaaattacaggccagctggcctcctcccagtccccaggaaagtggagaagg

SEQ ID NO: 53768 - DNA, 600 bp, Chicken  19866894305549_1
gcagagctacagtagaacacctgaaaaatacatcttgatagcagtgcaggacctaccagctgtagtcattgatccattttaacctgatcaaagaacagtaatgccacttagttacagttccctgtcattaggtggttagttgtcaggtcatttgagatccagtctgccttaggtcctataaaactgtggataagaggccaaaaaaaggcatcatgctgagccatgccaattgtctgtccattccactcactcgtctgcaggagcagccccaagtgctcacataaagtgagagcagatgascacagcgctgcttccccacctccagctcatatcagctctggcagttgcccagatccagattctttcagcttttcatctctttccttaccatctccagttttgtgaaagacttctttatggaaaaggcttgttatctgtgacaagacagattctgtgctctacmtaaaacaaacaawtttttacattttaatttaattagaaaaaaaatagttttccaaatttttaaaggttttatttgtttggatattttatttgtttgttttttaactaggattaaagagatttgtgaagggttactat

SEQ ID NO: 53769 - DNA, 596 bp, Chicken  19866894305549_2
ctgccttaggtcctataaaactgtggataagaggccaaaaaaaggcatcatgctgagccatgccaattgtctgtccattccactcactcgtctgcaggagcagccccaagtgctcacataaagtgagagcagatgascacagcgctgcttccccacctccagctcatatcagctctggcagttgcccagatccagattctttcagcttttcatctctttccttaccatctccagttttgtgaaagacttctttatggaaaaggcttgttatctgtgacaagacagattctgtgctctacmtaaaacaaacaawtttttacattttaatttaattagaaaaaaaatagttttccaaatttttaaaggttttatttgtttggatattttatttgtttgttttttaactaggattaaagagatttgtgaagggttactatgatcacaggagaaggtcgatctctaccaaatcatgggattttcttcttcattacatcttacatcctttcctcctgtgcactgaacgtgcttccaggcttttagatatcggtattttagataacttgccactgtagaacatgttactttgggtttcaaat

SEQ ID NO: 53770 - DNA, 583 bp, Chicken  19866894305549_3
tataaaactgtggataagaggccaaaaaaaggcatcatgctgagccatgccaattgtctgtccattccactcactcgtctgcaggagcagccccaagtgctcacataaagtgagagcagatgascacagcgctgcttccccacctccagctcatatcagctctggcagttgcccagatccagattctttcagcttttcatctctttccttaccatctccagttttgtgaaagacttctttatggaaaaggcttgttatctgtgacaagacagattctgtgctctacmtaaaacaaacaawtttttacattttaatttaattagaaaaaaaatagttttccaaatttttaaaggttttatttgtttggatattttatttgtttgttttttaactaggattaaagagatttgtgaagggttactatgatcacaggagaaggtcgatctctaccaaatcatgggattttcttcttcattacatcttacatcctttcctcctgtgcactgaacgtgcttccaggcttttagatatcggtattttagataacttgccactgtagaacatgttactttgggtttcaaat

SEQ ID NO: 53771 - DNA, 543 bp, Chicken  19866894305554_1
gtgctattagcacatcttcagagagaaaatacactaaaaacgggtacagcagaggagtggctataattcctcagggtggtaggaaacgcagtaggaacaaaaagctgtgattacttgcatgcttgtaccacaacaatgaacctaagcttctctcatttgggtgtcctcaagtgcttgtttcaaagccacagtgtgccatctagtgctccactgaccacctggagaccataccatgcaatacactgagagcaaacaaccaaaccatagcagaactatggaatagagctgtctaaaaacacrattatttaaaaacaaaaccaaaacacccaagtcatgtagtttgatacagagaaatcaacagggtctatactaaaacggttttagtctattcttattcaatatcatcacttattctctttagaaaattttagtaaccgtccgttgctgttgattaatgtttgtttgggatttttctccctttgttgcttaacaataagcttccatcctggacctaagagttaaagactcacaaacctcacataa

SEQ ID NO: 53772 - DNA, 600 bp, Chicken  19866894305555_1
tttcctctgctgtcttcagtagtataaattagatgtaaattattgcatacatttgtcattggcaatcaggccagtgattgctaattctgacgtgttttacagaaggaatgtgacttccttttctcaagttattaaattgattatgattaggtgtgtcactggggaggtaggagataacagaagccttgtgatgtttgattggggaagaggctagaccagcgctgggagtgttatccgttgttatgctctattggagtagtcattgaggtatcatggataaaaccttagatgttgctgaayggragaggtggcaaatgtcttatgggggtggttacagcagtgggaacaaagcaactggcaactaargggtaaacctatttgggctgctgaactgtggaaggacattgttgcccaaacaaagaatatggttgtaaaggtgcatcatgtagatgctcatatgtccaagagttgggctactgaagaacaaaaacctctgtgaggtctaaaactaagtagtataattctccttttctgaatactaggaaggtgtgcagctttgtgtcctaggctataaaacttttcagttacactgcattttct

SEQ ID NO: 53773 - DNA, 600 bp, Chicken  19866894305555_2
cctctgctgtcttcagtagtataaattagatgtaaattattgcatacatttgtcattggcaatcaggccagtgattgctaattctgacgtgttttacagaaggaatgtgacttccttttctcaagttattaaattgattatgattaggtgtgtcactggggaggtaggagataacagaagccttgtgatgtttgattggggaagaggctagaccagcgctgggagtgttatccgttgttatgctctattggagtagtcattgaggtatcatggataaaaccttagatgttgctgaayggragaggtggcaaatgtcttatgggggtggttacagcagtgggaacaaagcaactggcaactaargggtaaacctatttgggctgctgaactgtggaaggacattgttgcccaaacaaagaatatggttgtaaaggtgcatcatgtagatgctcatatgtccaagagttgggctactgaagaacaaaaacctctgtgaggtctaaaactaagtagtataattctccttttctgaatactaggaaggtgtgcagctttgtgtcctaggctataaaacttttcagttacactgcattttctaga

SEQ ID NO: 53774 - DNA, 600 bp, Chicken  19866894305555_3
caggccagtgattgctaattctgacgtgttttacagaaggaatgtgacttccttttctcaagttattaaattgattatgattaggtgtgtcactggggaggtaggagataacagaagccttgtgatgtttgattggggaagaggctagaccagcgctgggagtgttatccgttgttatgctctattggagtagtcattgaggtatcatggataaaaccttagatgttgctgaayggragaggtggcaaatgtcttatgggggtggttacagcagtgggaacaaagcaactggcaactaargggtaaacctatttgggctgctgaactgtggaaggacattgttgcccaaacaaagaatatggttgtaaaggtgcatcatgtagatgctcatatgtccaagagttgggctactgaagaacaaaaacctctgtgaggtctaaaactaagtagtataattctccttttctgaatactaggaaggtgtgcagctttgtgtcctaggctataaaacttttcagttacactgcattttctagatagtagtgtgaatcacctcagcccaaggaaagataggttttattacttaatctaaattggttt

SEQ ID NO: 53775 - DNA, 600 bp, Chicken  19866894305559_1
gggaggtgttttgtggtgttagtgttcagggtgctggagagtatgcttctaccttcgtaatagaaggagtttctggaacaaactgcttccagacaatacattgagatttctctgaagaaatcagctagtcccaaagggatctgggaaagcaccataaacaagcagagaaacagcatctgacataccaaggagcatacctgtttgacagtgtggatgttcttactgatgttattttcaaatcaaatctcttctctgttgtgtagctgtgggaagtgattctgggtttgctgctcctgtttkcaggggcgttatctcataagtgcagccattgttagtgagaagagctgggtgacttaggtcttcccagcagggaggcttcactgtgctagtaaaccaggcactttgcattatcctcatggtaagagcctgcagtgctactaaggctattttccaagagactgttatttcctgcaagaatatgtgtgatgtacagctgggacttttagagagattggggaaaagtatttcttgggacctgaagccaaggagtggctgatcctggcagttgaattctctttcaaatggatgtatggtggacca

SEQ ID NO: 53776 - DNA, 600 bp, Chicken  19866894305561_1
gtaaggggccgtgggtgtgcagctccgcttgtttccctgcagatgtggatgagtgtgagctgtaccaggcagaaggggccccacggctctgtgcccacgcctgcgtcaacctgcccggctcctaccgctgtgcctgtcccagtgggtacagcctgctggcagatggcaagagctgtgaaggtgaggcagcatggacagctttcccattttgtccaaccttgcacgattgccccaaaggtagttcatggtgaaaaatctcacgctttcccattttcaatgtgatttctgttgctacggtaygttttcataacatcttggtaacactcccaacacatayccgcaataaaagcccttggtcttactgctaggtaagccacccttaccttacttggtgtgctgacgcattcagcgagcttagcagaaggttaggaaaacaagcccatcccgctgccctaacccctgctggccctgggcagaaacagtaggaaaagatcaggagtagatggaaagtgagatttgggggtgaacttagtggttattcccatcagatttgcatttgcagccttaccctgaaagaggccagtgcatgctgggagggat

SEQ ID NO: 53777 - DNA, 600 bp, Chicken  19866894305561_2
tgcagatgtggatgagtgtgagctgtaccaggcagaaggggccccacggctctgtgcccacgcctgcgtcaacctgcccggctcctaccgctgtgcctgtcccagtgggtacagcctgctggcagatggcaagagctgtgaaggtgaggcagcatggacagctttcccattttgtccaaccttgcacgattgccccaaaggtagttcatggtgaaaaatctcacgctttcccattttcaatgtgatttctgttgctacggtaygttttcataacatcttggtaacactcccaacacatayccgcaataaaagcccttggtcttactgctaggtaagccacccttaccttacttggtgtgctgacgcattcagcgagcttagcagaaggttaggaaaacaagcccatcccgctgccctaacccctgctggccctgggcagaaacagtaggaaaagatcaggagtagatggaaagtgagatttgggggtgaacttagtggttattcccatcagatttgcatttgcagccttaccctgaaagaggccagtgcatgctgggagggatgcaagaagcagggtgggaagcttccacgctttcctta

SEQ ID NO: 53778 - DNA, 600 bp, Chicken  19866894305563_1
tttgcagtctttgagtgaaagtgggaggccgatgttaaaaactgcgtttatactatatacatatgaagagtggttatgataagaataaaagccaccaaaaagatcatatgattccttgtgttccatcattggggatcttaagagtgtgtacctacacatgtaggtaataccttctgggtcaggggcttttgcctctgccccaaaaagcctacagcaaaatctacgccactgttgtcacagttctgagtaataacagggatgtaaggctataaagtttgactatactcctccccgaaccakacttcatggagtctgaatgccttctgcagagtgtgagtgggcttccatggtggaacaactggtttaaccagtggaaccactgatttaaccagtgtcccaagtttcgcattccccgcactgaaatgayttggraatcagggtcttcttccctttttgaggccagaaacaatctcagctctgttaaactggggtaatctgactcattcttatttaattcaggcaacctttggcagaggagatttgggttttaggcaggtattggtagtgtagcctatatgtacttttctgctttaccttttc

SEQ ID NO: 53779 - DNA, 600 bp, Chicken  19866894305563_2
attggggatcttaagagtgtgtacctacacatgtaggtaataccttctgggtcaggggcttttgcctctgccccaaaaagcctacagcaaaatctacgccactgttgtcacagttctgagtaataacagggatgtaaggctataaagtttgactatactcctccccgaaccakacttcatggagtctgaatgccttctgcagagtgtgagtgggcttccatggtggaacaactggtttaaccagtggaaccactgatttaaccagtgtcccaagtttcgcattccccgcactgaaatgayttggraatcagggtcttcttccctttttgaggccagaaacaatctcagctctgttaaactggggtaatctgactcattcttatttaattcaggcaacctttggcagaggagatttgggttttaggcaggtattggtagtgtagcctatatgtacttttctgctttaccttttcattcttgttgctcaggtgtccgagggctttaaaggatatgcattccatgtgtcacaaggcaagacaggatgtgaacttgacttcattaggtccttagtgttttgagctgtgctcatagaaaaagcct

SEQ ID NO: 53780 - DNA, 600 bp, Chicken  19866894305563_3
ggatcttaagagtgtgtacctacacatgtaggtaataccttctgggtcaggggcttttgcctctgccccaaaaagcctacagcaaaatctacgccactgttgtcacagttctgagtaataacagggatgtaaggctataaagtttgactatactcctccccgaaccakacttcatggagtctgaatgccttctgcagagtgtgagtgggcttccatggtggaacaactggtttaaccagtggaaccactgatttaaccagtgtcccaagtttcgcattccccgcactgaaatgayttggraatcagggtcttcttccctttttgaggccagaaacaatctcagctctgttaaactggggtaatctgactcattcttatttaattcaggcaacctttggcagaggagatttgggttttaggcaggtattggtagtgtagcctatatgtacttttctgctttaccttttcattcttgttgctcaggtgtccgagggctttaaaggatatgcattccatgtgtcacaaggcaagacaggatgtgaacttgacttcattaggtccttagtgttttgagctgtgctcatagaaaaagcctctcta

SEQ ID NO: 53781 - DNA, 599 bp, Chicken  19866894305570_1
  misc_feature (1)..(95): n is any nucleotide
nnnnnnnnnnnnnnnnnnnnnnnnnnnnnnnnnnnnnnnnnnnnnnnnnnnnnnnnnnnnnnnnnnnnnnnnnnnnnnnnnnnnnnnnnnnnnnntcggtgtgggctgggaacgcagcaggactggggagattaaccttagctgcttgctgctcatctgggtctttgctaaactacgtggaaaagggaaggtttgctgggaggtgacagcatttcatccatctaggcaaaaaaaaaaaaaacaaaccacccactttctagtttttcttgcctcctctttttggttcccttgagatatacrtggtcacacacagctcagtgcactccctttgggatctcccccatcttcttctgacaaagccacacacctgagtccaggacctgggtctggtggaaacaaaaagcaaaacatcacataaattatatcaagagctscagaaatatgaaaaattaaaccaactacagcagcagagagaatgacaagcaagcaaataagcagtaaaagtattccaaattaatttcttgttagctktcagccgtaccacgctgctccatcagggatacagggtttcattttcccatacagtgaaccctcagcaa

SEQ ID NO: 53782 - DNA, 600 bp, Chicken  19866894305570_2
accttagctgcttgctgctcatctgggtctttgctaaactacgtggaaaagggaaggtttgctgggaggtgacagcatttcatccatctaggcaaaaaaaaaaaaaacaaaccacccactttctagtttttcttgcctcctctttttggttcccttgagatatacrtggtcacacacagctcagtgcactccctttgggatctcccccatcttcttctgacaaagccacacacctgagtccaggacctgggtctggtggaaacaaaaagcaaaacatcacataaattatatcaagagctscagaaatatgaaaaattaaaccaactacagcagcagagagaatgacaagcaagcaaataagcagtaaaagtattccaaattaatttcttgttagctktcagccgtaccacgctgctccatcagggatacagggtttcattttcccatacagtgaaccctcagcaattccctctgtgcaccactgcagaggcagaaagaaagagatcttttagctttaaaaaaagtaattaattaaaaacaagcctttagcttgaactggctctgcaatggagctgctcaaaagaggtgcccatcagccat

SEQ ID NO: 53783 - DNA, 600 bp, Chicken  19866894305570_3
aaaaaaaaaacaaaccacccactttctagtttttcttgcctcctctttttggttcccttgagatatacrtggtcacacacagctcagtgcactccctttgggatctcccccatcttcttctgacaaagccacacacctgagtccaggacctgggtctggtggaaacaaaaagcaaaacatcacataaattatatcaagagctscagaaatatgaaaaattaaaccaactacagcagcagagagaatgacaagcaagcaaataagcagtaaaagtattccaaattaatttcttgttagctktcagccgtaccacgctgctccatcagggatacagggtttcattttcccatacagtgaaccctcagcaattccctctgtgcaccactgcagaggcagaaagaaagagatcttttagctttaaaaaaagtaattaattaaaaacaagcctttagcttgaactggctctgcaatggagctgctcaaaagaggtgcccatcagccatagaatcatcgaatcactaaggctggaaaagacctctgagatcatcatcatcatcatgacccatcatcaccagaaaatgttgacttctctccatcagc

SEQ ID NO: 53784 - DNA, 600 bp, Chicken  19866894305585_1
caagacaaaatgcatgtgcatccagctgcgtcttcgagcagacctgtatttactacagggagcagaggatccccatgggtaccggtgcaggatgtatttcctgacgtgttatgctctactccaaccccattcagatgggggctgcattagacaccacgttcctgagagatcactaagcaatgatgactggctgtgcagaagaggtgatgtgtagaagtccaccagtttggtttcccattagagatgatttcttgtacgcctaagatgaagaatcctttgtaaatgagatggtctggatamtcttgggccttcattcttrtcttcaaaaaagctataggtggcagccagtgggtctgtgcacttttggaaatgtggcctctttttcaagcagtcttcattaagtctcttaaagtcctaccagcctccaagtctgactgtggtttggaaaggtcttgaatctcaaaggaaaatggccgcatgatttgggtacgggcgagtccatttaaataaagggcatttcatctttcttattccaatagagccattctccactcacctagagtgggtttctgaagaggtttccatacattttactagtac

SEQ ID NO: 53785 - DNA, 600 bp, Chicken  19866894305585_2
atccagctgcgtcttcgagcagacctgtatttactacagggagcagaggatccccatgggtaccggtgcaggatgtatttcctgacgtgttatgctctactccaaccccattcagatgggggctgcattagacaccacgttcctgagagatcactaagcaatgatgactggctgtgcagaagaggtgatgtgtagaagtccaccagtttggtttcccattagagatgatttcttgtacgcctaagatgaagaatcctttgtaaatgagatggtctggatamtcttgggccttcattcttrtcttcaaaaaagctataggtggcagccagtgggtctgtgcacttttggaaatgtggcctctttttcaagcagtcttcattaagtctcttaaagtcctaccagcctccaagtctgactgtggtttggaaaggtcttgaatctcaaaggaaaatggccgcatgatttgggtacgggcgagtccatttaaataaagggcatttcatctttcttattccaatagagccattctccactcacctagagtgggtttctgaagaggtttccatacattttactagtacagctggggaaaagcaacag

SEQ ID NO: 53786 - DNA, 600 bp, Chicken  19866894305593_1
gtaactgcaccaaagagactattcatttacacaacagaggaaaaaaaatgatttacctgattttaagctcaccgtagtaatgtgagttgtttaaggccttgaaaataatttaacgcatgagctatatattctgaaaatgatagctgaactattagctctgaatcagaaagcagatggttctgcacctcttgtattgctgactatgaaatgtcacactccctggcaagaatgcactcctggagacagtttttcatgcaaatttatagaaaagagccgcaaaataatgaatactatcaaatmtggatcttgggcttttgggtgacatggatttttaactccatttyaattacttttttggaattcagtgtaaatgttagttctgaaacaatacagtagttccaagtaataataaaaaagaaaaaggctatagggaggttatgtttaaagagaataaacaaagtaatctgtttaattgtagtcaggtaaatatgacaccgattctgaacaaaagtaaagaaaatcttacacatacagctaggcaaaggccataaagtaattgttgtcaatgaggacagttttatttaaaactgggcttgttag

SEQ ID NO: 53787 - DNA, 600 bp, Chicken  19866894305593_2
aaaatgatttacctgattttaagctcaccgtagtaatgtgagttgtttaaggccttgaaaataatttaacgcatgagctatatattctgaaaatgatagctgaactattagctctgaatcagaaagcagatggttctgcacctcttgtattgctgactatgaaatgtcacactccctggcaagaatgcactcctggagacagtttttcatgcaaatttatagaaaagagccgcaaaataatgaatactatcaaatmtggatcttgggcttttgggtgacatggatttttaactccatttyaattacttttttggaattcagtgtaaatgttagttctgaaacaatacagtagttccaagtaataataaaaaagaaaaaggctatagggaggttatgtttaaagagaataaacaaagtaatctgtttaattgtagtcaggtaaatatgacaccgattctgaacaaaagtaaagaaaatcttacacatacagctaggcaaaggccataaagtaattgttgtcaatgaggacagttttatttaaaactgggcttgttagataactggattgaatttcacattttgttgataaagctaaatgtg

SEQ ID NO: 53788 - DNA, 599 bp, Chicken  19866894305609_1
  misc_feature (1)..(188): n is any nucleotide
nnnnnnnnnnnnnnnnnnnnnnnnnnnnnnnnnnnnnnnnnnnnnnnnnnnnnnnnnnnnnnnnnnnnnnnnnnnnnnnnnnnnnnnnnnnnnnnnnnnnnnnnnnnnnnnnnnnnnnnnnnnnnnnnnnnnnnnnnnnnnnnnnnnnnnnnnnnnnnnnnnnnnnnnnnnnnnnnnnnnnnnnnnnntgtattcttgcctattcttccttccactcagaatagaaagaaggtgaagagtgcaaaatatatatatataaatatatatatttgccaaattaaagaaatgggtttagagttyaggaaagattcaaggcttaaagtcatttcgtctaaatcactgcaaccattctcaggctctgaacccccagagttcaagatccctttctgtgaaaatccaatgttttctccttttctgtgatatttttttctcccagatactgctgtgttgcttcctcactctttcctcacaattaatgtttttctatgcttcctgttcctttgtttctcctaaataactaagaaacgtggcagtttatcctgtttgttaattcagttctattagcaggcttgcagacccttctgtacattttcaccacc

SEQ ID NO: 53789 - DNA, 600 bp, Chicken  19866894305611_1
tggtctggtagttctgcccaatgccctcttgggggaataacagaagtgagatcagtctgtagtagttgctaataaatacatgatggacttcctatacgtgctgcatttatgaggaagtctggtggtcctctcctagaggcatgttaagcatgaaaaccagtgccacaggaaactgggcttcataaatgtcctctttagagaattacctgtttgtttgtttgttgtagaggatcttacagttatgataggggagggggaatgggattaacagtgaagagtttttgctgactttctgatgtmgtaaaaagttgagtacttgggctgatgtgaaatagttgaaatagtttataaagatatccataggtggaattccaagtaatgaaagcatgtttgtcttctgagggttctcttgtagtcagtgctgcttttctaaatggtaataataaagttctttaggtattgctgagaaactaaatcccyacttgctatttgagtacaaaatactttcattttcttatattaactatcaagcatatttcattctgtattaataacataaatacttcagtcttgcagtgattacgagtttgcattggtaag

SEQ ID NO: 53790 - DNA, 600 bp, Chicken  19866894305611_2
cataaatgtcctctttagagaattacctgtttgtttgtttgttgtagaggatcttacagttatgataggggagggggaatgggattaacagtgaagagtttttgctgactttctgatgtmgtaaaaagttgagtacttgggctgatgtgaaatagttgaaatagtttataaagatatccataggtggaattccaagtaatgaaagcatgtttgtcttctgagggttctcttgtagtcagtgctgcttttctaaatggtaataataaagttctttaggtattgctgagaaactaaatcccyacttgctatttgagtacaaaatactttcattttcttatattaactatcaagcatatttcattctgtattaataacataaatacttcagtcttgcagtgattacgagtttgcattggtaagagatatgtcttaggatctatatatgtagttgtgaggtaaaagcttagtaattattttaagagtttgccatttcttgtaagtaatcttaatatttatcttggcattacttagattatttttaagagttttccaattctaagttaaaatattaaaaccttaatttaagtattaaaagaaaca

SEQ ID NO: 53791 - DNA, 600 bp, Chicken  19866894305625_1
gaaatctttcatgctgcaacttgttggctgacaaaaaaatgtgtttccttcaaatttccaatatgcacagaatgttttgtaattcatctcatcttgaacgctgcctttgactgtttgcaggaaagtaaatggttgattagttgttttcttcctaataaagtacgcatgttgatgaatgctagtagacgttgtgattactgaacaaaggttaatacactgggagtctgaatgtttccttcagtggaagtgcaggaggaaataaatctgctagaatagaaactgcttttctttgaaatcacwtattttaacatctagtggtgtgatgtgcttttgttttttcttttattagaggtatgctcagaatgcctacctataagatcttaaataactaattgctgcaatcattctatcaaactctttcaaaacaggcttatgataccaaaaattgctgtaactattggaaatttcttccattctctcctctttgtagccagcttgcagcactgtcctttgtttatcatcatcaataagaaaaaatattcttcaacacatgagatttctctgtaaatgtcacatggttaatcctctgacttcaatgat

SEQ ID NO: 53792 - DNA, 600 bp, Chicken  19866894305627_1
aaatgttttgtggtagaacacatttgccatttgtgaacgttggcagtgtcctttctgatgctgtgctcaagctttgtaatttggcattaagtgaaaagagaatgacctctaacgtctttgacacctgttaggaaataatgattccttaaagcaaggaaatgaaactttaattgaagttaatattgctttcattttataaaaataacttctgcagaaaaatattatcaaatcaatctgctgaactaactagtagtaaatatttagatattttacaataatggaagtcatcacggtaattayccaactccaggtcacaataccacacttcagctgcctgtctaatattacttttgctggctttytgtttgtttgtctgttttttgctaacagtaatgtaaaaatatacaatatacaatctggttcataatacacaaaggtttattttacatatattttagtagcttgaatgagatgaaggaagcataagaaggtctcctgctgtcttctattaaaatcagtgtacttatgttaactcttgatcagaaggatcgcgtcatttatggcttggaaaagctaggaaatcagtattgattgtggtaa

SEQ ID NO: 53793 - DNA, 600 bp, Chicken  19866894305627_2
gtgctcaagctttgtaatttggcattaagtgaaaagagaatgacctctaacgtctttgacacctgttaggaaataatgattccttaaagcaaggaaatgaaactttaattgaagttaatattgctttcattttataaaaataacttctgcagaaaaatattatcaaatcaatctgctgaactaactagtagtaaatatttagatattttacaataatggaagtcatcacggtaattayccaactccaggtcacaataccacacttcagctgcctgtctaatattacttttgctggctttytgtttgtttgtctgttttttgctaacagtaatgtaaaaatatacaatatacaatctggttcataatacacaaaggtttattttacatatattttagtagcttgaatgagatgaaggaagcataagaaggtctcctgctgtcttctattaaaatcagtgtacttatgttaactcttgatcagaaggatcgcgtcatttatggcttggaaaagctaggaaatcagtattgattgtggtaatcaaaaaaattagacactttgaaccatttagtttttaagaccataaacaagtctgactgtca

SEQ ID NO: 53794 - DNA, 600 bp, Chicken  19866894305631_1
ctattggcctagaaaattttagttcttaaaggagtcattaagctcaaagtagtgtctgaaatttcttatttcttctgtgcactctttcttgaagaccatcaagcagctttccctgtcccaagctttataaactaattaagagaaaacaaactccaaaaaaacatccagtccaagtcctgtaggaaccttgcttgctgagccccagcttggactgaacttccatggccaagttacaaacccctgaaaataggggggatggagaaaacccaaaacagaatccaactatagggcactgtttgygccactataataagaacagaggtaacagcagtgaattgtttctagtttgctatgttacacttccaaatgagtattacctcaacattttaaaaaaataaaaacacacacccaagcaaaaaaaaaaaaaaacccaaaataaataaatctacacagcaaagcagcccccccttcccaacagaagaaaaaattaagacaagctagtgagataggcattattaaaggatctttacagctgatttctgctttttaaattaatataaaggaaatccatttctggttgtactattgtttaatgtagaa

SEQ ID NO: 53795 - DNA, 470 bp, Chicken  19866894305635_1
ttttacttgttctgtaattggggatgaattttcctttgctctgaaacagatctcttggcaccaaggaagtctgaattatccaactgtattaaatgtgaggtggttcagaaataaatctgtgaaagatcacatgcttcttcatatgagaaatcacagagagccgaaaaaccttaattcacttgacatttgctcagtttatgatatacctgaaggacagcctggatgtggctgattaaaaatacgcccagggatgaggtcaggcggtgcctgcgattcccagctctgctggctttcatttcsaaagcaatagatgttgctttcccaagataggctctgcccgctccgagcccaaaattgtcctgcatacatcagtataaacctttcaccgtgctcagtttgatctgtacgttaatcttgggtttggcctagcactgccttgcagttctgcattttattttctaccttcttgt

SEQ ID NO: 53796 - DNA, 600 bp, Chicken  19866894305636_1
gcttttggcaaagtggaacatgaaggaaatagcttcccattaataacagaagatccaaaattgaccctgctttcatgcttcatttcagtgacgcaggtaaagatttgttttgggagcaaatagtaaattccagcagatagttggctctaagagcataatataatgtctgtgctttaaacaccaagtttttccctagtgcttcttaaggcttagacattatgtcactcaactatttttgtcttctgttcagaagtcccagttcccaacgcaatatcttaatgacctgtagggtcttgcacwcgcatcgtaacctttgttgctgttccttgccttattgatcaaamgtaatgaagtgcacagagatgttaaaatcagcttattattttaatactgaaaactattaggctttttttcctccccattatttttgttttgtatgcatgctcaggctggtggaagaaatgagtaaaggtgatttgttcatctcttctacttcgtttgatacagtccgtgagcgacagagtccatagagtgaccagcagtggttgtacagcaaggctatttaatggaggttttggaaaaggataatattttctgtca

SEQ ID NO: 53797 - DNA, 600 bp, Chicken  19866894305636_2
aacagaagatccaaaattgaccctgctttcatgcttcatttcagtgacgcaggtaaagatttgttttgggagcaaatagtaaattccagcagatagttggctctaagagcataatataatgtctgtgctttaaacaccaagtttttccctagtgcttcttaaggcttagacattatgtcactcaactatttttgtcttctgttcagaagtcccagttcccaacgcaatatcttaatgacctgtagggtcttgcacwcgcatcgtaacctttgttgctgttccttgccttattgatcaaamgtaatgaagtgcacagagatgttaaaatcagcttattattttaatactgaaaactattaggctttttttcctccccattatttttgttttgtatgcatgctcaggctggtggaagaaatgagtaaaggtgatttgttcatctcttctacttcgtttgatacagtccgtgagcgacagagtccatagagtgaccagcagtggttgtacagcaaggctatttaatggaggttttggaaaaggataatattttctgtcatcttttttctgttttcctcctaagagggtgggttgtgccattaa

SEQ ID NO: 53798 - DNA, 599 bp, Chicken  19866894305638_1
  misc_feature (1)..(156): n is any nucleotide
nnnnnnnnnnnnnnnnnnnnnnnnnnnnnnnnnnnnnnnnnnnnnnnnnnnnnnnnnnnnnnnnnnnnnnnnnnnnnnnnnnnnnnnnnnnnnnnnnnnnnnnnnnnnnnnnnnnnnnnnnnnnnnnnnnnnnnnnnnnnnnnnnnnnnnnnnnnnttagcggccattctctggacccactccaagagctctgcatccttcttgtgctgggaagcacaaaatgaagcccagaataaattcagcgtacgatgcccggtccagttgagtcagcatggctgagttcatattaaacaggagtcytgtggtagcctctattggcagacttttgcagtagccagttccttcccatatgagctcccttcatataatggctatctgtactggaagttgtactatttcctttaccaaaatgcaaatttttatccagtcactccaaggttactgaatttcagattgccacaatgccaaaatgagttgagttacagccccagatgtcaaggagagagttgatacgtccattttgtctcacatgttgctgggaggagactctgaatccaagaggctgtggtcatgcaagtacatttttcctcagtcatcat

SEQ ID NO: 53799 - DNA, 600 bp, Chicken  19866894305644_1
ttcattgtgatttttagtttctttttttaatctctgaatgtaaactattttgctcccatgaaattgctattttttccccccttttactcagatggttgcagatatttctcaggggaacccaagcataacaaaggtttacaacatttctgagacagtttcatgatcatgtcctattctggcagggaaaacaatcgaatattttatgtttgcatattgacaagctggccagtttataagccataactgaaaacatattgtggtactggcgaataacaatgattaaaatacatttatgaagawtttaagcttcagactgtaaacaaatgtcactgtttcccyayacctgcctttctcatgtaactgtcttttcctttcatttcaacgattccttgatgcaaaatagaatattcatctgatttttgacactcgccatatatttgatcatttgtatcacaactgaataacataatggaaagaagacttcgctgtttgacctgattttcaatgtttcaatgattttaaaattcttacttttatcatttttccgtaatgttttgcagttttcacgttatatgttagcctgagaaatgccatgaatag

SEQ ID NO: 53800 - DNA, 600 bp, Chicken  19866894305644_2
gtaaactattttgctcccatgaaattgctattttttccccccttttactcagatggttgcagatatttctcaggggaacccaagcataacaaaggtttacaacatttctgagacagtttcatgatcatgtcctattctggcagggaaaacaatcgaatattttatgtttgcatattgacaagctggccagtttataagccataactgaaaacatattgtggtactggcgaataacaatgattaaaatacatttatgaagawtttaagcttcagactgtaaacaaatgtcactgtttcccyayacctgcctttctcatgtaactgtcttttcctttcatttcaacgattccttgatgcaaaatagaatattcatctgatttttgacactcgccatatatttgatcatttgtatcacaactgaataacataatggaaagaagacttcgctgtttgacctgattttcaatgtttcaatgattttaaaattcttacttttatcatttttccgtaatgttttgcagttttcacgttatatgttagcctgagaaatgccatgaataggacttatcttatatgcatgttagagatgttcctgagttg

SEQ ID NO: 53801 - DNA, 600 bp, Chicken  19866894305644_3
aaactattttgctcccatgaaattgctattttttccccccttttactcagatggttgcagatatttctcaggggaacccaagcataacaaaggtttacaacatttctgagacagtttcatgatcatgtcctattctggcagggaaaacaatcgaatattttatgtttgcatattgacaagctggccagtttataagccataactgaaaacatattgtggtactggcgaataacaatgattaaaatacatttatgaagawtttaagcttcagactgtaaacaaatgtcactgtttcccyayacctgcctttctcatgtaactgtcttttcctttcatttcaacgattccttgatgcaaaatagaatattcatctgatttttgacactcgccatatatttgatcatttgtatcacaactgaataacataatggaaagaagacttcgctgtttgacctgattttcaatgtttcaatgattttaaaattcttacttttatcatttttccgtaatgttttgcagttttcacgttatatgttagcctgagaaatgccatgaataggacttatcttatatgcatgttagagatgttcctgagttggt

SEQ ID NO: 53802 - DNA, 600 bp, Chicken  19866894305648_1
tggctcagatataccaggaaggaagaggagctgacatagaaatacagatttctagctgacattccaaaaaatgattctacaaccattcatgaagtcttcttacctgaacacagcaaaaatataaagataggctgcctttcagatatacaagaatacaatacaaaaagtggtgcaaatatgaaagaacaacttgaattgcatccttaatctctttgagcatcttgatattcatacataaaaagaatgccatacaaattttagtatttatcctaagaatctctgtagataaccctagcattmatctgtaatattcaaatttttattttctgatttttactatccttagacattggttggtggcaatacaaacatggaaataggttaagaaaataggtttgtaaatgagccgctgttagtactctgcttctaactgcttctaacaatgcaaaactgtaatttatattgcttctgcaaatcagaacaagaaaagctgtatattgctacttgtgagtctagagtccttggtaaattaggcccctgacagtatgacttaagaaaaattggggtacccagcgtcagcaaatgctctataaaaggaat

SEQ ID NO: 53803 - DNA, 600 bp, Chicken  19866894305651_1
gacaaaaagctgtaccatatgtatttaggtatattatacttttattgatgaggaggtctgtatttagtcctaagtgctctcttgaaatcagctcctgtactaaaagtgcattatcatagtattgcttttccttcttaggtttagctcttgtttctccaaattagattgatattcctcaaagtaaaaaagatatgtacaaaactgcagattaattaattaattaattggagggggcattttatcagtcaaaacaacagctgattcttaaaatgcatgttacatacttgctctaaattcttytacgccttctgtttgaactacattgaccatatatcacttggcaggcagtttcyacttctcagtcaggaatctcaaattcctccatgaggggagatccaaagtgtactgactgctagttagtatctgacctggggagtcacctctttactgaaatttattaattactttcaattttgattacatgttgatgaaagygtttaaaaggaggtgcaagctatactgcgatttttaacaaatcaattccttcaagtcatgcacatgtctagtcagcttctgtcagctattgtcagccaagacact

SEQ ID NO: 53804 - DNA, 600 bp, Chicken  19866894305651_2
aggtctgtatttagtcctaagtgctctcttgaaatcagctcctgtactaaaagtgcattatcatagtattgcttttccttcttaggtttagctcttgtttctccaaattagattgatattcctcaaagtaaaaaagatatgtacaaaactgcagattaattaattaattaattggagggggcattttatcagtcaaaacaacagctgattcttaaaatgcatgttacatacttgctctaaattcttytacgccttctgtttgaactacattgaccatatatcacttggcaggcagtttcyacttctcagtcaggaatctcaaattcctccatgaggggagatccaaagtgtactgactgctagttagtatctgacctggggagtcacctctttactgaaatttattaattactttcaattttgattacatgttgatgaaagygtttaaaaggaggtgcaagctatactgcgatttttaacaaatcaattccttcaagtcatgcacatgtctagtcagcttctgtcagctattgtcagccaagacactcattcccactttcaggaattttaactatttacacatatagtaacaaaacatga

SEQ ID NO: 53805 - DNA, 600 bp, Chicken  19866894305651_3
acaaaactgcagattaattaattaattaattggagggggcattttatcagtcaaaacaacagctgattcttaaaatgcatgttacatacttgctctaaattcttytacgccttctgtttgaactacattgaccatatatcacttggcaggcagtttcyacttctcagtcaggaatctcaaattcctccatgaggggagatccaaagtgtactgactgctagttagtatctgacctggggagtcacctctttactgaaatttattaattactttcaattttgattacatgttgatgaaagygtttaaaaggaggtgcaagctatactgcgatttttaacaaatcaattccttcaagtcatgcacatgtctagtcagcttctgtcagctattgtcagccaagacactcattcccactttcaggaattttaactatttacacatatagtaacaaaacatgagacaagaagtcccatatccattcttgtggttactagagtattagagtattaatgagagaagaaaagaaattatttctccagatgcccatactgatgcaatatggcttacggtgatttctcctcacctagtaatttggcatac

SEQ ID NO: 53806 - DNA, 600 bp, Chicken  19866894305651_4
tattgtcagccaagacactcattcccactttcaggaattttaactatttacacatatagtaacaaaacatgagacaagaagtcccatatccattcttgtggttactagagtattagagtattaatgagagaagaaaagaaattatttctccagatgcccatactgatgcaatatggcttacggtgatttctcctcacctagtaatttggcatacaaaatcaaattgcatatttgcttcaaatctgtattaaaaaggtgtttcattaattttaaattgttgattgggactacattcaaatratatatgtttatgtgctttccttgcttgattgaaaaacatatttcacagtcatggataatctgcaataatattcatgctgaagtccacccctcagtcccaagcctatctgtacgttgcatctcttccttaatggactgtggtttcatggccactctaagctagaaaaaaatcacctttctgttgccagtccagatctacctgaaccacttcaatcctagcagctcaatacaccttctgtttttgttgatgttctgctatggcccagctcttcagtacatgaacaccttcctgacatactt

SEQ ID NO: 53807 - DNA, 600 bp, Chicken  19866894305651_5
tctcttccttaatggactgtggtttcatggccactctaagctagaaaaaaatcacctttctgttgccagtccagatctacctgaaccacttcaatcctagcagctcaatacaccttctgtttttgttgatgttctgctatggcccagctcttcagtacatgaacaccttcctgacatacttttaccaactagttctctttctaggcagcaatatcttgccacagtgtggcagccctgatgatcttgcctctgcactgccagtccttctgcttccattgttgtaaccacctccactggacrttttctaccatcaatatagagatagaatacaggccatttctctcattcagcaatacataaagccagctggatagccttcagttttgcaaattggcttgattccctttctccttcagcagtttctgcagcttgtcatttaggagtccatacagtaactttccacttttgacgctttcccacaacatgagaggaccgatcagtgaacaaagcatgtttgtatttcttctcattctttgggtagtttattatacagtgaggcctctttagcctctcacctcctcttctaatgatattccaaaa

SEQ ID NO: 53808 - DNA, 599 bp, Chicken  19866894305652_1
  misc_feature (1)..(92): n is any nucleotide
nnnnnnnnnnnnnnnnnnnnnnnnnnnnnnnnnnnnnnnnnnnnnnnnnnnnnnnnnnnnnnnnnnnnnnnnnnnnnnnnnnnnnnnnnnnncttggtgtgccctgagaagttttgccatcttagttatccgtcttcagatgcaactccattgctctcccctctgctgcggctgtgtcagcaggaggcccctggtagaggaaatgaccagcaaaaactgtaacaacgaggagcaaaacaaacagctcttccatgggggggctgactggagctgtgtgggtgtgtggttggtgggcacacwgctggcagctgtgccagctgcagcccttggcatccctcagcagctccgggctgctggcagcaaatgaggcaccrgcacacagggctgtcacatctccagatgtgcacgagagcagctgatagcaaaaccattagggaccagtgctgctgcagggctgctggtctgaaatgctcatctggggccttgctctgtgtcacctgttgtggtggtttttgatttcctggagctggggcgatgccacctgggtgtcctctctgctccagaatggggctgcagaggggatggaagcagcccgtgtt

SEQ ID NO: 53809 - DNA, 599 bp, Chicken  19866894305652_2
  misc_feature (1)..(18): n is any nucleotide
nnnnnnnnnnnnnnnnnncttggtgtgccctgagaagttttgccatcttagttatccgtcttcagatgcaactccattgctctcccctctgctgcggctgtgtcagcaggaggcccctggtagaggaaatgaccagcaaaaactgtaacaacgaggagcaaaacaaacagctcttccatgggggggctgactggagctgtgtgggtgtgtggttggtgggcacacwgctggcagctgtgccagctgcagcccttggcatccctcagcagctccgggctgctggcagcaaatgaggcaccrgcacacagggctgtcacatctccagatgtgcacgagagcagctgatagcaaaaccattagggaccagtgctgctgcagggctgctggtctgaaatgctcatctggggccttgctctgtgtcacctgttgtggtggtttttgatttcctggagctggggcgatgccacctgggtgtcctctctgctccagaatggggctgcagaggggatggaagcagcccgtgttcctcatgccttttctctagcgaagtgctgaagcacagcatggcatctacatttttgggccctggtgcccaaaaa

SEQ ID NO: 53810 - DNA, 491 bp, Chicken  19866894305660_1
gatactcagcaccatggtacccacgttaatacgctctctgtggtcaggggttttggaaaggcagagaactggttggctccattctgtttttcagtgggaaggctgctggaggataaaatgtggaaagcagaaacagagaagggaggctgcacaagtcctaaagtaatgcaaaagagtcctcagcaccttcctccactcactgccactcattagggcagagctgactttgacaaacgatgccaccgcaaagatcaaatggagttataccatttgaatgccactcactattaaaatgggggyaggtgcttatagacaagttacacaagaaatgtaacaggacaagctgtggaagacggctaccagtcgtgcgggaacttgggtgggacggtgttttaataaagcaaaatcaccagcgttgcagatttgatcaaacacacaccattatgtctcctgtacaggcagcaactgctctgccagaaagcggctggcgt

SEQ ID NO: 53811 - DNA, 600 bp, Chicken  19866894305664_1
tggctctcctttcttcttttagctgccccagctctatatccctctggctgtctccttgaagagttaagacatgtttggagcaggagctccaagtcttagtggattggttcctctgctgcaatagctgtgtggtaagtctgtgctgcctgtcaggtatgttgctgaatgagctaaatactttgtgcaacgtcctgacttttaatggcctgctgattctttggtcctgttactggaggtcctgcttgtggtttcttcaggcaggtgggtcctgctggacttgcttagaaaaacattcatcarctgtcaaagccagcyggccagagagaaaccacagcctggggtacayggagctcaaggcaggggaggctgttggctaagctcccaacacaaggaaatgccagatgagctccagaaaactccatgtgaaacaatgggataggatgggattctctttygccaaagcaaatgytgagcttcttatttggaaatagctgcaatagggacagtaggaatcaggaaccccaaaactctgaggatttggtaatgctaattgtggcattccacagtgacacagaaaccccttgagcttcttttcattaa

SEQ ID NO: 53812 - DNA, 600 bp, Chicken  19866894305664_2
cttttagctgccccagctctatatccctctggctgtctccttgaagagttaagacatgtttggagcaggagctccaagtcttagtggattggttcctctgctgcaatagctgtgtggtaagtctgtgctgcctgtcaggtatgttgctgaatgagctaaatactttgtgcaacgtcctgacttttaatggcctgctgattctttggtcctgttactggaggtcctgcttgtggtttcttcaggcaggtgggtcctgctggacttgcttagaaaaacattcatcarctgtcaaagccagcyggccagagagaaaccacagcctggggtacayggagctcaaggcaggggaggctgttggctaagctcccaacacaaggaaatgccagatgagctccagaaaactccatgtgaaacaatgggataggatgggattctctttygccaaagcaaatgytgagcttcttatttggaaatagctgcaatagggacagtaggaatcaggaaccccaaaactctgaggatttggtaatgctaattgtggcattccacagtgacacagaaaccccttgagcttcttttcattaaatacagcttgctggc

SEQ ID NO: 53813 - DNA, 600 bp, Chicken  19866894305664_3
gctgtctccttgaagagttaagacatgtttggagcaggagctccaagtcttagtggattggttcctctgctgcaatagctgtgtggtaagtctgtgctgcctgtcaggtatgttgctgaatgagctaaatactttgtgcaacgtcctgacttttaatggcctgctgattctttggtcctgttactggaggtcctgcttgtggtttcttcaggcaggtgggtcctgctggacttgcttagaaaaacattcatcarctgtcaaagccagcyggccagagagaaaccacagcctggggtacayggagctcaaggcaggggaggctgttggctaagctcccaacacaaggaaatgccagatgagctccagaaaactccatgtgaaacaatgggataggatgggattctctttygccaaagcaaatgytgagcttcttatttggaaatagctgcaatagggacagtaggaatcaggaaccccaaaactctgaggatttggtaatgctaattgtggcattccacagtgacacagaaaccccttgagcttcttttcattaaatacagcttgctggctccaagtgacaccaaccagtgctgtgaaggt

SEQ ID NO: 53814 - DNA, 600 bp, Chicken  19866894305664_4
atgttgctgaatgagctaaatactttgtgcaacgtcctgacttttaatggcctgctgattctttggtcctgttactggaggtcctgcttgtggtttcttcaggcaggtgggtcctgctggacttgcttagaaaaacattcatcarctgtcaaagccagcyggccagagagaaaccacagcctggggtacayggagctcaaggcaggggaggctgttggctaagctcccaacacaaggaaatgccagatgagctccagaaaactccatgtgaaacaatgggataggatgggattctctttygccaaagcaaatgytgagcttcttatttggaaatagctgcaatagggacagtaggaatcaggaaccccaaaactctgaggatttggtaatgctaattgtggcattccacagtgacacagaaaccccttgagcttcttttcattaaatacagcttgctggctccaagtgacaccaaccagtgctgtgaaggtgggagggcaccctcaggataaagctcctccttgccagtgattcttctgcttccatctgctaatgcttgaattagttcctgggaggagaaatccagcagggctgtttttc

SEQ ID NO: 53815 - DNA, 598 bp, Chicken  19866894305664_5
gctaaatactttgtgcaacgtcctgacttttaatggcctgctgattctttggtcctgttactggaggtcctgcttgtggtttcttcaggcaggtgggtcctgctggacttgcttagaaaaacattcatcarctgtcaaagccagcyggccagagagaaaccacagcctggggtacayggagctcaaggcaggggaggctgttggctaagctcccaacacaaggaaatgccagatgagctccagaaaactccatgtgaaacaatgggataggatgggattctctttygccaaagcaaatgytgagcttcttatttggaaatagctgcaatagggacagtaggaatcaggaaccccaaaactctgaggatttggtaatgctaattgtggcattccacagtgacacagaaaccccttgagcttcttttcattaaatacagcttgctggctccaagtgacaccaaccagtgctgtgaaggtgggagggcaccctcaggataaagctcctccttgccagtgattcttctgcttccatctgctaatgcttgaattagttcctgggaggagaaatccagcagggctgtttttcctggcgggagca

SEQ ID NO: 53816 - DNA, 600 bp, Chicken  19866894305665_1
accaagtagccttgcacatttatgcaacagccattttgttgtgatttaactcagtgggcagatcagaatcacacagccattcactcattccccaacagtaagatgggggagagaactggaagaaaaaaaaaggtaaaatttgtcagctgtgatacagatacttgaatagggcagggaaaatagtaataataataaaagaatatatataaaacaagagatgcacaatgcatcactggacccagtcactccccaagtgtgtacctcctgatgcaccccttgataactctcctagttttattrttcatcatgatgttatatggtatggaatatccctttggccagttttggttagctgttctggttccgtctcctcccagctccttgtgcccctccaaacttcttgctagcacggcagtataaatagaaaagcctttgacttactataagctctgcacagcagcatctaaaatactagcattttatcaacattactctcatcctaaattcaaagcaaaacaccacaccagctactaggaagaaaattaactctgtccccgccaaaaccaggacatttaccacattaatgcactaggggaagat

SEQ ID NO: 53817 - DNA, 600 bp, Chicken  19866894305675_1
aataatacacacaatttgtgcccaagtaacacctcacactatcacctgtaacaaactcaattatccctgggatcttagcctagaactatgcaagggaggtaaggtggtaaaaattttcttctgtcaaattagtgaaatgcttctgaaccaggtataattctgctggaggaggaaaaagccttaattgtgaacaaaatcaagaagcttttgattccaggcaatcttagctcttctgtcttctgagtatcagaagcatctggaaaactattatcagaagactcttccagaggtacatcaagyggggrtattagcttcttgtaatgatccatggcaaagaaatggcaactactcacaaaattacacatatggtaaatagataagtgtgtttctttattggcttctgttagctgcagcaaaatgttactgaagagtggaagaacaactaagaaaaacacaaaacagtacgccatgcacactgcatcaccagtagtgctctgtaggtggaaataaagttgcataattttttttttctaaataaacaaagtacttcctatagaggcccactgcttaagcaattgcttttccatggcttagtcatcc

SEQ ID NO: 53818 - DNA, 600 bp, Chicken  19866894305675_2
tacacacaatttgtgcccaagtaacacctcacactatcacctgtaacaaactcaattatccctgggatcttagcctagaactatgcaagggaggtaaggtggtaaaaattttcttctgtcaaattagtgaaatgcttctgaaccaggtataattctgctggaggaggaaaaagccttaattgtgaacaaaatcaagaagcttttgattccaggcaatcttagctcttctgtcttctgagtatcagaagcatctggaaaactattatcagaagactcttccagaggtacatcaagyggggrtattagcttcttgtaatgatccatggcaaagaaatggcaactactcacaaaattacacatatggtaaatagataagtgtgtttctttattggcttctgttagctgcagcaaaatgttactgaagagtggaagaacaactaagaaaaacacaaaacagtacgccatgcacactgcatcaccagtagtgctctgtaggtggaaataaagttgcataattttttttttctaaataaacaaagtacttcctatagaggcccactgcttaagcaattgcttttccatggcttagtcatccagcat

SEQ ID NO: 53819 - DNA, 600 bp, Chicken  19866894305679_1
gggaagcaagaatcaaacttaatagatggcaaataagattaatctatgatctaagtgccgattacacttggccctgcccttgaacacccaggtgtaaccttgaaattcacatccgctaagacactgcaattggattgtgtgtccccgaaggcctggaaggggcagctggccaaactttacccattattccccagtgaggcatgagctgtctcagcctgcagctctcttacttgtggaatttggcagcggcacagctgaatgtttgttttgggatgtttagcattttttcagataaaatarttattttcaggtccttaatttttgtttgtcagaagcaagcagccagggaatgagtgaacttttacctggacctcacaagaggagaaagctctcttttcaaaatctgataactctgcagaagaaaacagayattttctttctttataggttgacctgtggaccctgccaaaaaaaattttccatgtgaacttgagtttgcaaggcccttttttgagtcccgaaaactctgcgttctgaaaaaggacatctgtgataagatggaacttggcaccagtaactcatgtactatgggtgaagcat

SEQ ID NO: 53820 - DNA, 600 bp, Chicken  19866894305679_2
tggattgtgtgtccccgaaggcctggaaggggcagctggccaaactttacccattattccccagtgaggcatgagctgtctcagcctgcagctctcttacttgtggaatttggcagcggcacagctgaatgtttgttttgggatgtttagcattttttcagataaaatarttattttcaggtccttaatttttgtttgtcagaagcaagcagccagggaatgagtgaacttttacctggacctcacaagaggagaaagctctcttttcaaaatctgataactctgcagaagaaaacagayattttctttctttataggttgacctgtggaccctgccaaaaaaaattttccatgtgaacttgagtttgcaaggcccttttttgagtcccgaaaactctgcgttctgaaaaaggacatctgtgataagatggaacttggcaccagtaactcatgtactatgggtgaagcatgctcagaagaggcagacccagaggtaatttttcatcaaagaactttttaaggccattattaaagctagcatacatttcctctgctgctgacagcttcaatggacaagacaggattgattcgggtatggca

SEQ ID NO: 53821 - DNA, 600 bp, Chicken  19866894305680_1
cctattatctctttttattatctctctttaaaacaacaacaacaacaacaacaaaactagtttctcttctacttacttagattttcctgcattgaggcagctgaaaataattcaaggcctttacaaggggcaggttatttccaagtacaaagctaacaagggattgtgccgtctcatcagacagcagtctggaggtggcagctattgtgaatgaatggaagtttatgagttttgtagccacaactggaaaagatgttccaataatctcagaagacagtaaaattcatgaagctcacagcmttctcaggaacttccacagttaaccagttttgcagagtgctcctctttagaagtggcagtgatcacattctggtcttcgtattaaaaaaccctacattctagacatctggaggggttttacataggaactatgagaatttgtccaattataaattactgaaaaatttaaatttgcagaaagcagattttctcaaattactaaaataatttaatattattatagccccaaaaagctttcatttacagtgcattttaatctactgtactcccagttttccttaacagaatgttgaaaaatgt

SEQ ID NO: 53822 - DNA, 600 bp, Chicken  19866894305687_1
cttgtgtcttgtgcaatgtacacaaagcagctaagtgagaaaagaaagttctgaatggggtacaagaaaaaatcttctgaagtcaacactactacagaggacaccatacgtacaagaagaaattaagtccagtaaaaccccctactaaccaatgaaacccctctactactgtcaagaaatatgcatccacttgatgttcatactttttgccatatgagattatgagttaataaacttttctcaggaacttcctgctgcttccaaaaatttaatatcagttctctttaaaaatttaatatytaacttgccacacaattctttattttaaattaggaaggttaatgagttattccctactatagtatgtgatgttttccagaacaaagtatggttttgtactaatatcactgactggaaagtatcaatcttaatatttatttattcagatatgtggaatacaaatgtaagaattgtgtatgaattgaaattacactgattagacagttcataatgggaaataaaaatcacatgttcatatattcagctctctttgcgccaacacattatctttatcccattaaagagccttatgccatctgt

SEQ ID NO: 53823 - DNA, 600 bp, Chicken  19866894305690_1
cggtcctgagcacacgtgtgctctgtttgttcactggagatgctgcagctttaaggtcatttacattccctggcatttaagttacactacaatatgcaaaagtctttaacagcatttgtcaacactgtcctcgaagaactcggaaatgaagttcagcactctgcttaccaagaaagaaccaaactaagacacatttctgggaaaagaacaagacactgcttcattagtactgtccccacatctactggctttgttacagcaaaccacaagtctctcttccatgatatttttccagcaaakgggagtccaaaaatagcatttcctcctcagtcactytcataaatgtgtaagagccaactagtcagactcagcagcagccaaatactgcactgccattaattctgtgcacagtctgagtggtactcatggtgtcagtggagaatcatgacaatgctggctcagtgatgtgaagacccaggacgcgaaggaaggggagaacacaacagtaccagtcacacactcaagcccacatactggcttttggaggttaaaattcatcactttcaactgcatggagctgtgtgtcatctgcatccgtca

SEQ ID NO: 53824 - DNA, 600 bp, Chicken  19866894305690_2
gagatgctgcagctttaaggtcatttacattccctggcatttaagttacactacaatatgcaaaagtctttaacagcatttgtcaacactgtcctcgaagaactcggaaatgaagttcagcactctgcttaccaagaaagaaccaaactaagacacatttctgggaaaagaacaagacactgcttcattagtactgtccccacatctactggctttgttacagcaaaccacaagtctctcttccatgatatttttccagcaaakgggagtccaaaaatagcatttcctcctcagtcactytcataaatgtgtaagagccaactagtcagactcagcagcagccaaatactgcactgccattaattctgtgcacagtctgagtggtactcatggtgtcagtggagaatcatgacaatgctggctcagtgatgtgaagacccaggacgcgaaggaaggggagaacacaacagtaccagtcacacactcaagcccacatactggcttttggaggttaaaattcatcactttcaactgcatggagctgtgtgtcatctgcatccgtcatgctgctctcttgggattcgtctgtgccaactttgg

SEQ ID NO: 53825 - DNA, 599 bp, Chicken  19866894305693_1
  misc_feature (1)..(68): n is any nucleotide
nnnnnnnnnnnnnnnnnnnnnnnnnnnnnnnnnnnnnnnnnnnnnnnnnnnnnnnnnnnnnnnnnnnnctgattacagatactactggcttttctactttttgtttttactgttgctgcctcccatgttggatgttgcccttgttcctgtgacatcagaattgagccttcatagagtatggtttagctaaagtgatgagcaccattgctggaagctctgctcacaatagaggtgggttagtctcccctgccagccttgcagatggccttgtttgaatggtttgagcaatacactgcacayggtactgatggaccctgaaccttcacaaggcactttgcaaattgtccttttgcaagatctttctcaccacttacagctggatgtatggcactggagagctgctgcaggggcaccacagggaacaaccagcaatgggtcattttaccctcttaactatatgaggatgtgtacagcaagtgaagcacgtaaggctctatgttgcaaagccattgtagtaaaagttaggcagtgtgaagcattttgctgcaaagccccttgaagtctgtgtaatggttcccktgaatggtatttcccattgt

SEQ ID NO: 53826 - DNA, 564 bp, Chicken  19866894305693_2
tttgagcaatacactgcacayggtactgatggaccctgaaccttcacaaggcactttgcaaattgtccttttgcaagatctttctcaccacttacagctggatgtatggcactggagagctgctgcaggggcaccacagggaacaaccagcaatgggtcattttaccctcttaactatatgaggatgtgtacagcaagtgaagcacgtaaggctctatgttgcaaagccattgtagtaaaagttaggcagtgtgaagcattttgctgcaaagccccttgaagtctgtgtaatggttcccktgaatggtatttcccattgtagaatggtactgatcaaaacctggtgttccaaagctatcttcaggaattgccctcactgtgtttaggtttccttagatctgctgatgtaaatgactgcctgagagctgatattattccactgtcataggtcaggttagtgggttacatggcctgtgctgcagtgaggctgctgccttggatgtctgcatgagcccattcacccccacttttaagttagtgtgacagagcttttctttctggagg

SEQ ID NO: 53827 - DNA, 600 bp, Chicken  19866894305695_1
tgcatgtatcatacataatgtgtaactgaaagagtttaatgctagtcagctgttagctggcgttcactaaagtgtttgcagcttccttttccccagagaaagaaactgtcactgtagctcttaagtgttatctcagaaaacaaggtgtgaaaatattgtatttaaacacaattttgatgaagctgaaatcttttgggcttggggcaagggaaggaagctttgtggcttgcacatattgtgcttcagttaagctaggtgggtaacaaacgtgacccatcataagagatgaggaggaagtamagccgctgtgttggcattgaactcatggcgagaaactgcaatgaggtgcaacaaagtcatatttgctatagatatggcttgtcagagatgcattactaattcatcagtagctgcgagctggttcttccccacactttaatgatttttaaggtttattttttgccagcattaagtyctagtgattgtgactccatgtcttgtgatgctctggcctgtcacaacacttctgcttagcaagctctgtggagtgctgattttgttcagttatttgagcattgataackatgtcatcattgtaat

SEQ ID NO: 53828 - DNA, 600 bp, Chicken  19866894305695_2
gatgaagctgaaatcttttgggcttggggcaagggaaggaagctttgtggcttgcacatattgtgcttcagttaagctaggtgggtaacaaacgtgacccatcataagagatgaggaggaagtamagccgctgtgttggcattgaactcatggcgagaaactgcaatgaggtgcaacaaagtcatatttgctatagatatggcttgtcagagatgcattactaattcatcagtagctgcgagctggttcttccccacactttaatgatttttaaggtttattttttgccagcattaagtyctagtgattgtgactccatgtcttgtgatgctctggcctgtcacaacacttctgcttagcaagctctgtggagtgctgattttgttcagttatttgagcattgataackatgtcatcattgtaatggctgcgtttgacttgaaggctcttcaccaaaacttgactgactccttccaagtttgcttggcagtatacggttcagttctggctgatgtggtactaatgcatcctgctgggttttgttgaagtgctggcattaggcagggtttgtaaagcacatattccttgtaggacagagct

SEQ ID NO: 53829 - DNA, 577 bp, Chicken  19866894305695_3
gatgaggaggaagtamagccgctgtgttggcattgaactcatggcgagaaactgcaatgaggtgcaacaaagtcatatttgctatagatatggcttgtcagagatgcattactaattcatcagtagctgcgagctggttcttccccacactttaatgatttttaaggtttattttttgccagcattaagtyctagtgattgtgactccatgtcttgtgatgctctggcctgtcacaacacttctgcttagcaagctctgtggagtgctgattttgttcagttatttgagcattgataackatgtcatcattgtaatggctgcgtttgacttgaaggctcttcaccaaaacttgactgactccttccaagtttgcttggcagtatacggttcagttctggctgatgtggtactaatgcatcctgctgggttttgttgaagtgctggcattaggcagggtttgtaaagcacatattccttgtaggacagagctgtacacagtaatgctgtgcattaagcacgagatgctgctgctgccctgtatgtgtggggctgtgtcggcactggggttcagggcgg

SEQ ID NO: 53830 - DNA, 600 bp, Chicken  19866894305710_1
tcttcatttgtttataatactcatagaattgagaatgtagttatagaggatgattgttgttttttacatacttcaagtattaaaatccaacaagttacagttatggagaataactttccatgtctaggttatttccataagaaaaaattattttgccaaagcaactagtcagtcagtataaggacaagccatttccagaggaaggccagaaaaacaatccaagggatggaacacctcccctttgacaacaggctgagagaactgggctgttcagcctggagaagaaaaggcattggggaraccaagtagcagcctttaagtattggtaggggggttataagaaagaaggggacagactccaatctataaagggggacagctttttaaaaatagggatgtcttttaattgattgcttgttttctacaattattgatcacagaacttcctttcccattcaagtagcttagtacccaagaggtagcttgctcaagttaactgatgaatgttaagttccttaaacttgccatgttatacacacatcaaagttttattgttacatggtcccatctagcagtctctaatcccctgctcttgtcaag

SEQ ID NO: 53831 - DNA, 600 bp, Chicken  19866894305711_1
atcaactgttgcatcagcatatagtacaacactatctccttctatccattagagagtttaagtagatatatatgtctttcaaatgcatacacaaacagacataatttattgtgtctttctttttccatttgatttgtaagaaattttgtgaaaaataccaggaagctgggtcaaggttggtgttctgtggaaagttacagacagagttagaaacgaaaagactggataatctacaagagggactgggttagtgactgcagtggtgaaccctgcaagttcactgtgcttttctttctacaygagtaaagctgtattataaacaatatagtttcttcagatgcaacagcaaagcttatctgaaggatcctgaagagattcagcagcctgttcagatatattgatgttagaaaaaacataagggtataaaagaatacaaaagaaaattgcacattttagctgttagacagacttaaagatagggaaaagttatgtctgtagcagtgaaattgtccagaaaattatttgccaagtcccttctgaaaccaccaaggtcacctgtgaggattggattatttgtcacaaactgtggccaaaaaaacc

SEQ ID NO: 53832 - DNA, 600 bp, Chicken  19866894305724_1
accttctcctcaacaacctctccccatttacaacattttactcatttggcctattgctttaccactgaacaaagtcatagtttgcctaaagcagcatttgacagcaaaattccactgtcaatattaaaaagtaaccatcctggttctcaaaacaagacaagaaatgcacccccagaataggctgcaacaaaaccaaggatctcgaatttgtcctcactggctgaggtcacctcatcactcagaagaactgcatcaaagtaaagacgaggggatgggaaataaagccacccacacccagtmacataaattgaatttcctctgtaatgctgttatgtgtttttctctcatagctcatacttttcatttatattcccttagctcccactggctgggcttttagtgtttctctcaccgaagggtctccaagctctctttcctttattctggactcttcctgttcccactgcacctcatgttctcctttcgtccagttctcttggccctgcttctccctctctcccccctctccccagtgtcagcttttctgttcctctggcacagcaccatggggtggaagctgaataataaacacgcataaaa

SEQ ID NO: 53833 - DNA, 599 bp, Chicken  19866894305727_1
  misc_feature (1)..(41): n is any nucleotide
nnnnnnnnnnnnnnnnnnnnnnnnnnnnnnnnnnnnnnnnntgggtgcacatccagcatgggtacaaatccagtgcaggtgcacatccagcacagatgtagtaagctctgtaatgagccccagggaggcagggagaaggccacccccgcggaaaggggattcatcagtgcgagctcattaaggaagtatggaaggatgtccctgggtgttcaggctcccagtggggaataaaggcatggcaaccagcaaatacatcctctgcgggatattcccacctattttgtaagaacataaggtcayggttcctttaatgttccattctcgcatccgttgtcaggaattaagaccttttcagttctgctacttactaatcacccagaggattatgccacacttttcactgcaacatctcaagacttctatgtatttcaaagctcttacaggtgcattaaaaaaaaggtcaagaaagacagccaccacagcaagcccatgcaggtttcttgctgctatcagagccgcttgagctggccaaaactacttttctttctttcccattacctgtcattcacttttaaacctgtggtcccagagtgagtgaa

SEQ ID NO: 53834 - DNA, 600 bp, Chicken  19866894305729_1
agtgcaaatgtggcaatggtttttaaaaaggccaacaggtcaaccagggaactacaactcttcagcttttcacctggaaaaatcccagagcaagacctcttggagcacatttcttggtgcttaatgggcaagctgatttggattagactgtggatttgtcaaggctaagaaatatttcatcaactcgattggttctctcccaaaccgtgattggatccgtagggaagggaaaagcagtggatgctgtttaccccaaagcccccaggggctgtaagaacacgcagccctcccctgcccatyccagaatcctgttccctcccccaggatatcactggtacccttgcctccccccacaacacttccccagggttcccccccatctccatgtaacccataccctttgggaaacttcaggaagccaagacctctgaggaccctccacagactaacctcccatcttaccccaaaaccttgacactccagggctctcctcttccctcatgatcccccatgaactccaagatggctgttgatcccaagacccaatgaacataggcagccagagcccttgtgccctcccctgaccactccccagtggac

SEQ ID NO: 53835 - DNA, 599 bp, Chicken  19866894305733_1
  misc_feature (1)..(80): n is any nucleotide
nnnnnnnnnnnnnnnnnnnnnnnnnnnnnnnnnnnnnnnnnnnnnnnnnnnnnnnnnnnnnnnnnnnnnnnnnnnnnnnntgctgttgggcagcagtttttcccttccttcaatctgtgctcccacagctcagctctggcagcacccggtgccagctctgctctggcacgggtcattgctgggctctgtttgcaaaggccatctctgcagccccctgctaccaaaaccctgtcctgtaaacccgatacagctagagttgcagacagaagatagagaatcacagaatggtctgggctggargagtccttaaaaaccattcaatctcatcctccytctggaccaagttgcccagcaccccatcttggattggaactcttccaaagatgggacatccacagcttctgtgggcatcctgctccagtgcctcacagcctcaccrtgaagaatttcttcctgatatctaatgtaaatatatcctctttcagtttaaaaccactacaccttgtcctattgctacaggccatagtaaaaagtctctccctcaaagatatttctgtgtatgtcatwtgaatgtcatatagctgacataaagttgagaa

SEQ ID NO: 53836 - DNA, 599 bp, Chicken  19866894305733_2
  misc_feature (1)..(47): n is any nucleotide
nnnnnnnnnnnnnnnnnnnnnnnnnnnnnnnnnnnnnnnnnnnnnnntgctgttgggcagcagtttttcccttccttcaatctgtgctcccacagctcagctctggcagcacccggtgccagctctgctctggcacgggtcattgctgggctctgtttgcaaaggccatctctgcagccccctgctaccaaaaccctgtcctgtaaacccgatacagctagagttgcagacagaagatagagaatcacagaatggtctgggctggargagtccttaaaaaccattcaatctcatcctccytctggaccaagttgcccagcaccccatcttggattggaactcttccaaagatgggacatccacagcttctgtgggcatcctgctccagtgcctcacagcctcaccrtgaagaatttcttcctgatatctaatgtaaatatatcctctttcagtttaaaaccactacaccttgtcctattgctacaggccatagtaaaaagtctctccctcaaagatatttctgtgtatgtcatwtgaatgtcatatagctgacataaagttgagaagggttttgagaagtcatctacttagttacctta

SEQ ID NO: 53837 - DNA, 600 bp, Chicken  19866894305733_3
cagcacccggtgccagctctgctctggcacgggtcattgctgggctctgtttgcaaaggccatctctgcagccccctgctaccaaaaccctgtcctgtaaacccgatacagctagagttgcagacagaagatagagaatcacagaatggtctgggctggargagtccttaaaaaccattcaatctcatcctccytctggaccaagttgcccagcaccccatcttggattggaactcttccaaagatgggacatccacagcttctgtgggcatcctgctccagtgcctcacagcctcaccrtgaagaatttcttcctgatatctaatgtaaatatatcctctttcagtttaaaaccactacaccttgtcctattgctacaggccatagtaaaaagtctctccctcaaagatatttctgtgtatgtcatwtgaatgtcatatagctgacataaagttgagaagggttttgagaagtcatctacttagttaccttactcttaggcaagattaaatgtagtacccaggagagactggacaaatttctgttttcaagactgctggttttgaagacttcagcactcttgaattgtctgaaaatgtt

SEQ ID NO: 53838 - DNA, 600 bp, Chicken  19866894305733_4
agatagagaatcacagaatggtctgggctggargagtccttaaaaaccattcaatctcatcctccytctggaccaagttgcccagcaccccatcttggattggaactcttccaaagatgggacatccacagcttctgtgggcatcctgctccagtgcctcacagcctcaccrtgaagaatttcttcctgatatctaatgtaaatatatcctctttcagtttaaaaccactacaccttgtcctattgctacaggccatagtaaaaagtctctccctcaaagatatttctgtgtatgtcatwtgaatgtcatatagctgacataaagttgagaagggttttgagaagtcatctacttagttaccttactcttaggcaagattaaatgtagtacccaggagagactggacaaatttctgttttcaagactgctggttttgaagacttcagcactcttgaattgtctgaaaatgtttctcataacagttgccactgaagagtaggatgctgaggtattgcagtgctcttccagcacatcagtctattgctcaacagcaatcagaaagatagtgcaaaacgtaagcaaaacaggaaatgtgagtt

SEQ ID NO: 53839 - DNA, 600 bp, Chicken  19866894305735_1
cagccggagtgatttgtcttcatcttgaagccattaaatgtaaactagcacttctctttggatttgtatactgccttctttgcccattactgttatttgttaagggagacattttttgccactcttgaaatcaattttctttcccagccccaatctttgctgcattttttggatttgtgacaaatgcccttttgttcttctaattaaatttcacatctgttccacactagttcatcttactcttgagagaggacagtctcactagggcacattaaaaatttcagtcattttgcagaaaamtaaatgtgagtacacactacaatttacctaaccactgtgaattaatttggtgtttaaggtgacactgtactaattacatattagcacattaatggagctgcaggctctaatcatttccctttgaatgaacagtgcaaacttccagcaaagtcttcaagaactgttttgaaatgcaagaaagcaataatcaattctcttgttgctgcaacttcaatataaagtgaggaattgtcttactttatgtttaagaacatcaatctctgtttattattagcaagacatttttgaccagcatgaaca

SEQ ID NO: 53840 - DNA, 420 bp, Chicken  19866894305743_1
gctaatgggccagtaaaggtcacatgttgaaatccaggaaccagaaacaccttttccccccctttgttcatactgttcaacacatttactcattcagcaatcataaacttagcctgtgttcatcattttctggtaacagagaagatcttgctaaaactgaaacaaacctctgtctctgttcatctccttccttctcccagacaggattttatttcttttctcaggtcactcttctctcacatttttaaatgttgactttactgcaatgctctcacagtgattattcagtgattacattayaggtaggtatttataatctcacataaaaaggaattgtgtagcaattcttctgttctgcttaaaattcacatgtaatgttgcatcctggagagaactctttgctcattttttgctgtaata

SEQ ID NO: 53841 - DNA, 600 bp, Chicken  19866894305754_1
aagtaacgtggagtgaaacatgccctgtccatgggtaacacacacaaagtgcagctggaggcctctagtgctgcctccagacattcagagagagatgctgttctgtatctccaagcccagacctgcaccctcccagcacgcagtacgtgcagtatccaagtgcagtggaaaacaaccacggctcatcttccagccgctcgagaacaagcaaccaatttctgaagtcattataaattcatttggcagagggctgtcaaacacttcatgcatgcagagagacagatttcaaacaagaactcyaaaaaaaaaagaaaaaaaggcaagttttcctgtagggctgatatttcaggagtgctcggtaccatgccacctgctgctagtacaaggagccacagacatagcatgctctcctggaaaagaaaagaacctttaaagaacaaattgctacacgttaaatatagcagaaagcacacattatggggcaaaggtaggccaaggagggggaaaacagcacaaaacaacaaaggtggatggaaatacgtgccgttggtccccatccaaagggcacagacagcagccatagtaaaaacctttcctaag

SEQ ID NO: 53842 - DNA, 600 bp, Chicken  19866894305754_2; identical to SEQ ID NO: 53841

SEQ ID NO: 53843 - DNA, 600 bp, Chicken  19866894305754_3; identical to SEQ ID NO: 53841

SEQ ID NO: 53844 - DNA, 600 bp, Chicken  19866894305754_4
agtaacgtggagtgaaacatgccctgtccatgggtaacacacacaaagtgcagctggaggcctctagtgctgcctccagacattcagagagagatgctgttctgtatctccaagcccagacctgcaccctcccagcacgcagtacgtgcagtatccaagtgcagtggaaaacaaccacggctcatcttccagccgctcgagaacaagcaaccaatttctgaagtcattataaattcatttggcagagggctgtcaaacacttcatgcatgcagagagacagatttcaaacaagaactcayaaaaaaaaagaaaaaaaggcaagttttcctgtagggctgatatttcaggagtgctcggtaccatgccacctgctgctagtacaaggagccacagacatagcatgctctcctggaaaagaaaagaacctttaaagaacaaattgctacacgttaaatatagcagaaagcacacattatggggcaaaggtaggccaaggagggggaaaacagcacaaaacaacaaaggtggatggaaatacgtgccgttggtccccatccaaagggcacagacagcagccatagtaaaaacctttcctaagg

SEQ ID NO: 53845 - DNA, 599 bp, Chicken  19866894305757_1
  misc_feature (1)..(194): n is any nucleotide
nnnnnnnnnnnnnnnnnnnnnnnnnnnnnnnnnnnnnnnnnnnnnnnnnnnnnnnnnnnnnnnnnnnnnnnnnnnnnnnnnnnnnnnnnnnnnnnnnnnnnnnnnnnnnnnnnnnnnnnnnnnnnnnnnnnnnnnnnnnnnnnnnnnnnnnnnnnnnnnnnnnnnnnnnnnnnnnnnnnnnnnnnnnnnnnnnncaaaccaacaatgcaggagttatcctcttaatttcagttcatagtagtgcttcagaatagaaggctctctaagtgcttgttctctggctgtctatgaagacctggraactctggataggcctaagtacaaagattagatgcaagcttcttcagcacttgaagatgtttggattaaccacttctatttatgcctttatattatgttcatcgaatcatagaatggcttaggttgaaagggatcttaaatgctatacagttccaaccccttgccatgggcaggattgccagtgtctggatttggatgctcagggtcccatccaacctggccttgaacaactccatggatgggacatccccagcttctttgagtaaccttttccaatgcctcaccaccctgtgagttaa

SEQ ID NO: 53846 - DNA, 599 bp, Chicken  19866894305762_1
  misc_feature (1)..(34): n is any nucleotide
nnnnnnnnnnnnnnnnnnnnnnnnnnnnnnnnnnagaaagtacatcaacacacgaaaacattcttcctacgaataactcttaacctcagtggcttcaggtaattttcagagaaagtttttgtgtcatttttatacaacagcatgacacgatcttccctttctcgtctcacctctgtaaatagctaagtattaatgagctcctctgaagctatctggctcaaatacgtccgtttctcaagtgcccatatctcacagagataaggatttaaagccacccgtaatctgatccaacactttttygagatgtcatcacagcagcagtacgtgtggcccgatcaatttctcagtacatcagaaatgtttcaccattagatacttcaggagaattaatcaatagcatagcatacttattgactggctatatcctaaatacgaaggagtgaaaattcaattagggattctacttcaaactaaccttgatgacttctgtaaatacagcccaacagttgacttagactgataaattggtatccagtacataagatacatttgtcacaggttgtcttaagaccaaaaaaaaaacccccaaaaaacaacac

SEQ ID NO: 53847 - DNA, 600 bp, Chicken  19866894305764_1
aatatggccaattttatacagagtcttaggcctcataatattcagtcagacttgcatatatgctaatagttaacagtgtgttgaagttctgtgttgcacagaagattgcttgtataataaaaaaatcttaatcactggcaaaagaaatcctacaatgaccacaagagaaaagaatctactcaagagcgccacctatctaagatattttgtagaatcacaggcacgggaaatacactaaatacttgtttatctttggccaagcaaggtcctggaacatctgagacagtgtgcccagtatgyctacacagcagacttaagcacattgcagatatacccaaactaagttgtactagctacaccgcagccatataaaaatgaaattcagcatgagatttgctaagtcctatattcactacaatactgacaccagaaaggctgattcaagcctgctttgcaatctttctaacactgacagtgacagagcagtcagacttgaagttatatctacttttctaatcctgtctttggctggtgttactcaaactaactgcagacctgcagaaaaaaacctagccacagccatatcttatcaaatcagct

SEQ ID NO: 53848 - DNA, 600 bp, Chicken  19866894305765_1
tcaaaccccagtgtgagctttcatgatggcagaaaaatccttagaaagtataactagagtacagtgatggccacctgaaataaatcctatgagatacccagactggtgatggcaattacggtcattgagacaacaggctgtgccaaggcttcaccagtggatgatgccacaggactcagatgtggtggagatactcccactactgtctgaagtgagacctgaaaggagcaatcccagagaagaaaggaaacaaatagaatgatgcttctacgttgtttctggcgtgtctgaaagtctaartggggcctatgaatccaagtgttttgcaagcctctggtggagtgctgtgcacttcagattccttaccagttgtacttagcttgcattacataaaccctggcttgaaaacacatttttctggatgctgactgtcgaaacctgtatgactgcttacaactcttcccatgtctcttattgacatagtgagtctacgccttctcctggggctgtcttttcccttgaatcccagagaacccagtcacgatgtacagaatttgcacagaattcatcagttccacttgacatgaagataacacatag

SEQ ID NO: 53849 - DNA, 599 bp, Chicken  19866894305766_1
  misc_feature (1)..(155): n is any nucleotide
nnnnnnnnnnnnnnnnnnnnnnnnnnnnnnnnnnnnnnnnnnnnnnnnnnnnnnnnnnnnnnnnnnnnnnnnnnnnnnnnnnnnnnnnnnnnnnnnnnnnnnnnnnnnnnnnnnnnnnnnnnnnnnnnnnnnnnnnnnnnnnnnnnnnnnnnnnnttttgtgctaatttttgctgcttttgcattcctagcttcttgtaatgccaaaaatttcccagttccatgagacgaggagccaggatgcgactgactcagactgctctcctgaagctgtgctgatttacaccaacccaggggaacrccgctataattctcctctcctttgagtgagtagccacagtgacaacagactgaatagatgacaaaataaaacagctcgtgaatctagaacatgcagctggaatttccccagcggagtcacagtgtgaaacatccaaaacaggcccatgaaatatgaattaatgtaaggacaaggttttaatcgcagttacacaactttaaagctgcagtaattccacagagctcagcctggtgactctggatttttgctcatgtggcagatgcctctcgtatacaaagaacagacactggtctcatttt

SEQ ID NO: 53850 - DNA, 600 bp, Chicken  19866894305766_2
cccatgaaatatgaattaatgtaaggacaaggttttaatcgcagttacacaactttaaagctgcagtaattccacagagctcagcctggtgactctggatttttgctcatgtggcagatgcctctcgtatacaaagaacagacactggtctcattttgctggtgtgaattctgcagtgaagtcagtagtgtagcaaaaatattaaagacaaataagagagtaaagacatctttcatgggttgagtgacttgctggtgtgactggtcagctctgttcctcttcatagaatcatagtatcayagaatcattgaatggcttgggttggaagggacctcaaggatcatcaggctcctaacccccaccacaggcasggccaccaacgtccaccttcctcctctggaggctatggccctaccagcaaggttattgcacrgtctctgctctgaatattcagtgatgtcgttgttgtgctgcaaatcagaagtaaataatatgacaatgaaaatcaggacagtcagttctcatctgcccctaatttacaaagggctgtgtctagtggagtagagcagaatgacctcctgctgagcactgcagatgttt

SEQ ID NO: 53851 - DNA, 600 bp, Chicken  19866894305766_3
ccacagagctcagcctggtgactctggatttttgctcatgtggcagatgcctctcgtatacaaagaacagacactggtctcattttgctggtgtgaattctgcagtgaagtcagtagtgtagcaaaaatattaaagacaaataagagagtaaagacatctttcatgggttgagtgacttgctggtgtgactggtcagctctgttcctcttcatagaatcatagtatcayagaatcattgaatggcttgggttggaagggacctcaaggatcatcaggctcctaacccccaccacaggcasggccaccaacgtccaccttcctcctctggaggctatggccctaccagcaaggttattgcacrgtctctgctctgaatattcagtgatgtcgttgttgtgctgcaaatcagaagtaaataatatgacaatgaaaatcaggacagtcagttctcatctgcccctaatttacaaagggctgtgtctagtggagtagagcagaatgacctcctgctgagcactgcagatgtttggctgctctaagagcacagtgagctacgttcagcagcaggaaaatcatgcagtgagtgtgtctgtcacatc

SEQ ID NO: 53852 - DNA, 600 bp, Chicken  19866894305766_4
aagaacagacactggtctcattttgctggtgtgaattctgcagtgaagtcagtagtgtagcaaaaatattaaagacaaataagagagtaaagacatctttcatgggttgagtgacttgctggtgtgactggtcagctctgttcctcttcatagaatcatagtatcayagaatcattgaatggcttgggttggaagggacctcaaggatcatcaggctcctaacccccaccacaggcasggccaccaacgtccaccttcctcctctggaggctatggccctaccagcaaggttattgcacrgtctctgctctgaatattcagtgatgtcgttgttgtgctgcaaatcagaagtaaataatatgacaatgaaaatcaggacagtcagttctcatctgcccctaatttacaaagggctgtgtctagtggagtagagcagaatgacctcctgctgagcactgcagatgtttggctgctctaagagcacagtgagctacgttcagcagcaggaaaatcatgcagtgagtgtgtctgtcacatcctgctctttgcagcacaagagccaactctcatcagtcacgtggagctcacagaccatgagcc

SEQ ID NO: 53853 - DNA, 600 bp, Chicken  19866894305772_1
agtcaactgctacaagtctgtatgaaagtgctttttcattcaagtatctgctataccgcctaatgaaggtagacatatcatagcctaaaagttaagtgtttgtaggttagatattttgaagtactacaatttcctccaagttcttttcaagaactattctcctactagcccattttacatcaacttgctgaagaacagtgcttcacagacacattccagggtctggagattcactattttcctctttgacatgcagaattacaacttcttcccagcttgctaagattaggaatgcactcsttgcaatcatgacaataaacgcctaccacacaaagaagtaggcaaaaaccaagcagctctcattacaatgttctaatctgaaatcggactgaaaacatactcctagtagaacaatgaggcctctggtaatttatctcactatccatgcagtatgttccacacaccttaacagttcagatttacttctgagatactgaagtgcaaagttcaaaagagatcagtgtgttgatattcatcaggtctactctacgtagtactagtttactatttcaaacttacagctctgtaaggacaatacat

SEQ ID NO: 53854 - DNA, 600 bp, Chicken  19866894305772_2
aaaacatactcctagtagaacaatgaggcctctggtaatttatctcactatccatgcagtatgttccacacaccttaacagttcagatttacttctgagatactgaagtgcaaagttcaaaagagatcagtgtgttgatattcatcaggtctactctacgtagtactagtttactatttcaaacttacagctctgtaaggacaatacatacattacaggcaaacttttagtacacatttagttaactcaatttcaccttcttgggatacatgcttggtcagatattccttggtgcttcaygcaatacaagtcataatactcttacttaaatgtcacttgtctcccagagtacaccaacacacgtaccaatcacagagcaagaaagcaattaaagattcttaccctgcatggcacttttgtccaggtagttatttaaattgaacaatgtgtttcgggatgcaagatactggataaagcgctgttggtgaaaaaaagtggagtcaattttttgttgcaacagtcaaaacattcaggcatactgcaagaaaaygacatttaaactcataattgattatagtaacctccaacaacaggtattag

SEQ ID NO: 53855 - DNA, 600 bp, Chicken  19866894305772_3
tttcaccttcttgggatacatgcttggtcagatattccttggtgcttcaygcaatacaagtcataatactcttacttaaatgtcacttgtctcccagagtacaccaacacacgtaccaatcacagagcaagaaagcaattaaagattcttaccctgcatggcacttttgtccaggtagttatttaaattgaacaatgtgtttcgggatgcaagatactggataaagcgctgttggtgaaaaaaagtggagtcaattttttgttgcaacagtcaaaacattcaggcatactgcaagaaaaygacatttaaactcataattgattatagtaacctccaacaacaggtattagttcaagagtcaaaaaaccttgaaactactgatcagcaaaatttctaacatacaaaatagtgtatttggtaaaagcatgactttaaagaaaatgacatggctgcccaggcagaagactagtaatcctagagggagtgggctaggttaacttcgtaggtttagaacagccaagctagaaaatgaaaaatgagagctccacctaagttatgagttcccacacttctactacagctgtacaagtcagagacagg

SEQ ID NO: 53856 - DNA, 600 bp, Chicken  19866894305774_1
ctctcccgggtcagtgctggctctttgtatctgtaccaaaaacgtgattcttctgcaaacagtcatttcacaaaccatcgcaaacatttcattgggaaatttacaacctcttgtgatccccagcccagccccatcgagccgtaggggtgtccatcagccccagctgggctgctgggaactctgctcagctggaaaccaaggttttggctggggagaatggagaaggggtggtttgcagtactttcctttgatccccacagtctcgggtgctcttgctgcaaaatgagctgcttttgatgsgcgccccttgcacccacctcacttctttctcttttcacggttgggtagatgaacctactaagactgataaggaatgagaaagagaactgcacccgctggttctcttttagcactgtacccacagtgcgccattagctgcctccaatacttctaactggctgctctagcttttgactgtgcatcacgattacctataaaatattttgatattctgatctgggctgcatttgaaaagtgaatcccattcactctggaacacgccgcacttactaatgcattgcacatgttttggtacaagca

SEQ ID NO: 53857 - DNA, 600 bp, Chicken  19866894305777_1
agaggaaaggccatatgccccacagagcacgagatataagtgctgctcagctgggtccttcttctcactgcaaccaccaggaacagcggaggacttcttcctcctaaatcagcccaaggcaatagctgcaagacaccatgcttgcaaacacaaaatatgcctctattcagttgggaaaaacagcctgcctggcacgaacaggcaacttagcaataacaagcagtgagccagcagcacggcagataggcagctggtccaaaatcccagcgtgggtcttgcaaaagcggtgggcattctgcragagggtttttccaagccagctcccacctccgagagacacagagcagcgtgggcgtgtgcaggtattccccagtgcgggttggtgcagccgaatacagggacctcgaaaacatgtttggacaagactccaaagaatccgagtgtcagtacttaaagtccccaggcaggagtggctgataatccccttcctgggtcacagcagagccggccgggctccaggccctgacactggcagctcgggaacaggctcacatttctgtatttgtcgatctgccgtcctttcttggctgccctgcaaac

SEQ ID NO: 53858 - DNA, 600 bp, Chicken  19866894305784_1
ttttgattgccccaagtgacatttttgaatgcctttcgttgctttgtttcagagcacctcgttatgttagctgatctgaaaatctagctggaaagttgttccgacttagaaagaaatcaacaattgcacgcgcacacatttggctgcacagtgagatctatttttagaaaagggttctgttctgttttcacttaattttagtagtcttttacattcatttgaggcatcctaatgacttctgggatcttatccagtccttcctaataaataagcgtgtgagtcctgtggatcaaatttcamaatcggttgtgtaggggaaagtcccacttatctgccagataacttcaggtattccagtaattcctggtgtgtgttcaaagtactgcctctgcatgtctggtctgtgctgcagccgtgtctttgtgattgggaaggcgaagcagcctgtgagaggttactgccacataaatgtaacattgaaaagtgattgccaccccatgtagattagtattctggtgattgctatatttttttctttatgatcttgtgttagtctagggttggtggttacatttgggttttacttctgttgtgcgtttg

SEQ ID NO: 53859 - DNA, 599 bp, Chicken  19866894305795_1
  misc_feature (1)..(203): n is any nucleotide
nnnnnnnnnnnnnnnnnnnnnnnnnnnnnnnnnnnnnnnnnnnnnnnnnnnnnnnnnnnnnnnnnnnnnnnnnnnnnnnnnnnnnnnnnnnnnnnnnnnnnnnnnnnnnnnnnnnnnnnnnnnnnnnnnnnnnnnnnnnnnnnnnnnnnnnnnnnnnnnnnnnnnnnnnnnnnnnnnnnnnnnnnnnnnnnnnnnnnnnnnnnctttttggctgagtgatgagttggagaagtggatgagaagtcgtgaactttccccacccaaatggttaaacttttcaagctattttcctgggatttygttgtgatgaagatccaaatcataatcagtcagcggaaagtttagagcgtcttcaaaagaaatgtgaatgaaattttgcacctacgtaagtgtaagtagcattctgggagtcattactcgcgcatttgcataccagtcattgcagctggatggaagtgccaggcttgacgtgcccaaaactgaaagctgccactgaatcttgtcgtgtttgagccaatcctgaaagacaacgagcactgggagaaatggctttacctttaccaggtatatgactgttatattgaaacacttttatttga

SEQ ID NO: 53860 - DNA, 599 bp, Chicken  19866894305797_1
  misc_feature (1)..(249): n is any nucleotide
nnnnnnnnnnnnnnnnnnnnnnnnnnnnnnnnnnnnnnnnnnnnnnnnnnnnnnnnnnnnnnnnnnnnnnnnnnnnnnnnnnnnnnnnnnnnnnnnnnnnnnnnnnnnnnnnnnnnnnnnnnnnnnnnnnnnnnnnnnnnnnnnnnnnnnnnnnnnnnnnnnnnnnnnnnnnnnnnnnnnnnnnnnnnnnnnnnnnnnnnnnnnnnnnnnnnnnnnnnnnnnnnnnnnnnnnnnnnnnnnnnnnnnnnnctgccttgatttttcgataccggttaattgatagaaaattctatacccagyttatgtcttgtacttttgaaagygacccatcacaggatggcctggattggaagggacctgaaagatcatctagctccaactccttgctgtgggcagggttgctgaccagtacatcaggcactagatcagatatgaactctgattgcttattttgaacagaaacgttatgaaactattgcttcctttgaacattcactacacattgtcatagctgtaagaaacccgcaacgagtgtgaattactgtacagtgaaacttcaagataaatgcttcaaaaakaaagcactgtttctgcagaag

SEQ ID NO: 53861 - DNA, 599 bp, Chicken  19866894305797_2
  misc_feature (1)..(226): n is any nucleotide
nnnnnnnnnnnnnnnnnnnnnnnnnnnnnnnnnnnnnnnnnnnnnnnnnnnnnnnnnnnnnnnnnnnnnnnnnnnnnnnnnnnnnnnnnnnnnnnnnnnnnnnnnnnnnnnnnnnnnnnnnnnnnnnnnnnnnnnnnnnnnnnnnnnnnnnnnnnnnnnnnnnnnnnnnnnnnnnnnnnnnnnnnnnnnnnnnnnnnnnnnnnnnnnnnnnnnnnnnnnnnnnnnnctgccttgatttttcgataccggttaattgatagaaaattctatacccagyttatgtcttgtacttttgaaagygacccatcacaggatggcctggattggaagggacctgaaagatcatctagctccaactccttgctgtgggcagggttgctgaccagtacatcaggcactagatcagatatgaactctgattgcttattttgaacagaaacgttatgaaactattgcttcctttgaacattcactacacattgtcatagctgtaagaaacccgcaacgagtgtgaattactgtacagtgaaacttcaagataaatgcttcaaaaakaaagcactgtttctgcagaaggatctctggaaacttctacagat

SEQ ID NO: 53862 - DNA, 600 bp, Chicken  19866894305797_3
gatagaaaattctatacccagyttatgtcttgtacttttgaaagygacccatcacaggatggcctggattggaagggacctgaaagatcatctagctccaactccttgctgtgggcagggttgctgaccagtacatcaggcactagatcagatatgaactctgattgcttattttgaacagaaacgttatgaaactattgcttcctttgaacattcactacacattgtcatagctgtaagaaacccgcaacgagtgtgaattactgtacagtgaaacttcaagataaatgcttcaaaaakaaagcactgtttctgcagaaggatctctggaaacttctacagattgctctcacgtaggtcttcagtgcagaaataaggtatgaacttgcatgagcttcaaggactgtgttttgtctttcagaaaaattatcaggtgtgactgtgttctgatcgaatacaagtgtcttaacagggcttctcagagagaacaactggccatgtaatccttctaaacagatatctctgaagagaggaatcctccttggcctaaacaccagcttaatgctcacagttactatgaacagtaaaaaaaattatgca

SEQ ID NO: 53863 - DNA, 600 bp, Chicken  19866894305800_1
aatcctcagaaatgcttggagggaagagcttgcctgctgtactgtggaatacagaaatctttgtgaccactgactagtactatgaaacctgaaacttcattaaggttagtcatacgtctgcaaatttctaaacccaatgagaacaatgtagttagtatctctatgagtgttcttggaggaatattacaggcaggatctgaagatacattcaagttcttagtctcagaaacttgaaacttttttagttttttgggttatttttcttcctcgttacctgctttgtgggttaaagtaggctgraatacttaaactcctggttttattctcagaatgtcattttaggtatttaatgtcragaaagcacttaattgtagaaggccaacaaatttgcatggccatagtatatgttctgtatgaaaatgtcttttgtaacaatagagcaaagcagttctctgagttcagggagtaaagttcctgctttccaagcaatgattttctgcactctgctgtattctaaggcacacacacaggaaaaaaaagaaacagttcttggatactttcagggatttgtgttgccctactgcttcagctctaagagct

SEQ ID NO: 53864 - DNA, 594 bp, Chicken  19866894305800_2
aatctttgtgaccactgactagtactatgaaacctgaaacttcattaaggttagtcatacgtctgcaaatttctaaacccaatgagaacaatgtagttagtatctctatgagtgttcttggaggaatattacaggcaggatctgaagatacattcaagttcttagtctcagaaacttgaaacttttttagttttttgggttatttttcttcctcgttacctgctttgtgggttaaagtaggctgraatacttaaactcctggttttattctcagaatgtcattttaggtatttaatgtcragaaagcacttaattgtagaaggccaacaaatttgcatggccatagtatatgttctgtatgaaaatgtcttttgtaacaatagagcaaagcagttctctgagttcagggagtaaagttcctgctttccaagcaatgattttctgcactctgctgtattctaaggcacacacacaggaaaaaaaagaaacagttcttggatactttcagggatttgtgttgccctactgcttcagctctaagagcttcgaagaccttgttttgtggaagggagttgggtgtggagaaacaagaat

SEQ ID NO: 53865 - DNA, 446 bp, Chicken  19866894305804_1
agaaaggccgatttaatattctttctgttcattgttttggtggcacctgactgatgtgcttctggaacaaatatgtatacatacttggaataaactgatgaccaggttagaaatgtgtattgcatactgatatagaacgtaaagaaatattaaaaagaaaataaaaacttttgtttgggagaatcttgtttaaaacagagtaggctgtacaactggctgtgtctttgttttctagcaccaaaaggtcggaccattccaacacaagactggcaattcagattgaaaaagatgcaggtatgrcttgggaacttgggtgatttgttttgcttgatttgcaaaatgtggtgtgtttactccattaaggctttagctgttagagagattcaaagggattaaatgttacaggagcaaacaagagtgttttaaatgtaacagagcacctgttt

SEQ ID NO: 53866 - DNA, 599 bp, Chicken  19866894305809_1
  misc_feature (1)..(119): n is any nucleotide
nnnnnnnnnnnnnnnnnnnnnnnnnnnnnnnnnnnnnnnnnnnnnnnnnnnnnnnnnnnnnnnnnnnnnnnnnnnnnnnnnnnnnnnnnnnnnnnnnnnnnnnnnnnnnnnnnnnnnnnctgtgggcgcctcatccctggcagtgctctaggcttccaccaagacattgcaaatttaaaatgaggactcaaaaaatggctcaccttcagccaaaaaaaaacattattgtgagcgtgaatttgttcttcagaaccaaaccaatgtgtatcctcagccatcaatgactgtgatgaaatactrtgtcatgggctcatgcaaatgacctttaagggtcccttccaactcaaacgattctaaatgggaacaactgcccaagtttattttcccttgaaagcagtggcaagccgaatcccaaaaggagctttatctcctccctgcagtacaggtatctatgggaatgagggctcagctcaaggacacatctcctgtagatccaaagttgtagcttctagcytgcacttgtctcaggcacccatggacagccacatggcatgacgagtaggtaatggagtggaatccccagcaaaccttgccccagg

SEQ ID NO: 53867 - DNA, 600 bp, Chicken  19866894305809_2
aaaaaacattattgtgagcgtgaatttgttcttcagaaccaaaccaatgtgtatcctcagccatcaatgactgtgatgaaatactrtgtcatgggctcatgcaaatgacctttaagggtcccttccaactcaaacgattctaaatgggaacaactgcccaagtttattttcccttgaaagcagtggcaagccgaatcccaaaaggagctttatctcctccctgcagtacaggtatctatgggaatgagggctcagctcaaggacacatctcctgtagatccaaagttgtagcttctagcytgcacttgtctcaggcacccatggacagccacatggcatgacgagtaggtaatggagtggaatccccagcaaaccttgccccagggccatattgtttgggctcagaaamtggagaattggctgaaggatgggctgggaaggctgaaattccttgaggcagaagacaaccaggagcccaaaggagacaatggtagtagagccctagtccaacgctacaggctgcctaatgacggaggaaggaatttgttttggatctgagcaccagtgtctggaatcagcctgaaaaagacttctccaaga

SEQ ID NO: 53868 - DNA, 600 bp, Chicken  19866894305809_3
ctttaagggtcccttccaactcaaacgattctaaatgggaacaactgcccaagtttattttcccttgaaagcagtggcaagccgaatcccaaaaggagctttatctcctccctgcagtacaggtatctatgggaatgagggctcagctcaaggacacatctcctgtagatccaaagttgtagcttctagcytgcacttgtctcaggcacccatggacagccacatggcatgacgagtaggtaatggagtggaatccccagcaaaccttgccccagggccatattgtttgggctcagaaamtggagaattggctgaaggatgggctgggaaggctgaaattccttgaggcagaagacaaccaggagcccaaaggagacaatggtagtagagccctagtccaacgctacaggctgcctaatgacggaggaaggaatttgttttggatctgagcaccagtgtctggaatcagcctgaaaaagacttctccaagacagaaacataaaggggttagccagagattacgttcatacccacagcatttctccttctggctgagagatgcacataccagcacatcattgccaagacacagccatgggt

SEQ ID NO: 53869 - DNA, 599 bp, Chicken  19866894305812_1
  misc_feature (1)..(56): n is any nucleotide
nnnnnnnnnnnnnnnnnnnnnnnnnnnnnnnnnnnnnnnnnnnnnnnnnnnnnnnnattacaagctgattaaatttagagctgtgctgggtggtgaaatgaaaggtaaaatgagaccctttgagaagcgccgacgtgcggtgcgagggggtgtattatctgagaagtaagatggaaacataattaaccatccggcgttacgctgagagatggaaaattgaaatgggagacaaaattaggtgaaattgcagagcagactcatttatttccgtggtataaatcagcattacctgtcagcagygctgagccgctcggggcgatgctgctgrcacagagcatggctgtgtggcactgcagggtgggctgccccattgggcaccccctgcagcccggattggggggaaacccatctcggtgggcaccgcactgcccagcctggctctgatcctccaagctttgctgctcccactgctgcgtgcsctgctgctgtcaccgctgcgatccctcayggtgatgagtgctgcagcccgggttagggcaggagggacgtttttggtttagtggctttaggtttctgcctttcaggcttcatgggatttc

SEQ ID NO: 53870 - DNA, 599 bp, Chicken  19866894305812_2
  misc_feature (1)..(28): n is any nucleotide
nnnnnnnnnnnnnnnnnnnnnnnnnnnnattacaagctgattaaatttagagctgtgctgggtggtgaaatgaaaggtaaaatgagaccctttgagaagcgccgacgtgcggtgcgagggggtgtattatctgagaagtaagatggaaacataattaaccatccggcgttacgctgagagatggaaaattgaaatgggagacaaaattaggtgaaattgcagagcagactcatttatttccgtggtataaatcagcattacctgtcagcagygctgagccgctcggggcgatgctgctgrcacagagcatggctgtgtggcactgcagggtgggctgccccattgggcaccccctgcagcccggattggggggaaacccatctcggtgggcaccgcactgcccagcctggctctgatcctccaagctttgctgctcccactgctgcgtgcsctgctgctgtcaccgctgcgatccctcayggtgatgagtgctgcagcccgggttagggcaggagggacgtttttggtttagtggctttaggtttctgcctttcaggcttcatgggatttctttcccttgtagcaggataagagaagcg

SEQ ID NO: 53871 - DNA, 600 bp, Chicken  19866894305812_3
aatgaaaggtaaaatgagaccctttgagaagcgccgacgtgcggtgcgagggggtgtattatctgagaagtaagatggaaacataattaaccatccggcgttacgctgagagatggaaaattgaaatgggagacaaaattaggtgaaattgcagagcagactcatttatttccgtggtataaatcagcattacctgtcagcagygctgagccgctcggggcgatgctgctgrcacagagcatggctgtgtggcactgcagggtgggctgccccattgggcaccccctgcagcccggattrgggggaaacccatctcggtgggcaccgcactgcccagcctggctctgatcctccaagctttgctgctcccactgctgcgtgcsctgctgctgtcaccgctgcgatccctcayggtgatgagtgctgcagcccgggttagggcaggagggacgtttttggtttagtggctttaggtttctgcctttcaggcttcatgggatttctttcccttgtagcaggataagagaagcgacccctgccaccttcgccctgctgctgtatctcggtttgctcctgtcagcccgtttggtttagagctgc

SEQ ID NO: 53872 - DNA, 600 bp, Chicken  19866894305812_4
taattaaccatccggcgttacgctgagagatggaaaattgaaatgggagacaaaattaggtgaaattgcagagcagactcatttatttccgtggtataaatcagcattacctgtcagcagygctgagccgctcggggcgatgctgctgrcacagagcatggctgtgtggcactgcagggtgggctgccccattgggcaccccctgcagcccggattggggggaaacccatctcggtgggcaccgcactgcccagcctggctctgatcctccaagctttgctgctcccactgctgcgtgcsctgctgctgtcaccgctgcgatccctcayggtgatgagtgctgcagcccgggttagggcaggagggacgtttttggtttagtggctttaggtttctgcctttcaggcttcatgggatttctttcccttgtagcaggataagagaagcgacccctgccaccttcgccctgctgctgtatctcggtttgctcctgtcagcccgtttggtttagagctgctttgacagtgagcgaggaaaaggtgtgtctcttccagaagccacagagggaaggcgcgccgtgcagctgcagggcctcattta

SEQ ID NO: 53873 - DNA, 600 bp, Chicken  19866894305812_5
atggaaaattgaaatgggagacaaaattaggtgaaattgcagagcagactcatttatttccgtggtataaatcagcattacctgtcagcagygctgagccgctcggggcgatgctgctgrcacagagcatggctgtgtggcactgcagggtgggctgccccattgggcaccccctgcagcccggattggggggaaacccatctcggtgggcaccgcactgcccagcctggctctgatcctccaagctttgctgctcccactgctgcgtgcsctgctgctgtcaccgctgcgatccctcayggtgatgagtgctgcagcccgggttagggcaggagggacgtttttggtttagtggctttaggtttctgcctttcaggcttcatgggatttctttcccttgtagcaggataagagaagcgacccctgccaccttcgccctgctgctgtatctcggtttgctcctgtcagcccgtttggtttagagctgctttgacagtgagcgaggaaaaggtgtgtctcttccagaagccacagagggaaggcgcgccgtgcagctgcagggcctcatttaggaacacagagcccagtgggacggctggg

SEQ ID NO: 53874 - DNA, 600 bp, Chicken  19866894305817_1
agtgaagcatccctctttgagcacgcaccttcatgccagctgcagctgccggcccgctggggtccacagcctgaatgtggcatggcttgctgccccgcaccacgaagccccagccaactgcatcgccaacgatcttgaaagagaaaagaaggaggtgagcactactagcactgtgatacatctaaattcaggacaactccttttcactggccactgtatgataatatttcatcaaagactgtgtacggtctcttatataagatatgggaaaggcactatgctttttgctttcaatgaacwtttcctytgttgaactaggaggctgcaaaatgcaatgctttccaatgactgactacatacaaaactatctttttgcaaagactttctctaatactgaaccaaaattcctttcccaccacagtctaagaaaaaatacatctgagtagaaaacttcactttgggtagttaatccacacctagagtggatgtagtaccaggagcacaaagtttagatgagtttgcataatacaaatgttagtgtctttatgtagtttcacaacccatttaagtcagcagtactgcagtgacataaagacagga

SEQ ID NO: 53875 - DNA, 600 bp, Chicken  19866894305817_2
catccctctttgagcacgcaccttcatgccagctgcagctgccggcccgctggggtccacagcctgaatgtggcatggcttgctgccccgcaccacgaagccccagccaactgcatcgccaacgatcttgaaagagaaaagaaggaggtgagcactactagcactgtgatacatctaaattcaggacaactccttttcactggccactgtatgataatatttcatcaaagactgtgtacggtctcttatataagatatgggaaaggcactatgctttttgctttcaatgaacwtttcctytgttgaactaggaggctgcaaaatgcaatgctttccaatgactgactacatacaaaactatctttttgcaaagactttctctaatactgaaccaaaattcctttcccaccacagtctaagaaaaaatacatctgagtagaaaacttcactttgggtagttaatccacacctagagtggatgtagtaccaggagcacaaagtttagatgagtttgcataatacaaatgttagtgtctttatgtagtttcacaacccatttaagtcagcagtactgcagtgacataaagacaggataaacaa

SEQ ID NO: 53876 - DNA, 600 bp, Chicken  19866894305826_1
ccatcactccacaaaataaatgccttctatcctaaaaagcagtgaaactggcattatttatgctgattgcaaggctgtcccataaatctcagtgatgctggaactgtgcagtacagtgaagcatttatgccagcagtgagagaatgtgcagagttactgaaagtaatatttgggacttaaaatttgaccacttaggacaaccaacaaaactgtaatggcaaataattgggaagaatccaagtacagaaaccaaaggagactggtgagtgagcagtggatacccaaatgaagacgtatgtygttgaaactcagaaaatggtaggcaagagtcaatcagaaaatctggatacagaacacagctctycaaacaaatatgcaagtcctttcctcaggatgaacaatactgtttcaggttaaactctaactcagtatatggcatgcagactttgagctgtacttgcaataccaccatccatgagcctcaataaatgccgaaacagaaagctgagaaatgagatcaatgctgcagaatgacaaacctctacaaaatgaaaaaacaacatcaaataaagattaatataacatgaagtgaggggcagt

SEQ ID NO: 53877 - DNA, 600 bp, Chicken  19866894305826_2
gattgcaaggctgtcccataaatctcagtgatgctggaactgtgcagtacagtgaagcatttatgccagcagtgagagaatgtgcagagttactgaaagtaatatttgggacttaaaatttgaccacttaggacaaccaacaaaactgtaatggcaaataattgggaagaatccaagtacagaaaccaaaggagactggtgagtgagcagtggatacccaaatgaagacgtatgtygttgaaactcagaaaatggtaggcaagagtcaatcagaaaatctggatacagaacacagctctycaaacaaatatgcaagtcctttcctcaggatgaacaatactgtttcaggttaaactctaactcagtatatggcatgcagactttgagctgtacttgcaataccaccatccatgagcctcaataaatgccgaaacagaaagctgagaaatgagatcaatgctgcagaatgacaaacctctacaaaatgaaaaaacaacatcaaataaagattaatataacatgaagtgaggggcagtatagattttcgttcaattaaaggaagcagaaagaaaatgaagaaagatactgacagaaacaatt

SEQ ID NO: 53878 - DNA, 600 bp, Chicken  19866894305826_3
ctgcatcaatgacccgtaatcccagactgaaaatctcagaaccagctatagtgaaaaaaataattttagtggaagttttaaaagaaaagattagccaccttcccttctttcacgcaagctgggtccagtttattttccacacacagaagttcaaaggtaattagagtttatctttacactgatactggatatcttcactactccaacatcttccaacacagtaactttaaaaagaaatgaaatgaatcacagtccaaatccagctgccatcaagcaaaaaatattccaactgatgagatwcaagttgggtagttccacctaaaaaaaaattgggaagctttggtagacttcgcwtccactccttttcatctgctactggcttgcttccagacaacattagctgagttgcattttttcaaatgagaaagttaaatcaataggattggagctaataataactggcaaatgctaaaaggacacccaaggaaagctagttcaaggaatgacgaagaaagtagaggaaaacagaaagaaaattaagaaaaatatgtgggaaaagracaaatgacaatacttgcattaaaatatagatcatgatcc

SEQ ID NO: 53879 - DNA, 600 bp, Chicken  19866894305826_4
aaaaaataattttagtggaagttttaaaagaaaagattagccaccttcccttctttcacgcaagctgggtccagtttattttccacacacagaagttcaaaggtaattagagtttatctttacactgatactggatatcttcactactccaacatcttccaacacagtaactttaaaaagaaatgaaatgaatcacagtccaaatccagctgccatcaagcaaaaaatattccaactgatgagatwcaagttgggtagttccacctaaaaaaaaattgggaagctttggtagacttcgcwtccactccttttcatctgctactggcttgcttccagacaacattagctgagttgcattttttcaaatgagaaagttaaatcaataggattggagctaataataactggcaaatgctaaaaggacacccaaggaaagctagttcaaggaatgacgaagaaagtagaggaaaacagaaagaaaattaagaaaaatatgtgggaaaagracaaatgacaatacttgcattaaaatatagatcatgatcctaaaatatatagaaattgccacagaattcgattctgaggacataattaggccta

SEQ ID NO: 53880 - DNA, 600 bp, Chicken  19866894305826_5
cagctgccatcaagcaaaaaatattccaactgatgagatwcaagttgggtagttccacctaaaaaaaaattgggaagctttggtagacttcgcwtccactccttttcatctgctactggcttgcttccagacaacattagctgagttgcattttttcaaatgagaaagttaaatcaataggattggagctaataataactggcaaatgctaaaaggacacccaaggaaagctagttcaaggaatgacgaagaaagtagaggaaaacagaaagaaaattaagaaaaatatgtgggaaaagracaaatgacaatacttgcattaaaatatagatcatgatcctaaaatatatagaaattgccacagaattcgattctgaggacataattaggcctatctaatatgccttctcacacggcacaggctggagaacttacatatccagacctgcayctcagcttcccagaagctgcatgttaaccaaaaagagtagacaatacagtacatgaagccttcatggtcaggacagtatttgacattcttctgggatccatgcaagaccaaacactgcatctcctctctgagcctagaatttgcttgtg

SEQ ID NO: 53881 - DNA, 600 bp, Chicken  19866894305826_6
tttttcaaatgagaaagttaaatcaataggattggagctaataataactggcaaatgctaaaaggacacccaaggaaagctagttcaaggaatgacgaagaaagtagaggaaaacagaaagaaaattaagaaaaatatgtgggaaaagracaaatgacaatacttgcattaaaatatagatcatgatcctaaaatatatagaaattgccacagaattcgattctgaggacataattaggcctatctaatatgccttctcacacggcacaggctggagaacttacatatccagacctgcayctcagcttcccagaagctgcatgttaaccaaaaagagtagacaatacagtacatgaagccttcatggtcaggacagtatttgacattcttctgggatccatgcaagaccaaacactgcatctcctctctgagcctagaatttgcttgtgtgcactggtctgttcacacacacagttgggttatacacactcttccaacacttggaaagtgtattttgccagacagtatgtacacatacgtgcatcctgaggtgttctaaagttgagccaagaaacagagaacagaccacagctgtccagt

SEQ ID NO: 53882 - DNA, 577 bp, Chicken  19866894305826_7
gagtagacaatacagtacatgaagccttcatggtcaggacagtatttgacattcttctgggatccatgcaagaccaaacactgcatctcctctctgagcctagaatttgcttgtgtgcactggtctgttcacacacacagttgggttatacacactcttccaacacttggaaagtgtattttgccagacagtatgtacacatacgtgcatcctgaggtgttctaaagttgagccaagaaacagagaacagaccacagctgtccagttattcatgcagaatattttctgtcacagaagcaragcacaaagcaggctgcaggctggttggatggtttttggaagtagcatccttccatttttactttcctagcagtatgattcttagctctacccctgttgctttacacattcttcaacttagaagactataccacagccattctttttgtgtaagcagactctgcacattcataatgaatgtactagaagtttgcacaaaaagggtcccaaaattagagccggtatcaacactttatacagatctaaacggaaagtcagaaacatggaggggaaaagg

SEQ ID NO: 53883 - DNA, 600 bp, Chicken  19866894305832_1
tcttcttctgaggcagatgtcctcacaggatgtctgcctcctgacacatgactgtttaggagagtgagaagttacttctaacacagctaaagcccttacaagaaccagccagcttacagaacatggccagtgagccactgcccacctaaacaaagcaaccacacatgtttccatgaccacttgatggtcacgaacagctctggaatgccacaaacctgataactcatgaaggagctcaggtcactgactgtcctaaaagacaggtcaagaaatgcgtgggcttctctgagtttgtccccragggcaggccaagaaactctgacagggcagcaggagcaaactcacatcagagcctatcttgccagcagttactgcaggagttataaagctttcaggaccttcagctccgctctttttactagcactaggttcccatatggagaaacagggcaagacggcatgatcattcctgctctacctccatcttgcaagagccaagagaggcagttcaacaaaaagcttcaggaagagctggccattaccttgcttttctgtgctgtaaactcttacagtttaggctctcagtgaagtctattaccc

SEQ ID NO: 53884 - DNA, 393 bp, Chicken  19866894305832_2
ctccgctctttttactagcactaggttcccatatggagaaacagggcaagacggcatgatcattcctgctctacctccatcttgcaagagccaagagaggcagttcaacaaaaagcttcaggaagagctggccattaccttgcttttctgtgctgtaaactcttacagtttaggctctcagtgaagtctattacccatccctgccaaagcaggttcaaaagtcttccagcaatggctcaaacacagctgatgccaattctctgggactcactgtttgtgggcacccttagtgcccagcakaaacagccccaacccacaaggccccattttgcacccacacaacatcttccatttccatgagtgaggatcagtgaagcagcttgcacaactcta

SEQ ID NO: 53885 - DNA, 600 bp, Chicken  19866894305840_1
ctgagaatattagcataatggcaatattagcaatggctgtgtccctgagggaagaaaacaatctgtcacttggaaacataatagcaaatcagttacagtataataaaaacaacataaacttaaagcctagaggcttatttgtgtgttatgattactacaaaacctcttaatgtataactgctaatcacttaatcaagtgtttcaatttcaagccctattgatgacagcaaattaagaccttctgacactggaagttctatgggacaggagcctatttctgggaatgggcatgtgtactgygttgtactcacacccagatcattgtgcttagggtatctcagtaatgtgaacagtccttaggattacaccacgtaggcactcaagatgaaggtcttgtcttctaaggggtctcagctaggctgcataccattgtaaactatttgcaatagaaggatacatcgcaaggtacgatgtatatataccatatcattttttgctgaccaatcacagtattttttcctttttttttttgaagttatttatcgtaatgtatatgtattcttaaagttcccaaaatgacctaattgtgaaatgatatga

SEQ ID NO: 53886 - DNA, 600 bp, Chicken  19866894305840_2
ttgtttttatagcacgttctggaaaacatcagggaaggaaaaaagaatcatagaatcacataattataatcctctacattaggaattaaaatacatttttatatcacttctctcaggtcatattttaaactcttttgcacactgtagataatcaacaatattaaaaattaaagagatgaatgaaagaaatgtaaaatatgcctgcattttgatggaagcaaaatgcagtagtaaatctctcttggtttctgagcttataccttcaaaagtgatctctgatgtttctgttggctgcattgsacctttgtacacacggaaatctctccctacttgtttgattgcaagactgagacttcatgtggtaggtctttaaacgttcatcactttacataggaaggggtctggcctactactcaccactctgtaaccaacgcaagtctagaagaagggaaaatggacgaacggcatcatttttactttcatattcaaaatagcaagcccattaaaactgcagctatattatatactttctattagtttacattgaaagtttcttctgggtttttttgtggaaatcatcattctttcttctcaagttat

SEQ ID NO: 53887 - DNA, 600 bp, Chicken  19866894305842_1
cttctacctggtattactggtaacctggctcacagtgcttttttttccttttcctgacttccagacttatttctggaacatgtaacatctcttctagacagaacgcttaaaacaacagcttttcacaataaagtagaaccataaagtactgttactgaaacagccccagacaaggctacaagactaaaagcaaacagctgaagacaggtcagctactagaagcagatcttctttatgattcaaaatagccatgaaacctctgtttaaaaaacaaaaatccaacactactgaggtaagctycctttaactttcacagctgtgtcccaactgcaggacctgcagctttttaataaaacatccgagattccaaatgggtggagaagttcttcagccacgcagaacaggaagtggtgtttaccagtgagcatttaaaaatcctaaatctcaagtattgcttgcaagccctgtctgatgaaatggatgtgctttataaagtggggttgtagttagtcctgggaagtctgggaggctgcatagggtgggtgcctggcttctcttacagtacagaaagctgttaaatacctaggacaatggtattag

SEQ ID NO: 53888 - DNA, 599 bp, Chicken  19866894305845_1
  misc_feature (1)..(198): n is any nucleotide
nnnnnnnnnnnnnnnnnnnnnnnnnnnnnnnnnnnnnnnnnnnnnnnnnnnnnnnnnnnnnnnnnnnnnnnnnnnnnnnnnnnnnnnnnnnnnnnnnnnnnnnnnnnnnnnnnnnnnnnnnnnnnnnnnnnnnnnnnnnnnnnnnnnnnnnnnnnnnnnnnnnnnnnnnnnnnnnnnnnnnnnnnnnnnnnnnnnnnnaattgtcctgagctatcctaagtgcgctagctgtagacagtgtaacttattctcgtatggtatttgttgacagatgcaaaagcagaagtgaaaacaggacgygttgaaccagatacttygtaaactgataatcccaggatatgaggttccagaaagcttataataaatatctttttctttttcccttgctcaggggcgtgcctcgttaacagaagagaagagccgttttgcacatgaacatgctgaaatgagaaatctagaagatattgttaaagatataaaaccatctgtgctaataggtaatttcttttactttaaagcaatgaccttattctttgtttgggggaaaaaaaaaaaaacaaccaccagagatgcggctttgtctgaagacaagatcgagt

SEQ ID NO: 53889 - DNA, 599 bp, Chicken  19866894305845_2
  misc_feature (1)..(181): n is any nucleotide
nnnnnnnnnnnnnnnnnnnnnnnnnnnnnnnnnnnnnnnnnnnnnnnnnnnnnnnnnnnnnnnnnnnnnnnnnnnnnnnnnnnnnnnnnnnnnnnnnnnnnnnnnnnnnnnnnnnnnnnnnnnnnnnnnnnnnnnnnnnnnnnnnnnnnnnnnnnnnnnnnnnnnnnnnnnnnnnnnnnnnaattgtcctgagctatcctaagtgcgctagctgtagacagtgtaacttattctcgtatggtatttgttgacagatgcaaaagcagaagtgaaaacaggacgygttgaaccagatacttygtaaactgataatcccaggatatgaggttccagaaagcttataataaatatctttttctttttcccttgctcaggggcgtgcctcgttaacagaagagaagagccgttttgcacatgaacatgctgaaatgagaaatctagaagatattgttaaagatataaaaccatctgtgctaataggtaatttcttttactttaaagcaatgaccttattctttgtttgggggaaaaaaaaaaaaacaaccaccagagatgcggctttgtctgaagacaagatcgagttcctccgaacacagttt

SEQ ID NO: 53890 - DNA, 599 bp, Chicken  19866894305849_1
  misc_feature (1)..(141): n is any nucleotide
nnnnnnnnnnnnnnnnnnnnnnnnnnnnnnnnnnnnnnnnnnnnnnnnnnnnnnnnnnnnnnnnnnnnnnnnnnnnnnnnnnnnnnnnnnnnnnnnnnnnnnnnnnnnnnnnnnnnnnnnnnnnnnnnnnnnnnnnnnnnnaagtggatgagggagcctggtgctggactgccttttatactgatctggaccgccccaggcccagaggtaacccatgcgaatggagctatactagggcaagcccatttgtatgcaaaagaatacaattacagaaattgctgccttattcctcttccctayaacgctcccttttcatttccctgttcatgacacgtccattttgccacaccagctcctttcaagtgacagaattagaagcytaagcatttctgaagaaggtactcaaaagcacagagagaagatgaaggcaagggaatggaaatggccaacgctgtcgactggtgccagcctctcattcccctgcaacttgctttaatgctttgcccttatgctttaggtatgttttcattaaaaacatggagtagaaggtcaaacttctaacaagactcatatgcaaagtccaacacggccattgcttc

SEQ ID NO: 53891 - DNA, 599 bp, Chicken  19866894305849_2
  misc_feature (1)..(61): n is any nucleotide
nnnnnnnnnnnnnnnnnnnnnnnnnnnnnnnnnnnnnnnnnnnnnnnnnnnnnnnnnnnnnaagtggatgagggagcctggtgctggactgccttttatactgatctggaccgccccaggcccagaggtaacccatgcgaatggagctatactagggcaagcccatttgtatgcaaaagaatacaattacagaaattgctgccttattcctcttccctayaacgctcccttttcatttccctgttcatgacacgtccattttgccacaccagctcctttcaagtgacagaattagaagcytaagcatttctgaagaaggtactcaaaagcacagagagaagatgaaggcaagggaatggaaatggccaacgctgtcgactggtgccagcctctcattcccctgcaacttgctttaatgctttgcccttatgctttaggtatgttttcattaaaaacatggagtagaaggtcaaacttctaacaagactcatatgcaaagtccaacacggccattgcttcacccatatatgtgttctgatcaaggattgctgctctgttttttgactctagcagttctacaaaatcaaacactgctctca

SEQ ID NO: 53892 - DNA, 600 bp, Chicken  19866894305851_1
acgctgtggttcaggacttgtggggagggtctcgtttgagctgtctgtgaggtgtgaagatgcacacaggaatgtccgtacagaaacgccatggggattttcccagactagccctcatgtacagttcagtttaacctctgattgccttgtcatttttttattaggttctattggagggagaatatctagttacacaccaacacgcccagcacgcatttagcgttggcagaccataagcatcctgattttgtagtgtggactggtaccacgttctccataaggccgtggatgatgtctgarttaaggcaagtcattttacagactgaaaagtggtttcattcaggctgcctctaccaaaccctgttaactcagtgccctgcctggagggacgccatgctttcaccctggcattgcagcactcggcaattaaaggctttggattcaggctgggtacactcctgtgatgttttaccatggagcaccaaaggcttttgtctgtgcctgtaataggtgtagaccagaacctgtctttcaccaacccctcagctgctgcctaaatgacctgccttcacagcacctgtttgacagctctgttcttaa

SEQ ID NO: 53893 - DNA, 600 bp, Chicken  19866894305857_1
aaaacaaatgcattcatgcaagtacctctcttatcagttttgaataatagtgacatgctaataagggctattgaaatattgaagaaagatgcatacctcatttgaagtctaagcagatgttttaatcaagtatggtgaaatttttaatgctatcattcattaataggatgtcagttttatgtctcacatccgaacaacagctgcctcagtgcagagtgatgctattcaggtgccagagctgagctctggcctagccttcagatctgtgttgtgtcagtgtctggtgatttccaaaagtgsagaaggcaattcatgaggaaacaaaacggcatggttttaatgaaaggggattagagattctaggtcaggtaatcagagcaaaaaggggtccctcctgattttgatgaagtttctgggagctaagtggtacaataaagaatgaattctgcaattgtctctctctcttatcattagattagtgttgaaaaaagtgacactttaaaaggtttattgctgtkcttagatctgtagtgctgctgctaagtgcatgcttttcttgcagaaatagcaatgcaacagggaaactcatgtttctttctt

SEQ ID NO: 53894 - DNA, 600 bp, Chicken  19866894305857_2
atgctattcaggtgccagagctgagctctggcctagccttcagatctgtgttgtgtcagtgtctggtgatttccaaaagtgsagaaggcaattcatgaggaaacaaaacggcatggttttaatgaaaggggattagagattctaggtcaggtaatcagagcaaaaaggggtccctcctgattttgatgaagtttctgggagctaagtggtacaataaagaatgaattctgcaattgtctctctctcttatcattagattagtgttgaaaaaagtgacactttaaaaggtttattgctgtkcttagatctgtagtgctgctgctaagtgcatgcttttcttgcagaaatagcaatgcaacagggaaactcatgtttctttcttttcctatcgcagctttaaatttattcatagttctaattctagactattactgggaagagagggttgacttccacacccccactccacacacacacattttattttccattttttctatattaacagttgtgagtctagaatcaagcctttttacagctcacataaagtccattcacatttcatctgcatttcactgtcttttcacggggatgggattt

SEQ ID NO: 53895 - DNA, 599 bp, Chicken  19866894305861_1
  misc_feature (1)..(143): n is any nucleotide
nnnnnnnnnnnnnnnnnnnnnnnnnnnnnnnnnnnnnnnnnnnnnnnnnnnnnnnnnnnnnnnnnnnnnnnnnnnnnnnnnnnnnnnnnnnnnnnnnnnnnnnnnnnnnnnnnnnnnnnnnnnnnnnnnnnnnnnnnnnnnnntggcacccttgtagctcagctggcagagttaacaaaacctccttgtaaactgtcaccaaggcaatgaactcgagtatacacaactaaatgcttcttaggaaaacaatgtccggttttcatcaccaaaatgtactgccagtatcaacagatgattttygattgaggctacatggcaacacagcgaggaggaggaaggaaactgcttacagctaaatataaatgatggtttcaccccaactattccaccttcatattcactacagaggcataaaacagcacatcaactcaaatgtacaacgatcatttctttaycttaagtacctttgcaagcatggaagactcacgttgtcaaacgtgatgcccagctgyaacctaagcatcttttcctgaattactaatccacaccacacgatcctgcaagaccaaggtttgtttggaggctaaatcatgttttct

SEQ ID NO: 53896 - DNA, 600 bp, Chicken  19866894305861_2
agctcagctggcagagttaacaaaacctccttgtaaactgtcaccaaggcaatgaactcgagtatacacaactaaatgcttcttaggaaaacaatgtccggttttcatcaccaaaatgtactgccagtatcaacagatgattttygattgaggctacatggcaacacagcgaggaggaggaaggaaactgcttacagctaaatataaatgatggtttcaccccaactattccaccttcatattcactacagaggcataaaacagcacatcaactcaaatgtacaacgatcatttctttaycttaagtacctttgcaagcatggaagactcacgttgtcaaacgtgatgcccagctgyaacctaagcatcttttcctgaattactaatccacaccacacgatcctgcaagaccaaggtttgtttggaggctaaatcatgttttctcatggcaagctcttcttgcaagagcgtcccaagagtgagttcttattttgttcctcagaattccagaactttgtttttctctgttaatgtccaagtgccaggagccaggagaacgatcaggcagacattcccctttggcatgtcgatggtgcaagc

SEQ ID NO: 53897 - DNA, 600 bp, Chicken  19866894305861_3
tcgagtatacacaactaaatgcttcttaggaaaacaatgtccggttttcatcaccaaaatgtactgccagtatcaacagatgattttygattgaggctacatggcaacacagcgaggaggaggaaggaaactgcttacagctaaatataaatgatggtttcaccccaactattccaccttcatattcactacagaggcataaaacagcacatcaactcaaatgtacaacgatcatttctttaycttaagtacctttgcaagcatggaagactcacgttgtcaaacgtgatgcccagctgyaacctaagcatcttttcctgaattactaatccacaccacacgatcctgcaagaccaaggtttgtttggaggctaaatcatgttttctcatggcaagctcttcttgcaagagcgtcccaagagtgagttcttattttgttcctcagaattccagaactttgtttttctctgttaatgtccaagtgccaggagccaggagaacgatcaggcagacattcccctttggcatgtcgatggtgcaagcacgagttatctgtgtttaacgggtcagcattcttgcccttcatgcttaacattttaa

SEQ ID NO: 53898 - DNA, 600 bp, Chicken  19866894305865_1
ccatcccccccggtggggccatgactcaggaagttatcctcaatgtattccaagagcctcttggattgcctacaggtctccatgctacttttccagtagatatctgggtggttgaagtgcaccagaaggacaagcaactgcagtcacaatgcctcctgtacctgaaggtagaaggcctcatcaacaagctctgactgatctggtagcctgtattagacacaaatcacaaggctcccttttccgcctcggtctctaactgtgacccataggctttcaacttgctcatgactattctttagkgacagctcytcacatactattcatttcctgatgtagatagcaacacctcctcccctccttacttgcctgttccttctaaactgcttgtaactgtcaatagccacactacggtcatggaaaacattccaccaggtttcagtgatgtggttttctagtagtacagtaccttccagctcctcctgtttatttcccaagctgcacgtgtagaggcacctcagctgggcagcgggtcttgtcacctccttgaacaactctttaatcccttttaaatacttccaatgattttccccattgcctttt

SEQ ID NO: 53899 - DNA, 600 bp, Chicken  19866894305865_2
ccggtggggccatgactcaggaagttatcctcaatgtattccaagagcctcttggattgcctacaggtctccatgctacttttccagtagatatctgggtggttgaagtgcaccagaaggacaagcaactgcagtcacaatgcctcctgtacctgaaggtagaaggcctcatcaacaagctctgactgatctggtagcctgtattagacacaaatcacaaggctcccttttccgcctcggtctctaactgtgacccataggctttcaacttgctcatgactattctttagkgacagctcytcacatactattcatttcctgatgtagatagcaacacctcctcccctccttacttgcctgttccttctaaactgcttgtaactgtcaatagccacactacggtcatggaaaacattccaccaggtttcagtgatgtggttttctagtagtacagtaccttccagctcctcctgtttatttcccaagctgcacgtgtagaggcacctcagctgggcagcgggtcttgtcacctccttgaacaactctttaatcccttttaaatacttccaatgattttccccattgccttttcccatttcc

SEQ ID NO: 53900 - DNA, 600 bp, Chicken  19866894305872_1
agcgaattttcctccttcacatctctatgctctctgagaaagtgttaagcctccagaatcactgtggtgatcaccatgtacaacatggcatgcagtccctgattacggcagagctctccatcggaggctgtatttgtggctttctgggctgcaaatctgtgggtgggtggagaaaagcagggatggaattactctggttaattgtactctcctcaggtgtattgcagaagaaaggacctttctggaggtgctgctctgggctttgtagaagcccctttctggccacggaggctgcgtgaygagctgtcttttggcatggaagcacaggagtgggcggtggcagctgggagtgagtgcccacgcagggtctggaaggcagagcaaccgctttgtggtttattttccctgctccaaagaggaatgtgtacttccccagctcatagctggcaggcagaagtgtgtgctggcaccccaagcacagagcaaggatccaaaaaaagcaagaattcagggtttggttgtttgcccatctgcaggcagctctgcggtgataacaccccttcgagcccctcttgcctcttggtacactcttgctgaatc

SEQ ID NO: 53901 - DNA, 600 bp, Chicken  19866894305877_1
aattagttccttgacaagagtagttttgaaatgtacatggatagagattccacaacctctcagggacacaaatccagctcctgtctaccttccttgcataaattatttgcctctattcaaagataatttccattccctcagaatgttattgtttgtttgtttgttttgttgttgttgttgtgtacatatttgaagagattggctccatccccttcatgttttccttttatgtcttcatgtctctttaagataaagaagatccaataatactgctatgcattaaacattttttcttcagtrgattttgcttttccatttctatttatattgtgactgtccgaattttctcctatgaagtgaagtctatcacagtaatttccaaagcaaacaccaaggtctagaaccttgattcatttttatccaacttaatgagatcctggattgttatttcttgctgagggaaatatataaatgctggagcataaacattaaatcatgattttcagctcartgatgtaagaatatattaaatattgcacagaattgtacaatttattttaagggcatgactctatggcagcctaaatccaagccagttaa

SEQ ID NO: 53902 - DNA, 600 bp, Chicken  19866894305877_2
cttcatgttttccttttatgtcttcatgtctctttaagataaagaagatccaataatactgctatgcattaaacattttttcttcagtrgattttgcttttccatttctatttatattgtgactgtccgaattttctcctatgaagtgaagtctatcacagtaatttccaaagcaaacaccaaggtctagaaccttgattcatttttatccaacttaatgagatcctggattgttatttcttgctgagggaaatatataaatgctggagcataaacattaaatcatgattttcagctcartgatgtaagaatatattaaatattgcacagaattgtacaatttattttaagggcatgactctatggcagcctaaatccaagccagttaaatctcccactgacacagacctattcaccttcattcccacataggcccacataaacaccagaggtgcttgttaaaggaaataatctgacaataatcaaaacttgaaaaaggcagatgtttaactggtgataagaacgtgataactgaggtcattagtagactttctgactgtgggctcaagcttcaacaaactctatcttcctaaacatgct

SEQ ID NO: 53903 - DNA, 599 bp, Chicken  19866894305881_1
  misc_feature (1)..(130): n is any nucleotide
nnnnnnnnnnnnnnnnnnnnnnnnnnnnnnnnnnnnnnnnnnnnnnnnnnnnnnnnnnnnnnnnnnnnnnnnnnnnnnnnnnnnnnnnnnnnnnnnnnnnnnnnnnnnnnnnnnnnnnnnnnnnnnnnnncagctttgcaagaggctgagctttccttctcttttccaggagagggatgacaggcacccaaagaaagatgtcttctcctggctgcagcagttcagtgcatgacacccactgttgtaaaataattgggttgcttagtctataggaaatttccacatctgctttgtgtggtyttgggtatttcagctggctgatactgaagggaaggaagaaactgagtgtacgcaaggcatttatctgtccctgtcaccttctgatgtcaatagaagttgtgttgtgttttctctagtctctaagcaaaaggtaaaaatatttttctaagtatgctttttggatattcatttcctgagaaaattattttcaaatctaattctaattcatttgaaattaaaatcttacttcatttkaaagtcaaataatattaactttgggagataatccttaaatttttgtctaactgtcagttaaaaag

SEQ ID NO: 53904 - DNA, 600 bp, Chicken  19866894305881_2
cccactgttgtaaaataattgggttgcttagtctataggaaatttccacatctgctttgtgtggtyttgggtatttcagctggctgatactgaagggaaggaagaaactgagtgtacgcaaggcatttatctgtccctgtcaccttctgatgtcaatagaagttgtgttgtgttttctctagtctctaagcaaaaggtaaaaatatttttctaagtatgctttttggatattcatttcctgagaaaattattttcaaatctaattctaattcatttgaaattaaaatcttacttcatttkaaagtcaaataatattaactttgggagataatccttaaatttttgtctaactgtcagttaaaaaggaaccaaattaaaatcttagtattcctgagtgactcttaagtgttttgcaatgtgtatattatggtaaaatagaggtaatgtgaccttcctatatatattatacatattaaaatataagtagttaaaactgaaggaaatgaagactctgcctctgtacaataaaatacatttttagacaagagaaactaatgtcctcagttgaaacacccgtattagagaaattcaggctgggga

SEQ ID NO: 53905 - DNA, 599 bp, Chicken  19866894305887_1
  misc_feature (1)..(155): n is any nucleotide
nnnnnnnnnnnnnnnnnnnnnnnnnnnnnnnnnnnnnnnnnnnnnnnnnnnnnnnnnnnnnnnnnnnnnnnnnnnnnnnnnnnnnnnnnnnnnnnnnnnnnnnnnnnnnnnnnnnnnnnnnnnnnnnnnnnnnnnnnnnnnnnnnnnnnnnnnnnaaaacagtaacaaaggaagtaaagcctcaaaattaatatccctttttatagcaaaagtagaaaatgaatgctctgctacaacccaaaaaatagtttcatattaaagttcaatatattatttatttaaattccactcttctgtatygatgagcccaaacctggctgtccacaagggtacaggtcttgaaacaactcccttgcccctcttcccacaagcatcatctaatgtttaaatattgaatctcttactaaccactgttgtgtggtcatgctatgcaatgccagctctggactcaatacagtctgctctatgtggatggcaggtaytacaggtaggaacagacagggaaaaagtccagcaggctcacttcagtgctgttgtcaagtgtgatcacagaagtgatcaggttttatgcgtataaacattctgatttcacaaaaggt

SEQ ID NO: 53906 - DNA, 600 bp, Chicken  19866894305887_2
caaaattaatatccctttttatagcaaaagtagaaaatgaatgctctgctacaacccaaaaaatagtttcatattaaagttcaatatattatttatttaaattccactcttctgtatygatgagcccaaacctggctgtccacaagggtacaggtcttgaaacaactcccttgcccctcttcccacaagcatcatctaatgtttaaatattgaatctcttactaaccactgttgtgtggtcatgctatgcaatgccagctctggactcaatacagtctgctctatgtggatggcaggtaytacaggtaggaacagacagggaaaaagtccagcaggctcacttcagtgctgttgtcaagtgtgatcacagaagtgatcaggttttatgcgtataaacattctgatttcacaaaaggtaattctgtaaccggtcactcgtcttaaaaaggcacttaacgtattcctatgttttagtctaatcttaggaagattttagcatctactagagcatagtggtacttaactctggtcccattacagaaggacagcagcacctctgggaattatattccatcagtcagtcaccggccttrgatttac

SEQ ID NO: 53907 - DNA, 600 bp, Chicken  19866894305887_3
caggtaytacaggtaggaacagacagggaaaaagtccagcaggctcacttcagtgctgttgtcaagtgtgatcacagaagtgatcaggttttatgcgtataaacattctgatttcacaaaaggtaattctgtaaccggtcactcgtcttaaaaaggcacttaacgtattcctatgttttagtctaatcttaggaagattttagcatctactagagcatagtggtacttaactctggtcccattacagaaggacagcagcacctctgggaattatattccatcagtcagtcaccggccttrgatttacagagggagcacaggcacgtgtttttttgaaagaagttcttaatactgtgggttgttcctcacccttacttacctgcatggtgcagtttatattgactgcaaggcagtgacagttactgcagtatgaacctttggatgactgtgggacagaggcagtcagtaaggctggcagcatcacttggccctaccacctctcttactgacctgcagtactgcattctgttagtggttctaaaaataccctctctctgctgtgccacagcactgctgtgccactgctaccacttaattctc

SEQ ID NO: 53908 - DNA, 600 bp, Chicken  19866894305890_1
aggctgcttactgagcaaaaggaatttctcttcccatgagaggccgagtgctgcttccctggctaggaatgctctaattcctgtggaggtgagaagcaggctgctaccctctgctggtgagtggctgcaggatggcggtggactttgggtgaagatgtgctcatggatgaaatagactgataagaggtcactgagcccagtttatttatttcctgtatgaaattccccggttttgtttgggttttagaaagttttctaactgcagtgcaccccgttatctatctgtctatttatggaacrtaaatgcgtaaggatatggttctcaccagagcttcagaaggtgctgacaggagctatgcatctttttatctttcaagacacaactgtagtgtcttgcaaatgagaactgaaaccatctagatttttttacatttgctatattctgtctgtttgcaggaaaacttggagacatttggtagttacatggcgttgttatcatttctttcaaagattcagtggtagactcctaagttattttacaccatataactttgtaggatttctgctttgttcagtcgctgtgtggtgtgtcaagaagaa

SEQ ID NO: 53909 - DNA, 600 bp, Chicken  19866894305891_1
ttttgaccagactgctgtccacttcttccaccctggatttccaccaggtcccctcccactcggttttgatcagctggccattcttcagcagcaccatgggacggttggggtatgcactgatgtactcctcaatgaagtcccggcacgacacgtcctctatgtcctcccacgtcttcttaactgtacagaaagggagagaaatgaggctggggaaaggtcctttggctccctatcaaacggatttctgctaggaaccctcaggcagcaggctgggcagcagggcacacggccacaccaacrcccccggtgtgcagggagctgcagcacgctgctgtgcaggcaataaaacatcgcttcctcccactctgcatgcraagcaaatctctacaggcacagcayggaaatgtgcatgacctccacrttcaagataagctcttctgygtgcccacaggcaccctgagtaatcccagcattaggacacgggagaggcagaggtcactcacgcggcctgcagaccgggtacagctcccactccttgacgtacgaagcgtagccatcatcaaagaagatcaagaacctgcacaacagcacagggaacac

SEQ ID NO: 53910 - DNA, 600 bp, Chicken  19866894305891_2
tggccattcttcagcagcaccatgggacggttggggtatgcactgatgtactcctcaatgaagtcccggcacgacacgtcctctatgtcctcccacgtcttcttaactgtacagaaagggagagaaatgaggctggggaaaggtcctttggctccctatcaaacggatttctgctaggaaccctcaggcagcaggctgggcagcagggcacacggccacaccaacrcccccggtgtgcagggagctgcagcacgctgctgtgcaggcaataaaacatcgcttcctcccactctgcatgcraagcaaatctctacaggcacagcayggaaatgtgcatgacctccacrttcaagataagctcttctgygtgcccacaggcaccctgagtaatcccagcattaggacacgggagaggcagaggtcactcacgcggcctgcagaccgggtacagctcccactccttgacgtacgaagcgtagccatcatcaaagaagatcaagaacctgcacaacagcacagggaacacgtgttcagcgttgggcttagaaaygccaccgaatgaaagcagagaaaccccactctgccacctccragtgccct

SEQ ID NO: 53911 - DNA, 600 bp, Chicken  19866894305891_3
gacggttggggtatgcactgatgtactcctcaatgaagtcccggcacgacacgtcctctatgtcctcccacgtcttcttaactgtacagaaagggagagaaatgaggctggggaaaggtcctttggctccctatcaaacggatttctgctaggaaccctcaggcagcaggctgggcagcagggcacacggccacaccaacrcccccggtgtgcagggagctgcagcacgctgctgtgcaggcaataaaacatcgcttcctcccactctgcatgcraagcaaatctctacaggcacagcayggaaatgtgcatgacctccacrttcaagataagctcttctgygtgcccacaggcaccctgagtaatcccagcattaggacacgggagaggcagaggtcactcacgcggcctgcagaccgggtacagctcccactccttgacgtacgaagcgtagccatcatcaaagaagatcaagaacctgcacaacagcacagggaacacgtgttcagcgttgggcttagaaaygccaccgaatgaaagcagagaaaccccactctgccacctccragtgccctgggtcaggcgtggcacatgaggatg

SEQ ID NO: 53912 - DNA, 600 bp, Chicken  19866894305891_4
gtactcctcaatgaagtcccggcacgacacgtcctctatgtcctcccacgtcttcttaactgtacagaaagggagagaaatgaggctggggaaaggtcctttggctccctatcaaacggatttctgctaggaaccctcaggcagcaggctgggcagcagggcacacggccacaccaacrcccccggtgtgcagggagctgcagcacgctgctgtgcaggcaataaaacatcgcttcctcccactctgcatgcraagcaaatctctacaggcacagcayggaaatgtgcatgacctccacrttcaagataagctcttctgygtgcccacaggcaccctgagtaatcccagcattaggacacgggagaggcagaggtcactcacgcggcctgcagaccgggtacagctcccactccttgacgtacgaagcgtagccatcatcaaagaagatcaagaacctgcacaacagcacagggaacacgtgttcagcgttgggcttagaaaygccaccgaatgaaagcagagaaaccccactctgccacctccragtgccctgggtcaggcgtggcacatgaggatggacagcactgctcgctcctgcc

SEQ ID NO: 53913 - DNA, 600 bp, Chicken  19866894305891_5
ggcacgacacgtcctctatgtcctcccacgtcttcttaactgtacagaaagggagagaaatgaggctggggaaaggtcctttggctccctatcaaacggatttctgctaggaaccctcaggcagcaggctgggcagcagggcacacggccacaccaacrcccccggtgtgcagggagctgcagcacgctgctgtgcaggcaataaaacatcgcttcctcccactctgcatgcraagcaaatctctacaggcacagcayggaaatgtgcatgacctccacrttcaagataagctcttctgygtgcccacaggcaccctgagtaatcccagcattaggacacgggagaggcagaggtcactcacgcggcctgcagaccgggtacagctcccactccttgacgtacgaagcgtagccatcatcaaagaagatcaagaacctgcacaacagcacagggaacacgtgttcagcgttgggcttagaaaygccaccgaatgaaagcagagaaaccccactctgccacctccragtgccctgggtcaggcgtggcacatgaggatggacagcactgctcgctcctgcccagagctccaggctgtgcag

SEQ ID NO: 53914 - DNA, 600 bp, Chicken  19866894305891_6
cacgctgctgtgcaggcaataaaacatcgcttcctcccactctgcatgcraagcaaatctctacaggcacagcayggaaatgtgcatgacctccacrttcaagataagctcttctgygtgcccacaggcaccctgagtaatcccagcattaggacacgggagaggcagaggtcactcacgcggcctgcagaccgggtacagctcccactccttgacgtacgaagcgtagccatcatcaaagaagatcaagaacctgcacaacagcacagggaacacgtgttcagcgttgggcttagaaaygccaccgaatgaaagcagagaaaccccactctgccacctccragtgccctgggtcaggcgtggcacatgaggatggacagcactgctcgctcctgcccagagctccaggctgtgcagcactgctgcttccctcagtgcttctgaaccactctccctggccctgagctacatctgcactcccaaagagaacacacagaagctgcccaaaggctttccagcagcacagcacagccaggccctctccccccagctccaaacctctgtgcctccagcacaggagctaaaacagtggggaaaaac

SEQ ID NO: 53915 - DNA, 600 bp, Chicken  19866894305891_7
tgcatgcraagcaaatctctacaggcacagcayggaaatgtgcatgacctccacrttcaagataagctcttctgygtgcccacaggcaccctgagtaatcccagcattaggacacgggagaggcagaggtcactcacgcggcctgcagaccgggtacagctcccactccttgacgtacgaagcgtagccatcatcaaagaagatcaagaacctgcacaacagcacagggaacacgtgttcagcgttgggcttagaaaygccaccgaatgaaagcagagaaaccccactctgccacctccragtgccctgggtcaggcgtggcacatgaggatggacagcactgctcgctcctgcccagagctccaggctgtgcagcactgctgcttccctcagtgcttctgaaccactctccctggccctgagctacatctgcactcccaaagagaacacacagaagctgcccaaaggctttccagcagcacagcacagccaggccctctccccccagctccaaacctctgtgcctccagcacaggagctaaaacagtggggaaaaacaaacagtttaattgctcctaatctccacaaagatattttcag

SEQ ID NO: 53916 - DNA, 600 bp, Chicken  19866894305899_1
ctgcttgttttcctgctcattggaacggtcttcctgagcttacaggaggtgaccaataaaaatcaactctctctcccatacccctcactgttgcaagcagatttcttaacatgccaaaatctgctctcctaaagtccacggttgtgatcctgtttttcactttgttcccttctctcaggttcctaaactccaccatctcacagtcactgcaaccaaagggaccatggttgctacagccatggctgcctcgcctacgaatctcaatctatcccttcttgtttataagcaggaagcccagtraagcacctctgcccactgactccttaatagcctgggatagcgagttgtcatcagtacaccccagaaacctcctggattgctccccccatgaggctgtccatccagttaatgccaggctgcttcaggtctgctgtgagtacctgggtctgcacatgaggctgctgcttctagttatctgaagaaggtcccatttatttcttcctgatagggcgtctagagcagacagtaatgttagtatgcacattaatcccaagctgctcacaactggcccatcattcagcccaaccttcacatattccc

SEQ ID NO: 53917 - DNA, 600 bp, Chicken  19866894305900_1
acgcatgtgaataggactggggaaggtgtagatgttgccaacagcaacacaaagcttttgcatattgcatattaatgtgctgtacatacttgttttggaaagaatattgagatgaaggggtttctggtgtattttagaactttattttacttttttttaaaagacttcaaagatactgcaagagaacctagactgggcatctaatttcaggagcttcctccagcatttgtttttgtcactttgcacattaagtaactttcttttctggtagtgtgttcttggggcaggaagtgtaaggaytgtgggggatagttttctcatcaggccttgtttttcttcagtaactgaaacaatctgtaataagccttatttaaacagatataatggctatttttttattaaaaatatatatgcctgccactaccttatcttttatgattgtctttttataaccatttttatatactcagcagagtattttatctgttgaaataaaaatggcagataaacagttattgaagcaaggagacaaccttggaattcactgagactgagtgggacaactgatgtaccactatacataagcttctgagcttttgc

SEQ ID NO: 53918 - DNA, 559 bp, Chicken  19866894305900_2
tatgcctgccactaccttatcttttatgattgtctttttataaccatttttatatactcagcagagtattttatctgttgaaataaaaatggcagataaacagttattgaagcaaggagacaaccttggaattcactgagactgagtgggacaactgatgtaccactatacataagcttctgagcttttgcctctgctacagtattgcaacttagcatgcagaactttgataagatggaaatggagtttctgaacatgatgtagctgtgactttccagtatgggaaaattattttggctmcaaacattttgacaaaaatgcagaggttgatttctgtacagcacttttgttactatggttgacctaacatttgtaaaaccaacttaaagtgtggggtttttctcatggtttttaaacaactttgagttggcgatgaaaatgtattcatctgacctgattagtaactgtcttatttttctaatattacaaacttaaactctggtataacacataacttgattcttatgtgctcgtagtactgcgttttagttcacttcct

SEQ ID NO: 53919 - DNA, 600 bp, Chicken  19866894305903_1
tcgaaaacaccaaggaagggagagaagagcttttcaatgtgcttgggaccgactccaggtgggagcagtagagactattttattgctttcagttgatagccctccctccctgctctcctctgggctgcctacagcccccattgccctcctggggcactgcactgcattgcaaggaacactctccatctctagcattaattcctgactgcaagcatttggcatttggtataaactgcttgcggccagcaagaaccaagctgctgccagaagacttcgcattgcttgagaagagggaaggargaacccacgcaacacctgagtcctaaccacctcaatgagaaagcatcaattaacctcatttgccagctggacctgtcctagggcgcccttgcggggacactgtgccttgagcagattgatgctcctattaggcagatgggaagtgaggggacagtctgatgagctctttaacttttactgacttccctataccaacctcttagctattttaattcccttttgaaggcaataaagggagggcttttagctcaccaggctcatctgaaatgtctcagtgaagtgactgaaactctatcttaa

SEQ ID NO: 53920 - DNA, 593 bp, Chicken  19866894305905_1
gtgttgttctgaatataatcgctaaatctaagaattattggcactgcatgcacctaatgctctttgactgaacagatggcttatgaaaatgtgggatgacttactagtcctgaaatgattcatacctctgctagctaaacacatggctacctttcatcacttgtgctgaatctaggagctggattaatagcccaggtttttaagtatttgcagttctttaaacagcatatgctaccagcatattttctagtaaggtatgaaaaccacaaatgtaaactgttttatgtgctttcagaggcrttttttttgggggggggggggttattacctcaaacttttttatcatttcagttatgttgcttttcagatcaatatcattcgtatgataaagaatgacatcctattctaagtctataaaaaygtgagtctgtttgtgcttagcatttccatgctcatcttattttcttgtttaggtggatacctttccactttcttgcttatttttcttgcattctctctcatgtttccaccccatctcactttctttcccttgcatgctttccttgtctctctcttcccatctgttctcaaat

SEQ ID NO: 53921 - DNA, 584 bp, Chicken  19866894305905_2
tgaatataatcgctaaatctaagaattattggcactgcatgcacctaatgctctttgactgaacagatggcttatgaaaatgtgggatgacttactagtcctgaaatgattcatacctctgctagctaaacacatggctacctttcatcacttgtgctgaatctaggagctggattaatagcccaggtttttaagtatttgcagttctttaaacagcatatgctaccagcatattttctagtaaggtatgaaaaccacaaatgtaaactgttttatgtgctttcagaggctttttttttrggggggggggggttattacctcaaacttttttatcatttcagttatgttgcttttcagatcaatatcattcgtatgataaagaatgacatcctattctaagtctataaaaaygtgagtctgtttgtgcttagcatttccatgctcatcttattttcttgtttaggtggatacctttccactttcttgcttatttttcttgcattctctctcatgtttccaccccatctcactttctttcccttgcatgctttccttgtctctctcttcccatctgttctcaaat

SEQ ID NO: 53922 - DNA, 472 bp, Chicken  19866894305905_3
atacctctgctagctaaacacatggctacctttcatcacttgtgctgaatctaggagctggattaatagcccaggtttttaagtatttgcagttctttaaacagcatatgctaccagcatattttctagtaaggtatgaaaaccacaaatgtaaactgttttatgtgctttcagaggctttttttttgggggggggggggttattacctcaaacttttttatcatttcagttatgttgcttttcagatcaatatcattcgtatgataaagaatgacatcctattctaagtctataaaaaygtgagtctgtttgtgcttagcatttccatgctcatcttattttcttgtttaggtggatacctttccactttcttgcttatttttcttgcattctctctcatgtttccaccccatctcactttctttcccttgcatgctttccttgtctctctcttcccatctgttctcaaat

SEQ ID NO: 53923 - DNA, 600 bp, Chicken  19866894305907_1
taaagctgccattccacatcatatgtgttgtttgtaacttctgcagtgtatttagagtatgtagataggacttatgtacaaatcttccatctttaagctcaaagagcaataaaagatatttatttataaactggagtataaatatgcataacattttttgtgaaggaagctttcctacccacttaattggaagtaaagcgataaaaatgaataatagaaatatggatgatgatccaatgtaaggggtgattgctttccttagctaaaaagacaattgtatgtaggttgctctgaaagcamtgcctcctgttcatttccatagaaactacaacaattacaaagagcataataccactacctgatagagcaaattctctgctacaaaacgctatttttcaatgtagtcatcaccattagctatgtatttttgctagtgatgaataagagtgaacattcatgaaacccacttggtgcaaactttgtgatagtccaacgttgccacttcatgaattgaagctgatattcagctctgtacactgactgtaatccaccaattctcgtggatgagctgatggagacagtctttgttttgtagtgtga

SEQ ID NO: 53924 - DNA, 600 bp, Chicken  19866894305908_1
cacaactctactctacttcattacatgcttagtgtaatttaattacagggttcctcagttgttttctacaaaagaaagcttatgcatatcacaatatttccaaataatagaaatgaaatgaaaatgactgcacatgttaataactaccttcacttttattccaaataagaggttaaaatggccaatttcattggataaagaaataatcctggtatggtcatttccatagtgcatcagttatcaaatttagtgctgtaattgggcttacatggcaaggttttgttagtgggggctgcagcygaggcctctgtgagcagagcccagcaggtgtcccatgtcagaacagagccagctccagctgctccaaaaggggcctgctgtcctgtgcaagaataggtgggagwgargagtgagaaaatgtgaaygaaatagccctgtagccaccaaggtctgtgcagaaggaaggcaggaggttctccaggcaccgagcagaagtttcctgcagyccaggagaggccaatgtcagagcagactgtacctctgcagaccacgggcaccaagcagagcagatctctacgtgcagtcatggaggaacccatg

SEQ ID NO: 53925 - DNA, 600 bp, Chicken  19866894305908_2
taatagaaatgaaatgaaaatgactgcacatgttaataactaccttcacttttattccaaataagaggttaaaatggccaatttcattggataaagaaataatcctggtatggtcatttccatagtgcatcagttatcaaatttagtgctgtaattgggcttacatggcaaggttttgttagtgggggctgcagcygaggcctctgtgagcagagcccagcaggtgtcccatgtcagaacagagccagctccagctgctccaaaaggggcctgctgtcctgtgcaagaataggtgggagwgargagtgagaaaatgtgaaygaaatagccctgtagccaccaaggtctgtgcagaaggaaggcaggaggttctccaggcaccgagcagaagtttcctgcagyccaggagaggccaatgtcagagcagactgtacctctgcagaccacgggcaccaagcagagcagatctctacgtgcagtcatggaggaacccatgaagcagcagtggacggagcctgaaggagccacagcccrtggatactcccacagaactggagctgcagcccatggggagcagccctgtggtggggcaggagggct

SEQ ID NO: 53926 - DNA, 600 bp, Chicken  19866894305908_3
tagaaatgaaatgaaaatgactgcacatgttaataactaccttcacttttattccaaataagaggttaaaatggccaatttcattggataaagaaataatcctggtatggtcatttccatagtgcatcagttatcaaatttagtgctgtaattgggcttacatggcaaggttttgttagtgggggctgcagcygaggcctctgtgagcagagcccagcaggtgtcccatgtcagaacagagccagctccagctgctccaaaaggggcctgctgtcctgtgcaagaataggtgggagwgargagtgagaaaatgtgaaygaaatagccctgtagccaccaaggtctgtgcagaaggaaggcaggaggttctccaggcaccgagcagaagtttcctgcagyccaggagaggccaatgtcagagcagactgtacctctgcagaccacgggcaccaagcagagcagatctctacgtgcagtcatggaggaacccatgaagcagcagtggacggagcctgaaggagccacagcccrtggatactcccacagaactggagctgcagcccatggggagcagccctgtggtggggcaggagggctgag

SEQ ID NO: 53927 - DNA, 600 bp, Chicken  19866894305908_4
gactgcacatgttaataactaccttcacttttattccaaataagaggttaaaatggccaatttcattggataaagaaataatcctggtatggtcatttccatagtgcatcagttatcaaatttagtgctgtaattgggcttacatggcaaggttttgttagtgggggctgcagcygaggcctctgtgagcagagcccagcaggtgtcccatgtcagaacagagccagctccagctgctccaaaaggggcctgctgtcctgtgcaagaataggtgggagwgargagtgagaaaatgtgaaygaaatagccctgtagccaccaaggtctgtgcagaaggaaggcaggaggttctccaggcaccgagcagaagtttcctgcagyccaggagaggccaatgtcagagcagactgtacctctgcagaccacgggcaccaagcagagcagatctctacgtgcagtcatggaggaacccatgaagcagcagtggacggagcctgaaggagccacagcccrtggatactcccacagaactggagctgcagcccatggggagcagccctgtggtggggcaggagggctgagggagctgccgcccacagg

SEQ ID NO: 53928 - DNA, 598 bp, Chicken  19866894305908_5
tcctggtatggtcatttccatagtgcatcagttatcaaatttagtgctgtaattgggcttacatggcaaggttttgttagtgggggctgcagcygaggcctctgtgagcagagcccagcaggtgtcccatgtcagaacagagccagctccagctgctccaaaaggggcctgctgtcctgtgcaagaataggtgggagwgargagtgagaaaatgtgaaygaaatagccctgtagccaccaaggtctgtgcagaaggaaggcaggaggttctccaggcaccgagcagaagtttcctgcagyccaggagaggccaatgtcagagcagactgtacctctgcagaccacgggcaccaagcagagcagatctctacgtgcagtcatggaggaacccatgaagcagcagtggacggagcctgaaggagccacagcccrtggatactcccacagaactggagctgcagcccatggggagcagccctgtggtggggcaggagggctgagggagctgccgcccacagggacctgtgctggagcagtgcctgaagggtgggccctgtcgtctggagctgtgttggagcgctgtcagaagagctgcagc

SEQ ID NO: 53929 - DNA, 466 bp, Chicken  19866894305908_6
cagaacagagccagctccagctgctccaaaaggggcctgctgtcctgtgcaagaataggtgggagwgargagtgagaaaatgtgaaygaaatagccctgtagccaccaaggtctgtgcagaaggaaggcaggaggttctccaggcaccgagcagaagtttcctgcagyccaggagaggccaatgtcagagcagactgtacctctgcagaccacgggcaccaagcagagcagatctctacgtgcagtcatggaggaacccatgaagcagcagtggacggagcctgaaggagccacagcccrtggatactcccacagaactggagctgcagcccatggggagcagccctgtggtggggcaggagggctgagggagctgccgcccacagggacctgtgctggagcagtgcctgaagggtgggccctgtcgtctggagctgtgttggagcgctgtcagaagagctgcagc

SEQ ID NO: 53930 - DNA, 600 bp, Chicken  19866894305911_1
gaggaggatgcatccctttcaaggggacacagtcacatttcaccccaagcgcagtgggtttggccagcagtggcaactcgtgttttctctttcccctgcccctgcccagatgtctttggaatagggacaggtcaggaactctgctcagcaattctgaggccattcccaaaactcctttccaagtcaagctcacgtgggtgggaagggcgtagcttccagctcactcagcacgtgttagcagcagtgatgctgtgtgggacgtgagaccccgtccccagcaggggctgcgtcccctggccrggtstaaatctgctggagcagctcctgcctgcaccgggcagctgtgaaggggaggaggcagctccattgctggtggaagcctggtgaggtcagtggagctgcacgtgggacagagctggtcccagagatctgacggcctctcctcttcgtcagcatgcagcatggctgggctgcattttttacacattgctaagccatccatttccgaaatcccaagacaagctcagtgcaaaggcacacgatcaaggagacatctgccttccttgaatgcatccatctgtgttcccccgacaccccaga

SEQ ID NO: 53931 - DNA, 600 bp, Chicken  19866894305911_2
aggatgcatccctttcaaggggacacagtcacatttcaccccaagcgcagtgggtttggccagcagtggcaactcgtgttttctctttcccctgcccctgcccagatgtctttggaatagggacaggtcaggaactctgctcagcaattctgaggccattcccaaaactcctttccaagtcaagctcacgtgggtgggaagggcgtagcttccagctcactcagcacgtgttagcagcagtgatgctgtgtgggacgtgagaccccgtccccagcaggggctgcgtcccctggccrggtstaaatctgctggagcagctcctgcctgcaccgggcagctgtgaaggggaggaggcagctccattgctggtggaagcctggtgaggtcagtggagctgcacgtgggacagagctggtcccagagatctgacggcctctcctcttcgtcagcatgcagcatggctgggctgcattttttacacattgctaagccatccatttccgaaatcccaagacaagctcagtgcaaaggcacacgatcaaggagacatctgccttccttgaatgcatccatctgtgttcccccgacaccccagagctt

SEQ ID NO: 53932 - DNA, 600 bp, Chicken  19866894305911_3
caccgggcagctgtgaaggggaggaggcagctccattgctggtggaagcctggtgaggtcagtggagctgcacgtgggacagagctggtcccagagatctgacggcctctcctcttcgtcagcatgcagcatggctgggctgcattttttacacattgctaagccatccatttccgaaatcccaagacaagctcagtgcaaaggcacacgatcaaggagacatctgccttccttgaatgcatccatctgtgttcccccgacaccccagagcttatctccctgccaaaaagctattacatragaccccgacttaaatttcacttcragctcggttgatcggcagtttccagttgtgtcaacacgttgctgatggatgggactgtactgtctgtgctccctgcgccggacctcagattcacctttggggagctcagtcctgttcagctggatggtgtggatgtgccgtgggattttcgcctccctacctgagctggtgcctgctggaaggacagcagagcacccatcctgctgctgccctcctgcctcttggaaatggtgttgcaaaccacagaggagtgttcgaccacaaccttgatgtcc

SEQ ID NO: 53933 - DNA, 600 bp, Chicken  19866894305911_4
ggcagctccattgctggtggaagcctggtgaggtcagtggagctgcacgtgggacagagctggtcccagagatctgacggcctctcctcttcgtcagcatgcagcatggctgggctgcattttttacacattgctaagccatccatttccgaaatcccaagacaagctcagtgcaaaggcacacgatcaaggagacatctgccttccttgaatgcatccatctgtgttcccccgacaccccagagcttatctccctgccaaaaagctattacatragaccccgacttaaatttcacttcragctcggttgatcggcagtttccagttgtgtcaacacgttgctgatggatgggactgtactgtctgtgctccctgcgccggacctcagattcacctttggggagctcagtcctgttcagctggatggtgtggatgtgccgtgggattttcgcctccctacctgagctggtgcctgctggaaggacagcagagcacccatcctgctgctgccctcctgcctcttggaaatggtgttgcaaaccacagaggagtgttcgaccacaaccttgatgtccaccagctgtaacagcaaaggcttgc

SEQ ID NO: 53934 - DNA, 600 bp, Chicken  19866894305913_1
tgccaggtttagtgtaatttttttttttttttttttttgaatggatgagtgaatgaatgaatgaacacctgattaagttaatgaagctgagccaatggtgggagggagtgacttggctgctgactgctctaagagatctggcagcgcattagacttgtataatgctttacagctccacgctgcgctccatatgagccacaggagagggctgcaataattactgggctttttgattgaaaccagctgcaggtagctcatcatccttttgtccattttgctggtgtcaggggtaacttgtckctgcagctcggattccgagtggcagmtgggtcagatgctttcacagagcgattgcrgcactgagagggcatctttgttgctcagcagctcttacacgaggcccrttcagatggccaagctgtgattcacagacctgcgtgtccgatggaggaattttttagttcccgagttcaagactcccacataaataacctttatgggagatctgtgatttatttttcttccctatgttggctgggagaaggggagcaaaaggttttcttgtatctgctttttgtaagaaaaggcgtttttaagtcc

SEQ ID NO: 53935 - DNA, 600 bp, Chicken  19866894305913_2
ttttttttttttgaatggatgagtgaatgaatgaatgaacacctgattaagttaatgaagctgagccaatggtgggagggagtgacttggctgctgactgctctaagagatctggcagcgcattagacttgtataatgctttacagctccacgctgcgctccatatgagccacaggagagggctgcaataattactgggctttttgattgaaaccagctgcaggtagctcatcatccttttgtccattttgctggtgtcaggggtaacttgtckctgcagctcggattccgagtggcagmtgggtcagatgctttcacagagcgattgcrgcactgagagggcatctttgttgctcagcagctcttacacgaggcccrttcagatggccaagctgtgattcacagacctgcgtgtccgatggaggaattttttagttcccgagttcaagactcccacataaataacctttatgggagatctgtgatttatttttcttccctatgttggctgggagaaggggagcaaaaggttttcttgtatctgctttttgtaagaaaaggcgtttttaagtcctcccagttctttttgactgcagttta

SEQ ID NO: 53936 - DNA, 600 bp, Chicken  19866894305913_3
atgaatgaacacctgattaagttaatgaagctgagccaatggtgggagggagtgacttggctgctgactgctctaagagatctggcagcgcattagacttgtataatgctttacagctccacgctgcgctccatatgagccacaggagagggctgcaataattactgggctttttgattgaaaccagctgcaggtagctcatcatccttttgtccattttgctggtgtcaggggtaacttgtckctgcagctcggattccgagtggcagmtgggtcagatgctttcacagagcgattgcrgcactgagagggcatctttgttgctcagcagctcttacacgaggcccrttcagatggccaagctgtgattcacagacctgcgtgtccgatggaggaattttttagttcccgagttcaagactcccacataaataacctttatgggagatctgtgatttatttttcttccctatgttggctgggagaaggggagcaaaaggttttcttgtatctgctttttgtaagaaaaggcgtttttaagtcctcccagttctttttgactgcagtttaaagcaagttctccctggcagtcctggatgc

SEQ ID NO: 53937 - DNA, 600 bp, Chicken  19866894305913_4
ggagtgacttggctgctgactgctctaagagatctggcagcgcattagacttgtataatgctttacagctccacgctgcgctccatatgagccacaggagagggctgcaataattactgggctttttgattgaaaccagctgcaggtagctcatcatccttttgtccattttgctggtgtcaggggtaacttgtckctgcagctcggattccgagtggcagmtgggtcagatgctttcacagagcgattgcrgcactgagagggcatctttgttgctcagcagctcttacacgaggcccrttcagatggccaagctgtgattcacagacctgcgtgtccgatggaggaattttttagttcccgagttcaagactcccacataaataacctttatgggagatctgtgatttatttttcttccctatgttggctgggagaaggggagcaaaaggttttcttgtatctgctttttgtaagaaaaggcgtttttaagtcctcccagttctttttgactgcagtttaaagcaagttctccctggcagtcctggatgctgcatacctttgtttctcacgtacttaaattgagagcactggcactgc

SEQ ID NO: 53938 - DNA, 555 bp, Chicken  19866894305915_1
atagcttaatgcaaccacacactgacaacgaattccaagcaagctacaacacgtgggcattctgtttgaacctcatttctttaaaggatactctctctttcttctccaaaaccagccccatctgaggcagtgacagtgtggagctctgatgaatcttttgaaagccgcgtgtaactcgaacgctggctccgcttgtgagcaacactcttcaggttctcattctgaacggcagttgaattggaacctgaactagggttcaggattatttgagatggatctctcataccttgcatttcttcraaattttgattagctcgattgtttggagcgctgttattatttagggttactgtactaggggttctatttaaattatagactttctggcaggctggccagttttcttctgggctacttgctatcaggctgctttccgaggggctcttcttatcttctgagcaaatggacatgcgaaccacggctggatcttgaaggccactaagactgtgtggaattcctctctttccactattactgtcatcttcaagctcaatg

SEQ ID NO: 53939 - DNA, 600 bp, Chicken  19866894305922_1
aaaatcaggatctcgtacttaagctgcagacctcaaacgctctgatgctggttgtacaaattattcaagtcaccacaatgattttgggtagaatcctccagattaagtattgagctgctcattttgtttttaaaaatctttacgagataaaaggatttttaccacacacataaaaaccaaatggaacgaatgggtaatattcaaaacacgctcacacgcagaacacgggctggaatggaatctggtcctaaagatggggcaatttcaagttttttgggaaattctgcaggctgatgtaakcacagtagctctgtatacagtccatggattctgcaagcatcactcctagcttatcatatttatcaagccatgtcaaagttggtattcttcatcaatgtttcatctgaagcaaattctcagcctactgcagygagagcaaaaagtggttcttgtaacccayccgcatccagtaggagaacgggatcccaacacttgtggctcaayttcgagtagttcaagacaggggtaccgcctcggtaagaggcagctttatgaaggaacagacgcaaccatgtttgcctaattcccatttaaatcaca

SEQ ID NO: 53940 - DNA, 600 bp, Chicken  19866894305922_2
aaaaatctttacgagataaaaggatttttaccacacacataaaaaccaaatggaacgaatgggtaatattcaaaacacgctcacacgcagaacacgggctggaatggaatctggtcctaaagatggggcaatttcaagttttttgggaaattctgcaggctgatgtaakcacagtagctctgtatacagtccatggattctgcaagcatcactcctagcttatcatatttatcaagccatgtcaaagttggtattcttcatcaatgtttcatctgaagcaaattctcagcctactgcagygagagcaaaaagtggttcttgtaacccayccgcatccagtaggagaacgggatcccaacacttgtggctcaayttcgagtagttcaagacaggggtaccgcctcggtaagaggcagctttatgaaggaacagacgcaaccatgtttgcctaattcccatttaaatcacagttgataaaaggaggccaggatggccccccatggtcagggcaggagggtggttcaggggaatcccactcctcacagctcttctctctgctgccataccccatcccagaggggctgtgaagcagtgcagacc

SEQ ID NO: 53941 - DNA, 600 bp, Chicken  19866894305922_3
accacacacataaaaaccaaatggaacgaatgggtaatattcaaaacacgctcacacgcagaacacgggctggaatggaatctggtcctaaagatggggcaatttcaagttttttgggaaattctgcaggctgatgtaakcacagtagctctgtatacagtccatggattctgcaagcatcactcctagcttatcatatttatcaagccatgtcaaagttggtattcttcatcaatgtttcatctgaagcaaattctcagcctactgcagygagagcaaaaagtggttcttgtaacccayccgcatccagtaggagaacgggatcccaacacttgtggctcaayttcgagtagttcaagacaggggtaccgcctcggtaagaggcagctttatgaaggaacagacgcaaccatgtttgcctaattcccatttaaatcacagttgataaaaggaggccaggatggccccccatggtcagggcaggagggtggttcaggggaatcccactcctcacagctcttctctctgctgccataccccatcccagaggggctgtgaagcagtgcagaccattgggccaaccatgcagccatgccacca

SEQ ID NO: 53942 - DNA, 584 bp, Chicken  19866894305922_4
aacacgctcacacgcagaacacgggctggaatggaatctggtcctaaagatggggcaatttcaagttttttgggaaattctgcaggctgatgtaakcacagtagctctgtatacagtccatggattctgcaagcatcactcctagcttatcatatttatcaagccatgtcaaagttggtattcttcatcaatgtttcatctgaagcaaattctcagcctactgcagygagagcaaaaagtggttcttgtaacccayccgcatccagtaggagaacgggatcccaacacttgtggctcaayttcgagtagttcaagacaggggtaccgcctcggtaagaggcagctttatgaaggaacagacgcaaccatgtttgcctaattcccatttaaatcacagttgataaaaggaggccaggatggccccccatggtcagggcaggagggtggttcaggggaatcccactcctcacagctcttctctctgctgccataccccatcccagaggggctgtgaagcagtgcagaccattgggccaaccatgcagccatgccaccatttaaatttcttgcagcaccagatctga

SEQ ID NO: 53943 - DNA, 599 bp, Chicken  19866894305926_1
  misc_feature (1)..(75): n is any nucleotide
nnnnnnnnnnnnnnnnnnnnnnnnnnnnnnnnnnnnnnnnnnnnnnnnnnnnnnnnnnnnnnnnnnnnnnnnnnnttctgagctgcaggttttgttctggtctctcagatgtgtgtaaactcaagcaacagcgacaaaacaatgcatctcaatttatgactaaaggaaattcttggcaccctgagcacactgctgtatttactgattttacagtgtaaacacatatgttaccagacagatggacctttccccccagctttcagcaatgggtgtctcatcagggaagggattaagatcttwaaatctttaaacaaggtttcacagcccatgccatggacagccaccccctaaaggctgggattattagacgcaaagtgtgtgctttcagggagcagccaggccacactaaacagataattcagcagtgttttaattatattacagaaaaagggttaacaatagattttactatcaactgcagccaggtggctttgcaagacaaaactgtggcttttcagtccatggaatgcaactcctgaattacccgtgttgtgaacagcgaggtctgtggtttcaaacacaacagctctcatttgaag

SEQ ID NO: 53944 - DNA, 519 bp, Chicken  19866894305926_2
gattttactatcaactgcagccaggtggctttgcaagacaaaactgtggcttttcagtccatggaatgcaactcctgaattacccgtgttgtgaacagcgaggtctgtggtttcaaacacaacagctctcatttgaagctacttttccaaaccaggaacaagattttgatttttgaggcactctaaaatatggaaatacatgtaataatgttctgtaaacataagccgtggatttatgggtacaacaaaattagcattaaggcacttacagatgtgtcagcatatgaactttttaccctkaagccttttttggtcaaagatccactgcaaggtttgtagaatggcagtccctgttacgataaccaatctttccttaaaaacttcacaacactctggtggtcagcctgcaaacaaagcagatcccaccacgccacacagccccacctgccaaggatccctcccacctctgctctctctgctattctttacagaacaatcacaagttttcctttcaaacag

SEQ ID NO: 53945 - DNA, 600 bp, Chicken  19866894305929_1
gtaaaaggataagtgaatgttaaatagtaaataaataatgtagtttaatgtgttgagataatgatgtacaaaatagaaaatataatcttgttgattgaaaagtggtgcatcccaaacaaagctgagccagaactagttccagcagacacagggaaggatcagggaagtagaacagagttgtcgctttgccactgagggcaaatcaggccttatactgcaatattaattgtattttatctttttatttccactacagtatatctttgatccgtgattgtgtcactaacttagcgtcactcwatcatgtatggacttgtttctcatacttcgtgaggattaagaccaatatacaatatttttttcccaacagcaaaataaagtgtttttgttcacgtgtgtgaaaatgtgcacrtagaaaatgtatgtttatctaattattagagggaaaaccaaataatcgctgacaaagctgatctactggactgattttatatgtaatacaagtaatgataaatgagtgattctataaatcatgaaaaactaagctctgggctgtattcacaggcacagaggtcttctgtatagctgcacctgaaatat

SEQ ID NO: 53946 - DNA, 600 bp, Chicken  19866894305929_2
caaacaaagctgagccagaactagttccagcagacacagggaaggatcagggaagtagaacagagttgtcgctttgccactgagggcaaatcaggccttatactgcaatattaattgtattttatctttttatttccactacagtatatctttgatccgtgattgtgtcactaacttagcgtcactcwatcatgtatggacttgtttctcatacttcgtgaggattaagaccaatatacaatatttttttcccaacagcaaaataaagtgtttttgttcacgtgtgtgaaaatgtgcacrtagaaaatgtatgtttatctaattattagagggaaaaccaaataatcgctgacaaagctgatctactggactgattttatatgtaatacaagtaatgataaatgagtgattctataaatcatgaaaaactaagctctgggctgtattcacaggcacagaggtcttctgtatagctgcacctgaaatatttatgcatatttttgtaatatgtgctactgagctcgcatcacttcagtatgtcttcagtctttgcagggaagaaaattcttgacttgcttatattttgaagattgaggtttt

SEQ ID NO: 53947 - DNA, 600 bp, Chicken  19866894305931_1
tggcttgtgcaatgctggaggtctagggttaaataagaacagacttttcataacgatcctttttgatctcagcagattacagaatggctttcattagacatgttcaagaacaggttagaccaccatgtgccactgatgctatcgtggtggtgctgaactcactttagtgttgatgatctgtctcttccaggcctgtatttctgtggcaacttaggggtttcacagcataatgaagaatagttcaactattgatttgaactccaggacacaaagatgtacacattgtgtgatttcatagcwtagctatgtggccagagctatagtgaatatgtggcaagtctgcaaaatcagggattcattgatgaaagtttactgtatatttcattgaaaacattacagtttattacttcacctggacatctcccctgcatgttcactcaatagtctgcacactcaatttgccataacttggagtcagaaatgtggaacttttgctggagacttgtgaggacaacagccctacaggtctgtattaactcctgtggaaaataaccattatgtcttaatttaaatttcttaagcagtctaaaaaatctcttt

SEQ ID NO: 53948 - DNA, 600 bp, Chicken  19866894305943_1
ttgtttgtgttcccaaagagtaaaaccactatggaattgatctcctcttttgagatgcctttgacagagattgtcgtatggcagttcagatgagatggaagtgaagggctccccatggatgcaggactaatgaactttatttctggcttggagactaggattgaattcttaacttacctgtgcctgagctttcttatctcaaaagtggagactaaacagtgccttcatgacagacgcatgcaaacttcagaggaaatctgaagtttgggcagataatgtcctgccacgtgcccttccctmattccctgcagcaaacagctggktgattatttcagggcatctgagatgaggcagggaaggyatggggcaccacagctgcattaggcgctggtttccacttcagygttctcacttttgctccataaarcctcggttatccagccccagcaacctgatcgatgtcacctggagaggttcctgcagaggtcgtcatcaaacatccactctttcagggccctgaggaaatactacaaggccaggtgttgcttcccagagagcttggctgaacaaaaattatggagcagtttctctgctgctaaa

SEQ ID NO: 53949 - DNA, 600 bp, Chicken  19866894305943_2
aaccactatggaattgatctcctcttttgagatgcctttgacagagattgtcgtatggcagttcagatgagatggaagtgaagggctccccatggatgcaggactaatgaactttatttctggcttggagactaggattgaattcttaacttacctgtgcctgagctttcttatctcaaaagtggagactaaacagtgccttcatgacagacgcatgcaaacttcagaggaaatctgaagtttgggcagataatgtcctgccacgtgcccttccctmattccctgcagcaaacagctggktgattatttcagggcatctgagatgaggcagggaaggyatggggcaccacagctgcattaggcgctggtttccacttcagygttctcacttttgctccataaarcctcggttatccagccccagcaacctgatcgatgtcacctggagaggttcctgcagaggtcgtcatcaaacatccactctttcagggccctgaggaaatactacaaggccaggtgttgcttcccagagagcttggctgaacaaaaattatggagcagtttctctgctgctaaaccccaaactcagcagagactttg

SEQ ID NO: 53950 - DNA, 600 bp, Chicken  19866894305943_3
tgacagagattgtcgtatggcagttcagatgagatggaagtgaagggctccccatggatgcaggactaatgaactttatttctggcttggagactaggattgaattcttaacttacctgtgcctgagctttcttatctcaaaagtggagactaaacagtgccttcatgacagacgcatgcaaacttcagaggaaatctgaagtttgggcagataatgtcctgccacgtgcccttccctmattccctgcagcaaacagctggktgattatttcagggcatctgagatgaggcagggaaggyatggggcaccacagctgcattaggcgctggtttccacttcagygttctcacttttgctccataaarcctcggttatccagccccagcaacctgatcgatgtcacctggagaggttcctgcagaggtcgtcatcaaacatccactctttcagggccctgaggaaatactacaaggccaggtgttgcttcccagagagcttggctgaacaaaaattatggagcagtttctctgctgctaaaccccaaactcagcagagactttgtcagccttgagcagtgaatcctgttcggctgggaagtg

SEQ ID NO: 53951 - DNA, 600 bp, Chicken  19866894305943_4
agggctccccatggatgcaggactaatgaactttatttctggcttggagactaggattgaattcttaacttacctgtgcctgagctttcttatctcaaaagtggagactaaacagtgccttcatgacagacgcatgcaaacttcagaggaaatctgaagtttgggcagataatgtcctgccacgtgcccttccctmattccctgcagcaaacagctggktgattatttcagggcatctgagatgaggcagggaaggyatggggcaccacagctgcattaggcgctggtttccacttcagygttctcacttttgctccataaarcctcggttatccagccccagcaacctgatcgatgtcacctggagaggttcctgcagaggtcgtcatcaaacatccactctttcagggccctgaggaaatactacaaggccaggtgttgcttcccagagagcttggctgaacaaaaattatggagcagtttctctgctgctaaaccccaaactcagcagagactttgtcagccttgagcagtgaatcctgttcggctgggaagtggccatcacttcatcctgtaatctttcattcgtctcatctattt

SEQ ID NO: 53952 - DNA, 600 bp, Chicken  19866894305943_5
taatgaactttatttctggcttggagactaggattgaattcttaacttacctgtgcctgagctttcttatctcaaaagtggagactaaacagtgccttcatgacagacgcatgcaaacttcagaggaaatctgaagtttgggcagataatgtcctgccacgtgcccttccctmattccctgcagcaaacagctggktgattatttcagggcatctgagatgaggcagggaaggyatggggcaccacagctgcattaggcgctggtttccacttcagygttctcacttttgctccataaarcctcggttatccagccccagcaacctgatcgatgtcacctggagaggttcctgcagaggtcgtcatcaaacatccactctttcagggccctgaggaaatactacaaggccaggtgttgcttcccagagagcttggctgaacaaaaattatggagcagtttctctgctgctaaaccccaaactcagcagagactttgtcagccttgagcagtgaatcctgttcggctgggaagtggccatcacttcatcctgtaatctttcattcgtctcatctatttttatctttccagttctctttcca

SEQ ID NO: 53953 - DNA, 600 bp, Chicken  19866894305944_1
ctgcacgcttggcgtctctgtatcagaattaaaaatgcaagaagctatgaatacagtactgctctgtaaagctgggcacagcatctgaaagcagaactcaatacactttagccatataagctttaaaagccacagcaaactagttaatttgaatgactgtatacgtgcatgggcaacattaataagatgtctgatgtgaacgttcacacacagtgtgatttatgtcagcactcaccctcccaacatttgggttgagctgtgtgcctgcacaaggcctgctgctcagcagcatcacatcaycagctycgtaaatatacatcctcacagggagagmttttctgtgagaaatttcaccctctccatctcagttcagatgcacctaaccacatttttctcagacaggaaacagctcctacgagtggatctctcccttctgcacttccaggcaccctcttctgcacatagcaattagctgagcttgttctgctcttgtggtgactgcaacttgggattcctgtggttcgtcacacaactgttttgcacacactgcccggctttacaggacagctttgtgctcacagcatcttcttacttttttat

SEQ ID NO: 53954 - DNA, 600 bp, Chicken  19866894305944_2
gcttggcgtctctgtatcagaattaaaaatgcaagaagctatgaatacagtactgctctgtaaagctgggcacagcatctgaaagcagaactcaatacactttagccatataagctttaaaagccacagcaaactagttaatttgaatgactgtatacgtgcatgggcaacattaataagatgtctgatgtgaacgttcacacacagtgtgatttatgtcagcactcaccctcccaacatttgggttgagctgtgtgcctgcacaaggcctgctgctcagcagcatcacatcaycagctycgtaaatatacatcctcacagggagagmttttctgtgagaaatttcaccctctccatctcagttcagatgcacctaaccacatttttctcagacaggaaacagctcctacgagtggatctctcccttctgcacttccaggcaccctcttctgcacatagcaattagctgagcttgttctgctcttgtggtgactgcaacttgggattcctgtggttcgtcacacaactgttttgcacacactgcccggctttacaggacagctttgtgctcacagcatcttcttacttttttatttctga

SEQ ID NO: 53955 - DNA, 600 bp, Chicken  19866894305944_3
atgcaagaagctatgaatacagtactgctctgtaaagctgggcacagcatctgaaagcagaactcaatacactttagccatataagctttaaaagccacagcaaactagttaatttgaatgactgtatacgtgcatgggcaacattaataagatgtctgatgtgaacgttcacacacagtgtgatttatgtcagcactcaccctcccaacatttgggttgagctgtgtgcctgcacaaggcctgctgctcagcagcatcacatcaycagctycgtaaatatacatcctcacagggagagmttttctgtgagaaatttcaccctctccatctcagttcagatgcacctaaccacatttttctcagacaggaaacagctcctacgagtggatctctcccttctgcacttccaggcaccctcttctgcacatagcaattagctgagcttgttctgctcttgtggtgactgcaacttgggattcctgtggttcgtcacacaactgttttgcacacactgcccggctttacaggacagctttgtgctcacagcatcttcttacttttttatttctgatacagcaaatatgctttcatgcctttct

SEQ ID NO: 53956 - DNA, 600 bp, Chicken  19866894305946_1
tgaagcacagctactgatgcaaacaaaacattactgcttaacccctttgtagtgcaaaggccagtaatctcttgtatgtaactagagctaggaagcagcttatttgaaatacaactactatttagatttataggcttaatgactttacttctggattaaggaagcatgttttcagcatgtttaaatgagcttaaagcacaaacttatcttggcaacttttagcacttctaatgtccaccatgatttttattttatttcattttggctgcttccctacctgatagcttcttaatgcaagaytaatgtagctaagcagtaaaacaaataaacaaaactaaactaaacaaaaaactagcagtgatgcagggagtcagctgactggatgttcagtatgcaatttcaccttaagcgaagcacaacttcattatatcagtgtaagccaccattacaaagcttattgactgctgtctctatttttttcccacagttttgctacagaataggaatatactttttcacaatagcagacaaattcttagaagccttctacagaaaaggcttgtgaacatgtccctcactgtggaggttctgttataacta

SEQ ID NO: 53957 - DNA, 600 bp, Chicken  19866894305951_1
ggctgaaccctagaaacattagttcctcctcattatgccagtgtgttgttctttgttcagtgttttaatataaaatggggttttaaaatataagacctgccatttttatgggtatcaatcaactatacaaaacaaaatattcaaatgctgtgatttaaaatgtactgcgaatgacagtagaccattttattcttggccttaagacattcaaatgaggacacatgctgcagaataaaaacgaacatgagttctctctgattagcactatatgacttcaactttttttcagattgtccatgstaatgtctttgcccattgcataaatgtgatggaagagctttaggctgacgctgctctagctatcaaaaattccctcttcaaggaaaacttcagacaaattattctgagattccttccttatcaggttcttcgcatttgtgagcaaagaaacataataaaaaatgtcctgaatactgaaagactggacatttgtatgccagtttttaatgaacctcatgcaaatagccatctaaagctagtgaaggtgaggactgaatagtatgacatatggtgaataaaatcaataatattggaacagta

SEQ ID NO: 53958 - DNA, 599 bp, Chicken  19866894305954_1
  misc_feature (1)..(94): n is any nucleotide
nnnnnnnnnnnnnnnnnnnnnnnnnnnnnnnnnnnnnnnnnnnnnnnnnnnnnnnnnnnnnnnnnnnnnnnnnnnnnnnnnnnnnnnnnnnnnnctgtgccgatgtggccggtgcctgttatgtggtcagtgcctgttagtacactcacagttctagctgctgtgcactggtgtgcactggtgtcttctgggtacaagaggcagcttgctgcaaggggagcaagctcccctgtgctaaccacaccgtgaggccatgcacatgagcattgcccacaaagctgtgaggacactgtaagtgtrccccgtagcttatgccatggtaactttttgatctacccttagttttcgtttaattggacatctyatatgagcttaaccaaaataaaatgtttaataccctctctttctgccagcagggttaggagagtgacttacagcgtggctgaactttagttactgctaacagcagggctttttttacttggagggagaatgcaaagtcgtggtggcagagctcagcggttggttccagtggtttaggtcagcatgttcttgttatagaaaacggagagccagtgggataaaacttaagtyctgca

SEQ ID NO: 53959 - DNA, 599 bp, Chicken  19866894305954_2
  misc_feature (1)..(30): n is any nucleotide
nnnnnnnnnnnnnnnnnnnnnnnnnnnnnnctgtgccgatgtggccggtgcctgttatgtggtcagtgcctgttagtacactcacagttctagctgctgtgcactggtgtgcactggtgtcttctgggtacaagaggcagcttgctgcaaggggagcaagctcccctgtgctaaccacaccgtgaggccatgcacatgagcattgcccacaaagctgtgaggacactgtaagtgtrccccgtagcttatgccatggtaactttttgatctacccttagttttcgtttaattggacatctyatatgagcttaaccaaaataaaatgtttaataccctctctttctgccagcagggttaggagagtgacttacagcgtggctgaactttagttactgctaacagcagggctttttttacttggagggagaatgcaaagtcgtggtggcagagctcagcggttggttccagtggtttaggtcagcatgttcttgttatagaaaacggagagccagtgggataaaacttaagtyctgcagatgtttaatgacaggtttcagcaaacttacgaactcttcaactatgtagcacaatatcagagc

SEQ ID NO: 53960 - DNA, 572 bp, Chicken  19866894305954_3
agtgtrccccgtagcttatgccatggtaactttttgatctacccttagttttcgtttaattggacatctyatatgagcttaaccaaaataaaatgtttaataccctctctttctgccagcagggttaggagagtgacttacagcgtggctgaactttagttactgctaacagcagggctttttttacttggagggagaatgcaaagtcgtggtggcagagctcagcggttggttccagtggtttaggtcagcatgttcttgttatagaaaacggagagccagtgggataaaacttaagtyctgcagatgtttaatgacaggtttcagcaaacttacgaactcttcaactatgtagcacaatatcagagccagacactgtggacagtatatttcaaataaatatttaggagttgccagtggaagctaaactttgcaaaatatgaaataattctcaaaagagttcagatttgttaaagctaccaatttcttgaagctatgacagggaamatactgcatacacattggctcacgtgccaaagaggaaagcttttgcatgcaaacaagggaagatg

SEQ ID NO: 53961 - DNA, 365 bp, Chicken  19866894305954_4
cgtggtggcagagctcagcggttggttccagtggtttaggtcagcatgttcttgttatagaaaacggagagccagtgggataaaacttaagtyctgcagatgtttaatgacaggtttcagcaaacttacgaactcttcaactatgtagcacaatatcagagccagacactgtggacagtatatttcaaataaatatttaggagttgccagtggaagctaaactttgcaaaatatgaaataattctcaaaagagttcagatttgttaaagctaccaatttcttgaagctatgacagggaamatactgcatacacattggctcacgtgccaaagaggaaagcttttgcatgcaaacaagggaagatg

SEQ ID NO: 53962 - DNA, 600 bp, Chicken  19866894305956_1
gcagttccgctacctgcagcgcctgctcctggtccacggacgctggtcctacatccgcatgtgcaagttcctcaagtacttcttctataagaattttgccttcacattagtgcatttctggtatggattcttctccggcttctcagctcaggtaggtcagcttctctgctctcatgatcgtctttagcatttccaaggaaaatatctgggagtattttaaactaaacccgttctccctgcttcactgtaaggcacacagttccgtcttcagcttgtacaaaactggtgaaagttctactrgtaaagraaagatgcctaaagacatttaggtgccttatgaagaatgtaggcacctcctgggatttttgaaagtgttcaaactgattacagccatcaaagtaggatgcagattacccagagcctgaccattgtattgcagatctgtgtaggacctgtgattttcatgaacacrcaagaagagccatactgggtcaggtgaaggagctcttgtagtgactgtgggcagtagtgggtgcttagcagtcagaactgacataaagtcatccttctcttgcatgttccctaccttctggtagtgag

SEQ ID NO: 53963 - DNA, 600 bp, Chicken  19866894305956_2
cgctacctgcagcgcctgctcctggtccacggacgctggtcctacatccgcatgtgcaagttcctcaagtacttcttctataagaattttgccttcacattagtgcatttctggtatggattcttctccggcttctcagctcaggtaggtcagcttctctgctctcatgatcgtctttagcatttccaaggaaaatatctgggagtattttaaactaaacccgttctccctgcttcactgtaaggcacacagttccgtcttcagcttgtacaaaactggtgaaagttctactrgtaaagraaagatgcctaaagacatttaggtgccttatgaagaatgtaggcacctcctgggatttttgaaagtgttcaaactgattacagccatcaaagtaggatgcagattacccagagcctgaccattgtattgcagatctgtgtaggacctgtgattttcatgaacacrcaagaagagccatactgggtcaggtgaaggagctcttgtagtgactgtgggcagtagtgggtgcttagcagtcagaactgacataaagtcatccttctcttgcatgttccctaccttctggtagtgagcaggtta

SEQ ID NO: 53964 - DNA, 525 bp, Chicken  19866894305956_3
catgatcgtctttagcatttccaaggaaaatatctgggagtattttaaactaaacccgttctccctgcttcactgtaaggcacacagttccgtcttcagcttgtacaaaactggtgaaagttctactrgtaaagraaagatgcctaaagacatttaggtgccttatgaagaatgtaggcacctcctgggatttttgaaagtgttcaaactgattacagccatcaaagtaggatgcagattacccagagcctgaccattgtattgcagatctgtgtaggacctgtgattttcatgaacacrcaagaagagccatactgggtcaggtgaaggagctcttgtagtgactgtgggcagtagtgggtgcttagcagtcagaactgacataaagtcatccttctcttgcatgttccctaccttctggtagtgagcaggttagggctgttgagctcaagtcttgctatacttttggtctcaatagaatcttcagtcatgatgctccagcatctaattaacagaatcataaaa

SEQ ID NO: 53965 - DNA, 600 bp, Chicken  19866894305957_1
gtacaaaggctcacatgccccatttaacaaaagcaaaaagcctctgttggtgtcatggctgtggtatgtaaaatcctgacctgctttatgagagcagcacacctgagtgctggataaaagaaaagggggtacaggtgctgcctttgcctgcaccccttctgcatgagcagattaagaaattcctactgaaacacaggctctgctcagaaccactgctccccaccactcactcgaagtaatcaagttttatattcctttcatgaaagggtaatcactgtgcaattagcaagcctgctgcayaaatggaaaatcacctggggggttggagtgtgctcccttagtgctgtgcttgggctgaatgggatgggggtgagggtgggcaggggctggtggtgggagggccctgagctgctcctgagtttctgctgtagaagcctggcttccagtactacggcagcggrtctgtcacatggagactcggtccctgttaccatcaatggcttccattggcactgcatgggggctgggtgcaccctgcctcacccaggtgttactgagcacttggctcagctctgggggcaggagagacagaaaggcccc

SEQ ID NO: 53966 - DNA, 600 bp, Chicken  19866894305957_2
catgagcagattaagaaattcctactgaaacacaggctctgctcagaaccactgctccccaccactcactcgaagtaatcaagttttatattcctttcatgaaagggtaatcactgtgcaattagcaagcctgctgcayaaatggaaaatcacctggggggttggagtgtgctcccttagtgctgtgcttgggctgaatgggatgggggtgagggtgggcaggggctggtggtgggagggccctgagctgctcctgagtttctgctgtagaagcctggcttccagtactacggcagcggrtctgtcacatggagactcggtccctgttaccatcaatggcttccattggcactgcatgggggctgggtgcaccctgcctcacccaggtgttactgagcacttggctcagctctgggggcaggagagacagaaaggccccagggactgtccccttttgcaggacagcgctctgccaccttgcacatccccttcagtggccgcgatgaggtgaggtacagccaggtcagcaagggaggacagggcagattcgttccctgccctgaggagctcaaagcccaggctcactgcacagyagtagtt

SEQ ID NO: 53967 - DNA, 600 bp, Chicken  19866894305957_3
cagcggrtctgtcacatggagactcggtccctgttaccatcaatggcttccattggcactgcatgggggctgggtgcaccctgcctcacccaggtgttactgagcacttggctcagctctgggggcaggagagacagaaaggccccagggactgtccccttttgcaggacagcgctctgccaccttgcacatccccttcagtggccgcgatgaggtgaggtacagccaggtcagcaagggaggacagggcagattcgttccctgccctgaggagctcaaagcccaggctcactgcacagyagtagttcattgttcattgggagcagaatgaaagatcaaatccagaacattacaaaagctttgccgtctcaggctaatccagtatttctagtctaaaaataactgactgacttctgaaacccagaagtgatggagacaatgcagccgagcttcagtaggttctgcagtgggcaaaacaagagctgctggaaggaaccaaaaagcaaaatccacacacacctcgcagggcgcgcagcccccgcagcccctgcccaatgctgagcagtcgctgtgatcccaggggtggtgaggggtcactgc

SEQ ID NO: 53968 - DNA, 600 bp, Chicken  19866894305960_1
ggaaggcggaatttgactctgtgacatccttgttgggaactgccagcttcacagatttgctgtcagtgtaaatcagattagattttatttaattaaagcagcttatctgccatccatactaattactgcagttcatcttaactagatgcaattctgtttccttaaattttcacaaattattatgaatacgggaattcttcaatttcattaatgtagtcaacagattcaaacttcaataagataatcacgttccattaaatttggaggtaggaataaaaatgcaggatgggtatgccgagwtgcttgcccagaatacarttctagttgaaatgttctttctctttctggttgatttataaggcattagaaacgtcacactgctcttgcaatgtgttgtttcatttctgagcaaggctctacaagtaatgccacagggagcaatgccacatcctgaaagtggagtcagtggggttctgcagggtatcccgtgcgcacagctggaaagcagcagaatgcgatcttgtctgctgtatacctcaggcaatgtatttcccatctattgtccaataatgctcacttttaatttttgccttttctcag

SEQ ID NO: 53969 - DNA, 600 bp, Chicken  19866894305960_2
ctgtgacatccttgttgggaactgccagcttcacagatttgctgtcagtgtaaatcagattagattttatttaattaaagcagcttatctgccatccatactaattactgcagttcatcttaactagatgcaattctgtttccttaaattttcacaaattattatgaatacgggaattcttcaatttcattaatgtagtcaacagattcaaacttcaataagataatcacgttccattaaatttggaggtaggaataaaaatgcaggatgggtatgccgagwtgcttgcccagaatacarttctagttgaaatgttctttctctttctggttgatttataaggcattagaaacgtcacactgctcttgcaatgtgttgtttcatttctgagcaaggctctacaagtaatgccacagggagcaatgccacatcctgaaagtggagtcagtggggttctgcagggtatcccgtgcgcacagctggaaagcagcagaatgcgatcttgtctgctgtatacctcaggcaatgtatttcccatctattgtccaataatgctcacttttaatttttgccttttctcagtaacctttttttcttttc

SEQ ID NO: 53970 - DNA, 600 bp, Chicken  19866894305966_1
tcatagaagtccttcctatttgtatctggtcgtctggaagtgggtcttctggcagatggcagaagctcagcaaggtgactgcataggtccccagcttccccacctctcacctctaagagctcaactactactgctactcaatgccatagatctctctggttctgctgaaggaaggcctgagatgtgtaaggattccccccaaaggtttcctctgggcaaagacaccagaactgtgagggtgaggaaagctaccttgcatcatcagcctaccgtgaggctgagaaaccccaaaggaagaakccacatctgggttctcaccctcaacagcaagtggtggctttggaaaagtcatgacagagagaagggcttgagagaaggccaccatgcagaggggctcccctacagggcccagcaccagagcttgctgctgaactgacttcaaccaggggggaaactctacagtacaaacaggccccacacattcatttcttcctgatgctcctcgactgctgtcacaatcsaaacaaaggggaaacgacctgggggggagaaccctgcctcaaagggacaagcacacactccccatgtctgaacacacwt

SEQ ID NO: 53971 - DNA, 600 bp, Chicken  19866894305966_2
acaccagaactgtgagggtgaggaaagctaccttgcatcatcagcctaccgtgaggctgagaaaccccaaaggaagaakccacatctgggttctcaccctcaacagcaagtggtggctttggaaaagtcatgacagagagaagggcttgagagaaggccaccatgcagaggggctcccctacagggcccagcaccagagcttgctgctgaactgacttcaaccaggggggaaactctacagtacaaacaggccccacacattcatttcttcctgatgctcctcgactgctgtcacaatcsaaacaaaggggaaacgacctgggggggagaaccctgcctcaaagggacaagcacacactccccatgtctgaacacacwtttcactgtgtatacaaaaccaagagcgtcagtggcccaaaatagaacctaagcacgyatgtgacctgttacaaagcagccaacaaaatcagttctcagcccattcccgggcacacaacaaagtcaggtctgtggggcagagtgcaacataaattaacgctaacccgtgcaacctctgcttcacaagtcataaatctgaagtggaagttctctctcttttct

SEQ ID NO: 53972 - DNA, 538 bp, Chicken  19866894305966_3
kccacatctgggttctcaccctcaacagcaagtggtggctttggaaaagtcatgacagagagaagggcttgagagaaggccaccatgcagaggggctcccctacagggcccagcaccagagcttgctgctgaactgacttcaaccaggggggaaactctacagtacaaacaggccccacacattcatttcttcctgatgctcctcgactgctgtcacaatcsaaacaaaggggaaacgacctgggggggagaaccctgcctcaaagggacaagcacacactccccatgtctgaacacacwtttcactgtgtatacaaaaccaagagcgtcagtggcccaaaatagaacctaagcacgyatgtgacctgttacaaagcagccaacaaaatcagttctcagcccattcccgggcacacaacaaagtcaggtctgtggggcagagtgcaacataaattaacgctaacccgtgcaacctctgcttcacaagtcataaatctgaagtggaagttctctctcttttcttcttggggagcatttc

SEQ ID NO: 53973 - DNA, 480 bp, Chicken  19866894305966_4
agagaagggcttgagagaaggccaccatgcagaggggctcccctacagggcccagcaccagagcttgctgctgaactgacttcaaccaggggggaaactctacagtacaaacaggccccacacattcatttcttcctgatgctcctcgactgctgtcacaatcsaaacaaaggggaaacgacctgggggggagaaccctgcctcaaagggacaagcacacactccccatgtctgaacacacwtttcactgtgtatacaaaaccaagagcgtcagtggcccaaaatagaacctaagcacgyatgtgacctgttacaaagcagccaacaaaatcagttctcagcccattcccgggcacacaacaaagtcaggtctgtggggcagagtgcaacataaattaacgctaacccgtgcaacctctgcttcacaagtcataaatctgaagtggaagttctctctcttttcttcttggggagcatttc

SEQ ID NO: 53974 - DNA, 600 bp, Chicken  19866894305977_1
acttttaaagtacgcagggttaaatatccatgccattcagttgttatggtattccagtgtcttttctcctcacagcacagacgaggcaagatgtcatccttgcttagacctcttcagagcatttctttgctgttacttttcgtttccaaagcatctatggggtaggttgctggcacttattttcatgaatgaatggctaattccttactctgcaaactatgtcataaaataatgaaatgagagggaaaaataaggtcacagaagtaggcagttctgggtagcagctgctattttaacagsatcatgggacagacactaatccatgagacttaaagaagaaaatactttttggaggcaaactcaaatgccctttgtggatgatagtgctacaagatgactcagtctgggtrggaaatgtggttaaatgtcccaaaagcttttctcccacagtgttcctcaacctgtaggcactgttggaaaaagattgttggaagggatgagcttcagaaaggattgctggctttctgatagatcttgaagtacrgtcatgtgcaagttgtttattggcgaatgaaatgaagcattgacagcgggattagg

SEQ ID NO: 53975 - DNA, 600 bp, Chicken  19866894305977_2
tcttcagagcatttctttgctgttacttttcgtttccaaagcatctatggggtaggttgctggcacttattttcatgaatgaatggctaattccttactctgcaaactatgtcataaaataatgaaatgagagggaaaaataaggtcacagaagtaggcagttctgggtagcagctgctattttaacagsatcatgggacagacactaatccatgagacttaaagaagaaaatactttttggaggcaaactcaaatgccctttgtggatgatagtgctacaagatgactcagtctgggtrggaaatgtggttaaatgtcccaaaagcttttctcccacagtgttcctcaacctgtaggcactgttggaaaaagattgttggaagggatgagcttcagaaaggattgctggctttctgatagatcttgaagtacrgtcatgtgcaagttgtttattggcgaatgaaatgaagcattgacagcgggattagggaattactgctggagtggatggcaagcaggtaacccaatgagatgaagacaattacgcacttagatctaaggagatgggaacaagattcttgcaattaggcaacaacaac

SEQ ID NO: 53976 - DNA, 600 bp, Chicken  19866894305977_3
gaaaaataaggtcacagaagtaggcagttctgggtagcagctgctattttaacagsatcatgggacagacactaatccatgagacttaaagaagaaaatactttttggaggcaaactcaaatgccctttgtggatgatagtgctacaagatgactcagtctgggtrggaaatgtggttaaatgtcccaaaagcttttctcccacagtgttcctcaacctgtaggcactgttggaaaaagattgttggaagggatgagcttcagaaaggattgctggctttctgatagatcttgaagtacrgtcatgtgcaagttgtttattggcgaatgaaatgaagcattgacagcgggattagggaattactgctggagtggatggcaagcaggtaacccaatgagatgaagacaattacgcacttagatctaaggagatgggaacaagattcttgcaattaggcaacaacaactgaaaggcatctcttccaacagaactttttcagaaatactgaatttattaaatttcagtgaataaatgctgttgaccttcagtaggaagtaagtgtaagtggtttcagcactctaattgtaatagcctctcttg

SEQ ID NO: 53977 - DNA, 600 bp, Chicken  19866894305984_1
atgagcaccctgtggaagagaaatgcagaagattttcactaacaggttaccaaatgcattctactgttgagaaaaatatatgttttgatgaaaggaatgatgagtggaaaactaattaagaaataactgaggtaaaatcagtgggattttaagttgtatgggtaaatgtttggggagaaagggaaggagatcttgatagaaccattgaggccagtcagcctcacctccgtctctgcaaagatgatggtacaacttgttctggatgccatctccaagcaattgaaagagaagaaggttatyaggagtggttgacatggattcaccaagggcaaatcatgcttgaccaacctgatagctgtctatgatgtcatcactggctgggtagatgcagggagaacaatggatgttgtgtaccttgatttcagcaaggtgtttgacactgtctcccacaacacctttggtaggaaacttagaaaatgtgggataaatgagtggatggtgaggtggattgagaactggctgattgacactgctcagagagtggtcatcagcggtgcagagtctggttggaggcctgtaactagtggtgttctccagggg

SEQ ID NO: 53978 - DNA, 599 bp, Chicken  19866894305990_1
  misc_feature (1)..(54): n is any nucleotide
nnnnnnnnnnnnnnnnnnnnnnnnnnnnnnnnnnnnnnnnnnnnnnnnnnnnnnttgaatagcagctctcttactgtccaattgccctgaatgggcccagtagttcctttacaacaagattgcattatgatacaacagcatggaactgctggtgtctcaaatcatttgttattatctcaaatctagaaggacaaaagctaggaaaatgtcatttccaaaggagtagaagcgacaaaagaaacaaacagtaaaagacacaaatgtttctgaaatatagccaaggtacaaacttttctctayrtataaaataagaagctgcttcatcatgtctccattagagcttctctgtctcakctaccgtatattcatgctggtaagggatgtgttttgtgcattatggttggttaaatatttctcaaaagttaatcccctttgaaatttattaagtagtaaaactaaaattctattaacctttatgggatttacacaagggaattcacacataatgtggatgcaacagtaatgcttaaaactgttgccaggaaaagacgacaagcttagtgcagctaaagccatcacatcttctatttatgtagtcc

SEQ ID NO: 53979 - DNA, 599 bp, Chicken  19866894305990_2
  misc_feature (1)..(53): n is any nucleotide
nnnnnnnnnnnnnnnnnnnnnnnnnnnnnnnnnnnnnnnnnnnnnnnnnnnnnttgaatagcagctctcttactgtccaattgccctgaatgggcccagtagttcctttacaacaagattgcattatgatacaacagcatggaactgctggtgtctcaaatcatttgttattatctcaaatctagaaggacaaaagctaggaaaatgtcatttccaaaggagtagaagcgacaaaagaaacaaacagtaaaagacacaaatgtttctgaaatatagccaaggtacaaacttttctctayrtataaaataagaagctgcttcatcatgtctccattagagcttctctgtctcakctaccgtatattcatgctggtaagggatgtgttttgtgcattatggttggttaaatatttctcaaaagttaatcccctttgaaatttattaagtagtaaaactaaaattctattaacctttatgggatttacacaagggaattcacacataatgtggatgcaacagtaatgcttaaaactgttgccaggaaaagacgacaagcttagtgcagctaaagccatcacatcttctatttatgtagtcct

SEQ ID NO: 53980 - DNA, 600 bp, Chicken  19866894305990_3
ttgaatagcagctctcttactgtccaattgccctgaatgggcccagtagttcctttacaacaagattgcattatgatacaacagcatggaactgctggtgtctcaaatcatttgttattatctcaaatctagaaggacaaaagctaggaaaatgtcatttccaaaggagtagaagcgacaaaagaaacaaacagtaaaagacacaaatgtttctgaaatatagccaaggtacaaacttttctctayrtataaaataagaagctgcttcatcatgtctccattagagcttctctgtctcakctaccgtatattcatgctggtaagggatgtgttttgtgcattatggttggttaaatatttctcaaaagttaatcccctttgaaatttattaagtagtaaaactaaaattctattaacctttatgggatttacacaagggaattcacacataatgtggatgcaacagtaatgcttaaaactgttgccaggaaaagacgacaagcttagtgcagctaaagccatcacatcttctatttatgtagtccttcacaagggtaatcctctgcgtattaaggagagaagaaaatgcaacagactggt

SEQ ID NO: 53981 - DNA, 600 bp, Chicken  19866894305991_1
cggtatttttcagacctcatttccctgtgcacttttctgcacaaaggcctgctatggactcagtgagcacattagcctgagcacaaccagcagggaaacgaccctgggcctgcttttttcactgtttctaaatatatgggcagtgacaggtgtaaaattacaccaaccaggcaataactcagacctgtccgagtgccaattatgtgtctttttacaacgctgggcctctgcctgaacacatcatttaggagaaaaatatgttgtaaaaaggtattcattcaaaagaatgctgtaaaaagygattgttaataatggtctcactcgtttaatcttcattttttctctccgctcctccctgccctgggataaacgagctctgggtgccccgtgttgcgtgcacagtcctgcagagctagcgaataggacatcggcaataaatatacataaatcttaaccatgtatggtctctagctgggtagatggcttacaaaccccagagggatgaccagccataacaaaaatgctaggcaccgttattgggatggcagggacttcagccatgccatgtgcaacaccgtttacagaagcgaagccggcgag

SEQ ID NO: 53982 - DNA, 600 bp, Chicken  19866894305994_1
gattttcttttcccttggtctgaagttaaagatgggagagaaagcaaaatttcctgaaaccgttggctacaaaaggcagaagaactattgtcagatttctaaaagtaaattactttgctctactgaaccatttgtgtactgcagagctacggtctcaatttgcactaatatctgagggtatattttgatcatgcaaatagcgcctttccttgactgtccccactgatgtgccctctcccccagagaaggcatttctaggatgaataagagatgacatttccaagaaaaggaaaacaaaaktttaagacacgcgaatgaagccaggaaatttgcartgcctttgcaattactctcatacactcatttctggagagatgttttgccaccatttcaaagccagtgaatgtattgggagcatgtggatttcagacaatgccaatctgaaaaaaatatcttcattctgacatgcaaaagagtgtccaaagcaatctgtcttctgcctaaaacaggaataccagggaatgcatcaggcgtgctggccagttgttttctcctattgcacattttaagggatgcaaccttatcacagcagttcagggc

SEQ ID NO: 53983 - DNA, 600 bp, Chicken  19866894305994_2
gagagaaagcaaaatttcctgaaaccgttggctacaaaaggcagaagaactattgtcagatttctaaaagtaaattactttgctctactgaaccatttgtgtactgcagagctacggtctcaatttgcactaatatctgagggtatattttgatcatgcaaatagcgcctttccttgactgtccccactgatgtgccctctcccccagagaaggcatttctaggatgaataagagatgacatttccaagaaaaggaaaacaaaaktttaagacacgcgaatgaagccaggaaatttgcartgcctttgcaattactctcatacactcatttctggagagatgttttgccaccatttcaaagccagtgaatgtattgggagcatgtggatttcagacaatgccaatctgaaaaaaatatcttcattctgacatgcaaaagagtgtccaaagcaatctgtcttctgcctaaaacaggaataccagggaatgcatcaggcgtgctggccagttgttttctcctattgcacattttaagggatgcaaccttatcacagcagttcagggcagtcagaaaaactacattccaattttattattatt

SEQ ID NO: 53984 - DNA, 600 bp, Chicken  19866894306001_1
tttcctgaatgttcttgtcaacaaatatcactagtacattattttaaatgtaattatttttgttatgtacacgttaaagatgcacctcagagaaaaagctgtgtccacaggactggctgcaaggtttggaatatccagggatgtttggcgcttgatctcttcctgggcttcatactcagctgattttgatatgatgtcctccttgtattaaaaaggaagttgttgttaagtgtaatgtgtataatgacaccactttcattgtaatgcagaatgcagagcttcaagtgtttgtgacacttyakccagttcctttcaaattgaaaacagacagagagccattctgaatgcaacctgcttggttcagccaccaatcttaccgctgacatctctacaaacagcgcagtgatcaccaaagttgaagaaacttctaacagaattgctcttcaatgcctgaagttttaaaagtaatgtacaaatggtgatttctttcataaatcgcattaaggcaaaagattggttttcctagggagagaagcatggtcatttttcacaaattgaaagcatctggtccaaacagagcagtgcatttaatatatcact

SEQ ID NO: 53985 - DNA, 600 bp, Chicken  19866894306001_2
tcctgaatgttcttgtcaacaaatatcactagtacattattttaaatgtaattatttttgttatgtacacgttaaagatgcacctcagagaaaaagctgtgtccacaggactggctgcaaggtttggaatatccagggatgtttggcgcttgatctcttcctgggcttcatactcagctgattttgatatgatgtcctccttgtattaaaaaggaagttgttgttaagtgtaatgtgtataatgacaccactttcattgtaatgcagaatgcagagcttcaagtgtttgtgacacttyakccagttcctttcaaattgaaaacagacagagagccattctgaatgcaacctgcttggttcagccaccaatcttaccgctgacatctctacaaacagcgcagtgatcaccaaagttgaagaaacttctaacagaattgctcttcaatgcctgaagttttaaaagtaatgtacaaatggtgatttctttcataaatcgcattaaggcaaaagattggttttcctagggagagaagcatggtcatttttcacaaattgaaagcatctggtccaaacagagcagtgcatttaatatatcactat

SEQ ID NO: 53986 - DNA, 600 bp, Chicken  19866894306001_3
ttcaacacatttagcaatgttttggaggaaaatataaatcatttgcagtaaagtttactagtgatccacttggtgaagtcctaaattaatgacagagttaggtcaggtgaatagagtattattctaggtggtttgataaactagtcttatttgaatatcacattgttgatatttccaaatatgacgtaatgcaattcagtacattaaaaaataaataaattttagattggcgaaatgcaaatcccttagcttagatatgttgaccctaaaaacccacttaatacctgtattatataccaytgcaaatctcccagtccagtgctttggctgtgaggaatagcaaattkagaagagagtaatatcaaacaggaaagtgaattgcatctaaacagcaccactgagatcattactggaatattgcccctattctttcagccacttcaaaaaggatgcagggaaaagagtaaaaaagatctagagaactaytgtgattcattcagaattactcagcagtaatctctaagataattcaatgtcttcagtttcttcaaaaggtaaatttatagaatcatggaacagtttgagttacaagaggccttt

SEQ ID NO: 53987 - DNA, 600 bp, Chicken  19866894306001_4
gtaaagtttactagtgatccacttggtgaagtcctaaattaatgacagagttaggtcaggtgaatagagtattattctaggtggtttgataaactagtcttatttgaatatcacattgttgatatttccaaatatgacgtaatgcaattcagtacattaaaaaataaataaattttagattggcgaaatgcaaatcccttagcttagatatgttgaccctaaaaacccacttaatacctgtattatataccaytgcaaatctcccagtccagtgctttggctgtgaggaatagcaaattkagaagagagtaatatcaaacaggaaagtgaattgcatctaaacagcaccactgagatcattactggaatattgcccctattctttcagccacttcaaaaaggatgcagggaaaagagtaaaaaagatctagagaactaytgtgattcattcagaattactcagcagtaatctctaagataattcaatgtcttcagtttcttcaaaaggtaaatttatagaatcatggaacagtttgagttacaagaggccttttaaagactgtttcattcaaatcccttctgctatgggcagggacacct

SEQ ID NO: 53988 - DNA, 600 bp, Chicken  19866894306001_5
taatgcaattcagtacattaaaaaataaataaattttagattggcgaaatgcaaatcccttagcttagatatgttgaccctaaaaacccacttaatacctgtattatataccaytgcaaatctcccagtccagtgctttggctgtgaggaatagcaaattkagaagagagtaatatcaaacaggaaagtgaattgcatctaaacagcaccactgagatcattactggaatattgcccctattctttcagccacttcaaaaaggatgcagggaaaagagtaaaaaagatctagagaactaytgtgattcattcagaattactcagcagtaatctctaagataattcaatgtcttcagtttcttcaaaaggtaaatttatagaatcatggaacagtttgagttacaagaggccttttaaagactgtttcattcaaatcccttctgctatgggcagggacaccttccattaggtcagactgcccaggtccccatccatcctcactctgagcacttccagggattgggcattcacacattctctgggtaacctgtaccagtgcctcaccaccctctaagtaaaaaaattcttccttaaattcta

SEQ ID NO: 53989 - DNA, 600 bp, Chicken  19866894306002_1
agaatttgcagaggcccgagaggacctggctgccctggagaaggactatgaggaagtgggaactgactcatttgaagatgaaaatgatgaagagtaattttaaaatacatcttgttcctagtgagcacagaattgtctctgtatcactgtattgcatatgtctatgattatgtcacacctttgtttgtaatatacaccaataccggaggagtcacgtaaagacatttttttgctccacgaatcacaggtaaattgtcctgtaagatacaattagctgtagtaatgctccaccattcccarcaatgtacagtgacttgctctcctctcttgcacatttaatataagctttttaaaactctaatacacattaaaacatgataatccaataaatacaagcttataatggattacagtgaaacactatagttttcaaatttaaatttgacatagctttgccttttgcttgttggcatggcaaataacaatggaaatggagaaccggctcctctgctctgtgcttcgttatcctctaaatgaccttcaactgattgacataagatgggcatttcactcttctttgaaatatcacttctgataaag

SEQ ID NO: 53990 - DNA, 600 bp, Chicken  19866894306036_1
cagagttctgctctttggtagattcacatatcagagaacaaaacagactatctgggtccatgatatggatagttcagacctgttggtagaagctggactattccaaataatatccaaatatttgaagttcagtcttcagaggatatggggtaattgaaaataggaattagagaaaaaaattgtccaaacatcaggtagttgaaaaaataaaaaggaacagctttgggctattaaatgttgaaatcaaatcttaataaatgcgatatttctgaccttggtgcacagtattcaaagtcccarcatgttactctaagagcttgctttgttctgggcagcctgatcwggtggttggagaccctgcccatggcaggggggttgaaatgacatgatcattgttgaccttttcaacccaggccattctatgattctatgattcttcactggttttcaatgcatttggacaggctttgaaaatggaagggcatgcatatagatggagagctacagaaagtctgagctaaagaaaaagaaacatttgtgcagttttattttcagcttatggcctgtggtcccttggagggaggttgaggayggggcaaa

SEQ ID NO: 53991 - DNA, 600 bp, Chicken  19866894306036_2
cagactatctgggtccatgatatggatagttcagacctgttggtagaagctggactattccaaataatatccaaatatttgaagttcagtcttcagaggatatggggtaattgaaaataggaattagagaaaaaaattgtccaaacatcaggtagttgaaaaaataaaaaggaacagctttgggctattaaatgttgaaatcaaatcttaataaatgcgatatttctgaccttggtgcacagtattcaaagtcccarcatgttactctaagagcttgctttgttctgggcagcctgatcwggtggttggagaccctgcccatggcaggggggttgaaatgacatgatcattgttgaccttttcaacccaggccattctatgattctatgattcttcactggttttcaatgcatttggacaggctttgaaaatggaagggcatgcatatagatggagagctacagaaagtctgagctaaagaaaaagaaacatttgtgcagttttattttcagcttatggcctgtggtcccttggagggaggttgaggayggggcaaaaaggggctgttcttacttcttagggatcctcaaggagtaatta

SEQ ID NO: 53992 - DNA, 554 bp, Chicken  19866894306036_3
agtcccarcatgttactctaagagcttgctttgttctgggcagcctgatcwggtggttggagaccctgcccatggcaggggggttgaaatgacatgatcattgttgaccttttcaacccaggccattctatgattctatgattcttcactggttttcaatgcatttggacaggctttgaaaatggaagggcatgcatatagatggagagctacagaaagtctgagctaaagaaaaagaaacatttgtgcagttttattttcagcttatggcctgtggtcccttggagggaggttgaggayggggcaaaaaggggctgttcttacttcttagggatcctcaaggagtaattaggaaaaaaaaaacctcaggctaattttgctgtccaggggttcctgggaaatatatgccaattggaaaaaaagagctgaaaaccattaatctgcagcaacacttgaacaccttggtgtttgcagacttttgcagtgaactcacttgcttccaggggatgtagagtgaataatgttcaacaaacaatttatttgacctggtgggt

SEQ ID NO: 53993 - DNA, 438 bp, Chicken  19866894306036_4
cccaggccattctatgattctatgattcttcactggttttcaatgcatttggacaggctttgaaaatggaagggcatgcatatagatggagagctacagaaagtctgagctaaagaaaaagaaacatttgtgcagttttattttcagcttatggcctgtggtcccttggagggaggttgaggayggggcaaaaaggggctgttcttacttcttagggatcctcaaggagtaattaggaaaaaaaaaacctcaggctaattttgctgtccaggggttcctgggaaatatatgccaattggyaaaaaagagctgaaaaccattaatctgcagcaacacttgaacaccttggtgtttgcagacttttgcagtgaactcacttgcttccaggggatgtagagtgaataatgttcaacaaacaatttatttgacctggtgggt

SEQ ID NO: 53994 - DNA, 600 bp, Chicken  19866894306043_1
ctccaagatcaaatagttccaacccaccttccacaggcaggattgccaaccactcactcaggcactggatcgggttgtgcagggcctcatccagcctggccctgagcacctccaggggcattcacatctctgaggagtggagaagtcctggaacaggaagctgtgagaaagcaggtcgtgcctttcccttctcatcccattcccgttcggatgttgccttcgctgcccccccaaggcccccgtggtgctccttcaccctcagcagccagaagcagcaccagactcctgcagaacatttcrgaaggccccctgccctgctgctggactgctgtgcctctggcagagccctcccagctgtgaaggaaggagctgccaggaatccctcaggatgaagaggggggggctcaagagctgctcctcagcccctatggattgagaacggagctgtgcagaatcccactgaccgacacctgccagcctgctgtaaccccacctacctggacgttttgagccrtacctgtcagccaatggttcaccctctggactgtgtgttcatggagctggatgctgggcgttgtgtccagaagcatgctatgagga

SEQ ID NO: 53995 - DNA, 429 bp, Chicken  19866894306043_2
tgccttcgctgcccccccaaggcccccgtggtgctccttcaccctcagcagccagaagcagcaccagactcctgcagaacatttcrgaaggccccctgccctgctgctggactgctgtgcctctggcagagccctcccagctgtgaaggaaggagctgccaggaatccctcaggatgaagaggggggggctcaagagctgctcctcagcccctatggattgagaacggagctgtgcagaatcccactgaccgacacctgccagcctgctgtaaccccacctacctggacgttttgagccrtacctgtcagccaatggttcaccctctggactgtgtgttcatggagctggatgctgggcgttgtgtccagaagcatgctatgaggaatagcatgaaaacctttgctgcagtccacaaagatgacatcaa

SEQ ID NO: 53996 - DNA, 600 bp, Chicken  19866894306060_1
atgatgctatgatcctttcagagtccagaagcaatatgccattgttaatgggttgatggttggactgaggggttaatggtcggactagatgatcttactgaactttttccaaccttaatgattctatgaatcaatccccaaatgcagcagtatttaaattggacttagttcacagtaaagacaaatgaacaaggcaaagaaattaaaaaggtgttctattcataaacgttatgtgatgaaaagtcaatcaccagacccagtcaaaagaataaacaagaagatggcacatcagcacaaagyagcaaaaatttaaggaattcatctgcctgcttacgaaaacaggttttaaccctccagacaatgagcagaatgcttaccatggtgtaattgtcagcattctgcatttggtgtatgagtgacctggaatgcaagctctaatcacagctgtgcccaaggttcttctgtgcccaaggccatcagattcccaggcggacctcagcacctcttggaccttctggacctcagaacctcgtggacctcatggagtaccactgtgcctgatgtgctcctgccgctctgctccatcagtgcctggggcca

SEQ ID NO: 53997 - DNA, 599 bp, Chicken  19866894306061_1
  misc_feature (1)..(137): n is any nucleotide
nnnnnnnnnnnnnnnnnnnnnnnnnnnnnnnnnnnnnnnnnnnnnnnnnnnnnnnnnnnnnnnnnnnnnnnnnnnnnnnnnnnnnnnnnnnnnnnnnnnnnnnnnnnnnnnnnnnnnnnnnnnnnnnnnnnnnnnnncacctgtagcctcgctgctaccagcagactgccacatgcacccaatgcaggtacacagtgtgaatgtcttcattaaaactggtagtgatggtgactcctctgggaggtattactggggactttctgggagcagtggatgctggtaagtaaagtcaaaggctgsagatttcctaattttcccagttctgaaggcacagaaaacaaaatgcttgctttcttcatgctttatgtttatgagccaaatgcagctgaaacagtccagaactggacacgtaagatttagtatggactattagatrgaggctgccattcctccgtgattattgtattttctatttcatgcctttgtagttatgcttggaatcattaaacatgaagccgcacagcttagcctgaaatgactttgtgctggaagtagtgttgctaattgctattactgttgctaatcgctaaagaaagact

SEQ ID NO: 53998 - DNA, 599 bp, Chicken  19866894306061_2
  misc_feature (1)..(1): n is any nucleotide
ncacctgtagcctcgctgctaccagcagactgccacatgcacccaatgcaggtacacagtgtgaatgtcttcattaaaactggtagtgatggtgactcctctgggaggtattactggggactttctgggagcagtggatgctggtaagtaaagtcaaaggctgsagatttcctaattttcccagttctgaaggcacagaaaacaaaatgcttgctttcttcatgctttatgtttatgagccaaatgcagctgaaacagtccagaactggacacgtaagatttagtatggactattagatrgaggctgccattcctccgtgattattgtattttctatttcatgcctttgtagttatgcttggaatcattaaacatgaagccgcacagcttagcctgaaatgactttgtgctggaagtagtgttgctaattgctattactgttgctaatcgctaaagaaagactagtaggatcgcaggaggaaaaaaaggaaattgggtattttaacccgactaatgcagattaaaacaaagctaataagcctcatgtgaaaagcttatatttgaattacaagaaaaagacatttgtggaaattagtatt

SEQ ID NO: 53999 - DNA, 600 bp, Chicken  19866894306066_1
aaattgtctttaggattttgtaatcactgtacttcagtgacggttgtctgggatgtcagaacaatgactaagaagatgaagacaaggagctctgcctgaacactaattaatagcttttgctgcacttttaatcaattaaggtagcatatgggaccactgcttaatgagaatttatatgaatttccatcatagttgatctgttttcttagccaatcttttttaaatttaggcaattcatcaatgctaaggcattatacactttgatagtagtacttcagacatcacaatctttatgaaacrctcctcaaccatgcaagaacacatttccaggactacattgtatgcctgctccacacagcaaatgaggacaacaggaaaaacagaggctcctcagaaatgcagatgagtactgtgtatgaaacctgtggttttcctcttcgtgtacatttgctattttaaattccattcctaaattctttgtcttcagctttgtagaaacaaggaagtgtttcatgattcctatagtaccaaagaggaaatatgcattctcaggtatacttttggtagctcctttgtcccataaaaatatagataaggtat

SEQ ID NO: 54000 - DNA, 600 bp, Chicken  19866894306066_2
ggactacattgtatgcctgctccacacagcaaatgaggacaacaggaaaaacagaggctcctcagaaatgcagatgagtactgtgtatgaaacctgtggttttcctcttcgtgtacatttgctattttaaattccattcctaaattctttgtcttcagctttgtagaaacaaggaagtgtttcatgattcctatagtaccaaagaggaaatatgcattctcaggtatacttttggtagctcctttgtcccataaaaatatagataaggtatcttctaaaggcctactattacatggagtktttactttaaaaaggtagtatgaaagcttaaaaactaaaaagtaaagagtttgtgtgttgtttttgttcttttgttttttaaccaagctttggaataagagtttcaatatgaacgtgttgcactattgtgatgtattttggtttataacttttcagtataccaaaactttcactttctcattatatttttgttaagcgttttcatttggtgtttgtgcttgccatctaacacctcacagaacaaatcattacatctaccacagacctgcaaatggaaaatactccaagctttctctttca

SEQ ID NO: 54001 - DNA, 600 bp, Chicken  19866894306068_1
actaatccaggtgtgtgtgatggtaagtaggagtgtggtgcaggaggagggaagggctcagggctcagctgcctgggggagatgcttggagcagatgacttctcctcctgtcctttttctccctttctgccttttgagcttcactctgttggtgcaggtgaagtagtgggtcctgtgggattagtgagttgatttgccaggggttgggctgaagcgaaaagccttgcattgctaggactcattcaatatgatcacagtgaaatggcaatgagggatacctaggcatggcattattttcartgctgttcctgagcagagcaaggaagttacgtgttaacataggttagctagcacgtctgaccttcattgttcccagtggaagcagtgacagtctattagtcctccgcaagggatatcactgtctcacagcagctctgaaaatccccccaggacgctcctggaacaacaataattcagcaagagttcacacaatgttggagctctgtgaaatgtttgtaacaaatctcgcctggattgagagggggatgtggtaggaggggggagaagggatcggtttgagtggaggcacaaacatttcca

SEQ ID NO: 54002 - DNA, 600 bp, Chicken  19866894306072_1
gagctgtgtgatttgaaggtatgtggatggggaaacagccctgtctgcttgatctgttccttcaggcaagggttggattagacagtgttgccccagataaggaagaaataatcttgccttttcaaaacatcactatgacatgatggaaatagccttgaaatacaggaattgtgcttcaaatcttgaactttttgctccactttattttaaagtcctccacatctagagataaatgggccatgttgttgttccttgtccagttttgccagagtttaccttcatcacagcaaaatgttactyccatgcttgggaatactgtgcttagagatgactttaaatcttcagatacaactgatacgagggtttgtctctttgttccttcacatacactgcagtcaatttgaattgattgtgctgactctcaggctgtttctagatgcagtttaagcagtgactctgttttgggtattattaatgtgaggagccatttgtctctttttgatgcaattaggatcaaatcaggcatttgaattctgcagtacacttatggaggaagcctagtattgctctgctttgatatgacatgaatgtattttattt

SEQ ID NO: 54003 - DNA, 600 bp, Chicken  19866894306078_1
taatcctctcagaaatgttgtggactggcctagtgagacaagtacattgtttcccatgagctatggaacactacttaataacctttcactgctgctcctcccttaaatttacaaggttgtaattcattcaagattggttctgagccagttcctatgctgcaggacaaaaacatagtacagataggtattttaccagaataaggaatgtaggatctggtcccctagaaattcttgactgggtgggagaaaaaatgcattaatttacttggggaaatgtaggctaatactgcctgagaactygttggatgcatagattgttcctcagtattatactcctgtttgaaaaaataataatataacaatctatagttatggttggaaaaaccggaaaacatcaaaccataattaggatggcaggagagaatttatacgtattattcaccaaaacataataaataagtagttattgattaaagggatgcatgcttaacagcaatttataaatccagaactcaaaaagataatgtttgttttactacttttaattatttaacatgcagtgacatttctgttttgccaacagcagcacaataggtccct

SEQ ID NO: 54004 - DNA, 600 bp, Chicken  19866894306080_1
aggtgcatcatcctcagacatccaataatttcatcaccaaaacaagagtgagctgcctgcacacctctgcagcagccccagtccctcaatgctgccaaatctgttcctgtttgtaaggcgacgtcaaaagaattaaataaccaatttcatattaataccaaataaatggcacttatctaaagctttacatcatctgaacaaacagcaggagattcccctcggtatagtgaggattacaggccaaataagtgattcgtccactgtcagaccagacatattgcacaggctggggctgagccyagcctcccaaacttcatttgctaacagcttgacccccttcctgttccgctgctgtaatttgtctcctccaaacccctcagtaactgaaacagaactctggcaccttaattaaggccaacacttagccaggaaatctcctcttttagctccacagcttttgtggatatgctgtataagaggcacatggagtgctggaattaaaaggatgtaaaaataatccatacagaacagcacagcaaggaacagcctgagaatataccagcatgaaacgcatctgcataccttctgcacagatagcaa

SEQ ID NO: 54005 - DNA, 600 bp, Chicken  19866894306085_1
gtaaggaacgaatttgcctttttaacatcccactgatatagcgcccttacttagagtgacatgaaattttagattatgaacatggtctctgtataatgtgctaaataaaatgaattttccaatcaaatatcaaatttctaatgagttccttctcaggttctccagctatattacatgaagcatgccttctgtttttgtggtggttgtcatatctcgtctttgatgtgctgcatctgcaataaatggcacttgctaacagtgctgtgaactggagatgggccttcacaagtattgtaaatygtgtttttattgacttcagtagtttgttgttattttgttctgtgtgcatctcttaaactctatgatcaatataatattaccaaatgtattgttaacttttgtgtttgtaagaagattatcatatggagacaaaatagtaataaaatctgggtttacttatacataacttgatttgaacaaaagataagaattagctgtgaaatcatgcagacatctgggagtaactttttcttttatttttggacttgtcatctgacctgtgttgtatcyttgccacagaaaataacctcatcttgagcc

SEQ ID NO: 54006 - DNA, 600 bp, Chicken  19866894306085_2
ggagatgggccttcacaagtattgtaaatygtgtttttattgacttcagtagtttgttgttattttgttctgtgtgcatctcttaaactctatgatcaatataatattaccaaatgtattgttaacttttgtgtttgtaagaagattatcatatggagacaaaatagtaataaaatctgggtttacttatacataacttgatttgaacaaaagataagaattagctgtgaaatcatgcagacatctgggagtaactttttcttttatttttggacttgtcatctgacctgtgttgtatcyttgccacagaaaataacctcatcttgagccactgagaaaagaatttttgtcatcagtaggaaggctagatagggagaaaaataccatttttttcttaatgtctgtatttttaatggaaaaaaataaaataaaagtcaacagtataaatggagaattattttaacagattggctttgatctttatttgattctgtctcctttcccatttataatgatagactaagcccagtgcagtgtgagctagcctgcttactgtggcactgtaatcaattaatctccttagccttcctgcccaccttt

SEQ ID NO: 54007 - DNA, 594 bp, Chicken  19866894306086_1
aaagatgggggagaaccttctttgtgtaaattccacaatcaatggagatgctaaggacaaactttcaaagtgacaagtgaatattacagagctgaacaactagaacatctgataagtgttctgataaatgtaaaacagcgagaggcgatcaagtccactgctgaaatgcgcttgtctgagagaatcaggggtcagggcacagtctggaaatcacaggaaaatggtgaaagctgatcaaaccataacaactcatggttttgtacaactccaaggaaacgttaacaacatcgtaaagcacayagtaaaaaatatcagcccagaaaataagaatacatgtcttctttagaaaagtttatagtaaaatataaaaatttcatcagtttaaragttttttcaattgtcaaattctagccatataaatgcacttcagcctgaagagtttttaaagctaacaggccagctaaccactcctattttcaagctgataacttcattcactgattcttcatctctgtgcatcttaactaaagcaaacattctgggtctctctaaaacatgggacctacattcatcttttctcataagcacatgagg

SEQ ID NO: 54008 - DNA, 508 bp, Chicken  19866894306086_2
cagagctgaacaactagaacatctgataagtgttctgataaatgtaaaacagcgagaggcgatcaagtccactgctgaaatgcgcttgtctgagagaatcaggggtcagggcacagtctggaaatcacaggaaaatggtgaaagctgatcaaaccataacaactcatggttttgtacaactccaaggaaacgttaacaacatcgtaaagcacayagtaaaaaatatcagcccagaaaataagaatacatgtcttctttagaaaagtttatagtaaaatataaaaatttcatcagtttaaragttttttcaattgtcaaattctagccatataaatgcacttcagcctgaagagtttttaaagctaacaggccagctaaccactcctattttcaagctgataacttcattcactgattcttcatctctgtgcatcttaactaaagcaaacattctgggtctctctaaaacatgggacctacattcatcttttctcataagcacatgagg

SEQ ID NO: 54009 - DNA, 600 bp, Chicken  19866894306087_1
tttgatgatattggcctgggtctcagctacacggtggtaaggcaaagcagtgctactgcattccactcgcaatgctgaggagcaagtacgagccacaagtgagcagtaaaggcaagcgattaaacagcagggctgcattcctcacccctccagcagcaaaacggagggtgatgcagcaaatagaggagagtttcaacagtcctaggcagaagttgaagcatttaaaaatctctgattcttctttggcagagctacaccaaagctgtttccatcacactgggtgacctctgcaggaccagygccgtagcagatattttcggtggtgttctcctatccaccatgttttccaaagccggaccatgacaatacctaacaaatcactcaacttttgagccacacatcctgctcctaattttgagctctgtgcaattaggagcagaaagtcacatggcttttgcacagcgttctggggaagctgggcagagtggagagctggcacaggagacacagctttgggcagaaagctgcaaggagccgcgctcagtggtttgcagagctcagactttccattcacagatccaggcatgaacacaagtctca

SEQ ID NO: 54010 - DNA, 600 bp, Chicken  19866894306087_2
ctggggaagctgggcagagtggagagctggcacaggagacacagctttgggcagaaagctgcaaggagccgcgctcagtggtttgcagagctcagactttccattcacagatccaggcatgaacacaagtctcagatcctctcttgccatgcacagagccacatgtttgttattctagagaggggaaaataacaaaagaggtactgggataacgaaagtacctccaactcagcagcagacagttttatccatatagatgaagctggaggaaggtagaagctctctaatcaacccccagastgcagttcaagttttaaaatgcggggaagacccagagggacgtctgtcccagctccacataatttcctcatgagtctcagcagctctgctgctccgctcctattcctccctgctggcactcaccccagacaaatgccgtcagctcacctgcccccttcacccctggcacgtcgggaagacaacgccagaaagcaaaacagataggattattcatgatgccaagaggagagagacgtctctcatttctcttccagcatccatccactccattccagatgacatctccactggcaatcttct

SEQ ID NO: 54011 - DNA, 600 bp, Chicken  19866894306092_1
acaacctcctttcatggagctggaaagagcaattaagtcccccctgagccccctcttctgaggtccgaacaatcccaggtcctccacccacctcccataagactttccagaccttcactgaacacagtccagggcctccaagtctttcttctgaggacgaccaccacctccaggtggtggaaccacccctaatgcacattgatgcaatagcaaatgggggctgcaaagagggacctggccaggttcccacagcaatgccacattcaagacttcggtaccactaagaatgagggatgttaycactcagggatgtcacaacacccagcagctccagctgctgagccatccccaraggaggggccgatgggcaggacatgcggggatgctctcacctttttgcgactcgaagaggctgtgctgacccagctgggccagcagcgggctgccagtactggggggctcgaggtggctcaggggaatgtaggacgggtagagcccattaggcagatgggaaaagcctgcaggaagatggaaacagaagaggaaaacatttcagcccaagcggagtgcagtctgttgcagctgttggtcccctgcatg

SEQ ID NO: 54012 - DNA, 600 bp, Chicken  19866894306092_2
ctcttctgaggtccgaacaatcccaggtcctccacccacctcccataagactttccagaccttcactgaacacagtccagggcctccaagtctttcttctgaggacgaccaccacctccaggtggtggaaccacccctaatgcacattgatgcaatagcaaatgggggctgcaaagagggacctggccaggttcccacagcaatgccacattcaagacttcggtaccactaagaatgagggatgttaycactcagggatgtcacaacacccagcagctccagctgctgagccatccccaraggaggggccgatgggcaggacatgcggggatgctctcacctttttgcgactcgaagaggctgtgctgacccagctgggccagcagcgggctgccagtactggggggctcgaggtggctcaggggaatgtaggacgggtagagcccattaggcagatgggaaaagcctgcaggaagatggaaacagaagaggaaaacatttcagcccaagcggagtgcagtctgttgcagctgttggtcccctgcatgccagctgtggggacacacagcaacgcatggcacggggagcactgctcaggtc

SEQ ID NO: 54013 - DNA, 600 bp, Chicken  19866894306095_1
actgaagcacttgatgtacgagctattatactcagaacaaaacctttccagcgatctctaccaaatgaagcagagaataactaatacatgaagaacgaattcacagatgggttgccaaaaacagacacgaatttgcagtttttagatgttgatcacattaagggaccaggaacatactagctttggctatttggttacatcagtagggaactgcaccaagtctgaaaatctctagctgctgagtcctcattttgactttcacacactctatcactttcagaagcctttttttttttttcyctcctgaaattgctttaagatgatattagctatgatacctttgctcagatttgctctcactctccataaaaccaaataaatttcaagagagtccaagcaaaagcagagcccttaggacacgttaaaggttattaaatattcagccaatctcagtctttactgcagttgctctcacagtctggtacaaaaatagaaaaagcagcatgaaatgaaaggcacacaaagcacacactaaaacaggaaaacgttaaaattgatttcaacagggaagggtaggcaaagactcactgaaaacagaag

SEQ ID NO: 54014 - DNA, 600 bp, Chicken  19866894306097_1
tataactccatttggttctagctcaaaagtgaacaaacaaagcactaactagctgctattgaatgggcaccaaccattccacgttctgactgaggcttgtggcttgcgatacatagagcacatgatcacctaattaaaatgtctttcagataatgtatgtacatacattttcatatacttatgtctacaaaagaaaccagacgttaaaggatccaagtgaagcagtatgcacgtaaaggcagactgtcgatttacaatcagacagtaaaacgtcacagagaattctaaaatcagaagctmtataggttcaactggaattcaaattacacaagtagtcattacatatacacagtggagtaccagtcagattggcaggataacgccatgttaatcatactctttttgggagacatccatttcaataaacaaaatccatcaattgtgctgagaataaaagcacatcaagactaaaattaaatgaatttcttgccactgaaatcctggaactaggtctttttacctgtgatgttttactctagttcttaagaaaatcctccctcctcatcttagtggtataaatagacagtttcagtagttctg

SEQ ID NO: 54015 - DNA, 600 bp, Chicken  19866894306097_2
cagtagttctgtcatcagtttacaccatttccacaacttttcctttaaatgctatcggtagttaatatacaaactaattcaaaggacttggaaggatatatgataaagagttataaaatcaatcacttatgagacatttcagagaaggcattacgtatttggaacatgctatgtattaaaataagtaatgttaaatcatgttttaaagaggtgtgaaaagttatatattttttaatagatgtaaaccactggatggattacagtttaaatgaaattgaagcacatgccttattttttccycccttgaacagatgtgatttcttaaaatggggttttcagctgttccctgcttgattaataactaagagtgtttcagtggagtagtaacgtaggctgatgtacctatacatgatgtacctatagctgtaattaacagacaaattggcagaatattacatagaactgatttattaccacatgctggtaataaatcaatcttagcaaaaaaagatttcatttgagaagtcaattcagctacatggcttggaacgctggatcttccctctttcaatgtattctttgttagaccaactagtgaca

SEQ ID NO: 54016 - DNA, 600 bp, Chicken  19866894306107_1
tagtcatgcagcgatggaatgacacagataaaacaggatgatggggtggcagggtgtttttggaaaacaaagacaaaaaaccaaaggggaaggtaggagctagaaaatgacgaaagctaagaacttgagtggttcctcttatcatgcaccctgtctcgtctggtagatgctggctgtgacctgacattccactaattcctgaactcctgtagccacttttcccttcagccatagagagatttcaaatgaccttagctcctatgcagactattaatagagcacggatccaccatcacagtraagtggcaacaatagctggtgccatcactggcttctatcagagaacattatgatggtcctggagacagcctcctgggccaaagctccaggtagtaaattcttagttcaataactgctaggcagtgttattaggagggratttaagggcaacacaaggttctttctcccctttcctgaagacaaaggttggtttagtgagacacagaccttggaaatggtcactcctgatatatcatagtggatatgtatgggggaagaaatcaccacgttcttatctagcgataattttcaaattaaaag

SEQ ID NO: 54017 - DNA, 600 bp, Chicken  19866894306107_2
ttatcatgcaccctgtctcgtctggtagatgctggctgtgacctgacattccactaattcctgaactcctgtagccacttttcccttcagccatagagagatttcaaatgaccttagctcctatgcagactattaatagagcacggatccaccatcacagtraagtggcaacaatagctggtgccatcactggcttctatcagagaacattatgatggtcctggagacagcctcctgggccaaagctccaggtagtaaattcttagttcaataactgctaggcagtgttattaggagggratttaagggcaacacaaggttctttctcccctttcctgaagacaaaggttggtttagtgagacacagaccttggaaatggtcactcctgatatatcatagtggatatgtatgggggaagaaatcaccacgttcttatctagcgataattttcaaattaaaagctacgttgtttggtctgcacaaattgtatatagtatgggtacgggcgggaacattgatttgaagtaaactttcttgctctttgtttctttgccagcaattgttcattaagaagaagcagggaaggctacagtgtctgc

SEQ ID NO: 54018 - DNA, 600 bp, Chicken  19866894306108_1
gatgtttttttctttgttactcatctctgaaatagaggagaaatgcactttaaagagcaaatcattatgcttatctttacaatgggaaacgtgtgtggctggatacaggtgaaggttgccatttgatctctctctttcaaacataagaatttacttcctgcaaaattataatagaggcctcaacgttatagacaggcattgctggtgccaatgctggaagcctacatatgccagtggggcacatttagggctgttgggaagtggaacaagggcagggcaggggcagggatgggagcaccrgcaggggcaggggcaagggcaggaacagggcagggcagggcactgctggggttgctcggggcttgttttcccatgcagctgccctgagacttcctgcatgctccttgagcaggagcagcgctcaatggccccgtgccattgccctctgcgttgccaaggtgccaccaggactgcaacaaacacagcacttctgcagtatagggaaagatttggttgatttcaagagaatgaaatactgcaggggtattcaaacaagcaaatgtattgctcccagaagtgtaccagcacttagcaggatat

SEQ ID NO: 54019 - DNA, 600 bp, Chicken  19866894306109_1
tgtagacttcttgagcaacaccaggagctcattttgaacatacactaccaaagggtgactattttagaagctgtctccagcataatacagatatcagcagcttttcagagaatcagtatactttcaatatttcgaagagagagactgagttttataaaccgggtgactctgatgtagaaactgaaattgatgtgtgtttttggtctccttcagactgctttgcttttgcatctactaaacttaatgagcagctccccaattaatttcagtgattgtataagctgctctatttaggacggstgatgaaggattatttcctgtcctcttcaaaatgaagaaatgctgagagtattaatttaaagagattattatgggacttttgttagtgatgctagtgcctgtataattaaacttggataattcataatagctggcaatggcaacaaaattcttaagtctaaggtgtgttatttttggatagcatgaacccattttagcctttagcttactctatctagttcttcagacaatccttccacagatttaaggctgtcttgttggagagtagatctatgagcttaatggatgttgaataattaa

SEQ ID NO: 54020 - DNA, 600 bp, Chicken  19866894306115_1
ggttcgagtgctgctgttgtcccattgcctacaagttgctttctataatgactgagatgtctgtcctcttgcactgctgatgcactaggcattctgaatgctttcagagctcaactgaaagcagatgtcattctgctaaattaaggaggcattaaaaaaggaatcacaggatggtgttattattggtgctgttattctttctccccaaggctccccgaggctccaggtgctcataattctcactggagttctgaatgctcagttccttcagaaaaaatgatgccaaataaaggtgaagtrtgttcaacccatcattttggcaatgtccctttaactcaggtgtcagctggaggggttcttgccactgtttctgctgttgttttcttaaaatcccactagataccatagcaacagctggatcacatgctcctctggtgtgctacctataagcagatgtgaacaatgctggctaataaagtctcagcaagcattggacaggaaaagcactgaattcagcctctgtgtttttttggaaaaactcccagccaaggctttccgtcatttcttacgacagaggtaaatccagatccgcaggcaaaa

SEQ ID NO: 54021 - DNA, 600 bp, Chicken  19866894306120_1
tgtacatacatgtcaagattgcgcacagattttggtagagctgtacagacagatgaaaaaaaatcctacctgttacatttccatggaaaatgtggatttttgttgcctgtgaattttcacagggcatgcctgcactccttagactcttggatatattaatattttcactttttcatgatgtagggcctaggtgttttgatagataaggccataagtgataaatttcacagtagaaaataatgtgagttttctatttagtaaaagcatttaagcatatgctttgccaaataaaaatgagtmaaaaacacaagcttgagcagtctgaagcttcataaatttgaactgaattcagtggtcagtttcagaggtcaaaaaatagcaagagagcaagtttcaagagagtgtgcattgttccaacacttctgaagagaaacttctaagttttcaccctgattacatattcaattaataagatatttgttgttgctttaatggtttgtttctccttttttttttttttcttactacaaagtgtaagtaacttgaaagaaaacaccatcctctcccaaacacttagttttggcttagcagaatcttaga

SEQ ID NO: 54022 - DNA, 600 bp, Chicken  19866894306120_2
tttttttttttttttcccctttttttcccccataataattggaccacactgtctcctgtcaacagagcacttactgtcaccctttgatatcttaaactctttgggtacagttcacacattaaggcactttgtgaaattgatgtccaagaagaaacaaatccaaattcttaataaattgagattcccagcagtggctttcccttgaaggaaaacaaaaatttatttgggattagaccagaatcccacactaacttcatcaaacagtgaggaaaatccttgagttgcctatttgctctctcstcttctatgacttacagacttccatgacttacaaacagatatatatgcctgtatgtacatctgcacctaccataccaccaacgcataacaaagggwccaaagattgaactccagtgaattagaaatactttcaaatagagcaccgcctttgtactgtacakttttagctggccacacctatcttttcaacataccaagtaactcaagaaaatacagagctaaatggtttattccatccttgctaaacaatgatgcaacttggtgtctgccctcattctttaacaaggttcaagccctggc

SEQ ID NO: 54023 - DNA, 600 bp, Chicken  19866894306120_3
ctctttgggtacagttcacacattaaggcactttgtgaaattgatgtccaagaagaaacaaatccaaattcttaataaattgagattcccagcagtggctttcccttgaaggaaaacaaaaatttatttgggattagaccagaatcccacactaacttcatcaaacagtgaggaaaatccttgagttgcctatttgctctctcstcttctatgacttacagacttccatgacttacaaacagatatatatgcctgtatgtacatctgcacctaccataccaccaacgcataacaaagggwccaaagattgaactccagtgaattagaaatactttcaaatagagcaccgcctttgtactgtacakttttagctggccacacctatcttttcaacataccaagtaactcaagaaaatacagagctaaatggtttattccatccttgctaaacaatgatgcaacttggtgtctgccctcattctttaacaaggttcaagccctggctgactagcagccagttaccctggaaaacctccctgacaaacaaggctcatcaccctggaaggccagcaggcagaggagatgctccgcagccatgca

SEQ ID NO: 54024 - DNA, 600 bp, Chicken  19866894306120_4
aaattcttaataaattgagattcccagcagtggctttcccttgaaggaaaacaaaaatttatttgggattagaccagaatcccacactaacttcatcaaacagtgaggaaaatccttgagttgcctatttgctctctcstcttctatgacttacagacttccatgacttacaaacagatatatatgcctgtatgtacatctgcacctaccataccaccaacgcataacaaagggwccaaagattgaactccagtgaattagaaatactttcaaatagagcaccgcctttgtactgtacakttttagctggccacacctatcttttcaacataccaagtaactcaagaaaatacagagctaaatggtttattccatccttgctaaacaatgatgcaacttggtgtctgccctcattctttaacaaggttcaagccctggctgactagcagccagttaccctggaaaacctccctgacaaacaaggctcatcaccctggaaggccagcaggcagaggagatgctccgcagccatgcaagtgggtggtacgaacattaaagggatggcattagattagagcttctactttgatctccctacaa

SEQ ID NO: 54025 - DNA, 599 bp, Chicken  19866894306125_1
  misc_feature (1)..(40): n is any nucleotide
nnnnnnnnnnnnnnnnnnnnnnnnnnnnnnnnnnnnnnnntgcaatttgctgtctgatgtttgtgtctcatttctctgtgtgagcgtgtggagtctggagcggcacagtgagggactttgctaggtgaaggaagcaaggaaggggaaaaaaaggttgtttgtatcctccgctttcccaaattaagaggggagactttgaagtacaggaatagtttctgtatttatatacctactgtagggtgtttaccgctggagagtaatgcttcaacagcgaatctccaaacgccatccaactttatyctraacagtcctgaaaaaaactcctgattgcgacaaatgaaactcagctattagttttgttttcgcagttggagatgctgtgcacacacagaagttgcttggggtctgaaagtgtttcccctgccaaaaagaaacgtcctaaaaatgatygcttagcattctccaaatctctgcatatttatttaccaggaaggatctgcttacagagctcacactgtttttctttttacatttcaacttcagttaaaaaaaawaataataataaaaacccaggcttctttaccaccacccatctctgc

SEQ ID NO: 54026 - DNA, 599 bp, Chicken  19866894306125_2
  misc_feature (1)..(37): n is any nucleotide
nnnnnnnnnnnnnnnnnnnnnnnnnnnnnnnnnnnnntgcaatttgctgtctgatgtttgtgtctcatttctctgtgtgagcgtgtggagtctggagcggcacagtgagggactttgctaggtgaaggaagcaaggaaggggaaaaaaaggttgtttgtatcctccgctttcccaaattaagaggggagactttgaagtacaggaatagtttctgtatttatatacctactgtagggtgtttaccgctggagagtaatgcttcaacagcgaatctccaaacgccatccaactttatyctraacagtcctgaaaaaaactcctgattgcgacaaatgaaactcagctattagttttgttttcgcagttggagatgctgtgcacacacagaagttgcttggggtctgaaagtgtttcccctgccaaaaagaaacgtcctaaaaatgatygcttagcattctccaaatctctgcatatttatttaccaggaaggatctgcttacagagctcacactgtttttctttttacatttcaacttcagttaaaaaaaawaataataataaaaacccaggcttctttaccaccacccatctctgctca

SEQ ID NO: 54027 - DNA, 600 bp, Chicken  19866894306125_3
aaggttgtttgtatcctccgctttcccaaattaagaggggagactttgaagtacaggaatagtttctgtatttatatacctactgtagggtgtttaccgctggagagtaatgcttcaacagcgaatctccaaacgccatccaactttatyctraacagtcctgaaaaaaactcctgattgcgacaaatgaaactcagctattagttttgttttcgcagttggagatgctgtgcacacacagaagttgcttggggtctgaaagtgtttcccctgccaaaaagaaacgtcctaaaaatgatygcttagcattctccaaatctctgcatatttatttaccaggaaggatctgcttacagagctcacactgtttttctttttacatttcaacttcagttaaaaaaaawaataataataaaaacccaggcttctttaccaccacccatctctgctcataaaaccgtttccagtcacaaatctgttctgtagctatttttgtgtgggctgtgcttaatctccagacaagtttatttagcaaccaaaggtgatacgaaaccagattttttcaaagcagttttctaaatactgcacagtgtttggaat

SEQ ID NO: 54028 - DNA, 600 bp, Chicken  19866894306125_4
gagtaatgcttcaacagcgaatctccaaacgccatccaactttatyctraacagtcctgaaaaaaactcctgattgcgacaaatgaaactcagctattagttttgttttcgcagttggagatgctgtgcacacacagaagttgcttggggtctgaaagtgtttcccctgccaaaaagaaacgtcctaaaaatgatygcttagcattctccaaatctctgcatatttatttaccaggaaggatctgcttacagagctcacactgtttttctttttacatttcaacttcagttaaaaaaaawaataataataaaaacccaggcttctttaccaccacccatctctgctcataaaaccgtttccagtcacaaatctgttctgtagctatttttgtgtgggctgtgcttaatctccagacaagtttatttagcaaccaaaggtgatacgaaaccagattttttcaaagcagttttctaaatactgcacagtgtttggaatttctcgtttgggtgacagcttgtaagcctgcagatggctttctatctggtgctggtaaattagaaataatactgctaaaccactggacgaaactcacattgcag

SEQ ID NO: 54029 - DNA, 600 bp, Chicken  19866894306127_1
ttaattgaaggtttaccaaactactacaggaacacagcacccacaaaactcacactctgcacagcttctgcacaaagcacagtccttcctcaaatgcagtactcttaaaataaatatatttgcaagctgagttgaataatcaagtctgtgacctccctactgaaggagtcacagcatctattcagattaaaaggcaaataagcactgtaaactccactgacaatatcaggaagctctgattagctgtgatgtggtagaagactacttctcagtggtctgtttgattttttttattgttcrtgacatacctgaaaggccttgtaacttgtttttaaggggaggtgatgtttaagcagttttatggaggaaattgagatattttccgaaactgcttatgctatagaattttacaattactgtgataatkagtggaattgtggcactggagtgactaaaaccttgggagattttcctctaggtagctaaatccatcagtttttttgtaagaatttccttcactcaaatgcttgaaaaagaattcaggaagaaaaattgctttctcttctagcttaaactcgcagcagtactcagagtggaaac

SEQ ID NO: 54030 - DNA, 600 bp, Chicken  19866894306127_2
tgagttgaataatcaagtctgtgacctccctactgaaggagtcacagcatctattcagattaaaaggcaaataagcactgtaaactccactgacaatatcaggaagctctgattagctgtgatgtggtagaagactacttctcagtggtctgtttgattttttttattgttcrtgacatacctgaaaggccttgtaacttgtttttaaggggaggtgatgtttaagcagttttatggaggaaattgagatattttccgaaactgcttatgctatagaattttacaattactgtgataatkagtggaattgtggcactggagtgactaaaaccttgggagattttcctctaggtagctaaatccatcagtttttttgtaagaatttccttcactcaaatgcttgaaaaagaattcaggaagaaaaattgctttctcttctagcttaaactcgcagcagtactcagagtggaaacatctaatgttcccaaaggtagaagtagcaaggcctgaagggattgattttactgttggatgcggttacatcatgaaaataatacgaagatgcctgtacaacacagggacctttctcgacgcagtgac

SEQ ID NO: 54031 - DNA, 600 bp, Chicken  19866894306133_1
ggaactgttgagtcatggcctgaaccactgattgagcacaggactgggtcagccctgggagcacaggtggaggcaattcaattgtgtgactggaaggggtgcagcctggctgtacctctcttagacctcacttaagggctgactgccactggggaaggatctctggttggagatctctcccttctggagtctctcctacaaaatctttggagacagaggagcacctttacttttcctttgaaataccatcctatctgtgctggtccctttgctgttacactcctgtatcgccctcccacyrcgttaatctttccaactgtaacactaaatcacagaacaaagcaaagattccagtacaaaraacatttatgtcaacagatagaagaaacagttaaaaaaaattcctccattcacaratctgaagagraatttctactccagaaacttgctgaatattttgtgcttgtaagcagactgctacctgcctcccttgctgtatagcgatgtatttcatttccttatttaccacaaggtaagttgcaacaaattttctgtattgttactgcacaaagaacgtagtctgaagtcaggcataagcac

SEQ ID NO: 54032 - DNA, 600 bp, Chicken  19866894306133_2
gaactgttgagtcatggcctgaaccactgattgagcacaggactgggtcagccctgggagcacaggtggaggcaattcaattgtgtgactggaaggggtgcagcctggctgtacctctcttagacctcacttaagggctgactgccactggggaaggatctctggttggagatctctcccttctggagtctctcctacaaaatctttggagacagaggagcacctttacttttcctttgaaataccatcctatctgtgctggtccctttgctgttacactcctgtatcgccctcccacyrcgttaatctttccaactgtaacactaaatcacagaacaaagcaaagattccagtacaaaraacatttatgtcaacagatagaagaaacagttaaaaaaaattcctccattcacaratctgaagagraatttctactccagaaacttgctgaatattttgtgcttgtaagcagactgctacctgcctcccttgctgtatagcgatgtatttcatttccttatttaccacaaggtaagttgcaacaaattttctgtattgttactgcacaaagaacgtagtctgaagtcaggcataagcaca

SEQ ID NO: 54033 - DNA, 589 bp, Chicken  19866894306133_3
cacaggtggaggcaattcaattgtgtgactggaaggggtgcagcctggctgtacctctcttagacctcacttaagggctgactgccactggggaaggatctctggttggagatctctcccttctggagtctctcctacaaaatctttggagacagaggagcacctttacttttcctttgaaataccatcctatctgtgctggtccctttgctgttacactcctgtatcgccctcccacyrcgttaatctttccaactgtaacactaaatcacagaacaaagcaaagattccagtacaaaraacatttatgtcaacagatagaagaaacagttaaaaaaaattcctccattcacaratctgaagagraatttctactccagaaacttgctgaatattttgtgcttgtaagcagactgctacctgcctcccttgctgtatagcgatgtatttcatttccttatttaccacaaggtaagttgcaacaaattttctgtattgttactgcacaaagaacgtagtctgaagtcaggcataagcacacagaacaccctggcaccattcatggcagttgtactgaatgaaacacaat

SEQ ID NO: 54034 - DNA, 534 bp, Chicken  19866894306133_4
tctcttagacctcacttaagggctgactgccactggggaaggatctctggttggagatctctcccttctggagtctctcctacaaaatctttggagacagaggagcacctttacttttcctttgaaataccatcctatctgtgctggtccctttgctgttacactcctgtatcgccctcccacyrcgttaatctttccaactgtaacactaaatcacagaacaaagcaaagattccagtacaaaraacatttatgtcaacagatagaagaaacagttaaaaaaaattcctccattcacaratctgaagagraatttctactccagaaacttgctgaatattttgtgcttgtaagcagactgctacctgcctcccttgctgtatagcgatgtatttcatttccttatttaccacaaggtaagttgcaacaaattttctgtattgttactgcacaaagaacgtagtctgaagtcaggcataagcacacagaacaccctggcaccattcatggcagttgtactgaatgaaacacaat

SEQ ID NO: 54035 - DNA, 523 bp, Chicken  19866894306133_5
tcacttaagggctgactgccactggggaaggatctctggttggagatctctcccttctggagtctctcctacaaaatctttggagacagaggagcacctttacttttcctttgaaataccatcctatctgtgctggtccctttgctgttacactcctgtatcgccctcccacyrcgttaatctttccaactgtaacactaaatcacagaacaaagcaaagattccagtacaaaraacatttatgtcaacagatagaagaaacagttaaaaaaaattcctccattcacaratctgaagagraatttctactccagaaacttgctgaatattttgtgcttgtaagcagactgctacctgcctcccttgctgtatagcgatgtatttcatttccttatttaccacaaggtaagttgcaacaaattttctgtattgttactgcacaaagaacgtagtctgaagtcaggcataagcacacagaacaccctggcaccattcatggcagttgtactgaatgaaacacaat

SEQ ID NO: 54036 - DNA, 600 bp, Chicken  19866894306139_1
caatgcttgttacccacccactgtctttgggtatgttctgtactttttatggcaatagggggacaatattttcaacaatctgcacaatagttctgtcctgtaccggactcttccctaccctatataattaccttacctagtgcctctgccaattttaccctaggttggaatgccccagtctcaactttactctgttcagaaactttctttgtgaaaggcaacttatcctatgctacatacagaaatactggaaatttccactgcaaaaatgcagtctacctctcacaattgcaaatagasaatattaatattgcacaagtttgtaaaggctcaaaaataattttgttcctattacctatttagtatttttgtatgaacttaaatttcaaggatatcttgatttaaactccaaaacattttctcccagagaatatagagtataaataagaagatttaggtcatgaaatagaaaatactaattcttcagtgagaaacaggaaattatcttgcaataaatactctattgatacagaaacataaagatgcatgcagcatagtgccagtcatacatcattgcaaacagacataaatcagagcaca

SEQ ID NO: 54037 - DNA, 600 bp, Chicken  19866894306147_1
tgtgtaagagagggtcctgaacttgaggctgcttttctttggagtaactaaggtggctattagcacagaagggagcaatgcagtgctctgtgtactcactgcctttggttatatctggtactactgagacttcattggaagcattactgctgcaatattaaactcagtcagcaaaggaaaacatgatcatcagtgttttgtttcattacaaagtgaactgaaagaaaagctttagggtaaaataccagcttttccattaagatcttttccaactatgaaaaaatgatgctataaaaacgrcaatgttttttcctaatttaattgctggtaatttatagttcaaaaggtgagatgaggtgtttgaactttttatttcctcactactgtattcataactaaattcatcaaagaaaatgccaaccttctttccttccttcctctttctttctttccgtctttctttctctttcttttttaataaaactcataactcaccaaaagaaaagttgagcagttttccattttcatccaaagcacaatgaggtcagtaaaaatactctcattaagtttaaacaggctccagctcagacatgtgtatgg

SEQ ID NO: 54038 - DNA, 599 bp, Chicken  19866894306149_1
  misc_feature (1)..(75): n is any nucleotide
nnnnnnnnnnnnnnnnnnnnnnnnnnnnnnnnnnnnnnnnnnnnnnnnnnnnnnnnnnnnnnnnnnnnnnnnnnnatggataaggaacgaaaaatatgatttcagacagacttacctctcaagctaacagaattctagtccatttgatcacatgttatgaagtccttggagctacatggtatgtgctcctctcagtacagcagaccacacaaaaggagatgttaagtgcattttagctagttacaacactttcacatccattttccatcagagatacagtttgttgatctacagagatcrgcactgggcatcctcaggcaggaaagcagccactctgtcctgcctgagatygygacacaaacaccacaacaggggaaaatgaagtggatgcaaagaaaacaaygaatctcacgttcaccacayttgactccagcaggtctggaagcatcctgtgaaatcagagccactgtaggagtcgagaggagaaacataaggctccaattttcacgtcttcaacccagttactacatgactggctggatcagcagcctccccactcttgccctgtaacaacttccagctcattagtgaatttcaac

SEQ ID NO: 54039 - DNA, 599 bp, Chicken  19866894306149_2
  misc_feature (1)..(24): n is any nucleotide
nnnnnnnnnnnnnnnnnnnnnnnnatggataaggaacgaaaaatatgatttcagacagacttacctctcaagctaacagaattctagtccatttgatcacatgttatgaagtccttggagctacatggtatgtgctcctctcagtacagcagaccacacaaaaggagatgttaagtgcattttagctagttacaacactttcacatccattttccatcagagatacagtttgttgatctacagagatcrgcactgggcatcctcaggcaggaaagcagccactctgtcctgcctgagatygygacacaaacaccacaacaggggaaaatgaagtggatgcaaagaaaacaaygaatctcacgttcaccacayttgactccagcaggtctggaagcatcctgtgaaatcagagccactgtaggagtcgagaggagaaacataaggctccaattttcacgtcttcaacccagttactacatgactggctggatcagcagcctccccactcttgccctgtaacaacttccagctcattagtgaatttcaactgtaactgacaccaggctagagatgtcaaagataaccacattcctgagagt

SEQ ID NO: 54040 - DNA, 599 bp, Chicken  19866894306149_3
  misc_feature (1)..(22): n is any nucleotide
nnnnnnnnnnnnnnnnnnnnnnatggataaggaacgaaaaatatgatttcagacagacttacctctcaagctaacagaattctagtccatttgatcacatgttatgaagtccttggagctacatggtatgtgctcctctcagtacagcagaccacacaaaaggagatgttaagtgcattttagctagttacaacactttcacatccattttccatcagagatacagtttgttgatctacagagatcrgcactgggcatcctcaggcaggaaagcagccactctgtcctgcctgagatygygacacaaacaccacaacaggggaaaatgaagtggatgcaaagaaaacaaygaatctcacgttcaccacayttgactccagcaggtctggaagcatcctgtgaaatcagagccactgtaggagtcgagaggagaaacataaggctccaattttcacgtcttcaacccagttactacatgactggctggatcagcagcctccccactcttgccctgtaacaacttccagctcattagtgaatttcaactgtaactgacaccaggctagagatgtcaaagataaccacattcctgagagttt

SEQ ID NO: 54041 - DNA, 600 bp, Chicken  19866894306149_4
agacagacttacctctcaagctaacagaattctagtccatttgatcacatgttatgaagtccttggagctacatggtatgtgctcctctcagtacagcagaccacacaaaaggagatgttaagtgcattttagctagttacaacactttcacatccattttccatcagagatacagtttgttgatctacagagatcrgcactgggcatcctcaggcaggaaagcagccactctgtcctgcctgagatygygacacaaacaccacaacaggggaaaatgaagtggatgcaaagaaaacaaygaatctcacgttcaccacayttgactccagcaggtctggaagcatcctgtgaaatcagagccactgtaggagtcgagaggagaaacataaggctccaattttcacgtcttcaacccagttactacatgactggctggatcagcagcctccccactcttgccctgtaacaacttccagctcattagtgaatttcaactgtaactgacaccaggctagagatgtcaaagataaccacattcctgagagttttatggccactggataaactggagtgacgcagtttaaaaaaaaaaaaatgct

SEQ ID NO: 54042 - DNA, 600 bp, Chicken  19866894306149_5
ctaacagaattctagtccatttgatcacatgttatgaagtccttggagctacatggtatgtgctcctctcagtacagcagaccacacaaaaggagatgttaagtgcattttagctagttacaacactttcacatccattttccatcagagatacagtttgttgatctacagagatcrgcactgggcatcctcaggcaggaaagcagccactctgtcctgcctgagatygygacacaaacaccacaacaggggaaaatgaagtggatgcaaagaaaacaaygaatctcacgttcaccacayttgactccagcaggtctggaagcatcctgtgaaatcagagccactgtaggagtcgagaggagaaacataaggctccaattttcacgtcttcaacccagttactacatgactggctggatcagcagcctccccactcttgccctgtaacaacttccagctcattagtgaatttcaactgtaactgacaccaggctagagatgtcaaagataaccacattcctgagagttttatggccactggataaactggagtgacgcagtttaaaaaaaaaaaaatgctgtagattttctcttgcctgc

SEQ ID NO: 54043 - DNA, 600 bp, Chicken  19866894306152_1
ctcaccaagtaataaaagtgagtgcaaaatgttttgataagcacactgtttccttgaaagcagtgaatagacttattactagtcagatagcttcaaacacatactatctgtttaggtttgagatgagtagccagcataaaacagtggtgcgaaacataagtggtctgaaaaaaaataaaatactccttacttatcaaaatattgtgttcaggctcatatatcaagggaacataaatgattagaaggagctcagaattctcctttccagaaagaaatgaaatatagtagttctggattcarggcttttggaatcaagaagggaaaaatgatttcaaacaaatgtctatgagattgcgtcctgcgcaagcaactttcagacttgcttagactgttaaaatacttgctcaacaaaataaaacaacaaagaagccataataggtcttcttaacaaaagagcaccttatgtatcagtaataaccactgtgttcaattgcttatatcatttactaaccagaacattcttgactgccaaaggcctaaatcttgatggctctgcttgaaggatgtgatgttctaactttctgcttgaatcacagggat

SEQ ID NO: 54044 - DNA, 600 bp, Chicken  19866894306154_1
tttactccagatggggcctcacaagggcagagttgtgggtgacaatcacttccctttccctgctggacagttgtcttttgatgcagcccaggatacagttggccttccaggttgcaagtgcacgctgctggattgtatccagattttcatccatcaggacccccaagtccttctatgcagggctgctctgaatgagttgttctgtcagtctgtatttatatctgggattgccctgatcaagtgcaactcctcattatgttctcttgtgcccactttttgagagtgtctagatccctctgkatggcatcccttccttctattgtgtcaactgcaccactcagcttggtgtcatcagcaaacttgctgaggtcatctcactatgtctctgataaagatgctgaagagcaccagtcccaatatggaccctggggggaaacctctcataactagcccccacctggacatagagccattggcaacaactctctggttgcaaacatccaaccaatttcttacctgctgaatagtccagacttcaattcaatttctctctaatttcgagataaggatgtggtgtggaacatgggatgcactctgtca

SEQ ID NO: 54045 - DNA, 600 bp, Chicken  19866894306155_1
ggagaagtttacataggattgaacagactgtaggcaagagcagactctggaagctcatgctttgtcccctaaactccccttccacccaaacgtttgcttagagcctaggagttcaggtaacactggggaggtcacagctagaagaagggagcattgctttgggtatctattgctgaggatggacagaacatgactgcagcagtggaaggcccacctgtgtgcaggggctgctggaggccgtggctgtggtcccaggtagggggtgagactcacccgaatatgagcaggttcttctccacrcggaagcactcagcccgcaggtaccgccgcgtcttctcattgaagcgccgtgagcgtgtgggtcgctcatccgagtcgctgtccagctcagagaactccatcagctcatcctcctcgaaggagttgtagtgtttggtctgcttccgcacacggggcctgtcaatgaccaagctctcctatggggacaaacagggaatgcactcaggtgtgggcagcaacacccgccctccgtcatggcacagtaagtcctccctgctgctgctctctggctctgctcacgcctctggttcctagctccca

SEQ ID NO: 54046 - DNA, 600 bp, Chicken  19866894306159_1
aaatgttctgctagagatgtagtttgcctcagaacttttctatgcttttgctccgagtttagggagaaggtcagttgttcgggggagagatgtggaaaagtgactgagactcatgcaatattgtagggcgccaggctgggtatagcagatcacctgattgtatttcagagtgacaaatccccagggctgtatccagtgcccactgagcagctttgaagcagtaagctgagagctgtaggagccctgtggctgctgtccccatccaagaggaagcacggagcaccgagagctttactggcyrgagtcagtccagttggcttggtctgattgcatcttttagagaaaaagacttcaggtttgaactcctgagttttggtttcagatyctgctcaccgtrgtgctgcttgacattaaaagtctgtgtttatgtgtaaagaaaaatgctgacctcttatggatggcttgagggacagagtcaagaaagggtcaccctttgcaggctctgttgctcgtaactatccccttgccactcagtactaatgctattggaaatcaattcttggtctaacctactgaaacagttcttaaacagcctgaaat

SEQ ID NO: 54047 - DNA, 600 bp, Chicken  19866894306159_2
aatgttctgctagagatgtagtttgcctcagaacttttctatgcttttgctccgagtttagggagaaggtcagttgttcgggggagagatgtggaaaagtgactgagactcatgcaatattgtagggcgccaggctgggtatagcagatcacctgattgtatttcagagtgacaaatccccagggctgtatccagtgcccactgagcagctttgaagcagtaagctgagagctgtaggagccctgtggctgctgtccccatccaagaggaagcacggagcaccgagagctttactggcyrgagtcagtccagttggcttggtctgattgcatcttttagagaaaaagacttcaggtttgaactcctgagttttggtttcagatyctgctcaccgtrgtgctgcttgacattaaaagtctgtgtttatgtgtaaagaaaaatgctgacctcttatggatggcttgagggacagagtcaagaaagggtcaccctttgcaggctctgttgctcgtaactatccccttgccactcagtactaatgctattggaaatcaattcttggtctaacctactgaaacagttcttaaacagcctgaaatg

SEQ ID NO: 54048 - DNA, 578 bp, Chicken  19866894306159_3
agagatgtggaaaagtgactgagactcatgcaatattgtagggcgccaggctgggtatagcagatcacctgattgtatttcagagtgacaaatccccagggctgtatccagtgcccactgagcagctttgaagcagtaagctgagagctgtaggagccctgtggctgctgtccccatccaagaggaagcacggagcaccgagagctttactggcyrgagtcagtccagttggcttggtctgattgcatcttttagagaaaaagacttcaggtttgaactcctgagttttggtttcagatyctgctcaccgtrgtgctgcttgacattaaaagtctgtgtttatgtgtaaagaaaaatgctgacctcttatggatggcttgagggacagagtcaagaaagggtcaccctttgcaggctctgttgctcgtaactatccccttgccactcagtactaatgctattggaaatcaattcttggtctaacctactgaaacagttcttaaacagcctgaaatgtttaaatgtcctggttaaacttatctgaatgtgcagcctgaaatgtgcaaggtgaaccatat

SEQ ID NO: 54049 - DNA, 566 bp, Chicken  19866894306159_4
aagtgactgagactcatgcaatattgtagggcgccaggctgggtatagcagatcacctgattgtatttcagagtgacaaatccccagggctgtatccagtgcccactgagcagctttgaagcagtaagctgagagctgtaggagccctgtggctgctgtccccatccaagaggaagcacggagcaccgagagctttactggcyrgagtcagtccagttggcttggtctgattgcatcttttagagaaaaagacttcaggtttgaactcctgagttttggtttcagatyctgctcaccgtrgtgctgcttgacattaaaagtctgtgtttatgtgtaaagaaaaatgctgacctcttatggatggcttgagggacagagtcaagaaagggtcaccctttgcaggctctgttgctcgtaactatccccttgccactcagtactaatgctattggaaatcaattcttggtctaacctactgaaacagttcttaaacagcctgaaatgtttaaatgtcctggttaaacttatctgaatgtgcagcctgaaatgtgcaaggtgaaccatat

SEQ ID NO: 54050 - DNA, 600 bp, Chicken  19866894306161_1
aagggacttataaaagatatggcaaaggttattaaaacactatccttattacaagaatttttcctcactgatatcatttggcttattgaatgagttaaactttattcctccaccttctttttttttcttcccccttccctattcctctccctttcataaactgcctaaaaacaggagactgacaagtgattatacaaaaaaatattggtaaagtcaattggacatgcaacttgcaaacctactcttcaatatgctactagagaaaggaggacttgtaaggatgtgctctaatgaggcacrgtgaggatccttttgctgggactcaagccagtagtaaggacatggaagcaacaacatggactgtgtaatgagtcggtttggttgctactgaatgttcacaagcaatggtaaatctgaaatccccagtggctgctaggtcattttgatttcctggtctctaataagaaatattagactgttgctcattttaatcacttaatattttttgttcaactgcacatatgctaggatggtctatcttctcgaatatatcctgttgcttatggcttccaacatccatttatcattctacccttttaa

SEQ ID NO: 54051 - DNA, 572 bp, Chicken  19866894306172_1
agggcagacactacaccgatggctgccaccagtactgagaacttggtggagactgactggtcagctgctgtggtaacgtgagtacctctgcacgaagctgatgaatttgagctcgttaccgtgcacattcttcgtgatcagcaaaacttacacagaggtgctggagtttctgcattaccccatctctttcagtatactcagtaggattcctgcctcaaagacaggtgggacaaactgctcactattaactggtttgggggtaactctgccagacatctggccccctctcttccttcaccyacccttcattacaytggcatgagtgattgctgagcagggcagatagatgtgtcacttctctgatcactcagccttttccagcagtaacaggctgttgtaccacgtaagaagacaagctgttaagatgcctaagatacagttgccctcagcttgaatctcccaagtactctgcatgtggcctctcaccatgagcaaagtacagctaatcagataagaacttccttatttatctgcaatgttaagaattaatctccaaagagactactatattt

SEQ ID NO: 54052 - DNA, 558 bp, Chicken  19866894306172_2
accgatggctgccaccagtactgagaacttggtggagactgactggtcagctgctgtggtaacgtgagtacctctgcacgaagctgatgaatttgagctcgttaccgtgcacattcttcgtgatcagcaaaacttacacagaggtgctggagtttctgcattaccccatctctttcagtatactcagtaggattcctgcctcaaagacaggtgggacaaactgctcactattaactggtttgggggtaactctgccagacatctggccccctctcttccttcaccyacccttcattacaytggcatgagtgattgctgagcagggcagatagatgtgtcacttctctgatcactcagccttttccagcagtaacaggctgttgtaccacgtaagaagacaagctgttaagatgcctaagatacagttgccctcagcttgaatctcccaagtactctgcatgtggcctctcaccatgagcaaagtacagctaatcagataagaacttccttatttatctgcaatgttaagaattaatctccaaagagactactatattt

SEQ ID NO: 54053 - DNA, 599 bp, Chicken  19866894306175_1
  misc_feature (1)..(57): n is any nucleotide
nnnnnnnnnnnnnnnnnnnnnnnnnnnnnnnnnnnnnnnnnnnnnnnnnnnnnnnnncaaacacagactgcagggagatgtggtggttttagaagttcaggagagccagccctggggcagctgcttgcactggttcaggagagcacttttcccacaagtgtcctgtcagtttccacttacaagtgtccccgtctgtcccactttccgagtgctcttggagcatgcaaaacatatggttactgatgcagttgcaagtccgtccaatgtaaacctggaagtgggcactgaggggatgcaaartgattaccagcaaccttccagctctgcagaagctttgttctgaaataagcagaggtactgggtgtttgccatgggtgagccacatccaatttgagagcaaggccctgaggcagtgccactggatttgaagaatcaccctccaatgcagtgctctggcagttcccgttcctctctctgcagtaagactgcagctctctcagcccctgaatatggcccagctcctgggattttcccgataggtggggaaaagggattgcttgagaakccctgcagcacagacagggcagtgctgrtgacct

SEQ ID NO: 54054 - DNA, 600 bp, Chicken  19866894306175_2
gtaaacctggaagtgggcactgaggggatgcaaartgattaccagcaaccttccagctctgcagaagctttgttctgaaataagcagaggtactgggtgtttgccatgggtgagccacatccaatttgagagcaaggccctgaggcagtgccactggatttgaagaatcaccctccaatgcagtgctctggcagttcccgttcctctctctgcagtaagactgcagctctctcagcccctgaatatggcccagctcctgggattttcccgataggtggggaaaagggattgcttgagaakccctgcagcacagacagggcagtgctgrtgacctggcaagagcctctagaaatctccctggggccgtggtcacttgtgtgggagaggtgcaggcagcagaaagaagggagggcaaggcatgtccagggagagtgtgagcctcaagaccagtcaagttctgccccagccctcartactcacccgccttctgcttgtttccaggcagggactgggcgctgtggggaccaggtgatatttataatctgcctggtaaatcttagcagagagttctgaatttcycctgccaattaacatgtaatt

SEQ ID NO: 54055 - DNA, 600 bp, Chicken  19866894306175_3
tgcaaartgattaccagcaaccttccagctctgcagaagctttgttctgaaataagcagaggtactgggtgtttgccatgggtgagccacatccaatttgagagcaaggccctgaggcagtgccactggatttgaagaatcaccctccaatgcagtgctctggcagttcccgttcctctctctgcagtaagactgcagctctctcagcccctgaatatggcccagctcctgggattttcccgataggtggggaaaagggattgcttgagaakccctgcagcacagacagggcagtgctgrtgacctggcaagagcctctagaaatctccctggggccgtggtcacttgtgtgggagaggtgcaggcagcagaaagaagggagggcaaggcatgtccagggagagtgtgagcctcaagaccagtcaagttctgccccagccctcartactcacccgccttctgcttgtttccaggcagggactgggcgctgtggggaccaggtgatatttataatctgcctggtaaatcttagcagagagttctgaatttcycctgccaattaacatgtaattagggagagaaagaagaaacacaaaagaa

SEQ ID NO: 54056 - DNA, 600 bp, Chicken  19866894306175_4
tccaatgcagtgctctggcagttcccgttcctctctctgcagtaagactgcagctctctcagcccctgaatatggcccagctcctgggattttcccgataggtggggaaaagggattgcttgagaakccctgcagcacagacagggcagtgctgrtgacctggcaagagcctctagaaatctccctggggccgtggtcacttgtgtgggagaggtgcaggcagcagaaagaagggagggcaaggcatgtccagggagagtgtgagcctcaagaccagtcaagttctgccccagccctcartactcacccgccttctgcttgtttccaggcagggactgggcgctgtggggaccaggtgatatttataatctgcctggtaaatcttagcagagagttctgaatttcycctgccaattaacatgtaattagggagagaaagaagaaacacaaaagaagtcaacttttaatcacctcagtggttgatgacctcatagtctgtggtacagttttgttctaaaactctggtcacttttatatctgttcccttacagtaacttccatggtttgttgagtaacttgctctgtggtatttctcactat

SEQ ID NO: 54057 - DNA, 600 bp, Chicken  19866894306175_5
gaaaagggattgcttgagaakccctgcagcacagacagggcagtgctgrtgacctggcaagagcctctagaaatctccctggggccgtggtcacttgtgtgggagaggtgcaggcagcagaaagaagggagggcaaggcatgtccagggagagtgtgagcctcaagaccagtcaagttctgccccagccctcartactcacccgccttctgcttgtttccaggcagggactgggcgctgtggggaccaggtgatatttataatctgcctggtaaatcttagcagagagttctgaatttcycctgccaattaacatgtaattagggagagaaagaagaaacacaaaagaagtcaacttttaatcacctcagtggttgatgacctcatagtctgtggtacagttttgttctaaaactctggtcacttttatatctgttcccttacagtaacttccatggtttgttgagtaacttgctctgtggtatttctcactatacctccctgtgctgtttttgtggtatgcacacaatgtgggaccactgaatggcttgggctggaagggactcgtagagatcatgagagtcatgctccctgggtgcca

SEQ ID NO: 54058 - DNA, 600 bp, Chicken  19866894306179_1
tctgaagagtgtatggagtgctgcctgcataacaccatgaagaattcttgctggagcactgagagatgtaaagatttctttatttgaaagttggtgaaaattggtgctgatgtcacatctgaacagttcagaggactgccaaactcagtccaggaactgaagcaatttctattactatcagcgaggatgagagtcagtttggttatttcagctaaaatgccagaacaatttttctattcagttctgctgaaatgtttaaatttcagcagatttttgatatgtgttctggtgattgcatcrgaggtttgggattattttataaatttccagttgaagttatatcaatggataaattaaaaaacaacagctacttagctgctctgtggaaactataatttgcgagagacatcaaatctttagattgttcattaatttcatattcaaactcctgtaatcaccttttaccagtaaatttttgtgttgattctaatttgcttgtgtagtcacttgagatctcacttattcttaaaacaaatacattaaacagcttggaagataagagaaccagtcaggtcattaaattaacatcaggttaccatg

SEQ ID NO: 54059 - DNA, 600 bp, Chicken  19866894306180_1
gcagtctgtacccagtgtaaggctttcacctgaaaaaaaaaaggctttttgtgattcgcaacaggtagctttctttaagtcttgtacttgacaacctacagtactcagatatcatcactttttcttttttaagctcttgttgcagttcatgcatgtgtttcccaaatatggcaatagcaaacaggatacagagtccggtttctgttactgttttcttaatagcaacagtaagtcgtcgtaaaaccacaagaagataagctgagaattcttttgtgctttaaaaagagaagtcatctatayggatttgctgtaaacagaagtgtgtgcgagagagaaattgaactgaaaacacttttaataaacagcatgtaagcataagtgactcagtttacacagctgaacttctccattttggatttttaacttgcatgcccatgaaagctttaaacagctattgcacaattctgcttagcacagcatgttttgcagtgccctctgatggttatttcagtacaggatgactgttaccacagccttctaatggtgcagctgtttgctgtgatggttgtaactggttgttgctgttcaggcgtcacctta

SEQ ID NO: 54060 - DNA, 600 bp, Chicken  19866894306181_1
acattttgtaaaggaagctgaacagtatgacaagaaataatggctacaggtatgtcaggaaaaaaagcaaccacctgtccacacaacaggctgatggtaaaaacgtacagccattgtaaagcagaagcatgtctctttacatttgcagatatgaatgacttatctatgtttcagtcagaatcaagttctctgaacttcagaagcaagtgggaaaagtattcaacactactgcacatctttcaggtctgcaaaactaggagtgaggccatgcaagggagctccccaaaaccctatcaacarcctttgtaaaagaaagcagagaaacatgtcactgggcagtgcggaagttccggaggtcctggaacaataaataaaagcccactcaaacacaaatgcttgcactgtgccaacattctcaagcggcgaagggctgacccaggaagcgcaggctgataaccctggctgcggcccacagagtcaggcaaagggcagagcaagcagcacaggactggagacgaaaacacaattagtgatggtcagcacagctctgcaggaggagggcctgtcagacccatctgagggcttctctgaaaatacaca

SEQ ID NO: 54061 - DNA, 600 bp, Chicken  19866894306184_1
cagcaaggagagaagtcccacgttctttcttgattgcagcaatatgatggagctcagcaaggctggactcattttttcccactcactgccgacagtacagtactttttaaatcagcagagttcttggatgtgctgcactgtattttaaagccaaccccttaggaactgtcaacagtgtcaatgtcagtatgttgcagcataaagcatgcttaacgtttcacatgttaaacaactgatttcctatctgctgaagcagaattcacttctctgtggaatatttcttcagtctgtgtggttctkcttctcctgatgctttcaatgtccttctgacaaacatgtcatgattagggcagacataatgaaaactgaggcacatcactggaacatatcctgggctctcgtagctacaagctgtgatgctgtgaatagtgttctttgctagatttctctgatggaagctctaattctcagaaatctcccagtctgagttatgttactggtacgttttagcacagttggaaagcttacctcaagagatgtccagggctggaatatcaagagtgttggatgcttgaactttggccaattcctctgcaggga

SEQ ID NO: 54062 - DNA, 600 bp, Chicken  19866894306194_1
cacgaaaagagcaaagactgtcaaacagtttaacttcccaccccatgcaaatgcaatgttatcagtctacagaaatccctaaagtgcaaatattctctaggtaggcacattttctacagttaattcaactttcatatttcacattgcttatactatatattctaaaactaattttccttttccacatttcccttatgtttcatatccaagagaattgcaaccgagcctataaattgccttttagtggaagttaatgatacagtcaccatgagaaatttgaacacttcaactttaaaacamagttatttgaagagagagttttctcactccgttttttgtgcagggtgttttacattacaaaagaaaatttttgtttctttccctgtttaaccatccttttcgctttggctggttgcatacatttcagtttgcattaaaccttacactgtttgtaacctgtacctacatagcagaactgtacctttagagcagaagagatatgtgagtatgcattcttggtaaagttggcagacaattcattgttagtaaaatgactttagcattaattttaactgaacaaaaaaatgataggattccaac

SEQ ID NO: 54063 - DNA, 600 bp, Chicken  19866894306198_1
tcactgggtggggttcttgttttgttacatttttctaacttttattattttagtcatgctttttctgaatttgatcaacttgggactacagagtcctagattacatgtatcccaggtccagcactgtaattggaactggaagatataactttcagatatttatctgagacatgaaagagtttctgttcattccccttcctgacactatgattttaagttgtaagactcatacggaatcatagaattgtttatgtcagaaatgacctttaagatcatcaaatttgaccaccctgtgtgttyttatttttcttcccccttttatcactttttgactcattttgtgcatttaggcttggggcttctctcttcacataagaagtggaagcaataagcctttccaaggtgttatcgtcctaaagtaatgtctaaaatatgctaggctaaacgcatgatttcagcttgagtacagaattccttacatcctagttctgattaaagaacttcttccactgtcagtagctcataattgcaacctgaatgtttcactgtgatcaaattgtttggaactgatagagattcaaaatgtttttgcaaaggaac

SEQ ID NO: 54064 - DNA, 600 bp, Chicken  19866894306200_1
tgtagagtgcacttagagtaatgttcagaaaatcagcctcaatgtcagtggcactcagctggggaaagcttcctctactaggcaggagaaaggactgctgtagtcctgcctcttaaagcactgtatcagtgagcagaaattttagacatgtttgattttctttttgttcttctgtaacctgaaatgttcctgctcgtaatagcagttgtatttcttaaggaaaagaaagttccacctcaacactcagataacagtatatctagcataaccaatgttttggtgaagggaaatctgcacacrgaagtaacakcagagacattaatggttaaggggtaaagcacagtccatccttgtgaatacatatcctgagctgaagaatctgtgcagatccattttaatcagtgtgcttttggctgagtttccatgaaaggcttttactttagaaagatcaagtaaaggaatcatttattgtccttatcctccagtacaagccttgagtgatttgttttcctccttagcattatctcattcacatgcgcaagtcaagccacagaaagggaaaatacagaggagcaaatctggaaaagcagtggcatgata

SEQ ID NO: 54065 - DNA, 600 bp, Chicken  19866894306200_2
acttagagtaatgttcagaaaatcagcctcaatgtcagtggcactcagctggggaaagcttcctctactaggcaggagaaaggactgctgtagtcctgcctcttaaagcactgtatcagtgagcagaaattttagacatgtttgattttctttttgttcttctgtaacctgaaatgttcctgctcgtaatagcagttgtatttcttaaggaaaagaaagttccacctcaacactcagataacagtatatctagcataaccaatgttttggtgaagggaaatctgcacacrgaagtaacakcagagacattaatggttaaggggtaaagcacagtccatccttgtgaatacatatcctgagctgaagaatctgtgcagatccattttaatcagtgtgcttttggctgagtttccatgaaaggcttttactttagaaagatcaagtaaaggaatcatttattgtccttatcctccagtacaagccttgagtgatttgttttcctccttagcattatctcattcacatgcgcaagtcaagccacagaaagggaaaatacagaggagcaaatctggaaaagcagtggcatgataaatatggaaa

SEQ ID NO: 54066 - DNA, 600 bp, Chicken  19866894306200_3
tgacacacgaagaggaaacctgcatccaggttgtctctcccaggccatcaaaagcaaaccacctggtaaacagctgaataatttccacatgttttgatagacagtgagttatggaattgacattttactccagtgttcacagatcctgacccaaaaccatcatgttttttatgtccttaagccacatttggggcacttctctacttgatcataacaaggaagaagagtgtcttcattatgcttaaaacaatttgattattgatttgagtttaaattaagaatatttttcaaatttgaaaytgccagtaaaaattgtattttactgatatttgtatatattttattttctctacagatgattcagaccatccggactctagttgaaaacgcagatagcttatatgataagatagtccaatgtcagaaagcaggtaagcgcaagctgtctttgaaaactattataaagaatttatgacatttttctttatttcccaaaacttttgattgagtttgtttattcagctatagcaaatataggcacacacatatatgtgtattagtttacagaggtgcacaacaacagcggaaaggatatttcaa

SEQ ID NO: 54067 - DNA, 600 bp, Chicken  19866894306206_1
gcacaaggatttgatctttaacccacccttgccagctcaatacgctgtcccccaagtctctggcaatgggcagacccccccccacgtcctcccaggtctgagaagaaagcacagagaggcactggcacccgctgagtgctgcacacacagtcggtaggcaaacagatgcctggctgccaaagttgccagggagatgtgcttcctttggagctgcacatgatccctgagctgcagctgagggctggggtcctctgggtcagagcagggcacagcacacagaacaccttccaattgagctgmcttctatgagcagcacttttgggcatgaaagagagatccaacagctttgcagggagagtgcttccatgccagaacccaggccctggtgaccatggtgcattttgttttacccagcccagatccagctaggagctcagaacatggctccctctgcccagcaatggagtttattgcctctgtgctcccaagcatgcaccagtttctgaaccagatccgaacccaagacaaggtgttgcctgtgatttaggaaggccgttatgcttcagggcccatatctaagggatatctgctgggagagct

SEQ ID NO: 54068 - DNA, 381 bp, Chicken  19866894306207_1
agacatgacgtcagtttttagacaatattataagcatctcagaaaataaataaaattaaagaacctttatttagtttgagatgagaatgcttaaaatgctgaattacctacttgtttataccctgcctttaatttttatttctactgacataaagtaggaagagaaacataaaaaataacaggatccataataaaggacgctagtttcgcaggcttgttttcccaagacatggtactggtctgttgttaatcaaggtaatgggggcattttctctctgagggctattttgaggaaaagayggtaactctgcactacagatttcaagatgcaaagttgggtttatttggttcaattgtgtttttgagtgggagggaggaaga

SEQ ID NO: 54069 - DNA, 600 bp, Chicken  19866894306208_1
cagctgagatcaagggtccaatgtgcttagtactgtattgatgcctaagcagaaaatccctgcctcttagcttacaatttaaatagacaagctgacaaagggcaggagaaaaaatggattcacagagacaaaatgattcagtcagcatcacatagaaggactaaagcaaaggtggaaataggcacccacaactgctagttgaggctgcctctcaccaatcaactttgagtttaacttatttttttcctacattgagtcctgaaatggtttttcataggaatgtgagttagaacaagagcratattttaacaaatacacaatctgtttcagactggaggggaactgcatggaaataacaggaatgcaaaaagctattgtaaaaatatgtccttgttaagtatgtagaattgaatggaatctttactgggatcactctacttcccttagcatcttctagtattcattgtgtttcctgtaggtgctcagaagagtttgtgcttctttctagtattgcaactatgctggagagacagtggttcttcagggtatgttctgtcatctgctgacttgagcttattgttacctaaagtgagattcttt

SEQ ID NO: 54070 - DNA, 600 bp, Chicken  19866894306210_1
aatacgcagcggtggacgctgggcattagtcacagggcattggcactggcaccgctgcctgtgtccctggacctgaaggcatctgtgtcctgcaaacacagctctggaaagcacagcctgttctgtaaaagcaaagcaaaacaaaacagaagaaaacaaaacagaataaagactcaaaatccctttgaagcctcaaattcccaacttaaaaagaaacaggacacaaaggatattcaaatttgagaagtgtgttaacagatttttatcaactccagatcgatgacttctgtcttctgttgktgatctgaaatgtggaggcactattcaggataatgccttccctccatcttctagccatcgtcttgttcaaataaaaaagttggatgctgactttttacatcatttctgaatgataggtcaaagatgaatggtaataaactaaaggagatatttacattagacatttggaaggaattcccaaccttcagctgttcatgatgtgaggcatggagctggtgtggaacaggtagcccagagaagttgtggctgcctcatccctggagatgttcaagatgtcagaggccccaggcatcccggtct

SEQ ID NO: 54071 - DNA, 393 bp, Chicken  19866894306213_1
ttgggagctaggacagactgacctaccaaccaaccaatccaccaaccaaccaatagatatcaaatcaatatttgagttaatgaactgagtttcagtaaaactctctgaactaaaatttcatttctgggaaaaactgttaacctgaaaaacaatctcaggtcagattgatttcaaactaaaaagattatacaaaagacttaacattttaagtgttttaaagtgttattttcatacctgaatattattaaaaaatactatttgtaccactagtagcgttggtaatgctttaatttggggggraaaaaaaatcctatcctttttcacaataaaaaatacttttcttccttctaaattccagcttttccaaatttaatatttcaaaatgtctcaaaa

SEQ ID NO: 54072 - DNA, 599 bp, Chicken  19866894306219_1
  misc_feature (1)..(120): n is any nucleotide
nnnnnnnnnnnnnnnnnnnnnnnnnnnnnnnnnnnnnnnnnnnnnnnnnnnnnnnnnnnnnnnnnnnnnnnnnnnnnnnnnnnnnnnnnnnnnnnnnnnnnnnnnnnnnnnnnnnnnnnnttataatttgcacagcatagtcgtaaaatttatacctacaaacaatttcatgccttttccctctcctttcacaaagaataataaagttttcaaatgtatgtggaggataacaacaaaaagctgtagatcacagaaattgaagcatttaaaattatataacatagtgtaatattaataccrctgtgatttttgaattggcattgaatttcattttatcaattttattttggactcaagtgtggtgggacatatataacacttcatctgtgaatttacgactagcttagttttctctatactagctaatataaactatctatctcttattaatgggctacattcagttctaaatcattaagttrcaaagttctttgagcacagagagaagcctgattggataaaggcaaaaataagaaaccatagtgagggctttcgcagaaaaactgtagagatcctatcttgaaactttgagaaaacaa

SEQ ID NO: 54073 - DNA, 600 bp, Chicken  19866894306219_2
ctcctttcacaaagaataataaagttttcaaatgtatgtggaggataacaacaaaaagctgtagatcacagaaattgaagcatttaaaattatataacatagtgtaatattaataccrctgtgatttttgaattggcattgaatttcattttatcaattttattttggactcaagtgtggtgggacatatataacacttcatctgtgaatttacgactagcttagttttctctatactagctaatataaactatctatctcttattaatgggctacattcagttctaaatcattaagttrcaaagttctttgagcacagagagaagcctgattggataaaggcaaaaataagaaaccatagtgagggctttcgcagaaaaactgtagagatcctatcttgaaactttgagaaaacaactctctatcttttaacttgatatgaagacaaaaataataaaggtatatttatttgccaaacaaaatatatacatatataaattaaagaagtaaaaaaaaaaaaaaaattgtttttatgtttgtttcttgttgtttctcctcccatcttatcaaaggatacagatatctttctactaagaatct

SEQ ID NO: 54074 - DNA, 599 bp, Chicken  19866894306220_1
  misc_feature (1)..(228): n is any nucleotide
nnnnnnnnnnnnnnnnnnnnnnnnnnnnnnnnnnnnnnnnnnnnnnnnnnnnnnnnnnnnnnnnnnnnnnnnnnnnnnnnnnnnnnnnnnnnnnnnnnnnnnnnnnnnnnnnnnnnnnnnnnnnnnnnnnnnnnnnnnnnnnnnnnnnnnnnnnnnnnnnnnnnnnnnnnnnnnnnnnnnnnnnnnnnnnnnnnnnnnnnnnnnnnnnnnnnnnnnnnnnnnnnnnnntgagttgggtaataaagacatagcattctactgtggatgtggacatttcacaatgacaaagtatgttttacygcactcttgctaggcttctgaattataaggtaaagaaatagaacagatttgcttccagaagagmgagtgagagtaaatacaaacacatgtaaattatcttcaatatccactctacttacggtgctaagaacggtgctcttttaaataataacatctcctccctagcaaaactcaactgatgttatcaaactgacaaatttgaatgcatgtcaggtaagctaataaagaagaattaaagataacatgaaaaggaagagtcaatagagcagaacgaaaacaaacaaacawgcacagagagg

SEQ ID NO: 54075 - DNA, 599 bp, Chicken  19866894306220_2
  misc_feature (1)..(164): n is any nucleotide
nnnnnnnnnnnnnnnnnnnnnnnnnnnnnnnnnnnnnnnnnnnnnnnnnnnnnnnnnnnnnnnnnnnnnnnnnnnnnnnnnnnnnnnnnnnnnnnnnnnnnnnnnnnnnnnnnnnnnnnnnnnnnnnnnnnnnnnnnnnnnnnnnnnnnnnnnnnnnnnnnnnntgagttgggtaataaagacatagcattctactgtggatgtggacatttcacaatgacaaagtatgttttacygcactcttgctaggcttctgaattataaggtaaagaaatagaacagatttgcttccagaagagmgagtgagagtaaatacaaacacatgtaaattatcttcaatatccactctacttacggtgctaagaacggtgctcttttaaataataacatctcctccctagcaaaactcaactgatgttatcaaactgacaaatttgaatgcatgtcaggtaagctaataaagaagaattaaagataacatgaaaaggaagagtcaatagagcagaacgaaaacaaacaaacawgcacagagaggcccaaatgaaatatctgcctttaagcaatttcattacattctgtttttttgtaattagatcgaa

SEQ ID NO: 54076 - DNA, 600 bp, Chicken  19866894306220_3
gtatgttttacygcactcttgctaggcttctgaattataaggtaaagaaatagaacagatttgcttccagaagagmgagtgagagtaaatacaaacacatgtaaattatcttcaatatccactctacttacggtgctaagaacggtgctcttttaaataataacatctcctccctagcaaaactcaactgatgttatcaaactgacaaatttgaatgcatgtcaggtaagctaataaagaagaattaaagataacatgaaaaggaagagtcaatagagcagaacgaaaacaaacaaacawgcacagagaggcccaaatgaaatatctgcctttaagcaatttcattacattctgtttttttgtaattagatcgaagccattaagaacccatgtacagcctagcatctcttcagacagcaaaaaacaacctagtaacaygaccaagtcaatcccttattctacaacacgtgttttgaattaagaaagaatgccaggatggaggacacatcacatgttcaataagctgagagcattcagtttttgaaagtggggaaaagggttaagctttttattgtaaacttcacatgtttyatgttwatg

SEQ ID NO: 54077 - DNA, 600 bp, Chicken  19866894306220_4
agaacggtgctcttttaaataataacatctcctccctagcaaaactcaactgatgttatcaaactgacaaatttgaatgcatgtcaggtaagctaataaagaagaattaaagataacatgaaaaggaagagtcaatagagcagaacgaaaacaaacaaacawgcacagagaggcccaaatgaaatatctgcctttaagcaatttcattacattctgtttttttgtaattagatcgaagccattaagaacccatgtacagcctagcatctcttcagacagcaaaaaacaacctagtaacaygaccaagtcaatcccttattctacaacacgtgttttgaattaagaaagaatgccaggatggaggacacatcacatgttcaataagctgagagcattcagtttttgaaagtggggaaaagggttaagctttttattgtaaacttcacatgtttyatgttwatgtaactatttgagtcctttttgactttctgatcatgtcttttgacaggaaagggagtatttgttttgtctgattttaactctctggaaagcaaactagaactgtccaaaaatacatctatccttaaatctgacctctgc

SEQ ID NO: 54078 - DNA, 600 bp, Chicken  19866894306220_5
aacaaacawgcacagagaggcccaaatgaaatatctgcctttaagcaatttcattacattctgtttttttgtaattagatcgaagccattaagaacccatgtacagcctagcatctcttcagacagcaaaaaacaacctagtaacaygaccaagtcaatcccttattctacaacacgtgttttgaattaagaaagaatgccaggatggaggacacatcacatgttcaataagctgagagcattcagtttttgaaagtggggaaaagggttaagctttttattgtaaacttcacatgtttyatgttwatgtaactatttgagtcctttttgactttctgatcatgtcttttgacaggaaagggagtatttgttttgtctgattttaactctctggaaagcaaactagaactgtccaaaaatacatctatccttaaatctgacctctgccttccaaaaggagcagtttaggtatgatgcattttccagagaacagaagtatgaaattccctttctaatggaaaaatcttacctgggtaatcattcttgtctacatctgagtctcctcttagagtgaagccaaatcccgaaggcatggactgt

SEQ ID NO: 54079 - DNA, 600 bp, Chicken  19866894306220_6
cawgcacagagaggcccaaatgaaatatctgcctttaagcaatttcattacattctgtttttttgtaattagatcgaagccattaagaacccatgtacagcctagcatctcttcagacagcaaaaaacaacctagtaacaygaccaagtcaatcccttattctacaacacgtgttttgaattaagaaagaatgccaggatggaggacacatcacatgttcaataagctgagagcattcagtttttgaaagtggggaaaagggttaagctttttattgtaaacttcacatgtttyatgttwatgtaactatttgagtcctttttgactttctgatcatgtcttttgacaggaaagggagtatttgttttgtctgattttaactctctggaaagcaaactagaactgtccaaaaatacatctatccttaaatctgacctctgccttccaaaaggagcagtttaggtatgatgcattttccagagaacagaagtatgaaattccctttctaatggaaaaatcttacctgggtaatcattcttgtctacatctgagtctcctcttagagtgaagccaaatcccgaaggcatggactgtgaggcc

SEQ ID NO: 54080 - DNA, 600 bp, Chicken  19866894306224_1
aaagcatgtgtctaccaacaatacaccctgtaggaccaaacacctgcatatcattagtatttctacaatgcaggattatgaaaatattccactgtaaagcatctttatctagcttttgcctcttaatttctactaatgaaatcatctgtcttttcagctcatcatcactgcaaatgtattcaagaacatactgaaaatgcagaaaagtactaaagcagcagcactcacaccattatcatctgtcttccttataccaagcaaatagaatggctgtaaacttaatttcagaaagcagttttycttcatttcagaggaagttgtacacagatctcaacaagaggatcacatttttggcttgacatgcaatagattgttatttttataaatatatatattgccaggagagctgctcagaattcctcttcacaaagaaagagaaagcaaacagaaccaaattctacactctcttgctattgatggctggcttgcaattcaggtgaagaaattcagtaattcaagtcctcgcattctgtactgctgggttctgaagatggccgctatctccagcctgtctactgcatctcttctcctgctgggtcc

SEQ ID NO: 54081 - DNA, 600 bp, Chicken  19866894306234_1
tacagcccacatgcacaggaggggcaaggcattttgaacatacagctccctgaaacctcctgtgtacgcaggagactgtatggtccccttatttatggcaaaaaatttaagttacctggacttctgattcagtgagaataggcaagcacctgcctaatatttgactgagggatttgaataaggcagcaagtacctcatatgtttaaaaaaaaaaaaaaagaagaagaagaagcacattgaaacccaccttacataagaaaacttcagaaagaaaaagcatagtgacagggcagagtttamacacacacagcacctttgaggcattgagaccagtatttttaatccttttgctcacgaccagccttatgaggataaaaccctacacgtaagtcccacagcagcacactgcatggaaaacagagtttcagctggctgttgtttcagttattaggacagtaacatcagggctgcttcctttcccaggattttctgaactatgcttgcagactccatgcctctcccttcaggattttaccttccctgtgaaagtgtgttgagttgcagtgtaactgaggtgcttcttcagttgatgcaggcact

SEQ ID NO: 54082 - DNA, 599 bp, Chicken  19866894306236_1
  misc_feature (1)..(68): n is any nucleotide
nnnnnnnnnnnnnnnnnnnnnnnnnnnnnnnnnnnnnnnnnnnnnnnnnnnnnnnnnnnnnnnnnnnncagcagttatggggcagtgtaggctgagagtaagcagagcaggaaaaggcagaggaatatttgaggatggatggatagataccactgcatgaaaacatatctttttcccctctccaaatctgttggtacagataccattgtccagaaagttttaaggtggtaaccagtgctccctacaagggcaatactgtcaaacagtactaaaagtccataggtgtctacacacaaaacytctcctcctttcccttgccatgagcccagttgtgtggggctctgaagacttgaatcagctgtgggaaaagcacagctgcaacatatttgtctggggggttcaggacaggctgggtttgctggaaacacctgggcataatggagggggctgcccatggcttaaaagacaggctcttgtaaatggtggaaaaagatgaagcagggacaacatgattcatagcctgcatagggtactggggaagggtgagcaggaagggagactaaaattatcaccccagggagcagctgcaagctgttttc

SEQ ID NO: 54083 - DNA, 600 bp, Chicken  19866894306238_1
tgcactgctttaaatctgtgactgttaggagttgcagaatacttttacatatctgtttatttatttgaatggtctttaagccctgcacagagttggatgtgggcttgtgaaaaagagttatcaaagccttggcatggcgttgttttgttctgcctttcagtgcaattttatccgttcctgcagctggctgttcctcttttaacagccaggctcttcaaaccaagtgcttaggatagcttttaagttgccaggctggttagagatgattgtgtctggcagaatgtctttacggtgttggtrgtaagggaaaagcatacgtagtgctactgacygctgctggaaatctgagacctgcctggtgcctcatgccatccatgatctgagtgaaggcagttgtgaagtggcagtctgcttgatatcagtttaaattattttcccctagaagtcaggggtatctaaaacaaacttcaggagaacttgagacagatgaactctggagttgtgttttgcctcaagaktattagggccttaaagcacctctagcctgtgctagcaccagttggtgagatatctgcctgtagctgccaagaaagggcagta

SEQ ID NO: 54084 - DNA, 600 bp, Chicken  19866894306238_2
tgcagaatacttttacatatctgtttatttatttgaatggtctttaagccctgcacagagttggatgtgggcttgtgaaaaagagttatcaaagccttggcatggcgttgttttgttctgcctttcagtgcaattttatccgttcctgcagctggctgttcctcttttaacagccaggctcttcaaaccaagtgcttaggatagcttttaagttgccaggctggttagagatgattgtgtctggcagaatgtctttacggtgttggtrgtaagggaaaagcatacgtagtgctactgacygctgctggaaatctgagacctgcctggtgcctcatgccatccatgatctgagtgaaggcagttgtgaagtggcagtctgcttgatatcagtttaaattattttcccctagaagtcaggggtatctaaaacaaacttcaggagaacttgagacagatgaactctggagttgtgttttgcctcaagaktattagggccttaaagcacctctagcctgtgctagcaccagttggtgagatatctgcctgtagctgccaagaaagggcagtaaaagggtgaagaaagggagaayagagcattgc

SEQ ID NO: 54085 - DNA, 600 bp, Chicken  19866894306238_3
accaagtgcttaggatagcttttaagttgccaggctggttagagatgattgtgtctggcagaatgtctttacggtgttggtrgtaagggaaaagcatacgtagtgctactgacygctgctggaaatctgagacctgcctggtgcctcatgccatccatgatctgagtgaaggcagttgtgaagtggcagtctgcttgatatcagtttaaattattttcccctagaagtcaggggtatctaaaacaaacttcaggagaacttgagacagatgaactctggagttgtgttttgcctcaagaktattagggccttaaagcacctctagcctgtgctagcaccagttggtgagatatctgcctgtagctgccaagaaagggcagtaaaagggtgaagaaagggagaayagagcattgcttagatatattggaagaygacacakwgctgggagggcctgctgtcatcaggagcaaggtgagatgttccacgtgttctcacttggatgcaagtggcagtaaaccagagccactagggagccacgttcttagcaatggttgggtggagcgtccaggatcagcacagataacctctgccttgctcatc

SEQ ID NO: 54086 - DNA, 600 bp, Chicken  19866894306238_4
gctactgacygctgctggaaatctgagacctgcctggtgcctcatgccatccatgatctgagtgaaggcagttgtgaagtggcagtctgcttgatatcagtttaaattattttcccctagaagtcaggggtatctaaaacaaacttcaggagaacttgagacagatgaactctggagttgtgttttgcctcaagaktattagggccttaaagcacctctagcctgtgctagcaccagttggtgagatatctgcctgtagctgccaagaaagggcagtaaaagggtgaagaaagggagaayagagcattgcttagatatattggaagaygacacakwgctgggagggcctgctgtcatcaggagcaaggtgagatgttccacgtgttctcacttggatgcaagtggcagtaaaccagagccactagggagccacgttcttagcaatggttgggtggagcgtccaggatcagcacagataacctctgccttgctcatctgacatccttaaattactaaaacagctccttcattccgaaactactaatttcacccaccactctgacctccacacaacaaatcagccagatagaaaggcaatat

SEQ ID NO: 54087 - DNA, 600 bp, Chicken  19866894306238_5
cctgcctggtgcctcatgccatccatgatctgagtgaaggcagttgtgaagtggcagtctgcttgatatcagtttaaattattttcccctagaagtcaggggtatctaaaacaaacttcaggagaacttgagacagatgaactctggagttgtgttttgcctcaagaktattagggccttaaagcacctctagcctgtgctagcaccagttggtgagatatctgcctgtagctgccaagaaagggcagtaaaagggtgaagaaagggagaayagagcattgcttagatatattggaagaygacacakwgctgggagggcctgctgtcatcaggagcaaggtgagatgttccacgtgttctcacttggatgcaagtggcagtaaaccagagccactagggagccacgttcttagcaatggttgggtggagcgtccaggatcagcacagataacctctgccttgctcatctgacatccttaaattactaaaacagctccttcattccgaaactactaatttcacccaccactctgacctccacacaacaaatcagccagatagaaaggcaatattctgagaaatcttacatttaatgctgct

SEQ ID NO: 54088 - DNA, 600 bp, Chicken  19866894306238_6
ggtgcctcatgccatccatgatctgagtgaaggcagttgtgaagtggcagtctgcttgatatcagtttaaattattttcccctagaagtcaggggtatctaaaacaaacttcaggagaacttgagacagatgaactctggagttgtgttttgcctcaagaktattagggccttaaagcacctctagcctgtgctagcaccagttggtgagatatctgcctgtagctgccaagaaagggcagtaaaagggtgaagaaagggagaayagagcattgcttagatatattggaagaygacacakwgctgggagggcctgctgtcatcaggagcaaggtgagatgttccacgtgttctcacttggatgcaagtggcagtaaaccagagccactagggagccacgttcttagcaatggttgggtggagcgtccaggatcagcacagataacctctgccttgctcatctgacatccttaaattactaaaacagctccttcattccgaaactactaatttcacccaccactctgacctccacacaacaaatcagccagatagaaaggcaatattctgagaaatcttacatttaatgctgctttaacag

SEQ ID NO: 54089 - DNA, 600 bp, Chicken  19866894306238_7
gtgcctcatgccatccatgatctgagtgaaggcagttgtgaagtggcagtctgcttgatatcagtttaaattattttcccctagaagtcaggggtatctaaaacaaacttcaggagaacttgagacagatgaactctggagttgtgttttgcctcaagaktattagggccttaaagcacctctagcctgtgctagcaccagttggtgagatatctgcctgtagctgccaagaaagggcagtaaaagggtgaagaaagggagaayagagcattgcttagatatattggaagaygacacakwgctgggagggcctgctgtcatcaggagcaaggtgagatgttccacgtgttctcacttggatgcaagtggcagtaaaccagagccactagggagccacgttcttagcaatggttgggtggagcgtccaggatcagcacagataacctctgccttgctcatctgacatccttaaattactaaaacagctccttcattccgaaactactaatttcacccaccactctgacctccacacaacaaatcagccagatagaaaggcaatattctgagaaatcttacatttaatgctgctttaacagt

SEQ ID NO: 54090 - DNA, 600 bp, Chicken  19866894306247_1
tgcagctctctcactcagcaagcagtgtttggatccgcatatggctgaaatcttacagagtactggggagttgagagtgagattccttccagcagtgctcttggtaaagaactggatacccatgtccttgaacgactaagctgtgtcagccagttgtctgtgtctgctggataccaataaaagtcctattgatcttataatcctcatgtagagtatagaaggtacttaacagctacagccctacatctgtgattgctcccttgctctgtgtcatgccataaaagttgaaggtcagattcragtttttctatagaactcccacgcttccaaatcttgccaattagctacatctgataactgctttgcattttggcagtttcttataacaccaaaagtgacagatatatgctagtgtttaaaagctagatggaaggaagtgtaagtgtgtggctattttccatgtctttaaatatcaatgacctttcttatggtgaaacgtattaaggttttcttacaaagaagctatgcaaatacagttttagggtagcagctgtaatttgcaaaggttttcctgcctgctaagcacagagatcaattact

SEQ ID NO: 54091 - DNA, 587 bp, Chicken  19866894306248_1
cagcacaaaaatagtttgccttctgcagtcacactgcaacatctgagcatttccgcatcttcctgtattcctttttgctgccatgttaaacaagaaaacactccctgttctgtagaagaaaccaaggggtggcacagctatgactcgctgatcattatggcacagaggactggggagccttctgccactgaacacctgactctggttttgcttattgctggttcttaatgtaagagagggcagcagggctgggagggaggcccccatgggtcagcctgcacaaatctatacccgaggaaygtgcaaccacgtgcacaacccagcagtgcccgggagctccttccacctccacctccctgcttggaaacccagccgaaggcaggcagtgctgttccttcagcagtgtgtgacttgtcctgctctgaatccaggggatgatttgctttcccagggcagagctgtgctccaggcggaccaacgggtagatctgcgagcatgaatcccgcagcggcacccacagctgatgcaaaacgaagcagacagccccaatatttgcaggtgacaatgggagcccttccccctccgca

SEQ ID NO: 54092 - DNA, 600 bp, Chicken  19866894306249_1
agggcagatacacataagaggaagggattgccagccaatggatattgaagacccatcccaaagctagaatgtaactgagaataggatgaaactcaggtgtgtgacaggcatattcccccctccaaagcatgctatcagatgcatcagtgatgactgaagatatttgcccccactgcagtggttggttgttgtaatacttcaaggagttacctctaccatacctcagctgccagaatggaactgtaagcacagtccatctgcttcagtgccccattcaccaaggtgatttggacagccacrgagatcacagtgattttgtgacaacaatgaaacagatgtcacatatgtagaaccagtgggttacagtactgctgacagtcctggcagagatyttacagtcttccttattatagaacatacaagtcaccagctaaacttaaaagccagtcctcataagcaaagaaattatgccaatatttaaagtgttaaggaacataagtattttaaatggtagagaccaagactacaatacattttatgcagagggaaactgatactctgctgtgatgttccatctattaaggaactacagctccttct

SEQ ID NO: 54093 - DNA, 600 bp, Chicken  19866894306249_2
tcaggtgtgtgacaggcatattcccccctccaaagcatgctatcagatgcatcagtgatgactgaagatatttgcccccactgcagtggttggttgttgtaatacttcaaggagttacctctaccatacctcagctgccagaatggaactgtaagcacagtccatctgcttcagtgccccattcaccaaggtgatttggacagccacrgagatcacagtgattttgtgacaacaatgaaacagatgtcacatatgtagaaccagtgggttacagtactgctgacagtcctggcagagatyttacagtcttccttattatagaacatacaagtcaccagctaaacttaaaagccagtcctcataagcaaagaaattatgccaatatttaaagtgttaaggaacataagtattttaaatggtagagaccaagactacaatacattttatgcagagggaaactgatactctgctgtgatgttccatctattaaggaactacagctccttcttgcaaactggcagaaaactaaacacaaggaatgccatgcacaggcagtgttaactaaactatcttttcctagctgtaaggcatcactcagaa

SEQ ID NO: 54094 - DNA, 600 bp, Chicken  19866894306256_1
gtcaaaatgtttctgggataatttgtgtttttctttaatgaaaagtcattagagagcaaatgtccgcagaaggtctgaaatgaaatgcatctttaatgaaatgggatttctctgatagaagatgccttatggtagcttccttcagagatcagctggctgtagcctcagggcaggtggacctgcagtgggtctgtgactcagtgctggagctggggtgaaccccgtgggctatatcctggcggaactcttgtgtcttagtatccatggattccagggttcatctctgtgatcctgtcttgytgcaaagcccgtcttagaaatgggcmtttatttctatgtgtgtaaaactggtctgtctggggtcttacgtgactgctttgtgcctgttcattgctgtcctgcctatgaacatagagtacaatgctgatcgtccattaattgcctgtcaattgattgaaagcgtaacaaaggtgtttctgtgtaagtctactttttacccgttgggaagataacaccagcaaattgacagtaaaaagaagtttgaggcagtagctttaagggcaatcactgcttgttcttgtggaaatatagggcagaagt

SEQ ID NO: 54095 - DNA, 600 bp, Chicken  19866894306256_2
gtttttctttaatgaaaagtcattagagagcaaatgtccgcagaaggtctgaaatgaaatgcatctttaatgaaatgggatttctctgatagaagatgccttatggtagcttccttcagagatcagctggctgtagcctcagggcaggtggacctgcagtgggtctgtgactcagtgctggagctggggtgaaccccgtgggctatatcctggcggaactcttgtgtcttagtatccatggattccagggttcatctctgtgatcctgtcttgytgcaaagcccgtcttagaaatgggcmtttatttctatgtgtgtaaaactggtctgtctggggtcttacgtgactgctttgtgcctgttcattgctgtcctgcctatgaacatagagtacaatgctgatcgtccattaattgcctgtcaattgattgaaagcgtaacaaaggtgtttctgtgtaagtctactttttacccgttgggaagataacaccagcaaattgacagtaaaaagaagtttgaggcagtagctttaagggcaatcactgcttgttcttgtggaaatatagggcagaagttggagccctacaggccagaagggaag

SEQ ID NO: 54096 - DNA, 599 bp, Chicken  19866894306270_1
  misc_feature (1)..(140): n is any nucleotide
nnnnnnnnnnnnnnnnnnnnnnnnnnnnnnnnnnnnnnnnnnnnnnnnnnnnnnnnnnnnnnnnnnnnnnnnnnnnnnnnnnnnnnnnnnnnnnnnnnnnnnnnnnnnnnnnnnnnnnnnnnnnnnnnnnnnnnnnnnnnttcttctgttatttacaacagcagtcatggactattcccatgaaaatagcatttgtttttctttcttgttgactgtttaacaaaaagacacgtaacaaaagtaaaaactgttagtaggacggacgtaactttttaacacagtaaactaaagaagacaaaygaacactgcaaatgtcacaggaagacaggagttgaaacaaaaccaaaccaaacaacagcaacaaaaaaaatctccgtttacctttaccagtcttcctggctgtagaaagggcaagcaatactttggtttgtgaatrtattcttcaatctctttacccagttttgcaagctgctgtcggattttgtagtatatgaccacattttcttcattgggaattactattttgttgtactgttcttccaatttattcacctctgtaataaaaagtaaaatctcatggacatgaataatttcataaa

SEQ ID NO: 54097 - DNA, 599 bp, Chicken  19866894306270_2
  misc_feature (1)..(4): n is any nucleotide
nnnnttcttctgttatttacaacagcagtcatggactattcccatgaaaatagcatttgtttttctttcttgttgactgtttaacaaaaagacacgtaacaaaagtaaaaactgttagtaggacggacgtaactttttaacacagtaaactaaagaagacaaaygaacactgcaaatgtcacaggaagacaggagttgaaacaaaaccaaaccaaacaacagcaacaaaaaaaatctccgtttacctttaccagtcttcctggctgtagaaagggcaagcaatactttggtttgtgaatrtattcttcaatctctttacccagttttgcaagctgctgtcggattttgtagtatatgaccacattttcttcattgggaattactattttgttgtactgttcttccaatttattcacctctgtaataaaaagtaaaatctcatggacatgaataatttcataaacttagaagccaatgtttctctttcacatctacaaaaccaggattttcaacacatattttctgtgcgcaataacccattctctgaaaaactggaaatttctaagtgtgtccgatagattttacttatagtaaattaa

SEQ ID NO: 54098 - DNA, 471 bp, Chicken  19866894306271_1
tagagctggggatttaagagggtataaatccattcactgattcgtactcaactcttctccccagaggcaagatcactgcttataaaacacaccttatggatctgtgtccaattcacttcttactgtccagcttttcctccaaaaggatcttaaagcgctttacaatcagcatttgtggggtcattcacctgcagctgcagtgcaggcattgctggggtagagccccaaaactgtttagcatgtcgaccaggaggtagtgtctccaatggctagcagaggaaacagcccagcacaacatakatgctaaccccaggagggaatttggcatgggcacaaaaataagcagtttatgctgcaggacactctgcaaggtttttattgtccacaagctctgtggtatttgcagcccatttcctctgcacaaaatgcagatagataagtgtgaaatctttagatgcagacttaactcta

SEQ ID NO: 54099 - DNA, 599 bp, Chicken  19866894306272_1
  misc_feature (1)..(130): n is any nucleotide
nnnnnnnnnnnnnnnnnnnnnnnnnnnnnnnnnnnnnnnnnnnnnnnnnnnnnnnnnnnnnnnnnnnnnnnnnnnnnnnnnnnnnnnnnnnnnnnnnnnnnnnnnnnnnnnnnnnnnnnnnnnnnnnnnnataatcatttctataaagagagaaatagctatacgtgtgatgcgttgtaaggttttaacaaattgttcaccaagaagtttatctgagcaattgggtttttagcatcagccatgaatgtataaatataaatgattatataataatcaaaatattggggctagcctgatttraagctctttctaacgtactctgcatggttgtgttcagccttaccagaagaccatgaggtttcctgcagaaatctgctcctctcttggaaaaacaaacaaacaaataaacgcttctcctaactatcttttgttgttgcgctcctgttagcaatatttccttcagccatatcattttgagcttctataacctacagaatcacagaaccataggtgttggaggggatctctggagcacaacccccacatctccctcaacctgctggccacgctctcttacctctctcctgctcagggacatg

SEQ ID NO: 54100 - DNA, 600 bp, Chicken  19866894306276_1
ataggcatccacaaccttctgacagaggaaataatgccacagaatgacatccttcctcttgtgagtgagatgaagaagactgagaagagcaagggcttaagctttgacacagatgtcaaggtcttcttatgcatctcttggacatgtatgccaattttctgttcccaagaataaatggaaaattctgatgtcaaactccagttttgttcatcttcaatcgtatagatggcatacaggataactagggaaaaaatgcaagtgataatgactgtagtaagactttatccattgtcccgtgtracatcttaaaactgaagtaggaaaaacaggctgaaaaaaaacagcagtttttcagtgggcctgagaaaggcacttgattctgtgctgttttgtcctagccataattctgctagtattttcactgtcagaccacaagtgttgtaagcccctactgtaacaggattgagtttgtagtgatctggagagattaagagaaatggtctaaaaccagcaagataatatgtagtgaaggcaagtaatcatagacttcagaaggagaaatcaaacgaaccacttcaaaatgagatataactggctacg

SEQ ID NO: 54101 - DNA, 600 bp, Chicken  19866894306287_1
atcaacgtaaaactttttttttattttttattttttcaatatttttcccttccctccttctctccaaatccctctactcatcctctcccttttatctcttcattacttttggctaagtgcttaagtagatggaagaaacttgctaaacttgcacaatctattgcaagcaatactcggaggacttctgaagtaattacacactatcttctagatatttttaaatgttttgcagaagtatactgatttgcttggatactaaagaacatgcaactagatcaaatagtttctagttttagatamattgtttatggaattctaatattaawgaagaaatacgggaaaagattattttctccttttttttttttcttttttttttcttttttttctttttttttttcttccaaacagaactatctgtaagtctgtgttaatttctgcagcatgcacattgcttccccatattctagagaaatatccacactccactgtagtaggtatttggtattgttcatgctaaccttgaatttctagcacatacattttttttcttgcaaaatatcagcactgtgtcctaatagtagtttatgtactcttata

SEQ ID NO: 54102 - DNA, 600 bp, Chicken  19866894306287_2
tttattttttcaatatttttcccttccctccttctctccaaatccctctactcatcctctcccttttatctcttcattacttttggctaagtgcttaagtagatggaagaaacttgctaaacttgcacaatctattgcaagcaatactcggaggacttctgaagtaattacacactatcttctagatatttttaaatgttttgcagaagtatactgatttgcttggatactaaagaacatgcaactagatcaaatagtttctagttttagatamattgtttatggaattctaatattaawgaagaaatacgggaaaagattattttctccttttttttttttcttttttttttcttttttttctttttttttttcttccaaacagaactatctgtaagtctgtgttaatttctgcagcatgcacattgcttccccatattctagagaaatatccacactccactgtagtaggtatttggtattgttcatgctaaccttgaatttctagcacatacattttttttcttgcaaaatatcagcactgtgtcctaatagtagtttatgtactcttataagttatttgaatgaacaatctttaac

SEQ ID NO: 54103 - DNA, 599 bp, Chicken  19866894306298_1
  misc_feature (1)..(19): n is any nucleotide
nnnnnnnnnnnnnnnnnnnaaaaaaaccagcaatttaaaaaaccccccagaaattagctaaagtcacatggatttttagatacaaacaatgcaggggcttggcttttttaaaatttatttttattcttgagctaaggtaatatttatttcactgccaatactaagcagtagcttgtctttcagagctcctctgttctttatgacacagccaccttctatgtagatatgctacactgttatcacttcgatgaaagctcataattccctttagagcttgttctgccaaacaaccattctcarcactgtgctgataacgtgacctaacaagagaaaacagaaggactcttcttaccggaatcacatgatagcccagtttactcagatgccgcttcttcattgcaagtttcccttgggggtgtgttgtacccaaacaaaaagcagaaggaggaacaaagagaaaagccagtctacaaccaagaagagtataagacaatgattcagtattatcttttaacagtrcagaatacataggcatctttctgttaggctaagtattaagactgcatgcatttcattatcccttttctttctccagactt

SEQ ID NO: 54104 - DNA, 600 bp, Chicken  19866894306298_2
gtagatatgctacactgttatcacttcgatgaaagctcataattccctttagagcttgttctgccaaacaaccattctcarcactgtgctgataacgtgacctaacaagagaaaacagaaggactcttcttaccggaatcacatgatagcccagtttactcagatgccgcttcttcattgcaagtttcccttgggggtgtgttgtacccaaacaaaaagcagaaggaggaacaaagagaaaagccagtctacaaccaagaagagtataagacaatgattcagtattatcttttaacagtrcagaatacataggcatctttctgttaggctaagtattaagactgcatgcatttcattatcccttttctttctccagacttaaactctttttactkytgsaagcttcacaaaagtactagcatttacctaaactcctagagcagaattaagcccttagatctctacttcccctayaataagaaggaaatagctcaaaattctacattttaacagcttgtgcacctgttttgatcatttgctaacactcagaatcagttacttcttgccattaaaccaatttagaaaggtaagaaaaggaac

SEQ ID NO: 54105 - DNA, 600 bp, Chicken  19866894306298_3
cgtgacctaacaagagaaaacagaaggactcttcttaccggaatcacatgatagcccagtttactcagatgccgcttcttcattgcaagtttcccttgggggtgtgttgtacccaaacaaaaagcagaaggaggaacaaagagaaaagccagtctacaaccaagaagagtataagacaatgattcagtattatcttttaacagtrcagaatacataggcatctttctgttaggctaagtattaagactgcatgcatttcattatcccttttctttctccagacttaaactctttttactkytgsaagcttcacaaaagtactagcatttacctaaactcctagagcagaattaagcccttagatctctacttcccctayaataagaaggaaatagctcaaaattctacattttaacagcttgtgcacctgttttgatcatttgctaacactcagaatcagttacttcttgccattaaaccaatttagaaaggtaagaaaaggaacgctttggaaatcagacagtttttgttacacaattcactagctacacacaaaatacattgctgtacagtgatccagaacacaaaagttacccaatt

SEQ ID NO: 54106 - DNA, 600 bp, Chicken  19866894306298_4
gtgacctaacaagagaaaacagaaggactcttcttaccggaatcacatgatagcccagtttactcagatgccgcttcttcattgcaagtttcccttgggggtgtgttgtacccaaacaaaaagcagaaggaggaacaaagagaaaagccagtctacaaccaagaagagtataagacaatgattcagtattatcttttaacagtrcagaatacataggcatctttctgttaggctaagtattaagactgcatgcatttcattatcccttttctttctccagacttaaactctttttactkytgsaagcttcacaaaagtactagcatttacctaaactcctagagcagaattaagcccttagatctctacttcccctayaataagaaggaaatagctcaaaattctacattttaacagcttgtgcacctgttttgatcatttgctaacactcagaatcagttacttcttgccattaaaccaatttagaaaggtaagaaaaggaacgctttggaaatcagacagtttttgttacacaattcactagctacacacaaaatacattgctgtacagtgatccagaacacaaaagttacccaattc

SEQ ID NO: 54107 - DNA, 600 bp, Chicken  19866894306298_5
acctaacaagagaaaacagaaggactcttcttaccggaatcacatgatagcccagtttactcagatgccgcttcttcattgcaagtttcccttgggggtgtgttgtacccaaacaaaaagcagaaggaggaacaaagagaaaagccagtctacaaccaagaagagtataagacaatgattcagtattatcttttaacagtrcagaatacataggcatctttctgttaggctaagtattaagactgcatgcatttcattatcccttttctttctccagacttaaactctttttactkytgsaagcttcacaaaagtactagcatttacctaaactcctagagcagaattaagcccttagatctctacttcccctayaataagaaggaaatagctcaaaattctacattttaacagcttgtgcacctgttttgatcatttgctaacactcagaatcagttacttcttgccattaaaccaatttagaaaggtaagaaaaggaacgctttggaaatcagacagtttttgttacacaattcactagctacacacaaaatacattgctgtacagtgatccagaacacaaaagttacccaattctag

SEQ ID NO: 54108 - DNA, 600 bp, Chicken  19866894306298_6
tcattgcaagtttcccttgggggtgtgttgtacccaaacaaaaagcagaaggaggaacaaagagaaaagccagtctacaaccaagaagagtataagacaatgattcagtattatcttttaacagtrcagaatacataggcatctttctgttaggctaagtattaagactgcatgcatttcattatcccttttctttctccagacttaaactctttttactkytgsaagcttcacaaaagtactagcatttacctaaactcctagagcagaattaagcccttagatctctacttcccctayaataagaaggaaatagctcaaaattctacattttaacagcttgtgcacctgttttgatcatttgctaacactcagaatcagttacttcttgccattaaaccaatttagaaaggtaagaaaaggaacgctttggaaatcagacagtttttgttacacaattcactagctacacacaaaatacattgctgtacagtgatccagaacacaaaagttacccaattctagttaagccttactgaaatggtgggatgtcccacttcagttagcaagaggtcatttttctcacacaagatgatgctt

SEQ ID NO: 54109 - DNA, 600 bp, Chicken  19866894306299_1
gattaagaaagtattcacagaacagcataaagcactgtaaaggccctgtctggatccttgattacaaaaatgaattggaaaatatgcagggaattcctattaaaataattagaaaggaaaatcccatcaaataaatggaacctgtgggaatcagcttgcttagaaaagccaaaacatactgtaaaaaaaaaaaagcaaaacagaacactaaattgttatttattgataaatacaaaacaaaggaaaagaaaagctcaaggccagtgctggaacagaagaaagtggccacgaacaaagccraaataaactgccttcaactaaatttacactagaaattaggaggtttctagccttctatcaagagtcaaagcatacaaacaacatctcaaggatctggaacacagtagagtgtgaaaaggttaagtgacataatcacctgcgacagaagaggacaaggtaatattctataagaaattccttccaatcccaaattcttaagattcatattaagccatgcaaattaaactcactgtatgtcaaacagcacacacacctctctctctgataaagataaaatattttcctagttttatgtagttt

SEQ ID NO: 54110 - DNA, 599 bp, Chicken  19866894306307_1
  misc_feature (1)..(20): n is any nucleotide
nnnnnnnnnnnnnnnnnnnnagatgtgtgtgccactgagcatcacctgaaaatggggtaagagttctttatgacctgttagaaaatagtgggctgaaacaggaagaggctctgcagcctgcagaatgagattgtattcactgaactgaggattgatgggttggatgagtgacacgggtttctgaagagggttggtgccacccatcctttgttacagcatcagtccagtacctggtgttggaaatttgggctctccactggcgtgttttgctcagggaggtttggtgccctccttgtgccrttccgtggcagtggractcaaggtctcaagctcagcttgtgagtgagctggcctcrtagctccagcctgcttacaccaaatgtgggagtgggagctkcagggcaccagtgggatcagagggagctggagcrgggccttgggtctgcctgggggcgctggaagccaggagaagatgcacagtgaggacagggtctctgcaagtctcccaggggctaacggctcgtttgggttacagtggagatgttgggtggtctccagtgaaggagaatggcttccattctccaggaggaagacctgga

SEQ ID NO: 54111 - DNA, 599 bp, Chicken  19866894306307_2
  misc_feature (1)..(5): n is any nucleotide
nnnnnagatgtgtgtgccactgagcatcacctgaaaatggggtaagagttctttatgacctgttagaaaatagtgggctgaaacaggaagaggctctgcagcctgcagaatgagattgtattcactgaactgaggattgatgggttggatgagtgacacgggtttctgaagagggttggtgccacccatcctttgttacagcatcagtccagtacctggtgttggaaatttgggctctccactggcgtgttttgctcagggaggtttggtgccctccttgtgccrttccgtggcagtggractcaaggtctcaagctcagcttgtgagtgagctggcctcrtagctccagcctgcttacaccaaatgtgggagtgggagctkcagggcaccagtgggatcagagggagctggagcrgggccttgggtctgcctgggggcgctggaagccaggagaagatgcacagtgaggacagggtctctgcaagtctcccaggggctaacggctcgtttgggttacagtggagatgttgggtggtctccagtgaaggagaatggcttccattctccaggaggaagacctggaatcccatccaggctg

SEQ ID NO: 54112 - DNA, 600 bp, Chicken  19866894306307_3
gtaagagttctttatgacctgttagaaaatagtgggctgaaacaggaagaggctctgcagcctgcagaatgagattgtattcactgaactgaggattgatgggttggatgagtgacacgggtttctgaagagggttggtgccacccatcctttgttacagcatcagtccagtacctggtgttggaaatttgggctctccactggcgtgttttgctcagggaggtttggtgccctccttgtgccrttccgtggcagtggractcaaggtctcaagctcagcttgtgagtgagctggcctcrtagctccagcctgcttacaccaaatgtgggagtgggagctkcagggcaccagtgggatcagagggagctggagcrgggccttgggtctgcctgggggcgctggaagccaggagaagatgcacagtgaggacagggtctctgcaagtctcccaggggctaacggctcgtttgggttacagtggagatgttgggtggtctccagtgaaggagaatggcttccattctccaggaggaagacctggaatcccatccaggctggtcagtcggtcctcaccagaggactgggacatcccttggcaa

SEQ ID NO: 54113 - DNA, 600 bp, Chicken  19866894306307_4
acaggaagaggctctgcagcctgcagaatgagattgtattcactgaactgaggattgatgggttggatgagtgacacgggtttctgaagagggttggtgccacccatcctttgttacagcatcagtccagtacctggtgttggaaatttgggctctccactggcgtgttttgctcagggaggtttggtgccctccttgtgccrttccgtggcagtggractcaaggtctcaagctcagcttgtgagtgagctggcctcrtagctccagcctgcttacaccaaatgtgggagtgggagctkcagggcaccagtgggatcagagggagctggagcrgggccttgggtctgcctgggggcgctggaagccaggagaagatgcacagtgaggacagggtctctgcaagtctcccaggggctaacggctcgtttgggttacagtggagatgttgggtggtctccagtgaaggagaatggcttccattctccaggaggaagacctggaatcccatccaggctggtcagtcggtcctcaccagaggactgggacatcccttggcaacccagaggtggaggagaactttgggcactgctcccacccra

SEQ ID NO: 54114 - DNA, 600 bp, Chicken  19866894306307_5
tgtattcactgaactgaggattgatgggttggatgagtgacacgggtttctgaagagggttggtgccacccatcctttgttacagcatcagtccagtacctggtgttggaaatttgggctctccactggcgtgttttgctcagggaggtttggtgccctccttgtgccrttccgtggcagtggractcaaggtctcaagctcagcttgtgagtgagctggcctcrtagctccagcctgcttacaccaaatgtgggagtgggagctkcagggcaccagtgggatcagagggagctggagcrgggccttgggtctgcctgggggcgctggaagccaggagaagatgcacagtgaggacagggtctctgcaagtctcccaggggctaacggctcgtttgggttacagtggagatgttgggtggtctccagtgaaggagaatggcttccattctccaggaggaagacctggaatcccatccaggctggtcagtcggtcctcaccagaggactgggacatcccttggcaacccagaggtggaggagaactttgggcactgctcccacccratctgtaaaacccaaaacaagcagaaatgtatcct

SEQ ID NO: 54115 - DNA, 600 bp, Chicken  19866894306307_6
kcagggcaccagtgggatcagagggagctggagcrgggccttgggtctgcctgggggcgctggaagccaggagaagatgcacagtgaggacagggtctctgcaagtctcccaggggctaacggctcgtttgggttacagtggagatgttgggtggtctccagtgaaggagaatggcttccattctccaggaggaagacctggaatcccatccaggctggtcagtcggtcctcaccagaggactgggacatcccttggcaacccagaggtggaggagaactttgggcactgctcccacccratctgtaaaacccaaaacaagcagaaatgtatcctgcatcccaacctatgtaaccaaccaatgtatcccaacctataggcygcgtgctgctttgacagagagcggatgtctttgatggctgatgagagagcgcaggtattattcattgggttgggtcggagctcttttgctataacagttctacagctgcagcagggcagtggtgacagcgggtgtgaaaagccctttgcaggcatcaggacatctctgttctgacagggtggggcgtgagccctgcctcagctcggagccctttggagc

SEQ ID NO: 54116 - DNA, 600 bp, Chicken  19866894306307_7
cagtgaggacagggtctctgcaagtctcccaggggctaacggctcgtttgggttacagtggagatgttgggtggtctccagtgaaggagaatggcttccattctccaggaggaagacctggaatcccatccaggctggtcagtcggtcctcaccagaggactgggacatcccttggcaacccagaggtggaggagaactttgggcactgctcccacccratctgtaaaacccaaaacaagcagaaatgtatcctgcatcccaacctatgtaaccaaccaatgtatcccaacctataggcygcgtgctgctttgacagagagcggatgtctttgatggctgatgagagagcgcaggtattattcattgggttgggtcggagctcttttgctataacagttctacagctgcagcagggcagtggtgacagcgggtgtgaaaagccctttgcaggcatcaggacatctctgttctgacagggtggggcgtgagccctgcctcagctcggagccctttggagcaggttctcttgactgttgaacaatgcttggcaaagaggagccgggtttataaataatgcatttcctttgtcttgcaggagt

SEQ ID NO: 54117 - DNA, 599 bp, Chicken  19866894306308_1
  misc_feature (1)..(25): n is any nucleotide
nnnnnnnnnnnnnnnnnnnnnnnnngtgtggccctgaatgatttcccttcactcactgtggcccaggaaagccaaaaggttggaaaatcatgtgttaccatctttaatgtgggactgtagacaatgcttctctgtgatgggcagcaccatttttcaggcttctgcttaaaacacacacagtcagaagaaaaggagtcaaggaccatgactgaaacttatctgtgttgcagtattacctaggctaataaccatcataattactgctcacttatgctcacttctcttgaaaaaatgccctgygtacaagaaggttttattgtgtggcagcacatgacagattgtacaactttcaggatgtgattctcctctagatgtagccagatcctcatggaggggagttttgtacatccctcgtgttgctccaggggctctctggtgtctggcacttcctgcccctggaaaccawtgcttctttttgcagcttgcttgtgactgctgcctcttatgcctggcttagcctagctcccaaatacagggggccacttccctttttgctgggggacacttccactttcacactctcatgtgctggcacactc

SEQ ID NO: 54118 - DNA, 600 bp, Chicken  19866894306308_2
taaaacacacacagtcagaagaaaaggagtcaaggaccatgactgaaacttatctgtgttgcagtattacctaggctaataaccatcataattactgctcacttatgctcacttctcttgaaaaaatgccctgygtacaagaaggttttattgtgtggcagcacatgacagattgtacaactttcaggatgtgattctcctctagatgtagccagatcctcatggaggggagttttgtacatccctcgtgttgctccaggggctctctggtgtctggcacttcctgcccctggaaaccawtgcttctttttgcagcttgcttgtgactgctgcctcttatgcctggcttagcctagctcccaaatacagggggccacttccctttttgctgggggacacttccactttcacactctcatgtgctggcacactctgcttgcatttaggttcccagctttgcacagaggagtttaaagaccttaagatgtccccgtggaagctacaccacatttcaagaggatgctactattcatacagagcagggaagcccttactaaaaaagtaaaaacaactacatctttgttccttcttctcgacagt

SEQ ID NO: 54119 - DNA, 600 bp, Chicken  19866894306309_1
cacgcggtgtttgagcgatcctgggagctcagctgaaccctgaaaggagctgttgggctcctacccgcggcacagacacctcgtgacctcccagccccttccttctgctgtgctagtatcccccaaatccagccctgtctgtgagtgcatccctgcagctctgtgtcgtcccacccccacccccccatggatgccatgcatggcctgagagcagccagcggccacttgagcaacagcacagggctgtatgcaaatgcagtactacatctcagcagccattaaatgcacacctgctcccgwatcgttccatggtgggacagccctgtcctctaagacacgcatgggtggctcctcgagttgtgtttcatgcacccaaaccagccatctaacccagcctcccaccaaaccagccataaaaccaaccatcccgagtggctccygggaayggctgcccagtgccctccctgccgcaggtggccgtgcctcagccggtcgcccagtgacagcccagtccctctgtggcctgcctgcccctagcatgctggtggcgataaggctggaaggtgcttcgtttgtgctgccatccaaacaaaataaagc

SEQ ID NO: 54120 - DNA, 600 bp, Chicken  19866894306309_2
gtgagtgcatccctgcagctctgtgtcgtcccacccccacccccccatggatgccatgcatggcctgagagcagccagcggccacttgagcaacagcacagggctgtatgcaaatgcagtactacatctcagcagccattaaatgcacacctgctcccgcatcgttccatggtgggacagccctgtcctctaagacacgcatgggtggctcctcgagttgtgtttcatgcacccaaaccagccatctaacccagcctcccaccaaaccagccataaaaccaaccatcccgagtggctccygggaayggctgcccagtgccctccctgccgcaggtggccgtgcctcagccggtcgcccagtgacagcccagtccctctgtggcctgcctgcccctagcatgctggtggcgataaggctggaaggtgcttcgtttgtgctgccatccaaacaaaataaagcctgtctgcctccaatgcatttttttttgtcttaattgttctatttccctgcgcctgtgcactcctggccacaccgctcttgccagcaaagcacagcactgatcatcctcagatggttcacacagaggtttctgttttgtt

SEQ ID NO: 54121 - DNA, 600 bp, Chicken  19866894306309_3
gcatccctgcagctctgtgtcgtcccacccccacccccccatggatgccatgcatggcctgagagcagccagcggccacttgagcaacagcacagggctgtatgcaaatgcagtactacatctcagcagccattaaatgcacacctgctcccgcatcgttccatggtgggacagccctgtcctctaagacacgcatgggtggctcctcgagttgtgtttcatgcacccaaaccagccatctaacccagcctcccaccaaaccagccataaaaccaaccatcccgagtggctccygggaayggctgcccagtgccctccctgccgcaggtggccgtgcctcagccggtcgcccagtgacagcccagtccctctgtggcctgcctgcccctagcatgctggtggcgataaggctggaaggtgcttcgtttgtgctgccatccaaacaaaataaagcctgtctgcctccaatgcatttttttttgtcttaattgttctatttccctgcgcctgtgcactcctggccacaccgctcttgccagcaaagcacagcactgatcatcctcagatggttcacacagaggtttctgttttgttttgttt

SEQ ID NO: 54122 - DNA, 600 bp, Chicken  19866894306309_4
tgcgtatctgctgctgacgggaaataaatgtgcccaaaagcacttaaaagaaaataaaaaggaccagacctgattgcagcagttagaagtgatatattcttggcatggaaacaaaaagcaaattcatagcaggtttggagctgatcttactggcttacatgggattttatacttaggtaattccattgttggctggtgatacctgatttatgcctgaataaggtcctgatcctgcaaacatttacttatgtatttcagttttacctttgccccagacgccctattaatttcactgcagtraggatagtgcttgtttgcaaaactggcgcctctgcaagaagaaactctatgccataacgyctgagatgaggaggaaattttgcagtgagaagtgaactctcccagacyggggtcttcctgtggtcttcctgtggcctcgggcagtgacatccagaggcacacagctcctccagcccaggagcttcaggaggcagcagrgagagccctcagctgaagcctgcagctgctctcagctctggcagcctctgcaacaagtggagaaccaggaagcagtgtggcactacgttcagtgtgacccca

SEQ ID NO: 54123 - DNA, 600 bp, Chicken  19866894306309_5
ggaccagacctgattgcagcagttagaagtgatatattcttggcatggaaacaaaaagcaaattcatagcaggtttggagctgatcttactggcttacatgggattttatacttaggtaattccattgttggctggtgatacctgatttatgcctgaataaggtcctgatcctgcaaacatttacttatgtatttcagttttacctttgccccagacgccctattaatttcactgcagtraggatagtgcttgtttgcaaaactggcgcctctgcaagaagaaactctatgccataacgyctgagatgaggaggaaattttgcagtgagaagtgaactctcccagacyggggtcttcctgtggtcttcctgtggcctcgggcagtgacatccagaggcacacagctcctccagcccaggagcttcaggaggcagcagrgagagccctcagctgaagcctgcagctgctctcagctctggcagcctctgcaacaagtggagaaccaggaagcagtgtggcactacgttcagtgtgaccccaccatttcccctgggcagaccaccaagaggagcttctaaacagagtcaaaatcgtatttat

SEQ ID NO: 54124 - DNA, 600 bp, Chicken  19866894306309_6
aaacaaaaagcaaattcatagcaggtttggagctgatcttactggcttacatgggattttatacttaggtaattccattgttggctggtgatacctgatttatgcctgaataaggtcctgatcctgcaaacatttacttatgtatttcagttttacctttgccccagacgccctattaatttcactgcagtraggatagtgcttgtttgcaaaactggcgcctctgcaagaagaaactctatgccataacgyctgagatgaggaggaaattttgcagtgagaagtgaactctcccagacyggggtcttcctgtggtcttcctgtggcctcgggcagtgacatccagaggcacacagctcctccagcccaggagcttcaggaggcagcagrgagagccctcagctgaagcctgcagctgctctcagctctggcagcctctgcaacaagtggagaaccaggaagcagtgtggcactacgttcagtgtgaccccaccatttcccctgggcagaccaccaagaggagcttctaaacagagtcaaaatcgtatttatttgttgtttcagttcaagaaagtgacatatataattaaaaccactggg

SEQ ID NO: 54125 - DNA, 600 bp, Chicken  19866894306309_7
atacctgatttatgcctgaataaggtcctgatcctgcaaacatttacttatgtatttcagttttacctttgccccagacgccctattaatttcactgcagtraggatagtgcttgtttgcaaaactggcgcctctgcaagaagaaactctatgccataacgyctgagatgaggaggaaattttgcagtgagaagtgaactctcccagacyggggtcttcctgtggtcttcctgtggcctcgggcagtgacatccagaggcacacagctcctccagcccaggagcttcaggaggcagcagrgagagccctcagctgaagcctgcagctgctctcagctctggcagcctctgcaacaagtggagaaccaggaagcagtgtggcactacgttcagtgtgaccccaccatttcccctgggcagaccaccaagaggagcttctaaacagagtcaaaatcgtatttatttgttgtttcagttcaagaaagtgacatatataattaaaaccactgggtttactgtataccctcctttgtcaggagagggggcatgctacaattcatcccccgggcaccattctttaacaacacaactaccgaatctg

SEQ ID NO: 54126 - DNA, 600 bp, Chicken  19866894306311_1
gcccagcaaagcttggaagccgctcgtgtgatgtagggcacttcggctccatgtgaacgcttcctccctggcacatctgtcaaagaacagaagcagcaagacacgagctgctatactttgatttcagcatctctacaagcgaatggcttgctgcctgcaggctggggctgctgctccagagccggagcacagcatgatgtgggtccagagttggggtgcagctcaggcagacgcagcctgcagcaaacctgggcagtgctgcagcagagggcacagccacagcactgctgcagcacctcrgccctgcgtgccttgcacggctgcaggctgctccacgagctctggtacacttccagagcaactcctgtgaatttggctcggcttctaatgcagcagcctggagaagtgaatattgcctctctacaccgatttaattatatataaaattagaaggaggaagtcttagttaaaatttcatacttctggaagacagccggttcgttagcatcactttaatgaggcactaacctcactgtaatgcttttattaatgctcgtcgcttattgagtgccaacagcttggctcctctccgacaggccg

SEQ ID NO: 54127 - DNA, 600 bp, Chicken  19866894306311_2
aactcctgtgaatttggctcggcttctaatgcagcagcctggagaagtgaatattgcctctctacaccgatttaattatatataaaattagaaggaggaagtcttagttaaaatttcatacttctggaagacagccggttcgttagcatcactttaatgaggcactaacctcactgtaatgcttttattaatgctcgtcgcttattgagtgccaacagcttggctcctctccgacaggccggctggcccgcacagtgaatggtttaggggtcctttgatgcaaaatacgagcgcgtttcyaccacagccacgggacaaacgacagttggtgagatgagacacagcaaaccccaccagatggtgcccagagcgggcgatgcagagagagagtgagattggggcaggcagaatgggtcygggagggaacaaacgaaggaagcggaggcgatgctgtcccaccgacaccattcctgttggctgcagcggggtcaggatggggccaggctggtgagcartgacagcacagcaaaaacacatctcacaatgggctttctttggccaaagcarcctccaaccccaggctcctgcactcggccccac

SEQ ID NO: 54128 - DNA, 600 bp, Chicken  19866894306311_3
atacttctggaagacagccggttcgttagcatcactttaatgaggcactaacctcactgtaatgcttttattaatgctcgtcgcttattgagtgccaacagcttggctcctctccgacaggccggctggcccgcacagtgaatggtttaggggtcctttgatgcaaaatacgagcgcgtttcyaccacagccacgggacaaacgacagttggtgagatgagacacagcaaaccccaccagatggtgcccagagcgggcgatgcagagagagagtgagattggggcaggcagaatgggtcygggagggaacaaacgaaggaagcggaggcgatgctgtcccaccgacaccattcctgttggctgcagcggggtcaggatggggccaggctggtgagcartgacagcacagcaaaaacacatctcacaatgggctttctttggccaaagcarcctccaaccccaggctcctgcactcggccccacccaggagcagagcccactgctcgcaggtagtgcccaggtgctccgggcatacctttcagacacggacacaaacagaaggacaaggattaccccaacagctgccaggacaacaacccc

SEQ ID NO: 54129 - DNA, 600 bp, Chicken  19866894306311_4
cagcttggctcctctccgacaggccggctggcccgcacagtgaatggtttaggggtcctttgatgcaaaatacgagcgcgtttcyaccacagccacgggacaaacgacagttggtgagatgagacacagcaaaccccaccagatggtgcccagagcgggcgatgcagagagagagtgagattggggcaggcagaatgggtcygggagggaacaaacgaaggaagcggaggcgatgctgtcccaccgacaccattcctgttggctgcagcggggtcaggatggggccaggctggtgagcartgacagcacagcaaaaacacatctcacaatgggctttctttggccaaagcarcctccaaccccaggctcctgcactcggccccacccaggagcagagcccactgctcgcaggtagtgcccaggtgctccgggcatacctttcagacacggacacaaacagaaggacaaggattaccccaacagctgccaggacaacaacccccacacctcctgggagctgaggtggcatatgccatatgtttctcctcctgttccttcaagctctctgaatagagggattagaaattatccattgcagcc

SEQ ID NO: 54130 - DNA, 568 bp, Chicken  19866894306311_5
gggtcctttgatgcaaaatacgagcgcgtttcyaccacagccacgggacaaacgacagttggtgagatgagacacagcaaaccccaccagatggtgcccagagcgggcgatgcagagagagagtgagattggggcaggcagaatgggtcygggagggaacaaacgaaggaagcggaggcgatgctgtcccaccgacaccattcctgttggctgcagcggggtcaggatggggccaggctggtgagcartgacagcacagcaaaaacacatctcacaatgggctttctttggccaaagcarcctccaaccccaggctcctgcactcggccccacccaggagcagagcccactgctcgcaggtagtgcccaggtgctccgggcatacctttcagacacggacacaaacagaaggacaaggattaccccaacagctgccaggacaacaacccccacacctcctgggagctgaggtggcatatgccatatgtttctcctcctgttccttcaagctctctgaatagagggattagaaattatccattgcagcctaaaacagcagagccaagtg

SEQ ID NO: 54131 - DNA, 600 bp, Chicken  19866894306318_1
gctttaagttagataagtataatcagaaagaaatcaagggatcatgctaagctgcaagacccctgaagtgttatttctcttagcaactctgttttgtaagaatgtgcagtattacattgggtattagagcctacattacttttatacaccatattactacacgataggcagttatgaaatagtgtggccaaaaaggagggataacgctgtgtggaaaatatccatagcagtttttagcaatctggtttctagcagcacagaaatgcaatctaaactcctacatcaaaactttacaaaaawacattcaatttaattttagattaaattgtttctggaataagattatctgtcacatttcagctcagaaacatttcttgatatccaaattccattttttcacaaacagccactctgaataagtttggtaggcttttaattacagaagcacagatatgcccctaaaataagagttttcagtatcctgactttgcagggaccactttaagactctgagggtgatataaaatctaaaatgacagttatgattctcaggcatatttccttctataacacatatactcttcacacttctaaaaaaaa

SEQ ID NO: 54132 - DNA, 600 bp, Chicken  19866894306325_1
agagcaaggcctcactcaaggtttttaagtcaaaattccattgctctagtcttgcaatttttttgtaactgtggcctatttatactgatattaaaacctttatagacagcagctgggtttgcggttttgtatcctgcaacaccacgctctgcatcttctgcatagttctgtgtcagttgagctgaagtagtatccagcagcaaggtgagttgtggcttgtgagtgacagtgcaggtaccatttgaagagataatatcaaaggttgattcctttggctttgccacaccccccctttctctyaccggcaccctggggagcttgttggtttcaaacaagcactgctatgccatactccttaagaacaattcttctgccaggttgctctgagcacaggttcacagtgctgctggagcaggagttccagccaggacttggagttggttacaggtgatgtcctgtcacgctgttgtctctctcaagctgatcagcaaacttccaaggctcaacatttgatggagacagaaagagaaggtgagtgcttattgcataaaataatccctgaagttcagacttccttgaggcaacaaatcaaatggaact

SEQ ID NO: 54133 - DNA, 600 bp, Chicken  19866894306335_1
ccactaccctgacaaaggccccgtttgtgaaaaagtgtttcattctgatttgtattctaattaaggagaaataatcatgcattttgaaatagaatcaattagttctttgtgggttttttttaatgtgagggagaaggagccaaatatgtttcttggtactgtttatgcagtgttagtgtttctgctgaggttgtatatctgcaaatcagggcatgatttattgattcaattttctgtatttcttctttttcttttgacctaataattacagagttaagatattctatgtttgggaagctygccttagaaatgaacttgaccatgtgaagaaaatgtattgagtataygtagtacagtaataatctcaggtacaacttctgaagccrtggtttcastgagtttctctttaacttcaaaaactgcttatatgcatttcagtcttccaaatacagagaacgttttaaaacaaaattattcaagacatttatttcaagtgtaatgtgcactcatttaatgcttttttaggcatagcagattatggtaattttcatcacagattttatcaagtcagaaggatgatgtattaaaaattcagtagct

SEQ ID NO: 54134 - DNA, 600 bp, Chicken  19866894306335_2
atttgtattctaattaaggagaaataatcatgcattttgaaatagaatcaattagttctttgtgggttttttttaatgtgagggagaaggagccaaatatgtttcttggtactgtttatgcagtgttagtgtttctgctgaggttgtatatctgcaaatcagggcatgatttattgattcaattttctgtatttcttctttttcttttgacctaataattacagagttaagatattctatgtttgggaagctygccttagaaatgaacttgaccatgtgaagaaaatgtattgagtataygtagtacagtaataatctcaggtacaacttctgaagccrtggtttcastgagtttctctttaacttcaaaaactgcttatatgcatttcagtcttccaaatacagagaacgttttaaaacaaaattattcaagacatttatttcaagtgtaatgtgcactcatttaatgcttttttaggcatagcagattatggtaattttcatcacagattttatcaagtcagaaggatgatgtattaaaaattcagtagcttatacagagaggtgagagaatataatacaggactctaaaataataag

SEQ ID NO: 54135 - DNA, 600 bp, Chicken  19866894306335_3
aaatagaatcaattagttctttgtgggttttttttaatgtgagggagaaggagccaaatatgtttcttggtactgtttatgcagtgttagtgtttctgctgaggttgtatatctgcaaatcagggcatgatttattgattcaattttctgtatttcttctttttcttttgacctaataattacagagttaagatattctatgtttgggaagctygccttagaaatgaacttgaccatgtgaagaaaatgtattgagtataygtagtacagtaataatctcaggtacaacttctgaagccrtggtttcastgagtttctctttaacttcaaaaactgcttatatgcatttcagtcttccaaatacagagaacgttttaaaacaaaattattcaagacatttatttcaagtgtaatgtgcactcatttaatgcttttttaggcatagcagattatggtaattttcatcacagattttatcaagtcagaaggatgatgtattaaaaattcagtagcttatacagagaggtgagagaatataatacaggactctaaaataataaggcagattttccatgatagtgatgttatagagtacttttg

SEQ ID NO: 54136 - DNA, 600 bp, Chicken  19866894306335_4
caattagttctttgtgggttttttttaatgtgagggagaaggagccaaatatgtttcttggtactgtttatgcagtgttagtgtttctgctgaggttgtatatctgcaaatcagggcatgatttattgattcaattttctgtatttcttctttttcttttgacctaataattacagagttaagatattctatgtttgggaagctygccttagaaatgaacttgaccatgtgaagaaaatgtattgagtataygtagtacagtaataatctcaggtacaacttctgaagccrtggtttcastgagtttctctttaacttcaaaaactgcttatatgcatttcagtcttccaaatacagagaacgttttaaaacaaaattattcaagacatttatttcaagtgtaatgtgcactcatttaatgcttttttaggcatagcagattatggtaattttcatcacagattttatcaagtcagaaggatgatgtattaaaaattcagtagcttatacagagaggtgagagaatataatacaggactctaaaataataaggcagattttccatgatagtgatgttatagagtacttttgctgattaat

SEQ ID NO: 54137 - DNA, 600 bp, Chicken  19866894306345_1
aaactactactcttcctctctgtaagtctgctctgaatattctggtctgtgctctgcacagcaattttagacctatatattcatgatatacctagattacctcaggcaaataagacactatccttgaatgataaatcatgggaaatatataatgaatctctcagttgcagtgtaagacaaaaagagttagttatgaggatttaatttccttctgtatggaaagatctttgagctcttcatcagggagtcccatggctctgtgattttctattgtgattgtaactgaatagaaaaaaaatkttgtgtgcctaatttcctattctttactctccagccctgagagattatgttgtagtgatgattggcatacgaggcttcttcagaaggtaaagactcctacagtgctatttgtaggctagtaaatttcaatcaggagaggtgataagaggaaaaaaggagaggtatgtgctatgtgagaaactacatgatgagatgggaaggtattatagcttctctgttcatccctttctgagtcttgggtaaatacgggatacattagctagcagcatagccttggggccttggggctttatttaactc

SEQ ID NO: 54138 - DNA, 600 bp, Chicken  19866894306345_2
ctctgttcatccctttctgagtcttgggtaaatacgggatacattagctagcagcatagccttggggccttggggctttatttaactccacttgccttgttttcactccagctgtggcttactacttattggccttctcagaggtcttgggacctgaaaagtgtgaaaagagtctgtgtgaagctattggaggcagaaatctggacctttgcatatcaggatctctaaccagcaaggcatggacaaagtctgaaaagactttgttttaaagttatgaattttggaatgtgactatacttrcaaatttcatgctcaaattcagtatttaagaaaaacagcagcttcaaaacccttctctagctggtgtaacaataacacagagtactctgcgaaaaatatggccatatgaaattgttggagctgtgttttctgagcttttgacttgcttcaacttatgaaccttgaacttcttttctccttgtcctttgtctcctcggttcttttactaaggttcaactcctcaggctttaggtgtacttttcttttcttactcttgcctaggaaattcttccatcatttcctatacttctgaaaattctc

SEQ ID NO: 54139 - DNA, 600 bp, Chicken  19866894306348_1
tgaaacacaaatcatttttagcctagtcatttctaatctgattttcaataaagtagctctttctaatgtagctaatgcagagacttttacaatagcattttcttttcttttcttttctttttttcatttttatattccttctgttctcttttgctgcaacttcatttcctctggtcaggagagcaaaccacttagtgatagattttcatcttagcgtaataacacgtgaaaaaggagaaggaagtgtaaatgtgaagaagaaaaattattattttcagaataattataaatggtgtctgragtttatatagaacacatatgggaacacagtgttaaaaagccacatgtattacatcctgaataagctgtaatttaaataagataagacaaatataactcagtagaaccacagttcaaagcagggcccccttctgcttgccagcagtgggaaaatgggagaaagaaattgatgaaaatcttcttttaaaggtggagagctgttaaaaataataatatgtattttctagaataagaaaccacatagatatcagtgtcacatattttgactggtatatagacacctaagctccagtgaaaaaa

SEQ ID NO: 54140 - DNA, 600 bp, Chicken  19866894306350_1
aggtagaaggttgtttttgtggggttttttttattttgggttggtttttttttttcttccgcaagttttaattttcatccttcaagggaaaaaaaaaatgtggatcacaaagatctttcagcgtgctgggtgtcaccaagggtgctttgggaggttgctttgtctgctggagtcggatggaagcagagcgccttcctacagctggctgggtagtgaggcttcgcccctgggctgggagtctttgtaaagcccccgagggcagggccagctgcaggaagaggtgctgcagccctctgtgarcrtagggggtgtattctcagtagggtcgctatgctggatgccagcgggccyggaggatgcttatcatggggctgtggtactgaaaagaaacaaagcagtattaaagtggstgtaagggctcgcggcaccacaaagaggtgcccggcaggaagtaggctggtggctgaggaaagaatagaacatatcagcatcagactcatctgaagggtgctttgggatgcctccrtaccagtaccagcaggagtggcagtctccatcctgcatcatcccacgttcgctccttgaagggtgattgtaacc

SEQ ID NO: 54141 - DNA, 600 bp, Chicken  19866894306350_2
gtagaaggttgtttttgtggggttttttttattttgggttggtttttttttttcttccgcaagttttaattttcatccttcaagggaaaaaaaaaatgtggatcacaaagatctttcagcgtgctgggtgtcaccaagggtgctttgggaggttgctttgtctgctggagtcggatggaagcagagcgccttcctacagctggctgggtagtgaggcttcgcccctgggctgggagtctttgtaaagcccccgagggcagggccagctgcaggaagaggtgctgcagccctctgtgarcrtagggggtgtattctcagtagggtcgctatgctggatgccagcgggccyggaggatgcttatcatggggctgtggtactgaaaagaaacaaagcagtattaaagtggstgtaagggctcgcggcaccacaaagaggtgcccggcaggaagtaggctggtggctgaggaaagaatagaacatatcagcatcagactcatctgaagggtgctttgggatgcctccrtaccagtaccagcaggagtggcagtctccatcctgcatcatcccacgttcgctccttgaagggtgattgtaacctg

SEQ ID NO: 54142 - DNA, 600 bp, Chicken  19866894306350_3
ttttcttccgcaagttttaattttcatccttcaagggaaaaaaaaaatgtggatcacaaagatctttcagcgtgctgggtgtcaccaagggtgctttgggaggttgctttgtctgctggagtcggatggaagcagagcgccttcctacagctggctgggtagtgaggcttcgcccctgggctgggagtctttgtaaagcccccgagggcagggccagctgcaggaagaggtgctgcagccctctgtgarcrtagggggtgtattctcagtagggtcgctatgctggatgccagcgggccyggaggatgcttatcatggggctgtggtactgaaaagaaacaaagcagtattaaagtggstgtaagggctcgcggcaccacaaagaggtgcccggcaggaagtaggctggtggctgaggaaagaatagaacatatcagcatcagactcatctgaagggtgctttgggatgcctccrtaccagtaccagcaggagtggcagtctccatcctgcatcatcccacgttcgctccttgaagggtgattgtaacctggtcctacacagcacagaactactacagaaacacagtactcacctgctat

SEQ ID NO: 54143 - DNA, 600 bp, Chicken  19866894306350_4
agatctttcagcgtgctgggtgtcaccaagggtgctttgggaggttgctttgtctgctggagtcggatggaagcagagcgccttcctacagctggctgggtagtgaggcttcgcccctgggctgggagtctttgtaaagcccccgagggcagggccagctgcaggaagaggtgctgcagccctctgtgarcrtagggggtgtattctcagtagggtcgctatgctggatgccagcgggccyggaggatgcttatcatggggctgtggtactgaaaagaaacaaagcagtattaaagtggstgtaagggctcgcggcaccacaaagaggtgcccggcaggaagtaggctggtggctgaggaaagaatagaacatatcagcatcagactcatctgaagggtgctttgggatgcctccrtaccagtaccagcaggagtggcagtctccatcctgcatcatcccacgttcgctccttgaagggtgattgtaacctggtcctacacagcacagaactactacagaaacacagtactcacctgctattcttacccggtcagtctctcccttcaagaagttcgtgtgttccaataaaagcaacctag

SEQ ID NO: 54144 - DNA, 600 bp, Chicken  19866894306350_5
ctgggctgggagtctttgtaaagcccccgagggcagggccagctgcaggaagaggtgctgcagccctctgtgarcrtagggggtgtattctcagtagggtcgctatgctggatgccagcgggccyggaggatgcttatcatggggctgtggtactgaaaagaaacaaagcagtattaaagtggstgtaagggctcgcggcaccacaaagaggtgcccggcaggaagtaggctggtggctgaggaaagaatagaacatatcagcatcagactcatctgaagggtgctttgggatgcctccrtaccagtaccagcaggagtggcagtctccatcctgcatcatcccacgttcgctccttgaagggtgattgtaacctggtcctacacagcacagaactactacagaaacacagtactcacctgctattcttacccggtcagtctctcccttcaagaagttcgtgtgttccaataaaagcaacctagctgtgcacttttctgtagctcttgctgagaactcttcccaggttggcacctgaatgccttactctcagcagtcagaggcttgcttgctctgtgtgcaggttattgccatagaatag

SEQ ID NO: 54145 - DNA, 599 bp, Chicken  19866894306355_1
  misc_feature (1)..(9): n is any nucleotide
nnnnnnnnnttttcaaccgtgtttaaagaccactgcccttgttatggacgtggaacaaagggccagactctgcagtgaaatgactaacttgtctttggaaatcctgtctgttttcttacatttcctgctttgtgtgctaaaagatctctttagaagtaggagatgaatgtgcaaagatagtaacactcctggagaactgacagaagtcagatcacagtggtaaatgctttgcatccagaggagctgagggtatctcaaactacctactaagcatttatttattcacgttttcctaaaacrtcctatgaagttctttacaaagaaaagttaatttctgaattatcttctggagctgccagaggtaagaagaaaatcatttgcagacacataaatctgaggagtcaaattaataaggagaacagcttcagccaataacttcttcctaagcttggaaggatatccagctatcaccagttacttgcttaacagcaatgtctgacaaacaggtagaacaccacattagagcaggcaggaaaccactacagcactgaaaccaatgactgtcaacagagatcctttgataaattagaagatgaaca

SEQ ID NO: 54146 - DNA, 424 bp, Chicken  19866894306355_2
cctatgaagttctttacaaagaaaagttaatttctgaattatcttctggagctgccagaggtaagaagaaaatcatttgcagacacataaatctgaggagtcaaattaataaggagaacagcttcagccaataacttcttcctaagcttggaaggatatccagctatcaccagttacttgcttaacagcaatgtctgacaaacaggtagaacaccacattagagcaggcaggaaaccactacagcactgaaaccaatgactgtcaacagagatcctttgataaattagaagatgaacacwtttayaggccttcaaatatttgatgtgcttttcaataaatattcaataggagcataatgccattgtatattagacacaaataacacaaagtgagcacctatagtgacaaataggcaattattac

SEQ ID NO: 54147 - DNA, 419 bp, Chicken  19866894306355_3
gaagttctttacaaagaaaagttaatttctgaattatcttctggagctgccagaggtaagaagaaaatcatttgcagacacataaatctgaggagtcaaattaataaggagaacagcttcagccaataacttcttcctaagcttggaaggatatccagctatcaccagttacttgcttaacagcaatgtctgacaaacaggtagaacaccacattagagcaggcaggaaaccactacagcactgaaaccaatgactgtcaacagagatcctttgataaattagaagatgaacacwtttayaggccttcaaatatttgatgtgcttttcaataaatattcaataggagcataatgccattgtatattagacacaaataacacaaagtgagcacctatagtgacaaataggcaattattac

SEQ ID NO: 54148 - DNA, 600 bp, Chicken  19866894306370_1
ctggggacctacaggccagtcagcctcacctcagtctcttggaaggtgacagaatagctcatctggaaaccacttctaggcacataaaggagaaggaatcgtcagtagtctgaatggattcaccaagagaaagttgtgcctgaccaacctgataagcttctacaatgaaatcatcggcctcctggacaggagggtgggggtggggggggcgaagtgaatattttcttcctggatttcagtatggtctttgacacaacctccagtaagatcctcatagagaagctgttgaagtatgggctrgatgagcagaaagcgaggtggattgaaaacragaatggccgggcccagagggtagtggtgagtggtgcagtctggctggagggcagtaactagcaaagtgacacagaggtcagtactgggtccagtcttgttttacatcttctttaacaatctggatgatggggctgaggacaccctcagtaaattcaggaatggcacagaaattggggcagtggctgactgaccagagggccgtgcagccatccagaggaacctcaacaggctggagagggccggagaggaacctcatggcattcaata

SEQ ID NO: 54149 - DNA, 600 bp, Chicken  19866894306370_2
cagtctcttggaaggtgacagaatagctcatctggaaaccacttctaggcacataaaggagaaggaatcgtcagtagtctgaatggattcaccaagagaaagttgtgcctgaccaacctgataagcttctacaatgaaatcatcggcctcctggacaggagggtgggggtggggggggcgaagtgaatattttcttcctggatttcagtatggtctttgacacaacctccagtaagatcctcatagagaagctgttgaagtatgggctrgatgagcagaaagcgaggtggattgaaaacragaatggccgggcccagagggtagtggtgagtggtgcagtctggctggagggcagtaactagcaaagtgacacagaggtcagtactgggtccagtcttgttttacatcttctttaacaatctggatgatggggctgaggacaccctcagtaaattcaggaatggcacagaaattggggcagtggctgactgaccagagggccgtgcagccatccagaggaacctcaacaggctggagagggccggagaggaacctcatggcattcaataaggagaagagcagaatgcttctcttggggag

SEQ ID NO: 54150 - DNA, 600 bp, Chicken  19866894306372_1
aaaacacagagaagatgcaaagttgtctatgctgctgaactcatatactacatgcaacaatttttattttttttttttaatctcgcattcagaagctgtgcaattctcagtgcttgaaaatagcaatgctactctggactgagatggcttctggggatatgaaagactttcttgtttttcctagctatgatgactcctaataagcaagatgtatcaaactttcacttgtcaaggatattctgttaagatcaacattaaaaaactcttttggaaagaaaaaaggattgtacttgagacaakaataaaaaaaatgaggaaagtcagcacttcagatagaaattaacaacatgatttctgactgcacagttatttgaacattcatataaatgactgatagattttgcaatctaaaaccaaatactgttggaattttaggaattatttttatgagtgatgactccatttctattcaatattgaatttgatttgttttatttgatagttgcttttctgcattcctgcatatggaagcatgaccatagtagtgcttgaaatacatttttgttattattggaataacactagtcactactccaacac

SEQ ID NO: 54151 - DNA, 599 bp, Chicken  19866894306383_1
  misc_feature (1)..(30): n is any nucleotide
nnnnnnnnnnnnnnnnnnnnnnnnnnnnnnattctatcccttgctgtgctgtgtgtcagtggtgcaggctgcagccagtcccaggaagcagagcaggtgatgatgggaggtgaagtgggtacgttcaccctgtgtcataagctgtttaaatgtttcattaacttcaagattttttttataaatcattgctttattgaatttcatattatttatttatgttacttatgtgtacacgtataatattcataatccatactgtttacacaatgaaatatgatattggagctaaagcactgggaraaggggaatttgtttcatcacagctttccttgggacaaaattgtcattagagacatattttgcctcctgtccgtggtttgtccttctgtttttcacaagcagtttaagaagagctgtgacaggccacagtaaraaatcakaaggctggaacttagatacatggggagctcatctctgctcctgctctgtctcaaagagtaggaggtgctcactaagtgtatgatttgatcaagattctttggtgagtggcttggatttatttgagtaatgaaggtattttaggagtcttcaatgagtaa

SEQ ID NO: 54152 - DNA, 600 bp, Chicken  19866894306383_2
gtcataagctgtttaaatgtttcattaacttcaagattttttttataaatcattgctttattgaatttcatattatttatttatgttacttatgtgtacacgtataatattcataatccatactgtttacacaatgaaatatgatattggagctaaagcactgggaraaggggaatttgtttcatcacagctttccttgggacaaaattgtcattagagacatattttgcctcctgtccgtggtttgtccttctgtttttcacaagcagtttaagaagagctgtgacaggccacagtaaraaatcakaaggctggaacttagatacatggggagctcatctctgctcctgctctgtctcaaagagtaggaggtgctcactaagtgtatgatttgatcaagattctttggtgagtggcttggatttatttgagtaatgaaggtattttaggagtcttcaatgagtaactccttcaggaaattggtgctttccttcagatctgaactctgttggtcaaggtttggattcagactgttaaggcttgttccaaagcaatgactgtttgaatgtccactgaattcagttcccagtcacaaatctg

SEQ ID NO: 54153 - DNA, 600 bp, Chicken  19866894306383_3
gctgtttaaatgtttcattaacttcaagattttttttataaatcattgctttattgaatttcatattatttatttatgttacttatgtgtacacgtataatattcataatccatactgtttacacaatgaaatatgatattggagctaaagcactgggaraaggggaatttgtttcatcacagctttccttgggacaaaattgtcattagagacatattttgcctcctgtccgtggtttgtccttctgtttttcacaagcagtttaagaagagctgtgacaggccacagtaaraaatcakaaggctggaacttagatacatggggagctcatctctgctcctgctctgtctcaaagagtaggaggtgctcactaagtgtatgatttgatcaagattctttggtgagtggcttggatttatttgagtaatgaaggtattttaggagtcttcaatgagtaactccttcaggaaattggtgctttccttcagatctgaactctgttggtcaaggtttggattcagactgttaaggcttgttccaaagcaatgactgtttgaatgtccactgaattcagttcccagtcacaaatctggagtagc

SEQ ID NO: 54154 - DNA, 600 bp, Chicken  19866894306389_1
aatataaatcttttctgttgtattatttttgctgtcattctgtgaagtattatcttgctgagccaagatctccatttctccctggtattgcagtcctgtctctcatgacacttagcctgtgaatatatcattatcaatctctctgatccacccagatttgtatataaattcatctctcaggtattgacttcgataaagtcccaccctatcaaatgatacatgctgcagcagagaccttacttgaaagtagctcttttgagagagatgtttgtagtttaccatggtgaggagagccaccaygcaacagtcaagtggggatgcagtgaatttgagtcatggattctggaatmcttactttcatacttcatatgtatactaagtggtatttcatttggtacttagtgcagcaccacttctatactggaacacctcttgctcttagaaacaaaaatgaaattgttgcagaaaaaaataaagttcttaattytgtatatttaccatacaataaatataagacaagaatttgtacatacaactgtaagacattacacacatcggtatgcaaacatgaagctgaatcctttcaatcaaaaatatctg

SEQ ID NO: 54155 - DNA, 600 bp, Chicken  19866894306389_2
tatcttgctgagccaagatctccatttctccctggtattgcagtcctgtctctcatgacacttagcctgtgaatatatcattatcaatctctctgatccacccagatttgtatataaattcatctctcaggtattgacttcgataaagtcccaccctatcaaatgatacatgctgcagcagagaccttacttgaaagtagctcttttgagagagatgtttgtagtttaccatggtgaggagagccaccaygcaacagtcaagtggggatgcagtgaatttgagtcatggattctggaatmcttactttcatacttcatatgtatactaagtggtatttcatttggtacttagtgcagcaccacttctatactggaacacctcttgctcttagaaacaaaaatgaaattgttgcagaaaaaaataaagttcttaattytgtatatttaccatacaataaatataagacaagaatttgtacatacaactgtaagacattacacacatcggtatgcaaacatgaagctgaatcctttcaatcaaaaatatctgaaaattcaaggtcttttctctgcactagtactcaatacaaaaatgcttca

SEQ ID NO: 54156 - DNA, 600 bp, Chicken  19866894306389_3
cttcgataaagtcccaccctatcaaatgatacatgctgcagcagagaccttacttgaaagtagctcttttgagagagatgtttgtagtttaccatggtgaggagagccaccaygcaacagtcaagtggggatgcagtgaatttgagtcatggattctggaatmcttactttcatacttcatatgtatactaagtggtatttcatttggtacttagtgcagcaccacttctatactggaacacctcttgctcttagaaacaaaaatgaaattgttgcagaaaaaaataaagttcttaattytgtatatttaccatacaataaatataagacaagaatttgtacatacaactgtaagacattacacacatcggtatgcaaacatgaagctgaatcctttcaatcaaaaatatctgaaaattcaaggtcttttctctgcactagtactcaatacaaaaatgcttcaccattgtcaaaccagacaagggtgcaaatagatgtcctcatgtacatgattttcacwgctgcagccactcaagttcagctctactcagcctttcaacacaaaaccagatcactaggatatcctcccacaacctgttt

SEQ ID NO: 54157 - DNA, 518 bp, Chicken  19866894306389_4
caccacttctatactggaacacctcttgctcttagaaacaaaaatgaaattgttgcagaaaaaaataaagttcttaattytgtatatttaccatacaataaatataagacaagaatttgtacatacaactgtaagacattacacacatcggtatgcaaacatgaagctgaatcctttcaatcaaaaatatctgaaaattcaaggtcttttctctgcactagtactcaatacaaaaatgcttcaccattgtcaaaccagacaagggtgcaaatagatgtcctcatgtacatgattttcacwgctgcagccactcaagttcagctctactcagcctttcaacacaaaaccagatcactaggatatcctcccacaacctgtttttttcctccatattttgaatgtatgtctgttcaacattaatcaaaatggcaaccccccccccctgctatgctcttccagtgttcttgaacccttacttacattacacagccctcttcatccttcttgcagaagcaaca

SEQ ID NO: 54158 - DNA, 600 bp, Chicken  19866894306392_1
acccattttgccacccgtgatggccatctctatcttctctcaggatgttggtaagactgcaggcttgctctttattagaaggcgtttgctctagcagcaatcaagtcttcaaggtggctcggaaagactttagaaagagtagaatgtttttgacaagaaataaaatggagtgtgattctattcttgtgaatagaatgttatgtaagctgggcatgctgttctttcatgctaagtgcagttccttttatgatcactaagtggtgagattcagccgtgaagatttcatcacagggatctgcragtttcttgaagttcttctgtcaatgttttgtttcaaaatcataatacagctagcacaaatacaccggcaaagcctggagagcatctccacatccctacagagatcactctcacactgccaggaggctttgatgcaaaagaatatagttccagtaaatcttcaatgtttttcagttttgaaggttctgaggctgaagatcagaaattaagtatttgcttgtcaatcagaggtgtacatttcaaagctgtcagtttatccctctgacgtggtccaaggtcttgcttcatatcttactggag

SEQ ID NO: 54159 - DNA, 600 bp, Chicken  19866894306396_1
gagtcaagagctactgctggaaccatggacaccaggcttactagaaaagctgaactgctcttgccaacataacccaaacaagtgtttaaaatcttcagacttgtaatgggttaaagatatcagaaactgctttttgggacaaagtattaatcctgggcacgaagaccaaaggaggagcaagcatatcatcatgtttctgctgtgaaaattattcatgttgtaagggatcttcagtcttggataagaggaaaaaatcaatattaatctactcatacttctgatggaagaatgtggtcacawaaagtatcactgggtaaagctggactgcagctggagtttgaaggcagatgctatagttttgctatggaaacaatggaccataacatcatatctgatacagaaaaatcaatcacactgctactggctggaaaatgctacgccctgatgaaagaatataaagtactttgagcagttgttaaacataagaggtgtcataattatttaatcacgttagaggtcaagacaattaaaatatcctttgtcagtattttctctgaagtttgttttcaggactgggggaagaggaggataatattttct

SEQ ID NO: 54160 - DNA, 599 bp, Chicken  19866894306399_1
  misc_feature (1)..(76): n is any nucleotide
nnnnnnnnnnnnnnnnnnnnnnnnnnnnnnnnnnnnnnnnnnnnnnnnnnnnnnnnnnnnnnnnnnnnnnnnnnnnctcctgggtctctaaaaactgagcggcaaattaattagccggacacaaaccagaacagtgagactgattttggaccggatccaaccaggcagcagtgtggctcctgttagccaaaatcaggaaccacaaaccactctcttcgtctgcgcttcctcatgagccactgggatagtccatggaccatgtggagttcacaagctctgctatcaaactccttcaaccaygaacrgtggcatttgttcagcaaagaccttgagagmcatgtgcacagggctctgtgctttccctccctgatgacccctccattctccatcccgctgggagcatggctgccagctgggctatgacctgcactggtctgcagaagatcctgctgctccgttaatgatccgtgggtccgacagcctgcaggctgttggaaatcacaacagggagaagaatgtaacattaaaaataatccaggcatgagctgctgtggaaaaacaaaacaaaacaaaaatacgttaaaaatctcccacacaac

SEQ ID NO: 54161 - DNA, 599 bp, Chicken  19866894306399_2
  misc_feature (1)..(71): n is any nucleotide
nnnnnnnnnnnnnnnnnnnnnnnnnnnnnnnnnnnnnnnnnnnnnnnnnnnnnnnnnnnnnnnnnnnnnnnctcctgggtctctaaaaactgagcggcaaattaattagccggacacaaaccagaacagtgagactgattttggaccggatccaaccaggcagcagtgtggctcctgttagccaaaatcaggaaccacaaaccactctcttcgtctgcgcttcctcatgagccactgggatagtccatggaccatgtggagttcacaagctctgctatcaaactccttcaaccaygaacrgtggcatttgttcagcaaagaccttgagagmcatgtgcacagggctctgtgctttccctccctgatgacccctccattctccatcccgctgggagcatggctgccagctgggctatgacctgcactggtctgcagaagatcctgctgctccgttaatgatccgtgggtccgacagcctgcaggctgttggaaatcacaacagggagaagaatgtaacattaaaaataatccaggcatgagctgctgtggaaaaacaaaacaaaacaaaaatacgttaaaaatctcccacacaacaacac

SEQ ID NO: 54162 - DNA, 599 bp, Chicken  19866894306399_3
  misc_feature (1)..(40): n is any nucleotide
nnnnnnnnnnnnnnnnnnnnnnnnnnnnnnnnnnnnnnnnctcctgggtctctaaaaactgagcggcaaattaattagccggacacaaaccagaacagtgagactgattttggaccggatccaaccaggcagcagtgtggctcctgttagccaaaatcaggaaccacaaaccactctcttcgtctgcgcttcctcatgagccactgggatagtccatggaccatgtggagttcacaagctctgctatcaaactccttcaaccaygaacrgtggcatttgttcagcaaagaccttgagagmcatgtgcacagggctctgtgctttccctccctgatgacccctccattctccatcccgctgggagcatggctgccagctgggctatgacctgcactggtctgcagaagatcctgctgctccgttaatgatccgtgggtccgacagcctgcaggctgttggaaatcacaacagggagaagaatgtaacattaaaaataatccaggcatgagctgctgtggaaaaacaaaacaaaacaaaaatacgttaaaaatctcccacacaacaacacaatatccttcttctctctgcctgagctattt

SEQ ID NO: 54163 - DNA, 600 bp, Chicken  19866894306406_1
ggaaagatgcccgcacccaacaggcatgcattagctgaccagacatcccttgtttgctttttgggctaaaatcctggagtgccacaacagcttcccagatgcaggtaaggcaaaacatgcatttacaccaggtatccatgtatttatctccagactactcgccctgaagcattcagacatgtcctagcagtcacataattagaaaagctaatgaatcactcgaacgttgcaaatccttaagggtcttggaacctctgctggattacatgaattcccaatgaggtatgcagagattggaaraaaataaatctacatgagtaaagtttcttccaggggatgagcattcttataataggaagtcccaggcaaagtaccatgggcagcagggacaactcctgcacactttacacccgacagcaggagattgtttccatccttcagaacttggtgtctgagcacaaggttaattccacacagctgatagaaggcgacagcagactccaaatcaaaggcacatcaccaccttcaaaaggaagtgctttaagtggaatcttagacagcttaagtgcgaaaaaattacattcctgaagtgttattctc

SEQ ID NO: 54164 - DNA, 600 bp, Chicken  19866894306409_1
gagcagcagcaggctcctgagccaggctcaatgcaacagcactggctagcatgcagccctgtggtgtgtgtgctcaggggtaaatgtacgtgggagaaagtgctgcagcaaggatggggtgatggcacagctgagctcatgagcctttggcacagtgtgggatgcagagcagagtgaggctggctcttctccttgcatttcgggactcatgagccttcaagctgctgcagagggatgatttacgtgctgctgggcacattcttggtggatatttttctgcaggtgggctttttgtatgcrctcctcctgaaaccctgggagccctgagtatatttctgcctctcctccccctgcctcatcctgaggtgaggaattctgtgcaatcccagccctggcccagggctgcgggagtgctgggagtgytgcaggtgttgggaatgggagttatttgccccagctctccattccgctctgccaccacctttggatctttgttggaaccccatagcaatgacaggaggctctgcagctctgccaagacacaggtttggctctgggcacgggcgcatcgctgtcatctttggagaggaggatggcact

SEQ ID NO: 54165 - DNA, 600 bp, Chicken  19866894306409_2
ggcacagctgagctcatgagcctttggcacagtgtgggatgcagagcagagtgaggctggctcttctccttgcatttcgggactcatgagccttcaagctgctgcagagggatgatttacgtgctgctgggcacattcttggtggatatttttctgcaggtgggctttttgtatgcrctcctcctgaaaccctgggagccctgagtatatttctgcctctcctccccctgcctcatcctgaggtgaggaattctgtgcaatcccagccctggcccagggctgcgggagtgctgggagtgytgcaggtgttgggaatgggagttatttgccccagctctccattccgctctgccaccacctttggatctttgttggaaccccatagcaatgacaggaggctctgcagctctgccaagacacaggtttggctctgggcacgggcgcatcgctgtcatctttggagaggaggatggcactgtgtgcccaaaacgccactgccgcggggctgtgtgcttctcagggagctgggaggtgctggggagctgtgcagggccatccccagctgctgggtgatgctggcagaggggtgcctgccccata

SEQ ID NO: 54166 - DNA, 599 bp, Chicken  19866894306412_1
  misc_feature (1)..(186): n is any nucleotide
nnnnnnnnnnnnnnnnnnnnnnnnnnnnnnnnnnnnnnnnnnnnnnnnnnnnnnnnnnnnnnnnnnnnnnnnnnnnnnnnnnnnnnnnnnnnnnnnnnnnnnnnnnnnnnnnnnnnnnnnnnnnnnnnnnnnnnnnnnnnnnnnnnnnnnnnnnnnnnnnnnnnnnnnnnnnnnnnnnnnnnnnnntatttctactgacaaaagtttaatccacgagagatacagacagaagtgctctggaatttgactttttttccttctaaaatagtaattcctgctcttaatttgagtgctctgctycgacacacatggtgaggagtactgagtggaacaaatgttactcatagagacaacattgctagaacactcaccatggactaagtttccctcttcttatttgtgacctaccagttatttctgtgaaaggcaggaggtgaattaactttgtgccaattttagtcattccattcctatcctgtgtgtacagtaatacttgctgtgtttcctcgtaggctattcacaagggtctgctgratattcatgagaatggcacagaggctgcagcagtcactggcacagagtttgctcctcattctgtt

SEQ ID NO: 54167 - DNA, 600 bp, Chicken  19866894306412_2
ctctggaatttgactttttttccttctaaaatagtaattcctgctcttaatttgagtgctctgctycgacacacatggtgaggagtactgagtggaacaaatgttactcatagagacaacattgctagaacactcaccatggactaagtttccctcttcttatttgtgacctaccagttatttctgtgaaaggcaggaggtgaattaactttgtgccaattttagtcattccattcctatcctgtgtgtacagtaatacttgctgtgtttcctcgtaggctattcacaagggtctgctgratattcatgagaatggcacagaggctgcagcagtcactggcacagagtttgctcctcattctgttcctcctgttataaagttcaaccgtccatttttgctgttgattgttgatcaatacactgaaagtatcctcttcataggaaaaattgtaaacccactgaaaaatgattgatcagtggtaggtcttattgatttgaattgcactttatgcatttatagtctgatgtaattaaaattatatcaaatcttttagtaacaattttattttttctaaaaataatcaagacaagaatgtggtc

SEQ ID NO: 54168 - DNA, 600 bp, Chicken  19866894306413_1
attcaggagttggaatgggtcttttctgtgcccaaactttgtagctatgaaaaaatagcagtggccagatgataagagcaggccagcatccagcaaagcaggactggaatcctttttggtggtgaaacccaaacacactttgtgctctcctgtggcaggaaacacgctggcttcgtcagcgatgggaaaaaagcaacctggtggctgtttaagaataagatgaagggacgtgtctgtcccactttaacctcaatttgtaagttaaaagttagggatgaaacagtctgaaggagtgatggrtgctgcataattactgtagaacataggaaatgcagattccaggtccttgcaaagagcagggcgcttcctttgcgaggtattctcattatgctgtgacaaaagcatatgtgcaaattagtgatatatgccgctaacatcagacagctccagcagtgtctccccgttctccttcccagtcttaaattggatcagcgatcagttagtgggatttttgcctgactaaggaacaggaaagagcaagtgagatttatcgcatggctcaaggtgcacttcatttgcattatattagctgtgctgtct

SEQ ID NO: 54169 - DNA, 600 bp, Chicken  19866894306420_1
ccagatgtgagaactaataaaacagtgtgatgaaataaaacgtcaggctttgttgggagagaaagggagaagtactatttgctgtttatttttccaaatggcatgaagtacagagcagggttcagtcaatgatatttgcctccaataacagaagtaatttttgtcatcacagtgctggtaggtattagtgagcttcggggttttttaatcaatcatatttataagacttgttcagtaaaaacaagttatgtttgagcagtgaaaaggctactcttgctaagtacttgctgctaagttgcygcagctcaaacttgtaaagactaattgtgcggaccctgtgatatcatgtgtgaaattgattgcctcactcttcccatcaatgtactgcacgactcraagagaagatgttttttgttttagtagccttaacaaaattacaatggatgtaatgattttagatctgctggagttacccaggtggattaaagtgaagaactcgtaaaaagtagatgcaagagagaaagcttgtaagcatctgctccatgtgttcggaatgagtaagctgcagtatcctacttaggaatttcactgctacaaaaa

SEQ ID NO: 54170 - DNA, 600 bp, Chicken  19866894306420_2
aatggcatgaagtacagagcagggttcagtcaatgatatttgcctccaataacagaagtaatttttgtcatcacagtgctggtaggtattagtgagcttcggggttttttaatcaatcatatttataagacttgttcagtaaaaacaagttatgtttgagcagtgaaaaggctactcttgctaagtacttgctgctaagttgcygcagctcaaacttgtaaagactaattgtgcggaccctgtgatatcatgtgtgaaattgattgcctcactcttcccatcaatgtactgcacgactcraagagaagatgttttttgttttagtagccttaacaaaattacaatggatgtaatgattttagatctgctggagttacccaggtggattaaagtgaagaactcgtaaaaagtagatgcaagagagaaagcttgtaagcatctgctccatgtgttcggaatgagtaagctgcagtatcctacttaggaatttcactgctacaaaaatgtgttcacaagccatgtatgtaaaacaaaacatataatggcaaattgtgtgtatagaacaagctctgttcctacagtgtttcttctcttctgtgt

SEQ ID NO: 54171 - DNA, 600 bp, Chicken  19866894306422_1
gctcttttgtctgccagcttgttctacaattatttacttggctgtccgggagtgaatagagcctgacttcagccctctgctgctttccacttttctgctgctttcacaccttccaggcagtctcagcctgatgctttcaagatgcattcttctccaacacatgacttttaggagaacagttcacacttagaagcagcagcagaagcaactttcacttctctgcaagcaacagccattaagcacaccacaaacactcccagggcaggtccagctgggagcagcacgtactgactggccatsagccttcagcctcagctcaagcttgaaaaaacaattcaggaatcatttgggaaatgaagtggggagcacgggcactcccgcactttggtttttctgcccaagccaaccattttggtcaaagacagaagaaaaagcccactggctttaacgtatacatctcaaacgcaaaacaaacaaacaaaaaaactgaagcaaggcagaatttaatggactacctctgcagatgggttctcattttgtctcccccccccctgcagccacagcagcccccctacccgctcatccctccccctctctgat

SEQ ID NO: 54172 - DNA, 599 bp, Chicken  19866894306427_1
  misc_feature (1)..(174): n is any nucleotide
nnnnnnnnnnnnnnnnnnnnnnnnnnnnnnnnnnnnnnnnnnnnnnnnnnnnnnnnnnnnnnnnnnnnnnnnnnnnnnnnnnnnnnnnnnnnnnnnnnnnnnnnnnnnnnnnnnnnnnnnnnnnnnnnnnnnnnnnnnnnnnnnnnnnnnnnnnnnnnnnnnnnnnnnnnnnnnctgccctccgaggcagcactgctaggccctaggccctaatgcagacatctgggtcttgcccacctgccaccagcaccttgaccttccttgtccaggaaagctggtttctatgtgccatagtcccarctggtttgtactgggcacagacgggcaggttatagtagctgtggctgcagggaggtggccatgtgctggtaccagccacgttcccagccggctcgcccagagccttgggtggttaaggaaaggggcaggagatacaggaagaggcacggggatatcacgtagctgagaggagccagacattcctggggacacacctggagttgctctsttgggaggagcactctgtgccagggttgacaagtcactgccaaaggacctctctgctggaaccttccacttgccctctttccatgycccct

SEQ ID NO: 54173 - DNA, 600 bp, Chicken  19866894306427_2
cctaatgcagacatctgggtcttgcccacctgccaccagcaccttgaccttccttgtccaggaaagctggtttctatgtgccatagtcccarctggtttgtactgggcacagacgggcaggttatagtagctgtggctgcagggaggtggccatgtgctggtaccagccacgttcccagccggctcgcccagagccttgggtggttaaggaaaggggcaggagatacaggaagaggcacggggatatcacgtagctgagaggagccagacattcctggggacacacctggagttgctctsttgggaggagcactctgtgccagggttgacaagtcactgccaaaggacctctctgctggaaccttccacttgccctctttccatgycccctcctcccacaccckcagagcaaggtaagcacagcccactgcacagggaagtgaggtatttctgtgtgtacaaagagcaacatctccatgtgcaactctgtcttaccttatggagaatgtggggaaacaactgtgcaagcccattgtgcgtgtggaaaccatcattccaaggccttggctagcttcactggaataccagaaggcccatctc

SEQ ID NO: 54174 - DNA, 516 bp, Chicken  19866894306427_3
tcccarctggtttgtactgggcacagacgggcaggttatagtagctgtggctgcagggaggtggccatgtgctggtaccagccacgttcccagccggctcgcccagagccttgggtggttaaggaaaggggcaggagatacaggaagaggcacggggatatcacgtagctgagaggagccagacattcctggggacacacctggagttgctctsttgggaggagcactctgtgccagggttgacaagtcactgccaaaggacctctctgctggaaccttccacttgccctctttccatgycccctcctcccacaccckcagagcaaggtaagcacagcccactgcacagggaagtgaggtatttctgtgtgtacaaagagcaacatctccatgtgcaactctgtcttaccttatggagaatgtggggaaacaactgtgcaagcccattgtgcgtgtggaaaccatcattccaaggccttggctagcttcactggaataccagaaggcccatctcct

SEQ ID NO: 54175 - DNA, 498 bp, Chicken  19866894306427_4
gggcacagacgggcaggttatagtagctgtggctgcagggaggtggccatgtgctggtaccagccacgttcccagccggctcgcccagagccttgggtggttaaggaaaggggcaggagatacaggaagaggcacggggatatcacgtagctgagaggagccagacattcctggggacacacctggagttgctctsttgggaggagcactctgtgccagggttgacaagtcactgccaaaggacctctctgctggaaccttccacttgccctctttccatgycccctcctcccacaccckcagagcaaggtaagcacagcccactgcacagggaagtgaggtatttctgtgtgtacaaagagcaacatctccatgtgcaactctgtcttaccttatggagaatgtggggaaacaactgtgcaagcccattgtgcgtgtggaaaccatcattccaaggccttggctagcttcactggaataccagaaggcccatctcct

SEQ ID NO: 54176 - DNA, 600 bp, Chicken  19866894306428_1
cagacataaaaacaaatattacatataagtacttaatatatttctttcattaagcatcacgtaatgaaagttatctgtctgttacaagagctggggtggaacaaagccattccttccatcccataagtttcagaggggaagaccatcttcccactacatgattttctatagaaaagcctccctcaaacacagttcagaggacaccggagtgtacggccggttgatcccacgcagcccccgggggtaaagctgcaattctacgtgcaaaaaaaaaccaacataagatggagatggctgaartaacagaggctgtttctcagcaatcccaacacacggacggcgtggggaagagggcaaaggcagcctgagatcggtacccgagaagcccgtgtattagcacgcacgcctttccccgaggccccgctgcggccccgaggctccgggtggcgacgccgtttctcgccacagcgccacctcgcggtgagcgccaccgcctgcggggccgcgcgcccccgcgaggtgtcagcagccgcccaggccagggcggggagagacagggccgctcccggcagcgccgtagcgagagagggctcggtgaaa

SEQ ID NO: 54177 - DNA, 600 bp, Chicken  19866894306431_1
gtattttatttcaaggtgaccagtgacctttcttctgttacttgaaaaacaggaagtgaggtgggaagagtgttacagaacaatctgagttgaaggatggctggcaaatcagactgtccagaaagcacagacttggaaaggtttttcatagcctcccagtctggttgtgtgtgagcatcaaaaataagagagagttcttcagatgggaatgggtataatttaatacagaccgctattaaaggaattgtgtgtttctgagtatcgtgagaaattaaaaaaacaaacaaagctattaaaggyaaaatcagttccaagaatgaagaagaaccttgataaattcactctatgccaccctcctttgaaactttgaatttaacttcagagtgcacagcacagtaggtgaagtactacgtgggggtcagtctctctctaccagccgggtgttgttggcacagggctcagcactggaagacgtttctacttctgtgaaatatactgggacctaatggaaagaatggctctgtgcatgcataagtagtccttgggcacaaattgaatactgcagtcactttgaaggaaatcacaatacagttttaaatt

SEQ ID NO: 54178 - DNA, 600 bp, Chicken  19866894306437_1
gctgaagaaggttgctggggtggttgatgtttgttgtgtaacagatacccctagatgtaccttacttggacctcagcaaatttttggactgtcctgaaacacttccagatgttttaaggggatctttactgagaatgaagggatttaggtaacatggaactgttctgtagaacataatgtgtttccttcatattatatacgtaaacctagaaagcctgaaataactttcatttgcttacaggctgtcaggtcttgcagtagacttaagacctctagcatggtaacttttaaaataatcamttttatattctttaatagttacttgtaaggataagcagctcctaggtcccacttygcactttactctgggatgtgttggcttgaatttgctttgtgcacaggagctaagtttgctctgtaggtgtggaaggaggaggaaataatccttgtgcaaaaaagacatcattagattaaagttggtatttgcaactggatgtcctgaaattgtctgaaaggtcgttgtaaaagcttagtaagtctggatttaagcttagttgtattcagagaatggtactcattatttctgttcactcgtgctat

SEQ ID NO: 54179 - DNA, 600 bp, Chicken  19866894306437_2
tgtaccttacttggacctcagcaaatttttggactgtcctgaaacacttccagatgttttaaggggatctttactgagaatgaagggatttaggtaacatggaactgttctgtagaacataatgtgtttccttcatattatatacgtaaacctagaaagcctgaaataactttcatttgcttacaggctgtcaggtcttgcagtagacttaagacctctagcatggtaacttttaaaataatcamttttatattctttaatagttacttgtaaggataagcagctcctaggtcccacttygcactttactctgggatgtgttggcttgaatttgctttgtgcacaggagctaagtttgctctgtaggtgtggaaggaggaggaaataatccttgtgcaaaaaagacatcattagattaaagttggtatttgcaactggatgtcctgaaattgtctgaaaggtcgttgtaaaagcttagtaagtctggatttaagcttagttgtattcagagaatggtactcattatttctgttcactcgtgctatcctagagcttcagtcttatgcttagatttctagtttaggacctgagtaacttgga

SEQ ID NO: 54180 - DNA, 600 bp, Chicken  19866894306438_1
ggataacatagggacgtttctccctttccttttgtgtaggtcctacataaatgcagggatgaggaggagatgcttttctgttctctttcgtgtaggccctacataattacggataaaaaatagggatgcttttcccttcccttgctgtaggtcctacataaacacagggacagaccagggatagttctcccctccttttgtgtaggtcctacataaatacgagtacagaatagggatgcttttcccttcccttgctgtaggtcctacataaacacagggacagaccagggatagttctcycctccttttgtgtaggtcctacataaatacgagtacagaatagggatgcttttcccttcccttgctgtaggtcctacataaacacagggacagaccagggatagttctctcctccttttgtgtaggtcctacataaatacgagtacagaatagggatgcttttcccttcccttgctgtaggtcctacataaacacagggacagaccagggatacttctcccctccttttgtgtaggccctacataaatacagatacaaaatagggatgcttctcccttcccttgctgtaggtcctacata

SEQ ID NO: 54181 - DNA, 600 bp, Chicken  19866894306440_1
gctctccgcacccttgtcactctctctctcagagccctgtgtgacactggggaaacagagagcaacttcttaattaattggactaattagtctcctggatggctggacagctggaccctatctccgccccgatctcctcgtggagggaacaatcaaatcgcggtttgtttctcccgagttgacaaagtctcagcactgcccgtgatctggttcctattaaccgcctcccccgagagcgctgccaaggatgaagatgtttttccctttggctaatgaagtccgcagcgagaccacggtatstccagagcagcacctggcagcctccggagggctcaagctttcctttcaggcccttccctggtttgcagggtttataaaggggctgtaaaactttgctctggtttcaaaccttccccaccaggtcttggccctgcaccataatttcatacaacgttcaaagccacgttggtgccgtatggctttaaccctttgaatccgcggcacctgtgaatcctgatgtaccaaagaggtccaatatttgaccctctgacgagcagcaccctgtgctcaggcagaggtctgggcaatgctgcagctgca

SEQ ID NO: 54182 - DNA, 600 bp, Chicken  19866894306440_2
acacttcagttctcatttgaatttgtctgccgtcagtttccagccatggaacctagctatacatatttatttctgctcagcttcagagtcttttactgtcttttgctcttccctgcgctggtatttgtagattatgaccacattgtcttttaaccttttctcacgtaaagatggcttgaactcctggcatgagattatcctaatgtacttctgcactacagagaggcccctgaaagggacaaggattgcacgagagatggtacatctctgagaaggaaggcaagcaagccctacagagcracgcataccacggactcatcatacctgcgctgtctcttttgcatattacctacatgatgaccatttcaacacacaggagacagcagtcaaagatatcaaatcatccctgctcgtcaccccgctggtcaacccaatgggccaaatcaagtcttcccttcttaaccgcagcactgcccaccagctggccccaaaggctgccaggaggaacgcccagcccatctcctgctgcccatcccaccaaggctgcctccatcccccgcacagcacagcgccgcagctcccacctcccggccccagctt

SEQ ID NO: 54183 - DNA, 600 bp, Chicken  19866894306440_3
ggactcatcatacctgcgctgtctcttttgcatattacctacatgatgaccatttcaacacacaggagacagcagtcaaagatatcaaatcatccctgctcgtcaccccgctggtcaacccaatgggccaaatcaagtcttcccttcttaaccgcagcactgcccaccagctggccccaaaggctgccaggaggaacgcccagcccatctcctgctgcccatcccaccaaggctgcctccatcccccgcacagcacagcgccgcagctcccacctcccggccccagcttccaattcaccrgcgaagcaccaactattacctttttaacctcgtgtattttcaatacatacaaagaacatgtacaacaaggttttgcttgtggtcaataatccctgaaatgatgttttcaacaaacctcatttcaagtctagatctggagtagagaagtgattggatgaaaggccattatatgactgctgtaatttattctgcagagagctaaaaccaccaattatctgacatgaatgacaccacttctttttcttaccaacacaaaggtgcacagtatctattttcttgagatctaatttaaattttaaa

SEQ ID NO: 54184 - DNA, 600 bp, Chicken  19866894306453_1
acaagtcaaaacctaaggaaattgctaaaactaaagatttctagactgcttgtaaaaagatgtgaaaaccatagagttgaaaatactgcatagtttatcaagccctgtacctatgaaagaaaaccctgaggtgtaacacaagtcctatgttaaatgtaatcatcacactgatttatttttgtacctaaaacttctgtcaatcccagaaaaaaatttcctctgttctatattcaagtcttttcccatatatttatggagcgaaatcatatccttcaccagcttgctatgtgctagcctaarcaaatcaagcattttcaatcatctctcttaaaaggattccacattccccaaataattctctgtgcctttattctgaaattcatctgaaaataggtggactaaactcaaacctgcacaaagactgtttagacataatgttagtggaaaggaaacaatagtcttgagaagaaaacttagtcacaaaatttccactatgtattaaattctatgtagaaaatatacttctaaattgaatttctttatatttcatgcctcacaaaatctgagtcttaaatctgagtaaccaaagacatgatgaat

SEQ ID NO: 54185 - DNA, 600 bp, Chicken  19866894306454_1
tcttacgttcttacacccgtaggcttacaggtgagagaaagagtgtatgtgtgaggggcttcattatgtgaggcaccatacaaatgagtggtgagacagcatctgcatggagaagccaaaacatttcagcaaatgaggtaggaaatagcatggtttctttccacagagaagactgttatgcagtgatacaagaaaaatacacagcgaggaattaaatttaaatcttaagccatcaagtacttcaaacacaacatgactgagtagacaacctatcacggccatttggaaaccttaacaatwaaaatatgaacacttctactgtacacttttaacagttgctatgagatccgatgaagagcagaccttatgctgagaagaaaacattcacattaaggaagtgttcttatgcatatttatttcatgtaaaaaacagtaccagcctaggccaaaggtactgccttagagcgcttaaaaatctgactttaaaagaattcaaagcctcagacatttcaaaggggaacagaactttgaacatcaaacaggacttggcagcagaaagtatccagcgatgggatatttgccaggtctagtttttcagat

SEQ ID NO: 54186 - DNA, 600 bp, Chicken  19866894306454_2
accttatgctgagaagaaaacattcacattaaggaagtgttcttatgcatatttatttcatgtaaaaaacagtaccagcctaggccaaaggtactgccttagagcgcttaaaaatctgactttaaaagaattcaaagcctcagacatttcaaaggggaacagaactttgaacatcaaacaggacttggcagcagaaagtatccagcgatgggatatttgccaggtctagtttttcagatgaagccaccctgtactcaagtttcatatatcagaggcagactatacagtatttctcacccrcactcttccctccagccccccaaaaatcatgaaacaaaccaacaaccatccggtccagaatctctgctattgttaagcctgacacagaaggataaattaaactcattgattttcagagctaaacagcgtgggcataattaactttttttctttctgtacttaccaggaacatgatccagggcaacaagactggactgggaggtggaagaggaccaggatgtatttgcatggggatctgggaaaggaaaacatctatgggaatgattctgcaaactcgagtgacttgtcaacagcattctt

SEQ ID NO: 54187 - DNA, 600 bp, Chicken  19866894306457_1
gcggcacgtcccaccgggtaggccgcagaaaggagctgcgcagcctggatcgtgttgggattttgggagacttgggcaaatgtggcgcttcttaaaagggaagtggaaggtttgtaacctgatgggagagcacaccctcgtatatcagagctcaaactaaaggtcttggcaaggaggagcctgagcaagtaaggggtgctcctctctctttgtgcccttcccatgcgttgaaccaagcaatcctttaaataaaaggatcttttcttcttctggctgtgtccctctctgcgccattctgcyaaatgcatttttgtgaaagcctccaacctgatatctagcttctttctactcagcttctatttatagagagtagaaaggatactttgcaggggacaatcctayagaggcagagaactgggagagaggatgacaatattgtgtctcctccccacctagcttagctaacaaaaccctgctttgcctgtcctagcttacactgacctacttgccccgatcttatccatcagtgtgtctttctctggtcctttcccttactggcagctatgatcaatatacaacactgtcttcctgcaaagtggt

SEQ ID NO: 54188 - DNA, 600 bp, Chicken  19866894306457_2
gtggaaggtttgtaacctgatgggagagcacaccctcgtatatcagagctcaaactaaaggtcttggcaaggaggagcctgagcaagtaaggggtgctcctctctctttgtgcccttcccatgcgttgaaccaagcaatcctttaaataaaaggatcttttcttcttctggctgtgtccctctctgcgccattctgcyaaatgcatttttgtgaaagcctccaacctgatatctagcttctttctactcagcttctatttatagagagtagaaaggatactttgcaggggacaatcctayagaggcagagaactgggagagaggatgacaatattgtgtctcctccccacctagcttagctaacaaaaccctgctttgcctgtcctagcttacactgacctacttgccccgatcttatccatcagtgtgtctttctctggtcctttcccttactggcagctatgatcaatatacaacactgtcttcctgcaaagtggtgccctatgtttttcaagaactgctgccactgctttcttgggtgctttagattgaacttcatcttctgtaggtgcctttctcccatgcagataggcctgagct

SEQ ID NO: 54189 - DNA, 600 bp, Chicken  19866894306458_1
tacatactaatgtctgtgtgtgcatcattgtaaaatacgtaatcttcagtaaacacaaccagggaaggatttttcattctcttgatctagttcatgtttttcattttctttttaacttcaagtttataatgaatgtaaaataaggcctttatcccttgagtatatctacagtaaaatagtccccttttaaaaaacaaattcataaagttgctatgattttttgtatttgccttttatgttaactgacataaaaactgtgaatgaatgagtgatgttaatgatgaaaaaaatggaataaarggtagaagctgtctgtaaataatgtgcagtgttcaagatttgcttaaaagatttaattaacagcatattagaaaagtgtacttcgctaacaacagatttttctaattctgtagcagtttctgtatctttsaaccaaacaaaatgtaagacaatttgattatagtaattacttctttatttacttataaggtttaatctgtttctgctgtcattgttgktttgaattgcatgcagttaaaaaatagataatcttttaatatttaatctcataatctacgtcctacacacagtcttaactgg

SEQ ID NO: 54190 - DNA, 600 bp, Chicken  19866894306458_2
gaatgtaaaataaggcctttatcccttgagtatatctacagtaaaatagtccccttttaaaaaacaaattcataaagttgctatgattttttgtatttgccttttatgttaactgacataaaaactgtgaatgaatgagtgatgttaatgatgaaaaaaatggaataaarggtagaagctgtctgtaaataatgtgcagtgttcaagatttgcttaaaagatttaattaacagcatattagaaaagtgtacttcgctaacaacagatttttctaattctgtagcagtttctgtatctttsaaccaaacaaaatgtaagacaatttgattatagtaattacttctttatttacttataaggtttaatctgtttctgctgtcattgttgktttgaattgcatgcagttaaaaaatagataatcttttaatatttaatctcataatctacgtcctacacacagtcttaactgggtgggaaaaatgtttaggtcattgttttggttgctatagatgcaatttcttgtttattaacacagactcgttcatttgctttcaatggcttacattaaaaaaatatgtttttaacaggcaagaaaagtgt

SEQ ID NO: 54191 - DNA, 600 bp, Chicken  19866894306458_3
ttttgtatttgccttttatgttaactgacataaaaactgtgaatgaatgagtgatgttaatgatgaaaaaaatggaataaarggtagaagctgtctgtaaataatgtgcagtgttcaagatttgcttaaaagatttaattaacagcatattagaaaagtgtacttcgctaacaacagatttttctaattctgtagcagtttctgtatctttsaaccaaacaaaatgtaagacaatttgattatagtaattacttctttatttacttataaggtttaatctgtttctgctgtcattgttgktttgaattgcatgcagttaaaaaatagataatcttttaatatttaatctcataatctacgtcctacacacagtcttaactgggtgggaaaaatgtttaggtcattgttttggttgctatagatgcaatttcttgtttattaacacagactcgttcatttgctttcaatggcttacattaaaaaaatatgtttttaacaggcaagaaaagtgtcttatacgtgcaccaaagtaactaaccttttcttctttcattccaatgctaacatctctgtgcatctcctaatgtctggcacacagga

SEQ ID NO: 54192 - DNA, 599 bp, Chicken  19866894306461_1
  misc_feature (1)..(44): n is any nucleotide
nnnnnnnnnnnnnnnnnnnnnnnnnnnnnnnnnnnnnnnnnnnncacatccctaagtatcacatctacatgcttcctcacagatggacatcagaccccatgcacacaccatgactgaagcacacttggaccgctctgtccccggggcagtattaacaatcttaatctttccaatcttaacaattctatggttctgttccatatgggccaacaagagctccactcagcagcactgctagcagaggacccttcttcacaaccaccatgcaacacctcccatcacgcagcccatctcatctcrcctaatcgatgctgcacacatcctggatttacacacacaaggcataattagtaaagataaaaagtttttcttgtctacttatacctctttaagagaagaaaggaaacctcagctccctcaccttgactctatagtagtaacagcagctcatgaaaagtgaaaagccttgaaggatttggaataagaaacttggagagacaatcgctgatcttttatcttccagacttcaagcagaatcaagttcttcaaagaaaactcaataaagcccagacattttcatcataacaaaataaataatt

SEQ ID NO: 54193 - DNA, 600 bp, Chicken  19866894306461_2
ttgtggcttaggtgcctctaaactgattaaagataacctgatagaagcttgcaacgtcaaaaccgccttcgtccctgacagatatgaatggatagcgtaaataactataaataaccagaatggctgcatttatgcctagcggaggatttacagcctgcagagctgtctggtaggaccaagaattacagctctgcctttctccttctgcagcacaagaagggagaggggctgaagtcctcctcacgccactgctctgtcaggacaactgagaatccatgaataacagacaaccatagagaygccagcaggtttggccacgttgactcgtgcagcattcctaggaactgctctcagacaagcatccaatccaagctcccattgggttcccaagggagctgtcacacttgctggatggggacatcaccatcagtcctacacactgcaaccggtgcagatgtcttttcaaatgggaggcccttctgtgcycaacagtgccacactcctcacctcctttaaaagagtactyttctccatggaggaagaaccaggaggaacgcaccacgaacgttacactgaacagctgctatggctttcactttg

SEQ ID NO: 54194 - DNA, 506 bp, Chicken  19866894306461_3
agctctgcctttctccttctgcagcacaagaagggagaggggctgaagtcctcctcacgccactgctctgtcaggacaactgagaatccatgaataacagacaaccatagagaygccagcaggtttggccacgttgactcgtgcagcattcctaggaactgctctcagacaagcatccaatccaagctcccattgggttcccaagggagctgtcacacttgctggatggggacatcaccatcagtcctacacactgcaaccggtgcagatgtcttttcaaatgggaggcccttctgtgcycaacagtgccacactcctcacctcctttaaaagagtactyttctccatggaggaagaaccaggaggaacgcaccacgaacgttacactgaacagctgctatggctttcactttgttatccacagcataacagattctcatcctgcactcccagaacctgggaagcatacaacaactgcacacacacacacacagcccactgctccc

SEQ ID NO: 54195 - DNA, 466 bp, Chicken  19866894306461_4
ggctgaagtcctcctcacgccactgctctgtcaggacaactgagaatccatgaataacagacaaccatagagaygccagcaggtttggccacgttgactcgtgcagcattcctaggaactgctctcagacaagcatccaatccaagctcccattgggttcccaagggagctgtcacacttgctggatggggacatcaccatcagtcctacacactgcaaccggtgcagatgtcttttcaaatgggaggcccttctgtgcycaacagtgccacactcctcacctcctttaaaagagtactyttctccatggaggaagaaccaggaggaacgcaccacgaacgttacactgaacagctgctatggctttcactttgttatccacagcataacagattctcatcctgcactcccagaacctgggaagcatacaacaactgcacacacacacacacagcccactgctccc

SEQ ID NO: 54196 - DNA, 600 bp, Chicken  19866894306464_1
agcgaggcagcagctctgcctcctggcaagcccaggcagctctgtcttctatcaagccaagttggctgactggcagtgcctcgagcgagcatttgtaagcctattgtacatgaacaacacctctggtattacgcctttttgtgtccctatcttgacatgtaaagtgaggataaagattaaagaacccgagagcagctggaaatgctttagatttaggggtgaaggttggtatttttgacatatatgctgctattttgagggaattgaaacatcactgctcttaggtggcactggctgaawatggctgagctcaggctctgtggttacttgtggaggccttcctcatcccrccttaggaagattctgagtctcagtgggtcacagcagaactatgtggcagcctagtggcttctgggttttgctggatagcaggggcagtgtttcggattgatgatctagaaagcaaatgttccaactcccaggcaggtacttcaggcaagcggtagaaagcctcttctgctgccagtagagcatcatctctttagggttaaaaaaatccagcaaccataaattctcttaacagaaaatcagttcagaaat

SEQ ID NO: 54197 - DNA, 600 bp, Chicken  19866894306464_2
atcaagccaagttggctgactggcagtgcctcgagcgagcatttgtaagcctattgtacatgaacaacacctctggtattacgcctttttgtgtccctatcttgacatgtaaagtgaggataaagattaaagaacccgagagcagctggaaatgctttagatttaggggtgaaggttggtatttttgacatatatgctgctattttgagggaattgaaacatcactgctcttaggtggcactggctgaawatggctgagctcaggctctgtggttacttgtggaggccttcctcatcccrccttaggaagattctgagtctcagtgggtcacagcagaactatgtggcagcctagtggcttctgggttttgctggatagcaggggcagtgtttcggattgatgatctagaaagcaaatgttccaactcccaggcaggtacttcaggcaagcggtagaaagcctcttctgctgccagtagagcatcatctctttagggttaaaaaaatccagcaaccataaattctcttaacagaaaatcagttcagaaatgttccccttgacagagggtcttgcttctcagtcggaggtgccaaggtcac

SEQ ID NO: 54198 - DNA, 600 bp, Chicken  19866894306465_1
tggtttgacatctgggctttgacacagcttggctgtgagtcctggagagggtttccagaaagctgcccctgctttgttgggggcttttcctcgagaacagcagcgctttggctctgctggaggggtcgtgtgttggagcagatgtgaaccaacccgttacagtcagttgattctggtgtactggtgctggaggaaggcttaaggggtagagcacacaaagctggtcatgcctgtgaaaacgtcttatctcctgctagcagcagcactggaagtgctcaccttcatgtgccattttcttcraggcttttagacgtttgcagttgtygatttcaataattcctcgagacacctgctcaggattttgtgtgtgagctgtagagggcaaaaatccatcttcaggtttaggaaaatgagattaaaagcctgcagtatttgatgggggatgtcaggcgtattggtttctgatttggcaagttaattatgtttaaaaacctttgtgtcagacttctctcctcgaggcgttcacctggcacaatgaggtcctgcctcccagagcagtttcttgcaggttgaagctgagcattttccttcagttacctc

SEQ ID NO: 54199 - DNA, 600 bp, Chicken  19866894306465_2
agcttggctgtgagtcctggagagggtttccagaaagctgcccctgctttgttgggggcttttcctcgagaacagcagcgctttggctctgctggaggggtcgtgtgttggagcagatgtgaaccaacccgttacagtcagttgattctggtgtactggtgctggaggaaggcttaaggggtagagcacacaaagctggtcatgcctgtgaaaacgtcttatctcctgctagcagcagcactggaagtgctcaccttcatgtgccattttcttcraggcttttagacgtttgcagttgtygatttcaataattcctcgagacacctgctcaggattttgtgtgtgagctgtagagggcaaaaatccatcttcaggtttaggaaaatgagattaaaagcctgcagtatttgatgggggatgtcaggcgtattggtttctgatttggcaagttaattatgtttaaaaacctttgtgtcagacttctctcctcgaggcgttcacctggcacaatgaggtcctgcctcccagagcagtttcttgcaggttgaagctgagcattttccttcagttacctccctaggaaagttgtttaagccgtca

SEQ ID NO: 54200 - DNA, 600 bp, Chicken  19866894306465_3
gtgctcatcccggatccctgcggggtgcagcccttccctgggctctgcagtttgttcccacctgcagagtgggctgtgctgtgctgctctttgctttatctgaggattcgagtgggttctggtggcaggcagtaattgccaggattttgttcttggcggttgaagtgtggctgttaattaatatttgtgtctgtgttgtggttgcagatattcagctcacccttgctttgaacttgctgtgaggagcttcctttccatccacgagggtgttttggggtgtgagatatggagacttctaaygctcaatggaagtttttctgttctgggatttaccccctgctgatgttgtcttgtccaaactgcagcagtcaaagcagcccagcagagcttcccgagagcaattacagcagctgctggcagccagcagcccctgtgctgggaaactgggctctgagcgtgtgtccagctaatgagggctgataggaaacgcttgtctggacctgatgtagtctcaggggattgctggaagggaggcttctcttcttgtcaattttacaccctgcaaaacctatttctggctgttttgtacagatgtgatgg

SEQ ID NO: 54201 - DNA, 599 bp, Chicken  19866894306469_1
  misc_feature (1)..(81): n is any nucleotide
nnnnnnnnnnnnnnnnnnnnnnnnnnnnnnnnnnnnnnnnnnnnnnnnnnnnnnnnnnnnnnnnnnnnnnnnnnnnnnnnncatgtcaaagtgggtgaaacatgaaaaatatgcaaacgtttcatagattctcagttgttgcctggatgcccattgaaagaaataatgtgacttcaagtatcactgtttgctcaatagatgttttaatatactcagatattcaaaagaagtaagtgccaaaaaatgccagtggacatccagtaagacttacaaaggtgcttaagctcgtagaacgcacayactgcagcacaagaagaaatctgaaattcccacttgatgtttatctgcatcctggactacatgatctccagaggtcccttccaacctcaaccattctgtgattctttgaaaacccactgttcagtcccacccrgtgttctcagcacgagcccttagacgaatcttctgaatcattacttatgaaacaaagagcttaggagcattcctgaccctgaagcacatgctcgaatcccgctggaggatgaagttatactgaggatgtgttgtgatctcagtgtggggagaaaagagcaaggaag

SEQ ID NO: 54202 - DNA, 600 bp, Chicken  19866894306469_2
agttgttgcctggatgcccattgaaagaaataatgtgacttcaagtatcactgtttgctcaatagatgttttaatatactcagatattcaaaagaagtaagtgccaaaaaatgccagtggacatccagtaagacttacaaaggtgcttaagctcgtagaacgcacayactgcagcacaagaagaaatctgaaattcccacttgatgtttatctgcatcctggactacatgatctccagaggtcccttccaacctcaaccattctgtgattctttgaaaacccactgttcagtcccacccrgtgttctcagcacgagcccttagacgaatcttctgaatcattacttatgaaacaaagagcttaggagcattcctgaccctgaagcacatgctcgaatcccgctggaggatgaagttatactgaggatgtgttgtgatctcagtgtggggagaaaagagcaaggaagctctggggaggagctactgggatccctccagggttgctcagtgctctgaaggctgtagaggtgacttctttaggaggcaataagccaggttggaggcaaaggctttatttgcttgtttttcaatcagaagtaat

SEQ ID NO: 54203 - DNA, 600 bp, Chicken  19866894306477_1
gagctctgctattagaggggtaaatacctgtgggcctttcgcttctcaagtacagcctgggaagcaaatgctactacagacaggattatgcactcttaattagaattacagataatttttcactaggcagtcactaaatcaataaaaagggttttgtttttggatttgttttggtaagtactggaaagtagaaaggggtcctggacaaacaagagcagactaatttgatttatgttaaatgaaacttaaatctgtagctgaaaaacacgtatatccagcatggtgcagaggggagcaaartaagtactaagagaaggagcagtagcaaatacaatggcattagtgaaggacttctgcacagactgatgttcctgctggaaaaaaaaattgttagcagaaaaaaatgttggcctaagcatagcacttagctgacataatgagctgtttttggtaactgcactcactgcccacaggttcttcatttccaaagggcacgctaccaagctggttactgaagtcagcaggattgaggagctcaggaaatcaaaggcagagcttgctggaaattctttcaagtcaaagatgcaaagcctatgtgaa

SEQ ID NO: 54204 - DNA, 599 bp, Chicken  19866894306490_1
  misc_feature (1)..(13): n is any nucleotide
nnnnnnnnnnnnnttactcccctgtgcaagaaaagaagttagccctgctattaaaataccactttaccactaacatccaaatctgctgtcctcttcagtcaggaatgctggcggtatgggcaggggaagtgaagcgagcatttttagatccctttgtgtgtcaccaagagtcagaatggggggagatgatttggaatccagataaggttaaaaaaacaaaacagtaggggtggattcttgtaaagggaccagaggctgtggtgtgtgcaggctcttcactaaggcacttgctacagagaytcctaccacgctgcagaacaatgtgtgcagattctggcttggttttgctctctcctgctgtagtatctaactcgtccctcggggtgttgggcactcagaggtagtattatctgcattttttgctgttgccctttttaccgtatggtggtggggctgaaagccgaactaggtcaattatttcactggtttcgttgtacagctgcacaaacagttctcttggcagagaggccacagttcagagggttggggcactgcttcggctggtactgtcaccaaaaagaatgtgtattaaattgtgg

SEQ ID NO: 54205 - DNA, 599 bp, Chicken  19866894306492_1
  misc_feature (1)..(86): n is any nucleotide
nnnnnnnnnnnnnnnnnnnnnnnnnnnnnnnnnnnnnnnnnnnnnnnnnnnnnnnnnnnnnnnnnnnnnnnnnnnnnnnnnnnnnncccaaatggcaaggttatgttatgctcagcatttcagctgtggcactgtatatcatcagttacacgcaccgttatcactcactgctctgtgactttctacagcttattatgctcatattcacataaacttaattacattgcacaaggcaataaaccccgcatgccggaggatgtaagtatctttcttcttatatttattaaatggtgtttatcsgcattttcactaatttacattacatctttcttgttaaatataacagtaaaatataattgaatcttccattcctaacgctgatttttattgccagcgtatatacgtgtaaatctgcatacctcacaaaatcactgggagtctgaggagaatgcagcactgatctgatagagacctggaagtttgtagcttggttgccatcaggcctatacagaaatcgttatctgtaacataactgaacctttaatgaacaagcccatcgctggaggtgcccaatgggccctgggcaccatgagctgggg

SEQ ID NO: 54206 - DNA, 600 bp, Chicken  19866894306492_2
cactgggagtctgaggagaatgcagcactgatctgatagagacctggaagtttgtagcttggttgccatcaggcctatacagaaatcgttatctgtaacataactgaacctttaatgaacaagcccatcgctggaggtgcccaatgggccctgggcaccatgagctggggggtgtctctacccatgggtcgggcactggggcactttgaggttccctccaacccaaccattctgtgattcaatgaatggtgtgcaattcactcctagcaagactacatgtgttttaagtattaatggcaytggaggagaaggtgctgtgctattttagtttgtattcattgacactggggagaacacgcaagtccgcattgccccaataacaactaatctctttatagagttaaaataaaatgagaagctaaaatttcactcataacatgttcttctgcctcccaggctggctgtrgctctgagtggcctggtttggtggttggtgaccctgcaaacagcaggggggttgaggccagatgatcattgtggtccttttcaacacccaggccattttatgactctatgtttctagtgctgatttgcagcagg

SEQ ID NO: 54207 - DNA, 466 bp, Chicken  19866894306492_3
ggggggtgtctctacccatgggtcgggcactggggcactttgaggttccctccaacccaaccattctgtgattcaatgaatggtgtgcaattcactcctagcaagactacatgtgttttaagtattaatggcaytggaggagaaggtgctgtgctattttagtttgtattcattgacactggggagaacacgcaagtccgcattgccccaataacaactaatctctttatagagttaaaataaaatgagaagctaaaatttcactcataacatgttcttctgcctcccaggctggctgtrgctctgagtggcctggtttggtggttggtgaccctgcaaacagcaggggggttgaggccagatgatcattgtggtccttttcaacacccaggccattttatgactctatgtttctagtgctgatttgcagcaggctcagcaagttgagctccagtctgttggcacg

SEQ ID NO: 54208 - DNA, 599 bp, Chicken  19866894306497_1
  misc_feature (1)..(106): n is any nucleotide
nnnnnnnnnnnnnnnnnnnnnnnnnnnnnnnnnnnnnnnnnnnnnnnnnnnnnnnnnnnnnnnnnnnnnnnnnnnnnnnnnnnnnnnnnnnnnnnnnnnnnnnnnnaaaatgaaaaaaatttactattgttgtggttcaaccacagtatggagctaagcaccacacagctgtttgctcgctccccaaggatgaatggtggagaaaatatgaaaggctaatgtacaagaattagtgagttgagaaaggcagataataggtaaaataaaagctgtgtgttctagcaaagcaaaacaaaaaawttgttcactctttcccatcagcaggcagatgctcagccacttccagaaaatcagctgtttcttgagaagacagaaaacatcactccaaactccattcctctgtccttaatacaggttttgttgctggacacaacgtcatatgatatggaatatccctttggccagtttgggtcagctgtcgtggctgcgtctcctctcaccttcttgtgcatccctggcagggaagctcaagaagtgaaagtctttgacttactgtaagcactgctctgtaacaactaaatgcattattttgttaccaa

SEQ ID NO: 54209 - DNA, 600 bp, Chicken  19866894306497_2
gtccaaaaatattcagggtggggtaatgaatcttaaaaatgccaatttagtgagtttctaatcacagatacttcatcagctgacaaaagaaaaacctcagtaggtgtagcacttcaaaatctgggacaatttacatgtaatttcaggaatcagcagggatacacagctggataaaaataaaaagcttgctgtaattgaaaattgccttgcagcttctttgtgattaaaatgaagttctattccttgaaatcttgtttggcaattaaatctgttttacttagtgaaatattgtctattgtmcttgaatgataaagccagtacagacattcttcaacatttcatgctaattgaacatgtatacacacaaaaatttgacaaaatccaaattggaaaactttcatttgaatgtattcaaggtgtactctcactagaagaggttgtggttgcctgtatttcttacaaactattttggtgaccacctcctttattttccaccaaaaaaagtttgcacctctttatttctaagtattcaattgtatgcaaaagctaatgtgataactttgtctaataactgatgaagtttaaagtttgactgaaatt

SEQ ID NO: 54210 - DNA, 600 bp, Chicken  19866894306510_1
tatggggattacagagaagtgtaagtagatgatcatgtcagatggtatcttataaccaagtgctgtctctttgcatgctttaacttcatgtctgtagagaccgtgtaatgttcaaaaggcacattacatccattcatgtactttcaagtcagccttattctataagatcccataacctacttcacttgacacagcaacttattggctttcttcgctgcaaggctgcagtatagtttagtattgtaaatggggggtagtcttttcttatccaaactctcaactttttataaactctcaacwgtttgtttcaggagttctccctgactatgtatgtatatcttgcttgtacaaaggtccctgacttcacgtggagttttggagtgctgctgttagcaatgtattgtcatgaacaagcagtaaaagaaaatggaaggctgacacttttaaacaggatatgaaagtttagtaggcgtgtgtgtatttgttagtacaggagcttttctcactacaattaattgctgaacagcagagatgtggtagatatgatttcggacctctgtcccagtaaaatgttatcgccttggaaaatccttctgtgta

SEQ ID NO: 54211 - DNA, 523 bp, Chicken  19866894306511_1
agtagctgcaggttccattctagatgagatgattgagcagccactttggggtcagaaaaccttcctgattcctagctgaaggaggaagccttacagagtttcagggtggtgttttcttttctttctttattattgttattatttttcaaataagtctttgattagggtgtgtgtctgttataatgatagcacctatctagttctattccaagtatttaatgtgcactaagtggtgtctggagaactcaacatacggcatacataggaaaagagatctcactttatgtgggggtttgcagrtgttggggttttatagtttgctggcttgctggtggggaacttgttgaatgtcagtggtctgaagaacctgtatgccattccctctgcagcatgacttgtgtctgcaggttccttggccatgttggtggacacttacaggagcatttcttcagtgcttctggaaagcttgctcctacaggactgacagcaacattatccagactagttggattttattgaacta

SEQ ID NO: 54212 - DNA, 600 bp, Chicken  19866894306512_1
tggcaatcacctaacagaagactgtaactagtgattgaagtgaaaatgaaggaaaaaaaaagaaggttgatggatgggatggcagaaagtccttaaacacacttgtcggtcaggccgcgccttcaggaaataaaaatgcagagaggcttttattgtcaaagtgaggctgtagggataatacagcagaagctatcagtgcctccatttgtttcctttgtgcttgctgcgctggagtcaattctgaaaaaatgatagctttatagcattcccttccctgtagcctggtgtaaaggtgcagcygacgccaaggtcatyscttccccttcctgaccagcaggagacggggcagactgtaacaagattagtgtctcagctgctctgtcattttgtggtgttgcaggtcaccccagtagagccagggaatttgtactgcggcagagtaggagtgcattctgyagagcaggcgttgaaggccgttcttgaaacgcagtcctgtaaatcctggcctctggcagcccaagctgtttagttatgttttatgaatcaggtcatatcgtgtctgtcacagcttccagatgccaaactccttctgtgacagct

SEQ ID NO: 54213 - DNA, 600 bp, Chicken  19866894306512_2
agaagactgtaactagtgattgaagtgaaaatgaaggaaaaaaaaagaaggttgatggatgggatggcagaaagtccttaaacacacttgtcggtcaggccgcgccttcaggaaataaaaatgcagagaggcttttattgtcaaagtgaggctgtagggataatacagcagaagctatcagtgcctccatttgtttcctttgtgcttgctgcgctggagtcaattctgaaaaaatgatagctttatagcattcccttccctgtagcctggtgtaaaggtgcagcygacgccaaggtcatyscttccccttcctgaccagcaggagacggggcagactgtaacaagattagtgtctcagctgctctgtcattttgtggtgttgcaggtcaccccagtagagccagggaatttgtactgcggcagagtaggagtgcattctgyagagcaggcgttgaaggccgttcttgaaacgcagtcctgtaaatcctggcctctggcagcccaagctgtttagttatgttttatgaatcaggtcatatcgtgtctgtcacagcttccagatgccaaactccttctgtgacagctttctcaagtgttttg

SEQ ID NO: 54214 - DNA, 600 bp, Chicken  19866894306512_3
gaagactgtaactagtgattgaagtgaaaatgaaggaaaaaaaaagaaggttgatggatgggatggcagaaagtccttaaacacacttgtcggtcaggccgcgccttcaggaaataaaaatgcagagaggcttttattgtcaaagtgaggctgtagggataatacagcagaagctatcagtgcctccatttgtttcctttgtgcttgctgcgctggagtcaattctgaaaaaatgatagctttatagcattcccttccctgtagcctggtgtaaaggtgcagcygacgccaaggtcatyscttccccttcctgaccagcaggagacggggcagactgtaacaagattagtgtctcagctgctctgtcattttgtggtgttgcaggtcaccccagtagagccagggaatttgtactgcggcagagtaggagtgcattctgyagagcaggcgttgaaggccgttcttgaaacgcagtcctgtaaatcctggcctctggcagcccaagctgtttagttatgttttatgaatcaggtcatatcgtgtctgtcacagcttccagatgccaaactccttctgtgacagctttctcaagtgttttga

SEQ ID NO: 54215 - DNA, 600 bp, Chicken  19866894306512_4
caaagtgaggctgtagggataatacagcagaagctatcagtgcctccatttgtttcctttgtgcttgctgcgctggagtcaattctgaaaaaatgatagctttatagcattcccttccctgtagcctggtgtaaaggtgcagcygacgccaaggtcatyscttccccttcctgaccagcaggagacggggcagactgtaacaagattagtgtctcagctgctctgtcattttgtggtgttgcaggtcaccccagtagagccagggaatttgtactgcggcagagtaggagtgcattctgyagagcaggcgttgaaggccgttcttgaaacgcagtcctgtaaatcctggcctctggcagcccaagctgtttagttatgttttatgaatcaggtcatatcgtgtctgtcacagcttccagatgccaaactccttctgtgacagctttctcaagtgttttgaaagggcacaaaaacagctcgagggtcaccgtggagcgtcatgcagcatgcaggaattgtttgtcacaaagagcgactggccgggggcagaagaataagcgtgagaagtatgaaggacgtgggggtctcagtggctgaggt

SEQ ID NO: 54216 - DNA, 600 bp, Chicken  19866894306512_5
ctgtaaatcctggcctctggcagcccaagctgtttagttatgttttatgaatcaggtcatatcgtgtctgtcacagcttccagatgccaaactccttctgtgacagctttctcaagtgttttgaaagggcacaaaaacagctcgagggtcaccgtggagcgtcatgcagcatgcaggaattgtttgtcacaaagagcgactggccgggggcagaagaataagcgtgagaagtatgaaggacgtgggggtctcagtggctgaggtgcccctgctatccatcttccccctgtgtttagcacytacaaactgygaatgagcaatccaggtagtgacatggagtctctatactaacataggtggtgggcctgcaagctatgcagratgtggatagacttgaaacaacgtccctgctcttaagtggtgacttgctacttaatttcctttacatcttccccttgtaatcagaacactctctgggcccaccttcaagcttgtgaagtgtcttttccaccagttgggatattacttgcaatgcagataccgtgaccttatttgttagcttgtcaagatgcgacttcaaattgggctcagctcacatac

SEQ ID NO: 54217 - DNA, 600 bp, Chicken  19866894306512_6
tggcctctggcagcccaagctgtttagttatgttttatgaatcaggtcatatcgtgtctgtcacagcttccagatgccaaactccttctgtgacagctttctcaagtgttttgaaagggcacaaaaacagctcgagggtcaccgtggagcgtcatgcagcatgcaggaattgtttgtcacaaagagcgactggccgggggcagaagaataagcgtgagaagtatgaaggacgtgggggtctcagtggctgaggtgcccctgctatccatcttccccctgtgtttagcacytacaaactgygaatgagcaatccaggtagtgacatggagtctctatactaacataggtggtgggcctgcaagctatgcagratgtggatagacttgaaacaacgtccctgctcttaagtggtgacttgctacttaatttcctttacatcttccccttgtaatcagaacactctctgggcccaccttcaagcttgtgaagtgtcttttccaccagttgggatattacttgcaatgcagataccgtgaccttatttgttagcttgtcaagatgcgacttcaaattgggctcagctcacatacaataattgct

SEQ ID NO: 54218 - DNA, 600 bp, Chicken  19866894306512_7
agatgccaaactccttctgtgacagctttctcaagtgttttgaaagggcacaaaaacagctcgagggtcaccgtggagcgtcatgcagcatgcaggaattgtttgtcacaaagagcgactggccgggggcagaagaataagcgtgagaagtatgaaggacgtgggggtctcagtggctgaggtgcccctgctatccatcttccccctgtgtttagcacytacaaactgygaatgagcaatccaggtagtgacatggagtctctatactaacataggtggtgggcctgcaagctatgcagratgtggatagacttgaaacaacgtccctgctcttaagtggtgacttgctacttaatttcctttacatcttccccttgtaatcagaacactctctgggcccaccttcaagcttgtgaagtgtcttttccaccagttgggatattacttgcaatgcagataccgtgaccttatttgttagcttgtcaagatgcgacttcaaattgggctcagctcacatacaataattgctgtttgcacaccgggcgatgctggtgagatgctccccatgaggccatctgctaacctgtctcaaatgtaatt

SEQ ID NO: 54219 - DNA, 600 bp, Chicken  19866894306515_1
atccttaaagtcacaagtgagtgtttcctctgctgtgttttaccatggccctcactggggcatctgaccacgttagtaataaaaggacaaatgcctttagaagctttatttatatgtcacctagaatataggagtaaagatttttaaaaggtacagaaaacagttgtgcttgtgcagtatttattttcagtttagcccaaggatcttgccaaaaacgaacacgttgtaagggggttatatatttaggatgggacggtggaggtaggtattcatgtagctgactagagcttcgtatactaygggtttactttatgacaggatcagcagtacaaggaggaattgtatggcaactacagcccacaaataaaatatcctccttgaatttctttwaaaagaagcagctgctaagaattcttcccacaggatagagcacagatggattgaaaagttcttctgtgagaagtagcttttctaatcattaaggatcaacatgttccctagcaaatacttaggatgacacagcatacatgacgttgcaggaaaaacctatttcttagcacacactaaaatgcgacaaagcagcatttttttctgccccat

SEQ ID NO: 54220 - DNA, 600 bp, Chicken  19866894306515_2
atgcctttagaagctttatttatatgtcacctagaatataggagtaaagatttttaaaaggtacagaaaacagttgtgcttgtgcagtatttattttcagtttagcccaaggatcttgccaaaaacgaacacgttgtaagggggttatatatttaggatgggacggtggaggtaggtattcatgtagctgactagagcttcgtatactaygggtttactttatgacaggatcagcagtacaaggaggaattgtatggcaactacagcccacaaataaaatatcctccttgaatttctttwaaaagaagcagctgctaagaattcttcccacaggatagagcacagatggattgaaaagttcttctgtgagaagtagcttttctaatcattaaggatcaacatgttccctagcaaatacttaggatgacacagcatacatgacgttgcaggaaaaacctatttcttagcacacactaaaatgcgacaaagcagcatttttttctgccccatatcatgaacatattttatgtgcacgtattacgtgtacccaatggcaccatcacttggacacaggaacattcctcaaaaccttcaacccaa

SEQ ID NO: 54221 - DNA, 600 bp, Chicken  19866894306519_1
ttgttgttgttttcctcatttctttttttttaatttttttaacatttatgtagacattaatgagtgcttactggatcctgatctctgtcccaatggaaggtgtgagaatctgcatggaacgtacaaatgtatttgtaaccctgggtatgaagtggattcaactggcaaaaattgcattggtatgaaatgtcccacttttttgttgtgaagtttgatatgtgtgtttatcctcctttgccttttccttcagatccaatagctgctcttctggatttatttatttatttgtttgtttgtttrtttatttatttatttwtggtgctttgcagtgcttgtgaagtcctccaatgtaaggatgcaagtgaccattgttactgatgattcaaatcactgacagttcagatcagttgctctgtggcctcagtgtttctcaaaatgaaaagaggccacatcttgcaattacagtgtactattagaaaaatctaagatcaccagcatgctaggtccttccaggagcagcagttctcttgttccacttcacattaccatcaaaagcactttacctaaaaccttctagattcytttctttcactgctgcac

SEQ ID NO: 54222 - DNA, 600 bp, Chicken  19866894306519_2
catttctttttttttaatttttttaacatttatgtagacattaatgagtgcttactggatcctgatctctgtcccaatggaaggtgtgagaatctgcatggaacgtacaaatgtatttgtaaccctgggtatgaagtggattcaactggcaaaaattgcattggtatgaaatgtcccacttttttgttgtgaagtttgatatgtgtgtttatcctcctttgccttttccttcagatccaatagctgctcttctggatttatttatttatttgtttgtttgtttrtttatttatttatttwtggtgctttgcagtgcttgtgaagtcctccaatgtaaggatgcaagtgaccattgttactgatgattcaaatcactgacagttcagatcagttgctctgtggcctcagtgtttctcaaaatgaaaagaggccacatcttgcaattacagtgtactattagaaaaatctaagatcaccagcatgctaggtccttccaggagcagcagttctcttgttccacttcacattaccatcaaaagcactttacctaaaaccttctagattcytttctttcactgctgcactattgcattgttccaa

SEQ ID NO: 54223 - DNA, 600 bp, Chicken  19866894306519_3
tatttgtttgtttgtttrtttatttatttatttwtggtgctttgcagtgcttgtgaagtcctccaatgtaaggatgcaagtgaccattgttactgatgattcaaatcactgacagttcagatcagttgctctgtggcctcagtgtttctcaaaatgaaaagaggccacatcttgcaattacagtgtactattagaaaaatctaagatcaccagcatgctaggtccttccaggagcagcagttctcttgttccacttcacattaccatcaaaagcactttacctaaaaccttctagattcytttctttcactgctgcactattgcattgttccaaattttctttgtgcaattggtaagaaatttattctagcttactcttaaaatttgcaactgttttgtgaccacttgatgttgaactaatattaccctttgacttagcaccatcagcacttatccctgaagtatttataaagaatcatcataacctttctcaaaytctcttgcctaaattgtccaaatccatgctttcagtcttttcataaaagcaaatgccatagccttctcttgcacagaactattccaaccattatacagtcttct

SEQ ID NO: 54224 - DNA, 600 bp, Chicken  19866894306519_4
aaatctaagatcaccagcatgctaggtccttccaggagcagcagttctcttgttccacttcacattaccatcaaaagcactttacctaaaaccttctagattcytttctttcactgctgcactattgcattgttccaaattttctttgtgcaattggtaagaaatttattctagcttactcttaaaatttgcaactgttttgtgaccacttgatgttgaactaatattaccctttgacttagcaccatcagcacttatccctgaagtatttataaagaatcatcataacctttctcaaaytctcttgcctaaattgtccaaatccatgctttcagtcttttcataaaagcaaatgccatagccttctcttgcacagaactattccaaccattatacagtcttctaatgacatccaagcagtgtattctgttgatcccaggaaaatcctggctggactgattctattagtgaatgagtcttttctcaaacacatgttgtactcaagaaycaaagtcaacttctaactgggggttacactcagaactctctgttctcagttgccttcaactgattagttctggtttatagcatgttagtgtt

SEQ ID NO: 54225 - DNA, 600 bp, Chicken  19866894306519_5
cttgatgttgaactaatattaccctttgacttagcaccatcagcacttatccctgaagtatttataaagaatcatcataacctttctcaaaytctcttgcctaaattgtccaaatccatgctttcagtcttttcataaaagcaaatgccatagccttctcttgcacagaactattccaaccattatacagtcttctaatgacatccaagcagtgtattctgttgatcccaggaaaatcctggctggactgattctattagtgaatgagtcttttctcaaacacatgttgtactcaagaaycaaagtcaacttctaactgggggttacactcagaactctctgttctcagttgccttcaactgattagttctggtttatagcatgttagtgttattatctctattatgctttttattttctcattgatgttgtcaggcttaattgaattgcgtgattaaagaatagcatgattctgtgttggcaataatttccagtttattgttgcttgtagtttttggtcctattcattttttaattctacattcaaaagtttttttatgggacctgtcccaaaactgatccttgaaaagcattcctaat

SEQ ID NO: 54226 - DNA, 599 bp, Chicken  19866894306522_1
  misc_feature (1)..(40): n is any nucleotide
nnnnnnnnnnnnnnnnnnnnnnnnnnnnnnnnnnnnnnnnaaatcagtatcacgcaaaatgattgtacccttcagctaactttctggattgtgttcatccttcatcctcatctgacatttcactgttcctgtgtgctgcggagatctcgttggatgtgaaactgcaggaggagggctggcatatgctttcatcaagacaagggctttctggcaactcctggcctactttatggtgtgtatgagctacagttgaaaggagtatgaaccactgttgaaaggaatatgattacttgtgattgytgtggagaaacaggctgttgtgttttgaagagctgartgaggtattgaattcacaacactttctgccgtgacgaagtacctcgtttgtcttaatcrcattttgttactgtcctgaacgtaataaacaataagtcattaaagctagtcatgacctccatgatcttttgagaaaatacttctgttactgaaaagctgggttaatctctccctaaatctgtaagtaattcaggcygtgactgyggtttcagcactttttcctggaaagcacagactggtcaagtgatggagatcaagatcgt

SEQ ID NO: 54227 - DNA, 599 bp, Chicken  19866894306522_2
  misc_feature (1)..(3): n is any nucleotide
nnnaaatcagtatcacgcaaaatgattgtacccttcagctaactttctggattgtgttcatccttcatcctcatctgacatttcactgttcctgtgtgctgcggagatctcgttggatgtgaaactgcaggaggagggctggcatatgctttcatcaagacaagggctttctggcaactcctggcctactttatggtgtgtatgagctacagttgaaaggagtatgaaccactgttgaaaggaatatgattacttgtgattgytgtggagaaacaggctgttgtgttttgaagagctgartgaggtattgaattcacaacactttctgccgtgacgaagtacctcgtttgtcttaatcrcattttgttactgtcctgaacgtaataaacaataagtcattaaagctagtcatgacctccatgatcttttgagaaaatacttctgttactgaaaagctgggttaatctctccctaaatctgtaagtaattcaggcygtgactgyggtttcagcactttttcctggaaagcacagactggtcaagtgatggagatcaagatcgtaacctacagatacaatatctgagaatcaatccttgca

SEQ ID NO: 54228 - DNA, 600 bp, Chicken  19866894306522_3
atccttcatcctcatctgacatttcactgttcctgtgtgctgcggagatctcgttggatgtgaaactgcaggaggagggctggcatatgctttcatcaagacaagggctttctggcaactcctggcctactttatggtgtgtatgagctacagttgaaaggagtatgaaccactgttgaaaggaatatgattacttgtgattgytgtggagaaacaggctgttgtgttttgaagagctgartgaggtattgaattcacaacactttctgccgtgacgaagtacctcgtttgtcttaatcrcattttgttactgtcctgaacgtaataaacaataagtcattaaagctagtcatgacctccatgatcttttgagaaaatacttctgttactgaaaagctgggttaatctctccctaaatctgtaagtaattcaggcygtgactgyggtttcagcactttttcctggaaagcacagactggtcaagtgatggagatcaagatcgtaacctacagatacaatatctgagaatcaatccttgcatttttttaacataaatgaaaaaaatatttaaatattgaaaacattttaaatatattaagt

SEQ ID NO: 54229 - DNA, 600 bp, Chicken  19866894306522_4
gtgtgtatgagctacagttgaaaggagtatgaaccactgttgaaaggaatatgattacttgtgattgytgtggagaaacaggctgttgtgttttgaagagctgartgaggtattgaattcacaacactttctgccgtgacgaagtacctcgtttgtcttaatcrcattttgttactgtcctgaacgtaataaacaataagtcattaaagctagtcatgacctccatgatcttttgagaaaatacttctgttactgaaaagctgggttaatctctccctaaatctgtaagtaattcaggcygtgactgyggtttcagcactttttcctggaaagcacagactggtcaagtgatggagatcaagatcgtaacctacagatacaatatctgagaatcaatccttgcatttttttaacataaatgaaaaaaatatttaaatattgaaaacattttaaatatattaagtacttttttgaaacaaggttcaggtatgctttttttttcttttttttttttttccctgcccttaggtttttaaatgcagtagttgctcagggcatgaaactggtgatgtcactatgtggttacacagaagaagacac

SEQ ID NO: 54230 - DNA, 600 bp, Chicken  19866894306522_5
gagctacagttgaaaggagtatgaaccactgttgaaaggaatatgattacttgtgattgytgtggagaaacaggctgttgtgttttgaagagctgartgaggtattgaattcacaacactttctgccgtgacgaagtacctcgtttgtcttaatcrcattttgttactgtcctgaacgtaataaacaataagtcattaaagctagtcatgacctccatgatcttttgagaaaatacttctgttactgaaaagctgggttaatctctccctaaatctgtaagtaattcaggcygtgactgyggtttcagcactttttcctggaaagcacagactggtcaagtgatggagatcaagatcgtaacctacagatacaatatctgagaatcaatccttgcatttttttaacataaatgaaaaaaatatttaaatattgaaaacattttaaatatattaagtacttttttgaaacaaggttcaggtatgctttttttttcttttttttttttttccctgcccttaggtttttaaatgcagtagttgctcagggcatgaaactggtgatgtcactatgtggttacacagaagaagacacacgtacct

SEQ ID NO: 54231 - DNA, 599 bp, Chicken  19866894306527_1
  misc_feature (1)..(135): n is any nucleotide
nnnnnnnnnnnnnnnnnnnnnnnnnnnnnnnnnnnnnnnnnnnnnnnnnnnnnnnnnnnnnnnnnnnnnnnnnnnnnnnnnnnnnnnnnnnnnnnnnnnnnnnnnnnnnnnnnnnnnnnnnnnnnnnnnnnnnnnaatatgattttcttatagttttcgttacctgagaaacttcactaacagtattttcactagcaggtacaattcgtaccagcagacatagctttgtatttcctggcattctcctcatatctatttttcatgagtttttatgctgtcattcagttcctgcttaagacrttgcctgtatttcagtggacatttgtcttgaaaagtctctgatcaaatatttgttggaaaaaaattaagtgtcacaatgcaagccaagggaaaactcttctgattgattttctgtttaaaagttattgacaatatgaaatattgtcagagtaaggaacatcttcaattatgccctatttaattttagagaagcagtcaaaatgtcgtagttaattaagaaaaatgtaatttctaagcttggaaccctcaccctgcttgagaccaatggttcatgtctcagcagaggttaatttctttct

SEQ ID NO: 54232 - DNA, 600 bp, Chicken  19866894306529_1
gttaatcatggcctgaagctctgattgatcacctgaggtgagcactgagtcagctgcgggagcacaggtgaaggcaattcacctgtgtgactggaaggggtgcagcctggctccacctctcctagaccccatttaagggctgactgcaactagggaaggatctttttctagagatcactctctttggagtttttctgtgagcctaagactggtaagcacttccattagtttttgattatctctttccactgtgataatccttctggctatatggcctgtaaaataccagcctaactacgycattctgctaattgtagatttgctgattgtacagtaatgctgcagacttcccagatccatcagtttctatttgtaaaaataaaaagactcatccatttctgtctgatgtttgagctatcagcattatatacgtataaatacatatatacgtatatatagatctgaagtcaatgtataattatgattgacgtataattatgatgagtcaatttttgcaagttttattgctaggcagcaatgtccagggaaaataatcacagtgctattcaatgctatcttgttttctcagaacaagttcct

SEQ ID NO: 54233 - DNA, 600 bp, Chicken  19866894306535_1
aagtggaaagaaggagcagagcagaaatcacagtggaagccccatggttaccttctgtgtgtctgaagtttgtctcttagccagtttcatacaactgggaacattccctgcactagggatgagatacccttgagtgtcccaccactgtcttagcactcggccattcacagaagtaagagacatgcacaacatttccactctaaaggtgcctacaccaaccattttttttgtctctagtgccaatttttatcaaccaagtccctctcagacatgaaagctactctcaagacactcaaagarcatgcagttgtcttctggaactggagaaaaagcagaagaccagcccagagcaaggcagaggcgctagtcatcctccacagactcctgctgtgtccttggagcagtcagtcagtcccaagcatttctcccctttgctgttatctctgctccaaagggcaacttcttcacctcaagatttttttttcctttttcttttttctcttttctttttttctttttcattttttttctttttttccgccttattttctttttccttttttccttcttctttcttcttttttttcttttcgggaattt

SEQ ID NO: 54234 - DNA, 600 bp, Chicken  19866894306537_1
aattgtgtagaatatgagtttttctcatttttttaaaaaaacatctactatgtatgaaaaggaaacttttaattggattattttttcacacatcacctaagtagcatgctttgggggctttcactacaaagatataattaaaagaagttattcaagttttcctcagctgagcaatcttctgacagtttcctgtctcatctcctttcctaaattctttatgaaggagctaattcacgctgtaaaactcagcagagaccacaactttccttattttgcatataagaaacttacagattcatygtcrtgttctaaacagaaattagccaatacataaataatgatacatcattaatttattattattaataaataatagcaacagcaggaaattttgcctgtgtcagagctccacaatttgactctaagactggagtttattttctgaatgagaagagaaccagcaacgatgggatggtatgtgccagtatcccaatgaagagtagaagaagtaccatttcatgccaataagccatttttcccagcratgcagtacaggaactgatatgatgcaggaaagtcataggcataggctcttgtaaa

SEQ ID NO: 54235 - DNA, 600 bp, Chicken  19866894306537_2
gtgtagaatatgagtttttctcatttttttaaaaaaacatctactatgtatgaaaaggaaacttttaattggattattttttcacacatcacctaagtagcatgctttgggggctttcactacaaagatataattaaaagaagttattcaagttttcctcagctgagcaatcttctgacagtttcctgtctcatctcctttcctaaattctttatgaaggagctaattcacgctgtaaaactcagcagagaccacaactttccttattttgcatataagaaacttacagattcatygtcrtgttctaaacagaaattagccaatacataaataatgatacatcattaatttattattattaataaataatagcaacagcaggaaattttgcctgtgtcagagctccacaatttgactctaagactggagtttattttctgaatgagaagagaaccagcaacgatgggatggtatgtgccagtatcccaatgaagagtagaagaagtaccatttcatgccaataagccatttttcccagcratgcagtacaggaactgatatgatgcaggaaagtcataggcataggctcttgtaaacact

SEQ ID NO: 54236 - DNA, 600 bp, Chicken  19866894306537_3
ctcagcagagaccacaactttccttattttgcatataagaaacttacagattcatygtcrtgttctaaacagaaattagccaatacataaataatgatacatcattaatttattattattaataaataatagcaacagcaggaaattttgcctgtgtcagagctccacaatttgactctaagactggagtttattttctgaatgagaagagaaccagcaacgatgggatggtatgtgccagtatcccaatgaagagtagaagaagtaccatttcatgccaataagccatttttcccagcratgcagtacaggaactgatatgatgcaggaaagtcataggcataggctcttgtaaacactcttgtaaacacgcagaaagcatgaaataaacaaagttttgctccctgtccctgtttccagagtatacttttcaaatagatttgaaagcagggtttttcacgctgagggcagattcacagcagtcagagactagttaataatgtatgcagccaagagaaaggccttgttattcagctacacaaaaagtaggggataggcaccttctgtctggctataagtaaatactaataaagactactg

SEQ ID NO: 54237 - DNA, 599 bp, Chicken  19866894306541_1
  misc_feature (1)..(103): n is any nucleotide
nnnnnnnnnnnnnnnnnnnnnnnnnnnnnnnnnnnnnnnnnnnnnnnnnnnnnnnnnnnnnnnnnnnnnnnnnnnnnnnnnnnnnnnnnnnnnnnnnnnnnnntggttgatactggtatagttccgtaagagttgaggatcttgttaactttgctgcatacaacggcttaataaaattgcatgttattgaaagtaggtaatagcaactgctcttataaactgagaagaaatacattacacattttctgatcatactgaacagatttatgagttccattcactcaatcttcttgttacatytaaactcctgaygctgttttagcagatcagaacctagtacttcagatatacagataaataagttwtctacttgctcccartcagatcttcacattaggggaccaaaaaatggtattattattgtgtttcagaaaagggggaaaagtatagtacagtagtcccattgtattacgggtttgatattgacagtgaaacacaatgttgatatmattgcagaaaatttaccttccagtgactaggcagaaggaagtaaactttacaaaaaaacttatctatccttcagatattctgaaatctgc

SEQ ID NO: 54238 - DNA, 599 bp, Chicken  19866894306541_2
  misc_feature (1)..(91): n is any nucleotide
nnnnnnnnnnnnnnnnnnnnnnnnnnnnnnnnnnnnnnnnnnnnnnnnnnnnnnnnnnnnnnnnnnnnnnnnnnnnnnnnnnnnnnnnnnntggttgatactggtatagttccgtaagagttgaggatcttgttaactttgctgcatacaacggcttaataaaattgcatgttattgaaagtaggtaatagcaactgctcttataaactgagaagaaatacattacacattttctgatcatactgaacagatttatgagttccattcactcaatcttcttgttacatytaaactcctgaygctgttttagcagatcagaacctagtacttcagatatacagataaataagttwtctacttgctcccartcagatcttcacattaggggaccaaaaaatggtattattattgtgtttcagaaaagggggaaaagtatagtacagtagtcccattgtattacgggtttgatattgacagtgaaacacaatgttgatatmattgcagaaaatttaccttccagtgactaggcagaaggaagtaaactttacaaaaaaacttatctatccttcagatattctgaaatctgctcagctgagtcc

SEQ ID NO: 54239 - DNA, 599 bp, Chicken  19866894306541_3
  misc_feature (1)..(38): n is any nucleotide
nnnnnnnnnnnnnnnnnnnnnnnnnnnnnnnnnnnnnntggttgatactggtatagttccgtaagagttgaggatcttgttaactttgctgcatacaacggcttaataaaattgcatgttattgaaagtaggtaatagcaactgctcttataaactgagaagaaatacattacacattttctgatcatactgaacagatttatgagttccattcactcaatcttcttgttacatytaaactcctgaygctgttttagcagatcagaacctagtacttcagatatacagataaataagttwtctacttgctcccartcagatcttcacattaggggaccaaaaaatggtattattattgtgtttcagaaaagggggaaaagtatagtacagtagtcccattgtattacgggtttgatattgacagtgaaacacaatgttgatatmattgcagaaaatttaccttccagtgactaggcagaaggaagtaaactttacaaaaaaacttatctatccttcagatattctgaaatctgctcagctgagtcctgaaaatggaaaagaaagctcaaggtctcctagaggggtaaatctccatacat

SEQ ID NO: 54240 - DNA, 599 bp, Chicken  19866894306541_4
  misc_feature (1)..(23): n is any nucleotide
nnnnnnnnnnnnnnnnnnnnnnntggttgatactggtatagttccgtaagagttgaggatcttgttaactttgctgcatacaacggcttaataaaattgcatgttattgaaagtaggtaatagcaactgctcttataaactgagaagaaatacattacacattttctgatcatactgaacagatttatgagttccattcactcaatcttcttgttacatytaaactcctgaygctgttttagcagatcagaacctagtacttcagatatacagataaataagttwtctacttgctcccartcagatcttcacattaggggaccaaaaaatggtattattattgtgtttcagaaaagggggaaaagtatagtacagtagtcccattgtattacgggtttgatattgacagtgaaacacaatgttgatatmattgcagaaaatttaccttccagtgactaggcagaaggaagtaaactttacaaaaaaacttatctatccttcagatattctgaaatctgctcagctgagtcctgaaaatggaaaagaaagctcaaggtctcctagaggggtaaatctccatacatccaataagtgcaata

SEQ ID NO: 54241 - DNA, 600 bp, Chicken  19866894306541_5
ctcttataaactgagaagaaatacattacacattttctgatcatactgaacagatttatgagttccattcactcaatcttcttgttacatytaaactcctgaygctgttttagcagatcagaacctagtacttcagatatacagataaataagttwtctacttgctcccartcagatcttcacattaggggaccaaaaaatggtattattattgtgtttcagaaaagggggaaaagtatagtacagtagtcccattgtattacgggtttgatattgacagtgaaacacaatgttgatatmattgcagaaaatttaccttccagtgactaggcagaaggaagtaaactttacaaaaaaacttatctatccttcagatattctgaaatctgctcagctgagtcctgaaaatggaaaagaaagctcaaggtctcctagaggggtaaatctccatacatccaataagtgcaatacaataggtcatttagagacattttcattaaactaactggatatccagaatcattaggataatatgtttccatttttcatgtttcartgatgtagtattaaatcagaggattattgggttgttcttctcct

SEQ ID NO: 54242 - DNA, 600 bp, Chicken  19866894306541_6
gtattacgggtttgatattgacagtgaaacacaatgttgatatmattgcagaaaatttaccttccagtgactaggcagaaggaagtaaactttacaaaaaaacttatctatccttcagatattctgaaatctgctcagctgagtcctgaaaatggaaaagaaagctcaaggtctcctagaggggtaaatctccatacatccaataagtgcaatacaataggtcatttagagacattttcattaaactaactggatatccagaatcattaggataatatgtttccatttttcatgtttcartgatgtagtattaaatcagaggattattgggttgttcttctcctccctcccaccttggtttgcattgttttcactgacttaaagcaccagggtattatgatatatattatggtatatggtattatggaatgatacagctcatttaaaataaatagaaatattctgtcacatagtataaacaccactagacatactgtagaatagtattataatttcatggcttatgatgtactcagtagatcaagtgccttggtattagcatcttttttttctctctttatgattttttacaataatcac

SEQ ID NO: 54243 - DNA, 600 bp, Chicken  19866894306544_1
tgctttcccactgtaggcattgctgtattgaagagagcaatgcctatcctagcatacataataacaatgagtgacaagggggcaagatagatattggcaaacagaactgtcgtatagatctttctcattcctgggttaggccagttctcccggcaccaatatacagggcgggtttcattgccatagccaaggattactcttatatgcttctcttcttgtacctgtaacatgactgctgaaggacacatgattgcaatggctagaatccagatgactgttataatgatgacagcagttgargtggtcagcttctgcttaaatggataaacgatgcatcgaaacctgcagcagaggtatccaggaatgcatgtggagaagctatttagagaatgcttagagaagtaaacataaacatacacaggtataaaattktgtattgtgagaattgtatgttgttaaaactatgtattttttgaaggtacagatggaattgtgtcatcctgcatgcaactccactgatgtatgtaayygctccatttaagaactgtgttgaggaaaacaatctagaagaaagttagtgtaagaaatcacttgattatc

SEQ ID NO: 54244 - DNA, 600 bp, Chicken  19866894306544_2
gggttaggccagttctcccggcaccaatatacagggcgggtttcattgccatagccaaggattactcttatatgcttctcttcttgtacctgtaacatgactgctgaaggacacatgattgcaatggctagaatccagatgactgttataatgatgacagcagttgargtggtcagcttctgcttaaatggataaacgatgcatcgaaacctgcagcagaggtatccaggaatgcatgtggagaagctatttagagaatgcttagagaagtaaacataaacatacacaggtataaaattktgtattgtgagaattgtatgttgttaaaactatgtattttttgaaggtacagatggaattgtgtcatcctgcatgcaactccactgatgtatgtaayygctccatttaagaactgtgttgaggaaaacaatctagaagaaagttagtgtaagaaatcacttgattatcatctgtgtctgtatcaacctgctgcttcagttaactatggcaggtaccactgcttctgctatctcgcttagctagggaaygagctaactctaggcagtcaggtacagcccagctgtgtgatttctttaagag

SEQ ID NO: 54245 - DNA, 600 bp, Chicken  19866894306544_3
tgactgctgaaggacacatgattgcaatggctagaatccagatgactgttataatgatgacagcagttgargtggtcagcttctgcttaaatggataaacgatgcatcgaaacctgcagcagaggtatccaggaatgcatgtggagaagctatttagagaatgcttagagaagtaaacataaacatacacaggtataaaattktgtattgtgagaattgtatgttgttaaaactatgtattttttgaaggtacagatggaattgtgtcatcctgcatgcaactccactgatgtatgtaayygctccatttaagaactgtgttgaggaaaacaatctagaagaaagttagtgtaagaaatcacttgattatcatctgtgtctgtatcaacctgctgcttcagttaactatggcaggtaccactgcttctgctatctcgcttagctagggaaygagctaactctaggcagtcaggtacagcccagctgtgtgatttctttaagagatactgatggaagagcaattactgtggatgcacttctgagctggccatgttttaagggggcagccttattgaactatatccatctaatatgttgcag

SEQ ID NO: 54246 - DNA, 600 bp, Chicken  19866894306544_4
gactgctgaaggacacatgattgcaatggctagaatccagatgactgttataatgatgacagcagttgargtggtcagcttctgcttaaatggataaacgatgcatcgaaacctgcagcagaggtatccaggaatgcatgtggagaagctatttagagaatgcttagagaagtaaacataaacatacacaggtataaaattktgtattgtgagaattgtatgttgttaaaactatgtattttttgaaggtacagatggaattgtgtcatcctgcatgcaactccactgatgtatgtaayygctccatttaagaactgtgttgaggaaaacaatctagaagaaagttagtgtaagaaatcacttgattatcatctgtgtctgtatcaacctgctgcttcagttaactatggcaggtaccactgcttctgctatctcgcttagctagggaaygagctaactctaggcagtcaggtacagcccagctgtgtgatttctttaagagatactgatggaagagcaattactgtggatgcacttctgagctggccatgttttaagggggcagccttattgaactatatccatctaatatgttgcagt

SEQ ID NO: 54247 - DNA, 544 bp, Chicken  19866894306544_5
atttagagaatgcttagagaagtaaacataaacatacacaggtataaaattktgtattgtgagaattgtatgttgttaaaactatgtattttttgaaggtacagatggaattgtgtcatcctgcatgcaactccactgatgtatgtaayygctccatttaagaactgtgttgaggaaaacaatctagaagaaagttagtgtaagaaatcacttgattatcatctgtgtctgtatcaacctgctgcttcagttaactatggcaggtaccactgcttctgctatctcgcttagctagggaaygagctaactctaggcagtcaggtacagcccagctgtgtgatttctttaagagatactgatggaagagcaattactgtggatgcacttctgagctggccatgttttaagggggcagccttattgaactatatccatctaatatgttgcagtgttatgtgaattcatctgcctcggtgtggtcaggtggcatgagggagatgatagtttatcatctctacatcatcttacctgtctacagcaattg

SEQ ID NO: 54248 - DNA, 600 bp, Chicken  19866894306546_1
gaggcaacaactttcgaagtcccagtttcagaggagaaacagaaaggctgtattactttcctctacaaataccgtagtaaacagctgcagttcttgtaaaagatacttgtcatcttttgtatactcttgtatgcagaagcaagaagagatgtagtgcttaaaaggcaggaatactcctaaaaagggacacccccctttcctgcaacagccacttctcatgggctacatttagtcccgggaagaacccataatgttttaacttttcacttccaagaaagaatcatgtccccctgtgatcgsttttgatgcttcttccattagtaagtgtgaaagagcctctagcaaccctctttgtgtactggcaaccctggggagtctgtgatgactctcagcagaaggaaatggattgtcagctgccagagcagggagcagaagcgycccagacaagagaaagataggtttttaacaagaaaacaaatgcaagtgtgtttgcaaatgtagggggtaatcaaaataggaaagtcataaggtgaacaactgagtcagacatatttctcatgatgaaggtctttgtcaagataataataggataataataaa

SEQ ID NO: 54249 - DNA, 600 bp, Chicken  19866894306546_2
gcaagaagagatgtagtgcttaaaaggcaggaatactcctaaaaagggacacccccctttcctgcaacagccacttctcatgggctacatttagtcccgggaagaacccataatgttttaacttttcacttccaagaaagaatcatgtccccctgtgatcgsttttgatgcttcttccattagtaagtgtgaaagagcctctagcaaccctctttgtgtactggcaaccctggggagtctgtgatgactctcagcagaaggaaatggattgtcagctgccagagcagggagcagaagcgycccagacaagagaaagataggtttttaacaagaaaacaaatgcaagtgtgtttgcaaatgtagggggtaatcaaaataggaaagtcataaggtgaacaactgagtcagacatatttctcatgatgaaggtctttgtcaagataataataggataataataaatatcaaactcttgtgtttattcccatttctaactcggcacaagaagagttgcacactggcctccctcctgcacaagcctattcagctcgctaaaacagcagaaaattaacactgtataaagagaagagtcattagctt

SEQ ID NO: 54250 - DNA, 600 bp, Chicken  19866894306546_3
ccatactgctcagatgaaccttcagcatccttcagcactggcaacatttactgcaagaacacatattcctttaaacatatttttattattaattcatgattaaaaggttttcttccctctctacaacagtatttattatgaggaaatgaaggaaaaatgaaggaaactgaggaagcaaaaataatgacaatgtctctatcatcattttggttaaaaattttaaaacataattgtgaggatttataagaaacaaaaataatcctttcaaattcttcaaagtgaaggtctgaaaaagcatcytttttttttttacagaaatatttgtatgagatgatgcaatataatgtacagtaagcctctcagaaatcagaattaggtttgaatctcacctgtactggtacaaataaggaacaataactaacatgcactggccacagtaataactaacccacctggccatcaccctgtcatgaagtatagagattttgtctaatactaaaacaaaacagtatttggtgttaattaatcttatttgatgctataatgaatctgattttttttcagatgattattttatgtatcaatgaaggattatagtca

SEQ ID NO: 54251 - DNA, 599 bp, Chicken  19866894306550_1
  misc_feature (1)..(64): n is any nucleotide
nnnnnnnnnnnnnnnnnnnnnnnnnnnnnnnnnnnnnnnnnnnnnnnnnnnnnnnnnnnnnnnnactgtcctgaatgtggatcaaagctgtttattgatttattcttggaacagaaccggccagcaaccaatgaaccctgtattcaagatcatattgataatacaacatatttcagagtactacacacttcaaagatgttggttacacgcttccacccttccaaaacttgtctcaaaaagctctagcccctacctccccactcccatccacgtacacatgatcacacacacatacacackctggaaggaagtgtgggttacaggcacataacatttttgggagcatgtgttcacatccctatctcctgggttctctagcccttagtacctgtgttgcttgctacaatctgctaaggcacacrttggtgagaaagcacctcatgacgtcgcataagcattcccaaaatgtttgtctctgagtgttaccttttataycagcactccactagctggcaggtaggctgctcacggtgcctgaaggagaggatgctctgtcaggcattggcagaggtcatgatcccggtgcagttacttggggc

SEQ ID NO: 54252 - DNA, 600 bp, Chicken  19866894306550_2
agcaaccaatgaaccctgtattcaagatcatattgataatacaacatatttcagagtactacacacttcaaagatgttggttacacgcttccacccttccaaaacttgtctcaaaaagctctagcccctacctccccactcccatccacgtacacatgatcacacacacatacacackctggaaggaagtgtgggttacaggcacataacatttttgggagcatgtgttcacatccctatctcctgggttctctagcccttagtacctgtgttgcttgctacaatctgctaaggcacacrttggtgagaaagcacctcatgacgtcgcataagcattcccaaaatgtttgtctctgagtgttaccttttataycagcactccactagctggcaggtaggctgctcacggtgcctgaaggagaggatgctctgtcaggcattggcagaggtcatgatcccggtgcagttacttggggcagcaccaagccaggtcattgctgatcccctgctttcattccatgatctctgttaccaatatctcagatttttaattacttcacgtttctttttgagctgattccttcctttcaaagtctcttt

SEQ ID NO: 54253 - DNA, 600 bp, Chicken  19866894306550_3
atgttggttacacgcttccacccttccaaaacttgtctcaaaaagctctagcccctacctccccactcccatccacgtacacatgatcacacacacatacacackctggaaggaagtgtgggttacaggcacataacatttttgggagcatgtgttcacatccctatctcctgggttctctagcccttagtacctgtgttgcttgctacaatctgctaaggcacacrttggtgagaaagcacctcatgacgtcgcataagcattcccaaaatgtttgtctctgagtgttaccttttataycagcactccactagctggcaggtaggctgctcacggtgcctgaaggagaggatgctctgtcaggcattggcagaggtcatgatcccggtgcagttacttggggcagcaccaagccaggtcattgctgatcccctgctttcattccatgatctctgttaccaatatctcagatttttaattacttcacgtttctttttgagctgattccttcctttcaaagtctctttgtaattacctggttatgaatctagctgattcttgtcttcctctcttaaacagccatttgggacaattgtattt

SEQ ID NO: 54254 - DNA, 600 bp, Chicken  19866894306552_1
tttacttcagtggtttcaagatcttcttcccaaggattacgattagtacatacacagtagaaagtgaggagaaaaaatactagattgtcagttgaagaattattttcgctttttcagcttgtttctaaacaagacatctttttaacatgatcagtgccaggcaggtatattctgtcctgcttactctttctgcagttcatcaccaataaatcactttgacaaaaccgtgagatcagcacagaacacacaactctatttctttggaaagagccattttctcccagttacagtttttcctcrcacatcagtgcttgctcgagctgcagctccacacacgaggcgcagcactcaagcacacagcactggttatcagtaactcatgcagttctgctttaagaagcagtagaggtatcaaaaaygaagtcaactgctttttgctaatatccagaaagccctgaaagatagcgaagaaaatcgatgagggaagcttctctcaagaacagctgatgggaacagaaatcttttccctccccttttttgcaggtaaaggacatacagggcgagctcccttcctcgggatacactaaatgcatcctttgg

SEQ ID NO: 54255 - DNA, 579 bp, Chicken  19866894306552_2
tgtttctaaacaagacatctttttaacatgatcagtgccaggcaggtatattctgtcctgcttactctttctgcagttcatcaccaataaatcactttgacaaaaccgtgagatcagcacagaacacacaactctatttctttggaaagagccattttctcccagttacagtttttcctcrcacatcagtgcttgctcgagctgcagctccacacacgaggcgcagcactcaagcacacagcactggttatcagtaactcatgcagttctgctttaagaagcagtagaggtatcaaaaaygaagtcaactgctttttgctaatatccagaaagccctgaaagatagcgaagaaaatcgatgagggaagcttctctcaagaacagctgatgggaacagaaatcttttccctccccttttttgcaggtaaaggacatacagggcgagctcccttcctcgggatacactaaatgcatcctttggcagtacctacgctaaaaagaacctcaaataaataagtctcgcagaactgtgtctaccacagcctgccccagcaggtggctgccagccccagcagccct

SEQ ID NO: 54256 - DNA, 599 bp, Chicken  19866894306553_1
  misc_feature (1)..(213): n is any nucleotide
nnnnnnnnnnnnnnnnnnnnnnnnnnnnnnnnnnnnnnnnnnnnnnnnnnnnnnnnnnnnnnnnnnnnnnnnnnnnnnnnnnnnnnnnnnnnnnnnnnnnnnnnnnnnnnnnnnnnnnnnnnnnnnnnnnnnnnnnnnnnnnnnnnnnnnnnnnnnnnnnnnnnnnnnnnnnnnnnnnnnnnnnnnnnnnnnnnnnnnnnnnnnnnnnnnnnncgttgtgtgctaatactcccatcagcacacagcatggggctggagaatcacacttcagttaatgcattagagcaacagagggcattrataaagtaaacagcactgagcgttygatgcacacacagcagaaaattgtccaaagccagattaacaaagaatataccttgagatgcttacctgaaatttcatgttcatctgaaaagtttaaattatgtaaaatgacagtaattagtaactatatttgtgattcatatgatgattttgaactttattcctctaaaaggatctgatataacagagttaaataggacaccttaggcttcaagacgtgaacaaagatagaaaatgcattttaatgagttttggtcctgcaagaaatgtatgca

SEQ ID NO: 54257 - DNA, 599 bp, Chicken  19866894306553_2
  misc_feature (1)..(188): n is any nucleotide
nnnnnnnnnnnnnnnnnnnnnnnnnnnnnnnnnnnnnnnnnnnnnnnnnnnnnnnnnnnnnnnnnnnnnnnnnnnnnnnnnnnnnnnnnnnnnnnnnnnnnnnnnnnnnnnnnnnnnnnnnnnnnnnnnnnnnnnnnnnnnnnnnnnnnnnnnnnnnnnnnnnnnnnnnnnnnnnnnnnnnnnnnnnncgttgtgtgctaatactcccatcagcacacagcatggggctggagaatcacacttcagttaatgcattagagcaacagagggcattrataaagtaaacagcactgagcgttygatgcacacacagcagaaaattgtccaaagccagattaacaaagaatataccttgagatgcttacctgaaatttcatgttcatctgaaaagtttaaattatgtaaaatgacagtaattagtaactatatttgtgattcatatgatgattttgaactttattcctctaaaaggatctgatataacagagttaaataggacaccttaggcttcaagacgtgaacaaagatagaaaatgcattttaatgagttttggtcctgcaagaaatgtatgcaatagaaaaaaattacgtagagatca

SEQ ID NO: 54258 - DNA, 522 bp, Chicken  19866894306553_3
gatctgatataacagagttaaataggacaccttaggcttcaagacgtgaacaaagatagaaaatgcattttaatgagttttggtcctgcaagaaatgtatgcaatagaaaaaaattacgtagagatcaaagctgtttcataaggattggaaatgcaaatgtgacgtattttactgcactctaagtaacttcccatggaaaaagaaaaaacgaagagtttaatttaaaaataatgaattttgttatcattgattgctgggaagaaatttgtcatttgggctgaacagaaccacagtgcctygctggaaactgcagagttgtttctttaaatggacaatgggattatttctaaaacatgtcctccaagaggggaatatggagcaatcttttgatttttagccctcgtgtctcttggctaatggtgtattttgattataagctattttgggctgacttcttctctggatgtatacatccatatacataaatgtatatatgcgtatatatttatgagcactgccag

SEQ ID NO: 54259 - DNA, 600 bp, Chicken  19866894306554_1
tagaactgagtgggatgatgaacctacactttctggcactttacgtttgtttctttgaacttccagagtaatcaaattatatatttttaaatatattctgcaatagttatgttaacttaagagagtgaagacatttatctacaaatccattaattatgggttttttttagaaaggaatctacagaatggtttaaggctttcttaaatttgttacattcgggatttacttgtttgcttgcttatggttagataatgcagatacaaataactgcctccaaaactggtagtttactaataaamaatgccactaattaatctttttacaactaacagtaaaataaaaaagtggaagtctctgtaccagcttacaaatattaaaatataatgtaatgtattcatgaagtttaatagctcagctaataaaataattacacgtttggtcacagtgctactgtgtatcatgttaattttgcagaaattggcatttttagatcaatgtgatgttgctctgcaataagcagtaatgtcactagacagtttcagaaatagttcagttttttacttgtccagcaagttatgggtatatattttttttttaat

SEQ ID NO: 54260 - DNA, 600 bp, Chicken  19866894306557_1
ctttatcagcacagataaactgggcaagcatggagtatctattaaaccaaagaaacccaatctccttatgtgtgcagtaaaagacaaataacgttgtacctgccattggtttgtacctattcttttagagctgccctgcttgccaaaacattgtacgtatcacactgggagacagctgagtttctcattatgaaaaccaattgcctccttaaaggttgcagtgtgttgcatatttatgaccgttcttctgtgcttttgcctcccttcccttctgaattactgtgacttcaaccttttagyattttggttgcattggacaaatgcaggaagttacagcctgtggtggaggcttcagctcccatgaattggccgtttcactccctcctgtaggttttcagtagactggtttcattttatacagtggagccctgttagtttccttgtgtaagtcttgcagatagaatttaggacccaggaacgtgccttcacagaggtaaaagtattcccatcttttatgatctgtcattttcacaaacggtaggtgtgtagaaactcaagagctcagtctgtgcggggggcttgtgtggctctttcttctca

SEQ ID NO: 54261 - DNA, 600 bp, Chicken  19866894306561_1
ttttcccttccggtgttcaagaaacatttagatgtactgagggacattgtttagtggggaaacattggtaataggtggatggttggattaggtgatcttggaggtcttttccaatcttggtggttgtatgattctgtgattctaagcaggaaatctaacaaaaagcatttttcagtgtttctttggtaaaattacacttgcgtttaatagtcagtacgtggtttatatgattccaagctaaatttttgttgagtaaaatccaaattctgctcaaaaatctgtcagcgacaaatcaatttmtagaagaacattttaaactgcattttccttaytaaatattaggcagttttctgcagaaagtgctctccaagaaaaagarattaaacttgcttcctatgacaaagrgatatattatatatacaatattagtgtttccatttttattataggaaaacatcgggaactactttaaaacccatgtctggggtgtgtcattgctgtgggtatctcagcatacttaatcattcagactgggcataaagctgaattgcatctccttttgcagtccttgttgcaaccatatggtatcttggtctgtga

SEQ ID NO: 54262 - DNA, 600 bp, Chicken  19866894306561_2
tgtactgagggacattgtttagtggggaaacattggtaataggtggatggttggattaggtgatcttggaggtcttttccaatcttggtggttgtatgattctgtgattctaagcaggaaatctaacaaaaagcatttttcagtgtttctttggtaaaattacacttgcgtttaatagtcagtacgtggtttatatgattccaagctaaatttttgttgagtaaaatccaaattctgctcaaaaatctgtcagcgacaaatcaatttmtagaagaacattttaaactgcattttccttaytaaatattaggcagttttctgcagaaagtgctctccaagaaaaagarattaaacttgcttcctatgacaaagrgatatattatatatacaatattagtgtttccatttttattataggaaaacatcgggaactactttaaaacccatgtctggggtgtgtcattgctgtgggtatctcagcatacttaatcattcagactgggcataaagctgaattgcatctccttttgcagtccttgttgcaaccatatggtatcttggtctgtgatttcaaaaagactccagaaattaacagttttt

SEQ ID NO: 54263 - DNA, 600 bp, Chicken  19866894306561_3
tggttggattaggtgatcttggaggtcttttccaatcttggtggttgtatgattctgtgattctaagcaggaaatctaacaaaaagcatttttcagtgtttctttggtaaaattacacttgcgtttaatagtcagtacgtggtttatatgattccaagctaaatttttgttgagtaaaatccaaattctgctcaaaaatctgtcagcgacaaatcaatttmtagaagaacattttaaactgcattttccttaytaaatattaggcagttttctgcagaaagtgctctccaagaaaaagarattaaacttgcttcctatgacaaagrgatatattatatatacaatattagtgtttccatttttattataggaaaacatcgggaactactttaaaacccatgtctggggtgtgtcattgctgtgggtatctcagcatacttaatcattcagactgggcataaagctgaattgcatctccttttgcagtccttgttgcaaccatatggtatcttggtctgtgatttcaaaaagactccagaaattaacagtttttgtttagaaaaaaagaaattaattatcatagagaagaaactttattta

SEQ ID NO: 54264 - DNA, 600 bp, Chicken  19866894306561_4
cttttccaatcttggtggttgtatgattctgtgattctaagcaggaaatctaacaaaaagcatttttcagtgtttctttggtaaaattacacttgcgtttaatagtcagtacgtggtttatatgattccaagctaaatttttgttgagtaaaatccaaattctgctcaaaaatctgtcagcgacaaatcaatttmtagaagaacattttaaactgcattttccttaytaaatattaggcagttttctgcagaaagtgctctccaagaaaaagarattaaacttgcttcctatgacaaagrgatatattatatatacaatattagtgtttccatttttattataggaaaacatcgggaactactttaaaacccatgtctggggtgtgtcattgctgtgggtatctcagcatacttaatcattcagactgggcataaagctgaattgcatctccttttgcagtccttgttgcaaccatatggtatcttggtctgtgatttcaaaaagactccagaaattaacagtttttgtttagaaaaaaagaaattaattatcatagagaagaaactttatttatttatttatttattttgagttgtcct

SEQ ID NO: 54265 - DNA, 600 bp, Chicken  19866894306562_1
gaaaaaaatccaaaaacctactccacatcattatcaaaacaccatccccaaactgcacccagcacccagcagctgatgcgccaatgcagtccttgagtttcaacagctcttctcctgcctttaccctctctcacatggttgctatctctaaatgtcttaagccttctaagcattttttccatctagctgggtcaggagttctgaactcccaatattactttcagctcctctactctgtctcagttttaattcacaccctcagcaagtttgcagatgacaccaggctgtgtagtgcatttracatgctcaagggacaggatgccacccagggagaactatacaggctcaagtagtgggcccaggaaaatctcaggaggttcaacaaattgcaagggcttgtgcatgggttacagcaacccccactatcactacaagctgaaggatgtaaggatggaacacagccctgctgaaaaggacccggtggtactggtggatgggaagctggatggcaagctagacatgagcccaggaatgtgcattcgcagcccaggaagccaaccatattctgggctgcaccaaaacaagtgtggccagcagggc

SEQ ID NO: 54266 - DNA, 600 bp, Chicken  19866894306565_1
ttattccccaggtaatttttgtcactctaaaactgtatctttattaaaaatctaaaagctccatttcagaaacagaaaacagaagcaaaaaaagaatttcgtaccctttgttatactcaagttgcattgaaagaacatttgtctataacactgaacaagaaatacagcatttgtataaataatgcactatgtgtaatggagatgcaactatacaaatcacctggagcactctttccctcaaatttgggcacaaagactatgaagaaatatatcatcaagtagggtttctctaggtatctyctgtactttcaccttcccatacagaggaagtgttactcccacrctctacaytgcaaactactttacaataaaactccagcagctgaaaccactggagtgaagacttggtaggagattgcttgaagtggttgtgcatgatgacatagttgtttgactaacactgactctttctgtttgggccaaatgcaattctgacacactctgcaactcagcaccaaacaccctttccattctccaacagtttacttgcatttctgtgtaagtgctggtttcttttggctccaaagacagcttcacctg

SEQ ID NO: 54267 - DNA, 600 bp, Chicken  19866894306565_2
ttaaaaatctaaaagctccatttcagaaacagaaaacagaagcaaaaaaagaatttcgtaccctttgttatactcaagttgcattgaaagaacatttgtctataacactgaacaagaaatacagcatttgtataaataatgcactatgtgtaatggagatgcaactatacaaatcacctggagcactctttccctcaaatttgggcacaaagactatgaagaaatatatcatcaagtagggtttctctaggtatctyctgtactttcaccttcccatacagaggaagtgttactcccacrctctacaytgcaaactactttacaataaaactccagcagctgaaaccactggagtgaagacttggtaggagattgcttgaagtggttgtgcatgatgacatagttgtttgactaacactgactctttctgtttgggccaaatgcaattctgacacactctgcaactcagcaccaaacaccctttccattctccaacagtttacttgcatttctgtgtaagtgctggtttcttttggctccaaagacagcttcacctgcagggtttcatttttctgtttgacaccttgctgttgattttcc

SEQ ID NO: 54268 - DNA, 600 bp, Chicken  19866894306565_3
ctaaaagctccatttcagaaacagaaaacagaagcaaaaaaagaatttcgtaccctttgttatactcaagttgcattgaaagaacatttgtctataacactgaacaagaaatacagcatttgtataaataatgcactatgtgtaatggagatgcaactatacaaatcacctggagcactctttccctcaaatttgggcacaaagactatgaagaaatatatcatcaagtagggtttctctaggtatctyctgtactttcaccttcccatacagaggaagtgttactcccacrctctacaytgcaaactactttacaataaaactccagcagctgaaaccactggagtgaagacttggtaggagattgcttgaagtggttgtgcatgatgacatagttgtttgactaacactgactctttctgtttgggccaaatgcaattctgacacactctgcaactcagcaccaaacaccctttccattctccaacagtttacttgcatttctgtgtaagtgctggtttcttttggctccaaagacagcttcacctgcagggtttcatttttctgtttgacaccttgctgttgattttcccttgctgc

SEQ ID NO: 54269 - DNA, 599 bp, Chicken  19866894306566_1
  misc_feature (1)..(44): n is any nucleotide
nnnnnnnnnnnnnnnnnnnnnnnnnnnnnnnnnnnnnnnnnnnntttctgtgagtgcttgtaatggcttcacagtaacagacagctaaagttcctccaccactctgtcacttcctttcctcaaaatagcagagacagaaaaaaatgatgggaaaaaaaaaaaataataatgatggactgagataaggacagggatattgctcaccaattagtatcttgggtaaaacagacttagcaatgggagattaacgtcatttattttctattactaaaagactagagctgtgagaaactaaaaagraattagaagcacatttacctgcttccactttctttcacctcctgccacttagcagctcagggcaacagggtagaggaatggaagttgtccctgtccttttgacagcatgcagtccttcacaaactgattctctgtgggtttcccacagacwgcagttctcccgaaactgctccaatatactatggggcttatccttcaggagcagacttctccagcatgaatctccacaaacagcagctcttaccagatcaccttctctaacatggactcctccacatgggctgcagttctagcctgga

SEQ ID NO: 54270 - DNA, 600 bp, Chicken  19866894306566_2
aaaaaaaaaaaataataatgatggactgagataaggacagggatattgctcaccaattagtatcttgggtaaaacagacttagcaatgggagattaacgtcatttattttctattactaaaagactagagctgtgagaaactaaaaagraattagaagcacatttacctgcttccactttctttcacctcctgccacttagcagctcagggcaacagggtagaggaatggaagttgtccctgtccttttgacagcatgcagtccttcacaaactgattctctgtgggtttcccacagacwgcagttctcccgaaactgctccaatatactatggggcttatccttcaggagcagacttctccagcatgaatctccacaaacagcagctcttaccagatcaccttctctaacatggactcctccacatgggctgcagttctagcctggaatttgctcctacgagggatttccatgatctgcagtctctttcaggtcaggctccacctcgagttccagcaattttctgtctttttatagagaggggctccaaagtgatgacagtattcaaggtgtggcctcaccaaatctgagtacagagtg

SEQ ID NO: 54271 - DNA, 599 bp, Chicken  19866894306578_1
  misc_feature (1)..(30): n is any nucleotide
nnnnnnnnnnnnnnnnnnnnnnnnnnnnnncacccctgcctgaggatgcaggatctgggcagggaactgatctctctctgcacagatgagacagggaggtgcactgagcaagggactaggactggtcctagttgggaggagggcattagtaccaagtagatggggtgagagggggcctggggtgcttcctaaggcacaggaaggcggatgaggaccccctccctctccacagagggcgtaccaacttaggagagccaggctgcccatcctggctcagatcacagcttccctgctagcttygtaccacagtaaggatggagattgaggagaacaaatctccccgctccactgttagaaagagagctagggtcacccagatagggaggagggagaggcagggctacagtaccacaggcagggaacatgccaggatgcagcatctctctctccagtaccggctgctggagagcccaggtccaactagactctgcagctgcaggatccccgctcactgctcccatctcgctctgcaaggcactttcaccccctactcctatgactcaggggaggcagagccactccccgtggagaaagtgggt

SEQ ID NO: 54272 - DNA, 600 bp, Chicken  19866894306578_2
gggagaccacaacagggggctgaaggcagcccaagatctcattctgcagcctgaaataaatgtccatgttaagtcaccagcctccaagagctgctgccaacttggtttctgcaccatgggtgtctctgtcttctccggccccattcacttcccagctgccattctcatgtctgctctgctgcagcaactgctggcactgccactgccccctcctccttggcagggggctccatgtagattggcatcaccgatgggggcttcttggacctgcaggtaagaaggctggatgggaaatggcayrggtagtgccagaaagtcccaagagtaagctgggacagaagcagaagacacagtgtcctgggcagggggcagtgccatgaggatgtrgggcattacccaaattgctatgtccctgatactcacgagtagggggaggcagggacccccaccacgaggaagtggtttttcttgcggaagagccgccacagccccttgtggttcccacggacatccagatcccagatgtggaggcactaggatggtagagaggagagaagaatcattgcctggggatgaacaacagtcaagtgtcctccagca

SEQ ID NO: 54273 - DNA, 600 bp, Chicken  19866894306578_3
ggagaccacaacagggggctgaaggcagcccaagatctcattctgcagcctgaaataaatgtccatgttaagtcaccagcctccaagagctgctgccaacttggtttctgcaccatgggtgtctctgtcttctccggccccattcacttcccagctgccattctcatgtctgctctgctgcagcaactgctggcactgccactgccccctcctccttggcagggggctccatgtagattggcatcaccgatgggggcttcttggacctgcaggtaagaaggctggatgggaaatggcayrggtagtgccagaaagtcccaagagtaagctgggacagaagcagaagacacagtgtcctgggcagggggcagtgccatgaggatgtrgggcattacccaaattgctatgtccctgatactcacgagtagggggaggcagggacccccaccacgaggaagtggtttttcttgcggaagagccgccacagccccttgtggttcccacggacatccagatcccagatgtggaggcactaggatggtagagaggagagaagaatcattgcctggggatgaacaacagtcaagtgtcctccagcaa

SEQ ID NO: 54274 - DNA, 600 bp, Chicken  19866894306578_4
gagctgctgccaacttggtttctgcaccatgggtgtctctgtcttctccggccccattcacttcccagctgccattctcatgtctgctctgctgcagcaactgctggcactgccactgccccctcctccttggcagggggctccatgtagattggcatcaccgatgggggcttcttggacctgcaggtaagaaggctggatgggaaatggcayrggtagtgccagaaagtcccaagagtaagctgggacagaagcagaagacacagtgtcctgggcagggggcagtgccatgaggatgtrgggcattacccaaattgctatgtccctgatactcacgagtagggggaggcagggacccccaccacgaggaagtggtttttcttgcggaagagccgccacagccccttgtggttcccacggacatccagatcccagatgtggaggcactaggatggtagagaggagagaagaatcattgcctggggatgaacaacagtcaagtgtcctccagcaagcaaacaaccatcacccttgccctcactaagtggcaacagagagggaacatgagcttgatgatggcagctgagggaaaaacacctc

SEQ ID NO: 54275 - DNA, 599 bp, Chicken  19866894306584_1
  misc_feature (1)..(3): n is any nucleotide
nnnacgtttccaggccaggagaacagcccttgccaccggcttccaggcctggggctggtttttggcagtaagcattttgggggagcgctgcatgcatctcagagtaccgaaataggaaaaacccagcatggccaccggcgctccctcctgtgcctcagaagggggtgagcagcggggggacggccagggagcagcacactgcctcattcctcgcgcagagccagggccctgctgttcatcactgctgctccccggcactgacaggttccccttcgtggcctgcgagccacgagcagcagraagggagagtccaacacaagttgactgtggctcagcacrtgtctgcagactttaaactgcatctcacgacttgcacatataccttggatgcttcagatatttgactgctccgaaacacacacaaaaaaattccccaaaccaaaacgcaaccaccaccttcatatctacgcaaggaaacccctctgtaattcactccctctcctcagcgtatggctcctcaaagccagattcagtgcttctttcgggaaggcatcctgccaacaaattgccaataaagtagtagcacactacacttgtgc

SEQ ID NO: 54276 - DNA, 600 bp, Chicken  19866894306584_2
cttccaggcctggggctggtttttggcagtaagcattttgggggagcgctgcatgcatctcagagtaccgaaataggaaaaacccagcatggccaccggcgctccctcctgtgcctcagaagggggtgagcagcggggggacggccagggagcagcacactgcctcattcctcgcgcagagccagggccctgctgttcatcactgctgctccccggcactgacaggttccccttcgtggcctgcgagccacgagcagcagraagggagagtccaacacaagttgactgtggctcagcacrtgtctgcagactttaaactgcatctcacgacttgcacatataccttggatgcttcagatatttgactgctccgaaacacacacaaaaaaattccccaaaccaaaacgcaaccaccaccttcatatctacgcaaggaaacccctctgtaattcactccctctcctcagcgtatggctcctcaaagccagattcagtgcttctttcgggaaggcatcctgccaacaaattgccaataaagtagtagcacactacacttgtgctatcttaaaatacacagcagaatgtgccaagtttccttat

SEQ ID NO: 54277 - DNA, 571 bp, Chicken  19866894306587_1
gaatgattcaattaatttgaatcaaatcatcagtatgcctgatatttgcagtcatgcttccaaacgagctatgctttgaagggtgttccaggaagaaatgggagtagtgattagggcacatggtgtagcaaatcccaaagctgtgtacttgcatatggcacattttcaaaatggcagtcagatgccattgtaatagctatagtactcttattttccctgctgggatttctccagagtgatttgccttcaggaatgtgtttgcagccagtgtcctgtctgagtcaaagtagacatttcaakttaaatttcaatttcaagttaagttctatttttgctggtgacaggtgttcatcaaattagragacacctgtgttgggtacttgtcctgctgttttacacatttatgcttcccgatgactgaatcatatttgtatttggttattatgttttgtacacatgattataactgaaccttcactttcaaagcaaacaaaataatcttacaagcttacatgccatgctgttttctgaagacttagctctacaccagtaatagaagatcaatcactcc

SEQ ID NO: 54278 - DNA, 510 bp, Chicken  19866894306587_2
aaacgagctatgctttgaagggtgttccaggaagaaatgggagtagtgattagggcacatggtgtagcaaatcccaaagctgtgtacttgcatatggcacattttcaaaatggcagtcagatgccattgtaatagctatagtactcttattttccctgctgggatttctccagagtgatttgccttcaggaatgtgtttgcagccagtgtcctgtctgagtcaaagtagacatttcaakttaaatttcaatttcaagttaagttctatttttgctggtgacaggtgttcatcaaattagragacacctgtgttgggtacttgtcctgctgttttacacatttatgcttcccgatgactgaatcatatttgtatttggttattatgttttgtacacatgattataactgaaccttcactttcaaagcaaacaaaataatcttacaagcttacatgccatgctgttttctgaagacttagctctacaccagtaatagaagatcaatcactcc

SEQ ID NO: 54279 - DNA, 600 bp, Chicken  19866894306609_1
tgcctctcgtgccacatcattactgtgacagtttccttgcccaaactttgtccagtgagttcatctccacaaggggacggtccttcacatccacacatcaaggatggaagggcctctgcctgcctccatcagtcaccatctgtgcagggctgcacttgtgctcacagcagtgatcaacataggaactggcacctgttccacttccacactctctacagattgatgtaaaaacaagcaaaaaaacccaatgaagtcaaagacttcaatcagaattcccttcctaaaaccttgcatatcaartctgccacagtttgctgttcattcctgagctctgtgccagccctgtgcagggctgcatccagtgactcatcttggaatgtctaaaagtgccactacttgcaaaataatccttctgtcaacattcccactcatcagagtggggtcatgtacacagcaaacaaacaagcaagaaaaaaatcccaccttgtcctcaagctttttctggtaactatttaagcttccatttatgttatgcaacagcagaatttgctagggctctgttgactaaagctgatgttctagaagttcagagcacaaata

SEQ ID NO: 54280 - DNA, 536 bp, Chicken  19866894306610_1
tatctttcctttagtctttgcaaaattttaagtttgtcagtttttgagtactaatcagacagagatttatctcctccttctttaattatgaaacgtattcccttactaatgccaacccaaaacagcatcatggacagggagtagtttttgtatgtaaaaacagattttatcaagacttactatcagttttcaattttcatttttttctcagtgccaatgaaatttaaatgctgcagaagtctgatttatttattcatttatttaattccccaaagagtattatgatttaatctccttcayctaaaaaggatggccaacttgcagttgagctatgagacactatctcatccttcaaaggctcagttgtggacacagcatctataaaaaccaggtgtatgacaattaaggcacatagagcttcagagcagagaaacactgcaaatgcaaactttcaggaaggaaatcagtggtaaagtacacatgctctagaaatttagaaacatgccacatacttcaggtgaaaacaaaatgtaata

SEQ ID NO: 54281 - DNA, 600 bp, Chicken  19866894306616_1
catgataatcgctttctctacaggtatatgtaattacattattattaatgtttttaaacattaattattaattattaatctaattacattttttaaagcatgactaggtgttgcacagtttcttagtgccactatgcacaacaaatactggaagaagtggatacaagatgtagctctcctccattccaggccacagccacaactgctcgtttgcatgctgaagcaaattttacctaccggtctcaaaaataagcactgtacttcccttttttatgaaggttctgttgaccgattgagttytcagtagatgagtttgtaagaagggaacaatggacattcaaaatgaacacgtcagacctcacaaagtaaataaggaagccactgccagcagcagtgctaggaggcttttccctrggtgttagggaaagaggcctcttccaggtttccaggtccctgtctagcatgctacgttttagtatgtaagtagtaattactaagtagtaaatacttagtaagtatttactaagattcagaaatgtatttgtctctttgttttcattatatggcatgggaaaagcaaaatctatttctaattaatat

SEQ ID NO: 54282 - DNA, 600 bp, Chicken  19866894306616_2
acagtttcttagtgccactatgcacaacaaatactggaagaagtggatacaagatgtagctctcctccattccaggccacagccacaactgctcgtttgcatgctgaagcaaattttacctaccggtctcaaaaataagcactgtacttcccttttttatgaaggttctgttgaccgattgagttytcagtagatgagtttgtaagaagggaacaatggacattcaaaatgaacacgtcagacctcacaaagtaaataaggaagccactgccagcagcagtgctaggaggcttttccctrggtgttagggaaagaggcctcttccaggtttccaggtccctgtctagcatgctacgttttagtatgtaagtagtaattactaagtagtaaatacttagtaagtatttactaagattcagaaatgtatttgtctctttgttttcattatatggcatgggaaaagcaaaatctatttctaattaatataaaagctttacttctgcatatcctaaggctttggaaaatcaaaagtctggaattgatttttttgggagatcatttgctataaattatttgcgtgaaacaattgacagtgcatgt

SEQ ID NO: 54283 - DNA, 600 bp, Chicken  19866894306619_1
gagatgggtacagagcctcagtggattcggccaggggaacatagaagaccaaggttcaagtccttctagtgatcatttatttatgcaaaacaactactataggatgcgttatgagcaacctgcatgttccctgtgaattatttacttgtggactggtacatccactgggaatacatgagtctggatcaggtaaaattaactagaacacaaactcccagactccaaataaaagcccacaaaaccagggcaaactcagtgcaatagcaacatagagttccacctgtttctcttaagaagaargtcaataagccatgcctgctgagctcatatattcaacattcaaacgttgagggactggtcataagagagccaacaccaagcagtgagatggggtaggtgaccaggtttctcagtctagaatgttaagattgattggcaggttaaaatttgtctcaaacagttgagatagagttttatccagttttcagcatgcaaatggatcacttttagttgtgacatttatagggtttgaagagactagcttgaaccccccaaaatctttgaagcctcctagtaaccacatcattctgaaatgcactg

SEQ ID NO: 54284 - DNA, 600 bp, Chicken  19866894306619_2
aatggatcacttttagttgtgacatttatagggtttgaagagactagcttgaaccccccaaaatctttgaagcctcctagtaaccacatcattctgaaatgcactggggatagtggggaaaagagaaaatgcagggtggcaggaggggacagtgcagtgggaccctggggaggagcattggtgtcaaacagacattccccttgggtccttggtgctctgtagtatttctctgggcagttttggcaggcatatatctgtctctattttgctcagaatttccattcttgtcaaaactgataygaatgttcttactgtaaactgctctcagtaggattgagagttttgactgattgttttcattaaaaagagacaattttttttaatgtgttttaaattatatagtttcatttttttaattcatatttgtttgtcaggataagagaatatattttacacccctcatgttaaaaatgcagttgtcttgacagcaaagaacaggaaaaacattttcccctttcaaagctgtgtttttaatttcctttaatatcttgctatgacagtggacacttgagcaagatcggccattaaaaaaaaaagcaa

SEQ ID NO: 54285 - DNA, 600 bp, Chicken  19866894306632_1
agataaggggcacatacccaggaacccaggacagagcttgcaagtgacagaagcagggccattgcgccagggtgcaacatgaggcagaggcttgtgctagacagcaaggcagacagctagagaaggagtgggaaaacaaaacaaatctgttcatctcacagtccctatttcactctctcggcagaatccagcctctggtttcttcagtttgcatctccttttgagcgataacccaacagggctgccatcccattacaaagcccattccttcagccttatttctctgccgggatgtgaggrgggacaacaagcacgccttctccagcagcagctgcacagcttgcactaaacacacggtgcctggagtaacgctacctctgagaaaattaccaaaagaaatggctcgttttgtaattcacacctgggctacaaatgcagaagagtttgcaataatctccgatgaaatattacattgtttaaagagttcccggtgaaattcacctttaattgatttttgatctgtgcaaaaactctgcagagagagaggagatattagtcatactcctgttttatcgctcctgcgagcgctttctctccttt

SEQ ID NO: 54286 - DNA, 599 bp, Chicken  19866894306639_1
  misc_feature (1)..(38): n is any nucleotide
nnnnnnnnnnnnnnnnnnnnnnnnnnnnnnnnnnnnnnctccacaccttctcccctgcttgtcactactaaaccctgactttacttgtgacaattgtcttcgaaaggattcctccagagtaaaaagctgcatgtgtgtctttgggataaacataaagctcagggcttcagaatggggatattcttttctgtatgtgtggatttaaagcacaacgcttaagttgtgctgtatataaacagcaccaaaccaacttgtgttacagctaagggggaaaaaacctaaggatgatcagaaataatmtgtgccaggmcatggatcagttttgaacaaatctattctgtggctgtgtgcatgaggaagggtatttaaratgcgcactgatctttgtttattactataaattatttatttcttcctttctctggtttcctccctgtattgatgtaaattattcacacatgaaattcagatttgagaaatacacaaacaaagaggattatagtttagtcacccaaaatgattcctccttcagattcaccttgcattctcccgcctcatctcatcacagaattatcagctctaagccaagatattccatg

SEQ ID NO: 54287 - DNA, 599 bp, Chicken  19866894306639_2
  misc_feature (1)..(28): n is any nucleotide
nnnnnnnnnnnnnnnnnnnnnnnnnnnnctccacaccttctcccctgcttgtcactactaaaccctgactttacttgtgacaattgtcttcgaaaggattcctccagagtaaaaagctgcatgtgtgtctttgggataaacataaagctcagggcttcagaatggggatattcttttctgtatgtgtggatttaaagcacaacgcttaagttgtgctgtatataaacagcaccaaaccaacttgtgttacagctaagggggaaaaaacctaaggatgatcagaaataatmtgtgccaggmcatggatcagttttgaacaaatctattctgtggctgtgtgcatgaggaagggtatttaaratgcgcactgatctttgtttattactataaattatttatttcttcctttctctggtttcctccctgtattgatgtaaattattcacacatgaaattcagatttgagaaatacacaaacaaagaggattatagtttagtcacccaaaatgattcctccttcagattcaccttgcattctcccgcctcatctcatcacagaattatcagctctaagccaagatattccatgctgacaaact

SEQ ID NO: 54288 - DNA, 600 bp, Chicken  19866894306639_3
aaccctgactttacttgtgacaattgtcttcgaaaggattcctccagagtaaaaagctgcatgtgtgtctttgggataaacataaagctcagggcttcagaatggggatattcttttctgtatgtgtggatttaaagcacaacgcttaagttgtgctgtatataaacagcaccaaaccaacttgtgttacagctaagggggaaaaaacctaaggatgatcagaaataatmtgtgccaggmcatggatcagttttgaacaaatctattctgtggctgtgtgcatgaggaagggtatttaaratgcgcactgatctttgtttattactataaattatttatttcttcctttctctggtttcctccctgtattgatgtaaattattcacacatgaaattcagatttgagaaatacacaaacaaagaggattatagtttagtcacccaaaatgattcctccttcagattcaccttgcattctcccgcctcatctcatcacagaattatcagctctaagccaagatattccatgctgacaaactagtgtgaatatctggagatgagttactgtccaacttattaataaaagagataacatttagg

SEQ ID NO: 54289 - DNA, 600 bp, Chicken  19866894306639_4
atcagctctaagccaagatattccatgctgacaaactagtgtgaatatctggagatgagttactgtccaacttattaataaaagagataacatttaggaacatttgtaaaagtccattctttgcatgctacctgtgcagaataaagcaatggtagtgtggtcctcattcctcaggctaagtttctttccttggtctcaaaatctgcccaatctcatgtcccactgaagtaaattacaggattttagcccatatctgagcactgctctctacacagttcaagagactgcttatgcccacarattggtcctactgcttcccctcccattgcagggaaagaattccacctgccagataatcttctctgcagcaaataatcacgtcctggcatgcatacagactgtccagcactcctgcagctatagggtctgtgctagagtgggagaacaagtcaatcttaagcatcagaccccatagcaaagtacagaaatctggtccccagagcaccaggttccttttctgcattgcagggactggtgtgggtggggattgaggctgtatgtcatctaacttcagtgatttgccctgacattcgtttctga

SEQ ID NO: 54290 - DNA, 600 bp, Chicken  19866894306639_5
cacatagtttagtagactcagcatattgcaaggtagcagcagtttcttgtaccatcatcagtacagcagaccttgctacagacacttgtacacttgttacactgtgggaatagactctctgcaccctctgcacaggacttcacctctgaggtcaatcccaaacttaagttgcatgctcattaaataatggtactcagagatatcctgctctgctctgcactgatgaggcctcagcttgagtacagtgttctgtttcttctgtttttttcacccttttctgttggaaggttgttatgtgtyaagcaagagatgagaacaacctcagcattctcaacaaagttaataataaaatgtgtttatgcaccagataatccaaaagggaagaggagaaaaagagagggatggaggaggaaggaaaggggagagaagagaaggagagcataaaggaaaagacagtatccatgttttcctcctcttttctcccttttgtaagttttaaggcaatatcatttgcatgtgtctgtgttttttggttacaccaggacaacagttctcttcatactcacataataatgtttttttaaacagctttccttctct

SEQ ID NO: 54291 - DNA, 600 bp, Chicken  19866894306639_6
atattagaaaatagtagaacaggatgggatccagactgtgctgttacagacactgaaagaaaaagagaactgcagagaacaggcatggtctgcattgacctgagtgtcatgatctgtgtattctgttcaagttgagatacgagttgctgcttcactgtgtggacagctcctgactatgaccatagccaaatcatcagctggctacaaaaaatacgcataaatgatctgatactgaccctaggttcccatgtttgaaatggggaaagactacttattttaacacttgttctgaactcttawatactcagagacagtttccttttctcaaacgagttagaaaaaagcccatatataacacctttctaaaacgtatctaatctgacttgaaagatctcaaacaaagtcaatcccacttcctttcctggtaagctgctttagtgtttagctgacctcattgctagaaaatgacaaggttaccttcagcctccaaagttaagctactccaggtggtactgtatatttatctccatcaagagagcttctttccatgtacaagcacctttacatagtgatcctttgacatttgcaatgtccttttat

SEQ ID NO: 54292 - DNA, 600 bp, Chicken  19866894306640_1
cagtgagggatctaggaagtgtgttctgctgatgtaatttcctggaccttgtctgggacttttcttctctttctctatagttctttatttgtaaaggatgggagcagaatagcctaaatgagtgcttactactccaacaacagcagaattcattcctgcactaccttagctttccagtcttccacctctgaaaatgttagtttcatattctttgacattcagcaggcaaattttatgttcagtttatttgagagtatgttaatatagattaaaagggttaacaagatctaactttgctayaggaattctgtagactgtatgcaaagatacaaatactttaaaaaaataaaatttctggtttcttaaaactatgaggattccttgggcctggaaaggatagactacaagtagtgcagaggcagtgattctcaagcatgtcatgaacggccacctgtgaactgaggggaaccattcttctggggcagtcgtgtgactttaaatacagagctgctgtgatgtggttcacctgtctgctggcacagcagtgcgtggtgatcgaaggttctgaacttactgatagcactactgcaattatctatt

SEQ ID NO: 54293 - DNA, 600 bp, Chicken  19866894306648_1
gcatacttgattctttattaatagactttattacagctgtcattcttgtgacctccactagaaatgttaaagaaatcaactctgaacagtaattttcatgacaaaaatggaatgaggtaactctgaatttttaagttatatccagaggttcatttcattactggtattgctttgaatacagtaatcaatcttaagaaagtggtgttagaaagtgaaggctacattttactttgcctatgagactctgtgaaagcttgttgaaaaccctacctacactgccaagctgcagctcagaagaamcattccaaattatttctgtgcaagaccttaagtgaaaaaggattcccaaatcctcacaccctcaagtgatttttctgccaagccatcaagttcttgtgaaagacaattctawggcaaagaacaggattcagtgatacctaaaaggatcaacctaaatgaagtatgaaatgtaaaatgtttttttctgcattgatttcacagcgtcttgcaataatcattccagtctttgtgattgacacttaaaattataacatatacyttttcgaagtgatgtgtctgtaygatcaaatcaatatatag

SEQ ID NO: 54294 - DNA, 600 bp, Chicken  19866894306648_2
tgaggtaactctgaatttttaagttatatccagaggttcatttcattactggtattgctttgaatacagtaatcaatcttaagaaagtggtgttagaaagtgaaggctacattttactttgcctatgagactctgtgaaagcttgttgaaaaccctacctacactgccaagctgcagctcagaagaamcattccaaattatttctgtgcaagaccttaagtgaaaaaggattcccaaatcctcacaccctcaagtgatttttctgccaagccatcaagttcttgtgaaagacaattctawggcaaagaacaggattcagtgatacctaaaaggatcaacctaaatgaagtatgaaatgtaaaatgtttttttctgcattgatttcacagcgtcttgcaataatcattccagtctttgtgattgacacttaaaattataacatatacyttttcgaagtgatgtgtctgtaygatcaaatcaatatatagttgtggtttggcacaaagcatccattattcagtatgctttagaaagtgacattacaccttcattaaaaaagcaggtaagacatatttaagttccatctgagtgatagaaaat

SEQ ID NO: 54295 - DNA, 513 bp, Chicken  19866894306648_3
gaaaaccctacctacactgccaagctgcagctcagaagaamcattccaaattatttctgtgcaagaccttaagtgaaaaaggattcccaaatcctcacaccctcaagtgatttttctgccaagccatcaagttcttgtgaaagacaattctawggcaaagaacaggattcagtgatacctaaaaggatcaacctaaatgaagtatgaaatgtaaaatgtttttttctgcattgatttcacagcgtcttgcaataatcattccagtctttgtgattgacacttaaaattataacatatacyttttcgaagtgatgtgtctgtaygatcaaatcaatatatagttgtggtttggcacaaagcatccattattcagtatgctttagaaagtgacattacaccttcattaaaaaagcaggtaagacatatttaagttccatctgagtgatagaaaatagtaactaacaaagaaacaacataaatactgaatgaagaataactgaagacctacaaatt

SEQ ID NO: 54296 - DNA, 490 bp, Chicken  19866894306648_4
gctgcagctcagaagaamcattccaaattatttctgtgcaagaccttaagtgaaaaaggattcccaaatcctcacaccctcaagtgatttttctgccaagccatcaagttcttgtgaaagacaattctawggcaaagaacaggattcagtgatacctaaaaggatcaacctaaatgaagtatgaaatgtaaaatgtttttttctgcattgatttcacagcgtcttgcaataatcattccagtctttgtgattgacacttaaaattataacatatacyttttcgaagtgatgtgtctgtaygatcaaatcaatatatagttgtggtttggcacaaagcatccattattcagtatgctttagaaagtgacattacaccttcattaaaaaagcaggtaagacatatttaagttccatctgagtgatagaaaatagtaactaacaaagaaacaacataaatactgaatgaagaataactgaagacctacaaatt

SEQ ID NO: 54297 - DNA, 600 bp, Chicken  19866894306651_1
aagcaaacgtagttcaaagtcttatttaaaatgctggcaattctcagcataaaaattaagaggctgtcattaccttggattttatgagctgtttcaaatgtctggagttcgttgtttgcagctcctagtcagaaggaaagaacagctcttagcagcacagattgaaaaacaccaaaaacaatgtatcgtcaacaacttctattaaaaaaaaacaaaaaacaaacaaaaaaaaacacccactaaatattgatacaactaagtcacagaaaaatctcctggttataagctttttataaattrtggtgaaagactgtataactgctgctctaattgtggttaagatcaaagatttggatttmagcaatccactgctggaataagtcgggccctgtttataacaggcaaygtattaatttttggaaacaataaactgccrggaagatattccttgatgattgaagtttgttactgtttcataagatgtctgtaaagtagcaagaagctgaacttcatctattggtgcactttggatgatgcactccattttaatgagattaaaggtttaatgcagataaaagatttttatctgttcrgtgcacc

SEQ ID NO: 54298 - DNA, 600 bp, Chicken  19866894306651_2
gaggctgtcattaccttggattttatgagctgtttcaaatgtctggagttcgttgtttgcagctcctagtcagaaggaaagaacagctcttagcagcacagattgaaaaacaccaaaaacaatgtatcgtcaacaacttctattaaaaaaaaacaaaaaacaaacaaaaaaaaacacccactaaatattgatacaactaagtcacagaaaaatctcctggttataagctttttataaattrtggtgaaagactgtataactgctgctctaattgtggttaagatcaaagatttggatttmagcaatccactgctggaataagtcgggccctgtttataacaggcaaygtattaatttttggaaacaataaactgccrggaagatattccttgatgattgaagtttgttactgtttcataagatgtctgtaaagtagcaagaagctgaacttcatctattggtgcactttggatgatgcactccattttaatgagattaaaggtttaatgcagataaaagatttttatctgttcrgtgcacccgtattctatgcagagatttcagtgtgattcacaaacagggacagcggagagctatgat

SEQ ID NO: 54299 - DNA, 600 bp, Chicken  19866894306651_3
gttcgttgtttgcagctcctagtcagaaggaaagaacagctcttagcagcacagattgaaaaacaccaaaaacaatgtatcgtcaacaacttctattaaaaaaaaacaaaaaacaaacaaaaaaaaacacccactaaatattgatacaactaagtcacagaaaaatctcctggttataagctttttataaattrtggtgaaagactgtataactgctgctctaattgtggttaagatcaaagatttggatttmagcaatccactgctggaataagtcgggccctgtttataacaggcaaygtattaatttttggaaacaataaactgccrggaagatattccttgatgattgaagtttgttactgtttcataagatgtctgtaaagtagcaagaagctgaacttcatctattggtgcactttggatgatgcactccattttaatgagattaaaggtttaatgcagataaaagatttttatctgttcrgtgcacccgtattctatgcagagatttcagtgtgattcacaaacagggacagcggagagctatgatcattctgacagataagagcttttgcmttctttcttaagtacattttc

SEQ ID NO: 54300 - DNA, 600 bp, Chicken  19866894306651_4
aaagaacagctcttagcagcacagattgaaaaacaccaaaaacaatgtatcgtcaacaacttctattaaaaaaaaacaaaaaacaaacaaaaaaaaacacccactaaatattgatacaactaagtcacagaaaaatctcctggttataagctttttataaattrtggtgaaagactgtataactgctgctctaattgtggttaagatcaaagatttggatttmagcaatccactgctggaataagtcgggccctgtttataacaggcaaygtattaatttttggaaacaataaactgccrggaagatattccttgatgattgaagtttgttactgtttcataagatgtctgtaaagtagcaagaagctgaacttcatctattggtgcactttggatgatgcactccattttaatgagattaaaggtttaatgcagataaaagatttttatctgttcrgtgcacccgtattctatgcagagatttcagtgtgattcacaaacagggacagcggagagctatgatcattctgacagataagagcttttgcmttctttcttaagtacattttcttttttattccgtacaaaatgatcagaaca

SEQ ID NO: 54301 - DNA, 515 bp, Chicken  19866894306651_5
taaattrtggtgaaagactgtataactgctgctctaattgtggttaagatcaaagatttggatttmagcaatccactgctggaataagtcgggccctgtttataacaggcaaygtattaatttttggaaacaataaactgccrggaagatattccttgatgattgaagtttgttactgtttcataagatgtctgtaaagtagcaagaagctgaacttcatctattggtgcactttggatgatgcactccattttaatgagattaaaggtttaatgcagataaaagatttttatctgttcrgtgcacccgtattctatgcagagatttcagtgtgattcacaaacagggacagcggagagctatgatcattctgacagataagagcttttgcmttctttcttaagtacattttcttttttattccgtacaaaatgatcagaacatatttctttctgttttctgttctgatcgtgtgcagcatatctgctgaggaaatctttcagccaacccttgtg

SEQ ID NO: 54302 - DNA, 423 bp, Chicken  19866894306651_6
gccctgtttataacaggcaaygtattaatttttggaaacaataaactgccrggaagatattccttgatgattgaagtttgttactgtttcataagatgtctgtaaagtagcaagaagctgaacttcatctattggtgcactttggatgatgcactccattttaatgagattaaaggtttaatgcagataaaagatttttatctgttcrgtgcacccgtattctatgcagagatttcagtgtgattcacaaacagggacagcggagagctatgatcattctgacagataagagcttttgcmttctttcttaagtacattttcttttttattccgtacaaaatgatcagaacatatttctttctgttttctgttctgatcgtgtgcagcatatctgctgaggaaatctttcagccaacccttgtg

SEQ ID NO: 54303 - DNA, 600 bp, Chicken  19866894306652_1
taaggtcagataggcttgctcagagctcatccagtcaggacttaaaaatctccagtgatagaggctgaccatcttgcaggtacaggcagatgtctgttagccccctccccaagctgaccaaggcccactgcctcagcttgatcccacaggacaaccagctcagggccttctgctgaattgccatccagtcattaacgtctgtcttatatgagaggacccagactggcatggtttaaccaacactgcacgggaggtaataatctcttctctagatcagctgaatactttgttaaatgaccrccacttacccaggctgaacctacagatacctggatttttttcttgggagcatttaaaaacgtttgtgtagtcttcagctgtgtagatttttggtttttttcatcagacaacataaaaggcagaacctaagaatagtacagttgaactcaaatacctctgagtgcatgaaatgttattttctcagaaacgttcttgttttatgatacagccaacttctgcagctttcgtctccatggaaacttttaaagtgagttttaaagaatgtttacatggatatattttttaagagaaacaagttgg

SEQ ID NO: 54304 - DNA, 599 bp, Chicken  19866894306654_1
  misc_feature (1)..(85): n is any nucleotide
nnnnnnnnnnnnnnnnnnnnnnnnnnnnnnnnnnnnnnnnnnnnnnnnnnnnnnnnnnnnnnnnnnnnnnnnnnnnnnnnnnnnncatttctttgtgatgtaaccaagtctttggcttttaattgtgttgtgaatcataatctcatggtctgtgagtgtaagcagcacttgcaaatttcatatccaagtggatagtgagtaggaagcttttaaaggatgtgcttttgatttctgcagaaagtatgcttcagtgaagaaagagagcactcccagttaaatttggcatttgcctgttcatakgtaaactatgacaatagtttatccactggtatacagtttcttgttaaacggcattttctttaaaccatcatttctagtggtttctttaaaggcaaaaaaaaatgcagcaagacgtgtgtgtgtgtatatatatatatatatatattccttatacatagtcccagagactgaaggtaaggcgatgaaattcagaatcaccttgtattggccaaaaattatattgatgcatacaaatgcactgcaggtttcagygcacagaagctgtattgttactgttggaaaagaggcttgttttcttt

SEQ ID NO: 54305 - DNA, 574 bp, Chicken  19866894306654_2
gaagaaagagagcactcccagttaaatttggcatttgcctgttcatakgtaaactatgacaatagtttatccactggtatacagtttcttgttaaacggcattttctttaaaccatcatttctagtggtttctttaaaggcaaaaaaaaatgcagcaagacgtgtgtgtgtgtatatatatatatatatatattccttatacatagtcccagagactgaaggtaaggcgatgaaattcagaatcaccttgtattggccaaaaattatattgatgcatacaaatgcactgcaggtttcagygcacagaagctgtattgttactgttggaaaagaggcttgttttcttttttctttagttttgcacattatccaacaaaatgagtcctaaagctttaactgctttgataataaaagtaatagttcttgctaagtggactttgcgtgagattccataaacaaagatttgtgctttcttatggtattttctgatattgagaagaaagtaaaagtaagtgaaaagacagaagtcttttgaataacatttttaaatcaacagcaaaataccaacttgttt

SEQ ID NO: 54306 - DNA, 600 bp, Chicken  19866894306658_1
tctttgacagatgtactgtttcatagggttcactgatatgacatccaagatggggaaaagactttgcaagtggagtataggattggagaaatgcatgggggaaagtgccttaaaatgtggtgtggttcaggtcatacgaggccatggcaacttctctgggtgcaatttaaggcatctcctccctctcctggccccgctctgtttaaggccagtatataaagggaatcagtccatttctgaacatgaatattcccccagaattgctggttctgctgcttgctagcatcctcaaggtcaacrtgagttcatgcctgaactctgctggggtcttctgtgttctcctattagaacacctacagcatatttggtgatggattaacactccaaccttacccatttagaataaggaatgcaaatgccccacgtggcarcttgcccaaccgaaggacacaacattccctcagctcatctctgtccagcagtaaaagtgctcatgtcagttctcagctctgctccccatgtaggcccatatgctgctagccaagccatggtcgcagggctggcagtaaggtgctctgtgctgaaatggacatgcagaaa

SEQ ID NO: 54307 - DNA, 600 bp, Chicken  19866894306658_2
tcatacgaggccatggcaacttctctgggtgcaatttaaggcatctcctccctctcctggccccgctctgtttaaggccagtatataaagggaatcagtccatttctgaacatgaatattcccccagaattgctggttctgctgcttgctagcatcctcaaggtcaacrtgagttcatgcctgaactctgctggggtcttctgtgttctcctattagaacacctacagcatatttggtgatggattaacactccaaccttacccatttagaataaggaatgcaaatgccccacgtggcarcttgcccaaccgaaggacacaacattccctcagctcatctctgtccagcagtaaaagtgctcatgtcagttctcagctctgctccccatgtaggcccatatgctgctagccaagccatggtcgcagggctggcagtaaggtgctctgtgctgaaatggacatgcagaaagggtgcacaggttggtcagagctgagacagtgcaaatggctgtgccagcccacgtgggaaatggtttggaggggtgaaagagtaagcaagagtgctcacactcagacatactgtttcaatattaaatacag

SEQ ID NO: 54308 - DNA, 599 bp, Chicken  19866894306662_1
  misc_feature (1)..(16): n is any nucleotide
nnnnnnnnnnnnnnnntgctgcctatggcaggaaggttggaatggactttaaagatcatccagttccaacccaaaccattctatgatcggtatccttttagttcagactccatctaatgaagcttcctgaaagatgtcaactatttcaggagctttagacactgtcttttcttctgagcaagtagacaagtagtgcgttctgaagcctgtcaggcagtttcattcaatgaaaaccatcaatttctaccttggatattttggttgagccataatctacaggaaggcagagcaaagcaaagyaagactgcttccagttttggtatgaccaagaggtctccctcacagacaagggggcagtggaaaatctgtatatagaaggaagagattacattgggaagagatgataaagcagtttataagactacattaaaatacttgctgaatcttggttaaagttaaatgatatatatatcttttttctttagatatttataaataaagaagataagatcttttaagaaacctgttttttttctgtttacataactgctttatgactgtactaaacctttctaatcctgacatcttctgctgcgtga

SEQ ID NO: 54309 - DNA, 522 bp, Chicken  19866894306669_1
agcgtgcatctgaagggtaatccaagcccacctgattgaggagaagataatttgccatccgaacccacctgaataaggagatgatttgccagtgagttggtctgtatgtcctctgaccaattactggtctaacattggaaaaggagagctctcctgcaggggaaagattttcctggtgccaaaggattgattgcaaaagctcgatggtttaagcaatgcgttccctcctagcatccagctcctggtgatgcatttgctcagctgacatctgtttagcagacagcttgtgttttccagcaygatgcagccaggctgctgagagatgttgtgtttcatggcacctaagctgtgctcgcataattcaagggctctcatcagtctgcactggaaggaagctttgtgtgctgtgtgtgattggcagctacatgtcacagctccatttgcaagcacgtcctcatgctgcagcctgaagctcaccagctcagagtctaaaaatgaacattactgacagacactccgacg

SEQ ID NO: 54310 - DNA, 599 bp, Chicken  19866894306673_1
  misc_feature (1)..(13): n is any nucleotide
nnnnnnnnnnnnnttgtataatgttttccaatgatttccccatgcactggcacaaatgataccaaactcctcatgactcggctttcttctcaaaattgggcagcctcatctgatctgattaatgtttataaatatctaaaaggaggtgggagccaaaaggatgaggccaggctcttcttcatggtgtgcagtgacaggataaggagcaactgcctaaaacatgaacataagtggttccatacctgcgtgacatattgtatagaacctgatttagcagaggggctgaactccatgatttaytggggttccttcctacctctgcaattcggcgattctatgattttattatctataccagcacctaggaacaactttttgctcatggtatatcaactgagaaaatacagattgtcatgggcttaaaccatgtcagaaatgttcacatgctgtttttcatgcctgtaccatggtcttcatctaattcattaacacagcagatctgttatgtttcaaaaactgcattttatctattaattataatacagtactcaratgaatgctcccggtttatttttttcttggcttggcccagtgattta

SEQ ID NO: 54311 - DNA, 498 bp, Chicken  19866894306673_2
tattgtatagaacctgatttagcagaggggctgaactccatgatttaytggggttccttcctacctctgcaattcggcgattctatgattttattatctataccagcacctaggaacaactttttgctcatggtatatcaactgagaaaatacagattgtcatgggcttaaaccatgtcagaaatgttcacatgctgtttttcatgcctgtaccatggtcttcatctaattcattaacacagcagatctgttatgtttcaaaaactgcattttatctattaattataatacagtactcaratgaatgctcccggtttatttttttcttggcttggcccagtgatttacgattttaagggtcctctaaaaaatcccaggcagcttttaaggttattttctccccagaagcacccctgagggaaacgaagcacgagaattgtagtgtctttcccatcgcgccctgtgcactctccctcaaggatatatttcaaagccaaa

SEQ ID NO: 54312 - DNA, 600 bp, Chicken  19866894306679_1
caaagcacttaagcacatgtccacatcccactgaatttggtaggaagtgaagaagtagaggaaaaactgttcgctgtgcagaaagcttctttcagggaaaagaaaaaaaagcaaatgaggatttgcctccatatgatcatagatctttttgtcaaattctttacgtcaggcacaaaccaatagatcatatggagattatgtttattaaacatattcaatcagtcaaaatgaaatattctaatataggctggttcagaccactgaaatagatcagctaattatggtacgtgtgggtgtacrgggtagtcatctgacttttgcttttttagacatcttgcctagcaccctgccccctccccaaaccagccttcagactcttcattacatgcagtattaagccagaggatctgctactaatcagcctttttttaattgctcattttctgaatgattcattcgataggccactgccaaatggtaagagagatcagtgagaacagtggatgtttggtgtacctgcaagagaaatgggatgtacccatgacctggaggacggagcggggtgccacaggggaatcgaaagatgctcctgaggtcttc

SEQ ID NO: 54313 - DNA, 600 bp, Chicken  19866894306683_1
ctaatttaatttttgtaatgctcttgttagtagacaagttctcattatcccacttcttcaaattaggaacagaggcacaggggacagtggtttactgaggtcactcaggaaactgaaggtggagataagaaaataatccagttcccccgtgtttgatgctagtactgttgctgcatcagctttctttggttcctgctgttcactttactcttctgagtctgctttatatgctcttccataccagttttctagttttgaagcactgcctcactgagggatatggaggagagcttcctgccraatgctatttcagcttcagtgaaatgaagctcaaggctaaggttggtkttttgktttttttttcctgttgtataacattctcctgaaacatgtctgttcatagagtggacatggtacctgtggcaaaatgacttgacccctttttgatctgttgccaagcatcaaggaacagagctgctgatctaaagcaatgtctgtacagttgcaactgtttgtggaacagtaataacaggaaaactgtactttgactacaagattagtatggagagcttcatgtaaaacgtgaggataaacaagcta

SEQ ID NO: 54314 - DNA, 600 bp, Chicken  19866894306683_2
cccacttcttcaaattaggaacagaggcacaggggacagtggtttactgaggtcactcaggaaactgaaggtggagataagaaaataatccagttcccccgtgtttgatgctagtactgttgctgcatcagctttctttggttcctgctgttcactttactcttctgagtctgctttatatgctcttccataccagttttctagttttgaagcactgcctcactgagggatatggaggagagcttcctgccraatgctatttcagcttcagtgaaatgaagctcaaggctaaggttggtkttttgktttttttttcctgttgtataacattctcctgaaacatgtctgttcatagagtggacatggtacctgtggcaaaatgacttgacccctttttgatctgttgccaagcatcaaggaacagagctgctgatctaaagcaatgtctgtacagttgcaactgtttgtggaacagtaataacaggaaaactgtactttgactacaagattagtatggagagcttcatgtaaaacgtgaggataaacaagctacacatgcattggtaccttttaaggaacttcattttttggaagttgtgc

SEQ ID NO: 54315 - DNA, 600 bp, Chicken  19866894306683_3
tcttcaaattaggaacagaggcacaggggacagtggtttactgaggtcactcaggaaactgaaggtggagataagaaaataatccagttcccccgtgtttgatgctagtactgttgctgcatcagctttctttggttcctgctgttcactttactcttctgagtctgctttatatgctcttccataccagttttctagttttgaagcactgcctcactgagggatatggaggagagcttcctgccraatgctatttcagcttcagtgaaatgaagctcaaggctaaggttggtkttttgktttttttttcctgttgtataacattctcctgaaacatgtctgttcatagagtggacatggtacctgtggcaaaatgacttgacccctttttgatctgttgccaagcatcaaggaacagagctgctgatctaaagcaatgtctgtacagttgcaactgtttgtggaacagtaataacaggaaaactgtactttgactacaagattagtatggagagcttcatgtaaaacgtgaggataaacaagctacacatgcattggtaccttttaaggaacttcattttttggaagttgtgcttcgaa

SEQ ID NO: 54316 - DNA, 600 bp, Chicken  19866894306687_1
ccccttttcttcgtggacacaactctcattagcgttaatgggagctgagcacatgcattgagaggagatgtttcccaagctctctgataacttgagttgtttggaggaggggggaaaagatggaaaatgttttgatttttttttttcagatgaaagtcacaagcttcaaagtcaagaatgggcaggaacagtccgttccctttctcctgcctgtcaaaaatgagtaaggaacaaagaaacccaatcagatggttttgttttgtgccatggcactggcaggctcttccacaaatatgaagwgtctaagcctaattgaaaatcagcttggtgttaatagcttttacaaagctgtttgcgtcttcctagcgctgcgctggtcttccttggctgccaaattatcctgtttccaagggaacctaatctcacctccttgaccacagcttaccatgtaattgtctttgtcatgcccagtcaagaggagcgagtctctggcatgcgagagagcattgtttggtttgtgcttaattttaggcatctttcccgagggctcttcttgatgtctccaaacttgggccacgatcacaaaccgaccccgtgata

SEQ ID NO: 54317 - DNA, 599 bp, Chicken  19866894306695_1
  misc_feature (1)..(183): n is any nucleotide
nnnnnnnnnnnnnnnnnnnnnnnnnnnnnnnnnnnnnnnnnnnnnnnnnnnnnnnnnnnnnnnnnnnnnnnnnnnnnnnnnnnnnnnnnnnnnnnnnnnnnnnnnnnnnnnnnnnnnnnnnnnnnnnnnnnnnnnnnnnnnnnnnnnnnnnnnnnnnnnnnnnnnnnnnnnnnnnnnnnnnnntgctgtacttactgagatgcttctacctaacatagaatatgtggaagaattttcaaggcatgaaaatgcctgcactttgtggaaatgagcagcactgaaaacaagagatccaaacaratgtctaagagttgaaaagacacaagcctcagcaatttttcagttatttttttcttcctgcacatccgcagagacatcagccagacaaccaacatacatacaggaccaaagcaggcaaattctgggctgttctctgtccagctggacaaaggacagtagaatgggatagaagagttgcggtgaaggggtattaagtccctgtgaggcaactgagaaagaaatcaaaaagaatctgaagtgacagacatagggatgagaaattcaaacctataggaaacccaggttgaccagttaacctg

SEQ ID NO: 54318 - DNA, 600 bp, Chicken  19866894306699_1
gcattgagctcagctggtcccatgctccatctcccttctctctgcagcagaggctgataagtctcatgctctgaggggatgaatcccaaagcagcagccaagcatgtttcttgaagcaactataagtcaacaatagcaactatataaaagttgtgggacctggtggagcagccttggaggcacataagcagggccttgaaggtgcaagcctgaagcagctgcagtagggggagatgagtttacagagacctactgaagcaaggagaagatggggcaaatatcatcagaggcccttccctstttccatgtcactgctgactgcagtggagggatcgagggaattcctgggcagcatctatgaactccacctgttctgtttcagaaccaccatgtggcagtggcagaatctgctgtgatcggctacccacatgagatcaagggagaaggtgagaagcatgctttcctgcacctgaaatgccacatcaacctccacggcacagcatattgctgggaatccccagcagttatcagaagtgtcatgcaaggcctgtttggctttgtgtaaggaaatatcacacgccaaaacgcatttacacagct

SEQ ID NO: 54319 - DNA, 600 bp, Chicken  19866894306705_1
accatactttggctggagtaatctagacccacgctgtaagtgtattacccagtaaatacaatgcatttgatacctatttgaagagacttcactcatttcaaagtctcaggagacaaaatgagttacttctgtggctgaatcattgaacaaaagagaagccattcattatctgaaggaacaggacagcgtacatttcactgcattgtggctggcagctgacagccttaaaaaataagttcttgtcttcaggggagcataaacatcaactttgagcatctcaagaggcattaaaacaacatytgatgagtcaagttgcaatcaagttagccttactagtgaagaacaagaaacatattcaaaattttggcaactgccattttacctttgtcttttcttaatgacagaaaatccactgagatttctcacaagttttcttgagctttataataaagaaaggtgccctgagctatttttcctctcacacccaaccaccttgaaattctaaccttaagagtgaaaaataaaaacataaaaaacaggtaaaattcctgcttctgttctcttacctatttaaaaatactgggtttgtcaccagaaggg

SEQ ID NO: 54320 - DNA, 600 bp, Chicken  19866894306707_1
tttctcctggtacctggagaatgtttatcctgattcccaaattccacgccattatttttctttgggggaggtaagatttttatctggtatatttgtctaccatttataaagtaagttgcataataagttgtttctattctgaattgagaaagcaaacacgttaacctccagcaaagttcaattaacttgcacgtgtatccccatcacctgaaaaatggtgcatctgatacctcagtgaagcagagaaccaaactttgttatgtgtgctggtaattggaatattttcacttctttattacygagctaaatttcaaagaaaaggacattagaagtattcagaaatgcatagttatggttaactttacacacagagcgctttctgtagagcagtggtttgcttaaagagcaaaacttattagagaaagtaaaacaaagactttgctaaataaataaatagtctgaactgaaccctcagaatcctcttcagtgaccagcaaatcctaataattcttaagctttgcagggcatttctctgtttttctttaattcacatgacagtagaggtagcacagatgaatgttgtcctaaataagcaggcac

SEQ ID NO: 54321 - DNA, 600 bp, Chicken  19866894306711_1
gaaattaaaattttcactccactttacaatttgagtcctccagaacagaagataaatcacacaacagacagcttctgcgctataatatcaagctactgggattctcttttacagtgccaatatcaacacgtgtttgtaaaatctctcaggaacggcagagcagaaaggagacaaatcttgaccaactattcattggcctttcgtttcctttagaagtaatggtccctttgagaacacattgttcctttcttctaaaagatctttacagctccctcctcagaacacgttacagggattacyctgtgtcagatgaagtgtggcaaaatgctgctatatgaagcaaagcttttagtgtcacagataaaagctagattttcttccatcattacactgaaatagtaaatcacagaatctaattgatataagctgtcactctggctagctgagagcttgctggcacctcagagagggagttctgcctacctgagggtaagagagcaggctatataaattaaggccagaggcactcaaggaactcactttgcagttttcttgataaacataaaaaaaacctcattctaaattaatccgaaacattct

SEQ ID NO: 54322 - DNA, 599 bp, Chicken  19866894306715_1
  misc_feature (1)..(23): n is any nucleotide
nnnnnnnnnnnnnnnnnnnnnnngctctgcagtataaatcctttaaaaaagcaaagactgagaagtgcacattcagtaggtccaccccaacttgttttacttattttgttacatctttctgtgcgtgcacaccttcctgtgcatgttcgtctaatttaattaactctgcatttaaaataagactggtacgactgtagcagtgtgactttaatgcaataattattcattcaacgcttggtttagatttgaactagcagttgtctgttcctttttctcacgggaatacatgcatttaaactrctaaatggcttggtgtcctccttctgtcagtgtggttctgttgggggttaccactgagaatggtactggggtgaatttgtttcctgtggatggcccatgaataggaagcacytaatgaacagtcagcagggctgagttgttgatgaaattgtgctgcaatcagatgttgataaactccatcacatccatcgggtttgtcatcagtctgytttccatagctgcacttaaggtatgaggagaagaagrcayggaatgctgagtatcttaagaattcctccccttcttctcacaattaaact

SEQ ID NO: 54323 - DNA, 600 bp, Chicken  19866894306715_2
atctttctgtgcgtgcacaccttcctgtgcatgttcgtctaatttaattaactctgcatttaaaataagactggtacgactgtagcagtgtgactttaatgcaataattattcattcaacgcttggtttagatttgaactagcagttgtctgttcctttttctcacgggaatacatgcatttaaactrctaaatggcttggtgtcctccttctgtcagtgtggttctgttgggggttaccactgagaatggtactggggtgaatttgtttcctgtggatggcccatgaataggaagcacytaatgaacagtcagcagggctgagttgttgatgaaattgtgctgcaatcagatgttgataaactccatcacatccatcgggtttgtcatcagtctgytttccatagctgcacttaaggtatgaggagaagaagrcayggaatgctgagtatcttaagaattcctccccttcttctcacaattaaactatccaaatgtctcttcgtggtaatatcagagcattttcttttttccccagaaattaggatctcttatttccggtaacttcaaagtgcaycatatcactaaacactttctcttc

SEQ ID NO: 54324 - DNA, 600 bp, Chicken  19866894306715_3
aatgcaataattattcattcaacgcttggtttagatttgaactagcagttgtctgttcctttttctcacgggaatacatgcatttaaactrctaaatggcttggtgtcctccttctgtcagtgtggttctgttgggggttaccactgagaatggtactggggtgaatttgtttcctgtggatggcccatgaataggaagcacytaatgaacagtcagcagggctgagttgttgatgaaattgtgctgcaatcagatgttgataaactccatcacatccatcgggtttgtcatcagtctgytttccatagctgcacttaaggtatgaggagaagaagrcayggaatgctgagtatcttaagaattcctccccttcttctcacaattaaactatccaaatgtctcttcgtggtaatatcagagcattttcttttttccccagaaattaggatctcttatttccggtaacttcaaagtgcaycatatcactaaacactttctcttcctgctatcaataaatcagctgtttcctcactgtaaatgcactttgccaaggcagagtatgcgatactagctttggaaagcagacagcccatggtata

SEQ ID NO: 54325 - DNA, 600 bp, Chicken  19866894306715_4
tgaactagcagttgtctgttcctttttctcacgggaatacatgcatttaaactrctaaatggcttggtgtcctccttctgtcagtgtggttctgttgggggttaccactgagaatggtactggggtgaatttgtttcctgtggatggcccatgaataggaagcacytaatgaacagtcagcagggctgagttgttgatgaaattgtgctgcaatcagatgttgataaactccatcacatccatcgggtttgtcatcagtctgytttccatagctgcacttaaggtatgaggagaagaagrcayggaatgctgagtatcttaagaattcctccccttcttctcacaattaaactatccaaatgtctcttcgtggtaatatcagagcattttcttttttccccagaaattaggatctcttatttccggtaacttcaaagtgcaycatatcactaaacactttctcttcctgctatcaataaatcagctgtttcctcactgtaaatgcactttgccaaggcagagtatgcgatactagctttggaaagcagacagcccatggtatatctaggtcttacacttaaagtaatacatgttccttca

SEQ ID NO: 54326 - DNA, 600 bp, Chicken  19866894306715_5
actagcagttgtctgttcctttttctcacgggaatacatgcatttaaactrctaaatggcttggtgtcctccttctgtcagtgtggttctgttgggggttaccactgagaatggtactggggtgaatttgtttcctgtggatggcccatgaataggaagcacytaatgaacagtcagcagggctgagttgttgatgaaattgtgctgcaatcagatgttgataaactccatcacatccatcgggtttgtcatcagtctgytttccatagctgcacttaaggtatgaggagaagaagrcayggaatgctgagtatcttaagaattcctccccttcttctcacaattaaactatccaaatgtctcttcgtggtaatatcagagcattttcttttttccccagaaattaggatctcttatttccggtaacttcaaagtgcaycatatcactaaacactttctcttcctgctatcaataaatcagctgtttcctcactgtaaatgcactttgccaaggcagagtatgcgatactagctttggaaagcagacagcccatggtatatctaggtcttacacttaaagtaatacatgttccttcatca

SEQ ID NO: 54327 - DNA, 600 bp, Chicken  19866894306715_6
gatggcccatgaataggaagcacytaatgaacagtcagcagggctgagttgttgatgaaattgtgctgcaatcagatgttgataaactccatcacatccatcgggtttgtcatcagtctgytttccatagctgcacttaaggtatgaggagaagaagrcayggaatgctgagtatcttaagaattcctccccttcttctcacaattaaactatccaaatgtctcttcgtggtaatatcagagcattttcttttttccccagaaattaggatctcttatttccggtaacttcaaagtgcaycatatcactaaacactttctcttcctgctatcaataaatcagctgtttcctcactgtaaatgcactttgccaaggcagagtatgcgatactagctttggaaagcagacagcccatggtatatctaggtcttacacttaaagtaatacatgttccttcatcagtagtatgcgtttctcatgatagctgacttggcaactgggttttggggattggcacaagaaggtgttgattggtcggtgctgaaaattcttcactcttgattttcgaggaacatcataggtgctagcaatggatccatt

SEQ ID NO: 54328 - DNA, 600 bp, Chicken  19866894306718_1
ctctagagcctgcactctgccaatgacctgagaccagggctccacacgcccaggtgccattagtttaaccatcaagagcttcatccatctctgctaagcagttgctttgaccttgcttccaaagcacagaacagtagcaacacaagcagctttacactgcccaattagcaaaaaccaggtgtgagctgcctggcagtatgaggagtctgctcagtagagacctttgcacatcccatgctggatcatgaggcaaagcacagcacgaaagccttcaactctcatctagacaaagccacagcygatctgatcctgcaatactaatagtatttccatggctgagacacagtctccctctaccaaaggagctctcygccagctcagcaaagagccaatgaggtttcaaccctgcaaagatagccaagatagtcagcaagcccattcctacaggccagccaaccacaccattgtattttggcagtaagtgtgcacacctgaacttgcagttacagcccctcgctgttggcaggcagcagagctcaggtcaaagcaatgcccagaactcagctgagtcttcacccacaaaaccatgcgtgcccacgc

SEQ ID NO: 54329 - DNA, 559 bp, Chicken  19866894306718_2
tcaagagcttcatccatctctgctaagcagttgctttgaccttgcttccaaagcacagaacagtagcaacacaagcagctttacactgcccaattagcaaaaaccaggtgtgagctgcctggcagtatgaggagtctgctcagtagagacctttgcacatcccatgctggatcatgaggcaaagcacagcacgaaagccttcaactctcatctagacaaagccacagcygatctgatcctgcaatactaatagtatttccatggctgagacacagtctccctctaccaaaggagctctcygccagctcagcaaagagccaatgaggtttcaaccctgcaaagatagccaagatagtcagcaagcccattcctacaggccagccaaccacaccattgtattttggcagtaagtgtgcacacctgaacttgcagttacagcccctcgctgttggcaggcagcagagctcaggtcaaagcaatgcccagaactcagctgagtcttcacccacaaaaccatgcgtgcccacgctccagccctccacaagaaggtaacaccatt

SEQ ID NO: 54330 - DNA, 600 bp, Chicken  19866894306723_1
aatatataaagaagcaaagatacataaatacataaagaagaaaaatacataaagaaaatacataaagaaacactgtgtaggtgttctgttaattaagacaatgacaaactaatgttatttacagggaattttaaaaatctgacagaacaatctgacagaaagtaagggctggtaatagtctaagcaaggatttcctttttgatacactgatatttcagagctaataaatttaaggacattttataggaaacgccgaccacctacactgaatattgtgccaaaacatcacagattttactwaaagttttgtgtttgacagcttgaagtttaatcctgaaaaacaaagtaaaatactaatgaattcaagacagctcctcagaagataaagaactgtgggagattttgccattgttaattgtgatccaagtcaaaggcacaagatgaaaaggttccacatacagggactcttcacatgtctgaataaatgaacaacttagcaattttcagagcttcttcagaaaggttaacatgcacaatatttctagaagtgagagaagagttttcaaattaagatacaaaagaatgaaataaagatttcct

SEQ ID NO: 54331 - DNA, 600 bp, Chicken  19866894306739_1
gggaatgcgttcaacagtctctatgaggaaaaaatgcatatatcagaatgtttatttgttctgtaactaaattgcacctttttttttctttctttttttttccctcttattcatccaaaatatttaggtggttcatgtaggagtctggaaagaactgaaaacctcagcatttcatctcgctttctttcccagtctccagctctcaggtatgattctgcttgttttgagtgtgtctgtctgtctgtttttactaatgtggtgaggtgttgtactaggccctgggccaaattagaaaggagrcttctgcagccggcaggttggttgtatttttggacaggctgtcctttgtcactatagctgtttggtttcttcctaaagcattactgttattttgttctttttcttcttttgaaaatctgattaactgttttgtgattaatagcttgattgattaagctggaggaatcactgtcatctaatttattcttgaccatttatgctctgcttattcttttgcatttcattcagcttggacaatgaaagtaggcttgttaacttttcctttgttttacagtcctttcttgactcagcctcatttct

SEQ ID NO: 54332 - DNA, 600 bp, Chicken  19866894306741_1
ctacatttaacttgagagttaatttatagcttcagtgaaatgtgagagatgagatggagacatctgcttacagaatatcttgtaattaaactaaaaaaatatatggaaaagggtagtagaaaaaaaaacagagcattgggatagcttgacacaactccatagcgtactctgcagttagtagatgaactaccgtatacaagtttgggaagaataatggcaacaggttctctggctaggctttcatcgttctgactgatcactagaaatcactctctcagctgccacagaatgaattccacygactgtgtactcactgctttaaaaaaaaaaaaaaatctttaagaattagatttttagagttacacatgacccatctttggtttaatcactgctctgctgtttcgtggtttcttaggcaatagatgttgccctttaaggtttttaatttttaatgcaattttaattcataattcaatgatatgtttctgtcatacagttataactgcaaacagcaattgtccatacagcagatcgagaatgtctacatgaagcagcagcaacatacaaagctcagaaatgcttgcttagaacaagtacatt

SEQ ID NO: 54333 - DNA, 599 bp, Chicken  19866894306744_1
  misc_feature (1)..(23): n is any nucleotide
nnnnnnnnnnnnnnnnnnnnnnnaaatgagctatggggattctgctgcaggcctaagtctggactacccagcattaaggcttgccttagctagaaatatatttgatgctaaaagagcttgcagataaattatgcctatgagatagttctttctgtctgatggaggcaatggcgagctgaaccatgaattagtggaatttcttgcttccccaagctcttcagttaccttgcaacagcatgtgcatgctcagggatctggcaaacttacccaacaaggtcagtgggctggtagcaaaggccrtgtgatacctaaacaggcacaagcttggagtctgccccagctacaattacaagcttcaaaaatgacgccctgtaactcctatttctcccccagggtgacccagagtaactgcttggagaatggcttcgggtgcccagagatcataagttttgttgggtaaactttgcccactgactgtagttttggagttaaaaggttgctacttgaactcctgagggaaarcttgcagtgatgacccgtgacagtgggygtgttgctgggtttgaagctctctcctcagatccctgttgtcaacacag

SEQ ID NO: 54334 - DNA, 600 bp, Chicken  19866894306744_2
taccttgcaacagcatgtgcatgctcagggatctggcaaacttacccaacaaggtcagtgggctggtagcaaaggccrtgtgatacctaaacaggcacaagcttggagtctgccccagctacaattacaagcttcaaaaatgacgccctgtaactcctatttctcccccagggtgacccagagtaactgcttggagaatggcttcgggtgcccagagatcataagttttgttgggtaaactttgcccactgactgtagttttggagttaaaaggttgctacttgaactcctgagggaaarcttgcagtgatgacccgtgacagtgggygtgttgctgggtttgaagctctctcctcagatccctgttgtcaacacagggtgacatgaagataatgaccgtgggacacattgcataaattactgaatgactgatacgcctgataagagaaagctaactaagtaaaaaaacaattcttgttcaaccttgttcaccttgttcatycatcaaccacctctagggaaggtgctgagggcctgttccaccatacacctgggtccctgcagaactctggcagcactgcagatgtgaggctaaggaga

SEQ ID NO: 54335 - DNA, 600 bp, Chicken  19866894306744_3
ggatctggcaaacttacccaacaaggtcagtgggctggtagcaaaggccrtgtgatacctaaacaggcacaagcttggagtctgccccagctacaattacaagcttcaaaaatgacgccctgtaactcctatttctcccccagggtgacccagagtaactgcttggagaatggcttcgggtgcccagagatcataagttttgttgggtaaactttgcccactgactgtagttttggagttaaaaggttgctacttgaactcctgagggaaarcttgcagtgatgacccgtgacagtgggygtgttgctgggtttgaagctctctcctcagatccctgttgtcaacacagggtgacatgaagataatgaccgtgggacacattgcataaattactgaatgactgatacgcctgataagagaaagctaactaagtaaaaaaacaattcttgttcaaccttgttcaccttgttcatycatcaaccacctctagggaaggtgctgagggcctgttccaccatacacctgggtccctgcagaactctggcagcactgcagatgtgaggctaaggagattcattattaaggttgcgttggccttta

SEQ ID NO: 54336 - DNA, 600 bp, Chicken  19866894306744_4
ttcgggtgcccagagatcataagttttgttgggtaaactttgcccactgactgtagttttggagttaaaaggttgctacttgaactcctgagggaaarcttgcagtgatgacccgtgacagtgggygtgttgctgggtttgaagctctctcctcagatccctgttgtcaacacagggtgacatgaagataatgaccgtgggacacattgcataaattactgaatgactgatacgcctgataagagaaagctaactaagtaaaaaaacaattcttgttcaaccttgttcaccttgttcatycatcaaccacctctagggaaggtgctgagggcctgttccaccatacacctgggtccctgcagaactctggcagcactgcagatgtgaggctaaggagattcattattaaggttgcgttggcctttacacttccaaatgtgcatagcccagaggctgtgtgagcttttgagcatttcatgagcaaggcaggaggagcctttagcgccgatgagcttcccctagaaacccagtgggggttgtttcccactttcaaagccttttaagcttgtggaagggaaacgcagccagcaggatgtgctg

SEQ ID NO: 54337 - DNA, 600 bp, Chicken  19866894306750_1
gcttggaggctgaaaaaatgtgcatttctgattgcaggtcactatgacaagtgtgtctttgcccttcgggaagagaataaaagcgacatgaatgctgtattgaactacatcttctcacatgctcaggtcaccaagaagaacctgcttgtcacaatgctcattgtaagttgtctatttattctctagaaattggcttctccttgtagttgtgtgtttgatgctttgaaaggtactgaattgacaactctcatccttaaagatgctaactttctagcttctgaagcagcagcagcagcagtrtggaatgtcttcaagttttcttcttggtgaatggcattagcctgtattgacattctagagtggattcactttctcttgatgaaccatgtttggtctcataggcttagcaattgctgtcttacatcttcctgactataagctcagagtgtctcatggcagatctgctgcagtgtgttctgaccagctgtactctgggctgtgtggtaggatctggctgggatccagcatctcagcacaaaggtggtcactccaggcaaggtgtctgaccctagggatgctgtgtgtggctgtccagtgggc

SEQ ID NO: 54338 - DNA, 600 bp, Chicken  19866894306751_1
gccctttgttgatcgctgtgttttgtttttctgtgagctgtgtttgcggtaaggtgcatgacatgtaactgtacttgggagagtttgaaaccgcatgcattttcatagcacttgcaaaggctgattctcctagtcacctatttgtatataagaattacagaacttctgtggaaagagcacacagagttcacgtgaggctgaggttcttcagaagaatgcaaagcaaagctgagcccgagcacccgtgtttcagtgggcctttgttgcccagcagcctgcagtgctgctgctcgctgctgkggtgcttggccagcagtgtgtctgtaagaggytttgccattgtgttggctcttatagatcggttacagcaaagactgaacttctcaggagccaggttctgcttttgagggcacttgtggaagtttattttgagctgttgctgttacacagtgccaaatttggttttctttgtgtgctgtattctgaacagggttcaacatgcttactcttagtgagaatagctccactgaactgtgttatttcataaagggagacatttacgaggcctgttgttggagaggtgttgttcagcagtctcca

SEQ ID NO: 54339 - DNA, 600 bp, Chicken  19866894306751_2
gtgagctgtgtttgcggtaaggtgcatgacatgtaactgtacttgggagagtttgaaaccgcatgcattttcatagcacttgcaaaggctgattctcctagtcacctatttgtatataagaattacagaacttctgtggaaagagcacacagagttcacgtgaggctgaggttcttcagaagaatgcaaagcaaagctgagcccgagcacccgtgtttcagtgggcctttgttgcccagcagcctgcagtgctgctgctcgctgctgkggtgcttggccagcagtgtgtctgtaagaggytttgccattgtgttggctcttatagatcggttacagcaaagactgaacttctcaggagccaggttctgcttttgagggcacttgtggaagtttattttgagctgttgctgttacacagtgccaaatttggttttctttgtgtgctgtattctgaacagggttcaacatgcttactcttagtgagaatagctccactgaactgtgttatttcataaagggagacatttacgaggcctgttgttggagaggtgttgttcagcagtctccattcccaactcctgcagatctgcgtggctttgg

SEQ ID NO: 54340 - DNA, 599 bp, Chicken  19866894306752_1
  misc_feature (1)..(33): n is any nucleotide
nnnnnnnnnnnnnnnnnnnnnnnnnnnnnnnnntgaagactattgcagaggtagtcttcatgcaccctgtgatgctgtggatgcaggaactacagtggtgcaagggaagactggcaaaatagttgttggtttcatagccctcaacaacaaacagaggcagtgggtgataaagtggttttgcctgaggatgctcagcaagtctgctagacaggattaaaacctagaagttgttcctttccagcacgaagatcagtgcttgaggtaatcactgcttcaaggctcagcaaataaagcagatgyagaagttgagctggtttttggctctgcaaagccaatagagacctctcgggattgcaacctgggacagttactccttttgctatataaaacagggtcttatstgaacagccagaaaccacaggttacatcttgttctttataytgaggactgcaaacccttagaaaagatgtggtggtggaaccaagataacacaggctgacagtgctgacacgggagctcctggaggctgagcaaagccctcagagcaaccctgcagcttctgactgcaaagggcaagatgtggtgacagggagacagc

SEQ ID NO: 54341 - DNA, 600 bp, Chicken  19866894306752_10
acacatgaaagcrgrtgggatggagatggggccgctgcacgcccaaatgcctttgattgctcacagagcaccctgcaaacaaagcsagccgcagaccttcaaggcagctttgaagcacaaaaggagatcgtttcgttttgtttgctggaagtcaacatgaaacttttaagaaattctaagaaacaaaagcaagggctgacagctcaccgcgaggaatccttaggaaagcagagggagatcccaaaaaaacycagcagcagcagcaagcactgtagcagcaagcacgctgctgcagcagcycygttagatctcagctatcctcctcgacatcaaagacctccatgctgcagatcaaacacagcttcccccagcaatgccaaccaccactgcctgctgcaaactcagagtccatttctcaggcaggagaaaagcagaagcgtccctgaatgaatccaacatcactcagtctataaatacagcccttgtggcacacatgcatgatgataaagcaaccgcaaagcttactgtcagcccgcctatggggaatacacgctctgcattacattgctttgggtaaacagcgagttcaatcgaggtaag

SEQ ID NO: 54342 - DNA, 600 bp, Chicken  19866894306752_11
acatgaaagcrgrtgggatggagatggggccgctgcacgcccaaatgcctttgattgctcacagagcaccctgcaaacaaagcsagccgcagaccttcaaggcagctttgaagcacaaaaggagatcgtttcgttttgtttgctggaagtcaacatgaaacttttaagaaattctaagaaacaaaagcaagggctgacagctcaccgcgaggaatccttaggaaagcagagggagatcccaaaaaaacycagcagcagcagcaagcactgtagcagcaagcacgctgctgcagcagcycygttagatctcagctatcctcctcgacatcaaagacctccatgctgcagatcaaacacagcttcccccagcaatgccaaccaccactgcctgctgcaaactcagagtccatttctcaggcaggagaaaagcagaagcgtccctgaatgaatccaacatcactcagtctataaatacagcccttgtggcacacatgcatgatgataaagcaaccgcaaagcttactgtcagcccgcctatggggaatacacgctctgcattacattgctttgggtaaacagcgagttcaatcgaggtaagag

SEQ ID NO: 54343 - DNA, 600 bp, Chicken  19866894306752_2
aagggaagactggcaaaatagttgttggtttcatagccctcaacaacaaacagaggcagtgggtgataaagtggttttgcctgaggatgctcagcaagtctgctagacaggattaaaacctagaagttgttcctttccagcacgaagatcagtgcttgaggtaatcactgcttcaaggctcagcaaataaagcagatgyagaagttgagctggtttttggctctgcaaagccaatagagacctctcgggattgcaacctgggacagttactccttttgctatataaaacagggtcttatstgaacagccagaaaccacaggttacatcttgttctttataytgaggactgcaaacccttagaaaagatgtggtggtggaaccaagataacacaggctgacagtgctgacacgggagctcctggaggctgagcaaagccctcagagcaaccctgcagcttctgactgcaaagggcaagatgtggtgacagggagacagcctccatcttggccacagcctatcctgctttcttctccctgacaccccccaaaccacgagagagcagatgtgccttctgcaagttgggtgcactctgaatctg

SEQ ID NO: 54344 - DNA, 600 bp, Chicken  19866894306752_3
aacaacaaacagaggcagtgggtgataaagtggttttgcctgaggatgctcagcaagtctgctagacaggattaaaacctagaagttgttcctttccagcacgaagatcagtgcttgaggtaatcactgcttcaaggctcagcaaataaagcagatgyagaagttgagctggtttttggctctgcaaagccaatagagacctctcgggattgcaacctgggacagttactccttttgctatataaaacagggtcttatstgaacagccagaaaccacaggttacatcttgttctttataytgaggactgcaaacccttagaaaagatgtggtggtggaaccaagataacacaggctgacagtgctgacacgggagctcctggaggctgagcaaagccctcagagcaaccctgcagcttctgactgcaaagggcaagatgtggtgacagggagacagcctccatcttggccacagcctatcctgctttcttctccctgacaccccccaaaccacgagagagcagatgtgccttctgcaagttgggtgcactctgaatctgaggtcccactgccacagccatccctaaaacacagcagcacc

SEQ ID NO: 54345 - DNA, 600 bp, Chicken  19866894306752_4
gcatccagacctgcaccagcttcatcacttacgtttggcatagacatcccgggcaggacacgcctgtgatctccaacttgcgcaggttttcacagacaccatactctgcaatgacacagataacaacgtcagctctggcattgaggcctctgctatgcaggatccaacagcgagatgcgaggtgcactcttgcaagccgggccctcagtctgagaatcttactgctgttctgcagggaaaacgaacaactggaggtaattgcattgcagtttgggaatccagcactttccaagcaatgcytgcaacaaacacacaacagagcaaagctccagaggctgacatctacactgcaaggggtgtgaaatgggagagacggactcgttacagctccraatgcgtgcccatttagatcaaatcatgagagtgcatagtaattatttactcccactgagctacccaacagagaaagctgcttattaggatccaaagaaaaggtcacgggcttaaaaaaaagaatgaaatggagacataaaacagacatcagcacgtacaaatatggttacacatgaaagcrgrtgggatggagatggggccgctgca

SEQ ID NO: 54346 - DNA, 600 bp, Chicken  19866894306752_5
cagacaccatactctgcaatgacacagataacaacgtcagctctggcattgaggcctctgctatgcaggatccaacagcgagatgcgaggtgcactcttgcaagccgggccctcagtctgagaatcttactgctgttctgcagggaaaacgaacaactggaggtaattgcattgcagtttgggaatccagcactttccaagcaatgcytgcaacaaacacacaacagagcaaagctccagaggctgacatctacactgcaaggggtgtgaaatgggagagacggactcgttacagctccraatgcgtgcccatttagatcaaatcatgagagtgcatagtaattatttactcccactgagctacccaacagagaaagctgcttattaggatccaaagaaaaggtcacgggcttaaaaaaaagaatgaaatggagacataaaacagacatcagcacgtacaaatatggttacacatgaaagcrgrtgggatggagatggggccgctgcacgcccaaatgcctttgattgctcacagagcaccctgcaaacaaagcsagccgcagaccttcaaggcagctttgaagcacaaaaggagatcgt

SEQ ID NO: 54347 - DNA, 600 bp, Chicken  19866894306752_6
gaatccagcactttccaagcaatgcytgcaacaaacacacaacagagcaaagctccagaggctgacatctacactgcaaggggtgtgaaatgggagagacggactcgttacagctccraatgcgtgcccatttagatcaaatcatgagagtgcatagtaattatttactcccactgagctacccaacagagaaagctgcttattaggatccaaagaaaaggtcacgggcttaaaaaaaagaatgaaatggagacataaaacagacatcagcacgtacaaatatggttacacatgaaagcrgrtgggatggagatggggccgctgcacgcccaaatgcctttgattgctcacagagcaccctgcaaacaaagcsagccgcagaccttcaaggcagctttgaagcacaaaaggagatcgtttcgttttgtttgctggaagtcaacatgaaacttttaagaaattctaagaaacaaaagcaagggctgacagctcaccgcgaggaatccttaggaaagcagagggagatcccaaaaaaacycagcagcagcagcaagcactgtagcagcaagcacgctgctgcagcagcycygttagatctca

SEQ ID NO: 54348 - DNA, 600 bp, Chicken  19866894306752_7
atccagcactttccaagcaatgcytgcaacaaacacacaacagagcaaagctccagaggctgacatctacactgcaaggggtgtgaaatgggagagacggactcgttacagctccraatgcgtgcccatttagatcaaatcatgagagtgcatagtaattatttactcccactgagctacccaacagagaaagctgcttattaggatccaaagaaaaggtcacgggcttaaaaaaaagaatgaaatggagacataaaacagacatcagcacgtacaaatatggttacacatgaaagcrgrtgggatggagatggggccgctgcacgcccaaatgcctttgattgctcacagagcaccctgcaaacaaagcsagccgcagaccttcaaggcagctttgaagcacaaaaggagatcgtttcgttttgtttgctggaagtcaacatgaaacttttaagaaattctaagaaacaaaagcaagggctgacagctcaccgcgaggaatccttaggaaagcagagggagatcccaaaaaaacycagcagcagcagcaagcactgtagcagcaagcacgctgctgcagcagcycygttagatctcagc

SEQ ID NO: 54349 - DNA, 600 bp, Chicken  19866894306752_8
ctgcaaggggtgtgaaatgggagagacggactcgttacagctccraatgcgtgcccatttagatcaaatcatgagagtgcatagtaattatttactcccactgagctacccaacagagaaagctgcttattaggatccaaagaaaaggtcacgggcttaaaaaaaagaatgaaatggagacataaaacagacatcagcacgtacaaatatggttacacatgaaagcrgrtgggatggagatggggccgctgcacgcccaaatgcctttgattgctcacagagcaccctgcaaacaaagcsagccgcagaccttcaaggcagctttgaagcacaaaaggagatcgtttcgttttgtttgctggaagtcaacatgaaacttttaagaaattctaagaaacaaaagcaagggctgacagctcaccgcgaggaatccttaggaaagcagagggagatcccaaaaaaacycagcagcagcagcaagcactgtagcagcaagcacgctgctgcagcagcycygttagatctcagctatcctcctcgacatcaaagacctccatgctgcagatcaaacacagcttcccccagcaatgccaaccacca

SEQ ID NO: 54350 - DNA, 600 bp, Chicken  19866894306752_9
agaatgaaatggagacataaaacagacatcagcacgtacaaatatggttacacatgaaagcrgrtgggatggagatggggccgctgcacgcccaaatgcctttgattgctcacagagcaccctgcaaacaaagcsagccgcagaccttcaaggcagctttgaagcacaaaaggagatcgtttcgttttgtttgctggaagtcaacatgaaacttttaagaaattctaagaaacaaaagcaagggctgacagctcaccgcgaggaatccttaggaaagcagagggagatcccaaaaaaacycagcagcagcagcaagcactgtagcagcaagcacgctgctgcagcagcycygttagatctcagctatcctcctcgacatcaaagacctccatgctgcagatcaaacacagcttcccccagcaatgccaaccaccactgcctgctgcaaactcagagtccatttctcaggcaggagaaaagcagaagcgtccctgaatgaatccaacatcactcagtctataaatacagcccttgtggcacacatgcatgatgataaagcaaccgcaaagcttactgtcagcccgcctatggggaatacac

SEQ ID NO: 54351 - DNA, 599 bp, Chicken  19866894306753_1
  misc_feature (1)..(22): n is any nucleotide
nnnnnnnnnnnnnnnnnnnnnnttgcagagccaaaaaccagctcaacttctgcatctgctttatttgctgagccttgaagcagtgattacctcaagcactgatcttcgtgctggaaaggaacaacttctagggttttaatcctgtctagcagacttgctgagcatcctcaggcaaaaccactttatcacccactgcctctgtttgttgttgagggctatgaaaccaacaactattttgccagtcttcccttgcaccgctgtagttcctgcatccacagcatcacagggtgcatgaggacyacctctgcaatagtcttcactgtgttcctgaggaaggactgtgctgtgcctttatccattcagcaatcccaaccagcatggttgctaaccagggttagtcaagcactgctcagggtgcttggcagccttctctggcttcagagggtgtgctgtcctagcaatcctgctcggatttaaccaacagttagtggctttggaacagtttcttggtggtgtgaccccccctcccyrttttctctgctgtcccattagcctccttaattgcagaggagttaatttggagctactggtagatgtca

SEQ ID NO: 54352 - DNA, 600 bp, Chicken  19866894306753_2
ctattttgccagtcttcccttgcaccgctgtagttcctgcatccacagcatcacagggtgcatgaggacyacctctgcaatagtcttcactgtgttcctgaggaaggactgtgctgtgcctttatccattcagcaatcccaaccagcatggttgctaaccagggttagtcaagcactgctcagggtgcttggcagccttctctggcttcagagggtgtgctgtcctagcaatcctgctcggatttaaccaacagttagtggctttggaacagtttcttggtggtgtgaccccccctcccyrttttctctgctgtcccattagcctccttaattgcagaggagttaatttggagctactggtagatgtcacctaagcttttccgtgcactgaatgtgcttctgcaggaaacagtgtgagaaactgggaactgagatctggtgttagaaagcagcactaacccaagctgccctccgtgcacttacttctcagacagtgatgctcatgactgtcacacaacagagctttgggggggaccacttttacttccccggatgtcatttgtaactgttatcttgggccaaattctgtgtcagtaaccc

SEQ ID NO: 54353 - DNA, 600 bp, Chicken  19866894306753_3
tattttgccagtcttcccttgcaccgctgtagttcctgcatccacagcatcacagggtgcatgaggacyacctctgcaatagtcttcactgtgttcctgaggaaggactgtgctgtgcctttatccattcagcaatcccaaccagcatggttgctaaccagggttagtcaagcactgctcagggtgcttggcagccttctctggcttcagagggtgtgctgtcctagcaatcctgctcggatttaaccaacagttagtggctttggaacagtttcttggtggtgtgaccccccctcccyrttttctctgctgtcccattagcctccttaattgcagaggagttaatttggagctactggtagatgtcacctaagcttttccgtgcactgaatgtgcttctgcaggaaacagtgtgagaaactgggaactgagatctggtgttagaaagcagcactaacccaagctgccctccgtgcacttacttctcagacagtgatgctcatgactgtcacacaacagagctttgggggggaccacttttacttccccggatgtcatttgtaactgttatcttgggccaaattctgtgtcagtaaccct

SEQ ID NO: 54354 - DNA, 600 bp, Chicken  19866894306768_1
gtaattcaacagtttgtaatactcaccattagtttatgtgtcactgaatgtagtaataacagatttctaattttctaatacagtgtattacagaatggaatttttgtctattctcatcactttttaatgagagcaagtgaatgtttggtatctgtaagtaaaggataaagaaactgattgtactgatgatgcttcaggtgagtagtaaagccacatacatctagggtagtgcaaaattcattttataagttaaacatcttaggaaatttcctagaacatcttaggaagtttcccagaacrtcttagaaatttcctaaacatcttaggaagtttccttaggtaatttaataatttctaaaagactagggctgacaaaacaaaaagcaaacaaaaaacttcagagactgaacgctagtcctgtaattttgaaaatgtcagctgacttaatgcctaactgtggaggtatataaattccacaattgtgattttatatgtatccaaggtgataaaaggttccccttttgtacatgaatagtgtccctttcataatgacaagcctgggaagcttctgtttgtctttaagtaaaatccattctctgt

SEQ ID NO: 54355 - DNA, 600 bp, Chicken  19866894306769_1
catgattacacacccactagcgcactggaagaggtaaacacaataaaataagttttaatacaaatgggagtttagctggtaaagaacctattgaaggaagcataaggatcttctcaggcatcaagagagatggtagtaaagtaagtatagtcatcctgtaaagttctttccagtgcttgtatccagattaaaagcaaaacaaaaaataacctttcagttgtgtttcttgcttggcaactgaagcagatgattttgacaagatttaacatgcactgttaaatcccccccatgagaaagagrctgagagatgttgaacacagcatgagatatctttcctcctttattggcattgtatttataaaacgagcatagtcctgagctgtggtccaaaaaagttaattttttaggtagatggagtagcgcagcgtgtaaaatcaagagtgacagatccgatccaattcatatttaatttttgtccagtgtaaaaagacacatttacagatgcataactcttatattctttctaagttgttgcatcgaaagtccttgatgaagcagcgtgtgtttgaaattgagagtatatacgtctcttaatgagta

SEQ ID NO: 54356 - DNA, 599 bp, Chicken  19866894306775_1
  misc_feature (1)..(66): n is any nucleotide
nnnnnnnnnnnnnnnnnnnnnnnnnnnnnnnnnnnnnnnnnnnnnnnnnnnnnnnnnnnnnnnnnnatccgaacaaaatgtttgtcaaaaatgatggatttcgtggtcttggcaccatctcccaggcaaatagttttgtgcctgaaagagtgtgaaattgacataaaatgtttcctgaaaccggattcttaataagaagaccgagagtaaataaaatcattttaactgagctcaaaatgaacataagtgaatgcaaagaaatactgcttttgcatctgttttctccacctccccctctcygcatttgcacacacacaaaaatgacctaaaagggaggatattaagatttatcttggcagtaagaatcaacaaaattataaatgtcatggtatcatgtaggctatcaggcgactgacgctggacatgttcaaaccgaactgagcaaacacattttgtttgcattcaagctaatgcctgaacactggagttaacctacacacagggcaagtgcaaggtggtttccctaacctaacaaaccaagatgctgactgtgtagtctgaactatctcattctgaaccctcgtgttgcatttgtctgt

SEQ ID NO: 54357 - DNA, 600 bp, Chicken  19866894306791_1
gagacgaaggactcgctggtgcggctcgccaagggctgcaacgccagctccccggcccaacagtggaaatgggtctcacgcaaccgcctcttcaacgtgggggccatgcaatgcctgggggtgtcgtggcacgggggcaatgccacggctggcctgcaccccttggccacctacgagtgcgaccgcgagtctgtcaacatgcgctggagctgccgtggtctcggggagcagctctcacagcacctcggggcccgaccagccaacacctcgctggataggggtgaccaggcacgcagctcrcagtggaggacatatggaactgaggaggatctgtgctccgtgccctattctggtaaggcccacttgctgggctcaccatctgcgtcccttggtgcttcatagcatcgcagcatggttgggttggaggggacacaaggcccccacaggtcttaccccttgctgtgggttggttgcccccctccagatcggaccccggaattggatgcagtattccaaatgggacttcccttctgttagtgttctttgccaatctgaataattcagtggttctgtatcagcacagtggtgcagtcgctgtcg

SEQ ID NO: 54358 - DNA, 600 bp, Chicken  19866894306793_1
tgttcttacaaacacacaacatttaatacagctgacagggaaaaaaaaaaaaaggccatttctataatctttttttagatcttttttatttcagttatcacagatcattgcacattagcctgttatgtccatagtctcattcaccatagtaaactaatatttccaagaggctatgctgaatagctagctcgcatttttaatactagctctcaaggaccaagttccatccatgggataaaataacttatactgaattccattctaccatagcagacttttctctggtagttgagatagctwaggcatacactgcaatgtatatgtattaaataggattaatctcaattaatttaaggcatttaaatctgagttggccatcctcatcttctcttactataatttgagaaaagtaaggcacaataaaggatgtaaaaataacacacatgatcatgttccttccaagttcctgtttgtctccactaactacaatgtggtgagtagttcaggtactgttgtaactttcattgtctaaggacaaaggtgaagcaaagtttgcagacagagttaatgccttttacctgaacaactattagtgttggg

SEQ ID NO: 54359 - DNA, 600 bp, Chicken  19866894306793_2
actataatttgagaaaagtaaggcacaataaaggatgtaaaaataacacacatgatcatgttccttccaagttcctgtttgtctccactaactacaatgtggtgagtagttcaggtactgttgtaactttcattgtctaaggacaaaggtgaagcaaagtttgcagacagagttaatgccttttacctgaacaactattagtgttgggaaaggtattaaaacttttggccattgcagtctttctgttttgaagccggagctgtataactgaaatcttgccatttcccagctataccagtygatccagtaaagtttcagctctacctataaacctgaacttagttctgatggaaatgtatacatcagaaacatttccatttggtcacataagcccaccttgaagctcggtaatkcttttgtaataattactgttttatttgcagattagaactcagaattaaatacagcctgctgggagcacttgttctcaaagttcttgtttacacttcacttacagctctgtaccttgctcaccttgtttaactacctaataaatatctcacttccataaaagttagatattcggtactaacataacac

SEQ ID NO: 54360 - DNA, 600 bp, Chicken  19866894306793_3
ggtactgttgtaactttcattgtctaaggacaaaggtgaagcaaagtttgcagacagagttaatgccttttacctgaacaactattagtgttgggaaaggtattaaaacttttggccattgcagtctttctgttttgaagccggagctgtataactgaaatcttgccatttcccagctataccagtygatccagtaaagtttcagctctacctataaacctgaacttagttctgatggaaatgtatacatcagaaacatttccatttggtcacataagcccaccttgaagctcggtaatkcttttgtaataattactgttttatttgcagattagaactcagaattaaatacagcctgctgggagcacttgttctcaaagttcttgtttacacttcacttacagctctgtaccttgctcaccttgtttaactacctaataaatatctcacttccataaaagttagatattcggtactaacataacactttataggcagagaagcattatccaaatgaaaaacaagaagaaagaagaaataaagagaacaataccaggaaaatggaccgattcaatgcttctgaaagaattctcttcagag

SEQ ID NO: 54361 - DNA, 600 bp, Chicken  19866894306800_1
gttacatttttcagggaggtctttgttctacattaggaaaaaaaagatctatgttgaaacgttcctctcacggtaggagcttttttatcaatttacttaagaaattatgctaaaaaaatacacaaagacaagtttttcttacttttccacttgtctgaaaaccagaactagacagaattagataaaaatgaaatgaaactttcacctgagaaaatcactgccttccattaaggatttcatcaatgcacattttagcagattaaaaaaaaattctgttagccagggggacaaagagactayatactaattattccttttgatcttcacttgcaggaagacatctgacaactgtcakagataaagcttacaattaggcagcttttttaaataattaagtacaggaactgaagctttccctagacttgccttctttcttctacctcgggctgtactattgcctagccagctgagaagtcacatccagccactttccccygttgtcaacaaatggcaaataaaagtcagtaaatgaagctctagtccacccaaatcactaaggtgactaagttaccgccatgctatgtagttatctagtagaaa

SEQ ID NO: 54362 - DNA, 600 bp, Chicken  19866894306800_2
gaaacgttcctctcacggtaggagcttttttatcaatttacttaagaaattatgctaaaaaaatacacaaagacaagtttttcttacttttccacttgtctgaaaaccagaactagacagaattagataaaaatgaaatgaaactttcacctgagaaaatcactgccttccattaaggatttcatcaatgcacattttagcagattaaaaaaaaattctgttagccagggggacaaagagactayatactaattattccttttgatcttcacttgcaggaagacatctgacaactgtcakagataaagcttacaattaggcagcttttttaaataattaagtacaggaactgaagctttccctagacttgccttctttcttctacctcgggctgtactattgcctagccagctgagaagtcacatccagccactttccccygttgtcaacaaatggcaaataaaagtcagtaaatgaagctctagtccacccaaatcactaaggtgactaagttaccgccatgctatgtagttatctagtagaaattaataatcagtgacttttctaatgatgcactaaaggaaagttacttgatttatt

SEQ ID NO: 54363 - DNA, 600 bp, Chicken  19866894306800_3
aactttcacctgagaaaatcactgccttccattaaggatttcatcaatgcacattttagcagattaaaaaaaaattctgttagccagggggacaaagagactayatactaattattccttttgatcttcacttgcaggaagacatctgacaactgtcakagataaagcttacaattaggcagcttttttaaataattaagtacaggaactgaagctttccctagacttgccttctttcttctacctcgggctgtactattgcctagccagctgagaagtcacatccagccactttccccygttgtcaacaaatggcaaataaaagtcagtaaatgaagctctagtccacccaaatcactaaggtgactaagttaccgccatgctatgtagttatctagtagaaattaataatcagtgacttttctaatgatgcactaaaggaaagttacttgatttattttttttttcagaaatattcattatctagctattcagtcattaaagtctctcctgaagatatttacaactaaaacataaaaaaataaaaccatcatgagcaaaagatgaaacagaaaaagcaaagatgaaaatgcccaagga

SEQ ID NO: 54364 - DNA, 600 bp, Chicken  19866894306814_1
ggcagcattcagaatacatctagaatcatggatttcagaaacagaaaacctgtgttaaatcactggctgtattgctgagatgctgaatgaacagtactttgttcaaagtatcttctttaaaagtcgatccatctgaggctccaattgatattttctgggcagagacactgtttctctatgtcctcaaaatccttaatatcactgggtcgatatcaactataaatatttctttatgagaatgagacttggagacattttaagcttaacagagccttgtttgggctgaatgagcatcagtcrgggatctgtatgcacagtgcttcatcctactgcttacataaaatggctgttatgctaattagtaacctagagatagcagccaacaggaatgatttattaatgtttccaatgagagtggtttaatgaatacaaatgccacagccatgcagatggggcagtgtctgcctgactactctgagaaagtggaaaggaagatttaggaagaacttaagaaatggatgcttcagttccttcagaaagttaagctttctgataatcctcagatcatcagtttttattttggttcatcctacaacacaa

SEQ ID NO: 54365 - DNA, 599 bp, Chicken  19866894306815_1
  misc_feature (1)..(91): n is any nucleotide
nnnnnnnnnnnnnnnnnnnnnnnnnnnnnnnnnnnnnnnnnnnnnnnnnnnnnnnnnnnnnnnnnnnnnnnnnnnnnnnnnnnnnnnnnnncaggttgcttctgaatctgccaccctgatgctggcattggccgatcccgacgtgttcttgggttgaacatcttaaccaataggctttttttctagtgatgtctcttccagtgtttttttttttcctgcttcttgttgatgaaatgctttctgaagttctgcagtcctccctgactttgaggttggaggggtccttcagagccaggcctygctcccttgtctgcttccccacactgatgtgcaggaagcaaggagaaaaggctcttatagttcttgttgacgatgctttgaaaagattcatgttggtagatgtgttgcgaagagtggggatagctgcttgagtgcaaaatgatgagggatgtgtgtttycagagggtcctgatgcatttagatctttcctccaggaggttaatctgtctttgttagtttagtagcagtagtggaactcagagtctcctttagatgggtttgcaacacctgcttttcgatggcttctggaacaaatgttg

SEQ ID NO: 54366 - DNA, 600 bp, Chicken  19866894306815_2
atcttaaccaataggctttttttctagtgatgtctcttccagtgtttttttttttcctgcttcttgttgatgaaatgctttctgaagttctgcagtcctccctgactttgaggttggaggggtccttcagagccaggcctygctcccttgtctgcttccccacactgatgtgcaggaagcaaggagaaaaggctcttatagttcttgttgacgatgctttgaaaagattcatgttggtagatgtgttgcgaagagtggggatagctgcttgagtgcaaaatgatgagggatgtgtgtttycagagggtcctgatgcatttagatctttcctccaggaggttaatctgtctttgttagtttagtagcagtagtggaactcagagtctcctttagatgggtttgcaacacctgcttttcgatggcttctggaacaaatgttggagatttgcttcctcttytaaattttacttagagcttctaacatctttccagctatcagcatctcgtcttagttcccaatgaccatctagtttgttcctggaatcgtagacatcctttcccagacttttacataacgtggttcctctgatttttgttctc

SEQ ID NO: 54367 - DNA, 600 bp, Chicken  19866894306815_3
cccacactgatgtgcaggaagcaaggagaaaaggctcttatagttcttgttgacgatgctttgaaaagattcatgttggtagatgtgttgcgaagagtggggatagctgcttgagtgcaaaatgatgagggatgtgtgtttycagagggtcctgatgcatttagatctttcctccaggaggttaatctgtctttgttagtttagtagcagtagtggaactcagagtctcctttagatgggtttgcaacacctgcttttcgatggcttctggaacaaatgttggagatttgcttcctcttytaaattttacttagagcttctaacatctttccagctatcagcatctcgtcttagttcccaatgaccatctagtttgttcctggaatcgtagacatcctttcccagacttttacataacgtggttcctctgatttttgttctctctgctgataacctctgcttgatttcagggaagctgttcccatggcgtgtggggaatgcaacgcttcagcacctgctcaggatccagcacgcaggaacatcatccacttccagcacagagaactgaagtgcagatagcagaacccaactgcagggtaa

SEQ ID NO: 54368 - DNA, 599 bp, Chicken  19866894306820_1
  misc_feature (1)..(110): n is any nucleotide
nnnnnnnnnnnnnnnnnnnnnnnnnnnnnnnnnnnnnnnnnnnnnnnnnnnnnnnnnnnnnnnnnnnnnnnnnnnnnnnnnnnnnnnnnnnnnnnnnnnnnnnnnnnnnncagaaaggcaggtgcctggtccagggtgcgctcagggtcactggagatgtcctcttcagactcctcccaggatgatgagaagccggtggacgaggctgacgatgaggacagctttcggacaggcaggctgctggggggcacggcacccgcctcctcctctgggccccccaggtctgtgatgatgacggcrggaatgctaccaccaacgactgggtactggccctccagtcctgaggtggccatcaccacctcacctcgctgcggrctgrgatctgatggctccgtccccaccgcctgccccacggcctgcccctccatcaccacgaggcccgcaacgctcggccgatcctgggccccaccagcgtcaggatccttgctctccccacaggcctgtggccggggtcctgtgccgagccccatcatcggcaccgtggggctggcaggccggggtgaggatggccggggtgaggaaggccgaggcgaggagag

SEQ ID NO: 54369 - DNA, 599 bp, Chicken  19866894306820_2
  misc_feature (1)..(35): n is any nucleotide
nnnnnnnnnnnnnnnnnnnnnnnnnnnnnnnnnnncagaaaggcaggtgcctggtccagggtgcgctcagggtcactggagatgtcctcttcagactcctcccaggatgatgagaagccggtggacgaggctgacgatgaggacagctttcggacaggcaggctgctggggggcacggcacccgcctcctcctctgggccccccaggtctgtgatgatgacggcrggaatgctaccaccaacgactgggtactggccctccagtcctgaggtggccatcaccacctcacctcgctgcggrctgrgatctgatggctccgtccccaccgcctgccccacggcctgcccctccatcaccacgaggcccgcaacgctcggccgatcctgggccccaccagcgtcaggatccttgctctccccacaggcctgtggccggggtcctgtgccgagccccatcatcggcaccgtggggctggcaggccggggtgaggatggccggggtgaggaaggccgaggcgaggagagccgaggcgaagatggccaagatgaagatggccgaggtgaggatggctggggcgaagaaggccgaggagaggatgg

SEQ ID NO: 54370 - DNA, 599 bp, Chicken  19866894306820_3
  misc_feature (1)..(31): n is any nucleotide
nnnnnnnnnnnnnnnnnnnnnnnnnnnnnnncagaaaggcaggtgcctggtccagggtgcgctcagggtcactggagatgtcctcttcagactcctcccaggatgatgagaagccggtggacgaggctgacgatgaggacagctttcggacaggcaggctgctggggggcacggcacccgcctcctcctctgggccccccaggtctgtgatgatgacggcrggaatgctaccaccaacgactgggtactggccctccagtcctgaggtggccatcaccacctcacctcgctgcggrctgrgatctgatggctccgtccccaccgcctgccccacggcctgcccctccatcaccacgaggcccgcaacgctcggccgatcctgggccccaccagcgtcaggatccttgctctccccacaggcctgtggccggggtcctgtgccgagccccatcatcggcaccgtggggctggcaggccggggtgaggatggccggggtgaggaaggccgaggcgaggagagccgaggcgaagatggccaagatgaagatggccgaggtgaggatggctggggcgaagaaggccgaggagaggatggcgga

SEQ ID NO: 54371 - DNA, 600 bp, Chicken  19866894306821_1
tagctgtgcatttttgccagcaatgaacaagagcctgtgtggcatgcttgtaaatacgtgcacgagtggaggtgaccactgctgggaaggttcagcctctgctgctgtactgccaacatccacctctgattctatgggccatcatagtaaaataggaggcatttctttttgggagcagtcctctttattacgtggaaatagtaaaactctgatagtagaaaaccttgctgctatttttcccttgagatattgcctggaaagaagaaaaaactactatttaagtttgaaatataaagaatrtgaactaataatatttgtttccaatgttttagagcttcgttttagttacagcttttgaattaattctatggacgagtgatttatagtgtcttaacagagaaaatgaatgaaaacccatggggcttgaaagtttgttgkcttgctatctgtcttcaatttggagtgaacagtcccaatattcatctcccttggttcctcaagctggctttctttattyggaaactgaatgagaraatctgctggttacccttyggaaggagaattaaattataaaaactcctggcagatggaacagtgcta

SEQ ID NO: 54372 - DNA, 600 bp, Chicken  19866894306821_2
ccatcatagtaaaataggaggcatttctttttgggagcagtcctctttattacgtggaaatagtaaaactctgatagtagaaaaccttgctgctatttttcccttgagatattgcctggaaagaagaaaaaactactatttaagtttgaaatataaagaatrtgaactaataatatttgtttccaatgttttagagcttcgttttagttacagcttttgaattaattctatggacgagtgatttatagtgtcttaacagagaaaatgaatgaaaacccatggggcttgaaagtttgttgkcttgctatctgtcttcaatttggagtgaacagtcccaatattcatctcccttggttcctcaagctggctttctttattyggaaactgaatgagaraatctgctggttacccttyggaaggagaattaaattataaaaactcctggcagatggaacagtgctacgagtcggggcatcctaaaggtcacaagttaagcatttattcaccctgctaaaagggccgttagtaaggcatatgtaacagatactcttggctggctggaacagctcccttactgtccatgctgccccaacaacccgc

SEQ ID NO: 54373 - DNA, 600 bp, Chicken  19866894306821_3
gaaaaccttgctgctatttttcccttgagatattgcctggaaagaagaaaaaactactatttaagtttgaaatataaagaatrtgaactaataatatttgtttccaatgttttagagcttcgttttagttacagcttttgaattaattctatggacgagtgatttatagtgtcttaacagagaaaatgaatgaaaacccatggggcttgaaagtttgttgkcttgctatctgtcttcaatttggagtgaacagtcccaatattcatctcccttggttcctcaagctggctttctttattyggaaactgaatgagaraatctgctggttacccttyggaaggagaattaaattataaaaactcctggcagatggaacagtgctacgagtcggggcatcctaaaggtcacaagttaagcatttattcaccctgctaaaagggccgttagtaaggcatatgtaacagatactcttggctggctggaacagctcccttactgtccatgctgccccaacaacccgcttggctgacctaagcagaaagaggtcagtgcaactggatcrgggatggaggggttcttatctctgggcaatgggagtaa

SEQ ID NO: 54374 - DNA, 600 bp, Chicken  19866894306821_4
tttttcccttgagatattgcctggaaagaagaaaaaactactatttaagtttgaaatataaagaatrtgaactaataatatttgtttccaatgttttagagcttcgttttagttacagcttttgaattaattctatggacgagtgatttatagtgtcttaacagagaaaatgaatgaaaacccatggggcttgaaagtttgttgkcttgctatctgtcttcaatttggagtgaacagtcccaatattcatctcccttggttcctcaagctggctttctttattyggaaactgaatgagaraatctgctggttacccttyggaaggagaattaaattataaaaactcctggcagatggaacagtgctacgagtcggggcatcctaaaggtcacaagttaagcatttattcaccctgctaaaagggccgttagtaaggcatatgtaacagatactcttggctggctggaacagctcccttactgtccatgctgccccaacaacccgcttggctgacctaagcagaaagaggtcagtgcaactggatcrgggatggaggggttcttatctctgggcaatgggagtaagaagagagctttcagg

SEQ ID NO: 54375 - DNA, 600 bp, Chicken  19866894306821_5
cctggaaagaagaaaaaactactatttaagtttgaaatataaagaatrtgaactaataatatttgtttccaatgttttagagcttcgttttagttacagcttttgaattaattctatggacgagtgatttatagtgtcttaacagagaaaatgaatgaaaacccatggggcttgaaagtttgttgkcttgctatctgtcttcaatttggagtgaacagtcccaatattcatctcccttggttcctcaagctggctttctttattyggaaactgaatgagaraatctgctggttacccttyggaaggagaattaaattataaaaactcctggcagatggaacagtgctacgagtcggggcatcctaaaggtcacaagttaagcatttattcaccctgctaaaagggccgttagtaaggcatatgtaacagatactcttggctggctggaacagctcccttactgtccatgctgccccaacaacccgcttggctgacctaagcagaaagaggtcagtgcaactggatcrgggatggaggggttcttatctctgggcaatgggagtaagaagagagctttcaggcagatggccggagaatgaa

SEQ ID NO: 54376 - DNA, 528 bp, Chicken  19866894306821_6
tcatctcccttggttcctcaagctggctttctttattyggaaactgaatgagaraatctgctggttacccttyggaaggagaattaaattataaaaactcctggcagatggaacagtgctacgagtcggggcatcctaaaggtcacaagttaagcatttattcaccctgctaaaagggccgttagtaaggcatatgtaacagatactcttggctggctggaacagctcccttactgtccatgctgccccaacaacccgcttggctgacctaagcagaaagaggtcagtgcaactggatcrgggatggaggggttcttatctctgggcaatgggagtaagaagagagctttcaggcagatggccggagaatgaaactgaagaaaaaatgtccaaataaaaggggtcactggtaggaaggtaagcttgctcagaaggtcacattcattgtggtgtgtaggagcagcgagggcactcagacaccactgcgggtctccatcggtcttacgtcagtctgtcagcacttgggca

SEQ ID NO: 54377 - DNA, 521 bp, Chicken  19866894306832_1
gtgttacaacagatccaggtttatatcaattttcagtaattcctataaatcaccctgcataatatgctcagctatataactcattacattcctgtttactggtaatgtggttgtaactaagaattgtggtgagctgtgtatatatatatatatatacacttgcttaatcacttgattgttagggccaagaagaaaaaaggtgttttttttgtttgttttcttttaaaagttgttagtaggaaaaaaaaattagatatgttcttcctcgagtgttttttaatgctctgaggaggtgtaacrgaaacattttttgtcagcatgcatagccctaggtcaggtatgtcaggtgcacacctgagaggatctgctaatcctgtgctgtgcacaatggcacctgctttcacctccaggcaaatacactgtgtcctgcagtgccaccagtgtatgtgggtgggttgtgttaacagcagtaatgctgacctaccttgtgtgctggatgggaacacctctaatgcttcaaa

SEQ ID NO: 54378 - DNA, 600 bp, Chicken  19866894306833_1
atgtggcaggaaatagagaaaaaagaggcgttaacaacttaatgtcattatttgcaataatgattctgcaatttgctttctaaaactagttgcacatatttttgtcttctccaaaatggaatattaagtcagaacatctacatacagaatttgagagccaaagagttccatgccaaaatttgaaaagggattgggccgaactcacatcaaatcagcaacagagttaaaaatgaaactctgaagctcctagctctcgtgcctgacgagataggttgccaaacgtatcctttcaaacagcaraagggagtgcaataatttgcscatagtctggggttttgagctacaggatgatacctgtaatagagtagtaatccggtacaaaaaaacagtgccacctgaagaaatgaacgagattgctagtgattatatgcacacaaactacactgaaagaagcaaatcccactgctacattcaggcggggagccaatataggactgccaaggtcattctcatctacaagtgctttatctatccctgtgagttctcccccactgaggctaactgctctgttcaattcaatgttttaaaatattcagttat

SEQ ID NO: 54379 - DNA, 600 bp, Chicken  19866894306833_2
aaagaggcgttaacaacttaatgtcattatttgcaataatgattctgcaatttgctttctaaaactagttgcacatatttttgtcttctccaaaatggaatattaagtcagaacatctacatacagaatttgagagccaaagagttccatgccaaaatttgaaaagggattgggccgaactcacatcaaatcagcaacagagttaaaaatgaaactctgaagctcctagctctcgtgcctgacgagataggttgccaaacgtatcctttcaaacagcaraagggagtgcaataatttgcscatagtctggggttttgagctacaggatgatacctgtaatagagtagtaatccggtacaaaaaaacagtgccacctgaagaaatgaacgagattgctagtgattatatgcacacaaactacactgaaagaagcaaatcccactgctacattcaggcggggagccaatataggactgccaaggtcattctcatctacaagtgctttatctatccctgtgagttctcccccactgaggctaactgctctgttcaattcaatgttttaaaatattcagttattcattcaagaatgaaagcatt

SEQ ID NO: 54380 - DNA, 600 bp, Chicken  19866894306841_1
atgggcagagacatctccaactggacctggttgctcaaagccccattgagcttggtcttgcacgcttccagagagcagaatggaagataaataagaggaaaaaaacaaaaacaccaccaccagaaaaaaccactacaccacaggatagttatttgatttcatagcatcaaagaatagtcaaggttggaagaggtatctggaggtcatctagtccctctcccctcctcaagcagggacatcgagagcagtttgcccaggactgtgtccagggatttgtttccttgttccagttaggaatarataagcaggtagtaaagaagcagccaacaacaatcctttatataaataaatggaaaacttcctattaatccccagaaatggaaaagaagcgtgaagcagaacagcgagccagggaggctcaggagagagaactgaggaagcgagagaaggcagaagaaaaggaacgcagaagacgggaatacgatgctcagagagctgcaaagcaggagatggaaaagaaaactaaaaaggaaactgtgcagtcccgaagtaagtggtatccacagtgagtttaggtaaagtgtattttaacatatgcct

SEQ ID NO: 54381 - DNA, 599 bp, Chicken  19866894306843_1
  misc_feature (1)..(103): n is any nucleotide
nnnnnnnnnnnnnnnnnnnnnnnnnnnnnnnnnnnnnnnnnnnnnnnnnnnnnnnnnnnnnnnnnnnnnnnnnnnnnnnnnnnnnnnnnnnnnnnnnnnnnnntttgctggcatttagtgctccgcttttggaaagagcacccgtggtgtgtggtgctgcctgctgacatagcgccgggcatttctgtctctgcacctgaaaaacaaagagagataaatcaatcgtattaaaaggttagaaaaaggatgcagtgttctgcaatgaagacgccttgcccaggctccaagtgagagcctgaytgaactcagggtgaatctgtggccctctggttccstgggaatcaagctgtagggaatggaccgataagctgctcgctttctgcatcgtacaccgtgaacctgcctaaaaccattgcaaaagcatctgtttgtgtatgtgtgattattcaaatgtgctgatttgaaaggctcaaggcaggcctaggccgggccctccccagcagtgctcccagcagcagtgagcccagccctgctgatgcccacacctgctcctggccggggaccttctcgcactcactgctattgtccctgcctgaagc

SEQ ID NO: 54382 - DNA, 600 bp, Chicken  19866894306843_10
gggagagctaaaaaggttacgtaaagagcagacgaaatgggtgacaaagccaaaatagctgtaaacaggagcctggtataaatagagagctgaggaacacccgagcccggctgctgcgtggcagaaaggtcggctccgctccctgacctgtcctgtgaccctgagcaacacgtgggggctgtggcacccrggcacggcctcgggctccttccttataaatgtcacagcaatgggatggggcaggaagggttgtgaggggtgagttctgtgcagctccaggggggggattttgtgcaagcracagaacttccctgcgtttcatgcggttcatgctaagacaggctgctcttgcaacccacgtgctttacggagcagaaaagacctacggcttggccagcattcaagcacctttctctgtcgtccttgtgatgtgtcagataagggttcaaggtctttggttgcttgcatagaacaaaagcagcttttcttaagttgctgctgccatccgtgggctcagataagaagagtggttggggggggtaccacactgtgtgctgtgtgctgtgtggtaaggccccccatgggtcccagcacgtgcct

SEQ ID NO: 54383 - DNA, 599 bp, Chicken  19866894306843_2
  misc_feature (1)..(68): n is any nucleotide
nnnnnnnnnnnnnnnnnnnnnnnnnnnnnnnnnnnnnnnnnnnnnnnnnnnnnnnnnnnnnnnnnnnntttgctggcatttagtgctccgcttttggaaagagcacccgtggtgtgtggtgctgcctgctgacatagcgccgggcatttctgtctctgcacctgaaaaacaaagagagataaatcaatcgtattaaaaggttagaaaaaggatgcagtgttctgcaatgaagacgccttgcccaggctccaagtgagagcctgaytgaactcagggtgaatctgtggccctctggttccstgggaatcaagctgtagggaatggaccgataagctgctcgctttctgcatcgtacaccgtgaacctgcctaaaaccattgcaaaagcatctgtttgtgtatgtgtgattattcaaatgtgctgatttgaaaggctcaaggcaggcctaggccgggccctccccagcagtgctcccagcagcagtgagcccagccctgctgatgcccacacctgctcctggccggggaccttctcgcactcactgctattgtccctgcctgaagccagcctgccctcaccaggtccaggtgctatttgca

SEQ ID NO: 54384 - DNA, 600 bp, Chicken  19866894306843_3
ataagctgctcgctttctgcatcgtacaccgtgaacctgcctaaaaccattgcaaaagcatctgtttgtgtatgtgtgattattcaaatgtgctgatttgaaaggctcaaggcaggcctaggccgggccctccccagcagtgctcccagcagcagtgagcccagccctgctgatgcccacacctgctcctggccggggaccttctcgcactcactgctattgtccctgcctgaagccagcctgccctcaccaggtccaggtgctatttgcagaagcagaacccaccgcctgcttcttgcyggttcscaaacaagcaggatcctctatttataatgtgctataattggctcagatgaaactggtggttatcagrctgctggggccctcagggacgctgatgccgcagggtacggaggtctgcagtgtgagccgtgtgctcacagacccccgctttccggagcaccccctatttgtcagggctgcgcgggtctgcttttctaaatgaggtttggtggcaatgaggcactgcagagccagaaagagagaaatcttcccaccgctccctggagatgcttttcgtcaaacccatcatttctaacc

SEQ ID NO: 54385 - DNA, 600 bp, Chicken  19866894306843_4
tgctcgctttctgcatcgtacaccgtgaacctgcctaaaaccattgcaaaagcatctgtttgtgtatgtgtgattattcaaatgtgctgatttgaaaggctcaaggcaggcctaggccgggccctccccagcagtgctcccagcagcagtgagcccagccctgctgatgcccacacctgctcctggccggggaccttctcgcactcactgctattgtccctgcctgaagccagcctgccctcaccaggtccaggtgctatttgcagaagcagaacccaccgcctgcttcttgcyggttcscaaacaagcaggatcctctatttataatgtgctataattggctcagatgaaactggtggttatcagrctgctggggccctcagggacgctgatgccgcagggtacggaggtctgcagtgtgagccgtgtgctcacagacccccgctttccggagcaccccctatttgtcagggctgcgcgggtctgcttttctaaatgaggtttggtggcaatgaggcactgcagagccagaaagagagaaatcttcccaccgctccctggagatgcttttcgtcaaacccatcatttctaaccccaagg

SEQ ID NO: 54386 - DNA, 600 bp, Chicken  19866894306843_5
gtgtgattattcaaatgtgctgatttgaaaggctcaaggcaggcctaggccgggccctccccagcagtgctcccagcagcagtgagcccagccctgctgatgcccacacctgctcctggccggggaccttctcgcactcactgctattgtccctgcctgaagccagcctgccctcaccaggtccaggtgctatttgcagaagcagaacccaccgcctgcttcttgcyggttcscaaacaagcaggatcctctatttataatgtgctataattggctcagatgaaactggtggttatcagrctgctggggccctcagggacgctgatgccgcagggtacggaggtctgcagtgtgagccgtgtgctcacagacccccgctttccggagcaccccctatttgtcagggctgcgcgggtctgcttttctaaatgaggtttggtggcaatgaggcactgcagagccagaaagagagaaatcttcccaccgctccctggagatgcttttcgtcaaacccatcatttctaaccccaaggctttcgtagcagggatgtgagcagggctctgcggccccaaaacgacccgctccatcaccgggcctga

SEQ ID NO: 54387 - DNA, 600 bp, Chicken  19866894306843_6
acgcgcattggaacaggaaatctgcttgctctgtgtttgaaaaatcagattgatttatcagtcaaaagcccttttttttttttttgctgtgaagtgctgcttaaaagaaatctttctccccctttcatttcataaaagctcactcagaagtcttccagcagtgcctggggctgctctgctgccaagaaatcccccgggtctgttgattaagcctccctgatatttccggtttctctctaattgttttctaatgaaagtttcaaacccgagtctaatcaggaggttgggccacagagagcyctcagcagggctcctcgctggggtgtttcttctcctaaatcagtagctgcctcctgcgcggggacgagaaggtgattttctgcacgtaaagacgcccacagtgcaggtggcagtggctccaactgcagggttctgcgctaacatcgctttgtgcagctctccattgcttttgccaccgaaattaccgttgcagtctgatcaggtttgcccgttcgtttgtctttttgtgggtttgtctttttgagggattgcggcgtggttatcccygcctgaattccccggtgcttctactctattgcc

SEQ ID NO: 54388 - DNA, 600 bp, Chicken  19866894306843_7
gagtctaatcaggaggttgggccacagagagcyctcagcagggctcctcgctggggtgtttcttctcctaaatcagtagctgcctcctgcgcggggacgagaaggtgattttctgcacgtaaagacgcccacagtgcaggtggcagtggctccaactgcagggttctgcgctaacatcgctttgtgcagctctccattgcttttgccaccgaaattaccgttgcagtctgatcaggtttgcccgttcgtttgtctttttgtgggtttgtctttttgagggattgcggcgtggttatcccygcctgaattccccggtgcttctactctattgcctgcatccccgtggcgttctttgcttcccgctgtgcctccggcscagaaaacagagacacgggagagctaaaaaggttacgtaaagagcagacgaaatgggtgacaaagccaaaatagctgtaaacaggagcctggtataaatagagagctgaggaacacccgagcccggctgctgcgtggcagaaaggtcggctccgctccctgacctgtcctgtgaccctgagcaacacgtgggggctgtggcacccrggcacggcctcgggctcc

SEQ ID NO: 54389 - DNA, 600 bp, Chicken  19866894306843_8
tagctgcctcctgcgcggggacgagaaggtgattttctgcacgtaaagacgcccacagtgcaggtggcagtggctccaactgcagggttctgcgctaacatcgctttgtgcagctctccattgcttttgccaccgaaattaccgttgcagtctgatcaggtttgcccgttcgtttgtctttttgtgggtttgtctttttgagggattgcggcgtggttatcccygcctgaattccccggtgcttctactctattgcctgcatccccgtggcgttctttgcttcccgctgtgcctccggcscagaaaacagagacacgggagagctaaaaaggttacgtaaagagcagacgaaatgggtgacaaagccaaaatagctgtaaacaggagcctggtataaatagagagctgaggaacacccgagcccggctgctgcgtggcagaaaggtcggctccgctccctgacctgtcctgtgaccctgagcaacacgtgggggctgtggcacccrggcacggcctcgggctccttccttataaatgtcacagcaatgggatggggcaggaagggttgtgaggggtgagttctgtgcagctccagggggg

SEQ ID NO: 54390 - DNA, 600 bp, Chicken  19866894306843_9
tgcggcgtggttatcccygcctgaattccccggtgcttctactctattgcctgcatccccgtggcgttctttgcttcccgctgtgcctccggcscagaaaacagagacacgggagagctaaaaaggttacgtaaagagcagacgaaatgggtgacaaagccaaaatagctgtaaacaggagcctggtataaatagagagctgaggaacacccgagcccggctgctgcgtggcagaaaggtcggctccgctccctgacctgtcctgtgaccctgagcaacacgtgggggctgtggcacccrggcacggcctcgggctccttccttataaatgtcacagcaatgggatggggcaggaagggttgtgaggggtgagttctgtgcagctccaggggggggattttgtgcaagcracagaacttccctgcgtttcatgcggttcatgctaagacaggctgctcttgcaacccacgtgctttacggagcagaaaagacctacggcttggccagcattcaagcacctttctctgtcgtccttgtgatgtgtcagataagggttcaaggtctttggttgcttgcatagaacaaaagcagcttttctta

SEQ ID NO: 54391 - DNA, 600 bp, Chicken  19866894306847_1
tcaataaaaaaggaaaatggagccacactacatatgcattttaaaaaatcactgaaaatttacctaattatgtattaaacatcaaattatgtgctattgcttcagttttaccccactgaaaatatgatcatgcacattatattctatgagtattttctttgtttacatttgaagcattacaaggatactaatttagaaatgctctacctagattaaatttctgatttcttgcaagaaaatatgaacttcaattcatagaaacatttgaaagaaatacagaaatgctatcaatagcagaartgatactaactgaataatgaataaactatttcccatagtttttcaggagtcagtatgctctttaaaattctactgcattagaagcctgtatacagaccttaaaaaaaagtttatgctgcaacaaaactggagaaatccgtaacacaatacacataaaagagaasataaaaattgtatatatatacatatataatttagatattaatttgtcatggaaatacatatatatatatatatatacaattgtacagtctttagatagtagaatgtgaaaagtgacccatgtctcagcccttagca

SEQ ID NO: 54392 - DNA, 600 bp, Chicken  19866894306847_2
acatttgaagcattacaaggatactaatttagaaatgctctacctagattaaatttctgatttcttgcaagaaaatatgaacttcaattcatagaaacatttgaaagaaatacagaaatgctatcaatagcagaartgatactaactgaataatgaataaactatttcccatagtttttcaggagtcagtatgctctttaaaattctactgcattagaagcctgtatacagaccttaaaaaaaagtttatgctgcaacaaaactggagaaatccgtaacacaatacacataaaagagaasataaaaattgtatatatatacatatataatttagatattaatttgtcatggaaatacatatatatatatatatatacaattgtacagtctttagatagtagaatgtgaaaagtgacccatgtctcagcccttagcacggctaggcatagaacagagaaaagctgccaagagctgaaaattcacgcttcggaagaatctttgattattagcttactcaattaactctcagacatattctttggtttatcattgcaaaaattgaggtggagccatgaggagtcttaaaaagaaaaacaacag

SEQ ID NO: 54393 - DNA, 600 bp, Chicken  19866894306852_1
agattgttagagggtagtaaagtgctttcaaaatgaaaacaaacaccattatgtttggcacactagaaaaaagtatcaaaccaagggttaatatggtcaaggttacatactaggaaaatcgataacaatgacattgatggtacaacaacttgtgccagtgttttgagtccatccatttgaaacctcagaaaggtttcttaatagatactcatcagctgccactggtaatatcagatgctggccaaattgtggggtatttcaacgtcctctgtaagactaagcatatttctgacagctaawtaaacccagagcactgtcgatctttgaaaaatcctaaacaagttcactttcttctattcttaaatttatatagggtaattaataaataaataagtaaaataatcaagtctgggacatgttcaactatgttcaactaacatcaactatgatattagccacctgtgttagccctcttgcacacactgaccaattacctgatcagggccaaatgactgcagacgcacaccaatatgatgagcagtaaaatgatgtctattcactaagcacagcttgtatacctttacttgagctatcgtgccc

SEQ ID NO: 54394 - DNA, 600 bp, Chicken  19866894306858_1
ggctgctgctctgctgtaggtcacaaatagaggtacttgtacaggaggagtacttagaatgggtttcacatagacaaccagaatgcaacactgactcttgggatatcattcagctgggcagtcttatcaaccatgtgtgctgttaaccaaaatgcagttcagttctggaaagtgaacgtgaaatccagcagtcctgcttgcagctcaggagaagggaagggtgaagggcacactgcattgggtgctggaggggtttgtgttggtcctcaagtccgtgatggaggcatagggcttcatctyacaccattagtcagaagtaagttagagaaatagattttgttggcaagtgaggcattggtgacctctgcttatgtagttgcctgactttgtctgtcctggactgttgtgtttgctgtgttaaggactcctcattactgcatgacttgcagttggttagagagcagagaaggtgctggtggggtaaggacagaattggtccatgctcaggtgctgctcagaaatgcaggtggggtaaaatgcatgcacagccttagctaatgttccatttgggaacagctttaaccgttgttagggctgtca

SEQ ID NO: 54395 - DNA, 599 bp, Chicken  19866894306859_1
  misc_feature (1)..(19): n is any nucleotide
nnnnnnnnnnnnnnnnnnntaatgcttcatattaccagcagaatgacatttttgcataagcctggaattgtttgaggaaatgcaatcatttttttaagaaagaccaaagttcctattcttaccatgaatagagaggattttgttcctggcttgattcattaagttccagttaagtaaatctctccacatgtgactcatgccctgattgatgctgctgctcttgaaattccccatgttggcattcatgcaacattggtcaaaattatatttgttgtattggcttcttgattccagtgtgayacatggtacagagggaagaggaataaaatcttcagatgttacagaaccaaatggaaaaactccaaatcacaaaatctttagaccacttgaagaataggattggccaagcttgagtgccagatgagctttgtttgacattggatacactgcaaaagctgccttagccaggamggtagtgcactcaccaaacagcaggagggaaggcatttctagaacgtgtaatttccccccttggagytagggcaaaggtttcaattatagatgggtgaacctggtggtgtgaggttttgcagactact

SEQ ID NO: 54396 - DNA, 600 bp, Chicken  19866894306859_2
aagtaaatctctccacatgtgactcatgccctgattgatgctgctgctcttgaaattccccatgttggcattcatgcaacattggtcaaaattatatttgttgtattggcttcttgattccagtgtgayacatggtacagagggaagaggaataaaatcttcagatgttacagaaccaaatggaaaaactccaaatcacaaaatctttagaccacttgaagaataggattggccaagcttgagtgccagatgagctttgtttgacattggatacactgcaaaagctgccttagccaggamggtagtgcactcaccaaacagcaggagggaaggcatttctagaacgtgtaatttccccccttggagytagggcaaaggtttcaattatagatgggtgaacctggtggtgtgaggttttgcagactactccagcagatttattttttgcttcacaaccatagcctaagtttcaaactcttctattatgtaatttgaatgcagggctaattctatctagaaaaacaggttatttttctctcttttgatgaatgtggaacctatgttgttgtatattctgagaccagcaaactgagtatatgg

SEQ ID NO: 54397 - DNA, 600 bp, Chicken  19866894306859_3
gcattcatgcaacattggtcaaaattatatttgttgtattggcttcttgattccagtgtgayacatggtacagagggaagaggaataaaatcttcagatgttacagaaccaaatggaaaaactccaaatcacaaaatctttagaccacttgaagaataggattggccaagcttgagtgccagatgagctttgtttgacattggatacactgcaaaagctgccttagccaggamggtagtgcactcaccaaacagcaggagggaaggcatttctagaacgtgtaatttccccccttggagytagggcaaaggtttcaattatagatgggtgaacctggtggtgtgaggttttgcagactactccagcagatttattttttgcttcacaaccatagcctaagtttcaaactcttctattatgtaatttgaatgcagggctaattctatctagaaaaacaggttatttttctctcttttgatgaatgtggaacctatgttgttgtatattctgagaccagcaaactgagtatatggtaaatatgacatatatactggacttccattttagttatgtttttctttcttcaccatctcttcattg

SEQ ID NO: 54398 - DNA, 600 bp, Chicken  19866894306859_4
ttttgcttcacaaccatagcctaagtttcaaactcttctattatgtaatttgaatgcagggctaattctatctagaaaaacaggttatttttctctcttttgatgaatgtggaacctatgttgttgtatattctgagaccagcaaactgagtatatggtaaatatgacatatatactggacttccattttagttatgtttttctttcttcaccatctcttcattgtaaagattcatattgcctctctgagaggtgtagcacagatcaatgaaatagagggaaaaactatctgtatggaartgctgcatagacctccttgatgcctttctgatgggttcctgtgtgcaggaaagcgcactgccaggacacttttaccctcaaccaaaaccaatacccttctctactctgccctaatgctggctcatagaacggaaggagagagaaggatgtaggactttgatttctccttctgccttcttaacttccaagcatgtgaaccagaaacaagacctgaatttgagtgggaattcgactctcagaataaaagtaaatgggaagttactgttttctctcctgcactattaaacagttgcactattt

SEQ ID NO: 54399 - DNA, 600 bp, Chicken  19866894306860_1
aatcaccatctagctagaagaaaaatctaaaataattgtctcattgatgagcatttttgaaagctagcaatatagtttgtatgtatacgcttcatatttctaaaacaaatatagttttgccactaattgtgacattgcatattgttgtgatatggcctttacaaagacaataataaatcataaatacccttaataggataataccaccatgaatgtgaaaagaaataagcatctgtaaaccacagattaaaagaggcagcacacttaatacaaagcaatgtaacgtaatgccaacatgasacaagaagattacaaatttcttcaattagtcatacaaccaaaccatgaatacaaatactcagtatcagcactctgataaagaaagcatatcagaaaataggtcaaaataaagtgcatgaggaatgctcaaacagatgacagttatgtgaagataattctttttctcatttcttgtatactatcaagatgtagaattctggcagtattcgtggaataatttcaccgtttgttaaatcccttttgttattattatcatacccaaactaatcattagtatgagattaattctcccaaaacaac

SEQ ID NO: 54400 - DNA, 600 bp, Chicken  19866894306861_1
tgtattaaattggattagcagatttgcagcatgctgatgtgctgttcctattggggggatggggaggaagggaagctgacatcaaggtaggtcttaaatcctcagaggtgaaagagggaggaataaatgagtgttaaacctcttggagtgtttgatatgaaaaatgttttcctcaactgcctgaacatatatgtgtgatgagcctaaaatagataatagcacgcaggaaccaatgaattgcacaaatcacaccgcatatggtaaggatttccaacgtgtattgatgataattgcattgtycaaggaagtactcaattcatgcatttgtgtacctgctagctgagcttctaaaacgtgggatcagtaatgtcattagtatgaaagcctacacctttgcgtatggtggatactttactggaagaaatacattgtttctgatccccgcgtttctamgtgaggtttcttctacattgcttcaaagtatattatatcctccaggctcccttctccactcctgtgatgagaacaaaccatccctgtcatactctgttttgcacacacttattagaagaactgacagaacagcctcaaaatcttcag

SEQ ID NO: 54401 - DNA, 600 bp, Chicken  19866894306861_2
gatatgaaaaatgttttcctcaactgcctgaacatatatgtgtgatgagcctaaaatagataatagcacgcaggaaccaatgaattgcacaaatcacaccgcatatggtaaggatttccaacgtgtattgatgataattgcattgtycaaggaagtactcaattcatgcatttgtgtacctgctagctgagcttctaaaacgtgggatcagtaatgtcattagtatgaaagcctacacctttgcgtatggtggatactttactggaagaaatacattgtttctgatccccgcgtttctamgtgaggtttcttctacattgcttcaaagtatattatatcctccaggctcccttctccactcctgtgatgagaacaaaccatccctgtcatactctgttttgcacacacttattagaagaactgacagaacagcctcaaaatcttcagaatttcttttaaggaaagatggtgccctccatcatcaagattttttggtgccatgaggctctgttttgaaagcagttacatttattttgatgttctttggcgtacaacagaaacatgctgaaattggtcccttggtttatttcatatgtgttc

SEQ ID NO: 54402 - DNA, 600 bp, Chicken  19866894306861_3
accatattactgcatttaatacaccatatgttttcttcagagtggggaaagttgcaaaattaattaacatgttcttttctatatctgtatagaatttttacagatacagaaggcttggttgtccccatagtatctcagtcacttcctcttacagtattatctgtgtaataaaaagttagtcatatagctcatccttaaagcactactacagtctataaacatttctgggtttcaccatccaaaccaacaggggtttaattcaaagcatccaaactgaacttaattttttgggatgcaatrtgagtagatattaaaaaataattttaaaaaatctaaatccttgtcttcttgcctttattggaagatccggaaaggaatgttgaacctgcctagcagttctgttgcaaytaatcagcaggacttgcaagtattgaaaggtgatagaaagtgggttaagcactggatttttcttttcttttaaaacaactcactaaaacactgaagagtgtcaaatattttggtaattaaaataacattgcagacttttagcagatgtcaatttctgctgtgccttccactttggctcttttataagtcaag

SEQ ID NO: 54403 - DNA, 596 bp, Chicken  19866894306861_4
gaaggcttggttgtccccatagtatctcagtcacttcctcttacagtattatctgtgtaataaaaagttagtcatatagctcatccttaaagcactactacagtctataaacatttctgggtttcaccatccaaaccaacaggggtttaattcaaagcatccaaactgaacttaattttttgggatgcaatrtgagtagatattaaaaaataattttaaaaaatctaaatccttgtcttcttgcctttattggaagatccggaaaggaatgttgaacctgcctagcagttctgttgcaaytaatcagcaggacttgcaagtattgaaaggtgatagaaagtgggttaagcactggatttttcttttcttttaaaacaactcactaaaacactgaagagtgtcaaatattttggtaattaaaataacattgcagacttttagcagatgtcaatttctgctgtgccttccactttggctcttttataagtcaagcctcagcttagaataatggaacggtttgggttggaagagacctcaggaagtcatacaggcccacctccagctcaaagcaggtatggcaggaattcagagaaggc

SEQ ID NO: 54404 - DNA, 600 bp, Chicken  19866894306863_1
agtcatgttcctattatgaactccaggaggtcagaatctgtttccttgtggtttcaggtgaaggcgtgaagtgcaacactgagaaaacatgcacatgcacataggataatctcagtgtcccagttgtgcacttgcatggctaggtaaaacagaacaaaacaagacagcaacctgaaggtaaagttctcattaagcattgtctgggctgtctagaagcagtagatcttctctaccacctactggaatttattggacaatttggtgtcatcacaggaagtatttgttagttatttttttttyttttgagacaacaaacactgttagaggctgaataaattctgtagctgacggctggtatgtgataatactaatatggtcaatatggagttaaccaatctgctccttagagctgcactttacagctatagtctaatcattgtctactcttaagaaacagctgtaacgtgatttttttcaaactcagtagtcagcattattgacttactagtgtaaagaattgcataaatagcaaaaaaagcagttatgagtacatgaagaaattatatttttttatttctaaacaattttctgtgtaattaa

SEQ ID NO: 54405 - DNA, 600 bp, Chicken  19866894306892_1
ggctgaatcctccaatgacccaatttctattgctggtattcaagaagctgctaattcttttagtctggcaaagccccaattcccaaatagcttactactgatttttgtaacacctctattgacaaaatgacacagaagcaagttagcttgcataatgactcctcaacccagccagccacccattctccagcacagccctgatgcacagcatggccagccacatgctgtatattggaacaccagggatgctgagtatatctccactccaaatgttacagtaatctgacggtattgctcacrattccaggtacagaaataattaaaactgcttcctctatattaaaaaagtttaatttaatgagaaagctcatcagagactgtaagaagtgtctaggaattaacttactttttattttgtattaatagcttggcaataacctaaatattagtcatgtctcagtggggaaagacatgactgttgattgmtactctgctatcacrgtatgcatttccataggatttttttttccactgtagtttctagttaaaaaactatgttgtatgtcatccactgatattagcatgagttgatccatccac

SEQ ID NO: 54406 - DNA, 600 bp, Chicken  19866894306892_2
ccagcacagccctgatgcacagcatggccagccacatgctgtatattggaacaccagggatgctgagtatatctccactccaaatgttacagtaatctgacggtattgctcacrattccaggtacagaaataattaaaactgcttcctctatattaaaaaagtttaatttaatgagaaagctcatcagagactgtaagaagtgtctaggaattaacttactttttattttgtattaatagcttggcaataacctaaatattagtcatgtctcagtggggaaagacatgactgttgattgmtactctgctatcacrgtatgcatttccataggatttttttttccactgtagtttctagttaaaaaactatgttgtatgtcatccactgatattagcatgagttgatccatccacagaggacagacagcttaaaggactgctgtcctcagaggcctctgttctcrcagtcagtagttcaacgcagagggccaggctactacaagtcatttttaagtaggtatgatctatttgccggtcttgttttttcttttttctttttttgtttttgtaaaacatcatcagaatttaagagaatggtga

SEQ ID NO: 54407 - DNA, 600 bp, Chicken  19866894306892_3
tgcacagcatggccagccacatgctgtatattggaacaccagggatgctgagtatatctccactccaaatgttacagtaatctgacggtattgctcacrattccaggtacagaaataattaaaactgcttcctctatattaaaaaagtttaatttaatgagaaagctcatcagagactgtaagaagtgtctaggaattaacttactttttattttgtattaatagcttggcaataacctaaatattagtcatgtctcagtggggaaagacatgactgttgattgmtactctgctatcacrgtatgcatttccataggatttttttttccactgtagtttctagttaaaaaactatgttgtatgtcatccactgatattagcatgagttgatccatccacagaggacagacagcttaaaggactgctgtcctcagaggcctctgttctcrcagtcagtagttcaacgcagagggccaggctactacaagtcatttttaagtaggtatgatctatttgccggtcttgttttttcttttttctttttttgtttttgtaaaacatcatcagaatttaagagaatggtgaaggcctgacttctga

SEQ ID NO: 54408 - DNA, 600 bp, Chicken  19866894306892_4
taatttaatgagaaagctcatcagagactgtaagaagtgtctaggaattaacttactttttattttgtattaatagcttggcaataacctaaatattagtcatgtctcagtggggaaagacatgactgttgattgmtactctgctatcacrgtatgcatttccataggatttttttttccactgtagtttctagttaaaaaactatgttgtatgtcatccactgatattagcatgagttgatccatccacagaggacagacagcttaaaggactgctgtcctcagaggcctctgttctcrcagtcagtagttcaacgcagagggccaggctactacaagtcatttttaagtaggtatgatctatttgccggtcttgttttttcttttttctttttttgtttttgtaaaacatcatcagaatttaagagaatggtgaaggcctgacttctgaaaaagaaaatccagggactcagtgaagattttacttctcacaactccctcagaacaaaaataacaaagacaacatggaaaaaacacagcactgcctggctaacatctgttgaacagaygtaggttttagagataattccatgtaggttt

SEQ ID NO: 54409 - DNA, 600 bp, Chicken  19866894306892_5
ggactgctgtcctcagaggcctctgttctcrcagtcagtagttcaacgcagagggccaggctactacaagtcatttttaagtaggtatgatctatttgccggtcttgttttttcttttttctttttttgtttttgtaaaacatcatcagaatttaagagaatggtgaaggcctgacttctgaaaaagaaaatccagggactcagtgaagattttacttctcacaactccctcagaacaaaaataacaaagacaacatggaaaaaacacagcactgcctggctaacatctgttgaacagaygtaggttttagagataattccatgtaggtttttttgcagatatagaattatgggagaagatagaaccttttgaatctactacagcaatatgatagcctgtttatctaygctttttctcccctcagtagaatgccatttttggcaatacagctgtttggcaaaaatcctcacatatacatggaagtcgtgaaagtgtaaaataacgcggccaccacttctgctagaaggatgtgaataactagaaaacagctcagtgttggaatttcagatttggcattcaaataaggtctgcacgcaaag

SEQ ID NO: 54410 - DNA, 600 bp, Chicken  19866894306892_6
tttttcttttttctttttttgtttttgtaaaacatcatcagaatttaagagaatggtgaaggcctgacttctgaaaaagaaaatccagggactcagtgaagattttacttctcacaactccctcagaacaaaaataacaaagacaacatggaaaaaacacagcactgcctggctaacatctgttgaacagaygtaggttttagagataattccatgtaggtttttttgcagatatagaattatgggagaagatagaaccttttgaatctactacagcaatatgatagcctgtttatctaygctttttctcccctcagtagaatgccatttttggcaatacagctgtttggcaaaaatcctcacatatacatggaagtcgtgaaagtgtaaaataacgcggccaccacttctgctagaaggatgtgaataactagaaaacagctcagtgttggaatttcagatttggcattcaaataaggtctgcacgcaaagcatgttttccgctgaatcgcaaaccaaaccattttaaaataactacctgaaattacttgaaattcaatattgtcaagccagtcaatatccccagtattcagtgtgttt

SEQ ID NO: 54411 - DNA, 599 bp, Chicken  19866894306898_1
  misc_feature (1)..(77): n is any nucleotide
nnnnnnnnnnnnnnnnnnnnnnnnnnnnnnnnnnnnnnnnnnnnnnnnnnnnnnnnnnnnnnnnnnnnnnnnnnnnnacacagcagggctaagtaggagaagacctgaaggaataataatagcagtaggtagaaaagatgagttatgataaaatatgcaaccaagcaaacaaagcagaatgtatacggtcagtccttaattccagttagtatgttgattctccactattggtaataaattagcatttacaaagatgtcataaaacacaaatcaaaataaaagtaaagtgttcagagcccrgagactttaaatggaaatggaatgtttccaattcacagaaatagtccaaaaagctaaatgggagaagaggagccattcttaaacaatatcaaattacaacatcagagttaaagacatggatttacattttatttaattttctgtttgtacacaggaatgaaaacatatatgaaatagcctttaaacactcaggatggagtgtgtcgccttcacttatgcagttgacttaattattcttccattatccctattactaatattactaaattgaattattaaaacacctttgataccacctt

SEQ ID NO: 54412 - DNA, 599 bp, Chicken  19866894306910_1
  misc_feature (1)..(109): n is any nucleotide
nnnnnnnnnnnnnnnnnnnnnnnnnnnnnnnnnnnnnnnnnnnnnnnnnnnnnnnnnnnnnnnnnnnnnnnnnnnnnnnnnnnnnnnnnnnnnnnnnnnnnnnnnnnnngaatgagcagggggtgaattaacaaccttaccacctgcctgccctgagtacctttatgcatggaagtgtttcagtttcaggcccatgtgaaaactgacattgacttagcagccccagaaaggtacgtgctgtggcattagggatatcttaaaagacacaaacaaatattacatttacctgaatataatagsattcagttggcaagattatttagctctaacaataaaccattgggcaacataaaaatccaaagcaagagaaaatcataatagggaacaaaggaagagtgtgttgtcccatttagctatgtatttgctattttggagactcatgaactgtggtaaattaatgagaactatatctttactgtatggtaccaaatacatacaatgattaagcacttgctgtgcacctctgtcatggataacagaagcttcatatgattcaacattttacaattcttttttttccttttagttaattcaggtgg

SEQ ID NO: 54413 - DNA, 600 bp, Chicken  19866894306911_1
gggcaatcttcgtgctcttagggtagtaacttccatgggctgagctcaacattaaggattcactgagtcagggaagctaggctgctcttggtggactcagtgtgacatctcagggttgttaccccctgccagaagtagacgtggcaatggtttccattaggtcctctagacggaaggcagcaagaggcgatgtggttaaacgtgaaaatgcttccctcctatctggccccgttacctgttcaattttcggatgggaagaaatgggagatttctgaacagattggcttcaaacccatgaamtgggacaagccaggaggggaagaggctcctgtagagcaaattcttcagtcttggcctgtcaactacagcccattgttgtcctggagccagcctttgtctggattcatcagttgttatgaaccaccatgagtgatgstgtgtttggtgtatctgatttatgacccaattgagccagaayaaaatgtgggcagtccacattcatgttgagcctcttgtggaagattttcacctctattatctgactgccttgcagcaattccagcctctctaatacttaatgaggcagggatgggtttattc

SEQ ID NO: 54414 - DNA, 600 bp, Chicken  19866894306911_2
agacgtggcaatggtttccattaggtcctctagacggaaggcagcaagaggcgatgtggttaaacgtgaaaatgcttccctcctatctggccccgttacctgttcaattttcggatgggaagaaatgggagatttctgaacagattggcttcaaacccatgaamtgggacaagccaggaggggaagaggctcctgtagagcaaattcttcagtcttggcctgtcaactacagcccattgttgtcctggagccagcctttgtctggattcatcagttgttatgaaccaccatgagtgatgstgtgtttggtgtatctgatttatgacccaattgagccagaayaaaatgtgggcagtccacattcatgttgagcctcttgtggaagattttcacctctattatctgactgccttgcagcaattccagcctctctaatacttaatgaggcagggatgggtttattcttatcttctgaaatcaatgtaaaagaggcaaaattatctgagcacctcattacccctcccaccttttctccatccttaactgcttctcatacaagctgaagtgtgaagggctgtcttgcttctccacttctgctga

SEQ ID NO: 54415 - DNA, 600 bp, Chicken  19866894306911_3
agcaagaggcgatgtggttaaacgtgaaaatgcttccctcctatctggccccgttacctgttcaattttcggatgggaagaaatgggagatttctgaacagattggcttcaaacccatgaamtgggacaagccaggaggggaagaggctcctgtagagcaaattcttcagtcttggcctgtcaactacagcccattgttgtcctggagccagcctttgtctggattcatcagttgttatgaaccaccatgagtgatgstgtgtttggtgtatctgatttatgacccaattgagccagaayaaaatgtgggcagtccacattcatgttgagcctcttgtggaagattttcacctctattatctgactgccttgcagcaattccagcctctctaatacttaatgaggcagggatgggtttattcttatcttctgaaatcaatgtaaaagaggcaaaattatctgagcacctcattacccctcccaccttttctccatccttaactgcttctcatacaagctgaagtgtgaagggctgtcttgcttctccacttctgctgagcctcagggactttagcatcactaggaaatgtatggcatttg

SEQ ID NO: 54416 - DNA, 511 bp, Chicken  19866894306911_4
ttgtggaagattttcacctctattatctgactgccttgcagcaattccagcctctctaatacttaatgaggcagggatgggtttattcttatcttctgaaatcaatgtaaaagaggcaaaattatctgagcacctcattacccctcccaccttttctccatccttaactgcttctcatacaagctgaagtgtgaagggctgtcttgcttctccacttctgctgagcctcagggactttagcatcactaggaaatgtatggcatttgcttttagggctttgggttccggcccaagctgaaragaggggagagatggaggtgtgtgtgggtgtctgctgcccttctagggcgtctcatcacctcaaaatgtgcacactctgcttcaaccaccccattgcctcastgtttcaatgccttctgatctcctgcctggccatcaggctgttctcccactgctgtaatggggagcagagtgaggtaaatagaggcctccaggaaagacatttccaaaa

SEQ ID NO: 54417 - DNA, 409 bp, Chicken  19866894306911_5
caatgtaaaagaggcaaaattatctgagcacctcattacccctcccaccttttctccatccttaactgcttctcatacaagctgaagtgtgaagggctgtcttgcttctccacttctgctgagcctcagggactttagcatcactaggaaatgtatggcatttgcttttagggctttgggttccggcccaagctgaaragaggggagagatggaggtgtgtgtgggtgtctgctgcccttctagggcgtctcatcacctcaaaatgtgcacactctgcttcaaccaccccattgcctcastgtttcaatgccttctgatctcctgcctggccatcaggctgttctcccactgctgtaatggggagcagagtgaggtaaatagaggcctccaggaaagacatttccaaaa

SEQ ID NO: 54418 - DNA, 600 bp, Chicken  19866894306915_1
tttagacaaagaagaatatttaaaatggctggatcagcactatgtgatgtattatactatatactatgtatacgatactgtatacttatgaaaacatccacaaaacattatccagaagagactatacctgaagcttatacctgaatgtacaatatattcaaaaaagcaatattttcaaaatctaccaagcatactgacaggaatgattagtagggtggtgtctgattttatttcaagactcttcttatttaaccaaatacatccctcaattctttaccaattcttggcctgaggaaattyggttktaaaatgactacaggtttcattctactgtaatgctggctcaactgaaaagaccacgtttactgtatattatttgaacgaagtgaataagcagggtttctgctcagccagaattagaccatgatggaaaacactttgacagtctctgacatttggttcccacactgcagaagtcacaaatgatgacgcttaccaaacagatggcgtccaacagcaggatgctctgaaatagccattttagttaaaataatttattcaaaattctactgacggtttcaaagtgatgaaatgagaaag

SEQ ID NO: 54419 - DNA, 600 bp, Chicken  19866894306915_2
acaaagaagaatatttaaaatggctggatcagcactatgtgatgtattatactatatactatgtatacgatactgtatacttatgaaaacatccacaaaacattatccagaagagactatacctgaagcttatacctgaatgtacaatatattcaaaaaagcaatattttcaaaatctaccaagcatactgacaggaatgattagtagggtggtgtctgattttatttcaagactcttcttatttaaccaaatacatccctcaattctttaccaattcttggcctgaggaaattyggttktaaaatgactacaggtttcattctactgtaatgctggctcaactgaaaagaccacgtttactgtatattatttgaacgaagtgaataagcagggtttctgctcagccagaattagaccatgatggaaaacactttgacagtctctgacatttggttcccacactgcagaagtcacaaatgatgacgcttaccaaacagatggcgtccaacagcaggatgctctgaaatagccattttagttaaaataatttattcaaaattctactgacggtttcaaagtgatgaaatgagaaagttgct

SEQ ID NO: 54420 - DNA, 600 bp, Chicken  19866894306915_3
agcaggatgctctgaaatagccattttagttaaaataatttattcaaaattctactgacggtttcaaagtgatgaaatgagaaagttgctcttgccatgtggatctcttaagtaacacagagaatcagaagtggcaaaatcctttgtcttctggagaacaaatgcatccacagagccaaactgtcaaatctgcacatgctgcctaacacagctaatgtgctcacttcaagtaaaccaaaaggagaacaatatgcatttttttatggtgggagtctgcttgtccactggtctaacttcatsagaaatcttgctattaacgtcatattcagtattacctctcaacacaaggggctgaattagcacaaggcttgtagaccagtgtactgacactgcactatcttcatttagttgtgcaatgttctataccttcattacttcttatcctttcatctgcctaaactgcagactctgtaggacagatatgcctgaactgcacagttcagtgcatgacagtttaaagctgaagtttctcagtgctttcgtaatgcaaaatagcttctaaaggctcgaactcactaaggcttaaagccttacccagat

SEQ ID NO: 54421 - DNA, 600 bp, Chicken  19866894306919_1
gagacttataaaagtgaaaagaattagtgatataattctacttgtatcataagaagctcattatataaaaatgagttcgtaaaagtagaaaagctccaaaaaattcagccttagcaatagctgcttcctgtgagatcttaagaattttttcagtatgggctgttagcttgtattcatctgcatagaagtattagagatgcaaagcttacaaagttttatgtgcaataccgatttccaaatgttattggcatgacatggtttacagctgtgttttctgtcagaaaacctagagcagataartctaaaaacctcttacagaaatgtggcaataagatttttacagcgaagcagtttgttttaaaaacctttttgtgtatgatgcaaacctctttttcagctggacagtttccttaatttttcaagcttaaaaacatgacattacaccttaacctaacatttatggatgctcttttctcatagttctaaaggaagtgccagtaaattttcaaaggctgtaagactttatttcaggttgcatgggggttaaaggtgtgtaccctaccattcagcattagacacttggacctgtgacttaaagca

SEQ ID NO: 54422 - DNA, 599 bp, Chicken  19866894306927_1
  misc_feature (1)..(31): n is any nucleotide
nnnnnnnnnnnnnnnnnnnnnnnnnnnnnnnggagggtggacttgatgattttttgaggtcccttccaacccctgcaactctgtgattctgtgaatggaaaacaagctttgtagtatgacttgggaatgagtagtagagttataaaccattttccagaaaaaagtttcttggtgcaggtggttcgctagagtacagtggtttcttgtgtcacaatctgaatagtttgcctccatgcttttccccaagcaattttctagcttcctctgattgcatcgttaactaagatgatactctccccyggcccattttgtcttccctcctactaagttattcaaaagactgagtgtgctctgttgtatagaaaatagcccaccttgctgatgaaaatcaagatatgttcatcaaattaattgttttcttccaattcccagctgcccctagacataactagtttctaggatgacagcagcaacccaccgaaactatacaaaaaaatcatgacaaggcaacaataacatggggctggcccttgaagggtgattggctaatccatgcaggtaatgcattcctcatgcaatcagaatagttgatgcagtga

SEQ ID NO: 54423 - DNA, 600 bp, Chicken  19866894306929_1
tgaacaggttttacttgccctcaggtcagatgttcctgtaagaacttgaaggaaaaattccagcaagcctcaaggttcctgaagcattggtcacttggaagagtatttacatgctgggaacagagaggaaccttgtgccctctctattgcaaaagctgccttacagatttctgataccagcatattcaacacaatggaaggtattactaatactgcagggagactggatgttcagaagtgtacccagttagcccacaatgcagtgagacacactgtactgtgctgtgaatatccccctcratatgcttgtacttatatcctaaacaatcacgagaaaccagggcatagatttccagcacattcatcrcctcaagtaactgtgaagtgaactcagctggcagtactgtggagtagttaaccctgctttcaaaaaggcagatatgactttgcacttacaaagcatgtaggcacagtttccacaggccgaccagcaggttatttatacctggcttttggcaactttcttcctttgctcagaaaggcaggacttgcaaggtggaggaacatcactgagatagctgtaagtatggaaataacaag

SEQ ID NO: 54424 - DNA, 600 bp, Chicken  19866894306929_2
cctcaaggttcctgaagcattggtcacttggaagagtatttacatgctgggaacagagaggaaccttgtgccctctctattgcaaaagctgccttacagatttctgataccagcatattcaacacaatggaaggtattactaatactgcagggagactggatgttcagaagtgtacccagttagcccacaatgcagtgagacacactgtactgtgctgtgaatatccccctcratatgcttgtacttatatcctaaacaatcacgagaaaccagggcatagatttccagcacattcatcrcctcaagtaactgtgaagtgaactcagctggcagtactgtggagtagttaaccctgctttcaaaaaggcagatatgactttgcacttacaaagcatgtaggcacagtttccacaggccgaccagcaggttatttatacctggcttttggcaactttcttcctttgctcagaaaggcaggacttgcaaggtggaggaacatcactgagatagctgtaagtatggaaataacaagagtttttgctaggaaagctcttcctccaggtcatacagatcctcacaaagggagggctggaccttgc

SEQ ID NO: 54425 - DNA, 599 bp, Chicken  19866894306930_1
  misc_feature (1)..(30): n is any nucleotide
nnnnnnnnnnnnnnnnnnnnnnnnnnnnnnttttacacactctttttttaagatgctgttcatctttttggagattagaaatttcttcaaaattcattggtggcaatgaagccattaggcctttgccaaagtacacagtataaaccaaaaacatttcagagcacagcttcctagcagccatcatgcttctcacactcaccagcagcagcattttacatattaatctgttactgataaaaacagattgggttcagttgcatgcggtgcattattctttatacacatcaagagcaaatgctrcatggtactataatgaagattatatatgtacatgtattactcccaaggaataacaataatttgaagcaattaaacatcttcaaacagtgataataacagtctgtttttcctttggctggatatctcaaattagtaatcaaaaatgtgcttgaaaatattcctctaagtttcttttgtttatacatgcaccacattcagaaagaataaaatatattttaataaatggaaatagaagaggatttattactatttaatacatacaggctgcattcttacgtctgagctgaaaaccactttgg

SEQ ID NO: 54426 - DNA, 600 bp, Chicken  19866894306931_1
gaatggctttttgtcatcgctgctttctctttatttttggtgatgataaaaaacttctttctacctcaaagactcagcatcctaatcatatattaatgcaaaatagctgtcaagacacagggtgtaagtataatgataacagccccccccccaacatatttaggaaatgacagcttaatataatgaaatacacgatgaaagaataaatgaataaaattgaagctaggaatatttctttttagtcttttacaaaaggggaaactgtcacaagcaaaactacggcgagcgttcaccagcccygtggtaccgcatattagctgcattcaccatgtgacgccgctgatgacaatgacattaaataagcactatatatttttagtttctaggacttctctccctctcactcaggcatagcactgctttatccaaggagatttatcgcggcatgttttcaggagtcaatttttcccatttattatagacaagggcagtcatttatgtatagggagggagacaggtacagtgctgttatctgatcggtgtccccrgcacagccaccatcctaatggayggtaaattcccgctgtgtgggatcgggcc

SEQ ID NO: 54427 - DNA, 566 bp, Chicken  19866894306931_2
acaaaaggggaaactgtcacaagcaaaactacggcgagcgttcaccagcccygtggtaccgcatattagctgcattcaccatgtgacgccgctgatgacaatgacattaaataagcactatatatttttagtttctaggacttctctccctctcactcaggcatagcactgctttatccaaggagatttatcgcggcatgttttcaggagtcaatttttcccatttattatagacaagggcagtcatttatgtatagggagggagacaggtacagtgctgttatctgatcggtgtccccrgcacagccaccatcctaatggayggtaaattcccgctgtgtgggatcgggccctgcctgggctccgcagcccaggaatgcatcctccccatctcctccacatatctcacctgtgatgtgttctgctttgtgaggagggaataacatgccacttaccacaaagcacggcttcaaatcctttgtgtgttttgcatccccagctcattatttaccaccttaaaaatgtgactgggtaagggacagcagccattatcacctttactttta

SEQ ID NO: 54428 - DNA, 543 bp, Chicken  19866894306931_3
caaaactacggcgagcgttcaccagcccygtggtaccgcatattagctgcattcaccatgtgacgccgctgatgacaatgacattaaataagcactatatatttttagtttctaggacttctctccctctcactcaggcatagcactgctttatccaaggagatttatcgcggcatgttttcaggagtcaatttttcccatttattatagacaagggcagtcatttatgtatagggagggagacaggtacagtgctgttatctgatcggtgtccccrgcacagccaccatcctaatggayggtaaattcccgctgtgtgggatcgggccctgcctgggctccgcagcccaggaatgcatcctccccatctcctccacatatctcacctgtgatgtgttctgctttgtgaggagggaataacatgccacttaccacaaagcacggcttcaaatcctttgtgtgttttgcatccccagctcattatttaccaccttaaaaatgtgactgggtaagggacagcagccattatcacctttactttta

SEQ ID NO: 54429 - DNA, 600 bp, Chicken  19866894306935_1
acacccattatttttgatccctaccacttcaggctcctgactgaagtattttttagaagcagtacaaggtatgtgactgggaagaagtgatctgtgtgactcagtctgggccacttcaaaataaacatctgagaagactgtcatcctacagataaatgtaagccacagttatttcctcttactccaaagtagtacagccaaagaatgctcatatacaacaggagaaaggaatgatatttcattctcccacttttttttgtgatacagttgcaggtaaagcacttagcttaaaaaacaatmattttaaattttcctactggggggaaaagaggaagttcaaagatagttttagccttaatattactacaatactacaatattgtctaataaaggttaaaaatattctttaatgagagaagagagaaacctattctatgactcacacaattcaacagaaaatactgtactctctaatgcacatgtataacaccattatagctgacagagggaaagaatctatatacaatcaaggtttaccattgcaaatacatcttactaattcaatttatagtgtgcaccttgaaagagctttttatagat

SEQ ID NO: 54430 - DNA, 600 bp, Chicken  19866894306945_1
tttgtttcctcataaaacaccaagatttgatcaaaaggatgcgagttcattaaggatgctcttgtgaagggcatgctttacgagcagtgctgtctaagcaagaactcacaggagcgcttctgtgcacatctgtatcatcaataacaaatatggaaaatacatacttccacgagggctctgagacctcccagatgcaattccaccagaagcgatggtcacagcaggtctcgtatcactttaattttgttctactttgataagaaatgccccactctgcgttttgcctaagttctcatgacytgatctcagaggcaacagccagagagcatggccagggagcaggatgggagaagatgggcaattttggaagctatgcataagcagaggagacagcaatgarmagaaacctggcagcaatcaggagactgcatggagcagaggtgaaccatcccrtagattaygatgacatagaaactgggagaccaacctgaaatggaatgctcttgtaaagtctgaaatatggtactgtggttggagagatgcagttgaaaaggagaagaaggttcaggaagaactggcatgaataaaatccacataaag

SEQ ID NO: 54431 - DNA, 600 bp, Chicken  19866894306945_2
agaactcacaggagcgcttctgtgcacatctgtatcatcaataacaaatatggaaaatacatacttccacgagggctctgagacctcccagatgcaattccaccagaagcgatggtcacagcaggtctcgtatcactttaattttgttctactttgataagaaatgccccactctgcgttttgcctaagttctcatgacytgatctcagaggcaacagccagagagcatggccagggagcaggatgggagaagatgggcaattttggaagctatgcataagcagaggagacagcaatgarmagaaacctggcagcaatcaggagactgcatggagcagaggtgaaccatcccrtagattaygatgacatagaaactgggagaccaacctgaaatggaatgctcttgtaaagtctgaaatatggtactgtggttggagagatgcagttgaaaaggagaagaaggttcaggaagaactggcatgaataaaatccacataaagcttattaaacggttacctaagtgcatgcaattaggaaacacttttgaagtcttcagaggaatcaaaagttcagaagagttctgactctgagagctttggg

SEQ ID NO: 54432 - DNA, 600 bp, Chicken  19866894306945_3
gaactcacaggagcgcttctgtgcacatctgtatcatcaataacaaatatggaaaatacatacttccacgagggctctgagacctcccagatgcaattccaccagaagcgatggtcacagcaggtctcgtatcactttaattttgttctactttgataagaaatgccccactctgcgttttgcctaagttctcatgacytgatctcagaggcaacagccagagagcatggccagggagcaggatgggagaagatgggcaattttggaagctatgcataagcagaggagacagcaatgarmagaaacctggcagcaatcaggagactgcatggagcagaggtgaaccatcccrtagattaygatgacatagaaactgggagaccaacctgaaatggaatgctcttgtaaagtctgaaatatggtactgtggttggagagatgcagttgaaaaggagaagaaggttcaggaagaactggcatgaataaaatccacataaagcttattaaacggttacctaagtgcatgcaattaggaaacacttttgaagtcttcagaggaatcaaaagttcagaagagttctgactctgagagctttggga

SEQ ID NO: 54433 - DNA, 600 bp, Chicken  19866894306945_4
aaaatacatacttccacgagggctctgagacctcccagatgcaattccaccagaagcgatggtcacagcaggtctcgtatcactttaattttgttctactttgataagaaatgccccactctgcgttttgcctaagttctcatgacytgatctcagaggcaacagccagagagcatggccagggagcaggatgggagaagatgggcaattttggaagctatgcataagcagaggagacagcaatgarmagaaacctggcagcaatcaggagactgcatggagcagaggtgaaccatcccrtagattaygatgacatagaaactgggagaccaacctgaaatggaatgctcttgtaaagtctgaaatatggtactgtggttggagagatgcagttgaaaaggagaagaaggttcaggaagaactggcatgaataaaatccacataaagcttattaaacggttacctaagtgcatgcaattaggaaacacttttgaagtcttcagaggaatcaaaagttcagaagagttctgactctgagagctttgggacctttgctggtaaaatcaaaattaacagctcttcctctcttaagaaattacc

SEQ ID NO: 54434 - DNA, 600 bp, Chicken  19866894306945_5
tacttccacgagggctctgagacctcccagatgcaattccaccagaagcgatggtcacagcaggtctcgtatcactttaattttgttctactttgataagaaatgccccactctgcgttttgcctaagttctcatgacytgatctcagaggcaacagccagagagcatggccagggagcaggatgggagaagatgggcaattttggaagctatgcataagcagaggagacagcaatgarmagaaacctggcagcaatcaggagactgcatggagcagaggtgaaccatcccrtagattaygatgacatagaaactgggagaccaacctgaaatggaatgctcttgtaaagtctgaaatatggtactgtggttggagagatgcagttgaaaaggagaagaaggttcaggaagaactggcatgaataaaatccacataaagcttattaaacggttacctaagtgcatgcaattaggaaacacttttgaagtcttcagaggaatcaaaagttcagaagagttctgactctgagagctttgggacctttgctggtaaaatcaaaattaacagctcttcctctcttaagaaattacctcttacaa

SEQ ID NO: 54435 - DNA, 599 bp, Chicken  19866894306946_1
  misc_feature (1)..(99): n is any nucleotide
nnnnnnnnnnnnnnnnnnnnnnnnnnnnnnnnnnnnnnnnnnnnnnnnnnnnnnnnnnnnnnnnnnnnnnnnnnnnnnnnnnnnnnnnnnnnnnnnnnncttgcagcaggatggccctaaactgcccagacagttgtgcagtaccaaactgtctcagatgaacatctctgacattccccactggtggctggaacaaggacaccagcgtccttcagcagccaaattgctcgagtcattcctctggtgatctaatgccttcctctattttagaggattaacagacctggtctttgccagacrctgcaggtaggatgaatgaaactcagggtgagctgtgctctcctaggagaaggagtgggcacaacatgatttctagaccctctgtccctccctttcctacctatatggaccagcaggaggcaaagccctcctggtagacacccagcttcccattgggcaattttgctggacctttataaagaatgattatttgaatttccttgaatttcaygttggtttttgaccccgyccwgctcccccgtgatacacaaggctgcctgcttccttcctgctaccagcagatccagcatccccaaacc

SEQ ID NO: 54436 - DNA, 593 bp, Chicken  19866894306946_2
tcagcagccaaattgctcgagtcattcctctggtgatctaatgccttcctctattttagaggattaacagacctggtctttgccagacrctgcaggtaggatgaatgaaactcagggtgagctgtgctctcctaggagaaggagtgggcacaacatgatttctagaccctctgtccctccctttcctacctatatggaccagcaggaggcaaagccctcctggtagacacccagcttcccattgggcaattttgctggacctttataaagaatgattatttgaatttccttgaatttcaygttggtttttgaccccgyccwgctcccccgtgatacacaaggctgcctgcttccttcctgctaccagcagatccagcatccccaaaccaccacccagcactgcccaagaagtgtgtggctctggcacaggggtgaccctcacctccactcaactccatcagcctcctggcagaaataaattgcaatcatttccgtacagacaaggagcaatattttagaaaattagttcattgccagctgtttgctcagctttgaggttttatcaactaaattcattctccggctcccacggt

SEQ ID NO: 54437 - DNA, 575 bp, Chicken  19866894306946_3
gagtcattcctctggtgatctaatgccttcctctattttagaggattaacagacctggtctttgccagacrctgcaggtaggatgaatgaaactcagggtgagctgtgctctcctaggagaaggagtgggcacaacatgatttctagaccctctgtccctccctttcctacctatatggaccagcaggaggcaaagccctcctggtagacacccagcttcccattgggcaattttgctggacctttataaagaatgattatttgaatttccttgaatttcaygttggtttttgaccccgyccwgctcccccgtgatacacaaggctgcctgcttccttcctgctaccagcagatccagcatccccaaaccaccacccagcactgcccaagaagtgtgtggctctggcacaggggtgaccctcacctccactcaactccatcagcctcctggcagaaataaattgcaatcatttccgtacagacaaggagcaatattttagaaaattagttcattgccagctgtttgctcagctttgaggttttatcaactaaattcattctccggctcccacggt

SEQ ID NO: 54438 - DNA, 572 bp, Chicken  19866894306946_4
tcattcctctggtgatctaatgccttcctctattttagaggattaacagacctggtctttgccagacrctgcaggtaggatgaatgaaactcagggtgagctgtgctctcctaggagaaggagtgggcacaacatgatttctagaccctctgtccctccctttcctacctatatggaccagcaggaggcaaagccctcctggtagacacccagcttcccattgggcaattttgctggacctttataaagaatgattatttgaatttccttgaatttcaygttggtttttgaccccgyccwgctcccccgtgatacacaaggctgcctgcttccttcctgctaccagcagatccagcatccccaaaccaccacccagcactgcccaagaagtgtgtggctctggcacaggggtgaccctcacctccactcaactccatcagcctcctggcagaaataaattgcaatcatttccgtacagacaaggagcaatattttagaaaattagttcattgccagctgtttgctcagctttgaggttttatcaactaaattcattctccggctcccacggt

SEQ ID NO: 54439 - DNA, 599 bp, Chicken  19866894306950_1
  misc_feature (1)..(142): n is any nucleotide
nnnnnnnnnnnnnnnnnnnnnnnnnnnnnnnnnnnnnnnnnnnnnnnnnnnnnnnnnnnnnnnnnnnnnnnnnnnnnnnnnnnnnnnnnnnnnnnnnnnnnnnnnnnnnnnnnnnnnnnnnnnnnnnnnnnnnnnnnnnnnncccgaattccggaacgggtttctgaatctttggttcatcctacaggtcctatgaaggactgtgccttcattgtaacctccatcagaaatgcctcctttctcagtgaaaatccagccattggattaagggcaaaagtaatgtgcagagtagaacttctrtaatgctctatattgtagaattctacctacaggctataatactctatattataggaactctaaatacagactgcttcaacacacttgaaatcagcacatgtttaaaactgatgcaaagagatgcatgtttggtcrttttgtttgtttaatctctttgaacagccagatcaagtagctaagaarcctcgttccagcttttctgtaaaaactgagtcatgatgagtgctttctctaacaattgtagtgttgggacacacgcttcactttttgccatagaccragtattgttctctctcctt

SEQ ID NO: 54440 - DNA, 600 bp, Chicken  19866894306950_10
accaacactgctgttayagcccaacaagggcccgtgatgcatgggtgaaggttgatgttgcagataacttcctgtcactggaatacatggagtttacacagtcttctgatggctggcttttatgcttatataagggtattcctttttgtttctcggcttttcaggtgattttgctttgctttccttggctttttagtgcttcctctttctgttattgttcctggatttgctttgctttgctctttgggttttcttttgtatctttgccgtgaattgcttctgaagtttctttcttttcyrtgctaagcactggtgagagttgctatctatttactgtgtttggcgtcttcacttcggcatggtattgtattcagtgcatttgctttcctcttgtagttcatgaccttgttttgctttgctgttttccttgktatttttctttatttttttctgccttgctttgctgctccttctgtgttgcaatgcattgtttttgttcagatttgttgattttctcttttcccgtttcaaaggcagtattcaatccagtcgcacctcattgcaggcaaatgcttctcttaactggtcttctgaatcagc

SEQ ID NO: 54441 - DNA, 561 bp, Chicken  19866894306950_11
aagggtattcctttttgtttctcggcttttcaggtgattttgctttgctttccttggctttttagtgcttcctctttctgttattgttcctggatttgctttgctttgctctttgggttttcttttgtatctttgccgtgaattgcttctgaagtttctttcttttcyrtgctaagcactggtgagagttgctatctatttactgtgtttggcgtcttcacttcggcatggtattgtattcagtgcatttgctttcctcttgtagttcatgaccttgttttgctttgctgttttccttgktatttttctttatttttttctgccttgctttgctgctccttctgtgttgcaatgcattgtttttgttcagatttgttgattttctcttttcccgtttcaaaggcagtattcaatccagtcgcacctcattgcaggcaaatgcttctcttaactggtcttctgaatcagcagtgtcagggatttcacagtctgtgtgttgcagtggctggcagtctttgcagttaggaacatcttcctgtgtttttatattccaaatagggt

SEQ ID NO: 54442 - DNA, 599 bp, Chicken  19866894306950_2
  misc_feature (1)..(7): n is any nucleotide
nnnnnnncccgaattccggaacgggtttctgaatctttggttcatcctacaggtcctatgaaggactgtgccttcattgtaacctccatcagaaatgcctcctttctcagtgaaaatccagccattggattaagggcaaaagtaatgtgcagagtagaacttctrtaatgctctatattgtagaattctacctacaggctataatactctatattataggaactctaaatacagactgcttcaacacacttgaaatcagcacatgtttaaaactgatgcaaagagatgcatgtttggtcrttttgtttgtttaatctctttgaacagccagatcaagtagctaagaarcctcgttccagcttttctgtaaaaactgagtcatgatgagtgctttctctaacaattgtagtgttgggacacacgcttcactttttgccatagaccragtattgttctctctccttattattatgttgcaggaaagattgtttcatgtgtaatgaaaagctagtgtccagaagatcactgcggccagatcccaattttgatgccctcatcagtaacacttgtccaacttcagatgtatctgaagctcatta

SEQ ID NO: 54443 - DNA, 600 bp, Chicken  19866894306950_3
acaggtcctatgaaggactgtgccttcattgtaacctccatcagaaatgcctcctttctcagtgaaaatccagccattggattaagggcaaaagtaatgtgcagagtagaacttctrtaatgctctatattgtagaattctacctacaggctataatactctatattataggaactctaaatacagactgcttcaacacacttgaaatcagcacatgtttaaaactgatgcaaagagatgcatgtttggtcrttttgtttgtttaatctctttgaacagccagatcaagtagctaagaarcctcgttccagcttttctgtaaaaactgagtcatgatgagtgctttctctaacaattgtagtgttgggacacacgcttcactttttgccatagaccragtattgttctctctccttattattatgttgcaggaaagattgtttcatgtgtaatgaaaagctagtgtccagaagatcactgcggccagatcccaattttgatgccctcatcagtaacacttgtccaacttcagatgtatctgaagctcattaggagggaatgctagcaagaatgagctaacacaataccagcaagctttca

SEQ ID NO: 54444 - DNA, 600 bp, Chicken  19866894306950_4
tgtgcagagtagaacttctrtaatgctctatattgtagaattctacctacaggctataatactctatattataggaactctaaatacagactgcttcaacacacttgaaatcagcacatgtttaaaactgatgcaaagagatgcatgtttggtcrttttgtttgtttaatctctttgaacagccagatcaagtagctaagaarcctcgttccagcttttctgtaaaaactgagtcatgatgagtgctttctctaacaattgtagtgttgggacacacgcttcactttttgccatagaccragtattgttctctctccttattattatgttgcaggaaagattgtttcatgtgtaatgaaaagctagtgtccagaagatcactgcggccagatcccaattttgatgccctcatcagtaacacttgtccaacttcagatgtatctgaagctcattaggagggaatgctagcaagaatgagctaacacaataccagcaagctttcagwcacagcgttaaggaagrataaagaggaggctgggggcaggtatgtcatcacctgatttgaccacatgtaacgtgatgctagaaatacaycacgtc

SEQ ID NO: 54445 - DNA, 600 bp, Chicken  19866894306950_5
tcgttccagcttttctgtaaaaactgagtcatgatgagtgctttctctaacaattgtagtgttgggacacacgcttcactttttgccatagaccragtattgttctctctccttattattatgttgcaggaaagattgtttcatgtgtaatgaaaagctagtgtccagaagatcactgcggccagatcccaattttgatgccctcatcagtaacacttgtccaacttcagatgtatctgaagctcattaggagggaatgctagcaagaatgagctaacacaataccagcaagctttcagwcacagcgttaaggaagrataaagaggaggctgggggcaggtatgtcatcacctgatttgaccacatgtaacgtgatgctagaaatacaycacgtcctcactccctgcatagcaagatattcatctctgctccaccaaaggctgccaaagtaacttctgtgtgatgactactgagataaaaatttgtgtcactccttgcaagttctgtggcagccagctattgtgctacccactcacaggtatcctgtcttcggtaacagggtgtaagagaatgaatcctgtaccaacactgctgttayag

SEQ ID NO: 54446 - DNA, 600 bp, Chicken  19866894306950_6
taaaaactgagtcatgatgagtgctttctctaacaattgtagtgttgggacacacgcttcactttttgccatagaccragtattgttctctctccttattattatgttgcaggaaagattgtttcatgtgtaatgaaaagctagtgtccagaagatcactgcggccagatcccaattttgatgccctcatcagtaacacttgtccaacttcagatgtatctgaagctcattaggagggaatgctagcaagaatgagctaacacaataccagcaagctttcagwcacagcgttaaggaagrataaagaggaggctgggggcaggtatgtcatcacctgatttgaccacatgtaacgtgatgctagaaatacaycacgtcctcactccctgcatagcaagatattcatctctgctccaccaaaggctgccaaagtaacttctgtgtgatgactactgagataaaaatttgtgtcactccttgcaagttctgtggcagccagctattgtgctacccactcacaggtatcctgtcttcggtaacagggtgtaagagaatgaatcctgtaccaacactgctgttayagcccaacaagggcccgtg

SEQ ID NO: 54447 - DNA, 600 bp, Chicken  19866894306950_7
agaccragtattgttctctctccttattattatgttgcaggaaagattgtttcatgtgtaatgaaaagctagtgtccagaagatcactgcggccagatcccaattttgatgccctcatcagtaacacttgtccaacttcagatgtatctgaagctcattaggagggaatgctagcaagaatgagctaacacaataccagcaagctttcagwcacagcgttaaggaagrataaagaggaggctgggggcaggtatgtcatcacctgatttgaccacatgtaacgtgatgctagaaatacaycacgtcctcactccctgcatagcaagatattcatctctgctccaccaaaggctgccaaagtaacttctgtgtgatgactactgagataaaaatttgtgtcactccttgcaagttctgtggcagccagctattgtgctacccactcacaggtatcctgtcttcggtaacagggtgtaagagaatgaatcctgtaccaacactgctgttayagcccaacaagggcccgtgatgcatgggtgaaggttgatgttgcagataacttcctgtcactggaatacatggagtttacacagtcttctg

SEQ ID NO: 54448 - DNA, 600 bp, Chicken  19866894306950_8
gwcacagcgttaaggaagrataaagaggaggctgggggcaggtatgtcatcacctgatttgaccacatgtaacgtgatgctagaaatacaycacgtcctcactccctgcatagcaagatattcatctctgctccaccaaaggctgccaaagtaacttctgtgtgatgactactgagataaaaatttgtgtcactccttgcaagttctgtggcagccagctattgtgctacccactcacaggtatcctgtcttcggtaacagggtgtaagagaatgaatcctgtaccaacactgctgttayagcccaacaagggcccgtgatgcatgggtgaaggttgatgttgcagataacttcctgtcactggaatacatggagtttacacagtcttctgatggctggcttttatgcttatataagggtattcctttttgtttctcggcttttcaggtgattttgctttgctttccttggctttttagtgcttcctctttctgttattgttcctggatttgctttgctttgctctttgggttttcttttgtatctttgccgtgaattgcttctgaagtttctttcttttcyrtgctaagcactggtgag

SEQ ID NO: 54449 - DNA, 600 bp, Chicken  19866894306950_9
taccaacactgctgttayagcccaacaagggcccgtgatgcatgggtgaaggttgatgttgcagataacttcctgtcactggaatacatggagtttacacagtcttctgatggctggcttttatgcttatataagggtattcctttttgtttctcggcttttcaggtgattttgctttgctttccttggctttttagtgcttcctctttctgttattgttcctggatttgctttgctttgctctttgggttttcttttgtatctttgccgtgaattgcttctgaagtttctttcttttcyrtgctaagcactggtgagagttgctatctatttactgtgtttggcgtcttcacttcggcatggtattgtattcagtgcatttgctttcctcttgtagttcatgaccttgttttgctttgctgttttccttgktatttttctttatttttttctgccttgctttgctgctccttctgtgttgcaatgcattgtttttgttcagatttgttgattttctcttttcccgtttcaaaggcagtattcaatccagtcgcacctcattgcaggcaaatgcttctcttaactggtcttctgaatcag

SEQ ID NO: 54450 - DNA, 600 bp, Chicken  19866894306960_1
ggataaggacaggggctgtggggttgggggggggggagggggacagcgaatgcacctccaagcacatcccaatggcagagaaaccgggagtggtcggcaggtagaaatgcgttctgagccgctttaattagctgctgcctgatacgtgtcgagggaacaaagagtgttttggaaacatctgagtggagctgcaataaggatctgcccgttggctccagagccgccaccgctttcctctgccccactgctctgatttacacagggacagcagccccagggggctctgctcccagggatggrgacacggacacacggacggggcacaccccataacagcgggacatctccataccgggccctccccggcttctccgtgcacacagcgaaatgcctccactgcaccccgtggtgttgggaagcattctcttctggctcagagctcacccttcatgtctctgagcagaagcgcatgctgagcagtggcagcagtgccaggaacacagcagtgagtgcacagcacccaggtccatctgctcacagcaggtccgacagcgtggacaggggactttccacatagcactgccttgaggaggaggcaac

SEQ ID NO: 54451 - DNA, 599 bp, Chicken  19866894306961_1
  misc_feature (1)..(1): n is any nucleotide
ncttctttttcccttctgaatttggttgattcactacttcagctgcagaactgactgtttctgataaagccagttctttgttttgcccattcatgccttcagtatcttcagattttaaaagcacagattcaagttgctgttgtattgccttttcctcctttgtttcttgattttcattagaactatgctttccttctgcttctgcaaactcttctgaaggtgaaggcatactactttcctctttcaaatcaacaaagtcatcttcatcttccacttccactgctgatctttccattcctyctggactttcatgagtttctccttccaaagaagtttccattaccaaagaagctgcagtaacagcaaccgtttcctccacaagctcttgagctttgctaagagaatcttcaattgcttcagctattccactactaatttctgaaacactgggttttattgcttctggctctgtagaaagttctgaacaaggcactacgtttagatcttgcgcagtttccctgtcctcatcctttaagtccttcccttgcttagagtctgaaggagtttgctggtcaccatctgactgatttttttcagta

SEQ ID NO: 54452 - DNA, 600 bp, Chicken  19866894306961_2
gcagcttcttttaattccaaacactgcttcttttccacaatttcagctcctttgccaactccagaaattgttctaatcggagctgaaggacatgtcacacacccttcgcctccctttccctggtattccctgtacatttcagaaagactctctttgtgcatttcaaaggttacctagaagaacagagttgaaaggacaaaaaatacgtacattaataaccactttctctgaaaaactcaaaatccttattcaaatcactaatttctactataaatttgtattggatgctatccttacaawtctgtaaaacaaaaagttaaaaatgaatttcaaattgcaaatcacttcaactaacaggaagtattttgtcatggtttgatgactttttgttattggtattccatatcataacatcatgtagtgcatcaggagttaaagagttaatgctccaattctgtggtagacttgtgtcagaagagaagaactacaagcaccagaggacttttcatggttgtatttctgttttccattcaaagcgaaagaaaaaactgcttgcaagtcatgagatgtccccctttccctttctgcttgtctctgcac

SEQ ID NO: 54453 - DNA, 600 bp, Chicken  19866894306965_1
catcatgtaagtgtgtgacctacatctatgaaaaattctgatatcccctcttatttccttagttctggtttgaccttgaaagtacttcctattattcagtgtactcaaaactagactgtcagtgtgtaacagaccctgggatgcctaagtgctgacacacagattcctgttggtcaggtatggttgtggcagagttccttgtctctgttcagtgattcactaaggaatcccttggatttcatgtggaaaagcagaagagctggtgaagtattcggctggtctgaagtattcagcatggcrgatcaaatgaagaggtggtagattacaatctttataaggtttttgtcttcctgtasaggyttaagactagtgtgctgtttaaaatgttctgaggccttgatagcaagccctctaacacagagcagatgaacgggaaacatttttaaatacaacaaacaagaagtgcttgggtatttacatttttttttttttatttgaagcattgaatacaaatggaaaaaaacatacaagcaccatattagaggccagcttcaagaggcaagtttactttgagtgtgccttgggttctaatctagggtg

SEQ ID NO: 54454 - DNA, 600 bp, Chicken  19866894306965_2
ccttagttctggtttgaccttgaaagtacttcctattattcagtgtactcaaaactagactgtcagtgtgtaacagaccctgggatgcctaagtgctgacacacagattcctgttggtcaggtatggttgtggcagagttccttgtctctgttcagtgattcactaaggaatcccttggatttcatgtggaaaagcagaagagctggtgaagtattcggctggtctgaagtattcagcatggcrgatcaaatgaagaggtggtagattacaatctttataaggtttttgtcttcctgtasaggyttaagactagtgtgctgtttaaaatgttctgaggccttgatagcaagccctctaacacagagcagatgaacgggaaacatttttaaatacaacaaacaagaagtgcttgggtatttacatttttttttttttatttgaagcattgaatacaaatggaaaaaaacatacaagcaccatattagaggccagcttcaagaggcaagtttactttgagtgtgccttgggttctaatctagggtgggttctcctaaacaaaaatggtttgaataactttgttttacctataaacaggcgag

SEQ ID NO: 54455 - DNA, 600 bp, Chicken  19866894306965_3
agttctggtttgaccttgaaagtacttcctattattcagtgtactcaaaactagactgtcagtgtgtaacagaccctgggatgcctaagtgctgacacacagattcctgttggtcaggtatggttgtggcagagttccttgtctctgttcagtgattcactaaggaatcccttggatttcatgtggaaaagcagaagagctggtgaagtattcggctggtctgaagtattcagcatggcrgatcaaatgaagaggtggtagattacaatctttataaggtttttgtcttcctgtasaggyttaagactagtgtgctgtttaaaatgttctgaggccttgatagcaagccctctaacacagagcagatgaacgggaaacatttttaaatacaacaaacaagaagtgcttgggtatttacatttttttttttttatttgaagcattgaatacaaatggaaaaaaacatacaagcaccatattagaggccagcttcaagaggcaagtttactttgagtgtgccttgggttctaatctagggtgggttctcctaaacaaaaatggtttgaataactttgttttacctataaacaggcgagaaaa

SEQ ID NO: 54456 - DNA, 599 bp, Chicken  19866894306968_1
  misc_feature (1)..(21): n is any nucleotide
nnnnnnnnnnnnnnnnnnnnncccctccctctctgccctcaacccgcatccgcgccgcgtcccggtggcacagccctccgtcccagagcaccggcttcaagcggccgcgggccggcggcaggccgggctctgccttaccccgggagcggacttgggcgaagggccgtgccccgccgagcagcccgagctccccctggcctggctccagctgcagggcgtgtgtcgtttgcacggagcggtttcgagacttcctgttcggaagcatcctaaacacaacagcacccgcgcctttttctcgtsttgtttttccctcctcgccgtccccggcagccgggccgagctctccgcccgcgttttccacagaggcgctcggcgcgcggagcgggaatccggcgccgccggggcaccgccggcacctccgtgccggagcgatacatcaacccgtcttctgcgtccggccggagcccgtcctgccgagcgagcggcggtgcccggcgggagcgctcggccccgcagagccgcctttgtctgcggacggggagctccccggaggcagcccccacccgccacggctccgcacggcacactctcgacacgga

SEQ ID NO: 54457 - DNA, 600 bp, Chicken  19866894306969_1
ttacacacgttctctggatgaaagacattttaaatgtctaggcgtgaaagtttgtaacgacccagtaaatattcagcaggtttgcgcttcttatgcctacttccaagtgttaaaatcttagaaatatacattaatactttcagaggaaaaatagtactgaaagtctctgagttataagcataaacttgctcaactggaagtaccttaggagggtcatttagctgagctgggaaacttcagaagtctgccaaatctgttcccatgtgtgacagttcagctcttcctcagacagcagagctstctagtaatggcaccaaatatcaccttcttcctctgcagagcagagcataccacactgccagttccttcagctttataatgtgaaaagcaactctggccactgaggcaattgcattttatcaataaaagcagggtgagaagccatgctaggatataacaaacctgacctttctgttcataggtaccaggctgctcaagctagccacagatattttagctggtattttgtctaggccaagctgttcttgagaagtaaagcttgtttataaaacctccactaaaagcaggtgttgcagacat

SEQ ID NO: 54458 - DNA, 600 bp, Chicken  19866894306973_1
gcttgcagactgccctcaaagaacataatattgtgccagtttactgccatacttaaaaaacaacagtcactgctttccaaattctttatttgtatttttactgcacctgcagttaagaaaaaacaaattttagaaacccacatctagaaagcctctggagtttaattaaaggcacattactccaagagttttggtttaaatagaatgttgtagatttagtgcccttgtctgaggatgagaaaatccagaagtgtcagcagggatgagcaaagggcagagctggagcacggggctgtgcckggtgtctggcagatgctgtgctcccacccacagggagcctgtttgcgtgccagggagaatgttttccagtgctgaagggagtcccacggggaaaaggctgatcaaagctatgattaaaggcagatctcacagggtcaaaatgagctcctttgttcttctgacttttttctaatacatttgcactcaataaagctagctctactcttgaaggcacaacggtaattaagtgcttgcttggctagctgggctgtctcagctttgttttaagaatacggagaaaagtggtgcatctagactctg

SEQ ID NO: 54459 - DNA, 599 bp, Chicken  19866894306985_1
  misc_feature (1)..(70): n is any nucleotide
nnnnnnnnnnnnnnnnnnnnnnnnnnnnnnnnnnnnnnnnnnnnnnnnnnnnnnnnnnnnnnnnnnnnnnacctggaggaaggcagcacggacaagcgggcagcgctgagcagggctgagcagccagctccgggcctccagctgcagggccacggggtgcaaggcctcagcaggcagcctgcggggacaaacaccctcactgtggggcccggatggagagacaccacagccatggggcaacgcagggtcactcacctggcggtgcccgggttgggggccagcagtgctttcatctgcagyaggcgcccatgcagagcgttgtgtgagaggacccccccgggcgcaggaagctgctgggccagctgcagaagcagagctgggcgctggggaggtgggaygacgggaatcagtgctttggcagccatggctctcacagcatagatggggctccccgccagctccagcagtggctccaggaagtgastggaggggctatggwgtaaaaagggcacagtgtggtgrcacaccgaggagagaatatctgctgccagcactctgccttacctgctggggtcatcagggccgggctgcagctgtgc

SEQ ID NO: 54460 - DNA, 600 bp, Chicken  19866894306985_2
ggcagcgctgagcagggctgagcagccagctccgggcctccagctgcagggccacggggtgcaaggcctcagcaggcagcctgcggggacaaacaccctcactgtggggcccggatggagagacaccacagccatggggcaacgcagggtcactcacctggcggtgcccgggttgggggccagcagtgctttcatctgcagyaggcgcccatgcagagcgttgtgtgagaggacccccccgggcgcaggaagctgctgggccagctgcagaagcagagctgggcgctggggaggtgggaygacgggaatcagtgctttggcagccatggctctcacagcatagatggggctccccgccagctccagcagtggctccaggaagtgastggaggggctatggwgtaaaaagggcacagtgtggtgrcacaccgaggagagaatatctgctgccagcactctgccttacctgctggggtcatcagggccgggctgcagctgtgccagcagcgtgaggacagcatgcagtgcggggcgcaggtgaggaccccctggcacggctgcctccagctcagccagcagcacggcacccagctgggggtg

SEQ ID NO: 54461 - DNA, 600 bp, Chicken  19866894306985_3
ggacaaacaccctcactgtggggcccggatggagagacaccacagccatggggcaacgcagggtcactcacctggcggtgcccgggttgggggccagcagtgctttcatctgcagyaggcgcccatgcagagcgttgtgtgagaggacccccccgggcgcaggaagctgctgggccagctgcagaagcagagctgggcgctggggaggtgggaygacgggaatcagtgctttggcagccatggctctcacagcatagatggggctccccgccagctccagcagtggctccaggaagtgastggaggggctatggwgtaaaaagggcacagtgtggtgrcacaccgaggagagaatatctgctgccagcactctgccttacctgctggggtcatcagggccgggctgcagctgtgccagcagcgtgaggacagcatgcagtgcggggcgcaggtgaggaccccctggcacggctgcctccagctcagccagcagcacggcacccagctgggggtgctgccccaggaacgcgggtaggctcagcccctccaccaggcagccctcagtgctgctctgcttctggcccagcagccgtgtggtga

SEQ ID NO: 54462 - DNA, 600 bp, Chicken  19866894306985_4
ctgtggggcccggatggagagacaccacagccatggggcaacgcagggtcactcacctggcggtgcccgggttgggggccagcagtgctttcatctgcagyaggcgcccatgcagagcgttgtgtgagaggacccccccgggcgcaggaagctgctgggccagctgcagaagcagagctgggcgctggggaggtgggaygacgggaatcagtgctttggcagccatggctctcacagcatagatggggctccccgccagctccagcagtggctccaggaagtgastggaggggctatggwgtaaaaagggcacagtgtggtgrcacaccgaggagagaatatctgctgccagcactctgccttacctgctggggtcatcagggccgggctgcagctgtgccagcagcgtgaggacagcatgcagtgcggggcgcaggtgaggaccccctggcacggctgcctccagctcagccagcagcacggcacccagctgggggtgctgccccaggaacgcgggtaggctcagcccctccaccaggcagccctcagtgctgctctgcttctggcccagcagccgtgtggtgagagcacctgcaagga

SEQ ID NO: 54463 - DNA, 600 bp, Chicken  19866894306985_5
accacagccatggggcaacgcagggtcactcacctggcggtgcccgggttgggggccagcagtgctttcatctgcagyaggcgcccatgcagagcgttgtgtgagaggacccccccgggcgcaggaagctgctgggccagctgcagaagcagagctgggcgctggggaggtgggaygacgggaatcagtgctttggcagccatggctctcacagcatagatggggctccccgccagctccagcagtggctccaggaagtgastggaggggctatggwgtaaaaagggcacagtgtggtgrcacaccgaggagagaatatctgctgccagcactctgccttacctgctggggtcatcagggccgggctgcagctgtgccagcagcgtgaggacagcatgcagtgcggggcgcaggtgaggaccccctggcacggctgcctccagctcagccagcagcacggcacccagctgggggtgctgccccaggaacgcgggtaggctcagcccctccaccaggcagccctcagtgctgctctgcttctggcccagcagccgtgtggtgagagcacctgcaaggaggggacacatcaaacatccctga

SEQ ID NO: 54464 - DNA, 600 bp, Chicken  19866894307006_1
taaactgtcattaatcccagcatataaactgagagcaaaacaaaccccagaatacatttatttcaagattcaggcacagagaatgtaatattcttcttccatctctccactttccaaactctggaattcaacagattacttgttaattctgagttttctgctaggccagtaaccgaaaatgcagggcagcagaagatagcgatggtattttcagttcttcatttattgggactttatcaaaatacctgccccctagatacttgcttattctgaatgtgaatataaactttattatatggrtaggtaactaagaaagtgcaagttttaagtgacaaatgaaagaataaactagttaaatttgagcatcccagcaaagacagcttcacatgaataacttctataggcactagaggacagaaattacctgtactgcagctagcattcattctgaattactcttcaagtamgtttaacagaagttatcccagaagcgagcgctcttctcttaaaacttatggctgagaactgcccagtgctgcatcatctaatgacaaatggtctcacttaatgaaaaaaaatattttacacatgctaggaggc

SEQ ID NO: 54465 - DNA, 600 bp, Chicken  19866894307006_2
agtaaccgaaaatgcagggcagcagaagatagcgatggtattttcagttcttcatttattgggactttatcaaaatacctgccccctagatacttgcttattctgaatgtgaatataaactttattatatggrtaggtaactaagaaagtgcaagttttaagtgacaaatgaaagaataaactagttaaatttgagcatcccagcaaagacagcttcacatgaataacttctataggcactagaggacagaaattacctgtactgcagctagcattcattctgaattactcttcaagtamgtttaacagaagttatcccagaagcgagcgctcttctcttaaaacttatggctgagaactgcccagtgctgcatcatctaatgacaaatggtctcacttaatgaaaaaaaatattttacacatgctaggaggctctttgtacaacactagctattgcataaaacagtgctgtacacagaatatctagttgggagctatctgaattacaaacctaaagtggatgttaaaatcaagctgattatatttcctgaaatgaaaattgcttcagaatgagtctcaaaggttttgctggtgcttctt

SEQ ID NO: 54466 - DNA, 600 bp, Chicken  19866894307007_1
cttggtcttataattctgcaaataaagtttatagcagaatcagccacagaaaaatctaaccttaacctttgaccctttgcaattgcctccacagatccccttcctgaagtaaaaaatcagcttgcgtgggcaaaaatgctttctttcattagagaaatttgcaaagatgcactggtgaagggaggaagggagggatgtctttcactgggttataaaactggtggaaaggtgaaattttctagctttgtgtatagatgagatgtcaagatgatttgaaatacctcttggaggtaagaggaraaaaaaaagatgaatagatagcatacaacatatgtggaatgtaaagaaaytctgtcatttgctttgtttttgcacgggaatgaaatwtataaacatgaacatgccagggataagacatgacactaagctactgcagtgatatgtgctttaggtatgtagctaggcagaacagatggatctagaataaatgcattacactttattacttgtctcaatccctgtgttatttctcactgtcctttgcatattcttttgtgtgcacagagttcaagcaaaatttggaatgttacagatgtatga

SEQ ID NO: 54467 - DNA, 600 bp, Chicken  19866894307007_2
aaaatctaaccttaacctttgaccctttgcaattgcctccacagatccccttcctgaagtaaaaaatcagcttgcgtgggcaaaaatgctttctttcattagagaaatttgcaaagatgcactggtgaagggaggaagggagggatgtctttcactgggttataaaactggtggaaaggtgaaattttctagctttgtgtatagatgagatgtcaagatgatttgaaatacctcttggaggtaagaggaraaaaaaaagatgaatagatagcatacaacatatgtggaatgtaaagaaaytctgtcatttgctttgtttttgcacgggaatgaaatwtataaacatgaacatgccagggataagacatgacactaagctactgcagtgatatgtgctttaggtatgtagctaggcagaacagatggatctagaataaatgcattacactttattacttgtctcaatccctgtgttatttctcactgtcctttgcatattcttttgtgtgcacagagttcaagcaaaatttggaatgttacagatgtatgagccagagtgatgttcagctaacagaaaaagacaaagttttcacctcaaag

SEQ ID NO: 54468 - DNA, 600 bp, Chicken  19866894307007_3
tccacagatccccttcctgaagtaaaaaatcagcttgcgtgggcaaaaatgctttctttcattagagaaatttgcaaagatgcactggtgaagggaggaagggagggatgtctttcactgggttataaaactggtggaaaggtgaaattttctagctttgtgtatagatgagatgtcaagatgatttgaaatacctcttggaggtaagaggaraaaaaaaagatgaatagatagcatacaacatatgtggaatgtaaagaaaytctgtcatttgctttgtttttgcacgggaatgaaatwtataaacatgaacatgccagggataagacatgacactaagctactgcagtgatatgtgctttaggtatgtagctaggcagaacagatggatctagaataaatgcattacactttattacttgtctcaatccctgtgttatttctcactgtcctttgcatattcttttgtgtgcacagagttcaagcaaaatttggaatgttacagatgtatgagccagagtgatgttcagctaacagaaaaagacaaagttttcacctcaaagttgcctcattctttgcttatccttttctcctcagaaa

SEQ ID NO: 54469 - DNA, 600 bp, Chicken  19866894307023_1
gtagaaaaaggaaatttgtcaaaaataggtgtttgttttagtaagttcctttactgtactgatggacacactcacttttgaaggtagaatatttgcatgaattttcattctagaatcacttcacttagggtttttttgtttaactgaggtgttgaaatctctctgcttttctgaacaattcaagttgtttttctagaatagcactagtgcgagaataatttattgcagacatgtgcgtatttatagttaatagtaacttttattatctgtactaatgcatgaaatcattaagatttgagsatatcatttaggggtctctcaggattttcatacatttagatttaagtcatcagtgtcattctttcaattcctatttcagtgtatgttccagtgctttaacagtatccagtgtattcctaatacattactgcttgtgactaattttttaggggattcagaaagtactttctgtcttggaaatatcgcttcctatttttgatatgcccccccccccactgctaggggggaagaggaattatctattctgatggtagcacggattgtccaagccatttttagctcagtgcacagaccattgtt

SEQ ID NO: 54470 - DNA, 573 bp, Chicken  19866894307023_2
tccagtgtattcctaatacattactgcttgtgactaattttttaggggattcagaaagtactttctgtcttggaaatatcgcttcctatttttgatatgcccccccccccactgctaggggggaagaggaattatctattctgatggtagcacggattgtccaagccatttttagctcagtgcacagaccattgttcaaatcacagctttagaagttctttatatccaaaagctttggatatgtttcctacagaataatgcaatgatatatgttctgggcatgaaaagtgatgtccaggrcccacttagtaatcattcttagttggagcagacaatctgtgttaggggaggctttgtttttgaaacctctggaagagacgagactggcagatgagtgaaaatctcctcttatagacagaactagtatttgaccactgcaaaactgggggcaactcttctttttctctctctctgtttctgtattttctatgcccagatttccatctaggtttcctgtatccatggattcaccagggcagttgcacccagctagaagagttactgagagacagc

SEQ ID NO: 54471 - DNA, 599 bp, Chicken  19866894307025_1
  misc_feature (1)..(179): n is any nucleotide
nnnnnnnnnnnnnnnnnnnnnnnnnnnnnnnnnnnnnnnnnnnnnnnnnnnnnnnnnnnnnnnnnnnnnnnnnnnnnnnnnnnnnnnnnnnnnnnnnnnnnnnnnnnnnnnnnnnnnnnnnnnnnnnnnnnnnnnnnnnnnnnnnnnnnnnnnnnnnnnnnnnnnnnnnnnnnnnnnnnccttcgaaggagggtgagtgaattttaatttttcttcgtaaaagtatgagccacttggccatggtaaaaggtgaaatggcaaattgctttaagatgggacattagcaagatgcagaacacrggaaaggtctcagggaagtagatctgtgaaaaatttgagggcccttccaactcagaatattctgattcaggatgttctatgattctatggaaacttatgcaatccaataagaaagctgcttctctcccaggagttacacacttccttccttctctaatctcaaggaatgaaaaccatttattcagcacttccagaagtatttagtaaacagcagtggcagacctttaccatgttaaacacaggtttgactgagccaacagagagggaaactaacacaaactttaaaatccgttgtatgg

SEQ ID NO: 54472 - DNA, 600 bp, Chicken  19866894307027_1
ctatacgctaacccactcatgtgttgtactactaacaggactaggaattatttctggtaacttaccttcactgctcttacttttactttaggcattggtcagtgatagagaatcctgttacgtttttacacaccacgcgctgagtttctctggctcattgtagacatcccgaggtaacaaacccaagaactttatgcttccttaattccatttacagagatcacttacagcacttcttacagaaatcagcatactgtctttcacttaatgaatgtctaaaataagtgatgtgacttaatmgaatggtttagttaagagaaaggttaaagataaataattgaaagcataactggctgttccagaacacagctacaaagctgatrgctgtaaaagcgcattaaactttgcatctctgaatagtctgcaggtcagcaggggggcaaccaaagaaatggatccataagcatcagatactgaactatgaattttagcaacctgtaggaaagaagctttgtgcactcataggctatcacacactgctttgttgtgctgccacattgtcctgctgttcccagaaagttctgggatctcatccycagc

SEQ ID NO: 54473 - DNA, 600 bp, Chicken  19866894307027_2
tactttaggcattggtcagtgatagagaatcctgttacgtttttacacaccacgcgctgagtttctctggctcattgtagacatcccgaggtaacaaacccaagaactttatgcttccttaattccatttacagagatcacttacagcacttcttacagaaatcagcatactgtctttcacttaatgaatgtctaaaataagtgatgtgacttaatmgaatggtttagttaagagaaaggttaaagataaataattgaaagcataactggctgttccagaacacagctacaaagctgatrgctgtaaaagcgcattaaactttgcatctctgaatagtctgcaggtcagcaggggggcaaccaaagaaatggatccataagcatcagatactgaactatgaattttagcaacctgtaggaaagaagctttgtgcactcataggctatcacacactgctttgttgtgctgccacattgtcctgctgttcccagaaagttctgggatctcatccycagcaaatgtttagagaggtcagcagtgaaagaaagaagtctattggcacatcaagacaatctgggagaagattttcctaccagatt

SEQ ID NO: 54474 - DNA, 600 bp, Chicken  19866894307027_3
aatmgaatggtttagttaagagaaaggttaaagataaataattgaaagcataactggctgttccagaacacagctacaaagctgatrgctgtaaaagcgcattaaactttgcatctctgaatagtctgcaggtcagcaggggggcaaccaaagaaatggatccataagcatcagatactgaactatgaattttagcaacctgtaggaaagaagctttgtgcactcataggctatcacacactgctttgttgtgctgccacattgtcctgctgttcccagaaagttctgggatctcatccycagcaaatgtttagagaggtcagcagtgaaagaaagaagtctattggcacatcaagacaatctgggagaagattttcctaccagattaccagtttcagtaaattattgaagaaacaggaacatgactatcgctccggtgcccttctgaggtgtgggctaaggggatgccttagaagaggcactgagaggttttctttgtattcgtattagtacgatgctaacatgagtacaaggagcagaagtctcattagtctgaggtccactccaactaatttgttgcaattctaaacaaatgaatta

SEQ ID NO: 54475 - DNA, 599 bp, Chicken  19866894307032_1
  misc_feature (1)..(63): n is any nucleotide
nnnnnnnnnnnnnnnnnnnnnnnnnnnnnnnnnnnnnnnnnnnnnnnnnnnnnnnnnnnnnnntgttttccttacagcaatattaactgaacaccggagagctgcaaaaaccagaattttctctcacagaatgtgttcattgatgacttctttctccctgttaacttttgccagtgtcagattacactaaataagaaactgtccctcctgtgattcaggagctattctcttaaataagatcacaacccttcaatggctcttgctgaaagaaagcaacttaaaaaaaaagaaaaagtgcaygatagcaatccaaggttatataaggggcacatagcattcagatcaagggagtagagcactaacrctatgcagccccactttcctagaatatgtttcttggcaacattgctaatctaaatctggcaaattgaatattttgatctccgtccctggagaaaaacatactcctgttatattagattataattttcctctgttacgcactgatgccgaactattctccacgatacccttcattatataagagaagctatactgtgtacgctaaggttgccatttatgccctgacccaggtgttc

SEQ ID NO: 54476 - DNA, 600 bp, Chicken  19866894307032_2
gttttccttacagcaatattaactgaacaccggagagctgcaaaaaccagaattttctctcacagaatgtgttcattgatgacttctttctccctgttaacttttgccagtgtcagattacactaaataagaaactgtccctcctgtgattcaggagctattctcttaaataagatcacaacccttcaatggctcttgctgaaagaaagcaacttaaaaaaaaagaaaaagtgcaygatagcaatccaaggttatataaggggcacatagcattcagatcaagggagtagagcactaacrctatgcagccccactttcctagaatatgtttcttggcaacattgctaatctaaatctggcaaattgaatattttgatctccgtccctggagaaaaacatactcctgttatattagattataattttcctctgttacgcactgatgccgaactattctccacgatacccttcattatataagagaagctatactgtgtacgctaaggttgccatttatgccctgacccaggtgttcaggtttattcaggagagtgggctgaaggaaacaacttcctaattgtcagtctaagtatgaacaac

SEQ ID NO: 54477 - DNA, 600 bp, Chicken  19866894307042_1
tgcggtatccaatctgaccatccatctcttctgaaagtgggattagtgggagtttacaattatctagccttgcttctcacagaaagctgttgcaaaactaatggcagtgagatacaggagcatttttcttgcagcaaaaatcacacgagccagagcttgccacttacattttccaagataagtttgatgattattctgtaaattagcattgattttttttctgcagatcccattactttcaatcccagagagattgttctgtctcctcgcatacctgttataaatgtatcgcaaacgttytccccgtcgttctttctctttaagaagcccccggccccaccgcctcccccttccacagcgcggctccgggcggtgcggccgcagggacccatcgctgtgctttacggccggccgacccacaaggtggcactaaagagaaaagtgacaacttgcctaataaaaaatgaaaaccgacggcaaaataccatatgctgaatcaatattattttaattaggagcacgcttcccttattgtcagtcgaatttttatttcgtgacaaagccttaatgccagaaggcggcaaaaatggttcattgccc

SEQ ID NO: 54478 - DNA, 494 bp, Chicken  19866894307043_1
agtcagaaaccaccaaactatgatttgggttttgcatactgaaacagtattctgggtagaacttggagaaagagctgctgaggtgggtgaataaaggagcaaaggagaaagaatgtctaaaatgaaattgaagtcagcagtacaaatttctctgaactccagggaaatcaatttctatgtcatgctttcccttaacttctttaaatgacataaacacaaacagtgtataattttctaggttccgtgcaggtggtgacgtggaatgaacagtaccacaaattaacaaccagtgatcaaaaygggctcatcattgtgtggatcatatataaaggtactccacagacaactttgagtttggataataatccatacagtgggagatcctttgattttaataactctttatcagacttctgaaaaagtccgaataggtttacaatatttttcaagtttttattgtaattgtctgaatttttatagcactgcttgtgaaa

SEQ ID NO: 54479 - DNA, 600 bp, Chicken  19866894307069_1
ggggcagaaacacaagtgcatcgagtctgagcacaaatagtttatttctcagtgtgtttgagaacatctcccattctgcttcttcatattatacccagcaattcacacacatgttaaaagacaaggtgtaacttctgatttttagaaaagcacagtcaaaaaaccctctcatgcaagaaagcttgtatgtgatcacctctgataggaatgaaccactttatatatttataatctgtcatgttaagataattaaacagctggcttatgaaccattaaactaggatgttggttgacgacgaygtaggtttagttgcaattcatactccagaccatccttcttaataatcaaatgaggtattagttattgcagctttgagggtggaaaacaccactgcttcactaacgtctccagtaatattttatttcccctttaattataacctgaaagcaaatccagacagcagagcagcagcaaagtcactgctggaaagtggcaggctggaggagcattaatcaatgggtgctctgcaaggagatacctcttcctgtgctgagcagaacaccagccctggtgttacaggagacatgagcaataaaata

SEQ ID NO: 54480 - DNA, 599 bp, Chicken  19866894307084_1
  misc_feature (1)..(68): n is any nucleotide
nnnnnnnnnnnnnnnnnnnnnnnnnnnnnnnnnnnnnnnnnnnnnnnnnnnnnnnnnnnnnnnnnnnntaaacaacctatgaaacatattttgtgttataattcttctattctttaccatcctttccttcatttgcgtccagggaagcaggttaaactaatgtgactgttgtgggtgatgactttcagagcaccaccaatgttagaactacagagggtgcctgggtaagatgatcagtgcagagtactgtcccatgggagggacatgaccaaagtttgatgtatttgttgattttgtcamagaagaagaagagttgagagaaaaccaccaaagagtttaaaactacgacagaagaaatgatgtgtgagaacttcagcttctggatcttgtcattagagaccatctgctttacaacttttcacaggggggcatggcgacagcagatttattatctacatagcttccaggtcttgctctttttttcctcactggagagaaggcaacactcatcactcttcactgccaacaacctaatytgttctactgtaaccactgatgaagcagaaaaggataaaggtcacttgttaaaggacgggaaa

SEQ ID NO: 54481 - DNA, 498 bp, Chicken  19866894307084_2
gtgcagagtactgtcccatgggagggacatgaccaaagtttgatgtatttgttgattttgtcamagaagaagaagagttgagagaaaaccaccaaagagtttaaaactacgacagaagaaatgatgtgtgagaacttcagcttctggatcttgtcattagagaccatctgctttacaacttttcacaggggggcatggcgacagcagatttattatctacatagcttccaggtcttgctctttttttcctcactggagagaaggcaacactcatcactcttcactgccaacaacctaatytgttctactgtaaccactgatgaagcagaaaaggataaaggtcacttgttaaaggacgggaaaaggtaagtaagttttcaacatcaagcaattcattttaggcaagtaaacctgattaacaaaagagaaggagaaagataaaaaattaacaagctattctgtattatttgagcctgcttttccatgggaaccatatca

SEQ ID NO: 54482 - DNA, 600 bp, Chicken  19866894307085_1
ctcatctaattaaacgaggcaaagtctggaagcagcagcacatccctccctagaactccacggtgccaatatcagggagcagcagcagcaatgccgttgtttcaggttgctttttggcacaaaagatgctccatccttcccatttggggcaaaccccccactaagcccctgatttgatcccgtccagctcagagctcccgtactccaggaacaccactctgtctgctccacagcctggttgctctcagccccccgctgtgctgaaggttattttctcctccactctgtcttgctgaataygaagcgtgtgtcaatgagagcccgagaatggcagctcgttgctatttataggagacagatgtgtcggtctgaccgcacacaggcattgcacgcagcacrgcagggcatggctgcaggagcaggacacctctccttgctcggtgtcacacccagcagcattaccagaccgtggtataatgacatcccaatgctcccaaaccacattgcagcaacctgggacgttccttgaggatctggtaaccatacccatggcagagggggggttggagcttgatgatatttaaagccctcccaacccaa

SEQ ID NO: 54483 - DNA, 600 bp, Chicken  19866894307085_2
tttcaggttgctttttggcacaaaagatgctccatccttcccatttggggcaaaccccccactaagcccctgatttgatcccgtccagctcagagctcccgtactccaggaacaccactctgtctgctccacagcctggttgctctcagccccccgctgtgctgaaggttattttctcctccactctgtcttgctgaataygaagcgtgtgtcaatgagagcccgagaatggcagctcgttgctatttataggagacagatgtgtcggtctgaccgcacacaggcattgcacgcagcacrgcagggcatggctgcaggagcaggacacctctccttgctcggtgtcacacccagcagcattaccagaccgtggtataatgacatcccaatgctcccaaaccacattgcagcaacctgggacgttccttgaggatctggtaaccatacccatggcagagggggggttggagcttgatgatatttaaagccctcccaacccaagccattctatgattctatgacctcccagggctctgcacctgctgcttgctcatacattggccaagctacgcacgccaggattgcatctttatctttggg

SEQ ID NO: 54484 - DNA, 600 bp, Chicken  19866894307103_1
aaaaactttcatcaagcagggattccatcaaataaagctaatatggtatgaagtaaccatgcaggggcatgaggaatgcacatcaacatgtttctcggtacctcttggagttcttatgcaagcctgaggccccatgttttagttcttgtagtgatatgtggtgagcttcacatttgacaagagctgtgtagttccacatcaggtaaggtggatatgttcagccctttgcatgaaatctgtgactcctgcttgcatttaaaaactgtcagtatgcaagtgtattatatttcaggaagtgcrgaatatcaaatatttgaagccatgaagactgaatattatattttccttttagaacagtgatgtaagttaaaaacattttttcctgaagatttggcaggcacaatgtgcataatgttggcttctgatgaaataaaagtgaagatcaagctccttctctaaaaatgcaataaagtaatttctggaaaagcaaaacctttaattcatcttaacattcttaaaaaaaaaaaaaaaagaaaaaaaaagttacagtatcccaggacaaataattttttcatttgtaaataacttatgtttatacca

SEQ ID NO: 54485 - DNA, 599 bp, Chicken  19866894307104_1
  misc_feature (1)..(101): n is any nucleotide
nnnnnnnnnnnnnnnnnnnnnnnnnnnnnnnnnnnnnnnnnnnnnnnnnnnnnnnnnnnnnnnnnnnnnnnnnnnnnnnnnnnnnnnnnnnnnnnnnnnnnatgtgatatttaccaggaatgactttcggatagattctcaggcttctgttcagatctcaggttttggccacctttcatggccatccagtatgacccaaaatgtaccctgactgcaaagcttggttcacacataacaaacacacacattgcaatccaccctggatactacagaccaccaaagcataaaaccaagtcctcyccacgtcagctaaagaatatatgtctataacttgctacttggataaactcaagttctttgggtgctgcaagcagggacaagcatacagctcatctagaagccagggaaataactggtgtgcaaaggtcctgtgaaagagaataaaatagctagtcctttttttcttagggaggattttcaaatgagctttggggcaggtacatcataaattccagaataatacattcagtaattgcacatatgattgctgtaataaccctacacactaaatatagataatagttttggatgtatttgaa

SEQ ID NO: 54486 - DNA, 600 bp, Chicken  19866894307106_1
ggcagcacaccccttcacacccagtgcaatcctcgatgccctgtgtgttctaagtcctcatcctgcacccaaaatgcagactgcagctctgcagcagccccagccagggcagactttagttcaagcaggcaaagctcaaagcacagcagtgaaacaggtgagagctctttaagtaacatatgggcagctgatacagaagtgatgttagtaggacatagggctaagcttcaacttcaatttccagcctccctgcaaaccccagggagtgtataaattacctatcccgctgctagctacgcyatgcacttgccagagactttttcctgtgttagagatacacagagtttaaaagaccagagtcagcagctggcttctgcaattgggcatttataagacacaggcaatggccagaagctaagacctacagttaaaagtagagctagcaggagatttctctccttccatgcacagaaaatatacatatatatakatataaataaagtacaaagaaaatattgcacttccatctactcttaccccattggtttcatttagctttcatgaaaaagctcaattccagatagtgtgtttacagagcat

SEQ ID NO: 54487 - DNA, 534 bp, Chicken  19866894307106_2
atacagaagtgatgttagtaggacatagggctaagcttcaacttcaatttccagcctccctgcaaaccccagggagtgtataaattacctatcccgctgctagctacgcyatgcacttgccagagactttttcctgtgttagagatacacagagtttaaaagaccagagtcagcagctggcttctgcaattgggcatttataagacacaggcaatggccagaagctaagacctacagttaaaagtagagctagcaggagatttctctccttccatgcacagaaaatatacatatatatakatataaataaagtacaaagaaaatattgcacttccatctactcttaccccattggtttcatttagctttcatgaaaaagctcaattccagatagtgtgtttacagagcatgtacacacctgtgtatgtcaacatacatacacaatcaactgcgagcactttttttttttcccagaagcttcaatatccaaaaatacaaaaatcatactcagaagaaaactgacacatttttagt

SEQ ID NO: 54488 - DNA, 599 bp, Chicken  19866894307107_1
  misc_feature (1)..(6): n is any nucleotide
nnnnnngcatggtagtgactcctcgttctgtactgctcacgatatctcaggactgcagaggaattacctgcctgctgggttcactggaactaatatgtgaaactttgatctgtgtttaacccctctcaggcagcagatgaccactgagggggtttggctgtcccagagcacagtgtggggaggaatgccaccaacaaattgactgaggctcccctcctatttgctccttctgtcttcaaaagattgtgtatctaaaaaaagccaactgggcaaggatttcagggaatggattttgtaagytgttatttgcctcaagatcaatctgtctgccctcaaggtaaaggaatgccttactggtttttatactgtttggctaggtttctctgggcacaggcagtgaacttggacttagtccttgaaactactctttagcctaaggcatatgtgatttccactaagaatttcacttttatttagcgttttcagaaagatagagtgttttctttctcatgtaagcacataccagaatgtgccctagcaggttggaaaattttgctattgttaaggcctaaaagtgtctctgctgagttctgtgtgga

SEQ ID NO: 54489 - DNA, 600 bp, Chicken  19866894307109_1
taattttcaaatgatagaaaactgctaagtaataacaagactgtgcaaatataaggctgagacacggagatctcacagcgaatggttctttactgtgttttggaatagtctttctaattaaaaacaagctgaaaacatccagcacaaaattccagttatatcaaagaagggtcagacataaaagaaattacatagaactgaaacaaaacacaatttcagagcttttaaattcactctaagactaaccctgctgttgcagaattgaacctctgactttaatatttatgtaatatttgtttwatatatttatttaataatgctgacggatgtagaatttctgttatctacgtagtagaaatgcaatgggtcaatatgtggccactgaaatcagaattcccctctgtttcaaataattttctgatatagaaaaaaatagggaaaaatattctacaaatatatatatatctcccaaggcaaacattttcagctgtgccagtcatgcagtgggatattagatcccgtgtacactacctcargaagatgtgatttcttccccccccagcaaaacattagaccacttgttcagctcagcactgactc

SEQ ID NO: 54490 - DNA, 600 bp, Chicken  19866894307109_2
taagactaaccctgctgttgcagaattgaacctctgactttaatatttatgtaatatttgtttwatatatttatttaataatgctgacggatgtagaatttctgttatctacgtagtagaaatgcaatgggtcaatatgtggccactgaaatcagaattcccctctgtttcaaataattttctgatatagaaaaaaatagggaaaaatattctacaaatatatatatatctcccaaggcaaacattttcagctgtgccagtcatgcagtgggatattagatcccgtgtacactacctcargaagatgtgatttcttccccccccagcaaaacattagaccacttgttcagctcagcactgactcataaaaaatccctaaatctggtgctgaatcatcactgacgtctccygtaggaattccttttgggggagatctgtctgttcaagtaccaasctaacacagcaccrtatagcttgggaggctgctgcagtcacgtctggaggcagcgtggtggcaggtaatttagaaaatctgtattaaaaaccaaaacaaacaaagcaacacttcagcctgtgttcaatttcctagcacctttaaaa

SEQ ID NO: 54491 - DNA, 600 bp, Chicken  19866894307109_3
acgtagtagaaatgcaatgggtcaatatgtggccactgaaatcagaattcccctctgtttcaaataattttctgatatagaaaaaaatagggaaaaatattctacaaatatatatatatctcccaaggcaaacattttcagctgtgccagtcatgcagtgggatattagatcccgtgtacactacctcargaagatgtgatttcttccccccccagcaaaacattagaccacttgttcagctcagcactgactcataaaaaatccctaaatctggtgctgaatcatcactgacgtctccygtaggaattccttttgggggagatctgtctgttcaagtaccaasctaacacagcaccrtatagcttgggaggctgctgcagtcacgtctggaggcagcgtggtggcaggtaatttagaaaatctgtattaaaaaccaaaacaaacaaagcaacacttcagcctgtgttcaatttcctagcacctttaaaagcctatagtgaagaagagccacgctgtatatggaaaacaggaaatgaaaatacaactgtgtttaaaaaaggaaagaaaaaaagccaacaagtggtagctgtgttaattcc

SEQ ID NO: 54492 - DNA, 570 bp, Chicken  19866894307109_4
gaattcccctctgtttcaaataattttctgatatagaaaaaaatagggaaaaatattctacaaatatatatatatctcccaaggcaaacattttcagctgtgccagtcatgcagtgggatattagatcccgtgtacactacctcargaagatgtgatttcttccccccccagcaaaacattagaccacttgttcagctcagcactgactcataaaaaatccctaaatctggtgctgaatcatcactgacgtctccygtaggaattccttttgggggagatctgtctgttcaagtaccaasctaacacagcaccrtatagcttgggaggctgctgcagtcacgtctggaggcagcgtggtggcaggtaatttagaaaatctgtattaaaaaccaaaacaaacaaagcaacacttcagcctgtgttcaatttcctagcacctttaaaagcctatagtgaagaagagccacgctgtatatggaaaacaggaaatgaaaatacaactgtgtttaaaaaaggaaagaaaaaaagccaacaagtggtagctgtgttaattcctgagttttaaaaac

SEQ ID NO: 54493 - DNA, 556 bp, Chicken  19866894307109_5
ttcaaataattttctgatatagaaaaaaatagggaaaaatattctacaaatatatatatatctcccaaggcaaacattttcagctgtgccagtcatgcagtgggatattagatcccgtgtacactacctcargaagatgtgatttcttccccccccagcaaaacattagaccacttgttcagctcagcactgactcataaaaaatccctaaatctggtgctgaatcatcactgacgtctccygtaggaattccttttgggggagatctgtctgttcaagtaccaasctaacacagcaccrtatagcttgggaggctgctgcagtcacgtctggaggcagcgtggtggcaggtaatttagaaaatctgtattaaaaaccaaaacaaacaaagcaacacttcagcctgtgttcaatttcctagcacctttaaaagcctatagtgaagaagagccacgctgtatatggaaaacaggaaatgaaaatacaactgtgtttaaaaaaggaaagaaaaaaagccaacaagtggtagctgtgttaattcctgagttttaaaaac

SEQ ID NO: 54494 - DNA, 599 bp, Chicken  19866894307113_1
  misc_feature (1)..(55): n is any nucleotide
nnnnnnnnnnnnnnnnnnnnnnnnnnnnnnnnnnnnnnnnnnnnnnnnnnnnnnnttctggatgttctgcacaaggggaaacctgaattacaaacttatttttttcattattgtactaagagctggggggtattaaatgcaggtgctgcggctccgtcataattggcagttaatggagagacaccagctgtactgttgcacaagggaggtattatatctcttcacacgttgcatatattgtaggaaatgcagaattcctgtcattgtcagaaactttgtgtccccatctaccgttcctcygcagaaaaaagacaatgatccgctgaaagttaaaaccacatctattttcagaaacagcttatcccttttattgtgctttcacgtagtgctaattgatgttttgtttggttaaatatagaaaagatttaacaaatgtttgcctttttatggtcatgcaggactaactggtgctgtagtggctgcctcatgtttttttgcagcacgtgacaggttatcccatgtatctgcgtgtgtggagcgcgtacgtggctgtatgcctacactcaggattatacttgttatgcattgacatatcacac

SEQ ID NO: 54495 - DNA, 600 bp, Chicken  19866894307114_1
ttaaattatgtttgaaagggccagtgaaaacacattagcacctctacacaagcactgtgtttgaacacagttggtttggggagggaggaaagaaagatttccaggcctggtacagacaaagcccagaggctgttggcgtaagcactaaccagggtagtgattcaagaaaatggaaagagaatgcctttaaagcagaactcacaaaaaaagacattaaacagcaaataggagacaggaccttagaaagcagcgtttaataattaggtcaacgctcaattgcaaagttcttttgtgaactgyaaatgtattctaaaataggagtcagaaacttgccagaagctgatttgcctggctgtttcagaaacccgcctagattctctgtttcagttttcaccatcgtaattatccgcctgccagagcaactgatacagcaaattggctgcttgctactgctgctgcttgctgccagtgccaaggagttaacagccgggctctggtaggcagcgggatggcagtcctaccagcagtttctgcatgcagggacataggacaatgcagagttaccagctgtctttacaaactttgcattgtctttgtctt

SEQ ID NO: 54496 - DNA, 404 bp, Chicken  19866894307114_2
gtcagaaacttgccagaagctgatttgcctggctgtttcagaaacccgcctagattctctgtttcagttttcaccatcgtaattatccgcctgccagagcaactgatacagcaaattggctgcttgctactgctgctgcttgctgccagtgccaaggagttaacagccgggctctggtaggcagcgggatggcagtcctaccagcagtttctgcatgcagggacataggacaatgcagagttaccagctgtctttacaaactttgcattgtctttgtcttgcctgcaggtcagcagggcrcttgcacatgcactgtattttgaaagcacgctgaggtcccgtgtgcacctctgacttggcatttgcaggctctgtcagaatgtgccattcaagtcaaatgaata

SEQ ID NO: 54497 - DNA, 600 bp, Chicken  19866894307117_1
gagcaaggacagaggctgctttgtgcccacctggggccatctcctgacatcagagctcatcatctccacctctgaagaaaaatctgttccttactgggtgtctgaaacccctcgagccatccaaaacacagtccttatcactgctccctggactctctatcatccttcatcgatgagaagcagacagtgaataagcaaacccttcttgaagcttggaacagttcttgtttgataagaagtcagcctagctttgacgctaaggtcaacaacattgtaatctatcctaaacatatttcaacygcaaatgtcccagcaaatggcatctcttcagctgctgcttgtttcctcctttaaagcagttccagtcactgagccactaaaatcaaaatactgcctacctcaaagttgggatggcattggggactccaaggagacaggggaggcggcttactcaagcagaaagcaaaggatcacacgctcatttttactcagaaagaaccataaactgaggcccagctgctgcttgcttcttcctttaaacttctgctgttatttcccaaagaatgttctcaacttaagagcaacccattgccctgctag

SEQ ID NO: 54498 - DNA, 600 bp, Chicken  19866894307119_1
ggtacaagtttgtgaaatcattcaaatcctatgaaagccaccttataaactgaactgcgtgtctttctcaggaggaatgaaggaacaggacttaatgtgcatcaaacttcatggcgtcaacaaaataggcctgaagaagatcattgatttcatttatactgcaaagctttcccttaacatggacaaccttcaggacactctggaagctgccagttttttgcagattttacctgttttggacttctgtaaagtgtttcttatctctggggtaagacttactgtttgttgttcacacttacraagacttgtttaagttttaaatcaaaaacagtgccattataacagttgaattctgtttcaccattatttataacttgaattcacaggataacttttaaactttattgcagatttttttgtgtattatttatatcactctcacactgaaaacatttatcacatttaaatccttctattggttgcagtaatgatagtagtggtattatagttttcagattccttactttatttcttagttcttgccctcatattccatatcctttcattaaaaaagctactttgctgcttaaacttgaacac

SEQ ID NO: 54499 - DNA, 599 bp, Chicken  19866894307123_1
  misc_feature (1)..(26): n is any nucleotide
nnnnnnnnnnnnnnnnnnnnnnnnnntgtagaaaaaaaagaaaatgaaattccaggtaccttgtaagagctttctgcaaaaacacggtcctcctctgttaaataagacatccttaggattatcaactacagattagtcaagttcataatcctaggctaatcagaacaagaactatttcttcttctgtttaattattctacaaatctcagaagatactgtttttcattatcaggtaagtaatccaagctttgctaacagagattttcatttaaactataaaggaagacacagtaagtgaaragcaaatgggaaacagcctttaacttttgacaaatcaggatgggtcagtgaaatggtggtcttggtctctcagttgtctttttgtccaagcaaatgcctgcaacgaacaaattgatcataacctttgtttcacaccactttttgtgggtaaaaaccagggtcaagacaaaggacatctggtggtcgtgttctattacargcttcctgatygaggggagcctgtggatgagaccttcttgcttcaactacaagaagtgttgcacctgcaagctcattgcaagtacattgttcagaagaga

SEQ ID NO: 54500 - DNA, 600 bp, Chicken  19866894307123_2
caaatctcagaagatactgtttttcattatcaggtaagtaatccaagctttgctaacagagattttcatttaaactataaaggaagacacagtaagtgaaragcaaatgggaaacagcctttaacttttgacaaatcaggatgggtcagtgaaatggtggtcttggtctctcagttgtctttttgtccaagcaaatgcctgcaacgaacaaattgatcataacctttgtttcacaccactttttgtgggtaaaaaccagggtcaagacaaaggacatctggtggtcgtgttctattacargcttcctgatygaggggagcctgtggatgagaccttcttgcttcaactacaagaagtgttgcacctgcaagctcattgcaagtacattgttcagaagagagagatcaaggagagtctatcctctctgatatatccctccaagggataattgtcttcaacagacatggggaaggctgaggtactcaatgagttcttagcactatcagtcaggcttcccacatctctcatgtccctgaaccactgggcagaggtcaggggagcagaatccttccttctgtaagagaagaacaaatctgagac

SEQ ID NO: 54501 - DNA, 600 bp, Chicken  19866894307123_3
agatactgtttttcattatcaggtaagtaatccaagctttgctaacagagattttcatttaaactataaaggaagacacagtaagtgaaragcaaatgggaaacagcctttaacttttgacaaatcaggatgggtcagtgaaatggtggtcttggtctctcagttgtctttttgtccaagcaaatgcctgcaacgaacaaattgatcataacctttgtttcacaccactttttgtgggtaaaaaccagggtcaagacaaaggacatctggtggtcgtgttctattacargcttcctgatygaggggagcctgtggatgagaccttcttgcttcaactacaagaagtgttgcacctgcaagctcattgcaagtacattgttcagaagagagagatcaaggagagtctatcctctctgatatatccctccaagggataattgtcttcaacagacatggggaaggctgaggtactcaatgagttcttagcactatcagtcaggcttcccacatctctcatgtccctgaaccactgggcagaggtcaggggagcagaatccttccttctgtaagagaagaacaaatctgagactgccatgtgag

SEQ ID NO: 54502 - DNA, 454 bp, Chicken  19866894307129_1
tccagatttcttgacagaagtgtgagcgactgaacacattgttctccaacaaatccttgactgttcgaagcaagcaagacaagctttcctggaatcaccccagaaataaagcagaaataatttcctttataagtaacatgttcttacaaaaacaatttgctgtttttttcctgcttagtgtttctaaagacttgaatagtggagagaattcctgaggaagggcccaagtctttcaccttaaggctgagttcgaggcagccaagctgacagcactgacacctgacagctcctcaggagtgrcgtgagccagcagtcatggcccaggttctggggagaagaccatcaccatacctacccctgctgcaaactgagaagactgataacagatggaacaaggataaaagacaccgagccacaccagggaaggctgaagcacactgtagtggtgactgca

SEQ ID NO: 54503 - DNA, 600 bp, Chicken  19866894307133_1
gcatttgtggctccgatcctggctaaaatggcaatgggaaattccgagcccagagaccttcaggcaggtgaaaatgcaagccagtctgtcctgagccccgtgccaacagcgtcggctacactagcactgaaacaccatcttggtgtcgatttcttgtggtcctatattgtcatagggacctatcttctgtttgtttctttcttcttttttattttgtattcaaagagcagctcggttcgagacaaatcaaaggcttctgcgcagaaatgcaaggttgccaaataccaccatgtccttatyattctccttttcctkttcttcctctgctacgtgggagcggaggttacttayggctcctacatatttacttatgcaaaggtctttgctgagatgaaagaaagygaagcagctgctctgaattctgtmttctggggagcgtttgctgtttgtagagcggtgtcggtattttgtgctgcttgcttataccccggcactatgatcgtgctgagcctcattggctctgcygtctcctcttcgtccttggctttctttgcacactacccaatttcgctgtgggctggaactgcggtgtacggagcc

SEQ ID NO: 54504 - DNA, 600 bp, Chicken  19866894307133_2
atcctggctaaaatggcaatgggaaattccgagcccagagaccttcaggcaggtgaaaatgcaagccagtctgtcctgagccccgtgccaacagcgtcggctacactagcactgaaacaccatcttggtgtcgatttcttgtggtcctatattgtcatagggacctatcttctgtttgtttctttcttcttttttattttgtattcaaagagcagctcggttcgagacaaatcaaaggcttctgcgcagaaatgcaaggttgccaaataccaccatgtccttatyattctccttttcctkttcttcctctgctacgtgggagcggaggttacttayggctcctacatatttacttatgcaaaggtctttgctgagatgaaagaaagygaagcagctgctctgaattctgtmttctggggagcgtttgctgtttgtagagcggtgtcggtattttgtgctgcttgcttataccccggcactatgatcgtgctgagcctcattggctctgcygtctcctcttcgtccttggctttctttgcacactacccaatttcgctgtgggctggaactgcggtgtacggagcctccatggccaccatc

SEQ ID NO: 54505 - DNA, 600 bp, Chicken  19866894307133_3
agagaccttcaggcaggtgaaaatgcaagccagtctgtcctgagccccgtgccaacagcgtcggctacactagcactgaaacaccatcttggtgtcgatttcttgtggtcctatattgtcatagggacctatcttctgtttgtttctttcttcttttttattttgtattcaaagagcagctcggttcgagacaaatcaaaggcttctgcgcagaaatgcaaggttgccaaataccaccatgtccttatyattctccttttcctkttcttcctctgctacgtgggagcggaggttacttayggctcctacatatttacttatgcaaaggtctttgctgagatgaaagaaagygaagcagctgctctgaattctgtmttctggggagcgtttgctgtttgtagagcggtgtcggtattttgtgctgcttgcttataccccggcactatgatcgtgctgagcctcattggctctgcygtctcctcttcgtccttggctttctttgcacactacccaatttcgctgtgggctggaactgcggtgtacggagcctccatggccaccatcttccccagtggcatttcctggatcgagcagtacacg

SEQ ID NO: 54506 - DNA, 600 bp, Chicken  19866894307133_4
ccaacagcgtcggctacactagcactgaaacaccatcttggtgtcgatttcttgtggtcctatattgtcatagggacctatcttctgtttgtttctttcttcttttttattttgtattcaaagagcagctcggttcgagacaaatcaaaggcttctgcgcagaaatgcaaggttgccaaataccaccatgtccttatyattctccttttcctkttcttcctctgctacgtgggagcggaggttacttayggctcctacatatttacttatgcaaaggtctttgctgagatgaaagaaagygaagcagctgctctgaattctgtmttctggggagcgtttgctgtttgtagagcggtgtcggtattttgtgctgcttgcttataccccggcactatgatcgtgctgagcctcattggctctgcygtctcctcttcgtccttggctttctttgcacactacccaatttcgctgtgggctggaactgcggtgtacggagcctccatggccaccatcttccccagtggcatttcctggatcgagcagtacacggtcatccagggggaagtcagcttctctctttcgtgggtggtgctgctctgg

SEQ ID NO: 54507 - DNA, 591 bp, Chicken  19866894307133_5
ctgaaacaccatcttggtgtcgatttcttgtggtcctatattgtcatagggacctatcttctgtttgtttctttcttcttttttattttgtattcaaagagcagctcggttcgagacaaatcaaaggcttctgcgcagaaatgcaaggttgccaaataccaccatgtccttatyattctccttttcctkttcttcctctgctacgtgggagcggaggttacttayggctcctacatatttacttatgcaaaggtctttgctgagatgaaagaaagygaagcagctgctctgaattctgtmttctggggagcgtttgctgtttgtagagcggtgtcggtattttgtgctgcttgcttataccccggcactatgatcgtgctgagcctcattggctctgcygtctcctcttcgtccttggctttctttgcacactacccaatttcgctgtgggctggaactgcggtgtacggagcctccatggccaccatcttccccagtggcatttcctggatcgagcagtacacggtcatccagggggaagtcagcttctctctttcgtgggtggtgctgctctggggggagatgtgcatt

SEQ ID NO: 54508 - DNA, 492 bp, Chicken  19866894307133_6
agcagctcggttcgagacaaatcaaaggcttctgcgcagaaatgcaaggttgccaaataccaccatgtccttatyattctccttttcctkttcttcctctgctacgtgggagcggaggttacttayggctcctacatatttacttatgcaaaggtctttgctgagatgaaagaaagygaagcagctgctctgaattctgtmttctggggagcgtttgctgtttgtagagcggtgtcggtattttgtgctgcttgcttataccccggcactatgatcgtgctgagcctcattggctctgcygtctcctcttcgtccttggctttctttgcacactacccaatttcgctgtgggctggaactgcggtgtacggagcctccatggccaccatcttccccagtggcatttcctggatcgagcagtacacggtcatccagggggaagtcagcttctctctttcgtgggtggtgctgctctggggggagatgtgcatt

SEQ ID NO: 54509 - DNA, 600 bp, Chicken  19866894307138_1
gcacaaaaagtagtacaaagtcatcttattaggctgactattttaaggctgtcccaaaacatacccaagtgattttactatatcacctaatttgggagccttttcaaaactgtgatggaggaaggggaagcagaaggtaagagagagttcatcctttcaggtgtctgctcacaaagtttatcctgcatgacatttgaaattagaaaggcttcaggatgggaacctcaagatcagttaggcagctcgcttgtccagctgtatccccccccccaccacacacacacagtcactaagcattayggagtgtcacctggcacagaggatgcgagtttcaaccacatagcttctaggtacttaaatgttttcaactcaagaaataacaaggcaaaccattagcttcagagtgggttctctattcaaatttggggttacttggtgtgatatcagtcatcccacatacacttgcagctctacagaaatacayggaagggatatctgacaaattctgaaggcgaaagcataactcacttctttaatgtaattcatctcctctttcagctgatcagctgaccagccataaaccaccatttcyctcttatg

SEQ ID NO: 54510 - DNA, 600 bp, Chicken  19866894307138_2
gcatgacatttgaaattagaaaggcttcaggatgggaacctcaagatcagttaggcagctcgcttgtccagctgtatccccccccccaccacacacacacagtcactaagcattayggagtgtcacctggcacagaggatgcgagtttcaaccacatagcttctaggtacttaaatgttttcaactcaagaaataacaaggcaaaccattagcttcagagtgggttctctattcaaatttggggttacttggtgtgatatcagtcatcccacatacacttgcagctctacagaaatacayggaagggatatctgacaaattctgaaggcgaaagcataactcacttctttaatgtaattcatctcctctttcagctgatcagctgaccagccataaaccaccatttcyctcttatggttgttgtcagtccggtgcacaacgccatataccattccatgagagagcttccccggagacatgccatttggtacatggtagagctccttaaaaacaaatcataattgattttcaagcaagttctagaacaatttaaaaattaaataaaggcagtaayataagacaagsaactatagtgaaagc

SEQ ID NO: 54511 - DNA, 600 bp, Chicken  19866894307138_3
agcattayggagtgtcacctggcacagaggatgcgagtttcaaccacatagcttctaggtacttaaatgttttcaactcaagaaataacaaggcaaaccattagcttcagagtgggttctctattcaaatttggggttacttggtgtgatatcagtcatcccacatacacttgcagctctacagaaatacayggaagggatatctgacaaattctgaaggcgaaagcataactcacttctttaatgtaattcatctcctctttcagctgatcagctgaccagccataaaccaccatttcyctcttatggttgttgtcagtccggtgcacaacgccatataccattccatgagagagcttccccggagacatgccatttggtacatggtagagctccttaaaaacaaatcataattgattttcaagcaagttctagaacaatttaaaaattaaataaaggcagtaayataagacaagsaactatagtgaaagctatacctaagtatacctaagaacacttcatattttgggatgatcaatgattagtttataatcagtttagatgtcaatttttcactagctttaatggaaatggtatgtg

SEQ ID NO: 54512 - DNA, 600 bp, Chicken  19866894307138_4
acacttgcagctctacagaaatacayggaagggatatctgacaaattctgaaggcgaaagcataactcacttctttaatgtaattcatctcctctttcagctgatcagctgaccagccataaaccaccatttcyctcttatggttgttgtcagtccggtgcacaacgccatataccattccatgagagagcttccccggagacatgccatttggtacatggtagagctccttaaaaacaaatcataattgattttcaagcaagttctagaacaatttaaaaattaaataaaggcagtaayataagacaagsaactatagtgaaagctatacctaagtatacctaagaacacttcatattttgggatgatcaatgattagtttataatcagtttagatgtcaatttttcactagctttaatggaaatggtatgtgtacagccaagagccacagatgagattactgcaaggagagagacatgtgagaaaagaaagttcttctggcttatatggtacttttctgcattcttccagaagactgtctgcttttacagttccctttccctcttgcaaacacaaaattcctccatcctgcctcttgc

SEQ ID NO: 54513 - DNA, 600 bp, Chicken  19866894307138_5
tctacagaaatacayggaagggatatctgacaaattctgaaggcgaaagcataactcacttctttaatgtaattcatctcctctttcagctgatcagctgaccagccataaaccaccatttcyctcttatggttgttgtcagtccggtgcacaacgccatataccattccatgagagagcttccccggagacatgccatttggtacatggtagagctccttaaaaacaaatcataattgattttcaagcaagttctagaacaatttaaaaattaaataaaggcagtaayataagacaagsaactatagtgaaagctatacctaagtatacctaagaacacttcatattttgggatgatcaatgattagtttataatcagtttagatgtcaatttttcactagctttaatggaaatggtatgtgtacagccaagagccacagatgagattactgcaaggagagagacatgtgagaaaagaaagttcttctggcttatatggtacttttctgcattcttccagaagactgtctgcttttacagttccctttccctcttgcaaacacaaaattcctccatcctgcctcttgcaaagtccatgc

SEQ ID NO: 54514 - DNA, 600 bp, Chicken  19866894307139_1
gggaaccaccgctccgcgagggggcgccatggcgggcgtcggggcagggagcggccgcgggccggcaggacggcattgccgcacctcgaggccgcccttggaggcgggtaacgcgtgtggtaataaacgcccgttttgttcccagccaaggaaagcatccgggaaatgaagaaagaactcgatttgctcttacaaatggctgagaaagcgttcatggtggaactgctgaagatgccgactgctatcagaaagatgaaaaggaaggacttgcttagtaagtgcgtgtgaacgcagcatttratgttggtgagcaaagggggcacggacgtaaaatcaaactgaagactctgagaccttgagttgactgtaagcctttgcagaaggtgtgtttagtgccttccttggaacctgctacctaaaagcattggcttccattagcacggagcattgctgctttcaattcaggctgtgtactgttcggctaagtttactattcttctacagatgaaacatactgaggtggcccaagatgtttctttaccattgttttgcacagtggccgtcctaaaggatttgctagctaaggtgaacgatgtaggc

SEQ ID NO: 54515 - DNA, 600 bp, Chicken  19866894307139_2
aggcaactgcaactctgaattacatgctcattttcatactctgtaagataacctgcagataataatgatgcaagcaacagaatgtaaacaagctatgctttcttatgtcacagatttgcaagaaggggaggaagtggcccttgctgctgcagcggtgtgtatttttaactttatcacagcttacagaccagaaacttctctttctgctgtaaagatttcagacaaatgactttgttcatctgcctgtttaaacagaagacagaaaggctagacagccagccatggtgcagttatgaacaytgcctaaagatttatggccatctgcagggagaagtacagctgcttctgaaaaacaaactgctgttcagccatttctgtcactttcttccacaaccttttgatttattgctttctgtgagataaagtgtatctgttgagcaaaaaatattgactttgtctttctggatgaatgttttacagactgactgtgctctagaagacgtaccaagcccaaaagtgacaaggaccaacagcaaaaaaggcaagcagctctgttatgtagctttgctctcaaattttctctttgttgtggtttgagtg

SEQ ID NO: 54516 - DNA, 600 bp, Chicken  19866894307155_1
ccctgggtctgtttgtagagacaggctgctgtgctggtggagtaggctgttagtcaaagccagggagagtgctacagtcagctaagaaggtcaaaaaggcaaagccttcagtgatcagaagcattttggggttgtaacagcactcaggcgtttctgaactttcctgtttttttcctttcctgaacttttcctttcatgttttttcccccagggctgttaaaaatatatctctccttttaagattgtgacagaggtgtacagatagttctgtgaagaattacttattttttcacccccccytttttttttctttcagattttcaactttcagtgtcatttcaaatttcaggaaataaatgtgggaaacagactgatgacagctttgtgacatccacccctctgcctccgagtgccttttatccaacaggaaaacaaagcattcagttaaggaagactggaaaaattaaggtacgcactttccctttctcctctatcctcttctcaaccacctgtgcttatgattcacctggtgatgggattttgtcagctcttctccacctcctataggtcttaatctatctcgtctcctacctgtttcct

SEQ ID NO: 54517 - DNA, 600 bp, Chicken  19866894307160_1
gaaatatataggtatagaatgttaattggatttggcaccttttaaaaatgaaactgtatttgaatttaagagggagattaggtgtattgcattttctatcactgtttatttttgtgtggataatacacgtctgaggtaaggtggctttatttgcagtagactcattacatgttggttggatgggacctcaagaggccatctagtccagtctcttgcttgaaacgagcctatcactgcaccagttcaggccagccctggcttcgtccagctgggccttggatatttccagggaagattctrccatgtctctttgtcgcctgtttgagcaatacactaccttcctaatgtccactgtgaatctcccaaacctcagcttgcccctgttgtcccttgttagatcatctttctctacttaaaaatgtttggctgcgtttggtatgcgcagagatctgacggcggacattactcatgaagaatgaaggtgaaaaaaaccaaaacaagttgaatgcctcagactgctagtagaatcatagaatcatagaatcgctaaggttggaaaagacccacaggatcatccagtccaaccattcgcccttcctc

SEQ ID NO: 54518 - DNA, 600 bp, Chicken  19866894307162_1
cgcttcggggtcaggatctcaatgaaagccccgttataagcagcagcctcagaggaaaggtccccactccagattgcagccccaaactgtttaccggttacctggcagtagttaacacgttgggaatgtctcctctggatgttgcccaggtgtttgttgcaggatgcaaacgcgtttgtggtttatgatgtaaacaggtagatgtacattttttctgcctggattgatttctggtcacaaactctctaaatggccagcttgaaagtgctcagcatccatctgaaaggagaagtaaaaaawatatatwtttttccatgtctagacccaaccaatttttggtccctacaatagctttcagcagaaggtgttgaatcatagaatcatagaatggcctaggttggaagggaccccaaagatcaccaagctccaactcccctgccacaggcagggccaccaatctccatagctggtactggaccaggctgcccatggccccatccaacctggccttgaacacctccagggatggagcacccacagcctctctgggcagcccaaactgttgagctcctgtccatctgaagcagaacacatgcatag

SEQ ID NO: 54519 - DNA, 600 bp, Chicken  19866894307162_2
gggtcaggatctcaatgaaagccccgttataagcagcagcctcagaggaaaggtccccactccagattgcagccccaaactgtttaccggttacctggcagtagttaacacgttgggaatgtctcctctggatgttgcccaggtgtttgttgcaggatgcaaacgcgtttgtggtttatgatgtaaacaggtagatgtacattttttctgcctggattgatttctggtcacaaactctctaaatggccagcttgaaagtgctcagcatccatctgaaaggagaagtaaaaaawatatatwtttttccatgtctagacccaaccaatttttggtccctacaatagctttcagcagaaggtgttgaatcatagaatcatagaatggcctaggttggaagggaccccaaagatcaccaagctccaactcccctgccacaggcagggccaccaatctccatagctggtactggaccaggctgcccatggccccatccaacctggccttgaacacctccagggatggagcacccacagcctctctgggcagcccaaactgttgagctcctgtccatctgaagcagaacacatgcatagagcaacg

SEQ ID NO: 54520 - DNA, 599 bp, Chicken  19866894307164_1
  misc_feature (1)..(40): n is any nucleotide
nnnnnnnnnnnnnnnnnnnnnnnnnnnnnnnnnnnnnnnntcatgtagacttatacaaaaactggggctatttttgcagggactgtagtaaacatttctaaaacagacgtagcctgaggtgaagctgttcttgtatttgtgtttagaaagcaagggatagaaaattatgaaacgaatgattcctgagtggtttaaaaactgtaaattcctgtttaaaaaaaaaatctctgatcatatgggcatatggtgcatcccgctatatcatgtttctaccttgcaaaatgaaatgtaatttaattkacagacatgttcaaatccactctaatataccttataaggagtgagtcagagcccttattcttgggaactgtcttcactcaccagagaagtccactctttcaccttttagcagctttcaaatgggggggaaataaaaaatttctattggataagtttttatctttgttaagttgacacattctcttcacccattcaagaaatatcgtcctctcttatcaccctcttatggtcttcaagtacctacgtgggaaagagatttctgatggaagaggggtctttaatctagcagaaaaaggcat

SEQ ID NO: 54521 - DNA, 600 bp, Chicken  19866894307168_1
ggccaatgcttcggtcccatttcttctgggtaggacctagcaaagaaagcagtcaaaaaagcacagcactcttgctgccttctttgcaaagaaaacagcatcagaggcacctcaggcaactcgggagaggaaaacagagtggaagagtgcttccaagggaaaatggttccaaatttcatgctggcacgtgtagagcatgcagcacttcctgacaaccaaggagccacaggcacaacaggaggatcccgtcaggcccagggcatcagcagcatcgggtccaaaggtaaaacctctgtaacrgggattgagggaaattctgggacagatccctgtgcaaggtatgcctttctctggcttggaacttgctgagtagctgacagcagggacagagctttggtggaagcaatgggaaagagctgtgatttctctattcccttgcacataaagaagggcagtgtgtaactcctgcagcttttggtgtgatttgttcaccatacaaaggagagcggctgcggatgctgagtaactggatggaaaacgcctccccagttctgcaggagttgcttcactgaagtcttacatgctccaccacaacagctc

SEQ ID NO: 54522 - DNA, 600 bp, Chicken  19866894307174_1
catgtaccacaataccttgattttcaaagctacctatgtgactctacgcaatgaaagatgataggcaaatcatcccagcatgattccctgtttcaagcttatttttaactcagctttctaatttaggttattctctctcctacagagaatatcttaaattgaagtaatggtggaaatgaaccaataatgtctattatgaagtcaaagggtttattgttaacgcagaaaaaggctgtcctccatcactaccagttacctctcaagtcaatatagttcattagaagcacagtgcaaataacrtgggccctccttaaactgcattcargatcacaatrcagtttttgaactatactactggccaactattaagggatataaaggaatcaaaggtgttatttcatcatccctttattaaattccgcatgttttcagggaagaccagaatcttcaccagcaatagaggaccagaattcatctgtcccctacgtaaattactcaaattgaaatagagaggtcttggaagcttgttacatcttcaaactttcttcggcattcccaaatccaaaaaacaagtcataatcataactgagcttaacataa

SEQ ID NO: 54523 - DNA, 600 bp, Chicken  19866894307174_2
aaagctacctatgtgactctacgcaatgaaagatgataggcaaatcatcccagcatgattccctgtttcaagcttatttttaactcagctttctaatttaggttattctctctcctacagagaatatcttaaattgaagtaatggtggaaatgaaccaataatgtctattatgaagtcaaagggtttattgttaacgcagaaaaaggctgtcctccatcactaccagttacctctcaagtcaatatagttcattagaagcacagtgcaaataacrtgggccctccttaaactgcattcargatcacaatrcagtttttgaactatactactggccaactattaagggatataaaggaatcaaaggtgttatttcatcatccctttattaaattccgcatgttttcagggaagaccagaatcttcaccagcaatagaggaccagaattcatctgtcccctacgtaaattactcaaattgaaatagagaggtcttggaagcttgttacatcttcaaactttcttcggcattcccaaatccaaaaaacaagtcataatcataactgagcttaacataaagtatttgatgttttactcagaaaa

SEQ ID NO: 54524 - DNA, 600 bp, Chicken  19866894307174_3
atgtgactctacgcaatgaaagatgataggcaaatcatcccagcatgattccctgtttcaagcttatttttaactcagctttctaatttaggttattctctctcctacagagaatatcttaaattgaagtaatggtggaaatgaaccaataatgtctattatgaagtcaaagggtttattgttaacgcagaaaaaggctgtcctccatcactaccagttacctctcaagtcaatatagttcattagaagcacagtgcaaataacrtgggccctccttaaactgcattcargatcacaatrcagtttttgaactatactactggccaactattaagggatataaaggaatcaaaggtgttatttcatcatccctttattaaattccgcatgttttcagggaagaccagaatcttcaccagcaatagaggaccagaattcatctgtcccctacgtaaattactcaaattgaaatagagaggtcttggaagcttgttacatcttcaaactttcttcggcattcccaaatccaaaaaacaagtcataatcataactgagcttaacataaagtatttgatgttttactcagaaaatggcaacatt

SEQ ID NO: 54525 - DNA, 599 bp, Chicken  19866894307177_1
  misc_feature (1)..(69): n is any nucleotide
nnnnnnnnnnnnnnnnnnnnnnnnnnnnnnnnnnnnnnnnnnnnnnnnnnnnnnnnnnnnnnnnnnnnnaagatttataacatttatgctttgcgcccagagcttggcaaagatactgcattcaaataacaagtgtaatgtctcctcaagcactaagctcttgtttactttgaaatgtgttctccagataggctttatcctaagaggggaaagggggaaatatagaagccagtaaatgttatctgcacatagccaaataagaatcacttgtacagttttgattatcacagtctcaagatraacagcctatgagttcacaaacctgaccgccaacatcaatatcccactgcactcaccacttttgattctccttctgctcactaaagccagccagccagcgagcataaaaacatctgcacagaacagtcttttcagcctgcagcctgctccccagtcactgtcacgttagcatcagctatcatcagcagcagaaacacacagaagttgactatcagtgtaaactattcaagcaaaatgggaggatatttcacatgctaaaagaacatgtactcaaacgctgggggaaaaaaaacacagct

SEQ ID NO: 54526 - DNA, 599 bp, Chicken  19866894307182_1
  misc_feature (1)..(85): n is any nucleotide
nnnnnnnnnnnnnnnnnnnnnnnnnnnnnnnnnnnnnnnnnnnnnnnnnnnnnnnnnnnnnnnnnnnnnnnnnnnnnnnnnnnnntaagcattaaaccttaacggggtttatatataaactaaggtactaaacatgctgtgaatagcagttaagaaatctttctccaacttgtccattcagtacaggtcgtttctgtgaaccttccttcaggagctaagattactcctaacatctccctgccagaagtctttgcaagatacattaaacaagacagatctatcacacaaaacagttcaagyycttcttaagtgagatactaacttaaaatgaactatcagatgattcaatatgcagcttacataacatggagcaagtgtaaatagataaataggctgctgttttcttccactgtggtttgtggactctgcctttggagttaggatagctgcaaaacagagcaagtatgcacttatgttctagtttggataatcaaattctccagcttacatctctctaatgtgtgctattttaggcattaggaaacaagattatggcattctttgacactacagaagaccgcaatctatatgacaaactg

SEQ ID NO: 54527 - DNA, 599 bp, Chicken  19866894307182_2
  misc_feature (1)..(84): n is any nucleotide
nnnnnnnnnnnnnnnnnnnnnnnnnnnnnnnnnnnnnnnnnnnnnnnnnnnnnnnnnnnnnnnnnnnnnnnnnnnnnnnnnnnntaagcattaaaccttaacggggtttatatataaactaaggtactaaacatgctgtgaatagcagttaagaaatctttctccaacttgtccattcagtacaggtcgtttctgtgaaccttccttcaggagctaagattactcctaacatctccctgccagaagtctttgcaagatacattaaacaagacagatctatcacacaaaacagttcaagyycttcttaagtgagatactaacttaaaatgaactatcagatgattcaatatgcagcttacataacatggagcaagtgtaaatagataaataggctgctgttttcttccactgtggtttgtggactctgcctttggagttaggatagctgcaaaacagagcaagtatgcacttatgttctagtttggataatcaaattctccagcttacatctctctaatgtgtgctattttaggcattaggaaacaagattatggcattctttgacactacagaagaccgcaatctatatgacaaactgg

SEQ ID NO: 54528 - DNA, 600 bp, Chicken  19866894307184_1
taatcatgtttaacaatattttagtgataagagttggtgacattatagcttccagtctttgatgcatatgattatattaccttcttcatcagtgaatacaaaactcctctggtaacttgctctactgacgttggaggaagtgagggctgttattgtttcagtgttcagcatgctgtcacttcattgctttgatccatggccttatgtggctttttaaagtggaggggggtggagagagaagggttactgggcttgtaaacatttctattacatcagattcatttttctgccatgtacaayctactggtgtgactcagacattcacattttataaagtcagctatgtctacagggactacagccattctgaggaattctagataaaagtgaattagttttattcttatcttaattacacaatgtacagttgtatgaaaagtgcccttgtgttgacttttagtgcagatgtgcaaccactggcaggtaatgagaacaaygtgttcccctctcaccagctcctttattytttggctgttagccctagcacagctttagaactagccactctcattcatagtgctctcagctgctctccaccca

SEQ ID NO: 54529 - DNA, 600 bp, Chicken  19866894307184_2
ggccttatgtggctttttaaagtggaggggggtggagagagaagggttactgggcttgtaaacatttctattacatcagattcatttttctgccatgtacaayctactggtgtgactcagacattcacattttataaagtcagctatgtctacagggactacagccattctgaggaattctagataaaagtgaattagttttattcttatcttaattacacaatgtacagttgtatgaaaagtgcccttgtgttgacttttagtgcagatgtgcaaccactggcaggtaatgagaacaaygtgttcccctctcaccagctcctttattytttggctgttagccctagcacagctttagaactagccactctcattcatagtgctctcagctgctctccacccacctctcaaatttttattgcggctgcgcaacagtgatctgagatggctgccactaaatacttcaagtcgtgtttcttagagtagatcattcaaccgctttgggttcggggaatagggtgtgctgtttcacatgtataagatcagggtgagacaatttatttttgcccttgcatcagttcagggaactgtcagtagtat

SEQ ID NO: 54530 - DNA, 600 bp, Chicken  19866894307184_3
gggtggagagagaagggttactgggcttgtaaacatttctattacatcagattcatttttctgccatgtacaayctactggtgtgactcagacattcacattttataaagtcagctatgtctacagggactacagccattctgaggaattctagataaaagtgaattagttttattcttatcttaattacacaatgtacagttgtatgaaaagtgcccttgtgttgacttttagtgcagatgtgcaaccactggcaggtaatgagaacaaygtgttcccctctcaccagctcctttattytttggctgttagccctagcacagctttagaactagccactctcattcatagtgctctcagctgctctccacccacctctcaaatttttattgcggctgcgcaacagtgatctgagatggctgccactaaatacttcaagtcgtgtttcttagagtagatcattcaaccgctttgggttcggggaatagggtgtgctgtttcacatgtataagatcagggtgagacaatttatttttgcccttgcatcagttcagggaactgtcagtagtatgggaaaattgatagtctttaccagcaaaa

SEQ ID NO: 54531 - DNA, 600 bp, Chicken  19866894307186_1
agaagataagctaaacagacatctctaatgtagcatgaaaatctgtcacagggaagtatttgtggggaaaagaggacttcgataaactttggcaccaaaaatgagagcacaactgcactgtgagatggtgagtgaggaccatcagcaggttagcctgatctgggtgcaacaaataggaacagatttttgccatcactctccaccttggtccatgttgtgcttgttcagcaatgctagagaggccttggggcccgggcaggtgggcctggggcagaagggccagacagcactcagccatgrcaccttcagaccctctacatcatgtgcttgtagagcttgccaaagccacatcagtaacagaggatagtttggttctgcttaatcatcacagttctcccttggatcagggcacattgggcctttgttcaagggaagagcctgataacaccagcagagtttctgatctttgcagtggtgtcagtggaaatgagtccaattattgctctgtgacagacctctgttttaccagttataggcccaagaagctctctctctgawgtattttcagatctctgtgtcttccaggcagataaggcaggc

SEQ ID NO: 54532 - DNA, 600 bp, Chicken  19866894307186_2
ggtgggcctggggcagaagggccagacagcactcagccatgrcaccttcagaccctctacatcatgtgcttgtagagcttgccaaagccacatcagtaacagaggatagtttggttctgcttaatcatcacagttctcccttggatcagggcacattgggcctttgttcaagggaagagcctgataacaccagcagagtttctgatctttgcagtggtgtcagtggaaatgagtccaattattgctctgtgacagacctctgttttaccagttataggcccaagaagctctctctctgawgtattttcagatctctgtgtcttccaggcagataaggcaggcttgcgcatctttgcttatcaagcacagtgttgctcatcagggtgtggatttcagataatgttttcacaagttctgatggctccaaggcatttaagttctgcctgtgtcagatttactgccttttttctttcttttcacaacccgagcccagcctcagagatggatgtatctacctcacagcaatgaacagagctgagcttactttggtcttgctgttacatgcacagcagggtgcaaataggcagcaccttaaatcaa

SEQ ID NO: 54533 - DNA, 600 bp, Chicken  19866894307186_3
tttcagatctctgtgtcttccaggcagataaggcaggcttgcgcatctttgcttatcaagcacagtgttgctcatcagggtgtggatttcagataatgttttcacaagttctgatggctccaaggcatttaagttctgcctgtgtcagatttactgccttttttctttcttttcacaacccgagcccagcctcagagatggatgtatctacctcacagcaatgaacagagctgagcttactttggtcttgctgttacatgcacagcagggtgcaaataggcagcaccttaaatcaaactyccctcactctacagcggctctagctgtccgctcagccacattcaagaaaaggtgttcaaaatggaaatggtgcaaaaaaaggggaatttttggggaagctgagagtgattgccttgcttagcctaactgagcaaaagccgaaaggtgagaggacagctttctgtaaatatcactgcaggaagaggaatatcagggaatgagatgagctgttcagactaaaagttagctttatcacaagagaaaaaaaggataggaaccggtcccaggtgtatctaggatggaaatttctttatctgctgg

SEQ ID NO: 54534 - DNA, 600 bp, Chicken  19866894307192_1
aggaaaagaaaccataaaaatgaacctgtctcatgagactttaaccagggggagatgaaagattagcaaagaaatgtagatgtttttaatggctctgtgtatccattcgctgtattgatgcaccattgttgggagaccctactcctgatggcacaaagctttttgtttcaagtcttggatcagcgtacgaatcaatacatttatttctggatggactgttaaaccaagaccagctctgcccatattcactgtgtggccattttagagattcctgagattccagtcagcgtctgcagtgtrtcttccatgcagatgataagatggcttttaatagcaaaagcactgaatgtgagaaggtggagtgtctgctgagtttccaaagacagctggtaactcacttgccaggggtttccgtatctgctgttctgttggtgctactgaggtcaaatcatccataatgctgagtgctgcttaataaggtctcagtctgaaatcacatctaaggaaagtgtttctagtctggacttggaaaacttctccgcttattttactggagtgggaatacagcagaatttggccaagtgaagacactcagcaact

SEQ ID NO: 54535 - DNA, 600 bp, Chicken  19866894307193_1
atcagatgaatatggtactggaatattaatgacatgtaaactatatttttggtcaagagagaaaactgagagatgaaagctaaacaatcactgagatatgaatatcagagtagtgattctgcgttgcttgcctgagtggaactgatattcatctgtgccctgaggagatcagtaaaattgttatagattttgttgcctttctggtcaagctataagacaggaattgcacagatttctcttaaatacgagcacaagctgcaaaaacagctggcaaaggtggcaaagggtatcagcactacyactgcctggtcctgtcctagccaaggaatctggccctaccaatatccaagcacatgcataaattcaatcctccagctttcataattgctctggagatgctcctgcgctaagccattatcaggaatgaattttatattgtttctgtcatgtattagtcttgtgaattctcacctactccttcaagcccaacagcagtggtgttaccctttgcagctgcattgaagcttgtcactgatttcatagagtcacagaaatatttacgtagggagagatgtttaaaagccatctggtccaactccc

SEQ ID NO: 54536 - DNA, 600 bp, Chicken  19866894307197_1
aaatagtaatcttcagccttgtatttgttaaacaggtcctgtcaaacttgcatacagtgtactttctgctccggtgtgagaatttgtaagacccatctggcacaaactgtgatatcacaatgttgccaccgtcgtttctaaagcattgaagctgatattcagctccatacatagttctgtagttgtaatctgctgattcacgtggatgagctgatcaagacactcttaatttcatggtatgacagctgtacacggccatccggaacatggcttgtcttctacatcaccgttgctgctgaygaaacactctacccactgcctcagtgtgctgacatcccctgtttggtgtccacaaatgctctacaagtgtcartgaatgtcactgtgtgccattcttttttctgcatggaggaattaaatgacacactttttgcttcatgcgctattccatatcggacctcactccgttggactgctcctctgctgccatctgtcacatggcaacaacatgttacagaatattggcggaaagattcaacctctactggcgtaacactgacatctgcttctaatatcgtgggccaaaataataamatagga

SEQ ID NO: 54537 - DNA, 600 bp, Chicken  19866894307197_2
gtgtgagaatttgtaagacccatctggcacaaactgtgatatcacaatgttgccaccgtcgtttctaaagcattgaagctgatattcagctccatacatagttctgtagttgtaatctgctgattcacgtggatgagctgatcaagacactcttaatttcatggtatgacagctgtacacggccatccggaacatggcttgtcttctacatcaccgttgctgctgaygaaacactctacccactgcctcagtgtgctgacatcccctgtttggtgtccacaaatgctctacaagtgtcartgaatgtcactgtgtgccattcttttttctgcatggaggaattaaatgacacactttttgcttcatgcgctattccatatcggacctcactccgttggactgctcctctgctgccatctgtcacatggcaacaacatgttacagaatattggcggaaagattcaacctctactggcgtaacactgacatctgcttctaatatcgtgggccaaaataataamataggaggcattactttcagagcagcctttgtayaagggcacagctacctatgaggtgctatattaaggactgcactgc

SEQ ID NO: 54538 - DNA, 600 bp, Chicken  19866894307197_3
gctgaygaaacactctacccactgcctcagtgtgctgacatcccctgtttggtgtccacaaatgctctacaagtgtcartgaatgtcactgtgtgccattcttttttctgcatggaggaattaaatgacacactttttgcttcatgcgctattccatatcggacctcactccgttggactgctcctctgctgccatctgtcacatggcaacaacatgttacagaatattggcggaaagattcaacctctactggcgtaacactgacatctgcttctaatatcgtgggccaaaataataamataggaggcattactttcagagcagcctttgtayaagggcacagctacctatgaggtgctatattaaggactgcactgccagccagtcttaggacgggactgttctgacctgatatatctctgagctggtgtggcctcagttagagtggttttgtgtgccatawcataggaaggacataaaaytgctatagagcaaccaaagcaggtctacaaagatggggaagggtctggagggcagggtgtatgagaagcagctgaggtcccgtggtttgtctggcttagagcagaagaggctgaggg

SEQ ID NO: 54539 - DNA, 600 bp, Chicken  19866894307197_4
ctgacatcccctgtttggtgtccacaaatgctctacaagtgtcartgaatgtcactgtgtgccattcttttttctgcatggaggaattaaatgacacactttttgcttcatgcgctattccatatcggacctcactccgttggactgctcctctgctgccatctgtcacatggcaacaacatgttacagaatattggcggaaagattcaacctctactggcgtaacactgacatctgcttctaatatcgtgggccaaaataataamataggaggcattactttcagagcagcctttgtayaagggcacagctacctatgaggtgctatattaaggactgcactgccagccagtcttaggacgggactgttctgacctgatatatctctgagctggtgtggcctcagttagagtggttttgtgtgccatawcataggaaggacataaaaytgctatagagcaaccaaagcaggtctacaaagatggggaagggtctggagggcagggtgtatgagaagcagctgaggtcccgtggtttgtctggcttagagcagaagaggctgagggaaggcctcatggcagcctgtagcactgagctctg

SEQ ID NO: 54540 - DNA, 600 bp, Chicken  19866894307197_5
ctcactccgttggactgctcctctgctgccatctgtcacatggcaacaacatgttacagaatattggcggaaagattcaacctctactggcgtaacactgacatctgcttctaatatcgtgggccaaaataataamataggaggcattactttcagagcagcctttgtayaagggcacagctacctatgaggtgctatattaaggactgcactgccagccagtcttaggacgggactgttctgacctgatatatctctgagctggtgtggcctcagttagagtggttttgtgtgccatawcataggaaggacataaaaytgctatagagcaaccaaagcaggtctacaaagatggggaagggtctggagggcagggtgtatgagaagcagctgaggtcccgtggtttgtctggcttagagcagaagaggctgagggaaggcctcatggcagcctgtagcactgagctctgctctctggtgacagacccaggactcaagggaatggcatggagttgtgtcaggggaaggtcatgctgggggttaagaaaaggttcttcaccagaagatggtgaggccctggaacaggctgcccagggcagt

SEQ ID NO: 54541 - DNA, 600 bp, Chicken  19866894307197_6
cctctgctgccatctgtcacatggcaacaacatgttacagaatattggcggaaagattcaacctctactggcgtaacactgacatctgcttctaatatcgtgggccaaaataataamataggaggcattactttcagagcagcctttgtayaagggcacagctacctatgaggtgctatattaaggactgcactgccagccagtcttaggacgggactgttctgacctgatatatctctgagctggtgtggcctcagttagagtggttttgtgtgccatawcataggaaggacataaaaytgctatagagcaaccaaagcaggtctacaaagatggggaagggtctggagggcagggtgtatgagaagcagctgaggtcccgtggtttgtctggcttagagcagaagaggctgagggaaggcctcatggcagcctgtagcactgagctctgctctctggtgacagacccaggactcaagggaatggcatggagttgtgtcaggggaaggtcatgctgggggttaagaaaaggttcttcaccagaagatggtgaggccctggaacaggctgcccagggcagtgggtacagccccaagctgc

SEQ ID NO: 54542 - DNA, 600 bp, Chicken  19866894307197_7
atcaagttgtatcaggggaggttcaggttggatattacgaaaaatgccttttcagaaagagtagtgaggcactggcacaggctgcccagggaggtggctgagtcactgtccttgtaggtgatcaagaaatgtttagatgtggtactaagagacatggtttagtgggcaatatagaatcatagaaccaccaacatactacgttgacgtttccctcatccaccaggtgggtgactccatcatagaaggagatcaggttagtcaatattggtggtaggtggatggtcggactagatgatctcrgagatcttttccaaccttggtgattctatgattctatgagtgtttggacatgggatttccattttgggtagtgctgtgtgaagccaggagttggattcagtgatcctttgggggtcccttccaacgcaggatattctataattctattacttttgcatccttaaaaataaatacagaacacgacagtcacacaggctcgtgcaaactgcatttcccaacagacatctaagggacttgaaaggggctgaagaaaagctgggccattgatgctgctagggcaccacaaacagggagatttgt

SEQ ID NO: 54543 - DNA, 599 bp, Chicken  19866894307198_1
  misc_feature (1)..(157): n is any nucleotide
nnnnnnnnnnnnnnnnnnnnnnnnnnnnnnnnnnnnnnnnnnnnnnnnnnnnnnnnnnnnnnnnnnnnnnnnnnnnnnnnnnnnnnnnnnnnnnnnnnnnnnnnnnnnnnnnnnnnnnnnnnnnnnnnnnnnnnnnnnnnnnnnnnnnnnnnnnnnncactgaggtcaactccccagtgctgccaccggaattaatggcagacacctgcagggggacagcaagggttctgcttgctttcagacatgttacagagacagagcaaggcaagacagctggaggcaggagcctcatctccccawttctgagctctcaccakgaaatcacaacacttcagcacctcctgaagttctcttcattcaggttttggcctggcagtgtgccaccaggctcgtgtaccggcccatccatccccccgccatacctctgtcagggtgcgttgcaaagataacagagcactcttacattccttttacagggtcagcctgttggctgtcagtcaccggagccatatggtgggtgcatacagtaactcgccctgtaaatttcattattgtgttgtttatctctgcagatcggccactggcatgtttctgaagga

SEQ ID NO: 54544 - DNA, 599 bp, Chicken  19866894307198_2
  misc_feature (1)..(140): n is any nucleotide
nnnnnnnnnnnnnnnnnnnnnnnnnnnnnnnnnnnnnnnnnnnnnnnnnnnnnnnnnnnnnnnnnnnnnnnnnnnnnnnnnnnnnnnnnnnnnnnnnnnnnnnnnnnnnnnnnnnnnnnnnnnnnnnnnnnnnnnnnnnncactgaggtcaactccccagtgctgccaccggaattaatggcagacacctgcagggggacagcaagggttctgcttgctttcagacatgttacagagacagagcaaggcaagacagctggaggcaggagcctcatctccccawttctgagctctcaccakgaaatcacaacacttcagcacctcctgaagttctcttcattcaggttttggcctggcagtgtgccaccaggctcgtgtaccggcccatccatccccccgccatacctctgtcagggtgcgttgcaaagataacagagcactcttacattccttttacagggtcagcctgttggctgtcagtcaccggagccatatggtgggtgcatacagtaactcgccctgtaaatttcattattgtgttgtttatctctgcagatcggccactggcatgtttctgaaggactcagcatggacaacag

SEQ ID NO: 54545 - DNA, 600 bp, Chicken  19866894307203_1
cttcggtacaaactgatggggtttgtgaaatgagtgaaagaaggtaccgatagcagcagtgttcaaggtgatctagaattactcattttaaagaaatgaacttaggaatttatgactggggactcagatggagcctgatctgctttgctctcttcaggtttaagaataatgttattattgagggctctctgaaattctttcctttttgtgtttgccagagtttgggctctcaggtcaactatgtcttccttgcctgtgctgcttgttatcatgctgccagcgtgcagtatgcaaatggaygtgctgtttgcagaagtacgggctgcctccacagaacagagaagagcaataatttgttttaattaccatataaacgtctggcttgttgtctttcactatttgtacaagcacttatttcccagtagattgaagttaacgtcacgtggttagcacaggaccacagtgctggtttaaagcatcgctgatgcttgatagccttctttctccctgttccctaccctccgtagggtttttatgtcgctgtggttgctgtyggtgttaagctccatgtccacgtttygcttttaactcgttgtcatt

SEQ ID NO: 54546 - DNA, 451 bp, Chicken  19866894307203_2
tgtgctgcttgttatcatgctgccagcgtgcagtatgcaaatggaygtgctgtttgcagaagtacgggctgcctccacagaacagagaagagcaataatttgttttaattaccatataaacgtctggcttgttgtctttcactatttgtacaagcacttatttcccagtagattgaagttaacgtcacgtggttagcacaggaccacagtgctggtttaaagcatcgctgatgcttgatagccttctttctccctgttccctaccctccgtagggtttttatgtcgctgtggttgctgtyggtgttaagctccatgtccacgtttygcttttaactcgttgtcattaggagattctgtggatggatttcgtaggaagtgtttaagaggcaaaatgggtggcttaggaaaggcccagctgaactgagctgccacctggagcacgacaggggt

SEQ ID NO: 54547 - DNA, 425 bp, Chicken  19866894307203_3
cgtgcagtatgcaaatggaygtgctgtttgcagaagtacgggctgcctccacagaacagagaagagcaataatttgttttaattaccatataaacgtctggcttgttgtctttcactatttgtacaagcacttatttcccagtagattgaagttaacgtcacgtggttagcacaggaccacagtgctggtttaaagcatcgctgatgcttgatagccttctttctccctgttccctaccctccgtagggtttttatgtcgctgtggttgctgtyggtgttaagctccatgtccacgtttygcttttaactcgttgtcattaggagattctgtggatggatttcgtaggaagtgtttaagaggcaaaatgggtggcttaggaaaggcccagctgaactgagctgccacctggagcacgacaggggt

SEQ ID NO: 54548 - DNA, 600 bp, Chicken  19866894307214_1
cctttgggcactgcttaacatggaagtacaaatgcttgtcatcccaagaagcttgttactggagctaggtcacaacagatggatacagatggatggggagaggaggaaacaacaacgcagcatcagcagcgtgatgtgcactcactaaagcgcagcagcagccgaacttgggaggcaatggagaatttcgaggagcgttttggttccgctgggatgctcacaggtggttcatctacagcatgacagccagcatgagacagcacacttgtttgggaactgcaaatggctgatgagaggagyggtgctcacctggtgccagcactgggtgcgctgtggtgccgcagtcttcaccagcaggaaggggagcgtggagccagcccagctctgcagagacaygtcatcattctgtccatgaaaacctctggagmcaatggggaatgctctgaccatgcctggatgtgcagtgaggggagcagggcacagtccctgcgctgcctgcaccatgcaccacgcaccgtgcaccatgcgccatgcaccatgcatcatgcaccacccacagtgtaccatgcacccaggtctaagctgagctgtgtccctatg

SEQ ID NO: 54549 - DNA, 600 bp, Chicken  19866894307214_2
ggagaggaggaaacaacaacgcagcatcagcagcgtgatgtgcactcactaaagcgcagcagcagccgaacttgggaggcaatggagaatttcgaggagcgttttggttccgctgggatgctcacaggtggttcatctacagcatgacagccagcatgagacagcacacttgtttgggaactgcaaatggctgatgagaggagyggtgctcacctggtgccagcactgggtgcgctgtggtgccgcagtcttcaccagcaggaaggggagcgtggagccagcccagctctgcagagacaygtcatcattctgtccatgaaaacctctggagmcaatggggaatgctctgaccatgcctggatgtgcagtgaggggagcagggcacagtccctgcgctgcctgcaccatgcaccacgcaccgtgcaccatgcgccatgcaccatgcatcatgcaccacccacagtgtaccatgcacccaggtctaagctgagctgtgtccctatgtgtttggctcagcactaggcttcccaaggtgcaaacctgttggacatcaagagaagtggaagcttggaaacagccatgccctaaagcctggccatg

SEQ ID NO: 54550 - DNA, 572 bp, Chicken  19866894307214_3
gcgtgatgtgcactcactaaagcgcagcagcagccgaacttgggaggcaatggagaatttcgaggagcgttttggttccgctgggatgctcacaggtggttcatctacagcatgacagccagcatgagacagcacacttgtttgggaactgcaaatggctgatgagaggagyggtgctcacctggtgccagcactgggtgcgctgtggtgccgcagtcttcaccagcaggaaggggagcgtggagccagcccagctctgcagagacaygtcatcattctgtccatgaaaacctctggagmcaatggggaatgctctgaccatgcctggatgtgcagtgaggggagcagggcacagtccctgcgctgcctgcaccatgcaccacgcaccgtgcaccatgcgccatgcaccatgcatcatgcaccacccacagtgtaccatgcacccaggtctaagctgagctgtgtccctatgtgtttggctcagcactaggcttcccaaggtgcaaacctgttggacatcaagagaagtggaagcttggaaacagccatgccctaaagcctggccatgcagt

SEQ ID NO: 54551 - DNA, 600 bp, Chicken  19866894307226_1
ggccgtcctgtctgcaccctgtgcggctcctgaggaacccagcagtaattctgttccgcttcccgcgggcctgtgctttccttccaggtcctttggcgttcatcaccactggagctaatggtgaccaaacgtgcctgaagtcaatgagcacgcttccacatgatgccatgctgttgttaagcccctgctagcaaccttcagtaattgcagcggtagcactcatcagcttgtacagcctgtactgaaggtcacccacccctatggtatgagcgcctaagtaagcccttgtgttcccctccrtgggagcatccacaatggctggagcttaactactatcatttgatgattcatttgcagtgcttattttctaaaaattgcatagcctgttctcaaaagcaaagcaaagaaaaaagcagctgttatgaaaagagaggaagaaaaactccacatagaaaacacaagggctttaaagaaccaaacccacattattagggtaggaaaaaaacaacaatttgccacatcttatctttggaaaagatcaaaaatagagttatatcctacacaattaacagaaacacttgcgagtcttaagaacatatg

SEQ ID NO: 54552 - DNA, 600 bp, Chicken  19866894307227_1
cctatggaaacgaatcggaagagttcattccttactgggacacaacggcggtggaaagaagtcccagcagcacgagcccctctgcagaaacccttataaaccctgcaaacagtgccatgcagggggaatcccttctcagcacctgacctgcagccggagcgcggctgttcgctgcagggaagcagttcctaaggctgtgtatggcacacagtcctcttacgcacttcggtttcgctccgcgctcctctgaggctgtagtgaataaaatcctgacagcgttctctcctgcattaatcattygaagctgatcttacaggatacaagggcaaattaaatcctatttgcaatttcatgcatggcgcgcggcgcgagcgagccctgagccagcagtttttcagtaagacaagcgtgtaagttgcaattatgcagctactttcccccatgcgccaacacttttattactgacaaatttataaatgaaaatgtatgaatggtattaaattcaccttcaaggatgtctcgaattaaaatgaatagcccgtaaggccgtattcgaagaaaagcactacttttagtgctccgggtgataaatgggagccc

SEQ ID NO: 54553 - DNA, 574 bp, Chicken  19866894307232_1
cagccttgaatgcctccagggatggggcatccacaacctccttgggcaatctgctccactgcgactccttcaggtatttccttggtagagtagtgcaggataaagccttggaggggatacgtgcccaagaacacttgttgatattcaagaaccatctcctgcaaacacaggagtgatgcgtaccaacaaagaggaagtcaggcaaaaatgctaggaggcctgcaagcctcctggaccaactcaaacacaacaagaaagactacagagggcagacacaaggacagcaagcctgggacgaakaaagagaaattgtctgagaagccggggatagtgtcaggaaaggcaaagaccaaatctaattgaatctggacagggatattaggggcaataagaaaagcttctgtaagtaacaccagtgataaaagaaaaaccagggaaaacatgagccctttctagaagagaaatagaagactaggttacctagaataaagagagggttgaagtattaaggttaggaagatattaggaccaaaagaaactgcaatgtttgcttattctccagtaaaacaggttt

SEQ ID NO: 54554 - DNA, 526 bp, Chicken  19866894307237_1
atgaaaagtaggaaaataatcaccggcagacctttattttccccaggttccacgggagaactatgaaaatgttaattcacagaggcacttagaaaggcattgcttaactttatctatgtcatgaattctggctgacaaaatcttactataaactaatttacactatccatcatgaagtatcatttcaaatgaaaagatttaggttttaacatagcactgtaaactcccaaggacttttggacagcaaacaatgagctcaaccatcctcttgagaagcctatgtgatctacagcctctagrartcccatatctgactagttactgctgcagggacatcctgcaagaccagtgagcttcacaaggtactactcagatggtagtaacagggaggtgaccctgaacgagtgaacagaaagatacagcagaggttttattgatatgttgtcaaagaaaccaatttgttccttttcccttttaagacagatgaggccacaagttttgtacttcataggccatactggggggg

SEQ ID NO: 54555 - DNA, 524 bp, Chicken  19866894307237_2
gaaaagtaggaaaataatcaccggcagacctttattttccccaggttccacgggagaactatgaaaatgttaattcacagaggcacttagaaaggcattgcttaactttatctatgtcatgaattctggctgacaaaatcttactataaactaatttacactatccatcatgaagtatcatttcaaatgaaaagatttaggttttaacatagcactgtaaactcccaaggacttttggacagcaaacaatgagctcaaccatcctcttgagaagcctatgtgatctacagcctctagrartcccatatctgactagttactgctgcagggacatcctgcaagaccagtgagcttcacaaggtactactcagatggtagtaacagggaggtgaccctgaacgagtgaacagaaagatacagcagaggttttattgatatgttgtcaaagaaaccaatttgttccttttcccttttaagacagatgaggccacaagttttgtacttcataggccatactggggggg

SEQ ID NO: 54556 - DNA, 600 bp, Chicken  19866894307243_1
tgaatttctagtgtgggaggtaagttatatggacctacataataaagcttcagaagggattcattctgcaaagtattagcatttaacccactgaaataaaggaatgacacccatgcccaatgagttacttttctcttgcaaaaatcctcttttctaggtttcctcaactgtacgtccatctcattttgctagactgttgacaaattgctgctctagaaatccagcactctggtaacacactgctcatcttagcaaatcaaaaaacatttggtagatttttttgaactagagagtttgagwgaaagtatatgttctgctaaccaaaatgaagagaacattagtggagattctcatgctaataactgctttattagactctaatcatctaaagtcgccgaagacatgaaaacaactgatgtgcctggtggaaaggccatgaaggctcactccccatgtcttattagggcttttttaaatgataaatcagtagcaagcaraaactcaatttctgagcaagtcttttaagttctctacaactttaaaacatttgcacagttttatattactttaaatcacaaataggcttgcttttggaaaatt

SEQ ID NO: 54557 - DNA, 600 bp, Chicken  19866894307243_2
tgacaaattgctgctctagaaatccagcactctggtaacacactgctcatcttagcaaatcaaaaaacatttggtagatttttttgaactagagagtttgagwgaaagtatatgttctgctaaccaaaatgaagagaacattagtggagattctcatgctaataactgctttattagactctaatcatctaaagtcgccgaagacatgaaaacaactgatgtgcctggtggaaaggccatgaaggctcactccccatgtcttattagggcttttttaaatgataaatcagtagcaagcaraaactcaatttctgagcaagtcttttaagttctctacaactttaaaacatttgcacagttttatattactttaaatcacaaataggcttgcttttggaaaatttccaagtacacccattaaagctgattggagtcaaaaaccacattacataaaagaggagcccaagtagaattcagatgcacagatcacagcattgaagcaaggcagaccttaccactttcagcatatatgcttcatgtttgctcacaagcacctccatcaccactgcatcgagtagctcaccatcatatcagagctca

SEQ ID NO: 54558 - DNA, 600 bp, Chicken  19866894307251_1
ttcccttcctttcagtttcacttgccttgtcttctatctaaacctttttcgtgaaatcctttgtcttcctcattcttttagcttgttacagtgcagggacattcttcttattcaaacactcacagcatgagcaaagaaagctacttctgtcgcatcttaagttttaccataactttctggcattttcttttcttctaattttcccagactaccgatagggtaatgaagaattataacgtacatcaattattggtgctcacggggtattatgctcctgaattcaaggggagagaaagaaaraaagaaaragaaaaaaaaaagaaaaagaaagaaagaaagaaaaaagctccactttctgtggttttgaggcacatgggagaggactgcgcccagattatttataacatcgttctgagcatcaattatgtttgactcctacagccacttccttgtcccactggttttacggccagaaggaaccatttttgtgtgtggtagctgcagcgtttaacttgtttcttttatgaggagctcaaacaatgcaccttcagccaaacaatcgatctccccgaataatagcctgaacgtccgtcaagcrct

SEQ ID NO: 54559 - DNA, 600 bp, Chicken  19866894307251_2
cttcctttcagtttcacttgccttgtcttctatctaaacctttttcgtgaaatcctttgtcttcctcattcttttagcttgttacagtgcagggacattcttcttattcaaacactcacagcatgagcaaagaaagctacttctgtcgcatcttaagttttaccataactttctggcattttcttttcttctaattttcccagactaccgatagggtaatgaagaattataacgtacatcaattattggtgctcacggggtattatgctcctgaattcaaggggagagaaagaaaraaaraaaragaaaaaaaaaagaaaaagaaagaaagaaagaaaaaagctccactttctgtggttttgaggcacatgggagaggactgcgcccagattatttataacatcgttctgagcatcaattatgtttgactcctacagccacttccttgtcccactggttttacggccagaaggaaccatttttgtgtgtggtagctgcagcgtttaacttgtttcttttatgaggagctcaaacaatgcaccttcagccaaacaatcgatctccccgaataatagcctgaacgtccgtcaagcrctcggc

SEQ ID NO: 54560 - DNA, 600 bp, Chicken  19866894307251_3
ctttcagtttcacttgccttgtcttctatctaaacctttttcgtgaaatcctttgtcttcctcattcttttagcttgttacagtgcagggacattcttcttattcaaacactcacagcatgagcaaagaaagctacttctgtcgcatcttaagttttaccataactttctggcattttcttttcttctaattttcccagactaccgatagggtaatgaagaattataacgtacatcaattattggtgctcacggggtattatgctcctgaattcaaggggagagaaagaaaraaagaaaragaaaaaaaaaagaaaaagaaagaaagaaagaaaaaagctccactttctgtggttttgaggcacatgggagaggactgcgcccagattatttataacatcgttctgagcatcaattatgtttgactcctacagccacttccttgtcccactggttttacggccagaaggaaccatttttgtgtgtggtagctgcagcgtttaacttgtttcttttatgaggagctcaaacaatgcaccttcagccaaacaatcgatctccccgaataatagcctgaacgtccgtcaagcrctcggcgctg

SEQ ID NO: 54561 - DNA, 600 bp, Chicken  19866894307251_4
ttcagtttcacttgccttgtcttctatctaaacctttttcgtgaaatcctttgtcttcctcattcttttagcttgttacagtgcagggacattcttcttattcaaacactcacagcatgagcaaagaaagctacttctgtcgcatcttaagttttaccataactttctggcattttcttttcttctaattttcccagactaccgatagggtaatgaagaattataacgtacatcaattattggtgctcacggggtattatgctcctgaattcaaggggagagaaagaaaraaagaaararaaaaaaaaaagaaaaagaaagaaagaaagaaaaaagctccactttctgtggttttgaggcacatgggagaggactgcgcccagattatttataacatcgttctgagcatcaattatgtttgactcctacagccacttccttgtcccactggttttacggccagaaggaaccatttttgtgtgtggtagctgcagcgtttaacttgtttcttttatgaggagctcaaacaatgcaccttcagccaaacaatcgatctccccgaataatagcctgaacgtccgtcaagcrctcggcgctggg

SEQ ID NO: 54562 - DNA, 544 bp, Chicken  19866894307251_5
araaagaaaragaaaaaaaaaagaaaaagaaagaaagaaagaaaaaagctccactttctgtggttttgaggcacatgggagaggactgcgcccagattatttataacatcgttctgagcatcaattatgtttgactcctacagccacttccttgtcccactggttttacggccagaaggaaccatttttgtgtgtggtagctgcagcgtttaacttgtttcttttatgaggagctcaaacaatgcaccttcagccaaacaatcgatctccccgaataatagcctgaacgtccgtcaagcrctcggcgctgggaaatagactctcagcgttaaagggagatgggaataaagcttgaggctggaggactgggcgcgggggatcggggtcactgcggagcggtgatgccatccctgcagtccacgtgggcaccccaagagccgggctgcgcccagagcgggcccgagggtcccgcagcccaacccgggccatgtaccggggcagcccccccagctgggtcgcgctgctgggcgcgcttctccgggcc

SEQ ID NO: 54563 - DNA, 600 bp, Chicken  19866894307253_1
aacatgcattcttcccatctctctgtattttaaaaaccaggcctgtcggattctggaagtagatcaaaacgctggtttgcacactactttgttaccaaggccgtgtctctaccagggaagttgctctatactgaaacagcagtctagttaagatcactttgtagatacacccagtactcgtttgcctagactgtgtttgcattggcatcctatgcagttaagataaagtgtaagaaacggttaaaccagttaagatacaagaaggttcttgcaccaatttgagtgtatggttttgtagtygctgcatataaaccatgacagcttttctcttagaaacaaggccttagtttagcatgtctgctcatctgaattggaaaaataataatgcaggctgtgaattttttttattgctttgcaaaatgacctgtttttttacttatcctttaaagcctttctttctctctacttcacattagatttttgtttgggggattttttttttagcaacaacaataaaaagtatgaacgctcctgattttaaaaaaaagtatatatatatatattgcttgaaggactttcattttgcactatattttttct

SEQ ID NO: 54564 - DNA, 599 bp, Chicken  19866894307255_1
  misc_feature (1)..(77): n is any nucleotide
nnnnnnnnnnnnnnnnnnnnnnnnnnnnnnnnnnnnnnnnnnnnnnnnnnnnnnnnnnnnnnnnnnnnnnnnnnnnncactcctgtaggctccttcggatactggaaggctgctataacgtttcccctgagccttttcttctccaggctgaggatctccagctctctcagcatgtcctcacaggacaggtgccccagccctctgatcatctttgtggccttcctctggacctgctccaatagctcgatgtccatgtgtttagggccccaaaactggatgcagaactccagatggggtctyacaagagcaaagtagaggggcaaaatcccctccctcaacctgctgatcacacttctcttgatgcaacccaggataaggttagacttctgggctgcaagcatacattacccactcatgttgagtctttcatcagctgacatccccaaatccttttctcaagccgttttccacccagcctacttctgtgcttaagactgccttgacccaggtacaggacaytgcatttggattgcaattcaaaattttgaatcttgattccttctcttacagaaaggatttttaacgacatagtcactgaa

SEQ ID NO: 54565 - DNA, 600 bp, Chicken  19866894307255_2
ttcctctggacctgctccaatagctcgatgtccatgtgtttagggccccaaaactggatgcagaactccagatggggtctyacaagagcaaagtagaggggcaaaatcccctccctcaacctgctgatcacacttctcttgatgcaacccaggataaggttagacttctgggctgcaagcatacattacccactcatgttgagtctttcatcagctgacatccccaaatccttttctcaagccgttttccacccagcctacttctgtgcttaagactgccttgacccaggtacaggacaytgcatttggattgcaattcaaaattttgaatcttgattccttctcttacagaaaggatttttaacgacatagtcactgaagttcttttcttgagtgtatcaaccaagtaccttttaccagattcagagcttgtgtaatactacaggggaatttgggactgtgaaatgaatgccagacagcagaacaaagtgaatgtctgaggcatcatctttgctgacttaaactttgtgtagtcatttactgttgtgcacggtgtgtacagattgctatcaaattggatttttccaccagtgattctgt

SEQ ID NO: 54566 - DNA, 600 bp, Chicken  19866894307256_1
ggagatcagtaagtcagtgttttcagtgcagaacaaagcattctggcacctcacttggaaatcggataagcggtttccctatgtgagtgggaattgtgggttactttccaggtgcatcaaaagaataacagcttatctgtgaaaacttgattagttgacttcacttgtcaaagtgtacgttcccctcccaggaaaaaagaaaaaggatccatggatacttgcaggcacacagcagcagcatttcactttttattattgttgttaatattacctttgtgcttagcagtcccagtcaatackgaggaacagaaacatgaaaccaccgaataaaagtcatgtctccatactaacaagttcacaatttagagacagcagatggagccagacaaatgacagggtacaagggcmctatgagacaggggtgacctcagagtagcctcctgcttactattgctgaccttgggtagcactaaaggccaagttttacatgctacctgaagaaagaggaggtaggatcaacagctgaaattttgagtcccttgtaatgaaaaaatgtttggtaagtatagaaatacttatacctgtgtacatatatatgtc

SEQ ID NO: 54567 - DNA, 600 bp, Chicken  19866894307256_2
caggtgcatcaaaagaataacagcttatctgtgaaaacttgattagttgacttcacttgtcaaagtgtacgttcccctcccaggaaaaaagaaaaaggatccatggatacttgcaggcacacagcagcagcatttcactttttattattgttgttaatattacctttgtgcttagcagtcccagtcaatackgaggaacagaaacatgaaaccaccgaataaaagtcatgtctccatactaacaagttcacaatttagagacagcagatggagccagacaaatgacagggtacaagggcmctatgagacaggggtgacctcagagtagcctcctgcttactattgctgaccttgggtagcactaaaggccaagttttacatgctacctgaagaaagaggaggtaggatcaacagctgaaattttgagtcccttgtaatgaaaaaatgtttggtaagtatagaaatacttatacctgtgtacatatatatgtcaatctctttgtctcatattttaacatcatgtgaaatacattcagcattagatgacactacaaagtcctaaggatactttctgcataagagaatgcattgcttttggct

SEQ ID NO: 54568 - DNA, 599 bp, Chicken  19866894307276_1
  misc_feature (1)..(126): n is any nucleotide
nnnnnnnnnnnnnnnnnnnnnnnnnnnnnnnnnnnnnnnnnnnnnnnnnnnnnnnnnnnnnnnnnnnnnnnnnnnnnnnnnnnnnnnnnnnnnnnnnnnnnnnnnnnnnnnnnnnnnnnnnnnnnntgataatgcataaccttctgtgatactcagaaattcagaaaaaaaattttttttagatttttgtttctgacttgaagacaccgacctatattctgtatcacctcattcagggccatgagaggatactatgaaaataccattattttttgagttctcttattttgttattaatakgtgttactgaccactgttgtagttgtgatgctacaaatggtgggactttgattagcgtttataaggcagtatatgatttttaacctttttgttctctattttgcattcttaaggarttaccatttaggtctccaaaatcccttgtttatgtgccagctgatagaataaaactgcttaacagaggttcttaggtttctttttgccagttcatacttgcacagccacccaaatcctgagagcactgaattgttaggcctcagctagcatgattgtcaaagcagatattttcccttcccact

SEQ ID NO: 54569 - DNA, 599 bp, Chicken  19866894307276_2
  misc_feature (1)..(10): n is any nucleotide
nnnnnnnnnntgataatgcataaccttctgtgatactcagaaattcagaaaaaaaattttttttagatttttgtttctgacttgaagacaccgacctatattctgtatcacctcattcagggccatgagaggatactatgaaaataccattattttttgagttctcttattttgttattaatakgtgttactgaccactgttgtagttgtgatgctacaaatggtgggactttgattagcgtttataaggcagtatatgatttttaacctttttgttctctattttgcattcttaaggarttaccatttaggtctccaaaatcccttgtttatgtgccagctgatagaataaaactgcttaacagaggttcttaggtttctttttgccagttcatacttgcacagccacccaaatcctgagagcactgaattgttaggcctcagctagcatgattgtcaaagcagatattttcccttcccactcatctcgcctgacctgaagtgtgccaactgagtgtagccaaaaagtgctacccattgtgtaaagggaaagtagactcaagtgtaatgacacagtgaaaaaacaggaacttgaagag

SEQ ID NO: 54570 - DNA, 600 bp, Chicken  19866894307276_3
ctgaggcactataaaatgttctcttttctgacttagatgaaaaggaccaaacatgttcaacttgttccagtgcagcagcaggaaaatagtaccttgtgatctacttacagttttccttgaaaaggtcacagcagctgttactctagtggcactctgaaagtgtggatgagaatataaaatacgtgaattgagaaaatgaaatcagaagctaactggtggcaagatgtcatttgctgtttgcagtctgaaacttatcagtgggagagatatagtatggacagcagatgcctcatcgttacytgtcagatttgtgagaagaactgcaagtagtaggagtccagtgccagaggctttccaattcttagtttttctagtaaaactggttgtgagattccatttgtactggaagtggtaatttttagttgtgtagacaagcattcagaagtgactaaagtcaatcacttcagttgattttgtgtcaattatcaaagagccagcagatgtccataagctttgtttttccttaagttagctggtgttacgtgagatgtagttgtgaaaaaactcaagcagaagcrtcacatctttgattaatttttt

SEQ ID NO: 54571 - DNA, 600 bp, Chicken  19866894307276_4
cagcagatgcctcatcgttacytgtcagatttgtgagaagaactgcaagtagtaggagtccagtgccagaggctttccaattcttagtttttctagtaaaactggttgtgagattccatttgtactggaagtggtaatttttagttgtgtagacaagcattcagaagtgactaaagtcaatcacttcagttgattttgtgtcaattatcaaagagccagcagatgtccataagctttgtttttccttaagttagctggtgttacgtgagatgtagttgtgaaaaaactcaagcagaagcrtcacatctttgattaatttttttctctgttcctgagtctcattttccttcagtgtctattcaggtaactgaacacaacttcccttctttcaccttctctgaagtacttccttttggggggtggaggagggaagagacaaagaagtctcagcacagaagttccaatggaactatttgcaaatgtgtcctggccaaaagccagactgactaagtttgtttaaagtgaagttcttcccacacctttgattatactagaaatgaacatgaagaggaaaaatgtgatttggctggtaacatcttt

SEQ ID NO: 54572 - DNA, 600 bp, Chicken  19866894307277_1
tatttcgtgtttaattgcattgatccgctttgaaagttttaaacatctgcctaataatggtcttcaactaatttgtcatctggaatacaataaaccattatctgtgcagagctcacaaggagtcgactcctgcactggtggaacgggaagaaaaataaacaaatacttgagatgccggagcacgcatccaggttgctgcgttcaggcaggagaacagcccatgcatgtggtggtaggaaggaaacttcattgaataatggagcttaattaccaagcccccacaacaggacttcacccggytaaggggcccggctgggagccccccagctgcagcggcagagctgcagcgagatgcacagttttatctctgtgagaccttgcacagctgagagctttgcagctttgtcctagggagcaggtgttacacagcactcagcctgcagcatctcatccaactttacggctgtggcaaagccmcccccagccccacaggtagtgtcagccaacccatgttccatgtggtacaggtggggaaggccaaggaggtgaagcagcacccaccgcccatgaggctgtgccccctgactcagcccacagccc

SEQ ID NO: 54573 - DNA, 600 bp, Chicken  19866894307277_2
gagcacgcatccaggttgctgcgttcaggcaggagaacagcccatgcatgtggtggtaggaaggaaacttcattgaataatggagcttaattaccaagcccccacaacaggacttcacccggytaaggggcccggctgggagccccccagctgcagcggcagagctgcagcgagatgcacagttttatctctgtgagaccttgcacagctgagagctttgcagctttgtcctagggagcaggtgttacacagcactcagcctgcagcatctcatccaactttacggctgtggcaaagccmcccccagccccacaggtagtgtcagccaacccatgttccatgtggtacaggtggggaaggccaaggaggtgaagcagcacccaccgcccatgaggctgtgccccctgactcagcccacagccctctccataaagcaccacagtggctgcacaggaggcatcagctgcaaacacggcccaggagatggtttatttaagagagcaggcggattgttgtacgagatcctgatggattattcctatctgagaatttacagatactgcaggagtgtggccaacaatttggattagtttagattaa

SEQ ID NO: 54574 - DNA, 600 bp, Chicken  19866894307289_1
taattcattctttatcaattattaaaactaatgtcactacttacctaatcaatcatttatattgaaaagctgaaaattttccatggaagaaattagtacaaatatttcttcatttaaatacaaattggatagcaactatcaccagatagttaacacctaattcaaatgttttactgaaaccaattgcatgaccagaaaatattagaagaattctgttttagaaaagtatgtattgtttaaacatatcaccaaactctgaacatgacactaactttttgacctaatactatcttgcctaaytttttgcatttaagcctgaactttggagtaacttaattttgtttggtattacaattgttttgaataaggaacagacattttttatatgtactatatttatataaaagttacctattttttaattagctcatactcaatgtaattaacatcaataataactttcagcttcaggtttcttattagaaattatacaagcaaatttgtagttttattgtcccatatggattttatagttcagagctttaaaacaaccaactatgcataacaattccttacatactctccttctcttgaaatatt

SEQ ID NO: 54575 - DNA, 599 bp, Chicken  19866894307290_1
  misc_feature (1)..(137): n is any nucleotide
nnnnnnnnnnnnnnnnnnnnnnnnnnnnnnnnnnnnnnnnnnnnnnnnnnnnnnnnnnnnnnnnnnnnnnnnnnnnnnnnnnnnnnnnnnnnnnnnnnnnnnnnnnnnnnnnnnnnnnnnnnnnnnnnnnnnnnnnntcttttaggggaatccttttcctcagtcttcattaaagaagaaaaacatcccagtcctcgcagcagctgcagacctacaaattctgtaaaagaaggaggagatacaagtccttccaactgcactatgtgccccttacctgtccctcacagaaacactgttctrcagagaactgctggttagagaaggttccatccacaaaccttacatgaggcagacttctcccttccctctaccaaagtacctcattaatacagagcagacagtagagggatgcactaatgtgagacagtggaaatctggatggtaaaagtcagcagtygtttgcagtactctttgttgaaccaagcaacttggccattcaaactctacatcttaaaacacagacttcaccaccaaatctctctgcagtcctaatttagcttaatgagaaaaaagctgcagcaagtatgccaagtggcaga

SEQ ID NO: 54576 - DNA, 600 bp, Chicken  19866894307290_2
cctcagtcttcattaaagaagaaaaacatcccagtcctcgcagcagctgcagacctacaaattctgtaaaagaaggaggagatacaagtccttccaactgcactatgtgccccttacctgtccctcacagaaacactgttctrcagagaactgctggttagagaaggttccatccacaaaccttacatgaggcagacttctcccttccctctaccaaagtacctcattaatacagagcagacagtagagggatgcactaatgtgagacagtggaaatctggatggtaaaagtcagcagtygtttgcagtactctttgttgaaccaagcaacttggccattcaaactctacatcttaaaacacagacttcaccaccaaatctctctgcagtcctaatttagcttaatgagaaaaaagctgcagcaagtatgccaagtggcagactggaagcatttgttgacatacttaaacactgaacatgtcctgaaggagacgggtcttcaaaagagaacgctttttctacaccttttttgttaacccgagctgacttagctatcctcttagtgtctgggataactgatatataatgctacctgtaagt

SEQ ID NO: 54577 - DNA, 600 bp, Chicken  19866894307290_3
aatgagaaaaaagctgcagcaagtatgccaagtggcagactggaagcatttgttgacatacttaaacactgaacatgtcctgaaggagacgggtcttcaaaagagaacgctttttctacaccttttttgttaacccgagctgacttagctatcctcttagtgtctgggataactgatatataatgctacctgtaagtataaaaattgatacaagttcaatcttcattccaaatctatcagtgggaacatttcttcccataaaagttttcgtggaatacagattgattcaccctcgcaaartgatatgaaaggattctgcttgttggagctataacaagaaagccttaacaagaatgagtgcttccatctatgaagaaaaataacagatctggatgacaatctaagaaacctctagcagcaatcctgagataccagagttccttaaatgtaaattccagaatctaacagtgccaacattaagattacactacatagcccattatatataaagccataagctcaaagaactctcaggagatagtttggtgtttgccagcattcttatataattagtgaatgtctggcacatgaaagcaggca

SEQ ID NO: 54578 - DNA, 600 bp, Chicken  19866894307292_1
tttataactcatttctgtcttatgataacaactgtgatggagaaaaaataaacataaactggaccagaccccttagatgtggaaaatgtctcatcaacagcccctcgagggttcaacattatgagttatgagttagtgtccaagctggcagtgctacctgagagactcccagaagtcaaggcccttgagtgtggtcctgggtcctggactcagctcaggaactgcagcacaccgtttaatctagatggatctgctcctgagccgcttcaatccctgtatttaggatatatctgtgctaarttcccttgcatagagcacagtaggcatgtgaacattgtttccatgtctctgagtggcactgatgagcaagtcaaggactttatgtgcatgctgttgatgattcccttgtcatttggtgcctctagcaaaagtatttgagttacatatactctgatcatctttcatctgcatactatgttacttgaactcatttaataaaagcagattaatacatatgctccatgaaattttccatttattaaaaagataccattttcatttgtattctggctattcaactgatttcttctttatctttaa

SEQ ID NO: 54579 - DNA, 600 bp, Chicken  19866894307308_1
gcaaagagtgaacactttaatcattccagcatgtcatttgcatttgctttggctaacaaatgtcagaaagacatcatccaaaatgaagctcagtcctgctgaggtcatgttgtgcctttttcacagcagcatgctgcaccggggtatcggtttaaaaggcaaacaggtatgttttatcaatttgcagcaggaaaacctatgacttcacaggactagaaaaacttggcttagcgtgaatcaagactcaaggcaaaacgctctgcagctctctgtgagaaagctgctatttattttaccatyaatattttcccttcccaagtgcatttaatttgaaagaattaatgaacggcagaaacaaatccctgtacaccacaaacatcaggcagcacacggagcggcggtaagctagcgggtgaaggttggaatttatcaaaacatgatagaataaactacttaattatgttagggtgattgccagcatgcaacaatcccgggagcagatagtttctcagtttggcctgagggtagtggcagtttggcattcgcagctttacctattcattgcagtctcttgaacctcatcagggatctggtacccca

SEQ ID NO: 54580 - DNA, 600 bp, Chicken  19866894307315_1
gttttgagtgtctccagggatggaggtttggcagtctctctggcctgctgttctgctatttgaccagcctcattattgaagtaattttgctttatgtctgatcagaattccctgtgtttcagcctctgtcctgtgcccctcatgctatacagctgcaagaaataatggctccttctttttatcctctcatcaggtagctgaaggtgacagttacctctcccctaagtgtgagcaaacccagccactgtcactccaatgcatttaaatgtttgtatttattcatatgttagattctcaccygtccttgaaaaattagcttttaaacaaagtggaaggtaggtttcttgcttggtctgtacctttctctcagtctgtcattgtatgcaatgcctgttttggtatggaagatttctcagaaaatccaacatgacatgcttctccctttttcctgcagtaattacacttgtgcaggtgtaaaatcaccattgctaatgttgatgatcacttctccccatttaaagttctctttgatcacttgtcctgaactttctaattgtaaacattgctgttaccagcttctcattacaaaaagaaataaat

SEQ ID NO: 54581 - DNA, 600 bp, Chicken  19866894307315_2
gtaagaagccagcttcctgaaaatgcgcattgcatcatgcagttacagtgcagaaccatgctgcgattggggattctcccttacagcatttgttttgtgttctttcctctactgcagaaaggtcccaaattgagaggcaggcaagaagacacaagagctcagcatttataattttcttatgttggctggagttgagctaattttgaagtgagcaatttgggtagtgccagtatgagtctgtgtgcacgtatctgtagtaggtggataacattacactaaaatacaccaggcattagcctrcaggttggctgaaatgatggtataataccttttaaaacccygaagagtgtttctgcttaaawcctccttgaagtttatactgctttygtgttttctgttggtgtatggttcagtcactgggggcatgtgtgggaagtgctgtcttctcacrgtgcagctgtgctccttttttagtggataggtatagctggacagctgctgcttctcctcttgtaagtcatctgctaccactcattttagttacttgygtctatatgagtctgaattcccaagaagagaactgaagcaagcaaagtggca

SEQ ID NO: 54582 - DNA, 600 bp, Chicken  19866894307315_3
gttacagtgcagaaccatgctgcgattggggattctcccttacagcatttgttttgtgttctttcctctactgcagaaaggtcccaaattgagaggcaggcaagaagacacaagagctcagcatttataattttcttatgttggctggagttgagctaattttgaagtgagcaatttgggtagtgccagtatgagtctgtgtgcacgtatctgtagtaggtggataacattacactaaaatacaccaggcattagcctrcaggttggctgaaatgatggtataataccttttaaaacccygaagagtgtttctgcttaaawcctccttgaagtttatactgctttygtgttttctgttggtgtatggttcagtcactgggggcatgtgtgggaagtgctgtcttctcacrgtgcagctgtgctccttttttagtggataggtatagctggacagctgctgcttctcctcttgtaagtcatctgctaccactcattttagttacttgygtctatatgagtctgaattcccaagaagagaactgaagcaagcaaagtggcaatggggacaatttctatttcagattttaattatactcctgc

SEQ ID NO: 54583 - DNA, 600 bp, Chicken  19866894307315_4
gcgattggggattctcccttacagcatttgttttgtgttctttcctctactgcagaaaggtcccaaattgagaggcaggcaagaagacacaagagctcagcatttataattttcttatgttggctggagttgagctaattttgaagtgagcaatttgggtagtgccagtatgagtctgtgtgcacgtatctgtagtaggtggataacattacactaaaatacaccaggcattagcctrcaggttggctgaaatgatggtataataccttttaaaacccygaagagtgtttctgcttaaawcctccttgaagtttatactgctttygtgttttctgttggtgtatggttcagtcactgggggcatgtgtgggaagtgctgtcttctcacrgtgcagctgtgctccttttttagtggataggtatagctggacagctgctgcttctcctcttgtaagtcatctgctaccactcattttagttacttgygtctatatgagtctgaattcccaagaagagaactgaagcaagcaaagtggcaatggggacaatttctatttcagattttaattatactcctgcctatatagggactgtgaatca

SEQ ID NO: 54584 - DNA, 600 bp, Chicken  19866894307315_5
atttgttttgtgttctttcctctactgcagaaaggtcccaaattgagaggcaggcaagaagacacaagagctcagcatttataattttcttatgttggctggagttgagctaattttgaagtgagcaatttgggtagtgccagtatgagtctgtgtgcacgtatctgtagtaggtggataacattacactaaaatacaccaggcattagcctrcaggttggctgaaatgatggtataataccttttaaaacccygaagagtgtttctgcttaaawcctccttgaagtttatactgctttygtgttttctgttggtgtatggttcagtcactgggggcatgtgtgggaagtgctgtcttctcacrgtgcagctgtgctccttttttagtggataggtatagctggacagctgctgcttctcctcttgtaagtcatctgctaccactcattttagttacttgygtctatatgagtctgaattcccaagaagagaactgaagcaagcaaagtggcaatggggacaatttctatttcagattttaattatactcctgcctatatagggactgtgaatcacagaatgctgtctgctaactgaaaa

SEQ ID NO: 54585 - DNA, 600 bp, Chicken  19866894307315_6
caagagctcagcatttataattttcttatgttggctggagttgagctaattttgaagtgagcaatttgggtagtgccagtatgagtctgtgtgcacgtatctgtagtaggtggataacattacactaaaatacaccaggcattagcctrcaggttggctgaaatgatggtataataccttttaaaacccygaagagtgtttctgcttaaawcctccttgaagtttatactgctttygtgttttctgttggtgtatggttcagtcactgggggcatgtgtgggaagtgctgtcttctcacrgtgcagctgtgctccttttttagtggataggtatagctggacagctgctgcttctcctcttgtaagtcatctgctaccactcattttagttacttgygtctatatgagtctgaattcccaagaagagaactgaagcaagcaaagtggcaatggggacaatttctatttcagattttaattatactcctgcctatatagggactgtgaatcacagaatgctgtctgctaactgaaaaatgtttcttcgtccacccacctgtttgcgcagtaatgcttcaaaataggccaatgttggtattg

SEQ ID NO: 54586 - DNA, 600 bp, Chicken  19866894307315_7
tatctgtagtaggtggataacattacactaaaatacaccaggcattagcctrcaggttggctgaaatgatggtataataccttttaaaacccygaagagtgtttctgcttaaawcctccttgaagtttatactgctttygtgttttctgttggtgtatggttcagtcactgggggcatgtgtgggaagtgctgtcttctcacrgtgcagctgtgctccttttttagtggataggtatagctggacagctgctgcttctcctcttgtaagtcatctgctaccactcattttagttacttgygtctatatgagtctgaattcccaagaagagaactgaagcaagcaaagtggcaatggggacaatttctatttcagattttaattatactcctgcctatatagggactgtgaatcacagaatgctgtctgctaactgaaaaatgtttcttcgtccacccacctgtttgcgcagtaatgcttcaaaataggccaatgttggtattgtccagcagcttaaaatgcagtggccagaaatgtttttgaaggaagaagcctgaaagaatgtgaacttaaattactgtaagagagctaatggcttcag

SEQ ID NO: 54587 - DNA, 600 bp, Chicken  19866894307315_8
ttctatttcagattttaattatactcctgcctatatagggactgtgaatcacagaatgctgtctgctaactgaaaaatgtttcttcgtccacccacctgtttgcgcagtaatgcttcaaaataggccaatgttggtattgtccagcagcttaaaatgcagtggccagaaatgtttttgaaggaagaagcctgaaagaatgtgaacttaaattactgtaagagagctaatggcttcagttttattttagaagtattttaggaggctaagtgaagcctggtacactgcaaagattacacatrtgcacacatacagatgagagtgtgatcaccttgaattccagttctagttgtcatttaaaacaacaactattccttcttatgaatgttctctttgaatttcagagtaattggactgggagctcccatgattcagttcagtcaaggagagtggtcatttctcacaacatggataaggcactgaaagaaggtgagtcttagtttggacagaggagcgttggatcctgtatgtaccccttgtcctcttaccaaactgtaactgtacgatatgcttggattttggaatggccctggtttcttcct

SEQ ID NO: 54588 - DNA, 600 bp, Chicken  19866894307318_1
ctccagaaaacacaatagaatgtaaaggacgtaaaccaacataatccaataggaatcaccctgtaacacctatcgatgaaaatctatctgtttcaagtgctttcctgcagaatttttaaattacttcttggcaacagcataactctgtgaaattttatgactggggctaacaatgcctatagtttttatttcctgttcaactcaacaaggattttccagagagtcaatctcatttgtttcctgagatttgtccagtctagagggaaaggaggccagtggagctgctcagaatatttttcyggtgtttctactgcagagcagctcttgtcattctttgtagagctctgagggataaaagaaagaagccttcccgaggggatccaaggttacctttattaatgaatccccaaaggcaatcttaacagaaaagctgtatttcagtggtcaccatatctgaagkgcctttccttctgctctccatttccagctgagatgtctccctgaaatgcatggtckcctcatcactctaatgctccacagagttgagagagaggggagcagagaaaaattctcatagattattaaagaggagtctctatt

SEQ ID NO: 54589 - DNA, 600 bp, Chicken  19866894307318_2
ctggggctaacaatgcctatagtttttatttcctgttcaactcaacaaggattttccagagagtcaatctcatttgtttcctgagatttgtccagtctagagggaaaggaggccagtggagctgctcagaatatttttcyggtgtttctactgcagagcagctcttgtcattctttgtagagctctgagggataaaagaaagaagccttcccgaggggatccaaggttacctttattaatgaatccccaaaggcaatcttaacagaaaagctgtatttcagtggtcaccatatctgaagkgcctttccttctgctctccatttccagctgagatgtctccctgaaatgcatggtckcctcatcactctaatgctccacagagttgagagagaggggagcagagaaaaattctcatagattattaaagaggagtctctatttagctgcacactgcctgtcttttgttaattcttccacaatagcttctcaagcagaattgctcaggctaaaaaccttattctatgattgttgtaacatcacttctctgcctgctagtgctgcacattctgccagtgatttgcagaccagctgcatttcctg

SEQ ID NO: 54590 - DNA, 600 bp, Chicken  19866894307318_3
cagagagtcaatctcatttgtttcctgagatttgtccagtctagagggaaaggaggccagtggagctgctcagaatatttttcyggtgtttctactgcagagcagctcttgtcattctttgtagagctctgagggataaaagaaagaagccttcccgaggggatccaaggttacctttattaatgaatccccaaaggcaatcttaacagaaaagctgtatttcagtggtcaccatatctgaagkgcctttccttctgctctccatttccagctgagatgtctccctgaaatgcatggtckcctcatcactctaatgctccacagagttgagagagaggggagcagagaaaaattctcatagattattaaagaggagtctctatttagctgcacactgcctgtcttttgttaattcttccacaatagcttctcaagcagaattgctcaggctaaaaaccttattctatgattgttgtaacatcacttctctgcctgctagtgctgcacattctgccagtgatttgcagaccagctgcatttcctgcttcagtaacctgttagagagaaagcagctgacaattttgttgatgcaatatcgat

SEQ ID NO: 54591 - DNA, 577 bp, Chicken  19866894307320_1
cctcacctccatcataggcagcagcgttcattgggaatagaaaaagaaattaaccatgctcttatctctcagaaactctgccaagataaaggattagccagctggctatcttgcagtgcaaatggagaaaaggggaggatcacagaagatgggcatgatcacagctggatgacgcaggagtaacagagtgaccttggctctattcaacaggtcaccttgagaaggaaatcctgactctcccaggtgcgggaatggcagctctgtatgttcctaatgggtggagagagaaaattctctctmtatatatttttgggggcatctactgcttcaaactggtgaacaagatcactcagagccttctgatcctgtccgagagttcaggagatgcctcctgaaaactgctgagccgctctccacgtgcatcttacctgactgttacaatgtggtgctgcattggccgagagagtcgctgcccaggggaccaccgtttccaggggggttccaaagcctcatgatgagaagctggcacaggatcactgctggaaaggtgggaacacaatgtggacctctcaccatg

SEQ ID NO: 54592 - DNA, 600 bp, Chicken  19866894307323_1
tcgagccacacatgaaatcatctatcccctattttaataagagaagtactgtcacttgaattgtaaagagcatagcatgtagagtgttgctaaggtgctttattattttatctagtttttcttctattaacacaatatctttcaactgttaagtttgctactaaattaaaagataacatttagcagcaaagaaaaaaaatcaagtgtgaactaaaagataaatgtgacgaaacaatcacaggacctaccctgctggtgatgagtcaaccaactgaagccattataatccactctaattayagtcagaaagcttatccactcaatctatagtatgaattaaaggctacatcaatttactgctacactaaagccctacttgtaattgtttcctaatcaagatttaaataaacgattatgtctctattacaaatcagcattagtggtagctgtgggctgtagaaaggtcaagcaactgagttacaaatacatgcttagtcacatctttattacttccagcttccaaggaaaaaagaaaatctttagtcgtgcaaaagtcttaattaataaggcaaagggacaaatgctgcagagcctccttcc

SEQ ID NO: 54593 - DNA, 600 bp, Chicken  19866894307337_1
tctaaggaggagttgagcactctggcgaaagttctaattgaaacaattgataacttaattatcactgaaggaataggtggaagcagaactagtggcaaggaaaagcgaagtgagcactgagatgtgtatttgtatcagctgcgagtccagcatcagcacttctatgctctgggttgcaatcagaagaaaacttgtgtctaaaatactactaaataactcaaaatattattttgttttgttttcttgtccaaaagagtctcaaaacaaacaagagtagaaggagggaaaaaaatatcctgyttgtcaaagcacaaaagggcattaacaatgttctcatgtagaaaggctctgagaggcagatataggaattttccagctaataaaaacaaacagaacctaggaaaaaaaatcaatagaagactattttgattaaaattaatgaagcaattttgttctccctgtaaaagaaatacaggattctgtaataataaaataaataaagttaagggaaacagcagagcgtcctttttgttatcatcaatcgaattgatagcccaagtctcactgtttataagttaatagtggaaaatccaaagattt

SEQ ID NO: 54594 - DNA, 599 bp, Chicken  19866894307346_1
  misc_feature (1)..(27): n is any nucleotide
nnnnnnnnnnnnnnnnnnnnnnnnnnntcctttttattacttaaagctatgttataaatattttatgacatgggaaaatttttgcagtaaaacaaatgagccaaaaaagctgctgtttgcttattcccctgaaacttcagcagttttagcctactcaaatgttcctaaccagtgatgaactgcagcaccatttaataagtgagtaattatcccaaattatctatcactacaataagatgctgccattcagttttagatttcatgaaacaagttcaattcccagattcctttctttaaagytgtttctttaaagttttgcatctctttaaaaatagaccagtcacttctgcctccaacatcccagtgatttaaactgtgatgatggagaagatactgcagcttaatttcattaacttgacagctcatttctccctgttctcaaggrttattactctgaccacatttttccaaggtattttgtaaccatcaaatacacgactaattctcaataagttaacgcctgtagctatagagtcaaagttgttggatgatggacatgttataaggattgctgagtctaaacaatcttctcatcctct

SEQ ID NO: 54595 - DNA, 600 bp, Chicken  19866894307346_2
ttagcctactcaaatgttcctaaccagtgatgaactgcagcaccatttaataagtgagtaattatcccaaattatctatcactacaataagatgctgccattcagttttagatttcatgaaacaagttcaattcccagattcctttctttaaagytgtttctttaaagttttgcatctctttaaaaatagaccagtcacttctgcctccaacatcccagtgatttaaactgtgatgatggagaagatactgcagcttaatttcattaacttgacagctcatttctccctgttctcaaggrttattactctgaccacatttttccaaggtattttgtaaccatcaaatacacgactaattctcaataagttaacgcctgtagctatagagtcaaagttgttggatgatggacatgttataaggattgctgagtctaaacaatcttctcatcctctagaacagttaatgagagataatagattttagtacatagaaatgcttcaaaatttctattttcagagtcttcattggcaactaatgaaacttcacaggaaatacatcatcttatatattagaaactttgttttgaaaattgtacatg

SEQ ID NO: 54596 - DNA, 599 bp, Chicken  19866894307347_1
  misc_feature (1)..(198): n is any nucleotide
nnnnnnnnnnnnnnnnnnnnnnnnnnnnnnnnnnnnnnnnnnnnnnnnnnnnnnnnnnnnnnnnnnnnnnnnnnnnnnnnnnnnnnnnnnnnnnnnnnnnnnnnnnnnnnnnnnnnnnnnnnnnnnnnnnnnnnnnnnnnnnnnnnnnnnnnnnnnnnnnnnnnnnnnnnnnnnnnnnnnnnnnnnnnnnnnnnnnnncgcctggccctggtggaccctgtggcctccgactggttgtgctggggggccacaaagagcaggtgggccgccgtcagtagcagccgggcccggggctgccgygtctcgatgacgtagaagagctttcgggagctgtcctcccggtcgaggaaggtgaggaagtcgctgtagagcagccggccatccgcgtcagcagccagcacgcggtccccagggctcaggtccttcaccagcttggtgcctccatgctccaggtgcactgtggctgagccagggaagcagcctcctgatttcgctgccactgagttttctgcataaagagagaggcgcaggggttagagggctgaccaatgggacagggtgcggggacacatttaccaacatgccccaagcatagagcc

SEQ ID NO: 54597 - DNA, 600 bp, Chicken  19866894307347_2
cccggtcgaggaaggtgaggaagtcgctgtagagcagccggccatccgcgtcagcagccagcacgcggtccccagggctcaggtccttcaccagcttggtgcctccatgctccaggtgcactgtggctgagccagggaagcagcctcctgatttcgctgccactgagttttctgcataaagagagaggcgcaggggttagagggctgaccaatgggacagggtgcggggacacatttaccaacatgccccaagcatagagccatgaatcattaaggttggaaaagatgtctaagaacacyatccatccatccaccatccatccatccacctaccaccaatactgctcactaaaccatgtccctcagtgccacatctccatgtttcatgaacacctccagggacggtgactccaccacctccctgggcagtccatgccagtgccagacaactccttctgagagcaagttttactaacctgaagggttggtaaaaaaaactgaggaagttatccaacctgaacttggctcgacttgaggccattccctctcatcctactgctgctatcttggagaagaagctgccttcaccttgccacaacc

SEQ ID NO: 54598 - DNA, 600 bp, Chicken  19866894307361_1
ctcataaaaactggcagagaaatagctcacatgagggaccctggaccctgtgttcttcatctgcatccacagagcaatgcatccacctctctaatgggaaacaaatttgggagtaggggaaaaaagccaacacagaggcaagctgatgtttgggaggagatggctttgttttcatttgccaaaggagcaatcttccagctgctgtgcacttaatggcttcccagggccatttgttaacctgccaagtccaacccagagcaacgattccagccgtatgccaggatgtctctttttaccccrataaacttcctgttccttgcagcccagctgatggctctgccctayggtgcagatgaggggatctcaaaacaatgaatccctgtcaaaagatttgtgagcagctggccaaacaattccagccccagaaagacacaggcgagaacatcattcctgaatgcgctgcattattgattaagcacttgtgatccataaagtacagtaacaacgtggggctggctgcaaatgaattctactgaaaagatctttttactgcctctgatcctcaaggacaagggtaaaataagtttagtatggagcagg

SEQ ID NO: 54599 - DNA, 600 bp, Chicken  19866894307361_2
ccctgtgttcttcatctgcatccacagagcaatgcatccacctctctaatgggaaacaaatttgggagtaggggaaaaaagccaacacagaggcaagctgatgtttgggaggagatggctttgttttcatttgccaaaggagcaatcttccagctgctgtgcacttaatggcttcccagggccatttgttaacctgccaagtccaacccagagcaacgattccagccgtatgccaggatgtctctttttaccccrataaacttcctgttccttgcagcccagctgatggctctgccctayggtgcagatgaggggatctcaaaacaatgaatccctgtcaaaagatttgtgagcagctggccaaacaattccagccccagaaagacacaggcgagaacatcattcctgaatgcgctgcattattgattaagcacttgtgatccataaagtacagtaacaacgtggggctggctgcaaatgaattctactgaaaagatctttttactgcctctgatcctcaaggacaagggtaaaataagtttagtatggagcaggaattcatttgtataataatggtttttgacgacttgcaaaggttat

SEQ ID NO: 54600 - DNA, 487 bp, Chicken  19866894307361_3
atttcatcttatccaaatctacatcagctaaattatgaaatgcccttgttttatgcaaattctgaaaatattgcttctctaacctttcaaccccgctgtctgtcaataaggctcacgtggagcataaatcttagggtagcaccggagcacaattcagctgcaagtaaatggcagtgaattaattgtgcaggatccctggaaggcaggaggctgtctggttctggagtaggcttccttagtcagcccagagactgggtgtgaggtggcctgtatgacagctggtccctatatgacaggacyggctggggctgagcaagctcctgaggagcattgggtgagaacagggggtgcacagcaggagctaagagctgatgtggataccccagagggatccagaagggacacayggagccagggggtggcttgtgggacagctgctgtggactcaggctgaggcagggaacaggtcctctgctttggagggagg

SEQ ID NO: 54601 - DNA, 380 bp, Chicken  19866894307361_4
aaggctcacgtggagcataaatcttagggtagcaccggagcacaattcagctgcaagtaaatggcagtgaattaattgtgcaggatccctggaaggcaggaggctgtctggttctggagtaggcttccttagtcagcccagagactgggtgtgaggtggcctgtatgacagctggtccctatatgacaggacyggctggggctgagcaagctcctgaggagcattgggtgagaacagggggtgcacagcaggagctaagagctgatgtggataccccagagggatccagaagggacacayggagccagggggtggcttgtgggacagctgctgtggactcaggctgaggcagggaacaggtcctctgctttggagggagg

SEQ ID NO: 54602 - DNA, 600 bp, Chicken  19866894307365_1
ctccagaagagtacacatttttcatgtgggttcctgtactacttggaagatgaagttattatcaacatattccaggacattgcatgctgctattacaattattgtatcagtgtagtttcccaccccaaaatgattcctttcttgatcacagaaattagtatgaccatttcttgagggatttggcagaccttttggacactgatgagaggaggcagaaagctttgtatttaaatactggagagcattgaacaggatggctgtcctattgcatgtgacttacaagtttgtaagtctttgatytccagagcaacctcttttgaaagtgaagagagagcagagcagtagctgagatttggaatgtcatggtaaaaacaaatgagcgagcaaccttcttcatgtttggcccgagaaaatgtgtgacctgttactttgcacaracaaggtcctttcattacaaatgctgaggtaagtcatttgtgtgtggactgcatctgggtttgtgacagtggaagctgaagacaatgtactgctggtaccaagaccaaggaagrtggcttctcttatagagaatggtggaagatgaagtcatgcaatgtatat

SEQ ID NO: 54603 - DNA, 600 bp, Chicken  19866894307365_2
tttcttgatcacagaaattagtatgaccatttcttgagggatttggcagaccttttggacactgatgagaggaggcagaaagctttgtatttaaatactggagagcattgaacaggatggctgtcctattgcatgtgacttacaagtttgtaagtctttgatytccagagcaacctcttttgaaagtgaagagagagcagagcagtagctgagatttggaatgtcatggtaaaaacaaatgagcgagcaaccttcttcatgtttggcccgagaaaatgtgtgacctgttactttgcacaracaaggtcctttcattacaaatgctgaggtaagtcatttgtgtgtggactgcatctgggtttgtgacagtggaagctgaagacaatgtactgctggtaccaagaccaaggaagrtggcttctcttatagagaatggtggaagatgaagtcatgcaatgtatatatgctgaaaggagctgttatgttgggtagaggaaattttggatggttattgaagctgagttctttcatgctggagtgttgctggaagtctatggtttgcgttggagacagtctaagacttactgcgtagatatggtt

SEQ ID NO: 54604 - DNA, 600 bp, Chicken  19866894307365_3
ggatggctgtcctattgcatgtgacttacaagtttgtaagtctttgatytccagagcaacctcttttgaaagtgaagagagagcagagcagtagctgagatttggaatgtcatggtaaaaacaaatgagcgagcaaccttcttcatgtttggcccgagaaaatgtgtgacctgttactttgcacaracaaggtcctttcattacaaatgctgaggtaagtcatttgtgtgtggactgcatctgggtttgtgacagtggaagctgaagacaatgtactgctggtaccaagaccaaggaagrtggcttctcttatagagaatggtggaagatgaagtcatgcaatgtatatatgctgaaaggagctgttatgttgggtagaggaaattttggatggttattgaagctgagttctttcatgctggagtgttgctggaagtctatggtttgcgttggagacagtctaagacttactgcgtagatatggttacttcaagatactctgacaggtaaagctgaaatctgaactctggtatagctaccaaaggtactacagatagtgtgtggtagctaaaacagaagccagagctaaaactcagaata

SEQ ID NO: 54605 - DNA, 600 bp, Chicken  19866894307370_1
agcttctctaggaaaatactgtgagagacagagtcaaagactttactaaaggctagacagagtacatccagagcctttccctcatccactagatgggtcacctggttgtagaaggagatatagacctgccttttgtgaacccacgatggcatgacctgattccctggctgtcttgcatgtactgtgtgattgcactcaagatgatctgctccaagaccttcgcaatatgataacctgcttccccatccacaagcattcaatgccttaatttcatggttttgaaagtttccattcctgcaytgaatcrtcttaacccatgttttgtaaacattccaataattctgtttctctggtcacctcatatagatgatagattttcaaccttgataggcgaaatgttcccagagaagagaaaacaactatttcaatcagtgaagttgtacccaacattactagagcataccgccagatgctttaggctacttgttttccttctccataagcaatgtgtgggtcttgattctactgctggaaagacacctttcatgtctgctctactttcttttcttttccagaaagttcctctaagaaacgagtgtg

SEQ ID NO: 54606 - DNA, 600 bp, Chicken  19866894307370_2
ctaggaaaatactgtgagagacagagtcaaagactttactaaaggctagacagagtacatccagagcctttccctcatccactagatgggtcacctggttgtagaaggagatatagacctgccttttgtgaacccacgatggcatgacctgattccctggctgtcttgcatgtactgtgtgattgcactcaagatgatctgctccaagaccttcgcaatatgataacctgcttccccatccacaagcattcaatgccttaatttcatggttttgaaagtttccattcctgcaytgaatcrtcttaacccatgttttgtaaacattccaataattctgtttctctggtcacctcatatagatgatagattttcaaccttgataggcgaaatgttcccagagaagagaaaacaactatttcaatcagtgaagttgtacccaacattactagagcataccgccagatgctttaggctacttgttttccttctccataagcaatgtgtgggtcttgattctactgctggaaagacacctttcatgtctgctctactttcttttcttttccagaaagttcctctaagaaacgagtgtgcaagcag

SEQ ID NO: 54607 - DNA, 599 bp, Chicken  19866894307376_1
  misc_feature (1)..(116): n is any nucleotide
nnnnnnnnnnnnnnnnnnnnnnnnnnnnnnnnnnnnnnnnnnnnnnnnnnnnnnnnnnnnnnnnnnnnnnnnnnnnnnnnnnnnnnnnnnnnnnnnnnnnnnnnnnnnnnnnnnnngtaactttgtttttgatgttataactcaccatgggttttttttgaacgtggctggcaaaattacctctgttctcaaatctcagtagagcgtagtcactggctgccaaggctggtaagagtaataggacctgacttctggggtattttaaagtattgaagatcttcacattgttctttttgggartttttttttttttttttttggatatgtcaaactgtcttgaatgaattagtattctccattcccgtatacattggttataagacaggtctttgacttttgtgagctttagttagcaaaaatcgatttctctaggttttattgaaaattaggtacagctgatgacatttgtgtaactgttgttgttttaatgggacagtattttttgtatttgatttgttcttgtaaagggcaagcaccatccctgaggctagttattttgctagagtggtaaatgctagatagatatggtcttcattaaa

SEQ ID NO: 54608 - DNA, 599 bp, Chicken  19866894307376_2
  misc_feature (1)..(115): n is any nucleotide
nnnnnnnnnnnnnnnnnnnnnnnnnnnnnnnnnnnnnnnnnnnnnnnnnnnnnnnnnnnnnnnnnnnnnnnnnnnnnnnnnnnnnnnnnnnnnnnnnnnnnnnnnnnnnnnnnnngtaactttgtttttgatgttataactcaccatgggttttttttgaacgtggctggcaaaattacctctgttctcaaatctcagtagagcgtagtcactggctgccaaggctggtaagagtaataggacctgacttctggggtattttaaagtattgaagatcttcacattgttctttttgggatrttttttttttttttttttggatatgtcaaactgtcttgaatgaattagtattctccattcccgtatacattggttataagacaggtctttgacttttgtgagctttagttagcaaaaatcgatttctctaggttttattgaaaattaggtacagctgatgacatttgtgtaactgttgttgttttaatgggacagtattttttgtatttgatttgttcttgtaaagggcaagcaccatccctgaggctagttattttgctagagtggtaaatgctagatagatatggtcttcattaaat

SEQ ID NO: 54609 - DNA, 599 bp, Chicken  19866894307376_3
  misc_feature (1)..(114): n is any nucleotide
nnnnnnnnnnnnnnnnnnnnnnnnnnnnnnnnnnnnnnnnnnnnnnnnnnnnnnnnnnnnnnnnnnnnnnnnnnnnnnnnnnnnnnnnnnnnnnnnnnnnnnnnnnnnnnnnnngtaactttgtttttgatgttataactcaccatgggttttttttgaacgtggctggcaaaattacctctgttctcaaatctcagtagagcgtagtcactggctgccaaggctggtaagagtaataggacctgacttctggggtattttaaagtattgaagatcttcacattgttctttttgggattrtttttttttttttttttggatatgtcaaactgtcttgaatgaattagtattctccattcccgtatacattggttataagacaggtctttgacttttgtgagctttagttagcaaaaatcgatttctctaggttttattgaaaattaggtacagctgatgacatttgtgtaactgttgttgttttaatgggacagtattttttgtatttgatttgttcttgtaaagggcaagcaccatccctgaggctagttattttgctagagtggtaaatgctagatagatatggtcttcattaaatg

SEQ ID NO: 54610 - DNA, 600 bp, Chicken  19866894307376_4
aattagtattctccattcccgtatacattggttataagacaggtctttgacttttgtgagctttagttagcaaaaatcgatttctctaggttttattgaaaattaggtacagctgatgacatttgtgtaactgttgttgttttaatgggacagtattttttgtatttgatttgttcttgtaaagggcaagcaccatccctgaggctagttattttgctagagtggtaaatgctagatagatatggtcttcattaaatgaagaccttgggaaggggctgtgagaactatgtgcaggtgaargaatgtgctctctgtccccatacctgatttcaagaatcctgacaattggctggttgatgggaacgttttagcaatttaggtttcacttatgactagagtaatttatgttgaagtttcccgtggtgatctgagccagatgggctctacatgcctcagagcattctttcataggtgacattgggctgctcaggtgtcaggtctgcctcttgcactggcagcccacaggcaaatggcaggaaagtagctggaggctgtgagtgagcccatttatcagctcaaaaaggctgaaggaaagcttag

SEQ ID NO: 54611 - DNA, 600 bp, Chicken  19866894307381_1
gttgaaaccttcaggtttcagctgctgaattcagcagctgtgggctgagcagccccgctcagcaggtcacggtgcactgcgactcaccaccatcagccccagcttattgaaggtgttcctcccagatgcatccaggtgtgttttccagctttgaaagaagtgtctgtctgcttttgtaaagctttcatgtcatgagcaggacttgaagttgcagctgagcacacagtgtctgatattgcctcaagaaagctcttcctatcattattaaaatgaacaggggtggctgagtttaactacacragaactctgccaggctgacactgaagcaggttttggtacaaagctatgggaggaggagaagtgtgttcatttgtgratgaattgaacctgcatttttctccatctcctgatgctggttacgtgatttcccagctgaccccaggaaatggctcctgtgacaagcaaaaggggagagctcatgagctytggcaaggcgctccttaaggaccctttgctgctcacatgggattcagtaaaatgatgcctgagctagtctgtgcctaactgggctctgctgtttgtgttcctggtcagtgtgca

SEQ ID NO: 54612 - DNA, 600 bp, Chicken  19866894307381_2
ctgcgactcaccaccatcagccccagcttattgaaggtgttcctcccagatgcatccaggtgtgttttccagctttgaaagaagtgtctgtctgcttttgtaaagctttcatgtcatgagcaggacttgaagttgcagctgagcacacagtgtctgatattgcctcaagaaagctcttcctatcattattaaaatgaacaggggtggctgagtttaactacacragaactctgccaggctgacactgaagcaggttttggtacaaagctatgggaggaggagaagtgtgttcatttgtgratgaattgaacctgcatttttctccatctcctgatgctggttacgtgatttcccagctgaccccaggaaatggctcctgtgacaagcaaaaggggagagctcatgagctytggcaaggcgctccttaaggaccctttgctgctcacatgggattcagtaaaatgatgcctgagctagtctgtgcctaactgggctctgctgtttgtgttcctggtcagtgtgcaggcamtaagatgaaggcagagatgctatgtggacagatctcattgatcccaggatcaccattcttgtctcttcctc

SEQ ID NO: 54613 - DNA, 600 bp, Chicken  19866894307381_3
atgtcatgagcaggacttgaagttgcagctgagcacacagtgtctgatattgcctcaagaaagctcttcctatcattattaaaatgaacaggggtggctgagtttaactacacragaactctgccaggctgacactgaagcaggttttggtacaaagctatgggaggaggagaagtgtgttcatttgtgratgaattgaacctgcatttttctccatctcctgatgctggttacgtgatttcccagctgaccccaggaaatggctcctgtgacaagcaaaaggggagagctcatgagctytggcaaggcgctccttaaggaccctttgctgctcacatgggattcagtaaaatgatgcctgagctagtctgtgcctaactgggctctgctgtttgtgttcctggtcagtgtgcaggcamtaagatgaaggcagagatgctatgtggacagatctcattgatcccaggatcaccattcttgtctcttcctcaataacttcacaaccatcgtgttcgtaagttggtgcaccagagcaggacagatcccagccctggatgtgctgctggacaaggagggcagctttctgtggtgcctgcagca

SEQ ID NO: 54614 - DNA, 600 bp, Chicken  19866894307381_4
tctgccaggctgacactgaagcaggttttggtacaaagctatgggaggaggagaagtgtgttcatttgtgratgaattgaacctgcatttttctccatctcctgatgctggttacgtgatttcccagctgaccccaggaaatggctcctgtgacaagcaaaaggggagagctcatgagctytggcaaggcgctccttaaggaccctttgctgctcacatgggattcagtaaaatgatgcctgagctagtctgtgcctaactgggctctgctgtttgtgttcctggtcagtgtgcaggcamtaagatgaaggcagagatgctatgtggacagatctcattgatcccaggatcaccattcttgtctcttcctcaataacttcacaaccatcgtgttcgtaagttggtgcaccagagcaggacagatcccagccctggatgtgctgctggacaaggagggcagctttctgtggtgcctgcagcaccgtgtcctctgtgtaggattcataatccaaagagacaaaagaccgatttgatgtggcaggtcctatrtggagcttgatatggggaaagcagtgcwgctcaggaactgaagccagcaat

SEQ ID NO: 54615 - DNA, 600 bp, Chicken  19866894307381_5
ctgtgcctaactgggctctgctgtttgtgttcctggtcagtgtgcaggcamtaagatgaaggcagagatgctatgtggacagatctcattgatcccaggatcaccattcttgtctcttcctcaataacttcacaaccatcgtgttcgtaagttggtgcaccagagcaggacagatcccagccctggatgtgctgctggacaaggagggcagctttctgtggtgcctgcagcaccgtgtcctctgtgtaggattcataatccaaagagacaaaagaccgatttgatgtggcaggtcctatrtggagcttgatatggggaaagcagtgcwgctcaggaactgaagccagcaataagggttatattttgcaactgaatggcctctgactcaaagagactgtagactagataaactatgtgatatggagaatatctcaggtttatctgttaagtaaagaagtgaatctctgatagactctcacctgcagaggcatttcatgcaatgraagaaacaaaaaagagtttgctgggagttagaatctttgtttgctaaggcttgggataggtttgagcaaatcaaaatgttcaggacagaaatcagag

SEQ ID NO: 54616 - DNA, 600 bp, Chicken  19866894307381_6
gttcctggtcagtgtgcaggcamtaagatgaaggcagagatgctatgtggacagatctcattgatcccaggatcaccattcttgtctcttcctcaataacttcacaaccatcgtgttcgtaagttggtgcaccagagcaggacagatcccagccctggatgtgctgctggacaaggagggcagctttctgtggtgcctgcagcaccgtgtcctctgtgtaggattcataatccaaagagacaaaagaccgatttgatgtggcaggtcctatrtggagcttgatatggggaaagcagtgcwgctcaggaactgaagccagcaataagggttatattttgcaactgaatggcctctgactcaaagagactgtagactagataaactatgtgatatggagaatatctcaggtttatctgttaagtaaagaagtgaatctctgatagactctcacctgcagaggcatttcatgcaatgraagaaacaaaaaagagtttgctgggagttagaatctttgtttgctaaggcttgggataggtttgagcaaatcaaaatgttcaggacagaaatcagagactgaatgggcagtactgcatagagaga

SEQ ID NO: 54617 - DNA, 496 bp, Chicken  19866894307381_7
gagggcagctttctgtggtgcctgcagcaccgtgtcctctgtgtaggattcataatccaaagagacaaaagaccgatttgatgtggcaggtcctatrtggagcttgatatggggaaagcagtgcwgctcaggaactgaagccagcaataagggttatattttgcaactgaatggcctctgactcaaagagactgtagactagataaactatgtgatatggagaatatctcaggtttatctgttaagtaaagaagtgaatctctgatagactctcacctgcagaggcatttcatgcaatgraagaaacaaaaaagagtttgctgggagttagaatctttgtttgctaaggcttgggataggtttgagcaaatcaaaatgttcaggacagaaatcagagactgaatgggcagtactgcatagagagagagttactcacacggggagaggtagatggtaaaaaacaaccacccaaccaacatgtttcctatagatgaag

SEQ ID NO: 54618 - DNA, 600 bp, Chicken  19866894307384_1
tgcatttctgtgtctacatgcttctccagatagctggaatgctaacactcaccttggcctacccccttctttgatccaagcttgatacaacatttcagccagtgctcattaaaaatggctggtagttaaatcattcctgtcataagttattacatccttttaatagaaagtgccctgaaaaggtatacttctatgtttggagtctgttttaagaactgcatttgtgttcagagaactgcaacataattcctcacagcacacctgacaacttgttttagatgtacttcagacagcctaacrattcctttcttgctaaaccatatctgttagggttgatcaaagcttgtttctcctcttggaatttcactgccgctacaacgtgctcttgggtctgatgatctcctctaccacctatcagtttttccttccatctctaggccaatctcaatgatttctttttcttatcacagcacacctttaattagcaagccatgctccctctggccaaacaagtgtatctgcttaagttctatactttttctgctagtctgatattattcaccacttctgtagtcacattgttttaacggatccactgct

SEQ ID NO: 54619 - DNA, 600 bp, Chicken  19866894307395_1
ataagtcttacttcaatgtctaagcaataaacacggagctctagtactaccaaatataagtttcccattggaaaaatctcaaagttaggatctgtatgaagcaagagccagctgagcttcccagtacaatggtgtctcccacagcagattggttttgctacttcagacatttaaaagtttggcatttagaataagtaagtgtcacaactacctctatagtcaatgatgagggcaaagtagatgatgaaatactgtactgtctacaggatactgcagttttgtgagatgaaaaccacactktaaggacagctctccactcttttaattgttctccacaattttctcactaatatcctctaatttttcctcatgttttggaccacattctacagtacaaacagtactttgcacagcacaattgtaatgtaactacaccacaacctgttagcattattttattcatatgtttaagtattatagtgatcctcttgcctacagaagtgtgctgaaggatcacatttccctgtgacccagttagcattggccagcacagagccaccggccctctgaaatactgtcaaattgccaccagaaagtgta

SEQ ID NO: 54620 - DNA, 600 bp, Chicken  19866894307395_2
tacaaagatacattaatgatagaaaatgtattattggatcacactgtgctacagttcctctaacgtatgccatcagtatgagttctgctattatcagtgacctaatagatatagagtaagtaaattctttgatgttcattcctttcccattcacagattccttacacgatttccctctcttctgccctagtcatatgcttaatggccatcatcctctaatcatctctagacttttcaaattttgtatgttgaaaacttactttgcagagcaaaatttcaatcccatgatttttcctcacmgatatcatcatagttttactcctcttccatacttctgttttaccaacataactagagtcaaataccctatttcctcaatttgtaaagtatctctgtttatacttcccattaaattaaaggtctataaagtacaaaaagttagaatgtatggccttcagctgtgttgtaaagggatttataaaaaagtatatcttatgttcagattaaacattctcctgtagattatcctgtaagcttcttctctcatgtgtctcccagaatgtatggtcctttcgaacgcagattaggatccaggattca

SEQ ID NO: 54621 - DNA, 600 bp, Chicken  19866894307396_1
aatacaggcagctatagcagcctgcagaggcacatgaactttgaagcttcttggttctgacaaggccagtatcaaatgttcaaagagttcagcgtagtttggttagaatactgaatgtgaatgtctgcattttagagactgtaagggcataccacaatgccatttacctagtcacatactagtgtggatgcaagcctgctgagacagtcctacacttttcaagtgccactgatggaaacaaacccaacaacccctggactagagtaaagaagagagacacatcaactggttgcctgtatratgtttcttgtcattcttatatcaaactttgccagtgaagaatgatatggacaagaagcatgagtattgttgatatcataaataacaattattttgatacttcttgttttcaacttttttagtcccccctctttttttttttttcgtggctttattacacagtgctggaatgagtgacaaatgaaayttgccttcagcaaatgtcaccctttcactacttcttggcagctctacagagtcaaaacatgaccaaaatttattttgatgttaattcctacagcttaggccagctcatttcat

SEQ ID NO: 54622 - DNA, 600 bp, Chicken  19866894307396_2
atgcaagcctgctgagacagtcctacacttttcaagtgccactgatggaaacaaacccaacaacccctggactagagtaaagaagagagacacatcaactggttgcctgtatratgtttcttgtcattcttatatcaaactttgccagtgaagaatgatatggacaagaagcatgagtattgttgatatcataaataacaattattttgatacttcttgttttcaacttttttagtcccccctctttttttttttttcgtggctttattacacagtgctggaatgagtgacaaatgaaayttgccttcagcaaatgtcaccctttcactacttcttggcagctctacagagtcaaaacatgaccaaaatttattttgatgttaattcctacagcttaggccagctcatttcattagaagatcagaactgtatgctggagacacacatcaccatacagaaactaaagaaacttagaggccaggtgagtccttacttctggaatggtttgtcattctatcattttccttgcaaactgctatgttatctttttcaacagcatggcataatgtttcaaaagtacaaagaatgggttcttccaaa

SEQ ID NO: 54623 - DNA, 600 bp, Chicken  19866894307399_1
tcagctatgaaaagtatttatttctgagtttcaggtagagagtaaggtagagacttgaatgcgaaggaagatgtgagcaggtaaatcccaggagccaagcttggaaaaatgaacaaataccacagtgaggtgactcctctctcagaataattctttgtggttgtattggtgatctgtagtaaaacattttctccaccttctttgttttggctcattaagatttgctgaaccatccagttttgaaaacaaggaaaattcatgttttttcctgtggttcactctctcctggccttatgtgcrgagaagggatgtgcccgtgtttgatctggcttggtcctgaagtgsattctctgaaaattttacagatattgaatctggttgcrttctcctcctacagctctggtaaaagttactggatcggtcagatgaaagcagctgtacaaattagctatcagctgctaaatgtttgtcagcctggtaagtgccaagatcaaccaagtcaatagtttggtgttttgcttcttctgctaaattcacagcaacaaaaaggaatctctctgcttgcaaagaaaaccagaattcatcttctcactaccagga

SEQ ID NO: 54624 - DNA, 600 bp, Chicken  19866894307399_2
ggtagagacttgaatgcgaaggaagatgtgagcaggtaaatcccaggagccaagcttggaaaaatgaacaaataccacagtgaggtgactcctctctcagaataattctttgtggttgtattggtgatctgtagtaaaacattttctccaccttctttgttttggctcattaagatttgctgaaccatccagttttgaaaacaaggaaaattcatgttttttcctgtggttcactctctcctggccttatgtgcrgagaagggatgtgcccgtgtttgatctggcttggtcctgaagtgsattctctgaaaattttacagatattgaatctggttgcrttctcctcctacagctctggtaaaagttactggatcggtcagatgaaagcagctgtacaaattagctatcagctgctaaatgtttgtcagcctggtaagtgccaagatcaaccaagtcaatagtttggtgttttgcttcttctgctaaattcacagcaacaaaaaggaatctctctgcttgcaaagaaaaccagaattcatcttctcactaccaggattgcgctgcagtcaaggagacctcactaacactttatttgccggc

SEQ ID NO: 54625 - DNA, 600 bp, Chicken  19866894307399_3
aatcccaggagccaagcttggaaaaatgaacaaataccacagtgaggtgactcctctctcagaataattctttgtggttgtattggtgatctgtagtaaaacattttctccaccttctttgttttggctcattaagatttgctgaaccatccagttttgaaaacaaggaaaattcatgttttttcctgtggttcactctctcctggccttatgtgcrgagaagggatgtgcccgtgtttgatctggcttggtcctgaagtgsattctctgaaaattttacagatattgaatctggttgcrttctcctcctacagctctggtaaaagttactggatcggtcagatgaaagcagctgtacaaattagctatcagctgctaaatgtttgtcagcctggtaagtgccaagatcaaccaagtcaatagtttggtgttttgcttcttctgctaaattcacagcaacaaaaaggaatctctctgcttgcaaagaaaaccagaattcatcttctcactaccaggattgcgctgcagtcaaggagacctcactaacactttatttgccggcgctttgttgtggaattacagcttatctccctatgctat

SEQ ID NO: 54626 - DNA, 600 bp, Chicken  19866894307399_4
cactaccaggattgcgctgcagtcaaggagacctcactaacactttatttgccggcgctttgttgtggaattacagcttatctccctatgctatttgagaaggtgatttgttgtgcagcattttggtgagatgaaacagattgcagggaatggagcttgggtgattgagaactttggctgacacagagtgccaccggatccacactgaatccctgaggttttaactaggggacctttttgctttcttattcaatttccctgctttaaactgtatggaattaactgtccttggacgacagkagggtgaggtgcagaaactccagcgctgtgtttaacttgtcctgccagagctgactcctgaaagcgatcatgaatttgatgtctctcaaggcaatatgaagtgctccaccgagtcccaaccattccctttcagtcctttaagacaagaaaatcattaaagaaaatgtctgtgacaacaacaaatagaagcacaatattttcttcagcaattcctatccgaaaaggaaccccgctcccaattaaccataaactgaggactgtggcagaagacctgtcttgtagaaccaagcaaggaggcag

SEQ ID NO: 54627 - DNA, 600 bp, Chicken  19866894307408_1
caatatgaataatcatgataagtcacctacaccaacagtgcatttatcctctagtcaaaatcatattatgtagattaaagttctatggctcccttcttaaattctgtgttctgcagtggtggtgacacgaccatcagaaacggtaggtcagtgcatgcagtgtggtaggtcagcagggagaaaggctggcagctgcagcctctctgccattagttcagtgcacactgagttttatgaactgcctggaaagtgtatatccaatggctcataaggaagcccaccgccacagtttgcatctcratgctcattagctaccgttgcttttattacaggatagagaacatttctaagagtaatattttaaaatggtttagtcagttcatgtttatttgattacygaagatgttttatgtataacctacaaatatctgaagagggaaaactcaagattcaacagtaggtagcatcaagatccttcactgtatttcagcctctttatgatgaatacagttctgacagcacagtaaaagaggtgcacaaaactaacagcagcaaatattcctttgagtcaagtgctgcagaagacagtagaaaaacatg

SEQ ID NO: 54628 - DNA, 600 bp, Chicken  19866894307408_2
aaattctgtgttctgcagtggtggtgacacgaccatcagaaacggtaggtcagtgcatgcagtgtggtaggtcagcagggagaaaggctggcagctgcagcctctctgccattagttcagtgcacactgagttttatgaactgcctggaaagtgtatatccaatggctcataaggaagcccaccgccacagtttgcatctcratgctcattagctaccgttgcttttattacaggatagagaacatttctaagagtaatattttaaaatggtttagtcagttcatgtttatttgattacygaagatgttttatgtataacctacaaatatctgaagagggaaaactcaagattcaacagtaggtagcatcaagatccttcactgtatttcagcctctttatgatgaatacagttctgacagcacagtaaaagaggtgcacaaaactaacagcagcaaatattcctttgagtcaagtgctgcagaagacagtagaaaaacatggacatctacaccagcatctgccagtgggaaatgctaggaaggggactgataaggagatgaaaagcaccaggaacaagaatggcctgggttatgttgtg

SEQ ID NO: 54629 - DNA, 600 bp, Chicken  19866894307412_1
aaggaagtaaaaacttccttagctaaattttgctgcaaagatgatataaaacatgactaaactctgaaaggatttcacctatggcttggcccagtttctagatgagtgctgagaaaaaaaagggcatttaaaccaacctatctaaaacctatttctattaaattactgttcataatttaatcaaatcatatctaaaatctcctctagaaaacagaagattttcacaattattcatcatcatcttcactctatcctttttttttttttttaattgctaataaaaggctcagaagacaaatwattatattaaaaagtttcagcaattactgaaatattcttcaaaacttttccctcctttttggtgtagaccccccacaaaatgtcatgattaccttcaattacagataaaatagctatctttaacctcttcttccctttcatcaaagtttctccttaagtcatgagacctgcagaatatgggaccactctttgtatagagaatgcatatttgtgctcgtccttaaataccaattatactaattctccagtgtttctgtgagattttgaagtacacggaaaataatccagaaaaaaataaaa

SEQ ID NO: 54630 - DNA, 600 bp, Chicken  19866894307414_1
tctgctccagttctacaccagcatccatgattacaaggaatatcctatgtcagctacactccaccaggtaaacaaaccctgaagtgcactaagtcagtctgtatctgtccccaaatctaatgaagatctttagatgaatttcagtaagattatgttaaattacagctgaattcctgtggaatcttgtattttatgcacctgaataccaaaagaattcatcattattaaaattattgcaagaaattccaaaggaagtaagaatgatttcccacttattataaagtgttgcccattttgcartaagtggccaatcattattaattcatttgatattctttatagcattaatcatgactaattcatgtgatattattaatgtagatataacatgaaattcaattgcaatttagctatttatttaaatgtatcattaatttaaagagctaccaacccaaaatgtcagtagttttattcaaaggctgtaaggcatattcttgcatttgaagctgaagaatccttttcaagaaaaataaatataaaccsttttgtatttgtacttaccttcttttaatgatacaaagtaacacagcatgtattaca

SEQ ID NO: 54631 - DNA, 510 bp, Chicken  19866894307414_2
ttccaaaggaagtaagaatgatttcccacttattataaagtgttgcccattttgcartaagtggccaatcattattaattcatttgatattctttatagcattaatcatgactaattcatgtgatattattaatgtagatataacatgaaattcaattgcaatttagctatttatttaaatgtatcattaatttaaagagctaccaacccaaaatgtcagtagttttattcaaaggctgtaaggcatattcttgcatttgaagctgaagaatccttttcaagaaaaataaatataaaccsttttgtatttgtacttaccttcttttaatgatacaaagtaacacagcatgtattacatttccttctatgtaaatggaaaaggaagaagcagacctttctgcagtccagaactccagcctttcattattcattatttcattatttcatcctattaatgtttaagctgtgtgtatgtttaatgactttgcttgcataaaactcttattttgt

SEQ ID NO: 54632 - DNA, 600 bp, Chicken  19866894307417_1
gaatttgatggttgctcatgcgatacactgtagaaaaagaaactgcctttctcagctgattattagaagttgatatcagcaacaagaccatctaccttctccagactgtaatttctccatttagaataagccacagtaatgtgcaaaagatgcatatatagggatgaagtaatatattcagtgtatttccgcagtctgtggaacctgaggatcttgcagaagatatctcgtgataatgatgtttgtagaagactcagaaaaatcacattttgatcctttgatagacataacttcaccagrgatgtatgcaaaatatttaaaattttaatttatatcttagcaccttaaaatattaatagaaacaataaaaagcttggtcagcaaggaacagttgtaagctttctttatagaaataacaataacgatttttttcttctttagataatgactcaaattaatgtaaactcatataatctaaaagtgcactatacgctggcgtttttcatttctgcctgtatcaggaatggtgtggtgagcaggactagaggagtcatcctgcccctgtactcggcattggtgaggcctcacactgagtactgt

SEQ ID NO: 54633 - DNA, 600 bp, Chicken  19866894307432_1
atgtactgcatagcaggggtgagtatcgcaaggatgtgaatcttttgaggaggctttacagtgagaatgagacattccacatatgtgtgtattagttatttactgcacatgtttgtgctggtctgtgacgagtagcaatcttcagaaataaaacctctgtgcctttgcatgaaggaacccagtgaattcactgcactccctatgcagcccctgggctgtgatgcaggagcaggacgcacaggctcccaggtgagatgcattaatggctgcagttccagctatttaagcagaagcattttygtctgagggtgtttggggaagatgaagcaatgacatgctattttagataattatttcacactttttcacaccgtggcatttgcccgaggctcagtctgacgtgtgggggactgattcttaatgaaataagctcgtgctcgctacaaaggacaaattaatctctggatgtctgatatggaaatgctcttatttgccaccttgtgcgagttcagtttgccactgtggtcttgtcagccagtgaatcagttctgttccttagttgcagaagcatctatggcttgaaatgaggaattcaagcaa

SEQ ID NO: 54634 - DNA, 600 bp, Chicken  19866894307435_1
tgagagtggtctaacacgggaacagtttgtccaaaggggtggtagaatcttcatcctcatagatgttcaaaactgactggacatagccctgagcaacagtttgagcagaaactttaactagatagttgtcagagacttccagcttcaactgttccatagctttgtgattgtatgagtgggacactgtgggagtgcaaagtctgtaggagtcaaattaagcccaaacttggcagaggatgtattttctcctggaattgatcttacataaaaatatattccaagttttgttgagacttcccwgtgaaatgttctttctgtttgcttcagaatgtgacaggactggtctgcacgtgaaaaatcagagaaatggagcacaggagaaaaatacaaactaatctgacagttaagtgtgttgtatattttctttatgcaatagtttttctacaaatataaagattgtctttacctacttagactctttctatatttaaagtcatgcttactataactcttaccattattaccattacttggcactaaagaggcacatttcttaaaaggtaaacgtgattcagaaaaaatgaattaaaccactgtcaa

SEQ ID NO: 54635 - DNA, 600 bp, Chicken  19866894307448_1
gagaggtagcacttgtatcttggtgttcccagtgccacatagccacagagtagttacgttgaacagttctaaaagttcagctacatttatagttacattaaaaacatctgtgggtcacagtagtcaggttgcacatattaacaagaattttaaaataaattattttcaacactgcaaaaaggtccacattttggattgtatgcaaagcatactggactgcgtcttcagaggttggaaactccgccaattctcaccattcttcctgtgctctgtgaccagcaccttcagggtgaggtgctyctcacaaggaataactgctgagcagaagaaggtggacgaaatgctagctggagcaaatcaaccmctgtgtgtacttttcactatatgaattcatgatgctcgcagcttcccgcttactttgtggcttccatgtgttaaataagcacagattccctccttggaaaatggaaagaaaagctagttacctgttcttctttgttgtttatgataaccaagcgcgatgccttctcttcacagaataactttgcctcttcaaaaatttctctttcaattgagaagtagtagcatttttctgtgtag

SEQ ID NO: 54636 - DNA, 600 bp, Chicken  19866894307448_2
agttctaaaagttcagctacatttatagttacattaaaaacatctgtgggtcacagtagtcaggttgcacatattaacaagaattttaaaataaattattttcaacactgcaaaaaggtccacattttggattgtatgcaaagcatactggactgcgtcttcagaggttggaaactccgccaattctcaccattcttcctgtgctctgtgaccagcaccttcagggtgaggtgctyctcacaaggaataactgctgagcagaagaaggtggacgaaatgctagctggagcaaatcaaccmctgtgtgtacttttcactatatgaattcatgatgctcgcagcttcccgcttactttgtggcttccatgtgttaaataagcacagattccctccttggaaaatggaaagaaaagctagttacctgttcttctttgttgtttatgataaccaagcgcgatgccttctcttcacagaataactttgcctcttcaaaaatttctctttcaattgagaagtagtagcatttttctgtgtagttcttccaatgaggagaacaacctatgatgtgatttttttgcatgaaaccaattactcataaat

SEQ ID NO: 54637 - DNA, 599 bp, Chicken  19866894307460_1
  misc_feature (1)..(116): n is any nucleotide
nnnnnnnnnnnnnnnnnnnnnnnnnnnnnnnnnnnnnnnnnnnnnnnnnnnnnnnnnnnnnnnnnnnnnnnnnnnnnnnnnnnnnnnnnnnnnnnnnnnnnnnnnnnnnnnnnnnntattttgaagcagctgttttagaagagttgagctttgtctgaagttcagctttgctgccattgccacatgcattaaggcttcctagtatcaattagaatttggacagcatagctaaatactgtgaactctgcttccttgtggttaaaaatgtggtgcagctattgatgaagtttgtaccatggyatgactgactggctgtttgattagtgctgctgaaaatattctgcagcagattctacagcttgtggatagttcttagctagcagtattaattmctgtttttctgctggctttgcctctgttaygatcattgagactttaattttttttttcttttccccaagcatacatatgaagaggctgagaagggttttgatgaaactttggccaaggagaaaggaatgaaccgtgatgaccgaatccatggtgccttattgatcctcaatgagctcgtgaggatcagcagtatggagggagaggtg

SEQ ID NO: 54638 - DNA, 599 bp, Chicken  19866894307460_2
  misc_feature (1)..(24): n is any nucleotide
nnnnnnnnnnnnnnnnnnnnnnnntattttgaagcagctgttttagaagagttgagctttgtctgaagttcagctttgctgccattgccacatgcattaaggcttcctagtatcaattagaatttggacagcatagctaaatactgtgaactctgcttccttgtggttaaaaatgtggtgcagctattgatgaagtttgtaccatggyatgactgactggctgtttgattagtgctgctgaaaatattctgcagcagattctacagcttgtggatagttcttagctagcagtattaattmctgtttttctgctggctttgcctctgttaygatcattgagactttaattttttttttcttttccccaagcatacatatgaagaggctgagaagggttttgatgaaactttggccaaggagaaaggaatgaaccgtgatgaccgaatccatggtgccttattgatcctcaatgagctcgtgaggatcagcagtatggagggagaggtgagcaaatgagcaagatggggactatggcttttggctgccagtctgttgattgacagtgggtagcagctcagcaacctgtgaaaataaaccac

SEQ ID NO: 54639 - DNA, 600 bp, Chicken  19866894307460_3
gaagcagctgttttagaagagttgagctttgtctgaagttcagctttgctgccattgccacatgcattaaggcttcctagtatcaattagaatttggacagcatagctaaatactgtgaactctgcttccttgtggttaaaaatgtggtgcagctattgatgaagtttgtaccatggyatgactgactggctgtttgattagtgctgctgaaaatattctgcagcagattctacagcttgtggatagttcttagctagcagtattaattmctgtttttctgctggctttgcctctgttaygatcattgagactttaattttttttttcttttccccaagcatacatatgaagaggctgagaagggttttgatgaaactttggccaaggagaaaggaatgaaccgtgatgaccgaatccatggtgccttattgatcctcaatgagctcgtgaggatcagcagtatggagggagaggtgagcaaatgagcaagatggggactatggcttttggctgccagtctgttgattgacagtgggtagcagctcagcaacctgtgaaaataaaccactgtgtttgaaatggattgatctgaatgtgga

SEQ ID NO: 54640 - DNA, 600 bp, Chicken  19866894307469_1
ttaaggatttgggtaccagataaacttaaaaactacagtgcctgagatggcaaggacataaataaaactattgagttcttcaaatgttttctcctgagttacgcaagtaaaaggagaacaacatcctataaacgatgactgaaggtactagatcttcactgcagcctgagggtacaattgctaaagcactaagttagaaaaggtggacaacttactgtacctccactccgccatacttcatctgtccaatacggtccccctaaggttctgccttctgtgaatctttcttagaaacaaacwaacaaaaattaatgctgtcacagatcacaaaagaaaaaaccaacacagtttcctaacaaacatgaaatctgcaccccacaaccttgggagaaaccctataaactcagagccaggcttatgaaaggaattgatctctgggggtaaggaaaaacgagacatacgtttgagttcattttcttttaaagacacactaggtacgtgattagaactggagacatcagctagtgggatggtaaataaacaccagtaacagtaagaaggattctttgacacttatttatgaagcaagactcgcataac

SEQ ID NO: 54641 - DNA, 529 bp, Chicken  19866894307470_1
tcaccgtgctcacagccgctgttttgtctccataaatgttcagcaagcactaataaatatcagtggatgccatttcttttctcttttttttttctttttctttttttttttttttcatggaggaattcaattccatatctctgctttatctgcgcttcccagacagacaccgttttgtcagcctttacctctgctgccatgtgtcacgtggcaacaaaatttaatggaatattggaaagaagattcagcttctacttccataccatcaacatagacttctgacatcactgggcaacatcrtaaaataggaaacattacttttggagcagcactcatataaaaagtaacaataaatagtattatcgtacaacatactatggaaatgcttttcaaggtcttccacagaacaagaaattatagatgatacaattttagaacaatgttttagtctcctctgaggtatgttagaatcatatactcatttacctatatattatctgagctcttgatgtaaatttacataaggtgg

SEQ ID NO: 54642 - DNA, 600 bp, Chicken  19866894307472_1
gtgaaacgcaagtgaaaaatgttactgtgaagcacactgttttcacagtgttctcgagtaataagctactgaatgtcaggggaaaacccaaaacaaaagccgccttcatttaataagctggattggtttcttggtttagctttcccaaaatttcaaaaggatagtttccagcattatgacagaattatttctgagcacttattcatcatcagttttcttcttcaactgagcctattgcaacatatcactttctttgtttcccgacctctgcttggaataggccacgggcatcctcactaygtaattttgaaaaaggctaaaagatgagctaagcaatttttaagccttttaaaacttccaggtacgtgccctacattttggccattgtgtcttttctttttctatgggagtgtgatggctgaaacgtctggaatgtgtctgtaagtaatcaatgcctcaaaatacctgagcttatcagcgagccttgctccaaggtgtgcactcagtgtttggaagccctaagacacatctttctgtgttccctcaaaacagcattttaaaccagctgttccagtacagtctgtagagtgtgttttgttt

SEQ ID NO: 54643 - DNA, 600 bp, Chicken  19866894307474_1
gactacataggaaatctataatgtctaggtacagaagacagttaactactaagttgcctgtaagtgaactctcaaatccatacaggtacacagttgatattcatttgccaagttgtacgttctgtcccacccatggagaaaccaaacacaaaaatacagttcagcactggatctgagggatttatcttcactggggagagctacatacaagctgtcatttttttattattattattatttgcttaccctatgggttcctggttagttacatttctttttgacaaaaggagagcaattaaygtaatggaacagactttgttctttaccagatatagtattttcactactgggtagttctcaggtagagaaggaagctcacttggacaagaaaggagaaagttgtctactgaagagaaaaagagccttcataagcacatcaaaaagcttaggtaatgctgcacttctctctttctctgactgagatgcaaagagaactgaaaagggaaactttagtccgatgcaattataaaatcacttgcgtagaatgactcaggcaaatggaaagaactacctgagtctttggaaaatattatttcaaaa

SEQ ID NO: 54644 - DNA, 600 bp, Chicken  19866894307476_1
gtttacacatacctatacataaaccttttagatgtacatacaagtaatgcttccatgttgttgtgtctccatttccaatttctctgttcaaaataagactttttacatatcttaacatgacatggaaagtgcatcagaaaagaacgatcacattccttgtttgacactgatttgcagtctattcatatataattaatgactggagtgttgtaatgaaagtatataggctcttcaggaaggacaggaagggaaaatgaataaagggggtcaccttctgtgtcagtgatcagctggagctcrtggaactctgctagaggatagaggagctgaccaagagcttatggsttaggattaaagggaaaacagggttagatgatattatagtgggggtctgctacaggtcacctgaccaggaagtccaagcagtataggtactctatagacatataggagcagcatcatgttcacgagccctggtcctcttggggaacttcartcaycttgmtgtcttttggagggactaacacagcagaacataagcaayccgaaaggttcctggagtgccttgatgataacttccttttacaagttataggggag

SEQ ID NO: 54645 - DNA, 600 bp, Chicken  19866894307476_2
aatgcttccatgttgttgtgtctccatttccaatttctctgttcaaaataagactttttacatatcttaacatgacatggaaagtgcatcagaaaagaacgatcacattccttgtttgacactgatttgcagtctattcatatataattaatgactggagtgttgtaatgaaagtatataggctcttcaggaaggacaggaagggaaaatgaataaagggggtcaccttctgtgtcagtgatcagctggagctcrtggaactctgctagaggatagaggagctgaccaagagcttatggsttaggattaaagggaaaacagggttagatgatattatagtgggggtctgctacaggtcacctgaccaggaagtccaagcagtataggtactctatagacatataggagcagcatcatgttcacgagccctggtcctcttggggaacttcartcaycttgmtgtcttttggagggactaacacagcagaacataagcaayccgaaaggttcctggagtgccttgatgataacttccttttacaagttataggggagccaatgaggagaggtgctatgctggacctcattctaaccaattag

SEQ ID NO: 54646 - DNA, 600 bp, Chicken  19866894307476_3
tgactggagtgttgtaatgaaagtatataggctcttcaggaaggacaggaagggaaaatgaataaagggggtcaccttctgtgtcagtgatcagctggagctcrtggaactctgctagaggatagaggagctgaccaagagcttatggsttaggattaaagggaaaacagggttagatgatattatagtgggggtctgctacaggtcacctgaccaggaagtccaagcagtataggtactctatagacatataggagcagcatcatgttcacgagccctggtcctcttggggaacttcartcaycttgmtgtcttttggagggactaacacagcagaacataagcaayccgaaaggttcctggagtgccttgatgataacttccttttacaagttataggggagccaatgaggagaggtgctatgctggacctcattctaaccaattaggagagacctgtggggaatgtgaaggtcaaaggcagcccctggctgcagtgaccatgaaatgggggaagctcaatatcctgagggctgtgaggaagatgcacagcaagctcactgccttgaaattcaggaaagcagacttcactgtattcag

SEQ ID NO: 54647 - DNA, 600 bp, Chicken  19866894307476_4
tggagtgttgtaatgaaagtatataggctcttcaggaaggacaggaagggaaaatgaataaagggggtcaccttctgtgtcagtgatcagctggagctcrtggaactctgctagaggatagaggagctgaccaagagcttatggsttaggattaaagggaaaacagggttagatgatattatagtgggggtctgctacaggtcacctgaccaggaagtccaagcagtataggtactctatagacatataggagcagcatcatgttcacgagccctggtcctcttggggaacttcartcaycttgmtgtcttttggagggactaacacagcagaacataagcaayccgaaaggttcctggagtgccttgatgataacttccttttacaagttataggggagccaatgaggagaggtgctatgctggacctcattctaaccaattaggagagacctgtggggaatgtgaaggtcaaaggcagcccctggctgcagtgaccatgaaatgggggaagctcaatatcctgagggctgtgaggaagatgcacagcaagctcactgccttgaaattcaggaaagcagacttcactgtattcagggat

SEQ ID NO: 54648 - DNA, 600 bp, Chicken  19866894307476_5
tgttgtaatgaaagtatataggctcttcaggaaggacaggaagggaaaatgaataaagggggtcaccttctgtgtcagtgatcagctggagctcrtggaactctgctagaggatagaggagctgaccaagagcttatggsttaggattaaagggaaaacagggttagatgatattatagtgggggtctgctacaggtcacctgaccaggaagtccaagcagtataggtactctatagacatataggagcagcatcatgttcacgagccctggtcctcttggggaacttcartcaycttgmtgtcttttggagggactaacacagcagaacataagcaayccgaaaggttcctggagtgccttgatgataacttccttttacaagttataggggagccaatgaggagaggtgctatgctggacctcattctaaccaattaggagagacctgtggggaatgtgaaggtcaaaggcagcccctggctgcagtgaccatgaaatgggggaagctcaatatcctgagggctgtgaggaagatgcacagcaagctcactgccttgaaattcaggaaagcagacttcactgtattcagggatttcct

SEQ ID NO: 54649 - DNA, 600 bp, Chicken  19866894307476_6
gaagggaaaatgaataaagggggtcaccttctgtgtcagtgatcagctggagctcrtggaactctgctagaggatagaggagctgaccaagagcttatggsttaggattaaagggaaaacagggttagatgatattatagtgggggtctgctacaggtcacctgaccaggaagtccaagcagtataggtactctatagacatataggagcagcatcatgttcacgagccctggtcctcttggggaacttcartcaycttgmtgtcttttggagggactaacacagcagaacataagcaayccgaaaggttcctggagtgccttgatgataacttccttttacaagttataggggagccaatgaggagaggtgctatgctggacctcattctaaccaattaggagagacctgtggggaatgtgaaggtcaaaggcagcccctggctgcagtgaccatgaaatgggggaagctcaatatcctgagggctgtgaggaagatgcacagcaagctcactgccttgaaattcaggaaagcagacttcactgtattcagggatttccttggaagagtaccatgggatgaagacctgcagggaatagg

SEQ ID NO: 54650 - DNA, 600 bp, Chicken  19866894307488_1
tcttcttatggtggtatgttccatgaagataatgtatggctgaggttaatgccaacagacatttatattctgaaataaaattttaaaatttatgcaattatctgtgcacacataaatatcaaaataatagttctggaacttgatagtaagagtagaatagatagaaattatcagcaagtctctgattctacgatgcctagaattaacataagaaatctggcaaaaagattatgtattttccactcaatttttacttccttaagcattgcctagaaagtagacttgtttaaaaagtgagcragaattactataaactgtttttatctgaatatatggagaattttttttatatttgctgcacaaaatcaattttttggaacatattttatatgttctagcctactataaatgctcatcatttattccacactgatacttccatttaagtgttagcacatggcccaaacttacttgtactggaaaagctcccaagagccctagctgtgccaccattgagcagttcactttgaacagcctttgctccaaagactttgcaagataactgtgtaaatacagatggtttagatttcagaacagtgt

SEQ ID NO: 54651 - DNA, 600 bp, Chicken  19866894307500_1
atacgcactgctcccgcgacggcactctggaacaggaacattagccctgctcagctgtcaaaagctgaaaaacagattctgcagatatcactcctctggagttgttaataaattgcctcagagcctggttacagaagagtatgtgcatggcaggaagtcagaatttgaaatggaaatgtttctgaagtttggaagttacctaatcacacatcttcccatttgctcggtgtgtgtcggagccccttggcctgaagctcagaaggggaaggagctctctgctttcatatcttggtggagagraagagatgtttcatctgcatatcccagagatccacagttttctgcagacagaagttcctgagggaagggagctatctattcccatttatttgtagagtaggagtcatacatggtcacggaggcaatttaatgcacatattctttctatacagagcattcgcagtgaaacggcaggactcgccctacctgaaagaagcacagaacagactgaggagtggagcaaaaagagcttctgctattttatatcaaggagctcttcttctcctcctggctcctctgttgatgggaggatgctttgat

SEQ ID NO: 54652 - DNA, 600 bp, Chicken  19866894307504_1
tttcactgtgaaaaaaatacgtagaaaattccaaccactcttctgttcatctgtgaaaccagttacataagcacctaataaggcagaccagaagtctataaatagcctggtttagggttattatatgaaactaacatgcagtcagagctgccccagattgctgatcatatgggtatctacataagcagcccaaggttcactcttttccctgctttcccctcaatgtacttcagtgttttttttttctgtttttttttttcttgttcattttacgtattttatttcaactgagcagaaaakaatacagctctgtgactggtattcttcagaggtagaagctcctgttgaggagtctctcattccagtctgggaaagattcaaacaattaactaaaaaaacctacacaaaacagtgakctctccagwtgacagtctgggtgtattagcactatagctaagcacgactctcacataaaatcgcaaatatactgaaatagaaagaaactgctgttcacctttaggataatattaaattaccttgtatgtaatgccggtataaataatgttaaaacaaattctgttaacatttaacataaataaa

SEQ ID NO: 54653 - DNA, 600 bp, Chicken  19866894307504_2
gttattatatgaaactaacatgcagtcagagctgccccagattgctgatcatatgggtatctacataagcagcccaaggttcactcttttccctgctttcccctcaatgtacttcagtgttttttttttctgtttttttttttcttgttcattttacgtattttatttcaactgagcagaaaakaatacagctctgtgactggtattcttcagaggtagaagctcctgttgaggagtctctcattccagtctgggaaagattcaaacaattaactaaaaaaacctacacaaaacagtgakctctccagwtgacagtctgggtgtattagcactatagctaagcacgactctcacataaaatcgcaaatatactgaaatagaaagaaactgctgttcacctttaggataatattaaattaccttgtatgtaatgccggtataaataatgttaaaacaaattctgttaacatttaacataaataaaacatagcatgtactaataatagattatttcatttccctgtcaaagttgaaaagacccttattgcttattcattttgctttgtttttgaaagtcaatagagcttctgttttctgtaa

SEQ ID NO: 54654 - DNA, 600 bp, Chicken  19866894307504_3
tgaaactaacatgcagtcagagctgccccagattgctgatcatatgggtatctacataagcagcccaaggttcactcttttccctgctttcccctcaatgtacttcagtgttttttttttctgtttttttttttcttgttcattttacgtattttatttcaactgagcagaaaakaatacagctctgtgactggtattcttcagaggtagaagctcctgttgaggagtctctcattccagtctgggaaagattcaaacaattaactaaaaaaacctacacaaaacagtgakctctccagwtgacagtctgggtgtattagcactatagctaagcacgactctcacataaaatcgcaaatatactgaaatagaaagaaactgctgttcacctttaggataatattaaattaccttgtatgtaatgccggtataaataatgttaaaacaaattctgttaacatttaacataaataaaacatagcatgtactaataatagattatttcatttccctgtcaaagttgaaaagacccttattgcttattcattttgctttgtttttgaaagtcaatagagcttctgttttctgtaaattccaatc

SEQ ID NO: 54655 - DNA, 435 bp, Chicken  19866894307504_4
tagaaagaaactgctgttcacctttaggataatattaaattaccttgtatgtaatgccggtataaataatgttaaaacaaattctgttaacatttaacataaataaaacatagcatgtactaataatagattatttcatttccctgtcaaagttgaaaagacccttattgcttattcattttgctttgtttttgaaagtcaatagagcttctgttttctgtaaattccaatcttatgaatattctttaagaggaaaattaataattaataatttcccgaggttttattccaacctctgtrttactgggaatttcacttagctcactaaaggactagatcttttctcaaagcttttgtaacagaatgtttttgccttgattgcagcagtcaaagtaagaagaattgattaaataaattcttctaatgcaaacaata

SEQ ID NO: 54656 - DNA, 600 bp, Chicken  19866894307510_1
actcctagtctggctgccatgctgatatcaatcctgcaaaacatgtatggtagaacagaaggttttgtgctagagaacagataagtgacatggatggaaattatggtaaatttaaattgatggcctaattagtattatctctttttgtattctctgtaagaaatattatccaggaggaactcattttgcatgaatattgatataaagtgttaattctgcagcatttccattgtaatctggcattaattaatgcatcattattctgaagtgttaattaaattattatagaaaggacatctrccccagttcagaaagaaaaaagtatatggtgtatgaaaacgagacttscaaagttctgaaatggcactcaagttctgacaacactggcaggaaaacaaaactaagcagaaatatatgcatgatgagcttgtggctattaaaccacagtatgacatcaacatttgctcagttgtgatggcgtttgatgacagcagcaaacccaagcatgtcatgaacaatacagtaaatgaagtacactctacactgattatcagaaattacagggaattcagggaattaaattaaaagcatgaatacatt

SEQ ID NO: 54657 - DNA, 600 bp, Chicken  19866894307510_2
ggtagaacagaaggttttgtgctagagaacagataagtgacatggatggaaattatggtaaatttaaattgatggcctaattagtattatctctttttgtattctctgtaagaaatattatccaggaggaactcattttgcatgaatattgatataaagtgttaattctgcagcatttccattgtaatctggcattaattaatgcatcattattctgaagtgttaattaaattattatagaaaggacatctrccccagttcagaaagaaaaaagtatatggtgtatgaaaacgagacttscaaagttctgaaatggcactcaagttctgacaacactggcaggaaaacaaaactaagcagaaatatatgcatgatgagcttgtggctattaaaccacagtatgacatcaacatttgctcagttgtgatggcgtttgatgacagcagcaaacccaagcatgtcatgaacaatacagtaaatgaagtacactctacactgattatcagaaattacagggaattcagggaattaaattaaaagcatgaatacattcaaaattctacagatttctaaatgttccatctggcttttgaacaggag

SEQ ID NO: 54658 - DNA, 600 bp, Chicken  19866894307513_1
tactcagaatgagactgttttcatcttagctagcattccttttttctagtatttcattacaatcctgtgctactcccaaacaccagagcttgtttacgctgtatcagtacagcactttctgataaacaagcagttcagagataagccaaagtctgtgctctgctgaagatgacatcacaacagatcaatgataaaaaaaaaatattagtaataaagtttaccttatccattagactattttgtggccctcctgtgatgccgtgtaaggaaaggttttttacttgaggcatggaggtagcygaggagaattcagctgcagaagagacagatgagagttcaacaggaaattcttctcttggtgccaggctagagattgtacgtgttttattgaatgactgggatcttttractgctgaggagacagcgagtgcaaaaggggatggcctcgaactggagtatggctttggaactgcaaaagttcttagagttcttaggttcaatggtgctggctggcaggagggaaaacttggcggtttgttgtttttaacaggagaagtggaggattcaatttttttcccatcatcatctttgtcttcatct

SEQ ID NO: 54659 - DNA, 600 bp, Chicken  19866894307513_2
acagcactttctgataaacaagcagttcagagataagccaaagtctgtgctctgctgaagatgacatcacaacagatcaatgataaaaaaaaaatattagtaataaagtttaccttatccattagactattttgtggccctcctgtgatgccgtgtaaggaaaggttttttacttgaggcatggaggtagcygaggagaattcagctgcagaagagacagatgagagttcaacaggaaattcttctcttggtgccaggctagagattgtacgtgttttattgaatgactgggatcttttractgctgaggagacagcgagtgcaaaaggggatggcctcgaactggagtatggctttggaactgcaaaagttcttagagttcttaggttcaatggtgctggctggcaggagggaaaacttggcggtttgttgtttttaacaggagaagtggaggattcaatttttttcccatcatcatctttgtcttcatctactggaggagagaagctatttgttgcatgtaatgaagtttcatcaggcgatgagatttttttttccatctctgtatttttaacttcattttgaatggaattaggagca

SEQ ID NO: 54660 - DNA, 600 bp, Chicken  19866894307517_1
ctgctctaatggccaagcagtgggaaataattcataatataggccactatacacaaagtaagcagttttcctgaacacagttctcttgtcttttgaaaacagtgctgtgctgaccagaatttcctggacatttcagcccagttggaaatgacagtctcattattaaagctgactgagatcttcaactctttgaaagggtagataatagcaggacaaggggaaacggttttaagttgaaggagggaagatttaggttggatgtcagggggaagttctttactgtgagagtggtgaggtgcrggaagaggctgcccagacaggttgtggataccccgtccctggaggtgctcaaggccaggctggatggggccctggrcagcctggtctagtattaaatgtaaaggttggcggccctgccaggggttggagcttgatgatccttgaggtcccttccaacacaagccattctatggattctatgatgatctaaaattctagatttaaatacagagtttgcagttaaaggagttaaattcacagctttaacacaggtcctctaattaccccagtgaagacatgtcagccttgtacaaaataagt

SEQ ID NO: 54661 - DNA, 600 bp, Chicken  19866894307517_2
acagttctcttgtcttttgaaaacagtgctgtgctgaccagaatttcctggacatttcagcccagttggaaatgacagtctcattattaaagctgactgagatcttcaactctttgaaagggtagataatagcaggacaaggggaaacggttttaagttgaaggagggaagatttaggttggatgtcagggggaagttctttactgtgagagtggtgaggtgcrggaagaggctgcccagacaggttgtggataccccgtccctggaggtgctcaaggccaggctggatggggccctggrcagcctggtctagtattaaatgtaaaggttggcggccctgccaggggttggagcttgatgatccttgaggtcccttccaacacaagccattctatggattctatgatgatctaaaattctagatttaaatacagagtttgcagttaaaggagttaaattcacagctttaacacaggtcctctaattaccccagtgaagacatgtcagccttgtacaaaataagtctgcttcctattttttacagtgcatttggaaacactcacttcatttctgtaaggcgacactatggtgttatggttc

SEQ ID NO: 54662 - DNA, 600 bp, Chicken  19866894307517_3
gctttaacacaggtcctctaattaccccagtgaagacatgtcagccttgtacaaaataagtctgcttcctattttttacagtgcatttggaaacactcacttcatttctgtaaggcgacactatggtgttatggttccatggtttataagttgttccagttgcacagctcctgcctgaagcttagacagcacagagatacagggagcaaatgagcagtgtccctgttctctgcagatgcagaatgaatccacagaactaaaaccatgagatctgttcaatatctgagcctggaaataacrcatctcctgaatcccaaagcaaagcccactttctccagagtcattaactgtaggcagaacaaaaggaaacacaaacacctagaagataaaagtgccaggaggagcaagtgtacctgatagggagaaggagaatgcaaagagaatgtctcagaggtagcagcagtccaacagcttagttctgctctgacaactgcttaacaccaaacgcacaccttcgattttcacttcatattgttgttctgttttgtttccatgatcccaatctactaagttgttttgctgggctttttttgttgtttt

SEQ ID NO: 54663 - DNA, 600 bp, Chicken  19866894307524_1
tgtacactgaaggtacactgaacaatattaagtaagtatggaaaaaaagaggggggatgtttcagacatggaggtaaggagctgtttattaaccagcacaaaacagtgagtgcagtcagaaatcactaacattccttgacatgtgccgttaacacaccaagacattgccactctgggatcacaacaggaatctcagaagaataaactctcttcaagaaacagagtgagaagataattaataaaatttctggaagagcaaacagttggagggtagtattgctaaatgagaatccgacattrcaaggttgttagtttttttttttttttccatgtaaaatagtaatcctgtttacacactccttttattccctgctcagttaagagtacaaagaaatagtcttgattcagattataatggcaggaattaaggtaattgtaaatatcctgcaaagcataataaatgatttgagatggatattgtagaagataaattaaatatggaggtgaagagatggagatcccaagtattttactaatactaatgtgcaaagctatttcagaatcagtatataggttgaaaaataatggtttagcatgatg

SEQ ID NO: 54664 - DNA, 600 bp, Chicken  19866894307524_2
agattgtttcactaaggaaatgtataacatttaggccatattcaagctatatgttatgtcaaagaaaatttaggaaaattgataggattctattataaaaccttttaacgtagagcttacatttattgtaaatttagcctgctggtgatttaaaattccagagattgacaggcaaaatatctcatacctgtgtatgtgtaaaataaactgttctcagatcagctggaaattggatgtatatttgcaagagggcaccactttaaaataatatatgcaaattgtatgaacttaatctttagrtgagctttacagctgtctcaatcgtatcgyaatgcaatgtcaagtaggaaaaaagatgaattatatcccacttctttctttacttttatgacctcagattttggtatacatttcatattcagtaaactttcaggtagaaaattgcttgcgatgaggacagtgttatgctcaggagtgcttagagtattttgtattggcagttcaccacaggagttctcagacatattttagcaaagccaccaccatgatttctttatattacaaactattaaaagactaggctgctaaagataatacaat

SEQ ID NO: 54665 - DNA, 600 bp, Chicken  19866894307524_3
ttaggccatattcaagctatatgttatgtcaaagaaaatttaggaaaattgataggattctattataaaaccttttaacgtagagcttacatttattgtaaatttagcctgctggtgatttaaaattccagagattgacaggcaaaatatctcatacctgtgtatgtgtaaaataaactgttctcagatcagctggaaattggatgtatatttgcaagagggcaccactttaaaataatatatgcaaattgtatgaacttaatctttagrtgagctttacagctgtctcaatcgtatcgyaatgcaatgtcaagtaggaaaaaagatgaattatatcccacttctttctttacttttatgacctcagattttggtatacatttcatattcagtaaactttcaggtagaaaattgcttgcgatgaggacagtgttatgctcaggagtgcttagagtattttgtattggcagttcaccacaggagttctcagacatattttagcaaagccaccaccatgatttctttatattacaaactattaaaagactaggctgctaaagataatacaattcaagcacctgatttcagcagtagacacaa

SEQ ID NO: 54666 - DNA, 600 bp, Chicken  19866894307526_1
gtctggtgactgccatggagcgggttaacatctggcttggtcgagagctggccatggctggacaccaatctctgcctcatgatgcttttggaaatcactgggtattctttgctgaaggaggcgagaaaaattattactggttagacagcatcaacacgaacaggaggatgaaatatgagtttggctgcgccagcacatccccatccaacggctccacgcctttgccaagcacgatgagctaaccctcaccatgcttcgggtgtgggcaagcattgcaacagcacatggaatgcgtcactyggttacaggaagagcttttcggaggtagggagggcatgaaatgccctgatgccctcaaatacaagaaaattggatgccccgtggcattcaacaattttcttcaaagaggtgcagcacattgacaataagacaagggcaaaggggctgagtagtgcatgccgggcaccacatggccacgcgcagcagccaaattcatcctgctgacccagagccctcccatctgtcctccaaccatacctttggagccgtgccacgcgcaggtcgctgtcgtcacttcccctgaatccctttgcaaagggg

SEQ ID NO: 54667 - DNA, 600 bp, Chicken  19866894307529_1
tgaaaccatcattcacaacaagttgagaaatcccaggctattttaagttttgagacaaacacactgccagtcttaaaggacagcctcctacctgaaccaaatacaagcttactctgagaagttaatacagaatcactgattagtaaccatcccgctttcagagatgcgtaaatttggacagtgatgaattaaaacttttggatggattgcagatagtgccagttctgaacataaaaaacagtcagggtctgttcagataacaactctagcctttagatggtgctaagaacagtcctatgmcacttcccccaaatcctccaaccctatctcagaagctctttatgataatccagttgttttcagtactgcagtaccttcaagtgcaataaaacaaactgtccattcccttgttgtcagatgcacacttacttgggagaaaataccaggtgggaaagaaacgttaatttttgccttcagttcctggaagagaccatcactggcaaccagcactccctgcgacagaagtaatgagtcatgaggaagacaaagggtgcttagatactccacacatcaaactacacccgacgtttcatctactac

SEQ ID NO: 54668 - DNA, 600 bp, Chicken  19866894307534_1
agctgcattttgtgtgtctcatgtagtcaggaaacctgtaaaagattttaaatccaatgaattataggagaggattaaaaactcagttgttattggtctgtttccacaggaaaggacttgagaaccgtagataggataataggatgctttctcactcttgaaagcaaagagtgatctataaaatataatatgctgttatgagccagttgatgctccggttcaagttggtagcacagccaatgaaattacagactctgacattgtcagcacttagcttacactgagacatccaactcactkattagaccactccacactacattttgttaattatctttcatttctctctgtgttgcaagcggacagatgaggaattaaaggaatgaggagagtgcacagttttgtgacctattattgttagttgcattacccttcctgaaatgttatttccttcttttatatacgaaaaccattcactaaaaagaattacaaactgaagcattaaagggttggagctgatccattcaaactccagctttcattttttaaggtcttttataaaacctgaaatagctgataataatcttatgggccatctca

SEQ ID NO: 54669 - DNA, 600 bp, Chicken  19866894307534_2
ggaaatcttaagtgagaaagggtaaggatttctgctgtagttattggaaacggcaaagcacatctttttttgcaggatggggatgtcagagaaaagctctgtgacctgggaactaaatcaaatgtcactgggcttccacatgcagcgaggcgagccagtgaaaactgggtctctgctgaaaatgtctcttcatgtaattgaatacattttctccaacctcttttcgtggcaaatcagcactggcatagaaaccagcaagcacattaataaatcaaaaagcttaccagattgtgtctgtaratataaatttaccttgtctgataggattagatgagtgaagagtaaatattctaaaacatgaagtactgaattarattattttttaaatggctctctttatatgctcattctaaaaatgactcctcctgtgctctccttgckctagaaraggtgaggggtcaagtctgtggtgtaaactgcattgctgtgttcattttgtgggcgttaggtgacatgaatagcagcatggatccaagttcatatatccataatacaacgaataatatcaaatgcaaagcttcagaatgctttgcagtaaaa

SEQ ID NO: 54670 - DNA, 600 bp, Chicken  19866894307534_3
ggatggggatgtcagagaaaagctctgtgacctgggaactaaatcaaatgtcactgggcttccacatgcagcgaggcgagccagtgaaaactgggtctctgctgaaaatgtctcttcatgtaattgaatacattttctccaacctcttttcgtggcaaatcagcactggcatagaaaccagcaagcacattaataaatcaaaaagcttaccagattgtgtctgtaratataaatttaccttgtctgataggattagatgagtgaagagtaaatattctaaaacatgaagtactgaattarattattttttaaatggctctctttatatgctcattctaaaaatgactcctcctgtgctctccttgckctagaaraggtgaggggtcaagtctgtggtgtaaactgcattgctgtgttcattttgtgggcgttaggtgacatgaatagcagcatggatccaagttcatatatccataatacaacgaataatatcaaatgcaaagcttcagaatgctttgcagtaaaaagtatgttgtataagttgaattcctgtagctatgatatcaagaaatatcagcagaccagaaaaatctccccaga

SEQ ID NO: 54671 - DNA, 600 bp, Chicken  19866894307534_4
gcagcgaggcgagccagtgaaaactgggtctctgctgaaaatgtctcttcatgtaattgaatacattttctccaacctcttttcgtggcaaatcagcactggcatagaaaccagcaagcacattaataaatcaaaaagcttaccagattgtgtctgtaratataaatttaccttgtctgataggattagatgagtgaagagtaaatattctaaaacatgaagtactgaattarattattttttaaatggctctctttatatgctcattctaaaaatgactcctcctgtgctctccttgckctagaaraggtgaggggtcaagtctgtggtgtaaactgcattgctgtgttcattttgtgggcgttaggtgacatgaatagcagcatggatccaagttcatatatccataatacaacgaataatatcaaatgcaaagcttcagaatgctttgcagtaaaaagtatgttgtataagttgaattcctgtagctatgatatcaagaaatatcagcagaccagaaaaatctccccagaagtgtttaaaaaaatgcactgtattctggaagccagtttctaattctaggtagatgctgagctggag

SEQ ID NO: 54672 - DNA, 600 bp, Chicken  19866894307534_5
ggcgagccagtgaaaactgggtctctgctgaaaatgtctcttcatgtaattgaatacattttctccaacctcttttcgtggcaaatcagcactggcatagaaaccagcaagcacattaataaatcaaaaagcttaccagattgtgtctgtaratataaatttaccttgtctgataggattagatgagtgaagagtaaatattctaaaacatgaagtactgaattarattattttttaaatggctctctttatatgctcattctaaaaatgactcctcctgtgctctccttgckctagaaraggtgaggggtcaagtctgtggtgtaaactgcattgctgtgttcattttgtgggcgttaggtgacatgaatagcagcatggatccaagttcatatatccataatacaacgaataatatcaaatgcaaagcttcagaatgctttgcagtaaaaagtatgttgtataagttgaattcctgtagctatgatatcaagaaatatcagcagaccagaaaaatctccccagaagtgtttaaaaaaatgcactgtattctggaagccagtttctaattctaggtagatgctgagctggagctgtcag

SEQ ID NO: 54673 - DNA, 552 bp, Chicken  19866894307538_1
aatatgttttctgaatatgttttctgaactctgttgaagtttatacaatagagttgaaggaatctactaagctacaatgagctctccacccatccacagttcttccagtaaccatccttcttcctcatctagtctcttcctttgaatacctcagctttttctccctgaatgctaatcccaagacaagacaatttctttgttcttataaggtagagaaggtgatagagaagctgggtagaaattacaaaagtaaataatgaaatcagaactgggaaagatgtgaaggaggtggtcattaarggtaagggaacggaaaggtatttttattatgataaggctatgacagactgaactttgggtgtcagtgaagttgatagagaaggtattacttatatgaatagcttgaaaatctgaatacatccttgtaatctggatagtgtttctatatataggaaaatttaaataaaaaattattctggcacacaatccaacagttctaaaagaaattcctgtaccttttctaaagaatcatgcccttcattaaagaatcat

SEQ ID NO: 54674 - DNA, 599 bp, Chicken  19866894307543_1
  misc_feature (1)..(34): n is any nucleotide
nnnnnnnnnnnnnnnnnnnnnnnnnnnnnnnnnnccctggattccttacctggggtcactgtaactgctgagagcacatcaattacatgtggctgctggagctggctggtcatcctagctgaaaaagaaaagagcacaaaggaggacttgaaagcccagaaagcaaagtgaaaaggccaaccgttctacagaaagacttcagattaataagattcaattcatgtccctgacctgcagcctcaccttcactgggcttgcactctgcactcgttgctttctctacttcctcatccacccaaraatcactacgttcatggtcaaaattcacatgatggtcatttcycattgcctctgttatctcctcctgtgctgacctatcatcttcagaaactagcacaaaaccacaaaagcagcaaggaagagagaccattagaaagcaggaaggacgtagtcctccagctcttgcagctggactgacggtctgtggtgttactgcagagcaattggcaccagtgaggatttccttttttgaagcacattaatatcaaatggaaacaaccattagaaaaaagggaggggttgagagtgggggggagaaa

SEQ ID NO: 54675 - DNA, 600 bp, Chicken  19866894307543_2
ccttacctggggtcactgtaactgctgagagcacatcaattacatgtggctgctggagctggctggtcatcctagctgaaaaagaaaagagcacaaaggaggacttgaaagcccagaaagcaaagtgaaaaggccaaccgttctacagaaagacttcagattaataagattcaattcatgtccctgacctgcagcctcaccttcactgggcttgcactctgcactcgttgctttctctacttcctcatccacccaaraatcactacgttcatggtcaaaattcacatgatggtcatttcycattgcctctgttatctcctcctgtgctgacctatcatcttcagaaactagcacaaaaccacaaaagcagcaaggaagagagaccattagaaagcaggaaggacgtagtcctccagctcttgcagctggactgacggtctgtggtgttactgcagagcaattggcaccagtgaggatttccttttttgaagcacattaatatcaaatggaaacaaccattagaaaaaagggaggggttgagagtgggggggagaaattcatgcaggagtacctactgagacatccatcagccatcttcca

SEQ ID NO: 54676 - DNA, 599 bp, Chicken  19866894307544_1
  misc_feature (1)..(100): n is any nucleotide
nnnnnnnnnnnnnnnnnnnnnnnnnnnnnnnnnnnnnnnnnnnnnnnnnnnnnnnnnnnnnnnnnnnnnnnnnnnnnnnnnnnnnnnnnnnnnnnnnnnnctcaatctgccctccttcaacttcaaaccatttccacttgtcctgctcttatctaccgtttcaaagagttgatttatcctgttcataggctccctttaggatattaaggtattgcatgtctgactgatataaagaccactttctattaaaaaaaaaatagagctttctgtagtatgaaaaataaagttagactgagcacrtgcagcacttcactaagaaagggaccaaattctgttttctcattgtatttttcaggtttcacttgttctcgaacctctatcagacacatacaaaaccagcagctctggcccaaccacagctacaagttcagatatgactcctgctccatcrcagcaaatgcagaccactcctcctggccaagagcctgttaacaaaagcagggtcacgactcccaggtatcttttcttcaccttgacaaaattctggctcattttgtatttcacaccatttcaagcaatggcactacagttgtgaattg

SEQ ID NO: 54677 - DNA, 600 bp, Chicken  19866894307544_2
tctaccgtttcaaagagttgatttatcctgttcataggctccctttaggatattaaggtattgcatgtctgactgatataaagaccactttctattaaaaaaaaaatagagctttctgtagtatgaaaaataaagttagactgagcacrtgcagcacttcactaagaaagggaccaaattctgttttctcattgtatttttcaggtttcacttgttctcgaacctctatcagacacatacaaaaccagcagctctggcccaaccacagctacaagttcagatatgactcctgctccatcrcagcaaatgcagaccactcctcctggccaagagcctgttaacaaaagcagggtcacgactcccaggtatcttttcttcaccttgacaaaattctggctcattttgtatttcacaccatttcaagcaatggcactacagttgtgaattgtggaatacttgcttatttttggctgtgcattttatcaactccagaacattcatcatttaagagcttaaagggtctgtttctcatctgcaacaaagttgcatcgtacattaacctatgctagttgacataagagataccacaagtctgttgtt

SEQ ID NO: 54678 - DNA, 600 bp, Chicken  19866894307552_1
acaatagaggtaaagtgaagcatttatggagaaactggccatctgtccaaacactgctcagctttttgtccaaaggctattttactgaatttggtgttgagtgtttgtctgtgcacctgtggttgcacataagaacactttttcttccttagataaatatttgcacaggagatacttgcacttcatactgcttattttcattttggtttagtgaaaatattactattaaaatagaatagggcagaaatacgatgcaacccatctacacatagcaggtcagtctgctccttgaggtgaacrtgtttcactgacaggtcactgtagagcttccctaacatcgaagctaggagctgcaggctactggcagcattactgtgggatgggcctgacctcaggggacctagggaacagcaaaggttttacttcttcctttggggaggtcaggcacgcagcagccctttctctatgccctcattcagtacatttgttacacttgaaccactcaatgagtttgaatgagtttgaattcttggaggttgaacatatttctgtccagataccttgccatgtcacatacctctgtgaacacttacctgctgg

SEQ ID NO: 54679 - DNA, 600 bp, Chicken  19866894307553_1
taatgtgattgcacaatatctctgtataactttcatatacattttatataatagtatatctttttcatacatttatgaacacacaaatgtacacaaagatatccacatatgtatccaggtgtttggaataataataggcagctttacttagggattatttttgttggcatctcctgccatgattttgctgcacttctgctgcagactagtaagtaccatcatggaattatctgagaaatacaaactcttagttcccaactgtgcagctgtgtgttgtgttctttcacagaaaaatttccrttttcctcagagtctggtatttctgaaagaacttcctggcactccgtccccaggggtgtgcttctgaattgcattttaaaatgtaatattttaatcagcttggactattgttctgaaaactgttcttaaaagtctctggtatgtatcgcatgcattgtcaaagacaaaaatatttagaacagtaattccagctaaaatccatcgcctacatattagcttaaaatccaggtagagatattcctaaaaggaactgagagaacagagagtcttgaatacattagataaagaagttcatgtata

SEQ ID NO: 54680 - DNA, 599 bp, Chicken  19866894307563_1
  misc_feature (1)..(205): n is any nucleotide
nnnnnnnnnnnnnnnnnnnnnnnnnnnnnnnnnnnnnnnnnnnnnnnnnnnnnnnnnnnnnnnnnnnnnnnnnnnnnnnnnnnnnnnnnnnnnnnnnnnnnnnnnnnnnnnnnnnnnnnnnnnnnnnnnnnnnnnnnnnnnnnnnnnnnnnnnnnnnnnnnnnnnnnnnnnnnnnnnnnnnnnnnnnnnnnnnnnnnnnnnnnnntgcctcagggtggagagcagcatccagacctggagagccgcagctggcagcagttgggcagtgcagtgcttgctccacaaatggggattttatgytttttttttttttttaatctttcagttcactcttgcagatctgtcctcctaaagatttttgacaacatcgatttatctgcaaaattttagaagcctgattcagtgtaagggaatatcccgtagctctcaactgatacatggtgaataaaagccaaaagtacttggggtctgcatggggaggtagggagcraggacggagtgacataagttggagttctttgcggtccatgaggaaatggaactcctccgtacacatgcagatgtacaggtcatccatgacatcaatctgaaacttcatg

SEQ ID NO: 54681 - DNA, 599 bp, Chicken  19866894307563_2
  misc_feature (1)..(15): n is any nucleotide
nnnnnnnnnnnnnnntgcctcagggtggagagcagcatccagacctggagagccgcagctggcagcagttgggcagtgcagtgcttgctccacaaatggggattttatgytttttttttttttttaatctttcagttcactcttgcagatctgtcctcctaaagatttttgacaacatcgatttatctgcaaaattttagaagcctgattcagtgtaagggaatatcccgtagctctcaactgatacatggtgaataaaagccaaaagtacttggggtctgcatggggaggtagggagcraggacggagtgacataagttggagttctttgcggtccatgaggaaatggaactcctccgtacacatgcagatgtacaggtcatccatgacatcaatctgaaacttcatggctgcagccctgagtgtccttttctttattcctacataaaagaacggcctcattgtatggctaattgagaggcatcatcacattgggtcttatcccattataccaccttaacagctgcaagcatttcacttgagagagagagaagagattccagctgaattacagccttcccatgacttcccatgccacc

SEQ ID NO: 54682 - DNA, 600 bp, Chicken  19866894307564_1
cttttggacaagtccaaaaatcaccacaaacccttaagagcacaaagttcaattgcttcatctatattgttggtcctggcatttcatttatatagcctaagacaatttattcataaggattatattctgaaatatgactctaccttgaaatctgtgtttctgtagatatataattctgaaatacttttgggggtgaacagcaggtggtagtaggaataaaaacagcagaaatgttcagaaacgagccccttgctactaagcacattgtgctaccctgtctagctgaagttatgcaaaacrttaaaaaagaagaatgatttaatatacttattgaaagaaagaaagaaatgactcattcagagcaagctaacctaatatacaataatatgggttagattaaatgaatcatgcataaagatcttgtggtgcagccatatcttagcagggtcaccagtcactatagaatacttcaaagatacagaagttacagccaagaacccaattaccattcacgtgtacctcacrctgcttgttctgaccatattcagggtacctgtgatttttccctatttaaatactgtatgcattgtttacaacagc

SEQ ID NO: 54683 - DNA, 600 bp, Chicken  19866894307564_2
cagaaatgttcagaaacgagccccttgctactaagcacattgtgctaccctgtctagctgaagttatgcaaaacrttaaaaaagaagaatgatttaatatacttattgaaagaaagaaagaaatgactcattcagagcaagctaacctaatatacaataatatgggttagattaaatgaatcatgcataaagatcttgtggtgcagccatatcttagcagggtcaccagtcactatagaatacttcaaagatacagaagttacagccaagaacccaattaccattcacgtgtacctcacrctgcttgttctgaccatattcagggtacctgtgatttttccctatttaaatactgtatgcattgtttacaacagcggtgtacaatgtgtggtatttcatgaactgattttttcttccttctgaaatatttttatcgtttttaagataggaaactgcggctaatcaggccaaacatctaagaggcagaacatgttttgctgtagtaaagtcttctggagcttagagggactgatccagctgctactgaaatcatggcaaagtaacaaacacaccgatgaaaaactgtaggggtagccattt

SEQ ID NO: 54684 - DNA, 600 bp, Chicken  19866894307567_1
acacagacaattaggtcaaagatgaaaatatttattcacaccaatgaaccagtcttggcttcctgatggactcatcaaaggggcataattactttccctgagacctttcaatctcccccattttacagctggaggaggaaattgcttttccatcctgggaaaatttagaagattttgattgcttcctcctatttagtaggatcttggggatgtatcatattaccagcttccatagcctaccacaaggactcacgttaagagcacagaatgcctggcaggtatgtactccatccttcagcwgggatctgtcacaacagggctggactgaatgcagatgccgccatctccaaaacagtgaagaaaaagctgttgaagtactgtggactgctttttattattattattttttcctatctctgagatttaagaaactcttgagatgggaaaagactttcatcttctccatgacagagggtagcaagaaagctgagtgagcggcagtttcccatgcaacccccaacttgggaaagcaggtggagtggagaggagaagccacctttcaattgtgttttaatgaagttgtttgttcttctgtgtcct

SEQ ID NO: 54685 - DNA, 600 bp, Chicken  19866894307568_1
ctgtgctagacagatcattcttagaaagggaaactgccctttggcgtgctcacctatttgtatttgataggcatcccctgatggtggtgttgggaggttggtggaatgattctttaactgcaggagcatctctgactccccagtgttctccagatgctttcacccaaagctgtcagcagttggctgtgtgtaacagctttcttcgaagtgcaactacaagagctggcagtgtcctgtgtattgagatggctaagacaccacacttctggaatgtgatagccttttctttctgtagcctcyctctgctttgggatggatattttctgttttcttttttctttttttaccagcctttgttttaaaagagctattttttaaaagaaattcaattagaaaaatcaaatagattgtttttattattactaaaaagcrtgtttaatggaaagcatgggaaacacaatgatcgaaatatgtttgaaagaaacagatgctggagtgagaggaggatgacttggaaggggaagggaattgggagaagtttgaattgcacatcttagcacagcatctgttttgttgaggataatgtccagtagaaacaag

SEQ ID NO: 54686 - DNA, 600 bp, Chicken  19866894307568_2
tgactccccagtgttctccagatgctttcacccaaagctgtcagcagttggctgtgtgtaacagctttcttcgaagtgcaactacaagagctggcagtgtcctgtgtattgagatggctaagacaccacacttctggaatgtgatagccttttctttctgtagcctcyctctgctttgggatggatattttctgttttcttttttctttttttaccagcctttgttttaaaagagctattttttaaaagaaattcaattagaaaaatcaaatagattgtttttattattactaaaaagcrtgtttaatggaaagcatgggaaacacaatgatcgaaatatgtttgaaagaaacagatgctggagtgagaggaggatgacttggaaggggaagggaattgggagaagtttgaattgcacatcttagcacagcatctgttttgttgaggataatgtccagtagaaacaagaagtggtggaagcaccatcttttgagactgctgaaaccaaaggtaaaaaactgaaaatcccaaatattattcagctttgtccacctcctactgctctattcacagcctcccaagaagcacagcccttcacca

SEQ ID NO: 54687 - DNA, 600 bp, Chicken  19866894307570_1
ctttggtgacaatatggattgcctcttaagcttgcctttctgtgtaattgcccactgtcaatactaagtttctcatgttgttctcttttcttcaccttgtttcagagtccatgttgtacttagatgggaagcgacactttgctgcaatcatgaaagaaatctgagagggcaccgagtgctgtgtcagttgtgtagcagcatgctggcttggaaggagcagtcagtgagccatctctggggacatgtgctctcagtactaaaaacaagcaaatcaactccccgctccttttcagtgctatwtacgtatttgcacataaatgggttttgtttaattctctgctcttaggaattgttgcaatctacttcggcacatcagttctgttaggaaacaagactgaaaaaactttagatagatggcttctcttgtctgctttgaamgatctyrctaccccccttgctgtcttgtccccatctgccttctttcccttggtagctcccctctgtatttctctgggaggggatagaagttctttcagaaaaatatctrccatcagtagatgcacacaactcaagccatttgacttgtatttgcatgtaaat

SEQ ID NO: 54688 - DNA, 600 bp, Chicken  19866894307570_2
ttgctgcaatcatgaaagaaatctgagagggcaccgagtgctgtgtcagttgtgtagcagcatgctggcttggaaggagcagtcagtgagccatctctggggacatgtgctctcagtactaaaaacaagcaaatcaactccccgctccttttcagtgctatwtacgtatttgcacataaatgggttttgtttaattctctgctcttaggaattgttgcaatctacttcggcacatcagttctgttaggaaacaagactgaaaaaactttagatagatggcttctcttgtctgctttgaamgatctyrctaccccccttgctgtcttgtccccatctgccttctttcccttggtagctcccctctgtatttctctgggaggggatagaagttctttcagaaaaatatctrccatcagtagatgcacacaactcaagccatttgacttgtatttgcatgtaaattaggtttaaggtattgtttccgaggaaaggtgcaggtgtctgagcagcagcagaagctcagaagttctgagtgtgtgcacggtgtccaagcaggtgttttccatcagttaggattttacgagactgttgcagcttctg

SEQ ID NO: 54689 - DNA, 600 bp, Chicken  19866894307570_3
caatcatgaaagaaatctgagagggcaccgagtgctgtgtcagttgtgtagcagcatgctggcttggaaggagcagtcagtgagccatctctggggacatgtgctctcagtactaaaaacaagcaaatcaactccccgctccttttcagtgctatwtacgtatttgcacataaatgggttttgtttaattctctgctcttaggaattgttgcaatctacttcggcacatcagttctgttaggaaacaagactgaaaaaactttagatagatggcttctcttgtctgctttgaamgatctyrctaccccccttgctgtcttgtccccatctgccttctttcccttggtagctcccctctgtatttctctgggaggggatagaagttctttcagaaaaatatctrccatcagtagatgcacacaactcaagccatttgacttgtatttgcatgtaaattaggtttaaggtattgtttccgaggaaaggtgcaggtgtctgagcagcagcagaagctcagaagttctgagtgtgtgcacggtgtccaagcaggtgttttccatcagttaggattttacgagactgttgcagcttctgttttgg

SEQ ID NO: 54690 - DNA, 600 bp, Chicken  19866894307570_4
aatcatgaaagaaatctgagagggcaccgagtgctgtgtcagttgtgtagcagcatgctggcttggaaggagcagtcagtgagccatctctggggacatgtgctctcagtactaaaaacaagcaaatcaactccccgctccttttcagtgctatwtacgtatttgcacataaatgggttttgtttaattctctgctcttaggaattgttgcaatctacttcggcacatcagttctgttaggaaacaagactgaaaaaactttagatagatggcttctcttgtctgctttgaamgatctyrctaccccccttgctgtcttgtccccatctgccttctttcccttggtagctcccctctgtatttctctgggaggggatagaagttctttcagaaaaatatctrccatcagtagatgcacacaactcaagccatttgacttgtatttgcatgtaaattaggtttaaggtattgtttccgaggaaaggtgcaggtgtctgagcagcagcagaagctcagaagttctgagtgtgtgcacggtgtccaagcaggtgttttccatcagttaggattttacgagactgttgcagcttctgttttgga

SEQ ID NO: 54691 - DNA, 600 bp, Chicken  19866894307570_5
ctctcagtactaaaaacaagcaaatcaactccccgctccttttcagtgctatwtacgtatttgcacataaatgggttttgtttaattctctgctcttaggaattgttgcaatctacttcggcacatcagttctgttaggaaacaagactgaaaaaactttagatagatggcttctcttgtctgctttgaamgatctyrctaccccccttgctgtcttgtccccatctgccttctttcccttggtagctcccctctgtatttctctgggaggggatagaagttctttcagaaaaatatctrccatcagtagatgcacacaactcaagccatttgacttgtatttgcatgtaaattaggtttaaggtattgtttccgaggaaaggtgcaggtgtctgagcagcagcagaagctcagaagttctgagtgtgtgcacggtgtccaagcaggtgttttccatcagttaggattttacgagactgttgcagcttctgttttggatggtttcctgtcctcgtgggacgagttcttctgtgatgagctggctggctggtctgttctgctgttgtagtttttcacagctggccctgtcagcctcttcga

SEQ ID NO: 54692 - DNA, 600 bp, Chicken  19866894307572_1
acttgcaggatttggaccatgcactgtcatatggacactgcaaaccttcctgctttcttagtttcaaactggttatgagacactctatttaggattgctatgctgaccaaaaaaacaaaacaaaacaaaaaccaacagtaactgtaacatagttaattgattatgccaaacaaaagcgcttcatagacttaagacacacagatagaaaactaagtgacaatttgaagagaagaaaataaagattacagtttgattcaggggaatctaccactgtaagtctcccaggccatggctgatttyctctatcatcttatatttcacccaaacagaagtttagagtgcagttctggccactgacaaagcagttattttgcttttggagatggcacactgttttcacattgtgtcttagtaacagaaattctgctaagttttctaaaaaatgaatacttaaaaattcataagcacgcagtccgtattaacccacagtttatacaaataataaaatacaaaatgttttttttttcttctttttttatttactccagagcagactggaagcaccagcactactttcttctataaaatatttacaagttt

SEQ ID NO: 54693 - DNA, 599 bp, Chicken  19866894307582_1
  misc_feature (1)..(22): n is any nucleotide
nnnnnnnnnnnnnnnnnnnnnnaatcaatcactggcataactgcaatgttgcatgtcatagttacacactgtaaactacttactagtcggttaaattgattgattaattagccctggacacctctggctccctgcatctaccattaatcaagtgtctccagtcctagcagtctccatcttgctgtggctctggctcatttgtttctagctcatgcttgttccaacagtctgggcttttgaaaaggccataaatcagtcactgtcataatgtgaatactaatatgagctgccatcattttstaaccgttgtactacacaggcccatcagtaactattctgagcaccgtttaaacatttgcataagcggttgakctggaaagccatgtttcacccagagagcctcacagctgggttcagcctggtgcgcaccgacgccctgcctgctggggaccaacacaaccggcgctgtggctgggagcacccctccctgctgctgtctgcacacaggcagccccggggtttggcccaagggcagcaggcctggtttctgtgtctgagcccccacaacggcccaaggcgcccggctccagaagccatcc

SEQ ID NO: 54694 - DNA, 600 bp, Chicken  19866894307582_2
aaactacttactagtcggttaaattgattgattaattagccctggacacctctggctccctgcatctaccattaatcaagtgtctccagtcctagcagtctccatcttgctgtggctctggctcatttgtttctagctcatgcttgttccaacagtctgggcttttgaaaaggccataaatcagtcactgtcataatgtgaatactaatatgagctgccatcattttstaaccgttgtactacacaggcccatcagtaactattctgagcaccgtttaaacatttgcataagcggttgakctggaaagccatgtttcacccagagagcctcacagctgggttcagcctggtgcgcaccgacgccctgcctgctggggaccaacacaaccggcgctgtggctgggagcacccctccctgctgctgtctgcacacaggcagccccggggtttggcccaagggcagcaggcctggtttctgtgtctgagcccccacaacggcccaaggcgcccggctccagaagccatccccgtgcgcaccgcttcgctctccttctgccccacgtccggcccacgcgcgacgccgaggcggggagcgcagct

SEQ ID NO: 54695 - DNA, 600 bp, Chicken  19866894307584_1
aataaattgaaacgcacatttcaaaagctttaatgtgtttgaagtaggctgcttttatattgtgcaatgttcctgttaattaccccttccggcatcagactaccatttgtaaccagactgtatctattaccagcacaataaaggtttaagaccagaaaaataaccattcatttagcttaacaggactaaaacaacactttggcaagctgaatatacaattagaataactacaacaacaacaacaacagaatacagtgtgcatttgtttgcaggtcacctcttgcagacaacaatattacygatctctggcctatacgttccacaggctttgacagcaactwytctgcaatactactgtagtttttcagcttatggaaataggctctacaacattaagcagtacgccggaggaaacacacttarctcagttttaatattgttatttatagtgacgtttagaaatggattgcatgcaggacacacagcttgtaggcttgtgccctttttctaagcactgccatttggtaaagtaagcagagggaagaaaacgccttgaaatctgcagaatctcttatatcagaagtacaacatttatgacac

SEQ ID NO: 54696 - DNA, 600 bp, Chicken  19866894307584_2
aagtaggctgcttttatattgtgcaatgttcctgttaattaccccttccggcatcagactaccatttgtaaccagactgtatctattaccagcacaataaaggtttaagaccagaaaaataaccattcatttagcttaacaggactaaaacaacactttggcaagctgaatatacaattagaataactacaacaacaacaacaacagaatacagtgtgcatttgtttgcaggtcacctcttgcagacaacaatattacygatctctggcctatacgttccacaggctttgacagcaactwytctgcaatactactgtagtttttcagcttatggaaataggctctacaacattaagcagtacgccggaggaaacacacttarctcagttttaatattgttatttatagtgacgtttagaaatggattgcatgcaggacacacagcttgtaggcttgtgccctttttctaagcactgccatttggtaaagtaagcagagggaagaaaacgccttgaaatctgcagaatctcttatatcagaagtacaacatttatgacactgctctccaagaagtacaccttcagatagttaagacttctg

SEQ ID NO: 54697 - DNA, 600 bp, Chicken  19866894307584_3
agtaggctgcttttatattgtgcaatgttcctgttaattaccccttccggcatcagactaccatttgtaaccagactgtatctattaccagcacaataaaggtttaagaccagaaaaataaccattcatttagcttaacaggactaaaacaacactttggcaagctgaatatacaattagaataactacaacaacaacaacaacagaatacagtgtgcatttgtttgcaggtcacctcttgcagacaacaatattacygatctctggcctatacgttccacaggctttgacagcaactwytctgcaatactactgtagtttttcagcttatggaaataggctctacaacattaagcagtacgccggaggaaacacacttarctcagttttaatattgttatttatagtgacgtttagaaatggattgcatgcaggacacacagcttgtaggcttgtgccctttttctaagcactgccatttggtaaagtaagcagagggaagaaaacgccttgaaatctgcagaatctcttatatcagaagtacaacatttatgacactgctctccaagaagtacaccttcagatagttaagacttctgt

SEQ ID NO: 54698 - DNA, 600 bp, Chicken  19866894307584_4
ctattaccagcacaataaaggtttaagaccagaaaaataaccattcatttagcttaacaggactaaaacaacactttggcaagctgaatatacaattagaataactacaacaacaacaacaacagaatacagtgtgcatttgtttgcaggtcacctcttgcagacaacaatattacygatctctggcctatacgttccacaggctttgacagcaactwytctgcaatactactgtagtttttcagcttatggaaataggctctacaacattaagcagtacgccggaggaaacacacttarctcagttttaatattgttatttatagtgacgtttagaaatggattgcatgcaggacacacagcttgtaggcttgtgccctttttctaagcactgccatttggtaaagtaagcagagggaagaaaacgccttgaaatctgcagaatctcttatatcagaagtacaacatttatgacactgctctccaagaagtacaccttcagatagttaagacttctgttgacatttaaaaataattagaagtatttcaaattagaagaaaaaagtatatttaaaggttccctataagattccaagcatt

SEQ ID NO: 54699 - DNA, 600 bp, Chicken  19866894307588_1
tcagcctgttgccttataattttgtagatatacacataaatttatctttatacatctgccttcttcacattaagaatgtgtaagtcttttcttgaaaaataatgctttccagaaagtagatcttcagtgatgctattttctattccagacaaagaatttagtcaataaggcattcatggtacttatatgggacccatgcttctttctctattctcttcttctactgttctaatgcttcttcaacagttctcacacagtattcagatattagttattgactcggatttaaaaaaaaaaaarcaaagatgagcctaatgagaacagctagtcttcttcctcatgttatgctttcacagctcttctgttttttttgtttttttttggttttttttttttttcccttcagttgtagtcataacacctttttttttttttttttggtgttgtagaagaaggaaatgaggaagtgccttagtgaacatcagacaattctcatctgttaaaggatttaataagagggaacaagcaacacagacaaaggaccacacaacaaagatttgatcgtctctgtgcaaatcagaggaagaactgcagcttgta

SEQ ID NO: 54700 - DNA, 600 bp, Chicken  19866894307588_2
agtaagactatagatatgacatatataacgtatgtttggtctaaaagatcatttttcttagaagaaattcattaaaaggaaaatattcatatattctgaggtccacttttagcagttccattgttatttttgatactgaatgcaagtgtatagctgtgtgataccattagcaaatctcttaatccgtattgatagagaagttgaatcttggcagcaccaggaatatcgccagctttctgaagctctgaaagcatgagcgctacccttcaagttatattttgcagtgacagtaacaccatytgctaaaaagtagttcacctgtatgaaatcctaatgtttttaaagtaaaattaaatcaaagcctgtaaaatagataaaatatctggataattaactaaaatggtgtagtaaagttataaactcagtttcagagtagccagagtgaatctgattaaatgatagaggacgctcacaaatggagctttaatccttataacatgaatcacacttcaacacttctattcatttatttacttccattatcaataatctggcttagtgttttatcactctactgcattgctttcaagttgattactt

SEQ ID NO: 54701 - DNA, 600 bp, Chicken  19866894307589_1
tgcttgcaagggcagggttactccgcagcttatcactttttgaggtacagctcttctgctcttttttccccccccctcatcaccagcccttttggtcctctctgtgaactgttcaagaacattcctgcctgtgtttctattcttctctacagttgtaatacatagtaacatcagcaccttttaagtaaatggatatacttctctcccatcaagttcagatggtttgcatcaattctcccacagcaaaccacctttcccctacacatcagttctaattgctagcgtaatttcaggccaacrcaggtgttgtggagcatgaaatagctgcagataaggtgttttcctctggtatgcattagaattagattaactgcaattccctctccagatagggagcacaccgcctgtttgcagagatgtttttctatcccagccaggtcagtcttgtcacattacagcacaatccctcctcccaggtttgcaaggactgcgtttgacactggaatttttgactccacaggtcccaccttactggctgttagatggaaacaggagtgagttgattttacctcgtaacagcatgatgaggatttcaatcag

SEQ ID NO: 54702 - DNA, 599 bp, Chicken  19866894307595_1
  misc_feature (1)..(101): n is any nucleotide
nnnnnnnnnnnnnnnnnnnnnnnnnnnnnnnnnnnnnnnnnnnnnnnnnnnnnnnnnnnnnnnnnnnnnnnnnnnnnnnnnnnnnnnnnnnnnnnnnnnnnaattgctgggaagaggggaagtggtggtatctaggaaaggctgcagatggaactgttatgtgcaggctttcctttcccagacatgcaatatctctaattgtttattgatatcacaagatcctagataatgcaaacacttcagcagccaatcaagaatagtagtaataaccaggatttcccttctctaaaaccttctctraaaaaaaaaaaagcatgggggcattctttgggaatagcagttatatattgatgtttggtggtttgcagagctatctggaggaacactgagttcctccttttggagtttcaagaggaattttgagccakctaagtatgattactgtggtgcaacttgaatttatttaagtcaggcttacagatacagaatgagttaagtctcaaggattctaagtagctgcagaaatgttgctgagataatttattgttgcatcctaattaaaactataattaacaaataaacattctgctgataacatg

SEQ ID NO: 54703 - DNA, 600 bp, Chicken  19866894307595_2
tatctaggaaaggctgcagatggaactgttatgtgcaggctttcctttcccagacatgcaatatctctaattgtttattgatatcacaagatcctagataatgcaaacacttcagcagccaatcaagaatagtagtaataaccaggatttcccttctctaaaaccttctctaaaaaaaaaaaaagcatgggggcattctttgggaatagcagttatatattgatgtttggtggtttgcagagctatctggaggaacactgagttcctccttttggagtttcaagaggaattttgagccakctaagtatgattactgtggtgcaacttgaatttatttaagtcaggcttacagatacagaatgagttaagtctcaaggattctaagtagctgcagaaatgttgctgagataatttattgttgcatcctaattaaaactataattaacaaataaacattctgctgataacatgctaacaatttttctgaaaggtaatataatcagagacttgttttttattcttacctttggtggtagtgtttccattggcatcgagaaaactactcaggtttgttgggtttttttaggcattattatagtt

SEQ ID NO: 54704 - DNA, 600 bp, Chicken  19866894307596_1
gagctttggatttgagatgagtctgtcacatggataaagcagccttttagaaagacagagactttactggaaaaacaagcatgagcccgcttgggctaagaatgggattttaaagtccactgctacacactgatatgcatttcatagagactgcacttcagatgcttgaaccccatatttttctgatcagttgttgctgtggtattttaatgttccttgtcttccagggaaagttctaacttaataaaagtatttgtaaatagatgtcaatatctgagatacagtataggcattataatraggtaaataatgggtaataatagggtaaatcttccatcaagtctaacaagcgaacattccccttttgcgtttcataattctctcccacatgtatttgtactgttctgtctctggatgaaactacacctaaataaaagttactcgaggcttggtgaacatgagggtattgttaggtcattatctgcacttaccaatggagggtaaacaattaaaaattcttcaagaatttttcatacaagaataaaaggtgttttatattaactattttcctgatctttcggagctctcctgccgagagag

SEQ ID NO: 54705 - DNA, 600 bp, Chicken  19866894307601_1
gcagcatgtagatcatgctctctcaaaagtcaagctgctgtggaattctttaaactggaagagttttgtagaaaaatgccagtttactgaactcaaaatgtcttagagtcaggaaacaaactgttttgtttctttttccagttgatttgtttgtttttgttggggggaaaaatgttttcctgctttgctgcttgggaacttgagggcacaaccttctgtgcatcagctctggaagcttgggaataatgaaaaccctgaaaacctggctataataaggttgtatagccttcctggttgggyttcctgggtcttcggttatttttagtgccacaaggcttgtgcactgttgggccaacccacttcttgcatagattcatgtctggcacacagctggcagagaaggttaggtccctggggcacgagagaaccacaggtcctggagcatggcagttcctgctggagccagcatccgctgcctggccagctctgcccctgctattgttctggggaaaacgcccattcctcagctgcggccacgaacccagggacaggtttttcccctttcagttcagaaatgctctatatggctgaaatgaaaac

SEQ ID NO: 54706 - DNA, 600 bp, Chicken  19866894307608_1
tttgggataagaatgcaggctaatttcagccacataaaagaacagaagagaaaatcaatacatctaaacagaaaaaagaaaacctgaagagaaaaaataattccccaacctctgcgtggatatgacaaactggagagcaggactggaatacaaagcctaaaagaattactagctggagttctgtcaagattgttcccgtaggttttcctgggtccttctctctacagctcttaaactggcattgacaaagggaggtacaaaagacttagagcaatattttgctatctacagtcttctttkcttctcaagctacacagggaaaagtgaacttgtatatcttaataggattaacattataagatttcaagtcatagtttctttctttaattcaaactagatgggtcagttcctaacaatactctagataggattatcaraagtcctcattgctggcctaattcctcacttattcaagtcactggaaagttctgtgctaaaaactggaagttaagcaaacctcttgtatcagagaccagtaagagttgtggttttaaaggcaagtcctttcttggactatctctacctcagtcgcttactttt

SEQ ID NO: 54707 - DNA, 556 bp, Chicken  19866894307608_2
caggactggaatacaaagcctaaaagaattactagctggagttctgtcaagattgttcccgtaggttttcctgggtccttctctctacagctcttaaactggcattgacaaagggaggtacaaaagacttagagcaatattttgctatctacagtcttctttkcttctcaagctacacagggaaaagtgaacttgtatatcttaataggattaacattataagatttcaagtcatagtttctttctttaattcaaactagatgggtcagttcctaacaatactctagataggattatcaraagtcctcattgctggcctaattcctcacttattcaagtcactggaaagttctgtgctaaaaactggaagttaagcaaacctcttgtatcagagaccagtaagagttgtggttttaaaggcaagtcctttcttggactatctctacctcagtcgcttactttttatcacagattcgttactggtacactgacatgggattcagaactaaatcctccatcatgaagcaaaggagagaccaactgtctcatcccagta

SEQ ID NO: 54708 - DNA, 600 bp, Chicken  19866894307610_1
aaaaaaagctttcgaggctttctgagaaaggctttgtatgtatgaagcagcagttagtgtgtagaaacaacctgactgaaggctccagcgaggtcagctccttcttgtacctgccctgtaggaggcaataggatggaagctgatgcacagacagccaccacaaaaaaaacctcaacaaacttcttcagcaaaacgtaccaagagggcatatgataaaatgagcactgattctaatgctgcatgttaacaacacattgcctacataggaaagttcttgattttgaacagtctccactcctrtctgtgacatatctgtgacatargttttagctagaatagaagactgtttcctgttgttttctggtggcagatttgtctcgggcgtcaagaaacaaaatgccaagtacaaggttaatttattaagctcgtatgtctaatttgattgcggaactagagtgaatcttagcacatgttttgagttcaggccaggtaaagatggttactaaaacaaaatcatgctgcttgtccttgaatcacatggaactcatagcaggaatcatcctccatagccttgaaaactctttataaggtactgtgtaa

SEQ ID NO: 54709 - DNA, 600 bp, Chicken  19866894307610_2
gagaaaggctttgtatgtatgaagcagcagttagtgtgtagaaacaacctgactgaaggctccagcgaggtcagctccttcttgtacctgccctgtaggaggcaataggatggaagctgatgcacagacagccaccacaaaaaaaacctcaacaaacttcttcagcaaaacgtaccaagagggcatatgataaaatgagcactgattctaatgctgcatgttaacaacacattgcctacataggaaagttcttgattttgaacagtctccactcctrtctgtgacatatctgtgacatargttttagctagaatagaagactgtttcctgttgttttctggtggcagatttgtctcgggcgtcaagaaacaaaatgccaagtacaaggttaatttattaagctcgtatgtctaatttgattgcggaactagagtgaatcttagcacatgttttgagttcaggccaggtaaagatggttactaaaacaaaatcatgctgcttgtccttgaatcacatggaactcatagcaggaatcatcctccatagccttgaaaactctttataaggtactgtgtaagctagcagtgtttgtacactatc

SEQ ID NO: 54710 - DNA, 600 bp, Chicken  19866894307610_3
cttagcacatgttttgagttcaggccaggtaaagatggttactaaaacaaaatcatgctgcttgtccttgaatcacatggaactcatagcaggaatcatcctccatagccttgaaaactctttataaggtactgtgtaagctagcagtgtttgtacactatcgttggttatttttcaagcaacagaaatattaaaagaattaggtaaatcaaaattaacacataagttactgaattaaaaaagaaaaaaaagagctgtaattaagcctttaggtataagaaggcagctgctgctattcayggatcatgcttgtcatgtttttctttatcctgcttctgtgttaaatgtaggaaccctgctgtcttgtaatatgcatggaacttcatctccagggctctacagtgtctaatgcagacttatgttttgagtaatttatggaaagaagagattatttgaggtttgccagatttacttcatgttcccttagcatactgctttcagcatcaagaaatcactgcagggccttggaggagtagaggttccctcatgaagctgccctctctgtggaagagagrctccctctcaaaaygtgtgtacttg

SEQ ID NO: 54711 - DNA, 507 bp, Chicken  19866894307610_4
taagaaggcagctgctgctattcayggatcatgcttgtcatgtttttctttatcctgcttctgtgttaaatgtaggaaccctgctgtcttgtaatatgcatggaacttcatctccagggctctacagtgtctaatgcagacttatgttttgagtaatttatggaaagaagagattatttgaggtttgccagatttacttcatgttcccttagcatactgctttcagcatcaagaaatcactgcagggccttggaggagtagaggttccctcatgaagctgccctctctgtggaagagagrctccctctcaaaaygtgtgtacttgyaacatgacggcacaaatgtctaggatactgtaatccatcctctgcactactacaaacacccttgatggcagtgacactgggctgaaataaaggttttttttgtcaggagctgtagcacaaaatggctgagatagagaaaaatgtacatttgatctgaatgtcatctggcagcctcagcaaa

SEQ ID NO: 54712 - DNA, 493 bp, Chicken  19866894307610_5
ctgctattcayggatcatgcttgtcatgtttttctttatcctgcttctgtgttaaatgtaggaaccctgctgtcttgtaatatgcatggaacttcatctccagggctctacagtgtctaatgcagacttatgttttgagtaatttatggaaagaagagattatttgaggtttgccagatttacttcatgttcccttagcatactgctttcagcatcaagaaatcactgcagggccttggaggagtagaggttccctcatgaagctgccctctctgtggaagagagrctccctctcaaaaygtgtgtacttgyaacatgacggcacaaatgtctaggatactgtaatccatcctctgcactactacaaacacccttgatggcagtgacactgggctgaaataaaggttttttttgtcaggagctgtagcacaaaatggctgagatagagaaaaatgtacatttgatctgaatgtcatctggcagcctcagcaaa

SEQ ID NO: 54713 - DNA, 481 bp, Chicken  19866894307610_6
gatcatgcttgtcatgtttttctttatcctgcttctgtgttaaatgtaggaaccctgctgtcttgtaatatgcatggaacttcatctccagggctctacagtgtctaatgcagacttatgttttgagtaatttatggaaagaagagattatttgaggtttgccagatttacttcatgttcccttagcatactgctttcagcatcaagaaatcactgcagggccttggaggagtagaggttccctcatgaagctgccctctctgtggaagagagrctccctctcaaaaygtgtgtacttgyaacatgacggcacaaatgtctaggatactgtaatccatcctctgcactactacaaacacccttgatggcagtgacactgggctgaaataaaggttttttttgtcaggagctgtagcacaaaatggctgagatagagaaaaatgtacatttgatctgaatgtcatctggcagcctcagcaaa

SEQ ID NO: 54714 - DNA, 600 bp, Chicken  19866894307615_1
tgaagcaaggaggccttgtcagcaggctcccccccaatcaggtggcctgtagtagaccccaacttgatgccatttactggactgatccttgatttttacccacaagctctcaatctggtcatggctattactgagacacagctctttgcattctatccatctcctagcatagagggcaactcccccatccctcctaccctgcccatcccttttgaagaatgcctttcatcttagtgaaaatgtgcttttgcaacatagatgaagcccaatgcccggctgcagcacaaccactctacaagytcttcccatctccttgcttcatttatgtttccttttcttcccttgcaggtctggtgctgggcaactcaaacttgttttgtctttccttgtctttatctaacatccaaaaatgggctgggcagtgctgttattgccacactgctctatgcacaatttgggcagtgtttttttcttttatcgtaaaaggcaaatcccagaatagatgcatagatgattttggagtattgtggaccactgagcaacatgcaagaaaagtcccttgttctgaaaaagtggtgtgaagctcagcaacaatgagtc

SEQ ID NO: 54715 - DNA, 600 bp, Chicken  19866894307616_1
gttgtgcaataaaccaagggcacagaaggggcgtgaaagtccagtctttccctcaccatgctgtcctttattccagcacagtcaaatactttgtacaggaagatgaaacctgaactgcaggtcaaaatgagcttgcccaaggatctgtgcttgttccgctctagagatggaaatagacagaaatgaaatctgagtgaggccctgtggcttttgtagcacagcagttagtggtaagtttgcctaggaaaatattaccatgttctaactgaaagtaatgatactgcttgctgcttgtacttygtgctgggtgagagaaaagcttattagcagaaataagcattttgttttttaacctacttttctatagtgtgtgatggaaatgctaaaatgtgaactttatttcatcaggtttattccatgaacagaaagggagacaatagcctgatcttccccctcttcgtgtaccagcaagacttcaggatggcagtctttgatgagattctgaaacatcaaatcaggaaatgatgggaataagctgatttcttcctgagctaacactgagagcagcattgcatgtctgatggagaacagcaaamaagt

SEQ ID NO: 54716 - DNA, 600 bp, Chicken  19866894307616_2
cttygtgctgggtgagagaaaagcttattagcagaaataagcattttgttttttaacctacttttctatagtgtgtgatggaaatgctaaaatgtgaactttatttcatcaggtttattccatgaacagaaagggagacaatagcctgatcttccccctcttcgtgtaccagcaagacttcaggatggcagtctttgatgagattctgaaacatcaaatcaggaaatgatgggaataagctgatttcttcctgagctaacactgagagcagcattgcatgtctgatggagaacagcaaamaagtgagagaggtaagaaagcttctttagaaatagttcttttgcatttctgaaacacgaaaagcaaaattaagtcttacaagaaaaacataattaagtttcacttggataaattccgtggctataaagagctgatagaacaagcactgtgagcacgtgaaatacaccgagcttacaaaagcatttgggcatcatctgtacacataatctcactgattcatgtgaaggtgatgtttacttaaaataaaggtggggcactgatgttgatcgttgccttcttaatttgccagtggtgttcatt

SEQ ID NO: 54717 - DNA, 600 bp, Chicken  19866894307619_1
aaacagttctctgctcagattcctgttcctttaattacagcagaaaataaacacactatctgaacaacgtcaaatagcagtgtatatgatagatttggggaggtcactgcaactagtgcaccacataagttgtaactcatatgccagaaaacatctacaaagtaaaactagcctctactacttgctggcttatttattttacatgaagatctaaacttatcttgaatgtttcaggatgcaccaccatgcacaaacattttgttatcatttactgtattctcacgcttgttacttacatgycggtctctgcatgattaagatacatcgttgtttattcactctagaaaatcaggagaagccaggcttgtgtttgaagttgccaagtgaagtcacttgggataaagcaccttgcccccctgaagtctcaacttatctgcttgaatgtacaacctggcaagcatactccaaatctgaaaaacacagttactggaacaaagccttataaaacctaattttgatcactagattctaatcattagagtgattagaaacagctgtgttgcctattaccatattctaccttgtctgctttacaacagt

SEQ ID NO: 54718 - DNA, 599 bp, Chicken  19866894307624_1
  misc_feature (1)..(95): n is any nucleotide
nnnnnnnnnnnnnnnnnnnnnnnnnnnnnnnnnnnnnnnnnnnnnnnnnnnnnnnnnnnnnnnnnnnnnnnnnnnnnnnnnnnnnnnnnnnnnnntggttaattcctattaaaagaaatgcatgtatatcaagatgtctatttatacaatgctattgtctgtagtggtatacaatgttgtacttacttttaacgtgcatgttgaagcatgcactgtagctaggacattttaatacagaattgcttgtagttgcatttatgtaagtggtttatattcattcaaaatgaagcagtcagaatrgtgctatttttaaaattgtgttacttccaaatttgacacacttggaaattccattattccacattcttagctgctgtcttatgaatttttaagaaatacatttcacaaattctagcccaaaatcgacgggcaaagctacataaaggggagaccttaatgaagcaagacactcccattttgagtgctttaatttttaacaaggtacctgtgtttaatgttatttttttgactattagtggtagttgtaccttcataatggcctattaactggaacatccttgaatatccagtgtaacagg

SEQ ID NO: 54719 - DNA, 600 bp, Chicken  19866894307628_1
aaaagccagtcattccattgatttccaggcttagttgtttctggcagacttttgagaggcatgatttcctgatgctaggcagtgcctagcattgcaaagcttaattcaactatgcaagaaatatttctggagattatacagagtaaatttcagaaacaaatgttaatactccactaaacgagtaaattatggattagtgtctggaaatttgagacctctgtgtcacactaagtctaaaacaacgctgcttgaagtaaacttgatagaggacactgtttaagacctagtaatttgctgaakttaaaagcgatgataataaaggaaacactgaagttgattcttaaccactggattatgacataattctagctttgaggtttttctgttgtgacatgcagggcttgtctaggactttactaggatttctagtaaaccaatacttggacaagtccagtggcaaacaagttccatatctgagtgctttggtgtctcttgatttttgtctagctgtttgaggtttttaagtttgtgcattctatatttctaggtcattttccactctggaactgtggcttaaattgatttcttccatgttaaatt

SEQ ID NO: 54720 - DNA, 600 bp, Chicken  19866894307635_1
ttctgcaaaggagatttactgaaacggatccttacttgctaagcctgcagaacgtatttatacatgtgattcaccatacggatgtgggaaaatgttcaaatatttgtgtatcaagtttcagactttccataaatgtttgctgcagtaagtaacactgactacaaaatcttcttttttgctttagaaaaataacactgactctggagtatcttttggcttcaaaccacaaatttactccaataaactcaagaggagagaatgaactaaatgcaagagtagaaggttactatttggagagtrattccccattgtgaaactgggatcatgccctgacttgtactgtcctgttcgcatttacacagcggtttcttgacctgcccaccctctccagcaagtttttcagacctcgaaattctatatcctactaggacaagcatcaatgtcatcaacctgtgggtgccaacttccacctcaagtgatctatgtgtatttgacagcagtttcccacccagttcttcctgggtagggaaatccccagccgtagttgtgtaggaccagaggcacagtgtcagtgtacacagtccaggttagcaaagctga

SEQ ID NO: 54721 - DNA, 600 bp, Chicken  19866894307635_2
ctatatcctactaggacaagcatcaatgtcatcaacctgtgggtgccaacttccacctcaagtgatctatgtgtatttgacagcagtttcccacccagttcttcctgggtagggaaatccccagccgtagttgtgtaggaccagaggcacagtgtcagtgtacacagtccaggttagcaaagctgatcctaatgaaaaggaggaatgagaaatttgttttttagtaatacctaccaaaaagtggtccatagagccatatacttacactcaaaatctctccaggtgactggaagagaagcrgatccctaggcaacactggggaaacacagcttgaacagaaggactgagagactatggccaaaattgtatttgtactgatgagcaaatctttactaaaacattgatggttttgttgtaggtaagttatttattatttactttactcttctggtctgtttcttttctccctgctgtgtaatggattgtctttctgagcataatgaaactaaagaaaaaaaagaagaacatattcctattttttgaagcttgaaaagwaagaattggagaaaaacatagtctgacgtatccagtgctacaaat

SEQ ID NO: 54722 - DNA, 600 bp, Chicken  19866894307635_3
atatacttacactcaaaatctctccaggtgactggaagagaagcrgatccctaggcaacactggggaaacacagcttgaacagaaggactgagagactatggccaaaattgtatttgtactgatgagcaaatctttactaaaacattgatggttttgttgtaggtaagttatttattatttactttactcttctggtctgtttcttttctccctgctgtgtaatggattgtctttctgagcataatgaaactaaagaaaaaaaagaagaacatattcctattttttgaagcttgaaaagwaagaattggagaaaaacatagtctgacgtatccagtgctacaaatcttatacgttaatttgrctaactgatgaacacaggatgacacagtgatatgatgtagttgataaaaattgcagctactacagttggtaaaaaaagtcagtaaaggccacaatactttactggcacagaggtcagggaagggtacaatctgttgaaaatactgcgattatttacagaactgtagttcagccagtataaaatatgttacactgccatttaagaggcacacacacacaaaaaaatcataaaaatctgc

SEQ ID NO: 54723 - DNA, 600 bp, Chicken  19866894307635_4
ggggaaacacagcttgaacagaaggactgagagactatggccaaaattgtatttgtactgatgagcaaatctttactaaaacattgatggttttgttgtaggtaagttatttattatttactttactcttctggtctgtttcttttctccctgctgtgtaatggattgtctttctgagcataatgaaactaaagaaaaaaaagaagaacatattcctattttttgaagcttgaaaagwaagaattggagaaaaacatagtctgacgtatccagtgctacaaatcttatacgttaatttgrctaactgatgaacacaggatgacacagtgatatgatgtagttgataaaaattgcagctactacagttggtaaaaaaagtcagtaaaggccacaatactttactggcacagaggtcagggaagggtacaatctgttgaaaatactgcgattatttacagaactgtagttcagccagtataaaatatgttacactgccatttaagaggcacacacacacaaaaaaatcataaaaatctgcttgaatcatgcaaaagtacttctggcacagattctttgtcttacagaggaattacagatatt

SEQ ID NO: 54724 - DNA, 600 bp, Chicken  19866894307641_1
tgcctctgagagaacgctgtttatttttgctgtgagaaccgatgtcggatagtgagctggcctgggctgagctctgcacaaaggtagaaagtggtgtttgtgtgtcctacgtgactcaagcagatcgctgtcactgcctgcctccctactcagagatcttagtgcagagaggagctggcatgggtgctgctgggctcggtgtgcaccgcgcatggtcctggctgctgggacggctgctgggcgctcggtgccgggctgtgctgagagccccgtggctgggagcagttggtgctgcagccytcccctggggtgagggtgacgtgaggtggccccgcttactcatctagtaaatcttagtaagagcgtaacgtgacagcaggggggtttcctgaagtcatgctctgcagactgccctttgcccaagcggtttccagcagcacccagcgagggactttgcccccattgcagagctctgctcggggcagcagcccgtgttgcacrcaggtactcagcgctcctttgtgtgctgcaccgatccggtcgggtccttcctcctgcacaacccgagtcatgcactgctcagacgggtccagcttggct

SEQ ID NO: 54725 - DNA, 600 bp, Chicken  19866894307641_2
tgcaccgcgcatggtcctggctgctgggacggctgctgggcgctcggtgccgggctgtgctgagagccccgtggctgggagcagttggtgctgcagccytcccctggggtgagggtgacgtgaggtggccccgcttactcatctagtaaatcttagtaagagcgtaacgtgacagcaggggggtttcctgaagtcatgctctgcagactgccctttgcccaagcggtttccagcagcacccagcgagggactttgcccccattgcagagctctgctcggggcagcagcccgtgttgcacrcaggtactcagcgctcctttgtgtgctgcaccgatccggtcgggtccttcctcctgcacaacccgagtcatgcactgctcagacgggtccagcttggctgagccacaagatgacccgaaagcgaaaacttctactcaaagaaaggacggcgtttgtcattacaatattggaaacaattacagaaggagagcttaaaataagaatctgaaagcagacggtatttccaggaaagttatgctctgcactgccttaagttctctgcggtggtttggctgcagcacctgcaggctgcctcagagc

SEQ ID NO: 54726 - DNA, 480 bp, Chicken  19866894307641_3
gcaccgatccggtcgggtccttcctcctgcacaacccgagtcatgcactgctcagacgggtccagcttggctgagccacaagatgacccgaaagcgaaaacttctactcaaagaaaggacggcgtttgtcattacaatattggaaacaattacagaaggagagcttaaaataagaatctgaaagcagacggtatttccaggaaagttatgctctgcactgccttaagttctctgcggtggtttggctgcagcacctgcaggctgcctcagagctcactgcctccctggggagcagagcgyggccctccttgctccgatgggtggaagaggtccccgcgtccctcactcctcaggttgggttctggatcagcagctctgtgcgcaggtggrgctgcccaggcctgcccagcgcccgtgctgggctctcctctgtgcctgggaacgcattttgcctaattcccccttctttctctcccctaa

SEQ ID NO: 54727 - DNA, 390 bp, Chicken  19866894307641_4
aaagcgaaaacttctactcaaagaaaggacggcgtttgtcattacaatattggaaacaattacagaaggagagcttaaaataagaatctgaaagcagacggtatttccaggaaagttatgctctgcactgccttaagttctctgcggtggtttggctgcagcacctgcaggctgcctcagagctcactgcctccctggggagcagagcgyggccctccttgctccgatgggtggaagaggtccccgcgtccctcactcctcaggttgggttctggatcagcagctctgtgcgcaggtggrgctgcccaggcctgcccagcgcccgtgctgggctctcctctgtgcctgggaacgcattttgcctaattcccccttctttctctcccctaa

SEQ ID NO: 54728 - DNA, 600 bp, Chicken  19866894307646_1
ccatcaatgtttttcttctttgtcatgtaacattcgtggctgttctcagaataccatacagcacagacagttcagggacaaacagttgcagactgtacacctaccagcttgtgcacctacatatacacatacaaagcagtactaaaaaaaaccaaattagcactaaaacctagcatttttcaatcaataatccatcatttttctttcaatttagaattctttcagaatgggaaatttaattctctagaagtgctacacagcaccactcggagaccaataactggatacttgaaatcttcrctaagattttccaccaacctcctggtttagaaataagaatatactcctcaaatccaaatggactgcttttcaaccggagacataactcacttcagaaagtgtctctttgctcctcccacccttcctctgctctccctcctcatccagactcaagagagaatgggaacctttcttcctctcttsactggccaaggccgattacgtatacacataagtaacaattcagttgctattcttatctgctacagaagcccattctcttaawacccaggacaggtttaccttacgtgggataggaac

SEQ ID NO: 54729 - DNA, 600 bp, Chicken  19866894307646_2
tcaataatccatcatttttctttcaatttagaattctttcagaatgggaaatttaattctctagaagtgctacacagcaccactcggagaccaataactggatacttgaaatcttcrctaagattttccaccaacctcctggtttagaaataagaatatactcctcaaatccaaatggactgcttttcaaccggagacataactcacttcagaaagtgtctctttgctcctcccacccttcctctgctctccctcctcatccagactcaagagagaatgggaacctttcttcctctcttsactggccaaggccgattacgtatacacataagtaacaattcagttgctattcttatctgctacagaagcccattctcttaawacccaggacaggtttaccttacgtgggataggaacgctggaaaggaaaaccatcttaagggaaagcctgatgcacagctcagataataatataagcacgttatttgttttgacagttctctcttttgcactccatgaagtcatcatggagattctcttgtattaaccagactgaggacaaaacataagtagagcctgtctactgattctgttgagata

SEQ ID NO: 54730 - DNA, 600 bp, Chicken  19866894307646_3
ctcggagaccaataactggatacttgaaatcttcrctaagattttccaccaacctcctggtttagaaataagaatatactcctcaaatccaaatggactgcttttcaaccggagacataactcacttcagaaagtgtctctttgctcctcccacccttcctctgctctccctcctcatccagactcaagagagaatgggaacctttcttcctctcttsactggccaaggccgattacgtatacacataagtaacaattcagttgctattcttatctgctacagaagcccattctcttaawacccaggacaggtttaccttacgtgggataggaacgctggaaaggaaaaccatcttaagggaaagcctgatgcacagctcagataataatataagcacgttatttgttttgacagttctctcttttgcactccatgaagtcatcatggagattctcttgtattaaccagactgaggacaaaacataagtagagcctgtctactgattctgttgagatagtggaaccaacactccaaacagacaaggcccaggcacagtaacacagcacatggatgatggcacacctcacactgctgaaat

SEQ ID NO: 54731 - DNA, 600 bp, Chicken  19866894307653_1
ggtggaagaagccagagccattgttcaggaaagttaaaagaggagctgtccttgcttgcttgttcagtcatgcatactgaatctcgccgtgtgagggtccctatggaaaggaggagggtgattcttcccctctttttaacattcctctccaggcctggctgtatttaagctgctttcctccatgtcgaggagggagggggatggtctgaagttcctgtacatttgcattttaagcacttccagcaccgagcgggccactttgttccctgcgcgctatcccgctctggcaacccgctcacygggcgctgccccggctgctcggccgccacacggaggaggtgcggggcctagccccgtgctcacctctgcctccgcggatgctttcggcttaggctggacaacacacggctctttgttcccagccctaaccacctctccccttttatctcggtgccgcatttcaaaggggaaaatcacatttcaagaaggccgcagttgtgcgccacctcatccccagcccaaggagaagggccggcacctcgagactgggcctttggggtctgcgttgtcttctttcsgtccctaagacttccacgcttt

SEQ ID NO: 54732 - DNA, 600 bp, Chicken  19866894307653_2
ccgctctggcaacccgctcacygggcgctgccccggctgctcggccgccacacggaggaggtgcggggcctagccccgtgctcacctctgcctccgcggatgctttcggcttaggctggacaacacacggctctttgttcccagccctaaccacctctccccttttatctcggtgccgcatttcaaaggggaaaatcacatttcaagaaggccgcagttgtgcgccacctcatccccagcccaaggagaagggccggcacctcgagactgggcctttggggtctgcgttgtcttctttcsgtccctaagacttccacgctttctgctgggagttgatcacaaaagctgcattgttcgcactggggaaagccaccacaattggatctaattgagcctgacactatatccatcttccyttacttggagggaggtgtggggtctttctttcctccatgaagaaaaaggtctacagtaacttcctgactgaaaacacaatgcatgaacgctataaacaacaggaattccagatcaggttcccgctacctctgaaatatgagcgttcccagggttctagcaagggatggggaatgamagatctcg

SEQ ID NO: 54733 - DNA, 544 bp, Chicken  19866894307653_3
tggacaacacacggctctttgttcccagccctaaccacctctccccttttatctcggtgccgcatttcaaaggggaaaatcacatttcaagaaggccgcagttgtgcgccacctcatccccagcccaaggagaagggccggcacctcgagactgggcctttggggtctgcgttgtcttctttcsgtccctaagacttccacgctttctgctgggagttgatcacaaaagctgcattgttcgcactggggaaagccaccacaattggatctaattgagcctgacactatatccatcttccyttacttggagggaggtgtggggtctttctttcctccatgaagaaaaaggtctacagtaacttcctgactgaaaacacaatgcatgaacgctataaacaacaggaattccagatcaggttcccgctacctctgaaatatgagcgttcccagggttctagcaagggatggggaatgamagatctcgcacaagatcccccaaaagggttgtttcttctggatttgactaaaaatggtgtctccttat

SEQ ID NO: 54734 - DNA, 368 bp, Chicken  19866894307653_4
ttctttcsgtccctaagacttccacgctttctgctgggagttgatcacaaaagctgcattgttcgcactggggaaagccaccacaattggatctaattgagcctgacactatatccatcttccyttacttggagggaggtgtggggtctttctttcctccatgaagaaaaaggtctacagtaacttcctgactgaaaacacaatgcatgaacgctataaacaacaggaattccagatcaggttcccgctacctctgaaatatgagcgttcccagggttctagcaagggatggggaatgamagatctcgcacaagatcccccaaaagggttgtttcttctggatttgactaaaaatggtgtctccttat

SEQ ID NO: 54735 - DNA, 600 bp, Chicken  19866894307665_1
ataactgcctgcttttgcacttctgaagtcaaggagatggtaacaggatgccccaataaaatctacttttgaagaataatttagtgatggaagcctgcactcctgaataattaattcttttcttgattatcattctcccacttgatattcttccatttgcattgctgtctcttgaataaagcttgcagactgctgcaaatatggaagtaatttctttgtccctgctgtgatacttcacaaaaatatacttggtatttcttaaagaccattccctggagtaattctcactttaacttctcrcccattcagttttctttatgaccacagttagaaaagtttttattctttacaaaaatcaaacaaaaarattgattaaatgatataaaagtaaaaatctctttctccagaaacacacaagcattttgagaaaccatactcttctctcttcawatagtttacattaggtgcatccaacatgtggccctagatagcctgtaatgcagccacattaagatcacaaacgtataacattacgatgtgattttcagtgatagttttcacgagttgattgtgcataacttgagtacagactgtgtaggc

SEQ ID NO: 54736 - DNA, 600 bp, Chicken  19866894307665_2
tttgaagaataatttagtgatggaagcctgcactcctgaataattaattcttttcttgattatcattctcccacttgatattcttccatttgcattgctgtctcttgaataaagcttgcagactgctgcaaatatggaagtaatttctttgtccctgctgtgatacttcacaaaaatatacttggtatttcttaaagaccattccctggagtaattctcactttaacttctcrcccattcagttttctttatgaccacagttagaaaagtttttattctttacaaaaatcaaacaaaaarattgattaaatgatataaaagtaaaaatctctttctccagaaacacacaagcattttgagaaaccatactcttctctcttcawatagtttacattaggtgcatccaacatgtggccctagatagcctgtaatgcagccacattaagatcacaaacgtataacattacgatgtgattttcagtgatagttttcacgagttgattgtgcataacttgagtacagactgtgtaggctacaatggaatagaatactgtggaggagagggcatactgcagtgccagctctgcctctcacacagca

SEQ ID NO: 54737 - DNA, 600 bp, Chicken  19866894307665_3
ttccatttgcattgctgtctcttgaataaagcttgcagactgctgcaaatatggaagtaatttctttgtccctgctgtgatacttcacaaaaatatacttggtatttcttaaagaccattccctggagtaattctcactttaacttctcrcccattcagttttctttatgaccacagttagaaaagtttttattctttacaaaaatcaaacaaaaarattgattaaatgatataaaagtaaaaatctctttctccagaaacacacaagcattttgagaaaccatactcttctctcttcawatagtttacattaggtgcatccaacatgtggccctagatagcctgtaatgcagccacattaagatcacaaacgtataacattacgatgtgattttcagtgatagttttcacgagttgattgtgcataacttgagtacagactgtgtaggctacaatggaatagaatactgtggaggagagggcatactgcagtgccagctctgcctctcacacagcatcacacacagccaagttgaaacccaaatgttatggggtcaaagtcttttaacttcactgcttaatctttatgcttatatataa

SEQ ID NO: 54738 - DNA, 600 bp, Chicken  19866894307670_1
tttctcatcaagtagaaatctttaaaaaaaacatacattttgtttcaaaatgaagttatattcttcacatgagaactgctacataacatcgaatgacagaattgcagggtttggaagggacctcaagaaactgattccaacgcccctgctaaagcaagtttcctacagcaggtcgcacaggtaggagtccagatgggtcttgagtatctccatagaaggagtctacacaccctctctgggcaacctgtttcagtactgcagcacccttgccataaagaagttcttttgcatgttagtacmgaacttcctatgtttcagtttcaggctattacattttgtcctaccactacagaccaccaagaagaacctggatccaaacatatgcctccctcttctctttagatatttataaacattaatcagatccccacttaatcttcttttccccagactgaacatacacaggttactcaaaccttcctcataagggagatgctcctggccccagtgatctttgtggccctcagctggacttgttccaggagatccctgacttttttgaactaagaagcccagaactggacacagtactctggatgt

SEQ ID NO: 54739 - DNA, 600 bp, Chicken  19866894307671_1
cttgcaaacagtgtcatttctacattccaccacacctatactaccatatgttgtagtcaatagttcaaaaggggattttgtaacagcaatccacttcagatctgtagattcacacctgtaagtaagcgtgagctgaacagctttttgctctgtcttttcattacctgtccttttgtttctgatttcttctcttcagaattgtttatggaacatattcttgctggatttcttcctgtaaatttcctccacagtctcttatgaggaatgatcagatttctctccatgggactacgcagtatrgctttgctttgtttgttacttgatgatgactttaacaatgcatgctgataactgtgcatttcaaaggttcactccaagagaaacagagactgatatttgagtaatactagcaaaagcccagatgagaaatgaatctactgaactccttgttgggtgctgaaatataaattttggcatgattttcacagggctgttatgttctgaccctgaaaaaaatgtactcagcaactctagcagagaaaggaatagagaacagcttgcaccactgaaagtacctattacagcgtcattagtttgtgc

SEQ ID NO: 54740 - DNA, 498 bp, Chicken  19866894307671_2
aatgcatgctgataactgtgcatttcaaaggttcactccaagagaaacagagactgatatttgagtaatactagcaaaagcccagatgagaaatgaatctactgaactccttgttgggtgctgaaatataaattttggcatgattttcacagggctgttatgttctgaccctgaaaaaaatgtactcagcaactctagcagagaaaggaatagagaacagcttgcaccactgaaagtacctattacagcgtcattagtttgtgcatgcatgtttgccttggcatctagcaggaaaaaaamctcctaatagctgctaccaagcaattccttgaaaaaaataatcaaaacagatggcgaatcctgaactttacctgaacagttcaacttatccaacggaatgggagacaaactcagcagcatggttagaaagtccatgtatgagggaggcttggctgtccttctgggcaatgtgactgctgtatatgaaccttctggtgt

SEQ ID NO: 54741 - DNA, 600 bp, Chicken  19866894307684_1
ggtgtttgtttttgtttcccacacaactggggttttttgcagctgaagtctcgtgtcctgatgactcccctagcaatctctccaccaagaagcacgccagagcctgatgtgagctcaatcccacaggatgcagccaccgtccccaaatcgaccaccccacaggctcttacaggtatgtggactgaagaatgctgcagcaagggggtgaacagatctcacagctggcagccagctgctgtgctcttcagaacgagcacagctcgtgaaaatgggacttttccaaatcagactgattggcartgacacacagcagtgctgtcttgcaggactatgctttgacagtgccaagtttggcagagaccttgggcccattcttcttgaaatgcagatatcagcatcctatggacaccaccattttatgctcaacactgtccccaccgtctgtgtcacagtgaccagacctaacaccgtgtgagcagggcgtatctcttgcctctatgggaagagaagggcaaagagggagttaaccagcacctagaccccagtggttcacagsaacagcaaacctgttcatttctgatggtagtcttactccttttt

SEQ ID NO: 54742 - DNA, 600 bp, Chicken  19866894307684_2
cagctcgtgaaaatgggacttttccaaatcagactgattggcartgacacacagcagtgctgtcttgcaggactatgctttgacagtgccaagtttggcagagaccttgggcccattcttcttgaaatgcagatatcagcatcctatggacaccaccattttatgctcaacactgtccccaccgtctgtgtcacagtgaccagacctaacaccgtgtgagcagggcgtatctcttgcctctatgggaagagaagggcaaagagggagttaaccagcacctagaccccagtggttcacagsaacagcaaacctgttcatttctgatggtagtcttactcctttttgcttatcagagcagaaggaacataggtcaatgcctttaaactgctgtaaatgagaagaaaatcaacaagacggtagatataccctgagatttcagcagagaaatggattagataacattaggttctaaactaaacatataaatcccattatttcttagctgggatgcacagaggagaagttttccatctgctctggtagcaaaatgatactaagcatggcgacgataataatatattctattctcatttgtcctgt

SEQ ID NO: 54743 - DNA, 600 bp, Chicken  19866894307685_1
tgggaagtaagttactgaatgaatgagagtggtagctttatgtgcatgtccaaacctctacagatttgaaaatgagaaggtatgcaaaggatcttaaaaggcagaagggactatggcagtcactcactgctgtcacaacccagaaaaaaaaacctctctaatttctttgcttgaatgcacttctccttgggtagctatagtaagcttgcaacttactgaaaatgctccctcagtgcagctacgctaaagcatgctgaaggtctgtagaagtttaaaggattggaatggtcatatgtggtrttgtgtcagaaacagtacagaaaatgaaagacttatagttaggatttctttcctgtctgcaccgactgtcatgtacaggaggacatgttcatttctgtattttcatccaaaatggggaggcttctaatagctgaagttgtaagttcatctagttatgtgtatctggtatttttacaatatgcatctgagctgccctgtaagtcttgaaatatcagctgcttcccagttcttgggctcttagtggaatygtgtaataggatctgtagtgctcatagacgtgtggagggtacagccacactg

SEQ ID NO: 54744 - DNA, 600 bp, Chicken  19866894307685_2
gtgcagctacgctaaagcatgctgaaggtctgtagaagtttaaaggattggaatggtcatatgtggtrttgtgtcagaaacagtacagaaaatgaaagacttatagttaggatttctttcctgtctgcaccgactgtcatgtacaggaggacatgttcatttctgtattttcatccaaaatggggaggcttctaatagctgaagttgtaagttcatctagttatgtgtatctggtatttttacaatatgcatctgagctgccctgtaagtcttgaaatatcagctgcttcccagttcttrggctcttagtggaatygtgtaataggatctgtagtgctcatagacgtgtggagggtacagccacactgatttcatatgtcaagagaattatcatagacttaaagccctggaaacataagactttctaactgcagaagagactgtagaaagtaatttsatgtcttccagttkaaaattaagttacgtgaatcatatcttagacgaacacaacctacttatgcataattgatgtctacaggtggcaccagaatttgtcactaaatgttctgccgtactgcattgtaagcaatataattgtgg

SEQ ID NO: 54745 - DNA, 600 bp, Chicken  19866894307685_3
gcatgctgaaggtctgtagaagtttaaaggattggaatggtcatatgtggtrttgtgtcagaaacagtacagaaaatgaaagacttatagttaggatttctttcctgtctgcaccgactgtcatgtacaggaggacatgttcatttctgtattttcatccaaaatggggaggcttctaatagctgaagttgtaagttcatctagttatgtgtatctggtatttttacaatatgcatctgagctgccctgtaagtcttgaaatatcagctgcttcccagttcttgggctcttagtggaatygtgtaataggatctgtagtgctcatagacgtgtggagggtacagccacactgatttcatatgtcaagagaattatcatagacttaaagccctggaaacataagactttctaactgcagaagagactgtagaaagtaatttsatgtcttccagttkaaaattaagttacgtgaatcatatcttagacgaacacaacctacttatgcataattgatgtctacaggtggcaccagaatttgtcactaaatgttctgccgtactgcattgtaagcaatataattgtgggtatatttcttagcag

SEQ ID NO: 54746 - DNA, 576 bp, Chicken  19866894307685_4
catttctgtattttcatccaaaatggggaggcttctaatagctgaagttgtaagttcatctagttatgtgtatctggtatttttacaatatgcatctgagctgccctgtaagtcttgaaatatcagctgcttcccagttcttgggctcttagtggaatygtgtaataggatctgtagtgctcatagacgtgtggagggtacagccacactgatttcatatgtcaagagaattatcatagacttaaagccctggaaacataagactttctaactgcagaagagactgtagaaagtaatttsatgtcttccagttkaaaattaagttacgtgaatcatatcttagacgaacacaacctacttatgcataattgatgtctacaggtggcaccagaatttgtcactaaatgttctgccgtactgcattgtaagcaatataattgtgggtatatttcttagcagctaggagataattttttctgtatcttagtgagtgcacaaagaatcatttccagctcatttactgagacctcatgcaatccatatgagtagagatgcatttctaacgtgtctgtttaa

SEQ ID NO: 54747 - DNA, 562 bp, Chicken  19866894307685_5
catccaaaatggggaggcttctaatagctgaagttgtaagttcatctagttatgtgtatctggtatttttacaatatgcatctgagctgccctgtaagtcttgaaatatcagctgcttcccagttcttgggctcttagtggaatygtgtaataggatctgtagtgctcatagacgtgtggagggtacagccacactgatttcatatgtcaagagaattatcatagacttaaagccctggaaacataagactttctaactgcagaagagactgtagaaagtaatttsatgtcttccagttkaaaattaagttacgtgaatcatatcttagacgaacacaacctacttatgcataattgatgtctacaggtggcaccagaatttgtcactaaatgttctgccgtactgcattgtaagcaatataattgtgggtatatttcttagcagctaggagataattttttctgtatcttagtgagtgcacaaagaatcatttccagctcatttactgagacctcatgcaatccatatgagtagagatgcatttctaacgtgtctgtttaa

SEQ ID NO: 54748 - DNA, 600 bp, Chicken  19866894307695_1
gggtatctgtgaagttaaagaagttcaagtgaattattaagattgccagagtccttgcagcaactggttgactggataataatgtgacatagttatatatttcatcaaaaatctaccagtacttttcagactatacaaatcttacttctattctttgctcagtctgtttattacaatgaaggcatcattgggaacactgcagtgatagttcagcaattaaggcaagaaacttgggagaaaggagggcgggaagaatttctctcaatcctgtagaaatctgtcctaaacatatgttcaacmcacttggaattaggtcacagtaacctgaatagaaargaggtcattcagacttattgaacaatrtactggaggccagaggtccccacttcacagttggcatactttacaaaaggccagaggtggcagctggataacatcaaaaagaaataggcagctgatgaatctatatggaatggaaaaaaagaatcaattgacaagagacagtgaaaaataattcaaaatattctttctttctttttaatctaattatctaaatttgtaatgtcgttatttctctaacatcagtgaatgatgaaatat

SEQ ID NO: 54749 - DNA, 600 bp, Chicken  19866894307695_2
ttaagattgccagagtccttgcagcaactggttgactggataataatgtgacatagttatatatttcatcaaaaatctaccagtacttttcagactatacaaatcttacttctattctttgctcagtctgtttattacaatgaaggcatcattgggaacactgcagtgatagttcagcaattaaggcaagaaacttgggagaaaggagggcgggaagaatttctctcaatcctgtagaaatctgtcctaaacatatgttcaacmcacttggaattaggtcacagtaacctgaatagaaargaggtcattcagacttattgaacaatrtactggaggccagaggtccccacttcacagttggcatactttacaaaaggccagaggtggcagctggataacatcaaaaagaaataggcagctgatgaatctatatggaatggaaaaaaagaatcaattgacaagagacagtgaaaaataattcaaaatattctttctttctttttaatctaattatctaaatttgtaatgtcgttatttctctaacatcagtgaatgatgaaatataaggataactgataaatgtatcagtaaatattcaaa

SEQ ID NO: 54750 - DNA, 600 bp, Chicken  19866894307695_3
ctggttgactggataataatgtgacatagttatatatttcatcaaaaatctaccagtacttttcagactatacaaatcttacttctattctttgctcagtctgtttattacaatgaaggcatcattgggaacactgcagtgatagttcagcaattaaggcaagaaacttgggagaaaggagggcgggaagaatttctctcaatcctgtagaaatctgtcctaaacatatgttcaacmcacttggaattaggtcacagtaacctgaatagaaargaggtcattcagacttattgaacaatrtactggaggccagaggtccccacttcacagttggcatactttacaaaaggccagaggtggcagctggataacatcaaaaagaaataggcagctgatgaatctatatggaatggaaaaaaagaatcaattgacaagagacagtgaaaaataattcaaaatattctttctttctttttaatctaattatctaaatttgtaatgtcgttatttctctaacatcagtgaatgatgaaatataaggataactgataaatgtatcagtaaatattcaaacagtctttaaattattcaactcaagtc

SEQ ID NO: 54751 - DNA, 600 bp, Chicken  19866894307695_4
ctgtagaaatctgtcctaaacatatgttcaacmcacttggaattaggtcacagtaacctgaatagaaargaggtcattcagacttattgaacaatrtactggaggccagaggtccccacttcacagttggcatactttacaaaaggccagaggtggcagctggataacatcaaaaagaaataggcagctgatgaatctatatggaatggaaaaaaagaatcaattgacaagagacagtgaaaaataattcaaaatattctttctttctttttaatctaattatctaaatttgtaatgtcrttatttctctaacatcagtgaatgatgaaatataaggataactgataaatgtatcagtaaatattcaaacagtctttaaattattcaactcaagtcttactaggacamagtactggtcagacttagaacaaaatcatctgtcttcagaagtggctttgacatattttaaatgaagagcttagtaatattttttcttcttttgagcaccctacttgtaagactggaatctacaaagctgcttggcgagatatatttcctcactgactgacttgaagatctctgtttgcagtgacatctctg

SEQ ID NO: 54752 - DNA, 600 bp, Chicken  19866894307695_5; identical to SEQ ID NO: 54751

SEQ ID NO: 54753 - DNA, 600 bp, Chicken  19866894307695_6
gaggtccccacttcacagttggcatactttacaaaaggccagaggtggcagctggataacatcaaaaagaaataggcagctgatgaatctatatggaatggaaaaaaagaatcaattgacaagagacagtgaaaaataattcaaaatattctttctttctttttaatctaattatctaaatttgtaatgtcgttatttctctaacatcagtgaatgatgaaatataaggataactgataaatgtatcagtaaatattcaaacagtctttaaattattcaactcaagtcttactaggacamagtactggtcagacttagaacaaaatcatctgtcttcagaagtggctttgacatattttaaatgaagagcttagtaatattttttcttcttttgagcaccctacttgtaagactggaatctacaaagctgcttggcgagatatatttcctcactgactgacttgaagatctctgtttgcagtgacatctctgtgaaattaaagaatagaagaattagcaattataactttaagatgtctgtaaaatggacctgagttattaaggtccagtcgtcttgttgccttgagtttcctgctaatg

SEQ ID NO: 54754 - DNA, 599 bp, Chicken  19866894307701_1
  misc_feature (1)..(53): n is any nucleotide
nnnnnnnnnnnnnnnnnnnnnnnnnnnnnnnnnnnnnnnnnnnnnnnnnnnnnatttagaatagtactaaaaaagagtactatagaatagcaatgtaggagattcgggagcaaagaatcatgtcaaatagtgtttgaatcatcagagaaacttggtgtattccttatgttttcaaaaacccatgttcctaacagttaactaaaacaagacctaatgtggcaatcggaagtctactgtttgaaaaactgctgcagaataagttgtatagagatttctattcaattctgtcagcaaacttaytgtaaaatttagctgtgaagcttaagatctatttctttatgcagaagcatcacagtaaaagtggagaacactgctaagatgccgtcagtgttcacgtgcaacagctttttgaagatctcaaacgtgccttctgttgctttaataaaaacaaaattaaatttccatgagatgcctgtttgagataagatggctcttggacacttygcagaacctgtggggaagctttcagggactccttttgatcaggccttttgtaataagtggaaaccaatgttcttgtcttgtcagtattaatgccc

SEQ ID NO: 54755 - DNA, 600 bp, Chicken  19866894307701_2
caagacctaatgtggcaatcggaagtctactgtttgaaaaactgctgcagaataagttgtatagagatttctattcaattctgtcagcaaacttaytgtaaaatttagctgtgaagcttaagatctatttctttatgcagaagcatcacagtaaaagtggagaacactgctaagatgccgtcagtgttcacgtgcaacagctttttgaagatctcaaacgtgccttctgttgctttaataaaaacaaaattaaatttccatgagatgcctgtttgagataagatggctcttggacacttygcagaacctgtggggaagctttcagggactccttttgatcaggccttttgtaataagtggaaaccaatgttcttgtcttgtcagtattaatgcccctggtaataaataaatacagatttacctttgttccttctgtggagaaacatctctgtgtactgtggtgatacttgtaattcttcttcaygttgtgcatcagaacagctgggtagagagaagggtatttgtgcatatgaaactggggatgaatgagttttctcccaactggctgatactaggtccttagcaagggcttgactcttt

SEQ ID NO: 54756 - DNA, 552 bp, Chicken  19866894307701_3
tgttcacgtgcaacagctttttgaagatctcaaacgtgccttctgttgctttaataaaaacaaaattaaatttccatgagatgcctgtttgagataagatggctcttggacacttygcagaacctgtggggaagctttcagggactccttttgatcaggccttttgtaataagtggaaaccaatgttcttgtcttgtcagtattaatgcccctggtaataaataaatacagatttacctttgttccttctgtggagaaacatctctgtgtactgtggtgatacttgtaattcttcttcaygttgtgcatcagaacagctgggtagagagaagggtatttgtgcatatgaaactggggatgaatgagttttctcccaactggctgatactaggtccttagcaagggcttgactcttttattattgaatttatatatccttctagttgtgaacagtttgtcgaggacgtgaccggttggctgctttaatgtctgaatacagaaggactgaaaccttcatttttgaagtatcatcattttgctttgctctaatta

SEQ ID NO: 54757 - DNA, 599 bp, Chicken  19866894307703_1
  misc_feature (1)..(54): n is any nucleotide
nnnnnnnnnnnnnnnnnnnnnnnnnnnnnnnnnnnnnnnnnnnnnnnnnnnnnnggggaaggggacaaacgagggccctgaggttgagcgggttgttagagggctcgtaccaaactccatgggcaaagatggtggagtacaaaggaatggtgtagggcagggggatgctgggaatgctactgttctaggggatcctagatcccctataaaggcggtgagatggaaagcccagctgaagtgcctttataccaacgcactcagcctgagtaataaacaggacgagttggaaactgtgatgcmcttggaaagtcatgaccttgttgctatcacagaaacatggtgggatgactcccacaactggaatactaccaykgatgggtatcggctctttagaagggataggcaaggtaggaggggtgggggagttgccctctatgtcaaagagtggatagactgtgaggagctccctctgagaaacagtcaggaacaggttgagaacctgtgggttagaattagggataggactaataaaggtcagctggtgataggggtatactacaggccacctgatcaaggggaggctgttgacgaggctttct

SEQ ID NO: 54758 - DNA, 600 bp, Chicken  19866894307703_2
gggccctgaggttgagcgggttgttagagggctcgtaccaaactccatgggcaaagatggtggagtacaaaggaatggtgtagggcagggggatgctgggaatgctactgttctaggggatcctagatcccctataaaggcggtgagatggaaagcccagctgaagtgcctttataccaacgcactcagcctgagtaataaacaggacgagttggaaactgtgatgcmcttggaaagtcatgaccttgttgctatcacagaaacatggtgggatgactcccacaactggaatactaccaykgatgggtatcggctctttagaagggataggcaaggtaggaggggtgggggagttgccctctatgtcaaagagtggatagactgtgaggagctccctctgagaaacagtcaggaacaggttgagaacctgtgggttagaattagggataggactaataaaggtcagctggtgataggggtatactacaggccacctgatcaaggggaggctgttgacgaggctttcttgctccagatgcagaaggcatcatgttcacgggcccttgtcctggtgggggacttcaaccacccggacatctg

SEQ ID NO: 54759 - DNA, 600 bp, Chicken  19866894307703_3
ggccctgaggttgagcgggttgttagagggctcgtaccaaactccatgggcaaagatggtggagtacaaaggaatggtgtagggcagggggatgctgggaatgctactgttctaggggatcctagatcccctataaaggcggtgagatggaaagcccagctgaagtgcctttataccaacgcactcagcctgagtaataaacaggacgagttggaaactgtgatgcmcttggaaagtcatgaccttgttgctatcacagaaacatggtgggatgactcccacaactggaatactaccaykgatgggtatcggctctttagaagggataggcaaggtaggaggggtgggggagttgccctctatgtcaaagagtggatagactgtgaggagctccctctgagaaacagtcaggaacaggttgagaacctgtgggttagaattagggataggactaataaaggtcagctggtgataggggtatactacaggccacctgatcaaggggaggctgttgacgaggctttcttgctccagatgcagaaggcatcatgttcacgggcccttgtcctggtgggggacttcaaccacccggacatctgt

SEQ ID NO: 54760 - DNA, 472 bp, Chicken  19866894307703_4
tttagaagggataggcaaggtaggaggggtgggggagttgccctctatgtcaaagagtggatagactgtgaggagctccctctgagaaacagtcaggaacaggttgagaacctgtgggttagaattagggataggactaataaaggtcagctggtgataggggtatactacaggccacctgatcaaggggaggctgttgacgaggctttcttgctccagatgcagaaggcatcatgttcacgggcccttgtcctggtgggggacttcaaccacccggacatctgttggaaagaccacacrgygagctgcaagaggtccagaaggctcatggaatccactgatgacaactttctggtccaggtagtggacagaccaaccagaggtgaagcattgctggacctgctgctcaccaatgcagaagagatcatcaaaggcgtcaacattggaggcagcctgggctgcagcgaccatg

SEQ ID NO: 54761 - DNA, 470 bp, Chicken  19866894307703_5
tagaagggataggcaaggtaggaggggtgggggagttgccctctatgtcaaagagtggatagactgtgaggagctccctctgagaaacagtcaggaacaggttgagaacctgtgggttagaattagggataggactaataaaggtcagctggtgataggggtatactacaggccacctgatcaaggggaggctgttgacgaggctttcttgctccagatgcagaaggcatcatgttcacgggcccttgtcctggtgggggacttcaaccacccggacatctgttggaaagaccacacrgygagctgcaagaggtccagaaggctcatggaatccactgatgacaactttctggtccaggtagtggacagaccaaccagaggtgaagcattgctggacctgctgctcaccaatgcagaagagatcatcaaaggcgtcaacattggaggcagcctgggctgcagcgaccatg

SEQ ID NO: 54762 - DNA, 599 bp, Chicken  19866894307705_1
  misc_feature (1)..(75): n is any nucleotide
nnnnnnnnnnnnnnnnnnnnnnnnnnnnnnnnnnnnnnnnnnnnnnnnnnnnnnnnnnnnnnnnnnnnnnnnnnntttcaaatgaaaataaaatctgctttacctttcacattagtagggctggtggaaaagtgtggtagtgcttcttgggtaaaatccccatttcacttaaagctacaaagttacactggattcagttgatctgtatcagatgtcacagcaaagagtcagactttgatgctcaaactgccttaccagtagagaagcatcaaggtttgtcccctttacataacaacacascagctgcactcttcgtgaggttcattcctccatttgtgaatccaccgggccttttttgccctgtttatatgtaccgtgtaactcaacaaatagtgggacaccttgcttcttgagctaaaattgtcgcacagagctccaagatcccaactcaaatgatgttgtaacatactaagagggcccaagttttgtttttctccaactgaaactcaagytttaacttttattcagagaaaagggtattgttttcccckgttcttcatgcaaatgcaataagcaaagcraatgctattatcacagat

SEQ ID NO: 54763 - DNA, 600 bp, Chicken  19866894307705_2
tgtcacagcaaagagtcagactttgatgctcaaactgccttaccagtagagaagcatcaaggtttgtcccctttacataacaacacascagctgcactcttcgtgaggttcattcctccatttgtgaatccaccgggccttttttgccctgtttatatgtaccgtgtaactcaacaaatagtgggacaccttgcttcttgagctaaaattgtcgcacagagctccaagatcccaactcaaatgatgttgtaacatactaagagggcccaagttttgtttttctccaactgaaactcaagytttaacttttattcagagaaaagggtattgttttcccckgttcttcatgcaaatgcaataagcaaagcraatgctattatcacagataggctgtgcttatcagactctctaggtgttatattaagcgtgttgtcatcagaatacttttctctgaaaggcaaactcattttgcaagaatttttcatttttgactgaaagacttcttattaaattagaagtgtattataatgatccacataggatcacacaataacacaagcatcacaaacaagagcrcaatcccctgtacaggctgatggt

SEQ ID NO: 54764 - DNA, 600 bp, Chicken  19866894307705_3
ttaccagtagagaagcatcaaggtttgtcccctttacataacaacacascagctgcactcttcgtgaggttcattcctccatttgtgaatccaccgggccttttttgccctgtttatatgtaccgtgtaactcaacaaatagtgggacaccttgcttcttgagctaaaattgtcgcacagagctccaagatcccaactcaaatgatgttgtaacatactaagagggcccaagttttgtttttctccaactgaaactcaagytttaacttttattcagagaaaagggtattgttttcccckgttcttcatgcaaatgcaataagcaaagcraatgctattatcacagataggctgtgcttatcagactctctaggtgttatattaagcgtgttgtcatcagaatacttttctctgaaaggcaaactcattttgcaagaatttttcatttttgactgaaagacttcttattaaattagaagtgtattataatgatccacataggatcacacaataacacaagcatcacaaacaagagcrcaatcccctgtacaggctgatggtgcaagctattgatataggcaggaacaccggaaaacactc

SEQ ID NO: 54765 - DNA, 600 bp, Chicken  19866894307705_4
cctttacataacaacacascagctgcactcttcgtgaggttcattcctccatttgtgaatccaccgggccttttttgccctgtttatatgtaccgtgtaactcaacaaatagtgggacaccttgcttcttgagctaaaattgtcgcacagagctccaagatcccaactcaaatgatgttgtaacatactaagagggcccaagttttgtttttctccaactgaaactcaagytttaacttttattcagagaaaagggtattgttttcccckgttcttcatgcaaatgcaataagcaaagcraatgctattatcacagataggctgtgcttatcagactctctaggtgttatattaagcgtgttgtcatcagaatacttttctctgaaaggcaaactcattttgcaagaatttttcatttttgactgaaagacttcttattaaattagaagtgtattataatgatccacataggatcacacaataacacaagcatcacaaacaagagcrcaatcccctgtacaggctgatggtgcaagctattgatataggcaggaacaccggaaaacactcaactatcaaatagctacatagtgcctcaga

SEQ ID NO: 54766 - DNA, 571 bp, Chicken  19866894307705_5
tttttctccaactgaaactcaagytttaacttttattcagagaaaagggtattgttttcccckgttcttcatgcaaatgcaataagcaaagcraatgctattatcacagataggctgtgcttatcagactctctaggtgttatattaagcgtgttgtcatcagaatacttttctctgaaaggcaaactcattttgcaagaatttttcatttttgactgaaagacttcttattaaattagaagtgtattataatgatccacataggatcacacaataacacaagcatcacaaacaagagcrcaatcccctgtacaggctgatggtgcaagctattgatataggcaggaacaccggaaaacactcaactatcaaatagctacatagtgcctcagactgcacagtagtgataaaatagatatcctacaaaagctgcagagtacaggaggcaatgctggaacagagacatccagctggcaccatggtcagctccttcctccaagacagttgaccagtgcagggcagcttgcttctttttcagtttccataaaagcacacgagtagtccggtggta

SEQ ID NO: 54767 - DNA, 600 bp, Chicken  19866894307708_1
aaatggaactgattctctagaggagtaactcataattgttaaagcaatacaagtatatatttgcaggcttttgctaattaagccatgaaagccttgtgtttcctctcacactgtctagatgggcacaatcaattaaagcatcgatgcagtagaagcagcttaggctggcttcttcagggagaaggggtgagagcaattttttgacaccacttagctaatggggtgaagcccatactctgctgaactctgacagcactcaaagttttgtctcaagattaaattttactacaactgagacaygcaatccctctctaaattccagaaatcagatttagatctacataaggtccttaagtacgaagccaatgaaaacagcacaggacttaatgggaatcctataaaagtataaatccagtggatttacttcctgaagcagtagcaagagttagttgtgcagaacctaccattaatgcagcttgcccaactctctgttagaagtgtaatacatcttttgcaaatgtttaagtgccttatacattaaaaggattcaaaatgagaccaaaaaaccctgcttctactccctcccttcaggggttcatg

SEQ ID NO: 54768 - DNA, 600 bp, Chicken  19866894307710_1
tggttgggataaagggatccaaacttctctgttagctgatggtgcagatggctaccaaactgttaaaagggccaccccgtgaagaggctggagcccaggagagcccaaaccctcggtaaccaccaacaccctgcgatgcattggtgacaatgtggggctgctccagcaatggcacatcccagccacgcagagcacccatctctctgcttccatcccatgggtgggctctcctcgctccacaggctaccagcaccctcgtcccacctttgccctgccataaggcagcccggaggtcagggraccagccagctgcacgtccccatcrccaatggggaggctgggctcacagggagcagtgtgttgcctggtgctraacagcgggggaatgtttcatgtgggaattctttggcttcctctggcagggaaaacaacaaacccaatccatttcctggggtcttcccagtgttgcaagggcagctgcaaccggctcctgctccgacaggatgagcgcagccctgctgccagcaccaggcatggggctgcactcagctctaccccccagaaatggtcagatgggcacagggccacctttgcaaagac

SEQ ID NO: 54769 - DNA, 600 bp, Chicken  19866894307710_2
tctctgttagctgatggtgcagatggctaccaaactgttaaaagggccaccccgtgaagaggctggagcccaggagagcccaaaccctcggtaaccaccaacaccctgcgatgcattggtgacaatgtggggctgctccagcaatggcacatcccagccacgcagagcacccatctctctgcttccatcccatgggtgggctctcctcgctccacaggctaccagcaccctcgtcccacctttgccctgccataaggcagcccggaggtcagggraccagccagctgcacgtccccatcrccaatggggaggctgggctcacagggagcagtgtgttgcctggtgctraacagcgggggaatgtttcatgtgggaattctttggcttcctctggcagggaaaacaacaaacccaatccatttcctggggtcttcccagtgttgcaagggcagctgcaaccggctcctgctccgacaggatgagcgcagccctgctgccagcaccaggcatggggctgcactcagctctaccccccagaaatggtcagatgggcacagggccacctttgcaaagacagatttcagaaagcagtagtcgcag

SEQ ID NO: 54770 - DNA, 600 bp, Chicken  19866894307710_3
accccgtgaagaggctggagcccaggagagcccaaaccctcggtaaccaccaacaccctgcgatgcattggtgacaatgtggggctgctccagcaatggcacatcccagccacgcagagcacccatctctctgcttccatcccatgggtgggctctcctcgctccacaggctaccagcaccctcgtcccacctttgccctgccataaggcagcccggaggtcagggraccagccagctgcacgtccccatcrccaatggggaggctgggctcacagggagcagtgtgttgcctggtgctraacagcgggggaatgtttcatgtgggaattctttggcttcctctggcagggaaaacaacaaacccaatccatttcctggggtcttcccagtgttgcaagggcagctgcaaccggctcctgctccgacaggatgagcgcagccctgctgccagcaccaggcatggggctgcactcagctctaccccccagaaatggtcagatgggcacagggccacctttgcaaagacagatttcagaaagcagtagtcgcaggaggagacattactgcaaacactgcgatgcaggggcaaaggaaaacga

SEQ ID NO: 54771 - DNA, 600 bp, Chicken  19866894307710_4
ctgcaaccggctcctgctccgacaggatgagcgcagccctgctgccagcaccaggcatggggctgcactcagctctaccccccagaaatggtcagatgggcacagggccacctttgcaaagacagatttcagaaagcagtagtcgcaggaggagacattactgcaaacactgcgatgcaggggcaaaggaaaacgagtgaaaagcaaagagcagcagatagaaaccactctgcatgagcccccagcctgccatgctgctgagggatttgggacagactgagcacaacctgcagtgaaacygggggaagctgagagtaaggaaattgcagggtggctgtctggcatcagtttgaggaagaaagaggaaaggtatttacttaagtgagtttgwctactaatacttccatattttttcaatacccaagtcagcgattagaaatttgtgttaattggcaatgaattaaagtatgcaaaattctccacgtcaagactgcctgcaacaccaccccacaagtgctaatagaatcccccaatcccagcaccagggactcatcagacaacagagagggggcaagcaagtaagccctccagtttctcagg

SEQ ID NO: 54772 - DNA, 600 bp, Chicken  19866894307710_5
tcagatgggcacagggccacctttgcaaagacagatttcagaaagcagtagtcgcaggaggagacattactgcaaacactgcgatgcaggggcaaaggaaaacgagtgaaaagcaaagagcagcagatagaaaccactctgcatgagcccccagcctgccatgctgctgagggatttgggacagactgagcacaacctgcagtgaaacygggggaagctgagagtaaggaaattgcagggtggctgtctggcatcagtttgaggaagaaagaggaaaggtatttacttaagtgagtttgwctactaatacttccatattttttcaatacccaagtcagcgattagaaatttgtgttaattggcaatgaattaaagtatgcaaaattctccacgtcaagactgcctgcaacaccaccccacaagtgctaatagaatcccccaatcccagcaccagggactcatcagacaacagagagggggcaagcaagtaagccctccagtttctcaggagcagctgcggccccacagaatggaaatayatgggarggagcacctgccccaagagacatctgcccccggacagcgaggagaggaggctct

SEQ ID NO: 54773 - DNA, 600 bp, Chicken  19866894307710_6
gtggctgtctggcatcagtttgaggaagaaagaggaaaggtatttacttaagtgagtttgwctactaatacttccatattttttcaatacccaagtcagcgattagaaatttgtgttaattggcaatgaattaaagtatgcaaaattctccacgtcaagactgcctgcaacaccaccccacaagtgctaatagaatcccccaatcccagcaccagggactcatcagacaacagagagggggcaagcaagtaagccctccagtttctcaggagcagctgcggccccacagaatggaaatayatgggarggagcacctgccccaagagacatctgcccccggacagcgaggagaggaggctctcagacagacctccctcactggccccaaacacacacatctcctgctaccgacagctcgcagtgaacgtcagacagagccgtgccatgggaaggacacagcagcttccgatcccggatttgcaggaggatttgcagtaggagggggatctctagaggtcactcggtccaactgcagggttagatgcagccccacagagctcactcagccaagccctgcctccaacgagcgctgctcccagc

SEQ ID NO: 54774 - DNA, 600 bp, Chicken  19866894307710_7
tctggcatcagtttgaggaagaaagaggaaaggtatttacttaagtgagtttgwctactaatacttccatattttttcaatacccaagtcagcgattagaaatttgtgttaattggcaatgaattaaagtatgcaaaattctccacgtcaagactgcctgcaacaccaccccacaagtgctaatagaatcccccaatcccagcaccagggactcatcagacaacagagagggggcaagcaagtaagccctccagtttctcaggagcagctgcggccccacagaatggaaatayatgggarggagcacctgccccaagagacatctgcccccggacagcgaggagaggaggctctcagacagacctccctcactggccccaaacacacacatctcctgctaccgacagctcgcagtgaacgtcagacagagccgtgccatgggaaggacacagcagcttccgatcccggatttgcaggaggatttgcagtaggagggggatctctagaggtcactcggtccaactgcagggttagatgcagccccacagagctcactcagccaagccctgcctccaacgagcgctgctcccagcagggctt

SEQ ID NO: 54775 - DNA, 599 bp, Chicken  19866894307713_1
  misc_feature (1)..(44): n is any nucleotide
nnnnnnnnnnnnnnnnnnnnnnnnnnnnnnnnnnnnnnnnnnnncatcctagcatagccctggggattcacatacaaacttcagcctacacagatttctagcttttgtattcctcatttccaaacaagcgctgcaactatactatgagtgctcccaggcccagcagtctggctcaggatgatgctctgctactgtcttcacagctcaaaagctccaggatatcactgtatatttccagctgtggagtcagttatgtagtttatataacagaagttatagtaattgagtgttacatctggyttagctgaaatttctggatatggtgatagcttgcagtcagattctgtagttgttcggcaggaattgaacacaaagatttccagcaatgcagtactaagagtggcctggtttggcagaggaaggagtagctrtatcctatggtttctatgtaatctctaagtaattttgatagaaatctcaaactctgcgtgctgtataagcacagacacaaacaaatcttatgaggccttctgaacctccatagcacatctaacaaaaggaaagaatattgcagataagaatgtggaaaatcaccgttc

SEQ ID NO: 54776 - DNA, 600 bp, Chicken  19866894307713_2
tgcaactatactatgagtgctcccaggcccagcagtctggctcaggatgatgctctgctactgtcttcacagctcaaaagctccaggatatcactgtatatttccagctgtggagtcagttatgtagtttatataacagaagttatagtaattgagtgttacatctggyttagctgaaatttctggatatggtgatagcttgcagtcagattctgtagttgttcggcaggaattgaacacaaagatttccagcaatgcagtactaagagtggcctggtttggcagaggaaggagtagctrtatcctatggtttctatgtaatctctaagtaattttgatagaaatctcaaactctgcgtgctgtataagcacagacacaaacaaatcttatgaggccttctgaacctccatagcacatctaacaaaaggaaagaatattgcagataagaatgtggaaaatcaccgttccaattccagctgagacaattaatattactaccgggattactgtttactcatttcccagcagtgcttagattttaattatttcacggcaatgttccaaactctttttttccacaaggggccatgtccagaagc

SEQ ID NO: 54777 - DNA, 599 bp, Chicken  19866894307715_1
  misc_feature (1)..(106): n is any nucleotide
nnnnnnnnnnnnnnnnnnnnnnnnnnnnnnnnnnnnnnnnnnnnnnnnnnnnnnnnnnnnnnnnnnnnnnnnnnnnnnnnnnnnnnnnnnnnnnnnnnnnnnnnnnttttctgtttcctcagaatatacagtctgtacccgtggcagttttgcacagagaagtcatggggatggctgggtcagaggacacaaagttcctgtaaagtctaaaaggaaagtgaaaggtgagacagagcaagtaagacccatttctaaacattcttagctggtgcttctgttcggtttttgctgttttggtgktgktggtggtgaatattttgatatatttgataatgttcctttttatccgcacatacaattgctctagacccaataaatcatcagtcatataatgagatgaattcgtgtgtggtcacagagttatttttactcaagcatatgaaggtgtgtaatttttgctatataaaatatgctaagtgacggggcgtttcggtgtgttgcttattttatccttcagaatttgctaatcaccaagcatatgcacacagttccagagaaaacaaaggaatgcagaagtattaaatagttacagctgctct

SEQ ID NO: 54778 - DNA, 599 bp, Chicken  19866894307715_2
  misc_feature (1)..(103): n is any nucleotide
nnnnnnnnnnnnnnnnnnnnnnnnnnnnnnnnnnnnnnnnnnnnnnnnnnnnnnnnnnnnnnnnnnnnnnnnnnnnnnnnnnnnnnnnnnnnnnnnnnnnnnnttttctgtttcctcagaatatacagtctgtacccgtggcagttttgcacagagaagtcatggggatggctgggtcagaggacacaaagttcctgtaaagtctaaaaggaaagtgaaaggtgagacagagcaagtaagacccatttctaaacattcttagctggtgcttctgttcggtttttgctgttttggtgktgktggtggtgaatattttgatatatttgataatgttcctttttatccgcacatacaattgctctagacccaataaatcatcagtcatataatgagatgaattcgtgtgtggtcacagagttatttttactcaagcatatgaaggtgtgtaatttttgctatataaaatatgctaagtgacggggcgtttcggtgtgttgcttattttatccttcagaatttgctaatcaccaagcatatgcacacagttccagagaaaacaaaggaatgcagaagtattaaatagttacagctgctctgct

SEQ ID NO: 54779 - DNA, 600 bp, Chicken  19866894307717_1
taggcagggcttagcccttaaaatgacaatagatgttaataggaaaatatgaagagaaagctctgaagattagcttagctttgtagtattgcttagctgctgttctgtatggaaagtacatgatgataacagatgtagagctcaccactcattaatattgaagtgataagacacaataggcaggaaccttcattactgtgagacccactgctaccgtctgaggcacaaagcacaagaacaagtggctttagctgcttgaaaattacatttccttagaaatgtacttaagaacttgggtaktttttttccttacaaaatacaatacatycagaaagagaggatactcactttggkgtrttcaccagcttgagtcactgacacagagagcagtccttccaacagctggcrcagaatagagagccatatcctggattcctacacccctgcataattagcaatggggatgcacctgatatttaactagaatggttaaatttgtattccaaaggaattcaaaattacagcagctgtctctgcaaacttgtattggaaatcgaaaaaaatgtgggagaagtcttctgattttcactactattttcc

SEQ ID NO: 54780 - DNA, 600 bp, Chicken  19866894307717_2; identical to SEQ ID NO: 54779

SEQ ID NO: 54781 - DNA, 600 bp, Chicken  19866894307717_3
atagatgttaataggaaaatatgaagagaaagctctgaagattagcttagctttgtagtattgcttagctgctgttctgtatggaaagtacatgatgataacagatgtagagctcaccactcattaatattgaagtgataagacacaataggcaggaaccttcattactgtgagacccactgctaccgtctgaggcacaaagcacaagaacaagtggctttagctgcttgaaaattacatttccttagaaatgtacttaagaacttgggtattttttttccttacaaaatacaatacatycagaaagagaggatactcactttggkgtrttcaccagcttgagtcactgacacagagagcagtccttccaacagctggcrcagaatagagagccatatcctggattcctacacccctgcataattagcaatggggatgcacctgatatttaactagaatggttaaatttgtattccaaaggaattcaaaattacagcagctgtctctgcaaacttgtattggaaatcgaaaaaaatgtgggagaagtcttctgattttcactactattttccacactttatgtgcatatacaatcaggct

SEQ ID NO: 54782 - DNA, 600 bp, Chicken  19866894307717_4
agaaagctctgaagattagcttagctttgtagtattgcttagctgctgttctgtatggaaagtacatgatgataacagatgtagagctcaccactcattaatattgaagtgataagacacaataggcaggaaccttcattactgtgagacccactgctaccgtctgaggcacaaagcacaagaacaagtggctttagctgcttgaaaattacatttccttagaaatgtacttaagaacttgggtattttttttccttacaaaatacaatacatycagaaagagaggatactcactttggkgtrttcaccagcttgagtcactgacacagagagcagtccttccaacagctggcrcagaatagagagccatatcctggattcctacacccctgcataattagcaatggggatgcacctgatatttaactagaatggttaaatttgtattccaaaggaattcaaaattacagcagctgtctctgcaaacttgtattggaaatcgaaaaaaatgtgggagaagtcttctgattttcactactattttccacactttatgtgcatatacaatcaggctctctgcaatgcaggagaaatgctaat

SEQ ID NO: 54783 - DNA, 600 bp, Chicken  19866894307717_5
aagctctgaagattagcttagctttgtagtattgcttagctgctgttctgtatggaaagtacatgatgataacagatgtagagctcaccactcattaatattgaagtgataagacacaataggcaggaaccttcattactgtgagacccactgctaccgtctgaggcacaaagcacaagaacaagtggctttagctgcttgaaaattacatttccttagaaatgtacttaagaacttgggtattttttttccttacaaaatacaatacatycagaaagagaggatactcactttggkgtrttcaccagcttgagtcactgacacagagagcagtccttccaacagctggcrcagaatagagagccatatcctggattcctacacccctgcataattagcaatggggatgcacctgatatttaactagaatggttaaatttgtattccaaaggaattcaaaattacagcagctgtctctgcaaacttgtattggaaatcgaaaaaaatgtgggagaagtcttctgattttcactactattttccacactttatgtgcatatacaatcaggctctctgcaatgcaggagaaatgctaatgca

SEQ ID NO: 54784 - DNA, 600 bp, Chicken  19866894307717_6
atggaaagtacatgatgataacagatgtagagctcaccactcattaatattgaagtgataagacacaataggcaggaaccttcattactgtgagacccactgctaccgtctgaggcacaaagcacaagaacaagtggctttagctgcttgaaaattacatttccttagaaatgtacttaagaacttgggtattttttttccttacaaaatacaatacatycagaaagagaggatactcactttggkgtrttcaccagcttgagtcactgacacagagagcagtccttccaacagctggcrcagaatagagagccatatcctggattcctacacccctgcataattagcaatggggatgcacctgatatttaactagaatggttaaatttgtattccaaaggaattcaaaattacagcagctgtctctgcaaacttgtattggaaatcgaaaaaaatgtgggagaagtcttctgattttcactactattttccacactttatgtgcatatacaatcaggctctctgcaatgcaggagaaatgctaatgcaattctgaaagattttacttctctttatttaaatgaacggtgactgtagcat

SEQ ID NO: 54785 - DNA, 600 bp, Chicken  19866894307717_7
agtattccaaaatcaatgctgaaatgttatctctatcttaagaagtgtaaattgaaccaggcttactgaggtgttccaggatagatgtagaattttggaacaaaataggtaaaaagaaacccaggaaaatcagatttagggcactctgagcaagcagcgaggggttggattgcctcaaccagacccagtggaagagggccctgggacaagagggacttcatttatagaatgaagaaatggaactcaaaaaaatattagcgtaggactttcttgcttctaactccttctctcagatgctayagataaatctttatgctttctttaataattgattccctcttactaccgtttttgccattctctgtgactcatggaatttatagcagtgctaaattccagttagacttatggaggaaaaatattgatgaaaaagtgattaactcaggaatcctataatgatgatgactgtaggaattttccctgtcagaagcacaaagacaggccagaagcttggagagcttattgatgggaagagcaatttagtatccaaaggtacggactataccgaactatgrcaacagtgtcctgcaaagggactat

SEQ ID NO: 54786 - DNA, 586 bp, Chicken  19866894307717_8
tctaactccttctctcagatgctayagataaatctttatgctttctttaataattgattccctcttactaccgtttttgccattctctgtgactcatggaatttatagcagtgctaaattccagttagacttatggaggaaaaatattgatgaaaaagtgattaactcaggaatcctataatgatgatgactgtaggaattttccctgtcagaagcacaaagacaggccagaagcttggagagcttattgatgggaagagcaatttagtatccaaaggtacggactataccgaactatgrcaacagtgtcctgcaaagggactataaaaacactacattttctacatctgtacatctcctacaggatgcaacaactgcagcctctttaccttttatttctttgacaagtgctaagagaaacagagtaaagatcttggaaattttagaccaattaatttattagcagtacagttctttctccccatcattaacttactgtattgtccttcagtgattacaaaccagtttgctcagtctctttatgtaagagagataacagtagcataggttatccaatagtgaactg

SEQ ID NO: 54787 - DNA, 600 bp, Chicken  19866894307730_1
gaatttctatcctatatagctattaactacatcatttttttaatgtgtatgatgtatttacaattttgtcatgaccaaatgtttgcagtcttaacataatctgcactcttctatgtggctgtccaggtctaacatttcaaaggtttgcaagatctctttgtgatttagaggatagaagcaatgttcagtttaattaacatcagcgaaggtgtgctgcggatagatttcctctgctactgtctttctcagtgttcttagtttcaagatgttaagatttccaaaataaatatatccttttcrtttttttaatacaaggtgagacacytctttctgtttttcgctagagaggaatcgtttcagctgggatgttcatcatcttggtgagaaagtagtgaggaagaggttgctgtgattgactgaggatgcaaaatagacaagactgtatgaagaaatgaagtagtgcttcmcacagtgstatcatagaattgccacatttcctcacaaacttcttgctcttaagatatgctttcttctttttttagcaccatttagaaraggcaaaaaggaagacaattcttrggcccattaacacatctgaag

SEQ ID NO: 54788 - DNA, 600 bp, Chicken  19866894307730_2
actacatcatttttttaatgtgtatgatgtatttacaattttgtcatgaccaaatgtttgcagtcttaacataatctgcactcttctatgtggctgtccaggtctaacatttcaaaggtttgcaagatctctttgtgatttagaggatagaagcaatgttcagtttaattaacatcagcgaaggtgtgctgcggatagatttcctctgctactgtctttctcagtgttcttagtttcaagatgttaagatttccaaaataaatatatccttttcttttttttaatacaaggtgagacacytctttctgtttttcgctagagaggaatcgtttcagctgggatgttcatcatcttggtgagaaagtagtgaggaagaggttgctgtgattgactgaggatgcaaaatagacaagactgtatgaagaaatgaagtagtgcttcmcacagtgstatcatagaattgccacatttcctcacaaacttcttgctcttaagatatgctttcttctttttttagcaccatttagaaraggcaaaaaggaagacaattcttrggcccattaacacatctgaaggtcttgtataatacagcagagagag

SEQ ID NO: 54789 - DNA, 600 bp, Chicken  19866894307730_3
gaggatagaagcaatgttcagtttaattaacatcagcgaaggtgtgctgcggatagatttcctctgctactgtctttctcagtgttcttagtttcaagatgttaagatttccaaaataaatatatccttttcttttttttaatacaaggtgagacacytctttctgtttttcgctagagaggaatcgtttcagctgggatgttcatcatcttggtgagaaagtagtgaggaagaggttgctgtgattgactgaggatgcaaaatagacaagactgtatgaagaaatgaagtagtgcttcmcacagtgstatcatagaattgccacatttcctcacaaacttcttgctcttaagatatgctttcttctttttttagcaccatttagaaraggcaaaaaggaagacaattcttrggcccattaacacatctgaaggtcttgtataatacagcagagagagcattgatcaagacagagggcctagcattcttgatcctagagagagtaggtgccaggccaaatctcatcataactaaaaccagtttggaagctgttttcaattgcaacagctggtgttgggctacattcctctccctgtccac

SEQ ID NO: 54790 - DNA, 600 bp, Chicken  19866894307730_4
aagcaatgttcagtttaattaacatcagcgaaggtgtgctgcggatagatttcctctgctactgtctttctcagtgttcttagtttcaagatgttaagatttccaaaataaatatatccttttcttttttttaatacaaggtgagacacytctttctgtttttcgctagagaggaatcgtttcagctgggatgttcatcatcttggtgagaaagtagtgaggaagaggttgctgtgattgactgaggatgcaaaatagacaagactgtatgaagaaatgaagtagtgcttcmcacagtgstatcatagaattgccacatttcctcacaaacttcttgctcttaagatatgctttcttctttttttagcaccatttagaaraggcaaaaaggaagacaattcttrggcccattaacacatctgaaggtcttgtataatacagcagagagagcattgatcaagacagagggcctagcattcttgatcctagagagagtaggtgccaggccaaatctcatcataactaaaaccagtttggaagctgttttcaattgcaacagctggtgttgggctacattcctctccctgtccacatcccctc

SEQ ID NO: 54791 - DNA, 600 bp, Chicken  19866894307730_5
tagtttcaagatgttaagatttccaaaataaatatatccttttcttttttttaatacaaggtgagacacytctttctgtttttcgctagagaggaatcgtttcagctgggatgttcatcatcttggtgagaaagtagtgaggaagaggttgctgtgattgactgaggatgcaaaatagacaagactgtatgaagaaatgaagtagtgcttcmcacagtgstatcatagaattgccacatttcctcacaaacttcttgctcttaagatatgctttcttctttttttagcaccatttagaaraggcaaaaaggaagacaattcttrggcccattaacacatctgaaggtcttgtataatacagcagagagagcattgatcaagacagagggcctagcattcttgatcctagagagagtaggtgccaggccaaatctcatcataactaaaaccagtttggaagctgttttcaattgcaacagctggtgttgggctacattcctctccctgtccacatcccctcctggtcacagaggagtggggatgtcaccagagcatctccacacagaccccaaaccgcttctgtgctggtggccctcacat

SEQ ID NO: 54792 - DNA, 600 bp, Chicken  19866894307730_6
aaaataaatatatccttttcttttttttaatacaaggtgagacacytctttctgtttttcgctagagaggaatcgtttcagctgggatgttcatcatcttggtgagaaagtagtgaggaagaggttgctgtgattgactgaggatgcaaaatagacaagactgtatgaagaaatgaagtagtgcttcmcacagtgstatcatagaattgccacatttcctcacaaacttcttgctcttaagatatgctttcttctttttttagcaccatttagaaraggcaaaaaggaagacaattcttrggcccattaacacatctgaaggtcttgtataatacagcagagagagcattgatcaagacagagggcctagcattcttgatcctagagagagtaggtgccaggccaaatctcatcataactaaaaccagtttggaagctgttttcaattgcaacagctggtgttgggctacattcctctccctgtccacatcccctcctggtcacagaggagtggggatgtcaccagagcatctccacacagaccccaaaccgcttctgtgctggtggccctcacatggcatgggagaaagctctctcctg

SEQ ID NO: 54793 - DNA, 600 bp, Chicken  19866894307736_1
tcattataactgttattgaaattagagtgaaacaattttaattttcaaggctcagattactcacattgcatttctgtcttaagcccgtgccagctcatcctcgttaattgcttatttggtcactattattagagctgatagtcataaacacagattaaatggattgacaaagagtgtgtatcataccatagccaagactgagcttgttttctgcattttgagccattcttgcaagtgtgtgaaactcaagctgatttctaagtttttatattcataataggttaacatttatgttgctcratggcttaatgcatgggcagagcagagggaatgttgcctgtaccacaaaacagctttcctaatgaatctcctattgtagaacgtgctggcactgcgagcacaacatccacagctctgtaattaagttccttctctaacggaacaaagcaaaacatccatttgtacagctgaatatgacagtaattagagatcaccacttcaagactgtgtgcaaaatacagtcttgctctagccatatctatagcaaaaagagaaggtattccatcatacattgcagctagggtgaccacgcattcgtta

SEQ ID NO: 54794 - DNA, 600 bp, Chicken  19866894307737_1
gctagaaagtgaatctattattaaattaatttgccttttcgcccccgagagtctgtaaaacataaatcagatatgcttaataaaagtcgagtttgccaaaaatattcagcactcaggctcatgcagtatgacactgacagaaccatcttttctgtcacagctctgaacataattgattaaagatcccattcctaagatatgttagccagagctgattttaggggcaaaatcactcagagtggggcatgcaaactttgtaaggagaaagcaggtgagcctgccaagctgatacaggcccaraaaagcaatgtttttccagtagatggacagtatcaacaactggtcagtgtggtttgtaatgtccagcaacaggaaaagttttgaaggaaaataggtcaggaaaatatttgtcttcagtcacgtatgaggagtggcacataataatttgttagggaaacatttccttctggtgacaagctaagctgcggttcactaattttatcatactttaagagaaagtgtaagaaaccagataaattttgcaggtgcttaagaaacgattccatgtctccatccaaccatctgattattaggttatca

SEQ ID NO: 54795 - DNA, 600 bp, Chicken  19866894307746_1
ttctacctcatcagtaatctgcatgctatcaccaacccatgcataaaaggtgttgtttacttctctgtgaaattttagcagacatcctggcagcaaagaatcataggatcatagaatggtttgggttagaatggacctttaagatcatctagttccaacttccctgctataggcagggacacctcccaccaggttgctcaaaacctcatcctgcctggccttcaatgcttccagagagggggcattcacagtctctccggggaacctgttccaatgtctcaccaccctcacagtaaatgygtgccttcctaatatctaatctaartctaacttctttcagtttaaaaccatttcccctcatcctatcactacctgccctgataaaaagtccctccccagctttcctgtaggccccctgcaggtactggaaagccactacaaggtctcctcagagccttctcttctccaggctaaagagccccaaatctctcagcctgtccccataggggaggtgctccagtcctctgatcaacttcacagaaacgtcctcagggcaactgtcagcaacagtgctgaggttgctttctggtactgcaaagg

SEQ ID NO: 54796 - DNA, 600 bp, Chicken  19866894307746_2
ctatcaccaacccatgcataaaaggtgttgtttacttctctgtgaaattttagcagacatcctggcagcaaagaatcataggatcatagaatggtttgggttagaatggacctttaagatcatctagttccaacttccctgctataggcagggacacctcccaccaggttgctcaaaacctcatcctgcctggccttcaatgcttccagagagggggcattcacagtctctccggggaacctgttccaatgtctcaccaccctcacagtaaatgygtgccttcctaatatctaatctaartctaacttctttcagtttaaaaccatttcccctcatcctatcactacctgccctgataaaaagtccctccccagctttcctgtaggccccctgcaggtactggaaagccactacaaggtctcctcagagccttctcttctccaggctaaagagccccaaatctctcagcctgtccccataggggaggtgctccagtcctctgatcaacttcacagaaacgtcctcagggcaactgtcagcaacagtgctgaggttgctttctggtactgcaaaggcagaataccacaaagatgagtgaag

SEQ ID NO: 54797 - DNA, 599 bp, Chicken  19866894307755_1
  misc_feature (1)..(105): n is any nucleotide
nnnnnnnnnnnnnnnnnnnnnnnnnnnnnnnnnnnnnnnnnnnnnnnnnnnnnnnnnnnnnnnnnnnnnnnnnnnnnnnnnnnnnnnnnnnnnnnnnnnnnnnnntttagaaggtaatgaaggtgtctagatgaggaaaaaacactgacagttgtgcgttgtagacacctccaccctcctccacaattgaggaaagaaaataccaggacttagcctgctgcaacccaggcatgtgttatacaaaagcatacattggagactttgttattattactttttcctgtctttgttgttatatcrtaatatgccaaagaaagagatggaacaaagctgggcgtgcaggatgggatgcggagtgtttgcgtgtccccttttcactggaggtgtcaccacccaccccatcgcccgtgttatataactctcctttcctgcaaacagtgaaattcattagcataaattataaccagagtctagttaggctcagttgtcacttttgcagaatgatgaggcctttgtgcacaaaaaaaaaattaaagaaaattgtataatgattatgtgcgctggttactaagctagccaccagttagatatatttatag

SEQ ID NO: 54798 - DNA, 599 bp, Chicken  19866894307756_1
  misc_feature (1)..(98): n is any nucleotide
nnnnnnnnnnnnnnnnnnnnnnnnnnnnnnnnnnnnnnnnnnnnnnnnnnnnnnnnnnnnnnnnnnnnnnnnnnnnnnnnnnnnnnnnnnnnnnnnnnataatataagtactattattgttgctggggacatttgttatagctttttttccgggaattcggtgttcccgtgccctgggcaagtaggcatactccatttacccagcatcagatactctataagcggctgctatatagtgtgaatgttaaatactggatcaaaggtgtgcgtgatattattgtgtgatctgagagtaattgratgcttgttacaccctggaaataattgcaaccctgtatttgttgttagaagcttaacctgtaataccgttcaggaattacagtggaatacaggagacttgcatttctgttggggttgtgagctggggtttaaagaggaacatgtatcagatctaactgatatactggctataagttttggacctttgggaacaataacgaatctaagatttaatatggggggaggacagaggaaggaggttcccaggcgaaccccacttgaatgtatcttgcctcattggcgagatattaccgaggagc

SEQ ID NO: 54799 - DNA, 600 bp, Chicken  19866894307768_1
tttttccatagatctctagtgaactgttgcatgaaacagcttttaaaaaagaaaaaggaaaaaagtccttttcttggaaaaaaaaattacatattggcaaaaaattgacttgttctagcaggatcagtttcttcatagcaaatgtatttataaccagtgccttgtagaatttcaactctctcttaaattcatagctatatatcatttggaaaacatccctgggcattctctctgcaagttgtaatccttggagtcaggtgtctccttccgtccctcagttcagggtacgtctgcttagcratgccaaaccatatgattgcagcagagaggtgcactgcttgattttaagctaccttggctgtaagaacagttgtgaagacatgcaacctggagctaataacacagcttagagtgcccactaggcttatgcttggtttttagctggctctaggccctgttgtgtctcagatggtactgttgtccctgctgtgcactcggcagtcacttcttcattttgctctgcagcaaagacaggaggccagcagacacttttaaagtggtgtgtgggaggagaaactcaaaccaagtgaaagggaaaca

SEQ ID NO: 54800 - DNA, 600 bp, Chicken  19866894307768_2
taggcttgtctttgcacacatcagtatgagagaaagatgaggccaagccttacaaacacttctgtgacagtagtgtttctctctgcttgtttggactgtttctgctgtgacttatataacagacacctccaagtcttatcccaggaaatttcctttgtgcagagcatcttgcacaagggaatatggagccttttgaaggaatcaaatatgtccacagctgtagtgaaatgggaggcttcttgtgaaagatgacctggctcaacaagggaggtgcatgtagctgagctgaatctcatacaraggaggacagcaagcaagaagattcaccacagctgtggcctactagcagtttaacctattgccaaacattgcacagtgacacagaaatatgttttagaggaaagctcttttgcagctttgttgattttcatagagttcttcccgtgtttcaggggatgcatttccatgattcctaagtgattaaaactctgatagctgattaaagaactacctggcactaaatgagtgtgctgagcatcttgtttccgtggctatttcttctttttcctctatgttagaaggagctaattttctccttct

SEQ ID NO: 54801 - DNA, 599 bp, Chicken  19866894307770_1
  misc_feature (1)..(110): n is any nucleotide
nnnnnnnnnnnnnnnnnnnnnnnnnnnnnnnnnnnnnnnnnnnnnnnnnnnnnnnnnnnnnnnnnnnnnnnnnnnnnnnnnnnnnnnnnnnnnnnnnnnnnnnnnnnnnntggaaattattctaatccacagaagaaacactaagaaaaaaagaggaaatcatcaaaagataacagcagaaaagctcacttcggtgcttcaaacatttttttcacaattacgaggaaagatattggtaactgaagcttaaaagatgtttctggaaaacagatagcaaaggatgagccttctcttgccttrctgccaagagtcactgaattgagaatcaccagtgaaaaacagctttctcctgagctgacttacctcccagtccctgctagaaccctccctaacacaggtcagactaacccgttgagctgcttatctctgatgactaattttgagactaagctagatgactggttcagatgagatgcctactatttaggcagctaaatttaggagagatgaatcacgccaaagagcccaccaagctactgttacagtcaataggaacacaacttcagtttgagtcctgtgctataaatggccaactggac

SEQ ID NO: 54802 - DNA, 600 bp, Chicken  19866894307770_2
ttgagactaagctagatgactggttcagatgagatgcctactatttaggcagctaaatttaggagagatgaatcacgccaaagagcccaccaagctactgttacagtcaataggaacacaacttcagtttgagtcctgtgctataaatggccaactggacagtaacaggactaatttgctaaaatggcatggtgtaatacaccataccaaaacccttcagtactgagttgtttagaatactccaggatgcctctaatccaggtttagcacagctttctgtatttatcacctgggacaaaytgcatccayggaaacgaccagtgtgggtaatttggcttgttagagtggttttcagccaaggaaagccaggaaagtttgtttcatcattaaaaatatagagctacagctttaacccacattcaaggtacctgcatctgtggtggagagtgctcttgcaatactgttggatcttgcagcacaactctacaactaagaaacatcaacatagagagtggttaaaagaaagatgtcaacagctggcacttgtgaaagaactgtacctccatgaagccaggaaaacgtgcaycacagctctccacc

SEQ ID NO: 54803 - DNA, 600 bp, Chicken  19866894307770_3
agctagatgactggttcagatgagatgcctactatttaggcagctaaatttaggagagatgaatcacgccaaagagcccaccaagctactgttacagtcaataggaacacaacttcagtttgagtcctgtgctataaatggccaactggacagtaacaggactaatttgctaaaatggcatggtgtaatacaccataccaaaacccttcagtactgagttgtttagaatactccaggatgcctctaatccaggtttagcacagctttctgtatttatcacctgggacaaaytgcatccayggaaacgaccagtgtgggtaatttggcttgttagagtggttttcagccaaggaaagccaggaaagtttgtttcatcattaaaaatatagagctacagctttaacccacattcaaggtacctgcatctgtggtggagagtgctcttgcaatactgttggatcttgcagcacaactctacaactaagaaacatcaacatagagagtggttaaaagaaagatgtcaacagctggcacttgtgaaagaactgtacctccatgaagccaggaaaacgtgcaycacagctctccaccagccttcat

SEQ ID NO: 54804 - DNA, 600 bp, Chicken  19866894307770_4
cacctgggacaaaytgcatccayggaaacgaccagtgtgggtaatttggcttgttagagtggttttcagccaaggaaagccaggaaagtttgtttcatcattaaaaatatagagctacagctttaacccacattcaaggtacctgcatctgtggtggagagtgctcttgcaatactgttggatcttgcagcacaactctacaactaagaaacatcaacatagagagtggttaaaagaaagatgtcaacagctggcacttgtgaaagaactgtacctccatgaagccaggaaaacgtgcaycacagctctccaccagccttcatgtggacttcaacagcactgaaaagcatccacctgagtttcaacgtctcagagtaggcagaatccagaccgagtataatgtcctcttcaaggagcatcaggatgtccaaattagtacaagatcacagaagataactgaccctaaaagggtagcattaaaaaaaaaaatctgtagatgaaaaaaaaatagtcttataaaagattttccatccatgtctctcttttcctgacacatgaactttcagcatccagtgctgcacgaaataactgcaattttcc

SEQ ID NO: 54805 - DNA, 600 bp, Chicken  19866894307780_1
atagcaatttaagtttgaaaacataatttcacatttcacatgagaaagctataaacttaaaattatttagaaaacaataaaaatactgtactgaagaatcactgagagcttacagcacacacgagagtctaagggttggatttaggcagggatggagatctctgccatgtcattctgaaaagtaagtatcttgagtaatggtacaaactgggaagaggtcaagtctccaaactggaactgcaggccttacccattcctagatgtgctcacaggactctatgctgcagtaacaagatacakgtaagagcgctatgaaatctttctattatatggcaagaagaaatacaagtgttcatatgcagaataattttttggttgttccaaggaagtaatttccattatatttgaatgaattggattgaaattaaattctaaaatgacagcattcccattgaatggaaattcttgtctctaagatcaatttttccaagcagttgagcaaattctatcagaatatttttttaatttgagcttgaaagttgagtaaataaatcttgtcattatcacaaattaatttagaaaactttgaacagcctcata

SEQ ID NO: 54806 - DNA, 600 bp, Chicken  19866894307783_1
tttaaggagggaagggtgctttgtctacaaggcaaagttcttcccatactacatttacgttcatacttaaaattttcacttcttcaattataaaatcaaattattgtggtgtacattatctccaaaaaagttccttccctttactctgaaggcagtattttgcttcttcagtgactttggtcttcaacttcactacttttacataacctggtcatttcatgcatcagatgagggagatgcagacagactgtcatcttactgtgacactataatgcttccttttaggtctttcattacgtracagagaagatgcaagatgcccatgtttacatgagaaaaagcccagaattaccaatccagttctaccacttctaaagctggattacctgtttcagctgtacayagcactacaatgatgcagtccttctttcagggggaactcagctgtactaattcttcaaacagattcaaagaaagaactctgaaaagaaacactatttcactaagctaaactattacaaagaaatttgctgagttaaatattttattattgcagttaacaaagatgtagttaactatgggatcttctttctcagataa

SEQ ID NO: 54807 - DNA, 600 bp, Chicken  19866894307783_2
ttgtggtgtacattatctccaaaaaagttccttccctttactctgaaggcagtattttgcttcttcagtgactttggtcttcaacttcactacttttacataacctggtcatttcatgcatcagatgagggagatgcagacagactgtcatcttactgtgacactataatgcttccttttaggtctttcattacgtracagagaagatgcaagatgcccatgtttacatgagaaaaagcccagaattaccaatccagttctaccacttctaaagctggattacctgtttcagctgtacayagcactacaatgatgcagtccttctttcagggggaactcagctgtactaattcttcaaacagattcaaagaaagaactctgaaaagaaacactatttcactaagctaaactattacaaagaaatttgctgagttaaatattttattattgcagttaacaaagatgtagttaactatgggatcttctttctcagataacattatttccctgcaagtgcaagaagtgagcacaaatcacacctcagtatcagtttaatttacataattattagccagaaaaacttggttgctcccctaaaga

SEQ ID NO: 54808 - DNA, 600 bp, Chicken  19866894307786_1
tataaatagccttaatagaagaaactgaatctaaacagcaaaaagaaaatgcaagtgctctcacatcacagttctctacttaccaagaaacagcattagatttgggttgctaccacagattttgctctcaaacctcacatccttcacaaggctgtgaaatagctagcataacttactgcgcatattttcagccataggtcatttttgttgccagagtgctaactcagttcttcctaggggtcaaagggcaggacttggcccccagctaggtgcttcctaatgtaaagatgggcagtttakcaggtcttgtctccactagtccatctacatcattagggatgagtgcatagttggacagtagcttctgctttagaagaaaaacacagcctgcacatcagcctctgtacctaaggcatgctgcctcactgtgaaataacagccatgggcatatactttgaatatttgtacgtacggcatcatatgaaagatgtaaatagctctcggatacagatccaggtagctctgcataaatgaaaccttccacaacacagaattgcagcactgcctataaatatgcccagcacttgttgctgacaaaca

SEQ ID NO: 54809 - DNA, 600 bp, Chicken  19866894307787_1
aacaaagtgattttcattatgccatactcagcacatccatgttgttataaatcatttttttacttttgttttttttttctatttatctaatctaaatctcccctctttcagtttaaagccattaccctttgacctgccactacacacccagatgaagtccctccccagctttcctgcaggccctattaggtattgcaaggccactctctgatttcccccatgcccgctgccttctctcctccaggctgaacaagcccagcccctcagcctgtcctcacaggagacactgtgctacagacyggatgctgtagcaggttccttccagagagtggtgtggtgctcctgtcataggccaaccaaaccagaatggacagtagccttttatggcaggtgctcagcaattcagagcatcatttccatgaaaccaagcccaattaagatatctcaaggtgagcatacaaaaagcaaggcattgcaaattacatcaatagttacttctgaaaacctagattgcacgtaaatttagctgcctgtgtgtgactatgcgtattgattttgattaagtgcaggagaattgatttgggagtgtatctttaggta

SEQ ID NO: 54810 - DNA, 600 bp, Chicken  19866894307798_1
gcagcagattgtggccagcaatgtgtgggcatggaggagccaggcagagcactgcacctctcagggctgtgctgggaaggaaggcgttcaggaacgtgcagagcaaacagggaacgagtggtgcaaaggcttgaaagggagtgtgtgttttgatagggaggaataaatggttcatagtctgacgctgctcttcttgctcacgtcccaggctgagccctgcagtgatgtctgtgcctctctgtcactgtcattgggaggagctggggacaaagtgcacgcagcagctgacccccccccatmgcgccggctggcactggtaagcctgggggagcacctccctttatgagttagctggaagcacgttggttgttatttccttctctcatcctctttaaggaatgggtactgtgctggaagacttgttgtctgggttggtctataygtatggctttggtgacttgaatacctttagcagtgcggagcaacaaccacgttcaggctttgaatgtgacaatggagatcacatgagagtggcagagaaaggcaaataaaaagctgtggcgtagcttctgctgtttcttgttgccttgcagactgatc

SEQ ID NO: 54811 - DNA, 600 bp, Chicken  19866894307798_2
gtgtgttttgatagggaggaataaatggttcatagtctgacgctgctcttcttgctcacgtcccaggctgagccctgcagtgatgtctgtgcctctctgtcactgtcattgggaggagctggggacaaagtgcacgcagcagctgacccccccccatmgcgccggctggcactggtaagcctgggggagcacctccctttatgagttagctggaagcacgttggttgttatttccttctctcatcctctttaaggaatgggtactgtgctggaagacttgttgtctgggttggtctataygtatggctttggtgacttgaatacctttagcagtgcggagcaacaaccacgttcaggctttgaatgtgacaatggagatcacatgagagtggcagagaaaggcaaataaaaagctgtggcgtagcttctgctgtttcttgttgccttgcagactgatcccctggttctgctataggcctgcatgagcccaggagagccatttgatttgtgcctggcccctgtaagataacacttagcgtttggttggagggattggtgctgtgataactgttcctgaaagacgggagtcccagaaaatgg

SEQ ID NO: 54812 - DNA, 600 bp, Chicken  19866894307802_1
ctcaggtgggtcatttccttcttttcccatgtcctttaaattattcctttccttcctcatcttcttttcctccactagcccttctcccctgtcataacatccttcatacccttgatttctcccttactcttttttttttttctttgttccctgttcccttttactgccttatatttgaatttcactatgttcacgaatcctatcttccaaaagacatgtcagccatacggtcagaaaggcaagtggaggcaagcaggagtgcttgagtgggcaccttataactcagcctcagatcttccrgaggagtttagacagctgctgagctttgacacttaatccccgctggttttgagtaggatttagtggcctaaatccttctgaggctctggtcctgaatcagcaatgttatctatcccatgttacagcccctcagcaagagggtcttgaaaacagcaatatggtcttgaaaaacttaagctgttaatgacagaagtgaccaatgcttgtggacacttttcattgtgcttccatcatctgcttcctaattaaatgacaattgtcccggttggtggggacatgcttagtcctgaagccatgatg

SEQ ID NO: 54813 - DNA, 600 bp, Chicken  19866894307809_1
aatctctagaagatatcccttattattgaaaaatgcactcattcattatttattctgattaaccgtgagtgagttgtagctagacacaccttcagggactgttttctcatttttttgtcaggtaaaatagaaaattagtatagtaaagagcaaatttcaaatgttaagacagaaggatattgtgagatatcagttctcactcagctttttattttagtggaaaaagatcaaattaggaagggattatatgaaggcagaaaggcctttgtctttctgaattgccgtcctgtaattgagaawaattgagagttttcctcttatcattcagaatctgtattcattttaatgttgggctgaaattctgccaacactgaaaagtgaagaaatgatctcagtgtatatttcctcatatctactaccttattttagtcaccccgattggaaatcaggaacacttgacattgtcttgtgagtgcaccctgcaaacacattaggaaaatatggcggcgttctgctactttcctattcacttactgaaacggttttgctcatgtactgatcactctgtcgcactgtgaagcaacagatgtaatgcttttg

SEQ ID NO: 54814 - DNA, 600 bp, Chicken  19866894307812_1
actcactgcccatagcagctcggtccctcctggtcagcagctcagagcgtggctgcagctctacactgtgccaatgagttgggtctcacttcactctttgtctcaaggcagtcaatgggtggatcacatcttgctttgggcacgctgctatgctccccaccatttcccagctgtgctcccttctggcagcttgcacagctcagccaacacagaaactcttctgttcctgcgtccccaccgatgctctcaagaagtcccttctcaaatctggctctctcccagccccaagctgtgatggargcttcayttttcatttcctttccaactgatcagggcatctccagctctgttctcaatataatgagcagttactatgaacaatttcatacctacatacaacctgtcatgtcatgacaggactgcaaatttcccttatactcatggcatactgtgatctgaacctaaaataaacacgtttcattcccacagcacagtatataggatgctcccatgaagccctgtttagttttggaaatgcctgtttaatctgccactaacatggcacaaatgatggctttattgactgggtgatgtagtgtg

SEQ ID NO: 54815 - DNA, 600 bp, Chicken  19866894307812_2
gcccatagcagctcggtccctcctggtcagcagctcagagcgtggctgcagctctacactgtgccaatgagttgggtctcacttcactctttgtctcaaggcagtcaatgggtggatcacatcttgctttgggcacgctgctatgctccccaccatttcccagctgtgctcccttctggcagcttgcacagctcagccaacacagaaactcttctgttcctgcgtccccaccgatgctctcaagaagtcccttctcaaatctggctctctcccagccccaagctgtgatggargcttcayttttcatttcctttccaactgatcagggcatctccagctctgttctcaatataatgagcagttactatgaacaatttcatacctacatacaacctgtcatgtcatgacaggactgcaaatttcccttatactcatggcatactgtgatctgaacctaaaataaacacgtttcattcccacagcacagtatataggatgctcccatgaagccctgtttagttttggaaatgcctgtttaatctgccactaacatggcacaaatgatggctttattgactgggtgatgtagtgtgatattca

SEQ ID NO: 54816 - DNA, 600 bp, Chicken  19866894307812_3
ccacagcacagtatataggatgctcccatgaagccctgtttagttttggaaatgcctgtttaatctgccactaacatggcacaaatgatggctttattgactgggtgatgtagtgtgatattcatctccctgccaagctccagtggggacaaggctcctctggtcactgagccaagagaaagtgtgtatattctatctcatggtatcttcaaaggaagaatatattctgggagatatatcttaatggaatgtatttcactttagtcaaacgtaagttttctgagtcagagaaagggtaamtggattcaatttgatagtctctaatacataggaggtctcttttrggctcaaactatatgaagaaacgcatttggagataaaaaatagaagaccaagctgggaagctgacagyaaaaatgtactttttgttccctgcgtttttatcattttcaccgcaatcaaaccatttacttcagagaaaatgatggggcagatgaaaaatccagatgcctcattctgctgcagaggaggtctggaagcccagatgccggcttggactcatcaatggcctcggctctgtctgaggaagcaatggcagca

SEQ ID NO: 54817 - DNA, 600 bp, Chicken  19866894307812_4
tttggaaatgcctgtttaatctgccactaacatggcacaaatgatggctttattgactgggtgatgtagtgtgatattcatctccctgccaagctccagtggggacaaggctcctctggtcactgagccaagagaaagtgtgtatattctatctcatggtatcttcaaaggaagaatatattctgggagatatatcttaatggaatgtatttcactttagtcaaacgtaagttttctgagtcagagaaagggtaamtggattcaatttgatagtctctaatacataggaggtctcttttrggctcaaactatatgaagaaacgcatttggagataaaaaatagaagaccaagctgggaagctgacagyaaaaatgtactttttgttccctgcgtttttatcattttcaccgcaatcaaaccatttacttcagagaaaatgatggggcagatgaaaaatccagatgcctcattctgctgcagaggaggtctggaagcccagatgccggcttggactcatcaatggcctcggctctgtctgaggaagcaatggcagcagggtactggatggtagagaggtcccactctccacagctgctaca

SEQ ID NO: 54818 - DNA, 583 bp, Chicken  19866894307812_5
gtgtgatattcatctccctgccaagctccagtggggacaaggctcctctggtcactgagccaagagaaagtgtgtatattctatctcatggtatcttcaaaggaagaatatattctgggagatatatcttaatggaatgtatttcactttagtcaaacgtaagttttctgagtcagagaaagggtaamtggattcaatttgatagtctctaatacataggaggtctcttttrggctcaaactatatgaagaaacgcatttggagataaaaaatagaagaccaagctgggaagctgacagyaaaaatgtactttttgttccctgcgtttttatcattttcaccgcaatcaaaccatttacttcagagaaaatgatggggcagatgaaaaatccagatgcctcattctgctgcagaggaggtctggaagcccagatgccggcttggactcatcaatggcctcggctctgtctgaggaagcaatggcagcagggtactggatggtagagaggtcccactctccacagctgctacacatggggggttttatttttaagctctgaacacaatttatcaaataacattt

SEQ ID NO: 54819 - DNA, 600 bp, Chicken  19866894307813_1
ccacagaccctgctaaagagtctgtccccttctttcctgtaactcccatttagatactgaaaggcagctatcaggtcttttggacccttctcttctccaggccaaacagccccagctccttcagcctatcctcgtaggagaggtgttctgtcccttgagtcatttttgtggccctcctctggacatgatccagtaggtctatgtccctgctgtactgagtactccacatctggatgcagtactcacgagcgcagagtagaggggcaggatcagatcccttgccctgctggccgtgcttcrtttgatgcagcccaggatacggttggctttttgggctgtgagtgcacattgctggctcatgtccagcttcccatccaccagtacacccagttcttttttygcaggactgtgctccatcttttcatccctcagcttgtattggtagtgaaggtcaacccagctgcaagatcttgcattttgatttgttgaacctcacgaggttcacctgggcccactgctcagcctgcctgtgtcctattggatggcatcccatccttctggtgtgtcgactgtaccccacggcttgttgtcctgagcaaa

SEQ ID NO: 54820 - DNA, 600 bp, Chicken  19866894307813_2
gccaaacagccccagctccttcagcctatcctcgtaggagaggtgttctgtcccttgagtcatttttgtggccctcctctggacatgatccagtaggtctatgtccctgctgtactgagtactccacatctggatgcagtactcacgagcgcagagtagaggggcaggatcagatcccttgccctgctggccgtgcttcrtttgatgcagcccaggatacggttggctttttgggctgtgagtgcacattgctggctcatgtccagcttcccatccaccagtacacccagttcttttttygcaggactgtgctccatcttttcatccctcagcttgtattggtagtgaaggtcaacccagctgcaagatcttgcattttgatttgttgaacctcacgaggttcacctgggcccactgctcagcctgcctgtgtcctattggatggcatcccatccttctggtgtgtcgactgtaccccacggcttgttgtcctgagcaaacttgctgagaggggactcgaccccactgtcaatattactgatgaagatactaaagagcatcagccctagcactgacccctgggggacaccacttgtcact

SEQ ID NO: 54821 - DNA, 600 bp, Chicken  19866894307819_1
tctgctgagccatccctgagctccaggactttaaggtaattatattcaagcacttatttttaggaaatactatatgaagcacttatttttcttcttatttggtaattcgttcatcagcttatcttcaatggtattgcttaactcattataagtaattttataattcttctgcttaagcccactgattctgttatcatcatttcaggaaaattcaagagtacgaacgtcttcaaaccaaaccatctttgttcttagtgctgtaaaaaggtgccaagggcaatggtttgtgtccttgaatartttttgtcatggctgctaactttgcaggcatgggtagataaaaaaaaatacaaaaaaaaaataatagctatttaagtaacactgggtagaagtttgacatcaatttcaagcccatatcccctagaatagaaatgaaagagacaagggattgaagaaatctaaataaagtaagaaaaaaaacccaacaaatatttaaactcctaggaaagagaaagagtggcatgataactcatctctttagagattgctacatgtaggtgaggaacaaaagtatgacagtaagaaaaaaagtgcgttgca

SEQ ID NO: 54822 - DNA, 599 bp, Chicken  19866894307822_1
  misc_feature (1)..(27): n is any nucleotide
nnnnnnnnnnnnnnnnnnnnnnnnnnntttgtaggcaaaatgtatataagctgtgtttagtagtgaataaaccgcccattttgctgctcatcatattggtgtgcgtctgcagtcatttggccctgatcagggctattggtcagtgagcgcagaggcctaacacagggtagctaacatcgttgttgcagaaagcaacagacaccaaattccatgactcattttccttgaagtaggaaaggaagcactgaagaagcccttacagaaagcctaaactgtactggagactatggtgccttttcyagagatagatttggattctcttcaagcctacagaagtgtctgtcacacagataacattttccttgatcttctgttcctgcatggctggtgagaggagcagagtctgtgcaggatttggccattccaatatcacaaggtgaacactcatacgtataaatgtgattatatgcatacaagtcttcaaaactacaatttatatgaaagcctctttagagctaatagatttatataggattttyatgaatgaaaataactctaacaggaaaagaagaagatttctctcactatgacttcgtaaa

SEQ ID NO: 54823 - DNA, 600 bp, Chicken  19866894307822_2
aagcactgaagaagcccttacagaaagcctaaactgtactggagactatggtgccttttcyagagatagatttggattctcttcaagcctacagaagtgtctgtcacacagataacattttccttgatcttctgttcctgcatggctggtgagaggagcagagtctgtgcaggatttggccattccaatatcacaaggtgaacactcatacgtataaatgtgattatatgcatacaagtcttcaaaactacaatttatatgaaagcctctttagagctaatagatttatataggattttyatgaatgaaaataactctaacaggaaaagaagaagatttctctcactatgacttcgtaaatgcagcctacagcttgggagcaatgtgtctggttgcattgtcagagatttctactgatgtatctttttgtgttcttcaaatgagatgtaaaaatcatgtggaagtcttaaaagctcacattgcattaatctatttatgttcttccacgtacattaatttttagtacagtgcaaatatttgtattggcacactatccccctgctctgcagaatttaactggatttgcaaattgtaacaata

SEQ ID NO: 54824 - DNA, 600 bp, Chicken  19866894307831_1
tcctgttgatagcatatagcttttttaatactaaatcaatttgaaggcacttctataatattgtttgatataaaatcagatggagagttttataactaaaatcttgtcataaaatatgactggagaaatagcaaaagaggggtgcagatagaagatgtggtgctgctgaaggcggtacactggactattgtgatagtagccaaaattctgtccattctgttgacagcgcatttttaggaaggttcttattctctaaagttaccttgttagacataagaaatgaattagaaattgagctcrtgcagcaaataccagaacagtctgtccatattttaatgaaatattaccacttgtatacttatatatatatattacttttttattaaacacaacacaaatcctgacggcaggtgaatgttttttgtataattagctagtgcctaaatttaaaaatgtaaaggaaaaggtggggcacatttatctccttcatagtaaaatatcaacttcagtgattcttctgacttcaaaccagacaaatgacaggagaatcaaactcatgaatcttggagtctgggcatctaatattgacaccaaaaacct

SEQ ID NO: 54825 - DNA, 600 bp, Chicken  19866894307831_2
gtccatattttaatgaaatattaccacttgtatacttatatatatatattacttttttattaaacacaacacaaatcctgacggcaggtgaatgttttttgtataattagctagtgcctaaatttaaaaatgtaaaggaaaaggtggggcacatttatctccttcatagtaaaatatcaacttcagtgattcttctgacttcaaaccagacaaatgacaggagaatcaaactcatgaatcttggagtctgggcatctaatattgacaccaaaaaccttttggctctttttgtgatgttayctttctaccttctctttgaaattcttacagttagctgtgatatattgtatattgtttgaaagtactctcatgatgtgcatcatcaaacatcaagtaaaatagtacttttgttttgttttgttttaaacatcatacaaacacaagtgccgttattcagctgtacaaatgtgtgcctgtagcgagctttgagatgctaatcagaggagcttgacttctgtaccctgaagcaaattttaaaactatttcatcattaggtgactacctatacaatgaaagtatggacaaaattacaggaaaatg

SEQ ID NO: 54826 - DNA, 600 bp, Chicken  19866894307836_1
ggggcatggccattcttggggtttgctcccaccccaccatcaatcactaaagccttgcataggggcagctggactgctgctggctggttaaggtggtggcctctctttgtttgggcagctcatccatctcctgatagagaactgttcatcgtcagttgatatctcaagttggatggtaggaaaaactcctcagaaagagtggttgggcactggcacagctgcccagggatgtggtgggatcaccatccctggaggtgttacagagccatgcagatgtggcactgaggaacatggtttagygggccatactggaggtaggtggactagatggtcttttccaaccttaatgagcctatgattttattataggaatactgcagcagcgagtctgtttgttgcatgtctccctggcattgctgggaatggaaagtcaatgtgtgagatactgaaggtayaatcatgtctctggaatgttgctggaggcagcttgtagcaagagagagtcaggatcttgcattgcgacatggccatgagttgtctcactctcacaggagttytgaggagttgcagcaatgggcttttgagctgggtggcagcagg

SEQ ID NO: 54827 - DNA, 600 bp, Chicken  19866894307836_2
ttgatatctcaagttggatggtaggaaaaactcctcagaaagagtggttgggcactggcacagctgcccagggatgtggtgggatcaccatccctggaggtgttacagagccatgcagatgtggcactgaggaacatggtttagygggccatactggaggtaggtggactagatggtcttttccaaccttaatgagcctatgattttattataggaatactgcagcagcgagtctgtttgttgcatgtctccctggcattgctgggaatggaaagtcaatgtgtgagatactgaaggtayaatcatgtctctggaatgttgctggaggcagcttgtagcaagagagagtcaggatcttgcattgcgacatggccatgagttgtctcactctcacaggagttytgaggagttgcagcaatgggcttttgagctgggtggcagcaggagatggagttcccagaaacacagctgacagctcaattaattggtagtgctgggtttcagtacgtgtggttcatgctgccactggctgctggcactggacgggcaccagtgtgtccttgggacattggcctgctctgcaagtgacacctcctattg

SEQ ID NO: 54828 - DNA, 598 bp, Chicken  19866894307836_3
ttacagagccatgcagatgtggcactgaggaacatggtttagygggccatactggaggtaggtggactagatggtcttttccaaccttaatgagcctatgattttattataggaatactgcagcagcgagtctgtttgttgcatgtctccctggcattgctgggaatggaaagtcaatgtgtgagatactgaaggtayaatcatgtctctggaatgttgctggaggcagcttgtagcaagagagagtcaggatcttgcattgcgacatggccatgagttgtctcactctcacaggagttytgaggagttgcagcaatgggcttttgagctgggtggcagcaggagatggagttcccagaaacacagctgacagctcaattaattggtagtgctgggtttcagtacgtgtggttcatgctgccactggctgctggcactggacgggcaccagtgtgtccttgggacattggcctgctctgcaagtgacacctcctattgctggaacccattgttttagggccaagtatgagtcagagggtgctcgatttgtgtctgggggggcatcaccctgcaatggtgtgccctttgagtgggcagg

SEQ ID NO: 54829 - DNA, 600 bp, Chicken  19866894307868_1
agcccagagaagagttactgttcaactgctctggtctttgtggatgctaactgagggagtttgtgtcttaggaggctgggaggttgccatccccactggcatttctcttcatgatggactacaaggacagaggggagtatggtggcccttccacccctcctcacagccaaggagattgagatccttccctctgaaggtcagttcctccacctgaccttgtttaatggaggcagatgcaaggactaaaggcacttaggacccggagctgacagttaatggttgtgcacgtgggaaatctgytgtgagctccacagtggctgttgcatttctatgaaaaatccactgagatgcagcctcaggcctactaaggttgtttgtctcatactcttcaggcatctaaagacagtgctactcttctgcatccagaaaagtttgtcttttctttattcttaaggctcccaggagacaaagagactgtgatagcagtgccattgcctctttgacatttcttgttgcagcagggaaagacagctttgttcccttttctctgctagcagcgggggatgcctgtagagttcaccagggaaaatctggcctttg

SEQ ID NO: 54830 - DNA, 600 bp, Chicken  19866894307870_1
cagccactgtcaggatgtatttttcataaagagagacagtaaagaatgtaaatgccaactgaaacgtccaattttacgctgtgaaaaatacagttagatcacttaggaatttgaaaacagcatttcttccttggctgttggatttggacagaaaacaacgtacccttgccaaactcctcacaaaagccaagctgtactagttctgtgattgacagcattgatggattccatcgttatgtcaaacaattttgtcattcgaagttacctggttaaatcccaatcacttctctgtttgatttrcwytgcagtctgaattatcattactccagggtcacrtaagaagaatgatctttttttaaaacataatgtaacagcattttctaaacagttagttgggtaagattcatgaccataatctctacttgtttattattgattaataacaaaacaaattaaaacaatatgaaatcataatatgcactcccaggtaacagaaattgcttctgataaaatcaattgataaaataactgtaaatctttaaagaaagtatttattaatctttagaaatctttaaaccggtcctgtaagtacatcagcat

SEQ ID NO: 54831 - DNA, 600 bp, Chicken  19866894307870_2
gccactgtcaggatgtatttttcataaagagagacagtaaagaatgtaaatgccaactgaaacgtccaattttacgctgtgaaaaatacagttagatcacttaggaatttgaaaacagcatttcttccttggctgttggatttggacagaaaacaacgtacccttgccaaactcctcacaaaagccaagctgtactagttctgtgattgacagcattgatggattccatcgttatgtcaaacaattttgtcattcgaagttacctggttaaatcccaatcacttctctgtttgatttrcwytgcagtctgaattatcattactccagggtcacrtaagaagaatgatctttttttaaaacataatgtaacagcattttctaaacagttagttgggtaagattcatgaccataatctctacttgtttattattgattaataacaaaacaaattaaaacaatatgaaatcataatatgcactcccaggtaacagaaattgcttctgataaaatcaattgataaaataactgtaaatctttaaagaaagtatttattaatctttagaaatctttaaaccggtcctgtaagtacatcagcatat

SEQ ID NO: 54832 - DNA, 600 bp, Chicken  19866894307870_3
ccactgtcaggatgtatttttcataaagagagacagtaaagaatgtaaatgccaactgaaacgtccaattttacgctgtgaaaaatacagttagatcacttaggaatttgaaaacagcatttcttccttggctgttggatttggacagaaaacaacgtacccttgccaaactcctcacaaaagccaagctgtactagttctgtgattgacagcattgatggattccatcgttatgtcaaacaattttgtcattcgaagttacctggttaaatcccaatcacttctctgtttgatttrcwytgcagtctgaattatcattactccagggtcacrtaagaagaatgatctttttttaaaacataatgtaacagcattttctaaacagttagttgggtaagattcatgaccataatctctacttgtttattattgattaataacaaaacaaattaaaacaatatgaaatcataatatgcactcccaggtaacagaaattgcttctgataaaatcaattgataaaataactgtaaatctttaaagaaagtatttattaatctttagaaatctttaaaccggtcctgtaagtacatcagcatatt

SEQ ID NO: 54833 - DNA, 600 bp, Chicken  19866894307870_4
cagtaaagaatgtaaatgccaactgaaacgtccaattttacgctgtgaaaaatacagttagatcacttaggaatttgaaaacagcatttcttccttggctgttggatttggacagaaaacaacgtacccttgccaaactcctcacaaaagccaagctgtactagttctgtgattgacagcattgatggattccatcgttatgtcaaacaattttgtcattcgaagttacctggttaaatcccaatcacttctctgtttgatttrcwytgcagtctgaattatcattactccagggtcacrtaagaagaatgatctttttttaaaacataatgtaacagcattttctaaacagttagttgggtaagattcatgaccataatctctacttgtttattattgattaataacaaaacaaattaaaacaatatgaaatcataatatgcactcccaggtaacagaaattgcttctgataaaatcaattgataaaataactgtaaatctttaaagaaagtatttattaatctttagaaatctttaaaccggtcctgtaagtacatcagcatatttcttctaaattatacttctcatttctrayacgt

SEQ ID NO: 54834 - DNA, 600 bp, Chicken  19866894307870_5
gtcacrtaagaagaatgatctttttttaaaacataatgtaacagcattttctaaacagttagttgggtaagattcatgaccataatctctacttgtttattattgattaataacaaaacaaattaaaacaatatgaaatcataatatgcactcccaggtaacagaaattgcttctgataaaatcaattgataaaataactgtaaatctttaaagaaagtatttattaatctttagaaatctttaaaccggtcctgtaagtacatcagcatatttcttctaaattatacttctcatttctrayacgtgtatgtttttgtttgcaaaatgaattcttatcactaacaacataaacgctcagcagactcaggactactcatagattctgtactgctaagaaaaaaaatccattccattggcaagtcagactttgtaaagaaactggggtatcgagctgcctgacgagcagaaaggaagatggatgactcttcctgaattaggcgcttgaaacttacatctggtcaaaagagagcataatcaatttgttaaggagttgaatctaacacaggggatgcwttatgataaatattagactgcattta

SEQ ID NO: 54835 - DNA, 600 bp, Chicken  19866894307870_6
cacrtaagaagaatgatctttttttaaaacataatgtaacagcattttctaaacagttagttgggtaagattcatgaccataatctctacttgtttattattgattaataacaaaacaaattaaaacaatatgaaatcataatatgcactcccaggtaacagaaattgcttctgataaaatcaattgataaaataactgtaaatctttaaagaaagtatttattaatctttagaaatctttaaaccggtcctgtaagtacatcagcatatttcttctaaattatacttctcatttctrayacgtgtatgtttttgtttgcaaaatgaattcttatcactaacaacataaacgctcagcagactcaggactactcatagattctgtactgctaagaaaaaaaatccattccattggcaagtcagactttgtaaagaaactggggtatcgagctgcctgacgagcagaaaggaagatggatgactcttcctgaattaggcgcttgaaacttacatctggtcaaaagagagcataatcaatttgttaaggagttgaatctaacacaggggatgcwttatgataaatattagactgcatttaaa

SEQ ID NO: 54836 - DNA, 600 bp, Chicken  19866894307870_7
cttctaaattatacttctcatttctrayacgtgtatgtttttgtttgcaaaatgaattcttatcactaacaacataaacgctcagcagactcaggactactcatagattctgtactgctaagaaaaaaaatccattccattggcaagtcagactttgtaaagaaactggggtatcgagctgcctgacgagcagaaaggaagatggatgactcttcctgaattaggcgcttgaaacttacatctggtcaaaagagagcataatcaatttgttaaggagttgaatctaacacaggggatgcwttatgataaatattagactgcatttaaactttactcaagaattttaaaggtattatttgagcaaaccttcaaaatgagtaacagtttatttgtgcagttattcactgaaatggtctgagatacctgatttaagaaatactctgccttgtcctttacatcctactttwtattttgattagcagttcaccttattattccgtttatttgttctctttaggttgaaagacagaaaatttattatcttgcaytcgtatctaaaggggatataagtaaacatgagctcaaaccattctcatcagg

SEQ ID NO: 54837 - DNA, 600 bp, Chicken  19866894307870_8
ggggtatcgagctgcctgacgagcagaaaggaagatggatgactcttcctgaattaggcgcttgaaacttacatctggtcaaaagagagcataatcaatttgttaaggagttgaatctaacacaggggatgcwttatgataaatattagactgcatttaaactttactcaagaattttaaaggtattatttgagcaaaccttcaaaatgagtaacagtttatttgtgcagttattcactgaaatggtctgagatacctgatttaagaaatactctgccttgtcctttacatcctactttwtattttgattagcagttcaccttattattccgtttatttgttctctttaggttgaaagacagaaaatttattatcttgcaytcgtatctaaaggggatataagtaaacatgagctcaaaccattctcatcaggaaagaagctagaaatggtctctcccaaactagcacttggtttagcttctaaccttactctgttccttatataaccttccagaaagaagtgcgagcatctttaaaggtcataccctgggagaaggcactcaataccataattggataattaattccaactctccaggt

SEQ ID NO: 54838 - DNA, 600 bp, Chicken  19866894307870_9
aaagagagcataatcaatttgttaaggagttgaatctaacacaggggatgcwttatgataaatattagactgcatttaaactttactcaagaattttaaaggtattatttgagcaaaccttcaaaatgagtaacagtttatttgtgcagttattcactgaaatggtctgagatacctgatttaagaaatactctgccttgtcctttacatcctactttwtattttgattagcagttcaccttattattccgtttatttgttctctttaggttgaaagacagaaaatttattatcttgcaytcgtatctaaaggggatataagtaaacatgagctcaaaccattctcatcaggaaagaagctagaaatggtctctcccaaactagcacttggtttagcttctaaccttactctgttccttatataaccttccagaaagaagtgcgagcatctttaaaggtcataccctgggagaaggcactcaataccataattggataattaattccaactctccaggtgatgactcctgaatgctcagaaccacttccactctttgtaaattaaattaattaaaatctggcactaagcattttcagtaa

SEQ ID NO: 54839 - DNA, 599 bp, Chicken  19866894307882_1
  misc_feature (1)..(84): n is any nucleotide
nnnnnnnnnnnnnnnnnnnnnnnnnnnnnnnnnnnnnnnnnnnnnnnnnnnnnnnnnnnnnnnnnnnnnnnnnnnnnnnnnnnncattttaaaagcaaaaaggtttacttctggtttttctagaacactcattaaaatccattcatattttttgtagaattttaatatgtcatttgtatttattaatctgctaagttccactaaattttgcttcatttgcagtctgtgttgtatcaaaactttttacaaattattttcaacttacagtgcctgaaggcaatctgttttacaatcattccmaaaaaaaaaaaaaaaaaaaaaaaaaaaaaagagcttaattagttggctctcttcataccttttttttcctatctttcctatcttggctttctctctgattaacttgatgaatctcacacaaaacataattttgatgctgtgcatgatttgatactgcttcatttcatacaaagtgttgtgacttgagttggaatcttatatttactattcaacccttttgtattgaagaaacactgctataaaggctgttgctgaaaaagctaaagacagagatgctgaaaggcaaattggaaagagca

SEQ ID NO: 54840 - DNA, 600 bp, Chicken  19866894307884_1
tacttagttgcagtgaaagaactactagggtacaagcaaatgtgaagaatccccagaggagctgctggcaacttcgtgcctttcctgtttaggatatttaacttgcatttgttcttgtttatgttagcaatctgctatatttttcctacttaagagactattgcagcagagtgagagtgatagtgtaagtttgctggaaggtgttgtttatagctcagttatttaggtctcttacagtcttgtgttcacttccttatatgctgaagaatgagtgtatacaaatgcaggatgcctgaaagycgaccttgaaaacatggatcaaaatgggagattcaggaaagacctcttaaatagcacaaagaagagaaattattcaytcttcatttccacatattaatcacagcatggtcgtgccccgagtattaaatttcaaatgaaatatccttgtatctttccaactatttctaaataggtggttgtggggcagatgtttgtcacaatattatctttggaaaatctcaagaaggaaatattttgcttttaagaatttcctttgcagactgcagaatttatcaaaaaagctttaaagttctgacttta

SEQ ID NO: 54841 - DNA, 600 bp, Chicken  19866894307884_2
gcctttcctgtttaggatatttaacttgcatttgttcttgtttatgttagcaatctgctatatttttcctacttaagagactattgcagcagagtgagagtgatagtgtaagtttgctggaaggtgttgtttatagctcagttatttaggtctcttacagtcttgtgttcacttccttatatgctgaagaatgagtgtatacaaatgcaggatgcctgaaagycgaccttgaaaacatggatcaaaatgggagattcaggaaagacctcttaaatagcacaaagaagagaaattattcaytcttcatttccacatattaatcacagcatggtcgtgccccgagtattaaatttcaaatgaaatatccttgtatctttccaactatttctaaataggtggttgtggggcagatgtttgtcacaatattatctttggaaaatctcaagaaggaaatattttgcttttaagaatttcctttgcagactgcagaatttatcaaaaaagctttaaagttctgactttaacatttttttatttcatagcaattaattgtttttatttcttgtattccatgcaatttggggataataaattattgca

SEQ ID NO: 54842 - DNA, 600 bp, Chicken  19866894307891_1
agctgacctacagaggatggtgagctttcaacgcaaaaataattgcctctccgtagctcatccatcccaagtcccactgagcagccagaggaagcagagagccctgacacgaatggttcctgccacaaataacccttgaactttgctcagtttctctgcatgctgtccaggatgacttgacaaatggtgttcaaaccaaagagcaggtgacaaggattgcttctggctggcaggtgctcagctgtgactcctggactttgcccgtggaggtctggaatgaagtccccagtccagaggacwtctggaagtctgtctcttgtgtaagttctaaaaagggctcttttggaaagttgtgttccagctgaaggagctgaaaacttgctgctctgacygtatgctgctcaagtctttgtggttcagcgctttaggtcagggtgttgtgtgttgaaggcaatggaagaaaaccctgtscccctcttgcagagccggtatgtgaacgcaaagctttaggaccaaatggtgactygagaattakatggtgtccctgatttccctcttcagttttaagtggatgcagcrttcttcactcacagtctcaac

SEQ ID NO: 54843 - DNA, 600 bp, Chicken  19866894307891_2
agcagagagccctgacacgaatggttcctgccacaaataacccttgaactttgctcagtttctctgcatgctgtccaggatgacttgacaaatggtgttcaaaccaaagagcaggtgacaaggattgcttctggctggcaggtgctcagctgtgactcctggactttgcccgtggaggtctggaatgaagtccccagtccagaggacwtctggaagtctgtctcttgtgtaagttctaaaaagggctcttttggaaagttgtgttccagctgaaggagctgaaaacttgctgctctgacygtatgctgctcaagtctttgtggttcagcgctttaggtcagggtgttgtgtgttgaaggcaatggaagaaaaccctgtscccctcttgcagagccggtatgtgaacgcaaagctttaggaccaaatggtgactygagaattakatggtgtccctgatttccctcttcagttttaagtggatgcagcrttcttcactcacagtctcaactgttgggttgcattgttgtatggggttgaacatctgccccttccagccacaaaagtggctgtgttccagtggcgggtgctttctttctattc

SEQ ID NO: 54844 - DNA, 600 bp, Chicken  19866894307891_3
atgacttgacaaatggtgttcaaaccaaagagcaggtgacaaggattgcttctggctggcaggtgctcagctgtgactcctggactttgcccgtggaggtctggaatgaagtccccagtccagaggacwtctggaagtctgtctcttgtgtaagttctaaaaagggctcttttggaaagttgtgttccagctgaaggagctgaaaacttgctgctctgacygtatgctgctcaagtctttgtggttcagcgctttaggtcagggtgttgtgtgttgaaggcaatggaagaaaaccctgtscccctcttgcagagccggtatgtgaacgcaaagctttaggaccaaatggtgactygagaattakatggtgtccctgatttccctcttcagttttaagtggatgcagcrttcttcactcacagtctcaactgttgggttgcattgttgtatggggttgaacatctgccccttccagccacaaaagtggctgtgttccagtggcgggtgctttctttctattcagggatcttctggggcctggagaagcttcagtatcaggcattacatactgtcagctgctgcagatctcctgggctccct

SEQ ID NO: 54845 - DNA, 600 bp, Chicken  19866894307891_4
ctggcaggtgctcagctgtgactcctggactttgcccgtggaggtctggaatgaagtccccagtccagaggacwtctggaagtctgtctcttgtgtaagttctaaaaagggctcttttggaaagttgtgttccagctgaaggagctgaaaacttgctgctctgacygtatgctgctcaagtctttgtggttcagcgctttaggtcagggtgttgtgtgttgaaggcaatggaagaaaaccctgtscccctcttgcagagccggtatgtgaacgcaaagctttaggaccaaatggtgactygagaattakatggtgtccctgatttccctcttcagttttaagtggatgcagcrttcttcactcacagtctcaactgttgggttgcattgttgtatggggttgaacatctgccccttccagccacaaaagtggctgtgttccagtggcgggtgctttctttctattcagggatcttctggggcctggagaagcttcagtatcaggcattacatactgtcagctgctgcagatctcctgggctcccttcctctcaacatctgcagggccatcttgctttgcctatgcaccatacatagcacg

SEQ ID NO: 54846 - DNA, 600 bp, Chicken  19866894307891_5
gctcagctgtgactcctggactttgcccgtggaggtctggaatgaagtccccagtccagaggacwtctggaagtctgtctcttgtgtaagttctaaaaagggctcttttggaaagttgtgttccagctgaaggagctgaaaacttgctgctctgacygtatgctgctcaagtctttgtggttcagcgctttaggtcagggtgttgtgtgttgaaggcaatggaagaaaaccctgtscccctcttgcagagccggtatgtgaacgcaaagctttaggaccaaatggtgactygagaattakatggtgtccctgatttccctcttcagttttaagtggatgcagcrttcttcactcacagtctcaactgttgggttgcattgttgtatggggttgaacatctgccccttccagccacaaaagtggctgtgttccagtggcgggtgctttctttctattcagggatcttctggggcctggagaagcttcagtatcaggcattacatactgtcagctgctgcagatctcctgggctcccttcctctcaacatctgcagggccatcttgctttgcctatgcaccatacatagcacgggcggacct

SEQ ID NO: 54847 - DNA, 600 bp, Chicken  19866894307891_6
aagtccccagtccagaggacwtctggaagtctgtctcttgtgtaagttctaaaaagggctcttttggaaagttgtgttccagctgaaggagctgaaaacttgctgctctgacygtatgctgctcaagtctttgtggttcagcgctttaggtcagggtgttgtgtgttgaaggcaatggaagaaaaccctgtscccctcttgcagagccggtatgtgaacgcaaagctttaggaccaaatggtgactygagaattakatggtgtccctgatttccctcttcagttttaagtggatgcagcrttcttcactcacagtctcaactgttgggttgcattgttgtatggggttgaacatctgccccttccagccacaaaagtggctgtgttccagtggcgggtgctttctttctattcagggatcttctggggcctggagaagcttcagtatcaggcattacatactgtcagctgctgcagatctcctgggctcccttcctctcaacatctgcagggccatcttgctttgcctatgcaccatacatagcacgggcggacctggccctgccagctgctgcacagcggggccaagcagaactgcagc

SEQ ID NO: 54848 - DNA, 600 bp, Chicken  19866894307898_1
gaagcctgtatttcaagcactgtgaaaagacaggagtttgcactgaaactcagagcagactgctgcacagaacacacgtctctgacaggcttttcaagaagtgtcactgtaggaatagataagggaggatctctgggaagtccttataaatgatcgcattccctctccctccctgacacaacacgacctttgctagattgagctttctgaacagcttttcagagtgggctgcacttctgtgacgcggtgccttctgaagagtaacaaatagcagcatgcctgctatctgctggcagctcrctcagaagactgaagcagatgtgccactgcagagccagctactgtgagatccagctttcttctgcttcctctcccagccagttcccccacaggcctggccatggcttgttccctaactgcactgcaattctcccatgcaggacgtttacctgtaagaagatacttcccactttttcaagttcactgctcccggcagtcactgtgattcagaaagagcagaagggagataatgttagctgagctgtgaaacaaaatgttctacagccaaaaggtgctgctgggtttcctgacccattgagt

SEQ ID NO: 54849 - DNA, 600 bp, Chicken  19866894307899_1
attctattggctaaagtctggtagaaggaaatgagtcccattctaggaatgcagaactgcccatctagttgagatacaaattcagagccacatgcaatcagacttctcagcagttcccaaaacatctcaagtggcagcaggaaaaggcagcttcctttaccatctgtcacaggtattcagccacaaggccgtgaataaaagtttcctgtctctgtatgaaagtgatccaaccttatctgtggtggagatcagatgccccagttccacacatccctttcccccacaccaccctggtcagcrtaggaaaggtatgtgacaaggcttgaagagcaggactggcacattatggtatctccaatctcatccctttcttccacataagcgtaactcatggcatataaacactgtactacatttgcatgccyaggcctcctgtgctacccaataactttctcactctttcacggttctgaagatgatgtggcagtgggtcagatgaacactcatcaagtaacttgaggaaacaagtgacccaggacaggttaataatagcagaggaaatcccagaccaaatagaaattattccactttgttagttct

SEQ ID NO: 54850 - DNA, 600 bp, Chicken  19866894307899_2
ctcaagtggcagcaggaaaaggcagcttcctttaccatctgtcacaggtattcagccacaaggccgtgaataaaagtttcctgtctctgtatgaaagtgatccaaccttatctgtggtggagatcagatgccccagttccacacatccctttcccccacaccaccctggtcagcrtaggaaaggtatgtgacaaggcttgaagagcaggactggcacattatggtatctccaatctcatccctttcttccacataagcgtaactcatggcatataaacactgtactacatttgcatgccyaggcctcctgtgctacccaataactttctcactctttcacggttctgaagatgatgtggcagtgggtcagatgaacactcatcaagtaacttgaggaaacaagtgacccaggacaggttaataatagcagaggaaatcccagaccaaatagaaattattccactttgttagttcttgatttagacaagaaaacccaaacaataacaaaaaaaaagccccacaaccattaagattccacacttctaaacagaaaacaacaacttttgcattttgcgtagtacacacaaaactggtttatac

SEQ ID NO: 54851 - DNA, 600 bp, Chicken  19866894307901_1
ctgtcactgagtgtatggataactttgttcttactttaagagctaccttcatatgcttttgtaattatttccaatttcagttaataggtggctacagttataaaattattcttacaatgcaaatagagacaaaacaaatcttctggttacctcccatgtgcttttcctgaaagataatgtatgtttctataaactatagaggaaatatatgatggtgctccctgaaagaaatattttatcacgacaaagttttccaaccttgggattgtacaattttctgacaatgcccaaacattgcasagggggttttagatgagggaaatgtatgctacctcrcttgtgactgtaacttatgctgtatttgaataataacatttgaataaccaaacaacagcaaatgtgaattagaaaataaaaataataatccagtaggtgctgttcaagtgtttacatggaaagagtgagagtcggagacagtttatcaagttctcttcatgcaagaccatttaatgcaaactactcctcttccggtcttctgatgtgccagatacaaagggtgaggttgtgacctctttatttcactggcagagctgactgaca

SEQ ID NO: 54852 - DNA, 600 bp, Chicken  19866894307901_2
taagagctaccttcatatgcttttgtaattatttccaatttcagttaataggtggctacagttataaaattattcttacaatgcaaatagagacaaaacaaatcttctggttacctcccatgtgcttttcctgaaagataatgtatgtttctataaactatagaggaaatatatgatggtgctccctgaaagaaatattttatcacgacaaagttttccaaccttgggattgtacaattttctgacaatgcccaaacattgcasagggggttttagatgagggaaatgtatgctacctcrcttgtgactgtaacttatgctgtatttgaataataacatttgaataaccaaacaacagcaaatgtgaattagaaaataaaaataataatccagtaggtgctgttcaagtgtttacatggaaagagtgagagtcggagacagtttatcaagttctcttcatgcaagaccatttaatgcaaactactcctcttccggtcttctgatgtgccagatacaaagggtgaggttgtgacctctttatttcactggcagagctgactgacagcaaagggcatgccaacaccttcacacaaaaaaaaa

SEQ ID NO: 54853 - DNA, 599 bp, Chicken  19866894307923_1
  misc_feature (1)..(94): n is any nucleotide
nnnnnnnnnnnnnnnnnnnnnnnnnnnnnnnnnnnnnnnnnnnnnnnnnnnnnnnnnnnnnnnnnnnnnnnnnnnnnnnnnnnnnnnnnnnnnnctggtgcttgagtctcctgagttggatcagcttggtgttcccctcccacctgccttgtggttggatctggtttggaatatatagtaaaatcctcttttcttaaaggcctgcatttataatcgttctcctttttttttttttttttttttccttcaggatcagtaatgacctcaactgcattccttcagtgttgccactgttgccartttctgttgatttataagcttgggttagtcctcacttttctacaaatggtaatgatggcattaaccatattagaacttctgatctgaatctgagatacagaactgtgctttagagatcttggcaaattgcgggtgttgtcttctgtttgcagcagctgtttccttttgtgatatgcagctgtgaaaaagttcaggatctatagtaaattctgcagtcagtacagtatctttttgtcttttactgatctttatttctgagtctacctgagcgtctgcaaagctggttcatagccaatttg

SEQ ID NO: 54854 - DNA, 600 bp, Chicken  19866894307943_1
ataggcacgaatcccaaacgggctgttagtgggagcctctcagtgatcagaaaagtcaatctgtaccaagttatgcaaaatcaattaaaatctgcctggctccattgcaggccagccactgaaacctgcccttgtttgttcagcccatcatgacaacccctaattgctctctatttgggtttttcttatattttttatactgtcatactttctcactgctcagagtctgctgagcacttttgagactgtttcagacctccacttgtctgtaccactgctctgtgatttacttcccatccyggagccattcattagaggggtgcttcgtacatattctatggttattgttacccaaatgacagtgtccacattggcttgtgcaacaataatgacacacggcttgatgagctcctgaatgagtcccagacggaggtattgattaggcggctttggcttaactattgaagagcaacaaaaattgtttattgcaaatatcctatgcggcaacagcaacgattcgtatcacagagccaactatcatgtgaaaaagcagagtcctctctctgatcttcctctaccccaaatgcatgacaactgtgg

SEQ ID NO: 54855 - DNA, 599 bp, Chicken  19866894307945_1
  misc_feature (1)..(49): n is any nucleotide
nnnnnnnnnnnnnnnnnnnnnnnnnnnnnnnnnnnnnnnnnnnnnnnnncaaaataatcagaagatctagcattagctgacctggccaattactccaaatttggaaataaaaggtaaaaatcacagactggaatagactaagaaatttactgtgagaggcttctccttagaaagccaccctaactagatcttctaagctcctcagatacccagaacttgaatggcagctgggaatggctttgattttgtagaagttttattggggaaattcaacctgcacctgcaattagtcagcctgastcttaccagaatggtcagttccttaatttaatgagcattcgaacagtgattcatttcaaagtagaacttggttatattgctgcagaaagaagaaatgacagaggggaacaaagagaatgaggaaatagttgtttcaggctgaaaacagaccaatatgttcctggaagtagactttcagcccctgtgcargcctggctcatgctgagggaggaaytcctgtgaacagttggatcttctgttcctaccagttctcttggctgtatggaccaaagctgtgcaaggctgcaggtactgcccaa

SEQ ID NO: 54856 - DNA, 600 bp, Chicken  19866894307945_2
cttctaagctcctcagatacccagaacttgaatggcagctgggaatggctttgattttgtagaagttttattggggaaattcaacctgcacctgcaattagtcagcctgastcttaccagaatggtcagttccttaatttaatgagcattcgaacagtgattcatttcaaagtagaacttggttatattgctgcagaaagaagaaatgacagaggggaacaaagagaatgaggaaatagttgtttcaggctgaaaacagaccaatatgttcctggaagtagactttcagcccctgtgcargcctggctcatgctgagggaggaaytcctgtgaacagttggatcttctgttcctaccagttctcttggctgtatggaccaaagctgtgcaaggctgcaggtactgcccaacaccacctgctggattgcactgcaggctgtagccatgcaaggaacattttctatgcatttccttattccgtgaaagcattaacacattaaatacttgcatagaaatgtaataataatgatgaacgcattcctgcccaggctttggccrttcctctgacataatatgtcaaggccataaatactttgctca

SEQ ID NO: 54857 - DNA, 600 bp, Chicken  19866894307945_3
acttgaatggcagctgggaatggctttgattttgtagaagttttattggggaaattcaacctgcacctgcaattagtcagcctgastcttaccagaatggtcagttccttaatttaatgagcattcgaacagtgattcatttcaaagtagaacttggttatattgctgcagaaagaagaaatgacagaggggaacaaagagaatgaggaaatagttgtttcaggctgaaaacagaccaatatgttcctggaagtagactttcagcccctgtgcargcctggctcatgctgagggaggaaytcctgtgaacagttggatcttctgttcctaccagttctcttggctgtatggaccaaagctgtgcaaggctgcaggtactgcccaacaccacctgctggattgcactgcaggctgtagccatgcaaggaacattttctatgcatttccttattccgtgaaagcattaacacattaaatacttgcatagaaatgtaataataatgatgaacgcattcctgcccaggctttggccrttcctctgacataatatgtcaaggccataaatactttgctcatgctgatgggtgtttagttctgcag

SEQ ID NO: 54858 - DNA, 600 bp, Chicken  19866894307945_4
gaccaatatgttcctggaagtagactttcagcccctgtgcargcctggctcatgctgagggaggaaytcctgtgaacagttggatcttctgttcctaccagttctcttggctgtatggaccaaagctgtgcaaggctgcaggtactgcccaacaccacctgctggattgcactgcaggctgtagccatgcaaggaacattttctatgcatttccttattccgtgaaagcattaacacattaaatacttgcatagaaatgtaataataatgatgaacgcattcctgcccaggctttggccrttcctctgacataatatgtcaaggccataaatactttgctcatgctgatgggtgtttagttctgcagcctkacagaagtcagcatgagatgaaagagttgcacctcttgcgagatgaaatccacccattcttgatcaagtgtatgccttccagagtaataaaagcagtgtagcaactaatcctgtaaataggagatcaagcagaggaatgagaaagcgtccattgcctgggaagaaggcctggcaaagctcacggtggtgaaaccaaatggaaatgttgcaaactttcacctagaataaa

SEQ ID NO: 54859 - DNA, 600 bp, Chicken  19866894307945_5
gtgaacagttggatcttctgttcctaccagttctcttggctgtatggaccaaagctgtgcaaggctgcaggtactgcccaacaccacctgctggattgcactgcaggctgtagccatgcaaggaacattttctatgcatttccttattccgtgaaagcattaacacattaaatacttgcatagaaatgtaataataatgatgaacgcattcctgcccaggctttggccrttcctctgacataatatgtcaaggccataaatactttgctcatgctgatgggtgtttagttctgcagcctkacagaagtcagcatgagatgaaagagttgcacctcttgcgagatgaaatccacccattcttgatcaagtgtatgccttccagagtaataaaagcagtgtagcaactaatcctgtaaataggagatcaagcagaggaatgagaaagcgtccattgcctgggaagaaggcctggcaaagctcacggtggtgaaaccaaatggaaatgttgcaaactttcacctagaataaacaatctgcatcagctggaagtgctttccatcgcgctggttcccaggaacagggttgcatcattttctcgac

SEQ ID NO: 54860 - DNA, 600 bp, Chicken  19866894307951_1
tcttcacacaaagtagcacagcctgaaatagaactcagacacttgccattttataaatgttcagatttgtgaccaaagccgtgtctaaatatctctaaaaagtaagaagggtacatgcaggaactgcaaaatctcatagcccttgaacatcatgactcaagatccagaatgtactaagctatttctatagctggcatgatgaagactgcttctggaatatgatcttgaggtctgaagtcttcaccttaagaaggatgtcttaggtgggaaacagttcacaggagatggtagaaacacaayctgtaatccacaaactgtacaggaagataaagaacctctcatcctaaccagtttagtcaagaaaaggttaaagagtgactttatcaaaaagcacctataatcaagagtagtcttttggtaatatttagcaggaaaggcaataatgagatccagtagtttgaaaccgagctcgactaattcaaactataaatagggcacttaaaaaaaaaaaaaaaaagaacagcaaataaggaggataattatgcattttaagcactgacagaacttaggaagaaaccttatatcctccctaccccttga

SEQ ID NO: 54861 - DNA, 600 bp, Chicken  19866894307954_1
tttagtgctggttgtgagttggggattactgatagtaccccaaaggcatttgggtgagaaggcagatgcaagttctttcttgctcaggcgagcagtggaagctccagcacagagatgtgcagcaaatgactgtgcttgtagttgttccatagtacttatgaacaagtatatgaaagttcctgtaataaatgcttagaatgaattgagttttaggctgcatgcatttaatgatgaaacctactctttacgtatcagaaacaggataagaaagcctttaagggacgtgtatctcaaggaacrtttccacggcctgcccaggaaggctgtttgattgctgatcttttgcaccgtgtgttttttctaatactctatataagctttctttattttacttcaagcctattaagttctgcttgttctgtcaccaattagagagaataatctgttcttggcttctttagaaaaattctttatgtatactaatctggataccatttcttgttatatttcaaataacagcttttcttgtgtatgctactgtctgaacttctcatcctgaataatgtagttactcgaggtctgattgactgtgagttgagt

SEQ ID NO: 54862 - DNA, 600 bp, Chicken  19866894307959_1
tgaagcgcatggtcccacgattctgcaagctacaggccctgttaaacgcaccttagaatttcctgactgctgcaggagcaccgctaggcatagaaacacaacacgctcttcttgcaagtcatttccctttttgtttgaaggtatgttcatggggggaaggggaacgaggctcgagcaatcatgcactgagagagtcctcagtgaacagagagacctcagtgaagtctgggaattgagctccttggataggcgcatctctgacctcatgggtttatttaaatgattgcatatggcctacaygactggagcaggaaacgcagttatttccctcatcacagaattagataaattacagacaaagaagaagagccgccaggtcgtttagcctgatggccaagttaattctctgtacgctctgctgccgcagtgggggccccaaacccagccagcgcagtgcatggggtgtagggacacaggcatctccatcagagagccctccaggttgcagggcagccatggcaccccccccccccacgctggggacgggcacgtggaatgaaggctgcatggcgcagggctcagcgggcaccgcttgctgca

SEQ ID NO: 54863 - DNA, 600 bp, Chicken  19866894307960_1
attgtttttaaagcactaatagctttaaaaatattttaccaccttttgattgcaacaagatcaagtcaatattctttaatttccttcaggaagtaagggcaacacaaaatataacataaaaagtggtaaattattgttattttgctgtttttgaatacttgagaactattacttgcagaaagtaataaacaagctttaaatcttataactctggagaagaatagatatcagatataataagaaacatttactttttgaatgatttaagagcagaaattaggacgaaaaatgaaaagaagwaaaacaaacctagaaaaagccacataagaatatcttgcctcttggtaaaaccagtccttgctctaccagtctgtagtgaggaaaatggactggatgtacacaaagacagaattaggtccagcaaagaaagcagaatgtagagcagcaatgtgctatgcacaaactgaccctcctgtgaatctctgactgacacagtttccccagtcaggaagaatttgtctctgcatctgacagaagttcatttgcccagggaaaaagtcaagaaatggataagtatttacttgtttttagttttaagtc

SEQ ID NO: 54864 - DNA, 600 bp, Chicken  19866894307967_1
ttacaatagacagcctgctgagacaccaaaacctagacaaagtaggagaaattgtcatttaaaaggcaataactgtctgttgcagaactcagataatctctttgaggcatttatccacatccaagcaggttgcccagtatccaaagctggacaaccaaaggctgattgaatcaccagcaaaatatagtaaagattcctttgcctttttagaaggatcttagccgtgctcccaaaaatgtttatgtgacaagcgtgcaccaatagtcctgacaagagtctcaagcttttaaatataccaartttaactcgttaacaggacaaatgataaaacagtggaatctttggaaatgccactcacatttcacattataatctatggattattgttatgttcacaggtggctcttaatgagaactttagagctgaacataatgcaagaacactgttgatctcagagaagaatcaaaaatgcccttgttcatcccccttttcagggatgaggagccacaagacaatgaaagaatttgcagagataaaataattccggggaaggagcggaggggggaatatttacttgcatatgtttttatccttaaaag

SEQ ID NO: 54865 - DNA, 600 bp, Chicken  19866894307969_1
atgctggtgctttatgctatctcactagcacacctgaacctgttctcacataaatctcaatagttgcaaggaatgtattggttatggatagcatagttacttacgttttgtaaacaagtgtaaattcagaatgattttatcagtatggacagagacctaaacttttaacagataatacacagaaggcaaaacaaatatacacctcataaaaaactactgcagattgcagaaccacccatttctttcaatcttctgctgagagaacagaacaccacacacagtactgcaactacaaaccarcagtggtttgatgccttacaacacttacctggcctttgcaggcacagtgtgtctatcttattaattacaacacagtttgaaacaraagctgtccagtatagatttccaactattcaaaagaaccagttgaaaaagactcctccagtctcacagctactatctggcaaatttgcccaaactatttcagctactgatgtttttcgttttaataatgatcaaaatytgcactatgaagctaataaataaaactttatatttacttgtacacaggcattaaagtttaagtgattgcaaatctca

SEQ ID NO: 54866 - DNA, 600 bp, Chicken  19866894307969_2
ggatagcatagttacttacgttttgtaaacaagtgtaaattcagaatgattttatcagtatggacagagacctaaacttttaacagataatacacagaaggcaaaacaaatatacacctcataaaaaactactgcagattgcagaaccacccatttctttcaatcttctgctgagagaacagaacaccacacacagtactgcaactacaaaccarcagtggtttgatgccttacaacacttacctggcctttgcaggcacagtgtgtctatcttattaattacaacacagtttgaaacaraagctgtccagtatagatttccaactattcaaaagaaccagttgaaaaagactcctccagtctcacagctactatctggcaaatttgcccaaactatttcagctactgatgtttttcgttttaataatgatcaaaatytgcactatgaagctaataaataaaactttatatttacttgtacacaggcattaaagtttaagtgattgcaaatctcaggaaccaatttcagagcacatcagctacgtcacgctaattatttatgtcacataaatgctgtaacagaagatgcaggttggccct

SEQ ID NO: 54867 - DNA, 600 bp, Chicken  19866894307969_3
ttgcagaaccacccatttctttcaatcttctgctgagagaacagaacaccacacacagtactgcaactacaaaccarcagtggtttgatgccttacaacacttacctggcctttgcaggcacagtgtgtctatcttattaattacaacacagtttgaaacaraagctgtccagtatagatttccaactattcaaaagaaccagttgaaaaagactcctccagtctcacagctactatctggcaaatttgcccaaactatttcagctactgatgtttttcgttttaataatgatcaaaatytgcactatgaagctaataaataaaactttatatttacttgtacacaggcattaaagtttaagtgattgcaaatctcaggaaccaatttcagagcacatcagctacgtcacgctaattatttatgtcacataaatgctgtaacagaagatgcaggttggccctgtatcaaaagaaaaagactaagagacaataaaaagatgaactcacagtaagcaaattttagagagtggaatcaaagacactgaagagaaaaacatctcaaaaccattaaaataccttaaagttttaacaactgtccag

SEQ ID NO: 54868 - DNA, 600 bp, Chicken  19866894307972_1
cccttcattcacaaccaccaatatatgcagtcttttcctgggggaatcatccatttaccatcatgaacaggagaaaacactggcagctgcactctcttactattcacaccaaaagcaaattagatacttgaatattaacaggaacaaagaagagcaaagcatttcttcttttactcctccgcccacataagtaccaattctctgcagctgtcctctgcaagcagagctttcccctttacactgggctcactgctctcttgtcactcagagctcagcatcaagaattagcaactcccagtyttcctgggagggaaggggaattcagtttcaccatttaatttaccaaatcatctgatagacttacaggtgagtgatgtaatagacaacagcccagccttcaataggaaatccctgagaagaaatgtagtggtagtcgatctggaagaagagaacataatatgctactttktaagactttcatcagcaccccatccatagccataaaattggtctgctttgacagccatctcaagtttcattttcagtgtgtacaaactctaatttagataaagcttgctcccaacattctagtaytgttta

SEQ ID NO: 54869 - DNA, 600 bp, Chicken  19866894307972_2
tttactcctccgcccacataagtaccaattctctgcagctgtcctctgcaagcagagctttcccctttacactgggctcactgctctcttgtcactcagagctcagcatcaagaattagcaactcccagtyttcctgggagggaaggggaattcagtttcaccatttaatttaccaaatcatctgatagacttacaggtgagtgatgtaatagacaacagcccagccttcaataggaaatccctgagaagaaatgtagtggtagtcgatctggaagaagagaacataatatgctactttktaagactttcatcagcaccccatccatagccataaaattggtctgctttgacagccatctcaagtttcattttcagtgtgtacaaactctaatttagataaagcttgctcccaacattctagtaytgtttagtgtcatcaaggtcatccccattcactccgtttcctaagcattagtgaatatactttacacaacctacattgttgctacacagcttccatgcataactacagctaaacaactgcatttttatcttcatgcattcattgttcacgttcagttgcactgacacacttttta

SEQ ID NO: 54870 - DNA, 600 bp, Chicken  19866894307972_3
ccagtyttcctgggagggaaggggaattcagtttcaccatttaatttaccaaatcatctgatagacttacaggtgagtgatgtaatagacaacagcccagccttcaataggaaatccctgagaagaaatgtagtggtagtcgatctggaagaagagaacataatatgctactttktaagactttcatcagcaccccatccatagccataaaattggtctgctttgacagccatctcaagtttcattttcagtgtgtacaaactctaatttagataaagcttgctcccaacattctagtaytgtttagtgtcatcaaggtcatccccattcactccgtttcctaagcattagtgaatatactttacacaacctacattgttgctacacagcttccatgcataactacagctaaacaactgcatttttatcttcatgcattcattgttcacgttcagttgcactgacacactttttagttttactttcatytgaaatcagattcaaacctgctgactccaggtttttgtaggtgttatcctagcatgaacttgatggagaagatcaaaactggcacaaacaggaggattaaatgcttgtcac

SEQ ID NO: 54871 - DNA, 600 bp, Chicken  19866894307972_4
gcaccccatccatagccataaaattggtctgctttgacagccatctcaagtttcattttcagtgtgtacaaactctaatttagataaagcttgctcccaacattctagtaytgtttagtgtcatcaaggtcatccccattcactccgtttcctaagcattagtgaatatactttacacaacctacattgttgctacacagcttccatgcataactacagctaaacaactgcatttttatcttcatgcattcattgttcacgttcagttgcactgacacactttttagttttactttcatytgaaatcagattcaaacctgctgactccaggtttttgtaggtgttatcctagcatgaacttgatggagaagatcaaaactggcacaaacaggaggattaaatgcttgtcactacctccattaatgatatatttcagtggaaaggcaaagtcaagacaatacaatagagacttgatgtaatgaatgtgttaaagcttataatattgtgtttgctacggtacagctcactgtgccagctaaagaagcacctctcaattctacaaacaagatccccattcattaacatttattgtaagccacg

SEQ ID NO: 54872 - DNA, 600 bp, Chicken  19866894307978_1
atagctagcagtgtaatgcacaaacattcttcgcatacgcactcctggtttctacacctcgtggatccaacatggtgggcaatgattccttcccagtctgtccaattaaagcaatttagataaaaacaaactgcttttcattttatttatttttttactcatttcatgaaaattggactttattgtattcgtttcatgacagacatttttaaggaagtattaactgaagattacttctcccccctcagtaacagtacgtacaaagtttaggcttccactgcctgctgaggccttgctctrtgagacagtccacgacatacaaaaactgccatacaagacaccaaccataactttttgagttatgtcactttattgagggagtgaaaagaatcacattctctagtagtcttggaacaatgcaaatggtgaacagaagacaaaaatagatgtaattggttccgaaaagcatgaacatctgtagagaatgtgttgcattattcctaaggactcttgcttttgaaaaaaagtacatgttctgtatatacaagtgtcagtgcaatagccaataaagcaatcaatcagaaatataaaaatatccta

SEQ ID NO: 54873 - DNA, 600 bp, Chicken  19866894307978_2
tgtaattggttccgaaaagcatgaacatctgtagagaatgtgttgcattattcctaaggactcttgcttttgaaaaaaagtacatgttctgtatatacaagtgtcagtgcaatagccaataaagcaatcaatcagaaatataaaaatatcctagatacaaacttaaaaagatgtttgaaagctgacaatatcagtattctgatatttctgtatctcagagtacgatcaccgggatgagctgttctgatgaggtaaaagacagtaaatgctctgtgagaacacagagccattagttctttyccgtaagacaagaagatagagcacccaatgaaatggcaagtcttcgctgcaagtgcccacaggaagtgaagttacagtctgtgagcacgactgcattcctgcaccattcacgtttgccatctttgccaacagctacaccagaaaaaacttgcatattctcccacgcccccccaggttcagcataaactgcacgtactgtgcagacacaccaaactgacagctgcttcaaacacagacaagatctacaaatgtccaaaaaccacttagtcattctttcctttattggttgcaaatcttttt

SEQ ID NO: 54874 - DNA, 600 bp, Chicken  19866894307990_1
gactgtggagcagcacgtgtcctcccatgctctgccttttgtgggacaggctcattggtttatagaagaaactcaaagggacaaatatgtcaagcacttaagagaaaagtcaaaatacgaaggttctatgtagttatctgtttgttttaattgagcagcagtggcaatgtttgcagtgtgttgaatcagcaggcagtaacttgcatggcatatgtcacagtttgctctataatcacctcacattatcaaaaagcttgccatgaagctaaccttcagccatggaaggtattgaacagctaytcccctcatgtaccagtgataccatttgcagtctcattaaagcwtgtctctttctgaaacatcagggttgactcctgtggggattaggtccactgtgaagtaaggagcatcactgggagcttctgacacttggtggagatgagcccaattgctccacttctaccccagctggggtactgggtggcctcattctacttctctggtgttagtgctcaccaagctgtccctgggctgcttgctcgctaggtgtgttgtttggttgtgcagaagtgggaaggaattaatttgaggatttcagct

SEQ ID NO: 54875 - DNA, 600 bp, Chicken  19866894307990_2
gacaggctcattggtttatagaagaaactcaaagggacaaatatgtcaagcacttaagagaaaagtcaaaatacgaaggttctatgtagttatctgtttgttttaattgagcagcagtggcaatgtttgcagtgtgttgaatcagcaggcagtaacttgcatggcatatgtcacagtttgctctataatcacctcacattatcaaaaagcttgccatgaagctaaccttcagccatggaaggtattgaacagctaytcccctcatgtaccagtgataccatttgcagtctcattaaagcwtgtctctttctgaaacatcagggttgactcctgtggggattaggtccactgtgaagtaaggagcatcactgggagcttctgacacttggtggagatgagcccaattgctccacttctaccccagctggggtactgggtggcctcattctacttctctggtgttagtgctcaccaagctgtccctgggctgcttgctcgctaggtgtgttgtttggttgtgcagaagtgggaaggaattaatttgaggatttcagctctgctgtggaaacagaagtacccttacttgtctaacattattgg

SEQ ID NO: 54876 - DNA, 600 bp, Chicken  19866894307995_1
cctgaaagtggagagctgcagaaagcaagctcccctggttctgctgctcacaaaacaggctcacgggctgcgggctcctgctgcactgctgagatcctctcctggttaatgtttcctcctctctgtttctgccctggccactgtgttgtgtgtccaggtaaatgggaggacagaaagcagcgtggaaactttgaaaggcgttcagaagtccaagtaggtcattcattgctgaagcaatggtcagggcattagggatgagatctcctatttagcctttttttcactctttcttggcacgcrtgctgaaagtttggcacttgtccacttgtttggcgctcgcctaaaacaatggagagtaaactgagctgttatggaataggaacacagccttgattaggctgctgaaagcccctttatccctcctgtcagagagggaggataagtcacacagatcagaaatcttttaaactcctttgcatgggtgaggatggtaggatatagtttcaagctgccttgtcctcccagttcactgctgaaaggttctccctgatttctcctatggacagcatgaatcatctccgatctagtttgtgttactgg

SEQ ID NO: 54877 - DNA, 600 bp, Chicken  19866894307997_1
tggttgttggaaacacctattccagtttgctcttagctcctgctgttaaaaaaagtctatgaatacatgtaatcaaatgatcttgtacatgttttatcaagctactctccatgttttggacaatttatgtaactaagatgtggtgttgtctgtgttatatatatttcttttgttttggccaggagacccaagactgattttgcttgatagcttgatagcttaaaattccatagtggagaggatttcttattgtttgaacagtcttttatacgtatttctgtggtgctcatcacttcagtrtctgtgcaccaagtctttagctctgccagtgagatccattattcagcaaaatctaagccagtatgtaaatgcagtcaagtgatggagatttgtgtattttataaatgattttaacactgagtaaccaattgtacaattcattgtatatgtctggagacataaaaccacaatattctgagaaagggctgtgccaatgtaagaggaatttaccttaaggctctctgtcactagtgatttactagctttagttgtttaacacattatctgtatttagtagtgattatttatttaccactccga

SEQ ID NO: 54878 - DNA, 600 bp, Chicken  19866894308003_1
aggggacacgttggggctgcagcattcggtgggactgacacgagtgggtatcaatatggaaaatcagttgtgtgttcccctcttattcccttcccctcctctttatcggtgcagaatttggggcatcgcccggagctgacggccctgcagcggcacgggggtgttgctttccccattgcctccccacgcagggatacggccctcggaatcctccagcgatgcgttctcgtggggagggggaattgtgtcccggcgtggaaatacgcggcggcggggcccgacccctgggcagctccacgmygctttttggagtgagttcggtccgtgggaggacagacaggggactgacaccccctgtgtacatttcctatgtcaggggatgtgtgtggacttcttttttttttttttttttttattatattattcgctttttttttttttctgcggggatttagagcctttcacacatgtataataacaataatcacagcaataataatattaataatagtagagaaaagaaagggtccatacaaatccctcccgaagaggagggggggcagtgagaaggcacaacccctcgcagctataatgtcaccg

SEQ ID NO: 54879 - DNA, 600 bp, Chicken  19866894308003_2
ggggacacgttggggctgcagcattcggtgggactgacacgagtgggtatcaatatggaaaatcagttgtgtgttcccctcttattcccttcccctcctctttatcggtgcagaatttggggcatcgcccggagctgacggccctgcagcggcacgggggtgttgctttccccattgcctccccacgcagggatacggccctcggaatcctccagcgatgcgttctcgtggggagggggaattgtgtcccggcgtggaaatacgcggcggcggggcccgacccctgggcagctccacgmygctttttggagtgagttcggtccgtgggaggacagacaggggactgacaccccctgtgtacatttcctatgtcaggggatgtgtgtggacttcttttttttttttttttttttattatattattcgctttttttttttttctgcggggatttagagcctttcacacatgtataataacaataatcacagcaataataatattaataatagtagagaaaagaaagggtccatacaaatccctcccgaagaggagggggggcagtgagaaggcacaacccctcgcagctataatgtcaccgc

SEQ ID NO: 54880 - DNA, 600 bp, Chicken  19866894308014_1
gatttagacacatgggaggaaggaaccttgaggggcctcaagtccaagctactactcaatgcagagccagcttaaaagtcagatccagttgctcagggctttgttcagtcaagttctgctcccacagcaagaattcactgagtcagacatcctactcagcccagccaagtaacaatggtgcaatccattccagtgcttgaccattctcactgcaaaacaattttcctagtagctaaccaaatttctcttgccacaacttacagccattactccttgtcccttctctgtctatctccaaaragcctgtttcctttactcattaggttgctgaagatagcagcaagacctcccccattccactacctttgtcctccctcctcaaagctgaaaaaatccatccacctcagctttccaagaactccaatctcctaatttcctaggcggtactctgacggaattcattcagtctgtggacacctttcttgtattaggtaaccctaaactgtttcagttccagtattcgaagtggtacatacagaaagaaccagttaagttaaaatcatttattgtgacatttgggatacttccttgaaaagttca

SEQ ID NO: 54881 - DNA, 600 bp, Chicken  19866894308022_1
actttgtaagcatcagtaaaaaagacaaagaaaaaacatatttttggacatgcctcataggcttggaagttatttgaatgctccctaagagactcagtgggtggaaatttagtaacaccaaatactctcagtctactaattgtcctcaagagatttttcttacagctttagttgtatcatgtattcagttacatggtttgtctgttttgggagagcaaggtagttgctttttttgaagtgttagatgaccacgtagtgtacaatgaaagcagtagagtttgttaatttaaaatgagtccyaaagactttaatattccttgcactatagcaacacagaaagtcattcctatttaattagttaggccaaagtatttgcaaaacaattaagaatgtaatttaattttggtgtttggtaaacatccagggattcattcactctgaacttatgacctacatgttgagtttactttgcaaagtatcattaaaccagtcagttagaacttacaattaaaatgcatgacatggaaagtctaataagtatatattacaaattagaaatatgcattagaaatttatttttaaaaacaacttgacacttta

SEQ ID NO: 54882 - DNA, 599 bp, Chicken  19866894308032_1
  misc_feature (1)..(3): n is any nucleotide
nnnagtccatatcatagaaatatacattcctcaaggcccacagttaagtgattacatgcttcctgctatcttgaaagtcagacatctttgccatgttcaaatcagattaacatctaaatccttcgttaccattactgtctgtacatctacatctggtttctcattttagaaaatacttatcttgtgaacaggcttcatggaggttatatgctcaaggagcaagaatactaaccaacagcagacacctactctgatcaaactgatcaacacaagaccctttcccatcatcagaattcatcrtrgagaacctaactgtagcaaatcatattaaacatttatatcatccccwcycccccccacccccccatcttacaatccaaaatagaatggctaggaagaataacaacagcacacagatttaatgttaactccttggaatacttaatagttacagtaacttgtggctcagactacaaaggaaatgacagctagactataccttagcagtcttttccaaccttaatgattgtatgatccctgctctttattttatgaatcttttaaactccagaagcaagaagtttccctccataaaaatc

SEQ ID NO: 54883 - DNA, 599 bp, Chicken  19866894308032_2
  misc_feature (1)..(1): n is any nucleotide
nagtccatatcatagaaatatacattcctcaaggcccacagttaagtgattacatgcttcctgctatcttgaaagtcagacatctttgccatgttcaaatcagattaacatctaaatccttcgttaccattactgtctgtacatctacatctggtttctcattttagaaaatacttatcttgtgaacaggcttcatggaggttatatgctcaaggagcaagaatactaaccaacagcagacacctactctgatcaaactgatcaacacaagaccctttcccatcatcagaattcatcrtrgagaacctaactgtagcaaatcatattaaacatttatatcatccccwcycccccccacccccccatcttacaatccaaaatagaatggctaggaagaataacaacagcacacagatttaatgttaactccttggaatacttaatagttacagtaacttgtggctcagactacaaaggaaatgacagctagactataccttagcagtcttttccaaccttaatgattgtatgatccctgctctttattttatgaatcttttaaactccagaagcaagaagtttccctccataaaaatcat

SEQ ID NO: 54884 - DNA, 600 bp, Chicken  19866894308032_3
gattacatgcttcctgctatcttgaaagtcagacatctttgccatgttcaaatcagattaacatctaaatccttcgttaccattactgtctgtacatctacatctggtttctcattttagaaaatacttatcttgtgaacaggcttcatggaggttatatgctcaaggagcaagaatactaaccaacagcagacacctactctgatcaaactgatcaacacaagaccctttcccatcatcagaattcatcrtrgagaacctaactgtagcaaatcatattaaacatttatatcatccccwcycccccccacccccccatcttacaatccaaaatagaatggctaggaagaataacaacagcacacagatttaatgttaactccttggaatacttaatagttacagtaacttgtggctcagactacaaaggaaatgacagctagactataccttagcagtcttttccaaccttaatgattgtatgatccctgctctttattttatgaatcttttaaactccagaagcaagaagtttccctccataaaaatcatatcccctcaactatgctttagacatctgtgtttactaattttactttt

SEQ ID NO: 54885 - DNA, 600 bp, Chicken  19866894308032_4
ttacatgcttcctgctatcttgaaagtcagacatctttgccatgttcaaatcagattaacatctaaatccttcgttaccattactgtctgtacatctacatctggtttctcattttagaaaatacttatcttgtgaacaggcttcatggaggttatatgctcaaggagcaagaatactaaccaacagcagacacctactctgatcaaactgatcaacacaagaccctttcccatcatcagaattcatcrtrgagaacctaactgtagcaaatcatattaaacatttatatcatccccwcycccccccacccccccatcttacaatccaaaatagaatggctaggaagaataacaacagcacacagatttaatgttaactccttggaatacttaatagttacagtaacttgtggctcagactacaaaggaaatgacagctagactataccttagcagtcttttccaaccttaatgattgtatgatccctgctctttattttatgaatcttttaaactccagaagcaagaagtttccctccataaaaatcatatcccctcaactatgctttagacatctgtgtttactaattttacttttta

SEQ ID NO: 54886 - DNA, 497 bp, Chicken  19866894308035_1
cacacatacctcattcatgacagtatctgctccaatgatatagtcgctatgaggtctgagcccagctaatgcagcaggagagtttggttccacttcctagttttaagaaggaaagttacaaaacattatagaacagccagggtgctgcagaacagcttacatacacacttcatacaagtttggagtcgggcagacaagcctttcaactctgatcaagttttcaacccagggagtaaaacagacctgagactgtaaaacaatggctggatgacagtctcgtaagttactgttacaaggggwtctgaatactgtgcagtaaaactgatagaaatataagacttgctaatgctctcagacactgttttacttcaaaagcctttcaaaaaacaaagccaatgaacagagaacagagcaatttcatctcaggccttgcacactcccttgcaagtttctttccagtaaagagactgagaaagtttaacagcaaacaacaaatt

SEQ ID NO: 54887 - DNA, 600 bp, Chicken  19866894308038_1
gtgctgtggaggcacacatgtagtgcagaccccgggagcacatgctaaggacacacatgagcagcagtgtgtacagctggtggtgcacacatacggcatcgcacagacacacacagaagcacagagttcagtgtgtcccacacgtgtgtttgtacacctgttgtgcacatgggatggtgcacacccatttaatacacatccacgtgttcacacgcacagctacatggctgtaattcacacgtgatggtgagcacaccgagcacactggcactgtgcacccttgaagtccatgtgtgcacmcaacacacccgtgtttgcgtacacatctgggggcatcagcggggtccccgcgtgcccacctcggcatagataatggggggttcaaaagtggtagaagagccgggggggtgggtgctgggggtcacagcttgcagctgggcataggtcagaccctcgctgtcaccgggggacacctggggacacagggacagcagtgtgaccatgggatcccaacatcccaactgaggggaggacggcactgtgtaatgtgtggtgggctgtccaggagaagggggttgggattgtggggtggtgtagatt

SEQ ID NO: 54888 - DNA, 533 bp, Chicken  19866894308040_1
gtgagagcactttgtggttgcacttcaagagctctaagaaataccacactctcaaggcattctgtgccttctgctttgtcctctgtgtgtgtagctgtggttgtttcagaaggaaatgaagcagttgctaagggaagtatgtcgtcgtgcaggaggagtttcgacagagctgtacaaagcacacacacacagttttctttcctctctctccccagtgctgatccacgtgcctttgtttcctcctccctgatgacttaagtctgttatattctgtgttgcagaagcgttatatggtaaatygtgttcttggttcctaaattgctcaagtttttctcaagcaggacaacagtggcttgggactgaggctttgaaatcccacaaaagggctgcttgtttcatgtttgtgtttgtacttctccagtgagctgaatcagggtgagtttagggaggctgatgtgttaattatcctgttttctgtgggcctcgtattcttccagcattgatgacaacccaggcagttcctcctgaccctg

SEQ ID NO: 54889 - DNA, 599 bp, Chicken  19866894308046_1
  misc_feature (1)..(118): n is any nucleotide
nnnnnnnnnnnnnnnnnnnnnnnnnnnnnnnnnnnnnnnnnnnnnnnnnnnnnnnnnnnnnnnnnnnnnnnnnnnnnnnnnnnnnnnnnnnnnnnnnnnnnnnnnnnnnnnnnnnnnntgctggtcttggatgtagagacagcctctggcagagttcaggttgtccagggcacactgctgggaggcagttgctcagatctgggtggagatggtggtgttggtgtctgttgtgaatggttcccagctgagcctggagaggaatgtgcagttcctctgggatctgtttctggtggctgccaygtcccatcactgaactgttctgcactggtgagtgctctgtgccttaaaacatgaagcagagttggtctgggtggtgagactttcttatcatgcttaataaagcacataaaaggaaaccaagagcccatattctgcwagtgaactgcttgttctttatcttccagcctctttgaggatgatgacttcttcaaaacagcatctcttaaatcaccaaagcctcgagttccctctgaagaggaggatgaggaggaagtggtatgtgtttctttccacccccaatgaacttactcaggtgttaa

SEQ ID NO: 54890 - DNA, 600 bp, Chicken  19866894308046_2
agacagcctctggcagagttcaggttgtccagggcacactgctgggaggcagttgctcagatctgggtggagatggtggtgttggtgtctgttgtgaatggttcccagctgagcctggagaggaatgtgcagttcctctgggatctgtttctggtggctgccaygtcccatcactgaactgttctgcactggtgagtgctctgtgccttaaaacatgaagcagagttggtctgggtggtgagactttcttatcatgcttaataaagcacataaaaggaaaccaagagcccatattctgcwagtgaactgcttgttctttatcttccagcctctttgaggatgatgacttcttcaaaacagcatctcttaaatcaccaaagcctcgagttccctctgaagaggaggatgaggaggaagtggtatgtgtttctttccacccccaatgaacttactcaggtgttaacctgcagtttatctgtgggggctgactggtccctgctggccgagcttggagcttccccagacattctctgtatcaattcagcttctgggtttgtatctcactgcacttggaggtgttgcacaggctgaaatggtgay

SEQ ID NO: 54891 - DNA, 600 bp, Chicken  19866894308046_3
agtgaactgcttgttctttatcttccagcctctttgaggatgatgacttcttcaaaacagcatctcttaaatcaccaaagcctcgagttccctctgaagaggaggatgaggaggaagtggtatgtgtttctttccacccccaatgaacttactcaggtgttaacctgcagtttatctgtgggggctgactggtccctgctggccgagcttggagcttccccagacattctctgtatcaattcagcttctgggtttgtatctcactgcacttggaggtgttgcacaggctgaaatggtgaygacagactcctgcttacatggcattaggaaaaggtctgggttaaatgaagggggcttgctttcctactccctcctatctcttcagctgtaagcatctctcttggaagattaagccatcatatgataaacgtaaaaacatcaataatgatgctgcttgtttatcatctcctgtaagctgatggagatttccgagccagagctgtggtggcagttactgaatgctgggaagctggtaaggctgacaggtttctctctgctttcatttccagagcatgaagggtcgcccccctccagctccac

SEQ ID NO: 54892 - DNA, 600 bp, Chicken  19866894308050_1
agtttacaaagcaaaaaatatactttctatttacagccatataagtttaagaaccatacttacttcagtgcagtttttgtaagcatataaaaggaccataaattgatcacaaatgttgtaagggatctgtctttatctcctctttaaggacctccataaacaaggtcaaccaacttaaatcaaaataaaatcaggtcctgcatctgttgagcaatcagcagctgactggcacctgttttccactgccccacatacagccccatctggcttcaggagttctttgcagagaaggaggattgktttcctycctgaattactaccttaaaggcttttagaaggagacctaaagtaaactaggagggtgcaggatgactgacctatctatcgattacatgaatgacaaaatagaaaccctggcccatggtttctttggagggtgccttctctgtaaggctttctgcttgagatgcacgcagagatattttgccatgtgggctgcagctaataaggctcatgtccttcacctccaatttaacccaggtgggccctatagaccagcttttcatctccctgcaaggtctgacacctgagcagcaacag

SEQ ID NO: 54893 - DNA, 600 bp, Chicken  19866894308050_2
aaagcaaaaaatatactttctatttacagccatataagtttaagaaccatacttacttcagtgcagtttttgtaagcatataaaaggaccataaattgatcacaaatgttgtaagggatctgtctttatctcctctttaaggacctccataaacaaggtcaaccaacttaaatcaaaataaaatcaggtcctgcatctgttgagcaatcagcagctgactggcacctgttttccactgccccacatacagccccatctggcttcaggagttctttgcagagaaggaggattgktttcctycctgaattactaccttaaaggcttttagaaggagacctaaagtaaactaggagggtgcaggatgactgacctatctatcgattacatgaatgacaaaatagaaaccctggcccatggtttctttggagggtgccttctctgtaaggctttctgcttgagatgcacgcagagatattttgccatgtgggctgcagctaataaggctcatgtccttcacctccaatttaacccaggtgggccctatagaccagcttttcatctccctgcaaggtctgacacctgagcagcaacagggcattg

SEQ ID NO: 54894 - DNA, 600 bp, Chicken  19866894308060_1
atatttatggatgcttgggcatcacttcagtattgctggtagtatacaccatactatacatacacgcacatgcaccaccatgctagcagtggcctgttacagaccaagagcctgaaaaatccagataaactagaatatttgcaacttagctatatctctgacaatcacatacaaatgccaaagttactccatttttatgtacctgtaagtgagaacttaagttcaaccaaagtcaacaaaaccaactgcatcattgtgtacaggggcagcagttctaacaagcctgattcaaaatcaaaycacatcttatgttgcttgcatacttcaattacaagtgagaacaaagtatggggaacaaaaattccgacaacatgcaagtttaaaagcttaaataagaagaaytcacaaaataaaaacatgacagttaatctaatgctgacctttagaactctttctcaaattaattgtttttttgtttgtttttttaaattagaagcaacatttaagagcatctgctttccaccaacaaccttaacacactgtctgaagtttgaaagttgccatcagaacccacagctacaatgcttcttggagataact

SEQ ID NO: 54895 - DNA, 600 bp, Chicken  19866894308060_2
accaagagcctgaaaaatccagataaactagaatatttgcaacttagctatatctctgacaatcacatacaaatgccaaagttactccatttttatgtacctgtaagtgagaacttaagttcaaccaaagtcaacaaaaccaactgcatcattgtgtacaggggcagcagttctaacaagcctgattcaaaatcaaaycacatcttatgttgcttgcatacttcaattacaagtgagaacaaagtatggggaacaaaaattccgacaacatgcaagtttaaaagcttaaataagaagaaytcacaaaataaaaacatgacagttaatctaatgctgacctttagaactctttctcaaattaattgtttttttgtttgtttttttaaattagaagcaacatttaagagcatctgctttccaccaacaaccttaacacactgtctgaagtttgaaagttgccatcagaacccacagctacaatgcttcttggagataacttgtgtccccttcccgtttcttccaaggtcttcttcacagatatggcattaacaggaaaatagcatatacgcttttattttagtacagcttctaaaataacat

SEQ ID NO: 54896 - DNA, 599 bp, Chicken  19866894308072_1
  misc_feature (1)..(173): n is any nucleotide
nnnnnnnnnnnnnnnnnnnnnnnnnnnnnnnnnnnnnnnnnnnnnnnnnnnnnnnnnnnnnnnnnnnnnnnnnnnnnnnnnnnnnnnnnnnnnnnnnnnnnnnnnnnnnnnnnnnnnnnnnnnnnnnnnnnnnnnnnnnnnnnnnnnnnnnnnnnnnnnnnnnnnnnnnnnnntcgtaccgcatcagcaaagttccccttgaagccttcctgctggcgtctcatcatctcttcctgctgccttctcatttcttcctcacggcgcctgcgttcttcctcttgcctggaaaaaagaggtaargatgctcagcacaacrcacaccaagcatttgcatcacagtgctgtctaacaagctcttgttttgaaaacacacagctttaaaaacacrattctgctgaagctgtaaaatattaggcacctcgtgatgaaaacaaacatccatgagcaagacattctcaacacgcttagttttaaagaattcattataaaaacattcccaagcacacccatgtacacagcagctcccaagtacatgctaactatgtgcaatacaatgcataaaagccacatggttctcaagtttcttgtattacagaggt

SEQ ID NO: 54897 - DNA, 599 bp, Chicken  19866894308072_2
  misc_feature (1)..(157): n is any nucleotide
nnnnnnnnnnnnnnnnnnnnnnnnnnnnnnnnnnnnnnnnnnnnnnnnnnnnnnnnnnnnnnnnnnnnnnnnnnnnnnnnnnnnnnnnnnnnnnnnnnnnnnnnnnnnnnnnnnnnnnnnnnnnnnnnnnnnnnnnnnnnnnnnnnnnnnnnnnnnntcgtaccgcatcagcaaagttccccttgaagccttcctgctggcgtctcatcatctcttcctgctgccttctcatttcttcctcacggcgcctgcgttcttcctcttgcctggaaaaaagaggtaargatgctcagcacaacrcacaccaagcatttgcatcacagtgctgtctaacaagctcttgttttgaaaacacacagctttaaaaacacrattctgctgaagctgtaaaatattaggcacctcgtgatgaaaacaaacatccatgagcaagacattctcaacacgcttagttttaaagaattcattataaaaacattcccaagcacacccatgtacacagcagctcccaagtacatgctaactatgtgcaatacaatgcataaaagccacatggttctcaagtttcttgtattacagaggtaaactgaaggaccaca

SEQ ID NO: 54898 - DNA, 599 bp, Chicken  19866894308072_3
  misc_feature (1)..(85): n is any nucleotide
nnnnnnnnnnnnnnnnnnnnnnnnnnnnnnnnnnnnnnnnnnnnnnnnnnnnnnnnnnnnnnnnnnnnnnnnnnnnnnnnnnnnntcgtaccgcatcagcaaagttccccttgaagccttcctgctggcgtctcatcatctcttcctgctgccttctcatttcttcctcacggcgcctgcgttcttcctcttgcctggaaaaaagaggtaargatgctcagcacaacrcacaccaagcatttgcatcacagtgctgtctaacaagctcttgttttgaaaacacacagctttaaaaacacrattctgctgaagctgtaaaatattaggcacctcgtgatgaaaacaaacatccatgagcaagacattctcaacacgcttagttttaaagaattcattataaaaacattcccaagcacacccatgtacacagcagctcccaagtacatgctaactatgtgcaatacaatgcataaaagccacatggttctcaagtttcttgtattacagaggtaaactgaaggaccacagggagcttcttacartgaccctgagacaaggaagagctggaacggagagagaaatctctgaggctaagttac

SEQ ID NO: 54899 - DNA, 600 bp, Chicken  19866894308072_4
gcatcacagtgctgtctaacaagctcttgttttgaaaacacacagctttaaaaacacrattctgctgaagctgtaaaatattaggcacctcgtgatgaaaacaaacatccatgagcaagacattctcaacacgcttagttttaaagaattcattataaaaacattcccaagcacacccatgtacacagcagctcccaagtacatgctaactatgtgcaatacaatgcataaaagccacatggttctcaagtttcttgtattacagaggtaaactgaaggaccacagggagcttcttacartgaccctgagacaaggaagagctggaacggagagagaaatctctgaggctaagttacctcccagatgagaagacagataccacatggggtttcccagcctgcagcactaaagctactgcacagaytctcattttttgaatctgtcttggtcaaagagctaaactgagatagagcattaaaacaaacaaacaaatccaacctaatactattcagtgtccttcaacttcagacggaactcttccatcctagcccagatgcacactccctctattaacagaaaaggccagaaacaacagccac

SEQ ID NO: 54900 - DNA, 600 bp, Chicken  19866894308072_5
tcaacacgcttagttttaaagaattcattataaaaacattcccaagcacacccatgtacacagcagctcccaagtacatgctaactatgtgcaatacaatgcataaaagccacatggttctcaagtttcttgtattacagaggtaaactgaaggaccacagggagcttcttacartgaccctgagacaaggaagagctggaacggagagagaaatctctgaggctaagttacctcccagatgagaagacagataccacatggggtttcccagcctgcagcactaaagctactgcacagaytctcattttttgaatctgtcttggtcaaagagctaaactgagatagagcattaaaacaaacaaacaaatccaacctaatactattcagtgtccttcaacttcagacggaactcttccatcctagcccagatgcacactccctctattaacagaaaaggccagaaacaacagccactcttaaggtagcaattaagttgtcagcttgaacaattagtgaactggagaagtgctttgtcctgtatcataacagattcacagtttcagaactgcctccctacctgatttccaactgtttacgtt

SEQ ID NO: 54901 - DNA, 599 bp, Chicken  19866894308074_1
  misc_feature (1)..(51): n is any nucleotide
nnnnnnnnnnnnnnnnnnnnnnnnnnnnnnnnnnnnnnnnnnnnnnnnnnnctggaggggtgaaatgtaataaaaatgtgagaatacaattaccatgataggttgtactgcagggaacacgtccagaaaacaagtgaggccacccccagctgcattaaatgaggcaagaaacaggggcatttaatgttcctagcttcaaattaaaatcctcaggaagaacaatggtaattccttaattcatcattaaactaccctaaatattcccaatccttatattttgtgctttatctagcagttctrtatatwtttttttgtcctattcacagccacgtgagttattatatactatttggaagctttgatttaaaaaatctctaattagtccctgaatgttccattttttttcccatcatttgtatgggtggagtaaatgactcgtcttagctctttcttgaactgagcaactgtggttgctcttcttgaaatcagtataaaggcaagacaaaaggcaagaggagcagggagagcgtccctatagagggtgacagaaccacgaatcactgaggttggaaaagacctcacagattcccaaacccaac

SEQ ID NO: 54902 - DNA, 599 bp, Chicken  19866894308074_2
  misc_feature (1)..(45): n is any nucleotide
nnnnnnnnnnnnnnnnnnnnnnnnnnnnnnnnnnnnnnnnnnnnnctggaggggtgaaatgtaataaaaatgtgagaatacaattaccatgataggttgtactgcagggaacacgtccagaaaacaagtgaggccacccccagctgcattaaatgaggcaagaaacaggggcatttaatgttcctagcttcaaattaaaatcctcaggaagaacaatggtaattccttaattcatcattaaactaccctaaatattcccaatccttatattttgtgctttatctagcagttctrtatatwtttttttgtcctattcacagccacgtgagttattatatactatttggaagctttgatttaaaaaatctctaattagtccctgaatgttccattttttttcccatcatttgtatgggtggagtaaatgactcgtcttagctctttcttgaactgagcaactgtggttgctcttcttgaaatcagtataaaggcaagacaaaaggcaagaggagcagggagagcgtccctatagagggtgacagaaccacgaatcactgaggttggaaaagacctcacagattcccaaacccaacgccaac

SEQ ID NO: 54903 - DNA, 599 bp, Chicken  19866894308076_1
  misc_feature (1)..(39): n is any nucleotide
nnnnnnnnnnnnnnnnnnnnnnnnnnnnnnnnnnnnnnngagatttcttttctgggtctcttctgaggtttttttgtttgtttgtgtgtgtgtgtgtgtgtgtgtgtttttgtttgttttgttttttgagtatattaaagactttttttctttactcagtttcaaacctgagaggaaaatgtgtttttaaaagttgaactctgattctagcgtaagactagaattccactaaagcttaaaagcaactaagaaaaaatacaataaaaaggaaagaaaatccaatataagagtttttataargtatggcaaagcatggtagaacaacagaaaagagcatgtgaaaagaaaactgaggctctgaaaaagtggaagaaaagcagatgaactagattttgcatatgcagacaacctagaatgagttggaggtatttctgtctggaaggttctaatttcttttctgctggaaaactgctcacttgatgatctctagaaaaatatggatgttttagcaacaaaagtaaatggttcatcagcttgagtttaatgaacacctaaaacagcaaccagctctagactccatttttctggattcagacatc

SEQ ID NO: 54904 - DNA, 600 bp, Chicken  19866894308080_1
ttaaattgatgggtatggcggcctgagagaagttatttttaaaccaagagaccccagtatgtattcttcacatgttttaaactccatttgtgaattgctgtttgttatgacgtatcttaaccttggcatttcagtggacaggttcacaccatttgaagatacctggcccaggtttaactacagattaatggaattccattgctactgctgagatgtgctgagtactgactggggcatttcagctcattgccaccacttatttgttccagctgaagccagggcaaagttcctcttacctcrctgacgtcrtatggaagttgtatcattgggttttctgttgggtgccttttaacacacataaatgacagaaatccttcaagcagcctcgccaacttgtggcgaacatttaacttggtatcctgggaaatacatgacttacacaaacaaattaatgatttggtcacagattgcaggagaaataccaattaaaaatgggaattgcccagttatctgcagtgaaaaggctatagaggagatctttttggaatagagaatgcgtatagcccagaacttactctgctttaaaggtctctttttagt

SEQ ID NO: 54905 - DNA, 600 bp, Chicken  19866894308080_2
tgggtatggcggcctgagagaagttatttttaaaccaagagaccccagtatgtattcttcacatgttttaaactccatttgtgaattgctgtttgttatgacgtatcttaaccttggcatttcagtggacaggttcacaccatttgaagatacctggcccaggtttaactacagattaatggaattccattgctactgctgagatgtgctgagtactgactggggcatttcagctcattgccaccacttatttgttccagctgaagccagggcaaagttcctcttacctcrctgacgtcrtatggaagttgtatcattgggttttctgttgggtgccttttaacacacataaatgacagaaatccttcaagcagcctcgccaacttgtggcgaacatttaacttggtatcctgggaaatacatgacttacacaaacaaattaatgatttggtcacagattgcaggagaaataccaattaaaaatgggaattgcccagttatctgcagtgaaaaggctatagaggagatctttttggaatagagaatgcgtatagcccagaacttactctgctttaaaggtctctttttagtaggcatggg

SEQ ID NO: 54906 - DNA, 600 bp, Chicken  19866894308081_1
acacaaacgtatcacaccttaacttgttaaaataaatacaaaataataatagctaattgagataataaacttcacttaattacttgtctatagacagaagtgctgacttctttaataacgctccaggctcttgggaagtgtgttatgtgagacttgtaagcaggactcaagatgctgttccttttctaaagcagtccatggtgcatgaaatacacaattttttgcatctttgttttttaggcattttgaagtccattgtacttgaagatgaaaatatttaaagagcaattagagaggtargaaaggtaaagacaatccttggaactgtgggtgatctcatctgtgctttgtaacttgctaagcaagcaaccatgaacttattagaatacgttcatttaaagctgtgaaattacacaggactaatcctgtaaatggggtcacagaaatccccctttttgaaaaaatgaagcttttatgtgtcagtttatgtgaggagacaaataatcagactcatgcattgcctgcctcaaaccaggcctataaaggtccacataaaggtcacatttgggtatcactctatattttaccatggcaaataaa

SEQ ID NO: 54907 - DNA, 600 bp, Chicken  19866894308081_2
atcactctatattttaccatggcaaataaaatttgaaatttcccttataaaaaggaagccttgtcttgctctaatctttagagtttaaattaatttttcattctattaacattcagcataataggatacaatagtccccaaggcattcttcataatatactttgtacagtggtttgcaaatgatcttagtagttaatggaactataaaaattacttgcacataaaggtcaagaaaaatagagataagtatatatacgttttggtcctgccctgctcaacatacagctaaaagcccctggrgtaaagaaaacttatactaatgcaaggaayacaattcctcccagtatgaaaaagcccaagcagctcatcttttggaattccacactttttatgtctgcattttcccttgaccaattctcttgaacaatccagcacctcattgatcaatttattattagcattcttggcatgagtttaagatcagtttgtagtttgattcagcctggtaataaaatgacctacatcaaagccctgccaaaatgccatctttgcagcaatgcgtttagcatgagttatttgaccatattcaaggtcacacag

SEQ ID NO: 54908 - DNA, 600 bp, Chicken  19866894308081_3
atttgaaatttcccttataaaaaggaagccttgtcttgctctaatctttagagtttaaattaatttttcattctattaacattcagcataataggatacaatagtccccaaggcattcttcataatatactttgtacagtggtttgcaaatgatcttagtagttaatggaactataaaaattacttgcacataaaggtcaagaaaaatagagataagtatatatacgttttggtcctgccctgctcaacatacagctaaaagcccctggrgtaaagaaaacttatactaatgcaaggaayacaattcctcccagtatgaaaaagcccaagcagctcatcttttggaattccacactttttatgtctgcattttcccttgaccaattctcttgaacaatccagcacctcattgatcaatttattattagcattcttggcatgagtttaagatcagtttgtagtttgattcagcctggtaataaaatgacctacatcaaagccctgccaaaatgccatctttgcagcaatgcgtttagcatgagttatttgaccatattcaaggtcacacagcaactgctccttatcatggaaaaaagtcaa

SEQ ID NO: 54909 - DNA, 600 bp, Chicken  19866894308085_1
tgccatcgcttcaccttgcccttgtatagcatctgtgctgcttcaaaaagagctgctcacctactgctgtcctgctgtgcttttacagccacctaacccacggacaggctttgtttaaatgtttatggaacttggcttcctaatccaattatcttcattcccccacatgagcgaaaaagtaaccaaagctgctcctaatgtggaatattacagtggaaactgtgacagtgaactgcttgcctccttgctgtttctttggcctgaatttgtaattaatataacagctgggaatctgagccyaatgggtgtgtttcctgaaygttgtcacaatggtaataaaataaaataggggaatacttatgaatgattcagaagtgctggaatcgagttacctacacgttctttagaacagggctgttacacacagtgtctgcattacttgttgccttcacctcgtgtttaagaacataaatcagagtgtaccacaaatcatggtgtgtagcagcaccaccacacgacgattgaatgaagttaaagctactgctttttaaaatagcatttttctaatgtaccaacgtgcttaagaagctcagacttgtg

SEQ ID NO: 54910 - DNA, 600 bp, Chicken  19866894308085_2
cttgtatagcatctgtgctgcttcaaaaagagctgctcacctactgctgtcctgctgtgcttttacagccacctaacccacggacaggctttgtttaaatgtttatggaacttggcttcctaatccaattatcttcattcccccacatgagcgaaaaagtaaccaaagctgctcctaatgtggaatattacagtggaaactgtgacagtgaactgcttgcctccttgctgtttctttggcctgaatttgtaattaatataacagctgggaatctgagccyaatgggtgtgtttcctgaaygttgtcacaatggtaataaaataaaataggggaatacttatgaatgattcagaagtgctggaatcgagttacctacacgttctttagaacagggctgttacacacagtgtctgcattacttgttgccttcacctcgtgtttaagaacataaatcagagtgtaccacaaatcatggtgtgtagcagcaccaccacacgacgattgaatgaagttaaagctactgctttttaaaatagcatttttctaatgtaccaacgtgcttaagaagctcagacttgtgtgttgtaacatgactggcag

SEQ ID NO: 54911 - DNA, 599 bp, Chicken  19866894308089_1
  misc_feature (1)..(187): n is any nucleotide
nnnnnnnnnnnnnnnnnnnnnnnnnnnnnnnnnnnnnnnnnnnnnnnnnnnnnnnnnnnnnnnnnnnnnnnnnnnnnnnnnnnnnnnnnnnnnnnnnnnnnnnnnnnnnnnnnnnnnnnnnnnnnnnnnnnnnnnnnnnnnnnnnnnnnnnnnnnnnnnnnnnnnnnnnnnnnnnnnnnnnnnnnnncttttaattttaaggtgaagacaagtgttagtaagtatagcaaaaggctgaccccactcccagcacctggagaaacacccctcatactgcactgcagcatccacctgggtccyctgggccacacaatatacagaattcacagctccttcactaaaacacgttatgtgaacccctgtccctccaacaccctccagctgctgatctcaggatagatcacacagmmtcacaaggtcagtgtgtgtcagaggaactctccatgctgcacctctcaaagatggggggctgtcccagagcccacgtaagcccacttgccatagcccggctctgccaagcatggatgrtgagctcccatgggagcccatgagatcccagagctctggatggcagacgtacggcccagaagagaggagac

SEQ ID NO: 54912 - DNA, 599 bp, Chicken  19866894308089_2
  misc_feature (1)..(78): n is any nucleotide
nnnnnnnnnnnnnnnnnnnnnnnnnnnnnnnnnnnnnnnnnnnnnnnnnnnnnnnnnnnnnnnnnnnnnnnnnnnnnncttttaattttaaggtgaagacaagtgttagtaagtatagcaaaaggctgaccccactcccagcacctggagaaacacccctcatactgcactgcagcatccacctgggtccyctgggccacacaatatacagaattcacagctccttcactaaaacacgttatgtgaacccctgtccctccaacaccctccagctgctgatctcaggatagatcacacagmmtcacaaggtcagtgtgtgtcagaggaactctccatgctgcacctctcaaagatggggggctgtcccagagcccacgtaagcccacttgccatagcccggctctgccaagcatggatgrtgagctcccatgggagcccatgagatcccagagctctggatggcagacgtacggcccagaagagaggagacctcagtgtgtacacacagctgcaccaaacctycacttctaatcacagatgtaatgctggatcagtaaaacaaaagcagttcgtacctcaaaagcaggcgatcccttcag

SEQ ID NO: 54913 - DNA, 599 bp, Chicken  19866894308089_3
  misc_feature (1)..(77): n is any nucleotide
nnnnnnnnnnnnnnnnnnnnnnnnnnnnnnnnnnnnnnnnnnnnnnnnnnnnnnnnnnnnnnnnnnnnnnnnnnnnncttttaattttaaggtgaagacaagtgttagtaagtatagcaaaaggctgaccccactcccagcacctggagaaacacccctcatactgcactgcagcatccacctgggtccyctgggccacacaatatacagaattcacagctccttcactaaaacacgttatgtgaacccctgtccctccaacaccctccagctgctgatctcaggatagatcacacagmmtcacaaggtcagtgtgtgtcagaggaactctccatgctgcacctctcaaagatggggggctgtcccagagcccacgtaagcccacttgccatagcccggctctgccaagcatggatgrtgagctcccatgggagcccatgagatcccagagctctggatggcagacgtacggcccagaagagaggagacctcagtgtgtacacacagctgcaccaaacctycacttctaatcacagatgtaatgctggatcagtaaaacaaaagcagttcgtacctcaaaagcaggcgatcccttcagc

SEQ ID NO: 54914 - DNA, 600 bp, Chicken  19866894308089_4
aaaaggctgaccccactcccagcacctggagaaacacccctcatactgcactgcagcatccacctgggtccyctgggccacacaatatacagaattcacagctccttcactaaaacacgttatgtgaacccctgtccctccaacaccctccagctgctgatctcaggatagatcacacagmmtcacaaggtcagtgtgtgtcagaggaactctccatgctgcacctctcaaagatggggggctgtcccagagcccacgtaagcccacttgccatagcccggctctgccaagcatggatgrtgagctcccatgggagcccatgagatcccagagctctggatggcagacgtacggcccagaagagaggagacctcagtgtgtacacacagctgcaccaaacctycacttctaatcacagatgtaatgctggatcagtaaaacaaaagcagttcgtacctcaaaagcaggcgatcccttcagcaggtccttcaatcttcagaaaatgcctatctgcaaaacacaatacacacataattaagaggaatccaaacaattagcaagtatttgtgcatcagctcattaggaatgtctagaacgcca

SEQ ID NO: 54915 - DNA, 600 bp, Chicken  19866894308089_5
ccttcactaaaacacgttatgtgaacccctgtccctccaacaccctccagctgctgatctcaggatagatcacacagmmtcacaaggtcagtgtgtgtcagaggaactctccatgctgcacctctcaaagatggggggctgtcccagagcccacgtaagcccacttgccatagcccggctctgccaagcatggatgrtgagctcccatgggagcccatgagatcccagagctctggatggcagacgtacggcccagaagagaggagacctcagtgtgtacacacagctgcaccaaacctycacttctaatcacagatgtaatgctggatcagtaaaacaaaagcagttcgtacctcaaaagcaggcgatcccttcagcaggtccttcaatcttcagaaaatgcctatctgcaaaacacaatacacacataattaagaggaatccaaacaattagcaagtatttgtgcatcagctcattaggaatgtctagaacgccatctgtgttgctcagaatgaacccacagccgaggagccttgctgcagtcccacaaatggctctctgaggtttcctttgcagcacgaggactgtccagccattgc

SEQ ID NO: 54916 - DNA, 599 bp, Chicken  19866894308091_1
  misc_feature (1)..(82): n is any nucleotide
nnnnnnnnnnnnnnnnnnnnnnnnnnnnnnnnnnnnnnnnnnnnnnnnnnnnnnnnnnnnnnnnnnnnnnnnnnnnnnnnnncttaacagaaaatgaatattgacagctttaggatatttgttaagaaaaaaaaaaaaacataaacacacaaaccaataccaccaccaaaatcgtttttctgtgaagcttgtttcatattcattacacagagaagcaaacttttaaggatgaactatttgctttcccaactggctattaaagagaagaacttttgctccagatgagatagtagtattctyttcttgaagagtagagagttgtctctttgaggaatgctgtcatgagcctttcctccaccaaataccacttgtttgggcagcatgacaagtaatggacttattccacatgtgtaaatccaaggctttgaaagaatctgctttttgcattccaagggctattttagatccagtttctatatcatgctgatataggtatttatatttctttaatggcaaaagtcattagatatccccacaaaaatgaatggagcccttcccactccttctwtttatttatttctccaccacaaaacccccag

SEQ ID NO: 54917 - DNA, 600 bp, Chicken  19866894308091_2
acttttgctccagatgagatagtagtattctyttcttgaagagtagagagttgtctctttgaggaatgctgtcatgagcctttcctccaccaaataccacttgtttgggcagcatgacaagtaatggacttattccacatgtgtaaatccaaggctttgaaagaatctgctttttgcattccaagggctattttagatccagtttctatatcatgctgatataggtatttatatttctttaatggcaaaagtcattagatatccccacaaaaatgaatggagcccttcccactccttctwtttatttatttctccaccacaaaacccccagcctgtttattggctaaaagatgaaattagtctgatcatatagtatgcaaacacatactgcaaggagtacaaatccatgggaggttaccccgctgtttgtctttaggttttctgttgtaaaggcattttcccttcagtctaaatctaatatacggtcccattgtgtttgctttagacatcagtggtgatggtctaataatgtatcctttgatcatctggcccagctgtctctttgctttcataactataaacttgggcattaagtgagat

SEQ ID NO: 54918 - DNA, 599 bp, Chicken  19866894308092_1
  misc_feature (1)..(76): n is any nucleotide
nnnnnnnnnnnnnnnnnnnnnnnnnnnnnnnnnnnnnnnnnnnnnnnnnnnnnnnnnnnnnnnnnnnnnnnnnnnnaaaaatggtgcagctattcccactcttcaataaaagcagaaatgaccagagtctggtctctgccaacatagtctttttttttttagactgttgtattctccttatagtctttttttttttagactgttgtattctccttctcctcctcccattgattgaacatatcgataaacaatataaataatatttataccagaacttctgaatatttactcttgcttctytctagtcagtatgcaaagaactgaatgaatgcaaaacgtgctattctatatgtatattcatgtttcaagatacaaaataagctttgctcttggagcaaaacatagtgaggtaactggtgacacagttcatgggaggaattaattaccaggttatgggacccagcaaagctctatcaacagcatggagaaaaaagtcatagtatcattacagttggaggggacctttaattgtcctctagtcaaattacaatgaacagagacctctacagctagatcagatttctcagggtgccatccag

SEQ ID NO: 54919 - DNA, 599 bp, Chicken  19866894308094_1
  misc_feature (1)..(161): n is any nucleotide
nnnnnnnnnnnnnnnnnnnnnnnnnnnnnnnnnnnnnnnnnnnnnnnnnnnnnnnnnnnnnnnnnnnnnnnnnnnnnnnnnnnnnnnnnnnnnnnnnnnnnnnnnnnnnnnnnnnnnnnnnnnnnnnnnnnnnnnnnnnnnnnnnnnnnnnnnnnnnnnnntgttgcattctacagttaaaagtaagggtgttttctgcacccctgctcattaaaggtcataaagcagtatttcaacagagatgctcttttgtgctttatatgtcagtagcaggttttcatgctcctccttttcaagaarggagaaaatcagcatggaattccagtggctaaattgttttttgtagttgcagccaaatggtttgctttttttttcacattttatttagttgcaatagtgaagatwtaartgctgtctttcatcatctctcagtatgttattttaatgatgtcaaaagtcgatcagytcaaaatgyttttatttaagtgatacatgatttcataggctgagagaagtggaaagccagtcatttattgttgctccaaaagaaaaaaaaatcaggtgagaactgcctccattcccctgaaaatcatctctaa

SEQ ID NO: 54920 - DNA, 599 bp, Chicken  19866894308094_2
  misc_feature (1)..(56): n is any nucleotide
nnnnnnnnnnnnnnnnnnnnnnnnnnnnnnnnnnnnnnnnnnnnnnnnnnnnnnnntgttgcattctacagttaaaagtaagggtgttttctgcacccctgctcattaaaggtcataaagcagtatttcaacagagatgctcttttgtgctttatatgtcagtagcaggttttcatgctcctccttttcaagaarggagaaaatcagcatggaattccagtggctaaattgttttttgtagttgcagccaaatggtttgctttttttttcacattttatttagttgcaatagtgaagatwtaartgctgtctttcatcatctctcagtatgttattttaatgatgtcaaaagtcgatcagytcaaaatgyttttatttaagtgatacatgatttcataggctgagagaagtggaaagccagtcatttattgttgctccaaaagaaaaaaaaatcaggtgagaactgcctccattcccctgaaaatcatctctaaatcttgcatgacagacagcaagcagcatcaaggtctatatacatccaatatcaaaatttgtcacagaatgtctaaggtgatttyctgaataactttcccaaatca

SEQ ID NO: 54921 - DNA, 599 bp, Chicken  19866894308094_3
  misc_feature (1)..(52): n is any nucleotide
nnnnnnnnnnnnnnnnnnnnnnnnnnnnnnnnnnnnnnnnnnnnnnnnnnnntgttgcattctacagttaaaagtaagggtgttttctgcacccctgctcattaaaggtcataaagcagtatttcaacagagatgctcttttgtgctttatatgtcagtagcaggttttcatgctcctccttttcaagaarggagaaaatcagcatggaattccagtggctaaattgttttttgtagttgcagccaaatggtttgctttttttttcacattttatttagttgcaatagtgaagatwtaartgctgtctttcatcatctctcagtatgttattttaatgatgtcaaaagtcgatcagytcaaaatgyttttatttaagtgatacatgatttcataggctgagagaagtggaaagccagtcatttattgttgctccaaaagaaaaaaaaatcaggtgagaactgcctccattcccctgaaaatcatctctaaatcttgcatgacagacagcaagcagcatcaaggtctatatacatccaatatcaaaatttgtcacagaatgtctaaggtgatttyctgaataactttcccaaatcatttt

SEQ ID NO: 54922 - DNA, 600 bp, Chicken  19866894308094_4
cattctacagttaaaagtaagggtgttttctgcacccctgctcattaaaggtcataaagcagtatttcaacagagatgctcttttgtgctttatatgtcagtagcaggttttcatgctcctccttttcaagaarggagaaaatcagcatggaattccagtggctaaattgttttttgtagttgcagccaaatggtttgctttttttttcacattttatttagttgcaatagtgaagatwtaartgctgtctttcatcatctctcagtatgttattttaatgatgtcaaaagtcgatcagytcaaaatgyttttatttaagtgatacatgatttcataggctgagagaagtggaaagccagtcatttattgttgctccaaaagaaaaaaaaatcaggtgagaactgcctccattcccctgaaaatcatctctaaatcttgcatgacagacagcaagcagcatcaaggtctatatacatccaatatcaaaatttgtcacagaatgtctaaggtgatttyctgaataactttcccaaatcattttgcacagtgcttttctacacgtacattatgagatgtctctgtccctgtactttgcatgc

SEQ ID NO: 54923 - DNA, 600 bp, Chicken  19866894308094_5
gttaaaagtaagggtgttttctgcacccctgctcattaaaggtcataaagcagtatttcaacagagatgctcttttgtgctttatatgtcagtagcaggttttcatgctcctccttttcaagaarggagaaaatcagcatggaattccagtggctaaattgttttttgtagttgcagccaaatggtttgctttttttttcacattttatttagttgcaatagtgaagatwtaartgctgtctttcatcatctctcagtatgttattttaatgatgtcaaaagtcgatcagytcaaaatgyttttatttaagtgatacatgatttcataggctgagagaagtggaaagccagtcatttattgttgctccaaaagaaaaaaaaatcaggtgagaactgcctccattcccctgaaaatcatctctaaatcttgcatgacagacagcaagcagcatcaaggtctatatacatccaatatcaaaatttgtcacagaatgtctaaggtgatttyctgaataactttcccaaatcattttgcacagtgcttttctacacgtacattatgagatgtctctgtccctgtactttgcatgcccatttgtg

SEQ ID NO: 54924 - DNA, 499 bp, Chicken  19866894308094_6
tttagttgcaatagtgaagatwtaartgctgtctttcatcatctctcagtatgttattttaatgatgtcaaaagtcgatcagytcaaaatgyttttatttaagtgatacatgatttcataggctgagagaagtggaaagccagtcatttattgttgctccaaaagaaaaaaaaatcaggtgagaactgcctccattcccctgaaaatcatctctaaatcttgcatgacagacagcaagcagcatcaaggtctatatacatccaatatcaaaatttgtcacagaatgtctaaggtgatttyctgaataactttcccaaatcattttgcacagtgcttttctacacgtacattatgagatgtctctgtccctgtactttgcatgcccatttgtgcatttgtttgctctttgccctgttaccggtttgctcattccctgcactgcctgactttcctcctttctcagcaactctactcagtgtgttattttctcagagccaca

SEQ ID NO: 54925 - DNA, 599 bp, Chicken  19866894308099_1
  misc_feature (1)..(35): n is any nucleotide
nnnnnnnnnnnnnnnnnnnnnnnnnnnnnnnnnnntttgtttgatcagaatgtgttatttcttttttacccgataggaaaaccttctcacttctgcttgagagatacattagaagaggaacaatctgttggggtctgctgaaaagaaaaaggagctgactgtattgtggggttcaaatagctgtaatctgcaggcagattttattgattgtttccctccctttcttccctagaagctcagcttttctagaagagagtaaaggatgaggagttatgctgacatttggaaaagggctaggargttgacctgtgttcaacatatctgccataaatgaatgctcaccatgaagtagtgcacccactgcaagcaatgcagtgaagtgttccagggccaagagagttccgtcatgaatttaaggaaaggaattacttcatccaaaaaggtctggacaccttgaaacattctggtatctctaaggaggagatgatgcaccttagggctgccttgaccttgcctggggcttgatgatccttgaggtcccttccaacccaagccattctataattctatarggcactttcacattcagcaacaccagt

SEQ ID NO: 54926 - DNA, 600 bp, Chicken  19866894308099_2
atgctgacatttggaaaagggctaggargttgacctgtgttcaacatatctgccataaatgaatgctcaccatgaagtagtgcacccactgcaagcaatgcagtgaagtgttccagggccaagagagttccgtcatgaatttaaggaaaggaattacttcatccaaaaaggtctggacaccttgaaacattctggtatctctaaggaggagatgatgcaccttagggctgccttgaccttgcctggggcttgatgatccttgaggtcccttccaacccaagccattctataattctatarggcactttcacattcagcaacaccagtagratgcttgttctcagacggagcaagtaacctatgtattgacttggaaattgaggtgagtgttcctccactttaagaatagtcaggattagcaagtggtgtgaaggtataaagttgtgttgtttgtttaaatgacagcataaggaatatctacctgagccattgtaattcagtgtttcattagcatgagatgcaagtctattgagactttactattccaagtccataagaaaatgggacaaggctcctaattcttaatgcagcaaaacactt

SEQ ID NO: 54927 - DNA, 600 bp, Chicken  19866894308099_3
tgacctgtgttcaacatatctgccataaatgaatgctcaccatgaagtagtgcacccactgcaagcaatgcagtgaagtgttccagggccaagagagttccgtcatgaatttaaggaaaggaattacttcatccaaaaaggtctggacaccttgaaacattctggtatctctaaggaggagatgatgcaccttagggctgccttgaccttgcctggggcttgatgatccttgaggtcccttccaacccaagccattctataattctatarggcactttcacattcagcaacaccagtagratgcttgttctcagacggagcaagtaacctatgtattgacttggaaattgaggtgagtgttcctccactttaagaatagtcaggattagcaagtggtgtgaaggtataaagttgtgttgtttgtttaaatgacagcataaggaatatctacctgagccattgtaattcagtgtttcattagcatgagatgcaagtctattgagactttactattccaagtccataagaaaatgggacaaggctcctaattcttaatgcagcaaaacacttagaatgaaggagatttgaatccaggtttaa

SEQ ID NO: 54928 - DNA, 600 bp, Chicken  19866894308101_1
tgctttgctttcttcagtagaatcatgcagcactgcagcacacttagaataatgaaaagtaactgcagagcagcacatcccttagagacatctccttgctctggaaagaaattgcaagcaaagacaaagcaactggagcttccttaggtaaacgtgtgacacgcgaggtctgctgaccctttttctcattcctctctcagttcccccgtgtacctttaccggctgatggcagtggttgtgcaccatggagacatgcattctggacactttgtgacttaccgccgctctccaccttcttcraagaacccgctctctgtcagcaatcagtggttgtggatttcagatgatacggttcgcaaagctagtttgcaggaggtcctttcctctagtgcttatctgctgttctatgagcgcgttcactcaagggtacagcaccagagtttggagttgaggcctgaagagtgattaggagagctggaggaggacaaaaactgaccaaattcctctgctgaaatccacgtggcacctcctgtccgttatgcaaataatccaccacaggccctttaactttcccttccctctatggcagcagctggctct

SEQ ID NO: 54929 - DNA, 600 bp, Chicken  19866894308103_1
ttttgagtcgctcttgcagggaaaaagcatctcccctgttatggttatcagatgtctgccctgcctggtttcagttaaacctcatgcattgcaaatattaacttacaggaatggaccccaacagcaatccctctgcataaagccatgaaaacaaatctggcacttttctctgcggagggctgatgcctgctgcccccgggcaggacgagctgtgcaaacaaacactgagggatcgggtagcagccctgtgcttcctacctgaccagccccactaaactcaatccatattacttctaggcytctgaagcctycctcagttccttcctctctatttacagggtagatgtatatttgtacctgcaactggtcagctcaactgcagctttgcagtaggcacaaagcagatgggctcaaaaacctgcagccagtgattaagacacacraagggaygcctcaagactgctgtgcgagtgaaactmcacattcttatcattttggagaaacacagcattgtctcaagcctcaaaagacagcactggtgtatttcccagttacctcgtgcctcagtttccccatctttgctgttaagcccatcactga

SEQ ID NO: 54930 - DNA, 600 bp, Chicken  19866894308103_2
tcttgcagggaaaaagcatctcccctgttatggttatcagatgtctgccctgcctggtttcagttaaacctcatgcattgcaaatattaacttacaggaatggaccccaacagcaatccctctgcataaagccatgaaaacaaatctggcacttttctctgcggagggctgatgcctgctgcccccgggcaggacgagctgtgcaaacaaacactgagggatcgggtagcagccctgtgcttcctacctgaccagccccactaaactcaatccatattacttctaggcytctgaagcctycctcagttccttcctctctatttacagggtagatgtatatttgtacctgcaactggtcagctcaactgcagctttgcagtaggcacaaagcagatgggctcaaaaacctgcagccagtgattaagacacacraagggaygcctcaagactgctgtgcgagtgaaactmcacattcttatcattttggagaaacacagcattgtctcaagcctcaaaagacagcactggtgtatttcccagttacctcgtgcctcagtttccccatctttgctgttaagcccatcactgaaagaagcgata

SEQ ID NO: 54931 - DNA, 600 bp, Chicken  19866894308103_3
catgaaaacaaatctggcacttttctctgcggagggctgatgcctgctgcccccgggcaggacgagctgtgcaaacaaacactgagggatcgggtagcagccctgtgcttcctacctgaccagccccactaaactcaatccatattacttctaggcytctgaagcctycctcagttccttcctctctatttacagggtagatgtatatttgtacctgcaactggtcagctcaactgcagctttgcagtaggcacaaagcagatgggctcaaaaacctgcagccagtgattaagacacacraagggaygcctcaagactgctgtgcgagtgaaactmcacattcttatcattttggagaaacacagcattgtctcaagcctcaaaagacagcactggtgtatttcccagttacctcgtgcctcagtttccccatctttgctgttaagcccatcactgaaagaagcgatacatcyccacccaaacaagccccaaattcccaatctcgttcagaataaatcacaaaacacaatcctcctcccactcacagactagaacccaggcaaagcacctaacacgtcacagcacaagtatgtcaaggat

SEQ ID NO: 54932 - DNA, 600 bp, Chicken  19866894308103_4
acaaatctggcacttttctctgcggagggctgatgcctgctgcccccgggcaggacgagctgtgcaaacaaacactgagggatcgggtagcagccctgtgcttcctacctgaccagccccactaaactcaatccatattacttctaggcytctgaagcctycctcagttccttcctctctatttacagggtagatgtatatttgtacctgcaactggtcagctcaactgcagctttgcagtaggcacaaagcagatgggctcaaaaacctgcagccagtgattaagacacacraagggaygcctcaagactgctgtgcgagtgaaactmcacattcttatcattttggagaaacacagcattgtctcaagcctcaaaagacagcactggtgtatttcccagttacctcgtgcctcagtttccccatctttgctgttaagcccatcactgaaagaagcgatacatcyccacccaaacaagccccaaattcccaatctcgttcagaataaatcacaaaacacaatcctcctcccactcacagactagaacccaggcaaagcacctaacacgtcacagcacaagtatgtcaaggattgggcca

SEQ ID NO: 54933 - DNA, 600 bp, Chicken  19866894308103_5
ctgatgcctgctgcccccgggcaggacgagctgtgcaaacaaacactgagggatcgggtagcagccctgtgcttcctacctgaccagccccactaaactcaatccatattacttctaggcytctgaagcctycctcagttccttcctctctatttacagggtagatgtatatttgtacctgcaactggtcagctcaactgcagctttgcagtaggcacaaagcagatgggctcaaaaacctgcagccagtgattaagacacacraagggaygcctcaagactgctgtgcgagtgaaactmcacattcttatcattttggagaaacacagcattgtctcaagcctcaaaagacagcactggtgtatttcccagttacctcgtgcctcagtttccccatctttgctgttaagcccatcactgaaagaagcgatacatcyccacccaaacaagccccaaattcccaatctcgttcagaataaatcacaaaacacaatcctcctcccactcacagactagaacccaggcaaagcacctaacacgtcacagcacaagtatgtcaaggattgggccaaggcaaagcagaaaaacaatgaggcacag

SEQ ID NO: 54934 - DNA, 600 bp, Chicken  19866894308103_6
gttccttcctctctatttacagggtagatgtatatttgtacctgcaactggtcagctcaactgcagctttgcagtaggcacaaagcagatgggctcaaaaacctgcagccagtgattaagacacacraagggaygcctcaagactgctgtgcgagtgaaactmcacattcttatcattttggagaaacacagcattgtctcaagcctcaaaagacagcactggtgtatttcccagttacctcgtgcctcagtttccccatctttgctgttaagcccatcactgaaagaagcgatacatcyccacccaaacaagccccaaattcccaatctcgttcagaataaatcacaaaacacaatcctcctcccactcacagactagaacccaggcaaagcacctaacacgtcacagcacaagtatgtcaaggattgggccaaggcaaagcagaaaaacaatgaggcacagctgaaggaaagtagcggatgtcatttaggtgatgatgcacagtggttcaaacttttagccaaaacagcagaactcatgcccacatcctgctaaaagcacataggtgtatttattgaccaccaacttgcttaagtttt

SEQ ID NO: 54935 - DNA, 600 bp, Chicken  19866894308104_1
acccaacagcatttattatgcgtttattaacactgtccataacatagtaggatcccctctccttttatcgcttccactctgatgtgttttcttgacttcctcatatcttctcattctttcattcaactggtatggcatattgataaaagtgaggtgatgcttttgcttgtagatttaggaaatgggaacatccagttaagtttctcagttcactttactcattgtagttctggtgatttttttgcagtcttttgggatcacagtacaccgtttctgttcaaatttttgcatctgttctcyacagcactcatgcttgaaaaccagttaggaggtattgaaatacatattttcagaaagcataaaatcctgagatgattgatgactggagataaaaattggtagtttcaaggtgcaaggtgttcaagtaagctatatgtctttatggtattctgccatattgccatgcagaatgttgcgttaggatagtataatttaaacacagtggataaatttctgtgtgacatcaagaatgttcaacaccatcgtgtacagcaactggatgtaataggcaaagaaattaaagggagtttagaaaatgaa

SEQ ID NO: 54936 - DNA, 600 bp, Chicken  19866894308104_2
cactcatgcttgaaaaccagttaggaggtattgaaatacatattttcagaaagcataaaatcctgagatgattgatgactggagataaaaattggtagtttcaaggtgcaaggtgttcaagtaagctatatgtctttatggtattctgccatattgccatgcagaatgttgcgttaggatagtataatttaaacacagtggataaatttctgtgtgacatcaagaatgttcaacaccatcgtgtacagcaactggatgtaataggcaaagaaattaaagggagtttagaaaatgaaaaawtgtgcaaaccgttgatttaagaactgaggatcttatttggtgctcacaaaagtttccaacgtccttctttttgtagttttaatgtacagtacatatataacgtatgtatttctgagcctgggtatactatctagtatctagaatgagatatacatttataatgcttggctttcagatttaagtctgagcaaaccaagagctcagtaaggtcgggctataatagttcctaaatgtagggcttctgagaacttgtttgcaaattgaaggattacttcatctagcaaaagtgataaagaaact

SEQ ID NO: 54937 - DNA, 599 bp, Chicken  19866894308105_1
  misc_feature (1)..(218): n is any nucleotide
nnnnnnnnnnnnnnnnnnnnnnnnnnnnnnnnnnnnnnnnnnnnnnnnnnnnnnnnnnnnnnnnnnnnnnnnnnnnnnnnnnnnnnnnnnnnnnnnnnnnnnnnnnnnnnnnnnnnnnnnnnnnnnnnnnnnnnnnnnnnnnnnnnnnnnnnnnnnnnnnnnnnnnnnnnnnnnnnnnnnnnnnnnnnnnnnnnnnnnnnnnnnnnnnnnnnnnnnnnttggaagctagaagcaggtgatatcacccctcatctctagattcagagatgggcttgtgtatcgttggactaccaagcaagyttattcctataaatgcttacacccctcaggatgtattatcttggtacatcataagtcacaaaagtttggtgacccttatcagagctctaccagattctacagatatccattaattaaaagcatgttggtgactccacaggttttctaaatgtcagtcctattgattcactatcctgaacactatgaagttcttcagaatgtctattctacgtcttttttgatataacttttttagctccatcttgaccgcaacagacagaaatagtagattatattcttctacttatgaacatctttta

SEQ ID NO: 54938 - DNA, 600 bp, Chicken  19866894308112_1
accaggatagtggtactatttaaggaagagatttgaaatgtatataaattcgaacttcaccaaattactgcctcagtaaggcggtagtatcggctgctgcatcacactgcgttaatatgcttagagcctaatcctcctcgcctttgcctcaaaggtaatcccattgacatcagtttgttcttaagtcttctaataactacaggcagttgtagtactttgcaggatcacattcagagatcacaggatgcaaaactcaactccacaggtaacttactctattgaataatatggcaagtagarctgtagtttgacttctgcttcatgcctggtgatttttctttgagggttcagacttttggtataaatttgtgacctataacatgaaacctgcaatgatacactgaagtaggtaagctgtgtaacaaatacaatccccaaagaagaagaatccctgcaccatyacacaatacaacatccacatgcaaaagggatatctgtgggtcagtgctaattctgctagtactagaactgagccaacaagtatttttcatttatgtaagtcagcactgctgacagtttcactgttaatgtagcttaggt

SEQ ID NO: 54939 - DNA, 600 bp, Chicken  19866894308112_2
cattgacatcagtttgttcttaagtcttctaataactacaggcagttgtagtactttgcaggatcacattcagagatcacaggatgcaaaactcaactccacaggtaacttactctattgaataatatggcaagtagarctgtagtttgacttctgcttcatgcctggtgatttttctttgagggttcagacttttggtataaatttgtgacctataacatgaaacctgcaatgatacactgaagtaggtaagctgtgtaacaaatacaatccccaaagaagaagaatccctgcaccatyacacaatacaacatccacatgcaaaagggatatctgtgggtcagtgctaattctgctagtactagaactgagccaacaagtatttttcatttatgtaagtcagcactgctgacagtttcactgttaatgtagcttaggttttcctgtatggtggaaacaatgtgaagaaggaaaaaagtaattttcaaaagcaattgaagatccttcttcctgcgctctgcctccactctgattttgttttctcaaaaatagcctgtgtgtgatttgacacagtcaaaaagaattttaccataaagagta

SEQ ID NO: 54940 - DNA, 600 bp, Chicken  19866894308117_1
atcagtgacatcgataatggggttgagtgtactctcagcaagtttgcagattacaccaagctgtgtagtgcagttgacacacctgagggtcaggataccattcagagggacctggacatgcttgagcagtgagcccaggagaacctcatgaagttcaacaaaaccaagtgcaaggtcttgcacctgggttgtggcaaaccctgctgtcagtacaagctgagggatgtaaggacagaacacagccctgctgaaaagaacctgggggtactggtggatggcaagctggacatgagtaaaaawtgtgcccttacagtgcagaaagccagacatatcctgggctgcatcaaaagaaacatggtcagcaggaagagggaggtgatcctgtgcctctgcccaacactggtgaggcctcatctgaagtactgtgttcagatgtggaatcctcactagaggagagatatggacctgttggagcatatccagaggagggcaacaaaaatgatcccagggacggatcctctcccatgaggacaggctgatagagctgaggctgtgcagtctggagaagagaaggctgtggggagacctgagagtggcctg

SEQ ID NO: 54941 - DNA, 599 bp, Chicken  19866894308118_1
  misc_feature (1)..(56): n is any nucleotide
nnnnnnnnnnnnnnnnnnnnnnnnnnnnnnnnnnnnnnnnnnnnnnnnnnnnnnnnctctttttttttccccccattatattacatcattagtgcctgtacttaaacagtccctgcctgagtgtggaattctgtgtcatgatgttttccaaatcaaaaagctacctgaaggcacattaacatcatacaaggtaatcacagactgtgggacaggaaaaaaagtttcatcttctgaatgccagtgcaacctagtagtgtaacccaacatatgaaaagtttatcattataaatggcctttttstagcataaatgcataatrtcttgctgtatgacctagcagtagtacatcattgtattttaatacatattttcctgaagaacttcaacctggggaaacactaccttgggaagaagttcaggaggcaccagaactagaagaccaaacaaaatcagtgactagaaggcttataccatcttttcaaataagatattctcaacatctttcaaaatgatttgtggcttaaactgaaagtggatgacttccatgacaattttgttattactcttccaagaacaatatcctggtgctctattcatgta

SEQ ID NO: 54942 - DNA, 599 bp, Chicken  19866894308118_2
  misc_feature (1)..(38): n is any nucleotide
nnnnnnnnnnnnnnnnnnnnnnnnnnnnnnnnnnnnnnctctttttttttccccccattatattacatcattagtgcctgtacttaaacagtccctgcctgagtgtggaattctgtgtcatgatgttttccaaatcaaaaagctacctgaaggcacattaacatcatacaaggtaatcacagactgtgggacaggaaaaaaagtttcatcttctgaatgccagtgcaacctagtagtgtaacccaacatatgaaaagtttatcattataaatggcctttttstagcataaatgcataatrtcttgctgtatgacctagcagtagtacatcattgtattttaatacatattttcctgaagaacttcaacctggggaaacactaccttgggaagaagttcaggaggcaccagaactagaagaccaaacaaaatcagtgactagaaggcttataccatcttttcaaataagatattctcaacatctttcaaaatgatttgtggcttaaactgaaagtggatgacttccatgacaattttgttattactcttccaagaacaatatcctggtgctctattcatgtatggagatgcttggcatac

SEQ ID NO: 54943 - DNA, 600 bp, Chicken  19866894308119_1
ggcggccccttccaacgaccgagcggaatgaacaacctttgctcacagcgtctgccccagaaatcacttctgagctgcagatttgtctacgttgacgcacccagcagcagagaaggcacttcagtgcttatcagctgcaataaaggagagcggaacgttggggctttggtgctgggacttggccattagccatggggaagctcggatcaggctaagaaatgcctctttgacatcagtccgtaagagatcacattgttggggatggtggcaaaaggctgtaaactgatggagcaaagcccycgtgtccctgtaaggctcctggagagccccgacgtgggscttgtatggccctgcatcactgagtgaagacacagccttaggagccgcactcccttctccgcgtccccatgtaagaacgacagacgctatccctgcagctcagcctcgagcagcaaggcagattaaacaccagctctcccataggtgggaagtggcaaactgctgctgatctgcagcctgggccgagccaggaagcctgctgctcagctaaagccccgtgatacgtatggggagagtgttatctaaaccactaggacgact

SEQ ID NO: 54944 - DNA, 600 bp, Chicken  19866894308119_2
tgctcacagcgtctgccccagaaatcacttctgagctgcagatttgtctacgttgacgcacccagcagcagagaaggcacttcagtgcttatcagctgcaataaaggagagcggaacgttggggctttggtgctgggacttggccattagccatggggaagctcggatcaggctaagaaatgcctctttgacatcagtccgtaagagatcacattgttggggatggtggcaaaaggctgtaaactgatggagcaaagcccycgtgtccctgtaaggctcctggagagccccgacgtgggscttgtatggccctgcatcactgagtgaagacacagccttaggagccgcactcccttctccgcgtccccatgtaagaacgacagacgctatccctgcagctcagcctcgagcagcaaggcagattaaacaccagctctcccataggtgggaagtggcaaactgctgctgatctgcagcctgggccgagccaggaagcctgctgctcagctaaagccccgtgatacgtatggggagagtgttatctaaaccactaggacgactataaaatatcttaacagcttctgctgcttagctggaagc

SEQ ID NO: 54945 - DNA, 599 bp, Chicken  19866894308124_1
  misc_feature (1)..(115): n is any nucleotide
nnnnnnnnnnnnnnnnnnnnnnnnnnnnnnnnnnnnnnnnnnnnnnnnnnnnnnnnnnnnnnnnnnnnnnnnnnnnnnnnnnnnnnnnnnnnnnnnnnnnnnnnnnnnnnnnnnnattcttagatctgccacatacagatccatataaaaataaaatactgtttattggctttatatagggggaaaaccccttttgtgaatatatgaattacatattcaaatggtttctatgtattaaaaggtcacaaacaaaatgtatttactgatatcttaatgcatttaaaacaaaatctcacaatwcactcacaaaaaatactccttttgtatcttcatggatgaatgggtaaaaagcttagaagagaggcaagcaccccgcagcgtgccctaggccccttctcatctaggtctggttgcagtaaagagtttctccctctgccttgcatgccagccttgtctcatggaaaccccaggacatgagggggtgctagtggatgcacaagtgtctttttgatattaracaagatgtggctgagatgtgtactttaacttatgttagaaactcataataaaaacatcatgaaatgtttcactgaaaacac

SEQ ID NO: 54946 - DNA, 600 bp, Chicken  19866894308124_2
caaatggtttctatgtattaaaaggtcacaaacaaaatgtatttactgatatcttaatgcatttaaaacaaaatctcacaatwcactcacaaaaaatactccttttgtatcttcatggatgaatgggtaaaaagcttagaagagaggcaagcaccccgcagcgtgccctaggccccttctcatctaggtctggttgcagtaaagagtttctccctctgccttgcatgccagccttgtctcatggaaaccccaggacatgagggggtgctagtggatgcacaagtgtctttttgatattaracaagatgtggctgagatgtgtactttaacttatgttagaaactcataataaaaacatcatgaaatgtttcactgaaaacactsggtggtttactagcacaaagaaaggatcgtacaaaccctttttctctctccctgttcttccttaacactttttcccttaatgcaatgatttaaagattaacttctaccacattattcatggcagagcctgcacctccattttcttctcttaattgtaaagctttggagaccttaaactgcaacttcatttgagttaaactgaacgaacagtgacat

SEQ ID NO: 54947 - DNA, 600 bp, Chicken  19866894308124_3
actcacaaaaaatactccttttgtatcttcatggatgaatgggtaaaaagcttagaagagaggcaagcaccccgcagcgtgccctaggccccttctcatctaggtctggttgcagtaaagagtttctccctctgccttgcatgccagccttgtctcatggaaaccccaggacatgagggggtgctagtggatgcacaagtgtctttttgatattaracaagatgtggctgagatgtgtactttaacttatgttagaaactcataataaaaacatcatgaaatgtttcactgaaaacactsggtggtttactagcacaaagaaaggatcgtacaaaccctttttctctctccctgttcttccttaacactttttcccttaatgcaatgatttaaagattaacttctaccacattattcatggcagagcctgcacctccattttcttctcttaattgtaaagctttggagaccttaaactgcaacttcatttgagttaaactgaacgaacagtgacatgcctgagaacatacaaaaatgaaagctttctaatgagataggtggatatgtctccgctaagagcagccaccaacctgtgttatg

SEQ ID NO: 54948 - DNA, 600 bp, Chicken  19866894308130_1
aagggccaaggcctgaattttagagcccaaggtctccttcaatggccagccctcctcccactcaccaatcaccatctttgtgaaggcccaaagcctcattttaatgctcagagcctcctttcaactgcccaaagccacatgccaggggccaaaagctgatatttagggcctgaagactcttttggggatcaaatgtccattttgagatatcaaagcgctactttaggatccagctcctaagctgtagagtacaaagccccattctgaaaggttcaaagccttgtatcaaggtccaaaccrtcctttgtagagtacaagccttctttttccattccagtgcacagtaatgggaccccaaacatctttttttattgccctaagcctcctatgacatatttgactttcactttgaacacacaaaataakcatctataaacaatttctctgaggggtgaagtccaaccctcacacagtttatgagcctaaacagtgcatctgagatgcgcrgtcctgactgcagccatctccttccccagagctgtgcctggagggtgacaaccctgtgtcttggttctcctccacttgtttcagagggaggga

SEQ ID NO: 54949 - DNA, 600 bp, Chicken  19866894308130_2
gcccaaagccacatgccaggggccaaaagctgatatttagggcctgaagactcttttggggatcaaatgtccattttgagatatcaaagcgctactttaggatccagctcctaagctgtagagtacaaagccccattctgaaaggttcaaagccttgtatcaaggtccaaaccrtcctttgtagagtacaagccttctttttccattccagtgcacagtaatgggaccccaaacatctttttttattgccctaagcctcctatgacatatttgactttcactttgaacacacaaaataakcatctataaacaatttctctgaggggtgaagtccaaccctcacacagtttatgagcctaaacagtgcatctgagatgcgcrgtcctgactgcagccatctccttccccagagctgtgcctggagggtgacaaccctgtgtcttggttctcctccacttgtttcagagggagggagaggcctctgaagcaaaacccagcagagggagccttgtcttcttgtgtcgcctgacatggaaggtttccatcctgccagtaggagatgcagttgttctttgttacaaatctggagaggcaaaaatt

SEQ ID NO: 54950 - DNA, 600 bp, Chicken  19866894308130_3
tatcaaagcgctactttaggatccagctcctaagctgtagagtacaaagccccattctgaaaggttcaaagccttgtatcaaggtccaaaccrtcctttgtagagtacaagccttctttttccattccagtgcacagtaatgggaccccaaacatctttttttattgccctaagcctcctatgacatatttgactttcactttgaacacacaaaataakcatctataaacaatttctctgaggggtgaagtccaaccctcacacagtttatgagcctaaacagtgcatctgagatgcgcrgtcctgactgcagccatctccttccccagagctgtgcctggagggtgacaaccctgtgtcttggttctcctccacttgtttcagagggagggagaggcctctgaagcaaaacccagcagagggagccttgtcttcttgtgtcgcctgacatggaaggtttccatcctgccagtaggagatgcagttgttctttgttacaaatctggagaggcaaaaattgagagagatgaagaaaagctacatctaggagtggaaatgtcttagctcaagggctagagaagggaagatccacaaaaagct

SEQ ID NO: 54951 - DNA, 599 bp, Chicken  19866894308139_1
  misc_feature (1)..(159): n is any nucleotide
nnnnnnnnnnnnnnnnnnnnnnnnnnnnnnnnnnnnnnnnnnnnnnnnnnnnnnnnnnnnnnnnnnnnnnnnnnnnnnnnnnnnnnnnnnnnnnnnnnnnnnnnnnnnnnnnnnnnnnnnnnnnnnnnnnnnnnnnnnnnnnnnnnnnnnnnnnnnnnnctgtgaatttgattcagagcttaagttcagttatttttttacaatctgctgtacaactggattaacaaatttaagttggcttgagctcttgaaaagattattctaatctgttgaactggagttggacatgctgaaaggggyctttttcctgagatatttactcacctacagtttcatagaagtaaagacatacaaggaagcgttcaggaaaaatgtgatagcaggggagtaccacatcttttgtttgcaggcctgggaaggtggtaggtctcgatttgacaagtcttccctcacaacatgctccattaaccaggatagactgtaatggatgtgtcccgatgcagaaggagaaactgaacrttttcccctctgtacygctgcaaattttacaatgaagaagactcacttggaaatgaatgaatgattcccatgaatgagtg

SEQ ID NO: 54952 - DNA, 600 bp, Chicken  19866894308139_2
attaacaaatttaagttggcttgagctcttgaaaagattattctaatctgttgaactggagttggacatgctgaaaggggyctttttcctgagatatttactcacctacagtttcatagaagtaaagacatacaaggaagcgttcaggaaaaatgtgatagcaggggagtaccacatcttttgtttgcaggcctgggaaggtggtaggtctcgatttgacaagtcttccctcacaacatgctccattaaccaggatagactgtaatggatgtgtcccgatgcagaaggagaaactgaacrttttcccctctgtacygctgcaaattttacaatgaagaagactcacttggaaatgaatgaatgattcccatgaatgagtgaatgaatgaatatctgtcatggataagttcagagactgatgtttcataatacagaatttcctattcatatgagcgaaacaaattatagaagagtgtctagctgcagggctggtagaaatgaggacagctctgctgagctgaaaaaaacaccattggcttagaaatgattctaacatgaccttagtttttcagaacacaaatatttttgcatgagttgctt

SEQ ID NO: 54953 - DNA, 600 bp, Chicken  19866894308139_3
tggcttgagctcttgaaaagattattctaatctgttgaactggagttggacatgctgaaaggggyctttttcctgagatatttactcacctacagtttcatagaagtaaagacatacaaggaagcgttcaggaaaaatgtgatagcaggggagtaccacatcttttgtttgcaggcctgggaaggtggtaggtctcgatttgacaagtcttccctcacaacatgctccattaaccaggatagactgtaatggatgtgtcccgatgcagaaggagaaactgaacrttttcccctctgtacygctgcaaattttacaatgaagaagactcacttggaaatgaatgaatgattcccatgaatgagtgaatgaatgaatatctgtcatggataagttcagagactgatgtttcataatacagaatttcctattcatatgagcgaaacaaattatagaagagtgtctagctgcagggctggtagaaatgaggacagctctgctgagctgaaaaaaacaccattggcttagaaatgattctaacatgaccttagtttttcagaacacaaatatttttgcatgagttgcttcacagaactgaaattt

SEQ ID NO: 54954 - DNA, 600 bp, Chicken  19866894308142_1
gttggctttggtggcagggtgcttggtagggtgactcctggggttgtctcaccatgttgctttttgcacaatttctcagcgggttgctcttactagagattctccttgttggagtagagatggggaacaaatggtttttatctgcacaggcagaaaaaaataaagacttttgagagcaaagccagcagaattcaagccaccagaatgaggcaggtacaaagtagacatggccttaaagagaatagatgagcaactttggcatttctttggggaaaagcaagcaagcagacagtctgctcrtgataggggtctaattgcagtggcacaggtcttgaaactcccttcatgttgaagtagtgtgtgagggcctatggtgcacagatccaacagactgatttttgtatgcttgtgtagtgaggcacaatgcaggatgtctccctggagggaaggtctgagccagcccaacacctccacatcttcagctcctgtgactgaaccttgatggacttgcaactgcattgctgtactggggaactgtttacattttgttttcattattaagcaggcctctgcattgcaagtcttttggtgggaggctgc

SEQ ID NO: 54955 - DNA, 600 bp, Chicken  19866894308143_1
tttgtgcccatagcgaaagcattgtcctctgctgtccatctcctaccctggggggatggatagaggtgcagctgctgccacagttgagcagcccaaggtcatggtgaaagagaaggaggcatcacagccgtggtcagattgcaggtccgtgtcacagacgcctgttgagaggggactggaagtctgtaccattcctgggcacgtccctgacaccccgcagtacactcccacacacactcccactgccagatggcctccaaaggtctcttccaacagaaattattttagaattttattaarwacgccagagaaccccagtctttgttctccagagaagaatataattccctgtcttcttgtacaagaaaaaaggaggaaaaaaaaaagcattcaccctccaaaataattataataaaacattcctgttcctacggaagtcacctaagcattcaaactaccgcccatgagtttgttctgctgacagctctgagtttgcacctgctgcttttcctcactctgtgtttggcaggcaaygagaacagaaatggaaatcatctgtgaccagacaagcagctgaaattaacaggaacgagggaagcg

SEQ ID NO: 54956 - DNA, 600 bp, Chicken  19866894308143_2
ttgtgcccatagcgaaagcattgtcctctgctgtccatctcctaccctggggggatggatagaggtgcagctgctgccacagttgagcagcccaaggtcatggtgaaagagaaggaggcatcacagccgtggtcagattgcaggtccgtgtcacagacgcctgttgagaggggactggaagtctgtaccattcctgggcacgtccctgacaccccgcagtacactcccacacacactcccactgccagatggcctccaaaggtctcttccaacagaaattattttagaattttattaarwacgccagagaaccccagtctttgttctccagagaagaatataattccctgtcttcttgtacaagaaaaaaggaggaaaaaaaaaagcattcaccctccaaaataattataataaaacattcctgttcctacggaagtcacctaagcattcaaactaccgcccatgagtttgttctgctgacagctctgagtttgcacctgctgcttttcctcactctgtgtttggcaggcaaygagaacagaaatggaaatcatctgtgaccagacaagcagctgaaattaacaggaacgagggaagcga

SEQ ID NO: 54957 - DNA, 600 bp, Chicken  19866894308143_3
cactcccactgccagatggcctccaaaggtctcttccaacagaaattattttagaattttattaarwacgccagagaaccccagtctttgttctccagagaagaatataattccctgtcttcttgtacaagaaaaaaggaggaaaaaaaaaagcattcaccctccaaaataattataataaaacattcctgttcctacggaagtcacctaagcattcaaactaccgcccatgagtttgttctgctgacagctctgagtttgcacctgctgcttttcctcactctgtgtttggcaggcaaygagaacagaaatggaaatcatctgtgaccagacaagcagctgaaattaacaggaacgagggaagcgacagcacaacgaaaggcagaggcaatgtcgtgggcagastaggagctaacatttccagctcatcaggcaagaagctctcatgttgggatttgtactgtgktgttgcttgtaatttcagagaacgcactgtgactccaaatgacttattcagaggaagacaaaaggcagctccatgatgagttcaattaagcttgagaacatatcattcgtggcattttcttcatggacattaac

SEQ ID NO: 54958 - DNA, 600 bp, Chicken  19866894308143_4
tataattccctgtcttcttgtacaagaaaaaaggaggaaaaaaaaaagcattcaccctccaaaataattataataaaacattcctgttcctacggaagtcacctaagcattcaaactaccgcccatgagtttgttctgctgacagctctgagtttgcacctgctgcttttcctcactctgtgtttggcaggcaaygagaacagaaatggaaatcatctgtgaccagacaagcagctgaaattaacaggaacgagggaagcgacagcacaacgaaaggcagaggcaatgtcgtgggcagastaggagctaacatttccagctcatcaggcaagaagctctcatgttgggatttgtactgtgktgttgcttgtaatttcagagaacgcactgtgactccaaatgacttattcagaggaagacaaaaggcagctccatgatgagttcaattaagcttgagaacatatcattcgtggcattttcttcatggacattaactttagggtgtaccaccatacctaccctgcaaatctagtgagggaagaaggacagtgacctgcagcaaagcattctgtcaatatttgcccttgctggaaagacaag

SEQ ID NO: 54959 - DNA, 600 bp, Chicken  19866894308143_5
aaataattataataaaacattcctgttcctacggaagtcacctaagcattcaaactaccgcccatgagtttgttctgctgacagctctgagtttgcacctgctgcttttcctcactctgtgtttggcaggcaaygagaacagaaatggaaatcatctgtgaccagacaagcagctgaaattaacaggaacgagggaagcgacagcacaacgaaaggcagaggcaatgtcgtgggcagastaggagctaacatttccagctcatcaggcaagaagctctcatgttgggatttgtactgtgktgttgcttgtaatttcagagaacgcactgtgactccaaatgacttattcagaggaagacaaaaggcagctccatgatgagttcaattaagcttgagaacatatcattcgtggcattttcttcatggacattaactttagggtgtaccaccatacctaccctgcaaatctagtgagggaagaaggacagtgacctgcagcaaagcattctgtcaatatttgcccttgctggaaagacaagattgggcaaaatgatgaatcgagcaagctgacatgtgtcacagacagggaccagggcctag

SEQ ID NO: 54960 - DNA, 600 bp, Chicken  19866894308147_1
accaggcccaccccaggcaccctactaccacaagagcacagaggcacaaagacaggtaagagcccaaattaagggctcagaggatgggataccctgcccaggtccatcccagcaccatcccagggcagcctcagtcccagcgtccaggtggaacactcatcaccacaagtcatggagagcaactctccagagcaactttctaagagaggtcgatgccaggggtttgggacacattaggggatgcagggtaaggcaagacttattataggatggttaggggaggagccaaaggcagaggargggaagcactgtggtgatttggggaggaacaagtctggaaaaacaaagggctaaggagattaaaggggtcagttgtgtgtaagcaggctgctggtctatacatttgcctggccatgccttgggcctggtcagcacagtctgtcctgtctgcagattaaactcagtttcttcttcttttcctgagcaaagcattccctgttatacatgcaagtgtgtgtacrcaggtctggggtcaggccatgggcactaggccccctggcagctactaaagtcaagtgtgcaagttcacgtgtgaacacc

SEQ ID NO: 54961 - DNA, 600 bp, Chicken  19866894308147_2
gtttgggacacattaggggatgcagggtaaggcaagacttattataggatggttaggggaggagccaaaggcagaggargggaagcactgtggtgatttggggaggaacaagtctggaaaaacaaagggctaaggagattaaaggggtcagttgtgtgtaagcaggctgctggtctatacatttgcctggccatgccttgggcctggtcagcacagtctgtcctgtctgcagattaaactcagtttcttcttcttttcctgagcaaagcattccctgttatacatgcaagtgtgtgtacrcaggtctggggtcaggccatgggcactaggccccctggcagctactaaagtcaagtgtgcaagttcacgtgtgaacaccagcgcacaccaaaccaaagccagcttggtgatgtggcctggaagctgagaagggagacatatccttaagggagagactacactacagaggggctaggggagtcctggctgactggaatagggctgtagattcgagggcacctgtatccaggtgccaaccactggggagactgagttagggttaggacagctgctatgagtctgagctcacgctgctgggtg

SEQ ID NO: 54962 - DNA, 599 bp, Chicken  19866894308152_1
  misc_feature (1)..(73): n is any nucleotide
nnnnnnnnnnnnnnnnnnnnnnnnnnnnnnnnnnnnnnnnnnnnnnnnnnnnnnnnnnnnnnnnnnnnnnnnnccacacctgtgtaagcttcaagaggcatgagaggagcatccaccgtctcatttcctccactgttgaaagcaggggagaaactgccacaccttgtccttgagcagctccaaagctggagctatgtgaattctgctgtgaaatcccatcccaccggagctggttttgtaccacgtggttttcctccccttccagctcctgctcgcagttcagccgaggtaatttagctktaaccattctgtaatactagctcttgggctgctgtagtgccctttgctgctggacctgcctgagcatgctggcgcttgctgcaggaggaggatgcggtgggatggctgcggtaccagctgtagcccagacctagctgacccgtgccaggccatgtatgcggatggcaaaataccatctacccttttggaaaccaatctgctccattaactgatgtcagggaccaaaccacagcgccgttctgatgagaaacgacgtgygttgtgggaatgcatggctggtttccacaagccttatcaca

SEQ ID NO: 54963 - DNA, 600 bp, Chicken  19866894308152_2
cttccagctcctgctcgcagttcagccgaggtaatttagctktaaccattctgtaatactagctcttgggctgctgtagtgccctttgctgctggacctgcctgagcatgctggcgcttgctgcaggaggaggatgcggtgggatggctgcggtaccagctgtagcccagacctagctgacccgtgccaggccatgtatgcggatggcaaaataccatctacccttttggaaaccaatctgctccattaactgatgtcagggaccaaaccacagcgccgttctgatgagaaacgacgtgygttgtgggaatgcatggctggtttccacaagccttatcacaagkcaaatcttttaacagtctttcatgcccattttttaatttttcctccttttttttttaatctttaaatggagaaatggttgctacagtcctgctgttaagcatttcttaagttttgaagcattttcacagtctgtatacataccgaaaatcaggatgaagagaccttttgcccttctgctctacgggaggtctctgcccttcccgagctcgccttcggaccccacgttaggctctgacaggtgtacccccccaggca

SEQ ID NO: 54964 - DNA, 600 bp, Chicken  19866894308152_3
accattctgtaatactagctcttgggctgctgtagtgccctttgctgctggacctgcctgagcatgctggcgcttgctgcaggaggaggatgcggtgggatggctgcggtaccagctgtagcccagacctagctgacccgtgccaggccatgtatgcggatggcaaaataccatctacccttttggaaaccaatctgctccattaactgatgtcagggaccaaaccacagcgccgttctgatgagaaacgacgtgygttgtgggaatgcatggctggtttccacaagccttatcacaagkcaaatcttttaacagtctttcatgcccattttttaatttttcctccttttttttttaatctttaaatggagaaatggttgctacagtcctgctgttaagcatttcttaagttttgaagcattttcacagtctgtatacataccgaaaatcaggatgaagagaccttttgcccttctgctctacgggaggtctctgcccttcccgagctcgccttcggaccccacgttaggctctgacaggtgtacccccccaggcaaactctggcagcggctccaacgcggcggggccgggagtagctcc

SEQ ID NO: 54965 - DNA, 589 bp, Chicken  19866894308152_4
ctgagcatgctggcgcttgctgcaggaggaggatgcggtgggatggctgcggtaccagctgtagcccagacctagctgacccgtgccaggccatgtatgcggatggcaaaataccatctacccttttggaaaccaatctgctccattaactgatgtcagggaccaaaccacagcgccgttctgatgagaaacgacgtgygttgtgggaatgcatggctggtttccacaagccttatcacaagkcaaatcttttaacagtctttcatgcccattttttaatttttcctccttttttttttkatctttaaatggagaaatggttgctacagtcctgctgttaagcatttcttaagttttgaagcattttcacagtctgtatacataccgaaaatcaggatgaagagaccttttgcccttctgctctacgggaggtctctgcccttcccgagctcgccttcggaccccacgttaggctctgacaggtgtacccccccaggcaaactctggcagcggctccaacgcggcggggccgggagtagctccgtgaccccctgcaattccaagagcggcccctggggggcgcagcgag

SEQ ID NO: 54966 - DNA, 578 bp, Chicken  19866894308153_1
ctgattcacttaaaagtcttatttatgtgttggctggccaggggctgtcagggtgtgctcatttttgttcctcatgggcaggaagccagagggagttcttagcgtggtgtccagggcaggaacaaggcttcctctttgtctcttccatgtgggccacacatgaagcttgggaattccttctgaagtctctgttgggcatctctgagctttgtgtggtccctcagccacccctgcctcctccaggtggcacagctggggtttggctcttgttggccccacgtggtgctggtccccttcctstgggtgcccccgtgccagctgttggggtgcagagagggtgcacatcccaatgtctacggggtctatctcacatctccttcaccccactgtggatggagctcaccagatcttggcgcagacctaatggaattggtcaccccccaccttgcrktctcccctccatgagttgctggttctgggtgttgtggagcgctctgtgtccatctggagtcccacctgacactcagtcttcctcgatgtccgcccccccccctctacagctttgggaatgcgggtaa

SEQ ID NO: 54967 - DNA, 428 bp, Chicken  19866894308153_2
gggccacacatgaagcttgggaattccttctgaagtctctgttgggcatctctgagctttgtgtggtccctcagccacccctgcctcctccaggtggcacagctggggtttggctcttgttggccccacgtggtgctggtccccttcctstgggtgcccccgtgccagctgttggggtgcagagagggtgcacatcccaatgtctacggggtctatctcacatctccttcaccccactgtggatggagctcaccagatcttggcgcagacctaatggaattggtcaccccccaccttgcrktctcccctccatgagttgctggttctgggtgttgtggagcgctctgtgtccatctggagtcccacctgacactcagtcttcctcgatgtccgcccccccccctctacagctttgggaatgcgggtaa

SEQ ID NO: 54968 - DNA, 427 bp, Chicken  19866894308153_3
ggccacacatgaagcttgggaattccttctgaagtctctgttgggcatctctgagctttgtgtggtccctcagccacccctgcctcctccaggtggcacagctggggtttggctcttgttggccccacgtggtgctggtccccttcctstgggtgcccccgtgccagctgttggggtgcagagagggtgcacatcccaatgtctacggggtctatctcacatctccttcaccccactgtggatggagctcaccagatcttggcgcagacctaatggaattggtcaccccccaccttgcrktctcccctccatgagttgctggttctgggtgttgtggagcgctctgtgtccatctggagtcccacctgacactcagtcttcctcgatgtccgcccccccccctctacagctttgggaatgcgggtaa

SEQ ID NO: 54969 - DNA, 600 bp, Chicken  19866894308154_1
taatgtacccttgtttacattattcactagtataggtatattatttttcctttcttcaggctctaagcaaggcatttggtgtggagaactaatgggacatctttagaaaatgtgttatctgtgtttctgaatctaatgtcaagatatagcgttaattcttattttcaggcttgtagggaactatctgtttaagaggattccagaactgctttgaaatgtgatgagttttattttcacagagcttctgagttagaaggctaatgtgaaaaatcagatattccagtaaccattggtgacagrcacattcccaggtcagagtttttattgggtcaaaatccccatccagtttgcagaaagaagctcgtggaaacaataaaaagtaaagtccaagaagatagatctgtcaggtataatagcccacatgtgaaagtcagaggtatatttgtagatcagtaaatcaaaagctgtattttaagtatccatcttgatgctcagttcctgaatagaatgaaaatagcaagacaaagagagtctaaaaaggactataagctgatctattgatgcaacagcatgatagcaatttatacatatgtcttttta

SEQ ID NO: 54970 - DNA, 599 bp, Chicken  19866894308158_1
  misc_feature (1)..(95): n is any nucleotide
nnnnnnnnnnnnnnnnnnnnnnnnnnnnnnnnnnnnnnnnnnnnnnnnnnnnnnnnnnnnnnnnnnnnnnnnnnnnnnnnnnnnnnnnnnnnnnnattatattatctaaatgaaaaaaattaggtaaagattatctgcagttcataaagaagaaatgtttttcatttagtatgcttactctgattcatattcaatcatctcctgggtattccttaaatagaaggatcacttaaggacaagtagaaaaaccaaaactaagaagatattctaaatctttctccctttctttctcctggaagwgtatttgattacctaatagttttcagtacctaatatcatcacattcagaatgttctaaagaaacaaatgtagtaaatctgcttaaagtaagaatattgccatcttttttgataggaataatctaaaagtttctggtgcatttgctgatgcttacaatttcttagccccttagaaagcgtgcttccatagttacctagtttaaatggaaaacaactaattttgtgtagcattaaaaatctgacaaaaaatatctattttctgggatgcattacattttacagtattcttgagtacaagtt

SEQ ID NO: 54971 - DNA, 600 bp, Chicken  19866894308167_1
atgcaggccgcgggtctctgcccgcgtcccccgagagcagagagaggagagcgcggagttcgcccggcgaggcggctccccgccccgtcccctcgcagccgctccgtgtgcttttccaaaggaacgttaatgcccccgggctgtccgctgctgcctccgcgttggctgccaggtcagcgcagattgccgtgcggggattttctgcctcgtcccgggattcgcgcccttcaccgttctcacggtacccccgttagagcgccaggagcgttaacgtcgctgcccgtcctttcccttccagcrggtccgcgccctgcacggatgcaggaggcactgctgtgggctcagtggcaggcggggcacagccagccgcccacctcggccgtgcaggaagggggaagcgggtgggaaaggtgaaatgaggaagcaggagggctggtatgcctgcagtccgataagcaaaaggaagaaatatttaaaaaatggcaaagtcctcctccaccccctgagaaaacaacccaagaaaagctcatggtgcagaatgcaattgcataccgctatgtgagcagtgcccagccggcccccaggcagcagttttcccct

SEQ ID NO: 54972 - DNA, 600 bp, Chicken  19866894308171_1
atctgtgttttttttagttaaagaaaatctcagtatttgtcatactcaatgctttgatgaaactgctgcttttcagttcttaaaaaaaaaggtgttaattgtgttttttatttcaaaaattgatcatcctagttcatcaaatagcagtaaagtaggacagaaaatgcagtaacacataggattttaatgcctaaaggtgttggatagaagtgtgcactttcagtgcagaacagtgctacgactgcagccattatggtcccgagaggtttagctgagctgcacacctatgtgatggtgctyatacacagcactgtgagactgaggcctttggataccctcctgtaccaccaggctgtctgctactgggcagtgacagtagatacaggagcactgctctttgccattcacaagactagattcaagttgtctaaactttctcaccaagrgcgggatctccttgcacttagctgtgttcacatacctgtgaaagaagctctattctgacaacctggaaatctyactgaagggagaaagatggagtgacagtccaaaggtgtgcttcatgttggaggaagacatgtgggaagaatattccagtgc

SEQ ID NO: 54973 - DNA, 600 bp, Chicken  19866894308171_2
gtaaagtaggacagaaaatgcagtaacacataggattttaatgcctaaaggtgttggatagaagtgtgcactttcagtgcagaacagtgctacgactgcagccattatggtcccgagaggtttagctgagctgcacacctatgtgatggtgctyatacacagcactgtgagactgaggcctttggataccctcctgtaccaccaggctgtctgctactgggcagtgacagtagatacaggagcactgctctttgccattcacaagactagattcaagttgtctaaactttctcaccaagrgcgggatctccttgcacttagctgtgttcacatacctgtgaaagaagctctattctgacaacctggaaatctyactgaagggagaaagatggagtgacagtccaaaggtgtgcttcatgttggaggaagacatgtgggaagaatattccagtgcctcaccactcttactgtaaaaaacttcttccttatatccaatctaaatctcccctactttagtttgaaaccatttccccttgttctaccacaacagacgctgctgaagagtttgtccccttccttctcattgccctcctttactga

SEQ ID NO: 54974 - DNA, 600 bp, Chicken  19866894308171_3
tcagtgcagaacagtgctacgactgcagccattatggtcccgagaggtttagctgagctgcacacctatgtgatggtgctyatacacagcactgtgagactgaggcctttggataccctcctgtaccaccaggctgtctgctactgggcagtgacagtagatacaggagcactgctctttgccattcacaagactagattcaagttgtctaaactttctcaccaagrgcgggatctccttgcacttagctgtgttcacatacctgtgaaagaagctctattctgacaacctggaaatctyactgaagggagaaagatggagtgacagtccaaaggtgtgcttcatgttggaggaagacatgtgggaagaatattccagtgcctcaccactcttactgtaaaaaacttcttccttatatccaatctaaatctcccctactttagtttgaaaccatttccccttgttctaccacaacagacgctgctgaagagtttgtccccttccttctcattgccctcctttactgaaaggccactctccggtctctcagagccttctcttctccaggttgaacagcctcagctctgacagcttttaagt

SEQ ID NO: 54975 - DNA, 600 bp, Chicken  19866894308177_1
tattaatgggtcaagcgatgtggtagcaagggatctggagatgaaaatgttggtgctgaggacccagtgtccatgcagcacacgtttcagggacaacaggggttgcttcaggttacctttcatctggtgggaaccgaacatttactcgttagttgtgagtaacttatcttccacttcagattaatctgaaatgaattcagtttgtgcactctatggctgctcctgatgtaaaccaaggcataataagtgacaatgcctgggatatttgcttcaaaaatattttcttgtctgaactaaaaygctagtggaggtgcacccttaatctgctactgaaacacaatcttttgctgcacaaggaggaatagtctagggatttagtgcacagcgatatkttrtatgtggctgctctatggggtaacatctttttggtggtggttaccacctggtccaaatgggtattgtctgctctcagttattcakttctcatacacttttagtcacatcagccacagctgacttcagtttgtgttgatatgccatattaygcaggatgcacagcaatgctagaggttgcacactgcctagtcccctacatccgct

SEQ ID NO: 54976 - DNA, 600 bp, Chicken  19866894308177_2
acaacaggggttgcttcaggttacctttcatctggtgggaaccgaacatttactcgttagttgtgagtaacttatcttccacttcagattaatctgaaatgaattcagtttgtgcactctatggctgctcctgatgtaaaccaaggcataataagtgacaatgcctgggatatttgcttcaaaaatattttcttgtctgaactaaaaygctagtggaggtgcacccttaatctgctactgaaacacaatcttttgctgcacaaggaggaatagtctagggatttagtgcacagcgatatkttrtatgtggctgctctatggggtaacatctttttggtggtggttaccacctggtccaaatgggtattgtctgctctcagttattcakttctcatacacttttagtcacatcagccacagctgacttcagtttgtgttgatatgccatattaygcaggatgcacagcaatgctagaggttgcacactgcctagtcccctacatccgctgctgtaatctctggtaaagggaacgagcagtcagttggagccaggtatatcctgaatcctgacagaacacgtttgcaaaactatatgagagc

SEQ ID NO: 54977 - DNA, 600 bp, Chicken  19866894308177_3
acaggggttgcttcaggttacctttcatctggtgggaaccgaacatttactcgttagttgtgagtaacttatcttccacttcagattaatctgaaatgaattcagtttgtgcactctatggctgctcctgatgtaaaccaaggcataataagtgacaatgcctgggatatttgcttcaaaaatattttcttgtctgaactaaaaygctagtggaggtgcacccttaatctgctactgaaacacaatcttttgctgcacaaggaggaatagtctagggatttagtgcacagcgatatkttrtatgtggctgctctatggggtaacatctttttggtggtggttaccacctggtccaaatgggtattgtctgctctcagttattcakttctcatacacttttagtcacatcagccacagctgacttcagtttgtgttgatatgccatattaygcaggatgcacagcaatgctagaggttgcacactgcctagtcccctacatccgctgctgtaatctctggtaaagggaacgagcagtcagttggagccaggtatatcctgaatcctgacagaacacgtttgcaaaactatatgagagccat

SEQ ID NO: 54978 - DNA, 546 bp, Chicken  19866894308177_4
ttaatctgaaatgaattcagtttgtgcactctatggctgctcctgatgtaaaccaaggcataataagtgacaatgcctgggatatttgcttcaaaaatattttcttgtctgaactaaaaygctagtggaggtgcacccttaatctgctactgaaacacaatcttttgctgcacaaggaggaatagtctagggatttagtgcacagcgatatkttrtatgtggctgctctatggggtaacatctttttggtggtggttaccacctggtccaaatgggtattgtctgctctcagttattcakttctcatacacttttagtcacatcagccacagctgacttcagtttgtgttgatatgccatattaygcaggatgcacagcaatgctagaggttgcacactgcctagtcccctacatccgctgctgtaatctctggtaaagggaacgagcagtcagttggagccaggtatatcctgaatcctgacagaacacgtttgcaaaactatatgagagccataaatcaataatgtaccacctattctttacag

SEQ ID NO: 54979 - DNA, 481 bp, Chicken  19866894308177_5
agtgacaatgcctgggatatttgcttcaaaaatattttcttgtctgaactaaaaygctagtggaggtgcacccttaatctgctactgaaacacaatcttttgctgcacaaggaggaatagtctagggatttagtgcacagcgatatkttrtatgtggctgctctatggggtaacatctttttggtggtggttaccacctggtccaaatgggtattgtctgctctcagttattcakttctcatacacttttagtcacatcagccacagctgacttcagtttgtgttgatatgccatattaygcaggatgcacagcaatgctagaggttgcacactgcctagtcccctacatccgctgctgtaatctctggtaaagggaacgagcagtcagttggagccaggtatatcctgaatcctgacagaacacgtttgcaaaactatatgagagccataaatcaataatgtaccacctattctttacag

SEQ ID NO: 54980 - DNA, 600 bp, Chicken  19866894308179_1
atgttgcacaacacagcatctgacactatgaagcctggtttaggacctcaggtgaaacagtggtatgtcaaaaagtatgaacatgggctactcctgtggactgcctgcattactagataggcccttcagccaagtagtttctggcaacgaagattagcacagacagtactcactatgaagttgtgaaagacagataagaacagatcacacattagaccaaatctctgaacattcttccttggcaggaacccaagttttcacctgaacttattttagattaatgttatttcatttactcaycattgtaactgaaagttattcttaaatatataacttaagctttatttatccttttatttttgttttttttttccaaaggagagagtgaaaaagttcaagcctattgagaaaacagctacattaataatttgctgaactgcatgattagctttacttgattccagtcactttcttagttgacttcctgcatcaaatctttaaatatgaaatcgaagtgtattttagaatcatacgttgtcgcaaaaaacagaccagtatttgtccatgttctctaggattacagtgaatagccattcaaag

SEQ ID NO: 54981 - DNA, 599 bp, Chicken  19866894308180_1
  misc_feature (1)..(185): n is any nucleotide
nnnnnnnnnnnnnnnnnnnnnnnnnnnnnnnnnnnnnnnnnnnnnnnnnnnnnnnnnnnnnnnnnnnnnnnnnnnnnnnnnnnnnnnnnnnnnnnnnnnnnnnnnnnnnnnnnnnnnnnnnnnnnnnnnnnnnnnnnnnnnnnnnnnnnnnnnnnnnnnnnnnnnnnnnnnnnnnnnnnnnnnnncttatatatcccacgccatctttaaaaagagttaatttttcttctacagtcataagaattctacaccaattctctctcattttttcttactatacaaacatttgtttaatttccktagcactggagcttgaaggaagtttagctactctgttgtttgtttttccacacttataactgtattttttaaaagtatttcagctcattgcttttccagaaggagtttattgccagccaagtggctaagcagcaacacagygttgccatgtggaaggtcaaatgatatgaccacaggcagctccaaaatactgccacaaggatttggcacccttgtggagggaatgaatcactcccacagtaaaattccctgggaatgatttttaggagtggaacagtcagtgactggagaaagtcaat

SEQ ID NO: 54982 - DNA, 599 bp, Chicken  19866894308180_2
  misc_feature (1)..(44): n is any nucleotide
nnnnnnnnnnnnnnnnnnnnnnnnnnnnnnnnnnnnnnnnnnnncttatatatcccacgccatctttaaaaagagttaatttttcttctacagtcataagaattctacaccaattctctctcattttttcttactatacaaacatttgtttaatttccktagcactggagcttgaaggaagtttagctactctgttgtttgtttttccacacttataactgtattttttaaaagtatttcagctcattgcttttccagaaggagtttattgccagccaagtggctaagcagcaacacagygttgccatgtggaaggtcaaatgatatgaccacaggcagctccaaaatactgccacaaggatttggcacccttgtggagggaatgaatcactcccacagtaaaattccctgggaatgatttttaggagtggaacagtcagtgactggagaaagtcaatcacttcccttctgtacagtaaaatctgccaaagtttggcatgaggtatggttgagtaacctctgcgcagcagggtatgtatgaaaaggcattaatcagggttatgctgagcagttacaaaactgtaaataaatgtgggcaa

SEQ ID NO: 54983 - DNA, 600 bp, Chicken  19866894308180_3
agctccaaaatactgccacaaggatttggcacccttgtggagggaatgaatcactcccacagtaaaattccctgggaatgatttttaggagtggaacagtcagtgactggagaaagtcaatcacttcccttctgtacagtaaaatctgccaaagtttggcatgaggtatggttgagtaacctctgcgcagcagggtatgtatgaaaaggcattaatcagggttatgctgagcagttacaaaactgtaaataaatgtgggcaaactatttccacctgagtttcatgaaggcagagatttamagtaaaatctcttttgctattgtctggttgttgtcatctagcagcaggcagggtattcctgagtgactctcagagtgctgraaatgtccattttccaagtgcttcattaattttagcttactaatcctcacaatattctagacatataaatagaaatagttaacttctaaaagcaggaaggtgacagtagaaagattaaggcttttaattccaggtatgtaccctgggacaacmtgtgcttcatttttggaaaaggagstcctccactgatactgatagacttcaaaggcactgccttag

SEQ ID NO: 54984 - DNA, 600 bp, Chicken  19866894308180_4
tttttaggagtggaacagtcagtgactggagaaagtcaatcacttcccttctgtacagtaaaatctgccaaagtttggcatgaggtatggttgagtaacctctgcgcagcagggtatgtatgaaaaggcattaatcagggttatgctgagcagttacaaaactgtaaataaatgtgggcaaactatttccacctgagtttcatgaaggcagagatttamagtaaaatctcttttgctattgtctggttgttgtcatctagcagcaggcagggtattcctgagtgactctcagagtgctgraaatgtccattttccaagtgcttcattaattttagcttactaatcctcacaatattctagacatataaatagaaatagttaacttctaaaagcaggaaggtgacagtagaaagattaaggcttttaattccaggtatgtaccctgggacaacmtgtgcttcatttttggaaaaggagstcctccactgatactgatagacttcaaaggcactgccttagatagcaggctcaaaatgagcaaacaaatatcagaaattatttycaaaactgtgttcttaagagtgattaactcaacgttat

SEQ ID NO: 54985 - DNA, 581 bp, Chicken  19866894308180_5
ttacaaaactgtaaataaatgtgggcaaactatttccacctgagtttcatgaaggcagagatttamagtaaaatctcttttgctattgtctggttgttgtcatctagcagcaggcagggtattcctgagtgactctcagagtgctgraaatgtccattttccaagtgcttcattaattttagcttactaatcctcacaatattctagacatataaatagaaatagttaacttctaaaagcaggaaggtgacagtagaaagattaaggcttttaattccaggtatgtaccctgggacaacmtgtgcttcatttttggaaaaggagstcctccactgatactgatagacttcaaaggcactgccttagatagcaggctcaaaatgagcaaacaaatatcagaaattatttycaaaactgtgttcttaagagtgattaactcaacgttatcaaaggaaatagaacaatattaaaaaaaaaaaaaaaaaaagatgataactcgacctccaaattcctgctcagattactaagaacccctcttcttatctaaaatctactcaattcccgagtaaggaaaaagaaca

SEQ ID NO: 54986 - DNA, 556 bp, Chicken  19866894308180_6
caaactatttccacctgagtttcatgaaggcagagatttamagtaaaatctcttttgctattgtctggttgttgtcatctagcagcaggcagggtattcctgagtgactctcagagtgctgraaatgtccattttccaagtgcttcattaattttagcttactaatcctcacaatattctagacatataaatagaaatagttaacttctaaaagcaggaaggtgacagtagaaagattaaggcttttaattccaggtatgtaccctgggacaacmtgtgcttcatttttggaaaaggagstcctccactgatactgatagacttcaaaggcactgccttagatagcaggctcaaaatgagcaaacaaatatcagaaattatttycaaaactgtgttcttaagagtgattaactcaacgttatcaaaggaaatagaacaatattaaaaaaaaaaaaaaaaaaagatgataactcgacctccaaattcctgctcagattactaagaacccctcttcttatctaaaatctactcaattcccgagtaaggaaaaagaaca

SEQ ID NO: 54987 - DNA, 472 bp, Chicken  19866894308180_7
gcaggcagggtattcctgagtgactctcagagtgctgraaatgtccattttccaagtgcttcattaattttagcttactaatcctcacaatattctagacatataaatagaaatagttaacttctaaaagcaggaaggtgacagtagaaagattaaggcttttaattccaggtatgtaccctgggacaacmtgtgcttcatttttggaaaaggagstcctccactgatactgatagacttcaaaggcactgccttagatagcaggctcaaaatgagcaaacaaatatcagaaattatttycaaaactgtgttcttaagagtgattaactcaacgttatcaaaggaaatagaacaatattaaaaaaaaaaaaaaaaaaagatgataactcgacctccaaattcctgctcagattactaagaacccctcttcttatctaaaatctactcaattcccgagtaaggaaaaagaaca

SEQ ID NO: 54988 - DNA, 600 bp, Chicken  19866894308183_1
attttcgcttaaatgggggatttgcatagaagcaacatgttgttttcacttaaatgggggattctcaatgagaaaacgcgtgattttcgcttaagtgggggatttgcgaagagaaaacgtgtgattttcacttaaatgggggatttgcgaagattaaaacgcgtgatttttgcttaaatgggggattttcgaagagaaaacgcgtgattttcgcttaaatgggggatttgcgaagagaaaacgcgtgattttcgggttaaatgggggatttgcgaagagaaaacacgtgatttgtggctwaaatgggggattctctaatagaaaacgcttggttttcacttaaatgggggatttgcgaagagaaaacgcgtgattttcgcttaaatgggggattctcgaagagaaaacgcgtgattttcgcttaaatgggggattcccgaagattaaaacgcgtgatttttgcttaaatgggggattctcgatgagaaaacgcgtgattttcgcttaaatgggggattctcgaagatgaaaatacgtgattttcgcttaaatgggggatgcttgaagagataacgcgtgattttcgcttaaattgggtat

SEQ ID NO: 54989 - DNA, 600 bp, Chicken  19866894308186_1
tgatgccttttttttccctctgctttacacttagagccccttgaacgtgtatctttcaagttcgttgtagtaaaagatgcagttcactgtttggctttaataaaatatattgctaattgtataactgatttgaggagattctaatgctcaaatggtttttcttatgcttccaaaatagcgtgaaatgctgagtttgccagattccctgaattttcagtactgcccctagatttcagcttctgtcatgtcagatactgttgtacagatagtaagaggaagccatttctgcttttggggagwgtaggagtgagtgggttatctgagaactgtggggtttgtgcaacagttggctaaacaaacaataagtggcacatttggaaaggtttatgtctttctgagtgacagctgagtttctgaactttcctagaatccttcctaatagtatgactgtagaacaacctggaattttaagtatactggagtcattatttactttggcataaaacataatccactgatactttgttcttgattggctttaattacgtataaaagcttgaacaaaaccagttaaaaagaaatatgacagtccaggagccg

SEQ ID NO: 54990 - DNA, 594 bp, Chicken  19866894308186_2
tggggtttgtgcaacagttggctaaacaaacaataagtggcacatttggaaaggtttatgtctttctgagtgacagctgagtttctgaactttcctagaatccttcctaatagtatgactgtagaacaacctggaattttaagtatactggagtcattatttactttggcataaaacataatccactgatactttgttcttgattggctttaattacgtataaaagcttgaacaaaaccagttaaaaagaaatatgacagtccaggagccgtataactagagtgtatttgcatagtattyggtattaaagctccctgcaagacctttaattycaaattttggaagcttacatgtgggttgtgtaacttgcacagtttttctgagagcggtgggtgtttgttcatacctcctgtctttgcatgcagaacattgcacctcgtgtttagacatgatgaaatacgtcgtctgcagtatattctttggggaatgttgcatcctttttgatagcaaatcttaagttgtggcagctgaaatgccatttgtgctggcacgttgtccagcaatgaagattcttgattctctcttatactaatg

SEQ ID NO: 54991 - DNA, 562 bp, Chicken  19866894308186_3
ataagtggcacatttggaaaggtttatgtctttctgagtgacagctgagtttctgaactttcctagaatccttcctaatagtatgactgtagaacaacctggaattttaagtatactggagtcattatttactttggcataaaacataatccactgatactttgttcttgattggctttaattacgtataaaagcttgaacaaaaccagttaaaaagaaatatgacagtccaggagccgtataactagagtgtatttgcatagtattyggtattaaagctccctgcaagacctttaattycaaattttggaagcttacatgtgggttgtgtaacttgcacagtttttctgagagcggtgggtgtttgttcatacctcctgtctttgcatgcagaacattgcacctcgtgtttagacatgatgaaatacgtcgtctgcagtatattctttggggaatgttgcatcctttttgatagcaaatcttaagttgtggcagctgaaatgccatttgtgctggcacgttgtccagcaatgaagattcttgattctctcttatactaatg

SEQ ID NO: 54992 - DNA, 600 bp, Chicken  19866894308187_1
cccagccttccaatgtcactggaattttcaatgtttataaactttacaccccaaccctttttgctatacatgacaaaccacattgtttaggaaaatatatcaagttcattataactagagccacagaagataacagaaatccttcaaagttcaaaatgattgtaatacttacaaaattatctacagtgtgttagtaataggctttagtctcctaggaaagtcagtttcactgctacattctattcagggaaagaacaaaacaaacaaacaaaatataccaaaaactaaattaacagtctkctgcaatgcagtgtggtagataaagctctagtgaataggaatgatagctatcatcctcagatattgaacacagtaagaatagctttcaaatattcaggagaacatttctaattttaaactcaaatcagacatgttttatttaaatgcttgagcaaaatttattcacttgtttttaggccagtgtcggaaattctatttcctacacattattgtagttggcccatctatgttttaggagtaatggaatttattcttgtgcaaaactaaagtaggattgtaaatctagagtttgataatttt

SEQ ID NO: 54993 - DNA, 600 bp, Chicken  19866894308188_1
tgtgtaaatacagctgtagagttttgtgaagttacaattagctatatattcgtttctgcaagaaatacctttttcttttttcttttttcttttgtgtgcatgtggtgtttgtgtgtgtgtgtgtctgaatatcagcaagatgttcctgaagcttagtgggtgccataaccttaataaggagttatgaaaaacctatctgaaatgagaaacatttccctgctcagagcagtctgcataggctaggcttattgtctcttatttacctgagagaaggaaaagagaggaactgcctcatttcamaggaaaccatcagaagttgttttctgtaagtaaaataagtgttcaatcttgttctcggagtcagtcttattcctcttacctattcttctttgccttctctgccttccttagggctgcctcatgtttcttgctttcctctttcaccttaacatgaaaattctcagcaagcatcaacagcagatgggaaggaccgaagcacatttcaacaaacaagagcaacatttgaactgttgctgatcttttaacaagacagattctgatgtgaatagtatatgaaaatacatataagggctagtttga

SEQ ID NO: 54994 - DNA, 600 bp, Chicken  19866894308189_1
gattaagtatttgatgtatgttattacattaaacttgaattaacccccagcaataatggaagaaatggcaactacttgaggccaatatttctggttaattactgtaagaaaattgctattttagacacagcctgtatttcccaacctggagagactgaaaatatttagctagtagcctttgctctatacacaacaaattagatatttgtctctccagactcttaaggttacctgaagtgaggacatgaaataaggtcacaaggttgtgaacctttttatcaccaaaggcagtcttttaarctcacacaattagcttattagaagtgttgtacaatgagttctggcaaaagtcagtgacatgtgagtgtacctatttatagcttatcatatgaatacttctcctactttcaattaagaaatttgactacatacatgtgttgtgaggaaaaactgaaaactagctactttccctgtcatcaaagcaaaacattgatgggggcctaatgtagtgtttgattacggaarccttcccaaaattttctcaggtgacaagtggtagggcacaaggaagtagacctaagttgtgctagagaagtggta

SEQ ID NO: 54995 - DNA, 572 bp, Chicken  19866894308189_2
ggttacctgaagtgaggacatgaaataaggtcacaaggttgtgaacctttttatcaccaaaggcagtcttttaarctcacacaattagcttattagaagtgttgtacaatgagttctggcaaaagtcagtgacatgtgagtgtacctatttatagcttatcatatgaatacttctcctactttcaattaagaaatttgactacatacatgtgttgtgaggaaaaactgaaaactagctactttccctgtcatcaaagcaaaacattgatgggggcctaatgtagtgtttgattacggaarccttcccaaaattttctcaggtgacaagtggtagggcacaaggaagtagacctaagttgtgctagagaagtggtagatttgatgttgggacaaattcattcctagagaggaaagtcaaatattggaacaggctgcccagggaagcggtggagtccccatccctggaggtatttacaagatgtggcagtaagtgtcatagtttagtggtgggaatcagtaggtcaggttgacagttaaactgcatgatctttaatgccttttgtgacttaaag

SEQ ID NO: 54996 - DNA, 599 bp, Chicken  19866894308190_1
  misc_feature (1)..(47): n is any nucleotide
nnnnnnnnnnnnnnnnnnnnnnnnnnnnnnnnnnnnnnnnnnnnnnncccagctctctcagcccgttctgaaaagggagggtgctccatccctccggtcatctttggtcctcctctggacccactccaacatcttggtgtccttcttgtgatggatgcctcagaactaaacgcagtactccaggtggggtctcatgaaagcagagtagaggggcagaatcacctccctcaacttgctgatcacacttctcttgatgcaacacaggatatggttggccttctggactaaaagcacacaccraaggctcatattcagtttttcatcaactgacgctctcaaatctttctcctcagggctgctttcaagccattctcctcccaaccttaatatggacatgatgttgaagaatgaatgttaatatgatactagtccagttctgcagtatagcttctgaggacatatggatgtaacttttctattcactagaagttacaacagtttcctcttaatcaaggattgttgtttggaaggaatcacatttttaagatatactgccacatatcagcacctatgtattttaattatctttcatgtatttt

SEQ ID NO: 54997 - DNA, 600 bp, Chicken  19866894308191_1
tactataggtagggggttttgttctagcagaataaaatgaaaagcaggctttttccttcttatacattgttgtgaaatttctcacttgagtctgctaggtctgacaggaaaaaatgtttttctactgtacattcaaggagagttgtccttgtttgtgaccagatgaaactagtatttacgagccatatttgaccagatgtagcttagctgcactgggtaataatgtctcctcctggacagagatgaaactatttcagtcaactgtcttaatgctcagagcttcacatcgtggcataaacrcttttttggatctctgtacaattccctccatatattacttctcatgcatacactttcctaaaggtatatctcatttctggattattttgtctttttcccccccccaccraagatataattgacccagctatcctacgtcctggtagactggataaaacactctatgtgggattgccaccycctgaagatcgacttgctattttaaagacaatcaccaaggtgagtatttggaaatgaattcttacctcgaacctgggtggaatggtttaaaacaaattaaaccttacaaaagctwacaaa

SEQ ID NO: 54998 - DNA, 600 bp, Chicken  19866894308191_2
aaaaatgtttttctactgtacattcaaggagagttgtccttgtttgtgaccagatgaaactagtatttacgagccatatttgaccagatgtagcttagctgcactgggtaataatgtctcctcctggacagagatgaaactatttcagtcaactgtcttaatgctcagagcttcacatcgtggcataaacrcttttttggatctctgtacaattccctccatatattacttctcatgcatacactttcctaaaggtatatctcatttctggattattttgtctttttcccccccccaccraagatataattgacccagctatcctacgtcctggtagactggataaaacactctatgtgggattgccaccycctgaagatcgacttgctattttaaagacaatcaccaaggtgagtatttggaaatgaattcttacctcgaacctgggtggaatggtttaaaacaaattaaaccttacaaaagctwacaaaagaattgcaggaccctgtctcatgaggcatttctaaatattacacaaagccatgaaaatacaccatcrgccatatctgctgctaaatttgctctaagggatgataaatc

SEQ ID NO: 54999 - DNA, 600 bp, Chicken  19866894308191_3
agccatatttgaccagatgtagcttagctgcactgggtaataatgtctcctcctggacagagatgaaactatttcagtcaactgtcttaatgctcagagcttcacatcgtggcataaacrcttttttggatctctgtacaattccctccatatattacttctcatgcatacactttcctaaaggtatatctcatttctggattattttgtctttttcccccccccaccraagatataattgacccagctatcctacgtcctggtagactggataaaacactctatgtgggattgccaccycctgaagatcgacttgctattttaaagacaatcaccaaggtgagtatttggaaatgaattcttacctcgaacctgggtggaatggtttaaaacaaattaaaccttacaaaagctwacaaaagaattgcaggaccctgtctcatgaggcatttctaaatattacacaaagccatgaaaatacaccatcrgccatatctgctgctaaatttgctctaagggatgataaatcttgagcaatactaacctgttaaacatagaagctgctgcctttatagtcacaatttaaagagatttttaatt

SEQ ID NO: 55000 - DNA, 597 bp, Chicken  19866894308191_4
aaacrcttttttggatctctgtacaattccctccatatattacttctcatgcatacactttcctaaaggtatatctcatttctggattattttgtctttttcccccccccaccraagatataattgacccagctatcctacgtcctggtagactggataaaacactctatgtgggattgccaccycctgaagatcgacttgctattttaaagacaatcaccaaggtgagtatttggaaatgaattcttacctcgaacctgggtggaatggtttaaaacaaattaaaccttacaaaagctwacaaaagaattgcaggaccctgtctcatgaggcatttctaaatattacacaaagccatgaaaatacaccatcrgccatatctgctgctaaatttgctctaagggatgataaatcttgagcaatactaacctgttaaacatagaagctgctgcctttatagtcacaatttaaagagatttttaattaaaagattcctatctatctatctatgagtaagggacctataagtgttttgtaagcattttgagggaggaaggatatttcctcacattcagtaatatgattcaatagctccag

SEQ ID NO: 55001 - DNA, 524 bp, Chicken  19866894308191_5
tctcatttctggattattttgtctttttcccccccccaccraagatataattgacccagctatcctacgtcctggtagactggataaaacactctatgtgggattgccaccycctgaagatcgacttgctattttaaagacaatcaccaaggtgagtatttggaaatgaattcttacctcgaacctgggtggaatggtttaaaacaaattaaaccttacaaaagctwacaaaagaattgcaggaccctgtctcatgaggcatttctaaatattacacaaagccatgaaaatacaccatcrgccatatctgctgctaaatttgctctaagggatgataaatcttgagcaatactaacctgttaaacatagaagctgctgcctttatagtcacaatttaaagagatttttaattaaaagattcctatctatctatctatgagtaagggacctataagtgttttgtaagcattttgagggaggaaggatatttcctcacattcagtaatatgattcaatagctccag

SEQ ID NO: 55002 - DNA, 600 bp, Chicken  19866894308193_1
agtttaatattatgctatatggacagatcccacatttctcagagaaatattttatttttcacccaaaattttgcttgcttcagtgtttctgaagggtacattgaaataagatagcaaaacgtacacgcggagttaatggctttggtttcttttctcgtgtgatttcttgtgattcaggaggtgcagacgtagggttagagctctgttgtttctgagccagcagtcccttgatgccagtcctaaagcttaagctgcattctgtgattctgttcatactgatgcttctgcccttatgagttwctgccccacgttttcccctccttgtgagttttgctcccactagcaaatcccactgaattttgttctcccactcaaattcctttccagagaggctcaaacacaatccttgcaatgtgcacagagctgsagccactggaggggagaaggtgaaggcactgtacttactgctgagttagcatttatagttgctcttcgtgttggtgtggagtttttgacatttttgcacaggatcccagggaggttcttttggctatgcggacaccaaccagccagtgctagaagttgttccaatgcacgtga

SEQ ID NO: 55003 - DNA, 600 bp, Chicken  19866894308193_2
cggagttaatggctttggtttcttttctcgtgtgatttcttgtgattcaggaggtgcagacgtagggttagagctctgttgtttctgagccagcagtcccttgatgccagtcctaaagcttaagctgcattctgtgattctgttcatactgatgcttctgcccttatgagttwctgccccacgttttcccctccttgtgagttttgctcccactagcaaatcccactgaattttgttctcccactcaaattcctttccagagaggctcaaacacaatccttgcaatgtgcacagagctgsagccactggaggggagaaggtgaaggcactgtacttactgctgagttagcatttatagttgctcttcgtgttggtgtggagtttttgacatttttgcacaggatcccagggaggttcttttggctatgcggacaccaaccagccagtgctagaagttgttccaatgcacgtgacctgtcaaaccatctgttttgacgctccttgcagtcaggtgaagcagcagctttcctcagaagatgcttcgtgctccatgagggcttcaccctgccagcgctccccagatgccaacacacacaggta

SEQ ID NO: 55004 - DNA, 599 bp, Chicken  19866894308203_1
  misc_feature (1)..(33): n is any nucleotide
nnnnnnnnnnnnnnnnnnnnnnnnnnnnnnnnncctcctaaagagcagaattccatcacttctttcatcactctaatattcctttaaacgactgtatcatgggatctattgtacttagctacgctgtgtctactgtacagtccatgtttttcatcacaggaagcagcttgaactgcttaaacacatggagtatacatttgtcttcttttagagcagctttatatcattcagctggctttatggcctcttctgagcctagagataagtatgtttaagtataatcctgaagtttttatcttytgcatcatcrgcctgcactttagttaccacttcatgttatgcttctccaagcagcttagagcaggcttagcttgacaatcaggggagtgaactggcaaaactctgctcagttctctccctttcctttcactcttatctcattctctaaggtacacatttttatctacgtatttccaagaaggtgttcaattaataactcagatgagtcagagctgataggatcttttcatgtattaatttaactcttccttttaaggggaatgccacagaatcactgttttcatgttttctctgtttat

SEQ ID NO: 55005 - DNA, 599 bp, Chicken  19866894308203_2
  misc_feature (1)..(23): n is any nucleotide
nnnnnnnnnnnnnnnnnnnnnnncctcctaaagagcagaattccatcacttctttcatcactctaatattcctttaaacgactgtatcatgggatctattgtacttagctacgctgtgtctactgtacagtccatgtttttcatcacaggaagcagcttgaactgcttaaacacatggagtatacatttgtcttcttttagagcagctttatatcattcagctggctttatggcctcttctgagcctagagataagtatgtttaagtataatcctgaagtttttatcttytgcatcatcrgcctgcactttagttaccacttcatgttatgcttctccaagcagcttagagcaggcttagcttgacaatcaggggagtgaactggcaaaactctgctcagttctctccctttcctttcactcttatctcattctctaaggtacacatttttatctacgtatttccaagaaggtgttcaattaataactcagatgagtcagagctgataggatcttttcatgtattaatttaactcttccttttaaggggaatgccacagaatcactgttttcatgttttctctgtttattttggctggg

SEQ ID NO: 55006 - DNA, 600 bp, Chicken  19866894308203_3
cttgacaatcaggggagtgaactggcaaaactctgctcagttctctccctttcctttcactcttatctcattctctaaggtacacatttttatctacgtatttccaagaaggtgttcaattaataactcagatgagtcagagctgataggatcttttcatgtattaatttaactcttccttttaaggggaatgccacagaatcactgttttcatgttttctctgtttattttggctgggtcttttatgctgctgaggttgcactctgtagccctttgatttggctcccaagaaattatcrgggattgcagcagtgggctttcaggtggctgctcattgccgtatggaatagcagttttattctgtattcatgttgattcgtttacagtggttttttttttcttcttaatttttttacaggaaaaataaaagggaaaaaaaaaaaaaggtaaagctgcagacctggctatttaggatctagaaatgcagtgagctttgttactcagtttgtgtttgtgtttttctggtgacaagagtgatgcaacagagctgacaaccaaattagtttccgtggagctaagcacaaggctttgtgcagaga

SEQ ID NO: 55007 - DNA, 600 bp, Chicken  19866894308205_1
tctcttcagccttggacatcctggttggataagagtatactattgccaacagtgtaaaatgccactgtagacgtatcacacagaatcatagagtcacaaggttggaaaggacctacaagatcatctagtccaactgttctcccattacccttgctaccacaagccactaaaccatatatagtaacatgatattaaagcctcagaaaagtcctcagttccttataacattaggatcaatgctctcaaacaaacaactggtcaacagagatttgatgacgtcaactctgacgaacctgaagyttatatttacttgcctatggaataagatccagaacagcaggttcgtccaattgttcagtgcctgagaaagcacatttctttgtatttcaaaggaaatggttaaggactgctcgtagaagtctttagagtagctcacatccaccacaagttgcacaaagacaatggacaaatcctagacagaattacatttagttaagcatgagtttaaaatgctgcataagaacagcaactctggttatcttcattgagctgctccctcagaccaacaccttatatagcatcaacagtggatgacaaagc

SEQ ID NO: 55008 - DNA, 449 bp, Chicken  19866894308205_2
gtttaaaatgctgcataagaacagcaactctggttatcttcattgagctgctccctcagaccaacaccttatatagcatcaacagtggatgacaaagccattccagtgattccagaaggagacacaccccaattcagggtaacaccaacagaatgaaaaccccttttaacctgatagtgttttaaggtcccaaagaggtttgtcattatcgggttcctgagcgcaacatgggctgctaagtgttccccagggctctcaccacagaactgctgcaagagtaaagagactcagggcagcttycatgctgcagccaactgattcctgtttgttcagagggtgcacgttctcaggaagctggtttgaacacttcaagaagcatttaccactacagatttccttccacagaggatttccagcccagcttctcacaggttttcccaaagattaag

SEQ ID NO: 55009 - DNA, 599 bp, Chicken  19866894308215_1
  misc_feature (1)..(168): n is any nucleotide
nnnnnnnnnnnnnnnnnnnnnnnnnnnnnnnnnnnnnnnnnnnnnnnnnnnnnnnnnnnnnnnnnnnnnnnnnnnnnnnnnnnnnnnnnnnnnnnnnnnnnnnnnnnnnnnnnnnnnnnnnnnnnnnnnnnnnnnnnnnnnnnnnnnnnnnnnnnnnnnnnnnnnnnngtccgattcctgcgctgaagtgttcctagccctgggataagcatcctggccatattgcatttgctatgcccatgagagtgtccaggtgaagcaaagtcagccagagggcacgtgtgtgcattaaagcctcaytgtaatttttttattatgctgaccttgcataaatcacaataatttacccttgagtcaacgatactgtgacagtgtcagactggtgcaggaggagggtgagatccttgagggttctccatcctcaccttcacattgcttttgccatttcccactgtgtgatgagtctgggctgtactttctacctgggactaaagtcccgaagaagcagacgtgtcactgtgaagttcaagctgagagagctgaaataacacagcactggggcacttggtttgccagcagctctcccagttctgaaccaa

SEQ ID NO: 55010 - DNA, 600 bp, Chicken  19866894308227_1
taaattgatcagcagctcttcatgcacaagagttatcttcagtgatggtgtaaccacaaaccgtagtttgtcacaaaggcagctgtgaatgggtttacgtggtggtgacagtgggacttgaacttcaagcacaattctgttctggtttgagttcagtcgttttcctgaaatgctaaagaccaaatagtgcagcttctttgaatgcatgagaatcttaaagtgaaactggttcattggttttcactgagcaagtgaataaaacacaggcagtaggtgacagcataggtgttaataattggrtttttttaaatctttgtctaataatctgagatactgatagacaagtggggtattacgtgttgttttttaaagttgttataatatgtttgcccttcgattttctcatgagcatctttgtggagtactgaaatggctttttaagaacaaaacactttttatgttgatactgtatgatttgcacattgtcttacctttagacttgtttacaccagtgttcttctttccctcagaacaacggtggggaaatgattgaaaagtttcctgagctattttgaagccaaatcgtgtttggatactgct

SEQ ID NO: 55011 - DNA, 599 bp, Chicken  19866894308231_1
  misc_feature (1)..(35): n is any nucleotide
nnnnnnnnnnnnnnnnnnnnnnnnnnnnnnnnnnntcaacaaataagctgacatctggcatcaagtattaactctttgtttgtcatggccccaataaatctgcttagttgcctcctcaactgtagacaggatatacatcagaatgctgaatgcactcttttacgtatcctggatggcttgggggctcaattaactacaatgttctaacagtgcctcctaccataaataaaatttaaaccctcacctctcaaaatttaaaccacccaaacctgaaaatagatggatataagcaggtggaakggcacagtatgacrgttatggttctcattactgtgctcactacaaggttgagctgtatgcaacatcctggcacctctgtgtcagtctaagaacaccakgaaaggttatgcaaaagtcctacatgattttrtcatttgctacagcaagtgatgaaactctgtacaaaaagagatttcctggaagccagtcataataacagcatgctcagcagcagcataaaactgagttttgctaactttataccgcatctatctgtaccgaaccctacaccaaataacttaagtgctggatgtcttgtt

SEQ ID NO: 55012 - DNA, 599 bp, Chicken  19866894308231_2
  misc_feature (1)..(21): n is any nucleotide
nnnnnnnnnnnnnnnnnnnnntcaacaaataagctgacatctggcatcaagtattaactctttgtttgtcatggccccaataaatctgcttagttgcctcctcaactgtagacaggatatacatcagaatgctgaatgcactcttttacgtatcctggatggcttgggggctcaattaactacaatgttctaacagtgcctcctaccataaataaaatttaaaccctcacctctcaaaatttaaaccacccaaacctgaaaatagatggatataagcaggtggaakggcacagtatgacrgttatggttctcattactgtgctcactacaaggttgagctgtatgcaacatcctggcacctctgtgtcagtctaagaacaccakgaaaggttatgcaaaagtcctacatgattttrtcatttgctacagcaagtgatgaaactctgtacaaaaagagatttcctggaagccagtcataataacagcatgctcagcagcagcataaaactgagttttgctaactttataccgcatctatctgtaccgaaccctacaccaaataacttaagtgctggatgtcttgtttataaaaatggtgc

SEQ ID NO: 55013 - DNA, 600 bp, Chicken  19866894308231_3
tctgcttagttgcctcctcaactgtagacaggatatacatcagaatgctgaatgcactcttttacgtatcctggatggcttgggggctcaattaactacaatgttctaacagtgcctcctaccataaataaaatttaaaccctcacctctcaaaatttaaaccacccaaacctgaaaatagatggatataagcaggtggaakggcacagtatgacrgttatggttctcattactgtgctcactacaaggttgagctgtatgcaacatcctggcacctctgtgtcagtctaagaacaccakgaaaggttatgcaaaagtcctacatgattttrtcatttgctacagcaagtgatgaaactctgtacaaaaagagatttcctggaagccagtcataataacagcatgctcagcagcagcataaaactgagttttgctaactttataccgcatctatctgtaccgaaccctacaccaaataacttaagtgctggatgtcttgtttataaaaatggtgcaattgaaacccatttgcagccacagagaactacacagactggcagaatattgtagaagtggctgccaactcatttctcactacca

SEQ ID NO: 55014 - DNA, 600 bp, Chicken  19866894308231_4
atatacatcagaatgctgaatgcactcttttacgtatcctggatggcttgggggctcaattaactacaatgttctaacagtgcctcctaccataaataaaatttaaaccctcacctctcaaaatttaaaccacccaaacctgaaaatagatggatataagcaggtggaakggcacagtatgacrgttatggttctcattactgtgctcactacaaggttgagctgtatgcaacatcctggcacctctgtgtcagtctaagaacaccakgaaaggttatgcaaaagtcctacatgattttrtcatttgctacagcaagtgatgaaactctgtacaaaaagagatttcctggaagccagtcataataacagcatgctcagcagcagcataaaactgagttttgctaactttataccgcatctatctgtaccgaaccctacaccaaataacttaagtgctggatgtcttgtttataaaaatggtgcaattgaaacccatttgcagccacagagaactacacagactggcagaatattgtagaagtggctgccaactcatttctcactaccaactttgaagagccattcaagtcagtagcatct

SEQ ID NO: 55015 - DNA, 600 bp, Chicken  19866894308233_1
gaatctttaccaacctcagtaattccgtggttcgatgcgtttctttgagacataccctgtgaagtccttgagaagagcttccaagagttcccaccttgggtaggcactgcagagtggttgttgctgaatataattgagccatttcctttttctacctcttctgtttcacggctgttgttcttttgcgttgctttacctgttaggacatggaactgagcacgctaccagatctcgagggaaggagggtgtttgtattttttgtacaagtgtgtctgtaagtacaagtatgactgatgttgygctttaaataccaaccactgcttcaatagcttccagtctggctactttgagtttgttccaaatctgagtttcaaagcccatcattatgaaaaaaaggcattcttactttttctggcaaaactatgtttttgatacttcagggatttaaagagtcctccactccccgtagatcatcagagctcttgatagcaacttcaagcctcactgaggatttaacgagctgtcactgagttacatgacacctattaggattatggaaaaaaattatccagtttgttgctgtcattagctatcaagtac

SEQ ID NO: 55016 - DNA, 600 bp, Chicken  19866894308252_1
aaaaggcatacataggtttttaacacttttgaattgagtgttccaattggtttgcttaaagagtaaaaagaattaaaatacagaaaataatatcaaacttaatgtatatttaggctatttaacctattttgttggttgactgctgagaattttctattgtaaccatatctgtaatatgacttcttctttcctgcacttattttggaatatggattatggtcatgttttggactgtctacttggaaacaggtccacagagggaaatcatgcatagtctctgtacagaagtgctgacagctytcatgatgatcactgcaactccaaaagggtctgacagaggattggttttccttttcctctcattattcactgcaaaatttactgtttacacttcaggctttgccaactcactcttctattttgttaaattttttagcttttgaggatccactgaattgtttcatgttgcttagcactctttatatattctaagaacagctttctaaattatcatagaatggcttggattggaaggaaccttaaagatcatctagttccctgctgtggacagggttgccacccactacatcaggctgccct

SEQ ID NO: 55017 - DNA, 509 bp, Chicken  19866894308257_1
ttcatgttattaggttcatttaaaaagttgtgtttatttccatcccacaagttcattatttttttttttatcttttgaaataatggaatggttccactacatgatttgttttagaataatcactgcgtaccaattcttcctgcacgttaactgtccctggcattggcttcatcataccagcagcagctcccaggactgtggccatccctgcctcgctgtggccttcccttgggcaggtgggtgtcactgccaccacctctggtttctgacctgcagatcggggcgtgggggctgtgtgcrtgctgttctgtgcttgcaaagcactctgcttggtgtgctgtgggagcagaaagcagtgatcgcaaaccccattcggtaacaggaggtgggttcagcagaatttgcatgtatttaatccagtttggagttgaaggtaaagaataaaaaaaacacattatatgttgtttatcatcaatttctcctttttgtcatcatgatgataggcactt

SEQ ID NO: 55018 - DNA, 581 bp, Chicken  19866894308259_1
tcacattaagtttgacgaggcccagtgcaaagtcctgcacctgggtcagggcaatcccaagcataaatacagtctgggcagagaatgggttgaaagcagccgtgaggagaaagatttgggaggtactgtctgatgaaagagtcaacatgagccagcaatgcgtgcttgcagaccagaaggccaactgtatctagatccagggctgcatcaagagtatcatgacgagcaggacaagttaggtgatacttctcctctacactactctcaagagaccccacctgaagtacggtgttcagttcyggggcctccaacacaaggacactgagctgttggagaaggtccagaggagggccacggatatgatcagagagtttgagcacctcttgtgcagggacaagctgaagaactgagagtcttcagccgggagaaggctctgggttcaccttatagcagccttcaatatctgaagggggcctacaagaaagcaggagagggattttttaggagggcatgtagtgacagcacaaggggagatggctttaaactggaagagggtagatttagactagatattaggagga

SEQ ID NO: 55019 - DNA, 600 bp, Chicken  19866894308260_1
gttagagcaagatccaggccttaaggtctctatctcaaaacactttaaagtatcttcacaaccatggagctcatctcatttagctgttgggcaaaataaccatagaaccagcttaattaagcacttagggacatccctgggcaaaactgggatgtggaccagtgccagctctgatttacagctattttcagtctcttgtgtagaaggcatgatgtttttaactggtttaaaggcaacaattttttatgcatgaaaaataaggttgttattcattacttctattgatttctttagttttamagataactttgtcataaaaaataaataaatctgtattcatcaccttcctttccaacttaattgctgcaaaagacattcatcaaaacagctcagaggaggagttttctaaaaatcacaggaagaaaaaaggttacatttccatttctctactaagatctaactgaactggatgaagatctttaaaggactatyctataatatgcatgcctgcagggagaaaggatgagcaaagtcagtctgaggtaaagtaacagctgctgaagcctaaaaaaataaaatttatcaaagatgcactgaatt

SEQ ID NO: 55020 - DNA, 600 bp, Chicken  19866894308260_2
ctcttgtgtagaaggcatgatgtttttaactggtttaaaggcaacaattttttatgcatgaaaaataaggttgttattcattacttctattgatttctttagttttamagataactttgtcataaaaaataaataaatctgtattcatcaccttcctttccaacttaattgctgcaaaagacattcatcaaaacagctcagaggaggagttttctaaaaatcacaggaagaaaaaaggttacatttccatttctctactaagatctaactgaactggatgaagatctttaaaggactatyctataatatgcatgcctgcagggagaaaggatgagcaaagtcagtctgaggtaaagtaacagctgctgaagcctaaaaaaataaaatttatcaaagatgcactgaattctgttaatccttcaaaagctgtggaggttttggagggtttgagtgaaaggaaattagagcacacctgccttcagacaaattaggctagaaaatcctctactccgcttagatggttgtagataatcacattcagaatgctatcttaatttctcttatcacatacttcctaggtctgtaagaagcagcgtttca

SEQ ID NO: 55021 - DNA, 600 bp, Chicken  19866894308262_1
agcaaggatgacaccagggcctgaatagtgataaatagcttggtgctgttatgcacagtgttggaaaatggaggtaaggatgataagtttagcagctcttcttgctacattgagcttttggtaaaagtggaacatttttcagtctaggccagatcaacaagtgtagttttaagttactgaatgggaggagtctggggaaatctccatgtgagctaccaacacggagatgtttgagttcatatctatggagatgtatgccttggctgacacagagagtgagaagtggaagggactgagggwagagaactttaggcccatgtgaagaaagactgaggaacaacctcagggaaagacagagcaggaaggaaagccaacaaagcaaatcaaaattgtggtcaagtgtactagtagttttctgtgggaggacaggctacagagtatgactttcattaggacctctgaatgcagaacagtgatgagctatagagcatcttaaggataccaaatgagcaatgtgcatagatatgggacggcaaatggaaagtagagtgtgactatgtttgttgcactgagctgaattaagagtggaagtatctgtat

SEQ ID NO: 55022 - DNA, 600 bp, Chicken  19866894308272_1
tttctcactagcagaattctgcagccttatctatctgcatgtctcccctgaactgctggatttgtatttgatctcacatctgtaacatctctgtctccttaaggcaatgttgctaatctctgttccacagacagagatcacgctatttttgcctctgtgtattatcttctacttaagctaattgacttccacctgatctctggctccctgcagtctaagtcagtgatgcataactctagggaagaggggtcttgataaagattaacttctcagttacctctccaatcccaatactcttarctttctacccgtcttcgctatcagcctcaccccttaccctgaagatccttctgccccacttcatcccttgctctaaagaggagctttgcttcctatttcaaacccagctttccatccataagygctctccgttcttcatcacatggttgygagcatttagatgtgaaggagaagttttctggaggayaagagtgtattttgtagccatgaaagtgtgattgctttgtgttttgctcctttgtggcttgaagattgaagacaaacagatctcatcttgttttgacaggagaatgaaggctg

SEQ ID NO: 55023 - DNA, 600 bp, Chicken  19866894308272_2
tccacagacagagatcacgctatttttgcctctgtgtattatcttctacttaagctaattgacttccacctgatctctggctccctgcagtctaagtcagtgatgcataactctagggaagaggggtcttgataaagattaacttctcagttacctctccaatcccaatactcttarctttctacccgtcttcgctatcagcctcaccccttaccctgaagatccttctgccccacttcatcccttgctctaaagaggagctttgcttcctatttcaaacccagctttccatccataagygctctccgttcttcatcacatggttgygagcatttagatgtgaaggagaagttttctggaggayaagagtgtattttgtagccatgaaagtgtgattgctttgtgttttgctcctttgtggcttgaagattgaagacaaacagatctcatcttgttttgacaggagaatgaaggctgaaatgtgaagaggacctgctgttggagcaaggacaaaggagggaaaagccagtagaaaatgttagaacaaattgaaagggtatgaaggtgccaggaatttattcacactgacagtttttaagc

SEQ ID NO: 55024 - DNA, 600 bp, Chicken  19866894308272_3
gcctctgtgtattatcttctacttaagctaattgacttccacctgatctctggctccctgcagtctaagtcagtgatgcataactctagggaagaggggtcttgataaagattaacttctcagttacctctccaatcccaatactcttarctttctacccgtcttcgctatcagcctcaccccttaccctgaagatccttctgccccacttcatcccttgctctaaagaggagctttgcttcctatttcaaacccagctttccatccataagygctctccgttcttcatcacatggttgygagcatttagatgtgaaggagaagttttctggaggayaagagtgtattttgtagccatgaaagtgtgattgctttgtgttttgctcctttgtggcttgaagattgaagacaaacagatctcatcttgttttgacaggagaatgaaggctgaaatgtgaagaggacctgctgttggagcaaggacaaaggagggaaaagccagtagaaaatgttagaacaaattgaaagggtatgaaggtgccaggaatttattcacactgacagtttttaagcctgtgtcaatctattaaagatggcctg

SEQ ID NO: 55025 - DNA, 600 bp, Chicken  19866894308272_4
tccacctgatctctggctccctgcagtctaagtcagtgatgcataactctagggaagaggggtcttgataaagattaacttctcagttacctctccaatcccaatactcttarctttctacccgtcttcgctatcagcctcaccccttaccctgaagatccttctgccccacttcatcccttgctctaaagaggagctttgcttcctatttcaaacccagctttccatccataagygctctccgttcttcatcacatggttgygagcatttagatgtgaaggagaagttttctggaggayaagagtgtattttgtagccatgaaagtgtgattgctttgtgttttgctcctttgtggcttgaagattgaagacaaacagatctcatcttgttttgacaggagaatgaaggctgaaatgtgaagaggacctgctgttggagcaaggacaaaggagggaaaagccagtagaaaatgttagaacaaattgaaagggtatgaaggtgccaggaatttattcacactgacagtttttaagcctgtgtcaatctattaaagatggcctgtagcaatgttactgctgtgtttagatagggaagcagc

SEQ ID NO: 55026 - DNA, 600 bp, Chicken  19866894308274_1
aaatttttaagaagttttgatgaagttagaaatgtttaatatttttacttttgtacactgccatgattacaacttgggatcactggtgtctcctgtagaaaagttacttaaatagaagagaggtttaaacaagaatacttgtatcaccagggaaagcggaatgctatcagtcatcttgaatttcagtatacttaggccatgcagagtggctcttggcattttgttgccagccctgaatgcttctctgaacttgatgaaaaatcacttctgctcaagtatttgctgtatggcttctctggragtcacattctaatagtgtctgaaaatttcaggtttcaacattagttactattgtaatacctacagagtttaactgagaggaattgagatccctctgtatttcagtgtcatcttactgtgacatcctctgacttcgttaaaaccacacaagtcatgacagtcttcagagcttcaataagtaaaagggtgaaacagaaggagcggggaaaatgaaaggctgaagatggcaaggagcagcagagagaaaccacagtgcagtgaatctgatttcctgggctcctaggccgctgcttgtcacat

SEQ ID NO: 55027 - DNA, 600 bp, Chicken  19866894308280_1
attcttctgagcgtgatctcactgctgaatgaacccaacacgttttctccagccaatgtggatgcctctgtgatgtaccgcaagtggaaggagagcaaagggaaggatcgggagtacacagacatcatcaggtgcgtggggagctgggctgagacccagcagcactcctgtagtcttgagagggcctactgagctgtggttgtgtagtacttgggatagtgagatcctgagggcacagcctgttcagccttatctgcaggctggttgggtagaaggattctggctctgagtgcggctctygaggagcagtttggctgtgttacrtgcccagctttgctgctgatgtgagccctggctcttttcagctctaaggctgaggctgtgggtatgcagcgctgcattgctgccgggtctgtggtgtggggctggccagccttggcatggcaagaggggccctcagagcacgggatgctcccagtcctgtgtggtgagtgtgagctggtgcacgagagggaaagagcgctgtcacctccatccccaagctgtgctgtgctgtgcaaagcccctgtcctcaccctacctgcttctgcccctccagaa

SEQ ID NO: 55028 - DNA, 600 bp, Chicken  19866894308280_2
ctgaatgaacccaacacgttttctccagccaatgtggatgcctctgtgatgtaccgcaagtggaaggagagcaaagggaaggatcgggagtacacagacatcatcaggtgcgtggggagctgggctgagacccagcagcactcctgtagtcttgagagggcctactgagctgtggttgtgtagtacttgggatagtgagatcctgagggcacagcctgttcagccttatctgcaggctggttgggtagaaggattctggctctgagtgcggctctygaggagcagtttggctgtgttacrtgcccagctttgctgctgatgtgagccctggctcttttcagctctaaggctgaggctgtgggtatgcagcgctgcattgctgccgggtctgtggtgtggggctggccagccttggcatggcaagaggggccctcagagcacgggatgctcccagtcctgtgtggtgagtgtgagctggtgcacgagagggaaagagcgctgtcacctccatccccaagctgtgctgtgctgtgcaaagcccctgtcctcaccctacctgcttctgcccctccagaaagcaagtcctgggaacaaaggtgg

SEQ ID NO: 55029 - DNA, 600 bp, Chicken  19866894308289_1
tagtggagatatgctgtaggctgtgtttcaaaagtcatagtccttggtgatacataatgtcttccctctagtctggtagtgcagtagcttttagctgtttttatctgcctctgtgctgatgcttacttaactgttttggctttaaattgtagaaatagcctcagaatgtaacgctttggctgtgaggtcagatggggtgggggtggagaagaagctgctacaggaggaaagcttcggcagagagtggggcagtgatttgttgctgtaaactgtccaatttccacgggtacagccatcccrttttgtaacctgtcattcagaawcagaagaactgtacaaagaaatctcaccagaacagagaaatgttgtagatgtttaagttcagaatagctttgctattaagtaatgttgtacttgatttctgtgtatgcactcaggagatgtagtggtatttttaatcctgatatgtatgtgagcatgggttgcaatatgttctaaaagaaaaagatagcaatatttatgatgtgcagcctgtttgctgtgtttaatctgctgtaatccaagaattgttatgaacgactgcagtaaaacatgaaagca

SEQ ID NO: 55030 - DNA, 600 bp, Chicken  19866894308289_2
tgtttcaaaagtcatagtccttggtgatacataatgtcttccctctagtctggtagtgcagtagcttttagctgtttttatctgcctctgtgctgatgcttacttaactgttttggctttaaattgtagaaatagcctcagaatgtaacgctttggctgtgaggtcagatggggtgggggtggagaagaagctgctacaggaggaaagcttcggcagagagtggggcagtgatttgttgctgtaaactgtccaatttccacgggtacagccatcccrttttgtaacctgtcattcagaawcagaagaactgtacaaagaaatctcaccagaacagagaaatgttgtagatgtttaagttcagaatagctttgctattaagtaatgttgtacttgatttctgtgtatgcactcaggagatgtagtggtatttttaatcctgatatgtatgtgagcatgggttgcaatatgttctaaaagaaaaagatagcaatatttatgatgtgcagcctgtttgctgtgtttaatctgctgtaatccaagaattgttatgaacgactgcagtaaaacatgaaagcaaaggtgtgatgtagcactgatga

SEQ ID NO: 55031 - DNA, 600 bp, Chicken  19866894308292_1
tttggtacagttatgtttgtacatttgtgcacatttgtgcaaagttggggatcctggcaagctgtgcagcccatgccaggccctgctgcagagtatacattcacgcagagcagcagttaacatcagccagcacagctctgccagcaaaggctgaaacaagagggcaatattcagggttgcaatgctaaactaaacaagttcattaactgttcaaatgggaaaacaaaaacaaaaccatctcatttctcactttggtgtcctccattaagtactgaaacataactaagagaatgacttcayaccagtttatccagcttgcccatttccatccatgttacctcagctgtgctcactgtatttcacccttttgcagagcaaaagcagggcagaacaataccaggagagcagggcttcaagccaagsctactcccaggatgagtggaaggtcttccaaagacaagctgagcacaaggtgaaactgagctcagctgctttccagaatgcaaggataggagagcagcagtgtgataagagagcatagcctgcaccagggtttctttaaatggttaccctggagcatctgrtctgccacaactcaca

SEQ ID NO: 55032 - DNA, 600 bp, Chicken  19866894308292_2
cagccagcacagctctgccagcaaaggctgaaacaagagggcaatattcagggttgcaatgctaaactaaacaagttcattaactgttcaaatgggaaaacaaaaacaaaaccatctcatttctcactttggtgtcctccattaagtactgaaacataactaagagaatgacttcayaccagtttatccagcttgcccatttccatccatgttacctcagctgtgctcactgtatttcacccttttgcagagcaaaagcagggcagaacaataccaggagagcagggcttcaagccaagsctactcccaggatgagtggaaggtcttccaaagacaagctgagcacaaggtgaaactgagctcagctgctttccagaatgcaaggataggagagcagcagtgtgataagagagcatagcctgcaccagggtttctttaaatggttaccctggagcatctgrtctgccacaactcacacagctaccttctgacttctttcagcaccatcccaggaagcctttacacttcctgccttggaagtgaaacactaaaccaaaaattatgttcaaatcattattgattcctcctgtaaccagagct

SEQ ID NO: 55033 - DNA, 600 bp, Chicken  19866894308292_3
aagagaatgacttcayaccagtttatccagcttgcccatttccatccatgttacctcagctgtgctcactgtatttcacccttttgcagagcaaaagcagggcagaacaataccaggagagcagggcttcaagccaagsctactcccaggatgagtggaaggtcttccaaagacaagctgagcacaaggtgaaactgagctcagctgctttccagaatgcaaggataggagagcagcagtgtgataagagagcatagcctgcaccagggtttctttaaatggttaccctggagcatctgrtctgccacaactcacacagctaccttctgacttctttcagcaccatcccaggaagcctttacacttcctgccttggaagtgaaacactaaaccaaaaattatgttcaaatcattattgattcctcctgtaaccagagctccaattcctaattttatttaaatcagtgcattatatccccagtaagcaatgcaaaagagccacagcatcagctgttcctctccttcacctgtggcaatagagggctataaaaatatattagcacaggccttcttcatacctgattttgatctcagacacac

SEQ ID NO: 55034 - DNA, 600 bp, Chicken  19866894308298_1
aagcagaaacccttcagcatttggaaaatgagtcagatttactcttttgctgtaggtttaccctgatctttccttggtttgggtaggtttacaccaagagtttatgttatgctgagtttatggttccagtgacctgagcaaaactcttgtctattggaggttgaagtataactaacagtgaacgtgaggaaaatggtgtaaaaacaccagaaaaacaggaggtttatcttcttgttggaaacagtattgttactctgcaggctggtgaataaaaacgaacagttatggttcgttttgcaratgtgttttaaatcttgcaaccttgaatacatgggtatttctgatgaacttttctctttaaacagtcatgtaacactcatgaactaatatttttgtgtaactgcactattgagcaagcctaattaccaagcagtcacatggccttactgacctcctttctcctggcatgcagcctacctgttctaaaatcatgaatgctatgtaacagacacgagggccttcatcagcttgtttcatttttctggttctcttcagtttcttattattgttcattctcctgggctgttaaataaatcatga

SEQ ID NO: 55035 - DNA, 600 bp, Chicken  19866894308305_1
tagctcctgcgctcgggttcgtttccccctttgagataggtgggttccatgcacatacaacaggccagaggccaaacaaactgcccagtgatcaaagaacccaaagtttctgcctcgacaccagcctctgagccaattattcattacttgtgctttccaagcccgctccatgtccttcactgcccctgaaggcatagaacaaaagatcacttgcactcccgctccttgaactaaatgttctaaacccctgaaatctcttttcatagtttgtaggcttctctgagcagtgaccacctcacmttgggctccctcctaggcaggtcctccatcacctccccactcacctccccttcaatttccagtgtctcaaacctgttctgagtgggagctggggaggcagggtaggcaggcatggggggctcccgtgacgccaagtcaggactctcatccaaccctcctcatctgtcaggtctgtctgactgtctgaccgattggtcacagccaacacaggttcatgaggaaggtcctgtttaactaacttagcttccttttatgatgaggtcacccatgcagttgatcatgggaagccagctgacgttt

SEQ ID NO: 55036 - DNA, 600 bp, Chicken  19866894308314_1
gctaggagcattcaaatgagggctggatgcttcttctacagacgcactttagttcaaacaagaatttgaggaagtcttggaaactgcactccacaatagaggaggccaaaacgctgtttccttctgtcttctgagtcaggctagaggaattcacacttgagcagttaaatttgtctcacagacagaagtctcatgcattttggacactttggaacatgtgatacagttgggaactgtatggctacactatacagctgcctgcaaggaattaacacacagataaaggaagagtgtaaaacygtgtaggcaggagcccctatttctgtcccaggaatggagagaaagaaagcagtgacagcaagctacagcctagcgcatgccagaaattttgcattttgagattcctcagctcaagtctgctggggactctgctcctttcagacttttgtgttatcagaaagataaagaagcaattcacttttttgtcctcagtgaaataaagatgagcaggcctaatatcatgtagatagacttcacagtgtaagtaaaaaattgagccagaagagatggaaacacagtcttggtgaaaaaaattactac

SEQ ID NO: 55037 - DNA, 600 bp, Chicken  19866894308314_2
aagacctccaacgatggcactcccccctgcatgtaaagcaatatggttcaagacattgttctgcctagttcaaggcgaaaatttgaagcagaatctcctgtaccttactttataacagcatctcaagccatgacactgctggctgttctgggaatcactgtccagttctcactgtaagtttgacctttgaagaaaagacaaccacattttgaaaaacatgttttattgaaaatctgggatacagatttagttgatgagcattctcctccaagagagggactacattttttcacccaagtwatccttttggtaacaaactatccatacccttcacaattcagaccttacgcatatttggctggcagattaagctagtgtaggagttcgccctgcacagacggtgagcataatgtacagtcatcacatggaagtaacagttaagaaaccgaaaaattcttccaagttttcatgatggatctatggcaatggtcacgcactgcaatatatttttagagctctgtacagggcactctgagtcaggctcctcccagaaatcctttaattcatatacactgttaaagctcacatgtcactcttcag

SEQ ID NO: 55038 - DNA, 600 bp, Chicken  19866894308315_1
tttattgagaagttccgatctttccattatttacacatttgaaatttgacgtagggacgtataatcacgatggataatttcttttgctattttcagaacagaagaggattacatataatgtttaccagtaagctactgcaattaaaaaaaaaaaaagacattgtaaaatttgcaataactgaagtcttttttgtttctttcaatcagaactgcaagagaatgatggtttcagggtatgaatgctagctagtaagcaagaagacctgaggtttgtacaggaatagtgtttcataaagaccyttgtcctcaattggcctcaaatatctagcatcatcttatgctaaattaggtgatgatatatagartttttatgctagaggacaagatcagagtaaaaacaatgctgactaaggagatttgattttttttctttcccctaactttgttctctaaaacacttaacttcccctgtgtattatcattgaactgagaagttgtgagttctactacggtacagtaaatagctgaaatgtatgaattagttttaacatctaaaatgcattttaaggtaaaagctggaaatacgtgattcaggctgac

SEQ ID NO: 55039 - DNA, 600 bp, Chicken  19866894308315_2
cacgatggataatttcttttgctattttcagaacagaagaggattacatataatgtttaccagtaagctactgcaattaaaaaaaaaaaaagacattgtaaaatttgcaataactgaagtcttttttgtttctttcaatcagaactgcaagagaatgatggtttcagggtatgaatgctagctagtaagcaagaagacctgaggtttgtacaggaatagtgtttcataaagaccyttgtcctcaattggcctcaaatatctagcatcatcttatgctaaattaggtgatgatatatagartttttatgctagaggacaagatcagagtaaaaacaatgctgactaaggagatttgattttttttctttcccctaactttgttctctaaaacacttaacttcccctgtgtattatcattgaactgagaagttgtgagttctactacggtacagtaaatagctgaaatgtatgaattagttttaacatctaaaatgcattttaaggtaaaagctggaaatacgtgattcaggctgaccatggtatgtgttctgaatatggagagtgaaggagaaaaaatgcaaactcaaaccctaaaattat

SEQ ID NO: 55040 - DNA, 599 bp, Chicken  19866894308316_1
  misc_feature (1)..(137): n is any nucleotide
nnnnnnnnnnnnnnnnnnnnnnnnnnnnnnnnnnnnnnnnnnnnnnnnnnnnnnnnnnnnnnnnnnnnnnnnnnnnnnnnnnnnnnnnnnnnnnnnnnnnnnnnnnnnnnnnnnnnnnnnnnnnnnnnnnnnnnnnnatgaatggctctttcatacacacacatgatgcagtaagtaagaaccctgtcgaggatgcagtaagtaagaaccctgtcgagacccagttagtgggggaccgtaccccaaggtccccatacagactgtggaaaagtaaaaagaccactgtaggaggcacttccyatttggatagatgctactgactgtgttctcagaatagcagcagccccacataacaaacaatctgatttgcttacatcttttttgaaccacagcactttgtatgttgttcaaggccctttcagatgtcagagaagatcttcatacaacctaaattttctgaggtaaattttgatttatttaaagagatctgacattcagaaagtcctgttgcccagttcctgacaatgaagccctgggaaactactgtatgacgcttactcaaacattattcagttttcaaaagttgacttaaattacat

SEQ ID NO: 55041 - DNA, 491 bp, Chicken  19866894308316_2
aattttctgaggtaaattttgatttatttaaagagatctgacattcagaaagtcctgttgcccagttcctgacaatgaagccctgggaaactactgtatgacgcttactcaaacattattcagttttcaaaagttgacttaaattacattgcgagtaatctaagcccactgaggactagtcctcttcttctaacctcaccctctggttggtattgattcttgtaaccaaaatggcatttataattgtacggctaattaaatgggattggtagtttcatttattgtttttaaatgagcccwcaataatgctgcagtaaggctgagactatctgaatatgatgtgtttcataaaccctctgctcatttcagacagagattaagtaatccttactcttaaataggaaagtgtgtcatcagacaaaaagctccgatgcttaagatcatactgaaatagtcattctgtttgttcagctgtacatatcatgataagc

SEQ ID NO: 55042 - DNA, 600 bp, Chicken  19866894308317_1
aagcaaaacagagcattacagactgcagccaggtcagtttgaccaaagcaccctacctttttgtgaagaactaccaaaacacatcactttattctgccatggaagcattttgtcaaattatagaaaagttcagaaaagttacagtaataagagaaaacagttgaaaaagtttgcatttcaatcattttcatatcctactggaaacaaatcccacttgtgatttgccattcctgggctgcatcaaaagaaacataactagcaggtagatggaggtgatcctccccttctgctctaatctcrtaaggtcccacctgcatcactgtgttcagctctggggtttccagcacaagaacaactagcaggttgcctagagcagctgtggatgccccatcttggaaagtactcaagwtaagtctggaatgggtttaggacagmctaacgtagtgtgaggtgtccctgcccatggcagcaggttggaaacaggtgatctttaaggtacattccagttcaacccattctatggtaaagagcagtattctgatgcctgttgactgcacagctgataaaaaacagatattaccaacattaagtagatctgct

SEQ ID NO: 55043 - DNA, 600 bp, Chicken  19866894308317_2
ttgtcaaattatagaaaagttcagaaaagttacagtaataagagaaaacagttgaaaaagtttgcatttcaatcattttcatatcctactggaaacaaatcccacttgtgatttgccattcctgggctgcatcaaaagaaacataactagcaggtagatggaggtgatcctccccttctgctctaatctcrtaaggtcccacctgcatcactgtgttcagctctggggtttccagcacaagaacaactagcaggttgcctagagcagctgtggatgccccatcttggaaagtactcaagwtaagtctggaatgggtttaggacagmctaacgtagtgtgaggtgtccctgcccatggcagcaggttggaaacaggtgatctttaaggtacattccagttcaacccattctatggtaaagagcagtattctgatgcctgttgactgcacagctgataaaaaacagatattaccaacattaagtagatctgctgctacttatttttgtttgattaaaaggagtcttcttacttaaggattggaaacttgccacttgtaagcttctgtaatatggctccttwgcaaaatatttttcctgctgc

SEQ ID NO: 55044 - DNA, 600 bp, Chicken  19866894308317_3
aagttacagtaataagagaaaacagttgaaaaagtttgcatttcaatcattttcatatcctactggaaacaaatcccacttgtgatttgccattcctgggctgcatcaaaagaaacataactagcaggtagatggaggtgatcctccccttctgctctaatctcrtaaggtcccacctgcatcactgtgttcagctctggggtttccagcacaagaacaactagcaggttgcctagagcagctgtggatgccccatcttggaaagtactcaagwtaagtctggaatgggtttaggacagmctaacgtagtgtgaggtgtccctgcccatggcagcaggttggaaacaggtgatctttaaggtacattccagttcaacccattctatggtaaagagcagtattctgatgcctgttgactgcacagctgataaaaaacagatattaccaacattaagtagatctgctgctacttatttttgtttgattaaaaggagtcttcttacttaaggattggaaacttgccacttgtaagcttctgtaatatggctccttwgcaaaatatttttcctgctgcatattaacattgttttccttaagtac

SEQ ID NO: 55045 - DNA, 600 bp, Chicken  19866894308317_4
catcttggaaagtactcaagwtaagtctggaatgggtttaggacagmctaacgtagtgtgaggtgtccctgcccatggcagcaggttggaaacaggtgatctttaaggtacattccagttcaacccattctatggtaaagagcagtattctgatgcctgttgactgcacagctgataaaaaacagatattaccaacattaagtagatctgctgctacttatttttgtttgattaaaaggagtcttcttacttaaggattggaaacttgccacttgtaagcttctgtaatatggctccttwgcaaaatatttttcctgctgcatattaacattgttttccttaagtacttagaattcagacaaacaatactttgaagtgcttgttgttgagaccatctacatagacatagatgaataattaacacactatgcttgctcacatgaaaatcagaacaagtgcacatacaaaaaattttattttcaggccagactttcctggcacactgacaagaaggttaaaccagttgtcagaaaactgcagtgaacatgaatctcttaatgggtgctgcatgaaagttcaaccacccctgaacatcacttt

SEQ ID NO: 55046 - DNA, 600 bp, Chicken  19866894308318_1
tttcctcagattgctagaaaagctgtgctcttcctgcgcccttgctttttacacagaaattcccaatctgacctcagtcccctttgggattgagggggtccagggccatatgctgagggcagaccatagtgtccattgctgcaggaggagttccttttggggcgctcattctcccctcctttccctttcggctctgccccacccgaagccctgaagcctcaacaccgcgcttcgctttcgcctctttttgtcccctccacgccgccgtagcctggagcggaagtgggcggggcgaagagrggcaccgcccttcggcggcgccgccatgcaggagggcgtgcggctgcgcgcgggtgagcggggcgcgggccgaagggcggggcgctctggtgacgtcactggkgggcgaccgttgggcgtgagggagggggcgggaaggcatggacgcgttccgcagcatgagctttgcccttcttcaggtgcctccaaggrggacatccgggagaaggtgtgggattacctggaggccagcggcctggctgagttcccccggcccgtgcatcaccgcatccccaatttcaaggtacggaggcccgcagc

SEQ ID NO: 55047 - DNA, 600 bp, Chicken  19866894308318_2
ggccatatgctgagggcagaccatagtgtccattgctgcaggaggagttccttttggggcgctcattctcccctcctttccctttcggctctgccccacccgaagccctgaagcctcaacaccgcgcttcgctttcgcctctttttgtcccctccacgccgccgtagcctggagcggaagtgggcggggcgaagagrggcaccgcccttcggcggcgccgccatgcaggagggcgtgcggctgcgcgcgggtgagcggggcgcgggccgaagggcggggcgctctggtgacgtcactggkgggcgaccgttgggcgtgagggagggggcgggaaggcatggacgcgttccgcagcatgagctttgcccttcttcaggtgcctccaaggrggacatccgggagaaggtgtgggattacctggaggccagcggcctggctgagttcccccggcccgtgcatcaccgcatccccaatttcaaggtacggaggcccgcagcgttgtagcgctcyccaggcacagtcccgcgggctgcgcaggtgcggagcgacggtagggggtggcagagagctgtaaagccaccttctgggtgagataaatgc

SEQ ID NO: 55048 - DNA, 600 bp, Chicken  19866894308318_3
tctgccccacccgaagccctgaagcctcaacaccgcgcttcgctttcgcctctttttgtcccctccacgccgccgtagcctggagcggaagtgggcggggcgaagagrggcaccgcccttcggcggcgccgccatgcaggagggcgtgcggctgcgcgcgggtgagcggggcgcgggccgaagggcggggcgctctggtgacgtcactggkgggcgaccgttgggcgtgagggagggggcgggaaggcatggacgcgttccgcagcatgagctttgcccttcttcaggtgcctccaaggrggacatccgggagaaggtgtgggattacctggaggccagcggcctggctgagttcccccggcccgtgcatcaccgcatccccaatttcaaggtacggaggcccgcagcgttgtagcgctcyccaggcacagtcccgcgggctgcgcaggtgcggagcgacggtagggggtggcagagagctgtaaagccaccttctgggtgagataaatgcgtttatgacggggaaggtgtacgaatttcatgccccgaggccttcagcggggtgagggaggtgatcctgcccttctgctctgtgctccc

SEQ ID NO: 55049 - DNA, 558 bp, Chicken  19866894308318_4
ggcggcgccgccatgcaggagggcgtgcggctgcgcgcgggtgagcggggcgcgggccgaagggcggggcgctctggtgacgtcactggkgggcgaccgttgggcgtgagggagggggcgggaaggcatggacgcgttccgcagcatgagctttgcccttcttcaggtgcctccaaggrggacatccgggagaaggtgtgggattacctggaggccagcggcctggctgagttcccccggcccgtgcatcaccgcatccccaatttcaaggtacggaggcccgcagcgttgtagcgctcyccaggcacagtcccgcgggctgcgcaggtgcggagcgacggtagggggtggcagagagctgtaaagccaccttctgggtgagataaatgcgtttatgacggggaaggtgtacgaatttcatgccccgaggccttcagcggggtgagggaggtgatcctgcccttctgctctgtgctcccctgaagcactgcgtccggttgtggagtcctcggtacaggagagacatggagctgtggcattgtgtccagaggaagacca

SEQ ID NO: 55050 - DNA, 600 bp, Chicken  19866894308319_1
agaacctgcttctccacggcctaaaagttgagatgttgcttttcaaagggatgaaagtttttcggatgtggcactcagcaccctgagctgtgtgtagctgcagtggcagccaggtgggcgccctctcggccttttccctgcagtgcccgatttttaggaaaaatgcccagctttgtcactgcctcccgcattgctgctctgctgtcccggaaccttgagcaatccagacgcaggagcaggcacgtggccgatgccccctcgatgtcctcactggctgacctgcaggttcgctctcctgcwcccgttgtattgagcttctttataacacccattactctaaggcatgggcatcgttgtttttacctaattttgcagatggagaaacatgagaaagtggaatgatttgtcccaccccaccgagcgcaacagcagcagcagagactgctctttggtgtctcatcaataccctacgtccaagcagtgctaatccaaattcggatgtctcttgaatttacatgtcagctttgtgtgtctcggtcgtttcctctgcacggcagataatgggccaaagcagatgtgcctaaaaacatgcagtgtgtg

SEQ ID NO: 55051 - DNA, 600 bp, Chicken  19866894308322_1
ccctacagaatcacaaaattagtagaatttttctagccatcctcctctgattttaaagtgcttttcattgaaacaaaatagctacactagttactctttaacctaccatacaaattaacacacaattctatcctttgatttctatgtcccattccagatctgttttcccactctctttttctaatgcttctaacaccctgcattttgctgctccagctcatcttatttgcataaaaacatttaaattactctttcctgaccataaccatattttatccagattactcaaaatccttctgytggttacagaacctaactacagcctgactcacagatctggcttgtgcagcacttgtctctccaaacatccaaccctgccctcccagacacacaatggctgcttctgctcagctgcagaaatgccacatgcactggtggcacttatgactcatgggtgcacccatcggtgcaggaatggcagaacagggaatccatccacggaaactgcaagagctagatcagactggcctccccaaccattcctatctgggccattctcttctcttcttgctctccatgcttctgtgtacagctagctcc

SEQ ID NO: 55052 - DNA, 600 bp, Chicken  19866894308323_1
agtgagtcacatcagactgaattacagaagttacatgccctgttggcaaatttgttaatgtgtttgtgatgtttgattctaacctatgaagaaatagtaaaaacttagtatgtctgtgaagaacactgctttttgtctttttggattaaaaattgttctgaatgaaaaaaaatcaaagagagttatcttgcatatttttatttggtacacatatccacaaaatcaaaatcaaacaacctaattttcaattctgtgattattacagctgaagggcaggtagagtctggtggaagaatgacwttcccttggctgatgaggagcttgtgaaagattgtttaggcaaaatcaatgcccacagatccatgggccccaatttggtttcacccacaagtgctgatagagctggcagaagtgattgctaaactgttctctgtcatctttgcaattacaggccagtcagcctcacctccatcctggaaaggtcatggagcaacttgttctggatgccatcatctccaagcagttggaaaaaaagratgttatcagaagtagtcaacacatattcaccaagggaaatttatgctcaaccactttggtggc

SEQ ID NO: 55053 - DNA, 600 bp, Chicken  19866894308323_2
cctaattttcaattctgtgattattacagctgaagggcaggtagagtctggtggaagaatgacwttcccttggctgatgaggagcttgtgaaagattgtttaggcaaaatcaatgcccacagatccatgggccccaatttggtttcacccacaagtgctgatagagctggcagaagtgattgctaaactgttctctgtcatctttgcaattacaggccagtcagcctcacctccatcctggaaaggtcatggagcaacttgttctggatgccatcatctccaagcagttggaaaaaaagratgttatcagaagtagtcaacacatattcaccaagggaaatttatgctcaaccactttggtggccttctgtgatgtcgtcacagttttgataaatgaggggagatatgtaccttgtctcagcgaggcttttgacaccatttcccacaacatccttgtaaagatgagcaggaaatgtgggatagacgggtgagacaatgaggtggattgagaattggttgattcatagaattcagagggttgtgactgatggtatagactctggttggaggcctgtaactagttgtgttccccaggggtta

SEQ ID NO: 55054 - DNA, 600 bp, Chicken  19866894308332_1
atatctgtttttgccctcattaaatttcacttcgttgctggaattttctaggaaatttcctgttctaaattgaattcagagacctttcattgcttactagatactgaaggcactcttgcaaaaagatacagacagaggtaagccctgcaagggacaaacacaagctgtgggttcactgttctatgatgtccaccaaatgtttcctagtagctgctgtatttaaacaggagctctgggaacaggagataggctcagaggacacgtgcccagtcttggcctgtgggcagagggctctaggaygcatgaaaatttgagcagcacgtgggttttgcagagagcaaggttagcgcaagcagctttggtgaggacttccttagaagcctgaccctaaaggtgggctttcggtgaatttcttgttgttaataggaaaacaaacgtaaccttcccccctttactttcttaacattgagaagagatgtatggcagagcctctttaaaggtgggatgttcatgttccctttctgtgttccttgaccccaaaccagagatgtttggaatcacaacgtgcagtggagcaacactgcatcgttccatctcaat

SEQ ID NO: 55055 - DNA, 600 bp, Chicken  19866894308334_1
gcttatttgatatgggggctttgcactattctggggctaggaaagctcagctgcaattgatctggtacttgactgatgtactaagttctgtttcatcagctttccacacagctgaccataaaattaaaccttcatttctaaagctttcagacagctgtaagaattgcccattatgcccatttgtttgctgcatgttttctttttttaattatgttttattatttgtgctggtctagtgctttgcatctcaatgttaccattagtgaaacataaaagggacatctaaggaccacataagargggagatgaagacaccaggctctgaaacatgttggttttttttcctgcttttgtttccactggcattggcagtgttcatagctcaatagaatctgtaagaaaatgtcttcwaagtgcagttytgttgctgcttgactgcatttgtctacgggttttttggctgtcactgaggcattgactcaagaatcgctgaaaactaacattaaattctaacgagcaagactttaccaagcaggtatttaaacaaaggacaacaaaaactacttttctctccactccagctgcttttgatcccattga

SEQ ID NO: 55056 - DNA, 600 bp, Chicken  19866894308334_2
ctgaccataaaattaaaccttcatttctaaagctttcagacagctgtaagaattgcccattatgcccatttgtttgctgcatgttttctttttttaattatgttttattatttgtgctggtctagtgctttgcatctcaatgttaccattagtgaaacataaaagggacatctaaggaccacataagargggagatgaagacaccaggctctgaaacatgttggttttttttcctgcttttgtttccactggcattggcagtgttcatagctcaatagaatctgtaagaaaatgtcttcwaagtgcagttytgttgctgcttgactgcatttgtctacgggttttttggctgtcactgaggcattgactcaagaatcgctgaaaactaacattaaattctaacgagcaagactttaccaagcaggtatttaaacaaaggacaacaaaaactacttttctctccactccagctgcttttgatcccattgaatactgccaattgcgttagagtcatgcatgacattcgccatttctgatttgctgagaatacctatctcaccatactacatgtgatgtgtcttcagtggttttacaaaaatg

SEQ ID NO: 55057 - DNA, 600 bp, Chicken  19866894308334_3
attaaaccttcatttctaaagctttcagacagctgtaagaattgcccattatgcccatttgtttgctgcatgttttctttttttaattatgttttattatttgtgctggtctagtgctttgcatctcaatgttaccattagtgaaacataaaagggacatctaaggaccacataagargggagatgaagacaccaggctctgaaacatgttggttttttttcctgcttttgtttccactggcattggcagtgttcatagctcaatagaatctgtaagaaaatgtcttcwaagtgcagttytgttgctgcttgactgcatttgtctacgggttttttggctgtcactgaggcattgactcaagaatcgctgaaaactaacattaaattctaacgagcaagactttaccaagcaggtatttaaacaaaggacaacaaaaactacttttctctccactccagctgcttttgatcccattgaatactgccaattgcgttagagtcatgcatgacattcgccatttctgatttgctgagaatacctatctcaccatactacatgtgatgtgtcttcagtggttttacaaaaatgaactaaaattc

SEQ ID NO: 55058 - DNA, 600 bp, Chicken  19866894308340_1
agtgttgacgtggtctcagccagcactgggttttacaggtgcgagctgcctgctcctctttcccaaagcttatcatataatgattgcagccactgaattttaacgcagataaggttgaagctagaattattaattaagctctgagagtctaactacaaattacctagtcattttcaccactgctttttaagtatacctctctaattataattcattaccgatcgagcagtacgttctgcacattctcacttttaattattggtattgaagcatggaatcgctaatatagtctgggatttygtaggctcttgtgactgtctttcatgcctgggccctacttgagcttccatgtgaggaagttatgatatcgataattcacttcggtggcttttcgtaaccttaatccaaggagtgtacgtatagcctggccaaaggagtctttgtgcctaggaaactacacatgcactataattcagtgctgccttttgggttttttttttctcatgtgcaagattaagtataggtttggtaagatacagcagaaaataggattgcagattttcttatgaactgttaaaatattcgccataatctcctaga

SEQ ID NO: 55059 - DNA, 600 bp, Chicken  19866894308348_1
atccatactgtaagactgtgcaaagcttcttagcacaacttcttgaaatacttaactcttaaagaagcaaaataaaccttattcttccatcttctgaatgctatctttcttagtaatcatcctcccagctactctggctccagctttacacccatcttagcaacagctttattccaattatactccttgtcccagaagaccatgtgaacatattattatgttccaggggctgtgcaagagtatatattcctagaagaggtgaagcatacagtttcactgtagaagcacggaaggaacttyggtctgtattgcactggactatccagaagttcagttgttgtgcagaagggcagcgctactgctcagggttcatacagtggttcagcagtcatcagttattgtcagagagacttcttgttttcaggtttaagttgagtctgagccagctgagctgcgctcccaggttttacttccatttatcgcacatgctaggtttcttatatacccttacagccgaattgaattgtatttactggacataaataaattaccaagtactgctgtggcaatcacctgcatttgcttgactatgaaatttga

SEQ ID NO: 55060 - DNA, 600 bp, Chicken  19866894308356_1
ggatgcacaggaaccatctggtgcaaactgcgactgtaacgaggcttctcctatcagacacaacgacagcctagcagtcagggagaaaacctgcagcactgaatgctcagaaaggatttctcttccacccactaatatgggtcctgcggctggatcaaacggttgacaagacacaaatccaagatcttaaacacttaattaagaatccaaacgcctttgtttttctgcttcactctgctggatggattggagtgtcagtcccaggatcccggccaagccctgagtcaaccctttctgccrctccacatcgctccagtggtttaactggaggcagcagcacgcagcccctcgcaggacactgctgcagcacactgsgctggtccagctgcctggcagcatgctgtgagcacagctatgtgccctgagcacagtgggctgtgcctcagctgcagtgtgtycccataactgctctcacaccctcaggaccagaggtggcacggctggtgcagccaggagccccatgccctaacagtcccaaggaaacccgtgcttcccgagccggcccgaggggcagcacagctctgagcactcagttccagc

SEQ ID NO: 55061 - DNA, 600 bp, Chicken  19866894308356_2
agtcagggagaaaacctgcagcactgaatgctcagaaaggatttctcttccacccactaatatgggtcctgcggctggatcaaacggttgacaagacacaaatccaagatcttaaacacttaattaagaatccaaacgcctttgtttttctgcttcactctgctggatggattggagtgtcagtcccaggatcccggccaagccctgagtcaaccctttctgccrctccacatcgctccagtggtttaactggaggcagcagcacgcagcccctcgcaggacactgctgcagcacactgsgctggtccagctgcctggcagcatgctgtgagcacagctatgtgccctgagcacagtgggctgtgcctcagctgcagtgtgtycccataactgctctcacaccctcaggaccagaggtggcacggctggtgcagccaggagccccatgccctaacagtcccaaggaaacccgtgcttcccgagccggcccgaggggcagcacagctctgagcactcagttccagcccctggtccctgtctttccctgmagccggacacaggggtggtgctccgtacttctgtgtttcttctctcttcaga

SEQ ID NO: 55062 - DNA, 600 bp, Chicken  19866894308356_3
acggttgacaagacacaaatccaagatcttaaacacttaattaagaatccaaacgcctttgtttttctgcttcactctgctggatggattggagtgtcagtcccaggatcccggccaagccctgagtcaaccctttctgccrctccacatcgctccagtggtttaactggaggcagcagcacgcagcccctcgcaggacactgctgcagcacactgsgctggtccagctgcctggcagcatgctgtgagcacagctatgtgccctgagcacagtgggctgtgcctcagctgcagtgtgtycccataactgctctcacaccctcaggaccagaggtggcacggctggtgcagccaggagccccatgccctaacagtcccaaggaaacccgtgcttcccgagccggcccgaggggcagcacagctctgagcactcagttccagcccctggtccctgtctttccctgmagccggacacaggggtggtgctccgtacttctgtgtttcttctctcttcagacactgtttctatctgagtagtgttttcctcatctgcacggcctggctctgggcagaggctgtgctgtcctccccttacccgac

SEQ ID NO: 55063 - DNA, 600 bp, Chicken  19866894308356_4
actggaggcagcagcacgcagcccctcgcaggacactgctgcagcacactgsgctggtccagctgcctggcagcatgctgtgagcacagctatgtgccctgagcacagtgggctgtgcctcagctgcagtgtgtycccataactgctctcacaccctcaggaccagaggtggcacggctggtgcagccaggagccccatgccctaacagtcccaaggaaacccgtgcttcccgagccggcccgaggggcagcacagctctgagcactcagttccagcccctggtccctgtctttccctgmagccggacacaggggtggtgctccgtacttctgtgtttcttctctcttcagacactgtttctatctgagtagtgttttcctcatctgcacggcctggctctgggcagaggctgtgctgtcctccccttacccgacgcgtggcatttcctccaagggctcctttgctcaactccagcacgagatgaaaccacgcttccacaaagcggattttaagtgcagagatatccatgaagattcatagttctcaaggcccagtgggacacttatgctcatccagccttgtcattctgtacatttcgg

SEQ ID NO: 55064 - DNA, 600 bp, Chicken  19866894308358_1
ggtctgctcttcactgtttcatctcccttgcccttatatacgaggcattgcaaaaactagttagtggccactctaactcttgttgttaccgtttaagtgagttaggcaatgctccagggagaaatgtagagatcatagaatcataaaggttggaaaagatctcaaaatactgagcacgaaatgaaatgcaagagaaagctaaactggaaatatcccttctaggtgactttggccccactctaacaggtacttttctcagcaatgtgctgaaggcattctgggtgagccgtggcagtgctrttgtggtgggaatggtgttccgtgagcacagctcctggctccttcctcctcctggaggtgctctggaggtgaattgcttcacctctgagtgcccccagcccttgasgaagcaggcatggttacactcacctttcccacaaaggtgccgtaaagctttgcttaatgttaataagatgttttaatttccagggtaaaaggacgttctataaatacacattagaagtagtaatagttttaatggatgccattattttataacagtgcttttctagtttgagaaattttttaccggtttgcgat

SEQ ID NO: 55065 - DNA, 600 bp, Chicken  19866894308358_2
caatgctccagggagaaatgtagagatcatagaatcataaaggttggaaaagatctcaaaatactgagcacgaaatgaaatgcaagagaaagctaaactggaaatatcccttctaggtgactttggccccactctaacaggtacttttctcagcaatgtgctgaaggcattctgggtgagccgtggcagtgctrttgtggtgggaatggtgttccgtgagcacagctcctggctccttcctcctcctggaggtgctctggaggtgaattgcttcacctctgagtgcccccagcccttgasgaagcaggcatggttacactcacctttcccacaaaggtgccgtaaagctttgcttaatgttaataagatgttttaatttccagggtaaaaggacgttctataaatacacattagaagtagtaatagttttaatggatgccattattttataacagtgcttttctagtttgagaaattttttaccggtttgcgattattacagaacctgttcttgttaattaaagattgacattcgggcaaaatgtgcrgaattgttactataaattccgatcggtgtgtgctgagcatgcccagcactgg

SEQ ID NO: 55066 - DNA, 600 bp, Chicken  19866894308358_3
gaggtgctctggaggtgaattgcttcacctctgagtgcccccagcccttgasgaagcaggcatggttacactcacctttcccacaaaggtgccgtaaagctttgcttaatgttaataagatgttttaatttccagggtaaaaggacgttctataaatacacattagaagtagtaatagttttaatggatgccattattttataacagtgcttttctagtttgagaaattttttaccggtttgcgattattacagaacctgttcttgttaattaaagattgacattcgggcaaaatgtgcrgaattgttactataaattccgatcggtgtgtgctgagcatgcccagcactggctctcctgcactcgggaaccgtcggtgcagcccttcagctcttacaacaactccttgctgcccgtgctcgcaagtttgatgactcctaaatagaatggttcaaatatttcaaagcacttgagattcgtatagcgcgaagcaatttgaaattattgtgctgcaattaattttaaataactgagccctgcatatgtctagaaacccatacagatccaaatggaagctctctaaaaattgaaatgattcaa

SEQ ID NO: 55067 - DNA, 600 bp, Chicken  19866894308358_4
cagtgatccaggtacgcgctgtatctgcagacaccaaactggattactgcccggtggccgctcctgctggcagcgcgttctgtccttgccttacagatggatcagaaagatgctatctagtgtaggaaggccggtagggatcctgatggcggaagtcatgccccttctcctggctccagagaggatggcagcgtgttctgctgtggctcttggaccagactctcctggcactgtggccaggacccctccagctcagccactggcacctggcagggccctcggcacagagccgtgggcaayggtgtccttgggacttactccgtgcctggtgggtgcttccacacggcaggcaagaggggcccctccgcagggccttcctcagggccttaccttacttttagacagttgtcattatctttgtctaaaggtcatggctaaattgaataaaaggaaagctgtgtgttcctgtcgatgcacaatggcagtattgactttcctaatccagtttgctgaggggtgagagaattaaattagatatctaagcacagaaattgagagcctttgaaaacaaagataaggagacagcctgtattttccttt

SEQ ID NO: 55068 - DNA, 600 bp, Chicken  19866894308365_1
acttcaggaacattttcagctgcatcaggaaatcaaactcaatgaagctgcgtctgcaagaactgtccttgcacagccagaactccatggagcagagctactcattttggcattccaattcagtcttcattatgaattatctaagtcaaaactgtgcattccactggtgcagaaatatgccccagtaaacgtgaattatttatcactagaacagcaagcaacagctcttctacgaaacatccctatgtgttccccaaatctaggggaaaaagtcagactgtgagcttcagactttttccmcacttaatattaaatgaaatgttacagcctcacaacacagagtgaataaaagtgactgcaaggtacaccactccaggctacagtagttaaaagcacttaccaatgttttcctcaggcgctcatattctggacgatactccctgcaaagataaacatacacagtgcattcattctcagctaatacatcatttctgttaagaagggatcactttggaggcttgtctctatcccamactaacagttcttctaaccaaatgtattctgaaactaaaggatgcaaaataagtgaatatactccat

SEQ ID NO: 55069 - DNA, 600 bp, Chicken  19866894308365_2
gaaacatccctatgtgttccccaaatctaggggaaaaagtcagactgtgagcttcagactttttccmcacttaatattaaatgaaatgttacagcctcacaacacagagtgaataaaagtgactgcaaggtacaccactccaggctacagtagttaaaagcacttaccaatgttttcctcaggcgctcatattctggacgatactccctgcaaagataaacatacacagtgcattcattctcagctaatacatcatttctgttaagaagggatcactttggaggcttgtctctatcccamactaacagttcttctaaccaaatgtattctgaaactaaaggatgcaaaataagtgaatatactccattaaaatgccaaatctttctcatgcagtctggttagattaaaaaataaaaattgggaaaaaaaacaacaacccagctctatagaactagtcattacactgccataaccagcagatcactcactctgactaaacattaaagtgggaaaaattagatgttaggaaggaattcttcactcagggagtggtgagactccggcataagttgctcaaagaagttgtagatgctccatcct

SEQ ID NO: 55070 - DNA, 600 bp, Chicken  19866894308366_1
ttaaatcataactagcaacctcctcctccccaaagcagacgtttaaaaatgttgttattgtcattctgcttaagcacgttgttcctcttacatttcccctgttgagacctagcctgaatgaattgtaaccacagcttgtccaactgtttcttaaataattcccattttttctgcactaggtttcctacacagtcatgagatcttgcatcatttccatcaagatcattcagttgtttatgttaccacaagctattccttctacttgaagtgaaggtgtaagtaattcatattgtgacatawgctgaaagcatgtttatctttcagaaaaacttccctacttcatacagttatctctgtcagaactccttacagtgtttttatttttttactaaatttccactgtgccaaaactcattataatgcttcctcttaatttcttttttctattgtgaatttgtgatccctaaatcagccctgctctttttatcaagatgggctaatttcccagctctgggtgccaagagcctctgatcatgaagttcagtcaataaactgacttcagtaagtaagcaattatgcattgcctctggaaacatgctt

SEQ ID NO: 55071 - DNA, 600 bp, Chicken  19866894308370_1
ttgatttggtagcaatgacaattcctaaggtctcagctcatcctctataaaaaaaaaacaaaaaaaaaacagcaacagtcctgcctgtgtcccactattcattgtcagaacaatatctactttaattaaatctgttaaagtagaatatgacaccctttgggacatagatttagcgtgagactgtttatcaagtgtagataatactaattgttcccatggagatttatctgctatgctagttacagtattaggctctggccccagcatcccatgtgcccgaattagaggagagaggtgagycttgtttattaaaatacaaagtcctgaaagttatggatttcctttgactggcacagtcagcaacctggagctgaccctcttagctcctcaccttgacttgtgtgtgtctgcaagcctggaagtattaacagaaagaagacactattagagtaatatcctcgtaacacttttgtttgcatgactgcccttcagctagcaagtggctaatgccatctgctcctgtgtcatccgggggttaacccacagcaggggcagatcctgagtcaccgtgccagcagtcgcagctcccaggctgagaca

SEQ ID NO: 55072 - DNA, 550 bp, Chicken  19866894308376_1
ctgtacacacagaataacctaaagacaattgtgattttggagagcacttttccacaaggtgagaacatttcacatatcattaaaagctgaaatggtcttgtgctctttgcttctggaagtctgtacttcacgcttcacttcctacctacctggcttagaacttagtcctgattcatcagtcttctctccacaaagcactagacgcattacagaagtgtttatcagctttgtttaaaaacgaagaatcaaaagactttttaagctgaatgaatcaaaacctgaaaaaggcaaagagcaagyratgaatgtcacagagatgcaacagtgacaatgggaatcaaacacttcgggttcagccagatgagtttcgtcatgcacattttagctgcagaatttaagcagagaaaatattgtagcccaatgtgaactaataaaccaccaggaggaatttggaggcatactgaattattcttgactagcagagaaattaaatggtgttaatatctgcagaagaataggtctagtgcaacttctgtaaaaactccaccga

SEQ ID NO: 55073 - DNA, 549 bp, Chicken  19866894308376_2
tgtacacacagaataacctaaagacaattgtgattttggagagcacttttccacaaggtgagaacatttcacatatcattaaaagctgaaatggtcttgtgctctttgcttctggaagtctgtacttcacgcttcacttcctacctacctggcttagaacttagtcctgattcatcagtcttctctccacaaagcactagacgcattacagaagtgtttatcagctttgtttaaaaacgaagaatcaaaagactttttaagctgaatgaatcaaaacctgaaaaaggcaaagagcaagyratgaatgtcacagagatgcaacagtgacaatgggaatcaaacacttcgggttcagccagatgagtttcgtcatgcacattttagctgcagaatttaagcagagaaaatattgtagcccaatgtgaactaataaaccaccaggaggaatttggaggcatactgaattattcttgactagcagagaaattaaatggtgttaatatctgcagaagaataggtctagtgcaacttctgtaaaaactccaccga

SEQ ID NO: 55074 - DNA, 600 bp, Chicken  19866894308377_1
ctacctgaattttaataagtgtatttattaattacagtgttcagtcacaattcagatagcaaaaccaaaactcaaaggcctcccttaaaagtagtagctccaacacagtatcagtgccttaaagactaacacttttcattttgtttctttccactcatatatcatcatattgccacaaaagaaaagaaactcatcagcagcttttttttaaatatatgtatcagtgtaaactaacattcccatctgtcatcgacgcatggctatcaaaatggtattccacattaatttatcatgcaagastgaaatgaaaacaggtaaaacacagcttataataaattcacttgcctgttttcttcctgtatgtcaagtagcgccttttgcagaaactgaagaactaatgaaaataattatgtgataaatttatccmaaaaagaaaattaatttattttttattacaattattaatttattattatttattatttaatttattaattaatttaaaagagcaaagcaatcacacatacagagtacacgcgatcacaacaaaaagttatcagtatagtggtgtttcttccactctaccaacaaatcaaactg

SEQ ID NO: 55075 - DNA, 600 bp, Chicken  19866894308377_2
aacacttttcattttgtttctttccactcatatatcatcatattgccacaaaagaaaagaaactcatcagcagcttttttttaaatatatgtatcagtgtaaactaacattcccatctgtcatcgacgcatggctatcaaaatggtattccacattaatttatcatgcaagastgaaatgaaaacaggtaaaacacagcttataataaattcacttgcctgttttcttcctgtatgtcaagtagcgccttttgcagaaactgaagaactaatgaaaataattatgtgataaatttatccmaaaaagaaaattaatttattttttattacaattattaatttattattatttattatttaatttattaattaatttaaaagagcaaagcaatcacacatacagagtacacgcgatcacaacaaaaagttatcagtatagtggtgtttcttccactctaccaacaaatcaaactgaaaattcagtgcagtcccaaagaagcaatgctaaaacaaaatctcacactggtttgtaacaaaattagagtttccaacccatgctgtctaattcagagttagagctcctcagcgaaaagctgaaatt

SEQ ID NO: 55076 - DNA, 599 bp, Chicken  19866894308379_1
  misc_feature (1)..(158): n is any nucleotide
nnnnnnnnnnnnnnnnnnnnnnnnnnnnnnnnnnnnnnnnnnnnnnnnnnnnnnnnnnnnnnnnnnnnnnnnnnnnnnnnnnnnnnnnnnnnnnnnnnnnnnnnnnnnnnnnnnnnnnnnnnnnnnnnnnnnnnnnnnnnnnnnnnnnnnnnnnnnnncagcattgctgctactttgaactaagggtatttcacaaatgccactttcagggggtcacttacacaggtgaggaaaaccataaactggcgagggatattttttaagctcagtaaagtgttgagtgggatctgactcatgctrggctgtagcagctctgcagtgtgctgtgctgtgttgtacctacaatttagagggaaggctccacatccttcctctgcactggtttctaatggagtatgaatgataagtaggccttgtgagatgtttgactgtyagaaattgctagtctggaaaggtacacaagattaaatgttagtctctcaaatctcacaagtttacctcaaaaacatttttacaatacctttggagaacacttaatccaaaacttsttctccttgaataacctgcagtggcctaaagtataatataatgatgtttat

SEQ ID NO: 55077 - DNA, 599 bp, Chicken  19866894308379_2
  misc_feature (1)..(25): n is any nucleotide
nnnnnnnnnnnnnnnnnnnnnnnnncagcattgctgctactttgaactaagggtatttcacaaatgccactttcagggggtcacttacacaggtgaggaaaaccataaactggcgagggatattttttaagctcagtaaagtgttgagtgggatctgactcatgctrggctgtagcagctctgcagtgtgctgtgctgtgttgtacctacaatttagagggaaggctccacatccttcctctgcactggtttctaatggagtatgaatgataagtaggccttgtgagatgtttgactgtyagaaattgctagtctggaaaggtacacaagattaaatgttagtctctcaaatctcacaagtttacctcaaaaacatttttacaatacctttggagaacacttaatccaaaacttsttctccttgaataacctgcagtggcctaaagtataatataatgatgtttatataccactctactgcctctgtgaatgcacttcagtccattttgcataatacttaagctgtgaaggtaagagatgctgcagtgctgctgtcagccagctcttcagcagcactyggagaggtggcaccaggctga

SEQ ID NO: 55078 - DNA, 600 bp, Chicken  19866894308379_3
agggatattttttaagctcagtaaagtgttgagtgggatctgactcatgctrggctgtagcagctctgcagtgtgctgtgctgtgttgtacctacaatttagagggaaggctccacatccttcctctgcactggtttctaatggagtatgaatgataagtaggccttgtgagatgtttgactgtyagaaattgctagtctggaaaggtacacaagattaaatgttagtctctcaaatctcacaagtttacctcaaaaacatttttacaatacctttggagaacacttaatccaaaacttsttctccttgaataacctgcagtggcctaaagtataatataatgatgtttatataccactctactgcctctgtgaatgcacttcagtccattttgcataatacttaagctgtgaaggtaagagatgctgcagtgctgctgtcagccagctcttcagcagcactyggagaggtggcaccaggctgagtgcttccagatggggaacatgggaatcacttctaatttacccctgtgcctctttctagggaatgcacggtctaaaaccagctagtgggtaggcctctcccacattgaaaggcaga

SEQ ID NO: 55079 - DNA, 600 bp, Chicken  19866894308379_4
ccttgtgagatgtttgactgtyagaaattgctagtctggaaaggtacacaagattaaatgttagtctctcaaatctcacaagtttacctcaaaaacatttttacaatacctttggagaacacttaatccaaaacttsttctccttgaataacctgcagtggcctaaagtataatataatgatgtttatataccactctactgcctctgtgaatgcacttcagtccattttgcataatacttaagctgtgaaggtaagagatgctgcagtgctgctgtcagccagctcttcagcagcactyggagaggtggcaccaggctgagtgcttccagatggggaacatgggaatcacttctaatttacccctgtgcctctttctagggaatgcacggtctaaaaccagctagtgggtaggcctctcccacattgaaaggcagatttgccaataagaacttgaaaatgttatatgatccagaaagcgtaactttattctgtcttcctcaaggagttgatctttttatccttaaactcaagtaatagttttgtagaggcttttacatcataacagattttacatgttctttactgacagctgaggata

SEQ ID NO: 55080 - DNA, 600 bp, Chicken  19866894308387_1
gaacaacagatgggattcagttgcataaacatgttgtattctatatacacatcagctggcagtgtaaagaggtgcaagtcttctacaaatcctcaatcatatctgccagccacgtgtgtttatctgatactgtaaggcatagtaaatggaattacacacctacacatggccttgtgactcaaagagagagcaatatatacttcagaaagataatcggcttggtgtaagctcccattaactgaacagaaagccagagagccaacttgcttaaaatgtggatgactccatgctttcaaactrgatctcagtttaagtgtcttattgaaatgtaaagcttataaacctttctcataaacattctcttattttacattgcaagcccctggcctattcaggtaacacctagagttaagaacacatttgaagctttactaaaaatgtctttgtaacagcttggaacagggaggaaaaggacagtatgaactattccaagttgaaggaaacactgtttttgaaaaaatggtcaagacacttacagtctaggtggcagaaatacacttttttgtggaatgttttgaaggttcacaaaataatagaatg

SEQ ID NO: 55081 - DNA, 599 bp, Chicken  19866894308389_1
  misc_feature (1)..(43): n is any nucleotide
nnnnnnnnnnnnnnnnnnnnnnnnnnnnnnnnnnnnnnnnnnnaacaaaaaaaacccaacaacaacaaaaaaaacaacaaccccagaggttgtacagacatggttttcacaatgaaattatgtcagagaaacttaaaaccttccagatttacacaaattttcaagtttcagaaattaaaagcacagattattaactgcatagcataagcaggaatgaattcaaattttcaattgaggcgaattttctttggtaagtattagaagaaataatgaatcagagtagtaaaatgtccagtagartttttttttctcccatttttttaaactatacaggagtactgtttcatttttaaaactgagatgtgagtaagaaatataaatgatatagcactatatacagagaaccaagaactggcagttattacagctcattgctatgataagtgaataaattaataagtaaaagaractacttttatcraactattccaaagtaaaacatyactacacaatatacattcaccaaagaaaaaggtccatttgctttttaagtagaacatgtcaaagcgtaagaatattttgcttttacctttgatttt

SEQ ID NO: 55082 - DNA, 600 bp, Chicken  19866894308389_2
cagaaattaaaagcacagattattaactgcatagcataagcaggaatgaattcaaattttcaattgaggcgaattttctttggtaagtattagaagaaataatgaatcagagtagtaaaatgtccagtagattttttttttctcccatttttttaaactatacaggagtactgtttcatttttaaaactgagatgtgagtaagaaatataaatgatatagcactatatacagagaaccaagaactggcagttattacagctcattgctatgataagtgaataaattaataagtaaaagaractacttttatcraactattccaaagtaaaacatyactacacaatatacattcaccaaagaaaaaggtccatttgctttttaagtagaacatgtcaaagcgtaagaatattttgcttttacctttgatttttactacaagggttagggttacaaggatccttggaaatacatgatccgaattcaaattgattgtcttggagaccaacacatcgagctatacatgcacttggatatgtgcgcccattttgaccacatactggtacaaactgatctacacagttacatggcaagcctgtaaa

SEQ ID NO: 55083 - DNA, 600 bp, Chicken  19866894308389_3
cacagattattaactgcatagcataagcaggaatgaattcaaattttcaattgaggcgaattttctttggtaagtattagaagaaataatgaatcagagtagtaaaatgtccagtagattttttttttctcccatttttttaaactatacaggagtactgtttcatttttaaaactgagatgtgagtaagaaatataaatgatatagcactatatacagagaaccaagaactggcagttattacagctcattgctatgataagtgaataaattaataagtaaaagaractacttttatcraactattccaaagtaaaacatyactacacaatatacattcaccaaagaaaaaggtccatttgctttttaagtagaacatgtcaaagcgtaagaatattttgcttttacctttgatttttactacaagggttagggttacaaggatccttggaaatacatgatccgaattcaaattgattgtcttggagaccaacacatcgagctatacatgcacttggatatgtgcgcccattttgaccacatactggtacaaactgatctacacagttacatggcaagcctgtaaaagcaacacataaa

SEQ ID NO: 55084 - DNA, 600 bp, Chicken  19866894308389_4
ataagcaggaatgaattcaaattttcaattgaggcgaattttctttggtaagtattagaagaaataatgaatcagagtagtaaaatgtccagtagattttttttttctcccatttttttaaactatacaggagtactgtttcatttttaaaactgagatgtgagtaagaaatataaatgatatagcactatatacagagaaccaagaactggcagttattacagctcattgctatgataagtgaataaattaataagtaaaagaractacttttatcraactattccaaagtaaaacatyactacacaatatacattcaccaaagaaaaaggtccatttgctttttaagtagaacatgtcaaagcgtaagaatattttgcttttacctttgatttttactacaagggttagggttacaaggatccttggaaatacatgatccgaattcaaattgattgtcttggagaccaacacatcgagctatacatgcacttggatatgtgcgcccattttgaccacatactggtacaaactgatctacacagttacatggcaagcctgtaaaagcaacacataaagcaagaatatggttcatactta

SEQ ID NO: 55085 - DNA, 600 bp, Chicken  19866894308395_1
ccggcagcagacaactacgacgagaccctttcgactctcaggtacgcagaccgggccaagaacatcgtcaaccatgccgtggtgaacgaagaccccaatgctcgcattattcgggagctccgtgaggaggtggagaagctgcgagaacagctcacaaaagcagaggtacaaatgtttgccttggctactgtccaagccctgtagacgaaagctttcttgttgtcaaagctttcttactgagattctgcaaggaaaaggcaaagaaagttgggacgtgatacctacgagaaatctcccttygtgccgcttccgttttgtttgaggtcgatatgggtgataacatgagataccaggttcccttcagacactcagttgagctgtcctgtttttattaggggatacagatcagaaaagcaggatgaggagggaggagtagggttgggatctaaagattgtgccatttataggtagagctttgcctgtgcgttttaagaattcactgtagctaattcctgcaagatgtgagttgacttgaataatgcttgcttgcgtactagtttttaccactgaaaaacagaacctcttacaggcattagacaa

SEQ ID NO: 55086 - DNA, 600 bp, Chicken  19866894308395_2
cttccgttttgtttgaggtcgatatgggtgataacatgagataccaggttcccttcagacactcagttgagctgtcctgtttttattaggggatacagatcagaaaagcaggatgaggagggaggagtagggttgggatctaaagattgtgccatttataggtagagctttgcctgtgcgttttaagaattcactgtagctaattcctgcaagatgtgagttgacttgaataatgcttgcttgcgtactagtttttaccactgaaaaacagaacctcttacaggcattagacaatattawagatatctccatagcttcctccatgaaattatgacggcaacatggactaaatgcaagtgtagtgtgcgcttgcagctcagaaggccatctgtgttctgggctgcactaaaaaggggtagccagcagggagagggaggtgatggtgcccctctactcggctcttgtgaggccccatctgcagtactgcatccaggcctggggcccccagtacaggaaggacgtggagctcttggagcgggtccaaaggagggccactaagatggtcagagggctggagcacctctcctatgaggaaagatt

SEQ ID NO: 55087 - DNA, 600 bp, Chicken  19866894308403_1
tgcatgtgttattcaagatagaagcatgttaccgaaagctgaagtgtgtaatgatgtattctgtactctaacaactcctaacatttcatttgttggtgggtggtgccttgtttgcttgattgattttttgccaaaagtagccactgggctgacattttcagagaagtattttgtgggacctgaatggtcatgttccccaatggtagtaggtagctcaacctcatcgccatgcagctagaagaaaggtatttttcgtcctgcatataatgttttacatgtattcacatcaaatttcatctsccagtttattaccccctcagcagtcatcactaacaaatcttatggtatgatttaggtatatttaagtgacttggatgttttgtttagctttagtagactcacatgttatggtatggacaagtagatttggttccttctcctaaatctagtgttatgctgggttattctcttcctgtgcccagacttcacagctggcttttatggctcttaatgtttttactcrttttgttctgtgatgctaattatttagtaacatttatagtctgatttttatgcagatatctaaatatttgtcataca

SEQ ID NO: 55088 - DNA, 600 bp, Chicken  19866894308403_2
tcgccatgcagctagaagaaaggtatttttcgtcctgcatataatgttttacatgtattcacatcaaatttcatctsccagtttattaccccctcagcagtcatcactaacaaatcttatggtatgatttaggtatatttaagtgacttggatgttttgtttagctttagtagactcacatgttatggtatggacaagtagatttggttccttctcctaaatctagtgttatgctgggttattctcttcctgtgcccagacttcacagctggcttttatggctcttaatgtttttactcrttttgttctgtgatgctaattatttagtaacatttatagtctgatttttatgcagatatctaaatatttgtcatacagtctcgctgttaaatttactaaacttaagacaaaaataagctcttctgcctacccgatttcacattctccttccctgatgctaataagctgtcctttaaaatagaagtacaatttagtattgccccaagtatctttgtttttcattattttcatcgttgaatatttcacaatcttctatttttaattaaaactgaacatcttccagttgatgtaaaacccaca

SEQ ID NO: 55089 - DNA, 600 bp, Chicken  19866894308404_1
taccaaccagggatagaatattgtctggtacaaaaaaaagcatctggagtgatgtaatgatctaatggaacataatggaacaaaacggtgtacagtggagagttaacattctggattctaaaaaagcagtttaaaaaagtctcattcttcttaaaagaagaggggaaacatgaagggaaacagacaaacagcaacagcacacctgtatgtgcagtaaaataagacagggagagatttaattctgaatcatctaaatcctgtgaataattttgcaggtaaatgttttaattacaaaacaaytattccatgacacaccttcaaaatgcatttcctctttttcaggtggaatgaggtaatatggctgaaatattggtggagctgaaraaactataaacatagaagagaaggctgcttccacaaaaaaaggacacttctgtacctatatgtatctatatgttaatttataataatagragaaaatggatgcaaaagtttaagtaagcggagtaaaattaaaccaggagaacagagtttgcagaacaggagcttaataaacaggtatgtgctaactgtaattattattttgagaacatgaacggt

SEQ ID NO: 55090 - DNA, 600 bp, Chicken  19866894308404_2
acggtgtacagtggagagttaacattctggattctaaaaaagcagtttaaaaaagtctcattcttcttaaaagaagaggggaaacatgaagggaaacagacaaacagcaacagcacacctgtatgtgcagtaaaataagacagggagagatttaattctgaatcatctaaatcctgtgaataattttgcaggtaaatgttttaattacaaaacaaytattccatgacacaccttcaaaatgcatttcctctttttcaggtggaatgaggtaatatggctgaaatattggtggagctgaaraaactataaacatagaagagaaggctgcttccacaaaaaaaggacacttctgtacctatatgtatctatatgttaatttataataatagragaaaatggatgcaaaagtttaagtaagcggagtaaaattaaaccaggagaacagagtttgcagaacaggagcttaataaacaggtatgtgctaactgtaattattattttgagaacatgaacggtagatggaaaaacatactactaggaataagtcagatgttgtgctgctagcagtcatactccctggcagtggaatacaggcacaat

SEQ ID NO: 55091 - DNA, 600 bp, Chicken  19866894308404_3
gggaaacagacaaacagcaacagcacacctgtatgtgcagtaaaataagacagggagagatttaattctgaatcatctaaatcctgtgaataattttgcaggtaaatgttttaattacaaaacaaytattccatgacacaccttcaaaatgcatttcctctttttcaggtggaatgaggtaatatggctgaaatattggtggagctgaaraaactataaacatagaagagaaggctgcttccacaaaaaaaggacacttctgtacctatatgtatctatatgttaatttataataatagragaaaatggatgcaaaagtttaagtaagcggagtaaaattaaaccaggagaacagagtttgcagaacaggagcttaataaacaggtatgtgctaactgtaattattattttgagaacatgaacggtagatggaaaaacatactactaggaataagtcagatgttgtgctgctagcagtcatactccctggcagtggaatacaggcacaatgcattgtaaacattgtaaacattactgagaatatctgcacactcaaagtatcaaaaagaagaaaaatttttgttgttccaatttctacca

SEQ ID NO: 55092 - DNA, 600 bp, Chicken  19866894308404_4
catactactaggaataagtcagatgttgtgctgctagcagtcatactccctggcagtggaatacaggcacaatgcattgtaaacattgtaaacattactgagaatatctgcacactcaaagtatcaaaaagaagaaaaatttttgttgttccaatttctaccaatataagcatcatttatagaatgtgcattcctctaactgcccttctgttttatggaggggaaaaaaaaatgaatttcagattatgaaatggaataaacagaaagactgtatgaaagcaaacgtggataagtattttstgattgcctaaaatttgatcattatcaggaaataacttccttttgaaagtagccctaattggctattaacagtagtagctaacaatttcaagacaattaatattttaaaataattagttggctaatatattacattagagcatacggtaaggcagaagtcttgctaattatatgtattattctccctactttgcttaatggaaggtgtctggcctttagattaattcattctctctcttttttttaatcagtgtaactaatcctcccacatactattgtaacattaaagctgaaagatgt

SEQ ID NO: 55093 - DNA, 600 bp, Chicken  19866894308407_1
tggggctgctgtgcagagctggggcacaaagctgcccttgtcacctcaggactcagagtgctgtctgagctgtttgagcttgacacttgttgtttctatgcgatgcaaactgctttggtcctggcaggatgggttgggttgcgcctacttaagattcaggtcagttccatgcagatttgtcattcagcccgcaaacattgggccttttaagaatgttcctgacctacataggcctggctttaatacctcagaagctagattatagagttctgtgcttgttttaaaccacttggtcttgtmccctgcctccgctgccgctcattgctgaaggtgccgttcctggctggcagcacatcgcttctgtgctgtgcctgggtaggatgagctgtgctggggagctgtgggagcagggccctaattcctgatggagacgtgggatagagtgctgctggggtaattggttgtaaaaatggttttgatgggatggagggtagctgaaggtgatcttgcaagcagatgagctgttctgctgcaagaaggatgtggtggctatctggcttatggcagtgttcttgctctgcttttgccacagtattgtaa

SEQ ID NO: 55094 - DNA, 600 bp, Chicken  19866894308407_2
attggaggaggtgccatagcaacagtttttggcctctctcaattttctcagtatagaaacaaacacgtaagtattaattatgacttctgataaaatatgaagcttaaaatctgtttgagcgtatgttaggcttatacgaatagctttgtttgggaagggatgccaagagctctcagcttgatttgctgtgtgctatctggaggatggcattaagtgatgtttcaccattgcaggtctttaaccagtggcaaagtatgattcatgtaaatcacttttcttgtttaaaaagtgtcctttggrtacccctagggatgtgacttagttgcaggaggagtgagaaataccatctgaagtacaagttgctttgaagtacatagaaacactagcattacctgagaatctcagctttatgcaatgattgtggcaactcttgggcagttgtgaaaactgataattgttttagggtgggatctgtaggaaggcttctgtttctggtggcattggtgtctcactgggtgggtacaacctagacagaggtatgctcaaggcatgrtttaaggctgtattttgggtaattaaggcacactgatgagataaaaa

SEQ ID NO: 55095 - DNA, 600 bp, Chicken  19866894308407_3
tatgattcatgtaaatcacttttcttgtttaaaaagtgtcctttggrtacccctagggatgtgacttagttgcaggaggagtgagaaataccatctgaagtacaagttgctttgaagtacatagaaacactagcattacctgagaatctcagctttatgcaatgattgtggcaactcttgggcagttgtgaaaactgataattgttttagggtgggatctgtaggaaggcttctgtttctggtggcattggtgtctcactgggtgggtacaacctagacagaggtatgctcaaggcatgrtttaaggctgtattttgggtaattaaggcacactgatgagataaaaattcccagagcagtgaaggaagatggtgaaaatgtactgataaagtaagatagtggtggcagaaagagatgtagtagatcctggttctagtctatgtgtcactgccataggaccttcttccaggtgaattggagcagccatgttttgttgttttgtttcctacttcttaatgcagaaacctaggaaaaacatcagcatgaggagcaagagttgtggactgcttttaggcagagctggtgctgatcaacggctac

SEQ ID NO: 55096 - DNA, 600 bp, Chicken  19866894308412_1
cactctctgcatgagtccagagctgccagcagccctccaggcgtgctatgaggtgatcaacaccaaacaccatcctgctgcaccaacgctgagtcctactgaacatcccactggtgggatcaggcggaccaaagctcagcacctgctgcaatttggaagcatctggcggtcaaggggtaccctacagccctctgaaagtgactgctggctcccttgccatgtgcctcagcaggctgagctagcagggctgttgagatccacccacttaaccccgggtcacctctgatcttgtgtcgcaaygtctctctgagtcatccgtttcctcccagtcacagaaatggcctcaaaagtttgcacagatggtgcttaatcccagtttggacaatgggagtttgggctttaaatgacaatttctaaccaagagcaaggagagggagggaggcggcgaggggtgggagaggacaaaggatatggggagacagcctgctttagtccacagaggctcaaagcaaatcagcacggtgaaaacsaagttcttaatgtccccacagggacctctacctgcccagtgctttctgctcttggcctctccctgcacat

SEQ ID NO: 55097 - DNA, 600 bp, Chicken  19866894308412_2
aggctgagctagcagggctgttgagatccacccacttaaccccgggtcacctctgatcttgtgtcgcaaygtctctctgagtcatccgtttcctcccagtcacagaaatggcctcaaaagtttgcacagatggtgcttaatcccagtttggacaatgggagtttgggctttaaatgacaatttctaaccaagagcaaggagagggagggaggcggcgaggggtgggagaggacaaaggatatggggagacagcctgctttagtccacagaggctcaaagcaaatcagcacggtgaaaacsaagttcttaatgtccccacagggacctctacctgcccagtgctttctgctcttggcctctccctgcacatccctgagatggatgccatagttgaggaaagatgctggggtggctgatggcccttccccattccaaaggccacaaccacacgtagcagttcctccagtcccatccggctctgggaaaggataagtctccaacatcccccttccaccctaacagtggagagctgatggtgcaggggactgctgtcaatctatcctccatgaggggcgatgacacagaatgatgttgtggctg

SEQ ID NO: 55098 - DNA, 599 bp, Chicken  19866894308417_1
  misc_feature (1)..(154): n is any nucleotide
nnnnnnnnnnnnnnnnnnnnnnnnnnnnnnnnnnnnnnnnnnnnnnnnnnnnnnnnnnnnnnnnnnnnnnnnnnnnnnnnnnnnnnnnnnnnnnnnnnnnnnnnnnnnnnnnnnnnnnnnnnnnnnnnnnnnnnnnnnnnnnnnnnnnnnnnnngtcagcatgtgcacttaagcagcttccttccacatctcttgctgctcactttcggtcttgctggagctctcctttcccctccacattttctgctctcccaattcttttcctcccactgaagttgttactaaatattattccctgcrtgtattctcttgtatttttccaagctgaagctcattttattgtttcctgctcatattatttcttgcttctctgtaggtccctttatattatttctctgtcctcagtggggtttgcagcatttccctgcatcccacacgcagacagcagcatgcagagtggtaggcgagttgggaagcagcagcacagcttctctgggagatgagcccatttcccaccagaggtgatgccttcctggttttccaagtagtgtttgcaggaaggcaagtgcttggcaagcaaatgtgtggcacacagcttt

SEQ ID NO: 55099 - DNA, 600 bp, Chicken  19866894308417_2
agcagcacagcttctctgggagatgagcccatttcccaccagaggtgatgccttcctggttttccaagtagtgtttgcaggaaggcaagtgcttggcaagcaaatgtgtggcacacagctttctcagagtacgcagctcaggacctcgtttcttcattaggcagccagagagagccctgtgtggggtgtgacgtgtgccacggcattcggagtgcttatttctgctcccaggtggaaagctttggcaaagtatctcattttcttaatagtgctcagtctggatggttatttctgttgccrgtggggcagcgatgctgtcattctatacctggtggtatctgctgctcagcatgaagatgatgtgccttccttttcatggttgacttatcagtagtgcatgaggaaatctgaaagaaaacttaccccaaactctgaagacaacccattgtctgccactgcagggtcctttcatgcactcagtagacttctgatagcaaaagcataaattgaatgtccaagaaagagtggcagtggcatcccttctcctgaacacgataaccctttgctttcagagaggcaaacccttatttgccttttcgg

SEQ ID NO: 55100 - DNA, 600 bp, Chicken  19866894308426_1
gaaaagtaaaataaatgtcctcggtcagattttcccagtgtcagaatggcattttggatacctgatgtgcatttgctttaaccccaggcccggtgctctgcgtgcacagaacccctccacagccagcacaaaatcttgtcttgctttcctgctccctttaactctgtacaatcattagcaatgcaaatgcactctgatctttttctggttttatgcttgttactggtttcttttttgaaccatggctagaggaagactgtttccatgatgaaaatacttacaaggggatccagaacattkagtttctgactcagcttagtcaaatatggttagtgactcctgcatgcctgaataccagaagagaagtagcccccttgagcatagggaaattttagtgtgtttctctgacacctcacaaagagcctatgggttggggatcaacacacgttagacggttaccaatgacatgacaaaaggcagtgagcacaaactggaacacaggatgctccatctgcacaccagcactgtgcaggtgatggagcagaggcacaggctgcccagaggggttgtggagtctcctccttggagatgttcagaagc

SEQ ID NO: 55101 - DNA, 599 bp, Chicken  19866894308429_1
  misc_feature (1)..(7): n is any nucleotide
nnnnnnnataaactatatatacgtttatactcatattttaacacacgcacatacatatatatatatataaaatgtagtttaactgctcctttgaggtatttctttatgcaaatctgtttattgccattttccattctaccagcttacccgcttagtacggagaggctacacatacacaaagccttctctagtaggggactcctccagctcgcagagaactatcttttaggatacaagtttctcaacaggttagatgcatcttgtgttagagcatggaggtagggcatggaggtaggctgwrsgaagcagtcgctgcacccagtacagatagaaataggcatgtaggaatgggaatgctgcaaatgagcttccatgagtggagggaaaaaaaataaagcaagtgaaaagacagagccagtacactaaatgcagctgttctggctaggaacttggtcagactcggtcaaactcggtcagacatatgggagcaccgaaactcctgccccagaacagggaacctgacattgcaggaacaaagtgcaggtgatggaacacaactgggaagcagaagaaatactactatttgcctccagatggca

SEQ ID NO: 55102 - DNA, 599 bp, Chicken  19866894308429_2
  misc_feature (1)..(6): n is any nucleotide
nnnnnnataaactatatatacgtttatactcatattttaacacacgcacatacatatatatatatataaaatgtagtttaactgctcctttgaggtatttctttatgcaaatctgtttattgccattttccattctaccagcttacccgcttagtacggagaggctacacatacacaaagccttctctagtaggggactcctccagctcgcagagaactatcttttaggatacaagtttctcaacaggttagatgcatcttgtgttagagcatggaggtagggcatggaggtaggctgwrsgaagcagtcgctgcacccagtacagatagaaataggcatgtaggaatgggaatgctgcaaatgagcttccatgagtggagggaaaaaaaataaagcaagtgaaaagacagagccagtacactaaatgcagctgttctggctaggaacttggtcagactcggtcaaactcggtcagacatatgggagcaccgaaactcctgccccagaacagggaacctgacattgcaggaacaaagtgcaggtgatggaacacaactgggaagcagaagaaatactactatttgcctccagatggcat

SEQ ID NO: 55103 - DNA, 599 bp, Chicken  19866894308429_3
  misc_feature (1)..(5): n is any nucleotide
nnnnnataaactatatatacgtttatactcatattttaacacacgcacatacatatatatatatataaaatgtagtttaactgctcctttgaggtatttctttatgcaaatctgtttattgccattttccattctaccagcttacccgcttagtacggagaggctacacatacacaaagccttctctagtaggggactcctccagctcgcagagaactatcttttaggatacaagtttctcaacaggttagatgcatcttgtgttagagcatggaggtagggcatggaggtaggctgwrsgaagcagtcgctgcacccagtacagatagaaataggcatgtaggaatgggaatgctgcaaatgagcttccatgagtggagggaaaaaaaataaagcaagtgaaaagacagagccagtacactaaatgcagctgttctggctaggaacttggtcagactcggtcaaactcggtcagacatatgggagcaccgaaactcctgccccagaacagggaacctgacattgcaggaacaaagtgcaggtgatggaacacaactgggaagcagaagaaatactactatttgcctccagatggcatt

SEQ ID NO: 55104 - DNA, 600 bp, Chicken  19866894308429_4
aggcatgtaggaatgggaatgctgcaaatgagcttccatgagtggagggaaaaaaaataaagcaagtgaaaagacagagccagtacactaaatgcagctgttctggctaggaacttggtcagactcggtcaaactcggtcagacatatgggagcaccgaaactcctgccccagaacagggaacctgacattgcaggaacaaagtgcaggtgatggaacacaactgggaagcagaagaaatactactatttgcctccagatggcattgtgtgctactaaaacgagtgcctgccaacagcasgatggaaatggcacatgaaaacgtggtgacagcacagagaaaaagaagctactgcctgtctgaaggttccaagatggcaggatgggtaagaaggctgcctgagctacggggcaggctgggctgcaaacagcaatctgtattattgcagaagctgtgggagtacagaggatttaattccccggagcaaagctcaactccagccaaagcgatgcttggtatttctgctcagggcagagcgcacatctccttgctgcacagcccatggaacaaagaagacatagagaggcttggcaatgaatt

SEQ ID NO: 55105 - DNA, 600 bp, Chicken  19866894308437_1
atggctctgggctgcagacccggctgttgggtaaatgtgaagtaaggggctcctcctaccttttccagaaaggctgcaattctcatccagatttatttgcctctgccccatctctgcttgttaaaaagacaagtaaattgagttgttctgtgtgacagccttgggagagatgtacctgttggtttacagtcctcagactcttggaaatcccttacttgtccagatttaagcacaggtctgcagaaataaggctgctcgcagaagctttggatttgctcatcttgttttgctgcagttgcrcagtctttgtttttttaggcagaaaaccagagagaaactcagtttgtaatatttctttggcatttcctctgcaacagttaatttatcgtgtgtttatgcagtgttatatattccaggtaatttatataattacagtgccattaaacttgtctagttagaatcaacaaaatcagactgtgaaattcaagtgtgcagtagtggttgcccagttattttatatcctgtaccagattcctctgtgtgatccttcagttctcttttttgtgcatgagcctttgacaccagaatgagttgcattgg

SEQ ID NO: 55106 - DNA, 600 bp, Chicken  19866894308437_2
atccttcagttctcttttttgtgcatgagcctttgacaccagaatgagttgcattgggatttaatcatccctaaatgactaaatgggaaaaatatttcactggaatgacatacatgtaaaacatgacttatttagtgatgttattagagtatttaatattttcatttcctgacctctgggaattcgactatgcggccataatgctgaactccaaaggaataaaggaatggtttccctgtggtaatttactgagctccttaccacagggtgttactgagggccaaacattcaacgatgccygagagagtgccaataagtaaacagccaatagggatagttaaggcaaaaagccaccccaaaaaaaaccctgactctttgaaattaacaatgttgaaagggctggggatttgtacttcaggatataaattgatattcagaagttttctctgaagcatcttagcacactgactgtctctgctccatccagtgaactgtcctggtccagcctggggaacacggtctgacgttgggtagtgcagggcagaacctctggtcttggggcaaatgtcattcctggatgggagatgtgcatgggaagct

SEQ ID NO: 55107 - DNA, 600 bp, Chicken  19866894308450_1
ctttgtttttctgcagcatcagagaagcattcctagtagctctccaggtttttagtgttagaaggattggtcttccttggcataggttgttatgctctccgtgtggtattgtgacaaaatttcctttccagtagatgctggtttgaaagcattaaacttaacactttgagaaacaagtttcactaggcaaaaccaatgagaaagcactttatccactgactcacttaaactgacttacatttgcttttgttcatttttttttgatgtctagcttcaaatttgcatgtatattttaaaatyttgatgttgttcactcttactgttacaccaaggtccttaattgtcctaccaaaaacaatcattcttcttcactgaggatattatgtgctgcaaagaaaataagtgagargagctcacaaaaaattctatacagttrttatttttattttttaagagtgatgcagtactagtgctgtgagagtcacaggaaagtaaacaacgtcttgaatattagaaatagttaaaagtctgtatgcagatgtataaaatgagctttcacatctatcttctgtgctgtaaaataccacagatacagacgta

SEQ ID NO: 55108 - DNA, 600 bp, Chicken  19866894308450_2
tgtgacaaaatttcctttccagtagatgctggtttgaaagcattaaacttaacactttgagaaacaagtttcactaggcaaaaccaatgagaaagcactttatccactgactcacttaaactgacttacatttgcttttgttcatttttttttgatgtctagcttcaaatttgcatgtatattttaaaatyttgatgttgttcactcttactgttacaccaaggtccttaattgtcctaccaaaaacaatcattcttcttcactgaggatattatgtgctgcaaagaaaataagtgagargagctcacaaaaaattctatacagttrttatttttattttttaagagtgatgcagtactagtgctgtgagagtcacaggaaagtaaacaacgtcttgaatattagaaatagttaaaagtctgtatgcagatgtataaaatgagctttcacatctatcttctgtgctgtaaaataccacagatacagacgtaaagcagatattttcatatatcatcaaagggcatgaggagtttctttcaagagattatgacagtgtcatgaaaagattataacacattaaagtgggacttaaataggcca

SEQ ID NO: 55109 - DNA, 600 bp, Chicken  19866894308450_3
gctggtttgaaagcattaaacttaacactttgagaaacaagtttcactaggcaaaaccaatgagaaagcactttatccactgactcacttaaactgacttacatttgcttttgttcatttttttttgatgtctagcttcaaatttgcatgtatattttaaaatyttgatgttgttcactcttactgttacaccaaggtccttaattgtcctaccaaaaacaatcattcttcttcactgaggatattatgtgctgcaaagaaaataagtgagargagctcacaaaaaattctatacagttrttatttttattttttaagagtgatgcagtactagtgctgtgagagtcacaggaaagtaaacaacgtcttgaatattagaaatagttaaaagtctgtatgcagatgtataaaatgagctttcacatctatcttctgtgctgtaaaataccacagatacagacgtaaagcagatattttcatatatcatcaaagggcatgaggagtttctttcaagagattatgacagtgtcatgaaaagattataacacattaaagtgggacttaaataggccagagatttctgtctgtacaaaagatgtg

SEQ ID NO: 55110 - DNA, 600 bp, Chicken  19866894308459_1
tttcaacagacaaacaattgtaaagacccatctgatatactctggtaaaggcagttgccccagatgagcaataatgcacgagactactgtggaagactgtggaagaaaccctgaccacatttcttcatagatgaagaattaatcctttagtaattgtgcttcttcagtctccagcgatcctcttggaacaggcttctgcagctctataagttgtttcatttaggaattcactccataaagatctcatgtatttcaaaataaaatcaagatgcacttcaaagggaaatacacaatactatyaaaaattgccagatactaccatgaaatcacatgggcaagatttcactctgtcaatcagcagttcttaatcatcaatacagaaacatttttcaaatcmggcccatatgacttaagyccctggcaaaagttgccttacagcatgcataagaacaccacttctggaagacttatcttttctcctcctccttcccaaaagggtacccaatataaaaaaaactgtcaatgcctaaacaaaaatatatggagtaatgggtgaacttaagaatgatctcctcaaaatcatggaataatagagtaaaa

SEQ ID NO: 55111 - DNA, 600 bp, Chicken  19866894308459_2
tgtggaagaaaccctgaccacatttcttcatagatgaagaattaatcctttagtaattgtgcttcttcagtctccagcgatcctcttggaacaggcttctgcagctctataagttgtttcatttaggaattcactccataaagatctcatgtatttcaaaataaaatcaagatgcacttcaaagggaaatacacaatactatyaaaaattgccagatactaccatgaaatcacatgggcaagatttcactctgtcaatcagcagttcttaatcatcaatacagaaacatttttcaaatcmggcccatatgacttaagyccctggcaaaagttgccttacagcatgcataagaacaccacttctggaagacttatcttttctcctcctccttcccaaaagggtacccaatataaaaaaaactgtcaatgcctaaacaaaaatatatggagtaatgggtgaacttaagaatgatctcctcaaaatcatggaataatagagtaaaaactgttaacttaccatcaacagaaagattaataagttggatttcagttctatgaaaaacaaaacacacacctcaacttctgaggttctttattactt

SEQ ID NO: 55112 - DNA, 600 bp, Chicken  19866894308459_3
cacatttcttcatagatgaagaattaatcctttagtaattgtgcttcttcagtctccagcgatcctcttggaacaggcttctgcagctctataagttgtttcatttaggaattcactccataaagatctcatgtatttcaaaataaaatcaagatgcacttcaaagggaaatacacaatactatyaaaaattgccagatactaccatgaaatcacatgggcaagatttcactctgtcaatcagcagttcttaatcatcaatacagaaacatttttcaaatcmggcccatatgacttaagyccctggcaaaagttgccttacagcatgcataagaacaccacttctggaagacttatcttttctcctcctccttcccaaaagggtacccaatataaaaaaaactgtcaatgcctaaacaaaaatatatggagtaatgggtgaacttaagaatgatctcctcaaaatcatggaataatagagtaaaaactgttaacttaccatcaacagaaagattaataagttggatttcagttctatgaaaaacaaaacacacacctcaacttctgaggttctttattactttgtcaaagacattttaat

SEQ ID NO: 55113 - DNA, 600 bp, Chicken  19866894308459_4
tctcctcctccttcccaaaagggtacccaatataaaaaaaactgtcaatgcctaaacaaaaatatatggagtaatgggtgaacttaagaatgatctcctcaaaatcatggaataatagagtaaaaactgttaacttaccatcaacagaaagattaataagttggatttcagttctatgaaaaacaaaacacacacctcaacttctgaggttctttattactttgtcaaagacattttaatagaattattcttgtattctgatctagtatcctatcacagccaaaaacctcccttttaagraaagccccttattttgtaccaatttggactgccaactggcttcaatttttccatttaatgaatgctctgcagttctaagatgagttacgctcttctgttcacatacaataaaacagtctaatagatgtaaactatttattgaatatttgccaccaatatcgttaaatacatcatcttcgcagttttctgctttcaagttaaaatgtcagaaacagaacaccaaatatttacaattcttataaggaatgttacataatgacacattaaggcgtaaattcttttggcttataattctgaaaa

SEQ ID NO: 55114 - DNA, 600 bp, Chicken  19866894308462_1
cagctgctgtgtgactcctcgcgtgctgcctttcacatgcgctgtcctatgggagccgcgctgagcgtccatcgcctgcagctatcgcctcttaacagaaagcagcagtttagaatcgcggaatcattaaggctggaaaaggcctctcggatccccagctccaacctcaaccccgccgtgcccacggccctcagtgccgcatccccacggctccgggacgccccggggcggtcacacgccgctccccgtgcagctgtgccaccgcccgaccgctcctcgggagaagcaatcgctcctaasgcccaacctgagctcggcgtggggccgccgcgtctcgctgttacctggagcgggggataccgcaccgatacggccgcggagcggttgtacccccgcagaagctgctcgtgcgcccgttgagctgcgcgctgcccggccggggtcggagctccgtggcgccggggcggtgacggtgttcgccccgccctcacagcgcccggaacccgttggcccggcggaggtttcccgccggagcaccgccagcagcggaccggaggcggaagtgtgggcggcgggtagggacggtgcggcggggcgggc

SEQ ID NO: 55115 - DNA, 600 bp, Chicken  19866894308470_1
gctgttccccagccacaacgcagtgcaatcaatactgcaccctgcatgtaaaattaaacaaccaacttccaatttgtggcctctagatccataaggagctcatggagtgaatctgagtcgaccaagagtttaatttaaaaaaaaaaaaaaaaaaaaaagctgtcatactctacatatggctgggcgacaggtttcttttcttaccaaaaattgctagaaactgtaatgctctacggtagcaggctaaggagagtggcaagcaccaaaatcccaaggggctgacctctggtctcataaaaycaacccaagtgccctcgagggctctctcaatctttttgccacacacgtagctccacagcttgaggagtttgtccagcagccccttraaatgtctccccagaacttttaatttcaacatatgtgaattttccaacaccaaacacttccccattacctgtaataaacacatgcatgcagtttgtagtagttcaatccttagagtttttttaagcttggaaataacaactcaactgaaaaattgaagaaagcctcagtgcagagggagactacaaacagaatggtcgtgtgaaaataaatgca

SEQ ID NO: 55116 - DNA, 600 bp, Chicken  19866894308470_2
atccataaggagctcatggagtgaatctgagtcgaccaagagtttaatttaaaaaaaaaaaaaaaaaaaaaagctgtcatactctacatatggctgggcgacaggtttcttttcttaccaaaaattgctagaaactgtaatgctctacggtagcaggctaaggagagtggcaagcaccaaaatcccaaggggctgacctctggtctcataaaaycaacccaagtgccctcgagggctctctcaatctttttgccacacacgtagctccacagcttgaggagtttgtccagcagccccttraaatgtctccccagaacttttaatttcaacatatgtgaattttccaacaccaaacacttccccattacctgtaataaacacatgcatgcagtttgtagtagttcaatccttagagtttttttaagcttggaaataacaactcaactgaaaaattgaagaaagcctcagtgcagagggagactacaaacagaatggtcgtgtgaaaataaatgcatattcctttttaaaattaaagtctgatttcaaatgtaagcaattgttttgttataacaacacttaagtagctataattacactttg

SEQ ID NO: 55117 - DNA, 600 bp, Chicken  19866894308474_1
tagttctgagcccacctcctgcactctgctgtcactcagcccacctggcagcctcctcctggggctttgaccattgcccacggcctcaggactccttcagcctcagcctcttgccctcagcctccagccttcagcctcagccgcctgcccacagcctcaggcccccttcagcctcagcctccagccctcagcctcctgccctcagcctcaggacccctccagcctcagcctcagcctcccttcccgcagagccctcagcaggagcagggctgcagcagcctccttcgactacctgagctytgggagtggctctagagggagcacctgagcccagctcttgcatccatgcatgcatttattctcctggtgatatctgttcacgtttttacaggcagtgatgaggaggtagtcatgcagtcaccgttgggagaggatttttggataactcagaaactagagaagtaacaagtgtggttgtgaacaggtagactacatggatataaattgctcgagaaggagaacatccttcagaaactgttgagcaattcaaagggctcaaaaaagagatcattttggaatataaaaattgaattacacaaa

SEQ ID NO: 55118 - DNA, 599 bp, Chicken  19866894308484_1
  misc_feature (1)..(254): n is any nucleotide
nnnnnnnnnnnnnnnnnnnnnnnnnnnnnnnnnnnnnnnnnnnnnnnnnnnnnnnnnnnnnnnnnnnnnnnnnnnnnnnnnnnnnnnnnnnnnnnnnnnnnnnnnnnnnnnnnnnnnnnnnnnnnnnnnnnnnnnnnnnnnnnnnnnnnnnnnnnnnnnnnnnnnnnnnnnnnnnnnnnnnnnnnnnnnnnnnnnnnnnnnnnnnnnnnnnnnnnnnnnnnnnnnnnnnnnnnnnnnnnnnnnnnnnnnnnnnncatcgcccggccctgtcctgcatgaaaccactgctggtgtgggaayggggcgcgtcgytgcgttgctgggaagttgcctcgttaactgatctgtctgttttaccttctgcacaacaagtggttggatagctggccataaatcccggggagtgcgtgagttcacggggcagctgggctgtcctgttggtgtgcagccctctgcccccaccccgtgctgccaccgccgagctcggagcgctggcccttatataacagatgggagcgagcgtttggtgtttgccagtgcgtctgaaagagaattgctgtgaattagggcaggaggcctccgtggggatggcggggaga

SEQ ID NO: 55119 - DNA, 599 bp, Chicken  19866894308484_2
  misc_feature (1)..(242): n is any nucleotide
nnnnnnnnnnnnnnnnnnnnnnnnnnnnnnnnnnnnnnnnnnnnnnnnnnnnnnnnnnnnnnnnnnnnnnnnnnnnnnnnnnnnnnnnnnnnnnnnnnnnnnnnnnnnnnnnnnnnnnnnnnnnnnnnnnnnnnnnnnnnnnnnnnnnnnnnnnnnnnnnnnnnnnnnnnnnnnnnnnnnnnnnnnnnnnnnnnnnnnnnnnnnnnnnnnnnnnnnnnnnnnnnnnnnnnnnnnnnnnnnnncatcgcccggccctgtcctgcatgaaaccactgctggtgtgggaayggggcgcgtcgytgcgttgctgggaagttgcctcgttaactgatctgtctgttttaccttctgcacaacaagtggttggatagctggccataaatcccggggagtgcgtgagttcacggggcagctgggctgtcctgttggtgtgcagccctctgcccccaccccgtgctgccaccgccgagctcggagcgctggcccttatataacagatgggagcgagcgtttggtgtttgccagtgcgtctgaaagagaattgctgtgaattagggcaggaggcctccgtggggatggcggggagaggcctttgctgt

SEQ ID NO: 55120 - DNA, 599 bp, Chicken  19866894308485_1
  misc_feature (1)..(152): n is any nucleotide
nnnnnnnnnnnnnnnnnnnnnnnnnnnnnnnnnnnnnnnnnnnnnnnnnnnnnnnnnnnnnnnnnnnnnnnnnnnnnnnnnnnnnnnnnnnnnnnnnnnnnnnnnnnnnnnnnnnnnnnnnnnnnnnnnnnnnnnnnnnnnnnnnnnnnnnnctgttggctttattcatcacattttttttccaagccagataaatcacagaagttaaatcacgtagaagaatgtaatgtgtctactcacagtaggattgaaaactaagaataaagcttttaaataaaacacgcaaaaaaaaaaaaaaamccctcaacaacaacaacaaaaatcaatcctgcaaagtttaaatattgcacgccttaatagattgtaaaggatttgaaaagaccatttatttatgacttatgttcactgttgctattaaatacatgtgatcccagtaactctggattggtgagaccctctcatgtctgtgcacagaaataaaatgcttgagttggagacagatttctactgatgtccttgaggttgttttatgccaattcagagctttgtgtccagtgcttatcatatctacctgaatctgtgtctctgcaatgctttac

SEQ ID NO: 55121 - DNA, 599 bp, Chicken  19866894308486_1
  misc_feature (1)..(173): n is any nucleotide
nnnnnnnnnnnnnnnnnnnnnnnnnnnnnnnnnnnnnnnnnnnnnnnnnnnnnnnnnnnnnnnnnnnnnnnnnnnnnnnnnnnnnnnnnnnnnnnnnnnnnnnnnnnnnnnnnnnnnnnnnnnnnnnnnnnnnnnnnnnnnnnnnnnnnnnnnnnnnnnnnnnnnnnnnnnnncattaaagtgagtctgcattaaagtgaagactgcacccagatatatgtaaaagcaactacgttttgcaaaactccagctttgataagaagccttctgaacttgcatgtttttttaagacagtgctgktgtatatatgtgggtttacgttrgaattggggttgaatgtctaaactcaacaagagacttcatttcaggccatcagtttcccttgaagctcatgcagaggctgctcatctctgctgcgatgggtgtgcagagagctaaatcccacagaaagmgttggagaggacaggacatgttcagcttaattcacaaaatcaagccttggttggcatctggtaaaacagcaacgcatgagcaatacccaaatgcccgaacagcaaaatgcttatctagagtgatatttcacttgtttaaacrttgat

SEQ ID NO: 55122 - DNA, 599 bp, Chicken  19866894308486_2
  misc_feature (1)..(150): n is any nucleotide
nnnnnnnnnnnnnnnnnnnnnnnnnnnnnnnnnnnnnnnnnnnnnnnnnnnnnnnnnnnnnnnnnnnnnnnnnnnnnnnnnnnnnnnnnnnnnnnnnnnnnnnnnnnnnnnnnnnnnnnnnnnnnnnnnnnnnnnnnnnnnnnnnnnnnncattaaagtgagtctgcattaaagtgaagactgcacccagatatatgtaaaagcaactacgttttgcaaaactccagctttgataagaagccttctgaacttgcatgtttttttaagacagtgctgktgtatatatgtgggtttacgttrgaattggggttgaatgtctaaactcaacaagagacttcatttcaggccatcagtttcccttgaagctcatgcagaggctgctcatctctgctgcgatgggtgtgcagagagctaaatcccacagaaagmgttggagaggacaggacatgttcagcttaattcacaaaatcaagccttggttggcatctggtaaaacagcaacgcatgagcaatacccaaatgcccgaacagcaaaatgcttatctagagtgatatttcacttgtttaaacrttgatgactcatgccattttaggtgcct

SEQ ID NO: 55123 - DNA, 599 bp, Chicken  19866894308486_3
  misc_feature (1)..(21): n is any nucleotide
nnnnnnnnnnnnnnnnnnnnncattaaagtgagtctgcattaaagtgaagactgcacccagatatatgtaaaagcaactacgttttgcaaaactccagctttgataagaagccttctgaacttgcatgtttttttaagacagtgctgktgtatatatgtgggtttacgttrgaattggggttgaatgtctaaactcaacaagagacttcatttcaggccatcagtttcccttgaagctcatgcagaggctgctcatctctgctgcgatgggtgtgcagagagctaaatcccacagaaagmgttggagaggacaggacatgttcagcttaattcacaaaatcaagccttggttggcatctggtaaaacagcaacgcatgagcaatacccaaatgcccgaacagcaaaatgcttatctagagtgatatttcacttgtttaaacrttgatgactcatgccattttaggtgccttaggaaatttcatctcaactccatctgccactcccctaccaccagaggtatgaaatgatattaacctgagagaacgaagaygctgcgtttaagagaaaccccaaattttatgttgaacagtgtggggaa

SEQ ID NO: 55124 - DNA, 600 bp, Chicken  19866894308486_4
tgctgktgtatatatgtgggtttacgttrgaattggggttgaatgtctaaactcaacaagagacttcatttcaggccatcagtttcccttgaagctcatgcagaggctgctcatctctgctgcgatgggtgtgcagagagctaaatcccacagaaagmgttggagaggacaggacatgttcagcttaattcacaaaatcaagccttggttggcatctggtaaaacagcaacgcatgagcaatacccaaatgcccgaacagcaaaatgcttatctagagtgatatttcacttgtttaaacrttgatgactcatgccattttaggtgccttaggaaatttcatctcaactccatctgccactcccctaccaccagaggtatgaaatgatattaacctgagagaacgaagaygctgcgtttaagagaaaccccaaattttatgttgaacagtgtggggaaaaaaaagtcttcctttgaagaaatccagtgtacttggcagccagggcttagcctgaatttttgatatcctacctgtttttatgagacattactctttatgttgtatttgccgtagactcgttttattttctactggatgatca

SEQ ID NO: 55125 - DNA, 600 bp, Chicken  19866894308486_5
ctcatctctgctgcgatgggtgtgcagagagctaaatcccacagaaagmgttggagaggacaggacatgttcagcttaattcacaaaatcaagccttggttggcatctggtaaaacagcaacgcatgagcaatacccaaatgcccgaacagcaaaatgcttatctagagtgatatttcacttgtttaaacrttgatgactcatgccattttaggtgccttaggaaatttcatctcaactccatctgccactcccctaccaccagaggtatgaaatgatattaacctgagagaacgaagaygctgcgtttaagagaaaccccaaattttatgttgaacagtgtggggaaaaaaaagtcttcctttgaagaaatccagtgtacttggcagccagggcttagcctgaatttttgatatcctacctgtttttatgagacattactctttatgttgtatttgccgtagactcgttttattttctactggatgatcatttgtgctaaggaagatcccacaaagaaggcttggtgtttgctgtgcaaactaccttcagggcttatctttgagtttcatgatgctttcatttgctaataaaggtggtg

SEQ ID NO: 55126 - DNA, 600 bp, Chicken  19866894308488_1
tagtagagtttgagcatcaaagggcaaaaaagagacttaaacacatttgttttattgattactgttgaccataactgcaaacccattaacaacttggttacaggagaaggggccttggctttctccttgtgttgaaaagaaaaaacaattcacacacaagtaaggcagttacagaaacaaactagtcttccagaaatttaatttactgagtttagcaagggcaaattggccctctatatgtgtacatatgtttaaagtagtcccattttttaaatataaatatatcaaattatcatatcyttcaaaagggagcagctaacctgaaatccttgcacttcataaggcagtaatattcaatttctctgtataaaattaaattgttgaaatctaatccacacaatcaactaatactatttttttaatgataaaaagttacttaatacaaaaagggcttgtacattaacacattaaaagttgtattaaacttttttgttgttggtttatttggttttttttttttttttttttttttttttatacaggaagaaactatgaataatccatgctactgtcaaatattctggactattttcctcaatg

SEQ ID NO: 55127 - DNA, 600 bp, Chicken  19866894308490_1
ctggtggaggccacaatgagcagatttagcacaaggggggctgctcagtgcatgtgctcaggcactggccatgttccttgggccctcctaggctgcaggttctcgtggtcactgcatgctgaggataacctcacagatatggtgggatcacagcctgaagcagggaatgaggattttttgttgtttgctttcctaaagccttgtcttttgccatctattctagtctgtagtaaaatcctgaccaaactctttttctttcttccctgatagttcaccttcattttgcgcgttaatgtggarcagtgcaactttggagagagatggtaaagtggtaaatgcattggtaaagtgccatgtgcattcaagatgaatttgctttactagtgacagagggagaggcctgtttgtatgtcctagctagtgaccaatagctagctctctgctgtgcccttgtgtggccccacctggaatactgagtccagacctgggccccccagtacaagaaagatatggagccattagagtgggtccagaggaggccatgaagatgctcagggggctggagcacctctcctaggaagaaaggccgagagagctggg

SEQ ID NO: 55128 - DNA, 599 bp, Chicken  19866894308494_1
  misc_feature (1)..(209): n is any nucleotide
nnnnnnnnnnnnnnnnnnnnnnnnnnnnnnnnnnnnnnnnnnnnnnnnnnnnnnnnnnnnnnnnnnnnnnnnnnnnnnnnnnnnnnnnnnnnnnnnnnnnnnnnnnnnnnnnnnnnnnnnnnnnnnnnnnnnnnnnnnnnnnnnnnnnnnnnnnnnnnnnnnnnnnnnnnnnnnnnnnnnnnnnnnnnnnnnnnnnnnnnnnnnnnnnnacagcgtagcaacaagtcctgcaaatctcttattgatctaaggagagctcaccacaaagctgcaacatccagtcccagccccattcactcrtttttcaattctctaggctgtttctgagcaagarcacccactgcaattcatatggtgtttgaagtcrcatcactgctgggcttaccgtgtgctgcagtgtcctgctggctccagctgctctcctccagctgagccatgtccscatycagtmcctgctggggggacaccgcctgccaccatttgcagccactcagagtgtccctgaccccaacccaggctggtgtcggactgcccacacgagtactgtttgggatgtgctgctggagcraggcagccctccagacagccccaccgaacgc

SEQ ID NO: 55129 - DNA, 599 bp, Chicken  19866894308494_2
  misc_feature (1)..(175): n is any nucleotide
nnnnnnnnnnnnnnnnnnnnnnnnnnnnnnnnnnnnnnnnnnnnnnnnnnnnnnnnnnnnnnnnnnnnnnnnnnnnnnnnnnnnnnnnnnnnnnnnnnnnnnnnnnnnnnnnnnnnnnnnnnnnnnnnnnnnnnnnnnnnnnnnnnnnnnnnnnnnnnnnnnnnnnnnnnnnnnnacagcgtagcaacaagtcctgcaaatctcttattgatctaaggagagctcaccacaaagctgcaacatccagtcccagccccattcactcrtttttcaattctctaggctgtttctgagcaagarcacccactgcaattcatatggtgtttgaagtcrcatcactgctgggcttaccgtgtgctgcagtgtcctgctggctccagctgctctcctccagctgagccatgtccscatycagtmcctgctggggggacaccgcctgccaccatttgcagccactcagagtgtccctgaccccaacccaggctggtgtcggactgcccacacgagtactgtttgggatgtgctgctggagcraggcagccctccagacagccccaccgaacgctcgattcaggtaaaatcaatgggataattagccc

SEQ ID NO: 55130 - DNA, 599 bp, Chicken  19866894308494_3
  misc_feature (1)..(142): n is any nucleotide
nnnnnnnnnnnnnnnnnnnnnnnnnnnnnnnnnnnnnnnnnnnnnnnnnnnnnnnnnnnnnnnnnnnnnnnnnnnnnnnnnnnnnnnnnnnnnnnnnnnnnnnnnnnnnnnnnnnnnnnnnnnnnnnnnnnnnnnnnnnnnnacagcgtagcaacaagtcctgcaaatctcttattgatctaaggagagctcaccacaaagctgcaacatccagtcccagccccattcactcrtttttcaattctctaggctgtttctgagcaagarcacccactgcaattcatatggtgtttgaagtcrcatcactgctgggcttaccgtgtgctgcagtgtcctgctggctccagctgctctcctccagctgagccatgtccscatycagtmcctgctggggggacaccgcctgccaccatttgcagccactcagagtgtccctgaccccaacccaggctggtgtcggactgcccacacgagtactgtttgggatgtgctgctggagcraggcagccctccagacagccccaccgaacgctcgattcaggtaaaatcaatgggataattagcccacagagtctgcccaaaggtcaggaagcagcgat

SEQ ID NO: 55131 - DNA, 599 bp, Chicken  19866894308494_4
  misc_feature (1)..(67): n is any nucleotide
nnnnnnnnnnnnnnnnnnnnnnnnnnnnnnnnnnnnnnnnnnnnnnnnnnnnnnnnnnnnnnnnnnnacagcgtagcaacaagtcctgcaaatctcttattgatctaaggagagctcaccacaaagctgcaacatccagtcccagccccattcactcrtttttcaattctctaggctgtttctgagcaagarcacccactgcaattcatatggtgtttgaagtcrcatcactgctgggcttaccgtgtgctgcagtgtcctgctggctccagctgctctcctccagctgagccatgtccscatycagtmcctgctggggggacaccgcctgccaccatttgcagccactcagagtgtccctgaccccaacccaggctggtgtcggactgcccacacgagtactgtttgggatgtgctgctggagcraggcagccctccagacagccccaccgaacgctcgattcaggtaaaatcaatgggataattagcccacagagtctgcccaaaggtcaggaagcagcgatttttttcttgtagcagctttggtcctgagctcttgcttcagcacgaggattgcaagcaaaggcacttcagcaggt

SEQ ID NO: 55132 - DNA, 599 bp, Chicken  19866894308494_5
  misc_feature (1)..(63): n is any nucleotide
nnnnnnnnnnnnnnnnnnnnnnnnnnnnnnnnnnnnnnnnnnnnnnnnnnnnnnnnnnnnnnnacagcgtagcaacaagtcctgcaaatctcttattgatctaaggagagctcaccacaaagctgcaacatccagtcccagccccattcactcrtttttcaattctctaggctgtttctgagcaagarcacccactgcaattcatatggtgtttgaagtcrcatcactgctgggcttaccgtgtgctgcagtgtcctgctggctccagctgctctcctccagctgagccatgtccscatycagtmcctgctggggggacaccgcctgccaccatttgcagccactcagagtgtccctgaccccaacccaggctggtgtcggactgcccacacgagtactgtttgggatgtgctgctggagcraggcagccctccagacagccccaccgaacgctcgattcaggtaaaatcaatgggataattagcccacagagtctgcccaaaggtcaggaagcagcgatttttttcttgtagcagctttggtcctgagctcttgcttcagcacgaggattgcaagcaaaggcacttcagcaggtaggt

SEQ ID NO: 55133 - DNA, 599 bp, Chicken  19866894308494_6
  misc_feature (1)..(58): n is any nucleotide
nnnnnnnnnnnnnnnnnnnnnnnnnnnnnnnnnnnnnnnnnnnnnnnnnnnnnnnnnnacagcgtagcaacaagtcctgcaaatctcttattgatctaaggagagctcaccacaaagctgcaacatccagtcccagccccattcactcrtttttcaattctctaggctgtttctgagcaagarcacccactgcaattcatatggtgtttgaagtcrcatcactgctgggcttaccgtgtgctgcagtgtcctgctggctccagctgctctcctccagctgagccatgtccscatycagtmcctgctggggggacaccgcctgccaccatttgcagccactcagagtgtccctgaccccaacccaggctggtgtcggactgcccacacgagtactgtttgggatgtgctgctggagcraggcagccctccagacagccccaccgaacgctcgattcaggtaaaatcaatgggataattagcccacagagtctgcccaaaggtcaggaagcagcgatttttttcttgtagcagctttggtcctgagctcttgcttcagcacgaggattgcaagcaaaggcacttcagcaggtaggttataa

SEQ ID NO: 55134 - DNA, 600 bp, Chicken  19866894308494_7
ctgcaacatccagtcccagccccattcactcrtttttcaattctctaggctgtttctgagcaagarcacccactgcaattcatatggtgtttgaagtcrcatcactgctgggcttaccgtgtgctgcagtgtcctgctggctccagctgctctcctccagctgagccatgtccscatycagtmcctgctggggggacaccgcctgccaccatttgcagccactcagagtgtccctgaccccaacccaggctggtgtcggactgcccacacgagtactgtttgggatgtgctgctggagcraggcagccctccagacagccccaccgaacgctcgattcaggtaaaatcaatgggataattagcccacagagtctgcccaaaggtcaggaagcagcgatttttttcttgtagcagctttggtcctgagctcttgcttcagcacgaggattgcaagcaaaggcacttcagcaggtaggttataaaagtgttatgactgctggtattaagctgacagactaatgtgacaagtgcttaacaaggtctcctaaaatagagaggtaaatgctttgcagcgccagttgctcggacaactctgacacg

SEQ ID NO: 55135 - DNA, 600 bp, Chicken  19866894308498_1
cgtctatgcagtacaactttggctccaggcagtgaaattgcagaatctccccgcagcactgattaagaacatggaaaaatagttttgtcaaactgagggaaaggaactgtgttgtccagagttactgaaggtctgctcacacccactgctcaaaaaacttgatcatgactaaagggctgtatcatgaattatatactaatgtaatgtagcaatagcaaagaagtcttatccttgagtctcctcactccagacctgtgtctgcagcagaatctatgcattgctttttccttcctcagaagygaagtagagcacagttgagtttcaaacctctaacagcagtgagtttactcttatatcygttccctttaattccttccaagttggtattatgaaactaccactcaaactgtcccrwctcactgctgcatctcaggtggaagaaaagaaagtaagaactggacagcaaagaatgcctctgagtcacagtacctcctcatatgcagctgaaataattgtgcaattgagaccacctgcatggaagataaggttgctttgtaccctccgctactctaaagacatttgctacaatggcagagtttt

SEQ ID NO: 55136 - DNA, 600 bp, Chicken  19866894308498_2
ctgattaagaacatggaaaaatagttttgtcaaactgagggaaaggaactgtgttgtccagagttactgaaggtctgctcacacccactgctcaaaaaacttgatcatgactaaagggctgtatcatgaattatatactaatgtaatgtagcaatagcaaagaagtcttatccttgagtctcctcactccagacctgtgtctgcagcagaatctatgcattgctttttccttcctcagaagygaagtagagcacagttgagtttcaaacctctaacagcagtgagtttactcttatatcygttccctttaattccttccaagttggtattatgaaactaccactcaaactgtcccrwctcactgctgcatctcaggtggaagaaaagaaagtaagaactggacagcaaagaatgcctctgagtcacagtacctcctcatatgcagctgaaataattgtgcaattgagaccacctgcatggaagataaggttgctttgtaccctccgctactctaaagacatttgctacaatggcagagttttatatgcaaaaaaattatttcaaaaatgaaacctatgactgtttccacctcattttaga

SEQ ID NO: 55137 - DNA, 600 bp, Chicken  19866894308498_3
tccagagttactgaaggtctgctcacacccactgctcaaaaaacttgatcatgactaaagggctgtatcatgaattatatactaatgtaatgtagcaatagcaaagaagtcttatccttgagtctcctcactccagacctgtgtctgcagcagaatctatgcattgctttttccttcctcagaagygaagtagagcacagttgagtttcaaacctctaacagcagtgagtttactcttatatcygttccctttaattccttccaagttggtattatgaaactaccactcaaactgtcccrwctcactgctgcatctcaggtggaagaaaagaaagtaagaactggacagcaaagaatgcctctgagtcacagtacctcctcatatgcagctgaaataattgtgcaattgagaccacctgcatggaagataaggttgctttgtaccctccgctactctaaagacatttgctacaatggcagagttttatatgcaaaaaaattatttcaaaaatgaaacctatgactgtttccacctcattttagagcaagtagaaatggcaatacaacagttaactatgtggattccaagttttagagatc

SEQ ID NO: 55138 - DNA, 600 bp, Chicken  19866894308498_4
ccagagttactgaaggtctgctcacacccactgctcaaaaaacttgatcatgactaaagggctgtatcatgaattatatactaatgtaatgtagcaatagcaaagaagtcttatccttgagtctcctcactccagacctgtgtctgcagcagaatctatgcattgctttttccttcctcagaagygaagtagagcacagttgagtttcaaacctctaacagcagtgagtttactcttatatcygttccctttaattccttccaagttggtattatgaaactaccactcaaactgtcccrwctcactgctgcatctcaggtggaagaaaagaaagtaagaactggacagcaaagaatgcctctgagtcacagtacctcctcatatgcagctgaaataattgtgcaattgagaccacctgcatggaagataaggttgctttgtaccctccgctactctaaagacatttgctacaatggcagagttttatatgcaaaaaaattatttcaaaaatgaaacctatgactgtttccacctcattttagagcaagtagaaatggcaatacaacagttaactatgtggattccaagttttagagatca

SEQ ID NO: 55139 - DNA, 599 bp, Chicken  19866894308501_1
  misc_feature (1)..(217): n is any nucleotide
nnnnnnnnnnnnnnnnnnnnnnnnnnnnnnnnnnnnnnnnnnnnnnnnnnnnnnnnnnnnnnnnnnnnnnnnnnnnnnnnnnnnnnnnnnnnnnnnnnnnnnnnnnnnnnnnnnnnnnnnnnnnnnnnnnnnnnnnnnnnnnnnnnnnnnnnnnnnnnnnnnnnnnnnnnnnnnnnnnnnnnnnnnnnnnnnnnnnnnnnnnnnnnnnnnnnnnnnncaatttggtatattattagtgcttttgcagaaagcctttactttaccattttctcctcctatagctcacctcaagctgccacwgctattacctcattcttttccataaagctccccaggcatggtagagcccagttacagaaacaaatcataggatagcttggtttggaagggaccttaaagatccccttgctgcaggcagagcttctgccccccgaatcagggggcccagtgccccacccaacctggcctggaacacctccagagatggagcatccatagctcctactggcagcctgtgccaaggcctcactgccccctgcataaaaatttcttcctaacgtgtaactcaaaatttcactcctctagcttaaggcaattcc

SEQ ID NO: 55140 - DNA, 600 bp, Chicken  19866894308501_2
gctagagaagctttttcaagtatttccctttaacaacaacatcaaagaactaaggaaaacaaattttgcattaggaagtctgtgtcagaaaacttttcacttcaaacaagacaccaaacataaagctgacaagacgagacatttacacgctaattagcatcaatttctttactgaatgattagtccaagaaaacgttgcatgaatctctggtttaaataatttttcccttgaaaagtatttttcattgtcaaaatgggttcttacattcgtatatatggattgcacatattaaaattgawtttttttaacagattggctcatgtttccacatttataatcaacggctgttaagtaccacataaatcacagtttgcatattcaagatcaaagcggttacatgtgataaraaagactaagtcacatttctatgcaagaaacaacaaaattcttcacaaacactaaacaggcaacaaaaagttatagcctttgttttcttttaactggaatgcccacctgaccagcagacaaatatgctctggattccaaacttgcccaagaaggctccatgacaatggcagaactgcatataagtgcctatt

SEQ ID NO: 55141 - DNA, 600 bp, Chicken  19866894308501_3; identical to SEQ ID NO: 55140

SEQ ID NO: 55142 - DNA, 600 bp, Chicken  19866894308501_4; identical to SEQ ID NO: 55140

SEQ ID NO: 55143 - DNA, 600 bp, Chicken  19866894308501_5; identical to SEQ ID NO: 55140

SEQ ID NO: 55144 - DNA, 600 bp, Chicken  19866894308501_6; identical to SEQ ID NO: 55140

SEQ ID NO: 55145 - DNA, 600 bp, Chicken  19866894308501_7
agacaccaaacataaagctgacaagacgagacatttacacgctaattagcatcaatttctttactgaatgattagtccaagaaaacgttgcatgaatctctggtttaaataatttttcccttgaaaagtatttttcattgtcaaaatgggttcttacattcgtatatatggattgcacatattaaaattgattttttttaacagattggctcatgtttccacatttataatcaacggctgttaagtaccacataaatcacagtttgcatattcaagatcaaagcggttacatgtgataaraaagactaagtcacatttctatgcaagaaacaacaaaattcttcacaaacactaaacaggcaacaaaaagttatagcctttgttttcttttaactggaatgcccacctgaccagcagacaaatatgctctggattccaaacttgcccaagaaggctccatgacaatggcagaactgcatataagtgcctattctttcctgaaacacatcacaaatactcaaatatcccattgctcacacagatgtaaaagttcacaaaagcgttacaggttaatgcacagtcacctcatgtaaattcttt

SEQ ID NO: 55146 - DNA, 599 bp, Chicken  19866894308508_1
  misc_feature (1)..(76): n is any nucleotide
nnnnnnnnnnnnnnnnnnnnnnnnnnnnnnnnnnnnnnnnnnnnnnnnnnnnnnnnnnnnnnnnnnnnnnnnnnnnatataactcataagcttcgattttctgcattatttcatctttatcatagaatcatagaatcacaaggttggaaaggacctatgagatcatctagtccaaccatcctcccattaccattgctaccacaagccactaaaccatatctcttagctcctgatccagacacctcttgaacactgccagggatggcgactctaccacctccctgggtaggccattccagygcctgaccactctgagagtaaaagttttcatttttgaaagctttgatactactaaaagttttttatttaccttgcatgaaacaatgatgttatattttttttaaagaagttttaaaaatatttatattcatatgctactgatactagataggaacttccacgcacgttacataagagctgatagtatttctggggcttacgaaggaagtgcttcttacagccaccagaaatattacagaaatttcactgaatgccaagaaaatacacagaaaggttttaaataaagattaaaaacttga

SEQ ID NO: 55147 - DNA, 419 bp, Chicken  19866894308514_1
tgctcgtgggtgactgtgacagtcattcaataaatggacaaagagaataatataaatcccctgcatctagggaattcctctaattagaagtggcaatgaattacagaagaaatttggatttaatataacatctgcaaatgacagctgtcttctcacagttattttgccattcctttacttaaaatattgcctcccctcacctccaaaaagaaaaaaagattaatgaaaaatctttgcacggcgttttgctttattttatcacactaccattacaaccggccagctggaaagaaaggtgaygggaagaaaatctttgccatgraagtgataatgttccacagcaccaagtttccccagcttatgcagtaacatttctaagtgaagtttgtaacacacatactctgcctttcaagtattga

SEQ ID NO: 55148 - DNA, 397 bp, Chicken  19866894308514_2
tcattcaataaatggacaaagagaataatataaatcccctgcatctagggaattcctctaattagaagtggcaatgaattacagaagaaatttggatttaatataacatctgcaaatgacagctgtcttctcacagttattttgccattcctttacttaaaatattgcctcccctcacctccaaaaagaaaaaaagattaatgaaaaatctttgcacggcgttttgctttattttatcacactaccattacaaccggccagctggaaagaaaggtgaygggaagaaaatctttgccatgraagtgataatgttccacagcaccaagtttccccagcttatgcagtaacatttctaagtgaagtttgtaacacacatactctgcctttcaagtattga

SEQ ID NO: 55149 - DNA, 600 bp, Chicken  19866894308519_1
ggagccaacaaagagaaatgaatgtacagccctccagtttcttcttgggattataagaaatatttaaggataagttgcacctacattaacagcagtgacgtcttagtgaaatacaaggcttttcaaataattagtacttctgtcattttatcttagttacggaattcgtcccgctgcaaccagaacgcgtgggcttctcatgtgcgttctcctcttccagagaggacaaaatgcaatgccgtaatggaaaaaagcccagggtttctgccaagggagactgagaggtagtgctgtaccccyggggagccccgtggctcctgggtgcctggaagctgtatttaattcatgcaccacgagatgtcaggactgcttygtgcaacagcataactgacactgtgagcaggaaaagtgacttcacactgaggcatgagcaggcaggaaagtcattctggcacatgcttggctgtgatttgataatttgttcttcccagaacagcaggagcggtccagctgtacytaaaacaatcacaatcatctgattgtgccttaactttctaaattaattacttaaactgatcaagaaactacacaaaagattgc

SEQ ID NO: 55150 - DNA, 600 bp, Chicken  19866894308519_2
gttgcacctacattaacagcagtgacgtcttagtgaaatacaaggcttttcaaataattagtacttctgtcattttatcttagttacggaattcgtcccgctgcaaccagaacgcgtgggcttctcatgtgcgttctcctcttccagagaggacaaaatgcaatgccgtaatggaaaaaagcccagggtttctgccaagggagactgagaggtagtgctgtaccccyggggagccccgtggctcctgggtgcctggaagctgtatttaattcatgcaccacgagatgtcaggactgcttygtgcaacagcataactgacactgtgagcaggaaaagtgacttcacactgaggcatgagcaggcaggaaagtcattctggcacatgcttggctgtgatttgataatttgttcttcccagaacagcaggagcggtccagctgtacytaaaacaatcacaatcatctgattgtgccttaactttctaaattaattacttaaactgatcaagaaactacacaaaagattgctctagacaagcagtactaaagttgtaatgggaattattttttacattactgaagctcgcagaattttggtcac

SEQ ID NO: 55151 - DNA, 600 bp, Chicken  19866894308519_3
cagagaggacaaaatgcaatgccgtaatggaaaaaagcccagggtttctgccaagggagactgagaggtagtgctgtaccccyggggagccccgtggctcctgggtgcctggaagctgtatttaattcatgcaccacgagatgtcaggactgcttygtgcaacagcataactgacactgtgagcaggaaaagtgacttcacactgaggcatgagcaggcaggaaagtcattctggcacatgcttggctgtgatttgataatttgttcttcccagaacagcaggagcggtccagctgtacytaaaacaatcacaatcatctgattgtgccttaactttctaaattaattacttaaactgatcaagaaactacacaaaagattgctctagacaagcagtactaaagttgtaatgggaattattttttacattactgaagctcgcagaattttggtcacacattacaatcatttgtgggtcctgtcagctacaatggatcacatctttgccaatccatatcacctcctaattgctttgtttctctcctttactatccagggattaccctaagtgaccaaaaaatgtgggacatggtgtctgtc

SEQ ID NO: 55152 - DNA, 599 bp, Chicken  19866894308523_1
  misc_feature (1)..(170): n is any nucleotide
nnnnnnnnnnnnnnnnnnnnnnnnnnnnnnnnnnnnnnnnnnnnnnnnnnnnnnnnnnnnnnnnnnnnnnnnnnnnnnnnnnnnnnnnnnnnnnnnnnnnnnnnnnnnnnnnnnnnnnnnnnnnnnnnnnnnnnnnnnnnnnnnnnnnnnnnnnnnnnnnnnnnnnnnnntgaaagcactcgtgtccctgagttatgcacgagtgcctgtccccgcacagcccccgtccgcccccggtcaggctctgcctcccctcacgaagggagaggaaagaggcatctcagacgtccgtggagttgstgtttgctcgcagagcttggggtgtttctctcacagccatctcakttggctgtaaactgacttttggctgcgggagatggaaggaaacggcagtgcgaagggttttcaggaagcgagcggaaagcggcacctcaccgcttttcctccttcagtaagcagcgaaaggaggatgcgggaaaggacaggtcctagctgcaccccttgccaggatggcgtcctgtggcccttcatcctgcctaagtgccccttctcctgcctccccaccacccgcccttctcgggatgcctgtcagcaagggc

SEQ ID NO: 55153 - DNA, 599 bp, Chicken  19866894308523_2
  misc_feature (1)..(125): n is any nucleotide
nnnnnnnnnnnnnnnnnnnnnnnnnnnnnnnnnnnnnnnnnnnnnnnnnnnnnnnnnnnnnnnnnnnnnnnnnnnnnnnnnnnnnnnnnnnnnnnnnnnnnnnnnnnnnnnnnnnnnnnnnnnnntgaaagcactcgtgtccctgagttatgcacgagtgcctgtccccgcacagcccccgtccgcccccggtcaggctctgcctcccctcacgaagggagaggaaagaggcatctcagacgtccgtggagttgstgtttgctcgcagagcttggggtgtttctctcacagccatctcakttggctgtaaactgacttttggctgcgggagatggaaggaaacggcagtgcgaagggttttcaggaagcgagcggaaagcggcacctcaccgcttttcctccttcagtaagcagcgaaaggaggatgcgggaaaggacaggtcctagctgcaccccttgccaggatggcgtcctgtggcccttcatcctgcctaagtgccccttctcctgcctccccaccacccgcccttctcgggatgcctgtcagcaagggctcgagctggggaaagcagtgttacatctacccagacgctcccagc

SEQ ID NO: 55154 - DNA, 600 bp, Chicken  19866894308523_3
cactgtatcaaaccagtgtatgtaatgtcagagtactttacatggggtttacaagatttaagcatgtctagttataaatgatgctggtattaaaggccagggaccagctgtcctaaatttctaaatagtcagctaagtctgtagatttacagttgtgctccatctgggtgaaccacagcctgcctacaccttttctttaatcataccacccctataaaattaaagcatccagtcttgtggaaacacaggctctcatttagagcataggtatacaaaagcttaaagatgggtgttgctagyagctatcaaaatgacaaagcaaacagcggaggtcatagaatcatagaataccccaagttggaaggaacatcaaatccagctcctggctctacagaaatgtaggttcctctccttgctgtgacacagacagcgtgtgtgacagtttcacctcactgtgcttcaaatcccagtctgtgtaattggggtaatgctgatggagcttcataggaatgcrtgttagtgaatgcagtgaaaaaaatcagatggtgttgaggtgataacaggtacacacgaagcaggacattaaacaggacgttagat

SEQ ID NO: 55155 - DNA, 503 bp, Chicken  19866894308523_4
taaaattaaagcatccagtcttgtggaaacacaggctctcatttagagcataggtatacaaaagcttaaagatgggtgttgctagyagctatcaaaatgacaaagcaaacagcggaggtcatagaatcatagaataccccaagttggaaggaacatcaaatccagctcctggctctacagaaatgtaggttcctctccttgctgtgacacagacagcgtgtgtgacagtttcacctcactgtgcttcaaatcccagtctgtgtaattggggtaatgctgatggagcttcataggaatgcrtgttagtgaatgcagtgaaaaaaatcagatggtgttgaggtgataacaggtacacacgaagcaggacattaaacaggacgttagatgtaggcatgctagtgtcagaatcattttggatccaaattgcaatatgagaaaccccatgcaaaaagctccttaggtattcgggctgtcagcttcatgtactagggctgaggttgaat

SEQ ID NO: 55156 - DNA, 599 bp, Chicken  19866894308526_1
  misc_feature (1)..(122): n is any nucleotide
nnnnnnnnnnnnnnnnnnnnnnnnnnnnnnnnnnnnnnnnnnnnnnnnnnnnnnnnnnnnnnnnnnnnnnnnnnnnnnnnnnnnnnnnnnnnnnnnnnnnnnnnnnnnnnnnnnnnnnnnnncgtgacttaggatgctcgttcaggaaggtaagagggaaatgcgtattgctgacgggagctttttgagctgttatttccagggctgtagaacggtaagaaatatgtggtgtctgttagatacagcatttcagagcagtttccatacagctgtcacgttgggaaagcttgggcaaggagrtgcrgggcagtggtgctgggcccaggtgggtgctgctgtggagcactccttttttgagcagcaaagttgaattctgagctttgctctggttttacagcagctcatgcactaattatcccatggtaaaaatgcaccttttttagcagtgaagacaaaacctcgacttgctttaaactgctgtattaatagcaaatgctcaacaatgtatgtcttagtagatacctacgcagcacaaactattcaactttttcgctttaatgatggtattagcytgaagaaagggagctgaaaacttctgt

SEQ ID NO: 55157 - DNA, 599 bp, Chicken  19866894308526_2
  misc_feature (1)..(118): n is any nucleotide
nnnnnnnnnnnnnnnnnnnnnnnnnnnnnnnnnnnnnnnnnnnnnnnnnnnnnnnnnnnnnnnnnnnnnnnnnnnnnnnnnnnnnnnnnnnnnnnnnnnnnnnnnnnnnnnnnnnnnncgtgacttaggatgctcgttcaggaaggtaagagggaaatgcgtattgctgacgggagctttttgagctgttatttccagggctgtagaacggtaagaaatatgtggtgtctgttagatacagcatttcagagcagtttccatacagctgtcacgttgggaaagcttgggcaaggagrtgcrgggcagtggtgctgggcccaggtgggtgctgctgtggagcactccttttttgagcagcaaagttgaattctgagctttgctctggttttacagcagctcatgcactaattatcccatggtaaaaatgcaccttttttagcagtgaagacaaaacctcgacttgctttaaactgctgtattaatagcaaatgctcaacaatgtatgtcttagtagatacctacgcagcacaaactattcaactttttcgctttaatgatggtattagcytgaagaaagggagctgaaaacttctgtgctc

SEQ ID NO: 55158 - DNA, 584 bp, Chicken  19866894308526_3
tcacgttgggaaagcttgggcaaggagrtgcrgggcagtggtgctgggcccaggtgggtgctgctgtggagcactccttttttgagcagcaaagttgaattctgagctttgctctggttttacagcagctcatgcactaattatcccatggtaaaaatgcaccttttttagcagtgaagacaaaacctcgacttgctttaaactgctgtattaatagcaaatgctcaacaatgtatgtcttagtagatacctacgcagcacaaactattcaactttttcgctttaatgatggtattagcytgaagaaagggagctgaaaacttctgtgctctgagctgagttaatctttgaaggaaaaaaaccctctgctgtgcaaatctgtctggcagaacgctcacaggtgcttgcaatgtgacttcaggaggatgcctcttgttgcagtgctcagggctgggtgcggtgatggatgagcccaagcgaagggatgagccctttatttaaggggagggtcccagttgccaaaaaaataatagattaatctgccatccttgcaagggcactgagtctcttcctgctgatgttct

SEQ ID NO: 55159 - DNA, 599 bp, Chicken  19866894308527_1
  misc_feature (1)..(176): n is any nucleotide
nnnnnnnnnnnnnnnnnnnnnnnnnnnnnnnnnnnnnnnnnnnnnnnnnnnnnnnnnnnnnnnnnnnnnnnnnnnnnnnnnnnnnnnnnnnnnnnnnnnnnnnnnnnnnnnnnnnnnnnnnnnnnnnnnnnnnnnnnnnnnnnnnnnnnnnnnnnnnnnnnnnnnnnnnnnnnnnntgtactgcaaaacttgtgtttgcttatatttgaggcaaacatgtcttggactaaatggaaagctgtgaatctgacgtacaaagattatccctgctgataacagaagcactcagaaacatcactrgttgtctgagacatgagaagaagcagaactatagtcagagagtacagctggaatacttggcagtgcttttccagtttcactgcactacaacctgctgctgttacataagaaaatgtcagtttttccttcctatccagcaatagaaaagaaaagaaaaaaaaaagaagttggttgaaaaagccaggattgctaaagaggcacaggcactaaaattgtgcaatcagttttaaatgaaatacagcacttgaaagaaaaactctgttgtatgtggtacacacaaagaaaatggtgtaacagaa

SEQ ID NO: 55160 - DNA, 600 bp, Chicken  19866894308528_1
attttgtttctcctaggtcggccacaaactgagcagcctcctggactaccgcttctgaggccaccaggggatttaatatagagaccaaaatgcaatacagatgagagggtgcctactgtagaatcaggtctctcatccctgctgagaatttgaccataccagggctatcaaatgaatcttcataaattgcttcccttatacctagctctcggatataattttgaaggtcctccacagaggaccacatccatgtatgtagaggtatatccgatttattaggcctgaccatacggcatgccrccatcaaccaatctattatggagaggttttcattggtatattgcacaccggcatacagcctctgcctaagggcaggatagacagtcatggtggccaacttggatatttccaggacattcaacatagcactttccgccccagagtcccacagtcataataaccaagttgacacgctttctctaggcctttgccgaaatcattggactaaatccatcaattccattgccatgtatggccgggctgttacatgcaagcgagtctgtgcagggggccactgatcaggcggcagccctaccagta

SEQ ID NO: 55161 - DNA, 600 bp, Chicken  19866894308528_2
ggaaatatatttttaatgtttattttattttatactgtttgtgtgttttattttttcctctttagtttattgtgtatgtttatttaatttgttatttttctttaatttttgttaattttattgttccttgtttatgcttattttgcttattgtttatgtttattttgttttatgctatataaacaaaataacaaaatatacaataaacaataaataaaataataagagttagcataaaaaataacaagcaaattaaacaataaacaaataaggccaagtgcaggccgctgcacttgggtyggggcacctccaggtatttatgcaaactggggggaagatctccttgagagcagccctgtggagaaggactttgggggtcctggtagatagaagctggacatgagccatcagtgtgcgcttgcagcccagaaggccaactgttttctggactacattaaaaaargggtggccagcaggaagagggaggtgactgtgcccttctactcagctcttgtgagggtccatcttggagtactgtgtccaggcctggggccaccagtacaggaaggatttggagctcttggagcgggtccagaggag

SEQ ID NO: 55162 - DNA, 600 bp, Chicken  19866894308528_3
tttgttttatgctatataaacaaaataacaaaatatacaataaacaataaataaaataataagagttagcataaaaaataacaagcaaattaaacaataaacaaataaggccaagtgcaggccgctgcacttgggtyggggcacctccaggtatttatgcaaactggggggaagatctccttgagagcagccctgtggagaaggactttgggggtcctggtagatagaagctggacatgagccatcagtgtgcgcttgcagcccagaaggccaactgttttctggactacattaaaaaargggtggccagcaggaagagggaggtgactgtgcccttctactcagctcttgtgagggtccatcttggagtactgtgtccaggcctggggccaccagtacaggaaggatttggagctcttggagcgggtccagaggagagccactaagacgatcagagggctggagcaccagtcctgtgaggaaaggttgagggaactgggcttgtttagctcggagaagagaaggctccggggagacctcattgaggcgttccagtacttgaaaggagcatataaacaggaagggggaactgctgtttac

SEQ ID NO: 55163 - DNA, 600 bp, Chicken  19866894308532_1
gcctggcaagatgtcagatgggctgccctgcctgtattgctttccttcactcctccagcccccctttttcactccccaatatggcattgatccggctcagtgagaatttccatttatatttcagctttgcctgcaacaccatccccgagtgcctgcagctttgacgcgtgcttgcctgctctctccaacacttggcattgctcagcccccccttctcagccgctttgcctttcctctgccccttccgctcacacaatcctcccctctccccctatctgtctccccgtgccgccatctgcygtctgcttgctcagtcattccatcttcccctgacatgtctcagcttctctccctctgctcccaattagcacagtcgccaggtttggctgggcagctggctgcacagtgaaaagataggtaaggattgctgcttcagagcagggttgcacrctggcttgctggtacctgggaatgctctctcacaaacacacagcctttgttcctctctttcaatgaacaagmcatagtccaggaaatggcaataggcagtgaccccatctctctgttcacatctcgcccccgaagacctgtcctactgag

SEQ ID NO: 55164 - DNA, 600 bp, Chicken  19866894308532_2
gcctgcagctttgacgcgtgcttgcctgctctctccaacacttggcattgctcagcccccccttctcagccgctttgcctttcctctgccccttccgctcacacaatcctcccctctccccctatctgtctccccgtgccgccatctgcygtctgcttgctcagtcattccatcttcccctgacatgtctcagcttctctccctctgctcccaattagcacagtcgccaggtttggctgggcagctggctgcacagtgaaaagataggtaaggattgctgcttcagagcagggttgcacrctggcttgctggtacctgggaatgctctctcacaaacacacagcctttgttcctctctttcaatgaacaagmcatagtccaggaaatggcaataggcagtgaccccatctctctgttcacatctcgcccccgaagacctgtcctactgagccacaagataacatgttgagtgtcgctcctagagcataagctctgaaataacctgggaagggttaatagggtgacctattacatcctgaacacccagagattggcaaccaggaggatgtttgagcttcacaagtctcttgcacaattagc

SEQ ID NO: 55165 - DNA, 600 bp, Chicken  19866894308532_3
ctttgcctttcctctgccccttccgctcacacaatcctcccctctccccctatctgtctccccgtgccgccatctgcygtctgcttgctcagtcattccatcttcccctgacatgtctcagcttctctccctctgctcccaattagcacagtcgccaggtttggctgggcagctggctgcacagtgaaaagataggtaaggattgctgcttcagagcagggttgcacrctggcttgctggtacctgggaatgctctctcacaaacacacagcctttgttcctctctttcaatgaacaagmcatagtccaggaaatggcaataggcagtgaccccatctctctgttcacatctcgcccccgaagacctgtcctactgagccacaagataacatgttgagtgtcgctcctagagcataagctctgaaataacctgggaagggttaatagggtgacctattacatcctgaacacccagagattggcaaccaggaggatgtttgagcttcacaagtctcttgcacaattagcagtttatgcaacatcctattgcagtggttcaccttctgtatccaacatttggaggggtgaactgtcctccag

SEQ ID NO: 55166 - DNA, 600 bp, Chicken  19866894308532_4
ctgagccacaagataacatgttgagtgtcgctcctagagcataagctctgaaataacctgggaagggttaatagggtgacctattacatcctgaacacccagagattggcaaccaggaggatgtttgagcttcacaagtctcttgcacaattagcagtttatgcaacatcctattgcagtggttcaccttctgtatccaacatttggaggggtgaactgtcctccagtggcgtctgcccatccttctactccttctctgagctcctactgcacttgctggggaaggttcctcagggattsaaatgagcctgggaagcaggtgttgccctcattaaaagaggaaatacagtacacagagaaagataggagatgaaagaagaaggaagatggaagccaaatgttcttgctgttgacagagaaaatgatcttggttttggaaaggagtgggatcttcccatcctgcctcatcaggattagagaagtgaatggagcaagcaggcagagctgtgaaatacagaggagtgaatcaagctgtgccatctgagcacagggctgattacacatggccaaaggggaaggggaggcactgacttggaagga

SEQ ID NO: 55167 - DNA, 600 bp, Chicken  19866894308534_1
agattttgaaatcacttttaagaaagaaaacagcaagagtaaccctgggaagagttcagagtttccaattagcagccaaaattgtgtgtgtaggtaaaatattctcaaatatccttttcctggaagaaggaaaacactgaagtaatgacagaagtaggaactgttcatacaacttcctcagggctctaatgttttctcaaacttgtgtacaactaccaaaattgctgtaattcagcgattggaggtgggaggcgttttcctgtcctctttcttaaagctaatcatgtaggtctagcctaktgtatgccaaccwtatgtagtcaacaaggagaactaaatactgacaaagagcaattcagcaccatctctatccaagtcacaaaaatggctgtctgcaggtggctgtttctttcaagcatttagcattttcttatcttactaaaaatgaagttaataccacccaggataaccactaggaactttagtaggaacacagtgatttgctttttctactattctgtgcaaggacaaaaaaaaaaaaaaaaaaaaaaacgagtatccattatgtgctctactactaatatagaataagaggactca

SEQ ID NO: 55168 - DNA, 600 bp, Chicken  19866894308534_2
acttttaagaaagaaaacagcaagagtaaccctgggaagagttcagagtttccaattagcagccaaaattgtgtgtgtaggtaaaatattctcaaatatccttttcctggaagaaggaaaacactgaagtaatgacagaagtaggaactgttcatacaacttcctcagggctctaatgttttctcaaacttgtgtacaactaccaaaattgctgtaattcagcgattggaggtgggaggcgttttcctgtcctctttcttaaagctaatcatgtaggtctagcctaktgtatgccaaccwtatgtagtcaacaaggagaactaaatactgacaaagagcaattcagcaccatctctatccaagtcacaaaaatggctgtctgcaggtggctgtttctttcaagcatttagcattttcttatcttactaaaaatgaagttaataccacccaggataaccactaggaactttagtaggaacacagtgatttgctttttctactattctgtgcaaggacaaaaaaaaaaaaaaaaaaaaaaacgagtatccattatgtgctctactactaatatagaataagaggactcagaactgtgggaca

SEQ ID NO: 55169 - DNA, 599 bp, Chicken  19866894308535_1
  misc_feature (1)..(51): n is any nucleotide
nnnnnnnnnnnnnnnnnnnnnnnnnnnnnnnnnnnnnnnnnnnnnnnnnnntgagaaagaaagaaggggaacctggtaaatgattcaagacattggcaaaaatgatgcagctgaagccaagttatttttccaaagtaagctatagacttgtcccttggaaatgagattttccgccagcagtctacctccagccaggagtcttccttcagctctcgggggacagaggatagtctcagcaggcacccagctgtgagggtaattgagcagcacagcaaagcaggtttgggactcaccagcagycaaaggctttaaaatgagattggatagccctttaaaaatcaactgtaatccagagtcaaaggaaaatgctattactggatgaattttctctaagaatttaccaggcaagggaggtgcagcaaacacactgttgctgctgccttgtgttgttttggcaagtcttsaccatgtgattggggtctggtgactgtcacagctgggaaaaggaacaattccatgctacgcgtcactcccagtaaagcttccttagacaaggctttgaagtttccaggtgtcagaccaaaaatcagacaagagct

SEQ ID NO: 55170 - DNA, 600 bp, Chicken  19866894308535_2
gattttccgccagcagtctacctccagccaggagtcttccttcagctctcgggggacagaggatagtctcagcaggcacccagctgtgagggtaattgagcagcacagcaaagcaggtttgggactcaccagcagycaaaggctttaaaatgagattggatagccctttaaaaatcaactgtaatccagagtcaaaggaaaatgctattactggatgaattttctctaagaatttaccaggcaagggaggtgcagcaaacacactgttgctgctgccttgtgttgttttggcaagtcttsaccatgtgattggggtctggtgactgtcacagctgggaaaaggaacaattccatgctacgcgtcactcccagtaaagcttccttagacaaggctttgaagtttccaggtgtcagaccaaaaatcagacaagagctggacttggcaagacattcctctatatttacagatatatcagtgtcctgcacatcatcatgagcacatcccattagggaaaaggcaattaactctctctcttccttcctggttggtgaaagtgagtgactgatagagtgcttcatgcacataatatgagtttgacc

SEQ ID NO: 55171 - DNA, 599 bp, Chicken  19866894308543_1
  misc_feature (1)..(76): n is any nucleotide
nnnnnnnnnnnnnnnnnnnnnnnnnnnnnnnnnnnnnnnnnnnnnnnnnnnnnnnnnnnnnnnnnnnnnnnnnnnnatcatagaagaccatgctggacggagttttgagcaacctggcctagctgtaggagtccctgtcttattgtatgggagttggactagatgacctttaaagatatctgttcaattcaaatgattcttatgattctctgattctatgaaggacatccctttgttagcccttcagtttgaagatcttccctttctcttggaggttgtcctgtatgaaagtgttctttmggccaacagtaagctcaatacagcaggtttgagtaacttatattgcatatatgggaacartgtgagactggcaacttttgaactttctgctgtgaacaacaacattagatttccaagaattctaaaggtgcagaacttttttgtttatttgtttgtttgtttgtttcttatgcctggtacagattatacatatgaactctgctcttttgtggatacctcacctattttgtagtcttccttttaactacaagttccaggataaaagatgaggttaggaaaaggttgtttatttrttatca

SEQ ID NO: 55172 - DNA, 599 bp, Chicken  19866894308543_2
  misc_feature (1)..(16): n is any nucleotide
nnnnnnnnnnnnnnnnatcatagaagaccatgctggacggagttttgagcaacctggcctagctgtaggagtccctgtcttattgtatgggagttggactagatgacctttaaagatatctgttcaattcaaatgattcttatgattctctgattctatgaaggacatccctttgttagcccttcagtttgaagatcttccctttctcttggaggttgtcctgtatgaaagtgttctttmggccaacagtaagctcaatacagcaggtttgagtaacttatattgcatatatgggaacartgtgagactggcaacttttgaactttctgctgtgaacaacaacattagatttccaagaattctaaaggtgcagaacttttttgtttatttgtttgtttgtttgtttcttatgcctggtacagattatacatatgaactctgctcttttgtggatacctcacctattttgtagtcttccttttaactacaagttccaggataaaagatgaggttaggaaaaggttgtttatttrttatcattgatcttcacactgtcactccattgctaacctattgctcatgccatacagtaaatggag

SEQ ID NO: 55173 - DNA, 600 bp, Chicken  19866894308543_3
ttctttmggccaacagtaagctcaatacagcaggtttgagtaacttatattgcatatatgggaacartgtgagactggcaacttttgaactttctgctgtgaacaacaacattagatttccaagaattctaaaggtgcagaacttttttgtttatttgtttgtttgtttgtttcttatgcctggtacagattatacatatgaactctgctcttttgtggatacctcacctattttgtagtcttccttttaactacaagttccaggataaaagatgaggttaggaaaaggttgtttatttrttatcattgatcttcacactgtcactccattgctaacctattgctcatgccatacagtaaatggagcaattcactgctttcatattcagtggctgcattgtagttttctccttatttttgttcttagaaaatgttgaactgaatctttccaagcccatatacactgtttttgcacagactctatgctcttgtaaaaagataatatggtaatgcatccacaaamaaaactgtcagctgaaaataaggaagagtttgagtttaatgtatttagaggtctgcatgtgatacttttcaagatcc

SEQ ID NO: 55174 - DNA, 600 bp, Chicken  19866894308543_4
ctcacctattttgtagtcttccttttaactacaagttccaggataaaagatgaggttaggaaaaggttgtttatttrttatcattgatcttcacactgtcactccattgctaacctattgctcatgccatacagtaaatggagcaattcactgctttcatattcagtggctgcattgtagttttctccttatttttgttcttagaaaatgttgaactgaatctttccaagcccatatacactgtttttgcacagactctatgctcttgtaaaaagataatatggtaatgcatccacaaamaaaactgtcagctgaaaataaggaagagtttgagtttaatgtatttagaggtctgcatgtgatacttttcaagatccatttctgctttaagacttgatagtgtggatgcatgggacacttacttgttgctgagattgtcttttctccataaattggtgatctgggtgtctaagctctgagtccagaaaacttaggcctcgcaagctgtacacatagagaggttaagatccagcagaagatgaacaggaacttacctgaggtttgaggtgttgtcatacagagaaacccgtacagaaatat

SEQ ID NO: 55175 - DNA, 600 bp, Chicken  19866894308545_1
tcgcattgaaagcatgagtgaaacttgatgattaccaagtattttggtattgcatatgttaacagtggatttgtgtcaaactacttgtaggtacatctaggcaagcctgaaagatgtacctagaagttatggttgcttcttgcattactctaataatttcaaaagtaaagctttggctcaagctgtaaccctcttattttgtgaatggagtggcagaaatccagcttgggacaagataatacagatacaacaatctttaaatattcagaacatgatcttgcttctttgcatttgtaaaakgatggtatgaaaatctagaagcgcacaaaaactaatctagcagtatgccaaagtaattaaagcaaagtaaataatctccagtgttcttattccccacagaaattgtttaatatcttatctttccaaactaattttctgctcattcatgatgtctttgtaaggccctccttgtttggccrgtgctggtgttttgcacagtgtggaaatatctcagttccttttaaagggtgaaatgtattgggtactgtctgtgttctaaatttaaaaataataataataaaaaatgatatttcttcagtg

SEQ ID NO: 55176 - DNA, 600 bp, Chicken  19866894308545_2
aagctgtaaccctcttattttgtgaatggagtggcagaaatccagcttgggacaagataatacagatacaacaatctttaaatattcagaacatgatcttgcttctttgcatttgtaaaakgatggtatgaaaatctagaagcgcacaaaaactaatctagcagtatgccaaagtaattaaagcaaagtaaataatctccagtgttcttattccccacagaaattgtttaatatcttatctttccaaactaattttctgctcattcatgatgtctttgtaaggccctccttgtttggccrgtgctggtgttttgcacagtgtggaaatatctcagttccttttaaagggtgaaatgtattgggtactgtctgtgttctaaatttaaaaataataataataaaaaatgatatttcttcagtgcagttgaaatgccaagcataaagctaacagctgtgagcctcttaggtcagttgttgtttacgcagagaaaggtctttgcttggctcaggagtgtgtggcatgtgattccaacactgccttggtgccaagggacatcttgctgctgggacctgatgttcatcttgctttagtaccaacca

SEQ ID NO: 55177 - DNA, 600 bp, Chicken  19866894308549_1
agctctggttcccccagcataagatacacatctgtcaggcagggtacagaggagggccatcaagataatcaggggactggagcacttctcctatgaagacataggtgatatggggttgttgagcctagagaaaagaaggagattctatagtagcctttcagtacttacagggaaagggacttatttaacatggaggttagtgataagacaacgggtaatggctttgaactagaagaggggagatttacttcagatattgaggaacttaaacaagttttctggagaagctgtggatgctcyatccctggaggttttcaggaccaggttggatcacgctttgggcaacctggtctagtgagaggtgtccctgctcatggtagggcagtaggaactagatgatattcaaggtcccttcaaacacaaaccattctgtgagtctgtatcaattaccaccggaaattgcagtatactacttttcctccctaaagctatactgatctatgtcctttctgtaagcttcacaaattttgattgtatgttcacattaacctttcctatatagggacgtaagagtttgtcatttcatgacattcattgccc

SEQ ID NO: 55178 - DNA, 600 bp, Chicken  19866894308552_1
tagccactgagactacgggttctgcaatgcagtgcaagatgcatgaaaaaatggagaaagacaaacagttacagcagctatattcaaaccaaaatactgtttgttcagacaagtatacagtatacttgcaatggcctgattaacctactgtatctctcttacaactttgtagagaagttccctcatgattttgagtacagaaatttgaagcaaagttagtagaattaactaccattcacagttcatatattggccctttaaaaacacacagaatagattctaatctaaaccttaattctyttagcctatactcaaagagattctacttcaaagatacaattctaatccacagattaaaattcacttacatattttctcacttccaccctaaacatccttaagcctaaggccttccaaaaagtgtgataataaaagatttcctattcccaagaaaattgggacagattacagctgccagattcattcatcttgtggcataggtcttcaaatatgagagctgcatatcagccagacaccttcatatttttaagcatccttttcagttgcaagcaaggtgttgacacaggcaatagatactcc

SEQ ID NO: 55179 - DNA, 600 bp, Chicken  19866894308554_1
taccatggtgtgtcaaaaatggctcttggttcctatgtttaggacctgaatcactcccagtgtgacatagctgtgagacacttaggagagtgagaacagttcctcttgcaatttataggaaaagttaaaagtagatcaactgttgacaagtcaggttggctggtttacaagagactactatgttcaacagatgggaagaagctgccagatctagattaagccagatccaaacaacccagcacttgtaagtatttgactttctacagtctgatgagatgctcaggtgagagtcagcaggtrgtggatgcagctttacttcctagtgctggtacacaaaaaggttacagaggtacttgttcctctcattttatttttaatcctcctacattcttagaaatgtgcagtgaattgggttttgcttttccctttatttgtccctgtaatgactttttttactgttcctcttattcccgctgcatgtgatcaggtggttcttcacgaaatctcctcagtttaataaaaaggtgagtgttygatgggattctgaatgctgactgcaggtacagaagtgtgtgtggggtcctacaccttcagttggaa

SEQ ID NO: 55180 - DNA, 600 bp, Chicken  19866894308554_2
cccagcacttgtaagtatttgactttctacagtctgatgagatgctcaggtgagagtcagcaggtrgtggatgcagctttacttcctagtgctggtacacaaaaaggttacagaggtacttgttcctctcattttatttttaatcctcctacattcttagaaatgtgcagtgaattgggttttgcttttccctttatttgtccctgtaatgactttttttactgttcctcttattcccgctgcatgtgatcaggtggttcttcacgaaatctcctcagtttaataaaaaggtgagtgttygatgggattctgaatgctgactgcaggtacagaagtgtgtgtggggtcctacaccttcagttggaagcagcagagccctgcagtgaatgcattatccacaagtgcctcaagaagcacaacttcatcaggccacggtgctctgaagtgctatttcctctatggtaccaacactcattaagagagaaaaaactcattaaatgtggatattaccaattccaaggccttgatcttaagccagtggggcatttccatggatttcaggaaaaggttgagcttttccttaaatctatcctatgggtc

SEQ ID NO: 55181 - DNA, 600 bp, Chicken  19866894308554_3
ggatttcaggaaaaggttgagcttttccttaaatctatcctatgggtcctgatttgtaccagtgcagaccgacatgggcatgcctggagtgttatccctgtatggatatgactgagtatctaccagacagtgagaggaagaatcattccttttcagatgaatttgatggccatgaaatggttgggtttggtttagccttctctatgctgatgaagttcactcctaaaagatttacatttctcccctgcagaaaaaaaaacattattgcatcatttctctctagtgctgaacttcaaaccrcatcctaatttgatcttgtgcccaatcctatccataaatgtagttgtcagccatacatatagtcttgtcccatctctaattaaagacttcacagcttgatgtatgtctttgccctgaaatgaaactacttgatttggcttctgaatagtacaaagatacaaagccagcaagaaaggcgatgaaagagaaaaatccataaggggcaaaagggacaaggaaaaaaataatatgtgagtaccctgattaaaatataaaactacagaaaagaaaaaaaaaaaaaaaacctagaaccgtagtcac

SEQ ID NO: 55182 - DNA, 600 bp, Chicken  19866894308560_1
tctgtcttcctgactttatatatttccttcatgcctatcaccttcatttctcttttttagccgttacagagattactacagatccctgtctttactgtcttttctccccttcccatttccctcctccttccccttccctccactgttctctagattaagggtgctcctcacatcctccttgacagttttcatgatgaacaataaaatacattcaagattccatctttcaaactatactgcagttaccggtatgataaagctgcactcaggaacatcacctgtgtgtgggaatgagcatarcaggtgtaggttaagcagtwcaaactaaagtcaggcataacatgcatgaacaggctcagaaaagactggtcttcgtgggtgctgccgagagagggaacagccagtgggattcctggaacaagcaggtgttagagctgaaagagaaagtgagtgttccagacagaagggcaccagggatgagggttcacagatgtgagaaggcagaggaggaaagcataagaatgccataaggggcagacagggttgtacatcacagagggttccgaaagagggcagcttggtgcagtgaagtgcaggagg

SEQ ID NO: 55183 - DNA, 600 bp, Chicken  19866894308560_2
tatttccttcatgcctatcaccttcatttctcttttttagccgttacagagattactacagatccctgtctttactgtcttttctccccttcccatttccctcctccttccccttccctccactgttctctagattaagggtgctcctcacatcctccttgacagttttcatgatgaacaataaaatacattcaagattccatctttcaaactatactgcagttaccggtatgataaagctgcactcaggaacatcacctgtgtgtgggaatgagcatarcaggtgtaggttaagcagtwcaaactaaagtcaggcataacatgcatgaacaggctcagaaaagactggtcttcgtgggtgctgccgagagagggaacagccagtgggattcctggaacaagcaggtgttagagctgaaagagaaagtgagtgttccagacagaagggcaccagggatgagggttcacagatgtgagaaggcagaggaggaaagcataagaatgccataaggggcagacagggttgtacatcacagagggttccgaaagagggcagcttggtgcagtgaagtgcaggaggccaaaagcatctctggaaaa

SEQ ID NO: 55184 - DNA, 600 bp, Chicken  19866894308560_3
agctggagagaagagtgcccataaaatatgcttggataaagtagtggaagaatgttgcaagcatttctcagtagatttttgcaaaaattgcatttcagtagattagttaatagagatatttatgtattagtgaggacaaactaaagggaggttactgataactacagtaggtgataggaaccacggcttagaagagatggtggcatgcaaattgcttgaggattttcaacgtatcttaaggagatccaagggccccagggacccctctgtttgagccacacaggtcaggagcaataactrgactgtggggactgaaagcaaacagtggatttgatttcaaggagcttatttagggatatctcttttctgtaactacatgttatccatcatttctacagcgatggccagagctgcaacatgcatatcatatataaaacattaaagccagcatctgatactcagttcagtaacagctgccaacttaagccattctgcttatttcctttttcttctgcttttttttttttttttttttttcagtgtagctttggaaaaacctgagtattgtgatatcacctaaaaatgtggggaaatagattt

SEQ ID NO: 55185 - DNA, 600 bp, Chicken  19866894308568_1
gcccacgtcctgccgccatcgccgttgccggcttctgcaactgggcctgcaacttcattgtggggatgtgcttccagtacatcgcggtaagaaacctccctaaaacagtaccaacatgaggcgggtgaggtccccaaagcagaatagcaggacgtgcacacgtcccccaaggggacatcttggatctccaaggctatgcaggcaggggtgatgatacgccatgctgtggtctgatggctgtgccctgctctcattgccccactgcaggatctgtgcggaccgtatgtgttcgttgtcttygccgtcctcctcctggtcttcttcctgtttgcrtacctcaaagtacccgagacgaaggggaagtcatttgaggagatcgcagctgcattccgccgcaagaagctcccarccaaatccatgacagagctggaagacctgcgtggcggcgaggaggcgtaggcatggccacacacacacaggaaggagggatgcagaaggaaacgttaggcaaaagtctcatctcacaaacaccttgcaggtgccagcccatgaggacacatcaactgcgggacttctgagcgctgcctgcaccatccagcc

SEQ ID NO: 55186 - DNA, 586 bp, Chicken  19866894308568_2
tctgcaactgggcctgcaacttcattgtggggatgtgcttccagtacatcgcggtaagaaacctccctaaaacagtaccaacatgaggcgggtgaggtccccaaagcagaatagcaggacgtgcacacgtcccccaaggggacatcttggatctccaaggctatgcaggcaggggtgatgatacgccatgctgtggtctgatggctgtgccctgctctcattgccccactgcaggatctgtgcggaccgtatgtgttcgttgtcttygccgtcctcctcctggtcttcttcctgtttgcrtacctcaaagtacccgagacgaaggggaagtcatttgaggagatcgcagctgcattccgccgcaagaagctcccarccaaatccatgacagagctggaagacctgcgtggcggcgaggaggcgtaggcatggccacacacacacaggaaggagggatgcagaaggaaacgttaggcaaaagtctcatctcacaaacaccttgcaggtgccagcccatgaggacacatcaactgcgggacttctgagcgctgcctgcaccatccagccacaggtgccaagctggcat

SEQ ID NO: 55187 - DNA, 510 bp, Chicken  19866894308568_3
accaacatgaggcgggtgaggtccccaaagcagaatagcaggacgtgcacacgtcccccaaggggacatcttggatctccaaggctatgcaggcaggggtgatgatacgccatgctgtggtctgatggctgtgccctgctctcattgccccactgcaggatctgtgcggaccgtatgtgttcgttgtcttygccgtcctcctcctggtcttcttcctgtttgcrtacctcaaagtacccgagacgaaggggaagtcatttgaggagatcgcagctgcattccgccgcaagaagctcccarccaaatccatgacagagctggaagacctgcgtggcggcgaggaggcgtaggcatggccacacacacacaggaaggagggatgcagaaggaaacgttaggcaaaagtctcatctcacaaacaccttgcaggtgccagcccatgaggacacatcaactgcgggacttctgagcgctgcctgcaccatccagccacaggtgccaagctggcat

SEQ ID NO: 55188 - DNA, 600 bp, Chicken  19866894308570_1
ccctttgcttcagtttccttgattgctgtagcggagacctcagctcagcaacttgccccttgttatctcagaattaaattttatctctagtttcgtgtctctctcaaactacagggagattttttttatcattctcagacttttcatgtctgtactaaacctcaaagagataattttataagaataattttactctgacattctggatctgtttctcatttcagtgcaaagctttgggaatagagtttggatgcccacattctaagcatatatcagtaaataattgcaagtgaacatttmattaaatcgtagaatatcctgagatggaagagacccacagggattactgagtcctaatcctggctccacacaggaccacccaaaatgaaacaaaagggatgtaattttgttaaaagaaaatacatcacagaaagtatcttcagaagtacattagtgatgtttacttggtatcggtttgaygtaatgaatttattataaattcacacctgatatgttaagacagatcaataaagcagagataagttttatgttttcaagaggggagaacacagagccattatggggaaatatgttttgcaa

SEQ ID NO: 55189 - DNA, 600 bp, Chicken  19866894308570_2
agaataattttactctgacattctggatctgtttctcatttcagtgcaaagctttgggaatagagtttggatgcccacattctaagcatatatcagtaaataattgcaagtgaacatttmattaaatcgtagaatatcctgagatggaagagacccacagggattactgagtcctaatcctggctccacacaggaccacccaaaatgaaacaaaagggatgtaattttgttaaaagaaaatacatcacagaaagtatcttcagaagtacattagtgatgtttacttggtatcggtttgaygtaatgaatttattataaattcacacctgatatgttaagacagatcaataaagcagagataagttttatgttttcaagaggggagaacacagagccattatggggaaatatgttttgcaagctggaaaggcagaatagattcaccaaactgacaggaggagcagaagaattctccccacctgttttcctctctgttcctctcctctggcatgctacaraatatattttgaacaaatgggcttcaaaaacctcccgctgcttttcgaatgggtatatattgctgtaaaattcaggtcatgt

SEQ ID NO: 55190 - DNA, 561 bp, Chicken  19866894308570_3
atgtaattttgttaaaagaaaatacatcacagaaagtatcttcagaagtacattagtgatgtttacttggtatcggtttgaygtaatgaatttattataaattcacacctgatatgttaagacagatcaataaagcagagataagttttatgttttcaagaggggagaacacagagccattatggggaaatatgttttgcaagctggaaaggcagaatagattcaccaaactgacaggaggagcagaagaattctccccacctgttttcctctctgttcctctcctctggcatgctacaraatatattttgaacaaatgggcttcaaaaacctcccgctgcttttcgaatgggtatatattgctgtaaaattcaggtcatgtttgttcaggatttgtataaaagtaaaaataatacacattcaattttttggtgtgactgcaatcccagggagataacttcaatttcttggtgtctttggccctcccacgctgctggtgtattctcagggaccagccaaagaaagacaaaccatcagcttagatccagagacaaaaataat

SEQ ID NO: 55191 - DNA, 599 bp, Chicken  19866894308574_1
  misc_feature (1)..(107): n is any nucleotide
nnnnnnnnnnnnnnnnnnnnnnnnnnnnnnnnnnnnnnnnnnnnnnnnnnnnnnnnnnnnnnnnnnnnnnnnnnnnnnnnnnnnnnnnnnnnnnnnnnnnnnnnnnntggttcggctcctgcctcagcccgctgttaacctcagacagagcgtgtcatcttgcttttctggctgtgaagacaagggtgagagtctcccttctctcatcatcttttgtttggaagacaatgggcaatttgtgagaggatccacgaaaaatcaagcagcgcctcacctagcagtgcctgcagactgcacagygcagagcagggctaggcccttgtgccccsgggctgcacgtctgtctggaaccgggcgggacatggggctggacacagggctggaaccaggccaggcattgggctggagctgggctggatcaggctaggagccagactagacggggagctagagatgggctgaatgggggccagcagggcctcagcaggcgctttccccagccccaaccccattcccatgcagtgatgcgatgagggagaggcagagggacagctgctccctcatctccctctcgtgagtctcctctgacagcgaatatc

SEQ ID NO: 55192 - DNA, 599 bp, Chicken  19866894308574_2
  misc_feature (1)..(78): n is any nucleotide
nnnnnnnnnnnnnnnnnnnnnnnnnnnnnnnnnnnnnnnnnnnnnnnnnnnnnnnnnnnnnnnnnnnnnnnnnnnnnntggttcggctcctgcctcagcccgctgttaacctcagacagagcgtgtcatcttgcttttctggctgtgaagacaagggtgagagtctcccttctctcatcatcttttgtttggaagacaatgggcaatttgtgagaggatccacgaaaaatcaagcagcgcctcacctagcagtgcctgcagactgcacagygcagagcagggctaggcccttgtgccccsgggctgcacgtctgtctggaaccgggcgggacatggggctggacacagggctggaaccaggccaggcattgggctggagctgggctggatcaggctaggagccagactagacggggagctagagatgggctgaatgggggccagcagggcctcagcaggcgctttccccagccccaaccccattcccatgcagtgatgcgatgagggagaggcagagggacagctgctccctcatctccctctcgtgagtctcctctgacagcgaatatcattaatcagtttaattaaccgatgggggc

SEQ ID NO: 55193 - DNA, 600 bp, Chicken  19866894308578_1
tagaagataaatgagaaaaataaaggttccattatagaaattcagtgtatagcactcccttaggaactctgaatggaaaataccttttctttatctgtgttgagtagttttttgtcatctctgtttctcagttttcccggtgcttccgcagttggcaatgaagagtggaagataaacagtttcccagcacattctgcagcctgttgcaaagacacccatataggcattgaatctactgctaagattaacaagccttattttcagacactcttgtttctcttggaacagtaacatttctgyaaagrttcttcagagctaaataattcatttggagtctttacatttgatagattcccaaagctgggaatttgatgtcagtaaatagtttagtctaacacaratgtgttggatgatgcattagtacagcgatttctacatcggaagctaaagtctcaatgagtaccacaagtacctctcctagagaattttaaattagatacaattaattaaaaggaaacgtaatttaacagaaaatacatttctttcagtttaggttattatacccttagagaagagtgacaactacactcctgtacctga

SEQ ID NO: 55194 - DNA, 600 bp, Chicken  19866894308578_2
gataaatgagaaaaataaaggttccattatagaaattcagtgtatagcactcccttaggaactctgaatggaaaataccttttctttatctgtgttgagtagttttttgtcatctctgtttctcagttttcccggtgcttccgcagttggcaatgaagagtggaagataaacagtttcccagcacattctgcagcctgttgcaaagacacccatataggcattgaatctactgctaagattaacaagccttattttcagacactcttgtttctcttggaacagtaacatttctgyaaagrttcttcagagctaaataattcatttggagtctttacatttgatagattcccaaagctgggaatttgatgtcagtaaatagtttagtctaacacaratgtgttggatgatgcattagtacagcgatttctacatcggaagctaaagtctcaatgagtaccacaagtacctctcctagagaattttaaattagatacaattaattaaaaggaaacgtaatttaacagaaaatacatttctttcagtttaggttattatacccttagagaagagtgacaactacactcctgtacctgattctg

SEQ ID NO: 55195 - DNA, 600 bp, Chicken  19866894308578_3
tgagtagttttttgtcatctctgtttctcagttttcccggtgcttccgcagttggcaatgaagagtggaagataaacagtttcccagcacattctgcagcctgttgcaaagacacccatataggcattgaatctactgctaagattaacaagccttattttcagacactcttgtttctcttggaacagtaacatttctgyaaagrttcttcagagctaaataattcatttggagtctttacatttgatagattcccaaagctgggaatttgatgtcagtaaatagtttagtctaacacaratgtgttggatgatgcattagtacagcgatttctacatcggaagctaaagtctcaatgagtaccacaagtacctctcctagagaattttaaattagatacaattaattaaaaggaaacgtaatttaacagaaaatacatttctttcagtttaggttattatacccttagagaagagtgacaactacactcctgtacctgattctgcattcaaacctacactagaacacaggagcagaagaacttgtgctgaacatctcctttcactaagaaacaaagtgaataccagttttagccaaagt

SEQ ID NO: 55196 - DNA, 600 bp, Chicken  19866894308579_1
tctcggaggggtgtcggacgtgctttatttccatgagttataggtgctgcgtgacacaggaacagtgtggccaccgcagaggggagcgatcactgcgatgagcccagctgtgacaagtgcaacagtgacctcggaggctgcattcactccctgagaggtgggctcatccacctctgctgccttctattcatcatcgaatcagagaagcacagaatggtttggattgaaagggacctcaaagtccacccgccccaacccagtagggctgccctccaccagctcaggctgcccagggctccrtccaacctggccttgagcgcctccagagatgtatccacaacttccctgggcagcccagggaccttttcctctgaaaagccacccwtcatctcacaagctactgctgcagcagccttggtgggaacaagcagaaagggaggatgtgagcatgggagactctgagcttctctcctaaatgcaccacctaagctcctgtcactgcgaaccactgcaagagccgctgcaaccaggtgagtgctgctatgacctggctgctgaccctttttccttctaaatccagagcaaactaaaggcacgtgt

SEQ ID NO: 55197 - DNA, 600 bp, Chicken  19866894308579_2
gcgatcactgcgatgagcccagctgtgacaagtgcaacagtgacctcggaggctgcattcactccctgagaggtgggctcatccacctctgctgccttctattcatcatcgaatcagagaagcacagaatggtttggattgaaagggacctcaaagtccacccgccccaacccagtagggctgccctccaccagctcaggctgcccagggctccrtccaacctggccttgagcgcctccagagatgtatccacaacttccctgggcagcccagggaccttttcctctgaaaagccacccwtcatctcacaagctactgctgcagcagccttggtgggaacaagcagaaagggaggatgtgagcatgggagactctgagcttctctcctaaatgcaccacctaagctcctgtcactgcgaaccactgcaagagccgctgcaaccaggtgagtgctgctatgacctggctgctgaccctttttccttctaaatccagagcaaactaaaggcacgtgtaccgggttcaggatgctgtgggtcatggcacccctgcgaggcagtcaggacacacggagctttgttttctgaatccctacagcaa

SEQ ID NO: 55198 - DNA, 599 bp, Chicken  19866894308582_1
  misc_feature (1)..(98): n is any nucleotide
nnnnnnnnnnnnnnnnnnnnnnnnnnnnnnnnnnnnnnnnnnnnnnnnnnnnnnnnnnnnnnnnnnnnnnnnnnnnnnnnnnnnnnnnnnnnnnnnnnaacatatctgcatagctacgcaagaggaaagttgctcaatttcctgcagaggggagttcaggttcacacaatggtcaatgaaatagtaggaactggagagagttcctacatctgctgctctattgtttcaactcttgaaagtctctctgggtaaatgcagacaactcttgaaggctttcaaagattaccatattttgggggyggagggtgagggggtagaaatcacttaagataacggaggaaaaaaggcacaacccttacaaatttttccaattatagtctaggttcaaagaacagtatatattttaaatgcacacacaaaaagttcattcttggaagtcattggatcatttttgctagaattttcctggcgtatttggactcgggtgaaatacttaaggaattgcagttaagtacttacagtaaagactctcaaacaaaattaaaacaagcaatgttaactaattttgcaaaaactgtgacgtcaaatcattagcgtcg

SEQ ID NO: 55199 - DNA, 600 bp, Chicken  19866894308582_2
ggtgaaatacttaaggaattgcagttaagtacttacagtaaagactctcaaacaaaattaaaacaagcaatgttaactaattttgcaaaaactgtgacgtcaaatcattagcgtcgtctacaaagtcctgtaataactgtttcacctataccaaaccagcaataaaatccttcagtaggggaaaaaagctacttcttttactgtttccagcacattctgtcatccaatctatctggggtcttaggatggtttcaacatacttggaacttgcactatccctactgtcattcaatattccarctacagagccatcactgcaaatgcagtcagctttttccaaaacatataacactgtatgctgtaggtaaggttctgccacagacagtatatttaaggcaaaaaataggtaacrtatctaattgtgaccattaagatacttcagcagttggaactcagacagaaaaatgctaatggcaaatacaaccttgaaacacaaaagtaagagacaactattaatagaaagctaatctaatgtctcactttacataatacacaaaactgcagtaaagccaaagttcactaacatcagcaacatacttc

SEQ ID NO: 55200 - DNA, 600 bp, Chicken  19866894308582_3
gtcgtctacaaagtcctgtaataactgtttcacctataccaaaccagcaataaaatccttcagtaggggaaaaaagctacttcttttactgtttccagcacattctgtcatccaatctatctggggtcttaggatggtttcaacatacttggaacttgcactatccctactgtcattcaatattccarctacagagccatcactgcaaatgcagtcagctttttccaaaacatataacactgtatgctgtaggtaaggttctgccacagacagtatatttaaggcaaaaaataggtaacrtatctaattgtgaccattaagatacttcagcagttggaactcagacagaaaaatgctaatggcaaatacaaccttgaaacacaaaagtaagagacaactattaatagaaagctaatctaatgtctcactttacataatacacaaaactgcagtaaagccaaagttcactaacatcagcaacatacttcagggcttcatctaggctgatggtgagatgcataaaaagctcttggaattttaaaaacattttgtatctagaagagtttacccttcaagaccttggaagaagtttttaattaa

SEQ ID NO: 55201 - DNA, 600 bp, Chicken  19866894308586_1
catttcctgcagcctgccgtgctgaatttcaggcagagattttgcttgattttcagccaagctgaagtatgaattcaggtgggtttggaaaacttgggccaggtatctttaaaggtgtatgcaatcaaattaatcctattgaagcttaagaataagtgggctgattatcaagcacccaacaggtcccactgagcattttcttaccactgcatttcctcttacgttgtgtttggggattggtgtggggctgtgtcctttcttgggaaacacgaggctctgtcttcctgggcttgctttgcrtcaatgttgactgaactgtgcagaagtccagcatggggctgagcatctcctgtgtgtgttggctgctcatgggctgggcagcacagagctgagcgagctctcactgactcaacatttttgggtttgtcccaaacacaatgagcattctgcatgaaggaagaaccaggagactgctaagaaatgctttagagagcacagggggttggagtgatgttaacctgtatcactgagcaacagaaccagtctctcccataggctggggtggcttcagcatttatatttaacagaagggcgttcgat

SEQ ID NO: 55202 - DNA, 600 bp, Chicken  19866894308586_2
ttttgggtttgtcccaaacacaatgagcattctgcatgaaggaagaaccaggagactgctaagaaatgctttagagagcacagggggttggagtgatgttaacctgtatcactgagcaacagaaccagtctctcccataggctggggtggcttcagcatttatatttaacagaagggcgttcgatgttgccttttccattcagtgaagtttggcttgaattttttttcatccgttccaaaaaagaaaatgaaacgttgactttaagcacctctgttaaatactcagaaattgtgaaagcrcttatttcatatggggaaagttctgtttttaatgtgatggtttgcttttataggaaagataaacctagtctgaagtaacatttctctaagccttttttggtagaatttgatcagtggtttaagcaactgtaactgattccaggaacacttcaaagcaggcacttctcattggccatgtgcaaaatcaccttctgagtctgaggctctggaaatgcatttattcatagaatatgtcttgcattagttctcagttggccaataaaattatctaaggcatgtctgaggcagctacgaaaaagc

SEQ ID NO: 55203 - DNA, 599 bp, Chicken  19866894308587_1
  misc_feature (1)..(7): n is any nucleotide
nnnnnnncatttaaccctaattaccccataattatgctatgattacccactattaccccattaccactaattacccattaattaccattagttacacaataattaccaattaattgcccctaattacccctaatcacccccagctgtcattgatcccccactaattacccccaattcccactaaatcccactaattcccccatttttacccccctaattagcactaattcccactaattatctctcaattcttactaattatccccaaattacctatactcctcactaattaccaccacyattcccactcattctcaccaattatctccaattatcactgattcccactaattacacactcaattcccactaattccccgtaattatccttaagtaccctcaattaccactaattacccaattccaactacttacccctaattcaccctaatcacctgattcctgctaattatcccccattcccacaaaatcccactaattgatccccaattcccaacaattacacccaattaccccctattcacactgattaccccatgaaatcccattagttacctccagttcccactaattactcc

SEQ ID NO: 55204 - DNA, 600 bp, Chicken  19866894308596_1
ggatttctctgcctccacttgcagaggcaactgtttaaactcaactcaggaaggttgagctttaaactgagtaacctgtatgtagttttttcctcttgctgatgtaagcaagcagttggtctgcagtcagtcattgagtgagatgagctcacattaattggctgtgctgtcagatgttaaaatatggggcgttgttcaagccctttgctgcagaaggaaggactctaccctgaaggtgcagagcgcactaagggaagttatggaatgatttcagctgttaccctatgcttagggcagagsccaacggcacataaaaaagaggtgagakcaatttggcacttgtgggctatgcgtgtggactggttgccagagtgttccagtgctgctgcttgttccataagcttctakcaaataaatccttcctcttgaaatgggaatctgactgcgtaatyctggtgagtgtgttactcttgggctgcatgctgaagaattcctcttggctgcatcttctgtcaaagccccttggagtggaagtggcaagggatgctctgctgaatgcctcttgtctgcaggttctgccagttttttgatggaggggat

SEQ ID NO: 55205 - DNA, 600 bp, Chicken  19866894308596_2
aactgtttaaactcaactcaggaaggttgagctttaaactgagtaacctgtatgtagttttttcctcttgctgatgtaagcaagcagttggtctgcagtcagtcattgagtgagatgagctcacattaattggctgtgctgtcagatgttaaaatatggggcgttgttcaagccctttgctgcagaaggaaggactctaccctgaaggtgcagagcgcactaagggaagttatggaatgatttcagctgttaccctatgcttagggcagagsccaacggcacataaaaaagaggtgagakcaatttggcacttgtgggctatgcgtgtggactggttgccagagtgttccagtgctgctgcttgttccataagcttctakcaaataaatccttcctcttgaaatgggaatctgactgcgtaatyctggtgagtgtgttactcttgggctgcatgctgaagaattcctcttggctgcatcttctgtcaaagccccttggagtggaagtggcaagggatgctctgctgaatgcctcttgtctgcaggttctgccagttttttgatggaggggatctttcctgtggaccagacaggggtctcc

SEQ ID NO: 55206 - DNA, 600 bp, Chicken  19866894308596_3
caagcagttggtctgcagtcagtcattgagtgagatgagctcacattaattggctgtgctgtcagatgttaaaatatggggcgttgttcaagccctttgctgcagaaggaaggactctaccctgaaggtgcagagcgcactaagggaagttatggaatgatttcagctgttaccctatgcttagggcagagsccaacggcacataaaaaagaggtgagakcaatttggcacttgtgggctatgcgtgtggactggttgccagagtgttccagtgctgctgcttgttccataagcttctakcaaataaatccttcctcttgaaatgggaatctgactgcgtaatyctggtgagtgtgttactcttgggctgcatgctgaagaattcctcttggctgcatcttctgtcaaagccccttggagtggaagtggcaagggatgctctgctgaatgcctcttgtctgcaggttctgccagttttttgatggaggggatctttcctgtggaccagacaggggtctccatattttttctgtctccctgacctgaaagtcttgctctttatttcagtctcgatcatccttttccactttcctcctcttc

SEQ ID NO: 55207 - DNA, 600 bp, Chicken  19866894308596_4
attaattggctgtgctgtcagatgttaaaatatggggcgttgttcaagccctttgctgcagaaggaaggactctaccctgaaggtgcagagcgcactaagggaagttatggaatgatttcagctgttaccctatgcttagggcagagsccaacggcacataaaaaagaggtgagakcaatttggcacttgtgggctatgcgtgtggactggttgccagagtgttccagtgctgctgcttgttccataagcttctakcaaataaatccttcctcttgaaatgggaatctgactgcgtaatyctggtgagtgtgttactcttgggctgcatgctgaagaattcctcttggctgcatcttctgtcaaagccccttggagtggaagtggcaagggatgctctgctgaatgcctcttgtctgcaggttctgccagttttttgatggaggggatctttcctgtggaccagacaggggtctccatattttttctgtctccctgacctgaaagtcttgctctttatttcagtctcgatcatccttttccactttcctcctcttctgcatccatattacctgccaggtaggaaaacaacagctacagct

SEQ ID NO: 55208 - DNA, 600 bp, Chicken  19866894308598_1
tgtctgattattgagtgatcagtcattgtccatttttgcttatagtgacatttgtcatgttcaaaggtgaagttttccatctacttcttaatgaaataaaaatctaacgatgatataacttgatgaattgtctgtgtcagagaaatactctgagaggcattatgtgtgatgtcagattaaattagtaaattgcagaaaaatataggaaacatatactttcttggtcttcaactaattctttgttcattagagcattattttatattctagcttgtagctacttagaaatattgatgattyatgtagctctttgatagtaatacggtcatatcgggtttttttttttgtgtgtccatgtatgaatatgcctttcatcacttgtattcatgaaagacttttagttattttgagaggaagagttcctaattctcttttcctccttgttacgcagtttctttaggctctttgttttacggtagtagcagaatattgcaaatgatatccgagatggttttcaaggtgtgtgttaactgataactgaaaataaaagagttatttgaatgtgattaaaataaatttctgtaatccataacaacagat

SEQ ID NO: 55209 - DNA, 600 bp, Chicken  19866894308601_1
gagaaggcgaactgactttaaatgcaaaaagttattggtttgctatttagccggtgttcatttagcccatatgcaaagtgtgctttcaaaggtggttatgtctcagcactcagcgtggggcctcccattcaactgcactgagtggctgaagccctcagcctggagacaggaaaaaaagaaacgaaatgacccaccccggcaaggacccaaatacagaaataccactgagcactcatggggggatcttaagggtctgggctggctggggcagcacactgaggtcagggagaggaggtgcakctttttaggaagactttaccacgtcgttatctcctgtatgtcatcagtctccatttggatgccgggtgaatcaccgttggtccctttattccccatgtctgtcctacaccctgatgcagcacaaccattcaaacaggacggtgactgaaaaataagatggggtttctctgaagctgtccagcacccaggcaatgtgcttccttaaagccttcacgctgctggttggctgttaagcaaaatagaacagtgctctcctaactgcttacacaaccaaacttgcaatgatatgagtagtatcag

SEQ ID NO: 55210 - DNA, 600 bp, Chicken  19866894308607_1
ttattttccttttttctttttccttttttcctttttcctttttttctttttttccttcttatttgtaattgacattgctgagttcgtagaaccatcgaatcactaaggttggaaaagacccacaggatcacccagtccaaccatccacccatcaccaatagttctcattaaactcaagactacttggttatttctacgttgcttgagcatgctgcattttattaacacataaataagagagggttggtctttctcttccattctgtagaataaattgctgcatttttgcttgtggtgccmagttggatggagactccaacaagagcatgagcaccagaagcagcctgcctggccagattgctgggggttctggtgccccctatcaagaagttggtctttcagagctggctctaacacatctaccattgcactgtgttatacagcaaagctataccatgagaactctatagagcatgcgtactacgtgactctccaaaatactagctttactcttgatgatgtccctaaatgagtgatttgtcaaagtgatgtgatttgatgccaactttactgcgtgactctgctggggatttgagcctt

SEQ ID NO: 55211 - DNA, 599 bp, Chicken  19866894308608_1
  misc_feature (1)..(209): n is any nucleotide
nnnnnnnnnnnnnnnnnnnnnnnnnnnnnnnnnnnnnnnnnnnnnnnnnnnnnnnnnnnnnnnnnnnnnnnnnnnnnnnnnnnnnnnnnnnnnnnnnnnnnnnnnnnnnnnnnnnnnnnnnnnnnnnnnnnnnnnnnnnnnnnnnnnnnnnnnnnnnnnnnnnnnnnnnnnnnnnnnnnnnnnnnnnnnnnnnnnnnnnnnnnnnnnnncctgtgcatgcttcctgcatggatgcatgcatgtaaagaggtagattcttttgcctctcacaacagtaatgaaattgtaagatgtaattgygtgcaccaccctgaggttcctaaatgtatgactcaatcaaaacactaaatatgattcatgataaaatcacaagagctggaaatcatttgagttcccttagttttgattgatatcggccatagttgcacattttattacaagatccaggatcatgcctgtagattcacctagtagcatatttttgtggtattatccacgctgatgaaaaggaaagtaatatcaataggaactgcattgtatctggataatggaactttgttttctgtgccaggtgatgaaagtataagtattgagtatat

SEQ ID NO: 55212 - DNA, 600 bp, Chicken  19866894308608_2
gtgcctaaatcaactagaattaaatgaagttatgtattttgtcagtttttccaacaagggtggcctaatccatccaggcttagacatcttctgaaagttggctatgttcagatttggaatattcagcacaactgaaagagttgttacacaatccacctggatttaatgcttcaattgagaaacagctgcagttttttcaagagctattcccatgatgtttgtgtgcacacaattaagttagaaggaaggaagaatatgtctgtgtctgcggtaaaactggaacacctcttgtccagagtsaactgaaggtaggtgaaaaactcctattgatttcagtgaacagtgactgcacccttaaaaaagaagtctgtgttgaaacaaacttcattctaaaacttcacagaatttggcatgttattggaaaaagcatgcaaaaaggctctcactagaacgtcattaagtagttttatttctttcacctcattatatttgaggctttgtttttcacttatagagtgtacaaatcacaggtttaaaattggcacagagagaaatataacagcgtttagccgcatgttttagaagtgcttggagaagaag

SEQ ID NO: 55213 - DNA, 600 bp, Chicken  19866894308609_1
caccattttactgtttccattttaatgttcagaatgtactagctgctggctggcatttccatcatgttgaagtgcctatattcctctcaggtttctaatgaggcacaaagtatagagaacataaatgacagggaaaggctacagttttttaaggaccaaaatcatatatattttaaagcacttgcctaaggttattgcacaacaaagcaggaaatgtctctttcttctgcagtttacttggaaacaaggacagaattacctcttctccttgggtgaaatgtactctttagtacaaaagcraagacccagctatgcacygtcctgtactgcagagtccatgtgagttgttctgcactgatgctgcgatcagagatgatraacaacatcaatacttctaagttcttaatatacatcacaccttttttatgaattttgccacaactctagggtgattttctgagatgagaattatattctccacctgcaaattgtacttttgtgagatactgtatttaggagaagttaggcaagatgctgatggggtgaactggcacatcgagactgcacagctgacaaaagtgatttctgacaaggagagat

SEQ ID NO: 55214 - DNA, 600 bp, Chicken  19866894308609_2
attttaatgttcagaatgtactagctgctggctggcatttccatcatgttgaagtgcctatattcctctcaggtttctaatgaggcacaaagtatagagaacataaatgacagggaaaggctacagttttttaaggaccaaaatcatatatattttaaagcacttgcctaaggttattgcacaacaaagcaggaaatgtctctttcttctgcagtttacttggaaacaaggacagaattacctcttctccttgggtgaaatgtactctttagtacaaaagcraagacccagctatgcacygtcctgtactgcagagtccatgtgagttgttctgcactgatgctgcgatcagagatgatraacaacatcaatacttctaagttcttaatatacatcacaccttttttatgaattttgccacaactctagggtgattttctgagatgagaattatattctccacctgcaaattgtacttttgtgagatactgtatttaggagaagttaggcaagatgctgatggggtgaactggcacatcgagactgcacagctgacaaaagtgatttctgacaaggagagatgtaaaggaaaaataaaaa

SEQ ID NO: 55215 - DNA, 600 bp, Chicken  19866894308609_3
tattcctctcaggtttctaatgaggcacaaagtatagagaacataaatgacagggaaaggctacagttttttaaggaccaaaatcatatatattttaaagcacttgcctaaggttattgcacaacaaagcaggaaatgtctctttcttctgcagtttacttggaaacaaggacagaattacctcttctccttgggtgaaatgtactctttagtacaaaagcraagacccagctatgcacygtcctgtactgcagagtccatgtgagttgttctgcactgatgctgcgatcagagatgatraacaacatcaatacttctaagttcttaatatacatcacaccttttttatgaattttgccacaactctagggtgattttctgagatgagaattatattctccacctgcaaattgtacttttgtgagatactgtatttaggagaagttaggcaagatgctgatggggtgaactggcacatcgagactgcacagctgacaaaagtgatttctgacaaggagagatgtaaaggaaaaataaaaaagaacaaagttcagttcctggtgatttgaacagactggtgaaactgcagctgtcatcagg

SEQ ID NO: 55216 - DNA, 600 bp, Chicken  19866894308614_1
gatggccatcctttgacaaccactgtgtataatctccctgatttcaaatgaggcaactgcagtgcaggggtggattgggattgagcgatggcttgttagggacagactccagacccctggagttttcatgcaaatatatcatttgatttctatttattttttaaaagtcttattcatttgggcccttgtaatcctttgggtgttacaacaacttattttgttaatttaaaagtgtgtgaaacctttgatttcagaaggaagaaataatgaagacaggatcttgctgtcaataatctattraatgtgtttgctagtttcaaaatgatagttaatatgtgtaagtagggaaagtgaatctcagaagtaatataaaggtaaatgtgcagatttttatttcttctgctacatctttcattttgacatttttgaggattttttttttaccactttcctttttgctctgatggctttcagactgttttattttaagcttcattcagagcactcaaggtaacttcaaatttaggaatcaagttaaaaaattaatctcatcatagctctagcaatttaaaacttgaaaattagctttcaagtccatgt

SEQ ID NO: 55217 - DNA, 600 bp, Chicken  19866894308614_2
tttttttaccactttcctttttgctctgatggctttcagactgttttattttaagcttcattcagagcactcaaggtaacttcaaatttaggaatcaagttaaaaaattaatctcatcatagctctagcaatttaaaacttgaaaattagctttcaagtccatgtttgtaagccaatattgagaaacagtatcactgctagactaaatacactcagtaattttgttttttaaccttactattaggctcagaaatggtacagggaacttggttttgctgaaacaagatatgaagaaatcargactcatttaacacacgttctctcagaattagactgtcttaaacaagaagctggagacaaaactcttggaaagcagcactgcagattcatggtatgtrtgtaaacagaatggagaaaagccatattcctttagaatgaatgtttttggtgttgagacatctattattattattggcaatagatttgactcaagtttagagccagtgcagatgtaaacttgaaagtgaggagatattatgctaggcttaccatctctcttactggataatccaatgtttcagttcttcatgggcatttcag

SEQ ID NO: 55218 - DNA, 600 bp, Chicken  19866894308614_3
gttaaaaaattaatctcatcatagctctagcaatttaaaacttgaaaattagctttcaagtccatgtttgtaagccaatattgagaaacagtatcactgctagactaaatacactcagtaattttgttttttaaccttactattaggctcagaaatggtacagggaacttggttttgctgaaacaagatatgaagaaatcargactcatttaacacacgttctctcagaattagactgtcttaaacaagaagctggagacaaaactcttggaaagcagcactgcagattcatggtatgtrtgtaaacagaatggagaaaagccatattcctttagaatgaatgtttttggtgttgagacatctattattattattggcaatagatttgactcaagtttagagccagtgcagatgtaaacttgaaagtgaggagatattatgctaggcttaccatctctcttactggataatccaatgtttcagttcttcatgggcatttcagacacctttatttttttttagaactctctctatctagccagaataattctctgacacatggattttcaggtgaattaatgagattgcccatagcagaag

SEQ ID NO: 55219 - DNA, 599 bp, Chicken  19866894308617_1
  misc_feature (1)..(37): n is any nucleotide
nnnnnnnnnnnnnnnnnnnnnnnnnnnnnnnnnnnnngtggggtgaaatgggagcatggcgggaaaaatctcaatcaggaagagtgaacagaaaattctgcctctaagagaggggttaccaaaatgtaatgttaaggatgtcagaagaggggaaaaagaggatggaaggacaaggacaaacaaaagaaagcattttgatgatacttgaggtggtgaaaagaagggaaagtcataaccccacggagctatatcaaggtggggttggtgagtattaggaaaagattcttcaccaaggaacayttggacaatgctctcagatactgggtttaaattttggtggtcctgtgtggagccaggggtttgacctgttaaatcttgttggtcccttccaacttgggatattctgtgagagagaatgcagatcatcrttgcctcttatcctgaagtatagcgttaggtgctaaaasagaatctgcttcactcctacacacaatgtgctcaattgtttgatttttatgtaacaaggagcactgaagactgtgattctgtcaggtggtaggttgagggcagaaacctcactgttaatgataggagagagg

SEQ ID NO: 55220 - DNA, 600 bp, Chicken  19866894308617_2
atgttaaggatgtcagaagaggggaaaaagaggatggaaggacaaggacaaacaaaagaaagcattttgatgatacttgaggtggtgaaaagaagggaaagtcataaccccacggagctatatcaaggtggggttggtgagtattaggaaaagattcttcaccaaggaacayttggacaatgctctcagatactgggtttaaattttggtggtcctgtgtggagccaggggtttgacctgttaaatcttgttggtcccttccaacttgggatattctgtgagagagaatgcagatcatcrttgcctcttatcctgaagtatagcgttaggtgctaaaasagaatctgcttcactcctacacacaatgtgctcaattgtttgatttttatgtaacaaggagcactgaagactgtgattctgtcaggtggtaggttgagggcagaaacctcactgttaatgataggagagagggcaaagattctttgtacacaggaagcaatttaccgttatgaagctgataggggttgctgtatctgagtattttagtggcttttggatttccatacatatctggaaggaaggagacagctgaagggtgga

SEQ ID NO: 55221 - DNA, 571 bp, Chicken  19866894308617_3
ggacaaggacaaacaaaagaaagcattttgatgatacttgaggtggtgaaaagaagggaaagtcataaccccacggagctatatcaaggtggggttggtgagtattaggaaaagattcttcaccaaggaacayttggacaatgctctcagatactgggtttaaattttggtggtcctgtgtggagccaggggtttgacctgttaaatcttgttggtcccttccaacttgggatattctgtgagagagaatgcagatcatcrttgcctcttatcctgaagtatagcgttaggtgctaaaasagaatctgcttcactcctacacacaatgtgctcaattgtttgatttttatgtaacaaggagcactgaagactgtgattctgtcaggtggtaggttgagggcagaaacctcactgttaatgataggagagagggcaaagattctttgtacacaggaagcaatttaccgttatgaagctgataggggttgctgtatctgagtattttagtggcttttggatttccatacatatctggaaggaaggagacagctgaagggtggaccctgggaat

SEQ ID NO: 55222 - DNA, 600 bp, Chicken  19866894308620_1
cagggtgagacacggctcggtgtgactggttctgcttagagaactactttaccagctttacttcaacagcttcttgtggcagacatggcggggtcttggagctggaggccaactgctcagggccaactcctctcctgctcttccttgaagtgtattgagaggaatccactgctggaacgcaccagcagaacctcgtggggacactgctggtcccagctctgacccaactcacgtccttaggggctccagcagagccctctgtgtgggtctgtcctggtcacgtcactgctgttaggaacygtgctgcacgtgagcagagccccagactctgttctatcagcgtttccttccaatatcgcttccgacagtatttgtcaaggctgcacatagttaatgattcgggatctcttgctttcatgtacggtttttcccagctttccacgcacaccataaatatcagccttaagccccgtaatttcccgcagggttctgctttcaaaacaactcttctgttgctcaagaaaagagggctgcctttgtttttcctatagctgagataattgtaaaccaacgcttatcggctaaaggttacagcagcct

SEQ ID NO: 55223 - DNA, 600 bp, Chicken  19866894308625_1
tccaggtaattctctgcagagctcctcccaagtagatcatcccccctaatctgtaatgatgtatgcagttattcctcctcaggtgcaagactctacacttgctcttgttacacttcatcagcttcctctctgtctagctctccagtctgtccagatcttgttgaatggcagcacagacttccctcccagctttgtatcatcaacaaacttactgaggatggactctatcccttcatccaggttgttgaacaatatgttgaacaaatctggacccagcattaaatctggggagcactgctrtttacggactctcaaccagactctgcgcctctgatgacagtcctctgaactctgccagtcagctagttgttaatccaccttaccatctactcatttatcccacacttcctcttctttgttactcctcctgcagtggctggagggctcccccagctgcagcagtttaggggtatgatgggctgtttgcatcaatgtcatctctgtctggaaacagctatgtttggcttagatatccttggttgatatctatttcttctttcctatacatggagttaaaacaaagtagtagaaacctgatat

SEQ ID NO: 55224 - DNA, 600 bp, Chicken  19866894308630_1
atggccttttaaataagagatcatcttttttccctggaaaattttagttttctcatgggaagatgagagcacgctcagtctaagcactaaagaaactcatgttttgcttggcagacttcttcagtttgtctgggggtggttgctttttgcctccaacctgtcttgtagatgtatcacttctagcgtttcatggtatgaattcagacagtagcagacaattaccaaactggggtatttctgatctagatagaggcatgtccttattagacacagtttctcttccttgtgataaaacttttsgtctattttgatatcttggaaaatctgtataactgtttttcaaggcacagtaaagccagtttttcaaggcacagtaaaccctcttttgcagtatcagtagtggtgtaaattggcacaaactcattggagttgatgtatctactttactttttggctgccggtgtttacagactaagatgtatgatatcatatatatgataaacccaaccccatattctggggcattaagactaaaaacaatctcatcactctccaaggtccagaayatgacctgrtgcgtcttgcaagtcttagccatgt

SEQ ID NO: 55225 - DNA, 600 bp, Chicken  19866894308630_2
gacacagtttctcttccttgtgataaaacttttsgtctattttgatatcttggaaaatctgtataactgtttttcaaggcacagtaaagccagtttttcaaggcacagtaaaccctcttttgcagtatcagtagtggtgtaaattggcacaaactcattggagttgatgtatctactttactttttggctgccggtgtttacagactaagatgtatgatatcatatatatgataaacccaaccccatattctggggcattaagactaaaaacaatctcatcactctccaaggtccagaayatgacctgrtgcgtcttgcaagtcttagccatgtgttatgccattgctgatggtggtttgctgttagagttgtaaaagtggcaaggattcagacagagctgccctctcccagggaatcacatgagcttggaaacagaaataaacttcacatggcatttcttctaactggctgcttgctcctctgagatatgtgatgtatcaagaggacagtgccagcaaatgcatcactcttcacttactatgatgttatttctagaacagaaatctgataaaatggtcagatgaagggtagatttagct

SEQ ID NO: 55226 - DNA, 600 bp, Chicken  19866894308630_3
tctcttccttgtgataaaacttttsgtctattttgatatcttggaaaatctgtataactgtttttcaaggcacagtaaagccagtttttcaaggcacagtaaaccctcttttgcagtatcagtagtggtgtaaattggcacaaactcattggagttgatgtatctactttactttttggctgccggtgtttacagactaagatgtatgatatcatatatatgataaacccaaccccatattctggggcattaagactaaaaacaatctcatcactctccaaggtccagaayatgacctgrtgcgtcttgcaagtcttagccatgtgttatgccattgctgatggtggtttgctgttagagttgtaaaagtggcaaggattcagacagagctgccctctcccagggaatcacatgagcttggaaacagaaataaacttcacatggcatttcttctaactggctgcttgctcctctgagatatgtgatgtatcaagaggacagtgccagcaaatgcatcactcttcacttactatgatgttatttctagaacagaaatctgataaaatggtcagatgaagggtagatttagctgttctccag

SEQ ID NO: 55227 - DNA, 600 bp, Chicken  19866894308634_1
cctgatttgaggagcaatgagattataattcacactggttgcaatggatattacaggtcacaatgcattgtgttggtaagatctgattgacaaaatactgtgggtttttttgtttgttgtttgtttgttttcaaatgaatgcataaacttatatactttaagatgtttacaggaaacaaatatctgacatatgatgaaacagtgacctcaaaactgactcactcaacgaaggagaacaatgaggaagcatctgtaaagaaaggttctgccagaaaaagacaggtaaaagacccacacacrtacacccttagtccartctatgagaactcacattaagaaatgaaaaggaaaatgtaagttttatcattttatcatgttctctttaaaatggaartgaagaaatattactgagcccactctcagtaaaattaatcctaatgatcagttatgctagtattacttcaaatgtgcattttacccttttgtctcctgcagaagttagtactagaatgaaagctttaatgatgttacataacgtaaatatatttctgaagtaaaactgtacagacaaaagttctgtctaacttaactatgggtatt

SEQ ID NO: 55228 - DNA, 600 bp, Chicken  19866894308634_2
atgagattataattcacactggttgcaatggatattacaggtcacaatgcattgtgttggtaagatctgattgacaaaatactgtgggtttttttgtttgttgtttgtttgttttcaaatgaatgcataaacttatatactttaagatgtttacaggaaacaaatatctgacatatgatgaaacagtgacctcaaaactgactcactcaacgaaggagaacaatgaggaagcatctgtaaagaaaggttctgccagaaaaagacaggtaaaagacccacacacrtacacccttagtccartctatgagaactcacattaagaaatgaaaaggaaaatgtaagttttatcattttatcatgttctctttaaaatggaartgaagaaatattactgagcccactctcagtaaaattaatcctaatgatcagttatgctagtattacttcaaatgtgcattttacccttttgtctcctgcagaagttagtactagaatgaaagctttaatgatgttacataacgtaaatatatttctgaagtaaaactgtacagacaaaagttctgtctaacttaactatgggtattcttattggttgtgtaa

SEQ ID NO: 55229 - DNA, 600 bp, Chicken  19866894308634_3
atactgtgggtttttttgtttgttgtttgtttgttttcaaatgaatgcataaacttatatactttaagatgtttacaggaaacaaatatctgacatatgatgaaacagtgacctcaaaactgactcactcaacgaaggagaacaatgaggaagcatctgtaaagaaaggttctgccagaaaaagacaggtaaaagacccacacacrtacacccttagtccartctatgagaactcacattaagaaatgaaaaggaaaatgtaagttttatcattttatcatgttctctttaaaatggaartgaagaaatattactgagcccactctcagtaaaattaatcctaatgatcagttatgctagtattacttcaaatgtgcattttacccttttgtctcctgcagaagttagtactagaatgaaagctttaatgatgttacataacgtaaatatatttctgaagtaaaactgtacagacaaaagttctgtctaacttaactatgggtattcttattggttgtgtaaatgttacatgcatcttacatgcttgaattcagcattacttgggtagaaatgaactcctaaagactatttatgaatcga

SEQ ID NO: 55230 - DNA, 600 bp, Chicken  19866894308636_1
caagcttgtgagaatgaattcaagagagagcagctgtgagatggagaggcagcagatgcctgtctacacaagcagttaattcagagtgaaaaaaataaaaggaaggaagaatattctgagcctagtgaattagttgttgtcgtggaggttataggaggtaaatgtgccttttttagaaatacctattgccattcattttctgaggctggacagtctaaaaaggttttagttcactttactgatgcatttgccccatttccctttataaataattccttatcttgaagcatttccttctcyagaagtctaatgctttaaatgttcctcactgtttgcttgcagacttgaaattatttgtgtgctatagaagagggagaaaatttcagaggatctttctatatggcatgcaggctttttcctttcccgtttatcatgggaaaaatacaaacattgccttttgcttgcaattttaatgtgtgcaggggtacctattgcagtcttaaatggctctgtactcawaaaaytgtacctaagaccttgaaattttacatgacataaaarcataaggaagttattgttttamtctagagggagtgcatt

SEQ ID NO: 55231 - DNA, 600 bp, Chicken  19866894308636_2
aaggttttagttcactttactgatgcatttgccccatttccctttataaataattccttatcttgaagcatttccttctcyagaagtctaatgctttaaatgttcctcactgtttgcttgcagacttgaaattatttgtgtgctatagaagagggagaaaatttcagaggatctttctatatggcatgcaggctttttcctttcccgtttatcatgggaaaaatacaaacattgccttttgcttgcaattttaatgtgtgcaggggtacctattgcagtcttaaatggctctgtactcawaaaaytgtacctaagaccttgaaattttacatgacataaaarcataaggaagttattgttttamtctagagggagtgcattttgaaaagaggtaggctcaaggatcaaaattagcatktttgtatggacttcccatgctccatattgtagagtagtcaggactggcatgctagtccttgtctagataaagcaggaaaattcaagtcatactttaagtagtgctcgcttgctagaattggcttatgatctaagtgatgaatgtgtcacacytgcatttctttcatgctaagcttaaaatcc

SEQ ID NO: 55232 - DNA, 600 bp, Chicken  19866894308636_3
tttagttcactttactgatgcatttgccccatttccctttataaataattccttatcttgaagcatttccttctcyagaagtctaatgctttaaatgttcctcactgtttgcttgcagacttgaaattatttgtgtgctatagaagagggagaaaatttcagaggatctttctatatggcatgcaggctttttcctttcccgtttatcatgggaaaaatacaaacattgccttttgcttgcaattttaatgtgtgcaggggtacctattgcagtcttaaatggctctgtactcawaaaaytgtacctaagaccttgaaattttacatgacataaaarcataaggaagttattgttttamtctagagggagtgcattttgaaaagaggtaggctcaaggatcaaaattagcatktttgtatggacttcccatgctccatattgtagagtagtcaggactggcatgctagtccttgtctagataaagcaggaaaattcaagtcatactttaagtagtgctcgcttgctagaattggcttatgatctaagtgatgaatgtgtcacacytgcatttctttcatgctaagcttaaaatcctagca

SEQ ID NO: 55233 - DNA, 600 bp, Chicken  19866894308636_4
tttataaataattccttatcttgaagcatttccttctcyagaagtctaatgctttaaatgttcctcactgtttgcttgcagacttgaaattatttgtgtgctatagaagagggagaaaatttcagaggatctttctatatggcatgcaggctttttcctttcccgtttatcatgggaaaaatacaaacattgccttttgcttgcaattttaatgtgtgcaggggtacctattgcagtcttaaatggctctgtactcawaaaaytgtacctaagaccttgaaattttacatgacataaaarcataaggaagttattgttttamtctagagggagtgcattttgaaaagaggtaggctcaaggatcaaaattagcatktttgtatggacttcccatgctccatattgtagagtagtcaggactggcatgctagtccttgtctagataaagcaggaaaattcaagtcatactttaagtagtgctcgcttgctagaattggcttatgatctaagtgatgaatgtgtcacacytgcatttctttcatgctaagcttaaaatcctagcaacactgacagtctttcacaatttagatgaaygaaata

SEQ ID NO: 55234 - DNA, 600 bp, Chicken  19866894308636_5
gaagcatttccttctcyagaagtctaatgctttaaatgttcctcactgtttgcttgcagacttgaaattatttgtgtgctatagaagagggagaaaatttcagaggatctttctatatggcatgcaggctttttcctttcccgtttatcatgggaaaaatacaaacattgccttttgcttgcaattttaatgtgtgcaggggtacctattgcagtcttaaatggctctgtactcawaaaaytgtacctaagaccttgaaattttacatgacataaaarcataaggaagttattgttttamtctagagggagtgcattttgaaaagaggtaggctcaaggatcaaaattagcatktttgtatggacttcccatgctccatattgtagagtagtcaggactggcatgctagtccttgtctagataaagcaggaaaattcaagtcatactttaagtagtgctcgcttgctagaattggcttatgatctaagtgatgaatgtgtcacacytgcatttctttcatgctaagcttaaaatcctagcaacactgacagtctttcacaatttagatgaaygaaataaacatctttgttatgacacatg

SEQ ID NO: 55235 - DNA, 600 bp, Chicken  19866894308636_6
tgcagacttgaaattatttgtgtgctatagaagagggagaaaatttcagaggatctttctatatggcatgcaggctttttcctttcccgtttatcatgggaaaaatacaaacattgccttttgcttgcaattttaatgtgtgcaggggtacctattgcagtcttaaatggctctgtactcawaaaaytgtacctaagaccttgaaattttacatgacataaaarcataaggaagttattgttttamtctagagggagtgcattttgaaaagaggtaggctcaaggatcaaaattagcatktttgtatggacttcccatgctccatattgtagagtagtcaggactggcatgctagtccttgtctagataaagcaggaaaattcaagtcatactttaagtagtgctcgcttgctagaattggcttatgatctaagtgatgaatgtgtcacacytgcatttctttcatgctaagcttaaaatcctagcaacactgacagtctttcacaatttagatgaaygaaataaacatctttgttatgacacatgagaatgttgtttttccaaaaaaaaatcytaaaagttaaggtctgtaaatgctga

SEQ ID NO: 55236 - DNA, 600 bp, Chicken  19866894308636_7
tattgcagtcttaaatggctctgtactcawaaaaytgtacctaagaccttgaaattttacatgacataaaarcataaggaagttattgttttamtctagagggagtgcattttgaaaagaggtaggctcaaggatcaaaattagcatktttgtatggacttcccatgctccatattgtagagtagtcaggactggcatgctagtccttgtctagataaagcaggaaaattcaagtcatactttaagtagtgctcgcttgctagaattggcttatgatctaagtgatgaatgtgtcacacytgcatttctttcatgctaagcttaaaatcctagcaacactgacagtctttcacaatttagatgaaygaaataaacatctttgttatgacacatgagaatgttgtttttccaaaaaaaaatcytaaaagttaaggtctgtaaatgctgagcatcaaagaccatcagcttctgtgaaggataaaacaagtttctgcttggcaaacccatttcagaacacacagtcacatattccaggcatcaacaactatgtacctgtaaagcagacttgaccttgtggttttcatccacaagcaggttttc

SEQ ID NO: 55237 - DNA, 565 bp, Chicken  19866894308636_8
taaaarcataaggaagttattgttttamtctagagggagtgcattttgaaaagaggtaggctcaaggatcaaaattagcatktttgtatggacttcccatgctccatattgtagagtagtcaggactggcatgctagtccttgtctagataaagcaggaaaattcaagtcatactttaagtagtgctcgcttgctagaattggcttatgatctaagtgatgaatgtgtcacacytgcatttctttcatgctaagcttaaaatcctagcaacactgacagtctttcacaatttagatgaaygaaataaacatctttgttatgacacatgagaatgttgtttttccaaaaaaaaatcytaaaagttaaggtctgtaaatgctgagcatcaaagaccatcagcttctgtgaaggataaaacaagtttctgcttggcaaacccatttcagaacacacagtcacatattccaggcatcaacaactatgtacctgtaaagcagacttgaccttgtggttttcatccacaagcaggttttcttgttatgattattgtaacattatttttgtt

SEQ ID NO: 55238 - DNA, 509 bp, Chicken  19866894308636_9
taggctcaaggatcaaaattagcatktttgtatggacttcccatgctccatattgtagagtagtcaggactggcatgctagtccttgtctagataaagcaggaaaattcaagtcatactttaagtagtgctcgcttgctagaattggcttatgatctaagtgatgaatgtgtcacacytgcatttctttcatgctaagcttaaaatcctagcaacactgacagtctttcacaatttagatgaaygaaataaacatctttgttatgacacatgagaatgttgtttttccaaaaaaaaatcytaaaagttaaggtctgtaaatgctgagcatcaaagaccatcagcttctgtgaaggataaaacaagtttctgcttggcaaacccatttcagaacacacagtcacatattccaggcatcaacaactatgtacctgtaaagcagacttgaccttgtggttttcatccacaagcaggttttcttgttatgattattgtaacattatttttgtt

SEQ ID NO: 55239 - DNA, 600 bp, Chicken  19866894308641_1
catttctgtgctgagaaaatgacacaggtatttctctaatttaggaaggaagctcaatattacatgtgtatgcgctgtgtgcagcatcatccgaggcattacataactccaagaacagcacacagagctgctccggtgttgttaaagttggcattgaagaggaacagcgtgcttggctgaacaaacacttcccctattaagtaagatatattgcagacatggaggtgtccttggcattcttgtaattttgtacagcttttaccactgtgctaaatttaaactggaaatatcgtttccatktaattattaggaaaggaacagttagaattttcatcctgatctctccttgctaatgaccttccatgtcttctgggcagctaagcgcactttttctctgattcactgcacccatctgaaagatgattaaaatgtactctgtgcattacatcttataaatctactgatagcagttattcccagtgagaaataagggtgttgtgtgggcagtatgagttggttacttctactcaagcttttcctcaatttcagtgagcaggaatgagttcacttttggcaaccgatgttttctgagaagaaaag

SEQ ID NO: 55240 - DNA, 600 bp, Chicken  19866894308645_1
aattccagctgatataaataaggtgttatttcttggtaatatgtcgatgcttttgggttaaattaagactgactttgatattgcaggtgtggagagctgtttacgagtaaccagatgtaaacaaatcattcaaggacttcctgaacacaattacattgttctgaaatatctgatatgctttctccatatggtgagtatataggaaaaaattccaaaagcagaaccaaacatttctttaaatctaataaagcttggtgctaaacaatggtctcagccatacagtaagcatgaaattctttrtatgtaagaaatactactatgtgaatttaaatgagaccgtgccttcactgggatgtttaaaaatccgctctcctctgttacccatcactaatgtatgttttagtgactttttttcctattttggagtgaaaaatattaaacatagtagttgtgtaacttttagtgctgctgaaaaagtatataaaatgawtttttttccccaaagtgtaaattttggcacctaaaacattaaataaatattcrtgtcactttagaaaattataaaaaatattggtgacctttaggaaagtaatcagcaaa

SEQ ID NO: 55241 - DNA, 538 bp, Chicken  19866894308645_2
gtgagtatataggaaaaaattccaaaagcagaaccaaacatttctttaaatctaataaagcttggtgctaaacaatggtctcagccatacagtaagcatgaaattctttrtatgtaagaaatactactatgtgaatttaaatgagaccgtgccttcactgggatgtttaaaaatccgctctcctctgttacccatcactaatgtatgttttagtgactttttttcctattttggagtgaaaaatattaaacatagtagttgtgtaacttttagtgctgctgaaaaagtatataaaatgawtttttttccccaaagtgtaaattttggcacctaaaacattaaataaatattcrtgtcactttagaaaattataaaaaatattggtgacctttaggaaagtaatcagcaaaatattttcaattttactttaaaaaccacattttcctgtttaaaataacctttaattctgtaacttagtacattcttgaacataaatagttaatcatgcccttttgcagcattttggtgtacttcagaa

SEQ ID NO: 55242 - DNA, 485 bp, Chicken  19866894308645_3
aataaagcttggtgctaaacaatggtctcagccatacagtaagcatgaaattctttrtatgtaagaaatactactatgtgaatttaaatgagaccgtgccttcactgggatgtttaaaaatccgctctcctctgttacccatcactaatgtatgttttagtgactttttttcctattttggagtgaaaaatattaaacatagtagttgtgtaacttttagtgctgctgaaaaagtatataaaatgawtttttttccccaaagtgtaaattttggcacctaaaacattaaataaatattcrtgtcactttagaaaattataaaaaatattggtgacctttaggaaagtaatcagcaaaatattttcaattttactttaaaaaccacattttcctgtttaaaataacctttaattctgtaacttagtacattcttgaacataaatagttaatcatgcccttttgcagcattttggtgtacttcagaa

SEQ ID NO: 55243 - DNA, 599 bp, Chicken  19866894308650_1
  misc_feature (1)..(153): n is any nucleotide
nnnnnnnnnnnnnnnnnnnnnnnnnnnnnnnnnnnnnnnnnnnnnnnnnnnnnnnnnnnnnnnnnnnnnnnnnnnnnnnnnnnnnnnnnnnnnnnnnnnnnnnnnnnnnnnnnnnnnnnnnnnnnnnnnnnnnnnnnnnnnnnnnnnnnnnnnagtttttaatgatatccttattacctgaggagctgagttgagagcatctctgaaatctcagcttgaaaccaaaaatggaatacatgacagggctatcatccacagcagagatagaagaaccaaaagtgttagcctctggagccagtktgacagcacattattgttttttattttattactgttgtctttaggaactaagaggcacttgctcaagtttattcactttctgagactaatttatgttctgagctcacccgtgatgttttccttagtgctatggaatttggttgtactaacagtgaaggaaaaatccaggaggttgatctggagacsgtcataatttatggaaggaggaaacacagtgagaaatgtcatcattctggttttcagttatggaagaaaactatgagattctttttgcccagatattatggcagacagaactc

SEQ ID NO: 55244 - DNA, 600 bp, Chicken  19866894308650_2
tgagttgagagcatctctgaaatctcagcttgaaaccaaaaatggaatacatgacagggctatcatccacagcagagatagaagaaccaaaagtgttagcctctggagccagtktgacagcacattattgttttttattttattactgttgtctttaggaactaagaggcacttgctcaagtttattcactttctgagactaatttatgttctgagctcacccgtgatgttttccttagtgctatggaatttggttgtactaacagtgaaggaaaaatccaggaggttgatctggagacsgtcataatttatggaaggaggaaacacagtgagaaatgtcatcattctggttttcagttatggaagaaaactatgagattctttttgcccagatattatggcagacagaactccagactttggctgcgactatcgcacaaaacagagttaatcactttggaacctgggaagctaatttactacttggctctgaaaaatgagaagcctgggaatctttatgcaaagcatatttaggaggaaataactgtaatgaagtgaaaaataatgagtgagccctaaaagaacacttttggaaaaatg

SEQ ID NO: 55245 - DNA, 600 bp, Chicken  19866894308653_1
ttactaacctatggagtggacctgatgatggactgacttggactcaccgtacattgacacatcaagaaatgcagttcccaactttcagcagcagttaaaaagacccagagttacacctcagggatagtacattcgaaaagataatcatttagatatttaggccatgactatcaatgaatctaatttttttttcgttcagtgattgaaccgcaaatgtgagtgaggaagacatttagtaacagtcttttaagaggacaacttaaaaaatcctgccaaatactcaatatcaaacagaagttymagcttaaagtcgcacataattgtcaccgatgcaaaaaatcagagcgtactctctaaaacgttaactatattgttctgcttaaaattatkcagctcacgccagtgagaagtkcaaggcaaggctgttagggttgcagtgctgactgtgccactatgacaggtgtttcttgtcctaacagctctgttaacccttctcacagtttatgtttctagaaaaggattaaaacctgttaaccaatgycttcgtttatgctatagcctctgcaccaggtcagcacagatacctccaaattaactcat

SEQ ID NO: 55246 - DNA, 600 bp, Chicken  19866894308653_2
tactaacctatggagtggacctgatgatggactgacttggactcaccgtacattgacacatcaagaaatgcagttcccaactttcagcagcagttaaaaagacccagagttacacctcagggatagtacattcgaaaagataatcatttagatatttaggccatgactatcaatgaatctaatttttttttcgttcagtgattgaaccgcaaatgtgagtgaggaagacatttagtaacagtcttttaagaggacaacttaaaaaatcctgccaaatactcaatatcaaacagaagttymagcttaaagtcgcacataattgtcaccgatgcaaaaaatcagagcgtactctctaaaacgttaactatattgttctgcttaaaattatkcagctcacgccagtgagaagtkcaaggcaaggctgttagggttgcagtgctgactgtgccactatgacaggtgtttcttgtcctaacagctctgttaacccttctcacagtttatgtttctagaaaaggattaaaacctgttaaccaatgycttcgtttatgctatagcctctgcaccaggtcagcacagatacctccaaattaactcatg

SEQ ID NO: 55247 - DNA, 600 bp, Chicken  19866894308653_3
gcagttaaaaagacccagagttacacctcagggatagtacattcgaaaagataatcatttagatatttaggccatgactatcaatgaatctaatttttttttcgttcagtgattgaaccgcaaatgtgagtgaggaagacatttagtaacagtcttttaagaggacaacttaaaaaatcctgccaaatactcaatatcaaacagaagttymagcttaaagtcgcacataattgtcaccgatgcaaaaaatcagagcgtactctctaaaacgttaactatattgttctgcttaaaattatkcagctcacgccagtgagaagtkcaaggcaaggctgttagggttgcagtgctgactgtgccactatgacaggtgtttcttgtcctaacagctctgttaacccttctcacagtttatgtttctagaaaaggattaaaacctgttaaccaatgycttcgtttatgctatagcctctgcaccaggtcagcacagatacctccaaattaactcatggtatcttggaataacaagaccacttctgtacagcctgtactgattattgcagtaagttgcccatcagccagtcagtcctcatctggccg

SEQ ID NO: 55248 - DNA, 600 bp, Chicken  19866894308653_4
acacctcagggatagtacattcgaaaagataatcatttagatatttaggccatgactatcaatgaatctaatttttttttcgttcagtgattgaaccgcaaatgtgagtgaggaagacatttagtaacagtcttttaagaggacaacttaaaaaatcctgccaaatactcaatatcaaacagaagttymagcttaaagtcgcacataattgtcaccgatgcaaaaaatcagagcgtactctctaaaacgttaactatattgttctgcttaaaattatkcagctcacgccagtgagaagtkcaaggcaaggctgttagggttgcagtgctgactgtgccactatgacaggtgtttcttgtcctaacagctctgttaacccttctcacagtttatgtttctagaaaaggattaaaacctgttaaccaatgycttcgtttatgctatagcctctgcaccaggtcagcacagatacctccaaattaactcatggtatcttggaataacaagaccacttctgtacagcctgtactgattattgcagtaagttgcccatcagccagtcagtcctcatctggccgctccttcctactacgttgtttg

SEQ ID NO: 55249 - DNA, 600 bp, Chicken  19866894308653_5
gtcttttaagaggacaacttaaaaaatcctgccaaatactcaatatcaaacagaagttymagcttaaagtcgcacataattgtcaccgatgcaaaaaatcagagcgtactctctaaaacgttaactatattgttctgcttaaaattatkcagctcacgccagtgagaagtkcaaggcaaggctgttagggttgcagtgctgactgtgccactatgacaggtgtttcttgtcctaacagctctgttaacccttctcacagtttatgtttctagaaaaggattaaaacctgttaaccaatgycttcgtttatgctatagcctctgcaccaggtcagcacagatacctccaaattaactcatggtatcttggaataacaagaccacttctgtacagcctgtactgattattgcagtaagttgcccatcagccagtcagtcctcatctggccgctccttcctactacgttgtttgagcctccatcagtctctagctatcttaaagccaagagcacacaaatctcatttcttctctattgggaaaaaaaaaattgcattagaggaccaagttccccccctgggcccctcaggcactcactgcaat

SEQ ID NO: 55250 - DNA, 600 bp, Chicken  19866894308656_1
aggatgataaactagtgcatgtagggggaaaaataaagtgaaaatgaaaataggactagggaataaccatcgcaagagtgcatgaatgatttctatcagttttttaattctaaaatatatcagaagtccagacttaggccagttgaaccaaatccaaaaactttacttcatgttatactgcctttctcagatgtggactggagagtcctcaaaaagacaccttctgaaaaacaaaaccaccaccaagcatgaccttgatgctttgctgtgaaaatgaatgacaaatatttttcaatctcyctttttctcttgaattaacattttactcaagaagagactgttcaagcaataaacgtggaagcattcagtgctaagcagtgatggagaactagctgattcactgtacgttttctacctgtaggacttcaagcaaaggagaggctagttgtttcagtcatagtgctgaaagcagaggtcagcaaaatgtaagcaagaaattagatgtgtttagaaaacaaacaaaaaccagaatcattaaccatggagggaatgcaacaaacactgttagtcactcaaagtctttaaatcaagattggttac

SEQ ID NO: 55251 - DNA, 600 bp, Chicken  19866894308662_1
atatgtgatgcacattagtgtaacaaaaccatttttgtaaacattttctccaacataacatgtgcataagataaaaaataaaaacactgcagtcatacaagttagggttactttgacttaaagatacagaaaattattacttattaaagcttaaaactaaacctaggagcttttcttttcttctttgcttacaaaagcactgtttagagttcgatgtctgtatacgtagtggttttgtaatactgggtttaccttgccatgtcgctgtcctggcacttctacagaggcgaagccggaggsagcttcccctcgggagcctctcarygccaacagcgtgcgtccgtcacctgggaatccctaacagcactggagcatcttcctctgggagaacagcrtcagctttcaaggactacattgattttggagcacagagcgctggaagagttaaatcacgcagactgacattgggtcaaatcagctggggtaagctacgctacagggccgatgtgtgattacacccgcgtcgcttctccgagtcccctttagttcgtgagagtacaaaaggttcatcgttcctctggctgaccgcgccaggcatga

SEQ ID NO: 55252 - DNA, 600 bp, Chicken  19866894308662_2
aaaaccatttttgtaaacattttctccaacataacatgtgcataagataaaaaataaaaacactgcagtcatacaagttagggttactttgacttaaagatacagaaaattattacttattaaagcttaaaactaaacctaggagcttttcttttcttctttgcttacaaaagcactgtttagagttcgatgtctgtatacgtagtggttttgtaatactgggtttaccttgccatgtcgctgtcctggcacttctacagaggcgaagccggaggsagcttcccctcgggagcctctcarygccaacagcgtgcgtccgtcacctgggaatccctaacagcactggagcatcttcctctgggagaacagcrtcagctttcaaggactacattgattttggagcacagagcgctggaagagttaaatcacgcagactgacattgggtcaaatcagctggggtaagctacgctacagggccgatgtgtgattacacccgcgtcgcttctccgagtcccctttagttcgtgagagtacaaaaggttcatcgttcctctggctgaccgcgccaggcatgaaaagaacacatccttcaccttcaa

SEQ ID NO: 55253 - DNA, 600 bp, Chicken  19866894308662_3
aaaccatttttgtaaacattttctccaacataacatgtgcataagataaaaaataaaaacactgcagtcatacaagttagggttactttgacttaaagatacagaaaattattacttattaaagcttaaaactaaacctaggagcttttcttttcttctttgcttacaaaagcactgtttagagttcgatgtctgtatacgtagtggttttgtaatactgggtttaccttgccatgtcgctgtcctggcacttctacagaggcgaagccggaggsagcttcccctcgggagcctctcarygccaacagcgtgcgtccgtcacctgggaatccctaacagcactggagcatcttcctctgggagaacagcrtcagctttcaaggactacattgattttggagcacagagcgctggaagagttaaatcacgcagactgacattgggtcaaatcagctggggtaagctacgctacagggccgatgtgtgattacacccgcgtcgcttctccgagtcccctttagttcgtgagagtacaaaaggttcatcgttcctctggctgaccgcgccaggcatgaaaagaacacatccttcaccttcaac

SEQ ID NO: 55254 - DNA, 600 bp, Chicken  19866894308662_4
tacaagttagggttactttgacttaaagatacagaaaattattacttattaaagcttaaaactaaacctaggagcttttcttttcttctttgcttacaaaagcactgtttagagttcgatgtctgtatacgtagtggttttgtaatactgggtttaccttgccatgtcgctgtcctggcacttctacagaggcgaagccggaggsagcttcccctcgggagcctctcarygccaacagcgtgcgtccgtcacctgggaatccctaacagcactggagcatcttcctctgggagaacagcrtcagctttcaaggactacattgattttggagcacagagcgctggaagagttaaatcacgcagactgacattgggtcaaatcagctggggtaagctacgctacagggccgatgtgtgattacacccgcgtcgcttctccgagtcccctttagttcgtgagagtacaaaaggttcatcgttcctctggctgaccgcgccaggcatgaaaagaacacatccttcaccttcaacgctatccaaaagtcacacggttaaaaaaaatatttctaggtactcctctgccagcaaatgtaaggctttc

SEQ ID NO: 55255 - DNA, 600 bp, Chicken  19866894308664_1
tctgcacaaaattcagaggctttccttagctacaggcacctgatatactaagaggtggagaatgatcacaactaaaagtctcagaatttaaaaattagctgttctacttcaactctcttgcagagaagtagaagacatgattatacagcacagcaacaagggaagcttgtagttttggataaagtacacagctcctcaatagaactttttagcaccttgtactggagtcaaggtactttactaatactagtgagctaatcgtaaaaaatattttgtcaggaaagcatcaacctcaacttsagaatgttaaaaacagcaacaacaaaaaactacccatcagttatgatatacttaccttcagcttccttctagcattgaactttctcaagcattccacagtctcctgcctgtgcatcattgaagcaacagtagatcgttgctgaaaaacaggaacacaaaaataaatcagcaacttagcctaactaaatcatctgagggagttctcccgactagcacatcatcacaatatggaaaccaacatggctgaacctctcatcactgcatggctgcaaatcactgcggccgattcatagcttacaa

SEQ ID NO: 55256 - DNA, 599 bp, Chicken  19866894308670_1
  misc_feature (1)..(162): n is any nucleotide
nnnnnnnnnnnnnnnnnnnnnnnnnnnnnnnnnnnnnnnnnnnnnnnnnnnnnnnnnnnnnnnnnnnnnnnnnnnnnnnnnnnnnnnnnnnnnnnnnnnnnnnnnnnnnnnnnnnnnnnnnnnnnnnnnnnnnnnnnnnnnnnnnnnnnnnnnnnnnnnnnngacaactcgccaaagctttgctaagcaaggcagggccgaggcttcagtcagacttaaatgatgaaggcctaggaaaatcaccctgttgaaggatctgtgttcacaacaagaggttacaatctgagttgctgttatgtrtttcatgctgtcacaccrggatggtcacagggaagtgaatctgcagtgaaggtacaagagtttttatttacctaaattcctaatttgartgggctttatagaagatttaatgtgacttctcctttggaatgagggaggctatcctaggagatgagtgagtttgggctactttttttagctgtgttgctcacactttgttgaataacatgttctttctgatgtgtgtaattgtacttcggtgctaagagacagcactttcccttttagctgaattgcatgttccggaaaaactgaatttc

SEQ ID NO: 55257 - DNA, 599 bp, Chicken  19866894308670_2
  misc_feature (1)..(144): n is any nucleotide
nnnnnnnnnnnnnnnnnnnnnnnnnnnnnnnnnnnnnnnnnnnnnnnnnnnnnnnnnnnnnnnnnnnnnnnnnnnnnnnnnnnnnnnnnnnnnnnnnnnnnnnnnnnnnnnnnnnnnnnnnnnnnnnnnnnnnnnnnnnnnnnngacaactcgccaaagctttgctaagcaaggcagggccgaggcttcagtcagacttaaatgatgaaggcctaggaaaatcaccctgttgaaggatctgtgttcacaacaagaggttacaatctgagttgctgttatgtrtttcatgctgtcacaccrggatggtcacagggaagtgaatctgcagtgaaggtacaagagtttttatttacctaaattcctaatttgartgggctttatagaagatttaatgtgacttctcctttggaatgagggaggctatcctaggagatgagtgagtttgggctactttttttagctgtgttgctcacactttgttgaataacatgttctttctgatgtgtgtaattgtacttcggtgctaagagacagcactttcccttttagctgaattgcatgttccggaaaaactgaatttcagtaattgaaaaaataat

SEQ ID NO: 55258 - DNA, 599 bp, Chicken  19866894308670_3
  misc_feature (1)..(73): n is any nucleotide
nnnnnnnnnnnnnnnnnnnnnnnnnnnnnnnnnnnnnnnnnnnnnnnnnnnnnnnnnnnnnnnnnnnnnnnnngacaactcgccaaagctttgctaagcaaggcagggccgaggcttcagtcagacttaaatgatgaaggcctaggaaaatcaccctgttgaaggatctgtgttcacaacaagaggttacaatctgagttgctgttatgtrtttcatgctgtcacaccrggatggtcacagggaagtgaatctgcagtgaaggtacaagagtttttatttacctaaattcctaatttgartgggctttatagaagatttaatgtgacttctcctttggaatgagggaggctatcctaggagatgagtgagtttgggctactttttttagctgtgttgctcacactttgttgaataacatgttctttctgatgtgtgtaattgtacttcggtgctaagagacagcactttcccttttagctgaattgcatgttccggaaaaactgaatttcagtaattgaaaaaataattctgctttacagatcttgggcaagatcgtcacaaaatgcctgcagaccgctgaggaactgtctttaaagtc

SEQ ID NO: 55259 - DNA, 600 bp, Chicken  19866894308670_4
tccgttgttgctaaatcgctgtttgacaaggtatatgaattcagtagtaaaaagaaaacgaattctcttcgggaagttcactttctgttgcatccaaaagacgtaaataatattcaggtgagttaccatgcttttctctctcagttacatgctattctgtttggatctatctcgtggtatgtggctatgtgttgttctccagacaatctgcaggatgcttgctatcataccgaagcagagagcagtttgctgacagtctcttttgcacatagcttgtcatgtacagccctgcttgcttcytgtccttttctattccctggcaataatgcagatgaaagtgtaattactcttttatcttatgaacttgcttgattcttcaatgcgtagggcacacctacagacagacttgctgcaacttctgcatacatgtcttcactcgtgtaaaaggaatactttccctgggtttagctgaagtctaagaataataattatgttaggattgcgggctggtaaaattctccagtggaaaacaaactagtgttctgcatcccactacttttttcagtgtcacattagaacagatttctatgcttctactca

SEQ ID NO: 55260 - DNA, 600 bp, Chicken  19866894308673_1
tactcacaataagaaggtagaatgcatgccccagaaccagagtaactaaccgaggcactgatttacctgcaaagggatctgaatatcgggcaaacagcatcagtggaaaaacacaatctactcttcttaggtgatgtgattaaattctttctgcagtcagcttttaagtcgtctattaagaagaaataaactaaaataccaacctctcttattgacgtaactgaaaatacttgcatacccttgcaatacaaacaggtagcttccttaaagcaaagtgtcagacaaggactgctagatacrcagctcttttccttctcaaggattcgatcttttcttccaaggaaatgccctaactgttggcttccaggttgtctgcactcttttggctggtgtggagccaaaagttcaggagtgaaaacttgtgagaggaggaaagcaagtgagacgaagctcagcactgactgcagggaaaagacatgagccttctcctgctggaatgtgccaggagagataatatggtctttatgggtgagaaaaactttcaaattatttatttttatattatttttaattatttttataattaaatataaatataat

SEQ ID NO: 55261 - DNA, 600 bp, Chicken  19866894308678_1
gccaggtggaaggagtggatggcaggggaagtggaggctgaattaaatgtgtatttggcctctgcaaactttactgggaaaattcagtgctattgttatttgtgctgaactggaaaagaacaagaaaatcagtggcagagaagggagactggatcgcatcaaattggagatgaaagaatacgtcagtaactctcatttgaggccctggtctgtgtacggactctaggatccctctccccctcgttcccacagagctttctcaagctcacagtagggctgcaagtggaggaaggagagcasccactgtatgtgactgtctgtattaccactgcaggaacaacaggactgagtcagagtcacacagtgggtctcgctgtctcccatgastgttgctgaggggtgcaacgccatcaacttagcagatccacactgacttttgtggtaggtgtgaagggggaattaagctgaataagtcagtggcagagcagggaacactgctgaggacttctgagggccttgtaaaattttgcattgtgacttcacatcsttttatatctgtattggaaaaggtgcacacaagccttccacaggcaaaacctt

SEQ ID NO: 55262 - DNA, 600 bp, Chicken  19866894308678_2
tgctattgttatttgtgctgaactggaaaagaacaagaaaatcagtggcagagaagggagactggatcgcatcaaattggagatgaaagaatacgtcagtaactctcatttgaggccctggtctgtgtacggactctaggatccctctccccctcgttcccacagagctttctcaagctcacagtagggctgcaagtggaggaaggagagcasccactgtatgtgactgtctgtattaccactgcaggaacaacaggactgagtcagagtcacacagtgggtctcgctgtctcccatgastgttgctgaggggtgcaacgccatcaacttagcagatccacactgacttttgtggtaggtgtgaagggggaattaagctgaataagtcagtggcagagcagggaacactgctgaggacttctgagggccttgtaaaattttgcattgtgacttcacatcsttttatatctgtattggaaaaggtgcacacaagccttccacaggcaaaaccttgacaatgttttcactttccttrtaccgctttggctggaatctccttgctcgctatctgagtgcaacttctcattgcacaagaaacca

SEQ ID NO: 55263 - DNA, 600 bp, Chicken  19866894308678_3
cacagagctttctcaagctcacagtagggctgcaagtggaggaaggagagcasccactgtatgtgactgtctgtattaccactgcaggaacaacaggactgagtcagagtcacacagtgggtctcgctgtctcccatgastgttgctgaggggtgcaacgccatcaacttagcagatccacactgacttttgtggtaggtgtgaagggggaattaagctgaataagtcagtggcagagcagggaacactgctgaggacttctgagggccttgtaaaattttgcattgtgacttcacatcsttttatatctgtattggaaaaggtgcacacaagccttccacaggcaaaaccttgacaatgttttcactttccttrtaccgctttggctggaatctccttgctcgctatctgagtgcaacttctcattgcacaagaaaccacaaacrtgctgagacatcattgtcacaaactgaacgcagcatggccacatccgtgggtatggagcacggggttctttactccccctgctcaccaaccccagcacagacgctgtcagctgtccgttactccaggttgctgtgagcctgttccctgggtcta

SEQ ID NO: 55264 - DNA, 600 bp, Chicken  19866894308678_4
ttaccactgcaggaacaacaggactgagtcagagtcacacagtgggtctcgctgtctcccatgastgttgctgaggggtgcaacgccatcaacttagcagatccacactgacttttgtggtaggtgtgaagggggaattaagctgaataagtcagtggcagagcagggaacactgctgaggacttctgagggccttgtaaaattttgcattgtgacttcacatcsttttatatctgtattggaaaaggtgcacacaagccttccacaggcaaaaccttgacaatgttttcactttccttrtaccgctttggctggaatctccttgctcgctatctgagtgcaacttctcattgcacaagaaaccacaaacrtgctgagacatcattgtcacaaactgaacgcagcatggccacatccgtgggtatggagcacggggttctttactccccctgctcaccaaccccagcacagacgctgtcagctgtccgttactccaggttgctgtgagcctgttccctgggtctaccaaagtgcagcttaagtttccagcaggagggcttgagggaccaagaaggagaccttttgcccactccagtgact

SEQ ID NO: 55265 - DNA, 600 bp, Chicken  19866894308678_5
tgaggggtgcaacgccatcaacttagcagatccacactgacttttgtggtaggtgtgaagggggaattaagctgaataagtcagtggcagagcagggaacactgctgaggacttctgagggccttgtaaaattttgcattgtgacttcacatcsttttatatctgtattggaaaaggtgcacacaagccttccacaggcaaaaccttgacaatgttttcactttccttrtaccgctttggctggaatctccttgctcgctatctgagtgcaacttctcattgcacaagaaaccacaaacrtgctgagacatcattgtcacaaactgaacgcagcatggccacatccgtgggtatggagcacggggttctttactccccctgctcaccaaccccagcacagacgctgtcagctgtccgttactccaggttgctgtgagcctgttccctgggtctaccaaagtgcagcttaagtttccagcaggagggcttgagggaccaagaaggagaccttttgcccactccagtgactccaagttgtgcatgcctggcgctgaccttccctgcccttcggcctctgcccttccctcctgaccttgcagg

SEQ ID NO: 55266 - DNA, 410 bp, Chicken  19866894308678_6
tcaataccccgcaccaagtgcactgctgaggagaagtgcattaagcctccgcctgctgacctcccccaggccgccatcctcttcccacagcacacttctcccatcctcaagatatcaaatgatgcctgtcctgctctgttttctggttttggcctcaggagcaagatgggaggcagagttctccctggaaaagctggcggcagatgaggggaagccactccccttgctcctgcaccataggcaggagccattttgcgtttgtttatttgcttttctctgaaccctgaattactgggcagygccgaaggcaggtcaccagacttagcagacaagatctgtttttgcaaattctccctctcttcttagcagggcttgtagaccctgcatcacatgcaagccattccagtggg

SEQ ID NO: 55267 - DNA, 600 bp, Chicken  19866894308683_1
aaatgtgcaattttcttttaatgcaagttaaacaaagcgtatgcacaacagagttgcacaaccattacagaacagagtgttctgggtatcctcatgatgtttcgcatctacagccagtgcaaacttacaaggcacaaactcagtgctgacaccgtagtgttgtaagttcaggcacatttcaatttgtagttcttaaagataataatcaacagaagtgctacttctgtactaaagtgccagcctcttcccaaagattaagcattaagttgatgtaacctgtacacagtaatgatcagcggygttcggatttaacctaacctatcactgcaaggtctgtggctatatcgtgctatgcgctccacacctctgagggtatgctgcttcccaaaatacctcccttacactcttcaaagagtacccatacctcgccagccttgacgcgtggactcttacaggtactactcaatgctttttcctaaccttagccaaacctctgataaaaccagacttaaaaaatcagccatcgggaaatctttcgcacacttgcgtttaacaaacctttgctcaattgcatagtgacatgtgtatcagctaggaaag

SEQ ID NO: 55268 - DNA, 599 bp, Chicken  19866894308687_1
  misc_feature (1)..(5): n is any nucleotide
nnnnntctgcttctgtgcatagctaagtaaggcgtgtgttctcttttaatgaaaatcagactatttcgtttaatagcaacttcggcatgcctgctgatgatgcctccacgggtctgtttcagcaaacggagccagaactctttaaattcacaacaaagaaaaaataattgaagtaattgcagtttttttaattactggtattactttataaagaaaaatgttggcatgttccctcctgcctctgtattgcttagagctgtgtacagtcattctcaagaagatagaaaaataaggaaattktataattaatcatcatccaactaaaagaaacctactaaagtattgtttacctttaacatcaactagctaaaataaaaggacaaagagaacagctgagtaatgtttcttacttcccattcatctcagattataaatcttatgttcatgaacagcgttggctcaacttctcaaatggcagaagctctccattttcccactgaaaatatagagctggtattgagcattgagcaaatatagggtgttaatggagggaatgtctaggaagaatagtttgagcccatgctggtattccctgtctt

SEQ ID NO: 55269 - DNA, 599 bp, Chicken  19866894308691_1
  misc_feature (1)..(5): n is any nucleotide
nnnnngcatgtacaaacagattcacatacagaaaaagccatggggagcactgggggagctcctttcacgtgcagagatagaagggtgcggtaggtggaggtatacagtgtcatttcttttgctcagtagtgaagtgtatgtaatacagaacaacagaaatggaaaatgtcagtttataactactggccaaaccttcccagagcccatcagactgtgcctagctgtgggatcttctggagtaatccaaagttaggcacagacggatgagagccaggttgcacaacgtgtcttagggaggayagagttctctcatttgtttcctgcttgttgtgtcagtggttccctctctgctcactgaattgcattagcacagggaccagagaggctggcatgactgctcctttcaaaaactggaatcaaaaggcattcaggtcagctgaaccaacatcccaactttacccaaggggctgaagggtgccttttctatctatctcctttttttctggtgtgccwtttcactaggatcygggagactacacaagtgtaaacacaccatccaggctgcggratggtatttttccaccyacctatgtcactac

SEQ ID NO: 55270 - DNA, 600 bp, Chicken  19866894308691_2
gtgcctagctgtgggatcttctggagtaatccaaagttaggcacagacggatgagagccaggttgcacaacgtgtcttagggaggayagagttctctcatttgtttcctgcttgttgtgtcagtggttccctctctgctcactgaattgcattagcacagggaccagagaggctggcatgactgctcctttcaaaaactggaatcaaaaggcattcaggtcagctgaaccaacatcccaactttacccaaggggctgaagggtgccttttctatctatctcctttttttctggtgtgccwtttcactaggatcygggagactacacaagtgtaaacacaccatccaggctgcggratggtatttttccaccyacctatgtcactacagtttgcctgagactatttatggatgaggccattgcttgattcctcatggcttctcatttccgcttcacagaccaaaccctctggctcagaacagtgttgggttttacatctcaccaaaaagaaaggaccacaaggatcaggatgacagcacacagatgaagaaaataagctagctcrgcccacataagaaaatcaagccagtttaattaaaat

SEQ ID NO: 55271 - DNA, 600 bp, Chicken  19866894308691_3
gatcttctggagtaatccaaagttaggcacagacggatgagagccaggttgcacaacgtgtcttagggaggayagagttctctcatttgtttcctgcttgttgtgtcagtggttccctctctgctcactgaattgcattagcacagggaccagagaggctggcatgactgctcctttcaaaaactggaatcaaaaggcattcaggtcagctgaaccaacatcccaactttacccaaggggctgaagggtgccttttctatctatctcctttttttctggtgtgccwtttcactaggatcygggagactacacaagtgtaaacacaccatccaggctgcggratggtatttttccaccyacctatgtcactacagtttgcctgagactatttatggatgaggccattgcttgattcctcatggcttctcatttccgcttcacagaccaaaccctctggctcagaacagtgttgggttttacatctcaccaaaaagaaaggaccacaaggatcaggatgacagcacacagatgaagaaaataagctagctcrgcccacataagaaaatcaagccagtttaattaaaataccagccataatgg

SEQ ID NO: 55272 - DNA, 600 bp, Chicken  19866894308691_4
agccaggttgcacaacgtgtcttagggaggayagagttctctcatttgtttcctgcttgttgtgtcagtggttccctctctgctcactgaattgcattagcacagggaccagagaggctggcatgactgctcctttcaaaaactggaatcaaaaggcattcaggtcagctgaaccaacatcccaactttacccaaggggctgaagggtgccttttctatctatctcctttttttctggtgtgccwtttcactaggatcygggagactacacaagtgtaaacacaccatccaggctgcggratggtatttttccaccyacctatgtcactacagtttgcctgagactatttatggatgaggccattgcttgattcctcatggcttctcatttccgcttcacagaccaaaccctctggctcagaacagtgttgggttttacatctcaccaaaaagaaaggaccacaaggatcaggatgacagcacacagatgaagaaaataagctagctcrgcccacataagaaaatcaagccagtttaattaaaataccagccataatggtatctctctgttgggatactgtcaatccaaaacacgtgctc

SEQ ID NO: 55273 - DNA, 600 bp, Chicken  19866894308691_5
tgtcttagggaggayagagttctctcatttgtttcctgcttgttgtgtcagtggttccctctctgctcactgaattgcattagcacagggaccagagaggctggcatgactgctcctttcaaaaactggaatcaaaaggcattcaggtcagctgaaccaacatcccaactttacccaaggggctgaagggtgccttttctatctatctcctttttttctggtgtgccwtttcactaggatcygggagactacacaagtgtaaacacaccatccaggctgcggratggtatttttccaccyacctatgtcactacagtttgcctgagactatttatggatgaggccattgcttgattcctcatggcttctcatttccgcttcacagaccaaaccctctggctcagaacagtgttgggttttacatctcaccaaaaagaaaggaccacaaggatcaggatgacagcacacagatgaagaaaataagctagctcrgcccacataagaaaatcaagccagtttaattaaaataccagccataatggtatctctctgttgggatactgtcaatccaaaacacgtgctcagagaagaccccacctc

SEQ ID NO: 55274 - DNA, 415 bp, Chicken  19866894308691_6
ccttttctatctatctcctttttttctggtgtgccwtttcactaggatcygggagactacacaagtgtaaacacaccatccaggctgcggratggtatttttccaccyacctatgtcactacagtttgcctgagactatttatggatgaggccattgcttgattcctcatggcttctcatttccgcttcacagaccaaaccctctggctcagaacagtgttgggttttacatctcaccaaaaagaaaggaccacaaggatcaggatgacagcacacagatgaagaaaataagctagctcrgcccacataagaaaatcaagccagtttaattaaaataccagccataatggtatctctctgttgggatactgtcaatccaaaacacgtgctcagagaagaccccacctcttccaga

SEQ ID NO: 55275 - DNA, 600 bp, Chicken  19866894308693_1
tgtaggtatgccctcacggtgttaggagagctctgcagggctctgtcccccttcatctttgccctcccacccacaccaggccgagagccaggtgtcatacttccgcagaggtccccgaagatgtaatagcactgttcagagaaggtgatcttgttcacggtgtgtcggatgtagccagccttcagcagattgctggcgtatttgcgggattcacggcggtccgtaaagccctccacatggtgatacagccagtccaccacatccgaacctgccaccaaatgtcagagttaaagacaagcragaggaaggcagtggccctcgaagcagtgggccgcaaagctggttaaaagcataaaaaagggacttcacagacmacagttcaacttgtgacratggctttgttaagtcagtttacactgaagagatcctccctgcatgaattttttcttgggaaacagaccacccaccccccactccctgcctctgctggaaagcagcacagtctcttaccaatgaaggcattggggatggtgatcttcagccacatgcgatcacgcacctccaagcctgactctggtgaggccatggctttgacaatgg

SEQ ID NO: 55276 - DNA, 600 bp, Chicken  19866894308693_2
accaggccgagagccaggtgtcatacttccgcagaggtccccgaagatgtaatagcactgttcagagaaggtgatcttgttcacggtgtgtcggatgtagccagccttcagcagattgctggcgtatttgcgggattcacggcggtccgtaaagccctccacatggtgatacagccagtccaccacatccgaacctgccaccaaatgtcagagttaaagacaagcragaggaaggcagtggccctcgaagcagtgggccgcaaagctggttaaaagcataaaaaagggacttcacagacmacagttcaacttgtgacratggctttgttaagtcagtttacactgaagagatcctccctgcatgaattttttcttgggaaacagaccacccaccccccactccctgcctctgctggaaagcagcacagtctcttaccaatgaaggcattggggatggtgatcttcagccacatgcgatcacgcacctccaagcctgactctggtgaggccatggctttgacaatggtggccatgtcgctgtggatggacaggtgaaagtcatcgaggcctgtgacgcagacaaaggcaagggaagcagag

SEQ ID NO: 55277 - DNA, 600 bp, Chicken  19866894308693_3
tgtcatacttccgcagaggtccccgaagatgtaatagcactgttcagagaaggtgatcttgttcacggtgtgtcggatgtagccagccttcagcagattgctggcgtatttgcgggattcacggcggtccgtaaagccctccacatggtgatacagccagtccaccacatccgaacctgccaccaaatgtcagagttaaagacaagcragaggaaggcagtggccctcgaagcagtgggccgcaaagctggttaaaagcataaaaaagggacttcacagacmacagttcaacttgtgacratggctttgttaagtcagtttacactgaagagatcctccctgcatgaattttttcttgggaaacagaccacccaccccccactccctgcctctgctggaaagcagcacagtctcttaccaatgaaggcattggggatggtgatcttcagccacatgcgatcacgcacctccaagcctgactctggtgaggccatggctttgacaatggtggccatgtcgctgtggatggacaggtgaaagtcatcgaggcctgtgacgcagacaaaggcaagggaagcagagatgagaagagacagaaaa

SEQ ID NO: 55278 - DNA, 600 bp, Chicken  19866894308696_1
aaactgggagacaactttgaaattatcagcttatttcagtttatgatatcctacaatattactcaaaggaaattgtcaatgaacttcatggtacaccaggtacttagaaatccagtatctaactgctgtttctgcatcaaatgaagaaagtagaagtcaacttaagtacatgatggaatatcccgtatgaatataaaacacagcatagacgtgaatttactaattggctgtatttctgacaagatttttgcttaaccttttgcaatatctggatattctgtatgtactactttaaaactycactcttcttgaaaacagaatgttttagttgaagttggtttatttttcaaataacactaagctgtttccatgtgtaaaagtatttaactatttctgaagtccaagccagacatgggctttcttaaaataattgattacttttctaccaaatatcgttaaacacaccaaattcattaaaatatcagttgtcttccaggctgtcatttaaataattttatgcacctggtacaacataacatgcttccaaaatactgcattttacataaatctgtgcttttaaaaatttctttcaaatctcat

SEQ ID NO: 55279 - DNA, 600 bp, Chicken  19866894308698_1
ttatttttgctagtgggtcgtttatatatacatagtgtccaggtatatgcaaggatggaaaaaatagtttaaggcttttagtgacttctgttggtacttaccatgattatttgtcccatctgcacagcaatatattgtgtgtcaacttgtgaaaactatgagagatcaccacctacataaataagaacataaaagggaatattaatgggctgtaaaaaaggggtctgaaatgcagcattagttttgtctttattccttactgaatttcacataactgttttcccagaatttagttattcrgcataacattctttctgtgttgtcagtctcccagacagaaagcagtttcagagacaaagtttgctgtaagcttgtatcctttcactccttaaggtcttaactaaaaaaacatctttcctgtctgtcaaacattgccacgccatgagaattaatctgggtagacacgggcatttgagtgcttcaatttctctagcacatatttatctcaaagtaatgtatatagattccaatagcagaaaaaagagagaaccttgctttgcacaggcatgaaggattaaagaaaagacttcaggaatagaa

SEQ ID NO: 55280 - DNA, 600 bp, Chicken  19866894308706_1
acagatgagggcctcaaaaatgattttctcctgaaatttgtggaatcaatttattccacagtaatagtaaaaagaagaatcttattctgtaattaaaaggctaaaagacggattgttttgatccagatactattcatttagtagacttttcgtaaagtaattcagtaattcagtattggtagtgtctgattgaggcctaagtgaaggtagcagcacatttttttttacttagagtccattttaacaaattgaaattaactttaatgagcatcacgctgaatagataagtcataggtgatktattgatgttatcaaattgatggaactcctgcagtgtttgcacaaygtcgtccagataggcagacaggcaagaggaaagtgtatgacagcctttacttgttcctttaccatccagacatgtatggctttggataaattacttttagaaatattgctgcttgtaatagcaaatatcacattgttagtgaagattcccaccttctgatagtttgcatgtatataattccatttctgcaattcactgtgctaaacttayactctcacttctgttattgcagaccatcatgaaggccagtataa

SEQ ID NO: 55281 - DNA, 600 bp, Chicken  19866894308706_2
caatttattccacagtaatagtaaaaagaagaatcttattctgtaattaaaaggctaaaagacggattgttttgatccagatactattcatttagtagacttttcgtaaagtaattcagtaattcagtattggtagtgtctgattgaggcctaagtgaaggtagcagcacatttttttttacttagagtccattttaacaaattgaaattaactttaatgagcatcacgctgaatagataagtcataggtgatktattgatgttatcaaattgatggaactcctgcagtgtttgcacaaygtcgtccagataggcagacaggcaagaggaaagtgtatgacagcctttacttgttcctttaccatccagacatgtatggctttggataaattacttttagaaatattgctgcttgtaatagcaaatatcacattgttagtgaagattcccaccttctgatagtttgcatgtatataattccatttctgcaattcactgtgctaaacttayactctcacttctgttattgcagaccatcatgaaggccagtataatattagcctccatagcagtattgctgctatagtttcaattatgcat

SEQ ID NO: 55282 - DNA, 600 bp, Chicken  19866894308706_3
aactttaatgagcatcacgctgaatagataagtcataggtgatktattgatgttatcaaattgatggaactcctgcagtgtttgcacaaygtcgtccagataggcagacaggcaagaggaaagtgtatgacagcctttacttgttcctttaccatccagacatgtatggctttggataaattacttttagaaatattgctgcttgtaatagcaaatatcacattgttagtgaagattcccaccttctgatagtttgcatgtatataattccatttctgcaattcactgtgctaaacttayactctcacttctgttattgcagaccatcatgaaggccagtataatattagcctccatagcagtattgctgctatagtttcaattatgcatgcaggctcatctgaggacaaattagatatactgccaaagccaaaacatttcaggaatttttccatctccacttgatatataggaatgaatgaagaaaatctccatctcggtttcactgtttaggatgaccttataactgaatattactgctttaattctagcctcaattagggaaaaaaatcaaccctcaaccgcatattcaacctcaaa

SEQ ID NO: 55283 - DNA, 600 bp, Chicken  19866894308714_1
gtaaaaccactgctggaacatgatgtatttctatacatagaaaagtatttctatgtcctcagccacaagtgacattgcatactagaagacatttaactacaaagtcttctgactttatatcatactttaaaagatttgatctcctggattcacttatgacagaaaggtgccacatgtgagatgcagattttaccaatactgtgactgttatacagatgattggacttttaattgcttgttcaaattgacagaatgtttttggcatatttgcgtttttcatagtggaaactcgtaaacagmttgccttttgctttcacttacctgagagtagactgatttgctgaaaacattctatgttgctccattaatggatctttaaccttctcaccttcttctcaatcactttagttgacaatgtctactcctgcattatatttttcaagttaaatctgttgaggaattggtttaaccaatcagacttaaaaatatctgctaagtaagactggagcatagatatctatgttactactctaggaaaaagggtgactagtgtcttctcccacaggaggggtttgcatctctggctactctttgttctgc

SEQ ID NO: 55284 - DNA, 600 bp, Chicken  19866894308714_2
ttctcaccttcttctcaatcactttagttgacaatgtctactcctgcattatatttttcaagttaaatctgttgaggaattggtttaaccaatcagacttaaaaatatctgctaagtaagactggagcatagatatctatgttactactctaggaaaaagggtgactagtgtcttctcccacaggaggggtttgcatctctggctactctttgttctgcaggcaatctgaagcacaagcatgaggagctgctcataggttcgtggttttggcagtgacaagtgtctttctctagcctacrtattttaaaaaatgtgcagcatataagcaatacaactcagaatgatagagaaaacagtcatgagcaggctgttgctcaaaagcctaaaatctgctgccagaaggcacacaggaaaaatagccattcatgatcaggtggagagccaggttagtagacctagttcacctcctataacctcatataattcatataacatatgagttacagtctgagcatgtccagtgttagagtaggcgctcattttctggccagtgcagaacttacacctgaagcacatttccaactgctcccctcagctga

SEQ ID NO: 55285 - DNA, 600 bp, Chicken  19866894308714_3
ctcatataattcatataacatatgagttacagtctgagcatgtccagtgttagagtaggcgctcattttctggccagtgcagaacttacacctgaagcacatttccaactgctcccctcagctgatggctttaagaacagccaagaaaaataattaaaggtgtctctcccctagaatttttgatatttccacattcttttttcatctgaaatcaagctgaaaatctgaaataccaaaatttcttgtgaaacaaaagtttttgtacgtatagtgttggaatgtccccttttcctacaacaytcatctctctgagttgatgtgggatggggtggggatgtgggatcataaatagacccacagtgactacttagaccaatgaagaatctgaagtcaaactgatcccccaaacaattactatagcttgccttcctttctagagaaataaccagtttgtagattgtgtgggaaatatcttgtggaggcctccatttttttcctgaagtcatcatttttaatgtaaaactggccattacttatacatcaattctggcccgaagaagtcataatttgcatatgattaccttgctgacttgttcataa

SEQ ID NO: 55286 - DNA, 600 bp, Chicken  19866894308720_1
tccacagaaacagtgacagcacaataacattgataggacaagttctcatttacagaacactgtttttcaacctcgtcaccaccattagcattttttgacagcactgaagtagagactgcatatcatgctcataaaaatctgcaccagtggaggtgacccactgcttcacagtgtttcatcacccacccctcgctgtgctcgcatccactggttggttgccgtcaacattcagctaacatcgatgaatgtcagtgggtgctactgtggaggaattcagttcccgcccctttgcttcatcckcccttccatgtcagataccactgtgtcagactgcccctctgctgccacctgtcacaaggcaacaacatgtaacgggatattggtgggaaggttcagcaccaacatctgcctctgcatccgcccccggctcggctcgccccgccccgtccctcccgctccsggccggacaggggcggtcccgcggcgccgcttatttgacccctcgccggggggaatttcgctctctttctgccctggctgcagcgctttccgtttgctgtcacccctccacgccatgccgaacatcgtgctgttcagcgg

SEQ ID NO: 55287 - DNA, 492 bp, Chicken  19866894308720_2
ctgcttcacagtgtttcatcacccacccctcgctgtgctcgcatccactggttggttgccgtcaacattcagctaacatcgatgaatgtcagtgggtgctactgtggaggaattcagttcccgcccctttgcttcatcckcccttccatgtcagataccactgtgtcagactgcccctctgctgccacctgtcacaaggcaacaacatgtaacgggatattggtgggaaggttcagcaccaacatctgcctctgcatccgcccccggctcggctcgccccgccccgtccctcccgctccsggccggacaggggcggtcccgcggcgccgcttatttgacccctcgccggggggaatttcgctctctttctgccctggctgcagcgctttccgtttgctgtcacccctccacgccatgccgaacatcgtgctgttcagcggcagctcccaccacgacctgtcccagcgggtggccgaccgcctggggctggag

SEQ ID NO: 55288 - DNA, 599 bp, Chicken  19866894308732_1
  misc_feature (1)..(40): n is any nucleotide
nnnnnnnnnnnnnnnnnnnnnnnnnnnnnnnnnnnnnnnnatttcttttgtgagtaattgtgaatctttaaaaacaactataaaagtaatggacggctttagtgggcattctggctgagagttcactgaaatggtattgaagtggtgtgttttttgttttaattttatttttactttttaccatcttgttgacttcctgtacataacttctccatcgatcactgccaaggcaaagaatataccatagtcttcatcagaaacttctggtgaagtttcctttgcagaaaaccaaatgaagcwtatatattatgcttctctagccttcctgagctgttttgttggttatgtgatgggacaggggagaygaggaaggagcattctttgttttattttgttttctaagaatactgtgctctgtagaatattgtgaaacaccttacagaatttatgcacctcttttttttttttycccctgtataactgaacaacaagttgatgagagattatcaagtccagtacttcatttatgtgatgtcctatttaatggaatattcggagttgaaagcaacccacaaagttcactgagtaatattaactac

SEQ ID NO: 55289 - DNA, 600 bp, Chicken  19866894308732_2
ctttaaaaacaactataaaagtaatggacggctttagtgggcattctggctgagagttcactgaaatggtattgaagtggtgtgttttttgttttaattttatttttactttttaccatcttgttgacttcctgtacataacttctccatcgatcactgccaaggcaaagaatataccatagtcttcatcagaaacttctggtgaagtttcctttgcagaaaaccaaatgaagcwtatatattatgcttctctagccttcctgagctgttttgttggttatgtgatgggacaggggagaygaggaaggagcattctttgttttattttgttttctaagaatactgtgctctgtagaatattgtgaaacaccttacagaatttatgcacctcttttttttttttycccctgtataactgaacaacaagttgatgagagattatcaagtccagtacttcatttatgtgatgtcctatttaatggaatattcggagttgaaagcaacccacaaagttcactgagtaatattaactacttttaattaattcaatatgtatctatttttgaagtcaaatattgttttatctggtatgatgaccat

SEQ ID NO: 55290 - DNA, 600 bp, Chicken  19866894308732_3
tttactttttaccatcttgttgacttcctgtacataacttctccatcgatcactgccaaggcaaagaatataccatagtcttcatcagaaacttctggtgaagtttcctttgcagaaaaccaaatgaagcwtatatattatgcttctctagccttcctgagctgttttgttggttatgtgatgggacaggggagaygaggaaggagcattctttgttttattttgttttctaagaatactgtgctctgtagaatattgtgaaacaccttacagaatttatgcacctcttttttttttttycccctgtataactgaacaacaagttgatgagagattatcaagtccagtacttcatttatgtgatgtcctatttaatggaatattcggagttgaaagcaacccacaaagttcactgagtaatattaactacttttaattaattcaatatgtatctatttttgaagtcaaatattgttttatctggtatgatgaccatatgtaacttcatatattccttttttaaaaagcaatatttaagacttgttagtctaacatgccacaagggacattccttgcagcagtatgcattttaattgctaa

SEQ ID NO: 55291 - DNA, 600 bp, Chicken  19866894308737_1
gtagtctgtcagtctgtctgtccatctcctgccacggccccaggacagcctggtgcagggctctgggttcccttcatggcccacttctttctgtccatcagtagggctgagcttagcgaggagaatgatgagctctgtctcaggccaagatgctctgcataaactggaagctaacatccctctgtggtttctccatcgtgctggaggccacttaatctttttcctacccctctcagagaaaagcagaggagcctccagcacagtaagagggctccaagtgtttggatgtgtcctgagttyggagcccggctcagcagggaaagcccctgcctagacgtgtaaccgagctctcaataaacaaacccaaacaaataggtcccctaagcatctcaggggcagattttctttttctctgcacacctttttgttgcttacatgcagttgggctgcaatcttggtttccctgctttaaaaaaaatatccgtatgtcgctatttaattcgataacatgatattaaatagacgaattctaggcaagtgcttaatagaagtaatgtgattacagatataacaacagttaygcaggattttttctttttc

SEQ ID NO: 55292 - DNA, 600 bp, Chicken  19866894308737_2
ttggatgtgtcctgagttyggagcccggctcagcagggaaagcccctgcctagacgtgtaaccgagctctcaataaacaaacccaaacaaataggtcccctaagcatctcaggggcagattttctttttctctgcacacctttttgttgcttacatgcagttgggctgcaatcttggtttccctgctttaaaaaaaatatccgtatgtcgctatttaattcgataacatgatattaaatagacgaattctaggcaagtgcttaatagaagtaatgtgattacagatataacaacagttaygcaggattttttctttttctgaaaaggtatttagatatacttggaattaaaagcagaaagaagcttttcatctcattctgactaagcctgtgttacaacaatgctgaaatcccacttttagggaagaggcagcccttgtgcagccatcataggactgctccactgctgacacacaagccagcgatcccacaaatgtacctgactgcagctggtattgaccaatgttctctgaacaataaatctacaccagactcattttcttaggatttcacactggattagagcaagaatccccaaaga

SEQ ID NO: 55293 - DNA, 600 bp, Chicken  19866894308738_1
gtttattcagcagaaacttcttaataacgtatattttctaaatactttaaagcatctataaaaagattattggctagtgcacacattcatttgtcaggctcggatttcctatctttgcaaagaagaaattctgcaaggttaccagttcaaattatccaaaaatcttgtactacaagaagatagttggaaattgaaacagaaacaaatatatccatatgaaagccaagtgagaggatggtttccaaattcatacatttaaagggacagtatttctttttcctttatttgtttctaatttcyatattaaaatgtgctgaaattaggtacttaagtttcttatgtttgtgtgatacaacagggaaattagtgataattaataagtgttcctttggaatatattcggtaaggattactttatttagctaaakaagttcactgttttttcaagtctcagagtaatttactgtacaagaatctttgactcctggacagaaaactgtatgagcatttcccagtatcacaaagtggttgaagttggaagggacctttgaatgtcatcaggtcccacccccagctcaagcagagacactacagcaggtt

SEQ ID NO: 55294 - DNA, 600 bp, Chicken  19866894308738_2
ttctgcaaggttaccagttcaaattatccaaaaatcttgtactacaagaagatagttggaaattgaaacagaaacaaatatatccatatgaaagccaagtgagaggatggtttccaaattcatacatttaaagggacagtatttctttttcctttatttgtttctaatttcyatattaaaatgtgctgaaattaggtacttaagtttcttatgtttgtgtgatacaacagggaaattagtgataattaataagtgttcctttggaatatattcggtaaggattactttatttagctaaakaagttcactgttttttcaagtctcagagtaatttactgtacaagaatctttgactcctggacagaaaactgtatgagcatttcccagtatcacaaagtggttgaagttggaagggacctttgaatgtcatcaggtcccacccccagctcaagcagagacactacagcaggttagccagaaccacatccagaaatcttctgaagatttctaaggagattaaaaaggtcgatgctagtcatgataaagtactgggggagttttcaaagtgctctagtcatggattgctgcctcattgctctg

SEQ ID NO: 55295 - DNA, 600 bp, Chicken  19866894308743_1
ttacataaatctttcctactagacaagcatgtttactttcagaaatatgactgctttaacataacattatagcaaacaaaagaaaaataacaatccaaatacaaaatgttgcttccaaaccagcatctaatcataggaatagaacacagtttagaaatttcatatgccaagatgtacagtaactttatatttctgtgctgggggcacagtggagtaaaataaggtataaggtgatgtactcacattcacatctcccaagtacatcttatagccacccacaatattttcattttgttcttyattttatttttcttcctcttttatttattttttttttttttaggaatttattgagcaactgtgttttactgacagcatacgcactaaaggctcaacttaactgctgtgttcctagaatattgcagggatgacacacttgaacaggtggtcctcagtgcttgatttaggcaaagmaaacagtaggccattcactaagcatgttctgaaagaacatagctgccatttctgtaaaacgttacttttcccttttcctttcttttcccccttccttctatccctctagctaaaccacacaaatct

SEQ ID NO: 55296 - DNA, 514 bp, Chicken  19866894308743_2
tacagtaactttatatttctgtgctgggggcacagtggagtaaaataaggtataaggtgatgtactcacattcacatctcccaagtacatcttatagccacccacaatattttcattttgttcttyattttatttttcttcctcttttatttattttttttttttttaggaatttattgagcaactgtgttttactgacagcatacgcactaaaggctcaacttaactgctgtgttcctagaatattgcagggatgacacacttgaacaggtggtcctcagtgcttgatttaggcaaagmaaacagtaggccattcactaagcatgttctgaaagaacatagctgccatttctgtaaaacgttacttttcccttttcctttcttttcccccttccttctatccctctagctaaaccacacaaatctacaaataaaatatttgtaaaagaatgacttttaaattggtgtcagtctggaaagttactgaatgagataataccaaaggcttctacaa

SEQ ID NO: 55297 - DNA, 600 bp, Chicken  19866894308745_1
aagaagtgcccagtgaataccaaacacagtttttaccataataaacatattttggtaggcctttcaatctttaaaatgtaatgtacattaatataatataatttcatttttgtttcacaggatattctccagaataaaaaggctaaactattatagctcctttacagagaacaatatcctgagtagtatcaatattgccttaagatcttaacgtgccactaatcccttcatattctttgttaacgattgtatacttctatttttggaatctttaatgggggcacacacacataaatgaargtacatgacatcccaaatgaacagagtgagattttctgctcgatatcttatctcaccatgagatagatgagaactctggtggttttttttctcactaatcactaaagggctgacaattctgtaagatgataccaatctatcacttgctataagctctttctaaaggaacatatcaatatcagttcttgaagatttstaagcagggagcctactatgcraaaataaaggctaccaatcagtaagtcacgttatttctgcaaagctgaagaatttctatgaacaattaaatcgtcaaactag

SEQ ID NO: 55298 - DNA, 600 bp, Chicken  19866894308745_2
gccttaagatcttaacgtgccactaatcccttcatattctttgttaacgattgtatacttctatttttggaatctttaatgggggcacacacacataaatgaargtacatgacatcccaaatgaacagagtgagattttctgctcgatatcttatctcaccatgagatagatgagaactctggtggttttttttctcactaatcactaaagggctgacaattctgtaagatgataccaatctatcacttgctataagctctttctaaaggaacatatcaatatcagttcttgaagatttstaagcagggagcctactatgcraaaataaaggctaccaatcagtaagtcacgttatttctgcaaagctgaagaatttctatgaacaattaaatcgtcaaactagataataatatgaagatatgactctttttaagaaaaatggttcaacttatgtaggactaacatctctgagacggtttctataaacgaatgctgagataattacaacggctacataaaaaatagaaacaaaaataagccatttcctgtatttacacaaatgtaaacaagaacactgtctgcctcygacttcacaattc

SEQ ID NO: 55299 - DNA, 600 bp, Chicken  19866894308745_3
ctaatcccttcatattctttgttaacgattgtatacttctatttttggaatctttaatgggggcacacacacataaatgaargtacatgacatcccaaatgaacagagtgagattttctgctcgatatcttatctcaccatgagatagatgagaactctggtggttttttttctcactaatcactaaagggctgacaattctgtaagatgataccaatctatcacttgctataagctctttctaaaggaacatatcaatatcagttcttgaagatttstaagcagggagcctactatgcraaaataaaggctaccaatcagtaagtcacgttatttctgcaaagctgaagaatttctatgaacaattaaatcgtcaaactagataataatatgaagatatgactctttttaagaaaaatggttcaacttatgtaggactaacatctctgagacggtttctataaacgaatgctgagataattacaacggctacataaaaaatagaaacaaaaataagccatttcctgtatttacacaaatgtaaacaagaacactgtctgcctcygacttcacaattcaataacagataaagaaagatgg

SEQ ID NO: 55300 - DNA, 600 bp, Chicken  19866894308745_4
tcttgaagatttstaagcagggagcctactatgcraaaataaaggctaccaatcagtaagtcacgttatttctgcaaagctgaagaatttctatgaacaattaaatcgtcaaactagataataatatgaagatatgactctttttaagaaaaatggttcaacttatgtaggactaacatctctgagacggtttctataaacgaatgctgagataattacaacggctacataaaaaatagaaacaaaaataagccatttcctgtatttacacaaatgtaaacaagaacactgtctgcctcygacttcacaattcaataacagataaagaaagatggcagagctccactggattatgaatgaaattgaaatcggaaatggtaattcaaaactgagtttgagatacataaagctgtgagttggggaacactgatatttgtccatcttcatttaagtacaactaactgcaccaaaatctttaaactggagcatacaatgcaagaaacatccttccttttaataagactgttgaatttgctttcagtcttttcaataatgatttattattttagtcttctttgccagcagaaaagaatgttgttg

SEQ ID NO: 55301 - DNA, 600 bp, Chicken  19866894308750_1
aatttgtagaagctttccccagggaaataaatccagaactatacaagaaactctggacagaatgtcaggtatgtaacttctaataatagttcatttaattatacagttacctaagcttcttaagaggtgcggggaaaagcacaacacagcactaacacacacaggacaggtatgcaggtgcatatatttgacttttctgtgtaataaggttaccaacaaaagccaagcaatgtttcatgaagaaaagctactggaaaaagaacaatagattaaagacaagaggtattattctctacaaaragagaaaacaaattcctatcaagagcacaccctaatcccttctctttttaagcactgatgctggaattttagcattgatgaaagctgatacaagcatggagatccaggctatatgtgaaataagtaagacttttaacatacatgaatgcacatatatttaaatatactctgtgctcagttgcactgcataaagtctcaaatgcactcattttgagtgtttaaccaactaccatccccratgttcattaacatactcctcatttcagagaagtatctacagatgaatgaaaagtgctttta

SEQ ID NO: 55302 - DNA, 600 bp, Chicken  19866894308750_2
gaagaaaagctactggaaaaagaacaatagattaaagacaagaggtattattctctacaaaragagaaaacaaattcctatcaagagcacaccctaatcccttctctttttaagcactgatgctggaattttagcattgatgaaagctgatacaagcatggagatccaggctatatgtgaaataagtaagacttttaacatacatgaatgcacatatatttaaatatactctgtgctcagttgcactgcataaagtctcaaatgcactcattttgagtgtttaaccaactaccatccccratgttcattaacatactcctcatttcagagaagtatctacagatgaatgaaaagtgcttttaaattatgatctcttaaaaaaaaaaaaaagcttttatttttgcgaatttcagtttgcacagtagattctgtatttcacatgtacaaccaagccttactgaagtgcttccacaaaaagaaaagtgaccagggagtacmgccagtgataagacagctccagtacagtcattaccaaattcataccacaaaargcaattctagcccatgaacacaatatcatacactgtccttaattttttt

SEQ ID NO: 55303 - DNA, 514 bp, Chicken  19866894308750_3
catacatgaatgcacatatatttaaatatactctgtgctcagttgcactgcataaagtctcaaatgcactcattttgagtgtttaaccaactaccatccccratgttcattaacatactcctcatttcagagaagtatctacagatgaatgaaaagtgcttttaaattatgatctcttaaaaaaaaaaaaaagcttttatttttgcgaatttcagtttgcacagtagattctgtatttcacatgtacaaccaagccttactgaagtgcttccacaaaaagaaaagtgaccagggagtacmgccagtgataagacagctccagtacagtcattaccaaattcataccacaaaargcaattctagcccatgaacacaatatcatacactgtccttaatttttttctttttttcttttttgagaaattttagaatgagctgcaatttgcgttgtttaatgaaccaacattttctgccctctcttctacggggcctttaagatgaccatctacatcca

SEQ ID NO: 55304 - DNA, 461 bp, Chicken  19866894308750_4
aaagtctcaaatgcactcattttgagtgtttaaccaactaccatccccratgttcattaacatactcctcatttcagagaagtatctacagatgaatgaaaagtgcttttaaattatgatctcttaaaaaaaaaaaaaagcttttatttttgcgaatttcagtttgcacagtagattctgtatttcacatgtacaaccaagccttactgaagtgcttccacaaaaagaaaagtgaccagggagtacmgccagtgataagacagctccagtacagtcattaccaaattcataccacaaaargcaattctagcccatgaacacaatatcatacactgtccttaatttttttctttttttcttttttgagaaattttagaatgagctgcaatttgcgttgtttaatgaaccaacattttctgccctctcttctacggggcctttaagatgaccatctacatcca

SEQ ID NO: 55305 - DNA, 599 bp, Chicken  19866894308756_1
  misc_feature (1)..(211): n is any nucleotide
nnnnnnnnnnnnnnnnnnnnnnnnnnnnnnnnnnnnnnnnnnnnnnnnnnnnnnnnnnnnnnnnnnnnnnnnnnnnnnnnnnnnnnnnnnnnnnnnnnnnnnnnnnnnnnnnnnnnnnnnnnnnnnnnnnnnnnnnnnnnnnnnnnnnnnnnnnnnnnnnnnnnnnnnnnnnnnnnnnnnnnnnnnnnnnnnnnnnnnnnnnnnnnnnnnngagattgtgagtcctacagggaccctcccaagctgaatattgtccatgctgggtattatgaatgtgagtggggaagcatgcaaggttcrcgaattggactctgggtacagtacttcaagctgccttaatctctgaacctaaagaaargttgagggggaaaattcagccaccttacaacttaaagagattggatctcatgtcaagggcaatggataaatacctgtgtgtggtaacagagggcgtaactgccttaatgattctggcatcagagatccaggaattttggtcagttatacatatggagcattgcccagggtcaaggacaactggctgatgaacatcagcctttccgagctctctgtccagcctgtagctcactcatccaaca

SEQ ID NO: 55306 - DNA, 599 bp, Chicken  19866894308756_2
  misc_feature (1)..(153): n is any nucleotide
nnnnnnnnnnnnnnnnnnnnnnnnnnnnnnnnnnnnnnnnnnnnnnnnnnnnnnnnnnnnnnnnnnnnnnnnnnnnnnnnnnnnnnnnnnnnnnnnnnnnnnnnnnnnnnnnnnnnnnnnnnnnnnnnnnnnnnnnnnnnnnnnnnnnnnnnngagattgtgagtcctacagggaccctcccaagctgaatattgtccatgctgggtattatgaatgtgagtggggaagcatgcaaggttcrcgaattggactctgggtacagtacttcaagctgccttaatctctgaacctaaagaaargttgagggggaaaattcagccaccttacaacttaaagagattggatctcatgtcaagggcaatggataaatacctgtgtgtggtaacagagggcgtaactgccttaatgattctggcatcagagatccaggaattttggtcagttatacatatggagcattgcccagggtcaaggacaactggctgatgaacatcagcctttccgagctctctgtccagcctgtagctcactcatccaacactgttttccttttgcaaatatagctggcagaagtctgacattctctttcacaaagatc

SEQ ID NO: 55307 - DNA, 565 bp, Chicken  19866894308756_3
tgattctggcatcagagatccaggaattttggtcagttatacatatggagcattgcccagggtcaaggacaactggctgatgaacatcagcctttccgagctctctgtccagcctgtagctcactcatccaacactgttttccttttgcaaatatagctggcagaagtctgacattctctttcacaaagatcccagggctcatagccccataactcacagtgggatacactgcactttggcactttggtttggtgactaggcatgcaagtaattcctggtgatgacatctcctgtgtgtrtaacccgctttcatgacttcatgcacatctatcacaggaatgggaaaagctcttgtgatttttgagggctcttctactaggctgyttggtccctcttggcataaccatccagtcccactgcatcgctacttggcttcctctattgaactatgttgtttgagaatatcagcccytgaaagtaagaacactgccttccttactctctctctttctggaaaatgtctgcctcagtttgggtacaattacattaatataggttataatt

SEQ ID NO: 55308 - DNA, 480 bp, Chicken  19866894308756_4
atcagcctttccgagctctctgtccagcctgtagctcactcatccaacactgttttccttttgcaaatatagctggcagaagtctgacattctctttcacaaagatcccagggctcatagccccataactcacagtgggatacactgcactttggcactttggtttggtgactaggcatgcaagtaattcctggtgatgacatctcctgtgtgtrtaacccgctttcatgacttcatgcacatctatcacaggaatgggaaaagctcttgtgatttttgagggctcttctactaggctgyttggtccctcttggcataaccatccagtcccactgcatcgctacttggcttcctctattgaactatgttgtttgagaatatcagcccytgaaagtaagaacactgccttccttactctctctctttctggaaaatgtctgcctcagtttgggtacaattacattaatataggttataatt

SEQ ID NO: 55309 - DNA, 392 bp, Chicken  19866894308756_5
attctctttcacaaagatcccagggctcatagccccataactcacagtgggatacactgcactttggcactttggtttggtgactaggcatgcaagtaattcctggtgatgacatctcctgtgtgtrtaacccgctttcatgacttcatgcacatctatcacaggaatgggaaaagctcttgtgatttttgagggctcttctactaggctgyttggtccctcttggcataaccatccagtcccactgcatcgctacttggcttcctctattgaactatgttgtttgagaatatcagcccytgaaagtaagaacactgccttccttactctctctctttctggaaaatgtctgcctcagtttgggtacaattacattaatataggttataatt

SEQ ID NO: 55310 - DNA, 599 bp, Chicken  19866894308758_1
  misc_feature (1)..(98): n is any nucleotide
nnnnnnnnnnnnnnnnnnnnnnnnnnnnnnnnnnnnnnnnnnnnnnnnnnnnnnnnnnnnnnnnnnnnnnnnnnnnnnnnnnnnnnnnnnnnnnnnnntttgtgttagttggtgttttcatttgagtatctgagagtgtttataggccatgatttagatgtctgaatgcttgcctaaggctacggcttacatatattcgcagagaagttagaactagtaggctttgcaccagattctgctatgcagaaatgctttacaattaattgtggctgtaagataataatcgagcttaaatcttayttcaaattcaggccattataccttgtggtgggtgtaagataaggctgctatggtagggcagactccaaaaataacttgtgtttgacagatagcatatagcacttgtcagatgacaattctgtttgctttctgtgcagaccataacttaggaatttgaggcagcaagggcaraaaagtgtaaattaygagaatcggagaggggaaatgtctgtkatragtttagtgctgtatgaatgtctgtagtttgatttacactgacaaagcattacaatctttgcactaccatatttgtgaagatt

SEQ ID NO: 55311 - DNA, 600 bp, Chicken  19866894308758_2
gcctaaggctacggcttacatatattcgcagagaagttagaactagtaggctttgcaccagattctgctatgcagaaatgctttacaattaattgtggctgtaagataataatcgagcttaaatcttayttcaaattcaggccattataccttgtggtgggtgtaagataaggctgctatggtagggcagactccaaaaataacttgtgtttgacagatagcatatagcacttgtcagatgacaattctgtttgctttctgtgcagaccataacttaggaatttgaggcagcaagggcaraaaagtgtaaattaygagaatcggagaggggaaatgtctgtkatragtttagtgctgtatgaatgtctgtagtttgatttacactgacaaagcattacaatctttgcactaccatatttgtgaagatttgacttcagatgttttgtttcactgcataaagtatatagcatatgttacttgtaaatgttactaggattccctctgccataattaacatttgtgtattccaactgctgtgctgagcttcggcttctagcaaggatcacctgctcatggtgagcagtaattgcatgaggctgg

SEQ ID NO: 55312 - DNA, 600 bp, Chicken  19866894308758_3
ttacatatattcgcagagaagttagaactagtaggctttgcaccagattctgctatgcagaaatgctttacaattaattgtggctgtaagataataatcgagcttaaatcttayttcaaattcaggccattataccttgtggtgggtgtaagataaggctgctatggtagggcagactccaaaaataacttgtgtttgacagatagcatatagcacttgtcagatgacaattctgtttgctttctgtgcagaccataacttaggaatttgaggcagcaagggcaraaaagtgtaaattaygagaatcggagaggggaaatgtctgtkatragtttagtgctgtatgaatgtctgtagtttgatttacactgacaaagcattacaatctttgcactaccatatttgtgaagatttgacttcagatgttttgtttcactgcataaagtatatagcatatgttacttgtaaatgttactaggattccctctgccataattaacatttgtgtattccaactgctgtgctgagcttcggcttctagcaaggatcacctgctcatggtgagcagtaattgcatgaggctggataattatgaaccca

SEQ ID NO: 55313 - DNA, 600 bp, Chicken  19866894308758_4
ctagtaggctttgcaccagattctgctatgcagaaatgctttacaattaattgtggctgtaagataataatcgagcttaaatcttayttcaaattcaggccattataccttgtggtgggtgtaagataaggctgctatggtagggcagactccaaaaataacttgtgtttgacagatagcatatagcacttgtcagatgacaattctgtttgctttctgtgcagaccataacttaggaatttgaggcagcaagggcaraaaagtgtaaattaygagaatcggagaggggaaatgtctgtkatragtttagtgctgtatgaatgtctgtagtttgatttacactgacaaagcattacaatctttgcactaccatatttgtgaagatttgacttcagatgttttgtttcactgcataaagtatatagcatatgttacttgtaaatgttactaggattccctctgccataattaacatttgtgtattccaactgctgtgctgagcttcggcttctagcaaggatcacctgctcatggtgagcagtaattgcatgaggctggataattatgaacccatacctgcagtttcctcttggtgtactc

SEQ ID NO: 55314 - DNA, 600 bp, Chicken  19866894308758_5
gtaggctttgcaccagattctgctatgcagaaatgctttacaattaattgtggctgtaagataataatcgagcttaaatcttayttcaaattcaggccattataccttgtggtgggtgtaagataaggctgctatggtagggcagactccaaaaataacttgtgtttgacagatagcatatagcacttgtcagatgacaattctgtttgctttctgtgcagaccataacttaggaatttgaggcagcaagggcaraaaagtgtaaattaygagaatcggagaggggaaatgtctgtkatragtttagtgctgtatgaatgtctgtagtttgatttacactgacaaagcattacaatctttgcactaccatatttgtgaagatttgacttcagatgttttgtttcactgcataaagtatatagcatatgttacttgtaaatgttactaggattccctctgccataattaacatttgtgtattccaactgctgtgctgagcttcggcttctagcaaggatcacctgctcatggtgagcagtaattgcatgaggctggataattatgaacccatacctgcagtttcctcttggtgtactctgg

SEQ ID NO: 55315 - DNA, 600 bp, Chicken  19866894308758_6
aacatttgtgtattccaactgctgtgctgagcttcggcttctagcaaggatcacctgctcatggtgagcagtaattgcatgaggctggataattatgaacccatacctgcagtttcctcttggtgtactctggaaggcataatttaagttaaggctttaggaggcaacagaaactcttgaagggaaatagcagtttgtggaaattctgcaaacagaagctgccttctcaacaacagatagattacactgcccactgctcttgactccccagtgtccaacatgcatgcccctgtaggctgwttgcagctccgaractttgccctttcatttctgctactgaaattgcatggatactgagcttagtggttcratttgtgtcacaaggagtttggattaacattgcaaaaatacaccataacaactcagtttaacttccagaagtttgtcctttgttagagttgtgcccaaagcagcctttatactgtctgggcatttgaaacttccatatttaaaatgtctgtttaaaaagataagatgtgcaaggtcacaaaaatcaaagcaactgataattagggtctccctcaaaagtcttttgccatc

SEQ ID NO: 55316 - DNA, 600 bp, Chicken  19866894308758_7
acatttgtgtattccaactgctgtgctgagcttcggcttctagcaaggatcacctgctcatggtgagcagtaattgcatgaggctggataattatgaacccatacctgcagtttcctcttggtgtactctggaaggcataatttaagttaaggctttaggaggcaacagaaactcttgaagggaaatagcagtttgtggaaattctgcaaacagaagctgccttctcaacaacagatagattacactgcccactgctcttgactccccagtgtccaacatgcatgcccctgtaggctgwwtgcagctccgaractttgccctttcatttctgctactgaaattgcatggatactgagcttagtggttcratttgtgtcacaaggagtttggattaacattgcaaaaatacaccataacaactcagtttaacttccagaagtttgtcctttgttagagttgtgcccaaagcagcctttatactgtctgggcatttgaaacttccatatttaaaatgtctgtttaaaaagataagatgtgcaaggtcacaaaaatcaaagcaactgataattagggtctccctcaaaagtcttttgccatca

SEQ ID NO: 55317 - DNA, 600 bp, Chicken  19866894308758_8
tccaactgctgtgctgagcttcggcttctagcaaggatcacctgctcatggtgagcagtaattgcatgaggctggataattatgaacccatacctgcagtttcctcttggtgtactctggaaggcataatttaagttaaggctttaggaggcaacagaaactcttgaagggaaatagcagtttgtggaaattctgcaaacagaagctgccttctcaacaacagatagattacactgcccactgctcttgactccccagtgtccaacatgcatgcccctgtaggctgwttgcagctccgaractttgccctttcatttctgctactgaaattgcatggatactgagcttagtggttcratttgtgtcacaaggagtttggattaacattgcaaaaatacaccataacaactcagtttaacttccagaagtttgtcctttgttagagttgtgcccaaagcagcctttatactgtctgggcatttgaaacttccatatttaaaatgtctgtttaaaaagataagatgtgcaaggtcacaaaaatcaaagcaactgataattagggtctccctcaaaagtcttttgccatcatcctctgcaaag

SEQ ID NO: 55318 - DNA, 600 bp, Chicken  19866894308758_9
gtaattgcatgaggctggataattatgaacccatacctgcagtttcctcttggtgtactctggaaggcataatttaagttaaggctttaggaggcaacagaaactcttgaagggaaatagcagtttgtggaaattctgcaaacagaagctgccttctcaacaacagatagattacactgcccactgctcttgactccccagtgtccaacatgcatgcccctgtaggctgwttgcagctccgaractttgccctttcatttctgctactgaaattgcatggatactgagcttagtggttcratttgtgtcacaaggagtttggattaacattgcaaaaatacaccataacaactcagtttaacttccagaagtttgtcctttgttagagttgtgcccaaagcagcctttatactgtctgggcatttgaaacttccatatttaaaatgtctgtttaaaaagataagatgtgcaaggtcacaaaaatcaaagcaactgataattagggtctccctcaaaagtcttttgccatcatcctctgcaaagtctgttaatttggattccttatgggctggtaaaaaaaaaaaaaaaagtaattttgct

SEQ ID NO: 55319 - DNA, 600 bp, Chicken  19866894308759_1
gagctgagtgcggatatatagagtcattaatccatctgtaagaagaagctaatgggtcagaaaagtaacaagaaaaaaaagaataaaaaaagacaccaattttgagaagtgaaaacagagcctgatacagaaagtattttggctgctctgagaaacctgacctgaatctgccagtttttgtacagacgcttacacaaagcattaactgtgctgaagatttacaaacaggaaagcagcttgggctccctatgttctgcttaccaataaagaaaggggttatttctaaggctgcccacaacrgctgctgtgatacatagggaagacgtcagctaaaggccaagagcaggaaagacagtcacgctgcattcaggctgtctctgtgcacttctatcaaaccccctctgctcctgcctggtgatccgccacaactgacaamagctcygcaaagcagcaggaacagctgacacgtgggaaaygaggcctacagaagagctgatgagtcggttacggccaaacaacatactgaggaatcgagacaacagtgagctaaatctaacccaactgcaaagaaaaatgggcaagcaacaaggggagctctct

SEQ ID NO: 55320 - DNA, 600 bp, Chicken  19866894308759_2
ttttggctgctctgagaaacctgacctgaatctgccagtttttgtacagacgcttacacaaagcattaactgtgctgaagatttacaaacaggaaagcagcttgggctccctatgttctgcttaccaataaagaaaggggttatttctaaggctgcccacaacrgctgctgtgatacatagggaagacgtcagctaaaggccaagagcaggaaagacagtcacgctgcattcaggctgtctctgtgcacttctatcaaaccccctctgctcctgcctggtgatccgccacaactgacaamagctcygcaaagcagcaggaacagctgacacgtgggaaaygaggcctacagaagagctgatgagtcggttacggccaaacaacatactgaggaatcgagacaacagtgagctaaatctaacccaactgcaaagaaaaatgggcaagcaacaaggggagctctcttgatcctcttctcctcaatacacaaacacacttctttcatttaagcaccaatatccaaagcgctccgaggtctttttcctctggaaggaaagaacactcctctgcacctcaccaacaaaccacagcacttctcaga

SEQ ID NO: 55321 - DNA, 600 bp, Chicken  19866894308759_3
ctgctctgagaaacctgacctgaatctgccagtttttgtacagacgcttacacaaagcattaactgtgctgaagatttacaaacaggaaagcagcttgggctccctatgttctgcttaccaataaagaaaggggttatttctaaggctgcccacaacrgctgctgtgatacatagggaagacgtcagctaaaggccaagagcaggaaagacagtcacgctgcattcaggctgtctctgtgcacttctatcaaaccccctctgctcctgcctggtgatccgccacaactgacaamagctcygcaaagcagcaggaacagctgacacgtgggaaaygaggcctacagaagagctgatgagtcggttacggccaaacaacatactgaggaatcgagacaacagtgagctaaatctaacccaactgcaaagaaaaatgggcaagcaacaaggggagctctcttgatcctcttctcctcaatacacaaacacacttctttcatttaagcaccaatatccaaagcgctccgaggtctttttcctctggaaggaaagaacactcctctgcacctcaccaacaaaccacagcacttctcagattcact

SEQ ID NO: 55322 - DNA, 600 bp, Chicken  19866894308759_4
tttgtacagacgcttacacaaagcattaactgtgctgaagatttacaaacaggaaagcagcttgggctccctatgttctgcttaccaataaagaaaggggttatttctaaggctgcccacaacrgctgctgtgatacatagggaagacgtcagctaaaggccaagagcaggaaagacagtcacgctgcattcaggctgtctctgtgcacttctatcaaaccccctctgctcctgcctggtgatccgccacaactgacaamagctcygcaaagcagcaggaacagctgacacgtgggaaaygaggcctacagaagagctgatgagtcggttacggccaaacaacatactgaggaatcgagacaacagtgagctaaatctaacccaactgcaaagaaaaatgggcaagcaacaaggggagctctcttgatcctcttctcctcaatacacaaacacacttctttcatttaagcaccaatatccaaagcgctccgaggtctttttcctctggaaggaaagaacactcctctgcacctcaccaacaaaccacagcacttctcagattcactcaaaggcactctgagcagtaagtggaaatctaca

SEQ ID NO: 55323 - DNA, 599 bp, Chicken  19866894308761_1
  misc_feature (1)..(24): n is any nucleotide
nnnnnnnnnnnnnnnnnnnnnnnnatctattctttattctactctttgcctcctgcatcctcatccttcccatgccttttagtgagactctttcctgctctcacctgagattaaattatcttttatgttgctgcttatttctctactgtagatccccacattttcgttcttgactcgtctcttccctgtcaacttcagcagtggtttctgctgctaggttttaggccttttttttccttcctgttcatcttacatgtgctgatgcaaatgttcaagtgaagtgcaggaagaaaataataygatattaggggaaattcttcagcatgtggtgctgttacctattttcattttatattctgtagtgaggattgctggaaattctgacatggtgttatttttcttgctatcaatgtgtacattatcartaaacatgtatktcatgcatcttctttcatctaactgtcgtgtttaattgcactgataaaagttctstattgagtaaatcatgaagttaatctgatttatttgacagcatagcaatactcttcactgtagtctttgtgcaggtctgctttccttatttaagggagatttgtata

SEQ ID NO: 55324 - DNA, 600 bp, Chicken  19866894308761_2
tgttgctgcttatttctctactgtagatccccacattttcgttcttgactcgtctcttccctgtcaacttcagcagtggtttctgctgctaggttttaggccttttttttccttcctgttcatcttacatgtgctgatgcaaatgttcaagtgaagtgcaggaagaaaataataygatattaggggaaattcttcagcatgtggtgctgttacctattttcattttatattctgtagtgaggattgctggaaattctgacatggtgttatttttcttgctatcaatgtgtacattatcartaaacatgtatktcatgcatcttctttcatctaactgtcgtgtttaattgcactgataaaagttctstattgagtaaatcatgaagttaatctgatttatttgacagcatagcaatactcttcactgtagtctttgtgcaggtctgctttccttatttaagggagatttgtatattaagaacagtttcagatgagatgcaaaaccagctaaaagattttcttagaaaataaaagctgcagggagatgatgagatgactgagcaaatccagtgtggtggggaaaatkagaccctggtgata

SEQ ID NO: 55325 - DNA, 600 bp, Chicken  19866894308761_3
tttctctactgtagatccccacattttcgttcttgactcgtctcttccctgtcaacttcagcagtggtttctgctgctaggttttaggccttttttttccttcctgttcatcttacatgtgctgatgcaaatgttcaagtgaagtgcaggaagaaaataataygatattaggggaaattcttcagcatgtggtgctgttacctattttcattttatattctgtagtgaggattgctggaaattctgacatggtgttatttttcttgctatcaatgtgtacattatcartaaacatgtatktcatgcatcttctttcatctaactgtcgtgtttaattgcactgataaaagttctstattgagtaaatcatgaagttaatctgatttatttgacagcatagcaatactcttcactgtagtctttgtgcaggtctgctttccttatttaagggagatttgtatattaagaacagtttcagatgagatgcaaaaccagctaaaagattttcttagaaaataaaagctgcagggagatgatgagatgactgagcaaatccagtgtggtggggaaaatkagaccctggtgataaataataatcct

SEQ ID NO: 55326 - DNA, 600 bp, Chicken  19866894308761_4
cttcagcagtggtttctgctgctaggttttaggccttttttttccttcctgttcatcttacatgtgctgatgcaaatgttcaagtgaagtgcaggaagaaaataataygatattaggggaaattcttcagcatgtggtgctgttacctattttcattttatattctgtagtgaggattgctggaaattctgacatggtgttatttttcttgctatcaatgtgtacattatcartaaacatgtatktcatgcatcttctttcatctaactgtcgtgtttaattgcactgataaaagttctstattgagtaaatcatgaagttaatctgatttatttgacagcatagcaatactcttcactgtagtctttgtgcaggtctgctttccttatttaagggagatttgtatattaagaacagtttcagatgagatgcaaaaccagctaaaagattttcttagaaaataaaagctgcagggagatgatgagatgactgagcaaatccagtgtggtggggaaaatkagaccctggtgataaataataatcctgttaatgtattcctgaacattaagagaatgaagatcggtccctagggatagaaca

SEQ ID NO: 55327 - DNA, 600 bp, Chicken  19866894308761_5
gtgtacattatcartaaacatgtatktcatgcatcttctttcatctaactgtcgtgtttaattgcactgataaaagttctstattgagtaaatcatgaagttaatctgatttatttgacagcatagcaatactcttcactgtagtctttgtgcaggtctgctttccttatttaagggagatttgtatattaagaacagtttcagatgagatgcaaaaccagctaaaagattttcttagaaaataaaagctgcagggagatgatgagatgactgagcaaatccagtgtggtggggaaaatkagaccctggtgataaataataatcctgttaatgtattcctgaacattaagagaatgaagatcggtccctagggatagaacaagaagtagagggcttgtgctgcaacagcagggaataaaaagagtgaggcaaatgcgtttacaaatggaagacttagacagtgaaacaggtacagacaaatgtgtgatgtccgtggagcaagtcatgcgtaaactgtgtggtgtctcttgaggatctggtgatataaattaatgatgtctacagagtaggtggtgagaactaggaaagcatrctaagttg

SEQ ID NO: 55328 - DNA, 600 bp, Chicken  19866894308761_6
ggaaaatkagaccctggtgataaataataatcctgttaatgtattcctgaacattaagagaatgaagatcggtccctagggatagaacaagaagtagagggcttgtgctgcaacagcagggaataaaaagagtgaggcaaatgcgtttacaaatggaagacttagacagtgaaacaggtacagacaaatgtgtgatgtccgtggagcaagtcatgcgtaaactgtgtggtgtctcttgaggatctggtgatataaattaatgatgtctacagagtaggtggtgagaactaggaaagcatrctaagttgttttcagcctccccctactccatcttatttgacttaaaagagaaattgtgctttaaaatgtgggaacgtgacactcgctttctttcaagaactctgcactcttctataaaagagagggataggttcttctctttatctcttctttagccttttctgagcctaaacagttgtagtagaattagagtcacagaatacctcgagttggagaagacccttaagaataattgagtgcaactcctggctccacaatcattaactaatcattaagaattttgatgttttaaggcactct

SEQ ID NO: 55329 - DNA, 600 bp, Chicken  19866894308763_1
atcacagcttactgccttcttacattctttctaacttaaaaattcattcacaaaagaatagaccggatcaaagcaaagagagtgcgttcttcccctcccagtacacgctcttgatgacgtaatggatcatctgcaggtgttactactgctaacagcaaaacagataagcagatatgatgcacaagagacaagttgcatcagcaatattcccactcagcaagaacatatcttttttgctctgttactgtgagatatagatggtttttggcagaaaagaattggtagagaaggaatggaggraaaaaaaaaaggttgttgaaggctttttttggttttcctktccaattcttcaagcctgttcgcagtcaaaaacaattttttcaaaatttcatactacaaattacatcaaaatatgtcttttttgcacttggtcaacgtggcactgccctaacctgtagcagacaaacactctcacaaaatgccatggtaaagcagagcctcaccactcaccatttaattcactggtgttggaaagaaacattgcacttaggttatcgcagagcacattttaatgtagagctttacaatcactttggaggt

SEQ ID NO: 55330 - DNA, 600 bp, Chicken  19866894308763_2; identical to SEQ ID NO: 55329

SEQ ID NO: 55331 - DNA, 600 bp, Chicken  19866894308763_3; identical to SEQ ID NO: 55329

SEQ ID NO: 55332 - DNA, 600 bp, Chicken  19866894308763_4; identical to SEQ ID NO: 55329

SEQ ID NO: 55333 - DNA, 600 bp, Chicken  19866894308763_5; identical to SEQ ID NO: 55329

SEQ ID NO: 55334 - DNA, 600 bp, Chicken  19866894308763_6
aattcattcacaaaagaatagaccggatcaaagcaaagagagtgcgttcttcccctcccagtacacgctcttgatgacgtaatggatcatctgcaggtgttactactgctaacagcaaaacagataagcagatatgatgcacaagagacaagttgcatcagcaatattcccactcagcaagaacatatcttttttgctctgttactgtgagatatagatggtttttggcagaaaagaattggtagagaaggaatggaggaaaaaaaaaaaggttgttgaaggctttttttggttttcctktccaattcttcaagcctgttcgcagtcaaaaacaattttttcaaaatttcatactacaaattacatcaaaatatgtcttttttgcacttggtcaacgtggcactgccctaacctgtagcagacaaacactctcacaaaatgccatggtaaagcagagcctcaccactcaccatttaattcactggtgttggaaagaaacattgcacttaggttatcgcagagcacattttaatgtagagctttacaatcactttggaggtcttaggaaaaaaaagtaaaataataacataaagcagctgg

SEQ ID NO: 55335 - DNA, 599 bp, Chicken  19866894308768_1
  misc_feature (1)..(153): n is any nucleotide
nnnnnnnnnnnnnnnnnnnnnnnnnnnnnnnnnnnnnnnnnnnnnnnnnnnnnnnnnnnnnnnnnnnnnnnnnnnnnnnnnnnnnnnnnnnnnnnnnnnnnnnnnnnnnnnnnnnnnnnnnnnnnnnnnnnnnnnnnnnnnnnnnnnnnnnnnaatgatttatgttctcctactttcccccacaacatgtaggtccttagatatatataaaaacgatataactcctcttcccaccccaattcaatttgatacatgtacaaaaaaatggaagaatgcacttcattcagtaatgtgctttaygggtctgcaagatgagagctttatgatattacagctattttgatccaaatctccttttctcttgctcagagtttattgcaaatcgggaggattaaacacacttcaaagttatttcgtttaaaagcaaaaatctgcaaagcaatgaaatgcaatggtatttcccccccagatacatttcttcagttatgtgaatattcttgtacaatgaagacaaaacatgaaatactctaaaacatctgcatatttaaaagagaatagcaaatgaaatgcaaatggcctcttacctcttcatatctatc

SEQ ID NO: 55336 - DNA, 599 bp, Chicken  19866894308769_1
  misc_feature (1)..(93): n is any nucleotide
nnnnnnnnnnnnnnnnnnnnnnnnnnnnnnnnnnnnnnnnnnnnnnnnnnnnnnnnnnnnnnnnnnnnnnnnnnnnnnnnnnnnnnnnnnnnnaaattggactggcgtaaaatgaaagcttggcttgttctgcttgcttaagaagatggagtatatgaagaatcagggaaacacccactgataaacgctgatcattcctaaactacaatctcaggcagcaatgaaggctgctttcagactttggtactcagcatcacctaaaaattaggggacagaatatacttttctgtcagctttctytttgtattttctatttggctggcttggcctttgcagacatcggctgctttgaaacaaaactctcagagatgagcacaaattttcatggctggccagactttcaactttgctctctaaacataacacatataaatgcttaattgtgcctttattaattagcaatgaaaaaaacattcattttcgtgtggaaaaacactgaaggctggcttcctcccaggtgcacatttgtctctaagtggtcagtgcaaatttatrttaatggcattgtctctgctgctgggaaggtgattctgggatgg

SEQ ID NO: 55337 - DNA, 600 bp, Chicken  19866894308769_2
acctaaaaattaggggacagaatatacttttctgtcagctttctytttgtattttctatttggctggcttggcctttgcagacatcggctgctttgaaacaaaactctcagagatgagcacaaattttcatggctggccagactttcaactttgctctctaaacataacacatataaatgcttaattgtgcctttattaattagcaatgaaaaaaacattcattttcgtgtggaaaaacactgaaggctggcttcctcccaggtgcacatttgtctctaagtggtcagtgcaaatttatrttaatggcattgtctctgctgctgggaaggtgattctgggatggctgatgattaaatgtttggctgtcaacactgtcactaactcatcccgaagcaccaggtgaaaggrttctgacttaccataaacccaggctacagcaatacattcaaagaatgcaacccacaaaaggcatacaccactagctgcatagtagtcaaagagttgaaaaacatacatgccaccctgtaacagagagacacagtgcattaggatccatcaggaaaaagatctgaayacttcaagcccagctgccagtaaaa

SEQ ID NO: 55338 - DNA, 600 bp, Chicken  19866894308769_3
agagatgagcacaaattttcatggctggccagactttcaactttgctctctaaacataacacatataaatgcttaattgtgcctttattaattagcaatgaaaaaaacattcattttcgtgtggaaaaacactgaaggctggcttcctcccaggtgcacatttgtctctaagtggtcagtgcaaatttatrttaatggcattgtctctgctgctgggaaggtgattctgggatggctgatgattaaatgtttggctgtcaacactgtcactaactcatcccgaagcaccaggtgaaaggrttctgacttaccataaacccaggctacagcaatacattcaaagaatgcaacccacaaaaggcatacaccactagctgcatagtagtcaaagagttgaaaaacatacatgccaccctgtaacagagagacacagtgcattaggatccatcaggaaaaagatctgaayacttcaagcccagctgccagtaaaatcttccagcagaccttactgactgctgcctaacaagcagaaatagcaagaaagtggcattaccttccccagggtatgtgctgtttactataggaaacattctaaacaag

SEQ ID NO: 55339 - DNA, 600 bp, Chicken  19866894308769_4
tctaagtggtcagtgcaaatttatrttaatggcattgtctctgctgctgggaaggtgattctgggatggctgatgattaaatgtttggctgtcaacactgtcactaactcatcccgaagcaccaggtgaaaggrttctgacttaccataaacccaggctacagcaatacattcaaagaatgcaacccacaaaaggcatacaccactagctgcatagtagtcaaagagttgaaaaacatacatgccaccctgtaacagagagacacagtgcattaggatccatcaggaaaaagatctgaayacttcaagcccagctgccagtaaaatcttccagcagaccttactgactgctgcctaacaagcagaaatagcaagaaagtggcattaccttccccagggtatgtgctgtttactataggaaacattctaaacaagatgatcatcaaacagaattaagccacttagtataatctactgagacacttaagtctttccttcttaaaagtattttaggatggtcatttataggaacaagtgacgtaaagaaacagtaggtcttttaacattaacacatcaaaggcactaaaaatggcatcagagg

SEQ ID NO: 55340 - DNA, 600 bp, Chicken  19866894308775_1
tggataaatgctatcaggagcttacctatttgctacagaacagtgttatagtagagttaaaaaaaaaataaaaatcattaagcagttagagtgaaattgtttgccttcccatctagagttttggagaatttcagagatagaaaactgcgctagtctcttttaacttgagttgattatgcccgctactgagtaattcctataatgtatttattctgtctacctctacgtatgataaatttcagagggtgtcagtcaaattaaacaaaaggtactctgtatttacagtgatgtaatgttacrgctttagtgtggaggctaccagacaagactagacaaagcaaatgttaaaaataacattctaattaaaccaatcctttggtatggatcactgatggtgttgtggccttgctcttractttcaaacattgaaaggtatttctgatggctgcagctaagagctgtaagcccagctctgctcacgatcagctaacacctgttttggtgaaaagctattttagttgttcagtcccaggattagttttatagaccaaaataaacccttgtcatgcactggagctttagactttggaaaaaacacac

SEQ ID NO: 55341 - DNA, 600 bp, Chicken  19866894308775_2
agagttttggagaatttcagagatagaaaactgcgctagtctcttttaacttgagttgattatgcccgctactgagtaattcctataatgtatttattctgtctacctctacgtatgataaatttcagagggtgtcagtcaaattaaacaaaaggtactctgtatttacagtgatgtaatgttacrgctttagtgtggaggctaccagacaagactagacaaagcaaatgttaaaaataacattctaattaaaccaatcctttggtatggatcactgatggtgttgtggccttgctcttractttcaaacattgaaaggtatttctgatggctgcagctaagagctgtaagcccagctctgctcacgatcagctaacacctgttttggtgaaaagctattttagttgttcagtcccaggattagttttatagaccaaaataaacccttgtcatgcactggagctttagactttggaaaaaacacactgaatgtgtggtctaaaccaactgaaatatatatggaatattcaggtaatgctggaaaatggcactgggcatatgttgatgtcttggccagtgcaggaaagtaaatcttcccct

SEQ ID NO: 55342 - DNA, 599 bp, Chicken  19866894308780_1
  misc_feature (1)..(85): n is any nucleotide
nnnnnnnnnnnnnnnnnnnnnnnnnnnnnnnnnnnnnnnnnnnnnnnnnnnnnnnnnnnnnnnnnnnnnnnnnnnnnnnnnnnnngcaggaagaggctgtcccgcagtgtttttggttgttcactgcggtgctgcacctgcaccaggctcccactgctgagaactggggccgtgccacgctcccagggcagctccagaggggaaggcaagcatcctcagcacgctgtgccctggggtttgtcatcacctccagagccggacccagggccgcctgcatccctgtgagctctctgcagcagytcccagtgggagataacaccgcattgccaccgcagctccatcgtggtgtgctggagctgtgagatttgagcaggatttttctagctkggagctgcatgcccacagcttgcatcatttccttttctgcaggcagyatgrgggtggttttgctcatgctacaaaagcagctcttagggccagggcactggggctgaattragagatagcaaagcartgcctccttcagcagcttttagggctcccttcccattagtgacaaatcccactcttgtccccatcaaagctctctgcaaataaag

SEQ ID NO: 55343 - DNA, 600 bp, Chicken  19866894308780_2
aggaagaggctgtcccgcagtgtttttggttgttcactgcggtgctgcacctgcaccaggctcccactgctgagaactggggccgtgccacgctcccagggcagctccagaggggaaggcaagcatcctcagcacgctgtgccctggggtttgtcatcacctccagagccggacccagggccgcctgcatccctgtgagctctctgcagcagytcccagtgggagataacaccgcattgccaccgcagctccatcgtggtgtgctggagctgtgagatttgagcaggatttttctagctkggagctgcatgcccacagcttgcatcatttccttttctgcaggcagyatgrgggtggttttgctcatgctacaaaagcagctcttagggccagggcactggggctgaattragagatagcaaagcartgcctccttcagcagcttttagggctcccttcccattagtgacaaatcccactcttgtccccatcaaagctctctgcaaataaagagaggcttctcaaagtgagaggttttagaacagaagaaaaggaataggaaaccctttgttgactgtggacctgggctgtctcagcagc

SEQ ID NO: 55344 - DNA, 600 bp, Chicken  19866894308780_3
cacctgcaccaggctcccactgctgagaactggggccgtgccacgctcccagggcagctccagaggggaaggcaagcatcctcagcacgctgtgccctggggtttgtcatcacctccagagccggacccagggccgcctgcatccctgtgagctctctgcagcagytcccagtgggagataacaccgcattgccaccgcagctccatcgtggtgtgctggagctgtgagatttgagcaggatttttctagctkggagctgcatgcccacagcttgcatcatttccttttctgcaggcagyatgrgggtggttttgctcatgctacaaaagcagctcttagggccagggcactggggctgaattragagatagcaaagcartgcctccttcagcagcttttagggctcccttcccattagtgacaaatcccactcttgtccccatcaaagctctctgcaaataaagagaggcttctcaaagtgagaggttttagaacagaagaaaaggaataggaaaccctttgttgactgtggacctgggctgtctcagcagcagtctgatgcaagtaagctctaygcgtggcagtgtgttgggctgcct

SEQ ID NO: 55345 - DNA, 600 bp, Chicken  19866894308780_4
tgcaccaggctcccactgctgagaactggggccgtgccacgctcccagggcagctccagaggggaaggcaagcatcctcagcacgctgtgccctggggtttgtcatcacctccagagccggacccagggccgcctgcatccctgtgagctctctgcagcagytcccagtgggagataacaccgcattgccaccgcagctccatcgtggtgtgctggagctgtgagatttgagcaggatttttctagctkggagctgcatgcccacagcttgcatcatttccttttctgcaggcagyatgrgggtggttttgctcatgctacaaaagcagctcttagggccagggcactggggctgaattragagatagcaaagcartgcctccttcagcagcttttagggctcccttcccattagtgacaaatcccactcttgtccccatcaaagctctctgcaaataaagagaggcttctcaaagtgagaggttttagaacagaagaaaaggaataggaaaccctttgttgactgtggacctgggctgtctcagcagcagtctgatgcaagtaagctctaygcgtggcagtgtgttgggctgcctctgt

SEQ ID NO: 55346 - DNA, 600 bp, Chicken  19866894308780_5
ggggaaggcaagcatcctcagcacgctgtgccctggggtttgtcatcacctccagagccggacccagggccgcctgcatccctgtgagctctctgcagcagytcccagtgggagataacaccgcattgccaccgcagctccatcgtggtgtgctggagctgtgagatttgagcaggatttttctagctkggagctgcatgcccacagcttgcatcatttccttttctgcaggcagyatgrgggtggttttgctcatgctacaaaagcagctcttagggccagggcactggggctgaattragagatagcaaagcartgcctccttcagcagcttttagggctcccttcccattagtgacaaatcccactcttgtccccatcaaagctctctgcaaataaagagaggcttctcaaagtgagaggttttagaacagaagaaaaggaataggaaaccctttgttgactgtggacctgggctgtctcagcagcagtctgatgcaagtaagctctaygcgtggcagtgtgttgggctgcctctgtgttgcctttgctgagcatttgcagttctctctattctcagaaatcaacacaaagggtttt

SEQ ID NO: 55347 - DNA, 600 bp, Chicken  19866894308780_6
ctcagcacgctgtgccctggggtttgtcatcacctccagagccggacccagggccgcctgcatccctgtgagctctctgcagcagytcccagtgggagataacaccgcattgccaccgcagctccatcgtggtgtgctggagctgtgagatttgagcaggatttttctagctkggagctgcatgcccacagcttgcatcatttccttttctgcaggcagyatgrgggtggttttgctcatgctacaaaagcagctcttagggccagggcactggggctgaattragagatagcaaagcartgcctccttcagcagcttttagggctcccttcccattagtgacaaatcccactcttgtccccatcaaagctctctgcaaataaagagaggcttctcaaagtgagaggttttagaacagaagaaaaggaataggaaaccctttgttgactgtggacctgggctgtctcagcagcagtctgatgcaagtaagctctaygcgtggcagtgtgttgggctgcctctgtgttgcctttgctgagcatttgcagttctctctattctcagaaatcaacacaaagggttttccattcccctgtcaca

SEQ ID NO: 55348 - DNA, 521 bp, Chicken  19866894308780_7
atcatttccttttctgcaggcagyatgrgggtggttttgctcatgctacaaaagcagctcttagggccagggcactggggctgaattragagatagcaaagcartgcctccttcagcagcttttagggctcccttcccattagtgacaaatcccactcttgtccccatcaaagctctctgcaaataaagagaggcttctcaaagtgagaggttttagaacagaagaaaaggaataggaaaccctttgttgactgtggacctgggctgtctcagcagcagtctgatgcaagtaagctctaygcgtggcagtgtgttgggctgcctctgtgttgcctttgctgagcatttgcagttctctctattctcagaaatcaacacaaagggttttccattcccctgtcacaccccgatgctcagtgagtcactgctctctgtggccctgattgtcctgggctgacaatgctccttcctgagcactgggaatgtttttgggccagacaggtgccagcaactacaggaag

SEQ ID NO: 55349 - DNA, 600 bp, Chicken  19866894308781_1
actatttgttttgtgctatattacacaaaaaattttctttggcagtaaaagaaaatgcactcgtattcattacatgcaggatttattttgattggtgtataattaaatgtttcatctatgacacagttctaagaaacaaaggaaattttatgtcttgttcttttcttgtttttccttcttcattctcaatcctggtgagcaccccagaagagaatgagtttgaaggagacagtgcaccctccatgccaaagggattgaattgcagacccaaatcagtgttctctgtggagtgccatgtaycagcaaccctctcctgctcaggtacgggcacattctgctcatgatggacacactgcttyctcatggacacactccatgacttgagcacaacattgtatcgttgactcatgcttcaagtgaagttcagaagaaatatttctgccttgctttcctcccttcctctccattcctctgtcccttttcataaatcccctttgcactcccttcttatcatgcttttatcaaaaattaaaatatttatagtgaagtgcaaacacgaagttaagtcaacaggaatctttaaaccaatagcatgcatta

SEQ ID NO: 55350 - DNA, 553 bp, Chicken  19866894308781_2
ctcgtattcattacatgcaggatttattttgattggtgtataattaaatgtttcatctatgacacagttctaagaaacaaaggaaattttatgtcttgttcttttcttgtttttccttcttcattctcaatcctggtgagcaccccagaagagaatgagtttgaaggagacagtgcaccctccatgccaaagggattgaattgcagacccaaatcagtgttctctgtggagtgccatgtaycagcaaccctctcctgctcaggtacgggcacattctgctcatgatggacacactgcttyctcatggacacactccatgacttgagcacaacattgtatcgttgactcatgcttcaagtgaagttcagaagaaatatttctgccttgctttcctcccttcctctccattcctctgtcccttttcataaatcccctttgcactcccttcttatcatgcttttatcaaaaattaaaatatttatagtgaagtgcaaacacgaagttaagtcaacaggaatctttaaaccaatagcatgcattaccctccctcaca

SEQ ID NO: 55351 - DNA, 599 bp, Chicken  19866894308784_1
  misc_feature (1)..(22): n is any nucleotide
nnnnnnnnnnnnnnnnnnnnnntctgtacgccagtgtgaagtatgtcccatagatatttaatagtcataccattccctgtttgttgcagccaaaaaccaatcagaagactattgttggtttgtaattcattaagggagggatgcctgaagtcattacagtgaatgcatattggccaggaaccatatttattttttgcaaatttcatcttgtcaagctgcatcaggacacattttgttattactaaattatcctttatgacagctgatatgatcacagcattacacaatgtggactgaacratgacatgcaatasattgaaatatgacagaaaaagtgggctttgtgtaaaaaaaatacaatttttttctgaatatgaatgtgaaaggataccaaatgaaatgtttgcctgtaatttgtaatttgcactaaattgaaatcttctgtcctccccacacattgcatgaatgtgcacaatatrccaccaagacaaaggttgcttctgaccctgcatatactrtgacaatccatgtaagtggagragccacagaaacttccagtccaacagcagctacacctagaaacacgctacaggtcttca

SEQ ID NO: 55352 - DNA, 599 bp, Chicken  19866894308784_2
  misc_feature (1)..(8): n is any nucleotide
nnnnnnnntctgtacgccagtgtgaagtatgtcccatagatatttaatagtcataccattccctgtttgttgcagccaaaaaccaatcagaagactattgttggtttgtaattcattaagggagggatgcctgaagtcattacagtgaatgcatattggccaggaaccatatttattttttgcaaatttcatcttgtcaagctgcatcaggacacattttgttattactaaattatcctttatgacagctgatatgatcacagcattacacaatgtggactgaacratgacatgcaatasattgaaatatgacagaaaaagtgggctttgtgtaaaaaaaatacaatttttttctgaatatgaatgtgaaaggataccaaatgaaatgtttgcctgtaatttgtaatttgcactaaattgaaatcttctgtcctccccacacattgcatgaatgtgcacaatatrccaccaagacaaaggttgcttctgaccctgcatatactrtgacaatccatgtaagtggagragccacagaaacttccagtccaacagcagctacacctagaaacacgctacaggtcttcagaggtctatataga

SEQ ID NO: 55353 - DNA, 600 bp, Chicken  19866894308784_3
accatatttattttttgcaaatttcatcttgtcaagctgcatcaggacacattttgttattactaaattatcctttatgacagctgatatgatcacagcattacacaatgtggactgaacratgacatgcaatasattgaaatatgacagaaaaagtgggctttgtgtaaaaaaaatacaatttttttctgaatatgaatgtgaaaggataccaaatgaaatgtttgcctgtaatttgtaatttgcactaaattgaaatcttctgtcctccccacacattgcatgaatgtgcacaatatrccaccaagacaaaggttgcttctgaccctgcatatactrtgacaatccatgtaagtggagragccacagaaacttccagtccaacagcagctacacctagaaacacgctacaggtcttcagaggtctatatagaaaatgaaatttatggttgcaaatgaactgagggagcctttgttttctctgcaacacttagaactgaaatggcgggatccagtgagttccttgaaaccgtactttacccatgatttttgagctatacgcacacacaggcacttgggaagaaaagtggctccactaag

SEQ ID NO: 55354 - DNA, 595 bp, Chicken  19866894308784_4
catcaggacacattttgttattactaaattatcctttatgacagctgatatgatcacagcattacacaatgtggactgaacratgacatgcaatasattgaaatatgacagaaaaagtgggctttgtgtaaaaaaaatacaatttttttctgaatatgaatgtgaaaggataccaaatgaaatgtttgcctgtaatttgtaatttgcactaaattgaaatcttctgtcctccccacacattgcatgaatgtgcacaatatrccaccaagacaaaggttgcttctgaccctgcatatactrtgacaatccatgtaagtggagragccacagaaacttccagtccaacagcagctacacctagaaacacgctacaggtcttcagaggtctatatagaaaatgaaatttatggttgcaaatgaactgagggagcctttgttttctctgcaacacttagaactgaaatggcgggatccagtgagttccttgaaaccgtactttacccatgatttttgagctatacgcacacacaggcacttgggaagaaaagtggctccactaagcagcacccacaccactcaagtaggtcctgtcctg

SEQ ID NO: 55355 - DNA, 573 bp, Chicken  19866894308784_5
actaaattatcctttatgacagctgatatgatcacagcattacacaatgtggactgaacratgacatgcaatasattgaaatatgacagaaaaagtgggctttgtgtaaaaaaaatacaatttttttctgaatatgaatgtgaaaggataccaaatgaaatgtttgcctgtaatttgtaatttgcactaaattgaaatcttctgtcctccccacacattgcatgaatgtgcacaatatrccaccaagacaaaggttgcttctgaccctgcatatactrtgacaatccatgtaagtggagragccacagaaacttccagtccaacagcagctacacctagaaacacgctacaggtcttcagaggtctatatagaaaatgaaatttatggttgcaaatgaactgagggagcctttgttttctctgcaacacttagaactgaaatggcgggatccagtgagttccttgaaaccgtactttacccatgatttttgagctatacgcacacacaggcacttgggaagaaaagtggctccactaagcagcacccacaccactcaagtaggtcctgtcctg

SEQ ID NO: 55356 - DNA, 600 bp, Chicken  19866894308786_1
agggggctcatcagccttaaagaagcaatgaggaaagctggcaattctggctttgattatgatctcgagccaactcctactctgtgttcttaattcagttcttaatttagttcttaaaacttcattttagcaaataatgttccaatctctgaacacttaatacaagatgatgatttttaacaagagtttccttgttcatttctatttcagtatttggttaatccaagtgagcaagatatacacaaggccaaaggttaggataaaatgctgaaacagttttcttcttatgaatattcatgyaataacttttggaatacatagtgattctcttggagcattctaccttggcactaaacatgttacaaaatatatatcttcaaatagataaggacagaaaaagtaatttctaagaaatattcccaattatccagggtgaggcactctgaatcttaagcaggaaaataaggcataagaactaaggagatctgaaagatttgcctgctgtttaaaattagatgtcttctttctattccacaccaagagagtttaagcactgaaaattaataattttaattgcagtttgtcacttttagcgaagaa

SEQ ID NO: 55357 - DNA, 600 bp, Chicken  19866894308792_1
tgggggttatattgctaaaaaatggcaaaaattagtatcttattttcatctaagcatccaactttcatccaacattgaaaactatgctgcataagataagaaaacaagctatattatagagattttctgataatattaaaggtgattttatttgagtatactacaaatctcttatgaactggtgtgtccaaagaccatcataggaagcctcactctaggtacaagtacgtggcaaggcagtgatgcattaacagtaccatttaagcagatcactcaaaaaattagtaaaaataagtaacyattacttgaggcatttcaaccactcttttatctcaactatctttttttctacwattayaaagtaggcctttgaactctyaagcactgattctactcttaattcatatattcttggttctgtgtgcactcacatccagttgtggattcaacaatagttgaatttgttattgtcaggaaagatttaacactgtttgtataaatgagttgaagttaagaaagaaaaaaagagaaacatcagtacagaaaataaaacttctctgcagattcaatccacttgaagtgtggtggtttaattccatt

SEQ ID NO: 55358 - DNA, 572 bp, Chicken  19866894308792_2
gcatccaactttcatccaacattgaaaactatgctgcataagataagaaaacaagctatattatagagattttctgataatattaaaggtgattttatttgagtatactacaaatctcttatgaactggtgtgtccaaagaccatcataggaagcctcactctaggtacaagtacgtggcaaggcagtgatgcattaacagtaccatttaagcagatcactcaaaaaattagtaaaaataagtaacyattacttgaggcatttcaaccactcttttatctcaactatctttttttctacwattayaaagtaggcctttgaactctyaagcactgattctactcttaattcatatattcttggttctgtgtgcactcacatccagttgtggattcaacaatagttgaatttgttattgtcaggaaagatttaacactgtttgtataaatgagttgaagttaagaaagaaaaaaagagaaacatcagtacagaaaataaaacttctctgcagattcaatccacttgaagtgtggtggtttaattccattattcaaaacacccagaactcactac

SEQ ID NO: 55359 - DNA, 567 bp, Chicken  19866894308792_3
caactttcatccaacattgaaaactatgctgcataagataagaaaacaagctatattatagagattttctgataatattaaaggtgattttatttgagtatactacaaatctcttatgaactggtgtgtccaaagaccatcataggaagcctcactctaggtacaagtacgtggcaaggcagtgatgcattaacagtaccatttaagcagatcactcaaaaaattagtaaaaataagtaacyattacttgaggcatttcaaccactcttttatctcaactatctttttttctacwattayaaagtaggcctttgaactctyaagcactgattctactcttaattcatatattcttggttctgtgtgcactcacatccagttgtggattcaacaatagttgaatttgttattgtcaggaaagatttaacactgtttgtataaatgagttgaagttaagaaagaaaaaaagagaaacatcagtacagaaaataaaacttctctgcagattcaatccacttgaagtgtggtggtttaattccattattcaaaacacccagaactcactac

SEQ ID NO: 55360 - DNA, 546 bp, Chicken  19866894308792_4
aactatgctgcataagataagaaaacaagctatattatagagattttctgataatattaaaggtgattttatttgagtatactacaaatctcttatgaactggtgtgtccaaagaccatcataggaagcctcactctaggtacaagtacgtggcaaggcagtgatgcattaacagtaccatttaagcagatcactcaaaaaattagtaaaaataagtaacyattacttgaggcatttcaaccactcttttatctcaactatctttttttctacwattayaaagtaggcctttgaactctyaagcactgattctactcttaattcatatattcttggttctgtgtgcactcacatccagttgtggattcaacaatagttgaatttgttattgtcaggaaagatttaacactgtttgtataaatgagttgaagttaagaaagaaaaaaagagaaacatcagtacagaaaataaaacttctctgcagattcaatccacttgaagtgtggtggtttaattccattattcaaaacacccagaactcactac

SEQ ID NO: 55361 - DNA, 600 bp, Chicken  19866894308805_1
tcggggtgcccagagtgtgttgacagacgccaagcagtacaagtgtaaagacttctagaagttagaaagcacaccctgggaaggaagatgagctcacaatgacatcctgctggggcacccatgtatttaaacaccgttcagctgagcaaaaccttctgtcagaccttctctagtggaacagaccccacactgggttaccccagatgtgttatttccagtacgaaggcacaacctgcagcatggaatgctgcacaaggagggacttgtggtttctggctccattctggggcagagctgcakggcatggccctcacctgcccccttccagcacagggcataggatggtaggtgctggtgcacagcactgcttaggtcctgcmctgctttgggggtatccataagatgaaactttcttgaactgatacatagagaagtaaaactgatcaacttgattcactttttccccagaatagaaagagtaaatgcaatatgcagagcataaggactgcaaaccaaaggcatggtcacagccaaattaaaccatctccactggagtcaataacatcacaagaatagggatatcagcatgtggctatgaac

SEQ ID NO: 55362 - DNA, 600 bp, Chicken  19866894308805_2
aaggaagatgagctcacaatgacatcctgctggggcacccatgtatttaaacaccgttcagctgagcaaaaccttctgtcagaccttctctagtggaacagaccccacactgggttaccccagatgtgttatttccagtacgaaggcacaacctgcagcatggaatgctgcacaaggagggacttgtggtttctggctccattctggggcagagctgcakggcatggccctcacctgcccccttccagcacagggcataggatggtaggtgctggtgcacagcactgcttaggtcctgcmctgctttgggggtatccataagatgaaactttcttgaactgatacatagagaagtaaaactgatcaacttgattcactttttccccagaatagaaagagtaaatgcaatatgcagagcataaggactgcaaaccaaaggcatggtcacagccaaattaaaccatctccactggagtcaataacatcacaagaatagggatatcagcatgtggctatgaaccagacagaatcctttcagcttgaatgcaataaaaatttagaataaataacttcatcaactctgtgagcccagcaacaaca

SEQ ID NO: 55363 - DNA, 599 bp, Chicken  19866894308807_1
  misc_feature (1)..(15): n is any nucleotide
nnnnnnnnnnnnnnnttcatttttttctaactgagaattagtttatcatagctgaaatattcaggaaaccttatttttatttttaatgtatgcagatagcagttacagcagtggtcagatagacttaaagaaaaatgaaaattctttgccagcagcccaaacattttgtagctttgcctctggacaacaatgttgtgtggacacactaacgtaattcattgtaaatctaatgctgtaatctgcctgccattttagaataaacagctatttcctaaaattatgaaatctcatatctgattygaaggagccttagtaacacaaatgaacaactagtaaaagacttcagtctcccagggccccacagcctaacataaatccctgtacacaaaatctgtataaagtgacagcacagcaaaggaaaaagtctcccactctgtttcttgttcggagccacagcaaggcctaacacaaatcagctcatctccctcattttgcagaaacactacaagaattagttacatgtcaatcgtaaatatcatttcaatattagacagtctgaggtagtcataagaaacactaggaattaccttggatataaa

SEQ ID NO: 55364 - DNA, 599 bp, Chicken  19866894308809_1
  misc_feature (1)..(172): n is any nucleotide
nnnnnnnnnnnnnnnnnnnnnnnnnnnnnnnnnnnnnnnnnnnnnnnnnnnnnnnnnnnnnnnnnnnnnnnnnnnnnnnnnnnnnnnnnnnnnnnnnnnnnnnnnnnnnnnnnnnnnnnnnnnnnnnnnnnnnnnnnnnnnnnnnnnnnnnnnnnnnnnnnnnnnnnnnnnnactgaacagactctgaaaatgcaggagtttgccttctccacccactaattaaaaggcagataggtaagaaaggcttggagatctactcccgaaaccttaaaaggagaagataaatggaaccacagtawgttcaacgtctacctactggtaatatgtggtctaaaatagaaaatatttgttgtccctctgccccttgttacctaaagcatggaacggctccagaatataaagtggttagaattcaagaaatagactatttaccacgcccaaaacaatctgacataaacaacacaaaaaawccttatgtataaaattctgtatttcttcagatgcaaaaatctgacaacacagctcrgaacaacagtatacagaataattcaggggagcatactattggggttacacatgtatacataacgtgtatata

SEQ ID NO: 55365 - DNA, 599 bp, Chicken  19866894308809_2
  misc_feature (1)..(1): n is any nucleotide
nactgaacagactctgaaaatgcaggagtttgccttctccacccactaattaaaaggcagataggtaagaaaggcttggagatctactcccgaaaccttaaaaggagaagataaatggaaccacagtawgttcaacgtctacctactggtaatatgtggtctaaaatagaaaatatttgttgtccctctgccccttgttacctaaagcatggaacggctccagaatataaagtggttagaattcaagaaatagactatttaccacgcccaaaacaatctgacataaacaacacaaaaaawccttatgtataaaattctgtatttcttcagatgcaaaaatctgacaacacagctcrgaacaacagtatacagaataattcaggggagcatactattggggttacacatgtatacataacgtgtatatagtgtgtgtcccataatggaaaaaytaacctaatgaatctatgaatcaagatcttaaagggctggaaaaaaaagaaaattaaaattgatctgtaaagattaatagtttgtccaaaatgtgaagaaagtgacttatgaagaagcgtacataatttttaagctcagtatgccct

SEQ ID NO: 55366 - DNA, 600 bp, Chicken  19866894308809_3
gcagataggtaagaaaggcttggagatctactcccgaaaccttaaaaggagaagataaatggaaccacagtawgttcaacgtctacctactggtaatatgtggtctaaaatagaaaatatttgttgtccctctgccccttgttacctaaagcatggaacggctccagaatataaagtggttagaattcaagaaatagactatttaccacgcccaaaacaatctgacataaacaacacaaaaaawccttatgtataaaattctgtatttcttcagatgcaaaaatctgacaacacagctcrgaacaacagtatacagaataattcaggggagcatactattggggttacacatgtatacataacgtgtatatagtgtgtgtcccataatggaaaaaytaacctaatgaatctatgaatcaagatcttaaagggctggaaaaaaaagaaaattaaaattgatctgtaaagattaatagtttgtccaaaatgtgaagaaagtgacttatgaagaagcgtacataatttttaagctcagtatgcccttctacctggaacatttgtacatacaccctagtattcatccaccaggccaagaacacc

SEQ ID NO: 55367 - DNA, 600 bp, Chicken  19866894308809_4
tatgtggtctaaaatagaaaatatttgttgtccctctgccccttgttacctaaagcatggaacggctccagaatataaagtggttagaattcaagaaatagactatttaccacgcccaaaacaatctgacataaacaacacaaaaaawccttatgtataaaattctgtatttcttcagatgcaaaaatctgacaacacagctcrgaacaacagtatacagaataattcaggggagcatactattggggttacacatgtatacataacgtgtatatagtgtgtgtcccataatggaaaaaytaacctaatgaatctatgaatcaagatcttaaagggctggaaaaaaaagaaaattaaaattgatctgtaaagattaatagtttgtccaaaatgtgaagaaagtgacttatgaagaagcgtacataatttttaagctcagtatgcccttctacctggaacatttgtacatacaccctagtattcatccaccaggccaagaacaccctactgacagtactgcagaatcaacaacaaaactagagtgaaatgtggtgcagttcgcagacgcccaaagacctgctgttgagcttccctgaaacc

SEQ ID NO: 55368 - DNA, 600 bp, Chicken  19866894308810_1
tctactgtcttatttcttacagaccttggcaatatttcttctaaatttggctgtctcctaattaataacattaaatacaaaaagttagacaaaggaaattaatttccaagttgccaaaggacaaagagtctgagcaaaatacacaaaatactgacaatgcaggtctcttgttgcatccctgtttttgagaatttacagacactgcagaatgtaacatctattattttctttcttcttcagtattagtagcaattatgtatattattattaaccctatatattttctgggtttaacaaccyccagtaaggcactgttggtcctcattgacctaggcataaaaagtgcaccagacttcctctttaagaacaaatttgttatatgcagtctcaactcagacacacaaaaaaagtaagtttcgtacgtgagcaaaatgcaacacccatttccatagaaaggggattctgaccataaaatgaacaaatgaacaaatgaaaaataattttcatagcagcaatacagtttctaacttccgtttcaattttggtgccactgtgaaggataatctaataaaaataaattagtgcagacatttctctcat

SEQ ID NO: 55369 - DNA, 600 bp, Chicken  19866894308825_1
accttaattccactcttgggataataagccttcctcataagtttccttccctgtaacaaattctgatatatgcttatagccccctaaatctattcccacaagaagtaaatgaataaatatgcatcagtgtaatttacatagccttcaccgcaagcatggtaggactgttcataaactcactactgtttactgtgcgaaaaactcattaagctcccctttgaatacaggaatgaaacttattttttaatttattagacgtattctcattcgtctccagttcaacaacatgaagcacggatrcattcctctccagttagaagtaaaataaagtaagagaatcagaactatatacttttgattgctcattaaaacttcacagtcgttcccaactcaaataattaagctgttgcatagagttgataagtagaaaaccacacttctaagttagtttatcaagtgtttatccaccaattattcctgggtatacattcatcccttctctcagagctctaaaatgttaaatgcagagattcagggaaacagtyctgagtcagtgatcagctctactaacaggcagaaaagwaagacataattgaactt

SEQ ID NO: 55370 - DNA, 600 bp, Chicken  19866894308825_2
aatttattagacgtattctcattcgtctccagttcaacaacatgaagcacggatrcattcctctccagttagaagtaaaataaagtaagagaatcagaactatatacttttgattgctcattaaaacttcacagtcgttcccaactcaaataattaagctgttgcatagagttgataagtagaaaaccacacttctaagttagtttatcaagtgtttatccaccaattattcctgggtatacattcatcccttctctcagagctctaaaatgttaaatgcagagattcagggaaacagtyctgagtcagtgatcagctctactaacaggcagaaaagwaagacataattgaacttgaaaaagcaggcaacttactggtagatgtcagtttcttattgagctccatcaactgcacacgaaatacatttcctgaaaactttctctttgcttttgaggaactgctgatctctgaaggcaaaactcgatgcaggaaaattcttgtccaagcctgcctaaaagtcattcaatataatgtgatttccagaattttcagtgagactaaattcaatctgttagagcttttttttaaagacacctgagc

SEQ ID NO: 55371 - DNA, 600 bp, Chicken  19866894308825_3
aacatgaagcacggatrcattcctctccagttagaagtaaaataaagtaagagaatcagaactatatacttttgattgctcattaaaacttcacagtcgttcccaactcaaataattaagctgttgcatagagttgataagtagaaaaccacacttctaagttagtttatcaagtgtttatccaccaattattcctgggtatacattcatcccttctctcagagctctaaaatgttaaatgcagagattcagggaaacagtyctgagtcagtgatcagctctactaacaggcagaaaagwaagacataattgaacttgaaaaagcaggcaacttactggtagatgtcagtttcttattgagctccatcaactgcacacgaaatacatttcctgaaaactttctctttgcttttgaggaactgctgatctctgaaggcaaaactcgatgcaggaaaattcttgtccaagcctgcctaaaagtcattcaatataatgtgatttccagaattttcagtgagactaaattcaatctgttagagcttttttttaaagacacctgagcatcagcataatttatcttccttggatatgactctgaag

SEQ ID NO: 55372 - DNA, 600 bp, Chicken  19866894308826_1
aaaactattgttttcagttgtaatacgacttttgattggtttaacaaattgtgaaactatggagtggaggttaagagaagcagagccagaaagccaagttgtatgggaactattgaatcatggcctgaaccactgattgatcacctgaggcgagcactgagtcagccatgggagcacaggtgaaggcaattcagctgtgtgaccagaaggggtggagcctggctacacctctcctagaccccatttaagggctgactggtagtggggaaggttctccttctgtttttgtgtgcgtgtgcytaggacatggrtgattatttcatttatttttgtttgtttctttccactgtgataatccttctagttacacaacctgtaaaataccagcctaaccacrccactctgctgattgtatatttgttgaytgtacacaagtgtaatttttcaggtgattgtctgaccacaaagtttgcattctccttctgactccatgactattaaattattatagacttatagtcattagagtctaaactgtgattatgaaacatccttgcttgccaataggtgatgtcattaatttagagcattattcttcta

SEQ ID NO: 55373 - DNA, 600 bp, Chicken  19866894308826_2
tttcagttgtaatacgacttttgattggtttaacaaattgtgaaactatggagtggaggttaagagaagcagagccagaaagccaagttgtatgggaactattgaatcatggcctgaaccactgattgatcacctgaggcgagcactgagtcagccatgggagcacaggtgaaggcaattcagctgtgtgaccagaaggggtggagcctggctacacctctcctagaccccatttaagggctgactggtagtggggaaggttctccttctgtttttgtgtgcgtgtgcytaggacatggrtgattatttcatttatttttgtttgtttctttccactgtgataatccttctagttacacaacctgtaaaataccagcctaaccacrccactctgctgattgtatatttgttgaytgtacacaagtgtaatttttcaggtgattgtctgaccacaaagtttgcattctccttctgactccatgactattaaattattatagacttatagtcattagagtctaaactgtgattatgaaacatccttgcttgccaataggtgatgtcattaatttagagcattattcttctatccaagcatta

SEQ ID NO: 55374 - DNA, 600 bp, Chicken  19866894308826_3
gttgtatgggaactattgaatcatggcctgaaccactgattgatcacctgaggcgagcactgagtcagccatgggagcacaggtgaaggcaattcagctgtgtgaccagaaggggtggagcctggctacacctctcctagaccccatttaagggctgactggtagtggggaaggttctccttctgtttttgtgtgcgtgtgcytaggacatggrtgattatttcatttatttttgtttgtttctttccactgtgataatccttctagttacacaacctgtaaaataccagcctaaccacrccactctgctgattgtatatttgttgaytgtacacaagtgtaatttttcaggtgattgtctgaccacaaagtttgcattctccttctgactccatgactattaaattattatagacttatagtcattagagtctaaactgtgattatgaaacatccttgcttgccaataggtgatgtcattaatttagagcattattcttctatccaagcattacaactaagtgcacggatggactactaaaaaaagaataagaaaaaaacatacaaaaatgacacataagtgatctaagtgaaaaattc

SEQ ID NO: 55375 - DNA, 600 bp, Chicken  19866894308826_4
tgaaccactgattgatcacctgaggcgagcactgagtcagccatgggagcacaggtgaaggcaattcagctgtgtgaccagaaggggtggagcctggctacacctctcctagaccccatttaagggctgactggtagtggggaaggttctccttctgtttttgtgtgcgtgtgcytaggacatggrtgattatttcatttatttttgtttgtttctttccactgtgataatccttctagttacacaacctgtaaaataccagcctaaccacrccactctgctgattgtatatttgttgaytgtacacaagtgtaatttttcaggtgattgtctgaccacaaagtttgcattctccttctgactccatgactattaaattattatagacttatagtcattagagtctaaactgtgattatgaaacatccttgcttgccaataggtgatgtcattaatttagagcattattcttctatccaagcattacaactaagtgcacggatggactactaaaaaaagaataagaaaaaaacatacaaaaatgacacataagtgatctaagtgaaaaattcccaaatcaatattttgaattcaaatttt

SEQ ID NO: 55376 - DNA, 600 bp, Chicken  19866894308830_1
acaaacttactagttctaaagctctgtgtatcaactgtgggaactcacttttcagtaacttacattggccaaagccaggcagattttctgaggcagggtaaaaatgtttccaacacaaaaatctaaacgtgagaattagagcacttaaaaataaaaggcttaagaacacaagcagaaaaccagtgttttacttacatccattcttaagttggttatacctcagcttcaggcttcccccccacccagttaaattcaggtcagaaacaattgcgtctatgtctaaagctctccctccatacrgttccagatatacaaagttaaaaacaaaaagaatatcacaagagttgcatatgccccatctgaagtattgtaagactggtaacagtaccaataaagttaatgtttcagttgctaacatttcaaataaatttaaagtttactgattgagattgagggttgcattcagaaattcaaaccaacgtttcagccttactcttacttatattgcaagcactaataaactagatataatccatgcttctgttaaagcagttaaaaggttacaaaatcatggcctcctagcaggaacttggcaagtaa

SEQ ID NO: 55377 - DNA, 599 bp, Chicken  19866894308832_1
  misc_feature (1)..(47): n is any nucleotide
nnnnnnnnnnnnnnnnnnnnnnnnnnnnnnnnnnnnnnnnnnnnnnngacttggggggtcctggtggacgagaagctggacatgagccagcagtgtgcgcttgcagcccagaaggccaactgtgttctgggctgcattaaaaagaggtggccagcagggagagggaggtgattgtccccctctaatcggcacttgtgaggccccatctggagtactgtgtccaggcccggggcccccaacacaggaaggatgtggagctcttggagggggtccagaggagggccactaagatggccagarggctgaagcacctctcctatgaggaaaggttgaaggaattgggattgtttagcttggagaagagaaggctctggggagacctcattgtggccttccagtacttgaagggagcgtataaacaggagggggaacggctgtttgtgagggtggataggacaggagggaatggtcttgaactgagtcaggggaggtttaggttggatattaggaggaagtttttcacacagagggtggtgatgcactggaacaggttgcccaaagaggctgtggatgccccakccctggaggcattcaaggcc

SEQ ID NO: 55378 - DNA, 600 bp, Chicken  19866894308832_2
gggccactaagatggccagarggctgaagcacctctcctatgaggaaaggttgaaggaattgggattgtttagcttggagaagagaaggctctggggagacctcattgtggccttccagtacttgaagggagcgtataaacaggagggggaacggctgtttgtgagggtggataggacaggagggaatggtcttgaactgagtcaggggaggtttaggttggatattaggaggaagtttttcacacagagggtggtgatgcactggaacaggttgcccaaagaggctgtggatgccccakccctggaggcattcaaggccaggctggatgtggctctgggcagcctggtctggtggctggcgaccctgggacatagcaggggggttgaaactcgatgatcattgtggtccttttcaacccaggccattctgtgattttatgtatctctgggcttgggcattagtttatgatgaacgtgtgaatttgccttcataagctgagtgcatccttttgtcacagactaatggaatgaaggttatggccatactgtgagatggcaagcaatctcgggaaggggaaaataccatctccacatgcttt

SEQ ID NO: 55379 - DNA, 600 bp, Chicken  19866894308833_1
ccctctgtaagtatgaacagcaagatgcttaagcgtatccatcaggtcttgctgctttgttgtggtgcttttttcctcctttatctgggagtgctgctcattgattcagtcagctttcatctgtcagtacaacaaaggctgagtaatacaagacctatgcttctttccagtttcggtaaaatgtaggtaaaaagtgcttcataaactggacataggtcaattcagcattgctttctctctgaactgctcagtaggggtttgagataactttatgtggaagtgtttgacatagtgaccttstcatgagaccgggctctcctccctgctgctcatcctgaccgcacatcttgcctcagcattagagtaaggcctttagcttttggacagtctttctctctttacatttgatttattagctccaattctaattatattgtattatagtgtgttatcttgcattccaatatcttatttagtaaatttgtttctcttcagatcgttgctactgttttgttttggggcccatctctctatccttttcctttaccctttccagagcttggatccgcgggtccctctgcccccctagtcatggaactg

SEQ ID NO: 55380 - DNA, 600 bp, Chicken  19866894308835_1
ggagaaggcagtgagcgagcaaattagatggatagctgtggtcttgaaaggctacaatattgccttcttgagcgtcgtccactcaagcaatatatgatagagatgacagaattaattaaaagagagttggcagccaagtcagaggctataaaatccagacagctttttgtataatcatataataataataataataacgaagggagaaatagcaaataaatttgtctggcactaagatacaacatgcaaattttcagtagagcagtggatgtttgaagctcatctaaagagagagattarcgtttattttcttagtgtgtgcgccgcctgatttcttcttggaactatccacttagtttttaaattggccaatcacaacgcattcaatgccacctccacacaacaagcaatcaacaaaacctcacatgctcattgtatttttatttttattatttttttgcagacagagctatgaaaaatcctgttaagcagtaccataagatgacatccatagtaatttagccagacagcaattctgtgcccagcagccagctcttgcaggctctacacactttttccctctgaatattaagctgacat

SEQ ID NO: 55381 - DNA, 599 bp, Chicken  19866894308837_1
  misc_feature (1)..(28): n is any nucleotide
nnnnnnnnnnnnnnnnnnnnnnnnnnnncaggccatggccctgcaggtacccgcgggccccgctcgccgtgctcagtgccggtgctgagtgcccgtcgccgcgttcccgtgggtgttggggcccggagcgtcccttgggcgcagccccagatcggggtgaggcagcagagctttgctccgacgtcctcccgtgtgtcacccggagaaacatcacctcccgcccggtgcgggcggctgggcccgggcacgcaactctcgtgctgcaggacggggagagctgcatttcctctctccaagtgygttttatctgcccaaagcaggcagttctggctcaaaacgctgtgatccccacgtgccgttgctctgcttcttcacgtgcgccagctgaaggagcccacagccaccctgcggggtcgcccacggcttgtcccaaccggtggcactgctgaggatccagcagcccctcgccagacacagcaaagccctgcggccaggtgtctctcctgagagagtgctggcgagtgyaggtgtagggagcgggctgtgtgacatccacagctggaggggcagcagtaagggccccaagcacgtgctccttt

SEQ ID NO: 55382 - DNA, 600 bp, Chicken  19866894308837_2
tgcgggcggctgggcccgggcacgcaactctcgtgctgcaggacggggagagctgcatttcctctctccaagtgygttttatctgcccaaagcaggcagttctggctcaaaacgctgtgatccccacgtgccgttgctctgcttcttcacgtgcgccagctgaaggagcccacagccaccctgcggggtcgcccacggcttgtcccaaccggtggcactgctgaggatccagcagcccctcgccagacacagcaaagccctgcggccaggtgtctctcctgagagagtgctggcgagtgyaggtgtagggagcgggctgtgtgacatccacagctggaggggcagcagtaagggccccaagcacgtgctccttttcctctccttgacagccagctttgttcccttgcaggcgttcaaagtctttgagcggatggcccggcaggatgacgagaagcggcgccgggagctggaggcaaagctccgcaagaaggaggaggaggaggaagctgccgcatctgccgagagggtgagagtggccccggccgcccatgaggtcgaggtggagacaacggaggaacccgagccctcgctggatgcagg

SEQ ID NO: 55383 - DNA, 599 bp, Chicken  19866894308844_1
  misc_feature (1)..(247): n is any nucleotide
nnnnnnnnnnnnnnnnnnnnnnnnnnnnnnnnnnnnnnnnnnnnnnnnnnnnnnnnnnnnnnnnnnnnnnnnnnnnnnnnnnnnnnnnnnnnnnnnnnnnnnnnnnnnnnnnnnnnnnnnnnnnnnnnnnnnnnnnnnnnnnnnnnnnnnnnnnnnnnnnnnnnnnnnnnnnnnnnnnnnnnnnnnnnnnnnnnnnnnnnnnnnnnnnnnnnnnnnnnnnnnnnnnnnnnnnnnnnnnnnnnnnnnntgaaaatgcttcaggtaaagccttgtttcataatttgaatgagaataatattytgcaacttttattttaaaaacrcactgcataagcttctcagtaaagggtacaatcgcttgatggaattccggagatccttatcactggaacacaaacctctccgagtgtttgcccatgtgttagttcattaagctacacaacacgaaatggcttcttcctaaaatctggtgcgtgctcattccccatacgagtctcaaagcgaagttccatgacacaaccttcataattaaattatctgctaggaaggggggaggyggaatcagaacgtgactgtaggtgagatctcgcttaaagggcc

SEQ ID NO: 55384 - DNA, 599 bp, Chicken  19866894308844_2
  misc_feature (1)..(225): n is any nucleotide
nnnnnnnnnnnnnnnnnnnnnnnnnnnnnnnnnnnnnnnnnnnnnnnnnnnnnnnnnnnnnnnnnnnnnnnnnnnnnnnnnnnnnnnnnnnnnnnnnnnnnnnnnnnnnnnnnnnnnnnnnnnnnnnnnnnnnnnnnnnnnnnnnnnnnnnnnnnnnnnnnnnnnnnnnnnnnnnnnnnnnnnnnnnnnnnnnnnnnnnnnnnnnnnnnnnnnnnnnnnnnnnnntgaaaatgcttcaggtaaagccttgtttcataatttgaatgagaataatattytgcaacttttattttaaaaacrcactgcataagcttctcagtaaagggtacaatcgcttgatggaattccggagatccttatcactggaacacaaacctctccgagtgtttgcccatgtgttagttcattaagctacacaacacgaaatggcttcttcctaaaatctggtgcgtgctcattccccatacgagtctcaaagcgaagttccatgacacaaccttcataattaaattatctgctaggaaggggggaggyggaatcagaacgtgactgtaggtgagatctcgcttaaagggccagagttctacagcactgatgga

SEQ ID NO: 55385 - DNA, 600 bp, Chicken  19866894308844_3
ttcaggtaaagccttgtttcataatttgaatgagaataatattytgcaacttttattttaaaaacrcactgcataagcttctcagtaaagggtacaatcgcttgatggaattccggagatccttatcactggaacacaaacctctccgagtgtttgcccatgtgttagttcattaagctacacaacacgaaatggcttcttcctaaaatctggtgcgtgctcattccccatacgagtctcaaagcgaagttccatgacacaaccttcataattaaattatctgctaggaaggggggaggyggaatcagaacgtgactgtaggtgagatctcgcttaaagggccagagttctacagcactgatggaagcctgcttggatgtacagtttgtttttcattaccaccatgacttgtcagtttatactgcccatattaccccaatgcaagcacttcagatagactaaaggatgtatacagagacacgacgacaggaaactttacagattttgtacgataaacgatcctgggcagggcgatgctcaccgccgcagcccggtgtaacacaaactttgctcagaagcccccgccccgcggcctgggtg

SEQ ID NO: 55386 - DNA, 600 bp, Chicken  19866894308851_1
ctgctgtttcatagagagcaggtgagttagtgggggaccatgtgaaggccatgtttgggggctgccctcttctcccagataatggtggtgagattaaagggaatggcctcaagatgcaccagaagaggttcaggttggatattaggaataatctcttcccaggaagagccagaggcacaggctgcccccccagggaggtggtgcagtctccatctctggaggtgttccagagccgtgtggatgtggcactgaggacgtggtcagtgggcatggtggggatggactggtggttgggccagstgatcttagaggtcttttccaaccttcatgattttatgtctcaggcaggacatggcactgccaccttccctctccattgctctggcatgatggaactagatgatcttaaaggtcccttccaacccaaaccattctactagggggtaagaaacaggataaaatgtgccaatggcacaagaaaaggtgttgctggagatctcagtgaccagggcttgtttccatagagcatcagctgttccacccctgctcctgcaactgtgttggtgctgcacggggtagctggggtgacatgaggcacaa

SEQ ID NO: 55387 - DNA, 599 bp, Chicken  19866894308854_1
  misc_feature (1)..(15): n is any nucleotide
nnnnnnnnnnnnnnnacgtgtaagccctgtgtatgttccaaagacagatttttgccatcggacccattgaagtactgaatatttatgcactttccataagtgaaggcaagctgccagggtgggatggttcttgccaaggtgaaggctctgatctgattaataatgaactgcctttttttgcaggacctctgtggtgccaagacatgtgatactctcgggatggccgatgtgggaaccgtttgtgatctaaaccgcagttgctctatcatagaggacgacggcttgcaggctgccttcacwacagcccacgagctaggtacttgaagctctaaaatgcgatttcagctgattaattgcaggcagctcgatgcagtgaggctggaagctccctgttccgcaggcactgggcaccctgtgctgccttggcaaggctggaagcagcacagcctggcagtgcagcagggttccaatgccgaaagcagttccaggccacactgcattgtgtgtgagagctgtgttggactgagattgcaggaaaatagcctgtgaggagagagaagatgctctgtaatctgcttaaaacttggcactgttcagct

SEQ ID NO: 55388 - DNA, 600 bp, Chicken  19866894308854_2
caggcactgggcaccctgtgctgccttggcaaggctggaagcagcacagcctggcagtgcagcagggttccaatgccgaaagcagttccaggccacactgcattgtgtgtgagagctgtgttggactgagattgcaggaaaatagcctgtgaggagagagaagatgctctgtaatctgcttaaaacttggcactgttcagctcccactattgtttcagtatttaaagacctgaccatgagtagctctagagttacagtagcgttggtaatgcaaaggacagacttgctgaaatcacaaamctttatattttaytttttttcctaaggccacgtgtttaacatgcctcatgacgatgcaaagcagtgtgctggcattaatggaataagccgggatttccacatgatggcatccatgctttccaacctggatcgcagccagccctggtctccatgtagtgcctacatgattacaacatttttggataacggtcatggtaaggtggttaaagtttccatttgtgtggcattcatgctcttgcgttttactgcttcgcttcttttcccttttaattaagggagtgctttctgctaaagacagca

SEQ ID NO: 55389 - DNA, 600 bp, Chicken  19866894308854_3
ccctgtgctgccttggcaaggctggaagcagcacagcctggcagtgcagcagggttccaatgccgaaagcagttccaggccacactgcattgtgtgtgagagctgtgttggactgagattgcaggaaaatagcctgtgaggagagagaagatgctctgtaatctgcttaaaacttggcactgttcagctcccactattgtttcagtatttaaagacctgaccatgagtagctctagagttacagtagcgttggtaatgcaaaggacagacttgctgaaatcacaaamctttatattttaytttttttcctaaggccacgtgtttaacatgcctcatgacgatgcaaagcagtgtgctggcattaatggaataagccgggatttccacatgatggcatccatgctttccaacctggatcgcagccagccctggtctccatgtagtgcctacatgattacaacatttttggataacggtcatggtaaggtggttaaagtttccatttgtgtggcattcatgctcttgcgttttactgcttcgcttcttttcccttttaattaagggagtgctttctgctaaagacagcattaaccctttgca

SEQ ID NO: 55390 - DNA, 599 bp, Chicken  19866894308855_1
  misc_feature (1)..(222): n is any nucleotide
nnnnnnnnnnnnnnnnnnnnnnnnnnnnnnnnnnnnnnnnnnnnnnnnnnnnnnnnnnnnnnnnnnnnnnnnnnnnnnnnnnnnnnnnnnnnnnnnnnnnnnnnnnnnnnnnnnnnnnnnnnnnnnnnnnnnnnnnnnnnnnnnnnnnnnnnnnnnnnnnnnnnnnnnnnnnnnnnnnnnnnnnnnnnnnnnnnnnnnnnnnnnnnnnnnnnnnnnnnnnnntggcaagctacttacaaacaagcaaaacttatcacaaatgagacaacacacaccttaaaaccatagaacatattctaytaaataaagaargtaacttggatgtgtggaactccaaaaccagagcaaaataaaaggttatctcagacaacagtattagtcctgcaacataggaacagttttaatttaaaaggacactgccaaatatgattcagtatgttttaattggttttgttcccatcttcctctaagtggcagagctcccacagagatgtgagatgaaacaaaatggtaactacccccacttcctttctttccctctcttcttttaggatcccttcattacagtaggatagcaaattctawttttttttttcaag

SEQ ID NO: 55391 - DNA, 599 bp, Chicken  19866894308855_2
  misc_feature (1)..(210): n is any nucleotide
nnnnnnnnnnnnnnnnnnnnnnnnnnnnnnnnnnnnnnnnnnnnnnnnnnnnnnnnnnnnnnnnnnnnnnnnnnnnnnnnnnnnnnnnnnnnnnnnnnnnnnnnnnnnnnnnnnnnnnnnnnnnnnnnnnnnnnnnnnnnnnnnnnnnnnnnnnnnnnnnnnnnnnnnnnnnnnnnnnnnnnnnnnnnnnnnnnnnnnnnnnnnnnnnnntggcaagctacttacaaacaagcaaaacttatcacaaatgagacaacacacaccttaaaaccatagaacatattctaytaaataaagaargtaacttggatgtgtggaactccaaaaccagagcaaaataaaaggttatctcagacaacagtattagtcctgcaacataggaacagttttaatttaaaaggacactgccaaatatgattcagtatgttttaattggttttgttcccatcttcctctaagtggcagagctcccacagagatgtgagatgaaacaaaatggtaactacccccacttcctttctttccctctcttcttttaggatcccttcattacagtaggatagcaaattctawttttttttttcaaggaacatgaagta

SEQ ID NO: 55392 - DNA, 600 bp, Chicken  19866894308855_3
tagaacatattctaytaaataaagaargtaacttggatgtgtggaactccaaaaccagagcaaaataaaaggttatctcagacaacagtattagtcctgcaacataggaacagttttaatttaaaaggacactgccaaatatgattcagtatgttttaattggttttgttcccatcttcctctaagtggcagagctcccacagagatgtgagatgaaacaaaatggtaactacccccacttcctttctttccctctcttcttttaggatcccttcattacagtaggatagcaaattctawttttttttttcaaggaacatgaagtagagctcatagatgttccagatttaaatgttttcccctagaaatgtagctttgttgtttaagctctctctttatttttttgcaaggcaggaattacagcgcctatttcactttattctattcatgctgcaatcatcagcaggactccttctgatagcagaaataatcagtcatttcagaaaacctgtgcagctccacatttaccctcttacttttctttgtctgcagtgtttgagttgcgcagcactggtccaaagcacataaccatcaggtggc

SEQ ID NO: 55393 - DNA, 600 bp, Chicken  19866894308858_1
acatgcagttctcataaagaactcacctacagatttggtgaaaaaagatgtgttcaaatgtaacttgattgaaagggattatcttgaatttctgtgtattacagagaaaagctattaaaagagctgaattcctcatttttttccccccactagggatgttaatcagttccttcatgtgatattagctgtatttaacatgaaaggagatggattcactcatgcatacatgattaactctgctaaaacatcaacaatggagcagaaaatctaccatctaaattgtaactggactacacaacyaacaagggctattcttaaatattcagagctataatgtatcagaatttgtgttaagactaccaygagcaagaacaaataagatgaygctcttgatgcatgagaaagggaaaaaacartgtacaacaatacccattattagacttaagcctgcactgtaaatgttttctttgtctattccacctatagtctattctaaaaaaatcaagttgtgttyaagcaacttgaaatttataatatcagagccctgcgtgttccacattccataaatgaacagatgttaattttacaaggtgttttact

SEQ ID NO: 55394 - DNA, 600 bp, Chicken  19866894308858_2
cttgattgaaagggattatcttgaatttctgtgtattacagagaaaagctattaaaagagctgaattcctcatttttttccccccactagggatgttaatcagttccttcatgtgatattagctgtatttaacatgaaaggagatggattcactcatgcatacatgattaactctgctaaaacatcaacaatggagcagaaaatctaccatctaaattgtaactggactacacaacyaacaagggctattcttaaatattcagagctataatgtatcagaatttgtgttaagactaccaygagcaagaacaaataagatgaygctcttgatgcatgagaaagggaaaaaacartgtacaacaatacccattattagacttaagcctgcactgtaaatgttttctttgtctattccacctatagtctattctaaaaaaatcaagttgtgttyaagcaacttgaaatttataatatcagagccctgcgtgttccacattccataaatgaacagatgttaattttacaaggtgttttactccttagtaaggaattatactctggaaatagatttctgtctcaaaaaaaagcctttgacttaca

SEQ ID NO: 55395 - DNA, 600 bp, Chicken  19866894308858_3
gaatttctgtgtattacagagaaaagctattaaaagagctgaattcctcatttttttccccccactagggatgttaatcagttccttcatgtgatattagctgtatttaacatgaaaggagatggattcactcatgcatacatgattaactctgctaaaacatcaacaatggagcagaaaatctaccatctaaattgtaactggactacacaacyaacaagggctattcttaaatattcagagctataatgtatcagaatttgtgttaagactaccaygagcaagaacaaataagatgaygctcttgatgcatgagaaagggaaaaaacartgtacaacaatacccattattagacttaagcctgcactgtaaatgttttctttgtctattccacctatagtctattctaaaaaaatcaagttgtgttyaagcaacttgaaatttataatatcagagccctgcgtgttccacattccataaatgaacagatgttaattttacaaggtgttttactccttagtaaggaattatactctggaaatagatttctgtctcaaaaaaaagcctttgacttacattgacacaagggagaacaagag

SEQ ID NO: 55396 - DNA, 600 bp, Chicken  19866894308858_4
aaaagagctgaattcctcatttttttccccccactagggatgttaatcagttccttcatgtgatattagctgtatttaacatgaaaggagatggattcactcatgcatacatgattaactctgctaaaacatcaacaatggagcagaaaatctaccatctaaattgtaactggactacacaacyaacaagggctattcttaaatattcagagctataatgtatcagaatttgtgttaagactaccaygagcaagaacaaataagatgaygctcttgatgcatgagaaagggaaaaaacartgtacaacaatacccattattagacttaagcctgcactgtaaatgttttctttgtctattccacctatagtctattctaaaaaaatcaagttgtgttyaagcaacttgaaatttataatatcagagccctgcgtgttccacattccataaatgaacagatgttaattttacaaggtgttttactccttagtaaggaattatactctggaaatagatttctgtctcaaaaaaaagcctttgacttacattgacacaagggagaacaagaggaggctagtttatgctgatacattagagatt

SEQ ID NO: 55397 - DNA, 572 bp, Chicken  19866894308858_5
actcatgcatacatgattaactctgctaaaacatcaacaatggagcagaaaatctaccatctaaattgtaactggactacacaacyaacaagggctattcttaaatattcagagctataatgtatcagaatttgtgttaagactaccaygagcaagaacaaataagatgaygctcttgatgcatgagaaagggaaaaaacartgtacaacaatacccattattagacttaagcctgcactgtaaatgttttctttgtctattccacctatagtctattctaaaaaaatcaagttgtgttyaagcaacttgaaatttataatatcagagccctgcgtgttccacattccataaatgaacagatgttaattttacaaggtgttttactccttagtaaggaattatactctggaaatagatttctgtctcaaaaaaaagcctttgacttacattgacacaagggagaacaagaggaggctagtttatgctgatacattagagattcagacaatacctctgatttctctaatttatggattagtgcattgtcatggtttctcaaagacttcctttt

SEQ ID NO: 55398 - DNA, 600 bp, Chicken  19866894308865_1
gtgtaatgcccgacgtgacaccacatgaaccagtgtcaactgataatgaagtcatactttaattctgctttaacaaaggtaatagttatcaattcccttgcttgtgacagcagtcagagctacaaagtatcccatgaagtgatgtggagctgcaaagaccaacagggatgtcttcttgttgctgatgcattcttttacatctcatcacagctctgcagaccgcagcaggagccctgtgggaagaaacacaggctatgtccacagggcaatgaagaggttaaagtggttcttcaagctcasggtgcaacccatgaggtgtcatattaacacatctgatatctgagcattagtatgagaaaagcaagtaaaaacctgctctggagaaattaaattaagcagttgaaggaaacagtcattttaataaggagcttctatataaaacaaatcctaatacttcattatctatttattcctttcagtcattcaatcttattttatccttcataattaaaaagaagacaaaatctttaagaatgatctgatattacatttttgtgtaaaagatattggtggaatgtaggactggctgtctgtgctcat

SEQ ID NO: 55399 - DNA, 600 bp, Chicken  19866894308870_1
gaccatgaccctagagaagcagtattctgaaggacccaaatgcagccatccacagcttcctcagtttccatggatctgaactgcaaaggaacttgaggcactgtggggtttggtattttacacagaaagccaatggtaaggaaagacacctaccttcagcctaccctacaaacaagcagcacaccatttttgatagttagcttctcttcccatcaccacttcatgttgctgaagtatgcccattctttctgcagcacgtccattaatgccacgatccgctcacagtgagcaacgctgagratgcctgtatgtctytgtgacactaagagtctcatgaggccattcaaattcaataaatccacacgcagacataagatgaccagatccaactccattccagcataattatttcaaatgaaatgattattctttaaaaatgaagaattttgcttcagaaattaaacctaggaattaacagtaacaccaaaccctgtcttgtatgtatggcaatcagtttcagaagaygaatttctaaatatctgaaagaatgtgctcaactcaactgtcattcattttttaagatggccactgaaatcattt

SEQ ID NO: 55400 - DNA, 600 bp, Chicken  19866894308870_2
gaagcagtattctgaaggacccaaatgcagccatccacagcttcctcagtttccatggatctgaactgcaaaggaacttgaggcactgtggggtttggtattttacacagaaagccaatggtaaggaaagacacctaccttcagcctaccctacaaacaagcagcacaccatttttgatagttagcttctcttcccatcaccacttcatgttgctgaagtatgcccattctttctgcagcacgtccattaatgccacgatccgctcacagtgagcaacgctgagratgcctgtatgtctytgtgacactaagagtctcatgaggccattcaaattcaataaatccacacgcagacataagatgaccagatccaactccattccagcataattatttcaaatgaaatgattattctttaaaaatgaagaattttgcttcagaaattaaacctaggaattaacagtaacaccaaaccctgtcttgtatgtatggcaatcagtttcagaagaygaatttctaaatatctgaaagaatgtgctcaactcaactgtcattcattttttaagatggccactgaaatcattttattgctgcagttag

SEQ ID NO: 55401 - DNA, 600 bp, Chicken  19866894308870_3
ttgctgaagtatgcccattctttctgcagcacgtccattaatgccacgatccgctcacagtgagcaacgctgagratgcctgtatgtctytgtgacactaagagtctcatgaggccattcaaattcaataaatccacacgcagacataagatgaccagatccaactccattccagcataattatttcaaatgaaatgattattctttaaaaatgaagaattttgcttcagaaattaaacctaggaattaacagtaacaccaaaccctgtcttgtatgtatggcaatcagtttcagaagaygaatttctaaatatctgaaagaatgtgctcaactcaactgtcattcattttttaagatggccactgaaatcattttattgctgcagttagttggaaagagcactgttctgcaaaaatcagataatgtacttatttctaaaagcctggaacaaagagccagtagagatttgctgagtagttgcaacatagccattaaatataaatatttttttaaacaatttactctttcctaatgcttttagagcagcatgggggaacagtctgagtgcagcatcttaccgtattaaaaaggacatgatg

SEQ ID NO: 55402 - DNA, 462 bp, Chicken  19866894308870_4
cagttagttggaaagagcactgttctgcaaaaatcagataatgtacttatttctaaaagcctggaacaaagagccagtagagatttgctgagtagttgcaacatagccattaaatataaatatttttttaaacaatttactctttcctaatgcttttagagcagcatgggggaacagtctgagtgcagcatcttaccgtattaaaaaggacatgatgaaggttactgggctccagatttaactcttcactgtcttaactgttcagaacattttccaacctatataaacgatgtaagtttwtataaaacttattcaatcttctcagtgaaaatggtagaaattttattttgaaaatgtatattcccamcaatctgcatttttcacattcctatagaaacaaactgttcttaatggtgaagtttctcaaattaaaaaactgctgcagaatggaaatcacttttt

SEQ ID NO: 55403 - DNA, 395 bp, Chicken  19866894308870_5
aaagagccagtagagatttgctgagtagttgcaacatagccattaaatataaatatttttttaaacaatttactctttcctaatgcttttagagcagcatgggggaacagtctgagtgcagcatcttaccgtattaaaaaggacatgatgaaggttactgggctccagatttaactcttcactgtcttaactgttcagaacattttccaacctatataaacgatgtaagtttwtataaaacttattcaatcttctcagtgaaaatggtagaaattttattttgaaaatgtatattcccamcaatctgcatttttcacattcctatagaaacaaactgttcttaatggtgaagtttctcaaattaaaaaactgctgcagaatggaaatcacttttt

SEQ ID NO: 55404 - DNA, 600 bp, Chicken  19866894308874_1
cagtcaccaactttgctacccccccatctgtctcatgcataccagaagcctgagccacctgctgtgcacagccctaaagagaccttatagcttcctgatggaacatgtgcttgcgtacatagtgccggaatatgatttctatctatgtcattaagcctagtgaaaaaataaacctcttgcctaatgtgaattatcagtactcagtgtacaaagagcatgggcatttcttctacttccaggtgctgctgaagagaaggatgtttacttgttgcattaaatgcacctgcaagcttcccttcyacattcctgcgagagaagatggctttttcagtgcattcacagcactgtgaatacggggtagaggcttttcataaacaaaattgaaacaaatgcagttttgaaggacgctttgaatttctgaatgctgctgtgtgagcaggactagtagtacttcagagcaacaagatgcttctcccactacccccgtacctgcatggcagctattgccatatccataggggataatactaaggcacgtcctgctaacagacctgtgttgacgaacacctcaacctcaggtatgtaaatataaagctcata

SEQ ID NO: 55405 - DNA, 600 bp, Chicken  19866894308874_2
tcagtgcattcacagcactgtgaatacggggtagaggcttttcataaacaaaattgaaacaaatgcagttttgaaggacgctttgaatttctgaatgctgctgtgtgagcaggactagtagtacttcagagcaacaagatgcttctcccactacccccgtacctgcatggcagctattgccatatccataggggataatactaaggcacgtcctgctaacagacctgtgttgacgaacacctcaacctcaggtatgtaaatataaagctcataaactccagtaacctcaataatcatcasatgcagacagtgcaggatggatttgtgtgaactgctgtgtaagactgcacaaacagcaactgctttcctctgagagccatcactacagagggggatttctggctttgtattctttcactcagagcttcggaacagcccagatccacttggtggagtgctaatgaattgatactttgtgcttagggaactcagctccctaaaagcttaatagctagtatctgacccaagagacctgagtgctagccctcagcccctgattcctgcacaccggtacaacagaaccatctaactctttgttta

SEQ ID NO: 55406 - DNA, 598 bp, Chicken  19866894308883_1
ggcgatcctccttcgagcataacgcagagcccggccaccccgcgcccctcaccgaccccggccccggctgccgtctcgggccccgctcattggcatgcagaccccgtcgctgcctgccgccaagccgcatcccagcccgctgctcgccggcagccgagacggagccaatcgcatattcatgaggagggggaaatccagctcagcactcccagagggccgagaatcgctcttttatatttttaacattccccctctgcctgcctcctttccagcagcgctcacccgggggctctgcgcagmggccccggttgctcccacccgcggataccggccgccgacgccaggcgcaccccgagcatccccaaagcggagcgcccgcacaagacagmgcaacgcgcggagggacggcgcgacacgcgcagacagaaagcaccccggcagcccgccgccgaggaacaggaaacacagcaggggctcctaccttacaatcctcaggacacgatttcaccgagtactcatccgactgtaaatacttctggagcataacctcaaactcttcgtatttctcctgagcgtgctggtcgtagcgctggtaagc

SEQ ID NO: 55407 - DNA, 509 bp, Chicken  19866894308883_2
ttggcatgcagaccccgtcgctgcctgccgccaagccgcatcccagcccgctgctcgccggcagccgagacggagccaatcgcatattcatgaggagggggaaatccagctcagcactcccagagggccgagaatcgctcttttatatttttaacattccccctctgcctgcctcctttccagcagcgctcacccgggggctctgcgcagmggccccggttgctcccacccgcggataccggccgccgacgccaggcgcaccccgagcatccccaaagcggagcgcccgcacaagacagmgcaacgcgcggagggacggcgcgacacgcgcagacagaaagcaccccggcagcccgccgccgaggaacaggaaacacagcaggggctcctaccttacaatcctcaggacacgatttcaccgagtactcatccgactgtaaatacttctggagcataacctcaaactcttcgtatttctcctgagcgtgctggtcgtagcgctggtaagc

SEQ ID NO: 55408 - DNA, 600 bp, Chicken  19866894308886_1
cgaggcagggtgagcagtgtagctgtaaggctaaactggggatggagcagagaacaaggctggtggtggagggcagcagcactgcacacaaacctggctgcacgtcagatgccctctgcagttcagtgaaacatggacagcatgccatcgctcttctggatttgaaaaacagatgcaaaagcattaagctgccggaatgagacaaggtctaagttcctcttcttgtctgaatgcaggttttggtgactaactcttctttgacacgggcttgagcctattgagcaggtcctgggccatacrtgtgtgcacagagaattacggttccctgctgctccactcgctttctatgtattacctaaagcatcgtgtkcctggtttacattcacagccacatcccacagtgagagagagactaagcagcttttgtgctccccctgggccacaggacataggctgagacaggcaggcttagcttttatttttattttttttttataaacagaggcttaacacccagaggaaagtactcttgcaggatatcagactctagcttaatccctatcttggcatcaaggagtattatatcatacaggggctgag

SEQ ID NO: 55409 - DNA, 600 bp, Chicken  19866894308886_2
gggcagcagcactgcacacaaacctggctgcacgtcagatgccctctgcagttcagtgaaacatggacagcatgccatcgctcttctggatttgaaaaacagatgcaaaagcattaagctgccggaatgagacaaggtctaagttcctcttcttgtctgaatgcaggttttggtgactaactcttctttgacacgggcttgagcctattgagcaggtcctgggccatacrtgtgtgcacagagaattacggttccctgctgctccactcgctttctatgtattacctaaagcatcgtgtkcctggtttacattcacagccacatcccacagtgagagagagactaagcagcttttgtgctccccctgggccacaggacataggctgagacaggcaggcttagcttttatttttattttttttttataaacagaggcttaacacccagaggaaagtactcttgcaggatatcagactctagcttaatccctatcttggcatcaaggagtattatatcatacaggggctgagcaactatgatgtaattttccatacccatattttatctttgcatcatattaaaatcctgtcgttctccagc

SEQ ID NO: 55410 - DNA, 600 bp, Chicken  19866894308887_1
gatcaagcgcttgttaaccagtggggctcgggatcgctctaaattaagtcctctgctcccttcccacagggggagggaggaaacactacagccactgctgccgtaccccttctggaggccagcaggacagaacaagaatgacacagccccattacctgctcttggtggaggctgtcaggttatgcaagaccacgctcagctccagctgctacgattcccacattttgccacaaaacaacgacaaaggaaaccaagagctcagagggctgccagcactttcttgtggtggtggcacttggyttctctcatggacaccatcaacrcctctgaaaggcccacaggctgacaccaaaggtctgcatgcctgagctccacagtgcgagcaaggagactgagcagagggctggcgcacatgtaccctagaggagcagccggggagggaggggaatgtgaagtgttgggccccagctgcgaactcctcctggttttgttttagggtaattaatgttcccctgaatagttcccctctagctttcaatgctatcaaccaggccggggggctgtgcttcctgccaccctcattacagaggcggtgggggc

SEQ ID NO: 55411 - DNA, 600 bp, Chicken  19866894308887_2
gggctcgggatcgctctaaattaagtcctctgctcccttcccacagggggagggaggaaacactacagccactgctgccgtaccccttctggaggccagcaggacagaacaagaatgacacagccccattacctgctcttggtggaggctgtcaggttatgcaagaccacgctcagctccagctgctacgattcccacattttgccacaaaacaacgacaaaggaaaccaagagctcagagggctgccagcactttcttgtggtggtggcacttggyttctctcatggacaccatcaacrcctctgaaaggcccacaggctgacaccaaaggtctgcatgcctgagctccacagtgcgagcaaggagactgagcagagggctggcgcacatgtaccctagaggagcagccggggagggaggggaatgtgaagtgttgggccccagctgcgaactcctcctggttttgttttagggtaattaatgttcccctgaatagttcccctctagctttcaatgctatcaaccaggccggggggctgtgcttcctgccaccctcattacagaggcggtgggggctgagccctcgtgcagccctgagc

SEQ ID NO: 55412 - DNA, 600 bp, Chicken  19866894308889_1
taatattatataaaattatgatttagataataaatcataaataaaacattatatatattaaatatatgaagtattatatatatatatatacatcacattagtgtatcacatgtttgcctttctcttctacccagtacttgcaggacaggcatgtggaactgtgcagcctttgccatctcaaaaaataaaaaaggatgatgaagacggttacaggaatatcttgaacctcaagcaatgctggtttctactatactgatcagaatctgcacagttcataggaaagaaaggaagaattctgtsccaaatatcccttggtgcatgagcctaagatgcatgggtgagaaagtgtggtctttgtaaacaaaccagcggctattccatgaaatcttgaaaaacattaacaggcactgaatagatcatttattttaagattcaaaacactgagagtaatttaaaaacagtataaaataggaaggaactaatttaaaaataatttgaaacacatgtatatgtgtgtgataaataattggtttgtgtgaaatatggaaaatatgtgcaattgtaaggaaataacactcataactcatgagatttcaactg

SEQ ID NO: 55413 - DNA, 600 bp, Chicken  19866894308897_1
agataaaccagagatgttctattttttttttcattacaccttacaagtgaaattgctccttatgtggaagaagctggtgtgagacagtgattttgactgtgatgtgaaaccacttgaactaacaagcgattatctagtgtttaatcttctttcttctcctaggacataaatcttatattgaagttactctgacgatctctttggtgtgggctttctcctaatccttattgttatttcattgttgtttacagcaaagcaggactgaaatctctgtttgcataagctgggaagttacacggraaggataaatgtatgctagaaaggttgctctgcctaggaaggtaaaggagactttttagaagattcttcccttcctttcccttcctttcccttcccaaaatggaaaacatgtctctgctcattgttacagtctgtgattcctttatctgaacattatctgaactggtactcgtgaagctcatcatcaaaaaattatgctagagcatttgtcctgagaaggaagagtggaaaagttttggacattatacttttcatttcttcattatttacttatttccatggtgtgagaaggccaaaggt

SEQ ID NO: 55414 - DNA, 600 bp, Chicken  19866894308898_1
ccatcagatgaagttttaaggcctgtttctagccttgggtggcactgaactagttttgaggtagctagattaaatacataatagatgtaaaacatctttcctaacagttttctagtagaaacttcacgtttccatatgacagctgacatttagcttcttagtttatatttttattattatttatgctgccataatatgctaatatagatcatcctcattggctcctcacaaacttgcttatatttttactacacattcacattatttcattttgagcaaaacttacacgttcatctgagmttctccaaaggtagcaagcccagaggggcttccactcctaataaatatttggtaaagtgttattttacagcaagctacttctagcacaggcaactgtacttatatttgaatttgtatagtgaacttgttggacctcattagctaagaaagcttggcttgattaatgttttaatataaatctttccagaaagcccagatgcagaaagaaaatggaagtggtgattcaggagacactactygcttcctctgagtccatactgaggaactgtttccgcctggtgctaagggacatcatgctgg

SEQ ID NO: 55415 - DNA, 600 bp, Chicken  19866894308898_2
atatttttactacacattcacattatttcattttgagcaaaacttacacgttcatctgagmttctccaaaggtagcaagcccagaggggcttccactcctaataaatatttggtaaagtgttattttacagcaagctacttctagcacaggcaactgtacttatatttgaatttgtatagtgaacttgttggacctcattagctaagaaagcttggcttgattaatgttttaatataaatctttccagaaagcccagatgcagaaagaaaatggaagtggtgattcaggagacactactygcttcctctgagtccatactgaggaactgtttccgcctggtgctaagggacatcatgctggtggtggtgctgtctttcagatgagatgtaaaactgagttctgacaacttgcagtcattaaatatcccatggcacttttcacaggagtacatgtgttaacccatatgtcctggctatattccaaatgcataattgcattctgcctacctaaattccctatgcagcttcagtagcatgcagtactatttattctctttctcttctctctccaacaatgctctttagctcctctgctcaggt

SEQ ID NO: 55416 - DNA, 599 bp, Chicken  19866894308899_1
  misc_feature (1)..(16): n is any nucleotide
nnnnnnnnnnnnnnnngtccagaggggaagaaaatacttttcaagtggtaagcagcatattttatggactttgaagtcacatagctctctccatacttgacaaattttgagtgtacttgcagctgtactggggctttgctgaagtaagtgcaacttctcccttttgcactcattctcatgaaatactccgtggtcgcagttgcagtgtaagcacctcaaagctatttgtactgttaatggagctcactacataacataattttacttgagtgcttttgcttagtctgtagcaagctggcrttggaatgtagtggtcatctcagagcagtgatgcgtggttgaagtacggtaaggttttgagattgcagtaggtggatcgtgagcaacagcgtagaaatactctgcatccctggaattcaacaccataaaacgggtggggtttttttsagatgtataatacataaaatcagatttttatttgatgtattcaaactcttcactgctaaagcctgaaggtttgtgtgtggmtctgaaaacaagttgtactatgacatgaaaatcgtgccttttgttccttttaatggtgtgctgtccaaacc

SEQ ID NO: 55417 - DNA, 600 bp, Chicken  19866894308899_2
gtgcaacttctcccttttgcactcattctcatgaaatactccgtggtcgcagttgcagtgtaagcacctcaaagctatttgtactgttaatggagctcactacataacataattttacttgagtgcttttgcttagtctgtagcaagctggcrttggaatgtagtggtcatctcagagcagtgatgcgtggttgaagtacggtaaggttttgagattgcagtaggtggatcgtgagcaacagcgtagaaatactctgcatccctggaattcaacaccataaaacgggtggggtttttttsagatgtataatacataaaatcagatttttatttgatgtattcaaactcttcactgctaaagcctgaaggtttgtgtgtggmtctgaaaacaagttgtactatgacatgaaaatcgtgccttttgttccttttaatggtgtgctgtccaaacctggtctgttgacctcagtacagggaagactcagctgtgccttctgtgctgatacgatgttcttccctcttccttccgcagctggggcaggtatttggatgaaatgctgatactaatgaaatcactggcaaaatgctgattggttttgg

SEQ ID NO: 55418 - DNA, 600 bp, Chicken  19866894308899_3
tactgttaatggagctcactacataacataattttacttgagtgcttttgcttagtctgtagcaagctggcrttggaatgtagtggtcatctcagagcagtgatgcgtggttgaagtacggtaaggttttgagattgcagtaggtggatcgtgagcaacagcgtagaaatactctgcatccctggaattcaacaccataaaacgggtggggtttttttsagatgtataatacataaaatcagatttttatttgatgtattcaaactcttcactgctaaagcctgaaggtttgtgtgtggmtctgaaaacaagttgtactatgacatgaaaatcgtgccttttgttccttttaatggtgtgctgtccaaacctggtctgttgacctcagtacagggaagactcagctgtgccttctgtgctgatacgatgttcttccctcttccttccgcagctggggcaggtatttggatgaaatgctgatactaatgaaatcactggcaaaatgctgattggttttggcagagcagggatttcactgaagagcacttttatttgcgtgaggaacttttgtcttctatggccaaggtgcagaagaaggag

SEQ ID NO: 55419 - DNA, 600 bp, Chicken  19866894308899_4
ggagagcgtatctgccttgaggaccataaagctccccctgcaattcttctgggagcggtaatatttacatacacaatctagcttgctctccgtgtttcagtgactatttgaatttcttatcaaagtaataaagaaacaaaccaaaagagagaaagacgccagctgataatactgctgtgataacacgtaattgcatgctggctagcatactttagggagaggaatttgataggaagccagggaacctggaaatctggagatgggaaagagatgcccagatgatagcagcaacaaaagctrcargggatgtttgtgccagtttctcccaggacttgcaacaagactgttgtcccttcgtgcccttccagcatctcatacaagtgcctgcacttctctgatgtccgcttggtgcccagacttcacattggcttcaggtataagcactcaatgcgatcgtatcaaaacacgagggcagcagagtgggttggcagctgggtcctggctgtggtggggcatgtgtttggaaacaggatgtactcagctcttctagtgtctgcaaaatggccatgctactgtgagctggctccaaaagcgcttggg

SEQ ID NO: 55420 - DNA, 600 bp, Chicken  19866894308899_5
gagcgtatctgccttgaggaccataaagctccccctgcaattcttctgggagcggtaatatttacatacacaatctagcttgctctccgtgtttcagtgactatttgaatttcttatcaaagtaataaagaaacaaaccaaaagagagaaagacgccagctgataatactgctgtgataacacgtaattgcatgctggctagcatactttagggagaggaatttgataggaagccagggaacctggaaatctggagatgggaaagagatgcccagatgatagcagcaacaaaagctrcargggatgtttgtgccagtttctcccaggacttgcaacaagactgttgtcccttcgtgcccttccagcatctcatacaagtgcctgcacttctctgatgtccgcttggtgcccagacttcacattggcttcaggtataagcactcaatgcgatcgtatcaaaacacgagggcagcagagtgggttggcagctgggtcctggctgtggtggggcatgtgtttggaaacaggatgtactcagctcttctagtgtctgcaaaatggccatgctactgtgagctggctccaaaagcgcttggggac

SEQ ID NO: 55421 - DNA, 600 bp, Chicken  19866894308905_1
tgtatttcaagctcatcctggatctagatgcgcctttatttaacatttgaaatcagaagctatttaaaaccttgggttaaaaattatctctgtacgatggaaatgtactattgaagtctccatcttcaaataccactgttgttctcagaagaataatttgttcttgcaattttatcttcagcaagttttcatatgtctgaaaagagaaaagaggcaatgtagaagtgctttcatgttggcttaccttggatgttatttgtacctgcttgctttgcaggtgccactggaggtgaggatctratggcattctgttctgtgaatggttacagcaaagggagagccctgcttgtgtgcagctcacaaaaacacatagaagggatagggagggaaaacagaaggtaataaaccgctggtgagcaggataagtggaacagacagcataggagcttcctaaccatagcagatttttcttttggttgtcagtaccaaaacagaggtcatctgaaggtggaataggaagtatgcaggatggatgggaaaaacataatggataacaacactgatgcagttcataattatgtaagtagcattaggatggtt

SEQ ID NO: 55422 - DNA, 600 bp, Chicken  19866894308908_1
caggacaccagttaggaatggcttcccagctatcttaaccaatctaaaagaaaataaaaatgacatgattacacatctgagaacactctgactgtaggcctcatgaaaacgcctgtctgttttaagacgtatcaatcttgggtgttttagacaaggtttaatgggttttttaacacgatagctggcgtgccctgaagtggggaacagaaaattaatcccagctgcaaattgttcagcctgacagtcaatagtttgatcttccagctgtgactgatagcaagcttacatgacttagcaagmtgcttcgggactttgctcaattaatctgatttttttttatctgcatctatttttaattcacacaacatgtagagcacagttygggagcacagaccattcccaaagcttcccaccaccattgctgaactccagcatccctcctccacagggtcactggtaaaccacagaactcagcatgtttcttacagcagattaacaaaggagtggaactgacctgcgtgcctgagagtttcttagcatcagctatcctttattcaccatccccagatgtgtttaaaaaccatttggatgtggtgctca

SEQ ID NO: 55423 - DNA, 583 bp, Chicken  19866894308908_2
acactctgactgtaggcctcatgaaaacgcctgtctgttttaagacgtatcaatcttgggtgttttagacaaggtttaatgggttttttaacacgatagctggcgtgccctgaagtggggaacagaaaattaatcccagctgcaaattgttcagcctgacagtcaatagtttgatcttccagctgtgactgatagcaagcttacatgacttagcaagmtgcttcgggactttgctcaattaatctgatttttttttatctgcatctatttttaattcacacaacatgtagagcacagttygggagcacagaccattcccaaagcttcccaccaccattgctgaactccagcatccctcctccacagggtcactggtaaaccacagaactcagcatgtttcttacagcagattaacaaaggagtggaactgacctgcgtgcctgagagtttcttagcatcagctatcctttattcaccatccccagatgtgtttaaaaaccatttggatgtggtgctcagggacgtgatttagcggaggattgttagaagtagggtagtatggttgggttgtggttggactcga

SEQ ID NO: 55424 - DNA, 599 bp, Chicken  19866894308912_1
  misc_feature (1)..(20): n is any nucleotide
nnnnnnnnnnnnnnnnnnnntggaaggtggcaccttcttgttaggttaacttttattgggaatctatccatggagtcagcacagcagagggagggtgagattgcttctcgctgatcaggtacctcatcaataatatcagtgtgcaagcattgactggatttttttctttaatggagtgagatgatttggagacaaccagctgtgatctgcgtctcaagggaagtttttgggctggcgtaagccagaagggaaggttgatggacatgggagggaggtggcaaaggagaattgggttttgcstcttcacaaaacaaatctgccactatcaggtcttgaagcgggcagctcaggaggcagttgaccttggttaagcactatgagagcagcagaagtactgtggcaatgcatgtcatagctgggatgctgcagtagctgccctgtttgcagaggttcaatccagtgtcaccatgggggctgtttttttgctccttgttgggctttgcatagcaccccataaggctcactggtagcaatgaatggacccttatcactctgaaatccaggcgtggctgtgctaataaccacagagcttggccctg

SEQ ID NO: 55425 - DNA, 600 bp, Chicken  19866894308915_1
ctgctgccacagcttgcgctgtcccgggctcataaatcagcacgggtgacagcgtttcacagctcgcttcccagccaggatattgccattcctgctgattacacagccagagcgcgggggaagctgcatctcccacttccaggaagggaggctccgcaaggaaaacgcattgataaaaagaagaacgaaatcagctttgttcacgttgcgaatctcccattgttcccactgtgaccgtcagccgttgctggagaaagtatttcctcagcaataaatctcctgggctcctcggcagccctygccttggcaccagaccctccttgtgttgttttgcaagaaaaaagctgcttctgacactacaccagctctgcatgggagccccggccacgggactgaccctgcactgacttctcagctggttttggtgactgagaccaggcggctggagcagcaccctgcgaggagtgtggagcatttcaaggtgtgagctcagccccaagactctgatttcaggagacaagtactatacccagcacagggggagagtgttatcgtgggggcccctgcccctgtctgcagctggcaccgcagcaggacatg

SEQ ID NO: 55426 - DNA, 600 bp, Chicken  19866894308918_1
aaccagaaatgagattaaatcctcacaagcaaatagtgttggcactggcattttcttctctcctaagcattccttcccctacataacagcacacactgccaattacctaccctctaccctctgtagaacttttgactaaacattctgaaattcacctttaccacttttttttttttttaaaggacaaaattatgttttctaaagaacaaagcaggtcattgtggtaatgcagagcagcaaaaactcctacggtttcattcctgttgccaatggttatgctgctatgtggtttaacattcrctctttctcatttgccaaaggtgagtgataacagaagcagaacgtctccagtaaagactaccagatcataaaatgaaaataagaagaaggtgtttgcagatattttaaatacattgctgaaaacaaagaaaaagcagatggagctatgtaggtctcagctctttttaaaagcaagacctccatagtcttaaatgaaatgcaaactatgtatgcatttgtgaagggtaaggaacaggtctcagcactgctctgaataaatgaaaaaaacgtatgaaaaatctagttactccagtttgggga

SEQ ID NO: 55427 - DNA, 600 bp, Chicken  19866894308920_1
acacaatggtcagatagcttatgtttatgctctggctgcgtctaactgtccctctgattttgtcaaagagaaagatgctagcagagtataacactgactgatactctgactcatttatgtgcttttgtgaactagaagagagatttctaaaggcacataggggagttagacgagaaattctcactgaaagtaagtggaaaatgaatgattgcagactctgttagtaaattttacccatgatactacaagaaaaacaaatcagatggagtgaggctactaataccttttggacatcaggcygggagcaatcaaacatagttgtcataaatctttcaatatccmtatctttttatgggatcgatagagtgagaaagcagctagggacttcccaaaacccagctgcataaatcctctgacaccaggaaacatgcagctattcatttgttatctggaagagctgatttttacccagtaagagattttttttttttttgcctttgatgctatatctccattatgattggtgatcataatacaacaactttagggaaagacggctgggtctgtaaaaagcatacatcagtagtgaaaccagagagg

SEQ ID NO: 55428 - DNA, 600 bp, Chicken  19866894308920_2
taactgtccctctgattttgtcaaagagaaagatgctagcagagtataacactgactgatactctgactcatttatgtgcttttgtgaactagaagagagatttctaaaggcacataggggagttagacgagaaattctcactgaaagtaagtggaaaatgaatgattgcagactctgttagtaaattttacccatgatactacaagaaaaacaaatcagatggagtgaggctactaataccttttggacatcaggcygggagcaatcaaacatagttgtcataaatctttcaatatccmtatctttttatgggatcgatagagtgagaaagcagctagggacttcccaaaacccagctgcataaatcctctgacaccaggaaacatgcagctattcatttgttatctggaagagctgatttttacccagtaagagattttttttttttttgcctttgatgctatatctccattatgattggtgatcataatacaacaactttagggaaagacggctgggtctgtaaaaagcatacatcagtagtgaaaccagagaggaaaaacagaatttgcttcatccttagctgttgaaaaagtgtt

SEQ ID NO: 55429 - DNA, 591 bp, Chicken  19866894308942_1
aattttattggtatttttaatgatagataaaataccacaaaagaagaatgtgatatctttctgaatcacttctgtaagtaactttttggttcattttgattggtgacctatacatagctataagtccatatcttgtgttaccctctacatcaggctgccctcaggcttaatacagaaatatctgttctggttgtggtacttgcagtaccccagtgctctcctctgcaagttagcatcatgaaacatcagaatcaatgccagaaaattcaatctaaacaacttcctccacttctctgttgrcaactgtggaggaccaccacagtgtatatttgcttctggccattatttgtctctgccaccctctgccatcacaaagtggtggtagtgggatagccttttcccactgacagacaatagctaggggcagcctatctctcttaaagatacaggctttaagaaaagatttagattttcacaaatggggtcaacgtacattggcttcagtggacattaggagtgtattttattttctagttctcaagaaaatggtaaattcatctttccgagaaaattcaggatttcaagggttga

SEQ ID NO: 55430 - DNA, 599 bp, Chicken  19866894308949_1
  misc_feature (1)..(125): n is any nucleotide
nnnnnnnnnnnnnnnnnnnnnnnnnnnnnnnnnnnnnnnnnnnnnnnnnnnnnnnnnnnnnnnnnnnnnnnnnnnnnnnnnnnnnnnnnnnnnnnnnnnnnnnnnnnnnnnnnnnnnnnnnnnnntcttctctatcatgatggacttactgaaaggaagtaggagagaagaccaggcaggaccctgaaaaaatattttctttgtcacatttcatctgtaacaagagatgcaacttaaatcacagaagtaaatgaaacatttataaggagaaagagatttttttttttactttgagaaagkgatttaacataaattaaaacattagattagctgaccgctaggtgctacagctaacaggggagctaataacctgtttcaaaccctggaacaactttgttgaatacagaaatggattaattatgctggaataagaaaaaatattgggcatgcatcatcagtgagcacttatcctggaaacagtatgaattcctttgtgcaagacttgcatttggcccattgcttgtgagttacttgtacttgagatccttgcctagttctctcacagtagttaggtaacyatatccagttgttatcgttaa

SEQ ID NO: 55431 - DNA, 600 bp, Chicken  19866894308949_2
tttttttttactttgagaaagkgatttaacataaattaaaacattagattagctgaccgctaggtgctacagctaacaggggagctaataacctgtttcaaaccctggaacaactttgttgaatacagaaatggattaattatgctggaataagaaaaaatattgggcatgcatcatcagtgagcacttatcctggaaacagtatgaattcctttgtgcaagacttgcatttggcccattgcttgtgagttacttgtacttgagatccttgcctagttctctcacagtagttaggtaacyatatccagttgttatcgttaatttattagtctttttcaaatgcaatgtaagattaatttcacctgttccaccttctcatttccatgagaaagcaaattgttggcatttggcaaatattttgaataattttgatagaacatattttgattttgaggagttcatgtattccagagaaatrccacacttttaccaagcaatacatatttttgtcatagaaataacagattgtagtacatagctctctgtcactgaagaaaaaaaggctgtttaaattgcctatattgataaatagtagtaatg

SEQ ID NO: 55432 - DNA, 600 bp, Chicken  19866894308949_3
agtgagcacttatcctggaaacagtatgaattcctttgtgcaagacttgcatttggcccattgcttgtgagttacttgtacttgagatccttgcctagttctctcacagtagttaggtaacyatatccagttgttatcgttaatttattagtctttttcaaatgcaatgtaagattaatttcacctgttccaccttctcatttccatgagaaagcaaattgttggcatttggcaaatattttgaataattttgatagaacatattttgattttgaggagttcatgtattccagagaaatrccacacttttaccaagcaatacatatttttgtcatagaaataacagattgtagtacatagctctctgtcactgaagaaaaaaaggctgtttaaattgcctatattgataaatagtagtaatgtattaggaaccagacaaactgtgggcatctgggaaggatggtggtataacacaaatactcttcatgcttcatatctagtaagagttacaagttatcatttagagagaatctgcattgtgtgcatttaaaataaagcattgaaatacagttttaatgatagtaaccacaaaaacactta

SEQ ID NO: 55433 - DNA, 599 bp, Chicken  19866894308952_1
  misc_feature (1)..(134): n is any nucleotide
nnnnnnnnnnnnnnnnnnnnnnnnnnnnnnnnnnnnnnnnnnnnnnnnnnnnnnnnnnnnnnnnnnnnnnnnnnnnnnnnnnnnnnnnnnnnnnnnnnnnnnnnnnnnnnnnnnnnnnnnnnnnnnnnnnnnnntccttatctctttacttgctttttgcctgtgcttttactttcatctaagacacattgcttgctggagtcctgctttgaagggcctagtaacatagcttggctgagaatctcctctttgctgatccataaggaaaaagggttggggcaggggctcacttttaggggraaaaaataatctgcttttgtagtaagggtattgcagaggcattttggagtaccctgtttgcaggccttgtttttcttgctccgtattgtagttgatccgcagcagggaagaatcttaaatgcaaaatcttttgggagtggcacttcctgcatctctcacactgtctgaatttgttggcttggaagagaggcatcctaatccaacaaacagttaaactaacaagaacttctgatgacatgatcacgtagttaagtgggagatgaaaggggacattagtccccatcagtgtctttctgagg

SEQ ID NO: 55434 - DNA, 600 bp, Chicken  19866894308952_2
taaatgcaaaatcttttgggagtggcacttcctgcatctctcacactgtctgaatttgttggcttggaagagaggcatcctaatccaacaaacagttaaactaacaagaacttctgatgacatgatcacgtagttaagtgggagatgaaaggggacattagtccccatcagtgtctttctgaggtaagcttacaggtgtaaggaatggaaggctaaagcaattaaagcttgatagtgttttgtcccattcatttttttttttaaggtgtcactgttttattaccttgtattgctttgtakttaagtgggactggaaagtgaaaaatgtgtgggaaagaacttgtgtatttgcagtgccatttgccagctgtatgcagttgatgaacaaatgtgtgaatgagaartattgaacaagtgtagagtgcatagtttgtttctgaaggcagaaattgacccaggtgctggtggctgacctttctggcttgttgcatcccttagtttgtttttgtttgtgcagaggctctattccagtcttgcccacttactgtatgtatgyggaaggatcacatctggcacttccagaagcattagttttacttt

SEQ ID NO: 55435 - DNA, 600 bp, Chicken  19866894308952_3
caagaacttctgatgacatgatcacgtagttaagtgggagatgaaaggggacattagtccccatcagtgtctttctgaggtaagcttacaggtgtaaggaatggaaggctaaagcaattaaagcttgatagtgttttgtcccattcatttttttttttaaggtgtcactgttttattaccttgtattgctttgtakttaagtgggactggaaagtgaaaaatgtgtgggaaagaacttgtgtatttgcagtgccatttgccagctgtatgcagttgatgaacaaatgtgtgaatgagaartattgaacaagtgtagagtgcatagtttgtttctgaaggcagaaattgacccaggtgctggtggctgacctttctggcttgttgcatcccttagtttgtttttgtttgtgcagaggctctattccagtcttgcccacttactgtatgtatgyggaaggatcacatctggcacttccagaagcattagttttactttctgttgtttattgttgtgttaggtttaagagcagccagctgcttattgcagccacagtgatttcccagatgtgagctgcaggttggctatcggtgttcccagcc

SEQ ID NO: 55436 - DNA, 600 bp, Chicken  19866894308952_4
ttttttaaggtgtcactgttttattaccttgtattgctttgtakttaagtgggactggaaagtgaaaaatgtgtgggaaagaacttgtgtatttgcagtgccatttgccagctgtatgcagttgatgaacaaatgtgtgaatgagaartattgaacaagtgtagagtgcatagtttgtttctgaaggcagaaattgacccaggtgctggtggctgacctttctggcttgttgcatcccttagtttgtttttgtttgtgcagaggctctattccagtcttgcccacttactgtatgtatgyggaaggatcacatctggcacttccagaagcattagttttactttctgttgtttattgttgtgttaggtttaagagcagccagctgcttattgcagccacagtgatttcccagatgtgagctgcaggttggctatcggtgttcccagccactgccctgcaggagcaaagggagagtgcttgattcttgtatgcttcctttggtaggaggctttgggagaagtgctgtaagagtagaaggttgctttcatttggctaattatcttatctgcagtttggatgagaaaactactagaaaatcaa

SEQ ID NO: 55437 - DNA, 599 bp, Chicken  19866894308958_1
  misc_feature (1)..(55): n is any nucleotide
nnnnnnnnnnnnnnnnnnnnnnnnnnnnnnnnnnnnnnnnnnnnnnnnnnnnnnntgcaccatcaccctctgtgtgaaaaactagcatttattttcattccacaaaagcattatactgtaaagttatacatgaaattgcccacaaatatccatttgcagagcaaaaatttcttgttttcttattcatttcactatatctgatatgagttcctgcactcaggttcagaattttcccctattggaaatatcatcagagcaacaaaacctttagtattttgaaaatgtttattttggtttatwatcaacaggttctaattagaactctgattaagcaacatctgcatagaacaaatgccaaataacaactacaaattgaatctrtgtttttacttatgtctgaaaatcatctgtctgagatgtttaacttgatctgcttatgggttgctggtttaatttatcctagaagacgatgttgaataataaaagttgaatccaatccttagactgtagccttgtgctactgggattaagggatctgctctcttcaattgagaaaaaaaagctcattcagtccattacatgttactgttctttctctg

SEQ ID NO: 55438 - DNA, 600 bp, Chicken  19866894308958_2
ctagcatttattttcattccacaaaagcattatactgtaaagttatacatgaaattgcccacaaatatccatttgcagagcaaaaatttcttgttttcttattcatttcactatatctgatatgagttcctgcactcaggttcagaattttcccctattggaaatatcatcagagcaacaaaacctttagtattttgaaaatgtttattttggtttatwatcaacaggttctaattagaactctgattaagcaacatctgcatagaacaaatgccaaataacaactacaaattgaatctrtgtttttacttatgtctgaaaatcatctgtctgagatgtttaacttgatctgcttatgggttgctggtttaatttatcctagaagacgatgttgaataataaaagttgaatccaatccttagactgtagccttgtgctactgggattaagggatctgctctcttcaattgagaaaaaaaagctcattcagtccattacatgttactgttctttctctgactgattaacaagaatactgagattcaaaaagaaagacaggggatgtcacttcctctgggatatgtaagaactagcaacact

SEQ ID NO: 55439 - DNA, 600 bp, Chicken  19866894308962_1
tgaataataaaagggaaatatttattaatgtttctgttttaaccttgtgtaaatgagaaaagagaactagttatgacatatacagagaatgttaaggttctaaacgagttttttgcctcagacttcactggcagccaggattcttgttgagggacctcaacaaactcgaaaggtggtcttgtgtgtgcctaatgaggttcaacacaccaaagtgcaaggttttgcacttggatcagagtaatcctagattatacagactgataatatatatataattcaagattataatatattatattwtatatatatatatataatttattaataatattatatattaataatattgtatactattattatattaatatataatataatcctagataatacagtctggaagaaaaactcctcgagaatagcccagcagagaaggacctgggggtcatggtggatgaaagactgaacatgagacagcagtttgctcttgcagtttggaactccaacaatatcctgggctgcatcagaagaggggtggtcagcagggacagggaggaaattgtccctctctactccacccttgtgaggccccatctggtg

SEQ ID NO: 55440 - DNA, 600 bp, Chicken  19866894308962_2
gcagagaaggacctgggggtcatggtggatgaaagactgaacatgagacagcagtttgctcttgcagtttggaactccaacaatatcctgggctgcatcagaagaggggtggtcagcagggacagggaggaaattgtccctctctactccacccttgtgaggccccatctggtgtactgtgtccaggtctggggccccgatacaggaaagacggggaagctgttggaaagggtccagagaagggccacaaagatgatcaaaggtctgaagcacctcccctatgaagataggctgagggamttgggcttgttcaacctggagaagagaaagctgaaagaagacttcattgtaatcttccagtatttaaaaagaggattataaaaaggagggaataactctttattctggagagtagttttaagctcaaggagggaaggtttagattggaggtcagtgggaagttcttcacagagagagcaatgaggtgctggaacaggccacacagtgaagttgtggataccccgtccatggaggtgttcaaggccaggttggatggggccctgggcaacctggtctagtaccagacctggagggtggtgg

SEQ ID NO: 55441 - DNA, 600 bp, Chicken  19866894308967_1
ttctctcaaaaagggaatccaagcaagctgtccaggcttgcactatagcaatgaagaaatagaaaagcattgctgtgggatttattgagtgtctttcagacagtgaattatccctgaagataattctgtctctgtctactgggagaggaaatgggcagctaattttgcctagatagcttacctgttttgttataaggatgttaaatgcacttttatcatacacttctgacttgtctctgcatggtgaaagttatttttacttagtattatacaaaaaaagttatatgtataatcattgtragctatttcaaaagggtaacgtgccttattctattcatctgatacttcggaattttgtggagaagaaagaattgatggagaagcgktgtttttggatggggraaatatgtgagacaagtgatctgctacagagaagtactgaaatgagacagtgcagttgataaaaacatgaaggccttttctttatccagctaactgatacttctacttggtcagtgaatacagtgggacaagtactatcaaggcacggggtaaggatgcttatcaatatactgggtatagcaaaaatgtttttctaag

SEQ ID NO: 55442 - DNA, 551 bp, Chicken  19866894308967_2
gagtgtctttcagacagtgaattatccctgaagataattctgtctctgtctactgggagaggaaatgggcagctaattttgcctagatagcttacctgttttgttataaggatgttaaatgcacttttatcatacacttctgacttgtctctgcatggtgaaagttatttttacttagtattatacaaaaaaagttatatgtataatcattgtragctatttcaaaagggtaacgtgccttattctattcatctgatacttcggaattttgtggagaagaaagaattgatggagaagcgktgtttttggatggggraaatatgtgagacaagtgatctgctacagagaagtactgaaatgagacagtgcagttgataaaaacatgaaggccttttctttatccagctaactgatacttctacttggtcagtgaatacagtgggacaagtactatcaaggcacggggtaaggatgcttatcaatatactgggtatagcaaaaatgtttttctaagtattttgtgctagtggtgtcttggaagaggaaagatg

SEQ ID NO: 55443 - DNA, 535 bp, Chicken  19866894308967_3
gtgaattatccctgaagataattctgtctctgtctactgggagaggaaatgggcagctaattttgcctagatagcttacctgttttgttataaggatgttaaatgcacttttatcatacacttctgacttgtctctgcatggtgaaagttatttttacttagtattatacaaaaaaagttatatgtataatcattgtragctatttcaaaagggtaacgtgccttattctattcatctgatacttcggaattttgtggagaagaaagaattgatggagaagcgktgtttttggatggggraaatatgtgagacaagtgatctgctacagagaagtactgaaatgagacagtgcagttgataaaaacatgaaggccttttctttatccagctaactgatacttctacttggtcagtgaatacagtgggacaagtactatcaaggcacggggtaaggatgcttatcaatatactgggtatagcaaaaatgtttttctaagtattttgtgctagtggtgtcttggaagaggaaagatg

SEQ ID NO: 55444 - DNA, 600 bp, Chicken  19866894308970_1
ctcatttgttagagcacctccacattcttcatgcagttttcttctttttctgacattttggggagcttcctacccctttctggtgggatctggttgttgatatcaatagcgtgtagtctttcctgcctacacagttgatactctttggttagaactggaaggctgtagacttttgtctgagtgaattcattttctataaggccctattacaaagttatataatactctgtagtagaaatatgcatgtgtattgactattaaagaggttgtttgtttgttttttgttttttcccctaaatygagtatttaactctcagtttttccaagaatatcacaggaaggtattacttagttcctggaagaaagatgaaaactggttaacttcttatacaaacatgatcagtcctttgtgcctgtcatcttggtttgaatattacagaagttcagtaagaaagggcaggaatctcctgctttgtgaggaccagtctacgggatttcactctttttgttgaagccatgtatattactgtctaaatttcatacagtcttcttcttaaagaagaattttccagtgcaggtctttgtaatagtgtactttct

SEQ ID NO: 55445 - DNA, 600 bp, Chicken  19866894308974_1
catttaaatcaattcaaaacacttcccctcatccactttctccttctgtgtatttatctgtgaaatggggcaatagatgcttgactggagttgtgaaaggcctcccagaaacactgctgaagtgtaattagtattacaacagaatttacaaagtaaaacttgatccattagcatttggcaacggcaggaaaatgaaaatactatacaatgcatcttcagcctggaaacaaagccaaccagctgttagcatttggtggaggaaagctatttttaaatctgcaacactggcattagagatgygtgtgtgttccctccaagttcccatgtgactgggaagataaaggcaacagagaattttagggaactataaatatgaagcatttcaaacaaaatgtgttgatagcttttgttttagattgtaaaatgctaaatttccaaataaaatggagaacccacaggacacttacaaattcaaacactgcataaatcagaaccaagtaccaaaaggggaggggaagagacaagcccagctaactgcactaagaagtgggaaatgaatctctaacagtaaaaaacaaaatgacctcaggtgcttaaaag

SEQ ID NO: 55446 - DNA, 373 bp, Chicken  19866894308975_1
ttttttttttttttaactgaagtcttttgctaaagggactgagtttcatgtagcctttacaatgtcttattgtgtggttgtgatgggtttgatgtatagagcctacttgtctgaaggagttcttaactgccacactaacaggacatagtatgacaattgcacttcagcctaggaaattactgcaaagaaactggcaaagaaaataatataaaaagtaagaattacaagaaaaataatgctttataaataacaggatctcatcttccatttatagaagagagtatgatataagaagaaaartatattcctagtagttttaggatttaaatttaaatcccttcagtgtttaccttctttctatattacaaaattt

SEQ ID NO: 55447 - DNA, 600 bp, Chicken  19866894308979_1
agacactacacttgaatggctagactgcctaagagtactgtccagccctgcagttattcggatacagttagatatgcagtctaacggcagtagctgtatttcattggtacagtggttttgcagcaaagggagggtactgcacgttatgccattgtgcagccaaaatgctgagggctcaatgaacatgcttattggaaggcagaactggaattcaaattgatcctcagaagaacagatacatgttcacagtaagaatcctgcacaaaaggcaggggcaactatgactgcataacactgcayyggtacgtgatgtgaagcaagtggtgggctcttctttagagaaacatctgagattacagcagatcacaagaagctctcttaaaccactgcttaaaaggcaaacattgtactgggactgccactgaaagcacacccttcaagacacatgcttcaagttatgcttccactcttctcaatacaaggaattcctaaaactgtctgcttccagcacataactattagaaataaatggaggaaacagagagagagaggtcagaggaggagaatgagactgattagtgatctagaaaaacgtgcccc

SEQ ID NO: 55448 - DNA, 600 bp, Chicken  19866894308979_2
gacactacacttgaatggctagactgcctaagagtactgtccagccctgcagttattcggatacagttagatatgcagtctaacggcagtagctgtatttcattggtacagtggttttgcagcaaagggagggtactgcacgttatgccattgtgcagccaaaatgctgagggctcaatgaacatgcttattggaaggcagaactggaattcaaattgatcctcagaagaacagatacatgttcacagtaagaatcctgcacaaaaggcaggggcaactatgactgcataacactgcayyggtacgtgatgtgaagcaagtggtgggctcttctttagagaaacatctgagattacagcagatcacaagaagctctcttaaaccactgcttaaaaggcaaacattgtactgggactgccactgaaagcacacccttcaagacacatgcttcaagttatgcttccactcttctcaatacaaggaattcctaaaactgtctgcttccagcacataactattagaaataaatggaggaaacagagagagagaggtcagaggaggagaatgagactgattagtgatctagaaaaacgtgccccc

SEQ ID NO: 55449 - DNA, 600 bp, Chicken  19866894308979_3
tgcagtctaacggcagtagctgtatttcattggtacagtggttttgcagcaaagggagggtactgcacgttatgccattgtgcagccaaaatgctgagggctcaatgaacatgcttattggaaggcagaactggaattcaaattgatcctcagaagaacagatacatgttcacagtaagaatcctgcacaaaaggcaggggcaactatgactgcataacactgcayyggtacgtgatgtgaagcaagtggtgggctcttctttagagaaacatctgagattacagcagatcacaagaagytctcttaaaccactgcttaaaaggcaaacattgtactgggactgccactgaaagcacacccttcaagacacatgcttcaagttatgcttccactcttctcaatacaaggaattcctaaaactgtctgcttccagcacataactattagaaataaatggaggaaacagagagagagaggtcagaggaggagaatgagactgattagtgatctagaaaaacgtgccccctgaggaaagaatgaagaacataagctgtttatacatgacagctgcctgccagtacagaaacgattactgcaaa

SEQ ID NO: 55450 - DNA, 600 bp, Chicken  19866894308979_4
gcagtctaacggcagtagctgtatttcattggtacagtggttttgcagcaaagggagggtactgcacgttatgccattgtgcagccaaaatgctgagggctcaatgaacatgcttattggaaggcagaactggaattcaaattgatcctcagaagaacagatacatgttcacagtaagaatcctgcacaaaaggcaggggcaactatgactgcataacactgcayyggtacgtgatgtgaagcaagtggtgggctcttctttagagaaacatctgagattacagcagatcacaagaagcyctcttaaaccactgcttaaaaggcaaacattgtactgggactgccactgaaagcacacccttcaagacacatgcttcaagttatgcttccactcttctcaatacaaggaattcctaaaactgtctgcttccagcacataactattagaaataaatggaggaaacagagagagagaggtcagaggaggagaatgagactgattagtgatctagaaaaacgtgccccctgaggaaagaatgaagaacataagctgtttatacatgacagctgcctgccagtacagaaacgattactgcaaac

SEQ ID NO: 55451 - DNA, 599 bp, Chicken  19866894308982_1
  misc_feature (1)..(65): n is any nucleotide
nnnnnnnnnnnnnnnnnnnnnnnnnnnnnnnnnnnnnnnnnnnnnnnnnnnnnnnnnnnnnnnnntcccctctggccattttcccccatggctctaaccacaccatcagtgttactacagagacaatgaattaagacacagagctgagaaactgctactggtggtgacataaagtcatttttccagattgtagcctgctactgacctatgtgtaattgtccttcctggcttccttaccctattttcaggatgtttgctctcactgtttgtttggaagggcacaactgttaattggaaatkagagcaggagggtggaggctcctaaaacataattacaaagcaccatgcgatgtcccagcactgccatgggaaagcagcttgtaactttaatttcagtgctgcgatggtattctgccagctgtctcattgccctcaagcaatcacagaggagctgctcccatatgagtggaaaatggctgcacagccygtgcctcatgcagcctcaccaaggaggcttggcgtggcccagccctagcctgaggtgcattttctgcccaagaagtgatactggatgtctcattgccagcatctcagcccag

SEQ ID NO: 55452 - DNA, 600 bp, Chicken  19866894308982_2
ttgtagcctgctactgacctatgtgtaattgtccttcctggcttccttaccctattttcaggatgtttgctctcactgtttgtttggaagggcacaactgttaattggaaatkagagcaggagggtggaggctcctaaaacataattacaaagcaccatgcgatgtcccagcactgccatgggaaagcagcttgtaactttaatttcagtgctgcgatggtattctgccagctgtctcattgccctcaagcaatcacagaggagctgctcccatatgagtggaaaatggctgcacagccygtgcctcatgcagcctcaccaaggaggcttggcgtggcccagccctagcctgaggtgcattttctgcccaagaagtgatactggatgtctcattgccagcatctcagcccagcgttttctgccgattcagctttacagagctgtgctgtgtatttcttaatctgttgcgtcaggagacataaactggctgccccatatctgaaacagaggctttcttttgttgcctagattaactgtttcatgctaagcttaacttttgaattaatagatattataaataccaggtatttgcacctacat

SEQ ID NO: 55453 - DNA, 600 bp, Chicken  19866894308987_1
acgcagagatgaggagggcagaagctctcaggcacagtgtctgttgtgaagcatgccagtggatttctagggagattaaggcagggcccaccaggagctggcagagctctgctgtttggcagtaacaaacagcacatggtgatctctccaagagagtgtgagtgatgcagccagtgatctccagcaaggagtagtattactcctcaccgtagacagcagtgaactgtagcaagggaagagaggggagaaaaaattctggttttgctttggttcagatccctgactgctctgagtttcatkgagcagcactaaaagcaatattttataggttcagacttagtatatggggttccttgtaatgcaagcttattctagagttgtcctctaagcatctcatcttttctttatagattccctcggcctgtgactgtggagcccatggatcaatatgatgatgaagagggactaccagaaaaacttgtcatcaaaaaccagcaatatcacaagtatgtgctttccataagagataaggtgacactctctgtgggcttcaggacattgtcctgcttgagcctttggaaggtgctcatcagtgctccc

SEQ ID NO: 55454 - DNA, 599 bp, Chicken  19866894308989_1
  misc_feature (1)..(111): n is any nucleotide
nnnnnnnnnnnnnnnnnnnnnnnnnnnnnnnnnnnnnnnnnnnnnnnnnnnnnnnnnnnnnnnnnnnnnnnnnnnnnnnnnnnnnnnnnnnnnnnnnnnnnnnnnnnnnnnactgtttttcctttatactctacagctactgtacatccttctttgctatctgctatagctgaaagcaaaactcatgtggtttgctgggcaagtcttgggccttctcttggtcccagactaccttttcatcaataccagagtgacctttcaaagtagtttgatatggaaatacttattaggaagaaaaawttctacctcttcaccagaggacaacataaaaacttggtttttggaactactgccaaggtttttgaccactttctttcaccttgagagtaaggaataaaccctattttatgagaaggaattaattattcacgctgattcaccctcccaatccacacagtacaccctctgttccactgaataackaacctgttcaaaaggaagcacttccttatctttcttaccactcccccttacaataatacagttctggcaagctgagagatatagtccccgtacttctttccattacaaaaagccct

SEQ ID NO: 55455 - DNA, 588 bp, Chicken  19866894308989_2
catgtggtttgctgggcaagtcttgggccttctcttggtcccagactaccttttcatcaataccagagtgacctttcaaagtagtttgatatggaaatacttattaggaagaaaaawttctacctcttcaccagaggacaacataaaaacttggtttttggaactactgccaaggtttttgaccactttctttcaccttgagagtaaggaataaaccctattttatgagaaggaattaattattcacgctgattcaccctcccaatccacacagtacaccctctgttccactgaataackaacctgttcaaaaggaagcacttccttatctttcttaccactcccccttacaataatacagttctggcaagctgagagatatagtccccgtacttctttccattacaaaaagccctgattcacagggcttttaagcccttgtttgtttgaagggagaacgttcattgccaattccttcctcccacttgccttaaaggactgctgagtgatctgcaagacaggtgcttcagagaaagtggatatgtgactctcttatttaccacccacagggagctggtgcaaacacaa

SEQ ID NO: 55456 - DNA, 600 bp, Chicken  19866894308992_1
agctgcagtttgtaccttcctcatttgtacgattttcagacaagccatagtgcataatccttttgtcatctgttctcagcctgcatacagcatgctacagtaaaatggcagtcacagatctctaaaatcctgtggcaaaacttaggttaattcctggggtgtctttttttcccatagaaaaggtatgggaggctccaaagctgtggccgctgccatccttgagagctgggtctgcaccagcattgctctccaacttatagctgatgggagcaggaaggagagtggctttgacagggctgytccagctctcacagtgccagggatggagaaccacaggctgggtatctcaggactttgaagggatcatcacatgtcctgtgttgtgcaaatgtcttttgccttctcttccttgtagattctcttttgatcagacaagtaagttccaggaaacccattaattgtcatacaattctgagacatgtttcttgtgaatgttatcttgacrccgttaaaarctatttctctcagtacaatcaacctagtgtcaacttcatgttactcttccttgccccaaggcatgacttcaggtttctgatagcc

SEQ ID NO: 55457 - DNA, 600 bp, Chicken  19866894308992_2
gccgctgccatccttgagagctgggtctgcaccagcattgctctccaacttatagctgatgggagcaggaaggagagtggctttgacagggctgytccagctctcacagtgccagggatggagaaccacaggctgggtatctcaggactttgaagggatcatcacatgtcctgtgttgtgcaaatgtcttttgccttctcttccttgtagattctcttttgatcagacaagtaagttccaggaaacccattaattgtcatacaattctgagacatgtttcttgtgaatgttatcttgacrccgttaaaarctatttctctcagtacaatcaacctagtgtcaacttcatgttactcttccttgccccaaggcatgacttcaggtttctgatagccagcaggtgaaacggggctatgtgtgggacttgtatgcgtatctctgactctcacgtccctctgtcagaaatcctaagggtttatctaagagaagaaactccgctataataacctaatgaggctgtgcgttcctgtggaagccagcaggaccccactctggagcagctgtgctgtggctctgtctcccccagctgtgagctccttc

SEQ ID NO: 55458 - DNA, 600 bp, Chicken  19866894308992_3
tccttgagagctgggtctgcaccagcattgctctccaacttatagctgatgggagcaggaaggagagtggctttgacagggctgytccagctctcacagtgccagggatggagaaccacaggctgggtatctcaggactttgaagggatcatcacatgtcctgtgttgtgcaaatgtcttttgccttctcttccttgtagattctcttttgatcagacaagtaagttccaggaaacccattaattgtcatacaattctgagacatgtttcttgtgaatgttatcttgacrccgttaaaarctatttctctcagtacaatcaacctagtgtcaacttcatgttactcttccttgccccaaggcatgacttcaggtttctgatagccagcaggtgaaacggggctatgtgtgggacttgtatgcgtatctctgactctcacgtccctctgtcagaaatcctaagggtttatctaagagaagaaactccgctataataacctaatgaggctgtgcgttcctgtggaagccagcaggaccccactctggagcagctgtgctgtggctctgtctcccccagctgtgagctccttcctgtctgtgg

SEQ ID NO: 55459 - DNA, 600 bp, Chicken  19866894309014_1
ttaattgaggattatatttagaataaagaaaaacaaacaagcaggtagtcttcttatcctacttcctccccattctctcctcaataagaaaatgtcaaaggatacctacttaaactttttctaaatgaggagatggaaggattgttagtaaatggagttgaatacagctgatgaccagtcataaatggtgttccccaggggctcgtattgaagctcatcatgtttaacacctttattggtatgatcctggatgaaagggggttgagtgcaccctcagtaagtttgcagatgacaccctgytgggaggatatgtctatctgtcagagggcactcaggaaggcactccagagggatctggacaggctggattgatgggctgaagccaactgcatgagctttaacaagatgtcatggttttgtaattttgctattggtattccacatcataacatcatggacaaaagagaagaagaactacatatcccagaggacctcacggtcagagaaggaagatacatcatggaagatacatcatctggttgcgcacggtcttccgctttcgcttgcaccagggagaggagtgggtgtgctttcaagctg

SEQ ID NO: 55460 - DNA, 600 bp, Chicken  19866894309025_1
aatgtatgtatgtaaacaatttatgtacaaaaagatgtgaagtaattatacagaactggcaggagtggctgacacactagatgggtgtgctgtcattcacagagatttggaccagttggagaaatgggctggcaggagccacatgaagctcaatacaggaaaatgccaagtcccgtggcggagtaaccccatgcatgaggacaagatggggccacccagctgaaatgcagctctgcagagaaggccctgggtgttctgatggacaccaggctgaccatgagcaagcagtgagcccttgcwcctggagtgctgttcccagtgctgtgcttcccagtacaagtactccatactggagagagtgcagcagaaaggaccatgaaggtgatcaggcttggagtagctgctgtagaagaagaggctgagagagctggaacagctcaacctggagatgagaaagctcaggagtaccctatcagtgtctatgtagtttgctgcaaaagtagtgcctcctttttacttcagtggaaactacaacaaatgcaaagagcacaataacactgcttgataatgccaacaggtgccaattctgcatggaggaat

SEQ ID NO: 55461 - DNA, 599 bp, Chicken  19866894309029_1
  misc_feature (1)..(75): n is any nucleotide
nnnnnnnnnnnnnnnnnnnnnnnnnnnnnnnnnnnnnnnnnnnnnnnnnnnnnnnnnnnnnnnnnnnnnnnnnnnactgtgtgacccctgcaaatgctacttactagtggattttatgtgataaattaatgctttagtgagaagtactcccagagcagacactacttaaatagcacttgtttttgacctgtggcaacctcaagtcaagagctttccagattttgttgcgcatatttctagctattcaccctgtttgtagctgataccttttcgttgtgcctgtgttacctttttctccaragatgtgctgccacgtgagctggaagctgggctgtctgctttgggatgcacagagggtgctgagcgtgactctgagcctccctactgggggtaaggatrggtgctcattgggtccttcatgaggctgaaggtrcccatgaaggcgatggttgggctgctcaatgcaaatggaaattacatcacccaaggcaggagagggacctcgtgtgcttaacgtggccctgttgggtggctcaggtgatcccagctgtggattatcgggggttgtcccatgtgtttgtgcttcattccagcaaata

SEQ ID NO: 55462 - DNA, 600 bp, Chicken  19866894309029_2
cttactagtggattttatgtgataaattaatgctttagtgagaagtactcccagagcagacactacttaaatagcacttgtttttgacctgtggcaacctcaagtcaagagctttccagattttgttgcgcatatttctagctattcaccctgtttgtagctgataccttttcgttgtgcctgtgttacctttttctccaragatgtgctgccacgtgagctggaagctgggctgtctgctttgggatgcacagagggtgctgagcgtgactctgagcctccctactgggggtaaggatrggtgctcattgggtccttcatgaggctgaaggtrcccatgaaggcgatggttgggctgctcaatgcaaatggaaattacatcacccaaggcaggagagggacctcgtgtgcttaacgtggccctgttgggtggctcaggtgatcccagctgtggattatcgggggttgtcccatgtgtttgtgcttcattccagcaaatataacgaacccatgcctgtagaagatgttgccctgtacccacagctatctttgggtgttactttccttttaagaaggcagaatgggagctgcacagctgga

SEQ ID NO: 55463 - DNA, 600 bp, Chicken  19866894309029_3
ttagtgagaagtactcccagagcagacactacttaaatagcacttgtttttgacctgtggcaacctcaagtcaagagctttccagattttgttgcgcatatttctagctattcaccctgtttgtagctgataccttttcgttgtgcctgtgttacctttttctccaragatgtgctgccacgtgagctggaagctgggctgtctgctttgggatgcacagagggtgctgagcgtgactctgagcctccctactgggggtaaggatrggtgctcattgggtccttcatgaggctgaaggtrcccatgaaggcgatggttgggctgctcaatgcaaatggaaattacatcacccaaggcaggagagggacctcgtgtgcttaacgtggccctgttgggtggctcaggtgatcccagctgtggattatcgggggttgtcccatgtgtttgtgcttcattccagcaaatataacgaacccatgcctgtagaagatgttgccctgtacccacagctatctttgggtgttactttccttttaagaaggcagaatgggagctgcacagctggagttagagactggaagagttgccgtggccacacag

SEQ ID NO: 55464 - DNA, 600 bp, Chicken  19866894309034_1
ctccaaattttttgtatacacactggatgagtaattataagccagaaacctacataatcattttccccattagcacagccacctctgttttaatgttctgcaatattctgctaaatggttgagaaaaaagtcgagcttttttattttacttacagacaacggaggtagaacttctgcctcagtagatttcacaattggagatgaaaatctgaacacaggactgccaacattacttgttggttgtacctgtattttcaaaagaaaggtttatatctaagagcggcaactccttgaattcasaaaccaacagaagttttgtagtgaagttcagaaatctgatgttttagttatttctaatccacagatgagagtaataataaaacaaaacgaagtctgctaatgagtatacaagaaatcatcttcaaaatcaaatcacacaaaccaagagaaaaagatgagatgctacttaggtctaaatatacggaaaagcaggaaattgaagacatctaaactcagctctactaaagaactcccttgacaggttaaagcagatatctgcttctaaaaatgtggaactatttcaagtattctgaaacagat

SEQ ID NO: 55465 - DNA, 600 bp, Chicken  19866894309043_1
gactttatagaaagtgaatgttatttaaagctgctgcttgatatttagctgttttattgcagtctgtgctaaagctgatcaactcaatactttctttgacttattcatttttaaaaatacaatttttgcctgaaatcggcacataagaagtgctgagttacagaaaatgtaaatttgtaatatatgagccaaatgacatgtttttaacttcatgaagtattccctctcccctacaaaataaactcccacctcttgggtgtaaacagaatcaagtgagacattctttctgggcacaagaarttacttacttgcctgaacttgtrgaaaggaccagcttgctggggtagccacttgaaaatgccaaaataaacaacaaaaagcataacactctcctgtctagtccaaaattagacttgtagcagatgcaagtctgctttctgaatgacctttctccacattaatctcagcacagacattttctatcttcctttcagtttttcaggaaaactaagaaataaagaattcctttcttcagaagagtggcagtattttctattttgggtgggatggatgatttgggctatagggtggtatttgttg

SEQ ID NO: 55466 - DNA, 600 bp, Chicken  19866894309043_2
tttaaagctgctgcttgatatttagctgttttattgcagtctgtgctaaagctgatcaactcaatactttctttgacttattcatttttaaaaatacaatttttgcctgaaatcggcacataagaagtgctgagttacagaaaatgtaaatttgtaatatatgagccaaatgacatgtttttaacttcatgaagtattccctctcccctacaaaataaactcccacctcttgggtgtaaacagaatcaagtgagacattctttctgggcacaagaarttacttacttgcctgaacttgtrgaaaggaccagcttgctggggtagccacttgaaaatgccaaaataaacaacaaaaagcataacactctcctgtctagtccaaaattagacttgtagcagatgcaagtctgctttctgaatgacctttctccacattaatctcagcacagacattttctatcttcctttcagtttttcaggaaaactaagaaataaagaattcctttcttcagaagagtggcagtattttctattttgggtgggatggatgatttgggctatagggtggtatttgttgtgaaaccgtaccttactttcttg

SEQ ID NO: 55467 - DNA, 600 bp, Chicken  19866894309044_1
tctagttccttctgatcaagtcaggcctttcccctttataatccccttcaccatctcacttgagtgcagttattcctttctgtttctattttgtttactcctctgctttcactgacctcttacttttattaggagttccgtacacttctgtctacccattagaatgctttctcctgtattacacctagacaagaaaaaaatactaagatgacagctgcagtagaactgcagcttgcttccagtttctgttcccatagcttcctttgacttcaggcaaatcgaattggaggaagaaatgarattcctttatggcctacaatggttacatgaggtatgctcccctaatcatatgatgcagtcaccacagtcaataaaaatgatattgaagatatattggcaattttttttctagatttatgcatcagataaatatggaggacttactgaaagagctgccaatatatctttgtagtcagagagggaaatccttcattctcagtctgatttcaagtgagtggaggtgctttgtgtttatgggaaataagccccccagaaattgcaaaactgtaaacttaggaatgggtggattttgtaaaaact

SEQ ID NO: 55468 - DNA, 538 bp, Chicken  19866894309047_1
taaaacttttctaagttttctattagttccatctttggagtcttagcagttcacggtggtttaacagcctcttcaaaccagcaaaagcatactcataacatctttataagagaaaaagttttggaaagccattttgatcaagtcttcttcatatgaaggagctacgttcaaggattggaagttctgctttggttttgtacaggtgtcctcttactgacccataacttcttttaactcttctcaagaggaagatgagaatccctgctaaaattattagctttcacaaagaatattgtcttygaggaaatggccagcacacgtgctttgctttctctaaagactcccgtgawcacagcacaaactctgcactcctgcagctaggaggttttttcccccaaagacaaacatgtattagtgccctgcaatactctcttgtctattctgttgtgtttcccacaggtgccattgagctcaatagacggacctcccttagttcccatgctctctttctcatagctaatttggacgtctgacgtcc

SEQ ID NO: 55469 - DNA, 488 bp, Chicken  19866894309047_2
tcacggtggtttaacagcctcttcaaaccagcaaaagcatactcataacatctttataagagaaaaagttttggaaagccattttgatcaagtcttcttcatatgaaggagctacgttcaaggattggaagttctgctttggttttgtacaggtgtcctcttactgacccataacttcttttaactcttctcaagaggaagatgagaatccctgctaaaattattagctttcacaaagaatattgtcttygaggaaatggccagcacacgtgctttgctttctctaaagactcccgtgawcacagcacaaactctgcactcctgcagctaggaggttttttcccccaaagacaaacatgtattagtgccctgcaatactctcttgtctattctgttgtgtttcccacaggtgccattgagctcaatagacggacctcccttagttcccatgctctctttctcatagctaatttggacgtctgacgtcc

SEQ ID NO: 55470 - DNA, 600 bp, Chicken  19866894309050_1
ataatgcattacaagtgttccctgtggttccccataccaagtagcaagagtagccgtgaacaaaaaaggaattttcttgaaaacaaataaaattaccagactttcattttgttttagaacctacatgttctatggtcctgaatgtagttttgttgttgttgtttatttttcttttgttttctttttacctccacagagattgaaacaagggtagagctgtaccttgtcttgccttagaactatagaatcatttgagttggaagggaccatgaaaggtcatgtagtccagctcccctacartgaatagggacatctacagctaaaccacattgcccagagactggtccttagagtgtctccagggatggggcattcaccacatctctggacaatctgttccagtgcttcgctaacattattgtaataaaccttttccttatacccagtctaaatctccaatcttttagtttgaaaccattacctcttgttctaccacaactcctgtttttttgagtatatctcctaaaaagtctgttctgtttgggtgttgctctttgttttttattttttttaacccaaataaagtagtgaggaagtgag

SEQ ID NO: 55471 - DNA, 600 bp, Chicken  19866894309050_2
tactacaacaactgaccacaatgcaacttctactgagctaaactaatgggtgcaagtaaataagccaattttttattctaaagatgttctcctgaaatctgaggtgactacatccaagtttaaatgagatttattaaaaattgaggagtggagtagggaaaacaaacaatacggacccattttatatagtcaagttgttgaccatgctttctttgactgtcaatgggctggtttaatacagtcaaactgttgactgttgaaaaaaaaaatgactgagaaagttgaaaacagggtaaaaaraagggtaaatatatacgtgtgtgtgtgtgtgtggtcttcatttcttggtttatawagggttaaacaatctcttggtcttaactattgcccaacccagctactttcaattaccaccattgttgaaaaagtgacagacaactgaattcagcatcagttcagcttatcttaatacaggcaactaacaatggaagccaaacagagatcatacccttactgctgccttttttttttttttttttttttttggagagagctcatgagggaagggacatactagccataagctgcaacctcttgaat

SEQ ID NO: 55472 - DNA, 600 bp, Chicken  19866894309050_3
gtaaataagccaattttttattctaaagatgttctcctgaaatctgaggtgactacatccaagtttaaatgagatttattaaaaattgaggagtggagtagggaaaacaaacaatacggacccattttatatagtcaagttgttgaccatgctttctttgactgtcaatgggctggtttaatacagtcaaactgttgactgttgaaaaaaaaaatgactgagaaagttgaaaacagggtaaaaaraagggtaaatatatacgtgtgtgtgtgtgtgtggtcttcatttcttggtttatawagggttaaacaatctcttggtcttaactattgcccaacccagctactttcaattaccaccattgttgaaaaagtgacagacaactgaattcagcatcagttcagcttatcttaatacaggcaactaacaatggaagccaaacagagatcatacccttactgctgccttttttttttttttttttttttttggagagagctcatgagggaagggacatactagccataagctgcaacctcttgaattcttgcaaggttacctcttgaaacctcttgaattgtgagccagagcctcaaacac

SEQ ID NO: 55473 - DNA, 600 bp, Chicken  19866894309050_4
aggaaatgaatgaagctttctgaaaaagttggtcaaattggaatggcaaaacttcaagcaaattattccactggatatttatcaagcaacagtctgatctcatgctcaagcaaggtctttggttcaaacatcatctgaagcaatcatagaatcacagaatggcctgggttgaaaagggtcacaatgatcatcttgtttcaacccccctgctatgtgcagggtcaccaaccaccagaccaggctgcccagagccacatccagcctggccttgaatgcctccagggatggggcatccacaayctccttgggcaacctgttccagtgcgtcaccaccctccaygtgaaaaacttcttcctaacatctaacctaaatctcccctgtctcagtttaaaaccattcccctttgtcctatcactatctaccctcgtaaacagctgcttcccctcgatgctgagtatctacagctcccacagaagaccttctattggacatcccagtttcaaaaatatcaaaaataactctcgccaacagcttacccaggtacaaaatgggaataacttgtatcttttaaaatacctcccccatgggagaatgagtgc

SEQ ID NO: 55474 - DNA, 600 bp, Chicken  19866894309050_5
gaatggcaaaacttcaagcaaattattccactggatatttatcaagcaacagtctgatctcatgctcaagcaaggtctttggttcaaacatcatctgaagcaatcatagaatcacagaatggcctgggttgaaaagggtcacaatgatcatcttgtttcaacccccctgctatgtgcagggtcaccaaccaccagaccaggctgcccagagccacatccagcctggccttgaatgcctccagggatggggcatccacaayctccttgggcaacctgttccagtgcgtcaccaccctccaygtgaaaaacttcttcctaacatctaacctaaatctcccctgtctcagtttaaaaccattcccctttgtcctatcactatctaccctcgtaaacagctgcttcccctcgatgctgagtatctacagctcccacagaagaccttctattggacatcccagtttcaaaaatatcaaaaataactctcgccaacagcttacccaggtacaaaatgggaataacttgtatcttttaaaatacctcccccatgggagaatgagtgctagttcaaacactggataaaattgtttggtagggtgctac

SEQ ID NO: 55475 - DNA, 600 bp, Chicken  19866894309052_1
ccccccattttttccctctcttcaagtattggaaggccacaatgaggtctccatggagccttttcttctccaaacccagttcccttaacctttcttcataggagaggtgctccagccctttgatcatcttagtgactctggactcattccaagagtttcacatctttcctgtgccgggtgtctcaggcatggatgcagtaatccagatggggtctcacaagagctcacaataggtttgagactctggatcttgaggaagaagtgaggatgcagtggaagttgcatccagaaggttgtctrgggtgaggcagccagctccatgcctcaagactgcctttgccaagaaggaaagaagggtgactgtcataggcatctcccttctgagaggaatggagggccctatatactgaccagaccctgcccatagataagtgtgctgcctccctagggcctaggtcagggacattactaaaaaacttcctggtctacttcaaccttctgattattatcctttactgatagttcaggctggaggcaatgaagtcactgagagagacctgtgggctgtaagagacttcagggtagtggggtggtgagttg

SEQ ID NO: 55476 - DNA, 600 bp, Chicken  19866894309054_1
gccgtgattcctgtgaaagtgttgcctgacctagtttggctttaccagcacctatgaggctacttgctgttacatggtcagtgacctgcagtgggaagaaaaaacaagacaaaaagcatttcagctgcttattgattattttttcagtgacaattgttgggtaccttgctaatgcctgttacccaaaagcagtaccctgtgtagcacccatgccttcaacaacaaccagttgcagctgcacagtctcattcacccctaatgccccagtatctgccccttgaggcactgtccatttttttwwaaattttgctgactttttaatcattactgagctgcctatttacaaatcatggcttaaagggtgcatatttagtggaattatttcacaacacagctaatcccacaaatctggaatcttcctgtaaatttttaacaagaactaaagcctctttcctactgttctcattaaatatatatatatatgaaaataaattttagatgtatttccctgtttctagtaataagtctctactgaattcctcctgaatggctttagaaggacaagcaaactaaccagaattgaacaattttaatgctaca

SEQ ID NO: 55477 - DNA, 600 bp, Chicken  19866894309054_2
ccgtgattcctgtgaaagtgttgcctgacctagtttggctttaccagcacctatgaggctacttgctgttacatggtcagtgacctgcagtgggaagaaaaaacaagacaaaaagcatttcagctgcttattgattattttttcagtgacaattgttgggtaccttgctaatgcctgttacccaaaagcagtaccctgtgtagcacccatgccttcaacaacaaccagttgcagctgcacagtctcattcacccctaatgccccagtatctgccccttgaggcactgtccatttttttwwaaattttgctgactttttaatcattactgagctgcctatttacaaatcatggcttaaagggtgcatatttagtggaattatttcacaacacagctaatcccacaaatctggaatcttcctgtaaatttttaacaagaactaaagcctctttcctactgttctcattaaatatatatatatatgaaaataaattttagatgtatttccctgtttctagtaataagtctctactgaattcctcctgaatggctttagaaggacaagcaaactaaccagaattgaacaattttaatgctacat

SEQ ID NO: 55478 - DNA, 600 bp, Chicken  19866894309062_1
tctataatttccttttgctgtgtaaaaatcacagtgaataaaaaaataattttaaactgaagatacacttgacttgtagcaatgtgttccaaacaatgatgaaaggatactatttacaatacatactatttcatcatagtttttgataaacttttggagatcatacaggactagatgatctagaatgaaactggaagcaacatttctccattctgctccattcatttctagccttcccctttcatgtactgtgtgcttaactggtaataggatgaaaaagtttctgaatgggagctaccygaatttcacagaatcataaaatccttagagttagaagggacctttaaagttctctagtctaactcccctgcaatgaacagggacatgcacagctagatcaggttgcccagggcctgatggagccttgtcttggaagtctccaggacagagcaattcacgtatattgacttgaaatatagtcaaaggaaggacctggatcatccaagyatttcaaatcctcaatttataaagatccttcagttctgtgtaggtacttggtccagcatttaaattctttatcaaactgaatgcacctcctgt

SEQ ID NO: 55479 - DNA, 600 bp, Chicken  19866894309062_2
ccattctgctccattcatttctagccttcccctttcatgtactgtgtgcttaactggtaataggatgaaaaagtttctgaatgggagctaccygaatttcacagaatcataaaatccttagagttagaagggacctttaaagttctctagtctaactcccctgcaatgaacagggacatgcacagctagatcaggttgcccagggcctgatggagccttgtcttggaagtctccaggacagagcaattcacgtatattgacttgaaatatagtcaaaggaaggacctggatcatccaagyatttcaaatcctcaatttataaagatccttcagttctgtgtaggtacttggtccagcatttaaattctttatcaaactgaatgcacctcctgtggactagttcatggaatttatttattcacattagtgaattatgcagtgtttaaaaaatgaaaatgttaaaatgatgggaatgtacactgtcagtgtgtgatgcataaagaagtctgcagctcatctgttcataactgtctggtgtcaatatcttaccacctgctggtggcagcaaaagggaatatgattcaccatcctcaagctatt

SEQ ID NO: 55480 - DNA, 599 bp, Chicken  19866894309065_1
  misc_feature (1)..(2): n is any nucleotide
nnttcctcccaactcaaaagattgcatgactccctcaaggtccacaaatgcatgcagagtggcatgcacccctctctgcaaatatgctgtctcatgtttcccaaccacagatgcagtttaaccaggcagcttgttttttggagtctgggtagcttgctgctatcattttgaattaacttcaaaaagtattttattcaatgatgcctttagaattacaacgctaaatggttgtctgctgtatcaggtctttgcatgctgcttatgttttttaacccagaactttctattgaaattaaattkcttttgctgttagcttggaattgttttagatggactttctgtggcaagcagtttgccaggattttaaattccctctaattccttctttcttcattcatatcaaccctgaaattgtagttgacataaggatgcatttgtgcagaggaggctggctgagcycatgtcttgaaagcccacttgagacatttattgactattttaaagcactaagggctaaatcacacctttaggtatttgttttagcacttgggactactcactgataaragagagaatgtgcagtaagcttcaggagtttt

SEQ ID NO: 55481 - DNA, 600 bp, Chicken  19866894309065_2
ctatcattttgaattaacttcaaaaagtattttattcaatgatgcctttagaattacaacgctaaatggttgtctgctgtatcaggtctttgcatgctgcttatgttttttaacccagaactttctattgaaattaaattkcttttgctgttagcttggaattgttttagatggactttctgtggcaagcagtttgccaggattttaaattccctctaattccttctttcttcattcatatcaaccctgaaattgtagttgacataaggatgcatttgtgcagaggaggctggctgagcycatgtcttgaaagcccacttgagacatttattgactattttaaagcactaagggctaaatcacacctttaggtatttgttttagcacttgggactactcactgataaragagagaatgtgcagtaagcttcaggagttttggtttttaggtgayaagatttaactgttgttttgataagagataaaattatataaataaagcgatggagaatattaatcttccccaggagagtgaggacttgcctgtttgctctaatgcagagtgctcaaatatttggcttgagcaaggtccaggtttca

SEQ ID NO: 55482 - DNA, 600 bp, Chicken  19866894309065_3
tttaacccagaactttctattgaaattaaattkcttttgctgttagcttggaattgttttagatggactttctgtggcaagcagtttgccaggattttaaattccctctaattccttctttcttcattcatatcaaccctgaaattgtagttgacataaggatgcatttgtgcagaggaggctggctgagcycatgtcttgaaagcccacttgagacatttattgactattttaaagcactaagggctaaatcacacctttaggtatttgttttagcacttgggactactcactgataaragagagaatgtgcagtaagcttcaggagttttggtttttaggtgayaagatttaactgttgttttgataagagataaaattatataaataaagcgatggagaatattaatcttccccaggagagtgaggacttgcctgtttgctctaatgcagagtgctcaaatatttggcttgagcaaggtccaggtttcacatcagacttcatcttctgcagtcagcagcagttgctgttaagtttatctgcatctcttaagatggtggccagggcaggaaagggcagcagaactctcatggctgttt

SEQ ID NO: 55483 - DNA, 600 bp, Chicken  19866894309065_4
cttggaattgttttagatggactttctgtggcaagcagtttgccaggattttaaattccctctaattccttctttcttcattcatatcaaccctgaaattgtagttgacataaggatgcatttgtgcagaggaggctggctgagcycatgtcttgaaagcccacttgagacatttattgactattttaaagcactaagggctaaatcacacctttaggtatttgttttagcacttgggactactcactgataaragagagaatgtgcagtaagcttcaggagttttggtttttaggtgayaagatttaactgttgttttgataagagataaaattatataaataaagcgatggagaatattaatcttccccaggagagtgaggacttgcctgtttgctctaatgcagagtgctcaaatatttggcttgagcaaggtccaggtttcacatcagacttcatcttctgcagtcagcagcagttgctgttaagtttatctgcatctcttaagatggtggccagggcaggaaagggcagcagaactctcatggctgtttgaggcaaatgagagagagggaatggaggaaagccaccgccttcaga

SEQ ID NO: 55484 - DNA, 599 bp, Chicken  19866894309068_1
  misc_feature (1)..(6): n is any nucleotide
nnnnnnacctgcaatacaacacttaatttctaccagacctcccaatttctgtaggaaaatacaaagcaggtgccaactcctcttctaagctttgtgtgttacagaagaggaggcttttcagaaaatttcattatattcacatcaatataaataccaaaacgaagcaaagagaagaatcttgagctctcaaggaaaccagtggcaactacagaaacaaacatcagcagtgactcagcacgagagaatacacaggaaaatgcaggcacaaagttagtcactgggtgaactctcaagctaccrgcagaggaacccaggaacaaacttcatccatttttccaggaaagtcctgaactgaaattcacatggacgcacagagtctccttgccaagtggccctagcaagacctggggtaccagacacatgctgtctgcgttaggaactctacagaggaagggaatcaactccatgcctactaatttttgtttcaacctaggagccaaatcgctaattcaatccatgtcattggtagcagcagtaggcagaatcctaactttcctatatcagattgtgcttagaagacagagtccattaaaagcaga

SEQ ID NO: 55485 - DNA, 600 bp, Chicken  19866894309079_1
gactcccaggctgtggccatggctcactcagcactgaggcagctgggatgaggggagatgggctggtacctccctccagagtggtagacatgactgtcccaaagcacaggcactgccagaggatggaaagtaccccactttgcccatctttcacttgcaaggagaatttgggggcatctgcctcaataatctccgcaggttgcagcgcggccttcagtagatggcatccagttgttcattgccttttgtattttctctgcctgaagccaacctccagccctctctgtgctgccgtgcacmttcagaactgaccccgatgcaatggctttgccacatcttccgggctttggtcaacccagtccagatcagccatgcacccaaggctctgtctccccattygctgctcctctcctcagtctccttaatctcacagccagcagacccacagtgttgcacatgggcctcctccagaagccctttgatcctgtgaggatgctgtgtgtgttcttaaaccataaggcccatccatggcaggccctgtcctgctggggacacttctcaagaggtggacataagggaaggacctttgggtcttcgttg

SEQ ID NO: 55486 - DNA, 600 bp, Chicken  19866894309079_2
caaagcacaggcactgccagaggatggaaagtaccccactttgcccatctttcacttgcaaggagaatttgggggcatctgcctcaataatctccgcaggttgcagcgcggccttcagtagatggcatccagttgttcattgccttttgtattttctctgcctgaagccaacctccagccctctctgtgctgccgtgcacmttcagaactgaccccgatgcaatggctttgccacatcttccgggctttggtcaacccagtccagatcagccatgcacccaaggctctgtctccccattygctgctcctctcctcagtctccttaatctcacagccagcagacccacagtgttgcacatgggcctcctccagaagccctttgatcctgtgaggatgctgtgtgtgttcttaaaccataaggcccatccatggcaggccctgtcctgctggggacacttctcaagaggtggacataagggaaggacctttgggtcttcgttgtaggttgaaaatcagtatctccaaaaggggtttctggacctgatatggctgatttcaagatcattgcagctcatacacttaaatctctgtgggttaagt

SEQ ID NO: 55487 - DNA, 600 bp, Chicken  19866894309081_1
gttctcctttagtcttgcaacaccttttgctcttgacatgtgctgaagcaggtgacaagctttagaacctcatttaatgctcatgcccacaagttgtggagttttccatgtattttggatgtctggcacatttctcatgctatgtatgcatgattttctttattaactgcaaaagctactgctcctgaggtgatttatgcacccaggtctattgtaaagcaaagctcctgagtgtgtggagaaacacaagggacagaggcagtaatgaagactgatgttatgccaggtgctaaagatgcratgaggtgacgtgcctctcctcttcctcctccttctcaccacttggctgcygaatctctcttgtcttgcctcccacgccaggtcacccctcctttgcactttgctgtggggtgaagaagcatgtagtgcttgcacctatgtgcctatttttatcctgcatgtttctacctgtagaaaatcatctcgcttggcacctgagctatgggcttcaggcaggtatttcccttgctaaaccttttgaagatacattggtaaaatgttagcggccgtcatatgatgaggatacaaagtgcacacttc

SEQ ID NO: 55488 - DNA, 600 bp, Chicken  19866894309081_2
gtgacaagctttagaacctcatttaatgctcatgcccacaagttgtggagttttccatgtattttggatgtctggcacatttctcatgctatgtatgcatgattttctttattaactgcaaaagctactgctcctgaggtgatttatgcacccaggtctattgtaaagcaaagctcctgagtgtgtggagaaacacaagggacagaggcagtaatgaagactgatgttatgccaggtgctaaagatgcratgaggtgacgtgcctctcctcttcctcctccttctcaccacttggctgcygaatctctcttgtcttgcctcccacgccaggtcacccctcctttgcactttgctgtggggtgaagaagcatgtagtgcttgcacctatgtgcctatttttatcctgcatgtttctacctgtagaaaatcatctcgcttggcacctgagctatgggcttcaggcaggtatttcccttgctaaaccttttgaagatacattggtaaaatgttagcggccgtcatatgatgaggatacaaagtgcacacttcttcctgagttcatacctcacctctctctttgtctctctgagaacctcatac

SEQ ID NO: 55489 - DNA, 464 bp, Chicken  19866894309081_3
tcttgtcttgcctcccacgccaggtcacccctcctttgcactttgctgtggggtgaagaagcatgtagtgcttgcacctatgtgcctatttttatcctgcatgtttctacctgtagaaaatcatctcgcttggcacctgagctatgggcttcaggcaggtatttcccttgctaaaccttttgaagatacattggtaaaatgttagcggccgtcatatgatgaggatacaaagtgcacacttcttcctgagttcatacctcacctctctctttgtctctctgagaacctcatacagatcaratttgatgttatggatgagggttatgctgagcagtgctccttccccttctgctcctacccttgttttttatttagttattccctcctctgcagtggatatagagataacatttaagggtttttttttctgtggagatacatctcaaagtacgctgctccttcat

SEQ ID NO: 55490 - DNA, 600 bp, Chicken  19866894309082_1
ctaaaagagtggtaatgctgctcaggaggtggtgcagtcaccgtccctggaggagtccaagaaccatggagatgtggcattgagggacacggttaatgggtatggtgggatgggttggggctgggcttggggatcacagaggtcttttcccaatctgaatgattctgtgattctatgataatttattttaattcagtttaaaacaaatgtctttttagacattgtcacagtgcctcatgctgtcttcccatgttcctctacggatgctcatgctcagttttattgcaagatgtgccttgytgrctgagctacaccacgctccatgcactggcgtcctcttcttgccaaagttgaaagcaacatacctctctttttctgctggtggagggaggtaagaataaagtcagcatcacaatttggtggttaattcatttctaggttcccatttctgtgctcaaaccccgtatagtacagtctggtggacaaaacagtgtcttcataagggactcatagaattacagaatcatggaaaagacctctaaggtccaaaatcagcccatcaccatgtcatgtagtgccatatctaccccatttattgaa

SEQ ID NO: 55491 - DNA, 600 bp, Chicken  19866894309082_2
aaagagtggtaatgctgctcaggaggtggtgcagtcaccgtccctggaggagtccaagaaccatggagatgtggcattgagggacacggttaatgggtatggtgggatgggttggggctgggcttggggatcacagaggtcttttcccaatctgaatgattctgtgattctatgataatttattttaattcagtttaaaacaaatgtctttttagacattgtcacagtgcctcatgctgtcttcccatgttcctctacggatgctcatgctcagttttattgcaagatgtgccttgytgrctgagctacaccacgctccatgcactggcgtcctcttcttgccaaagttgaaagcaacatacctctctttttctgctggtggagggaggtaagaataaagtcagcatcacaatttggtggttaattcatttctaggttcccatttctgtgctcaaaccccgtatagtacagtctggtggacaaaacagtgtcttcataagggactcatagaattacagaatcatggaaaagacctctaaggtccaaaatcagcccatcaccatgtcatgtagtgccatatctaccccatttattgaagac

SEQ ID NO: 55492 - DNA, 600 bp, Chicken  19866894309084_1
tgattcagcttagctttctttctttctgcactaaagtaatttgaatcatcttacatttcttatggttactgacaagaatgaggacagctgacaaataccacaggagtcaggactgcctatagtactgatgttgcttaagttccataagcacagttggcttgcacctacattttatttcatttcagagagatgctgtagtttttaagccagttgccatttcctgcttactacacaatgatgtgatgtggacagcagtgctgggacacacaaactggattcttgaaggaaactcctttcctmtccatgagtttaccaagaaatatgatcattactatccaaaccagtgactggctctgaaacatgtatgaggtctaaggaatcagaggaagtctagtaaatcttgaagtagagctcccaatatgcttagggtccatatttatttacgctgactgcctcactgtacacatccatgatgctatcttactttcttttaatgcagacacagccataaatgtctgtgagaaactgagctatttacgggatcagaatattactctataagaaggtacacactggacgttatgcttataatatagttaa

SEQ ID NO: 55493 - DNA, 600 bp, Chicken  19866894309085_1
ttaataagtcaaacctgaactcaattcagccgtgtctcctggtgttgagatgaggtgttgagctgttattgccttttcaagagcatgacagctactttttctcttttccattaagatatgtggccatgataagttctgttagaaagttattgtgtattctgagttatgaggtcttaaactccaaacattggttcatttacattctactcattcctggcatcactgctaatgttgaaaacgtacagagttcattggctggtctttcttctaaatacagcctcagtgcctagtggtaaaacrtgttctctcccatatgggtagctaatgtcactgctgttctctatttttgtaacaatgtgtggcaagcctggaaattttgattcatctttgatacttctgtgaagacatcactttttattaagtttctttaccttgctgtaggatgttatgtcatgtctgtaaaccaagaacatttgaagctccatttaaagtgccttatatttttacatgaatgaattatatatcatgcctgtctgcctcaatctaggtttgcacgagtcagaaactctgcagtactttgaggaagaaagtgagtgatat

SEQ ID NO: 55494 - DNA, 600 bp, Chicken  19866894309085_2
taaacaactggtgttcacaacataaaagcaatttggtcattggagcactcgtgcatgttatttacaaccagtaagacattaaaatgtcattacagagtctgacttgtgacaattttacatgacagttatttgggactactgcactgtttactaaggaaagaaagcaaaacacagctatttctatatgtttggagaggtgactttaattcagccaactgtttgcagataatatttacatagatgtttctagtttactcttccctcagaggaagctgaaaagaagaaaattcctcgggtacsagaaatttttccactgttgcactaaagaaagaagaaagggcaggggacttaraatatgtcaaaatgacttgtagctgtctgatggttatttaccttctcaactagatatgagaatcttgtacattgaattattttcaattgaaactttatgcagtataacatgatttgcttgtgaaaagtggataatatcagatttcagcaaaatccaagaggaaactagagactagatcttgtgatggtgctgagtgtagccactttctttggttttcatgacayctttctgaatagaaaccctatttt

SEQ ID NO: 55495 - DNA, 600 bp, Chicken  19866894309085_3
gcatgttatttacaaccagtaagacattaaaatgtcattacagagtctgacttgtgacaattttacatgacagttatttgggactactgcactgtttactaaggaaagaaagcaaaacacagctatttctatatgtttggagaggtgactttaattcagccaactgtttgcagataatatttacatagatgtttctagtttactcttccctcagaggaagctgaaaagaagaaaattcctcgggtacsagaaatttttccactgttgcactaaagaaagaagaaagggcaggggacttaraatatgtcaaaatgacttgtagctgtctgatggttatttaccttctcaactagatatgagaatcttgtacattgaattattttcaattgaaactttatgcagtataacatgatttgcttgtgaaaagtggataatatcagatttcagcaaaatccaagaggaaactagagactagatcttgtgatggtgctgagtgtagccactttctttggttttcatgacayctttctgaatagaaaccctatttttgttcggtgtttgcctacaaggtaagctgaacaatcacccttctttgccctc

SEQ ID NO: 55496 - DNA, 600 bp, Chicken  19866894309085_4
aaagaagaaaattcctcgggtacsagaaatttttccactgttgcactaaagaaagaagaaagggcaggggacttaraatatgtcaaaatgacttgtagctgtctgatggttatttaccttctcaactagatatgagaatcttgtacattgaattattttcaattgaaactttatgcagtataacatgatttgcttgtgaaaagtggataatatcagatttcagcaaaatccaagaggaaactagagactagatcttgtgatggtgctgagtgtagccactttctttggttttcatgacayctttctgaatagaaaccctatttttgttcggtgtttgcctacaaggtaagctgaacaatcacccttctttgccctcagactatttgaatgtaggtaattttcttgctttcagaaatggggtcaaagtttttctccaccattttatgactttcttgagaatacaataacccccaaactgaatctgcaactgctttgtcttgccagcaataagtggttggccagaaaagatgcacttcagtttgagactttgagagagtaaataaacacttgaggactattcccaaaacatttgtaacaata

SEQ ID NO: 55497 - DNA, 599 bp, Chicken  19866894309086_1
  misc_feature (1)..(14): n is any nucleotide
nnnnnnnnnnnnnnccctaccgctgggtacagaggtgggcagaaaggacacagactttatgtccccgctgttgtgcccatttgcccacagggtgaatgaggcagatccttgaagcgtgaccaggagagcagttaccttggaagcagggaggtggggaataagcaaatgcgtgaggagcattcagtgttgctctctttccatgtgtctttggttgttttcctttcccaagtcttggaggctgcaggtcccatatgcgacctgccctggtggacatgtcctgagcaggagcctgagagggasacatttccccagctctgcttgtaatgaaattagcaatacttctaacatttctgtgcctctcttactcttcttcctctgttctgtgctgtctttgaatgggatgctgtggattgatgcatgatgcccagctaggaggtgtgctccccaaaggtatgctagtatgataggatgagagggaatggcctcacgttgcaccagaggagattcaggttggatattaggaaaaatgaaggagcggcgaggcagtggcacaggctgcccrgggaggtggtggagtcactgtcygtggaggtgttcaa

SEQ ID NO: 55498 - DNA, 600 bp, Chicken  19866894309086_2
cctggtggacatgtcctgagcaggagcctgagagggasacatttccccagctctgcttgtaatgaaattagcaatacttctaacatttctgtgcctctcttactcttcttcctctgttctgtgctgtctttgaatgggatgctgtggattgatgcatgatgcccagctaggaggtgtgctccccaaaggtatgctagtatgataggatgagagggaatggcctcacgttgcaccagaggagattcaggttggatattaggaaaaatgaaggagcggcgaggcagtggcacaggctgcccrgggaggtggtggagtcactgtcygtggaggtgttcaagaaccatggagatgtggcactgaaggacgtgggttagtgggcagtattggtgatgggtggacaattgggctaggtgatgttastgatcttttccaaactttaggattctgtgattctttgctcacaaggagcccaaaatttctgagtctggctgcatctccttgctgtcaggtctgtcattaacttataagcaatagcttgccaagaattcacacatcagcaattgcaaatctctctctctctctttttttttttttttttta

SEQ ID NO: 55499 - DNA, 600 bp, Chicken  19866894309086_3
gagcctgagagggasacatttccccagctctgcttgtaatgaaattagcaatacttctaacatttctgtgcctctcttactcttcttcctctgttctgtgctgtctttgaatgggatgctgtggattgatgcatgatgcccagctaggaggtgtgctccccaaaggtatgctagtatgataggatgagagggaatggcctcacgttgcaccagaggagattcaggttggatattaggaaaaatgaaggagcggcgaggcagtggcacaggctgcccrgggaggtggtggagtcactgtcygtggaggtgttcaagaaccatggagatgtggcactgaaggacgtgggttagtgggcagtattggtgatgggtggacaattgggctaggtgatgttastgatcttttccaaactttaggattctgtgattctttgctcacaaggagcccaaaatttctgagtctggctgcatctccttgctgtcaggtctgtcattaacttataagcaatagcttgccaagaattcacacatcagcaattgcaaatctctctctctctcttttttttttttttttttaattttaataaagtcaggaaaaaa

SEQ ID NO: 55500 - DNA, 600 bp, Chicken  19866894309086_4
gtgctgtctttgaatgggatgctgtggattgatgcatgatgcccagctaggaggtgtgctccccaaaggtatgctagtatgataggatgagagggaatggcctcacgttgcaccagaggagattcaggttggatattaggaaaaatgaaggagcggcgaggcagtggcacaggctgcccrgggaggtggtggagtcactgtcygtggaggtgttcaagaaccatggagatgtggcactgaaggacgtgggttagtgggcagtattggtgatgggtggacaattgggctaggtgatgttastgatcttttccaaactttaggattctgtgattctttgctcacaaggagcccaaaatttctgagtctggctgcatctccttgctgtcaggtctgtcattaacttataagcaatagcttgccaagaattcacacatcagcaattgcaaatctctctctctctcttttttttttttttttttaattttaataaagtcaggaaaaaaaaaaaaccttttcttgaaactttaatgcatacagaattttgtggctgaactatttttcattcatgctgctcccatctcctgtcaccttcttatccac

SEQ ID NO: 55501 - DNA, 600 bp, Chicken  19866894309086_5
agtggcacaggctgcccrgggaggtggtggagtcactgtcygtggaggtgttcaagaaccatggagatgtggcactgaaggacgtgggttagtgggcagtattggtgatgggtggacaattgggctaggtgatgttastgatcttttccaaactttaggattctgtgattctttgctcacaaggagcccaaaatttctgagtctggctgcatctccttgctgtcaggtctgtcattaacttataagcaatagcttgccaagaattcacacatcagcaattgcaaatctctctctctctcstttttttttttttttttaattttaataaagtcaggaaaaaaaaaaaaccttttcttgaaactttaatgcatacagaattttgtggctgaactatttttcattcatgctgctcccatctcctgtcaccttcttatccactgctgaattcagttcaaaaccactttcctgccttgcaaaacccctcaggagctgcttcaccttccctcatttcctactggtgggctgctctcctggactacgtttccatccctttcttgggacagtccacactgtttctcttgtgcctgctccttcttgctt

SEQ ID NO: 55502 - DNA, 600 bp, Chicken  19866894309099_1
atcaggcataggctatgcttagtaggtcttactccatatctggatgctttcaacaagaggggtacttgatatgtacacatgtactgcactgagacgtctcctgttcaacatgttagtgatctgaaggaagttacaaaatgcactctcaaatattttgctgatgataccaatctgggaggaccagtaaatatgaccaaggacagggctgcttctcacagggacttaggaaagctggaggaatgagctgatactgaaattatgaaactcagaaaggacaaatgtaatcctacacctgggaargtagatcccaatacagttgtagactggggaccgaggaactagagtacacccttgaggaaagttctgagatcttgggggagagtggttgaaactgagctgggactgtatcctggcagcagagatggctaacaacatccagagctgtattaagtgaaatatatacagcaaatcaaaggaagtgattatcaaattctctgcattcattagacaacatcaattaaaaagtattcagctttgaagctgtcagtaactccaagcaagttcagcttgaggtccatcagagctgaagcactgtcacgg

SEQ ID NO: 55503 - DNA, 600 bp, Chicken  19866894309105_1
atcatttatacttcagcttctttaaacctaacattaattaaacatatcatttgttgctgcgatcttaaataatcttttaaatgtactatctttggaccattctgtcacacaccttttgtcatgaattcggtgactatgtagattggttcctcagaaacaacggcatacagtggaacaagcttgtcatgtcgtaatttcttcatgatctgagcctcctgaaggaaagcttcgggcatcattgtaccaggtttaagtgtcttgatggctacttttgtggttccattccaggttcctagagargcaaataaaatattattccccactacaaaaatcagggattttctgctaaaagtttgtttatttttttttccttctgtttygttaggtaacagaataatcctaaattattaactacattgagcattatttttaatgttttgtgactgaatataactggcatcttctttcttcagttatttatgagatcatatttaaagactccgaaaatgacttacttaaaatactattaaaacattcacagaggtaactgaaacgtatcacattaagctcttacccatccatacttcaccaaaacatcct

SEQ ID NO: 55504 - DNA, 600 bp, Chicken  19866894309105_2
atgtactatctttggaccattctgtcacacaccttttgtcatgaattcggtgactatgtagattggttcctcagaaacaacggcatacagtggaacaagcttgtcatgtcgtaatttcttcatgatctgagcctcctgaaggaaagcttcgggcatcattgtaccaggtttaagtgtcttgatggctacttttgtggttccattccaggttcctagagargcaaataaaatattattccccactacaaaaatcagggattttctgctaaaagtttgtttatttttttttccttctgtttygttaggtaacagaataatcctaaattattaactacattgagcattatttttaatgttttgtgactgaatataactggcatcttctttcttcagttatttatgagatcatatttaaagactccgaaaatgacttacttaaaatactattaaaacattcacagaggtaactgaaacgtatcacattaagctcttacccatccatacttcaccaaaacatccttggcccaacttaacttccagcctcaaagactccctaggaatttcccaggcatcttttgctagtccctgtgtttgtggttt

SEQ ID NO: 55505 - DNA, 600 bp, Chicken  19866894309107_1
aattaaataactaattatttatagccattaaattcttgaaatagttatcttttcatttcaggaaatgttttttgtttaattgaaagacagtatactgctgtctaagaaaactgagtatgctgttagttgactacattatgcagttgtttgactacttcaaagtggtgctactcagcttccattttctttttataaaaaaattataacaatttttctatcatgaaaactgattgatgtacctggtgtatacctggaacatccccccagtaaaaaacagtctctaattcacactgtaatacrgttctgtacttaaagcttcatctcctttcattaaaaatcattttccagcaaattatttacaccagtgggttttctctgaaaagcataatggcagcrtctgggccwtgggtgcatctctcaacactatctttcataatatagtgkaaggcagacacgggttggtaaaatgcaagagaaacagaagatcataatgatttccaaaggattccgaactgaaaggatttttttttttctttagagaaaaacttaacactcatacatggcatttagaattctcttgttatgcaggaataagcattt

SEQ ID NO: 55506 - DNA, 600 bp, Chicken  19866894309107_2
gctgtctaagaaaactgagtatgctgttagttgactacattatgcagttgtttgactacttcaaagtggtgctactcagcttccattttctttttataaaaaaattataacaatttttctatcatgaaaactgattgatgtacctggtgtatacctggaacatccccccagtaaaaaacagtctctaattcacactgtaatacrgttctgtacttaaagcttcatctcctttcattaaaaatcattttccagcaaattatttacaccagtgggttttctctgaaaagcataatggcagcrtctgggccwtgggtgcatctctcaacactatctttcataatatagtgkaaggcagacacgggttggtaaaatgcaagagaaacagaagatcataatgatttccaaaggattccgaactgaaaggatttttttttttctttagagaaaaacttaacactcatacatggcatttagaattctcttgttatgcaggaataagcatttgagctatcaatgatctagttggttagtttacactgaaaaaagtgaataaatagaatggttttcaagcatacagctaaccactttcaaacagttctt

SEQ ID NO: 55507 - DNA, 600 bp, Chicken  19866894309107_3
gaaaactgagtatgctgttagttgactacattatgcagttgtttgactacttcaaagtggtgctactcagcttccattttctttttataaaaaaattataacaatttttctatcatgaaaactgattgatgtacctggtgtatacctggaacatccccccagtaaaaaacagtctctaattcacactgtaatacrgttctgtacttaaagcttcatctcctttcattaaaaatcattttccagcaaattatttacaccagtgggttttctctgaaaagcataatggcagcrtctgggccwtgggtgcatctctcaacactatctttcataatatagtgkaaggcagacacgggttggtaaaatgcaagagaaacagaagatcataatgatttccaaaggattccgaactgaaaggatttttttttttctttagagaaaaacttaacactcatacatggcatttagaattctcttgttatgcaggaataagcatttgagctatcaatgatctagttggttagtttacactgaaaaaagtgaataaatagaatggttttcaagcatacagctaaccactttcaaacagttctttatcctagg

SEQ ID NO: 55508 - DNA, 600 bp, Chicken  19866894309107_4
tgtttgactacttcaaagtggtgctactcagcttccattttctttttataaaaaaattataacaatttttctatcatgaaaactgattgatgtacctggtgtatacctggaacatccccccagtaaaaaacagtctctaattcacactgtaatacrgttctgtacttaaagcttcatctcctttcattaaaaatcattttccagcaaattatttacaccagtgggttttctctgaaaagcataatggcagcrtctgggccwtgggtgcatctctcaacactatctttcataatatagtgkaaggcagacacgggttggtaaaatgcaagagaaacagaagatcataatgatttccaaaggattccgaactgaaaggatttttttttttctttagagaaaaacttaacactcatacatggcatttagaattctcttgttatgcaggaataagcatttgagctatcaatgatctagttggttagtttacactgaaaaaagtgaataaatagaatggttttcaagcatacagctaaccactttcaaacagttctttatcctaggggatcaaggtctttctgagctttcagtaaaataattcag

SEQ ID NO: 55509 - DNA, 600 bp, Chicken  19866894309116_1
tcttcagacccctgtcacctaggcaccgcttctgttctactttctatggactctatacagcagaaacccaaacacctcgatggtgacaaggctttaattccattttttttataaaggaggcctgaacggttggctgtgggggaaaaaagagactgaaaaaacacggatttaacctgacagaacagagcaaacctccttaggtacccataatattaaaaggacggctggaagcttctgctaatggtttcttcttatcttacagcatgtccaagccattcgttgagaaaacctgatgaagtrctgcgtttgttattttttttttcccattcatgtctgcttctctcagctatggcttctgctggctgtcagctgactcgtgctgcatctcctatcctgtcttcatcctacgctcctcttgcatggcccagctcttccacatacagcacagagaaaaataaaagctttcaactcacccttcacatgttccatctcccctggcgatttctgtttccaggcagcgaagtgacagggtaattcctctgaaatgttgccttacgcgacctttgggcacagattcttcctctctgaggtcaaatgact

SEQ ID NO: 55510 - DNA, 599 bp, Chicken  19866894309122_1
  misc_feature (1)..(115): n is any nucleotide
nnnnnnnnnnnnnnnnnnnnnnnnnnnnnnnnnnnnnnnnnnnnnnnnnnnnnnnnnnnnnnnnnnnnnnnnnnnnnnnnnnnnnnnnnnnnnnnnnnnnnnnnnnnnnnnnnnntatctgtcttctgcaaaactgggggtcagggagaaaacacatgcaagcactatgtagaaaagcagcaaacacattttatctattactcagtagctctgtattttatgctgttagcttcagtggcagccacagcattgatgggaaacacatgtaaagatatgactggtctcactggaacttgaaakgaatttgcacaatgaacatggacatatttctgtttgtgctgtattgacatcaagcctcctacttcatcagaacaaataagtgaaagagattactttagttatcaaatccagctcccagcaaccaaacactattcattaaatagttattatccacataaaagtggatccacagcacccaacaaaatttaaacacaagtttatgtcatttgatctttgactgcagaaatgccataggaagagtataaaaaaaaaaaaaaaagatcaggaggatcttagatcttagctcttttcaagagtgg

SEQ ID NO: 55511 - DNA, 600 bp, Chicken  19866894309125_1
aggtgggagatggcaacgtgaagatgttacggggttttgctggtccactaggggaaaaaatgagaccgaaaaaggcctggtgtaattaacaagattaaagggggatttaggatcaggacagaaaagcaacgggccagattgatccttacaggattaaagctggaatcctactaagagtccagtggttgagagatcaacgcaatgtaatgggattaaatcaacatcagcttttgtttttacacaactgagcccccagtgcccacagtctcactgctctggatatggagaagaaggattgaygaggaccctcaatactctgagtggggctcagccaggctcctccccacttcagccccgctaccactgagcagaaggcaccactgaatccagaaataaacgacgagaaactgagtgtgtaatgagtggtccgaatggccaaaaagtaaccactccagccagctctaaaccaagtggcacccagtgcaatgggatcgccctgtgactgatgtgggaargccagtaggacagtcccagctgtatccacacatgccgcagacgggcaattggattttgatattgccccttgctgaagaggaacaa

SEQ ID NO: 55512 - DNA, 600 bp, Chicken  19866894309125_2
aatcaacatcagcttttgtttttacacaactgagcccccagtgcccacagtctcactgctctggatatggagaagaaggattgaygaggaccctcaatactctgagtggggctcagccaggctcctccccacttcagccccgctaccactgagcagaaggcaccactgaatccagaaataaacgacgagaaactgagtgtgtaatgagtggtccgaatggccaaaaagtaaccactccagccagctctaaaccaagtggcacccagtgcaatgggatcgccctgtgactgatgtgggaargccagtaggacagtcccagctgtatccacacatgccgcagacgggcaattggattttgatattgccccttgctgaagaggaacaaaagaagcagtatactctgtagaacatatcagcaaacgcatttaagacaaattatcacgtgtccccattgcacaacaatatccaagaattacagaagtgagaaaagcctctttcagaacatatcgtttgcattacagctggtgcaacacatgcgggccagctgcaccttgattccactgccctgaagtttccaaagcttgctggtaatttgagttg

SEQ ID NO: 55513 - DNA, 600 bp, Chicken  19866894309128_1
cattatttatttcaggtgttttgtttgctgcttctccagcatcacatttatctgcaagcgaccgcatcaagcatgtgcccttctggccaatgtgcacaatgaaaacacccaagggaagtcaaagctgaccaagagagctatgaagagaggaaagaagtatagggatttgggtaaagctatagattgaaggagtttggttctcccagtgcagaatcccaatgggacatttagacagaaccagagtaatggcagcttgcagcggggagctgtcacttaatgcccatatcacaacaaaacttsacttttcttctgcccattatcaactctctttgtgtggcactgtttttgaggcagaggactctaattcttgaacacttgttgatgytgtggcatcacaaacacagcatgagcatctaggcaagactgcaaggcaaataaactatttatccttcaacgccttctgtgtccgtgccttctgcaaatggatctgtcaaacctacatctagcaacttacagctggaggctcagggaaaaaaaaaggttttagatccacgtatctcaaaaaaacaaatgttttcacaccctcatttcttaaaaaca

SEQ ID NO: 55514 - DNA, 600 bp, Chicken  19866894309128_2
tatttatttcaggtgttttgtttgctgcttctccagcatcacatttatctgcaagcgaccgcatcaagcatgtgcccttctggccaatgtgcacaatgaaaacacccaagggaagtcaaagctgaccaagagagctatgaagagaggaaagaagtatagggatttgggtaaagctatagattgaaggagtttggttctcccagtgcagaatcccaatgggacatttagacagaaccagagtaatggcagcttgcagcggggagctgtcacttaatgcccatatcacaacaaaacttsacstttcttctgcccattatcaactctctttgtgtggcactgtttttgaggcagaggactctaattcttgaacacttgttgatgytgtggcatcacaaacacagcatgagcatctaggcaagactgcaaggcaaataaactatttatccttcaacgccttctgtgtccgtgccttctgcaaatggatctgtcaaacctacatctagcaacttacagctggaggctcagggaaaaaaaaaggttttagatccacgtatctcaaaaaaacaaatgttttcacaccctcatttcttaaaaacaatt

SEQ ID NO: 55515 - DNA, 600 bp, Chicken  19866894309128_3
gccaatgtgcacaatgaaaacacccaagggaagtcaaagctgaccaagagagctatgaagagaggaaagaagtatagggatttgggtaaagctatagattgaaggagtttggttctcccagtgcagaatcccaatgggacatttagacagaaccagagtaatggcagcttgcagcggggagctgtcacttaatgcccatatcacaacaaaacttsacttttcttctgcccattatcaactctctttgtgtggcactgtttttgaggcagaggactctaattcttgaacacttgttgatgytgtggcatcacaaacacagcatgagcatctaggcaagactgcaaggcaaataaactatttatccttcaacgccttctgtgtccgtgccttctgcaaatggatctgtcaaacctacatctagcaacttacagctggaggctcagggaaaaaaaaaggttttagatccacgtatctcaaaaaaacaaatgttttcacaccctcatttcttaaaaacaattccatgaactcaaaggaaggttggttatagatgataacagagctcacacggcttaagagatagaaggatcttttcattatgaa

SEQ ID NO: 55516 - DNA, 599 bp, Chicken  19866894309132_1
  misc_feature (1)..(62): n is any nucleotide
nnnnnnnnnnnnnnnnnnnnnnnnnnnnnnnnnnnnnnnnnnnnnnnnnnnnnnnnnnnnnntcccgaggaatcacaaaattttaaatgattttggttttataccaatgctatgttactgcattcctttaaatgcccttcatgttttcagatgaagtgaagagaatatagcagagcatctactttctagtgattcatgaaattaagaggccctttgccttccctgtcttaaatcaacatgacaaactacatccctttacagggctatattacatatattcccggtgctttaccaggaaaytggtagaacttcccaaatgttgtgcatttatctttctttaaaagacagctgattaatgttatttgcatgygagcaacagaatgtgtaaacatggactggggactcattcaaatgaacactttsagttggattcatgactgcaacattaagccaagggtgagtgtagcccggcttggaaatgcaatcacgaaacttggcaacttatggcatgttagtattgtcctctctctgtttccttttcccatgtattttctgaagtcagaatgagacttcagccccgtccttggagcactgaaaaa

SEQ ID NO: 55517 - DNA, 600 bp, Chicken  19866894309132_2
aatcacaaaattttaaatgattttggttttataccaatgctatgttactgcattcctttaaatgcccttcatgttttcagatgaagtgaagagaatatagcagagcatctactttctagtgattcatgaaattaagaggccctttgccttccctgtcttaaatcaacatgacaaactacatccctttacagggctatattacatatattcccggtgctttaccaggaaaytggtagaacttcccaaatgttgtgcatttatctttctttaaaagacagctgattaatgttatttgcatgygagcaacagaatgtgtaaacatggactggggactcattcaaatgaacactttsagttggattcatgactgcaacattaagccaagggtgagtgtagcccggcttggaaatgcaatcacgaaacttggcaacttatggcatgttagtattgtcctctctctgtttccttttcccatgtattttctgaagtcagaatgagacttcagccccgtccttggagcactgaaaaacatctgccttgcttatcttgccacacaccctcccaaccgtgatacacagatcactgccccttctacagtcg

SEQ ID NO: 55518 - DNA, 600 bp, Chicken  19866894309132_3
tcctttaaatgcccttcatgttttcagatgaagtgaagagaatatagcagagcatctactttctagtgattcatgaaattaagaggccctttgccttccctgtcttaaatcaacatgacaaactacatccctttacagggctatattacatatattcccggtgctttaccaggaaaytggtagaacttcccaaatgttgtgcatttatctttctttaaaagacagctgattaatgttatttgcatgygagcaacagaatgtgtaaacatggactggggactcattcaaatgaacactttsagttggattcatgactgcaacattaagccaagggtgagtgtagcccggcttggaaatgcaatcacgaaacttggcaacttatggcatgttagtattgtcctctctctgtttccttttcccatgtattttctgaagtcagaatgagacttcagccccgtccttggagcactgaaaaacatctgccttgcttatcttgccacacaccctcccaaccgtgatacacagatcactgccccttctacagtcggctgcagaagttaactctttctcctgtctgatgaggtggacagcttagagaag

SEQ ID NO: 55519 - DNA, 600 bp, Chicken  19866894309132_4
gcaacttatggcatgttagtattgtcctctctctgtttccttttcccatgtattttctgaagtcagaatgagacttcagccccgtccttggagcactgaaaaacatctgccttgcttatcttgccacacaccctcccaaccgtgatacacagatcactgccccttctacagtcggctgcagaagttaactctttctcctgtctgatgaggtggacagcttagagaagtgtaatgacaaggaagaggccatgcacattaaaggttttggggccggctgaaatgagtcctttaataaacagktttttttaaatactccttcagcttctttcttcctaagagcccaggttctttgtacgtatgaactcattaagcctcctgatgtgatctgcttaggtatgtgagtagtacatctgctctcttgtagggtaactgaggtacactctaggtagactttttccttttatttttctgcaggatttgttattacttatgagaaatgaaatagagtctagatcatctgttatttaatgcagcttcctgtgctataaccatacgacmgttcttcctctatatgtgtatcatctacaaatggaagcagaa

SEQ ID NO: 55520 - DNA, 600 bp, Chicken  19866894309132_5
aaggttttggggccggctgaaatgagtcctttaataaacagktttttttaaatactccttcagcttctttcttcctaagagcccaggttctttgtacgtatgaactcattaagcctcctgatgtgatctgcttaggtatgtgagtagtacatctgctctcttgtagggtaactgaggtacactctaggtagactttttccttttatttttctgcaggatttgttattacttatgagaaatgaaatagagtctagatcatctgttatttaatgcagcttcctgtgctataaccatacgacmgttcttcctctatatgtgtatcatctacaaatggaagcagaactcaaaatatttaaatgcttgtatcactgctaaatgccaggattttaaggtgtttttattttgtggaaagatttgaccacctcaactcactgctggggctgtgttagggatgccacagctggtaactctggtggtggagctgctgagtacagcaggatgagtgagaaattagagagtatctcaaggtgggcattcccttgttttactgtgaatcaggcgttgggctttgctctcagcattcttcgggtggtcacaaaa

SEQ ID NO: 55521 - DNA, 600 bp, Chicken  19866894309132_6
caggatttgttattacttatgagaaatgaaatagagtctagatcatctgttatttaatgcagcttcctgtgctataaccatacgacmgttcttcctctatatgtgtatcatctacaaatggaagcagaactcaaaatatttaaatgcttgtatcactgctaaatgccaggattttaaggtgtttttattttgtggaaagatttgaccacctcaactcactgctggggctgtgttagggatgccacagctggtaactctggtggtggagctgctgagtacagcaggatgagtgagaaattmgagagtatctcaaggtgggcattcccttgttttactgtgaatcaggcgttgggctttgctctcagcattcttcgggtggtcacaaaatcatgcaaattaaaacatgatgcgtgtctctctctactgtgtggtgtagacctgtgatccatgttaacagtgctgttttgatttgcctgtccacattgagctgtgtttgacacatcgccagaaccaagtggcacccaggaggagtacctggcgtggcttttggtgcaagctaaagcagcagctactgcaaacctttcctgatctttgtgaata

SEQ ID NO: 55522 - DNA, 600 bp, Chicken  19866894309140_1
ccacccttggtctcttacaccaggcttgagttcaggctgtttgtcaagtggaagaatggtctcagacaagtctcttaaaggccatggtgagtgcaaatgctgtaaaatgagtggttcctgatgttaagagagagaaccaaatttgtcctttaatgtttggaaggttaaagataaggctttttctagtgctggaaaaggctgcctctgagcatgaatgcagggatatccactaagtgtattgtgctgcatggctgttcaggtgctgtccctccaggtagcctgcaggtaaccagtctgaaytgcctaaccagtttgttaattgttctgcataggtttcatacaaaacaaatagttgatttatcattaycatttatcattatcatttatttgtctgtgatgctttttgaacagcttatttacagaggtatcagccagacactgctaatctatcatagatggcataaaatgacaaggaatttagtgagaaagctactcttcctctcatgcataccttctgtccgtctggtcagggtttgtttactttgcactgttcttttgagttctcatgggttgggattacctttctggagctgagatgtt

SEQ ID NO: 55523 - DNA, 600 bp, Chicken  19866894309140_2
aagtctcttaaaggccatggtgagtgcaaatgctgtaaaatgagtggttcctgatgttaagagagagaaccaaatttgtcctttaatgtttggaaggttaaagataaggctttttctagtgctggaaaaggctgcctctgagcatgaatgcagggatatccactaagtgtattgtgctgcatggctgttcaggtgctgtccctccaggtagcctgcaggtaaccagtctgaaytgcctaaccagtttgttaattgttctgcataggtttcatacaaaacaaatagttgatttatcattaycatttatcattatcatttatttgtctgtgatgctttttgaacagcttatttacagaggtatcagccagacactgctaatctatcatagatggcataaaatgacaaggaatttagtgagaaagctactcttcctctcatgcataccttctgtccgtctggtcagggtttgtttactttgcactgttcttttgagttctcatgggttgggattacctttctggagctgagatgttgaaaagctctttgataaatgatgtgagaggaactctacaaatatgttccagtatcctgaatagtaga

SEQ ID NO: 55524 - DNA, 599 bp, Chicken  19866894309142_1
  misc_feature (1)..(37): n is any nucleotide
nnnnnnnnnnnnnnnnnnnnnnnnnnnnnnnnnnnnntaatgacaccaccctgttaatggaaaaaaacaggggtatagtggagaaagtttaaaaagaaaaagggaaaaatgctatttttaaagaatagttaatttgtacactcttccagcctctacccttgtgtggtttggagagtcttctcttaggggaaaaaaaaagtatctgtttagggacataaactaaatggctcttagttgtgtaagaaagacaaaaagaaacaagcttttgtttttgaggaagagtaaatagcaagcaaacaraatgatgctcagtttagttctagattaagttttgcttcaatattgcatttgtcttcaagtctgaactggagataatgattttgttcagattcatgctgctatcatatccatgcagatatttctagattatgtgctcaagtggtagtgcttgacaaagattagctgaggctgtgacatcctgttacactgattaggaaaaaaaatctcataaaagtaaagctgctccctacagatttctgctckttcartgcatacttggttgggactgggaaaaacatgcttagagttttaatctctac

SEQ ID NO: 55525 - DNA, 600 bp, Chicken  19866894309142_2
aaagacaaaaagaaacaagcttttgtttttgaggaagagtaaatagcaagcaaacaraatgatgctcagtttagttctagattaagttttgcttcaatattgcatttgtcttcaagtctgaactggagataatgattttgttcagattcatgctgctatcatatccatgcagatatttctagattatgtgctcaagtggtagtgcttgacaaagattagctgaggctgtgacatcctgttacactgattaggaaaaaaaatctcataaaagtaaagctgctccctacagatttctgctckttcartgcatacttggttgggactgggaaaaacatgcttagagttttaatctctacttctccttcagaacgacctaatcrtatctatgtccaaatataaaagagakacgsttttctttttgttatatagataggctctttcacctctatagcaattcctatccaattagtaatgttttaaagtctttgttttatgaccatttctgtgctttagtttgatatgaaaattaaaagagcatatatatatatattcaaaagtaagtaattaattatttttagaaaggaaaataacactatcttt

SEQ ID NO: 55526 - DNA, 600 bp, Chicken  19866894309142_3
caaaaagaaacaagcttttgtttttgaggaagagtaaatagcaagcaaacaraatgatgctcagtttagttctagattaagttttgcttcaatattgcatttgtcttcaagtctgaactggagataatgattttgttcagattcatgctgctatcatatccatgcagatatttctagattatgtgctcaagtggtagtgcttgacaaagattagctgaggctgtgacatcctgttacactgattaggaaaaaaaatctcataaaagtaaagctgctccctacagatttctgctckttcartgcatacttggttgggactgggaaaaacatgcttagagttttaatctctacttctccttcagaacgacctaatcrtatctatgtccaaatataaaagagakacgsttttctttttgttatatagataggctctttcacctctatagcaattcctatccaattagtaatgttttaaagtctttgttttatgaccatttctgtgctttagtttgatatgaaaattaaaagagcatatatatatatattcaaaagtaagtaattaattatttttagaaaggaaaataacactatctttamagc

SEQ ID NO: 55527 - DNA, 600 bp, Chicken  19866894309142_4
attaagttttgcttcaatattgcatttgtcttcaagtctgaactggagataatgattttgttcagattcatgctgctatcatatccatgcagatatttctagattatgtgctcaagtggtagtgcttgacaaagattagctgaggctgtgacatcctgttacactgattaggaaaaaaaatctcataaaagtaaagctgctccctacagatttctgctckttcartgcatacttggttgggactgggaaaaacatgcttagagttttaatctctacttctccttcagaacgacctaatcrtatctatgtccaaatataaaagagakacgsttttctttttgttatatagataggctctttcacctctatagcaattcctatccaattagtaatgttttaaagtctttgttttatgaccatttctgtgctttagtttgatatgaaaattaaaagagcatatatatatatattcaaaagtaagtaattaattatttttagaaaggaaaataacactatctttamagctttttttttccataattgcatgtcaaaagatctattagaaaaaaatcaattaactcatgagaaagatcagtgctg

SEQ ID NO: 55528 - DNA, 600 bp, Chicken  19866894309142_5
tgtcttcaagtctgaactggagataatgattttgttcagattcatgctgctatcatatccatgcagatatttctagattatgtgctcaagtggtagtgcttgacaaagattagctgaggctgtgacatcctgttacactgattaggaaaaaaaatctcataaaagtaaagctgctccctacagatttctgctckttcartgcatacttggttgggactgggaaaaacatgcttagagttttaatctctacttctccttcagaacgacctaatcrtatctatgtccaaatataaaagagakacgsttttctttttgttatatagataggctctttcacctctatagcaattcctatccaattagtaatgttttaaagtctttgttttatgaccatttctgtgctttagtttgatatgaaaattaaaagagcatatatatatatattcaaaagtaagtaattaattatttttagaaaggaaaataacactatctttamagctttttttttccataattgcatgtcaaaagatctattagaaaaaaatcaattaactcatgagaaagatcagtgctgatgtgaaatacaatgttcatcagcac

SEQ ID NO: 55529 - DNA, 600 bp, Chicken  19866894309142_6
ttcaagtctgaactggagataatgattttgttcagattcatgctgctatcatatccatgcagatatttctagattatgtgctcaagtggtagtgcttgacaaagattagctgaggctgtgacatcctgttacactgattaggaaaaaaaatctcataaaagtaaagctgctccctacagatttctgctckttcartgcatacttggttgggactgggaaaaacatgcttagagttttaatctctacttctccttcagaacgacctaatcrtatctatgtccaaatataaaagagakacgsttttctttttgttatatagataggctctttcacctctatagcaattcctatccaattagtaatgttttaaagtctttgttttatgaccatttctgtgctttagtttgatatgaaaattaaaagagcatatatatatatattcaaaagtaagtaattaattatttttagaaaggaaaataacactatctttamagctttttttttccataattgcatgtcaaaagatctattagaaaaaaatcaattaactcatgagaaagatcagtgctgatgtgaaatacaatgttcatcagcactcca

SEQ ID NO: 55530 - DNA, 600 bp, Chicken  19866894309142_7
cartgcatacttggttgggactgggaaaaacatgcttagagttttaatctctacttctccttcagaacgacctaatcrtatctatgtccaaatataaaagagakacgsttttctttttgttatatagataggctctttcacctctatagcaattcctatccaattagtaatgttttaaagtctttgttttatgaccatttctgtgctttagtttgatatgaaaattaaaagagcatatatatatatattcaaaagtaagtaattaattatttttagaaaggaaaataacactatctttamagctttttttttccataattgcatgtcaaaagatctattagaaaaaaatcaattaactcatgagaaagatcagtgctgatgtgaaatacaatgttcatcagcactccatatgccaacaaagaggttattattattattattttttaatgtattgtgtggatagttccttctaacaacgtaggttgtaaaatcacaactgggaagacatgcttttttctatgtatttgtatccaaatcccattcaaatggtacatatttcacttgaaaatacttttaaaaactcattttttgcttgattta

SEQ ID NO: 55531 - DNA, 600 bp, Chicken  19866894309142_8
gcatacttggttgggactgggaaaaacatgcttagagttttaatctctacttctccttcagaacgacctaatcrtatctatgtccaaatataaaagagakacgsttttctttttgttatatagataggctctttcacctctatagcaattcctatccaattagtaatgttttaaagtctttgttttatgaccatttctgtgctttagtttgatatgaaaattaaaagagcatatatatatatattcaaaagtaagtaattaattatttttagaaaggaaaataacactatctttamagcmttttttttccataattgcatgtcaaaagatctattagaaaaaaatcaattaactcatgagaaagatcagtgctgatgtgaaatacaatgttcatcagcactccatatgccaacaaagaggttattattattattattttttaatgtattgtgtggatagttccttctaacaacgtaggttgtaaaatcacaactgggaagacatgcttttttctatgtatttgtatccaaatcccattcaaatggtacatatttcacttgaaaatacttttaaaaactcattttttgcttgatttaattc

SEQ ID NO: 55532 - DNA, 600 bp, Chicken  19866894309149_1
taaattccaaaagtctaatgaaggaatcacagtcatcaaaggagctgtatggacagtaccctactatatgttctggatttagtggaaaacagaagaaatggaaaaacaacaacaaaaaacacttcagtttcatttccttccctcatttcagggcctatccaggtattgaatataatctcatcccctctcatccagattcttcttcaataaactttatattacttctctacactgaatatttaaactgaagtgaataatttatctgtgtacagtcagttgaatagactgtatttaaaaaasggaattgttaagtttgaaatgaaacttgtgaatgaaaagacaaattcaattttaagatacaaagacaaagagataacattcaagttaagaatgcataaaatagcacatgaatcattactgcttatacatcagaatttctgcatggtaactgatacttgatttataacacttccttttattttggtcacagatgaggtattctagaagtttaatgagttatttatagcattcatggcaaaataaaaaacatggatttcttagggagagatttacatccaagattctctaggaaaaaataaa

SEQ ID NO: 55533 - DNA, 600 bp, Chicken  19866894309157_1
tcatcactgatgcagggatagcagggcttgtttttccatatgacaactgatcacatattcatggttggaatttatatgaaactgtgcagcacagtaacagcagtcaccttttgcagtactcccagattagcagtaaaaagcagtaaataaattaagacaggcttcacattatccatctgctgcttgaactttgtttcttttttctaaaaaaggaaatctgattatttcatcaaacattatggactttcttctgaaagtgaggagctgcttatgtgattgagctgaagagaacataacttykccaggtaatgagttttccagtacaagcagtaaaactactcacatcgctgtgaatttactttttcagactatgactcatcagaaacacattcaggtggctggcaagaaattcagcagtgctatcacagacagctttgtatagcctgtccaaaataagtgaaggatcgcatatccttttgacggtaaaagttggcttttcaaagccaaaaaaagcatagatacagaattacagaagctgccagtactttgtagttaaaatcctggctccgctgaagacaaagcagatcctgccactaaacc

SEQ ID NO: 55534 - DNA, 600 bp, Chicken  19866894309157_2
catcactgatgcagggatagcagggcttgtttttccatatgacaactgatcacatattcatggttggaatttatatgaaactgtgcagcacagtaacagcagtcaccttttgcagtactcccagattagcagtaaaaagcagtaaataaattaagacaggcttcacattatccatctgctgcttgaactttgtttcttttttctaaaaaaggaaatctgattatttcatcaaacattatggactttcttctgaaagtgaggagctgcttatgtgattgagctgaagagaacataacttykccaggtaatgagttttccagtacaagcagtaaaactactcacatcgctgtgaatttactttttcagactatgactcatcagaaacacattcaggtggctggcaagaaattcagcagtgctatcacagacagctttgtatagcctgtccaaaataagtgaaggatcgcatatccttttgacggtaaaagttggcttttcaaagccaaaaaaagcatagatacagaattacagaagctgccagtactttgtagttaaaatcctggctccgctgaagacaaagcagatcctgccactaaaccc

SEQ ID NO: 55535 - DNA, 600 bp, Chicken  19866894309157_3
agacagctttgtatagcctgtccaaaataagtgaaggatcgcatatccttttgacggtaaaagttggcttttcaaagccaaaaaaagcatagatacagaattacagaagctgccagtactttgtagttaaaatcctggctccgctgaagacaaagcagatcctgccactaaaccctatcacaccagggtttcacttctatacactaaaacagtctttatcaaagagtgggatgcacaggtgagaattctgagatagttggatagaatgtcatttaatctggtgctccacatatactgcgracactgcatcttgacctctccctactcttcatgagcagaggatacacgtatgcattggcagcttcatgccgatgctggatgctctctgtgaacatttaatgcaaccaacagatgcaagagttaagcatctctttctttcctctttcatgtgtttcaaagctttcctatcatgttttatgcagtatttccctggagggtgtatgtattacttatcatgcacataccatctcagtcatgtatacagatcagccattggcgtacttgcatgtgagatgttaccttttaaacacatactcattg

SEQ ID NO: 55536 - DNA, 600 bp, Chicken  19866894309163_1
ctccttgtggtgatgggcaaagggagtggaaatctcctctgcgatagaagactgcagaggaagcagggacttggccagccacagcaaatggcaccaaggagatatgcacccactgggtgctgggagtcctcattcctcttcctggtggcttcctacacataccccttagatgcgctccagagctgcctgtataagtaaataagtttcacccactttgtttaatgtgctcctctctcagctcttagcacctcacttcattctgcccctgcgtgcccatgctggtacacccgtagtccccawgttctggagcagttagtgacagctggatactgctgctagtgctttaccaaaagaaaaaacaaggctcccatgcacatatgcaaatattcaggtgaatggcctcggccctgagtcccatcccttcagtaaacatcttcagccctacagctttgtctctcagcccatgctttgtgctgaaggaaaggacctgaagcatagggcttggcacagaggtgccctgtgtggttccccagaccttgatggaggttctttttgccctgggctggcttttgagacctgtccccttctgtacctgatgca

SEQ ID NO: 55537 - DNA, 600 bp, Chicken  19866894309163_2
aaaaacaaggctcccatgcacatatgcaaatattcaggtgaatggcctcggccctgagtcccatcccttcagtaaacatcttcagccctacagctttgtctctcagcccatgctttgtgctgaaggaaaggacctgaagcatagggcttggcacagaggtgccctgtgtggttccccagaccttgatggaggttctttttgccctgggctggcttttgagacctgtccccttctgtacctgatgcagacccaggagccctctgcagcctgcctgtttgctcactgctgcagaatggcagygacagggagaagtttgccccagcaaaaccggggcaaagagctcagccttcctcacctccaagtttccactgygttttcagcccaggaatggaagatgaagcatacctggccccacactctgcagggtagagaaggacgagtaaggtggctatcagagcccccaaccatgagaccattcccacagacgtctgcccttctcattacaaaagctgctctgaggaatggtaccacatccctgcaaagatcccatgtcctgacaagccactacacaccaatcctttccacccaaaaatccccatc

SEQ ID NO: 55538 - DNA, 600 bp, Chicken  19866894309163_3
taaacatcttcagccctacagctttgtctctcagcccatgctttgtgctgaaggaaaggacctgaagcatagggcttggcacagaggtgccctgtgtggttccccagaccttgatggaggttctttttgccctgggctggcttttgagacctgtccccttctgtacctgatgcagacccaggagccctctgcagcctgcctgtttgctcactgctgcagaatggcagygacagggagaagtttgccccagcaaaaccggggcaaagagctcagccttcctcacctccaagtttccactgygttttcagcccaggaatggaagatgaagcatacctggccccacactctgcagggtagagaaggacgagtaaggtggctatcagagcccccaaccatgagaccattcccacagacgtctgcccttctcattacaaaagctgctctgaggaatggtaccacatccctgcaaagatcccatgtcctgacaagccactacacaccaatcctttccacccaaaaatccccatctgtctctgctttaagggataaggggagagggaagaacagcagcaatcagcatccctcccagtgctaattctc

SEQ ID NO: 55539 - DNA, 600 bp, Chicken  19866894309164_1
ctatattcttaatccttccctgtcttcatgcattttcacttattctacacttgattttatgaagcgaggtatgtctccaatccttagtgcctgtttgcttcccagactagatgccagtatccagcaacaggtaagtttctcttcagacctattctcagattcacaggcaaagattttaaaagctctaagatgccgtggaatatactaaacaatcaaatcacacttagaaatattctgccattttaactctaaaaacataattcagccaaaataagaaggccaatttcagaaggtcagacyttctgaaaatcttttatggtctaccaataccacctcatattcttaatgaattttgaccattttgcttcagttctgctgaacatgtatatataagaaaatatgcatactcagtaaacccagtataaaaacttcttttaaaatgtgtaatttcattatttcatttcaccataaatattccttacctgtgttgtttgatgtcatatgctcaacaggaggatcagcactaacttgccatgttgttttcacctcctttgggccatgcccactagttatgtccaccttccacatttctgggtaatc

SEQ ID NO: 55540 - DNA, 600 bp, Chicken  19866894309165_1
attccagaaacttcatgggctgtgccacgatgtctgtcatgacatgtgggaggactacaactcagatgcaagagaggaggcaagtacctcacacccaaattaggcataaacacaggcataagctctcctcttttactggtcttagccaagccaacattccccttctctctcatcagcaaggtcaactcctttggccttcacagctgtagggaacacgagcctttagctcaaagctgcaatgggaccactctgtttctccctaaaacaaatgtgtgttctaagtacagtgcacctcaccakttccccctccagccgtatgggagctcttgtgctccctatttttctcacagcggaggaaaaygaggagaaacctgttgagtgcactgaaggaataagaatctcctgaaggggatcattttgtatgctttttgatctgactttcctccaagctggctgaatcccttcattacttgcagctttgcaagatgggtgaagtcttcatgagaaggtttttgttaataatattttcccagtatcagaactctaattcaggaaaagataggattgttactgcatagaattcagcaacaattatgcaaa

SEQ ID NO: 55541 - DNA, 600 bp, Chicken  19866894309165_2
tcagatgcaagagaggaggcaagtacctcacacccaaattaggcataaacacaggcataagctctcctcttttactggtcttagccaagccaacattccccttctctctcatcagcaaggtcaactcctttggccttcacagctgtagggaacacgagcctttagctcaaagctgcaatgggaccactctgtttctccctaaaacaaatgtgtgttctaagtacagtgcacctcaccakttccccctccagccgtatgggagctcttgtgctccctatttttctcacagcggaggaaaaygaggagaaacctgttgagtgcactgaaggaataagaatctcctgaaggggatcattttgtatgctttttgatctgactttcctccaagctggctgaatcccttcattacttgcagctttgcaagatgggtgaagtcttcatgagaaggtttttgttaataatattttcccagtatcagaactctaattcaggaaaagataggattgttactgcatagaattcagcaacaattatgcaaaatcacctttgtctattactcataaaggatgcaatggsatgcaaatttgtcctgattttatc

SEQ ID NO: 55542 - DNA, 536 bp, Chicken  19866894309165_3
atttttctcacagcggaggaaaaygaggagaaacctgttgagtgcactgaaggaataagaatctcctgaaggggatcattttgtatgctttttgatctgactttcctccaagctggctgaatcccttcattacttgcagctttgcaagatgggtgaagtcttcatgagaaggtttttgttaataatattttcccagtatcagaactctaattcaggaaaagataggattgttactgcatagaattcagcaacaattatgcaaaatcacctttgtctattactcataaaggatgcaatggsatgcaaatttgtcctgattttatcctggcactctatcaatgttcagccttagaatatatcatggctatgatgtcatcatacctgtcatacccctacaggtatctttctgcttttcttttgccttctttctccatctgtctttctctgctctctcattttgatctaagacaaacttctgaaaagcaaagtcctgtctctgccggccagggaggagatatccccaccttgctgtgaac

SEQ ID NO: 55543 - DNA, 599 bp, Chicken  19866894309169_1
  misc_feature (1)..(285): n is any nucleotide
nnnnnnnnnnnnnnnnnnnnnnnnnnnnnnnnnnnnnnnnnnnnnnnnnnnnnnnnnnnnnnnnnnnnnnnnnnnnnnnnnnnnnnnnnnnnnnnnnnnnnnnnnnnnnnnnnnnnnnnnnnnnnnnnnnnnnnnnnnnnnnnnnnnnnnnnnnnnnnnnnnnnnnnnnnnnnnnnnnnnnnnnnnnnnnnnnnnnnnnnnnnnnnnnnnnnnnnnnnnnnnnnnnnnnnnnnnnnnnnnnnnnnnnnnnnnnnnnnnnnnnnnnnnnnnnnnnnnnnnnnnnnncagtgatgacacaaytgtctgtcatctatatttgcacaagcctcccaagatttctttgtcacttctccttcagaagattaaaagaatctccatcatctgctgagagttctagttctgccatgtgctacttacaawacaggacactgyttttacttctcattgttttgctgtgtcccccatatatatccactctcataattcaattttctgacawgattctcacccctctcctttctgaggcatcccagtgatgataacagaataggtaaatactataaaaataaccagaagagtaggtgaagctggaaggtttc

SEQ ID NO: 55544 - DNA, 599 bp, Chicken  19866894309169_2
  misc_feature (1)..(165): n is any nucleotide
nnnnnnnnnnnnnnnnnnnnnnnnnnnnnnnnnnnnnnnnnnnnnnnnnnnnnnnnnnnnnnnnnnnnnnnnnnnnnnnnnnnnnnnnnnnnnnnnnnnnnnnnnnnnnnnnnnnnnnnnnnnnnnnnnnnnnnnnnnnnnnnnnnnnnnnnnnnnnnnnnnnnncagtgatgacacaaytgtctgtcatctatatttgcacaagcctcccaagatttctttgtcacttctccttcagaagattaaaagaatctccatcatctgctgagagttctagttctgccatgtgctacttacaawacaggacactgyttttacttctcattgttttgctgtgtcccccatatatatccactctcataattcaattttctgacawgattctcacccctctcctttctgaggcatcccagtgatgataacagaataggtaaatactataaaaataaccagaagagtaggtgaagctggaaggtttctttagattagtcaaccattgcttttaaggtcaaaataccagcgaagtctagagcattttttcactccccagcctcctatgcacttccagcactggaacaataccttttccaagtgcaatt

SEQ ID NO: 55545 - DNA, 599 bp, Chicken  19866894309169_3
  misc_feature (1)..(153): n is any nucleotide
nnnnnnnnnnnnnnnnnnnnnnnnnnnnnnnnnnnnnnnnnnnnnnnnnnnnnnnnnnnnnnnnnnnnnnnnnnnnnnnnnnnnnnnnnnnnnnnnnnnnnnnnnnnnnnnnnnnnnnnnnnnnnnnnnnnnnnnnnnnnnnnnnnnnnnnnncagtgatgacacaaytgtctgtcatctatatttgcacaagcctcccaagatttctttgtcacttctccttcagaagattaaaagaatctccatcatctgctgagagttctagttctgccatgtgctacttacaawacaggacactgyttttacttctcattgttttgctgtgtcccccatatatatccactctcataattcaattttctgacawgattctcacccctctcctttctgaggcatcccagtgatgataacagaataggtaaatactataaaaataaccagaagagtaggtgaagctggaaggtttctttagattagtcaaccattgcttttaaggtcaaaataccagcgaagtctagagcattttttcactccccagcctcctatgcacttccagcactggaacaataccttttccaagtgcaatttgttgctgcaaa

SEQ ID NO: 55546 - DNA, 599 bp, Chicken  19866894309169_4
  misc_feature (1)..(86): n is any nucleotide
nnnnnnnnnnnnnnnnnnnnnnnnnnnnnnnnnnnnnnnnnnnnnnnnnnnnnnnnnnnnnnnnnnnnnnnnnnnnnnnnnnnnnncagtgatgacacaaytgtctgtcatctatatttgcacaagcctcccaagatttctttgtcacttctccttcagaagattaaaagaatctccatcatctgctgagagttctagttctgccatgtgctacttacaawacaggacactgyttttacttctcattgttttgctgtgtcccccatatatatccactctcataattcaattttctgacawgattctcacccctctcctttctgaggcatcccagtgatgataacagaataggtaaatactataaaaataaccagaagagtaggtgaagctggaaggtttctttagattagtcaaccattgcttttaaggtcaaaataccagcgaagtctagagcattttttcactccccagcctcctatgcacttccagcactggaacaataccttttccaagtgcaatttgttgctgcaaaattttcttgaaaccccttctctgaaaaggctgactaacctcaagaaactcatgaatatttctttgtg

SEQ ID NO: 55547 - DNA, 600 bp, Chicken  19866894309171_1
tttttcattatctcctttttttgctggattttgctttgaaactttgatcatattcttggaaattaagtttattttctgatacataagtttgttactttgacaaatatgatttctcttgtcaacctagataggaaaatatctggattttatgtgggaaaaagtcagacatgggtggtggttaattaatctctagttatatgcccataggttacctgtggcaagggaaaacccagtgagaaaggctcaagggaaaagctgacttggtttgtgcttgtgaaaaaactttctgaaagtgtcagraatgccagcagggacacccatagaaagaagaacttgaatttaacttctgaatattggtgtgtttactctctgctgctgtgttacggggcagaagcacactatgaattgcagatcgaagtgcatagattatatattgctaaaattaggttgtatgaaagagactgtgttatagatgtgcaattggacagctttctctgacatgttctctgacatttttcattgtgccttacatattacttttgaatgtgaacattgcttaagtagcttagggaggatctcaccaggccctatatagatgct

SEQ ID NO: 55548 - DNA, 600 bp, Chicken  19866894309191_1
atgtccatggtccatgcactcactgcccatctttttctttccctccccaagctccccatattggtgtaggctttagagaccgcttgccagcttgcctgctgcccgaaggcgggtgaagagcaaatcagccccttgggggccagagggggcctgcccagccgggcaggggctgcgggggatatgctaatggagccgggccgctgcgggccagcctcccacagtgcgcgtatatagggccccgcatcagccagaggccactttgtctcgggtcgctaattgcggagggaatcgctgcattgygctgcgagctgccagcccacactgctgcctcggacgaagagatggaggtgatggacagctgccagttctccccatccgagctcttctatgacagctcctgcctgtcgtcccctgagggcgagttccctgaggatttcgagcccagggagctgcctccctttggagcccctgcgcccactgagcctgcctgccctgaggaagaggaacacgtccgggcccccagtgggcaccaccaggccggccactgcctcatgtgggcttgcaaagcctgcaagaggaaatccaccaccatggaccggc

SEQ ID NO: 55549 - DNA, 600 bp, Chicken  19866894309198_1
gttagtgctgagtttgcattgaggtagtgatcctgtaacaccatgctcactgttctggaagatgttgatttaatgctacagaatcacagaattgtaggggctggaagaggcctctagagatcatctagtccaaccccggccaaagcaaccttcttagagcagctttcacaggtaggcatcatgatctggcttccttaactctgtgctaggagaggtcttgtcacagacagaaattctgcagccaacaatgtgctgcctggtgtaggttttgaaactttgttttgttgtgggttttcttgrtggtgcacaaaaamcagttactgaaatatctagctgtttcctgaacttgttctgttcataatctttattttcacctctccccatttgaatgctgatgcagctttgcctctttaggttatttattattgctagtttacaagagtgtaactgagagcataatcagctctttaaagttggaaataggtataatattttcaaattctacagtcatcaataagaaggaatgcaataacacaagtattgaatggttcactagatgttagttacgataccaatagagctagatatttcttcgttctt

SEQ ID NO: 55550 - DNA, 600 bp, Chicken  19866894309198_2
tgcattgaggtagtgatcctgtaacaccatgctcactgttctggaagatgttgatttaatgctacagaatcacagaattgtaggggctggaagaggcctctagagatcatctagtccaaccccggccaaagcaaccttcttagagcagctttcacaggtaggcatcatgatctggcttccttaactctgtgctaggagaggtcttgtcacagacagaaattctgcagccaacaatgtgctgcctggtgtaggttttgaaactttgttttgttgtgggttttcttgrtggtgcacaaaaamcagttactgaaatatctagctgtttcctgaacttgttctgttcataatctttattttcacctctccccatttgaatgctgatgcagctttgcctctttaggttatttattattgctagtttacaagagtgtaactgagagcataatcagctctttaaagttggaaataggtataatattttcaaattctacagtcatcaataagaaggaatgcaataacacaagtattgaatggttcactagatgttagttacgataccaatagagctagatatttcttcgttcttttgggcaaatactt

SEQ ID NO: 55551 - DNA, 600 bp, Chicken  19866894309210_1
accgaccatgaatgctgtgagagggtggtcattaacatctcggggctgcgctttgagacccagctcaagactttagctcagtttccggagactttgctaggagatcctaaaaagagaatgagatatttcgaccctctccgaaatgagtatttctttgaccggaacagacccagcttcgatgcgattttgtactattaccaatctggagggaggttgcggaggccggttaatgtgcccttggacatcttctcagaggagatccgtttctatgaactgggggaagaagccatggagatgttycgggaggacgaaggctacatyaaagaagaagagagacckctgccagagaatgagtttcagagacaggtctggttgctcttcgagtaccccgagagctcgggccctgccaggattatagctattgtctccgtcatggtgattttgatctccatcgtgagcttttgcctggaaacrttgcccatttttcgggatgagaatgaagacatgcacggcagtgggctgagccaccctccctactccaacagcagcatggggtaccagcagtccacctctttcacagatcccttcttcatcgtggag

SEQ ID NO: 55552 - DNA, 600 bp, Chicken  19866894309210_2
agggtggtcattaacatctcggggctgcgctttgagacccagctcaagactttagctcagtttccggagactttgctaggagatcctaaaaagagaatgagatatttcgaccctctccgaaatgagtatttctttgaccggaacagacccagcttcgatgcgattttgtactattaccaatctggagggaggttgcggaggccggttaatgtgcccttggacatcttctcagaggagatccgtttctatgaactgggggaagaagccatggagatgttycgggaggacgaaggctacatyaaagaagaagagagacckctgccagagaatgagtttcagagacaggtctggttgctcttcgagtaccccgagagctcgggccctgccaggattatagctattgtctccgtcatggtgattttgatctccatcgtgagcttttgcctggaaacrttgcccatttttcgggatgagaatgaagacatgcacggcagtgggctgagccaccctccctactccaacagcagcatggggtaccagcagtccacctctttcacagatcccttcttcatcgtggagacgctttgcatcatctggttc

SEQ ID NO: 55553 - DNA, 600 bp, Chicken  19866894309210_3
tcggggctgcgctttgagacccagctcaagactttagctcagtttccggagactttgctaggagatcctaaaaagagaatgagatatttcgaccctctccgaaatgagtatttctttgaccggaacagacccagcttcgatgcgattttgtactattaccaatctggagggaggttgcggaggccggttaatgtgcccttggacatcttctcagaggagatccgtttctatgaactgggggaagaagccatggagatgttycgggaggacgaaggctacatyaaagaagaagagagacckctgccagagaatgagtttcagagacaggtctggttgctcttcgagtaccccgagagctcgggccctgccaggattatagctattgtctccgtcatggtgattttgatctccatcgtgagcttttgcctggaaacrttgcccatttttcgggatgagaatgaagacatgcacggcagtgggctgagccaccctccctactccaacagcagcatggggtaccagcagtccacctctttcacagatcccttcttcatcgtggagacgctttgcatcatctggttctccttcgagttcttggtg

SEQ ID NO: 55554 - DNA, 600 bp, Chicken  19866894309210_4
ttcgatgcgattttgtactattaccaatctggagggaggttgcggaggccggttaatgtgcccttggacatcttctcagaggagatccgtttctatgaactgggggaagaagccatggagatgttycgggaggacgaaggctacatyaaagaagaagagagacckctgccagagaatgagtttcagagacaggtctggttgctcttcgagtaccccgagagctcgggccctgccaggattatagctattgtctccgtcatggtgattttgatctccatcgtgagcttttgcctggaaacrttgcccatttttcgggatgagaatgaagacatgcacggcagtgggctgagccaccctccctactccaacagcagcatggggtaccagcagtccacctctttcacagatcccttcttcatcgtggagacgctttgcatcatctggttctccttcgagttcttggtgaggtttttcgcctgtcccagcaaggctgggttttttaccaacatcatgaacattatagacattgtagccatcatcccctacttcatcaccttagggacggagctggccgagaagccagaggatggacagcaaggc

SEQ ID NO: 55555 - DNA, 600 bp, Chicken  19866894309213_1
tgggtgacatagggcaggatatcctgggacagactgtctcccaacatgaggggaactcacctggtgggtttgattctgatgggaggaagtttttccttccagttctcactccttggtgctgtggtaacccagctttcctgccctgtgcacacctggacttccttcctgcccatcacaacctctctctctcccttcctctccttcccttttttctgtgctcgctttatcatggaccttccgttgacagtaaaagtaaataccttaacgatgtgtataggaatgagtagaagatcagagaaraagtggtggccatcagtccaatggctttgtctctacactgctcttttatttccagccatcttgctctttcctgcaaatgcccagcattaggcttctcaggagcctgatgctgatcagatcctctgggatcatgatctgaggatcatgaggagctcctggaatggtgggtagagtaggtgccagctatgttatgagaattacttttcagtacgactgtatgatacttacaccactttgtagtttttgaggagaccaggagtgattcactgcaaagttgttctgaatgttaacgtgcaggga

SEQ ID NO: 55556 - DNA, 600 bp, Chicken  19866894309214_1
aaatacaagaggcatgtactttattcatagatgattcgcaactgaaaactcatacatttttacagtggaacagctgaatgcaactttgaaaaagtatattagctctataattagaaacttctctgatcctggtgataatcatactcgctatgctgtcaaagattcctagataagtcacagaatcacaagggttggaagggatcactggagatcatccagtccttcagtttctttagctctgctaaagaagattccctacagggggtgcacagggaagtgtccaggcaggttttgaatttyaccagagaaggagactccataacctctctggatagcccattcagtgctctgtcacactcaaaagaatgaagttatatctcatgtaagtatggaacttcctgtgttccagatggtgccaattgccacttgtcctgttgctgggcactgtcgaaaagagcctggccccrtccacttgactcctgctcattaaatatttataagctttacttttggagtgacctacatacttttaattcaaatgtaaatgcctgtgatatttttttagcccaaaaaatggcttattatgcttgtgtcttggtg

SEQ ID NO: 55557 - DNA, 544 bp, Chicken  19866894309214_2
agataagtcacagaatcacaagggttggaagggatcactggagatcatccagtccttcagtttctttagctctgctaaagaagattccctacagggggtgcacagggaagtgtccaggcaggttttgaatttyaccagagaaggagactccataacctctctggatagcccattcagtgctctgtcacactcaaaagaatgaagttatatctcatgtaagtatggaacttcctgtgttccagatggtgccaattgccacttgtcctgttgctgggcactgtcgaaaagagcctggccccrtccacttgactcctgctcattaaatatttataagctttacttttggagtgacctacatacttttaattcaaatgtaaatgcctgtgatatttttttagcccaaaaaatggcttattatgcttgtgtcttggtgtgctgaatttaatgctgtcagacactgtgaaatgtaaacttgtcattagccacaatgaggataggaatttaaattctcaatgtaggctgaaggctgcaggccatatttctg

SEQ ID NO: 55558 - DNA, 599 bp, Chicken  19866894309218_1
  misc_feature (1)..(26): n is any nucleotide
nnnnnnnnnnnnnnnnnnnnnnnnnnggtgcccgttctttccatttgcactttgaacaagcatgattacagattagcagcgtgtcatccttttcttcatcctgcttctggcagctgtgctgtacacagacgagcctgggctagtaggtgatactggtttgtttgccaaaagtaacatgaggttatgatagcacactttgactctcaaggaccagttctgctgaatatgcttgttttctttagacaccaaaggtggaaaggatttcggttaataataaatgacctccccggggtaaacctrgttttttcctgaccatagatggtcactagatgcagtagttatcaagatcgaagctagaagagccaccatagggcgagctggttttgttttgttttttagctcttttgctaccaggccttctggagctgagcatctcctcagctgtcctcctttttgaggagaaacttctgtttggagtgggggtatgtgggaactgttggttcaatgggagacatgcagcgatgcgtgtacatgtgcgtgcctgggaaaaaacatgtcctgcagtgctaacggattctgagaaagccagtgttggccat

SEQ ID NO: 55559 - DNA, 600 bp, Chicken  19866894309218_2
tagaagagccaccatagggcgagctggttttgttttgttttttagctcttttgctaccaggccttctggagctgagcatctcctcagctgtcctcctttttgaggagaaacttctgtttggagtgggggtatgtgggaactgttggttcaatgggagacatgcagcgatgcgtgtacatgtgcgtgcctgggaaaaaacatgtcctgcagtgctaacggattctgagaaagccagtgttggccatcgtgtctcaaaatagctcatgaaaacaggctgccttacactgattccatactctstgacggagatgtgcagccctgaaatacaatttgttatgcaatttatcaaaatagttatcctccagggggtttcagaaccctggaaagaaacgacaaggaaaaaatagggagcttctttcttcggcaagataaatagcaaattgtttcctgaacgccttggagtgacttatttgacctcagaatacagtggtgcttttatagaaaggttatttttcaactcagctaggtggagggagttgctaaaacattcacattgttagtgaccatgaaaagagtatcttcacattttccactttcaac

SEQ ID NO: 55560 - DNA, 600 bp, Chicken  19866894309230_1
aagaaccaggcccagtatgctcagttctaccctgctggtacaccagattcatgccagtgattttgctgtagttgctcttcactggtactgcgacaaaagtgaaaagtgagaaaagctccagatgagaaaacaatctgaaataaaaagaaatcaaaataacattaaatattaaaacaagtttccagtttggtgatgacactgaggcatcacagagcaaaacctgaatgaaataagtagtctaattaactaacaattaaggtaatatctcacaaaaccagaatagtattaagaccagctttycttattagcacaaagtgattaactataataccagtgtttacttaaacaagcgcctgaagcaaagcagcaggctctgtaaaattatctctgcacctttcaccttccagcaggagttttctggccagatgtagatcctgcttatacctactcatatttctgcagtttcttcagaccaatgaacagtggaagtggcaggatgagaattatttggcattaggatcagaatctgttcaggccaccagctgtgcttttccacttgccttgtttgacatcaacagactaatctttttgactggtatt

SEQ ID NO: 55561 - DNA, 599 bp, Chicken  19866894309231_1
  misc_feature (1)..(104): n is any nucleotide
nnnnnnnnnnnnnnnnnnnnnnnnnnnnnnnnnnnnnnnnnnnnnnnnnnnnnnnnnnnnnnnnnnnnnnnnnnnnnnnnnnnnnnnnnnnnnnnnnnnnnnnnccaccaccaccaccgtggagctctgggtgcctgaggagctctgtgctaaaggccagggagaccacgaccagttacatctggtgggggagaagagggctgctgggtgggaaatgcctgcaaccgatgcccaaacagggctcggctgagagcagaaggactctcttggtgctgctaggaggtggggacaaaccagaaygcctgtgcgggagctctcccagcagacaaaccattgggaatcagtttctctgctcccaagtggctagatgtggcttcagccctttcttcctctcccggtctcttgcagagcctcactatcttcctggaggccttagagggatttcaatcggtcatccctaaggacaagtttctggccatcaccagtgctgtgttctaccaggtaaggggagcctatccttgcacccacaagcagtttccctcttggctaagtctcaggaggactcaaagctccgagcctctgccggctgctcagcctta

SEQ ID NO: 55562 - DNA, 599 bp, Chicken  19866894309237_1
  misc_feature (1)..(180): n is any nucleotide
nnnnnnnnnnnnnnnnnnnnnnnnnnnnnnnnnnnnnnnnnnnnnnnnnnnnnnnnnnnnnnnnnnnnnnnnnnnnnnnnnnnnnnnnnnnnnnnnnnnnnnnnnnnnnnnnnnnnnnnnnnnnnnnnnnnnnnnnnnnnnnnnnnnnnnnnnnnnnnnnnnnnnnnnnnnnnnnnnnnngtgtttggcttttcttggagctgaaatagacatattttgaatatagagttcaataggataacggcagccacagaaattgaaggagcctggtgctcttgccttcacttcccatgccacgcwccgcaacccactgaccacttgggttrtctttcctgagcwcgcttcagtgtggcatctctgagtctctccttagcttcctgttatacacaaagagcaaggatggtttttttcctggtttatacctgtaacatcctttcgtttggtataaagaacagaaaatatttgaacagagagcacaatactttaagcatctctttgagcttgtttgcactacacagtgcaagagttccacagaaaaggacactggacatcttctaygtgactgatctttataatttcaaaccaracagtttagaact

SEQ ID NO: 55563 - DNA, 599 bp, Chicken  19866894309237_2
  misc_feature (1)..(154): n is any nucleotide
nnnnnnnnnnnnnnnnnnnnnnnnnnnnnnnnnnnnnnnnnnnnnnnnnnnnnnnnnnnnnnnnnnnnnnnnnnnnnnnnnnnnnnnnnnnnnnnnnnnnnnnnnnnnnnnnnnnnnnnnnnnnnnnnnnnnnnnnnnnnnnnnnnnnnnnnnngtgtttggcttttcttggagctgaaatagacatattttgaatatagagttcaataggataacggcagccacagaaattgaaggagcctggtgctcttgccttcacttcccatgccacgcwccgcaacccactgaccacttgggttrtctttcctgagcwcgcttcagtgtggcatctctgagtctctccttagcttcctgttatacacaaagagcaaggatggtttttttcctggtttatacctgtaacatcctttcgtttggtataaagaacagaaaatatttgaacagagagcacaatactttaagcatctctttgagcttgtttgcactacacagtgcaagagttccacagaaaaggacactggacatcttctaygtgactgatctttataatttcaaaccaracagtttagaacttaattstagtaatttgtcagaatgac

SEQ ID NO: 55564 - DNA, 599 bp, Chicken  19866894309237_3
  misc_feature (1)..(141): n is any nucleotide
nnnnnnnnnnnnnnnnnnnnnnnnnnnnnnnnnnnnnnnnnnnnnnnnnnnnnnnnnnnnnnnnnnnnnnnnnnnnnnnnnnnnnnnnnnnnnnnnnnnnnnnnnnnnnnnnnnnnnnnnnnnnnnnnnnnnnnnnnnnnngtgtttggcttttcttggagctgaaatagacatattttgaatatagagttcaataggataacggcagccacagaaattgaaggagcctggtgctcttgccttcacttcccatgccacgcwccgcaacccactgaccacttgggttrtctttcctgagcwcgcttcagtgtggcatctctgagtctctccttagcttcctgttatacacaaagagcaaggatggtttttttcctggtttatacctgtaacatcctttcgtttggtataaagaacagaaaatatttgaacagagagcacaatactttaagcatctctttgagcttgtttgcactacacagtgcaagagttccacagaaaaggacactggacatcttctaygtgactgatctttataatttcaaaccaracagtttagaacttaattstagtaatttgtcagaatgacctagaacaaacta

SEQ ID NO: 55565 - DNA, 600 bp, Chicken  19866894309237_4
gaaggagcctggtgctcttgccttcacttcccatgccacgcwccgcaacccactgaccacttgggttrtctttcctgagcwcgcttcagtgtggcatctctgagtctctccttagcttcctgttatacacaaagagcaaggatggtttttttcctggtttatacctgtaacatcctttcgtttggtataaagaacagaaaatatttgaacagagagcacaatactttaagcatctctttgagcttgtttgcactacacagtgcaagagttccacagaaaaggacactggacatcttctaygtgactgatctttataatttcaaaccaracagtttagaacttaattstagtaatttgtcagaatgacctagaacaaactaggttgctaggaagccaaatgttattcatctggggagttcagtgtgaggaatgaatttaaatccagctgtttcagagtatggaaatacttacccaagacactcacatagtcataattatgttctactccttcatttgtggagaaaaaacaagtgcagttgttaagctacttaatttgagttcataaaatctaaaataccacaattagaagtgtaggatttt

SEQ ID NO: 55566 - DNA, 600 bp, Chicken  19866894309237_5
tcccatgccacgcwccgcaacccactgaccacttgggttrtctttcctgagcwcgcttcagtgtggcatctctgagtctctccttagcttcctgttatacacaaagagcaaggatggtttttttcctggtttatacctgtaacatcctttcgtttggtataaagaacagaaaatatttgaacagagagcacaatactttaagcatctctttgagcttgtttgcactacacagtgcaagagttccacagaaaaggacactggacatcttctaygtgactgatctttataatttcaaaccaracagtttagaacttaattstagtaatttgtcagaatgacctagaacaaactaggttgctaggaagccaaatgttattcatctggggagttcagtgtgaggaatgaatttaaatccagctgtttcagagtatggaaatacttacccaagacactcacatagtcataattatgttctactccttcatttgtggagaaaaaacaagtgcagttgttaagctacttaatttgagttcataaaatctaaaataccacaattagaagtgtaggattttgagtgatgttgttaacaaaaagtttctg

SEQ ID NO: 55567 - DNA, 600 bp, Chicken  19866894309237_6
acccactgaccacttgggttrtctttcctgagcwcgcttcagtgtggcatctctgagtctctccttagcttcctgttatacacaaagagcaaggatggtttttttcctggtttatacctgtaacatcctttcgtttggtataaagaacagaaaatatttgaacagagagcacaatactttaagcatctctttgagcttgtttgcactacacagtgcaagagttccacagaaaaggacactggacatcttctaygtgactgatctttataatttcaaaccaracagtttagaacttaattstagtaatttgtcagaatgacctagaacaaactaggttgctaggaagccaaatgttattcatctggggagttcagtgtgaggaatgaatttaaatccagctgtttcagagtatggaaatacttacccaagacactcacatagtcataattatgttctactccttcatttgtggagaaaaaacaagtgcagttgttaagctacttaatttgagttcataaaatctaaaataccacaattagaagtgtaggattttgagtgatgttgttaacaaaaagtttctgttcttctttaagctaaact

SEQ ID NO: 55568 - DNA, 599 bp, Chicken  19866894309248_1
  misc_feature (1)..(58): n is any nucleotide
nnnnnnnnnnnnnnnnnnnnnnnnnnnnnnnnnnnnnnnnnnnnnnnnnnnnnnnnnncctgtggtgtgcagtgcagctatagtagttggatgaacagtctgaccgcctaatttaagccttttgtttaaatccaagttgaaaagaaaacttatgtgagcttacttctttgaataaggatatgtagtcaatgaagtcgtcatcgctgtccagactgaacatgcttgcatcaaccagctcttggattgcatctcttcttttcagaggaaaagcttccctcagagccatcctgtttggagacrggcaacaacatgtgagcagttaatgagtgctggtatggatggcagtgtcttaggttagcagagcgtgcatgcacgccactggacagacmttcaaaacttcattgccctcgaagaggatacacgtgtcaagaagtgtgtgcaccttcaggtaacaaagcaagggtgatgttttcaggtgcatgttgatgctgagccatttgggaagttctgaatgcagcatggtgttggttagctgtgagctggtacatctgcaccagagccgcgttcccagctatgtgctggagatggctcttgccttt

SEQ ID NO: 55569 - DNA, 600 bp, Chicken  19866894309248_2
gatgaacagtctgaccgcctaatttaagccttttgtttaaatccaagttgaaaagaaaacttatgtgagcttacttctttgaataaggatatgtagtcaatgaagtcgtcatcgctgtccagactgaacatgcttgcatcaaccagctcttggattgcatctcttcttttcagaggaaaagcttccctcagagccatcctgtttggagacrggcaacaacatgtgagcagttaatgagtgctggtatggatggcagtgtcttaggttagcagagcgtgcatgcacgccactggacagacmttcaaaacttcattgccctcgaagaggatacacgtgtcaagaagtgtgtgcaccttcaggtaacaaagcaagggtgatgttttcaggtgcatgttgatgctgagccatttgggaagttctgaatgcagcatggtgttggttagctgtgagctggtacatctgcaccagagccgcgttcccagctatgtgctggagatggctcttgcctttctttgttctggtgccatagccccaagaaatgctgtctctagtgagtgctgtttatgaaggcacaggtgattgacaaatcctgcagctgta

SEQ ID NO: 55570 - DNA, 600 bp, Chicken  19866894309248_3
gttgatgctgagccatttgggaagttctgaatgcagcatggtgttggttagctgtgagctggtacatctgcaccagagccgcgttcccagctatgtgctggagatggctcttgcctttctttgttctggtgccatagccccaagaaatgctgtctctagtgagtgctgtttatgaaggcacaggtgattgacaaatcctgcagctgtagcaaaactcacgcaaatgctttgcgacccatcctaggagctaacgggagcactgcagagggtcctctgtctcctctctggggagcagtgcakggygcagatgctgcctcatcccactgcatgtgtgcagtgccctatgtctcttctcaggtttcccagttttgttactcaaaacctgcagttctcacataattctgaraactaatgctgagttttacaagtagacgcttgctatagctgtcctctcaagaatttaagggagaaaacctgttccctgggctgtgctgacagataagcaaagcagacagacttggcatatcccagcacgcagagctcagtttgtagtgcttggttcttgcctgaactgctcactgggcagggacccactgctgt

SEQ ID NO: 55571 - DNA, 600 bp, Chicken  19866894309248_4
gatgctgagccatttgggaagttctgaatgcagcatggtgttggttagctgtgagctggtacatctgcaccagagccgcgttcccagctatgtgctggagatggctcttgcctttctttgttctggtgccatagccccaagaaatgctgtctctagtgagtgctgtttatgaaggcacaggtgattgacaaatcctgcagctgtagcaaaactcacgcaaatgctttgcgacccatcctaggagctaacgggagcactgcagagggtcctctgtctcctctctggggagcagtgcakggygcagatgctgcctcatcccactgcatgtgtgcagtgccctatgtctcttctcaggtttcccagttttgttactcaaaacctgcagttctcacataattctgaraactaatgctgagttttacaagtagacgcttgctatagctgtcctctcaagaatttaagggagaaaacctgttccctgggctgtgctgacagataagcaaagcagacagacttggcatatcccagcacgcagagctcagtttgtagtgcttggttcttgcctgaactgctcactgggcagggacccactgctgtagc

SEQ ID NO: 55572 - DNA, 600 bp, Chicken  19866894309248_5
gctcttgcctttctttgttctggtgccatagccccaagaaatgctgtctctagtgagtgctgtttatgaaggcacaggtgattgacaaatcctgcagctgtagcaaaactcacgcaaatgctttgcgacccatcctaggagctaacgggagcactgcagagggtcctctgtctcctctctggggagcagtgcakggygcagatgctgcctcatcccactgcatgtgtgcagtgccctatgtctcttctcaggtttcccagttttgttactcaaaacctgcagttctcacataattctgaraactaatgctgagttttacaagtagacgcttgctatagctgtcctctcaagaatttaagggagaaaacctgttccctgggctgtgctgacagataagcaaagcagacagacttggcatatcccagcacgcagagctcagtttgtagtgcttggttcttgcctgaactgctcactgggcagggacccactgctgtagctgtcayaggcagccagctccttctgcaggtcagaaatcagctggttctggctgtggtattgctcttcagctacctgtggaacagggaaggttcacaggtcagg

SEQ ID NO: 55573 - DNA, 600 bp, Chicken  19866894309248_6
gctgcctcatcccactgcatgtgtgcagtgccctatgtctcttctcaggtttcccagttttgttactcaaaacctgcagttctcacataattctgaraactaatgctgagttttacaagtagacgcttgctatagctgtcctctcaagaatttaagggagaaaacctgttccctgggctgtgctgacagataagcaaagcagacagacttggcatatcccagcacgcagagctcagtttgtagtgcttggttcttgcctgaactgctcactgggcagggacccactgctgtagctgtcayaggcagccagctccttctgcaggtcagaaatcagctggttctggctgtggtattgctcttcagctacctgtggaacagggaaggttcacaggtcaggaactgacttatctgttggcccttgagttgcattcaagaggagggcaaaactgcaaaaaggttgtgctcacttctaaatcaactttcacctgagctgcttttagtgatttataaacaatcaagcaacaccrtggcttgcagggccggctgttcacaacagttccttattatgcaaactgctttggagcaagctgttcactgtca

SEQ ID NO: 55574 - DNA, 373 bp, Chicken  19866894309248_7
agagctcagtttgtagtgcttggttcttgcctgaactgctcactgggcagggacccactgctgtagctgtcayaggcagccagctccttctgcaggtcagaaatcagctggttctggctgtggtattgctcttcagctacctgtggaacagggaaggttcacaggtcaggaactgacttatctgttggcccttgagttgcattcaagaggagggcaaaactgcaaaaaggttgtgctcacttctaaatcaactttcacctgagctgcttttagtgatttataaacaatcaagcaacaccrtggcttgcagggccggctgttcacaacagttccttattatgcaaactgctttggagcaagctgttcactgtca

SEQ ID NO: 55575 - DNA, 600 bp, Chicken  19866894309254_1
caatttaaacagggtgaaatgcagtgtgccctgatgagattatacctaaattatctcagctaacaccttttccattgttgtgtaccatcacgtgacagaaaaaatttcttttcatgtatcaaagtgggaatttcaaggctcagggaagaaaatattaaaaatgatgggtcaagcccaatgttttctccttattagtgttgcatgaagtgaaattttgaggtcttttgcttctgagtcaccagtgaaaggttattacctaatggtaatggaaactgtgtgcaggcacatagtatcaaatgytttaaaaatgtttttcctccagaatcagtgacactgaacaactgtacattcacttcttttcatcacgttctatttcgcacattgcttcaattaatctctggattttcatgggttagaatttattgctatgacattgacttctttctagtttacctcctacagctgtggtagtatgcacaacacagtggtttctcctcggcatcagttcaaaagaagctcaaaaacaaatgaaagaaaatacgagttccatgtctgaagtcaggagattaagggatactggacaactcatctctgaagaaa

SEQ ID NO: 55576 - DNA, 600 bp, Chicken  19866894309254_2
tgtcatgctgttaaatggtctgggatgttaccagttctgatccaaatttgcccaactgtatcacacttgtctgaattcactgcttctgcctggttggatctctgagcagacacttgttggctctaagtagctaatttaatagtgacagatttatttagagatctagtagtgggtagaaatgttacctttactgtctccatagtctgaataaaatctcccaggttacaagcgccaaaaaagtacaatattttttatgttcattgtctcagtgaaacagcaaagaaaagtggagttacaaayggaagaacatattaaattgccttgtgctttctctcttccagctggacggttgttccaatagtgctgtgcagcttgctggatggaggaggatattggctgatgtgacacctgcttgttgtgtgagtgacaaggggatcagccaaggctggtaaaaggaaagctcactcttggcccagacactgtcacctcagctttaggggtcagccaagtgaagattaattcaaatgatggatgctgcctacgtattctgtgctcaaactgtccttcagttacttgaaattagaactgcactgctgtagt

SEQ ID NO: 55577 - DNA, 600 bp, Chicken  19866894309254_3
cagcttgctggatggaggaggatattggctgatgtgacacctgcttgttgtgtgagtgacaaggggatcagccaaggctggtaaaaggaaagctcactcttggcccagacactgtcacctcagctttaggggtcagccaagtgaagattaattcaaatgatggatgctgcctacgtattctgtgctcaaactgtccttcagttacttgaaattagaactgcactgctgtagtatgtgcaggccctttcaccaaggactcctgtcctggtatgagaagtaagtcttctctggatgccaccmttgttgatcacccacactcatgtccttcttccatgctacacacgtggcacattcgcatatagcattgtcacagttcactgccttcctttaaagaggaaatgacttccagcaataaaagtgtttttggaaaccaacaataattatcttcttttgtgttggtttcttttagcaaatgtttgttaggaataattataaatatgcaaagatggctcaatttccatgttaatatcacttctaaatgactgcttcgtgtgtgaaaaatgattgacacctctttgaatattgggtgttagcatagta

SEQ ID NO: 55578 - DNA, 600 bp, Chicken  19866894309275_1
agtcacagagatgctttaaggcacatcagctgatgtggctttcagggcgtggggttcagctggaaataatccaaactccatcccacgttgcttatgccttctgcagactggggagtaggaaccggtggtccttattacatcacgattcatgcagtctggccacatccaccccgctaccctttctggcataagatttgaaattcctgtcaccttcagctgaatttctcagggattcagataaacctacaggaaagtgcacaaatgccagcagcctgtctcaggcaatacatgaaattcagrtgacaaaatcaaatgcgatttctttcttcagaattatggcaggtgcagcatggcgaaactaccgtaacacactataaatttgaatgagagaagatgtggcaaaagaaagggaaggtggctttgttcaggtcatgcacctaatgaaaaataaacagcagaaagctcgcttttatcaagtttgaccaaattttagatttctagctgaactgctgcatatacattgagcccatggtgccctgccaagggttatagcttcttcccaccagaaagctgtggtgagtctccccgggagtcatattt

SEQ ID NO: 55579 - DNA, 600 bp, Chicken  19866894309280_1
ctttgttctttccataatgaacaggcttatgactattctgcatagtatgtaagtctcaatgttgtaataccaccattatttcatggccatacatgttgagacagaccagcagtggaatttatagctagtcactagagcctgctattacaccaatgctctgtaagtccagagaagatgtcaaaattcttctgtaggatataaaatccatgtcagcaatcttacactccatctgcattctcagtgatctaaatggattccctgaaatctgaaagagatgtttgttttcatttgataataagkttctttagaagatatagatatattgcccagtactcttttagaactgcagcttcattatgtgtctttactttgactacatattgatcctaacatggcttattatgttatgtctgggtatcctggttatattaacactatctaacgtaaggtacgtgatccaagcattttaactaaataccatttttgctagtctagacactattactgcaaaacagggcttcccagattgtagtgcwggaagcttggctgtttgttttttgttgttgttgttgtttttgttttgtttttgctaagattagt

SEQ ID NO: 55580 - DNA, 600 bp, Chicken  19866894309280_2
ctcagtgatctaaatggattccctgaaatctgaaagagatgtttgttttcatttgataataagkttctttagaagatatagatatattgcccagtactcttttagaactgcagcttcattatgtgtctttactttgactacatattgatcctaacatggcttattatgttatgtctgggtatcctggttatattaacactatctaacgtaaggtacgtgatccaagcattttaactaaataccatttttgctagtctagacactattactgcaaaacagggcttcccagattgtagtgcwggaagcttggctgtttgttttttgttgttgttgttgtttttgttttgtttttgctaagattagttaaaaggttttgagtatgggttctgtgaaaatccatgttttttgatatttaggatgatgcctgtgtccagagaatatttgtgtaaattatcttgtttctagtgggaaaagagtatttttttttccccatttcattgtttgtcacatcagtcctgtagaggatctggtatggaacttaactgaccatgatgataagatttttttctgttttccaaaagaaggtattgtcaagaatct

SEQ ID NO: 55581 - DNA, 600 bp, Chicken  19866894309288_1
tcagcacatgccactgaatgtgattccacgtgttacgtcagacacactatctaaacaaggatgtagatgtacattttaaacacaggggcaccctttgtgtgcgtgtacaagtgtgtaacataaacccagagcttgcagagccgatccctggcagacatcagcttagcccagcatggcatctgatggagcaaagctgctctgtgcctgctgaggattcaaggattcaggccacagctatagaacaatgtttgtgaactacatgaaatatttgggcgcaaacacacccttagtaaaacacakaatccacgcccttcagaaaaataggatctgttgctgtgatgccatggaaactcaaatgctagaaagagccatacaggaatgaatcaaacgtgctccaaatgctggttatacattcaccccaggaartgggcaggtagaagaggggcaaagccagcctgcccagtgctgctgggccagcaatgccccacgtgcagttcagctcaggagattacttcatggggctcaaaaaaagaatgcaggatctgtcagtgtcccttacaccttaagaaacagccttgtttgaagcatagtgaaaggtaa

SEQ ID NO: 55582 - DNA, 600 bp, Chicken  19866894309288_2
cagagcttgcagagccgatccctggcagacatcagcttagcccagcatggcatctgatggagcaaagctgctctgtgcctgctgaggattcaaggattcaggccacagctatagaacaatgtttgtgaactacatgaaatatttgggcgcaaacacacccttagtaaaacacakaatccacgcccttcagaaaaataggatctgttgctgtgatgccatggaaactcaaatgctagaaagagccatacaggaatgaatcaaacgtgctccaaatgctggttatacattcaccccaggaartgggcaggtagaagaggggcaaagccagcctgcccagtgctgctgggccagcaatgccccacgtgcagttcagctcaggagattacttcatggggctcaaaaaaagaatgcaggatctgtcagtgtcccttacaccttaagaaacagccttgtttgaagcatagtgaaaggtaagagcagggaagataaatagtctgtctcctagctacattctgcctgtggattgaagtagatcaacacaaatatttgcgtgtacagcatgctccagagcctgcaaatgcctgctggcaaagtgcaggc

SEQ ID NO: 55583 - DNA, 600 bp, Chicken  19866894309289_1
ttagcatttcaattaccacagaaaagaaaggaaggagcatgaatgaaagattgccacttaggatcttgctacttagcagaatgactgatctgtcctgaaaagtgtcagatacatttctctgggaagagacaaactacaattactggttctaatgtcagctaagaaaggcaagttatttttgttctgcattttttccgtaatatctacaagcacaataggtttcacataacctacattaccagaccctctgtcccaggtccttcccctgagtgtgtgatccactcctccacagactgtgawgctgagagttctgaattctactgagggttggagyagggacagtttcccaaggcagaagttactctgagatcaacaaggctgctcagtgtttgcagacagctcttcagttaaactctttctcttgaaaaatgaccattacattcatggcaagacttstgagcatccactrcttcttattcttttttactactatggtgcacacatacraacaagtgacacctactatttggactgcccatcagraatctgtttctgtacaagaagccactctgcttaatgggaaaaaataaacaaagcaac

SEQ ID NO: 55584 - DNA, 600 bp, Chicken  19866894309289_2
gagcatgaatgaaagattgccacttaggatcttgctacttagcagaatgactgatctgtcctgaaaagtgtcagatacatttctctgggaagagacaaactacaattactggttctaatgtcagctaagaaaggcaagttatttttgttctgcattttttccgtaatatctacaagcacaataggtttcacataacctacattaccagaccctctgtcccaggtccttcccctgagtgtgtgatccactcctccacagactgtgawgctgagagttctgaattctactgagggttggagyagggacagtttcccaaggcagaagttactctgagatcaacaaggctgctcagtgtttgcagacagctcttcagttaaactctttctcttgaaaaatgaccattacattcatggcaagacttstgagcatccactrcttcttattcttttttactactatggtgcacacatacraacaagtgacacctactatttggactgcccatcagraatctgtttctgtacaagaagccactctgcttaatgggaaaaaataaacaaagcaacaaagaaaagctgactctttcctaaaacagtgcaa

SEQ ID NO: 55585 - DNA, 600 bp, Chicken  19866894309289_3
agctaagaaaggcaagttatttttgttctgcattttttccgtaatatctacaagcacaataggtttcacataacctacattaccagaccctctgtcccaggtccttcccctgagtgtgtgatccactcctccacagactgtgawgctgagagttctgaattctactgagggttggagyagggacagtttcccaaggcagaagttactctgagatcaacaaggctgctcagtgtttgcagacagctcttcagttaaactctttctcttgaaaaatgaccattacattcatggcaagacttstgagcatccactrcttcttattcttttttactactatggtgcacacatacraacaagtgacacctactatttggactgcccatcagraatctgtttctgtacaagaagccactctgcttaatgggaaaaaataaacaaagcaacaaagaaaagctgactctttcctaaaacagtgcaaaggaataaccttctaaacaggggaacagaaagacaagtgaggaatgttctgtctgcagagggaagcaccagtgagggtttaggtcacactgccttacctgcagcctagaatgggctctgaaa

SEQ ID NO: 55586 - DNA, 600 bp, Chicken  19866894309289_4
aagttatttttgttctgcattttttccgtaatatctacaagcacaataggtttcacataacctacattaccagaccctctgtcccaggtccttcccctgagtgtgtgatccactcctccacagactgtgawgctgagagttctgaattctactgagggttggagyagggacagtttcccaaggcagaagttactctgagatcaacaaggctgctcagtgtttgcagacagctcttcagttaaactctttctcttgaaaaatgaccattacattcatggcaagacttstgagcatccactrcttcttattcttttttactactatggtgcacacatacraacaagtgacacctactatttggactgcccatcagraatctgtttctgtacaagaagccactctgcttaatgggaaaaaataaacaaagcaacaaagaaaagctgactctttcctaaaacagtgcaaaggaataaccttctaaacaggggaacagaaagacaagtgaggaatgttctgtctgcagagggaagcaccagtgagggtttaggtcacactgccttacctgcagcctagaatgggctctgaaacccaccaaagagg

SEQ ID NO: 55587 - DNA, 600 bp, Chicken  19866894309289_5
aagcacaataggtttcacataacctacattaccagaccctctgtcccaggtccttcccctgagtgtgtgatccactcctccacagactgtgawgctgagagttctgaattctactgagggttggagyagggacagtttcccaaggcagaagttactctgagatcaacaaggctgctcagtgtttgcagacagctcttcagttaaactctttctcttgaaaaatgaccattacattcatggcaagacttstgagcatccactrcttcttattcttttttactactatggtgcacacatacraacaagtgacacctactatttggactgcccatcagraatctgtttctgtacaagaagccactctgcttaatgggaaaaaataaacaaagcaacaaagaaaagctgactctttcctaaaacagtgcaaaggaataaccttctaaacaggggaacagaaagacaagtgaggaatgttctgtctgcagagggaagcaccagtgagggtttaggtcacactgccttacctgcagcctagaatgggctctgaaacccaccaaagaggtgctaaaatggaacaacttctgccagcagaagcaattt

SEQ ID NO: 55588 - DNA, 576 bp, Chicken  19866894309289_6
ccctctgtcccaggtccttcccctgagtgtgtgatccactcctccacagactgtgawgctgagagttctgaattctactgagggttggagyagggacagtttcccaaggcagaagttactctgagatcaacaaggctgctcagtgtttgcagacagctcttcagttaaactctttctcttgaaaaatgaccattacattcatggcaagacttstgagcatccactrcttcttattcttttttactactatggtgcacacatacraacaagtgacacctactatttggactgcccatcagraatctgtttctgtacaagaagccactctgcttaatgggaaaaaataaacaaagcaacaaagaaaagctgactctttcctaaaacagtgcaaaggaataaccttctaaacaggggaacagaaagacaagtgaggaatgttctgtctgcagagggaagcaccagtgagggtttaggtcacactgccttacctgcagcctagaatgggctctgaaacccaccaaagaggtgctaaaatggaacaacttctgccagcagaagcaatttcatttggcctga

SEQ ID NO: 55589 - DNA, 600 bp, Chicken  19866894309295_1
tctgagcgcgtggagaggggcggactgccgtctcccgctgcagttacctccgtcgttaatccggccgccattgcaggccgctgtgattgggagccgcccacgcgtggaatgtaacgctgttcagcagaagctggcgcagaggatggtttttctgtctgagcaaacaattcgatgtaaatcttacacgaatccacgtccgggagtggaatacgaaggcaggtccttagaacgcattacagtgaactttctggatcatactggccggattacacagggcagccactgttctgctcagtctcytccagactgcatgttctgacttgttagagcagcaattggccttcgtgccaagtctggtycctttaacatggaatgtatacattctgcagtgcttatggatgaccacatgaaacagcatagatctctgcctgaagcagacaaagcgttggttagcagcattgctgatcagactaaatgctcatgattctgtagcatggcgtattaactattaacactgagaaattactctctagctgaaccagttgtgaggaaggaacttcataacatgcctgatgaatcagtgttcatctactgtcttgt

SEQ ID NO: 55590 - DNA, 582 bp, Chicken  19866894309295_2
tccggccgccattgcaggccgctgtgattgggagccgcccacgcgtggaatgtaacgctgttcagcagaagctggcgcagaggatggtttttctgtctgagcaaacaattcgatgtaaatcttacacgaatccacgtccgggagtggaatacgaaggcaggtccttagaacgcattacagtgaactttctggatcatactggccggattacacagggcagccactgttctgctcagtctcytccagactgcatgttctgacttgttagagcagcaattggccttcgtgccaagtctggtycctttaacatggaatgtatacattctgcagtgcttatggatgaccacatgaaacagcatagatctctgcctgaagcagacaaagcgttggttagcagcattgctgatcagactaaatgctcatgattctgtagcatggcgtattaactattaacactgagaaattactctctagctgaaccagttgtgaggaaggaacttcataacatgcctgatgaatcagtgttcatctactgtcttgttggagacagagcctagtaagtaactgttttaatgctaacaa

SEQ ID NO: 55591 - DNA, 599 bp, Chicken  19866894309300_1
  misc_feature (1)..(15): n is any nucleotide
nnnnnnnnnnnnnnnctgcgaacaaaaaggctctcagtaaagaagatgacccaaagatacattttgtattaagcacaaggcaaacatttaacgtacatgaataaatcttctccagctggcaaacattgcaagaatagttcattctaccaaaaagattgcattgagtttgcagtgccaatagtatacacaaagtcattgtttcagtctcagtaagagagttatttatacactttgaatgagtgctgcttcctctagagcatttctatggctttacaacaactatccattaaaaaacaaacyccaaaataagtttttttcctgatgtccaagatttagatttggagtgggggacactaatttgtaatagaccttaatgacagatggggagcattaggtcacgcagttggatcccttgtattttataggccacaaaatttcttccacctacttctatatggagcccagtggctgacgtgtctaaaatgtgcacctggaagatttgctgtcttgaatctactgcttccctttgtagctggttccagcagaaatcaacctcgctatwaaacatwtgtgttgcacttctatttgattttctttgg

SEQ ID NO: 55592 - DNA, 509 bp, Chicken  19866894309300_2
ctatggctttacaacaactatccattaaaaaacaaacyccaaaataagtttttttcctgatgtccaagatttagatttggagtgggggacactaatttgtaatagaccttaatgacagatggggagcattaggtcacgcagttggatcccttgtattttataggccacaaaatttcttccacctacttctatatggagcccagtggctgacgtgtctaaaatgtgcacctggaagatttgctgtcttgaatctactgcttccctttgtagctggttccagcagaaatcaacctcgctatwaaacatwtgtgttgcacttctatttgattttctttggcgttgatttccatgcttaagttcccactgtgctttcctctgatctctgaaaagccctttaatggctgctatttctttaccatccaagaatcttgaaccatctgaatactttgtgcatttgattcgctgatagtcctgaacaaagataagagaggaaaggcagagagggaatt

SEQ ID NO: 55593 - DNA, 502 bp, Chicken  19866894309300_3
tttacaacaactatccattaaaaaacaaacyccaaaataagtttttttcctgatgtccaagatttagatttggagtgggggacactaatttgtaatagaccttaatgacagatggggagcattaggtcacgcagttggatcccttgtattttataggccacaaaatttcttccacctacttctatatggagcccagtggctgacgtgtctaaaatgtgcacctggaagatttgctgtcttgaatctactgcttccctttgtagctggttccagcagaaatcaacctcgctatwaaacatwtgtgttgcacttctatttgattttctttggcgttgatttccatgcttaagttcccactgtgctttcctctgatctctgaaaagccctttaatggctgctatttctttaccatccaagaatcttgaaccatctgaatactttgtgcatttgattcgctgatagtcctgaacaaagataagagaggaaaggcagagagggaatt

SEQ ID NO: 55594 - DNA, 600 bp, Chicken  19866894309301_1
acttagattgttctttggaacgctgatgggagggggattaattattatcctggtatgatggggttcatttgctccaccagaagagcgaagatggagaaatgtctcagctgataagctgcagataacccagatttgggaacaacctgatccttcaccttgcttgatttttgctgaggccgcaggatgagaggtgatgtggtcctggaggtgaccgccattgctctgtgctctgcagtgtgcagctgccacggacaattcctcttcattacagggggttggatgggatgaccattaaaaaawaaacaaactccatcagttccatgattgtaaggttctgcgccatggccacaatggccaactggagaccaggaggtctcctcatggaggcagcaggatggggatgtttgtaatgggaggttccagggcttcgtgcaagatggagccccacttctgcttggccacagactgttttgtttttgctgcagccattgctccaaggccagcagccaccagcagyggagcaggagacaaaatagagagattgaatgtcctttgttatccccaacaggtacgaagaggaaatcaacaaaaggacagctg

SEQ ID NO: 55595 - DNA, 600 bp, Chicken  19866894309301_2
ttgctctgtgctctgcagtgtgcagctgccacggacaattcctcttcattacagggggttggatgggatgaccattaaaaaacaaacaaactccatcagttccatgattgtaaggttctgcgccatggccacaatggccaactggagaccaggaggtctcctcatggaggcagcaggatggggatgtttgtaatgggaggttccagggcttcgtgcaagatggagccccacttctgcttggccacagactgttttgtttttgctgcagccattgctccaaggccagcagccaccagcagyggagcaggagacaaaatagagagattgaatgtcctttgttatccccaacaggtacgaagaggaaatcaacaaaaggacagctgcagagaacgactttgtgctcctaaagaaggtaaagctctgggcagcccaagtgtgtgtgacgagaaccaagcacttgcaggcacaggagcaggctttaattaagcttgtgtctcgttagaataaggagagctgaaggcaggagaacctcccagagcagagggggagactgatgggagttggtgctcctcctccctggagcaaaacatccacatatct

SEQ ID NO: 55596 - DNA, 600 bp, Chicken  19866894309301_3
tgtgacgagaaccaagcacttgcaggcacaggagcaggctttaattaagcttgtgtctcgttagaataaggagagctgaaggcaggagaacctcccagagcagagggggagactgatgggagttggtgctcctcctccctggagcaaaacatccacatatctgaattgtcacctttatctgtgttttctaagcacattgccgtttttaattattttatacaaatttccacctggttctcagcagacctttgcattggtggggctcagatgtaacccagggcccccagagctttgtgctgyggaaatggagcagcacaacactgacttatggggcttgacttagacccaactgtgtgcatcaggggaaggctttcagccctcatttctgcttcaggatgtggatggcgtctacatgaacaaagtggagcttcaggccaagttggactctctggcggatgagctgaacttcctcaggaacctctatgaaacagtgagtgtgcagcagaatgggatggaatgcggggaagrtgtcctaatagggctcaagacaacgttggcgtgaattgcaggagctgtgccagatgcagaagactgtttctg

SEQ ID NO: 55597 - DNA, 600 bp, Chicken  19866894309301_4
acctggttctcagcagacctttgcattggtggggctcagatgtaacccagggcccccagagctttgtgctgyggaaatggagcagcacaacactgacttatggggcttgacttagacccaactgtgtgcatcaggggaaggctttcagccctcatttctgcttcaggatgtggatggcgtctacatgaacaaagtggagcttcaggccaagttggactctctggcggatgagctgaacttcctcaggaacctctatgaaacagtgagtgtgcagcagaatgggatggaatgcggggaagrtgtcctaatagggctcaagacaacgttggcgtgaattgcaggagctgtgccagatgcagaagactgtttctgacacctccgtgggtgctgtccatggacaacaaccgctgcctggacctggacagcatcatcgccgaggtgaaggcacagtatgaggagatcgccaaccgcagcaggctggaggctgaggcctggtaccagwgcaaggtgagtgctatatgcatggtgatagtggggctgaggggcccgtgtgctccccttcctggtgtgggggagatccagggagacctcatgttgmcc

SEQ ID NO: 55598 - DNA, 600 bp, Chicken  19866894309301_5
caggccaagttggactctctggcggatgagctgaacttcctcaggaacctctatgaaacagtgagtgtgcagcagaatgggatggaatgcggggaagrtgtcctaatagggctcaagacaacgttggcgtgaattgcaggagctgtgccagatgcagaagactgtttctgacacctccgtgggtgctgtccatggacaacaaccgctgcctggacctggacagcatcatcgccgaggtgaaggcacagtatgaggagatcgccaaccgcagcaggctggaggctgaggcctggtaccagwgcaaggtgagtgctatatgcatggtgatagtggggctgaggggcccgtgtgctccccttcctggtgtgggggagatccagggagacctcatgttgmcctgatgagctcctctgtcccctgcccatcagtacaaggagctgcaggccactgcaggaaaacacggagacagcctgagggacaccaaggctgagatctccgagctcaaccgcgtgatccagaggcttcgggctgagattgagaacgtgaagaagcaggtagggctggcatgttctggggagcaggtgtgagatcctcataatt

SEQ ID NO: 55599 - DNA, 600 bp, Chicken  19866894309301_6
grtgtcctaatagggctcaagacaacgttggcgtgaattgcaggagctgtgccagatgcagaagactgtttctgacacctccgtgggtgctgtccatggacaacaaccgctgcctggacctggacagcatcatcgccgaggtgaaggcacagtatgaggagatcgccaaccgcagcaggctggaggctgaggcctggtaccagwgcaaggtgagtgctatatgcatggtgatagtggggctgaggggcccgtgtgctccccttcctggtgtgggggagatccagggagacctcatgttgmcctgatgagctcctctgtcccctgcccatcagtacaaggagctgcaggccactgcaggaaaacacggagacagcctgagggacaccaaggctgagatctccgagctcaaccgcgtgatccagaggcttcgggctgagattgagaacgtgaagaagcaggtagggctggcatgttctggggagcaggtgtgagatcctcataattccccttggagctgtgccctggtcagagctgtttgggagcagctgagccatgtgatgcacagagagctgcagtggtctctgcccaacgcactgcatc

SEQ ID NO: 55600 - DNA, 600 bp, Chicken  19866894309301_7
ggggcagctgcagcacaggcggtgcgggcttctgctacagcctgggagggggaggattcagctctggaacgggcagctctgtcgtggtgggctccggcggcgtcctgaagaacagctccgtgtccgcccggcggccgtaaggcagagagctgtccccgtcccctgcacccaaaggagaaaggaagcaaacatcaccaggaccaccaccccactgcccagctgagggccgcccgtctgttgagccaggcactgcccctcctttggacaccgcgtgggaaaagaacagcaggcttcatccaycacagtgactgagatgctctgcagagggcttgggaaattctcgcttcaccaacctcctccttgagacaccgtaaagctgctgcatggagctgagagctggcgttggaaggaccccccaccccaaagcccccaaccacaaagcacagcctgtggggtctgggcatccctcgaggtctcccatgggaccatgacatgctgcagtggccccggtactgctcacctctgcttgagctttgtctttttgttgtgattgtgagaacacttgtgcttgtttgcttaagcctttctcytttggcatgt

SEQ ID NO: 55601 - DNA, 600 bp, Chicken  19866894309301_8
cttcatccaycacagtgactgagatgctctgcagagggcttgggaaattctcgcttcaccaacctcctccttgagacaccgtaaagctgctgcatggagctgagagctggcgttggaaggaccccccaccccaaagcccccaaccacaaagcacagcctgtggggtctgggcatccctcgaggtctcccatgggaccatgacatgctgcagtggccccggtactgctcacctctgcttgagctttgtctttttgttgtgattgtgagaacacttgtgcttgtttgcttaagcctttctcytttggcatgtgccataccccaataaacactagaggcagtacactggtgtggttttctttctgagcaggcattttcgtgttgcaacaagactgctcttctgctgaggcctgaaagctgtcctgactttctcctgccctttcagggacacatagcgaggactggggcatgtatacagctgggatgggcaggggctgacaaaatggtggccacagggagcccatcatcttctccagtgacagctagggggaccrttgtgttcctggtagcatgtggcacaagaaagacataaaatgattatgg

SEQ ID NO: 55602 - DNA, 600 bp, Chicken  19866894309301_9
ttgttgtgattgtgagaacacttgtgcttgtttgcttaagcctttctcytttggcatgtgccataccccaataaacactagaggcagtacactggtgtggttttctttctgagcaggcattttcgtgttgcaacaagactgctcttctgctgaggcctgaaagctgtcctgactttctcctgccctttcagggacacatagcgaggactggggcatgtatacagctgggatgggcaggggctgacaaaatggtggccacagggagcccatcatcttctccagtgacagctagggggaccrttgtgttcctggtagcatgtggcacaagaaagacataaaatgattatggggagcaggctgggctggagctgactgtggtctctattgccctcctctccttgtggcatggaggaggctctcagccctgtgagagcagagctgatgtttgggattgcagttggggatgtcagcagatgctgcactcccattgggtccctgtgatggtgtctgtctgtagagtcataggatgtccccagttgggtgagggaaaggctgtcccactctgctctgtgctgaggggaggcctcatggtggtcctat

SEQ ID NO: 55603 - DNA, 600 bp, Chicken  19866894309315_1
agcattagtatccctgcgagcagcaaacaaccacctgtctgcgttgccccttttgtaaatgcagcattggccaaaaaggcatttctgcagcatggctgagcaaccgcttcatcacgtctgtattaaaggttttcccagcagttttgtcattgagatggtcgggagcagaagtagaacttaaatcctgatttaaaaacataataatagtgaatttttcattggatttctataaatctcagctttcacctttgctgtttagtaactaggaaagtaattcccttttcgctgtcacttctcccrtgcttgtttctgcagctgttaataacataagcgtattgcgtctgcttcctaacctgccacagctctgtgagaagagccattaacaatgctcacaatgacacttgttaaagctaatgaaaaagacacatgcacacccacaaggggacaaaaaaaagcatcttggcttcctctgaatcggtctaaaaaggagaccttagcagaataaacagcagaaggaaaagaaggagagagaaagcgtaccaaatgcgtagcagctactctgcagttgcttgttcattttatatgtgaagcatttcagaa

SEQ ID NO: 55604 - DNA, 592 bp, Chicken  19866894309317_1
ttttaacctcgtgaccaaagcctttcaaattcaccacgtcctgcaaagcagcaaagggttcagacccctattctgcagatggatccatggggagagctggcactgccgctccagcagccaacactgaggtgtggggtgggcacaggggtggcacggccccaacgcccactgcttcacacgagcagctggcatctgcagcgtgctctgctgcacacagagcagcatcaggcccggcttcttccttcctgagcactggaaccaaggatggaaggctctcatgcaagctcagccttcgaaacrcaggcaccaggggtgccttcctagtgctggtgctacaggtgtagcagaggggcctggcagagccctgactctatccaggaaggtcccggaatgctttagccatgtaacaccaaaaaaaaaaacccagcaaaaacaatgagctgattgagttcccaggacaaccacagagcggaactgttgtgcaagacggtgccattcgcacagccacttctcagagcagaacagctttttggtggtgtccccaagctctggccttgttcttcatctgagaaaaccatcagcttcagaatgg

SEQ ID NO: 55605 - DNA, 600 bp, Chicken  19866894309321_1
caaattgggaaggcaaagcatagctactgacgggctgagcaagcactgctgaggatgagagtgataaacagtccggttcggagcaggcagtaatttataaaatgagctgaggagaaagtaagatgtttctgtacaaagagagccatcagtatctccttccaaaaataactactttgtgtgtgggctttttagtttcagcttaaagagctgataaacacagaattggaggcaatggaacaaatctcagcaaggcaaccgagtgggtggcagcgttataaatgaaaccaaaaagctcatacrcagtatttatatcacatcactggggtgaatcacaaaactactgcctggtcttgtttggttcagtaatcagcagtgtgcctctccaaacactcagacatgtacacaaatctgctctgaaaaacagccacgatcagagtttggggtttatcccaggagagcaaatagtgctaaagtttcaaagtaagtgctgagctctttaacattttgtttgctggtattgatttctttgtacccaaagaawtttttccgccctacattagagagtgaatcatggcttaaataatgctctattggaaatac

SEQ ID NO: 55606 - DNA, 600 bp, Chicken  19866894309321_2
tctcagcaaggcaaccgagtgggtggcagcgttataaatgaaaccaaaaagctcatacrcagtatttatatcacatcactggggtgaatcacaaaactactgcctggtcttgtttggttcagtaatcagcagtgtgcctctccaaacactcagacatgtacacaaatctgctctgaaaaacagccacgatcagagtttggggtttatcccaggagagcaaatagtgctaaagtttcaaagtaagtgctgagctctttaacattttgtttgctggtattgatttctttgtacccaaagaawtttttccgccctacattagagagtgaatcatggcttaaataatgctctattggaaatacagagtcagaatttcttctgaatatacagttggctttgcaaaagcgataagaaaacttttgcatagcctttgtgctgtggtgatctaacaatgaaacaccatgctatgggattaggcctacaaccttctgcacctcacgtgttataaactcacgagttaccgccgtcatcttttattaattcctgtttcctttctcaattcatacttaatctgcagaattttgtctttcaaatagtaaataa

SEQ ID NO: 55607 - DNA, 600 bp, Chicken  19866894309322_1
accacttgcaacattcagtgttagcgaagagtgagctgggctgcaaactatgtaaggtttttcagaaaacaacttgacaagctttgtggcctgcagcttttagagctagctgtccttccatcaaaaaacagcctgccaaaatggggctcactttttccaaaatgccctaggtaacctatctgacattggcaggacacgctacaggacagttggctatgattcaagaaatttcatcacgtgtgctttgaagactaatagtaataatataatggacattttagcaattctttcttaaatttycttgaatatcatgaattcaaatcatgtgatccaaacttcattgctaacaaattcaagatctactaaaggaaatctgaaaggataatttggaacataggccactgtatactgcagcctagctaaacacactcattttcccttttctaccaagaagctgcactgtcagtagcaataatatatatatagtatataaatatatatgtttataatatataactcctttagggaaagaaaggtcccagcagaggaatttgcactcttttgttagtctcagggaatcaaaaaatatggagtaggctt

SEQ ID NO: 55608 - DNA, 600 bp, Chicken  19866894309327_1
cttctacagattcatttttatccacagggtaacagtctcaaccattagggatatttatttatttactgaatggtcttcaatttctttttcttttccctcttattagatagtcatgctcacactttccttttggtgcataattttccacctggatgttaaaggatgactgcattttaacgtttttatgtccgatgaagaaaaatgtgtagaaaaatagctcttttcttcttctcagcttttcctctctttccagacctaatcacctcaaagtatctccagctgtttctctgagctcctcckcaagctgtgcaaagcacacagcctccacagctcacctmtgagttcctaccacatgaagccttgccaaagccctgcattcacaaaggccctgtctgaggacagttacttgaggggcatttaggcagcaaagagaagcactgaaacagattagttgtaggaattttactgaagtttgaaattatttcatataaaaaaagaaaaaaatatacataataacaggggcagtcaaaagacttcctaaaatagcaagaacaagggataagtgcttttccatatgaaacccattgtatatacaataca

SEQ ID NO: 55609 - DNA, 600 bp, Chicken  19866894309327_2
caaccattagggatatttatttatttactgaatggtcttcaatttctttttcttttccctcttattagatagtcatgctcacactttccttttggtgcataattttccacctggatgttaaaggatgactgcattttaacgtttttatgtccgatgaagaaaaatgtgtagaaaaatagctcttttcttcttctcagcttttcctctctttccagacctaatcacctcaaagtatctccagctgtttctctgagctcctcckcaagctgtgcaaagcacacagcctccacagctcacctmtgagttcctaccacatgaagccttgccaaagccctgcattcacaaaggccctgtctgaggacagttacttgaggggcatttaggcagcaaagagaagcactgaaacagattagttgtaggaattttactgaagtttgaaattatttcatataaaaaaagaaaaaaatatacataataacaggggcagtcaaaagacttcctaaaatagcaagaacaagggataagtgcttttccatatgaaacccattgtatatacaatacaaaattgtctaatccctggacaaaacaaagagaagtgtc

SEQ ID NO: 55610 - DNA, 600 bp, Chicken  19866894309329_1
atttcaagggtgataaattcttcagactataaagttcagaggcctacctaaacccatgtggactcacacattttccaagtcaaaagcatggttttgccattttaatgtactgtaactacccaaaaacaaatcctaaatgtgaggctttgtacagttgacggaattatttgctaatgtaatttttcaggtaatataatctatataaacattattaaatattttcccttttgagtaatagcaggtgcatttttaagagagtattcacagaatgtctaactgtggcaatttaaggttaatatrtgctataatttcaaggaaagataggagagattatgctcttacttgctgactttggaaattcaggatgaggagaatgggcactagcagttttccattcccaccactggattctagattagaccctraaagctcttttcacacacccttttaatagccagttctcaacatggtgttaattctggttctaaatgaacctctgtataattgctgtcttcccagttgtgactaacagaccactgaacagaagaatgcaattagaacaattttaaggggatgcagggagggaggagtgaatgagag

SEQ ID NO: 55611 - DNA, 563 bp, Chicken  19866894309329_2
acaaatcctaaatgtgaggctttgtacagttgacggaattatttgctaatgtaatttttcaggtaatataatctatataaacattattaaatattttcccttttgagtaatagcaggtgcatttttaagagagtattcacagaatgtctaactgtggcaatttaaggttaatatrtgctataatttcaaggaaagataggagagattatgctcttacttgctgactttggaaattcaggatgaggagaatgggcactagcagttttccattcccaccactggattctagattagaccctraaagctcttttcacacacccttttaatagccagttctcaacatggtgttaattctggttctaaatgaacctctgtataattgctgtcttcccagttgtgactaacagaccactgaacagaagaatgcaattagaacaattttaaggggatgcagggagggaggagtgaatgagagaacatacagagaaaagcatatggtggatggaaaaaggatgcagacagtaaataagaagtgctgatttaatttcttctgtacaatctgg

SEQ ID NO: 55612 - DNA, 600 bp, Chicken  19866894309336_1
ttttattacttgaatttttatttatttttaagaaattcttcttctcatctatatattatcagtctgcaagctgtagtcatctcttcctctcctcaaataatgttaagtgctatttgtactagacttggaaacgatattttggaagaaaaaaataaggttccttgacataaaatgcacaaaaatacgtgaaacagcactttcagtgttgaaccaaccagcttcaggatactaatgcagctaaattagctaataaaggttccagatgtaaataatacagtaaacatatgcattcaaacacaytaagctatttccaacaaacaaagcatggaacattcactcaatattctttgaaaggaacctggacgaagggattttgtgtatgtgtggtacactggactaagcttaaaagacaaaaggatacttctgaagaaggaaaacatgaggtgttatggatgttgagaggtctggggatagaaggggctggagaatagggcaatctgagctccargaaaagtcagggaaagagggctttctgaatcactcagatgtagtattgaggaacattcttgctgctcctacgcactcttctcagctccatcc

SEQ ID NO: 55613 - DNA, 600 bp, Chicken  19866894309336_2
aaccaaccagcttcaggatactaatgcagctaaattagctaataaaggttccagatgtaaataatacagtaaacatatgcattcaaacacaytaagctatttccaacaaacaaagcatggaacattcactcaatattctttgaaaggaacctggacgaagggattttgtgtatgtgtggtacactggactaagcttaaaagacaaaaggatacttctgaagaaggaaaacatgaggtgttatggatgttgagaggtctggggatagaaggggctggagaatagggcaatctgagctccargaaaagtcagggaaagagggctttctgaatcactcagatgtagtattgaggaacattcttgctgctcctacgcactcttctcagctccatcctcctctcttactcacagctgcacattgcaaaattatttcctagcaactttctagactgacaaagatgaaatggatggaatttgaaaaacactaaatatgaatttacagtaagcttgttcaaattgcattgctttggccaaacaaaatcaaaattagatgatctccacctagtaatacttaggtctcttcggattaaagtcagttattc

SEQ ID NO: 55614 - DNA, 600 bp, Chicken  19866894309344_1
ggtcccttgaacaaattaaatgcagtaggtaattttagcagtgcacctggagtcccaggagtgccacaatgactagctcacatttgtatctctctgctcagctgaacaaatatggctggtgttatgaaaaatgttcctagatccaccgttttctctttctatgtcttctcttcagcattagcatctcttttttgggtctcgtggacctgcagccagcgcagaggcaccacagcctctctttgagtgggttcatgctgctctgctgtctccgtgctacagatctttactcattggggtacrtttcttatcataaagatggggtgctaagctgtgttttgcttctataacattggtagacataaaacatctgagatgatgcagtatctcacaattccatatggtcaatccttctagtccatggcattgtttttctggtaattaccatataaatcattttaaaagagtgacaaatattaaccttttggaatgtgtgaaaaggagaaaagcaaaggttggaattctggtgaattcataaaaatgaattataatgcagttcattatctgctagcactttttcatcagtgttttgctcagctctgg

SEQ ID NO: 55615 - DNA, 600 bp, Chicken  19866894309345_1
tctctgccagagagtttaacagaaagctggtgggccaggcagcacagacagagcacactttgcaagtcatttccatgaggagtggtttaaactggtagccaggaagtagagaacctggatagcaaacagaaccgtaacacctcaaccttgcctttcctattagtgaacagcccaacacagcacagtgaggagcagccattgtctttacctcaggcaaaaagaaaaggtcccccacctgctgaaatgtatatccttctgctcctcccaaagagcaggactacaagaatctacctgagcttwgtctgttgccgttgcatttgtgttggctttttccttcagagaaagcagatatttggcagaaacgttcttttagtaaagactgatattttgaaaagagtcaagtgaggygttgttgatcaacctcgattctgctttacatgctccataagtaataaagtccacttattaaaggcaagacaaaggtagaaaacactctagtcaaggaaggaattattcattctaaataacagaagtcaattctctgcagaacacacacttaaaccacaaaaataaagtaaaattaaatcaccaaagtgcaaa

SEQ ID NO: 55616 - DNA, 600 bp, Chicken  19866894309345_2
gagaacctggatagcaaacagaaccgtaacacctcaaccttgcctttcctattagtgaacagcccaacacagcacagtgaggagcagccattgtctttacctcaggcaaaaagaaaaggtcccccacctgctgaaatgtatatccttctgctcctcccaaagagcaggactacaagaatctacctgagcttwgtctgttgccgttgcatttgtgttggctttttccttcagagaaagcagatatttggcagaaacgttcttttagtaaagactgatattttgaaaagagtcaagtgaggygttgttgatcaacctcgattctgctttacatgctccataagtaataaagtccacttattaaaggcaagacaaaggtagaaaacactctagtcaaggaaggaattattcattctaaataacagaagtcaattctctgcagaacacacacttaaaccacaaaaataaagtaaaattaaatcaccaaagtgcaaaatactgcaaaactctgagttactctttgatttgatcatttaggaacaactacgccaaagcaggaaatgctggaggaaatgctggacagaattcacccccctccttctc

SEQ ID NO: 55617 - DNA, 600 bp, Chicken  19866894309348_1
ccgtcacccttaccgtgaagaagttccttcgcatatttggtgcagaacttcctatgctcaagtttatggccgtttctccctgtcctgtccccacagaccgctgaaaagaggttggccatgtacacttaagatatttataaactttaataagatcacctctgagtcttctattctcaaggctgaacagacccagtttgctcagcctttcctcataagagaggtgctccaggccctttatcatctttgtggccctccactggattctttctaggagatccttgccatttttatactggggarccggggagcccagaactggatacagctctcagtgaagcctgaccaaggcagatctgaggggggaggatcacctcccttgccctgctggccacactccttttaatacacaccaggatcctattggccttcttggccaccagggcacactgctggctcacggccaacctgttgttcactaagacccctgtgtccttctccacagagctcctctccagcagatcattccccaagctgtactgacacttgcagttattccttcccaggtgcatgactctacgcttactttttttaaatctcatc

SEQ ID NO: 55618 - DNA, 600 bp, Chicken  19866894309351_1
acacacacaaagaaagcttgcaatgaatgacctgtctcccaaatttattcattttgcacatctgacatttatgtggctatcaaagagagatgtgaggtatgaaggtgtctgttgtcaaattataaatacagacttagaagacatttacaaattaactttgtgcacttaaacatgatgaacactgttcagttgttactttttcttttacatcatctaattgtttcttcattttctatcactatgtatgaaatctgtcctctttataaatagtagtacaagacacaatcacatttgaaaacwttctatcagtagcaattgccggtgccagtaatagacagaaaactttagtgaagagttgagtactggaaacaaaaggtataaagaaaccaattagagacagtccaatatgactctatctgtctacctattttttggacatgaactggcgcacctattacaggtttcccaggaccatggccaagcagcttttgaatatctccattgagggagactccaatattttttttattattactattgattttatatatatatatatatatatatatataagcacatatatatgtacacatgacaagt

SEQ ID NO: 55619 - DNA, 600 bp, Chicken  19866894309358_1
atcgttgtttctatttactcaaataattgttaattcatttcctccatctgttccagtattgtttttctctttcttcttctttcccaacaatactcactgcttccccggttcctgtcttggttaaaaaatgtttaattgaaagtctataaggggtaaatcagaatgcatatgtacatataaattagtcatatacacacagaattactgggatgaatgttaagttctaaaccagtacttaacttatctataggtattgatatatttccttagactatcagcttgatatgacctcattctgtyctgtctctgattcttgtyggagacatagcataagcctctgagatgaaagttctttagtagtttgtcagaagactatcagcattacaaggctatgcaytactgtagtgatacagtaataaaactgttctttttgtaataaaagtttctggtaaatagtatttttatgacctagagaaatatgattatttaagtaatgctttatctttaagtgttctttacttcctttcttatttgaaagcaattatcaaatgacgtctttgagattgccttcctgagaaatccatagactagttcttgcta

SEQ ID NO: 55620 - DNA, 600 bp, Chicken  19866894309358_2
tcaaataattgttaattcatttcctccatctgttccagtattgtttttctctttcttcttctttcccaacaatactcactgcttccccggttcctgtcttggttaaaaaatgtttaattgaaagtctataaggggtaaatcagaatgcatatgtacatataaattagtcatatacacacagaattactgggatgaatgttaagttctaaaccagtacttaacttatctataggtattgatatatttccttagactatcagcttgatatgacctcattctgtyctgtctctgattcttgtyggagacatagcataagcctctgagatgaaagttctttagtagtttgtcagaagactatcagcattacaaggctatgcaytactgtagtgatacagtaataaaactgttctttttgtaataaaagtttctggtaaatagtatttttatgacctagagaaatatgattatttaagtaatgctttatctttaagtgttctttacttcctttcttatttgaaagcaattatcaaatgacgtctttgagattgccttcctgagaaatccatagactagttcttgctatacaacatcattatttta

SEQ ID NO: 55621 - DNA, 600 bp, Chicken  19866894309358_3
tgcttccccggttcctgtcttggttaaaaaatgtttaattgaaagtctataaggggtaaatcagaatgcatatgtacatataaattagtcatatacacacagaattactgggatgaatgttaagttctaaaccagtacttaacttatctataggtattgatatatttccttagactatcagcttgatatgacctcattctgtyctgtctctgattcttgtyggagacatagcataagcctctgagatgaaagttctttagtagtttgtcagaagactatcagcattacaaggctatgcaytactgtagtgatacagtaataaaactgttctttttgtaataaaagtttctggtaaatagtatttttatgacctagagaaatatgattatttaagtaatgctttatctttaagtgttctttacttcctttcttatttgaaagcaattatcaaatgacgtctttgagattgccttcctgagaaatccatagactagttcttgctatacaacatcattattttagtagttactcaatagtcagtacagaagggatcaagcctctgctgctagtcatctgttgcaaagctaggtgttcagagta

SEQ ID NO: 55622 - DNA, 600 bp, Chicken  19866894309362_1
ttctgccgtgggaatgtaagcaggcaagaccttcacaaaggcttttatatagaccttacctatagcttagagcctggaacacgcacttcataccttcattcattccactgaatcaaagtttcagtagtccattactactcagagttctatagcagttgaaatcatcaaaggttattgcaggtgttccctgtattctacacaactccttgtgagataggaaggaggaaatactacctctgaataaataaaagacctgaggcactgaggtgctaaaatcattcagttaactgcatatcaccygtctatgggagagctggcaaatgtctcatctcctatctccaaggcaggtcccttaatcacataacaattcatctcctgggttaaagaaactgcattataagcagagagaaaaaaaaaaaatcctgaacaacacataatgagctgacaaatggggattaggttttcaggtcactgtactaaatattgccactgaacagcattagatttgcatagcttgggttgctaagaatggatcatgttaagttcttcatatttttsgctaggacaaatccacgagaactacagtacagacaggtgcac

SEQ ID NO: 55623 - DNA, 600 bp, Chicken  19866894309362_2
gcactgaggtgctaaaatcattcagttaactgcatatcaccygtctatgggagagctggcaaatgtctcatctcctatctccaaggcaggtcccttaatcacataacaattcatctcctgggttaaagaaactgcattataagcagagagaaaaaaaaaaaatcctgaacaacacataatgagctgacaaatggggattaggttttcaggtcactgtactaaatattgccactgaacagcattagatttgcatagcttgggttgctaagaatggatcatgttaagttcttcatatttttsgctaggacaaatccacgagaactacagtacagacaggtgcactgggtcacaagaatatgtctgcatgaggggatggttttcccctggtttgccctttgagcacaagttgctactcatactgtagccatgagtaggagaaatcgatgggttatactgtcagatgctgctttgctacaatcctatttattaatagaggagcggatttgcttctctaaactggcaattctctggttttgttcttactttaatttttacagaactgtaagttagctttctgaacaaggactgttcccaatctct

SEQ ID NO: 55624 - DNA, 599 bp, Chicken  19866894309365_1
  misc_feature (1)..(53): n is any nucleotide
nnnnnnnnnnnnnnnnnnnnnnnnnnnnnnnnnnnnnnnnnnnnnnnnnnnnntgcgtgtatctaatcttaaagctgcctgcttttgagtaatactctgtttaccttctgtctttcatattatttttcagccatggtcacatttcactttttgttgggcaatgagaaataccctgactgctatgaaatgtgtatataatgcctttactactactactatatcagctgttatcctaacggttatccttatggcttctaaaagtatagtgggtgtcatggcactactagaggagcaaatggsctggcttgcactgaccagttagcgctggcttgcactgaccagtkagcactaagaagagggtaagatgttggggacacatgagggtatagaggatagatgccattcatgtttctagtttttctggtactgaytgcccaaatgcttttagacattgacagcaaatttgctcatcaaacatcagactcagtaagaggcactactgcaaagctaacctgatgcaaggttacaggtagggctttcttcactagcagaggcatctgtagaagccctgagatttcagcactaaatgttctgcatct

SEQ ID NO: 55625 - DNA, 599 bp, Chicken  19866894309365_2
  misc_feature (1)..(9): n is any nucleotide
nnnnnnnnntgcgtgtatctaatcttaaagctgcctgcttttgagtaatactctgtttaccttctgtctttcatattatttttcagccatggtcacatttcactttttgttgggcaatgagaaataccctgactgctatgaaatgtgtatataatgcctttactactactactatatcagctgttatcctaacggttatccttatggcttctaaaagtatagtgggtgtcatggcactactagaggagcaaatggsctggcttgcactgaccagttagcgctggcttgcactgaccagtkagcactaagaagagggtaagatgttggggacacatgagggtatagaggatagatgccattcatgtttctagtttttctggtactgaytgcccaaatgcttttagacattgacagcaaatttgctcatcaaacatcagactcagtaagaggcactactgcaaagctaacctgatgcaaggttacaggtagggctttcttcactagcagaggcatctgtagaagccctgagatttcagcactaaatgttctgcatcttataataataaaaaagtagtgctacaacacagaaggttaagcga

SEQ ID NO: 55626 - DNA, 600 bp, Chicken  19866894309365_3
catggtcacatttcactttttgttgggcaatgagaaataccctgactgctatgaaatgtgtatataatgcctttactactactactatatcagctgttatcctaacggttatccttatggcttctaaaagtatagtgggtgtcatggcactactagaggagcaaatggsctggcttgcactgaccagttagcgctggcttgcactgaccagtkagcactaagaagagggtaagatgttggggacacatgagggtatagaggatagatgccattcatgtttctagtttttctggtactgaytgcccaaatgcttttagacattgacagcaaatttgctcatcaaacatcagactcagtaagaggcactactgcaaagctaacctgatgcaaggttacaggtagggctttcttcactagcagaggcatctgtagaagccctgagatttcagcactaaatgttctgcatcttataataataaaaaagtagtgctacaacacagaaggttaagcgaaggacagtttgtgtcaatcaatattgacagtgtttttctaaggtttatgaagagttagtacatgggccttgaaagcttaagttttact

SEQ ID NO: 55627 - DNA, 599 bp, Chicken  19866894309368_1
  misc_feature (1)..(38): n is any nucleotide
nnnnnnnnnnnnnnnnnnnnnnnnnnnnnnnnnnnnnngtaacagaagctaggcatctatcagtcagttaggatctttcttgatgctgcaagaaatctgggtcatgggaagtgtctggaggtagtttggagcagtgctgcttggtgatgcctcactggggttttggctcttgggcacaggaactgctgcaggtcctgttaatcttggaaccagaaagtggatgctagattactgcaaaaaaacgttttggtttttttggtgggtttcaataggacccatttattctgactcataaatctstgctctagataaaggtccttcaaaggctgagactgcaggcagaggagtggtgtgcagtgctgtgcatgggaggtatggagcagtggcttgtgcattgctctgctgtgcagtagggccgctggatttaggtagtgtggggcttttcaggcatgtrgtttgtcatttgaggatcctgattgtagcacagactttttttaagaaagtgtgaacacctatctcaacttttatatattgtttttcctttgtaaaacaagaaacgttcctcttcttcaccttgtctaaatgaaacctttcctggc

SEQ ID NO: 55628 - DNA, 600 bp, Chicken  19866894309368_2
ctggggttttggctcttgggcacaggaactgctgcaggtcctgttaatcttggaaccagaaagtggatgctagattactgcaaaaaaacgttttggtttttttggtgggtttcaataggacccatttattctgactcataaatctstgctctagataaaggtccttcaaaggctgagactgcaggcagaggagtggtgtgcagtgctgtgcatgggaggtatggagcagtggcttgtgcattgctctgctgtgcagtagggccgctggatttaggtagtgtggggcttttcaggcatgtrgtttgtcatttgaggatcctgattgtagcacagactttttttaagaaagtgtgaacacctatctcaacttttatatattgtttttcctttgtaaaacaagaaacgttcctcttcttcaccttgtctaaatgaaacctttcctggcacaacctgtctcatacagcatccatagaatatagcactgagtagtaattcttgtgatagataaatgttgatatttctgctctgtaaataaaagctaagtaggaggaagcaaccttaccttgaaagttagtcttccatctaaacctctgtaatgac

SEQ ID NO: 55629 - DNA, 600 bp, Chicken  19866894309371_1
ctcgtatgggtagtagagactaaatgaacataactgtttgactaaaagaatttgacaacacatggtaggaatgttagaattcttagcacagcaaggcagaagtgagcactgaagttgaaaccgcaccttcatcaattactttgtgaggagacacataagagtttttgaaggagttgaaacaagctgtgggaatatttacatgtgagcagtgttcctataatcaactaagggaacattatttctgtccagatgtatgtaggaaataaatttgctgacttttgtgataattgctatttcatrctgttttctaaaagagtctgtatcttacagatagattgacatttctccatttgctttcagaataagaagattaacatggaaaagaatactaattcggcacagagaagatatttctttgcaaggtggatgtcttgctgagattcagaaacaaagaaaattctccactttggaagaaaaatgtttcgatgcacatggtgctagaggaaatcatatggatttggggcagctgtatcaatttttagaagaaaaaggatgtgctgacatttttcaaatgtactttggggttgaagggcattaaat

SEQ ID NO: 55630 - DNA, 599 bp, Chicken  19866894309378_1
  misc_feature (1)..(213): n is any nucleotide
nnnnnnnnnnnnnnnnnnnnnnnnnnnnnnnnnnnnnnnnnnnnnnnnnnnnnnnnnnnnnnnnnnnnnnnnnnnnnnnnnnnnnnnnnnnnnnnnnnnnnnnnnnnnnnnnnnnnnnnnnnnnnnnnnnnnnnnnnnnnnnnnnnnnnnnnnnnnnnnnnnnnnnnnnnnnnnnnnnnnnnnnnnnnnnnnnnnnnnnnnnnnnnnnnnnnnacccccatacctcattcaccagcttctccagcttacatagtgctccttgaagaaaataaccaaactctcttctgcccaatttagaaktgagtaaattctgattgcacttaccctcaattacactgctgggagtcagggaaagcagggcattcacctcatgcacaactagttttatctttactcattaccttaccttctatctattgacttggctctatcacgtcacaagaatatactgtaaatgagtctacwtacacatcttgaaaaatctacctgtagtgttagcaatattctaaaytacttgtttgaacagttgtagtcttacttcttagataggtaacctagttcatttgtatttttattgtttattttttgcctgtgaacct

SEQ ID NO: 55631 - DNA, 599 bp, Chicken  19866894309378_2
  misc_feature (1)..(48): n is any nucleotide
nnnnnnnnnnnnnnnnnnnnnnnnnnnnnnnnnnnnnnnnnnnnnnnnacccccatacctcattcaccagcttctccagcttacatagtgctccttgaagaaaataaccaaactctcttctgcccaatttagaaktgagtaaattctgattgcacttaccctcaattacactgctgggagtcagggaaagcagggcattcacctcatgcacaactagttttatctttactcattaccttaccttctatctattgacttggctctatcacgtcacaagaatatactgtaaatgagtctacwtacacatcttgaaaaatctacctgtagtgttagcaatattctaaaytacttgtttgaacagttgtagtcttacttcttagataggtaacctagttcatttgtatttttattgtttattttttgcctgtgaacctcattcagttaattaggtagatctcattttacctaatgattttctccttaaataacttatcttggtgttggatcatattttatgatctcatgcatactttctgtacctcagtttctgtcaaaataaatgtggttggacagtgccagatgcaaagataaaacctaca

SEQ ID NO: 55632 - DNA, 599 bp, Chicken  19866894309378_3
  misc_feature (1)..(2): n is any nucleotide
nnacccccatacctcattcaccagcttctccagcttacatagtgctccttgaagaaaataaccaaactctcttctgcccaatttagaaktgagtaaattctgattgcacttaccctcaattacactgctgggagtcagggaaagcagggcattcacctcatgcacaactagttttatctttactcattaccttaccttctatctattgacttggctctatcacgtcacaagaatatactgtaaatgagtctacwtacacatcttgaaaaatctacctgtagtgttagcaatattctaaaytacttgtttgaacagttgtagtcttacttcttagataggtaacctagttcatttgtatttttattgtttattttttgcctgtgaacctcattcagttaattaggtagatctcattttacctaatgattttctccttaaataacttatcttggtgttggatcatattttatgatctcatgcatactttctgtacctcagtttctgtcaaaataaatgtggttggacagtgccagatgcaaagataaaacctacagtttttaatgcaagaattgtcaacaggtatcagtcagaactctagt

SEQ ID NO: 55633 - DNA, 600 bp, Chicken  19866894309381_1
gttccacagattgctatggcaaagacagaattctgtattgagcagaaacagtccaacagcaggacacacacagccatgcagagggtatgcaagtatttgtagggacacggacaacgtttgtaagctatgggtctgcaggttaccagagatctcagcacgggggcaaccaggagctaacacaaagcttctgctcactattatcatttgcagaagtctttgtgtaaaaatgaatgaatttatcattacaatttagggatgcatatgcaacttaagattattttaataaaatatttctgcacktgcagaactatttggagcagcacaagcagggtaggcacagcctctatttatcacgtgttgttctgtgtgcaacatttgaatagactgctctaactatttaggtgatacataccaggtctaactgcttttattctkagtgggcacagagctttgtatttaaaagataacacacatgcagatgcatatatgcactgtgaatatgttgcaagaatatttgtgggctctagtgtgtgaatgcacatgtgtgcacataagcatgtgtttgtggtgtaagagatgcagtggggggctaacagcatt

SEQ ID NO: 55634 - DNA, 600 bp, Chicken  19866894309381_2
caggttaccagagatctcagcacgggggcaaccaggagctaacacaaagcttctgctcactattatcatttgcagaagtctttgtgtaaaaatgaatgaatttatcattacaatttagggatgcatatgcaacttaagattattttaataaaatatttctgcacktgcagaactatttggagcagcacaagcagggtaggcacagcctctatttatcacgtgttgttctgtgtgcaacatttgaatagactgctctaactatttaggtgatacataccaggtctaactgcttttattctkagtgggcacagagctttgtatttaaaagataacacacatgcagatgcatatatgcactgtgaatatgttgcaagaatatttgtgggctctagtgtgtgaatgcacatgtgtgcacataagcatgtgtttgtggtgtaagagatgcagtggggggctaacagcattgcaaccatatgtgctcttatagagaacacgtgtcccagaagaaaccatcctggtgttctttctctgctctccaaggttaacttaaataaaacaaagaaagcagtttcccttctcaataattcatggctttcttta

SEQ ID NO: 55635 - DNA, 600 bp, Chicken  19866894309390_1
ctcagcgatggggatggaagggtggctgcacttggtgctgcacagtgtattcacagaggcagccgacaggataagcaggaggacttgaataatggtgccactgaaaggcattctctttagacgtattgagtggcttgcagcttttctatgttctatgtagtccccccataggtgaggagtccatacatgtgccataactgaggcacagcctgtgcaaagatccccagggacctgccacgaggattgacaaaaactaacttccaaggcaggtaaaggcaaaaaatctatacaggggtgtarggaggatggtaaccatgtcattttagactccaaagagctttctagaccatctgcataattctggtatgtgcaacatgggacacaaagggtcctrcacctttctacacagcagctagaggtgaggtcaggatatcgtagggcatctaaaaagcccctgggcaccttcgtttcagttactgaaytcctccttgactccttaaaggcactcaagcacttgccaagcacccacctcagagaggcaggaaggtttaaatggctttaaactggaagagggttgatttagattagatattaagaata

SEQ ID NO: 55636 - DNA, 600 bp, Chicken  19866894309390_2
gtgccactgaaaggcattctctttagacgtattgagtggcttgcagcttttctatgttctatgtagtccccccataggtgaggagtccatacatgtgccataactgaggcacagcctgtgcaaagatccccagggacctgccacgaggattgacaaaaactaacttccaaggcaggtaaaggcaaaaaatctatacaggggtgtarggaggatggtaaccatgtcattttagactccaaagagctttctagaccatctgcataattctggtatgtgcaacatgggacacaaagggtcctrcacctttctacacagcagctagaggtgaggtcaggatatcgtagggcatctaaaaagcccctgggcaccttcgtttcagttactgaaytcctccttgactccttaaaggcactcaagcacttgccaagcacccacctcagagaggcaggaaggtttaaatggctttaaactggaagagggttgatttagattagatattaagaataaattccttaatgtgagggtggtgagacactggaacaggttgctcagagaggcagtggatccgtcctccctagaagcactcaaggccaggctggg

SEQ ID NO: 55637 - DNA, 600 bp, Chicken  19866894309390_3
atacatgtgccataactgaggcacagcctgtgcaaagatccccagggacctgccacgaggattgacaaaaactaacttccaaggcaggtaaaggcaaaaaatctatacaggggtgtarggaggatggtaaccatgtcattttagactccaaagagctttctagaccatctgcataattctggtatgtgcaacatgggacacaaagggtcctrcacctttctacacagcagctagaggtgaggtcaggatatcgtagggcatctaaaaagcccctgggcaccttcgtttcagttactgaaytcctccttgactccttaaaggcactcaagcacttgccaagcacccacctcagagaggcaggaaggtttaaatggctttaaactggaagagggttgatttagattagatattaagaataaattccttaatgtgagggtggtgagacactggaacaggttgctcagagaggcagtggatccgtcctccctagaagcactcaaggccaggctgggtggcgctgtgagcaacccctgggctagagggagctgttggaacaggaggtttggaacgaggtgatcttcaaggtccctttcaacccta

SEQ ID NO: 55638 - DNA, 599 bp, Chicken  19866894309397_1
  misc_feature (1)..(155): n is any nucleotide
nnnnnnnnnnnnnnnnnnnnnnnnnnnnnnnnnnnnnnnnnnnnnnnnnnnnnnnnnnnnnnnnnnnnnnnnnnnnnnnnnnnnnnnnnnnnnnnnnnnnnnnnnnnnnnnnnnnnnnnnnnnnnnnnnnnnnnnnnnnnnnnnnnnnnnnnnnnaatgcattgctatggcattatctgcattggctccagaaggaagcatatgaagatcttcaagcctgggtctccctgcttcaggagccacatgaccctttatcatcagcagataaaagctcatggggaatatagctgaggacacttmattaggctgtggcctctactttaacattctcaggagcacagaatctcctggagctcttctggaacagtgggcctttgcagaggtctggatctttgctgctattcaagccttggaggggtaattatgctacagctgactcataagcaagagaaagcttgtaggctttcagctctctttaattttgcattagacaaaaagtgataaagaatttgttttctgtaatctatggatttaactttgaatagcaggtggtaaatgttccaacaaatatgtatgtatctctcaaatctgtgagtgcc

SEQ ID NO: 55639 - DNA, 599 bp, Chicken  19866894309400_1
  misc_feature (1)..(66): n is any nucleotide
nnnnnnnnnnnnnnnnnnnnnnnnnnnnnnnnnnnnnnnnnnnnnnnnnnnnnnnnnnnnnnnnnnctttacaaatcccagaaatggtttgcacaggcttattaggagttaaaaaaaattactttgaagctccactgtctcatgtgaaagcaacaccttcaacaatgcaatgacatcgagcaattattttgagaaggttggacagtgagggctgtgtgcccactgatgtgttttagagcatgtgggttgtgggtcttgcatttaaaagctgatccaactcactaatgcttaatttgagarataagctgaatttttactagtgagtcactagtatctactaatgttttgaaccagataagtgtctcagagatgaaaattttagagaaaacggtacgagtggatagtgttttgtttttgttgctttttgctttttattttctcaaaggaatagcttcagaagagtccaacttgagaaacagaacctaatggccagcatttccattgggtagtgttaggtgaatgttaaatcatttattgtcttttttggggggtaaaactctccacactattcagggttagcaggtctcaaaacatctcaa

SEQ ID NO: 55640 - DNA, 494 bp, Chicken  19866894309400_2
aggaatagcttcagaagagtccaacttgagaaacagaacctaatggccagcatttccattgggtagtgttaggtgaatgttaaatcatttattgtcttttttggggggtaaaactctccacactattcagggttagcaggtctcaaaacatctcaacttctgacctacagagattggattaactgagacatgagaaagcaaaagaattacgaaacctcaagtttcatagaaattatcacaagacccttgctaattgggcctataagcttgagcccattagttcttttctttgtaaaactrtaatgcaatagctagctagcaaattagtcttccaatgggattctattacagattgtttttgaaagcaggagaagcaaatgtatgaaggtgtacattttctaaattagtaaaagtatagaatgaggaggaaggctgctagctacaagtcacaagccatgtagtctatgccttggaatactcagaaaatgcatttc

SEQ ID NO: 55641 - DNA, 600 bp, Chicken  19866894309409_1
gttaagaaggacagtgctagaagaaatatgacagaaacttgacctgatgatcctggggctgttgacagaccctattgccatttcttgcccagattatgcccagttgaagagaacatggcatggtcatcctcatctcctcaaacaccactgtagagtagctctgctcacattgctccttgacacacttaagcaaagactaagtaaagcaaacaaagattcagcattgaaggtgaaaactgcagcctttatttgctaggtagctgagctagaaactaaagtcaaggttatcagggctatgasgggcctgatgtctgtaggacaatgcatgtgatcttccttgaatcagttttgggggtcactctctggggctttgaaatctcactaaaatttggaataaattgcattttcaccatattaagaagtcacagcctgtgaatgtctccagaaaataagcaactactaccccaatcttaatgaaataatacatttttttctaaaatatttctggaggaggaaatgccaaactgccacgactctctttctagtttatttggattacagagttagatgagacaaggatttctaagatcaatttctttt

SEQ ID NO: 55642 - DNA, 600 bp, Chicken  19866894309411_1
gctagaattgtttagcactgaaacactcagttgtctagtagggcataacctaaatattagactttgcttttctacaaaaaaagcaaacaaaagtctgctgtaatagttgactggtatagctgccacaccaataaatggtttagatgtagcttttgatgattaacaaggggcttttagggcttccttgactagtaccaacacttatcctcaggagactggagtatagtgggatttttgataacagggatatgtcaaaaaattacgtacaaaggcaactttgttacactgacataaatttcyggtgcagacctattcttaggccttgatgatcaaagctcttatttttattaccaaaatataggttgctacatccctttcatacttytgaaaacattgcgtcttgcgtaatgttgtaatccattcctgcagtttggagatacagttttagttttcaattgatcatctaattactggtgtatatattttttaaatgttttcaaaattcatagtctgacttccagcttggcaagctgaccggttcccaagatctctgcaattttattttccatagggaaaagctggcagtgcaataaatagtgt

SEQ ID NO: 55643 - DNA, 600 bp, Chicken  19866894309411_2
aacaaaagtctgctgtaatagttgactggtatagctgccacaccaataaatggtttagatgtagcttttgatgattaacaaggggcttttagggcttccttgactagtaccaacacttatcctcaggagactggagtatagtgggatttttgataacagggatatgtcaaaaaattacgtacaaaggcaactttgttacactgacataaatttcyggtgcagacctattcttaggccttgatgatcaaagctcttatttttattaccaaaatataggttgctacatccctttcatacttytgaaaacattgcgtcttgcgtaatgttgtaatccattcctgcagtttggagatacagttttagttttcaattgatcatctaattactggtgtatatattttttaaatgttttcaaaattcatagtctgacttccagcttggcaagctgaccggttcccaagatctctgcaattttattttccatagggaaaagctggcagtgcaataaatagtgttttgaaatcagtctgctccatccagcgtttttcaggcagcaaaggcttctgtccaagtattagatgaccatataatgatatcaga

SEQ ID NO: 55644 - DNA, 600 bp, Chicken  19866894309420_1
gaatatgcgtagagaaggaggctccaccattttggaaagaaatgtagtgttctcattgttttcctgtaataaatatattaaatgatccttagtgcaaaataatgttactcttgaacccttgtttttgccccccccctttttttcctcctaattattcagttctcattctgcttctggggtggcttgtggccttctcttttctctcctcctgtctaagaggaaggagacagatatgtgccctttgactgtatttctcagtgcaaagtgtacaggaattgaaggatcctgtcttggatgtgyatgcgtacatgcagcatataatctgtatcacagaaagccagtacaagtaaggaaaactcataatttatctttataactggaggtttcaaaggcattcatacactaacctcaagccaaaccattttgcacttggggtttttcttgctgcggggtttgaggcttcaaaacaatattgcctaagtggatcagtacagcaatacagtgcatgttcttatctcttgttgatgctgggttatgccaagacatgcaatccatggtaaagcttggccttccttcataggtagtattctaaaattcagt

SEQ ID NO: 55645 - DNA, 600 bp, Chicken  19866894309426_1
caggctcaaagctgtgttaatgagggcagctctcccaccgagggagctgacagcactgcagcaggcaacagaggttctggcaccacgctgaatcttgaaaagaaagcctgcttccacccactttaatgccttcattttcacatgaacattcggcaaagacaattcaatataccgtgatttgctagccatgttacagagcaataatgcatataaaacagcagaaataagtgttcaaatgcataaattgttgaggaacactagtctgagagttcattgtaatgagctgaggcaaggatatgkaatggctattatgtttcactaacacagatgcttccttgcttttcaaatacatcttacaaaaacatttacatctatgaaatatttcttactgatttcaagctagaactccatgacacagtacatttgaggctaacactaggaaatacatagatgcagaaagtgtcccaatgctatagtttgaataactgggtttccagacacaagagtgttggaaacaacaccactgtacacaactttacacaagcaactcgctatgccatcctgataatggcatacagttcaaaagagctgtctcacaca

SEQ ID NO: 55646 - DNA, 600 bp, Chicken  19866894309430_1
gcacatgggaccaaatatttagagaagttcttagtgttaaaaataaatacacatcagtgcatagcacgtacaagagaattagttagctaacttttattgtatatataccattatatgatttacttgttgagtaaatcatttgaatgagcaaattcaggtgcaagcctgcagtgaagctcggtgcttagaaagcttggctgcctgtctgtctgtccctttctctggggaatgcagacgtatctctggagcaggcagactgtcacaaggcactgggaaaactgcttttgacacctgtactcrgaaaacattgttttccttggtgtgaagtttagtttgcttttagggatgcaaggatgcaagaaatgtttttcatcaaattaagaaaaatgaaggcgcttctgtagcagactaattagatatctatctaaaataaatgttttttttaacgcctgatttcttttttaaatatataaataccagctagtggtttaaagctcctgtagttgtgaatggctctgctgtcccacactgcaagctaagtttttattacttcttcacaagaaatttattttgctgacatgggccctaatccagtaaagt

SEQ ID NO: 55647 - DNA, 600 bp, Chicken  19866894309436_1
cccagtcccaacccctgccatgggttggctgccccccagcagctcaggctgcccagggccccatccagcctggcctgagcacctccagggatggagcacccacagttctatggacagcctatgccaaatggtgtaattgaatagtgtgcagctgaggtttttcttcagaccttaattcctggctgtgctcgtctctctgctcctttcctcctatctcagagatgcaaagccaaggctgagcttggctctgggcggagagaacgcaagtactgagggacatggtttagtgggaagtactgrtgataggtggatgattggactggatgagcttggagctcttttccaaccttagccattctatgattctataattctatgataagtgaactgctgcagctcttggtgcctccaccaggacactgccacccgctcaggcctccagcatggcgcagtgcccttgcatctggcgtgcagaactgaggacgtgtgttggcatggccgtgggatgggatgaagatggcggtgggctgctgtgtgaatggagccctgctgtgccctctgctccctgcacatggctgcacgtcttcaactcggtgtgct

SEQ ID NO: 55648 - DNA, 600 bp, Chicken  19866894309441_1
gacaaaatagctgatttcctgaaatctaacacttttgtattgaatgagtagttttattcatagcagtgagatttctattttgacaaacctggtgaaatcttttctcaatcaagatacaaggacgagcagaagattaccagctttcggtcataatctggtgtcccaccaggggatgtgcagtgaaactgtggggtgcagaggtcctcgagtcacccctgactaagagaggacaagcatgggtttcagaagaatccagctgtttttgtagaagcactgcatctgctctcactcctcagaaaygtgacagcaagttgtgcttgcttgctttgcttctcactatttccctgctggcttgccctaccaaaattatcaggatcacaataaaaaatgccacagcatttcaccccagcacagatatgccttaggcctagaaactggactaggctgttatcataaaaacacagatctcttaaatacatagcaattacttctgtttgtattcagtaactcctccaaatctatccacctgtctcttcaacttacartgatgactcactgacaatgttaatgaaacatgagagggctccatcagtttgtgaa

SEQ ID NO: 55649 - DNA, 566 bp, Chicken  19866894309441_2
gaagaatccagctgtttttgtagaagcactgcatctgctctcactcctcagaaaygtgacagcaagttgtgcttgcttgctttgcttctcactatttccctgctggcttgccctaccaaaattatcaggatcacaataaaaaatgccacagcatttcaccccagcacagatatgccttaggcctagaaactggactaggctgttatcataaaaacacagatctcttaaatacatagcaattacttctgtttgtattcagtaactcctccaaatctatccacctgtctcttcaacttacartgatgactcactgacaatgttaatgaaacatgagagggctccatcagtttgtgaacaactgggaaacagcaactgactacaaagacattttccatcctttttttttttttttttcaacagatcagtcaggtttgtattatggtccctgcctgcatgacatagctcagactaggaagtgtctgtcttccaggtttttaatcagtctccttgagattccagatgtgccagaactgctgcttttgcaactgtcatataacaaaatcaca

SEQ ID NO: 55650 - DNA, 600 bp, Chicken  19866894309444_1
gtaagcagtcttgggattcatctgcttgaaatgtgatagatttcacaaagttcatctttgttcttccttagagaagaggggaaggggaaataagatgtactgagagaatcattacacaactgtgtttacgttaagcagtgtgtgcagctatttaaaccagtagttcatctgctgaatcttcccattgcttcttttccccttgggaatttccttcccttctgcaaaaattacctgtaagttcattaagcacagagtttgcagacgacagggatggtttctaagtgtcgattggtggcgttytagcttttatgtggaygtatgcagatgcattatatataaatcttgtttgtaacctgtctctaattttcttacagggagatggttggcaatacttgaatcctctctggaagagcctttgacaagatacagcagttgtcttataactttaccttaaaggcattataaagatacagtatataacttgtaaaatgtctctgagtaggtctcgttatcagaagatacgaatgagaagctatatactgtgaacagtgcatctcaaataaccacaagctcaaggtgattcaggagccatttggtgtg

SEQ ID NO: 55651 - DNA, 600 bp, Chicken  19866894309444_2
ttcatctgcttgaaatgtgatagatttcacaaagttcatctttgttcttccttagagaagaggggaaggggaaataagatgtactgagagaatcattacacaactgtgtttacgttaagcagtgtgtgcagctatttaaaccagtagttcatctgctgaatcttcccattgcttcttttccccttgggaatttccttcccttctgcaaaaattacctgtaagttcattaagcacagagtttgcagacgacagggatggtttctaagtgtcgattggtggcgttytagcttttatgtggaygtatgcagatgcattatatataaatcttgtttgtaacctgtctctaattttcttacagggagatggttggcaatacttgaatcctctctggaagagcctttgacaagatacagcagttgtcttataactttaccttaaaggcattataaagatacagtatataacttgtaaaatgtctctgagtaggtctcgttatcagaagatacgaatgagaagctatatactgtgaacagtgcatctcaaataaccacaagctcaaggtgattcaggagccatttggtgtgtatggatacacagaca

SEQ ID NO: 55652 - DNA, 600 bp, Chicken  19866894309444_3
ctgagtaggtctcgttatcagaagatacgaatgagaagctatatactgtgaacagtgcatctcaaataaccacaagctcaaggtgattcaggagccatttggtgtgtatggatacacagacacactcacgtgtacgatatacgcacatataaacacacagtatgcatgtgtgtttgtgtgtgggtgttacttacactacacataaacaaagtataaacactaatggtgatttaaagaccttatcctttaaacattagggcacagaactctggctgccatcagctggggttcccgagttgygtgcttgcaggatcaggccctgtgctagtatttaaaaaccacttttttattagtactggttaaggttttctatttttcacttttgccaaaaatgttttgcacttgaaatgtgacgtcacttaatggcagtcgttccgttccaacagtcacggggtaactcactttgacgtatgaatgacgcattgacagcgctctttgggatgctgatttaagagcatgtttctggcacttgtggtgtgaatttcctgctcttacaagaagtagcaataccttctcaaggacgttgttggcactaacccg

SEQ ID NO: 55653 - DNA, 600 bp, Chicken  19866894309462_1
acttatatttttcttcactgcactggttgttacattattactctatctttgcagtgaggcttttggagtctgtgacagctggattttgcagacttatttactctattcctgaatatcatcacagttaagagaaggtgctacatgtcaagctcaggagatttcaagtttgatcttggtaagtgagtatcaggaaattctttatagcttttttatttgtatgctgttgaagcttgtcagctgcagaactgcaagatctgctaaacgaatggcctcaaaagtctatgtgttatcatgccactygttgcttctcacttcatatcaacactttacacaagctgtgcaacctcactgtagtttcatatgcttacttgggaaaatttcattaagaaactccacttcttcctggaaattcctatgtgggtactcctggtgggaaggcttcatgaaattcttacgtgaataaaagaagctctgaaaaaaatagaagtatatgttagatatcaaatatatctgcctacaacctaaaagcaatttagaaaatttaatataagctttcacaggacatgacttctccatgtcaacaatgctgctagccgtatg

SEQ ID NO: 55654 - DNA, 600 bp, Chicken  19866894309462_2
ctgtgcaacctcactgtagtttcatatgcttacttgggaaaatttcattaagaaactccacttcttcctggaaattcctatgtgggtactcctggtgggaaggcttcatgaaattcttacgtgaataaaagaagctctgaaaaaaatagaagtatatgttagatatcaaatatatctgcctacaacctaaaagcaatttagaaaatttaatataagctttcacaggacatgacttctccatgtcaacaatgctgctagccgtatgtttattcctagcttgattagtaagctacaggagasagcaaacttctgaattggttttacacacaaaaaaattcaattatttcagcactgactacataggcatggaagttcttcacctttaagtaaccttaactctacacagtagcatttataaagcagcgatctttaaaaggcaaatagaaggctragttccatagcagagcaaayagtcatataacytrttctgggaagcaaacaactaagaaatatttgaaataagaaaaaaatacaaaacgaattggaaatattaataaaaggcttgctgtctatttgaagggagatgcatttttagcactt

SEQ ID NO: 55655 - DNA, 600 bp, Chicken  19866894309462_3
gtatatgttagatatcaaatatatctgcctacaacctaaaagcaatttagaaaatttaatataagctttcacaggacatgacttctccatgtcaacaatgctgctagccgtatgtttattcctagcttgattagtaagctacaggagasagcaaacttctgaattggttttacacacaaaaaaattcaattatttcagcactgactacataggcatggaagttcttcacctttaagtaaccttaactctacacagtagcatttataaagcagcgatctttaaaaggcaaatagaaggctragttccatagcagagcaaayagtcatataacytrttctgggaagcaaacaactaagaaatatttgaaataagaaaaaaatacaaaacgaattggaaatattaataaaaggcttgctgtctatttgaagggagatgcatttttagcactttacctgaattgagtcaaacccactgtactccctagcaagctccaacaggggaaccagtgcttgcagtaagagggtggtaccacacgtcttcaaaatgaaacgtctcttggagacaaacatgctactctcactgtaaaagcaatgagaaaaa

SEQ ID NO: 55656 - DNA, 600 bp, Chicken  19866894309462_4
atatctgcctacaacctaaaagcaatttagaaaatttaatataagctttcacaggacatgacttctccatgtcaacaatgctgctagccgtatgtttattcctagcttgattagtaagctacaggagasagcaaacttctgaattggttttacacacaaaaaaattcaattatttcagcactgactacataggcatggaagttcttcacctttaagtaaccttaactctacacagtagcatttataaagcagcgatctttaaaaggcaaatagaaggctragttccatagcagagcaaayagtcatataacytrttctgggaagcaaacaactaagaaatatttgaaataagaaaaaaatacaaaacgaattggaaatattaataaaaggcttgctgtctatttgaagggagatgcatttttagcactttacctgaattgagtcaaacccactgtactccctagcaagctccaacaggggaaccagtgcttgcagtaagagggtggtaccacacgtcttcaaaatgaaacgtctcttggagacaaacatgctactctcactgtaaaagcaatgagaaaaatacattaaacacttaataca

SEQ ID NO: 55657 - DNA, 600 bp, Chicken  19866894309462_5
aacctaaaagcaatttagaaaatttaatataagctttcacaggacatgacttctccatgtcaacaatgctgctagccgtatgtttattcctagcttgattagtaagctacaggagasagcaaacttctgaattggttttacacacaaaaaaattcaattatttcagcactgactacataggcatggaagttcttcacctttaagtaaccttaactctacacagtagcatttataaagcagcgatctttaaaaggcaaatagaaggctragttccatagcagagcaaayagtcatataacytrttctgggaagcaaacaactaagaaatatttgaaataagaaaaaaatacaaaacgaattggaaatattaataaaaggcttgctgtctatttgaagggagatgcatttttagcactttacctgaattgagtcaaacccactgtactccctagcaagctccaacaggggaaccagtgcttgcagtaagagggtggtaccacacgtcttcaaaatgaaacgtctcttggagacaaacatgctactctcactgtaaaagcaatgagaaaaatacattaaacacttaatacaaagcaggagaca

SEQ ID NO: 55658 - DNA, 600 bp, Chicken  19866894309462_6
cctaaaagcaatttagaaaatttaatataagctttcacaggacatgacttctccatgtcaacaatgctgctagccgtatgtttattcctagcttgattagtaagctacaggagasagcaaacttctgaattggttttacacacaaaaaaattcaattatttcagcactgactacataggcatggaagttcttcacctttaagtaaccttaactctacacagtagcatttataaagcagcgatctttaaaaggcaaatagaaggctragttccatagcagagcaaayagtcatataacytrttctgggaagcaaacaactaagaaatatttgaaataagaaaaaaatacaaaacgaattggaaatattaataaaaggcttgctgtctatttgaagggagatgcatttttagcactttacctgaattgagtcaaacccactgtactccctagcaagctccaacaggggaaccagtgcttgcagtaagagggtggtaccacacgtcttcaaaatgaaacgtctcttggagacaaacatgctactctcactgtaaaagcaatgagaaaaatacattaaacacttaatacaaagcaggagacaag

SEQ ID NO: 55659 - DNA, 600 bp, Chicken  19866894309467_1
tgtgatgatagatgcactctcagggatgagctgggccacttgacagaagagctgccaccatgatggcatggcagctggggtcagctggggctgcagtgtctttcccatagtgaggagcccaacacagaacacattactcgaggtacagtctcaccacagccaagtacagaaggaatatcatctccctagtcctgctggctacactatttctgatacaagccaggatgccactggtctttttgactacgtgggcacacttctggcttacattcagccgactgttaggtaacaccttgatayccttttcctccacacaactatcctgtattgatgcagggttgttgtgattgaagtggaggacctggcacttggttttgctaaagctcattcacttggtttcagatgatctatccagcctatccagatcactctgaagagccttcctaccctcaggcagattgacacttcctcccaacttggtgtcatcagcaaacttactgaaagtgcactcaattctcttgatcaaatcatcaggtacctctggcaacatcactagtgagtgactggctgccatgtggattcaactccattcacaatctc

SEQ ID NO: 55660 - DNA, 600 bp, Chicken  19866894309474_1
ctccagggcaggctttattatttctttttaaaaattcttcacagtaaaatgacaggcgtaaatatcaccatagcaacaccttacctcaatatttgtatatttacctctctttacaaactacagaagtgcaatgaaaacctgttccaaacgactgcacaatgtatgaaaatctctctctgagtttagaaaccacatttacataccatcaacttcagcacttaggcccttcatggaagctggaaagagatggaaaaacgcaccactaaatatcattcatactttaggatggaagatccaacmaaagttgagggattccattatttgctggctttctccccctctctcctcttaccatcaggaacagcctcaaattctgtcagctcctgagcaaatttcaccagatcaggttcatgtaaggagagctgttccacragggcatgaagcaaggtgaacgtcctctccttgccccgcagcagagataactgcaaatagaatggagcagtaactgacagaccgagctgttacacttctttaaaaaacataggagcagcagagatgttgatagctcctggatagatctgacgagaatagaaaacacaa

SEQ ID NO: 55661 - DNA, 600 bp, Chicken  19866894309474_2
gaaaacctgttccaaacgactgcacaatgtatgaaaatctctctctgagtttagaaaccacatttacataccatcaacttcagcacttaggcccttcatggaagctggaaagagatggaaaaacgcaccactaaatatcattcatactttaggatggaagatccaacmaaagttgagggattccattatttgctggctttctccccctctctcctcttaccatcaggaacagcctcaaattctgtcagctcctgagcaaatttcaccagatcaggttcatgtaaggagagctgttccacragggcatgaagcaaggtgaacgtcctctccttgccccgcagcagagataactgcaaatagaatggagcagtaactgacagaccgagctgttacacttctttaaaaaacataggagcagcagagatgttgatagctcctggatagatctgacgagaatagaaaacacaatgaaattaaacatctccttttcaatctgcagcttctcaggcattctcagttaagatcaaactttatgctttcacatccgttcaccttcattgtgttcttttgtgttttcttattcacacattcttaataact

SEQ ID NO: 55662 - DNA, 599 bp, Chicken  19866894309490_1
  misc_feature (1)..(34): n is any nucleotide
nnnnnnnnnnnnnnnnnnnnnnnnnnnnnnnnnnttcctcttctaggacctgcggaattatcagcgctgtgaagccctcgaggtatgcagaaaccatgttattaatgctattagtgctaattaattctgccaacaaggcctctgcaaccagtcaagacatcaggctttgccaaaaccaacagattaaataaattacaagttctaggacaagcaattctgcagttataatgagccaaaaggaaggttagggaaactctgaaagcatgagctaatttttgaacatccatgcaacataaatgytttgtatattttgcttcaaatttgctatgtattttcagattggttcatttcagttygtatgtgcctgcagaggattagttagctattcagtgaatagttgctataagtgaacagtgacaaaattcacatcttcatgatacaaatcatacttcagttttgaatgtattgcagtgcattacagtagaattctctaaagatgcaggtttctaagaaataattatatagaagtttgtatagcattacacgtacaatgtatgtactgtgagcayattagatgagaaaacacataattaaaaaat

SEQ ID NO: 55663 - DNA, 600 bp, Chicken  19866894309490_2
attatcagcgctgtgaagccctcgaggtatgcagaaaccatgttattaatgctattagtgctaattaattctgccaacaaggcctctgcaaccagtcaagacatcaggctttgccaaaaccaacagattaaataaattacaagttctaggacaagcaattctgcagttataatgagccaaaaggaaggttagggaaactctgaaagcatgagctaatttttgaacatccatgcaacataaatgytttgtatattttgcttcaaatttgctatgtattttcagattggttcatttcagttygtatgtgcctgcagaggattagttagctattcagtgaatagttgctataagtgaacagtgacaaaattcacatcttcatgatacaaatcatacttcagttttgaatgtattgcagtgcattacagtagaattctctaaagatgcaggtttctaagaaataattatatagaagtttgtatagcattacacgtacaatgtatgtactgtgagcayattagatgagaaaacacataattaaaaaattcagttataagtacattcattgttttttgtacagcactcacaacacctctgtggaaa

SEQ ID NO: 55664 - DNA, 600 bp, Chicken  19866894309490_3
taatttttgaacatccatgcaacataaatgytttgtatattttgcttcaaatttgctatgtattttcagattggttcatttcagttygtatgtgcctgcagaggattagttagctattcagtgaatagttgctataagtgaacagtgacaaaattcacatcttcatgatacaaatcatacttcagttttgaatgtattgcagtgcattacagtagaattctctaaagatgcaggtttctaagaaataattatatagaagtttgtatagcattacacgtacaatgtatgtactgtgagcayattagatgagaaaacacataattaaaaaattcagttataagtacattcattgttttttgtacagcactcacaacacctctgtggaaagaaataacaggaatgatttatgtctgcatttccacacctctgcagcagattatactttggaagaggtgaggtgacttttaaccgcacatcaacagctttttccccctccaccatggatgggctccgttatctggaatggctgacaattctcaccttaaggatcctgacaaacagctttaaatattcagttaaacagttcttattcaattaatt

SEQ ID NO: 55665 - DNA, 600 bp, Chicken  19866894309491_1
atgacatgaaaatgctgctctgcctgtccttttatcccaagagggtaacaagatatagctaagtaagtgataactgcttacccacagtcacttgtagcgagtcctaactgcagaaaaagtactgttttcagcattttcctatgattcttctatctctacatacaataaaaatcactccaacttttaaaatccaagggaactgtacacacaaactaattaatgccatactgaaatcaatacatgaaattcgcaaaaataactgacagattcatattacgaatcttctgtaggatggaaaaytttctgttagcatgtacaaatgattccattttgaagcatgctgtttgcatttactacagggaagttagaaaaatatacccatgacggaaatctttgtaacaactgaagtttcttaagtttagtagtgtcttttgtacacttggcaaaacagcaggatttagatccatgatttaggctttcatagctctcctggtccctctttactttctgtgaaaaaaaaaaggagcagctgaagaatatgatgttaaaattgaatcccattaactcagccattacaacgcagacactaatgattagaaa

SEQ ID NO: 55666 - DNA, 362 bp, Chicken  19866894309491_2
acttggcaaaacagcaggatttagatccatgatttaggctttcatagctctcctggtccctctttactttctgtgaaaaaaaaaaggagcagctgaagaatatgatgttaaaattgaatcccattaactcagccattacaacgcagacactaatgattagaaagaagcgtggaaagatgaagagcacgctcacccactggcagtggggaaaaatacaggaatcttttataactagactgtcgatgcatcggttttgtacagtgtcagtgttaacattacgatcaaaagcaattcaagtaragcaatttgaaaacaatattaacgttctaactgaacaccgcatggtgagtaactaaggtcag

SEQ ID NO: 55667 - DNA, 600 bp, Chicken  19866894309496_1
ccaccgcgccgtcccgaacttcgccgcagttagaacaaagcgccgcgcccccagcgtcccggcgacattactgggcggcagctgttggggtcctaaggctgacttaagtgaggttctctccgggccgatcggttagaacgccgggcaagcgagcggggtgcagcggtacgtggggctcagtctcggtctcgcagaggcagggcctccgaatctgaaagaaaggtaaaaggggcgtgaggagtgagtagtatggggttcatcctttcttacagagcctcaaaaactgaattcccttttctyaaactcagagtattaccsctgtagcggcagctctctcagttcactatgtagaaactccaccatgtgtcatcagaataagcgcgcaaagaggtctgcagaggacagaggcgtaacgacagatttaattagcatcacctgcccggctcagcacgcgcagagcagcagtcccgcggctatcgccctcacctgcggcgggtgggctgctcgttctgcaccgtcctgagcgcggctgtacttggggaaactctgggaggagcgtttgtaatcgcagaaataaacatgcaagtaatgcatagagtc

SEQ ID NO: 55668 - DNA, 600 bp, Chicken  19866894309496_2
cttcgccgcagttagaacaaagcgccgcgcccccagcgtcccggcgacattactgggcggcagctgttggggtcctaaggctgacttaagtgaggttctctccgggccgatcggttagaacgccgggcaagcgagcggggtgcagcggtacgtggggctcagtctcggtctcgcagaggcagggcctccgaatctgaaagaaaggtaaaaggggcgtgaggagtgagtagtatggggttcatcctttcttacagagcctcaaaaactgaattcccttttctyaaactcagagtattaccsctgtagcggcagctctctcagttcactatgtagaaactccaccatgtgtcatcagaataagcgcgcaaagaggtctgcagaggacagaggcgtaacgacagatttaattagcatcacctgcccggctcagcacgcgcagagcagcagtcccgcggctatcgccctcacctgcggcgggtgggctgctcgttctgcaccgtcctgagcgcggctgtacttggggaaactctgggaggagcgtttgtaatcgcagaaataaacatgcaagtaatgcatagagtccctccgttagggaacaac

SEQ ID NO: 55669 - DNA, 600 bp, Chicken  19866894309500_1
aattttcaagagtaaactattctcctaggtcaaaatttggtcgtttcttgatgattttattattttgcaataagctatgtaacttaaattacaactgagaaatatgattatgctgtataggcacactaatgttaatatttaatatggctaaccagaatgtgtggcacaaactggcttccttgatgtgaaccctaactgtaaaaacagaactttactgtcagttttcaaaagtaacttctgtgttttatcagatacctaggacaatgtattaagtttattttttactctccaaatattctktcattctgaactgaaaattctttacattttcttaagctggtttctcagaattgtcagctacctttgaaaaccttggccccactctcagtggatactcactaagatcaggttaccattaatctttctagcttcatgtacacaaattaaaattggtatgacctagttcttaaaaatgtgacacttgggatttatacccctctgcatagtttcctctgtagaagagaacagcagatccaagatggcttatatatttgccaggaaatttttccaactgcaaaccatttggggaggattatttct

SEQ ID NO: 55670 - DNA, 600 bp, Chicken  19866894309504_1
atctctgttggcacgaggtagacgaattctgtgcatgtgtttatgtagataattgcataaaaacaagtagaagtccaaagccctggggtaaaaacaacagaattattttataagcagttcagtttatatgtaattgaattcatactggagtgacacttgtacaacacagaattggctgcagagctatcacaatgccttacagaaaccaagtgctgtgaggccaggcagggagggcttcctatgaagaaatctaaggcaaggggaattcagggaaggcaacatcacttcatctgttgtgtraaagaaaaaccatctctgaaaaagctaaacatattccataaggaaaatgatactttaaggaaagtttatcagaaattacatcagagtaggaaaaaatcattgtatatactatagttggtgaatggcaatgaggctaaaagcaagcagagccaaacatgccagctgagaattcagggtttcacaytgatcatccagaagtcaaatgatatttaatacttatatccaagtatcatttcyatcaggtcgagcctgccaaataccaccaattaagaaatgtttttaaatactcaaatatctggg

SEQ ID NO: 55671 - DNA, 600 bp, Chicken  19866894309504_2
tatcacaatgccttacagaaaccaagtgctgtgaggccaggcagggagggcttcctatgaagaaatctaaggcaaggggaattcagggaaggcaacatcacttcatctgttgtgtraaagaaaaaccatctctgaaaaagctaaacatattccataaggaaaatgatactttaaggaaagtttatcagaaattacatcagagtaggaaaaaatcattgtatatactatagttggtgaatggcaatgaggctaaaagcaagcagagccaaacatgccagctgagaattcagggtttcacaytgatcatccagaagtcaaatgatatttaatacttatatccaagtatcatttcyatcaggtcgagcctgccaaataccaccaattaagaaatgtttttaaatactcaaatatctgggattactgtgcatttaaagatcarcatgttcaagaaccacggagacgtggtactaagggacatgctcagagggcatggtggggatgggctggggtttggacatggggatcttaagagctcttttccaaacttctgctaaataagcaaccagcctacaaatgttcagtgagatcatgacaactaga

SEQ ID NO: 55672 - DNA, 600 bp, Chicken  19866894309504_3
cctatgaagaaatctaaggcaaggggaattcagggaaggcaacatcacttcatctgttgtgtraaagaaaaaccatctctgaaaaagctaaacatattccataaggaaaatgatactttaaggaaagtttatcagaaattacatcagagtaggaaaaaatcattgtatatactatagttggtgaatggcaatgaggctaaaagcaagcagagccaaacatgccagctgagaattcagggtttcacaytgatcatccagaagtcaaatgatatttaatacttatatccaagtatcatttcyatcaggtcgagcctgccaaataccaccaattaagaaatgtttttaaatactcaaatatctgggattactgtgcatttaaagatcarcatgttcaagaaccacggagacgtggtactaagggacatgctcagagggcatggtggggatgggctggggtttggacatggggatcttaagagctcttttccaaacttctgctaaataagcaaccagcctacaaatgttcagtgagatcatgacaactagaatgttaatgttacaacaggcttggtgctcccagtaaccggtcagtaaacatgg

SEQ ID NO: 55673 - DNA, 600 bp, Chicken  19866894309504_4
gctaaacatattccataaggaaaatgatactttaaggaaagtttatcagaaattacatcagagtaggaaaaaatcattgtatatactatagttggtgaatggcaatgaggctaaaagcaagcagagccaaacatgccagctgagaattcagggtttcacaytgatcatccagaagtcaaatgatatttaatacttatatccaagtatcatttcyatcaggtcgagcctgccaaataccaccaattaagaaatgtttttaaatactcaaatatctgggattactgtgcatttaaagatcarcatgttcaagaaccacggagacgtggtactaagggacatgctcagagggcatggtggggatgggctggggtttggacatggggatcttaagagctcttttccaaacttctgctaaataagcaaccagcctacaaatgttcagtgagatcatgacaactagaatgttaatgttacaacaggcttggtgctcccagtaaccggtcagtaaacatggtcctccaccacatccttatctctaaattggagagatatgaagggtgggctatttgatggttaaggaattgtttggaagattgcagc

SEQ ID NO: 55674 - DNA, 600 bp, Chicken  19866894309508_1
ggccctcttccacagagggatattcaggaacccttctggatgctcctgaagagatgtggggtgtcagctgctttgagaagtgcacctccccgtgctcctggctgcacaaacaagctcagtacttactagtgaaggtcacatcactaggtggagaaaggaacctaagacagaaatatccctaacatttatcctgaagtgagcctgttttctgcatgacacgacccattagctgtgacttgttatcagcaagaaagatgaagtcaacttgcatttagctaaaatcccttttgagacagaaaygtgccccrggccctgctgtcagaaggatgagcctgtgtgggctctgcaaacryggtgctttgtttggcttgagaactaagctggaggccaggcatttccattctgaaggagggttattttattaaaaggaaagcacaaagccaagatcacatgctgctcctgcaacccctaaatagcaataagataatgtagggactgggagaaggggagtccctgatctgcttcacttctaaagagagaactagcagtgatgtcttgttgtcaactgagcaaggaggcatgagattccacatgatggcc

SEQ ID NO: 55675 - DNA, 600 bp, Chicken  19866894309508_2
tccacagagggatattcaggaacccttctggatgctcctgaagagatgtggggtgtcagctgctttgagaagtgcacctccccgtgctcctggctgcacaaacaagctcagtacttactagtgaaggtcacatcactaggtggagaaaggaacctaagacagaaatatccctaacatttatcctgaagtgagcctgttttctgcatgacacgacccattagctgtgacttgttatcagcaagaaagatgaagtcaacttgcatttagctaaaatcccttttgagacagaaaygtgccccrggccctgctgtcagaaggatgagcctgtgtgggctctgcaaacryggtgctttgtttggcttgagaactaagctggaggccaggcatttccattctgaaggagggttattttattaaaaggaaagcacaaagccaagatcacatgctgctcctgcaacccctaaatagcaataagataatgtagggactgggagaaggggagtccctgatctgcttcacttctaaagagagaactagcagtgatgtcttgttgtcaactgagcaaggaggcatgagattccacatgatggccctatcagt

SEQ ID NO: 55676 - DNA, 600 bp, Chicken  19866894309508_3
gatgtggggtgtcagctgctttgagaagtgcacctccccgtgctcctggctgcacaaacaagctcagtacttactagtgaaggtcacatcactaggtggagaaaggaacctaagacagaaatatccctaacatttatcctgaagtgagcctgttttctgcatgacacgacccattagctgtgacttgttatcagcaagaaagatgaagtcaacttgcatttagctaaaatcccttttgagacagaaaygtgccccrggccctgctgtcagaaggatgagcctgtgtgggctctgcaaacryggtgctttgtttggcttgagaactaagctggaggccaggcatttccattctgaaggagggttattttattaaaaggaaagcacaaagccaagatcacatgctgctcctgcaacccctaaatagcaataagataatgtagggactgggagaaggggagtccctgatctgcttcacttctaaagagagaactagcagtgatgtcttgttgtcaactgagcaaggaggcatgagattccacatgatggccctatcagtgcaaacccacatttctggatccagctactgctctgtaaccaggc

SEQ ID NO: 55677 - DNA, 600 bp, Chicken  19866894309508_4
atgtggggtgtcagctgctttgagaagtgcacctccccgtgctcctggctgcacaaacaagctcagtacttactagtgaaggtcacatcactaggtggagaaaggaacctaagacagaaatatccctaacatttatcctgaagtgagcctgttttctgcatgacacgacccattagctgtgacttgttatcagcaagaaagatgaagtcaacttgcatttagctaaaatcccttttgagacagaaaygtgccccrggccctgctgtcagaaggatgagcctgtgtgggctctgcaaacryggtgctttgtttggcttgagaactaagctggaggccaggcatttccattctgaaggagggttattttattaaaaggaaagcacaaagccaagatcacatgctgctcctgcaacccctaaatagcaataagataatgtagggactgggagaaggggagtccctgatctgcttcacttctaaagagagaactagcagtgatgtcttgttgtcaactgagcaaggaggcatgagattccacatgatggccctatcagtgcaaacccacatttctggatccagctactgctctgtaaccaggct

SEQ ID NO: 55678 - DNA, 600 bp, Chicken  19866894309515_1
ggaaattgcttgtcacgagtcctcttcctactctatccagcttcaaagggaaagactcatttctccttagacctccaaaagaatgatgggagaggggaaggtgatgaaacagttaaatcacagcttttaaaagtaatgaacacaaaaggaaaaaaaactggaaccctgcatacctgagtgtgaagacaagaatgacatgcaattatgtcagtgcaatgacatgaactgcacccatcagaagattctcacatctcagaagaatttagaaagagccacttcatctttctcagtcatcagtcrtcaatgttattagggctttaacttacaaaktgattccccaagacatacagttgcttactttggacattagagatgctgctttcttgctttaacttggagacatggtgcaggtgtagcacaggccaagaaactatccctcaagatcagcaagcaaagagtccagtcaggtacattttgtgtctctgttgattttctcatcggctgtaagaaatacctgttcctcattctagttgatactcactcttgcaagcactgagctgcagtaaggacccattgtggatgtatcagagtgccagcrca

SEQ ID NO: 55679 - DNA, 600 bp, Chicken  19866894309515_2
ctctatccagcttcaaagggaaagactcatttctccttagacctccaaaagaatgatgggagaggggaaggtgatgaaacagttaaatcacagcttttaaaagtaatgaacacaaaaggaaaaaaaactggaaccctgcatacctgagtgtgaagacaagaatgacatgcaattatgtcagtgcaatgacatgaactgcacccatcagaagattctcacatctcagaagaatttagaaagagccacttcatctttctcagtcatcagtcrtcaatgttattagggctttaacttacaaaktgattccccaagacatacagttgcttactttggacattagagatgctgctttcttgctttaacttggagacatggtgcaggtgtagcacaggccaagaaactatccctcaagatcagcaagcaaagagtccagtcaggtacattttgtgtctctgttgattttctcatcggctgtaagaaatacctgttcctcattctagttgatactcactcttgcaagcactgagctgcagtaaggacccattgtggatgtatcagagtgccagcrcaatgatgcatgttggtactacaacagagaat

SEQ ID NO: 55680 - DNA, 600 bp, Chicken  19866894309515_3
crtcaatgttattagggctttaacttacaaaktgattccccaagacatacagttgcttactttggacattagagatgctgctttcttgctttaacttggagacatggtgcaggtgtagcacaggccaagaaactatccctcaagatcagcaagcaaagagtccagtcaggtacattttgtgtctctgttgattttctcatcggctgtaagaaatacctgttcctcattctagttgatactcactcttgcaagcactgagctgcagtaaggacccattgtggatgtatcagagtgccagcrcaatgatgcatgttggtactacaacagagaatacaataacaatttgaatattatattaattatatattaatatattatacaatktaatatataatattttatattattaattatattaatatacaatattaatctaagaccgcacagtcaatatgctaccacctgtgctgtgtgcagtgggaaaaattagcaaacaagcaatatgccccacattcaaatcttttactgctcagggattgtcttatgtcaactgcaagagaaatcaaaagcaacttttcagaggacaaattttatctgctt

SEQ ID NO: 55681 - DNA, 600 bp, Chicken  19866894309515_4
cttgctttaacttggagacatggtgcaggtgtagcacaggccaagaaactatccctcaagatcagcaagcaaagagtccagtcaggtacattttgtgtctctgttgattttctcatcggctgtaagaaatacctgttcctcattctagttgatactcactcttgcaagcactgagctgcagtaaggacccattgtggatgtatcagagtgccagcrcaatgatgcatgttggtactacaacagagaatacaataacaatttgaatattatattaattatatattaatatattatacaatktaatatataatattttatattattaattatattaatatacaatattaatctaagaccgcacagtcaatatgctaccacctgtgctgtgtgcagtgggaaaaattagcaaacaagcaatatgccccacattcaaatcttttactgctcagggattgtcttatgtcaactgcaagagaaatcaaaagcaacttttcagaggacaaattttatctgcttcagaacgagagctatgaaagaaaaatctgaaacccagttgagttttttgggtttttatttttcttctttttttcctagcaatgt

SEQ ID NO: 55682 - DNA, 600 bp, Chicken  19866894309523_1
aaatttcctttgactgtgaattactctaatgttatggccttttgtgtaggcgttgtggaagagtatgtgtaattttatgttccagacagtgtttaactgttgttacgctacatgattaatattttcttgctaggaataaattcttttactttctttgacaattacattcctacttagtttctccgtttttttttccctatgtacttgtcataaacctgtgtactttcctctattcttgtaacaataaacagacaccatttcactgtgcctgcctgtttctgaacacactggattttgtgytgcactgagcactgtgaagagctcaacatggtgtgtgagtgtgtgcacacgtctgtgtgggttccgtgtacattacaaacacaatgagcacaggcgcagactctgaacaactaaacgtagggcatcctggcctgtgaatctgatgctgaggcattcaaatagatgaaatagaggctgttttgaatgcatgcaaggaacaaaattctttatacttaaaagtatatcgacattgcacttcattttagagcatatgatcagaaatattatttgggtgcagtttaaaagaaagcaccacattca

SEQ ID NO: 55683 - DNA, 600 bp, Chicken  19866894309526_1
gtggcacatacagatttcagaaaaactctcgataaacatcttgtgggggctgtactagcagatcaccaaacattattgatgcctttaaaaatttgcaaatcccacatatactttatttttaacacaaggcaggagagaagtatagtttcagagagctgactcatgctaacagtaaacatggaagcaattcaagttaaagctagtaggtatgattcccaaaaataatgctgataactcctttttaatctgtttaactcactagcctttgtctttaattatgtatcttagttcagtcaagamggacatgaagtcttcccctttccctccaatttatttttataactcatttgtctataaagagatttaataactctgagacaaaatgcatttgttgactgtagttataagaatttcatgtatgtgtgtgtctttgtttgctttcaaaacaaaagaaggtctctgaaatgatttcaacaagctgaagttaataagtcctctaggatacttagtgttacttttggggtccagacactgctcagactgctggagcaacttctgtccacctttgcaggggaggagctgtctgtgtagcatctgcga

SEQ ID NO: 55684 - DNA, 599 bp, Chicken  19866894309529_1
  misc_feature (1)..(22): n is any nucleotide
nnnnnnnnnnnnnnnnnnnnnnccccatgcaactagctctcatgcactgcaaaggcagtctcaacaaactgcgtaaagaaaagatatgataattttgtgttgatccaactgattctaccagcagctgaagagtaacaacatacccaaagcatcaatatatgctttacaaagtgcttagcaccacttacatataaaagccttctcagcactctcatttcatcagtgatttggttcatgccatcgacgtacaaaagtgcaatacctgtgtaaacactacatctccttcaagggaagtacttygagcactttcaaaaggcttgaacgtcaccgctgctgcaacccacgctgtgcagctgcaggctgcgtggagtggcagttctggcactgcagtctgctccacccagcccatctgtgatggaaagggaaggcagaagacaagggcgagactggcagctaacagctctcttgtgggaggctgttggaccagcaggacccagccacacactcccaagttaacagagttacttccactagatatatctagggtagggttgtatgcgataggcaacaaggaaaagaaatagcaaaaataagtgctg

SEQ ID NO: 55685 - DNA, 599 bp, Chicken  19866894309535_1
  misc_feature (1)..(107): n is any nucleotide
nnnnnnnnnnnnnnnnnnnnnnnnnnnnnnnnnnnnnnnnnnnnnnnnnnnnnnnnnnnnnnnnnnnnnnnnnnnnnnnnnnnnnnnnnnnnnnnnnnnnnnnnnnngctcccacaggtaaggctctcgggccgcatccctggaaagattgcacacgtgggactgcagccatcaggacgcagcagggcactcccacttctttgtgagcgcgtgcgccggcagcaggagcagaggtggcccagctctgtgtagggaggacaggagagacacgtgagctcagctcagcctttcctctgcccycgtctgtatcggagatgcgcagtggctgtgggtccgtctgatggacataggggtccctgtccctgagctgccccccgtgtggcagtgaccacagagccctgcagggcccatgcagccccagggcagtgggctgcaggacctgtactgcttgagcagcgaggctgtgctgctcagggcagggtgttggggcacggagggacaggagggagcagagcagtgggagctctgtgcagctgggtggtaaagctgggtaggagcacagcgccgatctttgtacatttaagcaatggatgtgggta

SEQ ID NO: 55686 - DNA, 579 bp, Chicken  19866894309542_1
attttgtcctgctgtgtaattaatacacatgtacagtgtggcaaacattttcctgaagcctgcttgttttgcctgtaaattacaggaaatcctatacaatacacctgggagccctgcagtttgaaattagaatggcaactatccccgcttcctcctgcctgctggcttaccagtcagactgcagaactcttttttgtttagacatgtagtaagttcagattgtgacacgcttccttctctttggcttaatatgaatatgagttttaattccaaaatgaacccagtttatggctcactgawttgctacaaaggggtgaaactgcacagaagtttccagttgtgggttttgttctgacacacgcgccacacaaatttgtaaccaaatccccaatgttcaaggaatattggcagtaaaatcaatggccaagccttagttctgtgtgatgtcacatctatatgagccctgagatagtattaaaatagcaacagctgttacttattgtcgacacagacttttcacaggtaagctccatattttcccttcctctccagtacattgtgaatctcagtagaaaagaa

SEQ ID NO: 55687 - DNA, 599 bp, Chicken  19866894309551_1
  misc_feature (1)..(24): n is any nucleotide
nnnnnnnnnnnnnnnnnnnnnnnnctatgcgccaccttgaacgtgttcctgcccatagaaccagcaccacacactgcaccatcagcccatgctcccagtgtcaccactgtcccatgtttctgaacacaaggggctttcaccatcaggaagccatccctgtggcactccacagggctttgtgcggaggatcttgtgcactgcacaggattttgtgcagagaggagctgtcatcagacaggcaggggatcaaggcagcaaagaagaattggagctaggctgtaagcaacactggctttccayggggggttatgtgacgttgactatattcttccctgaaatggagtgagaaattttcagtctcccatgaaacacaattcaaatatcacataaagattgattgaaatattttattttgatagtataaaaatgttttattcctatttcagtttaaagattttatattatgaagcatggtgtatcactatttttacttcaaatgaaatcaatcattggcttaaaatagaggttctttttcagtatttctcccaaagatatgtattttttctttcaacaacaggcacactcttgttaaatgtttc

SEQ ID NO: 55688 - DNA, 467 bp, Chicken  19866894309554_1
aagttggcctttcctaatagctgttctgcagagtaggtgtcacttctcaaaatacctctgttacgtaaagcctgattgatatgagctaaggtgggcagaaaagagttatcaaaatgtgactgtttgaaagagaagaatgtatttttgtttaaagcagtgggagggcataattacctgtgctgaggataggaaagatatgagctcactttgccgacgttaaggtctgcggagtgcagacctccctctttttgtgctttcctgtgccacactgccctgaaatatccaagaggggtttccaawatcccactgcagtcataacataagagccaaacaatgccatgctgtttatccaaagaacattagcagtcagtgtgtttacaccacacaggtagaggtcaatgagtgctgaaggatgcagtgagcagctggctggggcaacttgccctggcatgggagttgcaaacagg

SEQ ID NO: 55689 - DNA, 600 bp, Chicken  19866894309557_1
tggggctggagggagggaagcggcaggcgagcattcctaatgcctctcggataaagggctgtttccataggaatcgggataaaggagcctctctctttcttcccatggcgtgtgaacggggaggtcgtcccgggaacaaatagcccgtggaaggggaacatctgggaacagctgcaaataatcatcacccgttcagggaggctgagagtgggcagtggcactcgggtccgacgcatccctcgtgtcccttgggtgggcaatggtgcgtgtcccttgcccaggctgggagccttgacatarggttggtggtgcaggtgtacatctggaaggagggtgacttggtgagcagttgtaaacctggggaccagaactgagccaagtttgggttgggtaatgtgggtttgagttggataatgcaggtttggattggatagtgcaggttttggttggctggaggtccagcctacagtgtacatttcttgattccttctccttactttgggattcctgctctcccagcggggtctcctccggcacaagactccaggtgtaagggcaagggagaatggaggtaatttcctacagctgctcgaagtgttt

SEQ ID NO: 55690 - DNA, 600 bp, Chicken  19866894309558_1
tgcaatttttaaccatgacctcctgctctttcacagtgtttgagaagaaactggctctgtgctttccacagccacctgttaggtggttaagacaacattagatcaccccttagcattcactttttcaagctgaacaaagacagtcttcttggcctcctctcatacttactctttaatcaacttgggactcctcttctgaaggaatttcttgtacagagaaattcaaaactggataaacttgtctacttgcagtcttgcaagagccaagtagatagttattataacttacactgaccaacyggctacactttgccgatgtggtccagaatgcagygagtcttcactagtgcaagggtgcatagctgacttctgtcraacttgtcgaccaagactgtcggatccttttctactaagctgtttcctgagctgctggtgcccattatgtactgttgtgtggtattactcttacctaggcacagaacaatttttttgtctttactgaaattcaggcagttcctctcagctcatatctccagtctgccagtttcccactaaatgtagaccaatccagcaaactgatgagaattccagcctggtatc

SEQ ID NO: 55691 - DNA, 600 bp, Chicken  19866894309558_2
agtgtttgagaagaaactggctctgtgctttccacagccacctgttaggtggttaagacaacattagatcaccccttagcattcactttttcaagctgaacaaagacagtcttcttggcctcctctcatacttactctttaatcaacttgggactcctcttctgaaggaatttcttgtacagagaaattcaaaactggataaacttgtctacttgcagtcttgcaagagccaagtagatagttattataacttacactgaccaacyggctacactttgccgatgtggtccagaatgcagygagtcttcactagtgcaagggtgcatagctgacttctgtcraacttgtcgaccaagactgtcggatccttttctactaagctgtttcctgagctgctggtgcccattatgtactgttgtgtggtattactcttacctaggcacagaacaatttttttgtctttactgaaattcaggcagttcctctcagctcatatctccagtctgccagtttcccactaaatgtagaccaatccagcaaactgatgagaattccagcctggtatcttccatgaacttgctgaatttgtcattcagtttc

SEQ ID NO: 55692 - DNA, 600 bp, Chicken  19866894309558_3
ctgttaggtggttaagacaacattagatcaccccttagcattcactttttcaagctgaacaaagacagtcttcttggcctcctctcatacttactctttaatcaacttgggactcctcttctgaaggaatttcttgtacagagaaattcaaaactggataaacttgtctacttgcagtcttgcaagagccaagtagatagttattataacttacactgaccaacyggctacactttgccgatgtggtccagaatgcagygagtcttcactagtgcaagggtgcatagctgacttctgtcraacttgtcgaccaagactgtcggatccttttctactaagctgtttcctgagctgctggtgcccattatgtactgttgtgtggtattactcttacctaggcacagaacaatttttttgtctttactgaaattcaggcagttcctctcagctcatatctccagtctgccagtttcccactaaatgtagaccaatccagcaaactgatgagaattccagcctggtatcttccatgaacttgctgaatttgtcattcagtttcaccacccagatccattaagcagggcactaaacagtacaagc

SEQ ID NO: 55693 - DNA, 599 bp, Chicken  19866894309565_1
  misc_feature (1)..(122): n is any nucleotide
nnnnnnnnnnnnnnnnnnnnnnnnnnnnnnnnnnnnnnnnnnnnnnnnnnnnnnnnnnnnnnnnnnnnnnnnnnnnnnnnnnnnnnnnnnnnnnnnnnnnnnnnnnnnnnnnnnnnnnnnnntccctgaaggatatccgagggtctgggtgtgcggaacaccgaccacttcaccgaccggtctttgaagatgttgcagttgatttcatggggccgcaaccactgcttcaccctctgctgcacgctgtcaccttctgggaatcccacagatttggggccagggtggaaactgtcatctacraaattgactttgttctgcaagagcaaaaggtaaggacagcatgagtgtgtgcggcacacgcagctcccggggcacccagctcggagagccacgatcccattccctcctcagggctcccagctgtagctcaaatctgccttcctctgttgtacagaaaccttctgggcagggartgtctcacacctcacaccggtgctaaaagtcagacggtggggaaccttggctgcctctacaagcggtgaagcaggcgagcagcgggcctgcagggagcatctggcaaccagcactccccagcatga

SEQ ID NO: 55694 - DNA, 600 bp, Chicken  19866894309565_2
cgaccggtctttgaagatgttgcagttgatttcatggggccgcaaccactgcttcaccctctgctgcacgctgtcaccttctgggaatcccacagatttggggccagggtggaaactgtcatctacraaattgactttgttctgcaagagcaaaaggtaaggacagcatgagtgtgtgcggcacacgcagctcccggggcacccagctcggagagccacgatcccattccctcctcagggctcccagctgtagctcaaatctgccttcctctgttgtacagaaaccttctgggcagggartgtctcacacctcacaccggtgctaaaagtcagacggtggggaaccttggctgcctctacaagcggtgaagcaggcgagcagcgggcctgcagggagcatctggcaaccagcactccccagcatgagccccacgctaagctgtcctggctctgcagccccagccccgagctccagataatcacagaatgaaaagaataaaataaaacaggatgggctgaaaggcagatgatcctataggtatcagctgcagatgtaggatggaagcccagaatttctccggggggaggagaatggctttt

SEQ ID NO: 55695 - DNA, 600 bp, Chicken  19866894309568_1
ctctgcattgctctgtggtggacgctagatggggtgtcagacaaagagtttcatccaggacatactgggtggaacttttgcaagagttggaagagatgcctgagaaaatcaggatgggagcacacatctgctcgcacagagcttgtgttatggcatgtggtttcttgggacagcaaacagcgcagtgctcacagctctgcctccatagagggtgagagcctcacgggcaatttcagaccgagaacaatgttatctcagcaagggagagtttgaataaagaaatgaggctgatggttgctygcctcgtggatctcagcagatgtaggaacaggatgtggtcctgaacgtgctgcaatggaacagcagctctgaawctctctgggataaaacgtagtgccaaattgcgtcttggaaaggatcagtggcttcagaccttatagtccacactctttcctcgtatctggcagtgtggagcctctgctgactatggaggcaataaggtgtctatagtgaattctttgctgtcattttgtgtccttctgtaaggtcccaccaacctgcatgtctccctgaatgtgtgaaatgcaaagtaatgcgcca

SEQ ID NO: 55696 - DNA, 548 bp, Chicken  19866894309568_2
cttttgcaagagttggaagagatgcctgagaaaatcaggatgggagcacacatctgctcgcacagagcttgtgttatggcatgtggtttcttgggacagcaaacagcgcagtgctcacagctctgcctccatagagggtgagagcctcacgggcaatttcagaccgagaacaatgttatctcagcaagggagagtttgaataaagaaatgaggctgatggttgctygcctcgtggatctcagcagatgtaggaacaggatgtggtcctgaacgtgctgcaatggaacagcagctctgaawctctctgggataaaacgtagtgccaaattgcgtcttggaaaggatcagtggcttcagaccttatagtccacactctttcctcgtatctggcagtgtggagcctctgctgactatggaggcaataaggtgtctatagtgaattctttgctgtcattttgtgtccttctgtaaggtcccaccaacctgcatgtctccctgaatgtgtgaaatgcaaagtaatgcgccagaaacagcagagaggaggagga

SEQ ID NO: 55697 - DNA, 599 bp, Chicken  19866894309570_1
  misc_feature (1)..(14): n is any nucleotide
nnnnnnnnnnnnnnatgtacgctgcagttttgaagaaggatttcttctgttcatccttacttctagaaatagcaagcatatgtaaaagaaataactcagaataaagagggaggaacaacatggttaagtaaaggagtggatcaggaacaacaaagaggagaatgcctgccctttaaatcctcctgctacagcagaatcacttacagctgaacctcacccatacttcaaaatatcatttaaaatgagaaacaaagcacaaaagtgaaaggcgaggtgtgatttgcaattgactattatttwaaaatccagaagtaattctgctgtattgatcttctctatctgagcatcsaagaaggaaattgccccagcactctctcctggggatgagcagcagggtgaccatccaattaaaattcaaggatagtattcccaaaagcctggcatgttaatatcctattactgttaagcaacagataccacatctgcaagaagccatacaacagtccttccataaccataagtttcctgtaattttggccaggttttccagacttgcctttgattttatcagaagccatctggtaattgtcttttcaagt

SEQ ID NO: 55698 - DNA, 600 bp, Chicken  19866894309570_2
ttcatccttacttctagaaatagcaagcatatgtaaaagaaataactcagaataaagagggaggaacaacatggttaagtaaaggagtggatcaggaacaacaaagaggagaatgcctgccctttaaatcctcctgctacagcagaatcacttacagctgaacctcacccatacttcaaaatatcatttaaaatgagaaacaaagcacaaaagtgaaaggcgaggtgtgatttgcaattgactattatttwaaaatccagaagtaattctgctgtattgatcttctctatctgagcatcsaagaaggaaattgccccagcactctctcctggggatgagcagcagggtgaccatccaattaaaattcaaggatagtattcccaaaagcctggcatgttaatatcctattactgttaagcaacagataccacatctgcaagaagccatacaacagtccttccataaccataagtttcctgtaattttggccaggttttccagacttgcctttgattttatcagaagccatctggtaattgtcttttcaagttgcatttttatttagattgcgggggttttaatgttgttattactgcctgt

SEQ ID NO: 55699 - DNA, 600 bp, Chicken  19866894309574_1
gaacggtctgaggcgacagcaaagcctggagtccttctgcgcgctatttacaaacgagagcagcgataatctccgctttccgcccggcgtccgtgccggcacagccccgagctcacagccgggagcccgcgccgctgagtgcgggcagctccgagcacaaccacagctccaccgcacggctctcccctgcgcgccccgcgcagcgcagcgcgcaccgtacgcgggctgctcccaaccctgtccgcgctgcgctcccgggtcacagccggcagctgggactttttttcgtctctatttcckccgtacacccctttatttttaaaaatttctctctttttcttgctttcgctaccgcaaccctcccctttccccggcgctgccgtcgggccgccgccagccgtacctgccggacttggtgatgatcatctcggtgcccagctcgtgaaacttgtcccacagctccttggtctccaggctgcaggagattttggccatctcctcgctggggatgatgggtgtggtggggatgaggggctcggtacacagggccgaggggctgccgctgaagtccccgtggggctccaggccggacagatcgct

SEQ ID NO: 55700 - DNA, 600 bp, Chicken  19866894309574_2
gggatgaggggctcggtacacagggccgaggggctgccgctgaagtccccgtggggctccaggccggacagatcgctcagaggctgcgcgcaggaggacttctcaacgaattgctctgcggggttcgggggagaggagacagagaggggacgttgagccggggcgggctgccggcaaaaagcgctttccaaaaatgaggcatttctcgctcggtcgggcccctccttccagcgctccctcagagcagcgctgctcctccggtcggtgatttgagcgagaatatggggagcctggctccarcccttcatccccaaaagacgggagggatgyccggagccgaccccggctgcgggacgcggcggctgggggctgggggtggctgaggggagagactggaaaggggatttcccccagatctccagataatagaagcaggggtgcaggcagtcgtttcgtttggatttctaagtgaatggcgtggggaaatggatcaaaaaaaataatattggaaaatcgattaagcgagcrtttctaaaaataaaaaaaataaaataatagyagtcataaagagagagagagagagagaaygagagaaatagc

SEQ ID NO: 55701 - DNA, 600 bp, Chicken  19866894309574_3
gggctgccgctgaagtccccgtggggctccaggccggacagatcgctcagaggctgcgcgcaggaggacttctcaacgaattgctctgcggggttcgggggagaggagacagagaggggacgttgagccggggcgggctgccggcaaaaagcgctttccaaaaatgaggcatttctcgctcggtcgggcccctccttccagcgctccctcagagcagcgctgctcctccggtcggtgatttgagcgagaatatggggagcctggctccarcccttcatccccaaaagacgggagggatgyccggagccgaccccggctgcgggacgcggcggctgggggctgggggtggctgaggggagagactggaaaggggatttcccccagatctccagataatagaagcaggggtgcaggcagtcgtttcgtttggatttctaagtgaatggcgtggggaaatggatcaaaaaaaataatattggaaaatcgattaagcgagcrtttctaaaaataaaaaaaataaaataatagyagtcataaagagagagagagagagagaaygagagaaatagccaagcttagcccgcgtaaatgtgcccacca

SEQ ID NO: 55702 - DNA, 600 bp, Chicken  19866894309574_4
cagcgctccctcagagcagcgctgctcctccggtcggtgatttgagcgagaatatggggagcctggctccarcccttcatccccaaaagacgggagggatgyccggagccgaccccggctgcgggacgcggcggctgggggctgggggtggctgaggggagagactggaaaggggatttcccccagatctccagataatagaagcaggggtgcaggcagtcgtttcgtttggatttctaagtgaatggcgtggggaaatggatcaaaaaaaataatattggaaaatcgattaagcgagcrtttctaaaaataaaaaaaataaaataatagyagtcataaagagagagagagagagagaaygagagaaatagccaagcttagcccgcgtaaatgtgcccaccaggctcactgtgacacagccggcctgcacggtgcctcagcaaagaaataaagttggcgacggacccccggaataccctggcggggggctcggagggaacgcgcagagagcggcccttcccgtccccccagcccagggtcacgtcgggcggtggccccgtgagcgcggtgctgatttcttgtagagctctgcactcttgg

SEQ ID NO: 55703 - DNA, 600 bp, Chicken  19866894309574_5
ggtcggtgatttgagcgagaatatggggagcctggctccarcccttcatccccaaaagacgggagggatgyccggagccgaccccggctgcgggacgcggcggctgggggctgggggtggctgaggggagagactggaaaggggatttcccccagatctccagataatagaagcaggggtgcaggcagtcgtttcgtttggatttctaagtgaatggcgtggggaaatggatcaaaaaaaataatattggaaaatcgattaagcgagcrtttctaaaaataaaaaaaataaaataatagyagtcataaagagagagagagagagagaaygagagaaatagccaagcttagcccgcgtaaatgtgcccaccaggctcactgtgacacagccggcctgcacggtgcctcagcaaagaaataaagttggcgacggacccccggaataccctggcggggggctcggagggaacgcgcagagagcggcccttcccgtccccccagcccagggtcacgtcgggcggtggccccgtgagcgcggtgctgatttcttgtagagctctgcactcttgggtacgcgcaaggaacgcaaggcacacggatt

SEQ ID NO: 55704 - DNA, 575 bp, Chicken  19866894309574_6
gcctggctccarcccttcatccccaaaagacgggagggatgyccggagccgaccccggctgcgggacgcggcggctgggggctgggggtggctgaggggagagactggaaaggggatttcccccagatctccagataatagaagcaggggtgcaggcagtcgtttcgtttggatttctaagtgaatggcgtggggaaatggatcaaaaaaaataatattggaaaatcgattaagcgagcrtttctaaaaataaaaaaaataaaataatagyagtcataaagagagagagagagagagaaygagagaaatagccaagcttagcccgcgtaaatgtgcccaccaggctcactgtgacacagccggcctgcacggtgcctcagcaaagaaataaagttggcgacggacccccggaataccctggcggggggctcggagggaacgcgcagagagcggcccttcccgtccccccagcccagggtcacgtcgggcggtggccccgtgagcgcggtgctgatttcttgtagagctctgcactcttgggtacgcgcaaggaacgcaaggcacacggattggcg

SEQ ID NO: 55705 - DNA, 600 bp, Chicken  19866894309579_1
taattagtgtaattacaatccaatgttaattatatctgccacttagacataattttatatagtaatggtcttattctcaataaccttattatgttgtttattcaaacaggaatttagccttctttcatgcgtcaaatatggagattacaaaaagtactgcctgtcatttctgtagttatgactaggggatctctgcattgcaaaatcatatttggggcaatcaatgaatggagaaaaccaaattatagagactgattattagaggcatgctgaactaacaaaaataatttgcacagaagrcacattaaggcatacgctgcttcatgcagagggaaaggtcagtgtgcatgagtttacagaacaagagactgcaacacacacagcaaacatggcggggtaacttccattggcaaccttagcatttctcttatttggagtgcaataaaatagcaacactggaattgacaaataacacctgctgagacatttcttaggggcaatgacaccttctagcacaagcactcagtatgcgtttttctttctccacaggcttcatttctstgattctctgcattttgggggagcacagccatacctact

SEQ ID NO: 55706 - DNA, 600 bp, Chicken  19866894309579_2
gaggcatgctgaactaacaaaaataatttgcacagaagrcacattaaggcatacgctgcttcatgcagagggaaaggtcagtgtgcatgagtttacagaacaagagactgcaacacacacagcaaacatggcggggtaacttccattggcaaccttagcatttctcttatttggagtgcaataaaatagcaacactggaattgacaaataacacctgctgagacatttcttaggggcaatgacaccttctagcacaagcactcagtatgcgtttttctttctccacaggcttcatttctstgattctctgcattttgggggagcacagccatacctactatggctttagttcagacaaggagtggggttttgctcagtcctctttgcttccagagctttgcttcaccctgatgggtttcttctagatgaagcaaaagtcagagacaccccaggaaatctccttgtgccccacagaacagtgctgtcccatggcaccaaactacaacacaaccccacsaaacacggccagcaggctccyggcacaatcatcttgctcctgctctttgagggccccaccatttgctgatacagccttamgct

SEQ ID NO: 55707 - DNA, 600 bp, Chicken  19866894309579_3
ctgagacatttcttaggggcaatgacaccttctagcacaagcactcagtatgcgtttttctttctccacaggcttcatttctstgattctctgcattttgggggagcacagccatacctactatggctttagttcagacaaggagtggggttttgctcagtcctctttgcttccagagctttgcttcaccctgatgggtttcttctagatgaagcaaaagtcagagacaccccaggaaatctccttgtgccccacagaacagtgctgtcccatggcaccaaactacaacacaaccccacsaaacacggccagcaggctccyggcacaatcatcttgctcctgctctttgagggccccaccatttgctgatacagccttamgctcattacaaagcaaagaccgaacaattctgtacagtaaggttttcttggaattggcccargagtgaaataaactctcgctggaagtgaagggtgatgcagactcaaaccactctctaccctatacacttttacctactacctctcacatacacagttacatacgtttagatttagaaaacctaaaacacctagtcaaaacaatgcacgtttcttcctc

SEQ ID NO: 55708 - DNA, 600 bp, Chicken  19866894309579_4
atgacaccttctagcacaagcactcagtatgcgtttttctttctccacaggcttcatttctstgattctctgcattttgggggagcacagccatacctactatggctttagttcagacaaggagtggggttttgctcagtcctctttgcttccagagctttgcttcaccctgatgggtttcttctagatgaagcaaaagtcagagacaccccaggaaatctccttgtgccccacagaacagtgctgtcccatggcaccaaactacaacacaaccccacsaaacacggccagcaggctccyggcacaatcatcttgctcctgctctttgagggccccaccatttgctgatacagccttamgctcattacaaagcaaagaccgaacaattctgtacagtaaggttttcttggaattggcccargagtgaaataaactctcgctggaagtgaagggtgatgcagactcaaaccactctctaccctatacacttttacctactacctctcacatacacagttacatacgtttagatttagaaaacctaaaacacctagtcaaaacaatgcacgtttcttcctccataaaggctcaaaaggacaa

SEQ ID NO: 55709 - DNA, 600 bp, Chicken  19866894309579_5
ctstgattctctgcattttgggggagcacagccatacctactatggctttagttcagacaaggagtggggttttgctcagtcctctttgcttccagagctttgcttcaccctgatgggtttcttctagatgaagcaaaagtcagagacaccccaggaaatctccttgtgccccacagaacagtgctgtcccatggcaccaaactacaacacaaccccacsaaacacggccagcaggctccyggcacaatcatcttgctcctgctctttgagggccccaccatttgctgatacagccttamgctcattacaaagcaaagaccgaacaattctgtacagtaaggttttcttggaattggcccargagtgaaataaactctcgctggaagtgaagggtgatgcagactcaaaccactctctaccctatacacttttacctactacctctcacatacacagttacatacgtttagatttagaaaacctaaaacacctagtcaaaacaatgcacgtttcttcctccataaaggctcaaaaggacaagtaacacatgacaaatattagtcatgttatttaatgcacaatgtcgaaaagtggcataa

SEQ ID NO: 55710 - DNA, 600 bp, Chicken  19866894309579_6
gagtggggttttgctcagtcctctttgcttccagagctttgcttcaccctgatgggtttcttctagatgaagcaaaagtcagagacaccccaggaaatctccttgtgccccacagaacagtgctgtcccatggcaccaaactacaacacaaccccacsaaacacggccagcaggctccyggcacaatcatcttgctcctgctctttgagggccccaccatttgctgatacagccttamgctcattacaaagcaaagaccgaacaattctgtacagtaaggttttcttggaattggcccargagtgaaataaactctcgctggaagtgaagggtgatgcagactcaaaccactctctaccctatacacttttacctactacctctcacatacacagttacatacgtttagatttagaaaacctaaaacacctagtcaaaacaatgcacgtttcttcctccataaaggctcaaaaggacaagtaacacatgacaaatattagtcatgttatttaatgcacaatgtcgaaaagtggcataagaaccggaggagcagggaagggaatttggcagctctctgggagatggaaaccgagatctctc

SEQ ID NO: 55711 - DNA, 599 bp, Chicken  19866894309582_1
  misc_feature (1)..(13): n is any nucleotide
nnnnnnnnnnnnntaattcaaagtatctgttgttttcttctccttcccacacctgcccacattcaacttttcttctcacgcccagtgccttcccacacagtcccagctggaagacctcctcttcacatgtaataaaacctatttttttctatgagttatgaagaggacagcaacccttctatgggtatttcagtcctacatgatccataatagattttatctgagttgtgccctgtgaagcagggaattgttgtagatgcaagaaataatatacttgcccaaggtcataaagaaagttartrggtaaattaagctcaacctcatggatcctaatcctagctaggaggatggaaagtccaggcagatgatttgtattccttacttayggccaaatacgacacaaatagaggcaccctgttcctgacgaggagaggcgggagagggggacataattcatgctattcagattctgctatttagcatttgccgatccctaatgggatatttgcaaagtataatattttctaacagctgtaaggacaagagagcctaaaatttctccctatacataatatccgtgaaattgcattgaatattgt

SEQ ID NO: 55712 - DNA, 599 bp, Chicken  19866894309582_2
  misc_feature (1)..(11): n is any nucleotide
nnnnnnnnnnntaattcaaagtatctgttgttttcttctccttcccacacctgcccacattcaacttttcttctcacgcccagtgccttcccacacagtcccagctggaagacctcctcttcacatgtaataaaacctatttttttctatgagttatgaagaggacagcaacccttctatgggtatttcagtcctacatgatccataatagattttatctgagttgtgccctgtgaagcagggaattgttgtagatgcaagaaataatatacttgcccaaggtcataaagaaagttartrggtaaattaagctcaacctcatggatcctaatcctagctaggaggatggaaagtccaggcagatgatttgtattccttacttayggccaaatacgacacaaatagaggcaccctgttcctgacgaggagaggcgggagagggggacataattcatgctattcagattctgctatttagcatttgccgatccctaatgggatatttgcaaagtataatattttctaacagctgtaaggacaagagagcctaaaatttctccctatacataatatccgtgaaattgcattgaatattgtaa

SEQ ID NO: 55713 - DNA, 600 bp, Chicken  19866894309582_3
gccttcccacacagtcccagctggaagacctcctcttcacatgtaataaaacctatttttttctatgagttatgaagaggacagcaacccttctatgggtatttcagtcctacatgatccataatagattttatctgagttgtgccctgtgaagcagggaattgttgtagatgcaagaaataatatacttgcccaaggtcataaagaaagttartrggtaaattaagctcaacctcatggatcctaatcctagctaggaggatggaaagtccaggcagatgatttgtattccttacttayggccaaatacgacacaaatagaggcaccctgttcctgacgaggagaggcgggagagggggacataattcatgctattcagattctgctatttagcatttgccgatccctaatgggatatttgcaaagtataatattttctaacagctgtaaggacaagagagcctaaaatttctccctatacataatatccgtgaaattgcattgaatattgtaatgatgtgttatgctgccattagcttcctgtgaatacctaatttggaaggttaatgaaattgacaaatgtgtgtactgyacgcgca

SEQ ID NO: 55714 - DNA, 600 bp, Chicken  19866894309582_4
tacttayggccaaatacgacacaaatagaggcaccctgttcctgacgaggagaggcgggagagggggacataattcatgctattcagattctgctatttagcatttgccgatccctaatgggatatttgcaaagtataatattttctaacagctgtaaggacaagagagcctaaaatttctccctatacataatatccgtgaaattgcattgaatattgtaatgatgtgttatgctgccattagcttcctgtgaatacctaatttggaaggttaatgaaattgacaaatgtgtgtactgyacgcgcattgtcagtgctagttaatggcaaccctcacatttttatttgtaaaattatataaaaccgaaagtgacaattattgtaacttcatctttttttggaatatagcacagcatgcagtttatttaaatagagttgtatgttttaaatttgtataccgtcatatgaagtcctttgctcatcatgcgattatatacttaattcttatatgaatgagagcatgtattgtggtattttgtagcatattgggccaattctttgggttttgtgtgtactccatgctaaaataccttaagtcct

SEQ ID NO: 55715 - DNA, 600 bp, Chicken  19866894309583_1
atacatggagaggtaggccaagagatgagacctttatgacccataattctgctcctaaaattaagtccctgaatatacttaagcctgaacatcagcatgagtaacacttcgtgtgtttatgtgcatgtgtaaacagaaaaatatcattccgttccaaaaatcacacttgttactgtagtcaagagaccaccaacatgatcagatgctgcatacactagaatggaccttggtgacaaagaacacatggagagtttctaatgtagagagatctaagcaccattacagaaattgaacaccatygtttccatccttactgggtaagatgatgacgtctttctcctggacctgggatgctgcagttgaatccaccccagcctttttccacatccttccatgtctctgggtgcgaccatttcaagacagaatcagaaggatctacaaaataggatgtatgaagagagaattattgttttcaggggagaccttatagctctctacaactacctaaaaggaggttgtggtgaggtggggatgacttctcccacataattagtgatagaatgagagagaatagccacaagttgcatcaggggatgttca

SEQ ID NO: 55716 - DNA, 600 bp, Chicken  19866894309591_1
tctggttgtttttgctcatttacaaatgtgaaatttgatggataagccagataaattttgtctttaggcaacagagagcttcctgttgctctatgttcaccgagttcagcatttacacttctgtctccttaacagcagtgactggcaaaggctttaacaggaccaactgctgcctctgtatcaacagcaggaaattttgttcccttcttcagttcagtttttgccccaaactctgagtacagaaagtaagcaaatgtgcttgcagtaacacagtttcactgtaactaagcgtgaacattytctgctatgattgctgtacctgttgggtttgtctttgtttctgtttggtgtttggatgcctcccctgagagactgttatttttgaattacatccatgtatatgatctcctattgagagcataaatcaaaaggacaagttgatcgttaaccagtgtgtcacttgcagtccaggtggcctgactgcgtagttatgtgcttgcacaaattgtgcttgtatgtagagcttgagtttaatggcttccagcattctggagtattcctgaataggaaaatcaaagactraatcttcaagctkatgaa

SEQ ID NO: 55717 - DNA, 600 bp, Chicken  19866894309591_2
aactaagcgtgaacattytctgctatgattgctgtacctgttgggtttgtctttgtttctgtttggtgtttggatgcctcccctgagagactgttatttttgaattacatccatgtatatgatctcctattgagagcataaatcaaaaggacaagttgatcgttaaccagtgtgtcacttgcagtccaggtggcctgactgcgtagttatgtgcttgcacaaattgtgcttgtatgtagagcttgagtttaatggcttccagcattctggagtattcctgaataggaaaatcaaagactraatcttcaagctkatgaaatcgtgtgctctgtgacaggtagattaggctcgtatggaatatacatgactttcaaagctttaatcagtagcaggctgttacaacaccacagctatggctgagatcctgtgcaggtcttttactctatagagaaagatgcactacagtrcaaaagaaaaaaaagaaaaaggacaattagacaggatggccatcagttaattctaccacttgagaccaaaggtactttccaggttatagcagagaggcttcacttcatagtcaaacatactcattggattaat

SEQ ID NO: 55718 - DNA, 600 bp, Chicken  19866894309591_3
cattytctgctatgattgctgtacctgttgggtttgtctttgtttctgtttggtgtttggatgcctcccctgagagactgttatttttgaattacatccatgtatatgatctcctattgagagcataaatcaaaaggacaagttgatcgttaaccagtgtgtcacttgcagtccaggtggcctgactgcgtagttatgtgcttgcacaaattgtgcttgtatgtagagcttgagtttaatggcttccagcattctggagtattcctgaataggaaaatcaaagactraatcttcaagctkatgaaatcgtgtgctctgtgacaggtagattaggctcgtatggaatatacatgactttcaaagctttaatcagtagcaggctgttacaacaccacagctatggctgagatcctgtgcaggtcttttactctatagagaaagatgcactacagtrcaaaagaaaaaaaagaaaaaggacaattagacaggatggccatcagttaattctaccacttgagaccaaaggtactttccaggttatagcagagaggcttcacttcatagtcaaacatactcattggattaatagacagaagaaag

SEQ ID NO: 55719 - DNA, 548 bp, Chicken  19866894309591_4
cagtgtgtcacttgcagtccaggtggcctgactgcgtagttatgtgcttgcacaaattgtgcttgtatgtagagcttgagtttaatggcttccagcattctggagtattcctgaataggaaaatcaaagactraatcttcaagctkatgaaatcgtgtgctctgtgacaggtagattaggctcgtatggaatatacatgactttcaaagctttaatcagtagcaggctgttacaacaccacagctatggctgagatcctgtgcaggtcttttactctatagagaaagatgcactacagtrcaaaagaaaaaaaagaaaaaggacaattagacaggatggccatcagttaattctaccacttgagaccaaaggtactttccaggttatagcagagaggcttcacttcatagtcaaacatactcattggattaatagacagaagaaagcgttgtccagaccagcctgaactgttgtcagagctataagggctcaatgaaaaatgaaagtactaaatatgttatgaaagcacacataaaaaatctgttttt

SEQ ID NO: 55720 - DNA, 600 bp, Chicken  19866894309593_1
gacaaagcctcttggaatcgttttcactgtagtgatggatgataatggagacaaagctgtggcccaccaataaaaacaactcccaaggcaaaaagagcatgacgaggctgtgcgcatctcaaggcttggccaaaatcctattatggcattaaagattacattagacaagggctgaattagatcagacgaaacaaaaagcatcctaggagagcttctcctcctgctctgccagcacgttttgcttgctgcctgctggtgtccttcacacctgcacacagcttgcattcagtcagacacccrcaggcagtcccactgtctctgagcagggcaggagcagtgccagaacccagagctgctggatttgccatcaccaccacctgcgtggagctggggctgcatgttgcaggacagccccacagctgcagtgctccaaaagcaggctgaggggctgagaaccagcactgcagggagccacgatggcacccaacccctgcatgctcccctcgtgtgacaygtgctcatctatatttaggtgtttgctgaaaataccacggacatcttcagagggcggagatgggacatgagccggtgtttcctgct

SEQ ID NO: 55721 - DNA, 600 bp, Chicken  19866894309593_2
ctcctcctgctctgccagcacgttttgcttgctgcctgctggtgtccttcacacctgcacacagcttgcattcagtcagacacccrcaggcagtcccactgtctctgagcagggcaggagcagtgccagaacccagagctgctggatttgccatcaccaccacctgcgtggagctggggctgcatgttgcaggacagccccacagctgcagtgctccaaaagcaggctgaggggctgagaaccagcactgcagggagccacgatggcacccaacccctgcatgctcccctcgtgtgacaygtgctcatctatatttaggtgtttgctgaaaataccacggacatcttcagagggcggagatgggacatgagccggtgtttcctgctgtatggggaagtttgctgactgtcaagctgctgggtttttgcagcagccttctctgccccaaagtgctgattcttccccacctccttgcagcgatgacaaaggttttcagccaggcctgcagtgcccattgcgtccaccacacagcatggggctcaggcacagtgggagcaaccacgggccgtggctttcctctcccagaggtggtctgaagtt

SEQ ID NO: 55722 - DNA, 600 bp, Chicken  19866894309595_1
tttgttttttccaatctattgtattctctgcttcattcaagcttctgcagtagtgagatctagaagttcactatctttgtgtggaaaatgtactttaagaatgtgtttcaaatatatctcttaatagctatttttttccaccatgcctgtattttagcttagacttcttgctgaagccaaattggacagagttgggagttttcttcatcaagaaattgtaccagtttagctccaatactggcaaataatgacaattacaaaccataccttcaaacatttaaatattaaaaagtttgacamcttaaataatttttatatttttctatcataaaacttacttcagtaactcaaggatggcaagcacaatatcattgacataacaaaaaccagatgcctctgacttcttggcatggtgaagtcctccagcccaattaacagccatgtctgtctgctgtctgttcaattttaccgccccagctgtaaaaagacaggcacaaaattgaaacaaaatgcagtcaaacttctgagggtcttcaaatttgttacaagaaacagtatctcatttttaagtcattacatctcatactcgatcctagatct

SEQ ID NO: 55723 - DNA, 600 bp, Chicken  19866894309598_1
ccctctgagcagcacagcaaacacacagagcagctccaccacgccaggctgctcactggaggtcaaatcctcaacccatggtacagccaaggagacacccatctcctcttgctctgggtgggacagagggatcaaaactcctccccatgaactccttaaagcagacactcattgaatcacactgcagctgctcccagagctgttcctgggctctatctcacaggatcgtgaaggttggaaaagagcactaagatcatccaatccatcagcccacccccaccatgcccacatccctcagtrccaggtctccacagttcttgaacacctccagggatggtgactccaccacctccctgggcagcctgcaccaatacctcttgccagtatctttcccaaagaagccagtggatatcttgctgtatggcaaatgggaaaaggcttggactgtacatacatcatatggtagcacagcccatagagagcacgtgcaaagaataatagttgaaccttctccagaaagcagctgtcctggtgtgtgaaaggaatgcttgttcactatctagccaatgaaacaacttaaaagtaataaaggataagctt

SEQ ID NO: 55724 - DNA, 597 bp, Chicken  19866894309600_1
aagttgacaaaaaccactctagatttaaagcccaagaatccaaccaatcctgtgcaagttcacaatccaaaactgagtattttataccctccttgtattccattcagacacatttgaaacatagaatcatctgaagacagcttcacaatgtttcctggacaaggactgtttgctcatctctgcacaatgtttggcacaaaaggaccctgactctgaaaccttggggtgccctggagtgcaaaagagcaatggcacttaagggatggactggttgaagccaggagcatttctatggttctrcgttcaacaacaaaatcagtaaactgtgctgaactcagtggraactcctcttggggaatcttgactcatctrtgtgaagacagtgctctcaaccaagccctgacacattcatggttagacgaacatcattccaatagcggtctgctgctgtgttttccattccataaaataaactgtgcaatttactatttcttttctcctttccaggttttgtaatctagaagaacaataagcacatatattgcttttatgaggggaaagttctgagaacctggcagcttgcctgatcccctcatt

SEQ ID NO: 55725 - DNA, 555 bp, Chicken  19866894309600_2
accaatcctgtgcaagttcacaatccaaaactgagtattttataccctccttgtattccattcagacacatttgaaacatagaatcatctgaagacagcttcacaatgtttcctggacaaggactgtttgctcatctctgcacaatgtttggcacaaaaggaccctgactctgaaaccttggggtgccctggagtgcaaaagagcaatggcacttaagggatggactggttgaagccaggagcatttctatggttctrcgttcaacaacaaaatcagtaaactgtgctgaactcagtggraactcctcttggggaatcttgactcatctrtgtgaagacagtgctctcaaccaagccctgacacattcatggttagacgaacatcattccaatagcggtctgctgctgtgttttccattccataaaataaactgtgcaatttactatttcttttctcctttccaggttttgtaatctagaagaacaataagcacatatattgcttttatgaggggaaagttctgagaacctggcagcttgcctgatcccctcatt

SEQ ID NO: 55726 - DNA, 525 bp, Chicken  19866894309600_3
ctgagtattttataccctccttgtattccattcagacacatttgaaacatagaatcatctgaagacagcttcacaatgtttcctggacaaggactgtttgctcatctctgcacaatgtttggcacaaaaggaccctgactctgaaaccttggggtgccctggagtgcaaaagagcaatggcacttaagggatggactggttgaagccaggagcatttctatggttctrcgttcaacaacaaaatcagtaaactgtgctgaactcagtggraactcctcttggggaatcttgactcatctrtgtgaagacagtgctctcaaccaagccctgacacattcatggttagacgaacatcattccaatagcggtctgctgctgtgttttccattccataaaataaactgtgcaatttactatttcttttctcctttccaggttttgtaatctagaagaacaataagcacatatattgcttttatgaggggaaagttctgagaacctggcagcttgcctgatcccctcatt

SEQ ID NO: 55727 - DNA, 600 bp, Chicken  19866894309611_1
agttgttaaaaggaataatttcagccttactttcctcaactatgttaaaacttcagaataatgcacaattttgttgagagtgaatctggggtttcctttcagaatttttgttgagtttaaccaatgggccaaaccacaagatggagtctgtgcagtttgttagtgagacttgtgctttggttggatgacagcattgtcaaattcatttagtgctgtgttcagacaaggaggatattagcattcatactcacaattccagtctagcagtgctagacattaagagaaactgcagaacaacayactgtgctaggaatagtgaaataaaaagtttgggataagaagttagccaggatggaattcactgtttttgctgagaaatgatatctgagatggagctgaaatgtccmaaatttactttattgctyttcagaactgtatttgtttaaagttcctaacttgtgcataaatgttttgttccagagagaaagyragaagaggaaagtgatgtaatgtagaatatccaggagatcaaagcaaaagagataaaagctgcaactactgtacaggctagaaatttctcctgaatcataaacaccctta

SEQ ID NO: 55728 - DNA, 558 bp, Chicken  19866894309611_2
ttgttgagtttaaccaatgggccaaaccacaagatggagtctgtgcagtttgttagtgagacttgtgctttggttggatgacagcattgtcaaattcatttagtgctgtgttcagacaaggaggatattagcattcatactcacaattccagtctagcagtgctagacattaagagaaactgcagaacaacayactgtgctaggaatagtgaaataaaaagtttgggataagaagttagccaggatggaattcactgtttttgctgagaaatgatatctgagatggagctgaaatgtccmaaatttactttattgctyttcagaactgtatttgtttaaagttcctaacttgtgcataaatgttttgttccagagagaaagyragaagaggaaagtgatgtaatgtagaatatccaggagatcaaagcaaaagagataaaagctgcaactactgtacaggctagaaatttctcctgaatcataaacacccttaagtctagtgcttcataggcagctgccctgaattcaggatagagtcacagctgaaatggaaatcct

SEQ ID NO: 55729 - DNA, 540 bp, Chicken  19866894309611_3
gggccaaaccacaagatggagtctgtgcagtttgttagtgagacttgtgctttggttggatgacagcattgtcaaattcatttagtgctgtgttcagacaaggaggatattagcattcatactcacaattccagtctagcagtgctagacattaagagaaactgcagaacaacayactgtgctaggaatagtgaaataaaaagtttgggataagaagttagccaggatggaattcactgtttttgctgagaaatgatatctgagatggagctgaaatgtccmaaatttactttattgctyttcagaactgtatttgtttaaagttcctaacttgtgcataaatgttttgttccagagagaaagyragaagaggaaagtgatgtaatgtagaatatccaggagatcaaagcaaaagagataaaagctgcaactactgtacaggctagaaatttctcctgaatcataaacacccttaagtctagtgcttcataggcagctgccctgaattcaggatagagtcacagctgaaatggaaatcct

SEQ ID NO: 55730 - DNA, 476 bp, Chicken  19866894309611_4
agcattgtcaaattcatttagtgctgtgttcagacaaggaggatattagcattcatactcacaattccagtctagcagtgctagacattaagagaaactgcagaacaacayactgtgctaggaatagtgaaataaaaagtttgggataagaagttagccaggatggaattcactgtttttgctgagaaatgatatctgagatggagctgaaatgtccmaaatttactttattgctyttcagaactgtatttgtttaaagttcctaacttgtgcataaatgttttgttccagagagaaagyragaagaggaaagtgatgtaatgtagaatatccaggagatcaaagcaaaagagataaaagctgcaactactgtacaggctagaaatttctcctgaatcataaacacccttaagtctagtgcttcataggcagctgccctgaattcaggatagagtcacagctgaaatggaaatcct

SEQ ID NO: 55731 - DNA, 475 bp, Chicken  19866894309611_5
gcattgtcaaattcatttagtgctgtgttcagacaaggaggatattagcattcatactcacaattccagtctagcagtgctagacattaagagaaactgcagaacaacayactgtgctaggaatagtgaaataaaaagtttgggataagaagttagccaggatggaattcactgtttttgctgagaaatgatatctgagatggagctgaaatgtccmaaatttactttattgctyttcagaactgtatttgtttaaagttcctaacttgtgcataaatgttttgttccagagagaaagyragaagaggaaagtgatgtaatgtagaatatccaggagatcaaagcaaaagagataaaagctgcaactactgtacaggctagaaatttctcctgaatcataaacacccttaagtctagtgcttcataggcagctgccctgaattcaggatagagtcacagctgaaatggaaatcct

SEQ ID NO: 55732 - DNA, 600 bp, Chicken  19866894309623_1
taccctgcggctttggttgtggtgtcacctagagcaggagttctgtaggcacttctgtacaagtatttggagccgggggggggctcaggctcagcaccagaggccctgccccatccttcaattctaggaagtggtagctctatccccgaccacacacaggtaaaaagttgaacaaatgtttaggacttgatttgctcgatgcaatatcaaggtgaccataacaacactgcaggatggtaagaactgacaaagatatccatttacttgcctgggcagctgctgcgatagttgcaccacacrcgatactgtgaagaagaacagagctgaagttaataaaaatgagaactcattgtcttgtacagaactcattacatttttctctttcagccagacaacattagtgtttattgcacttctgtacagattgattcaccctccctttttaaggcagttaaacaaattaatgacatttttactctgcttgattcactaagcgaaattataagtttcaatttaatttgtaaatttagggccgaaggaaaagcactccattttgccgtcaaaatctgacgagctcaatcccagctccgtttggccgcc

SEQ ID NO: 55733 - DNA, 600 bp, Chicken  19866894309631_1
gattgtactactagaaagtagattttgccagcttccttcactttgttttaagtgagagcacatagataagcagatcatctggtaggtcacagttgatgacagtctttgatatgtcgggcagtggtcccttcagtttcaggaggatatggatttgcagcctagcagtgtcacctcagattaggtctcttgcatttatcattttaaaggtaacctatgtgaatttaaattaagttaaagctcaatgttgactgcagcggaaggcaaatcagttactgtctgtacagagaggaagagtggaaraattgagattatatagctctctaaatgtgtcactcatcrctttcattcttggtcagagaaactagagccaaagcatatctcaattcctgagaactttcattcagtccttcttttctgttgcggggagaggaaaaaaatcacagaaacatagaaattagtcatattgtaatgaaaggtgtaatgtaatgggaggatgcagttgaaagggtgtccctgttatgctttatatggtacaaaacatacgttagtaggtagttgttgtatcaaatagttgataatacaaatacatgactgaatcca

SEQ ID NO: 55734 - DNA, 600 bp, Chicken  19866894309631_2
actttgttttaagtgagagcacatagataagcagatcatctggtaggtcacagttgatgacagtctttgatatgtcgggcagtggtcccttcagtttcaggaggatatggatttgcagcctagcagtgtcacctcagattaggtctcttgcatttatcattttaaaggtaacctatgtgaatttaaattaagttaaagctcaatgttgactgcagcggaaggcaaatcagttactgtctgtacagagaggaagagtggaaraattgagattatatagctctctaaatgtgtcactcatcrctttcattcttggtcagagaaactagagccaaagcatatctcaattcctgagaactttcattcagtccttcttttctgttgcggggagaggaaaaaaatcacagaaacatagaaattagtcatattgtaatgaaaggtgtaatgtaatgggaggatgcagttgaaagggtgtccctgttatgctttatatggtacaaaacatacgttagtaggtagttgttgtatcaaatagttgataatacaaatacatgactgaatccacaagatctattcctgtttcctagatgagaaatgctgcca

SEQ ID NO: 55735 - DNA, 600 bp, Chicken  19866894309632_1
ccctaaattctaaaaaatgcttttctttttttctttttttctttctttcttttttctcttatgaattaagaaaatttcactggcatgatgtgcagaatcaaactctataacccagttaggttataaagcaggtatggtttattcggccggcccgatgcaagggggaccactccaccaaacttgtacaccggccagaagaagcactacagatttataagccaaagccatacatattcagcaaaaattcttggaacccattcacgtatccattgttcttccagaaactcatttacatattayacctcccccggcgcatgcgctgtccgttataggggtctccctttggtggtcgtggggatgaagtcagaagtcttcctcgtgaaggcttgacgtcttcctcggtctgacctctttacagtgcattgaaaccagtcacagtcatttatcttgtattgttcctttctttatrtttgcacagctgaccaggaaatgttgagatgtcattctccttccctagttttcaaagctagcatatttacccctatatgttcaaaccctagacccatctaagctcctgatctcagcattagggtactgagt

SEQ ID NO: 55736 - DNA, 600 bp, Chicken  19866894309632_2
ctccaccaaacttgtacaccggccagaagaagcactacagatttataagccaaagccatacatattcagcaaaaattcttggaacccattcacgtatccattgttcttccagaaactcatttacatattayacctcccccggcgcatgcgctgtccgttataggggtctccctttggtggtcgtggggatgaagtcagaagtcttcctcgtgaaggcttgacgtcttcctcggtctgacctctttacagtgcattgaaaccagtcacagtcatttatcttgtattgttcctttctttatrtttgcacagctgaccaggaaatgttgagatgtcattctccttccctagttttcaaagctagcatatttacccctatatgttcaaaccctagacccatctaagctcctgatctcagcattagggtactgagtaatctactttttytcactcatccaaaattctttgtttgttattttctgcaagattcaaatgatgtagtacaaataagagacactgtcttaaagcttagaagtgcacaataagttccattttcatgttcatgggggttaatcgaatgaaaaattatttttctatggacag

SEQ ID NO: 55737 - DNA, 479 bp, Chicken  19866894309632_3
catgcgctgtccgttataggggtctccctttggtggtcgtggggatgaagtcagaagtcttcctcgtgaaggcttgacgtcttcctcggtctgacctctttacagtgcattgaaaccagtcacagtcatttatcttgtattgttcctttctttatrtttgcacagctgaccaggaaatgttgagatgtcattctccttccctagttttcaaagctagcatatttacccctatatgttcaaaccctagacccatctaagctcctgatctcagcattagggtactgagtaatctactttttytcactcatccaaaattctttgtttgttattttctgcaagattcaaatgatgtagtacaaataagagacactgtcttaaagcttagaagtgcacaataagttccattttcatgttcatgggggttaatcgaatgaaaaattatttttctatggacagcttcttgtctgtgcctgtcaata

SEQ ID NO: 55738 - DNA, 511 bp, Chicken  19866894309634_1
gtagtttattaaatcagtattcaccccaaagtcccgaatgcgtggctttcactctctgtgttttaatccttttcttggctgcatcactgcctctgcattttctgtgcctcgtggctggctggcacggcggcatgctgctggtgctcctccttaattgggcactggaagtgatttaaacaggcgagcactgcgcgtgtcaatttgcaggacgagtttttaggcagctaatcaattcaggctggaattctttggggatctgcagacatcctcacaaattcctggcagatgttgtgatcctcrgagatgatagataatgtaaccccgggtctgttttgcaggctggtgtcagtttttgtttgttgaaatctgtggctcctttttttttgtgcttgatctgcctgactttgtgatcaaaccccgttggttttttgtttttttcattaaatgccagcatccccaaacacagtgggtgctgtataaacacgtaccgagatgcagtccctaattcaag

SEQ ID NO: 55739 - DNA, 599 bp, Chicken  19866894309641_1
  misc_feature (1)..(73): n is any nucleotide
nnnnnnnnnnnnnnnnnnnnnnnnnnnnnnnnnnnnnnnnnnnnnnnnnnnnnnnnnnnnnnnnnnnnnnnnnacctgctggagctgggccttgtagctggctactgcttggccaggtcttccgacatctgcgggaaacgcacagctcagcacacggacaacacaacaccgggcgcgcagcttcttaacctgcagtgagaactgctgaagagatgacagcctgcgccggcccgctgcgtcgcgctcggggcgaggccgatccctcccccctccgaggctcggccgcgctgtcccgcctgrgtcgcgcggggaagacagggccggcacgcaggcctaggcccaggcccgagcgcgggctgcctcccagggggtagcgggaggccgcgaggcggcaaggaaggaccgagagggaccgagcagccgcttctcacctcggcgggcgctgtggggcccgagggccgggccgggggcgccgcgctgggagccgtcagaccgctgccgcccgatcgccggagccgcgggccgtactacggggagagacgggaagtgggaggagccgagggccaacgcgcgccggccctcgcgagagcgacctcgct

SEQ ID NO: 55740 - DNA, 600 bp, Chicken  19866894309648_1
tagccacagctttctctgtctctctggccagctcaaaaccagcaggagctgaccagttacgcagatcagatggactattttcatggcttttaccactactgagcatcttttgtttgttgagagactgtcaaattattcaactttccaacacttttaaaacatttctgatgttacagtgaagtgactagaagatggttacgcaatgctagcatgttttctgcaatttctggctagggttttctactcattttgaagttcccctctcttcacatgcacagagctctcaagaagctgccagtyatcctttcatgtgtttgatactgttcagtttgcaggccaataaacctgagtcagaagtaaaggacatgtctgggtttatttactacttaatttatctttgcccattactttcatagtgagattttctttttrggtaaatargcactggaagtgagctgagaaaataagacttcaagtagatgtagatgaaacataaataaaggagacaaattgtagtgacatctaggtgaaagataacatttcttcctgaggtagtaggacagcttccttgactacactgaccatacaccattacctgct

SEQ ID NO: 55741 - DNA, 600 bp, Chicken  19866894309648_2
ttattcaactttccaacacttttaaaacatttctgatgttacagtgaagtgactagaagatggttacgcaatgctagcatgttttctgcaatttctggctagggttttctactcattttgaagttcccctctcttcacatgcacagagctctcaagaagctgccagtyatcctttcatgtgtttgatactgttcagtttgcaggccaataaacctgagtcagaagtaaaggacatgtctgggtttatttactacttaatttatctttgcccattactttcatagtgagattttctttttrggtaaatargcactggaagtgagctgagaaaataagacttcaagtagatgtagatgaaacataaataaaggagacaaattgtagtgacatctaggtgaaagataacatttcttcctgaggtagtaggacagcttccttgactacactgaccatacaccattacctgctgctctctatttgcagagacattcacagaattaacaacaaaaacaaacaaacaaaaaaacaaaacaaaacaaaactcatacatacacacacacacacacacaaagccaaaaaaccccaacaacttgagtaagt

SEQ ID NO: 55742 - DNA, 600 bp, Chicken  19866894309648_3
tttccaacacttttaaaacatttctgatgttacagtgaagtgactagaagatggttacgcaatgctagcatgttttctgcaatttctggctagggttttctactcattttgaagttcccctctcttcacatgcacagagctctcaagaagctgccagtyatcctttcatgtgtttgatactgttcagtttgcaggccaataaacctgagtcagaagtaaaggacatgtctgggtttatttactacttaatttatctttgcccattactttcatagtgagattttctttttrggtaaatargcactggaagtgagctgagaaaataagacttcaagtagatgtagatgaaacataaataaaggagacaaattgtagtgacatctaggtgaaagataacatttcttcctgaggtagtaggacagcttccttgactacactgaccatacaccattacctgctgctctctatttgcagagacattcacagaattaacaacaaaaacaaacaaacaaaaaaacaaaacaaaacaaaactcatacatacacacacacacacacacaaagccaaaaaaccccaacaacttgagtaagtgtaaattaa

SEQ ID NO: 55743 - DNA, 600 bp, Chicken  19866894309651_1
aaaactatattatgaaaaataatctatcaggctaataagtaaaagtgagagaggaacttaagtttgtggttaaacaaaatataaaactaagcaagaccgtagcagttgtctaaagacacagattctacattttctctttcccaaatctaatctatttcacatgccatgttttagacaaactgtggaaccaatacttgaaaacccaagtcaactttttttttctttttttttaatgtcagtttccaaaagaagagaaaatgatcacttgtaatgccctgagcaagaaacagaaatactggraattggtacaactcatcaaacagctctacaagaggatggtctcaggatgccccatcattatccaaggagctgcagggaaatggggaaacgcaaagagtgaagcctcacatgaacagaaggagacaaccaagcaggatcctctctgaaagagcagcactgctgctgaatttacttccttatgctttcagagagcacaaagtagacattcactgaatgctgtaatgccagccccttagttgacacttgtaaacataggaaatatcaaatagcaaggaaatcactgaaggacaggagaaaaac

SEQ ID NO: 55744 - DNA, 599 bp, Chicken  19866894309660_1
  misc_feature (1)..(113): n is any nucleotide
nnnnnnnnnnnnnnnnnnnnnnnnnnnnnnnnnnnnnnnnnnnnnnnnnnnnnnnnnnnnnnnnnnnnnnnnnnnnnnnnnnnnnnnnnnnnnnnnnnnnnnnnnnnnnnnnnttgtgatatcttacagacccagatacctgctttgtagggttgctccatagttgctctctggaatatacttgtgttacctgcatacttgagaaattactgccagccagttgactgcaagtagttccttttatggcaaattctcatacaggagggaattaaattttgtgtgttgcaacagcttgatttrgagttggttttgctcctggagatctcagttgcttctccttcttctccatggctatgaagtcctatagttcatgtaaagcgtccaaacaatgcaagaatcgtgtccttcagaggtcaggcagcatgagactgcctgtgaaatctagtggattctactgactaacggggtccaaaggcacgggcacatgtacatgtagtgatacatgtgtaaaagctcttcatttttgtttagaagtgaccactccatcagaaagccaagtgaatttcaacattgtcgtaactattcttttgctgaaagtg

SEQ ID NO: 55745 - DNA, 600 bp, Chicken  19866894309660_2
aagctcttcatttttgtttagaagtgaccactccatcagaaagccaagtgaatttcaacattgtcgtaactattcttttgctgaaagtgaatcttaatgacatttgtttactgtttcatagtaagcacattgcacaagttactggaaaaaataattatttctgagaaatgattctgagtcagacattggcagtagtgacatcagaatacatattaatagaatatgtatttttgactttgaatgactgtttcattgccctaaaatactttccatgcgaataatctcatttttatttataayatatattcatcttcaagttactccagttctggcagctctaggtctagcctagctttgcattttattttcagcacctctgtttttctaacttgtattctttgcttcagataaaagcagagttgccttgtccctgctgaatacatgaccaacagtttctctatgcagatatctcaaaggaagtaggtcagaccagtatatctttaagctgtatataagctttgtatatatccagcctgcataggcagcttacatattaagtctcttcaacatgcagtgtaatgctacagtaagaaatttgaa

SEQ ID NO: 55746 - DNA, 600 bp, Chicken  19866894309662_1
tctctgtgaaaagagggctggaaacttgtttgtgctcatcagatgaatttaaacaggcctatatttttatgcatttgaatgtgtaaccattccctcttctcttcagaaagagctaacagggaaaaaaggtcttctgacatttagtcctttcagaagtatgttcaacagttccatcaaaaatttaattgagtaaaaaatcaatcaggaatatttatagaaaatacatacttcttgaagaaagccttcaatcagcattcatccatttttcaggtattcatccttctcattaaaatgcttccrtaagtctgatcctttatcccttcatcctcaataacttagaaaaaaaatcagttgaccctacaaggtacagtaaggtaccttttttgttgttgttgtttttgtttcaacattgtagcctacaaagtaaaatttaatgggctctgctgaataacattttgaaaacagagggacaggaaatgaaaaagcattcattctcagagaacttgtaatctgttaaatagtcttgaaaattcccagacaggtgtgtgtaaaagtaaattaaactacctagtttcaaattttatcctttctccctgttat

SEQ ID NO: 55747 - DNA, 600 bp, Chicken  19866894309673_1
aatctaaattgatcattgcttagtaaaacagtggaaaataaacttaattgaagtggagtaagaatgcataaaatcagaggcctgtatagagttcttaagttcatatctcttgagattttaattgtctaactcgtgctgacttagtgagaaattaggtttgtaaataggatagctggtagatttgggataaattaaggagcaagcctttattcttgtaagacattacacggtgtgttatagcaaaaagagacagtaactgtctaacttactttctctgcatgaacaagcaagttatccatyagaggaacattatttctgctgttaaggtgttgttggaacttaagagtaaagtgttatttcatagtatgtatttaggaatgtgcgtgtgggtaaggacatgacaccatccaccactctcaggatggtgttagtctgccattggcctcctagactcaccaaatatgaataagatacagatacacattcagtttgaagcatcccacagtactggtaacatttttgcctctattttttttttagaagtcctgtttacagggctctgatttcctttcttcacttcttacatttgttctactgttg

SEQ ID NO: 55748 - DNA, 600 bp, Chicken  19866894309674_1
catggactgcaaaccagggcagtgtaaaaagctcattattttgttacaatttagtactgtgcgtatttagaagcactgtgtatcatcagtgttttggatgagcttgcggtggggtgaaagctgtacccactacaaaccctaccactacaaacctaggtataggactcacatggtatttctggatacctttcacccaagacctttaggggacactcctcacaccagcagcaccattatacaaactacagatcacagtgatcatttctatggtgtatcttgttgcaaggacatttgtaaccwaaacggactgctgaaatatacctggatcagaaccacagccaccagagaacttcaggcctcagtgaaaatactggcagcacaacaaagtaacttctgcacacagcaatgcatgaacaaaagctttgagttcacaaattctccaaaaggacctatggcaatcaaacacttgtataacgcagcgatgtaattgtatttctcatctcttttcagtggtgtgcagagacgggacaaggggcaatgggggcacaaattggaacatatgaagttccatgtaaacatgaggaaaaaccttctttactg

SEQ ID NO: 55749 - DNA, 600 bp, Chicken  19866894309676_1
cagactaacgtgatgcaatgaaatgccataatccaagcctctccagttctgtccaatttaaaatctctattttgagattattttccctcttgatcaggtaaatccctattccagctgaactaacaaaataagtacgtgttgcaatagtctgcaatgaatagactattatattagagattattatggtgtaagtaatcactgagacacttctgggatctagcaggaattattccccagctcctcagactaatttgacttttcttttttgatgaccagaagtctgccctccacccaactccrcacataaataccatattacagaacatgacccagactctacattttcctccgacaaaattcataaacagacacaagtgcaaagcaaaatgtcattttatttaattcaaggactatcttccttctagtattgctgaagggatcacctcctggggaactgatcattacaaagtccctgtctaaaagttcaagtgctcttgttgtacattcttttgaaccacagaaaacataatgaccaagtaggtgggcagctacttgcagttttatcccacctaaattagcattgcttcaggctagaaaaca

SEQ ID NO: 55750 - DNA, 600 bp, Chicken  19866894309676_2
agtgctcttgttgtacattcttttgaaccacagaaaacataatgaccaagtaggtgggcagctacttgcagttttatcccacctaaattagcattgcttcaggctagaaaacaattcaagtagtaaaatcatggaaaatgttaacctttaaggtcactaccatattttgatcaaaaagtcctgaatgtatgaaaagaacatttgtacatgttatgaagtttttgtttttccagacactgtcagagatggcagttaagtattttggaccagttgtcaaccaggtatttaagagttctatcsgaaggtttattaccaatttcattatgcaattcacttttcacattaagctctttaacaaaagcaacatatacccgcaccagaatcactgtagacagatttagttttatagaatgcccttctgaaaattcatttcaaaatagagatgctttttctccagaactgtaaaagccataaaaatgcaaaatatctgttaggaaattttttaatcaaaattattccttaatgttcaaaataacatttaacctcctactttttttgttgttgttgtcattgtcatccacatactgatcaatagactaa

SEQ ID NO: 55751 - DNA, 600 bp, Chicken  19866894309678_1
tggccacagcacgctgtgggctctgggggaggccagcagctgggggctgtgggagaggtactgcaaccacacacagttgttgccttggctgaagagagaggctcggggcaggagccagtggtgaaagtctccctgttgacctgccagatctgatagcctggtgagaagcacagcttgtacgtgcaaggagatggaacaatgtgcaattagaaagagatgcttgccctaggtggaaagacagcagtgcaggctctgaggacctgcttctttgaccaagagaccaagacaccttcagtgctsccccactttcaagtggtgatttgagtacaggctgctcagtcttaaaaacctggggagcagacatcaaggcacgacctagcctgtatcccagaggtagcagcagcattcaaagcctcatgctgtgcttggtctttcctgttgttctgacctattttgatgacttgctctatttccacagtagcaggcctgaaaagaggccgtgctttaaaaatcccatgtaattataacagcatcaacactgtgtggttcaaattgaactcaaagtgatctcttttatctgaagacactctttcctccaga

SEQ ID NO: 55752 - DNA, 600 bp, Chicken  19866894309680_1
tccttggggtacagtttcctagccctgccaatatttagtccatccagtgtcactcaaagtccgtatctgttacccagggagaccgatttctgagacagaaaagagtgaatccaactgtagctgcaggagatgctgtccccagaactacagagcactgagttcttctgcccatgcaaacgggagctgagcgacaggttgcccaagacaaagtggtcttgaggaagatgctaacatgctgggatcaacacctggctattaacttgaggggccatccaaggcccaggagaaagggagcagcarctcctgttctatctgttacataggaagctagatttctggaagagtatgccctctgtctggatgaacttaattctggatagttttatgatgaaaaaacgactcctggtatgggctccattatgtaatgtactcatggtgttacctggaagctgcagctctygtaagacttgcccaataaatatacagatacagtactacagagaccgatcatgtctctcacaacatagaaaaaagaagcttaattgtaataaaagaaggaggagatattatcaaggtggctagatgtggacagtccatgtt

SEQ ID NO: 55753 - DNA, 600 bp, Chicken  19866894309680_2
tcttctgcccatgcaaacgggagctgagcgacaggttgcccaagacaaagtggtcttgaggaagatgctaacatgctgggatcaacacctggctattaacttgaggggccatccaaggcccaggagaaagggagcagcarctcctgttctatctgttacataggaagctagatttctggaagagtatgccctctgtctggatgaacttaattctggatagttttatgatgaaaaaacgactcctggtatgggctccattatgtaatgtactcatggtgttacctggaagctgcagctctygtaagacttgcccaataaatatacagatacagtactacagagaccgatcatgtctctcacaacatagaaaaaagaagcttaattgtaataaaagaaggaggagatattatcaaggtggctagatgtggacagtccatgttttctctaggtctctatgctaatgccacctactgctactggaaataggtcaatggaatgaaaactgagagatgaacacatgcacttgtcttgtgcaaacaccccatgacttgtccattctgctggtcacagcttgaatgtggcatgactctaactcacagg

SEQ ID NO: 55754 - DNA, 600 bp, Chicken  19866894309682_1
catccctgcctgcaggggacagatagtgttgtgactgtagctggccaaagctgccccagttctcctcctcacagacactgggtgtacacctgagtgcagtgttcctgccagagccccagacaatccagtgcaaccgagtaaaatgtccggcaattccatcctgcttgctggaagatctggcctgtgcaacccacacctccctggctcttgctgtgttttcctttctccaacgtttgctgtagagaaacagcactgagatggtcattccctggtacaagtggtcactgaggaggatgatgyagttgccataggctgtactaagctgcccacagatgaggttatcttccactgcaagwggaagtggggagggcttcttctggcaaggggatggagatgggatggagatgggacagggatgtctccagggatggagatgggacaggaccataagccaaggagggatgtggtagcaatgggacggggagaagatgaactcagaacatagcctgccatcaggcataggctgagcttcctgtgcctgggctcctgggcctccagcagctcctggagcctcaggcaccacctggctgccatgcaggc

SEQ ID NO: 55755 - DNA, 600 bp, Chicken  19866894309682_2
cagttctcctcctcacagacactgggtgtacacctgagtgcagtgttcctgccagagccccagacaatccagtgcaaccgagtaaaatgtccggcaattccatcctgcttgctggaagatctggcctgtgcaacccacacctccctggctcttgctgtgttttcctttctccaacgtttgctgtagagaaacagcactgagatggtcattccctggtacaagtggtcactgaggaggatgatgyagttgccataggctgtactaagctgcccacagatgaggttatcttccactgcaagwggaagtggggagggcttcttctggcaaggggatggagatgggatggagatgggacagggatgtctccagggatggagatgggacaggaccataagccaaggagggatgtggtagcaatgggacggggagaagatgaactcagaacatagcctgccatcaggcataggctgagcttcctgtgcctgggctcctgggcctccagcagctcctggagcctcaggcaccacctggctgccatgcaggctggtgtgcatcttcccacaagcatcctacctgcctcagccccatcctctgcccccc

SEQ ID NO: 55756 - DNA, 600 bp, Chicken  19866894309683_1
ctcagagtgagttaaaaaagagcttactacatagcaatgatttaaagggaaaattaatgatagtgctcttcctgtacaaaacaacagaatgaaaatagttttgtcctcaaaaatggacttcaagatgaatttgagcctttggagggtttccttttgattaaatccagacactatgctccttgagttatctgctccttgaagtttcactttttttgtgtgtgtaaaatgcaagaatctcaatgaacaattttaagacaaatgttttatatgattttggatgagtccaacccgcctgctaargcaggttccctacaataggttgcacaggtaggagtccagatggattttgaatatctccacagaaagagactctacaacctctctgggcagcctgttccagtgctatgtcacccttactgtaaagaagttcttatgtttgtatggaacttcctatgttcaagttttaggccactgctccttgtcctattactacacagcaccaagagcctggcctcaatcctttgcctcccttctccttgtaaatatttataaacattaaccaaattccccttctaatttcattctattccctgtaacttt

SEQ ID NO: 55757 - DNA, 600 bp, Chicken  19866894309692_1
acactgaaacaatattactcaaggtttacagacatctttagagagggcacatgcacagaccctccaggaatctctgatctttgtcttctgttgcaatttgagcctgcgcaagtttgtctgacttgtgaaccatgcaaaatcttttctgagctttttttaagctctcattatgttcatgggaatgcatggcattttattacttcaaatgtgaaggtgtttgttataacaaggacagaacagcaggagctaaaatcttgttgaaggaactttagttaagataactaagtagtggggactcakattgctttcacttataccagtcttgagtgtaagccacaaagtaagaaaaatgattttgtcgtagagcaaaaacattaaaataataaaaaatatcttctcagataarcgttaaggtctgctctgttttactggcaccacaattattcattccaggaaaatccgtcctttgtctgaagtgatttaataaattactgattacattttcttcatagctggacaaatccagatgtgtttagaaagtgcggtatatagctttaactgacttctccctaggtcaccgtgttgccagtgattaaggtg

SEQ ID NO: 55758 - DNA, 600 bp, Chicken  19866894309692_2
cgcaagtttgtctgacttgtgaaccatgcaaaatcttttctgagctttttttaagctctcattatgttcatgggaatgcatggcattttattacttcaaatgtgaaggtgtttgttataacaaggacagaacagcaggagctaaaatcttgttgaaggaactttagttaagataactaagtagtggggactcakattgctttcacttataccagtcttgagtgtaagccacaaagtaagaaaaatgattttgtcgtagagcaaaaacattaaaataataaaaaatatcttctcagataarcgttaaggtctgctctgttttactggcaccacaattattcattccaggaaaatccgtcctttgtctgaagtgatttaataaattactgattacattttcttcatagctggacaaatccagatgtgtttagaaagtgcggtatatagctttaactgacttctccctaggtcaccgtgttgccagtgattaaggtgatggattctatcatatggtgctgtcagtaggtgaaaccaagaagctgatgtgaggagctgtaaagtcacatgcaagactgtacccagactattgcacagtacagaa

SEQ ID NO: 55759 - DNA, 600 bp, Chicken  19866894309699_1
atctaagataaattgttttttaaatcacccttattatattctgtgcttggaggacaatgggtggcttctttattaacagcattgaaaagcacagcataaactgcttctagcaaaaatgactttgactttggaagagagcaacagaagattgccccttcctcccttcttgtcccctttcaaggaggttcacccacattgctcagtgtggggtcccacagagagctgtaccttccatcagagaagctccagccaaatccaaaacacaaatccaactctcttctgctgctccatcccacagtrcctgcttccasagccattctcatgggagcagactgcaycagccacaccaactgcatgatgcagttccaactgggaastgactgatctcaccagtaccaaatctatgaaatgagaacatcgtgagagctgtgttcactttaattcccaggaaagattgtattccttaaattaacattttctgaaagcaaggagtggatggaggaaaacctagcatctttgaaatggataatacctgatcgactaacttcctgataattaattgatatgttagcagatctctaattgaaaaatgctgtatgt

SEQ ID NO: 55760 - DNA, 600 bp, Chicken  19866894309699_2
attgttttttaaatcacccttattatattctgtgcttggaggacaatgggtggcttctttattaacagcattgaaaagcacagcataaactgcttctagcaaaaatgactttgactttggaagagagcaacagaagattgccccttcctcccttcttgtcccctttcaaggaggttcacccacattgctcagtgtggggtcccacagagagctgtaccttccatcagagaagctccagccaaatccaaaacacaaatccaactctcttctgctgctccatcccacagtrcctgcttccasagccattctcatgggagcagactgcaycagccacaccaactgcatgatgcagttccaactgggaastgactgatctcaccagtaccaaatctatgaaatgagaacatcgtgagagctgtgttcactttaattcccaggaaagattgtattccttaaattaacattttctgaaagcaaggagtggatggaggaaaacctagcatctttgaaatggataatacctgatcgactaacttcctgataattaattgatatgttagcagatctctaattgaaaaatgctgtatgtattccccccag

SEQ ID NO: 55761 - DNA, 600 bp, Chicken  19866894309699_3
ttctgtgcttggaggacaatgggtggcttctttattaacagcattgaaaagcacagcataaactgcttctagcaaaaatgactttgactttggaagagagcaacagaagattgccccttcctcccttcttgtcccctttcaaggaggttcacccacattgctcagtgtggggtcccacagagagctgtaccttccatcagagaagctccagccaaatccaaaacacaaatccaactctcttctgctgctccatcccacagtrcctgcttccasagccattctcatgggagcagactgcaycagccacaccaactgcatgatgcagttccaactgggaastgactgatctcaccagtaccaaatctatgaaatgagaacatcgtgagagctgtgttcactttaattcccaggaaagattgtattccttaaattaacattttctgaaagcaaggagtggatggaggaaaacctagcatctttgaaatggataatacctgatcgactaacttcctgataattaattgatatgttagcagatctctaattgaaaaatgctgtatgtattccccccagaaccttccactatgttttctgtgacat

SEQ ID NO: 55762 - DNA, 600 bp, Chicken  19866894309699_4
agcattgaaaagcacagcataaactgcttctagcaaaaatgactttgactttggaagagagcaacagaagattgccccttcctcccttcttgtcccctttcaaggaggttcacccacattgctcagtgtggggtcccacagagagctgtaccttccatcagagaagctccagccaaatccaaaacacaaatccaactctcttctgctgctccatcccacagtrcctgcttccasagccattctcatgggagcagactgcaycagccacaccaactgcatgatgcagttccaactgggaastgactgatctcaccagtaccaaatctatgaaatgagaacatcgtgagagctgtgttcactttaattcccaggaaagattgtattccttaaattaacattttctgaaagcaaggagtggatggaggaaaacctagcatctttgaaatggataatacctgatcgactaacttcctgataattaattgatatgttagcagatctctaattgaaaaatgctgtatgtattccccccagaaccttccactatgttttctgtgacattaatcattagaggacatctattacagattacccttttca

SEQ ID NO: 55763 - DNA, 445 bp, Chicken  19866894309699_5
tatgttagcagatctctaattgaaaaatgctgtatgtattccccccagaaccttccactatgttttctgtgacattaatcattagaggacatctattacagattacccttttcaaagacaatcttctgataaaaagtcaggaatgctggcaaggtcaaacacccagctaaatcccacagagaacaggcaactggtgagtacagcgctcatgaagattcagaaagtgtcatgctatgaagaagataaatgacggctttccaaatttaagggctaacacatgcagtgtagtacacaagtcartacttccctatgaataatgtatcttacgaggtggtctacattctggcccacaggctccttaccatcctaaaagaattaggtcaaagtaaacaagctttaagtaggttctttttatacagagtataaaaggaggttttttcctttc

SEQ ID NO: 55764 - DNA, 600 bp, Chicken  19866894309701_1
atttgattatttatttgtttatttgtccttagaatgctattgatccattttgtggaaaatagaataaaaattcaggcttcggacctatcatcctacttatgtgcttatcaacctgtgagcaaataaacatgaaaataatattcagtgtaacagacagcttatttaatgtcaacattaatgctatacatttaaacaaataagatattcttaccatacaaaaggtatgtgatcattttactgtactcagatgtttaggagggaaaacaaaactctctctctctctctaaaagagaagaaaarggaaaagcaactcattctttttgtataaaaagcatagcctgaggaatcctgagaggttttaattaagtatatagacaatgcagctgttacaattttttttatttatttaagttgctgaagccaacatgtatttacccttgaattttggcatttgaacccagttccaaacattcaaggattcgtcagaatcaccagggctcaagtttattcctaagaatcctttttctccaggaaagcagtaagctgaccacacacatccaacctacygagatggttgccctgtatattccatatatgaat

SEQ ID NO: 55765 - DNA, 600 bp, Chicken  19866894309701_2
aactctctctctctctctaaaagagaagaaaarggaaaagcaactcattctttttgtataaaaagcatagcctgaggaatcctgagaggttttaattaagtatatagacaatgcagctgttacaattttttttatttatttaagttgctgaagccaacatgtatttacccttgaattttggcatttgaacccagttccaaacattcaaggattcgtcagaatcaccagggctcaagtttattcctaagaatcctttttctccaggaaagcagtaagctgaccacacacatccaacctacygagatggttgccctgtatattccatatatgaattctgaagacacaaaagtatgaagtgtacaaatatattctctttgcacagcaaaattaaacaaaaatcaaaatcattggtcagttgattttcctggtctgcaggcaggagaaagtttttaaataatatccatcactgaaaaccagtatatagcaaaagatcacaaggagaggtggcctaatacccatcaacaaaacaatcttttcttaaaaaataaaaattcctaatgctctgaaggcatctctctttaagccactggcatgttaaac

SEQ ID NO: 55766 - DNA, 491 bp, Chicken  19866894309702_1
gcacttcaccttatgtatagttttaaattaaaaacctgtcctgaagaaaacacaaagcaattacatagctgaacatgttttcaggcatcttacagaagaattaacaataatatagccctcaggggcagaaaaactgtttctacactgttgctttgctttgctagccatgaccaacaatactgctgcctaatcttcttcctagaaggtggactgaatctttcatttagacaagtatggttccttgatgaaaatctgaaaattcagttttgaagctctctggtgaagaccagctctcctagmctaagatatgaaaagctaaaatatgacgtatcaaattttgcgttggcattttagtcttattctttttcacagccacacttcaagctgacatcagcttttccagtgatgaacttctactgaaattcatagtattgtacactgataaacaatggccatccaaaaagcagtaatatgcacattcagaaactgta

SEQ ID NO: 55767 - DNA, 599 bp, Chicken  19866894309705_1
  misc_feature (1)..(76): n is any nucleotide
nnnnnnnnnnnnnnnnnnnnnnnnnnnnnnnnnnnnnnnnnnnnnnnnnnnnnnnnnnnnnnnnnnnnnnnnnnnnacttctttttctgtctcttctggtgactcctcattactaattgcactgtgacaataaatgtttgctcccagctaaaacaaagagattgtgttgtgcttttaacttacgaagcactacttgcatcaacttgtactcttaatgaaccctactggcatcaactattatttttagcagctctgaaatgctatgagatgtttatctgggtctgttgctttttttaattmattttttttttatctgaagtgtcagaaatgaatattcttttctgtgataaaygaaaagacagaaacaagaaagtgcattgataataagcaatccagaagggcagatcagaagaagactgaattgatatattaaagctaggcttcctttacttaaaaattcagcatgacaraccataaggaaaccaacatttctgaacgcacttgattcaatgacagttccctaaaacagggtagggaaaagaattattgcagtaagaaataaataagagtcaattcattgtgctcattaaaacagccct

SEQ ID NO: 55768 - DNA, 599 bp, Chicken  19866894309705_2
  misc_feature (1)..(75): n is any nucleotide
nnnnnnnnnnnnnnnnnnnnnnnnnnnnnnnnnnnnnnnnnnnnnnnnnnnnnnnnnnnnnnnnnnnnnnnnnnnacttctttttctgtctcttctggtgactcctcattactaattgcactgtgacaataaatgtttgctcccagctaaaacaaagagattgtgttgtgcttttaacttacgaagcactacttgcatcaacttgtactcttaatgaaccctactggcatcaactattatttttagcagctctgaaatgctatgagatgtttatctgggtctgttgctttttttaatttmttttttttttatctgaagtgtcagaaatgaatattcttttctgtgataaaygaaaagacagaaacaagaaagtgcattgataataagcaatccagaagggcagatcagaagaagactgaattgatatattaaagctaggcttcctttacttaaaaattcagcatgacaraccataaggaaaccaacatttctgaacgcacttgattcaatgacagttccctaaaacagggtagggaaaagaattattgcagtaagaaataaataagagtcaattcattgtgctcattaaaacagcccta

SEQ ID NO: 55769 - DNA, 599 bp, Chicken  19866894309705_3
  misc_feature (1)..(24): n is any nucleotide
nnnnnnnnnnnnnnnnnnnnnnnnacttctttttctgtctcttctggtgactcctcattactaattgcactgtgacaataaatgtttgctcccagctaaaacaaagagattgtgttgtgcttttaacttacgaagcactacttgcatcaacttgtactcttaatgaaccctactggcatcaactattatttttagcagctctgaaatgctatgagatgtttatctgggtctgttgctttttttaatttattttttttttatctgaagtgtcagaaatgaatattcttttctgtgataaaygaaaagacagaaacaagaaagtgcattgataataagcaatccagaagggcagatcagaagaagactgaattgatatattaaagctaggcttcctttacttaaaaattcagcatgacaraccataaggaaaccaacatttctgaacgcacttgattcaatgacagttccctaaaacagggtagggaaaagaattattgcagtaagaaataaataagagtcaattcattgtgctcattaaaacagccctatatatggtgaacagcctatctaaggtattagaacattcagcaaggtggctt

SEQ ID NO: 55770 - DNA, 600 bp, Chicken  19866894309705_4
gcttttaacttacgaagcactacttgcatcaacttgtactcttaatgaaccctactggcatcaactattatttttagcagctctgaaatgctatgagatgtttatctgggtctgttgctttttttaatttattttttttttatctgaagtgtcagaaatgaatattcttttctgtgataaaygaaaagacagaaacaagaaagtgcattgataataagcaatccagaagggcagatcagaagaagactgaattgatatattaaagctaggcttcctttacttaaaaattcagcatgacaraccataaggaaaccaacatttctgaacgcacttgattcaatgacagttccctaaaacagggtagggaaaagaattattgcagtaagaaataaataagagtcaattcattgtgctcattaaaacagccctatatatggtgaacagcctatctaaggtattagaacattcagcaaggtggctttgttgatgcttagccctggaatcattgttatgcagggaaggctttagctatacttgtcctttgaggctgaagcaagcacgtcccaaagagtgacttttctccagctgtgtctgtgtcca
